United States Patent Application Publication US 2014/0004565 A1 - sequence listing, part 54

SEQ ID NO: 1280763 - RNA, 19 nt, Artificial Sequence
  Description of Artificial Sequence: Synthetic oligonucleotide
uggaccugcauguacccua

SEQ ID NO: 1280764 - RNA, 19 nt, Artificial Sequence
  Description of Artificial Sequence: Synthetic oligonucleotide
aaauggccccuaguuacca

SEQ ID NO: 1280765 - RNA, 19 nt, Artificial Sequence
  Description of Artificial Sequence: Synthetic oligonucleotide
ccuaacaccuucaccaaac

SEQ ID NO: 1280766 - RNA, 19 nt, Artificial Sequence
  Description of Artificial Sequence: Synthetic oligonucleotide
cugcggaaaggagaggcgg

SEQ ID NO: 1280767 - RNA, 19 nt, Artificial Sequence
  Description of Artificial Sequence: Synthetic oligonucleotide
cauagucuacgagccagcc

SEQ ID NO: 1280768 - RNA, 19 nt, Artificial Sequence
  Description of Artificial Sequence: Synthetic oligonucleotide
agggaugacagaccucccu

SEQ ID NO: 1280769 - RNA, 19 nt, Artificial Sequence
  Description of Artificial Sequence: Synthetic oligonucleotide
acccuaggugcuucggguc

SEQ ID NO: 1280770 - RNA, 19 nt, Artificial Sequence
  Description of Artificial Sequence: Synthetic oligonucleotide
cauugaaaggguacagaaa

SEQ ID NO: 1280771 - RNA, 19 nt, Artificial Sequence
  Description of Artificial Sequence: Synthetic oligonucleotide
cuacgagccagcccagccc

SEQ ID NO: 1280772 - RNA, 19 nt, Artificial Sequence
  Description of Artificial Sequence: Synthetic oligonucleotide
ugccucuagccccuggcac

SEQ ID NO: 1280773 - RNA, 19 nt, Artificial Sequence
  Description of Artificial Sequence: Synthetic oligonucleotide
cuucacguacuggaucucc

SEQ ID NO: 1280774 - RNA, 19 nt, Artificial Sequence
  Description of Artificial Sequence: Synthetic oligonucleotide
cuggcugcgggccuuguac

SEQ ID NO: 1280775 - RNA, 19 nt, Artificial Sequence
  Description of Artificial Sequence: Synthetic oligonucleotide
cuuguacaccucgauuagc

SEQ ID NO: 1280776 - RNA, 19 nt, Artificial Sequence
  Description of Artificial Sequence: Synthetic oligonucleotide
cuucggguccucuggcugc

SEQ ID NO: 1280777 - RNA, 19 nt, Artificial Sequence
  Description of Artificial Sequence: Synthetic oligonucleotide
cacguacuggaucucccgc

SEQ ID NO: 1280778 - RNA, 19 nt, Artificial Sequence
  Description of Artificial Sequence: Synthetic oligonucleotide
gggccgugaagucaacucg

SEQ ID NO: 1280779 - RNA, 19 nt, Artificial Sequence
  Description of Artificial Sequence: Synthetic oligonucleotide
gcauugaaaggguacagaa

SEQ ID NO: 1280780 - RNA, 19 nt, Artificial Sequence
  Description of Artificial Sequence: Synthetic oligonucleotide
acggauggaggcugcacca

SEQ ID NO: 1280781 - RNA, 19 nt, Artificial Sequence
  Description of Artificial Sequence: Synthetic oligonucleotide
gguuccgugccucuagccc

SEQ ID NO: 1280782 - RNA, 19 nt, Artificial Sequence
  Description of Artificial Sequence: Synthetic oligonucleotide
ccuaguuaccaacuacagc

SEQ ID NO: 1280783 - RNA, 19 nt, Artificial Sequence
  Description of Artificial Sequence: Synthetic oligonucleotide
ccucaguugcauugaaagg

SEQ ID NO: 1280784 - RNA, 19 nt, Artificial Sequence
  Description of Artificial Sequence: Synthetic oligonucleotide
acucccuuccguuggcuga

SEQ ID NO: 1280785 - RNA, 19 nt, Artificial Sequence
  Description of Artificial Sequence: Synthetic oligonucleotide
acguacuggaucucccgcu

SEQ ID NO: 1280786 - RNA, 19 nt, Artificial Sequence
  Description of Artificial Sequence: Synthetic oligonucleotide
agacauggaugagauagaa

SEQ ID NO: 1280787 - RNA, 19 nt, Artificial Sequence
  Description of Artificial Sequence: Synthetic oligonucleotide
uugacucccuuccguuggc

SEQ ID NO: 1280788 - RNA, 19 nt, Artificial Sequence
  Description of Artificial Sequence: Synthetic oligonucleotide
cucgcucugucauccaauc

SEQ ID NO: 1280789 - RNA, 19 nt, Artificial Sequence
  Description of Artificial Sequence: Synthetic oligonucleotide
ucgcucugucauccaauca

SEQ ID NO: 1280790 - RNA, 19 nt, Artificial Sequence
  Description of Artificial Sequence: Synthetic oligonucleotide
agcuugggagauuguucag

SEQ ID NO: 1280791 - RNA, 19 nt, Artificial Sequence
  Description of Artificial Sequence: Synthetic oligonucleotide
gacucccuuccguuggcug

SEQ ID NO: 1280792 - RNA, 19 nt, Artificial Sequence
  Description of Artificial Sequence: Synthetic oligonucleotide
cacuucggcaguagacagc

SEQ ID NO: 1280793 - RNA, 19 nt, Artificial Sequence
  Description of Artificial Sequence: Synthetic oligonucleotide
guuacccugaguggcuucc

SEQ ID NO: 1280794 - RNA, 19 nt, Artificial Sequence
  Description of Artificial Sequence: Synthetic oligonucleotide
cagcucacgguuccgugcc

SEQ ID NO: 1280795 - RNA, 19 nt, Artificial Sequence
  Description of Artificial Sequence: Synthetic oligonucleotide
aauggccccuaguuaccaa

SEQ ID NO: 1280796 - RNA, 19 nt, Artificial Sequence
  Description of Artificial Sequence: Synthetic oligonucleotide
agaugcaaucccucccuaa

SEQ ID NO: 1280797 - RNA, 19 nt, Artificial Sequence
  Description of Artificial Sequence: Synthetic oligonucleotide
ugccaagccugcauccccu

SEQ ID NO: 1280798 - RNA, 19 nt, Artificial Sequence
  Description of Artificial Sequence: Synthetic oligonucleotide
gaaacugacuaaaccaaau

SEQ ID NO: 1280799 - RNA, 19 nt, Artificial Sequence
  Description of Artificial Sequence: Synthetic oligonucleotide
cucuggcgguaccugagag

SEQ ID NO: 1280800 - RNA, 19 nt, Artificial Sequence
  Description of Artificial Sequence: Synthetic oligonucleotide
guuggcugacuucucaugu

SEQ ID NO: 1280801 - RNA, 19 nt, Artificial Sequence
  Description of Artificial Sequence: Synthetic oligonucleotide
ccaacuacagccacccuuc

SEQ ID NO: 1280802 - RNA, 19 nt, Artificial Sequence
  Description of Artificial Sequence: Synthetic oligonucleotide
acacuuguuuuagacucca

SEQ ID NO: 1280803 - RNA, 19 nt, Artificial Sequence
  Description of Artificial Sequence: Synthetic oligonucleotide
caaggaccucauaggggcc

SEQ ID NO: 1280804 - RNA, 19 nt, Artificial Sequence
  Description of Artificial Sequence: Synthetic oligonucleotide
ccugacuagguucucauca

SEQ ID NO: 1280805 - RNA, 19 nt, Artificial Sequence
  Description of Artificial Sequence: Synthetic oligonucleotide
cuaacaucucuccuguacu

SEQ ID NO: 1280806 - RNA, 19 nt, Artificial Sequence
  Description of Artificial Sequence: Synthetic oligonucleotide
uggccccuaguuaccaacu

SEQ ID NO: 1280807 - RNA, 19 nt, Artificial Sequence
  Description of Artificial Sequence: Synthetic oligonucleotide
ccagaaaccaggguucagg

SEQ ID NO: 1280808 - RNA, 19 nt, Artificial Sequence
  Description of Artificial Sequence: Synthetic oligonucleotide
ucccauagucuacgagcca

SEQ ID NO: 1280809 - RNA, 19 nt, Artificial Sequence
  Description of Artificial Sequence: Synthetic oligonucleotide
augagauagaagaguggga

SEQ ID NO: 1280810 - RNA, 19 nt, Artificial Sequence
  Description of Artificial Sequence: Synthetic oligonucleotide
gggaguuucccauagucua

SEQ ID NO: 1280811 - RNA, 19 nt, Artificial Sequence
  Description of Artificial Sequence: Synthetic oligonucleotide
ucccuaacaccuucaccaa

SEQ ID NO: 1280812 - RNA, 19 nt, Artificial Sequence
  Description of Artificial Sequence: Synthetic oligonucleotide
acagccacccuucucucuu

SEQ ID NO: 1280813 - RNA, 19 nt, Artificial Sequence
  Description of Artificial Sequence: Synthetic oligonucleotide
ucccucccugacuagguuc

SEQ ID NO: 1280814 - RNA, 19 nt, Artificial Sequence
  Description of Artificial Sequence: Synthetic oligonucleotide
cauaaccccuggaggauca

SEQ ID NO: 1280815 - RNA, 19 nt, Artificial Sequence
  Description of Artificial Sequence: Synthetic oligonucleotide
gccuugguuccucaguugc

SEQ ID NO: 1280816 - RNA, 19 nt, Artificial Sequence
  Description of Artificial Sequence: Synthetic oligonucleotide
cuucuugagcagggaagcc

SEQ ID NO: 1280817 - RNA, 19 nt, Artificial Sequence
  Description of Artificial Sequence: Synthetic oligonucleotide
ucccugacuagguucucau

SEQ ID NO: 1280818 - RNA, 19 nt, Artificial Sequence
  Description of Artificial Sequence: Synthetic oligonucleotide
ccaacuaggacuaccugca

SEQ ID NO: 1280819 - RNA, 19 nt, Artificial Sequence
  Description of Artificial Sequence: Synthetic oligonucleotide
ggcugcaccaauagugggg

SEQ ID NO: 1280820 - RNA, 19 nt, Artificial Sequence
  Description of Artificial Sequence: Synthetic oligonucleotide
agccacccuucucucuugg

SEQ ID NO: 1280821 - RNA, 19 nt, Artificial Sequence
  Description of Artificial Sequence: Synthetic oligonucleotide
guacuggaucucccgcucc

SEQ ID NO: 1280822 - RNA, 19 nt, Artificial Sequence
  Description of Artificial Sequence: Synthetic oligonucleotide
cucagcucacgguuccgug

SEQ ID NO: 1280823 - RNA, 19 nt, Artificial Sequence
  Description of Artificial Sequence: Synthetic oligonucleotide
aauaguggggaggcagcuu

SEQ ID NO: 1280824 - RNA, 19 nt, Artificial Sequence
  Description of Artificial Sequence: Synthetic oligonucleotide
gccuuguacaccucgauua

SEQ ID NO: 1280825 - RNA, 19 nt, Artificial Sequence
  Description of Artificial Sequence: Synthetic oligonucleotide
cuagguucucaucagcagu

SEQ ID NO: 1280826 - RNA, 19 nt, Artificial Sequence
  Description of Artificial Sequence: Synthetic oligonucleotide
ugcuugcggucaccucugg

SEQ ID NO: 1280827 - RNA, 19 nt, Artificial Sequence
  Description of Artificial Sequence: Synthetic oligonucleotide
ggcgagagggugaaggcag

SEQ ID NO: 1280828 - RNA, 19 nt, Artificial Sequence
  Description of Artificial Sequence: Synthetic oligonucleotide
cccuaguuaccaacuacag

SEQ ID NO: 1280829 - RNA, 19 nt, Artificial Sequence
  Description of Artificial Sequence: Synthetic oligonucleotide
accugccaggggcucuccc

SEQ ID NO: 1280830 - RNA, 19 nt, Artificial Sequence
  Description of Artificial Sequence: Synthetic oligonucleotide
cacgguuccgugccucuag

SEQ ID NO: 1280831 - RNA, 19 nt, Artificial Sequence
  Description of Artificial Sequence: Synthetic oligonucleotide
acacugauucucucccaaa

SEQ ID NO: 1280832 - RNA, 19 nt, Artificial Sequence
  Description of Artificial Sequence: Synthetic oligonucleotide
ccccaaggaccucauaggg

SEQ ID NO: 1280833 - RNA, 19 nt, Artificial Sequence
  Description of Artificial Sequence: Synthetic oligonucleotide
ccaauaguggggaggcagc

SEQ ID NO: 1280834 - RNA, 19 nt, Artificial Sequence
  Description of Artificial Sequence: Synthetic oligonucleotide
uucggguccucuggcugcg

SEQ ID NO: 1280835 - RNA, 19 nt, Artificial Sequence
  Description of Artificial Sequence: Synthetic oligonucleotide
gaccucauaggggcccagg

SEQ ID NO: 1280836 - RNA, 19 nt, Artificial Sequence
  Description of Artificial Sequence: Synthetic oligonucleotide
ggcugcggaaaggagaggc

SEQ ID NO: 1280837 - RNA, 19 nt, Artificial Sequence
  Description of Artificial Sequence: Synthetic oligonucleotide
aggguugccaagccugcau

SEQ ID NO: 1280838 - RNA, 19 nt, Artificial Sequence
  Description of Artificial Sequence: Synthetic oligonucleotide
ccuuguacaccucgauuag

SEQ ID NO: 1280839 - RNA, 19 nt, Artificial Sequence
  Description of Artificial Sequence: Synthetic oligonucleotide
ugcuucggguccucuggcu

SEQ ID NO: 1280840 - RNA, 19 nt, Artificial Sequence
  Description of Artificial Sequence: Synthetic oligonucleotide
ggaaaggagaggcggcgac

SEQ ID NO: 1280841 - RNA, 19 nt, Artificial Sequence
  Description of Artificial Sequence: Synthetic oligonucleotide
ccucacuucggcaguagac

SEQ ID NO: 1280842 - RNA, 19 nt, Artificial Sequence
  Description of Artificial Sequence: Synthetic oligonucleotide
ugaagucaacucgcucugu

SEQ ID NO: 1280843 - RNA, 19 nt, Artificial Sequence
  Description of Artificial Sequence: Synthetic oligonucleotide
aggugcuucggguccucug

SEQ ID NO: 1280844 - RNA, 19 nt, Artificial Sequence
  Description of Artificial Sequence: Synthetic oligonucleotide
uuccgugccucuagccccu

SEQ ID NO: 1280845 - RNA, 19 nt, Artificial Sequence
  Description of Artificial Sequence: Synthetic oligonucleotide
ccuuaaagcccucccuccc

SEQ ID NO: 1280846 - RNA, 19 nt, Artificial Sequence
  Description of Artificial Sequence: Synthetic oligonucleotide
cuugagcagggaagccaug

SEQ ID NO: 1280847 - RNA, 19 nt, Artificial Sequence
  Description of Artificial Sequence: Synthetic oligonucleotide
cucgauuagcagguccuuc

SEQ ID NO: 1280848 - RNA, 19 nt, Artificial Sequence
  Description of Artificial Sequence: Synthetic oligonucleotide
gauggaggguaggagugaa

SEQ ID NO: 1280849 - RNA, 19 nt, Artificial Sequence
  Description of Artificial Sequence: Synthetic oligonucleotide
gcuaaauggccccuaguua

SEQ ID NO: 1280850 - RNA, 19 nt, Artificial Sequence
  Description of Artificial Sequence: Synthetic oligonucleotide
cugcuugcggucaccucug

SEQ ID NO: 1280851 - RNA, 19 nt, Artificial Sequence
  Description of Artificial Sequence: Synthetic oligonucleotide
gcccauaaccccuggagga

SEQ ID NO: 1280852 - RNA, 19 nt, Artificial Sequence
  Description of Artificial Sequence: Synthetic oligonucleotide
gucaacucgcucugucauc

SEQ ID NO: 1280853 - RNA, 19 nt, Artificial Sequence
  Description of Artificial Sequence: Synthetic oligonucleotide
cccauagucuacgagccag

SEQ ID NO: 1280854 - RNA, 19 nt, Artificial Sequence
  Description of Artificial Sequence: Synthetic oligonucleotide
gggagauuguucagcuggg

SEQ ID NO: 1280855 - RNA, 19 nt, Artificial Sequence
  Description of Artificial Sequence: Synthetic oligonucleotide
gaagcccgcccuccagggc

SEQ ID NO: 1280856 - RNA, 19 nt, Artificial Sequence
  Description of Artificial Sequence: Synthetic oligonucleotide
ucgccaggagugacauggc

SEQ ID NO: 1280857 - RNA, 19 nt, Artificial Sequence
  Description of Artificial Sequence: Synthetic oligonucleotide
ugagggccuugguuccuca

SEQ ID NO: 1280858 - RNA, 19 nt, Artificial Sequence
  Description of Artificial Sequence: Synthetic oligonucleotide
ggggcaucaaggaagaagu

SEQ ID NO: 1280859 - RNA, 19 nt, Artificial Sequence
  Description of Artificial Sequence: Synthetic oligonucleotide
ugaguggcuuccugccuua

SEQ ID NO: 1280860 - RNA, 19 nt, Artificial Sequence
  Description of Artificial Sequence: Synthetic oligonucleotide
cuguauucucaaauucccu

SEQ ID NO: 1280861 - RNA, 19 nt, Artificial Sequence
  Description of Artificial Sequence: Synthetic oligonucleotide
cugacuuauucugaucucu

SEQ ID NO: 1280862 - RNA, 19 nt, Artificial Sequence
  Description of Artificial Sequence: Synthetic oligonucleotide
cauguacccuaggugcuuc

SEQ ID NO: 1280863 - RNA, 19 nt, Artificial Sequence
  Description of Artificial Sequence: Synthetic oligonucleotide
agagugggauggaggguag

SEQ ID NO: 1280864 - RNA, 19 nt, Artificial Sequence
  Description of Artificial Sequence: Synthetic oligonucleotide
uccaccgacucugcccucu

SEQ ID NO: 1280865 - RNA, 19 nt, Artificial Sequence
  Description of Artificial Sequence: Synthetic oligonucleotide
ggaguuucccauagucuac

SEQ ID NO: 1280866 - RNA, 19 nt, Artificial Sequence
  Description of Artificial Sequence: Synthetic oligonucleotide
gugcuucggguccucuggc

SEQ ID NO: 1280867 - RNA, 19 nt, Artificial Sequence
  Description of Artificial Sequence: Synthetic oligonucleotide
cucuccuguacugaggacu

SEQ ID NO: 1280868 - RNA, 19 nt, Artificial Sequence
  Description of Artificial Sequence: Synthetic oligonucleotide
ccauagucuacgagccagc

SEQ ID NO: 1280869 - RNA, 19 nt, Artificial Sequence
  Description of Artificial Sequence: Synthetic oligonucleotide
gagugacauggcugagaca

SEQ ID NO: 1280870 - RNA, 19 nt, Artificial Sequence
  Description of Artificial Sequence: Synthetic oligonucleotide
uaccaacuacagccacccu

SEQ ID NO: 1280871 - RNA, 19 nt, Artificial Sequence
  Description of Artificial Sequence: Synthetic oligonucleotide
cuggcgguaccugagagcu

SEQ ID NO: 1280872 - RNA, 19 nt, Artificial Sequence
  Description of Artificial Sequence: Synthetic oligonucleotide
gacagaccucccucuucca

SEQ ID NO: 1280873 - RNA, 19 nt, Artificial Sequence
  Description of Artificial Sequence: Synthetic oligonucleotide
cucccucagcucacgguuc

SEQ ID NO: 1280874 - RNA, 19 nt, Artificial Sequence
  Description of Artificial Sequence: Synthetic oligonucleotide
cagguccuucacguacugg

SEQ ID NO: 1280875 - RNA, 19 nt, Artificial Sequence
  Description of Artificial Sequence: Synthetic oligonucleotide
gcugcggaaaggagaggcg

SEQ ID NO: 1280876 - RNA, 19 nt, Artificial Sequence
  Description of Artificial Sequence: Synthetic oligonucleotide
ggccgugaagucaacucgc

SEQ ID NO: 1280877 - RNA, 19 nt, Artificial Sequence
  Description of Artificial Sequence: Synthetic oligonucleotide
gcggaaaggagaggcggcg

SEQ ID NO: 1280878 - RNA, 19 nt, Artificial Sequence
  Description of Artificial Sequence: Synthetic oligonucleotide
ccccuaguuaccaacuaca

SEQ ID NO: 1280879 - RNA, 19 nt, Artificial Sequence
  Description of Artificial Sequence: Synthetic oligonucleotide
gagggaugacagaccuccc

SEQ ID NO: 1280880 - RNA, 19 nt, Artificial Sequence
  Description of Artificial Sequence: Synthetic oligonucleotide
aggagggccgugaagucaa

SEQ ID NO: 1280881 - RNA, 19 nt, Artificial Sequence
  Description of Artificial Sequence: Synthetic oligonucleotide
ucuggcugcgggccuugua

SEQ ID NO: 1280882 - RNA, 19 nt, Artificial Sequence
  Description of Artificial Sequence: Synthetic oligonucleotide
cagagggaugacagaccuc

SEQ ID NO: 1280883 - RNA, 19 nt, Artificial Sequence
  Description of Artificial Sequence: Synthetic oligonucleotide
gccccuaguuaccaacuac

SEQ ID NO: 1280884 - RNA, 19 nt, Artificial Sequence
  Description of Artificial Sequence: Synthetic oligonucleotide
ccuggaccugcauguaccc

SEQ ID NO: 1280885 - RNA, 19 nt, Artificial Sequence
  Description of Artificial Sequence: Synthetic oligonucleotide
gacuugacucccuuccguu

SEQ ID NO: 1280886 - RNA, 19 nt, Artificial Sequence
  Description of Artificial Sequence: Synthetic oligonucleotide
gcgggccuuguacaccucg

SEQ ID NO: 1280887 - RNA, 19 nt, Artificial Sequence
  Description of Artificial Sequence: Synthetic oligonucleotide
ccucccuaacaccuucacc

SEQ ID NO: 1280888 - RNA, 19 nt, Artificial Sequence
  Description of Artificial Sequence: Synthetic oligonucleotide
caccaaacacugauucucu

SEQ ID NO: 1280889 - RNA, 19 nt, Artificial Sequence
  Description of Artificial Sequence: Synthetic oligonucleotide
cugcaccaauaguggggag

SEQ ID NO: 1280890 - RNA, 19 nt, Artificial Sequence
  Description of Artificial Sequence: Synthetic oligonucleotide
auggaggguaggagugaag

SEQ ID NO: 1280891 - RNA, 19 nt, Artificial Sequence
  Description of Artificial Sequence: Synthetic oligonucleotide
aaucccucccuaacaccuu

SEQ ID NO: 1280892 - RNA, 19 nt, Artificial Sequence
  Description of Artificial Sequence: Synthetic oligonucleotide
gaugacagaccucccucuu

SEQ ID NO: 1280893 - RNA, 19 nt, Artificial Sequence
  Description of Artificial Sequence: Synthetic oligonucleotide
uuacccugaguggcuuccu

SEQ ID NO: 1280894 - RNA, 19 nt, Artificial Sequence
  Description of Artificial Sequence: Synthetic oligonucleotide
caggcgcagggcacggaug

SEQ ID NO: 1280895 - RNA, 19 nt, Artificial Sequence
  Description of Artificial Sequence: Synthetic oligonucleotide
cuguacugaggacuugacu

SEQ ID NO: 1280896 - RNA, 19 nt, Artificial Sequence
  Description of Artificial Sequence: Synthetic oligonucleotide
guuccagccccagggucgc

SEQ ID NO: 1280897 - RNA, 19 nt, Artificial Sequence
  Description of Artificial Sequence: Synthetic oligonucleotide
ccuguacugaggacuugac

SEQ ID NO: 1280898 - RNA, 19 nt, Artificial Sequence
  Description of Artificial Sequence: Synthetic oligonucleotide
cccuaggugcuucgggucc

SEQ ID NO: 1280899 - RNA, 19 nt, Artificial Sequence
  Description of Artificial Sequence: Synthetic oligonucleotide
ggaccugcauguacccuag

SEQ ID NO: 1280900 - RNA, 19 nt, Artificial Sequence
  Description of Artificial Sequence: Synthetic oligonucleotide
ggaguggggcaucaaggaa

SEQ ID NO: 1280901 - RNA, 19 nt, Artificial Sequence
  Description of Artificial Sequence: Synthetic oligonucleotide
uggcugcggaaaggagagg

SEQ ID NO: 1280902 - RNA, 19 nt, Artificial Sequence
  Description of Artificial Sequence: Synthetic oligonucleotide
gugccucuagccccuggca

SEQ ID NO: 1280903 - RNA, 19 nt, Artificial Sequence
  Description of Artificial Sequence: Synthetic oligonucleotide
cucccuuccguuggcugac

SEQ ID NO: 1280904 - RNA, 19 nt, Artificial Sequence
  Description of Artificial Sequence: Synthetic oligonucleotide
caggcuguauucucaaauu

SEQ ID NO: 1280905 - RNA, 19 nt, Artificial Sequence
  Description of Artificial Sequence: Synthetic oligonucleotide
caccgacucugcccucucc

SEQ ID NO: 1280906 - RNA, 19 nt, Artificial Sequence
  Description of Artificial Sequence: Synthetic oligonucleotide
acucgcucugucauccaau

SEQ ID NO: 1280907 - RNA, 19 nt, Artificial Sequence
  Description of Artificial Sequence: Synthetic oligonucleotide
caaagauggaggacuccau

SEQ ID NO: 1280908 - RNA, 19 nt, Artificial Sequence
  Description of Artificial Sequence: Synthetic oligonucleotide
agccucacuucggcaguag

SEQ ID NO: 1280909 - RNA, 19 nt, Artificial Sequence
  Description of Artificial Sequence: Synthetic oligonucleotide
guguguccuauguccccuc

SEQ ID NO: 1280910 - RNA, 19 nt, Artificial Sequence
  Description of Artificial Sequence: Synthetic oligonucleotide
gucuacgagccagcccagc

SEQ ID NO: 1280911 - RNA, 19 nt, Artificial Sequence
  Description of Artificial Sequence: Synthetic oligonucleotide
guccuauguccccuccuua

SEQ ID NO: 1280912 - RNA, 19 nt, Artificial Sequence
  Description of Artificial Sequence: Synthetic oligonucleotide
agcucacgguuccgugccu

SEQ ID NO: 1280913 - RNA, 19 nt, Artificial Sequence
  Description of Artificial Sequence: Synthetic oligonucleotide
ggaggacuccauggcugcg

SEQ ID NO: 1280914 - RNA, 19 nt, Artificial Sequence
  Description of Artificial Sequence: Synthetic oligonucleotide
cccgaacccaacuaggacu

SEQ ID NO: 1280915 - RNA, 19 nt, Artificial Sequence
  Description of Artificial Sequence: Synthetic oligonucleotide
cguuggcugacuucucaug

SEQ ID NO: 1280916 - RNA, 19 nt, Artificial Sequence
  Description of Artificial Sequence: Synthetic oligonucleotide
caaagcuaaauggccccua

SEQ ID NO: 1280917 - RNA, 19 nt, Artificial Sequence
  Description of Artificial Sequence: Synthetic oligonucleotide
ggcacucgcccuccagggc

SEQ ID NO: 1280918 - RNA, 19 nt, Artificial Sequence
  Description of Artificial Sequence: Synthetic oligonucleotide
agggucgccaggagugaca

SEQ ID NO: 1280919 - RNA, 19 nt, Artificial Sequence
  Description of Artificial Sequence: Synthetic oligonucleotide
ccccgaacccaacuaggac

SEQ ID NO: 1280920 - RNA, 19 nt, Artificial Sequence
  Description of Artificial Sequence: Synthetic oligonucleotide
uaggugcuucggguccucu

SEQ ID NO: 1280921 - RNA, 19 nt, Artificial Sequence
  Description of Artificial Sequence: Synthetic oligonucleotide
cucccugacuagguucuca

SEQ ID NO: 1280922 - RNA, 19 nt, Artificial Sequence
  Description of Artificial Sequence: Synthetic oligonucleotide
caacuaggacuaccugcaa

SEQ ID NO: 1280923 - RNA, 19 nt, Artificial Sequence
  Description of Artificial Sequence: Synthetic oligonucleotide
cugagagcugcugacuuau

SEQ ID NO: 1280924 - RNA, 19 nt, Artificial Sequence
  Description of Artificial Sequence: Synthetic oligonucleotide
ucacgguuccgugccucua

SEQ ID NO: 1280925 - RNA, 19 nt, Artificial Sequence
  Description of Artificial Sequence: Synthetic oligonucleotide
cucuagccccuggcacucg

SEQ ID NO: 1280926 - RNA, 19 nt, Artificial Sequence
  Description of Artificial Sequence: Synthetic oligonucleotide
cugagggccuugguuccuc

SEQ ID NO: 1280927 - RNA, 19 nt, Artificial Sequence
  Description of Artificial Sequence: Synthetic oligonucleotide
cuccuguacugaggacuug

SEQ ID NO: 1280928 - RNA, 19 nt, Artificial Sequence
  Description of Artificial Sequence: Synthetic oligonucleotide
cccacuagaugcaaucccu

SEQ ID NO: 1280929 - RNA, 19 nt, Artificial Sequence
  Description of Artificial Sequence: Synthetic oligonucleotide
caauaguggggaggcagcu

SEQ ID NO: 1280930 - RNA, 19 nt, Artificial Sequence
  Description of Artificial Sequence: Synthetic oligonucleotide
cgugccucuagccccuggc

SEQ ID NO: 1280931 - RNA, 19 nt, Artificial Sequence
  Description of Artificial Sequence: Synthetic oligonucleotide
ccuuaccuccaugccagac

SEQ ID NO: 1280932 - RNA, 19 nt, Artificial Sequence
  Description of Artificial Sequence: Synthetic oligonucleotide
gcgcagggcacggauggag

SEQ ID NO: 1280933 - RNA, 19 nt, Artificial Sequence
  Description of Artificial Sequence: Synthetic oligonucleotide
ccgaacccaacuaggacua

SEQ ID NO: 1280934 - RNA, 19 nt, Artificial Sequence
  Description of Artificial Sequence: Synthetic oligonucleotide
caacucgcucugucaucca

SEQ ID NO: 1280935 - RNA, 19 nt, Artificial Sequence
  Description of Artificial Sequence: Synthetic oligonucleotide
ccgugaagucaacucgcuc

SEQ ID NO: 1280936 - RNA, 19 nt, Artificial Sequence
  Description of Artificial Sequence: Synthetic oligonucleotide
ccauaaccccuggaggauc

SEQ ID NO: 1280937 - RNA, 19 nt, Artificial Sequence
  Description of Artificial Sequence: Synthetic oligonucleotide
gggcgagagggugaaggca

SEQ ID NO: 1280938 - RNA, 19 nt, Artificial Sequence
  Description of Artificial Sequence: Synthetic oligonucleotide
cuucggcaguagacagcca

SEQ ID NO: 1280939 - RNA, 19 nt, Artificial Sequence
  Description of Artificial Sequence: Synthetic oligonucleotide
gccucacuucggcaguaga

SEQ ID NO: 1280940 - RNA, 19 nt, Artificial Sequence
  Description of Artificial Sequence: Synthetic oligonucleotide
ccagcccgcuagcugggag

SEQ ID NO: 1280941 - RNA, 19 nt, Artificial Sequence
  Description of Artificial Sequence: Synthetic oligonucleotide
gagggccgugaagucaacu

SEQ ID NO: 1280942 - RNA, 19 nt, Artificial Sequence
  Description of Artificial Sequence: Synthetic oligonucleotide
cccugacuagguucucauc

SEQ ID NO: 1280943 - RNA, 19 nt, Artificial Sequence
  Description of Artificial Sequence: Synthetic oligonucleotide
cucacgguuccgugccucu

SEQ ID NO: 1280944 - RNA, 19 nt, Artificial Sequence
  Description of Artificial Sequence: Synthetic oligonucleotide
ccucuggugauggcaggac

SEQ ID NO: 1280945 - RNA, 19 nt, Artificial Sequence
  Description of Artificial Sequence: Synthetic oligonucleotide
ucccuuccguuggcugacu

SEQ ID NO: 1280946 - RNA, 19 nt, Artificial Sequence
  Description of Artificial Sequence: Synthetic oligonucleotide
cgguuccgugccucuagcc

SEQ ID NO: 1280947 - RNA, 19 nt, Artificial Sequence
  Description of Artificial Sequence: Synthetic oligonucleotide
gcacggauggaggcugcac

SEQ ID NO: 1280948 - RNA, 19 nt, Artificial Sequence
  Description of Artificial Sequence: Synthetic oligonucleotide
ggucgccaggagugacaug

SEQ ID NO: 1280949 - RNA, 19 nt, Artificial Sequence
  Description of Artificial Sequence: Synthetic oligonucleotide
ggagauuguucagcugggu

SEQ ID NO: 1280950 - RNA, 19 nt, Artificial Sequence
  Description of Artificial Sequence: Synthetic oligonucleotide
ggccccuaguuaccaacua

SEQ ID NO: 1280951 - RNA, 19 nt, Artificial Sequence
  Description of Artificial Sequence: Synthetic oligonucleotide
ggccuuguacaccucgauu

SEQ ID NO: 1280952 - RNA, 19 nt, Artificial Sequence
  Description of Artificial Sequence: Synthetic oligonucleotide
caccaauaguggggaggca

SEQ ID NO: 1280953 - RNA, 19 nt, Artificial Sequence
  Description of Artificial Sequence: Synthetic oligonucleotide
cuccaccgacucugcccuc

SEQ ID NO: 1280954 - RNA, 19 nt, Artificial Sequence
  Description of Artificial Sequence: Synthetic oligonucleotide
uccgugccucuagccccug

SEQ ID NO: 1280955 - RNA, 19 nt, Artificial Sequence
  Description of Artificial Sequence: Synthetic oligonucleotide
gcaguuacccugaguggcu

SEQ ID NO: 1280956 - RNA, 19 nt, Artificial Sequence
  Description of Artificial Sequence: Synthetic oligonucleotide
ggaccucauaggggcccag

SEQ ID NO: 1280957 - RNA, 19 nt, Artificial Sequence
  Description of Artificial Sequence: Synthetic oligonucleotide
gcucacgguuccgugccuc

SEQ ID NO: 1280958 - RNA, 19 nt, Artificial Sequence
  Description of Artificial Sequence: Synthetic oligonucleotide
ggcagcuugggagauuguu

SEQ ID NO: 1280959 - RNA, 19 nt, Artificial Sequence
  Description of Artificial Sequence: Synthetic oligonucleotide
ccaggguucaggcuguauu

SEQ ID NO: 1280960 - RNA, 19 nt, Artificial Sequence
  Description of Artificial Sequence: Synthetic oligonucleotide
gccagaccugacagucccc

SEQ ID NO: 1280961 - RNA, 19 nt, Artificial Sequence
  Description of Artificial Sequence: Synthetic oligonucleotide
ggcuaacaucucuccugua

SEQ ID NO: 1280962 - RNA, 19 nt, Artificial Sequence
  Description of Artificial Sequence: Synthetic oligonucleotide
cuggaccugcauguacccu

SEQ ID NO: 1280963 - RNA, 19 nt, Artificial Sequence
  Description of Artificial Sequence: Synthetic oligonucleotide
cacucgcccuccagggccu

SEQ ID NO: 1280964 - RNA, 19 nt, Artificial Sequence
  Description of Artificial Sequence: Synthetic oligonucleotide
cccucucccucagcucacg

SEQ ID NO: 1280965 - RNA, 19 nt, Artificial Sequence
  Description of Artificial Sequence: Synthetic oligonucleotide
ccucuggcgguaccugaga

SEQ ID NO: 1280966 - RNA, 19 nt, Artificial Sequence
  Description of Artificial Sequence: Synthetic oligonucleotide
gcuugcggucaccucuggu

SEQ ID NO: 1280967 - RNA, 19 nt, Artificial Sequence
  Description of Artificial Sequence: Synthetic oligonucleotide
gggccuuguacaccucgau

SEQ ID NO: 1280968 - RNA, 19 nt, Artificial Sequence
  Description of Artificial Sequence: Synthetic oligonucleotide
ccgugccucuagccccugg

SEQ ID NO: 1280969 - RNA, 19 nt, Artificial Sequence
  Description of Artificial Sequence: Synthetic oligonucleotide
gcgagagggugaaggcaga

SEQ ID NO: 1280970 - RNA, 19 nt, Artificial Sequence
  Description of Artificial Sequence: Synthetic oligonucleotide
cucccucuuccagccugga

SEQ ID NO: 1280971 - RNA, 19 nt, Artificial Sequence
  Description of Artificial Sequence: Synthetic oligonucleotide
cggcaguagacagccagca

SEQ ID NO: 1280972 - RNA, 19 nt, Artificial Sequence
  Description of Artificial Sequence: Synthetic oligonucleotide
gccuuaccuccaugccaga

SEQ ID NO: 1280973 - RNA, 19 nt, Artificial Sequence
  Description of Artificial Sequence: Synthetic oligonucleotide
gccgugaagucaacucgcu

SEQ ID NO: 1280974 - RNA, 19 nt, Artificial Sequence
  Description of Artificial Sequence: Synthetic oligonucleotide
caaauucccugagggccuu

SEQ ID NO: 1280975 - RNA, 19 nt, Artificial Sequence
  Description of Artificial Sequence: Synthetic oligonucleotide
gggucgccaggagugacau

SEQ ID NO: 1280976 - RNA, 19 nt, Artificial Sequence
  Description of Artificial Sequence: Synthetic oligonucleotide
cucccucccugacuagguu

SEQ ID NO: 1280977 - RNA, 19 nt, Artificial Sequence
  Description of Artificial Sequence: Synthetic oligonucleotide
caguuacccugaguggcuu

SEQ ID NO: 1280978 - RNA, 19 nt, Artificial Sequence
  Description of Artificial Sequence: Synthetic oligonucleotide
ggagggccgugaagucaac

SEQ ID NO: 1280979 - RNA, 19 nt, Artificial Sequence
  Description of Artificial Sequence: Synthetic oligonucleotide
ccaccgacucugcccucuc

SEQ ID NO: 1280980 - RNA, 19 nt, Artificial Sequence
  Description of Artificial Sequence: Synthetic oligonucleotide
gcauguacccuaggugcuu

SEQ ID NO: 1280981 - RNA, 19 nt, Artificial Sequence
  Description of Artificial Sequence: Synthetic oligonucleotide
cgaacccaacuaggacuac

SEQ ID NO: 1280982 - RNA, 19 nt, Artificial Sequence
  Description of Artificial Sequence: Synthetic oligonucleotide
ccguuggcugacuucucau

SEQ ID NO: 1280983 - RNA, 19 nt, Artificial Sequence
  Description of Artificial Sequence: Synthetic oligonucleotide
ccagggucgccaggaguga

SEQ ID NO: 1280984 - RNA, 19 nt, Artificial Sequence
  Description of Artificial Sequence: Synthetic oligonucleotide
ccgacucugcccucucccu

SEQ ID NO: 1280985 - RNA, 19 nt, Artificial Sequence
  Description of Artificial Sequence: Synthetic oligonucleotide
cccauaaccccuggaggau

SEQ ID NO: 1280986 - RNA, 19 nt, Artificial Sequence
  Description of Artificial Sequence: Synthetic oligonucleotide
cgccaggagugacauggcu

SEQ ID NO: 1280987 - RNA, 19 nt, Artificial Sequence
  Description of Artificial Sequence: Synthetic oligonucleotide
ccuggcggcagaggggccu

SEQ ID NO: 1280988 - RNA, 19 nt, Artificial Sequence
  Description of Artificial Sequence: Synthetic oligonucleotide
ggaggcagcuugggagauu

SEQ ID NO: 1280989 - RNA, 19 nt, Artificial Sequence
  Description of Artificial Sequence: Synthetic oligonucleotide
ccucgauuagcagguccuu

SEQ ID NO: 1280990 - RNA, 19 nt, Artificial Sequence
  Description of Artificial Sequence: Synthetic oligonucleotide
aauaacagcaguuaucuuc

SEQ ID NO: 1280991 - RNA, 19 nt, Artificial Sequence
  Description of Artificial Sequence: Synthetic oligonucleotide
ugugaaaugauuaauagaa

SEQ ID NO: 1280992 - RNA, 19 nt, Artificial Sequence
  Description of Artificial Sequence: Synthetic oligonucleotide
agguuauacacauacagcc

SEQ ID NO: 1280993 - RNA, 19 nt, Artificial Sequence
  Description of Artificial Sequence: Synthetic oligonucleotide
aauuauaauuccaucaucg

SEQ ID NO: 1280994 - RNA, 19 nt, Artificial Sequence
  Description of Artificial Sequence: Synthetic oligonucleotide
aacugcagcaaauauauuc

SEQ ID NO: 1280995 - RNA, 19 nt, Artificial Sequence
  Description of Artificial Sequence: Synthetic oligonucleotide
ucaaccaaagcacugaucc

SEQ ID NO: 1280996 - RNA, 19 nt, Artificial Sequence
  Description of Artificial Sequence: Synthetic oligonucleotide
aaaagacuacuguaggggc

SEQ ID NO: 1280997 - RNA, 19 nt, Artificial Sequence
  Description of Artificial Sequence: Synthetic oligonucleotide
aagccaaaugucuaguccc

SEQ ID NO: 1280998 - RNA, 19 nt, Artificial Sequence
  Description of Artificial Sequence: Synthetic oligonucleotide
uacaacacaauuccuaggg

SEQ ID NO: 1280999 - RNA, 19 nt, Artificial Sequence
  Description of Artificial Sequence: Synthetic oligonucleotide
uuaacuucaaugauguccc

SEQ ID NO: 1281000 - RNA, 19 nt, Artificial Sequence
  Description of Artificial Sequence: Synthetic oligonucleotide
ucaauuguagguuauacac

SEQ ID NO: 1281001 - RNA, 19 nt, Artificial Sequence
  Description of Artificial Sequence: Synthetic oligonucleotide
ugauguuaaccaaugacag

SEQ ID NO: 1281002 - RNA, 19 nt, Artificial Sequence
  Description of Artificial Sequence: Synthetic oligonucleotide
aauucgggagcccacacgg

SEQ ID NO: 1281003 - RNA, 19 nt, Artificial Sequence
  Description of Artificial Sequence: Synthetic oligonucleotide
auuauaauuccaucaucgc

SEQ ID NO: 1281004 - RNA, 19 nt, Artificial Sequence
  Description of Artificial Sequence: Synthetic oligonucleotide
uugauguuaaccaaugaca

SEQ ID NO: 1281005 - RNA, 19 nt, Artificial Sequence
  Description of Artificial Sequence: Synthetic oligonucleotide
aaugacagaauauuauccu

SEQ ID NO: 1281006 - RNA, 19 nt, Artificial Sequence
  Description of Artificial Sequence: Synthetic oligonucleotide
aaggcguuuaacuucaaug

SEQ ID NO: 1281007 - RNA, 19 nt, Artificial Sequence
  Description of Artificial Sequence: Synthetic oligonucleotide
aauuguagguuauacacau

SEQ ID NO: 1281008 - RNA, 19 nt, Artificial Sequence
  Description of Artificial Sequence: Synthetic oligonucleotide
gagauuaacugccuguugg

SEQ ID NO: 1281009 - RNA, 19 nt, Artificial Sequence
  Description of Artificial Sequence: Synthetic oligonucleotide
aaugucuagucccugaaga

SEQ ID NO: 1281010 - RNA, 19 nt, Artificial Sequence
  Description of Artificial Sequence: Synthetic oligonucleotide
uguuacuaguccaugaucu

SEQ ID NO: 1281011 - RNA, 19 nt, Artificial Sequence
  Description of Artificial Sequence: Synthetic oligonucleotide
aauaacuuuaugcuucgga

SEQ ID NO: 1281012 - RNA, 19 nt, Artificial Sequence
  Description of Artificial Sequence: Synthetic oligonucleotide
aagguggucggucuuacac

SEQ ID NO: 1281013 - RNA, 19 nt, Artificial Sequence
  Description of Artificial Sequence: Synthetic oligonucleotide
uguaucagaaagguggucg

SEQ ID NO: 1281014 - RNA, 19 nt, Artificial Sequence
  Description of Artificial Sequence: Synthetic oligonucleotide
ugaguggccaaucaaaucu

SEQ ID NO: 1281015 - RNA, 19 nt, Artificial Sequence
  Description of Artificial Sequence: Synthetic oligonucleotide
uuguagguuauacacauac

SEQ ID NO: 1281016 - RNA, 19 nt, Artificial Sequence
  Description of Artificial Sequence: Synthetic oligonucleotide
agugacgaaacucuuauca

SEQ ID NO: 1281017 - RNA, 19 nt, Artificial Sequence
  Description of Artificial Sequence: Synthetic oligonucleotide
agaucuaauuuucgguucc

SEQ ID NO: 1281018 - RNA, 19 nt, Artificial Sequence
  Description of Artificial Sequence: Synthetic oligonucleotide
aaucacaugcuucaauugu

SEQ ID NO: 1281019 - RNA, 19 nt, Artificial Sequence
  Description of Artificial Sequence: Synthetic oligonucleotide
ugauuaauagaaaugucau

SEQ ID NO: 1281020 - RNA, 19 nt, Artificial Sequence
  Description of Artificial Sequence: Synthetic oligonucleotide
caaugacagaauauuaucc

SEQ ID NO: 1281021 - RNA, 19 nt, Artificial Sequence
  Description of Artificial Sequence: Synthetic oligonucleotide
gaguuuuauuucuugcugg

SEQ ID NO: 1281022 - RNA, 19 nt, Artificial Sequence
  Description of Artificial Sequence: Synthetic oligonucleotide
agaauaaugagaugaucug

SEQ ID NO: 1281023 - RNA, 19 nt, Artificial Sequence
  Description of Artificial Sequence: Synthetic oligonucleotide
aauaaugagaugaucugca

SEQ ID NO: 1281024 - RNA, 19 nt, Artificial Sequence
  Description of Artificial Sequence: Synthetic oligonucleotide
aaacagaagucuaauucgg

SEQ ID NO: 1281025 - RNA, 19 nt, Artificial Sequence
  Description of Artificial Sequence: Synthetic oligonucleotide
ucugucgauguguaggacg

SEQ ID NO: 1281026 - RNA, 19 nt, Artificial Sequence
  Description of Artificial Sequence: Synthetic oligonucleotide
uugucugccgguaucacag

SEQ ID NO: 1281027 - RNA, 19 nt, Artificial Sequence
  Description of Artificial Sequence: Synthetic oligonucleotide
uuaucauccagcugcacca

SEQ ID NO: 1281028 - RNA, 19 nt, Artificial Sequence
  Description of Artificial Sequence: Synthetic oligonucleotide
uagguuauacacauacagc

SEQ ID NO: 1281029 - RNA, 19 nt, Artificial Sequence
  Description of Artificial Sequence: Synthetic oligonucleotide
uccaaugagcuccagagaa

SEQ ID NO: 1281030 - RNA, 19 nt, Artificial Sequence
  Description of Artificial Sequence: Synthetic oligonucleotide
aucaagaaggcguuuaacu

SEQ ID NO: 1281031 - RNA, 19 nt, Artificial Sequence
  Description of Artificial Sequence: Synthetic oligonucleotide
gucauuaccacccgaaagc

SEQ ID NO: 1281032 - RNA, 19 nt, Artificial Sequence
  Description of Artificial Sequence: Synthetic oligonucleotide
ucauugauguuaaccaaug

SEQ ID NO: 1281033 - RNA, 19 nt, Artificial Sequence
  Description of Artificial Sequence: Synthetic oligonucleotide
accuaagucauuaccaccc

SEQ ID NO: 1281034 - RNA, 19 nt, Artificial Sequence
  Description of Artificial Sequence: Synthetic oligonucleotide
gacguuggaaucaugugcg

SEQ ID NO: 1281035 - RNA, 19 nt, Artificial Sequence
  Description of Artificial Sequence: Synthetic oligonucleotide
uuuucgguuccacacaccu

SEQ ID NO: 1281036 - RNA, 19 nt, Artificial Sequence
  Description of Artificial Sequence: Synthetic oligonucleotide
auaacuuuaugcuucggaa

SEQ ID NO: 1281037 - RNA, 19 nt, Artificial Sequence
  Description of Artificial Sequence: Synthetic oligonucleotide
augauuaauagaaauguca

SEQ ID NO: 1281038 - RNA, 19 nt, Artificial Sequence
  Description of Artificial Sequence: Synthetic oligonucleotide
cuggcaggcaaucacaugc

SEQ ID NO: 1281039 - RNA, 19 nt, Artificial Sequence
  Description of Artificial Sequence: Synthetic oligonucleotide
acaccuaagucauuaccac

SEQ ID NO: 1281040 - RNA, 19 nt, Artificial Sequence
  Description of Artificial Sequence: Synthetic oligonucleotide
gaauaaugagaugaucugc

SEQ ID NO: 1281041 - RNA, 19 nt, Artificial Sequence
  Description of Artificial Sequence: Synthetic oligonucleotide
aucaugugcgguuuucugg

SEQ ID NO: 1281042 - RNA, 19 nt, Artificial Sequence
  Description of Artificial Sequence: Synthetic oligonucleotide
ucggaauccagauucuugc

SEQ ID NO: 1281043 - RNA, 19 nt, Artificial Sequence
  Description of Artificial Sequence: Synthetic oligonucleotide
acacaauuauaauuccauc

SEQ ID NO: 1281044 - RNA, 19 nt, Artificial Sequence
  Description of Artificial Sequence: Synthetic oligonucleotide
cacaauuauaauuccauca

SEQ ID NO: 1281045 - RNA, 19 nt, Artificial Sequence
  Description of Artificial Sequence: Synthetic oligonucleotide
uaaugagaugaucugcaga

SEQ ID NO: 1281046 - RNA, 19 nt, Artificial Sequence
  Description of Artificial Sequence: Synthetic oligonucleotide
cccuguaucagaaaggugg

SEQ ID NO: 1281047 - RNA, 19 nt, Artificial Sequence
  Description of Artificial Sequence: Synthetic oligonucleotide
aaugaucagcucuccaaca

SEQ ID NO: 1281048 - RNA, 19 nt, Artificial Sequence
  Description of Artificial Sequence: Synthetic oligonucleotide
agauuaacugccuguuggg

SEQ ID NO: 1281049 - RNA, 19 nt, Artificial Sequence
  Description of Artificial Sequence: Synthetic oligonucleotide
aaugcaauaacagcaguua

SEQ ID NO: 1281050 - RNA, 19 nt, Artificial Sequence
  Description of Artificial Sequence: Synthetic oligonucleotide
uucgguuccacacaccuaa

SEQ ID NO: 1281051 - RNA, 19 nt, Artificial Sequence
  Description of Artificial Sequence: Synthetic oligonucleotide
agggguuuugacuuugguc

SEQ ID NO: 1281052 - RNA, 19 nt, Artificial Sequence
  Description of Artificial Sequence: Synthetic oligonucleotide
agcaagaaaacagaagucu

SEQ ID NO: 1281053 - RNA, 19 nt, Artificial Sequence
  Description of Artificial Sequence: Synthetic oligonucleotide
uacuaguccaugaucuuca

SEQ ID NO: 1281054 - RNA, 19 nt, Artificial Sequence
  Description of Artificial Sequence: Synthetic oligonucleotide
uaauuuucgguuccacaca

SEQ ID NO: 1281055 - RNA, 19 nt, Artificial Sequence
  Description of Artificial Sequence: Synthetic oligonucleotide
uuuggcagaguuuuauuuc

SEQ ID NO: 1281056 - RNA, 19 nt, Artificial Sequence
  Description of Artificial Sequence: Synthetic oligonucleotide
uaagucauuaccacccgaa

SEQ ID NO: 1281057 - RNA, 19 nt, Artificial Sequence
  Description of Artificial Sequence: Synthetic oligonucleotide
auguuaaccaaugacagaa

SEQ ID NO: 1281058 - RNA, 19 nt, Artificial Sequence
  Description of Artificial Sequence: Synthetic oligonucleotide
auguuacuaguccaugauc

SEQ ID NO: 1281059 - RNA, 19 nt, Artificial Sequence
  Description of Artificial Sequence: Synthetic oligonucleotide
uaucacagucccaaacacc

SEQ ID NO: 1281060 - RNA, 19 nt, Artificial Sequence
  Description of Artificial Sequence: Synthetic oligonucleotide
augugaaaugauuaauaga

SEQ ID NO: 1281061 - RNA, 19 nt, Artificial Sequence
  Description of Artificial Sequence: Synthetic oligonucleotide
aucucgaugggcuuucgag

SEQ ID NO: 1281062 - RNA, 19 nt, Artificial Sequence
  Description of Artificial Sequence: Synthetic oligonucleotide
aauaucucgaugggcuuuc

SEQ ID NO: 1281063 - RNA, 19 nt, Artificial Sequence
  Description of Artificial Sequence: Synthetic oligonucleotide
cagaagucuaauucgggag

SEQ ID NO: 1281064 - RNA, 19 nt, Artificial Sequence
  Description of Artificial Sequence: Synthetic oligonucleotide
uucggaauccagauucuug

SEQ ID NO: 1281065 - RNA, 19 nt, Artificial Sequence
  Description of Artificial Sequence: Synthetic oligonucleotide
uaauucgggagcccacacg

SEQ ID NO: 1281066 - RNA, 19 nt, Artificial Sequence
  Description of Artificial Sequence: Synthetic oligonucleotide
auaaugagaugaucugcag

SEQ ID NO: 1281067 - RNA, 19 nt, Artificial Sequence
  Description of Artificial Sequence: Synthetic oligonucleotide
aagacuacuguaggggcuc

SEQ ID NO: 1281068 - RNA, 19 nt, Artificial Sequence
  Description of Artificial Sequence: Synthetic oligonucleotide
aacagaagucuaauucggg

SEQ ID NO: 1281069 - RNA, 19 nt, Artificial Sequence
  Description of Artificial Sequence: Synthetic oligonucleotide
aguguagggguuuugacuu

SEQ ID NO: 1281070 - RNA, 19 nt, Artificial Sequence
  Description of Artificial Sequence: Synthetic oligonucleotide
acagaagucuaauucggga

SEQ ID NO: 1281071 - RNA, 19 nt, Artificial Sequence
  Description of Artificial Sequence: Synthetic oligonucleotide
cuagggauuucaaccaaag

SEQ ID NO: 1281072 - RNA, 19 nt, Artificial Sequence
  Description of Artificial Sequence: Synthetic oligonucleotide
gagcaugagauuaacugcc

SEQ ID NO: 1281073 - RNA, 19 nt, Artificial Sequence
  Description of Artificial Sequence: Synthetic oligonucleotide
aaagcacugaucccuguau

SEQ ID NO: 1281074 - RNA, 19 nt, Artificial Sequence
  Description of Artificial Sequence: Synthetic oligonucleotide
uccuauugucugcaaagca

SEQ ID NO: 1281075 - RNA, 19 nt, Artificial Sequence
  Description of Artificial Sequence: Synthetic oligonucleotide
acuguaggggcucaggggu

SEQ ID NO: 1281076 - RNA, 19 nt, Artificial Sequence
  Description of Artificial Sequence: Synthetic oligonucleotide
ucgauguguaggacguugg

SEQ ID NO: 1281077 - RNA, 19 nt, Artificial Sequence
  Description of Artificial Sequence: Synthetic oligonucleotide
ugcuacaacacaauuccua

SEQ ID NO: 1281078 - RNA, 19 nt, Artificial Sequence
  Description of Artificial Sequence: Synthetic oligonucleotide
uuggcagaguuuuauuucu

SEQ ID NO: 1281079 - RNA, 19 nt, Artificial Sequence
  Description of Artificial Sequence: Synthetic oligonucleotide
ugagauuaacugccuguug

SEQ ID NO: 1281080 - RNA, 19 nt, Artificial Sequence
  Description of Artificial Sequence: Synthetic oligonucleotide
ugcugcuacaacacaauuc

SEQ ID NO: 1281081 - RNA, 19 nt, Artificial Sequence
  Description of Artificial Sequence: Synthetic oligonucleotide
acagaauaaugagaugauc

SEQ ID NO: 1281082 - RNA, 19 nt, Artificial Sequence
  Description of Artificial Sequence: Synthetic oligonucleotide
uuuaugcuucggaauccag

SEQ ID NO: 1281083 - RNA, 19 nt, Artificial Sequence
  Description of Artificial Sequence: Synthetic oligonucleotide
uuccuagggauuucaacca

SEQ ID NO: 1281084 - RNA, 19 nt, Artificial Sequence
  Description of Artificial Sequence: Synthetic oligonucleotide
cuacaacacaauuccuagg

SEQ ID NO: 1281085 - RNA, 19 nt, Artificial Sequence
  Description of Artificial Sequence: Synthetic oligonucleotide
uccaacugcagcaaauaua

SEQ ID NO: 1281086 - RNA, 19 nt, Artificial Sequence
  Description of Artificial Sequence: Synthetic oligonucleotide
ucuagucccugaagaacag

SEQ ID NO: 1281087 - RNA, 19 nt, Artificial Sequence
  Description of Artificial Sequence: Synthetic oligonucleotide
auaacagcaguuaucuucu

SEQ ID NO: 1281088 - RNA, 19 nt, Artificial Sequence
  Description of Artificial Sequence: Synthetic oligonucleotide
auugcugccgcccggugag

SEQ ID NO: 1281089 - RNA, 19 nt, Artificial Sequence
  Description of Artificial Sequence: Synthetic oligonucleotide
ucauuaccacccgaaagcc

SEQ ID NO: 1281090 - RNA, 19 nt, Artificial Sequence
  Description of Artificial Sequence: Synthetic oligonucleotide
ucccauuccagcaagccuu

SEQ ID NO: 1281091 - RNA, 19 nt, Artificial Sequence
  Description of Artificial Sequence: Synthetic oligonucleotide
gauguuaaccaaugacaga

SEQ ID NO: 1281092 - RNA, 19 nt, Artificial Sequence
  Description of Artificial Sequence: Synthetic oligonucleotide
guagacuggaagcaggaga

SEQ ID NO: 1281093 - RNA, 19 nt, Artificial Sequence
  Description of Artificial Sequence: Synthetic oligonucleotide
ccggacaauaucucgaugg

SEQ ID NO: 1281094 - RNA, 19 nt, Artificial Sequence
  Description of Artificial Sequence: Synthetic oligonucleotide
ugacgaaacucuuaucauu

SEQ ID NO: 1281095 - RNA, 19 nt, Artificial Sequence
  Description of Artificial Sequence: Synthetic oligonucleotide
aaugagcuccagagaacac

SEQ ID NO: 1281096 - RNA, 19 nt, Artificial Sequence
  Description of Artificial Sequence: Synthetic oligonucleotide
gacaauaucucgaugggcu

SEQ ID NO: 1281097 - RNA, 19 nt, Artificial Sequence
  Description of Artificial Sequence: Synthetic oligonucleotide
uuugucugccgguaucaca

SEQ ID NO: 1281098 - RNA, 19 nt, Artificial Sequence
  Description of Artificial Sequence: Synthetic oligonucleotide
aaagacuacuguaggggcu

SEQ ID NO: 1281099 - RNA, 19 nt, Artificial Sequence
  Description of Artificial Sequence: Synthetic oligonucleotide
aagucauuaccacccgaaa

SEQ ID NO: 1281100 - RNA, 19 nt, Artificial Sequence
  Description of Artificial Sequence: Synthetic oligonucleotide
uuauacacauacagcccuc

SEQ ID NO: 1281101 - RNA, 19 nt, Artificial Sequence
  Description of Artificial Sequence: Synthetic oligonucleotide
caccuaagucauuaccacc

SEQ ID NO: 1281102 - RNA, 19 nt, Artificial Sequence
  Description of Artificial Sequence: Synthetic oligonucleotide
cagaucuaauuuucgguuc

SEQ ID NO: 1281103 - RNA, 19 nt, Artificial Sequence
  Description of Artificial Sequence: Synthetic oligonucleotide
cucccaaaugcgcacacug

SEQ ID NO: 1281104 - RNA, 19 nt, Artificial Sequence
  Description of Artificial Sequence: Synthetic oligonucleotide
uaucaguucuuugccaacu

SEQ ID NO: 1281105 - RNA, 19 nt, Artificial Sequence
  Description of Artificial Sequence: Synthetic oligonucleotide
acagcagaucuaauuuucg

SEQ ID NO: 1281106 - RNA, 19 nt, Artificial Sequence
  Description of Artificial Sequence: Synthetic oligonucleotide
cguagugccauuuucuugc

SEQ ID NO: 1281107 - RNA, 19 nt, Artificial Sequence
  Description of Artificial Sequence: Synthetic oligonucleotide
aaccggacaauaucucgau

SEQ ID NO: 1281108 - RNA, 19 nt, Artificial Sequence
  Description of Artificial Sequence: Synthetic oligonucleotide
aggacguuggaaucaugug

SEQ ID NO: 1281109 - RNA, 19 nt, Artificial Sequence
  Description of Artificial Sequence: Synthetic oligonucleotide
cauccggcuguggagaugg

SEQ ID NO: 1281110 - RNA, 19 nt, Artificial Sequence
  Description of Artificial Sequence: Synthetic oligonucleotide
ucuaauucgggagcccaca

SEQ ID NO: 1281111 - RNA, 19 nt, Artificial Sequence
  Description of Artificial Sequence: Synthetic oligonucleotide
guuaaccaaugacagaaua

SEQ ID NO: 1281112 - RNA, 19 nt, Artificial Sequence
  Description of Artificial Sequence: Synthetic oligonucleotide
uuguuuguucacucuucca

SEQ ID NO: 1281113 - RNA, 19 nt, Artificial Sequence
  Description of Artificial Sequence: Synthetic oligonucleotide
gaagucugucgauguguag

SEQ ID NO: 1281114 - RNA, 19 nt, Artificial Sequence
  Description of Artificial Sequence: Synthetic oligonucleotide
auuauccuggugaucaaga

SEQ ID NO: 1281115 - RNA, 19 nt, Artificial Sequence
  Description of Artificial Sequence: Synthetic oligonucleotide
cagggcaucccaaaugauc

SEQ ID NO: 1281116 - RNA, 19 nt, Artificial Sequence
  Description of Artificial Sequence: Synthetic oligonucleotide
accaaugacagaauauuau

SEQ ID NO: 1281117 - RNA, 19 nt, Artificial Sequence
  Description of Artificial Sequence: Synthetic oligonucleotide
uguuaaccaaugacagaau

SEQ ID NO: 1281118 - RNA, 19 nt, Artificial Sequence
  Description of Artificial Sequence: Synthetic oligonucleotide
aguccaguccagggcaucc

SEQ ID NO: 1281119 - RNA, 19 nt, Artificial Sequence
  Description of Artificial Sequence: Synthetic oligonucleotide
augaucagcucuccaacau

SEQ ID NO: 1281120 - RNA, 19 nt, Artificial Sequence
  Description of Artificial Sequence: Synthetic oligonucleotide
uucugugggugcuaccaac

SEQ ID NO: 1281121 - RNA, 19 nt, Artificial Sequence
  Description of Artificial Sequence: Synthetic oligonucleotide
aucgccagcagaugcaaau

SEQ ID NO: 1281122 - RNA, 19 nt, Artificial Sequence
  Description of Artificial Sequence: Synthetic oligonucleotide
augcaauaacagcaguuau

SEQ ID NO: 1281123 - RNA, 19 nt, Artificial Sequence
  Description of Artificial Sequence: Synthetic oligonucleotide
aaauccccacauauuaaaa

SEQ ID NO: 1281124 - RNA, 19 nt, Artificial Sequence
  Description of Artificial Sequence: Synthetic oligonucleotide
gaucaagaaggcguuuaac

SEQ ID NO: 1281125 - RNA, 19 nt, Artificial Sequence
  Description of Artificial Sequence: Synthetic oligonucleotide
ugggcuuucgaggaccagc

SEQ ID NO: 1281126 - RNA, 19 nt, Artificial Sequence
  Description of Artificial Sequence: Synthetic oligonucleotide
ucgcuauugcugccgcccg

SEQ ID NO: 1281127 - RNA, 19 nt, Artificial Sequence
  Description of Artificial Sequence: Synthetic oligonucleotide
uguagggguuuugacuuug

SEQ ID NO: 1281128 - RNA, 19 nt, Artificial Sequence
  Description of Artificial Sequence: Synthetic oligonucleotide
cacccgaaagccaaauguc

SEQ ID NO: 1281129 - RNA, 19 nt, Artificial Sequence
  Description of Artificial Sequence: Synthetic oligonucleotide
cacacggaaagccgcggcg

SEQ ID NO: 1281130 - RNA, 19 nt, Artificial Sequence
  Description of Artificial Sequence: Synthetic oligonucleotide
gauuugucugccgguauca

SEQ ID NO: 1281131 - RNA, 19 nt, Artificial Sequence
  Description of Artificial Sequence: Synthetic oligonucleotide
agucgcuauugcugccgcc

SEQ ID NO: 1281132 - RNA, 19 nt, Artificial Sequence
  Description of Artificial Sequence: Synthetic oligonucleotide
gguuccacacaccuaaguc

SEQ ID NO: 1281133 - RNA, 19 nt, Artificial Sequence
  Description of Artificial Sequence: Synthetic oligonucleotide
aucauugauguuaaccaau

SEQ ID NO: 1281134 - RNA, 19 nt, Artificial Sequence
  Description of Artificial Sequence: Synthetic oligonucleotide
augugcgguuuucuggcag

SEQ ID NO: 1281135 - RNA, 19 nt, Artificial Sequence
  Description of Artificial Sequence: Synthetic oligonucleotide
aucuguuaucauccagcug

SEQ ID NO: 1281136 - RNA, 19 nt, Artificial Sequence
  Description of Artificial Sequence: Synthetic oligonucleotide
auuuucgguuccacacacc

SEQ ID NO: 1281137 - RNA, 19 nt, Artificial Sequence
  Description of Artificial Sequence: Synthetic oligonucleotide
gauuaacugccuguuggga

SEQ ID NO: 1281138 - RNA, 19 nt, Artificial Sequence
  Description of Artificial Sequence: Synthetic oligonucleotide
gaaccggacaauaucucga

SEQ ID NO: 1281139 - RNA, 19 nt, Artificial Sequence
  Description of Artificial Sequence: Synthetic oligonucleotide
uuuaacagguuggcuggcu

SEQ ID NO: 1281140 - RNA, 19 nt, Artificial Sequence
  Description of Artificial Sequence: Synthetic oligonucleotide
gguguguccucugaguucc

SEQ ID NO: 1281141 - RNA, 19 nt, Artificial Sequence
  Description of Artificial Sequence: Synthetic oligonucleotide
gucuagucccugaagaaca

SEQ ID NO: 1281142 - RNA, 19 nt, Artificial Sequence
  Description of Artificial Sequence: Synthetic oligonucleotide
gacagaauauuauccuggu

SEQ ID NO: 1281143 - RNA, 19 nt, Artificial Sequence
  Description of Artificial Sequence: Synthetic oligonucleotide
uaucucgaugggcuuucga

SEQ ID NO: 1281144 - RNA, 19 nt, Artificial Sequence
  Description of Artificial Sequence: Synthetic oligonucleotide
acguuggaaucaugugcgg

SEQ ID NO: 1281145 - RNA, 19 nt, Artificial Sequence
  Description of Artificial Sequence: Synthetic oligonucleotide
ugcuucaauuguagguuau

SEQ ID NO: 1281146 - RNA, 19 nt, Artificial Sequence
  Description of Artificial Sequence: Synthetic oligonucleotide
uuuuaacagguuggcuggc

SEQ ID NO: 1281147 - RNA, 19 nt, Artificial Sequence
  Description of Artificial Sequence: Synthetic oligonucleotide
aaagguggucggucuuaca

SEQ ID NO: 1281148 - RNA, 19 nt, Artificial Sequence
  Description of Artificial Sequence: Synthetic oligonucleotide
ggucuuacacagcagaucu

SEQ ID NO: 1281149 - RNA, 19 nt, Artificial Sequence
  Description of Artificial Sequence: Synthetic oligonucleotide
cugucugggcauuccacac

SEQ ID NO: 1281150 - RNA, 19 nt, Artificial Sequence
  Description of Artificial Sequence: Synthetic oligonucleotide
uccuagggauuucaaccaa

SEQ ID NO: 1281151 - RNA, 19 nt, Artificial Sequence
  Description of Artificial Sequence: Synthetic oligonucleotide
cuaauucgggagcccacac

SEQ ID NO: 1281152 - RNA, 19 nt, Artificial Sequence
  Description of Artificial Sequence: Synthetic oligonucleotide
gucgauguguaggacguug

SEQ ID NO: 1281153 - RNA, 19 nt, Artificial Sequence
  Description of Artificial Sequence: Synthetic oligonucleotide
accucccaaaugcgcacac

SEQ ID NO: 1281154 - RNA, 19 nt, Artificial Sequence
  Description of Artificial Sequence: Synthetic oligonucleotide
aggaugaguggccaaucaa

SEQ ID NO: 1281155 - RNA, 19 nt, Artificial Sequence
  Description of Artificial Sequence: Synthetic oligonucleotide
acgaaacucuuaucauuga

SEQ ID NO: 1281156 - RNA, 19 nt, Artificial Sequence
  Description of Artificial Sequence: Synthetic oligonucleotide
auacagcccucuuccaacu

SEQ ID NO: 1281157 - RNA, 19 nt, Artificial Sequence
  Description of Artificial Sequence: Synthetic oligonucleotide
cucggaccucccaaaugcg

SEQ ID NO: 1281158 - RNA, 19 nt, Artificial Sequence
  Description of Artificial Sequence: Synthetic oligonucleotide
gaauauuauccuggugauc

SEQ ID NO: 1281159 - RNA, 19 nt, Artificial Sequence
  Description of Artificial Sequence: Synthetic oligonucleotide
uggugaucaagaaggcguu

SEQ ID NO: 1281160 - RNA, 19 nt, Artificial Sequence
  Description of Artificial Sequence: Synthetic oligonucleotide
acaauaucucgaugggcuu

SEQ ID NO: 1281161 - RNA, 19 nt, Artificial Sequence
  Description of Artificial Sequence: Synthetic oligonucleotide
gucgcuauugcugccgccc

SEQ ID NO: 1281162 - RNA, 19 nt, Artificial Sequence
  Description of Artificial Sequence: Synthetic oligonucleotide
agcauguuacuaguccaug

SEQ ID NO: 1281163 - RNA, 19 nt, Artificial Sequence
  Description of Artificial Sequence: Synthetic oligonucleotide
uggauuugucugccgguau

SEQ ID NO: 1281164 - RNA, 19 nt, Artificial Sequence
  Description of Artificial Sequence: Synthetic oligonucleotide
gcuuccgcggcccacgccg

SEQ ID NO: 1281165 - RNA, 19 nt, Artificial Sequence
  Description of Artificial Sequence: Synthetic oligonucleotide
uguaggacguuggaaucau

SEQ ID NO: 1281166 - RNA, 19 nt, Artificial Sequence
  Description of Artificial Sequence: Synthetic oligonucleotide
aggaaccggacaauaucuc

SEQ ID NO: 1281167 - RNA, 19 nt, Artificial Sequence
  Description of Artificial Sequence: Synthetic oligonucleotide
gcaauaacagcaguuaucu

SEQ ID NO: 1281168 - RNA, 19 nt, Artificial Sequence
  Description of Artificial Sequence: Synthetic oligonucleotide
gcguuuaacuucaaugaug

SEQ ID NO: 1281169 - RNA, 19 nt, Artificial Sequence
  Description of Artificial Sequence: Synthetic oligonucleotide
cagaguuuuauuucuugcu

SEQ ID NO: 1281170 - RNA, 19 nt, Artificial Sequence
  Description of Artificial Sequence: Synthetic oligonucleotide
agcaucgcgccggagcuuc

SEQ ID NO: 1281171 - RNA, 19 nt, Artificial Sequence
  Description of Artificial Sequence: Synthetic oligonucleotide
gaaagguggucggucuuac

SEQ ID NO: 1281172 - RNA, 19 nt, Artificial Sequence
  Description of Artificial Sequence: Synthetic oligonucleotide
uguugggaagucugucgau

SEQ ID NO: 1281173 - RNA, 19 nt, Artificial Sequence
  Description of Artificial Sequence: Synthetic oligonucleotide
acccgaaagccaaaugucu

SEQ ID NO: 1281174 - RNA, 19 nt, Artificial Sequence
  Description of Artificial Sequence: Synthetic oligonucleotide
ucgguuccacacaccuaag

SEQ ID NO: 1281175 - RNA, 19 nt, Artificial Sequence
  Description of Artificial Sequence: Synthetic oligonucleotide
accacccgaaagccaaaug

SEQ ID NO: 1281176 - RNA, 19 nt, Artificial Sequence
  Description of Artificial Sequence: Synthetic oligonucleotide
augcuucaauuguagguua

SEQ ID NO: 1281177 - RNA, 19 nt, Artificial Sequence
  Description of Artificial Sequence: Synthetic oligonucleotide
aucuccacggaggaugagu

SEQ ID NO: 1281178 - RNA, 19 nt, Artificial Sequence
  Description of Artificial Sequence: Synthetic oligonucleotide
accggacaauaucucgaug

SEQ ID NO: 1281179 - RNA, 19 nt, Artificial Sequence
  Description of Artificial Sequence: Synthetic oligonucleotide
uuucgguuccacacaccua

SEQ ID NO: 1281180 - RNA, 19 nt, Artificial Sequence
  Description of Artificial Sequence: Synthetic oligonucleotide
ccgaaagccaaaugucuag

SEQ ID NO: 1281181 - RNA, 19 nt, Artificial Sequence
  Description of Artificial Sequence: Synthetic oligonucleotide
caacacaauuccuagggau

SEQ ID NO: 1281182 - RNA, 19 nt, Artificial Sequence
  Description of Artificial Sequence: Synthetic oligonucleotide
gaucuaauuuucgguucca

SEQ ID NO: 1281183 - RNA, 19 nt, Artificial Sequence
  Description of Artificial Sequence: Synthetic oligonucleotide
aggcggagguuccguggcc

SEQ ID NO: 1281184 - RNA, 19 nt, Artificial Sequence
  Description of Artificial Sequence: Synthetic oligonucleotide
cuaagucauuaccacccga

SEQ ID NO: 1281185 - RNA, 19 nt, Artificial Sequence
  Description of Artificial Sequence: Synthetic oligonucleotide
caggaaccggacaauaucu

SEQ ID NO: 1281186 - RNA, 19 nt, Artificial Sequence
  Description of Artificial Sequence: Synthetic oligonucleotide
uuggaaucaugugcgguuu

SEQ ID NO: 1281187 - RNA, 19 nt, Artificial Sequence
  Description of Artificial Sequence: Synthetic oligonucleotide
guagggguuuugacuuugg

SEQ ID NO: 1281188 - RNA, 19 nt, Artificial Sequence
  Description of Artificial Sequence: Synthetic oligonucleotide
ucgaugggcuuucgaggac

SEQ ID NO: 1281189 - RNA, 19 nt, Artificial Sequence
  Description of Artificial Sequence: Synthetic oligonucleotide
cauuaccacccgaaagcca

SEQ ID NO: 1281190 - RNA, 19 nt, Artificial Sequence
  Description of Artificial Sequence: Synthetic oligonucleotide
gcauguuacuaguccauga

SEQ ID NO: 1281191 - RNA, 19 nt, Artificial Sequence
  Description of Artificial Sequence: Synthetic oligonucleotide
ggacaauaucucgaugggc

SEQ ID NO: 1281192 - RNA, 19 nt, Artificial Sequence
  Description of Artificial Sequence: Synthetic oligonucleotide
guuggaaucaugugcgguu

SEQ ID NO: 1281193 - RNA, 19 nt, Artificial Sequence
  Description of Artificial Sequence: Synthetic oligonucleotide
agagaacacguagugccau

SEQ ID NO: 1281194 - RNA, 19 nt, Artificial Sequence
  Description of Artificial Sequence: Synthetic oligonucleotide
ccuaagucauuaccacccg

SEQ ID NO: 1281195 - RNA, 19 nt, Artificial Sequence
  Description of Artificial Sequence: Synthetic oligonucleotide
agccagcgcagcaucgcgc

SEQ ID NO: 1281196 - RNA, 19 nt, Artificial Sequence
  Description of Artificial Sequence: Synthetic oligonucleotide
agcuuccgcggcccacgcc

SEQ ID NO: 1281197 - RNA, 19 nt, Artificial Sequence
  Description of Artificial Sequence: Synthetic oligonucleotide
agaacacguagugccauuu

SEQ ID NO: 1281198 - RNA, 19 nt, Artificial Sequence
  Description of Artificial Sequence: Synthetic oligonucleotide
uguuaucauccagcugcac

SEQ ID NO: 1281199 - RNA, 19 nt, Artificial Sequence
  Description of Artificial Sequence: Synthetic oligonucleotide
auacacauacagcccucuu

SEQ ID NO: 1281200 - RNA, 19 nt, Artificial Sequence
  Description of Artificial Sequence: Synthetic oligonucleotide
cugucgauguguaggacgu

SEQ ID NO: 1281201 - RNA, 19 nt, Artificial Sequence
  Description of Artificial Sequence: Synthetic oligonucleotide
cauguuacuaguccaugau

SEQ ID NO: 1281202 - RNA, 19 nt, Artificial Sequence
  Description of Artificial Sequence: Synthetic oligonucleotide
ggauuugucugccgguauc

SEQ ID NO: 1281203 - RNA, 19 nt, Artificial Sequence
  Description of Artificial Sequence: Synthetic oligonucleotide
uggaaucaugugcgguuuu

SEQ ID NO: 1281204 - RNA, 19 nt, Artificial Sequence
  Description of Artificial Sequence: Synthetic oligonucleotide
auaucucgaugggcuuucg

SEQ ID NO: 1281205 - RNA, 19 nt, Artificial Sequence
  Description of Artificial Sequence: Synthetic oligonucleotide
agcaugagauuaacugccu

SEQ ID NO: 1281206 - RNA, 19 nt, Artificial Sequence
  Description of Artificial Sequence: Synthetic oligonucleotide
ggaugaguggccaaucaaa

SEQ ID NO: 1281207 - RNA, 19 nt, Artificial Sequence
  Description of Artificial Sequence: Synthetic oligonucleotide
cagugacgaaacucuuauc

SEQ ID NO: 1281208 - RNA, 19 nt, Artificial Sequence
  Description of Artificial Sequence: Synthetic oligonucleotide
gugacgaaacucuuaucau

SEQ ID NO: 1281209 - RNA, 19 nt, Artificial Sequence
  Description of Artificial Sequence: Synthetic oligonucleotide
ucgccagcagaugcaaauc

SEQ ID NO: 1281210 - RNA, 19 nt, Artificial Sequence
  Description of Artificial Sequence: Synthetic oligonucleotide
ugucugccgguaucacagu

SEQ ID NO: 1281211 - RNA, 19 nt, Artificial Sequence
  Description of Artificial Sequence: Synthetic oligonucleotide
gaugggcuuucgaggacca

SEQ ID NO: 1281212 - RNA, 19 nt, Artificial Sequence
  Description of Artificial Sequence: Synthetic oligonucleotide
gcaaucacaugcuucaauu

SEQ ID NO: 1281213 - RNA, 19 nt, Artificial Sequence
  Description of Artificial Sequence: Synthetic oligonucleotide
gaaggcguuuaacuucaau

SEQ ID NO: 1281214 - RNA, 19 nt, Artificial Sequence
  Description of Artificial Sequence: Synthetic oligonucleotide
gucuaauucgggagcccac

SEQ ID NO: 1281215 - RNA, 19 nt, Artificial Sequence
  Description of Artificial Sequence: Synthetic oligonucleotide
cuguaucagaaaggugguc

SEQ ID NO: 1281216 - RNA, 19 nt, Artificial Sequence
  Description of Artificial Sequence: Synthetic oligonucleotide
uccugucagcagaggcugu

SEQ ID NO: 1281217 - RNA, 19 nt, Artificial Sequence
  Description of Artificial Sequence: Synthetic oligonucleotide
gcgcagucgcuauugcugc

SEQ ID NO: 1281218 - RNA, 19 nt, Artificial Sequence
  Description of Artificial Sequence: Synthetic oligonucleotide
cugggcauccggcugugga

SEQ ID NO: 1281219 - RNA, 19 nt, Artificial Sequence
  Description of Artificial Sequence: Synthetic oligonucleotide
ugcgguuuucuggcaggca

SEQ ID NO: 1281220 - RNA, 19 nt, Artificial Sequence
  Description of Artificial Sequence: Synthetic oligonucleotide
gcagaucuaauuuucgguu

SEQ ID NO: 1281221 - RNA, 19 nt, Artificial Sequence
  Description of Artificial Sequence: Synthetic oligonucleotide
ugagcacgcgcgcgugggu

SEQ ID NO: 1281222 - RNA, 19 nt, Artificial Sequence
  Description of Artificial Sequence: Synthetic oligonucleotide
cuuccaacugcagcaaaua

SEQ ID NO: 1281223 - RNA, 19 nt, Artificial Sequence
  Description of Artificial Sequence: Synthetic oligonucleotide
guggccaaucaaaucucca

SEQ ID NO: 1281224 - RNA, 19 nt, Artificial Sequence
  Description of Artificial Sequence: Synthetic oligonucleotide
gacuuuggucuucuccuau

SEQ ID NO: 1281225 - RNA, 19 nt, Artificial Sequence
  Description of Artificial Sequence: Synthetic oligonucleotide
gccccagugagcacgcgcg

SEQ ID NO: 1281226 - RNA, 19 nt, Artificial Sequence
  Description of Artificial Sequence: Synthetic oligonucleotide
ugggugcuaccaaccuaaa

SEQ ID NO: 1281227 - RNA, 19 nt, Artificial Sequence
  Description of Artificial Sequence: Synthetic oligonucleotide
augcuucggaauccagauu

SEQ ID NO: 1281228 - RNA, 19 nt, Artificial Sequence
  Description of Artificial Sequence: Synthetic oligonucleotide
gccagcgcagcaucgcgcc

SEQ ID NO: 1281229 - RNA, 19 nt, Artificial Sequence
  Description of Artificial Sequence: Synthetic oligonucleotide
cuguugggacagguucugc

SEQ ID NO: 1281230 - RNA, 19 nt, Artificial Sequence
  Description of Artificial Sequence: Synthetic oligonucleotide
gcgguuuucuggcaggcaa

SEQ ID NO: 1281231 - RNA, 19 nt, Artificial Sequence
  Description of Artificial Sequence: Synthetic oligonucleotide
uaccacccgaaagccaaau

SEQ ID NO: 1281232 - RNA, 19 nt, Artificial Sequence
  Description of Artificial Sequence: Synthetic oligonucleotide
ggaccucccaaaugcgcac

SEQ ID NO: 1281233 - RNA, 19 nt, Artificial Sequence
  Description of Artificial Sequence: Synthetic oligonucleotide
caaaugcgcacacugccau

SEQ ID NO: 1281234 - RNA, 19 nt, Artificial Sequence
  Description of Artificial Sequence: Synthetic oligonucleotide
gaaagccgcggcggcggag

SEQ ID NO: 1281235 - RNA, 19 nt, Artificial Sequence
  Description of Artificial Sequence: Synthetic oligonucleotide
gugcgguuuucuggcaggc

SEQ ID NO: 1281236 - RNA, 19 nt, Artificial Sequence
  Description of Artificial Sequence: Synthetic oligonucleotide
guaggacguuggaaucaug

SEQ ID NO: 1281237 - RNA, 19 nt, Artificial Sequence
  Description of Artificial Sequence: Synthetic oligonucleotide
cuuccgcggcccacgccgc

SEQ ID NO: 1281238 - RNA, 19 nt, Artificial Sequence
  Description of Artificial Sequence: Synthetic oligonucleotide
gccgguaucacagucccaa

SEQ ID NO: 1281239 - RNA, 19 nt, Artificial Sequence
  Description of Artificial Sequence: Synthetic oligonucleotide
acggaggaugaguggccaa

SEQ ID NO: 1281240 - RNA, 19 nt, Artificial Sequence
  Description of Artificial Sequence: Synthetic oligonucleotide
gagcauguuacuaguccau

SEQ ID NO: 1281241 - RNA, 19 nt, Artificial Sequence
  Description of Artificial Sequence: Synthetic oligonucleotide
gaccucccaaaugcgcaca

SEQ ID NO: 1281242 - RNA, 19 nt, Artificial Sequence
  Description of Artificial Sequence: Synthetic oligonucleotide
ccaaauccccacauauuaa

SEQ ID NO: 1281243 - RNA, 19 nt, Artificial Sequence
  Description of Artificial Sequence: Synthetic oligonucleotide
gucugucgauguguaggac

SEQ ID NO: 1281244 - RNA, 19 nt, Artificial Sequence
  Description of Artificial Sequence: Synthetic oligonucleotide
ggcuuucgaggaccagcag

SEQ ID NO: 1281245 - RNA, 19 nt, Artificial Sequence
  Description of Artificial Sequence: Synthetic oligonucleotide
cagcaguuaucuucugggu

SEQ ID NO: 1281246 - RNA, 19 nt, Artificial Sequence
  Description of Artificial Sequence: Synthetic oligonucleotide
ccacccgaaagccaaaugu

SEQ ID NO: 1281247 - RNA, 19 nt, Artificial Sequence
  Description of Artificial Sequence: Synthetic oligonucleotide
agacuacuguaggggcuca

SEQ ID NO: 1281248 - RNA, 19 nt, Artificial Sequence
  Description of Artificial Sequence: Synthetic oligonucleotide
cacguagugccauuuucuu

SEQ ID NO: 1281249 - RNA, 19 nt, Artificial Sequence
  Description of Artificial Sequence: Synthetic oligonucleotide
cacggaggaugaguggcca

SEQ ID NO: 1281250 - RNA, 19 nt, Artificial Sequence
  Description of Artificial Sequence: Synthetic oligonucleotide
gagaacacguagugccauu

SEQ ID NO: 1281251 - RNA, 19 nt, Artificial Sequence
  Description of Artificial Sequence: Synthetic oligonucleotide
acuuuacaguagacuggaa

SEQ ID NO: 1281252 - RNA, 19 nt, Artificial Sequence
  Description of Artificial Sequence: Synthetic oligonucleotide
ggaagucugucgaugugua

SEQ ID NO: 1281253 - RNA, 19 nt, Artificial Sequence
  Description of Artificial Sequence: Synthetic oligonucleotide
ccacacggaaagccgcggc

SEQ ID NO: 1281254 - RNA, 19 nt, Artificial Sequence
  Description of Artificial Sequence: Synthetic oligonucleotide
gcagcgcagucgcuauugc

SEQ ID NO: 1281255 - RNA, 19 nt, Artificial Sequence
  Description of Artificial Sequence: Synthetic oligonucleotide
auucgggagcccacacgga

SEQ ID NO: 1281256 - RNA, 19 nt, Artificial Sequence
  Description of Artificial Sequence: Synthetic oligonucleotide
gggaagucugucgaugugu

SEQ ID NO: 1281257 - RNA, 19 nt, Artificial Sequence
  Description of Artificial Sequence: Synthetic oligonucleotide
ccuagggauuucaaccaaa

SEQ ID NO: 1281258 - RNA, 19 nt, Artificial Sequence
  Description of Artificial Sequence: Synthetic oligonucleotide
ggucggucuuacacagcag

SEQ ID NO: 1281259 - RNA, 19 nt, Artificial Sequence
  Description of Artificial Sequence: Synthetic oligonucleotide
guggucggucuuacacagc

SEQ ID NO: 1281260 - RNA, 19 nt, Artificial Sequence
  Description of Artificial Sequence: Synthetic oligonucleotide
ggguguaagucaccguccu

SEQ ID NO: 1281261 - RNA, 19 nt, Artificial Sequence
  Description of Artificial Sequence: Synthetic oligonucleotide
cugcuacaacacaauuccu

SEQ ID NO: 1281262 - RNA, 19 nt, Artificial Sequence
  Description of Artificial Sequence: Synthetic oligonucleotide
cagugagcacgcgcgcgug

SEQ ID NO: 1281263 - RNA, 19 nt, Artificial Sequence
  Description of Artificial Sequence: Synthetic oligonucleotide
agcucaguguagggguuuu

SEQ ID NO: 1281264 - RNA, 19 nt, Artificial Sequence
  Description of Artificial Sequence: Synthetic oligonucleotide
ccagugacgaaacucuuau

SEQ ID NO: 1281265 - RNA, 19 nt, Artificial Sequence
  Description of Artificial Sequence: Synthetic oligonucleotide
ugucgauguguaggacguu

SEQ ID NO: 1281266 - RNA, 19 nt, Artificial Sequence
  Description of Artificial Sequence: Synthetic oligonucleotide
cgaugggcuuucgaggacc

SEQ ID NO: 1281267 - RNA, 19 nt, Artificial Sequence
  Description of Artificial Sequence: Synthetic oligonucleotide
cccgaaagccaaaugucua

SEQ ID NO: 1281268 - RNA, 19 nt, Artificial Sequence
  Description of Artificial Sequence: Synthetic oligonucleotide
ccuguaucagaaagguggu

SEQ ID NO: 1281269 - RNA, 19 nt, Artificial Sequence
  Description of Artificial Sequence: Synthetic oligonucleotide
cccauuccagcaagccuuc

SEQ ID NO: 1281270 - RNA, 19 nt, Artificial Sequence
  Description of Artificial Sequence: Synthetic oligonucleotide
gucuuacacagcagaucua

SEQ ID NO: 1281271 - RNA, 19 nt, Artificial Sequence
  Description of Artificial Sequence: Synthetic oligonucleotide
gcuucaauuguagguuaua

SEQ ID NO: 1281272 - RNA, 19 nt, Artificial Sequence
  Description of Artificial Sequence: Synthetic oligonucleotide
caauaucucgaugggcuuu

SEQ ID NO: 1281273 - RNA, 19 nt, Artificial Sequence
  Description of Artificial Sequence: Synthetic oligonucleotide
ccccgaucagccagcgcag

SEQ ID NO: 1281274 - RNA, 19 nt, Artificial Sequence
  Description of Artificial Sequence: Synthetic oligonucleotide
caguccaguccagggcauc

SEQ ID NO: 1281275 - RNA, 19 nt, Artificial Sequence
  Description of Artificial Sequence: Synthetic oligonucleotide
cacgccgcgagggccggug

SEQ ID NO: 1281276 - RNA, 19 nt, Artificial Sequence
  Description of Artificial Sequence: Synthetic oligonucleotide
gcuccagagaacacguagu

SEQ ID NO: 1281277 - RNA, 19 nt, Artificial Sequence
  Description of Artificial Sequence: Synthetic oligonucleotide
gccuguugggaagucuguc

SEQ ID NO: 1281278 - RNA, 19 nt, Artificial Sequence
  Description of Artificial Sequence: Synthetic oligonucleotide
agggccggugcagcgcagu

SEQ ID NO: 1281279 - RNA, 19 nt, Artificial Sequence
  Description of Artificial Sequence: Synthetic oligonucleotide
cggaccucccaaaugcgca

SEQ ID NO: 1281280 - RNA, 19 nt, Artificial Sequence
  Description of Artificial Sequence: Synthetic oligonucleotide
cccacacggaaagccgcgg

SEQ ID NO: 1281281 - RNA, 19 nt, Artificial Sequence
  Description of Artificial Sequence: Synthetic oligonucleotide
cggucuuacacagcagauc

SEQ ID NO: 1281282 - RNA, 19 nt, Artificial Sequence
  Description of Artificial Sequence: Synthetic oligonucleotide
cuagucccugaagaacagu

SEQ ID NO: 1281283 - RNA, 19 nt, Artificial Sequence
  Description of Artificial Sequence: Synthetic oligonucleotide
uugcugccgcccggugagc

SEQ ID NO: 1281284 - RNA, 19 nt, Artificial Sequence
  Description of Artificial Sequence: Synthetic oligonucleotide
ccggugagccagaggcgag

SEQ ID NO: 1281285 - RNA, 19 nt, Artificial Sequence
  Description of Artificial Sequence: Synthetic oligonucleotide
cugucaagaugagcugacu

SEQ ID NO: 1281286 - RNA, 19 nt, Artificial Sequence
  Description of Artificial Sequence: Synthetic oligonucleotide
agaaggcguuuaacuucaa

SEQ ID NO: 1281287 - RNA, 19 nt, Artificial Sequence
  Description of Artificial Sequence: Synthetic oligonucleotide
ugccgcccggugagccaga

SEQ ID NO: 1281288 - RNA, 19 nt, Artificial Sequence
  Description of Artificial Sequence: Synthetic oligonucleotide
gccagugacgaaacucuua

SEQ ID NO: 1281289 - RNA, 19 nt, Artificial Sequence
  Description of Artificial Sequence: Synthetic oligonucleotide
cgcuauugcugccgcccgg

SEQ ID NO: 1281290 - RNA, 19 nt, Artificial Sequence
  Description of Artificial Sequence: Synthetic oligonucleotide
ccagcgcagcaucgcgccg

SEQ ID NO: 1281291 - RNA, 19 nt, Artificial Sequence
  Description of Artificial Sequence: Synthetic oligonucleotide
cuucggaauccagauucuu

SEQ ID NO: 1281292 - RNA, 19 nt, Artificial Sequence
  Description of Artificial Sequence: Synthetic oligonucleotide
guguagggguuuugacuuu

SEQ ID NO: 1281293 - RNA, 19 nt, Artificial Sequence
  Description of Artificial Sequence: Synthetic oligonucleotide
cgauguguaggacguugga

SEQ ID NO: 1281294 - RNA, 19 nt, Artificial Sequence
  Description of Artificial Sequence: Synthetic oligonucleotide
cgcagucgcuauugcugcc

SEQ ID NO: 1281295 - RNA, 19 nt, Artificial Sequence
  Description of Artificial Sequence: Synthetic oligonucleotide
cagguuggcuggcuuguuu

SEQ ID NO: 1281296 - RNA, 19 nt, Artificial Sequence
  Description of Artificial Sequence: Synthetic oligonucleotide
ccgaucagccagcgcagca

SEQ ID NO: 1281297 - RNA, 19 nt, Artificial Sequence
  Description of Artificial Sequence: Synthetic oligonucleotide
gcauccggcuguggagaug

SEQ ID NO: 1281298 - RNA, 19 nt, Artificial Sequence
  Description of Artificial Sequence: Synthetic oligonucleotide
ggaaagccgcggcggcgga

SEQ ID NO: 1281299 - RNA, 19 nt, Artificial Sequence
  Description of Artificial Sequence: Synthetic oligonucleotide
caacugcagcaaauauauu

SEQ ID NO: 1281300 - RNA, 19 nt, Artificial Sequence
  Description of Artificial Sequence: Synthetic oligonucleotide
cccgaucagccagcgcagc

SEQ ID NO: 1281301 - RNA, 19 nt, Artificial Sequence
  Description of Artificial Sequence: Synthetic oligonucleotide
gcuucggaauccagauucu

SEQ ID NO: 1281302 - RNA, 19 nt, Artificial Sequence
  Description of Artificial Sequence: Synthetic oligonucleotide
ggcaggcaaucacaugcuu

SEQ ID NO: 1281303 - RNA, 19 nt, Artificial Sequence
  Description of Artificial Sequence: Synthetic oligonucleotide
ggugaucaagaaggcguuu

SEQ ID NO: 1281304 - RNA, 19 nt, Artificial Sequence
  Description of Artificial Sequence: Synthetic oligonucleotide
ccgguaucacagucccaaa

SEQ ID NO: 1281305 - RNA, 19 nt, Artificial Sequence
  Description of Artificial Sequence: Synthetic oligonucleotide
ccgcccggugagccagagg

SEQ ID NO: 1281306 - RNA, 19 nt, Artificial Sequence
  Description of Artificial Sequence: Synthetic oligonucleotide
cguuggaaucaugugcggu

SEQ ID NO: 1281307 - RNA, 19 nt, Artificial Sequence
  Description of Artificial Sequence: Synthetic oligonucleotide
gccgcccggugagccagag

SEQ ID NO: 1281308 - RNA, 19 nt, Artificial Sequence
  Description of Artificial Sequence: Synthetic oligonucleotide
gcaucgcgccggagcuucc

SEQ ID NO: 1281309 - RNA, 19 nt, Artificial Sequence
  Description of Artificial Sequence: Synthetic oligonucleotide
ccgcgagggccggugcagc

SEQ ID NO: 1281310 - RNA, 19 nt, Artificial Sequence
  Description of Artificial Sequence: Synthetic oligonucleotide
cgguuccacacaccuaagu

SEQ ID NO: 1281311 - RNA, 19 nt, Artificial Sequence
  Description of Artificial Sequence: Synthetic oligonucleotide
ccagggcaucccaaaugau

SEQ ID NO: 1281312 - RNA, 19 nt, Artificial Sequence
  Description of Artificial Sequence: Synthetic oligonucleotide
ccguggccccagugagcac

SEQ ID NO: 1281313 - RNA, 19 nt, Artificial Sequence
  Description of Artificial Sequence: Synthetic oligonucleotide
cggagcuuccgcggcccac

SEQ ID NO: 1281314 - RNA, 19 nt, Artificial Sequence
  Description of Artificial Sequence: Synthetic oligonucleotide
gcgcagcaucgcgccggag

SEQ ID NO: 1281315 - RNA, 19 nt, Artificial Sequence
  Description of Artificial Sequence: Synthetic oligonucleotide
cggugcagcgcagucgcua

SEQ ID NO: 1281316 - RNA, 19 nt, Artificial Sequence
  Description of Artificial Sequence: Synthetic oligonucleotide
ccggagcuuccgcggccca

SEQ ID NO: 1281317 - RNA, 19 nt, Artificial Sequence
  Description of Artificial Sequence: Synthetic oligonucleotide
ccacgccgcgagggccggu

SEQ ID NO: 1281318 - RNA, 19 nt, Artificial Sequence
  Description of Artificial Sequence: Synthetic oligonucleotide
ugaaauauggaaaaguaag

SEQ ID NO: 1281319 - RNA, 19 nt, Artificial Sequence
  Description of Artificial Sequence: Synthetic oligonucleotide
aaaggaaucagauaguacu

SEQ ID NO: 1281320 - RNA, 19 nt, Artificial Sequence
  Description of Artificial Sequence: Synthetic oligonucleotide
aaaaguaagguacagagau

SEQ ID NO: 1281321 - RNA, 19 nt, Artificial Sequence
  Description of Artificial Sequence: Synthetic oligonucleotide
uuuaaguugaucuuuacga

SEQ ID NO: 1281322 - RNA, 19 nt, Artificial Sequence
  Description of Artificial Sequence: Synthetic oligonucleotide
uucauuucaagcuauauug

SEQ ID NO: 1281323 - RNA, 19 nt, Artificial Sequence
  Description of Artificial Sequence: Synthetic oligonucleotide
aguauauuuucauaguuac

SEQ ID NO: 1281324 - RNA, 19 nt, Artificial Sequence
  Description of Artificial Sequence: Synthetic oligonucleotide
uuuaugaagagguauauga

SEQ ID NO: 1281325 - RNA, 19 nt, Artificial Sequence
  Description of Artificial Sequence: Synthetic oligonucleotide
aaauaaaccaaccaccuga

SEQ ID NO: 1281326 - RNA, 19 nt, Artificial Sequence
  Description of Artificial Sequence: Synthetic oligonucleotide
aagucuucuaaucaauacg

SEQ ID NO: 1281327 - RNA, 19 nt, Artificial Sequence
  Description of Artificial Sequence: Synthetic oligonucleotide
uaaaccaaccaccugaaag

SEQ ID NO: 1281328 - RNA, 19 nt, Artificial Sequence
  Description of Artificial Sequence: Synthetic oligonucleotide
auauugaggauuuuaaaag

SEQ ID NO: 1281329 - RNA, 19 nt, Artificial Sequence
  Description of Artificial Sequence: Synthetic oligonucleotide
aauggauguauacuauugg

SEQ ID NO: 1281330 - RNA, 19 nt, Artificial Sequence
  Description of Artificial Sequence: Synthetic oligonucleotide
aaugacuggguccugacag

SEQ ID NO: 1281331 - RNA, 19 nt, Artificial Sequence
  Description of Artificial Sequence: Synthetic oligonucleotide
uuacuuguuagugaaaugg

SEQ ID NO: 1281332 - RNA, 19 nt, Artificial Sequence
  Description of Artificial Sequence: Synthetic oligonucleotide
aauuugaugccugaaguac

SEQ ID NO: 1281333 - RNA, 19 nt, Artificial Sequence
  Description of Artificial Sequence: Synthetic oligonucleotide
aauacauugccucaauaca

SEQ ID NO: 1281334 - RNA, 19 nt, Artificial Sequence
  Description of Artificial Sequence: Synthetic oligonucleotide
agauaagugucauagauca

SEQ ID NO: 1281335 - RNA, 19 nt, Artificial Sequence
  Description of Artificial Sequence: Synthetic oligonucleotide
uauaccuaaauaaacauuu

SEQ ID NO: 1281336 - RNA, 19 nt, Artificial Sequence
  Description of Artificial Sequence: Synthetic oligonucleotide
uuauuaacauugaagcucc

SEQ ID NO: 1281337 - RNA, 19 nt, Artificial Sequence
  Description of Artificial Sequence: Synthetic oligonucleotide
aauuagcugaugcuucacc

SEQ ID NO: 1281338 - RNA, 19 nt, Artificial Sequence
  Description of Artificial Sequence: Synthetic oligonucleotide
acuaagaugacguggcccc

SEQ ID NO: 1281339 - RNA, 19 nt, Artificial Sequence
  Description of Artificial Sequence: Synthetic oligonucleotide
agggaaauaaaccaaccac

SEQ ID NO: 1281340 - RNA, 19 nt, Artificial Sequence
  Description of Artificial Sequence: Synthetic oligonucleotide
aaaggauacugaaauaugg

SEQ ID NO: 1281341 - RNA, 19 nt, Artificial Sequence
  Description of Artificial Sequence: Synthetic oligonucleotide
aacucauaacacuauacug

SEQ ID NO: 1281342 - RNA, 19 nt, Artificial Sequence
  Description of Artificial Sequence: Synthetic oligonucleotide
uauuuucauaguuacagug

SEQ ID NO: 1281343 - RNA, 19 nt, Artificial Sequence
  Description of Artificial Sequence: Synthetic oligonucleotide
uuucaaacccaauacauga

SEQ ID NO: 1281344 - RNA, 19 nt, Artificial Sequence
  Description of Artificial Sequence: Synthetic oligonucleotide
aaacucauaacacuauacu

SEQ ID NO: 1281345 - RNA, 19 nt, Artificial Sequence
  Description of Artificial Sequence: Synthetic oligonucleotide
cuagacauuucuuaugagg

SEQ ID NO: 1281346 - RNA, 19 nt, Artificial Sequence
  Description of Artificial Sequence: Synthetic oligonucleotide
uauacuauuggagauaagu

SEQ ID NO: 1281347 - RNA, 19 nt, Artificial Sequence
  Description of Artificial Sequence: Synthetic oligonucleotide
aauagcacauacaucguac

SEQ ID NO: 1281348 - RNA, 19 nt, Artificial Sequence
  Description of Artificial Sequence: Synthetic oligonucleotide
cagagagcuaauuugaugc

SEQ ID NO: 1281349 - RNA, 19 nt, Artificial Sequence
  Description of Artificial Sequence: Synthetic oligonucleotide
aaauccuaaagaucuaggu

SEQ ID NO: 1281350 - RNA, 19 nt, Artificial Sequence
  Description of Artificial Sequence: Synthetic oligonucleotide
uuggagauaagugucauag

SEQ ID NO: 1281351 - RNA, 19 nt, Artificial Sequence
  Description of Artificial Sequence: Synthetic oligonucleotide
ucuggaacuaagaugacgu

SEQ ID NO: 1281352 - RNA, 19 nt, Artificial Sequence
  Description of Artificial Sequence: Synthetic oligonucleotide
agaucaaauagccuauuuc

SEQ ID NO: 1281353 - RNA, 19 nt, Artificial Sequence
  Description of Artificial Sequence: Synthetic oligonucleotide
cuugcagugauaagcaugg

SEQ ID NO: 1281354 - RNA, 19 nt, Artificial Sequence
  Description of Artificial Sequence: Synthetic oligonucleotide
ucauagaucaaauagccua

SEQ ID NO: 1281355 - RNA, 19 nt, Artificial Sequence
  Description of Artificial Sequence: Synthetic oligonucleotide
aauccuguucaccauuggg

SEQ ID NO: 1281356 - RNA, 19 nt, Artificial Sequence
  Description of Artificial Sequence: Synthetic oligonucleotide
aaaaugacuaucaggauga

SEQ ID NO: 1281357 - RNA, 19 nt, Artificial Sequence
  Description of Artificial Sequence: Synthetic oligonucleotide
uuuuaaaagugucuuggcu

SEQ ID NO: 1281358 - RNA, 19 nt, Artificial Sequence
  Description of Artificial Sequence: Synthetic oligonucleotide
gauaguacuccaaaggaag

SEQ ID NO: 1281359 - RNA, 19 nt, Artificial Sequence
  Description of Artificial Sequence: Synthetic oligonucleotide
acauacaucguacucaucu

SEQ ID NO: 1281360 - RNA, 19 nt, Artificial Sequence
  Description of Artificial Sequence: Synthetic oligonucleotide
uugaucuuuacgaagucug

SEQ ID NO: 1281361 - RNA, 19 nt, Artificial Sequence
  Description of Artificial Sequence: Synthetic oligonucleotide
uauugcaacacaaaaggau

SEQ ID NO: 1281362 - RNA, 19 nt, Artificial Sequence
  Description of Artificial Sequence: Synthetic oligonucleotide
aacuaagaugacguggccc

SEQ ID NO: 1281363 - RNA, 19 nt, Artificial Sequence
  Description of Artificial Sequence: Synthetic oligonucleotide
auacaucguacucaucucc

SEQ ID NO: 1281364 - RNA, 19 nt, Artificial Sequence
  Description of Artificial Sequence: Synthetic oligonucleotide
uggauguauacuauuggag

SEQ ID NO: 1281365 - RNA, 19 nt, Artificial Sequence
  Description of Artificial Sequence: Synthetic oligonucleotide
uuuucaaacccaauacaug

SEQ ID NO: 1281366 - RNA, 19 nt, Artificial Sequence
  Description of Artificial Sequence: Synthetic oligonucleotide
gauacugaaauauggaaaa

SEQ ID NO: 1281367 - RNA, 19 nt, Artificial Sequence
  Description of Artificial Sequence: Synthetic oligonucleotide
uuguuagugaaauggaugu

SEQ ID NO: 1281368 - RNA, 19 nt, Artificial Sequence
  Description of Artificial Sequence: Synthetic oligonucleotide
agucuuagcauucugauua

SEQ ID NO: 1281369 - RNA, 19 nt, Artificial Sequence
  Description of Artificial Sequence: Synthetic oligonucleotide
ucuucuaaucaauacgaug

SEQ ID NO: 1281370 - RNA, 19 nt, Artificial Sequence
  Description of Artificial Sequence: Synthetic oligonucleotide
uuaaagggaaauaaaccaa

SEQ ID NO: 1281371 - RNA, 19 nt, Artificial Sequence
  Description of Artificial Sequence: Synthetic oligonucleotide
aaguaagguacagagaugu

SEQ ID NO: 1281372 - RNA, 19 nt, Artificial Sequence
  Description of Artificial Sequence: Synthetic oligonucleotide
uaaguugaucuuuacgaag

SEQ ID NO: 1281373 - RNA, 19 nt, Artificial Sequence
  Description of Artificial Sequence: Synthetic oligonucleotide
uucuacagaaaccucuaag

SEQ ID NO: 1281374 - RNA, 19 nt, Artificial Sequence
  Description of Artificial Sequence: Synthetic oligonucleotide
uacuauuggagauaagugu

SEQ ID NO: 1281375 - RNA, 19 nt, Artificial Sequence
  Description of Artificial Sequence: Synthetic oligonucleotide
uuugaagucuacacuagac

SEQ ID NO: 1281376 - RNA, 19 nt, Artificial Sequence
  Description of Artificial Sequence: Synthetic oligonucleotide
ucugacaaagacccaaaug

SEQ ID NO: 1281377 - RNA, 19 nt, Artificial Sequence
  Description of Artificial Sequence: Synthetic oligonucleotide
cugacaaagacccaaauga

SEQ ID NO: 1281378 - RNA, 19 nt, Artificial Sequence
  Description of Artificial Sequence: Synthetic oligonucleotide
uaagcaugggaacagggga

SEQ ID NO: 1281379 - RNA, 19 nt, Artificial Sequence
  Description of Artificial Sequence: Synthetic oligonucleotide
aguaauuucauugucugca

SEQ ID NO: 1281380 - RNA, 19 nt, Artificial Sequence
  Description of Artificial Sequence: Synthetic oligonucleotide
aaacccaauacaugaacga

SEQ ID NO: 1281381 - RNA, 19 nt, Artificial Sequence
  Description of Artificial Sequence: Synthetic oligonucleotide
uauuugaagucuacacuag

SEQ ID NO: 1281382 - RNA, 19 nt, Artificial Sequence
  Description of Artificial Sequence: Synthetic oligonucleotide
aacgugauuacacuagaaa

SEQ ID NO: 1281383 - RNA, 19 nt, Artificial Sequence
  Description of Artificial Sequence: Synthetic oligonucleotide
gaaggugggaguaaagggg

SEQ ID NO: 1281384 - RNA, 19 nt, Artificial Sequence
  Description of Artificial Sequence: Synthetic oligonucleotide
ucagggaauuagcugaugc

SEQ ID NO: 1281385 - RNA, 19 nt, Artificial Sequence
  Description of Artificial Sequence: Synthetic oligonucleotide
uuaacauugaagcucccau

SEQ ID NO: 1281386 - RNA, 19 nt, Artificial Sequence
  Description of Artificial Sequence: Synthetic oligonucleotide
uguguuacuuguuagugaa

SEQ ID NO: 1281387 - RNA, 19 nt, Artificial Sequence
  Description of Artificial Sequence: Synthetic oligonucleotide
uacauuucaucauucccag

SEQ ID NO: 1281388 - RNA, 19 nt, Artificial Sequence
  Description of Artificial Sequence: Synthetic oligonucleotide
ucaguauuaacaguugcug

SEQ ID NO: 1281389 - RNA, 19 nt, Artificial Sequence
  Description of Artificial Sequence: Synthetic oligonucleotide
aaauggauguauacuauug

SEQ ID NO: 1281390 - RNA, 19 nt, Artificial Sequence
  Description of Artificial Sequence: Synthetic oligonucleotide
uggaacuaagaugacgugg

SEQ ID NO: 1281391 - RNA, 19 nt, Artificial Sequence
  Description of Artificial Sequence: Synthetic oligonucleotide
uugaggauuuuaaaagugu

SEQ ID NO: 1281392 - RNA, 19 nt, Artificial Sequence
  Description of Artificial Sequence: Synthetic oligonucleotide
agagagcuaauuugaugcc

SEQ ID NO: 1281393 - RNA, 19 nt, Artificial Sequence
  Description of Artificial Sequence: Synthetic oligonucleotide
aauacaugaacgauuuccu

SEQ ID NO: 1281394 - RNA, 19 nt, Artificial Sequence
  Description of Artificial Sequence: Synthetic oligonucleotide
uccuggacaaauuuuguga

SEQ ID NO: 1281395 - RNA, 19 nt, Artificial Sequence
  Description of Artificial Sequence: Synthetic oligonucleotide
ucauguucugaugugagug

SEQ ID NO: 1281396 - RNA, 19 nt, Artificial Sequence
  Description of Artificial Sequence: Synthetic oligonucleotide
uucagcagggcuaacuagc

SEQ ID NO: 1281397 - RNA, 19 nt, Artificial Sequence
  Description of Artificial Sequence: Synthetic oligonucleotide
aaauauuugggaauaggaa

SEQ ID NO: 1281398 - RNA, 19 nt, Artificial Sequence
  Description of Artificial Sequence: Synthetic oligonucleotide
agguauaugauuucaguau

SEQ ID NO: 1281399 - RNA, 19 nt, Artificial Sequence
  Description of Artificial Sequence: Synthetic oligonucleotide
uuguuggcuuuuaaauugg

SEQ ID NO: 1281400 - RNA, 19 nt, Artificial Sequence
  Description of Artificial Sequence: Synthetic oligonucleotide
ugaagcucccaucauacaa

SEQ ID NO: 1281401 - RNA, 19 nt, Artificial Sequence
  Description of Artificial Sequence: Synthetic oligonucleotide
ugaggauuuuaaaaguguc

SEQ ID NO: 1281402 - RNA, 19 nt, Artificial Sequence
  Description of Artificial Sequence: Synthetic oligonucleotide
caaacucauaacacuauac

SEQ ID NO: 1281403 - RNA, 19 nt, Artificial Sequence
  Description of Artificial Sequence: Synthetic oligonucleotide
aagcucccaucauacaagg

SEQ ID NO: 1281404 - RNA, 19 nt, Artificial Sequence
  Description of Artificial Sequence: Synthetic oligonucleotide
aaggaaucagauaguacuc

SEQ ID NO: 1281405 - RNA, 19 nt, Artificial Sequence
  Description of Artificial Sequence: Synthetic oligonucleotide
uuuucauaguuacaguguu

SEQ ID NO: 1281406 - RNA, 19 nt, Artificial Sequence
  Description of Artificial Sequence: Synthetic oligonucleotide
aaccuuuauaucaaaauua

SEQ ID NO: 1281407 - RNA, 19 nt, Artificial Sequence
  Description of Artificial Sequence: Synthetic oligonucleotide
gauaagcaugggaacaggg

SEQ ID NO: 1281408 - RNA, 19 nt, Artificial Sequence
  Description of Artificial Sequence: Synthetic oligonucleotide
auuagcugaugcuucacca

SEQ ID NO: 1281409 - RNA, 19 nt, Artificial Sequence
  Description of Artificial Sequence: Synthetic oligonucleotide
uuaugaagagguauaugau

SEQ ID NO: 1281410 - RNA, 19 nt, Artificial Sequence
  Description of Artificial Sequence: Synthetic oligonucleotide
auccuguucaccauugggc

SEQ ID NO: 1281411 - RNA, 19 nt, Artificial Sequence
  Description of Artificial Sequence: Synthetic oligonucleotide
acgugauuacacuagaaaa

SEQ ID NO: 1281412 - RNA, 19 nt, Artificial Sequence
  Description of Artificial Sequence: Synthetic oligonucleotide
aggaaucagauaguacucc

SEQ ID NO: 1281413 - RNA, 19 nt, Artificial Sequence
  Description of Artificial Sequence: Synthetic oligonucleotide
agagguauaugauuucagu

SEQ ID NO: 1281414 - RNA, 19 nt, Artificial Sequence
  Description of Artificial Sequence: Synthetic oligonucleotide
ugcacaugguucagcaggg

SEQ ID NO: 1281415 - RNA, 19 nt, Artificial Sequence
  Description of Artificial Sequence: Synthetic oligonucleotide
caagucuucuaaucaauac

SEQ ID NO: 1281416 - RNA, 19 nt, Artificial Sequence
  Description of Artificial Sequence: Synthetic oligonucleotide
aaguugaucuuuacgaagu

SEQ ID NO: 1281417 - RNA, 19 nt, Artificial Sequence
  Description of Artificial Sequence: Synthetic oligonucleotide
acucauaacacuauacugu

SEQ ID NO: 1281418 - RNA, 19 nt, Artificial Sequence
  Description of Artificial Sequence: Synthetic oligonucleotide
uacuuguuagugaaaugga

SEQ ID NO: 1281419 - RNA, 19 nt, Artificial Sequence
  Description of Artificial Sequence: Synthetic oligonucleotide
auggauguauacuauugga

SEQ ID NO: 1281420 - RNA, 19 nt, Artificial Sequence
  Description of Artificial Sequence: Synthetic oligonucleotide
uacaucguacucaucuccc

SEQ ID NO: 1281421 - RNA, 19 nt, Artificial Sequence
  Description of Artificial Sequence: Synthetic oligonucleotide
caaauagccuauuucagga

SEQ ID NO: 1281422 - RNA, 19 nt, Artificial Sequence
  Description of Artificial Sequence: Synthetic oligonucleotide
auacaugaacgauuuccuc

SEQ ID NO: 1281423 - RNA, 19 nt, Artificial Sequence
  Description of Artificial Sequence: Synthetic oligonucleotide
uguuccuguggaaucaaac

SEQ ID NO: 1281424 - RNA, 19 nt, Artificial Sequence
  Description of Artificial Sequence: Synthetic oligonucleotide
uucuugaauuuauguacag

SEQ ID NO: 1281425 - RNA, 19 nt, Artificial Sequence
  Description of Artificial Sequence: Synthetic oligonucleotide
ugcuauguuguaauccugu

SEQ ID NO: 1281426 - RNA, 19 nt, Artificial Sequence
  Description of Artificial Sequence: Synthetic oligonucleotide
aaauagcacauacaucgua

SEQ ID NO: 1281427 - RNA, 19 nt, Artificial Sequence
  Description of Artificial Sequence: Synthetic oligonucleotide
agacccaaaugacuggguc

SEQ ID NO: 1281428 - RNA, 19 nt, Artificial Sequence
  Description of Artificial Sequence: Synthetic oligonucleotide
auaagugucauagaucaaa

SEQ ID NO: 1281429 - RNA, 19 nt, Artificial Sequence
  Description of Artificial Sequence: Synthetic oligonucleotide
agggcuaacuagcauaaga

SEQ ID NO: 1281430 - RNA, 19 nt, Artificial Sequence
  Description of Artificial Sequence: Synthetic oligonucleotide
aucauacaaggccauauaa

SEQ ID NO: 1281431 - RNA, 19 nt, Artificial Sequence
  Description of Artificial Sequence: Synthetic oligonucleotide
gaaucaaacucauaacacu

SEQ ID NO: 1281432 - RNA, 19 nt, Artificial Sequence
  Description of Artificial Sequence: Synthetic oligonucleotide
uagugaaauggauguauac

SEQ ID NO: 1281433 - RNA, 19 nt, Artificial Sequence
  Description of Artificial Sequence: Synthetic oligonucleotide
agucuucuaaucaauacga

SEQ ID NO: 1281434 - RNA, 19 nt, Artificial Sequence
  Description of Artificial Sequence: Synthetic oligonucleotide
ugaacgauuuccucugcac

SEQ ID NO: 1281435 - RNA, 19 nt, Artificial Sequence
  Description of Artificial Sequence: Synthetic oligonucleotide
auaagcaugggaacagggg

SEQ ID NO: 1281436 - RNA, 19 nt, Artificial Sequence
  Description of Artificial Sequence: Synthetic oligonucleotide
auacuauuggagauaagug

SEQ ID NO: 1281437 - RNA, 19 nt, Artificial Sequence
  Description of Artificial Sequence: Synthetic oligonucleotide
auaagaugcucuuuaugaa

SEQ ID NO: 1281438 - RNA, 19 nt, Artificial Sequence
  Description of Artificial Sequence: Synthetic oligonucleotide
acaguauuugcuauguugu

SEQ ID NO: 1281439 - RNA, 19 nt, Artificial Sequence
  Description of Artificial Sequence: Synthetic oligonucleotide
gacccaaaugacugggucc

SEQ ID NO: 1281440 - RNA, 19 nt, Artificial Sequence
  Description of Artificial Sequence: Synthetic oligonucleotide
gugucauagaucaaauagc

SEQ ID NO: 1281441 - RNA, 19 nt, Artificial Sequence
  Description of Artificial Sequence: Synthetic oligonucleotide
uaauccuguucaccauugg

SEQ ID NO: 1281442 - RNA, 19 nt, Artificial Sequence
  Description of Artificial Sequence: Synthetic oligonucleotide
auuaguucuguuaagcaaa

SEQ ID NO: 1281443 - RNA, 19 nt, Artificial Sequence
  Description of Artificial Sequence: Synthetic oligonucleotide
acacuauacuguuuuaaaa

SEQ ID NO: 1281444 - RNA, 19 nt, Artificial Sequence
  Description of Artificial Sequence: Synthetic oligonucleotide
ugauuacacuagaaaauua

SEQ ID NO: 1281445 - RNA, 19 nt, Artificial Sequence
  Description of Artificial Sequence: Synthetic oligonucleotide
gaaguacagcaccagugug

SEQ ID NO: 1281446 - RNA, 19 nt, Artificial Sequence
  Description of Artificial Sequence: Synthetic oligonucleotide
agugauaagcaugggaaca

SEQ ID NO: 1281447 - RNA, 19 nt, Artificial Sequence
  Description of Artificial Sequence: Synthetic oligonucleotide
uccuguucaccauugggcu

SEQ ID NO: 1281448 - RNA, 19 nt, Artificial Sequence
  Description of Artificial Sequence: Synthetic oligonucleotide
acuaugaugaggaaaggaa

SEQ ID NO: 1281449 - RNA, 19 nt, Artificial Sequence
  Description of Artificial Sequence: Synthetic oligonucleotide
aaccaaccaccugaaaguc

SEQ ID NO: 1281450 - RNA, 19 nt, Artificial Sequence
  Description of Artificial Sequence: Synthetic oligonucleotide
uagcauaagaugcucuuua

SEQ ID NO: 1281451 - RNA, 19 nt, Artificial Sequence
  Description of Artificial Sequence: Synthetic oligonucleotide
gcuaauuugaugccugaag

SEQ ID NO: 1281452 - RNA, 19 nt, Artificial Sequence
  Description of Artificial Sequence: Synthetic oligonucleotide
gugaaauggauguauacua

SEQ ID NO: 1281453 - RNA, 19 nt, Artificial Sequence
  Description of Artificial Sequence: Synthetic oligonucleotide
gacuaucaggaugaggcag

SEQ ID NO: 1281454 - RNA, 19 nt, Artificial Sequence
  Description of Artificial Sequence: Synthetic oligonucleotide
aaauagccuauuucaggaa

SEQ ID NO: 1281455 - RNA, 19 nt, Artificial Sequence
  Description of Artificial Sequence: Synthetic oligonucleotide
aaaugacuggguccugaca

SEQ ID NO: 1281456 - RNA, 19 nt, Artificial Sequence
  Description of Artificial Sequence: Synthetic oligonucleotide
guccgaaucaccuugggaa

SEQ ID NO: 1281457 - RNA, 19 nt, Artificial Sequence
  Description of Artificial Sequence: Synthetic oligonucleotide
ggauguauacuauuggaga

SEQ ID NO: 1281458 - RNA, 19 nt, Artificial Sequence
  Description of Artificial Sequence: Synthetic oligonucleotide
guuacuuguuagugaaaug

SEQ ID NO: 1281459 - RNA, 19 nt, Artificial Sequence
  Description of Artificial Sequence: Synthetic oligonucleotide
ugauaagcaugggaacagg

SEQ ID NO: 1281460 - RNA, 19 nt, Artificial Sequence
  Description of Artificial Sequence: Synthetic oligonucleotide
ucccuucuugaauuuaugu

SEQ ID NO: 1281461 - RNA, 19 nt, Artificial Sequence
  Description of Artificial Sequence: Synthetic oligonucleotide
acuagacauuucuuaugag

SEQ ID NO: 1281462 - RNA, 19 nt, Artificial Sequence
  Description of Artificial Sequence: Synthetic oligonucleotide
ucuacacuagacauuucuu

SEQ ID NO: 1281463 - RNA, 19 nt, Artificial Sequence
  Description of Artificial Sequence: Synthetic oligonucleotide
gaccacaacacuguguuca

SEQ ID NO: 1281464 - RNA, 19 nt, Artificial Sequence
  Description of Artificial Sequence: Synthetic oligonucleotide
aaaguaagguacagagaug

SEQ ID NO: 1281465 - RNA, 19 nt, Artificial Sequence
  Description of Artificial Sequence: Synthetic oligonucleotide
auagcacauacaucguacu

SEQ ID NO: 1281466 - RNA, 19 nt, Artificial Sequence
  Description of Artificial Sequence: Synthetic oligonucleotide
uaaagggguaugcucugac

SEQ ID NO: 1281467 - RNA, 19 nt, Artificial Sequence
  Description of Artificial Sequence: Synthetic oligonucleotide
agaugcucuuuaugaagag

SEQ ID NO: 1281468 - RNA, 19 nt, Artificial Sequence
  Description of Artificial Sequence: Synthetic oligonucleotide
gaacgauuuccucugcaca

SEQ ID NO: 1281469 - RNA, 19 nt, Artificial Sequence
  Description of Artificial Sequence: Synthetic oligonucleotide
aauaaaccaaccaccugaa

SEQ ID NO: 1281470 - RNA, 19 nt, Artificial Sequence
  Description of Artificial Sequence: Synthetic oligonucleotide
ugggaauaggaaagaaaau

SEQ ID NO: 1281471 - RNA, 19 nt, Artificial Sequence
  Description of Artificial Sequence: Synthetic oligonucleotide
gauguauacuauuggagau

SEQ ID NO: 1281472 - RNA, 19 nt, Artificial Sequence
  Description of Artificial Sequence: Synthetic oligonucleotide
aucuuuacgaagucuguuu

SEQ ID NO: 1281473 - RNA, 19 nt, Artificial Sequence
  Description of Artificial Sequence: Synthetic oligonucleotide
cauuaguucuguuaagcaa

SEQ ID NO: 1281474 - RNA, 19 nt, Artificial Sequence
  Description of Artificial Sequence: Synthetic oligonucleotide
aguaaagggguaugcucug

SEQ ID NO: 1281475 - RNA, 19 nt, Artificial Sequence
  Description of Artificial Sequence: Synthetic oligonucleotide
gauucugacaaagacccaa

SEQ ID NO: 1281476 - RNA, 19 nt, Artificial Sequence
  Description of Artificial Sequence: Synthetic oligonucleotide
guggaaucaaacucauaac

SEQ ID NO: 1281477 - RNA, 19 nt, Artificial Sequence
  Description of Artificial Sequence: Synthetic oligonucleotide
cacuagacauuucuuauga

SEQ ID NO: 1281478 - RNA, 19 nt, Artificial Sequence
  Description of Artificial Sequence: Synthetic oligonucleotide
gauuucaguauuaacaguu

SEQ ID NO: 1281479 - RNA, 19 nt, Artificial Sequence
  Description of Artificial Sequence: Synthetic oligonucleotide
gaggcagaugcccacuaug

SEQ ID NO: 1281480 - RNA, 19 nt, Artificial Sequence
  Description of Artificial Sequence: Synthetic oligonucleotide
auuaacaguugcugaaauu

SEQ ID NO: 1281481 - RNA, 19 nt, Artificial Sequence
  Description of Artificial Sequence: Synthetic oligonucleotide
ggaacuaagaugacguggc

SEQ ID NO: 1281482 - RNA, 19 nt, Artificial Sequence
  Description of Artificial Sequence: Synthetic oligonucleotide
cuaauuugaugccugaagu

SEQ ID NO: 1281483 - RNA, 19 nt, Artificial Sequence
  Description of Artificial Sequence: Synthetic oligonucleotide
gaaaaguaagguacagaga

SEQ ID NO: 1281484 - RNA, 19 nt, Artificial Sequence
  Description of Artificial Sequence: Synthetic oligonucleotide
uagaucaaauagccuauuu

SEQ ID NO: 1281485 - RNA, 19 nt, Artificial Sequence
  Description of Artificial Sequence: Synthetic oligonucleotide
ucauaauacauugccucaa

SEQ ID NO: 1281486 - RNA, 19 nt, Artificial Sequence
  Description of Artificial Sequence: Synthetic oligonucleotide
uuagcugaugcuucaccaa

SEQ ID NO: 1281487 - RNA, 19 nt, Artificial Sequence
  Description of Artificial Sequence: Synthetic oligonucleotide
uaaagaucuaggucuucau

SEQ ID NO: 1281488 - RNA, 19 nt, Artificial Sequence
  Description of Artificial Sequence: Synthetic oligonucleotide
auuaacauugaagcuccca

SEQ ID NO: 1281489 - RNA, 19 nt, Artificial Sequence
  Description of Artificial Sequence: Synthetic oligonucleotide
acuugcagugauaagcaug

SEQ ID NO: 1281490 - RNA, 19 nt, Artificial Sequence
  Description of Artificial Sequence: Synthetic oligonucleotide
cagaguccgaaucaccuug

SEQ ID NO: 1281491 - RNA, 19 nt, Artificial Sequence
  Description of Artificial Sequence: Synthetic oligonucleotide
aggaacgugauuacacuag

SEQ ID NO: 1281492 - RNA, 19 nt, Artificial Sequence
  Description of Artificial Sequence: Synthetic oligonucleotide
ucucccuucuugaauuuau

SEQ ID NO: 1281493 - RNA, 19 nt, Artificial Sequence
  Description of Artificial Sequence: Synthetic oligonucleotide
gaacuaagaugacguggcc

SEQ ID NO: 1281494 - RNA, 19 nt, Artificial Sequence
  Description of Artificial Sequence: Synthetic oligonucleotide
aacccaauacaugaacgau

SEQ ID NO: 1281495 - RNA, 19 nt, Artificial Sequence
  Description of Artificial Sequence: Synthetic oligonucleotide
cuauauugaggauuuuaaa

SEQ ID NO: 1281496 - RNA, 19 nt, Artificial Sequence
  Description of Artificial Sequence: Synthetic oligonucleotide
auguucugaugugaguggg

SEQ ID NO: 1281497 - RNA, 19 nt, Artificial Sequence
  Description of Artificial Sequence: Synthetic oligonucleotide
gugauaagcaugggaacag

SEQ ID NO: 1281498 - RNA, 19 nt, Artificial Sequence
  Description of Artificial Sequence: Synthetic oligonucleotide
cauacaucguacucaucuc

SEQ ID NO: 1281499 - RNA, 19 nt, Artificial Sequence
  Description of Artificial Sequence: Synthetic oligonucleotide
aagguacagagauguuccu

SEQ ID NO: 1281500 - RNA, 19 nt, Artificial Sequence
  Description of Artificial Sequence: Synthetic oligonucleotide
auaauacauugccucaaua

SEQ ID NO: 1281501 - RNA, 19 nt, Artificial Sequence
  Description of Artificial Sequence: Synthetic oligonucleotide
ccaccugaaagucacacag

SEQ ID NO: 1281502 - RNA, 19 nt, Artificial Sequence
  Description of Artificial Sequence: Synthetic oligonucleotide
uuuacgaagucuguuucuu

SEQ ID NO: 1281503 - RNA, 19 nt, Artificial Sequence
  Description of Artificial Sequence: Synthetic oligonucleotide
auacauugccucaauacau

SEQ ID NO: 1281504 - RNA, 19 nt, Artificial Sequence
  Description of Artificial Sequence: Synthetic oligonucleotide
cagugauaagcaugggaac

SEQ ID NO: 1281505 - RNA, 19 nt, Artificial Sequence
  Description of Artificial Sequence: Synthetic oligonucleotide
aacuagcauaagaugcucu

SEQ ID NO: 1281506 - RNA, 19 nt, Artificial Sequence
  Description of Artificial Sequence: Synthetic oligonucleotide
cauauaccuaaauaaacau

SEQ ID NO: 1281507 - RNA, 19 nt, Artificial Sequence
  Description of Artificial Sequence: Synthetic oligonucleotide
guagucugaagacucuguc

SEQ ID NO: 1281508 - RNA, 19 nt, Artificial Sequence
  Description of Artificial Sequence: Synthetic oligonucleotide
agagcuaauuugaugccug

SEQ ID NO: 1281509 - RNA, 19 nt, Artificial Sequence
  Description of Artificial Sequence: Synthetic oligonucleotide
caguauuaacaguugcuga

SEQ ID NO: 1281510 - RNA, 19 nt, Artificial Sequence
  Description of Artificial Sequence: Synthetic oligonucleotide
uggagauaagugucauaga

SEQ ID NO: 1281511 - RNA, 19 nt, Artificial Sequence
  Description of Artificial Sequence: Synthetic oligonucleotide
ggcuaacuagcauaagaug

SEQ ID NO: 1281512 - RNA, 19 nt, Artificial Sequence
  Description of Artificial Sequence: Synthetic oligonucleotide
agagauguuccuguggaau

SEQ ID NO: 1281513 - RNA, 19 nt, Artificial Sequence
  Description of Artificial Sequence: Synthetic oligonucleotide
ggaguaaagggguaugcuc

SEQ ID NO: 1281514 - RNA, 19 nt, Artificial Sequence
  Description of Artificial Sequence: Synthetic oligonucleotide
augaacgauuuccucugca

SEQ ID NO: 1281515 - RNA, 19 nt, Artificial Sequence
  Description of Artificial Sequence: Synthetic oligonucleotide
ugggaguaaagggguaugc

SEQ ID NO: 1281516 - RNA, 19 nt, Artificial Sequence
  Description of Artificial Sequence: Synthetic oligonucleotide
uguuaagcaaaagcacuua

SEQ ID NO: 1281517 - RNA, 19 nt, Artificial Sequence
  Description of Artificial Sequence: Synthetic oligonucleotide
guaauccuguucaccauug

SEQ ID NO: 1281518 - RNA, 19 nt, Artificial Sequence
  Description of Artificial Sequence: Synthetic oligonucleotide
auuugaugccugaaguaca

SEQ ID NO: 1281519 - RNA, 19 nt, Artificial Sequence
  Description of Artificial Sequence: Synthetic oligonucleotide
cauaacacuauacuguuuu

SEQ ID NO: 1281520 - RNA, 19 nt, Artificial Sequence
  Description of Artificial Sequence: Synthetic oligonucleotide
gaguccgaaucaccuuggg

SEQ ID NO: 1281521 - RNA, 19 nt, Artificial Sequence
  Description of Artificial Sequence: Synthetic oligonucleotide
cugugucagaguccgaauc

SEQ ID NO: 1281522 - RNA, 19 nt, Artificial Sequence
  Description of Artificial Sequence: Synthetic oligonucleotide
uauuggagauaagugucau

SEQ ID NO: 1281523 - RNA, 19 nt, Artificial Sequence
  Description of Artificial Sequence: Synthetic oligonucleotide
gucuacacuagacauuucu

SEQ ID NO: 1281524 - RNA, 19 nt, Artificial Sequence
  Description of Artificial Sequence: Synthetic oligonucleotide
ucguacucaucucccuucu

SEQ ID NO: 1281525 - RNA, 19 nt, Artificial Sequence
  Description of Artificial Sequence: Synthetic oligonucleotide
gaguaaagggguaugcucu

SEQ ID NO: 1281526 - RNA, 19 nt, Artificial Sequence
  Description of Artificial Sequence: Synthetic oligonucleotide
cuuagcauucugauuauau

SEQ ID NO: 1281527 - RNA, 19 nt, Artificial Sequence
  Description of Artificial Sequence: Synthetic oligonucleotide
agauguuccuguggaauca

SEQ ID NO: 1281528 - RNA, 19 nt, Artificial Sequence
  Description of Artificial Sequence: Synthetic oligonucleotide
ugcaucacugcugucgguc

SEQ ID NO: 1281529 - RNA, 19 nt, Artificial Sequence
  Description of Artificial Sequence: Synthetic oligonucleotide
ggagauaagugucauagau

SEQ ID NO: 1281530 - RNA, 19 nt, Artificial Sequence
  Description of Artificial Sequence: Synthetic oligonucleotide
uugaagcucccaucauaca

SEQ ID NO: 1281531 - RNA, 19 nt, Artificial Sequence
  Description of Artificial Sequence: Synthetic oligonucleotide
uggguccugacagaagcug

SEQ ID NO: 1281532 - RNA, 19 nt, Artificial Sequence
  Description of Artificial Sequence: Synthetic oligonucleotide
ugcucuuuaugaagaggua

SEQ ID NO: 1281533 - RNA, 19 nt, Artificial Sequence
  Description of Artificial Sequence: Synthetic oligonucleotide
gacaaagacccaaaugacu

SEQ ID NO: 1281534 - RNA, 19 nt, Artificial Sequence
  Description of Artificial Sequence: Synthetic oligonucleotide
acaucguacucaucucccu

SEQ ID NO: 1281535 - RNA, 19 nt, Artificial Sequence
  Description of Artificial Sequence: Synthetic oligonucleotide
cuggaacuaagaugacgug

SEQ ID NO: 1281536 - RNA, 19 nt, Artificial Sequence
  Description of Artificial Sequence: Synthetic oligonucleotide
cacaacacuguguucagua

SEQ ID NO: 1281537 - RNA, 19 nt, Artificial Sequence
  Description of Artificial Sequence: Synthetic oligonucleotide
cccuaaaaugaaauauuug

SEQ ID NO: 1281538 - RNA, 19 nt, Artificial Sequence
  Description of Artificial Sequence: Synthetic oligonucleotide
uccucguagucugaagacu

SEQ ID NO: 1281539 - RNA, 19 nt, Artificial Sequence
  Description of Artificial Sequence: Synthetic oligonucleotide
agggguaugcucugacacu

SEQ ID NO: 1281540 - RNA, 19 nt, Artificial Sequence
  Description of Artificial Sequence: Synthetic oligonucleotide
ucguagucugaagacucug

SEQ ID NO: 1281541 - RNA, 19 nt, Artificial Sequence
  Description of Artificial Sequence: Synthetic oligonucleotide
auuugggaauaggaaagaa

SEQ ID NO: 1281542 - RNA, 19 nt, Artificial Sequence
  Description of Artificial Sequence: Synthetic oligonucleotide
ggauacugaaauauggaaa

SEQ ID NO: 1281543 - RNA, 19 nt, Artificial Sequence
  Description of Artificial Sequence: Synthetic oligonucleotide
ggaaucagauaguacucca

SEQ ID NO: 1281544 - RNA, 19 nt, Artificial Sequence
  Description of Artificial Sequence: Synthetic oligonucleotide
gaugugagugggauucuga

SEQ ID NO: 1281545 - RNA, 19 nt, Artificial Sequence
  Description of Artificial Sequence: Synthetic oligonucleotide
accaccugaaagucacaca

SEQ ID NO: 1281546 - RNA, 19 nt, Artificial Sequence
  Description of Artificial Sequence: Synthetic oligonucleotide
uucaagcuauauugaggau

SEQ ID NO: 1281547 - RNA, 19 nt, Artificial Sequence
  Description of Artificial Sequence: Synthetic oligonucleotide
gcagugauaagcaugggaa

SEQ ID NO: 1281548 - RNA, 19 nt, Artificial Sequence
  Description of Artificial Sequence: Synthetic oligonucleotide
gggaacaggggaaggaucc

SEQ ID NO: 1281549 - RNA, 19 nt, Artificial Sequence
  Description of Artificial Sequence: Synthetic oligonucleotide
gaagcugaaggugggagua

SEQ ID NO: 1281550 - RNA, 19 nt, Artificial Sequence
  Description of Artificial Sequence: Synthetic oligonucleotide
agguacagagauguuccug

SEQ ID NO: 1281551 - RNA, 19 nt, Artificial Sequence
  Description of Artificial Sequence: Synthetic oligonucleotide
gccucaauacauuaguucu

SEQ ID NO: 1281552 - RNA, 19 nt, Artificial Sequence
  Description of Artificial Sequence: Synthetic oligonucleotide
caggggaaggauccuuagc

SEQ ID NO: 1281553 - RNA, 19 nt, Artificial Sequence
  Description of Artificial Sequence: Synthetic oligonucleotide
ucagaguccgaaucaccuu

SEQ ID NO: 1281554 - RNA, 19 nt, Artificial Sequence
  Description of Artificial Sequence: Synthetic oligonucleotide
gcuauauugaggauuuuaa

SEQ ID NO: 1281555 - RNA, 19 nt, Artificial Sequence
  Description of Artificial Sequence: Synthetic oligonucleotide
uguuagugaaauggaugua

SEQ ID NO: 1281556 - RNA, 19 nt, Artificial Sequence
  Description of Artificial Sequence: Synthetic oligonucleotide
gagcuaauuugaugccuga

SEQ ID NO: 1281557 - RNA, 19 nt, Artificial Sequence
  Description of Artificial Sequence: Synthetic oligonucleotide
gccuauuucaggaacguga

SEQ ID NO: 1281558 - RNA, 19 nt, Artificial Sequence
  Description of Artificial Sequence: Synthetic oligonucleotide
ucaauacauuaguucuguu

SEQ ID NO: 1281559 - RNA, 19 nt, Artificial Sequence
  Description of Artificial Sequence: Synthetic oligonucleotide
cacuaugaugaggaaagga

SEQ ID NO: 1281560 - RNA, 19 nt, Artificial Sequence
  Description of Artificial Sequence: Synthetic oligonucleotide
uaaaagugucuuggcuaca

SEQ ID NO: 1281561 - RNA, 19 nt, Artificial Sequence
  Description of Artificial Sequence: Synthetic oligonucleotide
cauagaucaaauagccuau

SEQ ID NO: 1281562 - RNA, 19 nt, Artificial Sequence
  Description of Artificial Sequence: Synthetic oligonucleotide
gguacagagauguuccugu

SEQ ID NO: 1281563 - RNA, 19 nt, Artificial Sequence
  Description of Artificial Sequence: Synthetic oligonucleotide
guuaagcaaaagcacuuau

SEQ ID NO: 1281564 - RNA, 19 nt, Artificial Sequence
  Description of Artificial Sequence: Synthetic oligonucleotide
acauugaagcucccaucau

SEQ ID NO: 1281565 - RNA, 19 nt, Artificial Sequence
  Description of Artificial Sequence: Synthetic oligonucleotide
cauugaagcucccaucaua

SEQ ID NO: 1281566 - RNA, 19 nt, Artificial Sequence
  Description of Artificial Sequence: Synthetic oligonucleotide
ccagagagcuaauuugaug

SEQ ID NO: 1281567 - RNA, 19 nt, Artificial Sequence
  Description of Artificial Sequence: Synthetic oligonucleotide
ugcugucggucucauuguc

SEQ ID NO: 1281568 - RNA, 19 nt, Artificial Sequence
  Description of Artificial Sequence: Synthetic oligonucleotide
aagacccaaaugacugggu

SEQ ID NO: 1281569 - RNA, 19 nt, Artificial Sequence
  Description of Artificial Sequence: Synthetic oligonucleotide
accucuaagagagcagaaa

SEQ ID NO: 1281570 - RNA, 19 nt, Artificial Sequence
  Description of Artificial Sequence: Synthetic oligonucleotide
ugacuggguccugacagaa

SEQ ID NO: 1281571 - RNA, 19 nt, Artificial Sequence
  Description of Artificial Sequence: Synthetic oligonucleotide
ggaacgugauuacacuaga

SEQ ID NO: 1281572 - RNA, 19 nt, Artificial Sequence
  Description of Artificial Sequence: Synthetic oligonucleotide
cucauaacacuauacuguu

SEQ ID NO: 1281573 - RNA, 19 nt, Artificial Sequence
  Description of Artificial Sequence: Synthetic oligonucleotide
gaacgugauuacacuagaa

SEQ ID NO: 1281574 - RNA, 19 nt, Artificial Sequence
  Description of Artificial Sequence: Synthetic oligonucleotide
auaccuaaauaaacauuuu

SEQ ID NO: 1281575 - RNA, 19 nt, Artificial Sequence
  Description of Artificial Sequence: Synthetic oligonucleotide
acccaauacaugaacgauu

SEQ ID NO: 1281576 - RNA, 19 nt, Artificial Sequence
  Description of Artificial Sequence: Synthetic oligonucleotide
aaccucuaagagagcagaa

SEQ ID NO: 1281577 - RNA, 19 nt, Artificial Sequence
  Description of Artificial Sequence: Synthetic oligonucleotide
cuuuacgaagucuguuucu

SEQ ID NO: 1281578 - RNA, 19 nt, Artificial Sequence
  Description of Artificial Sequence: Synthetic oligonucleotide
ugagugggauucugacaaa

SEQ ID NO: 1281579 - RNA, 19 nt, Artificial Sequence
  Description of Artificial Sequence: Synthetic oligonucleotide
uucugaugugagugggauu

SEQ ID NO: 1281580 - RNA, 19 nt, Artificial Sequence
  Description of Artificial Sequence: Synthetic oligonucleotide
gaaggauccuuagcuuauc

SEQ ID NO: 1281581 - RNA, 19 nt, Artificial Sequence
  Description of Artificial Sequence: Synthetic oligonucleotide
gagagcuaauuugaugccu

SEQ ID NO: 1281582 - RNA, 19 nt, Artificial Sequence
  Description of Artificial Sequence: Synthetic oligonucleotide
guauacuauuggagauaag

SEQ ID NO: 1281583 - RNA, 19 nt, Artificial Sequence
  Description of Artificial Sequence: Synthetic oligonucleotide
caucauacaaggccauaua

SEQ ID NO: 1281584 - RNA, 19 nt, Artificial Sequence
  Description of Artificial Sequence: Synthetic oligonucleotide
gugggaguaaagggguaug

SEQ ID NO: 1281585 - RNA, 19 nt, Artificial Sequence
  Description of Artificial Sequence: Synthetic oligonucleotide
caggaacgugauuacacua

SEQ ID NO: 1281586 - RNA, 19 nt, Artificial Sequence
  Description of Artificial Sequence: Synthetic oligonucleotide
agcuaauuugaugccugaa

SEQ ID NO: 1281587 - RNA, 19 nt, Artificial Sequence
  Description of Artificial Sequence: Synthetic oligonucleotide
cuuagcuuaucuccauccu

SEQ ID NO: 1281588 - RNA, 19 nt, Artificial Sequence
  Description of Artificial Sequence: Synthetic oligonucleotide
agccuauuucaggaacgug

SEQ ID NO: 1281589 - RNA, 19 nt, Artificial Sequence
  Description of Artificial Sequence: Synthetic oligonucleotide
caaauagcacauacaucgu

SEQ ID NO: 1281590 - RNA, 19 nt, Artificial Sequence
  Description of Artificial Sequence: Synthetic oligonucleotide
gauguuccuguggaaucaa

SEQ ID NO: 1281591 - RNA, 19 nt, Artificial Sequence
  Description of Artificial Sequence: Synthetic oligonucleotide
cagggaauuagcugaugcu

SEQ ID NO: 1281592 - RNA, 19 nt, Artificial Sequence
  Description of Artificial Sequence: Synthetic oligonucleotide
accaaccaccugaaaguca

SEQ ID NO: 1281593 - RNA, 19 nt, Artificial Sequence
  Description of Artificial Sequence: Synthetic oligonucleotide
augaggcagaugcccacua

SEQ ID NO: 1281594 - RNA, 19 nt, Artificial Sequence
  Description of Artificial Sequence: Synthetic oligonucleotide
augcuucaccaaugcauuu

SEQ ID NO: 1281595 - RNA, 19 nt, Artificial Sequence
  Description of Artificial Sequence: Synthetic oligonucleotide
gaucuuuacgaagucuguu

SEQ ID NO: 1281596 - RNA, 19 nt, Artificial Sequence
  Description of Artificial Sequence: Synthetic oligonucleotide
caguauuugcuauguugua

SEQ ID NO: 1281597 - RNA, 19 nt, Artificial Sequence
  Description of Artificial Sequence: Synthetic oligonucleotide
gucauguucugaugugagu

SEQ ID NO: 1281598 - RNA, 19 nt, Artificial Sequence
  Description of Artificial Sequence: Synthetic oligonucleotide
guaaagggguaugcucuga

SEQ ID NO: 1281599 - RNA, 19 nt, Artificial Sequence
  Description of Artificial Sequence: Synthetic oligonucleotide
caugguucagcagggcuaa

SEQ ID NO: 1281600 - RNA, 19 nt, Artificial Sequence
  Description of Artificial Sequence: Synthetic oligonucleotide
cuguguucaguaauuucau

SEQ ID NO: 1281601 - RNA, 19 nt, Artificial Sequence
  Description of Artificial Sequence: Synthetic oligonucleotide
cccuucuugaauuuaugua

SEQ ID NO: 1281602 - RNA, 19 nt, Artificial Sequence
  Description of Artificial Sequence: Synthetic oligonucleotide
ccgaaucaccuugggaagg

SEQ ID NO: 1281603 - RNA, 19 nt, Artificial Sequence
  Description of Artificial Sequence: Synthetic oligonucleotide
aagcuauauugaggauuuu

SEQ ID NO: 1281604 - RNA, 19 nt, Artificial Sequence
  Description of Artificial Sequence: Synthetic oligonucleotide
uguucaccauugggcugca

SEQ ID NO: 1281605 - RNA, 19 nt, Artificial Sequence
  Description of Artificial Sequence: Synthetic oligonucleotide
agacucaguucuggaacua

SEQ ID NO: 1281606 - RNA, 19 nt, Artificial Sequence
  Description of Artificial Sequence: Synthetic oligonucleotide
cuggaccacaacacugugu

SEQ ID NO: 1281607 - RNA, 19 nt, Artificial Sequence
  Description of Artificial Sequence: Synthetic oligonucleotide
cagggcuaacuagcauaag

SEQ ID NO: 1281608 - RNA, 19 nt, Artificial Sequence
  Description of Artificial Sequence: Synthetic oligonucleotide
cucguagucugaagacucu

SEQ ID NO: 1281609 - RNA, 19 nt, Artificial Sequence
  Description of Artificial Sequence: Synthetic oligonucleotide
gcacauacaucguacucau

SEQ ID NO: 1281610 - RNA, 19 nt, Artificial Sequence
  Description of Artificial Sequence: Synthetic oligonucleotide
gcagggcuaacuagcauaa

SEQ ID NO: 1281611 - RNA, 19 nt, Artificial Sequence
  Description of Artificial Sequence: Synthetic oligonucleotide
gucuucuaaucaauacgau

SEQ ID NO: 1281612 - RNA, 19 nt, Artificial Sequence
  Description of Artificial Sequence: Synthetic oligonucleotide
ccuauuucaggaacgugau

SEQ ID NO: 1281613 - RNA, 19 nt, Artificial Sequence
  Description of Artificial Sequence: Synthetic oligonucleotide
caccugaaagucacacagu

SEQ ID NO: 1281614 - RNA, 19 nt, Artificial Sequence
  Description of Artificial Sequence: Synthetic oligonucleotide
ccaauacaugaacgauuuc

SEQ ID NO: 1281615 - RNA, 19 nt, Artificial Sequence
  Description of Artificial Sequence: Synthetic oligonucleotide
ggaaagaaaaugacaucuu

SEQ ID NO: 1281616 - RNA, 19 nt, Artificial Sequence
  Description of Artificial Sequence: Synthetic oligonucleotide
cuguggaaucaaacucaua

SEQ ID NO: 1281617 - RNA, 19 nt, Artificial Sequence
  Description of Artificial Sequence: Synthetic oligonucleotide
ccuggacaaauuuugugau

SEQ ID NO: 1281618 - RNA, 19 nt, Artificial Sequence
  Description of Artificial Sequence: Synthetic oligonucleotide
ggaccacaacacuguguuc

SEQ ID NO: 1281619 - RNA, 19 nt, Artificial Sequence
  Description of Artificial Sequence: Synthetic oligonucleotide
gcugucggucucauuguca

SEQ ID NO: 1281620 - RNA, 19 nt, Artificial Sequence
  Description of Artificial Sequence: Synthetic oligonucleotide
gggaguaaagggguaugcu

SEQ ID NO: 1281621 - RNA, 19 nt, Artificial Sequence
  Description of Artificial Sequence: Synthetic oligonucleotide
cugcugucggucucauugu

SEQ ID NO: 1281622 - RNA, 19 nt, Artificial Sequence
  Description of Artificial Sequence: Synthetic oligonucleotide
ggaaggauccuuagcuuau

SEQ ID NO: 1281623 - RNA, 19 nt, Artificial Sequence
  Description of Artificial Sequence: Synthetic oligonucleotide
gcacaugguucagcagggc

SEQ ID NO: 1281624 - RNA, 19 nt, Artificial Sequence
  Description of Artificial Sequence: Synthetic oligonucleotide
ggugggaguaaagggguau

SEQ ID NO: 1281625 - RNA, 19 nt, Artificial Sequence
  Description of Artificial Sequence: Synthetic oligonucleotide
cugaagacucugucauguu

SEQ ID NO: 1281626 - RNA, 19 nt, Artificial Sequence
  Description of Artificial Sequence: Synthetic oligonucleotide
gggguaugcucugacacuu

SEQ ID NO: 1281627 - RNA, 19 nt, Artificial Sequence
  Description of Artificial Sequence: Synthetic oligonucleotide
cuaucaggaugaggcagau

SEQ ID NO: 1281628 - RNA, 19 nt, Artificial Sequence
  Description of Artificial Sequence: Synthetic oligonucleotide
cgaaucaccuugggaagga

SEQ ID NO: 1281629 - RNA, 19 nt, Artificial Sequence
  Description of Artificial Sequence: Synthetic oligonucleotide
cagcagggcuaacuagcau

SEQ ID NO: 1281630 - RNA, 19 nt, Artificial Sequence
  Description of Artificial Sequence: Synthetic oligonucleotide
cccagagagcuaauuugau

SEQ ID NO: 1281631 - RNA, 19 nt, Artificial Sequence
  Description of Artificial Sequence: Synthetic oligonucleotide
ccacaacacuguguucagu

SEQ ID NO: 1281632 - RNA, 19 nt, Artificial Sequence
  Description of Artificial Sequence: Synthetic oligonucleotide
aagaggacugauuaauucc

SEQ ID NO: 1281633 - RNA, 19 nt, Artificial Sequence
  Description of Artificial Sequence: Synthetic oligonucleotide
uguacaaucuuuccaaagg

SEQ ID NO: 1281634 - RNA, 19 nt, Artificial Sequence
  Description of Artificial Sequence: Synthetic oligonucleotide
uaggauauagaacacgagg

SEQ ID NO: 1281635 - RNA, 19 nt, Artificial Sequence
  Description of Artificial Sequence: Synthetic oligonucleotide
aagcgcuuuauuuauaguc

SEQ ID NO: 1281636 - RNA, 19 nt, Artificial Sequence
  Description of Artificial Sequence: Synthetic oligonucleotide
acauagaacccauaguagc

SEQ ID NO: 1281637 - RNA, 19 nt, Artificial Sequence
  Description of Artificial Sequence: Synthetic oligonucleotide
aaacguggaguaucgaugg

SEQ ID NO: 1281638 - RNA, 19 nt, Artificial Sequence
  Description of Artificial Sequence: Synthetic oligonucleotide
aauauugccaacaaagagu

SEQ ID NO: 1281639 - RNA, 19 nt, Artificial Sequence
  Description of Artificial Sequence: Synthetic oligonucleotide
aauaaagcgcuuuauuuau

SEQ ID NO: 1281640 - RNA, 19 nt, Artificial Sequence
  Description of Artificial Sequence: Synthetic oligonucleotide
agcaauauugccaacaaag

SEQ ID NO: 1281641 - RNA, 19 nt, Artificial Sequence
  Description of Artificial Sequence: Synthetic oligonucleotide
auugccaacaaagaguggg

SEQ ID NO: 1281642 - RNA, 19 nt, Artificial Sequence
  Description of Artificial Sequence: Synthetic oligonucleotide
aaugguucgcacaucauag

SEQ ID NO: 1281643 - RNA, 19 nt, Artificial Sequence
  Description of Artificial Sequence: Synthetic oligonucleotide
gugagaaccacacugcccg

SEQ ID NO: 1281644 - RNA, 19 nt, Artificial Sequence
  Description of Artificial Sequence: Synthetic oligonucleotide
uagagaugcacaagggagg

SEQ ID NO: 1281645 - RNA, 19 nt, Artificial Sequence
  Description of Artificial Sequence: Synthetic oligonucleotide
uauagagaugcacaaggga

SEQ ID NO: 1281646 - RNA, 19 nt, Artificial Sequence
  Description of Artificial Sequence: Synthetic oligonucleotide
acaucauagauccagcgcu

SEQ ID NO: 1281647 - RNA, 19 nt, Artificial Sequence
  Description of Artificial Sequence: Synthetic oligonucleotide
uggcaacagacauagaacc

SEQ ID NO: 1281648 - RNA, 19 nt, Artificial Sequence
  Description of Artificial Sequence: Synthetic oligonucleotide
aacuucuugguaguggagg

SEQ ID NO: 1281649 - RNA, 19 nt, Artificial Sequence
  Description of Artificial Sequence: Synthetic oligonucleotide
aagagugggagagucacgg

SEQ ID NO: 1281650 - RNA, 19 nt, Artificial Sequence
  Description of Artificial Sequence: Synthetic oligonucleotide
aacccauaguagcugacag

SEQ ID NO: 1281651 - RNA, 19 nt, Artificial Sequence
  Description of Artificial Sequence: Synthetic oligonucleotide
gaggcuacauuugugaucc

SEQ ID NO: 1281652 - RNA, 19 nt, Artificial Sequence
  Description of Artificial Sequence: Synthetic oligonucleotide
agaugguggagccucauag

SEQ ID NO: 1281653 - RNA, 19 nt, Artificial Sequence
  Description of Artificial Sequence: Synthetic oligonucleotide
uaauagucgauguggauaa

SEQ ID NO: 1281654 - RNA, 19 nt, Artificial Sequence
  Description of Artificial Sequence: Synthetic oligonucleotide
aaaacguggaguaucgaug

SEQ ID NO: 1281655 - RNA, 19 nt, Artificial Sequence
  Description of Artificial Sequence: Synthetic oligonucleotide
uuaggauauagaacacgag

SEQ ID NO: 1281656 - RNA, 19 nt, Artificial Sequence
  Description of Artificial Sequence: Synthetic oligonucleotide
uucaccaacuuguaggaga

SEQ ID NO: 1281657 - RNA, 19 nt, Artificial Sequence
  Description of Artificial Sequence: Synthetic oligonucleotide
uucacagcaauauugccaa

SEQ ID NO: 1281658 - RNA, 19 nt, Artificial Sequence
  Description of Artificial Sequence: Synthetic oligonucleotide
ucucaggcgaaucucgaag

SEQ ID NO: 1281659 - RNA, 19 nt, Artificial Sequence
  Description of Artificial Sequence: Synthetic oligonucleotide
agaccuguagguaauaguc

SEQ ID NO: 1281660 - RNA, 19 nt, Artificial Sequence
  Description of Artificial Sequence: Synthetic oligonucleotide
aauaucugggaugcuguuc

SEQ ID NO: 1281661 - RNA, 19 nt, Artificial Sequence
  Description of Artificial Sequence: Synthetic oligonucleotide
ucgagaagaggacugauua

SEQ ID NO: 1281662 - RNA, 19 nt, Artificial Sequence
  Description of Artificial Sequence: Synthetic oligonucleotide
uagucgauguggauaaggc

SEQ ID NO: 1281663 - RNA, 19 nt, Artificial Sequence
  Description of Artificial Sequence: Synthetic oligonucleotide
uugguguacaaucuuucca

SEQ ID NO: 1281664 - RNA, 19 nt, Artificial Sequence
  Description of Artificial Sequence: Synthetic oligonucleotide
ugguucacagcaauauugc

SEQ ID NO: 1281665 - RNA, 19 nt, Artificial Sequence
  Description of Artificial Sequence: Synthetic oligonucleotide
auauagaacacgaggcuac

SEQ ID NO: 1281666 - RNA, 19 nt, Artificial Sequence
  Description of Artificial Sequence: Synthetic oligonucleotide
uuuauagucucuccagguc

SEQ ID NO: 1281667 - RNA, 19 nt, Artificial Sequence
  Description of Artificial Sequence: Synthetic oligonucleotide
acauuugugauccuuggaa

SEQ ID NO: 1281668 - RNA, 19 nt, Artificial Sequence
  Description of Artificial Sequence: Synthetic oligonucleotide
cuuaggauauagaacacga

SEQ ID NO: 1281669 - RNA, 19 nt, Artificial Sequence
  Description of Artificial Sequence: Synthetic oligonucleotide
auauugccaacaaagagug

SEQ ID NO: 1281670 - RNA, 19 nt, Artificial Sequence
  Description of Artificial Sequence: Synthetic oligonucleotide
gaagaggacugauuaauuc

SEQ ID NO: 1281671 - RNA, 19 nt, Artificial Sequence
  Description of Artificial Sequence: Synthetic oligonucleotide
aacacgaggcuacauuugu

SEQ ID NO: 1281672 - RNA, 19 nt, Artificial Sequence
  Description of Artificial Sequence: Synthetic oligonucleotide
ucccuugucagccagugac

SEQ ID NO: 1281673 - RNA, 19 nt, Artificial Sequence
  Description of Artificial Sequence: Synthetic oligonucleotide
caaggguuagcucaccagg

SEQ ID NO: 1281674 - RNA, 19 nt, Artificial Sequence
  Description of Artificial Sequence: Synthetic oligonucleotide
uguaggagaacuucuuggu

SEQ ID NO: 1281675 - RNA, 19 nt, Artificial Sequence
  Description of Artificial Sequence: Synthetic oligonucleotide
uggguugcucaauaucugg

SEQ ID NO: 1281676 - RNA, 19 nt, Artificial Sequence
  Description of Artificial Sequence: Synthetic oligonucleotide
ccuauagagaugcacaagg

SEQ ID NO: 1281677 - RNA, 19 nt, Artificial Sequence
  Description of Artificial Sequence: Synthetic oligonucleotide
ucauagauccagcgcuugg

SEQ ID NO: 1281678 - RNA, 19 nt, Artificial Sequence
  Description of Artificial Sequence: Synthetic oligonucleotide
uauagucucuccagguccc

SEQ ID NO: 1281679 - RNA, 19 nt, Artificial Sequence
  Description of Artificial Sequence: Synthetic oligonucleotide
gacauagaacccauaguag

SEQ ID NO: 1281680 - RNA, 19 nt, Artificial Sequence
  Description of Artificial Sequence: Synthetic oligonucleotide
ugguguacaaucuuuccaa

SEQ ID NO: 1281681 - RNA, 19 nt, Artificial Sequence
  Description of Artificial Sequence: Synthetic oligonucleotide
gucgauguggauaaggcug

SEQ ID NO: 1281682 - RNA, 19 nt, Artificial Sequence
  Description of Artificial Sequence: Synthetic oligonucleotide
auuggguugcucaauaucu

SEQ ID NO: 1281683 - RNA, 19 nt, Artificial Sequence
  Description of Artificial Sequence: Synthetic oligonucleotide
aggacuguagacgacgcgg

SEQ ID NO: 1281684 - RNA, 19 nt, Artificial Sequence
  Description of Artificial Sequence: Synthetic oligonucleotide
auagucgauguggauaagg

SEQ ID NO: 1281685 - RNA, 19 nt, Artificial Sequence
  Description of Artificial Sequence: Synthetic oligonucleotide
gagccuucugcaaaguagg

SEQ ID NO: 1281686 - RNA, 19 nt, Artificial Sequence
  Description of Artificial Sequence: Synthetic oligonucleotide
aguagcugacaguggcugc

SEQ ID NO: 1281687 - RNA, 19 nt, Artificial Sequence
  Description of Artificial Sequence: Synthetic oligonucleotide
ucgauguggauaaggcugc

SEQ ID NO: 1281688 - RNA, 19 nt, Artificial Sequence
  Description of Artificial Sequence: Synthetic oligonucleotide
acccggauagcucggaagg

SEQ ID NO: 1281689 - RNA, 19 nt, Artificial Sequence
  Description of Artificial Sequence: Synthetic oligonucleotide
cagggcaaaggccaggucc

SEQ ID NO: 1281690 - RNA, 19 nt, Artificial Sequence
  Description of Artificial Sequence: Synthetic oligonucleotide
aggucacccggauagcucg

SEQ ID NO: 1281691 - RNA, 19 nt, Artificial Sequence
  Description of Artificial Sequence: Synthetic oligonucleotide
aggccuugacaccuguacc

SEQ ID NO: 1281692 - RNA, 19 nt, Artificial Sequence
  Description of Artificial Sequence: Synthetic oligonucleotide
aaagcgcuuuauuuauagu

SEQ ID NO: 1281693 - RNA, 19 nt, Artificial Sequence
  Description of Artificial Sequence: Synthetic oligonucleotide
acuguagacgacgcggccc

SEQ ID NO: 1281694 - RNA, 19 nt, Artificial Sequence
  Description of Artificial Sequence: Synthetic oligonucleotide
cacaacugaggacaaggcc

SEQ ID NO: 1281695 - RNA, 19 nt, Artificial Sequence
  Description of Artificial Sequence: Synthetic oligonucleotide
gaccuguagguaauagucg

SEQ ID NO: 1281696 - RNA, 19 nt, Artificial Sequence
  Description of Artificial Sequence: Synthetic oligonucleotide
ugaaguagcucuccuccac

SEQ ID NO: 1281697 - RNA, 19 nt, Artificial Sequence
  Description of Artificial Sequence: Synthetic oligonucleotide
ggaagaaucaaggcgcugg

SEQ ID NO: 1281698 - RNA, 19 nt, Artificial Sequence
  Description of Artificial Sequence: Synthetic oligonucleotide
auuaauuccagaggagcca

SEQ ID NO: 1281699 - RNA, 19 nt, Artificial Sequence
  Description of Artificial Sequence: Synthetic oligonucleotide
ugggcaucuugucccaggg

SEQ ID NO: 1281700 - RNA, 19 nt, Artificial Sequence
  Description of Artificial Sequence: Synthetic oligonucleotide
agaacacgaggcuacauuu

SEQ ID NO: 1281701 - RNA, 19 nt, Artificial Sequence
  Description of Artificial Sequence: Synthetic oligonucleotide
cuucagggagaccuguagg

SEQ ID NO: 1281702 - RNA, 19 nt, Artificial Sequence
  Description of Artificial Sequence: Synthetic oligonucleotide
gagugggagagucacggug

SEQ ID NO: 1281703 - RNA, 19 nt, Artificial Sequence
  Description of Artificial Sequence: Synthetic oligonucleotide
agugggguuugguucacag

SEQ ID NO: 1281704 - RNA, 19 nt, Artificial Sequence
  Description of Artificial Sequence: Synthetic oligonucleotide
caaagagugggagagucac

SEQ ID NO: 1281705 - RNA, 19 nt, Artificial Sequence
  Description of Artificial Sequence: Synthetic oligonucleotide
gcuucaggugccuucaggg

SEQ ID NO: 1281706 - RNA, 19 nt, Artificial Sequence
  Description of Artificial Sequence: Synthetic oligonucleotide
uauugccaacaaagagugg

SEQ ID NO: 1281707 - RNA, 19 nt, Artificial Sequence
  Description of Artificial Sequence: Synthetic oligonucleotide
accuguaccuuccaccucu

SEQ ID NO: 1281708 - RNA, 19 nt, Artificial Sequence
  Description of Artificial Sequence: Synthetic oligonucleotide
aguaggggacaguggcacc

SEQ ID NO: 1281709 - RNA, 19 nt, Artificial Sequence
  Description of Artificial Sequence: Synthetic oligonucleotide
ugguucgcacaucauagau

SEQ ID NO: 1281710 - RNA, 19 nt, Artificial Sequence
  Description of Artificial Sequence: Synthetic oligonucleotide
gaacugaaaggggaaguug

SEQ ID NO: 1281711 - RNA, 19 nt, Artificial Sequence
  Description of Artificial Sequence: Synthetic oligonucleotide
agucgauguggauaaggcu

SEQ ID NO: 1281712 - RNA, 19 nt, Artificial Sequence
  Description of Artificial Sequence: Synthetic oligonucleotide
ggcacuacagcucugcuca

SEQ ID NO: 1281713 - RNA, 19 nt, Artificial Sequence
  Description of Artificial Sequence: Synthetic oligonucleotide
gauauagaacacgaggcua

SEQ ID NO: 1281714 - RNA, 19 nt, Artificial Sequence
  Description of Artificial Sequence: Synthetic oligonucleotide
uacaaauaaagcgcuuuau

SEQ ID NO: 1281715 - RNA, 19 nt, Artificial Sequence
  Description of Artificial Sequence: Synthetic oligonucleotide
gguggcaaggguuagcuca

SEQ ID NO: 1281716 - RNA, 19 nt, Artificial Sequence
  Description of Artificial Sequence: Synthetic oligonucleotide
uagcucggaaggcaguggc

SEQ ID NO: 1281717 - RNA, 19 nt, Artificial Sequence
  Description of Artificial Sequence: Synthetic oligonucleotide
aaguugugcucuccagcug

SEQ ID NO: 1281718 - RNA, 19 nt, Artificial Sequence
  Description of Artificial Sequence: Synthetic oligonucleotide
ucgauggaggccuucacuu

SEQ ID NO: 1281719 - RNA, 19 nt, Artificial Sequence
  Description of Artificial Sequence: Synthetic oligonucleotide
cauuggguugcucaauauc

SEQ ID NO: 1281720 - RNA, 19 nt, Artificial Sequence
  Description of Artificial Sequence: Synthetic oligonucleotide
gauagcucggaaggcagug

SEQ ID NO: 1281721 - RNA, 19 nt, Artificial Sequence
  Description of Artificial Sequence: Synthetic oligonucleotide
cugaaaggggaaguugugc

SEQ ID NO: 1281722 - RNA, 19 nt, Artificial Sequence
  Description of Artificial Sequence: Synthetic oligonucleotide
cagcgcuuggccuuauagg

SEQ ID NO: 1281723 - RNA, 19 nt, Artificial Sequence
  Description of Artificial Sequence: Synthetic oligonucleotide
uuggccuuauaggauaccu

SEQ ID NO: 1281724 - RNA, 19 nt, Artificial Sequence
  Description of Artificial Sequence: Synthetic oligonucleotide
guaauagucgauguggaua

SEQ ID NO: 1281725 - RNA, 19 nt, Artificial Sequence
  Description of Artificial Sequence: Synthetic oligonucleotide
acccaugccccaucguugg

SEQ ID NO: 1281726 - RNA, 19 nt, Artificial Sequence
  Description of Artificial Sequence: Synthetic oligonucleotide
cagucgaagcaccuguccc

SEQ ID NO: 1281727 - RNA, 19 nt, Artificial Sequence
  Description of Artificial Sequence: Synthetic oligonucleotide
agaggacugauuaauucca

SEQ ID NO: 1281728 - RNA, 19 nt, Artificial Sequence
  Description of Artificial Sequence: Synthetic oligonucleotide
agucgaagcaccuguccca

SEQ ID NO: 1281729 - RNA, 19 nt, Artificial Sequence
  Description of Artificial Sequence: Synthetic oligonucleotide
aggacugauuaauuccaga

SEQ ID NO: 1281730 - RNA, 19 nt, Artificial Sequence
  Description of Artificial Sequence: Synthetic oligonucleotide
gggaaacugggucugagac

SEQ ID NO: 1281731 - RNA, 19 nt, Artificial Sequence
  Description of Artificial Sequence: Synthetic oligonucleotide
aggcgaaucucgaagagcu

SEQ ID NO: 1281732 - RNA, 19 nt, Artificial Sequence
  Description of Artificial Sequence: Synthetic oligonucleotide
ugagcacgccuccaggccu

SEQ ID NO: 1281733 - RNA, 19 nt, Artificial Sequence
  Description of Artificial Sequence: Synthetic oligonucleotide
ugucucaggcgaaucucga

SEQ ID NO: 1281734 - RNA, 19 nt, Artificial Sequence
  Description of Artificial Sequence: Synthetic oligonucleotide
agggguagccccaugaacu

SEQ ID NO: 1281735 - RNA, 19 nt, Artificial Sequence
  Description of Artificial Sequence: Synthetic oligonucleotide
acgaaggucagugcuagcu

SEQ ID NO: 1281736 - RNA, 19 nt, Artificial Sequence
  Description of Artificial Sequence: Synthetic oligonucleotide
guggcaacagacauagaac

SEQ ID NO: 1281737 - RNA, 19 nt, Artificial Sequence
  Description of Artificial Sequence: Synthetic oligonucleotide
guaguggaggccacauugg

SEQ ID NO: 1281738 - RNA, 19 nt, Artificial Sequence
  Description of Artificial Sequence: Synthetic oligonucleotide
gcagagaaugucgagcagg

SEQ ID NO: 1281739 - RNA, 19 nt, Artificial Sequence
  Description of Artificial Sequence: Synthetic oligonucleotide
aaaguaggggacaguggca

SEQ ID NO: 1281740 - RNA, 19 nt, Artificial Sequence
  Description of Artificial Sequence: Synthetic oligonucleotide
gcuuaggauauagaacacg

SEQ ID NO: 1281741 - RNA, 19 nt, Artificial Sequence
  Description of Artificial Sequence: Synthetic oligonucleotide
caggccuugacaccuguac

SEQ ID NO: 1281742 - RNA, 19 nt, Artificial Sequence
  Description of Artificial Sequence: Synthetic oligonucleotide
aagaaucaaggcgcuggug

SEQ ID NO: 1281743 - RNA, 19 nt, Artificial Sequence
  Description of Artificial Sequence: Synthetic oligonucleotide
cauuccucucgagaagagg

SEQ ID NO: 1281744 - RNA, 19 nt, Artificial Sequence
  Description of Artificial Sequence: Synthetic oligonucleotide
uauagaacacgaggcuaca

SEQ ID NO: 1281745 - RNA, 19 nt, Artificial Sequence
  Description of Artificial Sequence: Synthetic oligonucleotide
agaaccacacugcccgucu

SEQ ID NO: 1281746 - RNA, 19 nt, Artificial Sequence
  Description of Artificial Sequence: Synthetic oligonucleotide
ggccuuauaggauaccuuc

SEQ ID NO: 1281747 - RNA, 19 nt, Artificial Sequence
  Description of Artificial Sequence: Synthetic oligonucleotide
acguggaguaucgauggag

SEQ ID NO: 1281748 - RNA, 19 nt, Artificial Sequence
  Description of Artificial Sequence: Synthetic oligonucleotide
aagaagguggcaaggguua

SEQ ID NO: 1281749 - RNA, 19 nt, Artificial Sequence
  Description of Artificial Sequence: Synthetic oligonucleotide
cacgaggcuacauuuguga

SEQ ID NO: 1281750 - RNA, 19 nt, Artificial Sequence
  Description of Artificial Sequence: Synthetic oligonucleotide
uagauccagcgcuuggccu

SEQ ID NO: 1281751 - RNA, 19 nt, Artificial Sequence
  Description of Artificial Sequence: Synthetic oligonucleotide
acagggaucaaugguggca

SEQ ID NO: 1281752 - RNA, 19 nt, Artificial Sequence
  Description of Artificial Sequence: Synthetic oligonucleotide
gaggacugauuaauuccag

SEQ ID NO: 1281753 - RNA, 19 nt, Artificial Sequence
  Description of Artificial Sequence: Synthetic oligonucleotide
gauguggauaaggcugcag

SEQ ID NO: 1281754 - RNA, 19 nt, Artificial Sequence
  Description of Artificial Sequence: Synthetic oligonucleotide
aauagucgauguggauaag

SEQ ID NO: 1281755 - RNA, 19 nt, Artificial Sequence
  Description of Artificial Sequence: Synthetic oligonucleotide
gacuucccuugucagccag

SEQ ID NO: 1281756 - RNA, 19 nt, Artificial Sequence
  Description of Artificial Sequence: Synthetic oligonucleotide
caaggggucgucccaucgg

SEQ ID NO: 1281757 - RNA, 19 nt, Artificial Sequence
  Description of Artificial Sequence: Synthetic oligonucleotide
accuauagagaugcacaag

SEQ ID NO: 1281758 - RNA, 19 nt, Artificial Sequence
  Description of Artificial Sequence: Synthetic oligonucleotide
caagggagggugcagagaa

SEQ ID NO: 1281759 - RNA, 19 nt, Artificial Sequence
  Description of Artificial Sequence: Synthetic oligonucleotide
agguccaccgaagaaggug

SEQ ID NO: 1281760 - RNA, 19 nt, Artificial Sequence
  Description of Artificial Sequence: Synthetic oligonucleotide
uggagccucauagggguag

SEQ ID NO: 1281761 - RNA, 19 nt, Artificial Sequence
  Description of Artificial Sequence: Synthetic oligonucleotide
aacguggaguaucgaugga

SEQ ID NO: 1281762 - RNA, 19 nt, Artificial Sequence
  Description of Artificial Sequence: Synthetic oligonucleotide
acugcccgucuucaccaac

SEQ ID NO: 1281763 - RNA, 19 nt, Artificial Sequence
  Description of Artificial Sequence: Synthetic oligonucleotide
ugcacccucccaucccgcg

SEQ ID NO: 1281764 - RNA, 19 nt, Artificial Sequence
  Description of Artificial Sequence: Synthetic oligonucleotide
ccuucugcaaaguagggga

SEQ ID NO: 1281765 - RNA, 19 nt, Artificial Sequence
  Description of Artificial Sequence: Synthetic oligonucleotide
ucaaaagaugugggugcug

SEQ ID NO: 1281766 - RNA, 19 nt, Artificial Sequence
  Description of Artificial Sequence: Synthetic oligonucleotide
cugagcacgccuccaggcc

SEQ ID NO: 1281767 - RNA, 19 nt, Artificial Sequence
  Description of Artificial Sequence: Synthetic oligonucleotide
ccagguccaccgaagaagg

SEQ ID NO: 1281768 - RNA, 19 nt, Artificial Sequence
  Description of Artificial Sequence: Synthetic oligonucleotide
ugacaccuguaccuuccac

SEQ ID NO: 1281769 - RNA, 19 nt, Artificial Sequence
  Description of Artificial Sequence: Synthetic oligonucleotide
augguucgcacaucauaga

SEQ ID NO: 1281770 - RNA, 19 nt, Artificial Sequence
  Description of Artificial Sequence: Synthetic oligonucleotide
caccgaagaagguggcaag

SEQ ID NO: 1281771 - RNA, 19 nt, Artificial Sequence
  Description of Artificial Sequence: Synthetic oligonucleotide
agggaucaaugguggcaac

SEQ ID NO: 1281772 - RNA, 19 nt, Artificial Sequence
  Description of Artificial Sequence: Synthetic oligonucleotide
agauccagcgcuuggccuu

SEQ ID NO: 1281773 - RNA, 19 nt, Artificial Sequence
  Description of Artificial Sequence: Synthetic oligonucleotide
uccucucgagaagaggacu

SEQ ID NO: 1281774 - RNA, 19 nt, Artificial Sequence
  Description of Artificial Sequence: Synthetic oligonucleotide
auagggguagccccaugaa

SEQ ID NO: 1281775 - RNA, 19 nt, Artificial Sequence
  Description of Artificial Sequence: Synthetic oligonucleotide
cacagcaauauugccaaca

SEQ ID NO: 1281776 - RNA, 19 nt, Artificial Sequence
  Description of Artificial Sequence: Synthetic oligonucleotide
acauuggguugcucaauau

SEQ ID NO: 1281777 - RNA, 19 nt, Artificial Sequence
  Description of Artificial Sequence: Synthetic oligonucleotide
cacccggauagcucggaag

SEQ ID NO: 1281778 - RNA, 19 nt, Artificial Sequence
  Description of Artificial Sequence: Synthetic oligonucleotide
ccuuauaggauaccuucug

SEQ ID NO: 1281779 - RNA, 19 nt, Artificial Sequence
  Description of Artificial Sequence: Synthetic oligonucleotide
cacccaugccccaucguug

SEQ ID NO: 1281780 - RNA, 19 nt, Artificial Sequence
  Description of Artificial Sequence: Synthetic oligonucleotide
acugaaaggggaaguugug

SEQ ID NO: 1281781 - RNA, 19 nt, Artificial Sequence
  Description of Artificial Sequence: Synthetic oligonucleotide
aaggucagugcuagcugug

SEQ ID NO: 1281782 - RNA, 19 nt, Artificial Sequence
  Description of Artificial Sequence: Synthetic oligonucleotide
gagaccuguagguaauagu

SEQ ID NO: 1281783 - RNA, 19 nt, Artificial Sequence
  Description of Artificial Sequence: Synthetic oligonucleotide
aucauagauccagcgcuug

SEQ ID NO: 1281784 - RNA, 19 nt, Artificial Sequence
  Description of Artificial Sequence: Synthetic oligonucleotide
ucuugguaguggaggccac

SEQ ID NO: 1281785 - RNA, 19 nt, Artificial Sequence
  Description of Artificial Sequence: Synthetic oligonucleotide
gcaaggguuagcucaccag

SEQ ID NO: 1281786 - RNA, 19 nt, Artificial Sequence
  Description of Artificial Sequence: Synthetic oligonucleotide
gaagguggcaaggguuagc

SEQ ID NO: 1281787 - RNA, 19 nt, Artificial Sequence
  Description of Artificial Sequence: Synthetic oligonucleotide
caggacuguagacgacgcg

SEQ ID NO: 1281788 - RNA, 19 nt, Artificial Sequence
  Description of Artificial Sequence: Synthetic oligonucleotide
caggcgaaucucgaagagc

SEQ ID NO: 1281789 - RNA, 19 nt, Artificial Sequence
  Description of Artificial Sequence: Synthetic oligonucleotide
ggguugcucaauaucuggg

SEQ ID NO: 1281790 - RNA, 19 nt, Artificial Sequence
  Description of Artificial Sequence: Synthetic oligonucleotide
acgaggcuacauuugugau

SEQ ID NO: 1281791 - RNA, 19 nt, Artificial Sequence
  Description of Artificial Sequence: Synthetic oligonucleotide
uggccuuauaggauaccuu

SEQ ID NO: 1281792 - RNA, 19 nt, Artificial Sequence
  Description of Artificial Sequence: Synthetic oligonucleotide
cacagggaucaaugguggc

SEQ ID NO: 1281793 - RNA, 19 nt, Artificial Sequence
  Description of Artificial Sequence: Synthetic oligonucleotide
ugucgagcagggcuuccaa

SEQ ID NO: 1281794 - RNA, 19 nt, Artificial Sequence
  Description of Artificial Sequence: Synthetic oligonucleotide
gaagaaucaaggcgcuggu

SEQ ID NO: 1281795 - RNA, 19 nt, Artificial Sequence
  Description of Artificial Sequence: Synthetic oligonucleotide
ugcagucgaagcaccuguc

SEQ ID NO: 1281796 - RNA, 19 nt, Artificial Sequence
  Description of Artificial Sequence: Synthetic oligonucleotide
gcgaaucucgaagagcugc

SEQ ID NO: 1281797 - RNA, 19 nt, Artificial Sequence
  Description of Artificial Sequence: Synthetic oligonucleotide
guagcugggccagguagag

SEQ ID NO: 1281798 - RNA, 19 nt, Artificial Sequence
  Description of Artificial Sequence: Synthetic oligonucleotide
gcaacagacauagaaccca

SEQ ID NO: 1281799 - RNA, 19 nt, Artificial Sequence
  Description of Artificial Sequence: Synthetic oligonucleotide
agaaugucgagcagggcuu

SEQ ID NO: 1281800 - RNA, 19 nt, Artificial Sequence
  Description of Artificial Sequence: Synthetic oligonucleotide
ucaaggcgcuggugguggg

SEQ ID NO: 1281801 - RNA, 19 nt, Artificial Sequence
  Description of Artificial Sequence: Synthetic oligonucleotide
ggauauagaacacgaggcu

SEQ ID NO: 1281802 - RNA, 19 nt, Artificial Sequence
  Description of Artificial Sequence: Synthetic oligonucleotide
agguggcaaggguuagcuc

SEQ ID NO: 1281803 - RNA, 19 nt, Artificial Sequence
  Description of Artificial Sequence: Synthetic oligonucleotide
guuugguucacagcaauau

SEQ ID NO: 1281804 - RNA, 19 nt, Artificial Sequence
  Description of Artificial Sequence: Synthetic oligonucleotide
caccuauagagaugcacaa

SEQ ID NO: 1281805 - RNA, 19 nt, Artificial Sequence
  Description of Artificial Sequence: Synthetic oligonucleotide
ggcaacagacauagaaccc

SEQ ID NO: 1281806 - RNA, 19 nt, Artificial Sequence
  Description of Artificial Sequence: Synthetic oligonucleotide
ucgucccaucggcugcagg

SEQ ID NO: 1281807 - RNA, 19 nt, Artificial Sequence
  Description of Artificial Sequence: Synthetic oligonucleotide
ggggcuuaggauauagaac

SEQ ID NO: 1281808 - RNA, 19 nt, Artificial Sequence
  Description of Artificial Sequence: Synthetic oligonucleotide
caccaggaucuguucuugc

SEQ ID NO: 1281809 - RNA, 19 nt, Artificial Sequence
  Description of Artificial Sequence: Synthetic oligonucleotide
gacgcggcccugucucagg

SEQ ID NO: 1281810 - RNA, 19 nt, Artificial Sequence
  Description of Artificial Sequence: Synthetic oligonucleotide
uucccuugucagccaguga

SEQ ID NO: 1281811 - RNA, 19 nt, Artificial Sequence
  Description of Artificial Sequence: Synthetic oligonucleotide
ucccagaucccugccgccc

SEQ ID NO: 1281812 - RNA, 19 nt, Artificial Sequence
  Description of Artificial Sequence: Synthetic oligonucleotide
ugagaaccacacugcccgu

SEQ ID NO: 1281813 - RNA, 19 nt, Artificial Sequence
  Description of Artificial Sequence: Synthetic oligonucleotide
ggagaccuguagguaauag

SEQ ID NO: 1281814 - RNA, 19 nt, Artificial Sequence
  Description of Artificial Sequence: Synthetic oligonucleotide
ggcaccuauagagaugcac

SEQ ID NO: 1281815 - RNA, 19 nt, Artificial Sequence
  Description of Artificial Sequence: Synthetic oligonucleotide
ggaucuguucuugccacug

SEQ ID NO: 1281816 - RNA, 19 nt, Artificial Sequence
  Description of Artificial Sequence: Synthetic oligonucleotide
gguuagcucaccaggguca

SEQ ID NO: 1281817 - RNA, 19 nt, Artificial Sequence
  Description of Artificial Sequence: Synthetic oligonucleotide
gguggagccucauaggggu

SEQ ID NO: 1281818 - RNA, 19 nt, Artificial Sequence
  Description of Artificial Sequence: Synthetic oligonucleotide
ucacccggauagcucggaa

SEQ ID NO: 1281819 - RNA, 19 nt, Artificial Sequence
  Description of Artificial Sequence: Synthetic oligonucleotide
auagaacacgaggcuacau

SEQ ID NO: 1281820 - RNA, 19 nt, Artificial Sequence
  Description of Artificial Sequence: Synthetic oligonucleotide
ccagcgcuuggccuuauag

SEQ ID NO: 1281821 - RNA, 19 nt, Artificial Sequence
  Description of Artificial Sequence: Synthetic oligonucleotide
gcccugggcaucuuguccc

SEQ ID NO: 1281822 - RNA, 19 nt, Artificial Sequence
  Description of Artificial Sequence: Synthetic oligonucleotide
uguccuugccugacugguu

SEQ ID NO: 1281823 - RNA, 19 nt, Artificial Sequence
  Description of Artificial Sequence: Synthetic oligonucleotide
uagacgacgcggcccuguc

SEQ ID NO: 1281824 - RNA, 19 nt, Artificial Sequence
  Description of Artificial Sequence: Synthetic oligonucleotide
gcgcuuuauuuauagucuc

SEQ ID NO: 1281825 - RNA, 19 nt, Artificial Sequence
  Description of Artificial Sequence: Synthetic oligonucleotide
ugccgcccuaccccauucc

SEQ ID NO: 1281826 - RNA, 19 nt, Artificial Sequence
  Description of Artificial Sequence: Synthetic oligonucleotide
acacgaggcuacauuugug

SEQ ID NO: 1281827 - RNA, 19 nt, Artificial Sequence
  Description of Artificial Sequence: Synthetic oligonucleotide
aggcgcacgcgcacggccc

SEQ ID NO: 1281828 - RNA, 19 nt, Artificial Sequence
  Description of Artificial Sequence: Synthetic oligonucleotide
gguucgcacaucauagauc

SEQ ID NO: 1281829 - RNA, 19 nt, Artificial Sequence
  Description of Artificial Sequence: Synthetic oligonucleotide
acgccuccaggccuugaca

SEQ ID NO: 1281830 - RNA, 19 nt, Artificial Sequence
  Description of Artificial Sequence: Synthetic oligonucleotide
cacgccuccaggccuugac

SEQ ID NO: 1281831 - RNA, 19 nt, Artificial Sequence
  Description of Artificial Sequence: Synthetic oligonucleotide
auaaagcgcuuuauuuaua

SEQ ID NO: 1281832 - RNA, 19 nt, Artificial Sequence
  Description of Artificial Sequence: Synthetic oligonucleotide
ugguaguggaggccacauu

SEQ ID NO: 1281833 - RNA, 19 nt, Artificial Sequence
  Description of Artificial Sequence: Synthetic oligonucleotide
cccaucguuggccuuguug

SEQ ID NO: 1281834 - RNA, 19 nt, Artificial Sequence
  Description of Artificial Sequence: Synthetic oligonucleotide
ugucccgcgccgcggucug

SEQ ID NO: 1281835 - RNA, 19 nt, Artificial Sequence
  Description of Artificial Sequence: Synthetic oligonucleotide
caucguuggccuuguugga

SEQ ID NO: 1281836 - RNA, 19 nt, Artificial Sequence
  Description of Artificial Sequence: Synthetic oligonucleotide
ccaccacauagccacgaag

SEQ ID NO: 1281837 - RNA, 19 nt, Artificial Sequence
  Description of Artificial Sequence: Synthetic oligonucleotide
cagggaucaaugguggcaa

SEQ ID NO: 1281838 - RNA, 19 nt, Artificial Sequence
  Description of Artificial Sequence: Synthetic oligonucleotide
ggggucgucccaucggcug

SEQ ID NO: 1281839 - RNA, 19 nt, Artificial Sequence
  Description of Artificial Sequence: Synthetic oligonucleotide
gucucaggcgaaucucgaa

SEQ ID NO: 1281840 - RNA, 19 nt, Artificial Sequence
  Description of Artificial Sequence: Synthetic oligonucleotide
guagacagggaaacugggu

SEQ ID NO: 1281841 - RNA, 19 nt, Artificial Sequence
  Description of Artificial Sequence: Synthetic oligonucleotide
cagcaauauugccaacaaa

SEQ ID NO: 1281842 - RNA, 19 nt, Artificial Sequence
  Description of Artificial Sequence: Synthetic oligonucleotide
agacgacgcggcccugucu

SEQ ID NO: 1281843 - RNA, 19 nt, Artificial Sequence
  Description of Artificial Sequence: Synthetic oligonucleotide
gcaguggcgcucccaggcg

SEQ ID NO: 1281844 - RNA, 19 nt, Artificial Sequence
  Description of Artificial Sequence: Synthetic oligonucleotide
augucgagcagggcuucca

SEQ ID NO: 1281845 - RNA, 19 nt, Artificial Sequence
  Description of Artificial Sequence: Synthetic oligonucleotide
ggucuguacuggcacuaca

SEQ ID NO: 1281846 - RNA, 19 nt, Artificial Sequence
  Description of Artificial Sequence: Synthetic oligonucleotide
uggcaccuauagagaugca

SEQ ID NO: 1281847 - RNA, 19 nt, Artificial Sequence
  Description of Artificial Sequence: Synthetic oligonucleotide
guagcugacaguggcugcu

SEQ ID NO: 1281848 - RNA, 19 nt, Artificial Sequence
  Description of Artificial Sequence: Synthetic oligonucleotide
gggucgucccaucggcugc

SEQ ID NO: 1281849 - RNA, 19 nt, Artificial Sequence
  Description of Artificial Sequence: Synthetic oligonucleotide
gguaauagucgauguggau

SEQ ID NO: 1281850 - RNA, 19 nt, Artificial Sequence
  Description of Artificial Sequence: Synthetic oligonucleotide
cugcagucgaagcaccugu

SEQ ID NO: 1281851 - RNA, 19 nt, Artificial Sequence
  Description of Artificial Sequence: Synthetic oligonucleotide
ggagagucacgguggcuuc

SEQ ID NO: 1281852 - RNA, 19 nt, Artificial Sequence
  Description of Artificial Sequence: Synthetic oligonucleotide
gcuaguguccuugccugac

SEQ ID NO: 1281853 - RNA, 19 nt, Artificial Sequence
  Description of Artificial Sequence: Synthetic oligonucleotide
guaggggacaguggcaccu

SEQ ID NO: 1281854 - RNA, 19 nt, Artificial Sequence
  Description of Artificial Sequence: Synthetic oligonucleotide
aaacugggucugagacgug

SEQ ID NO: 1281855 - RNA, 19 nt, Artificial Sequence
  Description of Artificial Sequence: Synthetic oligonucleotide
gcacccucccaucccgcgg

SEQ ID NO: 1281856 - RNA, 19 nt, Artificial Sequence
  Description of Artificial Sequence: Synthetic oligonucleotide
ggacaguggcaccuauaga

SEQ ID NO: 1281857 - RNA, 19 nt, Artificial Sequence
  Description of Artificial Sequence: Synthetic oligonucleotide
ugguggcaacagacauaga

SEQ ID NO: 1281858 - RNA, 19 nt, Artificial Sequence
  Description of Artificial Sequence: Synthetic oligonucleotide
agcaccugucccaccacau

SEQ ID NO: 1281859 - RNA, 19 nt, Artificial Sequence
  Description of Artificial Sequence: Synthetic oligonucleotide
cuguagacgacgcggcccu

SEQ ID NO: 1281860 - RNA, 19 nt, Artificial Sequence
  Description of Artificial Sequence: Synthetic oligonucleotide
cucccaggcgcacgcgcac

SEQ ID NO: 1281861 - RNA, 19 nt, Artificial Sequence
  Description of Artificial Sequence: Synthetic oligonucleotide
guccaccgaagaagguggc

SEQ ID NO: 1281862 - RNA, 19 nt, Artificial Sequence
  Description of Artificial Sequence: Synthetic oligonucleotide
ggccacuagccacugccuc

SEQ ID NO: 1281863 - RNA, 19 nt, Artificial Sequence
  Description of Artificial Sequence: Synthetic oligonucleotide
gggcaucuugucccagggc

SEQ ID NO: 1281864 - RNA, 19 nt, Artificial Sequence
  Description of Artificial Sequence: Synthetic oligonucleotide
gcuagcugugagaaccaca

SEQ ID NO: 1281865 - RNA, 19 nt, Artificial Sequence
  Description of Artificial Sequence: Synthetic oligonucleotide
ggcgcucccaggcgcacgc

SEQ ID NO: 1281866 - RNA, 19 nt, Artificial Sequence
  Description of Artificial Sequence: Synthetic oligonucleotide
cucgagaagaggacugauu

SEQ ID NO: 1281867 - RNA, 19 nt, Artificial Sequence
  Description of Artificial Sequence: Synthetic oligonucleotide
gucccaucggcugcagguc

SEQ ID NO: 1281868 - RNA, 19 nt, Artificial Sequence
  Description of Artificial Sequence: Synthetic oligonucleotide
caucauagauccagcgcuu

SEQ ID NO: 1281869 - RNA, 19 nt, Artificial Sequence
  Description of Artificial Sequence: Synthetic oligonucleotide
acgacgcggcccugucuca

SEQ ID NO: 1281870 - RNA, 19 nt, Artificial Sequence
  Description of Artificial Sequence: Synthetic oligonucleotide
gggaagaaucaaggcgcug

SEQ ID NO: 1281871 - RNA, 19 nt, Artificial Sequence
  Description of Artificial Sequence: Synthetic oligonucleotide
cugcccgucuucaccaacu

SEQ ID NO: 1281872 - RNA, 19 nt, Artificial Sequence
  Description of Artificial Sequence: Synthetic oligonucleotide
uccagcgcuuggccuuaua

SEQ ID NO: 1281873 - RNA, 19 nt, Artificial Sequence
  Description of Artificial Sequence: Synthetic oligonucleotide
cugccgcccuaccccauuc

SEQ ID NO: 1281874 - RNA, 19 nt, Artificial Sequence
  Description of Artificial Sequence: Synthetic oligonucleotide
caggugccuucagggagac

SEQ ID NO: 1281875 - RNA, 19 nt, Artificial Sequence
  Description of Artificial Sequence: Synthetic oligonucleotide
gccagugacagggagcugu

SEQ ID NO: 1281876 - RNA, 19 nt, Artificial Sequence
  Description of Artificial Sequence: Synthetic oligonucleotide
ggucacccggauagcucgg

SEQ ID NO: 1281877 - RNA, 19 nt, Artificial Sequence
  Description of Artificial Sequence: Synthetic oligonucleotide
aggcuacauuugugauccu

SEQ ID NO: 1281878 - RNA, 19 nt, Artificial Sequence
  Description of Artificial Sequence: Synthetic oligonucleotide
augucagccugcagucgaa

SEQ ID NO: 1281879 - RNA, 19 nt, Artificial Sequence
  Description of Artificial Sequence: Synthetic oligonucleotide
cagaucccugccgcccuac

SEQ ID NO: 1281880 - RNA, 19 nt, Artificial Sequence
  Description of Artificial Sequence: Synthetic oligonucleotide
aggggucgucccaucggcu

SEQ ID NO: 1281881 - RNA, 19 nt, Artificial Sequence
  Description of Artificial Sequence: Synthetic oligonucleotide
ggaacugaaaggggaaguu

SEQ ID NO: 1281882 - RNA, 19 nt, Artificial Sequence
  Description of Artificial Sequence: Synthetic oligonucleotide
cgaaucucgaagagcugca

SEQ ID NO: 1281883 - RNA, 19 nt, Artificial Sequence
  Description of Artificial Sequence: Synthetic oligonucleotide
ucccgcgccgcggucugac

SEQ ID NO: 1281884 - RNA, 19 nt, Artificial Sequence
  Description of Artificial Sequence: Synthetic oligonucleotide
acccucccaucccgcggug

SEQ ID NO: 1281885 - RNA, 19 nt, Artificial Sequence
  Description of Artificial Sequence: Synthetic oligonucleotide
cccggauagcucggaaggc

SEQ ID NO: 1281886 - RNA, 19 nt, Artificial Sequence
  Description of Artificial Sequence: Synthetic oligonucleotide
gucacccggauagcucgga

SEQ ID NO: 1281887 - RNA, 19 nt, Artificial Sequence
  Description of Artificial Sequence: Synthetic oligonucleotide
cccuugucagccagugaca

SEQ ID NO: 1281888 - RNA, 19 nt, Artificial Sequence
  Description of Artificial Sequence: Synthetic oligonucleotide
gccuuauaggauaccuucu

SEQ ID NO: 1281889 - RNA, 19 nt, Artificial Sequence
  Description of Artificial Sequence: Synthetic oligonucleotide
cgagaagaggacugauuaa

SEQ ID NO: 1281890 - RNA, 19 nt, Artificial Sequence
  Description of Artificial Sequence: Synthetic oligonucleotide
guagacgacgcggcccugu

SEQ ID NO: 1281891 - RNA, 19 nt, Artificial Sequence
  Description of Artificial Sequence: Synthetic oligonucleotide
ccggauagcucggaaggca

SEQ ID NO: 1281892 - RNA, 19 nt, Artificial Sequence
  Description of Artificial Sequence: Synthetic oligonucleotide
gcaucuugucccagggcaa

SEQ ID NO: 1281893 - RNA, 19 nt, Artificial Sequence
  Description of Artificial Sequence: Synthetic oligonucleotide
gucgucccaucggcugcag

SEQ ID NO: 1281894 - RNA, 19 nt, Artificial Sequence
  Description of Artificial Sequence: Synthetic oligonucleotide
acgguggcuucaggugccu

SEQ ID NO: 1281895 - RNA, 19 nt, Artificial Sequence
  Description of Artificial Sequence: Synthetic oligonucleotide
gccccaugaacuguacucu

SEQ ID NO: 1281896 - RNA, 19 nt, Artificial Sequence
  Description of Artificial Sequence: Synthetic oligonucleotide
ccaacuuguaggagaacuu

SEQ ID NO: 1281897 - RNA, 19 nt, Artificial Sequence
  Description of Artificial Sequence: Synthetic oligonucleotide
ggccaccacagggcuagug

SEQ ID NO: 1281898 - RNA, 19 nt, Artificial Sequence
  Description of Artificial Sequence: Synthetic oligonucleotide
gcaccugucccaccacaua

SEQ ID NO: 1281899 - RNA, 19 nt, Artificial Sequence
  Description of Artificial Sequence: Synthetic oligonucleotide
cgcuuggccuuauaggaua

SEQ ID NO: 1281900 - RNA, 19 nt, Artificial Sequence
  Description of Artificial Sequence: Synthetic oligonucleotide
ggggaagaaucaaggcgcu

SEQ ID NO: 1281901 - RNA, 19 nt, Artificial Sequence
  Description of Artificial Sequence: Synthetic oligonucleotide
cagguccaccgaagaaggu

SEQ ID NO: 1281902 - RNA, 19 nt, Artificial Sequence
  Description of Artificial Sequence: Synthetic oligonucleotide
caucggcugcagguccuga

SEQ ID NO: 1281903 - RNA, 19 nt, Artificial Sequence
  Description of Artificial Sequence: Synthetic oligonucleotide
acggccccagccagcggcu

SEQ ID NO: 1281904 - RNA, 19 nt, Artificial Sequence
  Description of Artificial Sequence: Synthetic oligonucleotide
ggucgucccaucggcugca

SEQ ID NO: 1281905 - RNA, 19 nt, Artificial Sequence
  Description of Artificial Sequence: Synthetic oligonucleotide
ggccuucacuugguguaca

SEQ ID NO: 1281906 - RNA, 19 nt, Artificial Sequence
  Description of Artificial Sequence: Synthetic oligonucleotide
cccaugccccaucguuggc

SEQ ID NO: 1281907 - RNA, 19 nt, Artificial Sequence
  Description of Artificial Sequence: Synthetic oligonucleotide
guggcgcucccaggcgcac

SEQ ID NO: 1281908 - RNA, 19 nt, Artificial Sequence
  Description of Artificial Sequence: Synthetic oligonucleotide
gcgcuggugguggguacug

SEQ ID NO: 1281909 - RNA, 19 nt, Artificial Sequence
  Description of Artificial Sequence: Synthetic oligonucleotide
cagugggguuugguucaca

SEQ ID NO: 1281910 - RNA, 19 nt, Artificial Sequence
  Description of Artificial Sequence: Synthetic oligonucleotide
guggagccucauaggggua

SEQ ID NO: 1281911 - RNA, 19 nt, Artificial Sequence
  Description of Artificial Sequence: Synthetic oligonucleotide
ggugucccgcgccgcgguc

SEQ ID NO: 1281912 - RNA, 19 nt, Artificial Sequence
  Description of Artificial Sequence: Synthetic oligonucleotide
cccugucucaggcgaaucu

SEQ ID NO: 1281913 - RNA, 19 nt, Artificial Sequence
  Description of Artificial Sequence: Synthetic oligonucleotide
gccgcccuaccccauuccu

SEQ ID NO: 1281914 - RNA, 19 nt, Artificial Sequence
  Description of Artificial Sequence: Synthetic oligonucleotide
ccacccaugccccaucguu

SEQ ID NO: 1281915 - RNA, 19 nt, Artificial Sequence
  Description of Artificial Sequence: Synthetic oligonucleotide
gagcacgccuccaggccuu

SEQ ID NO: 1281916 - RNA, 19 nt, Artificial Sequence
  Description of Artificial Sequence: Synthetic oligonucleotide
ccccggagccuucugcaaa

SEQ ID NO: 1281917 - RNA, 19 nt, Artificial Sequence
  Description of Artificial Sequence: Synthetic oligonucleotide
cccaccacauagccacgaa

SEQ ID NO: 1281918 - RNA, 19 nt, Artificial Sequence
  Description of Artificial Sequence: Synthetic oligonucleotide
cccgcgccgcggucugacg

SEQ ID NO: 1281919 - RNA, 19 nt, Artificial Sequence
  Description of Artificial Sequence: Synthetic oligonucleotide
gcaaugguucgcacaucau

SEQ ID NO: 1281920 - RNA, 19 nt, Artificial Sequence
  Description of Artificial Sequence: Synthetic oligonucleotide
gccuugacaccuguaccuu

SEQ ID NO: 1281921 - RNA, 19 nt, Artificial Sequence
  Description of Artificial Sequence: Synthetic oligonucleotide
gcgcucccaggcgcacgcg

SEQ ID NO: 1281922 - RNA, 19 nt, Artificial Sequence
  Description of Artificial Sequence: Synthetic oligonucleotide
ggcgcuggugguggguacu

SEQ ID NO: 1281923 - RNA, 19 nt, Artificial Sequence
  Description of Artificial Sequence: Synthetic oligonucleotide
gcgcuuggccuuauaggau

SEQ ID NO: 1281924 - RNA, 19 nt, Artificial Sequence
  Description of Artificial Sequence: Synthetic oligonucleotide
cgacgcggcccugucucag

SEQ ID NO: 1281925 - RNA, 19 nt, Artificial Sequence
  Description of Artificial Sequence: Synthetic oligonucleotide
ccaggccuugacaccugua

SEQ ID NO: 1281926 - RNA, 19 nt, Artificial Sequence
  Description of Artificial Sequence: Synthetic oligonucleotide
gcgcacggccccagccagc

SEQ ID NO: 1281927 - RNA, 19 nt, Artificial Sequence
  Description of Artificial Sequence: Synthetic oligonucleotide
cgauguggauaaggcugca

SEQ ID NO: 1281928 - RNA, 19 nt, Artificial Sequence
  Description of Artificial Sequence: Synthetic oligonucleotide
gcggcuccccaggacugua

SEQ ID NO: 1281929 - RNA, 19 nt, Artificial Sequence
  Description of Artificial Sequence: Synthetic oligonucleotide
gcacgccuccaggccuuga

SEQ ID NO: 1281930 - RNA, 19 nt, Artificial Sequence
  Description of Artificial Sequence: Synthetic oligonucleotide
cgcacgcgcacggccccag

SEQ ID NO: 1281931 - RNA, 19 nt, Artificial Sequence
  Description of Artificial Sequence: Synthetic oligonucleotide
gcgcacgcgcacggcccca

SEQ ID NO: 1281932 - RNA, 19 nt, Artificial Sequence
  Description of Artificial Sequence: Synthetic oligonucleotide
ccggagccuucugcaaagu

SEQ ID NO: 1281933 - RNA, 19 nt, Artificial Sequence
  Description of Artificial Sequence: Synthetic oligonucleotide
cccucccaucccgcggugu

SEQ ID NO: 1281934 - RNA, 19 nt, Artificial Sequence
  Description of Artificial Sequence: Synthetic oligonucleotide
cggugucccgcgccgcggu

SEQ ID NO: 1281935 - RNA, 19 nt, Artificial Sequence
  Description of Artificial Sequence: Synthetic oligonucleotide
ccccaucguuggccuuguu

SEQ ID NO: 1281936 - RNA, 19 nt, Artificial Sequence
  Description of Artificial Sequence: Synthetic oligonucleotide
ucuagcuugacccuggcag

SEQ ID NO: 1281937 - RNA, 19 nt, Artificial Sequence
  Description of Artificial Sequence: Synthetic oligonucleotide
agcgacaugaccccgauac

SEQ ID NO: 1281938 - RNA, 19 nt, Artificial Sequence
  Description of Artificial Sequence: Synthetic oligonucleotide
gauagaauugcuugguucc

SEQ ID NO: 1281939 - RNA, 19 nt, Artificial Sequence
  Description of Artificial Sequence: Synthetic oligonucleotide
aacacaaggacaccgacga

SEQ ID NO: 1281940 - RNA, 19 nt, Artificial Sequence
  Description of Artificial Sequence: Synthetic oligonucleotide
ggaaauauccauuaaacac

SEQ ID NO: 1281941 - RNA, 19 nt, Artificial Sequence
  Description of Artificial Sequence: Synthetic oligonucleotide
ugcgugacaacauggaggg

SEQ ID NO: 1281942 - RNA, 19 nt, Artificial Sequence
  Description of Artificial Sequence: Synthetic oligonucleotide
gauacgagugagcacaugc

SEQ ID NO: 1281943 - RNA, 19 nt, Artificial Sequence
  Description of Artificial Sequence: Synthetic oligonucleotide
uuuguauccaacacggcac

SEQ ID NO: 1281944 - RNA, 19 nt, Artificial Sequence
  Description of Artificial Sequence: Synthetic oligonucleotide
aacucgagccagaagaggc

SEQ ID NO: 1281945 - RNA, 19 nt, Artificial Sequence
  Description of Artificial Sequence: Synthetic oligonucleotide
agcagcuugaaccugcggg

SEQ ID NO: 1281946 - RNA, 19 nt, Artificial Sequence
  Description of Artificial Sequence: Synthetic oligonucleotide
gagccaauggaauacucgg

SEQ ID NO: 1281947 - RNA, 19 nt, Artificial Sequence
  Description of Artificial Sequence: Synthetic oligonucleotide
caaccuguaaacuuccggg

SEQ ID NO: 1281948 - RNA, 19 nt, Artificial Sequence
  Description of Artificial Sequence: Synthetic oligonucleotide
uauaaauuggguggguuag

SEQ ID NO: 1281949 - RNA, 19 nt, Artificial Sequence
  Description of Artificial Sequence: Synthetic oligonucleotide
agggaaauauccauuaaac

SEQ ID NO: 1281950 - RNA, 19 nt, Artificial Sequence
  Description of Artificial Sequence: Synthetic oligonucleotide
acgacuagaugucagucac

SEQ ID NO: 1281951 - RNA, 19 nt, Artificial Sequence
  Description of Artificial Sequence: Synthetic oligonucleotide
ugcgugauagaauugcuug

SEQ ID NO: 1281952 - RNA, 19 nt, Artificial Sequence
  Description of Artificial Sequence: Synthetic oligonucleotide
auguggagaguucaggacg

SEQ ID NO: 1281953 - RNA, 19 nt, Artificial Sequence
  Description of Artificial Sequence: Synthetic oligonucleotide
uucacucuucccacgaagg

SEQ ID NO: 1281954 - RNA, 19 nt, Artificial Sequence
  Description of Artificial Sequence: Synthetic oligonucleotide
uguuccucgaucaccagug

SEQ ID NO: 1281955 - RNA, 19 nt, Artificial Sequence
  Description of Artificial Sequence: Synthetic oligonucleotide
ucgaaauuccuuuucacuc

SEQ ID NO: 1281956 - RNA, 19 nt, Artificial Sequence
  Description of Artificial Sequence: Synthetic oligonucleotide
aaguaguugcccuugugga

SEQ ID NO: 1281957 - RNA, 19 nt, Artificial Sequence
  Description of Artificial Sequence: Synthetic oligonucleotide
aauugcuugguucccuuug

SEQ ID NO: 1281958 - RNA, 19 nt, Artificial Sequence
  Description of Artificial Sequence: Synthetic oligonucleotide
uuaagagggaaauauccau

SEQ ID NO: 1281959 - RNA, 19 nt, Artificial Sequence
  Description of Artificial Sequence: Synthetic oligonucleotide
cuugguucccuuuguaucc

SEQ ID NO: 1281960 - RNA, 19 nt, Artificial Sequence
  Description of Artificial Sequence: Synthetic oligonucleotide
cuuauucccggcaagggac

SEQ ID NO: 1281961 - RNA, 19 nt, Artificial Sequence
  Description of Artificial Sequence: Synthetic oligonucleotide
ggcaccaacuccuaaaagg

SEQ ID NO: 1281962 - RNA, 19 nt, Artificial Sequence
  Description of Artificial Sequence: Synthetic oligonucleotide
aauggaauacucggacugg

SEQ ID NO: 1281963 - RNA, 19 nt, Artificial Sequence
  Description of Artificial Sequence: Synthetic oligonucleotide
ugauagaauugcuugguuc

SEQ ID NO: 1281964 - RNA, 19 nt, Artificial Sequence
  Description of Artificial Sequence: Synthetic oligonucleotide
acaccgacgacuuugggcu

SEQ ID NO: 1281965 - RNA, 19 nt, Artificial Sequence
  Description of Artificial Sequence: Synthetic oligonucleotide
ggagagucuagcuugaccc

SEQ ID NO: 1281966 - RNA, 19 nt, Artificial Sequence
  Description of Artificial Sequence: Synthetic oligonucleotide
gaagagaacucccuggaga

SEQ ID NO: 1281967 - RNA, 19 nt, Artificial Sequence
  Description of Artificial Sequence: Synthetic oligonucleotide
uugguuaggcgacucagga

SEQ ID NO: 1281968 - RNA, 19 nt, Artificial Sequence
  Description of Artificial Sequence: Synthetic oligonucleotide
caggcgagcauugagagcc

SEQ ID NO: 1281969 - RNA, 19 nt, Artificial Sequence
  Description of Artificial Sequence: Synthetic oligonucleotide
ucccuauguggcuaugugg

SEQ ID NO: 1281970 - RNA, 19 nt, Artificial Sequence
  Description of Artificial Sequence: Synthetic oligonucleotide
gaugcgugacaacauggag

SEQ ID NO: 1281971 - RNA, 19 nt, Artificial Sequence
  Description of Artificial Sequence: Synthetic oligonucleotide
uccuaaaagggcuguagcu

SEQ ID NO: 1281972 - RNA, 19 nt, Artificial Sequence
  Description of Artificial Sequence: Synthetic oligonucleotide
gacaccgacgacuuugggc

SEQ ID NO: 1281973 - RNA, 19 nt, Artificial Sequence
  Description of Artificial Sequence: Synthetic oligonucleotide
uguaguugacaaucccucc

SEQ ID NO: 1281974 - RNA, 19 nt, Artificial Sequence
  Description of Artificial Sequence: Synthetic oligonucleotide
aaccuguaaacuuccgggu

SEQ ID NO: 1281975 - RNA, 19 nt, Artificial Sequence
  Description of Artificial Sequence: Synthetic oligonucleotide
uggauggggcuccagugcg

SEQ ID NO: 1281976 - RNA, 19 nt, Artificial Sequence
  Description of Artificial Sequence: Synthetic oligonucleotide
aaaggggcgcugcaacagg

SEQ ID NO: 1281977 - RNA, 19 nt, Artificial Sequence
  Description of Artificial Sequence: Synthetic oligonucleotide
cuuuguauccaacacggca

SEQ ID NO: 1281978 - RNA, 19 nt, Artificial Sequence
  Description of Artificial Sequence: Synthetic oligonucleotide
guaguugacaaucccuccc

SEQ ID NO: 1281979 - RNA, 19 nt, Artificial Sequence
  Description of Artificial Sequence: Synthetic oligonucleotide
caagggacuccuuggauag

SEQ ID NO: 1281980 - RNA, 19 nt, Artificial Sequence
  Description of Artificial Sequence: Synthetic oligonucleotide
gguuaggcgacucaggaug

SEQ ID NO: 1281981 - RNA, 19 nt, Artificial Sequence
  Description of Artificial Sequence: Synthetic oligonucleotide
acaggugccgcaugaagag

SEQ ID NO: 1281982 - RNA, 19 nt, Artificial Sequence
  Description of Artificial Sequence: Synthetic oligonucleotide
uuguauccaacacggcacc

SEQ ID NO: 1281983 - RNA, 19 nt, Artificial Sequence
  Description of Artificial Sequence: Synthetic oligonucleotide
auauaaauuggguggguua

SEQ ID NO: 1281984 - RNA, 19 nt, Artificial Sequence
  Description of Artificial Sequence: Synthetic oligonucleotide
agugcgacagaugcuggcc

SEQ ID NO: 1281985 - RNA, 19 nt, Artificial Sequence
  Description of Artificial Sequence: Synthetic oligonucleotide
uguggagaguucaggacgu

SEQ ID NO: 1281986 - RNA, 19 nt, Artificial Sequence
  Description of Artificial Sequence: Synthetic oligonucleotide
accacaaccuguaaacuuc

SEQ ID NO: 1281987 - RNA, 19 nt, Artificial Sequence
  Description of Artificial Sequence: Synthetic oligonucleotide
uuugggcugacgcaccaca

SEQ ID NO: 1281988 - RNA, 19 nt, Artificial Sequence
  Description of Artificial Sequence: Synthetic oligonucleotide
acgagugagcacaugcugc

SEQ ID NO: 1281989 - RNA, 19 nt, Artificial Sequence
  Description of Artificial Sequence: Synthetic oligonucleotide
uccaacacggcaccaacuc

SEQ ID NO: 1281990 - RNA, 19 nt, Artificial Sequence
  Description of Artificial Sequence: Synthetic oligonucleotide
auuaagagggaaauaucca

SEQ ID NO: 1281991 - RNA, 19 nt, Artificial Sequence
  Description of Artificial Sequence: Synthetic oligonucleotide
cuagcuugacccuggcagg

SEQ ID NO: 1281992 - RNA, 19 nt, Artificial Sequence
  Description of Artificial Sequence: Synthetic oligonucleotide
gagggaaauauccauuaaa

SEQ ID NO: 1281993 - RNA, 19 nt, Artificial Sequence
  Description of Artificial Sequence: Synthetic oligonucleotide
ucgccguccacucugcccc

SEQ ID NO: 1281994 - RNA, 19 nt, Artificial Sequence
  Description of Artificial Sequence: Synthetic oligonucleotide
cccuuuguauccaacacgg

SEQ ID NO: 1281995 - RNA, 19 nt, Artificial Sequence
  Description of Artificial Sequence: Synthetic oligonucleotide
ugagguacgcagcccuccg

SEQ ID NO: 1281996 - RNA, 19 nt, Artificial Sequence
  Description of Artificial Sequence: Synthetic oligonucleotide
uaaauuggguggguuagcu

SEQ ID NO: 1281997 - RNA, 19 nt, Artificial Sequence
  Description of Artificial Sequence: Synthetic oligonucleotide
auaggcucgaaauuccuuu

SEQ ID NO: 1281998 - RNA, 19 nt, Artificial Sequence
  Description of Artificial Sequence: Synthetic oligonucleotide
acgaaggucccgcaccaac

SEQ ID NO: 1281999 - RNA, 19 nt, Artificial Sequence
  Description of Artificial Sequence: Synthetic oligonucleotide
uaaccagcgacaugacccc

SEQ ID NO: 1282000 - RNA, 19 nt, Artificial Sequence
  Description of Artificial Sequence: Synthetic oligonucleotide
agauugucgccguccacuc

SEQ ID NO: 1282001 - RNA, 19 nt, Artificial Sequence
  Description of Artificial Sequence: Synthetic oligonucleotide
gaugucagucacauagggc

SEQ ID NO: 1282002 - RNA, 19 nt, Artificial Sequence
  Description of Artificial Sequence: Synthetic oligonucleotide
gaaguugggcccaaagcug

SEQ ID NO: 1282003 - RNA, 19 nt, Artificial Sequence
  Description of Artificial Sequence: Synthetic oligonucleotide
cacauagggccccaggggc

SEQ ID NO: 1282004 - RNA, 19 nt, Artificial Sequence
  Description of Artificial Sequence: Synthetic oligonucleotide
gugacucucagcaaggcac

SEQ ID NO: 1282005 - RNA, 19 nt, Artificial Sequence
  Description of Artificial Sequence: Synthetic oligonucleotide
ggaauacucggacugguug

SEQ ID NO: 1282006 - RNA, 19 nt, Artificial Sequence
  Description of Artificial Sequence: Synthetic oligonucleotide
cugucuggcauugaagccc

SEQ ID NO: 1282007 - RNA, 19 nt, Artificial Sequence
  Description of Artificial Sequence: Synthetic oligonucleotide
uugaaggcguccugcgggg

SEQ ID NO: 1282008 - RNA, 19 nt, Artificial Sequence
  Description of Artificial Sequence: Synthetic oligonucleotide
caugaccccgauacgagug

SEQ ID NO: 1282009 - RNA, 19 nt, Artificial Sequence
  Description of Artificial Sequence: Synthetic oligonucleotide
cuccuaaaagggcuguagc

SEQ ID NO: 1282010 - RNA, 19 nt, Artificial Sequence
  Description of Artificial Sequence: Synthetic oligonucleotide
agucacauagggccccagg

SEQ ID NO: 1282011 - RNA, 19 nt, Artificial Sequence
  Description of Artificial Sequence: Synthetic oligonucleotide
ucugcgugauagaauugcu

SEQ ID NO: 1282012 - RNA, 19 nt, Artificial Sequence
  Description of Artificial Sequence: Synthetic oligonucleotide
cucugcgugauagaauugc

SEQ ID NO: 1282013 - RNA, 19 nt, Artificial Sequence
  Description of Artificial Sequence: Synthetic oligonucleotide
uucuuccuaaccagcgaca

SEQ ID NO: 1282014 - RNA, 19 nt, Artificial Sequence
  Description of Artificial Sequence: Synthetic oligonucleotide
ugucuggcauugaagccca

SEQ ID NO: 1282015 - RNA, 19 nt, Artificial Sequence
  Description of Artificial Sequence: Synthetic oligonucleotide
gacgacuagaugucaguca

SEQ ID NO: 1282016 - RNA, 19 nt, Artificial Sequence
  Description of Artificial Sequence: Synthetic oligonucleotide
gaaaggggcgcugcaacag

SEQ ID NO: 1282017 - RNA, 19 nt, Artificial Sequence
  Description of Artificial Sequence: Synthetic oligonucleotide
guagcuuuucucucccaug

SEQ ID NO: 1282018 - RNA, 19 nt, Artificial Sequence
  Description of Artificial Sequence: Synthetic oligonucleotide
ugccaggcgagcauugaga

SEQ ID NO: 1282019 - RNA, 19 nt, Artificial Sequence
  Description of Artificial Sequence: Synthetic oligonucleotide
acacccaacaggcccuuuc

SEQ ID NO: 1282020 - RNA, 19 nt, Artificial Sequence
  Description of Artificial Sequence: Synthetic oligonucleotide
agcaaggcacuccacuucu

SEQ ID NO: 1282021 - RNA, 19 nt, Artificial Sequence
  Description of Artificial Sequence: Synthetic oligonucleotide
acuccuaaaagggcuguag

SEQ ID NO: 1282022 - RNA, 19 nt, Artificial Sequence
  Description of Artificial Sequence: Synthetic oligonucleotide
gccgaaagcgcccugcugg

SEQ ID NO: 1282023 - RNA, 19 nt, Artificial Sequence
  Description of Artificial Sequence: Synthetic oligonucleotide
gacaugaccccgauacgag

SEQ ID NO: 1282024 - RNA, 19 nt, Artificial Sequence
  Description of Artificial Sequence: Synthetic oligonucleotide
auugcuugguucccuuugu

SEQ ID NO: 1282025 - RNA, 19 nt, Artificial Sequence
  Description of Artificial Sequence: Synthetic oligonucleotide
aggcucgaaauuccuuuuc

SEQ ID NO: 1282026 - RNA, 19 nt, Artificial Sequence
  Description of Artificial Sequence: Synthetic oligonucleotide
uccuagauugucgccgucc

SEQ ID NO: 1282027 - RNA, 19 nt, Artificial Sequence
  Description of Artificial Sequence: Synthetic oligonucleotide
ugacucucagcaaggcacu

SEQ ID NO: 1282028 - RNA, 19 nt, Artificial Sequence
  Description of Artificial Sequence: Synthetic oligonucleotide
acgacuuugggcugacgca

SEQ ID NO: 1282029 - RNA, 19 nt, Artificial Sequence
  Description of Artificial Sequence: Synthetic oligonucleotide
gaugucacgaggacgacua

SEQ ID NO: 1282030 - RNA, 19 nt, Artificial Sequence
  Description of Artificial Sequence: Synthetic oligonucleotide
cacgaggacgacuagaugu

SEQ ID NO: 1282031 - RNA, 19 nt, Artificial Sequence
  Description of Artificial Sequence: Synthetic oligonucleotide
ugggaggagccgaaagcgc

SEQ ID NO: 1282032 - RNA, 19 nt, Artificial Sequence
  Description of Artificial Sequence: Synthetic oligonucleotide
ugguggggucgccagcacg

SEQ ID NO: 1282033 - RNA, 19 nt, Artificial Sequence
  Description of Artificial Sequence: Synthetic oligonucleotide
aauauccauuaaacacaag

SEQ ID NO: 1282034 - RNA, 19 nt, Artificial Sequence
  Description of Artificial Sequence: Synthetic oligonucleotide
aaggucucugcgccgucug

SEQ ID NO: 1282035 - RNA, 19 nt, Artificial Sequence
  Description of Artificial Sequence: Synthetic oligonucleotide
cucggacaucugcagacgg

SEQ ID NO: 1282036 - RNA, 19 nt, Artificial Sequence
  Description of Artificial Sequence: Synthetic oligonucleotide
uacucggacugguugucug

SEQ ID NO: 1282037 - RNA, 19 nt, Artificial Sequence
  Description of Artificial Sequence: Synthetic oligonucleotide
cugcgaaggucucugcgcc

SEQ ID NO: 1282038 - RNA, 19 nt, Artificial Sequence
  Description of Artificial Sequence: Synthetic oligonucleotide
cugccuccuagauugucgc

SEQ ID NO: 1282039 - RNA, 19 nt, Artificial Sequence
  Description of Artificial Sequence: Synthetic oligonucleotide
gaauacucggacugguugu

SEQ ID NO: 1282040 - RNA, 19 nt, Artificial Sequence
  Description of Artificial Sequence: Synthetic oligonucleotide
ucacgaggacgacuagaug

SEQ ID NO: 1282041 - RNA, 19 nt, Artificial Sequence
  Description of Artificial Sequence: Synthetic oligonucleotide
aaggggcgcugcaacaggg

SEQ ID NO: 1282042 - RNA, 19 nt, Artificial Sequence
  Description of Artificial Sequence: Synthetic oligonucleotide
gcgugauagaauugcuugg

SEQ ID NO: 1282043 - RNA, 19 nt, Artificial Sequence
  Description of Artificial Sequence: Synthetic oligonucleotide
aggacgacuagaugucagu

SEQ ID NO: 1282044 - RNA, 19 nt, Artificial Sequence
  Description of Artificial Sequence: Synthetic oligonucleotide
gaaggucccgcaccaacca

SEQ ID NO: 1282045 - RNA, 19 nt, Artificial Sequence
  Description of Artificial Sequence: Synthetic oligonucleotide
ugacgcaccacaaccugua

SEQ ID NO: 1282046 - RNA, 19 nt, Artificial Sequence
  Description of Artificial Sequence: Synthetic oligonucleotide
cucgggucucuccucaaag

SEQ ID NO: 1282047 - RNA, 19 nt, Artificial Sequence
  Description of Artificial Sequence: Synthetic oligonucleotide
gaggacgacuagaugucag

SEQ ID NO: 1282048 - RNA, 19 nt, Artificial Sequence
  Description of Artificial Sequence: Synthetic oligonucleotide
uccggguuaucgcaccuaa

SEQ ID NO: 1282049 - RNA, 19 nt, Artificial Sequence
  Description of Artificial Sequence: Synthetic oligonucleotide
acgaggacgacuagauguc

SEQ ID NO: 1282050 - RNA, 19 nt, Artificial Sequence
  Description of Artificial Sequence: Synthetic oligonucleotide
ucuuccuaaccagcgacau

SEQ ID NO: 1282051 - RNA, 19 nt, Artificial Sequence
  Description of Artificial Sequence: Synthetic oligonucleotide
gccaauggaauacucggac

SEQ ID NO: 1282052 - RNA, 19 nt, Artificial Sequence
  Description of Artificial Sequence: Synthetic oligonucleotide
ucgggucucuccucaaagu

SEQ ID NO: 1282053 - RNA, 19 nt, Artificial Sequence
  Description of Artificial Sequence: Synthetic oligonucleotide
agagucuagcuugacccug

SEQ ID NO: 1282054 - RNA, 19 nt, Artificial Sequence
  Description of Artificial Sequence: Synthetic oligonucleotide
gucccuauguggcuaugug

SEQ ID NO: 1282055 - RNA, 19 nt, Artificial Sequence
  Description of Artificial Sequence: Synthetic oligonucleotide
acaugaccccgauacgagu

SEQ ID NO: 1282056 - RNA, 19 nt, Artificial Sequence
  Description of Artificial Sequence: Synthetic oligonucleotide
ugcgacagaugcuggccug

SEQ ID NO: 1282057 - RNA, 19 nt, Artificial Sequence
  Description of Artificial Sequence: Synthetic oligonucleotide
cuucccacgaaggucccgc

SEQ ID NO: 1282058 - RNA, 19 nt, Artificial Sequence
  Description of Artificial Sequence: Synthetic oligonucleotide
cacccaacaggcccuuucc

SEQ ID NO: 1282059 - RNA, 19 nt, Artificial Sequence
  Description of Artificial Sequence: Synthetic oligonucleotide
cucgaaauuccuuuucacu

SEQ ID NO: 1282060 - RNA, 19 nt, Artificial Sequence
  Description of Artificial Sequence: Synthetic oligonucleotide
uuuccggguuaucgcaccu

SEQ ID NO: 1282061 - RNA, 19 nt, Artificial Sequence
  Description of Artificial Sequence: Synthetic oligonucleotide
ugggcugacgcaccacaac

SEQ ID NO: 1282062 - RNA, 19 nt, Artificial Sequence
  Description of Artificial Sequence: Synthetic oligonucleotide
accuguaaacuuccgggua

SEQ ID NO: 1282063 - RNA, 19 nt, Artificial Sequence
  Description of Artificial Sequence: Synthetic oligonucleotide
uggagaguucaggacguac

SEQ ID NO: 1282064 - RNA, 19 nt, Artificial Sequence
  Description of Artificial Sequence: Synthetic oligonucleotide
accccgauacgagugagca

SEQ ID NO: 1282065 - RNA, 19 nt, Artificial Sequence
  Description of Artificial Sequence: Synthetic oligonucleotide
uaccccagcgcaugauggc

SEQ ID NO: 1282066 - RNA, 19 nt, Artificial Sequence
  Description of Artificial Sequence: Synthetic oligonucleotide
gguugguuaggcgacucag

SEQ ID NO: 1282067 - RNA, 19 nt, Artificial Sequence
  Description of Artificial Sequence: Synthetic oligonucleotide
acggcaccaacuccuaaaa

SEQ ID NO: 1282068 - RNA, 19 nt, Artificial Sequence
  Description of Artificial Sequence: Synthetic oligonucleotide
auacgagugagcacaugcu

SEQ ID NO: 1282069 - RNA, 19 nt, Artificial Sequence
  Description of Artificial Sequence: Synthetic oligonucleotide
guuaggcgacucaggaugc

SEQ ID NO: 1282070 - RNA, 19 nt, Artificial Sequence
  Description of Artificial Sequence: Synthetic oligonucleotide
gggcugacgcaccacaacc

SEQ ID NO: 1282071 - RNA, 19 nt, Artificial Sequence
  Description of Artificial Sequence: Synthetic oligonucleotide
uggaauacucggacugguu

SEQ ID NO: 1282072 - RNA, 19 nt, Artificial Sequence
  Description of Artificial Sequence: Synthetic oligonucleotide
guacgcagcccuccggagc

SEQ ID NO: 1282073 - RNA, 19 nt, Artificial Sequence
  Description of Artificial Sequence: Synthetic oligonucleotide
cggguauauaaauugggug

SEQ ID NO: 1282074 - RNA, 19 nt, Artificial Sequence
  Description of Artificial Sequence: Synthetic oligonucleotide
caggcuuauucccggcaag

SEQ ID NO: 1282075 - RNA, 19 nt, Artificial Sequence
  Description of Artificial Sequence: Synthetic oligonucleotide
auggaauacucggacuggu

SEQ ID NO: 1282076 - RNA, 19 nt, Artificial Sequence
  Description of Artificial Sequence: Synthetic oligonucleotide
uagcuugacccuggcaggc

SEQ ID NO: 1282077 - RNA, 19 nt, Artificial Sequence
  Description of Artificial Sequence: Synthetic oligonucleotide
uguaaacuuccggguauau

SEQ ID NO: 1282078 - RNA, 19 nt, Artificial Sequence
  Description of Artificial Sequence: Synthetic oligonucleotide
ugguuaggcgacucaggau

SEQ ID NO: 1282079 - RNA, 19 nt, Artificial Sequence
  Description of Artificial Sequence: Synthetic oligonucleotide
accccagcgcaugauggcg

SEQ ID NO: 1282080 - RNA, 19 nt, Artificial Sequence
  Description of Artificial Sequence: Synthetic oligonucleotide
augaccccgauacgaguga

SEQ ID NO: 1282081 - RNA, 19 nt, Artificial Sequence
  Description of Artificial Sequence: Synthetic oligonucleotide
cuauguggcuauguggaga

SEQ ID NO: 1282082 - RNA, 19 nt, Artificial Sequence
  Description of Artificial Sequence: Synthetic oligonucleotide
gacuagaugucagucacau

SEQ ID NO: 1282083 - RNA, 19 nt, Artificial Sequence
  Description of Artificial Sequence: Synthetic oligonucleotide
cagagccaauggaauacuc

SEQ ID NO: 1282084 - RNA, 19 nt, Artificial Sequence
  Description of Artificial Sequence: Synthetic oligonucleotide
cuuccuaaccagcgacaug

SEQ ID NO: 1282085 - RNA, 19 nt, Artificial Sequence
  Description of Artificial Sequence: Synthetic oligonucleotide
uaggcucgaaauuccuuuu

SEQ ID NO: 1282086 - RNA, 19 nt, Artificial Sequence
  Description of Artificial Sequence: Synthetic oligonucleotide
gccuccuagauugucgccg

SEQ ID NO: 1282087 - RNA, 19 nt, Artificial Sequence
  Description of Artificial Sequence: Synthetic oligonucleotide
gucgccguccacucugccc

SEQ ID NO: 1282088 - RNA, 19 nt, Artificial Sequence
  Description of Artificial Sequence: Synthetic oligonucleotide
uaggcgacucaggaugcug

SEQ ID NO: 1282089 - RNA, 19 nt, Artificial Sequence
  Description of Artificial Sequence: Synthetic oligonucleotide
uugguucccuuuguaucca

SEQ ID NO: 1282090 - RNA, 19 nt, Artificial Sequence
  Description of Artificial Sequence: Synthetic oligonucleotide
cccaacaggcccuuuccgg

SEQ ID NO: 1282091 - RNA, 19 nt, Artificial Sequence
  Description of Artificial Sequence: Synthetic oligonucleotide
gcugccuccuagauugucg

SEQ ID NO: 1282092 - RNA, 19 nt, Artificial Sequence
  Description of Artificial Sequence: Synthetic oligonucleotide
gcucgaaauuccuuuucac

SEQ ID NO: 1282093 - RNA, 19 nt, Artificial Sequence
  Description of Artificial Sequence: Synthetic oligonucleotide
cgcaccacaaccuguaaac

SEQ ID NO: 1282094 - RNA, 19 nt, Artificial Sequence
  Description of Artificial Sequence: Synthetic oligonucleotide
ugaccccgauacgagugag

SEQ ID NO: 1282095 - RNA, 19 nt, Artificial Sequence
  Description of Artificial Sequence: Synthetic oligonucleotide
cuagauugucgccguccac

SEQ ID NO: 1282096 - RNA, 19 nt, Artificial Sequence
  Description of Artificial Sequence: Synthetic oligonucleotide
uccuaaccagcgacaugac

SEQ ID NO: 1282097 - RNA, 19 nt, Artificial Sequence
  Description of Artificial Sequence: Synthetic oligonucleotide
cugcagacgggcagccacc

SEQ ID NO: 1282098 - RNA, 19 nt, Artificial Sequence
  Description of Artificial Sequence: Synthetic oligonucleotide
ucuucccacgaaggucccg

SEQ ID NO: 1282099 - RNA, 19 nt, Artificial Sequence
  Description of Artificial Sequence: Synthetic oligonucleotide
ggcuuauucccggcaaggg

SEQ ID NO: 1282100 - RNA, 19 nt, Artificial Sequence
  Description of Artificial Sequence: Synthetic oligonucleotide
uugucgccguccacucugc

SEQ ID NO: 1282101 - RNA, 19 nt, Artificial Sequence
  Description of Artificial Sequence: Synthetic oligonucleotide
ggcggcaggggcuuguccc

SEQ ID NO: 1282102 - RNA, 19 nt, Artificial Sequence
  Description of Artificial Sequence: Synthetic oligonucleotide
acgcaccacaaccuguaaa

SEQ ID NO: 1282103 - RNA, 19 nt, Artificial Sequence
  Description of Artificial Sequence: Synthetic oligonucleotide
ucuggucccuauguggcua

SEQ ID NO: 1282104 - RNA, 19 nt, Artificial Sequence
  Description of Artificial Sequence: Synthetic oligonucleotide
gcuuauucccggcaaggga

SEQ ID NO: 1282105 - RNA, 19 nt, Artificial Sequence
  Description of Artificial Sequence: Synthetic oligonucleotide
ggcucgaaauuccuuuuca

SEQ ID NO: 1282106 - RNA, 19 nt, Artificial Sequence
  Description of Artificial Sequence: Synthetic oligonucleotide
augguggggucgccagcac

SEQ ID NO: 1282107 - RNA, 19 nt, Artificial Sequence
  Description of Artificial Sequence: Synthetic oligonucleotide
ggcacaccaucugcgaagg

SEQ ID NO: 1282108 - RNA, 19 nt, Artificial Sequence
  Description of Artificial Sequence: Synthetic oligonucleotide
ucccacgaaggucccgcac

SEQ ID NO: 1282109 - RNA, 19 nt, Artificial Sequence
  Description of Artificial Sequence: Synthetic oligonucleotide
ggggaugucacgaggacga

SEQ ID NO: 1282110 - RNA, 19 nt, Artificial Sequence
  Description of Artificial Sequence: Synthetic oligonucleotide
acaaggacaccgacgacuu

SEQ ID NO: 1282111 - RNA, 19 nt, Artificial Sequence
  Description of Artificial Sequence: Synthetic oligonucleotide
ggggaugcgugacaacaug

SEQ ID NO: 1282112 - RNA, 19 nt, Artificial Sequence
  Description of Artificial Sequence: Synthetic oligonucleotide
augucacgaggacgacuag

SEQ ID NO: 1282113 - RNA, 19 nt, Artificial Sequence
  Description of Artificial Sequence: Synthetic oligonucleotide
caacacggcaccaacuccu

SEQ ID NO: 1282114 - RNA, 19 nt, Artificial Sequence
  Description of Artificial Sequence: Synthetic oligonucleotide
gcugacgcaccacaaccug

SEQ ID NO: 1282115 - RNA, 19 nt, Artificial Sequence
  Description of Artificial Sequence: Synthetic oligonucleotide
acgguugguuaggcgacuc

SEQ ID NO: 1282116 - RNA, 19 nt, Artificial Sequence
  Description of Artificial Sequence: Synthetic oligonucleotide
ccuaaccagcgacaugacc

SEQ ID NO: 1282117 - RNA, 19 nt, Artificial Sequence
  Description of Artificial Sequence: Synthetic oligonucleotide
agccaauggaauacucgga

SEQ ID NO: 1282118 - RNA, 19 nt, Artificial Sequence
  Description of Artificial Sequence: Synthetic oligonucleotide
gagagucuagcuugacccu

SEQ ID NO: 1282119 - RNA, 19 nt, Artificial Sequence
  Description of Artificial Sequence: Synthetic oligonucleotide
cacggcaccaacuccuaaa

SEQ ID NO: 1282120 - RNA, 19 nt, Artificial Sequence
  Description of Artificial Sequence: Synthetic oligonucleotide
gcucuggucccuauguggc

SEQ ID NO: 1282121 - RNA, 19 nt, Artificial Sequence
  Description of Artificial Sequence: Synthetic oligonucleotide
guugacaaucccucccggu

SEQ ID NO: 1282122 - RNA, 19 nt, Artificial Sequence
  Description of Artificial Sequence: Synthetic oligonucleotide
acuagaugucagucacaua

SEQ ID NO: 1282123 - RNA, 19 nt, Artificial Sequence
  Description of Artificial Sequence: Synthetic oligonucleotide
ugucgccguccacucugcc

SEQ ID NO: 1282124 - RNA, 19 nt, Artificial Sequence
  Description of Artificial Sequence: Synthetic oligonucleotide
uuaggcgacucaggaugcu

SEQ ID NO: 1282125 - RNA, 19 nt, Artificial Sequence
  Description of Artificial Sequence: Synthetic oligonucleotide
cccgauacgagugagcaca

SEQ ID NO: 1282126 - RNA, 19 nt, Artificial Sequence
  Description of Artificial Sequence: Synthetic oligonucleotide
gugggaguugaaggcgucc

SEQ ID NO: 1282127 - RNA, 19 nt, Artificial Sequence
  Description of Artificial Sequence: Synthetic oligonucleotide
ccaacacggcaccaacucc

SEQ ID NO: 1282128 - RNA, 19 nt, Artificial Sequence
  Description of Artificial Sequence: Synthetic oligonucleotide
caaucccucccgguccagg

SEQ ID NO: 1282129 - RNA, 19 nt, Artificial Sequence
  Description of Artificial Sequence: Synthetic oligonucleotide
gcuugacccuggcaggcag

SEQ ID NO: 1282130 - RNA, 19 nt, Artificial Sequence
  Description of Artificial Sequence: Synthetic oligonucleotide
guaaacuuccggguauaua

SEQ ID NO: 1282131 - RNA, 19 nt, Artificial Sequence
  Description of Artificial Sequence: Synthetic oligonucleotide
cggaaguugggcccaaagc

SEQ ID NO: 1282132 - RNA, 19 nt, Artificial Sequence
  Description of Artificial Sequence: Synthetic oligonucleotide
gcaagggacuccuuggaua

SEQ ID NO: 1282133 - RNA, 19 nt, Artificial Sequence
  Description of Artificial Sequence: Synthetic oligonucleotide
guauccaacacggcaccaa

SEQ ID NO: 1282134 - RNA, 19 nt, Artificial Sequence
  Description of Artificial Sequence: Synthetic oligonucleotide
uucccacgaaggucccgca

SEQ ID NO: 1282135 - RNA, 19 nt, Artificial Sequence
  Description of Artificial Sequence: Synthetic oligonucleotide
gcgacaugaccccgauacg

SEQ ID NO: 1282136 - RNA, 19 nt, Artificial Sequence
  Description of Artificial Sequence: Synthetic oligonucleotide
gaccccgauacgagugagc

SEQ ID NO: 1282137 - RNA, 19 nt, Artificial Sequence
  Description of Artificial Sequence: Synthetic oligonucleotide
guggguuagcuuccuccuc

SEQ ID NO: 1282138 - RNA, 19 nt, Artificial Sequence
  Description of Artificial Sequence: Synthetic oligonucleotide
auccaacacggcaccaacu

SEQ ID NO: 1282139 - RNA, 19 nt, Artificial Sequence
  Description of Artificial Sequence: Synthetic oligonucleotide
ccuuuguauccaacacggc

SEQ ID NO: 1282140 - RNA, 19 nt, Artificial Sequence
  Description of Artificial Sequence: Synthetic oligonucleotide
cugcgcucggacaucugca

SEQ ID NO: 1282141 - RNA, 19 nt, Artificial Sequence
  Description of Artificial Sequence: Synthetic oligonucleotide
uauucccggcaagggacuc

SEQ ID NO: 1282142 - RNA, 19 nt, Artificial Sequence
  Description of Artificial Sequence: Synthetic oligonucleotide
guugggauccugggucaug

SEQ ID NO: 1282143 - RNA, 19 nt, Artificial Sequence
  Description of Artificial Sequence: Synthetic oligonucleotide
acauagggccccaggggca

SEQ ID NO: 1282144 - RNA, 19 nt, Artificial Sequence
  Description of Artificial Sequence: Synthetic oligonucleotide
guauauaaauugggugggu

SEQ ID NO: 1282145 - RNA, 19 nt, Artificial Sequence
  Description of Artificial Sequence: Synthetic oligonucleotide
cgaaggucccgcaccaacc

SEQ ID NO: 1282146 - RNA, 19 nt, Artificial Sequence
  Description of Artificial Sequence: Synthetic oligonucleotide
gcccuuuccggguuaucgc

SEQ ID NO: 1282147 - RNA, 19 nt, Artificial Sequence
  Description of Artificial Sequence: Synthetic oligonucleotide
ggacgacuagaugucaguc

SEQ ID NO: 1282148 - RNA, 19 nt, Artificial Sequence
  Description of Artificial Sequence: Synthetic oligonucleotide
ugguucccuuuguauccaa

SEQ ID NO: 1282149 - RNA, 19 nt, Artificial Sequence
  Description of Artificial Sequence: Synthetic oligonucleotide
ggggucgccagcacgguug

SEQ ID NO: 1282150 - RNA, 19 nt, Artificial Sequence
  Description of Artificial Sequence: Synthetic oligonucleotide
gagagcucauccugccacu

SEQ ID NO: 1282151 - RNA, 19 nt, Artificial Sequence
  Description of Artificial Sequence: Synthetic oligonucleotide
aacacggcaccaacuccua

SEQ ID NO: 1282152 - RNA, 19 nt, Artificial Sequence
  Description of Artificial Sequence: Synthetic oligonucleotide
aggggcgcugcaacagggg

SEQ ID NO: 1282153 - RNA, 19 nt, Artificial Sequence
  Description of Artificial Sequence: Synthetic oligonucleotide
gucccgcaccaaccagugg

SEQ ID NO: 1282154 - RNA, 19 nt, Artificial Sequence
  Description of Artificial Sequence: Synthetic oligonucleotide
uugaaccugcgggccaaaa

SEQ ID NO: 1282155 - RNA, 19 nt, Artificial Sequence
  Description of Artificial Sequence: Synthetic oligonucleotide
cgcaugauggcguucaaaa

SEQ ID NO: 1282156 - RNA, 19 nt, Artificial Sequence
  Description of Artificial Sequence: Synthetic oligonucleotide
gucacgaggacgacuagau

SEQ ID NO: 1282157 - RNA, 19 nt, Artificial Sequence
  Description of Artificial Sequence: Synthetic oligonucleotide
ggagccgaaagcgcccugc

SEQ ID NO: 1282158 - RNA, 19 nt, Artificial Sequence
  Description of Artificial Sequence: Synthetic oligonucleotide
cuuugggcugacgcaccac

SEQ ID NO: 1282159 - RNA, 19 nt, Artificial Sequence
  Description of Artificial Sequence: Synthetic oligonucleotide
ggacaccgacgacuuuggg

SEQ ID NO: 1282160 - RNA, 19 nt, Artificial Sequence
  Description of Artificial Sequence: Synthetic oligonucleotide
gcuagccccaagugccugc

SEQ ID NO: 1282161 - RNA, 19 nt, Artificial Sequence
  Description of Artificial Sequence: Synthetic oligonucleotide
gacgcaccacaaccuguaa

SEQ ID NO: 1282162 - RNA, 19 nt, Artificial Sequence
  Description of Artificial Sequence: Synthetic oligonucleotide
ggucauguugagguacgca

SEQ ID NO: 1282163 - RNA, 19 nt, Artificial Sequence
  Description of Artificial Sequence: Synthetic oligonucleotide
agcuagccccaagugccug

SEQ ID NO: 1282164 - RNA, 19 nt, Artificial Sequence
  Description of Artificial Sequence: Synthetic oligonucleotide
gggucgccagcacgguugg

SEQ ID NO: 1282165 - RNA, 19 nt, Artificial Sequence
  Description of Artificial Sequence: Synthetic oligonucleotide
cagcgcaugauggcguuca

SEQ ID NO: 1282166 - RNA, 19 nt, Artificial Sequence
  Description of Artificial Sequence: Synthetic oligonucleotide
gauugucgccguccacucu

SEQ ID NO: 1282167 - RNA, 19 nt, Artificial Sequence
  Description of Artificial Sequence: Synthetic oligonucleotide
cacacacccaacaggcccu

SEQ ID NO: 1282168 - RNA, 19 nt, Artificial Sequence
  Description of Artificial Sequence: Synthetic oligonucleotide
gcgacagaugcuggccugg

SEQ ID NO: 1282169 - RNA, 19 nt, Artificial Sequence
  Description of Artificial Sequence: Synthetic oligonucleotide
accagcgacaugaccccga

SEQ ID NO: 1282170 - RNA, 19 nt, Artificial Sequence
  Description of Artificial Sequence: Synthetic oligonucleotide
ccuagauugucgccgucca

SEQ ID NO: 1282171 - RNA, 19 nt, Artificial Sequence
  Description of Artificial Sequence: Synthetic oligonucleotide
ccaggcgagcauugagagc

SEQ ID NO: 1282172 - RNA, 19 nt, Artificial Sequence
  Description of Artificial Sequence: Synthetic oligonucleotide
uggggucgccagcacgguu

SEQ ID NO: 1282173 - RNA, 19 nt, Artificial Sequence
  Description of Artificial Sequence: Synthetic oligonucleotide
gcaggcuuauucccggcaa

SEQ ID NO: 1282174 - RNA, 19 nt, Artificial Sequence
  Description of Artificial Sequence: Synthetic oligonucleotide
cugacgcaccacaaccugu

SEQ ID NO: 1282175 - RNA, 19 nt, Artificial Sequence
  Description of Artificial Sequence: Synthetic oligonucleotide
uuccggguuaucgcaccua

SEQ ID NO: 1282176 - RNA, 19 nt, Artificial Sequence
  Description of Artificial Sequence: Synthetic oligonucleotide
caccgacgacuuugggcug

SEQ ID NO: 1282177 - RNA, 19 nt, Artificial Sequence
  Description of Artificial Sequence: Synthetic oligonucleotide
cccggcaagggacuccuug

SEQ ID NO: 1282178 - RNA, 19 nt, Artificial Sequence
  Description of Artificial Sequence: Synthetic oligonucleotide
cuccuagauugucgccguc

SEQ ID NO: 1282179 - RNA, 19 nt, Artificial Sequence
  Description of Artificial Sequence: Synthetic oligonucleotide
acaaucccucccgguccag

SEQ ID NO: 1282180 - RNA, 19 nt, Artificial Sequence
  Description of Artificial Sequence: Synthetic oligonucleotide
ccggguauauaaauugggu

SEQ ID NO: 1282181 - RNA, 19 nt, Artificial Sequence
  Description of Artificial Sequence: Synthetic oligonucleotide
cggguuaucgcaccuaaaa

SEQ ID NO: 1282182 - RNA, 19 nt, Artificial Sequence
  Description of Artificial Sequence: Synthetic oligonucleotide
cugcgugauagaauugcuu

SEQ ID NO: 1282183 - RNA, 19 nt, Artificial Sequence
  Description of Artificial Sequence: Synthetic oligonucleotide
uggucccuauguggcuaug

SEQ ID NO: 1282184 - RNA, 19 nt, Artificial Sequence
  Description of Artificial Sequence: Synthetic oligonucleotide
agcgcaugauggcguucaa

SEQ ID NO: 1282185 - RNA, 19 nt, Artificial Sequence
  Description of Artificial Sequence: Synthetic oligonucleotide
cccggcucagcuggaaagg

SEQ ID NO: 1282186 - RNA, 19 nt, Artificial Sequence
  Description of Artificial Sequence: Synthetic oligonucleotide
cccggggcacaccaucugc

SEQ ID NO: 1282187 - RNA, 19 nt, Artificial Sequence
  Description of Artificial Sequence: Synthetic oligonucleotide
aggcccucccggggcacac

SEQ ID NO: 1282188 - RNA, 19 nt, Artificial Sequence
  Description of Artificial Sequence: Synthetic oligonucleotide
gcacgguugguuaggcgac

SEQ ID NO: 1282189 - RNA, 19 nt, Artificial Sequence
  Description of Artificial Sequence: Synthetic oligonucleotide
cgaaauuccuuuucacucu

SEQ ID NO: 1282190 - RNA, 19 nt, Artificial Sequence
  Description of Artificial Sequence: Synthetic oligonucleotide
caaagcugcuguugugcau

SEQ ID NO: 1282191 - RNA, 19 nt, Artificial Sequence
  Description of Artificial Sequence: Synthetic oligonucleotide
uuccucugucuggcauuga

SEQ ID NO: 1282192 - RNA, 19 nt, Artificial Sequence
  Description of Artificial Sequence: Synthetic oligonucleotide
gcgcccugcuggauggugg

SEQ ID NO: 1282193 - RNA, 19 nt, Artificial Sequence
  Description of Artificial Sequence: Synthetic oligonucleotide
ggcauaccccagcgcauga

SEQ ID NO: 1282194 - RNA, 19 nt, Artificial Sequence
  Description of Artificial Sequence: Synthetic oligonucleotide
gcagacgggcagccaccgg

SEQ ID NO: 1282195 - RNA, 19 nt, Artificial Sequence
  Description of Artificial Sequence: Synthetic oligonucleotide
ccacucugccccucggguc

SEQ ID NO: 1282196 - RNA, 19 nt, Artificial Sequence
  Description of Artificial Sequence: Synthetic oligonucleotide
aggcccuuuccggguuauc

SEQ ID NO: 1282197 - RNA, 19 nt, Artificial Sequence
  Description of Artificial Sequence: Synthetic oligonucleotide
ccagcacgguugguuaggc

SEQ ID NO: 1282198 - RNA, 19 nt, Artificial Sequence
  Description of Artificial Sequence: Synthetic oligonucleotide
auguggcuauguggagagu

SEQ ID NO: 1282199 - RNA, 19 nt, Artificial Sequence
  Description of Artificial Sequence: Synthetic oligonucleotide
ggggcacaccaucugcgaa

SEQ ID NO: 1282200 - RNA, 19 nt, Artificial Sequence
  Description of Artificial Sequence: Synthetic oligonucleotide
cgacaugaccccgauacga

SEQ ID NO: 1282201 - RNA, 19 nt, Artificial Sequence
  Description of Artificial Sequence: Synthetic oligonucleotide
cccugucacucuucagcug

SEQ ID NO: 1282202 - RNA, 19 nt, Artificial Sequence
  Description of Artificial Sequence: Synthetic oligonucleotide
caccaaccagugggaguug

SEQ ID NO: 1282203 - RNA, 19 nt, Artificial Sequence
  Description of Artificial Sequence: Synthetic oligonucleotide
ccuaaaagggcuguagcuu

SEQ ID NO: 1282204 - RNA, 19 nt, Artificial Sequence
  Description of Artificial Sequence: Synthetic oligonucleotide
cacacaggugccgcaugaa

SEQ ID NO: 1282205 - RNA, 19 nt, Artificial Sequence
  Description of Artificial Sequence: Synthetic oligonucleotide
gcaaggcacuccacuucug

SEQ ID NO: 1282206 - RNA, 19 nt, Artificial Sequence
  Description of Artificial Sequence: Synthetic oligonucleotide
cucccggggcacaccaucu

SEQ ID NO: 1282207 - RNA, 19 nt, Artificial Sequence
  Description of Artificial Sequence: Synthetic oligonucleotide
ccccgauacgagugagcac

SEQ ID NO: 1282208 - RNA, 19 nt, Artificial Sequence
  Description of Artificial Sequence: Synthetic oligonucleotide
ggaugucacgaggacgacu

SEQ ID NO: 1282209 - RNA, 19 nt, Artificial Sequence
  Description of Artificial Sequence: Synthetic oligonucleotide
cggcaccaacuccuaaaag

SEQ ID NO: 1282210 - RNA, 19 nt, Artificial Sequence
  Description of Artificial Sequence: Synthetic oligonucleotide
gucuggcauugaagcccag

SEQ ID NO: 1282211 - RNA, 19 nt, Artificial Sequence
  Description of Artificial Sequence: Synthetic oligonucleotide
gcgcucggacaucugcaga

SEQ ID NO: 1282212 - RNA, 19 nt, Artificial Sequence
  Description of Artificial Sequence: Synthetic oligonucleotide
aggcgagcauugagagcca

SEQ ID NO: 1282213 - RNA, 19 nt, Artificial Sequence
  Description of Artificial Sequence: Synthetic oligonucleotide
ccgaaagcgcccugcugga

SEQ ID NO: 1282214 - RNA, 19 nt, Artificial Sequence
  Description of Artificial Sequence: Synthetic oligonucleotide
ggcugacgcaccacaaccu

SEQ ID NO: 1282215 - RNA, 19 nt, Artificial Sequence
  Description of Artificial Sequence: Synthetic oligonucleotide
gggaugucacgaggacgac

SEQ ID NO: 1282216 - RNA, 19 nt, Artificial Sequence
  Description of Artificial Sequence: Synthetic oligonucleotide
cgugauagaauugcuuggu

SEQ ID NO: 1282217 - RNA, 19 nt, Artificial Sequence
  Description of Artificial Sequence: Synthetic oligonucleotide
cagcuagccccaagugccu

SEQ ID NO: 1282218 - RNA, 19 nt, Artificial Sequence
  Description of Artificial Sequence: Synthetic oligonucleotide
cuagccccaagugccugcu

SEQ ID NO: 1282219 - RNA, 19 nt, Artificial Sequence
  Description of Artificial Sequence: Synthetic oligonucleotide
cccgcaccaaccaguggga

SEQ ID NO: 1282220 - RNA, 19 nt, Artificial Sequence
  Description of Artificial Sequence: Synthetic oligonucleotide
cuggucccuauguggcuau

SEQ ID NO: 1282221 - RNA, 19 nt, Artificial Sequence
  Description of Artificial Sequence: Synthetic oligonucleotide
ggcaggcgcgucacaucug

SEQ ID NO: 1282222 - RNA, 19 nt, Artificial Sequence
  Description of Artificial Sequence: Synthetic oligonucleotide
ccgcaccaaccagugggag

SEQ ID NO: 1282223 - RNA, 19 nt, Artificial Sequence
  Description of Artificial Sequence: Synthetic oligonucleotide
ccuccuagauugucgccgu

SEQ ID NO: 1282224 - RNA, 19 nt, Artificial Sequence
  Description of Artificial Sequence: Synthetic oligonucleotide
gcgcaugauggcguucaaa

SEQ ID NO: 1282225 - RNA, 19 nt, Artificial Sequence
  Description of Artificial Sequence: Synthetic oligonucleotide
agggccccaggggcaucug

SEQ ID NO: 1282226 - RNA, 19 nt, Artificial Sequence
  Description of Artificial Sequence: Synthetic oligonucleotide
gcgugacaacauggagggc

SEQ ID NO: 1282227 - RNA, 19 nt, Artificial Sequence
  Description of Artificial Sequence: Synthetic oligonucleotide
cacgaaggucccgcaccaa

SEQ ID NO: 1282228 - RNA, 19 nt, Artificial Sequence
  Description of Artificial Sequence: Synthetic oligonucleotide
cacgguugguuaggcgacu

SEQ ID NO: 1282229 - RNA, 19 nt, Artificial Sequence
  Description of Artificial Sequence: Synthetic oligonucleotide
cgauacgagugagcacaug

SEQ ID NO: 1282230 - RNA, 19 nt, Artificial Sequence
  Description of Artificial Sequence: Synthetic oligonucleotide
cagcgacaugaccccgaua

SEQ ID NO: 1282231 - RNA, 19 nt, Artificial Sequence
  Description of Artificial Sequence: Synthetic oligonucleotide
ccccucgggucucuccuca

SEQ ID NO: 1282232 - RNA, 19 nt, Artificial Sequence
  Description of Artificial Sequence: Synthetic oligonucleotide
gcggcaggggcuugucccu

SEQ ID NO: 1282233 - RNA, 19 nt, Artificial Sequence
  Description of Artificial Sequence: Synthetic oligonucleotide
ccggguuaucgcaccuaaa

SEQ ID NO: 1282234 - RNA, 19 nt, Artificial Sequence
  Description of Artificial Sequence: Synthetic oligonucleotide
gccccucgggucucuccuc

SEQ ID NO: 1282235 - RNA, 19 nt, Artificial Sequence
  Description of Artificial Sequence: Synthetic oligonucleotide
cgaggacgacuagauguca

SEQ ID NO: 1282236 - RNA, 19 nt, Artificial Sequence
  Description of Artificial Sequence: Synthetic oligonucleotide
ccagcgcaugauggcguuc

SEQ ID NO: 1282237 - RNA, 19 nt, Artificial Sequence
  Description of Artificial Sequence: Synthetic oligonucleotide
caaggacaccgacgacuuu

SEQ ID NO: 1282238 - RNA, 19 nt, Artificial Sequence
  Description of Artificial Sequence: Synthetic oligonucleotide
cgguugguuaggcgacuca

SEQ ID NO: 1282239 - RNA, 19 nt, Artificial Sequence
  Description of Artificial Sequence: Synthetic oligonucleotide
guggggucgccagcacggu

SEQ ID NO: 1282240 - RNA, 19 nt, Artificial Sequence
  Description of Artificial Sequence: Synthetic oligonucleotide
ggcgagcauugagagccau

SEQ ID NO: 1282241 - RNA, 19 nt, Artificial Sequence
  Description of Artificial Sequence: Synthetic oligonucleotide
cacacccaacaggcccuuu

SEQ ID NO: 1282242 - RNA, 19 nt, Artificial Sequence
  Description of Artificial Sequence: Synthetic oligonucleotide
cccggaaguugggcccaaa

SEQ ID NO: 1282243 - RNA, 19 nt, Artificial Sequence
  Description of Artificial Sequence: Synthetic oligonucleotide
ccccggaaguugggcccaa

SEQ ID NO: 1282244 - RNA, 19 nt, Artificial Sequence
  Description of Artificial Sequence: Synthetic oligonucleotide
gcagcccuccggagcuguu

SEQ ID NO: 1282245 - RNA, 19 nt, Artificial Sequence
  Description of Artificial Sequence: Synthetic oligonucleotide
aaaagagucaauccguagc

SEQ ID NO: 1282246 - RNA, 19 nt, Artificial Sequence
  Description of Artificial Sequence: Synthetic oligonucleotide
  modified_base (9)..(9): a, c, u, g, unknown or other
uucaaguunaccaucacug

SEQ ID NO: 1282247 - RNA, 19 nt, Artificial Sequence
  Description of Artificial Sequence: Synthetic oligonucleotide
aauaucuagccauucauca

SEQ ID NO: 1282248 - RNA, 19 nt, Artificial Sequence
  Description of Artificial Sequence: Synthetic oligonucleotide
auuuguuccgguccaaucc

SEQ ID NO: 1282249 - RNA, 19 nt, Artificial Sequence
  Description of Artificial Sequence: Synthetic oligonucleotide
gaucccuucaguauaaucg

SEQ ID NO: 1282250 - RNA, 19 nt, Artificial Sequence
  Description of Artificial Sequence: Synthetic oligonucleotide
aagagguuacucuccaggc

SEQ ID NO: 1282251 - RNA, 19 nt, Artificial Sequence
  Description of Artificial Sequence: Synthetic oligonucleotide
  modified_base (5)..(5): a, c, u, g, unknown or other
  modified_base (16)..(16): a, c, u, g, unknown or other
aaucnguuucaaguunacc

SEQ ID NO: 1282252 - RNA, 19 nt, Artificial Sequence
  Description of Artificial Sequence: Synthetic oligonucleotide
uaucuagccauucaucagg

SEQ ID NO: 1282253 - RNA, 19 nt, Artificial Sequence
  Description of Artificial Sequence: Synthetic oligonucleotide
uuuuacuuuggugucaugg

SEQ ID NO: 1282254 - RNA, 19 nt, Artificial Sequence
  Description of Artificial Sequence: Synthetic oligonucleotide
  modified_base (4)..(4): a, c, u, g, unknown or other
  modified_base (15)..(15): a, c, u, g, unknown or other
aucnguuucaaguunacca

SEQ ID NO: 1282255 - RNA, 19 nt, Artificial Sequence
  Description of Artificial Sequence: Synthetic oligonucleotide
ugugaaaguccacauauug

SEQ ID NO: 1282256 - RNA, 19 nt, Artificial Sequence
  Description of Artificial Sequence: Synthetic oligonucleotide
  modified_base (3)..(3): a, c, u, g, unknown or other
uunaccaucacugaucaca

SEQ ID NO: 1282257 - RNA, 19 nt, Artificial Sequence
  Description of Artificial Sequence: Synthetic oligonucleotide
gauuaauuuguuccggucc

SEQ ID NO: 1282258 - RNA, 19 nt, Artificial Sequence
  Description of Artificial Sequence: Synthetic oligonucleotide
aaagccgggugucagcugc

SEQ ID NO: 1282259 - RNA, 19 nt, Artificial Sequence
  Description of Artificial Sequence: Synthetic oligonucleotide
agguuugccccauagaaac

SEQ ID NO: 1282260 - RNA, 19 nt, Artificial Sequence
  Description of Artificial Sequence: Synthetic oligonucleotide
ugcuaguggacauauaacc

SEQ ID NO: 1282261 - RNA, 19 nt, Artificial Sequence
  Description of Artificial Sequence: Synthetic oligonucleotide
uauagggaaugccaaacag

SEQ ID NO: 1282262 - RNA, 19 nt, Artificial Sequence
  Description of Artificial Sequence: Synthetic oligonucleotide
uuacacagccaacaguugg

SEQ ID NO: 1282263 - RNA, 19 nt, Artificial Sequence
  Description of Artificial Sequence: Synthetic oligonucleotide
aguugauuaauuuguuccg

SEQ ID NO: 1282264 - RNA, 19 nt, Artificial Sequence
  Description of Artificial Sequence: Synthetic oligonucleotide
uguugagcuaauuugaaaa

SEQ ID NO: 1282265 - RNA, 19 nt, Artificial Sequence
  Description of Artificial Sequence: Synthetic oligonucleotide
aaagagucaauccguagcu

SEQ ID NO: 1282266 - RNA, 19 nt, Artificial Sequence
  Description of Artificial Sequence: Synthetic oligonucleotide
aauuuguuccgguccaauc

SEQ ID NO: 1282267 - RNA, 19 nt, Artificial Sequence
  Description of Artificial Sequence: Synthetic oligonucleotide
aaucuugucaacgucaggu

SEQ ID NO: 1282268 - RNA, 19 nt, Artificial Sequence
  Description of Artificial Sequence: Synthetic oligonucleotide
uccuaauugguugugaaag

SEQ ID NO: 1282269 - RNA, 19 nt, Artificial Sequence
  Description of Artificial Sequence: Synthetic oligonucleotide
uuaauaucuagccauucau

SEQ ID NO: 1282270 - RNA, 19 nt, Artificial Sequence
  Description of Artificial Sequence: Synthetic oligonucleotide
uguuacacagccaacaguu

SEQ ID NO: 1282271 - RNA, 19 nt, Artificial Sequence
  Description of Artificial Sequence: Synthetic oligonucleotide
aauucauugagaauuucca

SEQ ID NO: 1282272 - RNA, 19 nt, Artificial Sequence
  Description of Artificial Sequence: Synthetic oligonucleotide
cuaucaucagugauggucc

SEQ ID NO: 1282273 - RNA, 19 nt, Artificial Sequence
  Description of Artificial Sequence: Synthetic oligonucleotide
cucgaggugauucugagag

SEQ ID NO: 1282274 - RNA, 19 nt, Artificial Sequence
  Description of Artificial Sequence: Synthetic oligonucleotide
uuccagauuaauaucuagc

SEQ ID NO: 1282275 - RNA, 19 nt, Artificial Sequence
  Description of Artificial Sequence: Synthetic oligonucleotide
  modified_base (3)..(3): a, c, u, g, unknown or other
  modified_base (14)..(14): a, c, u, g, unknown or other
ucnguuucaaguunaccau

SEQ ID NO: 1282276 - RNA, 19 nt, Artificial Sequence
  Description of Artificial Sequence: Synthetic oligonucleotide
  modified_base (7)..(7): a, c, u, g, unknown or other
  modified_base (18)..(18): a, c, u, g, unknown or other
ugaaucnguuucaaguuna

SEQ ID NO: 1282277 - RNA, 19 nt, Artificial Sequence
  Description of Artificial Sequence: Synthetic oligonucleotide
gaauuuuaggagugggucc

SEQ ID NO: 1282278 - RNA, 19 nt, Artificial Sequence
  Description of Artificial Sequence: Synthetic oligonucleotide
agagucaauccguagcugg

SEQ ID NO: 1282279 - RNA, 19 nt, Artificial Sequence
  Description of Artificial Sequence: Synthetic oligonucleotide
uucuuauagacaugucggg

SEQ ID NO: 1282280 - RNA, 19 nt, Artificial Sequence
  Description of Artificial Sequence: Synthetic oligonucleotide
  modified_base (6)..(6): a, c, u, g, unknown or other
aaguunaccaucacugauc

SEQ ID NO: 1282281 - RNA, 19 nt, Artificial Sequence
  Description of Artificial Sequence: Synthetic oligonucleotide
agcaauccguucuugcugc

SEQ ID NO: 1282282 - RNA, 19 nt, Artificial Sequence
  Description of Artificial Sequence: Synthetic oligonucleotide
gaaacgauccccuggaauc

SEQ ID NO: 1282283 - RNA, 19 nt, Artificial Sequence
  Description of Artificial Sequence: Synthetic oligonucleotide
auuaauaucuagccauuca

SEQ ID NO: 1282284 - RNA, 19 nt, Artificial Sequence
  Description of Artificial Sequence: Synthetic oligonucleotide
aagucugaucaguaagguc

SEQ ID NO: 1282285 - RNA, 19 nt, Artificial Sequence
  Description of Artificial Sequence: Synthetic oligonucleotide
uuccuguugagcuaauuug

SEQ ID NO: 1282286 - RNA, 19 nt, Artificial Sequence
  Description of Artificial Sequence: Synthetic oligonucleotide
  modified_base (5)..(5): a, c, u, g, unknown or other
aguunaccaucacugauca

SEQ ID NO: 1282287 - RNA, 19 nt, Artificial Sequence
  Description of Artificial Sequence: Synthetic oligonucleotide
uggacauauaaccaucccu

SEQ ID NO: 1282288 - RNA, 19 nt, Artificial Sequence
  Description of Artificial Sequence: Synthetic oligonucleotide
auuaauuuguuccggucca

SEQ ID NO: 1282289 - RNA, 19 nt, Artificial Sequence
  Description of Artificial Sequence: Synthetic oligonucleotide
gugagcaucucucacuacg

SEQ ID NO: 1282290 - RNA, 19 nt, Artificial Sequence
  Description of Artificial Sequence: Synthetic oligonucleotide
ugaucaguaagguccagga

SEQ ID NO: 1282291 - RNA, 19 nt, Artificial Sequence
  Description of Artificial Sequence: Synthetic oligonucleotide
ccagauaucacuaucauca

SEQ ID NO: 1282292 - RNA, 19 nt, Artificial Sequence
  Description of Artificial Sequence: Synthetic oligonucleotide
aauuuuaggagugggucca

SEQ ID NO: 1282293 - RNA, 19 nt, Artificial Sequence
  Description of Artificial Sequence: Synthetic oligonucleotide
ugcaacuuccguaacuucu

SEQ ID NO: 1282294 - RNA, 19 nt, Artificial Sequence
  Description of Artificial Sequence: Synthetic oligonucleotide
ucuggccuguuacagaggc

SEQ ID NO: 1282295 - RNA, 19 nt, Artificial Sequence
  Description of Artificial Sequence: Synthetic oligonucleotide
uuagaagcuccgaugaauc

SEQ ID NO: 1282296 - RNA, 19 nt, Artificial Sequence
  Description of Artificial Sequence: Synthetic oligonucleotide
uuagcauacaugucacagc

SEQ ID NO: 1282297 - RNA, 19 nt, Artificial Sequence
  Description of Artificial Sequence: Synthetic oligonucleotide
uccuguugagcuaauuuga

SEQ ID NO: 1282298 - RNA, 19 nt, Artificial Sequence
  Description of Artificial Sequence: Synthetic oligonucleotide
aaacaggcgcaggaguucc

SEQ ID NO: 1282299 - RNA, 19 nt, Artificial Sequence
  Description of Artificial Sequence: Synthetic oligonucleotide
ugagcuuccagugaauucu

SEQ ID NO: 1282300 - RNA, 19 nt, Artificial Sequence
  Description of Artificial Sequence: Synthetic oligonucleotide
uccgguccaauccuaauug

SEQ ID NO: 1282301 - RNA, 19 nt, Artificial Sequence
  Description of Artificial Sequence: Synthetic oligonucleotide
auagaaacgauccccugga

SEQ ID NO: 1282302 - RNA, 19 nt, Artificial Sequence
  Description of Artificial Sequence: Synthetic oligonucleotide
agagccagauaucacuauc

SEQ ID NO: 1282303 - RNA, 19 nt, Artificial Sequence
  Description of Artificial Sequence: Synthetic oligonucleotide
auaaucgcugcccaguaga

SEQ ID NO: 1282304 - RNA, 19 nt, Artificial Sequence
  Description of Artificial Sequence: Synthetic oligonucleotide
uaaaguccaacucccuggc

SEQ ID NO: 1282305 - RNA, 19 nt, Artificial Sequence
  Description of Artificial Sequence: Synthetic oligonucleotide
ucuuauagacaugucgggc

SEQ ID NO: 1282306 - RNA, 19 nt, Artificial Sequence
  Description of Artificial Sequence: Synthetic oligonucleotide
auugguaguacucuacaaa

SEQ ID NO: 1282307 - RNA, 19 nt, Artificial Sequence
  Description of Artificial Sequence: Synthetic oligonucleotide
aauugguugugaaagucca

SEQ ID NO: 1282308 - RNA, 19 nt, Artificial Sequence
  Description of Artificial Sequence: Synthetic oligonucleotide
gauauagggaaugccaaac

SEQ ID NO: 1282309 - RNA, 19 nt, Artificial Sequence
  Description of Artificial Sequence: Synthetic oligonucleotide
ugucgggcuccaaagagcc

SEQ ID NO: 1282310 - RNA, 19 nt, Artificial Sequence
  Description of Artificial Sequence: Synthetic oligonucleotide
uccaaagagccagauauca

SEQ ID NO: 1282311 - RNA, 19 nt, Artificial Sequence
  Description of Artificial Sequence: Synthetic oligonucleotide
guugauuaauuuguuccgg

SEQ ID NO: 1282312 - RNA, 19 nt, Artificial Sequence
  Description of Artificial Sequence: Synthetic oligonucleotide
gacaugucgggcuccaaag

SEQ ID NO: 1282313 - RNA, 19 nt, Artificial Sequence
  Description of Artificial Sequence: Synthetic oligonucleotide
  modified_base (8)..(8): a, c, u, g, unknown or other
ucaaguunaccaucacuga

SEQ ID NO: 1282314 - RNA, 19 nt, Artificial Sequence
  Description of Artificial Sequence: Synthetic oligonucleotide
agacucgcuuucuucagac

SEQ ID NO: 1282315 - RNA, 19 nt, Artificial Sequence
  Description of Artificial Sequence: Synthetic oligonucleotide
uaucuuguucagagggagg

SEQ ID NO: 1282316 - RNA, 19 nt, Artificial Sequence
  Description of Artificial Sequence: Synthetic oligonucleotide
gacauauaaccaucccucc

SEQ ID NO: 1282317 - RNA, 19 nt, Artificial Sequence
  Description of Artificial Sequence: Synthetic oligonucleotide
gucaacgucagguuugccc

SEQ ID NO: 1282318 - RNA, 19 nt, Artificial Sequence
  Description of Artificial Sequence: Synthetic oligonucleotide
uuuaggaguggguccaggc

SEQ ID NO: 1282319 - RNA, 19 nt, Artificial Sequence
  Description of Artificial Sequence: Synthetic oligonucleotide
ugcauccucacuugaaucu

SEQ ID NO: 1282320 - RNA, 19 nt, Artificial Sequence
  Description of Artificial Sequence: Synthetic oligonucleotide
cauauugguaguacucuac

SEQ ID NO: 1282321 - RNA, 19 nt, Artificial Sequence
  Description of Artificial Sequence: Synthetic oligonucleotide
cacuacgucgggcaaaucc

SEQ ID NO: 1282322 - RNA, 19 nt, Artificial Sequence
  Description of Artificial Sequence: Synthetic oligonucleotide
  modified_base (2)..(2): a, c, u, g, unknown or other
unaccaucacugaucacac

SEQ ID NO: 1282323 - RNA, 19 nt, Artificial Sequence
  Description of Artificial Sequence: Synthetic oligonucleotide
uggauauagggaaugccaa

SEQ ID NO: 1282324 - RNA, 19 nt, Artificial Sequence
  Description of Artificial Sequence: Synthetic oligonucleotide
gggaaugccaaacaggcgc

SEQ ID NO: 1282325 - RNA, 19 nt, Artificial Sequence
  Description of Artificial Sequence: Synthetic oligonucleotide
ucuaucuuguucagaggga

SEQ ID NO: 1282326 - RNA, 19 nt, Artificial Sequence
  Description of Artificial Sequence: Synthetic oligonucleotide
uuuguuccgguccaauccu

SEQ ID NO: 1282327 - RNA, 19 nt, Artificial Sequence
  Description of Artificial Sequence: Synthetic oligonucleotide
cuugucaacgucagguuug

SEQ ID NO: 1282328 - RNA, 19 nt, Artificial Sequence
  Description of Artificial Sequence: Synthetic oligonucleotide
aucacuaucaucagugaug

SEQ ID NO: 1282329 - RNA, 19 nt, Artificial Sequence
  Description of Artificial Sequence: Synthetic oligonucleotide
uauaaucgcugcccaguag

SEQ ID NO: 1282330 - RNA, 19 nt, Artificial Sequence
  Description of Artificial Sequence: Synthetic oligonucleotide
auauugguaguacucuaca

SEQ ID NO: 1282331 - RNA, 19 nt, Artificial Sequence
  Description of Artificial Sequence: Synthetic oligonucleotide
aauccgagcagcugacugu

SEQ ID NO: 1282332 - RNA, 19 nt, Artificial Sequence
  Description of Artificial Sequence: Synthetic oligonucleotide
gucccguccauccucaccg

SEQ ID NO: 1282333 - RNA, 19 nt, Artificial Sequence
  Description of Artificial Sequence: Synthetic oligonucleotide
gggacuaaaguccaacucc

SEQ ID NO: 1282334 - RNA, 19 nt, Artificial Sequence
  Description of Artificial Sequence: Synthetic oligonucleotide
cuuccagauuaauaucuag

SEQ ID NO: 1282335 - RNA, 19 nt, Artificial Sequence
  Description of Artificial Sequence: Synthetic oligonucleotide
aggugauucugagaggugg

SEQ ID NO: 1282336 - RNA, 19 nt, Artificial Sequence
  Description of Artificial Sequence: Synthetic oligonucleotide
aaccaucccuccugugagc

SEQ ID NO: 1282337 - RNA, 19 nt, Artificial Sequence
  Description of Artificial Sequence: Synthetic oligonucleotide
uugaaucucgaggugauuc

SEQ ID NO: 1282338 - RNA, 19 nt, Artificial Sequence
  Description of Artificial Sequence: Synthetic oligonucleotide
ucucgugggcucaucaggc

SEQ ID NO: 1282339 - RNA, 19 nt, Artificial Sequence
  Description of Artificial Sequence: Synthetic oligonucleotide
aucgcugcccaguagauaa

SEQ ID NO: 1282340 - RNA, 19 nt, Artificial Sequence
  Description of Artificial Sequence: Synthetic oligonucleotide
uucgucuuguuccagccaa

SEQ ID NO: 1282341 - RNA, 19 nt, Artificial Sequence
  Description of Artificial Sequence: Synthetic oligonucleotide
guccaauccuaauugguug

SEQ ID NO: 1282342 - RNA, 19 nt, Artificial Sequence
  Description of Artificial Sequence: Synthetic oligonucleotide
acuacgucgggcaaauccg

SEQ ID NO: 1282343 - RNA, 19 nt, Artificial Sequence
  Description of Artificial Sequence: Synthetic oligonucleotide
auauagggaaugccaaaca

SEQ ID NO: 1282344 - RNA, 19 nt, Artificial Sequence
  Description of Artificial Sequence: Synthetic oligonucleotide
uccacauauugguaguacu

SEQ ID NO: 1282345 - RNA, 19 nt, Artificial Sequence
  Description of Artificial Sequence: Synthetic oligonucleotide
aaugccaaacaggcgcagg

SEQ ID NO: 1282346 - RNA, 19 nt, Artificial Sequence
  Description of Artificial Sequence: Synthetic oligonucleotide
ugauggucccugaagucug

SEQ ID NO: 1282347 - RNA, 19 nt, Artificial Sequence
  Description of Artificial Sequence: Synthetic oligonucleotide
ugguucucagggaaucucc

SEQ ID NO: 1282348 - RNA, 19 nt, Artificial Sequence
  Description of Artificial Sequence: Synthetic oligonucleotide
ugcccaguagauaagccaa

SEQ ID NO: 1282349 - RNA, 19 nt, Artificial Sequence
  Description of Artificial Sequence: Synthetic oligonucleotide
ucucucacuacgucgggca

SEQ ID NO: 1282350 - RNA, 19 nt, Artificial Sequence
  Description of Artificial Sequence: Synthetic oligonucleotide
cuggauauagggaaugcca

SEQ ID NO: 1282351 - RNA, 19 nt, Artificial Sequence
  Description of Artificial Sequence: Synthetic oligonucleotide
uauugguaguacucuacaa

SEQ ID NO: 1282352 - RNA, 19 nt, Artificial Sequence
  Description of Artificial Sequence: Synthetic oligonucleotide
acuguugaggacucagcug

SEQ ID NO: 1282353 - RNA, 19 nt, Artificial Sequence
  Description of Artificial Sequence: Synthetic oligonucleotide
ucguccggggaauucauug

SEQ ID NO: 1282354 - RNA, 19 nt, Artificial Sequence
  Description of Artificial Sequence: Synthetic oligonucleotide
acuaggacagccuuagcuu

SEQ ID NO: 1282355 - RNA, 19 nt, Artificial Sequence
  Description of Artificial Sequence: Synthetic oligonucleotide
ugaaucucgaggugauucu

SEQ ID NO: 1282356 - RNA, 19 nt, Artificial Sequence
  Description of Artificial Sequence: Synthetic oligonucleotide
uccaauccuaauugguugu

SEQ ID NO: 1282357 - RNA, 19 nt, Artificial Sequence
  Description of Artificial Sequence: Synthetic oligonucleotide
ggacugaugucucucgugg

SEQ ID NO: 1282358 - RNA, 19 nt, Artificial Sequence
  Description of Artificial Sequence: Synthetic oligonucleotide
cuaauugguugugaaaguc

SEQ ID NO: 1282359 - RNA, 19 nt, Artificial Sequence
  Description of Artificial Sequence: Synthetic oligonucleotide
uugaggacucagcuguucu

SEQ ID NO: 1282360 - RNA, 19 nt, Artificial Sequence
  Description of Artificial Sequence: Synthetic oligonucleotide
cugguuugagcuucaugcc

SEQ ID NO: 1282361 - RNA, 19 nt, Artificial Sequence
  Description of Artificial Sequence: Synthetic oligonucleotide
acgucgggcaaauccgagc

SEQ ID NO: 1282362 - RNA, 19 nt, Artificial Sequence
  Description of Artificial Sequence: Synthetic oligonucleotide
ucagacucgcuuucuucag

SEQ ID NO: 1282363 - RNA, 19 nt, Artificial Sequence
  Description of Artificial Sequence: Synthetic oligonucleotide
aucuagccauucaucaggc

SEQ ID NO: 1282364 - RNA, 19 nt, Artificial Sequence
  Description of Artificial Sequence: Synthetic oligonucleotide
ucagucacuaggacagccu

SEQ ID NO: 1282365 - RNA, 19 nt, Artificial Sequence
  Description of Artificial Sequence: Synthetic oligonucleotide
agaaacgauccccuggaau

SEQ ID NO: 1282366 - RNA, 19 nt, Artificial Sequence
  Description of Artificial Sequence: Synthetic oligonucleotide
uggugugcacaccacagau

SEQ ID NO: 1282367 - RNA, 19 nt, Artificial Sequence
  Description of Artificial Sequence: Synthetic oligonucleotide
cauccucacuugaaucucg

SEQ ID NO: 1282368 - RNA, 19 nt, Artificial Sequence
  Description of Artificial Sequence: Synthetic oligonucleotide
  modified_base (9)..(9): a, c, u, g, unknown or other
gaugaaucnguuucaaguu

SEQ ID NO: 1282369 - RNA, 19 nt, Artificial Sequence
  Description of Artificial Sequence: Synthetic oligonucleotide
gauuaauaucuagccauuc

SEQ ID NO: 1282370 - RNA, 19 nt, Artificial Sequence
  Description of Artificial Sequence: Synthetic oligonucleotide
ucuagccauucaucaggcg

SEQ ID NO: 1282371 - RNA, 19 nt, Artificial Sequence
  Description of Artificial Sequence: Synthetic oligonucleotide
uugggaucccuucaguaua

SEQ ID NO: 1282372 - RNA, 19 nt, Artificial Sequence
  Description of Artificial Sequence: Synthetic oligonucleotide
aucucgaggugauucugag

SEQ ID NO: 1282373 - RNA, 19 nt, Artificial Sequence
  Description of Artificial Sequence: Synthetic oligonucleotide
  modified_base (19)..(19): a, c, u, g, unknown or other
uagaagcuccgaugaaucn

SEQ ID NO: 1282374 - RNA, 19 nt, Artificial Sequence
  Description of Artificial Sequence: Synthetic oligonucleotide
  modified_base (8)..(8): a, c, u, g, unknown or other
  modified_base (19)..(19): a, c, u, g, unknown or other
augaaucnguuucaaguun

SEQ ID NO: 1282375 - RNA, 19 nt, Artificial Sequence
  Description of Artificial Sequence: Synthetic oligonucleotide
ucaccggagcugcuagugg

SEQ ID NO: 1282376 - RNA, 19 nt, Artificial Sequence
  Description of Artificial Sequence: Synthetic oligonucleotide
ucacuugaaucucgaggug

SEQ ID NO: 1282377 - RNA, 19 nt, Artificial Sequence
  Description of Artificial Sequence: Synthetic oligonucleotide
guaagguccaggauggcac

SEQ ID NO: 1282378 - RNA, 19 nt, Artificial Sequence
  Description of Artificial Sequence: Synthetic oligonucleotide
gucacuaggacagccuuag

SEQ ID NO: 1282379 - RNA, 19 nt, Artificial Sequence
  Description of Artificial Sequence: Synthetic oligonucleotide
gagucaauccguagcuggg

SEQ ID NO: 1282380 - RNA, 19 nt, Artificial Sequence
  Description of Artificial Sequence: Synthetic oligonucleotide
aaacgauccccuggaauca

SEQ ID NO: 1282381 - RNA, 19 nt, Artificial Sequence
  Description of Artificial Sequence: Synthetic oligonucleotide
agagguuacucuccaggcu

SEQ ID NO: 1282382 - RNA, 19 nt, Artificial Sequence
  Description of Artificial Sequence: Synthetic oligonucleotide
uuuuaggaguggguccagg

SEQ ID NO: 1282383 - RNA, 19 nt, Artificial Sequence
  Description of Artificial Sequence: Synthetic oligonucleotide
ccucacuugaaucucgagg

SEQ ID NO: 1282384 - RNA, 19 nt, Artificial Sequence
  Description of Artificial Sequence: Synthetic oligonucleotide
cugcuaguggacauauaac

SEQ ID NO: 1282385 - RNA, 19 nt, Artificial Sequence
  Description of Artificial Sequence: Synthetic oligonucleotide
caugggagccuggauauag

SEQ ID NO: 1282386 - RNA, 19 nt, Artificial Sequence
  Description of Artificial Sequence: Synthetic oligonucleotide
  modified_base (2)..(2): a, c, u, g, unknown or other
  modified_base (13)..(13): a, c, u, g, unknown or other
cnguuucaaguunaccauc

SEQ ID NO: 1282387 - RNA, 19 nt, Artificial Sequence
  Description of Artificial Sequence: Synthetic oligonucleotide
ggacauauaaccaucccuc

SEQ ID NO: 1282388 - RNA, 19 nt, Artificial Sequence
  Description of Artificial Sequence: Synthetic oligonucleotide
ucucucgugggcucaucag

SEQ ID NO: 1282389 - RNA, 19 nt, Artificial Sequence
  Description of Artificial Sequence: Synthetic oligonucleotide
cuuauagacaugucgggcu

SEQ ID NO: 1282390 - RNA, 19 nt, Artificial Sequence
  Description of Artificial Sequence: Synthetic oligonucleotide
augucgggcuccaaagagc

SEQ ID NO: 1282391 - RNA, 19 nt, Artificial Sequence
  Description of Artificial Sequence: Synthetic oligonucleotide
cugagaauuuuaggagugg

SEQ ID NO: 1282392 - RNA, 19 nt, Artificial Sequence
  Description of Artificial Sequence: Synthetic oligonucleotide
ucgaggugauucugagagg

SEQ ID NO: 1282393 - RNA, 19 nt, Artificial Sequence
  Description of Artificial Sequence: Synthetic oligonucleotide
cagccaacaguugggaucc

SEQ ID NO: 1282394 - RNA, 19 nt, Artificial Sequence
  Description of Artificial Sequence: Synthetic oligonucleotide
cuucaugccaccacucuga

SEQ ID NO: 1282395 - RNA, 19 nt, Artificial Sequence
  Description of Artificial Sequence: Synthetic oligonucleotide
aagagccagauaucacuau

SEQ ID NO: 1282396 - RNA, 19 nt, Artificial Sequence
  Description of Artificial Sequence: Synthetic oligonucleotide
aagagucaauccguagcug

SEQ ID NO: 1282397 - RNA, 19 nt, Artificial Sequence
  Description of Artificial Sequence: Synthetic oligonucleotide
aacuuccguaacuucuuuu

SEQ ID NO: 1282398 - RNA, 19 nt, Artificial Sequence
  Description of Artificial Sequence: Synthetic oligonucleotide
ucgggcaaauccgagcagc

SEQ ID NO: 1282399 - RNA, 19 nt, Artificial Sequence
  Description of Artificial Sequence: Synthetic oligonucleotide
uacgucgggcaaauccgag

SEQ ID NO: 1282400 - RNA, 19 nt, Artificial Sequence
  Description of Artificial Sequence: Synthetic oligonucleotide
acauauugguaguacucua

SEQ ID NO: 1282401 - RNA, 19 nt, Artificial Sequence
  Description of Artificial Sequence: Synthetic oligonucleotide
cuaagagguuacucuccag

SEQ ID NO: 1282402 - RNA, 19 nt, Artificial Sequence
  Description of Artificial Sequence: Synthetic oligonucleotide
augguucucagggaaucuc

SEQ ID NO: 1282403 - RNA, 19 nt, Artificial Sequence
  Description of Artificial Sequence: Synthetic oligonucleotide
gacuccauccccauugguc

SEQ ID NO: 1282404 - RNA, 19 nt, Artificial Sequence
  Description of Artificial Sequence: Synthetic oligonucleotide
uccagccaaaauaccucug

SEQ ID NO: 1282405 - RNA, 19 nt, Artificial Sequence
  Description of Artificial Sequence: Synthetic oligonucleotide
uuuuggggacugaugucuc

SEQ ID NO: 1282406 - RNA, 19 nt, Artificial Sequence
  Description of Artificial Sequence: Synthetic oligonucleotide
aaucucgaggugauucuga

SEQ ID NO: 1282407 - RNA, 19 nt, Artificial Sequence
  Description of Artificial Sequence: Synthetic oligonucleotide
uauagacaugucgggcucc

SEQ ID NO: 1282408 - RNA, 19 nt, Artificial Sequence
  Description of Artificial Sequence: Synthetic oligonucleotide
uccggggaauucauugaga

SEQ ID NO: 1282409 - RNA, 19 nt, Artificial Sequence
  Description of Artificial Sequence: Synthetic oligonucleotide
uguucagagggagguuuag

SEQ ID NO: 1282410 - RNA, 19 nt, Artificial Sequence
  Description of Artificial Sequence: Synthetic oligonucleotide
cuugguuccucuucuaucu

SEQ ID NO: 1282411 - RNA, 19 nt, Artificial Sequence
  Description of Artificial Sequence: Synthetic oligonucleotide
cagcaauccguucuugcug

SEQ ID NO: 1282412 - RNA, 19 nt, Artificial Sequence
  Description of Artificial Sequence: Synthetic oligonucleotide
agaaacccaccacuuccug

SEQ ID NO: 1282413 - RNA, 19 nt, Artificial Sequence
  Description of Artificial Sequence: Synthetic oligonucleotide
gaaucucgaggugauucug

SEQ ID NO: 1282414 - RNA, 19 nt, Artificial Sequence
  Description of Artificial Sequence: Synthetic oligonucleotide
uuccgguccaauccuaauu

SEQ ID NO: 1282415 - RNA, 19 nt, Artificial Sequence
  Description of Artificial Sequence: Synthetic oligonucleotide
  modified_base (6)..(6): a, c, u, g, unknown or other
  modified_base (17)..(17): a, c, u, g, unknown or other
gaaucnguuucaaguunac

SEQ ID NO: 1282416 - RNA, 19 nt, Artificial Sequence
  Description of Artificial Sequence: Synthetic oligonucleotide
ugucccguccauccucacc

SEQ ID NO: 1282417 - RNA, 19 nt, Artificial Sequence
  Description of Artificial Sequence: Synthetic oligonucleotide
  modified_base (11)..(11): a, c, u, g, unknown or other
guuucaaguunaccaucac

SEQ ID NO: 1282418 - RNA, 19 nt, Artificial Sequence
  Description of Artificial Sequence: Synthetic oligonucleotide
uuuugagcuuccagugaau

SEQ ID NO: 1282419 - RNA, 19 nt, Artificial Sequence
  Description of Artificial Sequence: Synthetic oligonucleotide
auccuaauugguugugaaa

SEQ ID NO: 1282420 - RNA, 19 nt, Artificial Sequence
  Description of Artificial Sequence: Synthetic oligonucleotide
gcugcuaguggacauauaa

SEQ ID NO: 1282421 - RNA, 19 nt, Artificial Sequence
  Description of Artificial Sequence: Synthetic oligonucleotide
uccucacuugaaucucgag

SEQ ID NO: 1282422 - RNA, 19 nt, Artificial Sequence
  Description of Artificial Sequence: Synthetic oligonucleotide
uccugacuuuccagaaaca

SEQ ID NO: 1282423 - RNA, 19 nt, Artificial Sequence
  Description of Artificial Sequence: Synthetic oligonucleotide
ggcaaauccgagcagcuga

SEQ ID NO: 1282424 - RNA, 19 nt, Artificial Sequence
  Description of Artificial Sequence: Synthetic oligonucleotide
uguuccgguccaauccuaa

SEQ ID NO: 1282425 - RNA, 19 nt, Artificial Sequence
  Description of Artificial Sequence: Synthetic oligonucleotide
uaaucgcugcccaguagau

SEQ ID NO: 1282426 - RNA, 19 nt, Artificial Sequence
  Description of Artificial Sequence: Synthetic oligonucleotide
agaauuuccauggcuguua

SEQ ID NO: 1282427 - RNA, 19 nt, Artificial Sequence
  Description of Artificial Sequence: Synthetic oligonucleotide
acaugucgggcuccaaaga

SEQ ID NO: 1282428 - RNA, 19 nt, Artificial Sequence
  Description of Artificial Sequence: Synthetic oligonucleotide
uugucaacgucagguuugc

SEQ ID NO: 1282429 - RNA, 19 nt, Artificial Sequence
  Description of Artificial Sequence: Synthetic oligonucleotide
caacaguugggaucccuuc

SEQ ID NO: 1282430 - RNA, 19 nt, Artificial Sequence
  Description of Artificial Sequence: Synthetic oligonucleotide
ucucgaggugauucugaga

SEQ ID NO: 1282431 - RNA, 19 nt, Artificial Sequence
  Description of Artificial Sequence: Synthetic oligonucleotide
agacaugucgggcuccaaa

SEQ ID NO: 1282432 - RNA, 19 nt, Artificial Sequence
  Description of Artificial Sequence: Synthetic oligonucleotide
ugggaucccuucaguauaa

SEQ ID NO: 1282433 - RNA, 19 nt, Artificial Sequence
  Description of Artificial Sequence: Synthetic oligonucleotide
agccagauaucacuaucau

SEQ ID NO: 1282434 - RNA, 19 nt, Artificial Sequence
  Description of Artificial Sequence: Synthetic oligonucleotide
gaauucugcucugcuaaga

SEQ ID NO: 1282435 - RNA, 19 nt, Artificial Sequence
  Description of Artificial Sequence: Synthetic oligonucleotide
guuugccccauagaaacga

SEQ ID NO: 1282436 - RNA, 19 nt, Artificial Sequence
  Description of Artificial Sequence: Synthetic oligonucleotide
ggauucaucugucuucguc

SEQ ID NO: 1282437 - RNA, 19 nt, Artificial Sequence
  Description of Artificial Sequence: Synthetic oligonucleotide
ugggaaagccgggugucag

SEQ ID NO: 1282438 - RNA, 19 nt, Artificial Sequence
  Description of Artificial Sequence: Synthetic oligonucleotide
caucaggcgagcccuuggc

SEQ ID NO: 1282439 - RNA, 19 nt, Artificial Sequence
  Description of Artificial Sequence: Synthetic oligonucleotide
uuugccccauagaaacgau

SEQ ID NO: 1282440 - RNA, 19 nt, Artificial Sequence
  Description of Artificial Sequence: Synthetic oligonucleotide
agccauucaucaggcgagc

SEQ ID NO: 1282441 - RNA, 19 nt, Artificial Sequence
  Description of Artificial Sequence: Synthetic oligonucleotide
aucuugucaacgucagguu

SEQ ID NO: 1282442 - RNA, 19 nt, Artificial Sequence
  Description of Artificial Sequence: Synthetic oligonucleotide
cugcccaguagauaagcca

SEQ ID NO: 1282443 - RNA, 19 nt, Artificial Sequence
  Description of Artificial Sequence: Synthetic oligonucleotide
uugccccauagaaacgauc

SEQ ID NO: 1282444 - RNA, 19 nt, Artificial Sequence
  Description of Artificial Sequence: Synthetic oligonucleotide
uuguucagagggagguuua

SEQ ID NO: 1282445 - RNA, 19 nt, Artificial Sequence
  Description of Artificial Sequence: Synthetic oligonucleotide
agccuuagcuugucccguc

SEQ ID NO: 1282446 - RNA, 19 nt, Artificial Sequence
  Description of Artificial Sequence: Synthetic oligonucleotide
uaauuuguuccgguccaau

SEQ ID NO: 1282447 - RNA, 19 nt, Artificial Sequence
  Description of Artificial Sequence: Synthetic oligonucleotide
  modified_base (7)..(7): a, c, u, g, unknown or other
caaguunaccaucacugau

SEQ ID NO: 1282448 - RNA, 19 nt, Artificial Sequence
  Description of Artificial Sequence: Synthetic oligonucleotide
agguaagcaucugcaacug

SEQ ID NO: 1282449 - RNA, 19 nt, Artificial Sequence
  Description of Artificial Sequence: Synthetic oligonucleotide
  modified_base (12)..(12): a, c, u, g, unknown or other
uccgaugaaucnguuucaa

SEQ ID NO: 1282450 - RNA, 19 nt, Artificial Sequence
  Description of Artificial Sequence: Synthetic oligonucleotide
aguugcuuuaguacuggaa

SEQ ID NO: 1282451 - RNA, 19 nt, Artificial Sequence
  Description of Artificial Sequence: Synthetic oligonucleotide
ccacauauugguaguacuc

SEQ ID NO: 1282452 - RNA, 19 nt, Artificial Sequence
  Description of Artificial Sequence: Synthetic oligonucleotide
guuacacagccaacaguug

SEQ ID NO: 1282453 - RNA, 19 nt, Artificial Sequence
  Description of Artificial Sequence: Synthetic oligonucleotide
uuaauuuguuccgguccaa

SEQ ID NO: 1282454 - RNA, 19 nt, Artificial Sequence
  Description of Artificial Sequence: Synthetic oligonucleotide
cuaguggacauauaaccau

SEQ ID NO: 1282455 - RNA, 19 nt, Artificial Sequence
  Description of Artificial Sequence: Synthetic oligonucleotide
uuccgaguuccucuugguu

SEQ ID NO: 1282456 - RNA, 19 nt, Artificial Sequence
  Description of Artificial Sequence: Synthetic oligonucleotide
agggaaugccaaacaggcg

SEQ ID NO: 1282457 - RNA, 19 nt, Artificial Sequence
  Description of Artificial Sequence: Synthetic oligonucleotide
ugaugucucucgugggcuc

SEQ ID NO: 1282458 - RNA, 19 nt, Artificial Sequence
  Description of Artificial Sequence: Synthetic oligonucleotide
uggucccaugggcuuuggg

SEQ ID NO: 1282459 - RNA, 19 nt, Artificial Sequence
  Description of Artificial Sequence: Synthetic oligonucleotide
uagaaacgauccccuggaa

SEQ ID NO: 1282460 - RNA, 19 nt, Artificial Sequence
  Description of Artificial Sequence: Synthetic oligonucleotide
gucaauccguagcuggguc

SEQ ID NO: 1282461 - RNA, 19 nt, Artificial Sequence
  Description of Artificial Sequence: Synthetic oligonucleotide
cacuaggacagccuuagcu

SEQ ID NO: 1282462 - RNA, 19 nt, Artificial Sequence
  Description of Artificial Sequence: Synthetic oligonucleotide
gaagucugaucaguaaggu

SEQ ID NO: 1282463 - RNA, 19 nt, Artificial Sequence
  Description of Artificial Sequence: Synthetic oligonucleotide
uguuaagucuuuggcuuuu

SEQ ID NO: 1282464 - RNA, 19 nt, Artificial Sequence
  Description of Artificial Sequence: Synthetic oligonucleotide
aucaggcgagcccuuggca

SEQ ID NO: 1282465 - RNA, 19 nt, Artificial Sequence
  Description of Artificial Sequence: Synthetic oligonucleotide
  modified_base (10)..(10): a, c, u, g, unknown or other
cgaugaaucnguuucaagu

SEQ ID NO: 1282466 - RNA, 19 nt, Artificial Sequence
  Description of Artificial Sequence: Synthetic oligonucleotide
caucucucacuacgucggg

SEQ ID NO: 1282467 - RNA, 19 nt, Artificial Sequence
  Description of Artificial Sequence: Synthetic oligonucleotide
ugugagcaucucucacuac

SEQ ID NO: 1282468 - RNA, 19 nt, Artificial Sequence
  Description of Artificial Sequence: Synthetic oligonucleotide
cacuugaaucucgagguga

SEQ ID NO: 1282469 - RNA, 19 nt, Artificial Sequence
  Description of Artificial Sequence: Synthetic oligonucleotide
gguuugagcuucaugccac

SEQ ID NO: 1282470 - RNA, 19 nt, Artificial Sequence
  Description of Artificial Sequence: Synthetic oligonucleotide
ggggaauucauugagaauu

SEQ ID NO: 1282471 - RNA, 19 nt, Artificial Sequence
  Description of Artificial Sequence: Synthetic oligonucleotide
gaaagccgggugucagcug

SEQ ID NO: 1282472 - RNA, 19 nt, Artificial Sequence
  Description of Artificial Sequence: Synthetic oligonucleotide
guacucuacaaacuuguuu

SEQ ID NO: 1282473 - RNA, 19 nt, Artificial Sequence
  Description of Artificial Sequence: Synthetic oligonucleotide
agucaauccguagcugggu

SEQ ID NO: 1282474 - RNA, 19 nt, Artificial Sequence
  Description of Artificial Sequence: Synthetic oligonucleotide
  modified_base (4)..(4): a, c, u, g, unknown or other
guunaccaucacugaucac

SEQ ID NO: 1282475 - RNA, 19 nt, Artificial Sequence
  Description of Artificial Sequence: Synthetic oligonucleotide
guauaaucgcugcccagua

SEQ ID NO: 1282476 - RNA, 19 nt, Artificial Sequence
  Description of Artificial Sequence: Synthetic oligonucleotide
guuuagaagcuccgaugaa

SEQ ID NO: 1282477 - RNA, 19 nt, Artificial Sequence
  Description of Artificial Sequence: Synthetic oligonucleotide
agccuggauauagggaaug

SEQ ID NO: 1282478 - RNA, 19 nt, Artificial Sequence
  Description of Artificial Sequence: Synthetic oligonucleotide
cucaccggagcugcuagug

SEQ ID NO: 1282479 - RNA, 19 nt, Artificial Sequence
  Description of Artificial Sequence: Synthetic oligonucleotide
  modified_base (17)..(17): a, c, u, g, unknown or other
gaagcuccgaugaaucngu

SEQ ID NO: 1282480 - RNA, 19 nt, Artificial Sequence
  Description of Artificial Sequence: Synthetic oligonucleotide
ucgugggcucaucaggcuu

SEQ ID NO: 1282481 - RNA, 19 nt, Artificial Sequence
  Description of Artificial Sequence: Synthetic oligonucleotide
  modified_base (13)..(13): a, c, u, g, unknown or other
cuccgaugaaucnguuuca

SEQ ID NO: 1282482 - RNA, 19 nt, Artificial Sequence
  Description of Artificial Sequence: Synthetic oligonucleotide
cuuuugccucauccagggc

SEQ ID NO: 1282483 - RNA, 19 nt, Artificial Sequence
  Description of Artificial Sequence: Synthetic oligonucleotide
gguaagcaucugcaacugc

SEQ ID NO: 1282484 - RNA, 19 nt, Artificial Sequence
  Description of Artificial Sequence: Synthetic oligonucleotide
cauggggauuggcugcaac

SEQ ID NO: 1282485 - RNA, 19 nt, Artificial Sequence
  Description of Artificial Sequence: Synthetic oligonucleotide
gauccccuggaaucaucca

SEQ ID NO: 1282486 - RNA, 19 nt, Artificial Sequence
  Description of Artificial Sequence: Synthetic oligonucleotide
aggacagccuuagcuuguc

SEQ ID NO: 1282487 - RNA, 19 nt, Artificial Sequence
  Description of Artificial Sequence: Synthetic oligonucleotide
ccccauagaaacgaucccc

SEQ ID NO: 1282488 - RNA, 19 nt, Artificial Sequence
  Description of Artificial Sequence: Synthetic oligonucleotide
ggaucccuucaguauaauc

SEQ ID NO: 1282489 - RNA, 19 nt, Artificial Sequence
  Description of Artificial Sequence: Synthetic oligonucleotide
ucucacuacgucgggcaaa

SEQ ID NO: 1282490 - RNA, 19 nt, Artificial Sequence
  Description of Artificial Sequence: Synthetic oligonucleotide
cugucuucgucuuguucca

SEQ ID NO: 1282491 - RNA, 19 nt, Artificial Sequence
  Description of Artificial Sequence: Synthetic oligonucleotide
ggauauagggaaugccaaa

SEQ ID NO: 1282492 - RNA, 19 nt, Artificial Sequence
  Description of Artificial Sequence: Synthetic oligonucleotide
uccaacucccuggcagcag

SEQ ID NO: 1282493 - RNA, 19 nt, Artificial Sequence
  Description of Artificial Sequence: Synthetic oligonucleotide
gggagguuuagaagcuccg

SEQ ID NO: 1282494 - RNA, 19 nt, Artificial Sequence
  Description of Artificial Sequence: Synthetic oligonucleotide
ucccguccauccucaccgg

SEQ ID NO: 1282495 - RNA, 19 nt, Artificial Sequence
  Description of Artificial Sequence: Synthetic oligonucleotide
aaucgcugcccaguagaua

SEQ ID NO: 1282496 - RNA, 19 nt, Artificial Sequence
  Description of Artificial Sequence: Synthetic oligonucleotide
cacauauugguaguacucu

SEQ ID NO: 1282497 - RNA, 19 nt, Artificial Sequence
  Description of Artificial Sequence: Synthetic oligonucleotide
ucgucuuguuccagccaaa

SEQ ID NO: 1282498 - RNA, 19 nt, Artificial Sequence
  Description of Artificial Sequence: Synthetic oligonucleotide
gguuugccccauagaaacg

SEQ ID NO: 1282499 - RNA, 19 nt, Artificial Sequence
  Description of Artificial Sequence: Synthetic oligonucleotide
uuguuccgguccaauccua

SEQ ID NO: 1282500 - RNA, 19 nt, Artificial Sequence
  Description of Artificial Sequence: Synthetic oligonucleotide
gccagauaucacuaucauc

SEQ ID NO: 1282501 - RNA, 19 nt, Artificial Sequence
  Description of Artificial Sequence: Synthetic oligonucleotide
  modified_base (15)..(15): a, c, u, g, unknown or other
agcuccgaugaaucnguuu

SEQ ID NO: 1282502 - RNA, 19 nt, Artificial Sequence
  Description of Artificial Sequence: Synthetic oligonucleotide
uguugaggacucagcuguu

SEQ ID NO: 1282503 - RNA, 19 nt, Artificial Sequence
  Description of Artificial Sequence: Synthetic oligonucleotide
uucuuccccguggugugca

SEQ ID NO: 1282504 - RNA, 19 nt, Artificial Sequence
  Description of Artificial Sequence: Synthetic oligonucleotide
gucucucgugggcucauca

SEQ ID NO: 1282505 - RNA, 19 nt, Artificial Sequence
  Description of Artificial Sequence: Synthetic oligonucleotide
auuggucccaugggcuuug

SEQ ID NO: 1282506 - RNA, 19 nt, Artificial Sequence
  Description of Artificial Sequence: Synthetic oligonucleotide
gucgggcaaauccgagcag

SEQ ID NO: 1282507 - RNA, 19 nt, Artificial Sequence
  Description of Artificial Sequence: Synthetic oligonucleotide
aacgauccccuggaaucau

SEQ ID NO: 1282508 - RNA, 19 nt, Artificial Sequence
  Description of Artificial Sequence: Synthetic oligonucleotide
aggccugagguaagcaucu

SEQ ID NO: 1282509 - RNA, 19 nt, Artificial Sequence
  Description of Artificial Sequence: Synthetic oligonucleotide
cuacgucgggcaaauccga

SEQ ID NO: 1282510 - RNA, 19 nt, Artificial Sequence
  Description of Artificial Sequence: Synthetic oligonucleotide
  modified_base (11)..(11): a, c, u, g, unknown or other
ccgaugaaucnguuucaag

SEQ ID NO: 1282511 - RNA, 19 nt, Artificial Sequence
  Description of Artificial Sequence: Synthetic oligonucleotide
guugaggacucagcuguuc

SEQ ID NO: 1282512 - RNA, 19 nt, Artificial Sequence
  Description of Artificial Sequence: Synthetic oligonucleotide
uggugucauggggauuggc

SEQ ID NO: 1282513 - RNA, 19 nt, Artificial Sequence
  Description of Artificial Sequence: Synthetic oligonucleotide
aacgucagguuugccccau

SEQ ID NO: 1282514 - RNA, 19 nt, Artificial Sequence
  Description of Artificial Sequence: Synthetic oligonucleotide
ccgguccaauccuaauugg

SEQ ID NO: 1282515 - RNA, 19 nt, Artificial Sequence
  Description of Artificial Sequence: Synthetic oligonucleotide
aguacucuacaaacuuguu

SEQ ID NO: 1282516 - RNA, 19 nt, Artificial Sequence
  Description of Artificial Sequence: Synthetic oligonucleotide
cuucgucuuguuccagcca

SEQ ID NO: 1282517 - RNA, 19 nt, Artificial Sequence
  Description of Artificial Sequence: Synthetic oligonucleotide
ugucaacgucagguuugcc

SEQ ID NO: 1282518 - RNA, 19 nt, Artificial Sequence
  Description of Artificial Sequence: Synthetic oligonucleotide
ccauagaaacgauccccug

SEQ ID NO: 1282519 - RNA, 19 nt, Artificial Sequence
  Description of Artificial Sequence: Synthetic oligonucleotide
cgauccccuggaaucaucc

SEQ ID NO: 1282520 - RNA, 19 nt, Artificial Sequence
  Description of Artificial Sequence: Synthetic oligonucleotide
cuguuacacagccaacagu

SEQ ID NO: 1282521 - RNA, 19 nt, Artificial Sequence
  Description of Artificial Sequence: Synthetic oligonucleotide
aguccacauauugguagua

SEQ ID NO: 1282522 - RNA, 19 nt, Artificial Sequence
  Description of Artificial Sequence: Synthetic oligonucleotide
acgauccccuggaaucauc

SEQ ID NO: 1282523 - RNA, 19 nt, Artificial Sequence
  Description of Artificial Sequence: Synthetic oligonucleotide
auccgagcagcugacuguu

SEQ ID NO: 1282524 - RNA, 19 nt, Artificial Sequence
  Description of Artificial Sequence: Synthetic oligonucleotide
  modified_base (16)..(16): a, c, u, g, unknown or other
aagcuccgaugaaucnguu

SEQ ID NO: 1282525 - RNA, 19 nt, Artificial Sequence
  Description of Artificial Sequence: Synthetic oligonucleotide
ggaaugccaaacaggcgca

SEQ ID NO: 1282526 - RNA, 19 nt, Artificial Sequence
  Description of Artificial Sequence: Synthetic oligonucleotide
ccguccauccucaccggag

SEQ ID NO: 1282527 - RNA, 19 nt, Artificial Sequence
  Description of Artificial Sequence: Synthetic oligonucleotide
gcugcccaguagauaagcc

SEQ ID NO: 1282528 - RNA, 19 nt, Artificial Sequence
  Description of Artificial Sequence: Synthetic oligonucleotide
ccggggaauucauugagaa

SEQ ID NO: 1282529 - RNA, 19 nt, Artificial Sequence
  Description of Artificial Sequence: Synthetic oligonucleotide
gcaaauccgagcagcugac

SEQ ID NO: 1282530 - RNA, 19 nt, Artificial Sequence
  Description of Artificial Sequence: Synthetic oligonucleotide
uccuucuuuuggggacuga

SEQ ID NO: 1282531 - RNA, 19 nt, Artificial Sequence
  Description of Artificial Sequence: Synthetic oligonucleotide
gacucgcuuucuucagacu

SEQ ID NO: 1282532 - RNA, 19 nt, Artificial Sequence
  Description of Artificial Sequence: Synthetic oligonucleotide
ggacagccuuagcuugucc

SEQ ID NO: 1282533 - RNA, 19 nt, Artificial Sequence
  Description of Artificial Sequence: Synthetic oligonucleotide
gccuggauauagggaaugc

SEQ ID NO: 1282534 - RNA, 19 nt, Artificial Sequence
  Description of Artificial Sequence: Synthetic oligonucleotide
ccaauccuaauugguugug

SEQ ID NO: 1282535 - RNA, 19 nt, Artificial Sequence
  Description of Artificial Sequence: Synthetic oligonucleotide
aacuuccaucagacucgcu

SEQ ID NO: 1282536 - RNA, 19 nt, Artificial Sequence
  Description of Artificial Sequence: Synthetic oligonucleotide
aagccgggugucagcugca

SEQ ID NO: 1282537 - RNA, 19 nt, Artificial Sequence
  Description of Artificial Sequence: Synthetic oligonucleotide
cucucacuacgucgggcaa

SEQ ID NO: 1282538 - RNA, 19 nt, Artificial Sequence
  Description of Artificial Sequence: Synthetic oligonucleotide
gguccaauccuaauugguu

SEQ ID NO: 1282539 - RNA, 19 nt, Artificial Sequence
  Description of Artificial Sequence: Synthetic oligonucleotide
uccccguggugugcacacc

SEQ ID NO: 1282540 - RNA, 19 nt, Artificial Sequence
  Description of Artificial Sequence: Synthetic oligonucleotide
cgucgggcaaauccgagca

SEQ ID NO: 1282541 - RNA, 19 nt, Artificial Sequence
  Description of Artificial Sequence: Synthetic oligonucleotide
guuccgguccaauccuaau

SEQ ID NO: 1282542 - RNA, 19 nt, Artificial Sequence
  Description of Artificial Sequence: Synthetic oligonucleotide
cucacuacgucgggcaaau

SEQ ID NO: 1282543 - RNA, 19 nt, Artificial Sequence
  Description of Artificial Sequence: Synthetic oligonucleotide
ccgggugucagcugcaacu

SEQ ID NO: 1282544 - RNA, 19 nt, Artificial Sequence
  Description of Artificial Sequence: Synthetic oligonucleotide
ucacuacgucgggcaaauc

SEQ ID NO: 1282545 - RNA, 19 nt, Artificial Sequence
  Description of Artificial Sequence: Synthetic oligonucleotide
auucaucaggcgagcccuu

SEQ ID NO: 1282546 - RNA, 19 nt, Artificial Sequence
  Description of Artificial Sequence: Synthetic oligonucleotide
cacagccaacaguugggau

SEQ ID NO: 1282547 - RNA, 19 nt, Artificial Sequence
  Description of Artificial Sequence: Synthetic oligonucleotide
gagccuggauauagggaau

SEQ ID NO: 1282548 - RNA, 19 nt, Artificial Sequence
  Description of Artificial Sequence: Synthetic oligonucleotide
gggaauucauugagaauuu

SEQ ID NO: 1282549 - RNA, 19 nt, Artificial Sequence
  Description of Artificial Sequence: Synthetic oligonucleotide
cgcugcccaguagauaagc

SEQ ID NO: 1282550 - RNA, 19 nt, Artificial Sequence
  Description of Artificial Sequence: Synthetic oligonucleotide
acgucagguuugccccaua

SEQ ID NO: 1282551 - RNA, 19 nt, Artificial Sequence
  Description of Artificial Sequence: Synthetic oligonucleotide
caacuuccguaacuucuuu

SEQ ID NO: 1282552 - RNA, 19 nt, Artificial Sequence
  Description of Artificial Sequence: Synthetic oligonucleotide
ggagcugcuaguggacaua

SEQ ID NO: 1282553 - RNA, 19 nt, Artificial Sequence
  Description of Artificial Sequence: Synthetic oligonucleotide
gcaacuuccguaacuucuu

SEQ ID NO: 1282554 - RNA, 19 nt, Artificial Sequence
  Description of Artificial Sequence: Synthetic oligonucleotide
cguccggggaauucauuga

SEQ ID NO: 1282555 - RNA, 19 nt, Artificial Sequence
  Description of Artificial Sequence: Synthetic oligonucleotide
gucgggcuccaaagagcca

SEQ ID NO: 1282556 - RNA, 19 nt, Artificial Sequence
  Description of Artificial Sequence: Synthetic oligonucleotide
ccguggugugcacaccaca

SEQ ID NO: 1282557 - RNA, 19 nt, Artificial Sequence
  Description of Artificial Sequence: Synthetic oligonucleotide
ggccugagguaagcaucug

SEQ ID NO: 1282558 - RNA, 19 nt, Artificial Sequence
  Description of Artificial Sequence: Synthetic oligonucleotide
agcugcuaguggacauaua

SEQ ID NO: 1282559 - RNA, 19 nt, Artificial Sequence
  Description of Artificial Sequence: Synthetic oligonucleotide
ccaacaguugggaucccuu

SEQ ID NO: 1282560 - RNA, 19 nt, Artificial Sequence
  Description of Artificial Sequence: Synthetic oligonucleotide
cauuggucccaugggcuuu

SEQ ID NO: 1282561 - RNA, 19 nt, Artificial Sequence
  Description of Artificial Sequence: Synthetic oligonucleotide
cgguccaauccuaauuggu

SEQ ID NO: 1282562 - RNA, 19 nt, Artificial Sequence
  Description of Artificial Sequence: Synthetic oligonucleotide
cucguccggggaauucauu

SEQ ID NO: 1282563 - RNA, 19 nt, Artificial Sequence
  Description of Artificial Sequence: Synthetic oligonucleotide
ggccucguccggggaauuc

SEQ ID NO: 1282564 - RNA, 19 nt, Artificial Sequence
  Description of Artificial Sequence: Synthetic oligonucleotide
ccaggccucguccggggaa

SEQ ID NO: 1282565 - RNA, 19 nt, Artificial Sequence
  Description of Artificial Sequence: Synthetic oligonucleotide
aggccucguccggggaauu

SEQ ID NO: 1282566 - RNA, 19 nt, Artificial Sequence
  Description of Artificial Sequence: Synthetic oligonucleotide
ccaucagacucgcuuucuu

SEQ ID NO: 1282567 - RNA, 19 nt, Artificial Sequence
  Description of Artificial Sequence: Synthetic oligonucleotide
caggccucguccggggaau

SEQ ID NO: 1282568 - RNA, 19 nt, Artificial Sequence
  Description of Artificial Sequence: Synthetic oligonucleotide
cgggcaaauccgagcagcu

SEQ ID NO: 1282569 - RNA, 19 nt, Artificial Sequence
  Description of Artificial Sequence: Synthetic oligonucleotide
ccucguccggggaauucau

SEQ ID NO: 1282570 - RNA, 19 nt, Artificial Sequence
  Description of Artificial Sequence: Synthetic oligonucleotide
gggaucccuucaguauaau

SEQ ID NO: 1282571 - RNA, 19 nt, Artificial Sequence
  Description of Artificial Sequence: Synthetic oligonucleotide
ccucaccggagcugcuagu

SEQ ID NO: 1282572 - RNA, 19 nt, Artificial Sequence
  Description of Artificial Sequence: Synthetic oligonucleotide
ggcgagcccuuggcaucuc

SEQ ID NO: 1282573 - RNA, 19 nt, Artificial Sequence
  Description of Artificial Sequence: Synthetic oligonucleotide
aacuaguuagaccggaggc

SEQ ID NO: 1282574 - RNA, 19 nt, Artificial Sequence
  Description of Artificial Sequence: Synthetic oligonucleotide
aacacccaaaaccacaugg

SEQ ID NO: 1282575 - RNA, 19 nt, Artificial Sequence
  Description of Artificial Sequence: Synthetic oligonucleotide
acauucgugacagagaagc

SEQ ID NO: 1282576 - RNA, 19 nt, Artificial Sequence
  Description of Artificial Sequence: Synthetic oligonucleotide
uaugucuugaacuggaccc

SEQ ID NO: 1282577 - RNA, 19 nt, Artificial Sequence
  Description of Artificial Sequence: Synthetic oligonucleotide
guaagggcuguauagaggg

SEQ ID NO: 1282578 - RNA, 19 nt, Artificial Sequence
  Description of Artificial Sequence: Synthetic oligonucleotide
ugaaccucaauccagcccu

SEQ ID NO: 1282579 - RNA, 19 nt, Artificial Sequence
  Description of Artificial Sequence: Synthetic oligonucleotide
uccagaaauuccuuuacag

SEQ ID NO: 1282580 - RNA, 19 nt, Artificial Sequence
  Description of Artificial Sequence: Synthetic oligonucleotide
agaguggggacauaguggg

SEQ ID NO: 1282581 - RNA, 19 nt, Artificial Sequence
  Description of Artificial Sequence: Synthetic oligonucleotide
auggcguuaccacacauac

SEQ ID NO: 1282582 - RNA, 19 nt, Artificial Sequence
  Description of Artificial Sequence: Synthetic oligonucleotide
uggauaagaaagcagccca

SEQ ID NO: 1282583 - RNA, 19 nt, Artificial Sequence
  Description of Artificial Sequence: Synthetic oligonucleotide
aacagguaccaugggaucc

SEQ ID NO: 1282584 - RNA, 19 nt, Artificial Sequence
  Description of Artificial Sequence: Synthetic oligonucleotide
cacgaugccagccaaaggg

SEQ ID NO: 1282585 - RNA, 19 nt, Artificial Sequence
  Description of Artificial Sequence: Synthetic oligonucleotide
uagaguggggacauagugg

SEQ ID NO: 1282586 - RNA, 19 nt, Artificial Sequence
  Description of Artificial Sequence: Synthetic oligonucleotide
ugugacaacagaccguagc

SEQ ID NO: 1282587 - RNA, 19 nt, Artificial Sequence
  Description of Artificial Sequence: Synthetic oligonucleotide
agauguacuugacaugagg

SEQ ID NO: 1282588 - RNA, 19 nt, Artificial Sequence
  Description of Artificial Sequence: Synthetic oligonucleotide
uugagugucacagggaucc

SEQ ID NO: 1282589 - RNA, 19 nt, Artificial Sequence
  Description of Artificial Sequence: Synthetic oligonucleotide
auucgauuggcagggaucc

SEQ ID NO: 1282590 - RNA, 19 nt, Artificial Sequence
  Description of Artificial Sequence: Synthetic oligonucleotide
aacucgccugcacaggagc

SEQ ID NO: 1282591 - RNA, 19 nt, Artificial Sequence
  Description of Artificial Sequence: Synthetic oligonucleotide
uaagaaagcagcccacccc

SEQ ID NO: 1282592 - RNA, 19 nt, Artificial Sequence
  Description of Artificial Sequence: Synthetic oligonucleotide
aauaaccgcggccguuucc

SEQ ID NO: 1282593 - RNA, 19 nt, Artificial Sequence
  Description of Artificial Sequence: Synthetic oligonucleotide
agccccaucaggucaaacc

SEQ ID NO: 1282594 - RNA, 19 nt, Artificial Sequence
  Description of Artificial Sequence: Synthetic oligonucleotide
gaguggauaagaaagcagc

SEQ ID NO: 1282595 - RNA, 19 nt, Artificial Sequence
  Description of Artificial Sequence: Synthetic oligonucleotide
cucaaugccacgaugccag

SEQ ID NO: 1282596 - RNA, 19 nt, Artificial Sequence
  Description of Artificial Sequence: Synthetic oligonucleotide
aguagcaagggccccggcc

SEQ ID NO: 1282597 - RNA, 19 nt, Artificial Sequence
  Description of Artificial Sequence: Synthetic oligonucleotide
ucagauccaagauggugcg

SEQ ID NO: 1282598 - RNA, 19 nt, Artificial Sequence
  Description of Artificial Sequence: Synthetic oligonucleotide
ggagccagcaacuaguuag

SEQ ID NO: 1282599 - RNA, 19 nt, Artificial Sequence
  Description of Artificial Sequence: Synthetic oligonucleotide
gauggugcgguguuguuug

SEQ ID NO: 1282600 - RNA, 19 nt, Artificial Sequence
  Description of Artificial Sequence: Synthetic oligonucleotide
aggagagacgcgauuaucc

SEQ ID NO: 1282601 - RNA, 19 nt, Artificial Sequence
  Description of Artificial Sequence: Synthetic oligonucleotide
cuuucucccgcacagacac

SEQ ID NO: 1282602 - RNA, 19 nt, Artificial Sequence
  Description of Artificial Sequence: Synthetic oligonucleotide
gacgauucgauuggcaggg

SEQ ID NO: 1282603 - RNA, 19 nt, Artificial Sequence
  Description of Artificial Sequence: Synthetic oligonucleotide
agggacucuaccuccacac

SEQ ID NO: 1282604 - RNA, 19 nt, Artificial Sequence
  Description of Artificial Sequence: Synthetic oligonucleotide
aaccgaacagguaccaugg

SEQ ID NO: 1282605 - RNA, 19 nt, Artificial Sequence
  Description of Artificial Sequence: Synthetic oligonucleotide
gaaaguuccgaugcagagg

SEQ ID NO: 1282606 - RNA, 19 nt, Artificial Sequence
  Description of Artificial Sequence: Synthetic oligonucleotide
agcgucagugagcaggggc

SEQ ID NO: 1282607 - RNA, 19 nt, Artificial Sequence
  Description of Artificial Sequence: Synthetic oligonucleotide
gaaccgaacagguaccaug

SEQ ID NO: 1282608 - RNA, 19 nt, Artificial Sequence
  Description of Artificial Sequence: Synthetic oligonucleotide
aggacgauucgauuggcag

SEQ ID NO: 1282609 - RNA, 19 nt, Artificial Sequence
  Description of Artificial Sequence: Synthetic oligonucleotide
uuaccacacauacacugca

SEQ ID NO: 1282610 - RNA, 19 nt, Artificial Sequence
  Description of Artificial Sequence: Synthetic oligonucleotide
ggcguuaccacacauacac

SEQ ID NO: 1282611 - RNA, 19 nt, Artificial Sequence
  Description of Artificial Sequence: Synthetic oligonucleotide
uugaaccucaauccagccc

SEQ ID NO: 1282612 - RNA, 19 nt, Artificial Sequence
  Description of Artificial Sequence: Synthetic oligonucleotide
cuagaguggggacauagug

SEQ ID NO: 1282613 - RNA, 19 nt, Artificial Sequence
  Description of Artificial Sequence: Synthetic oligonucleotide
acacauucgugacagagaa

SEQ ID NO: 1282614 - RNA, 19 nt, Artificial Sequence
  Description of Artificial Sequence: Synthetic oligonucleotide
uuagaccggaggcaggagc

SEQ ID NO: 1282615 - RNA, 19 nt, Artificial Sequence
  Description of Artificial Sequence: Synthetic oligonucleotide
gacgcgauuauccgggcag

SEQ ID NO: 1282616 - RNA, 19 nt, Artificial Sequence
  Description of Artificial Sequence: Synthetic oligonucleotide
caggugugacaacagaccg

SEQ ID NO: 1282617 - RNA, 19 nt, Artificial Sequence
  Description of Artificial Sequence: Synthetic oligonucleotide
gauguacuugacaugagga

SEQ ID NO: 1282618 - RNA, 19 nt, Artificial Sequence
  Description of Artificial Sequence: Synthetic oligonucleotide
aauuccuuuacagcugcca

SEQ ID NO: 1282619 - RNA, 19 nt, Artificial Sequence
  Description of Artificial Sequence: Synthetic oligonucleotide
caacuaguuagaccggagg

SEQ ID NO: 1282620 - RNA, 19 nt, Artificial Sequence
  Description of Artificial Sequence: Synthetic oligonucleotide
gagagacgcgauuauccgg

SEQ ID NO: 1282621 - RNA, 19 nt, Artificial Sequence
  Description of Artificial Sequence: Synthetic oligonucleotide
auaaccgcggccguuuccc

SEQ ID NO: 1282622 - RNA, 19 nt, Artificial Sequence
  Description of Artificial Sequence: Synthetic oligonucleotide
uggcauugaaggauggcca

SEQ ID NO: 1282623 - RNA, 19 nt, Artificial Sequence
  Description of Artificial Sequence: Synthetic oligonucleotide
gauaagaaagcagcccacc

SEQ ID NO: 1282624 - RNA, 19 nt, Artificial Sequence
  Description of Artificial Sequence: Synthetic oligonucleotide
guaugucuugaacuggacc

SEQ ID NO: 1282625 - RNA, 19 nt, Artificial Sequence
  Description of Artificial Sequence: Synthetic oligonucleotide
agguaagggcuguauagag

SEQ ID NO: 1282626 - RNA, 19 nt, Artificial Sequence
  Description of Artificial Sequence: Synthetic oligonucleotide
ugcgaaaagccacccagga

SEQ ID NO: 1282627 - RNA, 19 nt, Artificial Sequence
  Description of Artificial Sequence: Synthetic oligonucleotide
ugaggacagauguacuuga

SEQ ID NO: 1282628 - RNA, 19 nt, Artificial Sequence
  Description of Artificial Sequence: Synthetic oligonucleotide
agagacgcgauuauccggg

SEQ ID NO: 1282629 - RNA, 19 nt, Artificial Sequence
  Description of Artificial Sequence: Synthetic oligonucleotide
aagacaagacacaaccccu

SEQ ID NO: 1282630 - RNA, 19 nt, Artificial Sequence
  Description of Artificial Sequence: Synthetic oligonucleotide
aaagcggggcuagugagug

SEQ ID NO: 1282631 - RNA, 19 nt, Artificial Sequence
  Description of Artificial Sequence: Synthetic oligonucleotide
uccgggcagaaucacuggg

SEQ ID NO: 1282632 - RNA, 19 nt, Artificial Sequence
  Description of Artificial Sequence: Synthetic oligonucleotide
cuggggaccgcaaugggag

SEQ ID NO: 1282633 - RNA, 19 nt, Artificial Sequence
  Description of Artificial Sequence: Synthetic oligonucleotide
cuuccgagaccuuucgggc

SEQ ID NO: 1282634 - RNA, 19 nt, Artificial Sequence
  Description of Artificial Sequence: Synthetic oligonucleotide
cuaguuagaccggaggcag

SEQ ID NO: 1282635 - RNA, 19 nt, Artificial Sequence
  Description of Artificial Sequence: Synthetic oligonucleotide
acuaccauuggcugcuuga

SEQ ID NO: 1282636 - RNA, 19 nt, Artificial Sequence
  Description of Artificial Sequence: Synthetic oligonucleotide
uuccgagaccuuucgggcg

SEQ ID NO: 1282637 - RNA, 19 nt, Artificial Sequence
  Description of Artificial Sequence: Synthetic oligonucleotide
gcuguauagagggacaggg

SEQ ID NO: 1282638 - RNA, 19 nt, Artificial Sequence
  Description of Artificial Sequence: Synthetic oligonucleotide
uuucgggcgauucuccccu

SEQ ID NO: 1282639 - RNA, 19 nt, Artificial Sequence
  Description of Artificial Sequence: Synthetic oligonucleotide
ugcgguguuguuugcuggg

SEQ ID NO: 1282640 - RNA, 19 nt, Artificial Sequence
  Description of Artificial Sequence: Synthetic oligonucleotide
ggaaaguuccgaugcagag

SEQ ID NO: 1282641 - RNA, 19 nt, Artificial Sequence
  Description of Artificial Sequence: Synthetic oligonucleotide
cuugaaccucaauccagcc

SEQ ID NO: 1282642 - RNA, 19 nt, Artificial Sequence
  Description of Artificial Sequence: Synthetic oligonucleotide
ugaggaaaguuccgaugca

SEQ ID NO: 1282643 - RNA, 19 nt, Artificial Sequence
  Description of Artificial Sequence: Synthetic oligonucleotide
gaggaaaguuccgaugcag

SEQ ID NO: 1282644 - RNA, 19 nt, Artificial Sequence
  Description of Artificial Sequence: Synthetic oligonucleotide
gcuuccgagaccuuucggg

SEQ ID NO: 1282645 - RNA, 19 nt, Artificial Sequence
  Description of Artificial Sequence: Synthetic oligonucleotide
gcagguaagggcuguauag

SEQ ID NO: 1282646 - RNA, 19 nt, Artificial Sequence
  Description of Artificial Sequence: Synthetic oligonucleotide
aaccgcggccguuucccgc

SEQ ID NO: 1282647 - RNA, 19 nt, Artificial Sequence
  Description of Artificial Sequence: Synthetic oligonucleotide
ucccucaugagcuggggac

SEQ ID NO: 1282648 - RNA, 19 nt, Artificial Sequence
  Description of Artificial Sequence: Synthetic oligonucleotide
ccagaaauuccuuuacagc

SEQ ID NO: 1282649 - RNA, 19 nt, Artificial Sequence
  Description of Artificial Sequence: Synthetic oligonucleotide
ggagagacgcgauuauccg

SEQ ID NO: 1282650 - RNA, 19 nt, Artificial Sequence
  Description of Artificial Sequence: Synthetic oligonucleotide
cuguauagagggacagggc

SEQ ID NO: 1282651 - RNA, 19 nt, Artificial Sequence
  Description of Artificial Sequence: Synthetic oligonucleotide
ugaggcaggagagacgcga

SEQ ID NO: 1282652 - RNA, 19 nt, Artificial Sequence
  Description of Artificial Sequence: Synthetic oligonucleotide
cuaccuccacaccaacucg

SEQ ID NO: 1282653 - RNA, 19 nt, Artificial Sequence
  Description of Artificial Sequence: Synthetic oligonucleotide
acuaguuagaccggaggca

SEQ ID NO: 1282654 - RNA, 19 nt, Artificial Sequence
  Description of Artificial Sequence: Synthetic oligonucleotide
aggagcugugcaugacacc

SEQ ID NO: 1282655 - RNA, 19 nt, Artificial Sequence
  Description of Artificial Sequence: Synthetic oligonucleotide
uaguuagaccggaggcagg

SEQ ID NO: 1282656 - RNA, 19 nt, Artificial Sequence
  Description of Artificial Sequence: Synthetic oligonucleotide
agggcgucagcccagcugu

SEQ ID NO: 1282657 - RNA, 19 nt, Artificial Sequence
  Description of Artificial Sequence: Synthetic oligonucleotide
aaccucaauccagcccugc

SEQ ID NO: 1282658 - RNA, 19 nt, Artificial Sequence
  Description of Artificial Sequence: Synthetic oligonucleotide
ggcccuugaaccucaaucc

SEQ ID NO: 1282659 - RNA, 19 nt, Artificial Sequence
  Description of Artificial Sequence: Synthetic oligonucleotide
uuauccgggcagaaucacu

SEQ ID NO: 1282660 - RNA, 19 nt, Artificial Sequence
  Description of Artificial Sequence: Synthetic oligonucleotide
gauucgauuggcagggauc

SEQ ID NO: 1282661 - RNA, 19 nt, Artificial Sequence
  Description of Artificial Sequence: Synthetic oligonucleotide
acgggccaaacccugaggu

SEQ ID NO: 1282662 - RNA, 19 nt, Artificial Sequence
  Description of Artificial Sequence: Synthetic oligonucleotide
cugcgaaaagccacccagg

SEQ ID NO: 1282663 - RNA, 19 nt, Artificial Sequence
  Description of Artificial Sequence: Synthetic oligonucleotide
cuuucgggcgauucucccc

SEQ ID NO: 1282664 - RNA, 19 nt, Artificial Sequence
  Description of Artificial Sequence: Synthetic oligonucleotide
uccgagaccuuucgggcga

SEQ ID NO: 1282665 - RNA, 19 nt, Artificial Sequence
  Description of Artificial Sequence: Synthetic oligonucleotide
caggagcugugcaugacac

SEQ ID NO: 1282666 - RNA, 19 nt, Artificial Sequence
  Description of Artificial Sequence: Synthetic oligonucleotide
gauuauccgggcagaauca

SEQ ID NO: 1282667 - RNA, 19 nt, Artificial Sequence
  Description of Artificial Sequence: Synthetic oligonucleotide
acaggagcugugcaugaca

SEQ ID NO: 1282668 - RNA, 19 nt, Artificial Sequence
  Description of Artificial Sequence: Synthetic oligonucleotide
gaacagguaccaugggauc

SEQ ID NO: 1282669 - RNA, 19 nt, Artificial Sequence
  Description of Artificial Sequence: Synthetic oligonucleotide
acaccaacucgccugcaca

SEQ ID NO: 1282670 - RNA, 19 nt, Artificial Sequence
  Description of Artificial Sequence: Synthetic oligonucleotide
cuaaggggaggcccugagg

SEQ ID NO: 1282671 - RNA, 19 nt, Artificial Sequence
  Description of Artificial Sequence: Synthetic oligonucleotide
ggacacauucgugacagag

SEQ ID NO: 1282672 - RNA, 19 nt, Artificial Sequence
  Description of Artificial Sequence: Synthetic oligonucleotide
ucgauuggcagggauccca

SEQ ID NO: 1282673 - RNA, 19 nt, Artificial Sequence
  Description of Artificial Sequence: Synthetic oligonucleotide
ggcgucuggacucagcccc

SEQ ID NO: 1282674 - RNA, 19 nt, Artificial Sequence
  Description of Artificial Sequence: Synthetic oligonucleotide
ugcccugugucuccaaguc

SEQ ID NO: 1282675 - RNA, 19 nt, Artificial Sequence
  Description of Artificial Sequence: Synthetic oligonucleotide
caucucauguucaaucaaa

SEQ ID NO: 1282676 - RNA, 19 nt, Artificial Sequence
  Description of Artificial Sequence: Synthetic oligonucleotide
gguaagggcuguauagagg

SEQ ID NO: 1282677 - RNA, 19 nt, Artificial Sequence
  Description of Artificial Sequence: Synthetic oligonucleotide
ggauccugggcgcaugagg

SEQ ID NO: 1282678 - RNA, 19 nt, Artificial Sequence
  Description of Artificial Sequence: Synthetic oligonucleotide
gcucgaccggcucagaucc

SEQ ID NO: 1282679 - RNA, 19 nt, Artificial Sequence
  Description of Artificial Sequence: Synthetic oligonucleotide
gcugucagggccccgaacc

SEQ ID NO: 1282680 - RNA, 19 nt, Artificial Sequence
  Description of Artificial Sequence: Synthetic oligonucleotide
uccaagauggugcgguguu

SEQ ID NO: 1282681 - RNA, 19 nt, Artificial Sequence
  Description of Artificial Sequence: Synthetic oligonucleotide
gauccaagauggugcggug

SEQ ID NO: 1282682 - RNA, 19 nt, Artificial Sequence
  Description of Artificial Sequence: Synthetic oligonucleotide
ccugcgaaaagccacccag

SEQ ID NO: 1282683 - RNA, 19 nt, Artificial Sequence
  Description of Artificial Sequence: Synthetic oligonucleotide
aguuagaccggaggcagga

SEQ ID NO: 1282684 - RNA, 19 nt, Artificial Sequence
  Description of Artificial Sequence: Synthetic oligonucleotide
cuaccauuggcugcuugag

SEQ ID NO: 1282685 - RNA, 19 nt, Artificial Sequence
  Description of Artificial Sequence: Synthetic oligonucleotide
gacacauucgugacagaga

SEQ ID NO: 1282686 - RNA, 19 nt, Artificial Sequence
  Description of Artificial Sequence: Synthetic oligonucleotide
auccgggcagaaucacugg

SEQ ID NO: 1282687 - RNA, 19 nt, Artificial Sequence
  Description of Artificial Sequence: Synthetic oligonucleotide
caccaacucgccugcacag

SEQ ID NO: 1282688 - RNA, 19 nt, Artificial Sequence
  Description of Artificial Sequence: Synthetic oligonucleotide
gagggcgucagcccagcug

SEQ ID NO: 1282689 - RNA, 19 nt, Artificial Sequence
  Description of Artificial Sequence: Synthetic oligonucleotide
gagacagcgggagcagggg

SEQ ID NO: 1282690 - RNA, 19 nt, Artificial Sequence
  Description of Artificial Sequence: Synthetic oligonucleotide
ggcauugaaggauggccag

SEQ ID NO: 1282691 - RNA, 19 nt, Artificial Sequence
  Description of Artificial Sequence: Synthetic oligonucleotide
ggaguggauaagaaagcag

SEQ ID NO: 1282692 - RNA, 19 nt, Artificial Sequence
  Description of Artificial Sequence: Synthetic oligonucleotide
cguuaccacacauacacug

SEQ ID NO: 1282693 - RNA, 19 nt, Artificial Sequence
  Description of Artificial Sequence: Synthetic oligonucleotide
accgaacagguaccauggg

SEQ ID NO: 1282694 - RNA, 19 nt, Artificial Sequence
  Description of Artificial Sequence: Synthetic oligonucleotide
gugacaacagaccguagcu

SEQ ID NO: 1282695 - RNA, 19 nt, Artificial Sequence
  Description of Artificial Sequence: Synthetic oligonucleotide
cagauguacuugacaugag

SEQ ID NO: 1282696 - RNA, 19 nt, Artificial Sequence
  Description of Artificial Sequence: Synthetic oligonucleotide
accuuucgggcgauucucc

SEQ ID NO: 1282697 - RNA, 19 nt, Artificial Sequence
  Description of Artificial Sequence: Synthetic oligonucleotide
gaggaagccggauggugga

SEQ ID NO: 1282698 - RNA, 19 nt, Artificial Sequence
  Description of Artificial Sequence: Synthetic oligonucleotide
accgcaaugggagccagca

SEQ ID NO: 1282699 - RNA, 19 nt, Artificial Sequence
  Description of Artificial Sequence: Synthetic oligonucleotide
cugucagggccccgaaccg

SEQ ID NO: 1282700 - RNA, 19 nt, Artificial Sequence
  Description of Artificial Sequence: Synthetic oligonucleotide
uggcguuaccacacauaca

SEQ ID NO: 1282701 - RNA, 19 nt, Artificial Sequence
  Description of Artificial Sequence: Synthetic oligonucleotide
auggugcgguguuguuugc

SEQ ID NO: 1282702 - RNA, 19 nt, Artificial Sequence
  Description of Artificial Sequence: Synthetic oligonucleotide
ugagggacucuaccuccac

SEQ ID NO: 1282703 - RNA, 19 nt, Artificial Sequence
  Description of Artificial Sequence: Synthetic oligonucleotide
aggaaaguuccgaugcaga

SEQ ID NO: 1282704 - RNA, 19 nt, Artificial Sequence
  Description of Artificial Sequence: Synthetic oligonucleotide
ggccccacgggccaaaccc

SEQ ID NO: 1282705 - RNA, 19 nt, Artificial Sequence
  Description of Artificial Sequence: Synthetic oligonucleotide
gcaggugugacaacagacc

SEQ ID NO: 1282706 - RNA, 19 nt, Artificial Sequence
  Description of Artificial Sequence: Synthetic oligonucleotide
gggcccuugaaccucaauc

SEQ ID NO: 1282707 - RNA, 19 nt, Artificial Sequence
  Description of Artificial Sequence: Synthetic oligonucleotide
cacauucgugacagagaag

SEQ ID NO: 1282708 - RNA, 19 nt, Artificial Sequence
  Description of Artificial Sequence: Synthetic oligonucleotide
uccugggcgcaugaggaca

SEQ ID NO: 1282709 - RNA, 19 nt, Artificial Sequence
  Description of Artificial Sequence: Synthetic oligonucleotide
agggccccgaaccgaacag

SEQ ID NO: 1282710 - RNA, 19 nt, Artificial Sequence
  Description of Artificial Sequence: Synthetic oligonucleotide
ggacucuaccuccacacca

SEQ ID NO: 1282711 - RNA, 19 nt, Artificial Sequence
  Description of Artificial Sequence: Synthetic oligonucleotide
agccagcaacuaguuagac

SEQ ID NO: 1282712 - RNA, 19 nt, Artificial Sequence
  Description of Artificial Sequence: Synthetic oligonucleotide
ccuacagccccuccaauac

SEQ ID NO: 1282713 - RNA, 19 nt, Artificial Sequence
  Description of Artificial Sequence: Synthetic oligonucleotide
uaaccgcggccguuucccg

SEQ ID NO: 1282714 - RNA, 19 nt, Artificial Sequence
  Description of Artificial Sequence: Synthetic oligonucleotide
ggugcgguguuguuugcug

SEQ ID NO: 1282715 - RNA, 19 nt, Artificial Sequence
  Description of Artificial Sequence: Synthetic oligonucleotide
cucuggggcgucuggacuc

SEQ ID NO: 1282716 - RNA, 19 nt, Artificial Sequence
  Description of Artificial Sequence: Synthetic oligonucleotide
gaccggcucagauccaaga

SEQ ID NO: 1282717 - RNA, 19 nt, Artificial Sequence
  Description of Artificial Sequence: Synthetic oligonucleotide
gagaccuuucgggcgauuc

SEQ ID NO: 1282718 - RNA, 19 nt, Artificial Sequence
  Description of Artificial Sequence: Synthetic oligonucleotide
cgauuauccgggcagaauc

SEQ ID NO: 1282719 - RNA, 19 nt, Artificial Sequence
  Description of Artificial Sequence: Synthetic oligonucleotide
accaacucgccugcacagg

SEQ ID NO: 1282720 - RNA, 19 nt, Artificial Sequence
  Description of Artificial Sequence: Synthetic oligonucleotide
ccaaagcggggcuagugag

SEQ ID NO: 1282721 - RNA, 19 nt, Artificial Sequence
  Description of Artificial Sequence: Synthetic oligonucleotide
aagauggugcgguguuguu

SEQ ID NO: 1282722 - RNA, 19 nt, Artificial Sequence
  Description of Artificial Sequence: Synthetic oligonucleotide
caacucgccugcacaggag

SEQ ID NO: 1282723 - RNA, 19 nt, Artificial Sequence
  Description of Artificial Sequence: Synthetic oligonucleotide
cacaccaacucgccugcac

SEQ ID NO: 1282724 - RNA, 19 nt, Artificial Sequence
  Description of Artificial Sequence: Synthetic oligonucleotide
uucucccgcugccuacagc

SEQ ID NO: 1282725 - RNA, 19 nt, Artificial Sequence
  Description of Artificial Sequence: Synthetic oligonucleotide
cccaggacgauucgauugg

SEQ ID NO: 1282726 - RNA, 19 nt, Artificial Sequence
  Description of Artificial Sequence: Synthetic oligonucleotide
ggcgcaugaggacagaugu

SEQ ID NO: 1282727 - RNA, 19 nt, Artificial Sequence
  Description of Artificial Sequence: Synthetic oligonucleotide
agacgcgauuauccgggca

SEQ ID NO: 1282728 - RNA, 19 nt, Artificial Sequence
  Description of Artificial Sequence: Synthetic oligonucleotide
gagacgcgauuauccgggc

SEQ ID NO: 1282729 - RNA, 19 nt, Artificial Sequence
  Description of Artificial Sequence: Synthetic oligonucleotide
cccuugaaccucaauccag

SEQ ID NO: 1282730 - RNA, 19 nt, Artificial Sequence
  Description of Artificial Sequence: Synthetic oligonucleotide
ggggcgucuggacucagcc

SEQ ID NO: 1282731 - RNA, 19 nt, Artificial Sequence
  Description of Artificial Sequence: Synthetic oligonucleotide
ccccgaaccgaacagguac

SEQ ID NO: 1282732 - RNA, 19 nt, Artificial Sequence
  Description of Artificial Sequence: Synthetic oligonucleotide
cacgggccaaacccugagg

SEQ ID NO: 1282733 - RNA, 19 nt, Artificial Sequence
  Description of Artificial Sequence: Synthetic oligonucleotide
ccguuucccgcucagcucc

SEQ ID NO: 1282734 - RNA, 19 nt, Artificial Sequence
  Description of Artificial Sequence: Synthetic oligonucleotide
ugcugacuuccagaugacu

SEQ ID NO: 1282735 - RNA, 19 nt, Artificial Sequence
  Description of Artificial Sequence: Synthetic oligonucleotide
gaguggggacauagugggg

SEQ ID NO: 1282736 - RNA, 19 nt, Artificial Sequence
  Description of Artificial Sequence: Synthetic oligonucleotide
ugucagggccccgaaccga

SEQ ID NO: 1282737 - RNA, 19 nt, Artificial Sequence
  Description of Artificial Sequence: Synthetic oligonucleotide
auccaagauggugcggugu

SEQ ID NO: 1282738 - RNA, 19 nt, Artificial Sequence
  Description of Artificial Sequence: Synthetic oligonucleotide
ggauaagaaagcagcccac

SEQ ID NO: 1282739 - RNA, 19 nt, Artificial Sequence
  Description of Artificial Sequence: Synthetic oligonucleotide
uuucucccgcacagacaca

SEQ ID NO: 1282740 - RNA, 19 nt, Artificial Sequence
  Description of Artificial Sequence: Synthetic oligonucleotide
uggggaccgcaaugggagc

SEQ ID NO: 1282741 - RNA, 19 nt, Artificial Sequence
  Description of Artificial Sequence: Synthetic oligonucleotide
cagguaagggcuguauaga

SEQ ID NO: 1282742 - RNA, 19 nt, Artificial Sequence
  Description of Artificial Sequence: Synthetic oligonucleotide
gcccaugagggccccacgg

SEQ ID NO: 1282743 - RNA, 19 nt, Artificial Sequence
  Description of Artificial Sequence: Synthetic oligonucleotide
cauggcguuaccacacaua

SEQ ID NO: 1282744 - RNA, 19 nt, Artificial Sequence
  Description of Artificial Sequence: Synthetic oligonucleotide
agauggugcgguguuguuu

SEQ ID NO: 1282745 - RNA, 19 nt, Artificial Sequence
  Description of Artificial Sequence: Synthetic oligonucleotide
uucgauuggcagggauccc

SEQ ID NO: 1282746 - RNA, 19 nt, Artificial Sequence
  Description of Artificial Sequence: Synthetic oligonucleotide
caugaggacagauguacuu

SEQ ID NO: 1282747 - RNA, 19 nt, Artificial Sequence
  Description of Artificial Sequence: Synthetic oligonucleotide
uggggcgucuggacucagc

SEQ ID NO: 1282748 - RNA, 19 nt, Artificial Sequence
  Description of Artificial Sequence: Synthetic oligonucleotide
ggcuguauagagggacagg

SEQ ID NO: 1282749 - RNA, 19 nt, Artificial Sequence
  Description of Artificial Sequence: Synthetic oligonucleotide
guuagaccggaggcaggag

SEQ ID NO: 1282750 - RNA, 19 nt, Artificial Sequence
  Description of Artificial Sequence: Synthetic oligonucleotide
aggugugacaacagaccgu

SEQ ID NO: 1282751 - RNA, 19 nt, Artificial Sequence
  Description of Artificial Sequence: Synthetic oligonucleotide
gcuaaggggaggcccugag

SEQ ID NO: 1282752 - RNA, 19 nt, Artificial Sequence
  Description of Artificial Sequence: Synthetic oligonucleotide
uagagggacagggccccgc

SEQ ID NO: 1282753 - RNA, 19 nt, Artificial Sequence
  Description of Artificial Sequence: Synthetic oligonucleotide
cagauccaagauggugcgg

SEQ ID NO: 1282754 - RNA, 19 nt, Artificial Sequence
  Description of Artificial Sequence: Synthetic oligonucleotide
cucgccugcacaggagcag

SEQ ID NO: 1282755 - RNA, 19 nt, Artificial Sequence
  Description of Artificial Sequence: Synthetic oligonucleotide
gcaacuaguuagaccggag

SEQ ID NO: 1282756 - RNA, 19 nt, Artificial Sequence
  Description of Artificial Sequence: Synthetic oligonucleotide
cuggcccuagaguggggac

SEQ ID NO: 1282757 - RNA, 19 nt, Artificial Sequence
  Description of Artificial Sequence: Synthetic oligonucleotide
gaugguggagagggcguca

SEQ ID NO: 1282758 - RNA, 19 nt, Artificial Sequence
  Description of Artificial Sequence: Synthetic oligonucleotide
aagcggggcuagugaguga

SEQ ID NO: 1282759 - RNA, 19 nt, Artificial Sequence
  Description of Artificial Sequence: Synthetic oligonucleotide
caggagagacgcgauuauc

SEQ ID NO: 1282760 - RNA, 19 nt, Artificial Sequence
  Description of Artificial Sequence: Synthetic oligonucleotide
gcagcgucagugagcaggg

SEQ ID NO: 1282761 - RNA, 19 nt, Artificial Sequence
  Description of Artificial Sequence: Synthetic oligonucleotide
cugugcaugacaccugggu

SEQ ID NO: 1282762 - RNA, 19 nt, Artificial Sequence
  Description of Artificial Sequence: Synthetic oligonucleotide
gaggagcuaaggggaggcc

SEQ ID NO: 1282763 - RNA, 19 nt, Artificial Sequence
  Description of Artificial Sequence: Synthetic oligonucleotide
caggacgauucgauuggca

SEQ ID NO: 1282764 - RNA, 19 nt, Artificial Sequence
  Description of Artificial Sequence: Synthetic oligonucleotide
cgcaugaggacagauguac

SEQ ID NO: 1282765 - RNA, 19 nt, Artificial Sequence
  Description of Artificial Sequence: Synthetic oligonucleotide
cuagugagugagguccuga

SEQ ID NO: 1282766 - RNA, 19 nt, Artificial Sequence
  Description of Artificial Sequence: Synthetic oligonucleotide
ucuggggcgucuggacuca

SEQ ID NO: 1282767 - RNA, 19 nt, Artificial Sequence
  Description of Artificial Sequence: Synthetic oligonucleotide
ucgaccggcucagauccaa

SEQ ID NO: 1282768 - RNA, 19 nt, Artificial Sequence
  Description of Artificial Sequence: Synthetic oligonucleotide
ggcuuccgagaccuuucgg

SEQ ID NO: 1282769 - RNA, 19 nt, Artificial Sequence
  Description of Artificial Sequence: Synthetic oligonucleotide
gaaccucaauccagcccug

SEQ ID NO: 1282770 - RNA, 19 nt, Artificial Sequence
  Description of Artificial Sequence: Synthetic oligonucleotide
gggacucuaccuccacacc

SEQ ID NO: 1282771 - RNA, 19 nt, Artificial Sequence
  Description of Artificial Sequence: Synthetic oligonucleotide
gcgaaaagccacccaggac

SEQ ID NO: 1282772 - RNA, 19 nt, Artificial Sequence
  Description of Artificial Sequence: Synthetic oligonucleotide
cugagggacucuaccucca

SEQ ID NO: 1282773 - RNA, 19 nt, Artificial Sequence
  Description of Artificial Sequence: Synthetic oligonucleotide
uggugcgguguuguuugcu

SEQ ID NO: 1282774 - RNA, 19 nt, Artificial Sequence
  Description of Artificial Sequence: Synthetic oligonucleotide
ugccacgaugccagccaaa

SEQ ID NO: 1282775 - RNA, 19 nt, Artificial Sequence
  Description of Artificial Sequence: Synthetic oligonucleotide
ggguaugucuugaacugga

SEQ ID NO: 1282776 - RNA, 19 nt, Artificial Sequence
  Description of Artificial Sequence: Synthetic oligonucleotide
ccuuucgggcgauucuccc

SEQ ID NO: 1282777 - RNA, 19 nt, Artificial Sequence
  Description of Artificial Sequence: Synthetic oligonucleotide
cccgaaccgaacagguacc

SEQ ID NO: 1282778 - RNA, 19 nt, Artificial Sequence
  Description of Artificial Sequence: Synthetic oligonucleotide
cccuagaguggggacauag

SEQ ID NO: 1282779 - RNA, 19 nt, Artificial Sequence
  Description of Artificial Sequence: Synthetic oligonucleotide
ugagugucacagggauccu

SEQ ID NO: 1282780 - RNA, 19 nt, Artificial Sequence
  Description of Artificial Sequence: Synthetic oligonucleotide
gaccggaggcaggagcuuc

SEQ ID NO: 1282781 - RNA, 19 nt, Artificial Sequence
  Description of Artificial Sequence: Synthetic oligonucleotide
gcugccuacagccccucca

SEQ ID NO: 1282782 - RNA, 19 nt, Artificial Sequence
  Description of Artificial Sequence: Synthetic oligonucleotide
gggugagacagcgggagca

SEQ ID NO: 1282783 - RNA, 19 nt, Artificial Sequence
  Description of Artificial Sequence: Synthetic oligonucleotide
ggcucgaccggcucagauc

SEQ ID NO: 1282784 - RNA, 19 nt, Artificial Sequence
  Description of Artificial Sequence: Synthetic oligonucleotide
gagcuaaggggaggcccug

SEQ ID NO: 1282785 - RNA, 19 nt, Artificial Sequence
  Description of Artificial Sequence: Synthetic oligonucleotide
ugggcgcaugaggacagau

SEQ ID NO: 1282786 - RNA, 19 nt, Artificial Sequence
  Description of Artificial Sequence: Synthetic oligonucleotide
acucgccugcacaggagca

SEQ ID NO: 1282787 - RNA, 19 nt, Artificial Sequence
  Description of Artificial Sequence: Synthetic oligonucleotide
ccucaugagcuggggaccg

SEQ ID NO: 1282788 - RNA, 19 nt, Artificial Sequence
  Description of Artificial Sequence: Synthetic oligonucleotide
ccugggcgcaugaggacag

SEQ ID NO: 1282789 - RNA, 19 nt, Artificial Sequence
  Description of Artificial Sequence: Synthetic oligonucleotide
ggggaccgcaaugggagcc

SEQ ID NO: 1282790 - RNA, 19 nt, Artificial Sequence
  Description of Artificial Sequence: Synthetic oligonucleotide
ccgaacagguaccauggga

SEQ ID NO: 1282791 - RNA, 19 nt, Artificial Sequence
  Description of Artificial Sequence: Synthetic oligonucleotide
cucaugagcuggggaccgc

SEQ ID NO: 1282792 - RNA, 19 nt, Artificial Sequence
  Description of Artificial Sequence: Synthetic oligonucleotide
aggcaggagagacgcgauu

SEQ ID NO: 1282793 - RNA, 19 nt, Artificial Sequence
  Description of Artificial Sequence: Synthetic oligonucleotide
caaagcggggcuagugagu

SEQ ID NO: 1282794 - RNA, 19 nt, Artificial Sequence
  Description of Artificial Sequence: Synthetic oligonucleotide
acgcgauuauccgggcaga

SEQ ID NO: 1282795 - RNA, 19 nt, Artificial Sequence
  Description of Artificial Sequence: Synthetic oligonucleotide
cagguaccaugggauccag

SEQ ID NO: 1282796 - RNA, 19 nt, Artificial Sequence
  Description of Artificial Sequence: Synthetic oligonucleotide
ucgggcgauucuccccuuu

SEQ ID NO: 1282797 - RNA, 19 nt, Artificial Sequence
  Description of Artificial Sequence: Synthetic oligonucleotide
gcucaaugccacgaugcca

SEQ ID NO: 1282798 - RNA, 19 nt, Artificial Sequence
  Description of Artificial Sequence: Synthetic oligonucleotide
gaccgcaaugggagccagc

SEQ ID NO: 1282799 - RNA, 19 nt, Artificial Sequence
  Description of Artificial Sequence: Synthetic oligonucleotide
gcgucagugagcaggggca

SEQ ID NO: 1282800 - RNA, 19 nt, Artificial Sequence
  Description of Artificial Sequence: Synthetic oligonucleotide
ggcaggagagacgcgauua

SEQ ID NO: 1282801 - RNA, 19 nt, Artificial Sequence
  Description of Artificial Sequence: Synthetic oligonucleotide
agcuccccauggcauugaa

SEQ ID NO: 1282802 - RNA, 19 nt, Artificial Sequence
  Description of Artificial Sequence: Synthetic oligonucleotide
ccgcccugcgaaaagccac

SEQ ID NO: 1282803 - RNA, 19 nt, Artificial Sequence
  Description of Artificial Sequence: Synthetic oligonucleotide
agcuaaggggaggcccuga

SEQ ID NO: 1282804 - RNA, 19 nt, Artificial Sequence
  Description of Artificial Sequence: Synthetic oligonucleotide
agacacgguggcagcguca

SEQ ID NO: 1282805 - RNA, 19 nt, Artificial Sequence
  Description of Artificial Sequence: Synthetic oligonucleotide
guuucccgcucagcuccag

SEQ ID NO: 1282806 - RNA, 19 nt, Artificial Sequence
  Description of Artificial Sequence: Synthetic oligonucleotide
gggcgcaugaggacagaug

SEQ ID NO: 1282807 - RNA, 19 nt, Artificial Sequence
  Description of Artificial Sequence: Synthetic oligonucleotide
ccaacucgccugcacagga

SEQ ID NO: 1282808 - RNA, 19 nt, Artificial Sequence
  Description of Artificial Sequence: Synthetic oligonucleotide
ggccguuucccgcucagcu

SEQ ID NO: 1282809 - RNA, 19 nt, Artificial Sequence
  Description of Artificial Sequence: Synthetic oligonucleotide
gccuacagccccuccaaua

SEQ ID NO: 1282810 - RNA, 19 nt, Artificial Sequence
  Description of Artificial Sequence: Synthetic oligonucleotide
cccaaagcggggcuaguga

SEQ ID NO: 1282811 - RNA, 19 nt, Artificial Sequence
  Description of Artificial Sequence: Synthetic oligonucleotide
gggccccgaaccgaacagg

SEQ ID NO: 1282812 - RNA, 19 nt, Artificial Sequence
  Description of Artificial Sequence: Synthetic oligonucleotide
cgaacagguaccaugggau

SEQ ID NO: 1282813 - RNA, 19 nt, Artificial Sequence
  Description of Artificial Sequence: Synthetic oligonucleotide
gcuggggaccgcaauggga

SEQ ID NO: 1282814 - RNA, 19 nt, Artificial Sequence
  Description of Artificial Sequence: Synthetic oligonucleotide
cagggauccugggcgcaug

SEQ ID NO: 1282815 - RNA, 19 nt, Artificial Sequence
  Description of Artificial Sequence: Synthetic oligonucleotide
caggggcccuugaaccuca

SEQ ID NO: 1282816 - RNA, 19 nt, Artificial Sequence
  Description of Artificial Sequence: Synthetic oligonucleotide
ggcgucagcccagcugugc

SEQ ID NO: 1282817 - RNA, 19 nt, Artificial Sequence
  Description of Artificial Sequence: Synthetic oligonucleotide
gucagggccccgaaccgaa

SEQ ID NO: 1282818 - RNA, 19 nt, Artificial Sequence
  Description of Artificial Sequence: Synthetic oligonucleotide
ccacgggccaaacccugag

SEQ ID NO: 1282819 - RNA, 19 nt, Artificial Sequence
  Description of Artificial Sequence: Synthetic oligonucleotide
agggccccacgggccaaac

SEQ ID NO: 1282820 - RNA, 19 nt, Artificial Sequence
  Description of Artificial Sequence: Synthetic oligonucleotide
cuacagccccuccaauacu

SEQ ID NO: 1282821 - RNA, 19 nt, Artificial Sequence
  Description of Artificial Sequence: Synthetic oligonucleotide
ccccgcccugcgaaaagcc

SEQ ID NO: 1282822 - RNA, 19 nt, Artificial Sequence
  Description of Artificial Sequence: Synthetic oligonucleotide
ccugcaaggaagggccaug

SEQ ID NO: 1282823 - RNA, 19 nt, Artificial Sequence
  Description of Artificial Sequence: Synthetic oligonucleotide
gguccuuggcacuaccauu

SEQ ID NO: 1282824 - RNA, 19 nt, Artificial Sequence
  Description of Artificial Sequence: Synthetic oligonucleotide
cagcgucagugagcagggg

SEQ ID NO: 1282825 - RNA, 19 nt, Artificial Sequence
  Description of Artificial Sequence: Synthetic oligonucleotide
acgauucgauuggcaggga

SEQ ID NO: 1282826 - RNA, 19 nt, Artificial Sequence
  Description of Artificial Sequence: Synthetic oligonucleotide
ccaggacgauucgauuggc

SEQ ID NO: 1282827 - RNA, 19 nt, Artificial Sequence
  Description of Artificial Sequence: Synthetic oligonucleotide
gggcccaaagcggggcuag

SEQ ID NO: 1282828 - RNA, 19 nt, Artificial Sequence
  Description of Artificial Sequence: Synthetic oligonucleotide
cgcccugcgaaaagccacc

SEQ ID NO: 1282829 - RNA, 19 nt, Artificial Sequence
  Description of Artificial Sequence: Synthetic oligonucleotide
ggagcuaaggggaggcccu

SEQ ID NO: 1282830 - RNA, 19 nt, Artificial Sequence
  Description of Artificial Sequence: Synthetic oligonucleotide
ggaccgcaaugggagccag

SEQ ID NO: 1282831 - RNA, 19 nt, Artificial Sequence
  Description of Artificial Sequence: Synthetic oligonucleotide
uucgggcgauucuccccuu

SEQ ID NO: 1282832 - RNA, 19 nt, Artificial Sequence
  Description of Artificial Sequence: Synthetic oligonucleotide
caugaggaagccggauggu

SEQ ID NO: 1282833 - RNA, 19 nt, Artificial Sequence
  Description of Artificial Sequence: Synthetic oligonucleotide
ggccccgcccugcgaaaag

SEQ ID NO: 1282834 - RNA, 19 nt, Artificial Sequence
  Description of Artificial Sequence: Synthetic oligonucleotide
cagccccaucaggucaaac

SEQ ID NO: 1282835 - RNA, 19 nt, Artificial Sequence
  Description of Artificial Sequence: Synthetic oligonucleotide
agaccggaggcaggagcuu

SEQ ID NO: 1282836 - RNA, 19 nt, Artificial Sequence
  Description of Artificial Sequence: Synthetic oligonucleotide
gcggccguuucccgcucag

SEQ ID NO: 1282837 - RNA, 19 nt, Artificial Sequence
  Description of Artificial Sequence: Synthetic oligonucleotide
gggagccagcaacuaguua

SEQ ID NO: 1282838 - RNA, 19 nt, Artificial Sequence
  Description of Artificial Sequence: Synthetic oligonucleotide
cucgaccggcucagaucca

SEQ ID NO: 1282839 - RNA, 19 nt, Artificial Sequence
  Description of Artificial Sequence: Synthetic oligonucleotide
cgguguuguuugcuggguc

SEQ ID NO: 1282840 - RNA, 19 nt, Artificial Sequence
  Description of Artificial Sequence: Synthetic oligonucleotide
ccuagaguggggacauagu

SEQ ID NO: 1282841 - RNA, 19 nt, Artificial Sequence
  Description of Artificial Sequence: Synthetic oligonucleotide
gcaggagagacgcgauuau

SEQ ID NO: 1282842 - RNA, 19 nt, Artificial Sequence
  Description of Artificial Sequence: Synthetic oligonucleotide
gcccugcgaaaagccaccc

SEQ ID NO: 1282843 - RNA, 19 nt, Artificial Sequence
  Description of Artificial Sequence: Synthetic oligonucleotide
ccgaugcagaggcagccaa

SEQ ID NO: 1282844 - RNA, 19 nt, Artificial Sequence
  Description of Artificial Sequence: Synthetic oligonucleotide
cuggggcgucuggacucag

SEQ ID NO: 1282845 - RNA, 19 nt, Artificial Sequence
  Description of Artificial Sequence: Synthetic oligonucleotide
cacccaggacgauucgauu

SEQ ID NO: 1282846 - RNA, 19 nt, Artificial Sequence
  Description of Artificial Sequence: Synthetic oligonucleotide
cccgcccugcgaaaagcca

SEQ ID NO: 1282847 - RNA, 19 nt, Artificial Sequence
  Description of Artificial Sequence: Synthetic oligonucleotide
cgaccggcucagauccaag

SEQ ID NO: 1282848 - RNA, 19 nt, Artificial Sequence
  Description of Artificial Sequence: Synthetic oligonucleotide
ggccccgaaccgaacaggu

SEQ ID NO: 1282849 - RNA, 19 nt, Artificial Sequence
  Description of Artificial Sequence: Synthetic oligonucleotide
ccacccaggacgauucgau

SEQ ID NO: 1282850 - RNA, 19 nt, Artificial Sequence
  Description of Artificial Sequence: Synthetic oligonucleotide
ccgaaccgaacagguacca

SEQ ID NO: 1282851 - RNA, 19 nt, Artificial Sequence
  Description of Artificial Sequence: Synthetic oligonucleotide
gccggaugguggagagggc

SEQ ID NO: 1282852 - RNA, 19 nt, Artificial Sequence
  Description of Artificial Sequence: Synthetic oligonucleotide
cccugcgaaaagccaccca

SEQ ID NO: 1282853 - RNA, 19 nt, Artificial Sequence
  Description of Artificial Sequence: Synthetic oligonucleotide
gcgauuauccgggcagaau

SEQ ID NO: 1282854 - RNA, 19 nt, Artificial Sequence
  Description of Artificial Sequence: Synthetic oligonucleotide
ggcccuagaguggggacau

SEQ ID NO: 1282855 - RNA, 19 nt, Artificial Sequence
  Description of Artificial Sequence: Synthetic oligonucleotide
cugggcgcaugaggacaga

SEQ ID NO: 1282856 - RNA, 19 nt, Artificial Sequence
  Description of Artificial Sequence: Synthetic oligonucleotide
gggcucgaccggcucagau

SEQ ID NO: 1282857 - RNA, 19 nt, Artificial Sequence
  Description of Artificial Sequence: Synthetic oligonucleotide
ccucuggggcgucuggacu

SEQ ID NO: 1282858 - RNA, 19 nt, Artificial Sequence
  Description of Artificial Sequence: Synthetic oligonucleotide
gcguuaccacacauacacu

SEQ ID NO: 1282859 - RNA, 19 nt, Artificial Sequence
  Description of Artificial Sequence: Synthetic oligonucleotide
gcgcaugaggacagaugua

SEQ ID NO: 1282860 - RNA, 19 nt, Artificial Sequence
  Description of Artificial Sequence: Synthetic oligonucleotide
cggccauggacacauucgu

SEQ ID NO: 1282861 - RNA, 19 nt, Artificial Sequence
  Description of Artificial Sequence: Synthetic oligonucleotide
gcgguguuguuugcugggu

SEQ ID NO: 1282862 - RNA, 19 nt, Artificial Sequence
  Description of Artificial Sequence: Synthetic oligonucleotide
gggcgucagcccagcugug

SEQ ID NO: 1282863 - RNA, 19 nt, Artificial Sequence
  Description of Artificial Sequence: Synthetic oligonucleotide
gcaugacaccuggguaugu

SEQ ID NO: 1282864 - RNA, 19 nt, Artificial Sequence
  Description of Artificial Sequence: Synthetic oligonucleotide
cgauucgauuggcagggau

SEQ ID NO: 1282865 - RNA, 19 nt, Artificial Sequence
  Description of Artificial Sequence: Synthetic oligonucleotide
aggggcccuugaaccucaa

SEQ ID NO: 1282866 - RNA, 19 nt, Artificial Sequence
  Description of Artificial Sequence: Synthetic oligonucleotide
ggggcccaaagcggggcua

SEQ ID NO: 1282867 - RNA, 19 nt, Artificial Sequence
  Description of Artificial Sequence: Synthetic oligonucleotide
ccgcaaugggagccagcaa

SEQ ID NO: 1282868 - RNA, 19 nt, Artificial Sequence
  Description of Artificial Sequence: Synthetic oligonucleotide
gccccgaaccgaacaggua

SEQ ID NO: 1282869 - RNA, 19 nt, Artificial Sequence
  Description of Artificial Sequence: Synthetic oligonucleotide
ggggcagguaagggcugua

SEQ ID NO: 1282870 - RNA, 19 nt, Artificial Sequence
  Description of Artificial Sequence: Synthetic oligonucleotide
ggggcccuugaaccucaau

SEQ ID NO: 1282871 - RNA, 19 nt, Artificial Sequence
  Description of Artificial Sequence: Synthetic oligonucleotide
cccgcugccuacagccccu

SEQ ID NO: 1282872 - RNA, 19 nt, Artificial Sequence
  Description of Artificial Sequence: Synthetic oligonucleotide
gggccccgcccugcgaaaa

SEQ ID NO: 1282873 - RNA, 19 nt, Artificial Sequence
  Description of Artificial Sequence: Synthetic oligonucleotide
cgcgauuauccgggcagaa

SEQ ID NO: 1282874 - RNA, 19 nt, Artificial Sequence
  Description of Artificial Sequence: Synthetic oligonucleotide
ggggcucgaccggcucaga

SEQ ID NO: 1282875 - RNA, 19 nt, Artificial Sequence
  Description of Artificial Sequence: Synthetic oligonucleotide
ccgcugccuacagccccuc

SEQ ID NO: 1282876 - RNA, 19 nt, Artificial Sequence
  Description of Artificial Sequence: Synthetic oligonucleotide
ccgcggccguuucccgcuc

SEQ ID NO: 1282877 - RNA, 19 nt, Artificial Sequence
  Description of Artificial Sequence: Synthetic oligonucleotide
cgaaccgaacagguaccau

SEQ ID NO: 1282878 - RNA, 19 nt, Artificial Sequence
  Description of Artificial Sequence: Synthetic oligonucleotide
ccgagaccuuucgggcgau

SEQ ID NO: 1282879 - RNA, 19 nt, Artificial Sequence
  Description of Artificial Sequence: Synthetic oligonucleotide
cgagaccuuucgggcgauu

SEQ ID NO: 1282880 - RNA, 19 nt, Artificial Sequence
  Description of Artificial Sequence: Synthetic oligonucleotide
ccccggccauggacacauu

SEQ ID NO: 1282881 - RNA, 19 nt, Artificial Sequence
  Description of Artificial Sequence: Synthetic oligonucleotide
uguacuaauauacaagggg

SEQ ID NO: 1282882 - RNA, 19 nt, Artificial Sequence
  Description of Artificial Sequence: Synthetic oligonucleotide
aauaacuuagaaaagggac

SEQ ID NO: 1282883 - RNA, 19 nt, Artificial Sequence
  Description of Artificial Sequence: Synthetic oligonucleotide
aaaacgguuaggcacuucc

SEQ ID NO: 1282884 - RNA, 19 nt, Artificial Sequence
  Description of Artificial Sequence: Synthetic oligonucleotide
uguguacuaauauacaagg

SEQ ID NO: 1282885 - RNA, 19 nt, Artificial Sequence
  Description of Artificial Sequence: Synthetic oligonucleotide
aaaucugacugacugacgg

SEQ ID NO: 1282886 - RNA, 19 nt, Artificial Sequence
  Description of Artificial Sequence: Synthetic oligonucleotide
aagagaaagauaugaaaag

SEQ ID NO: 1282887 - RNA, 19 nt, Artificial Sequence
  Description of Artificial Sequence: Synthetic oligonucleotide
aaaguaaagaaaucugacu

SEQ ID NO: 1282888 - RNA, 19 nt, Artificial Sequence
  Description of Artificial Sequence: Synthetic oligonucleotide
auaacuuagaaaagggacc

SEQ ID NO: 1282889 - RNA, 19 nt, Artificial Sequence
  Description of Artificial Sequence: Synthetic oligonucleotide
uaaauaggcugaaaugagg

SEQ ID NO: 1282890 - RNA, 19 nt, Artificial Sequence
  Description of Artificial Sequence: Synthetic oligonucleotide
gauggcacgagauuggacc

SEQ ID NO: 1282891 - RNA, 19 nt, Artificial Sequence
  Description of Artificial Sequence: Synthetic oligonucleotide
aagcccagaaugcacgugc

SEQ ID NO: 1282892 - RNA, 19 nt, Artificial Sequence
  Description of Artificial Sequence: Synthetic oligonucleotide
agagaaagauaugaaaagg

SEQ ID NO: 1282893 - RNA, 19 nt, Artificial Sequence
  Description of Artificial Sequence: Synthetic oligonucleotide
cuuggauaccuauacagag

SEQ ID NO: 1282894 - RNA, 19 nt, Artificial Sequence
  Description of Artificial Sequence: Synthetic oligonucleotide
aaggggcuaacacuuugcc

SEQ ID NO: 1282895 - RNA, 19 nt, Artificial Sequence
  Description of Artificial Sequence: Synthetic oligonucleotide
gugacaguuacucagagca

SEQ ID NO: 1282896 - RNA, 19 nt, Artificial Sequence
  Description of Artificial Sequence: Synthetic oligonucleotide
agaaaucugacugacugac

SEQ ID NO: 1282897 - RNA, 19 nt, Artificial Sequence
  Description of Artificial Sequence: Synthetic oligonucleotide
gauaccuauacagaggaug

SEQ ID NO: 1282898 - RNA, 19 nt, Artificial Sequence
  Description of Artificial Sequence: Synthetic oligonucleotide
uggauaccuauacagagga

SEQ ID NO: 1282899 - RNA, 19 nt, Artificial Sequence
  Description of Artificial Sequence: Synthetic oligonucleotide
accgacacaaggaacaugc

SEQ ID NO: 1282900 - RNA, 19 nt, Artificial Sequence
  Description of Artificial Sequence: Synthetic oligonucleotide
aaggcauggccggauaucc

SEQ ID NO: 1282901 - RNA, 19 nt, Artificial Sequence
  Description of Artificial Sequence: Synthetic oligonucleotide
agauuggacccucagcugg

SEQ ID NO: 1282902 - RNA, 19 nt, Artificial Sequence
  Description of Artificial Sequence: Synthetic oligonucleotide
guguauaugagcagcaggg

SEQ ID NO: 1282903 - RNA, 19 nt, Artificial Sequence
  Description of Artificial Sequence: Synthetic oligonucleotide
aaauaggcugaaaugagga

SEQ ID NO: 1282904 - RNA, 19 nt, Artificial Sequence
  Description of Artificial Sequence: Synthetic oligonucleotide
guacuaauauacaaggggc

SEQ ID NO: 1282905 - RNA, 19 nt, Artificial Sequence
  Description of Artificial Sequence: Synthetic oligonucleotide
uacuaauauacaaggggcu

SEQ ID NO: 1282906 - RNA, 19 nt, Artificial Sequence
  Description of Artificial Sequence: Synthetic oligonucleotide
acaagggugacaguuacuc

SEQ ID NO: 1282907 - RNA, 19 nt, Artificial Sequence
  Description of Artificial Sequence: Synthetic oligonucleotide
ugcacgugcaaaaguaaag

SEQ ID NO: 1282908 - RNA, 19 nt, Artificial Sequence
  Description of Artificial Sequence: Synthetic oligonucleotide
accuauacagaggaugacc

SEQ ID NO: 1282909 - RNA, 19 nt, Artificial Sequence
  Description of Artificial Sequence: Synthetic oligonucleotide
auauccaagcccagaaugc

SEQ ID NO: 1282910 - RNA, 19 nt, Artificial Sequence
  Description of Artificial Sequence: Synthetic oligonucleotide
aaaggggcuaacacuuugc

SEQ ID NO: 1282911 - RNA, 19 nt, Artificial Sequence
  Description of Artificial Sequence: Synthetic oligonucleotide
uggguauugccccagggcu

SEQ ID NO: 1282912 - RNA, 19 nt, Artificial Sequence
  Description of Artificial Sequence: Synthetic oligonucleotide
aacgguuaggcacuuccca

SEQ ID NO: 1282913 - RNA, 19 nt, Artificial Sequence
  Description of Artificial Sequence: Synthetic oligonucleotide
acuguaguguauaugagca

SEQ ID NO: 1282914 - RNA, 19 nt, Artificial Sequence
  Description of Artificial Sequence: Synthetic oligonucleotide
agggcccuagcauggaucc

SEQ ID NO: 1282915 - RNA, 19 nt, Artificial Sequence
  Description of Artificial Sequence: Synthetic oligonucleotide
uguauaugagcagcagggg

SEQ ID NO: 1282916 - RNA, 19 nt, Artificial Sequence
  Description of Artificial Sequence: Synthetic oligonucleotide
auggcacgagauuggaccc

SEQ ID NO: 1282917 - RNA, 19 nt, Artificial Sequence
  Description of Artificial Sequence: Synthetic oligonucleotide
acgagauuggacccucagc

SEQ ID NO: 1282918 - RNA, 19 nt, Artificial Sequence
  Description of Artificial Sequence: Synthetic oligonucleotide
cuaaccguugaucaccuug

SEQ ID NO: 1282919 - RNA, 19 nt, Artificial Sequence
  Description of Artificial Sequence: Synthetic oligonucleotide
caauaugucaccugcccug

SEQ ID NO: 1282920 - RNA, 19 nt, Artificial Sequence
  Description of Artificial Sequence: Synthetic oligonucleotide
acaaggaacaugcuucgca

SEQ ID NO: 1282921 - RNA, 19 nt, Artificial Sequence
  Description of Artificial Sequence: Synthetic oligonucleotide
uauuccgauucaaaacaga

SEQ ID NO: 1282922 - RNA, 19 nt, Artificial Sequence
  Description of Artificial Sequence: Synthetic oligonucleotide
aaacgguuaggcacuuccc

SEQ ID NO: 1282923 - RNA, 19 nt, Artificial Sequence
  Description of Artificial Sequence: Synthetic oligonucleotide
ugccaagacagaguggagg

SEQ ID NO: 1282924 - RNA, 19 nt, Artificial Sequence
  Description of Artificial Sequence: Synthetic oligonucleotide
uaaccguugaucaccuugu

SEQ ID NO: 1282925 - RNA, 19 nt, Artificial Sequence
  Description of Artificial Sequence: Synthetic oligonucleotide
gauccucaagccuccagcc

SEQ ID NO: 1282926 - RNA, 19 nt, Artificial Sequence
  Description of Artificial Sequence: Synthetic oligonucleotide
auaggcugaaaugaggacu

SEQ ID NO: 1282927 - RNA, 19 nt, Artificial Sequence
  Description of Artificial Sequence: Synthetic oligonucleotide
aucguguugggauggcacg

SEQ ID NO: 1282928 - RNA, 19 nt, Artificial Sequence
  Description of Artificial Sequence: Synthetic oligonucleotide
ucuggguaaggggucaagg

SEQ ID NO: 1282929 - RNA, 19 nt, Artificial Sequence
  Description of Artificial Sequence: Synthetic oligonucleotide
ugggccgcgaucuagcaca

SEQ ID NO: 1282930 - RNA, 19 nt, Artificial Sequence
  Description of Artificial Sequence: Synthetic oligonucleotide
auggccggauauccaagcc

SEQ ID NO: 1282931 - RNA, 19 nt, Artificial Sequence
  Description of Artificial Sequence: Synthetic oligonucleotide
agaaugcacgugcaaaagu

SEQ ID NO: 1282932 - RNA, 19 nt, Artificial Sequence
  Description of Artificial Sequence: Synthetic oligonucleotide
uccacguagccccaucgug

SEQ ID NO: 1282933 - RNA, 19 nt, Artificial Sequence
  Description of Artificial Sequence: Synthetic oligonucleotide
aggggcuaacacuuugccg

SEQ ID NO: 1282934 - RNA, 19 nt, Artificial Sequence
  Description of Artificial Sequence: Synthetic oligonucleotide
guguacuaauauacaaggg

SEQ ID NO: 1282935 - RNA, 19 nt, Artificial Sequence
  Description of Artificial Sequence: Synthetic oligonucleotide
aaggggucaaggccccgac

SEQ ID NO: 1282936 - RNA, 19 nt, Artificial Sequence
  Description of Artificial Sequence: Synthetic oligonucleotide
ugcuucgcaaaggacgagg

SEQ ID NO: 1282937 - RNA, 19 nt, Artificial Sequence
  Description of Artificial Sequence: Synthetic oligonucleotide
gagaaagauaugaaaaggu

SEQ ID NO: 1282938 - RNA, 19 nt, Artificial Sequence
  Description of Artificial Sequence: Synthetic oligonucleotide
uggccggauauccaagccc

SEQ ID NO: 1282939 - RNA, 19 nt, Artificial Sequence
  Description of Artificial Sequence: Synthetic oligonucleotide
gaaaucugacugacugacg

SEQ ID NO: 1282940 - RNA, 19 nt, Artificial Sequence
  Description of Artificial Sequence: Synthetic oligonucleotide
cugacugacugacggacag

SEQ ID NO: 1282941 - RNA, 19 nt, Artificial Sequence
  Description of Artificial Sequence: Synthetic oligonucleotide
auaccuauacagaggauga

SEQ ID NO: 1282942 - RNA, 19 nt, Artificial Sequence
  Description of Artificial Sequence: Synthetic oligonucleotide
uauccaagcccagaaugca

SEQ ID NO: 1282943 - RNA, 19 nt, Artificial Sequence
  Description of Artificial Sequence: Synthetic oligonucleotide
ccugcaauaugucaccugc

SEQ ID NO: 1282944 - RNA, 19 nt, Artificial Sequence
  Description of Artificial Sequence: Synthetic oligonucleotide
cuggguauugccccagggc

SEQ ID NO: 1282945 - RNA, 19 nt, Artificial Sequence
  Description of Artificial Sequence: Synthetic oligonucleotide
gccgcgaucuagcacaugg

SEQ ID NO: 1282946 - RNA, 19 nt, Artificial Sequence
  Description of Artificial Sequence: Synthetic oligonucleotide
ucugacugacugacggaca

SEQ ID NO: 1282947 - RNA, 19 nt, Artificial Sequence
  Description of Artificial Sequence: Synthetic oligonucleotide
gagauuggacccucagcug

SEQ ID NO: 1282948 - RNA, 19 nt, Artificial Sequence
  Description of Artificial Sequence: Synthetic oligonucleotide
auuccgauucaaaacagaa

SEQ ID NO: 1282949 - RNA, 19 nt, Artificial Sequence
  Description of Artificial Sequence: Synthetic oligonucleotide
aaugaggacuguguacuaa

SEQ ID NO: 1282950 - RNA, 19 nt, Artificial Sequence
  Description of Artificial Sequence: Synthetic oligonucleotide
cuggcaccgagccagguac

SEQ ID NO: 1282951 - RNA, 19 nt, Artificial Sequence
  Description of Artificial Sequence: Synthetic oligonucleotide
uucccuucugccugggaca

SEQ ID NO: 1282952 - RNA, 19 nt, Artificial Sequence
  Description of Artificial Sequence: Synthetic oligonucleotide
ggacuguguacuaauauac

SEQ ID NO: 1282953 - RNA, 19 nt, Artificial Sequence
  Description of Artificial Sequence: Synthetic oligonucleotide
gaaugcacgugcaaaagua

SEQ ID NO: 1282954 - RNA, 19 nt, Artificial Sequence
  Description of Artificial Sequence: Synthetic oligonucleotide
caugcuucgcaaaggacga

SEQ ID NO: 1282955 - RNA, 19 nt, Artificial Sequence
  Description of Artificial Sequence: Synthetic oligonucleotide
aagggcccuagcauggauc

SEQ ID NO: 1282956 - RNA, 19 nt, Artificial Sequence
  Description of Artificial Sequence: Synthetic oligonucleotide
cuguaguguauaugagcag

SEQ ID NO: 1282957 - RNA, 19 nt, Artificial Sequence
  Description of Artificial Sequence: Synthetic oligonucleotide
uuacucagagcaggggacc

SEQ ID NO: 1282958 - RNA, 19 nt, Artificial Sequence
  Description of Artificial Sequence: Synthetic oligonucleotide
aaaugaggacuguguacua

SEQ ID NO: 1282959 - RNA, 19 nt, Artificial Sequence
  Description of Artificial Sequence: Synthetic oligonucleotide
gaaccugccacccaccacu

SEQ ID NO: 1282960 - RNA, 19 nt, Artificial Sequence
  Description of Artificial Sequence: Synthetic oligonucleotide
augaggacuguguacuaau

SEQ ID NO: 1282961 - RNA, 19 nt, Artificial Sequence
  Description of Artificial Sequence: Synthetic oligonucleotide
uggcccagaccuuggauac

SEQ ID NO: 1282962 - RNA, 19 nt, Artificial Sequence
  Description of Artificial Sequence: Synthetic oligonucleotide
guuacucagagcaggggac

SEQ ID NO: 1282963 - RNA, 19 nt, Artificial Sequence
  Description of Artificial Sequence: Synthetic oligonucleotide
gacugacggacagacagac

SEQ ID NO: 1282964 - RNA, 19 nt, Artificial Sequence
  Description of Artificial Sequence: Synthetic oligonucleotide
agaaaacguggaagaggcc

SEQ ID NO: 1282965 - RNA, 19 nt, Artificial Sequence
  Description of Artificial Sequence: Synthetic oligonucleotide
ucgcaaaggacgaggguua

SEQ ID NO: 1282966 - RNA, 19 nt, Artificial Sequence
  Description of Artificial Sequence: Synthetic oligonucleotide
gaacgcugccugaaagggg

SEQ ID NO: 1282967 - RNA, 19 nt, Artificial Sequence
  Description of Artificial Sequence: Synthetic oligonucleotide
ucgggcuugggaagccccg

SEQ ID NO: 1282968 - RNA, 19 nt, Artificial Sequence
  Description of Artificial Sequence: Synthetic oligonucleotide
ucagcgagacccucugggu

SEQ ID NO: 1282969 - RNA, 19 nt, Artificial Sequence
  Description of Artificial Sequence: Synthetic oligonucleotide
ggaacaugcuucgcaaagg

SEQ ID NO: 1282970 - RNA, 19 nt, Artificial Sequence
  Description of Artificial Sequence: Synthetic oligonucleotide
ugaggacuguguacuaaua

SEQ ID NO: 1282971 - RNA, 19 nt, Artificial Sequence
  Description of Artificial Sequence: Synthetic oligonucleotide
cagaaugcacgugcaaaag

SEQ ID NO: 1282972 - RNA, 19 nt, Artificial Sequence
  Description of Artificial Sequence: Synthetic oligonucleotide
agugcuugucacagccacc

SEQ ID NO: 1282973 - RNA, 19 nt, Artificial Sequence
  Description of Artificial Sequence: Synthetic oligonucleotide
acuuugccggcuuggggug

SEQ ID NO: 1282974 - RNA, 19 nt, Artificial Sequence
  Description of Artificial Sequence: Synthetic oligonucleotide
aggggucaaggccccgacc

SEQ ID NO: 1282975 - RNA, 19 nt, Artificial Sequence
  Description of Artificial Sequence: Synthetic oligonucleotide
caaggaacaugcuucgcaa

SEQ ID NO: 1282976 - RNA, 19 nt, Artificial Sequence
  Description of Artificial Sequence: Synthetic oligonucleotide
ggacggaccugagaaaacg

SEQ ID NO: 1282977 - RNA, 19 nt, Artificial Sequence
  Description of Artificial Sequence: Synthetic oligonucleotide
ugagcuggguauugcccca

SEQ ID NO: 1282978 - RNA, 19 nt, Artificial Sequence
  Description of Artificial Sequence: Synthetic oligonucleotide
auugggaaguggaucucag

SEQ ID NO: 1282979 - RNA, 19 nt, Artificial Sequence
  Description of Artificial Sequence: Synthetic oligonucleotide
uggcgugugucugagugga

SEQ ID NO: 1282980 - RNA, 19 nt, Artificial Sequence
  Description of Artificial Sequence: Synthetic oligonucleotide
caaaggacgaggguuaaaa

SEQ ID NO: 1282981 - RNA, 19 nt, Artificial Sequence
  Description of Artificial Sequence: Synthetic oligonucleotide
cuggcgugugucugagugg

SEQ ID NO: 1282982 - RNA, 19 nt, Artificial Sequence
  Description of Artificial Sequence: Synthetic oligonucleotide
cagccaccuguccauaccc

SEQ ID NO: 1282983 - RNA, 19 nt, Artificial Sequence
  Description of Artificial Sequence: Synthetic oligonucleotide
agggcccuaaccguugauc

SEQ ID NO: 1282984 - RNA, 19 nt, Artificial Sequence
  Description of Artificial Sequence: Synthetic oligonucleotide
guaguguauaugagcagca

SEQ ID NO: 1282985 - RNA, 19 nt, Artificial Sequence
  Description of Artificial Sequence: Synthetic oligonucleotide
cacgagauuggacccucag

SEQ ID NO: 1282986 - RNA, 19 nt, Artificial Sequence
  Description of Artificial Sequence: Synthetic oligonucleotide
uguguggcacagccccaag

SEQ ID NO: 1282987 - RNA, 19 nt, Artificial Sequence
  Description of Artificial Sequence: Synthetic oligonucleotide
cacgugcaaaaguaaagaa

SEQ ID NO: 1282988 - RNA, 19 nt, Artificial Sequence
  Description of Artificial Sequence: Synthetic oligonucleotide
gaguggaggagaguauuuc

SEQ ID NO: 1282989 - RNA, 19 nt, Artificial Sequence
  Description of Artificial Sequence: Synthetic oligonucleotide
gcauggauccccugggcag

SEQ ID NO: 1282990 - RNA, 19 nt, Artificial Sequence
  Description of Artificial Sequence: Synthetic oligonucleotide
gaccuuggauaccuauaca

SEQ ID NO: 1282991 - RNA, 19 nt, Artificial Sequence
  Description of Artificial Sequence: Synthetic oligonucleotide
ggguaaggggucaaggccc

SEQ ID NO: 1282992 - RNA, 19 nt, Artificial Sequence
  Description of Artificial Sequence: Synthetic oligonucleotide
ggaucucaggggcucaaug

SEQ ID NO: 1282993 - RNA, 19 nt, Artificial Sequence
  Description of Artificial Sequence: Synthetic oligonucleotide
ggauccccugggcagaacc

SEQ ID NO: 1282994 - RNA, 19 nt, Artificial Sequence
  Description of Artificial Sequence: Synthetic oligonucleotide
ucuuggagucuggggagca

SEQ ID NO: 1282995 - RNA, 19 nt, Artificial Sequence
  Description of Artificial Sequence: Synthetic oligonucleotide
ucguguugggauggcacga

SEQ ID NO: 1282996 - RNA, 19 nt, Artificial Sequence
  Description of Artificial Sequence: Synthetic oligonucleotide
uaccuauacagaggaugac

SEQ ID NO: 1282997 - RNA, 19 nt, Artificial Sequence
  Description of Artificial Sequence: Synthetic oligonucleotide
agcugggccgcgaucuagc

SEQ ID NO: 1282998 - RNA, 19 nt, Artificial Sequence
  Description of Artificial Sequence: Synthetic oligonucleotide
ucauccacguagccccauc

SEQ ID NO: 1282999 - RNA, 19 nt, Artificial Sequence
  Description of Artificial Sequence: Synthetic oligonucleotide
ugucaccugcccugccaag

SEQ ID NO: 1283000 - RNA, 19 nt, Artificial Sequence
  Description of Artificial Sequence: Synthetic oligonucleotide
uuggacccucagcuggaga

SEQ ID NO: 1283001 - RNA, 19 nt, Artificial Sequence
  Description of Artificial Sequence: Synthetic oligonucleotide
uaaggggucaaggccccga

SEQ ID NO: 1283002 - RNA, 19 nt, Artificial Sequence
  Description of Artificial Sequence: Synthetic oligonucleotide
acggaccugagaaaacgug

SEQ ID NO: 1283003 - RNA, 19 nt, Artificial Sequence
  Description of Artificial Sequence: Synthetic oligonucleotide
cuucagcgagacccucugg

SEQ ID NO: 1283004 - RNA, 19 nt, Artificial Sequence
  Description of Artificial Sequence: Synthetic oligonucleotide
ccgauucaaaacagaauuc

SEQ ID NO: 1283005 - RNA, 19 nt, Artificial Sequence
  Description of Artificial Sequence: Synthetic oligonucleotide
auccacguagccccaucgu

SEQ ID NO: 1283006 - RNA, 19 nt, Artificial Sequence
  Description of Artificial Sequence: Synthetic oligonucleotide
agcuggguauugccccagg

SEQ ID NO: 1283007 - RNA, 19 nt, Artificial Sequence
  Description of Artificial Sequence: Synthetic oligonucleotide
gggaccaugggcuugggcu

SEQ ID NO: 1283008 - RNA, 19 nt, Artificial Sequence
  Description of Artificial Sequence: Synthetic oligonucleotide
gcuucgcaaaggacgaggg

SEQ ID NO: 1283009 - RNA, 19 nt, Artificial Sequence
  Description of Artificial Sequence: Synthetic oligonucleotide
cuuguggccaagggccugc

SEQ ID NO: 1283010 - RNA, 19 nt, Artificial Sequence
  Description of Artificial Sequence: Synthetic oligonucleotide
ugccugaaaggggcuaaca

SEQ ID NO: 1283011 - RNA, 19 nt, Artificial Sequence
  Description of Artificial Sequence: Synthetic oligonucleotide
cacuuugccggcuuggggu

SEQ ID NO: 1283012 - RNA, 19 nt, Artificial Sequence
  Description of Artificial Sequence: Synthetic oligonucleotide
gcuggguauugccccaggg

SEQ ID NO: 1283013 - RNA, 19 nt, Artificial Sequence
  Description of Artificial Sequence: Synthetic oligonucleotide
aguguggcaggcaggacaa

SEQ ID NO: 1283014 - RNA, 19 nt, Artificial Sequence
  Description of Artificial Sequence: Synthetic oligonucleotide
caagggugacaguuacuca

SEQ ID NO: 1283015 - RNA, 19 nt, Artificial Sequence
  Description of Artificial Sequence: Synthetic oligonucleotide
uguccauacccuggggcuc

SEQ ID NO: 1283016 - RNA, 19 nt, Artificial Sequence
  Description of Artificial Sequence: Synthetic oligonucleotide
gauuggacccucagcugga

SEQ ID NO: 1283017 - RNA, 19 nt, Artificial Sequence
  Description of Artificial Sequence: Synthetic oligonucleotide
ccgaccuacagcucacacc

SEQ ID NO: 1283018 - RNA, 19 nt, Artificial Sequence
  Description of Artificial Sequence: Synthetic oligonucleotide
cgaucuagcacauggguga

SEQ ID NO: 1283019 - RNA, 19 nt, Artificial Sequence
  Description of Artificial Sequence: Synthetic oligonucleotide
gggcccuaaccguugauca

SEQ ID NO: 1283020 - RNA, 19 nt, Artificial Sequence
  Description of Artificial Sequence: Synthetic oligonucleotide
guagccccaucguguuggg

SEQ ID NO: 1283021 - RNA, 19 nt, Artificial Sequence
  Description of Artificial Sequence: Synthetic oligonucleotide
agacuggcgugugucugag

SEQ ID NO: 1283022 - RNA, 19 nt, Artificial Sequence
  Description of Artificial Sequence: Synthetic oligonucleotide
ccuuggauaccuauacaga

SEQ ID NO: 1283023 - RNA, 19 nt, Artificial Sequence
  Description of Artificial Sequence: Synthetic oligonucleotide
gcgaucuagcacaugggug

SEQ ID NO: 1283024 - RNA, 19 nt, Artificial Sequence
  Description of Artificial Sequence: Synthetic oligonucleotide
ugacugacugacggacaga

SEQ ID NO: 1283025 - RNA, 19 nt, Artificial Sequence
  Description of Artificial Sequence: Synthetic oligonucleotide
acuugggaccaugggcuug

SEQ ID NO: 1283026 - RNA, 19 nt, Artificial Sequence
  Description of Artificial Sequence: Synthetic oligonucleotide
uggcaccgagccagguacc

SEQ ID NO: 1283027 - RNA, 19 nt, Artificial Sequence
  Description of Artificial Sequence: Synthetic oligonucleotide
cagguacccaagccucccc

SEQ ID NO: 1283028 - RNA, 19 nt, Artificial Sequence
  Description of Artificial Sequence: Synthetic oligonucleotide
cccaccgacacaaggaaca

SEQ ID NO: 1283029 - RNA, 19 nt, Artificial Sequence
  Description of Artificial Sequence: Synthetic oligonucleotide
gcccuaaccguugaucacc

SEQ ID NO: 1283030 - RNA, 19 nt, Artificial Sequence
  Description of Artificial Sequence: Synthetic oligonucleotide
cagaccuuggauaccuaua

SEQ ID NO: 1283031 - RNA, 19 nt, Artificial Sequence
  Description of Artificial Sequence: Synthetic oligonucleotide
ggcccuagcauggaucccc

SEQ ID NO: 1283032 - RNA, 19 nt, Artificial Sequence
  Description of Artificial Sequence: Synthetic oligonucleotide
cgauucaaaacagaauuca

SEQ ID NO: 1283033 - RNA, 19 nt, Artificial Sequence
  Description of Artificial Sequence: Synthetic oligonucleotide
ggggaccugcaauauguca

SEQ ID NO: 1283034 - RNA, 19 nt, Artificial Sequence
  Description of Artificial Sequence: Synthetic oligonucleotide
aggagccgggugugggaag

SEQ ID NO: 1283035 - RNA, 19 nt, Artificial Sequence
  Description of Artificial Sequence: Synthetic oligonucleotide
ggcugaaaugaggacugug

SEQ ID NO: 1283036 - RNA, 19 nt, Artificial Sequence
  Description of Artificial Sequence: Synthetic oligonucleotide
cuuugccggcuuggggugg

SEQ ID NO: 1283037 - RNA, 19 nt, Artificial Sequence
  Description of Artificial Sequence: Synthetic oligonucleotide
gggagaucaauaacuuaga

SEQ ID NO: 1283038 - RNA, 19 nt, Artificial Sequence
  Description of Artificial Sequence: Synthetic oligonucleotide
ggagccgggugugggaagg

SEQ ID NO: 1283039 - RNA, 19 nt, Artificial Sequence
  Description of Artificial Sequence: Synthetic oligonucleotide
gccaccuguccauacccug

SEQ ID NO: 1283040 - RNA, 19 nt, Artificial Sequence
  Description of Artificial Sequence: Synthetic oligonucleotide
gggcuaacacuuugccggc

SEQ ID NO: 1283041 - RNA, 19 nt, Artificial Sequence
  Description of Artificial Sequence: Synthetic oligonucleotide
acguagccccaucguguug

SEQ ID NO: 1283042 - RNA, 19 nt, Artificial Sequence
  Description of Artificial Sequence: Synthetic oligonucleotide
cguagccccaucguguugg

SEQ ID NO: 1283043 - RNA, 19 nt, Artificial Sequence
  Description of Artificial Sequence: Synthetic oligonucleotide
ugcccagacuggcgugugu

SEQ ID NO: 1283044 - RNA, 19 nt, Artificial Sequence
  Description of Artificial Sequence: Synthetic oligonucleotide
ccagaaugcacgugcaaaa

SEQ ID NO: 1283045 - RNA, 19 nt, Artificial Sequence
  Description of Artificial Sequence: Synthetic oligonucleotide
gagcuggguauugccccag

SEQ ID NO: 1283046 - RNA, 19 nt, Artificial Sequence
  Description of Artificial Sequence: Synthetic oligonucleotide
cugggccgcgaucuagcac

SEQ ID NO: 1283047 - RNA, 19 nt, Artificial Sequence
  Description of Artificial Sequence: Synthetic oligonucleotide
guguugggauggcacgaga

SEQ ID NO: 1283048 - RNA, 19 nt, Artificial Sequence
  Description of Artificial Sequence: Synthetic oligonucleotide
ugaggccaccgcccguguc

SEQ ID NO: 1283049 - RNA, 19 nt, Artificial Sequence
  Description of Artificial Sequence: Synthetic oligonucleotide
ggccggauauccaagccca

SEQ ID NO: 1283050 - RNA, 19 nt, Artificial Sequence
  Description of Artificial Sequence: Synthetic oligonucleotide
ugacccugucauccacgua

SEQ ID NO: 1283051 - RNA, 19 nt, Artificial Sequence
  Description of Artificial Sequence: Synthetic oligonucleotide
ggcuugggaagccccgggc

SEQ ID NO: 1283052 - RNA, 19 nt, Artificial Sequence
  Description of Artificial Sequence: Synthetic oligonucleotide
gcaauaugucaccugcccu

SEQ ID NO: 1283053 - RNA, 19 nt, Artificial Sequence
  Description of Artificial Sequence: Synthetic oligonucleotide
agcaggggaccugcaauau

SEQ ID NO: 1283054 - RNA, 19 nt, Artificial Sequence
  Description of Artificial Sequence: Synthetic oligonucleotide
cucugugcacccgucccuc

SEQ ID NO: 1283055 - RNA, 19 nt, Artificial Sequence
  Description of Artificial Sequence: Synthetic oligonucleotide
cgagauuggacccucagcu

SEQ ID NO: 1283056 - RNA, 19 nt, Artificial Sequence
  Description of Artificial Sequence: Synthetic oligonucleotide
caccgacacaaggaacaug

SEQ ID NO: 1283057 - RNA, 19 nt, Artificial Sequence
  Description of Artificial Sequence: Synthetic oligonucleotide
augcuucgcaaaggacgag

SEQ ID NO: 1283058 - RNA, 19 nt, Artificial Sequence
  Description of Artificial Sequence: Synthetic oligonucleotide
gacggaccugagaaaacgu

SEQ ID NO: 1283059 - RNA, 19 nt, Artificial Sequence
  Description of Artificial Sequence: Synthetic oligonucleotide
acugacugacggacagaca

SEQ ID NO: 1283060 - RNA, 19 nt, Artificial Sequence
  Description of Artificial Sequence: Synthetic oligonucleotide
ggucaaggccccgaccuac

SEQ ID NO: 1283061 - RNA, 19 nt, Artificial Sequence
  Description of Artificial Sequence: Synthetic oligonucleotide
cauggauccccugggcaga

SEQ ID NO: 1283062 - RNA, 19 nt, Artificial Sequence
  Description of Artificial Sequence: Synthetic oligonucleotide
ccgcgaucuagcacauggg

SEQ ID NO: 1283063 - RNA, 19 nt, Artificial Sequence
  Description of Artificial Sequence: Synthetic oligonucleotide
gaggagccgggugugggaa

SEQ ID NO: 1283064 - RNA, 19 nt, Artificial Sequence
  Description of Artificial Sequence: Synthetic oligonucleotide
ccuggcacacuuggaacgc

SEQ ID NO: 1283065 - RNA, 19 nt, Artificial Sequence
  Description of Artificial Sequence: Synthetic oligonucleotide
gugcacccgucccuccagc

SEQ ID NO: 1283066 - RNA, 19 nt, Artificial Sequence
  Description of Artificial Sequence: Synthetic oligonucleotide
agcccagaaugcacgugca

SEQ ID NO: 1283067 - RNA, 19 nt, Artificial Sequence
  Description of Artificial Sequence: Synthetic oligonucleotide
ggggacggaccugagaaaa

SEQ ID NO: 1283068 - RNA, 19 nt, Artificial Sequence
  Description of Artificial Sequence: Synthetic oligonucleotide
accugccacccaccacuug

SEQ ID NO: 1283069 - RNA, 19 nt, Artificial Sequence
  Description of Artificial Sequence: Synthetic oligonucleotide
guggacacucuggggcuug

SEQ ID NO: 1283070 - RNA, 19 nt, Artificial Sequence
  Description of Artificial Sequence: Synthetic oligonucleotide
uggaucucaggggcucaau

SEQ ID NO: 1283071 - RNA, 19 nt, Artificial Sequence
  Description of Artificial Sequence: Synthetic oligonucleotide
gaggcuggguccccauugu

SEQ ID NO: 1283072 - RNA, 19 nt, Artificial Sequence
  Description of Artificial Sequence: Synthetic oligonucleotide
cacuuggaacgcugccuga

SEQ ID NO: 1283073 - RNA, 19 nt, Artificial Sequence
  Description of Artificial Sequence: Synthetic oligonucleotide
ggccccgaccuacagcuca

SEQ ID NO: 1283074 - RNA, 19 nt, Artificial Sequence
  Description of Artificial Sequence: Synthetic oligonucleotide
caacugcccagacuggcgu

SEQ ID NO: 1283075 - RNA, 19 nt, Artificial Sequence
  Description of Artificial Sequence: Synthetic oligonucleotide
gccccaucguguugggaug

SEQ ID NO: 1283076 - RNA, 19 nt, Artificial Sequence
  Description of Artificial Sequence: Synthetic oligonucleotide
cagcgagacccucugggua

SEQ ID NO: 1283077 - RNA, 19 nt, Artificial Sequence
  Description of Artificial Sequence: Synthetic oligonucleotide
gcauggccggauauccaag

SEQ ID NO: 1283078 - RNA, 19 nt, Artificial Sequence
  Description of Artificial Sequence: Synthetic oligonucleotide
agccgggugugggaaggug

SEQ ID NO: 1283079 - RNA, 19 nt, Artificial Sequence
  Description of Artificial Sequence: Synthetic oligonucleotide
gauccccugggcagaaccu

SEQ ID NO: 1283080 - RNA, 19 nt, Artificial Sequence
  Description of Artificial Sequence: Synthetic oligonucleotide
ggcaccgagccagguaccc

SEQ ID NO: 1283081 - RNA, 19 nt, Artificial Sequence
  Description of Artificial Sequence: Synthetic oligonucleotide
gcgugugucugaguggaca

SEQ ID NO: 1283082 - RNA, 19 nt, Artificial Sequence
  Description of Artificial Sequence: Synthetic oligonucleotide
agccaccuguccauacccu

SEQ ID NO: 1283083 - RNA, 19 nt, Artificial Sequence
  Description of Artificial Sequence: Synthetic oligonucleotide
cuucgcaaaggacgagggu

SEQ ID NO: 1283084 - RNA, 19 nt, Artificial Sequence
  Description of Artificial Sequence: Synthetic oligonucleotide
gaccgucugugauccucaa

SEQ ID NO: 1283085 - RNA, 19 nt, Artificial Sequence
  Description of Artificial Sequence: Synthetic oligonucleotide
aggcugaaaugaggacugu

SEQ ID NO: 1283086 - RNA, 19 nt, Artificial Sequence
  Description of Artificial Sequence: Synthetic oligonucleotide
gaccugcaauaugucaccu

SEQ ID NO: 1283087 - RNA, 19 nt, Artificial Sequence
  Description of Artificial Sequence: Synthetic oligonucleotide
ggauggcacgagauuggac

SEQ ID NO: 1283088 - RNA, 19 nt, Artificial Sequence
  Description of Artificial Sequence: Synthetic oligonucleotide
gcacccgucccuccagcug

SEQ ID NO: 1283089 - RNA, 19 nt, Artificial Sequence
  Description of Artificial Sequence: Synthetic oligonucleotide
cacuugggugagcugggua

SEQ ID NO: 1283090 - RNA, 19 nt, Artificial Sequence
  Description of Artificial Sequence: Synthetic oligonucleotide
gccaccgcccgugucuggg

SEQ ID NO: 1283091 - RNA, 19 nt, Artificial Sequence
  Description of Artificial Sequence: Synthetic oligonucleotide
cccugccaagacagagugg

SEQ ID NO: 1283092 - RNA, 19 nt, Artificial Sequence
  Description of Artificial Sequence: Synthetic oligonucleotide
uggcuucagcgagacccuc

SEQ ID NO: 1283093 - RNA, 19 nt, Artificial Sequence
  Description of Artificial Sequence: Synthetic oligonucleotide
ggaggagaguauuucucuu

SEQ ID NO: 1283094 - RNA, 19 nt, Artificial Sequence
  Description of Artificial Sequence: Synthetic oligonucleotide
ccgagccagguacccaagc

SEQ ID NO: 1283095 - RNA, 19 nt, Artificial Sequence
  Description of Artificial Sequence: Synthetic oligonucleotide
uccauacccuggggcucug

SEQ ID NO: 1283096 - RNA, 19 nt, Artificial Sequence
  Description of Artificial Sequence: Synthetic oligonucleotide
ggaccgucugugauccuca

SEQ ID NO: 1283097 - RNA, 19 nt, Artificial Sequence
  Description of Artificial Sequence: Synthetic oligonucleotide
cccgaccuacagcucacac

SEQ ID NO: 1283098 - RNA, 19 nt, Artificial Sequence
  Description of Artificial Sequence: Synthetic oligonucleotide
gggacggaccugagaaaac

SEQ ID NO: 1283099 - RNA, 19 nt, Artificial Sequence
  Description of Artificial Sequence: Synthetic oligonucleotide
ggcacgagauuggacccuc

SEQ ID NO: 1283100 - RNA, 19 nt, Artificial Sequence
  Description of Artificial Sequence: Synthetic oligonucleotide
cccagaaugcacgugcaaa

SEQ ID NO: 1283101 - RNA, 19 nt, Artificial Sequence
  Description of Artificial Sequence: Synthetic oligonucleotide
ccccaucguguugggaugg

SEQ ID NO: 1283102 - RNA, 19 nt, Artificial Sequence
  Description of Artificial Sequence: Synthetic oligonucleotide
gggauggcacgagauugga

SEQ ID NO: 1283103 - RNA, 19 nt, Artificial Sequence
  Description of Artificial Sequence: Synthetic oligonucleotide
ggguccccauugugaacug

SEQ ID NO: 1283104 - RNA, 19 nt, Artificial Sequence
  Description of Artificial Sequence: Synthetic oligonucleotide
ccccaccgacacaaggaac

SEQ ID NO: 1283105 - RNA, 19 nt, Artificial Sequence
  Description of Artificial Sequence: Synthetic oligonucleotide
cggauauccaagcccagaa

SEQ ID NO: 1283106 - RNA, 19 nt, Artificial Sequence
  Description of Artificial Sequence: Synthetic oligonucleotide
cacccaccacuugggugag

SEQ ID NO: 1283107 - RNA, 19 nt, Artificial Sequence
  Description of Artificial Sequence: Synthetic oligonucleotide
guauugccccagggcuuug

SEQ ID NO: 1283108 - RNA, 19 nt, Artificial Sequence
  Description of Artificial Sequence: Synthetic oligonucleotide
cagaguggaggagaguauu

SEQ ID NO: 1283109 - RNA, 19 nt, Artificial Sequence
  Description of Artificial Sequence: Synthetic oligonucleotide
uggauccccugggcagaac

SEQ ID NO: 1283110 - RNA, 19 nt, Artificial Sequence
  Description of Artificial Sequence: Synthetic oligonucleotide
gucuggggacggaccugag

SEQ ID NO: 1283111 - RNA, 19 nt, Artificial Sequence
  Description of Artificial Sequence: Synthetic oligonucleotide
ccacguagccccaucgugu

SEQ ID NO: 1283112 - RNA, 19 nt, Artificial Sequence
  Description of Artificial Sequence: Synthetic oligonucleotide
gcugggccgcgaucuagca

SEQ ID NO: 1283113 - RNA, 19 nt, Artificial Sequence
  Description of Artificial Sequence: Synthetic oligonucleotide
cacguagccccaucguguu

SEQ ID NO: 1283114 - RNA, 19 nt, Artificial Sequence
  Description of Artificial Sequence: Synthetic oligonucleotide
caccgcccgugucugggga

SEQ ID NO: 1283115 - RNA, 19 nt, Artificial Sequence
  Description of Artificial Sequence: Synthetic oligonucleotide
gcuaacacuuugccggcuu

SEQ ID NO: 1283116 - RNA, 19 nt, Artificial Sequence
  Description of Artificial Sequence: Synthetic oligonucleotide
gugucugaguggacacucu

SEQ ID NO: 1283117 - RNA, 19 nt, Artificial Sequence
  Description of Artificial Sequence: Synthetic oligonucleotide
aggccccgaccuacagcuc

SEQ ID NO: 1283118 - RNA, 19 nt, Artificial Sequence
  Description of Artificial Sequence: Synthetic oligonucleotide
ccauugggaaguggaucuc

SEQ ID NO: 1283119 - RNA, 19 nt, Artificial Sequence
  Description of Artificial Sequence: Synthetic oligonucleotide
gcagggcccuaaccguuga

SEQ ID NO: 1283120 - RNA, 19 nt, Artificial Sequence
  Description of Artificial Sequence: Synthetic oligonucleotide
gcccagaaugcacgugcaa

SEQ ID NO: 1283121 - RNA, 19 nt, Artificial Sequence
  Description of Artificial Sequence: Synthetic oligonucleotide
acgcugccugaaaggggcu

SEQ ID NO: 1283122 - RNA, 19 nt, Artificial Sequence
  Description of Artificial Sequence: Synthetic oligonucleotide
gguauugccccagggcuuu

SEQ ID NO: 1283123 - RNA, 19 nt, Artificial Sequence
  Description of Artificial Sequence: Synthetic oligonucleotide
gggcacaugggagaucaau

SEQ ID NO: 1283124 - RNA, 19 nt, Artificial Sequence
  Description of Artificial Sequence: Synthetic oligonucleotide
ccuuguggccaagggccug

SEQ ID NO: 1283125 - RNA, 19 nt, Artificial Sequence
  Description of Artificial Sequence: Synthetic oligonucleotide
gcaaaggacgaggguuaaa

SEQ ID NO: 1283126 - RNA, 19 nt, Artificial Sequence
  Description of Artificial Sequence: Synthetic oligonucleotide
ccagaccuuggauaccuau

SEQ ID NO: 1283127 - RNA, 19 nt, Artificial Sequence
  Description of Artificial Sequence: Synthetic oligonucleotide
cccgugucuggggacggac

SEQ ID NO: 1283128 - RNA, 19 nt, Artificial Sequence
  Description of Artificial Sequence: Synthetic oligonucleotide
cccaucguguugggauggc

SEQ ID NO: 1283129 - RNA, 19 nt, Artificial Sequence
  Description of Artificial Sequence: Synthetic oligonucleotide
gggucaaggccccgaccua

SEQ ID NO: 1283130 - RNA, 19 nt, Artificial Sequence
  Description of Artificial Sequence: Synthetic oligonucleotide
cccuagcauggauccccug

SEQ ID NO: 1283131 - RNA, 19 nt, Artificial Sequence
  Description of Artificial Sequence: Synthetic oligonucleotide
cgcgaucuagcacaugggu

SEQ ID NO: 1283132 - RNA, 19 nt, Artificial Sequence
  Description of Artificial Sequence: Synthetic oligonucleotide
gggcccuagcauggauccc

SEQ ID NO: 1283133 - RNA, 19 nt, Artificial Sequence
  Description of Artificial Sequence: Synthetic oligonucleotide
cccuaaccguugaucaccu

SEQ ID NO: 1283134 - RNA, 19 nt, Artificial Sequence
  Description of Artificial Sequence: Synthetic oligonucleotide
ccaucguguugggauggca

SEQ ID NO: 1283135 - RNA, 19 nt, Artificial Sequence
  Description of Artificial Sequence: Synthetic oligonucleotide
cccaccacuugggugagcu

SEQ ID NO: 1283136 - RNA, 19 nt, Artificial Sequence
  Description of Artificial Sequence: Synthetic oligonucleotide
ggacacucuggggcuugga

SEQ ID NO: 1283137 - RNA, 19 nt, Artificial Sequence
  Description of Artificial Sequence: Synthetic oligonucleotide
gcaccgagccagguaccca

SEQ ID NO: 1283138 - RNA, 19 nt, Artificial Sequence
  Description of Artificial Sequence: Synthetic oligonucleotide
ggauaccuauacagaggau

SEQ ID NO: 1283139 - RNA, 19 nt, Artificial Sequence
  Description of Artificial Sequence: Synthetic oligonucleotide
ggcgugugucugaguggac

SEQ ID NO: 1283140 - RNA, 19 nt, Artificial Sequence
  Description of Artificial Sequence: Synthetic oligonucleotide
gugaggccaccgcccgugu

SEQ ID NO: 1283141 - RNA, 19 nt, Artificial Sequence
  Description of Artificial Sequence: Synthetic oligonucleotide
ccuggcaccgagccaggua

SEQ ID NO: 1283142 - RNA, 19 nt, Artificial Sequence
  Description of Artificial Sequence: Synthetic oligonucleotide
cuguguccucucuggccau

SEQ ID NO: 1283143 - RNA, 19 nt, Artificial Sequence
  Description of Artificial Sequence: Synthetic oligonucleotide
agggcacaugggagaucaa

SEQ ID NO: 1283144 - RNA, 19 nt, Artificial Sequence
  Description of Artificial Sequence: Synthetic oligonucleotide
gccccgaccuacagcucac

SEQ ID NO: 1283145 - RNA, 19 nt, Artificial Sequence
  Description of Artificial Sequence: Synthetic oligonucleotide
ggguauugccccagggcuu

SEQ ID NO: 1283146 - RNA, 19 nt, Artificial Sequence
  Description of Artificial Sequence: Synthetic oligonucleotide
gcacgagauuggacccuca

SEQ ID NO: 1283147 - RNA, 19 nt, Artificial Sequence
  Description of Artificial Sequence: Synthetic oligonucleotide
ggcuaacacuuugccggcu

SEQ ID NO: 1283148 - RNA, 19 nt, Artificial Sequence
  Description of Artificial Sequence: Synthetic oligonucleotide
ccgacacaaggaacaugcu

SEQ ID NO: 1283149 - RNA, 19 nt, Artificial Sequence
  Description of Artificial Sequence: Synthetic oligonucleotide
ccgucccuccagcugccca

SEQ ID NO: 1283150 - RNA, 19 nt, Artificial Sequence
  Description of Artificial Sequence: Synthetic oligonucleotide
ccaagggcccuagcaugga

SEQ ID NO: 1283151 - RNA, 19 nt, Artificial Sequence
  Description of Artificial Sequence: Synthetic oligonucleotide
ggccgcgaucuagcacaug

SEQ ID NO: 1283152 - RNA, 19 nt, Artificial Sequence
  Description of Artificial Sequence: Synthetic oligonucleotide
cagggcccuaaccguugau

SEQ ID NO: 1283153 - RNA, 19 nt, Artificial Sequence
  Description of Artificial Sequence: Synthetic oligonucleotide
cacuguggccuggcacacu

SEQ ID NO: 1283154 - RNA, 19 nt, Artificial Sequence
  Description of Artificial Sequence: Synthetic oligonucleotide
gcccuagcauggauccccu

SEQ ID NO: 1283155 - RNA, 19 nt, Artificial Sequence
  Description of Artificial Sequence: Synthetic oligonucleotide
cgcaaaggacgaggguuaa

SEQ ID NO: 1283156 - RNA, 19 nt, Artificial Sequence
  Description of Artificial Sequence: Synthetic oligonucleotide
gccaggaaugugagugcuu

SEQ ID NO: 1283157 - RNA, 19 nt, Artificial Sequence
  Description of Artificial Sequence: Synthetic oligonucleotide
ccaccgacacaaggaacau

SEQ ID NO: 1283158 - RNA, 19 nt, Artificial Sequence
  Description of Artificial Sequence: Synthetic oligonucleotide
ccccgaccuacagcucaca

SEQ ID NO: 1283159 - RNA, 19 nt, Artificial Sequence
  Description of Artificial Sequence: Synthetic oligonucleotide
ccuaaccguugaucaccuu

SEQ ID NO: 1283160 - RNA, 19 nt, Artificial Sequence
  Description of Artificial Sequence: Synthetic oligonucleotide
gggccgcgaucuagcacau

SEQ ID NO: 1283161 - RNA, 19 nt, Artificial Sequence
  Description of Artificial Sequence: Synthetic oligonucleotide
aauaaaguuacuaagaauc

SEQ ID NO: 1283162 - RNA, 19 nt, Artificial Sequence
  Description of Artificial Sequence: Synthetic oligonucleotide
cuuaaauauauauauaugg

SEQ ID NO: 1283163 - RNA, 19 nt, Artificial Sequence
  Description of Artificial Sequence: Synthetic oligonucleotide
aaugauuaaagagaagucc

SEQ ID NO: 1283164 - RNA, 19 nt, Artificial Sequence
  Description of Artificial Sequence: Synthetic oligonucleotide
uuaaauauauauauauggg

SEQ ID NO: 1283165 - RNA, 19 nt, Artificial Sequence
  Description of Artificial Sequence: Synthetic oligonucleotide
uaaauauauauauaugggg

SEQ ID NO: 1283166 - RNA, 19 nt, Artificial Sequence
  Description of Artificial Sequence: Synthetic oligonucleotide
aaugagucgauuuacaaga

SEQ ID NO: 1283167 - RNA, 19 nt, Artificial Sequence
  Description of Artificial Sequence: Synthetic oligonucleotide
uuuauaaauccucuugugg

SEQ ID NO: 1283168 - RNA, 19 nt, Artificial Sequence
  Description of Artificial Sequence: Synthetic oligonucleotide
agcaauauggccuuuaaag

SEQ ID NO: 1283169 - RNA, 19 nt, Artificial Sequence
  Description of Artificial Sequence: Synthetic oligonucleotide
aauguaguaaccacuaugg

SEQ ID NO: 1283170 - RNA, 19 nt, Artificial Sequence
  Description of Artificial Sequence: Synthetic oligonucleotide
auaaggaauauugaaauac

SEQ ID NO: 1283171 - RNA, 19 nt, Artificial Sequence
  Description of Artificial Sequence: Synthetic oligonucleotide
aaucauaaaccaucuuggc

SEQ ID NO: 1283172 - RNA, 19 nt, Artificial Sequence
  Description of Artificial Sequence: Synthetic oligonucleotide
uaauaauauauucaauuca

SEQ ID NO: 1283173 - RNA, 19 nt, Artificial Sequence
  Description of Artificial Sequence: Synthetic oligonucleotide
aaguucaacggguugauag

SEQ ID NO: 1283174 - RNA, 19 nt, Artificial Sequence
  Description of Artificial Sequence: Synthetic oligonucleotide
aaaaugagggauugacagc

SEQ ID NO: 1283175 - RNA, 19 nt, Artificial Sequence
  Description of Artificial Sequence: Synthetic oligonucleotide
aaagaagaauuacaugauc

SEQ ID NO: 1283176 - RNA, 19 nt, Artificial Sequence
  Description of Artificial Sequence: Synthetic oligonucleotide
aaaguuuugaacugaccag

SEQ ID NO: 1283177 - RNA, 19 nt, Artificial Sequence
  Description of Artificial Sequence: Synthetic oligonucleotide
aaaugagucgauuuacaag

SEQ ID NO: 1283178 - RNA, 19 nt, Artificial Sequence
  Description of Artificial Sequence: Synthetic oligonucleotide
aauauauucaauucacgau

SEQ ID NO: 1283179 - RNA, 19 nt, Artificial Sequence
  Description of Artificial Sequence: Synthetic oligonucleotide
uuacaagaugccaauaaag

SEQ ID NO: 1283180 - RNA, 19 nt, Artificial Sequence
  Description of Artificial Sequence: Synthetic oligonucleotide
uacuuaaauauauauauau

SEQ ID NO: 1283181 - RNA, 19 nt, Artificial Sequence
  Description of Artificial Sequence: Synthetic oligonucleotide
ucauaaaccggucagcccc

SEQ ID NO: 1283182 - RNA, 19 nt, Artificial Sequence
  Description of Artificial Sequence: Synthetic oligonucleotide
auauucuauauacauuacg

SEQ ID NO: 1283183 - RNA, 19 nt, Artificial Sequence
  Description of Artificial Sequence: Synthetic oligonucleotide
aguuccacaaaucauaggu

SEQ ID NO: 1283184 - RNA, 19 nt, Artificial Sequence
  Description of Artificial Sequence: Synthetic oligonucleotide
gaaaguuuugaacugacca

SEQ ID NO: 1283185 - RNA, 19 nt, Artificial Sequence
  Description of Artificial Sequence: Synthetic oligonucleotide
ugugcuuuuccuuauaaga

SEQ ID NO: 1283186 - RNA, 19 nt, Artificial Sequence
  Description of Artificial Sequence: Synthetic oligonucleotide
guaggcaugauacugggcg

SEQ ID NO: 1283187 - RNA, 19 nt, Artificial Sequence
  Description of Artificial Sequence: Synthetic oligonucleotide
cucauuguaggcaugauac

SEQ ID NO: 1283188 - RNA, 19 nt, Artificial Sequence
  Description of Artificial Sequence: Synthetic oligonucleotide
uguauuuuguacuuucuca

SEQ ID NO: 1283189 - RNA, 19 nt, Artificial Sequence
  Description of Artificial Sequence: Synthetic oligonucleotide
caugaaagguauaaauugg

SEQ ID NO: 1283190 - RNA, 19 nt, Artificial Sequence
  Description of Artificial Sequence: Synthetic oligonucleotide
aauauugaaauacucugua

SEQ ID NO: 1283191 - RNA, 19 nt, Artificial Sequence
  Description of Artificial Sequence: Synthetic oligonucleotide
auuacguaagaaaugaguc

SEQ ID NO: 1283192 - RNA, 19 nt, Artificial Sequence
  Description of Artificial Sequence: Synthetic oligonucleotide
ucauaaggaauauugaaau

SEQ ID NO: 1283193 - RNA, 19 nt, Artificial Sequence
  Description of Artificial Sequence: Synthetic oligonucleotide
uauaagaauaaaagauggc

SEQ ID NO: 1283194 - RNA, 19 nt, Artificial Sequence
  Description of Artificial Sequence: Synthetic oligonucleotide
aaagccuccucaugaaaac

SEQ ID NO: 1283195 - RNA, 19 nt, Artificial Sequence
  Description of Artificial Sequence: Synthetic oligonucleotide
uguaguaaccacuauggac

SEQ ID NO: 1283196 - RNA, 19 nt, Artificial Sequence
  Description of Artificial Sequence: Synthetic oligonucleotide
aaaugauuaaagagaaguc

SEQ ID NO: 1283197 - RNA, 19 nt, Artificial Sequence
  Description of Artificial Sequence: Synthetic oligonucleotide
aaaccggucagccccagac

SEQ ID NO: 1283198 - RNA, 19 nt, Artificial Sequence
  Description of Artificial Sequence: Synthetic oligonucleotide
auaggaauguaguaaccac

SEQ ID NO: 1283199 - RNA, 19 nt, Artificial Sequence
  Description of Artificial Sequence: Synthetic oligonucleotide
caugucuaaaguuaacuag

SEQ ID NO: 1283200 - RNA, 19 nt, Artificial Sequence
  Description of Artificial Sequence: Synthetic oligonucleotide
uacaagaugccaauaaagu

SEQ ID NO: 1283201 - RNA, 19 nt, Artificial Sequence
  Description of Artificial Sequence: Synthetic oligonucleotide
uucauugaacacuugacac

SEQ ID NO: 1283202 - RNA, 19 nt, Artificial Sequence
  Description of Artificial Sequence: Synthetic oligonucleotide
auaaaguuacuaagaaucc

SEQ ID NO: 1283203 - RNA, 19 nt, Artificial Sequence
  Description of Artificial Sequence: Synthetic oligonucleotide
guaaccacuauggacaucg

SEQ ID NO: 1283204 - RNA, 19 nt, Artificial Sequence
  Description of Artificial Sequence: Synthetic oligonucleotide
cuuuguauaguuauccaac

SEQ ID NO: 1283205 - RNA, 19 nt, Artificial Sequence
  Description of Artificial Sequence: Synthetic oligonucleotide
agugaauccacauacucca

SEQ ID NO: 1283206 - RNA, 19 nt, Artificial Sequence
  Description of Artificial Sequence: Synthetic oligonucleotide
aauagucauaaaccgguca

SEQ ID NO: 1283207 - RNA, 19 nt, Artificial Sequence
  Description of Artificial Sequence: Synthetic oligonucleotide
uacuaagaauccuucacag

SEQ ID NO: 1283208 - RNA, 19 nt, Artificial Sequence
  Description of Artificial Sequence: Synthetic oligonucleotide
gaaauagauggcuucauga

SEQ ID NO: 1283209 - RNA, 19 nt, Artificial Sequence
  Description of Artificial Sequence: Synthetic oligonucleotide
uggagccugaaacucaugg

SEQ ID NO: 1283210 - RNA, 19 nt, Artificial Sequence
  Description of Artificial Sequence: Synthetic oligonucleotide
uaaguuccacaaaucauag

SEQ ID NO: 1283211 - RNA, 19 nt, Artificial Sequence
  Description of Artificial Sequence: Synthetic oligonucleotide
uuaaauggcuccugcaaag

SEQ ID NO: 1283212 - RNA, 19 nt, Artificial Sequence
  Description of Artificial Sequence: Synthetic oligonucleotide
uuacuaagaauccuucaca

SEQ ID NO: 1283213 - RNA, 19 nt, Artificial Sequence
  Description of Artificial Sequence: Synthetic oligonucleotide
uacauuaauacuuccucug

SEQ ID NO: 1283214 - RNA, 19 nt, Artificial Sequence
  Description of Artificial Sequence: Synthetic oligonucleotide
ugcguaauucccaaugaag

SEQ ID NO: 1283215 - RNA, 19 nt, Artificial Sequence
  Description of Artificial Sequence: Synthetic oligonucleotide
accaugugaagguggaugc

SEQ ID NO: 1283216 - RNA, 19 nt, Artificial Sequence
  Description of Artificial Sequence: Synthetic oligonucleotide
uucgauuccgaauggagcc

SEQ ID NO: 1283217 - RNA, 19 nt, Artificial Sequence
  Description of Artificial Sequence: Synthetic oligonucleotide
uacauuacguaagaaauga

SEQ ID NO: 1283218 - RNA, 19 nt, Artificial Sequence
  Description of Artificial Sequence: Synthetic oligonucleotide
aauagugccagguguccuc

SEQ ID NO: 1283219 - RNA, 19 nt, Artificial Sequence
  Description of Artificial Sequence: Synthetic oligonucleotide
gagucgauuuacaagaugc

SEQ ID NO: 1283220 - RNA, 19 nt, Artificial Sequence
  Description of Artificial Sequence: Synthetic oligonucleotide
aaauagauggcuucaugaa

SEQ ID NO: 1283221 - RNA, 19 nt, Artificial Sequence
  Description of Artificial Sequence: Synthetic oligonucleotide
agugauaaauuguacauua

SEQ ID NO: 1283222 - RNA, 19 nt, Artificial Sequence
  Description of Artificial Sequence: Synthetic oligonucleotide
uucaugaacuaugagagac

SEQ ID NO: 1283223 - RNA, 19 nt, Artificial Sequence
  Description of Artificial Sequence: Synthetic oligonucleotide
uguugagaaaguuuugaac

SEQ ID NO: 1283224 - RNA, 19 nt, Artificial Sequence
  Description of Artificial Sequence: Synthetic oligonucleotide
uuagacuauaauauucuau

SEQ ID NO: 1283225 - RNA, 19 nt, Artificial Sequence
  Description of Artificial Sequence: Synthetic oligonucleotide
ucaauucacgauauuuuca

SEQ ID NO: 1283226 - RNA, 19 nt, Artificial Sequence
  Description of Artificial Sequence: Synthetic oligonucleotide
aacguacagucacccaugc

SEQ ID NO: 1283227 - RNA, 19 nt, Artificial Sequence
  Description of Artificial Sequence: Synthetic oligonucleotide
uauaaauccucuuguggug

SEQ ID NO: 1283228 - RNA, 19 nt, Artificial Sequence
  Description of Artificial Sequence: Synthetic oligonucleotide
uuuacaagaugccaauaaa

SEQ ID NO: 1283229 - RNA, 19 nt, Artificial Sequence
  Description of Artificial Sequence: Synthetic oligonucleotide
gaacuuuguauaguuaucc

SEQ ID NO: 1283230 - RNA, 19 nt, Artificial Sequence
  Description of Artificial Sequence: Synthetic oligonucleotide
ucucaugaaagguauaaau

SEQ ID NO: 1283231 - RNA, 19 nt, Artificial Sequence
  Description of Artificial Sequence: Synthetic oligonucleotide
uugauaggaauguaguaac

SEQ ID NO: 1283232 - RNA, 19 nt, Artificial Sequence
  Description of Artificial Sequence: Synthetic oligonucleotide
cuagcaaacguacagucac

SEQ ID NO: 1283233 - RNA, 19 nt, Artificial Sequence
  Description of Artificial Sequence: Synthetic oligonucleotide
uuaauggucacaacugaaa

SEQ ID NO: 1283234 - RNA, 19 nt, Artificial Sequence
  Description of Artificial Sequence: Synthetic oligonucleotide
guuacuaagaauccuucac

SEQ ID NO: 1283235 - RNA, 19 nt, Artificial Sequence
  Description of Artificial Sequence: Synthetic oligonucleotide
aacuagauggcaaacauua

SEQ ID NO: 1283236 - RNA, 19 nt, Artificial Sequence
  Description of Artificial Sequence: Synthetic oligonucleotide
aucaaguaauuugaaaauc

SEQ ID NO: 1283237 - RNA, 19 nt, Artificial Sequence
  Description of Artificial Sequence: Synthetic oligonucleotide
ucuuaaauggcuccugcaa

SEQ ID NO: 1283238 - RNA, 19 nt, Artificial Sequence
  Description of Artificial Sequence: Synthetic oligonucleotide
ccaaucauaaggaauauug

SEQ ID NO: 1283239 - RNA, 19 nt, Artificial Sequence
  Description of Artificial Sequence: Synthetic oligonucleotide
guaguaaccacuauggaca

SEQ ID NO: 1283240 - RNA, 19 nt, Artificial Sequence
  Description of Artificial Sequence: Synthetic oligonucleotide
ucgauuuacaagaugccaa

SEQ ID NO: 1283241 - RNA, 19 nt, Artificial Sequence
  Description of Artificial Sequence: Synthetic oligonucleotide
agugaugccgagcugaaga

SEQ ID NO: 1283242 - RNA, 19 nt, Artificial Sequence
  Description of Artificial Sequence: Synthetic oligonucleotide
uucaauucacgauauuuuc

SEQ ID NO: 1283243 - RNA, 19 nt, Artificial Sequence
  Description of Artificial Sequence: Synthetic oligonucleotide
auaauauauucaauucacg

SEQ ID NO: 1283244 - RNA, 19 nt, Artificial Sequence
  Description of Artificial Sequence: Synthetic oligonucleotide
uacguaagaaaugagucga

SEQ ID NO: 1283245 - RNA, 19 nt, Artificial Sequence
  Description of Artificial Sequence: Synthetic oligonucleotide
ugaaagguauaaauuggaa

SEQ ID NO: 1283246 - RNA, 19 nt, Artificial Sequence
  Description of Artificial Sequence: Synthetic oligonucleotide
ucauugaacacuugacaca

SEQ ID NO: 1283247 - RNA, 19 nt, Artificial Sequence
  Description of Artificial Sequence: Synthetic oligonucleotide
uggaacuuuguauaguuau

SEQ ID NO: 1283248 - RNA, 19 nt, Artificial Sequence
  Description of Artificial Sequence: Synthetic oligonucleotide
aguucaacggguugauagg

SEQ ID NO: 1283249 - RNA, 19 nt, Artificial Sequence
  Description of Artificial Sequence: Synthetic oligonucleotide
uaauggucacaacugaaaa

SEQ ID NO: 1283250 - RNA, 19 nt, Artificial Sequence
  Description of Artificial Sequence: Synthetic oligonucleotide
uugaacacuugacacacaa

SEQ ID NO: 1283251 - RNA, 19 nt, Artificial Sequence
  Description of Artificial Sequence: Synthetic oligonucleotide
uccucaugaaaacuguacu

SEQ ID NO: 1283252 - RNA, 19 nt, Artificial Sequence
  Description of Artificial Sequence: Synthetic oligonucleotide
aggaaauagugccaggugu

SEQ ID NO: 1283253 - RNA, 19 nt, Artificial Sequence
  Description of Artificial Sequence: Synthetic oligonucleotide
gauacugggcgucuguccc

SEQ ID NO: 1283254 - RNA, 19 nt, Artificial Sequence
  Description of Artificial Sequence: Synthetic oligonucleotide
agaauagucauaaaccggu

SEQ ID NO: 1283255 - RNA, 19 nt, Artificial Sequence
  Description of Artificial Sequence: Synthetic oligonucleotide
auucacgauauuuucauuu

SEQ ID NO: 1283256 - RNA, 19 nt, Artificial Sequence
  Description of Artificial Sequence: Synthetic oligonucleotide
aaguuccacaaaucauagg

SEQ ID NO: 1283257 - RNA, 19 nt, Artificial Sequence
  Description of Artificial Sequence: Synthetic oligonucleotide
acuuaaauauauauauaug

SEQ ID NO: 1283258 - RNA, 19 nt, Artificial Sequence
  Description of Artificial Sequence: Synthetic oligonucleotide
ugauaggaauguaguaacc

SEQ ID NO: 1283259 - RNA, 19 nt, Artificial Sequence
  Description of Artificial Sequence: Synthetic oligonucleotide
cuucgauuccgaauggagc

SEQ ID NO: 1283260 - RNA, 19 nt, Artificial Sequence
  Description of Artificial Sequence: Synthetic oligonucleotide
ugcccaaagaagaauuaca

SEQ ID NO: 1283261 - RNA, 19 nt, Artificial Sequence
  Description of Artificial Sequence: Synthetic oligonucleotide
aauuacaugaucacacaaa

SEQ ID NO: 1283262 - RNA, 19 nt, Artificial Sequence
  Description of Artificial Sequence: Synthetic oligonucleotide
ucaugaacuaugagagacc

SEQ ID NO: 1283263 - RNA, 19 nt, Artificial Sequence
  Description of Artificial Sequence: Synthetic oligonucleotide
aaaguuaacuagauggcaa

SEQ ID NO: 1283264 - RNA, 19 nt, Artificial Sequence
  Description of Artificial Sequence: Synthetic oligonucleotide
agcaaacguacagucaccc

SEQ ID NO: 1283265 - RNA, 19 nt, Artificial Sequence
  Description of Artificial Sequence: Synthetic oligonucleotide
aaucauagguagcuggaua

SEQ ID NO: 1283266 - RNA, 19 nt, Artificial Sequence
  Description of Artificial Sequence: Synthetic oligonucleotide
agaaauagauggcuucaug

SEQ ID NO: 1283267 - RNA, 19 nt, Artificial Sequence
  Description of Artificial Sequence: Synthetic oligonucleotide
ugcucugucagcuaauaau

SEQ ID NO: 1283268 - RNA, 19 nt, Artificial Sequence
  Description of Artificial Sequence: Synthetic oligonucleotide
caugaacuaugagagaccc

SEQ ID NO: 1283269 - RNA, 19 nt, Artificial Sequence
  Description of Artificial Sequence: Synthetic oligonucleotide
aguuaauggucacaacuga

SEQ ID NO: 1283270 - RNA, 19 nt, Artificial Sequence
  Description of Artificial Sequence: Synthetic oligonucleotide
gucagcuaauaauauauuc

SEQ ID NO: 1283271 - RNA, 19 nt, Artificial Sequence
  Description of Artificial Sequence: Synthetic oligonucleotide
agucccaagaauuaugguu

SEQ ID NO: 1283272 - RNA, 19 nt, Artificial Sequence
  Description of Artificial Sequence: Synthetic oligonucleotide
cuuuaaagccuccucauga

SEQ ID NO: 1283273 - RNA, 19 nt, Artificial Sequence
  Description of Artificial Sequence: Synthetic oligonucleotide
auuguaggcaugauacugg

SEQ ID NO: 1283274 - RNA, 19 nt, Artificial Sequence
  Description of Artificial Sequence: Synthetic oligonucleotide
aagccagguaaagagaaca

SEQ ID NO: 1283275 - RNA, 19 nt, Artificial Sequence
  Description of Artificial Sequence: Synthetic oligonucleotide
acuuuguauaguuauccaa

SEQ ID NO: 1283276 - RNA, 19 nt, Artificial Sequence
  Description of Artificial Sequence: Synthetic oligonucleotide
aaaucguggugccgagaac

SEQ ID NO: 1283277 - RNA, 19 nt, Artificial Sequence
  Description of Artificial Sequence: Synthetic oligonucleotide
gauaggaauguaguaacca

SEQ ID NO: 1283278 - RNA, 19 nt, Artificial Sequence
  Description of Artificial Sequence: Synthetic oligonucleotide
ugaucacacaaaagcacga

SEQ ID NO: 1283279 - RNA, 19 nt, Artificial Sequence
  Description of Artificial Sequence: Synthetic oligonucleotide
ugguuuauccuuuuguauu

SEQ ID NO: 1283280 - RNA, 19 nt, Artificial Sequence
  Description of Artificial Sequence: Synthetic oligonucleotide
aagaugucggcgcuuuugu

SEQ ID NO: 1283281 - RNA, 19 nt, Artificial Sequence
  Description of Artificial Sequence: Synthetic oligonucleotide
ggcaugaagugauaaauug

SEQ ID NO: 1283282 - RNA, 19 nt, Artificial Sequence
  Description of Artificial Sequence: Synthetic oligonucleotide
cauugaacacuugacacac

SEQ ID NO: 1283283 - RNA, 19 nt, Artificial Sequence
  Description of Artificial Sequence: Synthetic oligonucleotide
agaaaguuuugaacugacc

SEQ ID NO: 1283284 - RNA, 19 nt, Artificial Sequence
  Description of Artificial Sequence: Synthetic oligonucleotide
uucuagcaaacguacaguc

SEQ ID NO: 1283285 - RNA, 19 nt, Artificial Sequence
  Description of Artificial Sequence: Synthetic oligonucleotide
ugugguggaaaucguggug

SEQ ID NO: 1283286 - RNA, 19 nt, Artificial Sequence
  Description of Artificial Sequence: Synthetic oligonucleotide
ucugugcaggaaauagugc

SEQ ID NO: 1283287 - RNA, 19 nt, Artificial Sequence
  Description of Artificial Sequence: Synthetic oligonucleotide
aaguucaugugguggaaau

SEQ ID NO: 1283288 - RNA, 19 nt, Artificial Sequence
  Description of Artificial Sequence: Synthetic oligonucleotide
ugagucgauuuacaagaug

SEQ ID NO: 1283289 - RNA, 19 nt, Artificial Sequence
  Description of Artificial Sequence: Synthetic oligonucleotide
ugucuaaaguuaacuagau

SEQ ID NO: 1283290 - RNA, 19 nt, Artificial Sequence
  Description of Artificial Sequence: Synthetic oligonucleotide
cauuaauacuuccucugac

SEQ ID NO: 1283291 - RNA, 19 nt, Artificial Sequence
  Description of Artificial Sequence: Synthetic oligonucleotide
ucacgauauuuucauuucu

SEQ ID NO: 1283292 - RNA, 19 nt, Artificial Sequence
  Description of Artificial Sequence: Synthetic oligonucleotide
gaagaauuacaugaucaca

SEQ ID NO: 1283293 - RNA, 19 nt, Artificial Sequence
  Description of Artificial Sequence: Synthetic oligonucleotide
uuuaaagccuccucaugaa

SEQ ID NO: 1283294 - RNA, 19 nt, Artificial Sequence
  Description of Artificial Sequence: Synthetic oligonucleotide
aguuaacuagauggcaaac

SEQ ID NO: 1283295 - RNA, 19 nt, Artificial Sequence
  Description of Artificial Sequence: Synthetic oligonucleotide
uucacgauauuuucauuuc

SEQ ID NO: 1283296 - RNA, 19 nt, Artificial Sequence
  Description of Artificial Sequence: Synthetic oligonucleotide
caacauguagccccaggcg

SEQ ID NO: 1283297 - RNA, 19 nt, Artificial Sequence
  Description of Artificial Sequence: Synthetic oligonucleotide
agucgauuuacaagaugcc

SEQ ID NO: 1283298 - RNA, 19 nt, Artificial Sequence
  Description of Artificial Sequence: Synthetic oligonucleotide
augaagugauaaauuguac

SEQ ID NO: 1283299 - RNA, 19 nt, Artificial Sequence
  Description of Artificial Sequence: Synthetic oligonucleotide
ugagaaaguuuugaacuga

SEQ ID NO: 1283300 - RNA, 19 nt, Artificial Sequence
  Description of Artificial Sequence: Synthetic oligonucleotide
cuuaaaaggcaaugucaac

SEQ ID NO: 1283301 - RNA, 19 nt, Artificial Sequence
  Description of Artificial Sequence: Synthetic oligonucleotide
uuggcauucuuucccaauc

SEQ ID NO: 1283302 - RNA, 19 nt, Artificial Sequence
  Description of Artificial Sequence: Synthetic oligonucleotide
agacacaacuucauugaac

SEQ ID NO: 1283303 - RNA, 19 nt, Artificial Sequence
  Description of Artificial Sequence: Synthetic oligonucleotide
uuguauaguuauccaacau

SEQ ID NO: 1283304 - RNA, 19 nt, Artificial Sequence
  Description of Artificial Sequence: Synthetic oligonucleotide
aacggguugauaggaaugu

SEQ ID NO: 1283305 - RNA, 19 nt, Artificial Sequence
  Description of Artificial Sequence: Synthetic oligonucleotide
gaugcguaauucccaauga

SEQ ID NO: 1283306 - RNA, 19 nt, Artificial Sequence
  Description of Artificial Sequence: Synthetic oligonucleotide
caacugaaaaccagagaac

SEQ ID NO: 1283307 - RNA, 19 nt, Artificial Sequence
  Description of Artificial Sequence: Synthetic oligonucleotide
auauucugcuucgauuccg

SEQ ID NO: 1283308 - RNA, 19 nt, Artificial Sequence
  Description of Artificial Sequence: Synthetic oligonucleotide
augucuaaaguuaacuaga

SEQ ID NO: 1283309 - RNA, 19 nt, Artificial Sequence
  Description of Artificial Sequence: Synthetic oligonucleotide
acaugaucacacaaaagca

SEQ ID NO: 1283310 - RNA, 19 nt, Artificial Sequence
  Description of Artificial Sequence: Synthetic oligonucleotide
acuaagaauccuucacaga

SEQ ID NO: 1283311 - RNA, 19 nt, Artificial Sequence
  Description of Artificial Sequence: Synthetic oligonucleotide
ucucauuguaggcaugaua

SEQ ID NO: 1283312 - RNA, 19 nt, Artificial Sequence
  Description of Artificial Sequence: Synthetic oligonucleotide
gaaaucguggugccgagaa

SEQ ID NO: 1283313 - RNA, 19 nt, Artificial Sequence
  Description of Artificial Sequence: Synthetic oligonucleotide
uuaaagccuccucaugaaa

SEQ ID NO: 1283314 - RNA, 19 nt, Artificial Sequence
  Description of Artificial Sequence: Synthetic oligonucleotide
agauggcaaacauuauugu

SEQ ID NO: 1283315 - RNA, 19 nt, Artificial Sequence
  Description of Artificial Sequence: Synthetic oligonucleotide
gaaauagugccaggugucc

SEQ ID NO: 1283316 - RNA, 19 nt, Artificial Sequence
  Description of Artificial Sequence: Synthetic oligonucleotide
ugcauauucugcuucgauu

SEQ ID NO: 1283317 - RNA, 19 nt, Artificial Sequence
  Description of Artificial Sequence: Synthetic oligonucleotide
augcccaaagaagaauuac

SEQ ID NO: 1283318 - RNA, 19 nt, Artificial Sequence
  Description of Artificial Sequence: Synthetic oligonucleotide
uuucuagcaaacguacagu

SEQ ID NO: 1283319 - RNA, 19 nt, Artificial Sequence
  Description of Artificial Sequence: Synthetic oligonucleotide
gauugacagcauaaaugag

SEQ ID NO: 1283320 - RNA, 19 nt, Artificial Sequence
  Description of Artificial Sequence: Synthetic oligonucleotide
gggauugacagcauaaaug

SEQ ID NO: 1283321 - RNA, 19 nt, Artificial Sequence
  Description of Artificial Sequence: Synthetic oligonucleotide
agaacccguauaaaagggg

SEQ ID NO: 1283322 - RNA, 19 nt, Artificial Sequence
  Description of Artificial Sequence: Synthetic oligonucleotide
ucccaccaugugaaggugg

SEQ ID NO: 1283323 - RNA, 19 nt, Artificial Sequence
  Description of Artificial Sequence: Synthetic oligonucleotide
ggggaugaaguucaacggg

SEQ ID NO: 1283324 - RNA, 19 nt, Artificial Sequence
  Description of Artificial Sequence: Synthetic oligonucleotide
uuucugguuuauccuuuug

SEQ ID NO: 1283325 - RNA, 19 nt, Artificial Sequence
  Description of Artificial Sequence: Synthetic oligonucleotide
gucugugcaggaaauagug

SEQ ID NO: 1283326 - RNA, 19 nt, Artificial Sequence
  Description of Artificial Sequence: Synthetic oligonucleotide
uggcauucuuucccaauca

SEQ ID NO: 1283327 - RNA, 19 nt, Artificial Sequence
  Description of Artificial Sequence: Synthetic oligonucleotide
aauucacgauauuuucauu

SEQ ID NO: 1283328 - RNA, 19 nt, Artificial Sequence
  Description of Artificial Sequence: Synthetic oligonucleotide
aaacguacagucacccaug

SEQ ID NO: 1283329 - RNA, 19 nt, Artificial Sequence
  Description of Artificial Sequence: Synthetic oligonucleotide
ucgaugguuucuagcaaac

SEQ ID NO: 1283330 - RNA, 19 nt, Artificial Sequence
  Description of Artificial Sequence: Synthetic oligonucleotide
aaacacuuccauuggccuu

SEQ ID NO: 1283331 - RNA, 19 nt, Artificial Sequence
  Description of Artificial Sequence: Synthetic oligonucleotide
cauuacguaagaaaugagu

SEQ ID NO: 1283332 - RNA, 19 nt, Artificial Sequence
  Description of Artificial Sequence: Synthetic oligonucleotide
aaagcacgauuccaaugaa

SEQ ID NO: 1283333 - RNA, 19 nt, Artificial Sequence
  Description of Artificial Sequence: Synthetic oligonucleotide
ugguggauuuuaugaaugu

SEQ ID NO: 1283334 - RNA, 19 nt, Artificial Sequence
  Description of Artificial Sequence: Synthetic oligonucleotide
aagugauaaauuguacauu

SEQ ID NO: 1283335 - RNA, 19 nt, Artificial Sequence
  Description of Artificial Sequence: Synthetic oligonucleotide
gguaaagagaacaagaaau

SEQ ID NO: 1283336 - RNA, 19 nt, Artificial Sequence
  Description of Artificial Sequence: Synthetic oligonucleotide
ugagcaauauggccuuuaa

SEQ ID NO: 1283337 - RNA, 19 nt, Artificial Sequence
  Description of Artificial Sequence: Synthetic oligonucleotide
augucggcgcuuuuguuug

SEQ ID NO: 1283338 - RNA, 19 nt, Artificial Sequence
  Description of Artificial Sequence: Synthetic oligonucleotide
ucaacggguugauaggaau

SEQ ID NO: 1283339 - RNA, 19 nt, Artificial Sequence
  Description of Artificial Sequence: Synthetic oligonucleotide
uauccaacauguagcccca

SEQ ID NO: 1283340 - RNA, 19 nt, Artificial Sequence
  Description of Artificial Sequence: Synthetic oligonucleotide
augaaguucaacggguuga

SEQ ID NO: 1283341 - RNA, 19 nt, Artificial Sequence
  Description of Artificial Sequence: Synthetic oligonucleotide
guaaaauaguaaguuccac

SEQ ID NO: 1283342 - RNA, 19 nt, Artificial Sequence
  Description of Artificial Sequence: Synthetic oligonucleotide
ugccaaaaucauaaaccau

SEQ ID NO: 1283343 - RNA, 19 nt, Artificial Sequence
  Description of Artificial Sequence: Synthetic oligonucleotide
ucauuguaggcaugauacu

SEQ ID NO: 1283344 - RNA, 19 nt, Artificial Sequence
  Description of Artificial Sequence: Synthetic oligonucleotide
guuaacuagauggcaaaca

SEQ ID NO: 1283345 - RNA, 19 nt, Artificial Sequence
  Description of Artificial Sequence: Synthetic oligonucleotide
guugcgaucuggaacuuug

SEQ ID NO: 1283346 - RNA, 19 nt, Artificial Sequence
  Description of Artificial Sequence: Synthetic oligonucleotide
ggaugcguaauucccaaug

SEQ ID NO: 1283347 - RNA, 19 nt, Artificial Sequence
  Description of Artificial Sequence: Synthetic oligonucleotide
uguaggcaugauacugggc

SEQ ID NO: 1283348 - RNA, 19 nt, Artificial Sequence
  Description of Artificial Sequence: Synthetic oligonucleotide
uggguuucagucacuugcu

SEQ ID NO: 1283349 - RNA, 19 nt, Artificial Sequence
  Description of Artificial Sequence: Synthetic oligonucleotide
auaaauccucuugugguga

SEQ ID NO: 1283350 - RNA, 19 nt, Artificial Sequence
  Description of Artificial Sequence: Synthetic oligonucleotide
aaaucauagguagcuggau

SEQ ID NO: 1283351 - RNA, 19 nt, Artificial Sequence
  Description of Artificial Sequence: Synthetic oligonucleotide
aaccacuauggacaucgau

SEQ ID NO: 1283352 - RNA, 19 nt, Artificial Sequence
  Description of Artificial Sequence: Synthetic oligonucleotide
uugaacugaccaguguaug

SEQ ID NO: 1283353 - RNA, 19 nt, Artificial Sequence
  Description of Artificial Sequence: Synthetic oligonucleotide
aucgaugguuucuagcaaa

SEQ ID NO: 1283354 - RNA, 19 nt, Artificial Sequence
  Description of Artificial Sequence: Synthetic oligonucleotide
caaaucauagguagcugga

SEQ ID NO: 1283355 - RNA, 19 nt, Artificial Sequence
  Description of Artificial Sequence: Synthetic oligonucleotide
gagaaaguuuugaacugac

SEQ ID NO: 1283356 - RNA, 19 nt, Artificial Sequence
  Description of Artificial Sequence: Synthetic oligonucleotide
uagcaaacguacagucacc

SEQ ID NO: 1283357 - RNA, 19 nt, Artificial Sequence
  Description of Artificial Sequence: Synthetic oligonucleotide
caacggguugauaggaaug

SEQ ID NO: 1283358 - RNA, 19 nt, Artificial Sequence
  Description of Artificial Sequence: Synthetic oligonucleotide
agggauugacagcauaaau

SEQ ID NO: 1283359 - RNA, 19 nt, Artificial Sequence
  Description of Artificial Sequence: Synthetic oligonucleotide
gucauaaaccggucagccc

SEQ ID NO: 1283360 - RNA, 19 nt, Artificial Sequence
  Description of Artificial Sequence: Synthetic oligonucleotide
gaacccguauaaaagggga

SEQ ID NO: 1283361 - RNA, 19 nt, Artificial Sequence
  Description of Artificial Sequence: Synthetic oligonucleotide
ugucagcuaauaauauauu

SEQ ID NO: 1283362 - RNA, 19 nt, Artificial Sequence
  Description of Artificial Sequence: Synthetic oligonucleotide
gaauauugaaauacucugu

SEQ ID NO: 1283363 - RNA, 19 nt, Artificial Sequence
  Description of Artificial Sequence: Synthetic oligonucleotide
uggcaugaagugauaaauu

SEQ ID NO: 1283364 - RNA, 19 nt, Artificial Sequence
  Description of Artificial Sequence: Synthetic oligonucleotide
uagucauaaaccggucagc

SEQ ID NO: 1283365 - RNA, 19 nt, Artificial Sequence
  Description of Artificial Sequence: Synthetic oligonucleotide
augguggauuuuaugaaug

SEQ ID NO: 1283366 - RNA, 19 nt, Artificial Sequence
  Description of Artificial Sequence: Synthetic oligonucleotide
ugccgagcugaagaugucg

SEQ ID NO: 1283367 - RNA, 19 nt, Artificial Sequence
  Description of Artificial Sequence: Synthetic oligonucleotide
ugaacacuugacacacaaa

SEQ ID NO: 1283368 - RNA, 19 nt, Artificial Sequence
  Description of Artificial Sequence: Synthetic oligonucleotide
cuuaaauggcuccugcaaa

SEQ ID NO: 1283369 - RNA, 19 nt, Artificial Sequence
  Description of Artificial Sequence: Synthetic oligonucleotide
cagauugaagucaguucac

SEQ ID NO: 1283370 - RNA, 19 nt, Artificial Sequence
  Description of Artificial Sequence: Synthetic oligonucleotide
uucugcuucgauuccgaau

SEQ ID NO: 1283371 - RNA, 19 nt, Artificial Sequence
  Description of Artificial Sequence: Synthetic oligonucleotide
aauggagccugaaacucau

SEQ ID NO: 1283372 - RNA, 19 nt, Artificial Sequence
  Description of Artificial Sequence: Synthetic oligonucleotide
cugucagcuaauaauauau

SEQ ID NO: 1283373 - RNA, 19 nt, Artificial Sequence
  Description of Artificial Sequence: Synthetic oligonucleotide
uucaacggguugauaggaa

SEQ ID NO: 1283374 - RNA, 19 nt, Artificial Sequence
  Description of Artificial Sequence: Synthetic oligonucleotide
auaaaccaucuuggcauuc

SEQ ID NO: 1283375 - RNA, 19 nt, Artificial Sequence
  Description of Artificial Sequence: Synthetic oligonucleotide
guacauuaauacuuccucu

SEQ ID NO: 1283376 - RNA, 19 nt, Artificial Sequence
  Description of Artificial Sequence: Synthetic oligonucleotide
ccgagaacccguauaaaag

SEQ ID NO: 1283377 - RNA, 19 nt, Artificial Sequence
  Description of Artificial Sequence: Synthetic oligonucleotide
caccaugugaagguggaug

SEQ ID NO: 1283378 - RNA, 19 nt, Artificial Sequence
  Description of Artificial Sequence: Synthetic oligonucleotide
cgagaacccguauaaaagg

SEQ ID NO: 1283379 - RNA, 19 nt, Artificial Sequence
  Description of Artificial Sequence: Synthetic oligonucleotide
uggcaguuaauggucacaa

SEQ ID NO: 1283380 - RNA, 19 nt, Artificial Sequence
  Description of Artificial Sequence: Synthetic oligonucleotide
acccguauaaaaggggaug

SEQ ID NO: 1283381 - RNA, 19 nt, Artificial Sequence
  Description of Artificial Sequence: Synthetic oligonucleotide
agauugaagucaguucaca

SEQ ID NO: 1283382 - RNA, 19 nt, Artificial Sequence
  Description of Artificial Sequence: Synthetic oligonucleotide
gucgauuuacaagaugcca

SEQ ID NO: 1283383 - RNA, 19 nt, Artificial Sequence
  Description of Artificial Sequence: Synthetic oligonucleotide
ucggcgcuuuuguuugugg

SEQ ID NO: 1283384 - RNA, 19 nt, Artificial Sequence
  Description of Artificial Sequence: Synthetic oligonucleotide
aaagcucaagacacaacuu

SEQ ID NO: 1283385 - RNA, 19 nt, Artificial Sequence
  Description of Artificial Sequence: Synthetic oligonucleotide
aguuuugaacugaccagug

SEQ ID NO: 1283386 - RNA, 19 nt, Artificial Sequence
  Description of Artificial Sequence: Synthetic oligonucleotide
augaacuaugagagacccc

SEQ ID NO: 1283387 - RNA, 19 nt, Artificial Sequence
  Description of Artificial Sequence: Synthetic oligonucleotide
uggaaaucguggugccgag

SEQ ID NO: 1283388 - RNA, 19 nt, Artificial Sequence
  Description of Artificial Sequence: Synthetic oligonucleotide
cuuuaaugauuucugugcu

SEQ ID NO: 1283389 - RNA, 19 nt, Artificial Sequence
  Description of Artificial Sequence: Synthetic oligonucleotide
uaggcaugauacugggcgu

SEQ ID NO: 1283390 - RNA, 19 nt, Artificial Sequence
  Description of Artificial Sequence: Synthetic oligonucleotide
acauuacguaagaaaugag

SEQ ID NO: 1283391 - RNA, 19 nt, Artificial Sequence
  Description of Artificial Sequence: Synthetic oligonucleotide
ugucaacuucagccucagg

SEQ ID NO: 1283392 - RNA, 19 nt, Artificial Sequence
  Description of Artificial Sequence: Synthetic oligonucleotide
gaugccgagcugaagaugu

SEQ ID NO: 1283393 - RNA, 19 nt, Artificial Sequence
  Description of Artificial Sequence: Synthetic oligonucleotide
aucguggugccgagaaccc

SEQ ID NO: 1283394 - RNA, 19 nt, Artificial Sequence
  Description of Artificial Sequence: Synthetic oligonucleotide
cucaugaaagguauaaauu

SEQ ID NO: 1283395 - RNA, 19 nt, Artificial Sequence
  Description of Artificial Sequence: Synthetic oligonucleotide
uaaauccucuuguggugaa

SEQ ID NO: 1283396 - RNA, 19 nt, Artificial Sequence
  Description of Artificial Sequence: Synthetic oligonucleotide
gaauagucauaaaccgguc

SEQ ID NO: 1283397 - RNA, 19 nt, Artificial Sequence
  Description of Artificial Sequence: Synthetic oligonucleotide
uaguaaccacuauggacau

SEQ ID NO: 1283398 - RNA, 19 nt, Artificial Sequence
  Description of Artificial Sequence: Synthetic oligonucleotide
ugaaguucaacggguugau

SEQ ID NO: 1283399 - RNA, 19 nt, Artificial Sequence
  Description of Artificial Sequence: Synthetic oligonucleotide
ggcgcuuuuguuuguggcc

SEQ ID NO: 1283400 - RNA, 19 nt, Artificial Sequence
  Description of Artificial Sequence: Synthetic oligonucleotide
cacaaaucauagguagcug

SEQ ID NO: 1283401 - RNA, 19 nt, Artificial Sequence
  Description of Artificial Sequence: Synthetic oligonucleotide
auggcuucaugaacuauga

SEQ ID NO: 1283402 - RNA, 19 nt, Artificial Sequence
  Description of Artificial Sequence: Synthetic oligonucleotide
ugaugccgagcugaagaug

SEQ ID NO: 1283403 - RNA, 19 nt, Artificial Sequence
  Description of Artificial Sequence: Synthetic oligonucleotide
aguguaugcaaaaggcuua

SEQ ID NO: 1283404 - RNA, 19 nt, Artificial Sequence
  Description of Artificial Sequence: Synthetic oligonucleotide
ugaaguucaugugguggaa

SEQ ID NO: 1283405 - RNA, 19 nt, Artificial Sequence
  Description of Artificial Sequence: Synthetic oligonucleotide
ucccaagaauuaugguuuc

SEQ ID NO: 1283406 - RNA, 19 nt, Artificial Sequence
  Description of Artificial Sequence: Synthetic oligonucleotide
caccuggaaccuuuuggug

SEQ ID NO: 1283407 - RNA, 19 nt, Artificial Sequence
  Description of Artificial Sequence: Synthetic oligonucleotide
cccaaagaagaauuacaug

SEQ ID NO: 1283408 - RNA, 19 nt, Artificial Sequence
  Description of Artificial Sequence: Synthetic oligonucleotide
aggcguucuuaaauggcuc

SEQ ID NO: 1283409 - RNA, 19 nt, Artificial Sequence
  Description of Artificial Sequence: Synthetic oligonucleotide
agcuaauaauauauucaau

SEQ ID NO: 1283410 - RNA, 19 nt, Artificial Sequence
  Description of Artificial Sequence: Synthetic oligonucleotide
gaugucggcgcuuuuguuu

SEQ ID NO: 1283411 - RNA, 19 nt, Artificial Sequence
  Description of Artificial Sequence: Synthetic oligonucleotide
cagguugcgaucuggaacu

SEQ ID NO: 1283412 - RNA, 19 nt, Artificial Sequence
  Description of Artificial Sequence: Synthetic oligonucleotide
cugggcgucugucccaaag

SEQ ID NO: 1283413 - RNA, 19 nt, Artificial Sequence
  Description of Artificial Sequence: Synthetic oligonucleotide
guucaacggguugauagga

SEQ ID NO: 1283414 - RNA, 19 nt, Artificial Sequence
  Description of Artificial Sequence: Synthetic oligonucleotide
gcuucgauuccgaauggag

SEQ ID NO: 1283415 - RNA, 19 nt, Artificial Sequence
  Description of Artificial Sequence: Synthetic oligonucleotide
aacccguauaaaaggggau

SEQ ID NO: 1283416 - RNA, 19 nt, Artificial Sequence
  Description of Artificial Sequence: Synthetic oligonucleotide
aagcacgauuccaaugaaa

SEQ ID NO: 1283417 - RNA, 19 nt, Artificial Sequence
  Description of Artificial Sequence: Synthetic oligonucleotide
ggaaauagugccagguguc

SEQ ID NO: 1283418 - RNA, 19 nt, Artificial Sequence
  Description of Artificial Sequence: Synthetic oligonucleotide
ucguggugccgagaacccg

SEQ ID NO: 1283419 - RNA, 19 nt, Artificial Sequence
  Description of Artificial Sequence: Synthetic oligonucleotide
acggccagugaugccgagc

SEQ ID NO: 1283420 - RNA, 19 nt, Artificial Sequence
  Description of Artificial Sequence: Synthetic oligonucleotide
ucgauuccgaauggagccu

SEQ ID NO: 1283421 - RNA, 19 nt, Artificial Sequence
  Description of Artificial Sequence: Synthetic oligonucleotide
agauggcaguuaaugguca

SEQ ID NO: 1283422 - RNA, 19 nt, Artificial Sequence
  Description of Artificial Sequence: Synthetic oligonucleotide
guacagucacccaugccca

SEQ ID NO: 1283423 - RNA, 19 nt, Artificial Sequence
  Description of Artificial Sequence: Synthetic oligonucleotide
uaaccacuauggacaucga

SEQ ID NO: 1283424 - RNA, 19 nt, Artificial Sequence
  Description of Artificial Sequence: Synthetic oligonucleotide
gguugauaggaauguagua

SEQ ID NO: 1283425 - RNA, 19 nt, Artificial Sequence
  Description of Artificial Sequence: Synthetic oligonucleotide
ccaaagauucugucccacc

SEQ ID NO: 1283426 - RNA, 19 nt, Artificial Sequence
  Description of Artificial Sequence: Synthetic oligonucleotide
guuuugaacugaccagugu

SEQ ID NO: 1283427 - RNA, 19 nt, Artificial Sequence
  Description of Artificial Sequence: Synthetic oligonucleotide
caguguaugcaaaaggcuu

SEQ ID NO: 1283428 - RNA, 19 nt, Artificial Sequence
  Description of Artificial Sequence: Synthetic oligonucleotide
cccaggcguucuuaaaugg

SEQ ID NO: 1283429 - RNA, 19 nt, Artificial Sequence
  Description of Artificial Sequence: Synthetic oligonucleotide
uaaaccggucagccccaga

SEQ ID NO: 1283430 - RNA, 19 nt, Artificial Sequence
  Description of Artificial Sequence: Synthetic oligonucleotide
guggaugcguaauucccaa

SEQ ID NO: 1283431 - RNA, 19 nt, Artificial Sequence
  Description of Artificial Sequence: Synthetic oligonucleotide
gagggauugacagcauaaa

SEQ ID NO: 1283432 - RNA, 19 nt, Artificial Sequence
  Description of Artificial Sequence: Synthetic oligonucleotide
gaaguucaugugguggaaa

SEQ ID NO: 1283433 - RNA, 19 nt, Artificial Sequence
  Description of Artificial Sequence: Synthetic oligonucleotide
ggaacuuuguauaguuauc

SEQ ID NO: 1283434 - RNA, 19 nt, Artificial Sequence
  Description of Artificial Sequence: Synthetic oligonucleotide
auagguagcuggauacaaa

SEQ ID NO: 1283435 - RNA, 19 nt, Artificial Sequence
  Description of Artificial Sequence: Synthetic oligonucleotide
auacugggcgucuguccca

SEQ ID NO: 1283436 - RNA, 19 nt, Artificial Sequence
  Description of Artificial Sequence: Synthetic oligonucleotide
cauaaaccggucagcccca

SEQ ID NO: 1283437 - RNA, 19 nt, Artificial Sequence
  Description of Artificial Sequence: Synthetic oligonucleotide
gggguauucauucagucuu

SEQ ID NO: 1283438 - RNA, 19 nt, Artificial Sequence
  Description of Artificial Sequence: Synthetic oligonucleotide
ucccaaucauaaggaauau

SEQ ID NO: 1283439 - RNA, 19 nt, Artificial Sequence
  Description of Artificial Sequence: Synthetic oligonucleotide
auagugccagguguccuca

SEQ ID NO: 1283440 - RNA, 19 nt, Artificial Sequence
  Description of Artificial Sequence: Synthetic oligonucleotide
cggguugauaggaauguag

SEQ ID NO: 1283441 - RNA, 19 nt, Artificial Sequence
  Description of Artificial Sequence: Synthetic oligonucleotide
ggaaccuuuuggugaggug

SEQ ID NO: 1283442 - RNA, 19 nt, Artificial Sequence
  Description of Artificial Sequence: Synthetic oligonucleotide
gccgagaacccguauaaaa

SEQ ID NO: 1283443 - RNA, 19 nt, Artificial Sequence
  Description of Artificial Sequence: Synthetic oligonucleotide
caggcguucuuaaauggcu

SEQ ID NO: 1283444 - RNA, 19 nt, Artificial Sequence
  Description of Artificial Sequence: Synthetic oligonucleotide
ccuuuaaagccuccucaug

SEQ ID NO: 1283445 - RNA, 19 nt, Artificial Sequence
  Description of Artificial Sequence: Synthetic oligonucleotide
gguggaaaucguggugccg

SEQ ID NO: 1283446 - RNA, 19 nt, Artificial Sequence
  Description of Artificial Sequence: Synthetic oligonucleotide
acuagauggcaaacauuau

SEQ ID NO: 1283447 - RNA, 19 nt, Artificial Sequence
  Description of Artificial Sequence: Synthetic oligonucleotide
gccgagcugaagaugucgg

SEQ ID NO: 1283448 - RNA, 19 nt, Artificial Sequence
  Description of Artificial Sequence: Synthetic oligonucleotide
caucgaugguuucuagcaa

SEQ ID NO: 1283449 - RNA, 19 nt, Artificial Sequence
  Description of Artificial Sequence: Synthetic oligonucleotide
agaugucggcgcuuuuguu

SEQ ID NO: 1283450 - RNA, 19 nt, Artificial Sequence
  Description of Artificial Sequence: Synthetic oligonucleotide
gguggaugcguaauuccca

SEQ ID NO: 1283451 - RNA, 19 nt, Artificial Sequence
  Description of Artificial Sequence: Synthetic oligonucleotide
auaaaccggucagccccag

SEQ ID NO: 1283452 - RNA, 19 nt, Artificial Sequence
  Description of Artificial Sequence: Synthetic oligonucleotide
aggagucugugcaggaaau

SEQ ID NO: 1283453 - RNA, 19 nt, Artificial Sequence
  Description of Artificial Sequence: Synthetic oligonucleotide
cauguagccccaggcguuc

SEQ ID NO: 1283454 - RNA, 19 nt, Artificial Sequence
  Description of Artificial Sequence: Synthetic oligonucleotide
auugaacacuugacacaca

SEQ ID NO: 1283455 - RNA, 19 nt, Artificial Sequence
  Description of Artificial Sequence: Synthetic oligonucleotide
augagucgauuuacaagau

SEQ ID NO: 1283456 - RNA, 19 nt, Artificial Sequence
  Description of Artificial Sequence: Synthetic oligonucleotide
ggcaguuaauggucacaac

SEQ ID NO: 1283457 - RNA, 19 nt, Artificial Sequence
  Description of Artificial Sequence: Synthetic oligonucleotide
caugugaagguggaugcgu

SEQ ID NO: 1283458 - RNA, 19 nt, Artificial Sequence
  Description of Artificial Sequence: Synthetic oligonucleotide
gauuccgaauggagccuga

SEQ ID NO: 1283459 - RNA, 19 nt, Artificial Sequence
  Description of Artificial Sequence: Synthetic oligonucleotide
cgaucuggaacuuuguaua

SEQ ID NO: 1283460 - RNA, 19 nt, Artificial Sequence
  Description of Artificial Sequence: Synthetic oligonucleotide
gguggauuuuaugaaugua

SEQ ID NO: 1283461 - RNA, 19 nt, Artificial Sequence
  Description of Artificial Sequence: Synthetic oligonucleotide
acguaagaaaugagucgau

SEQ ID NO: 1283462 - RNA, 19 nt, Artificial Sequence
  Description of Artificial Sequence: Synthetic oligonucleotide
ccccaggcguucuuaaaug

SEQ ID NO: 1283463 - RNA, 19 nt, Artificial Sequence
  Description of Artificial Sequence: Synthetic oligonucleotide
ugccgagaacccguauaaa

SEQ ID NO: 1283464 - RNA, 19 nt, Artificial Sequence
  Description of Artificial Sequence: Synthetic oligonucleotide
gcgaucuggaacuuuguau

SEQ ID NO: 1283465 - RNA, 19 nt, Artificial Sequence
  Description of Artificial Sequence: Synthetic oligonucleotide
gcaaacguacagucaccca

SEQ ID NO: 1283466 - RNA, 19 nt, Artificial Sequence
  Description of Artificial Sequence: Synthetic oligonucleotide
ugucggcgcuuuuguuugu

SEQ ID NO: 1283467 - RNA, 19 nt, Artificial Sequence
  Description of Artificial Sequence: Synthetic oligonucleotide
caugauacugggcgucugu

SEQ ID NO: 1283468 - RNA, 19 nt, Artificial Sequence
  Description of Artificial Sequence: Synthetic oligonucleotide
auuccgaauggagccugaa

SEQ ID NO: 1283469 - RNA, 19 nt, Artificial Sequence
  Description of Artificial Sequence: Synthetic oligonucleotide
ccgagcugaagaugucggc

SEQ ID NO: 1283470 - RNA, 19 nt, Artificial Sequence
  Description of Artificial Sequence: Synthetic oligonucleotide
gaaguucaacggguugaua

SEQ ID NO: 1283471 - RNA, 19 nt, Artificial Sequence
  Description of Artificial Sequence: Synthetic oligonucleotide
ccaugugaagguggaugcg

SEQ ID NO: 1283472 - RNA, 19 nt, Artificial Sequence
  Description of Artificial Sequence: Synthetic oligonucleotide
gggaugaaguucaacgggu

SEQ ID NO: 1283473 - RNA, 19 nt, Artificial Sequence
  Description of Artificial Sequence: Synthetic oligonucleotide
gcgcuuuuguuuguggcca

SEQ ID NO: 1283474 - RNA, 19 nt, Artificial Sequence
  Description of Artificial Sequence: Synthetic oligonucleotide
ccucuuguggugaaggagu

SEQ ID NO: 1283475 - RNA, 19 nt, Artificial Sequence
  Description of Artificial Sequence: Synthetic oligonucleotide
gugcauauucugcuucgau

SEQ ID NO: 1283476 - RNA, 19 nt, Artificial Sequence
  Description of Artificial Sequence: Synthetic oligonucleotide
agccccaggcguucuuaaa

SEQ ID NO: 1283477 - RNA, 19 nt, Artificial Sequence
  Description of Artificial Sequence: Synthetic oligonucleotide
gucaguucacaaagcucaa

SEQ ID NO: 1283478 - RNA, 19 nt, Artificial Sequence
  Description of Artificial Sequence: Synthetic oligonucleotide
gugcagauugaagucaguu

SEQ ID NO: 1283479 - RNA, 19 nt, Artificial Sequence
  Description of Artificial Sequence: Synthetic oligonucleotide
cccguauaaaaggggauga

SEQ ID NO: 1283480 - RNA, 19 nt, Artificial Sequence
  Description of Artificial Sequence: Synthetic oligonucleotide
gcccaaagaagaauuacau

SEQ ID NO: 1283481 - RNA, 19 nt, Artificial Sequence
  Description of Artificial Sequence: Synthetic oligonucleotide
acggguugauaggaaugua

SEQ ID NO: 1283482 - RNA, 19 nt, Artificial Sequence
  Description of Artificial Sequence: Synthetic oligonucleotide
agaugccaauaaaguuacu

SEQ ID NO: 1283483 - RNA, 19 nt, Artificial Sequence
  Description of Artificial Sequence: Synthetic oligonucleotide
auggagccugaaacucaug

SEQ ID NO: 1283484 - RNA, 19 nt, Artificial Sequence
  Description of Artificial Sequence: Synthetic oligonucleotide
gaguggguuucagucacuu

SEQ ID NO: 1283485 - RNA, 19 nt, Artificial Sequence
  Description of Artificial Sequence: Synthetic oligonucleotide
gcaugauacugggcgucug

SEQ ID NO: 1283486 - RNA, 19 nt, Artificial Sequence
  Description of Artificial Sequence: Synthetic oligonucleotide
ccgaauggagccugaaacu

SEQ ID NO: 1283487 - RNA, 19 nt, Artificial Sequence
  Description of Artificial Sequence: Synthetic oligonucleotide
auguagccccaggcguucu

SEQ ID NO: 1283488 - RNA, 19 nt, Artificial Sequence
  Description of Artificial Sequence: Synthetic oligonucleotide
gucagccccagaccagagu

SEQ ID NO: 1283489 - RNA, 19 nt, Artificial Sequence
  Description of Artificial Sequence: Synthetic oligonucleotide
ggaugugcauauucugcuu

SEQ ID NO: 1283490 - RNA, 19 nt, Artificial Sequence
  Description of Artificial Sequence: Synthetic oligonucleotide
cacuauggacaucgauggu

SEQ ID NO: 1283491 - RNA, 19 nt, Artificial Sequence
  Description of Artificial Sequence: Synthetic oligonucleotide
ccggucagccccagaccag

SEQ ID NO: 1283492 - RNA, 19 nt, Artificial Sequence
  Description of Artificial Sequence: Synthetic oligonucleotide
gccccaggcguucuuaaau

SEQ ID NO: 1283493 - RNA, 19 nt, Artificial Sequence
  Description of Artificial Sequence: Synthetic oligonucleotide
cgauuccgaauggagccug

SEQ ID NO: 1283494 - RNA, 19 nt, Artificial Sequence
  Description of Artificial Sequence: Synthetic oligonucleotide
gcucaagacacaacuucau

SEQ ID NO: 1283495 - RNA, 19 nt, Artificial Sequence
  Description of Artificial Sequence: Synthetic oligonucleotide
gguauucauucagucuuuu

SEQ ID NO: 1283496 - RNA, 19 nt, Artificial Sequence
  Description of Artificial Sequence: Synthetic oligonucleotide
agguugcgaucuggaacuu

SEQ ID NO: 1283497 - RNA, 19 nt, Artificial Sequence
  Description of Artificial Sequence: Synthetic oligonucleotide
cccagguugcgaucuggaa

SEQ ID NO: 1283498 - RNA, 19 nt, Artificial Sequence
  Description of Artificial Sequence: Synthetic oligonucleotide
ccccagguugcgaucugga

SEQ ID NO: 1283499 - RNA, 19 nt, Artificial Sequence
  Description of Artificial Sequence: Synthetic oligonucleotide
ggugcagauugaagucagu

SEQ ID NO: 1283500 - RNA, 19 nt, Artificial Sequence
  Description of Artificial Sequence: Synthetic oligonucleotide
ggguauucauucagucuuu

SEQ ID NO: 1283501 - RNA, 19 nt, Artificial Sequence
  Description of Artificial Sequence: Synthetic oligonucleotide
cguggugccgagaacccgu

SEQ ID NO: 1283502 - RNA, 19 nt, Artificial Sequence
  Description of Artificial Sequence: Synthetic oligonucleotide
cguaagaaaugagucgauu

SEQ ID NO: 1283503 - RNA, 19 nt, Artificial Sequence
  Description of Artificial Sequence: Synthetic oligonucleotide
gguugcgaucuggaacuuu

SEQ ID NO: 1283504 - RNA, 19 nt, Artificial Sequence
  Description of Artificial Sequence: Synthetic oligonucleotide
gcugaagaugucggcgcuu

SEQ ID NO: 1283505 - RNA, 19 nt, Artificial Sequence
  Description of Artificial Sequence: Synthetic oligonucleotide
cccaaucauaaggaauauu

SEQ ID NO: 1283506 - RNA, 19 nt, Artificial Sequence
  Description of Artificial Sequence: Synthetic oligonucleotide
auuacgguaguuuuggagc

SEQ ID NO: 1283507 - RNA, 19 nt, Artificial Sequence
  Description of Artificial Sequence: Synthetic oligonucleotide
aauuaggagacacugguag

SEQ ID NO: 1283508 - RNA, 19 nt, Artificial Sequence
  Description of Artificial Sequence: Synthetic oligonucleotide
auguuuauauuuuggaugc

SEQ ID NO: 1283509 - RNA, 19 nt, Artificial Sequence
  Description of Artificial Sequence: Synthetic oligonucleotide
aacaaggucuuguugaggg

SEQ ID NO: 1283510 - RNA, 19 nt, Artificial Sequence
  Description of Artificial Sequence: Synthetic oligonucleotide
aguaucuuuagugagaaac

SEQ ID NO: 1283511 - RNA, 19 nt, Artificial Sequence
  Description of Artificial Sequence: Synthetic oligonucleotide
uuuagugagaaacauaauc

SEQ ID NO: 1283512 - RNA, 19 nt, Artificial Sequence
  Description of Artificial Sequence: Synthetic oligonucleotide
aacaaugaggcacuggauc

SEQ ID NO: 1283513 - RNA, 19 nt, Artificial Sequence
  Description of Artificial Sequence: Synthetic oligonucleotide
uauagggucacacaggaga

SEQ ID NO: 1283514 - RNA, 19 nt, Artificial Sequence
  Description of Artificial Sequence: Synthetic oligonucleotide
caucuagcaguuuagagcg

SEQ ID NO: 1283515 - RNA, 19 nt, Artificial Sequence
  Description of Artificial Sequence: Synthetic oligonucleotide
ugaucugacaccaagagua

SEQ ID NO: 1283516 - RNA, 19 nt, Artificial Sequence
  Description of Artificial Sequence: Synthetic oligonucleotide
aaucacuccgccucaaaac

SEQ ID NO: 1283517 - RNA, 19 nt, Artificial Sequence
  Description of Artificial Sequence: Synthetic oligonucleotide
aauuacgguaguuuuggag

SEQ ID NO: 1283518 - RNA, 19 nt, Artificial Sequence
  Description of Artificial Sequence: Synthetic oligonucleotide
uaaggagaaaggcauagcc

SEQ ID NO: 1283519 - RNA, 19 nt, Artificial Sequence
  Description of Artificial Sequence: Synthetic oligonucleotide
gaaauacucaucuucugag

SEQ ID NO: 1283520 - RNA, 19 nt, Artificial Sequence
  Description of Artificial Sequence: Synthetic oligonucleotide
uuggcuacaacacggagcc

SEQ ID NO: 1283521 - RNA, 19 nt, Artificial Sequence
  Description of Artificial Sequence: Synthetic oligonucleotide
ucuggaaaggguuuucacg

SEQ ID NO: 1283522 - RNA, 19 nt, Artificial Sequence
  Description of Artificial Sequence: Synthetic oligonucleotide
ucaaauaccccuaaagcaa

SEQ ID NO: 1283523 - RNA, 19 nt, Artificial Sequence
  Description of Artificial Sequence: Synthetic oligonucleotide
uguuaugggcacuugaaug

SEQ ID NO: 1283524 - RNA, 19 nt, Artificial Sequence
  Description of Artificial Sequence: Synthetic oligonucleotide
auaauuacgguaguuuugg

SEQ ID NO: 1283525 - RNA, 19 nt, Artificial Sequence
  Description of Artificial Sequence: Synthetic oligonucleotide
ugaaauacucaucuucuga

SEQ ID NO: 1283526 - RNA, 19 nt, Artificial Sequence
  Description of Artificial Sequence: Synthetic oligonucleotide
caaggauauacccagcucc

SEQ ID NO: 1283527 - RNA, 19 nt, Artificial Sequence
  Description of Artificial Sequence: Synthetic oligonucleotide
acugccauccgcuuauacc

SEQ ID NO: 1283528 - RNA, 19 nt, Artificial Sequence
  Description of Artificial Sequence: Synthetic oligonucleotide
ugaucagcaauuaggagac

SEQ ID NO: 1283529 - RNA, 19 nt, Artificial Sequence
  Description of Artificial Sequence: Synthetic oligonucleotide
aagucuucaaggauauacc

SEQ ID NO: 1283530 - RNA, 19 nt, Artificial Sequence
  Description of Artificial Sequence: Synthetic oligonucleotide
aaggcuauacccagcaggc

SEQ ID NO: 1283531 - RNA, 19 nt, Artificial Sequence
  Description of Artificial Sequence: Synthetic oligonucleotide
uguuccaaggacaggauga

SEQ ID NO: 1283532 - RNA, 19 nt, Artificial Sequence
  Description of Artificial Sequence: Synthetic oligonucleotide
agaccaaguaucuuuagug

SEQ ID NO: 1283533 - RNA, 19 nt, Artificial Sequence
  Description of Artificial Sequence: Synthetic oligonucleotide
caccaaauuaucuaggcug

SEQ ID NO: 1283534 - RNA, 19 nt, Artificial Sequence
  Description of Artificial Sequence: Synthetic oligonucleotide
aauuaucuaggcugauguc

SEQ ID NO: 1283535 - RNA, 19 nt, Artificial Sequence
  Description of Artificial Sequence: Synthetic oligonucleotide
auauuuuggaugcugcuug

SEQ ID NO: 1283536 - RNA, 19 nt, Artificial Sequence
  Description of Artificial Sequence: Synthetic oligonucleotide
uguguugucuccacucucg

SEQ ID NO: 1283537 - RNA, 19 nt, Artificial Sequence
  Description of Artificial Sequence: Synthetic oligonucleotide
agcaaugucuuuguuaugg

SEQ ID NO: 1283538 - RNA, 19 nt, Artificial Sequence
  Description of Artificial Sequence: Synthetic oligonucleotide
uauuuccuggagaugaggc

SEQ ID NO: 1283539 - RNA, 19 nt, Artificial Sequence
  Description of Artificial Sequence: Synthetic oligonucleotide
accaguaagaccaaguauc

SEQ ID NO: 1283540 - RNA, 19 nt, Artificial Sequence
  Description of Artificial Sequence: Synthetic oligonucleotide
uguugaggggcaaaggccc

SEQ ID NO: 1283541 - RNA, 19 nt, Artificial Sequence
  Description of Artificial Sequence: Synthetic oligonucleotide
uaaccuguuuccuuguucc

SEQ ID NO: 1283542 - RNA, 19 nt, Artificial Sequence
  Description of Artificial Sequence: Synthetic oligonucleotide
acaauagcaggaauaaaac

SEQ ID NO: 1283543 - RNA, 19 nt, Artificial Sequence
  Description of Artificial Sequence: Synthetic oligonucleotide
uguaccagguuucacggug

SEQ ID NO: 1283544 - RNA, 19 nt, Artificial Sequence
  Description of Artificial Sequence: Synthetic oligonucleotide
acuguaccagguuucacgg

SEQ ID NO: 1283545 - RNA, 19 nt, Artificial Sequence
  Description of Artificial Sequence: Synthetic oligonucleotide
guugaucugacaccaagag

SEQ ID NO: 1283546 - RNA, 19 nt, Artificial Sequence
  Description of Artificial Sequence: Synthetic oligonucleotide
cucaaaacaguagaacugg

SEQ ID NO: 1283547 - RNA, 19 nt, Artificial Sequence
  Description of Artificial Sequence: Synthetic oligonucleotide
aucgaagagcagcuuauac

SEQ ID NO: 1283548 - RNA, 19 nt, Artificial Sequence
  Description of Artificial Sequence: Synthetic oligonucleotide
cuuguugaggggcaaaggc

SEQ ID NO: 1283549 - RNA, 19 nt, Artificial Sequence
  Description of Artificial Sequence: Synthetic oligonucleotide
caaggcuauacccagcagg

SEQ ID NO: 1283550 - RNA, 19 nt, Artificial Sequence
  Description of Artificial Sequence: Synthetic oligonucleotide
uccuguaggaccaucuagc

SEQ ID NO: 1283551 - RNA, 19 nt, Artificial Sequence
  Description of Artificial Sequence: Synthetic oligonucleotide
aaauacucaucuucugaga

SEQ ID NO: 1283552 - RNA, 19 nt, Artificial Sequence
  Description of Artificial Sequence: Synthetic oligonucleotide
uuuguuaugggcacuugaa

SEQ ID NO: 1283553 - RNA, 19 nt, Artificial Sequence
  Description of Artificial Sequence: Synthetic oligonucleotide
gaaacaaggucuuguugag

SEQ ID NO: 1283554 - RNA, 19 nt, Artificial Sequence
  Description of Artificial Sequence: Synthetic oligonucleotide
uuugugaggguguaacagc

SEQ ID NO: 1283555 - RNA, 19 nt, Artificial Sequence
  Description of Artificial Sequence: Synthetic oligonucleotide
agaaacauaaucauguuua

SEQ ID NO: 1283556 - RNA, 19 nt, Artificial Sequence
  Description of Artificial Sequence: Synthetic oligonucleotide
aagaccaaguaucuuuagu

SEQ ID NO: 1283557 - RNA, 19 nt, Artificial Sequence
  Description of Artificial Sequence: Synthetic oligonucleotide
guuacugcgacguuuccgc

SEQ ID NO: 1283558 - RNA, 19 nt, Artificial Sequence
  Description of Artificial Sequence: Synthetic oligonucleotide
cugaucagcaauuaggaga

SEQ ID NO: 1283559 - RNA, 19 nt, Artificial Sequence
  Description of Artificial Sequence: Synthetic oligonucleotide
accaaguaucuuuagugag

SEQ ID NO: 1283560 - RNA, 19 nt, Artificial Sequence
  Description of Artificial Sequence: Synthetic oligonucleotide
aaacacaaucuccacaaua

SEQ ID NO: 1283561 - RNA, 19 nt, Artificial Sequence
  Description of Artificial Sequence: Synthetic oligonucleotide
augucuuuguuaugggcac

SEQ ID NO: 1283562 - RNA, 19 nt, Artificial Sequence
  Description of Artificial Sequence: Synthetic oligonucleotide
cagcagauaauuacgguag

SEQ ID NO: 1283563 - RNA, 19 nt, Artificial Sequence
  Description of Artificial Sequence: Synthetic oligonucleotide
cuugugacaccacaggcag

SEQ ID NO: 1283564 - RNA, 19 nt, Artificial Sequence
  Description of Artificial Sequence: Synthetic oligonucleotide
auccgcuuauaccacuucc

SEQ ID NO: 1283565 - RNA, 19 nt, Artificial Sequence
  Description of Artificial Sequence: Synthetic oligonucleotide
cuuggcuacaacacggagc

SEQ ID NO: 1283566 - RNA, 19 nt, Artificial Sequence
  Description of Artificial Sequence: Synthetic oligonucleotide
gauaauuacgguaguuuug

SEQ ID NO: 1283567 - RNA, 19 nt, Artificial Sequence
  Description of Artificial Sequence: Synthetic oligonucleotide
auuaggagacacugguagg

SEQ ID NO: 1283568 - RNA, 19 nt, Artificial Sequence
  Description of Artificial Sequence: Synthetic oligonucleotide
cacuguaccagguuucacg

SEQ ID NO: 1283569 - RNA, 19 nt, Artificial Sequence
  Description of Artificial Sequence: Synthetic oligonucleotide
gaaaggaggaaauuucuaa

SEQ ID NO: 1283570 - RNA, 19 nt, Artificial Sequence
  Description of Artificial Sequence: Synthetic oligonucleotide
auagcccagaaacaagguc

SEQ ID NO: 1283571 - RNA, 19 nt, Artificial Sequence
  Description of Artificial Sequence: Synthetic oligonucleotide
uccgccucaaaacaguaga

SEQ ID NO: 1283572 - RNA, 19 nt, Artificial Sequence
  Description of Artificial Sequence: Synthetic oligonucleotide
ugaugaguuuccuuuugcc

SEQ ID NO: 1283573 - RNA, 19 nt, Artificial Sequence
  Description of Artificial Sequence: Synthetic oligonucleotide
uguccuuuugaccacuccu

SEQ ID NO: 1283574 - RNA, 19 nt, Artificial Sequence
  Description of Artificial Sequence: Synthetic oligonucleotide
uggaugaccacuuggcuac

SEQ ID NO: 1283575 - RNA, 19 nt, Artificial Sequence
  Description of Artificial Sequence: Synthetic oligonucleotide
aucagcaauuaggagacac

SEQ ID NO: 1283576 - RNA, 19 nt, Artificial Sequence
  Description of Artificial Sequence: Synthetic oligonucleotide
acaaugaggcacuggauca

SEQ ID NO: 1283577 - RNA, 19 nt, Artificial Sequence
  Description of Artificial Sequence: Synthetic oligonucleotide
cuugucauugguuguggcc

SEQ ID NO: 1283578 - RNA, 19 nt, Artificial Sequence
  Description of Artificial Sequence: Synthetic oligonucleotide
uuccuguaggaccaucuag

SEQ ID NO: 1283579 - RNA, 19 nt, Artificial Sequence
  Description of Artificial Sequence: Synthetic oligonucleotide
aacacggagcccgacaaag

SEQ ID NO: 1283580 - RNA, 19 nt, Artificial Sequence
  Description of Artificial Sequence: Synthetic oligonucleotide
aaccaguaagaccaaguau

SEQ ID NO: 1283581 - RNA, 19 nt, Artificial Sequence
  Description of Artificial Sequence: Synthetic oligonucleotide
auagccauuggaugaccac

SEQ ID NO: 1283582 - RNA, 19 nt, Artificial Sequence
  Description of Artificial Sequence: Synthetic oligonucleotide
agcaguuuagagcggcugg

SEQ ID NO: 1283583 - RNA, 19 nt, Artificial Sequence
  Description of Artificial Sequence: Synthetic oligonucleotide
cacacuugagcaccgaggc

SEQ ID NO: 1283584 - RNA, 19 nt, Artificial Sequence
  Description of Artificial Sequence: Synthetic oligonucleotide
augcugaucagcaauuagg

SEQ ID NO: 1283585 - RNA, 19 nt, Artificial Sequence
  Description of Artificial Sequence: Synthetic oligonucleotide
aauggugcugcuucacaga

SEQ ID NO: 1283586 - RNA, 19 nt, Artificial Sequence
  Description of Artificial Sequence: Synthetic oligonucleotide
cuuuugaccacuccugcac

SEQ ID NO: 1283587 - RNA, 19 nt, Artificial Sequence
  Description of Artificial Sequence: Synthetic oligonucleotide
uugucauugguuguggcca

SEQ ID NO: 1283588 - RNA, 19 nt, Artificial Sequence
  Description of Artificial Sequence: Synthetic oligonucleotide
uguuacugcgacguuuccg

SEQ ID NO: 1283589 - RNA, 19 nt, Artificial Sequence
  Description of Artificial Sequence: Synthetic oligonucleotide
uugccaauccagaauucgc

SEQ ID NO: 1283590 - RNA, 19 nt, Artificial Sequence
  Description of Artificial Sequence: Synthetic oligonucleotide
uagugagaaacauaaucau

SEQ ID NO: 1283591 - RNA, 19 nt, Artificial Sequence
  Description of Artificial Sequence: Synthetic oligonucleotide
gacguuuccgcuuuccuuc

SEQ ID NO: 1283592 - RNA, 19 nt, Artificial Sequence
  Description of Artificial Sequence: Synthetic oligonucleotide
gcuuauaccacuuccuuug

SEQ ID NO: 1283593 - RNA, 19 nt, Artificial Sequence
  Description of Artificial Sequence: Synthetic oligonucleotide
uccaauucucuccccaaca

SEQ ID NO: 1283594 - RNA, 19 nt, Artificial Sequence
  Description of Artificial Sequence: Synthetic oligonucleotide
uugugaggguguaacagcu

SEQ ID NO: 1283595 - RNA, 19 nt, Artificial Sequence
  Description of Artificial Sequence: Synthetic oligonucleotide
gauggaacucccguggaag

SEQ ID NO: 1283596 - RNA, 19 nt, Artificial Sequence
  Description of Artificial Sequence: Synthetic oligonucleotide
cuuugugaggguguaacag

SEQ ID NO: 1283597 - RNA, 19 nt, Artificial Sequence
  Description of Artificial Sequence: Synthetic oligonucleotide
aaacaaggucuuguugagg

SEQ ID NO: 1283598 - RNA, 19 nt, Artificial Sequence
  Description of Artificial Sequence: Synthetic oligonucleotide
ugcucucuuaaccuguuuc

SEQ ID NO: 1283599 - RNA, 19 nt, Artificial Sequence
  Description of Artificial Sequence: Synthetic oligonucleotide
acugaaauacucaucuucu

SEQ ID NO: 1283600 - RNA, 19 nt, Artificial Sequence
  Description of Artificial Sequence: Synthetic oligonucleotide
agcagcuuauacuucccag

SEQ ID NO: 1283601 - RNA, 19 nt, Artificial Sequence
  Description of Artificial Sequence: Synthetic oligonucleotide
caugguaaggagaaaggca

SEQ ID NO: 1283602 - RNA, 19 nt, Artificial Sequence
  Description of Artificial Sequence: Synthetic oligonucleotide
uugaucugacaccaagagu

SEQ ID NO: 1283603 - RNA, 19 nt, Artificial Sequence
  Description of Artificial Sequence: Synthetic oligonucleotide
ugaggggucugucaccacc

SEQ ID NO: 1283604 - RNA, 19 nt, Artificial Sequence
  Description of Artificial Sequence: Synthetic oligonucleotide
ccaucuagcaguuuagagc

SEQ ID NO: 1283605 - RNA, 19 nt, Artificial Sequence
  Description of Artificial Sequence: Synthetic oligonucleotide
uuugccugauggaacuccc

SEQ ID NO: 1283606 - RNA, 19 nt, Artificial Sequence
  Description of Artificial Sequence: Synthetic oligonucleotide
guugccaauccagaauucg

SEQ ID NO: 1283607 - RNA, 19 nt, Artificial Sequence
  Description of Artificial Sequence: Synthetic oligonucleotide
uccuuuugaccacuccugc

SEQ ID NO: 1283608 - RNA, 19 nt, Artificial Sequence
  Description of Artificial Sequence: Synthetic oligonucleotide
uucgacaaugcugaucagc

SEQ ID NO: 1283609 - RNA, 19 nt, Artificial Sequence
  Description of Artificial Sequence: Synthetic oligonucleotide
auaccccuaaagcaauguc

SEQ ID NO: 1283610 - RNA, 19 nt, Artificial Sequence
  Description of Artificial Sequence: Synthetic oligonucleotide
uuauaccacuuccuuuggc

SEQ ID NO: 1283611 - RNA, 19 nt, Artificial Sequence
  Description of Artificial Sequence: Synthetic oligonucleotide
uuacgguaguuuuggagcu

SEQ ID NO: 1283612 - RNA, 19 nt, Artificial Sequence
  Description of Artificial Sequence: Synthetic oligonucleotide
cacggugacagacuugcgg

SEQ ID NO: 1283613 - RNA, 19 nt, Artificial Sequence
  Description of Artificial Sequence: Synthetic oligonucleotide
cuguuguugaucugacacc

SEQ ID NO: 1283614 - RNA, 19 nt, Artificial Sequence
  Description of Artificial Sequence: Synthetic oligonucleotide
agugagaaacauaaucaug

SEQ ID NO: 1283615 - RNA, 19 nt, Artificial Sequence
  Description of Artificial Sequence: Synthetic oligonucleotide
ugggccaagcccauauugc

SEQ ID NO: 1283616 - RNA, 19 nt, Artificial Sequence
  Description of Artificial Sequence: Synthetic oligonucleotide
ucuagcaguuuagagcggc

SEQ ID NO: 1283617 - RNA, 19 nt, Artificial Sequence
  Description of Artificial Sequence: Synthetic oligonucleotide
cacuccugcacugaaauac

SEQ ID NO: 1283618 - RNA, 19 nt, Artificial Sequence
  Description of Artificial Sequence: Synthetic oligonucleotide
uaagaccaaguaucuuuag

SEQ ID NO: 1283619 - RNA, 19 nt, Artificial Sequence
  Description of Artificial Sequence: Synthetic oligonucleotide
ucaaggauauacccagcuc

SEQ ID NO: 1283620 - RNA, 19 nt, Artificial Sequence
  Description of Artificial Sequence: Synthetic oligonucleotide
agcccgacaaagcuauuuc

SEQ ID NO: 1283621 - RNA, 19 nt, Artificial Sequence
  Description of Artificial Sequence: Synthetic oligonucleotide
agcuccaacaucccgugug

SEQ ID NO: 1283622 - RNA, 19 nt, Artificial Sequence
  Description of Artificial Sequence: Synthetic oligonucleotide
agguuucacggugacagac

SEQ ID NO: 1283623 - RNA, 19 nt, Artificial Sequence
  Description of Artificial Sequence: Synthetic oligonucleotide
ucuuguugaggggcaaagg

SEQ ID NO: 1283624 - RNA, 19 nt, Artificial Sequence
  Description of Artificial Sequence: Synthetic oligonucleotide
ucauugguuguggccaugg

SEQ ID NO: 1283625 - RNA, 19 nt, Artificial Sequence
  Description of Artificial Sequence: Synthetic oligonucleotide
guuuagagcggcuggccag

SEQ ID NO: 1283626 - RNA, 19 nt, Artificial Sequence
  Description of Artificial Sequence: Synthetic oligonucleotide
cucacaaauucuccugccc

SEQ ID NO: 1283627 - RNA, 19 nt, Artificial Sequence
  Description of Artificial Sequence: Synthetic oligonucleotide
auggacccagacaugagac

SEQ ID NO: 1283628 - RNA, 19 nt, Artificial Sequence
  Description of Artificial Sequence: Synthetic oligonucleotide
auugaagucuucaaggaua

SEQ ID NO: 1283629 - RNA, 19 nt, Artificial Sequence
  Description of Artificial Sequence: Synthetic oligonucleotide
uuuugaccacuccugcacu

SEQ ID NO: 1283630 - RNA, 19 nt, Artificial Sequence
  Description of Artificial Sequence: Synthetic oligonucleotide
uccuuuugccugauggaac

SEQ ID NO: 1283631 - RNA, 19 nt, Artificial Sequence
  Description of Artificial Sequence: Synthetic oligonucleotide
guuuucacgagguugccaa

SEQ ID NO: 1283632 - RNA, 19 nt, Artificial Sequence
  Description of Artificial Sequence: Synthetic oligonucleotide
ucuggggaaucacuccgcc

SEQ ID NO: 1283633 - RNA, 19 nt, Artificial Sequence
  Description of Artificial Sequence: Synthetic oligonucleotide
uacaacacggagcccgaca

SEQ ID NO: 1283634 - RNA, 19 nt, Artificial Sequence
  Description of Artificial Sequence: Synthetic oligonucleotide
ucaguguccagggguauag

SEQ ID NO: 1283635 - RNA, 19 nt, Artificial Sequence
  Description of Artificial Sequence: Synthetic oligonucleotide
cuuagcuggggaccguucc

SEQ ID NO: 1283636 - RNA, 19 nt, Artificial Sequence
  Description of Artificial Sequence: Synthetic oligonucleotide
cacgagguugccaauccag

SEQ ID NO: 1283637 - RNA, 19 nt, Artificial Sequence
  Description of Artificial Sequence: Synthetic oligonucleotide
cugccauccgcuuauacca

SEQ ID NO: 1283638 - RNA, 19 nt, Artificial Sequence
  Description of Artificial Sequence: Synthetic oligonucleotide
uauuuuggaugcugcuuga

SEQ ID NO: 1283639 - RNA, 19 nt, Artificial Sequence
  Description of Artificial Sequence: Synthetic oligonucleotide
acaaggucuuguugagggg

SEQ ID NO: 1283640 - RNA, 19 nt, Artificial Sequence
  Description of Artificial Sequence: Synthetic oligonucleotide
aaggaaucucuggggaauc

SEQ ID NO: 1283641 - RNA, 19 nt, Artificial Sequence
  Description of Artificial Sequence: Synthetic oligonucleotide
cugaaauacucaucuucug

SEQ ID NO: 1283642 - RNA, 19 nt, Artificial Sequence
  Description of Artificial Sequence: Synthetic oligonucleotide
aacaucccgugugauuuuc

SEQ ID NO: 1283643 - RNA, 19 nt, Artificial Sequence
  Description of Artificial Sequence: Synthetic oligonucleotide
gauguuacugcgacguuuc

SEQ ID NO: 1283644 - RNA, 19 nt, Artificial Sequence
  Description of Artificial Sequence: Synthetic oligonucleotide
cacucuugugacaccacag

SEQ ID NO: 1283645 - RNA, 19 nt, Artificial Sequence
  Description of Artificial Sequence: Synthetic oligonucleotide
augguaaggagaaaggcau

SEQ ID NO: 1283646 - RNA, 19 nt, Artificial Sequence
  Description of Artificial Sequence: Synthetic oligonucleotide
gaauucgcugcuccucaag

SEQ ID NO: 1283647 - RNA, 19 nt, Artificial Sequence
  Description of Artificial Sequence: Synthetic oligonucleotide
aauccagaauucgcugcuc

SEQ ID NO: 1283648 - RNA, 19 nt, Artificial Sequence
  Description of Artificial Sequence: Synthetic oligonucleotide
aucugacaccaagaguacc

SEQ ID NO: 1283649 - RNA, 19 nt, Artificial Sequence
  Description of Artificial Sequence: Synthetic oligonucleotide
agcuucauaugggccaagc

SEQ ID NO: 1283650 - RNA, 19 nt, Artificial Sequence
  Description of Artificial Sequence: Synthetic oligonucleotide
aguuuagagcggcuggcca

SEQ ID NO: 1283651 - RNA, 19 nt, Artificial Sequence
  Description of Artificial Sequence: Synthetic oligonucleotide
agcaauuaggagacacugg

SEQ ID NO: 1283652 - RNA, 19 nt, Artificial Sequence
  Description of Artificial Sequence: Synthetic oligonucleotide
aggaccaucuagcaguuua

SEQ ID NO: 1283653 - RNA, 19 nt, Artificial Sequence
  Description of Artificial Sequence: Synthetic oligonucleotide
gugaugaguuuccuuuugc

SEQ ID NO: 1283654 - RNA, 19 nt, Artificial Sequence
  Description of Artificial Sequence: Synthetic oligonucleotide
ugagaaacauaaucauguu

SEQ ID NO: 1283655 - RNA, 19 nt, Artificial Sequence
  Description of Artificial Sequence: Synthetic oligonucleotide
cagaaacaaggucuuguug

SEQ ID NO: 1283656 - RNA, 19 nt, Artificial Sequence
  Description of Artificial Sequence: Synthetic oligonucleotide
caaauuaucuaggcugaug

SEQ ID NO: 1283657 - RNA, 19 nt, Artificial Sequence
  Description of Artificial Sequence: Synthetic oligonucleotide
ucaaggcuauacccagcag

SEQ ID NO: 1283658 - RNA, 19 nt, Artificial Sequence
  Description of Artificial Sequence: Synthetic oligonucleotide
aaggcacaggaaguacuuc

SEQ ID NO: 1283659 - RNA, 19 nt, Artificial Sequence
  Description of Artificial Sequence: Synthetic oligonucleotide
agguugccaauccagaauu

SEQ ID NO: 1283660 - RNA, 19 nt, Artificial Sequence
  Description of Artificial Sequence: Synthetic oligonucleotide
aagugaugaguuuccuuuu

SEQ ID NO: 1283661 - RNA, 19 nt, Artificial Sequence
  Description of Artificial Sequence: Synthetic oligonucleotide
uggaucacccacucuugug

SEQ ID NO: 1283662 - RNA, 19 nt, Artificial Sequence
  Description of Artificial Sequence: Synthetic oligonucleotide
uugccugauggaacucccg

SEQ ID NO: 1283663 - RNA, 19 nt, Artificial Sequence
  Description of Artificial Sequence: Synthetic oligonucleotide
gguauagggucacacagga

SEQ ID NO: 1283664 - RNA, 19 nt, Artificial Sequence
  Description of Artificial Sequence: Synthetic oligonucleotide
ggcuacaacacggagcccg

SEQ ID NO: 1283665 - RNA, 19 nt, Artificial Sequence
  Description of Artificial Sequence: Synthetic oligonucleotide
aucaucgaagagcagcuua

SEQ ID NO: 1283666 - RNA, 19 nt, Artificial Sequence
  Description of Artificial Sequence: Synthetic oligonucleotide
ucacuucaguguccagggg

SEQ ID NO: 1283667 - RNA, 19 nt, Artificial Sequence
  Description of Artificial Sequence: Synthetic oligonucleotide
ggauauacccagcuccugc

SEQ ID NO: 1283668 - RNA, 19 nt, Artificial Sequence
  Description of Artificial Sequence: Synthetic oligonucleotide
ugccugauggaacucccgu

SEQ ID NO: 1283669 - RNA, 19 nt, Artificial Sequence
  Description of Artificial Sequence: Synthetic oligonucleotide
gaaucacuccgccucaaaa

SEQ ID NO: 1283670 - RNA, 19 nt, Artificial Sequence
  Description of Artificial Sequence: Synthetic oligonucleotide
uuccuuuugccugauggaa

SEQ ID NO: 1283671 - RNA, 19 nt, Artificial Sequence
  Description of Artificial Sequence: Synthetic oligonucleotide
caggaugacugccauccgc

SEQ ID NO: 1283672 - RNA, 19 nt, Artificial Sequence
  Description of Artificial Sequence: Synthetic oligonucleotide
ugaauccaauucucucccc

SEQ ID NO: 1283673 - RNA, 19 nt, Artificial Sequence
  Description of Artificial Sequence: Synthetic oligonucleotide
uuuccgcuuuccuuccacc

SEQ ID NO: 1283674 - RNA, 19 nt, Artificial Sequence
  Description of Artificial Sequence: Synthetic oligonucleotide
uguauacugcuuguugaaa

SEQ ID NO: 1283675 - RNA, 19 nt, Artificial Sequence
  Description of Artificial Sequence: Synthetic oligonucleotide
ucucagaccagagcuccag

SEQ ID NO: 1283676 - RNA, 19 nt, Artificial Sequence
  Description of Artificial Sequence: Synthetic oligonucleotide
agagcagcuuauacuuccc

SEQ ID NO: 1283677 - RNA, 19 nt, Artificial Sequence
  Description of Artificial Sequence: Synthetic oligonucleotide
accaaauuaucuaggcuga

SEQ ID NO: 1283678 - RNA, 19 nt, Artificial Sequence
  Description of Artificial Sequence: Synthetic oligonucleotide
agacacacaaggaauucca

SEQ ID NO: 1283679 - RNA, 19 nt, Artificial Sequence
  Description of Artificial Sequence: Synthetic oligonucleotide
uaauuacgguaguuuugga

SEQ ID NO: 1283680 - RNA, 19 nt, Artificial Sequence
  Description of Artificial Sequence: Synthetic oligonucleotide
cuuuguuaugggcacuuga

SEQ ID NO: 1283681 - RNA, 19 nt, Artificial Sequence
  Description of Artificial Sequence: Synthetic oligonucleotide
augacugccauccgcuuau

SEQ ID NO: 1283682 - RNA, 19 nt, Artificial Sequence
  Description of Artificial Sequence: Synthetic oligonucleotide
ucucuuaaccuguuuccuu

SEQ ID NO: 1283683 - RNA, 19 nt, Artificial Sequence
  Description of Artificial Sequence: Synthetic oligonucleotide
ugagacacacaaggaauuc

SEQ ID NO: 1283684 - RNA, 19 nt, Artificial Sequence
  Description of Artificial Sequence: Synthetic oligonucleotide
aaccuguuuccuuguucca

SEQ ID NO: 1283685 - RNA, 19 nt, Artificial Sequence
  Description of Artificial Sequence: Synthetic oligonucleotide
uaucuaggcugaugucugc

SEQ ID NO: 1283686 - RNA, 19 nt, Artificial Sequence
  Description of Artificial Sequence: Synthetic oligonucleotide
ccacuuggcuacaacacgg

SEQ ID NO: 1283687 - RNA, 19 nt, Artificial Sequence
  Description of Artificial Sequence: Synthetic oligonucleotide
aaguucuguuguugaucug

SEQ ID NO: 1283688 - RNA, 19 nt, Artificial Sequence
  Description of Artificial Sequence: Synthetic oligonucleotide
ccugauggaacucccgugg

SEQ ID NO: 1283689 - RNA, 19 nt, Artificial Sequence
  Description of Artificial Sequence: Synthetic oligonucleotide
agcugauguuacugcgacg

SEQ ID NO: 1283690 - RNA, 19 nt, Artificial Sequence
  Description of Artificial Sequence: Synthetic oligonucleotide
gccagcuugucauugguug

SEQ ID NO: 1283691 - RNA, 19 nt, Artificial Sequence
  Description of Artificial Sequence: Synthetic oligonucleotide
agcagauaauuacgguagu

SEQ ID NO: 1283692 - RNA, 19 nt, Artificial Sequence
  Description of Artificial Sequence: Synthetic oligonucleotide
uccagaauucgcugcuccu

SEQ ID NO: 1283693 - RNA, 19 nt, Artificial Sequence
  Description of Artificial Sequence: Synthetic oligonucleotide
agggguauagggucacaca

SEQ ID NO: 1283694 - RNA, 19 nt, Artificial Sequence
  Description of Artificial Sequence: Synthetic oligonucleotide
ugcuguaguacagcucccc

SEQ ID NO: 1283695 - RNA, 19 nt, Artificial Sequence
  Description of Artificial Sequence: Synthetic oligonucleotide
gauauacccagcuccugcu

SEQ ID NO: 1283696 - RNA, 19 nt, Artificial Sequence
  Description of Artificial Sequence: Synthetic oligonucleotide
uagcaguuuagagcggcug

SEQ ID NO: 1283697 - RNA, 19 nt, Artificial Sequence
  Description of Artificial Sequence: Synthetic oligonucleotide
ucacgagguugccaaucca

SEQ ID NO: 1283698 - RNA, 19 nt, Artificial Sequence
  Description of Artificial Sequence: Synthetic oligonucleotide
caaugcuguaguacagcuc

SEQ ID NO: 1283699 - RNA, 19 nt, Artificial Sequence
  Description of Artificial Sequence: Synthetic oligonucleotide
uggacccagacaugagaca

SEQ ID NO: 1283700 - RNA, 19 nt, Artificial Sequence
  Description of Artificial Sequence: Synthetic oligonucleotide
guaaggagaaaggcauagc

SEQ ID NO: 1283701 - RNA, 19 nt, Artificial Sequence
  Description of Artificial Sequence: Synthetic oligonucleotide
ugguuguggccaugguaag

SEQ ID NO: 1283702 - RNA, 19 nt, Artificial Sequence
  Description of Artificial Sequence: Synthetic oligonucleotide
gucauggacccagacauga

SEQ ID NO: 1283703 - RNA, 19 nt, Artificial Sequence
  Description of Artificial Sequence: Synthetic oligonucleotide
ggcacuugaauggugcugc

SEQ ID NO: 1283704 - RNA, 19 nt, Artificial Sequence
  Description of Artificial Sequence: Synthetic oligonucleotide
uuccuuccaccaaauuauc

SEQ ID NO: 1283705 - RNA, 19 nt, Artificial Sequence
  Description of Artificial Sequence: Synthetic oligonucleotide
gaucugacaccaagaguac

SEQ ID NO: 1283706 - RNA, 19 nt, Artificial Sequence
  Description of Artificial Sequence: Synthetic oligonucleotide
gcugaucagcaauuaggag

SEQ ID NO: 1283707 - RNA, 19 nt, Artificial Sequence
  Description of Artificial Sequence: Synthetic oligonucleotide
guaggcuguguuacacugg

SEQ ID NO: 1283708 - RNA, 19 nt, Artificial Sequence
  Description of Artificial Sequence: Synthetic oligonucleotide
acagaagguucaccugugu

SEQ ID NO: 1283709 - RNA, 19 nt, Artificial Sequence
  Description of Artificial Sequence: Synthetic oligonucleotide
aagcccauauugcucucuu

SEQ ID NO: 1283710 - RNA, 19 nt, Artificial Sequence
  Description of Artificial Sequence: Synthetic oligonucleotide
cauggacccagacaugaga

SEQ ID NO: 1283711 - RNA, 19 nt, Artificial Sequence
  Description of Artificial Sequence: Synthetic oligonucleotide
caggggcucacaaauucuc

SEQ ID NO: 1283712 - RNA, 19 nt, Artificial Sequence
  Description of Artificial Sequence: Synthetic oligonucleotide
cucgcuuagcuggggaccg

SEQ ID NO: 1283713 - RNA, 19 nt, Artificial Sequence
  Description of Artificial Sequence: Synthetic oligonucleotide
ggaucacccacucuuguga

SEQ ID NO: 1283714 - RNA, 19 nt, Artificial Sequence
  Description of Artificial Sequence: Synthetic oligonucleotide
agacuugcggccucgcuua

SEQ ID NO: 1283715 - RNA, 19 nt, Artificial Sequence
  Description of Artificial Sequence: Synthetic oligonucleotide
ccauuggaugaccacuugg

SEQ ID NO: 1283716 - RNA, 19 nt, Artificial Sequence
  Description of Artificial Sequence: Synthetic oligonucleotide
cucuggggaaucacuccgc

SEQ ID NO: 1283717 - RNA, 19 nt, Artificial Sequence
  Description of Artificial Sequence: Synthetic oligonucleotide
ucuuuguuaugggcacuug

SEQ ID NO: 1283718 - RNA, 19 nt, Artificial Sequence
  Description of Artificial Sequence: Synthetic oligonucleotide
cgacaaagcuauuuccugg

SEQ ID NO: 1283719 - RNA, 19 nt, Artificial Sequence
  Description of Artificial Sequence: Synthetic oligonucleotide
cuccgccucaaaacaguag

SEQ ID NO: 1283720 - RNA, 19 nt, Artificial Sequence
  Description of Artificial Sequence: Synthetic oligonucleotide
uccaacaucccgugugauu

SEQ ID NO: 1283721 - RNA, 19 nt, Artificial Sequence
  Description of Artificial Sequence: Synthetic oligonucleotide
aggaugacugccauccgcu

SEQ ID NO: 1283722 - RNA, 19 nt, Artificial Sequence
  Description of Artificial Sequence: Synthetic oligonucleotide
uuccggguucgacaaugcu

SEQ ID NO: 1283723 - RNA, 19 nt, Artificial Sequence
  Description of Artificial Sequence: Synthetic oligonucleotide
ugacagacuugcggccucg

SEQ ID NO: 1283724 - RNA, 19 nt, Artificial Sequence
  Description of Artificial Sequence: Synthetic oligonucleotide
ugcuuguugaaaggaggaa

SEQ ID NO: 1283725 - RNA, 19 nt, Artificial Sequence
  Description of Artificial Sequence: Synthetic oligonucleotide
gaugacugccauccgcuua

SEQ ID NO: 1283726 - RNA, 19 nt, Artificial Sequence
  Description of Artificial Sequence: Synthetic oligonucleotide
ggcaugaggggucugucac

SEQ ID NO: 1283727 - RNA, 19 nt, Artificial Sequence
  Description of Artificial Sequence: Synthetic oligonucleotide
acaucccgugugauuuucc

SEQ ID NO: 1283728 - RNA, 19 nt, Artificial Sequence
  Description of Artificial Sequence: Synthetic oligonucleotide
cugguaggcuguguuacac

SEQ ID NO: 1283729 - RNA, 19 nt, Artificial Sequence
  Description of Artificial Sequence: Synthetic oligonucleotide
uaccagguuucacggugac

SEQ ID NO: 1283730 - RNA, 19 nt, Artificial Sequence
  Description of Artificial Sequence: Synthetic oligonucleotide
caguuuagagcggcuggcc

SEQ ID NO: 1283731 - RNA, 19 nt, Artificial Sequence
  Description of Artificial Sequence: Synthetic oligonucleotide
ugccauccgcuuauaccac

SEQ ID NO: 1283732 - RNA, 19 nt, Artificial Sequence
  Description of Artificial Sequence: Synthetic oligonucleotide
ugucauugguuguggccau

SEQ ID NO: 1283733 - RNA, 19 nt, Artificial Sequence
  Description of Artificial Sequence: Synthetic oligonucleotide
ggguauagggucacacagg

SEQ ID NO: 1283734 - RNA, 19 nt, Artificial Sequence
  Description of Artificial Sequence: Synthetic oligonucleotide
gacugccauccgcuuauac

SEQ ID NO: 1283735 - RNA, 19 nt, Artificial Sequence
  Description of Artificial Sequence: Synthetic oligonucleotide
gcacacuugagcaccgagg

SEQ ID NO: 1283736 - RNA, 19 nt, Artificial Sequence
  Description of Artificial Sequence: Synthetic oligonucleotide
uuacugcgacguuuccgcu

SEQ ID NO: 1283737 - RNA, 19 nt, Artificial Sequence
  Description of Artificial Sequence: Synthetic oligonucleotide
gcucacaaauucuccugcc

SEQ ID NO: 1283738 - RNA, 19 nt, Artificial Sequence
  Description of Artificial Sequence: Synthetic oligonucleotide
uacgguaguuuuggagcug

SEQ ID NO: 1283739 - RNA, 19 nt, Artificial Sequence
  Description of Artificial Sequence: Synthetic oligonucleotide
gguuguggccaugguaagg

SEQ ID NO: 1283740 - RNA, 19 nt, Artificial Sequence
  Description of Artificial Sequence: Synthetic oligonucleotide
ccgacaaagcuauuuccug

SEQ ID NO: 1283741 - RNA, 19 nt, Artificial Sequence
  Description of Artificial Sequence: Synthetic oligonucleotide
cccuaaagcaaugucuuug

SEQ ID NO: 1283742 - RNA, 19 nt, Artificial Sequence
  Description of Artificial Sequence: Synthetic oligonucleotide
ugcgacguuuccgcuuucc

SEQ ID NO: 1283743 - RNA, 19 nt, Artificial Sequence
  Description of Artificial Sequence: Synthetic oligonucleotide
cagggguauagggucacac

SEQ ID NO: 1283744 - RNA, 19 nt, Artificial Sequence
  Description of Artificial Sequence: Synthetic oligonucleotide
acagacuugcggccucgcu

SEQ ID NO: 1283745 - RNA, 19 nt, Artificial Sequence
  Description of Artificial Sequence: Synthetic oligonucleotide
caugaggggucugucacca

SEQ ID NO: 1283746 - RNA, 19 nt, Artificial Sequence
  Description of Artificial Sequence: Synthetic oligonucleotide
ucucgcaggggcucacaaa

SEQ ID NO: 1283747 - RNA, 19 nt, Artificial Sequence
  Description of Artificial Sequence: Synthetic oligonucleotide
gcccgacaaagcuauuucc

SEQ ID NO: 1283748 - RNA, 19 nt, Artificial Sequence
  Description of Artificial Sequence: Synthetic oligonucleotide
acuugcggccucgcuuagc

SEQ ID NO: 1283749 - RNA, 19 nt, Artificial Sequence
  Description of Artificial Sequence: Synthetic oligonucleotide
agaauucgcugcuccucaa

SEQ ID NO: 1283750 - RNA, 19 nt, Artificial Sequence
  Description of Artificial Sequence: Synthetic oligonucleotide
uaugggccaagcccauauu

SEQ ID NO: 1283751 - RNA, 19 nt, Artificial Sequence
  Description of Artificial Sequence: Synthetic oligonucleotide
gaaucucuggggaaucacu

SEQ ID NO: 1283752 - RNA, 19 nt, Artificial Sequence
  Description of Artificial Sequence: Synthetic oligonucleotide
acccacucuugugacacca

SEQ ID NO: 1283753 - RNA, 19 nt, Artificial Sequence
  Description of Artificial Sequence: Synthetic oligonucleotide
uacugcgacguuuccgcuu

SEQ ID NO: 1283754 - RNA, 19 nt, Artificial Sequence
  Description of Artificial Sequence: Synthetic oligonucleotide
caauuaggagacacuggua

SEQ ID NO: 1283755 - RNA, 19 nt, Artificial Sequence
  Description of Artificial Sequence: Synthetic oligonucleotide
accacaucaaauaccccua

SEQ ID NO: 1283756 - RNA, 19 nt, Artificial Sequence
  Description of Artificial Sequence: Synthetic oligonucleotide
uauacccagcaggcagcag

SEQ ID NO: 1283757 - RNA, 19 nt, Artificial Sequence
  Description of Artificial Sequence: Synthetic oligonucleotide
ggaccaucuagcaguuuag

SEQ ID NO: 1283758 - RNA, 19 nt, Artificial Sequence
  Description of Artificial Sequence: Synthetic oligonucleotide
gcugauguuacugcgacgu

SEQ ID NO: 1283759 - RNA, 19 nt, Artificial Sequence
  Description of Artificial Sequence: Synthetic oligonucleotide
gcccauauugcucucuuaa

SEQ ID NO: 1283760 - RNA, 19 nt, Artificial Sequence
  Description of Artificial Sequence: Synthetic oligonucleotide
ggacagaagguucaccugu

SEQ ID NO: 1283761 - RNA, 19 nt, Artificial Sequence
  Description of Artificial Sequence: Synthetic oligonucleotide
aggaaucucuggggaauca

SEQ ID NO: 1283762 - RNA, 19 nt, Artificial Sequence
  Description of Artificial Sequence: Synthetic oligonucleotide
acgagguugccaauccaga

SEQ ID NO: 1283763 - RNA, 19 nt, Artificial Sequence
  Description of Artificial Sequence: Synthetic oligonucleotide
ccggguucgacaaugcuga

SEQ ID NO: 1283764 - RNA, 19 nt, Artificial Sequence
  Description of Artificial Sequence: Synthetic oligonucleotide
cauugaagucuucaaggau

SEQ ID NO: 1283765 - RNA, 19 nt, Artificial Sequence
  Description of Artificial Sequence: Synthetic oligonucleotide
cauccgcuuauaccacuuc

SEQ ID NO: 1283766 - RNA, 19 nt, Artificial Sequence
  Description of Artificial Sequence: Synthetic oligonucleotide
cagcuuauacuucccagcu

SEQ ID NO: 1283767 - RNA, 19 nt, Artificial Sequence
  Description of Artificial Sequence: Synthetic oligonucleotide
gcuugucauugguuguggc

SEQ ID NO: 1283768 - RNA, 19 nt, Artificial Sequence
  Description of Artificial Sequence: Synthetic oligonucleotide
cagauaauuacgguaguuu

SEQ ID NO: 1283769 - RNA, 19 nt, Artificial Sequence
  Description of Artificial Sequence: Synthetic oligonucleotide
cacaucaaauaccccuaaa

SEQ ID NO: 1283770 - RNA, 19 nt, Artificial Sequence
  Description of Artificial Sequence: Synthetic oligonucleotide
gccuuugugaggguguaac

SEQ ID NO: 1283771 - RNA, 19 nt, Artificial Sequence
  Description of Artificial Sequence: Synthetic oligonucleotide
guuucacggugacagacuu

SEQ ID NO: 1283772 - RNA, 19 nt, Artificial Sequence
  Description of Artificial Sequence: Synthetic oligonucleotide
cagucaugaggaucucaga

SEQ ID NO: 1283773 - RNA, 19 nt, Artificial Sequence
  Description of Artificial Sequence: Synthetic oligonucleotide
gcaguuuagagcggcuggc

SEQ ID NO: 1283774 - RNA, 19 nt, Artificial Sequence
  Description of Artificial Sequence: Synthetic oligonucleotide
uccagggguauagggucac

SEQ ID NO: 1283775 - RNA, 19 nt, Artificial Sequence
  Description of Artificial Sequence: Synthetic oligonucleotide
gacuugcggccucgcuuag

SEQ ID NO: 1283776 - RNA, 19 nt, Artificial Sequence
  Description of Artificial Sequence: Synthetic oligonucleotide
cucgcaggggcucacaaau

SEQ ID NO: 1283777 - RNA, 19 nt, Artificial Sequence
  Description of Artificial Sequence: Synthetic oligonucleotide
cuuuugccugauggaacuc

SEQ ID NO: 1283778 - RNA, 19 nt, Artificial Sequence
  Description of Artificial Sequence: Synthetic oligonucleotide
ggaccguucccucuucaga

SEQ ID NO: 1283779 - RNA, 19 nt, Artificial Sequence
  Description of Artificial Sequence: Synthetic oligonucleotide
cuugcggccucgcuuagcu

SEQ ID NO: 1283780 - RNA, 19 nt, Artificial Sequence
  Description of Artificial Sequence: Synthetic oligonucleotide
ggaaucucuggggaaucac

SEQ ID NO: 1283781 - RNA, 19 nt, Artificial Sequence
  Description of Artificial Sequence: Synthetic oligonucleotide
agacccaguagcagccuga

SEQ ID NO: 1283782 - RNA, 19 nt, Artificial Sequence
  Description of Artificial Sequence: Synthetic oligonucleotide
gugacagacuugcggccuc

SEQ ID NO: 1283783 - RNA, 19 nt, Artificial Sequence
  Description of Artificial Sequence: Synthetic oligonucleotide
agccauuggaugaccacuu

SEQ ID NO: 1283784 - RNA, 19 nt, Artificial Sequence
  Description of Artificial Sequence: Synthetic oligonucleotide
guaccagguuucacgguga

SEQ ID NO: 1283785 - RNA, 19 nt, Artificial Sequence
  Description of Artificial Sequence: Synthetic oligonucleotide
ucgcaggggcucacaaauu

SEQ ID NO: 1283786 - RNA, 19 nt, Artificial Sequence
  Description of Artificial Sequence: Synthetic oligonucleotide
gacagacuugcggccucgc

SEQ ID NO: 1283787 - RNA, 19 nt, Artificial Sequence
  Description of Artificial Sequence: Synthetic oligonucleotide
uugcggccucgcuuagcug

SEQ ID NO: 1283788 - RNA, 19 nt, Artificial Sequence
  Description of Artificial Sequence: Synthetic oligonucleotide
cuauacccagcaggcagca

SEQ ID NO: 1283789 - RNA, 19 nt, Artificial Sequence
  Description of Artificial Sequence: Synthetic oligonucleotide
uuagagcggcuggccagcu

SEQ ID NO: 1283790 - RNA, 19 nt, Artificial Sequence
  Description of Artificial Sequence: Synthetic oligonucleotide
agcccauauugcucucuua

SEQ ID NO: 1283791 - RNA, 19 nt, Artificial Sequence
  Description of Artificial Sequence: Synthetic oligonucleotide
cacccacucuugugacacc

SEQ ID NO: 1283792 - RNA, 19 nt, Artificial Sequence
  Description of Artificial Sequence: Synthetic oligonucleotide
ccucaaggcuauacccagc

SEQ ID NO: 1283793 - RNA, 19 nt, Artificial Sequence
  Description of Artificial Sequence: Synthetic oligonucleotide
cucucuuaaccuguuuccu

SEQ ID NO: 1283794 - RNA, 19 nt, Artificial Sequence
  Description of Artificial Sequence: Synthetic oligonucleotide
gguuuucacgagguugcca

SEQ ID NO: 1283795 - RNA, 19 nt, Artificial Sequence
  Description of Artificial Sequence: Synthetic oligonucleotide
cuacaacacggagcccgac

SEQ ID NO: 1283796 - RNA, 19 nt, Artificial Sequence
  Description of Artificial Sequence: Synthetic oligonucleotide
cacuccgccucaaaacagu

SEQ ID NO: 1283797 - RNA, 19 nt, Artificial Sequence
  Description of Artificial Sequence: Synthetic oligonucleotide
ccuuuugaccacuccugca

SEQ ID NO: 1283798 - RNA, 19 nt, Artificial Sequence
  Description of Artificial Sequence: Synthetic oligonucleotide
ccucgcuuagcuggggacc

SEQ ID NO: 1283799 - RNA, 19 nt, Artificial Sequence
  Description of Artificial Sequence: Synthetic oligonucleotide
cagguuucacggugacaga

SEQ ID NO: 1283800 - RNA, 19 nt, Artificial Sequence
  Description of Artificial Sequence: Synthetic oligonucleotide
cccaacaaugaggcacugg

SEQ ID NO: 1283801 - RNA, 19 nt, Artificial Sequence
  Description of Artificial Sequence: Synthetic oligonucleotide
ggggcucacaaauucuccu

SEQ ID NO: 1283802 - RNA, 19 nt, Artificial Sequence
  Description of Artificial Sequence: Synthetic oligonucleotide
gaucagcaauuaggagaca

SEQ ID NO: 1283803 - RNA, 19 nt, Artificial Sequence
  Description of Artificial Sequence: Synthetic oligonucleotide
ccaguaagaccaaguaucu

SEQ ID NO: 1283804 - RNA, 19 nt, Artificial Sequence
  Description of Artificial Sequence: Synthetic oligonucleotide
ccuuugugaggguguaaca

SEQ ID NO: 1283805 - RNA, 19 nt, Artificial Sequence
  Description of Artificial Sequence: Synthetic oligonucleotide
gcuggggagcugauguuac

SEQ ID NO: 1283806 - RNA, 19 nt, Artificial Sequence
  Description of Artificial Sequence: Synthetic oligonucleotide
cgcaggggcucacaaauuc

SEQ ID NO: 1283807 - RNA, 19 nt, Artificial Sequence
  Description of Artificial Sequence: Synthetic oligonucleotide
acuccgccucaaaacagua

SEQ ID NO: 1283808 - RNA, 19 nt, Artificial Sequence
  Description of Artificial Sequence: Synthetic oligonucleotide
gguugccaauccagaauuc

SEQ ID NO: 1283809 - RNA, 19 nt, Artificial Sequence
  Description of Artificial Sequence: Synthetic oligonucleotide
guccagggguauaggguca

SEQ ID NO: 1283810 - RNA, 19 nt, Artificial Sequence
  Description of Artificial Sequence: Synthetic oligonucleotide
aucucagaccagagcucca

SEQ ID NO: 1283811 - RNA, 19 nt, Artificial Sequence
  Description of Artificial Sequence: Synthetic oligonucleotide
ggguucgacaaugcugauc

SEQ ID NO: 1283812 - RNA, 19 nt, Artificial Sequence
  Description of Artificial Sequence: Synthetic oligonucleotide
gggccaagcccauauugcu

SEQ ID NO: 1283813 - RNA, 19 nt, Artificial Sequence
  Description of Artificial Sequence: Synthetic oligonucleotide
cgccucaaaacaguagaac

SEQ ID NO: 1283814 - RNA, 19 nt, Artificial Sequence
  Description of Artificial Sequence: Synthetic oligonucleotide
gccccuccagucaugagga

SEQ ID NO: 1283815 - RNA, 19 nt, Artificial Sequence
  Description of Artificial Sequence: Synthetic oligonucleotide
cucucgcaggggcucacaa

SEQ ID NO: 1283816 - RNA, 19 nt, Artificial Sequence
  Description of Artificial Sequence: Synthetic oligonucleotide
cccgacaaagcuauuuccu

SEQ ID NO: 1283817 - RNA, 19 nt, Artificial Sequence
  Description of Artificial Sequence: Synthetic oligonucleotide
ggccaagcccauauugcuc

SEQ ID NO: 1283818 - RNA, 19 nt, Artificial Sequence
  Description of Artificial Sequence: Synthetic oligonucleotide
cagacuugcggccucgcuu

SEQ ID NO: 1283819 - RNA, 19 nt, Artificial Sequence
  Description of Artificial Sequence: Synthetic oligonucleotide
gagcccgacaaagcuauuu

SEQ ID NO: 1283820 - RNA, 19 nt, Artificial Sequence
  Description of Artificial Sequence: Synthetic oligonucleotide
acggagcccgacaaagcua

SEQ ID NO: 1283821 - RNA, 19 nt, Artificial Sequence
  Description of Artificial Sequence: Synthetic oligonucleotide
ccacucuugugacaccaca

SEQ ID NO: 1283822 - RNA, 19 nt, Artificial Sequence
  Description of Artificial Sequence: Synthetic oligonucleotide
gaagacccaguagcagccu

SEQ ID NO: 1283823 - RNA, 19 nt, Artificial Sequence
  Description of Artificial Sequence: Synthetic oligonucleotide
uggccaugguaaggagaaa

SEQ ID NO: 1283824 - RNA, 19 nt, Artificial Sequence
  Description of Artificial Sequence: Synthetic oligonucleotide
uacccagcuccugcucgaa

SEQ ID NO: 1283825 - RNA, 19 nt, Artificial Sequence
  Description of Artificial Sequence: Synthetic oligonucleotide
caucgaagagcagcuuaua

SEQ ID NO: 1283826 - RNA, 19 nt, Artificial Sequence
  Description of Artificial Sequence: Synthetic oligonucleotide
acucucgcaggggcucaca

SEQ ID NO: 1283827 - RNA, 19 nt, Artificial Sequence
  Description of Artificial Sequence: Synthetic oligonucleotide
ucgcuuagcuggggaccgu

SEQ ID NO: 1283828 - RNA, 19 nt, Artificial Sequence
  Description of Artificial Sequence: Synthetic oligonucleotide
ggaugcugcuugaauccaa

SEQ ID NO: 1283829 - RNA, 19 nt, Artificial Sequence
  Description of Artificial Sequence: Synthetic oligonucleotide
cuguaccagguuucacggu

SEQ ID NO: 1283830 - RNA, 19 nt, Artificial Sequence
  Description of Artificial Sequence: Synthetic oligonucleotide
gcuacaacacggagcccga

SEQ ID NO: 1283831 - RNA, 19 nt, Artificial Sequence
  Description of Artificial Sequence: Synthetic oligonucleotide
gguaguuuuggagcugguu

SEQ ID NO: 1283832 - RNA, 19 nt, Artificial Sequence
  Description of Artificial Sequence: Synthetic oligonucleotide
ggccucgcuuagcugggga

SEQ ID NO: 1283833 - RNA, 19 nt, Artificial Sequence
  Description of Artificial Sequence: Synthetic oligonucleotide
gcagauaauuacgguaguu

SEQ ID NO: 1283834 - RNA, 19 nt, Artificial Sequence
  Description of Artificial Sequence: Synthetic oligonucleotide
cacucucgcaggggcucac

SEQ ID NO: 1283835 - RNA, 19 nt, Artificial Sequence
  Description of Artificial Sequence: Synthetic oligonucleotide
ccagaaacaaggucuuguu

SEQ ID NO: 1283836 - RNA, 19 nt, Artificial Sequence
  Description of Artificial Sequence: Synthetic oligonucleotide
ccacaucaaauaccccuaa

SEQ ID NO: 1283837 - RNA, 19 nt, Artificial Sequence
  Description of Artificial Sequence: Synthetic oligonucleotide
ggggaccguucccucuuca

SEQ ID NO: 1283838 - RNA, 19 nt, Artificial Sequence
  Description of Artificial Sequence: Synthetic oligonucleotide
gcuuagcuggggaccguuc

SEQ ID NO: 1283839 - RNA, 19 nt, Artificial Sequence
  Description of Artificial Sequence: Synthetic oligonucleotide
ccgccucaaaacaguagaa

SEQ ID NO: 1283840 - RNA, 19 nt, Artificial Sequence
  Description of Artificial Sequence: Synthetic oligonucleotide
gcgacguuuccgcuuuccu

SEQ ID NO: 1283841 - RNA, 19 nt, Artificial Sequence
  Description of Artificial Sequence: Synthetic oligonucleotide
ccgcuuuccuuccaccaaa

SEQ ID NO: 1283842 - RNA, 19 nt, Artificial Sequence
  Description of Artificial Sequence: Synthetic oligonucleotide
cugacaccaagaguaccuu

SEQ ID NO: 1283843 - RNA, 19 nt, Artificial Sequence
  Description of Artificial Sequence: Synthetic oligonucleotide
gccauccgcuuauaccacu

SEQ ID NO: 1283844 - RNA, 19 nt, Artificial Sequence
  Description of Artificial Sequence: Synthetic oligonucleotide
gcaggggcucacaaauucu

SEQ ID NO: 1283845 - RNA, 19 nt, Artificial Sequence
  Description of Artificial Sequence: Synthetic oligonucleotide
caccgaggcugggcaugag

SEQ ID NO: 1283846 - RNA, 19 nt, Artificial Sequence
  Description of Artificial Sequence: Synthetic oligonucleotide
cugcgacguuuccgcuuuc

SEQ ID NO: 1283847 - RNA, 19 nt, Artificial Sequence
  Description of Artificial Sequence: Synthetic oligonucleotide
caacaucccgugugauuuu

SEQ ID NO: 1283848 - RNA, 19 nt, Artificial Sequence
  Description of Artificial Sequence: Synthetic oligonucleotide
gcuggggaccguucccucu

SEQ ID NO: 1283849 - RNA, 19 nt, Artificial Sequence
  Description of Artificial Sequence: Synthetic oligonucleotide
cugauguuacugcgacguu

SEQ ID NO: 1283850 - RNA, 19 nt, Artificial Sequence
  Description of Artificial Sequence: Synthetic oligonucleotide
ccguggaagcaugcugcug

SEQ ID NO: 1283851 - RNA, 19 nt, Artificial Sequence
  Description of Artificial Sequence: Synthetic oligonucleotide
cuggggaccguucccucuu

SEQ ID NO: 1283852 - RNA, 19 nt, Artificial Sequence
  Description of Artificial Sequence: Synthetic oligonucleotide
ggaugacugccauccgcuu

SEQ ID NO: 1283853 - RNA, 19 nt, Artificial Sequence
  Description of Artificial Sequence: Synthetic oligonucleotide
gcaccgaggcugggcauga

SEQ ID NO: 1283854 - RNA, 19 nt, Artificial Sequence
  Description of Artificial Sequence: Synthetic oligonucleotide
caucaucgaagagcagcuu

SEQ ID NO: 1283855 - RNA, 19 nt, Artificial Sequence
  Description of Artificial Sequence: Synthetic oligonucleotide
cgugugauuuucccagagu

SEQ ID NO: 1283856 - RNA, 19 nt, Artificial Sequence
  Description of Artificial Sequence: Synthetic oligonucleotide
ccacuccugcacugaaaua

SEQ ID NO: 1283857 - RNA, 19 nt, Artificial Sequence
  Description of Artificial Sequence: Synthetic oligonucleotide
ccgcuuauaccacuuccuu

SEQ ID NO: 1283858 - RNA, 19 nt, Artificial Sequence
  Description of Artificial Sequence: Synthetic oligonucleotide
cgcuuauaccacuuccuuu

SEQ ID NO: 1283859 - RNA, 19 nt, Artificial Sequence
  Description of Artificial Sequence: Synthetic oligonucleotide
ccauccgcuuauaccacuu

SEQ ID NO: 1283860 - RNA, 19 nt, Artificial Sequence
  Description of Artificial Sequence: Synthetic oligonucleotide
ccaaauuaucuaggcugau

SEQ ID NO: 1283861 - RNA, 19 nt, Artificial Sequence
  Description of Artificial Sequence: Synthetic oligonucleotide
cccguggaagcaugcugcu

SEQ ID NO: 1283862 - RNA, 19 nt, Artificial Sequence
  Description of Artificial Sequence: Synthetic oligonucleotide
cgacguuuccgcuuuccuu

SEQ ID NO: 1283863 - RNA, 19 nt, Artificial Sequence
  Description of Artificial Sequence: Synthetic oligonucleotide
ccagggguauagggucaca

SEQ ID NO: 1283864 - RNA, 19 nt, Artificial Sequence
  Description of Artificial Sequence: Synthetic oligonucleotide
ccacucucgcaggggcuca

SEQ ID NO: 1283865 - RNA, 19 nt, Artificial Sequence
  Description of Artificial Sequence: Synthetic oligonucleotide
ggagcccgacaaagcuauu

SEQ ID NO: 1283866 - RNA, 19 nt, Artificial Sequence
  Description of Artificial Sequence: Synthetic oligonucleotide
cggguucgacaaugcugau

SEQ ID NO: 1283867 - RNA, 19 nt, Artificial Sequence
  Description of Artificial Sequence: Synthetic oligonucleotide
cgcuuagcuggggaccguu

SEQ ID NO: 1283868 - RNA, 19 nt, Artificial Sequence
  Description of Artificial Sequence: Synthetic oligonucleotide
agaaauaucagucacacaa

SEQ ID NO: 1283869 - RNA, 19 nt, Artificial Sequence
  Description of Artificial Sequence: Synthetic oligonucleotide
uucucaaugacuucaauag

SEQ ID NO: 1283870 - RNA, 19 nt, Artificial Sequence
  Description of Artificial Sequence: Synthetic oligonucleotide
aaaagaauccccaaaagug

SEQ ID NO: 1283871 - RNA, 19 nt, Artificial Sequence
  Description of Artificial Sequence: Synthetic oligonucleotide
uuuaagaugggcuugugca

SEQ ID NO: 1283872 - RNA, 19 nt, Artificial Sequence
  Description of Artificial Sequence: Synthetic oligonucleotide
aauucaggacagcaaagac

SEQ ID NO: 1283873 - RNA, 19 nt, Artificial Sequence
  Description of Artificial Sequence: Synthetic oligonucleotide
aagaugagaaauaucaguc

SEQ ID NO: 1283874 - RNA, 19 nt, Artificial Sequence
  Description of Artificial Sequence: Synthetic oligonucleotide
uuuaguacagccauucucu

SEQ ID NO: 1283875 - RNA, 19 nt, Artificial Sequence
  Description of Artificial Sequence: Synthetic oligonucleotide
uugccuacaaucuuuauug

SEQ ID NO: 1283876 - RNA, 19 nt, Artificial Sequence
  Description of Artificial Sequence: Synthetic oligonucleotide
guaaccauaggccaaaccc

SEQ ID NO: 1283877 - RNA, 19 nt, Artificial Sequence
  Description of Artificial Sequence: Synthetic oligonucleotide
aagacuagcugcuuccugg

SEQ ID NO: 1283878 - RNA, 19 nt, Artificial Sequence
  Description of Artificial Sequence: Synthetic oligonucleotide
agaguuguaaccauaggcc

SEQ ID NO: 1283879 - RNA, 19 nt, Artificial Sequence
  Description of Artificial Sequence: Synthetic oligonucleotide
uuucucuaauuucagguag

SEQ ID NO: 1283880 - RNA, 19 nt, Artificial Sequence
  Description of Artificial Sequence: Synthetic oligonucleotide
accagaguagcuuucaagg

SEQ ID NO: 1283881 - RNA, 19 nt, Artificial Sequence
  Description of Artificial Sequence: Synthetic oligonucleotide
aaucccaguaguuucuuag

SEQ ID NO: 1283882 - RNA, 19 nt, Artificial Sequence
  Description of Artificial Sequence: Synthetic oligonucleotide
gagaguuguaaccauaggc

SEQ ID NO: 1283883 - RNA, 19 nt, Artificial Sequence
  Description of Artificial Sequence: Synthetic oligonucleotide
ucucauauucaguaaauga

SEQ ID NO: 1283884 - RNA, 19 nt, Artificial Sequence
  Description of Artificial Sequence: Synthetic oligonucleotide
cauacugagaguuguaacc

SEQ ID NO: 1283885 - RNA, 19 nt, Artificial Sequence
  Description of Artificial Sequence: Synthetic oligonucleotide
cacaauuugacgaggaagc

SEQ ID NO: 1283886 - RNA, 19 nt, Artificial Sequence
  Description of Artificial Sequence: Synthetic oligonucleotide
aauucucagauucaacacu

SEQ ID NO: 1283887 - RNA, 19 nt, Artificial Sequence
  Description of Artificial Sequence: Synthetic oligonucleotide
aacacuaacuucuccaagu

SEQ ID NO: 1283888 - RNA, 19 nt, Artificial Sequence
  Description of Artificial Sequence: Synthetic oligonucleotide
aacuucuccaaguuuaaga

SEQ ID NO: 1283889 - RNA, 19 nt, Artificial Sequence
  Description of Artificial Sequence: Synthetic oligonucleotide
aauagauuugccaaacugu

SEQ ID NO: 1283890 - RNA, 19 nt, Artificial Sequence
  Description of Artificial Sequence: Synthetic oligonucleotide
ucagauucaacacuaacuu

SEQ ID NO: 1283891 - RNA, 19 nt, Artificial Sequence
  Description of Artificial Sequence: Synthetic oligonucleotide
uaggagugaaaccugaaga

SEQ ID NO: 1283892 - RNA, 19 nt, Artificial Sequence
  Description of Artificial Sequence: Synthetic oligonucleotide
uacuucuuaccuaaaagac

SEQ ID NO: 1283893 - RNA, 19 nt, Artificial Sequence
  Description of Artificial Sequence: Synthetic oligonucleotide
aauuucagguagcaguucu

SEQ ID NO: 1283894 - RNA, 19 nt, Artificial Sequence
  Description of Artificial Sequence: Synthetic oligonucleotide
ucagucacacaauuugacg

SEQ ID NO: 1283895 - RNA, 19 nt, Artificial Sequence
  Description of Artificial Sequence: Synthetic oligonucleotide
caagaaccgauucaguugg

SEQ ID NO: 1283896 - RNA, 19 nt, Artificial Sequence
  Description of Artificial Sequence: Synthetic oligonucleotide
augcauuaacagcugaugg

SEQ ID NO: 1283897 - RNA, 19 nt, Artificial Sequence
  Description of Artificial Sequence: Synthetic oligonucleotide
uucaacacuaacuucucca

SEQ ID NO: 1283898 - RNA, 19 nt, Artificial Sequence
  Description of Artificial Sequence: Synthetic oligonucleotide
ucaagaaccgauucaguug

SEQ ID NO: 1283899 - RNA, 19 nt, Artificial Sequence
  Description of Artificial Sequence: Synthetic oligonucleotide
uucacuauccacauccaga

SEQ ID NO: 1283900 - RNA, 19 nt, Artificial Sequence
  Description of Artificial Sequence: Synthetic oligonucleotide
acuucaauagauuugccaa

SEQ ID NO: 1283901 - RNA, 19 nt, Artificial Sequence
  Description of Artificial Sequence: Synthetic oligonucleotide
uuugucgucgucuucugag

SEQ ID NO: 1283902 - RNA, 19 nt, Artificial Sequence
  Description of Artificial Sequence: Synthetic oligonucleotide
auuaacagcugauggaaug

SEQ ID NO: 1283903 - RNA, 19 nt, Artificial Sequence
  Description of Artificial Sequence: Synthetic oligonucleotide
aaugcauuaacagcugaug

SEQ ID NO: 1283904 - RNA, 19 nt, Artificial Sequence
  Description of Artificial Sequence: Synthetic oligonucleotide
aguacagccauucucuucu

SEQ ID NO: 1283905 - RNA, 19 nt, Artificial Sequence
  Description of Artificial Sequence: Synthetic oligonucleotide
auuagcuguuucuccauac

SEQ ID NO: 1283906 - RNA, 19 nt, Artificial Sequence
  Description of Artificial Sequence: Synthetic oligonucleotide
uuugcuaaauccagcauau

SEQ ID NO: 1283907 - RNA, 19 nt, Artificial Sequence
  Description of Artificial Sequence: Synthetic oligonucleotide
uucuuggaggcuuagacaa

SEQ ID NO: 1283908 - RNA, 19 nt, Artificial Sequence
  Description of Artificial Sequence: Synthetic oligonucleotide
uguaguugcagacuccacu

SEQ ID NO: 1283909 - RNA, 19 nt, Artificial Sequence
  Description of Artificial Sequence: Synthetic oligonucleotide
agacuauccacuuuaucug

SEQ ID NO: 1283910 - RNA, 19 nt, Artificial Sequence
  Description of Artificial Sequence: Synthetic oligonucleotide
gauggaaugucucccauca

SEQ ID NO: 1283911 - RNA, 19 nt, Artificial Sequence
  Description of Artificial Sequence: Synthetic oligonucleotide
ucuacaugcacuccuucca

SEQ ID NO: 1283912 - RNA, 19 nt, Artificial Sequence
  Description of Artificial Sequence: Synthetic oligonucleotide
auucaguugguguuucuuc

SEQ ID NO: 1283913 - RNA, 19 nt, Artificial Sequence
  Description of Artificial Sequence: Synthetic oligonucleotide
uaauucucagauucaacac

SEQ ID NO: 1283914 - RNA, 19 nt, Artificial Sequence
  Description of Artificial Sequence: Synthetic oligonucleotide
aacaugcagugcuuucuac

SEQ ID NO: 1283915 - RNA, 19 nt, Artificial Sequence
  Description of Artificial Sequence: Synthetic oligonucleotide
auucaacacuaacuucucc

SEQ ID NO: 1283916 - RNA, 19 nt, Artificial Sequence
  Description of Artificial Sequence: Synthetic oligonucleotide
auaggccaaacccaacugg

SEQ ID NO: 1283917 - RNA, 19 nt, Artificial Sequence
  Description of Artificial Sequence: Synthetic oligonucleotide
aaugucucccaucaccaga

SEQ ID NO: 1283918 - RNA, 19 nt, Artificial Sequence
  Description of Artificial Sequence: Synthetic oligonucleotide
uaaccauaggccaaaccca

SEQ ID NO: 1283919 - RNA, 19 nt, Artificial Sequence
  Description of Artificial Sequence: Synthetic oligonucleotide
uuaagaugggcuugugcag

SEQ ID NO: 1283920 - RNA, 19 nt, Artificial Sequence
  Description of Artificial Sequence: Synthetic oligonucleotide
uucuaccaaagauucaucu

SEQ ID NO: 1283921 - RNA, 19 nt, Artificial Sequence
  Description of Artificial Sequence: Synthetic oligonucleotide
ucaauuuugucagcggaag

SEQ ID NO: 1283922 - RNA, 19 nt, Artificial Sequence
  Description of Artificial Sequence: Synthetic oligonucleotide
uagacaagccugaaacucc

SEQ ID NO: 1283923 - RNA, 19 nt, Artificial Sequence
  Description of Artificial Sequence: Synthetic oligonucleotide
ucacuauccacauccagac

SEQ ID NO: 1283924 - RNA, 19 nt, Artificial Sequence
  Description of Artificial Sequence: Synthetic oligonucleotide
aaaaugaucuuugcuaaau

SEQ ID NO: 1283925 - RNA, 19 nt, Artificial Sequence
  Description of Artificial Sequence: Synthetic oligonucleotide
ugauccuucagccucuuuc

SEQ ID NO: 1283926 - RNA, 19 nt, Artificial Sequence
  Description of Artificial Sequence: Synthetic oligonucleotide
ugcauuaacagcugaugga

SEQ ID NO: 1283927 - RNA, 19 nt, Artificial Sequence
  Description of Artificial Sequence: Synthetic oligonucleotide
ugagaguuguaaccauagg

SEQ ID NO: 1283928 - RNA, 19 nt, Artificial Sequence
  Description of Artificial Sequence: Synthetic oligonucleotide
uaucagucacacaauuuga

SEQ ID NO: 1283929 - RNA, 19 nt, Artificial Sequence
  Description of Artificial Sequence: Synthetic oligonucleotide
uuagacaagccugaaacuc

SEQ ID NO: 1283930 - RNA, 19 nt, Artificial Sequence
  Description of Artificial Sequence: Synthetic oligonucleotide
aacucuccaccagaguagc

SEQ ID NO: 1283931 - RNA, 19 nt, Artificial Sequence
  Description of Artificial Sequence: Synthetic oligonucleotide
ucuguccuaaucccaguag

SEQ ID NO: 1283932 - RNA, 19 nt, Artificial Sequence
  Description of Artificial Sequence: Synthetic oligonucleotide
gcuuagacaagccugaaac

SEQ ID NO: 1283933 - RNA, 19 nt, Artificial Sequence
  Description of Artificial Sequence: Synthetic oligonucleotide
cagaguagcuuucaaggcc

SEQ ID NO: 1283934 - RNA, 19 nt, Artificial Sequence
  Description of Artificial Sequence: Synthetic oligonucleotide
aucaccagauguuucuguc

SEQ ID NO: 1283935 - RNA, 19 nt, Artificial Sequence
  Description of Artificial Sequence: Synthetic oligonucleotide
gacagcaaagacuuacuca

SEQ ID NO: 1283936 - RNA, 19 nt, Artificial Sequence
  Description of Artificial Sequence: Synthetic oligonucleotide
aacuucauuucuacugggg

SEQ ID NO: 1283937 - RNA, 19 nt, Artificial Sequence
  Description of Artificial Sequence: Synthetic oligonucleotide
uucucuaauuucagguagc

SEQ ID NO: 1283938 - RNA, 19 nt, Artificial Sequence
  Description of Artificial Sequence: Synthetic oligonucleotide
acacaauuugacgaggaag

SEQ ID NO: 1283939 - RNA, 19 nt, Artificial Sequence
  Description of Artificial Sequence: Synthetic oligonucleotide
cugagaguuguaaccauag

SEQ ID NO: 1283940 - RNA, 19 nt, Artificial Sequence
  Description of Artificial Sequence: Synthetic oligonucleotide
agaacucuccaccagagua

SEQ ID NO: 1283941 - RNA, 19 nt, Artificial Sequence
  Description of Artificial Sequence: Synthetic oligonucleotide
uucaagaaccgauucaguu

SEQ ID NO: 1283942 - RNA, 19 nt, Artificial Sequence
  Description of Artificial Sequence: Synthetic oligonucleotide
auagauuugccaaacugug

SEQ ID NO: 1283943 - RNA, 19 nt, Artificial Sequence
  Description of Artificial Sequence: Synthetic oligonucleotide
cauguuuucugaaacuuca

SEQ ID NO: 1283944 - RNA, 19 nt, Artificial Sequence
  Description of Artificial Sequence: Synthetic oligonucleotide
uucaauuuugucagcggaa

SEQ ID NO: 1283945 - RNA, 19 nt, Artificial Sequence
  Description of Artificial Sequence: Synthetic oligonucleotide
ucaucugcucauuuaguac

SEQ ID NO: 1283946 - RNA, 19 nt, Artificial Sequence
  Description of Artificial Sequence: Synthetic oligonucleotide
uguaaccauaggccaaacc

SEQ ID NO: 1283947 - RNA, 19 nt, Artificial Sequence
  Description of Artificial Sequence: Synthetic oligonucleotide
guaguugcagacuccacug

SEQ ID NO: 1283948 - RNA, 19 nt, Artificial Sequence
  Description of Artificial Sequence: Synthetic oligonucleotide
aagacuuacucaggcacag

SEQ ID NO: 1283949 - RNA, 19 nt, Artificial Sequence
  Description of Artificial Sequence: Synthetic oligonucleotide
cuucuuaccuaaaagacua

SEQ ID NO: 1283950 - RNA, 19 nt, Artificial Sequence
  Description of Artificial Sequence: Synthetic oligonucleotide
cuacauucccacuacgcug

SEQ ID NO: 1283951 - RNA, 19 nt, Artificial Sequence
  Description of Artificial Sequence: Synthetic oligonucleotide
aguugcagacuccacuguc

SEQ ID NO: 1283952 - RNA, 19 nt, Artificial Sequence
  Description of Artificial Sequence: Synthetic oligonucleotide
ucccucuuaacaugcagug

SEQ ID NO: 1283953 - RNA, 19 nt, Artificial Sequence
  Description of Artificial Sequence: Synthetic oligonucleotide
auuucuacuggggacagca

SEQ ID NO: 1283954 - RNA, 19 nt, Artificial Sequence
  Description of Artificial Sequence: Synthetic oligonucleotide
ugcuuucuacuguaguugc

SEQ ID NO: 1283955 - RNA, 19 nt, Artificial Sequence
  Description of Artificial Sequence: Synthetic oligonucleotide
aucuacauuaucauuauuu

SEQ ID NO: 1283956 - RNA, 19 nt, Artificial Sequence
  Description of Artificial Sequence: Synthetic oligonucleotide
cuaggagugaaaccugaag

SEQ ID NO: 1283957 - RNA, 19 nt, Artificial Sequence
  Description of Artificial Sequence: Synthetic oligonucleotide
gaguuguaaccauaggcca

SEQ ID NO: 1283958 - RNA, 19 nt, Artificial Sequence
  Description of Artificial Sequence: Synthetic oligonucleotide
gguagugagucucugcuag

SEQ ID NO: 1283959 - RNA, 19 nt, Artificial Sequence
  Description of Artificial Sequence: Synthetic oligonucleotide
caugcagugcuuucuacug

SEQ ID NO: 1283960 - RNA, 19 nt, Artificial Sequence
  Description of Artificial Sequence: Synthetic oligonucleotide
uuaacaugcagugcuuucu

SEQ ID NO: 1283961 - RNA, 19 nt, Artificial Sequence
  Description of Artificial Sequence: Synthetic oligonucleotide
auucaguaaaugauccuuc

SEQ ID NO: 1283962 - RNA, 19 nt, Artificial Sequence
  Description of Artificial Sequence: Synthetic oligonucleotide
uuagcuucacuauccacau

SEQ ID NO: 1283963 - RNA, 19 nt, Artificial Sequence
  Description of Artificial Sequence: Synthetic oligonucleotide
agcuacauucccacuacgc

SEQ ID NO: 1283964 - RNA, 19 nt, Artificial Sequence
  Description of Artificial Sequence: Synthetic oligonucleotide
uucucauauucaguaaaug

SEQ ID NO: 1283965 - RNA, 19 nt, Artificial Sequence
  Description of Artificial Sequence: Synthetic oligonucleotide
ugacgaggaagcaccaucu

SEQ ID NO: 1283966 - RNA, 19 nt, Artificial Sequence
  Description of Artificial Sequence: Synthetic oligonucleotide
ucaucauacugagaguugu

SEQ ID NO: 1283967 - RNA, 19 nt, Artificial Sequence
  Description of Artificial Sequence: Synthetic oligonucleotide
ucugcucccucuuaacaug

SEQ ID NO: 1283968 - RNA, 19 nt, Artificial Sequence
  Description of Artificial Sequence: Synthetic oligonucleotide
uugacgaggaagcaccauc

SEQ ID NO: 1283969 - RNA, 19 nt, Artificial Sequence
  Description of Artificial Sequence: Synthetic oligonucleotide
aggaagcaccaucuguugg

SEQ ID NO: 1283970 - RNA, 19 nt, Artificial Sequence
  Description of Artificial Sequence: Synthetic oligonucleotide
auauucaguaaaugauccu

SEQ ID NO: 1283971 - RNA, 19 nt, Artificial Sequence
  Description of Artificial Sequence: Synthetic oligonucleotide
uccuaaucccaguaguuuc

SEQ ID NO: 1283972 - RNA, 19 nt, Artificial Sequence
  Description of Artificial Sequence: Synthetic oligonucleotide
cuagcugcuuccuggaaug

SEQ ID NO: 1283973 - RNA, 19 nt, Artificial Sequence
  Description of Artificial Sequence: Synthetic oligonucleotide
guuucuuagcuucacuauc

SEQ ID NO: 1283974 - RNA, 19 nt, Artificial Sequence
  Description of Artificial Sequence: Synthetic oligonucleotide
cuaaauccagcauauccca

SEQ ID NO: 1283975 - RNA, 19 nt, Artificial Sequence
  Description of Artificial Sequence: Synthetic oligonucleotide
uuuaucugaagagguagaa

SEQ ID NO: 1283976 - RNA, 19 nt, Artificial Sequence
  Description of Artificial Sequence: Synthetic oligonucleotide
gagugaaaccugaagaaga

SEQ ID NO: 1283977 - RNA, 19 nt, Artificial Sequence
  Description of Artificial Sequence: Synthetic oligonucleotide
ucccaguaguuucuuagcu

SEQ ID NO: 1283978 - RNA, 19 nt, Artificial Sequence
  Description of Artificial Sequence: Synthetic oligonucleotide
ucaucuacauuaucauuau

SEQ ID NO: 1283979 - RNA, 19 nt, Artificial Sequence
  Description of Artificial Sequence: Synthetic oligonucleotide
ugucgucgucuucugagcc

SEQ ID NO: 1283980 - RNA, 19 nt, Artificial Sequence
  Description of Artificial Sequence: Synthetic oligonucleotide
ucugcuaggagacggucau

SEQ ID NO: 1283981 - RNA, 19 nt, Artificial Sequence
  Description of Artificial Sequence: Synthetic oligonucleotide
aaccgauucaguugguguu

SEQ ID NO: 1283982 - RNA, 19 nt, Artificial Sequence
  Description of Artificial Sequence: Synthetic oligonucleotide
cagucacacaauuugacga

SEQ ID NO: 1283983 - RNA, 19 nt, Artificial Sequence
  Description of Artificial Sequence: Synthetic oligonucleotide
uccuuugccgagcuuucag

SEQ ID NO: 1283984 - RNA, 19 nt, Artificial Sequence
  Description of Artificial Sequence: Synthetic oligonucleotide
ccaaauacuguucuuggag

SEQ ID NO: 1283985 - RNA, 19 nt, Artificial Sequence
  Description of Artificial Sequence: Synthetic oligonucleotide
acuaacuucuccaaguuua

SEQ ID NO: 1283986 - RNA, 19 nt, Artificial Sequence
  Description of Artificial Sequence: Synthetic oligonucleotide
uuucaagaaccgauucagu

SEQ ID NO: 1283987 - RNA, 19 nt, Artificial Sequence
  Description of Artificial Sequence: Synthetic oligonucleotide
uagcuguugccuacaaucu

SEQ ID NO: 1283988 - RNA, 19 nt, Artificial Sequence
  Description of Artificial Sequence: Synthetic oligonucleotide
ucuuucagcuccucaauuu

SEQ ID NO: 1283989 - RNA, 19 nt, Artificial Sequence
  Description of Artificial Sequence: Synthetic oligonucleotide
ugaggcaccagcuccacua

SEQ ID NO: 1283990 - RNA, 19 nt, Artificial Sequence
  Description of Artificial Sequence: Synthetic oligonucleotide
ucuaccaaagauucaucuu

SEQ ID NO: 1283991 - RNA, 19 nt, Artificial Sequence
  Description of Artificial Sequence: Synthetic oligonucleotide
agccaucaaagccuuagcu

SEQ ID NO: 1283992 - RNA, 19 nt, Artificial Sequence
  Description of Artificial Sequence: Synthetic oligonucleotide
uucuuaccuaaaagacuag

SEQ ID NO: 1283993 - RNA, 19 nt, Artificial Sequence
  Description of Artificial Sequence: Synthetic oligonucleotide
gaauucaggacagcaaaga

SEQ ID NO: 1283994 - RNA, 19 nt, Artificial Sequence
  Description of Artificial Sequence: Synthetic oligonucleotide
ucaaagccuuagcuguugc

SEQ ID NO: 1283995 - RNA, 19 nt, Artificial Sequence
  Description of Artificial Sequence: Synthetic oligonucleotide
aauaucagucacacaauuu

SEQ ID NO: 1283996 - RNA, 19 nt, Artificial Sequence
  Description of Artificial Sequence: Synthetic oligonucleotide
ugauucucagccucagccu

SEQ ID NO: 1283997 - RNA, 19 nt, Artificial Sequence
  Description of Artificial Sequence: Synthetic oligonucleotide
gaacucuccaccagaguag

SEQ ID NO: 1283998 - RNA, 19 nt, Artificial Sequence
  Description of Artificial Sequence: Synthetic oligonucleotide
aaagacuuacucaggcaca

SEQ ID NO: 1283999 - RNA, 19 nt, Artificial Sequence
  Description of Artificial Sequence: Synthetic oligonucleotide
agcuuucaaggccaguuca

SEQ ID NO: 1284000 - RNA, 19 nt, Artificial Sequence
  Description of Artificial Sequence: Synthetic oligonucleotide
uucauguuuucugaaacuu

SEQ ID NO: 1284001 - RNA, 19 nt, Artificial Sequence
  Description of Artificial Sequence: Synthetic oligonucleotide
cuauccacuuuaucugaag

SEQ ID NO: 1284002 - RNA, 19 nt, Artificial Sequence
  Description of Artificial Sequence: Synthetic oligonucleotide
aaguuuaagaugggcuugu

SEQ ID NO: 1284003 - RNA, 19 nt, Artificial Sequence
  Description of Artificial Sequence: Synthetic oligonucleotide
agucucugcuaggagacgg

SEQ ID NO: 1284004 - RNA, 19 nt, Artificial Sequence
  Description of Artificial Sequence: Synthetic oligonucleotide
uuucuccauacuucuuacc

SEQ ID NO: 1284005 - RNA, 19 nt, Artificial Sequence
  Description of Artificial Sequence: Synthetic oligonucleotide
auacugagaguuguaacca

SEQ ID NO: 1284006 - RNA, 19 nt, Artificial Sequence
  Description of Artificial Sequence: Synthetic oligonucleotide
cauuauuuucuaccaaaga

SEQ ID NO: 1284007 - RNA, 19 nt, Artificial Sequence
  Description of Artificial Sequence: Synthetic oligonucleotide
ucuguggccaucguucccc

SEQ ID NO: 1284008 - RNA, 19 nt, Artificial Sequence
  Description of Artificial Sequence: Synthetic oligonucleotide
cuacuggcaaucauggaga

SEQ ID NO: 1284009 - RNA, 19 nt, Artificial Sequence
  Description of Artificial Sequence: Synthetic oligonucleotide
cuccauucagcucuggcuc

SEQ ID NO: 1284010 - RNA, 19 nt, Artificial Sequence
  Description of Artificial Sequence: Synthetic oligonucleotide
cucagauucaacacuaacu

SEQ ID NO: 1284011 - RNA, 19 nt, Artificial Sequence
  Description of Artificial Sequence: Synthetic oligonucleotide
ucuuagcuucacuauccac

SEQ ID NO: 1284012 - RNA, 19 nt, Artificial Sequence
  Description of Artificial Sequence: Synthetic oligonucleotide
gaaugucucccaucaccag

SEQ ID NO: 1284013 - RNA, 19 nt, Artificial Sequence
  Description of Artificial Sequence: Synthetic oligonucleotide
ugguguuucuucagccuug

SEQ ID NO: 1284014 - RNA, 19 nt, Artificial Sequence
  Description of Artificial Sequence: Synthetic oligonucleotide
uucugacaagaugagaaau

SEQ ID NO: 1284015 - RNA, 19 nt, Artificial Sequence
  Description of Artificial Sequence: Synthetic oligonucleotide
caugggcuuccaaauacug

SEQ ID NO: 1284016 - RNA, 19 nt, Artificial Sequence
  Description of Artificial Sequence: Synthetic oligonucleotide
ucuuugcuaaauccagcau

SEQ ID NO: 1284017 - RNA, 19 nt, Artificial Sequence
  Description of Artificial Sequence: Synthetic oligonucleotide
ucccucgggagaaagguuc

SEQ ID NO: 1284018 - RNA, 19 nt, Artificial Sequence
  Description of Artificial Sequence: Synthetic oligonucleotide
uucugcucccucuuaacau

SEQ ID NO: 1284019 - RNA, 19 nt, Artificial Sequence
  Description of Artificial Sequence: Synthetic oligonucleotide
uacuguaguugcagacucc

SEQ ID NO: 1284020 - RNA, 19 nt, Artificial Sequence
  Description of Artificial Sequence: Synthetic oligonucleotide
cuuguuuucaagaaccgau

SEQ ID NO: 1284021 - RNA, 19 nt, Artificial Sequence
  Description of Artificial Sequence: Synthetic oligonucleotide
gcuuggauauaauucucag

SEQ ID NO: 1284022 - RNA, 19 nt, Artificial Sequence
  Description of Artificial Sequence: Synthetic oligonucleotide
caaguuuaagaugggcuug

SEQ ID NO: 1284023 - RNA, 19 nt, Artificial Sequence
  Description of Artificial Sequence: Synthetic oligonucleotide
uguccuaaucccaguaguu

SEQ ID NO: 1284024 - RNA, 19 nt, Artificial Sequence
  Description of Artificial Sequence: Synthetic oligonucleotide
acuagcugcuuccuggaau

SEQ ID NO: 1284025 - RNA, 19 nt, Artificial Sequence
  Description of Artificial Sequence: Synthetic oligonucleotide
cagauucaacacuaacuuc

SEQ ID NO: 1284026 - RNA, 19 nt, Artificial Sequence
  Description of Artificial Sequence: Synthetic oligonucleotide
uugucgucgucuucugagc

SEQ ID NO: 1284027 - RNA, 19 nt, Artificial Sequence
  Description of Artificial Sequence: Synthetic oligonucleotide
guagacucuguggccaucg

SEQ ID NO: 1284028 - RNA, 19 nt, Artificial Sequence
  Description of Artificial Sequence: Synthetic oligonucleotide
caauuugacgaggaagcac

SEQ ID NO: 1284029 - RNA, 19 nt, Artificial Sequence
  Description of Artificial Sequence: Synthetic oligonucleotide
caacacuaacuucuccaag

SEQ ID NO: 1284030 - RNA, 19 nt, Artificial Sequence
  Description of Artificial Sequence: Synthetic oligonucleotide
ugcacuccuuccaaggcau

SEQ ID NO: 1284031 - RNA, 19 nt, Artificial Sequence
  Description of Artificial Sequence: Synthetic oligonucleotide
guucuuggaggcuuagaca

SEQ ID NO: 1284032 - RNA, 19 nt, Artificial Sequence
  Description of Artificial Sequence: Synthetic oligonucleotide
uaacaugcagugcuuucua

SEQ ID NO: 1284033 - RNA, 19 nt, Artificial Sequence
  Description of Artificial Sequence: Synthetic oligonucleotide
ucgggagaaagguucugcu

SEQ ID NO: 1284034 - RNA, 19 nt, Artificial Sequence
  Description of Artificial Sequence: Synthetic oligonucleotide
caucguuccccugacgcgg

SEQ ID NO: 1284035 - RNA, 19 nt, Artificial Sequence
  Description of Artificial Sequence: Synthetic oligonucleotide
agaguagcuuucaaggcca

SEQ ID NO: 1284036 - RNA, 19 nt, Artificial Sequence
  Description of Artificial Sequence: Synthetic oligonucleotide
acuguaguugcagacucca

SEQ ID NO: 1284037 - RNA, 19 nt, Artificial Sequence
  Description of Artificial Sequence: Synthetic oligonucleotide
cauuauguacaaaaccacu

SEQ ID NO: 1284038 - RNA, 19 nt, Artificial Sequence
  Description of Artificial Sequence: Synthetic oligonucleotide
cuacaaucuuuauugaagu

SEQ ID NO: 1284039 - RNA, 19 nt, Artificial Sequence
  Description of Artificial Sequence: Synthetic oligonucleotide
gauuugccaaacugugcca

SEQ ID NO: 1284040 - RNA, 19 nt, Artificial Sequence
  Description of Artificial Sequence: Synthetic oligonucleotide
ucuccauucuggccaacuc

SEQ ID NO: 1284041 - RNA, 19 nt, Artificial Sequence
  Description of Artificial Sequence: Synthetic oligonucleotide
aagccagcucuccggcgac

SEQ ID NO: 1284042 - RNA, 19 nt, Artificial Sequence
  Description of Artificial Sequence: Synthetic oligonucleotide
guagugagucucugcuagg

SEQ ID NO: 1284043 - RNA, 19 nt, Artificial Sequence
  Description of Artificial Sequence: Synthetic oligonucleotide
auggaaugucucccaucac

SEQ ID NO: 1284044 - RNA, 19 nt, Artificial Sequence
  Description of Artificial Sequence: Synthetic oligonucleotide
ugguuuucuacuggcaauc

SEQ ID NO: 1284045 - RNA, 19 nt, Artificial Sequence
  Description of Artificial Sequence: Synthetic oligonucleotide
uucuguccuaaucccagua

SEQ ID NO: 1284046 - RNA, 19 nt, Artificial Sequence
  Description of Artificial Sequence: Synthetic oligonucleotide
guugcagacuccacugucc

SEQ ID NO: 1284047 - RNA, 19 nt, Artificial Sequence
  Description of Artificial Sequence: Synthetic oligonucleotide
cagcaaagacuuacucagg

SEQ ID NO: 1284048 - RNA, 19 nt, Artificial Sequence
  Description of Artificial Sequence: Synthetic oligonucleotide
caguugguguuucuucagc

SEQ ID NO: 1284049 - RNA, 19 nt, Artificial Sequence
  Description of Artificial Sequence: Synthetic oligonucleotide
uuugccaaacugugccacu

SEQ ID NO: 1284050 - RNA, 19 nt, Artificial Sequence
  Description of Artificial Sequence: Synthetic oligonucleotide
augcacuccuuccaaggca

SEQ ID NO: 1284051 - RNA, 19 nt, Artificial Sequence
  Description of Artificial Sequence: Synthetic oligonucleotide
gaagccagcucuccggcga

SEQ ID NO: 1284052 - RNA, 19 nt, Artificial Sequence
  Description of Artificial Sequence: Synthetic oligonucleotide
acuuguuuucaagaaccga

SEQ ID NO: 1284053 - RNA, 19 nt, Artificial Sequence
  Description of Artificial Sequence: Synthetic oligonucleotide
uggauauaauucucagauu

SEQ ID NO: 1284054 - RNA, 19 nt, Artificial Sequence
  Description of Artificial Sequence: Synthetic oligonucleotide
ucuuugucgucgucuucug

SEQ ID NO: 1284055 - RNA, 19 nt, Artificial Sequence
  Description of Artificial Sequence: Synthetic oligonucleotide
acuacgcugagacuccuuu

SEQ ID NO: 1284056 - RNA, 19 nt, Artificial Sequence
  Description of Artificial Sequence: Synthetic oligonucleotide
gaaccgauucaguuggugu

SEQ ID NO: 1284057 - RNA, 19 nt, Artificial Sequence
  Description of Artificial Sequence: Synthetic oligonucleotide
gacgcggugggccgguggg

SEQ ID NO: 1284058 - RNA, 19 nt, Artificial Sequence
  Description of Artificial Sequence: Synthetic oligonucleotide
ugccuacaaucuuuauuga

SEQ ID NO: 1284059 - RNA, 19 nt, Artificial Sequence
  Description of Artificial Sequence: Synthetic oligonucleotide
gagacugaggcaccagcuc

SEQ ID NO: 1284060 - RNA, 19 nt, Artificial Sequence
  Description of Artificial Sequence: Synthetic oligonucleotide
cuccauacuucuuaccuaa

SEQ ID NO: 1284061 - RNA, 19 nt, Artificial Sequence
  Description of Artificial Sequence: Synthetic oligonucleotide
ggaggcuuagacaagccug

SEQ ID NO: 1284062 - RNA, 19 nt, Artificial Sequence
  Description of Artificial Sequence: Synthetic oligonucleotide
uaguacagccauucucuuc

SEQ ID NO: 1284063 - RNA, 19 nt, Artificial Sequence
  Description of Artificial Sequence: Synthetic oligonucleotide
caaaaccacuuucccucgg

SEQ ID NO: 1284064 - RNA, 19 nt, Artificial Sequence
  Description of Artificial Sequence: Synthetic oligonucleotide
acacuaacuucuccaaguu

SEQ ID NO: 1284065 - RNA, 19 nt, Artificial Sequence
  Description of Artificial Sequence: Synthetic oligonucleotide
ugugccacugccucaucau

SEQ ID NO: 1284066 - RNA, 19 nt, Artificial Sequence
  Description of Artificial Sequence: Synthetic oligonucleotide
cuccaaguuuaagaugggc

SEQ ID NO: 1284067 - RNA, 19 nt, Artificial Sequence
  Description of Artificial Sequence: Synthetic oligonucleotide
agugaaaccugaagaagaa

SEQ ID NO: 1284068 - RNA, 19 nt, Artificial Sequence
  Description of Artificial Sequence: Synthetic oligonucleotide
acaauuugacgaggaagca

SEQ ID NO: 1284069 - RNA, 19 nt, Artificial Sequence
  Description of Artificial Sequence: Synthetic oligonucleotide
auucucagauucaacacua

SEQ ID NO: 1284070 - RNA, 19 nt, Artificial Sequence
  Description of Artificial Sequence: Synthetic oligonucleotide
uugccaaacugugccacug

SEQ ID NO: 1284071 - RNA, 19 nt, Artificial Sequence
  Description of Artificial Sequence: Synthetic oligonucleotide
ccaucuguugguuuucuac

SEQ ID NO: 1284072 - RNA, 19 nt, Artificial Sequence
  Description of Artificial Sequence: Synthetic oligonucleotide
gcaaucauggagacugagg

SEQ ID NO: 1284073 - RNA, 19 nt, Artificial Sequence
  Description of Artificial Sequence: Synthetic oligonucleotide
agaaccgauucaguuggug

SEQ ID NO: 1284074 - RNA, 19 nt, Artificial Sequence
  Description of Artificial Sequence: Synthetic oligonucleotide
caaaagugacuucccauaa

SEQ ID NO: 1284075 - RNA, 19 nt, Artificial Sequence
  Description of Artificial Sequence: Synthetic oligonucleotide
uuaguacagccauucucuu

SEQ ID NO: 1284076 - RNA, 19 nt, Artificial Sequence
  Description of Artificial Sequence: Synthetic oligonucleotide
gaggcuuagacaagccuga

SEQ ID NO: 1284077 - RNA, 19 nt, Artificial Sequence
  Description of Artificial Sequence: Synthetic oligonucleotide
acauccagacuauccacuu

SEQ ID NO: 1284078 - RNA, 19 nt, Artificial Sequence
  Description of Artificial Sequence: Synthetic oligonucleotide
guaaaugauccuucagccu

SEQ ID NO: 1284079 - RNA, 19 nt, Artificial Sequence
  Description of Artificial Sequence: Synthetic oligonucleotide
cucgggagaaagguucugc

SEQ ID NO: 1284080 - RNA, 19 nt, Artificial Sequence
  Description of Artificial Sequence: Synthetic oligonucleotide
agacuagcugcuuccugga

SEQ ID NO: 1284081 - RNA, 19 nt, Artificial Sequence
  Description of Artificial Sequence: Synthetic oligonucleotide
ccagaguagcuuucaaggc

SEQ ID NO: 1284082 - RNA, 19 nt, Artificial Sequence
  Description of Artificial Sequence: Synthetic oligonucleotide
ucuuaacaugcagugcuuu

SEQ ID NO: 1284083 - RNA, 19 nt, Artificial Sequence
  Description of Artificial Sequence: Synthetic oligonucleotide
uccccucuuccuuugccga

SEQ ID NO: 1284084 - RNA, 19 nt, Artificial Sequence
  Description of Artificial Sequence: Synthetic oligonucleotide
augcagugcuuucuacugu

SEQ ID NO: 1284085 - RNA, 19 nt, Artificial Sequence
  Description of Artificial Sequence: Synthetic oligonucleotide
guuccccugacgcgguggg

SEQ ID NO: 1284086 - RNA, 19 nt, Artificial Sequence
  Description of Artificial Sequence: Synthetic oligonucleotide
ggagaaagguucugcuccc

SEQ ID NO: 1284087 - RNA, 19 nt, Artificial Sequence
  Description of Artificial Sequence: Synthetic oligonucleotide
cuacgcugagacuccuuug

SEQ ID NO: 1284088 - RNA, 19 nt, Artificial Sequence
  Description of Artificial Sequence: Synthetic oligonucleotide
cuaacuucuccaaguuuaa

SEQ ID NO: 1284089 - RNA, 19 nt, Artificial Sequence
  Description of Artificial Sequence: Synthetic oligonucleotide
ggcaguaguggcuguagac

SEQ ID NO: 1284090 - RNA, 19 nt, Artificial Sequence
  Description of Artificial Sequence: Synthetic oligonucleotide
agagcacugccuguggaga

SEQ ID NO: 1284091 - RNA, 19 nt, Artificial Sequence
  Description of Artificial Sequence: Synthetic oligonucleotide
aguuguaaccauaggccaa

SEQ ID NO: 1284092 - RNA, 19 nt, Artificial Sequence
  Description of Artificial Sequence: Synthetic oligonucleotide
uccccugacgcggugggcc

SEQ ID NO: 1284093 - RNA, 19 nt, Artificial Sequence
  Description of Artificial Sequence: Synthetic oligonucleotide
ggcauuucccaacacucca

SEQ ID NO: 1284094 - RNA, 19 nt, Artificial Sequence
  Description of Artificial Sequence: Synthetic oligonucleotide
cagcuacauucccacuacg

SEQ ID NO: 1284095 - RNA, 19 nt, Artificial Sequence
  Description of Artificial Sequence: Synthetic oligonucleotide
guaguggcuguagacucug

SEQ ID NO: 1284096 - RNA, 19 nt, Artificial Sequence
  Description of Artificial Sequence: Synthetic oligonucleotide
cuuagacaagccugaaacu

SEQ ID NO: 1284097 - RNA, 19 nt, Artificial Sequence
  Description of Artificial Sequence: Synthetic oligonucleotide
cugaaacuccuccacagcu

SEQ ID NO: 1284098 - RNA, 19 nt, Artificial Sequence
  Description of Artificial Sequence: Synthetic oligonucleotide
cacugccucaucauacuga

SEQ ID NO: 1284099 - RNA, 19 nt, Artificial Sequence
  Description of Artificial Sequence: Synthetic oligonucleotide
uuucuacuggggacagcau

SEQ ID NO: 1284100 - RNA, 19 nt, Artificial Sequence
  Description of Artificial Sequence: Synthetic oligonucleotide
guuguaaccauaggccaaa

SEQ ID NO: 1284101 - RNA, 19 nt, Artificial Sequence
  Description of Artificial Sequence: Synthetic oligonucleotide
aggcaccagcuccacuagg

SEQ ID NO: 1284102 - RNA, 19 nt, Artificial Sequence
  Description of Artificial Sequence: Synthetic oligonucleotide
gcauaucccaggcaaguuc

SEQ ID NO: 1284103 - RNA, 19 nt, Artificial Sequence
  Description of Artificial Sequence: Synthetic oligonucleotide
uguugccuacaaucuuuau

SEQ ID NO: 1284104 - RNA, 19 nt, Artificial Sequence
  Description of Artificial Sequence: Synthetic oligonucleotide
ugguagugagucucugcua

SEQ ID NO: 1284105 - RNA, 19 nt, Artificial Sequence
  Description of Artificial Sequence: Synthetic oligonucleotide
ggacagcaaagacuuacuc

SEQ ID NO: 1284106 - RNA, 19 nt, Artificial Sequence
  Description of Artificial Sequence: Synthetic oligonucleotide
ugucucccaucaccagaug

SEQ ID NO: 1284107 - RNA, 19 nt, Artificial Sequence
  Description of Artificial Sequence: Synthetic oligonucleotide
cuguaguugcagacuccac

SEQ ID NO: 1284108 - RNA, 19 nt, Artificial Sequence
  Description of Artificial Sequence: Synthetic oligonucleotide
aguuuaagaugggcuugug

SEQ ID NO: 1284109 - RNA, 19 nt, Artificial Sequence
  Description of Artificial Sequence: Synthetic oligonucleotide
aagcaccaucuguugguuu

SEQ ID NO: 1284110 - RNA, 19 nt, Artificial Sequence
  Description of Artificial Sequence: Synthetic oligonucleotide
ggaaugcauuaacagcuga

SEQ ID NO: 1284111 - RNA, 19 nt, Artificial Sequence
  Description of Artificial Sequence: Synthetic oligonucleotide
accauaggccaaacccaac

SEQ ID NO: 1284112 - RNA, 19 nt, Artificial Sequence
  Description of Artificial Sequence: Synthetic oligonucleotide
gcaaagacuuacucaggca

SEQ ID NO: 1284113 - RNA, 19 nt, Artificial Sequence
  Description of Artificial Sequence: Synthetic oligonucleotide
gcggaagccagcucuccgg

SEQ ID NO: 1284114 - RNA, 19 nt, Artificial Sequence
  Description of Artificial Sequence: Synthetic oligonucleotide
uuugacgaggaagcaccau

SEQ ID NO: 1284115 - RNA, 19 nt, Artificial Sequence
  Description of Artificial Sequence: Synthetic oligonucleotide
aggacagcaaagacuuacu

SEQ ID NO: 1284116 - RNA, 19 nt, Artificial Sequence
  Description of Artificial Sequence: Synthetic oligonucleotide
acuguucuuggaggcuuag

SEQ ID NO: 1284117 - RNA, 19 nt, Artificial Sequence
  Description of Artificial Sequence: Synthetic oligonucleotide
uagacucuguggccaucgu

SEQ ID NO: 1284118 - RNA, 19 nt, Artificial Sequence
  Description of Artificial Sequence: Synthetic oligonucleotide
aggcaaguuccagguuccc

SEQ ID NO: 1284119 - RNA, 19 nt, Artificial Sequence
  Description of Artificial Sequence: Synthetic oligonucleotide
gccauucucuucucaauga

SEQ ID NO: 1284120 - RNA, 19 nt, Artificial Sequence
  Description of Artificial Sequence: Synthetic oligonucleotide
gaaugcauuaacagcugau

SEQ ID NO: 1284121 - RNA, 19 nt, Artificial Sequence
  Description of Artificial Sequence: Synthetic oligonucleotide
ucucugcuaggagacgguc

SEQ ID NO: 1284122 - RNA, 19 nt, Artificial Sequence
  Description of Artificial Sequence: Synthetic oligonucleotide
agacucuguggccaucguu

SEQ ID NO: 1284123 - RNA, 19 nt, Artificial Sequence
  Description of Artificial Sequence: Synthetic oligonucleotide
ccauucucuucucaaugac

SEQ ID NO: 1284124 - RNA, 19 nt, Artificial Sequence
  Description of Artificial Sequence: Synthetic oligonucleotide
gaguagcuuucaaggccag

SEQ ID NO: 1284125 - RNA, 19 nt, Artificial Sequence
  Description of Artificial Sequence: Synthetic oligonucleotide
cugacaagaugagaaauau

SEQ ID NO: 1284126 - RNA, 19 nt, Artificial Sequence
  Description of Artificial Sequence: Synthetic oligonucleotide
auuugacgaggaagcacca

SEQ ID NO: 1284127 - RNA, 19 nt, Artificial Sequence
  Description of Artificial Sequence: Synthetic oligonucleotide
ccaucguuccccugacgcg

SEQ ID NO: 1284128 - RNA, 19 nt, Artificial Sequence
  Description of Artificial Sequence: Synthetic oligonucleotide
cuacaugcacuccuuccaa

SEQ ID NO: 1284129 - RNA, 19 nt, Artificial Sequence
  Description of Artificial Sequence: Synthetic oligonucleotide
uggccaucguuccccugac

SEQ ID NO: 1284130 - RNA, 19 nt, Artificial Sequence
  Description of Artificial Sequence: Synthetic oligonucleotide
gcuacauucccacuacgcu

SEQ ID NO: 1284131 - RNA, 19 nt, Artificial Sequence
  Description of Artificial Sequence: Synthetic oligonucleotide
uuguaaccauaggccaaac

SEQ ID NO: 1284132 - RNA, 19 nt, Artificial Sequence
  Description of Artificial Sequence: Synthetic oligonucleotide
acauucccacuacgcugag

SEQ ID NO: 1284133 - RNA, 19 nt, Artificial Sequence
  Description of Artificial Sequence: Synthetic oligonucleotide
cacacaauuugacgaggaa

SEQ ID NO: 1284134 - RNA, 19 nt, Artificial Sequence
  Description of Artificial Sequence: Synthetic oligonucleotide
guagcuuucaaggccaguu

SEQ ID NO: 1284135 - RNA, 19 nt, Artificial Sequence
  Description of Artificial Sequence: Synthetic oligonucleotide
ggaagcaccaucuguuggu

SEQ ID NO: 1284136 - RNA, 19 nt, Artificial Sequence
  Description of Artificial Sequence: Synthetic oligonucleotide
uagcuucacuauccacauc

SEQ ID NO: 1284137 - RNA, 19 nt, Artificial Sequence
  Description of Artificial Sequence: Synthetic oligonucleotide
caccagauguuucuguccu

SEQ ID NO: 1284138 - RNA, 19 nt, Artificial Sequence
  Description of Artificial Sequence: Synthetic oligonucleotide
gcuccacuaggagugaaac

SEQ ID NO: 1284139 - RNA, 19 nt, Artificial Sequence
  Description of Artificial Sequence: Synthetic oligonucleotide
ccucuuaacaugcagugcu

SEQ ID NO: 1284140 - RNA, 19 nt, Artificial Sequence
  Description of Artificial Sequence: Synthetic oligonucleotide
aguagcuuucaaggccagu

SEQ ID NO: 1284141 - RNA, 19 nt, Artificial Sequence
  Description of Artificial Sequence: Synthetic oligonucleotide
acuggcaaucauggagacu

SEQ ID NO: 1284142 - RNA, 19 nt, Artificial Sequence
  Description of Artificial Sequence: Synthetic oligonucleotide
acuaggagugaaaccugaa

SEQ ID NO: 1284143 - RNA, 19 nt, Artificial Sequence
  Description of Artificial Sequence: Synthetic oligonucleotide
ugucagcggaagccagcuc

SEQ ID NO: 1284144 - RNA, 19 nt, Artificial Sequence
  Description of Artificial Sequence: Synthetic oligonucleotide
ccagcauaucccaggcaag

SEQ ID NO: 1284145 - RNA, 19 nt, Artificial Sequence
  Description of Artificial Sequence: Synthetic oligonucleotide
gauucaguugguguuucuu

SEQ ID NO: 1284146 - RNA, 19 nt, Artificial Sequence
  Description of Artificial Sequence: Synthetic oligonucleotide
cauuucuacuggggacagc

SEQ ID NO: 1284147 - RNA, 19 nt, Artificial Sequence
  Description of Artificial Sequence: Synthetic oligonucleotide
caucauacugagaguugua

SEQ ID NO: 1284148 - RNA, 19 nt, Artificial Sequence
  Description of Artificial Sequence: Synthetic oligonucleotide
accgauucaguugguguuu

SEQ ID NO: 1284149 - RNA, 19 nt, Artificial Sequence
  Description of Artificial Sequence: Synthetic oligonucleotide
ugccgagcuuucagccuga

SEQ ID NO: 1284150 - RNA, 19 nt, Artificial Sequence
  Description of Artificial Sequence: Synthetic oligonucleotide
uguagacucuguggccauc

SEQ ID NO: 1284151 - RNA, 19 nt, Artificial Sequence
  Description of Artificial Sequence: Synthetic oligonucleotide
aagaaccgauucaguuggu

SEQ ID NO: 1284152 - RNA, 19 nt, Artificial Sequence
  Description of Artificial Sequence: Synthetic oligonucleotide
agcauaucccaggcaaguu

SEQ ID NO: 1284153 - RNA, 19 nt, Artificial Sequence
  Description of Artificial Sequence: Synthetic oligonucleotide
cauuagcuguuucuccaua

SEQ ID NO: 1284154 - RNA, 19 nt, Artificial Sequence
  Description of Artificial Sequence: Synthetic oligonucleotide
cccacuacgcugagacucc

SEQ ID NO: 1284155 - RNA, 19 nt, Artificial Sequence
  Description of Artificial Sequence: Synthetic oligonucleotide
gacuagcugcuuccuggaa

SEQ ID NO: 1284156 - RNA, 19 nt, Artificial Sequence
  Description of Artificial Sequence: Synthetic oligonucleotide
cauuuaguacagccauucu

SEQ ID NO: 1284157 - RNA, 19 nt, Artificial Sequence
  Description of Artificial Sequence: Synthetic oligonucleotide
agcacugccuguggagaga

SEQ ID NO: 1284158 - RNA, 19 nt, Artificial Sequence
  Description of Artificial Sequence: Synthetic oligonucleotide
ugggcuugugcagcauaaa

SEQ ID NO: 1284159 - RNA, 19 nt, Artificial Sequence
  Description of Artificial Sequence: Synthetic oligonucleotide
agacuuacucaggcacaga

SEQ ID NO: 1284160 - RNA, 19 nt, Artificial Sequence
  Description of Artificial Sequence: Synthetic oligonucleotide
ggccaacuccaaaagugac

SEQ ID NO: 1284161 - RNA, 19 nt, Artificial Sequence
  Description of Artificial Sequence: Synthetic oligonucleotide
ccggcgacggcaguagugg

SEQ ID NO: 1284162 - RNA, 19 nt, Artificial Sequence
  Description of Artificial Sequence: Synthetic oligonucleotide
ccagacuauccacuuuauc

SEQ ID NO: 1284163 - RNA, 19 nt, Artificial Sequence
  Description of Artificial Sequence: Synthetic oligonucleotide
ccacuuuaucugaagaggu

SEQ ID NO: 1284164 - RNA, 19 nt, Artificial Sequence
  Description of Artificial Sequence: Synthetic oligonucleotide
cuguccccucuuccuuugc

SEQ ID NO: 1284165 - RNA, 19 nt, Artificial Sequence
  Description of Artificial Sequence: Synthetic oligonucleotide
ggcuuagacaagccugaaa

SEQ ID NO: 1284166 - RNA, 19 nt, Artificial Sequence
  Description of Artificial Sequence: Synthetic oligonucleotide
gcgacggcaguaguggcug

SEQ ID NO: 1284167 - RNA, 19 nt, Artificial Sequence
  Description of Artificial Sequence: Synthetic oligonucleotide
caaacccaacugguaguga

SEQ ID NO: 1284168 - RNA, 19 nt, Artificial Sequence
  Description of Artificial Sequence: Synthetic oligonucleotide
cccucuuaacaugcagugc

SEQ ID NO: 1284169 - RNA, 19 nt, Artificial Sequence
  Description of Artificial Sequence: Synthetic oligonucleotide
gacggucaugggcuuccaa

SEQ ID NO: 1284170 - RNA, 19 nt, Artificial Sequence
  Description of Artificial Sequence: Synthetic oligonucleotide
aggagacggucaugggcuu

SEQ ID NO: 1284171 - RNA, 19 nt, Artificial Sequence
  Description of Artificial Sequence: Synthetic oligonucleotide
agcuccacuaggagugaaa

SEQ ID NO: 1284172 - RNA, 19 nt, Artificial Sequence
  Description of Artificial Sequence: Synthetic oligonucleotide
gcaguaguggcuguagacu

SEQ ID NO: 1284173 - RNA, 19 nt, Artificial Sequence
  Description of Artificial Sequence: Synthetic oligonucleotide
acgcggugggccggugggc

SEQ ID NO: 1284174 - RNA, 19 nt, Artificial Sequence
  Description of Artificial Sequence: Synthetic oligonucleotide
guccuaaucccaguaguuu

SEQ ID NO: 1284175 - RNA, 19 nt, Artificial Sequence
  Description of Artificial Sequence: Synthetic oligonucleotide
guucagcuacauucccacu

SEQ ID NO: 1284176 - RNA, 19 nt, Artificial Sequence
  Description of Artificial Sequence: Synthetic oligonucleotide
agccagcucuccggcgacg

SEQ ID NO: 1284177 - RNA, 19 nt, Artificial Sequence
  Description of Artificial Sequence: Synthetic oligonucleotide
cuuagcuguugccuacaau

SEQ ID NO: 1284178 - RNA, 19 nt, Artificial Sequence
  Description of Artificial Sequence: Synthetic oligonucleotide
uuccccugacgcggugggc

SEQ ID NO: 1284179 - RNA, 19 nt, Artificial Sequence
  Description of Artificial Sequence: Synthetic oligonucleotide
ggccaucguuccccugacg

SEQ ID NO: 1284180 - RNA, 19 nt, Artificial Sequence
  Description of Artificial Sequence: Synthetic oligonucleotide
ccuaaucccaguaguuucu

SEQ ID NO: 1284181 - RNA, 19 nt, Artificial Sequence
  Description of Artificial Sequence: Synthetic oligonucleotide
ccuccauucagcucuggcu

SEQ ID NO: 1284182 - RNA, 19 nt, Artificial Sequence
  Description of Artificial Sequence: Synthetic oligonucleotide
gccagcucuccggcgacgg

SEQ ID NO: 1284183 - RNA, 19 nt, Artificial Sequence
  Description of Artificial Sequence: Synthetic oligonucleotide
cacugccuguggagagaac

SEQ ID NO: 1284184 - RNA, 19 nt, Artificial Sequence
  Description of Artificial Sequence: Synthetic oligonucleotide
cucuuaacaugcagugcuu

SEQ ID NO: 1284185 - RNA, 19 nt, Artificial Sequence
  Description of Artificial Sequence: Synthetic oligonucleotide
cacuaacuucuccaaguuu

SEQ ID NO: 1284186 - RNA, 19 nt, Artificial Sequence
  Description of Artificial Sequence: Synthetic oligonucleotide
ccauaggccaaacccaacu

SEQ ID NO: 1284187 - RNA, 19 nt, Artificial Sequence
  Description of Artificial Sequence: Synthetic oligonucleotide
aggcuuagacaagccugaa

SEQ ID NO: 1284188 - RNA, 19 nt, Artificial Sequence
  Description of Artificial Sequence: Synthetic oligonucleotide
cugcuaggagacggucaug

SEQ ID NO: 1284189 - RNA, 19 nt, Artificial Sequence
  Description of Artificial Sequence: Synthetic oligonucleotide
acucuccaccagaguagcu

SEQ ID NO: 1284190 - RNA, 19 nt, Artificial Sequence
  Description of Artificial Sequence: Synthetic oligonucleotide
aucguuccccugacgcggu

SEQ ID NO: 1284191 - RNA, 19 nt, Artificial Sequence
  Description of Artificial Sequence: Synthetic oligonucleotide
gacggcaguaguggcugua

SEQ ID NO: 1284192 - RNA, 19 nt, Artificial Sequence
  Description of Artificial Sequence: Synthetic oligonucleotide
cauucccacuacgcugaga

SEQ ID NO: 1284193 - RNA, 19 nt, Artificial Sequence
  Description of Artificial Sequence: Synthetic oligonucleotide
ccccugacgcggugggccg

SEQ ID NO: 1284194 - RNA, 19 nt, Artificial Sequence
  Description of Artificial Sequence: Synthetic oligonucleotide
gucucugcuaggagacggu

SEQ ID NO: 1284195 - RNA, 19 nt, Artificial Sequence
  Description of Artificial Sequence: Synthetic oligonucleotide
ggagacggucaugggcuuc

SEQ ID NO: 1284196 - RNA, 19 nt, Artificial Sequence
  Description of Artificial Sequence: Synthetic oligonucleotide
ggugggccggugggcagag

SEQ ID NO: 1284197 - RNA, 19 nt, Artificial Sequence
  Description of Artificial Sequence: Synthetic oligonucleotide
cguuccccugacgcggugg

SEQ ID NO: 1284198 - RNA, 19 nt, Artificial Sequence
  Description of Artificial Sequence: Synthetic oligonucleotide
ccacuuucccucgggagaa

SEQ ID NO: 1284199 - RNA, 19 nt, Artificial Sequence
  Description of Artificial Sequence: Synthetic oligonucleotide
cccaguaguuucuuagcuu

SEQ ID NO: 1284200 - RNA, 19 nt, Artificial Sequence
  Description of Artificial Sequence: Synthetic oligonucleotide
caggagcaucuucaauuuu

SEQ ID NO: 1284201 - RNA, 19 nt, Artificial Sequence
  Description of Artificial Sequence: Synthetic oligonucleotide
ccuuagcuguugccuacaa

SEQ ID NO: 1284202 - RNA, 19 nt, Artificial Sequence
  Description of Artificial Sequence: Synthetic oligonucleotide
ggcgacggcaguaguggcu

SEQ ID NO: 1284203 - RNA, 19 nt, Artificial Sequence
  Description of Artificial Sequence: Synthetic oligonucleotide
cagcuccacuaggagugaa

SEQ ID NO: 1284204 - RNA, 19 nt, Artificial Sequence
  Description of Artificial Sequence: Synthetic oligonucleotide
gggccggugggcagagcac

SEQ ID NO: 1284205 - RNA, 19 nt, Artificial Sequence
  Description of Artificial Sequence: Synthetic oligonucleotide
cggcgacggcaguaguggc

SEQ ID NO: 1284206 - RNA, 19 nt, Artificial Sequence
  Description of Artificial Sequence: Synthetic oligonucleotide
ggccggugggcagagcacu

SEQ ID NO: 1284207 - RNA, 19 nt, Artificial Sequence
  Description of Artificial Sequence: Synthetic oligonucleotide
cggucaugggcuuccaaau

SEQ ID NO: 1284208 - RNA, 19 nt, Artificial Sequence
  Description of Artificial Sequence: Synthetic oligonucleotide
ccuaaaagacuagcugcuu

SEQ ID NO: 1284209 - RNA, 19 nt, Artificial Sequence
  Description of Artificial Sequence: Synthetic oligonucleotide
cccugacgcggugggccgg

SEQ ID NO: 1284210 - RNA, 19 nt, Artificial Sequence
  Description of Artificial Sequence: Synthetic oligonucleotide
gggcucucuuccucugguu

SEQ ID NO: 1284211 - RNA, 19 nt, Artificial Sequence
  Description of Artificial Sequence: Synthetic oligonucleotide
ccacuacgcugagacuccu

SEQ ID NO: 1284212 - RNA, 19 nt, Artificial Sequence
  Description of Artificial Sequence: Synthetic oligonucleotide
cccaggcaaguuccagguu

SEQ ID NO: 1284213 - RNA, 19 nt, Artificial Sequence
  Description of Artificial Sequence: Synthetic oligonucleotide
ccugacgcggugggccggu

SEQ ID NO: 1284214 - RNA, 19 nt, Artificial Sequence
  Description of Artificial Sequence: Synthetic oligonucleotide
uauuagaucagaacaaaug

SEQ ID NO: 1284215 - RNA, 19 nt, Artificial Sequence
  Description of Artificial Sequence: Synthetic oligonucleotide
aagguggcgaacuucuugc

SEQ ID NO: 1284216 - RNA, 19 nt, Artificial Sequence
  Description of Artificial Sequence: Synthetic oligonucleotide
auuagaucagaacaaauga

SEQ ID NO: 1284217 - RNA, 19 nt, Artificial Sequence
  Description of Artificial Sequence: Synthetic oligonucleotide
agagauacgucucucaauc

SEQ ID NO: 1284218 - RNA, 19 nt, Artificial Sequence
  Description of Artificial Sequence: Synthetic oligonucleotide
ucaauaucaggaauaaaga

SEQ ID NO: 1284219 - RNA, 19 nt, Artificial Sequence
  Description of Artificial Sequence: Synthetic oligonucleotide
uuuguaguaucucaucaag

SEQ ID NO: 1284220 - RNA, 19 nt, Artificial Sequence
  Description of Artificial Sequence: Synthetic oligonucleotide
aaaauaagcaguccguuau

SEQ ID NO: 1284221 - RNA, 19 nt, Artificial Sequence
  Description of Artificial Sequence: Synthetic oligonucleotide
uaguaucucaucaaggagc

SEQ ID NO: 1284222 - RNA, 19 nt, Artificial Sequence
  Description of Artificial Sequence: Synthetic oligonucleotide
uucgauuucauccuuugga

SEQ ID NO: 1284223 - RNA, 19 nt, Artificial Sequence
  Description of Artificial Sequence: Synthetic oligonucleotide
uaagcaguccguuauuggg

SEQ ID NO: 1284224 - RNA, 19 nt, Artificial Sequence
  Description of Artificial Sequence: Synthetic oligonucleotide
gaagcuguggauuuuaguc

SEQ ID NO: 1284225 - RNA, 19 nt, Artificial Sequence
  Description of Artificial Sequence: Synthetic oligonucleotide
uuguaguaucucaucaagg

SEQ ID NO: 1284226 - RNA, 19 nt, Artificial Sequence
  Description of Artificial Sequence: Synthetic oligonucleotide
ucagaaucguacuugggcc

SEQ ID NO: 1284227 - RNA, 19 nt, Artificial Sequence
  Description of Artificial Sequence: Synthetic oligonucleotide
auuuaaucaguccuuucag

SEQ ID NO: 1284228 - RNA, 19 nt, Artificial Sequence
  Description of Artificial Sequence: Synthetic oligonucleotide
aaucguuguuuguaguauc

SEQ ID NO: 1284229 - RNA, 19 nt, Artificial Sequence
  Description of Artificial Sequence: Synthetic oligonucleotide
cauuccaaagucuuauccg

SEQ ID NO: 1284230 - RNA, 19 nt, Artificial Sequence
  Description of Artificial Sequence: Synthetic oligonucleotide
aaaaucauagaagucugca

SEQ ID NO: 1284231 - RNA, 19 nt, Artificial Sequence
  Description of Artificial Sequence: Synthetic oligonucleotide
cucuuggcaagccaaaucg

SEQ ID NO: 1284232 - RNA, 19 nt, Artificial Sequence
  Description of Artificial Sequence: Synthetic oligonucleotide
ucagaacaaaugaaguagc

SEQ ID NO: 1284233 - RNA, 19 nt, Artificial Sequence
  Description of Artificial Sequence: Synthetic oligonucleotide
aggacaacugcucaauuuc

SEQ ID NO: 1284234 - RNA, 19 nt, Artificial Sequence
  Description of Artificial Sequence: Synthetic oligonucleotide
gacggcugggccuugaugg

SEQ ID NO: 1284235 - RNA, 19 nt, Artificial Sequence
  Description of Artificial Sequence: Synthetic oligonucleotide
agcaucuccacuuggcggc

SEQ ID NO: 1284236 - RNA, 19 nt, Artificial Sequence
  Description of Artificial Sequence: Synthetic oligonucleotide
aaggauuucccuuucucgu

SEQ ID NO: 1284237 - RNA, 19 nt, Artificial Sequence
  Description of Artificial Sequence: Synthetic oligonucleotide
gcuucuguggaguagaagg

SEQ ID NO: 1284238 - RNA, 19 nt, Artificial Sequence
  Description of Artificial Sequence: Synthetic oligonucleotide
ugaugggaacaaaauaagc

SEQ ID NO: 1284239 - RNA, 19 nt, Artificial Sequence
  Description of Artificial Sequence: Synthetic oligonucleotide
aucaucgcauuccaaaguc

SEQ ID NO: 1284240 - RNA, 19 nt, Artificial Sequence
  Description of Artificial Sequence: Synthetic oligonucleotide
aaagucuuauccgaggaca

SEQ ID NO: 1284241 - RNA, 19 nt, Artificial Sequence
  Description of Artificial Sequence: Synthetic oligonucleotide
uuggacauacugcaugucc

SEQ ID NO: 1284242 - RNA, 19 nt, Artificial Sequence
  Description of Artificial Sequence: Synthetic oligonucleotide
auaugagccacauucuuca

SEQ ID NO: 1284243 - RNA, 19 nt, Artificial Sequence
  Description of Artificial Sequence: Synthetic oligonucleotide
agauacgucucucaaucuc

SEQ ID NO: 1284244 - RNA, 19 nt, Artificial Sequence
  Description of Artificial Sequence: Synthetic oligonucleotide
ucaucaucgcauuccaaag

SEQ ID NO: 1284245 - RNA, 19 nt, Artificial Sequence
  Description of Artificial Sequence: Synthetic oligonucleotide
cucccaaauauuuaaucag

SEQ ID NO: 1284246 - RNA, 19 nt, Artificial Sequence
  Description of Artificial Sequence: Synthetic oligonucleotide
aagcuguggauuuuaguca

SEQ ID NO: 1284247 - RNA, 19 nt, Artificial Sequence
  Description of Artificial Sequence: Synthetic oligonucleotide
agaaggauuucccuuucuc

SEQ ID NO: 1284248 - RNA, 19 nt, Artificial Sequence
  Description of Artificial Sequence: Synthetic oligonucleotide
aauaagcaguccguuauug

SEQ ID NO: 1284249 - RNA, 19 nt, Artificial Sequence
  Description of Artificial Sequence: Synthetic oligonucleotide
ugcuucgcuaacuucuugg

SEQ ID NO: 1284250 - RNA, 19 nt, Artificial Sequence
  Description of Artificial Sequence: Synthetic oligonucleotide
ugcuuagugguauuguucu

SEQ ID NO: 1284251 - RNA, 19 nt, Artificial Sequence
  Description of Artificial Sequence: Synthetic oligonucleotide
uuucauuaggguccugccc

SEQ ID NO: 1284252 - RNA, 19 nt, Artificial Sequence
  Description of Artificial Sequence: Synthetic oligonucleotide
gaggaaagugcagugagag

SEQ ID NO: 1284253 - RNA, 19 nt, Artificial Sequence
  Description of Artificial Sequence: Synthetic oligonucleotide
auaagcaguccguuauugg

SEQ ID NO: 1284254 - RNA, 19 nt, Artificial Sequence
  Description of Artificial Sequence: Synthetic oligonucleotide
auugcuggaguacccuacc

SEQ ID NO: 1284255 - RNA, 19 nt, Artificial Sequence
  Description of Artificial Sequence: Synthetic oligonucleotide
aacaaaauaagcaguccgu

SEQ ID NO: 1284256 - RNA, 19 nt, Artificial Sequence
  Description of Artificial Sequence: Synthetic oligonucleotide
uuauuagaucagaacaaau

SEQ ID NO: 1284257 - RNA, 19 nt, Artificial Sequence
  Description of Artificial Sequence: Synthetic oligonucleotide
uuauccgaggacaacugcu

SEQ ID NO: 1284258 - RNA, 19 nt, Artificial Sequence
  Description of Artificial Sequence: Synthetic oligonucleotide
agugaugggaacaaaauaa

SEQ ID NO: 1284259 - RNA, 19 nt, Artificial Sequence
  Description of Artificial Sequence: Synthetic oligonucleotide
aguaucucaucaaggagcg

SEQ ID NO: 1284260 - RNA, 19 nt, Artificial Sequence
  Description of Artificial Sequence: Synthetic oligonucleotide
ucguaggcguugaaggugg

SEQ ID NO: 1284261 - RNA, 19 nt, Artificial Sequence
  Description of Artificial Sequence: Synthetic oligonucleotide
uccguuauugggauggcac

SEQ ID NO: 1284262 - RNA, 19 nt, Artificial Sequence
  Description of Artificial Sequence: Synthetic oligonucleotide
ucgauuucauccuuuggac

SEQ ID NO: 1284263 - RNA, 19 nt, Artificial Sequence
  Description of Artificial Sequence: Synthetic oligonucleotide
uguuacagcucuuggcaag

SEQ ID NO: 1284264 - RNA, 19 nt, Artificial Sequence
  Description of Artificial Sequence: Synthetic oligonucleotide
uggaguacccuacccacag

SEQ ID NO: 1284265 - RNA, 19 nt, Artificial Sequence
  Description of Artificial Sequence: Synthetic oligonucleotide
ugcugcuucgcuaacuucu

SEQ ID NO: 1284266 - RNA, 19 nt, Artificial Sequence
  Description of Artificial Sequence: Synthetic oligonucleotide
uuguaaucuggguagcuac

SEQ ID NO: 1284267 - RNA, 19 nt, Artificial Sequence
  Description of Artificial Sequence: Synthetic oligonucleotide
agugcagugagagauacgu

SEQ ID NO: 1284268 - RNA, 19 nt, Artificial Sequence
  Description of Artificial Sequence: Synthetic oligonucleotide
uuggcaagccaaaucguug

SEQ ID NO: 1284269 - RNA, 19 nt, Artificial Sequence
  Description of Artificial Sequence: Synthetic oligonucleotide
uugagugaugggaacaaaa

SEQ ID NO: 1284270 - RNA, 19 nt, Artificial Sequence
  Description of Artificial Sequence: Synthetic oligonucleotide
ugcucaauuucauuagggu

SEQ ID NO: 1284271 - RNA, 19 nt, Artificial Sequence
  Description of Artificial Sequence: Synthetic oligonucleotide
ggauuuuagucauaugagc

SEQ ID NO: 1284272 - RNA, 19 nt, Artificial Sequence
  Description of Artificial Sequence: Synthetic oligonucleotide
gaguacccuacccacagcc

SEQ ID NO: 1284273 - RNA, 19 nt, Artificial Sequence
  Description of Artificial Sequence: Synthetic oligonucleotide
ucuuauccgaggacaacug

SEQ ID NO: 1284274 - RNA, 19 nt, Artificial Sequence
  Description of Artificial Sequence: Synthetic oligonucleotide
agauccauuccacaaucug

SEQ ID NO: 1284275 - RNA, 19 nt, Artificial Sequence
  Description of Artificial Sequence: Synthetic oligonucleotide
uucccuuucucguugcacc

SEQ ID NO: 1284276 - RNA, 19 nt, Artificial Sequence
  Description of Artificial Sequence: Synthetic oligonucleotide
uuugucacucaugugugcc

SEQ ID NO: 1284277 - RNA, 19 nt, Artificial Sequence
  Description of Artificial Sequence: Synthetic oligonucleotide
uguacgucgccauggcggg

SEQ ID NO: 1284278 - RNA, 19 nt, Artificial Sequence
  Description of Artificial Sequence: Synthetic oligonucleotide
uccacuucgauuucauccu

SEQ ID NO: 1284279 - RNA, 19 nt, Artificial Sequence
  Description of Artificial Sequence: Synthetic oligonucleotide
uucucucccaaauauuuaa

SEQ ID NO: 1284280 - RNA, 19 nt, Artificial Sequence
  Description of Artificial Sequence: Synthetic oligonucleotide
auuaggguccugccccucc

SEQ ID NO: 1284281 - RNA, 19 nt, Artificial Sequence
  Description of Artificial Sequence: Synthetic oligonucleotide
ugagagauacgucucucaa

SEQ ID NO: 1284282 - RNA, 19 nt, Artificial Sequence
  Description of Artificial Sequence: Synthetic oligonucleotide
cacaaucuggcuucacugg

SEQ ID NO: 1284283 - RNA, 19 nt, Artificial Sequence
  Description of Artificial Sequence: Synthetic oligonucleotide
uuccaaagucuuauccgag

SEQ ID NO: 1284284 - RNA, 19 nt, Artificial Sequence
  Description of Artificial Sequence: Synthetic oligonucleotide
ugcaccacaagcaaaucuu

SEQ ID NO: 1284285 - RNA, 19 nt, Artificial Sequence
  Description of Artificial Sequence: Synthetic oligonucleotide
uuucagaucugagagguau

SEQ ID NO: 1284286 - RNA, 19 nt, Artificial Sequence
  Description of Artificial Sequence: Synthetic oligonucleotide
aaaucguuguuuguaguau

SEQ ID NO: 1284287 - RNA, 19 nt, Artificial Sequence
  Description of Artificial Sequence: Synthetic oligonucleotide
cauaugagccacauucuuc

SEQ ID NO: 1284288 - RNA, 19 nt, Artificial Sequence
  Description of Artificial Sequence: Synthetic oligonucleotide
uugcaccacaagcaaaucu

SEQ ID NO: 1284289 - RNA, 19 nt, Artificial Sequence
  Description of Artificial Sequence: Synthetic oligonucleotide
uccuaaaaucauagaaguc

SEQ ID NO: 1284290 - RNA, 19 nt, Artificial Sequence
  Description of Artificial Sequence: Synthetic oligonucleotide
uguaaucuggguagcuacu

SEQ ID NO: 1284291 - RNA, 19 nt, Artificial Sequence
  Description of Artificial Sequence: Synthetic oligonucleotide
agugguauuguucuucauu

SEQ ID NO: 1284292 - RNA, 19 nt, Artificial Sequence
  Description of Artificial Sequence: Synthetic oligonucleotide
agcgucaccaucugugaag

SEQ ID NO: 1284293 - RNA, 19 nt, Artificial Sequence
  Description of Artificial Sequence: Synthetic oligonucleotide
guguacgucgccauggcgg

SEQ ID NO: 1284294 - RNA, 19 nt, Artificial Sequence
  Description of Artificial Sequence: Synthetic oligonucleotide
ggagcgaugacccacucug

SEQ ID NO: 1284295 - RNA, 19 nt, Artificial Sequence
  Description of Artificial Sequence: Synthetic oligonucleotide
uuacaguggcuuuugucac

SEQ ID NO: 1284296 - RNA, 19 nt, Artificial Sequence
  Description of Artificial Sequence: Synthetic oligonucleotide
aaagcagcgucaccaucug

SEQ ID NO: 1284297 - RNA, 19 nt, Artificial Sequence
  Description of Artificial Sequence: Synthetic oligonucleotide
uccaucgucugaaucaaua

SEQ ID NO: 1284298 - RNA, 19 nt, Artificial Sequence
  Description of Artificial Sequence: Synthetic oligonucleotide
ucggacaaggaggaaagug

SEQ ID NO: 1284299 - RNA, 19 nt, Artificial Sequence
  Description of Artificial Sequence: Synthetic oligonucleotide
agaagauccauuccacaau

SEQ ID NO: 1284300 - RNA, 19 nt, Artificial Sequence
  Description of Artificial Sequence: Synthetic oligonucleotide
agguauucaauaucaggaa

SEQ ID NO: 1284301 - RNA, 19 nt, Artificial Sequence
  Description of Artificial Sequence: Synthetic oligonucleotide
uccuuguccaggccgucgg

SEQ ID NO: 1284302 - RNA, 19 nt, Artificial Sequence
  Description of Artificial Sequence: Synthetic oligonucleotide
gugaugggaacaaaauaag

SEQ ID NO: 1284303 - RNA, 19 nt, Artificial Sequence
  Description of Artificial Sequence: Synthetic oligonucleotide
ucguacuugggcccugaag

SEQ ID NO: 1284304 - RNA, 19 nt, Artificial Sequence
  Description of Artificial Sequence: Synthetic oligonucleotide
cagaaucguacuugggccc

SEQ ID NO: 1284305 - RNA, 19 nt, Artificial Sequence
  Description of Artificial Sequence: Synthetic oligonucleotide
aaauaagcaguccguuauu

SEQ ID NO: 1284306 - RNA, 19 nt, Artificial Sequence
  Description of Artificial Sequence: Synthetic oligonucleotide
cuuauccgaggacaacugc

SEQ ID NO: 1284307 - RNA, 19 nt, Artificial Sequence
  Description of Artificial Sequence: Synthetic oligonucleotide
ugcuggaguacccuaccca

SEQ ID NO: 1284308 - RNA, 19 nt, Artificial Sequence
  Description of Artificial Sequence: Synthetic oligonucleotide
ugguccuccacuccggagu

SEQ ID NO: 1284309 - RNA, 19 nt, Artificial Sequence
  Description of Artificial Sequence: Synthetic oligonucleotide
cuuguagugcgcccgcugc

SEQ ID NO: 1284310 - RNA, 19 nt, Artificial Sequence
  Description of Artificial Sequence: Synthetic oligonucleotide
cuuagugguauuguucuuc

SEQ ID NO: 1284311 - RNA, 19 nt, Artificial Sequence
  Description of Artificial Sequence: Synthetic oligonucleotide
uauugggauggcaccuaag

SEQ ID NO: 1284312 - RNA, 19 nt, Artificial Sequence
  Description of Artificial Sequence: Synthetic oligonucleotide
gucaccaucugugaagagc

SEQ ID NO: 1284313 - RNA, 19 nt, Artificial Sequence
  Description of Artificial Sequence: Synthetic oligonucleotide
uuguuuguaguaucucauc

SEQ ID NO: 1284314 - RNA, 19 nt, Artificial Sequence
  Description of Artificial Sequence: Synthetic oligonucleotide
cuucgcuaacuucuuggcc

SEQ ID NO: 1284315 - RNA, 19 nt, Artificial Sequence
  Description of Artificial Sequence: Synthetic oligonucleotide
gaguucucacauuccauuc

SEQ ID NO: 1284316 - RNA, 19 nt, Artificial Sequence
  Description of Artificial Sequence: Synthetic oligonucleotide
ucuuggcaagccaaaucgu

SEQ ID NO: 1284317 - RNA, 19 nt, Artificial Sequence
  Description of Artificial Sequence: Synthetic oligonucleotide
ucaaggagcgaugacccac

SEQ ID NO: 1284318 - RNA, 19 nt, Artificial Sequence
  Description of Artificial Sequence: Synthetic oligonucleotide
ucuuguagugcgcccgcug

SEQ ID NO: 1284319 - RNA, 19 nt, Artificial Sequence
  Description of Artificial Sequence: Synthetic oligonucleotide
agguguacgucgccauggc

SEQ ID NO: 1284320 - RNA, 19 nt, Artificial Sequence
  Description of Artificial Sequence: Synthetic oligonucleotide
ugaggugguugucguaggc

SEQ ID NO: 1284321 - RNA, 19 nt, Artificial Sequence
  Description of Artificial Sequence: Synthetic oligonucleotide
uaggcguugaagguggcga

SEQ ID NO: 1284322 - RNA, 19 nt, Artificial Sequence
  Description of Artificial Sequence: Synthetic oligonucleotide
ucgguauugcuggaguacc

SEQ ID NO: 1284323 - RNA, 19 nt, Artificial Sequence
  Description of Artificial Sequence: Synthetic oligonucleotide
cacgcaugagagcugcucc

SEQ ID NO: 1284324 - RNA, 19 nt, Artificial Sequence
  Description of Artificial Sequence: Synthetic oligonucleotide
uccgccacggcucgcugcg

SEQ ID NO: 1284325 - RNA, 19 nt, Artificial Sequence
  Description of Artificial Sequence: Synthetic oligonucleotide
ucaauuucauuaggguccu

SEQ ID NO: 1284326 - RNA, 19 nt, Artificial Sequence
  Description of Artificial Sequence: Synthetic oligonucleotide
cacuuggcggcucacggcc

SEQ ID NO: 1284327 - RNA, 19 nt, Artificial Sequence
  Description of Artificial Sequence: Synthetic oligonucleotide
gcuuuugucacucaugugu

SEQ ID NO: 1284328 - RNA, 19 nt, Artificial Sequence
  Description of Artificial Sequence: Synthetic oligonucleotide
cugcaugucccgcucacgc

SEQ ID NO: 1284329 - RNA, 19 nt, Artificial Sequence
  Description of Artificial Sequence: Synthetic oligonucleotide
aggugguugucguaggcgu

SEQ ID NO: 1284330 - RNA, 19 nt, Artificial Sequence
  Description of Artificial Sequence: Synthetic oligonucleotide
ucucaucaaggagcgauga

SEQ ID NO: 1284331 - RNA, 19 nt, Artificial Sequence
  Description of Artificial Sequence: Synthetic oligonucleotide
gagagguauucaauaucag

SEQ ID NO: 1284332 - RNA, 19 nt, Artificial Sequence
  Description of Artificial Sequence: Synthetic oligonucleotide
aucuccgcgucgcggaacg

SEQ ID NO: 1284333 - RNA, 19 nt, Artificial Sequence
  Description of Artificial Sequence: Synthetic oligonucleotide
uuauugggauggcaccuaa

SEQ ID NO: 1284334 - RNA, 19 nt, Artificial Sequence
  Description of Artificial Sequence: Synthetic oligonucleotide
guucucacauuccauucca

SEQ ID NO: 1284335 - RNA, 19 nt, Artificial Sequence
  Description of Artificial Sequence: Synthetic oligonucleotide
aagcaguccguuauuggga

SEQ ID NO: 1284336 - RNA, 19 nt, Artificial Sequence
  Description of Artificial Sequence: Synthetic oligonucleotide
ggacauacugcaugucccg

SEQ ID NO: 1284337 - RNA, 19 nt, Artificial Sequence
  Description of Artificial Sequence: Synthetic oligonucleotide
gauggcaccuaagggcggg

SEQ ID NO: 1284338 - RNA, 19 nt, Artificial Sequence
  Description of Artificial Sequence: Synthetic oligonucleotide
aaggagcgaugacccacuc

SEQ ID NO: 1284339 - RNA, 19 nt, Artificial Sequence
  Description of Artificial Sequence: Synthetic oligonucleotide
agucuuauccgaggacaac

SEQ ID NO: 1284340 - RNA, 19 nt, Artificial Sequence
  Description of Artificial Sequence: Synthetic oligonucleotide
uugcuggaguacccuaccc

SEQ ID NO: 1284341 - RNA, 19 nt, Artificial Sequence
  Description of Artificial Sequence: Synthetic oligonucleotide
aagagcuuacaguggcuuu

SEQ ID NO: 1284342 - RNA, 19 nt, Artificial Sequence
  Description of Artificial Sequence: Synthetic oligonucleotide
cagaacaaaugaaguagca

SEQ ID NO: 1284343 - RNA, 19 nt, Artificial Sequence
  Description of Artificial Sequence: Synthetic oligonucleotide
uagaaggauuucccuuucu

SEQ ID NO: 1284344 - RNA, 19 nt, Artificial Sequence
  Description of Artificial Sequence: Synthetic oligonucleotide
acaaaauaagcaguccguu

SEQ ID NO: 1284345 - RNA, 19 nt, Artificial Sequence
  Description of Artificial Sequence: Synthetic oligonucleotide
ugucacucaugugugccug

SEQ ID NO: 1284346 - RNA, 19 nt, Artificial Sequence
  Description of Artificial Sequence: Synthetic oligonucleotide
gccaaaucguuguuuguag

SEQ ID NO: 1284347 - RNA, 19 nt, Artificial Sequence
  Description of Artificial Sequence: Synthetic oligonucleotide
cuaagggcgggcucucccc

SEQ ID NO: 1284348 - RNA, 19 nt, Artificial Sequence
  Description of Artificial Sequence: Synthetic oligonucleotide
uacuugggcccugaagugc

SEQ ID NO: 1284349 - RNA, 19 nt, Artificial Sequence
  Description of Artificial Sequence: Synthetic oligonucleotide
gggauggcaccuaagggcg

SEQ ID NO: 1284350 - RNA, 19 nt, Artificial Sequence
  Description of Artificial Sequence: Synthetic oligonucleotide
guacuugggcccugaagug

SEQ ID NO: 1284351 - RNA, 19 nt, Artificial Sequence
  Description of Artificial Sequence: Synthetic oligonucleotide
cuucuguggaguagaagga

SEQ ID NO: 1284352 - RNA, 19 nt, Artificial Sequence
  Description of Artificial Sequence: Synthetic oligonucleotide
cuagguucuucucguugag

SEQ ID NO: 1284353 - RNA, 19 nt, Artificial Sequence
  Description of Artificial Sequence: Synthetic oligonucleotide
acggcugggccuugauggc

SEQ ID NO: 1284354 - RNA, 19 nt, Artificial Sequence
  Description of Artificial Sequence: Synthetic oligonucleotide
caaaauaagcaguccguua

SEQ ID NO: 1284355 - RNA, 19 nt, Artificial Sequence
  Description of Artificial Sequence: Synthetic oligonucleotide
caggugaugcagguguacg

SEQ ID NO: 1284356 - RNA, 19 nt, Artificial Sequence
  Description of Artificial Sequence: Synthetic oligonucleotide
cagguguacgucgccaugg

SEQ ID NO: 1284357 - RNA, 19 nt, Artificial Sequence
  Description of Artificial Sequence: Synthetic oligonucleotide
caaaucguuguuuguagua

SEQ ID NO: 1284358 - RNA, 19 nt, Artificial Sequence
  Description of Artificial Sequence: Synthetic oligonucleotide
acacggugcaguagguggc

SEQ ID NO: 1284359 - RNA, 19 nt, Artificial Sequence
  Description of Artificial Sequence: Synthetic oligonucleotide
aggugaugcagguguacgu

SEQ ID NO: 1284360 - RNA, 19 nt, Artificial Sequence
  Description of Artificial Sequence: Synthetic oligonucleotide
ucgcauuccaaagucuuau

SEQ ID NO: 1284361 - RNA, 19 nt, Artificial Sequence
  Description of Artificial Sequence: Synthetic oligonucleotide
gucaccggggccaugccgg

SEQ ID NO: 1284362 - RNA, 19 nt, Artificial Sequence
  Description of Artificial Sequence: Synthetic oligonucleotide
aagauccauuccacaaucu

SEQ ID NO: 1284363 - RNA, 19 nt, Artificial Sequence
  Description of Artificial Sequence: Synthetic oligonucleotide
cacucuggcaccagaagga

SEQ ID NO: 1284364 - RNA, 19 nt, Artificial Sequence
  Description of Artificial Sequence: Synthetic oligonucleotide
aucguuguuuguaguaucu

SEQ ID NO: 1284365 - RNA, 19 nt, Artificial Sequence
  Description of Artificial Sequence: Synthetic oligonucleotide
uacugcaugucccgcucac

SEQ ID NO: 1284366 - RNA, 19 nt, Artificial Sequence
  Description of Artificial Sequence: Synthetic oligonucleotide
gauggccgcguucauggca

SEQ ID NO: 1284367 - RNA, 19 nt, Artificial Sequence
  Description of Artificial Sequence: Synthetic oligonucleotide
ugggagacguggacggcug

SEQ ID NO: 1284368 - RNA, 19 nt, Artificial Sequence
  Description of Artificial Sequence: Synthetic oligonucleotide
agcaguccguuauugggau

SEQ ID NO: 1284369 - RNA, 19 nt, Artificial Sequence
  Description of Artificial Sequence: Synthetic oligonucleotide
ugugccugcacagcuucug

SEQ ID NO: 1284370 - RNA, 19 nt, Artificial Sequence
  Description of Artificial Sequence: Synthetic oligonucleotide
cugguccucggacaaggag

SEQ ID NO: 1284371 - RNA, 19 nt, Artificial Sequence
  Description of Artificial Sequence: Synthetic oligonucleotide
aggaaguaucagcuccaug

SEQ ID NO: 1284372 - RNA, 19 nt, Artificial Sequence
  Description of Artificial Sequence: Synthetic oligonucleotide
cacaagcaaaucuugccaa

SEQ ID NO: 1284373 - RNA, 19 nt, Artificial Sequence
  Description of Artificial Sequence: Synthetic oligonucleotide
cuuguccaggccgucggcg

SEQ ID NO: 1284374 - RNA, 19 nt, Artificial Sequence
  Description of Artificial Sequence: Synthetic oligonucleotide
aggaaagugcagugagaga

SEQ ID NO: 1284375 - RNA, 19 nt, Artificial Sequence
  Description of Artificial Sequence: Synthetic oligonucleotide
cugaggugguugucguagg

SEQ ID NO: 1284376 - RNA, 19 nt, Artificial Sequence
  Description of Artificial Sequence: Synthetic oligonucleotide
aagucuuauccgaggacaa

SEQ ID NO: 1284377 - RNA, 19 nt, Artificial Sequence
  Description of Artificial Sequence: Synthetic oligonucleotide
ucgcggaacgccacccugc

SEQ ID NO: 1284378 - RNA, 19 nt, Artificial Sequence
  Description of Artificial Sequence: Synthetic oligonucleotide
aagugcagugagagauacg

SEQ ID NO: 1284379 - RNA, 19 nt, Artificial Sequence
  Description of Artificial Sequence: Synthetic oligonucleotide
ucguugcaccacaagcaaa

SEQ ID NO: 1284380 - RNA, 19 nt, Artificial Sequence
  Description of Artificial Sequence: Synthetic oligonucleotide
gucguaggcguugaaggug

SEQ ID NO: 1284381 - RNA, 19 nt, Artificial Sequence
  Description of Artificial Sequence: Synthetic oligonucleotide
uaagggcgggcucucccca

SEQ ID NO: 1284382 - RNA, 19 nt, Artificial Sequence
  Description of Artificial Sequence: Synthetic oligonucleotide
ugcaugucccgcucacgca

SEQ ID NO: 1284383 - RNA, 19 nt, Artificial Sequence
  Description of Artificial Sequence: Synthetic oligonucleotide
ucauuaggguccugccccu

SEQ ID NO: 1284384 - RNA, 19 nt, Artificial Sequence
  Description of Artificial Sequence: Synthetic oligonucleotide
uccgaggacaacugcucaa

SEQ ID NO: 1284385 - RNA, 19 nt, Artificial Sequence
  Description of Artificial Sequence: Synthetic oligonucleotide
guagaaggauuucccuuuc

SEQ ID NO: 1284386 - RNA, 19 nt, Artificial Sequence
  Description of Artificial Sequence: Synthetic oligonucleotide
uguggaguagaaggauuuc

SEQ ID NO: 1284387 - RNA, 19 nt, Artificial Sequence
  Description of Artificial Sequence: Synthetic oligonucleotide
cucaucaaggagcgaugac

SEQ ID NO: 1284388 - RNA, 19 nt, Artificial Sequence
  Description of Artificial Sequence: Synthetic oligonucleotide
ugguuucaucaucgcauuc

SEQ ID NO: 1284389 - RNA, 19 nt, Artificial Sequence
  Description of Artificial Sequence: Synthetic oligonucleotide
ucgaaccacugcagccggg

SEQ ID NO: 1284390 - RNA, 19 nt, Artificial Sequence
  Description of Artificial Sequence: Synthetic oligonucleotide
auuccaucgucugaaucaa

SEQ ID NO: 1284391 - RNA, 19 nt, Artificial Sequence
  Description of Artificial Sequence: Synthetic oligonucleotide
agcuugagugaugggaaca

SEQ ID NO: 1284392 - RNA, 19 nt, Artificial Sequence
  Description of Artificial Sequence: Synthetic oligonucleotide
uguagcggugccaguccgu

SEQ ID NO: 1284393 - RNA, 19 nt, Artificial Sequence
  Description of Artificial Sequence: Synthetic oligonucleotide
uccuccacuccggaguucu

SEQ ID NO: 1284394 - RNA, 19 nt, Artificial Sequence
  Description of Artificial Sequence: Synthetic oligonucleotide
uucucacauuccauuccau

SEQ ID NO: 1284395 - RNA, 19 nt, Artificial Sequence
  Description of Artificial Sequence: Synthetic oligonucleotide
caccagaaggaaguaucag

SEQ ID NO: 1284396 - RNA, 19 nt, Artificial Sequence
  Description of Artificial Sequence: Synthetic oligonucleotide
gcuucgcuaacuucuuggc

SEQ ID NO: 1284397 - RNA, 19 nt, Artificial Sequence
  Description of Artificial Sequence: Synthetic oligonucleotide
acgcaugagagcugcuccu

SEQ ID NO: 1284398 - RNA, 19 nt, Artificial Sequence
  Description of Artificial Sequence: Synthetic oligonucleotide
uacgucgccauggcggggc

SEQ ID NO: 1284399 - RNA, 19 nt, Artificial Sequence
  Description of Artificial Sequence: Synthetic oligonucleotide
aguccguuauugggauggc

SEQ ID NO: 1284400 - RNA, 19 nt, Artificial Sequence
  Description of Artificial Sequence: Synthetic oligonucleotide
uuuggacauacugcauguc

SEQ ID NO: 1284401 - RNA, 19 nt, Artificial Sequence
  Description of Artificial Sequence: Synthetic oligonucleotide
ucacgcaugagagcugcuc

SEQ ID NO: 1284402 - RNA, 19 nt, Artificial Sequence
  Description of Artificial Sequence: Synthetic oligonucleotide
aagggcgggcucuccccag

SEQ ID NO: 1284403 - RNA, 19 nt, Artificial Sequence
  Description of Artificial Sequence: Synthetic oligonucleotide
gguguacgucgccauggcg

SEQ ID NO: 1284404 - RNA, 19 nt, Artificial Sequence
  Description of Artificial Sequence: Synthetic oligonucleotide
ugcacacggugcaguaggu

SEQ ID NO: 1284405 - RNA, 19 nt, Artificial Sequence
  Description of Artificial Sequence: Synthetic oligonucleotide
caaaucuugccaacaccaa

SEQ ID NO: 1284406 - RNA, 19 nt, Artificial Sequence
  Description of Artificial Sequence: Synthetic oligonucleotide
ucguuguuuguaguaucuc

SEQ ID NO: 1284407 - RNA, 19 nt, Artificial Sequence
  Description of Artificial Sequence: Synthetic oligonucleotide
aucaaggagcgaugaccca

SEQ ID NO: 1284408 - RNA, 19 nt, Artificial Sequence
  Description of Artificial Sequence: Synthetic oligonucleotide
ugcagguguacgucgccau

SEQ ID NO: 1284409 - RNA, 19 nt, Artificial Sequence
  Description of Artificial Sequence: Synthetic oligonucleotide
gucccgcggcuccugagcg

SEQ ID NO: 1284410 - RNA, 19 nt, Artificial Sequence
  Description of Artificial Sequence: Synthetic oligonucleotide
agagcuuacaguggcuuuu

SEQ ID NO: 1284411 - RNA, 19 nt, Artificial Sequence
  Description of Artificial Sequence: Synthetic oligonucleotide
aaucguacuugggcccuga

SEQ ID NO: 1284412 - RNA, 19 nt, Artificial Sequence
  Description of Artificial Sequence: Synthetic oligonucleotide
uugcgccgcagguuguagc

SEQ ID NO: 1284413 - RNA, 19 nt, Artificial Sequence
  Description of Artificial Sequence: Synthetic oligonucleotide
gagacguggacggcugggc

SEQ ID NO: 1284414 - RNA, 19 nt, Artificial Sequence
  Description of Artificial Sequence: Synthetic oligonucleotide
agggcgggcucuccccagc

SEQ ID NO: 1284415 - RNA, 19 nt, Artificial Sequence
  Description of Artificial Sequence: Synthetic oligonucleotide
acugcaugucccgcucacg

SEQ ID NO: 1284416 - RNA, 19 nt, Artificial Sequence
  Description of Artificial Sequence: Synthetic oligonucleotide
cagcgucugcaucuucugc

SEQ ID NO: 1284417 - RNA, 19 nt, Artificial Sequence
  Description of Artificial Sequence: Synthetic oligonucleotide
aggagcgaugacccacucu

SEQ ID NO: 1284418 - RNA, 19 nt, Artificial Sequence
  Description of Artificial Sequence: Synthetic oligonucleotide
agcggugccaguccgucuu

SEQ ID NO: 1284419 - RNA, 19 nt, Artificial Sequence
  Description of Artificial Sequence: Synthetic oligonucleotide
ccguuauugggauggcacc

SEQ ID NO: 1284420 - RNA, 19 nt, Artificial Sequence
  Description of Artificial Sequence: Synthetic oligonucleotide
gucacucaugugugccugc

SEQ ID NO: 1284421 - RNA, 19 nt, Artificial Sequence
  Description of Artificial Sequence: Synthetic oligonucleotide
cuacccacagccuucuggu

SEQ ID NO: 1284422 - RNA, 19 nt, Artificial Sequence
  Description of Artificial Sequence: Synthetic oligonucleotide
cugcccgcgccugcgaucg

SEQ ID NO: 1284423 - RNA, 19 nt, Artificial Sequence
  Description of Artificial Sequence: Synthetic oligonucleotide
uguagugcgcccgcugcau

SEQ ID NO: 1284424 - RNA, 19 nt, Artificial Sequence
  Description of Artificial Sequence: Synthetic oligonucleotide
agcuuacaguggcuuuugu

SEQ ID NO: 1284425 - RNA, 19 nt, Artificial Sequence
  Description of Artificial Sequence: Synthetic oligonucleotide
gagauacgucucucaaucu

SEQ ID NO: 1284426 - RNA, 19 nt, Artificial Sequence
  Description of Artificial Sequence: Synthetic oligonucleotide
gucgcggaacgccacccug

SEQ ID NO: 1284427 - RNA, 19 nt, Artificial Sequence
  Description of Artificial Sequence: Synthetic oligonucleotide
cuccugagcgccccgucug

SEQ ID NO: 1284428 - RNA, 19 nt, Artificial Sequence
  Description of Artificial Sequence: Synthetic oligonucleotide
caugucccgcucacgcaug

SEQ ID NO: 1284429 - RNA, 19 nt, Artificial Sequence
  Description of Artificial Sequence: Synthetic oligonucleotide
agguggcgaacuucuugcu

SEQ ID NO: 1284430 - RNA, 19 nt, Artificial Sequence
  Description of Artificial Sequence: Synthetic oligonucleotide
cugagcgccccgucugccc

SEQ ID NO: 1284431 - RNA, 19 nt, Artificial Sequence
  Description of Artificial Sequence: Synthetic oligonucleotide
uagugguauuguucuucau

SEQ ID NO: 1284432 - RNA, 19 nt, Artificial Sequence
  Description of Artificial Sequence: Synthetic oligonucleotide
cugguuucuagcaacuguu

SEQ ID NO: 1284433 - RNA, 19 nt, Artificial Sequence
  Description of Artificial Sequence: Synthetic oligonucleotide
auggcaccuaagggcgggc

SEQ ID NO: 1284434 - RNA, 19 nt, Artificial Sequence
  Description of Artificial Sequence: Synthetic oligonucleotide
aguacccuacccacagccu

SEQ ID NO: 1284435 - RNA, 19 nt, Artificial Sequence
  Description of Artificial Sequence: Synthetic oligonucleotide
caucaucgcauuccaaagu

SEQ ID NO: 1284436 - RNA, 19 nt, Artificial Sequence
  Description of Artificial Sequence: Synthetic oligonucleotide
accuaagggcgggcucucc

SEQ ID NO: 1284437 - RNA, 19 nt, Artificial Sequence
  Description of Artificial Sequence: Synthetic oligonucleotide
cuccacuuggcggcucacg

SEQ ID NO: 1284438 - RNA, 19 nt, Artificial Sequence
  Description of Artificial Sequence: Synthetic oligonucleotide
uuccaucgucugaaucaau

SEQ ID NO: 1284439 - RNA, 19 nt, Artificial Sequence
  Description of Artificial Sequence: Synthetic oligonucleotide
agcuacuccuaaaaucaua

SEQ ID NO: 1284440 - RNA, 19 nt, Artificial Sequence
  Description of Artificial Sequence: Synthetic oligonucleotide
cacggugcaguagguggcc

SEQ ID NO: 1284441 - RNA, 19 nt, Artificial Sequence
  Description of Artificial Sequence: Synthetic oligonucleotide
ccugcgaucgcgcccuccg

SEQ ID NO: 1284442 - RNA, 19 nt, Artificial Sequence
  Description of Artificial Sequence: Synthetic oligonucleotide
gaaucguacuugggcccug

SEQ ID NO: 1284443 - RNA, 19 nt, Artificial Sequence
  Description of Artificial Sequence: Synthetic oligonucleotide
ugguugucguaggcguuga

SEQ ID NO: 1284444 - RNA, 19 nt, Artificial Sequence
  Description of Artificial Sequence: Synthetic oligonucleotide
ccuucggccgucaccgggg

SEQ ID NO: 1284445 - RNA, 19 nt, Artificial Sequence
  Description of Artificial Sequence: Synthetic oligonucleotide
gucauaugagccacauucu

SEQ ID NO: 1284446 - RNA, 19 nt, Artificial Sequence
  Description of Artificial Sequence: Synthetic oligonucleotide
cuuggcggcucacggccug

SEQ ID NO: 1284447 - RNA, 19 nt, Artificial Sequence
  Description of Artificial Sequence: Synthetic oligonucleotide
uuccccucugcugcuucgc

SEQ ID NO: 1284448 - RNA, 19 nt, Artificial Sequence
  Description of Artificial Sequence: Synthetic oligonucleotide
cuggauggccgcguucaug

SEQ ID NO: 1284449 - RNA, 19 nt, Artificial Sequence
  Description of Artificial Sequence: Synthetic oligonucleotide
guugcaccacaagcaaauc

SEQ ID NO: 1284450 - RNA, 19 nt, Artificial Sequence
  Description of Artificial Sequence: Synthetic oligonucleotide
agugcgcccgcugcaucuc

SEQ ID NO: 1284451 - RNA, 19 nt, Artificial Sequence
  Description of Artificial Sequence: Synthetic oligonucleotide
cuucggccgucaccggggc

SEQ ID NO: 1284452 - RNA, 19 nt, Artificial Sequence
  Description of Artificial Sequence: Synthetic oligonucleotide
guagcggugccaguccguc

SEQ ID NO: 1284453 - RNA, 19 nt, Artificial Sequence
  Description of Artificial Sequence: Synthetic oligonucleotide
agcucuuggcaagccaaau

SEQ ID NO: 1284454 - RNA, 19 nt, Artificial Sequence
  Description of Artificial Sequence: Synthetic oligonucleotide
gccaguccgucuuguagug

SEQ ID NO: 1284455 - RNA, 19 nt, Artificial Sequence
  Description of Artificial Sequence: Synthetic oligonucleotide
ggaguucucacauuccauu

SEQ ID NO: 1284456 - RNA, 19 nt, Artificial Sequence
  Description of Artificial Sequence: Synthetic oligonucleotide
agggcgcuuuccugggaga

SEQ ID NO: 1284457 - RNA, 19 nt, Artificial Sequence
  Description of Artificial Sequence: Synthetic oligonucleotide
ucugcccgcgccugcgauc

SEQ ID NO: 1284458 - RNA, 19 nt, Artificial Sequence
  Description of Artificial Sequence: Synthetic oligonucleotide
guuauugggauggcaccua

SEQ ID NO: 1284459 - RNA, 19 nt, Artificial Sequence
  Description of Artificial Sequence: Synthetic oligonucleotide
ccuaagggcgggcucuccc

SEQ ID NO: 1284460 - RNA, 19 nt, Artificial Sequence
  Description of Artificial Sequence: Synthetic oligonucleotide
auggccgcguucauggcau

SEQ ID NO: 1284461 - RNA, 19 nt, Artificial Sequence
  Description of Artificial Sequence: Synthetic oligonucleotide
gccgucggcgcccagcccc

SEQ ID NO: 1284462 - RNA, 19 nt, Artificial Sequence
  Description of Artificial Sequence: Synthetic oligonucleotide
cucgcugcgcccgcacccg

SEQ ID NO: 1284463 - RNA, 19 nt, Artificial Sequence
  Description of Artificial Sequence: Synthetic oligonucleotide
aucgcauuccaaagucuua

SEQ ID NO: 1284464 - RNA, 19 nt, Artificial Sequence
  Description of Artificial Sequence: Synthetic oligonucleotide
uagcggugccaguccgucu

SEQ ID NO: 1284465 - RNA, 19 nt, Artificial Sequence
  Description of Artificial Sequence: Synthetic oligonucleotide
ggucccgcggcuccugagc

SEQ ID NO: 1284466 - RNA, 19 nt, Artificial Sequence
  Description of Artificial Sequence: Synthetic oligonucleotide
gcagugagagauacgucuc

SEQ ID NO: 1284467 - RNA, 19 nt, Artificial Sequence
  Description of Artificial Sequence: Synthetic oligonucleotide
ggaguacccuacccacagc

SEQ ID NO: 1284468 - RNA, 19 nt, Artificial Sequence
  Description of Artificial Sequence: Synthetic oligonucleotide
guagugcgcccgcugcauc

SEQ ID NO: 1284469 - RNA, 19 nt, Artificial Sequence
  Description of Artificial Sequence: Synthetic oligonucleotide
gcagguguacgucgccaug

SEQ ID NO: 1284470 - RNA, 19 nt, Artificial Sequence
  Description of Artificial Sequence: Synthetic oligonucleotide
cuccccagcgucugcaucu

SEQ ID NO: 1284471 - RNA, 19 nt, Artificial Sequence
  Description of Artificial Sequence: Synthetic oligonucleotide
ggcgcuuuccugggagacg

SEQ ID NO: 1284472 - RNA, 19 nt, Artificial Sequence
  Description of Artificial Sequence: Synthetic oligonucleotide
uggcaccuaagggcgggcu

SEQ ID NO: 1284473 - RNA, 19 nt, Artificial Sequence
  Description of Artificial Sequence: Synthetic oligonucleotide
cuugagugaugggaacaaa

SEQ ID NO: 1284474 - RNA, 19 nt, Artificial Sequence
  Description of Artificial Sequence: Synthetic oligonucleotide
caaggagcgaugacccacu

SEQ ID NO: 1284475 - RNA, 19 nt, Artificial Sequence
  Description of Artificial Sequence: Synthetic oligonucleotide
ggacggcugggccuugaug

SEQ ID NO: 1284476 - RNA, 19 nt, Artificial Sequence
  Description of Artificial Sequence: Synthetic oligonucleotide
uuccacaaucuggcuucac

SEQ ID NO: 1284477 - RNA, 19 nt, Artificial Sequence
  Description of Artificial Sequence: Synthetic oligonucleotide
cuccacuccggaguucuca

SEQ ID NO: 1284478 - RNA, 19 nt, Artificial Sequence
  Description of Artificial Sequence: Synthetic oligonucleotide
cugcgaucgcgcccuccgc

SEQ ID NO: 1284479 - RNA, 19 nt, Artificial Sequence
  Description of Artificial Sequence: Synthetic oligonucleotide
aucguacuugggcccugaa

SEQ ID NO: 1284480 - RNA, 19 nt, Artificial Sequence
  Description of Artificial Sequence: Synthetic oligonucleotide
guccguuauugggauggca

SEQ ID NO: 1284481 - RNA, 19 nt, Artificial Sequence
  Description of Artificial Sequence: Synthetic oligonucleotide
gccgccgugggcacggagg

SEQ ID NO: 1284482 - RNA, 19 nt, Artificial Sequence
  Description of Artificial Sequence: Synthetic oligonucleotide
cagugagagauacgucucu

SEQ ID NO: 1284483 - RNA, 19 nt, Artificial Sequence
  Description of Artificial Sequence: Synthetic oligonucleotide
ggauggcaccuaagggcgg

SEQ ID NO: 1284484 - RNA, 19 nt, Artificial Sequence
  Description of Artificial Sequence: Synthetic oligonucleotide
cacuccggaguucucacau

SEQ ID NO: 1284485 - RNA, 19 nt, Artificial Sequence
  Description of Artificial Sequence: Synthetic oligonucleotide
gguauugcuggaguacccu

SEQ ID NO: 1284486 - RNA, 19 nt, Artificial Sequence
  Description of Artificial Sequence: Synthetic oligonucleotide
ccggaguucucacauucca

SEQ ID NO: 1284487 - RNA, 19 nt, Artificial Sequence
  Description of Artificial Sequence: Synthetic oligonucleotide
cgguauugcuggaguaccc

SEQ ID NO: 1284488 - RNA, 19 nt, Artificial Sequence
  Description of Artificial Sequence: Synthetic oligonucleotide
uguccaccccagggcucgg

SEQ ID NO: 1284489 - RNA, 19 nt, Artificial Sequence
  Description of Artificial Sequence: Synthetic oligonucleotide
cagcuccacgugccgccgg

SEQ ID NO: 1284490 - RNA, 19 nt, Artificial Sequence
  Description of Artificial Sequence: Synthetic oligonucleotide
gaucgcgcccuccgcccuc

SEQ ID NO: 1284491 - RNA, 19 nt, Artificial Sequence
  Description of Artificial Sequence: Synthetic oligonucleotide
ucgcugcgcccgcacccgc

SEQ ID NO: 1284492 - RNA, 19 nt, Artificial Sequence
  Description of Artificial Sequence: Synthetic oligonucleotide
caucuccgcgucgcggaac

SEQ ID NO: 1284493 - RNA, 19 nt, Artificial Sequence
  Description of Artificial Sequence: Synthetic oligonucleotide
ggcaccuaagggcgggcuc

SEQ ID NO: 1284494 - RNA, 19 nt, Artificial Sequence
  Description of Artificial Sequence: Synthetic oligonucleotide
cgaaccacugcagccgggg

SEQ ID NO: 1284495 - RNA, 19 nt, Artificial Sequence
  Description of Artificial Sequence: Synthetic oligonucleotide
gccgccgggaccugaggug

SEQ ID NO: 1284496 - RNA, 19 nt, Artificial Sequence
  Description of Artificial Sequence: Synthetic oligonucleotide
gcaguccguuauugggaug

SEQ ID NO: 1284497 - RNA, 19 nt, Artificial Sequence
  Description of Artificial Sequence: Synthetic oligonucleotide
caauuucauuaggguccug

SEQ ID NO: 1284498 - RNA, 19 nt, Artificial Sequence
  Description of Artificial Sequence: Synthetic oligonucleotide
gcgucaccaucugugaaga

SEQ ID NO: 1284499 - RNA, 19 nt, Artificial Sequence
  Description of Artificial Sequence: Synthetic oligonucleotide
ccgccgugggcacggaggg

SEQ ID NO: 1284500 - RNA, 19 nt, Artificial Sequence
  Description of Artificial Sequence: Synthetic oligonucleotide
cagcgucaccaucugugaa

SEQ ID NO: 1284501 - RNA, 19 nt, Artificial Sequence
  Description of Artificial Sequence: Synthetic oligonucleotide
ggcguugaagguggcgaac

SEQ ID NO: 1284502 - RNA, 19 nt, Artificial Sequence
  Description of Artificial Sequence: Synthetic oligonucleotide
gcacacggugcaguaggug

SEQ ID NO: 1284503 - RNA, 19 nt, Artificial Sequence
  Description of Artificial Sequence: Synthetic oligonucleotide
ggcucgguauugcuggagu

SEQ ID NO: 1284504 - RNA, 19 nt, Artificial Sequence
  Description of Artificial Sequence: Synthetic oligonucleotide
ucuccgcgucgcggaacgc

SEQ ID NO: 1284505 - RNA, 19 nt, Artificial Sequence
  Description of Artificial Sequence: Synthetic oligonucleotide
gguggccgugcccuugcuc

SEQ ID NO: 1284506 - RNA, 19 nt, Artificial Sequence
  Description of Artificial Sequence: Synthetic oligonucleotide
acguggacggcugggccuu

SEQ ID NO: 1284507 - RNA, 19 nt, Artificial Sequence
  Description of Artificial Sequence: Synthetic oligonucleotide
ggguagcuacuccuaaaau

SEQ ID NO: 1284508 - RNA, 19 nt, Artificial Sequence
  Description of Artificial Sequence: Synthetic oligonucleotide
cacggcucgcugcgcccgc

SEQ ID NO: 1284509 - RNA, 19 nt, Artificial Sequence
  Description of Artificial Sequence: Synthetic oligonucleotide
ccgccgggaccugaggugg

SEQ ID NO: 1284510 - RNA, 19 nt, Artificial Sequence
  Description of Artificial Sequence: Synthetic oligonucleotide
cgcguucauggcauccuug

SEQ ID NO: 1284511 - RNA, 19 nt, Artificial Sequence
  Description of Artificial Sequence: Synthetic oligonucleotide
ggaagccuucggccgucac

SEQ ID NO: 1284512 - RNA, 19 nt, Artificial Sequence
  Description of Artificial Sequence: Synthetic oligonucleotide
ggaacgccacccugcaggu

SEQ ID NO: 1284513 - RNA, 19 nt, Artificial Sequence
  Description of Artificial Sequence: Synthetic oligonucleotide
ggccgcguucauggcaucc

SEQ ID NO: 1284514 - RNA, 19 nt, Artificial Sequence
  Description of Artificial Sequence: Synthetic oligonucleotide
cgucuuguagugcgcccgc

SEQ ID NO: 1284515 - RNA, 19 nt, Artificial Sequence
  Description of Artificial Sequence: Synthetic oligonucleotide
gggcgcuuuccugggagac

SEQ ID NO: 1284516 - RNA, 19 nt, Artificial Sequence
  Description of Artificial Sequence: Synthetic oligonucleotide
cugggagacguggacggcu

SEQ ID NO: 1284517 - RNA, 19 nt, Artificial Sequence
  Description of Artificial Sequence: Synthetic oligonucleotide
ccaguccgucuuguagugc

SEQ ID NO: 1284518 - RNA, 19 nt, Artificial Sequence
  Description of Artificial Sequence: Synthetic oligonucleotide
uccccagcgucugcaucuu

SEQ ID NO: 1284519 - RNA, 19 nt, Artificial Sequence
  Description of Artificial Sequence: Synthetic oligonucleotide
gcguugaagguggcgaacu

SEQ ID NO: 1284520 - RNA, 19 nt, Artificial Sequence
  Description of Artificial Sequence: Synthetic oligonucleotide
gcgucgcggaacgccaccc

SEQ ID NO: 1284521 - RNA, 19 nt, Artificial Sequence
  Description of Artificial Sequence: Synthetic oligonucleotide
gguugucguaggcguugaa

SEQ ID NO: 1284522 - RNA, 19 nt, Artificial Sequence
  Description of Artificial Sequence: Synthetic oligonucleotide
gcaccuaagggcgggcucu

SEQ ID NO: 1284523 - RNA, 19 nt, Artificial Sequence
  Description of Artificial Sequence: Synthetic oligonucleotide
ccgcacccgcuccuggaag

SEQ ID NO: 1284524 - RNA, 19 nt, Artificial Sequence
  Description of Artificial Sequence: Synthetic oligonucleotide
accuugcgccgcagguugu

SEQ ID NO: 1284525 - RNA, 19 nt, Artificial Sequence
  Description of Artificial Sequence: Synthetic oligonucleotide
ccugagcgccccgucugcc

SEQ ID NO: 1284526 - RNA, 19 nt, Artificial Sequence
  Description of Artificial Sequence: Synthetic oligonucleotide
ggcuccugagcgccccguc

SEQ ID NO: 1284527 - RNA, 19 nt, Artificial Sequence
  Description of Artificial Sequence: Synthetic oligonucleotide
ugcccgcgccugcgaucgc

SEQ ID NO: 1284528 - RNA, 19 nt, Artificial Sequence
  Description of Artificial Sequence: Synthetic oligonucleotide
ggagggcgcuuuccuggga

SEQ ID NO: 1284529 - RNA, 19 nt, Artificial Sequence
  Description of Artificial Sequence: Synthetic oligonucleotide
gcggugccaguccgucuug

SEQ ID NO: 1284530 - RNA, 19 nt, Artificial Sequence
  Description of Artificial Sequence: Synthetic oligonucleotide
gucuuguagugcgcccgcu

SEQ ID NO: 1284531 - RNA, 19 nt, Artificial Sequence
  Description of Artificial Sequence: Synthetic oligonucleotide
gcugcgcccgcacccgcuc

SEQ ID NO: 1284532 - RNA, 19 nt, Artificial Sequence
  Description of Artificial Sequence: Synthetic oligonucleotide
ccgcucacgcaugagagcu

SEQ ID NO: 1284533 - RNA, 19 nt, Artificial Sequence
  Description of Artificial Sequence: Synthetic oligonucleotide
gcuccugagcgccccgucu

SEQ ID NO: 1284534 - RNA, 19 nt, Artificial Sequence
  Description of Artificial Sequence: Synthetic oligonucleotide
ggcaagccaaaucguuguu

SEQ ID NO: 1284535 - RNA, 19 nt, Artificial Sequence
  Description of Artificial Sequence: Synthetic oligonucleotide
cgcgccugcgaucgcgccc

SEQ ID NO: 1284536 - RNA, 19 nt, Artificial Sequence
  Description of Artificial Sequence: Synthetic oligonucleotide
ccacuccggaguucucaca

SEQ ID NO: 1284537 - RNA, 19 nt, Artificial Sequence
  Description of Artificial Sequence: Synthetic oligonucleotide
cgucgggucccgcggcucc

SEQ ID NO: 1284538 - RNA, 19 nt, Artificial Sequence
  Description of Artificial Sequence: Synthetic oligonucleotide
gguccuccacuccggaguu

SEQ ID NO: 1284539 - RNA, 19 nt, Artificial Sequence
  Description of Artificial Sequence: Synthetic oligonucleotide
gccgcagguuguagcggug

SEQ ID NO: 1284540 - RNA, 19 nt, Artificial Sequence
  Description of Artificial Sequence: Synthetic oligonucleotide
cguuauugggauggcaccu

SEQ ID NO: 1284541 - RNA, 19 nt, Artificial Sequence
  Description of Artificial Sequence: Synthetic oligonucleotide
gggcggcuucuccgucggg

SEQ ID NO: 1284542 - RNA, 19 nt, Artificial Sequence
  Description of Artificial Sequence: Synthetic oligonucleotide
acgugccgccgggaccuga

SEQ ID NO: 1284543 - RNA, 19 nt, Artificial Sequence
  Description of Artificial Sequence: Synthetic oligonucleotide
ccgggaccugaggugguug

SEQ ID NO: 1284544 - RNA, 19 nt, Artificial Sequence
  Description of Artificial Sequence: Synthetic oligonucleotide
gucugcccgcgccugcgau

SEQ ID NO: 1284545 - RNA, 19 nt, Artificial Sequence
  Description of Artificial Sequence: Synthetic oligonucleotide
cgcucacgcaugagagcug

SEQ ID NO: 1284546 - RNA, 19 nt, Artificial Sequence
  Description of Artificial Sequence: Synthetic oligonucleotide
ccgcuccuggaagccuucg

SEQ ID NO: 1284547 - RNA, 19 nt, Artificial Sequence
  Description of Artificial Sequence: Synthetic oligonucleotide
cgcgucgcggaacgccacc

SEQ ID NO: 1284548 - RNA, 19 nt, Artificial Sequence
  Description of Artificial Sequence: Synthetic oligonucleotide
ggcgcccagccccuucucu

SEQ ID NO: 1284549 - RNA, 19 nt, Artificial Sequence
  Description of Artificial Sequence: Synthetic oligonucleotide
gcccgcugcaucuccgcgu

SEQ ID NO: 1284550 - RNA, 19 nt, Artificial Sequence
  Description of Artificial Sequence: Synthetic oligonucleotide
ccgcgucgcggaacgccac

SEQ ID NO: 1284551 - RNA, 19 nt, Artificial Sequence
  Description of Artificial Sequence: Synthetic oligonucleotide
gccugcgaucgcgcccucc

SEQ ID NO: 1284552 - RNA, 19 nt, Artificial Sequence
  Description of Artificial Sequence: Synthetic oligonucleotide
gccgcguucauggcauccu

SEQ ID NO: 1284553 - RNA, 19 nt, Artificial Sequence
  Description of Artificial Sequence: Synthetic oligonucleotide
ccccucugcugcuucgcua

SEQ ID NO: 1284554 - RNA, 19 nt, Artificial Sequence
  Description of Artificial Sequence: Synthetic oligonucleotide
cgcggaacgccacccugca

SEQ ID NO: 1284555 - RNA, 19 nt, Artificial Sequence
  Description of Artificial Sequence: Synthetic oligonucleotide
ccacgugccgccgggaccu

SEQ ID NO: 1284556 - RNA, 19 nt, Artificial Sequence
  Description of Artificial Sequence: Synthetic oligonucleotide
cacgugccgccgggaccug

SEQ ID NO: 1284557 - RNA, 19 nt, Artificial Sequence
  Description of Artificial Sequence: Synthetic oligonucleotide
ccgaggacaacugcucaau

SEQ ID NO: 1284558 - RNA, 19 nt, Artificial Sequence
  Description of Artificial Sequence: Synthetic oligonucleotide
gcgccugcgaucgcgcccu

SEQ ID NO: 1284559 - RNA, 19 nt, Artificial Sequence
  Description of Artificial Sequence: Synthetic oligonucleotide
gcaucuccacuuggcggcu

SEQ ID NO: 1284560 - RNA, 19 nt, Artificial Sequence
  Description of Artificial Sequence: Synthetic oligonucleotide
cacccgcuccuggaagccu

SEQ ID NO: 1284561 - RNA, 19 nt, Artificial Sequence
  Description of Artificial Sequence: Synthetic oligonucleotide
gcuccacgugccgccggga

SEQ ID NO: 1284562 - RNA, 19 nt, Artificial Sequence
  Description of Artificial Sequence: Synthetic oligonucleotide
ccacuucgauuucauccuu

SEQ ID NO: 1284563 - RNA, 19 nt, Artificial Sequence
  Description of Artificial Sequence: Synthetic oligonucleotide
ccggggcggcuucuccguc

SEQ ID NO: 1284564 - RNA, 19 nt, Artificial Sequence
  Description of Artificial Sequence: Synthetic oligonucleotide
gccgugcccuugcucgccu

SEQ ID NO: 1284565 - RNA, 19 nt, Artificial Sequence
  Description of Artificial Sequence: Synthetic oligonucleotide
ccccgucugcccgcgccug

SEQ ID NO: 1284566 - RNA, 19 nt, Artificial Sequence
  Description of Artificial Sequence: Synthetic oligonucleotide
ccgucgggucccgcggcuc

SEQ ID NO: 1284567 - RNA, 19 nt, Artificial Sequence
  Description of Artificial Sequence: Synthetic oligonucleotide
ccgcguucauggcauccuu

SEQ ID NO: 1284568 - RNA, 19 nt, Artificial Sequence
  Description of Artificial Sequence: Synthetic oligonucleotide
cgucugcccgcgccugcga

SEQ ID NO: 1284569 - RNA, 19 nt, Artificial Sequence
  Description of Artificial Sequence: Synthetic oligonucleotide
gcgccccgucugcccgcgc

SEQ ID NO: 1284570 - RNA, 19 nt, Artificial Sequence
  Description of Artificial Sequence: Synthetic oligonucleotide
cgucgcggaacgccacccu

SEQ ID NO: 1284571 - RNA, 19 nt, Artificial Sequence
  Description of Artificial Sequence: Synthetic oligonucleotide
gccgggaccugaggugguu

SEQ ID NO: 1284572 - RNA, 19 nt, Artificial Sequence
  Description of Artificial Sequence: Synthetic oligonucleotide
cgcugcgcccgcacccgcu

SEQ ID NO: 1284573 - RNA, 19 nt, Artificial Sequence
  Description of Artificial Sequence: Synthetic oligonucleotide
cgccgggaccugagguggu

SEQ ID NO: 1284574 - RNA, 19 nt, Artificial Sequence
  Description of Artificial Sequence: Synthetic oligonucleotide
cgccugcgaucgcgcccuc

SEQ ID NO: 1284575 - RNA, 19 nt, Artificial Sequence
  Description of Artificial Sequence: Synthetic oligonucleotide
agauauuugagacacaggc

SEQ ID NO: 1284576 - RNA, 19 nt, Artificial Sequence
  Description of Artificial Sequence: Synthetic oligonucleotide
aaagugugguaacacaagc

SEQ ID NO: 1284577 - RNA, 19 nt, Artificial Sequence
  Description of Artificial Sequence: Synthetic oligonucleotide
aaacccgacaaacucgagc

SEQ ID NO: 1284578 - RNA, 19 nt, Artificial Sequence
  Description of Artificial Sequence: Synthetic oligonucleotide
gauagcuucaauccgcccg

SEQ ID NO: 1284579 - RNA, 19 nt, Artificial Sequence
  Description of Artificial Sequence: Synthetic oligonucleotide
ugaaaacccgacaaacucg

SEQ ID NO: 1284580 - RNA, 19 nt, Artificial Sequence
  Description of Artificial Sequence: Synthetic oligonucleotide
auauuugagacacaggccu

SEQ ID NO: 1284581 - RNA, 19 nt, Artificial Sequence
  Description of Artificial Sequence: Synthetic oligonucleotide
ugcacaaauauucuugagc

SEQ ID NO: 1284582 - RNA, 19 nt, Artificial Sequence
  Description of Artificial Sequence: Synthetic oligonucleotide
ugcuaaaagaguccgaaca

SEQ ID NO: 1284583 - RNA, 19 nt, Artificial Sequence
  Description of Artificial Sequence: Synthetic oligonucleotide
gagacuguagaucuguugc

SEQ ID NO: 1284584 - RNA, 19 nt, Artificial Sequence
  Description of Artificial Sequence: Synthetic oligonucleotide
aacccgacaaacucgagca

SEQ ID NO: 1284585 - RNA, 19 nt, Artificial Sequence
  Description of Artificial Sequence: Synthetic oligonucleotide
ucaaguaguggucauauuu

SEQ ID NO: 1284586 - RNA, 19 nt, Artificial Sequence
  Description of Artificial Sequence: Synthetic oligonucleotide
aaaagcuacaaggacguug

SEQ ID NO: 1284587 - RNA, 19 nt, Artificial Sequence
  Description of Artificial Sequence: Synthetic oligonucleotide
aauaacucuacuucaucau

SEQ ID NO: 1284588 - RNA, 19 nt, Artificial Sequence
  Description of Artificial Sequence: Synthetic oligonucleotide
uucaucauccccgaaaggc

SEQ ID NO: 1284589 - RNA, 19 nt, Artificial Sequence
  Description of Artificial Sequence: Synthetic oligonucleotide
uucccagcaaucuugagcu

SEQ ID NO: 1284590 - RNA, 19 nt, Artificial Sequence
  Description of Artificial Sequence: Synthetic oligonucleotide
auaacucuacuucaucauc

SEQ ID NO: 1284591 - RNA, 19 nt, Artificial Sequence
  Description of Artificial Sequence: Synthetic oligonucleotide
augccucugacauagcgac

SEQ ID NO: 1284592 - RNA, 19 nt, Artificial Sequence
  Description of Artificial Sequence: Synthetic oligonucleotide
guaguggucauauuuaauc

SEQ ID NO: 1284593 - RNA, 19 nt, Artificial Sequence
  Description of Artificial Sequence: Synthetic oligonucleotide
uggacuagguugcuaaaag

SEQ ID NO: 1284594 - RNA, 19 nt, Artificial Sequence
  Description of Artificial Sequence: Synthetic oligonucleotide
gacuagguugcuaaaagag

SEQ ID NO: 1284595 - RNA, 19 nt, Artificial Sequence
  Description of Artificial Sequence: Synthetic oligonucleotide
uaggugaagcaccacauga

SEQ ID NO: 1284596 - RNA, 19 nt, Artificial Sequence
  Description of Artificial Sequence: Synthetic oligonucleotide
ucugacauagcgacugugc

SEQ ID NO: 1284597 - RNA, 19 nt, Artificial Sequence
  Description of Artificial Sequence: Synthetic oligonucleotide
uccuucaaagugccuaugg

SEQ ID NO: 1284598 - RNA, 19 nt, Artificial Sequence
  Description of Artificial Sequence: Synthetic oligonucleotide
accaaaguggaccccaagg

SEQ ID NO: 1284599 - RNA, 19 nt, Artificial Sequence
  Description of Artificial Sequence: Synthetic oligonucleotide
agagaugauccugaaauuc

SEQ ID NO: 1284600 - RNA, 19 nt, Artificial Sequence
  Description of Artificial Sequence: Synthetic oligonucleotide
gcacaaauauucuugagcc

SEQ ID NO: 1284601 - RNA, 19 nt, Artificial Sequence
  Description of Artificial Sequence: Synthetic oligonucleotide
gggauuggcaaugagaugg

SEQ ID NO: 1284602 - RNA, 19 nt, Artificial Sequence
  Description of Artificial Sequence: Synthetic oligonucleotide
uauucuugagccaucccac

SEQ ID NO: 1284603 - RNA, 19 nt, Artificial Sequence
  Description of Artificial Sequence: Synthetic oligonucleotide
cuggauucgaaaauggguc

SEQ ID NO: 1284604 - RNA, 19 nt, Artificial Sequence
  Description of Artificial Sequence: Synthetic oligonucleotide
agacuguagaucuguugcc

SEQ ID NO: 1284605 - RNA, 19 nt, Artificial Sequence
  Description of Artificial Sequence: Synthetic oligonucleotide
ucaucauguugccagcaag

SEQ ID NO: 1284606 - RNA, 19 nt, Artificial Sequence
  Description of Artificial Sequence: Synthetic oligonucleotide
auagcuucaauccgcccgg

SEQ ID NO: 1284607 - RNA, 19 nt, Artificial Sequence
  Description of Artificial Sequence: Synthetic oligonucleotide
gauauuugagacacaggcc

SEQ ID NO: 1284608 - RNA, 19 nt, Artificial Sequence
  Description of Artificial Sequence: Synthetic oligonucleotide
acaaggacguugaugagac

SEQ ID NO: 1284609 - RNA, 19 nt, Artificial Sequence
  Description of Artificial Sequence: Synthetic oligonucleotide
guagaagaaggccaucugc

SEQ ID NO: 1284610 - RNA, 19 nt, Artificial Sequence
  Description of Artificial Sequence: Synthetic oligonucleotide
ucauguagauguagguugc

SEQ ID NO: 1284611 - RNA, 19 nt, Artificial Sequence
  Description of Artificial Sequence: Synthetic oligonucleotide
gcuacaaggacguugauga

SEQ ID NO: 1284612 - RNA, 19 nt, Artificial Sequence
  Description of Artificial Sequence: Synthetic oligonucleotide
uggcauaugucagugagug

SEQ ID NO: 1284613 - RNA, 19 nt, Artificial Sequence
  Description of Artificial Sequence: Synthetic oligonucleotide
aguuugaccaagcagucau

SEQ ID NO: 1284614 - RNA, 19 nt, Artificial Sequence
  Description of Artificial Sequence: Synthetic oligonucleotide
agaguccgaacacagaaga

SEQ ID NO: 1284615 - RNA, 19 nt, Artificial Sequence
  Description of Artificial Sequence: Synthetic oligonucleotide
ugaccaagcagucaucauc

SEQ ID NO: 1284616 - RNA, 19 nt, Artificial Sequence
  Description of Artificial Sequence: Synthetic oligonucleotide
ucaagcaucccaucaguga

SEQ ID NO: 1284617 - RNA, 19 nt, Artificial Sequence
  Description of Artificial Sequence: Synthetic oligonucleotide
agcaguuugaccaagcagu

SEQ ID NO: 1284618 - RNA, 19 nt, Artificial Sequence
  Description of Artificial Sequence: Synthetic oligonucleotide
ugcuucugagaacugguug

SEQ ID NO: 1284619 - RNA, 19 nt, Artificial Sequence
  Description of Artificial Sequence: Synthetic oligonucleotide
aucacagcauagccguucc

SEQ ID NO: 1284620 - RNA, 19 nt, Artificial Sequence
  Description of Artificial Sequence: Synthetic oligonucleotide
ugaauaacucuacuucauc

SEQ ID NO: 1284621 - RNA, 19 nt, Artificial Sequence
  Description of Artificial Sequence: Synthetic oligonucleotide
ucgaaaauggguccuugac

SEQ ID NO: 1284622 - RNA, 19 nt, Artificial Sequence
  Description of Artificial Sequence: Synthetic oligonucleotide
uggggaaucuuuugaaaug

SEQ ID NO: 1284623 - RNA, 19 nt, Artificial Sequence
  Description of Artificial Sequence: Synthetic oligonucleotide
caucauguugccagcaagc

SEQ ID NO: 1284624 - RNA, 19 nt, Artificial Sequence
  Description of Artificial Sequence: Synthetic oligonucleotide
ucugccuugcuccaugaac

SEQ ID NO: 1284625 - RNA, 19 nt, Artificial Sequence
  Description of Artificial Sequence: Synthetic oligonucleotide
ucccaaucacagcauagcc

SEQ ID NO: 1284626 - RNA, 19 nt, Artificial Sequence
  Description of Artificial Sequence: Synthetic oligonucleotide
uguugacauucccaguacc

SEQ ID NO: 1284627 - RNA, 19 nt, Artificial Sequence
  Description of Artificial Sequence: Synthetic oligonucleotide
uggauucgaaaaugggucc

SEQ ID NO: 1284628 - RNA, 19 nt, Artificial Sequence
  Description of Artificial Sequence: Synthetic oligonucleotide
aaguaguggucauauuuaa

SEQ ID NO: 1284629 - RNA, 19 nt, Artificial Sequence
  Description of Artificial Sequence: Synthetic oligonucleotide
aucugucgaguacucauuc

SEQ ID NO: 1284630 - RNA, 19 nt, Artificial Sequence
  Description of Artificial Sequence: Synthetic oligonucleotide
agacacaggccuuucagca

SEQ ID NO: 1284631 - RNA, 19 nt, Artificial Sequence
  Description of Artificial Sequence: Synthetic oligonucleotide
guaggcagccuucauguag

SEQ ID NO: 1284632 - RNA, 19 nt, Artificial Sequence
  Description of Artificial Sequence: Synthetic oligonucleotide
ucuacuucaucauccccga

SEQ ID NO: 1284633 - RNA, 19 nt, Artificial Sequence
  Description of Artificial Sequence: Synthetic oligonucleotide
ugaagcaccacaugagcuc

SEQ ID NO: 1284634 - RNA, 19 nt, Artificial Sequence
  Description of Artificial Sequence: Synthetic oligonucleotide
ggugaaacugcuuccagug

SEQ ID NO: 1284635 - RNA, 19 nt, Artificial Sequence
  Description of Artificial Sequence: Synthetic oligonucleotide
caauauucccuuugauagc

SEQ ID NO: 1284636 - RNA, 19 nt, Artificial Sequence
  Description of Artificial Sequence: Synthetic oligonucleotide
gacauagcgacugugcuuc

SEQ ID NO: 1284637 - RNA, 19 nt, Artificial Sequence
  Description of Artificial Sequence: Synthetic oligonucleotide
auagccguuccagauguac

SEQ ID NO: 1284638 - RNA, 19 nt, Artificial Sequence
  Description of Artificial Sequence: Synthetic oligonucleotide
gguggcauaugucagugag

SEQ ID NO: 1284639 - RNA, 19 nt, Artificial Sequence
  Description of Artificial Sequence: Synthetic oligonucleotide
ucuuuucauuggcagagau

SEQ ID NO: 1284640 - RNA, 19 nt, Artificial Sequence
  Description of Artificial Sequence: Synthetic oligonucleotide
uuggcaaugagaugggguu

SEQ ID NO: 1284641 - RNA, 19 nt, Artificial Sequence
  Description of Artificial Sequence: Synthetic oligonucleotide
uaggcagccuucauguaga

SEQ ID NO: 1284642 - RNA, 19 nt, Artificial Sequence
  Description of Artificial Sequence: Synthetic oligonucleotide
agcugagugcuucugagaa

SEQ ID NO: 1284643 - RNA, 19 nt, Artificial Sequence
  Description of Artificial Sequence: Synthetic oligonucleotide
aguccgaacacagaagacu

SEQ ID NO: 1284644 - RNA, 19 nt, Artificial Sequence
  Description of Artificial Sequence: Synthetic oligonucleotide
gaugaccucaagcauccca

SEQ ID NO: 1284645 - RNA, 19 nt, Artificial Sequence
  Description of Artificial Sequence: Synthetic oligonucleotide
uagauguagguugccuugg

SEQ ID NO: 1284646 - RNA, 19 nt, Artificial Sequence
  Description of Artificial Sequence: Synthetic oligonucleotide
gauccuagugggaagcaug

SEQ ID NO: 1284647 - RNA, 19 nt, Artificial Sequence
  Description of Artificial Sequence: Synthetic oligonucleotide
gggguaucuguucagguag

SEQ ID NO: 1284648 - RNA, 19 nt, Artificial Sequence
  Description of Artificial Sequence: Synthetic oligonucleotide
agagguagcgucuggacuu

SEQ ID NO: 1284649 - RNA, 19 nt, Artificial Sequence
  Description of Artificial Sequence: Synthetic oligonucleotide
ucaggauccuagugggaag

SEQ ID NO: 1284650 - RNA, 19 nt, Artificial Sequence
  Description of Artificial Sequence: Synthetic oligonucleotide
cuagugggaagcauggaca

SEQ ID NO: 1284651 - RNA, 19 nt, Artificial Sequence
  Description of Artificial Sequence: Synthetic oligonucleotide
aauccgcccggcaaagaac

SEQ ID NO: 1284652 - RNA, 19 nt, Artificial Sequence
  Description of Artificial Sequence: Synthetic oligonucleotide
ucaaaccgcuggauggcag

SEQ ID NO: 1284653 - RNA, 19 nt, Artificial Sequence
  Description of Artificial Sequence: Synthetic oligonucleotide
gggacgguggacuagguug

SEQ ID NO: 1284654 - RNA, 19 nt, Artificial Sequence
  Description of Artificial Sequence: Synthetic oligonucleotide
gacaaacucgagcagccuc

SEQ ID NO: 1284655 - RNA, 19 nt, Artificial Sequence
  Description of Artificial Sequence: Synthetic oligonucleotide
uucgaaaauggguccuuga

SEQ ID NO: 1284656 - RNA, 19 nt, Artificial Sequence
  Description of Artificial Sequence: Synthetic oligonucleotide
agcacauguggugaaacug

SEQ ID NO: 1284657 - RNA, 19 nt, Artificial Sequence
  Description of Artificial Sequence: Synthetic oligonucleotide
aagaguccgaacacagaag

SEQ ID NO: 1284658 - RNA, 19 nt, Artificial Sequence
  Description of Artificial Sequence: Synthetic oligonucleotide
ccaacaccaagcuucaccc

SEQ ID NO: 1284659 - RNA, 19 nt, Artificial Sequence
  Description of Artificial Sequence: Synthetic oligonucleotide
gaguacucauucucugggc

SEQ ID NO: 1284660 - RNA, 19 nt, Artificial Sequence
  Description of Artificial Sequence: Synthetic oligonucleotide
uugggaucaaguagugguc

SEQ ID NO: 1284661 - RNA, 19 nt, Artificial Sequence
  Description of Artificial Sequence: Synthetic oligonucleotide
uccucgauguugacauucc

SEQ ID NO: 1284662 - RNA, 19 nt, Artificial Sequence
  Description of Artificial Sequence: Synthetic oligonucleotide
auuugggaucaaguagugg

SEQ ID NO: 1284663 - RNA, 19 nt, Artificial Sequence
  Description of Artificial Sequence: Synthetic oligonucleotide
gaacagcagggccaacucc

SEQ ID NO: 1284664 - RNA, 19 nt, Artificial Sequence
  Description of Artificial Sequence: Synthetic oligonucleotide
uccccgaaaggcuuguagu

SEQ ID NO: 1284665 - RNA, 19 nt, Artificial Sequence
  Description of Artificial Sequence: Synthetic oligonucleotide
uggaccccaaggaaaggca

SEQ ID NO: 1284666 - RNA, 19 nt, Artificial Sequence
  Description of Artificial Sequence: Synthetic oligonucleotide
cugucgaguacucauucuc

SEQ ID NO: 1284667 - RNA, 19 nt, Artificial Sequence
  Description of Artificial Sequence: Synthetic oligonucleotide
auccccgaaaggcuuguag

SEQ ID NO: 1284668 - RNA, 19 nt, Artificial Sequence
  Description of Artificial Sequence: Synthetic oligonucleotide
ucaaagugccuauggcuuc

SEQ ID NO: 1284669 - RNA, 19 nt, Artificial Sequence
  Description of Artificial Sequence: Synthetic oligonucleotide
auucggcccagauauuuga

SEQ ID NO: 1284670 - RNA, 19 nt, Artificial Sequence
  Description of Artificial Sequence: Synthetic oligonucleotide
uccugaaauucuccuccgc

SEQ ID NO: 1284671 - RNA, 19 nt, Artificial Sequence
  Description of Artificial Sequence: Synthetic oligonucleotide
gugaguuuccgcugcuucc

SEQ ID NO: 1284672 - RNA, 19 nt, Artificial Sequence
  Description of Artificial Sequence: Synthetic oligonucleotide
uugcuaaaagaguccgaac

SEQ ID NO: 1284673 - RNA, 19 nt, Artificial Sequence
  Description of Artificial Sequence: Synthetic oligonucleotide
ugggaucaaguagugguca

SEQ ID NO: 1284674 - RNA, 19 nt, Artificial Sequence
  Description of Artificial Sequence: Synthetic oligonucleotide
ucugucgaguacucauucu

SEQ ID NO: 1284675 - RNA, 19 nt, Artificial Sequence
  Description of Artificial Sequence: Synthetic oligonucleotide
cucaagcaucccaucagug

SEQ ID NO: 1284676 - RNA, 19 nt, Artificial Sequence
  Description of Artificial Sequence: Synthetic oligonucleotide
uuggcagagucuaggaguu

SEQ ID NO: 1284677 - RNA, 19 nt, Artificial Sequence
  Description of Artificial Sequence: Synthetic oligonucleotide
uccgcuuccuggauucggc

SEQ ID NO: 1284678 - RNA, 19 nt, Artificial Sequence
  Description of Artificial Sequence: Synthetic oligonucleotide
aggucggcguagaagaagg

SEQ ID NO: 1284679 - RNA, 19 nt, Artificial Sequence
  Description of Artificial Sequence: Synthetic oligonucleotide
cacagcauagccguuccag

SEQ ID NO: 1284680 - RNA, 19 nt, Artificial Sequence
  Description of Artificial Sequence: Synthetic oligonucleotide
auccuagugggaagcaugg

SEQ ID NO: 1284681 - RNA, 19 nt, Artificial Sequence
  Description of Artificial Sequence: Synthetic oligonucleotide
cucgcagcacuccucaaac

SEQ ID NO: 1284682 - RNA, 19 nt, Artificial Sequence
  Description of Artificial Sequence: Synthetic oligonucleotide
guggucauauuuaaucuuc

SEQ ID NO: 1284683 - RNA, 19 nt, Artificial Sequence
  Description of Artificial Sequence: Synthetic oligonucleotide
uagguugccuuggaccagg

SEQ ID NO: 1284684 - RNA, 19 nt, Artificial Sequence
  Description of Artificial Sequence: Synthetic oligonucleotide
gguugaaggcuccaacacc

SEQ ID NO: 1284685 - RNA, 19 nt, Artificial Sequence
  Description of Artificial Sequence: Synthetic oligonucleotide
cuuguagucuuccuuccca

SEQ ID NO: 1284686 - RNA, 19 nt, Artificial Sequence
  Description of Artificial Sequence: Synthetic oligonucleotide
gguaacacaagcagcagca

SEQ ID NO: 1284687 - RNA, 19 nt, Artificial Sequence
  Description of Artificial Sequence: Synthetic oligonucleotide
acagaagacuuccuccgau

SEQ ID NO: 1284688 - RNA, 19 nt, Artificial Sequence
  Description of Artificial Sequence: Synthetic oligonucleotide
cugugcuuccuucaucaug

SEQ ID NO: 1284689 - RNA, 19 nt, Artificial Sequence
  Description of Artificial Sequence: Synthetic oligonucleotide
cagaagacuuccuccgaug

SEQ ID NO: 1284690 - RNA, 19 nt, Artificial Sequence
  Description of Artificial Sequence: Synthetic oligonucleotide
uuguagucuuccuucccaa

SEQ ID NO: 1284691 - RNA, 19 nt, Artificial Sequence
  Description of Artificial Sequence: Synthetic oligonucleotide
gaugccucugacauagcga

SEQ ID NO: 1284692 - RNA, 19 nt, Artificial Sequence
  Description of Artificial Sequence: Synthetic oligonucleotide
ugggguaucuguucaggua

SEQ ID NO: 1284693 - RNA, 19 nt, Artificial Sequence
  Description of Artificial Sequence: Synthetic oligonucleotide
gacguugaugagacuguag

SEQ ID NO: 1284694 - RNA, 19 nt, Artificial Sequence
  Description of Artificial Sequence: Synthetic oligonucleotide
ugacauagcgacugugcuu

SEQ ID NO: 1284695 - RNA, 19 nt, Artificial Sequence
  Description of Artificial Sequence: Synthetic oligonucleotide
caucagugaguuuccgcug

SEQ ID NO: 1284696 - RNA, 19 nt, Artificial Sequence
  Description of Artificial Sequence: Synthetic oligonucleotide
gauucggcccagauauuug

SEQ ID NO: 1284697 - RNA, 19 nt, Artificial Sequence
  Description of Artificial Sequence: Synthetic oligonucleotide
aucauguugccagcaagca

SEQ ID NO: 1284698 - RNA, 19 nt, Artificial Sequence
  Description of Artificial Sequence: Synthetic oligonucleotide
ugagugguacaugcucucc

SEQ ID NO: 1284699 - RNA, 19 nt, Artificial Sequence
  Description of Artificial Sequence: Synthetic oligonucleotide
ccuucuagggaagaucugg

SEQ ID NO: 1284700 - RNA, 19 nt, Artificial Sequence
  Description of Artificial Sequence: Synthetic oligonucleotide
ugccuauggcuucugugaa

SEQ ID NO: 1284701 - RNA, 19 nt, Artificial Sequence
  Description of Artificial Sequence: Synthetic oligonucleotide
uucaauccgcccggcaaag

SEQ ID NO: 1284702 - RNA, 19 nt, Artificial Sequence
  Description of Artificial Sequence: Synthetic oligonucleotide
uaggggagagguagcgucu

SEQ ID NO: 1284703 - RNA, 19 nt, Artificial Sequence
  Description of Artificial Sequence: Synthetic oligonucleotide
aggugaagcaccacaugag

SEQ ID NO: 1284704 - RNA, 19 nt, Artificial Sequence
  Description of Artificial Sequence: Synthetic oligonucleotide
uucccaguaccgagcacga

SEQ ID NO: 1284705 - RNA, 19 nt, Artificial Sequence
  Description of Artificial Sequence: Synthetic oligonucleotide
guaucuguucagguagggc

SEQ ID NO: 1284706 - RNA, 19 nt, Artificial Sequence
  Description of Artificial Sequence: Synthetic oligonucleotide
acaaacucgagcagccuca

SEQ ID NO: 1284707 - RNA, 19 nt, Artificial Sequence
  Description of Artificial Sequence: Synthetic oligonucleotide
augguggcauaugucagug

SEQ ID NO: 1284708 - RNA, 19 nt, Artificial Sequence
  Description of Artificial Sequence: Synthetic oligonucleotide
acauagcgacugugcuucc

SEQ ID NO: 1284709 - RNA, 19 nt, Artificial Sequence
  Description of Artificial Sequence: Synthetic oligonucleotide
agggauuggcaaugagaug

SEQ ID NO: 1284710 - RNA, 19 nt, Artificial Sequence
  Description of Artificial Sequence: Synthetic oligonucleotide
auucgaaaauggguccuug

SEQ ID NO: 1284711 - RNA, 19 nt, Artificial Sequence
  Description of Artificial Sequence: Synthetic oligonucleotide
ugagugcuucugagaacug

SEQ ID NO: 1284712 - RNA, 19 nt, Artificial Sequence
  Description of Artificial Sequence: Synthetic oligonucleotide
uuuccgcugcuucccaauc

SEQ ID NO: 1284713 - RNA, 19 nt, Artificial Sequence
  Description of Artificial Sequence: Synthetic oligonucleotide
caggauccuagugggaagc

SEQ ID NO: 1284714 - RNA, 19 nt, Artificial Sequence
  Description of Artificial Sequence: Synthetic oligonucleotide
caaaguggaccccaaggaa

SEQ ID NO: 1284715 - RNA, 19 nt, Artificial Sequence
  Description of Artificial Sequence: Synthetic oligonucleotide
acuguagaucuguugccuu

SEQ ID NO: 1284716 - RNA, 19 nt, Artificial Sequence
  Description of Artificial Sequence: Synthetic oligonucleotide
agaggucuagggcugucau

SEQ ID NO: 1284717 - RNA, 19 nt, Artificial Sequence
  Description of Artificial Sequence: Synthetic oligonucleotide
ccuagugggaagcauggac

SEQ ID NO: 1284718 - RNA, 19 nt, Artificial Sequence
  Description of Artificial Sequence: Synthetic oligonucleotide
gaucaaguaguggucauau

SEQ ID NO: 1284719 - RNA, 19 nt, Artificial Sequence
  Description of Artificial Sequence: Synthetic oligonucleotide
agcccugaauaacucuacu

SEQ ID NO: 1284720 - RNA, 19 nt, Artificial Sequence
  Description of Artificial Sequence: Synthetic oligonucleotide
agcuucaagccuggcacag

SEQ ID NO: 1284721 - RNA, 19 nt, Artificial Sequence
  Description of Artificial Sequence: Synthetic oligonucleotide
aaaacccgacaaacucgag

SEQ ID NO: 1284722 - RNA, 19 nt, Artificial Sequence
  Description of Artificial Sequence: Synthetic oligonucleotide
guggaccccaaggaaaggc

SEQ ID NO: 1284723 - RNA, 19 nt, Artificial Sequence
  Description of Artificial Sequence: Synthetic oligonucleotide
cacgaaggugaggaaagug

SEQ ID NO: 1284724 - RNA, 19 nt, Artificial Sequence
  Description of Artificial Sequence: Synthetic oligonucleotide
cuagggcugucaugcacug

SEQ ID NO: 1284725 - RNA, 19 nt, Artificial Sequence
  Description of Artificial Sequence: Synthetic oligonucleotide
cuguccagcuagcugugug

SEQ ID NO: 1284726 - RNA, 19 nt, Artificial Sequence
  Description of Artificial Sequence: Synthetic oligonucleotide
auagcgacugugcuuccuu

SEQ ID NO: 1284727 - RNA, 19 nt, Artificial Sequence
  Description of Artificial Sequence: Synthetic oligonucleotide
ugucagugagugguacaug

SEQ ID NO: 1284728 - RNA, 19 nt, Artificial Sequence
  Description of Artificial Sequence: Synthetic oligonucleotide
ggaaagugugguaacacaa

SEQ ID NO: 1284729 - RNA, 19 nt, Artificial Sequence
  Description of Artificial Sequence: Synthetic oligonucleotide
cccggcaaagaacaggaag

SEQ ID NO: 1284730 - RNA, 19 nt, Artificial Sequence
  Description of Artificial Sequence: Synthetic oligonucleotide
gagagguagcgucuggacu

SEQ ID NO: 1284731 - RNA, 19 nt, Artificial Sequence
  Description of Artificial Sequence: Synthetic oligonucleotide
cccaguaccgagcacgaag

SEQ ID NO: 1284732 - RNA, 19 nt, Artificial Sequence
  Description of Artificial Sequence: Synthetic oligonucleotide
ggacuagguugcuaaaaga

SEQ ID NO: 1284733 - RNA, 19 nt, Artificial Sequence
  Description of Artificial Sequence: Synthetic oligonucleotide
ggcaaugagaugggguuag

SEQ ID NO: 1284734 - RNA, 19 nt, Artificial Sequence
  Description of Artificial Sequence: Synthetic oligonucleotide
cagcccugaauaacucuac

SEQ ID NO: 1284735 - RNA, 19 nt, Artificial Sequence
  Description of Artificial Sequence: Synthetic oligonucleotide
cgcagcacuccucaaaccg

SEQ ID NO: 1284736 - RNA, 19 nt, Artificial Sequence
  Description of Artificial Sequence: Synthetic oligonucleotide
aguaguggucauauuuaau

SEQ ID NO: 1284737 - RNA, 19 nt, Artificial Sequence
  Description of Artificial Sequence: Synthetic oligonucleotide
gcauaugucagugaguggu

SEQ ID NO: 1284738 - RNA, 19 nt, Artificial Sequence
  Description of Artificial Sequence: Synthetic oligonucleotide
ccgacaaacucgagcagcc

SEQ ID NO: 1284739 - RNA, 19 nt, Artificial Sequence
  Description of Artificial Sequence: Synthetic oligonucleotide
ggugggacgguggacuagg

SEQ ID NO: 1284740 - RNA, 19 nt, Artificial Sequence
  Description of Artificial Sequence: Synthetic oligonucleotide
gaguccgaacacagaagac

SEQ ID NO: 1284741 - RNA, 19 nt, Artificial Sequence
  Description of Artificial Sequence: Synthetic oligonucleotide
acccgacaaacucgagcag

SEQ ID NO: 1284742 - RNA, 19 nt, Artificial Sequence
  Description of Artificial Sequence: Synthetic oligonucleotide
cuugacuccauggaguagu

SEQ ID NO: 1284743 - RNA, 19 nt, Artificial Sequence
  Description of Artificial Sequence: Synthetic oligonucleotide
ugaccucaagcaucccauc

SEQ ID NO: 1284744 - RNA, 19 nt, Artificial Sequence
  Description of Artificial Sequence: Synthetic oligonucleotide
ggcagagucuaggaguuug

SEQ ID NO: 1284745 - RNA, 19 nt, Artificial Sequence
  Description of Artificial Sequence: Synthetic oligonucleotide
aagaucuggccuggagcgu

SEQ ID NO: 1284746 - RNA, 19 nt, Artificial Sequence
  Description of Artificial Sequence: Synthetic oligonucleotide
agccaucccacuggagcac

SEQ ID NO: 1284747 - RNA, 19 nt, Artificial Sequence
  Description of Artificial Sequence: Synthetic oligonucleotide
gaucuggccuggagcgugg

SEQ ID NO: 1284748 - RNA, 19 nt, Artificial Sequence
  Description of Artificial Sequence: Synthetic oligonucleotide
caggucggcguagaagaag

SEQ ID NO: 1284749 - RNA, 19 nt, Artificial Sequence
  Description of Artificial Sequence: Synthetic oligonucleotide
gagcuucaagccuggcaca

SEQ ID NO: 1284750 - RNA, 19 nt, Artificial Sequence
  Description of Artificial Sequence: Synthetic oligonucleotide
cugaauaacucuacuucau

SEQ ID NO: 1284751 - RNA, 19 nt, Artificial Sequence
  Description of Artificial Sequence: Synthetic oligonucleotide
gacuguagaucuguugccu

SEQ ID NO: 1284752 - RNA, 19 nt, Artificial Sequence
  Description of Artificial Sequence: Synthetic oligonucleotide
auccgcccggcaaagaaca

SEQ ID NO: 1284753 - RNA, 19 nt, Artificial Sequence
  Description of Artificial Sequence: Synthetic oligonucleotide
cuggacuuccggauggcaa

SEQ ID NO: 1284754 - RNA, 19 nt, Artificial Sequence
  Description of Artificial Sequence: Synthetic oligonucleotide
cuucaauccgcccggcaaa

SEQ ID NO: 1284755 - RNA, 19 nt, Artificial Sequence
  Description of Artificial Sequence: Synthetic oligonucleotide
gccuggauucgaaaauggg

SEQ ID NO: 1284756 - RNA, 19 nt, Artificial Sequence
  Description of Artificial Sequence: Synthetic oligonucleotide
agcuucaccccuccuucaa

SEQ ID NO: 1284757 - RNA, 19 nt, Artificial Sequence
  Description of Artificial Sequence: Synthetic oligonucleotide
uccgcccggcaaagaacag

SEQ ID NO: 1284758 - RNA, 19 nt, Artificial Sequence
  Description of Artificial Sequence: Synthetic oligonucleotide
caaacucgagcagccucag

SEQ ID NO: 1284759 - RNA, 19 nt, Artificial Sequence
  Description of Artificial Sequence: Synthetic oligonucleotide
ugccucugacauagcgacu

SEQ ID NO: 1284760 - RNA, 19 nt, Artificial Sequence
  Description of Artificial Sequence: Synthetic oligonucleotide
gagauuucccagcaaucuu

SEQ ID NO: 1284761 - RNA, 19 nt, Artificial Sequence
  Description of Artificial Sequence: Synthetic oligonucleotide
caauccgcccggcaaagaa

SEQ ID NO: 1284762 - RNA, 19 nt, Artificial Sequence
  Description of Artificial Sequence: Synthetic oligonucleotide
cauaugucagugaguggua

SEQ ID NO: 1284763 - RNA, 19 nt, Artificial Sequence
  Description of Artificial Sequence: Synthetic oligonucleotide
aagcuacaaggacguugau

SEQ ID NO: 1284764 - RNA, 19 nt, Artificial Sequence
  Description of Artificial Sequence: Synthetic oligonucleotide
ugggacgguggacuagguu

SEQ ID NO: 1284765 - RNA, 19 nt, Artificial Sequence
  Description of Artificial Sequence: Synthetic oligonucleotide
ugggguuaggggagaggua

SEQ ID NO: 1284766 - RNA, 19 nt, Artificial Sequence
  Description of Artificial Sequence: Synthetic oligonucleotide
agguagcgucuggacuucc

SEQ ID NO: 1284767 - RNA, 19 nt, Artificial Sequence
  Description of Artificial Sequence: Synthetic oligonucleotide
cccaucagugaguuuccgc

SEQ ID NO: 1284768 - RNA, 19 nt, Artificial Sequence
  Description of Artificial Sequence: Synthetic oligonucleotide
uggcaaugagaugggguua

SEQ ID NO: 1284769 - RNA, 19 nt, Artificial Sequence
  Description of Artificial Sequence: Synthetic oligonucleotide
uccuagugggaagcaugga

SEQ ID NO: 1284770 - RNA, 19 nt, Artificial Sequence
  Description of Artificial Sequence: Synthetic oligonucleotide
gguagcgucuggacuuccg

SEQ ID NO: 1284771 - RNA, 19 nt, Artificial Sequence
  Description of Artificial Sequence: Synthetic oligonucleotide
ggacgguggacuagguugc

SEQ ID NO: 1284772 - RNA, 19 nt, Artificial Sequence
  Description of Artificial Sequence: Synthetic oligonucleotide
ggguaucuguucagguagg

SEQ ID NO: 1284773 - RNA, 19 nt, Artificial Sequence
  Description of Artificial Sequence: Synthetic oligonucleotide
guggacuagguugcuaaaa

SEQ ID NO: 1284774 - RNA, 19 nt, Artificial Sequence
  Description of Artificial Sequence: Synthetic oligonucleotide
ccuggauucgaaaaugggu

SEQ ID NO: 1284775 - RNA, 19 nt, Artificial Sequence
  Description of Artificial Sequence: Synthetic oligonucleotide
ucaauccgcccggcaaaga

SEQ ID NO: 1284776 - RNA, 19 nt, Artificial Sequence
  Description of Artificial Sequence: Synthetic oligonucleotide
cccgacaaacucgagcagc

SEQ ID NO: 1284777 - RNA, 19 nt, Artificial Sequence
  Description of Artificial Sequence: Synthetic oligonucleotide
cuugagcuucaagccuggc

SEQ ID NO: 1284778 - RNA, 19 nt, Artificial Sequence
  Description of Artificial Sequence: Synthetic oligonucleotide
cggcccagauauuugagac

SEQ ID NO: 1284779 - RNA, 19 nt, Artificial Sequence
  Description of Artificial Sequence: Synthetic oligonucleotide
agauggcacccuuggggua

SEQ ID NO: 1284780 - RNA, 19 nt, Artificial Sequence
  Description of Artificial Sequence: Synthetic oligonucleotide
gcauagccguuccagaugu

SEQ ID NO: 1284781 - RNA, 19 nt, Artificial Sequence
  Description of Artificial Sequence: Synthetic oligonucleotide
ccuucccaaacaugcugag

SEQ ID NO: 1284782 - RNA, 19 nt, Artificial Sequence
  Description of Artificial Sequence: Synthetic oligonucleotide
ccguuccagauguacauca

SEQ ID NO: 1284783 - RNA, 19 nt, Artificial Sequence
  Description of Artificial Sequence: Synthetic oligonucleotide
caucaauauucccuuugau

SEQ ID NO: 1284784 - RNA, 19 nt, Artificial Sequence
  Description of Artificial Sequence: Synthetic oligonucleotide
ggcccagauauuugagaca

SEQ ID NO: 1284785 - RNA, 19 nt, Artificial Sequence
  Description of Artificial Sequence: Synthetic oligonucleotide
gggaagcauggacagcguc

SEQ ID NO: 1284786 - RNA, 19 nt, Artificial Sequence
  Description of Artificial Sequence: Synthetic oligonucleotide
accgagcacgaaggugagg

SEQ ID NO: 1284787 - RNA, 19 nt, Artificial Sequence
  Description of Artificial Sequence: Synthetic oligonucleotide
cucugugggcagagauuuc

SEQ ID NO: 1284788 - RNA, 19 nt, Artificial Sequence
  Description of Artificial Sequence: Synthetic oligonucleotide
auggugggacgguggacua

SEQ ID NO: 1284789 - RNA, 19 nt, Artificial Sequence
  Description of Artificial Sequence: Synthetic oligonucleotide
ggguggggaaucuuuugaa

SEQ ID NO: 1284790 - RNA, 19 nt, Artificial Sequence
  Description of Artificial Sequence: Synthetic oligonucleotide
gcaguuugaccaagcaguc

SEQ ID NO: 1284791 - RNA, 19 nt, Artificial Sequence
  Description of Artificial Sequence: Synthetic oligonucleotide
gagaugggguuaggggaga

SEQ ID NO: 1284792 - RNA, 19 nt, Artificial Sequence
  Description of Artificial Sequence: Synthetic oligonucleotide
cguagaagaaggccaucug

SEQ ID NO: 1284793 - RNA, 19 nt, Artificial Sequence
  Description of Artificial Sequence: Synthetic oligonucleotide
caguuugaccaagcaguca

SEQ ID NO: 1284794 - RNA, 19 nt, Artificial Sequence
  Description of Artificial Sequence: Synthetic oligonucleotide
ccgagcacgaaggugagga

SEQ ID NO: 1284795 - RNA, 19 nt, Artificial Sequence
  Description of Artificial Sequence: Synthetic oligonucleotide
uagcuucaauccgcccggc

SEQ ID NO: 1284796 - RNA, 19 nt, Artificial Sequence
  Description of Artificial Sequence: Synthetic oligonucleotide
guccgaacacagaagacuu

SEQ ID NO: 1284797 - RNA, 19 nt, Artificial Sequence
  Description of Artificial Sequence: Synthetic oligonucleotide
ccugaaaacccgacaaacu

SEQ ID NO: 1284798 - RNA, 19 nt, Artificial Sequence
  Description of Artificial Sequence: Synthetic oligonucleotide
gucagguugaaggcuccaa

SEQ ID NO: 1284799 - RNA, 19 nt, Artificial Sequence
  Description of Artificial Sequence: Synthetic oligonucleotide
gauucgaaaauggguccuu

SEQ ID NO: 1284800 - RNA, 19 nt, Artificial Sequence
  Description of Artificial Sequence: Synthetic oligonucleotide
caguagcacauguggugaa

SEQ ID NO: 1284801 - RNA, 19 nt, Artificial Sequence
  Description of Artificial Sequence: Synthetic oligonucleotide
cagcauagccguuccagau

SEQ ID NO: 1284802 - RNA, 19 nt, Artificial Sequence
  Description of Artificial Sequence: Synthetic oligonucleotide
guuuccgcugcuucccaau

SEQ ID NO: 1284803 - RNA, 19 nt, Artificial Sequence
  Description of Artificial Sequence: Synthetic oligonucleotide
gguugcuaaaagaguccga

SEQ ID NO: 1284804 - RNA, 19 nt, Artificial Sequence
  Description of Artificial Sequence: Synthetic oligonucleotide
ggcacagcccugaauaacu

SEQ ID NO: 1284805 - RNA, 19 nt, Artificial Sequence
  Description of Artificial Sequence: Synthetic oligonucleotide
caucauccccgaaaggcuu

SEQ ID NO: 1284806 - RNA, 19 nt, Artificial Sequence
  Description of Artificial Sequence: Synthetic oligonucleotide
ccuucauguagauguaggu

SEQ ID NO: 1284807 - RNA, 19 nt, Artificial Sequence
  Description of Artificial Sequence: Synthetic oligonucleotide
gguggacuagguugcuaaa

SEQ ID NO: 1284808 - RNA, 19 nt, Artificial Sequence
  Description of Artificial Sequence: Synthetic oligonucleotide
guuaggggagagguagcgu

SEQ ID NO: 1284809 - RNA, 19 nt, Artificial Sequence
  Description of Artificial Sequence: Synthetic oligonucleotide
ggccucgcagcacuccuca

SEQ ID NO: 1284810 - RNA, 19 nt, Artificial Sequence
  Description of Artificial Sequence: Synthetic oligonucleotide
gcugccuggauucgaaaau

SEQ ID NO: 1284811 - RNA, 19 nt, Artificial Sequence
  Description of Artificial Sequence: Synthetic oligonucleotide
ggauucgaaaauggguccu

SEQ ID NO: 1284812 - RNA, 19 nt, Artificial Sequence
  Description of Artificial Sequence: Synthetic oligonucleotide
ucccagcaaucuugagcuu

SEQ ID NO: 1284813 - RNA, 19 nt, Artificial Sequence
  Description of Artificial Sequence: Synthetic oligonucleotide
guuuugcuuggcagagucu

SEQ ID NO: 1284814 - RNA, 19 nt, Artificial Sequence
  Description of Artificial Sequence: Synthetic oligonucleotide
ccgcuuccuggauucggcc

SEQ ID NO: 1284815 - RNA, 19 nt, Artificial Sequence
  Description of Artificial Sequence: Synthetic oligonucleotide
ggaucaaguaguggucaua

SEQ ID NO: 1284816 - RNA, 19 nt, Artificial Sequence
  Description of Artificial Sequence: Synthetic oligonucleotide
gcguagaagaaggccaucu

SEQ ID NO: 1284817 - RNA, 19 nt, Artificial Sequence
  Description of Artificial Sequence: Synthetic oligonucleotide
gcagagucuaggaguuuga

SEQ ID NO: 1284818 - RNA, 19 nt, Artificial Sequence
  Description of Artificial Sequence: Synthetic oligonucleotide
cuacuucaucauccccgaa

SEQ ID NO: 1284819 - RNA, 19 nt, Artificial Sequence
  Description of Artificial Sequence: Synthetic oligonucleotide
ccgcccggcaaagaacagg

SEQ ID NO: 1284820 - RNA, 19 nt, Artificial Sequence
  Description of Artificial Sequence: Synthetic oligonucleotide
ccuugacuccauggaguag

SEQ ID NO: 1284821 - RNA, 19 nt, Artificial Sequence
  Description of Artificial Sequence: Synthetic oligonucleotide
gcccugaauaacucuacuu

SEQ ID NO: 1284822 - RNA, 19 nt, Artificial Sequence
  Description of Artificial Sequence: Synthetic oligonucleotide
ggauucggcccagauauuu

SEQ ID NO: 1284823 - RNA, 19 nt, Artificial Sequence
  Description of Artificial Sequence: Synthetic oligonucleotide
cgcccggcaaagaacagga

SEQ ID NO: 1284824 - RNA, 19 nt, Artificial Sequence
  Description of Artificial Sequence: Synthetic oligonucleotide
gccuucuagggaagaucug

SEQ ID NO: 1284825 - RNA, 19 nt, Artificial Sequence
  Description of Artificial Sequence: Synthetic oligonucleotide
acgguggacuagguugcua

SEQ ID NO: 1284826 - RNA, 19 nt, Artificial Sequence
  Description of Artificial Sequence: Synthetic oligonucleotide
uggcagagucuaggaguuu

SEQ ID NO: 1284827 - RNA, 19 nt, Artificial Sequence
  Description of Artificial Sequence: Synthetic oligonucleotide
gggcccauugccagcaucu

SEQ ID NO: 1284828 - RNA, 19 nt, Artificial Sequence
  Description of Artificial Sequence: Synthetic oligonucleotide
cauagcgacugugcuuccu

SEQ ID NO: 1284829 - RNA, 19 nt, Artificial Sequence
  Description of Artificial Sequence: Synthetic oligonucleotide
gcgucagguugaaggcucc

SEQ ID NO: 1284830 - RNA, 19 nt, Artificial Sequence
  Description of Artificial Sequence: Synthetic oligonucleotide
cgguggacuagguugcuaa

SEQ ID NO: 1284831 - RNA, 19 nt, Artificial Sequence
  Description of Artificial Sequence: Synthetic oligonucleotide
cauagccguuccagaugua

SEQ ID NO: 1284832 - RNA, 19 nt, Artificial Sequence
  Description of Artificial Sequence: Synthetic oligonucleotide
ccagcagggcauuugggau

SEQ ID NO: 1284833 - RNA, 19 nt, Artificial Sequence
  Description of Artificial Sequence: Synthetic oligonucleotide
gcccauugccagcaucucu

SEQ ID NO: 1284834 - RNA, 19 nt, Artificial Sequence
  Description of Artificial Sequence: Synthetic oligonucleotide
cuccgaugccucugacaua

SEQ ID NO: 1284835 - RNA, 19 nt, Artificial Sequence
  Description of Artificial Sequence: Synthetic oligonucleotide
cccacuggagcaccaaagu

SEQ ID NO: 1284836 - RNA, 19 nt, Artificial Sequence
  Description of Artificial Sequence: Synthetic oligonucleotide
caaggacguugaugagacu

SEQ ID NO: 1284837 - RNA, 19 nt, Artificial Sequence
  Description of Artificial Sequence: Synthetic oligonucleotide
gcguggcugccuggauucg

SEQ ID NO: 1284838 - RNA, 19 nt, Artificial Sequence
  Description of Artificial Sequence: Synthetic oligonucleotide
ccuccuucaaagugccuau

SEQ ID NO: 1284839 - RNA, 19 nt, Artificial Sequence
  Description of Artificial Sequence: Synthetic oligonucleotide
ccuccgcuuccuggauucg

SEQ ID NO: 1284840 - RNA, 19 nt, Artificial Sequence
  Description of Artificial Sequence: Synthetic oligonucleotide
ccgaugccucugacauagc

SEQ ID NO: 1284841 - RNA, 19 nt, Artificial Sequence
  Description of Artificial Sequence: Synthetic oligonucleotide
ccgcugcuucccaaucaca

SEQ ID NO: 1284842 - RNA, 19 nt, Artificial Sequence
  Description of Artificial Sequence: Synthetic oligonucleotide
cagcuagcuguguguucau

SEQ ID NO: 1284843 - RNA, 19 nt, Artificial Sequence
  Description of Artificial Sequence: Synthetic oligonucleotide
cauccccgaaaggcuugua

SEQ ID NO: 1284844 - RNA, 19 nt, Artificial Sequence
  Description of Artificial Sequence: Synthetic oligonucleotide
gugggacgguggacuaggu

SEQ ID NO: 1284845 - RNA, 19 nt, Artificial Sequence
  Description of Artificial Sequence: Synthetic oligonucleotide
cagugaguuuccgcugcuu

SEQ ID NO: 1284846 - RNA, 19 nt, Artificial Sequence
  Description of Artificial Sequence: Synthetic oligonucleotide
gccucgcagcacuccucaa

SEQ ID NO: 1284847 - RNA, 19 nt, Artificial Sequence
  Description of Artificial Sequence: Synthetic oligonucleotide
gcccggcaaagaacaggaa

SEQ ID NO: 1284848 - RNA, 19 nt, Artificial Sequence
  Description of Artificial Sequence: Synthetic oligonucleotide
cguggcugccuggauucga

SEQ ID NO: 1284849 - RNA, 19 nt, Artificial Sequence
  Description of Artificial Sequence: Synthetic oligonucleotide
cgucagguugaaggcucca

SEQ ID NO: 1284850 - RNA, 19 nt, Artificial Sequence
  Description of Artificial Sequence: Synthetic oligonucleotide
ugaauuuugauucaucugg

SEQ ID NO: 1284851 - RNA, 19 nt, Artificial Sequence
  Description of Artificial Sequence: Synthetic oligonucleotide
aaucucacaucuuuguucc

SEQ ID NO: 1284852 - RNA, 19 nt, Artificial Sequence
  Description of Artificial Sequence: Synthetic oligonucleotide
uauccaaucggccagggcg

SEQ ID NO: 1284853 - RNA, 19 nt, Artificial Sequence
  Description of Artificial Sequence: Synthetic oligonucleotide
ugacuuguggcgaugagcg

SEQ ID NO: 1284854 - RNA, 19 nt, Artificial Sequence
  Description of Artificial Sequence: Synthetic oligonucleotide
acguuuaaaaucucaagac

SEQ ID NO: 1284855 - RNA, 19 nt, Artificial Sequence
  Description of Artificial Sequence: Synthetic oligonucleotide
acuuguuuauauugcagcc

SEQ ID NO: 1284856 - RNA, 19 nt, Artificial Sequence
  Description of Artificial Sequence: Synthetic oligonucleotide
uaagaaagaccauugaaga

SEQ ID NO: 1284857 - RNA, 19 nt, Artificial Sequence
  Description of Artificial Sequence: Synthetic oligonucleotide
aacuacucggucuguaacc

SEQ ID NO: 1284858 - RNA, 19 nt, Artificial Sequence
  Description of Artificial Sequence: Synthetic oligonucleotide
acuacugugguuaagaaag

SEQ ID NO: 1284859 - RNA, 19 nt, Artificial Sequence
  Description of Artificial Sequence: Synthetic oligonucleotide
cuugcaacuaccuaugcgc

SEQ ID NO: 1284860 - RNA, 19 nt, Artificial Sequence
  Description of Artificial Sequence: Synthetic oligonucleotide
aaucucaagacgugacacc

SEQ ID NO: 1284861 - RNA, 19 nt, Artificial Sequence
  Description of Artificial Sequence: Synthetic oligonucleotide
acugaggacguuuaaaauc

SEQ ID NO: 1284862 - RNA, 19 nt, Artificial Sequence
  Description of Artificial Sequence: Synthetic oligonucleotide
uggcuaauagcaaaacugg

SEQ ID NO: 1284863 - RNA, 19 nt, Artificial Sequence
  Description of Artificial Sequence: Synthetic oligonucleotide
uauauugcagcccaguuau

SEQ ID NO: 1284864 - RNA, 19 nt, Artificial Sequence
  Description of Artificial Sequence: Synthetic oligonucleotide
gugaaaacgucucugacag

SEQ ID NO: 1284865 - RNA, 19 nt, Artificial Sequence
  Description of Artificial Sequence: Synthetic oligonucleotide
aaugugccuggcuaauagc

SEQ ID NO: 1284866 - RNA, 19 nt, Artificial Sequence
  Description of Artificial Sequence: Synthetic oligonucleotide
auacacauuuauccaaucg

SEQ ID NO: 1284867 - RNA, 19 nt, Artificial Sequence
  Description of Artificial Sequence: Synthetic oligonucleotide
agcucugauucauaggagc

SEQ ID NO: 1284868 - RNA, 19 nt, Artificial Sequence
  Description of Artificial Sequence: Synthetic oligonucleotide
ucgagagaaaccaagggac

SEQ ID NO: 1284869 - RNA, 19 nt, Artificial Sequence
  Description of Artificial Sequence: Synthetic oligonucleotide
gacguuuaaaaucucaaga

SEQ ID NO: 1284870 - RNA, 19 nt, Artificial Sequence
  Description of Artificial Sequence: Synthetic oligonucleotide
agaaacuaacucuuugauc

SEQ ID NO: 1284871 - RNA, 19 nt, Artificial Sequence
  Description of Artificial Sequence: Synthetic oligonucleotide
gagaacgccaccuccaagg

SEQ ID NO: 1284872 - RNA, 19 nt, Artificial Sequence
  Description of Artificial Sequence: Synthetic oligonucleotide
uucaacuccauccaacugu

SEQ ID NO: 1284873 - RNA, 19 nt, Artificial Sequence
  Description of Artificial Sequence: Synthetic oligonucleotide
uuugauugguccuggcugg

SEQ ID NO: 1284874 - RNA, 19 nt, Artificial Sequence
  Description of Artificial Sequence: Synthetic oligonucleotide
uguacaguagagcuuucag

SEQ ID NO: 1284875 - RNA, 19 nt, Artificial Sequence
  Description of Artificial Sequence: Synthetic oligonucleotide
ucucgagagaaaccaaggg

SEQ ID NO: 1284876 - RNA, 19 nt, Artificial Sequence
  Description of Artificial Sequence: Synthetic oligonucleotide
cuugcuccaauauauuugc

SEQ ID NO: 1284877 - RNA, 19 nt, Artificial Sequence
  Description of Artificial Sequence: Synthetic oligonucleotide
aaugucagaagacuuguuu

SEQ ID NO: 1284878 - RNA, 19 nt, Artificial Sequence
  Description of Artificial Sequence: Synthetic oligonucleotide
aagggauucauccucucca

SEQ ID NO: 1284879 - RNA, 19 nt, Artificial Sequence
  Description of Artificial Sequence: Synthetic oligonucleotide
agucagggcgacuaguggc

SEQ ID NO: 1284880 - RNA, 19 nt, Artificial Sequence
  Description of Artificial Sequence: Synthetic oligonucleotide
aaagaaugcagggcuuugc

SEQ ID NO: 1284881 - RNA, 19 nt, Artificial Sequence
  Description of Artificial Sequence: Synthetic oligonucleotide
gauuucggccuucagcugg

SEQ ID NO: 1284882 - RNA, 19 nt, Artificial Sequence
  Description of Artificial Sequence: Synthetic oligonucleotide
acuuaggucacugucagag

SEQ ID NO: 1284883 - RNA, 19 nt, Artificial Sequence
  Description of Artificial Sequence: Synthetic oligonucleotide
aacaagcaaggguuguagg

SEQ ID NO: 1284884 - RNA, 19 nt, Artificial Sequence
  Description of Artificial Sequence: Synthetic oligonucleotide
aagacuuguuuauauugca

SEQ ID NO: 1284885 - RNA, 19 nt, Artificial Sequence
  Description of Artificial Sequence: Synthetic oligonucleotide
uucuacgacauucugcaga

SEQ ID NO: 1284886 - RNA, 19 nt, Artificial Sequence
  Description of Artificial Sequence: Synthetic oligonucleotide
ugguaucugccuuugauga

SEQ ID NO: 1284887 - RNA, 19 nt, Artificial Sequence
  Description of Artificial Sequence: Synthetic oligonucleotide
gaagguguccugaacauag

SEQ ID NO: 1284888 - RNA, 19 nt, Artificial Sequence
  Description of Artificial Sequence: Synthetic oligonucleotide
ugcguuguacaguagagcu

SEQ ID NO: 1284889 - RNA, 19 nt, Artificial Sequence
  Description of Artificial Sequence: Synthetic oligonucleotide
aagggacugaucuaagcca

SEQ ID NO: 1284890 - RNA, 19 nt, Artificial Sequence
  Description of Artificial Sequence: Synthetic oligonucleotide
gagucacugagcuuggugc

SEQ ID NO: 1284891 - RNA, 19 nt, Artificial Sequence
  Description of Artificial Sequence: Synthetic oligonucleotide
ugugcguuguacaguagag

SEQ ID NO: 1284892 - RNA, 19 nt, Artificial Sequence
  Description of Artificial Sequence: Synthetic oligonucleotide
ucccuugauacuaauaaau

SEQ ID NO: 1284893 - RNA, 19 nt, Artificial Sequence
  Description of Artificial Sequence: Synthetic oligonucleotide
uacgacauucugcagaauc

SEQ ID NO: 1284894 - RNA, 19 nt, Artificial Sequence
  Description of Artificial Sequence: Synthetic oligonucleotide
ugcuccaauauauuugcug

SEQ ID NO: 1284895 - RNA, 19 nt, Artificial Sequence
  Description of Artificial Sequence: Synthetic oligonucleotide
uaucuuucaaagcgugugc

SEQ ID NO: 1284896 - RNA, 19 nt, Artificial Sequence
  Description of Artificial Sequence: Synthetic oligonucleotide
cugugguuaagaaagacca

SEQ ID NO: 1284897 - RNA, 19 nt, Artificial Sequence
  Description of Artificial Sequence: Synthetic oligonucleotide
aaacaagcaaggguuguag

SEQ ID NO: 1284898 - RNA, 19 nt, Artificial Sequence
  Description of Artificial Sequence: Synthetic oligonucleotide
uugauacuaauaaauucau

SEQ ID NO: 1284899 - RNA, 19 nt, Artificial Sequence
  Description of Artificial Sequence: Synthetic oligonucleotide
aguauacacauuuauccaa

SEQ ID NO: 1284900 - RNA, 19 nt, Artificial Sequence
  Description of Artificial Sequence: Synthetic oligonucleotide
acuaccuaugcgcugcagg

SEQ ID NO: 1284901 - RNA, 19 nt, Artificial Sequence
  Description of Artificial Sequence: Synthetic oligonucleotide
acagaaacuaacucuuuga

SEQ ID NO: 1284902 - RNA, 19 nt, Artificial Sequence
  Description of Artificial Sequence: Synthetic oligonucleotide
aagacgugacaccuggucu

SEQ ID NO: 1284903 - RNA, 19 nt, Artificial Sequence
  Description of Artificial Sequence: Synthetic oligonucleotide
aagcgcagucauuaaaugu

SEQ ID NO: 1284904 - RNA, 19 nt, Artificial Sequence
  Description of Artificial Sequence: Synthetic oligonucleotide
uccugagucacugagcuug

SEQ ID NO: 1284905 - RNA, 19 nt, Artificial Sequence
  Description of Artificial Sequence: Synthetic oligonucleotide
aaguagagccgguacauau

SEQ ID NO: 1284906 - RNA, 19 nt, Artificial Sequence
  Description of Artificial Sequence: Synthetic oligonucleotide
agcgcaaucaaacuuccca

SEQ ID NO: 1284907 - RNA, 19 nt, Artificial Sequence
  Description of Artificial Sequence: Synthetic oligonucleotide
aagucagggcgacuagugg

SEQ ID NO: 1284908 - RNA, 19 nt, Artificial Sequence
  Description of Artificial Sequence: Synthetic oligonucleotide
acugguuaacuacucgguc

SEQ ID NO: 1284909 - RNA, 19 nt, Artificial Sequence
  Description of Artificial Sequence: Synthetic oligonucleotide
ugaacauaggauguugugu

SEQ ID NO: 1284910 - RNA, 19 nt, Artificial Sequence
  Description of Artificial Sequence: Synthetic oligonucleotide
guguccugaacauaggaug

SEQ ID NO: 1284911 - RNA, 19 nt, Artificial Sequence
  Description of Artificial Sequence: Synthetic oligonucleotide
agugaaggauucuguuacc

SEQ ID NO: 1284912 - RNA, 19 nt, Artificial Sequence
  Description of Artificial Sequence: Synthetic oligonucleotide
acuaguggcagccaacaca

SEQ ID NO: 1284913 - RNA, 19 nt, Artificial Sequence
  Description of Artificial Sequence: Synthetic oligonucleotide
aagcaaggguuguaggcag

SEQ ID NO: 1284914 - RNA, 19 nt, Artificial Sequence
  Description of Artificial Sequence: Synthetic oligonucleotide
auauacacccuguaagccu

SEQ ID NO: 1284915 - RNA, 19 nt, Artificial Sequence
  Description of Artificial Sequence: Synthetic oligonucleotide
ugguuaacuacucggucug

SEQ ID NO: 1284916 - RNA, 19 nt, Artificial Sequence
  Description of Artificial Sequence: Synthetic oligonucleotide
acuacucggucuguaaccc

SEQ ID NO: 1284917 - RNA, 19 nt, Artificial Sequence
  Description of Artificial Sequence: Synthetic oligonucleotide
ucccacagaaacuaacucu

SEQ ID NO: 1284918 - RNA, 19 nt, Artificial Sequence
  Description of Artificial Sequence: Synthetic oligonucleotide
caaagcgugugcaagccgc

SEQ ID NO: 1284919 - RNA, 19 nt, Artificial Sequence
  Description of Artificial Sequence: Synthetic oligonucleotide
uauugaauuuugauucauc

SEQ ID NO: 1284920 - RNA, 19 nt, Artificial Sequence
  Description of Artificial Sequence: Synthetic oligonucleotide
cucaagacgugacaccugg

SEQ ID NO: 1284921 - RNA, 19 nt, Artificial Sequence
  Description of Artificial Sequence: Synthetic oligonucleotide
cagugaaggauucuguuac

SEQ ID NO: 1284922 - RNA, 19 nt, Artificial Sequence
  Description of Artificial Sequence: Synthetic oligonucleotide
aaggauucuguuaccgacg

SEQ ID NO: 1284923 - RNA, 19 nt, Artificial Sequence
  Description of Artificial Sequence: Synthetic oligonucleotide
uguugucgugaccucuucg

SEQ ID NO: 1284924 - RNA, 19 nt, Artificial Sequence
  Description of Artificial Sequence: Synthetic oligonucleotide
ugugucagcaacugguuaa

SEQ ID NO: 1284925 - RNA, 19 nt, Artificial Sequence
  Description of Artificial Sequence: Synthetic oligonucleotide
uauauuugcugaguaacuc

SEQ ID NO: 1284926 - RNA, 19 nt, Artificial Sequence
  Description of Artificial Sequence: Synthetic oligonucleotide
uuugauucaucuggaagga

SEQ ID NO: 1284927 - RNA, 19 nt, Artificial Sequence
  Description of Artificial Sequence: Synthetic oligonucleotide
uccaaaguagagccgguac

SEQ ID NO: 1284928 - RNA, 19 nt, Artificial Sequence
  Description of Artificial Sequence: Synthetic oligonucleotide
uaagggauucauccucucc

SEQ ID NO: 1284929 - RNA, 19 nt, Artificial Sequence
  Description of Artificial Sequence: Synthetic oligonucleotide
ucuguuaccgacgccaugu

SEQ ID NO: 1284930 - RNA, 19 nt, Artificial Sequence
  Description of Artificial Sequence: Synthetic oligonucleotide
auuaaaugugccuggcuaa

SEQ ID NO: 1284931 - RNA, 19 nt, Artificial Sequence
  Description of Artificial Sequence: Synthetic oligonucleotide
ucuacgacauucugcagaa

SEQ ID NO: 1284932 - RNA, 19 nt, Artificial Sequence
  Description of Artificial Sequence: Synthetic oligonucleotide
ucaaagcgugugcaagccg

SEQ ID NO: 1284933 - RNA, 19 nt, Artificial Sequence
  Description of Artificial Sequence: Synthetic oligonucleotide
uguggauuccuugagcaga

SEQ ID NO: 1284934 - RNA, 19 nt, Artificial Sequence
  Description of Artificial Sequence: Synthetic oligonucleotide
gaacauaggauguugugua

SEQ ID NO: 1284935 - RNA, 19 nt, Artificial Sequence
  Description of Artificial Sequence: Synthetic oligonucleotide
gacaucucgagagaaacca

SEQ ID NO: 1284936 - RNA, 19 nt, Artificial Sequence
  Description of Artificial Sequence: Synthetic oligonucleotide
uaacuacucggucuguaac

SEQ ID NO: 1284937 - RNA, 19 nt, Artificial Sequence
  Description of Artificial Sequence: Synthetic oligonucleotide
cagaaugacagacggcugc

SEQ ID NO: 1284938 - RNA, 19 nt, Artificial Sequence
  Description of Artificial Sequence: Synthetic oligonucleotide
guagagccgguacauauug

SEQ ID NO: 1284939 - RNA, 19 nt, Artificial Sequence
  Description of Artificial Sequence: Synthetic oligonucleotide
cauauacacccuguaagcc

SEQ ID NO: 1284940 - RNA, 19 nt, Artificial Sequence
  Description of Artificial Sequence: Synthetic oligonucleotide
ugcucuggugaaaacgucu

SEQ ID NO: 1284941 - RNA, 19 nt, Artificial Sequence
  Description of Artificial Sequence: Synthetic oligonucleotide
augagcgcaaucaaacuuc

SEQ ID NO: 1284942 - RNA, 19 nt, Artificial Sequence
  Description of Artificial Sequence: Synthetic oligonucleotide
ucauuaaaugugccuggcu

SEQ ID NO: 1284943 - RNA, 19 nt, Artificial Sequence
  Description of Artificial Sequence: Synthetic oligonucleotide
caguagagcuuucagauca

SEQ ID NO: 1284944 - RNA, 19 nt, Artificial Sequence
  Description of Artificial Sequence: Synthetic oligonucleotide
ugagcgcaaucaaacuucc

SEQ ID NO: 1284945 - RNA, 19 nt, Artificial Sequence
  Description of Artificial Sequence: Synthetic oligonucleotide
acaguagagcuuucagauc

SEQ ID NO: 1284946 - RNA, 19 nt, Artificial Sequence
  Description of Artificial Sequence: Synthetic oligonucleotide
uguaaccccuguguugucg

SEQ ID NO: 1284947 - RNA, 19 nt, Artificial Sequence
  Description of Artificial Sequence: Synthetic oligonucleotide
uccaggucgaaacacuguc

SEQ ID NO: 1284948 - RNA, 19 nt, Artificial Sequence
  Description of Artificial Sequence: Synthetic oligonucleotide
agcaaaacugguuuugauu

SEQ ID NO: 1284949 - RNA, 19 nt, Artificial Sequence
  Description of Artificial Sequence: Synthetic oligonucleotide
caggucgaaacacuguccc

SEQ ID NO: 1284950 - RNA, 19 nt, Artificial Sequence
  Description of Artificial Sequence: Synthetic oligonucleotide
uuaacuacucggucuguaa

SEQ ID NO: 1284951 - RNA, 19 nt, Artificial Sequence
  Description of Artificial Sequence: Synthetic oligonucleotide
uguuuauauugcagcccag

SEQ ID NO: 1284952 - RNA, 19 nt, Artificial Sequence
  Description of Artificial Sequence: Synthetic oligonucleotide
uuccugguuaggagguugg

SEQ ID NO: 1284953 - RNA, 19 nt, Artificial Sequence
  Description of Artificial Sequence: Synthetic oligonucleotide
ugccgagggacacugugag

SEQ ID NO: 1284954 - RNA, 19 nt, Artificial Sequence
  Description of Artificial Sequence: Synthetic oligonucleotide
agcgcagucauuaaaugug

SEQ ID NO: 1284955 - RNA, 19 nt, Artificial Sequence
  Description of Artificial Sequence: Synthetic oligonucleotide
uccaauauauuugcugagu

SEQ ID NO: 1284956 - RNA, 19 nt, Artificial Sequence
  Description of Artificial Sequence: Synthetic oligonucleotide
ucugauucauaggagcuuc

SEQ ID NO: 1284957 - RNA, 19 nt, Artificial Sequence
  Description of Artificial Sequence: Synthetic oligonucleotide
gaaaacgucucugacagcu

SEQ ID NO: 1284958 - RNA, 19 nt, Artificial Sequence
  Description of Artificial Sequence: Synthetic oligonucleotide
gguagagaggcacugagga

SEQ ID NO: 1284959 - RNA, 19 nt, Artificial Sequence
  Description of Artificial Sequence: Synthetic oligonucleotide
cugguaucugccuuugaug

SEQ ID NO: 1284960 - RNA, 19 nt, Artificial Sequence
  Description of Artificial Sequence: Synthetic oligonucleotide
agacgugacaccuggucug

SEQ ID NO: 1284961 - RNA, 19 nt, Artificial Sequence
  Description of Artificial Sequence: Synthetic oligonucleotide
uguuaccgacgccaugugc

SEQ ID NO: 1284962 - RNA, 19 nt, Artificial Sequence
  Description of Artificial Sequence: Synthetic oligonucleotide
uugucgugaccucuucgag

SEQ ID NO: 1284963 - RNA, 19 nt, Artificial Sequence
  Description of Artificial Sequence: Synthetic oligonucleotide
ugauacuaauaaauucauu

SEQ ID NO: 1284964 - RNA, 19 nt, Artificial Sequence
  Description of Artificial Sequence: Synthetic oligonucleotide
cguuuaaaaucucaagacg

SEQ ID NO: 1284965 - RNA, 19 nt, Artificial Sequence
  Description of Artificial Sequence: Synthetic oligonucleotide
agccgguacauauugaauu

SEQ ID NO: 1284966 - RNA, 19 nt, Artificial Sequence
  Description of Artificial Sequence: Synthetic oligonucleotide
uacucggucuguaaccccu

SEQ ID NO: 1284967 - RNA, 19 nt, Artificial Sequence
  Description of Artificial Sequence: Synthetic oligonucleotide
aacugguuaacuacucggu

SEQ ID NO: 1284968 - RNA, 19 nt, Artificial Sequence
  Description of Artificial Sequence: Synthetic oligonucleotide
ggacguuuaaaaucucaag

SEQ ID NO: 1284969 - RNA, 19 nt, Artificial Sequence
  Description of Artificial Sequence: Synthetic oligonucleotide
uugcaacuaccuaugcgcu

SEQ ID NO: 1284970 - RNA, 19 nt, Artificial Sequence
  Description of Artificial Sequence: Synthetic oligonucleotide
gugacaccuggucuggagg

SEQ ID NO: 1284971 - RNA, 19 nt, Artificial Sequence
  Description of Artificial Sequence: Synthetic oligonucleotide
gaagguccacgucaccugc

SEQ ID NO: 1284972 - RNA, 19 nt, Artificial Sequence
  Description of Artificial Sequence: Synthetic oligonucleotide
cugugcucuggugaaaacg

SEQ ID NO: 1284973 - RNA, 19 nt, Artificial Sequence
  Description of Artificial Sequence: Synthetic oligonucleotide
uuuauccaaucggccaggg

SEQ ID NO: 1284974 - RNA, 19 nt, Artificial Sequence
  Description of Artificial Sequence: Synthetic oligonucleotide
cauuaaaugugccuggcua

SEQ ID NO: 1284975 - RNA, 19 nt, Artificial Sequence
  Description of Artificial Sequence: Synthetic oligonucleotide
aucucgagagaaaccaagg

SEQ ID NO: 1284976 - RNA, 19 nt, Artificial Sequence
  Description of Artificial Sequence: Synthetic oligonucleotide
agggcgacuaguggcagcc

SEQ ID NO: 1284977 - RNA, 19 nt, Artificial Sequence
  Description of Artificial Sequence: Synthetic oligonucleotide
cucgagagaaaccaaggga

SEQ ID NO: 1284978 - RNA, 19 nt, Artificial Sequence
  Description of Artificial Sequence: Synthetic oligonucleotide
caagucagggcgacuagug

SEQ ID NO: 1284979 - RNA, 19 nt, Artificial Sequence
  Description of Artificial Sequence: Synthetic oligonucleotide
accuaugcgcugcagguca

SEQ ID NO: 1284980 - RNA, 19 nt, Artificial Sequence
  Description of Artificial Sequence: Synthetic oligonucleotide
auauauuugcugaguaacu

SEQ ID NO: 1284981 - RNA, 19 nt, Artificial Sequence
  Description of Artificial Sequence: Synthetic oligonucleotide
agggacugaucuaagccac

SEQ ID NO: 1284982 - RNA, 19 nt, Artificial Sequence
  Description of Artificial Sequence: Synthetic oligonucleotide
agacuuguuuauauugcag

SEQ ID NO: 1284983 - RNA, 19 nt, Artificial Sequence
  Description of Artificial Sequence: Synthetic oligonucleotide
auuuauccaaucggccagg

SEQ ID NO: 1284984 - RNA, 19 nt, Artificial Sequence
  Description of Artificial Sequence: Synthetic oligonucleotide
agcgugugcaagccgcugg

SEQ ID NO: 1284985 - RNA, 19 nt, Artificial Sequence
  Description of Artificial Sequence: Synthetic oligonucleotide
ugagucgucggaaccacua

SEQ ID NO: 1284986 - RNA, 19 nt, Artificial Sequence
  Description of Artificial Sequence: Synthetic oligonucleotide
aucucaagacgugacaccu

SEQ ID NO: 1284987 - RNA, 19 nt, Artificial Sequence
  Description of Artificial Sequence: Synthetic oligonucleotide
gcaaucaaacuucccacag

SEQ ID NO: 1284988 - RNA, 19 nt, Artificial Sequence
  Description of Artificial Sequence: Synthetic oligonucleotide
ugagaacgccaccuccaag

SEQ ID NO: 1284989 - RNA, 19 nt, Artificial Sequence
  Description of Artificial Sequence: Synthetic oligonucleotide
caagcgcagucauuaaaug

SEQ ID NO: 1284990 - RNA, 19 nt, Artificial Sequence
  Description of Artificial Sequence: Synthetic oligonucleotide
uuauccaaucggccagggc

SEQ ID NO: 1284991 - RNA, 19 nt, Artificial Sequence
  Description of Artificial Sequence: Synthetic oligonucleotide
uucacuaauggacggucuu

SEQ ID NO: 1284992 - RNA, 19 nt, Artificial Sequence
  Description of Artificial Sequence: Synthetic oligonucleotide
cuuaggucacugucagagc

SEQ ID NO: 1284993 - RNA, 19 nt, Artificial Sequence
  Description of Artificial Sequence: Synthetic oligonucleotide
caggucguccagcagaaug

SEQ ID NO: 1284994 - RNA, 19 nt, Artificial Sequence
  Description of Artificial Sequence: Synthetic oligonucleotide
gucgugaccucuucgagga

SEQ ID NO: 1284995 - RNA, 19 nt, Artificial Sequence
  Description of Artificial Sequence: Synthetic oligonucleotide
gucuguaaccccuguguug

SEQ ID NO: 1284996 - RNA, 19 nt, Artificial Sequence
  Description of Artificial Sequence: Synthetic oligonucleotide
guugucgugaccucuucga

SEQ ID NO: 1284997 - RNA, 19 nt, Artificial Sequence
  Description of Artificial Sequence: Synthetic oligonucleotide
caagacgugacaccugguc

SEQ ID NO: 1284998 - RNA, 19 nt, Artificial Sequence
  Description of Artificial Sequence: Synthetic oligonucleotide
caggucaaugucagaagac

SEQ ID NO: 1284999 - RNA, 19 nt, Artificial Sequence
  Description of Artificial Sequence: Synthetic oligonucleotide
ucacuaauggacggucuug

SEQ ID NO: 1285000 - RNA, 19 nt, Artificial Sequence
  Description of Artificial Sequence: Synthetic oligonucleotide
aaaccaagggacugaucua

SEQ ID NO: 1285001 - RNA, 19 nt, Artificial Sequence
  Description of Artificial Sequence: Synthetic oligonucleotide
auccaaucggccagggcgc

SEQ ID NO: 1285002 - RNA, 19 nt, Artificial Sequence
  Description of Artificial Sequence: Synthetic oligonucleotide
accacuacugugguuaaga

SEQ ID NO: 1285003 - RNA, 19 nt, Artificial Sequence
  Description of Artificial Sequence: Synthetic oligonucleotide
cucugcacugcuucagggc

SEQ ID NO: 1285004 - RNA, 19 nt, Artificial Sequence
  Description of Artificial Sequence: Synthetic oligonucleotide
ggucccuugauacuaauaa

SEQ ID NO: 1285005 - RNA, 19 nt, Artificial Sequence
  Description of Artificial Sequence: Synthetic oligonucleotide
cacccuguaagccuucaac

SEQ ID NO: 1285006 - RNA, 19 nt, Artificial Sequence
  Description of Artificial Sequence: Synthetic oligonucleotide
ugugccuggcuaauagcaa

SEQ ID NO: 1285007 - RNA, 19 nt, Artificial Sequence
  Description of Artificial Sequence: Synthetic oligonucleotide
ugcaacuaccuaugcgcug

SEQ ID NO: 1285008 - RNA, 19 nt, Artificial Sequence
  Description of Artificial Sequence: Synthetic oligonucleotide
aagccgcuggcucugcacu

SEQ ID NO: 1285009 - RNA, 19 nt, Artificial Sequence
  Description of Artificial Sequence: Synthetic oligonucleotide
gcaacugguuaacuacucg

SEQ ID NO: 1285010 - RNA, 19 nt, Artificial Sequence
  Description of Artificial Sequence: Synthetic oligonucleotide
cauaggagcuuccaaagua

SEQ ID NO: 1285011 - RNA, 19 nt, Artificial Sequence
  Description of Artificial Sequence: Synthetic oligonucleotide
gguguggauuccuugagca

SEQ ID NO: 1285012 - RNA, 19 nt, Artificial Sequence
  Description of Artificial Sequence: Synthetic oligonucleotide
acuaauggacggucuugug

SEQ ID NO: 1285013 - RNA, 19 nt, Artificial Sequence
  Description of Artificial Sequence: Synthetic oligonucleotide
aacgccaccuccaaggcuu

SEQ ID NO: 1285014 - RNA, 19 nt, Artificial Sequence
  Description of Artificial Sequence: Synthetic oligonucleotide
uuccacucucucuugcaac

SEQ ID NO: 1285015 - RNA, 19 nt, Artificial Sequence
  Description of Artificial Sequence: Synthetic oligonucleotide
ugcugaagguccacgucac

SEQ ID NO: 1285016 - RNA, 19 nt, Artificial Sequence
  Description of Artificial Sequence: Synthetic oligonucleotide
cagacuuaggucacuguca

SEQ ID NO: 1285017 - RNA, 19 nt, Artificial Sequence
  Description of Artificial Sequence: Synthetic oligonucleotide
ugcucacuugcuccaauau

SEQ ID NO: 1285018 - RNA, 19 nt, Artificial Sequence
  Description of Artificial Sequence: Synthetic oligonucleotide
ucaaucaagucagggcgac

SEQ ID NO: 1285019 - RNA, 19 nt, Artificial Sequence
  Description of Artificial Sequence: Synthetic oligonucleotide
cuugugugggcaagcgcag

SEQ ID NO: 1285020 - RNA, 19 nt, Artificial Sequence
  Description of Artificial Sequence: Synthetic oligonucleotide
aucaagucagggcgacuag

SEQ ID NO: 1285021 - RNA, 19 nt, Artificial Sequence
  Description of Artificial Sequence: Synthetic oligonucleotide
agucgucggaaccacuacu

SEQ ID NO: 1285022 - RNA, 19 nt, Artificial Sequence
  Description of Artificial Sequence: Synthetic oligonucleotide
uuaccgacgccaugugcug

SEQ ID NO: 1285023 - RNA, 19 nt, Artificial Sequence
  Description of Artificial Sequence: Synthetic oligonucleotide
uuaaaugugccuggcuaau

SEQ ID NO: 1285024 - RNA, 19 nt, Artificial Sequence
  Description of Artificial Sequence: Synthetic oligonucleotide
cuucaacuccauccaacug

SEQ ID NO: 1285025 - RNA, 19 nt, Artificial Sequence
  Description of Artificial Sequence: Synthetic oligonucleotide
ugggcaagcgcagucauua

SEQ ID NO: 1285026 - RNA, 19 nt, Artificial Sequence
  Description of Artificial Sequence: Synthetic oligonucleotide
cucacuugcuccaauauau

SEQ ID NO: 1285027 - RNA, 19 nt, Artificial Sequence
  Description of Artificial Sequence: Synthetic oligonucleotide
acugucccacuuuugguau

SEQ ID NO: 1285028 - RNA, 19 nt, Artificial Sequence
  Description of Artificial Sequence: Synthetic oligonucleotide
gaagacagacuuaggucac

SEQ ID NO: 1285029 - RNA, 19 nt, Artificial Sequence
  Description of Artificial Sequence: Synthetic oligonucleotide
agcaacugguuaacuacuc

SEQ ID NO: 1285030 - RNA, 19 nt, Artificial Sequence
  Description of Artificial Sequence: Synthetic oligonucleotide
uguguugucgugaccucuu

SEQ ID NO: 1285031 - RNA, 19 nt, Artificial Sequence
  Description of Artificial Sequence: Synthetic oligonucleotide
gaugagcgcaaucaaacuu

SEQ ID NO: 1285032 - RNA, 19 nt, Artificial Sequence
  Description of Artificial Sequence: Synthetic oligonucleotide
uucuguuaccgacgccaug

SEQ ID NO: 1285033 - RNA, 19 nt, Artificial Sequence
  Description of Artificial Sequence: Synthetic oligonucleotide
acgacauucugcagaaucu

SEQ ID NO: 1285034 - RNA, 19 nt, Artificial Sequence
  Description of Artificial Sequence: Synthetic oligonucleotide
auuccacucucucuugcaa

SEQ ID NO: 1285035 - RNA, 19 nt, Artificial Sequence
  Description of Artificial Sequence: Synthetic oligonucleotide
auacagcucagcaaauccu

SEQ ID NO: 1285036 - RNA, 19 nt, Artificial Sequence
  Description of Artificial Sequence: Synthetic oligonucleotide
augugccuggcuaauagca

SEQ ID NO: 1285037 - RNA, 19 nt, Artificial Sequence
  Description of Artificial Sequence: Synthetic oligonucleotide
gaggacguuuaaaaucuca

SEQ ID NO: 1285038 - RNA, 19 nt, Artificial Sequence
  Description of Artificial Sequence: Synthetic oligonucleotide
ucaagucagggcgacuagu

SEQ ID NO: 1285039 - RNA, 19 nt, Artificial Sequence
  Description of Artificial Sequence: Synthetic oligonucleotide
gguuaagaaagaccauuga

SEQ ID NO: 1285040 - RNA, 19 nt, Artificial Sequence
  Description of Artificial Sequence: Synthetic oligonucleotide
ugccuggcuaauagcaaaa

SEQ ID NO: 1285041 - RNA, 19 nt, Artificial Sequence
  Description of Artificial Sequence: Synthetic oligonucleotide
uggcuaagggauucauccu

SEQ ID NO: 1285042 - RNA, 19 nt, Artificial Sequence
  Description of Artificial Sequence: Synthetic oligonucleotide
cuguaagccuucaacucca

SEQ ID NO: 1285043 - RNA, 19 nt, Artificial Sequence
  Description of Artificial Sequence: Synthetic oligonucleotide
agguuccauuuccaagcuc

SEQ ID NO: 1285044 - RNA, 19 nt, Artificial Sequence
  Description of Artificial Sequence: Synthetic oligonucleotide
ucgucggaaccacuacugu

SEQ ID NO: 1285045 - RNA, 19 nt, Artificial Sequence
  Description of Artificial Sequence: Synthetic oligonucleotide
ugaaaacgucucugacagc

SEQ ID NO: 1285046 - RNA, 19 nt, Artificial Sequence
  Description of Artificial Sequence: Synthetic oligonucleotide
guggcgaugagcgcaauca

SEQ ID NO: 1285047 - RNA, 19 nt, Artificial Sequence
  Description of Artificial Sequence: Synthetic oligonucleotide
uaugcgcugcaggucaaug

SEQ ID NO: 1285048 - RNA, 19 nt, Artificial Sequence
  Description of Artificial Sequence: Synthetic oligonucleotide
aggagcuuccaaaguagag

SEQ ID NO: 1285049 - RNA, 19 nt, Artificial Sequence
  Description of Artificial Sequence: Synthetic oligonucleotide
aggacguuuaaaaucucaa

SEQ ID NO: 1285050 - RNA, 19 nt, Artificial Sequence
  Description of Artificial Sequence: Synthetic oligonucleotide
gucgucggaaccacuacug

SEQ ID NO: 1285051 - RNA, 19 nt, Artificial Sequence
  Description of Artificial Sequence: Synthetic oligonucleotide
cugguuaacuacucggucu

SEQ ID NO: 1285052 - RNA, 19 nt, Artificial Sequence
  Description of Artificial Sequence: Synthetic oligonucleotide
cagcccggcaaugaagucc

SEQ ID NO: 1285053 - RNA, 19 nt, Artificial Sequence
  Description of Artificial Sequence: Synthetic oligonucleotide
ugaggacguuuaaaaucuc

SEQ ID NO: 1285054 - RNA, 19 nt, Artificial Sequence
  Description of Artificial Sequence: Synthetic oligonucleotide
ggaaccacuacugugguua

SEQ ID NO: 1285055 - RNA, 19 nt, Artificial Sequence
  Description of Artificial Sequence: Synthetic oligonucleotide
uugcuccaauauauuugcu

SEQ ID NO: 1285056 - RNA, 19 nt, Artificial Sequence
  Description of Artificial Sequence: Synthetic oligonucleotide
gcaacuaccuaugcgcugc

SEQ ID NO: 1285057 - RNA, 19 nt, Artificial Sequence
  Description of Artificial Sequence: Synthetic oligonucleotide
guuuugauugguccuggcu

SEQ ID NO: 1285058 - RNA, 19 nt, Artificial Sequence
  Description of Artificial Sequence: Synthetic oligonucleotide
cuaauggacggucuugugu

SEQ ID NO: 1285059 - RNA, 19 nt, Artificial Sequence
  Description of Artificial Sequence: Synthetic oligonucleotide
gagucgucggaaccacuac

SEQ ID NO: 1285060 - RNA, 19 nt, Artificial Sequence
  Description of Artificial Sequence: Synthetic oligonucleotide
cuacucggucuguaacccc

SEQ ID NO: 1285061 - RNA, 19 nt, Artificial Sequence
  Description of Artificial Sequence: Synthetic oligonucleotide
acauaggauguuguguaaa

SEQ ID NO: 1285062 - RNA, 19 nt, Artificial Sequence
  Description of Artificial Sequence: Synthetic oligonucleotide
cacucucucuugcaacuac

SEQ ID NO: 1285063 - RNA, 19 nt, Artificial Sequence
  Description of Artificial Sequence: Synthetic oligonucleotide
ugggacugacuuguggcga

SEQ ID NO: 1285064 - RNA, 19 nt, Artificial Sequence
  Description of Artificial Sequence: Synthetic oligonucleotide
ucaagacgugacaccuggu

SEQ ID NO: 1285065 - RNA, 19 nt, Artificial Sequence
  Description of Artificial Sequence: Synthetic oligonucleotide
ggcuaagggauucauccuc

SEQ ID NO: 1285066 - RNA, 19 nt, Artificial Sequence
  Description of Artificial Sequence: Synthetic oligonucleotide
guuaccgacgccaugugcu

SEQ ID NO: 1285067 - RNA, 19 nt, Artificial Sequence
  Description of Artificial Sequence: Synthetic oligonucleotide
gacuaguggcagccaacac

SEQ ID NO: 1285068 - RNA, 19 nt, Artificial Sequence
  Description of Artificial Sequence: Synthetic oligonucleotide
aaaguagagccgguacaua

SEQ ID NO: 1285069 - RNA, 19 nt, Artificial Sequence
  Description of Artificial Sequence: Synthetic oligonucleotide
aacuaccuaugcgcugcag

SEQ ID NO: 1285070 - RNA, 19 nt, Artificial Sequence
  Description of Artificial Sequence: Synthetic oligonucleotide
ggucgaaacacugucccac

SEQ ID NO: 1285071 - RNA, 19 nt, Artificial Sequence
  Description of Artificial Sequence: Synthetic oligonucleotide
uguaugcucucaagccuuu

SEQ ID NO: 1285072 - RNA, 19 nt, Artificial Sequence
  Description of Artificial Sequence: Synthetic oligonucleotide
cugugcguuguacaguaga

SEQ ID NO: 1285073 - RNA, 19 nt, Artificial Sequence
  Description of Artificial Sequence: Synthetic oligonucleotide
cuugguagccuuccuggga

SEQ ID NO: 1285074 - RNA, 19 nt, Artificial Sequence
  Description of Artificial Sequence: Synthetic oligonucleotide
ucgaaacacugucccacuu

SEQ ID NO: 1285075 - RNA, 19 nt, Artificial Sequence
  Description of Artificial Sequence: Synthetic oligonucleotide
gugcguuguacaguagagc

SEQ ID NO: 1285076 - RNA, 19 nt, Artificial Sequence
  Description of Artificial Sequence: Synthetic oligonucleotide
ugacagacggcugccucca

SEQ ID NO: 1285077 - RNA, 19 nt, Artificial Sequence
  Description of Artificial Sequence: Synthetic oligonucleotide
cuucccacagaaacuaacu

SEQ ID NO: 1285078 - RNA, 19 nt, Artificial Sequence
  Description of Artificial Sequence: Synthetic oligonucleotide
gacgccaugugcugaaggu

SEQ ID NO: 1285079 - RNA, 19 nt, Artificial Sequence
  Description of Artificial Sequence: Synthetic oligonucleotide
uggucccuugauacuaaua

SEQ ID NO: 1285080 - RNA, 19 nt, Artificial Sequence
  Description of Artificial Sequence: Synthetic oligonucleotide
cuaagccacuuucuccauc

SEQ ID NO: 1285081 - RNA, 19 nt, Artificial Sequence
  Description of Artificial Sequence: Synthetic oligonucleotide
gguacauauugaauuuuga

SEQ ID NO: 1285082 - RNA, 19 nt, Artificial Sequence
  Description of Artificial Sequence: Synthetic oligonucleotide
uugcucacuugcuccaaua

SEQ ID NO: 1285083 - RNA, 19 nt, Artificial Sequence
  Description of Artificial Sequence: Synthetic oligonucleotide
aaucggccagggcgcaaca

SEQ ID NO: 1285084 - RNA, 19 nt, Artificial Sequence
  Description of Artificial Sequence: Synthetic oligonucleotide
cagcugagucgucggaacc

SEQ ID NO: 1285085 - RNA, 19 nt, Artificial Sequence
  Description of Artificial Sequence: Synthetic oligonucleotide
uggcgaugagcgcaaucaa

SEQ ID NO: 1285086 - RNA, 19 nt, Artificial Sequence
  Description of Artificial Sequence: Synthetic oligonucleotide
aaagcgugugcaagccgcu

SEQ ID NO: 1285087 - RNA, 19 nt, Artificial Sequence
  Description of Artificial Sequence: Synthetic oligonucleotide
aggucgaaacacuguccca

SEQ ID NO: 1285088 - RNA, 19 nt, Artificial Sequence
  Description of Artificial Sequence: Synthetic oligonucleotide
gucccuugauacuaauaaa

SEQ ID NO: 1285089 - RNA, 19 nt, Artificial Sequence
  Description of Artificial Sequence: Synthetic oligonucleotide
uaaaugugccuggcuaaua

SEQ ID NO: 1285090 - RNA, 19 nt, Artificial Sequence
  Description of Artificial Sequence: Synthetic oligonucleotide
gcgcaaucaaacuucccac

SEQ ID NO: 1285091 - RNA, 19 nt, Artificial Sequence
  Description of Artificial Sequence: Synthetic oligonucleotide
ccaagggacugaucuaagc

SEQ ID NO: 1285092 - RNA, 19 nt, Artificial Sequence
  Description of Artificial Sequence: Synthetic oligonucleotide
ggcgcaacagggcaggguc

SEQ ID NO: 1285093 - RNA, 19 nt, Artificial Sequence
  Description of Artificial Sequence: Synthetic oligonucleotide
agcugagucgucggaacca

SEQ ID NO: 1285094 - RNA, 19 nt, Artificial Sequence
  Description of Artificial Sequence: Synthetic oligonucleotide
ccaacacauauacacccug

SEQ ID NO: 1285095 - RNA, 19 nt, Artificial Sequence
  Description of Artificial Sequence: Synthetic oligonucleotide
cuggaaggaucucagacau

SEQ ID NO: 1285096 - RNA, 19 nt, Artificial Sequence
  Description of Artificial Sequence: Synthetic oligonucleotide
gaugugcuggacacacuga

SEQ ID NO: 1285097 - RNA, 19 nt, Artificial Sequence
  Description of Artificial Sequence: Synthetic oligonucleotide
uugauugguccuggcuggc

SEQ ID NO: 1285098 - RNA, 19 nt, Artificial Sequence
  Description of Artificial Sequence: Synthetic oligonucleotide
cacugucccacuuuuggua

SEQ ID NO: 1285099 - RNA, 19 nt, Artificial Sequence
  Description of Artificial Sequence: Synthetic oligonucleotide
aagcgugugcaagccgcug

SEQ ID NO: 1285100 - RNA, 19 nt, Artificial Sequence
  Description of Artificial Sequence: Synthetic oligonucleotide
ccaggucgaaacacugucc

SEQ ID NO: 1285101 - RNA, 19 nt, Artificial Sequence
  Description of Artificial Sequence: Synthetic oligonucleotide
uuccaaaguagagccggua

SEQ ID NO: 1285102 - RNA, 19 nt, Artificial Sequence
  Description of Artificial Sequence: Synthetic oligonucleotide
cugaucuaagccacuuucu

SEQ ID NO: 1285103 - RNA, 19 nt, Artificial Sequence
  Description of Artificial Sequence: Synthetic oligonucleotide
ugucccacuuuugguauuu

SEQ ID NO: 1285104 - RNA, 19 nt, Artificial Sequence
  Description of Artificial Sequence: Synthetic oligonucleotide
agcccggcaaugaagucca

SEQ ID NO: 1285105 - RNA, 19 nt, Artificial Sequence
  Description of Artificial Sequence: Synthetic oligonucleotide
cccuguaagccuucaacuc

SEQ ID NO: 1285106 - RNA, 19 nt, Artificial Sequence
  Description of Artificial Sequence: Synthetic oligonucleotide
gacugacuuguggcgauga

SEQ ID NO: 1285107 - RNA, 19 nt, Artificial Sequence
  Description of Artificial Sequence: Synthetic oligonucleotide
gugucagcaacugguuaac

SEQ ID NO: 1285108 - RNA, 19 nt, Artificial Sequence
  Description of Artificial Sequence: Synthetic oligonucleotide
ucgugaccucuucgaggag

SEQ ID NO: 1285109 - RNA, 19 nt, Artificial Sequence
  Description of Artificial Sequence: Synthetic oligonucleotide
cgguacauauugaauuuug

SEQ ID NO: 1285110 - RNA, 19 nt, Artificial Sequence
  Description of Artificial Sequence: Synthetic oligonucleotide
caacacauauacacccugu

SEQ ID NO: 1285111 - RNA, 19 nt, Artificial Sequence
  Description of Artificial Sequence: Synthetic oligonucleotide
ugaguaacucuggucccuu

SEQ ID NO: 1285112 - RNA, 19 nt, Artificial Sequence
  Description of Artificial Sequence: Synthetic oligonucleotide
aucucacaucuuuguuccu

SEQ ID NO: 1285113 - RNA, 19 nt, Artificial Sequence
  Description of Artificial Sequence: Synthetic oligonucleotide
guuaacuacucggucugua

SEQ ID NO: 1285114 - RNA, 19 nt, Artificial Sequence
  Description of Artificial Sequence: Synthetic oligonucleotide
cuguuaccgacgccaugug

SEQ ID NO: 1285115 - RNA, 19 nt, Artificial Sequence
  Description of Artificial Sequence: Synthetic oligonucleotide
acggucuugugugggcaag

SEQ ID NO: 1285116 - RNA, 19 nt, Artificial Sequence
  Description of Artificial Sequence: Synthetic oligonucleotide
aguagagccgguacauauu

SEQ ID NO: 1285117 - RNA, 19 nt, Artificial Sequence
  Description of Artificial Sequence: Synthetic oligonucleotide
ccaauauauuugcugagua

SEQ ID NO: 1285118 - RNA, 19 nt, Artificial Sequence
  Description of Artificial Sequence: Synthetic oligonucleotide
caaucggccagggcgcaac

SEQ ID NO: 1285119 - RNA, 19 nt, Artificial Sequence
  Description of Artificial Sequence: Synthetic oligonucleotide
agggaaauccugagucacu

SEQ ID NO: 1285120 - RNA, 19 nt, Artificial Sequence
  Description of Artificial Sequence: Synthetic oligonucleotide
cuuguggcgaugagcgcaa

SEQ ID NO: 1285121 - RNA, 19 nt, Artificial Sequence
  Description of Artificial Sequence: Synthetic oligonucleotide
gagcgcaaucaaacuuccc

SEQ ID NO: 1285122 - RNA, 19 nt, Artificial Sequence
  Description of Artificial Sequence: Synthetic oligonucleotide
gcagggaaauccugaguca

SEQ ID NO: 1285123 - RNA, 19 nt, Artificial Sequence
  Description of Artificial Sequence: Synthetic oligonucleotide
accauugaagacagacuua

SEQ ID NO: 1285124 - RNA, 19 nt, Artificial Sequence
  Description of Artificial Sequence: Synthetic oligonucleotide
cagggcgacuaguggcagc

SEQ ID NO: 1285125 - RNA, 19 nt, Artificial Sequence
  Description of Artificial Sequence: Synthetic oligonucleotide
accgacgccaugugcugaa

SEQ ID NO: 1285126 - RNA, 19 nt, Artificial Sequence
  Description of Artificial Sequence: Synthetic oligonucleotide
cuucacuaauggacggucu

SEQ ID NO: 1285127 - RNA, 19 nt, Artificial Sequence
  Description of Artificial Sequence: Synthetic oligonucleotide
uugugugggcaagcgcagu

SEQ ID NO: 1285128 - RNA, 19 nt, Artificial Sequence
  Description of Artificial Sequence: Synthetic oligonucleotide
gacggucuugugugggcaa

SEQ ID NO: 1285129 - RNA, 19 nt, Artificial Sequence
  Description of Artificial Sequence: Synthetic oligonucleotide
guaaccccuguguugucgu

SEQ ID NO: 1285130 - RNA, 19 nt, Artificial Sequence
  Description of Artificial Sequence: Synthetic oligonucleotide
gcgcagucauuaaaugugc

SEQ ID NO: 1285131 - RNA, 19 nt, Artificial Sequence
  Description of Artificial Sequence: Synthetic oligonucleotide
auucuguuaccgacgccau

SEQ ID NO: 1285132 - RNA, 19 nt, Artificial Sequence
  Description of Artificial Sequence: Synthetic oligonucleotide
auuucggccuucagcuggu

SEQ ID NO: 1285133 - RNA, 19 nt, Artificial Sequence
  Description of Artificial Sequence: Synthetic oligonucleotide
auacacccuguaagccuuc

SEQ ID NO: 1285134 - RNA, 19 nt, Artificial Sequence
  Description of Artificial Sequence: Synthetic oligonucleotide
cuucgaggagcaauggauu

SEQ ID NO: 1285135 - RNA, 19 nt, Artificial Sequence
  Description of Artificial Sequence: Synthetic oligonucleotide
ggauucuguuaccgacgcc

SEQ ID NO: 1285136 - RNA, 19 nt, Artificial Sequence
  Description of Artificial Sequence: Synthetic oligonucleotide
uaccgacgccaugugcuga

SEQ ID NO: 1285137 - RNA, 19 nt, Artificial Sequence
  Description of Artificial Sequence: Synthetic oligonucleotide
guguugucgugaccucuuc

SEQ ID NO: 1285138 - RNA, 19 nt, Artificial Sequence
  Description of Artificial Sequence: Synthetic oligonucleotide
uccaaucggccagggcgca

SEQ ID NO: 1285139 - RNA, 19 nt, Artificial Sequence
  Description of Artificial Sequence: Synthetic oligonucleotide
ggcaagcgcagucauuaaa

SEQ ID NO: 1285140 - RNA, 19 nt, Artificial Sequence
  Description of Artificial Sequence: Synthetic oligonucleotide
cugagaacgccaccuccaa

SEQ ID NO: 1285141 - RNA, 19 nt, Artificial Sequence
  Description of Artificial Sequence: Synthetic oligonucleotide
gucgaaacacugucccacu

SEQ ID NO: 1285142 - RNA, 19 nt, Artificial Sequence
  Description of Artificial Sequence: Synthetic oligonucleotide
cuguaugcucucaagccuu

SEQ ID NO: 1285143 - RNA, 19 nt, Artificial Sequence
  Description of Artificial Sequence: Synthetic oligonucleotide
aucggccagggcgcaacag

SEQ ID NO: 1285144 - RNA, 19 nt, Artificial Sequence
  Description of Artificial Sequence: Synthetic oligonucleotide
cagaagacuuguuuauauu

SEQ ID NO: 1285145 - RNA, 19 nt, Artificial Sequence
  Description of Artificial Sequence: Synthetic oligonucleotide
cgucggaaccacuacugug

SEQ ID NO: 1285146 - RNA, 19 nt, Artificial Sequence
  Description of Artificial Sequence: Synthetic oligonucleotide
gacugaucuaagccacuuu

SEQ ID NO: 1285147 - RNA, 19 nt, Artificial Sequence
  Description of Artificial Sequence: Synthetic oligonucleotide
cacuaauggacggucuugu

SEQ ID NO: 1285148 - RNA, 19 nt, Artificial Sequence
  Description of Artificial Sequence: Synthetic oligonucleotide
gaccucuucgaggagcaau

SEQ ID NO: 1285149 - RNA, 19 nt, Artificial Sequence
  Description of Artificial Sequence: Synthetic oligonucleotide
gcugaagguccacgucacc

SEQ ID NO: 1285150 - RNA, 19 nt, Artificial Sequence
  Description of Artificial Sequence: Synthetic oligonucleotide
auccugagucacugagcuu

SEQ ID NO: 1285151 - RNA, 19 nt, Artificial Sequence
  Description of Artificial Sequence: Synthetic oligonucleotide
acucggucuguaaccccug

SEQ ID NO: 1285152 - RNA, 19 nt, Artificial Sequence
  Description of Artificial Sequence: Synthetic oligonucleotide
cuguaaccccuguguuguc

SEQ ID NO: 1285153 - RNA, 19 nt, Artificial Sequence
  Description of Artificial Sequence: Synthetic oligonucleotide
cgugacaccuggucuggag

SEQ ID NO: 1285154 - RNA, 19 nt, Artificial Sequence
  Description of Artificial Sequence: Synthetic oligonucleotide
uggcuggcuaagggauuca

SEQ ID NO: 1285155 - RNA, 19 nt, Artificial Sequence
  Description of Artificial Sequence: Synthetic oligonucleotide
ccuucaacuccauccaacu

SEQ ID NO: 1285156 - RNA, 19 nt, Artificial Sequence
  Description of Artificial Sequence: Synthetic oligonucleotide
cuuccaaaguagagccggu

SEQ ID NO: 1285157 - RNA, 19 nt, Artificial Sequence
  Description of Artificial Sequence: Synthetic oligonucleotide
ggcgacuaguggcagccaa

SEQ ID NO: 1285158 - RNA, 19 nt, Artificial Sequence
  Description of Artificial Sequence: Synthetic oligonucleotide
gcaagcgcagucauuaaau

SEQ ID NO: 1285159 - RNA, 19 nt, Artificial Sequence
  Description of Artificial Sequence: Synthetic oligonucleotide
cccggcaaugaaguccagg

SEQ ID NO: 1285160 - RNA, 19 nt, Artificial Sequence
  Description of Artificial Sequence: Synthetic oligonucleotide
cucuggugaaaacgucucu

SEQ ID NO: 1285161 - RNA, 19 nt, Artificial Sequence
  Description of Artificial Sequence: Synthetic oligonucleotide
gcugagucgucggaaccac

SEQ ID NO: 1285162 - RNA, 19 nt, Artificial Sequence
  Description of Artificial Sequence: Synthetic oligonucleotide
gcucugauucauaggagcu

SEQ ID NO: 1285163 - RNA, 19 nt, Artificial Sequence
  Description of Artificial Sequence: Synthetic oligonucleotide
gagccgguacauauugaau

SEQ ID NO: 1285164 - RNA, 19 nt, Artificial Sequence
  Description of Artificial Sequence: Synthetic oligonucleotide
cacaucuuuguuccugguu

SEQ ID NO: 1285165 - RNA, 19 nt, Artificial Sequence
  Description of Artificial Sequence: Synthetic oligonucleotide
gucagcucuugguagccuu

SEQ ID NO: 1285166 - RNA, 19 nt, Artificial Sequence
  Description of Artificial Sequence: Synthetic oligonucleotide
gggacacugugagcucagg

SEQ ID NO: 1285167 - RNA, 19 nt, Artificial Sequence
  Description of Artificial Sequence: Synthetic oligonucleotide
agggcgcaacagggcaggg

SEQ ID NO: 1285168 - RNA, 19 nt, Artificial Sequence
  Description of Artificial Sequence: Synthetic oligonucleotide
ccugaacauaggauguugu

SEQ ID NO: 1285169 - RNA, 19 nt, Artificial Sequence
  Description of Artificial Sequence: Synthetic oligonucleotide
gcuggcuaagggauucauc

SEQ ID NO: 1285170 - RNA, 19 nt, Artificial Sequence
  Description of Artificial Sequence: Synthetic oligonucleotide
caacuaccuaugcgcugca

SEQ ID NO: 1285171 - RNA, 19 nt, Artificial Sequence
  Description of Artificial Sequence: Synthetic oligonucleotide
cgacgccaugugcugaagg

SEQ ID NO: 1285172 - RNA, 19 nt, Artificial Sequence
  Description of Artificial Sequence: Synthetic oligonucleotide
aggcugccucugagaacgc

SEQ ID NO: 1285173 - RNA, 19 nt, Artificial Sequence
  Description of Artificial Sequence: Synthetic oligonucleotide
gccuggcuaauagcaaaac

SEQ ID NO: 1285174 - RNA, 19 nt, Artificial Sequence
  Description of Artificial Sequence: Synthetic oligonucleotide
gccgguacauauugaauuu

SEQ ID NO: 1285175 - RNA, 19 nt, Artificial Sequence
  Description of Artificial Sequence: Synthetic oligonucleotide
cuucccugcaaggccucca

SEQ ID NO: 1285176 - RNA, 19 nt, Artificial Sequence
  Description of Artificial Sequence: Synthetic oligonucleotide
cucugguaucugccuuuga

SEQ ID NO: 1285177 - RNA, 19 nt, Artificial Sequence
  Description of Artificial Sequence: Synthetic oligonucleotide
ggacggucuugugugggca

SEQ ID NO: 1285178 - RNA, 19 nt, Artificial Sequence
  Description of Artificial Sequence: Synthetic oligonucleotide
gguaucugccuuugaugau

SEQ ID NO: 1285179 - RNA, 19 nt, Artificial Sequence
  Description of Artificial Sequence: Synthetic oligonucleotide
caaugucagaagacuuguu

SEQ ID NO: 1285180 - RNA, 19 nt, Artificial Sequence
  Description of Artificial Sequence: Synthetic oligonucleotide
gcgacuaguggcagccaac

SEQ ID NO: 1285181 - RNA, 19 nt, Artificial Sequence
  Description of Artificial Sequence: Synthetic oligonucleotide
caucugcagcugagucguc

SEQ ID NO: 1285182 - RNA, 19 nt, Artificial Sequence
  Description of Artificial Sequence: Synthetic oligonucleotide
ggacugacuuguggcgaug

SEQ ID NO: 1285183 - RNA, 19 nt, Artificial Sequence
  Description of Artificial Sequence: Synthetic oligonucleotide
ggacagugggcagcccggc

SEQ ID NO: 1285184 - RNA, 19 nt, Artificial Sequence
  Description of Artificial Sequence: Synthetic oligonucleotide
cucugauucauaggagcuu

SEQ ID NO: 1285185 - RNA, 19 nt, Artificial Sequence
  Description of Artificial Sequence: Synthetic oligonucleotide
gcugugcguuguacaguag

SEQ ID NO: 1285186 - RNA, 19 nt, Artificial Sequence
  Description of Artificial Sequence: Synthetic oligonucleotide
acgugacaccuggucugga

SEQ ID NO: 1285187 - RNA, 19 nt, Artificial Sequence
  Description of Artificial Sequence: Synthetic oligonucleotide
gcaauggauucaaacucau

SEQ ID NO: 1285188 - RNA, 19 nt, Artificial Sequence
  Description of Artificial Sequence: Synthetic oligonucleotide
cccuguguugucgugaccu

SEQ ID NO: 1285189 - RNA, 19 nt, Artificial Sequence
  Description of Artificial Sequence: Synthetic oligonucleotide
cugagucgucggaaccacu

SEQ ID NO: 1285190 - RNA, 19 nt, Artificial Sequence
  Description of Artificial Sequence: Synthetic oligonucleotide
cucggucuguaaccccugu

SEQ ID NO: 1285191 - RNA, 19 nt, Artificial Sequence
  Description of Artificial Sequence: Synthetic oligonucleotide
cgagagaaaccaagggacu

SEQ ID NO: 1285192 - RNA, 19 nt, Artificial Sequence
  Description of Artificial Sequence: Synthetic oligonucleotide
gggacugacuuguggcgau

SEQ ID NO: 1285193 - RNA, 19 nt, Artificial Sequence
  Description of Artificial Sequence: Synthetic oligonucleotide
cgacuaguggcagccaaca

SEQ ID NO: 1285194 - RNA, 19 nt, Artificial Sequence
  Description of Artificial Sequence: Synthetic oligonucleotide
ggacugaucuaagccacuu

SEQ ID NO: 1285195 - RNA, 19 nt, Artificial Sequence
  Description of Artificial Sequence: Synthetic oligonucleotide
cuuggugccgagggacacu

SEQ ID NO: 1285196 - RNA, 19 nt, Artificial Sequence
  Description of Artificial Sequence: Synthetic oligonucleotide
guccugaacauaggauguu

SEQ ID NO: 1285197 - RNA, 19 nt, Artificial Sequence
  Description of Artificial Sequence: Synthetic oligonucleotide
cuggucccuugauacuaau

SEQ ID NO: 1285198 - RNA, 19 nt, Artificial Sequence
  Description of Artificial Sequence: Synthetic oligonucleotide
caaucaagucagggcgacu

SEQ ID NO: 1285199 - RNA, 19 nt, Artificial Sequence
  Description of Artificial Sequence: Synthetic oligonucleotide
gggcaagcgcagucauuaa

SEQ ID NO: 1285200 - RNA, 19 nt, Artificial Sequence
  Description of Artificial Sequence: Synthetic oligonucleotide
gguuaacuacucggucugu

SEQ ID NO: 1285201 - RNA, 19 nt, Artificial Sequence
  Description of Artificial Sequence: Synthetic oligonucleotide
cgagggacacugugagcuc

SEQ ID NO: 1285202 - RNA, 19 nt, Artificial Sequence
  Description of Artificial Sequence: Synthetic oligonucleotide
acgucaccugccagaggua

SEQ ID NO: 1285203 - RNA, 19 nt, Artificial Sequence
  Description of Artificial Sequence: Synthetic oligonucleotide
cgaugagcgcaaucaaacu

SEQ ID NO: 1285204 - RNA, 19 nt, Artificial Sequence
  Description of Artificial Sequence: Synthetic oligonucleotide
gcgcaacagggcaggguca

SEQ ID NO: 1285205 - RNA, 19 nt, Artificial Sequence
  Description of Artificial Sequence: Synthetic oligonucleotide
guaugcucucaagccuuuu

SEQ ID NO: 1285206 - RNA, 19 nt, Artificial Sequence
  Description of Artificial Sequence: Synthetic oligonucleotide
cugucccacuuuugguauu

SEQ ID NO: 1285207 - RNA, 19 nt, Artificial Sequence
  Description of Artificial Sequence: Synthetic oligonucleotide
ccuaugcgcugcaggucaa

SEQ ID NO: 1285208 - RNA, 19 nt, Artificial Sequence
  Description of Artificial Sequence: Synthetic oligonucleotide
cuaugcgcugcaggucaau

SEQ ID NO: 1285209 - RNA, 19 nt, Artificial Sequence
  Description of Artificial Sequence: Synthetic oligonucleotide
ccgacgccaugugcugaag

SEQ ID NO: 1285210 - RNA, 19 nt, Artificial Sequence
  Description of Artificial Sequence: Synthetic oligonucleotide
acgccaccuccaaggcuuu

SEQ ID NO: 1285211 - RNA, 19 nt, Artificial Sequence
  Description of Artificial Sequence: Synthetic oligonucleotide
cuacgacauucugcagaau

SEQ ID NO: 1285212 - RNA, 19 nt, Artificial Sequence
  Description of Artificial Sequence: Synthetic oligonucleotide
gggcgacuaguggcagcca

SEQ ID NO: 1285213 - RNA, 19 nt, Artificial Sequence
  Description of Artificial Sequence: Synthetic oligonucleotide
gggcgcaacagggcagggu

SEQ ID NO: 1285214 - RNA, 19 nt, Artificial Sequence
  Description of Artificial Sequence: Synthetic oligonucleotide
ccgguacauauugaauuuu

SEQ ID NO: 1285215 - RNA, 19 nt, Artificial Sequence
  Description of Artificial Sequence: Synthetic oligonucleotide
gcccggcaaugaaguccag

SEQ ID NO: 1285216 - RNA, 19 nt, Artificial Sequence
  Description of Artificial Sequence: Synthetic oligonucleotide
ccaaucggccagggcgcaa

SEQ ID NO: 1285217 - RNA, 19 nt, Artificial Sequence
  Description of Artificial Sequence: Synthetic oligonucleotide
cgugugcaagccgcuggcu

SEQ ID NO: 1285218 - RNA, 19 nt, Artificial Sequence
  Description of Artificial Sequence: Synthetic oligonucleotide
cggaaccacuacugugguu

SEQ ID NO: 1285219 - RNA, 19 nt, Artificial Sequence
  Description of Artificial Sequence: Synthetic oligonucleotide
aauaaguuguugcuguucc

SEQ ID NO: 1285220 - RNA, 19 nt, Artificial Sequence
  Description of Artificial Sequence: Synthetic oligonucleotide
aauuagagaugucaaagac

SEQ ID NO: 1285221 - RNA, 19 nt, Artificial Sequence
  Description of Artificial Sequence: Synthetic oligonucleotide
gaugcaaucggguagagag

SEQ ID NO: 1285222 - RNA, 19 nt, Artificial Sequence
  Description of Artificial Sequence: Synthetic oligonucleotide
ucaagauguaucccaaacg

SEQ ID NO: 1285223 - RNA, 19 nt, Artificial Sequence
  Description of Artificial Sequence: Synthetic oligonucleotide
aaaauggucgucaauaagu

SEQ ID NO: 1285224 - RNA, 19 nt, Artificial Sequence
  Description of Artificial Sequence: Synthetic oligonucleotide
aaacguucauuccacauga

SEQ ID NO: 1285225 - RNA, 19 nt, Artificial Sequence
  Description of Artificial Sequence: Synthetic oligonucleotide
auuaugucgcucuuggauc

SEQ ID NO: 1285226 - RNA, 19 nt, Artificial Sequence
  Description of Artificial Sequence: Synthetic oligonucleotide
aaauaugcagaaguccugg

SEQ ID NO: 1285227 - RNA, 19 nt, Artificial Sequence
  Description of Artificial Sequence: Synthetic oligonucleotide
uccgucaucucacugagcc

SEQ ID NO: 1285228 - RNA, 19 nt, Artificial Sequence
  Description of Artificial Sequence: Synthetic oligonucleotide
ucuuuacuaggacagggag

SEQ ID NO: 1285229 - RNA, 19 nt, Artificial Sequence
  Description of Artificial Sequence: Synthetic oligonucleotide
ucaaucaaauaauuuacuc

SEQ ID NO: 1285230 - RNA, 19 nt, Artificial Sequence
  Description of Artificial Sequence: Synthetic oligonucleotide
uucacccagaucaagaaac

SEQ ID NO: 1285231 - RNA, 19 nt, Artificial Sequence
  Description of Artificial Sequence: Synthetic oligonucleotide
uaucaaacagaaaaugguc

SEQ ID NO: 1285232 - RNA, 19 nt, Artificial Sequence
  Description of Artificial Sequence: Synthetic oligonucleotide
ugagccuauaguaucgucc

SEQ ID NO: 1285233 - RNA, 19 nt, Artificial Sequence
  Description of Artificial Sequence: Synthetic oligonucleotide
ucgcucuuggaucacaggg

SEQ ID NO: 1285234 - RNA, 19 nt, Artificial Sequence
  Description of Artificial Sequence: Synthetic oligonucleotide
ucuaguguccaaccagugg

SEQ ID NO: 1285235 - RNA, 19 nt, Artificial Sequence
  Description of Artificial Sequence: Synthetic oligonucleotide
cuuucgucaaaguagccag

SEQ ID NO: 1285236 - RNA, 19 nt, Artificial Sequence
  Description of Artificial Sequence: Synthetic oligonucleotide
caaaauaggggucacgaug

SEQ ID NO: 1285237 - RNA, 19 nt, Artificial Sequence
  Description of Artificial Sequence: Synthetic oligonucleotide
aucaaacagaaaauggucg

SEQ ID NO: 1285238 - RNA, 19 nt, Artificial Sequence
  Description of Artificial Sequence: Synthetic oligonucleotide
uuuuggagccguaaguucu

SEQ ID NO: 1285239 - RNA, 19 nt, Artificial Sequence
  Description of Artificial Sequence: Synthetic oligonucleotide
agauguaucccaaacguuc

SEQ ID NO: 1285240 - RNA, 19 nt, Artificial Sequence
  Description of Artificial Sequence: Synthetic oligonucleotide
gcuaucuuugcuuagcagg

SEQ ID NO: 1285241 - RNA, 19 nt, Artificial Sequence
  Description of Artificial Sequence: Synthetic oligonucleotide
ugaugugcacuccugcccg

SEQ ID NO: 1285242 - RNA, 19 nt, Artificial Sequence
  Description of Artificial Sequence: Synthetic oligonucleotide
gaaaauggucgucaauaag

SEQ ID NO: 1285243 - RNA, 19 nt, Artificial Sequence
  Description of Artificial Sequence: Synthetic oligonucleotide
ucguacagaaucuggacgc

SEQ ID NO: 1285244 - RNA, 19 nt, Artificial Sequence
  Description of Artificial Sequence: Synthetic oligonucleotide
ucaaacagaaaauggucgu

SEQ ID NO: 1285245 - RNA, 19 nt, Artificial Sequence
  Description of Artificial Sequence: Synthetic oligonucleotide
auaccuuucgucaaaguag

SEQ ID NO: 1285246 - RNA, 19 nt, Artificial Sequence
  Description of Artificial Sequence: Synthetic oligonucleotide
aaagacacugccuguggca

SEQ ID NO: 1285247 - RNA, 19 nt, Artificial Sequence
  Description of Artificial Sequence: Synthetic oligonucleotide
uaccuuucgucaaaguagc

SEQ ID NO: 1285248 - RNA, 19 nt, Artificial Sequence
  Description of Artificial Sequence: Synthetic oligonucleotide
aacggauuuuacuggcauc

SEQ ID NO: 1285249 - RNA, 19 nt, Artificial Sequence
  Description of Artificial Sequence: Synthetic oligonucleotide
ucauucacccagaucaaga

SEQ ID NO: 1285250 - RNA, 19 nt, Artificial Sequence
  Description of Artificial Sequence: Synthetic oligonucleotide
guuaauguuugccaugcac

SEQ ID NO: 1285251 - RNA, 19 nt, Artificial Sequence
  Description of Artificial Sequence: Synthetic oligonucleotide
aauggucgucaauaaguug

SEQ ID NO: 1285252 - RNA, 19 nt, Artificial Sequence
  Description of Artificial Sequence: Synthetic oligonucleotide
uguggagucuuuacuagga

SEQ ID NO: 1285253 - RNA, 19 nt, Artificial Sequence
  Description of Artificial Sequence: Synthetic oligonucleotide
acguucauuccacaugaac

SEQ ID NO: 1285254 - RNA, 19 nt, Artificial Sequence
  Description of Artificial Sequence: Synthetic oligonucleotide
auagccauuaugucgcucu

SEQ ID NO: 1285255 - RNA, 19 nt, Artificial Sequence
  Description of Artificial Sequence: Synthetic oligonucleotide
acgccguucacacucaauc

SEQ ID NO: 1285256 - RNA, 19 nt, Artificial Sequence
  Description of Artificial Sequence: Synthetic oligonucleotide
gucgucaauaaguuguugc

SEQ ID NO: 1285257 - RNA, 19 nt, Artificial Sequence
  Description of Artificial Sequence: Synthetic oligonucleotide
cuagcggccagcuagagca

SEQ ID NO: 1285258 - RNA, 19 nt, Artificial Sequence
  Description of Artificial Sequence: Synthetic oligonucleotide
agaaucuggacgcagcaga

SEQ ID NO: 1285259 - RNA, 19 nt, Artificial Sequence
  Description of Artificial Sequence: Synthetic oligonucleotide
guaucguccagccagguca

SEQ ID NO: 1285260 - RNA, 19 nt, Artificial Sequence
  Description of Artificial Sequence: Synthetic oligonucleotide
agugcguccaccaccacgc

SEQ ID NO: 1285261 - RNA, 19 nt, Artificial Sequence
  Description of Artificial Sequence: Synthetic oligonucleotide
uugaugugcacuccugccc

SEQ ID NO: 1285262 - RNA, 19 nt, Artificial Sequence
  Description of Artificial Sequence: Synthetic oligonucleotide
uaauguggagucuuuacua

SEQ ID NO: 1285263 - RNA, 19 nt, Artificial Sequence
  Description of Artificial Sequence: Synthetic oligonucleotide
ugcaaucggguagagagag

SEQ ID NO: 1285264 - RNA, 19 nt, Artificial Sequence
  Description of Artificial Sequence: Synthetic oligonucleotide
gauacagucuccuccguuc

SEQ ID NO: 1285265 - RNA, 19 nt, Artificial Sequence
  Description of Artificial Sequence: Synthetic oligonucleotide
agucuuuacuaggacaggg

SEQ ID NO: 1285266 - RNA, 19 nt, Artificial Sequence
  Description of Artificial Sequence: Synthetic oligonucleotide
ugggccaccguuaaauaug

SEQ ID NO: 1285267 - RNA, 19 nt, Artificial Sequence
  Description of Artificial Sequence: Synthetic oligonucleotide
gauucgaagcaggauuugg

SEQ ID NO: 1285268 - RNA, 19 nt, Artificial Sequence
  Description of Artificial Sequence: Synthetic oligonucleotide
aagucgguccaaauuagag

SEQ ID NO: 1285269 - RNA, 19 nt, Artificial Sequence
  Description of Artificial Sequence: Synthetic oligonucleotide
ucgucaauaaguuguugcu

SEQ ID NO: 1285270 - RNA, 19 nt, Artificial Sequence
  Description of Artificial Sequence: Synthetic oligonucleotide
ugaacucccagccucguuc

SEQ ID NO: 1285271 - RNA, 19 nt, Artificial Sequence
  Description of Artificial Sequence: Synthetic oligonucleotide
auucgaauauccuguccuc

SEQ ID NO: 1285272 - RNA, 19 nt, Artificial Sequence
  Description of Artificial Sequence: Synthetic oligonucleotide
uuaugucgcucuuggauca

SEQ ID NO: 1285273 - RNA, 19 nt, Artificial Sequence
  Description of Artificial Sequence: Synthetic oligonucleotide
gauucgaauauccuguccu

SEQ ID NO: 1285274 - RNA, 19 nt, Artificial Sequence
  Description of Artificial Sequence: Synthetic oligonucleotide
caggucacccuucaggccg

SEQ ID NO: 1285275 - RNA, 19 nt, Artificial Sequence
  Description of Artificial Sequence: Synthetic oligonucleotide
ucuggacgcagcagaaucc

SEQ ID NO: 1285276 - RNA, 19 nt, Artificial Sequence
  Description of Artificial Sequence: Synthetic oligonucleotide
agagaugacccgugugugg

SEQ ID NO: 1285277 - RNA, 19 nt, Artificial Sequence
  Description of Artificial Sequence: Synthetic oligonucleotide
auggucgucaauaaguugu

SEQ ID NO: 1285278 - RNA, 19 nt, Artificial Sequence
  Description of Artificial Sequence: Synthetic oligonucleotide
auguuugccaugcacgaga

SEQ ID NO: 1285279 - RNA, 19 nt, Artificial Sequence
  Description of Artificial Sequence: Synthetic oligonucleotide
auuagagaugucaaagaca

SEQ ID NO: 1285280 - RNA, 19 nt, Artificial Sequence
  Description of Artificial Sequence: Synthetic oligonucleotide
uaucccaaacguucauucc

SEQ ID NO: 1285281 - RNA, 19 nt, Artificial Sequence
  Description of Artificial Sequence: Synthetic oligonucleotide
ggacaauacauaccuuucg

SEQ ID NO: 1285282 - RNA, 19 nt, Artificial Sequence
  Description of Artificial Sequence: Synthetic oligonucleotide
cacugagccuauaguaucg

SEQ ID NO: 1285283 - RNA, 19 nt, Artificial Sequence
  Description of Artificial Sequence: Synthetic oligonucleotide
ucggguagagagagggccg

SEQ ID NO: 1285284 - RNA, 19 nt, Artificial Sequence
  Description of Artificial Sequence: Synthetic oligonucleotide
acgcguucuaccucucgcc

SEQ ID NO: 1285285 - RNA, 19 nt, Artificial Sequence
  Description of Artificial Sequence: Synthetic oligonucleotide
aguccccugaugcuucggc

SEQ ID NO: 1285286 - RNA, 19 nt, Artificial Sequence
  Description of Artificial Sequence: Synthetic oligonucleotide
gaugcauuugcuggggaug

SEQ ID NO: 1285287 - RNA, 19 nt, Artificial Sequence
  Description of Artificial Sequence: Synthetic oligonucleotide
guaucccaaacguucauuc

SEQ ID NO: 1285288 - RNA, 19 nt, Artificial Sequence
  Description of Artificial Sequence: Synthetic oligonucleotide
uacuaggacagggagcgag

SEQ ID NO: 1285289 - RNA, 19 nt, Artificial Sequence
  Description of Artificial Sequence: Synthetic oligonucleotide
cauuguugugccagauucc

SEQ ID NO: 1285290 - RNA, 19 nt, Artificial Sequence
  Description of Artificial Sequence: Synthetic oligonucleotide
uccauagagaugacccgug

SEQ ID NO: 1285291 - RNA, 19 nt, Artificial Sequence
  Description of Artificial Sequence: Synthetic oligonucleotide
uuagauggacaggucaaga

SEQ ID NO: 1285292 - RNA, 19 nt, Artificial Sequence
  Description of Artificial Sequence: Synthetic oligonucleotide
aaucggguagagagagggc

SEQ ID NO: 1285293 - RNA, 19 nt, Artificial Sequence
  Description of Artificial Sequence: Synthetic oligonucleotide
cacaugaacucccagccuc

SEQ ID NO: 1285294 - RNA, 19 nt, Artificial Sequence
  Description of Artificial Sequence: Synthetic oligonucleotide
ucacugagccuauaguauc

SEQ ID NO: 1285295 - RNA, 19 nt, Artificial Sequence
  Description of Artificial Sequence: Synthetic oligonucleotide
gauggggaguuaauguuug

SEQ ID NO: 1285296 - RNA, 19 nt, Artificial Sequence
  Description of Artificial Sequence: Synthetic oligonucleotide
acggauuuuacuggcauca

SEQ ID NO: 1285297 - RNA, 19 nt, Artificial Sequence
  Description of Artificial Sequence: Synthetic oligonucleotide
aguaucguccagccagguc

SEQ ID NO: 1285298 - RNA, 19 nt, Artificial Sequence
  Description of Artificial Sequence: Synthetic oligonucleotide
ugucgcucuuggaucacag

SEQ ID NO: 1285299 - RNA, 19 nt, Artificial Sequence
  Description of Artificial Sequence: Synthetic oligonucleotide
uuguugugcuuucggaggu

SEQ ID NO: 1285300 - RNA, 19 nt, Artificial Sequence
  Description of Artificial Sequence: Synthetic oligonucleotide
aaauggucgucaauaaguu

SEQ ID NO: 1285301 - RNA, 19 nt, Artificial Sequence
  Description of Artificial Sequence: Synthetic oligonucleotide
gaugcggcuacuggauucg

SEQ ID NO: 1285302 - RNA, 19 nt, Artificial Sequence
  Description of Artificial Sequence: Synthetic oligonucleotide
aaaguagccagaacggauu

SEQ ID NO: 1285303 - RNA, 19 nt, Artificial Sequence
  Description of Artificial Sequence: Synthetic oligonucleotide
ugggaaccggcuaucuuug

SEQ ID NO: 1285304 - RNA, 19 nt, Artificial Sequence
  Description of Artificial Sequence: Synthetic oligonucleotide
auaucucauaggucuccuc

SEQ ID NO: 1285305 - RNA, 19 nt, Artificial Sequence
  Description of Artificial Sequence: Synthetic oligonucleotide
uggauucgaagcaggauuu

SEQ ID NO: 1285306 - RNA, 19 nt, Artificial Sequence
  Description of Artificial Sequence: Synthetic oligonucleotide
cagagccgagcauagacug

SEQ ID NO: 1285307 - RNA, 19 nt, Artificial Sequence
  Description of Artificial Sequence: Synthetic oligonucleotide
auggggaguuaauguuugc

SEQ ID NO: 1285308 - RNA, 19 nt, Artificial Sequence
  Description of Artificial Sequence: Synthetic oligonucleotide
ucccaaacguucauuccac

SEQ ID NO: 1285309 - RNA, 19 nt, Artificial Sequence
  Description of Artificial Sequence: Synthetic oligonucleotide
agggauucgaauauccugu

SEQ ID NO: 1285310 - RNA, 19 nt, Artificial Sequence
  Description of Artificial Sequence: Synthetic oligonucleotide
gcuuaucaaacagaaaaug

SEQ ID NO: 1285311 - RNA, 19 nt, Artificial Sequence
  Description of Artificial Sequence: Synthetic oligonucleotide
ggaggaugcaaucggguag

SEQ ID NO: 1285312 - RNA, 19 nt, Artificial Sequence
  Description of Artificial Sequence: Synthetic oligonucleotide
caagauguaucccaaacgu

SEQ ID NO: 1285313 - RNA, 19 nt, Artificial Sequence
  Description of Artificial Sequence: Synthetic oligonucleotide
cauagagaugacccgugug

SEQ ID NO: 1285314 - RNA, 19 nt, Artificial Sequence
  Description of Artificial Sequence: Synthetic oligonucleotide
caggauuuggagcaaguca

SEQ ID NO: 1285315 - RNA, 19 nt, Artificial Sequence
  Description of Artificial Sequence: Synthetic oligonucleotide
augcauuugcuggggaugg

SEQ ID NO: 1285316 - RNA, 19 nt, Artificial Sequence
  Description of Artificial Sequence: Synthetic oligonucleotide
aucucacugagccuauagu

SEQ ID NO: 1285317 - RNA, 19 nt, Artificial Sequence
  Description of Artificial Sequence: Synthetic oligonucleotide
gauguaucccaaacguuca

SEQ ID NO: 1285318 - RNA, 19 nt, Artificial Sequence
  Description of Artificial Sequence: Synthetic oligonucleotide
cuagagacccagcuccagc

SEQ ID NO: 1285319 - RNA, 19 nt, Artificial Sequence
  Description of Artificial Sequence: Synthetic oligonucleotide
ucgaauauccuguccucuc

SEQ ID NO: 1285320 - RNA, 19 nt, Artificial Sequence
  Description of Artificial Sequence: Synthetic oligonucleotide
ggauuuuacuggcaucaag

SEQ ID NO: 1285321 - RNA, 19 nt, Artificial Sequence
  Description of Artificial Sequence: Synthetic oligonucleotide
ucuccuccguucacuggcg

SEQ ID NO: 1285322 - RNA, 19 nt, Artificial Sequence
  Description of Artificial Sequence: Synthetic oligonucleotide
uuucgucaaaguagccaga

SEQ ID NO: 1285323 - RNA, 19 nt, Artificial Sequence
  Description of Artificial Sequence: Synthetic oligonucleotide
accucugacuugccaaguc

SEQ ID NO: 1285324 - RNA, 19 nt, Artificial Sequence
  Description of Artificial Sequence: Synthetic oligonucleotide
ccuauaguaucguccagcc

SEQ ID NO: 1285325 - RNA, 19 nt, Artificial Sequence
  Description of Artificial Sequence: Synthetic oligonucleotide
acaggcuuaucaaacagaa

SEQ ID NO: 1285326 - RNA, 19 nt, Artificial Sequence
  Description of Artificial Sequence: Synthetic oligonucleotide
guuagauggacaggucaag

SEQ ID NO: 1285327 - RNA, 19 nt, Artificial Sequence
  Description of Artificial Sequence: Synthetic oligonucleotide
uucgaauauccuguccucu

SEQ ID NO: 1285328 - RNA, 19 nt, Artificial Sequence
  Description of Artificial Sequence: Synthetic oligonucleotide
gaugacccguguguggucc

SEQ ID NO: 1285329 - RNA, 19 nt, Artificial Sequence
  Description of Artificial Sequence: Synthetic oligonucleotide
guagagagagggccggagc

SEQ ID NO: 1285330 - RNA, 19 nt, Artificial Sequence
  Description of Artificial Sequence: Synthetic oligonucleotide
acccagaucaagaaacucu

SEQ ID NO: 1285331 - RNA, 19 nt, Artificial Sequence
  Description of Artificial Sequence: Synthetic oligonucleotide
cuuugcuuagcaggggcag

SEQ ID NO: 1285332 - RNA, 19 nt, Artificial Sequence
  Description of Artificial Sequence: Synthetic oligonucleotide
ccagaacggauuuuacugg

SEQ ID NO: 1285333 - RNA, 19 nt, Artificial Sequence
  Description of Artificial Sequence: Synthetic oligonucleotide
cugcccgaaguccagugcc

SEQ ID NO: 1285334 - RNA, 19 nt, Artificial Sequence
  Description of Artificial Sequence: Synthetic oligonucleotide
aaguacaaugggccaccgu

SEQ ID NO: 1285335 - RNA, 19 nt, Artificial Sequence
  Description of Artificial Sequence: Synthetic oligonucleotide
ggaguuaauguuugccaug

SEQ ID NO: 1285336 - RNA, 19 nt, Artificial Sequence
  Description of Artificial Sequence: Synthetic oligonucleotide
ggcgcagcgagcuagcggc

SEQ ID NO: 1285337 - RNA, 19 nt, Artificial Sequence
  Description of Artificial Sequence: Synthetic oligonucleotide
uucgucaaaguagccagaa

SEQ ID NO: 1285338 - RNA, 19 nt, Artificial Sequence
  Description of Artificial Sequence: Synthetic oligonucleotide
cuccagacgccguucacac

SEQ ID NO: 1285339 - RNA, 19 nt, Artificial Sequence
  Description of Artificial Sequence: Synthetic oligonucleotide
auaguaucguccagccagg

SEQ ID NO: 1285340 - RNA, 19 nt, Artificial Sequence
  Description of Artificial Sequence: Synthetic oligonucleotide
gagggaggaugcaaucggg

SEQ ID NO: 1285341 - RNA, 19 nt, Artificial Sequence
  Description of Artificial Sequence: Synthetic oligonucleotide
auacagucuccuccguuca

SEQ ID NO: 1285342 - RNA, 19 nt, Artificial Sequence
  Description of Artificial Sequence: Synthetic oligonucleotide
acgcuuuuggagccguaag

SEQ ID NO: 1285343 - RNA, 19 nt, Artificial Sequence
  Description of Artificial Sequence: Synthetic oligonucleotide
uggcggcucguacagaauc

SEQ ID NO: 1285344 - RNA, 19 nt, Artificial Sequence
  Description of Artificial Sequence: Synthetic oligonucleotide
ugcacugaucuagugucca

SEQ ID NO: 1285345 - RNA, 19 nt, Artificial Sequence
  Description of Artificial Sequence: Synthetic oligonucleotide
accguuaaauaugcagaag

SEQ ID NO: 1285346 - RNA, 19 nt, Artificial Sequence
  Description of Artificial Sequence: Synthetic oligonucleotide
auucacccagaucaagaaa

SEQ ID NO: 1285347 - RNA, 19 nt, Artificial Sequence
  Description of Artificial Sequence: Synthetic oligonucleotide
cagugcguccaccaccacg

SEQ ID NO: 1285348 - RNA, 19 nt, Artificial Sequence
  Description of Artificial Sequence: Synthetic oligonucleotide
gcaguuguugugcuuucgg

SEQ ID NO: 1285349 - RNA, 19 nt, Artificial Sequence
  Description of Artificial Sequence: Synthetic oligonucleotide
uaguguccaaccagugggu

SEQ ID NO: 1285350 - RNA, 19 nt, Artificial Sequence
  Description of Artificial Sequence: Synthetic oligonucleotide
ucgguccaaauuagagaug

SEQ ID NO: 1285351 - RNA, 19 nt, Artificial Sequence
  Description of Artificial Sequence: Synthetic oligonucleotide
uggaugcacugaucuagug

SEQ ID NO: 1285352 - RNA, 19 nt, Artificial Sequence
  Description of Artificial Sequence: Synthetic oligonucleotide
caaacagaaaauggucguc

SEQ ID NO: 1285353 - RNA, 19 nt, Artificial Sequence
  Description of Artificial Sequence: Synthetic oligonucleotide
ucgucaaaguagccagaac

SEQ ID NO: 1285354 - RNA, 19 nt, Artificial Sequence
  Description of Artificial Sequence: Synthetic oligonucleotide
cacgcguucuaccucucgc

SEQ ID NO: 1285355 - RNA, 19 nt, Artificial Sequence
  Description of Artificial Sequence: Synthetic oligonucleotide
ggcaguuugaugugcacuc

SEQ ID NO: 1285356 - RNA, 19 nt, Artificial Sequence
  Description of Artificial Sequence: Synthetic oligonucleotide
aaccggcuaucuuugcuua

SEQ ID NO: 1285357 - RNA, 19 nt, Artificial Sequence
  Description of Artificial Sequence: Synthetic oligonucleotide
aagauguaucccaaacguu

SEQ ID NO: 1285358 - RNA, 19 nt, Artificial Sequence
  Description of Artificial Sequence: Synthetic oligonucleotide
acuggcggcucguacagaa

SEQ ID NO: 1285359 - RNA, 19 nt, Artificial Sequence
  Description of Artificial Sequence: Synthetic oligonucleotide
cuucggccaguucugacuc

SEQ ID NO: 1285360 - RNA, 19 nt, Artificial Sequence
  Description of Artificial Sequence: Synthetic oligonucleotide
acaugaacucccagccucg

SEQ ID NO: 1285361 - RNA, 19 nt, Artificial Sequence
  Description of Artificial Sequence: Synthetic oligonucleotide
augggccaccguuaaauau

SEQ ID NO: 1285362 - RNA, 19 nt, Artificial Sequence
  Description of Artificial Sequence: Synthetic oligonucleotide
agagccgagcauagacugc

SEQ ID NO: 1285363 - RNA, 19 nt, Artificial Sequence
  Description of Artificial Sequence: Synthetic oligonucleotide
acuaggacagggagcgagg

SEQ ID NO: 1285364 - RNA, 19 nt, Artificial Sequence
  Description of Artificial Sequence: Synthetic oligonucleotide
ucuaccucucgccgcucug

SEQ ID NO: 1285365 - RNA, 19 nt, Artificial Sequence
  Description of Artificial Sequence: Synthetic oligonucleotide
ggggaguuaauguuugcca

SEQ ID NO: 1285366 - RNA, 19 nt, Artificial Sequence
  Description of Artificial Sequence: Synthetic oligonucleotide
ugaggccccggcagaaucu

SEQ ID NO: 1285367 - RNA, 19 nt, Artificial Sequence
  Description of Artificial Sequence: Synthetic oligonucleotide
agcaagucaggaacuagga

SEQ ID NO: 1285368 - RNA, 19 nt, Artificial Sequence
  Description of Artificial Sequence: Synthetic oligonucleotide
aguuaauguuugccaugca

SEQ ID NO: 1285369 - RNA, 19 nt, Artificial Sequence
  Description of Artificial Sequence: Synthetic oligonucleotide
acgggagaagggaccagcc

SEQ ID NO: 1285370 - RNA, 19 nt, Artificial Sequence
  Description of Artificial Sequence: Synthetic oligonucleotide
gucgcucuuggaucacagg

SEQ ID NO: 1285371 - RNA, 19 nt, Artificial Sequence
  Description of Artificial Sequence: Synthetic oligonucleotide
gccgccuuucuccauagag

SEQ ID NO: 1285372 - RNA, 19 nt, Artificial Sequence
  Description of Artificial Sequence: Synthetic oligonucleotide
aucccagcggcuagagacc

SEQ ID NO: 1285373 - RNA, 19 nt, Artificial Sequence
  Description of Artificial Sequence: Synthetic oligonucleotide
gaucuuugggaaccggcua

SEQ ID NO: 1285374 - RNA, 19 nt, Artificial Sequence
  Description of Artificial Sequence: Synthetic oligonucleotide
ggauucgaauauccugucc

SEQ ID NO: 1285375 - RNA, 19 nt, Artificial Sequence
  Description of Artificial Sequence: Synthetic oligonucleotide
gcggcuacuggauucgaag

SEQ ID NO: 1285376 - RNA, 19 nt, Artificial Sequence
  Description of Artificial Sequence: Synthetic oligonucleotide
cacaggcuuaucaaacaga

SEQ ID NO: 1285377 - RNA, 19 nt, Artificial Sequence
  Description of Artificial Sequence: Synthetic oligonucleotide
ugcccagguuagauggaca

SEQ ID NO: 1285378 - RNA, 19 nt, Artificial Sequence
  Description of Artificial Sequence: Synthetic oligonucleotide
caccguuaaauaugcagaa

SEQ ID NO: 1285379 - RNA, 19 nt, Artificial Sequence
  Description of Artificial Sequence: Synthetic oligonucleotide
gaggaugcaaucggguaga

SEQ ID NO: 1285380 - RNA, 19 nt, Artificial Sequence
  Description of Artificial Sequence: Synthetic oligonucleotide
uggcagucggugccaacca

SEQ ID NO: 1285381 - RNA, 19 nt, Artificial Sequence
  Description of Artificial Sequence: Synthetic oligonucleotide
aguccagugcccagguuag

SEQ ID NO: 1285382 - RNA, 19 nt, Artificial Sequence
  Description of Artificial Sequence: Synthetic oligonucleotide
cacugaucuaguguccaac

SEQ ID NO: 1285383 - RNA, 19 nt, Artificial Sequence
  Description of Artificial Sequence: Synthetic oligonucleotide
ugucgcagagccgagcaua

SEQ ID NO: 1285384 - RNA, 19 nt, Artificial Sequence
  Description of Artificial Sequence: Synthetic oligonucleotide
ucguccagccaggucaccc

SEQ ID NO: 1285385 - RNA, 19 nt, Artificial Sequence
  Description of Artificial Sequence: Synthetic oligonucleotide
uuugcuuagcaggggcagu

SEQ ID NO: 1285386 - RNA, 19 nt, Artificial Sequence
  Description of Artificial Sequence: Synthetic oligonucleotide
ggcuaucuuugcuuagcag

SEQ ID NO: 1285387 - RNA, 19 nt, Artificial Sequence
  Description of Artificial Sequence: Synthetic oligonucleotide
uuguugcuguuccgccucc

SEQ ID NO: 1285388 - RNA, 19 nt, Artificial Sequence
  Description of Artificial Sequence: Synthetic oligonucleotide
gcuacuggauucgaagcag

SEQ ID NO: 1285389 - RNA, 19 nt, Artificial Sequence
  Description of Artificial Sequence: Synthetic oligonucleotide
uacagucuccuccguucac

SEQ ID NO: 1285390 - RNA, 19 nt, Artificial Sequence
  Description of Artificial Sequence: Synthetic oligonucleotide
gaucuaguguccaaccagu

SEQ ID NO: 1285391 - RNA, 19 nt, Artificial Sequence
  Description of Artificial Sequence: Synthetic oligonucleotide
uggucgucaauaaguuguu

SEQ ID NO: 1285392 - RNA, 19 nt, Artificial Sequence
  Description of Artificial Sequence: Synthetic oligonucleotide
caugcacgagaggugcagg

SEQ ID NO: 1285393 - RNA, 19 nt, Artificial Sequence
  Description of Artificial Sequence: Synthetic oligonucleotide
uguugcuguuccgccuccg

SEQ ID NO: 1285394 - RNA, 19 nt, Artificial Sequence
  Description of Artificial Sequence: Synthetic oligonucleotide
gugccagauuccucgagca

SEQ ID NO: 1285395 - RNA, 19 nt, Artificial Sequence
  Description of Artificial Sequence: Synthetic oligonucleotide
uugccgccuuucuccauag

SEQ ID NO: 1285396 - RNA, 19 nt, Artificial Sequence
  Description of Artificial Sequence: Synthetic oligonucleotide
ccggcagaaucuuucaaac

SEQ ID NO: 1285397 - RNA, 19 nt, Artificial Sequence
  Description of Artificial Sequence: Synthetic oligonucleotide
accggcuaucuuugcuuag

SEQ ID NO: 1285398 - RNA, 19 nt, Artificial Sequence
  Description of Artificial Sequence: Synthetic oligonucleotide
guagccagaacggauuuua

SEQ ID NO: 1285399 - RNA, 19 nt, Artificial Sequence
  Description of Artificial Sequence: Synthetic oligonucleotide
cugagccuauaguaucguc

SEQ ID NO: 1285400 - RNA, 19 nt, Artificial Sequence
  Description of Artificial Sequence: Synthetic oligonucleotide
gccaagucgguccaaauua

SEQ ID NO: 1285401 - RNA, 19 nt, Artificial Sequence
  Description of Artificial Sequence: Synthetic oligonucleotide
uggagccguaaguucucca

SEQ ID NO: 1285402 - RNA, 19 nt, Artificial Sequence
  Description of Artificial Sequence: Synthetic oligonucleotide
ccaagucgguccaaauuag

SEQ ID NO: 1285403 - RNA, 19 nt, Artificial Sequence
  Description of Artificial Sequence: Synthetic oligonucleotide
gccgagcauagacugcugg

SEQ ID NO: 1285404 - RNA, 19 nt, Artificial Sequence
  Description of Artificial Sequence: Synthetic oligonucleotide
caaaguagccagaacggau

SEQ ID NO: 1285405 - RNA, 19 nt, Artificial Sequence
  Description of Artificial Sequence: Synthetic oligonucleotide
gccuauaguaucguccagc

SEQ ID NO: 1285406 - RNA, 19 nt, Artificial Sequence
  Description of Artificial Sequence: Synthetic oligonucleotide
ggcuacuggauucgaagca

SEQ ID NO: 1285407 - RNA, 19 nt, Artificial Sequence
  Description of Artificial Sequence: Synthetic oligonucleotide
ccgagcauagacugcuggg

SEQ ID NO: 1285408 - RNA, 19 nt, Artificial Sequence
  Description of Artificial Sequence: Synthetic oligonucleotide
aucuaguguccaaccagug

SEQ ID NO: 1285409 - RNA, 19 nt, Artificial Sequence
  Description of Artificial Sequence: Synthetic oligonucleotide
agagagagggccggagcug

SEQ ID NO: 1285410 - RNA, 19 nt, Artificial Sequence
  Description of Artificial Sequence: Synthetic oligonucleotide
ugcggcuacuggauucgaa

SEQ ID NO: 1285411 - RNA, 19 nt, Artificial Sequence
  Description of Artificial Sequence: Synthetic oligonucleotide
ggucuugucgcagagccga

SEQ ID NO: 1285412 - RNA, 19 nt, Artificial Sequence
  Description of Artificial Sequence: Synthetic oligonucleotide
uuggagccguaaguucucc

SEQ ID NO: 1285413 - RNA, 19 nt, Artificial Sequence
  Description of Artificial Sequence: Synthetic oligonucleotide
cuggauucgaagcaggauu

SEQ ID NO: 1285414 - RNA, 19 nt, Artificial Sequence
  Description of Artificial Sequence: Synthetic oligonucleotide
cuauaguaucguccagcca

SEQ ID NO: 1285415 - RNA, 19 nt, Artificial Sequence
  Description of Artificial Sequence: Synthetic oligonucleotide
ugcuucggccaguucugac

SEQ ID NO: 1285416 - RNA, 19 nt, Artificial Sequence
  Description of Artificial Sequence: Synthetic oligonucleotide
ucuuugggaaccggcuauc

SEQ ID NO: 1285417 - RNA, 19 nt, Artificial Sequence
  Description of Artificial Sequence: Synthetic oligonucleotide
gucgcagagccgagcauag

SEQ ID NO: 1285418 - RNA, 19 nt, Artificial Sequence
  Description of Artificial Sequence: Synthetic oligonucleotide
acugagccuauaguaucgu

SEQ ID NO: 1285419 - RNA, 19 nt, Artificial Sequence
  Description of Artificial Sequence: Synthetic oligonucleotide
cuaccucucgccgcucugc

SEQ ID NO: 1285420 - RNA, 19 nt, Artificial Sequence
  Description of Artificial Sequence: Synthetic oligonucleotide
gcuuagcaggggcaguuug

SEQ ID NO: 1285421 - RNA, 19 nt, Artificial Sequence
  Description of Artificial Sequence: Synthetic oligonucleotide
aggggucacgaugaaggcu

SEQ ID NO: 1285422 - RNA, 19 nt, Artificial Sequence
  Description of Artificial Sequence: Synthetic oligonucleotide
uugccaagucgguccaaau

SEQ ID NO: 1285423 - RNA, 19 nt, Artificial Sequence
  Description of Artificial Sequence: Synthetic oligonucleotide
cggcuagagacccagcucc

SEQ ID NO: 1285424 - RNA, 19 nt, Artificial Sequence
  Description of Artificial Sequence: Synthetic oligonucleotide
gaaccggcuaucuuugcuu

SEQ ID NO: 1285425 - RNA, 19 nt, Artificial Sequence
  Description of Artificial Sequence: Synthetic oligonucleotide
gguagagagagggccggag

SEQ ID NO: 1285426 - RNA, 19 nt, Artificial Sequence
  Description of Artificial Sequence: Synthetic oligonucleotide
uuacuccaucgaugaccag

SEQ ID NO: 1285427 - RNA, 19 nt, Artificial Sequence
  Description of Artificial Sequence: Synthetic oligonucleotide
cuggguacucagcgcucgg

SEQ ID NO: 1285428 - RNA, 19 nt, Artificial Sequence
  Description of Artificial Sequence: Synthetic oligonucleotide
guugugccagauuccucga

SEQ ID NO: 1285429 - RNA, 19 nt, Artificial Sequence
  Description of Artificial Sequence: Synthetic oligonucleotide
cagucuggaugcacugauc

SEQ ID NO: 1285430 - RNA, 19 nt, Artificial Sequence
  Description of Artificial Sequence: Synthetic oligonucleotide
auagacugcuggggucagg

SEQ ID NO: 1285431 - RNA, 19 nt, Artificial Sequence
  Description of Artificial Sequence: Synthetic oligonucleotide
ggcaaguacaaugggccac

SEQ ID NO: 1285432 - RNA, 19 nt, Artificial Sequence
  Description of Artificial Sequence: Synthetic oligonucleotide
gguuagauggacaggucaa

SEQ ID NO: 1285433 - RNA, 19 nt, Artificial Sequence
  Description of Artificial Sequence: Synthetic oligonucleotide
agggaggaugcaaucgggu

SEQ ID NO: 1285434 - RNA, 19 nt, Artificial Sequence
  Description of Artificial Sequence: Synthetic oligonucleotide
aggucacccuucaggccgc

SEQ ID NO: 1285435 - RNA, 19 nt, Artificial Sequence
  Description of Artificial Sequence: Synthetic oligonucleotide
agucggugccaaccaggcu

SEQ ID NO: 1285436 - RNA, 19 nt, Artificial Sequence
  Description of Artificial Sequence: Synthetic oligonucleotide
cagucccgagccauuccug

SEQ ID NO: 1285437 - RNA, 19 nt, Artificial Sequence
  Description of Artificial Sequence: Synthetic oligonucleotide
guugccgccuuucuccaua

SEQ ID NO: 1285438 - RNA, 19 nt, Artificial Sequence
  Description of Artificial Sequence: Synthetic oligonucleotide
uaugucgcucuuggaucac

SEQ ID NO: 1285439 - RNA, 19 nt, Artificial Sequence
  Description of Artificial Sequence: Synthetic oligonucleotide
cauagccauuaugucgcuc

SEQ ID NO: 1285440 - RNA, 19 nt, Artificial Sequence
  Description of Artificial Sequence: Synthetic oligonucleotide
ggggauggggaguuaaugu

SEQ ID NO: 1285441 - RNA, 19 nt, Artificial Sequence
  Description of Artificial Sequence: Synthetic oligonucleotide
augcaaucggguagagaga

SEQ ID NO: 1285442 - RNA, 19 nt, Artificial Sequence
  Description of Artificial Sequence: Synthetic oligonucleotide
aacguucauuccacaugaa

SEQ ID NO: 1285443 - RNA, 19 nt, Artificial Sequence
  Description of Artificial Sequence: Synthetic oligonucleotide
gggauucgaauauccuguc

SEQ ID NO: 1285444 - RNA, 19 nt, Artificial Sequence
  Description of Artificial Sequence: Synthetic oligonucleotide
gagccgagcauagacugcu

SEQ ID NO: 1285445 - RNA, 19 nt, Artificial Sequence
  Description of Artificial Sequence: Synthetic oligonucleotide
caaugggccaccguuaaau

SEQ ID NO: 1285446 - RNA, 19 nt, Artificial Sequence
  Description of Artificial Sequence: Synthetic oligonucleotide
gggccaccguuaaauaugc

SEQ ID NO: 1285447 - RNA, 19 nt, Artificial Sequence
  Description of Artificial Sequence: Synthetic oligonucleotide
ggcucguacagaaucugga

SEQ ID NO: 1285448 - RNA, 19 nt, Artificial Sequence
  Description of Artificial Sequence: Synthetic oligonucleotide
gccguucacacucaaucaa

SEQ ID NO: 1285449 - RNA, 19 nt, Artificial Sequence
  Description of Artificial Sequence: Synthetic oligonucleotide
gccuccgucaucucacuga

SEQ ID NO: 1285450 - RNA, 19 nt, Artificial Sequence
  Description of Artificial Sequence: Synthetic oligonucleotide
aucguccagccaggucacc

SEQ ID NO: 1285451 - RNA, 19 nt, Artificial Sequence
  Description of Artificial Sequence: Synthetic oligonucleotide
guacaaugggccaccguua

SEQ ID NO: 1285452 - RNA, 19 nt, Artificial Sequence
  Description of Artificial Sequence: Synthetic oligonucleotide
aggaugcaaucggguagag

SEQ ID NO: 1285453 - RNA, 19 nt, Artificial Sequence
  Description of Artificial Sequence: Synthetic oligonucleotide
ccuuucgucaaaguagcca

SEQ ID NO: 1285454 - RNA, 19 nt, Artificial Sequence
  Description of Artificial Sequence: Synthetic oligonucleotide
gacccgugugugguccucc

SEQ ID NO: 1285455 - RNA, 19 nt, Artificial Sequence
  Description of Artificial Sequence: Synthetic oligonucleotide
ccagaucaagaaacucuuc

SEQ ID NO: 1285456 - RNA, 19 nt, Artificial Sequence
  Description of Artificial Sequence: Synthetic oligonucleotide
gggaggcgcagcgagcuag

SEQ ID NO: 1285457 - RNA, 19 nt, Artificial Sequence
  Description of Artificial Sequence: Synthetic oligonucleotide
uuacuaggacagggagcga

SEQ ID NO: 1285458 - RNA, 19 nt, Artificial Sequence
  Description of Artificial Sequence: Synthetic oligonucleotide
ggauucgaagcaggauuug

SEQ ID NO: 1285459 - RNA, 19 nt, Artificial Sequence
  Description of Artificial Sequence: Synthetic oligonucleotide
gcguucuaccucucgccgc

SEQ ID NO: 1285460 - RNA, 19 nt, Artificial Sequence
  Description of Artificial Sequence: Synthetic oligonucleotide
gggaggaugcaaucgggua

SEQ ID NO: 1285461 - RNA, 19 nt, Artificial Sequence
  Description of Artificial Sequence: Synthetic oligonucleotide
ggucgucaauaaguuguug

SEQ ID NO: 1285462 - RNA, 19 nt, Artificial Sequence
  Description of Artificial Sequence: Synthetic oligonucleotide
gccaggguuguccacucca

SEQ ID NO: 1285463 - RNA, 19 nt, Artificial Sequence
  Description of Artificial Sequence: Synthetic oligonucleotide
gggcaaguacaaugggcca

SEQ ID NO: 1285464 - RNA, 19 nt, Artificial Sequence
  Description of Artificial Sequence: Synthetic oligonucleotide
ucggccaguucugacucuu

SEQ ID NO: 1285465 - RNA, 19 nt, Artificial Sequence
  Description of Artificial Sequence: Synthetic oligonucleotide
cggcuacuggauucgaagc

SEQ ID NO: 1285466 - RNA, 19 nt, Artificial Sequence
  Description of Artificial Sequence: Synthetic oligonucleotide
gugcguccaccaccacgcg

SEQ ID NO: 1285467 - RNA, 19 nt, Artificial Sequence
  Description of Artificial Sequence: Synthetic oligonucleotide
cuugccaagucgguccaaa

SEQ ID NO: 1285468 - RNA, 19 nt, Artificial Sequence
  Description of Artificial Sequence: Synthetic oligonucleotide
agcuagcggccagcuagag

SEQ ID NO: 1285469 - RNA, 19 nt, Artificial Sequence
  Description of Artificial Sequence: Synthetic oligonucleotide
agcgagcuagcggccagcu

SEQ ID NO: 1285470 - RNA, 19 nt, Artificial Sequence
  Description of Artificial Sequence: Synthetic oligonucleotide
ugccgccuuucuccauaga

SEQ ID NO: 1285471 - RNA, 19 nt, Artificial Sequence
  Description of Artificial Sequence: Synthetic oligonucleotide
ccggcuaucuuugcuuagc

SEQ ID NO: 1285472 - RNA, 19 nt, Artificial Sequence
  Description of Artificial Sequence: Synthetic oligonucleotide
cgcguucuaccucucgccg

SEQ ID NO: 1285473 - RNA, 19 nt, Artificial Sequence
  Description of Artificial Sequence: Synthetic oligonucleotide
gcuagagacccagcuccag

SEQ ID NO: 1285474 - RNA, 19 nt, Artificial Sequence
  Description of Artificial Sequence: Synthetic oligonucleotide
ggaaccggcuaucuuugcu

SEQ ID NO: 1285475 - RNA, 19 nt, Artificial Sequence
  Description of Artificial Sequence: Synthetic oligonucleotide
ggcuuaucaaacagaaaau

SEQ ID NO: 1285476 - RNA, 19 nt, Artificial Sequence
  Description of Artificial Sequence: Synthetic oligonucleotide
gcaaucggguagagagagg

SEQ ID NO: 1285477 - RNA, 19 nt, Artificial Sequence
  Description of Artificial Sequence: Synthetic oligonucleotide
gaggugcagggauucgaau

SEQ ID NO: 1285478 - RNA, 19 nt, Artificial Sequence
  Description of Artificial Sequence: Synthetic oligonucleotide
gcuucggccaguucugacu

SEQ ID NO: 1285479 - RNA, 19 nt, Artificial Sequence
  Description of Artificial Sequence: Synthetic oligonucleotide
ccgccuuucuccauagaga

SEQ ID NO: 1285480 - RNA, 19 nt, Artificial Sequence
  Description of Artificial Sequence: Synthetic oligonucleotide
cacgcuuuuggagccguaa

SEQ ID NO: 1285481 - RNA, 19 nt, Artificial Sequence
  Description of Artificial Sequence: Synthetic oligonucleotide
gcagcgagcuagcggccag

SEQ ID NO: 1285482 - RNA, 19 nt, Artificial Sequence
  Description of Artificial Sequence: Synthetic oligonucleotide
caccacgcguucuaccucu

SEQ ID NO: 1285483 - RNA, 19 nt, Artificial Sequence
  Description of Artificial Sequence: Synthetic oligonucleotide
cccagguuagauggacagg

SEQ ID NO: 1285484 - RNA, 19 nt, Artificial Sequence
  Description of Artificial Sequence: Synthetic oligonucleotide
gggaaccggcuaucuuugc

SEQ ID NO: 1285485 - RNA, 19 nt, Artificial Sequence
  Description of Artificial Sequence: Synthetic oligonucleotide
agacgccguucacacucaa

SEQ ID NO: 1285486 - RNA, 19 nt, Artificial Sequence
  Description of Artificial Sequence: Synthetic oligonucleotide
ucgcagagccgagcauaga

SEQ ID NO: 1285487 - RNA, 19 nt, Artificial Sequence
  Description of Artificial Sequence: Synthetic oligonucleotide
cagaaucccagcggcuaga

SEQ ID NO: 1285488 - RNA, 19 nt, Artificial Sequence
  Description of Artificial Sequence: Synthetic oligonucleotide
cccggcagaaucuuucaaa

SEQ ID NO: 1285489 - RNA, 19 nt, Artificial Sequence
  Description of Artificial Sequence: Synthetic oligonucleotide
ccgugugugguccuccuca

SEQ ID NO: 1285490 - RNA, 19 nt, Artificial Sequence
  Description of Artificial Sequence: Synthetic oligonucleotide
ccaaccagugggugugguc

SEQ ID NO: 1285491 - RNA, 19 nt, Artificial Sequence
  Description of Artificial Sequence: Synthetic oligonucleotide
ugacccgugugugguccuc

SEQ ID NO: 1285492 - RNA, 19 nt, Artificial Sequence
  Description of Artificial Sequence: Synthetic oligonucleotide
ccguucacacucaaucaaa

SEQ ID NO: 1285493 - RNA, 19 nt, Artificial Sequence
  Description of Artificial Sequence: Synthetic oligonucleotide
cagcgagcuagcggccagc

SEQ ID NO: 1285494 - RNA, 19 nt, Artificial Sequence
  Description of Artificial Sequence: Synthetic oligonucleotide
ccacgcguucuaccucucg

SEQ ID NO: 1285495 - RNA, 19 nt, Artificial Sequence
  Description of Artificial Sequence: Synthetic oligonucleotide
accacgcguucuaccucuc

SEQ ID NO: 1285496 - RNA, 19 nt, Artificial Sequence
  Description of Artificial Sequence: Synthetic oligonucleotide
ggaugcaaucggguagaga

SEQ ID NO: 1285497 - RNA, 19 nt, Artificial Sequence
  Description of Artificial Sequence: Synthetic oligonucleotide
gcggcucguacagaaucug

SEQ ID NO: 1285498 - RNA, 19 nt, Artificial Sequence
  Description of Artificial Sequence: Synthetic oligonucleotide
gccuuucuccauagagaug

SEQ ID NO: 1285499 - RNA, 19 nt, Artificial Sequence
  Description of Artificial Sequence: Synthetic oligonucleotide
agccgagcauagacugcug

SEQ ID NO: 1285500 - RNA, 19 nt, Artificial Sequence
  Description of Artificial Sequence: Synthetic oligonucleotide
ccaaacguucauuccacau

SEQ ID NO: 1285501 - RNA, 19 nt, Artificial Sequence
  Description of Artificial Sequence: Synthetic oligonucleotide
cccagaucaagaaacucuu

SEQ ID NO: 1285502 - RNA, 19 nt, Artificial Sequence
  Description of Artificial Sequence: Synthetic oligonucleotide
ggccccggcagaaucuuuc

SEQ ID NO: 1285503 - RNA, 19 nt, Artificial Sequence
  Description of Artificial Sequence: Synthetic oligonucleotide
gcacugaucuaguguccaa

SEQ ID NO: 1285504 - RNA, 19 nt, Artificial Sequence
  Description of Artificial Sequence: Synthetic oligonucleotide
caggguuguccacuccagu

SEQ ID NO: 1285505 - RNA, 19 nt, Artificial Sequence
  Description of Artificial Sequence: Synthetic oligonucleotide
cuuggaucacagggucaaa

SEQ ID NO: 1285506 - RNA, 19 nt, Artificial Sequence
  Description of Artificial Sequence: Synthetic oligonucleotide
augcggcuacuggauucga

SEQ ID NO: 1285507 - RNA, 19 nt, Artificial Sequence
  Description of Artificial Sequence: Synthetic oligonucleotide
cccaaacguucauuccaca

SEQ ID NO: 1285508 - RNA, 19 nt, Artificial Sequence
  Description of Artificial Sequence: Synthetic oligonucleotide
gcagagccgagcauagacu

SEQ ID NO: 1285509 - RNA, 19 nt, Artificial Sequence
  Description of Artificial Sequence: Synthetic oligonucleotide
cgccguucacacucaauca

SEQ ID NO: 1285510 - RNA, 19 nt, Artificial Sequence
  Description of Artificial Sequence: Synthetic oligonucleotide
cucgagcaucuggccaguc

SEQ ID NO: 1285511 - RNA, 19 nt, Artificial Sequence
  Description of Artificial Sequence: Synthetic oligonucleotide
cuggggauggggaguuaau

SEQ ID NO: 1285512 - RNA, 19 nt, Artificial Sequence
  Description of Artificial Sequence: Synthetic oligonucleotide
gacgccguucacacucaau

SEQ ID NO: 1285513 - RNA, 19 nt, Artificial Sequence
  Description of Artificial Sequence: Synthetic oligonucleotide
cguucacacucaaucaaau

SEQ ID NO: 1285514 - RNA, 19 nt, Artificial Sequence
  Description of Artificial Sequence: Synthetic oligonucleotide
ggcggcucguacagaaucu

SEQ ID NO: 1285515 - RNA, 19 nt, Artificial Sequence
  Description of Artificial Sequence: Synthetic oligonucleotide
cucucgccgcucugcccga

SEQ ID NO: 1285516 - RNA, 19 nt, Artificial Sequence
  Description of Artificial Sequence: Synthetic oligonucleotide
cggcuaucuuugcuuagca

SEQ ID NO: 1285517 - RNA, 19 nt, Artificial Sequence
  Description of Artificial Sequence: Synthetic oligonucleotide
ccauagagaugacccgugu

SEQ ID NO: 1285518 - RNA, 19 nt, Artificial Sequence
  Description of Artificial Sequence: Synthetic oligonucleotide
gucacccuucaggccgcuc

SEQ ID NO: 1285519 - RNA, 19 nt, Artificial Sequence
  Description of Artificial Sequence: Synthetic oligonucleotide
cguacagaaucuggacgca

SEQ ID NO: 1285520 - RNA, 19 nt, Artificial Sequence
  Description of Artificial Sequence: Synthetic oligonucleotide
cuggcggcucguacagaau

SEQ ID NO: 1285521 - RNA, 19 nt, Artificial Sequence
  Description of Artificial Sequence: Synthetic oligonucleotide
cguucuaccucucgccgcu

SEQ ID NO: 1285522 - RNA, 19 nt, Artificial Sequence
  Description of Artificial Sequence: Synthetic oligonucleotide
ccaccucuuugaggccccg

SEQ ID NO: 1285523 - RNA, 19 nt, Artificial Sequence
  Description of Artificial Sequence: Synthetic oligonucleotide
gcgcagcgagcuagcggcc

SEQ ID NO: 1285524 - RNA, 19 nt, Artificial Sequence
  Description of Artificial Sequence: Synthetic oligonucleotide
aggccccggcagaaucuuu

SEQ ID NO: 1285525 - RNA, 19 nt, Artificial Sequence
  Description of Artificial Sequence: Synthetic oligonucleotide
cgccuccgucaucucacug

SEQ ID NO: 1285526 - RNA, 19 nt, Artificial Sequence
  Description of Artificial Sequence: Synthetic oligonucleotide
ccgucaucucacugagccu

SEQ ID NO: 1285527 - RNA, 19 nt, Artificial Sequence
  Description of Artificial Sequence: Synthetic oligonucleotide
gcgagcuagcggccagcua

SEQ ID NO: 1285528 - RNA, 19 nt, Artificial Sequence
  Description of Artificial Sequence: Synthetic oligonucleotide
ccgaggcugaagccaaaau

SEQ ID NO: 1285529 - RNA, 19 nt, Artificial Sequence
  Description of Artificial Sequence: Synthetic oligonucleotide
cggauuuuacuggcaucaa

SEQ ID NO: 1285530 - RNA, 19 nt, Artificial Sequence
  Description of Artificial Sequence: Synthetic oligonucleotide
ccgccuccgucaucucacu

SEQ ID NO: 1285531 - RNA, 19 nt, Artificial Sequence
  Description of Artificial Sequence: Synthetic oligonucleotide
cguucacuggcggcucgua

SEQ ID NO: 1285532 - RNA, 19 nt, Artificial Sequence
  Description of Artificial Sequence: Synthetic oligonucleotide
ccucgagcaucuggccagu

SEQ ID NO: 1285533 - RNA, 19 nt, Artificial Sequence
  Description of Artificial Sequence: Synthetic oligonucleotide
ccguucacuggcggcucgu

SEQ ID NO: 1285534 - RNA, 19 nt, Artificial Sequence
  Description of Artificial Sequence: Synthetic oligonucleotide
aaguauuggagauauaaag

SEQ ID NO: 1285535 - RNA, 19 nt, Artificial Sequence
  Description of Artificial Sequence: Synthetic oligonucleotide
gaucuuacuguccagagcg

SEQ ID NO: 1285536 - RNA, 19 nt, Artificial Sequence
  Description of Artificial Sequence: Synthetic oligonucleotide
aaaguuugcuuuucguggc

SEQ ID NO: 1285537 - RNA, 19 nt, Artificial Sequence
  Description of Artificial Sequence: Synthetic oligonucleotide
aauucaaugaccaaacucu

SEQ ID NO: 1285538 - RNA, 19 nt, Artificial Sequence
  Description of Artificial Sequence: Synthetic oligonucleotide
ugguuuauggacucaaucg

SEQ ID NO: 1285539 - RNA, 19 nt, Artificial Sequence
  Description of Artificial Sequence: Synthetic oligonucleotide
aaaaguauuggagauauaa

SEQ ID NO: 1285540 - RNA, 19 nt, Artificial Sequence
  Description of Artificial Sequence: Synthetic oligonucleotide
ugauaguccagcauaagga

SEQ ID NO: 1285541 - RNA, 19 nt, Artificial Sequence
  Description of Artificial Sequence: Synthetic oligonucleotide
agaaacuuagcaugaaguc

SEQ ID NO: 1285542 - RNA, 19 nt, Artificial Sequence
  Description of Artificial Sequence: Synthetic oligonucleotide
uccaguuuccucucgaacg

SEQ ID NO: 1285543 - RNA, 19 nt, Artificial Sequence
  Description of Artificial Sequence: Synthetic oligonucleotide
cuuuucguggcuuugcgcg

SEQ ID NO: 1285544 - RNA, 19 nt, Artificial Sequence
  Description of Artificial Sequence: Synthetic oligonucleotide
aguauuggagauauaaagg

SEQ ID NO: 1285545 - RNA, 19 nt, Artificial Sequence
  Description of Artificial Sequence: Synthetic oligonucleotide
uuacaguagaaguagcggc

SEQ ID NO: 1285546 - RNA, 19 nt, Artificial Sequence
  Description of Artificial Sequence: Synthetic oligonucleotide
uucaugggccucuugaggg

SEQ ID NO: 1285547 - RNA, 19 nt, Artificial Sequence
  Description of Artificial Sequence: Synthetic oligonucleotide
uuaaaaguauuggagauau

SEQ ID NO: 1285548 - RNA, 19 nt, Artificial Sequence
  Description of Artificial Sequence: Synthetic oligonucleotide
gaaacuuagcaugaagucc

SEQ ID NO: 1285549 - RNA, 19 nt, Artificial Sequence
  Description of Artificial Sequence: Synthetic oligonucleotide
ucgcaugaugguuugaucc

SEQ ID NO: 1285550 - RNA, 19 nt, Artificial Sequence
  Description of Artificial Sequence: Synthetic oligonucleotide
cuugucaugggaauccugc

SEQ ID NO: 1285551 - RNA, 19 nt, Artificial Sequence
  Description of Artificial Sequence: Synthetic oligonucleotide
uccaauucaaugaccaaac

SEQ ID NO: 1285552 - RNA, 19 nt, Artificial Sequence
  Description of Artificial Sequence: Synthetic oligonucleotide
aacgcuaggagguccaugu

SEQ ID NO: 1285553 - RNA, 19 nt, Artificial Sequence
  Description of Artificial Sequence: Synthetic oligonucleotide
uuggacguagccuuuuggg

SEQ ID NO: 1285554 - RNA, 19 nt, Artificial Sequence
  Description of Artificial Sequence: Synthetic oligonucleotide
ugcgcuucugcuuacuggg

SEQ ID NO: 1285555 - RNA, 19 nt, Artificial Sequence
  Description of Artificial Sequence: Synthetic oligonucleotide
agaaguagcggcugacggc

SEQ ID NO: 1285556 - RNA, 19 nt, Artificial Sequence
  Description of Artificial Sequence: Synthetic oligonucleotide
acuucaaucggggacaguc

SEQ ID NO: 1285557 - RNA, 19 nt, Artificial Sequence
  Description of Artificial Sequence: Synthetic oligonucleotide
ucaacgaggugguugucgg

SEQ ID NO: 1285558 - RNA, 19 nt, Artificial Sequence
  Description of Artificial Sequence: Synthetic oligonucleotide
ugaugcuuguucaugggcu

SEQ ID NO: 1285559 - RNA, 19 nt, Artificial Sequence
  Description of Artificial Sequence: Synthetic oligonucleotide
auaaaggcgcagcuuucgc

SEQ ID NO: 1285560 - RNA, 19 nt, Artificial Sequence
  Description of Artificial Sequence: Synthetic oligonucleotide
cucccgaauccuuugaggg

SEQ ID NO: 1285561 - RNA, 19 nt, Artificial Sequence
  Description of Artificial Sequence: Synthetic oligonucleotide
agagaacuugcgcuucugc

SEQ ID NO: 1285562 - RNA, 19 nt, Artificial Sequence
  Description of Artificial Sequence: Synthetic oligonucleotide
uauaaaggcgcagcuuucg

SEQ ID NO: 1285563 - RNA, 19 nt, Artificial Sequence
  Description of Artificial Sequence: Synthetic oligonucleotide
uuguucaugggcuccuagg

SEQ ID NO: 1285564 - RNA, 19 nt, Artificial Sequence
  Description of Artificial Sequence: Synthetic oligonucleotide
uacaguagaaguagcggcu

SEQ ID NO: 1285565 - RNA, 19 nt, Artificial Sequence
  Description of Artificial Sequence: Synthetic oligonucleotide
uggggaaucucagagaacu

SEQ ID NO: 1285566 - RNA, 19 nt, Artificial Sequence
  Description of Artificial Sequence: Synthetic oligonucleotide
aacgaggugguugucgggg

SEQ ID NO: 1285567 - RNA, 19 nt, Artificial Sequence
  Description of Artificial Sequence: Synthetic oligonucleotide
uccacagugaugcuuguuc

SEQ ID NO: 1285568 - RNA, 19 nt, Artificial Sequence
  Description of Artificial Sequence: Synthetic oligonucleotide
uggacuauggcggagcggc

SEQ ID NO: 1285569 - RNA, 19 nt, Artificial Sequence
  Description of Artificial Sequence: Synthetic oligonucleotide
uucaaugaccaaacucuug

SEQ ID NO: 1285570 - RNA, 19 nt, Artificial Sequence
  Description of Artificial Sequence: Synthetic oligonucleotide
guugucggggccauaaagg

SEQ ID NO: 1285571 - RNA, 19 nt, Artificial Sequence
  Description of Artificial Sequence: Synthetic oligonucleotide
uuggagauauaaaggcgca

SEQ ID NO: 1285572 - RNA, 19 nt, Artificial Sequence
  Description of Artificial Sequence: Synthetic oligonucleotide
uggaucuuacuguccagag

SEQ ID NO: 1285573 - RNA, 19 nt, Artificial Sequence
  Description of Artificial Sequence: Synthetic oligonucleotide
cucagagaacuucaaucgg

SEQ ID NO: 1285574 - RNA, 19 nt, Artificial Sequence
  Description of Artificial Sequence: Synthetic oligonucleotide
agaaggaagagaacuugcg

SEQ ID NO: 1285575 - RNA, 19 nt, Artificial Sequence
  Description of Artificial Sequence: Synthetic oligonucleotide
gacaggagaaagcugcuca

SEQ ID NO: 1285576 - RNA, 19 nt, Artificial Sequence
  Description of Artificial Sequence: Synthetic oligonucleotide
gccauaaaggucuuugucc

SEQ ID NO: 1285577 - RNA, 19 nt, Artificial Sequence
  Description of Artificial Sequence: Synthetic oligonucleotide
aaaguauuggagauauaaa

SEQ ID NO: 1285578 - RNA, 19 nt, Artificial Sequence
  Description of Artificial Sequence: Synthetic oligonucleotide
ucuacucgagcggaguggg

SEQ ID NO: 1285579 - RNA, 19 nt, Artificial Sequence
  Description of Artificial Sequence: Synthetic oligonucleotide
agaacuucaaucggggaca

SEQ ID NO: 1285580 - RNA, 19 nt, Artificial Sequence
  Description of Artificial Sequence: Synthetic oligonucleotide
cacauacugccacagugcc

SEQ ID NO: 1285581 - RNA, 19 nt, Artificial Sequence
  Description of Artificial Sequence: Synthetic oligonucleotide
cucacucucucucucuucc

SEQ ID NO: 1285582 - RNA, 19 nt, Artificial Sequence
  Description of Artificial Sequence: Synthetic oligonucleotide
uucaaucggggacagucaa

SEQ ID NO: 1285583 - RNA, 19 nt, Artificial Sequence
  Description of Artificial Sequence: Synthetic oligonucleotide
uucuacucgagcggagugg

SEQ ID NO: 1285584 - RNA, 19 nt, Artificial Sequence
  Description of Artificial Sequence: Synthetic oligonucleotide
cuaugcuggacaguguggc

SEQ ID NO: 1285585 - RNA, 19 nt, Artificial Sequence
  Description of Artificial Sequence: Synthetic oligonucleotide
cuuggacguagccuuuugg

SEQ ID NO: 1285586 - RNA, 19 nt, Artificial Sequence
  Description of Artificial Sequence: Synthetic oligonucleotide
cacagugccuggacuaugg

SEQ ID NO: 1285587 - RNA, 19 nt, Artificial Sequence
  Description of Artificial Sequence: Synthetic oligonucleotide
uggacguagccuuuugggu

SEQ ID NO: 1285588 - RNA, 19 nt, Artificial Sequence
  Description of Artificial Sequence: Synthetic oligonucleotide
uccucucgaacgcuaggag

SEQ ID NO: 1285589 - RNA, 19 nt, Artificial Sequence
  Description of Artificial Sequence: Synthetic oligonucleotide
gcacccauggaccagaaac

SEQ ID NO: 1285590 - RNA, 19 nt, Artificial Sequence
  Description of Artificial Sequence: Synthetic oligonucleotide
ggagaaacuuagcaugaag

SEQ ID NO: 1285591 - RNA, 19 nt, Artificial Sequence
  Description of Artificial Sequence: Synthetic oligonucleotide
uuugggucucuggagaaac

SEQ ID NO: 1285592 - RNA, 19 nt, Artificial Sequence
  Description of Artificial Sequence: Synthetic oligonucleotide
cagugccuggacuauggcg

SEQ ID NO: 1285593 - RNA, 19 nt, Artificial Sequence
  Description of Artificial Sequence: Synthetic oligonucleotide
cagcgauugcuccagcucc

SEQ ID NO: 1285594 - RNA, 19 nt, Artificial Sequence
  Description of Artificial Sequence: Synthetic oligonucleotide
ucuggguaugcaaccccag

SEQ ID NO: 1285595 - RNA, 19 nt, Artificial Sequence
  Description of Artificial Sequence: Synthetic oligonucleotide
guagaaguagcggcugacg

SEQ ID NO: 1285596 - RNA, 19 nt, Artificial Sequence
  Description of Artificial Sequence: Synthetic oligonucleotide
gugaugcuuguucaugggc

SEQ ID NO: 1285597 - RNA, 19 nt, Artificial Sequence
  Description of Artificial Sequence: Synthetic oligonucleotide
ggagauauaaaggcgcagc

SEQ ID NO: 1285598 - RNA, 19 nt, Artificial Sequence
  Description of Artificial Sequence: Synthetic oligonucleotide
augguuugauccaguuucc

SEQ ID NO: 1285599 - RNA, 19 nt, Artificial Sequence
  Description of Artificial Sequence: Synthetic oligonucleotide
uuacugggaucauccaaga

SEQ ID NO: 1285600 - RNA, 19 nt, Artificial Sequence
  Description of Artificial Sequence: Synthetic oligonucleotide
uuuucguggcuuugcgcgc

SEQ ID NO: 1285601 - RNA, 19 nt, Artificial Sequence
  Description of Artificial Sequence: Synthetic oligonucleotide
ucagaaucuucagcaucgg

SEQ ID NO: 1285602 - RNA, 19 nt, Artificial Sequence
  Description of Artificial Sequence: Synthetic oligonucleotide
uuugauccaguuuccucuc

SEQ ID NO: 1285603 - RNA, 19 nt, Artificial Sequence
  Description of Artificial Sequence: Synthetic oligonucleotide
auggaccagaaacucaaaa

SEQ ID NO: 1285604 - RNA, 19 nt, Artificial Sequence
  Description of Artificial Sequence: Synthetic oligonucleotide
cucaacgaggugguugucg

SEQ ID NO: 1285605 - RNA, 19 nt, Artificial Sequence
  Description of Artificial Sequence: Synthetic oligonucleotide
ucuuggacguagccuuuug

SEQ ID NO: 1285606 - RNA, 19 nt, Artificial Sequence
  Description of Artificial Sequence: Synthetic oligonucleotide
cuaggagguccauguaggc

SEQ ID NO: 1285607 - RNA, 19 nt, Artificial Sequence
  Description of Artificial Sequence: Synthetic oligonucleotide
acuucguccgcggccaucg

SEQ ID NO: 1285608 - RNA, 19 nt, Artificial Sequence
  Description of Artificial Sequence: Synthetic oligonucleotide
cagcgcacacucaaguccc

SEQ ID NO: 1285609 - RNA, 19 nt, Artificial Sequence
  Description of Artificial Sequence: Synthetic oligonucleotide
uucguccgcggccaucggg

SEQ ID NO: 1285610 - RNA, 19 nt, Artificial Sequence
  Description of Artificial Sequence: Synthetic oligonucleotide
ugcaaccccagcagccggg

SEQ ID NO: 1285611 - RNA, 19 nt, Artificial Sequence
  Description of Artificial Sequence: Synthetic oligonucleotide
auauaaaggcgcagcuuuc

SEQ ID NO: 1285612 - RNA, 19 nt, Artificial Sequence
  Description of Artificial Sequence: Synthetic oligonucleotide
gcaggguuaaaaguauugg

SEQ ID NO: 1285613 - RNA, 19 nt, Artificial Sequence
  Description of Artificial Sequence: Synthetic oligonucleotide
cuggaucuuacaguagaag

SEQ ID NO: 1285614 - RNA, 19 nt, Artificial Sequence
  Description of Artificial Sequence: Synthetic oligonucleotide
uggagauauaaaggcgcag

SEQ ID NO: 1285615 - RNA, 19 nt, Artificial Sequence
  Description of Artificial Sequence: Synthetic oligonucleotide
ugugccacucaacgaggug

SEQ ID NO: 1285616 - RNA, 19 nt, Artificial Sequence
  Description of Artificial Sequence: Synthetic oligonucleotide
gucugauggguccacgcug

SEQ ID NO: 1285617 - RNA, 19 nt, Artificial Sequence
  Description of Artificial Sequence: Synthetic oligonucleotide
uuucgcaugaugguuugau

SEQ ID NO: 1285618 - RNA, 19 nt, Artificial Sequence
  Description of Artificial Sequence: Synthetic oligonucleotide
agcaucgggcuucgcaggg

SEQ ID NO: 1285619 - RNA, 19 nt, Artificial Sequence
  Description of Artificial Sequence: Synthetic oligonucleotide
guaugcaaccccagcagcc

SEQ ID NO: 1285620 - RNA, 19 nt, Artificial Sequence
  Description of Artificial Sequence: Synthetic oligonucleotide
agcaggguacagcgcacac

SEQ ID NO: 1285621 - RNA, 19 nt, Artificial Sequence
  Description of Artificial Sequence: Synthetic oligonucleotide
uggucugauggguccacgc

SEQ ID NO: 1285622 - RNA, 19 nt, Artificial Sequence
  Description of Artificial Sequence: Synthetic oligonucleotide
cuucgcaggguuaaaagua

SEQ ID NO: 1285623 - RNA, 19 nt, Artificial Sequence
  Description of Artificial Sequence: Synthetic oligonucleotide
acccgcuuucgcaugaugg

SEQ ID NO: 1285624 - RNA, 19 nt, Artificial Sequence
  Description of Artificial Sequence: Synthetic oligonucleotide
gguugucggggccauaaag

SEQ ID NO: 1285625 - RNA, 19 nt, Artificial Sequence
  Description of Artificial Sequence: Synthetic oligonucleotide
aggcugauaguccagcaua

SEQ ID NO: 1285626 - RNA, 19 nt, Artificial Sequence
  Description of Artificial Sequence: Synthetic oligonucleotide
uacucgagcggagugggga

SEQ ID NO: 1285627 - RNA, 19 nt, Artificial Sequence
  Description of Artificial Sequence: Synthetic oligonucleotide
uccggcaacuucguccgcg

SEQ ID NO: 1285628 - RNA, 19 nt, Artificial Sequence
  Description of Artificial Sequence: Synthetic oligonucleotide
cucacacuucuacucgagc

SEQ ID NO: 1285629 - RNA, 19 nt, Artificial Sequence
  Description of Artificial Sequence: Synthetic oligonucleotide
uugaggucucggcucugag

SEQ ID NO: 1285630 - RNA, 19 nt, Artificial Sequence
  Description of Artificial Sequence: Synthetic oligonucleotide
ucgaacgcuaggaggucca

SEQ ID NO: 1285631 - RNA, 19 nt, Artificial Sequence
  Description of Artificial Sequence: Synthetic oligonucleotide
cuccagacggcaucccggg

SEQ ID NO: 1285632 - RNA, 19 nt, Artificial Sequence
  Description of Artificial Sequence: Synthetic oligonucleotide
gcuaggagguccauguagg

SEQ ID NO: 1285633 - RNA, 19 nt, Artificial Sequence
  Description of Artificial Sequence: Synthetic oligonucleotide
cucgguggggcgauucggg

SEQ ID NO: 1285634 - RNA, 19 nt, Artificial Sequence
  Description of Artificial Sequence: Synthetic oligonucleotide
gaacuugcgcuucugcuua

SEQ ID NO: 1285635 - RNA, 19 nt, Artificial Sequence
  Description of Artificial Sequence: Synthetic oligonucleotide
acucucucucucuuccucu

SEQ ID NO: 1285636 - RNA, 19 nt, Artificial Sequence
  Description of Artificial Sequence: Synthetic oligonucleotide
cuucuacucgagcggagug

SEQ ID NO: 1285637 - RNA, 19 nt, Artificial Sequence
  Description of Artificial Sequence: Synthetic oligonucleotide
uucgcaugaugguuugauc

SEQ ID NO: 1285638 - RNA, 19 nt, Artificial Sequence
  Description of Artificial Sequence: Synthetic oligonucleotide
uucuucuggucugaugggu

SEQ ID NO: 1285639 - RNA, 19 nt, Artificial Sequence
  Description of Artificial Sequence: Synthetic oligonucleotide
agcucccgaauccuuugag

SEQ ID NO: 1285640 - RNA, 19 nt, Artificial Sequence
  Description of Artificial Sequence: Synthetic oligonucleotide
aagagaacuugcgcuucug

SEQ ID NO: 1285641 - RNA, 19 nt, Artificial Sequence
  Description of Artificial Sequence: Synthetic oligonucleotide
gagaacuugcgcuucugcu

SEQ ID NO: 1285642 - RNA, 19 nt, Artificial Sequence
  Description of Artificial Sequence: Synthetic oligonucleotide
ugucggggccauaaagguc

SEQ ID NO: 1285643 - RNA, 19 nt, Artificial Sequence
  Description of Artificial Sequence: Synthetic oligonucleotide
ucaaucggggacagucaaa

SEQ ID NO: 1285644 - RNA, 19 nt, Artificial Sequence
  Description of Artificial Sequence: Synthetic oligonucleotide
agucccucuggaucuugag

SEQ ID NO: 1285645 - RNA, 19 nt, Artificial Sequence
  Description of Artificial Sequence: Synthetic oligonucleotide
cacgaccagcgauugcucc

SEQ ID NO: 1285646 - RNA, 19 nt, Artificial Sequence
  Description of Artificial Sequence: Synthetic oligonucleotide
cugacggcuuccugggacc

SEQ ID NO: 1285647 - RNA, 19 nt, Artificial Sequence
  Description of Artificial Sequence: Synthetic oligonucleotide
guuaccagccacaucuguc

SEQ ID NO: 1285648 - RNA, 19 nt, Artificial Sequence
  Description of Artificial Sequence: Synthetic oligonucleotide
acaggagaaagcugcucau

SEQ ID NO: 1285649 - RNA, 19 nt, Artificial Sequence
  Description of Artificial Sequence: Synthetic oligonucleotide
caguguggcuggcuggucc

SEQ ID NO: 1285650 - RNA, 19 nt, Artificial Sequence
  Description of Artificial Sequence: Synthetic oligonucleotide
augaugguuugauccaguu

SEQ ID NO: 1285651 - RNA, 19 nt, Artificial Sequence
  Description of Artificial Sequence: Synthetic oligonucleotide
uguccacccgcuuucgcau

SEQ ID NO: 1285652 - RNA, 19 nt, Artificial Sequence
  Description of Artificial Sequence: Synthetic oligonucleotide
uaaaaguauuggagauaua

SEQ ID NO: 1285653 - RNA, 19 nt, Artificial Sequence
  Description of Artificial Sequence: Synthetic oligonucleotide
gauguccacccgcuuucgc

SEQ ID NO: 1285654 - RNA, 19 nt, Artificial Sequence
  Description of Artificial Sequence: Synthetic oligonucleotide
ggacguagccuuuuggguc

SEQ ID NO: 1285655 - RNA, 19 nt, Artificial Sequence
  Description of Artificial Sequence: Synthetic oligonucleotide
cuuugcgcgccccuccggc

SEQ ID NO: 1285656 - RNA, 19 nt, Artificial Sequence
  Description of Artificial Sequence: Synthetic oligonucleotide
aucgucucguggaucuuac

SEQ ID NO: 1285657 - RNA, 19 nt, Artificial Sequence
  Description of Artificial Sequence: Synthetic oligonucleotide
gcucccgaauccuuugagg

SEQ ID NO: 1285658 - RNA, 19 nt, Artificial Sequence
  Description of Artificial Sequence: Synthetic oligonucleotide
gaaguagcggcugacggcu

SEQ ID NO: 1285659 - RNA, 19 nt, Artificial Sequence
  Description of Artificial Sequence: Synthetic oligonucleotide
cuugcgcuucugcuuacug

SEQ ID NO: 1285660 - RNA, 19 nt, Artificial Sequence
  Description of Artificial Sequence: Synthetic oligonucleotide
gguuugauccaguuuccuc

SEQ ID NO: 1285661 - RNA, 19 nt, Artificial Sequence
  Description of Artificial Sequence: Synthetic oligonucleotide
ccucucgaacgcuaggagg

SEQ ID NO: 1285662 - RNA, 19 nt, Artificial Sequence
  Description of Artificial Sequence: Synthetic oligonucleotide
acgaccagcgauugcucca

SEQ ID NO: 1285663 - RNA, 19 nt, Artificial Sequence
  Description of Artificial Sequence: Synthetic oligonucleotide
ugggcuccuagguguugcg

SEQ ID NO: 1285664 - RNA, 19 nt, Artificial Sequence
  Description of Artificial Sequence: Synthetic oligonucleotide
ucgagcggaguggggaggg

SEQ ID NO: 1285665 - RNA, 19 nt, Artificial Sequence
  Description of Artificial Sequence: Synthetic oligonucleotide
ggcgauucgggcuccagac

SEQ ID NO: 1285666 - RNA, 19 nt, Artificial Sequence
  Description of Artificial Sequence: Synthetic oligonucleotide
gcggcugacggcuuccugg

SEQ ID NO: 1285667 - RNA, 19 nt, Artificial Sequence
  Description of Artificial Sequence: Synthetic oligonucleotide
uccucucacucucucucuc

SEQ ID NO: 1285668 - RNA, 19 nt, Artificial Sequence
  Description of Artificial Sequence: Synthetic oligonucleotide
cuucaaucggggacaguca

SEQ ID NO: 1285669 - RNA, 19 nt, Artificial Sequence
  Description of Artificial Sequence: Synthetic oligonucleotide
acuucuacucgagcggagu

SEQ ID NO: 1285670 - RNA, 19 nt, Artificial Sequence
  Description of Artificial Sequence: Synthetic oligonucleotide
gccuaugcuggacagugug

SEQ ID NO: 1285671 - RNA, 19 nt, Artificial Sequence
  Description of Artificial Sequence: Synthetic oligonucleotide
ggccauaaaggucuuuguc

SEQ ID NO: 1285672 - RNA, 19 nt, Artificial Sequence
  Description of Artificial Sequence: Synthetic oligonucleotide
ucucacucucucucucuuc

SEQ ID NO: 1285673 - RNA, 19 nt, Artificial Sequence
  Description of Artificial Sequence: Synthetic oligonucleotide
aacuucguccgcggccauc

SEQ ID NO: 1285674 - RNA, 19 nt, Artificial Sequence
  Description of Artificial Sequence: Synthetic oligonucleotide
gacguagccuuuugggucu

SEQ ID NO: 1285675 - RNA, 19 nt, Artificial Sequence
  Description of Artificial Sequence: Synthetic oligonucleotide
ggcaacuucguccgcggcc

SEQ ID NO: 1285676 - RNA, 19 nt, Artificial Sequence
  Description of Artificial Sequence: Synthetic oligonucleotide
caacgaggugguugucggg

SEQ ID NO: 1285677 - RNA, 19 nt, Artificial Sequence
  Description of Artificial Sequence: Synthetic oligonucleotide
cucgaacgcuaggaggucc

SEQ ID NO: 1285678 - RNA, 19 nt, Artificial Sequence
  Description of Artificial Sequence: Synthetic oligonucleotide
ucgguggggcgauucgggc

SEQ ID NO: 1285679 - RNA, 19 nt, Artificial Sequence
  Description of Artificial Sequence: Synthetic oligonucleotide
ucaggguuaccagccacau

SEQ ID NO: 1285680 - RNA, 19 nt, Artificial Sequence
  Description of Artificial Sequence: Synthetic oligonucleotide
ugguuugauccaguuuccu

SEQ ID NO: 1285681 - RNA, 19 nt, Artificial Sequence
  Description of Artificial Sequence: Synthetic oligonucleotide
cuucugcuuacugggauca

SEQ ID NO: 1285682 - RNA, 19 nt, Artificial Sequence
  Description of Artificial Sequence: Synthetic oligonucleotide
cacucucucucucuuccuc

SEQ ID NO: 1285683 - RNA, 19 nt, Artificial Sequence
  Description of Artificial Sequence: Synthetic oligonucleotide
auucaaugaccaaacucuu

SEQ ID NO: 1285684 - RNA, 19 nt, Artificial Sequence
  Description of Artificial Sequence: Synthetic oligonucleotide
ucacucucucucucuuccu

SEQ ID NO: 1285685 - RNA, 19 nt, Artificial Sequence
  Description of Artificial Sequence: Synthetic oligonucleotide
uccccuggccucuucacuu

SEQ ID NO: 1285686 - RNA, 19 nt, Artificial Sequence
  Description of Artificial Sequence: Synthetic oligonucleotide
caaucggggacagucaaaa

SEQ ID NO: 1285687 - RNA, 19 nt, Artificial Sequence
  Description of Artificial Sequence: Synthetic oligonucleotide
cccuccggcaacuucgucc

SEQ ID NO: 1285688 - RNA, 19 nt, Artificial Sequence
  Description of Artificial Sequence: Synthetic oligonucleotide
ccgguuugucuucacauac

SEQ ID NO: 1285689 - RNA, 19 nt, Artificial Sequence
  Description of Artificial Sequence: Synthetic oligonucleotide
cgauucgggcuccagacgg

SEQ ID NO: 1285690 - RNA, 19 nt, Artificial Sequence
  Description of Artificial Sequence: Synthetic oligonucleotide
gccuuuugggucucuggag

SEQ ID NO: 1285691 - RNA, 19 nt, Artificial Sequence
  Description of Artificial Sequence: Synthetic oligonucleotide
ggggccauaaaggucuuug

SEQ ID NO: 1285692 - RNA, 19 nt, Artificial Sequence
  Description of Artificial Sequence: Synthetic oligonucleotide
gaacgcuaggagguccaug

SEQ ID NO: 1285693 - RNA, 19 nt, Artificial Sequence
  Description of Artificial Sequence: Synthetic oligonucleotide
ggcaaugcugccaucagaa

SEQ ID NO: 1285694 - RNA, 19 nt, Artificial Sequence
  Description of Artificial Sequence: Synthetic oligonucleotide
gucggggccauaaaggucu

SEQ ID NO: 1285695 - RNA, 19 nt, Artificial Sequence
  Description of Artificial Sequence: Synthetic oligonucleotide
uuugcgcgccccuccggca

SEQ ID NO: 1285696 - RNA, 19 nt, Artificial Sequence
  Description of Artificial Sequence: Synthetic oligonucleotide
gcuuuucguggcuuugcgc

SEQ ID NO: 1285697 - RNA, 19 nt, Artificial Sequence
  Description of Artificial Sequence: Synthetic oligonucleotide
cuggggaaucucagagaac

SEQ ID NO: 1285698 - RNA, 19 nt, Artificial Sequence
  Description of Artificial Sequence: Synthetic oligonucleotide
cuuggcacugcggcucugc

SEQ ID NO: 1285699 - RNA, 19 nt, Artificial Sequence
  Description of Artificial Sequence: Synthetic oligonucleotide
acugcggcucugcggcggg

SEQ ID NO: 1285700 - RNA, 19 nt, Artificial Sequence
  Description of Artificial Sequence: Synthetic oligonucleotide
ugcgcacgaccagcgauug

SEQ ID NO: 1285701 - RNA, 19 nt, Artificial Sequence
  Description of Artificial Sequence: Synthetic oligonucleotide
agcggcucuggguaugcaa

SEQ ID NO: 1285702 - RNA, 19 nt, Artificial Sequence
  Description of Artificial Sequence: Synthetic oligonucleotide
gguguugcgcacgaccagc

SEQ ID NO: 1285703 - RNA, 19 nt, Artificial Sequence
  Description of Artificial Sequence: Synthetic oligonucleotide
gacuauggcggagcggcuc

SEQ ID NO: 1285704 - RNA, 19 nt, Artificial Sequence
  Description of Artificial Sequence: Synthetic oligonucleotide
gggccuaugcuggacagug

SEQ ID NO: 1285705 - RNA, 19 nt, Artificial Sequence
  Description of Artificial Sequence: Synthetic oligonucleotide
ggcuccagacggcaucccg

SEQ ID NO: 1285706 - RNA, 19 nt, Artificial Sequence
  Description of Artificial Sequence: Synthetic oligonucleotide
ccugugccacucaacgagg

SEQ ID NO: 1285707 - RNA, 19 nt, Artificial Sequence
  Description of Artificial Sequence: Synthetic oligonucleotide
gcugacggcuuccugggac

SEQ ID NO: 1285708 - RNA, 19 nt, Artificial Sequence
  Description of Artificial Sequence: Synthetic oligonucleotide
gguacagcgcacacucaag

SEQ ID NO: 1285709 - RNA, 19 nt, Artificial Sequence
  Description of Artificial Sequence: Synthetic oligonucleotide
aagucccucuggaucuuga

SEQ ID NO: 1285710 - RNA, 19 nt, Artificial Sequence
  Description of Artificial Sequence: Synthetic oligonucleotide
gcuuucgcaugaugguuug

SEQ ID NO: 1285711 - RNA, 19 nt, Artificial Sequence
  Description of Artificial Sequence: Synthetic oligonucleotide
cuccuagguguugcgcacg

SEQ ID NO: 1285712 - RNA, 19 nt, Artificial Sequence
  Description of Artificial Sequence: Synthetic oligonucleotide
caucaccuugaggucucgg

SEQ ID NO: 1285713 - RNA, 19 nt, Artificial Sequence
  Description of Artificial Sequence: Synthetic oligonucleotide
cacucaacgaggugguugu

SEQ ID NO: 1285714 - RNA, 19 nt, Artificial Sequence
  Description of Artificial Sequence: Synthetic oligonucleotide
ugaacuggggaggcugaua

SEQ ID NO: 1285715 - RNA, 19 nt, Artificial Sequence
  Description of Artificial Sequence: Synthetic oligonucleotide
cauguaggccugggacucg

SEQ ID NO: 1285716 - RNA, 19 nt, Artificial Sequence
  Description of Artificial Sequence: Synthetic oligonucleotide
ucgggcuucgcaggguuaa

SEQ ID NO: 1285717 - RNA, 19 nt, Artificial Sequence
  Description of Artificial Sequence: Synthetic oligonucleotide
ggcuccuagguguugcgca

SEQ ID NO: 1285718 - RNA, 19 nt, Artificial Sequence
  Description of Artificial Sequence: Synthetic oligonucleotide
ugguugucggggccauaaa

SEQ ID NO: 1285719 - RNA, 19 nt, Artificial Sequence
  Description of Artificial Sequence: Synthetic oligonucleotide
cuggcucgugcccgggcgg

SEQ ID NO: 1285720 - RNA, 19 nt, Artificial Sequence
  Description of Artificial Sequence: Synthetic oligonucleotide
gcgauucgggcuccagacg

SEQ ID NO: 1285721 - RNA, 19 nt, Artificial Sequence
  Description of Artificial Sequence: Synthetic oligonucleotide
auucgggcuccagacggca

SEQ ID NO: 1285722 - RNA, 19 nt, Artificial Sequence
  Description of Artificial Sequence: Synthetic oligonucleotide
guccugugccacucaacga

SEQ ID NO: 1285723 - RNA, 19 nt, Artificial Sequence
  Description of Artificial Sequence: Synthetic oligonucleotide
gaggcugauaguccagcau

SEQ ID NO: 1285724 - RNA, 19 nt, Artificial Sequence
  Description of Artificial Sequence: Synthetic oligonucleotide
ugccccuucaguggcuccu

SEQ ID NO: 1285725 - RNA, 19 nt, Artificial Sequence
  Description of Artificial Sequence: Synthetic oligonucleotide
gguggggcgauucgggcuc

SEQ ID NO: 1285726 - RNA, 19 nt, Artificial Sequence
  Description of Artificial Sequence: Synthetic oligonucleotide
cacccauggaccagaaacu

SEQ ID NO: 1285727 - RNA, 19 nt, Artificial Sequence
  Description of Artificial Sequence: Synthetic oligonucleotide
ugacggcuuccugggacca

SEQ ID NO: 1285728 - RNA, 19 nt, Artificial Sequence
  Description of Artificial Sequence: Synthetic oligonucleotide
gagagcggagcaggucuug

SEQ ID NO: 1285729 - RNA, 19 nt, Artificial Sequence
  Description of Artificial Sequence: Synthetic oligonucleotide
uggguguccugugccacuc

SEQ ID NO: 1285730 - RNA, 19 nt, Artificial Sequence
  Description of Artificial Sequence: Synthetic oligonucleotide
uggcucgugcccgggcggg

SEQ ID NO: 1285731 - RNA, 19 nt, Artificial Sequence
  Description of Artificial Sequence: Synthetic oligonucleotide
cacucaaguccccuggccu

SEQ ID NO: 1285732 - RNA, 19 nt, Artificial Sequence
  Description of Artificial Sequence: Synthetic oligonucleotide
guugcgcacgaccagcgau

SEQ ID NO: 1285733 - RNA, 19 nt, Artificial Sequence
  Description of Artificial Sequence: Synthetic oligonucleotide
ggcuuugcgcgccccuccg

SEQ ID NO: 1285734 - RNA, 19 nt, Artificial Sequence
  Description of Artificial Sequence: Synthetic oligonucleotide
aguuuccucucgaacgcua

SEQ ID NO: 1285735 - RNA, 19 nt, Artificial Sequence
  Description of Artificial Sequence: Synthetic oligonucleotide
agcggcugacggcuuccug

SEQ ID NO: 1285736 - RNA, 19 nt, Artificial Sequence
  Description of Artificial Sequence: Synthetic oligonucleotide
cugggcucucucacacuuc

SEQ ID NO: 1285737 - RNA, 19 nt, Artificial Sequence
  Description of Artificial Sequence: Synthetic oligonucleotide
caugaugguuugauccagu

SEQ ID NO: 1285738 - RNA, 19 nt, Artificial Sequence
  Description of Artificial Sequence: Synthetic oligonucleotide
uucgggcuccagacggcau

SEQ ID NO: 1285739 - RNA, 19 nt, Artificial Sequence
  Description of Artificial Sequence: Synthetic oligonucleotide
gcuccuagguguugcgcac

SEQ ID NO: 1285740 - RNA, 19 nt, Artificial Sequence
  Description of Artificial Sequence: Synthetic oligonucleotide
gcaacuucguccgcggcca

SEQ ID NO: 1285741 - RNA, 19 nt, Artificial Sequence
  Description of Artificial Sequence: Synthetic oligonucleotide
ccacagugaugcuuguuca

SEQ ID NO: 1285742 - RNA, 19 nt, Artificial Sequence
  Description of Artificial Sequence: Synthetic oligonucleotide
caggguuaccagccacauc

SEQ ID NO: 1285743 - RNA, 19 nt, Artificial Sequence
  Description of Artificial Sequence: Synthetic oligonucleotide
ccuugucaugggaauccug

SEQ ID NO: 1285744 - RNA, 19 nt, Artificial Sequence
  Description of Artificial Sequence: Synthetic oligonucleotide
cacccgcuuucgcaugaug

SEQ ID NO: 1285745 - RNA, 19 nt, Artificial Sequence
  Description of Artificial Sequence: Synthetic oligonucleotide
agacggcaucccggggcgc

SEQ ID NO: 1285746 - RNA, 19 nt, Artificial Sequence
  Description of Artificial Sequence: Synthetic oligonucleotide
cuucguccgcggccaucgg

SEQ ID NO: 1285747 - RNA, 19 nt, Artificial Sequence
  Description of Artificial Sequence: Synthetic oligonucleotide
ccgaauccuuugagggagg

SEQ ID NO: 1285748 - RNA, 19 nt, Artificial Sequence
  Description of Artificial Sequence: Synthetic oligonucleotide
ccggcaacuucguccgcgg

SEQ ID NO: 1285749 - RNA, 19 nt, Artificial Sequence
  Description of Artificial Sequence: Synthetic oligonucleotide
cugcagccgguuugucuuc

SEQ ID NO: 1285750 - RNA, 19 nt, Artificial Sequence
  Description of Artificial Sequence: Synthetic oligonucleotide
cucgugcccgggcggggcc

SEQ ID NO: 1285751 - RNA, 19 nt, Artificial Sequence
  Description of Artificial Sequence: Synthetic oligonucleotide
gcuuugcgcgccccuccgg

SEQ ID NO: 1285752 - RNA, 19 nt, Artificial Sequence
  Description of Artificial Sequence: Synthetic oligonucleotide
ggcugauaguccagcauaa

SEQ ID NO: 1285753 - RNA, 19 nt, Artificial Sequence
  Description of Artificial Sequence: Synthetic oligonucleotide
ugcgcgccccuccggcaac

SEQ ID NO: 1285754 - RNA, 19 nt, Artificial Sequence
  Description of Artificial Sequence: Synthetic oligonucleotide
gguuaccagccacaucugu

SEQ ID NO: 1285755 - RNA, 19 nt, Artificial Sequence
  Description of Artificial Sequence: Synthetic oligonucleotide
ggucugauggguccacgcu

SEQ ID NO: 1285756 - RNA, 19 nt, Artificial Sequence
  Description of Artificial Sequence: Synthetic oligonucleotide
acguagccuuuugggucuc

SEQ ID NO: 1285757 - RNA, 19 nt, Artificial Sequence
  Description of Artificial Sequence: Synthetic oligonucleotide
acgcuaggagguccaugua

SEQ ID NO: 1285758 - RNA, 19 nt, Artificial Sequence
  Description of Artificial Sequence: Synthetic oligonucleotide
ggcgcuggggaaucucaga

SEQ ID NO: 1285759 - RNA, 19 nt, Artificial Sequence
  Description of Artificial Sequence: Synthetic oligonucleotide
uggcuggcucgugcccggg

SEQ ID NO: 1285760 - RNA, 19 nt, Artificial Sequence
  Description of Artificial Sequence: Synthetic oligonucleotide
cuuucgcaugaugguuuga

SEQ ID NO: 1285761 - RNA, 19 nt, Artificial Sequence
  Description of Artificial Sequence: Synthetic oligonucleotide
ucguggcuuugcgcgcccc

SEQ ID NO: 1285762 - RNA, 19 nt, Artificial Sequence
  Description of Artificial Sequence: Synthetic oligonucleotide
cagcucccgaauccuuuga

SEQ ID NO: 1285763 - RNA, 19 nt, Artificial Sequence
  Description of Artificial Sequence: Synthetic oligonucleotide
ggaacccaucugucuccug

SEQ ID NO: 1285764 - RNA, 19 nt, Artificial Sequence
  Description of Artificial Sequence: Synthetic oligonucleotide
gcggccaucgggugggcuc

SEQ ID NO: 1285765 - RNA, 19 nt, Artificial Sequence
  Description of Artificial Sequence: Synthetic oligonucleotide
ccucgguggggcgauucgg

SEQ ID NO: 1285766 - RNA, 19 nt, Artificial Sequence
  Description of Artificial Sequence: Synthetic oligonucleotide
gccgguuugucuucacaua

SEQ ID NO: 1285767 - RNA, 19 nt, Artificial Sequence
  Description of Artificial Sequence: Synthetic oligonucleotide
ucggggccauaaaggucuu

SEQ ID NO: 1285768 - RNA, 19 nt, Artificial Sequence
  Description of Artificial Sequence: Synthetic oligonucleotide
ggcaucccggggcgcaccc

SEQ ID NO: 1285769 - RNA, 19 nt, Artificial Sequence
  Description of Artificial Sequence: Synthetic oligonucleotide
aggguacagcgcacacuca

SEQ ID NO: 1285770 - RNA, 19 nt, Artificial Sequence
  Description of Artificial Sequence: Synthetic oligonucleotide
cacccgcagcucccaggag

SEQ ID NO: 1285771 - RNA, 19 nt, Artificial Sequence
  Description of Artificial Sequence: Synthetic oligonucleotide
cccucgguggggcgauucg

SEQ ID NO: 1285772 - RNA, 19 nt, Artificial Sequence
  Description of Artificial Sequence: Synthetic oligonucleotide
cgcacacucaaguccccug

SEQ ID NO: 1285773 - RNA, 19 nt, Artificial Sequence
  Description of Artificial Sequence: Synthetic oligonucleotide
cuccggcaacuucguccgc

SEQ ID NO: 1285774 - RNA, 19 nt, Artificial Sequence
  Description of Artificial Sequence: Synthetic oligonucleotide
aaguagcggcugacggcuu

SEQ ID NO: 1285775 - RNA, 19 nt, Artificial Sequence
  Description of Artificial Sequence: Synthetic oligonucleotide
gggcuccuagguguugcgc

SEQ ID NO: 1285776 - RNA, 19 nt, Artificial Sequence
  Description of Artificial Sequence: Synthetic oligonucleotide
gcacugcggcucugcggcg

SEQ ID NO: 1285777 - RNA, 19 nt, Artificial Sequence
  Description of Artificial Sequence: Synthetic oligonucleotide
ggcgcagcuuucgcuuuug

SEQ ID NO: 1285778 - RNA, 19 nt, Artificial Sequence
  Description of Artificial Sequence: Synthetic oligonucleotide
cucucacucucucucucuu

SEQ ID NO: 1285779 - RNA, 19 nt, Artificial Sequence
  Description of Artificial Sequence: Synthetic oligonucleotide
agcuuccccuccacccgca

SEQ ID NO: 1285780 - RNA, 19 nt, Artificial Sequence
  Description of Artificial Sequence: Synthetic oligonucleotide
cucucucucucuuccucuu

SEQ ID NO: 1285781 - RNA, 19 nt, Artificial Sequence
  Description of Artificial Sequence: Synthetic oligonucleotide
ggcgcacccauggaccaga

SEQ ID NO: 1285782 - RNA, 19 nt, Artificial Sequence
  Description of Artificial Sequence: Synthetic oligonucleotide
guggggcgauucgggcucc

SEQ ID NO: 1285783 - RNA, 19 nt, Artificial Sequence
  Description of Artificial Sequence: Synthetic oligonucleotide
cgaccagcgauugcuccag

SEQ ID NO: 1285784 - RNA, 19 nt, Artificial Sequence
  Description of Artificial Sequence: Synthetic oligonucleotide
uggggcgauucgggcucca

SEQ ID NO: 1285785 - RNA, 19 nt, Artificial Sequence
  Description of Artificial Sequence: Synthetic oligonucleotide
caucgggcuucgcaggguu

SEQ ID NO: 1285786 - RNA, 19 nt, Artificial Sequence
  Description of Artificial Sequence: Synthetic oligonucleotide
cccgcuuucgcaugauggu

SEQ ID NO: 1285787 - RNA, 19 nt, Artificial Sequence
  Description of Artificial Sequence: Synthetic oligonucleotide
gcgcacgaccagcgauugc

SEQ ID NO: 1285788 - RNA, 19 nt, Artificial Sequence
  Description of Artificial Sequence: Synthetic oligonucleotide
ggaccagcucccgaauccu

SEQ ID NO: 1285789 - RNA, 19 nt, Artificial Sequence
  Description of Artificial Sequence: Synthetic oligonucleotide
ggcucgugcccgggcgggg

SEQ ID NO: 1285790 - RNA, 19 nt, Artificial Sequence
  Description of Artificial Sequence: Synthetic oligonucleotide
gggaccagggcugguggua

SEQ ID NO: 1285791 - RNA, 19 nt, Artificial Sequence
  Description of Artificial Sequence: Synthetic oligonucleotide
gcucgugcccgggcggggc

SEQ ID NO: 1285792 - RNA, 19 nt, Artificial Sequence
  Description of Artificial Sequence: Synthetic oligonucleotide
gggcgcacccauggaccag

SEQ ID NO: 1285793 - RNA, 19 nt, Artificial Sequence
  Description of Artificial Sequence: Synthetic oligonucleotide
gcaggguacagcgcacacu

SEQ ID NO: 1285794 - RNA, 19 nt, Artificial Sequence
  Description of Artificial Sequence: Synthetic oligonucleotide
cgcacgaccagcgauugcu

SEQ ID NO: 1285795 - RNA, 19 nt, Artificial Sequence
  Description of Artificial Sequence: Synthetic oligonucleotide
ccucucacucucucucucu

SEQ ID NO: 1285796 - RNA, 19 nt, Artificial Sequence
  Description of Artificial Sequence: Synthetic oligonucleotide
gcgcuucugcuuacuggga

SEQ ID NO: 1285797 - RNA, 19 nt, Artificial Sequence
  Description of Artificial Sequence: Synthetic oligonucleotide
cggcaacuucguccgcggc

SEQ ID NO: 1285798 - RNA, 19 nt, Artificial Sequence
  Description of Artificial Sequence: Synthetic oligonucleotide
caaccccagcagccgggcu

SEQ ID NO: 1285799 - RNA, 19 nt, Artificial Sequence
  Description of Artificial Sequence: Synthetic oligonucleotide
gcgccccuccggcaacuuc

SEQ ID NO: 1285800 - RNA, 19 nt, Artificial Sequence
  Description of Artificial Sequence: Synthetic oligonucleotide
cguccgcggccaucgggug

SEQ ID NO: 1285801 - RNA, 19 nt, Artificial Sequence
  Description of Artificial Sequence: Synthetic oligonucleotide
cgcuuucgcaugaugguuu

SEQ ID NO: 1285802 - RNA, 19 nt, Artificial Sequence
  Description of Artificial Sequence: Synthetic oligonucleotide
ccccucgguggggcgauuc

SEQ ID NO: 1285803 - RNA, 19 nt, Artificial Sequence
  Description of Artificial Sequence: Synthetic oligonucleotide
ggacuauggcggagcggcu

SEQ ID NO: 1285804 - RNA, 19 nt, Artificial Sequence
  Description of Artificial Sequence: Synthetic oligonucleotide
cggagcggcucuggguaug

SEQ ID NO: 1285805 - RNA, 19 nt, Artificial Sequence
  Description of Artificial Sequence: Synthetic oligonucleotide
gcaucgggcuucgcagggu

SEQ ID NO: 1285806 - RNA, 19 nt, Artificial Sequence
  Description of Artificial Sequence: Synthetic oligonucleotide
ccccuccggcaacuucguc

SEQ ID NO: 1285807 - RNA, 19 nt, Artificial Sequence
  Description of Artificial Sequence: Synthetic oligonucleotide
caacuucguccgcggccau

SEQ ID NO: 1285808 - RNA, 19 nt, Artificial Sequence
  Description of Artificial Sequence: Synthetic oligonucleotide
gcaucccggggcgcaccca

SEQ ID NO: 1285809 - RNA, 19 nt, Artificial Sequence
  Description of Artificial Sequence: Synthetic oligonucleotide
cgguggggcgauucgggcu

SEQ ID NO: 1285810 - RNA, 19 nt, Artificial Sequence
  Description of Artificial Sequence: Synthetic oligonucleotide
gcggagcggcucuggguau

SEQ ID NO: 1285811 - RNA, 19 nt, Artificial Sequence
  Description of Artificial Sequence: Synthetic oligonucleotide
ccgcuuucgcaugaugguu

SEQ ID NO: 1285812 - RNA, 19 nt, Artificial Sequence
  Description of Artificial Sequence: Synthetic oligonucleotide
cccggggcgcacccaugga

SEQ ID NO: 1285813 - RNA, 19 nt, Artificial Sequence
  Description of Artificial Sequence: Synthetic oligonucleotide
gcgcacccauggaccagaa

SEQ ID NO: 1285814 - RNA, 19 nt, Artificial Sequence
  Description of Artificial Sequence: Synthetic oligonucleotide
cgcacccauggaccagaaa

SEQ ID NO: 1285815 - RNA, 19 nt, Artificial Sequence
  Description of Artificial Sequence: Synthetic oligonucleotide
gccccuccggcaacuucgu

SEQ ID NO: 1285816 - RNA, 19 nt, Artificial Sequence
  Description of Artificial Sequence: Synthetic oligonucleotide
ccgcggccaucgggugggc

SEQ ID NO: 1285817 - RNA, 19 nt, Artificial Sequence
  Description of Artificial Sequence: Synthetic oligonucleotide
cggggaccagcucccgaau

SEQ ID NO: 1285818 - RNA, 19 nt, Artificial Sequence
  Description of Artificial Sequence: Synthetic oligonucleotide
cgaacgcuaggagguccau

SEQ ID NO: 1285819 - RNA, 19 nt, Artificial Sequence
  Description of Artificial Sequence: Synthetic oligonucleotide
cguagccuuuugggucucu

SEQ ID NO: 1285820 - RNA, 19 nt, Artificial Sequence
  Description of Artificial Sequence: Synthetic oligonucleotide
ccacccgcuuucgcaugau

SEQ ID NO: 1285821 - RNA, 19 nt, Artificial Sequence
  Description of Artificial Sequence: Synthetic oligonucleotide
cgcggccaucgggugggcu

SEQ ID NO: 1285822 - RNA, 19 nt, Artificial Sequence
  Description of Artificial Sequence: Synthetic oligonucleotide
cgcgccccuccggcaacuu

SEQ ID NO: 1285823 - RNA, 19 nt, Artificial Sequence
  Description of Artificial Sequence: Synthetic oligonucleotide
auauauauauauuaaauuc

SEQ ID NO: 1285824 - RNA, 19 nt, Artificial Sequence
  Description of Artificial Sequence: Synthetic oligonucleotide
acaauaaucaaguaaauuc

SEQ ID NO: 1285825 - RNA, 19 nt, Artificial Sequence
  Description of Artificial Sequence: Synthetic oligonucleotide
uuuauuauugaucacgggg

SEQ ID NO: 1285826 - RNA, 19 nt, Artificial Sequence
  Description of Artificial Sequence: Synthetic oligonucleotide
aaaacaaauauauauauau

SEQ ID NO: 1285827 - RNA, 19 nt, Artificial Sequence
  Description of Artificial Sequence: Synthetic oligonucleotide
aacaaauauauauauauau

SEQ ID NO: 1285828 - RNA, 19 nt, Artificial Sequence
  Description of Artificial Sequence: Synthetic oligonucleotide
uuauaauugggguucaccg

SEQ ID NO: 1285829 - RNA, 19 nt, Artificial Sequence
  Description of Artificial Sequence: Synthetic oligonucleotide
aauucacccaaacuagacc

SEQ ID NO: 1285830 - RNA, 19 nt, Artificial Sequence
  Description of Artificial Sequence: Synthetic oligonucleotide
aauauauauauauauuaaa

SEQ ID NO: 1285831 - RNA, 19 nt, Artificial Sequence
  Description of Artificial Sequence: Synthetic oligonucleotide
uuauuauugaucacggggc

SEQ ID NO: 1285832 - RNA, 19 nt, Artificial Sequence
  Description of Artificial Sequence: Synthetic oligonucleotide
ugaaauucacccaaacuag

SEQ ID NO: 1285833 - RNA, 19 nt, Artificial Sequence
  Description of Artificial Sequence: Synthetic oligonucleotide
aaugcaaagggccuaagga

SEQ ID NO: 1285834 - RNA, 19 nt, Artificial Sequence
  Description of Artificial Sequence: Synthetic oligonucleotide
uauauauauauauuaaauu

SEQ ID NO: 1285835 - RNA, 19 nt, Artificial Sequence
  Description of Artificial Sequence: Synthetic oligonucleotide
acugguuuauuauugauca

SEQ ID NO: 1285836 - RNA, 19 nt, Artificial Sequence
  Description of Artificial Sequence: Synthetic oligonucleotide
uuuguucuccuuaaaauga

SEQ ID NO: 1285837 - RNA, 19 nt, Artificial Sequence
  Description of Artificial Sequence: Synthetic oligonucleotide
aaucccgauucccuggucc

SEQ ID NO: 1285838 - RNA, 19 nt, Artificial Sequence
  Description of Artificial Sequence: Synthetic oligonucleotide
aauaagagucaauuugugu

SEQ ID NO: 1285839 - RNA, 19 nt, Artificial Sequence
  Description of Artificial Sequence: Synthetic oligonucleotide
uauacugacgcucagggua

SEQ ID NO: 1285840 - RNA, 19 nt, Artificial Sequence
  Description of Artificial Sequence: Synthetic oligonucleotide
uuugcgaauauucuucgca

SEQ ID NO: 1285841 - RNA, 19 nt, Artificial Sequence
  Description of Artificial Sequence: Synthetic oligonucleotide
uggaggaaauuucggaucg

SEQ ID NO: 1285842 - RNA, 19 nt, Artificial Sequence
  Description of Artificial Sequence: Synthetic oligonucleotide
acaaaagaacuucauagcu

SEQ ID NO: 1285843 - RNA, 19 nt, Artificial Sequence
  Description of Artificial Sequence: Synthetic oligonucleotide
uucggaucgauguaguuag

SEQ ID NO: 1285844 - RNA, 19 nt, Artificial Sequence
  Description of Artificial Sequence: Synthetic oligonucleotide
gaucgauguaguuagaguc

SEQ ID NO: 1285845 - RNA, 19 nt, Artificial Sequence
  Description of Artificial Sequence: Synthetic oligonucleotide
gucaauuugugugugaggg

SEQ ID NO: 1285846 - RNA, 19 nt, Artificial Sequence
  Description of Artificial Sequence: Synthetic oligonucleotide
aaauauauauauauauuaa

SEQ ID NO: 1285847 - RNA, 19 nt, Artificial Sequence
  Description of Artificial Sequence: Synthetic oligonucleotide
cuuuguucuccuuaaaaug

SEQ ID NO: 1285848 - RNA, 19 nt, Artificial Sequence
  Description of Artificial Sequence: Synthetic oligonucleotide
caaauauauauauauauua

SEQ ID NO: 1285849 - RNA, 19 nt, Artificial Sequence
  Description of Artificial Sequence: Synthetic oligonucleotide
aaauuucggaucgauguag

SEQ ID NO: 1285850 - RNA, 19 nt, Artificial Sequence
  Description of Artificial Sequence: Synthetic oligonucleotide
auauauauauauauuaaau

SEQ ID NO: 1285851 - RNA, 19 nt, Artificial Sequence
  Description of Artificial Sequence: Synthetic oligonucleotide
augcauuuagcuuugucug

SEQ ID NO: 1285852 - RNA, 19 nt, Artificial Sequence
  Description of Artificial Sequence: Synthetic oligonucleotide
uuuucaaugcaaagggccu

SEQ ID NO: 1285853 - RNA, 19 nt, Artificial Sequence
  Description of Artificial Sequence: Synthetic oligonucleotide
ucuuucucuaauuccagga

SEQ ID NO: 1285854 - RNA, 19 nt, Artificial Sequence
  Description of Artificial Sequence: Synthetic oligonucleotide
gaugcuggaaucccgauuc

SEQ ID NO: 1285855 - RNA, 19 nt, Artificial Sequence
  Description of Artificial Sequence: Synthetic oligonucleotide
uauaaccugguaauguccu

SEQ ID NO: 1285856 - RNA, 19 nt, Artificial Sequence
  Description of Artificial Sequence: Synthetic oligonucleotide
aaacccagcagguaccaug

SEQ ID NO: 1285857 - RNA, 19 nt, Artificial Sequence
  Description of Artificial Sequence: Synthetic oligonucleotide
cacuaaaauucuuuauugc

SEQ ID NO: 1285858 - RNA, 19 nt, Artificial Sequence
  Description of Artificial Sequence: Synthetic oligonucleotide
uguuuugucuguuuggaau

SEQ ID NO: 1285859 - RNA, 19 nt, Artificial Sequence
  Description of Artificial Sequence: Synthetic oligonucleotide
cuguuuggaauugacaagg

SEQ ID NO: 1285860 - RNA, 19 nt, Artificial Sequence
  Description of Artificial Sequence: Synthetic oligonucleotide
uucucuaauuccaggaccu

SEQ ID NO: 1285861 - RNA, 19 nt, Artificial Sequence
  Description of Artificial Sequence: Synthetic oligonucleotide
uaagagucaauuugugugu

SEQ ID NO: 1285862 - RNA, 19 nt, Artificial Sequence
  Description of Artificial Sequence: Synthetic oligonucleotide
uauuauugaucacggggca

SEQ ID NO: 1285863 - RNA, 19 nt, Artificial Sequence
  Description of Artificial Sequence: Synthetic oligonucleotide
uguuuggaauugacaaggg

SEQ ID NO: 1285864 - RNA, 19 nt, Artificial Sequence
  Description of Artificial Sequence: Synthetic oligonucleotide
guaaguuauguuuuauaac

SEQ ID NO: 1285865 - RNA, 19 nt, Artificial Sequence
  Description of Artificial Sequence: Synthetic oligonucleotide
ucuaauuccaggaccugcu

SEQ ID NO: 1285866 - RNA, 19 nt, Artificial Sequence
  Description of Artificial Sequence: Synthetic oligonucleotide
caaacuagaccaucgcacc

SEQ ID NO: 1285867 - RNA, 19 nt, Artificial Sequence
  Description of Artificial Sequence: Synthetic oligonucleotide
ucuaccuauagacugccuc

SEQ ID NO: 1285868 - RNA, 19 nt, Artificial Sequence
  Description of Artificial Sequence: Synthetic oligonucleotide
uagacuaugggcugcuugc

SEQ ID NO: 1285869 - RNA, 19 nt, Artificial Sequence
  Description of Artificial Sequence: Synthetic oligonucleotide
gauguagcuauuuugcgaa

SEQ ID NO: 1285870 - RNA, 19 nt, Artificial Sequence
  Description of Artificial Sequence: Synthetic oligonucleotide
ucgcauggaggaaauuucg

SEQ ID NO: 1285871 - RNA, 19 nt, Artificial Sequence
  Description of Artificial Sequence: Synthetic oligonucleotide
ggagcaucuaccuauagac

SEQ ID NO: 1285872 - RNA, 19 nt, Artificial Sequence
  Description of Artificial Sequence: Synthetic oligonucleotide
uaauauuccggacuguguu

SEQ ID NO: 1285873 - RNA, 19 nt, Artificial Sequence
  Description of Artificial Sequence: Synthetic oligonucleotide
uccagaugcauuuagcuuu

SEQ ID NO: 1285874 - RNA, 19 nt, Artificial Sequence
  Description of Artificial Sequence: Synthetic oligonucleotide
gagugggcgaucucgaucc

SEQ ID NO: 1285875 - RNA, 19 nt, Artificial Sequence
  Description of Artificial Sequence: Synthetic oligonucleotide
ugguaauguccucugcccg

SEQ ID NO: 1285876 - RNA, 19 nt, Artificial Sequence
  Description of Artificial Sequence: Synthetic oligonucleotide
ucaacacuaaaauucuuua

SEQ ID NO: 1285877 - RNA, 19 nt, Artificial Sequence
  Description of Artificial Sequence: Synthetic oligonucleotide
gauaacaccacaugcuuaa

SEQ ID NO: 1285878 - RNA, 19 nt, Artificial Sequence
  Description of Artificial Sequence: Synthetic oligonucleotide
caugcuaagauaacaccac

SEQ ID NO: 1285879 - RNA, 19 nt, Artificial Sequence
  Description of Artificial Sequence: Synthetic oligonucleotide
uguaguuagaguccaucaa

SEQ ID NO: 1285880 - RNA, 19 nt, Artificial Sequence
  Description of Artificial Sequence: Synthetic oligonucleotide
uugaucacggggcauuuca

SEQ ID NO: 1285881 - RNA, 19 nt, Artificial Sequence
  Description of Artificial Sequence: Synthetic oligonucleotide
uccuuaaaaugacuucccc

SEQ ID NO: 1285882 - RNA, 19 nt, Artificial Sequence
  Description of Artificial Sequence: Synthetic oligonucleotide
ggcuucuuaacagugaagg

SEQ ID NO: 1285883 - RNA, 19 nt, Artificial Sequence
  Description of Artificial Sequence: Synthetic oligonucleotide
uaaugaaacucuuucucua

SEQ ID NO: 1285884 - RNA, 19 nt, Artificial Sequence
  Description of Artificial Sequence: Synthetic oligonucleotide
gcuauacugacgcucaggg

SEQ ID NO: 1285885 - RNA, 19 nt, Artificial Sequence
  Description of Artificial Sequence: Synthetic oligonucleotide
ggugcagcuauacugacgc

SEQ ID NO: 1285886 - RNA, 19 nt, Artificial Sequence
  Description of Artificial Sequence: Synthetic oligonucleotide
uuagcuuugucugcugucc

SEQ ID NO: 1285887 - RNA, 19 nt, Artificial Sequence
  Description of Artificial Sequence: Synthetic oligonucleotide
agucggugguccuucuucc

SEQ ID NO: 1285888 - RNA, 19 nt, Artificial Sequence
  Description of Artificial Sequence: Synthetic oligonucleotide
aaacuagaccaucgcaccu

SEQ ID NO: 1285889 - RNA, 19 nt, Artificial Sequence
  Description of Artificial Sequence: Synthetic oligonucleotide
agucaauuugugugugagg

SEQ ID NO: 1285890 - RNA, 19 nt, Artificial Sequence
  Description of Artificial Sequence: Synthetic oligonucleotide
uaguuagaguccaucaaau

SEQ ID NO: 1285891 - RNA, 19 nt, Artificial Sequence
  Description of Artificial Sequence: Synthetic oligonucleotide
agggguguaaguuauguuu

SEQ ID NO: 1285892 - RNA, 19 nt, Artificial Sequence
  Description of Artificial Sequence: Synthetic oligonucleotide
uagaccaucgcaccuugca

SEQ ID NO: 1285893 - RNA, 19 nt, Artificial Sequence
  Description of Artificial Sequence: Synthetic oligonucleotide
aaacaaauauauauauaua

SEQ ID NO: 1285894 - RNA, 19 nt, Artificial Sequence
  Description of Artificial Sequence: Synthetic oligonucleotide
aaagggccuaaggaaagag

SEQ ID NO: 1285895 - RNA, 19 nt, Artificial Sequence
  Description of Artificial Sequence: Synthetic oligonucleotide
guuauaauugggguucacc

SEQ ID NO: 1285896 - RNA, 19 nt, Artificial Sequence
  Description of Artificial Sequence: Synthetic oligonucleotide
acccaaacuagaccaucgc

SEQ ID NO: 1285897 - RNA, 19 nt, Artificial Sequence
  Description of Artificial Sequence: Synthetic oligonucleotide
ugacgcucaggguagcuag

SEQ ID NO: 1285898 - RNA, 19 nt, Artificial Sequence
  Description of Artificial Sequence: Synthetic oligonucleotide
gagucaauuugugugugag

SEQ ID NO: 1285899 - RNA, 19 nt, Artificial Sequence
  Description of Artificial Sequence: Synthetic oligonucleotide
ugcauuuagcuuugucugc

SEQ ID NO: 1285900 - RNA, 19 nt, Artificial Sequence
  Description of Artificial Sequence: Synthetic oligonucleotide
uucgcauggaggaaauuuc

SEQ ID NO: 1285901 - RNA, 19 nt, Artificial Sequence
  Description of Artificial Sequence: Synthetic oligonucleotide
uggaaucccgauucccugg

SEQ ID NO: 1285902 - RNA, 19 nt, Artificial Sequence
  Description of Artificial Sequence: Synthetic oligonucleotide
ugcuaagauaacaccacau

SEQ ID NO: 1285903 - RNA, 19 nt, Artificial Sequence
  Description of Artificial Sequence: Synthetic oligonucleotide
ucucgauccuucuccuucg

SEQ ID NO: 1285904 - RNA, 19 nt, Artificial Sequence
  Description of Artificial Sequence: Synthetic oligonucleotide
uuguucuccuuaaaaugac

SEQ ID NO: 1285905 - RNA, 19 nt, Artificial Sequence
  Description of Artificial Sequence: Synthetic oligonucleotide
ucaaguaaauucaguccaa

SEQ ID NO: 1285906 - RNA, 19 nt, Artificial Sequence
  Description of Artificial Sequence: Synthetic oligonucleotide
uguucuccuuaaaaugacu

SEQ ID NO: 1285907 - RNA, 19 nt, Artificial Sequence
  Description of Artificial Sequence: Synthetic oligonucleotide
acuucauagcuuuguucuc

SEQ ID NO: 1285908 - RNA, 19 nt, Artificial Sequence
  Description of Artificial Sequence: Synthetic oligonucleotide
cuccuuaaaaugacuuccc

SEQ ID NO: 1285909 - RNA, 19 nt, Artificial Sequence
  Description of Artificial Sequence: Synthetic oligonucleotide
acaaauauauauauauauu

SEQ ID NO: 1285910 - RNA, 19 nt, Artificial Sequence
  Description of Artificial Sequence: Synthetic oligonucleotide
guagcuagggcgcggaggc

SEQ ID NO: 1285911 - RNA, 19 nt, Artificial Sequence
  Description of Artificial Sequence: Synthetic oligonucleotide
gcgaauauucuucgcaugg

SEQ ID NO: 1285912 - RNA, 19 nt, Artificial Sequence
  Description of Artificial Sequence: Synthetic oligonucleotide
cacugguuuauuauugauc

SEQ ID NO: 1285913 - RNA, 19 nt, Artificial Sequence
  Description of Artificial Sequence: Synthetic oligonucleotide
ggaaauuucggaucgaugu

SEQ ID NO: 1285914 - RNA, 19 nt, Artificial Sequence
  Description of Artificial Sequence: Synthetic oligonucleotide
cacccaaacuagaccaucg

SEQ ID NO: 1285915 - RNA, 19 nt, Artificial Sequence
  Description of Artificial Sequence: Synthetic oligonucleotide
uuuugcgaauauucuucgc

SEQ ID NO: 1285916 - RNA, 19 nt, Artificial Sequence
  Description of Artificial Sequence: Synthetic oligonucleotide
ucacuuugguguuggggag

SEQ ID NO: 1285917 - RNA, 19 nt, Artificial Sequence
  Description of Artificial Sequence: Synthetic oligonucleotide
uggugcagcuauacugacg

SEQ ID NO: 1285918 - RNA, 19 nt, Artificial Sequence
  Description of Artificial Sequence: Synthetic oligonucleotide
ugcgaauauucuucgcaug

SEQ ID NO: 1285919 - RNA, 19 nt, Artificial Sequence
  Description of Artificial Sequence: Synthetic oligonucleotide
gcuaagauaacaccacaug

SEQ ID NO: 1285920 - RNA, 19 nt, Artificial Sequence
  Description of Artificial Sequence: Synthetic oligonucleotide
ucacuaaccuccccuggug

SEQ ID NO: 1285921 - RNA, 19 nt, Artificial Sequence
  Description of Artificial Sequence: Synthetic oligonucleotide
uggugaugcuggaaucccg

SEQ ID NO: 1285922 - RNA, 19 nt, Artificial Sequence
  Description of Artificial Sequence: Synthetic oligonucleotide
uccccugaaauucacccaa

SEQ ID NO: 1285923 - RNA, 19 nt, Artificial Sequence
  Description of Artificial Sequence: Synthetic oligonucleotide
auaaucaaguaaauucagu

SEQ ID NO: 1285924 - RNA, 19 nt, Artificial Sequence
  Description of Artificial Sequence: Synthetic oligonucleotide
aaccugguaauguccucug

SEQ ID NO: 1285925 - RNA, 19 nt, Artificial Sequence
  Description of Artificial Sequence: Synthetic oligonucleotide
auaaccugguaauguccuc

SEQ ID NO: 1285926 - RNA, 19 nt, Artificial Sequence
  Description of Artificial Sequence: Synthetic oligonucleotide
aagagucaauuugugugug

SEQ ID NO: 1285927 - RNA, 19 nt, Artificial Sequence
  Description of Artificial Sequence: Synthetic oligonucleotide
guagacuaugggcugcuug

SEQ ID NO: 1285928 - RNA, 19 nt, Artificial Sequence
  Description of Artificial Sequence: Synthetic oligonucleotide
cucaggguagcuagggcgc

SEQ ID NO: 1285929 - RNA, 19 nt, Artificial Sequence
  Description of Artificial Sequence: Synthetic oligonucleotide
ugggcucgcgaauugccgg

SEQ ID NO: 1285930 - RNA, 19 nt, Artificial Sequence
  Description of Artificial Sequence: Synthetic oligonucleotide
uugcgaauauucuucgcau

SEQ ID NO: 1285931 - RNA, 19 nt, Artificial Sequence
  Description of Artificial Sequence: Synthetic oligonucleotide
acacaauaaccacguuggg

SEQ ID NO: 1285932 - RNA, 19 nt, Artificial Sequence
  Description of Artificial Sequence: Synthetic oligonucleotide
uugggguucaccgugcuaa

SEQ ID NO: 1285933 - RNA, 19 nt, Artificial Sequence
  Description of Artificial Sequence: Synthetic oligonucleotide
guaaugaaacucuuucucu

SEQ ID NO: 1285934 - RNA, 19 nt, Artificial Sequence
  Description of Artificial Sequence: Synthetic oligonucleotide
ccaaacuagaccaucgcac

SEQ ID NO: 1285935 - RNA, 19 nt, Artificial Sequence
  Description of Artificial Sequence: Synthetic oligonucleotide
cuucuuaacagugaaggaa

SEQ ID NO: 1285936 - RNA, 19 nt, Artificial Sequence
  Description of Artificial Sequence: Synthetic oligonucleotide
uuucggaucgauguaguua

SEQ ID NO: 1285937 - RNA, 19 nt, Artificial Sequence
  Description of Artificial Sequence: Synthetic oligonucleotide
uuugucugcuguccucccc

SEQ ID NO: 1285938 - RNA, 19 nt, Artificial Sequence
  Description of Artificial Sequence: Synthetic oligonucleotide
gcucaggguagcuagggcg

SEQ ID NO: 1285939 - RNA, 19 nt, Artificial Sequence
  Description of Artificial Sequence: Synthetic oligonucleotide
ugguccggccguaauauuc

SEQ ID NO: 1285940 - RNA, 19 nt, Artificial Sequence
  Description of Artificial Sequence: Synthetic oligonucleotide
ucgauguaguuagagucca

SEQ ID NO: 1285941 - RNA, 19 nt, Artificial Sequence
  Description of Artificial Sequence: Synthetic oligonucleotide
aauuucggaucgauguagu

SEQ ID NO: 1285942 - RNA, 19 nt, Artificial Sequence
  Description of Artificial Sequence: Synthetic oligonucleotide
accugguaauguccucugc

SEQ ID NO: 1285943 - RNA, 19 nt, Artificial Sequence
  Description of Artificial Sequence: Synthetic oligonucleotide
gaaauucacccaaacuaga

SEQ ID NO: 1285944 - RNA, 19 nt, Artificial Sequence
  Description of Artificial Sequence: Synthetic oligonucleotide
aucccgauucccugguccg

SEQ ID NO: 1285945 - RNA, 19 nt, Artificial Sequence
  Description of Artificial Sequence: Synthetic oligonucleotide
ucauccaaggguagacuau

SEQ ID NO: 1285946 - RNA, 19 nt, Artificial Sequence
  Description of Artificial Sequence: Synthetic oligonucleotide
ggggucacggagcacaggg

SEQ ID NO: 1285947 - RNA, 19 nt, Artificial Sequence
  Description of Artificial Sequence: Synthetic oligonucleotide
ugcagcuauacugacgcuc

SEQ ID NO: 1285948 - RNA, 19 nt, Artificial Sequence
  Description of Artificial Sequence: Synthetic oligonucleotide
uccggccguaauauuccgg

SEQ ID NO: 1285949 - RNA, 19 nt, Artificial Sequence
  Description of Artificial Sequence: Synthetic oligonucleotide
aucaacacuaaaauucuuu

SEQ ID NO: 1285950 - RNA, 19 nt, Artificial Sequence
  Description of Artificial Sequence: Synthetic oligonucleotide
aguuagaguccaucaaaua

SEQ ID NO: 1285951 - RNA, 19 nt, Artificial Sequence
  Description of Artificial Sequence: Synthetic oligonucleotide
uggagacuggugcagcuau

SEQ ID NO: 1285952 - RNA, 19 nt, Artificial Sequence
  Description of Artificial Sequence: Synthetic oligonucleotide
gaucacggggcauuucaca

SEQ ID NO: 1285953 - RNA, 19 nt, Artificial Sequence
  Description of Artificial Sequence: Synthetic oligonucleotide
agcuauacugacgcucagg

SEQ ID NO: 1285954 - RNA, 19 nt, Artificial Sequence
  Description of Artificial Sequence: Synthetic oligonucleotide
augcuggaaucccgauucc

SEQ ID NO: 1285955 - RNA, 19 nt, Artificial Sequence
  Description of Artificial Sequence: Synthetic oligonucleotide
uuauugaucacggggcauu

SEQ ID NO: 1285956 - RNA, 19 nt, Artificial Sequence
  Description of Artificial Sequence: Synthetic oligonucleotide
uuccccugaaauucaccca

SEQ ID NO: 1285957 - RNA, 19 nt, Artificial Sequence
  Description of Artificial Sequence: Synthetic oligonucleotide
acuaaccuccccuggugca

SEQ ID NO: 1285958 - RNA, 19 nt, Artificial Sequence
  Description of Artificial Sequence: Synthetic oligonucleotide
agcggcugugauuucucag

SEQ ID NO: 1285959 - RNA, 19 nt, Artificial Sequence
  Description of Artificial Sequence: Synthetic oligonucleotide
ggauguagcuauuuugcga

SEQ ID NO: 1285960 - RNA, 19 nt, Artificial Sequence
  Description of Artificial Sequence: Synthetic oligonucleotide
cuggaaucccgauucccug

SEQ ID NO: 1285961 - RNA, 19 nt, Artificial Sequence
  Description of Artificial Sequence: Synthetic oligonucleotide
cacuaaccuccccuggugc

SEQ ID NO: 1285962 - RNA, 19 nt, Artificial Sequence
  Description of Artificial Sequence: Synthetic oligonucleotide
uguccucgagcgcuugggc

SEQ ID NO: 1285963 - RNA, 19 nt, Artificial Sequence
  Description of Artificial Sequence: Synthetic oligonucleotide
gcggcugugauuucucagg

SEQ ID NO: 1285964 - RNA, 19 nt, Artificial Sequence
  Description of Artificial Sequence: Synthetic oligonucleotide
ucugaacugaaaguucauu

SEQ ID NO: 1285965 - RNA, 19 nt, Artificial Sequence
  Description of Artificial Sequence: Synthetic oligonucleotide
cauccaaggguagacuaug

SEQ ID NO: 1285966 - RNA, 19 nt, Artificial Sequence
  Description of Artificial Sequence: Synthetic oligonucleotide
gccguaauauuccggacug

SEQ ID NO: 1285967 - RNA, 19 nt, Artificial Sequence
  Description of Artificial Sequence: Synthetic oligonucleotide
auacugacgcucaggguag

SEQ ID NO: 1285968 - RNA, 19 nt, Artificial Sequence
  Description of Artificial Sequence: Synthetic oligonucleotide
ccccacaagaauacaaaag

SEQ ID NO: 1285969 - RNA, 19 nt, Artificial Sequence
  Description of Artificial Sequence: Synthetic oligonucleotide
ccugguaauguccucugcc

SEQ ID NO: 1285970 - RNA, 19 nt, Artificial Sequence
  Description of Artificial Sequence: Synthetic oligonucleotide
guguaaguuauguuuuaua

SEQ ID NO: 1285971 - RNA, 19 nt, Artificial Sequence
  Description of Artificial Sequence: Synthetic oligonucleotide
uucaaugcaaagggccuaa

SEQ ID NO: 1285972 - RNA, 19 nt, Artificial Sequence
  Description of Artificial Sequence: Synthetic oligonucleotide
agguaccaugcuaagauaa

SEQ ID NO: 1285973 - RNA, 19 nt, Artificial Sequence
  Description of Artificial Sequence: Synthetic oligonucleotide
uuucaaugcaaagggccua

SEQ ID NO: 1285974 - RNA, 19 nt, Artificial Sequence
  Description of Artificial Sequence: Synthetic oligonucleotide
cauuuagcuuugucugcug

SEQ ID NO: 1285975 - RNA, 19 nt, Artificial Sequence
  Description of Artificial Sequence: Synthetic oligonucleotide
aggaaauuucggaucgaug

SEQ ID NO: 1285976 - RNA, 19 nt, Artificial Sequence
  Description of Artificial Sequence: Synthetic oligonucleotide
uucacccaaacuagaccau

SEQ ID NO: 1285977 - RNA, 19 nt, Artificial Sequence
  Description of Artificial Sequence: Synthetic oligonucleotide
uccucgagcgcuugggcuc

SEQ ID NO: 1285978 - RNA, 19 nt, Artificial Sequence
  Description of Artificial Sequence: Synthetic oligonucleotide
ggucacggagcacagggug

SEQ ID NO: 1285979 - RNA, 19 nt, Artificial Sequence
  Description of Artificial Sequence: Synthetic oligonucleotide
aaacuaguccacagccacu

SEQ ID NO: 1285980 - RNA, 19 nt, Artificial Sequence
  Description of Artificial Sequence: Synthetic oligonucleotide
uauuccggacuguguucag

SEQ ID NO: 1285981 - RNA, 19 nt, Artificial Sequence
  Description of Artificial Sequence: Synthetic oligonucleotide
ccaugcuaagauaacacca

SEQ ID NO: 1285982 - RNA, 19 nt, Artificial Sequence
  Description of Artificial Sequence: Synthetic oligonucleotide
uucuucgcauggaggaaau

SEQ ID NO: 1285983 - RNA, 19 nt, Artificial Sequence
  Description of Artificial Sequence: Synthetic oligonucleotide
agcuagggcgcggaggcgg

SEQ ID NO: 1285984 - RNA, 19 nt, Artificial Sequence
  Description of Artificial Sequence: Synthetic oligonucleotide
agaccaucgcaccuugcaa

SEQ ID NO: 1285985 - RNA, 19 nt, Artificial Sequence
  Description of Artificial Sequence: Synthetic oligonucleotide
ggaauugacaagggaggag

SEQ ID NO: 1285986 - RNA, 19 nt, Artificial Sequence
  Description of Artificial Sequence: Synthetic oligonucleotide
cacggggcauuucacauca

SEQ ID NO: 1285987 - RNA, 19 nt, Artificial Sequence
  Description of Artificial Sequence: Synthetic oligonucleotide
ucucuaauuccaggaccug

SEQ ID NO: 1285988 - RNA, 19 nt, Artificial Sequence
  Description of Artificial Sequence: Synthetic oligonucleotide
auugaucacggggcauuuc

SEQ ID NO: 1285989 - RNA, 19 nt, Artificial Sequence
  Description of Artificial Sequence: Synthetic oligonucleotide
auuauugaucacggggcau

SEQ ID NO: 1285990 - RNA, 19 nt, Artificial Sequence
  Description of Artificial Sequence: Synthetic oligonucleotide
auccaaggguagacuaugg

SEQ ID NO: 1285991 - RNA, 19 nt, Artificial Sequence
  Description of Artificial Sequence: Synthetic oligonucleotide
gaguggucuucagaaguac

SEQ ID NO: 1285992 - RNA, 19 nt, Artificial Sequence
  Description of Artificial Sequence: Synthetic oligonucleotide
caucaaauacgagcucaug

SEQ ID NO: 1285993 - RNA, 19 nt, Artificial Sequence
  Description of Artificial Sequence: Synthetic oligonucleotide
auuucggaucgauguaguu

SEQ ID NO: 1285994 - RNA, 19 nt, Artificial Sequence
  Description of Artificial Sequence: Synthetic oligonucleotide
ucggugguccuucuuccau

SEQ ID NO: 1285995 - RNA, 19 nt, Artificial Sequence
  Description of Artificial Sequence: Synthetic oligonucleotide
gcauggaggaaauuucgga

SEQ ID NO: 1285996 - RNA, 19 nt, Artificial Sequence
  Description of Artificial Sequence: Synthetic oligonucleotide
caggagaauccacuuaaaa

SEQ ID NO: 1285997 - RNA, 19 nt, Artificial Sequence
  Description of Artificial Sequence: Synthetic oligonucleotide
ucacccaaacuagaccauc

SEQ ID NO: 1285998 - RNA, 19 nt, Artificial Sequence
  Description of Artificial Sequence: Synthetic oligonucleotide
cucgcgaauugccgggccc

SEQ ID NO: 1285999 - RNA, 19 nt, Artificial Sequence
  Description of Artificial Sequence: Synthetic oligonucleotide
ucacggggcauuucacauc

SEQ ID NO: 1286000 - RNA, 19 nt, Artificial Sequence
  Description of Artificial Sequence: Synthetic oligonucleotide
guagcuauuuugcgaauau

SEQ ID NO: 1286001 - RNA, 19 nt, Artificial Sequence
  Description of Artificial Sequence: Synthetic oligonucleotide
acgcucaggguagcuaggg

SEQ ID NO: 1286002 - RNA, 19 nt, Artificial Sequence
  Description of Artificial Sequence: Synthetic oligonucleotide
cuagaccaucgcaccuugc

SEQ ID NO: 1286003 - RNA, 19 nt, Artificial Sequence
  Description of Artificial Sequence: Synthetic oligonucleotide
ggcgcuggagggauggucg

SEQ ID NO: 1286004 - RNA, 19 nt, Artificial Sequence
  Description of Artificial Sequence: Synthetic oligonucleotide
gacgcucaggguagcuagg

SEQ ID NO: 1286005 - RNA, 19 nt, Artificial Sequence
  Description of Artificial Sequence: Synthetic oligonucleotide
cuguccucgagcgcuuggg

SEQ ID NO: 1286006 - RNA, 19 nt, Artificial Sequence
  Description of Artificial Sequence: Synthetic oligonucleotide
gugggcucgcgaauugccg

SEQ ID NO: 1286007 - RNA, 19 nt, Artificial Sequence
  Description of Artificial Sequence: Synthetic oligonucleotide
ugcugggcgcagcaccggc

SEQ ID NO: 1286008 - RNA, 19 nt, Artificial Sequence
  Description of Artificial Sequence: Synthetic oligonucleotide
guccggccguaauauuccg

SEQ ID NO: 1286009 - RNA, 19 nt, Artificial Sequence
  Description of Artificial Sequence: Synthetic oligonucleotide
cuucgggucagguagcggu

SEQ ID NO: 1286010 - RNA, 19 nt, Artificial Sequence
  Description of Artificial Sequence: Synthetic oligonucleotide
uugccgggccccuggagac

SEQ ID NO: 1286011 - RNA, 19 nt, Artificial Sequence
  Description of Artificial Sequence: Synthetic oligonucleotide
ucgcgaauugccgggcccc

SEQ ID NO: 1286012 - RNA, 19 nt, Artificial Sequence
  Description of Artificial Sequence: Synthetic oligonucleotide
gcaucuaccuauagacugc

SEQ ID NO: 1286013 - RNA, 19 nt, Artificial Sequence
  Description of Artificial Sequence: Synthetic oligonucleotide
uccggacuguguucaggga

SEQ ID NO: 1286014 - RNA, 19 nt, Artificial Sequence
  Description of Artificial Sequence: Synthetic oligonucleotide
gcuucuuaacagugaagga

SEQ ID NO: 1286015 - RNA, 19 nt, Artificial Sequence
  Description of Artificial Sequence: Synthetic oligonucleotide
gcaaagggccuaaggaaag

SEQ ID NO: 1286016 - RNA, 19 nt, Artificial Sequence
  Description of Artificial Sequence: Synthetic oligonucleotide
uauugaucacggggcauuu

SEQ ID NO: 1286017 - RNA, 19 nt, Artificial Sequence
  Description of Artificial Sequence: Synthetic oligonucleotide
gaccaucgcaccuugcaau

SEQ ID NO: 1286018 - RNA, 19 nt, Artificial Sequence
  Description of Artificial Sequence: Synthetic oligonucleotide
ucccgauucccugguccgg

SEQ ID NO: 1286019 - RNA, 19 nt, Artificial Sequence
  Description of Artificial Sequence: Synthetic oligonucleotide
aucgcaccuugcaauauau

SEQ ID NO: 1286020 - RNA, 19 nt, Artificial Sequence
  Description of Artificial Sequence: Synthetic oligonucleotide
ucggaucgauguaguuaga

SEQ ID NO: 1286021 - RNA, 19 nt, Artificial Sequence
  Description of Artificial Sequence: Synthetic oligonucleotide
gaguguaggcuguccucga

SEQ ID NO: 1286022 - RNA, 19 nt, Artificial Sequence
  Description of Artificial Sequence: Synthetic oligonucleotide
guaauauuccggacugugu

SEQ ID NO: 1286023 - RNA, 19 nt, Artificial Sequence
  Description of Artificial Sequence: Synthetic oligonucleotide
ccucacuuugguguugggg

SEQ ID NO: 1286024 - RNA, 19 nt, Artificial Sequence
  Description of Artificial Sequence: Synthetic oligonucleotide
ucgcaccuugcaauauaua

SEQ ID NO: 1286025 - RNA, 19 nt, Artificial Sequence
  Description of Artificial Sequence: Synthetic oligonucleotide
cuguuuugucuguuuggaa

SEQ ID NO: 1286026 - RNA, 19 nt, Artificial Sequence
  Description of Artificial Sequence: Synthetic oligonucleotide
gguccggccguaauauucc

SEQ ID NO: 1286027 - RNA, 19 nt, Artificial Sequence
  Description of Artificial Sequence: Synthetic oligonucleotide
ggaucgauguaguuagagu

SEQ ID NO: 1286028 - RNA, 19 nt, Artificial Sequence
  Description of Artificial Sequence: Synthetic oligonucleotide
gccugagagaggcggcucg

SEQ ID NO: 1286029 - RNA, 19 nt, Artificial Sequence
  Description of Artificial Sequence: Synthetic oligonucleotide
gacugccucucugaacuga

SEQ ID NO: 1286030 - RNA, 19 nt, Artificial Sequence
  Description of Artificial Sequence: Synthetic oligonucleotide
ucaccgugcuaacgugaau

SEQ ID NO: 1286031 - RNA, 19 nt, Artificial Sequence
  Description of Artificial Sequence: Synthetic oligonucleotide
gaaucccgauucccugguc

SEQ ID NO: 1286032 - RNA, 19 nt, Artificial Sequence
  Description of Artificial Sequence: Synthetic oligonucleotide
gaggaaauuucggaucgau

SEQ ID NO: 1286033 - RNA, 19 nt, Artificial Sequence
  Description of Artificial Sequence: Synthetic oligonucleotide
cagcuauacugacgcucag

SEQ ID NO: 1286034 - RNA, 19 nt, Artificial Sequence
  Description of Artificial Sequence: Synthetic oligonucleotide
gcagcuauacugacgcuca

SEQ ID NO: 1286035 - RNA, 19 nt, Artificial Sequence
  Description of Artificial Sequence: Synthetic oligonucleotide
gggcucgcgaauugccggg

SEQ ID NO: 1286036 - RNA, 19 nt, Artificial Sequence
  Description of Artificial Sequence: Synthetic oligonucleotide
gagcggcugugauuucuca

SEQ ID NO: 1286037 - RNA, 19 nt, Artificial Sequence
  Description of Artificial Sequence: Synthetic oligonucleotide
cuaguccacagccacuggu

SEQ ID NO: 1286038 - RNA, 19 nt, Artificial Sequence
  Description of Artificial Sequence: Synthetic oligonucleotide
ggcgcugaccucacuuugg

SEQ ID NO: 1286039 - RNA, 19 nt, Artificial Sequence
  Description of Artificial Sequence: Synthetic oligonucleotide
ggugaugcuggaaucccga

SEQ ID NO: 1286040 - RNA, 19 nt, Artificial Sequence
  Description of Artificial Sequence: Synthetic oligonucleotide
gggguaggggagcaucuac

SEQ ID NO: 1286041 - RNA, 19 nt, Artificial Sequence
  Description of Artificial Sequence: Synthetic oligonucleotide
cgcaccuugcaauauauaa

SEQ ID NO: 1286042 - RNA, 19 nt, Artificial Sequence
  Description of Artificial Sequence: Synthetic oligonucleotide
ccucacuaaccuccccugg

SEQ ID NO: 1286043 - RNA, 19 nt, Artificial Sequence
  Description of Artificial Sequence: Synthetic oligonucleotide
gguaauguccucugcccgu

SEQ ID NO: 1286044 - RNA, 19 nt, Artificial Sequence
  Description of Artificial Sequence: Synthetic oligonucleotide
uagcuagggcgcggaggcg

SEQ ID NO: 1286045 - RNA, 19 nt, Artificial Sequence
  Description of Artificial Sequence: Synthetic oligonucleotide
cuucgcauggaggaaauuu

SEQ ID NO: 1286046 - RNA, 19 nt, Artificial Sequence
  Description of Artificial Sequence: Synthetic oligonucleotide
guaggggagcaucuaccua

SEQ ID NO: 1286047 - RNA, 19 nt, Artificial Sequence
  Description of Artificial Sequence: Synthetic oligonucleotide
cucacuaaccuccccuggu

SEQ ID NO: 1286048 - RNA, 19 nt, Artificial Sequence
  Description of Artificial Sequence: Synthetic oligonucleotide
ucgcagagcggcugugauu

SEQ ID NO: 1286049 - RNA, 19 nt, Artificial Sequence
  Description of Artificial Sequence: Synthetic oligonucleotide
ggccguaauauuccggacu

SEQ ID NO: 1286050 - RNA, 19 nt, Artificial Sequence
  Description of Artificial Sequence: Synthetic oligonucleotide
uguuggggagucggugguc

SEQ ID NO: 1286051 - RNA, 19 nt, Artificial Sequence
  Description of Artificial Sequence: Synthetic oligonucleotide
cccaaacuagaccaucgca

SEQ ID NO: 1286052 - RNA, 19 nt, Artificial Sequence
  Description of Artificial Sequence: Synthetic oligonucleotide
acugacgcucaggguagcu

SEQ ID NO: 1286053 - RNA, 19 nt, Artificial Sequence
  Description of Artificial Sequence: Synthetic oligonucleotide
guguucagggauguagcua

SEQ ID NO: 1286054 - RNA, 19 nt, Artificial Sequence
  Description of Artificial Sequence: Synthetic oligonucleotide
agcgagugggcgaucucga

SEQ ID NO: 1286055 - RNA, 19 nt, Artificial Sequence
  Description of Artificial Sequence: Synthetic oligonucleotide
gcaaggggcuuguuuaucu

SEQ ID NO: 1286056 - RNA, 19 nt, Artificial Sequence
  Description of Artificial Sequence: Synthetic oligonucleotide
uacugacgcucaggguagc

SEQ ID NO: 1286057 - RNA, 19 nt, Artificial Sequence
  Description of Artificial Sequence: Synthetic oligonucleotide
caggguagcuagggcgcgg

SEQ ID NO: 1286058 - RNA, 19 nt, Artificial Sequence
  Description of Artificial Sequence: Synthetic oligonucleotide
caucgcaccuugcaauaua

SEQ ID NO: 1286059 - RNA, 19 nt, Artificial Sequence
  Description of Artificial Sequence: Synthetic oligonucleotide
aggggcuuguuuaucuguu

SEQ ID NO: 1286060 - RNA, 19 nt, Artificial Sequence
  Description of Artificial Sequence: Synthetic oligonucleotide
cugcccguugcugcuccgg

SEQ ID NO: 1286061 - RNA, 19 nt, Artificial Sequence
  Description of Artificial Sequence: Synthetic oligonucleotide
gggcuucuuaacagugaag

SEQ ID NO: 1286062 - RNA, 19 nt, Artificial Sequence
  Description of Artificial Sequence: Synthetic oligonucleotide
cgaauugccgggccccugg

SEQ ID NO: 1286063 - RNA, 19 nt, Artificial Sequence
  Description of Artificial Sequence: Synthetic oligonucleotide
aggguagcuagggcgcgga

SEQ ID NO: 1286064 - RNA, 19 nt, Artificial Sequence
  Description of Artificial Sequence: Synthetic oligonucleotide
ccggccguaauauuccgga

SEQ ID NO: 1286065 - RNA, 19 nt, Artificial Sequence
  Description of Artificial Sequence: Synthetic oligonucleotide
cccucacuaaccuccccug

SEQ ID NO: 1286066 - RNA, 19 nt, Artificial Sequence
  Description of Artificial Sequence: Synthetic oligonucleotide
cggcugugauuucucaggg

SEQ ID NO: 1286067 - RNA, 19 nt, Artificial Sequence
  Description of Artificial Sequence: Synthetic oligonucleotide
gguggguacagcuccuggu

SEQ ID NO: 1286068 - RNA, 19 nt, Artificial Sequence
  Description of Artificial Sequence: Synthetic oligonucleotide
ucuucgcauggaggaaauu

SEQ ID NO: 1286069 - RNA, 19 nt, Artificial Sequence
  Description of Artificial Sequence: Synthetic oligonucleotide
cgugggcucgcgaauugcc

SEQ ID NO: 1286070 - RNA, 19 nt, Artificial Sequence
  Description of Artificial Sequence: Synthetic oligonucleotide
aucuaccuauagacugccu

SEQ ID NO: 1286071 - RNA, 19 nt, Artificial Sequence
  Description of Artificial Sequence: Synthetic oligonucleotide
gcccguugcugcuccggcg

SEQ ID NO: 1286072 - RNA, 19 nt, Artificial Sequence
  Description of Artificial Sequence: Synthetic oligonucleotide
cggaucgauguaguuagag

SEQ ID NO: 1286073 - RNA, 19 nt, Artificial Sequence
  Description of Artificial Sequence: Synthetic oligonucleotide
uaaccuccccuggugcauu

SEQ ID NO: 1286074 - RNA, 19 nt, Artificial Sequence
  Description of Artificial Sequence: Synthetic oligonucleotide
gcgcuggagggauggucgg

SEQ ID NO: 1286075 - RNA, 19 nt, Artificial Sequence
  Description of Artificial Sequence: Synthetic oligonucleotide
gcauuuagcuuugucugcu

SEQ ID NO: 1286076 - RNA, 19 nt, Artificial Sequence
  Description of Artificial Sequence: Synthetic oligonucleotide
cucugaacugaaaguucau

SEQ ID NO: 1286077 - RNA, 19 nt, Artificial Sequence
  Description of Artificial Sequence: Synthetic oligonucleotide
gcucgcgaauugccgggcc

SEQ ID NO: 1286078 - RNA, 19 nt, Artificial Sequence
  Description of Artificial Sequence: Synthetic oligonucleotide
gugcugggcgcagcaccgg

SEQ ID NO: 1286079 - RNA, 19 nt, Artificial Sequence
  Description of Artificial Sequence: Synthetic oligonucleotide
uggggagucggugguccuu

SEQ ID NO: 1286080 - RNA, 19 nt, Artificial Sequence
  Description of Artificial Sequence: Synthetic oligonucleotide
ggaaucccgauucccuggu

SEQ ID NO: 1286081 - RNA, 19 nt, Artificial Sequence
  Description of Artificial Sequence: Synthetic oligonucleotide
gcagggguguaaguuaugu

SEQ ID NO: 1286082 - RNA, 19 nt, Artificial Sequence
  Description of Artificial Sequence: Synthetic oligonucleotide
gcuggaaucccgauucccu

SEQ ID NO: 1286083 - RNA, 19 nt, Artificial Sequence
  Description of Artificial Sequence: Synthetic oligonucleotide
uccggcggcguggcgcucu

SEQ ID NO: 1286084 - RNA, 19 nt, Artificial Sequence
  Description of Artificial Sequence: Synthetic oligonucleotide
ggaggaaauuucggaucga

SEQ ID NO: 1286085 - RNA, 19 nt, Artificial Sequence
  Description of Artificial Sequence: Synthetic oligonucleotide
cugccucucugaacugaaa

SEQ ID NO: 1286086 - RNA, 19 nt, Artificial Sequence
  Description of Artificial Sequence: Synthetic oligonucleotide
cgagugggcgaucucgauc

SEQ ID NO: 1286087 - RNA, 19 nt, Artificial Sequence
  Description of Artificial Sequence: Synthetic oligonucleotide
gugaugcuggaaucccgau

SEQ ID NO: 1286088 - RNA, 19 nt, Artificial Sequence
  Description of Artificial Sequence: Synthetic oligonucleotide
ggcaaggggcuuguuuauc

SEQ ID NO: 1286089 - RNA, 19 nt, Artificial Sequence
  Description of Artificial Sequence: Synthetic oligonucleotide
cagccacugguuuauuauu

SEQ ID NO: 1286090 - RNA, 19 nt, Artificial Sequence
  Description of Artificial Sequence: Synthetic oligonucleotide
ggguagcuagggcgcggag

SEQ ID NO: 1286091 - RNA, 19 nt, Artificial Sequence
  Description of Artificial Sequence: Synthetic oligonucleotide
gggguguaaguuauguuuu

SEQ ID NO: 1286092 - RNA, 19 nt, Artificial Sequence
  Description of Artificial Sequence: Synthetic oligonucleotide
cugacgcucaggguagcua

SEQ ID NO: 1286093 - RNA, 19 nt, Artificial Sequence
  Description of Artificial Sequence: Synthetic oligonucleotide
ccugagagaggcggcucgc

SEQ ID NO: 1286094 - RNA, 19 nt, Artificial Sequence
  Description of Artificial Sequence: Synthetic oligonucleotide
cgauucccugguccggccg

SEQ ID NO: 1286095 - RNA, 19 nt, Artificial Sequence
  Description of Artificial Sequence: Synthetic oligonucleotide
ccgauucccugguccggcc

SEQ ID NO: 1286096 - RNA, 19 nt, Artificial Sequence
  Description of Artificial Sequence: Synthetic oligonucleotide
uucccugguccggccguaa

SEQ ID NO: 1286097 - RNA, 19 nt, Artificial Sequence
  Description of Artificial Sequence: Synthetic oligonucleotide
cccgauucccugguccggc

SEQ ID NO: 1286098 - RNA, 19 nt, Artificial Sequence
  Description of Artificial Sequence: Synthetic oligonucleotide
ggcugugauuucucagggu

SEQ ID NO: 1286099 - RNA, 19 nt, Artificial Sequence
  Description of Artificial Sequence: Synthetic oligonucleotide
cagggguguaaguuauguu

SEQ ID NO: 1286100 - RNA, 19 nt, Artificial Sequence
  Description of Artificial Sequence: Synthetic oligonucleotide
ggggagucggugguccuuc

SEQ ID NO: 1286101 - RNA, 19 nt, Artificial Sequence
  Description of Artificial Sequence: Synthetic oligonucleotide
cgaauauucuucgcaugga

SEQ ID NO: 1286102 - RNA, 19 nt, Artificial Sequence
  Description of Artificial Sequence: Synthetic oligonucleotide
gccgaguguaggcuguccu

SEQ ID NO: 1286103 - RNA, 19 nt, Artificial Sequence
  Description of Artificial Sequence: Synthetic oligonucleotide
ccuucgggucagguagcgg

SEQ ID NO: 1286104 - RNA, 19 nt, Artificial Sequence
  Description of Artificial Sequence: Synthetic oligonucleotide
ggcagggguguaaguuaug

SEQ ID NO: 1286105 - RNA, 19 nt, Artificial Sequence
  Description of Artificial Sequence: Synthetic oligonucleotide
cucgcagagcggcugugau

SEQ ID NO: 1286106 - RNA, 19 nt, Artificial Sequence
  Description of Artificial Sequence: Synthetic oligonucleotide
ggcucgcgaauugccgggc

SEQ ID NO: 1286107 - RNA, 19 nt, Artificial Sequence
  Description of Artificial Sequence: Synthetic oligonucleotide
cacuuugguguuggggagu

SEQ ID NO: 1286108 - RNA, 19 nt, Artificial Sequence
  Description of Artificial Sequence: Synthetic oligonucleotide
ccucgagcgcuugggcucc

SEQ ID NO: 1286109 - RNA, 19 nt, Artificial Sequence
  Description of Artificial Sequence: Synthetic oligonucleotide
cuaaccuccccuggugcau

SEQ ID NO: 1286110 - RNA, 19 nt, Artificial Sequence
  Description of Artificial Sequence: Synthetic oligonucleotide
gugcagcuauacugacgcu

SEQ ID NO: 1286111 - RNA, 19 nt, Artificial Sequence
  Description of Artificial Sequence: Synthetic oligonucleotide
gcgcggaggcggugguggg

SEQ ID NO: 1286112 - RNA, 19 nt, Artificial Sequence
  Description of Artificial Sequence: Synthetic oligonucleotide
gcggugguggguacagcuc

SEQ ID NO: 1286113 - RNA, 19 nt, Artificial Sequence
  Description of Artificial Sequence: Synthetic oligonucleotide
gggcugcuugcuggcggcg

SEQ ID NO: 1286114 - RNA, 19 nt, Artificial Sequence
  Description of Artificial Sequence: Synthetic oligonucleotide
cccgugggcucgcgaauug

SEQ ID NO: 1286115 - RNA, 19 nt, Artificial Sequence
  Description of Artificial Sequence: Synthetic oligonucleotide
cgcugaccucacuuuggug

SEQ ID NO: 1286116 - RNA, 19 nt, Artificial Sequence
  Description of Artificial Sequence: Synthetic oligonucleotide
cggccguaauauuccggac

SEQ ID NO: 1286117 - RNA, 19 nt, Artificial Sequence
  Description of Artificial Sequence: Synthetic oligonucleotide
ccgugggcucgcgaauugc

SEQ ID NO: 1286118 - RNA, 19 nt, Artificial Sequence
  Description of Artificial Sequence: Synthetic oligonucleotide
cucgagcgcuugggcuccc

SEQ ID NO: 1286119 - RNA, 19 nt, Artificial Sequence
  Description of Artificial Sequence: Synthetic oligonucleotide
gcgaauugccgggccccug

SEQ ID NO: 1286120 - RNA, 19 nt, Artificial Sequence
  Description of Artificial Sequence: Synthetic oligonucleotide
ccggacuguguucagggau

SEQ ID NO: 1286121 - RNA, 19 nt, Artificial Sequence
  Description of Artificial Sequence: Synthetic oligonucleotide
ggcucgcagagcggcugug

SEQ ID NO: 1286122 - RNA, 19 nt, Artificial Sequence
  Description of Artificial Sequence: Synthetic oligonucleotide
cgacgguuuuggaaccaga

SEQ ID NO: 1286123 - RNA, 19 nt, Artificial Sequence
  Description of Artificial Sequence: Synthetic oligonucleotide
ccccugaaauucacccaaa

SEQ ID NO: 1286124 - RNA, 19 nt, Artificial Sequence
  Description of Artificial Sequence: Synthetic oligonucleotide
ggggcgcugaccucacuuu

SEQ ID NO: 1286125 - RNA, 19 nt, Artificial Sequence
  Description of Artificial Sequence: Synthetic oligonucleotide
gcguggcgcucugggagug

SEQ ID NO: 1286126 - RNA, 19 nt, Artificial Sequence
  Description of Artificial Sequence: Synthetic oligonucleotide
gcuggcggcgcuggaggga

SEQ ID NO: 1286127 - RNA, 19 nt, Artificial Sequence
  Description of Artificial Sequence: Synthetic oligonucleotide
ccugguccggccguaauau

SEQ ID NO: 1286128 - RNA, 19 nt, Artificial Sequence
  Description of Artificial Sequence: Synthetic oligonucleotide
cuggcggcgcuggagggau

SEQ ID NO: 1286129 - RNA, 19 nt, Artificial Sequence
  Description of Artificial Sequence: Synthetic oligonucleotide
cgcagagcggcugugauuu

SEQ ID NO: 1286130 - RNA, 19 nt, Artificial Sequence
  Description of Artificial Sequence: Synthetic oligonucleotide
acggggcauuucacaucaa

SEQ ID NO: 1286131 - RNA, 19 nt, Artificial Sequence
  Description of Artificial Sequence: Synthetic oligonucleotide
cugguccggccguaauauu

SEQ ID NO: 1286132 - RNA, 19 nt, Artificial Sequence
  Description of Artificial Sequence: Synthetic oligonucleotide
cagaugcauuuagcuuugu

SEQ ID NO: 1286133 - RNA, 19 nt, Artificial Sequence
  Description of Artificial Sequence: Synthetic oligonucleotide
ggagucggugguccuucuu

SEQ ID NO: 1286134 - RNA, 19 nt, Artificial Sequence
  Description of Artificial Sequence: Synthetic oligonucleotide
gggucacggagcacagggu

SEQ ID NO: 1286135 - RNA, 19 nt, Artificial Sequence
  Description of Artificial Sequence: Synthetic oligonucleotide
cguggcgcucugggagugg

SEQ ID NO: 1286136 - RNA, 19 nt, Artificial Sequence
  Description of Artificial Sequence: Synthetic oligonucleotide
gcgagugggcgaucucgau

SEQ ID NO: 1286137 - RNA, 19 nt, Artificial Sequence
  Description of Artificial Sequence: Synthetic oligonucleotide
cggcgcuggagggaugguc

SEQ ID NO: 1286138 - RNA, 19 nt, Artificial Sequence
  Description of Artificial Sequence: Synthetic oligonucleotide
ccaucgcaccuugcaauau

SEQ ID NO: 1286139 - RNA, 19 nt, Artificial Sequence
  Description of Artificial Sequence: Synthetic oligonucleotide
cuccggcggcguggcgcuc

SEQ ID NO: 1286140 - RNA, 19 nt, Artificial Sequence
  Description of Artificial Sequence: Synthetic oligonucleotide
gcccgugggcucgcgaauu

SEQ ID NO: 1286141 - RNA, 19 nt, Artificial Sequence
  Description of Artificial Sequence: Synthetic oligonucleotide
ccggcccgugggcucgcga

SEQ ID NO: 1286142 - RNA, 19 nt, Artificial Sequence
  Description of Artificial Sequence: Synthetic oligonucleotide
ccgccugggccggcccgug

SEQ ID NO: 1286143 - RNA, 19 nt, Artificial Sequence
  Description of Artificial Sequence: Synthetic oligonucleotide
cggcggcguggcgcucugg

SEQ ID NO: 1286144 - RNA, 19 nt, Artificial Sequence
  Description of Artificial Sequence: Synthetic oligonucleotide
cgcgaauugccgggccccu

SEQ ID NO: 1286145 - RNA, 19 nt, Artificial Sequence
  Description of Artificial Sequence: Synthetic oligonucleotide
cggcucgcagagcggcugu

SEQ ID NO: 1286146 - RNA, 19 nt, Artificial Sequence
  Description of Artificial Sequence: Synthetic oligonucleotide
cgcggaggcgguggugggu

SEQ ID NO: 1286147 - RNA, 19 nt, Artificial Sequence
  Description of Artificial Sequence: Synthetic oligonucleotide
uuuagcuuguauuauagcc

SEQ ID NO: 1286148 - RNA, 19 nt, Artificial Sequence
  Description of Artificial Sequence: Synthetic oligonucleotide
gaaaccaucaaugaccugg

SEQ ID NO: 1286149 - RNA, 19 nt, Artificial Sequence
  Description of Artificial Sequence: Synthetic oligonucleotide
ugucaaaagggccagguag

SEQ ID NO: 1286150 - RNA, 19 nt, Artificial Sequence
  Description of Artificial Sequence: Synthetic oligonucleotide
auaagaucuagacuggcuc

SEQ ID NO: 1286151 - RNA, 19 nt, Artificial Sequence
  Description of Artificial Sequence: Synthetic oligonucleotide
uuagcuuguauuauagccc

SEQ ID NO: 1286152 - RNA, 19 nt, Artificial Sequence
  Description of Artificial Sequence: Synthetic oligonucleotide
cuugauagagcucagcagc

SEQ ID NO: 1286153 - RNA, 19 nt, Artificial Sequence
  Description of Artificial Sequence: Synthetic oligonucleotide
uauuauagcccaaaggauc

SEQ ID NO: 1286154 - RNA, 19 nt, Artificial Sequence
  Description of Artificial Sequence: Synthetic oligonucleotide
uaggguauggcccugauau

SEQ ID NO: 1286155 - RNA, 19 nt, Artificial Sequence
  Description of Artificial Sequence: Synthetic oligonucleotide
uuugugauagccugcagca

SEQ ID NO: 1286156 - RNA, 19 nt, Artificial Sequence
  Description of Artificial Sequence: Synthetic oligonucleotide
auuauagcccaaaggaucc

SEQ ID NO: 1286157 - RNA, 19 nt, Artificial Sequence
  Description of Artificial Sequence: Synthetic oligonucleotide
aagacuaacuccccagguc

SEQ ID NO: 1286158 - RNA, 19 nt, Artificial Sequence
  Description of Artificial Sequence: Synthetic oligonucleotide
accgccugaugcuagaugc

SEQ ID NO: 1286159 - RNA, 19 nt, Artificial Sequence
  Description of Artificial Sequence: Synthetic oligonucleotide
uauaggucaggucagugga

SEQ ID NO: 1286160 - RNA, 19 nt, Artificial Sequence
  Description of Artificial Sequence: Synthetic oligonucleotide
gaauacuucccguacagac

SEQ ID NO: 1286161 - RNA, 19 nt, Artificial Sequence
  Description of Artificial Sequence: Synthetic oligonucleotide
ugguccaagacuaacuccc

SEQ ID NO: 1286162 - RNA, 19 nt, Artificial Sequence
  Description of Artificial Sequence: Synthetic oligonucleotide
aacaaagcgcguguggcgc

SEQ ID NO: 1286163 - RNA, 19 nt, Artificial Sequence
  Description of Artificial Sequence: Synthetic oligonucleotide
ugauauagucuuucaaggc

SEQ ID NO: 1286164 - RNA, 19 nt, Artificial Sequence
  Description of Artificial Sequence: Synthetic oligonucleotide
caugguacgcuucacaaag

SEQ ID NO: 1286165 - RNA, 19 nt, Artificial Sequence
  Description of Artificial Sequence: Synthetic oligonucleotide
gagauugggaccccgacag

SEQ ID NO: 1286166 - RNA, 19 nt, Artificial Sequence
  Description of Artificial Sequence: Synthetic oligonucleotide
uauaggaacaccugacuga

SEQ ID NO: 1286167 - RNA, 19 nt, Artificial Sequence
  Description of Artificial Sequence: Synthetic oligonucleotide
aggaucccaguucaaaggc

SEQ ID NO: 1286168 - RNA, 19 nt, Artificial Sequence
  Description of Artificial Sequence: Synthetic oligonucleotide
cauuuagcuuguauuauag

SEQ ID NO: 1286169 - RNA, 19 nt, Artificial Sequence
  Description of Artificial Sequence: Synthetic oligonucleotide
acaacaccuucacuggugc

SEQ ID NO: 1286170 - RNA, 19 nt, Artificial Sequence
  Description of Artificial Sequence: Synthetic oligonucleotide
ugggccuuguucuugacag

SEQ ID NO: 1286171 - RNA, 19 nt, Artificial Sequence
  Description of Artificial Sequence: Synthetic oligonucleotide
cuagaugcugcuucagucg

SEQ ID NO: 1286172 - RNA, 19 nt, Artificial Sequence
  Description of Artificial Sequence: Synthetic oligonucleotide
aaggcccuuugucaaaagg

SEQ ID NO: 1286173 - RNA, 19 nt, Artificial Sequence
  Description of Artificial Sequence: Synthetic oligonucleotide
ucagccaacgaacgaagag

SEQ ID NO: 1286174 - RNA, 19 nt, Artificial Sequence
  Description of Artificial Sequence: Synthetic oligonucleotide
guacgcuucacaaagaaac

SEQ ID NO: 1286175 - RNA, 19 nt, Artificial Sequence
  Description of Artificial Sequence: Synthetic oligonucleotide
ugcacuucucuccaggaug

SEQ ID NO: 1286176 - RNA, 19 nt, Artificial Sequence
  Description of Artificial Sequence: Synthetic oligonucleotide
aaucggccgucaaugaugc

SEQ ID NO: 1286177 - RNA, 19 nt, Artificial Sequence
  Description of Artificial Sequence: Synthetic oligonucleotide
auacuucccguacagacug

SEQ ID NO: 1286178 - RNA, 19 nt, Artificial Sequence
  Description of Artificial Sequence: Synthetic oligonucleotide
ugcauugaagucacugaag

SEQ ID NO: 1286179 - RNA, 19 nt, Artificial Sequence
  Description of Artificial Sequence: Synthetic oligonucleotide
uucccguacagacugggcc

SEQ ID NO: 1286180 - RNA, 19 nt, Artificial Sequence
  Description of Artificial Sequence: Synthetic oligonucleotide
agaggguuuguagaaggcc

SEQ ID NO: 1286181 - RNA, 19 nt, Artificial Sequence
  Description of Artificial Sequence: Synthetic oligonucleotide
ugaagauggguacuugggu

SEQ ID NO: 1286182 - RNA, 19 nt, Artificial Sequence
  Description of Artificial Sequence: Synthetic oligonucleotide
acaacagcacucuguacuc

SEQ ID NO: 1286183 - RNA, 19 nt, Artificial Sequence
  Description of Artificial Sequence: Synthetic oligonucleotide
agacuaacuccccaggucu

SEQ ID NO: 1286184 - RNA, 19 nt, Artificial Sequence
  Description of Artificial Sequence: Synthetic oligonucleotide
ucuuucaaggcccuuuguc

SEQ ID NO: 1286185 - RNA, 19 nt, Artificial Sequence
  Description of Artificial Sequence: Synthetic oligonucleotide
uagcuuguauuauagccca

SEQ ID NO: 1286186 - RNA, 19 nt, Artificial Sequence
  Description of Artificial Sequence: Synthetic oligonucleotide
uccaagacuaacuccccag

SEQ ID NO: 1286187 - RNA, 19 nt, Artificial Sequence
  Description of Artificial Sequence: Synthetic oligonucleotide
cuuguauuauagcccaaag

SEQ ID NO: 1286188 - RNA, 19 nt, Artificial Sequence
  Description of Artificial Sequence: Synthetic oligonucleotide
gguagguuggggucgaugg

SEQ ID NO: 1286189 - RNA, 19 nt, Artificial Sequence
  Description of Artificial Sequence: Synthetic oligonucleotide
uuagggguggcacaggcau

SEQ ID NO: 1286190 - RNA, 19 nt, Artificial Sequence
  Description of Artificial Sequence: Synthetic oligonucleotide
uacgcuucacaaagaaacc

SEQ ID NO: 1286191 - RNA, 19 nt, Artificial Sequence
  Description of Artificial Sequence: Synthetic oligonucleotide
uaagaucuagacuggcucu

SEQ ID NO: 1286192 - RNA, 19 nt, Artificial Sequence
  Description of Artificial Sequence: Synthetic oligonucleotide
aaaucggccgucaaugaug

SEQ ID NO: 1286193 - RNA, 19 nt, Artificial Sequence
  Description of Artificial Sequence: Synthetic oligonucleotide
ugaugcuagaugcugcuuc

SEQ ID NO: 1286194 - RNA, 19 nt, Artificial Sequence
  Description of Artificial Sequence: Synthetic oligonucleotide
ugugauagccugcagcaau

SEQ ID NO: 1286195 - RNA, 19 nt, Artificial Sequence
  Description of Artificial Sequence: Synthetic oligonucleotide
agcggguuggggcaaaccg

SEQ ID NO: 1286196 - RNA, 19 nt, Artificial Sequence
  Description of Artificial Sequence: Synthetic oligonucleotide
gaggguaagaccucugcac

SEQ ID NO: 1286197 - RNA, 19 nt, Artificial Sequence
  Description of Artificial Sequence: Synthetic oligonucleotide
ccugauauagucuuucaag

SEQ ID NO: 1286198 - RNA, 19 nt, Artificial Sequence
  Description of Artificial Sequence: Synthetic oligonucleotide
uauccggugccccaggcca

SEQ ID NO: 1286199 - RNA, 19 nt, Artificial Sequence
  Description of Artificial Sequence: Synthetic oligonucleotide
aggaugguagguugggguc

SEQ ID NO: 1286200 - RNA, 19 nt, Artificial Sequence
  Description of Artificial Sequence: Synthetic oligonucleotide
ugaggguaagaccucugca

SEQ ID NO: 1286201 - RNA, 19 nt, Artificial Sequence
  Description of Artificial Sequence: Synthetic oligonucleotide
gcaauguacucucaggaag

SEQ ID NO: 1286202 - RNA, 19 nt, Artificial Sequence
  Description of Artificial Sequence: Synthetic oligonucleotide
ugagauugggaccccgaca

SEQ ID NO: 1286203 - RNA, 19 nt, Artificial Sequence
  Description of Artificial Sequence: Synthetic oligonucleotide
auaggaacaccugacugag

SEQ ID NO: 1286204 - RNA, 19 nt, Artificial Sequence
  Description of Artificial Sequence: Synthetic oligonucleotide
acuacccacacgaagucac

SEQ ID NO: 1286205 - RNA, 19 nt, Artificial Sequence
  Description of Artificial Sequence: Synthetic oligonucleotide
ugcuguaccgauccaccag

SEQ ID NO: 1286206 - RNA, 19 nt, Artificial Sequence
  Description of Artificial Sequence: Synthetic oligonucleotide
aacauuuagcuuguauuau

SEQ ID NO: 1286207 - RNA, 19 nt, Artificial Sequence
  Description of Artificial Sequence: Synthetic oligonucleotide
cuuucaaggcccuuuguca

SEQ ID NO: 1286208 - RNA, 19 nt, Artificial Sequence
  Description of Artificial Sequence: Synthetic oligonucleotide
uccaugguacgcuucacaa

SEQ ID NO: 1286209 - RNA, 19 nt, Artificial Sequence
  Description of Artificial Sequence: Synthetic oligonucleotide
uguguggggcacaugcagc

SEQ ID NO: 1286210 - RNA, 19 nt, Artificial Sequence
  Description of Artificial Sequence: Synthetic oligonucleotide
uuucguacuguguggggca

SEQ ID NO: 1286211 - RNA, 19 nt, Artificial Sequence
  Description of Artificial Sequence: Synthetic oligonucleotide
uaccgauccaccagggcug

SEQ ID NO: 1286212 - RNA, 19 nt, Artificial Sequence
  Description of Artificial Sequence: Synthetic oligonucleotide
agccaacgaacgaagagcg

SEQ ID NO: 1286213 - RNA, 19 nt, Artificial Sequence
  Description of Artificial Sequence: Synthetic oligonucleotide
uauagucuuucaaggcccu

SEQ ID NO: 1286214 - RNA, 19 nt, Artificial Sequence
  Description of Artificial Sequence: Synthetic oligonucleotide
aaugaccuggguguuugug

SEQ ID NO: 1286215 - RNA, 19 nt, Artificial Sequence
  Description of Artificial Sequence: Synthetic oligonucleotide
uguagacgcccacacuuga

SEQ ID NO: 1286216 - RNA, 19 nt, Artificial Sequence
  Description of Artificial Sequence: Synthetic oligonucleotide
aggcccuuugucaaaaggg

SEQ ID NO: 1286217 - RNA, 19 nt, Artificial Sequence
  Description of Artificial Sequence: Synthetic oligonucleotide
cgccauaagaucuagacug

SEQ ID NO: 1286218 - RNA, 19 nt, Artificial Sequence
  Description of Artificial Sequence: Synthetic oligonucleotide
cuuucguacuguguggggc

SEQ ID NO: 1286219 - RNA, 19 nt, Artificial Sequence
  Description of Artificial Sequence: Synthetic oligonucleotide
ucaucuagccgcuugcguu

SEQ ID NO: 1286220 - RNA, 19 nt, Artificial Sequence
  Description of Artificial Sequence: Synthetic oligonucleotide
ugguacgcuucacaaagaa

SEQ ID NO: 1286221 - RNA, 19 nt, Artificial Sequence
  Description of Artificial Sequence: Synthetic oligonucleotide
uaagaccucugcacucuag

SEQ ID NO: 1286222 - RNA, 19 nt, Artificial Sequence
  Description of Artificial Sequence: Synthetic oligonucleotide
aggguaagaccucugcacu

SEQ ID NO: 1286223 - RNA, 19 nt, Artificial Sequence
  Description of Artificial Sequence: Synthetic oligonucleotide
cuggguguuugugauagcc

SEQ ID NO: 1286224 - RNA, 19 nt, Artificial Sequence
  Description of Artificial Sequence: Synthetic oligonucleotide
gaugcuagaugcugcuuca

SEQ ID NO: 1286225 - RNA, 19 nt, Artificial Sequence
  Description of Artificial Sequence: Synthetic oligonucleotide
ucggccgucaaugaugcug

SEQ ID NO: 1286226 - RNA, 19 nt, Artificial Sequence
  Description of Artificial Sequence: Synthetic oligonucleotide
uacagacugggccuuguuc

SEQ ID NO: 1286227 - RNA, 19 nt, Artificial Sequence
  Description of Artificial Sequence: Synthetic oligonucleotide
aucuagacuggcucuuuug

SEQ ID NO: 1286228 - RNA, 19 nt, Artificial Sequence
  Description of Artificial Sequence: Synthetic oligonucleotide
acauuuagcuuguauuaua

SEQ ID NO: 1286229 - RNA, 19 nt, Artificial Sequence
  Description of Artificial Sequence: Synthetic oligonucleotide
acaaagcgcguguggcgcc

SEQ ID NO: 1286230 - RNA, 19 nt, Artificial Sequence
  Description of Artificial Sequence: Synthetic oligonucleotide
ucagcugccgggcgaauac

SEQ ID NO: 1286231 - RNA, 19 nt, Artificial Sequence
  Description of Artificial Sequence: Synthetic oligonucleotide
cagccaacgaacgaagagc

SEQ ID NO: 1286232 - RNA, 19 nt, Artificial Sequence
  Description of Artificial Sequence: Synthetic oligonucleotide
uguaccgauccaccagggc

SEQ ID NO: 1286233 - RNA, 19 nt, Artificial Sequence
  Description of Artificial Sequence: Synthetic oligonucleotide
cucggucagccaacgaacg

SEQ ID NO: 1286234 - RNA, 19 nt, Artificial Sequence
  Description of Artificial Sequence: Synthetic oligonucleotide
uauauccggugccccaggc

SEQ ID NO: 1286235 - RNA, 19 nt, Artificial Sequence
  Description of Artificial Sequence: Synthetic oligonucleotide
caccaaguauauccggugc

SEQ ID NO: 1286236 - RNA, 19 nt, Artificial Sequence
  Description of Artificial Sequence: Synthetic oligonucleotide
acucggucagccaacgaac

SEQ ID NO: 1286237 - RNA, 19 nt, Artificial Sequence
  Description of Artificial Sequence: Synthetic oligonucleotide
uguuugugauagccugcag

SEQ ID NO: 1286238 - RNA, 19 nt, Artificial Sequence
  Description of Artificial Sequence: Synthetic oligonucleotide
ucggagggagcgcagugcc

SEQ ID NO: 1286239 - RNA, 19 nt, Artificial Sequence
  Description of Artificial Sequence: Synthetic oligonucleotide
ugugucccgacccucuggu

SEQ ID NO: 1286240 - RNA, 19 nt, Artificial Sequence
  Description of Artificial Sequence: Synthetic oligonucleotide
augaccuggguguuuguga

SEQ ID NO: 1286241 - RNA, 19 nt, Artificial Sequence
  Description of Artificial Sequence: Synthetic oligonucleotide
ugcuggacaacaccuucac

SEQ ID NO: 1286242 - RNA, 19 nt, Artificial Sequence
  Description of Artificial Sequence: Synthetic oligonucleotide
uggguguuugugauagccu

SEQ ID NO: 1286243 - RNA, 19 nt, Artificial Sequence
  Description of Artificial Sequence: Synthetic oligonucleotide
cugaggguaagaccucugc

SEQ ID NO: 1286244 - RNA, 19 nt, Artificial Sequence
  Description of Artificial Sequence: Synthetic oligonucleotide
agcaauguacucucaggaa

SEQ ID NO: 1286245 - RNA, 19 nt, Artificial Sequence
  Description of Artificial Sequence: Synthetic oligonucleotide
cugcacaggucaucuagcc

SEQ ID NO: 1286246 - RNA, 19 nt, Artificial Sequence
  Description of Artificial Sequence: Synthetic oligonucleotide
agcuuucguacuguguggg

SEQ ID NO: 1286247 - RNA, 19 nt, Artificial Sequence
  Description of Artificial Sequence: Synthetic oligonucleotide
gccgcuguaacucucggag

SEQ ID NO: 1286248 - RNA, 19 nt, Artificial Sequence
  Description of Artificial Sequence: Synthetic oligonucleotide
gauccgugccgccauaaga

SEQ ID NO: 1286249 - RNA, 19 nt, Artificial Sequence
  Description of Artificial Sequence: Synthetic oligonucleotide
cuucacuggugccagguuc

SEQ ID NO: 1286250 - RNA, 19 nt, Artificial Sequence
  Description of Artificial Sequence: Synthetic oligonucleotide
agcggguaccgucggaggg

SEQ ID NO: 1286251 - RNA, 19 nt, Artificial Sequence
  Description of Artificial Sequence: Synthetic oligonucleotide
gagguagcggguaccgucg

SEQ ID NO: 1286252 - RNA, 19 nt, Artificial Sequence
  Description of Artificial Sequence: Synthetic oligonucleotide
cuagccuuggcagagguga

SEQ ID NO: 1286253 - RNA, 19 nt, Artificial Sequence
  Description of Artificial Sequence: Synthetic oligonucleotide
gagcccuucagaaacccug

SEQ ID NO: 1286254 - RNA, 19 nt, Artificial Sequence
  Description of Artificial Sequence: Synthetic oligonucleotide
ucaggucaguggacugugg

SEQ ID NO: 1286255 - RNA, 19 nt, Artificial Sequence
  Description of Artificial Sequence: Synthetic oligonucleotide
cuuuuggagcccuucagaa

SEQ ID NO: 1286256 - RNA, 19 nt, Artificial Sequence
  Description of Artificial Sequence: Synthetic oligonucleotide
cuggucuccugcacuaccc

SEQ ID NO: 1286257 - RNA, 19 nt, Artificial Sequence
  Description of Artificial Sequence: Synthetic oligonucleotide
ucuggugucagugcacuuc

SEQ ID NO: 1286258 - RNA, 19 nt, Artificial Sequence
  Description of Artificial Sequence: Synthetic oligonucleotide
cagcuuucguacugugugg

SEQ ID NO: 1286259 - RNA, 19 nt, Artificial Sequence
  Description of Artificial Sequence: Synthetic oligonucleotide
ccagauuucucuguagacg

SEQ ID NO: 1286260 - RNA, 19 nt, Artificial Sequence
  Description of Artificial Sequence: Synthetic oligonucleotide
ucccguacagacugggccu

SEQ ID NO: 1286261 - RNA, 19 nt, Artificial Sequence
  Description of Artificial Sequence: Synthetic oligonucleotide
gcuguaccgauccaccagg

SEQ ID NO: 1286262 - RNA, 19 nt, Artificial Sequence
  Description of Artificial Sequence: Synthetic oligonucleotide
cagcaauguacucucagga

SEQ ID NO: 1286263 - RNA, 19 nt, Artificial Sequence
  Description of Artificial Sequence: Synthetic oligonucleotide
ucuguacucgccaggccuc

SEQ ID NO: 1286264 - RNA, 19 nt, Artificial Sequence
  Description of Artificial Sequence: Synthetic oligonucleotide
gguaccgucggagggagcg

SEQ ID NO: 1286265 - RNA, 19 nt, Artificial Sequence
  Description of Artificial Sequence: Synthetic oligonucleotide
ccaacgaacgaagagcggg

SEQ ID NO: 1286266 - RNA, 19 nt, Artificial Sequence
  Description of Artificial Sequence: Synthetic oligonucleotide
ucgcucguccagcauccgg

SEQ ID NO: 1286267 - RNA, 19 nt, Artificial Sequence
  Description of Artificial Sequence: Synthetic oligonucleotide
ugaccuggguguuugugau

SEQ ID NO: 1286268 - RNA, 19 nt, Artificial Sequence
  Description of Artificial Sequence: Synthetic oligonucleotide
uagacgcccacacuugaua

SEQ ID NO: 1286269 - RNA, 19 nt, Artificial Sequence
  Description of Artificial Sequence: Synthetic oligonucleotide
guguggggcacaugcagcc

SEQ ID NO: 1286270 - RNA, 19 nt, Artificial Sequence
  Description of Artificial Sequence: Synthetic oligonucleotide
gccacagcgcuucaggcgg

SEQ ID NO: 1286271 - RNA, 19 nt, Artificial Sequence
  Description of Artificial Sequence: Synthetic oligonucleotide
cugcacuacccacacgaag

SEQ ID NO: 1286272 - RNA, 19 nt, Artificial Sequence
  Description of Artificial Sequence: Synthetic oligonucleotide
cugccgggcgaauacuucc

SEQ ID NO: 1286273 - RNA, 19 nt, Artificial Sequence
  Description of Artificial Sequence: Synthetic oligonucleotide
acgaacgaagagcggguug

SEQ ID NO: 1286274 - RNA, 19 nt, Artificial Sequence
  Description of Artificial Sequence: Synthetic oligonucleotide
guauggcccugauauaguc

SEQ ID NO: 1286275 - RNA, 19 nt, Artificial Sequence
  Description of Artificial Sequence: Synthetic oligonucleotide
gccgccauaagaucuagac

SEQ ID NO: 1286276 - RNA, 19 nt, Artificial Sequence
  Description of Artificial Sequence: Synthetic oligonucleotide
uugucaaaagggccaggua

SEQ ID NO: 1286277 - RNA, 19 nt, Artificial Sequence
  Description of Artificial Sequence: Synthetic oligonucleotide
ucaccaacaugcagcuuuc

SEQ ID NO: 1286278 - RNA, 19 nt, Artificial Sequence
  Description of Artificial Sequence: Synthetic oligonucleotide
gcuagaugcugcuucaguc

SEQ ID NO: 1286279 - RNA, 19 nt, Artificial Sequence
  Description of Artificial Sequence: Synthetic oligonucleotide
auggucaccgccugaugcu

SEQ ID NO: 1286280 - RNA, 19 nt, Artificial Sequence
  Description of Artificial Sequence: Synthetic oligonucleotide
ggguauggcccugauauag

SEQ ID NO: 1286281 - RNA, 19 nt, Artificial Sequence
  Description of Artificial Sequence: Synthetic oligonucleotide
uuccggcccaagcggaucc

SEQ ID NO: 1286282 - RNA, 19 nt, Artificial Sequence
  Description of Artificial Sequence: Synthetic oligonucleotide
gagaggguuuguagaaggc

SEQ ID NO: 1286283 - RNA, 19 nt, Artificial Sequence
  Description of Artificial Sequence: Synthetic oligonucleotide
ucccgcugcgcagagguag

SEQ ID NO: 1286284 - RNA, 19 nt, Artificial Sequence
  Description of Artificial Sequence: Synthetic oligonucleotide
ucggucagccaacgaacga

SEQ ID NO: 1286285 - RNA, 19 nt, Artificial Sequence
  Description of Artificial Sequence: Synthetic oligonucleotide
gcgaauacuucccguacag

SEQ ID NO: 1286286 - RNA, 19 nt, Artificial Sequence
  Description of Artificial Sequence: Synthetic oligonucleotide
acgcuucacaaagaaacca

SEQ ID NO: 1286287 - RNA, 19 nt, Artificial Sequence
  Description of Artificial Sequence: Synthetic oligonucleotide
gguacuugggugugucucc

SEQ ID NO: 1286288 - RNA, 19 nt, Artificial Sequence
  Description of Artificial Sequence: Synthetic oligonucleotide
ugggguuuuccaggggcgg

SEQ ID NO: 1286289 - RNA, 19 nt, Artificial Sequence
  Description of Artificial Sequence: Synthetic oligonucleotide
guaccgauccaccagggcu

SEQ ID NO: 1286290 - RNA, 19 nt, Artificial Sequence
  Description of Artificial Sequence: Synthetic oligonucleotide
guauauccggugccccagg

SEQ ID NO: 1286291 - RNA, 19 nt, Artificial Sequence
  Description of Artificial Sequence: Synthetic oligonucleotide
gaacaccugacugagggua

SEQ ID NO: 1286292 - RNA, 19 nt, Artificial Sequence
  Description of Artificial Sequence: Synthetic oligonucleotide
acagcacucuguacucgcc

SEQ ID NO: 1286293 - RNA, 19 nt, Artificial Sequence
  Description of Artificial Sequence: Synthetic oligonucleotide
cuguaccgauccaccaggg

SEQ ID NO: 1286294 - RNA, 19 nt, Artificial Sequence
  Description of Artificial Sequence: Synthetic oligonucleotide
cugagauugggaccccgac

SEQ ID NO: 1286295 - RNA, 19 nt, Artificial Sequence
  Description of Artificial Sequence: Synthetic oligonucleotide
auaggucaggucaguggac

SEQ ID NO: 1286296 - RNA, 19 nt, Artificial Sequence
  Description of Artificial Sequence: Synthetic oligonucleotide
ugccgggcgaauacuuccc

SEQ ID NO: 1286297 - RNA, 19 nt, Artificial Sequence
  Description of Artificial Sequence: Synthetic oligonucleotide
auugggaccccgacaguuc

SEQ ID NO: 1286298 - RNA, 19 nt, Artificial Sequence
  Description of Artificial Sequence: Synthetic oligonucleotide
aagaucuagacuggcucuu

SEQ ID NO: 1286299 - RNA, 19 nt, Artificial Sequence
  Description of Artificial Sequence: Synthetic oligonucleotide
gcugcgcagagguagcggg

SEQ ID NO: 1286300 - RNA, 19 nt, Artificial Sequence
  Description of Artificial Sequence: Synthetic oligonucleotide
caaaggcuggcuagccuug

SEQ ID NO: 1286301 - RNA, 19 nt, Artificial Sequence
  Description of Artificial Sequence: Synthetic oligonucleotide
agcccaaaggaucccaguu

SEQ ID NO: 1286302 - RNA, 19 nt, Artificial Sequence
  Description of Artificial Sequence: Synthetic oligonucleotide
cuacccacacgaagucacc

SEQ ID NO: 1286303 - RNA, 19 nt, Artificial Sequence
  Description of Artificial Sequence: Synthetic oligonucleotide
uggacagacccauguuccu

SEQ ID NO: 1286304 - RNA, 19 nt, Artificial Sequence
  Description of Artificial Sequence: Synthetic oligonucleotide
gaacgaagagcggguuggg

SEQ ID NO: 1286305 - RNA, 19 nt, Artificial Sequence
  Description of Artificial Sequence: Synthetic oligonucleotide
cauaagaucuagacuggcu

SEQ ID NO: 1286306 - RNA, 19 nt, Artificial Sequence
  Description of Artificial Sequence: Synthetic oligonucleotide
cacacuugauagagcucag

SEQ ID NO: 1286307 - RNA, 19 nt, Artificial Sequence
  Description of Artificial Sequence: Synthetic oligonucleotide
aguggacuguggcugcagu

SEQ ID NO: 1286308 - RNA, 19 nt, Artificial Sequence
  Description of Artificial Sequence: Synthetic oligonucleotide
agugugcucaggccuucug

SEQ ID NO: 1286309 - RNA, 19 nt, Artificial Sequence
  Description of Artificial Sequence: Synthetic oligonucleotide
cuaacuccccaggucuugc

SEQ ID NO: 1286310 - RNA, 19 nt, Artificial Sequence
  Description of Artificial Sequence: Synthetic oligonucleotide
augugguccaagacuaacu

SEQ ID NO: 1286311 - RNA, 19 nt, Artificial Sequence
  Description of Artificial Sequence: Synthetic oligonucleotide
uccugcucuuuaggggugg

SEQ ID NO: 1286312 - RNA, 19 nt, Artificial Sequence
  Description of Artificial Sequence: Synthetic oligonucleotide
gaggguuuguagaaggccu

SEQ ID NO: 1286313 - RNA, 19 nt, Artificial Sequence
  Description of Artificial Sequence: Synthetic oligonucleotide
ugauagccugcagcaaugu

SEQ ID NO: 1286314 - RNA, 19 nt, Artificial Sequence
  Description of Artificial Sequence: Synthetic oligonucleotide
ggcaaaccggcagugggcg

SEQ ID NO: 1286315 - RNA, 19 nt, Artificial Sequence
  Description of Artificial Sequence: Synthetic oligonucleotide
agaaaccaucaaugaccug

SEQ ID NO: 1286316 - RNA, 19 nt, Artificial Sequence
  Description of Artificial Sequence: Synthetic oligonucleotide
gcacuucucuccaggaugg

SEQ ID NO: 1286317 - RNA, 19 nt, Artificial Sequence
  Description of Artificial Sequence: Synthetic oligonucleotide
accggcagugggcgcuucc

SEQ ID NO: 1286318 - RNA, 19 nt, Artificial Sequence
  Description of Artificial Sequence: Synthetic oligonucleotide
ccgacaguucagcagcugg

SEQ ID NO: 1286319 - RNA, 19 nt, Artificial Sequence
  Description of Artificial Sequence: Synthetic oligonucleotide
auccgugccgccauaagau

SEQ ID NO: 1286320 - RNA, 19 nt, Artificial Sequence
  Description of Artificial Sequence: Synthetic oligonucleotide
cagucgcucguccagcauc

SEQ ID NO: 1286321 - RNA, 19 nt, Artificial Sequence
  Description of Artificial Sequence: Synthetic oligonucleotide
guauuauagcccaaaggau

SEQ ID NO: 1286322 - RNA, 19 nt, Artificial Sequence
  Description of Artificial Sequence: Synthetic oligonucleotide
gcauuucuggcccuguguc

SEQ ID NO: 1286323 - RNA, 19 nt, Artificial Sequence
  Description of Artificial Sequence: Synthetic oligonucleotide
gccauaagaucuagacugg

SEQ ID NO: 1286324 - RNA, 19 nt, Artificial Sequence
  Description of Artificial Sequence: Synthetic oligonucleotide
cacucggucagccaacgaa

SEQ ID NO: 1286325 - RNA, 19 nt, Artificial Sequence
  Description of Artificial Sequence: Synthetic oligonucleotide
cugcaguagagcugguaca

SEQ ID NO: 1286326 - RNA, 19 nt, Artificial Sequence
  Description of Artificial Sequence: Synthetic oligonucleotide
guguuugugauagccugca

SEQ ID NO: 1286327 - RNA, 19 nt, Artificial Sequence
  Description of Artificial Sequence: Synthetic oligonucleotide
ucgauggucaccgccugau

SEQ ID NO: 1286328 - RNA, 19 nt, Artificial Sequence
  Description of Artificial Sequence: Synthetic oligonucleotide
ggccuucugacuuggccag

SEQ ID NO: 1286329 - RNA, 19 nt, Artificial Sequence
  Description of Artificial Sequence: Synthetic oligonucleotide
ugguagguuggggucgaug

SEQ ID NO: 1286330 - RNA, 19 nt, Artificial Sequence
  Description of Artificial Sequence: Synthetic oligonucleotide
accgauccaccagggcugc

SEQ ID NO: 1286331 - RNA, 19 nt, Artificial Sequence
  Description of Artificial Sequence: Synthetic oligonucleotide
gcuuucguacugugugggg

SEQ ID NO: 1286332 - RNA, 19 nt, Artificial Sequence
  Description of Artificial Sequence: Synthetic oligonucleotide
gacgcccacacuugauaga

SEQ ID NO: 1286333 - RNA, 19 nt, Artificial Sequence
  Description of Artificial Sequence: Synthetic oligonucleotide
aacgaacgaagagcggguu

SEQ ID NO: 1286334 - RNA, 19 nt, Artificial Sequence
  Description of Artificial Sequence: Synthetic oligonucleotide
caaggcccuuugucaaaag

SEQ ID NO: 1286335 - RNA, 19 nt, Artificial Sequence
  Description of Artificial Sequence: Synthetic oligonucleotide
agauggguacuugggugug

SEQ ID NO: 1286336 - RNA, 19 nt, Artificial Sequence
  Description of Artificial Sequence: Synthetic oligonucleotide
uccgugccgccauaagauc

SEQ ID NO: 1286337 - RNA, 19 nt, Artificial Sequence
  Description of Artificial Sequence: Synthetic oligonucleotide
ccgaaaucggccgucaaug

SEQ ID NO: 1286338 - RNA, 19 nt, Artificial Sequence
  Description of Artificial Sequence: Synthetic oligonucleotide
guccaagacuaacucccca

SEQ ID NO: 1286339 - RNA, 19 nt, Artificial Sequence
  Description of Artificial Sequence: Synthetic oligonucleotide
auuucucuguagacgccca

SEQ ID NO: 1286340 - RNA, 19 nt, Artificial Sequence
  Description of Artificial Sequence: Synthetic oligonucleotide
gagcgcagugccuuuugaa

SEQ ID NO: 1286341 - RNA, 19 nt, Artificial Sequence
  Description of Artificial Sequence: Synthetic oligonucleotide
ggucagccaacgaacgaag

SEQ ID NO: 1286342 - RNA, 19 nt, Artificial Sequence
  Description of Artificial Sequence: Synthetic oligonucleotide
uacucucaggaaggcugag

SEQ ID NO: 1286343 - RNA, 19 nt, Artificial Sequence
  Description of Artificial Sequence: Synthetic oligonucleotide
uugugauagccugcagcaa

SEQ ID NO: 1286344 - RNA, 19 nt, Artificial Sequence
  Description of Artificial Sequence: Synthetic oligonucleotide
ugccgccauaagaucuaga

SEQ ID NO: 1286345 - RNA, 19 nt, Artificial Sequence
  Description of Artificial Sequence: Synthetic oligonucleotide
cucuguacucgccaggccu

SEQ ID NO: 1286346 - RNA, 19 nt, Artificial Sequence
  Description of Artificial Sequence: Synthetic oligonucleotide
ccaccaaguauauccggug

SEQ ID NO: 1286347 - RNA, 19 nt, Artificial Sequence
  Description of Artificial Sequence: Synthetic oligonucleotide
gcagagguagcggguaccg

SEQ ID NO: 1286348 - RNA, 19 nt, Artificial Sequence
  Description of Artificial Sequence: Synthetic oligonucleotide
cgaacgaagagcggguugg

SEQ ID NO: 1286349 - RNA, 19 nt, Artificial Sequence
  Description of Artificial Sequence: Synthetic oligonucleotide
gaugguagguuggggucga

SEQ ID NO: 1286350 - RNA, 19 nt, Artificial Sequence
  Description of Artificial Sequence: Synthetic oligonucleotide
agccgcuugcguuccacaa

SEQ ID NO: 1286351 - RNA, 19 nt, Artificial Sequence
  Description of Artificial Sequence: Synthetic oligonucleotide
ggucaucuagccgcuugcg

SEQ ID NO: 1286352 - RNA, 19 nt, Artificial Sequence
  Description of Artificial Sequence: Synthetic oligonucleotide
cccuuugucaaaagggcca

SEQ ID NO: 1286353 - RNA, 19 nt, Artificial Sequence
  Description of Artificial Sequence: Synthetic oligonucleotide
agccgcuguaacucucgga

SEQ ID NO: 1286354 - RNA, 19 nt, Artificial Sequence
  Description of Artificial Sequence: Synthetic oligonucleotide
ucgucccgccacucgguca

SEQ ID NO: 1286355 - RNA, 19 nt, Artificial Sequence
  Description of Artificial Sequence: Synthetic oligonucleotide
caagcggauccgugccgcc

SEQ ID NO: 1286356 - RNA, 19 nt, Artificial Sequence
  Description of Artificial Sequence: Synthetic oligonucleotide
uaccgucggagggagcgca

SEQ ID NO: 1286357 - RNA, 19 nt, Artificial Sequence
  Description of Artificial Sequence: Synthetic oligonucleotide
caagacuaacuccccaggu

SEQ ID NO: 1286358 - RNA, 19 nt, Artificial Sequence
  Description of Artificial Sequence: Synthetic oligonucleotide
ggcgaauacuucccguaca

SEQ ID NO: 1286359 - RNA, 19 nt, Artificial Sequence
  Description of Artificial Sequence: Synthetic oligonucleotide
ugcguuccacaaugugguc

SEQ ID NO: 1286360 - RNA, 19 nt, Artificial Sequence
  Description of Artificial Sequence: Synthetic oligonucleotide
gucggagggagcgcagugc

SEQ ID NO: 1286361 - RNA, 19 nt, Artificial Sequence
  Description of Artificial Sequence: Synthetic oligonucleotide
ccauaagaucuagacuggc

SEQ ID NO: 1286362 - RNA, 19 nt, Artificial Sequence
  Description of Artificial Sequence: Synthetic oligonucleotide
ggguaagaccucugcacuc

SEQ ID NO: 1286363 - RNA, 19 nt, Artificial Sequence
  Description of Artificial Sequence: Synthetic oligonucleotide
caccgccugaugcuagaug

SEQ ID NO: 1286364 - RNA, 19 nt, Artificial Sequence
  Description of Artificial Sequence: Synthetic oligonucleotide
gcccuuugucaaaagggcc

SEQ ID NO: 1286365 - RNA, 19 nt, Artificial Sequence
  Description of Artificial Sequence: Synthetic oligonucleotide
agguauaggucaggucagu

SEQ ID NO: 1286366 - RNA, 19 nt, Artificial Sequence
  Description of Artificial Sequence: Synthetic oligonucleotide
cagcauccggcagagccug

SEQ ID NO: 1286367 - RNA, 19 nt, Artificial Sequence
  Description of Artificial Sequence: Synthetic oligonucleotide
ugcgcagagguagcgggua

SEQ ID NO: 1286368 - RNA, 19 nt, Artificial Sequence
  Description of Artificial Sequence: Synthetic oligonucleotide
gcggguuggggcaaaccgg

SEQ ID NO: 1286369 - RNA, 19 nt, Artificial Sequence
  Description of Artificial Sequence: Synthetic oligonucleotide
ccacaaugugguccaagac

SEQ ID NO: 1286370 - RNA, 19 nt, Artificial Sequence
  Description of Artificial Sequence: Synthetic oligonucleotide
agcggauccgugccgccau

SEQ ID NO: 1286371 - RNA, 19 nt, Artificial Sequence
  Description of Artificial Sequence: Synthetic oligonucleotide
agagcggguuggggcaaac

SEQ ID NO: 1286372 - RNA, 19 nt, Artificial Sequence
  Description of Artificial Sequence: Synthetic oligonucleotide
gcccaaaggaucccaguuc

SEQ ID NO: 1286373 - RNA, 19 nt, Artificial Sequence
  Description of Artificial Sequence: Synthetic oligonucleotide
ucccgaaaucggccgucaa

SEQ ID NO: 1286374 - RNA, 19 nt, Artificial Sequence
  Description of Artificial Sequence: Synthetic oligonucleotide
acagcgcuucaggcggaac

SEQ ID NO: 1286375 - RNA, 19 nt, Artificial Sequence
  Description of Artificial Sequence: Synthetic oligonucleotide
acccauguuccuccaccaa

SEQ ID NO: 1286376 - RNA, 19 nt, Artificial Sequence
  Description of Artificial Sequence: Synthetic oligonucleotide
agcccuucagaaacccuga

SEQ ID NO: 1286377 - RNA, 19 nt, Artificial Sequence
  Description of Artificial Sequence: Synthetic oligonucleotide
gguuuugggccagcucuag

SEQ ID NO: 1286378 - RNA, 19 nt, Artificial Sequence
  Description of Artificial Sequence: Synthetic oligonucleotide
cuagccgcuugcguuccac

SEQ ID NO: 1286379 - RNA, 19 nt, Artificial Sequence
  Description of Artificial Sequence: Synthetic oligonucleotide
ccgcuugcguuccacaaug

SEQ ID NO: 1286380 - RNA, 19 nt, Artificial Sequence
  Description of Artificial Sequence: Synthetic oligonucleotide
uuuccaggggcggcugcgu

SEQ ID NO: 1286381 - RNA, 19 nt, Artificial Sequence
  Description of Artificial Sequence: Synthetic oligonucleotide
cagcacucuguacucgcca

SEQ ID NO: 1286382 - RNA, 19 nt, Artificial Sequence
  Description of Artificial Sequence: Synthetic oligonucleotide
uggugucagugcacuucuc

SEQ ID NO: 1286383 - RNA, 19 nt, Artificial Sequence
  Description of Artificial Sequence: Synthetic oligonucleotide
ggauccgugccgccauaag

SEQ ID NO: 1286384 - RNA, 19 nt, Artificial Sequence
  Description of Artificial Sequence: Synthetic oligonucleotide
ucggagcauuucuggcccu

SEQ ID NO: 1286385 - RNA, 19 nt, Artificial Sequence
  Description of Artificial Sequence: Synthetic oligonucleotide
gucaucuagccgcuugcgu

SEQ ID NO: 1286386 - RNA, 19 nt, Artificial Sequence
  Description of Artificial Sequence: Synthetic oligonucleotide
augguacgcuucacaaaga

SEQ ID NO: 1286387 - RNA, 19 nt, Artificial Sequence
  Description of Artificial Sequence: Synthetic oligonucleotide
gagcggguuggggcaaacc

SEQ ID NO: 1286388 - RNA, 19 nt, Artificial Sequence
  Description of Artificial Sequence: Synthetic oligonucleotide
caacgaacgaagagcgggu

SEQ ID NO: 1286389 - RNA, 19 nt, Artificial Sequence
  Description of Artificial Sequence: Synthetic oligonucleotide
gguccaagacuaacucccc

SEQ ID NO: 1286390 - RNA, 19 nt, Artificial Sequence
  Description of Artificial Sequence: Synthetic oligonucleotide
aggguauggcccugauaua

SEQ ID NO: 1286391 - RNA, 19 nt, Artificial Sequence
  Description of Artificial Sequence: Synthetic oligonucleotide
ggucgauggucaccgccug

SEQ ID NO: 1286392 - RNA, 19 nt, Artificial Sequence
  Description of Artificial Sequence: Synthetic oligonucleotide
cauccccugggguuuucca

SEQ ID NO: 1286393 - RNA, 19 nt, Artificial Sequence
  Description of Artificial Sequence: Synthetic oligonucleotide
agccugucuccgaagugcu

SEQ ID NO: 1286394 - RNA, 19 nt, Artificial Sequence
  Description of Artificial Sequence: Synthetic oligonucleotide
guaggguauggcccugaua

SEQ ID NO: 1286395 - RNA, 19 nt, Artificial Sequence
  Description of Artificial Sequence: Synthetic oligonucleotide
cuggugucagugcacuucu

SEQ ID NO: 1286396 - RNA, 19 nt, Artificial Sequence
  Description of Artificial Sequence: Synthetic oligonucleotide
gcccaagcggauccgugcc

SEQ ID NO: 1286397 - RNA, 19 nt, Artificial Sequence
  Description of Artificial Sequence: Synthetic oligonucleotide
ugcugcugcacaggucauc

SEQ ID NO: 1286398 - RNA, 19 nt, Artificial Sequence
  Description of Artificial Sequence: Synthetic oligonucleotide
gucagccaacgaacgaaga

SEQ ID NO: 1286399 - RNA, 19 nt, Artificial Sequence
  Description of Artificial Sequence: Synthetic oligonucleotide
gccgggcgaauacuucccg

SEQ ID NO: 1286400 - RNA, 19 nt, Artificial Sequence
  Description of Artificial Sequence: Synthetic oligonucleotide
gucaccgccugaugcuaga

SEQ ID NO: 1286401 - RNA, 19 nt, Artificial Sequence
  Description of Artificial Sequence: Synthetic oligonucleotide
cacacgaagucaccaacau

SEQ ID NO: 1286402 - RNA, 19 nt, Artificial Sequence
  Description of Artificial Sequence: Synthetic oligonucleotide
cggccgucaaugaugcugc

SEQ ID NO: 1286403 - RNA, 19 nt, Artificial Sequence
  Description of Artificial Sequence: Synthetic oligonucleotide
gacugaggguaagaccucu

SEQ ID NO: 1286404 - RNA, 19 nt, Artificial Sequence
  Description of Artificial Sequence: Synthetic oligonucleotide
ugcguaggguauggcccug

SEQ ID NO: 1286405 - RNA, 19 nt, Artificial Sequence
  Description of Artificial Sequence: Synthetic oligonucleotide
aaagcgcguguggcgcccu

SEQ ID NO: 1286406 - RNA, 19 nt, Artificial Sequence
  Description of Artificial Sequence: Synthetic oligonucleotide
guaagaccucugcacucua

SEQ ID NO: 1286407 - RNA, 19 nt, Artificial Sequence
  Description of Artificial Sequence: Synthetic oligonucleotide
auccggugccccaggccac

SEQ ID NO: 1286408 - RNA, 19 nt, Artificial Sequence
  Description of Artificial Sequence: Synthetic oligonucleotide
uggcccugauauagucuuu

SEQ ID NO: 1286409 - RNA, 19 nt, Artificial Sequence
  Description of Artificial Sequence: Synthetic oligonucleotide
gucgauggucaccgccuga

SEQ ID NO: 1286410 - RNA, 19 nt, Artificial Sequence
  Description of Artificial Sequence: Synthetic oligonucleotide
ucccgccacucggucagcc

SEQ ID NO: 1286411 - RNA, 19 nt, Artificial Sequence
  Description of Artificial Sequence: Synthetic oligonucleotide
caguggacuguggcugcag

SEQ ID NO: 1286412 - RNA, 19 nt, Artificial Sequence
  Description of Artificial Sequence: Synthetic oligonucleotide
cucgucccgccacucgguc

SEQ ID NO: 1286413 - RNA, 19 nt, Artificial Sequence
  Description of Artificial Sequence: Synthetic oligonucleotide
ggcccugauauagucuuuc

SEQ ID NO: 1286414 - RNA, 19 nt, Artificial Sequence
  Description of Artificial Sequence: Synthetic oligonucleotide
gugccgccauaagaucuag

SEQ ID NO: 1286415 - RNA, 19 nt, Artificial Sequence
  Description of Artificial Sequence: Synthetic oligonucleotide
ucaccgccugaugcuagau

SEQ ID NO: 1286416 - RNA, 19 nt, Artificial Sequence
  Description of Artificial Sequence: Synthetic oligonucleotide
gccaacgaacgaagagcgg

SEQ ID NO: 1286417 - RNA, 19 nt, Artificial Sequence
  Description of Artificial Sequence: Synthetic oligonucleotide
uggggucgauggucaccgc

SEQ ID NO: 1286418 - RNA, 19 nt, Artificial Sequence
  Description of Artificial Sequence: Synthetic oligonucleotide
gggaccccgacaguucagc

SEQ ID NO: 1286419 - RNA, 19 nt, Artificial Sequence
  Description of Artificial Sequence: Synthetic oligonucleotide
ggacagacccauguuccuc

SEQ ID NO: 1286420 - RNA, 19 nt, Artificial Sequence
  Description of Artificial Sequence: Synthetic oligonucleotide
gaggugaagauggguacuu

SEQ ID NO: 1286421 - RNA, 19 nt, Artificial Sequence
  Description of Artificial Sequence: Synthetic oligonucleotide
aaccggcagugggcgcuuc

SEQ ID NO: 1286422 - RNA, 19 nt, Artificial Sequence
  Description of Artificial Sequence: Synthetic oligonucleotide
auagucuuucaaggcccuu

SEQ ID NO: 1286423 - RNA, 19 nt, Artificial Sequence
  Description of Artificial Sequence: Synthetic oligonucleotide
gccacucggucagccaacg

SEQ ID NO: 1286424 - RNA, 19 nt, Artificial Sequence
  Description of Artificial Sequence: Synthetic oligonucleotide
ccaagcggauccgugccgc

SEQ ID NO: 1286425 - RNA, 19 nt, Artificial Sequence
  Description of Artificial Sequence: Synthetic oligonucleotide
gggagcgcagugccuuuug

SEQ ID NO: 1286426 - RNA, 19 nt, Artificial Sequence
  Description of Artificial Sequence: Synthetic oligonucleotide
guaccgucggagggagcgc

SEQ ID NO: 1286427 - RNA, 19 nt, Artificial Sequence
  Description of Artificial Sequence: Synthetic oligonucleotide
gaccuggguguuugugaua

SEQ ID NO: 1286428 - RNA, 19 nt, Artificial Sequence
  Description of Artificial Sequence: Synthetic oligonucleotide
uuccuccaccaaguauauc

SEQ ID NO: 1286429 - RNA, 19 nt, Artificial Sequence
  Description of Artificial Sequence: Synthetic oligonucleotide
agguagccagcugacucuu

SEQ ID NO: 1286430 - RNA, 19 nt, Artificial Sequence
  Description of Artificial Sequence: Synthetic oligonucleotide
cccaagcggauccgugccg

SEQ ID NO: 1286431 - RNA, 19 nt, Artificial Sequence
  Description of Artificial Sequence: Synthetic oligonucleotide
gcggcugcguaggguaugg

SEQ ID NO: 1286432 - RNA, 19 nt, Artificial Sequence
  Description of Artificial Sequence: Synthetic oligonucleotide
cugcguaggguauggcccu

SEQ ID NO: 1286433 - RNA, 19 nt, Artificial Sequence
  Description of Artificial Sequence: Synthetic oligonucleotide
aaaccggcagugggcgcuu

SEQ ID NO: 1286434 - RNA, 19 nt, Artificial Sequence
  Description of Artificial Sequence: Synthetic oligonucleotide
ggucaccgccugaugcuag

SEQ ID NO: 1286435 - RNA, 19 nt, Artificial Sequence
  Description of Artificial Sequence: Synthetic oligonucleotide
agguuuugggccagcucua

SEQ ID NO: 1286436 - RNA, 19 nt, Artificial Sequence
  Description of Artificial Sequence: Synthetic oligonucleotide
cccugauauagucuuucaa

SEQ ID NO: 1286437 - RNA, 19 nt, Artificial Sequence
  Description of Artificial Sequence: Synthetic oligonucleotide
gcaaaccggcagugggcgc

SEQ ID NO: 1286438 - RNA, 19 nt, Artificial Sequence
  Description of Artificial Sequence: Synthetic oligonucleotide
gauggguacuugggugugu

SEQ ID NO: 1286439 - RNA, 19 nt, Artificial Sequence
  Description of Artificial Sequence: Synthetic oligonucleotide
ggcgcccucugcuggcugc

SEQ ID NO: 1286440 - RNA, 19 nt, Artificial Sequence
  Description of Artificial Sequence: Synthetic oligonucleotide
gccgucaaugaugcugcug

SEQ ID NO: 1286441 - RNA, 19 nt, Artificial Sequence
  Description of Artificial Sequence: Synthetic oligonucleotide
caaaccggcagugggcgcu

SEQ ID NO: 1286442 - RNA, 19 nt, Artificial Sequence
  Description of Artificial Sequence: Synthetic oligonucleotide
ccauguuccuccaccaagu

SEQ ID NO: 1286443 - RNA, 19 nt, Artificial Sequence
  Description of Artificial Sequence: Synthetic oligonucleotide
ggaccccgacaguucagca

SEQ ID NO: 1286444 - RNA, 19 nt, Artificial Sequence
  Description of Artificial Sequence: Synthetic oligonucleotide
gugcacuucucuccaggau

SEQ ID NO: 1286445 - RNA, 19 nt, Artificial Sequence
  Description of Artificial Sequence: Synthetic oligonucleotide
uucccgcugcgcagaggua

SEQ ID NO: 1286446 - RNA, 19 nt, Artificial Sequence
  Description of Artificial Sequence: Synthetic oligonucleotide
ggacaacaccuucacuggu

SEQ ID NO: 1286447 - RNA, 19 nt, Artificial Sequence
  Description of Artificial Sequence: Synthetic oligonucleotide
aucggccgucaaugaugcu

SEQ ID NO: 1286448 - RNA, 19 nt, Artificial Sequence
  Description of Artificial Sequence: Synthetic oligonucleotide
ccugagauugggaccccga

SEQ ID NO: 1286449 - RNA, 19 nt, Artificial Sequence
  Description of Artificial Sequence: Synthetic oligonucleotide
cgucccgccacucggucag

SEQ ID NO: 1286450 - RNA, 19 nt, Artificial Sequence
  Description of Artificial Sequence: Synthetic oligonucleotide
guacuguguggggcacaug

SEQ ID NO: 1286451 - RNA, 19 nt, Artificial Sequence
  Description of Artificial Sequence: Synthetic oligonucleotide
agcugccgggcgaauacuu

SEQ ID NO: 1286452 - RNA, 19 nt, Artificial Sequence
  Description of Artificial Sequence: Synthetic oligonucleotide
uggcucuuuuggagcccuu

SEQ ID NO: 1286453 - RNA, 19 nt, Artificial Sequence
  Description of Artificial Sequence: Synthetic oligonucleotide
gcuagccuuggcagaggug

SEQ ID NO: 1286454 - RNA, 19 nt, Artificial Sequence
  Description of Artificial Sequence: Synthetic oligonucleotide
guuccuccaccaaguauau

SEQ ID NO: 1286455 - RNA, 19 nt, Artificial Sequence
  Description of Artificial Sequence: Synthetic oligonucleotide
cuccgaagugcugaaggau

SEQ ID NO: 1286456 - RNA, 19 nt, Artificial Sequence
  Description of Artificial Sequence: Synthetic oligonucleotide
cccgcugcgcagagguagc

SEQ ID NO: 1286457 - RNA, 19 nt, Artificial Sequence
  Description of Artificial Sequence: Synthetic oligonucleotide
cucccgaaaucggccguca

SEQ ID NO: 1286458 - RNA, 19 nt, Artificial Sequence
  Description of Artificial Sequence: Synthetic oligonucleotide
ggugaggagugagcagaga

SEQ ID NO: 1286459 - RNA, 19 nt, Artificial Sequence
  Description of Artificial Sequence: Synthetic oligonucleotide
ucccgacccucugguuucu

SEQ ID NO: 1286460 - RNA, 19 nt, Artificial Sequence
  Description of Artificial Sequence: Synthetic oligonucleotide
ggaucccaguucaaaggcu

SEQ ID NO: 1286461 - RNA, 19 nt, Artificial Sequence
  Description of Artificial Sequence: Synthetic oligonucleotide
gacuaacuccccaggucuu

SEQ ID NO: 1286462 - RNA, 19 nt, Artificial Sequence
  Description of Artificial Sequence: Synthetic oligonucleotide
guagacgcccacacuugau

SEQ ID NO: 1286463 - RNA, 19 nt, Artificial Sequence
  Description of Artificial Sequence: Synthetic oligonucleotide
gcugccgggcgaauacuuc

SEQ ID NO: 1286464 - RNA, 19 nt, Artificial Sequence
  Description of Artificial Sequence: Synthetic oligonucleotide
cccugagauugggaccccg

SEQ ID NO: 1286465 - RNA, 19 nt, Artificial Sequence
  Description of Artificial Sequence: Synthetic oligonucleotide
gcgcagagguagcggguac

SEQ ID NO: 1286466 - RNA, 19 nt, Artificial Sequence
  Description of Artificial Sequence: Synthetic oligonucleotide
guacagacugggccuuguu

SEQ ID NO: 1286467 - RNA, 19 nt, Artificial Sequence
  Description of Artificial Sequence: Synthetic oligonucleotide
ggcggcugcguaggguaug

SEQ ID NO: 1286468 - RNA, 19 nt, Artificial Sequence
  Description of Artificial Sequence: Synthetic oligonucleotide
agggagcgcagugccuuuu

SEQ ID NO: 1286469 - RNA, 19 nt, Artificial Sequence
  Description of Artificial Sequence: Synthetic oligonucleotide
caaugaccuggguguuugu

SEQ ID NO: 1286470 - RNA, 19 nt, Artificial Sequence
  Description of Artificial Sequence: Synthetic oligonucleotide
cuggcucuuuuggagcccu

SEQ ID NO: 1286471 - RNA, 19 nt, Artificial Sequence
  Description of Artificial Sequence: Synthetic oligonucleotide
gcgcguguggcgcccucug

SEQ ID NO: 1286472 - RNA, 19 nt, Artificial Sequence
  Description of Artificial Sequence: Synthetic oligonucleotide
ccgccauaagaucuagacu

SEQ ID NO: 1286473 - RNA, 19 nt, Artificial Sequence
  Description of Artificial Sequence: Synthetic oligonucleotide
gcggguaccgucggaggga

SEQ ID NO: 1286474 - RNA, 19 nt, Artificial Sequence
  Description of Artificial Sequence: Synthetic oligonucleotide
gcguguggcgcccucugcu

SEQ ID NO: 1286475 - RNA, 19 nt, Artificial Sequence
  Description of Artificial Sequence: Synthetic oligonucleotide
gcauccggcagagccuguc

SEQ ID NO: 1286476 - RNA, 19 nt, Artificial Sequence
  Description of Artificial Sequence: Synthetic oligonucleotide
ccgugccgccauaagaucu

SEQ ID NO: 1286477 - RNA, 19 nt, Artificial Sequence
  Description of Artificial Sequence: Synthetic oligonucleotide
cgcccacacuugauagagc

SEQ ID NO: 1286478 - RNA, 19 nt, Artificial Sequence
  Description of Artificial Sequence: Synthetic oligonucleotide
cgucggagggagcgcagug

SEQ ID NO: 1286479 - RNA, 19 nt, Artificial Sequence
  Description of Artificial Sequence: Synthetic oligonucleotide
gcucccgaaaucggccguc

SEQ ID NO: 1286480 - RNA, 19 nt, Artificial Sequence
  Description of Artificial Sequence: Synthetic oligonucleotide
cugccucgucccgccacuc

SEQ ID NO: 1286481 - RNA, 19 nt, Artificial Sequence
  Description of Artificial Sequence: Synthetic oligonucleotide
ccugcacuacccacacgaa

SEQ ID NO: 1286482 - RNA, 19 nt, Artificial Sequence
  Description of Artificial Sequence: Synthetic oligonucleotide
gagggagcgcagugccuuu

SEQ ID NO: 1286483 - RNA, 19 nt, Artificial Sequence
  Description of Artificial Sequence: Synthetic oligonucleotide
cgauggucaccgccugaug

SEQ ID NO: 1286484 - RNA, 19 nt, Artificial Sequence
  Description of Artificial Sequence: Synthetic oligonucleotide
gggccuggucuccugcacu

SEQ ID NO: 1286485 - RNA, 19 nt, Artificial Sequence
  Description of Artificial Sequence: Synthetic oligonucleotide
agcauccggcagagccugu

SEQ ID NO: 1286486 - RNA, 19 nt, Artificial Sequence
  Description of Artificial Sequence: Synthetic oligonucleotide
cgcugcgcagagguagcgg

SEQ ID NO: 1286487 - RNA, 19 nt, Artificial Sequence
  Description of Artificial Sequence: Synthetic oligonucleotide
cccgacaguucagcagcug

SEQ ID NO: 1286488 - RNA, 19 nt, Artificial Sequence
  Description of Artificial Sequence: Synthetic oligonucleotide
cggaacuucugcucccgaa

SEQ ID NO: 1286489 - RNA, 19 nt, Artificial Sequence
  Description of Artificial Sequence: Synthetic oligonucleotide
ccgcugcgcagagguagcg

SEQ ID NO: 1286490 - RNA, 19 nt, Artificial Sequence
  Description of Artificial Sequence: Synthetic oligonucleotide
ggagcauuucuggcccugu

SEQ ID NO: 1286491 - RNA, 19 nt, Artificial Sequence
  Description of Artificial Sequence: Synthetic oligonucleotide
cgggcgaauacuucccgua

SEQ ID NO: 1286492 - RNA, 19 nt, Artificial Sequence
  Description of Artificial Sequence: Synthetic oligonucleotide
cacagcgcuucaggcggaa

SEQ ID NO: 1286493 - RNA, 19 nt, Artificial Sequence
  Description of Artificial Sequence: Synthetic oligonucleotide
gccgcuugcguuccacaau

SEQ ID NO: 1286494 - RNA, 19 nt, Artificial Sequence
  Description of Artificial Sequence: Synthetic oligonucleotide
ggagcccuucagaaacccu

SEQ ID NO: 1286495 - RNA, 19 nt, Artificial Sequence
  Description of Artificial Sequence: Synthetic oligonucleotide
cagagguagcggguaccgu

SEQ ID NO: 1286496 - RNA, 19 nt, Artificial Sequence
  Description of Artificial Sequence: Synthetic oligonucleotide
cgugccgccauaagaucua

SEQ ID NO: 1286497 - RNA, 19 nt, Artificial Sequence
  Description of Artificial Sequence: Synthetic oligonucleotide
cccgaaaucggccgucaau

SEQ ID NO: 1286498 - RNA, 19 nt, Artificial Sequence
  Description of Artificial Sequence: Synthetic oligonucleotide
gucccgccacucggucagc

SEQ ID NO: 1286499 - RNA, 19 nt, Artificial Sequence
  Description of Artificial Sequence: Synthetic oligonucleotide
cgcguguggcgcccucugc

SEQ ID NO: 1286500 - RNA, 19 nt, Artificial Sequence
  Description of Artificial Sequence: Synthetic oligonucleotide
cggagcauuucuggcccug

SEQ ID NO: 1286501 - RNA, 19 nt, Artificial Sequence
  Description of Artificial Sequence: Synthetic oligonucleotide
gcguaggguauggcccuga

SEQ ID NO: 1286502 - RNA, 19 nt, Artificial Sequence
  Description of Artificial Sequence: Synthetic oligonucleotide
ccguacagacugggccuug

SEQ ID NO: 1286503 - RNA, 19 nt, Artificial Sequence
  Description of Artificial Sequence: Synthetic oligonucleotide
cacuucucuccaggauggu

SEQ ID NO: 1286504 - RNA, 19 nt, Artificial Sequence
  Description of Artificial Sequence: Synthetic oligonucleotide
ggguaccgucggagggagc

SEQ ID NO: 1286505 - RNA, 19 nt, Artificial Sequence
  Description of Artificial Sequence: Synthetic oligonucleotide
gugucccgacccucugguu

SEQ ID NO: 1286506 - RNA, 19 nt, Artificial Sequence
  Description of Artificial Sequence: Synthetic oligonucleotide
cagcugccgggcgaauacu

SEQ ID NO: 1286507 - RNA, 19 nt, Artificial Sequence
  Description of Artificial Sequence: Synthetic oligonucleotide
ccgggcgaauacuucccgu

SEQ ID NO: 1286508 - RNA, 19 nt, Artificial Sequence
  Description of Artificial Sequence: Synthetic oligonucleotide
ccacagcgcuucaggcgga

SEQ ID NO: 1286509 - RNA, 19 nt, Artificial Sequence
  Description of Artificial Sequence: Synthetic oligonucleotide
ggccgucaaugaugcugcu

SEQ ID NO: 1286510 - RNA, 19 nt, Artificial Sequence
  Description of Artificial Sequence: Synthetic oligonucleotide
ccgccugaugcuagaugcu

SEQ ID NO: 1286511 - RNA, 19 nt, Artificial Sequence
  Description of Artificial Sequence: Synthetic oligonucleotide
ccggugccccaggccacag

SEQ ID NO: 1286512 - RNA, 19 nt, Artificial Sequence
  Description of Artificial Sequence: Synthetic oligonucleotide
ccucgucccgccacucggu

SEQ ID NO: 1286513 - RNA, 19 nt, Artificial Sequence
  Description of Artificial Sequence: Synthetic oligonucleotide
cguaggguauggcccugau

SEQ ID NO: 1286514 - RNA, 19 nt, Artificial Sequence
  Description of Artificial Sequence: Synthetic oligonucleotide
cggauccgugccgccauaa

SEQ ID NO: 1286515 - RNA, 19 nt, Artificial Sequence
  Description of Artificial Sequence: Synthetic oligonucleotide
gggcggcugcguaggguau

SEQ ID NO: 1286516 - RNA, 19 nt, Artificial Sequence
  Description of Artificial Sequence: Synthetic oligonucleotide
cccguacagacugggccuu

SEQ ID NO: 1286517 - RNA, 19 nt, Artificial Sequence
  Description of Artificial Sequence: Synthetic oligonucleotide
ccgucggagggagcgcagu

SEQ ID NO: 1286518 - RNA, 19 nt, Artificial Sequence
  Description of Artificial Sequence: Synthetic oligonucleotide
ugaaauugaagacagaagg

SEQ ID NO: 1286519 - RNA, 19 nt, Artificial Sequence
  Description of Artificial Sequence: Synthetic oligonucleotide
uuugcuauagccugggucg

SEQ ID NO: 1286520 - RNA, 19 nt, Artificial Sequence
  Description of Artificial Sequence: Synthetic oligonucleotide
aaaacugccugccaaccgc

SEQ ID NO: 1286521 - RNA, 19 nt, Artificial Sequence
  Description of Artificial Sequence: Synthetic oligonucleotide
aaguagacggcauuggagg

SEQ ID NO: 1286522 - RNA, 19 nt, Artificial Sequence
  Description of Artificial Sequence: Synthetic oligonucleotide
uguucauuaagcuggaagc

SEQ ID NO: 1286523 - RNA, 19 nt, Artificial Sequence
  Description of Artificial Sequence: Synthetic oligonucleotide
agcacgaauacaaacaugg

SEQ ID NO: 1286524 - RNA, 19 nt, Artificial Sequence
  Description of Artificial Sequence: Synthetic oligonucleotide
acgaauacaaacauggaag

SEQ ID NO: 1286525 - RNA, 19 nt, Artificial Sequence
  Description of Artificial Sequence: Synthetic oligonucleotide
gagggguugagcucaaugg

SEQ ID NO: 1286526 - RNA, 19 nt, Artificial Sequence
  Description of Artificial Sequence: Synthetic oligonucleotide
aguuuugaggcgcucugcc

SEQ ID NO: 1286527 - RNA, 19 nt, Artificial Sequence
  Description of Artificial Sequence: Synthetic oligonucleotide
ugagaauggagccggacug

SEQ ID NO: 1286528 - RNA, 19 nt, Artificial Sequence
  Description of Artificial Sequence: Synthetic oligonucleotide
ucaaauaucucuggcagug

SEQ ID NO: 1286529 - RNA, 19 nt, Artificial Sequence
  Description of Artificial Sequence: Synthetic oligonucleotide
ugcuuauucaggcuggaga

SEQ ID NO: 1286530 - RNA, 19 nt, Artificial Sequence
  Description of Artificial Sequence: Synthetic oligonucleotide
uugagguuggacuuauaag

SEQ ID NO: 1286531 - RNA, 19 nt, Artificial Sequence
  Description of Artificial Sequence: Synthetic oligonucleotide
aggcuaaaacaccaggagg

SEQ ID NO: 1286532 - RNA, 19 nt, Artificial Sequence
  Description of Artificial Sequence: Synthetic oligonucleotide
agaugagcgucacucuugc

SEQ ID NO: 1286533 - RNA, 19 nt, Artificial Sequence
  Description of Artificial Sequence: Synthetic oligonucleotide
uggguuguucagcaggccg

SEQ ID NO: 1286534 - RNA, 19 nt, Artificial Sequence
  Description of Artificial Sequence: Synthetic oligonucleotide
uuaacaugcagguccaguc

SEQ ID NO: 1286535 - RNA, 19 nt, Artificial Sequence
  Description of Artificial Sequence: Synthetic oligonucleotide
agagauguacagcugccuc

SEQ ID NO: 1286536 - RNA, 19 nt, Artificial Sequence
  Description of Artificial Sequence: Synthetic oligonucleotide
aauugaagacagaagggca

SEQ ID NO: 1286537 - RNA, 19 nt, Artificial Sequence
  Description of Artificial Sequence: Synthetic oligonucleotide
caagugugggcgcaaaacg

SEQ ID NO: 1286538 - RNA, 19 nt, Artificial Sequence
  Description of Artificial Sequence: Synthetic oligonucleotide
agaucgaugggaucaccac

SEQ ID NO: 1286539 - RNA, 19 nt, Artificial Sequence
  Description of Artificial Sequence: Synthetic oligonucleotide
gagaucaugccugacauca

SEQ ID NO: 1286540 - RNA, 19 nt, Artificial Sequence
  Description of Artificial Sequence: Synthetic oligonucleotide
aagacagaagggcaaguau

SEQ ID NO: 1286541 - RNA, 19 nt, Artificial Sequence
  Description of Artificial Sequence: Synthetic oligonucleotide
gaagguggcguccugucag

SEQ ID NO: 1286542 - RNA, 19 nt, Artificial Sequence
  Description of Artificial Sequence: Synthetic oligonucleotide
ugagcgucacucuugcugc

SEQ ID NO: 1286543 - RNA, 19 nt, Artificial Sequence
  Description of Artificial Sequence: Synthetic oligonucleotide
uaaaacaccaggaggccaa

SEQ ID NO: 1286544 - RNA, 19 nt, Artificial Sequence
  Description of Artificial Sequence: Synthetic oligonucleotide
aaaauuaggacuggcugau

SEQ ID NO: 1286545 - RNA, 19 nt, Artificial Sequence
  Description of Artificial Sequence: Synthetic oligonucleotide
cauagugaugaaguguggg

SEQ ID NO: 1286546 - RNA, 19 nt, Artificial Sequence
  Description of Artificial Sequence: Synthetic oligonucleotide
ugaagagaaacagcggaug

SEQ ID NO: 1286547 - RNA, 19 nt, Artificial Sequence
  Description of Artificial Sequence: Synthetic oligonucleotide
gaaggagacacggacgucc

SEQ ID NO: 1286548 - RNA, 19 nt, Artificial Sequence
  Description of Artificial Sequence: Synthetic oligonucleotide
aaagaucgaugggaucacc

SEQ ID NO: 1286549 - RNA, 19 nt, Artificial Sequence
  Description of Artificial Sequence: Synthetic oligonucleotide
uccgucuuaacaugcaggu

SEQ ID NO: 1286550 - RNA, 19 nt, Artificial Sequence
  Description of Artificial Sequence: Synthetic oligonucleotide
uguaguaagccacggcuuc

SEQ ID NO: 1286551 - RNA, 19 nt, Artificial Sequence
  Description of Artificial Sequence: Synthetic oligonucleotide
guuacaaaaguagacggca

SEQ ID NO: 1286552 - RNA, 19 nt, Artificial Sequence
  Description of Artificial Sequence: Synthetic oligonucleotide
cugcacacaaaauuaggac

SEQ ID NO: 1286553 - RNA, 19 nt, Artificial Sequence
  Description of Artificial Sequence: Synthetic oligonucleotide
gaucaugccugacaucagc

SEQ ID NO: 1286554 - RNA, 19 nt, Artificial Sequence
  Description of Artificial Sequence: Synthetic oligonucleotide
aggaccagcaacccaagug

SEQ ID NO: 1286555 - RNA, 19 nt, Artificial Sequence
  Description of Artificial Sequence: Synthetic oligonucleotide
agcucaauggccuugccau

SEQ ID NO: 1286556 - RNA, 19 nt, Artificial Sequence
  Description of Artificial Sequence: Synthetic oligonucleotide
acaaaaguagacggcauug

SEQ ID NO: 1286557 - RNA, 19 nt, Artificial Sequence
  Description of Artificial Sequence: Synthetic oligonucleotide
ucgaccgaagccccgaccc

SEQ ID NO: 1286558 - RNA, 19 nt, Artificial Sequence
  Description of Artificial Sequence: Synthetic oligonucleotide
agagcuaggucacuguccu

SEQ ID NO: 1286559 - RNA, 19 nt, Artificial Sequence
  Description of Artificial Sequence: Synthetic oligonucleotide
caaaauuaggacuggcuga

SEQ ID NO: 1286560 - RNA, 19 nt, Artificial Sequence
  Description of Artificial Sequence: Synthetic oligonucleotide
ucucagucgaccgaagccc

SEQ ID NO: 1286561 - RNA, 19 nt, Artificial Sequence
  Description of Artificial Sequence: Synthetic oligonucleotide
cuuugcuauagccuggguc

SEQ ID NO: 1286562 - RNA, 19 nt, Artificial Sequence
  Description of Artificial Sequence: Synthetic oligonucleotide
aaagcccaccauuccguag

SEQ ID NO: 1286563 - RNA, 19 nt, Artificial Sequence
  Description of Artificial Sequence: Synthetic oligonucleotide
aggaucucucagucgaccg

SEQ ID NO: 1286564 - RNA, 19 nt, Artificial Sequence
  Description of Artificial Sequence: Synthetic oligonucleotide
ugugggcgcaaaacgcugg

SEQ ID NO: 1286565 - RNA, 19 nt, Artificial Sequence
  Description of Artificial Sequence: Synthetic oligonucleotide
accgcagacgucgaauucc

SEQ ID NO: 1286566 - RNA, 19 nt, Artificial Sequence
  Description of Artificial Sequence: Synthetic oligonucleotide
uacaaacauggaagugggg

SEQ ID NO: 1286567 - RNA, 19 nt, Artificial Sequence
  Description of Artificial Sequence: Synthetic oligonucleotide
aaccgcagacgucgaauuc

SEQ ID NO: 1286568 - RNA, 19 nt, Artificial Sequence
  Description of Artificial Sequence: Synthetic oligonucleotide
ggcuaaaacaccaggaggc

SEQ ID NO: 1286569 - RNA, 19 nt, Artificial Sequence
  Description of Artificial Sequence: Synthetic oligonucleotide
cucauuaccuucaguuuug

SEQ ID NO: 1286570 - RNA, 19 nt, Artificial Sequence
  Description of Artificial Sequence: Synthetic oligonucleotide
uaagccacggcuucggcau

SEQ ID NO: 1286571 - RNA, 19 nt, Artificial Sequence
  Description of Artificial Sequence: Synthetic oligonucleotide
uucaaauaucucuggcagu

SEQ ID NO: 1286572 - RNA, 19 nt, Artificial Sequence
  Description of Artificial Sequence: Synthetic oligonucleotide
cucucagucgaccgaagcc

SEQ ID NO: 1286573 - RNA, 19 nt, Artificial Sequence
  Description of Artificial Sequence: Synthetic oligonucleotide
caaaacugccugccaaccg

SEQ ID NO: 1286574 - RNA, 19 nt, Artificial Sequence
  Description of Artificial Sequence: Synthetic oligonucleotide
agcccgacggagaaaaggc

SEQ ID NO: 1286575 - RNA, 19 nt, Artificial Sequence
  Description of Artificial Sequence: Synthetic oligonucleotide
aaguaugggccaggguggc

SEQ ID NO: 1286576 - RNA, 19 nt, Artificial Sequence
  Description of Artificial Sequence: Synthetic oligonucleotide
ugucagagccccuuggguc

SEQ ID NO: 1286577 - RNA, 19 nt, Artificial Sequence
  Description of Artificial Sequence: Synthetic oligonucleotide
gaugaguccgucuuaacau

SEQ ID NO: 1286578 - RNA, 19 nt, Artificial Sequence
  Description of Artificial Sequence: Synthetic oligonucleotide
uagcuggccgugcagaaac

SEQ ID NO: 1286579 - RNA, 19 nt, Artificial Sequence
  Description of Artificial Sequence: Synthetic oligonucleotide
agagaaacagcggaugagu

SEQ ID NO: 1286580 - RNA, 19 nt, Artificial Sequence
  Description of Artificial Sequence: Synthetic oligonucleotide
uacaaaaguagacggcauu

SEQ ID NO: 1286581 - RNA, 19 nt, Artificial Sequence
  Description of Artificial Sequence: Synthetic oligonucleotide
agaaacuggaugauggcgu

SEQ ID NO: 1286582 - RNA, 19 nt, Artificial Sequence
  Description of Artificial Sequence: Synthetic oligonucleotide
ggaggccaaagaucgaugg

SEQ ID NO: 1286583 - RNA, 19 nt, Artificial Sequence
  Description of Artificial Sequence: Synthetic oligonucleotide
uuaagcuggaagccauagu

SEQ ID NO: 1286584 - RNA, 19 nt, Artificial Sequence
  Description of Artificial Sequence: Synthetic oligonucleotide
aguaagccacggcuucggc

SEQ ID NO: 1286585 - RNA, 19 nt, Artificial Sequence
  Description of Artificial Sequence: Synthetic oligonucleotide
gaucaccacacagaugagc

SEQ ID NO: 1286586 - RNA, 19 nt, Artificial Sequence
  Description of Artificial Sequence: Synthetic oligonucleotide
cgucuuaacaugcaggucc

SEQ ID NO: 1286587 - RNA, 19 nt, Artificial Sequence
  Description of Artificial Sequence: Synthetic oligonucleotide
augaguccgucuuaacaug

SEQ ID NO: 1286588 - RNA, 19 nt, Artificial Sequence
  Description of Artificial Sequence: Synthetic oligonucleotide
aguccgucuuaacaugcag

SEQ ID NO: 1286589 - RNA, 19 nt, Artificial Sequence
  Description of Artificial Sequence: Synthetic oligonucleotide
accauuccguagcuggccg

SEQ ID NO: 1286590 - RNA, 19 nt, Artificial Sequence
  Description of Artificial Sequence: Synthetic oligonucleotide
cugccaaccgcagacgucg

SEQ ID NO: 1286591 - RNA, 19 nt, Artificial Sequence
  Description of Artificial Sequence: Synthetic oligonucleotide
agguuggacuuauaagugu

SEQ ID NO: 1286592 - RNA, 19 nt, Artificial Sequence
  Description of Artificial Sequence: Synthetic oligonucleotide
gaucgaugggaucaccaca

SEQ ID NO: 1286593 - RNA, 19 nt, Artificial Sequence
  Description of Artificial Sequence: Synthetic oligonucleotide
cuauagccugggucgaugc

SEQ ID NO: 1286594 - RNA, 19 nt, Artificial Sequence
  Description of Artificial Sequence: Synthetic oligonucleotide
cacgaauacaaacauggaa

SEQ ID NO: 1286595 - RNA, 19 nt, Artificial Sequence
  Description of Artificial Sequence: Synthetic oligonucleotide
cagagcuaggucacugucc

SEQ ID NO: 1286596 - RNA, 19 nt, Artificial Sequence
  Description of Artificial Sequence: Synthetic oligonucleotide
aagaucgaugggaucacca

SEQ ID NO: 1286597 - RNA, 19 nt, Artificial Sequence
  Description of Artificial Sequence: Synthetic oligonucleotide
uauagccugggucgaugcc

SEQ ID NO: 1286598 - RNA, 19 nt, Artificial Sequence
  Description of Artificial Sequence: Synthetic oligonucleotide
augucgaggcugcugaggu

SEQ ID NO: 1286599 - RNA, 19 nt, Artificial Sequence
  Description of Artificial Sequence: Synthetic oligonucleotide
gaaguguggguuguucagc

SEQ ID NO: 1286600 - RNA, 19 nt, Artificial Sequence
  Description of Artificial Sequence: Synthetic oligonucleotide
cuggccgugcagaaacugg

SEQ ID NO: 1286601 - RNA, 19 nt, Artificial Sequence
  Description of Artificial Sequence: Synthetic oligonucleotide
acggacguccacaaguggg

SEQ ID NO: 1286602 - RNA, 19 nt, Artificial Sequence
  Description of Artificial Sequence: Synthetic oligonucleotide
uggcauaggccacugggau

SEQ ID NO: 1286603 - RNA, 19 nt, Artificial Sequence
  Description of Artificial Sequence: Synthetic oligonucleotide
caauggcacguucacaguc

SEQ ID NO: 1286604 - RNA, 19 nt, Artificial Sequence
  Description of Artificial Sequence: Synthetic oligonucleotide
cagacgucgaauucccaug

SEQ ID NO: 1286605 - RNA, 19 nt, Artificial Sequence
  Description of Artificial Sequence: Synthetic oligonucleotide
gacacggacguccacaagu

SEQ ID NO: 1286606 - RNA, 19 nt, Artificial Sequence
  Description of Artificial Sequence: Synthetic oligonucleotide
agacgucgaauucccauga

SEQ ID NO: 1286607 - RNA, 19 nt, Artificial Sequence
  Description of Artificial Sequence: Synthetic oligonucleotide
gaacuccggguucugcugc

SEQ ID NO: 1286608 - RNA, 19 nt, Artificial Sequence
  Description of Artificial Sequence: Synthetic oligonucleotide
aggccggcgauguccaaac

SEQ ID NO: 1286609 - RNA, 19 nt, Artificial Sequence
  Description of Artificial Sequence: Synthetic oligonucleotide
ucagucgaccgaagccccg

SEQ ID NO: 1286610 - RNA, 19 nt, Artificial Sequence
  Description of Artificial Sequence: Synthetic oligonucleotide
auggccaccagagaucaug

SEQ ID NO: 1286611 - RNA, 19 nt, Artificial Sequence
  Description of Artificial Sequence: Synthetic oligonucleotide
cuaggugcuggaggaaugg

SEQ ID NO: 1286612 - RNA, 19 nt, Artificial Sequence
  Description of Artificial Sequence: Synthetic oligonucleotide
aaacuggaugauggcguag

SEQ ID NO: 1286613 - RNA, 19 nt, Artificial Sequence
  Description of Artificial Sequence: Synthetic oligonucleotide
aggccaaagaucgauggga

SEQ ID NO: 1286614 - RNA, 19 nt, Artificial Sequence
  Description of Artificial Sequence: Synthetic oligonucleotide
gaugaaguguggguuguuc

SEQ ID NO: 1286615 - RNA, 19 nt, Artificial Sequence
  Description of Artificial Sequence: Synthetic oligonucleotide
gggguuauggccaccagag

SEQ ID NO: 1286616 - RNA, 19 nt, Artificial Sequence
  Description of Artificial Sequence: Synthetic oligonucleotide
cacaaguggggcacaaguc

SEQ ID NO: 1286617 - RNA, 19 nt, Artificial Sequence
  Description of Artificial Sequence: Synthetic oligonucleotide
gccauagugaugaagugug

SEQ ID NO: 1286618 - RNA, 19 nt, Artificial Sequence
  Description of Artificial Sequence: Synthetic oligonucleotide
gucacucugugaugaacug

SEQ ID NO: 1286619 - RNA, 19 nt, Artificial Sequence
  Description of Artificial Sequence: Synthetic oligonucleotide
ucagcggaguccuccucag

SEQ ID NO: 1286620 - RNA, 19 nt, Artificial Sequence
  Description of Artificial Sequence: Synthetic oligonucleotide
guaguaagccacggcuucg

SEQ ID NO: 1286621 - RNA, 19 nt, Artificial Sequence
  Description of Artificial Sequence: Synthetic oligonucleotide
guagacggcauuggagggg

SEQ ID NO: 1286622 - RNA, 19 nt, Artificial Sequence
  Description of Artificial Sequence: Synthetic oligonucleotide
cucagucgaccgaagcccc

SEQ ID NO: 1286623 - RNA, 19 nt, Artificial Sequence
  Description of Artificial Sequence: Synthetic oligonucleotide
ccaauacuccaaaacugcc

SEQ ID NO: 1286624 - RNA, 19 nt, Artificial Sequence
  Description of Artificial Sequence: Synthetic oligonucleotide
uguucagcaggccggcgau

SEQ ID NO: 1286625 - RNA, 19 nt, Artificial Sequence
  Description of Artificial Sequence: Synthetic oligonucleotide
aacagcggaugaguccguc

SEQ ID NO: 1286626 - RNA, 19 nt, Artificial Sequence
  Description of Artificial Sequence: Synthetic oligonucleotide
agccggacugcacacaaaa

SEQ ID NO: 1286627 - RNA, 19 nt, Artificial Sequence
  Description of Artificial Sequence: Synthetic oligonucleotide
cuggaugauggcguaggcc

SEQ ID NO: 1286628 - RNA, 19 nt, Artificial Sequence
  Description of Artificial Sequence: Synthetic oligonucleotide
aaacgcuggcacccagcug

SEQ ID NO: 1286629 - RNA, 19 nt, Artificial Sequence
  Description of Artificial Sequence: Synthetic oligonucleotide
gagaaacagcggaugaguc

SEQ ID NO: 1286630 - RNA, 19 nt, Artificial Sequence
  Description of Artificial Sequence: Synthetic oligonucleotide
gccaauacuccaaaacugc

SEQ ID NO: 1286631 - RNA, 19 nt, Artificial Sequence
  Description of Artificial Sequence: Synthetic oligonucleotide
acguaguuccccagcuugc

SEQ ID NO: 1286632 - RNA, 19 nt, Artificial Sequence
  Description of Artificial Sequence: Synthetic oligonucleotide
aaauuaggacuggcugaug

SEQ ID NO: 1286633 - RNA, 19 nt, Artificial Sequence
  Description of Artificial Sequence: Synthetic oligonucleotide
acgucgaauucccaugaaa

SEQ ID NO: 1286634 - RNA, 19 nt, Artificial Sequence
  Description of Artificial Sequence: Synthetic oligonucleotide
caugucgaggcugcugagg

SEQ ID NO: 1286635 - RNA, 19 nt, Artificial Sequence
  Description of Artificial Sequence: Synthetic oligonucleotide
guuauggccaccagagauc

SEQ ID NO: 1286636 - RNA, 19 nt, Artificial Sequence
  Description of Artificial Sequence: Synthetic oligonucleotide
ggccaauacuccaaaacug

SEQ ID NO: 1286637 - RNA, 19 nt, Artificial Sequence
  Description of Artificial Sequence: Synthetic oligonucleotide
cugccugccaaccgcagac

SEQ ID NO: 1286638 - RNA, 19 nt, Artificial Sequence
  Description of Artificial Sequence: Synthetic oligonucleotide
agaagguggcguccuguca

SEQ ID NO: 1286639 - RNA, 19 nt, Artificial Sequence
  Description of Artificial Sequence: Synthetic oligonucleotide
gacacuggauggcaaccuc

SEQ ID NO: 1286640 - RNA, 19 nt, Artificial Sequence
  Description of Artificial Sequence: Synthetic oligonucleotide
guaagccacggcuucggca

SEQ ID NO: 1286641 - RNA, 19 nt, Artificial Sequence
  Description of Artificial Sequence: Synthetic oligonucleotide
uccuccucagaagguggcg

SEQ ID NO: 1286642 - RNA, 19 nt, Artificial Sequence
  Description of Artificial Sequence: Synthetic oligonucleotide
aagguggcguccugucaga

SEQ ID NO: 1286643 - RNA, 19 nt, Artificial Sequence
  Description of Artificial Sequence: Synthetic oligonucleotide
cuaggaccagcaacccaag

SEQ ID NO: 1286644 - RNA, 19 nt, Artificial Sequence
  Description of Artificial Sequence: Synthetic oligonucleotide
uagacggcauuggaggggu

SEQ ID NO: 1286645 - RNA, 19 nt, Artificial Sequence
  Description of Artificial Sequence: Synthetic oligonucleotide
cagacacuggauggcaacc

SEQ ID NO: 1286646 - RNA, 19 nt, Artificial Sequence
  Description of Artificial Sequence: Synthetic oligonucleotide
gacggcauuggagggguug

SEQ ID NO: 1286647 - RNA, 19 nt, Artificial Sequence
  Description of Artificial Sequence: Synthetic oligonucleotide
ggagggguugagcucaaug

SEQ ID NO: 1286648 - RNA, 19 nt, Artificial Sequence
  Description of Artificial Sequence: Synthetic oligonucleotide
ucauuaccuucaguuuuga

SEQ ID NO: 1286649 - RNA, 19 nt, Artificial Sequence
  Description of Artificial Sequence: Synthetic oligonucleotide
auuccguagcuggccgugc

SEQ ID NO: 1286650 - RNA, 19 nt, Artificial Sequence
  Description of Artificial Sequence: Synthetic oligonucleotide
caauacuccaaaacugccu

SEQ ID NO: 1286651 - RNA, 19 nt, Artificial Sequence
  Description of Artificial Sequence: Synthetic oligonucleotide
aacuccggguucugcugcu

SEQ ID NO: 1286652 - RNA, 19 nt, Artificial Sequence
  Description of Artificial Sequence: Synthetic oligonucleotide
agucgaccgaagccccgac

SEQ ID NO: 1286653 - RNA, 19 nt, Artificial Sequence
  Description of Artificial Sequence: Synthetic oligonucleotide
ccugggucgaugccaaugg

SEQ ID NO: 1286654 - RNA, 19 nt, Artificial Sequence
  Description of Artificial Sequence: Synthetic oligonucleotide
uuccguagcuggccgugca

SEQ ID NO: 1286655 - RNA, 19 nt, Artificial Sequence
  Description of Artificial Sequence: Synthetic oligonucleotide
aguaugggccaggguggcc

SEQ ID NO: 1286656 - RNA, 19 nt, Artificial Sequence
  Description of Artificial Sequence: Synthetic oligonucleotide
caggaucucucagucgacc

SEQ ID NO: 1286657 - RNA, 19 nt, Artificial Sequence
  Description of Artificial Sequence: Synthetic oligonucleotide
ggacugcacacaaaauuag

SEQ ID NO: 1286658 - RNA, 19 nt, Artificial Sequence
  Description of Artificial Sequence: Synthetic oligonucleotide
caaagaucgaugggaucac

SEQ ID NO: 1286659 - RNA, 19 nt, Artificial Sequence
  Description of Artificial Sequence: Synthetic oligonucleotide
ccaaagaucgaugggauca

SEQ ID NO: 1286660 - RNA, 19 nt, Artificial Sequence
  Description of Artificial Sequence: Synthetic oligonucleotide
ccggcgauguccaaacugc

SEQ ID NO: 1286661 - RNA, 19 nt, Artificial Sequence
  Description of Artificial Sequence: Synthetic oligonucleotide
acagcggaugaguccgucu

SEQ ID NO: 1286662 - RNA, 19 nt, Artificial Sequence
  Description of Artificial Sequence: Synthetic oligonucleotide
cccacgcugagaauggagc

SEQ ID NO: 1286663 - RNA, 19 nt, Artificial Sequence
  Description of Artificial Sequence: Synthetic oligonucleotide
gguuggacuuauaaguguc

SEQ ID NO: 1286664 - RNA, 19 nt, Artificial Sequence
  Description of Artificial Sequence: Synthetic oligonucleotide
cuaaaacaccaggaggcca

SEQ ID NO: 1286665 - RNA, 19 nt, Artificial Sequence
  Description of Artificial Sequence: Synthetic oligonucleotide
uguguggcauaggccacug

SEQ ID NO: 1286666 - RNA, 19 nt, Artificial Sequence
  Description of Artificial Sequence: Synthetic oligonucleotide
gcgauguccaaacugccca

SEQ ID NO: 1286667 - RNA, 19 nt, Artificial Sequence
  Description of Artificial Sequence: Synthetic oligonucleotide
gucgaggcugcugagguga

SEQ ID NO: 1286668 - RNA, 19 nt, Artificial Sequence
  Description of Artificial Sequence: Synthetic oligonucleotide
ugucgaggcugcugaggug

SEQ ID NO: 1286669 - RNA, 19 nt, Artificial Sequence
  Description of Artificial Sequence: Synthetic oligonucleotide
ugccucagcggaguccucc

SEQ ID NO: 1286670 - RNA, 19 nt, Artificial Sequence
  Description of Artificial Sequence: Synthetic oligonucleotide
ggcuucggcaugcuuauuc

SEQ ID NO: 1286671 - RNA, 19 nt, Artificial Sequence
  Description of Artificial Sequence: Synthetic oligonucleotide
gcuaaaacaccaggaggcc

SEQ ID NO: 1286672 - RNA, 19 nt, Artificial Sequence
  Description of Artificial Sequence: Synthetic oligonucleotide
cugcccacgccucccgugg

SEQ ID NO: 1286673 - RNA, 19 nt, Artificial Sequence
  Description of Artificial Sequence: Synthetic oligonucleotide
acacggacguccacaagug

SEQ ID NO: 1286674 - RNA, 19 nt, Artificial Sequence
  Description of Artificial Sequence: Synthetic oligonucleotide
gaggcuggccaagucacuc

SEQ ID NO: 1286675 - RNA, 19 nt, Artificial Sequence
  Description of Artificial Sequence: Synthetic oligonucleotide
caguuuugaggcgcucugc

SEQ ID NO: 1286676 - RNA, 19 nt, Artificial Sequence
  Description of Artificial Sequence: Synthetic oligonucleotide
aaggcccaugcggccauag

SEQ ID NO: 1286677 - RNA, 19 nt, Artificial Sequence
  Description of Artificial Sequence: Synthetic oligonucleotide
ugcgaucuugagguuggac

SEQ ID NO: 1286678 - RNA, 19 nt, Artificial Sequence
  Description of Artificial Sequence: Synthetic oligonucleotide
ggcgcaaaacgcuggcacc

SEQ ID NO: 1286679 - RNA, 19 nt, Artificial Sequence
  Description of Artificial Sequence: Synthetic oligonucleotide
gguagcagcggcuucaaau

SEQ ID NO: 1286680 - RNA, 19 nt, Artificial Sequence
  Description of Artificial Sequence: Synthetic oligonucleotide
aaguggggcacaagucaca

SEQ ID NO: 1286681 - RNA, 19 nt, Artificial Sequence
  Description of Artificial Sequence: Synthetic oligonucleotide
uccuugcugguagcagcgg

SEQ ID NO: 1286682 - RNA, 19 nt, Artificial Sequence
  Description of Artificial Sequence: Synthetic oligonucleotide
agccacggcuucggcaugc

SEQ ID NO: 1286683 - RNA, 19 nt, Artificial Sequence
  Description of Artificial Sequence: Synthetic oligonucleotide
cugggucgaugccaauggc

SEQ ID NO: 1286684 - RNA, 19 nt, Artificial Sequence
  Description of Artificial Sequence: Synthetic oligonucleotide
aggcgcuuucuguugucca

SEQ ID NO: 1286685 - RNA, 19 nt, Artificial Sequence
  Description of Artificial Sequence: Synthetic oligonucleotide
cuggugcguagcugucugg

SEQ ID NO: 1286686 - RNA, 19 nt, Artificial Sequence
  Description of Artificial Sequence: Synthetic oligonucleotide
acugcccacgccucccgug

SEQ ID NO: 1286687 - RNA, 19 nt, Artificial Sequence
  Description of Artificial Sequence: Synthetic oligonucleotide
cuccucagaagguggcguc

SEQ ID NO: 1286688 - RNA, 19 nt, Artificial Sequence
  Description of Artificial Sequence: Synthetic oligonucleotide
gggccaauacuccaaaacu

SEQ ID NO: 1286689 - RNA, 19 nt, Artificial Sequence
  Description of Artificial Sequence: Synthetic oligonucleotide
ccauagugaugaagugugg

SEQ ID NO: 1286690 - RNA, 19 nt, Artificial Sequence
  Description of Artificial Sequence: Synthetic oligonucleotide
aacugcccacgccucccgu

SEQ ID NO: 1286691 - RNA, 19 nt, Artificial Sequence
  Description of Artificial Sequence: Synthetic oligonucleotide
ugccaauggcacguucaca

SEQ ID NO: 1286692 - RNA, 19 nt, Artificial Sequence
  Description of Artificial Sequence: Synthetic oligonucleotide
cauuccguagcuggccgug

SEQ ID NO: 1286693 - RNA, 19 nt, Artificial Sequence
  Description of Artificial Sequence: Synthetic oligonucleotide
ccacgcugagaauggagcc

SEQ ID NO: 1286694 - RNA, 19 nt, Artificial Sequence
  Description of Artificial Sequence: Synthetic oligonucleotide
ugccugccaaccgcagacg

SEQ ID NO: 1286695 - RNA, 19 nt, Artificial Sequence
  Description of Artificial Sequence: Synthetic oligonucleotide
gugggcgcaaaacgcuggc

SEQ ID NO: 1286696 - RNA, 19 nt, Artificial Sequence
  Description of Artificial Sequence: Synthetic oligonucleotide
gcgaucuugagguuggacu

SEQ ID NO: 1286697 - RNA, 19 nt, Artificial Sequence
  Description of Artificial Sequence: Synthetic oligonucleotide
cucagcggaguccuccuca

SEQ ID NO: 1286698 - RNA, 19 nt, Artificial Sequence
  Description of Artificial Sequence: Synthetic oligonucleotide
ugcccacgccucccguggg

SEQ ID NO: 1286699 - RNA, 19 nt, Artificial Sequence
  Description of Artificial Sequence: Synthetic oligonucleotide
gucgaauucccaugaaauu

SEQ ID NO: 1286700 - RNA, 19 nt, Artificial Sequence
  Description of Artificial Sequence: Synthetic oligonucleotide
caagucacaggccucuccu

SEQ ID NO: 1286701 - RNA, 19 nt, Artificial Sequence
  Description of Artificial Sequence: Synthetic oligonucleotide
gucgaccgaagccccgacc

SEQ ID NO: 1286702 - RNA, 19 nt, Artificial Sequence
  Description of Artificial Sequence: Synthetic oligonucleotide
aggaggccaaagaucgaug

SEQ ID NO: 1286703 - RNA, 19 nt, Artificial Sequence
  Description of Artificial Sequence: Synthetic oligonucleotide
ccgugcagaaacuggauga

SEQ ID NO: 1286704 - RNA, 19 nt, Artificial Sequence
  Description of Artificial Sequence: Synthetic oligonucleotide
ccaagugugggcgcaaaac

SEQ ID NO: 1286705 - RNA, 19 nt, Artificial Sequence
  Description of Artificial Sequence: Synthetic oligonucleotide
gaauggagccggacugcac

SEQ ID NO: 1286706 - RNA, 19 nt, Artificial Sequence
  Description of Artificial Sequence: Synthetic oligonucleotide
augccugacaucagcugcu

SEQ ID NO: 1286707 - RNA, 19 nt, Artificial Sequence
  Description of Artificial Sequence: Synthetic oligonucleotide
ugggguacccaagggguua

SEQ ID NO: 1286708 - RNA, 19 nt, Artificial Sequence
  Description of Artificial Sequence: Synthetic oligonucleotide
uggccacgucuucugccca

SEQ ID NO: 1286709 - RNA, 19 nt, Artificial Sequence
  Description of Artificial Sequence: Synthetic oligonucleotide
cuuaacaugcagguccagu

SEQ ID NO: 1286710 - RNA, 19 nt, Artificial Sequence
  Description of Artificial Sequence: Synthetic oligonucleotide
guuuugaggcgcucugccu

SEQ ID NO: 1286711 - RNA, 19 nt, Artificial Sequence
  Description of Artificial Sequence: Synthetic oligonucleotide
ggggccagcacgaauacaa

SEQ ID NO: 1286712 - RNA, 19 nt, Artificial Sequence
  Description of Artificial Sequence: Synthetic oligonucleotide
cgaauucccaugaaauuga

SEQ ID NO: 1286713 - RNA, 19 nt, Artificial Sequence
  Description of Artificial Sequence: Synthetic oligonucleotide
ggaucucucagucgaccga

SEQ ID NO: 1286714 - RNA, 19 nt, Artificial Sequence
  Description of Artificial Sequence: Synthetic oligonucleotide
ggccccaccccucagcuuc

SEQ ID NO: 1286715 - RNA, 19 nt, Artificial Sequence
  Description of Artificial Sequence: Synthetic oligonucleotide
cuccacgaacuccggguuc

SEQ ID NO: 1286716 - RNA, 19 nt, Artificial Sequence
  Description of Artificial Sequence: Synthetic oligonucleotide
gacgucgaauucccaugaa

SEQ ID NO: 1286717 - RNA, 19 nt, Artificial Sequence
  Description of Artificial Sequence: Synthetic oligonucleotide
cggacguccacaagugggg

SEQ ID NO: 1286718 - RNA, 19 nt, Artificial Sequence
  Description of Artificial Sequence: Synthetic oligonucleotide
cacgaacuccggguucugc

SEQ ID NO: 1286719 - RNA, 19 nt, Artificial Sequence
  Description of Artificial Sequence: Synthetic oligonucleotide
uguaggccgcagcucuguu

SEQ ID NO: 1286720 - RNA, 19 nt, Artificial Sequence
  Description of Artificial Sequence: Synthetic oligonucleotide
guggggccagcacgaauac

SEQ ID NO: 1286721 - RNA, 19 nt, Artificial Sequence
  Description of Artificial Sequence: Synthetic oligonucleotide
gcgcaaaacgcuggcaccc

SEQ ID NO: 1286722 - RNA, 19 nt, Artificial Sequence
  Description of Artificial Sequence: Synthetic oligonucleotide
gugcaaacugcuggcccgc

SEQ ID NO: 1286723 - RNA, 19 nt, Artificial Sequence
  Description of Artificial Sequence: Synthetic oligonucleotide
agcggaugaguccgucuua

SEQ ID NO: 1286724 - RNA, 19 nt, Artificial Sequence
  Description of Artificial Sequence: Synthetic oligonucleotide
gcucauuaccuucaguuuu

SEQ ID NO: 1286725 - RNA, 19 nt, Artificial Sequence
  Description of Artificial Sequence: Synthetic oligonucleotide
ggcgcucugccucagcgga

SEQ ID NO: 1286726 - RNA, 19 nt, Artificial Sequence
  Description of Artificial Sequence: Synthetic oligonucleotide
aaacagcggaugaguccgu

SEQ ID NO: 1286727 - RNA, 19 nt, Artificial Sequence
  Description of Artificial Sequence: Synthetic oligonucleotide
gaaugggugcuggugcgua

SEQ ID NO: 1286728 - RNA, 19 nt, Artificial Sequence
  Description of Artificial Sequence: Synthetic oligonucleotide
gcuauagccugggucgaug

SEQ ID NO: 1286729 - RNA, 19 nt, Artificial Sequence
  Description of Artificial Sequence: Synthetic oligonucleotide
ugccaaccgcagacgucga

SEQ ID NO: 1286730 - RNA, 19 nt, Artificial Sequence
  Description of Artificial Sequence: Synthetic oligonucleotide
aucucucagucgaccgaag

SEQ ID NO: 1286731 - RNA, 19 nt, Artificial Sequence
  Description of Artificial Sequence: Synthetic oligonucleotide
aacugcuggcccgccugga

SEQ ID NO: 1286732 - RNA, 19 nt, Artificial Sequence
  Description of Artificial Sequence: Synthetic oligonucleotide
ccaaacugcccacgccucc

SEQ ID NO: 1286733 - RNA, 19 nt, Artificial Sequence
  Description of Artificial Sequence: Synthetic oligonucleotide
ccgcagacgucgaauuccc

SEQ ID NO: 1286734 - RNA, 19 nt, Artificial Sequence
  Description of Artificial Sequence: Synthetic oligonucleotide
ugguagcagcggcuucaaa

SEQ ID NO: 1286735 - RNA, 19 nt, Artificial Sequence
  Description of Artificial Sequence: Synthetic oligonucleotide
cuucaguuuugaggcgcuc

SEQ ID NO: 1286736 - RNA, 19 nt, Artificial Sequence
  Description of Artificial Sequence: Synthetic oligonucleotide
gccaaagaucgaugggauc

SEQ ID NO: 1286737 - RNA, 19 nt, Artificial Sequence
  Description of Artificial Sequence: Synthetic oligonucleotide
guaggccgcagcucuguua

SEQ ID NO: 1286738 - RNA, 19 nt, Artificial Sequence
  Description of Artificial Sequence: Synthetic oligonucleotide
gcggccauaggcuuugcua

SEQ ID NO: 1286739 - RNA, 19 nt, Artificial Sequence
  Description of Artificial Sequence: Synthetic oligonucleotide
uggggccagcacgaauaca

SEQ ID NO: 1286740 - RNA, 19 nt, Artificial Sequence
  Description of Artificial Sequence: Synthetic oligonucleotide
cgcaguuucagcucugcga

SEQ ID NO: 1286741 - RNA, 19 nt, Artificial Sequence
  Description of Artificial Sequence: Synthetic oligonucleotide
aacccaagugugggcgcaa

SEQ ID NO: 1286742 - RNA, 19 nt, Artificial Sequence
  Description of Artificial Sequence: Synthetic oligonucleotide
cgaauacaaacauggaagu

SEQ ID NO: 1286743 - RNA, 19 nt, Artificial Sequence
  Description of Artificial Sequence: Synthetic oligonucleotide
gagcuaggucacuguccuc

SEQ ID NO: 1286744 - RNA, 19 nt, Artificial Sequence
  Description of Artificial Sequence: Synthetic oligonucleotide
ccuugccauagagauguac

SEQ ID NO: 1286745 - RNA, 19 nt, Artificial Sequence
  Description of Artificial Sequence: Synthetic oligonucleotide
ggccaccagagaucaugcc

SEQ ID NO: 1286746 - RNA, 19 nt, Artificial Sequence
  Description of Artificial Sequence: Synthetic oligonucleotide
cugucagagccccuugggu

SEQ ID NO: 1286747 - RNA, 19 nt, Artificial Sequence
  Description of Artificial Sequence: Synthetic oligonucleotide
ggaugaggcuggccaaguc

SEQ ID NO: 1286748 - RNA, 19 nt, Artificial Sequence
  Description of Artificial Sequence: Synthetic oligonucleotide
cggacugcacacaaaauua

SEQ ID NO: 1286749 - RNA, 19 nt, Artificial Sequence
  Description of Artificial Sequence: Synthetic oligonucleotide
uggagagugcaaggcccau

SEQ ID NO: 1286750 - RNA, 19 nt, Artificial Sequence
  Description of Artificial Sequence: Synthetic oligonucleotide
ggacguccacaaguggggc

SEQ ID NO: 1286751 - RNA, 19 nt, Artificial Sequence
  Description of Artificial Sequence: Synthetic oligonucleotide
gaugagcgucacucuugcu

SEQ ID NO: 1286752 - RNA, 19 nt, Artificial Sequence
  Description of Artificial Sequence: Synthetic oligonucleotide
gcugagaauggagccggac

SEQ ID NO: 1286753 - RNA, 19 nt, Artificial Sequence
  Description of Artificial Sequence: Synthetic oligonucleotide
caggggcacuugcuaggac

SEQ ID NO: 1286754 - RNA, 19 nt, Artificial Sequence
  Description of Artificial Sequence: Synthetic oligonucleotide
gccugggucgaugccaaug

SEQ ID NO: 1286755 - RNA, 19 nt, Artificial Sequence
  Description of Artificial Sequence: Synthetic oligonucleotide
caacccaagugugggcgca

SEQ ID NO: 1286756 - RNA, 19 nt, Artificial Sequence
  Description of Artificial Sequence: Synthetic oligonucleotide
gcacgaauacaaacaugga

SEQ ID NO: 1286757 - RNA, 19 nt, Artificial Sequence
  Description of Artificial Sequence: Synthetic oligonucleotide
ggguuauggccaccagaga

SEQ ID NO: 1286758 - RNA, 19 nt, Artificial Sequence
  Description of Artificial Sequence: Synthetic oligonucleotide
ccgcaguuucagcucugcg

SEQ ID NO: 1286759 - RNA, 19 nt, Artificial Sequence
  Description of Artificial Sequence: Synthetic oligonucleotide
ucccuaggugcuggaggaa

SEQ ID NO: 1286760 - RNA, 19 nt, Artificial Sequence
  Description of Artificial Sequence: Synthetic oligonucleotide
ggcauaggccacugggaua

SEQ ID NO: 1286761 - RNA, 19 nt, Artificial Sequence
  Description of Artificial Sequence: Synthetic oligonucleotide
gcgcuuucuguuguccaug

SEQ ID NO: 1286762 - RNA, 19 nt, Artificial Sequence
  Description of Artificial Sequence: Synthetic oligonucleotide
ccugggguacccaaggggu

SEQ ID NO: 1286763 - RNA, 19 nt, Artificial Sequence
  Description of Artificial Sequence: Synthetic oligonucleotide
gugggacuuggugccuccc

SEQ ID NO: 1286764 - RNA, 19 nt, Artificial Sequence
  Description of Artificial Sequence: Synthetic oligonucleotide
cgucgaauucccaugaaau

SEQ ID NO: 1286765 - RNA, 19 nt, Artificial Sequence
  Description of Artificial Sequence: Synthetic oligonucleotide
gcacuggguguccggcugc

SEQ ID NO: 1286766 - RNA, 19 nt, Artificial Sequence
  Description of Artificial Sequence: Synthetic oligonucleotide
cauaggccacugggauaag

SEQ ID NO: 1286767 - RNA, 19 nt, Artificial Sequence
  Description of Artificial Sequence: Synthetic oligonucleotide
ccacaaguggggcacaagu

SEQ ID NO: 1286768 - RNA, 19 nt, Artificial Sequence
  Description of Artificial Sequence: Synthetic oligonucleotide
caaccgcagacgucgaauu

SEQ ID NO: 1286769 - RNA, 19 nt, Artificial Sequence
  Description of Artificial Sequence: Synthetic oligonucleotide
cccaagggguuauggccac

SEQ ID NO: 1286770 - RNA, 19 nt, Artificial Sequence
  Description of Artificial Sequence: Synthetic oligonucleotide
ccgacggagaaaaggcuaa

SEQ ID NO: 1286771 - RNA, 19 nt, Artificial Sequence
  Description of Artificial Sequence: Synthetic oligonucleotide
cagucgaccgaagccccga

SEQ ID NO: 1286772 - RNA, 19 nt, Artificial Sequence
  Description of Artificial Sequence: Synthetic oligonucleotide
cccgacggagaaaaggcua

SEQ ID NO: 1286773 - RNA, 19 nt, Artificial Sequence
  Description of Artificial Sequence: Synthetic oligonucleotide
cacugggauaaggcaggca

SEQ ID NO: 1286774 - RNA, 19 nt, Artificial Sequence
  Description of Artificial Sequence: Synthetic oligonucleotide
gagcgucacucuugcugcu

SEQ ID NO: 1286775 - RNA, 19 nt, Artificial Sequence
  Description of Artificial Sequence: Synthetic oligonucleotide
cggcgauguccaaacugcc

SEQ ID NO: 1286776 - RNA, 19 nt, Artificial Sequence
  Description of Artificial Sequence: Synthetic oligonucleotide
agcuggccgugcagaaacu

SEQ ID NO: 1286777 - RNA, 19 nt, Artificial Sequence
  Description of Artificial Sequence: Synthetic oligonucleotide
ggcaaccucuaggcucucc

SEQ ID NO: 1286778 - RNA, 19 nt, Artificial Sequence
  Description of Artificial Sequence: Synthetic oligonucleotide
cagcggaugaguccgucuu

SEQ ID NO: 1286779 - RNA, 19 nt, Artificial Sequence
  Description of Artificial Sequence: Synthetic oligonucleotide
gcggaugaguccgucuuaa

SEQ ID NO: 1286780 - RNA, 19 nt, Artificial Sequence
  Description of Artificial Sequence: Synthetic oligonucleotide
ggcgcuuucuguuguccau

SEQ ID NO: 1286781 - RNA, 19 nt, Artificial Sequence
  Description of Artificial Sequence: Synthetic oligonucleotide
ccgucuuaacaugcagguc

SEQ ID NO: 1286782 - RNA, 19 nt, Artificial Sequence
  Description of Artificial Sequence: Synthetic oligonucleotide
gcguaggccaggcgcuuuc

SEQ ID NO: 1286783 - RNA, 19 nt, Artificial Sequence
  Description of Artificial Sequence: Synthetic oligonucleotide
ggccaaagaucgaugggau

SEQ ID NO: 1286784 - RNA, 19 nt, Artificial Sequence
  Description of Artificial Sequence: Synthetic oligonucleotide
caggccggcgauguccaaa

SEQ ID NO: 1286785 - RNA, 19 nt, Artificial Sequence
  Description of Artificial Sequence: Synthetic oligonucleotide
gagccggacugcacacaaa

SEQ ID NO: 1286786 - RNA, 19 nt, Artificial Sequence
  Description of Artificial Sequence: Synthetic oligonucleotide
uggccccaccccucagcuu

SEQ ID NO: 1286787 - RNA, 19 nt, Artificial Sequence
  Description of Artificial Sequence: Synthetic oligonucleotide
ggcaaguaugggccagggu

SEQ ID NO: 1286788 - RNA, 19 nt, Artificial Sequence
  Description of Artificial Sequence: Synthetic oligonucleotide
agccugggucgaugccaau

SEQ ID NO: 1286789 - RNA, 19 nt, Artificial Sequence
  Description of Artificial Sequence: Synthetic oligonucleotide
gcccaugcggccauaggcu

SEQ ID NO: 1286790 - RNA, 19 nt, Artificial Sequence
  Description of Artificial Sequence: Synthetic oligonucleotide
guguccggcugcgcaccac

SEQ ID NO: 1286791 - RNA, 19 nt, Artificial Sequence
  Description of Artificial Sequence: Synthetic oligonucleotide
gguguccggcugcgcacca

SEQ ID NO: 1286792 - RNA, 19 nt, Artificial Sequence
  Description of Artificial Sequence: Synthetic oligonucleotide
gcagcccgacggagaaaag

SEQ ID NO: 1286793 - RNA, 19 nt, Artificial Sequence
  Description of Artificial Sequence: Synthetic oligonucleotide
acgccucccgugggacuug

SEQ ID NO: 1286794 - RNA, 19 nt, Artificial Sequence
  Description of Artificial Sequence: Synthetic oligonucleotide
cgaugccaauggcacguuc

SEQ ID NO: 1286795 - RNA, 19 nt, Artificial Sequence
  Description of Artificial Sequence: Synthetic oligonucleotide
ccucagcggaguccuccuc

SEQ ID NO: 1286796 - RNA, 19 nt, Artificial Sequence
  Description of Artificial Sequence: Synthetic oligonucleotide
gcuccacgaacuccggguu

SEQ ID NO: 1286797 - RNA, 19 nt, Artificial Sequence
  Description of Artificial Sequence: Synthetic oligonucleotide
cugcgaucuugagguugga

SEQ ID NO: 1286798 - RNA, 19 nt, Artificial Sequence
  Description of Artificial Sequence: Synthetic oligonucleotide
gccaaccgcagacgucgaa

SEQ ID NO: 1286799 - RNA, 19 nt, Artificial Sequence
  Description of Artificial Sequence: Synthetic oligonucleotide
gcuuugcuauagccugggu

SEQ ID NO: 1286800 - RNA, 19 nt, Artificial Sequence
  Description of Artificial Sequence: Synthetic oligonucleotide
cccaagugugggcgcaaaa

SEQ ID NO: 1286801 - RNA, 19 nt, Artificial Sequence
  Description of Artificial Sequence: Synthetic oligonucleotide
gccucagcggaguccuccu

SEQ ID NO: 1286802 - RNA, 19 nt, Artificial Sequence
  Description of Artificial Sequence: Synthetic oligonucleotide
gcccacgccucccguggga

SEQ ID NO: 1286803 - RNA, 19 nt, Artificial Sequence
  Description of Artificial Sequence: Synthetic oligonucleotide
ccaaccgcagacgucgaau

SEQ ID NO: 1286804 - RNA, 19 nt, Artificial Sequence
  Description of Artificial Sequence: Synthetic oligonucleotide
gcccgacggagaaaaggcu

SEQ ID NO: 1286805 - RNA, 19 nt, Artificial Sequence
  Description of Artificial Sequence: Synthetic oligonucleotide
agacggcauuggagggguu

SEQ ID NO: 1286806 - RNA, 19 nt, Artificial Sequence
  Description of Artificial Sequence: Synthetic oligonucleotide
ccauuccguagcuggccgu

SEQ ID NO: 1286807 - RNA, 19 nt, Artificial Sequence
  Description of Artificial Sequence: Synthetic oligonucleotide
cgcaaaacgcuggcaccca

SEQ ID NO: 1286808 - RNA, 19 nt, Artificial Sequence
  Description of Artificial Sequence: Synthetic oligonucleotide
cgaccgaagccccgaccca

SEQ ID NO: 1286809 - RNA, 19 nt, Artificial Sequence
  Description of Artificial Sequence: Synthetic oligonucleotide
gccggacugcacacaaaau

SEQ ID NO: 1286810 - RNA, 19 nt, Artificial Sequence
  Description of Artificial Sequence: Synthetic oligonucleotide
ggccggcgauguccaaacu

SEQ ID NO: 1286811 - RNA, 19 nt, Artificial Sequence
  Description of Artificial Sequence: Synthetic oligonucleotide
cggcaugcuuauucaggcu

SEQ ID NO: 1286812 - RNA, 19 nt, Artificial Sequence
  Description of Artificial Sequence: Synthetic oligonucleotide
caaggcccaugcggccaua

SEQ ID NO: 1286813 - RNA, 19 nt, Artificial Sequence
  Description of Artificial Sequence: Synthetic oligonucleotide
ccaugcggccauaggcuuu

SEQ ID NO: 1286814 - RNA, 19 nt, Artificial Sequence
  Description of Artificial Sequence: Synthetic oligonucleotide
ccacguaguuccccagcuu

SEQ ID NO: 1286815 - RNA, 19 nt, Artificial Sequence
  Description of Artificial Sequence: Synthetic oligonucleotide
gggcagcccgacggagaaa

SEQ ID NO: 1286816 - RNA, 19 nt, Artificial Sequence
  Description of Artificial Sequence: Synthetic oligonucleotide
ggcguaggccaggcgcuuu

SEQ ID NO: 1286817 - RNA, 19 nt, Artificial Sequence
  Description of Artificial Sequence: Synthetic oligonucleotide
cguccacaaguggggcaca

SEQ ID NO: 1286818 - RNA, 19 nt, Artificial Sequence
  Description of Artificial Sequence: Synthetic oligonucleotide
gccuugccauagagaugua

SEQ ID NO: 1286819 - RNA, 19 nt, Artificial Sequence
  Description of Artificial Sequence: Synthetic oligonucleotide
cguaggccaggcgcuuucu

SEQ ID NO: 1286820 - RNA, 19 nt, Artificial Sequence
  Description of Artificial Sequence: Synthetic oligonucleotide
gcguccugucagagccccu

SEQ ID NO: 1286821 - RNA, 19 nt, Artificial Sequence
  Description of Artificial Sequence: Synthetic oligonucleotide
gccucccgugggacuuggu

SEQ ID NO: 1286822 - RNA, 19 nt, Artificial Sequence
  Description of Artificial Sequence: Synthetic oligonucleotide
aaagaagguaucuugaugu

SEQ ID NO: 1286823 - RNA, 19 nt, Artificial Sequence
  Description of Artificial Sequence: Synthetic oligonucleotide
uugcauuagagacagaagc

SEQ ID NO: 1286824 - RNA, 19 nt, Artificial Sequence
  Description of Artificial Sequence: Synthetic oligonucleotide
ucuaucaguccauagaaca

SEQ ID NO: 1286825 - RNA, 19 nt, Artificial Sequence
  Description of Artificial Sequence: Synthetic oligonucleotide
ucugauaacucuuucuccc

SEQ ID NO: 1286826 - RNA, 19 nt, Artificial Sequence
  Description of Artificial Sequence: Synthetic oligonucleotide
uguuguugguaccaaagcc

SEQ ID NO: 1286827 - RNA, 19 nt, Artificial Sequence
  Description of Artificial Sequence: Synthetic oligonucleotide
uugguaaccaccagcaaag

SEQ ID NO: 1286828 - RNA, 19 nt, Artificial Sequence
  Description of Artificial Sequence: Synthetic oligonucleotide
cagugaauggucuucaccg

SEQ ID NO: 1286829 - RNA, 19 nt, Artificial Sequence
  Description of Artificial Sequence: Synthetic oligonucleotide
ucuucauccgacaaagucu

SEQ ID NO: 1286830 - RNA, 19 nt, Artificial Sequence
  Description of Artificial Sequence: Synthetic oligonucleotide
aguaucuggagcuggguac

SEQ ID NO: 1286831 - RNA, 19 nt, Artificial Sequence
  Description of Artificial Sequence: Synthetic oligonucleotide
aauccuugggcaaggaagc

SEQ ID NO: 1286832 - RNA, 19 nt, Artificial Sequence
  Description of Artificial Sequence: Synthetic oligonucleotide
aaccaucgaauccuugggc

SEQ ID NO: 1286833 - RNA, 19 nt, Artificial Sequence
  Description of Artificial Sequence: Synthetic oligonucleotide
aaaaccuaagggcacggug

SEQ ID NO: 1286834 - RNA, 19 nt, Artificial Sequence
  Description of Artificial Sequence: Synthetic oligonucleotide
aggauagccagcuugagcu

SEQ ID NO: 1286835 - RNA, 19 nt, Artificial Sequence
  Description of Artificial Sequence: Synthetic oligonucleotide
ucauccucgguccaguuag

SEQ ID NO: 1286836 - RNA, 19 nt, Artificial Sequence
  Description of Artificial Sequence: Synthetic oligonucleotide
aaaaugcccgauguguggc

SEQ ID NO: 1286837 - RNA, 19 nt, Artificial Sequence
  Description of Artificial Sequence: Synthetic oligonucleotide
uaaaaugcccgaugugugg

SEQ ID NO: 1286838 - RNA, 19 nt, Artificial Sequence
  Description of Artificial Sequence: Synthetic oligonucleotide
gacgaugacaugaugggcg

SEQ ID NO: 1286839 - RNA, 19 nt, Artificial Sequence
  Description of Artificial Sequence: Synthetic oligonucleotide
gaauccuugggcaaggaag

SEQ ID NO: 1286840 - RNA, 19 nt, Artificial Sequence
  Description of Artificial Sequence: Synthetic oligonucleotide
cagcaauaaacccacagag

SEQ ID NO: 1286841 - RNA, 19 nt, Artificial Sequence
  Description of Artificial Sequence: Synthetic oligonucleotide
ugcauuagagacagaagca

SEQ ID NO: 1286842 - RNA, 19 nt, Artificial Sequence
  Description of Artificial Sequence: Synthetic oligonucleotide
caugauagagcagagcugc

SEQ ID NO: 1286843 - RNA, 19 nt, Artificial Sequence
  Description of Artificial Sequence: Synthetic oligonucleotide
uccauagaacagauuagcc

SEQ ID NO: 1286844 - RNA, 19 nt, Artificial Sequence
  Description of Artificial Sequence: Synthetic oligonucleotide
uaaccaccagcaaaggugc

SEQ ID NO: 1286845 - RNA, 19 nt, Artificial Sequence
  Description of Artificial Sequence: Synthetic oligonucleotide
cauagcuguaggaaccucg

SEQ ID NO: 1286846 - RNA, 19 nt, Artificial Sequence
  Description of Artificial Sequence: Synthetic oligonucleotide
guaaccaccagcaaaggug

SEQ ID NO: 1286847 - RNA, 19 nt, Artificial Sequence
  Description of Artificial Sequence: Synthetic oligonucleotide
aaccuaagggcacggugac

SEQ ID NO: 1286848 - RNA, 19 nt, Artificial Sequence
  Description of Artificial Sequence: Synthetic oligonucleotide
aacagauuagccaucucug

SEQ ID NO: 1286849 - RNA, 19 nt, Artificial Sequence
  Description of Artificial Sequence: Synthetic oligonucleotide
uugaggaacucuccaacgc

SEQ ID NO: 1286850 - RNA, 19 nt, Artificial Sequence
  Description of Artificial Sequence: Synthetic oligonucleotide
uggucuaucaguccauaga

SEQ ID NO: 1286851 - RNA, 19 nt, Artificial Sequence
  Description of Artificial Sequence: Synthetic oligonucleotide
cuugaggaacucuccaacg

SEQ ID NO: 1286852 - RNA, 19 nt, Artificial Sequence
  Description of Artificial Sequence: Synthetic oligonucleotide
ucuugaggaacucuccaac

SEQ ID NO: 1286853 - RNA, 19 nt, Artificial Sequence
  Description of Artificial Sequence: Synthetic oligonucleotide
guauauggggcacugugcc

SEQ ID NO: 1286854 - RNA, 19 nt, Artificial Sequence
  Description of Artificial Sequence: Synthetic oligonucleotide
uguauacuccccaaacggu

SEQ ID NO: 1286855 - RNA, 19 nt, Artificial Sequence
  Description of Artificial Sequence: Synthetic oligonucleotide
uauacuccccaaacggugc

SEQ ID NO: 1286856 - RNA, 19 nt, Artificial Sequence
  Description of Artificial Sequence: Synthetic oligonucleotide
agguguucaggauagccag

SEQ ID NO: 1286857 - RNA, 19 nt, Artificial Sequence
  Description of Artificial Sequence: Synthetic oligonucleotide
agcaauaaacccacagagc

SEQ ID NO: 1286858 - RNA, 19 nt, Artificial Sequence
  Description of Artificial Sequence: Synthetic oligonucleotide
gaauaaaaugcccgaugug

SEQ ID NO: 1286859 - RNA, 19 nt, Artificial Sequence
  Description of Artificial Sequence: Synthetic oligonucleotide
gcaauaaacccacagagca

SEQ ID NO: 1286860 - RNA, 19 nt, Artificial Sequence
  Description of Artificial Sequence: Synthetic oligonucleotide
guaccugugagucccacag

SEQ ID NO: 1286861 - RNA, 19 nt, Artificial Sequence
  Description of Artificial Sequence: Synthetic oligonucleotide
accagcaaaggugcaaucc

SEQ ID NO: 1286862 - RNA, 19 nt, Artificial Sequence
  Description of Artificial Sequence: Synthetic oligonucleotide
gaaccucggguauaugggg

SEQ ID NO: 1286863 - RNA, 19 nt, Artificial Sequence
  Description of Artificial Sequence: Synthetic oligonucleotide
ggugacgaugacaugaugg

SEQ ID NO: 1286864 - RNA, 19 nt, Artificial Sequence
  Description of Artificial Sequence: Synthetic oligonucleotide
cacuacaccaccgaaguag

SEQ ID NO: 1286865 - RNA, 19 nt, Artificial Sequence
  Description of Artificial Sequence: Synthetic oligonucleotide
cauggauccagugugcacc

SEQ ID NO: 1286866 - RNA, 19 nt, Artificial Sequence
  Description of Artificial Sequence: Synthetic oligonucleotide
guacuugcauuagagacag

SEQ ID NO: 1286867 - RNA, 19 nt, Artificial Sequence
  Description of Artificial Sequence: Synthetic oligonucleotide
aaaccuaagggcacgguga

SEQ ID NO: 1286868 - RNA, 19 nt, Artificial Sequence
  Description of Artificial Sequence: Synthetic oligonucleotide
gacccauuccagugaaugg

SEQ ID NO: 1286869 - RNA, 19 nt, Artificial Sequence
  Description of Artificial Sequence: Synthetic oligonucleotide
uucaggaacucucgggucu

SEQ ID NO: 1286870 - RNA, 19 nt, Artificial Sequence
  Description of Artificial Sequence: Synthetic oligonucleotide
ugaggaacucuccaacgcu

SEQ ID NO: 1286871 - RNA, 19 nt, Artificial Sequence
  Description of Artificial Sequence: Synthetic oligonucleotide
uccgacaaagucuccauaa

SEQ ID NO: 1286872 - RNA, 19 nt, Artificial Sequence
  Description of Artificial Sequence: Synthetic oligonucleotide
uaucaguccauagaacaga

SEQ ID NO: 1286873 - RNA, 19 nt, Artificial Sequence
  Description of Artificial Sequence: Synthetic oligonucleotide
aaccucggguauauggggc

SEQ ID NO: 1286874 - RNA, 19 nt, Artificial Sequence
  Description of Artificial Sequence: Synthetic oligonucleotide
agaucuaggucaucaccag

SEQ ID NO: 1286875 - RNA, 19 nt, Artificial Sequence
  Description of Artificial Sequence: Synthetic oligonucleotide
uguccuguaggggugaugu

SEQ ID NO: 1286876 - RNA, 19 nt, Artificial Sequence
  Description of Artificial Sequence: Synthetic oligonucleotide
agaagguaucuugauguuc

SEQ ID NO: 1286877 - RNA, 19 nt, Artificial Sequence
  Description of Artificial Sequence: Synthetic oligonucleotide
cauaaacuccgacucgagc

SEQ ID NO: 1286878 - RNA, 19 nt, Artificial Sequence
  Description of Artificial Sequence: Synthetic oligonucleotide
uccgcagccagcuggaaga

SEQ ID NO: 1286879 - RNA, 19 nt, Artificial Sequence
  Description of Artificial Sequence: Synthetic oligonucleotide
cucgagcccagcaauaaac

SEQ ID NO: 1286880 - RNA, 19 nt, Artificial Sequence
  Description of Artificial Sequence: Synthetic oligonucleotide
ugugccaacgagaccucag

SEQ ID NO: 1286881 - RNA, 19 nt, Artificial Sequence
  Description of Artificial Sequence: Synthetic oligonucleotide
acuacaccaccgaaguagc

SEQ ID NO: 1286882 - RNA, 19 nt, Artificial Sequence
  Description of Artificial Sequence: Synthetic oligonucleotide
ugcuguaccugugaguccc

SEQ ID NO: 1286883 - RNA, 19 nt, Artificial Sequence
  Description of Artificial Sequence: Synthetic oligonucleotide
ucagcccacaugauagagc

SEQ ID NO: 1286884 - RNA, 19 nt, Artificial Sequence
  Description of Artificial Sequence: Synthetic oligonucleotide
gguagcacuguauacuccc

SEQ ID NO: 1286885 - RNA, 19 nt, Artificial Sequence
  Description of Artificial Sequence: Synthetic oligonucleotide
cugugagucccacagauca

SEQ ID NO: 1286886 - RNA, 19 nt, Artificial Sequence
  Description of Artificial Sequence: Synthetic oligonucleotide
cugauaacucuuucucccc

SEQ ID NO: 1286887 - RNA, 19 nt, Artificial Sequence
  Description of Artificial Sequence: Synthetic oligonucleotide
gaaguagcguuccgagcgg

SEQ ID NO: 1286888 - RNA, 19 nt, Artificial Sequence
  Description of Artificial Sequence: Synthetic oligonucleotide
caguccauagaacagauua

SEQ ID NO: 1286889 - RNA, 19 nt, Artificial Sequence
  Description of Artificial Sequence: Synthetic oligonucleotide
ugauagagcagagcugcag

SEQ ID NO: 1286890 - RNA, 19 nt, Artificial Sequence
  Description of Artificial Sequence: Synthetic oligonucleotide
ucacgcaacauucuauguu

SEQ ID NO: 1286891 - RNA, 19 nt, Artificial Sequence
  Description of Artificial Sequence: Synthetic oligonucleotide
agucuccauaaacuccgac

SEQ ID NO: 1286892 - RNA, 19 nt, Artificial Sequence
  Description of Artificial Sequence: Synthetic oligonucleotide
cacucuccgaaguacuugc

SEQ ID NO: 1286893 - RNA, 19 nt, Artificial Sequence
  Description of Artificial Sequence: Synthetic oligonucleotide
cucaaagaagguaucuuga

SEQ ID NO: 1286894 - RNA, 19 nt, Artificial Sequence
  Description of Artificial Sequence: Synthetic oligonucleotide
gacaugaugggcgggcagg

SEQ ID NO: 1286895 - RNA, 19 nt, Artificial Sequence
  Description of Artificial Sequence: Synthetic oligonucleotide
aguacuugcauuagagaca

SEQ ID NO: 1286896 - RNA, 19 nt, Artificial Sequence
  Description of Artificial Sequence: Synthetic oligonucleotide
uuguugguaccaaagccua

SEQ ID NO: 1286897 - RNA, 19 nt, Artificial Sequence
  Description of Artificial Sequence: Synthetic oligonucleotide
gauuagccaucucugucac

SEQ ID NO: 1286898 - RNA, 19 nt, Artificial Sequence
  Description of Artificial Sequence: Synthetic oligonucleotide
ucuuggagugagaggguug

SEQ ID NO: 1286899 - RNA, 19 nt, Artificial Sequence
  Description of Artificial Sequence: Synthetic oligonucleotide
aggcgaucggcuucccucc

SEQ ID NO: 1286900 - RNA, 19 nt, Artificial Sequence
  Description of Artificial Sequence: Synthetic oligonucleotide
uccccaaacggugcaaggg

SEQ ID NO: 1286901 - RNA, 19 nt, Artificial Sequence
  Description of Artificial Sequence: Synthetic oligonucleotide
guaugcagucgguaagucc

SEQ ID NO: 1286902 - RNA, 19 nt, Artificial Sequence
  Description of Artificial Sequence: Synthetic oligonucleotide
gaugaacuugcagucgggc

SEQ ID NO: 1286903 - RNA, 19 nt, Artificial Sequence
  Description of Artificial Sequence: Synthetic oligonucleotide
gucgguaaguccuugguaa

SEQ ID NO: 1286904 - RNA, 19 nt, Artificial Sequence
  Description of Artificial Sequence: Synthetic oligonucleotide
ugguucuccucugauaacu

SEQ ID NO: 1286905 - RNA, 19 nt, Artificial Sequence
  Description of Artificial Sequence: Synthetic oligonucleotide
cuugguaaccaccagcaaa

SEQ ID NO: 1286906 - RNA, 19 nt, Artificial Sequence
  Description of Artificial Sequence: Synthetic oligonucleotide
guauacuccccaaacggug

SEQ ID NO: 1286907 - RNA, 19 nt, Artificial Sequence
  Description of Artificial Sequence: Synthetic oligonucleotide
aagaagguaucuugauguu

SEQ ID NO: 1286908 - RNA, 19 nt, Artificial Sequence
  Description of Artificial Sequence: Synthetic oligonucleotide
augugaagacucaaaagga

SEQ ID NO: 1286909 - RNA, 19 nt, Artificial Sequence
  Description of Artificial Sequence: Synthetic oligonucleotide
cauuccaccaacacuggga

SEQ ID NO: 1286910 - RNA, 19 nt, Artificial Sequence
  Description of Artificial Sequence: Synthetic oligonucleotide
uccaguuagccaccugcug

SEQ ID NO: 1286911 - RNA, 19 nt, Artificial Sequence
  Description of Artificial Sequence: Synthetic oligonucleotide
uagaacagauuagccaucu

SEQ ID NO: 1286912 - RNA, 19 nt, Artificial Sequence
  Description of Artificial Sequence: Synthetic oligonucleotide
agaaaaccuaagggcacgg

SEQ ID NO: 1286913 - RNA, 19 nt, Artificial Sequence
  Description of Artificial Sequence: Synthetic oligonucleotide
gguccaguuagccaccugc

SEQ ID NO: 1286914 - RNA, 19 nt, Artificial Sequence
  Description of Artificial Sequence: Synthetic oligonucleotide
uagcuguaggaaccucggg

SEQ ID NO: 1286915 - RNA, 19 nt, Artificial Sequence
  Description of Artificial Sequence: Synthetic oligonucleotide
aguccauagaacagauuag

SEQ ID NO: 1286916 - RNA, 19 nt, Artificial Sequence
  Description of Artificial Sequence: Synthetic oligonucleotide
uagcacuguauacucccca

SEQ ID NO: 1286917 - RNA, 19 nt, Artificial Sequence
  Description of Artificial Sequence: Synthetic oligonucleotide
uacaccaccgaaguagcgu

SEQ ID NO: 1286918 - RNA, 19 nt, Artificial Sequence
  Description of Artificial Sequence: Synthetic oligonucleotide
aaacggugcaagggccacc

SEQ ID NO: 1286919 - RNA, 19 nt, Artificial Sequence
  Description of Artificial Sequence: Synthetic oligonucleotide
agaacagauuagccaucuc

SEQ ID NO: 1286920 - RNA, 19 nt, Artificial Sequence
  Description of Artificial Sequence: Synthetic oligonucleotide
gaggcgaucggcuucccuc

SEQ ID NO: 1286921 - RNA, 19 nt, Artificial Sequence
  Description of Artificial Sequence: Synthetic oligonucleotide
ccaacgagaccucagcacg

SEQ ID NO: 1286922 - RNA, 19 nt, Artificial Sequence
  Description of Artificial Sequence: Synthetic oligonucleotide
uauauggggcacugugcca

SEQ ID NO: 1286923 - RNA, 19 nt, Artificial Sequence
  Description of Artificial Sequence: Synthetic oligonucleotide
aaaugcccgauguguggcu

SEQ ID NO: 1286924 - RNA, 19 nt, Artificial Sequence
  Description of Artificial Sequence: Synthetic oligonucleotide
ugccaacgagaccucagca

SEQ ID NO: 1286925 - RNA, 19 nt, Artificial Sequence
  Description of Artificial Sequence: Synthetic oligonucleotide
ccagugugcacccagcucc

SEQ ID NO: 1286926 - RNA, 19 nt, Artificial Sequence
  Description of Artificial Sequence: Synthetic oligonucleotide
acacguguuccagaacugg

SEQ ID NO: 1286927 - RNA, 19 nt, Artificial Sequence
  Description of Artificial Sequence: Synthetic oligonucleotide
gaaggcagggccacgugcc

SEQ ID NO: 1286928 - RNA, 19 nt, Artificial Sequence
  Description of Artificial Sequence: Synthetic oligonucleotide
accaacacugggaaggucu

SEQ ID NO: 1286929 - RNA, 19 nt, Artificial Sequence
  Description of Artificial Sequence: Synthetic oligonucleotide
cagcccacaugauagagca

SEQ ID NO: 1286930 - RNA, 19 nt, Artificial Sequence
  Description of Artificial Sequence: Synthetic oligonucleotide
uccccagcgaagaguaucu

SEQ ID NO: 1286931 - RNA, 19 nt, Artificial Sequence
  Description of Artificial Sequence: Synthetic oligonucleotide
uccugucacucuccgaagu

SEQ ID NO: 1286932 - RNA, 19 nt, Artificial Sequence
  Description of Artificial Sequence: Synthetic oligonucleotide
aggggugauguguccuccc

SEQ ID NO: 1286933 - RNA, 19 nt, Artificial Sequence
  Description of Artificial Sequence: Synthetic oligonucleotide
uuagagacagaagcacuuc

SEQ ID NO: 1286934 - RNA, 19 nt, Artificial Sequence
  Description of Artificial Sequence: Synthetic oligonucleotide
ggguauauggggcacugug

SEQ ID NO: 1286935 - RNA, 19 nt, Artificial Sequence
  Description of Artificial Sequence: Synthetic oligonucleotide
uggagugagaggguugugu

SEQ ID NO: 1286936 - RNA, 19 nt, Artificial Sequence
  Description of Artificial Sequence: Synthetic oligonucleotide
ugccgcucacgcaacauuc

SEQ ID NO: 1286937 - RNA, 19 nt, Artificial Sequence
  Description of Artificial Sequence: Synthetic oligonucleotide
ucucgggucuggucuauca

SEQ ID NO: 1286938 - RNA, 19 nt, Artificial Sequence
  Description of Artificial Sequence: Synthetic oligonucleotide
ggucuaucaguccauagaa

SEQ ID NO: 1286939 - RNA, 19 nt, Artificial Sequence
  Description of Artificial Sequence: Synthetic oligonucleotide
auuagagacagaagcacuu

SEQ ID NO: 1286940 - RNA, 19 nt, Artificial Sequence
  Description of Artificial Sequence: Synthetic oligonucleotide
gaacuugcagucgggcucc

SEQ ID NO: 1286941 - RNA, 19 nt, Artificial Sequence
  Description of Artificial Sequence: Synthetic oligonucleotide
gguggaauaaaaugcccga

SEQ ID NO: 1286942 - RNA, 19 nt, Artificial Sequence
  Description of Artificial Sequence: Synthetic oligonucleotide
uccgaaguacuugcauuag

SEQ ID NO: 1286943 - RNA, 19 nt, Artificial Sequence
  Description of Artificial Sequence: Synthetic oligonucleotide
uguaggggugauguguccu

SEQ ID NO: 1286944 - RNA, 19 nt, Artificial Sequence
  Description of Artificial Sequence: Synthetic oligonucleotide
gaacucucgggucuggucu

SEQ ID NO: 1286945 - RNA, 19 nt, Artificial Sequence
  Description of Artificial Sequence: Synthetic oligonucleotide
aacggugcaagggccacca

SEQ ID NO: 1286946 - RNA, 19 nt, Artificial Sequence
  Description of Artificial Sequence: Synthetic oligonucleotide
gagucucaguugcauucag

SEQ ID NO: 1286947 - RNA, 19 nt, Artificial Sequence
  Description of Artificial Sequence: Synthetic oligonucleotide
uguaccugugagucccaca

SEQ ID NO: 1286948 - RNA, 19 nt, Artificial Sequence
  Description of Artificial Sequence: Synthetic oligonucleotide
caacgagaccucagcacgc

SEQ ID NO: 1286949 - RNA, 19 nt, Artificial Sequence
  Description of Artificial Sequence: Synthetic oligonucleotide
ucgggcucccagaagggcu

SEQ ID NO: 1286950 - RNA, 19 nt, Artificial Sequence
  Description of Artificial Sequence: Synthetic oligonucleotide
ucgguaaguccuugguaac

SEQ ID NO: 1286951 - RNA, 19 nt, Artificial Sequence
  Description of Artificial Sequence: Synthetic oligonucleotide
uugguaccaaagccuauuu

SEQ ID NO: 1286952 - RNA, 19 nt, Artificial Sequence
  Description of Artificial Sequence: Synthetic oligonucleotide
aucgaauccuugggcaagg

SEQ ID NO: 1286953 - RNA, 19 nt, Artificial Sequence
  Description of Artificial Sequence: Synthetic oligonucleotide
cuacaccaccgaaguagcg

SEQ ID NO: 1286954 - RNA, 19 nt, Artificial Sequence
  Description of Artificial Sequence: Synthetic oligonucleotide
acguguuccagaacugguc

SEQ ID NO: 1286955 - RNA, 19 nt, Artificial Sequence
  Description of Artificial Sequence: Synthetic oligonucleotide
aguugcauucaggaacucu

SEQ ID NO: 1286956 - RNA, 19 nt, Artificial Sequence
  Description of Artificial Sequence: Synthetic oligonucleotide
guuguugguaccaaagccu

SEQ ID NO: 1286957 - RNA, 19 nt, Artificial Sequence
  Description of Artificial Sequence: Synthetic oligonucleotide
ugguaaccaccagcaaagg

SEQ ID NO: 1286958 - RNA, 19 nt, Artificial Sequence
  Description of Artificial Sequence: Synthetic oligonucleotide
ugugagucccacagaucaa

SEQ ID NO: 1286959 - RNA, 19 nt, Artificial Sequence
  Description of Artificial Sequence: Synthetic oligonucleotide
cacggugacgaugacauga

SEQ ID NO: 1286960 - RNA, 19 nt, Artificial Sequence
  Description of Artificial Sequence: Synthetic oligonucleotide
uccgacucgagcccagcaa

SEQ ID NO: 1286961 - RNA, 19 nt, Artificial Sequence
  Description of Artificial Sequence: Synthetic oligonucleotide
agcacuguauacuccccaa

SEQ ID NO: 1286962 - RNA, 19 nt, Artificial Sequence
  Description of Artificial Sequence: Synthetic oligonucleotide
agucucaguugcauucagg

SEQ ID NO: 1286963 - RNA, 19 nt, Artificial Sequence
  Description of Artificial Sequence: Synthetic oligonucleotide
gcucacgcaacauucuaug

SEQ ID NO: 1286964 - RNA, 19 nt, Artificial Sequence
  Description of Artificial Sequence: Synthetic oligonucleotide
ggcccauggauccagugug

SEQ ID NO: 1286965 - RNA, 19 nt, Artificial Sequence
  Description of Artificial Sequence: Synthetic oligonucleotide
uaagggcacggugacgaug

SEQ ID NO: 1286966 - RNA, 19 nt, Artificial Sequence
  Description of Artificial Sequence: Synthetic oligonucleotide
caugugugguggaauaaaa

SEQ ID NO: 1286967 - RNA, 19 nt, Artificial Sequence
  Description of Artificial Sequence: Synthetic oligonucleotide
ugucuuggagugagagggu

SEQ ID NO: 1286968 - RNA, 19 nt, Artificial Sequence
  Description of Artificial Sequence: Synthetic oligonucleotide
uccaggcucacacguguuc

SEQ ID NO: 1286969 - RNA, 19 nt, Artificial Sequence
  Description of Artificial Sequence: Synthetic oligonucleotide
cugugggugccgcucacgc

SEQ ID NO: 1286970 - RNA, 19 nt, Artificial Sequence
  Description of Artificial Sequence: Synthetic oligonucleotide
caucgaauccuugggcaag

SEQ ID NO: 1286971 - RNA, 19 nt, Artificial Sequence
  Description of Artificial Sequence: Synthetic oligonucleotide
gcugguucuccucugauaa

SEQ ID NO: 1286972 - RNA, 19 nt, Artificial Sequence
  Description of Artificial Sequence: Synthetic oligonucleotide
gugccaacgagaccucagc

SEQ ID NO: 1286973 - RNA, 19 nt, Artificial Sequence
  Description of Artificial Sequence: Synthetic oligonucleotide
auauggggcacugugccaa

SEQ ID NO: 1286974 - RNA, 19 nt, Artificial Sequence
  Description of Artificial Sequence: Synthetic oligonucleotide
gguauauggggcacugugc

SEQ ID NO: 1286975 - RNA, 19 nt, Artificial Sequence
  Description of Artificial Sequence: Synthetic oligonucleotide
gcauuagagacagaagcac

SEQ ID NO: 1286976 - RNA, 19 nt, Artificial Sequence
  Description of Artificial Sequence: Synthetic oligonucleotide
ggacccauuccagugaaug

SEQ ID NO: 1286977 - RNA, 19 nt, Artificial Sequence
  Description of Artificial Sequence: Synthetic oligonucleotide
agucgguaaguccuuggua

SEQ ID NO: 1286978 - RNA, 19 nt, Artificial Sequence
  Description of Artificial Sequence: Synthetic oligonucleotide
guaaguccuugguaaccac

SEQ ID NO: 1286979 - RNA, 19 nt, Artificial Sequence
  Description of Artificial Sequence: Synthetic oligonucleotide
aacgagaccucagcacgcu

SEQ ID NO: 1286980 - RNA, 19 nt, Artificial Sequence
  Description of Artificial Sequence: Synthetic oligonucleotide
gucagcccacaugauagag

SEQ ID NO: 1286981 - RNA, 19 nt, Artificial Sequence
  Description of Artificial Sequence: Synthetic oligonucleotide
guuccgagcggaugcggcc

SEQ ID NO: 1286982 - RNA, 19 nt, Artificial Sequence
  Description of Artificial Sequence: Synthetic oligonucleotide
gaguaucuggagcugggua

SEQ ID NO: 1286983 - RNA, 19 nt, Artificial Sequence
  Description of Artificial Sequence: Synthetic oligonucleotide
gcugcuguaccugugaguc

SEQ ID NO: 1286984 - RNA, 19 nt, Artificial Sequence
  Description of Artificial Sequence: Synthetic oligonucleotide
aggagcccgaacuccgcag

SEQ ID NO: 1286985 - RNA, 19 nt, Artificial Sequence
  Description of Artificial Sequence: Synthetic oligonucleotide
auacuccccaaacggugca

SEQ ID NO: 1286986 - RNA, 19 nt, Artificial Sequence
  Description of Artificial Sequence: Synthetic oligonucleotide
cucgggucuggucuaucag

SEQ ID NO: 1286987 - RNA, 19 nt, Artificial Sequence
  Description of Artificial Sequence: Synthetic oligonucleotide
uggagcuggguaccaguuc

SEQ ID NO: 1286988 - RNA, 19 nt, Artificial Sequence
  Description of Artificial Sequence: Synthetic oligonucleotide
ucggguauauggggcacug

SEQ ID NO: 1286989 - RNA, 19 nt, Artificial Sequence
  Description of Artificial Sequence: Synthetic oligonucleotide
ccucgguccaguuagccac

SEQ ID NO: 1286990 - RNA, 19 nt, Artificial Sequence
  Description of Artificial Sequence: Synthetic oligonucleotide
ggcaaggaagccaguaugc

SEQ ID NO: 1286991 - RNA, 19 nt, Artificial Sequence
  Description of Artificial Sequence: Synthetic oligonucleotide
uccagugaauggucuucac

SEQ ID NO: 1286992 - RNA, 19 nt, Artificial Sequence
  Description of Artificial Sequence: Synthetic oligonucleotide
ccuugggcaaggaagccag

SEQ ID NO: 1286993 - RNA, 19 nt, Artificial Sequence
  Description of Artificial Sequence: Synthetic oligonucleotide
gcaauuguggguuuccugu

SEQ ID NO: 1286994 - RNA, 19 nt, Artificial Sequence
  Description of Artificial Sequence: Synthetic oligonucleotide
cccagcaauaaacccacag

SEQ ID NO: 1286995 - RNA, 19 nt, Artificial Sequence
  Description of Artificial Sequence: Synthetic oligonucleotide
ggagugagaggguuguguc

SEQ ID NO: 1286996 - RNA, 19 nt, Artificial Sequence
  Description of Artificial Sequence: Synthetic oligonucleotide
aggcggguaccaucuucac

SEQ ID NO: 1286997 - RNA, 19 nt, Artificial Sequence
  Description of Artificial Sequence: Synthetic oligonucleotide
ggcacugugccaacgagac

SEQ ID NO: 1286998 - RNA, 19 nt, Artificial Sequence
  Description of Artificial Sequence: Synthetic oligonucleotide
cccagcgaagaguaucugg

SEQ ID NO: 1286999 - RNA, 19 nt, Artificial Sequence
  Description of Artificial Sequence: Synthetic oligonucleotide
aacucucgggucuggucua

SEQ ID NO: 1287000 - RNA, 19 nt, Artificial Sequence
  Description of Artificial Sequence: Synthetic oligonucleotide
gucuaucaguccauagaac

SEQ ID NO: 1287001 - RNA, 19 nt, Artificial Sequence
  Description of Artificial Sequence: Synthetic oligonucleotide
cuccgaaguacuugcauua

SEQ ID NO: 1287002 - RNA, 19 nt, Artificial Sequence
  Description of Artificial Sequence: Synthetic oligonucleotide
uaccugugagucccacaga

SEQ ID NO: 1287003 - RNA, 19 nt, Artificial Sequence
  Description of Artificial Sequence: Synthetic oligonucleotide
cauagcuugcucagggucu

SEQ ID NO: 1287004 - RNA, 19 nt, Artificial Sequence
  Description of Artificial Sequence: Synthetic oligonucleotide
acgagaccucagcacgcuc

SEQ ID NO: 1287005 - RNA, 19 nt, Artificial Sequence
  Description of Artificial Sequence: Synthetic oligonucleotide
ccaguaugcagucgguaag

SEQ ID NO: 1287006 - RNA, 19 nt, Artificial Sequence
  Description of Artificial Sequence: Synthetic oligonucleotide
augcccgauguguggcuuc

SEQ ID NO: 1287007 - RNA, 19 nt, Artificial Sequence
  Description of Artificial Sequence: Synthetic oligonucleotide
uugcagucgggcucccaga

SEQ ID NO: 1287008 - RNA, 19 nt, Artificial Sequence
  Description of Artificial Sequence: Synthetic oligonucleotide
gugggugccgcucacgcaa

SEQ ID NO: 1287009 - RNA, 19 nt, Artificial Sequence
  Description of Artificial Sequence: Synthetic oligonucleotide
guagcacuguauacucccc

SEQ ID NO: 1287010 - RNA, 19 nt, Artificial Sequence
  Description of Artificial Sequence: Synthetic oligonucleotide
gguaaguccuugguaacca

SEQ ID NO: 1287011 - RNA, 19 nt, Artificial Sequence
  Description of Artificial Sequence: Synthetic oligonucleotide
aaguagcguuccgagcgga

SEQ ID NO: 1287012 - RNA, 19 nt, Artificial Sequence
  Description of Artificial Sequence: Synthetic oligonucleotide
ccacagagcacaugugaag

SEQ ID NO: 1287013 - RNA, 19 nt, Artificial Sequence
  Description of Artificial Sequence: Synthetic oligonucleotide
aggggcugagccaacagau

SEQ ID NO: 1287014 - RNA, 19 nt, Artificial Sequence
  Description of Artificial Sequence: Synthetic oligonucleotide
caggcggguaccaucuuca

SEQ ID NO: 1287015 - RNA, 19 nt, Artificial Sequence
  Description of Artificial Sequence: Synthetic oligonucleotide
agcacaugugaagacucaa

SEQ ID NO: 1287016 - RNA, 19 nt, Artificial Sequence
  Description of Artificial Sequence: Synthetic oligonucleotide
gcagucgguaaguccuugg

SEQ ID NO: 1287017 - RNA, 19 nt, Artificial Sequence
  Description of Artificial Sequence: Synthetic oligonucleotide
ugaggcgaucggcuucccu

SEQ ID NO: 1287018 - RNA, 19 nt, Artificial Sequence
  Description of Artificial Sequence: Synthetic oligonucleotide
aacuugcagucgggcuccc

SEQ ID NO: 1287019 - RNA, 19 nt, Artificial Sequence
  Description of Artificial Sequence: Synthetic oligonucleotide
gccaacgagaccucagcac

SEQ ID NO: 1287020 - RNA, 19 nt, Artificial Sequence
  Description of Artificial Sequence: Synthetic oligonucleotide
cugguucuccucugauaac

SEQ ID NO: 1287021 - RNA, 19 nt, Artificial Sequence
  Description of Artificial Sequence: Synthetic oligonucleotide
aaggugcaauccagccccg

SEQ ID NO: 1287022 - RNA, 19 nt, Artificial Sequence
  Description of Artificial Sequence: Synthetic oligonucleotide
cccaaacggugcaagggcc

SEQ ID NO: 1287023 - RNA, 19 nt, Artificial Sequence
  Description of Artificial Sequence: Synthetic oligonucleotide
agcugguucuccucugaua

SEQ ID NO: 1287024 - RNA, 19 nt, Artificial Sequence
  Description of Artificial Sequence: Synthetic oligonucleotide
aaugcccgauguguggcuu

SEQ ID NO: 1287025 - RNA, 19 nt, Artificial Sequence
  Description of Artificial Sequence: Synthetic oligonucleotide
ugcagucgguaaguccuug

SEQ ID NO: 1287026 - RNA, 19 nt, Artificial Sequence
  Description of Artificial Sequence: Synthetic oligonucleotide
cacgcucuuggcugcuggc

SEQ ID NO: 1287027 - RNA, 19 nt, Artificial Sequence
  Description of Artificial Sequence: Synthetic oligonucleotide
ccauagcuugcucaggguc

SEQ ID NO: 1287028 - RNA, 19 nt, Artificial Sequence
  Description of Artificial Sequence: Synthetic oligonucleotide
uggcaauuguggguuuccu

SEQ ID NO: 1287029 - RNA, 19 nt, Artificial Sequence
  Description of Artificial Sequence: Synthetic oligonucleotide
caaacggugcaagggccac

SEQ ID NO: 1287030 - RNA, 19 nt, Artificial Sequence
  Description of Artificial Sequence: Synthetic oligonucleotide
aacuccgcagccagcugga

SEQ ID NO: 1287031 - RNA, 19 nt, Artificial Sequence
  Description of Artificial Sequence: Synthetic oligonucleotide
ggaugaacuugcagucggg

SEQ ID NO: 1287032 - RNA, 19 nt, Artificial Sequence
  Description of Artificial Sequence: Synthetic oligonucleotide
aggacccgcagguguggag

SEQ ID NO: 1287033 - RNA, 19 nt, Artificial Sequence
  Description of Artificial Sequence: Synthetic oligonucleotide
agcguuccgagcggaugcg

SEQ ID NO: 1287034 - RNA, 19 nt, Artificial Sequence
  Description of Artificial Sequence: Synthetic oligonucleotide
cauccucgguccaguuagc

SEQ ID NO: 1287035 - RNA, 19 nt, Artificial Sequence
  Description of Artificial Sequence: Synthetic oligonucleotide
accuaagggcacggugacg

SEQ ID NO: 1287036 - RNA, 19 nt, Artificial Sequence
  Description of Artificial Sequence: Synthetic oligonucleotide
ugcccgauguguggcuucc

SEQ ID NO: 1287037 - RNA, 19 nt, Artificial Sequence
  Description of Artificial Sequence: Synthetic oligonucleotide
ccccaaacggugcaagggc

SEQ ID NO: 1287038 - RNA, 19 nt, Artificial Sequence
  Description of Artificial Sequence: Synthetic oligonucleotide
gagcacaugugaagacuca

SEQ ID NO: 1287039 - RNA, 19 nt, Artificial Sequence
  Description of Artificial Sequence: Synthetic oligonucleotide
gacucgagcccagcaauaa

SEQ ID NO: 1287040 - RNA, 19 nt, Artificial Sequence
  Description of Artificial Sequence: Synthetic oligonucleotide
aagucuccauaaacuccga

SEQ ID NO: 1287041 - RNA, 19 nt, Artificial Sequence
  Description of Artificial Sequence: Synthetic oligonucleotide
aagccaguaugcagucggu

SEQ ID NO: 1287042 - RNA, 19 nt, Artificial Sequence
  Description of Artificial Sequence: Synthetic oligonucleotide
ccauaaacuccgacucgag

SEQ ID NO: 1287043 - RNA, 19 nt, Artificial Sequence
  Description of Artificial Sequence: Synthetic oligonucleotide
cgagcccagcaauaaaccc

SEQ ID NO: 1287044 - RNA, 19 nt, Artificial Sequence
  Description of Artificial Sequence: Synthetic oligonucleotide
ggagcccgaacuccgcagc

SEQ ID NO: 1287045 - RNA, 19 nt, Artificial Sequence
  Description of Artificial Sequence: Synthetic oligonucleotide
ucgaauccuugggcaagga

SEQ ID NO: 1287046 - RNA, 19 nt, Artificial Sequence
  Description of Artificial Sequence: Synthetic oligonucleotide
ggacgccauagcuugcuca

SEQ ID NO: 1287047 - RNA, 19 nt, Artificial Sequence
  Description of Artificial Sequence: Synthetic oligonucleotide
ggcggcagagucucugcgc

SEQ ID NO: 1287048 - RNA, 19 nt, Artificial Sequence
  Description of Artificial Sequence: Synthetic oligonucleotide
cacgugcccuccugucucc

SEQ ID NO: 1287049 - RNA, 19 nt, Artificial Sequence
  Description of Artificial Sequence: Synthetic oligonucleotide
acgcaacauucuauguuga

SEQ ID NO: 1287050 - RNA, 19 nt, Artificial Sequence
  Description of Artificial Sequence: Synthetic oligonucleotide
aggugcaauccagccccgg

SEQ ID NO: 1287051 - RNA, 19 nt, Artificial Sequence
  Description of Artificial Sequence: Synthetic oligonucleotide
cuaggucaucaccagugcu

SEQ ID NO: 1287052 - RNA, 19 nt, Artificial Sequence
  Description of Artificial Sequence: Synthetic oligonucleotide
cuuggagugagaggguugu

SEQ ID NO: 1287053 - RNA, 19 nt, Artificial Sequence
  Description of Artificial Sequence: Synthetic oligonucleotide
gcacgcucuuggcugcugg

SEQ ID NO: 1287054 - RNA, 19 nt, Artificial Sequence
  Description of Artificial Sequence: Synthetic oligonucleotide
gcucacacguguuccagaa

SEQ ID NO: 1287055 - RNA, 19 nt, Artificial Sequence
  Description of Artificial Sequence: Synthetic oligonucleotide
guccuguaggggugaugug

SEQ ID NO: 1287056 - RNA, 19 nt, Artificial Sequence
  Description of Artificial Sequence: Synthetic oligonucleotide
cucacgcaacauucuaugu

SEQ ID NO: 1287057 - RNA, 19 nt, Artificial Sequence
  Description of Artificial Sequence: Synthetic oligonucleotide
aaaagccaaugagcuucuu

SEQ ID NO: 1287058 - RNA, 19 nt, Artificial Sequence
  Description of Artificial Sequence: Synthetic oligonucleotide
gucgggcucccagaagggc

SEQ ID NO: 1287059 - RNA, 19 nt, Artificial Sequence
  Description of Artificial Sequence: Synthetic oligonucleotide
auaaacccacagagcacau

SEQ ID NO: 1287060 - RNA, 19 nt, Artificial Sequence
  Description of Artificial Sequence: Synthetic oligonucleotide
gucucugcgcagcgcccag

SEQ ID NO: 1287061 - RNA, 19 nt, Artificial Sequence
  Description of Artificial Sequence: Synthetic oligonucleotide
cacguguuccagaacuggu

SEQ ID NO: 1287062 - RNA, 19 nt, Artificial Sequence
  Description of Artificial Sequence: Synthetic oligonucleotide
guugguaccaaagccuauu

SEQ ID NO: 1287063 - RNA, 19 nt, Artificial Sequence
  Description of Artificial Sequence: Synthetic oligonucleotide
gcaaggaagccaguaugca

SEQ ID NO: 1287064 - RNA, 19 nt, Artificial Sequence
  Description of Artificial Sequence: Synthetic oligonucleotide
acggugacgaugacaugau

SEQ ID NO: 1287065 - RNA, 19 nt, Artificial Sequence
  Description of Artificial Sequence: Synthetic oligonucleotide
gcggcagagucucugcgca

SEQ ID NO: 1287066 - RNA, 19 nt, Artificial Sequence
  Description of Artificial Sequence: Synthetic oligonucleotide
ggugcaagggccaccaggu

SEQ ID NO: 1287067 - RNA, 19 nt, Artificial Sequence
  Description of Artificial Sequence: Synthetic oligonucleotide
ccauggauccagugugcac

SEQ ID NO: 1287068 - RNA, 19 nt, Artificial Sequence
  Description of Artificial Sequence: Synthetic oligonucleotide
cuguaccugugagucccac

SEQ ID NO: 1287069 - RNA, 19 nt, Artificial Sequence
  Description of Artificial Sequence: Synthetic oligonucleotide
guggaauaaaaugcccgau

SEQ ID NO: 1287070 - RNA, 19 nt, Artificial Sequence
  Description of Artificial Sequence: Synthetic oligonucleotide
ggcggguaccaucuucaca

SEQ ID NO: 1287071 - RNA, 19 nt, Artificial Sequence
  Description of Artificial Sequence: Synthetic oligonucleotide
gcuggguaccaguuccauc

SEQ ID NO: 1287072 - RNA, 19 nt, Artificial Sequence
  Description of Artificial Sequence: Synthetic oligonucleotide
cucauccucgguccaguua

SEQ ID NO: 1287073 - RNA, 19 nt, Artificial Sequence
  Description of Artificial Sequence: Synthetic oligonucleotide
ucgguccaguuagccaccu

SEQ ID NO: 1287074 - RNA, 19 nt, Artificial Sequence
  Description of Artificial Sequence: Synthetic oligonucleotide
agcuggguaccaguuccau

SEQ ID NO: 1287075 - RNA, 19 nt, Artificial Sequence
  Description of Artificial Sequence: Synthetic oligonucleotide
cagugugcacccagcucca

SEQ ID NO: 1287076 - RNA, 19 nt, Artificial Sequence
  Description of Artificial Sequence: Synthetic oligonucleotide
agccaguaugcagucggua

SEQ ID NO: 1287077 - RNA, 19 nt, Artificial Sequence
  Description of Artificial Sequence: Synthetic oligonucleotide
agaccucagcacgcucuug

SEQ ID NO: 1287078 - RNA, 19 nt, Artificial Sequence
  Description of Artificial Sequence: Synthetic oligonucleotide
guaggaaccucggguauau

SEQ ID NO: 1287079 - RNA, 19 nt, Artificial Sequence
  Description of Artificial Sequence: Synthetic oligonucleotide
gcaggcggguaccaucuuc

SEQ ID NO: 1287080 - RNA, 19 nt, Artificial Sequence
  Description of Artificial Sequence: Synthetic oligonucleotide
ggggugauguguccuccca

SEQ ID NO: 1287081 - RNA, 19 nt, Artificial Sequence
  Description of Artificial Sequence: Synthetic oligonucleotide
cagucgguaaguccuuggu

SEQ ID NO: 1287082 - RNA, 19 nt, Artificial Sequence
  Description of Artificial Sequence: Synthetic oligonucleotide
gugagucccacagaucaau

SEQ ID NO: 1287083 - RNA, 19 nt, Artificial Sequence
  Description of Artificial Sequence: Synthetic oligonucleotide
acggugcaagggccaccag

SEQ ID NO: 1287084 - RNA, 19 nt, Artificial Sequence
  Description of Artificial Sequence: Synthetic oligonucleotide
ccugugagucccacagauc

SEQ ID NO: 1287085 - RNA, 19 nt, Artificial Sequence
  Description of Artificial Sequence: Synthetic oligonucleotide
gggaaggucuccccuggaa

SEQ ID NO: 1287086 - RNA, 19 nt, Artificial Sequence
  Description of Artificial Sequence: Synthetic oligonucleotide
agcccgaacuccgcagcca

SEQ ID NO: 1287087 - RNA, 19 nt, Artificial Sequence
  Description of Artificial Sequence: Synthetic oligonucleotide
aguagcguuccgagcggau

SEQ ID NO: 1287088 - RNA, 19 nt, Artificial Sequence
  Description of Artificial Sequence: Synthetic oligonucleotide
caggagcccgaacuccgca

SEQ ID NO: 1287089 - RNA, 19 nt, Artificial Sequence
  Description of Artificial Sequence: Synthetic oligonucleotide
gugcaagggccaccagguc

SEQ ID NO: 1287090 - RNA, 19 nt, Artificial Sequence
  Description of Artificial Sequence: Synthetic oligonucleotide
ccaaacggugcaagggcca

SEQ ID NO: 1287091 - RNA, 19 nt, Artificial Sequence
  Description of Artificial Sequence: Synthetic oligonucleotide
cuccgacucgagcccagca

SEQ ID NO: 1287092 - RNA, 19 nt, Artificial Sequence
  Description of Artificial Sequence: Synthetic oligonucleotide
cucuccgaaguacuugcau

SEQ ID NO: 1287093 - RNA, 19 nt, Artificial Sequence
  Description of Artificial Sequence: Synthetic oligonucleotide
caguaugcagucgguaagu

SEQ ID NO: 1287094 - RNA, 19 nt, Artificial Sequence
  Description of Artificial Sequence: Synthetic oligonucleotide
cgccggacgccauagcuug

SEQ ID NO: 1287095 - RNA, 19 nt, Artificial Sequence
  Description of Artificial Sequence: Synthetic oligonucleotide
cgguaaguccuugguaacc

SEQ ID NO: 1287096 - RNA, 19 nt, Artificial Sequence
  Description of Artificial Sequence: Synthetic oligonucleotide
cuucaccggcuugucaaaa

SEQ ID NO: 1287097 - RNA, 19 nt, Artificial Sequence
  Description of Artificial Sequence: Synthetic oligonucleotide
gcacaugugaagacucaaa

SEQ ID NO: 1287098 - RNA, 19 nt, Artificial Sequence
  Description of Artificial Sequence: Synthetic oligonucleotide
ccgaaguacuugcauuaga

SEQ ID NO: 1287099 - RNA, 19 nt, Artificial Sequence
  Description of Artificial Sequence: Synthetic oligonucleotide
gugugcacccagcuccacu

SEQ ID NO: 1287100 - RNA, 19 nt, Artificial Sequence
  Description of Artificial Sequence: Synthetic oligonucleotide
ccacgugcccuccugucuc

SEQ ID NO: 1287101 - RNA, 19 nt, Artificial Sequence
  Description of Artificial Sequence: Synthetic oligonucleotide
guccaguuagccaccugcu

SEQ ID NO: 1287102 - RNA, 19 nt, Artificial Sequence
  Description of Artificial Sequence: Synthetic oligonucleotide
ggugcaauccagccccggu

SEQ ID NO: 1287103 - RNA, 19 nt, Artificial Sequence
  Description of Artificial Sequence: Synthetic oligonucleotide
ccaucgaauccuugggcaa

SEQ ID NO: 1287104 - RNA, 19 nt, Artificial Sequence
  Description of Artificial Sequence: Synthetic oligonucleotide
gcgaucggcuucccuccag

SEQ ID NO: 1287105 - RNA, 19 nt, Artificial Sequence
  Description of Artificial Sequence: Synthetic oligonucleotide
gggcccauggauccagugu

SEQ ID NO: 1287106 - RNA, 19 nt, Artificial Sequence
  Description of Artificial Sequence: Synthetic oligonucleotide
caguugcauucaggaacuc

SEQ ID NO: 1287107 - RNA, 19 nt, Artificial Sequence
  Description of Artificial Sequence: Synthetic oligonucleotide
gcccauggauccagugugc

SEQ ID NO: 1287108 - RNA, 19 nt, Artificial Sequence
  Description of Artificial Sequence: Synthetic oligonucleotide
ccgacaaagucuccauaaa

SEQ ID NO: 1287109 - RNA, 19 nt, Artificial Sequence
  Description of Artificial Sequence: Synthetic oligonucleotide
gucuuggagugagaggguu

SEQ ID NO: 1287110 - RNA, 19 nt, Artificial Sequence
  Description of Artificial Sequence: Synthetic oligonucleotide
agccccgguagcacuguau

SEQ ID NO: 1287111 - RNA, 19 nt, Artificial Sequence
  Description of Artificial Sequence: Synthetic oligonucleotide
cuuggucagcccacaugau

SEQ ID NO: 1287112 - RNA, 19 nt, Artificial Sequence
  Description of Artificial Sequence: Synthetic oligonucleotide
gccccgguagcacuguaua

SEQ ID NO: 1287113 - RNA, 19 nt, Artificial Sequence
  Description of Artificial Sequence: Synthetic oligonucleotide
ccaugugugguggaauaaa

SEQ ID NO: 1287114 - RNA, 19 nt, Artificial Sequence
  Description of Artificial Sequence: Synthetic oligonucleotide
cugugccaacgagaccuca

SEQ ID NO: 1287115 - RNA, 19 nt, Artificial Sequence
  Description of Artificial Sequence: Synthetic oligonucleotide
cugcuggcaauuguggguu

SEQ ID NO: 1287116 - RNA, 19 nt, Artificial Sequence
  Description of Artificial Sequence: Synthetic oligonucleotide
gcguuccgagcggaugcgg

SEQ ID NO: 1287117 - RNA, 19 nt, Artificial Sequence
  Description of Artificial Sequence: Synthetic oligonucleotide
augcagucgguaaguccuu

SEQ ID NO: 1287118 - RNA, 19 nt, Artificial Sequence
  Description of Artificial Sequence: Synthetic oligonucleotide
cucucgggucuggucuauc

SEQ ID NO: 1287119 - RNA, 19 nt, Artificial Sequence
  Description of Artificial Sequence: Synthetic oligonucleotide
ccauuccagugaauggucu

SEQ ID NO: 1287120 - RNA, 19 nt, Artificial Sequence
  Description of Artificial Sequence: Synthetic oligonucleotide
gcacggugacgaugacaug

SEQ ID NO: 1287121 - RNA, 19 nt, Artificial Sequence
  Description of Artificial Sequence: Synthetic oligonucleotide
agccggguggcggcagagu

SEQ ID NO: 1287122 - RNA, 19 nt, Artificial Sequence
  Description of Artificial Sequence: Synthetic oligonucleotide
ccugucacucuccgaagua

SEQ ID NO: 1287123 - RNA, 19 nt, Artificial Sequence
  Description of Artificial Sequence: Synthetic oligonucleotide
aggacccauuccagugaau

SEQ ID NO: 1287124 - RNA, 19 nt, Artificial Sequence
  Description of Artificial Sequence: Synthetic oligonucleotide
acgugcccuccugucucca

SEQ ID NO: 1287125 - RNA, 19 nt, Artificial Sequence
  Description of Artificial Sequence: Synthetic oligonucleotide
gccgccggacgccauagcu

SEQ ID NO: 1287126 - RNA, 19 nt, Artificial Sequence
  Description of Artificial Sequence: Synthetic oligonucleotide
gccauagcuugcucagggu

SEQ ID NO: 1287127 - RNA, 19 nt, Artificial Sequence
  Description of Artificial Sequence: Synthetic oligonucleotide
ccucggguauauggggcac

SEQ ID NO: 1287128 - RNA, 19 nt, Artificial Sequence
  Description of Artificial Sequence: Synthetic oligonucleotide
cgaugacaugaugggcggg

SEQ ID NO: 1287129 - RNA, 19 nt, Artificial Sequence
  Description of Artificial Sequence: Synthetic oligonucleotide
ccaacagaucuaggucauc

SEQ ID NO: 1287130 - RNA, 19 nt, Artificial Sequence
  Description of Artificial Sequence: Synthetic oligonucleotide
cuaagggcacggugacgau

SEQ ID NO: 1287131 - RNA, 19 nt, Artificial Sequence
  Description of Artificial Sequence: Synthetic oligonucleotide
ggcgaucggcuucccucca

SEQ ID NO: 1287132 - RNA, 19 nt, Artificial Sequence
  Description of Artificial Sequence: Synthetic oligonucleotide
ccuugguaaccaccagcaa

SEQ ID NO: 1287133 - RNA, 19 nt, Artificial Sequence
  Description of Artificial Sequence: Synthetic oligonucleotide
cucggguauauggggcacu

SEQ ID NO: 1287134 - RNA, 19 nt, Artificial Sequence
  Description of Artificial Sequence: Synthetic oligonucleotide
uugcccugggagggcccau

SEQ ID NO: 1287135 - RNA, 19 nt, Artificial Sequence
  Description of Artificial Sequence: Synthetic oligonucleotide
cggugacgaugacaugaug

SEQ ID NO: 1287136 - RNA, 19 nt, Artificial Sequence
  Description of Artificial Sequence: Synthetic oligonucleotide
cccaugugugguggaauaa

SEQ ID NO: 1287137 - RNA, 19 nt, Artificial Sequence
  Description of Artificial Sequence: Synthetic oligonucleotide
gcgaugccgccgcccacca

SEQ ID NO: 1287138 - RNA, 19 nt, Artificial Sequence
  Description of Artificial Sequence: Synthetic oligonucleotide
ggccgccggacgccauagc

SEQ ID NO: 1287139 - RNA, 19 nt, Artificial Sequence
  Description of Artificial Sequence: Synthetic oligonucleotide
cuccaggcucacacguguu

SEQ ID NO: 1287140 - RNA, 19 nt, Artificial Sequence
  Description of Artificial Sequence: Synthetic oligonucleotide
cccgcgaugccgccgccca

SEQ ID NO: 1287141 - RNA, 19 nt, Artificial Sequence
  Description of Artificial Sequence: Synthetic oligonucleotide
ggccccaugugugguggaa

SEQ ID NO: 1287142 - RNA, 19 nt, Artificial Sequence
  Description of Artificial Sequence: Synthetic oligonucleotide
ccgaacuccgcagccagcu

SEQ ID NO: 1287143 - RNA, 19 nt, Artificial Sequence
  Description of Artificial Sequence: Synthetic oligonucleotide
ccgcucacgcaacauucua

SEQ ID NO: 1287144 - RNA, 19 nt, Artificial Sequence
  Description of Artificial Sequence: Synthetic oligonucleotide
ccccagcgaagaguaucug

SEQ ID NO: 1287145 - RNA, 19 nt, Artificial Sequence
  Description of Artificial Sequence: Synthetic oligonucleotide
cagcacccgcgggccgccg

SEQ ID NO: 1287146 - RNA, 19 nt, Artificial Sequence
  Description of Artificial Sequence: Synthetic oligonucleotide
gccggacgccauagcuugc

SEQ ID NO: 1287147 - RNA, 19 nt, Artificial Sequence
  Description of Artificial Sequence: Synthetic oligonucleotide
ccugcugacuuaucuccuu

SEQ ID NO: 1287148 - RNA, 19 nt, Artificial Sequence
  Description of Artificial Sequence: Synthetic oligonucleotide
gccgcucacgcaacauucu

SEQ ID NO: 1287149 - RNA, 19 nt, Artificial Sequence
  Description of Artificial Sequence: Synthetic oligonucleotide
ccacuacaccaccgaagua

SEQ ID NO: 1287150 - RNA, 19 nt, Artificial Sequence
  Description of Artificial Sequence: Synthetic oligonucleotide
ccuaggccggggcugcugu

SEQ ID NO: 1287151 - RNA, 19 nt, Artificial Sequence
  Description of Artificial Sequence: Synthetic oligonucleotide
cggacgccauagcuugcuc

SEQ ID NO: 1287152 - RNA, 19 nt, Artificial Sequence
  Description of Artificial Sequence: Synthetic oligonucleotide
cgacucgagcccagcaaua

SEQ ID NO: 1287153 - RNA, 19 nt, Artificial Sequence
  Description of Artificial Sequence: Synthetic oligonucleotide
ccggguggcggcagagucu

SEQ ID NO: 1287154 - RNA, 19 nt, Artificial Sequence
  Description of Artificial Sequence: Synthetic oligonucleotide
ccggacgccauagcuugcu

SEQ ID NO: 1287155 - RNA, 19 nt, Artificial Sequence
  Description of Artificial Sequence: Synthetic oligonucleotide
ccgccggacgccauagcuu

SEQ ID NO: 1287156 - RNA, 19 nt, Artificial Sequence
  Description of Artificial Sequence: Synthetic oligonucleotide
gccccgcgaugccgccgcc

SEQ ID NO: 1287157 - RNA, 19 nt, Artificial Sequence
  Description of Artificial Sequence: Synthetic oligonucleotide
gcgccggcgguggccucca

SEQ ID NO: 1287158 - RNA, 19 nt, Artificial Sequence
  Description of Artificial Sequence: Synthetic oligonucleotide
gcgggcaggcggguaccau

SEQ ID NO: 1287159 - RNA, 19 nt, Artificial Sequence
  Description of Artificial Sequence: Synthetic oligonucleotide
cggguauauggggcacugu

SEQ ID NO: 1287160 - RNA, 19 nt, Artificial Sequence
  Description of Artificial Sequence: Synthetic oligonucleotide
cgggccgccggacgccaua

SEQ ID NO: 1287161 - RNA, 19 nt, Artificial Sequence
  Description of Artificial Sequence: Synthetic oligonucleotide
aaaaguuagucuugaaucc

SEQ ID NO: 1287162 - RNA, 19 nt, Artificial Sequence
  Description of Artificial Sequence: Synthetic oligonucleotide
aauacaauggcugcgcagc

SEQ ID NO: 1287163 - RNA, 19 nt, Artificial Sequence
  Description of Artificial Sequence: Synthetic oligonucleotide
auaaauucauuccuccucc

SEQ ID NO: 1287164 - RNA, 19 nt, Artificial Sequence
  Description of Artificial Sequence: Synthetic oligonucleotide
aacauuuguacagagucgc

SEQ ID NO: 1287165 - RNA, 19 nt, Artificial Sequence
  Description of Artificial Sequence: Synthetic oligonucleotide
aaagaucgaucccaguugc

SEQ ID NO: 1287166 - RNA, 19 nt, Artificial Sequence
  Description of Artificial Sequence: Synthetic oligonucleotide
ucacaaaccauauagaguc

SEQ ID NO: 1287167 - RNA, 19 nt, Artificial Sequence
  Description of Artificial Sequence: Synthetic oligonucleotide
agaaucaccaaagugaaac

SEQ ID NO: 1287168 - RNA, 19 nt, Artificial Sequence
  Description of Artificial Sequence: Synthetic oligonucleotide
ucauaaauguauuugguac

SEQ ID NO: 1287169 - RNA, 19 nt, Artificial Sequence
  Description of Artificial Sequence: Synthetic oligonucleotide
aauguuugaucacaaaagu

SEQ ID NO: 1287170 - RNA, 19 nt, Artificial Sequence
  Description of Artificial Sequence: Synthetic oligonucleotide
guuaguuucaacuuccugc

SEQ ID NO: 1287171 - RNA, 19 nt, Artificial Sequence
  Description of Artificial Sequence: Synthetic oligonucleotide
uucauuugaggacugacag

SEQ ID NO: 1287172 - RNA, 19 nt, Artificial Sequence
  Description of Artificial Sequence: Synthetic oligonucleotide
caaaaguuagucuugaauc

SEQ ID NO: 1287173 - RNA, 19 nt, Artificial Sequence
  Description of Artificial Sequence: Synthetic oligonucleotide
uguuugaucacaaaaguua

SEQ ID NO: 1287174 - RNA, 19 nt, Artificial Sequence
  Description of Artificial Sequence: Synthetic oligonucleotide
uuugaggacugacagacag

SEQ ID NO: 1287175 - RNA, 19 nt, Artificial Sequence
  Description of Artificial Sequence: Synthetic oligonucleotide
aaaagaucgaucccaguug

SEQ ID NO: 1287176 - RNA, 19 nt, Artificial Sequence
  Description of Artificial Sequence: Synthetic oligonucleotide
aagaugagcacccauauuu

SEQ ID NO: 1287177 - RNA, 19 nt, Artificial Sequence
  Description of Artificial Sequence: Synthetic oligonucleotide
aaguccuuacgauuuauag

SEQ ID NO: 1287178 - RNA, 19 nt, Artificial Sequence
  Description of Artificial Sequence: Synthetic oligonucleotide
aauagcugggcuuuuguca

SEQ ID NO: 1287179 - RNA, 19 nt, Artificial Sequence
  Description of Artificial Sequence: Synthetic oligonucleotide
aaaacaacuucuugcaagu

SEQ ID NO: 1287180 - RNA, 19 nt, Artificial Sequence
  Description of Artificial Sequence: Synthetic oligonucleotide
gguuauauaauccacuaag

SEQ ID NO: 1287181 - RNA, 19 nt, Artificial Sequence
  Description of Artificial Sequence: Synthetic oligonucleotide
ugauauuuucaguuggucc

SEQ ID NO: 1287182 - RNA, 19 nt, Artificial Sequence
  Description of Artificial Sequence: Synthetic oligonucleotide
uguguuugcaaccaugaga

SEQ ID NO: 1287183 - RNA, 19 nt, Artificial Sequence
  Description of Artificial Sequence: Synthetic oligonucleotide
ugugcagaauguuugauca

SEQ ID NO: 1287184 - RNA, 19 nt, Artificial Sequence
  Description of Artificial Sequence: Synthetic oligonucleotide
uuaaaaucugguaaccgcu

SEQ ID NO: 1287185 - RNA, 19 nt, Artificial Sequence
  Description of Artificial Sequence: Synthetic oligonucleotide
cuucacaaaccauauagag

SEQ ID NO: 1287186 - RNA, 19 nt, Artificial Sequence
  Description of Artificial Sequence: Synthetic oligonucleotide
cacaaaucggaguugagcc

SEQ ID NO: 1287187 - RNA, 19 nt, Artificial Sequence
  Description of Artificial Sequence: Synthetic oligonucleotide
uuucauaccgacuuccagc

SEQ ID NO: 1287188 - RNA, 19 nt, Artificial Sequence
  Description of Artificial Sequence: Synthetic oligonucleotide
gcaaccaugagacagauug

SEQ ID NO: 1287189 - RNA, 19 nt, Artificial Sequence
  Description of Artificial Sequence: Synthetic oligonucleotide
aaucucuaguuuuauaaau

SEQ ID NO: 1287190 - RNA, 19 nt, Artificial Sequence
  Description of Artificial Sequence: Synthetic oligonucleotide
aacaacuuguguagcagcc

SEQ ID NO: 1287191 - RNA, 19 nt, Artificial Sequence
  Description of Artificial Sequence: Synthetic oligonucleotide
guuacuacaaaucugguua

SEQ ID NO: 1287192 - RNA, 19 nt, Artificial Sequence
  Description of Artificial Sequence: Synthetic oligonucleotide
gaauucuccuauuauagca

SEQ ID NO: 1287193 - RNA, 19 nt, Artificial Sequence
  Description of Artificial Sequence: Synthetic oligonucleotide
aacggcuauugcuagaugu

SEQ ID NO: 1287194 - RNA, 19 nt, Artificial Sequence
  Description of Artificial Sequence: Synthetic oligonucleotide
gauaaauucauuccuccuc

SEQ ID NO: 1287195 - RNA, 19 nt, Artificial Sequence
  Description of Artificial Sequence: Synthetic oligonucleotide
ucugguaaccgcucaauag

SEQ ID NO: 1287196 - RNA, 19 nt, Artificial Sequence
  Description of Artificial Sequence: Synthetic oligonucleotide
cucaauaggaccuagugca

SEQ ID NO: 1287197 - RNA, 19 nt, Artificial Sequence
  Description of Artificial Sequence: Synthetic oligonucleotide
aauucuugguccuuuguaa

SEQ ID NO: 1287198 - RNA, 19 nt, Artificial Sequence
  Description of Artificial Sequence: Synthetic oligonucleotide
uacuucucgaaccaucucc

SEQ ID NO: 1287199 - RNA, 19 nt, Artificial Sequence
  Description of Artificial Sequence: Synthetic oligonucleotide
aaacauguuacucgcgucu

SEQ ID NO: 1287200 - RNA, 19 nt, Artificial Sequence
  Description of Artificial Sequence: Synthetic oligonucleotide
uuggcaaaucuuuagagaa

SEQ ID NO: 1287201 - RNA, 19 nt, Artificial Sequence
  Description of Artificial Sequence: Synthetic oligonucleotide
auauaauccacuaaguccu

SEQ ID NO: 1287202 - RNA, 19 nt, Artificial Sequence
  Description of Artificial Sequence: Synthetic oligonucleotide
aacuuugcuagcucaagca

SEQ ID NO: 1287203 - RNA, 19 nt, Artificial Sequence
  Description of Artificial Sequence: Synthetic oligonucleotide
gaauuguccgcccaagugc

SEQ ID NO: 1287204 - RNA, 19 nt, Artificial Sequence
  Description of Artificial Sequence: Synthetic oligonucleotide
aauccacuaaguccuuacg

SEQ ID NO: 1287205 - RNA, 19 nt, Artificial Sequence
  Description of Artificial Sequence: Synthetic oligonucleotide
ugugugguuauauaaucca

SEQ ID NO: 1287206 - RNA, 19 nt, Artificial Sequence
  Description of Artificial Sequence: Synthetic oligonucleotide
uuauagauuugauauuuuc

SEQ ID NO: 1287207 - RNA, 19 nt, Artificial Sequence
  Description of Artificial Sequence: Synthetic oligonucleotide
uccaaaauacaauggcugc

SEQ ID NO: 1287208 - RNA, 19 nt, Artificial Sequence
  Description of Artificial Sequence: Synthetic oligonucleotide
uauagcauagcaucugccu

SEQ ID NO: 1287209 - RNA, 19 nt, Artificial Sequence
  Description of Artificial Sequence: Synthetic oligonucleotide
uuugguacauacuucucga

SEQ ID NO: 1287210 - RNA, 19 nt, Artificial Sequence
  Description of Artificial Sequence: Synthetic oligonucleotide
ucggaguugagccaucaag

SEQ ID NO: 1287211 - RNA, 19 nt, Artificial Sequence
  Description of Artificial Sequence: Synthetic oligonucleotide
uuuucauaccgacuuccag

SEQ ID NO: 1287212 - RNA, 19 nt, Artificial Sequence
  Description of Artificial Sequence: Synthetic oligonucleotide
aagugcaguguucugauaa

SEQ ID NO: 1287213 - RNA, 19 nt, Artificial Sequence
  Description of Artificial Sequence: Synthetic oligonucleotide
aauaggaccuagugcagca

SEQ ID NO: 1287214 - RNA, 19 nt, Artificial Sequence
  Description of Artificial Sequence: Synthetic oligonucleotide
uaaggauuacuccacguuc

SEQ ID NO: 1287215 - RNA, 19 nt, Artificial Sequence
  Description of Artificial Sequence: Synthetic oligonucleotide
uuuggcauaguacaccguc

SEQ ID NO: 1287216 - RNA, 19 nt, Artificial Sequence
  Description of Artificial Sequence: Synthetic oligonucleotide
acaaaccauauagaguccc

SEQ ID NO: 1287217 - RNA, 19 nt, Artificial Sequence
  Description of Artificial Sequence: Synthetic oligonucleotide
uuccagugaauuugcaggg

SEQ ID NO: 1287218 - RNA, 19 nt, Artificial Sequence
  Description of Artificial Sequence: Synthetic oligonucleotide
uuugcuagcucaagcagcu

SEQ ID NO: 1287219 - RNA, 19 nt, Artificial Sequence
  Description of Artificial Sequence: Synthetic oligonucleotide
ugcgcagagagaaucacca

SEQ ID NO: 1287220 - RNA, 19 nt, Artificial Sequence
  Description of Artificial Sequence: Synthetic oligonucleotide
cugguaaccgcucaauagg

SEQ ID NO: 1287221 - RNA, 19 nt, Artificial Sequence
  Description of Artificial Sequence: Synthetic oligonucleotide
agcacccauauuuucaauc

SEQ ID NO: 1287222 - RNA, 19 nt, Artificial Sequence
  Description of Artificial Sequence: Synthetic oligonucleotide
guuugcaaccaugagacag

SEQ ID NO: 1287223 - RNA, 19 nt, Artificial Sequence
  Description of Artificial Sequence: Synthetic oligonucleotide
uagcucaagcagcucaucg

SEQ ID NO: 1287224 - RNA, 19 nt, Artificial Sequence
  Description of Artificial Sequence: Synthetic oligonucleotide
uguuacucgcgucucagga

SEQ ID NO: 1287225 - RNA, 19 nt, Artificial Sequence
  Description of Artificial Sequence: Synthetic oligonucleotide
accaaagugaaacuuugcu

SEQ ID NO: 1287226 - RNA, 19 nt, Artificial Sequence
  Description of Artificial Sequence: Synthetic oligonucleotide
ccuauuauagcauagcauc

SEQ ID NO: 1287227 - RNA, 19 nt, Artificial Sequence
  Description of Artificial Sequence: Synthetic oligonucleotide
aaaaucugguaaccgcuca

SEQ ID NO: 1287228 - RNA, 19 nt, Artificial Sequence
  Description of Artificial Sequence: Synthetic oligonucleotide
uucauaccgacuuccagca

SEQ ID NO: 1287229 - RNA, 19 nt, Artificial Sequence
  Description of Artificial Sequence: Synthetic oligonucleotide
ugugccaaaggcaucuugu

SEQ ID NO: 1287230 - RNA, 19 nt, Artificial Sequence
  Description of Artificial Sequence: Synthetic oligonucleotide
uuccaaacauguuacucgc

SEQ ID NO: 1287231 - RNA, 19 nt, Artificial Sequence
  Description of Artificial Sequence: Synthetic oligonucleotide
gguacauacuucucgaacc

SEQ ID NO: 1287232 - RNA, 19 nt, Artificial Sequence
  Description of Artificial Sequence: Synthetic oligonucleotide
acagauugugucuggaugu

SEQ ID NO: 1287233 - RNA, 19 nt, Artificial Sequence
  Description of Artificial Sequence: Synthetic oligonucleotide
guuugaucacaaaaguuag

SEQ ID NO: 1287234 - RNA, 19 nt, Artificial Sequence
  Description of Artificial Sequence: Synthetic oligonucleotide
uuugcaaccaugagacaga

SEQ ID NO: 1287235 - RNA, 19 nt, Artificial Sequence
  Description of Artificial Sequence: Synthetic oligonucleotide
guguuugcaaccaugagac

SEQ ID NO: 1287236 - RNA, 19 nt, Artificial Sequence
  Description of Artificial Sequence: Synthetic oligonucleotide
ugaauuaugucagcaagaa

SEQ ID NO: 1287237 - RNA, 19 nt, Artificial Sequence
  Description of Artificial Sequence: Synthetic oligonucleotide
ucaauccacaguccaacug

SEQ ID NO: 1287238 - RNA, 19 nt, Artificial Sequence
  Description of Artificial Sequence: Synthetic oligonucleotide
gaugugcccaaccaacugc

SEQ ID NO: 1287239 - RNA, 19 nt, Artificial Sequence
  Description of Artificial Sequence: Synthetic oligonucleotide
guaaccgcucaauaggacc

SEQ ID NO: 1287240 - RNA, 19 nt, Artificial Sequence
  Description of Artificial Sequence: Synthetic oligonucleotide
uccuauuauagcauagcau

SEQ ID NO: 1287241 - RNA, 19 nt, Artificial Sequence
  Description of Artificial Sequence: Synthetic oligonucleotide
agcucaucguggcaaacac

SEQ ID NO: 1287242 - RNA, 19 nt, Artificial Sequence
  Description of Artificial Sequence: Synthetic oligonucleotide
caaucaguguguuugcaac

SEQ ID NO: 1287243 - RNA, 19 nt, Artificial Sequence
  Description of Artificial Sequence: Synthetic oligonucleotide
ucccuccaaaauacaaugg

SEQ ID NO: 1287244 - RNA, 19 nt, Artificial Sequence
  Description of Artificial Sequence: Synthetic oligonucleotide
auauauaugugcagaaugu

SEQ ID NO: 1287245 - RNA, 19 nt, Artificial Sequence
  Description of Artificial Sequence: Synthetic oligonucleotide
aguccuuacgauuuauaga

SEQ ID NO: 1287246 - RNA, 19 nt, Artificial Sequence
  Description of Artificial Sequence: Synthetic oligonucleotide
ucaucccucacucgaaucu

SEQ ID NO: 1287247 - RNA, 19 nt, Artificial Sequence
  Description of Artificial Sequence: Synthetic oligonucleotide
ugguacauacuucucgaac

SEQ ID NO: 1287248 - RNA, 19 nt, Artificial Sequence
  Description of Artificial Sequence: Synthetic oligonucleotide
caaaauacaauggcugcgc

SEQ ID NO: 1287249 - RNA, 19 nt, Artificial Sequence
  Description of Artificial Sequence: Synthetic oligonucleotide
ucacucgaaucucacuucc

SEQ ID NO: 1287250 - RNA, 19 nt, Artificial Sequence
  Description of Artificial Sequence: Synthetic oligonucleotide
uuguguagcagccugugua

SEQ ID NO: 1287251 - RNA, 19 nt, Artificial Sequence
  Description of Artificial Sequence: Synthetic oligonucleotide
gauaagcuguggcaugaag

SEQ ID NO: 1287252 - RNA, 19 nt, Artificial Sequence
  Description of Artificial Sequence: Synthetic oligonucleotide
cuuacgauuuauagauuug

SEQ ID NO: 1287253 - RNA, 19 nt, Artificial Sequence
  Description of Artificial Sequence: Synthetic oligonucleotide
uuugaucacaaaaguuagu

SEQ ID NO: 1287254 - RNA, 19 nt, Artificial Sequence
  Description of Artificial Sequence: Synthetic oligonucleotide
ugcuagcucaagcagcuca

SEQ ID NO: 1287255 - RNA, 19 nt, Artificial Sequence
  Description of Artificial Sequence: Synthetic oligonucleotide
ugcuucaacggcuauugcu

SEQ ID NO: 1287256 - RNA, 19 nt, Artificial Sequence
  Description of Artificial Sequence: Synthetic oligonucleotide
uuuggaaucucuaguuuua

SEQ ID NO: 1287257 - RNA, 19 nt, Artificial Sequence
  Description of Artificial Sequence: Synthetic oligonucleotide
uuacucgcgucucaggaac

SEQ ID NO: 1287258 - RNA, 19 nt, Artificial Sequence
  Description of Artificial Sequence: Synthetic oligonucleotide
ucucuaaggauuacuccac

SEQ ID NO: 1287259 - RNA, 19 nt, Artificial Sequence
  Description of Artificial Sequence: Synthetic oligonucleotide
uaaccgcucaauaggaccu

SEQ ID NO: 1287260 - RNA, 19 nt, Artificial Sequence
  Description of Artificial Sequence: Synthetic oligonucleotide
cagcuugcuagauaaauuc

SEQ ID NO: 1287261 - RNA, 19 nt, Artificial Sequence
  Description of Artificial Sequence: Synthetic oligonucleotide
ucaauaggaccuagugcag

SEQ ID NO: 1287262 - RNA, 19 nt, Artificial Sequence
  Description of Artificial Sequence: Synthetic oligonucleotide
uacaccgucuguucucugg

SEQ ID NO: 1287263 - RNA, 19 nt, Artificial Sequence
  Description of Artificial Sequence: Synthetic oligonucleotide
ucaacuuccugcaucucuc

SEQ ID NO: 1287264 - RNA, 19 nt, Artificial Sequence
  Description of Artificial Sequence: Synthetic oligonucleotide
ucccaguugccaaucagug

SEQ ID NO: 1287265 - RNA, 19 nt, Artificial Sequence
  Description of Artificial Sequence: Synthetic oligonucleotide
ucugauaagcuguggcaug

SEQ ID NO: 1287266 - RNA, 19 nt, Artificial Sequence
  Description of Artificial Sequence: Synthetic oligonucleotide
ucucuggagguauaggcgu

SEQ ID NO: 1287267 - RNA, 19 nt, Artificial Sequence
  Description of Artificial Sequence: Synthetic oligonucleotide
uuggucccagaauuguccg

SEQ ID NO: 1287268 - RNA, 19 nt, Artificial Sequence
  Description of Artificial Sequence: Synthetic oligonucleotide
ccaaccaacugcuucaacg

SEQ ID NO: 1287269 - RNA, 19 nt, Artificial Sequence
  Description of Artificial Sequence: Synthetic oligonucleotide
ucuaaggauuacuccacgu

SEQ ID NO: 1287270 - RNA, 19 nt, Artificial Sequence
  Description of Artificial Sequence: Synthetic oligonucleotide
aacauguuacucgcgucuc

SEQ ID NO: 1287271 - RNA, 19 nt, Artificial Sequence
  Description of Artificial Sequence: Synthetic oligonucleotide
gucgcauccauucuugcug

SEQ ID NO: 1287272 - RNA, 19 nt, Artificial Sequence
  Description of Artificial Sequence: Synthetic oligonucleotide
gguauaggcguuaagauga

SEQ ID NO: 1287273 - RNA, 19 nt, Artificial Sequence
  Description of Artificial Sequence: Synthetic oligonucleotide
uguaaugugugguuauaua

SEQ ID NO: 1287274 - RNA, 19 nt, Artificial Sequence
  Description of Artificial Sequence: Synthetic oligonucleotide
uccacuaaguccuuacgau

SEQ ID NO: 1287275 - RNA, 19 nt, Artificial Sequence
  Description of Artificial Sequence: Synthetic oligonucleotide
uucuuagucuguucccucc

SEQ ID NO: 1287276 - RNA, 19 nt, Artificial Sequence
  Description of Artificial Sequence: Synthetic oligonucleotide
uccaaacauguuacucgcg

SEQ ID NO: 1287277 - RNA, 19 nt, Artificial Sequence
  Description of Artificial Sequence: Synthetic oligonucleotide
uuuucauuugaggacugac

SEQ ID NO: 1287278 - RNA, 19 nt, Artificial Sequence
  Description of Artificial Sequence: Synthetic oligonucleotide
ucucauuuucauaccgacu

SEQ ID NO: 1287279 - RNA, 19 nt, Artificial Sequence
  Description of Artificial Sequence: Synthetic oligonucleotide
aguuaguuucaacuuccug

SEQ ID NO: 1287280 - RNA, 19 nt, Artificial Sequence
  Description of Artificial Sequence: Synthetic oligonucleotide
ucuccuauuauagcauagc

SEQ ID NO: 1287281 - RNA, 19 nt, Artificial Sequence
  Description of Artificial Sequence: Synthetic oligonucleotide
acgauuuauagauuugaua

SEQ ID NO: 1287282 - RNA, 19 nt, Artificial Sequence
  Description of Artificial Sequence: Synthetic oligonucleotide
ugaaacuuugcuagcucaa

SEQ ID NO: 1287283 - RNA, 19 nt, Artificial Sequence
  Description of Artificial Sequence: Synthetic oligonucleotide
aaagugagccgucccauua

SEQ ID NO: 1287284 - RNA, 19 nt, Artificial Sequence
  Description of Artificial Sequence: Synthetic oligonucleotide
ucucccaaugugcuguucu

SEQ ID NO: 1287285 - RNA, 19 nt, Artificial Sequence
  Description of Artificial Sequence: Synthetic oligonucleotide
ugcuccagaaagugagccg

SEQ ID NO: 1287286 - RNA, 19 nt, Artificial Sequence
  Description of Artificial Sequence: Synthetic oligonucleotide
aucucucuaaggauuacuc

SEQ ID NO: 1287287 - RNA, 19 nt, Artificial Sequence
  Description of Artificial Sequence: Synthetic oligonucleotide
ugguaaccgcucaauagga

SEQ ID NO: 1287288 - RNA, 19 nt, Artificial Sequence
  Description of Artificial Sequence: Synthetic oligonucleotide
ugggaauucuccuauuaua

SEQ ID NO: 1287289 - RNA, 19 nt, Artificial Sequence
  Description of Artificial Sequence: Synthetic oligonucleotide
uggcauaguacaccgucug

SEQ ID NO: 1287290 - RNA, 19 nt, Artificial Sequence
  Description of Artificial Sequence: Synthetic oligonucleotide
ucuaacuggguccucuuuu

SEQ ID NO: 1287291 - RNA, 19 nt, Artificial Sequence
  Description of Artificial Sequence: Synthetic oligonucleotide
gagacugccaugacaagug

SEQ ID NO: 1287292 - RNA, 19 nt, Artificial Sequence
  Description of Artificial Sequence: Synthetic oligonucleotide
uuucgcucgugcuacuuca

SEQ ID NO: 1287293 - RNA, 19 nt, Artificial Sequence
  Description of Artificial Sequence: Synthetic oligonucleotide
ugguuauauaauccacuaa

SEQ ID NO: 1287294 - RNA, 19 nt, Artificial Sequence
  Description of Artificial Sequence: Synthetic oligonucleotide
aggauuacuccacguucac

SEQ ID NO: 1287295 - RNA, 19 nt, Artificial Sequence
  Description of Artificial Sequence: Synthetic oligonucleotide
auaagcuguggcaugaaga

SEQ ID NO: 1287296 - RNA, 19 nt, Artificial Sequence
  Description of Artificial Sequence: Synthetic oligonucleotide
ucauuugaggacugacaga

SEQ ID NO: 1287297 - RNA, 19 nt, Artificial Sequence
  Description of Artificial Sequence: Synthetic oligonucleotide
gggaauucuccuauuauag

SEQ ID NO: 1287298 - RNA, 19 nt, Artificial Sequence
  Description of Artificial Sequence: Synthetic oligonucleotide
aauuguccgcccaagugca

SEQ ID NO: 1287299 - RNA, 19 nt, Artificial Sequence
  Description of Artificial Sequence: Synthetic oligonucleotide
aaugugcuguucugaauua

SEQ ID NO: 1287300 - RNA, 19 nt, Artificial Sequence
  Description of Artificial Sequence: Synthetic oligonucleotide
guauuugguacauacuucu

SEQ ID NO: 1287301 - RNA, 19 nt, Artificial Sequence
  Description of Artificial Sequence: Synthetic oligonucleotide
auacaauggcugcgcagcg

SEQ ID NO: 1287302 - RNA, 19 nt, Artificial Sequence
  Description of Artificial Sequence: Synthetic oligonucleotide
uuacuacaaaucugguuaa

SEQ ID NO: 1287303 - RNA, 19 nt, Artificial Sequence
  Description of Artificial Sequence: Synthetic oligonucleotide
cauaccgacuuccagcauc

SEQ ID NO: 1287304 - RNA, 19 nt, Artificial Sequence
  Description of Artificial Sequence: Synthetic oligonucleotide
uugaauccagcgcauguua

SEQ ID NO: 1287305 - RNA, 19 nt, Artificial Sequence
  Description of Artificial Sequence: Synthetic oligonucleotide
ucuggaugugcccaaccaa

SEQ ID NO: 1287306 - RNA, 19 nt, Artificial Sequence
  Description of Artificial Sequence: Synthetic oligonucleotide
uucacaaaucggaguugag

SEQ ID NO: 1287307 - RNA, 19 nt, Artificial Sequence
  Description of Artificial Sequence: Synthetic oligonucleotide
cuugcaaguuaguuucaac

SEQ ID NO: 1287308 - RNA, 19 nt, Artificial Sequence
  Description of Artificial Sequence: Synthetic oligonucleotide
ucuuagucuguucccucca

SEQ ID NO: 1287309 - RNA, 19 nt, Artificial Sequence
  Description of Artificial Sequence: Synthetic oligonucleotide
ucacaaaaguuagucuuga

SEQ ID NO: 1287310 - RNA, 19 nt, Artificial Sequence
  Description of Artificial Sequence: Synthetic oligonucleotide
ugagcacccauauuuucaa

SEQ ID NO: 1287311 - RNA, 19 nt, Artificial Sequence
  Description of Artificial Sequence: Synthetic oligonucleotide
accuagugcagcaauagcu

SEQ ID NO: 1287312 - RNA, 19 nt, Artificial Sequence
  Description of Artificial Sequence: Synthetic oligonucleotide
aagaucgaucccaguugcc

SEQ ID NO: 1287313 - RNA, 19 nt, Artificial Sequence
  Description of Artificial Sequence: Synthetic oligonucleotide
cuugucaucccucacucga

SEQ ID NO: 1287314 - RNA, 19 nt, Artificial Sequence
  Description of Artificial Sequence: Synthetic oligonucleotide
ucgcgucucaggaacauuc

SEQ ID NO: 1287315 - RNA, 19 nt, Artificial Sequence
  Description of Artificial Sequence: Synthetic oligonucleotide
uaaauucauuccuccucca

SEQ ID NO: 1287316 - RNA, 19 nt, Artificial Sequence
  Description of Artificial Sequence: Synthetic oligonucleotide
agcgcauguuacuacaaau

SEQ ID NO: 1287317 - RNA, 19 nt, Artificial Sequence
  Description of Artificial Sequence: Synthetic oligonucleotide
auacuucucgaaccaucuc

SEQ ID NO: 1287318 - RNA, 19 nt, Artificial Sequence
  Description of Artificial Sequence: Synthetic oligonucleotide
auccauucuugcugcacag

SEQ ID NO: 1287319 - RNA, 19 nt, Artificial Sequence
  Description of Artificial Sequence: Synthetic oligonucleotide
ugugugcgcagagagaauc

SEQ ID NO: 1287320 - RNA, 19 nt, Artificial Sequence
  Description of Artificial Sequence: Synthetic oligonucleotide
uuucuacagcucuuggcaa

SEQ ID NO: 1287321 - RNA, 19 nt, Artificial Sequence
  Description of Artificial Sequence: Synthetic oligonucleotide
cuucaacggcuauugcuag

SEQ ID NO: 1287322 - RNA, 19 nt, Artificial Sequence
  Description of Artificial Sequence: Synthetic oligonucleotide
uccagcgcauguuacuaca

SEQ ID NO: 1287323 - RNA, 19 nt, Artificial Sequence
  Description of Artificial Sequence: Synthetic oligonucleotide
ggaauucuccuauuauagc

SEQ ID NO: 1287324 - RNA, 19 nt, Artificial Sequence
  Description of Artificial Sequence: Synthetic oligonucleotide
agaugugccaaaggcaucu

SEQ ID NO: 1287325 - RNA, 19 nt, Artificial Sequence
  Description of Artificial Sequence: Synthetic oligonucleotide
cagaguucucugaagcgac

SEQ ID NO: 1287326 - RNA, 19 nt, Artificial Sequence
  Description of Artificial Sequence: Synthetic oligonucleotide
ugcgaauccccacaaccuc

SEQ ID NO: 1287327 - RNA, 19 nt, Artificial Sequence
  Description of Artificial Sequence: Synthetic oligonucleotide
caugcagcaugucaccaac

SEQ ID NO: 1287328 - RNA, 19 nt, Artificial Sequence
  Description of Artificial Sequence: Synthetic oligonucleotide
ugcaucucucuaaggauua

SEQ ID NO: 1287329 - RNA, 19 nt, Artificial Sequence
  Description of Artificial Sequence: Synthetic oligonucleotide
uaaguccuuacgauuuaua

SEQ ID NO: 1287330 - RNA, 19 nt, Artificial Sequence
  Description of Artificial Sequence: Synthetic oligonucleotide
agcucaagcagcucaucgu

SEQ ID NO: 1287331 - RNA, 19 nt, Artificial Sequence
  Description of Artificial Sequence: Synthetic oligonucleotide
agcaucaauucuugcuuca

SEQ ID NO: 1287332 - RNA, 19 nt, Artificial Sequence
  Description of Artificial Sequence: Synthetic oligonucleotide
auccagcgcauguuacuac

SEQ ID NO: 1287333 - RNA, 19 nt, Artificial Sequence
  Description of Artificial Sequence: Synthetic oligonucleotide
uuuucgcucgugcuacuuc

SEQ ID NO: 1287334 - RNA, 19 nt, Artificial Sequence
  Description of Artificial Sequence: Synthetic oligonucleotide
ucgcauccauucuugcugc

SEQ ID NO: 1287335 - RNA, 19 nt, Artificial Sequence
  Description of Artificial Sequence: Synthetic oligonucleotide
gaugggaauucuccuauua

SEQ ID NO: 1287336 - RNA, 19 nt, Artificial Sequence
  Description of Artificial Sequence: Synthetic oligonucleotide
augggaauucuccuauuau

SEQ ID NO: 1287337 - RNA, 19 nt, Artificial Sequence
  Description of Artificial Sequence: Synthetic oligonucleotide
cacaaaccauauagagucc

SEQ ID NO: 1287338 - RNA, 19 nt, Artificial Sequence
  Description of Artificial Sequence: Synthetic oligonucleotide
aguaacauuuguacagagu

SEQ ID NO: 1287339 - RNA, 19 nt, Artificial Sequence
  Description of Artificial Sequence: Synthetic oligonucleotide
acaaccuccgccgggccgc

SEQ ID NO: 1287340 - RNA, 19 nt, Artificial Sequence
  Description of Artificial Sequence: Synthetic oligonucleotide
agcauagcaucugccugcc

SEQ ID NO: 1287341 - RNA, 19 nt, Artificial Sequence
  Description of Artificial Sequence: Synthetic oligonucleotide
cuccuauuauagcauagca

SEQ ID NO: 1287342 - RNA, 19 nt, Artificial Sequence
  Description of Artificial Sequence: Synthetic oligonucleotide
auguuacucgcgucucagg

SEQ ID NO: 1287343 - RNA, 19 nt, Artificial Sequence
  Description of Artificial Sequence: Synthetic oligonucleotide
uucuacagcucuuggcaaa

SEQ ID NO: 1287344 - RNA, 19 nt, Artificial Sequence
  Description of Artificial Sequence: Synthetic oligonucleotide
acguggagaucccagaguu

SEQ ID NO: 1287345 - RNA, 19 nt, Artificial Sequence
  Description of Artificial Sequence: Synthetic oligonucleotide
ugccaugacaagugagcug

SEQ ID NO: 1287346 - RNA, 19 nt, Artificial Sequence
  Description of Artificial Sequence: Synthetic oligonucleotide
aauccagcgcauguuacua

SEQ ID NO: 1287347 - RNA, 19 nt, Artificial Sequence
  Description of Artificial Sequence: Synthetic oligonucleotide
agaucgaucccaguugcca

SEQ ID NO: 1287348 - RNA, 19 nt, Artificial Sequence
  Description of Artificial Sequence: Synthetic oligonucleotide
agucgcauccauucuugcu

SEQ ID NO: 1287349 - RNA, 19 nt, Artificial Sequence
  Description of Artificial Sequence: Synthetic oligonucleotide
ccgacuuccagcaucaauc

SEQ ID NO: 1287350 - RNA, 19 nt, Artificial Sequence
  Description of Artificial Sequence: Synthetic oligonucleotide
auuacuccacguucacgcu

SEQ ID NO: 1287351 - RNA, 19 nt, Artificial Sequence
  Description of Artificial Sequence: Synthetic oligonucleotide
gcagagagaaucaccaaag

SEQ ID NO: 1287352 - RNA, 19 nt, Artificial Sequence
  Description of Artificial Sequence: Synthetic oligonucleotide
ggagguauaggcguuaaga

SEQ ID NO: 1287353 - RNA, 19 nt, Artificial Sequence
  Description of Artificial Sequence: Synthetic oligonucleotide
aagugagccgucccauuau

SEQ ID NO: 1287354 - RNA, 19 nt, Artificial Sequence
  Description of Artificial Sequence: Synthetic oligonucleotide
uggagguauaggcguuaag

SEQ ID NO: 1287355 - RNA, 19 nt, Artificial Sequence
  Description of Artificial Sequence: Synthetic oligonucleotide
caaaggcaucuugucaucc

SEQ ID NO: 1287356 - RNA, 19 nt, Artificial Sequence
  Description of Artificial Sequence: Synthetic oligonucleotide
cauagcaucugccugccaa

SEQ ID NO: 1287357 - RNA, 19 nt, Artificial Sequence
  Description of Artificial Sequence: Synthetic oligonucleotide
uccagaaagugagccgucc

SEQ ID NO: 1287358 - RNA, 19 nt, Artificial Sequence
  Description of Artificial Sequence: Synthetic oligonucleotide
uccuuuguaaugugugguu

SEQ ID NO: 1287359 - RNA, 19 nt, Artificial Sequence
  Description of Artificial Sequence: Synthetic oligonucleotide
guuauauaauccacuaagu

SEQ ID NO: 1287360 - RNA, 19 nt, Artificial Sequence
  Description of Artificial Sequence: Synthetic oligonucleotide
gagguauaggcguuaagau

SEQ ID NO: 1287361 - RNA, 19 nt, Artificial Sequence
  Description of Artificial Sequence: Synthetic oligonucleotide
uaguacaccgucuguucuc

SEQ ID NO: 1287362 - RNA, 19 nt, Artificial Sequence
  Description of Artificial Sequence: Synthetic oligonucleotide
aucaagcugcagcaacaug

SEQ ID NO: 1287363 - RNA, 19 nt, Artificial Sequence
  Description of Artificial Sequence: Synthetic oligonucleotide
uaggaccuagugcagcaau

SEQ ID NO: 1287364 - RNA, 19 nt, Artificial Sequence
  Description of Artificial Sequence: Synthetic oligonucleotide
cucacucgaaucucacuuc

SEQ ID NO: 1287365 - RNA, 19 nt, Artificial Sequence
  Description of Artificial Sequence: Synthetic oligonucleotide
ccaaaauacaauggcugcg

SEQ ID NO: 1287366 - RNA, 19 nt, Artificial Sequence
  Description of Artificial Sequence: Synthetic oligonucleotide
aaucggaguugagccauca

SEQ ID NO: 1287367 - RNA, 19 nt, Artificial Sequence
  Description of Artificial Sequence: Synthetic oligonucleotide
ccuagugcagcaauagcug

SEQ ID NO: 1287368 - RNA, 19 nt, Artificial Sequence
  Description of Artificial Sequence: Synthetic oligonucleotide
augugccaaaggcaucuug

SEQ ID NO: 1287369 - RNA, 19 nt, Artificial Sequence
  Description of Artificial Sequence: Synthetic oligonucleotide
accauauagaguccccaua

SEQ ID NO: 1287370 - RNA, 19 nt, Artificial Sequence
  Description of Artificial Sequence: Synthetic oligonucleotide
uaugugcagaauguuugau

SEQ ID NO: 1287371 - RNA, 19 nt, Artificial Sequence
  Description of Artificial Sequence: Synthetic oligonucleotide
ccuuugugugcgcagagag

SEQ ID NO: 1287372 - RNA, 19 nt, Artificial Sequence
  Description of Artificial Sequence: Synthetic oligonucleotide
aacugugcacguggagauc

SEQ ID NO: 1287373 - RNA, 19 nt, Artificial Sequence
  Description of Artificial Sequence: Synthetic oligonucleotide
cuccaaaagaucgauccca

SEQ ID NO: 1287374 - RNA, 19 nt, Artificial Sequence
  Description of Artificial Sequence: Synthetic oligonucleotide
gaaucaccaaagugaaacu

SEQ ID NO: 1287375 - RNA, 19 nt, Artificial Sequence
  Description of Artificial Sequence: Synthetic oligonucleotide
ugucaucccucacucgaau

SEQ ID NO: 1287376 - RNA, 19 nt, Artificial Sequence
  Description of Artificial Sequence: Synthetic oligonucleotide
cagcgcucgggauaccgcg

SEQ ID NO: 1287377 - RNA, 19 nt, Artificial Sequence
  Description of Artificial Sequence: Synthetic oligonucleotide
uauaggcguuaagaugagc

SEQ ID NO: 1287378 - RNA, 19 nt, Artificial Sequence
  Description of Artificial Sequence: Synthetic oligonucleotide
agacagauugugucuggau

SEQ ID NO: 1287379 - RNA, 19 nt, Artificial Sequence
  Description of Artificial Sequence: Synthetic oligonucleotide
ccaugagacagauuguguc

SEQ ID NO: 1287380 - RNA, 19 nt, Artificial Sequence
  Description of Artificial Sequence: Synthetic oligonucleotide
ucgugcuacuucacucuca

SEQ ID NO: 1287381 - RNA, 19 nt, Artificial Sequence
  Description of Artificial Sequence: Synthetic oligonucleotide
gaucgaucccaguugccaa

SEQ ID NO: 1287382 - RNA, 19 nt, Artificial Sequence
  Description of Artificial Sequence: Synthetic oligonucleotide
auguuugaucacaaaaguu

SEQ ID NO: 1287383 - RNA, 19 nt, Artificial Sequence
  Description of Artificial Sequence: Synthetic oligonucleotide
acauguuacucgcgucuca

SEQ ID NO: 1287384 - RNA, 19 nt, Artificial Sequence
  Description of Artificial Sequence: Synthetic oligonucleotide
gugugguuauauaauccac

SEQ ID NO: 1287385 - RNA, 19 nt, Artificial Sequence
  Description of Artificial Sequence: Synthetic oligonucleotide
uguuugcaaccaugagaca

SEQ ID NO: 1287386 - RNA, 19 nt, Artificial Sequence
  Description of Artificial Sequence: Synthetic oligonucleotide
agagucgcauccauucuug

SEQ ID NO: 1287387 - RNA, 19 nt, Artificial Sequence
  Description of Artificial Sequence: Synthetic oligonucleotide
cauuccuccuccaaaagau

SEQ ID NO: 1287388 - RNA, 19 nt, Artificial Sequence
  Description of Artificial Sequence: Synthetic oligonucleotide
caaaagaucgaucccaguu

SEQ ID NO: 1287389 - RNA, 19 nt, Artificial Sequence
  Description of Artificial Sequence: Synthetic oligonucleotide
ugugcgcagagagaaucac

SEQ ID NO: 1287390 - RNA, 19 nt, Artificial Sequence
  Description of Artificial Sequence: Synthetic oligonucleotide
aaaucggaguugagccauc

SEQ ID NO: 1287391 - RNA, 19 nt, Artificial Sequence
  Description of Artificial Sequence: Synthetic oligonucleotide
ucccagaauuguccgccca

SEQ ID NO: 1287392 - RNA, 19 nt, Artificial Sequence
  Description of Artificial Sequence: Synthetic oligonucleotide
uccgcauucacagcaucaa

SEQ ID NO: 1287393 - RNA, 19 nt, Artificial Sequence
  Description of Artificial Sequence: Synthetic oligonucleotide
aguacaccgucuguucucu

SEQ ID NO: 1287394 - RNA, 19 nt, Artificial Sequence
  Description of Artificial Sequence: Synthetic oligonucleotide
acuaaguccuuacgauuua

SEQ ID NO: 1287395 - RNA, 19 nt, Artificial Sequence
  Description of Artificial Sequence: Synthetic oligonucleotide
accaacugcuucaacggcu

SEQ ID NO: 1287396 - RNA, 19 nt, Artificial Sequence
  Description of Artificial Sequence: Synthetic oligonucleotide
cggaguugagccaucaagc

SEQ ID NO: 1287397 - RNA, 19 nt, Artificial Sequence
  Description of Artificial Sequence: Synthetic oligonucleotide
cacgcucaaucucugcuuc

SEQ ID NO: 1287398 - RNA, 19 nt, Artificial Sequence
  Description of Artificial Sequence: Synthetic oligonucleotide
ucccaaugugcuguucuga

SEQ ID NO: 1287399 - RNA, 19 nt, Artificial Sequence
  Description of Artificial Sequence: Synthetic oligonucleotide
aacuuguguagcagccugu

SEQ ID NO: 1287400 - RNA, 19 nt, Artificial Sequence
  Description of Artificial Sequence: Synthetic oligonucleotide
uccagugaauuugcaggga

SEQ ID NO: 1287401 - RNA, 19 nt, Artificial Sequence
  Description of Artificial Sequence: Synthetic oligonucleotide
ucuacagcucuuggcaaau

SEQ ID NO: 1287402 - RNA, 19 nt, Artificial Sequence
  Description of Artificial Sequence: Synthetic oligonucleotide
agcagcgcucgggauaccg

SEQ ID NO: 1287403 - RNA, 19 nt, Artificial Sequence
  Description of Artificial Sequence: Synthetic oligonucleotide
acggcuauugcuagaugug

SEQ ID NO: 1287404 - RNA, 19 nt, Artificial Sequence
  Description of Artificial Sequence: Synthetic oligonucleotide
uggucccagaauuguccgc

SEQ ID NO: 1287405 - RNA, 19 nt, Artificial Sequence
  Description of Artificial Sequence: Synthetic oligonucleotide
uuggaaucucuaguuuuau

SEQ ID NO: 1287406 - RNA, 19 nt, Artificial Sequence
  Description of Artificial Sequence: Synthetic oligonucleotide
ucuccgcauucacagcauc

SEQ ID NO: 1287407 - RNA, 19 nt, Artificial Sequence
  Description of Artificial Sequence: Synthetic oligonucleotide
gaauccagcgcauguuacu

SEQ ID NO: 1287408 - RNA, 19 nt, Artificial Sequence
  Description of Artificial Sequence: Synthetic oligonucleotide
cgugcgaauccccacaacc

SEQ ID NO: 1287409 - RNA, 19 nt, Artificial Sequence
  Description of Artificial Sequence: Synthetic oligonucleotide
ggaccuagugcagcaauag

SEQ ID NO: 1287410 - RNA, 19 nt, Artificial Sequence
  Description of Artificial Sequence: Synthetic oligonucleotide
gcuauugcuagaugugcca

SEQ ID NO: 1287411 - RNA, 19 nt, Artificial Sequence
  Description of Artificial Sequence: Synthetic oligonucleotide
cacccauauuuucaaucuc

SEQ ID NO: 1287412 - RNA, 19 nt, Artificial Sequence
  Description of Artificial Sequence: Synthetic oligonucleotide
ggaugugcccaaccaacug

SEQ ID NO: 1287413 - RNA, 19 nt, Artificial Sequence
  Description of Artificial Sequence: Synthetic oligonucleotide
ucgcucgugcuacuucacu

SEQ ID NO: 1287414 - RNA, 19 nt, Artificial Sequence
  Description of Artificial Sequence: Synthetic oligonucleotide
gugcccaaccaacugcuuc

SEQ ID NO: 1287415 - RNA, 19 nt, Artificial Sequence
  Description of Artificial Sequence: Synthetic oligonucleotide
uacucgcgucucaggaaca

SEQ ID NO: 1287416 - RNA, 19 nt, Artificial Sequence
  Description of Artificial Sequence: Synthetic oligonucleotide
ggauuacuccacguucacg

SEQ ID NO: 1287417 - RNA, 19 nt, Artificial Sequence
  Description of Artificial Sequence: Synthetic oligonucleotide
guuacucgcgucucaggaa

SEQ ID NO: 1287418 - RNA, 19 nt, Artificial Sequence
  Description of Artificial Sequence: Synthetic oligonucleotide
guauaggcguuaagaugag

SEQ ID NO: 1287419 - RNA, 19 nt, Artificial Sequence
  Description of Artificial Sequence: Synthetic oligonucleotide
uucgcucgugcuacuucac

SEQ ID NO: 1287420 - RNA, 19 nt, Artificial Sequence
  Description of Artificial Sequence: Synthetic oligonucleotide
caaugugcuguucugaauu

SEQ ID NO: 1287421 - RNA, 19 nt, Artificial Sequence
  Description of Artificial Sequence: Synthetic oligonucleotide
accaugagacagauugugu

SEQ ID NO: 1287422 - RNA, 19 nt, Artificial Sequence
  Description of Artificial Sequence: Synthetic oligonucleotide
agcaauagcugggcuuuug

SEQ ID NO: 1287423 - RNA, 19 nt, Artificial Sequence
  Description of Artificial Sequence: Synthetic oligonucleotide
ggcuauugcuagaugugcc

SEQ ID NO: 1287424 - RNA, 19 nt, Artificial Sequence
  Description of Artificial Sequence: Synthetic oligonucleotide
ucgaaccaucuccgcauuc

SEQ ID NO: 1287425 - RNA, 19 nt, Artificial Sequence
  Description of Artificial Sequence: Synthetic oligonucleotide
aggucuaacuggguccucu

SEQ ID NO: 1287426 - RNA, 19 nt, Artificial Sequence
  Description of Artificial Sequence: Synthetic oligonucleotide
guggagaucccagaguucu

SEQ ID NO: 1287427 - RNA, 19 nt, Artificial Sequence
  Description of Artificial Sequence: Synthetic oligonucleotide
gucaucccucacucgaauc

SEQ ID NO: 1287428 - RNA, 19 nt, Artificial Sequence
  Description of Artificial Sequence: Synthetic oligonucleotide
aaggucuaacuggguccuc

SEQ ID NO: 1287429 - RNA, 19 nt, Artificial Sequence
  Description of Artificial Sequence: Synthetic oligonucleotide
acucucaguaacauuugua

SEQ ID NO: 1287430 - RNA, 19 nt, Artificial Sequence
  Description of Artificial Sequence: Synthetic oligonucleotide
cucgggauaccgcggcggc

SEQ ID NO: 1287431 - RNA, 19 nt, Artificial Sequence
  Description of Artificial Sequence: Synthetic oligonucleotide
agugagccgucccauuauu

SEQ ID NO: 1287432 - RNA, 19 nt, Artificial Sequence
  Description of Artificial Sequence: Synthetic oligonucleotide
gcuacuucacucucaguaa

SEQ ID NO: 1287433 - RNA, 19 nt, Artificial Sequence
  Description of Artificial Sequence: Synthetic oligonucleotide
gaauccccacaaccuccgc

SEQ ID NO: 1287434 - RNA, 19 nt, Artificial Sequence
  Description of Artificial Sequence: Synthetic oligonucleotide
augugcccaaccaacugcu

SEQ ID NO: 1287435 - RNA, 19 nt, Artificial Sequence
  Description of Artificial Sequence: Synthetic oligonucleotide
agcaugcagcaugucacca

SEQ ID NO: 1287436 - RNA, 19 nt, Artificial Sequence
  Description of Artificial Sequence: Synthetic oligonucleotide
cuugcuagauaaauucauu

SEQ ID NO: 1287437 - RNA, 19 nt, Artificial Sequence
  Description of Artificial Sequence: Synthetic oligonucleotide
uugcaaccaugagacagau

SEQ ID NO: 1287438 - RNA, 19 nt, Artificial Sequence
  Description of Artificial Sequence: Synthetic oligonucleotide
ccaaagugaaacuuugcua

SEQ ID NO: 1287439 - RNA, 19 nt, Artificial Sequence
  Description of Artificial Sequence: Synthetic oligonucleotide
uggagaucccagaguucuc

SEQ ID NO: 1287440 - RNA, 19 nt, Artificial Sequence
  Description of Artificial Sequence: Synthetic oligonucleotide
agaugagcacccauauuuu

SEQ ID NO: 1287441 - RNA, 19 nt, Artificial Sequence
  Description of Artificial Sequence: Synthetic oligonucleotide
cuaaggauuacuccacguu

SEQ ID NO: 1287442 - RNA, 19 nt, Artificial Sequence
  Description of Artificial Sequence: Synthetic oligonucleotide
cugugcacguggagauccc

SEQ ID NO: 1287443 - RNA, 19 nt, Artificial Sequence
  Description of Artificial Sequence: Synthetic oligonucleotide
ucauaccgacuuccagcau

SEQ ID NO: 1287444 - RNA, 19 nt, Artificial Sequence
  Description of Artificial Sequence: Synthetic oligonucleotide
ccagaaagugagccguccc

SEQ ID NO: 1287445 - RNA, 19 nt, Artificial Sequence
  Description of Artificial Sequence: Synthetic oligonucleotide
cugcuucaacggcuauugc

SEQ ID NO: 1287446 - RNA, 19 nt, Artificial Sequence
  Description of Artificial Sequence: Synthetic oligonucleotide
uugugugcgcagagagaau

SEQ ID NO: 1287447 - RNA, 19 nt, Artificial Sequence
  Description of Artificial Sequence: Synthetic oligonucleotide
gcacccauauuuucaaucu

SEQ ID NO: 1287448 - RNA, 19 nt, Artificial Sequence
  Description of Artificial Sequence: Synthetic oligonucleotide
cuauugcuagaugugccaa

SEQ ID NO: 1287449 - RNA, 19 nt, Artificial Sequence
  Description of Artificial Sequence: Synthetic oligonucleotide
auaauccacuaaguccuua

SEQ ID NO: 1287450 - RNA, 19 nt, Artificial Sequence
  Description of Artificial Sequence: Synthetic oligonucleotide
cuccagaaagugagccguc

SEQ ID NO: 1287451 - RNA, 19 nt, Artificial Sequence
  Description of Artificial Sequence: Synthetic oligonucleotide
gcgcauguuacuacaaauc

SEQ ID NO: 1287452 - RNA, 19 nt, Artificial Sequence
  Description of Artificial Sequence: Synthetic oligonucleotide
cgacuuccagcaucaaucc

SEQ ID NO: 1287453 - RNA, 19 nt, Artificial Sequence
  Description of Artificial Sequence: Synthetic oligonucleotide
cgcucaauaggaccuagug

SEQ ID NO: 1287454 - RNA, 19 nt, Artificial Sequence
  Description of Artificial Sequence: Synthetic oligonucleotide
gcuucaacggcuauugcua

SEQ ID NO: 1287455 - RNA, 19 nt, Artificial Sequence
  Description of Artificial Sequence: Synthetic oligonucleotide
caacuguggcuucuucaca

SEQ ID NO: 1287456 - RNA, 19 nt, Artificial Sequence
  Description of Artificial Sequence: Synthetic oligonucleotide
auuugaggacugacagaca

SEQ ID NO: 1287457 - RNA, 19 nt, Artificial Sequence
  Description of Artificial Sequence: Synthetic oligonucleotide
aucggaguugagccaucaa

SEQ ID NO: 1287458 - RNA, 19 nt, Artificial Sequence
  Description of Artificial Sequence: Synthetic oligonucleotide
caacggcuauugcuagaug

SEQ ID NO: 1287459 - RNA, 19 nt, Artificial Sequence
  Description of Artificial Sequence: Synthetic oligonucleotide
ugugcccaaccaacugcuu

SEQ ID NO: 1287460 - RNA, 19 nt, Artificial Sequence
  Description of Artificial Sequence: Synthetic oligonucleotide
gccaaaggcaucuugucau

SEQ ID NO: 1287461 - RNA, 19 nt, Artificial Sequence
  Description of Artificial Sequence: Synthetic oligonucleotide
cuuagucuguucccuccaa

SEQ ID NO: 1287462 - RNA, 19 nt, Artificial Sequence
  Description of Artificial Sequence: Synthetic oligonucleotide
cucugaagcgacucugagu

SEQ ID NO: 1287463 - RNA, 19 nt, Artificial Sequence
  Description of Artificial Sequence: Synthetic oligonucleotide
gguaaccgcucaauaggac

SEQ ID NO: 1287464 - RNA, 19 nt, Artificial Sequence
  Description of Artificial Sequence: Synthetic oligonucleotide
cuagcucaagcagcucauc

SEQ ID NO: 1287465 - RNA, 19 nt, Artificial Sequence
  Description of Artificial Sequence: Synthetic oligonucleotide
cgaauccccacaaccuccg

SEQ ID NO: 1287466 - RNA, 19 nt, Artificial Sequence
  Description of Artificial Sequence: Synthetic oligonucleotide
ugcaaccaugagacagauu

SEQ ID NO: 1287467 - RNA, 19 nt, Artificial Sequence
  Description of Artificial Sequence: Synthetic oligonucleotide
agcgcucgggauaccgcgg

SEQ ID NO: 1287468 - RNA, 19 nt, Artificial Sequence
  Description of Artificial Sequence: Synthetic oligonucleotide
gagcccgcgugcgaauccc

SEQ ID NO: 1287469 - RNA, 19 nt, Artificial Sequence
  Description of Artificial Sequence: Synthetic oligonucleotide
gaccgggagcccgcgugcg

SEQ ID NO: 1287470 - RNA, 19 nt, Artificial Sequence
  Description of Artificial Sequence: Synthetic oligonucleotide
agucuugaauccagcgcau

SEQ ID NO: 1287471 - RNA, 19 nt, Artificial Sequence
  Description of Artificial Sequence: Synthetic oligonucleotide
aucccucacucgaaucuca

SEQ ID NO: 1287472 - RNA, 19 nt, Artificial Sequence
  Description of Artificial Sequence: Synthetic oligonucleotide
ugccugccaaugucuucac

SEQ ID NO: 1287473 - RNA, 19 nt, Artificial Sequence
  Description of Artificial Sequence: Synthetic oligonucleotide
ucgggauaccgcggcggcc

SEQ ID NO: 1287474 - RNA, 19 nt, Artificial Sequence
  Description of Artificial Sequence: Synthetic oligonucleotide
ccaucaagcugcagcaaca

SEQ ID NO: 1287475 - RNA, 19 nt, Artificial Sequence
  Description of Artificial Sequence: Synthetic oligonucleotide
auaggaccuagugcagcaa

SEQ ID NO: 1287476 - RNA, 19 nt, Artificial Sequence
  Description of Artificial Sequence: Synthetic oligonucleotide
gugagccgucccauuauuc

SEQ ID NO: 1287477 - RNA, 19 nt, Artificial Sequence
  Description of Artificial Sequence: Synthetic oligonucleotide
ccaacugugcacguggaga

SEQ ID NO: 1287478 - RNA, 19 nt, Artificial Sequence
  Description of Artificial Sequence: Synthetic oligonucleotide
ccaaaggcaucuugucauc

SEQ ID NO: 1287479 - RNA, 19 nt, Artificial Sequence
  Description of Artificial Sequence: Synthetic oligonucleotide
auuguccgcccaagugcag

SEQ ID NO: 1287480 - RNA, 19 nt, Artificial Sequence
  Description of Artificial Sequence: Synthetic oligonucleotide
guacaccgucuguucucug

SEQ ID NO: 1287481 - RNA, 19 nt, Artificial Sequence
  Description of Artificial Sequence: Synthetic oligonucleotide
gugcgaauccccacaaccu

SEQ ID NO: 1287482 - RNA, 19 nt, Artificial Sequence
  Description of Artificial Sequence: Synthetic oligonucleotide
ccaaacauguuacucgcgu

SEQ ID NO: 1287483 - RNA, 19 nt, Artificial Sequence
  Description of Artificial Sequence: Synthetic oligonucleotide
caaccaugagacagauugu

SEQ ID NO: 1287484 - RNA, 19 nt, Artificial Sequence
  Description of Artificial Sequence: Synthetic oligonucleotide
ccaaucaguguguuugcaa

SEQ ID NO: 1287485 - RNA, 19 nt, Artificial Sequence
  Description of Artificial Sequence: Synthetic oligonucleotide
cagcgcauguuacuacaaa

SEQ ID NO: 1287486 - RNA, 19 nt, Artificial Sequence
  Description of Artificial Sequence: Synthetic oligonucleotide
cagugucuguguaggaagu

SEQ ID NO: 1287487 - RNA, 19 nt, Artificial Sequence
  Description of Artificial Sequence: Synthetic oligonucleotide
acucgcgucucaggaacau

SEQ ID NO: 1287488 - RNA, 19 nt, Artificial Sequence
  Description of Artificial Sequence: Synthetic oligonucleotide
agcccgcgugcgaaucccc

SEQ ID NO: 1287489 - RNA, 19 nt, Artificial Sequence
  Description of Artificial Sequence: Synthetic oligonucleotide
ggagcccgcgugcgaaucc

SEQ ID NO: 1287490 - RNA, 19 nt, Artificial Sequence
  Description of Artificial Sequence: Synthetic oligonucleotide
cagaauuguccgcccaagu

SEQ ID NO: 1287491 - RNA, 19 nt, Artificial Sequence
  Description of Artificial Sequence: Synthetic oligonucleotide
cugccaugacaagugagcu

SEQ ID NO: 1287492 - RNA, 19 nt, Artificial Sequence
  Description of Artificial Sequence: Synthetic oligonucleotide
gcuugcuagauaaauucau

SEQ ID NO: 1287493 - RNA, 19 nt, Artificial Sequence
  Description of Artificial Sequence: Synthetic oligonucleotide
cuuguguagcagccugugu

SEQ ID NO: 1287494 - RNA, 19 nt, Artificial Sequence
  Description of Artificial Sequence: Synthetic oligonucleotide
gcaauagcugggcuuuugu

SEQ ID NO: 1287495 - RNA, 19 nt, Artificial Sequence
  Description of Artificial Sequence: Synthetic oligonucleotide
ccaugacaagugagcuggg

SEQ ID NO: 1287496 - RNA, 19 nt, Artificial Sequence
  Description of Artificial Sequence: Synthetic oligonucleotide
cagcacaauucuugguccu

SEQ ID NO: 1287497 - RNA, 19 nt, Artificial Sequence
  Description of Artificial Sequence: Synthetic oligonucleotide
ggcgccgcggaccgggagc

SEQ ID NO: 1287498 - RNA, 19 nt, Artificial Sequence
  Description of Artificial Sequence: Synthetic oligonucleotide
cacguggagaucccagagu

SEQ ID NO: 1287499 - RNA, 19 nt, Artificial Sequence
  Description of Artificial Sequence: Synthetic oligonucleotide
caagcucagggaugggaau

SEQ ID NO: 1287500 - RNA, 19 nt, Artificial Sequence
  Description of Artificial Sequence: Synthetic oligonucleotide
cuaaguccuuacgauuuau

SEQ ID NO: 1287501 - RNA, 19 nt, Artificial Sequence
  Description of Artificial Sequence: Synthetic oligonucleotide
cgcagagagaaucaccaaa

SEQ ID NO: 1287502 - RNA, 19 nt, Artificial Sequence
  Description of Artificial Sequence: Synthetic oligonucleotide
caguuggucccagaauugu

SEQ ID NO: 1287503 - RNA, 19 nt, Artificial Sequence
  Description of Artificial Sequence: Synthetic oligonucleotide
ccccauagcccagugucug

SEQ ID NO: 1287504 - RNA, 19 nt, Artificial Sequence
  Description of Artificial Sequence: Synthetic oligonucleotide
cgggauaccgcggcggccg

SEQ ID NO: 1287505 - RNA, 19 nt, Artificial Sequence
  Description of Artificial Sequence: Synthetic oligonucleotide
cuggagguauaggcguuaa

SEQ ID NO: 1287506 - RNA, 19 nt, Artificial Sequence
  Description of Artificial Sequence: Synthetic oligonucleotide
cguucacgcucaaucucug

SEQ ID NO: 1287507 - RNA, 19 nt, Artificial Sequence
  Description of Artificial Sequence: Synthetic oligonucleotide
gucuaacuggguccucuuu

SEQ ID NO: 1287508 - RNA, 19 nt, Artificial Sequence
  Description of Artificial Sequence: Synthetic oligonucleotide
gcaucucucuaaggauuac

SEQ ID NO: 1287509 - RNA, 19 nt, Artificial Sequence
  Description of Artificial Sequence: Synthetic oligonucleotide
caucaagcugcagcaacau

SEQ ID NO: 1287510 - RNA, 19 nt, Artificial Sequence
  Description of Artificial Sequence: Synthetic oligonucleotide
gccagcuugcuagauaaau

SEQ ID NO: 1287511 - RNA, 19 nt, Artificial Sequence
  Description of Artificial Sequence: Synthetic oligonucleotide
gcagcgcucgggauaccgc

SEQ ID NO: 1287512 - RNA, 19 nt, Artificial Sequence
  Description of Artificial Sequence: Synthetic oligonucleotide
aaccuccgccgggccgcgg

SEQ ID NO: 1287513 - RNA, 19 nt, Artificial Sequence
  Description of Artificial Sequence: Synthetic oligonucleotide
gcagcaauagcugggcuuu

SEQ ID NO: 1287514 - RNA, 19 nt, Artificial Sequence
  Description of Artificial Sequence: Synthetic oligonucleotide
gccgcggaccgggagcccg

SEQ ID NO: 1287515 - RNA, 19 nt, Artificial Sequence
  Description of Artificial Sequence: Synthetic oligonucleotide
caaccuccgccgggccgcg

SEQ ID NO: 1287516 - RNA, 19 nt, Artificial Sequence
  Description of Artificial Sequence: Synthetic oligonucleotide
uaccgacuuccagcaucaa

SEQ ID NO: 1287517 - RNA, 19 nt, Artificial Sequence
  Description of Artificial Sequence: Synthetic oligonucleotide
cccgcgugcgaauccccac

SEQ ID NO: 1287518 - RNA, 19 nt, Artificial Sequence
  Description of Artificial Sequence: Synthetic oligonucleotide
gaagcgacucugaguccau

SEQ ID NO: 1287519 - RNA, 19 nt, Artificial Sequence
  Description of Artificial Sequence: Synthetic oligonucleotide
gcgcagagagaaucaccaa

SEQ ID NO: 1287520 - RNA, 19 nt, Artificial Sequence
  Description of Artificial Sequence: Synthetic oligonucleotide
gcgugcgaauccccacaac

SEQ ID NO: 1287521 - RNA, 19 nt, Artificial Sequence
  Description of Artificial Sequence: Synthetic oligonucleotide
ccacuaaguccuuacgauu

SEQ ID NO: 1287522 - RNA, 19 nt, Artificial Sequence
  Description of Artificial Sequence: Synthetic oligonucleotide
gccugccaaugucuucaca

SEQ ID NO: 1287523 - RNA, 19 nt, Artificial Sequence
  Description of Artificial Sequence: Synthetic oligonucleotide
cgcucaaucucugcuucuc

SEQ ID NO: 1287524 - RNA, 19 nt, Artificial Sequence
  Description of Artificial Sequence: Synthetic oligonucleotide
gcgacucugaguccauuuu

SEQ ID NO: 1287525 - RNA, 19 nt, Artificial Sequence
  Description of Artificial Sequence: Synthetic oligonucleotide
ccaaaagaucgaucccagu

SEQ ID NO: 1287526 - RNA, 19 nt, Artificial Sequence
  Description of Artificial Sequence: Synthetic oligonucleotide
cggaccgggagcccgcgug

SEQ ID NO: 1287527 - RNA, 19 nt, Artificial Sequence
  Description of Artificial Sequence: Synthetic oligonucleotide
cucgaaccaucuccgcauu

SEQ ID NO: 1287528 - RNA, 19 nt, Artificial Sequence
  Description of Artificial Sequence: Synthetic oligonucleotide
ggaugggaauucuccuauu

SEQ ID NO: 1287529 - RNA, 19 nt, Artificial Sequence
  Description of Artificial Sequence: Synthetic oligonucleotide
gccgucccauuauucuucu

SEQ ID NO: 1287530 - RNA, 19 nt, Artificial Sequence
  Description of Artificial Sequence: Synthetic oligonucleotide
cgcgucucaggaacauuca

SEQ ID NO: 1287531 - RNA, 19 nt, Artificial Sequence
  Description of Artificial Sequence: Synthetic oligonucleotide
gggagcccgcgugcgaauc

SEQ ID NO: 1287532 - RNA, 19 nt, Artificial Sequence
  Description of Artificial Sequence: Synthetic oligonucleotide
gcacaauucuugguccuuu

SEQ ID NO: 1287533 - RNA, 19 nt, Artificial Sequence
  Description of Artificial Sequence: Synthetic oligonucleotide
ccgucccauuauucuucuc

SEQ ID NO: 1287534 - RNA, 19 nt, Artificial Sequence
  Description of Artificial Sequence: Synthetic oligonucleotide
cgaucccaguugccaauca

SEQ ID NO: 1287535 - RNA, 19 nt, Artificial Sequence
  Description of Artificial Sequence: Synthetic oligonucleotide
guccgcccaagugcagugu

SEQ ID NO: 1287536 - RNA, 19 nt, Artificial Sequence
  Description of Artificial Sequence: Synthetic oligonucleotide
cccucacucgaaucucacu

SEQ ID NO: 1287537 - RNA, 19 nt, Artificial Sequence
  Description of Artificial Sequence: Synthetic oligonucleotide
gcccgcgugcgaaucccca

SEQ ID NO: 1287538 - RNA, 19 nt, Artificial Sequence
  Description of Artificial Sequence: Synthetic oligonucleotide
cucgcgucucaggaacauu

SEQ ID NO: 1287539 - RNA, 19 nt, Artificial Sequence
  Description of Artificial Sequence: Synthetic oligonucleotide
ccgcauucacagcaucaau

SEQ ID NO: 1287540 - RNA, 19 nt, Artificial Sequence
  Description of Artificial Sequence: Synthetic oligonucleotide
ccgcucaauaggaccuagu

SEQ ID NO: 1287541 - RNA, 19 nt, Artificial Sequence
  Description of Artificial Sequence: Synthetic oligonucleotide
cgcgugcgaauccccacaa

SEQ ID NO: 1287542 - RNA, 19 nt, Artificial Sequence
  Description of Artificial Sequence: Synthetic oligonucleotide
cagcaauagcugggcuuuu

SEQ ID NO: 1287543 - RNA, 19 nt, Artificial Sequence
  Description of Artificial Sequence: Synthetic oligonucleotide
cgcggaccgggagcccgcg

SEQ ID NO: 1287544 - RNA, 19 nt, Artificial Sequence
  Description of Artificial Sequence: Synthetic oligonucleotide
gcggaccgggagcccgcgu

SEQ ID NO: 1287545 - RNA, 19 nt, Artificial Sequence
  Description of Artificial Sequence: Synthetic oligonucleotide
cgggagcccgcgugcgaau

SEQ ID NO: 1287546 - RNA, 19 nt, Artificial Sequence
  Description of Artificial Sequence: Synthetic oligonucleotide
aauuuuaguguuuucacug

SEQ ID NO: 1287547 - RNA, 19 nt, Artificial Sequence
  Description of Artificial Sequence: Synthetic oligonucleotide
aacuucguaaaacgggucc

SEQ ID NO: 1287548 - RNA, 19 nt, Artificial Sequence
  Description of Artificial Sequence: Synthetic oligonucleotide
ucauccgucaaguucaacg

SEQ ID NO: 1287549 - RNA, 19 nt, Artificial Sequence
  Description of Artificial Sequence: Synthetic oligonucleotide
uagaacuucguaaaacggg

SEQ ID NO: 1287550 - RNA, 19 nt, Artificial Sequence
  Description of Artificial Sequence: Synthetic oligonucleotide
aaagucuuuggucucaaug

SEQ ID NO: 1287551 - RNA, 19 nt, Artificial Sequence
  Description of Artificial Sequence: Synthetic oligonucleotide
caaaccaucaugcagcucc

SEQ ID NO: 1287552 - RNA, 19 nt, Artificial Sequence
  Description of Artificial Sequence: Synthetic oligonucleotide
aaguucaacggcgacaccc

SEQ ID NO: 1287553 - RNA, 19 nt, Artificial Sequence
  Description of Artificial Sequence: Synthetic oligonucleotide
ugaagaauugagcugguug

SEQ ID NO: 1287554 - RNA, 19 nt, Artificial Sequence
  Description of Artificial Sequence: Synthetic oligonucleotide
ugucauggcaucaauccgg

SEQ ID NO: 1287555 - RNA, 19 nt, Artificial Sequence
  Description of Artificial Sequence: Synthetic oligonucleotide
cuggcuucgaacuucaugc

SEQ ID NO: 1287556 - RNA, 19 nt, Artificial Sequence
  Description of Artificial Sequence: Synthetic oligonucleotide
aacggcgacacccaccggc

SEQ ID NO: 1287557 - RNA, 19 nt, Artificial Sequence
  Description of Artificial Sequence: Synthetic oligonucleotide
caugauucuauuugggcgg

SEQ ID NO: 1287558 - RNA, 19 nt, Artificial Sequence
  Description of Artificial Sequence: Synthetic oligonucleotide
agaggaaagguauccuucc

SEQ ID NO: 1287559 - RNA, 19 nt, Artificial Sequence
  Description of Artificial Sequence: Synthetic oligonucleotide
aauccggucgcuucgacug

SEQ ID NO: 1287560 - RNA, 19 nt, Artificial Sequence
  Description of Artificial Sequence: Synthetic oligonucleotide
aacgcuucuacuucuguug

SEQ ID NO: 1287561 - RNA, 19 nt, Artificial Sequence
  Description of Artificial Sequence: Synthetic oligonucleotide
uguuagggucacaucaugg

SEQ ID NO: 1287562 - RNA, 19 nt, Artificial Sequence
  Description of Artificial Sequence: Synthetic oligonucleotide
ucaacggcgacacccaccg

SEQ ID NO: 1287563 - RNA, 19 nt, Artificial Sequence
  Description of Artificial Sequence: Synthetic oligonucleotide
uauccgucugcuuaaaggc

SEQ ID NO: 1287564 - RNA, 19 nt, Artificial Sequence
  Description of Artificial Sequence: Synthetic oligonucleotide
aguuagcucagacagacca

SEQ ID NO: 1287565 - RNA, 19 nt, Artificial Sequence
  Description of Artificial Sequence: Synthetic oligonucleotide
aacaaaacaugaucucuug

SEQ ID NO: 1287566 - RNA, 19 nt, Artificial Sequence
  Description of Artificial Sequence: Synthetic oligonucleotide
ucuucauucauccgucaag

SEQ ID NO: 1287567 - RNA, 19 nt, Artificial Sequence
  Description of Artificial Sequence: Synthetic oligonucleotide
cuauccgucugcuuaaagg

SEQ ID NO: 1287568 - RNA, 19 nt, Artificial Sequence
  Description of Artificial Sequence: Synthetic oligonucleotide
uuaaccuucaucucgcuau

SEQ ID NO: 1287569 - RNA, 19 nt, Artificial Sequence
  Description of Artificial Sequence: Synthetic oligonucleotide
aguaugaaaaggcgcuggc

SEQ ID NO: 1287570 - RNA, 19 nt, Artificial Sequence
  Description of Artificial Sequence: Synthetic oligonucleotide
cuagaacuucguaaaacgg

SEQ ID NO: 1287571 - RNA, 19 nt, Artificial Sequence
  Description of Artificial Sequence: Synthetic oligonucleotide
aaugcuguaugucgcagca

SEQ ID NO: 1287572 - RNA, 19 nt, Artificial Sequence
  Description of Artificial Sequence: Synthetic oligonucleotide
aaaggcgcuggcuucgaac

SEQ ID NO: 1287573 - RNA, 19 nt, Artificial Sequence
  Description of Artificial Sequence: Synthetic oligonucleotide
uccgucaaguucaacggcg

SEQ ID NO: 1287574 - RNA, 19 nt, Artificial Sequence
  Description of Artificial Sequence: Synthetic oligonucleotide
gucgcuucgacugagagag

SEQ ID NO: 1287575 - RNA, 19 nt, Artificial Sequence
  Description of Artificial Sequence: Synthetic oligonucleotide
agauuuaccuuucuuaaau

SEQ ID NO: 1287576 - RNA, 19 nt, Artificial Sequence
  Description of Artificial Sequence: Synthetic oligonucleotide
cuuguugugcgacacacag

SEQ ID NO: 1287577 - RNA, 19 nt, Artificial Sequence
  Description of Artificial Sequence: Synthetic oligonucleotide
uuaguguuuucacugucug

SEQ ID NO: 1287578 - RNA, 19 nt, Artificial Sequence
  Description of Artificial Sequence: Synthetic oligonucleotide
ucauucauccgucaaguuc

SEQ ID NO: 1287579 - RNA, 19 nt, Artificial Sequence
  Description of Artificial Sequence: Synthetic oligonucleotide
acgugucuagcuuccaucc

SEQ ID NO: 1287580 - RNA, 19 nt, Artificial Sequence
  Description of Artificial Sequence: Synthetic oligonucleotide
aaggugacaauuccuagaa

SEQ ID NO: 1287581 - RNA, 19 nt, Artificial Sequence
  Description of Artificial Sequence: Synthetic oligonucleotide
uaggaaacggugcauggcc

SEQ ID NO: 1287582 - RNA, 19 nt, Artificial Sequence
  Description of Artificial Sequence: Synthetic oligonucleotide
gcagaguuagcucagacag

SEQ ID NO: 1287583 - RNA, 19 nt, Artificial Sequence
  Description of Artificial Sequence: Synthetic oligonucleotide
uagaccugcaggaaugaag

SEQ ID NO: 1287584 - RNA, 19 nt, Artificial Sequence
  Description of Artificial Sequence: Synthetic oligonucleotide
uugugcgacacacaguucu

SEQ ID NO: 1287585 - RNA, 19 nt, Artificial Sequence
  Description of Artificial Sequence: Synthetic oligonucleotide
uaugaaaaggcgcuggcuu

SEQ ID NO: 1287586 - RNA, 19 nt, Artificial Sequence
  Description of Artificial Sequence: Synthetic oligonucleotide
uagucuacaggcuuguuuc

SEQ ID NO: 1287587 - RNA, 19 nt, Artificial Sequence
  Description of Artificial Sequence: Synthetic oligonucleotide
aagguauccuuccugggga

SEQ ID NO: 1287588 - RNA, 19 nt, Artificial Sequence
  Description of Artificial Sequence: Synthetic oligonucleotide
ugcuguaugucgcagcaug

SEQ ID NO: 1287589 - RNA, 19 nt, Artificial Sequence
  Description of Artificial Sequence: Synthetic oligonucleotide
gaauugagcugguuguugc

SEQ ID NO: 1287590 - RNA, 19 nt, Artificial Sequence
  Description of Artificial Sequence: Synthetic oligonucleotide
uguugcuaggaaacggugc

SEQ ID NO: 1287591 - RNA, 19 nt, Artificial Sequence
  Description of Artificial Sequence: Synthetic oligonucleotide
cauccgucaaguucaacgg

SEQ ID NO: 1287592 - RNA, 19 nt, Artificial Sequence
  Description of Artificial Sequence: Synthetic oligonucleotide
ucuauuugggcggaagaag

SEQ ID NO: 1287593 - RNA, 19 nt, Artificial Sequence
  Description of Artificial Sequence: Synthetic oligonucleotide
agugacgugguuuucuuca

SEQ ID NO: 1287594 - RNA, 19 nt, Artificial Sequence
  Description of Artificial Sequence: Synthetic oligonucleotide
cauucauccgucaaguuca

SEQ ID NO: 1287595 - RNA, 19 nt, Artificial Sequence
  Description of Artificial Sequence: Synthetic oligonucleotide
caccguaguaugaaaaggc

SEQ ID NO: 1287596 - RNA, 19 nt, Artificial Sequence
  Description of Artificial Sequence: Synthetic oligonucleotide
caggaaugaagaauugagc

SEQ ID NO: 1287597 - RNA, 19 nt, Artificial Sequence
  Description of Artificial Sequence: Synthetic oligonucleotide
ugcuuaaaggcagagaaau

SEQ ID NO: 1287598 - RNA, 19 nt, Artificial Sequence
  Description of Artificial Sequence: Synthetic oligonucleotide
acuuaaaacucugcaaaag

SEQ ID NO: 1287599 - RNA, 19 nt, Artificial Sequence
  Description of Artificial Sequence: Synthetic oligonucleotide
uccgaauucuugaaagcca

SEQ ID NO: 1287600 - RNA, 19 nt, Artificial Sequence
  Description of Artificial Sequence: Synthetic oligonucleotide
gucuccgaauucuugaaag

SEQ ID NO: 1287601 - RNA, 19 nt, Artificial Sequence
  Description of Artificial Sequence: Synthetic oligonucleotide
ucuguugcuaggaaacggu

SEQ ID NO: 1287602 - RNA, 19 nt, Artificial Sequence
  Description of Artificial Sequence: Synthetic oligonucleotide
agauuugaugaucucuuca

SEQ ID NO: 1287603 - RNA, 19 nt, Artificial Sequence
  Description of Artificial Sequence: Synthetic oligonucleotide
ucucugacaucugggaugg

SEQ ID NO: 1287604 - RNA, 19 nt, Artificial Sequence
  Description of Artificial Sequence: Synthetic oligonucleotide
ggaaagguauccuuccugg

SEQ ID NO: 1287605 - RNA, 19 nt, Artificial Sequence
  Description of Artificial Sequence: Synthetic oligonucleotide
gucaauucaauuuuagugu

SEQ ID NO: 1287606 - RNA, 19 nt, Artificial Sequence
  Description of Artificial Sequence: Synthetic oligonucleotide
ggugucauugaaaacaaag

SEQ ID NO: 1287607 - RNA, 19 nt, Artificial Sequence
  Description of Artificial Sequence: Synthetic oligonucleotide
uauuuucaccuggagaggc

SEQ ID NO: 1287608 - RNA, 19 nt, Artificial Sequence
  Description of Artificial Sequence: Synthetic oligonucleotide
auucaugcaaauugaggga

SEQ ID NO: 1287609 - RNA, 19 nt, Artificial Sequence
  Description of Artificial Sequence: Synthetic oligonucleotide
aaauugagggaggaaagaa

SEQ ID NO: 1287610 - RNA, 19 nt, Artificial Sequence
  Description of Artificial Sequence: Synthetic oligonucleotide
uuugggcggaagaaguuug

SEQ ID NO: 1287611 - RNA, 19 nt, Artificial Sequence
  Description of Artificial Sequence: Synthetic oligonucleotide
uaguaugaaaaggcgcugg

SEQ ID NO: 1287612 - RNA, 19 nt, Artificial Sequence
  Description of Artificial Sequence: Synthetic oligonucleotide
uccgucugcuuaaaggcag

SEQ ID NO: 1287613 - RNA, 19 nt, Artificial Sequence
  Description of Artificial Sequence: Synthetic oligonucleotide
augaaaaggcgcuggcuuc

SEQ ID NO: 1287614 - RNA, 19 nt, Artificial Sequence
  Description of Artificial Sequence: Synthetic oligonucleotide
acuucguaaaacggguccc

SEQ ID NO: 1287615 - RNA, 19 nt, Artificial Sequence
  Description of Artificial Sequence: Synthetic oligonucleotide
acaagcucacacuagugga

SEQ ID NO: 1287616 - RNA, 19 nt, Artificial Sequence
  Description of Artificial Sequence: Synthetic oligonucleotide
aagaaguuugucuccgaau

SEQ ID NO: 1287617 - RNA, 19 nt, Artificial Sequence
  Description of Artificial Sequence: Synthetic oligonucleotide
aaaguagucuacaggcuug

SEQ ID NO: 1287618 - RNA, 19 nt, Artificial Sequence
  Description of Artificial Sequence: Synthetic oligonucleotide
auuuugguauugcugucug

SEQ ID NO: 1287619 - RNA, 19 nt, Artificial Sequence
  Description of Artificial Sequence: Synthetic oligonucleotide
aggugacuuauuuucaccu

SEQ ID NO: 1287620 - RNA, 19 nt, Artificial Sequence
  Description of Artificial Sequence: Synthetic oligonucleotide
uccguaagagucaauucaa

SEQ ID NO: 1287621 - RNA, 19 nt, Artificial Sequence
  Description of Artificial Sequence: Synthetic oligonucleotide
cuuccaaggugacaauucc

SEQ ID NO: 1287622 - RNA, 19 nt, Artificial Sequence
  Description of Artificial Sequence: Synthetic oligonucleotide
cuuaaauucuuccagcaua

SEQ ID NO: 1287623 - RNA, 19 nt, Artificial Sequence
  Description of Artificial Sequence: Synthetic oligonucleotide
ugccaucaaggcauuuugg

SEQ ID NO: 1287624 - RNA, 19 nt, Artificial Sequence
  Description of Artificial Sequence: Synthetic oligonucleotide
gaggugacuuauuuucacc

SEQ ID NO: 1287625 - RNA, 19 nt, Artificial Sequence
  Description of Artificial Sequence: Synthetic oligonucleotide
auccgucaaguucaacggc

SEQ ID NO: 1287626 - RNA, 19 nt, Artificial Sequence
  Description of Artificial Sequence: Synthetic oligonucleotide
ucuccgaauucuugaaagc

SEQ ID NO: 1287627 - RNA, 19 nt, Artificial Sequence
  Description of Artificial Sequence: Synthetic oligonucleotide
cugucuggagaucuugacg

SEQ ID NO: 1287628 - RNA, 19 nt, Artificial Sequence
  Description of Artificial Sequence: Synthetic oligonucleotide
uucacucgcugcaauggcc

SEQ ID NO: 1287629 - RNA, 19 nt, Artificial Sequence
  Description of Artificial Sequence: Synthetic oligonucleotide
uccaagauuucagauuuga

SEQ ID NO: 1287630 - RNA, 19 nt, Artificial Sequence
  Description of Artificial Sequence: Synthetic oligonucleotide
acuuggugucauugaaaac

SEQ ID NO: 1287631 - RNA, 19 nt, Artificial Sequence
  Description of Artificial Sequence: Synthetic oligonucleotide
acaguucuguucauugagc

SEQ ID NO: 1287632 - RNA, 19 nt, Artificial Sequence
  Description of Artificial Sequence: Synthetic oligonucleotide
cacaccguaguaugaaaag

SEQ ID NO: 1287633 - RNA, 19 nt, Artificial Sequence
  Description of Artificial Sequence: Synthetic oligonucleotide
auuucagauuugaugaucu

SEQ ID NO: 1287634 - RNA, 19 nt, Artificial Sequence
  Description of Artificial Sequence: Synthetic oligonucleotide
acaccguaguaugaaaagg

SEQ ID NO: 1287635 - RNA, 19 nt, Artificial Sequence
  Description of Artificial Sequence: Synthetic oligonucleotide
uucacggugggccacuuuc

SEQ ID NO: 1287636 - RNA, 19 nt, Artificial Sequence
  Description of Artificial Sequence: Synthetic oligonucleotide
aagggcccuagauggcgcc

SEQ ID NO: 1287637 - RNA, 19 nt, Artificial Sequence
  Description of Artificial Sequence: Synthetic oligonucleotide
gucgaugucacgugucuag

SEQ ID NO: 1287638 - RNA, 19 nt, Artificial Sequence
  Description of Artificial Sequence: Synthetic oligonucleotide
acaaaacaugaucucuuga

SEQ ID NO: 1287639 - RNA, 19 nt, Artificial Sequence
  Description of Artificial Sequence: Synthetic oligonucleotide
aggaaagguauccuuccug

SEQ ID NO: 1287640 - RNA, 19 nt, Artificial Sequence
  Description of Artificial Sequence: Synthetic oligonucleotide
agucuuuggucucaaugcu

SEQ ID NO: 1287641 - RNA, 19 nt, Artificial Sequence
  Description of Artificial Sequence: Synthetic oligonucleotide
caggaggccgauuaaggag

SEQ ID NO: 1287642 - RNA, 19 nt, Artificial Sequence
  Description of Artificial Sequence: Synthetic oligonucleotide
cuccgaauucuugaaagcc

SEQ ID NO: 1287643 - RNA, 19 nt, Artificial Sequence
  Description of Artificial Sequence: Synthetic oligonucleotide
agaaaugauaaaagguacu

SEQ ID NO: 1287644 - RNA, 19 nt, Artificial Sequence
  Description of Artificial Sequence: Synthetic oligonucleotide
gugucauggcaucaauccg

SEQ ID NO: 1287645 - RNA, 19 nt, Artificial Sequence
  Description of Artificial Sequence: Synthetic oligonucleotide
agcauagcguccaacuugg

SEQ ID NO: 1287646 - RNA, 19 nt, Artificial Sequence
  Description of Artificial Sequence: Synthetic oligonucleotide
uccgggaugccaucaaggc

SEQ ID NO: 1287647 - RNA, 19 nt, Artificial Sequence
  Description of Artificial Sequence: Synthetic oligonucleotide
ugguuggccuuguugugcg

SEQ ID NO: 1287648 - RNA, 19 nt, Artificial Sequence
  Description of Artificial Sequence: Synthetic oligonucleotide
agaacuucguaaaacgggu

SEQ ID NO: 1287649 - RNA, 19 nt, Artificial Sequence
  Description of Artificial Sequence: Synthetic oligonucleotide
ucguuguucacucgcugca

SEQ ID NO: 1287650 - RNA, 19 nt, Artificial Sequence
  Description of Artificial Sequence: Synthetic oligonucleotide
aaacgcuucuacuucuguu

SEQ ID NO: 1287651 - RNA, 19 nt, Artificial Sequence
  Description of Artificial Sequence: Synthetic oligonucleotide
uugguauugcugucuggag

SEQ ID NO: 1287652 - RNA, 19 nt, Artificial Sequence
  Description of Artificial Sequence: Synthetic oligonucleotide
cuugacgaacuguagguca

SEQ ID NO: 1287653 - RNA, 19 nt, Artificial Sequence
  Description of Artificial Sequence: Synthetic oligonucleotide
uuguuucgcugguagaggu

SEQ ID NO: 1287654 - RNA, 19 nt, Artificial Sequence
  Description of Artificial Sequence: Synthetic oligonucleotide
accguaguaugaaaaggcg

SEQ ID NO: 1287655 - RNA, 19 nt, Artificial Sequence
  Description of Artificial Sequence: Synthetic oligonucleotide
uuagcucagacagaccaac

SEQ ID NO: 1287656 - RNA, 19 nt, Artificial Sequence
  Description of Artificial Sequence: Synthetic oligonucleotide
agcagaguuagcucagaca

SEQ ID NO: 1287657 - RNA, 19 nt, Artificial Sequence
  Description of Artificial Sequence: Synthetic oligonucleotide
agucuacaggcuuguuucg

SEQ ID NO: 1287658 - RNA, 19 nt, Artificial Sequence
  Description of Artificial Sequence: Synthetic oligonucleotide
caucaugcagcuccguaag

SEQ ID NO: 1287659 - RNA, 19 nt, Artificial Sequence
  Description of Artificial Sequence: Synthetic oligonucleotide
uaugucgcagcauggcaga

SEQ ID NO: 1287660 - RNA, 19 nt, Artificial Sequence
  Description of Artificial Sequence: Synthetic oligonucleotide
ugucacgugucuagcuucc

SEQ ID NO: 1287661 - RNA, 19 nt, Artificial Sequence
  Description of Artificial Sequence: Synthetic oligonucleotide
cucguuguucacucgcugc

SEQ ID NO: 1287662 - RNA, 19 nt, Artificial Sequence
  Description of Artificial Sequence: Synthetic oligonucleotide
ucuacaggcuuguuucgcu

SEQ ID NO: 1287663 - RNA, 19 nt, Artificial Sequence
  Description of Artificial Sequence: Synthetic oligonucleotide
uuuaaccuucaucucgcua

SEQ ID NO: 1287664 - RNA, 19 nt, Artificial Sequence
  Description of Artificial Sequence: Synthetic oligonucleotide
caucaauccggucgcuucg

SEQ ID NO: 1287665 - RNA, 19 nt, Artificial Sequence
  Description of Artificial Sequence: Synthetic oligonucleotide
cauagcguccaacuuggug

SEQ ID NO: 1287666 - RNA, 19 nt, Artificial Sequence
  Description of Artificial Sequence: Synthetic oligonucleotide
cuccguaagagucaauuca

SEQ ID NO: 1287667 - RNA, 19 nt, Artificial Sequence
  Description of Artificial Sequence: Synthetic oligonucleotide
uaaacgcuucuacuucugu

SEQ ID NO: 1287668 - RNA, 19 nt, Artificial Sequence
  Description of Artificial Sequence: Synthetic oligonucleotide
uuccaaggugacaauuccu

SEQ ID NO: 1287669 - RNA, 19 nt, Artificial Sequence
  Description of Artificial Sequence: Synthetic oligonucleotide
uucaagggagugcagucau

SEQ ID NO: 1287670 - RNA, 19 nt, Artificial Sequence
  Description of Artificial Sequence: Synthetic oligonucleotide
uucaacggcgacacccacc

SEQ ID NO: 1287671 - RNA, 19 nt, Artificial Sequence
  Description of Artificial Sequence: Synthetic oligonucleotide
guaugucgcagcauggcag

SEQ ID NO: 1287672 - RNA, 19 nt, Artificial Sequence
  Description of Artificial Sequence: Synthetic oligonucleotide
cuuguuucgcugguagagg

SEQ ID NO: 1287673 - RNA, 19 nt, Artificial Sequence
  Description of Artificial Sequence: Synthetic oligonucleotide
ucaaugcuguaugucgcag

SEQ ID NO: 1287674 - RNA, 19 nt, Artificial Sequence
  Description of Artificial Sequence: Synthetic oligonucleotide
ugugcgacacacaguucug

SEQ ID NO: 1287675 - RNA, 19 nt, Artificial Sequence
  Description of Artificial Sequence: Synthetic oligonucleotide
uggagaucuugacgaacug

SEQ ID NO: 1287676 - RNA, 19 nt, Artificial Sequence
  Description of Artificial Sequence: Synthetic oligonucleotide
caaugcuguaugucgcagc

SEQ ID NO: 1287677 - RNA, 19 nt, Artificial Sequence
  Description of Artificial Sequence: Synthetic oligonucleotide
agaauugagcugguuguug

SEQ ID NO: 1287678 - RNA, 19 nt, Artificial Sequence
  Description of Artificial Sequence: Synthetic oligonucleotide
gaagaaguuugucuccgaa

SEQ ID NO: 1287679 - RNA, 19 nt, Artificial Sequence
  Description of Artificial Sequence: Synthetic oligonucleotide
uguaggucagagagggcuc

SEQ ID NO: 1287680 - RNA, 19 nt, Artificial Sequence
  Description of Artificial Sequence: Synthetic oligonucleotide
ugcuaggaaacggugcaug

SEQ ID NO: 1287681 - RNA, 19 nt, Artificial Sequence
  Description of Artificial Sequence: Synthetic oligonucleotide
uaguguuuucacugucuga

SEQ ID NO: 1287682 - RNA, 19 nt, Artificial Sequence
  Description of Artificial Sequence: Synthetic oligonucleotide
cuaaacgcuucuacuucug

SEQ ID NO: 1287683 - RNA, 19 nt, Artificial Sequence
  Description of Artificial Sequence: Synthetic oligonucleotide
ucacacuaguggaagucau

SEQ ID NO: 1287684 - RNA, 19 nt, Artificial Sequence
  Description of Artificial Sequence: Synthetic oligonucleotide
agguauccuuccuggggac

SEQ ID NO: 1287685 - RNA, 19 nt, Artificial Sequence
  Description of Artificial Sequence: Synthetic oligonucleotide
uguccauccgggaugccau

SEQ ID NO: 1287686 - RNA, 19 nt, Artificial Sequence
  Description of Artificial Sequence: Synthetic oligonucleotide
ugucuccgaauucuugaaa

SEQ ID NO: 1287687 - RNA, 19 nt, Artificial Sequence
  Description of Artificial Sequence: Synthetic oligonucleotide
agaagcugcggugauauuu

SEQ ID NO: 1287688 - RNA, 19 nt, Artificial Sequence
  Description of Artificial Sequence: Synthetic oligonucleotide
aacggugcauggccaggag

SEQ ID NO: 1287689 - RNA, 19 nt, Artificial Sequence
  Description of Artificial Sequence: Synthetic oligonucleotide
gcuaggaaacggugcaugg

SEQ ID NO: 1287690 - RNA, 19 nt, Artificial Sequence
  Description of Artificial Sequence: Synthetic oligonucleotide
uuuccccugcagaaugaga

SEQ ID NO: 1287691 - RNA, 19 nt, Artificial Sequence
  Description of Artificial Sequence: Synthetic oligonucleotide
caugccguccuccgcagcc

SEQ ID NO: 1287692 - RNA, 19 nt, Artificial Sequence
  Description of Artificial Sequence: Synthetic oligonucleotide
cuaggaaacggugcauggc

SEQ ID NO: 1287693 - RNA, 19 nt, Artificial Sequence
  Description of Artificial Sequence: Synthetic oligonucleotide
uauuugggcggaagaaguu

SEQ ID NO: 1287694 - RNA, 19 nt, Artificial Sequence
  Description of Artificial Sequence: Synthetic oligonucleotide
uggugucauggcaucaauc

SEQ ID NO: 1287695 - RNA, 19 nt, Artificial Sequence
  Description of Artificial Sequence: Synthetic oligonucleotide
gacgaacuguaggucagag

SEQ ID NO: 1287696 - RNA, 19 nt, Artificial Sequence
  Description of Artificial Sequence: Synthetic oligonucleotide
cuguugcuaggaaacggug

SEQ ID NO: 1287697 - RNA, 19 nt, Artificial Sequence
  Description of Artificial Sequence: Synthetic oligonucleotide
ucaucucgcuauccgucug

SEQ ID NO: 1287698 - RNA, 19 nt, Artificial Sequence
  Description of Artificial Sequence: Synthetic oligonucleotide
gagucaauucaauuuuagu

SEQ ID NO: 1287699 - RNA, 19 nt, Artificial Sequence
  Description of Artificial Sequence: Synthetic oligonucleotide
gagggcucugacugaguag

SEQ ID NO: 1287700 - RNA, 19 nt, Artificial Sequence
  Description of Artificial Sequence: Synthetic oligonucleotide
agggcucugacugaguagu

SEQ ID NO: 1287701 - RNA, 19 nt, Artificial Sequence
  Description of Artificial Sequence: Synthetic oligonucleotide
caaguccagccuguuaggg

SEQ ID NO: 1287702 - RNA, 19 nt, Artificial Sequence
  Description of Artificial Sequence: Synthetic oligonucleotide
gaaugagaacaaaguaguc

SEQ ID NO: 1287703 - RNA, 19 nt, Artificial Sequence
  Description of Artificial Sequence: Synthetic oligonucleotide
uuccuagaacuucguaaaa

SEQ ID NO: 1287704 - RNA, 19 nt, Artificial Sequence
  Description of Artificial Sequence: Synthetic oligonucleotide
aaacucugcaaaagacacu

SEQ ID NO: 1287705 - RNA, 19 nt, Artificial Sequence
  Description of Artificial Sequence: Synthetic oligonucleotide
ugcaaggggugguuguaga

SEQ ID NO: 1287706 - RNA, 19 nt, Artificial Sequence
  Description of Artificial Sequence: Synthetic oligonucleotide
aaguagucuacaggcuugu

SEQ ID NO: 1287707 - RNA, 19 nt, Artificial Sequence
  Description of Artificial Sequence: Synthetic oligonucleotide
ggcggaagaaguuugucuc

SEQ ID NO: 1287708 - RNA, 19 nt, Artificial Sequence
  Description of Artificial Sequence: Synthetic oligonucleotide
ugucuagcuuccaucccuc

SEQ ID NO: 1287709 - RNA, 19 nt, Artificial Sequence
  Description of Artificial Sequence: Synthetic oligonucleotide
cuucgacugagagagucug

SEQ ID NO: 1287710 - RNA, 19 nt, Artificial Sequence
  Description of Artificial Sequence: Synthetic oligonucleotide
cuucguaaaacgggucccc

SEQ ID NO: 1287711 - RNA, 19 nt, Artificial Sequence
  Description of Artificial Sequence: Synthetic oligonucleotide
agaccaacuuaaaacucug

SEQ ID NO: 1287712 - RNA, 19 nt, Artificial Sequence
  Description of Artificial Sequence: Synthetic oligonucleotide
ucuugacgaacuguagguc

SEQ ID NO: 1287713 - RNA, 19 nt, Artificial Sequence
  Description of Artificial Sequence: Synthetic oligonucleotide
uuguugugcgacacacagu

SEQ ID NO: 1287714 - RNA, 19 nt, Artificial Sequence
  Description of Artificial Sequence: Synthetic oligonucleotide
ggugacuuauuuucaccug

SEQ ID NO: 1287715 - RNA, 19 nt, Artificial Sequence
  Description of Artificial Sequence: Synthetic oligonucleotide
guaguaugaaaaggcgcug

SEQ ID NO: 1287716 - RNA, 19 nt, Artificial Sequence
  Description of Artificial Sequence: Synthetic oligonucleotide
uggcuucgaacuucaugcc

SEQ ID NO: 1287717 - RNA, 19 nt, Artificial Sequence
  Description of Artificial Sequence: Synthetic oligonucleotide
agcucagacagaccaacuu

SEQ ID NO: 1287718 - RNA, 19 nt, Artificial Sequence
  Description of Artificial Sequence: Synthetic oligonucleotide
ugguuguugcugcucccca

SEQ ID NO: 1287719 - RNA, 19 nt, Artificial Sequence
  Description of Artificial Sequence: Synthetic oligonucleotide
gcuuguuucgcugguagag

SEQ ID NO: 1287720 - RNA, 19 nt, Artificial Sequence
  Description of Artificial Sequence: Synthetic oligonucleotide
cuacaggcuuguuucgcug

SEQ ID NO: 1287721 - RNA, 19 nt, Artificial Sequence
  Description of Artificial Sequence: Synthetic oligonucleotide
uucgcugguagagguagca

SEQ ID NO: 1287722 - RNA, 19 nt, Artificial Sequence
  Description of Artificial Sequence: Synthetic oligonucleotide
cacacuaguggaagucaug

SEQ ID NO: 1287723 - RNA, 19 nt, Artificial Sequence
  Description of Artificial Sequence: Synthetic oligonucleotide
ucucguccggcaaaccauc

SEQ ID NO: 1287724 - RNA, 19 nt, Artificial Sequence
  Description of Artificial Sequence: Synthetic oligonucleotide
aagagucaauucaauuuua

SEQ ID NO: 1287725 - RNA, 19 nt, Artificial Sequence
  Description of Artificial Sequence: Synthetic oligonucleotide
uucgacugagagagucuga

SEQ ID NO: 1287726 - RNA, 19 nt, Artificial Sequence
  Description of Artificial Sequence: Synthetic oligonucleotide
uagauggcgccuucacugu

SEQ ID NO: 1287727 - RNA, 19 nt, Artificial Sequence
  Description of Artificial Sequence: Synthetic oligonucleotide
aagaauugagcugguuguu

SEQ ID NO: 1287728 - RNA, 19 nt, Artificial Sequence
  Description of Artificial Sequence: Synthetic oligonucleotide
gaccaacuuaaaacucugc

SEQ ID NO: 1287729 - RNA, 19 nt, Artificial Sequence
  Description of Artificial Sequence: Synthetic oligonucleotide
uccggcaaaccaucaugca

SEQ ID NO: 1287730 - RNA, 19 nt, Artificial Sequence
  Description of Artificial Sequence: Synthetic oligonucleotide
cauccaagauuucagauuu

SEQ ID NO: 1287731 - RNA, 19 nt, Artificial Sequence
  Description of Artificial Sequence: Synthetic oligonucleotide
cacccaccggcacacagag

SEQ ID NO: 1287732 - RNA, 19 nt, Artificial Sequence
  Description of Artificial Sequence: Synthetic oligonucleotide
ucgucauacuucagcuccu

SEQ ID NO: 1287733 - RNA, 19 nt, Artificial Sequence
  Description of Artificial Sequence: Synthetic oligonucleotide
uuucgcugguagagguagc

SEQ ID NO: 1287734 - RNA, 19 nt, Artificial Sequence
  Description of Artificial Sequence: Synthetic oligonucleotide
ucgaugucacgugucuagc

SEQ ID NO: 1287735 - RNA, 19 nt, Artificial Sequence
  Description of Artificial Sequence: Synthetic oligonucleotide
gggauguagaccugcagga

SEQ ID NO: 1287736 - RNA, 19 nt, Artificial Sequence
  Description of Artificial Sequence: Synthetic oligonucleotide
gauggcgccuucacugugc

SEQ ID NO: 1287737 - RNA, 19 nt, Artificial Sequence
  Description of Artificial Sequence: Synthetic oligonucleotide
cucgcuauccgucugcuua

SEQ ID NO: 1287738 - RNA, 19 nt, Artificial Sequence
  Description of Artificial Sequence: Synthetic oligonucleotide
ugggaugggcuaaacgcuu

SEQ ID NO: 1287739 - RNA, 19 nt, Artificial Sequence
  Description of Artificial Sequence: Synthetic oligonucleotide
guccggcaaaccaucaugc

SEQ ID NO: 1287740 - RNA, 19 nt, Artificial Sequence
  Description of Artificial Sequence: Synthetic oligonucleotide
caucucgcuauccgucugc

SEQ ID NO: 1287741 - RNA, 19 nt, Artificial Sequence
  Description of Artificial Sequence: Synthetic oligonucleotide
cagacaggccaggaggccg

SEQ ID NO: 1287742 - RNA, 19 nt, Artificial Sequence
  Description of Artificial Sequence: Synthetic oligonucleotide
uuccuucccggcuucuacu

SEQ ID NO: 1287743 - RNA, 19 nt, Artificial Sequence
  Description of Artificial Sequence: Synthetic oligonucleotide
ggaggugacuuauuuucac

SEQ ID NO: 1287744 - RNA, 19 nt, Artificial Sequence
  Description of Artificial Sequence: Synthetic oligonucleotide
acgaacuguaggucagaga

SEQ ID NO: 1287745 - RNA, 19 nt, Artificial Sequence
  Description of Artificial Sequence: Synthetic oligonucleotide
acgugguuuucuucauuca

SEQ ID NO: 1287746 - RNA, 19 nt, Artificial Sequence
  Description of Artificial Sequence: Synthetic oligonucleotide
ucacggugggccacuuucu

SEQ ID NO: 1287747 - RNA, 19 nt, Artificial Sequence
  Description of Artificial Sequence: Synthetic oligonucleotide
agcuccguaagagucaauu

SEQ ID NO: 1287748 - RNA, 19 nt, Artificial Sequence
  Description of Artificial Sequence: Synthetic oligonucleotide
uguuucgcugguagaggua

SEQ ID NO: 1287749 - RNA, 19 nt, Artificial Sequence
  Description of Artificial Sequence: Synthetic oligonucleotide
ugagcaaguuggccgucuc

SEQ ID NO: 1287750 - RNA, 19 nt, Artificial Sequence
  Description of Artificial Sequence: Synthetic oligonucleotide
uucguaaaacggguccccu

SEQ ID NO: 1287751 - RNA, 19 nt, Artificial Sequence
  Description of Artificial Sequence: Synthetic oligonucleotide
cagaccaacuuaaaacucu

SEQ ID NO: 1287752 - RNA, 19 nt, Artificial Sequence
  Description of Artificial Sequence: Synthetic oligonucleotide
cugcaggaaugaagaauug

SEQ ID NO: 1287753 - RNA, 19 nt, Artificial Sequence
  Description of Artificial Sequence: Synthetic oligonucleotide
ugacaucugggaugggcua

SEQ ID NO: 1287754 - RNA, 19 nt, Artificial Sequence
  Description of Artificial Sequence: Synthetic oligonucleotide
cggcaaaccaucaugcagc

SEQ ID NO: 1287755 - RNA, 19 nt, Artificial Sequence
  Description of Artificial Sequence: Synthetic oligonucleotide
ggaaacggugcauggccag

SEQ ID NO: 1287756 - RNA, 19 nt, Artificial Sequence
  Description of Artificial Sequence: Synthetic oligonucleotide
ucggggauguagaccugca

SEQ ID NO: 1287757 - RNA, 19 nt, Artificial Sequence
  Description of Artificial Sequence: Synthetic oligonucleotide
agcugucgaugucacgugu

SEQ ID NO: 1287758 - RNA, 19 nt, Artificial Sequence
  Description of Artificial Sequence: Synthetic oligonucleotide
ggcuaaacgcuucuacuuc

SEQ ID NO: 1287759 - RNA, 19 nt, Artificial Sequence
  Description of Artificial Sequence: Synthetic oligonucleotide
cucaaugcuguaugucgca

SEQ ID NO: 1287760 - RNA, 19 nt, Artificial Sequence
  Description of Artificial Sequence: Synthetic oligonucleotide
ggugauauuuuaaccuuca

SEQ ID NO: 1287761 - RNA, 19 nt, Artificial Sequence
  Description of Artificial Sequence: Synthetic oligonucleotide
ucaauccggucgcuucgac

SEQ ID NO: 1287762 - RNA, 19 nt, Artificial Sequence
  Description of Artificial Sequence: Synthetic oligonucleotide
auuugggcggaagaaguuu

SEQ ID NO: 1287763 - RNA, 19 nt, Artificial Sequence
  Description of Artificial Sequence: Synthetic oligonucleotide
gaacuucguaaaacggguc

SEQ ID NO: 1287764 - RNA, 19 nt, Artificial Sequence
  Description of Artificial Sequence: Synthetic oligonucleotide
cauccgggaugccaucaag

SEQ ID NO: 1287765 - RNA, 19 nt, Artificial Sequence
  Description of Artificial Sequence: Synthetic oligonucleotide
agcucacacuaguggaagu

SEQ ID NO: 1287766 - RNA, 19 nt, Artificial Sequence
  Description of Artificial Sequence: Synthetic oligonucleotide
ucaagggagugcagucauc

SEQ ID NO: 1287767 - RNA, 19 nt, Artificial Sequence
  Description of Artificial Sequence: Synthetic oligonucleotide
uuggccgucucguccggca

SEQ ID NO: 1287768 - RNA, 19 nt, Artificial Sequence
  Description of Artificial Sequence: Synthetic oligonucleotide
agauggcgccuucacugug

SEQ ID NO: 1287769 - RNA, 19 nt, Artificial Sequence
  Description of Artificial Sequence: Synthetic oligonucleotide
ggcucugacugaguagucg

SEQ ID NO: 1287770 - RNA, 19 nt, Artificial Sequence
  Description of Artificial Sequence: Synthetic oligonucleotide
aguucaacggcgacaccca

SEQ ID NO: 1287771 - RNA, 19 nt, Artificial Sequence
  Description of Artificial Sequence: Synthetic oligonucleotide
caggugagauuuaccuuuc

SEQ ID NO: 1287772 - RNA, 19 nt, Artificial Sequence
  Description of Artificial Sequence: Synthetic oligonucleotide
caagcucacacuaguggaa

SEQ ID NO: 1287773 - RNA, 19 nt, Artificial Sequence
  Description of Artificial Sequence: Synthetic oligonucleotide
gcaaguccagccuguuagg

SEQ ID NO: 1287774 - RNA, 19 nt, Artificial Sequence
  Description of Artificial Sequence: Synthetic oligonucleotide
ucgcuauccgucugcuuaa

SEQ ID NO: 1287775 - RNA, 19 nt, Artificial Sequence
  Description of Artificial Sequence: Synthetic oligonucleotide
gaugucacgugucuagcuu

SEQ ID NO: 1287776 - RNA, 19 nt, Artificial Sequence
  Description of Artificial Sequence: Synthetic oligonucleotide
ucguaaaacggguccccuu

SEQ ID NO: 1287777 - RNA, 19 nt, Artificial Sequence
  Description of Artificial Sequence: Synthetic oligonucleotide
ccggcaaaccaucaugcag

SEQ ID NO: 1287778 - RNA, 19 nt, Artificial Sequence
  Description of Artificial Sequence: Synthetic oligonucleotide
auugagcaaguuggccguc

SEQ ID NO: 1287779 - RNA, 19 nt, Artificial Sequence
  Description of Artificial Sequence: Synthetic oligonucleotide
acggugcauggccaggaga

SEQ ID NO: 1287780 - RNA, 19 nt, Artificial Sequence
  Description of Artificial Sequence: Synthetic oligonucleotide
gguauugcugucuggagau

SEQ ID NO: 1287781 - RNA, 19 nt, Artificial Sequence
  Description of Artificial Sequence: Synthetic oligonucleotide
cuucauucauccgucaagu

SEQ ID NO: 1287782 - RNA, 19 nt, Artificial Sequence
  Description of Artificial Sequence: Synthetic oligonucleotide
uccauccgggaugccauca

SEQ ID NO: 1287783 - RNA, 19 nt, Artificial Sequence
  Description of Artificial Sequence: Synthetic oligonucleotide
ugagugguucaggccacga

SEQ ID NO: 1287784 - RNA, 19 nt, Artificial Sequence
  Description of Artificial Sequence: Synthetic oligonucleotide
gcuguaugucgcagcaugg

SEQ ID NO: 1287785 - RNA, 19 nt, Artificial Sequence
  Description of Artificial Sequence: Synthetic oligonucleotide
aguuggccgucucguccgg

SEQ ID NO: 1287786 - RNA, 19 nt, Artificial Sequence
  Description of Artificial Sequence: Synthetic oligonucleotide
caaaguagucuacaggcuu

SEQ ID NO: 1287787 - RNA, 19 nt, Artificial Sequence
  Description of Artificial Sequence: Synthetic oligonucleotide
guagucuacaggcuuguuu

SEQ ID NO: 1287788 - RNA, 19 nt, Artificial Sequence
  Description of Artificial Sequence: Synthetic oligonucleotide
augauucuauuugggcgga

SEQ ID NO: 1287789 - RNA, 19 nt, Artificial Sequence
  Description of Artificial Sequence: Synthetic oligonucleotide
cuacuuccacuuuccccug

SEQ ID NO: 1287790 - RNA, 19 nt, Artificial Sequence
  Description of Artificial Sequence: Synthetic oligonucleotide
guagaauuuggugaugguu

SEQ ID NO: 1287791 - RNA, 19 nt, Artificial Sequence
  Description of Artificial Sequence: Synthetic oligonucleotide
ugagggccaucacaccgua

SEQ ID NO: 1287792 - RNA, 19 nt, Artificial Sequence
  Description of Artificial Sequence: Synthetic oligonucleotide
ucuuucacggugggccacu

SEQ ID NO: 1287793 - RNA, 19 nt, Artificial Sequence
  Description of Artificial Sequence: Synthetic oligonucleotide
gaguuagcucagacagacc

SEQ ID NO: 1287794 - RNA, 19 nt, Artificial Sequence
  Description of Artificial Sequence: Synthetic oligonucleotide
ugacgaacuguaggucaga

SEQ ID NO: 1287795 - RNA, 19 nt, Artificial Sequence
  Description of Artificial Sequence: Synthetic oligonucleotide
ucguccggcaaaccaucau

SEQ ID NO: 1287796 - RNA, 19 nt, Artificial Sequence
  Description of Artificial Sequence: Synthetic oligonucleotide
ccaagguuggugucauggc

SEQ ID NO: 1287797 - RNA, 19 nt, Artificial Sequence
  Description of Artificial Sequence: Synthetic oligonucleotide
cccaccggcacacagagga

SEQ ID NO: 1287798 - RNA, 19 nt, Artificial Sequence
  Description of Artificial Sequence: Synthetic oligonucleotide
aagcugcggugauauuuua

SEQ ID NO: 1287799 - RNA, 19 nt, Artificial Sequence
  Description of Artificial Sequence: Synthetic oligonucleotide
ugagagagucugagugguu

SEQ ID NO: 1287800 - RNA, 19 nt, Artificial Sequence
  Description of Artificial Sequence: Synthetic oligonucleotide
cagcugucgaugucacgug

SEQ ID NO: 1287801 - RNA, 19 nt, Artificial Sequence
  Description of Artificial Sequence: Synthetic oligonucleotide
gucacaucaugggaucaca

SEQ ID NO: 1287802 - RNA, 19 nt, Artificial Sequence
  Description of Artificial Sequence: Synthetic oligonucleotide
gucggggauguagaccugc

SEQ ID NO: 1287803 - RNA, 19 nt, Artificial Sequence
  Description of Artificial Sequence: Synthetic oligonucleotide
uccuucccggcuucuacuu

SEQ ID NO: 1287804 - RNA, 19 nt, Artificial Sequence
  Description of Artificial Sequence: Synthetic oligonucleotide
uucuuucacggugggccac

SEQ ID NO: 1287805 - RNA, 19 nt, Artificial Sequence
  Description of Artificial Sequence: Synthetic oligonucleotide
aggaaacggugcauggcca

SEQ ID NO: 1287806 - RNA, 19 nt, Artificial Sequence
  Description of Artificial Sequence: Synthetic oligonucleotide
uccggucgcuucgacugag

SEQ ID NO: 1287807 - RNA, 19 nt, Artificial Sequence
  Description of Artificial Sequence: Synthetic oligonucleotide
cagaguuagcucagacaga

SEQ ID NO: 1287808 - RNA, 19 nt, Artificial Sequence
  Description of Artificial Sequence: Synthetic oligonucleotide
gcagacaagcucacacuag

SEQ ID NO: 1287809 - RNA, 19 nt, Artificial Sequence
  Description of Artificial Sequence: Synthetic oligonucleotide
gggacggccaaggaaggcc

SEQ ID NO: 1287810 - RNA, 19 nt, Artificial Sequence
  Description of Artificial Sequence: Synthetic oligonucleotide
uauccuuccuggggacggc

SEQ ID NO: 1287811 - RNA, 19 nt, Artificial Sequence
  Description of Artificial Sequence: Synthetic oligonucleotide
gcuauccgucugcuuaaag

SEQ ID NO: 1287812 - RNA, 19 nt, Artificial Sequence
  Description of Artificial Sequence: Synthetic oligonucleotide
ggcagacaagcucacacua

SEQ ID NO: 1287813 - RNA, 19 nt, Artificial Sequence
  Description of Artificial Sequence: Synthetic oligonucleotide
ugggcggaagaaguuuguc

SEQ ID NO: 1287814 - RNA, 19 nt, Artificial Sequence
  Description of Artificial Sequence: Synthetic oligonucleotide
gcuccguaagagucaauuc

SEQ ID NO: 1287815 - RNA, 19 nt, Artificial Sequence
  Description of Artificial Sequence: Synthetic oligonucleotide
caaguucaacggcgacacc

SEQ ID NO: 1287816 - RNA, 19 nt, Artificial Sequence
  Description of Artificial Sequence: Synthetic oligonucleotide
gcucagacagaccaacuua

SEQ ID NO: 1287817 - RNA, 19 nt, Artificial Sequence
  Description of Artificial Sequence: Synthetic oligonucleotide
ugucgaugucacgugucua

SEQ ID NO: 1287818 - RNA, 19 nt, Artificial Sequence
  Description of Artificial Sequence: Synthetic oligonucleotide
ggucagagagggcucugac

SEQ ID NO: 1287819 - RNA, 19 nt, Artificial Sequence
  Description of Artificial Sequence: Synthetic oligonucleotide
guaugaaaaggcgcuggcu

SEQ ID NO: 1287820 - RNA, 19 nt, Artificial Sequence
  Description of Artificial Sequence: Synthetic oligonucleotide
guuagcucagacagaccaa

SEQ ID NO: 1287821 - RNA, 19 nt, Artificial Sequence
  Description of Artificial Sequence: Synthetic oligonucleotide
cguaguaugaaaaggcgcu

SEQ ID NO: 1287822 - RNA, 19 nt, Artificial Sequence
  Description of Artificial Sequence: Synthetic oligonucleotide
gccaucaaggcauuuuggu

SEQ ID NO: 1287823 - RNA, 19 nt, Artificial Sequence
  Description of Artificial Sequence: Synthetic oligonucleotide
gcgacacacaguucuguuc

SEQ ID NO: 1287824 - RNA, 19 nt, Artificial Sequence
  Description of Artificial Sequence: Synthetic oligonucleotide
auccaagauuucagauuug

SEQ ID NO: 1287825 - RNA, 19 nt, Artificial Sequence
  Description of Artificial Sequence: Synthetic oligonucleotide
gaagcugcggugauauuuu

SEQ ID NO: 1287826 - RNA, 19 nt, Artificial Sequence
  Description of Artificial Sequence: Synthetic oligonucleotide
ggucgcuucgacugagaga

SEQ ID NO: 1287827 - RNA, 19 nt, Artificial Sequence
  Description of Artificial Sequence: Synthetic oligonucleotide
aucucgcuauccgucugcu

SEQ ID NO: 1287828 - RNA, 19 nt, Artificial Sequence
  Description of Artificial Sequence: Synthetic oligonucleotide
ggucacaucaugggaucac

SEQ ID NO: 1287829 - RNA, 19 nt, Artificial Sequence
  Description of Artificial Sequence: Synthetic oligonucleotide
ggaggccgauuaaggaggg

SEQ ID NO: 1287830 - RNA, 19 nt, Artificial Sequence
  Description of Artificial Sequence: Synthetic oligonucleotide
agugcaaggggugguugua

SEQ ID NO: 1287831 - RNA, 19 nt, Artificial Sequence
  Description of Artificial Sequence: Synthetic oligonucleotide
gaaaaggcgcuggcuucga

SEQ ID NO: 1287832 - RNA, 19 nt, Artificial Sequence
  Description of Artificial Sequence: Synthetic oligonucleotide
gugacaauuccuagaacuu

SEQ ID NO: 1287833 - RNA, 19 nt, Artificial Sequence
  Description of Artificial Sequence: Synthetic oligonucleotide
cgacacacaguucuguuca

SEQ ID NO: 1287834 - RNA, 19 nt, Artificial Sequence
  Description of Artificial Sequence: Synthetic oligonucleotide
gucuggagaucuugacgaa

SEQ ID NO: 1287835 - RNA, 19 nt, Artificial Sequence
  Description of Artificial Sequence: Synthetic oligonucleotide
cggaagaaguuugucuccg

SEQ ID NO: 1287836 - RNA, 19 nt, Artificial Sequence
  Description of Artificial Sequence: Synthetic oligonucleotide
uggccgucucguccggcaa

SEQ ID NO: 1287837 - RNA, 19 nt, Artificial Sequence
  Description of Artificial Sequence: Synthetic oligonucleotide
gaugggcuaaacgcuucua

SEQ ID NO: 1287838 - RNA, 19 nt, Artificial Sequence
  Description of Artificial Sequence: Synthetic oligonucleotide
gguuuucaagggagugcag

SEQ ID NO: 1287839 - RNA, 19 nt, Artificial Sequence
  Description of Artificial Sequence: Synthetic oligonucleotide
auccggucgcuucgacuga

SEQ ID NO: 1287840 - RNA, 19 nt, Artificial Sequence
  Description of Artificial Sequence: Synthetic oligonucleotide
gaggccgauuaaggagggc

SEQ ID NO: 1287841 - RNA, 19 nt, Artificial Sequence
  Description of Artificial Sequence: Synthetic oligonucleotide
gccgauuaaggagggcuug

SEQ ID NO: 1287842 - RNA, 19 nt, Artificial Sequence
  Description of Artificial Sequence: Synthetic oligonucleotide
ucccggcuucuacuuccac

SEQ ID NO: 1287843 - RNA, 19 nt, Artificial Sequence
  Description of Artificial Sequence: Synthetic oligonucleotide
uuuguccauccgggaugcc

SEQ ID NO: 1287844 - RNA, 19 nt, Artificial Sequence
  Description of Artificial Sequence: Synthetic oligonucleotide
ccaggaggccgauuaagga

SEQ ID NO: 1287845 - RNA, 19 nt, Artificial Sequence
  Description of Artificial Sequence: Synthetic oligonucleotide
cagagagggcucugacuga

SEQ ID NO: 1287846 - RNA, 19 nt, Artificial Sequence
  Description of Artificial Sequence: Synthetic oligonucleotide
cucguccggcaaaccauca

SEQ ID NO: 1287847 - RNA, 19 nt, Artificial Sequence
  Description of Artificial Sequence: Synthetic oligonucleotide
gccaaggaaggccacucaa

SEQ ID NO: 1287848 - RNA, 19 nt, Artificial Sequence
  Description of Artificial Sequence: Synthetic oligonucleotide
ucucgcuauccgucugcuu

SEQ ID NO: 1287849 - RNA, 19 nt, Artificial Sequence
  Description of Artificial Sequence: Synthetic oligonucleotide
cguccggcaaaccaucaug

SEQ ID NO: 1287850 - RNA, 19 nt, Artificial Sequence
  Description of Artificial Sequence: Synthetic oligonucleotide
gagggccaucacaccguag

SEQ ID NO: 1287851 - RNA, 19 nt, Artificial Sequence
  Description of Artificial Sequence: Synthetic oligonucleotide
cugucgaugucacgugucu

SEQ ID NO: 1287852 - RNA, 19 nt, Artificial Sequence
  Description of Artificial Sequence: Synthetic oligonucleotide
ccccucguuguucacucgc

SEQ ID NO: 1287853 - RNA, 19 nt, Artificial Sequence
  Description of Artificial Sequence: Synthetic oligonucleotide
uggcgccuucacugugcag

SEQ ID NO: 1287854 - RNA, 19 nt, Artificial Sequence
  Description of Artificial Sequence: Synthetic oligonucleotide
aggccacgaggggcgaggg

SEQ ID NO: 1287855 - RNA, 19 nt, Artificial Sequence
  Description of Artificial Sequence: Synthetic oligonucleotide
aauggccaggugagauuua

SEQ ID NO: 1287856 - RNA, 19 nt, Artificial Sequence
  Description of Artificial Sequence: Synthetic oligonucleotide
gcuuucuuucacggugggc

SEQ ID NO: 1287857 - RNA, 19 nt, Artificial Sequence
  Description of Artificial Sequence: Synthetic oligonucleotide
acggcgacacccaccggca

SEQ ID NO: 1287858 - RNA, 19 nt, Artificial Sequence
  Description of Artificial Sequence: Synthetic oligonucleotide
ccucguuguucacucgcug

SEQ ID NO: 1287859 - RNA, 19 nt, Artificial Sequence
  Description of Artificial Sequence: Synthetic oligonucleotide
ggagaucuugacgaacugu

SEQ ID NO: 1287860 - RNA, 19 nt, Artificial Sequence
  Description of Artificial Sequence: Synthetic oligonucleotide
gucauggcaucaauccggu

SEQ ID NO: 1287861 - RNA, 19 nt, Artificial Sequence
  Description of Artificial Sequence: Synthetic oligonucleotide
gcaaggggugguuguagaa

SEQ ID NO: 1287862 - RNA, 19 nt, Artificial Sequence
  Description of Artificial Sequence: Synthetic oligonucleotide
gcgccuucacugugcaggc

SEQ ID NO: 1287863 - RNA, 19 nt, Artificial Sequence
  Description of Artificial Sequence: Synthetic oligonucleotide
aggggcaaguccagccugu

SEQ ID NO: 1287864 - RNA, 19 nt, Artificial Sequence
  Description of Artificial Sequence: Synthetic oligonucleotide
guugugcgacacacaguuc

SEQ ID NO: 1287865 - RNA, 19 nt, Artificial Sequence
  Description of Artificial Sequence: Synthetic oligonucleotide
caauccggucgcuucgacu

SEQ ID NO: 1287866 - RNA, 19 nt, Artificial Sequence
  Description of Artificial Sequence: Synthetic oligonucleotide
guagaccugcaggaaugaa

SEQ ID NO: 1287867 - RNA, 19 nt, Artificial Sequence
  Description of Artificial Sequence: Synthetic oligonucleotide
ggcuucgaacuucaugccu

SEQ ID NO: 1287868 - RNA, 19 nt, Artificial Sequence
  Description of Artificial Sequence: Synthetic oligonucleotide
aguagucuacaggcuuguu

SEQ ID NO: 1287869 - RNA, 19 nt, Artificial Sequence
  Description of Artificial Sequence: Synthetic oligonucleotide
guaggucagagagggcucu

SEQ ID NO: 1287870 - RNA, 19 nt, Artificial Sequence
  Description of Artificial Sequence: Synthetic oligonucleotide
cccuagauggcgccuucac

SEQ ID NO: 1287871 - RNA, 19 nt, Artificial Sequence
  Description of Artificial Sequence: Synthetic oligonucleotide
ggcaaaccaucaugcagcu

SEQ ID NO: 1287872 - RNA, 19 nt, Artificial Sequence
  Description of Artificial Sequence: Synthetic oligonucleotide
auucauccgucaaguucaa

SEQ ID NO: 1287873 - RNA, 19 nt, Artificial Sequence
  Description of Artificial Sequence: Synthetic oligonucleotide
cgugucuagcuuccauccc

SEQ ID NO: 1287874 - RNA, 19 nt, Artificial Sequence
  Description of Artificial Sequence: Synthetic oligonucleotide
ucgcuucgacugagagagu

SEQ ID NO: 1287875 - RNA, 19 nt, Artificial Sequence
  Description of Artificial Sequence: Synthetic oligonucleotide
caacggcgacacccaccgg

SEQ ID NO: 1287876 - RNA, 19 nt, Artificial Sequence
  Description of Artificial Sequence: Synthetic oligonucleotide
gcggugauauuuuaaccuu

SEQ ID NO: 1287877 - RNA, 19 nt, Artificial Sequence
  Description of Artificial Sequence: Synthetic oligonucleotide
cucgcugcaauggccaggu

SEQ ID NO: 1287878 - RNA, 19 nt, Artificial Sequence
  Description of Artificial Sequence: Synthetic oligonucleotide
guccauccgggaugccauc

SEQ ID NO: 1287879 - RNA, 19 nt, Artificial Sequence
  Description of Artificial Sequence: Synthetic oligonucleotide
gcugucgaugucacguguc

SEQ ID NO: 1287880 - RNA, 19 nt, Artificial Sequence
  Description of Artificial Sequence: Synthetic oligonucleotide
ccaucacaccguaguauga

SEQ ID NO: 1287881 - RNA, 19 nt, Artificial Sequence
  Description of Artificial Sequence: Synthetic oligonucleotide
caaggggugguuguagaau

SEQ ID NO: 1287882 - RNA, 19 nt, Artificial Sequence
  Description of Artificial Sequence: Synthetic oligonucleotide
ggcgcuggcuucgaacuuc

SEQ ID NO: 1287883 - RNA, 19 nt, Artificial Sequence
  Description of Artificial Sequence: Synthetic oligonucleotide
ccggcacacagaggaaagg

SEQ ID NO: 1287884 - RNA, 19 nt, Artificial Sequence
  Description of Artificial Sequence: Synthetic oligonucleotide
cgcugcaauggccagguga

SEQ ID NO: 1287885 - RNA, 19 nt, Artificial Sequence
  Description of Artificial Sequence: Synthetic oligonucleotide
gucucguccggcaaaccau

SEQ ID NO: 1287886 - RNA, 19 nt, Artificial Sequence
  Description of Artificial Sequence: Synthetic oligonucleotide
aggcgcuggcuucgaacuu

SEQ ID NO: 1287887 - RNA, 19 nt, Artificial Sequence
  Description of Artificial Sequence: Synthetic oligonucleotide
gugagggccaucacaccgu

SEQ ID NO: 1287888 - RNA, 19 nt, Artificial Sequence
  Description of Artificial Sequence: Synthetic oligonucleotide
ggaugggcuaaacgcuucu

SEQ ID NO: 1287889 - RNA, 19 nt, Artificial Sequence
  Description of Artificial Sequence: Synthetic oligonucleotide
gcgacacccaccggcacac

SEQ ID NO: 1287890 - RNA, 19 nt, Artificial Sequence
  Description of Artificial Sequence: Synthetic oligonucleotide
cgcuucgacugagagaguc

SEQ ID NO: 1287891 - RNA, 19 nt, Artificial Sequence
  Description of Artificial Sequence: Synthetic oligonucleotide
agggcccuagauggcgccu

SEQ ID NO: 1287892 - RNA, 19 nt, Artificial Sequence
  Description of Artificial Sequence: Synthetic oligonucleotide
cggucgcuucgacugagag

SEQ ID NO: 1287893 - RNA, 19 nt, Artificial Sequence
  Description of Artificial Sequence: Synthetic oligonucleotide
ccgucaaguucaacggcga

SEQ ID NO: 1287894 - RNA, 19 nt, Artificial Sequence
  Description of Artificial Sequence: Synthetic oligonucleotide
ccuuguugugcgacacaca

SEQ ID NO: 1287895 - RNA, 19 nt, Artificial Sequence
  Description of Artificial Sequence: Synthetic oligonucleotide
cagccuguuagggucacau

SEQ ID NO: 1287896 - RNA, 19 nt, Artificial Sequence
  Description of Artificial Sequence: Synthetic oligonucleotide
cgucaaguucaacggcgac

SEQ ID NO: 1287897 - RNA, 19 nt, Artificial Sequence
  Description of Artificial Sequence: Synthetic oligonucleotide
gggucacaucaugggauca

SEQ ID NO: 1287898 - RNA, 19 nt, Artificial Sequence
  Description of Artificial Sequence: Synthetic oligonucleotide
acccaccggcacacagagg

SEQ ID NO: 1287899 - RNA, 19 nt, Artificial Sequence
  Description of Artificial Sequence: Synthetic oligonucleotide
gugcgacacacaguucugu

SEQ ID NO: 1287900 - RNA, 19 nt, Artificial Sequence
  Description of Artificial Sequence: Synthetic oligonucleotide
gcagcuccguaagagucaa

SEQ ID NO: 1287901 - RNA, 19 nt, Artificial Sequence
  Description of Artificial Sequence: Synthetic oligonucleotide
cccaugccguccuccgcag

SEQ ID NO: 1287902 - RNA, 19 nt, Artificial Sequence
  Description of Artificial Sequence: Synthetic oligonucleotide
gguuggccuuguugugcga

SEQ ID NO: 1287903 - RNA, 19 nt, Artificial Sequence
  Description of Artificial Sequence: Synthetic oligonucleotide
ccccaugccguccuccgca

SEQ ID NO: 1287904 - RNA, 19 nt, Artificial Sequence
  Description of Artificial Sequence: Synthetic oligonucleotide
gccaggugagauuuaccuu

SEQ ID NO: 1287905 - RNA, 19 nt, Artificial Sequence
  Description of Artificial Sequence: Synthetic oligonucleotide
ccgauuaaggagggcuuga

SEQ ID NO: 1287906 - RNA, 19 nt, Artificial Sequence
  Description of Artificial Sequence: Synthetic oligonucleotide
ccuagauggcgccuucacu

SEQ ID NO: 1287907 - RNA, 19 nt, Artificial Sequence
  Description of Artificial Sequence: Synthetic oligonucleotide
gagaagcugcggugauauu

SEQ ID NO: 1287908 - RNA, 19 nt, Artificial Sequence
  Description of Artificial Sequence: Synthetic oligonucleotide
ggcccuagauggcgccuuc

SEQ ID NO: 1287909 - RNA, 19 nt, Artificial Sequence
  Description of Artificial Sequence: Synthetic oligonucleotide
gcuucgacugagagagucu

SEQ ID NO: 1287910 - RNA, 19 nt, Artificial Sequence
  Description of Artificial Sequence: Synthetic oligonucleotide
ccgucugcuuaaaggcaga

SEQ ID NO: 1287911 - RNA, 19 nt, Artificial Sequence
  Description of Artificial Sequence: Synthetic oligonucleotide
gcaaaccaucaugcagcuc

SEQ ID NO: 1287912 - RNA, 19 nt, Artificial Sequence
  Description of Artificial Sequence: Synthetic oligonucleotide
ccaugccguccuccgcagc

SEQ ID NO: 1287913 - RNA, 19 nt, Artificial Sequence
  Description of Artificial Sequence: Synthetic oligonucleotide
caggcuuguuucgcuggua

SEQ ID NO: 1287914 - RNA, 19 nt, Artificial Sequence
  Description of Artificial Sequence: Synthetic oligonucleotide
ccguaagagucaauucaau

SEQ ID NO: 1287915 - RNA, 19 nt, Artificial Sequence
  Description of Artificial Sequence: Synthetic oligonucleotide
ggccgucucguccggcaaa

SEQ ID NO: 1287916 - RNA, 19 nt, Artificial Sequence
  Description of Artificial Sequence: Synthetic oligonucleotide
ggcgagggaggugacuuau

SEQ ID NO: 1287917 - RNA, 19 nt, Artificial Sequence
  Description of Artificial Sequence: Synthetic oligonucleotide
ggggcgagggaggugacuu

SEQ ID NO: 1287918 - RNA, 19 nt, Artificial Sequence
  Description of Artificial Sequence: Synthetic oligonucleotide
cugaguagucggggaugua

SEQ ID NO: 1287919 - RNA, 19 nt, Artificial Sequence
  Description of Artificial Sequence: Synthetic oligonucleotide
ggccacgaggggcgaggga

SEQ ID NO: 1287920 - RNA, 19 nt, Artificial Sequence
  Description of Artificial Sequence: Synthetic oligonucleotide
cgaugucacgugucuagcu

SEQ ID NO: 1287921 - RNA, 19 nt, Artificial Sequence
  Description of Artificial Sequence: Synthetic oligonucleotide
cgauuaaggagggcuugaa

SEQ ID NO: 1287922 - RNA, 19 nt, Artificial Sequence
  Description of Artificial Sequence: Synthetic oligonucleotide
gggcgagggaggugacuua

SEQ ID NO: 1287923 - RNA, 19 nt, Artificial Sequence
  Description of Artificial Sequence: Synthetic oligonucleotide
ggccgauuaaggagggcuu

SEQ ID NO: 1287924 - RNA, 19 nt, Artificial Sequence
  Description of Artificial Sequence: Synthetic oligonucleotide
gcccuagauggcgccuuca

SEQ ID NO: 1287925 - RNA, 19 nt, Artificial Sequence
  Description of Artificial Sequence: Synthetic oligonucleotide
cccucguuguucacucgcu

SEQ ID NO: 1287926 - RNA, 19 nt, Artificial Sequence
  Description of Artificial Sequence: Synthetic oligonucleotide
ccgucucguccggcaaacc

SEQ ID NO: 1287927 - RNA, 19 nt, Artificial Sequence
  Description of Artificial Sequence: Synthetic oligonucleotide
ccccaagguuggugucaug

SEQ ID NO: 1287928 - RNA, 19 nt, Artificial Sequence
  Description of Artificial Sequence: Synthetic oligonucleotide
ccaccggcacacagaggaa

SEQ ID NO: 1287929 - RNA, 19 nt, Artificial Sequence
  Description of Artificial Sequence: Synthetic oligonucleotide
ccggucgcuucgacugaga

SEQ ID NO: 1287930 - RNA, 19 nt, Artificial Sequence
  Description of Artificial Sequence: Synthetic oligonucleotide
cgacugagagagucugagu

SEQ ID NO: 1287931 - RNA, 19 nt, Artificial Sequence
  Description of Artificial Sequence: Synthetic oligonucleotide
cuuucacggugggccacuu

SEQ ID NO: 1287932 - RNA, 19 nt, Artificial Sequence
  Description of Artificial Sequence: Synthetic oligonucleotide
cagcuccguaagagucaau

SEQ ID NO: 1287933 - RNA, 19 nt, Artificial Sequence
  Description of Artificial Sequence: Synthetic oligonucleotide
gcauagcguccaacuuggu

SEQ ID NO: 1287934 - RNA, 19 nt, Artificial Sequence
  Description of Artificial Sequence: Synthetic oligonucleotide
gggcccuagauggcgccuu

SEQ ID NO: 1287935 - RNA, 19 nt, Artificial Sequence
  Description of Artificial Sequence: Synthetic oligonucleotide
ggcugugguuggccuuguu

SEQ ID NO: 1287936 - RNA, 19 nt, Artificial Sequence
  Description of Artificial Sequence: Synthetic oligonucleotide
gcgagggaggugacuuauu

SEQ ID NO: 1287937 - RNA, 19 nt, Artificial Sequence
  Description of Artificial Sequence: Synthetic oligonucleotide
cgcuauccgucugcuuaaa

SEQ ID NO: 1287938 - RNA, 19 nt, Artificial Sequence
  Description of Artificial Sequence: Synthetic oligonucleotide
cguccaacuuggugucauu

SEQ ID NO: 1287939 - RNA, 19 nt, Artificial Sequence
  Description of Artificial Sequence: Synthetic oligonucleotide
uguucaaacugcuugagga

SEQ ID NO: 1287940 - RNA, 19 nt, Artificial Sequence
  Description of Artificial Sequence: Synthetic oligonucleotide
ugcggcaucauacugggcg

SEQ ID NO: 1287941 - RNA, 19 nt, Artificial Sequence
  Description of Artificial Sequence: Synthetic oligonucleotide
ucacugagaggucauaagg

SEQ ID NO: 1287942 - RNA, 19 nt, Artificial Sequence
  Description of Artificial Sequence: Synthetic oligonucleotide
acugagaggucauaagggc

SEQ ID NO: 1287943 - RNA, 19 nt, Artificial Sequence
  Description of Artificial Sequence: Synthetic oligonucleotide
uuccuuaagcaucucauag

SEQ ID NO: 1287944 - RNA, 19 nt, Artificial Sequence
  Description of Artificial Sequence: Synthetic oligonucleotide
uuugaacucuugaugaugu

SEQ ID NO: 1287945 - RNA, 19 nt, Artificial Sequence
  Description of Artificial Sequence: Synthetic oligonucleotide
agcguuggcagcuugcagc

SEQ ID NO: 1287946 - RNA, 19 nt, Artificial Sequence
  Description of Artificial Sequence: Synthetic oligonucleotide
agagacuccagguagcguc

SEQ ID NO: 1287947 - RNA, 19 nt, Artificial Sequence
  Description of Artificial Sequence: Synthetic oligonucleotide
aacauucuguucuugcugu

SEQ ID NO: 1287948 - RNA, 19 nt, Artificial Sequence
  Description of Artificial Sequence: Synthetic oligonucleotide
ucuuguagcuuccucucgg

SEQ ID NO: 1287949 - RNA, 19 nt, Artificial Sequence
  Description of Artificial Sequence: Synthetic oligonucleotide
aucgcuguugaugucaugc

SEQ ID NO: 1287950 - RNA, 19 nt, Artificial Sequence
  Description of Artificial Sequence: Synthetic oligonucleotide
agcucgucaagcuugguuc

SEQ ID NO: 1287951 - RNA, 19 nt, Artificial Sequence
  Description of Artificial Sequence: Synthetic oligonucleotide
uuaagcaucucauagcguu

SEQ ID NO: 1287952 - RNA, 19 nt, Artificial Sequence
  Description of Artificial Sequence: Synthetic oligonucleotide
gaacucuugaugaugugcg

SEQ ID NO: 1287953 - RNA, 19 nt, Artificial Sequence
  Description of Artificial Sequence: Synthetic oligonucleotide
agggacauugacuuugggg

SEQ ID NO: 1287954 - RNA, 19 nt, Artificial Sequence
  Description of Artificial Sequence: Synthetic oligonucleotide
cucccuagcagcaagcucc

SEQ ID NO: 1287955 - RNA, 19 nt, Artificial Sequence
  Description of Artificial Sequence: Synthetic oligonucleotide
agagaugcaucugaggaac

SEQ ID NO: 1287956 - RNA, 19 nt, Artificial Sequence
  Description of Artificial Sequence: Synthetic oligonucleotide
uuuggaagguggaacauuc

SEQ ID NO: 1287957 - RNA, 19 nt, Artificial Sequence
  Description of Artificial Sequence: Synthetic oligonucleotide
ucaucuagcacaccaucgc

SEQ ID NO: 1287958 - RNA, 19 nt, Artificial Sequence
  Description of Artificial Sequence: Synthetic oligonucleotide
aucucauagcguuugaacu

SEQ ID NO: 1287959 - RNA, 19 nt, Artificial Sequence
  Description of Artificial Sequence: Synthetic oligonucleotide
cauaccuccuucaacuggg

SEQ ID NO: 1287960 - RNA, 19 nt, Artificial Sequence
  Description of Artificial Sequence: Synthetic oligonucleotide
ugcgcuguugcucuuguag

SEQ ID NO: 1287961 - RNA, 19 nt, Artificial Sequence
  Description of Artificial Sequence: Synthetic oligonucleotide
cuuugcauccaucuuggcc

SEQ ID NO: 1287962 - RNA, 19 nt, Artificial Sequence
  Description of Artificial Sequence: Synthetic oligonucleotide
accuguugggguccaaucc

SEQ ID NO: 1287963 - RNA, 19 nt, Artificial Sequence
  Description of Artificial Sequence: Synthetic oligonucleotide
gacaaagucuagcucucgg

SEQ ID NO: 1287964 - RNA, 19 nt, Artificial Sequence
  Description of Artificial Sequence: Synthetic oligonucleotide
ugugcggcaucauacuggg

SEQ ID NO: 1287965 - RNA, 19 nt, Artificial Sequence
  Description of Artificial Sequence: Synthetic oligonucleotide
agcguuugaacucuugaug

SEQ ID NO: 1287966 - RNA, 19 nt, Artificial Sequence
  Description of Artificial Sequence: Synthetic oligonucleotide
gaacauucuguucuugcug

SEQ ID NO: 1287967 - RNA, 19 nt, Artificial Sequence
  Description of Artificial Sequence: Synthetic oligonucleotide
cucaaagcgccucagcucc

SEQ ID NO: 1287968 - RNA, 19 nt, Artificial Sequence
  Description of Artificial Sequence: Synthetic oligonucleotide
agguggaacauucuguucu

SEQ ID NO: 1287969 - RNA, 19 nt, Artificial Sequence
  Description of Artificial Sequence: Synthetic oligonucleotide
cucaucuagcacaccaucg

SEQ ID NO: 1287970 - RNA, 19 nt, Artificial Sequence
  Description of Artificial Sequence: Synthetic oligonucleotide
ucccauaccuccuucaacu

SEQ ID NO: 1287971 - RNA, 19 nt, Artificial Sequence
  Description of Artificial Sequence: Synthetic oligonucleotide
ugaacucuugaugaugugc

SEQ ID NO: 1287972 - RNA, 19 nt, Artificial Sequence
  Description of Artificial Sequence: Synthetic oligonucleotide
aacucuugaugaugugcgg

SEQ ID NO: 1287973 - RNA, 19 nt, Artificial Sequence
  Description of Artificial Sequence: Synthetic oligonucleotide
gauagcaucagcagaggug

SEQ ID NO: 1287974 - RNA, 19 nt, Artificial Sequence
  Description of Artificial Sequence: Synthetic oligonucleotide
ugaggaacaggguagcccu

SEQ ID NO: 1287975 - RNA, 19 nt, Artificial Sequence
  Description of Artificial Sequence: Synthetic oligonucleotide
aagguggaacauucuguuc

SEQ ID NO: 1287976 - RNA, 19 nt, Artificial Sequence
  Description of Artificial Sequence: Synthetic oligonucleotide
aaccuguugggguccaauc

SEQ ID NO: 1287977 - RNA, 19 nt, Artificial Sequence
  Description of Artificial Sequence: Synthetic oligonucleotide
acaacugauagcaucagca

SEQ ID NO: 1287978 - RNA, 19 nt, Artificial Sequence
  Description of Artificial Sequence: Synthetic oligonucleotide
guaugaagaaggucuuggg

SEQ ID NO: 1287979 - RNA, 19 nt, Artificial Sequence
  Description of Artificial Sequence: Synthetic oligonucleotide
augaugugcggcaucauac

SEQ ID NO: 1287980 - RNA, 19 nt, Artificial Sequence
  Description of Artificial Sequence: Synthetic oligonucleotide
cacaagacgguccugguug

SEQ ID NO: 1287981 - RNA, 19 nt, Artificial Sequence
  Description of Artificial Sequence: Synthetic oligonucleotide
guaguauaggccugugucc

SEQ ID NO: 1287982 - RNA, 19 nt, Artificial Sequence
  Description of Artificial Sequence: Synthetic oligonucleotide
aguucuugcucaucuagca

SEQ ID NO: 1287983 - RNA, 19 nt, Artificial Sequence
  Description of Artificial Sequence: Synthetic oligonucleotide
aagucuagcucucggcuca

SEQ ID NO: 1287984 - RNA, 19 nt, Artificial Sequence
  Description of Artificial Sequence: Synthetic oligonucleotide
ugguaaagagagcuuccag

SEQ ID NO: 1287985 - RNA, 19 nt, Artificial Sequence
  Description of Artificial Sequence: Synthetic oligonucleotide
ucucauagcguuugaacuc

SEQ ID NO: 1287986 - RNA, 19 nt, Artificial Sequence
  Description of Artificial Sequence: Synthetic oligonucleotide
acucuugaugaugugcggc

SEQ ID NO: 1287987 - RNA, 19 nt, Artificial Sequence
  Description of Artificial Sequence: Synthetic oligonucleotide
caucucauagcguuugaac

SEQ ID NO: 1287988 - RNA, 19 nt, Artificial Sequence
  Description of Artificial Sequence: Synthetic oligonucleotide
aaggcuacuucaucuggcu

SEQ ID NO: 1287989 - RNA, 19 nt, Artificial Sequence
  Description of Artificial Sequence: Synthetic oligonucleotide
aauuugagggcugggguca

SEQ ID NO: 1287990 - RNA, 19 nt, Artificial Sequence
  Description of Artificial Sequence: Synthetic oligonucleotide
guucaaacugcuugaggag

SEQ ID NO: 1287991 - RNA, 19 nt, Artificial Sequence
  Description of Artificial Sequence: Synthetic oligonucleotide
auagcguuugaacucuuga

SEQ ID NO: 1287992 - RNA, 19 nt, Artificial Sequence
  Description of Artificial Sequence: Synthetic oligonucleotide
aucggugguaguauaggcc

SEQ ID NO: 1287993 - RNA, 19 nt, Artificial Sequence
  Description of Artificial Sequence: Synthetic oligonucleotide
gguaguauaggccuguguc

SEQ ID NO: 1287994 - RNA, 19 nt, Artificial Sequence
  Description of Artificial Sequence: Synthetic oligonucleotide
ucuagcacaccaucgcugu

SEQ ID NO: 1287995 - RNA, 19 nt, Artificial Sequence
  Description of Artificial Sequence: Synthetic oligonucleotide
aagcaaaggggccccgcgg

SEQ ID NO: 1287996 - RNA, 19 nt, Artificial Sequence
  Description of Artificial Sequence: Synthetic oligonucleotide
ugucucuagcacauugaug

SEQ ID NO: 1287997 - RNA, 19 nt, Artificial Sequence
  Description of Artificial Sequence: Synthetic oligonucleotide
gaagcaaaggggccccgcg

SEQ ID NO: 1287998 - RNA, 19 nt, Artificial Sequence
  Description of Artificial Sequence: Synthetic oligonucleotide
caacugauagcaucagcag

SEQ ID NO: 1287999 - RNA, 19 nt, Artificial Sequence
  Description of Artificial Sequence: Synthetic oligonucleotide
ucaaacgugugcugguucu

SEQ ID NO: 1288000 - RNA, 19 nt, Artificial Sequence
  Description of Artificial Sequence: Synthetic oligonucleotide
aagcuugguucggacaugg

SEQ ID NO: 1288001 - RNA, 19 nt, Artificial Sequence
  Description of Artificial Sequence: Synthetic oligonucleotide
gaauuugagggcugggguc

SEQ ID NO: 1288002 - RNA, 19 nt, Artificial Sequence
  Description of Artificial Sequence: Synthetic oligonucleotide
guucaggugguccaccugc

SEQ ID NO: 1288003 - RNA, 19 nt, Artificial Sequence
  Description of Artificial Sequence: Synthetic oligonucleotide
ugucaugcaguaugaagaa

SEQ ID NO: 1288004 - RNA, 19 nt, Artificial Sequence
  Description of Artificial Sequence: Synthetic oligonucleotide
cuucaacugggcuuggcug

SEQ ID NO: 1288005 - RNA, 19 nt, Artificial Sequence
  Description of Artificial Sequence: Synthetic oligonucleotide
uugagcucgucaagcuugg

SEQ ID NO: 1288006 - RNA, 19 nt, Artificial Sequence
  Description of Artificial Sequence: Synthetic oligonucleotide
aggaauuugagggcugggg

SEQ ID NO: 1288007 - RNA, 19 nt, Artificial Sequence
  Description of Artificial Sequence: Synthetic oligonucleotide
uuugggguguucccggugu

SEQ ID NO: 1288008 - RNA, 19 nt, Artificial Sequence
  Description of Artificial Sequence: Synthetic oligonucleotide
cucuguguaggccggauac

SEQ ID NO: 1288009 - RNA, 19 nt, Artificial Sequence
  Description of Artificial Sequence: Synthetic oligonucleotide
aacgugugcugguucugag

SEQ ID NO: 1288010 - RNA, 19 nt, Artificial Sequence
  Description of Artificial Sequence: Synthetic oligonucleotide
ugacuuugggguguucccg

SEQ ID NO: 1288011 - RNA, 19 nt, Artificial Sequence
  Description of Artificial Sequence: Synthetic oligonucleotide
agguuuggaagguggaaca

SEQ ID NO: 1288012 - RNA, 19 nt, Artificial Sequence
  Description of Artificial Sequence: Synthetic oligonucleotide
agcaaaggggccccgcggg

SEQ ID NO: 1288013 - RNA, 19 nt, Artificial Sequence
  Description of Artificial Sequence: Synthetic oligonucleotide
uccucugcgucgaugccag

SEQ ID NO: 1288014 - RNA, 19 nt, Artificial Sequence
  Description of Artificial Sequence: Synthetic oligonucleotide
ugggcgaggucucgggugg

SEQ ID NO: 1288015 - RNA, 19 nt, Artificial Sequence
  Description of Artificial Sequence: Synthetic oligonucleotide
uucaucacgugcucccuca

SEQ ID NO: 1288016 - RNA, 19 nt, Artificial Sequence
  Description of Artificial Sequence: Synthetic oligonucleotide
gucacugagaggucauaag

SEQ ID NO: 1288017 - RNA, 19 nt, Artificial Sequence
  Description of Artificial Sequence: Synthetic oligonucleotide
ugaagaaggucuugggguu

SEQ ID NO: 1288018 - RNA, 19 nt, Artificial Sequence
  Description of Artificial Sequence: Synthetic oligonucleotide
gucaccugugucugcacgg

SEQ ID NO: 1288019 - RNA, 19 nt, Artificial Sequence
  Description of Artificial Sequence: Synthetic oligonucleotide
guaucggugguaguauagg

SEQ ID NO: 1288020 - RNA, 19 nt, Artificial Sequence
  Description of Artificial Sequence: Synthetic oligonucleotide
gaggucauaagggcugggg

SEQ ID NO: 1288021 - RNA, 19 nt, Artificial Sequence
  Description of Artificial Sequence: Synthetic oligonucleotide
aggagcgucaccugugucu

SEQ ID NO: 1288022 - RNA, 19 nt, Artificial Sequence
  Description of Artificial Sequence: Synthetic oligonucleotide
ucacgugcucccucauucg

SEQ ID NO: 1288023 - RNA, 19 nt, Artificial Sequence
  Description of Artificial Sequence: Synthetic oligonucleotide
ugaugugcggcaucauacu

SEQ ID NO: 1288024 - RNA, 19 nt, Artificial Sequence
  Description of Artificial Sequence: Synthetic oligonucleotide
uuuccaacuccuugguaaa

SEQ ID NO: 1288025 - RNA, 19 nt, Artificial Sequence
  Description of Artificial Sequence: Synthetic oligonucleotide
uuguagcuuccucucggcc

SEQ ID NO: 1288026 - RNA, 19 nt, Artificial Sequence
  Description of Artificial Sequence: Synthetic oligonucleotide
acaagacgguccugguugg

SEQ ID NO: 1288027 - RNA, 19 nt, Artificial Sequence
  Description of Artificial Sequence: Synthetic oligonucleotide
ugucgcuugagcucgucaa

SEQ ID NO: 1288028 - RNA, 19 nt, Artificial Sequence
  Description of Artificial Sequence: Synthetic oligonucleotide
ugcgucgaugccaggaacu

SEQ ID NO: 1288029 - RNA, 19 nt, Artificial Sequence
  Description of Artificial Sequence: Synthetic oligonucleotide
uugggguccaauccaucca

SEQ ID NO: 1288030 - RNA, 19 nt, Artificial Sequence
  Description of Artificial Sequence: Synthetic oligonucleotide
uugguucggacaugguggc

SEQ ID NO: 1288031 - RNA, 19 nt, Artificial Sequence
  Description of Artificial Sequence: Synthetic oligonucleotide
cacguucuucaucacgugc

SEQ ID NO: 1288032 - RNA, 19 nt, Artificial Sequence
  Description of Artificial Sequence: Synthetic oligonucleotide
caucucucucaugucaucc

SEQ ID NO: 1288033 - RNA, 19 nt, Artificial Sequence
  Description of Artificial Sequence: Synthetic oligonucleotide
guaggccggauacauuucc

SEQ ID NO: 1288034 - RNA, 19 nt, Artificial Sequence
  Description of Artificial Sequence: Synthetic oligonucleotide
cucuagcacauugaugacc

SEQ ID NO: 1288035 - RNA, 19 nt, Artificial Sequence
  Description of Artificial Sequence: Synthetic oligonucleotide
agcacaacugauagcauca

SEQ ID NO: 1288036 - RNA, 19 nt, Artificial Sequence
  Description of Artificial Sequence: Synthetic oligonucleotide
aggucauaagggcugggga

SEQ ID NO: 1288037 - RNA, 19 nt, Artificial Sequence
  Description of Artificial Sequence: Synthetic oligonucleotide
ugcccaucugucucuagca

SEQ ID NO: 1288038 - RNA, 19 nt, Artificial Sequence
  Description of Artificial Sequence: Synthetic oligonucleotide
gggacauugacuuuggggu

SEQ ID NO: 1288039 - RNA, 19 nt, Artificial Sequence
  Description of Artificial Sequence: Synthetic oligonucleotide
uagcguuugaacucuugau

SEQ ID NO: 1288040 - RNA, 19 nt, Artificial Sequence
  Description of Artificial Sequence: Synthetic oligonucleotide
cucucauguuccuuaagca

SEQ ID NO: 1288041 - RNA, 19 nt, Artificial Sequence
  Description of Artificial Sequence: Synthetic oligonucleotide
acggaacugcagcuuuccc

SEQ ID NO: 1288042 - RNA, 19 nt, Artificial Sequence
  Description of Artificial Sequence: Synthetic oligonucleotide
uccagggucacaagacggu

SEQ ID NO: 1288043 - RNA, 19 nt, Artificial Sequence
  Description of Artificial Sequence: Synthetic oligonucleotide
guucugagggucuaggugu

SEQ ID NO: 1288044 - RNA, 19 nt, Artificial Sequence
  Description of Artificial Sequence: Synthetic oligonucleotide
ugacaaagucuagcucucg

SEQ ID NO: 1288045 - RNA, 19 nt, Artificial Sequence
  Description of Artificial Sequence: Synthetic oligonucleotide
acgugugcugguucugagg

SEQ ID NO: 1288046 - RNA, 19 nt, Artificial Sequence
  Description of Artificial Sequence: Synthetic oligonucleotide
ucauaagggcuggggaucc

SEQ ID NO: 1288047 - RNA, 19 nt, Artificial Sequence
  Description of Artificial Sequence: Synthetic oligonucleotide
agaugcaucugaggaacag

SEQ ID NO: 1288048 - RNA, 19 nt, Artificial Sequence
  Description of Artificial Sequence: Synthetic oligonucleotide
cagcuugcagcuucucacg

SEQ ID NO: 1288049 - RNA, 19 nt, Artificial Sequence
  Description of Artificial Sequence: Synthetic oligonucleotide
cuccucguucuuugggucg

SEQ ID NO: 1288050 - RNA, 19 nt, Artificial Sequence
  Description of Artificial Sequence: Synthetic oligonucleotide
aaguugggcuccugcuuug

SEQ ID NO: 1288051 - RNA, 19 nt, Artificial Sequence
  Description of Artificial Sequence: Synthetic oligonucleotide
agcaucucuaggucccgag

SEQ ID NO: 1288052 - RNA, 19 nt, Artificial Sequence
  Description of Artificial Sequence: Synthetic oligonucleotide
ugguaguauaggccugugu

SEQ ID NO: 1288053 - RNA, 19 nt, Artificial Sequence
  Description of Artificial Sequence: Synthetic oligonucleotide
agaagcaaaggggccccgc

SEQ ID NO: 1288054 - RNA, 19 nt, Artificial Sequence
  Description of Artificial Sequence: Synthetic oligonucleotide
ucugcgucgaugccaggaa

SEQ ID NO: 1288055 - RNA, 19 nt, Artificial Sequence
  Description of Artificial Sequence: Synthetic oligonucleotide
augcaguaugaagaagguc

SEQ ID NO: 1288056 - RNA, 19 nt, Artificial Sequence
  Description of Artificial Sequence: Synthetic oligonucleotide
cauccuuccccaguguccc

SEQ ID NO: 1288057 - RNA, 19 nt, Artificial Sequence
  Description of Artificial Sequence: Synthetic oligonucleotide
caucuuggccuugagcagc

SEQ ID NO: 1288058 - RNA, 19 nt, Artificial Sequence
  Description of Artificial Sequence: Synthetic oligonucleotide
agccucaaacgugugcugg

SEQ ID NO: 1288059 - RNA, 19 nt, Artificial Sequence
  Description of Artificial Sequence: Synthetic oligonucleotide
aagacgguccugguuggug

SEQ ID NO: 1288060 - RNA, 19 nt, Artificial Sequence
  Description of Artificial Sequence: Synthetic oligonucleotide
ugauaccuccugucgcuug

SEQ ID NO: 1288061 - RNA, 19 nt, Artificial Sequence
  Description of Artificial Sequence: Synthetic oligonucleotide
agggucacaagacgguccu

SEQ ID NO: 1288062 - RNA, 19 nt, Artificial Sequence
  Description of Artificial Sequence: Synthetic oligonucleotide
aaacgugugcugguucuga

SEQ ID NO: 1288063 - RNA, 19 nt, Artificial Sequence
  Description of Artificial Sequence: Synthetic oligonucleotide
uaagcaucucauagcguuu

SEQ ID NO: 1288064 - RNA, 19 nt, Artificial Sequence
  Description of Artificial Sequence: Synthetic oligonucleotide
gauaccuccugucgcuuga

SEQ ID NO: 1288065 - RNA, 19 nt, Artificial Sequence
  Description of Artificial Sequence: Synthetic oligonucleotide
agcccuuucuccuccccag

SEQ ID NO: 1288066 - RNA, 19 nt, Artificial Sequence
  Description of Artificial Sequence: Synthetic oligonucleotide
uaggccggauacauuucca

SEQ ID NO: 1288067 - RNA, 19 nt, Artificial Sequence
  Description of Artificial Sequence: Synthetic oligonucleotide
guauaggccuguguccggg

SEQ ID NO: 1288068 - RNA, 19 nt, Artificial Sequence
  Description of Artificial Sequence: Synthetic oligonucleotide
ugcggccuucuuuucagga

SEQ ID NO: 1288069 - RNA, 19 nt, Artificial Sequence
  Description of Artificial Sequence: Synthetic oligonucleotide
cccaguguccccaaacucc

SEQ ID NO: 1288070 - RNA, 19 nt, Artificial Sequence
  Description of Artificial Sequence: Synthetic oligonucleotide
ucgcuugagcucgucaagc

SEQ ID NO: 1288071 - RNA, 19 nt, Artificial Sequence
  Description of Artificial Sequence: Synthetic oligonucleotide
agacgguccugguuggugu

SEQ ID NO: 1288072 - RNA, 19 nt, Artificial Sequence
  Description of Artificial Sequence: Synthetic oligonucleotide
gguaaagagagcuuccagu

SEQ ID NO: 1288073 - RNA, 19 nt, Artificial Sequence
  Description of Artificial Sequence: Synthetic oligonucleotide
ucucuagcacauugaugac

SEQ ID NO: 1288074 - RNA, 19 nt, Artificial Sequence
  Description of Artificial Sequence: Synthetic oligonucleotide
uguaggccggauacauuuc

SEQ ID NO: 1288075 - RNA, 19 nt, Artificial Sequence
  Description of Artificial Sequence: Synthetic oligonucleotide
ggcagagaugcaucugagg

SEQ ID NO: 1288076 - RNA, 19 nt, Artificial Sequence
  Description of Artificial Sequence: Synthetic oligonucleotide
gaagguggaacauucuguu

SEQ ID NO: 1288077 - RNA, 19 nt, Artificial Sequence
  Description of Artificial Sequence: Synthetic oligonucleotide
gugcccaucugucucuagc

SEQ ID NO: 1288078 - RNA, 19 nt, Artificial Sequence
  Description of Artificial Sequence: Synthetic oligonucleotide
gccagcacaacugauagca

SEQ ID NO: 1288079 - RNA, 19 nt, Artificial Sequence
  Description of Artificial Sequence: Synthetic oligonucleotide
aucucuaggucccgagccu

SEQ ID NO: 1288080 - RNA, 19 nt, Artificial Sequence
  Description of Artificial Sequence: Synthetic oligonucleotide
acggaagugcccaucuguc

SEQ ID NO: 1288081 - RNA, 19 nt, Artificial Sequence
  Description of Artificial Sequence: Synthetic oligonucleotide
ugcacggaacugcagcuuu

SEQ ID NO: 1288082 - RNA, 19 nt, Artificial Sequence
  Description of Artificial Sequence: Synthetic oligonucleotide
ugaccuccuggagguaucg

SEQ ID NO: 1288083 - RNA, 19 nt, Artificial Sequence
  Description of Artificial Sequence: Synthetic oligonucleotide
cuggagguaucggugguag

SEQ ID NO: 1288084 - RNA, 19 nt, Artificial Sequence
  Description of Artificial Sequence: Synthetic oligonucleotide
gucgcuugagcucgucaag

SEQ ID NO: 1288085 - RNA, 19 nt, Artificial Sequence
  Description of Artificial Sequence: Synthetic oligonucleotide
guagcgucuucucucaugu

SEQ ID NO: 1288086 - RNA, 19 nt, Artificial Sequence
  Description of Artificial Sequence: Synthetic oligonucleotide
ucagcguuggcagcuugca

SEQ ID NO: 1288087 - RNA, 19 nt, Artificial Sequence
  Description of Artificial Sequence: Synthetic oligonucleotide
ugggcuccugcuuugcauc

SEQ ID NO: 1288088 - RNA, 19 nt, Artificial Sequence
  Description of Artificial Sequence: Synthetic oligonucleotide
ucacaagacgguccugguu

SEQ ID NO: 1288089 - RNA, 19 nt, Artificial Sequence
  Description of Artificial Sequence: Synthetic oligonucleotide
ucacggaagugcccaucug

SEQ ID NO: 1288090 - RNA, 19 nt, Artificial Sequence
  Description of Artificial Sequence: Synthetic oligonucleotide
ccucagguuuggaaggugg

SEQ ID NO: 1288091 - RNA, 19 nt, Artificial Sequence
  Description of Artificial Sequence: Synthetic oligonucleotide
cucaaacgugugcugguuc

SEQ ID NO: 1288092 - RNA, 19 nt, Artificial Sequence
  Description of Artificial Sequence: Synthetic oligonucleotide
ucggguggccgucuggauc

SEQ ID NO: 1288093 - RNA, 19 nt, Artificial Sequence
  Description of Artificial Sequence: Synthetic oligonucleotide
uaccuccuucaacugggcu

SEQ ID NO: 1288094 - RNA, 19 nt, Artificial Sequence
  Description of Artificial Sequence: Synthetic oligonucleotide
ggacauugacuuuggggug

SEQ ID NO: 1288095 - RNA, 19 nt, Artificial Sequence
  Description of Artificial Sequence: Synthetic oligonucleotide
acaggagcgucaccugugu

SEQ ID NO: 1288096 - RNA, 19 nt, Artificial Sequence
  Description of Artificial Sequence: Synthetic oligonucleotide
gguaucggugguaguauag

SEQ ID NO: 1288097 - RNA, 19 nt, Artificial Sequence
  Description of Artificial Sequence: Synthetic oligonucleotide
ccuugauaccuccugucgc

SEQ ID NO: 1288098 - RNA, 19 nt, Artificial Sequence
  Description of Artificial Sequence: Synthetic oligonucleotide
uugggcuccugcuuugcau

SEQ ID NO: 1288099 - RNA, 19 nt, Artificial Sequence
  Description of Artificial Sequence: Synthetic oligonucleotide
uucgcagccgcuccuccuc

SEQ ID NO: 1288100 - RNA, 19 nt, Artificial Sequence
  Description of Artificial Sequence: Synthetic oligonucleotide
cacgugcucccucauucgc

SEQ ID NO: 1288101 - RNA, 19 nt, Artificial Sequence
  Description of Artificial Sequence: Synthetic oligonucleotide
uguugggguccaauccauc

SEQ ID NO: 1288102 - RNA, 19 nt, Artificial Sequence
  Description of Artificial Sequence: Synthetic oligonucleotide
uggggucacugagagguca

SEQ ID NO: 1288103 - RNA, 19 nt, Artificial Sequence
  Description of Artificial Sequence: Synthetic oligonucleotide
ucguucuuugggucguaaa

SEQ ID NO: 1288104 - RNA, 19 nt, Artificial Sequence
  Description of Artificial Sequence: Synthetic oligonucleotide
aucguggcuggucucuccu

SEQ ID NO: 1288105 - RNA, 19 nt, Artificial Sequence
  Description of Artificial Sequence: Synthetic oligonucleotide
auaccuccuucaacugggc

SEQ ID NO: 1288106 - RNA, 19 nt, Artificial Sequence
  Description of Artificial Sequence: Synthetic oligonucleotide
cucccauaccuccuucaac

SEQ ID NO: 1288107 - RNA, 19 nt, Artificial Sequence
  Description of Artificial Sequence: Synthetic oligonucleotide
uccuugguaaagagagcuu

SEQ ID NO: 1288108 - RNA, 19 nt, Artificial Sequence
  Description of Artificial Sequence: Synthetic oligonucleotide
gcucgucaagcuugguucg

SEQ ID NO: 1288109 - RNA, 19 nt, Artificial Sequence
  Description of Artificial Sequence: Synthetic oligonucleotide
gucauaagggcuggggauc

SEQ ID NO: 1288110 - RNA, 19 nt, Artificial Sequence
  Description of Artificial Sequence: Synthetic oligonucleotide
guguccgggcucucagugg

SEQ ID NO: 1288111 - RNA, 19 nt, Artificial Sequence
  Description of Artificial Sequence: Synthetic oligonucleotide
cuugauaccuccugucgcu

SEQ ID NO: 1288112 - RNA, 19 nt, Artificial Sequence
  Description of Artificial Sequence: Synthetic oligonucleotide
gguagcgucuucucucaug

SEQ ID NO: 1288113 - RNA, 19 nt, Artificial Sequence
  Description of Artificial Sequence: Synthetic oligonucleotide
ccauaccuccuucaacugg

SEQ ID NO: 1288114 - RNA, 19 nt, Artificial Sequence
  Description of Artificial Sequence: Synthetic oligonucleotide
uguguaggccggauacauu

SEQ ID NO: 1288115 - RNA, 19 nt, Artificial Sequence
  Description of Artificial Sequence: Synthetic oligonucleotide
cugggcgaggucucgggug

SEQ ID NO: 1288116 - RNA, 19 nt, Artificial Sequence
  Description of Artificial Sequence: Synthetic oligonucleotide
ucggacaugguggcugaca

SEQ ID NO: 1288117 - RNA, 19 nt, Artificial Sequence
  Description of Artificial Sequence: Synthetic oligonucleotide
cacggaacugcagcuuucc

SEQ ID NO: 1288118 - RNA, 19 nt, Artificial Sequence
  Description of Artificial Sequence: Synthetic oligonucleotide
cucuccuagcgcagagggc

SEQ ID NO: 1288119 - RNA, 19 nt, Artificial Sequence
  Description of Artificial Sequence: Synthetic oligonucleotide
cuguugaugucaugcagua

SEQ ID NO: 1288120 - RNA, 19 nt, Artificial Sequence
  Description of Artificial Sequence: Synthetic oligonucleotide
caacuccuugguaaagaga

SEQ ID NO: 1288121 - RNA, 19 nt, Artificial Sequence
  Description of Artificial Sequence: Synthetic oligonucleotide
cuucucacggaagugccca

SEQ ID NO: 1288122 - RNA, 19 nt, Artificial Sequence
  Description of Artificial Sequence: Synthetic oligonucleotide
ucucggguggccgucugga

SEQ ID NO: 1288123 - RNA, 19 nt, Artificial Sequence
  Description of Artificial Sequence: Synthetic oligonucleotide
caucauacugggcgagguc

SEQ ID NO: 1288124 - RNA, 19 nt, Artificial Sequence
  Description of Artificial Sequence: Synthetic oligonucleotide
gcuggucucuccuagcgca

SEQ ID NO: 1288125 - RNA, 19 nt, Artificial Sequence
  Description of Artificial Sequence: Synthetic oligonucleotide
uccgcagccuugauaccuc

SEQ ID NO: 1288126 - RNA, 19 nt, Artificial Sequence
  Description of Artificial Sequence: Synthetic oligonucleotide
cucagguuuggaaggugga

SEQ ID NO: 1288127 - RNA, 19 nt, Artificial Sequence
  Description of Artificial Sequence: Synthetic oligonucleotide
cauucgcagccgcuccucc

SEQ ID NO: 1288128 - RNA, 19 nt, Artificial Sequence
  Description of Artificial Sequence: Synthetic oligonucleotide
ucccuagcagcaagcuccu

SEQ ID NO: 1288129 - RNA, 19 nt, Artificial Sequence
  Description of Artificial Sequence: Synthetic oligonucleotide
ucggcucagcuuuccacuc

SEQ ID NO: 1288130 - RNA, 19 nt, Artificial Sequence
  Description of Artificial Sequence: Synthetic oligonucleotide
caugcaguaugaagaaggu

SEQ ID NO: 1288131 - RNA, 19 nt, Artificial Sequence
  Description of Artificial Sequence: Synthetic oligonucleotide
auuugagggcuggggucac

SEQ ID NO: 1288132 - RNA, 19 nt, Artificial Sequence
  Description of Artificial Sequence: Synthetic oligonucleotide
agcaucucauagcguuuga

SEQ ID NO: 1288133 - RNA, 19 nt, Artificial Sequence
  Description of Artificial Sequence: Synthetic oligonucleotide
cguucuuugggucguaaac

SEQ ID NO: 1288134 - RNA, 19 nt, Artificial Sequence
  Description of Artificial Sequence: Synthetic oligonucleotide
guguaggccggauacauuu

SEQ ID NO: 1288135 - RNA, 19 nt, Artificial Sequence
  Description of Artificial Sequence: Synthetic oligonucleotide
ucgucaagcuugguucgga

SEQ ID NO: 1288136 - RNA, 19 nt, Artificial Sequence
  Description of Artificial Sequence: Synthetic oligonucleotide
acuuugggguguucccggu

SEQ ID NO: 1288137 - RNA, 19 nt, Artificial Sequence
  Description of Artificial Sequence: Synthetic oligonucleotide
ucucuaggucccgagccuc

SEQ ID NO: 1288138 - RNA, 19 nt, Artificial Sequence
  Description of Artificial Sequence: Synthetic oligonucleotide
cuuugggucguaaacuuuu

SEQ ID NO: 1288139 - RNA, 19 nt, Artificial Sequence
  Description of Artificial Sequence: Synthetic oligonucleotide
cugagaggucauaagggcu

SEQ ID NO: 1288140 - RNA, 19 nt, Artificial Sequence
  Description of Artificial Sequence: Synthetic oligonucleotide
caggaauuugagggcuggg

SEQ ID NO: 1288141 - RNA, 19 nt, Artificial Sequence
  Description of Artificial Sequence: Synthetic oligonucleotide
uguugaugucaugcaguau

SEQ ID NO: 1288142 - RNA, 19 nt, Artificial Sequence
  Description of Artificial Sequence: Synthetic oligonucleotide
cucgucaagcuugguucgg

SEQ ID NO: 1288143 - RNA, 19 nt, Artificial Sequence
  Description of Artificial Sequence: Synthetic oligonucleotide
agcauccgcagccuugaua

SEQ ID NO: 1288144 - RNA, 19 nt, Artificial Sequence
  Description of Artificial Sequence: Synthetic oligonucleotide
gaagugcccaucugucucu

SEQ ID NO: 1288145 - RNA, 19 nt, Artificial Sequence
  Description of Artificial Sequence: Synthetic oligonucleotide
cagggacauugacuuuggg

SEQ ID NO: 1288146 - RNA, 19 nt, Artificial Sequence
  Description of Artificial Sequence: Synthetic oligonucleotide
agaguggcagacacaggca

SEQ ID NO: 1288147 - RNA, 19 nt, Artificial Sequence
  Description of Artificial Sequence: Synthetic oligonucleotide
gccagggacauugacuuug

SEQ ID NO: 1288148 - RNA, 19 nt, Artificial Sequence
  Description of Artificial Sequence: Synthetic oligonucleotide
gucucuccuagcgcagagg

SEQ ID NO: 1288149 - RNA, 19 nt, Artificial Sequence
  Description of Artificial Sequence: Synthetic oligonucleotide
agaggucauaagggcuggg

SEQ ID NO: 1288150 - RNA, 19 nt, Artificial Sequence
  Description of Artificial Sequence: Synthetic oligonucleotide
uuccacugucuuccauccu

SEQ ID NO: 1288151 - RNA, 19 nt, Artificial Sequence
  Description of Artificial Sequence: Synthetic oligonucleotide
agcgucaccugugucugca

SEQ ID NO: 1288152 - RNA, 19 nt, Artificial Sequence
  Description of Artificial Sequence: Synthetic oligonucleotide
uccucguucuuugggucgu

SEQ ID NO: 1288153 - RNA, 19 nt, Artificial Sequence
  Description of Artificial Sequence: Synthetic oligonucleotide
ucccucauucgcagccgcu

SEQ ID NO: 1288154 - RNA, 19 nt, Artificial Sequence
  Description of Artificial Sequence: Synthetic oligonucleotide
augaccuccuggagguauc

SEQ ID NO: 1288155 - RNA, 19 nt, Artificial Sequence
  Description of Artificial Sequence: Synthetic oligonucleotide
uggcaccgccagcacaacu

SEQ ID NO: 1288156 - RNA, 19 nt, Artificial Sequence
  Description of Artificial Sequence: Synthetic oligonucleotide
gcagcuuucccucagguuu

SEQ ID NO: 1288157 - RNA, 19 nt, Artificial Sequence
  Description of Artificial Sequence: Synthetic oligonucleotide
ggcaccgccagcacaacug

SEQ ID NO: 1288158 - RNA, 19 nt, Artificial Sequence
  Description of Artificial Sequence: Synthetic oligonucleotide
cagguagcgucuucucuca

SEQ ID NO: 1288159 - RNA, 19 nt, Artificial Sequence
  Description of Artificial Sequence: Synthetic oligonucleotide
ucaucacgugcucccucau

SEQ ID NO: 1288160 - RNA, 19 nt, Artificial Sequence
  Description of Artificial Sequence: Synthetic oligonucleotide
ccgccagcacaacugauag

SEQ ID NO: 1288161 - RNA, 19 nt, Artificial Sequence
  Description of Artificial Sequence: Synthetic oligonucleotide
aggcaucguggcuggucuc

SEQ ID NO: 1288162 - RNA, 19 nt, Artificial Sequence
  Description of Artificial Sequence: Synthetic oligonucleotide
agguaucggugguaguaua

SEQ ID NO: 1288163 - RNA, 19 nt, Artificial Sequence
  Description of Artificial Sequence: Synthetic oligonucleotide
cugcgucgaugccaggaac

SEQ ID NO: 1288164 - RNA, 19 nt, Artificial Sequence
  Description of Artificial Sequence: Synthetic oligonucleotide
caaacgugugcugguucug

SEQ ID NO: 1288165 - RNA, 19 nt, Artificial Sequence
  Description of Artificial Sequence: Synthetic oligonucleotide
caaaggggccccgcggggc

SEQ ID NO: 1288166 - RNA, 19 nt, Artificial Sequence
  Description of Artificial Sequence: Synthetic oligonucleotide
cucagccucccuagcagca

SEQ ID NO: 1288167 - RNA, 19 nt, Artificial Sequence
  Description of Artificial Sequence: Synthetic oligonucleotide
gacgguccugguugguguc

SEQ ID NO: 1288168 - RNA, 19 nt, Artificial Sequence
  Description of Artificial Sequence: Synthetic oligonucleotide
uccuucaacugggcuuggc

SEQ ID NO: 1288169 - RNA, 19 nt, Artificial Sequence
  Description of Artificial Sequence: Synthetic oligonucleotide
ggagcgucaccugugucug

SEQ ID NO: 1288170 - RNA, 19 nt, Artificial Sequence
  Description of Artificial Sequence: Synthetic oligonucleotide
gcugcaaggcuacuucauc

SEQ ID NO: 1288171 - RNA, 19 nt, Artificial Sequence
  Description of Artificial Sequence: Synthetic oligonucleotide
acauucuguucuugcuguu

SEQ ID NO: 1288172 - RNA, 19 nt, Artificial Sequence
  Description of Artificial Sequence: Synthetic oligonucleotide
gucucggguggccgucugg

SEQ ID NO: 1288173 - RNA, 19 nt, Artificial Sequence
  Description of Artificial Sequence: Synthetic oligonucleotide
cagaggugguagaagcaaa

SEQ ID NO: 1288174 - RNA, 19 nt, Artificial Sequence
  Description of Artificial Sequence: Synthetic oligonucleotide
ccagggacauugacuuugg

SEQ ID NO: 1288175 - RNA, 19 nt, Artificial Sequence
  Description of Artificial Sequence: Synthetic oligonucleotide
cuuaagcaucucauagcgu

SEQ ID NO: 1288176 - RNA, 19 nt, Artificial Sequence
  Description of Artificial Sequence: Synthetic oligonucleotide
cagcguuggcagcuugcag

SEQ ID NO: 1288177 - RNA, 19 nt, Artificial Sequence
  Description of Artificial Sequence: Synthetic oligonucleotide
gaacaggguagcccuuucu

SEQ ID NO: 1288178 - RNA, 19 nt, Artificial Sequence
  Description of Artificial Sequence: Synthetic oligonucleotide
uugggguguucccgguguc

SEQ ID NO: 1288179 - RNA, 19 nt, Artificial Sequence
  Description of Artificial Sequence: Synthetic oligonucleotide
gucgaugccaggaacuccu

SEQ ID NO: 1288180 - RNA, 19 nt, Artificial Sequence
  Description of Artificial Sequence: Synthetic oligonucleotide
ucucacggaagugcccauc

SEQ ID NO: 1288181 - RNA, 19 nt, Artificial Sequence
  Description of Artificial Sequence: Synthetic oligonucleotide
guucccggugucugcgcug

SEQ ID NO: 1288182 - RNA, 19 nt, Artificial Sequence
  Description of Artificial Sequence: Synthetic oligonucleotide
ucgaugccaggaacuccuc

SEQ ID NO: 1288183 - RNA, 19 nt, Artificial Sequence
  Description of Artificial Sequence: Synthetic oligonucleotide
uccgggcucucaguggccu

SEQ ID NO: 1288184 - RNA, 19 nt, Artificial Sequence
  Description of Artificial Sequence: Synthetic oligonucleotide
ggagguaucggugguagua

SEQ ID NO: 1288185 - RNA, 19 nt, Artificial Sequence
  Description of Artificial Sequence: Synthetic oligonucleotide
uggucucuccuagcgcaga

SEQ ID NO: 1288186 - RNA, 19 nt, Artificial Sequence
  Description of Artificial Sequence: Synthetic oligonucleotide
ugggguguucccggugucu

SEQ ID NO: 1288187 - RNA, 19 nt, Artificial Sequence
  Description of Artificial Sequence: Synthetic oligonucleotide
cacggaagugcccaucugu

SEQ ID NO: 1288188 - RNA, 19 nt, Artificial Sequence
  Description of Artificial Sequence: Synthetic oligonucleotide
cuagcacauugaugaccuc

SEQ ID NO: 1288189 - RNA, 19 nt, Artificial Sequence
  Description of Artificial Sequence: Synthetic oligonucleotide
agcaucagcagagguggua

SEQ ID NO: 1288190 - RNA, 19 nt, Artificial Sequence
  Description of Artificial Sequence: Synthetic oligonucleotide
caucuagcacaccaucgcu

SEQ ID NO: 1288191 - RNA, 19 nt, Artificial Sequence
  Description of Artificial Sequence: Synthetic oligonucleotide
cucggcucagcuuuccacu

SEQ ID NO: 1288192 - RNA, 19 nt, Artificial Sequence
  Description of Artificial Sequence: Synthetic oligonucleotide
guugggcuccugcuuugca

SEQ ID NO: 1288193 - RNA, 19 nt, Artificial Sequence
  Description of Artificial Sequence: Synthetic oligonucleotide
gguucaggugguccaccug

SEQ ID NO: 1288194 - RNA, 19 nt, Artificial Sequence
  Description of Artificial Sequence: Synthetic oligonucleotide
gaugaccuccuggagguau

SEQ ID NO: 1288195 - RNA, 19 nt, Artificial Sequence
  Description of Artificial Sequence: Synthetic oligonucleotide
uucucacggaagugcccau

SEQ ID NO: 1288196 - RNA, 19 nt, Artificial Sequence
  Description of Artificial Sequence: Synthetic oligonucleotide
ggucauaagggcuggggau

SEQ ID NO: 1288197 - RNA, 19 nt, Artificial Sequence
  Description of Artificial Sequence: Synthetic oligonucleotide
uugauaccuccugucgcuu

SEQ ID NO: 1288198 - RNA, 19 nt, Artificial Sequence
  Description of Artificial Sequence: Synthetic oligonucleotide
cucugcgucgaugccagga

SEQ ID NO: 1288199 - RNA, 19 nt, Artificial Sequence
  Description of Artificial Sequence: Synthetic oligonucleotide
cucugcggccuucuuuuca

SEQ ID NO: 1288200 - RNA, 19 nt, Artificial Sequence
  Description of Artificial Sequence: Synthetic oligonucleotide
ggugucugcgcuguugcuc

SEQ ID NO: 1288201 - RNA, 19 nt, Artificial Sequence
  Description of Artificial Sequence: Synthetic oligonucleotide
ccucauucgcagccgcucc

SEQ ID NO: 1288202 - RNA, 19 nt, Artificial Sequence
  Description of Artificial Sequence: Synthetic oligonucleotide
ggccgucuggaucagcauc

SEQ ID NO: 1288203 - RNA, 19 nt, Artificial Sequence
  Description of Artificial Sequence: Synthetic oligonucleotide
ggcuggucucuccuagcgc

SEQ ID NO: 1288204 - RNA, 19 nt, Artificial Sequence
  Description of Artificial Sequence: Synthetic oligonucleotide
gagcucgucaagcuugguu

SEQ ID NO: 1288205 - RNA, 19 nt, Artificial Sequence
  Description of Artificial Sequence: Synthetic oligonucleotide
gagcgucaccugugucugc

SEQ ID NO: 1288206 - RNA, 19 nt, Artificial Sequence
  Description of Artificial Sequence: Synthetic oligonucleotide
cucacggaagugcccaucu

SEQ ID NO: 1288207 - RNA, 19 nt, Artificial Sequence
  Description of Artificial Sequence: Synthetic oligonucleotide
gugguaguauaggccugug

SEQ ID NO: 1288208 - RNA, 19 nt, Artificial Sequence
  Description of Artificial Sequence: Synthetic oligonucleotide
accgccagcacaacugaua

SEQ ID NO: 1288209 - RNA, 19 nt, Artificial Sequence
  Description of Artificial Sequence: Synthetic oligonucleotide
agucuagcucucggcucag

SEQ ID NO: 1288210 - RNA, 19 nt, Artificial Sequence
  Description of Artificial Sequence: Synthetic oligonucleotide
ggucccgagccucaaacgu

SEQ ID NO: 1288211 - RNA, 19 nt, Artificial Sequence
  Description of Artificial Sequence: Synthetic oligonucleotide
gagguaucggugguaguau

SEQ ID NO: 1288212 - RNA, 19 nt, Artificial Sequence
  Description of Artificial Sequence: Synthetic oligonucleotide
ccggugucugcgcuguugc

SEQ ID NO: 1288213 - RNA, 19 nt, Artificial Sequence
  Description of Artificial Sequence: Synthetic oligonucleotide
aggaacaggguagcccuuu

SEQ ID NO: 1288214 - RNA, 19 nt, Artificial Sequence
  Description of Artificial Sequence: Synthetic oligonucleotide
uggccgucuggaucagcau

SEQ ID NO: 1288215 - RNA, 19 nt, Artificial Sequence
  Description of Artificial Sequence: Synthetic oligonucleotide
uccucuguguaggccggau

SEQ ID NO: 1288216 - RNA, 19 nt, Artificial Sequence
  Description of Artificial Sequence: Synthetic oligonucleotide
gcacaacugauagcaucag

SEQ ID NO: 1288217 - RNA, 19 nt, Artificial Sequence
  Description of Artificial Sequence: Synthetic oligonucleotide
cgugcucccucauucgcag

SEQ ID NO: 1288218 - RNA, 19 nt, Artificial Sequence
  Description of Artificial Sequence: Synthetic oligonucleotide
ggucacugagaggucauaa

SEQ ID NO: 1288219 - RNA, 19 nt, Artificial Sequence
  Description of Artificial Sequence: Synthetic oligonucleotide
cccauaccuccuucaacug

SEQ ID NO: 1288220 - RNA, 19 nt, Artificial Sequence
  Description of Artificial Sequence: Synthetic oligonucleotide
gcccaucugucucuagcac

SEQ ID NO: 1288221 - RNA, 19 nt, Artificial Sequence
  Description of Artificial Sequence: Synthetic oligonucleotide
caaagcgccucagcuccuc

SEQ ID NO: 1288222 - RNA, 19 nt, Artificial Sequence
  Description of Artificial Sequence: Synthetic oligonucleotide
ggaacaggguagcccuuuc

SEQ ID NO: 1288223 - RNA, 19 nt, Artificial Sequence
  Description of Artificial Sequence: Synthetic oligonucleotide
gagacuccagguagcgucu

SEQ ID NO: 1288224 - RNA, 19 nt, Artificial Sequence
  Description of Artificial Sequence: Synthetic oligonucleotide
ccgagccucaaacgugugc

SEQ ID NO: 1288225 - RNA, 19 nt, Artificial Sequence
  Description of Artificial Sequence: Synthetic oligonucleotide
aagugcccaucugucucua

SEQ ID NO: 1288226 - RNA, 19 nt, Artificial Sequence
  Description of Artificial Sequence: Synthetic oligonucleotide
cacaucuuucuggucaccu

SEQ ID NO: 1288227 - RNA, 19 nt, Artificial Sequence
  Description of Artificial Sequence: Synthetic oligonucleotide
gucacaagacgguccuggu

SEQ ID NO: 1288228 - RNA, 19 nt, Artificial Sequence
  Description of Artificial Sequence: Synthetic oligonucleotide
ucguggcuggucucuccua

SEQ ID NO: 1288229 - RNA, 19 nt, Artificial Sequence
  Description of Artificial Sequence: Synthetic oligonucleotide
gugagagcugagaguggca

SEQ ID NO: 1288230 - RNA, 19 nt, Artificial Sequence
  Description of Artificial Sequence: Synthetic oligonucleotide
guuuggaagguggaacauu

SEQ ID NO: 1288231 - RNA, 19 nt, Artificial Sequence
  Description of Artificial Sequence: Synthetic oligonucleotide
ugagcucgucaagcuuggu

SEQ ID NO: 1288232 - RNA, 19 nt, Artificial Sequence
  Description of Artificial Sequence: Synthetic oligonucleotide
agguagcgucuucucucau

SEQ ID NO: 1288233 - RNA, 19 nt, Artificial Sequence
  Description of Artificial Sequence: Synthetic oligonucleotide
gcggcaucauacugggcga

SEQ ID NO: 1288234 - RNA, 19 nt, Artificial Sequence
  Description of Artificial Sequence: Synthetic oligonucleotide
cguggcuggucucuccuag

SEQ ID NO: 1288235 - RNA, 19 nt, Artificial Sequence
  Description of Artificial Sequence: Synthetic oligonucleotide
acauugacuuugggguguu

SEQ ID NO: 1288236 - RNA, 19 nt, Artificial Sequence
  Description of Artificial Sequence: Synthetic oligonucleotide
ccacguucuucaucacgug

SEQ ID NO: 1288237 - RNA, 19 nt, Artificial Sequence
  Description of Artificial Sequence: Synthetic oligonucleotide
uucggacaugguggcugac

SEQ ID NO: 1288238 - RNA, 19 nt, Artificial Sequence
  Description of Artificial Sequence: Synthetic oligonucleotide
ugaaccuguugggguccaa

SEQ ID NO: 1288239 - RNA, 19 nt, Artificial Sequence
  Description of Artificial Sequence: Synthetic oligonucleotide
cuguguaggccggauacau

SEQ ID NO: 1288240 - RNA, 19 nt, Artificial Sequence
  Description of Artificial Sequence: Synthetic oligonucleotide
gaaccuguugggguccaau

SEQ ID NO: 1288241 - RNA, 19 nt, Artificial Sequence
  Description of Artificial Sequence: Synthetic oligonucleotide
ccgcggggcacagagguag

SEQ ID NO: 1288242 - RNA, 19 nt, Artificial Sequence
  Description of Artificial Sequence: Synthetic oligonucleotide
cuagcucucggcucagcuu

SEQ ID NO: 1288243 - RNA, 19 nt, Artificial Sequence
  Description of Artificial Sequence: Synthetic oligonucleotide
gcgaggucucggguggccg

SEQ ID NO: 1288244 - RNA, 19 nt, Artificial Sequence
  Description of Artificial Sequence: Synthetic oligonucleotide
cagccuugauaccuccugu

SEQ ID NO: 1288245 - RNA, 19 nt, Artificial Sequence
  Description of Artificial Sequence: Synthetic oligonucleotide
ggacaggagcgucaccugu

SEQ ID NO: 1288246 - RNA, 19 nt, Artificial Sequence
  Description of Artificial Sequence: Synthetic oligonucleotide
gcagcauccgcagccuuga

SEQ ID NO: 1288247 - RNA, 19 nt, Artificial Sequence
  Description of Artificial Sequence: Synthetic oligonucleotide
gcaccgccagcacaacuga

SEQ ID NO: 1288248 - RNA, 19 nt, Artificial Sequence
  Description of Artificial Sequence: Synthetic oligonucleotide
cuguugggguccaauccau

SEQ ID NO: 1288249 - RNA, 19 nt, Artificial Sequence
  Description of Artificial Sequence: Synthetic oligonucleotide
ccucccuagcagcaagcuc

SEQ ID NO: 1288250 - RNA, 19 nt, Artificial Sequence
  Description of Artificial Sequence: Synthetic oligonucleotide
cugcagcuuucccucaggu

SEQ ID NO: 1288251 - RNA, 19 nt, Artificial Sequence
  Description of Artificial Sequence: Synthetic oligonucleotide
ggugguaguauaggccugu

SEQ ID NO: 1288252 - RNA, 19 nt, Artificial Sequence
  Description of Artificial Sequence: Synthetic oligonucleotide
gggguccaauccauccagc

SEQ ID NO: 1288253 - RNA, 19 nt, Artificial Sequence
  Description of Artificial Sequence: Synthetic oligonucleotide
cuaggucccgagccucaaa

SEQ ID NO: 1288254 - RNA, 19 nt, Artificial Sequence
  Description of Artificial Sequence: Synthetic oligonucleotide
ccagggucacaagacgguc

SEQ ID NO: 1288255 - RNA, 19 nt, Artificial Sequence
  Description of Artificial Sequence: Synthetic oligonucleotide
gcguuggcagcuugcagcu

SEQ ID NO: 1288256 - RNA, 19 nt, Artificial Sequence
  Description of Artificial Sequence: Synthetic oligonucleotide
cucguucuuugggucguaa

SEQ ID NO: 1288257 - RNA, 19 nt, Artificial Sequence
  Description of Artificial Sequence: Synthetic oligonucleotide
uccuagcgcagagggcguu

SEQ ID NO: 1288258 - RNA, 19 nt, Artificial Sequence
  Description of Artificial Sequence: Synthetic oligonucleotide
ccuucaacugggcuuggcu

SEQ ID NO: 1288259 - RNA, 19 nt, Artificial Sequence
  Description of Artificial Sequence: Synthetic oligonucleotide
cauaagggcuggggaucca

SEQ ID NO: 1288260 - RNA, 19 nt, Artificial Sequence
  Description of Artificial Sequence: Synthetic oligonucleotide
ccgcagccuugauaccucc

SEQ ID NO: 1288261 - RNA, 19 nt, Artificial Sequence
  Description of Artificial Sequence: Synthetic oligonucleotide
ggcuuggcugccagggaca

SEQ ID NO: 1288262 - RNA, 19 nt, Artificial Sequence
  Description of Artificial Sequence: Synthetic oligonucleotide
gccgucuggaucagcaucu

SEQ ID NO: 1288263 - RNA, 19 nt, Artificial Sequence
  Description of Artificial Sequence: Synthetic oligonucleotide
cccucauucgcagccgcuc

SEQ ID NO: 1288264 - RNA, 19 nt, Artificial Sequence
  Description of Artificial Sequence: Synthetic oligonucleotide
ggcgaggucucggguggcc

SEQ ID NO: 1288265 - RNA, 19 nt, Artificial Sequence
  Description of Artificial Sequence: Synthetic oligonucleotide
gguuuggaagguggaacau

SEQ ID NO: 1288266 - RNA, 19 nt, Artificial Sequence
  Description of Artificial Sequence: Synthetic oligonucleotide
gccucaaacgugugcuggu

SEQ ID NO: 1288267 - RNA, 19 nt, Artificial Sequence
  Description of Artificial Sequence: Synthetic oligonucleotide
ccacaucuuucuggucacc

SEQ ID NO: 1288268 - RNA, 19 nt, Artificial Sequence
  Description of Artificial Sequence: Synthetic oligonucleotide
cagcaucucuaggucccga

SEQ ID NO: 1288269 - RNA, 19 nt, Artificial Sequence
  Description of Artificial Sequence: Synthetic oligonucleotide
gugcggcaucauacugggc

SEQ ID NO: 1288270 - RNA, 19 nt, Artificial Sequence
  Description of Artificial Sequence: Synthetic oligonucleotide
ccucagcguuggcagcuug

SEQ ID NO: 1288271 - RNA, 19 nt, Artificial Sequence
  Description of Artificial Sequence: Synthetic oligonucleotide
gcgguccaguggcaccgcc

SEQ ID NO: 1288272 - RNA, 19 nt, Artificial Sequence
  Description of Artificial Sequence: Synthetic oligonucleotide
cggugguaguauaggccug

SEQ ID NO: 1288273 - RNA, 19 nt, Artificial Sequence
  Description of Artificial Sequence: Synthetic oligonucleotide
gcggggcacagagguaggc

SEQ ID NO: 1288274 - RNA, 19 nt, Artificial Sequence
  Description of Artificial Sequence: Synthetic oligonucleotide
gcacggaacugcagcuuuc

SEQ ID NO: 1288275 - RNA, 19 nt, Artificial Sequence
  Description of Artificial Sequence: Synthetic oligonucleotide
cuccuccccaggaagccuu

SEQ ID NO: 1288276 - RNA, 19 nt, Artificial Sequence
  Description of Artificial Sequence: Synthetic oligonucleotide
ggcaucguggcuggucucu

SEQ ID NO: 1288277 - RNA, 19 nt, Artificial Sequence
  Description of Artificial Sequence: Synthetic oligonucleotide
guggcaccgccagcacaac

SEQ ID NO: 1288278 - RNA, 19 nt, Artificial Sequence
  Description of Artificial Sequence: Synthetic oligonucleotide
cuccuagcgcagagggcgu

SEQ ID NO: 1288279 - RNA, 19 nt, Artificial Sequence
  Description of Artificial Sequence: Synthetic oligonucleotide
gcgucaccugugucugcac

SEQ ID NO: 1288280 - RNA, 19 nt, Artificial Sequence
  Description of Artificial Sequence: Synthetic oligonucleotide
gggucacaagacgguccug

SEQ ID NO: 1288281 - RNA, 19 nt, Artificial Sequence
  Description of Artificial Sequence: Synthetic oligonucleotide
caucacgugcucccucauu

SEQ ID NO: 1288282 - RNA, 19 nt, Artificial Sequence
  Description of Artificial Sequence: Synthetic oligonucleotide
cccgagccucaaacgugug

SEQ ID NO: 1288283 - RNA, 19 nt, Artificial Sequence
  Description of Artificial Sequence: Synthetic oligonucleotide
gcaucguggcuggucucuc

SEQ ID NO: 1288284 - RNA, 19 nt, Artificial Sequence
  Description of Artificial Sequence: Synthetic oligonucleotide
cugcgcuguugcucuugua

SEQ ID NO: 1288285 - RNA, 19 nt, Artificial Sequence
  Description of Artificial Sequence: Synthetic oligonucleotide
ucccggugucugcgcuguu

SEQ ID NO: 1288286 - RNA, 19 nt, Artificial Sequence
  Description of Artificial Sequence: Synthetic oligonucleotide
cuagcacaccaucgcuguu

SEQ ID NO: 1288287 - RNA, 19 nt, Artificial Sequence
  Description of Artificial Sequence: Synthetic oligonucleotide
gcgcugggccuuggcauug

SEQ ID NO: 1288288 - RNA, 19 nt, Artificial Sequence
  Description of Artificial Sequence: Synthetic oligonucleotide
cggcaucauacugggcgag

SEQ ID NO: 1288289 - RNA, 19 nt, Artificial Sequence
  Description of Artificial Sequence: Synthetic oligonucleotide
gcgguccugggagcgcccc

SEQ ID NO: 1288290 - RNA, 19 nt, Artificial Sequence
  Description of Artificial Sequence: Synthetic oligonucleotide
ccucugcgucgaugccagg

SEQ ID NO: 1288291 - RNA, 19 nt, Artificial Sequence
  Description of Artificial Sequence: Synthetic oligonucleotide
caagacgguccugguuggu

SEQ ID NO: 1288292 - RNA, 19 nt, Artificial Sequence
  Description of Artificial Sequence: Synthetic oligonucleotide
caccgccagcacaacugau

SEQ ID NO: 1288293 - RNA, 19 nt, Artificial Sequence
  Description of Artificial Sequence: Synthetic oligonucleotide
ccccgcggggcacagaggu

SEQ ID NO: 1288294 - RNA, 19 nt, Artificial Sequence
  Description of Artificial Sequence: Synthetic oligonucleotide
cucggguggccgucuggau

SEQ ID NO: 1288295 - RNA, 19 nt, Artificial Sequence
  Description of Artificial Sequence: Synthetic oligonucleotide
cuagcgcagagggcguuuu

SEQ ID NO: 1288296 - RNA, 19 nt, Artificial Sequence
  Description of Artificial Sequence: Synthetic oligonucleotide
ggcgcugggccuuggcauu

SEQ ID NO: 1288297 - RNA, 19 nt, Artificial Sequence
  Description of Artificial Sequence: Synthetic oligonucleotide
ggcgguccugggagcgccc

SEQ ID NO: 1288298 - RNA, 19 nt, Artificial Sequence
  Description of Artificial Sequence: Synthetic oligonucleotide
ccgucuggaucagcaucuc

SEQ ID NO: 1288299 - RNA, 19 nt, Artificial Sequence
  Description of Artificial Sequence: Synthetic oligonucleotide
cugcacggaacugcagcuu

SEQ ID NO: 1288300 - RNA, 19 nt, Artificial Sequence
  Description of Artificial Sequence: Synthetic oligonucleotide
ggguggccgucuggaucag

SEQ ID NO: 1288301 - RNA, 19 nt, Artificial Sequence
  Description of Artificial Sequence: Synthetic oligonucleotide
cggaagugcccaucugucu

SEQ ID NO: 1288302 - RNA, 19 nt, Artificial Sequence
  Description of Artificial Sequence: Synthetic oligonucleotide
ccagcacaacugauagcau

SEQ ID NO: 1288303 - RNA, 19 nt, Artificial Sequence
  Description of Artificial Sequence: Synthetic oligonucleotide
ggggucacugagaggucau

SEQ ID NO: 1288304 - RNA, 19 nt, Artificial Sequence
  Description of Artificial Sequence: Synthetic oligonucleotide
gcuuggcugccagggacau

SEQ ID NO: 1288305 - RNA, 19 nt, Artificial Sequence
  Description of Artificial Sequence: Synthetic oligonucleotide
cagcauccgcagccuugau

SEQ ID NO: 1288306 - RNA, 19 nt, Artificial Sequence
  Description of Artificial Sequence: Synthetic oligonucleotide
cccuagcagcaagcuccuc

SEQ ID NO: 1288307 - RNA, 19 nt, Artificial Sequence
  Description of Artificial Sequence: Synthetic oligonucleotide
cgaggucucggguggccgu

SEQ ID NO: 1288308 - RNA, 19 nt, Artificial Sequence
  Description of Artificial Sequence: Synthetic oligonucleotide
cgcagccuugauaccuccu

SEQ ID NO: 1288309 - RNA, 19 nt, Artificial Sequence
  Description of Artificial Sequence: Synthetic oligonucleotide
cgcgguccaguggcaccgc

SEQ ID NO: 1288310 - RNA, 19 nt, Artificial Sequence
  Description of Artificial Sequence: Synthetic oligonucleotide
cuccuuccucugcgucgau

SEQ ID NO: 1288311 - RNA, 19 nt, Artificial Sequence
  Description of Artificial Sequence: Synthetic oligonucleotide
cccgcggggcacagaggua

SEQ ID NO: 1288312 - RNA, 19 nt, Artificial Sequence
  Description of Artificial Sequence: Synthetic oligonucleotide
ccucguucuuugggucgua

SEQ ID NO: 1288313 - RNA, 19 nt, Artificial Sequence
  Description of Artificial Sequence: Synthetic oligonucleotide
ccuagcgcagagggcguuu

SEQ ID NO: 1288314 - RNA, 19 nt, Artificial Sequence
  Description of Artificial Sequence: Synthetic oligonucleotide
ggagcgccccagggccucu

SEQ ID NO: 1288315 - RNA, 19 nt, Artificial Sequence
  Description of Artificial Sequence: Synthetic oligonucleotide
cguuggcagcuugcagcuu

SEQ ID NO: 1288316 - RNA, 19 nt, Artificial Sequence
  Description of Artificial Sequence: Synthetic oligonucleotide
accaguauaguucaggugg

SEQ ID NO: 1288317 - RNA, 19 nt, Artificial Sequence
  Description of Artificial Sequence: Synthetic oligonucleotide
auucggaagauauaguagc

SEQ ID NO: 1288318 - RNA, 19 nt, Artificial Sequence
  Description of Artificial Sequence: Synthetic oligonucleotide
uucuuuucauguaagaaag

SEQ ID NO: 1288319 - RNA, 19 nt, Artificial Sequence
  Description of Artificial Sequence: Synthetic oligonucleotide
gaauuugcggucuucagcg

SEQ ID NO: 1288320 - RNA, 19 nt, Artificial Sequence
  Description of Artificial Sequence: Synthetic oligonucleotide
uugagauucagccuugccg

SEQ ID NO: 1288321 - RNA, 19 nt, Artificial Sequence
  Description of Artificial Sequence: Synthetic oligonucleotide
ugguauaccaaguacaggc

SEQ ID NO: 1288322 - RNA, 19 nt, Artificial Sequence
  Description of Artificial Sequence: Synthetic oligonucleotide
agcuguacuggucacaugc

SEQ ID NO: 1288323 - RNA, 19 nt, Artificial Sequence
  Description of Artificial Sequence: Synthetic oligonucleotide
aggauagucauguagauga

SEQ ID NO: 1288324 - RNA, 19 nt, Artificial Sequence
  Description of Artificial Sequence: Synthetic oligonucleotide
aaaucuauggcagaaguca

SEQ ID NO: 1288325 - RNA, 19 nt, Artificial Sequence
  Description of Artificial Sequence: Synthetic oligonucleotide
aguaguacacaaugaaugg

SEQ ID NO: 1288326 - RNA, 19 nt, Artificial Sequence
  Description of Artificial Sequence: Synthetic oligonucleotide
aagguguacaguuggacag

SEQ ID NO: 1288327 - RNA, 19 nt, Artificial Sequence
  Description of Artificial Sequence: Synthetic oligonucleotide
uuggacaccucccacauag

SEQ ID NO: 1288328 - RNA, 19 nt, Artificial Sequence
  Description of Artificial Sequence: Synthetic oligonucleotide
uuguagaagaaauugccug

SEQ ID NO: 1288329 - RNA, 19 nt, Artificial Sequence
  Description of Artificial Sequence: Synthetic oligonucleotide
uugaucagugcgaaugugg

SEQ ID NO: 1288330 - RNA, 19 nt, Artificial Sequence
  Description of Artificial Sequence: Synthetic oligonucleotide
accacuuuccaauacgggg

SEQ ID NO: 1288331 - RNA, 19 nt, Artificial Sequence
  Description of Artificial Sequence: Synthetic oligonucleotide
acagcuugaagucaaacca

SEQ ID NO: 1288332 - RNA, 19 nt, Artificial Sequence
  Description of Artificial Sequence: Synthetic oligonucleotide
aguuacggcaccuucuugg

SEQ ID NO: 1288333 - RNA, 19 nt, Artificial Sequence
  Description of Artificial Sequence: Synthetic oligonucleotide
ucacaugccaugaugaagu

SEQ ID NO: 1288334 - RNA, 19 nt, Artificial Sequence
  Description of Artificial Sequence: Synthetic oligonucleotide
guaaagaaccaccuggaag

SEQ ID NO: 1288335 - RNA, 19 nt, Artificial Sequence
  Description of Artificial Sequence: Synthetic oligonucleotide
ggaguaaagaaccaccugg

SEQ ID NO: 1288336 - RNA, 19 nt, Artificial Sequence
  Description of Artificial Sequence: Synthetic oligonucleotide
uuuacaacccugcuggagu

SEQ ID NO: 1288337 - RNA, 19 nt, Artificial Sequence
  Description of Artificial Sequence: Synthetic oligonucleotide
augaugguaggggagaacc

SEQ ID NO: 1288338 - RNA, 19 nt, Artificial Sequence
  Description of Artificial Sequence: Synthetic oligonucleotide
uguccugcggaacaggucc

SEQ ID NO: 1288339 - RNA, 19 nt, Artificial Sequence
  Description of Artificial Sequence: Synthetic oligonucleotide
uaguuguagaagaaauugc

SEQ ID NO: 1288340 - RNA, 19 nt, Artificial Sequence
  Description of Artificial Sequence: Synthetic oligonucleotide
aacgguguucaucacgaag

SEQ ID NO: 1288341 - RNA, 19 nt, Artificial Sequence
  Description of Artificial Sequence: Synthetic oligonucleotide
cauacuuguuggcacaacg

SEQ ID NO: 1288342 - RNA, 19 nt, Artificial Sequence
  Description of Artificial Sequence: Synthetic oligonucleotide
aaaaucuauggcagaaguc

SEQ ID NO: 1288343 - RNA, 19 nt, Artificial Sequence
  Description of Artificial Sequence: Synthetic oligonucleotide
uugcuuagcagcaaaggac

SEQ ID NO: 1288344 - RNA, 19 nt, Artificial Sequence
  Description of Artificial Sequence: Synthetic oligonucleotide
ucuuuucauguaagaaagg

SEQ ID NO: 1288345 - RNA, 19 nt, Artificial Sequence
  Description of Artificial Sequence: Synthetic oligonucleotide
uauaguagcccaccaggcc

SEQ ID NO: 1288346 - RNA, 19 nt, Artificial Sequence
  Description of Artificial Sequence: Synthetic oligonucleotide
caucaggucaccaguauag

SEQ ID NO: 1288347 - RNA, 19 nt, Artificial Sequence
  Description of Artificial Sequence: Synthetic oligonucleotide
aguuggacagcuuuagcug

SEQ ID NO: 1288348 - RNA, 19 nt, Artificial Sequence
  Description of Artificial Sequence: Synthetic oligonucleotide
aauuugcggucuucagcgc

SEQ ID NO: 1288349 - RNA, 19 nt, Artificial Sequence
  Description of Artificial Sequence: Synthetic oligonucleotide
agucaaaccacuuuccaau

SEQ ID NO: 1288350 - RNA, 19 nt, Artificial Sequence
  Description of Artificial Sequence: Synthetic oligonucleotide
ucaauaaagccucccuaug

SEQ ID NO: 1288351 - RNA, 19 nt, Artificial Sequence
  Description of Artificial Sequence: Synthetic oligonucleotide
uugccugugaauuugcggu

SEQ ID NO: 1288352 - RNA, 19 nt, Artificial Sequence
  Description of Artificial Sequence: Synthetic oligonucleotide
aaguggucauggcagaugu

SEQ ID NO: 1288353 - RNA, 19 nt, Artificial Sequence
  Description of Artificial Sequence: Synthetic oligonucleotide
caucauauaguuguagaag

SEQ ID NO: 1288354 - RNA, 19 nt, Artificial Sequence
  Description of Artificial Sequence: Synthetic oligonucleotide
guguucaucacgaaggcag

SEQ ID NO: 1288355 - RNA, 19 nt, Artificial Sequence
  Description of Artificial Sequence: Synthetic oligonucleotide
uacuuguuuacaacccugc

SEQ ID NO: 1288356 - RNA, 19 nt, Artificial Sequence
  Description of Artificial Sequence: Synthetic oligonucleotide
ugaucagugcgaaugugga

SEQ ID NO: 1288357 - RNA, 19 nt, Artificial Sequence
  Description of Artificial Sequence: Synthetic oligonucleotide
uucggaagauauaguagcc

SEQ ID NO: 1288358 - RNA, 19 nt, Artificial Sequence
  Description of Artificial Sequence: Synthetic oligonucleotide
auagucauguagaugaugu

SEQ ID NO: 1288359 - RNA, 19 nt, Artificial Sequence
  Description of Artificial Sequence: Synthetic oligonucleotide
cuuuagcugucacaggcgg

SEQ ID NO: 1288360 - RNA, 19 nt, Artificial Sequence
  Description of Artificial Sequence: Synthetic oligonucleotide
aagauauaguagcccacca

SEQ ID NO: 1288361 - RNA, 19 nt, Artificial Sequence
  Description of Artificial Sequence: Synthetic oligonucleotide
uauaguuguagaagaaauu

SEQ ID NO: 1288362 - RNA, 19 nt, Artificial Sequence
  Description of Artificial Sequence: Synthetic oligonucleotide
gaagauauaguagcccacc

SEQ ID NO: 1288363 - RNA, 19 nt, Artificial Sequence
  Description of Artificial Sequence: Synthetic oligonucleotide
ugucugccagacuagcacg

SEQ ID NO: 1288364 - RNA, 19 nt, Artificial Sequence
  Description of Artificial Sequence: Synthetic oligonucleotide
uguguagcgcucccagucg

SEQ ID NO: 1288365 - RNA, 19 nt, Artificial Sequence
  Description of Artificial Sequence: Synthetic oligonucleotide
uuggccauucggaagauau

SEQ ID NO: 1288366 - RNA, 19 nt, Artificial Sequence
  Description of Artificial Sequence: Synthetic oligonucleotide
caauccacuucccaggccc

SEQ ID NO: 1288367 - RNA, 19 nt, Artificial Sequence
  Description of Artificial Sequence: Synthetic oligonucleotide
aagucaaaccacuuuccaa

SEQ ID NO: 1288368 - RNA, 19 nt, Artificial Sequence
  Description of Artificial Sequence: Synthetic oligonucleotide
guauaguucagguggcgag

SEQ ID NO: 1288369 - RNA, 19 nt, Artificial Sequence
  Description of Artificial Sequence: Synthetic oligonucleotide
uacuuguuggcacaacggu

SEQ ID NO: 1288370 - RNA, 19 nt, Artificial Sequence
  Description of Artificial Sequence: Synthetic oligonucleotide
uucauguaagaaaggcucu

SEQ ID NO: 1288371 - RNA, 19 nt, Artificial Sequence
  Description of Artificial Sequence: Synthetic oligonucleotide
uggaauuuugaagccauca

SEQ ID NO: 1288372 - RNA, 19 nt, Artificial Sequence
  Description of Artificial Sequence: Synthetic oligonucleotide
ggcuauguccacuaguggg

SEQ ID NO: 1288373 - RNA, 19 nt, Artificial Sequence
  Description of Artificial Sequence: Synthetic oligonucleotide
aaucccugggcguccauug

SEQ ID NO: 1288374 - RNA, 19 nt, Artificial Sequence
  Description of Artificial Sequence: Synthetic oligonucleotide
accaauccacuucccaggc

SEQ ID NO: 1288375 - RNA, 19 nt, Artificial Sequence
  Description of Artificial Sequence: Synthetic oligonucleotide
agugcgaauguggacacgg

SEQ ID NO: 1288376 - RNA, 19 nt, Artificial Sequence
  Description of Artificial Sequence: Synthetic oligonucleotide
acacacucaauaaagccuc

SEQ ID NO: 1288377 - RNA, 19 nt, Artificial Sequence
  Description of Artificial Sequence: Synthetic oligonucleotide
uaggacgguccucagaaga

SEQ ID NO: 1288378 - RNA, 19 nt, Artificial Sequence
  Description of Artificial Sequence: Synthetic oligonucleotide
accaggauaguagguaagc

SEQ ID NO: 1288379 - RNA, 19 nt, Artificial Sequence
  Description of Artificial Sequence: Synthetic oligonucleotide
ugacccacaagguguacag

SEQ ID NO: 1288380 - RNA, 19 nt, Artificial Sequence
  Description of Artificial Sequence: Synthetic oligonucleotide
ugaauggugcaaagagcag

SEQ ID NO: 1288381 - RNA, 19 nt, Artificial Sequence
  Description of Artificial Sequence: Synthetic oligonucleotide
cucuugaucagugcgaaug

SEQ ID NO: 1288382 - RNA, 19 nt, Artificial Sequence
  Description of Artificial Sequence: Synthetic oligonucleotide
auauaguuguagaagaaau

SEQ ID NO: 1288383 - RNA, 19 nt, Artificial Sequence
  Description of Artificial Sequence: Synthetic oligonucleotide
aagaaaggcucuccauucu

SEQ ID NO: 1288384 - RNA, 19 nt, Artificial Sequence
  Description of Artificial Sequence: Synthetic oligonucleotide
agcguguagagguagggca

SEQ ID NO: 1288385 - RNA, 19 nt, Artificial Sequence
  Description of Artificial Sequence: Synthetic oligonucleotide
ucggcugauguguaggagc

SEQ ID NO: 1288386 - RNA, 19 nt, Artificial Sequence
  Description of Artificial Sequence: Synthetic oligonucleotide
uggucgaacgagcagcugu

SEQ ID NO: 1288387 - RNA, 19 nt, Artificial Sequence
  Description of Artificial Sequence: Synthetic oligonucleotide
guugcuuagcagcaaagga

SEQ ID NO: 1288388 - RNA, 19 nt, Artificial Sequence
  Description of Artificial Sequence: Synthetic oligonucleotide
gacauugaccaaaaucaug

SEQ ID NO: 1288389 - RNA, 19 nt, Artificial Sequence
  Description of Artificial Sequence: Synthetic oligonucleotide
aucagugcgaauguggaca

SEQ ID NO: 1288390 - RNA, 19 nt, Artificial Sequence
  Description of Artificial Sequence: Synthetic oligonucleotide
ugauguguaggagcacucg

SEQ ID NO: 1288391 - RNA, 19 nt, Artificial Sequence
  Description of Artificial Sequence: Synthetic oligonucleotide
gaacagguagcucuugauc

SEQ ID NO: 1288392 - RNA, 19 nt, Artificial Sequence
  Description of Artificial Sequence: Synthetic oligonucleotide
ugcgaauguggacacggca

SEQ ID NO: 1288393 - RNA, 19 nt, Artificial Sequence
  Description of Artificial Sequence: Synthetic oligonucleotide
cacagggugguauaccaag

SEQ ID NO: 1288394 - RNA, 19 nt, Artificial Sequence
  Description of Artificial Sequence: Synthetic oligonucleotide
uacaguuggacagcuuuag

SEQ ID NO: 1288395 - RNA, 19 nt, Artificial Sequence
  Description of Artificial Sequence: Synthetic oligonucleotide
uggcuauguccacuagugg

SEQ ID NO: 1288396 - RNA, 19 nt, Artificial Sequence
  Description of Artificial Sequence: Synthetic oligonucleotide
cuuguggggaacagguagc

SEQ ID NO: 1288397 - RNA, 19 nt, Artificial Sequence
  Description of Artificial Sequence: Synthetic oligonucleotide
gaacgagcagcuguacugg

SEQ ID NO: 1288398 - RNA, 19 nt, Artificial Sequence
  Description of Artificial Sequence: Synthetic oligonucleotide
cacaacgguguucaucacg

SEQ ID NO: 1288399 - RNA, 19 nt, Artificial Sequence
  Description of Artificial Sequence: Synthetic oligonucleotide
gauagucauguagaugaug

SEQ ID NO: 1288400 - RNA, 19 nt, Artificial Sequence
  Description of Artificial Sequence: Synthetic oligonucleotide
uauaguucagguggcgagc

SEQ ID NO: 1288401 - RNA, 19 nt, Artificial Sequence
  Description of Artificial Sequence: Synthetic oligonucleotide
gaauguuggcacaccacag

SEQ ID NO: 1288402 - RNA, 19 nt, Artificial Sequence
  Description of Artificial Sequence: Synthetic oligonucleotide
agguaccagguuucauucc

SEQ ID NO: 1288403 - RNA, 19 nt, Artificial Sequence
  Description of Artificial Sequence: Synthetic oligonucleotide
ugaugaaguaguacacaau

SEQ ID NO: 1288404 - RNA, 19 nt, Artificial Sequence
  Description of Artificial Sequence: Synthetic oligonucleotide
gucaccccaacccagguac

SEQ ID NO: 1288405 - RNA, 19 nt, Artificial Sequence
  Description of Artificial Sequence: Synthetic oligonucleotide
aagcugacccacaaggugu

SEQ ID NO: 1288406 - RNA, 19 nt, Artificial Sequence
  Description of Artificial Sequence: Synthetic oligonucleotide
ucggaagauauaguagccc

SEQ ID NO: 1288407 - RNA, 19 nt, Artificial Sequence
  Description of Artificial Sequence: Synthetic oligonucleotide
auguaagaaaggcucucca

SEQ ID NO: 1288408 - RNA, 19 nt, Artificial Sequence
  Description of Artificial Sequence: Synthetic oligonucleotide
ucaucacgaaggcagcggu

SEQ ID NO: 1288409 - RNA, 19 nt, Artificial Sequence
  Description of Artificial Sequence: Synthetic oligonucleotide
cuuaggacgguccucagaa

SEQ ID NO: 1288410 - RNA, 19 nt, Artificial Sequence
  Description of Artificial Sequence: Synthetic oligonucleotide
uucuuggacaccucccaca

SEQ ID NO: 1288411 - RNA, 19 nt, Artificial Sequence
  Description of Artificial Sequence: Synthetic oligonucleotide
gucaccaguauaguucagg

SEQ ID NO: 1288412 - RNA, 19 nt, Artificial Sequence
  Description of Artificial Sequence: Synthetic oligonucleotide
acacucaauaaagccuccc

SEQ ID NO: 1288413 - RNA, 19 nt, Artificial Sequence
  Description of Artificial Sequence: Synthetic oligonucleotide
aggucaccaguauaguuca

SEQ ID NO: 1288414 - RNA, 19 nt, Artificial Sequence
  Description of Artificial Sequence: Synthetic oligonucleotide
cauguaagaaaggcucucc

SEQ ID NO: 1288415 - RNA, 19 nt, Artificial Sequence
  Description of Artificial Sequence: Synthetic oligonucleotide
cccuaugccucuuaggacg

SEQ ID NO: 1288416 - RNA, 19 nt, Artificial Sequence
  Description of Artificial Sequence: Synthetic oligonucleotide
cagguaccacccaaagugg

SEQ ID NO: 1288417 - RNA, 19 nt, Artificial Sequence
  Description of Artificial Sequence: Synthetic oligonucleotide
gauguguaggagcacucga

SEQ ID NO: 1288418 - RNA, 19 nt, Artificial Sequence
  Description of Artificial Sequence: Synthetic oligonucleotide
agugggauccaguugucaa

SEQ ID NO: 1288419 - RNA, 19 nt, Artificial Sequence
  Description of Artificial Sequence: Synthetic oligonucleotide
cuaacacauagauggccug

SEQ ID NO: 1288420 - RNA, 19 nt, Artificial Sequence
  Description of Artificial Sequence: Synthetic oligonucleotide
uagcucuugaucagugcga

SEQ ID NO: 1288421 - RNA, 19 nt, Artificial Sequence
  Description of Artificial Sequence: Synthetic oligonucleotide
ugcugugauguuucugccc

SEQ ID NO: 1288422 - RNA, 19 nt, Artificial Sequence
  Description of Artificial Sequence: Synthetic oligonucleotide
uguagcgcucccagucgcg

SEQ ID NO: 1288423 - RNA, 19 nt, Artificial Sequence
  Description of Artificial Sequence: Synthetic oligonucleotide
ucuuaggacgguccucaga

SEQ ID NO: 1288424 - RNA, 19 nt, Artificial Sequence
  Description of Artificial Sequence: Synthetic oligonucleotide
ggcacaacgguguucauca

SEQ ID NO: 1288425 - RNA, 19 nt, Artificial Sequence
  Description of Artificial Sequence: Synthetic oligonucleotide
acuuguuuacaacccugcu

SEQ ID NO: 1288426 - RNA, 19 nt, Artificial Sequence
  Description of Artificial Sequence: Synthetic oligonucleotide
ucuucagcgcuugugggga

SEQ ID NO: 1288427 - RNA, 19 nt, Artificial Sequence
  Description of Artificial Sequence: Synthetic oligonucleotide
aguaaagaaccaccuggaa

SEQ ID NO: 1288428 - RNA, 19 nt, Artificial Sequence
  Description of Artificial Sequence: Synthetic oligonucleotide
gucuaacacauagauggcc

SEQ ID NO: 1288429 - RNA, 19 nt, Artificial Sequence
  Description of Artificial Sequence: Synthetic oligonucleotide
caagguguacaguuggaca

SEQ ID NO: 1288430 - RNA, 19 nt, Artificial Sequence
  Description of Artificial Sequence: Synthetic oligonucleotide
cucccuaugccucuuagga

SEQ ID NO: 1288431 - RNA, 19 nt, Artificial Sequence
  Description of Artificial Sequence: Synthetic oligonucleotide
auuugcggucuucagcgcu

SEQ ID NO: 1288432 - RNA, 19 nt, Artificial Sequence
  Description of Artificial Sequence: Synthetic oligonucleotide
uagcccguucaccucauac

SEQ ID NO: 1288433 - RNA, 19 nt, Artificial Sequence
  Description of Artificial Sequence: Synthetic oligonucleotide
gucgcggccauacuuguug

SEQ ID NO: 1288434 - RNA, 19 nt, Artificial Sequence
  Description of Artificial Sequence: Synthetic oligonucleotide
acaacgguguucaucacga

SEQ ID NO: 1288435 - RNA, 19 nt, Artificial Sequence
  Description of Artificial Sequence: Synthetic oligonucleotide
cuugagauucagccuugcc

SEQ ID NO: 1288436 - RNA, 19 nt, Artificial Sequence
  Description of Artificial Sequence: Synthetic oligonucleotide
ggcuagacugcccaucagg

SEQ ID NO: 1288437 - RNA, 19 nt, Artificial Sequence
  Description of Artificial Sequence: Synthetic oligonucleotide
cuugccguugggauucuug

SEQ ID NO: 1288438 - RNA, 19 nt, Artificial Sequence
  Description of Artificial Sequence: Synthetic oligonucleotide
ggugguauaccaaguacag

SEQ ID NO: 1288439 - RNA, 19 nt, Artificial Sequence
  Description of Artificial Sequence: Synthetic oligonucleotide
ugggcguccauugaagaac

SEQ ID NO: 1288440 - RNA, 19 nt, Artificial Sequence
  Description of Artificial Sequence: Synthetic oligonucleotide
agcgcucccagucgcggcc

SEQ ID NO: 1288441 - RNA, 19 nt, Artificial Sequence
  Description of Artificial Sequence: Synthetic oligonucleotide
agaaccaccuggaagcuga

SEQ ID NO: 1288442 - RNA, 19 nt, Artificial Sequence
  Description of Artificial Sequence: Synthetic oligonucleotide
guuuacaacccugcuggag

SEQ ID NO: 1288443 - RNA, 19 nt, Artificial Sequence
  Description of Artificial Sequence: Synthetic oligonucleotide
gaguaaugagccaggcuug

SEQ ID NO: 1288444 - RNA, 19 nt, Artificial Sequence
  Description of Artificial Sequence: Synthetic oligonucleotide
aaagaaccaccuggaagcu

SEQ ID NO: 1288445 - RNA, 19 nt, Artificial Sequence
  Description of Artificial Sequence: Synthetic oligonucleotide
cagcauugggaguggagag

SEQ ID NO: 1288446 - RNA, 19 nt, Artificial Sequence
  Description of Artificial Sequence: Synthetic oligonucleotide
auacuuguuuacaacccug

SEQ ID NO: 1288447 - RNA, 19 nt, Artificial Sequence
  Description of Artificial Sequence: Synthetic oligonucleotide
ucgaacgagcagcuguacu

SEQ ID NO: 1288448 - RNA, 19 nt, Artificial Sequence
  Description of Artificial Sequence: Synthetic oligonucleotide
aguauaguucagguggcga

SEQ ID NO: 1288449 - RNA, 19 nt, Artificial Sequence
  Description of Artificial Sequence: Synthetic oligonucleotide
ucagugcgaauguggacac

SEQ ID NO: 1288450 - RNA, 19 nt, Artificial Sequence
  Description of Artificial Sequence: Synthetic oligonucleotide
aaccaggauaguagguaag

SEQ ID NO: 1288451 - RNA, 19 nt, Artificial Sequence
  Description of Artificial Sequence: Synthetic oligonucleotide
cuguguagcgcucccaguc

SEQ ID NO: 1288452 - RNA, 19 nt, Artificial Sequence
  Description of Artificial Sequence: Synthetic oligonucleotide
ugaugaggguccaggcuac

SEQ ID NO: 1288453 - RNA, 19 nt, Artificial Sequence
  Description of Artificial Sequence: Synthetic oligonucleotide
gcuauguccacuagugggg

SEQ ID NO: 1288454 - RNA, 19 nt, Artificial Sequence
  Description of Artificial Sequence: Synthetic oligonucleotide
agacuagcacggccggugg

SEQ ID NO: 1288455 - RNA, 19 nt, Artificial Sequence
  Description of Artificial Sequence: Synthetic oligonucleotide
uccuucugaugguuggcca

SEQ ID NO: 1288456 - RNA, 19 nt, Artificial Sequence
  Description of Artificial Sequence: Synthetic oligonucleotide
uuaggacgguccucagaag

SEQ ID NO: 1288457 - RNA, 19 nt, Artificial Sequence
  Description of Artificial Sequence: Synthetic oligonucleotide
aggauaguagguaagcauu

SEQ ID NO: 1288458 - RNA, 19 nt, Artificial Sequence
  Description of Artificial Sequence: Synthetic oligonucleotide
guucaucacgaaggcagcg

SEQ ID NO: 1288459 - RNA, 19 nt, Artificial Sequence
  Description of Artificial Sequence: Synthetic oligonucleotide
aaaugaugguaggggagaa

SEQ ID NO: 1288460 - RNA, 19 nt, Artificial Sequence
  Description of Artificial Sequence: Synthetic oligonucleotide
cuugccccagaugaggcag

SEQ ID NO: 1288461 - RNA, 19 nt, Artificial Sequence
  Description of Artificial Sequence: Synthetic oligonucleotide
cagaagaagucuaacacau

SEQ ID NO: 1288462 - RNA, 19 nt, Artificial Sequence
  Description of Artificial Sequence: Synthetic oligonucleotide
agcccguucaccucauacu

SEQ ID NO: 1288463 - RNA, 19 nt, Artificial Sequence
  Description of Artificial Sequence: Synthetic oligonucleotide
cacacacucaauaaagccu

SEQ ID NO: 1288464 - RNA, 19 nt, Artificial Sequence
  Description of Artificial Sequence: Synthetic oligonucleotide
ucccuaugccucuuaggac

SEQ ID NO: 1288465 - RNA, 19 nt, Artificial Sequence
  Description of Artificial Sequence: Synthetic oligonucleotide
ugcccaucggcugaugugu

SEQ ID NO: 1288466 - RNA, 19 nt, Artificial Sequence
  Description of Artificial Sequence: Synthetic oligonucleotide
caucgagcuccacacacuc

SEQ ID NO: 1288467 - RNA, 19 nt, Artificial Sequence
  Description of Artificial Sequence: Synthetic oligonucleotide
agccacacgcagucacccc

SEQ ID NO: 1288468 - RNA, 19 nt, Artificial Sequence
  Description of Artificial Sequence: Synthetic oligonucleotide
ucagguggcgagccacacc

SEQ ID NO: 1288469 - RNA, 19 nt, Artificial Sequence
  Description of Artificial Sequence: Synthetic oligonucleotide
ucgcggccauacuuguugg

SEQ ID NO: 1288470 - RNA, 19 nt, Artificial Sequence
  Description of Artificial Sequence: Synthetic oligonucleotide
acccagguaccacccaaag

SEQ ID NO: 1288471 - RNA, 19 nt, Artificial Sequence
  Description of Artificial Sequence: Synthetic oligonucleotide
gguaccagguuucauucca

SEQ ID NO: 1288472 - RNA, 19 nt, Artificial Sequence
  Description of Artificial Sequence: Synthetic oligonucleotide
ugggauccaguugucaaaa

SEQ ID NO: 1288473 - RNA, 19 nt, Artificial Sequence
  Description of Artificial Sequence: Synthetic oligonucleotide
cacucgauggccuugggcu

SEQ ID NO: 1288474 - RNA, 19 nt, Artificial Sequence
  Description of Artificial Sequence: Synthetic oligonucleotide
cuagacugcccaucagguc

SEQ ID NO: 1288475 - RNA, 19 nt, Artificial Sequence
  Description of Artificial Sequence: Synthetic oligonucleotide
guggccgccaccacaagcc

SEQ ID NO: 1288476 - RNA, 19 nt, Artificial Sequence
  Description of Artificial Sequence: Synthetic oligonucleotide
aagaaccaccuggaagcug

SEQ ID NO: 1288477 - RNA, 19 nt, Artificial Sequence
  Description of Artificial Sequence: Synthetic oligonucleotide
caaaaucauggaguugguc

SEQ ID NO: 1288478 - RNA, 19 nt, Artificial Sequence
  Description of Artificial Sequence: Synthetic oligonucleotide
gguauaccaaguacaggcc

SEQ ID NO: 1288479 - RNA, 19 nt, Artificial Sequence
  Description of Artificial Sequence: Synthetic oligonucleotide
uuacggcaccuucuuggac

SEQ ID NO: 1288480 - RNA, 19 nt, Artificial Sequence
  Description of Artificial Sequence: Synthetic oligonucleotide
gaguggagagcugcacagg

SEQ ID NO: 1288481 - RNA, 19 nt, Artificial Sequence
  Description of Artificial Sequence: Synthetic oligonucleotide
uuggacagcuuuagcuguc

SEQ ID NO: 1288482 - RNA, 19 nt, Artificial Sequence
  Description of Artificial Sequence: Synthetic oligonucleotide
agggagaaccaauccacuu

SEQ ID NO: 1288483 - RNA, 19 nt, Artificial Sequence
  Description of Artificial Sequence: Synthetic oligonucleotide
guuacggcaccuucuugga

SEQ ID NO: 1288484 - RNA, 19 nt, Artificial Sequence
  Description of Artificial Sequence: Synthetic oligonucleotide
ugccucuuaggacgguccu

SEQ ID NO: 1288485 - RNA, 19 nt, Artificial Sequence
  Description of Artificial Sequence: Synthetic oligonucleotide
gggagaaccaauccacuuc

SEQ ID NO: 1288486 - RNA, 19 nt, Artificial Sequence
  Description of Artificial Sequence: Synthetic oligonucleotide
caguauaguucagguggcg

SEQ ID NO: 1288487 - RNA, 19 nt, Artificial Sequence
  Description of Artificial Sequence: Synthetic oligonucleotide
gaguuacggcaccuucuug

SEQ ID NO: 1288488 - RNA, 19 nt, Artificial Sequence
  Description of Artificial Sequence: Synthetic oligonucleotide
cagccucuaugcaucgagc

SEQ ID NO: 1288489 - RNA, 19 nt, Artificial Sequence
  Description of Artificial Sequence: Synthetic oligonucleotide
acgguccucagaagauucc

SEQ ID NO: 1288490 - RNA, 19 nt, Artificial Sequence
  Description of Artificial Sequence: Synthetic oligonucleotide
ugccagccucuaugcaucg

SEQ ID NO: 1288491 - RNA, 19 nt, Artificial Sequence
  Description of Artificial Sequence: Synthetic oligonucleotide
cuggaguuacggcaccuuc

SEQ ID NO: 1288492 - RNA, 19 nt, Artificial Sequence
  Description of Artificial Sequence: Synthetic oligonucleotide
caucacgaaggcagcggug

SEQ ID NO: 1288493 - RNA, 19 nt, Artificial Sequence
  Description of Artificial Sequence: Synthetic oligonucleotide
gagugagcaggauagucau

SEQ ID NO: 1288494 - RNA, 19 nt, Artificial Sequence
  Description of Artificial Sequence: Synthetic oligonucleotide
uaugccucuuaggacgguc

SEQ ID NO: 1288495 - RNA, 19 nt, Artificial Sequence
  Description of Artificial Sequence: Synthetic oligonucleotide
cagacuagcacggccggug

SEQ ID NO: 1288496 - RNA, 19 nt, Artificial Sequence
  Description of Artificial Sequence: Synthetic oligonucleotide
cuggaagcugacccacaag

SEQ ID NO: 1288497 - RNA, 19 nt, Artificial Sequence
  Description of Artificial Sequence: Synthetic oligonucleotide
ugucacaggcggugucuug

SEQ ID NO: 1288498 - RNA, 19 nt, Artificial Sequence
  Description of Artificial Sequence: Synthetic oligonucleotide
auaccaaguacaggcccug

SEQ ID NO: 1288499 - RNA, 19 nt, Artificial Sequence
  Description of Artificial Sequence: Synthetic oligonucleotide
ugccguugggauucuuggu

SEQ ID NO: 1288500 - RNA, 19 nt, Artificial Sequence
  Description of Artificial Sequence: Synthetic oligonucleotide
cuggaauuuugaagccauc

SEQ ID NO: 1288501 - RNA, 19 nt, Artificial Sequence
  Description of Artificial Sequence: Synthetic oligonucleotide
guguagcgcucccagucgc

SEQ ID NO: 1288502 - RNA, 19 nt, Artificial Sequence
  Description of Artificial Sequence: Synthetic oligonucleotide
ccaguauaguucagguggc

SEQ ID NO: 1288503 - RNA, 19 nt, Artificial Sequence
  Description of Artificial Sequence: Synthetic oligonucleotide
acuagcacggccgguggcu

SEQ ID NO: 1288504 - RNA, 19 nt, Artificial Sequence
  Description of Artificial Sequence: Synthetic oligonucleotide
gacuagcacggccgguggc

SEQ ID NO: 1288505 - RNA, 19 nt, Artificial Sequence
  Description of Artificial Sequence: Synthetic oligonucleotide
cgaacgagcagcuguacug

SEQ ID NO: 1288506 - RNA, 19 nt, Artificial Sequence
  Description of Artificial Sequence: Synthetic oligonucleotide
guagcgcucccagucgcgg

SEQ ID NO: 1288507 - RNA, 19 nt, Artificial Sequence
  Description of Artificial Sequence: Synthetic oligonucleotide
aucggcugauguguaggag

SEQ ID NO: 1288508 - RNA, 19 nt, Artificial Sequence
  Description of Artificial Sequence: Synthetic oligonucleotide
ggcuguguagcgcucccag

SEQ ID NO: 1288509 - RNA, 19 nt, Artificial Sequence
  Description of Artificial Sequence: Synthetic oligonucleotide
caggaguaaagaaccaccu

SEQ ID NO: 1288510 - RNA, 19 nt, Artificial Sequence
  Description of Artificial Sequence: Synthetic oligonucleotide
caggcuuguagcccguuca

SEQ ID NO: 1288511 - RNA, 19 nt, Artificial Sequence
  Description of Artificial Sequence: Synthetic oligonucleotide
aguaggcuagacugcccau

SEQ ID NO: 1288512 - RNA, 19 nt, Artificial Sequence
  Description of Artificial Sequence: Synthetic oligonucleotide
aggcccggccccauugucc

SEQ ID NO: 1288513 - RNA, 19 nt, Artificial Sequence
  Description of Artificial Sequence: Synthetic oligonucleotide
uggcacaacgguguucauc

SEQ ID NO: 1288514 - RNA, 19 nt, Artificial Sequence
  Description of Artificial Sequence: Synthetic oligonucleotide
ggaagauauaguagcccac

SEQ ID NO: 1288515 - RNA, 19 nt, Artificial Sequence
  Description of Artificial Sequence: Synthetic oligonucleotide
cuugaagucaaaccacuuu

SEQ ID NO: 1288516 - RNA, 19 nt, Artificial Sequence
  Description of Artificial Sequence: Synthetic oligonucleotide
caggauaguagguaagcau

SEQ ID NO: 1288517 - RNA, 19 nt, Artificial Sequence
  Description of Artificial Sequence: Synthetic oligonucleotide
ggguggucgaacgagcagc

SEQ ID NO: 1288518 - RNA, 19 nt, Artificial Sequence
  Description of Artificial Sequence: Synthetic oligonucleotide
uggccauucggaagauaua

SEQ ID NO: 1288519 - RNA, 19 nt, Artificial Sequence
  Description of Artificial Sequence: Synthetic oligonucleotide
uggacacggcauagcccag

SEQ ID NO: 1288520 - RNA, 19 nt, Artificial Sequence
  Description of Artificial Sequence: Synthetic oligonucleotide
gucaaaccacuuuccaaua

SEQ ID NO: 1288521 - RNA, 19 nt, Artificial Sequence
  Description of Artificial Sequence: Synthetic oligonucleotide
ggcaguaggcuagacugcc

SEQ ID NO: 1288522 - RNA, 19 nt, Artificial Sequence
  Description of Artificial Sequence: Synthetic oligonucleotide
agcucuugaucagugcgaa

SEQ ID NO: 1288523 - RNA, 19 nt, Artificial Sequence
  Description of Artificial Sequence: Synthetic oligonucleotide
acgagcagcuguacugguc

SEQ ID NO: 1288524 - RNA, 19 nt, Artificial Sequence
  Description of Artificial Sequence: Synthetic oligonucleotide
guccuugagauucagccuu

SEQ ID NO: 1288525 - RNA, 19 nt, Artificial Sequence
  Description of Artificial Sequence: Synthetic oligonucleotide
gugggauccaguugucaaa

SEQ ID NO: 1288526 - RNA, 19 nt, Artificial Sequence
  Description of Artificial Sequence: Synthetic oligonucleotide
ccagccucuaugcaucgag

SEQ ID NO: 1288527 - RNA, 19 nt, Artificial Sequence
  Description of Artificial Sequence: Synthetic oligonucleotide
cuacaaucccugggcgucc

SEQ ID NO: 1288528 - RNA, 19 nt, Artificial Sequence
  Description of Artificial Sequence: Synthetic oligonucleotide
aggcuagacugcccaucag

SEQ ID NO: 1288529 - RNA, 19 nt, Artificial Sequence
  Description of Artificial Sequence: Synthetic oligonucleotide
uucugaugguuggccauuc

SEQ ID NO: 1288530 - RNA, 19 nt, Artificial Sequence
  Description of Artificial Sequence: Synthetic oligonucleotide
ggguccaggcuacaauccc

SEQ ID NO: 1288531 - RNA, 19 nt, Artificial Sequence
  Description of Artificial Sequence: Synthetic oligonucleotide
ccaucauauaguuguagaa

SEQ ID NO: 1288532 - RNA, 19 nt, Artificial Sequence
  Description of Artificial Sequence: Synthetic oligonucleotide
guaggcuagacugcccauc

SEQ ID NO: 1288533 - RNA, 19 nt, Artificial Sequence
  Description of Artificial Sequence: Synthetic oligonucleotide
acuggcuagggagaaccaa

SEQ ID NO: 1288534 - RNA, 19 nt, Artificial Sequence
  Description of Artificial Sequence: Synthetic oligonucleotide
uguuggcacaacgguguuc

SEQ ID NO: 1288535 - RNA, 19 nt, Artificial Sequence
  Description of Artificial Sequence: Synthetic oligonucleotide
cccaucauauaguuguaga

SEQ ID NO: 1288536 - RNA, 19 nt, Artificial Sequence
  Description of Artificial Sequence: Synthetic oligonucleotide
cugcacagggugguauacc

SEQ ID NO: 1288537 - RNA, 19 nt, Artificial Sequence
  Description of Artificial Sequence: Synthetic oligonucleotide
uucagguggcgagccacac

SEQ ID NO: 1288538 - RNA, 19 nt, Artificial Sequence
  Description of Artificial Sequence: Synthetic oligonucleotide
cuguccugcggaacagguc

SEQ ID NO: 1288539 - RNA, 19 nt, Artificial Sequence
  Description of Artificial Sequence: Synthetic oligonucleotide
gguggccgccaccacaagc

SEQ ID NO: 1288540 - RNA, 19 nt, Artificial Sequence
  Description of Artificial Sequence: Synthetic oligonucleotide
caucggcugauguguagga

SEQ ID NO: 1288541 - RNA, 19 nt, Artificial Sequence
  Description of Artificial Sequence: Synthetic oligonucleotide
ccagucgcggccauacuug

SEQ ID NO: 1288542 - RNA, 19 nt, Artificial Sequence
  Description of Artificial Sequence: Synthetic oligonucleotide
uguagcccguucaccucau

SEQ ID NO: 1288543 - RNA, 19 nt, Artificial Sequence
  Description of Artificial Sequence: Synthetic oligonucleotide
gacaccucccacauagccu

SEQ ID NO: 1288544 - RNA, 19 nt, Artificial Sequence
  Description of Artificial Sequence: Synthetic oligonucleotide
uucagguaccagguuucau

SEQ ID NO: 1288545 - RNA, 19 nt, Artificial Sequence
  Description of Artificial Sequence: Synthetic oligonucleotide
gcagcguguagagguaggg

SEQ ID NO: 1288546 - RNA, 19 nt, Artificial Sequence
  Description of Artificial Sequence: Synthetic oligonucleotide
cacucaauaaagccucccu

SEQ ID NO: 1288547 - RNA, 19 nt, Artificial Sequence
  Description of Artificial Sequence: Synthetic oligonucleotide
aguggucauggcagauguc

SEQ ID NO: 1288548 - RNA, 19 nt, Artificial Sequence
  Description of Artificial Sequence: Synthetic oligonucleotide
uagcgcucccagucgcggc

SEQ ID NO: 1288549 - RNA, 19 nt, Artificial Sequence
  Description of Artificial Sequence: Synthetic oligonucleotide
augcaucgagcuccacaca

SEQ ID NO: 1288550 - RNA, 19 nt, Artificial Sequence
  Description of Artificial Sequence: Synthetic oligonucleotide
gugaguaaugagccaggcu

SEQ ID NO: 1288551 - RNA, 19 nt, Artificial Sequence
  Description of Artificial Sequence: Synthetic oligonucleotide
agcuugcugugauguuucu

SEQ ID NO: 1288552 - RNA, 19 nt, Artificial Sequence
  Description of Artificial Sequence: Synthetic oligonucleotide
gcuacaaucccugggcguc

SEQ ID NO: 1288553 - RNA, 19 nt, Artificial Sequence
  Description of Artificial Sequence: Synthetic oligonucleotide
uucagcgcuuguggggaac

SEQ ID NO: 1288554 - RNA, 19 nt, Artificial Sequence
  Description of Artificial Sequence: Synthetic oligonucleotide
gccagacuagcacggccgg

SEQ ID NO: 1288555 - RNA, 19 nt, Artificial Sequence
  Description of Artificial Sequence: Synthetic oligonucleotide
ccaucggcugauguguagg

SEQ ID NO: 1288556 - RNA, 19 nt, Artificial Sequence
  Description of Artificial Sequence: Synthetic oligonucleotide
cugggcguccauugaagaa

SEQ ID NO: 1288557 - RNA, 19 nt, Artificial Sequence
  Description of Artificial Sequence: Synthetic oligonucleotide
cggaagauauaguagccca

SEQ ID NO: 1288558 - RNA, 19 nt, Artificial Sequence
  Description of Artificial Sequence: Synthetic oligonucleotide
gagguggccgccaccacaa

SEQ ID NO: 1288559 - RNA, 19 nt, Artificial Sequence
  Description of Artificial Sequence: Synthetic oligonucleotide
gggaacagguagcucuuga

SEQ ID NO: 1288560 - RNA, 19 nt, Artificial Sequence
  Description of Artificial Sequence: Synthetic oligonucleotide
aggacgguccucagaagau

SEQ ID NO: 1288561 - RNA, 19 nt, Artificial Sequence
  Description of Artificial Sequence: Synthetic oligonucleotide
cugugaauuugcggucuuc

SEQ ID NO: 1288562 - RNA, 19 nt, Artificial Sequence
  Description of Artificial Sequence: Synthetic oligonucleotide
gggguggucgaacgagcag

SEQ ID NO: 1288563 - RNA, 19 nt, Artificial Sequence
  Description of Artificial Sequence: Synthetic oligonucleotide
cugacccacaagguguaca

SEQ ID NO: 1288564 - RNA, 19 nt, Artificial Sequence
  Description of Artificial Sequence: Synthetic oligonucleotide
gcccaucauauaguuguag

SEQ ID NO: 1288565 - RNA, 19 nt, Artificial Sequence
  Description of Artificial Sequence: Synthetic oligonucleotide
uugcggucuucagcgcuug

SEQ ID NO: 1288566 - RNA, 19 nt, Artificial Sequence
  Description of Artificial Sequence: Synthetic oligonucleotide
cagggugguauaccaagua

SEQ ID NO: 1288567 - RNA, 19 nt, Artificial Sequence
  Description of Artificial Sequence: Synthetic oligonucleotide
gccgccaccacaagccagg

SEQ ID NO: 1288568 - RNA, 19 nt, Artificial Sequence
  Description of Artificial Sequence: Synthetic oligonucleotide
gguaccacccaaagugguc

SEQ ID NO: 1288569 - RNA, 19 nt, Artificial Sequence
  Description of Artificial Sequence: Synthetic oligonucleotide
ggucacaugccaugaugaa

SEQ ID NO: 1288570 - RNA, 19 nt, Artificial Sequence
  Description of Artificial Sequence: Synthetic oligonucleotide
gccucuaugcaucgagcuc

SEQ ID NO: 1288571 - RNA, 19 nt, Artificial Sequence
  Description of Artificial Sequence: Synthetic oligonucleotide
guacaguuggacagcuuua

SEQ ID NO: 1288572 - RNA, 19 nt, Artificial Sequence
  Description of Artificial Sequence: Synthetic oligonucleotide
caaugcccaucauauaguu

SEQ ID NO: 1288573 - RNA, 19 nt, Artificial Sequence
  Description of Artificial Sequence: Synthetic oligonucleotide
gugcgaauguggacacggc

SEQ ID NO: 1288574 - RNA, 19 nt, Artificial Sequence
  Description of Artificial Sequence: Synthetic oligonucleotide
gcgcccaucuguccugcgg

SEQ ID NO: 1288575 - RNA, 19 nt, Artificial Sequence
  Description of Artificial Sequence: Synthetic oligonucleotide
uagcugucacaggcggugu

SEQ ID NO: 1288576 - RNA, 19 nt, Artificial Sequence
  Description of Artificial Sequence: Synthetic oligonucleotide
ugcggucuucagcgcuugu

SEQ ID NO: 1288577 - RNA, 19 nt, Artificial Sequence
  Description of Artificial Sequence: Synthetic oligonucleotide
gccacacgcagucacccca

SEQ ID NO: 1288578 - RNA, 19 nt, Artificial Sequence
  Description of Artificial Sequence: Synthetic oligonucleotide
guggcgagccacaccccag

SEQ ID NO: 1288579 - RNA, 19 nt, Artificial Sequence
  Description of Artificial Sequence: Synthetic oligonucleotide
agguggcgagccacacccc

SEQ ID NO: 1288580 - RNA, 19 nt, Artificial Sequence
  Description of Artificial Sequence: Synthetic oligonucleotide
cagugcgaauguggacacg

SEQ ID NO: 1288581 - RNA, 19 nt, Artificial Sequence
  Description of Artificial Sequence: Synthetic oligonucleotide
ucccagucgcggccauacu

SEQ ID NO: 1288582 - RNA, 19 nt, Artificial Sequence
  Description of Artificial Sequence: Synthetic oligonucleotide
gucgaacgagcagcuguac

SEQ ID NO: 1288583 - RNA, 19 nt, Artificial Sequence
  Description of Artificial Sequence: Synthetic oligonucleotide
ccaauccacuucccaggcc

SEQ ID NO: 1288584 - RNA, 19 nt, Artificial Sequence
  Description of Artificial Sequence: Synthetic oligonucleotide
agcacggccgguggcuaug

SEQ ID NO: 1288585 - RNA, 19 nt, Artificial Sequence
  Description of Artificial Sequence: Synthetic oligonucleotide
gcuagacugcccaucaggu

SEQ ID NO: 1288586 - RNA, 19 nt, Artificial Sequence
  Description of Artificial Sequence: Synthetic oligonucleotide
agguggccgccaccacaag

SEQ ID NO: 1288587 - RNA, 19 nt, Artificial Sequence
  Description of Artificial Sequence: Synthetic oligonucleotide
ccucuuaggacgguccuca

SEQ ID NO: 1288588 - RNA, 19 nt, Artificial Sequence
  Description of Artificial Sequence: Synthetic oligonucleotide
cacaugccaugaugaagua

SEQ ID NO: 1288589 - RNA, 19 nt, Artificial Sequence
  Description of Artificial Sequence: Synthetic oligonucleotide
ggggagaaccaggauagua

SEQ ID NO: 1288590 - RNA, 19 nt, Artificial Sequence
  Description of Artificial Sequence: Synthetic oligonucleotide
cccaucggcugauguguag

SEQ ID NO: 1288591 - RNA, 19 nt, Artificial Sequence
  Description of Artificial Sequence: Synthetic oligonucleotide
ccaggauaguagguaagca

SEQ ID NO: 1288592 - RNA, 19 nt, Artificial Sequence
  Description of Artificial Sequence: Synthetic oligonucleotide
gcuggaauuuugaagccau

SEQ ID NO: 1288593 - RNA, 19 nt, Artificial Sequence
  Description of Artificial Sequence: Synthetic oligonucleotide
cccagaauguuggcacacc

SEQ ID NO: 1288594 - RNA, 19 nt, Artificial Sequence
  Description of Artificial Sequence: Synthetic oligonucleotide
guggucgaacgagcagcug

SEQ ID NO: 1288595 - RNA, 19 nt, Artificial Sequence
  Description of Artificial Sequence: Synthetic oligonucleotide
ggaguuacggcaccuucuu

SEQ ID NO: 1288596 - RNA, 19 nt, Artificial Sequence
  Description of Artificial Sequence: Synthetic oligonucleotide
gggcguccauugaagaaca

SEQ ID NO: 1288597 - RNA, 19 nt, Artificial Sequence
  Description of Artificial Sequence: Synthetic oligonucleotide
cagcggugagugagcagga

SEQ ID NO: 1288598 - RNA, 19 nt, Artificial Sequence
  Description of Artificial Sequence: Synthetic oligonucleotide
caggcccggccccauuguc

SEQ ID NO: 1288599 - RNA, 19 nt, Artificial Sequence
  Description of Artificial Sequence: Synthetic oligonucleotide
acaaucccugggcguccau

SEQ ID NO: 1288600 - RNA, 19 nt, Artificial Sequence
  Description of Artificial Sequence: Synthetic oligonucleotide
ggcuacaaucccugggcgu

SEQ ID NO: 1288601 - RNA, 19 nt, Artificial Sequence
  Description of Artificial Sequence: Synthetic oligonucleotide
cggccauacuuguuggcac

SEQ ID NO: 1288602 - RNA, 19 nt, Artificial Sequence
  Description of Artificial Sequence: Synthetic oligonucleotide
agcggugagugagcaggau

SEQ ID NO: 1288603 - RNA, 19 nt, Artificial Sequence
  Description of Artificial Sequence: Synthetic oligonucleotide
gcggugagugagcaggaua

SEQ ID NO: 1288604 - RNA, 19 nt, Artificial Sequence
  Description of Artificial Sequence: Synthetic oligonucleotide
ccugggcguccauugaaga

SEQ ID NO: 1288605 - RNA, 19 nt, Artificial Sequence
  Description of Artificial Sequence: Synthetic oligonucleotide
caacgguguucaucacgaa

SEQ ID NO: 1288606 - RNA, 19 nt, Artificial Sequence
  Description of Artificial Sequence: Synthetic oligonucleotide
ccacuucccaggcccggcc

SEQ ID NO: 1288607 - RNA, 19 nt, Artificial Sequence
  Description of Artificial Sequence: Synthetic oligonucleotide
ggucgaacgagcagcugua

SEQ ID NO: 1288608 - RNA, 19 nt, Artificial Sequence
  Description of Artificial Sequence: Synthetic oligonucleotide
gccguugggauucuugguu

SEQ ID NO: 1288609 - RNA, 19 nt, Artificial Sequence
  Description of Artificial Sequence: Synthetic oligonucleotide
ccauaaagcuccuguugcu

SEQ ID NO: 1288610 - RNA, 19 nt, Artificial Sequence
  Description of Artificial Sequence: Synthetic oligonucleotide
ccaggcuuguagcccguuc

SEQ ID NO: 1288611 - RNA, 19 nt, Artificial Sequence
  Description of Artificial Sequence: Synthetic oligonucleotide
gcgaauguggacacggcau

SEQ ID NO: 1288612 - RNA, 19 nt, Artificial Sequence
  Description of Artificial Sequence: Synthetic oligonucleotide
cuucagcgcuuguggggaa

SEQ ID NO: 1288613 - RNA, 19 nt, Artificial Sequence
  Description of Artificial Sequence: Synthetic oligonucleotide
gacccacaagguguacagu

SEQ ID NO: 1288614 - RNA, 19 nt, Artificial Sequence
  Description of Artificial Sequence: Synthetic oligonucleotide
ggggaacagguagcucuug

SEQ ID NO: 1288615 - RNA, 19 nt, Artificial Sequence
  Description of Artificial Sequence: Synthetic oligonucleotide
ggcguccauugaagaacag

SEQ ID NO: 1288616 - RNA, 19 nt, Artificial Sequence
  Description of Artificial Sequence: Synthetic oligonucleotide
ccagaugaggcagcgccca

SEQ ID NO: 1288617 - RNA, 19 nt, Artificial Sequence
  Description of Artificial Sequence: Synthetic oligonucleotide
gguguugugcuggaauuuu

SEQ ID NO: 1288618 - RNA, 19 nt, Artificial Sequence
  Description of Artificial Sequence: Synthetic oligonucleotide
ggccgccaccacaagccag

SEQ ID NO: 1288619 - RNA, 19 nt, Artificial Sequence
  Description of Artificial Sequence: Synthetic oligonucleotide
gcacaacgguguucaucac

SEQ ID NO: 1288620 - RNA, 19 nt, Artificial Sequence
  Description of Artificial Sequence: Synthetic oligonucleotide
gguaggggagaaccaggau

SEQ ID NO: 1288621 - RNA, 19 nt, Artificial Sequence
  Description of Artificial Sequence: Synthetic oligonucleotide
cagucgcggccauacuugu

SEQ ID NO: 1288622 - RNA, 19 nt, Artificial Sequence
  Description of Artificial Sequence: Synthetic oligonucleotide
caccaacagcuugcuguga

SEQ ID NO: 1288623 - RNA, 19 nt, Artificial Sequence
  Description of Artificial Sequence: Synthetic oligonucleotide
cgaauguggacacggcaua

SEQ ID NO: 1288624 - RNA, 19 nt, Artificial Sequence
  Description of Artificial Sequence: Synthetic oligonucleotide
cuagcacggccgguggcua

SEQ ID NO: 1288625 - RNA, 19 nt, Artificial Sequence
  Description of Artificial Sequence: Synthetic oligonucleotide
gcuguguagcgcucccagu

SEQ ID NO: 1288626 - RNA, 19 nt, Artificial Sequence
  Description of Artificial Sequence: Synthetic oligonucleotide
agucgcggccauacuuguu

SEQ ID NO: 1288627 - RNA, 19 nt, Artificial Sequence
  Description of Artificial Sequence: Synthetic oligonucleotide
gccauucggaagauauagu

SEQ ID NO: 1288628 - RNA, 19 nt, Artificial Sequence
  Description of Artificial Sequence: Synthetic oligonucleotide
cacggccgguggcuauguc

SEQ ID NO: 1288629 - RNA, 19 nt, Artificial Sequence
  Description of Artificial Sequence: Synthetic oligonucleotide
guagcccguucaccucaua

SEQ ID NO: 1288630 - RNA, 19 nt, Artificial Sequence
  Description of Artificial Sequence: Synthetic oligonucleotide
cccggccccauuguccuug

SEQ ID NO: 1288631 - RNA, 19 nt, Artificial Sequence
  Description of Artificial Sequence: Synthetic oligonucleotide
gcugacccacaagguguac

SEQ ID NO: 1288632 - RNA, 19 nt, Artificial Sequence
  Description of Artificial Sequence: Synthetic oligonucleotide
ggauagucauguagaugau

SEQ ID NO: 1288633 - RNA, 19 nt, Artificial Sequence
  Description of Artificial Sequence: Synthetic oligonucleotide
gcacagggugguauaccaa

SEQ ID NO: 1288634 - RNA, 19 nt, Artificial Sequence
  Description of Artificial Sequence: Synthetic oligonucleotide
gcgguaggggacuguggcu

SEQ ID NO: 1288635 - RNA, 19 nt, Artificial Sequence
  Description of Artificial Sequence: Synthetic oligonucleotide
gcaucgagcuccacacacu

SEQ ID NO: 1288636 - RNA, 19 nt, Artificial Sequence
  Description of Artificial Sequence: Synthetic oligonucleotide
ccgguggcuauguccacua

SEQ ID NO: 1288637 - RNA, 19 nt, Artificial Sequence
  Description of Artificial Sequence: Synthetic oligonucleotide
ccacacgcagucaccccaa

SEQ ID NO: 1288638 - RNA, 19 nt, Artificial Sequence
  Description of Artificial Sequence: Synthetic oligonucleotide
ggguguugugcuggaauuu

SEQ ID NO: 1288639 - RNA, 19 nt, Artificial Sequence
  Description of Artificial Sequence: Synthetic oligonucleotide
ccguugggauucuugguuu

SEQ ID NO: 1288640 - RNA, 19 nt, Artificial Sequence
  Description of Artificial Sequence: Synthetic oligonucleotide
ggacgguccucagaagauu

SEQ ID NO: 1288641 - RNA, 19 nt, Artificial Sequence
  Description of Artificial Sequence: Synthetic oligonucleotide
cuaugccucuuaggacggu

SEQ ID NO: 1288642 - RNA, 19 nt, Artificial Sequence
  Description of Artificial Sequence: Synthetic oligonucleotide
gcucuugaucagugcgaau

SEQ ID NO: 1288643 - RNA, 19 nt, Artificial Sequence
  Description of Artificial Sequence: Synthetic oligonucleotide
cugucacaggcggugucuu

SEQ ID NO: 1288644 - RNA, 19 nt, Artificial Sequence
  Description of Artificial Sequence: Synthetic oligonucleotide
cccagucgcggccauacuu

SEQ ID NO: 1288645 - RNA, 19 nt, Artificial Sequence
  Description of Artificial Sequence: Synthetic oligonucleotide
gccagccucuaugcaucga

SEQ ID NO: 1288646 - RNA, 19 nt, Artificial Sequence
  Description of Artificial Sequence: Synthetic oligonucleotide
gccgguggcuauguccacu

SEQ ID NO: 1288647 - RNA, 19 nt, Artificial Sequence
  Description of Artificial Sequence: Synthetic oligonucleotide
ccugugaauuugcggucuu

SEQ ID NO: 1288648 - RNA, 19 nt, Artificial Sequence
  Description of Artificial Sequence: Synthetic oligonucleotide
gcccaucggcugaugugua

SEQ ID NO: 1288649 - RNA, 19 nt, Artificial Sequence
  Description of Artificial Sequence: Synthetic oligonucleotide
ccggccccauuguccuuga

SEQ ID NO: 1288650 - RNA, 19 nt, Artificial Sequence
  Description of Artificial Sequence: Synthetic oligonucleotide
ccagacuagcacggccggu

SEQ ID NO: 1288651 - RNA, 19 nt, Artificial Sequence
  Description of Artificial Sequence: Synthetic oligonucleotide
ccaggcccggccccauugu

SEQ ID NO: 1288652 - RNA, 19 nt, Artificial Sequence
  Description of Artificial Sequence: Synthetic oligonucleotide
gcacggccgguggcuaugu

SEQ ID NO: 1288653 - RNA, 19 nt, Artificial Sequence
  Description of Artificial Sequence: Synthetic oligonucleotide
gccaggcuuguagcccguu

SEQ ID NO: 1288654 - RNA, 19 nt, Artificial Sequence
  Description of Artificial Sequence: Synthetic oligonucleotide
auagcauugagguugaugg

SEQ ID NO: 1288655 - RNA, 19 nt, Artificial Sequence
  Description of Artificial Sequence: Synthetic oligonucleotide
ugauuagagaugaagagag

SEQ ID NO: 1288656 - RNA, 19 nt, Artificial Sequence
  Description of Artificial Sequence: Synthetic oligonucleotide
uuaaauagcuguuuauugg

SEQ ID NO: 1288657 - RNA, 19 nt, Artificial Sequence
  Description of Artificial Sequence: Synthetic oligonucleotide
agcgaugucagacagcucc

SEQ ID NO: 1288658 - RNA, 19 nt, Artificial Sequence
  Description of Artificial Sequence: Synthetic oligonucleotide
aucuuuagcacacaacgcc

SEQ ID NO: 1288659 - RNA, 19 nt, Artificial Sequence
  Description of Artificial Sequence: Synthetic oligonucleotide
cuuaaugcccacaacaccg

SEQ ID NO: 1288660 - RNA, 19 nt, Artificial Sequence
  Description of Artificial Sequence: Synthetic oligonucleotide
uuuaucuaccuuaaugccc

SEQ ID NO: 1288661 - RNA, 19 nt, Artificial Sequence
  Description of Artificial Sequence: Synthetic oligonucleotide
aaaagaacgcagccuauuc

SEQ ID NO: 1288662 - RNA, 19 nt, Artificial Sequence
  Description of Artificial Sequence: Synthetic oligonucleotide
uuguugauagcauugaggu

SEQ ID NO: 1288663 - RNA, 19 nt, Artificial Sequence
  Description of Artificial Sequence: Synthetic oligonucleotide
aauucgaugagcgauguca

SEQ ID NO: 1288664 - RNA, 19 nt, Artificial Sequence
  Description of Artificial Sequence: Synthetic oligonucleotide
uaaauagcuguuuauuggc

SEQ ID NO: 1288665 - RNA, 19 nt, Artificial Sequence
  Description of Artificial Sequence: Synthetic oligonucleotide
agcgcuuuaagucaugguc

SEQ ID NO: 1288666 - RNA, 19 nt, Artificial Sequence
  Description of Artificial Sequence: Synthetic oligonucleotide
uuaucuaccuuaaugccca

SEQ ID NO: 1288667 - RNA, 19 nt, Artificial Sequence
  Description of Artificial Sequence: Synthetic oligonucleotide
aauggguacaaugccauuc

SEQ ID NO: 1288668 - RNA, 19 nt, Artificial Sequence
  Description of Artificial Sequence: Synthetic oligonucleotide
cucauuggaaaauuucugg

SEQ ID NO: 1288669 - RNA, 19 nt, Artificial Sequence
  Description of Artificial Sequence: Synthetic oligonucleotide
caugauuagagaugaagag

SEQ ID NO: 1288670 - RNA, 19 nt, Artificial Sequence
  Description of Artificial Sequence: Synthetic oligonucleotide
aaugccauucugcuggcag

SEQ ID NO: 1288671 - RNA, 19 nt, Artificial Sequence
  Description of Artificial Sequence: Synthetic oligonucleotide
uaccuuaaugcccacaaca

SEQ ID NO: 1288672 - RNA, 19 nt, Artificial Sequence
  Description of Artificial Sequence: Synthetic oligonucleotide
agagagauucacuggcugc

SEQ ID NO: 1288673 - RNA, 19 nt, Artificial Sequence
  Description of Artificial Sequence: Synthetic oligonucleotide
uuggacuugauaacuuggg

SEQ ID NO: 1288674 - RNA, 19 nt, Artificial Sequence
  Description of Artificial Sequence: Synthetic oligonucleotide
agcgaacgcagcuagaguc

SEQ ID NO: 1288675 - RNA, 19 nt, Artificial Sequence
  Description of Artificial Sequence: Synthetic oligonucleotide
uuuauuggcagugggcugg

SEQ ID NO: 1288676 - RNA, 19 nt, Artificial Sequence
  Description of Artificial Sequence: Synthetic oligonucleotide
uucucaguuacauacugac

SEQ ID NO: 1288677 - RNA, 19 nt, Artificial Sequence
  Description of Artificial Sequence: Synthetic oligonucleotide
gaaaauuucuggguacagg

SEQ ID NO: 1288678 - RNA, 19 nt, Artificial Sequence
  Description of Artificial Sequence: Synthetic oligonucleotide
ugguuaguaggcaugauua

SEQ ID NO: 1288679 - RNA, 19 nt, Artificial Sequence
  Description of Artificial Sequence: Synthetic oligonucleotide
aaagaacgcagccuauuca

SEQ ID NO: 1288680 - RNA, 19 nt, Artificial Sequence
  Description of Artificial Sequence: Synthetic oligonucleotide
acaucguucagacagccca

SEQ ID NO: 1288681 - RNA, 19 nt, Artificial Sequence
  Description of Artificial Sequence: Synthetic oligonucleotide
ccuuuaucuaccuuaaugc

SEQ ID NO: 1288682 - RNA, 19 nt, Artificial Sequence
  Description of Artificial Sequence: Synthetic oligonucleotide
aagagagauucacuggcug

SEQ ID NO: 1288683 - RNA, 19 nt, Artificial Sequence
  Description of Artificial Sequence: Synthetic oligonucleotide
ucuaccuuaaugcccacaa

SEQ ID NO: 1288684 - RNA, 19 nt, Artificial Sequence
  Description of Artificial Sequence: Synthetic oligonucleotide
agagacaacaccacacacc

SEQ ID NO: 1288685 - RNA, 19 nt, Artificial Sequence
  Description of Artificial Sequence: Synthetic oligonucleotide
uguuuauuggcagugggcu

SEQ ID NO: 1288686 - RNA, 19 nt, Artificial Sequence
  Description of Artificial Sequence: Synthetic oligonucleotide
ucuuuagcacacaacgcca

SEQ ID NO: 1288687 - RNA, 19 nt, Artificial Sequence
  Description of Artificial Sequence: Synthetic oligonucleotide
accauguugggcuucaaca

SEQ ID NO: 1288688 - RNA, 19 nt, Artificial Sequence
  Description of Artificial Sequence: Synthetic oligonucleotide
agggacguccaucaucggc

SEQ ID NO: 1288689 - RNA, 19 nt, Artificial Sequence
  Description of Artificial Sequence: Synthetic oligonucleotide
gaaacgccuguucucuucg

SEQ ID NO: 1288690 - RNA, 19 nt, Artificial Sequence
  Description of Artificial Sequence: Synthetic oligonucleotide
uugggcuucaacagugugc

SEQ ID NO: 1288691 - RNA, 19 nt, Artificial Sequence
  Description of Artificial Sequence: Synthetic oligonucleotide
ugugacaguugccauggca

SEQ ID NO: 1288692 - RNA, 19 nt, Artificial Sequence
  Description of Artificial Sequence: Synthetic oligonucleotide
gggcacaucguucagacag

SEQ ID NO: 1288693 - RNA, 19 nt, Artificial Sequence
  Description of Artificial Sequence: Synthetic oligonucleotide
uuggaaaauuucuggguac

SEQ ID NO: 1288694 - RNA, 19 nt, Artificial Sequence
  Description of Artificial Sequence: Synthetic oligonucleotide
uguacugggcacaucguuc

SEQ ID NO: 1288695 - RNA, 19 nt, Artificial Sequence
  Description of Artificial Sequence: Synthetic oligonucleotide
ugggcuucaacagugugcc

SEQ ID NO: 1288696 - RNA, 19 nt, Artificial Sequence
  Description of Artificial Sequence: Synthetic oligonucleotide
gagucggccggauacggcg

SEQ ID NO: 1288697 - RNA, 19 nt, Artificial Sequence
  Description of Artificial Sequence: Synthetic oligonucleotide
aaugcuuccaguggacuca

SEQ ID NO: 1288698 - RNA, 19 nt, Artificial Sequence
  Description of Artificial Sequence: Synthetic oligonucleotide
ucggccauaagagaaaguc

SEQ ID NO: 1288699 - RNA, 19 nt, Artificial Sequence
  Description of Artificial Sequence: Synthetic oligonucleotide
uuaaugcccacaacaccgc

SEQ ID NO: 1288700 - RNA, 19 nt, Artificial Sequence
  Description of Artificial Sequence: Synthetic oligonucleotide
aggacagaggagcgaacgc

SEQ ID NO: 1288701 - RNA, 19 nt, Artificial Sequence
  Description of Artificial Sequence: Synthetic oligonucleotide
uccagauagacaugguggu

SEQ ID NO: 1288702 - RNA, 19 nt, Artificial Sequence
  Description of Artificial Sequence: Synthetic oligonucleotide
augauuagagaugaagaga

SEQ ID NO: 1288703 - RNA, 19 nt, Artificial Sequence
  Description of Artificial Sequence: Synthetic oligonucleotide
caguuacauacugacagcg

SEQ ID NO: 1288704 - RNA, 19 nt, Artificial Sequence
  Description of Artificial Sequence: Synthetic oligonucleotide
uuagagaugaagagagauu

SEQ ID NO: 1288705 - RNA, 19 nt, Artificial Sequence
  Description of Artificial Sequence: Synthetic oligonucleotide
agauagacaugguggucac

SEQ ID NO: 1288706 - RNA, 19 nt, Artificial Sequence
  Description of Artificial Sequence: Synthetic oligonucleotide
gauagcauugagguugaug

SEQ ID NO: 1288707 - RNA, 19 nt, Artificial Sequence
  Description of Artificial Sequence: Synthetic oligonucleotide
cacacaccagucacgaggg

SEQ ID NO: 1288708 - RNA, 19 nt, Artificial Sequence
  Description of Artificial Sequence: Synthetic oligonucleotide
cuguuuauuggcagugggc

SEQ ID NO: 1288709 - RNA, 19 nt, Artificial Sequence
  Description of Artificial Sequence: Synthetic oligonucleotide
gauggcagaauuagcauuc

SEQ ID NO: 1288710 - RNA, 19 nt, Artificial Sequence
  Description of Artificial Sequence: Synthetic oligonucleotide
auacugacagcgcuuuaag

SEQ ID NO: 1288711 - RNA, 19 nt, Artificial Sequence
  Description of Artificial Sequence: Synthetic oligonucleotide
accuuaaugcccacaacac

SEQ ID NO: 1288712 - RNA, 19 nt, Artificial Sequence
  Description of Artificial Sequence: Synthetic oligonucleotide
ucucagugccaauggauug

SEQ ID NO: 1288713 - RNA, 19 nt, Artificial Sequence
  Description of Artificial Sequence: Synthetic oligonucleotide
uuccccaaucuuuagcaca

SEQ ID NO: 1288714 - RNA, 19 nt, Artificial Sequence
  Description of Artificial Sequence: Synthetic oligonucleotide
aacgcagcuagagucacca

SEQ ID NO: 1288715 - RNA, 19 nt, Artificial Sequence
  Description of Artificial Sequence: Synthetic oligonucleotide
ucaccucugguuaguaggc

SEQ ID NO: 1288716 - RNA, 19 nt, Artificial Sequence
  Description of Artificial Sequence: Synthetic oligonucleotide
guugauggaugccucuucc

SEQ ID NO: 1288717 - RNA, 19 nt, Artificial Sequence
  Description of Artificial Sequence: Synthetic oligonucleotide
ucuucgguguucucagugc

SEQ ID NO: 1288718 - RNA, 19 nt, Artificial Sequence
  Description of Artificial Sequence: Synthetic oligonucleotide
cauugagguugauggaugc

SEQ ID NO: 1288719 - RNA, 19 nt, Artificial Sequence
  Description of Artificial Sequence: Synthetic oligonucleotide
ucggccuucugguacagug

SEQ ID NO: 1288720 - RNA, 19 nt, Artificial Sequence
  Description of Artificial Sequence: Synthetic oligonucleotide
cagaugcuggcauaacggg

SEQ ID NO: 1288721 - RNA, 19 nt, Artificial Sequence
  Description of Artificial Sequence: Synthetic oligonucleotide
caaugcagggauucacacg

SEQ ID NO: 1288722 - RNA, 19 nt, Artificial Sequence
  Description of Artificial Sequence: Synthetic oligonucleotide
aggaaagugaccccaguaa

SEQ ID NO: 1288723 - RNA, 19 nt, Artificial Sequence
  Description of Artificial Sequence: Synthetic oligonucleotide
cauucagagacaacaccac

SEQ ID NO: 1288724 - RNA, 19 nt, Artificial Sequence
  Description of Artificial Sequence: Synthetic oligonucleotide
cacaacaccgcccuuggac

SEQ ID NO: 1288725 - RNA, 19 nt, Artificial Sequence
  Description of Artificial Sequence: Synthetic oligonucleotide
agauucacuggcugcagcu

SEQ ID NO: 1288726 - RNA, 19 nt, Artificial Sequence
  Description of Artificial Sequence: Synthetic oligonucleotide
agucacgagggcaagagug

SEQ ID NO: 1288727 - RNA, 19 nt, Artificial Sequence
  Description of Artificial Sequence: Synthetic oligonucleotide
ugggguauacuuuccuuga

SEQ ID NO: 1288728 - RNA, 19 nt, Artificial Sequence
  Description of Artificial Sequence: Synthetic oligonucleotide
aguguuucauggaaaagga

SEQ ID NO: 1288729 - RNA, 19 nt, Artificial Sequence
  Description of Artificial Sequence: Synthetic oligonucleotide
agccuuguagacagcagcc

SEQ ID NO: 1288730 - RNA, 19 nt, Artificial Sequence
  Description of Artificial Sequence: Synthetic oligonucleotide
uugagguugauggaugccu

SEQ ID NO: 1288731 - RNA, 19 nt, Artificial Sequence
  Description of Artificial Sequence: Synthetic oligonucleotide
ugagggaguauguucccca

SEQ ID NO: 1288732 - RNA, 19 nt, Artificial Sequence
  Description of Artificial Sequence: Synthetic oligonucleotide
auggauugcaggcgcuugg

SEQ ID NO: 1288733 - RNA, 19 nt, Artificial Sequence
  Description of Artificial Sequence: Synthetic oligonucleotide
ccuggggugaccauguugg

SEQ ID NO: 1288734 - RNA, 19 nt, Artificial Sequence
  Description of Artificial Sequence: Synthetic oligonucleotide
ggcgcguuccaaaagaacg

SEQ ID NO: 1288735 - RNA, 19 nt, Artificial Sequence
  Description of Artificial Sequence: Synthetic oligonucleotide
cacaauucgaugagcgaug

SEQ ID NO: 1288736 - RNA, 19 nt, Artificial Sequence
  Description of Artificial Sequence: Synthetic oligonucleotide
ugugcgacgaagugcugug

SEQ ID NO: 1288737 - RNA, 19 nt, Artificial Sequence
  Description of Artificial Sequence: Synthetic oligonucleotide
aauggauugcaggcgcuug

SEQ ID NO: 1288738 - RNA, 19 nt, Artificial Sequence
  Description of Artificial Sequence: Synthetic oligonucleotide
acaacaccgcccuuggacu

SEQ ID NO: 1288739 - RNA, 19 nt, Artificial Sequence
  Description of Artificial Sequence: Synthetic oligonucleotide
guaggcaugauuagagaug

SEQ ID NO: 1288740 - RNA, 19 nt, Artificial Sequence
  Description of Artificial Sequence: Synthetic oligonucleotide
cuuuagcacacaacgccac

SEQ ID NO: 1288741 - RNA, 19 nt, Artificial Sequence
  Description of Artificial Sequence: Synthetic oligonucleotide
ccauaagagaaagucaagg

SEQ ID NO: 1288742 - RNA, 19 nt, Artificial Sequence
  Description of Artificial Sequence: Synthetic oligonucleotide
ucgcuugauguacuccucc

SEQ ID NO: 1288743 - RNA, 19 nt, Artificial Sequence
  Description of Artificial Sequence: Synthetic oligonucleotide
aaacgccuguucucuucgg

SEQ ID NO: 1288744 - RNA, 19 nt, Artificial Sequence
  Description of Artificial Sequence: Synthetic oligonucleotide
ucgggcuccacaaugggua

SEQ ID NO: 1288745 - RNA, 19 nt, Artificial Sequence
  Description of Artificial Sequence: Synthetic oligonucleotide
auggguacaaugccauucu

SEQ ID NO: 1288746 - RNA, 19 nt, Artificial Sequence
  Description of Artificial Sequence: Synthetic oligonucleotide
ggcaugauuagagaugaag

SEQ ID NO: 1288747 - RNA, 19 nt, Artificial Sequence
  Description of Artificial Sequence: Synthetic oligonucleotide
cccucuugaacacaagugg

SEQ ID NO: 1288748 - RNA, 19 nt, Artificial Sequence
  Description of Artificial Sequence: Synthetic oligonucleotide
cuuagaucaccucugguua

SEQ ID NO: 1288749 - RNA, 19 nt, Artificial Sequence
  Description of Artificial Sequence: Synthetic oligonucleotide
cuucgguguucucagugcc

SEQ ID NO: 1288750 - RNA, 19 nt, Artificial Sequence
  Description of Artificial Sequence: Synthetic oligonucleotide
ugccaauggauugcaggcg

SEQ ID NO: 1288751 - RNA, 19 nt, Artificial Sequence
  Description of Artificial Sequence: Synthetic oligonucleotide
cugacagcgcuuuaaguca

SEQ ID NO: 1288752 - RNA, 19 nt, Artificial Sequence
  Description of Artificial Sequence: Synthetic oligonucleotide
agccuuagaucaccucugg

SEQ ID NO: 1288753 - RNA, 19 nt, Artificial Sequence
  Description of Artificial Sequence: Synthetic oligonucleotide
cugggcacaucguucagac

SEQ ID NO: 1288754 - RNA, 19 nt, Artificial Sequence
  Description of Artificial Sequence: Synthetic oligonucleotide
ugcccuccagacaggaaag

SEQ ID NO: 1288755 - RNA, 19 nt, Artificial Sequence
  Description of Artificial Sequence: Synthetic oligonucleotide
agacugaccacuuggggua

SEQ ID NO: 1288756 - RNA, 19 nt, Artificial Sequence
  Description of Artificial Sequence: Synthetic oligonucleotide
guuaguaggcaugauuaga

SEQ ID NO: 1288757 - RNA, 19 nt, Artificial Sequence
  Description of Artificial Sequence: Synthetic oligonucleotide
ugcgacgaagugcugugac

SEQ ID NO: 1288758 - RNA, 19 nt, Artificial Sequence
  Description of Artificial Sequence: Synthetic oligonucleotide
gguauacuuuccuugacaa

SEQ ID NO: 1288759 - RNA, 19 nt, Artificial Sequence
  Description of Artificial Sequence: Synthetic oligonucleotide
gagauucacuggcugcagc

SEQ ID NO: 1288760 - RNA, 19 nt, Artificial Sequence
  Description of Artificial Sequence: Synthetic oligonucleotide
ccucuugaacacaaguggg

SEQ ID NO: 1288761 - RNA, 19 nt, Artificial Sequence
  Description of Artificial Sequence: Synthetic oligonucleotide
uggaguguugauggggcag

SEQ ID NO: 1288762 - RNA, 19 nt, Artificial Sequence
  Description of Artificial Sequence: Synthetic oligonucleotide
uucaacagugugccuucca

SEQ ID NO: 1288763 - RNA, 19 nt, Artificial Sequence
  Description of Artificial Sequence: Synthetic oligonucleotide
gguuaguaggcaugauuag

SEQ ID NO: 1288764 - RNA, 19 nt, Artificial Sequence
  Description of Artificial Sequence: Synthetic oligonucleotide
acagcgcuuuaagucaugg

SEQ ID NO: 1288765 - RNA, 19 nt, Artificial Sequence
  Description of Artificial Sequence: Synthetic oligonucleotide
aguauguuccccaaucuuu

SEQ ID NO: 1288766 - RNA, 19 nt, Artificial Sequence
  Description of Artificial Sequence: Synthetic oligonucleotide
caaugcuuccaguggacuc

SEQ ID NO: 1288767 - RNA, 19 nt, Artificial Sequence
  Description of Artificial Sequence: Synthetic oligonucleotide
gugccuuccagauagacau

SEQ ID NO: 1288768 - RNA, 19 nt, Artificial Sequence
  Description of Artificial Sequence: Synthetic oligonucleotide
cucuucgguguucucagug

SEQ ID NO: 1288769 - RNA, 19 nt, Artificial Sequence
  Description of Artificial Sequence: Synthetic oligonucleotide
uuccuugacaagcgaggcu

SEQ ID NO: 1288770 - RNA, 19 nt, Artificial Sequence
  Description of Artificial Sequence: Synthetic oligonucleotide
auucgaugagcgaugucag

SEQ ID NO: 1288771 - RNA, 19 nt, Artificial Sequence
  Description of Artificial Sequence: Synthetic oligonucleotide
uuguacugggcacaucguu

SEQ ID NO: 1288772 - RNA, 19 nt, Artificial Sequence
  Description of Artificial Sequence: Synthetic oligonucleotide
guacaaugccauucugcug

SEQ ID NO: 1288773 - RNA, 19 nt, Artificial Sequence
  Description of Artificial Sequence: Synthetic oligonucleotide
agcauugagguugauggau

SEQ ID NO: 1288774 - RNA, 19 nt, Artificial Sequence
  Description of Artificial Sequence: Synthetic oligonucleotide
uugacaagcgaggcuguug

SEQ ID NO: 1288775 - RNA, 19 nt, Artificial Sequence
  Description of Artificial Sequence: Synthetic oligonucleotide
augggauggcagaauuagc

SEQ ID NO: 1288776 - RNA, 19 nt, Artificial Sequence
  Description of Artificial Sequence: Synthetic oligonucleotide
uggguacaaugccauucug

SEQ ID NO: 1288777 - RNA, 19 nt, Artificial Sequence
  Description of Artificial Sequence: Synthetic oligonucleotide
uggucucaccauugguucc

SEQ ID NO: 1288778 - RNA, 19 nt, Artificial Sequence
  Description of Artificial Sequence: Synthetic oligonucleotide
cagaauuagcauucagaga

SEQ ID NO: 1288779 - RNA, 19 nt, Artificial Sequence
  Description of Artificial Sequence: Synthetic oligonucleotide
uuuaagucaugguccccau

SEQ ID NO: 1288780 - RNA, 19 nt, Artificial Sequence
  Description of Artificial Sequence: Synthetic oligonucleotide
cagauagacauggugguca

SEQ ID NO: 1288781 - RNA, 19 nt, Artificial Sequence
  Description of Artificial Sequence: Synthetic oligonucleotide
cagaacccgguucugcggc

SEQ ID NO: 1288782 - RNA, 19 nt, Artificial Sequence
  Description of Artificial Sequence: Synthetic oligonucleotide
uguugggcuucaacagugu

SEQ ID NO: 1288783 - RNA, 19 nt, Artificial Sequence
  Description of Artificial Sequence: Synthetic oligonucleotide
ucuccucauuggaaaauuu

SEQ ID NO: 1288784 - RNA, 19 nt, Artificial Sequence
  Description of Artificial Sequence: Synthetic oligonucleotide
guacugggcacaucguuca

SEQ ID NO: 1288785 - RNA, 19 nt, Artificial Sequence
  Description of Artificial Sequence: Synthetic oligonucleotide
acguccaucaucggccuuc

SEQ ID NO: 1288786 - RNA, 19 nt, Artificial Sequence
  Description of Artificial Sequence: Synthetic oligonucleotide
aagcgaggcuguuggccag

SEQ ID NO: 1288787 - RNA, 19 nt, Artificial Sequence
  Description of Artificial Sequence: Synthetic oligonucleotide
gcaugauuagagaugaaga

SEQ ID NO: 1288788 - RNA, 19 nt, Artificial Sequence
  Description of Artificial Sequence: Synthetic oligonucleotide
aguccuugagugguggucu

SEQ ID NO: 1288789 - RNA, 19 nt, Artificial Sequence
  Description of Artificial Sequence: Synthetic oligonucleotide
uguugauagcauugagguu

SEQ ID NO: 1288790 - RNA, 19 nt, Artificial Sequence
  Description of Artificial Sequence: Synthetic oligonucleotide
gauacggcgguggguaggc

SEQ ID NO: 1288791 - RNA, 19 nt, Artificial Sequence
  Description of Artificial Sequence: Synthetic oligonucleotide
uggcauaacgggccagaac

SEQ ID NO: 1288792 - RNA, 19 nt, Artificial Sequence
  Description of Artificial Sequence: Synthetic oligonucleotide
agaugaagagagauucacu

SEQ ID NO: 1288793 - RNA, 19 nt, Artificial Sequence
  Description of Artificial Sequence: Synthetic oligonucleotide
agaggcaccacgccuuuau

SEQ ID NO: 1288794 - RNA, 19 nt, Artificial Sequence
  Description of Artificial Sequence: Synthetic oligonucleotide
cagccuuagaucaccucug

SEQ ID NO: 1288795 - RNA, 19 nt, Artificial Sequence
  Description of Artificial Sequence: Synthetic oligonucleotide
uucgaugagcgaugucaga

SEQ ID NO: 1288796 - RNA, 19 nt, Artificial Sequence
  Description of Artificial Sequence: Synthetic oligonucleotide
ccucauuggaaaauuucug

SEQ ID NO: 1288797 - RNA, 19 nt, Artificial Sequence
  Description of Artificial Sequence: Synthetic oligonucleotide
ccauucugcuggcagaugc

SEQ ID NO: 1288798 - RNA, 19 nt, Artificial Sequence
  Description of Artificial Sequence: Synthetic oligonucleotide
acaauggguacaaugccau

SEQ ID NO: 1288799 - RNA, 19 nt, Artificial Sequence
  Description of Artificial Sequence: Synthetic oligonucleotide
acgccuguucucuucggug

SEQ ID NO: 1288800 - RNA, 19 nt, Artificial Sequence
  Description of Artificial Sequence: Synthetic oligonucleotide
caccacgccuuuaucuacc

SEQ ID NO: 1288801 - RNA, 19 nt, Artificial Sequence
  Description of Artificial Sequence: Synthetic oligonucleotide
ucugcggcgcguuccaaaa

SEQ ID NO: 1288802 - RNA, 19 nt, Artificial Sequence
  Description of Artificial Sequence: Synthetic oligonucleotide
cacgccuuuaucuaccuua

SEQ ID NO: 1288803 - RNA, 19 nt, Artificial Sequence
  Description of Artificial Sequence: Synthetic oligonucleotide
aagggacguccaucaucgg

SEQ ID NO: 1288804 - RNA, 19 nt, Artificial Sequence
  Description of Artificial Sequence: Synthetic oligonucleotide
aacccgguucugcggcgcg

SEQ ID NO: 1288805 - RNA, 19 nt, Artificial Sequence
  Description of Artificial Sequence: Synthetic oligonucleotide
agaacccgguucugcggcg

SEQ ID NO: 1288806 - RNA, 19 nt, Artificial Sequence
  Description of Artificial Sequence: Synthetic oligonucleotide
gaauuagcauucagagaca

SEQ ID NO: 1288807 - RNA, 19 nt, Artificial Sequence
  Description of Artificial Sequence: Synthetic oligonucleotide
ugacagcgcuuuaagucau

SEQ ID NO: 1288808 - RNA, 19 nt, Artificial Sequence
  Description of Artificial Sequence: Synthetic oligonucleotide
acaauucgaugagcgaugu

SEQ ID NO: 1288809 - RNA, 19 nt, Artificial Sequence
  Description of Artificial Sequence: Synthetic oligonucleotide
gugacaguugccauggcaa

SEQ ID NO: 1288810 - RNA, 19 nt, Artificial Sequence
  Description of Artificial Sequence: Synthetic oligonucleotide
uggggugaccauguugggc

SEQ ID NO: 1288811 - RNA, 19 nt, Artificial Sequence
  Description of Artificial Sequence: Synthetic oligonucleotide
cuggcgguagaaacgccug

SEQ ID NO: 1288812 - RNA, 19 nt, Artificial Sequence
  Description of Artificial Sequence: Synthetic oligonucleotide
gauuagagaugaagagaga

SEQ ID NO: 1288813 - RNA, 19 nt, Artificial Sequence
  Description of Artificial Sequence: Synthetic oligonucleotide
gugacagcacguuccuggc

SEQ ID NO: 1288814 - RNA, 19 nt, Artificial Sequence
  Description of Artificial Sequence: Synthetic oligonucleotide
cuaccuuaaugcccacaac

SEQ ID NO: 1288815 - RNA, 19 nt, Artificial Sequence
  Description of Artificial Sequence: Synthetic oligonucleotide
ggagcgaacgcagcuagag

SEQ ID NO: 1288816 - RNA, 19 nt, Artificial Sequence
  Description of Artificial Sequence: Synthetic oligonucleotide
ccaaucuuuagcacacaac

SEQ ID NO: 1288817 - RNA, 19 nt, Artificial Sequence
  Description of Artificial Sequence: Synthetic oligonucleotide
uggauugcaggcgcuuggc

SEQ ID NO: 1288818 - RNA, 19 nt, Artificial Sequence
  Description of Artificial Sequence: Synthetic oligonucleotide
ccuggaguguugauggggc

SEQ ID NO: 1288819 - RNA, 19 nt, Artificial Sequence
  Description of Artificial Sequence: Synthetic oligonucleotide
agagauucacuggcugcag

SEQ ID NO: 1288820 - RNA, 19 nt, Artificial Sequence
  Description of Artificial Sequence: Synthetic oligonucleotide
agccaguaccuucucaguu

SEQ ID NO: 1288821 - RNA, 19 nt, Artificial Sequence
  Description of Artificial Sequence: Synthetic oligonucleotide
gcgcuuuaagucauggucc

SEQ ID NO: 1288822 - RNA, 19 nt, Artificial Sequence
  Description of Artificial Sequence: Synthetic oligonucleotide
gccaauggauugcaggcgc

SEQ ID NO: 1288823 - RNA, 19 nt, Artificial Sequence
  Description of Artificial Sequence: Synthetic oligonucleotide
uacugggcacaucguucag

SEQ ID NO: 1288824 - RNA, 19 nt, Artificial Sequence
  Description of Artificial Sequence: Synthetic oligonucleotide
cacaacgccacuuggcaaa

SEQ ID NO: 1288825 - RNA, 19 nt, Artificial Sequence
  Description of Artificial Sequence: Synthetic oligonucleotide
ggguacaaugccauucugc

SEQ ID NO: 1288826 - RNA, 19 nt, Artificial Sequence
  Description of Artificial Sequence: Synthetic oligonucleotide
cuggguacaggcauggccu

SEQ ID NO: 1288827 - RNA, 19 nt, Artificial Sequence
  Description of Artificial Sequence: Synthetic oligonucleotide
ccaucagggaggauuucgg

SEQ ID NO: 1288828 - RNA, 19 nt, Artificial Sequence
  Description of Artificial Sequence: Synthetic oligonucleotide
gggaaagagccugaaggcc

SEQ ID NO: 1288829 - RNA, 19 nt, Artificial Sequence
  Description of Artificial Sequence: Synthetic oligonucleotide
ggguauacuuuccuugaca

SEQ ID NO: 1288830 - RNA, 19 nt, Artificial Sequence
  Description of Artificial Sequence: Synthetic oligonucleotide
gcgguggguaggcaaaagg

SEQ ID NO: 1288831 - RNA, 19 nt, Artificial Sequence
  Description of Artificial Sequence: Synthetic oligonucleotide
uggguacaggcauggccug

SEQ ID NO: 1288832 - RNA, 19 nt, Artificial Sequence
  Description of Artificial Sequence: Synthetic oligonucleotide
aucguucagacagcccauc

SEQ ID NO: 1288833 - RNA, 19 nt, Artificial Sequence
  Description of Artificial Sequence: Synthetic oligonucleotide
ggccauaagagaaagucaa

SEQ ID NO: 1288834 - RNA, 19 nt, Artificial Sequence
  Description of Artificial Sequence: Synthetic oligonucleotide
uagaucaccucugguuagu

SEQ ID NO: 1288835 - RNA, 19 nt, Artificial Sequence
  Description of Artificial Sequence: Synthetic oligonucleotide
cauacugacagcgcuuuaa

SEQ ID NO: 1288836 - RNA, 19 nt, Artificial Sequence
  Description of Artificial Sequence: Synthetic oligonucleotide
gugagucggccggauacgg

SEQ ID NO: 1288837 - RNA, 19 nt, Artificial Sequence
  Description of Artificial Sequence: Synthetic oligonucleotide
guagaaacgccuguucucu

SEQ ID NO: 1288838 - RNA, 19 nt, Artificial Sequence
  Description of Artificial Sequence: Synthetic oligonucleotide
cacugugcgacgaagugcu

SEQ ID NO: 1288839 - RNA, 19 nt, Artificial Sequence
  Description of Artificial Sequence: Synthetic oligonucleotide
uacggcgguggguaggcaa

SEQ ID NO: 1288840 - RNA, 19 nt, Artificial Sequence
  Description of Artificial Sequence: Synthetic oligonucleotide
cagacugaccacuuggggu

SEQ ID NO: 1288841 - RNA, 19 nt, Artificial Sequence
  Description of Artificial Sequence: Synthetic oligonucleotide
gacaugguggucacucaga

SEQ ID NO: 1288842 - RNA, 19 nt, Artificial Sequence
  Description of Artificial Sequence: Synthetic oligonucleotide
ccaaugcagggauucacac

SEQ ID NO: 1288843 - RNA, 19 nt, Artificial Sequence
  Description of Artificial Sequence: Synthetic oligonucleotide
agggcucggccauaagaga

SEQ ID NO: 1288844 - RNA, 19 nt, Artificial Sequence
  Description of Artificial Sequence: Synthetic oligonucleotide
cauggcgccggugacagca

SEQ ID NO: 1288845 - RNA, 19 nt, Artificial Sequence
  Description of Artificial Sequence: Synthetic oligonucleotide
gggugagucggccggauac

SEQ ID NO: 1288846 - RNA, 19 nt, Artificial Sequence
  Description of Artificial Sequence: Synthetic oligonucleotide
gcacuuguugauagcauug

SEQ ID NO: 1288847 - RNA, 19 nt, Artificial Sequence
  Description of Artificial Sequence: Synthetic oligonucleotide
uggcgccggugacagcacg

SEQ ID NO: 1288848 - RNA, 19 nt, Artificial Sequence
  Description of Artificial Sequence: Synthetic oligonucleotide
guauguuccccaaucuuua

SEQ ID NO: 1288849 - RNA, 19 nt, Artificial Sequence
  Description of Artificial Sequence: Synthetic oligonucleotide
acgaagugcugugacaguu

SEQ ID NO: 1288850 - RNA, 19 nt, Artificial Sequence
  Description of Artificial Sequence: Synthetic oligonucleotide
ccagacugaccacuugggg

SEQ ID NO: 1288851 - RNA, 19 nt, Artificial Sequence
  Description of Artificial Sequence: Synthetic oligonucleotide
uucugcggcgcguuccaaa

SEQ ID NO: 1288852 - RNA, 19 nt, Artificial Sequence
  Description of Artificial Sequence: Synthetic oligonucleotide
guaggcaggggccuggagu

SEQ ID NO: 1288853 - RNA, 19 nt, Artificial Sequence
  Description of Artificial Sequence: Synthetic oligonucleotide
ccccucuugaacacaagug

SEQ ID NO: 1288854 - RNA, 19 nt, Artificial Sequence
  Description of Artificial Sequence: Synthetic oligonucleotide
ggauucacacggucaucag

SEQ ID NO: 1288855 - RNA, 19 nt, Artificial Sequence
  Description of Artificial Sequence: Synthetic oligonucleotide
gaguguugauggggcagcc

SEQ ID NO: 1288856 - RNA, 19 nt, Artificial Sequence
  Description of Artificial Sequence: Synthetic oligonucleotide
acaacgccacuuggcaaag

SEQ ID NO: 1288857 - RNA, 19 nt, Artificial Sequence
  Description of Artificial Sequence: Synthetic oligonucleotide
ugcuggguauggguagggc

SEQ ID NO: 1288858 - RNA, 19 nt, Artificial Sequence
  Description of Artificial Sequence: Synthetic oligonucleotide
agcacguuccuggcacagg

SEQ ID NO: 1288859 - RNA, 19 nt, Artificial Sequence
  Description of Artificial Sequence: Synthetic oligonucleotide
uaucuaccuuaaugcccac

SEQ ID NO: 1288860 - RNA, 19 nt, Artificial Sequence
  Description of Artificial Sequence: Synthetic oligonucleotide
gagggaguauguuccccaa

SEQ ID NO: 1288861 - RNA, 19 nt, Artificial Sequence
  Description of Artificial Sequence: Synthetic oligonucleotide
acugggcacaucguucaga

SEQ ID NO: 1288862 - RNA, 19 nt, Artificial Sequence
  Description of Artificial Sequence: Synthetic oligonucleotide
gcauugagguugauggaug

SEQ ID NO: 1288863 - RNA, 19 nt, Artificial Sequence
  Description of Artificial Sequence: Synthetic oligonucleotide
ggggugaccauguugggcu

SEQ ID NO: 1288864 - RNA, 19 nt, Artificial Sequence
  Description of Artificial Sequence: Synthetic oligonucleotide
gguugauggaugccucuuc

SEQ ID NO: 1288865 - RNA, 19 nt, Artificial Sequence
  Description of Artificial Sequence: Synthetic oligonucleotide
ggugagucggccggauacg

SEQ ID NO: 1288866 - RNA, 19 nt, Artificial Sequence
  Description of Artificial Sequence: Synthetic oligonucleotide
cugaccacuugggguauac

SEQ ID NO: 1288867 - RNA, 19 nt, Artificial Sequence
  Description of Artificial Sequence: Synthetic oligonucleotide
gucacgagggcaagaguga

SEQ ID NO: 1288868 - RNA, 19 nt, Artificial Sequence
  Description of Artificial Sequence: Synthetic oligonucleotide
ugggcacaucguucagaca

SEQ ID NO: 1288869 - RNA, 19 nt, Artificial Sequence
  Description of Artificial Sequence: Synthetic oligonucleotide
gccauaagagaaagucaag

SEQ ID NO: 1288870 - RNA, 19 nt, Artificial Sequence
  Description of Artificial Sequence: Synthetic oligonucleotide
uccuugagugguggucuca

SEQ ID NO: 1288871 - RNA, 19 nt, Artificial Sequence
  Description of Artificial Sequence: Synthetic oligonucleotide
aucuaccuuaaugcccaca

SEQ ID NO: 1288872 - RNA, 19 nt, Artificial Sequence
  Description of Artificial Sequence: Synthetic oligonucleotide
caguccuugaguggugguc

SEQ ID NO: 1288873 - RNA, 19 nt, Artificial Sequence
  Description of Artificial Sequence: Synthetic oligonucleotide
gcuucaacagugugccuuc

SEQ ID NO: 1288874 - RNA, 19 nt, Artificial Sequence
  Description of Artificial Sequence: Synthetic oligonucleotide
uagaaacgccuguucucuu

SEQ ID NO: 1288875 - RNA, 19 nt, Artificial Sequence
  Description of Artificial Sequence: Synthetic oligonucleotide
caggaaagugaccccagua

SEQ ID NO: 1288876 - RNA, 19 nt, Artificial Sequence
  Description of Artificial Sequence: Synthetic oligonucleotide
cuucugguacaguguuuca

SEQ ID NO: 1288877 - RNA, 19 nt, Artificial Sequence
  Description of Artificial Sequence: Synthetic oligonucleotide
auggcagaauuagcauuca

SEQ ID NO: 1288878 - RNA, 19 nt, Artificial Sequence
  Description of Artificial Sequence: Synthetic oligonucleotide
ccagaacccgguucugcgg

SEQ ID NO: 1288879 - RNA, 19 nt, Artificial Sequence
  Description of Artificial Sequence: Synthetic oligonucleotide
gcuuccaguggacucaucu

SEQ ID NO: 1288880 - RNA, 19 nt, Artificial Sequence
  Description of Artificial Sequence: Synthetic oligonucleotide
gaacgcagcuagagucacc

SEQ ID NO: 1288881 - RNA, 19 nt, Artificial Sequence
  Description of Artificial Sequence: Synthetic oligonucleotide
ggacagaggagcgaacgca

SEQ ID NO: 1288882 - RNA, 19 nt, Artificial Sequence
  Description of Artificial Sequence: Synthetic oligonucleotide
agucggccggauacggcgg

SEQ ID NO: 1288883 - RNA, 19 nt, Artificial Sequence
  Description of Artificial Sequence: Synthetic oligonucleotide
cagugccaauggauugcag

SEQ ID NO: 1288884 - RNA, 19 nt, Artificial Sequence
  Description of Artificial Sequence: Synthetic oligonucleotide
caauucgaugagcgauguc

SEQ ID NO: 1288885 - RNA, 19 nt, Artificial Sequence
  Description of Artificial Sequence: Synthetic oligonucleotide
agcuggcgguagaaacgcc

SEQ ID NO: 1288886 - RNA, 19 nt, Artificial Sequence
  Description of Artificial Sequence: Synthetic oligonucleotide
gaacccgguucugcggcgc

SEQ ID NO: 1288887 - RNA, 19 nt, Artificial Sequence
  Description of Artificial Sequence: Synthetic oligonucleotide
gcacugugcgacgaagugc

SEQ ID NO: 1288888 - RNA, 19 nt, Artificial Sequence
  Description of Artificial Sequence: Synthetic oligonucleotide
ccucugguuaguaggcaug

SEQ ID NO: 1288889 - RNA, 19 nt, Artificial Sequence
  Description of Artificial Sequence: Synthetic oligonucleotide
gggguauacuuuccuugac

SEQ ID NO: 1288890 - RNA, 19 nt, Artificial Sequence
  Description of Artificial Sequence: Synthetic oligonucleotide
ggauacggcgguggguagg

SEQ ID NO: 1288891 - RNA, 19 nt, Artificial Sequence
  Description of Artificial Sequence: Synthetic oligonucleotide
gcacguuccuggcacagga

SEQ ID NO: 1288892 - RNA, 19 nt, Artificial Sequence
  Description of Artificial Sequence: Synthetic oligonucleotide
cgacgaagugcugugacag

SEQ ID NO: 1288893 - RNA, 19 nt, Artificial Sequence
  Description of Artificial Sequence: Synthetic oligonucleotide
agaggagcgaacgcagcua

SEQ ID NO: 1288894 - RNA, 19 nt, Artificial Sequence
  Description of Artificial Sequence: Synthetic oligonucleotide
ugaccacuugggguauacu

SEQ ID NO: 1288895 - RNA, 19 nt, Artificial Sequence
  Description of Artificial Sequence: Synthetic oligonucleotide
gacagcgcuuuaagucaug

SEQ ID NO: 1288896 - RNA, 19 nt, Artificial Sequence
  Description of Artificial Sequence: Synthetic oligonucleotide
gcagcuagagucaccagaa

SEQ ID NO: 1288897 - RNA, 19 nt, Artificial Sequence
  Description of Artificial Sequence: Synthetic oligonucleotide
ggaguauguuccccaaucu

SEQ ID NO: 1288898 - RNA, 19 nt, Artificial Sequence
  Description of Artificial Sequence: Synthetic oligonucleotide
gcgcguuccaaaagaacgc

SEQ ID NO: 1288899 - RNA, 19 nt, Artificial Sequence
  Description of Artificial Sequence: Synthetic oligonucleotide
acgcagcuagagucaccag

SEQ ID NO: 1288900 - RNA, 19 nt, Artificial Sequence
  Description of Artificial Sequence: Synthetic oligonucleotide
gcacacaacgccacuuggc

SEQ ID NO: 1288901 - RNA, 19 nt, Artificial Sequence
  Description of Artificial Sequence: Synthetic oligonucleotide
ccgcccuuggacuugauaa

SEQ ID NO: 1288902 - RNA, 19 nt, Artificial Sequence
  Description of Artificial Sequence: Synthetic oligonucleotide
cuggaguguugauggggca

SEQ ID NO: 1288903 - RNA, 19 nt, Artificial Sequence
  Description of Artificial Sequence: Synthetic oligonucleotide
gcucggccauaagagaaag

SEQ ID NO: 1288904 - RNA, 19 nt, Artificial Sequence
  Description of Artificial Sequence: Synthetic oligonucleotide
cugguuaguaggcaugauu

SEQ ID NO: 1288905 - RNA, 19 nt, Artificial Sequence
  Description of Artificial Sequence: Synthetic oligonucleotide
ggguauggguagggcaugg

SEQ ID NO: 1288906 - RNA, 19 nt, Artificial Sequence
  Description of Artificial Sequence: Synthetic oligonucleotide
acgccuuuaucuaccuuaa

SEQ ID NO: 1288907 - RNA, 19 nt, Artificial Sequence
  Description of Artificial Sequence: Synthetic oligonucleotide
gcacaucguucagacagcc

SEQ ID NO: 1288908 - RNA, 19 nt, Artificial Sequence
  Description of Artificial Sequence: Synthetic oligonucleotide
gccacaauucgaugagcga

SEQ ID NO: 1288909 - RNA, 19 nt, Artificial Sequence
  Description of Artificial Sequence: Synthetic oligonucleotide
agguugauggaugccucuu

SEQ ID NO: 1288910 - RNA, 19 nt, Artificial Sequence
  Description of Artificial Sequence: Synthetic oligonucleotide
gagcgaacgcagcuagagu

SEQ ID NO: 1288911 - RNA, 19 nt, Artificial Sequence
  Description of Artificial Sequence: Synthetic oligonucleotide
cagcacguuccuggcacag

SEQ ID NO: 1288912 - RNA, 19 nt, Artificial Sequence
  Description of Artificial Sequence: Synthetic oligonucleotide
gacgaagugcugugacagu

SEQ ID NO: 1288913 - RNA, 19 nt, Artificial Sequence
  Description of Artificial Sequence: Synthetic oligonucleotide
cugcggcgcguuccaaaag

SEQ ID NO: 1288914 - RNA, 19 nt, Artificial Sequence
  Description of Artificial Sequence: Synthetic oligonucleotide
cuuguacugggcacaucgu

SEQ ID NO: 1288915 - RNA, 19 nt, Artificial Sequence
  Description of Artificial Sequence: Synthetic oligonucleotide
gcgguagaaacgccuguuc

SEQ ID NO: 1288916 - RNA, 19 nt, Artificial Sequence
  Description of Artificial Sequence: Synthetic oligonucleotide
gcaccacgccuuuaucuac

SEQ ID NO: 1288917 - RNA, 19 nt, Artificial Sequence
  Description of Artificial Sequence: Synthetic oligonucleotide
ggcacaucguucagacagc

SEQ ID NO: 1288918 - RNA, 19 nt, Artificial Sequence
  Description of Artificial Sequence: Synthetic oligonucleotide
cagggauucacacggucau

SEQ ID NO: 1288919 - RNA, 19 nt, Artificial Sequence
  Description of Artificial Sequence: Synthetic oligonucleotide
uucuuguacugggcacauc

SEQ ID NO: 1288920 - RNA, 19 nt, Artificial Sequence
  Description of Artificial Sequence: Synthetic oligonucleotide
ccuuagaucaccucugguu

SEQ ID NO: 1288921 - RNA, 19 nt, Artificial Sequence
  Description of Artificial Sequence: Synthetic oligonucleotide
ccagccuuagaucaccucu

SEQ ID NO: 1288922 - RNA, 19 nt, Artificial Sequence
  Description of Artificial Sequence: Synthetic oligonucleotide
ggcucgcuugauguacucc

SEQ ID NO: 1288923 - RNA, 19 nt, Artificial Sequence
  Description of Artificial Sequence: Synthetic oligonucleotide
gguucugcggcgcguucca

SEQ ID NO: 1288924 - RNA, 19 nt, Artificial Sequence
  Description of Artificial Sequence: Synthetic oligonucleotide
ggccggauacggcgguggg

SEQ ID NO: 1288925 - RNA, 19 nt, Artificial Sequence
  Description of Artificial Sequence: Synthetic oligonucleotide
gcgacgaagugcugugaca

SEQ ID NO: 1288926 - RNA, 19 nt, Artificial Sequence
  Description of Artificial Sequence: Synthetic oligonucleotide
gagugguggucucaccauu

SEQ ID NO: 1288927 - RNA, 19 nt, Artificial Sequence
  Description of Artificial Sequence: Synthetic oligonucleotide
guggucacucagagccuug

SEQ ID NO: 1288928 - RNA, 19 nt, Artificial Sequence
  Description of Artificial Sequence: Synthetic oligonucleotide
caucaucggccuucuggua

SEQ ID NO: 1288929 - RNA, 19 nt, Artificial Sequence
  Description of Artificial Sequence: Synthetic oligonucleotide
caaaagaacgcagccuauu

SEQ ID NO: 1288930 - RNA, 19 nt, Artificial Sequence
  Description of Artificial Sequence: Synthetic oligonucleotide
gggcucggccauaagagaa

SEQ ID NO: 1288931 - RNA, 19 nt, Artificial Sequence
  Description of Artificial Sequence: Synthetic oligonucleotide
cuuucccggggccacaauu

SEQ ID NO: 1288932 - RNA, 19 nt, Artificial Sequence
  Description of Artificial Sequence: Synthetic oligonucleotide
ccagauagacauggugguc

SEQ ID NO: 1288933 - RNA, 19 nt, Artificial Sequence
  Description of Artificial Sequence: Synthetic oligonucleotide
gcgaacgcagcuagaguca

SEQ ID NO: 1288934 - RNA, 19 nt, Artificial Sequence
  Description of Artificial Sequence: Synthetic oligonucleotide
cgcagcuagagucaccaga

SEQ ID NO: 1288935 - RNA, 19 nt, Artificial Sequence
  Description of Artificial Sequence: Synthetic oligonucleotide
ucggccggauacggcggug

SEQ ID NO: 1288936 - RNA, 19 nt, Artificial Sequence
  Description of Artificial Sequence: Synthetic oligonucleotide
caucguucagacagcccau

SEQ ID NO: 1288937 - RNA, 19 nt, Artificial Sequence
  Description of Artificial Sequence: Synthetic oligonucleotide
gggccacaauucgaugagc

SEQ ID NO: 1288938 - RNA, 19 nt, Artificial Sequence
  Description of Artificial Sequence: Synthetic oligonucleotide
cugugcgacgaagugcugu

SEQ ID NO: 1288939 - RNA, 19 nt, Artificial Sequence
  Description of Artificial Sequence: Synthetic oligonucleotide
ugaccauguugggcuucaa

SEQ ID NO: 1288940 - RNA, 19 nt, Artificial Sequence
  Description of Artificial Sequence: Synthetic oligonucleotide
aggagcgaacgcagcuaga

SEQ ID NO: 1288941 - RNA, 19 nt, Artificial Sequence
  Description of Artificial Sequence: Synthetic oligonucleotide
cagccaguaccuucucagu

SEQ ID NO: 1288942 - RNA, 19 nt, Artificial Sequence
  Description of Artificial Sequence: Synthetic oligonucleotide
cagcgcuuuaagucauggu

SEQ ID NO: 1288943 - RNA, 19 nt, Artificial Sequence
  Description of Artificial Sequence: Synthetic oligonucleotide
ccacuuggcaaagucagcu

SEQ ID NO: 1288944 - RNA, 19 nt, Artificial Sequence
  Description of Artificial Sequence: Synthetic oligonucleotide
cucggccauaagagaaagu

SEQ ID NO: 1288945 - RNA, 19 nt, Artificial Sequence
  Description of Artificial Sequence: Synthetic oligonucleotide
cggggccacaauucgauga

SEQ ID NO: 1288946 - RNA, 19 nt, Artificial Sequence
  Description of Artificial Sequence: Synthetic oligonucleotide
gaggggugagucggccgga

SEQ ID NO: 1288947 - RNA, 19 nt, Artificial Sequence
  Description of Artificial Sequence: Synthetic oligonucleotide
cauaacgggccagaacauu

SEQ ID NO: 1288948 - RNA, 19 nt, Artificial Sequence
  Description of Artificial Sequence: Synthetic oligonucleotide
gagcgaugucagacagcuc

SEQ ID NO: 1288949 - RNA, 19 nt, Artificial Sequence
  Description of Artificial Sequence: Synthetic oligonucleotide
gugcgacgaagugcuguga

SEQ ID NO: 1288950 - RNA, 19 nt, Artificial Sequence
  Description of Artificial Sequence: Synthetic oligonucleotide
ggguaggcaaaaggacaga

SEQ ID NO: 1288951 - RNA, 19 nt, Artificial Sequence
  Description of Artificial Sequence: Synthetic oligonucleotide
caaugccauucugcuggca

SEQ ID NO: 1288952 - RNA, 19 nt, Artificial Sequence
  Description of Artificial Sequence: Synthetic oligonucleotide
cuucuuguacugggcacau

SEQ ID NO: 1288953 - RNA, 19 nt, Artificial Sequence
  Description of Artificial Sequence: Synthetic oligonucleotide
gcagugggcacuuguugau

SEQ ID NO: 1288954 - RNA, 19 nt, Artificial Sequence
  Description of Artificial Sequence: Synthetic oligonucleotide
ggcucggccauaagagaaa

SEQ ID NO: 1288955 - RNA, 19 nt, Artificial Sequence
  Description of Artificial Sequence: Synthetic oligonucleotide
caauggguacaaugccauu

SEQ ID NO: 1288956 - RNA, 19 nt, Artificial Sequence
  Description of Artificial Sequence: Synthetic oligonucleotide
auacggcgguggguaggca

SEQ ID NO: 1288957 - RNA, 19 nt, Artificial Sequence
  Description of Artificial Sequence: Synthetic oligonucleotide
cgaacgcagcuagagucac

SEQ ID NO: 1288958 - RNA, 19 nt, Artificial Sequence
  Description of Artificial Sequence: Synthetic oligonucleotide
aggcaugauuagagaugaa

SEQ ID NO: 1288959 - RNA, 19 nt, Artificial Sequence
  Description of Artificial Sequence: Synthetic oligonucleotide
cggcgcguuccaaaagaac

SEQ ID NO: 1288960 - RNA, 19 nt, Artificial Sequence
  Description of Artificial Sequence: Synthetic oligonucleotide
ggacguccaucaucggccu

SEQ ID NO: 1288961 - RNA, 19 nt, Artificial Sequence
  Description of Artificial Sequence: Synthetic oligonucleotide
gccuuagaucaccucuggu

SEQ ID NO: 1288962 - RNA, 19 nt, Artificial Sequence
  Description of Artificial Sequence: Synthetic oligonucleotide
cagugggcacuuguugaua

SEQ ID NO: 1288963 - RNA, 19 nt, Artificial Sequence
  Description of Artificial Sequence: Synthetic oligonucleotide
acugaccacuugggguaua

SEQ ID NO: 1288964 - RNA, 19 nt, Artificial Sequence
  Description of Artificial Sequence: Synthetic oligonucleotide
caggggccuggaguguuga

SEQ ID NO: 1288965 - RNA, 19 nt, Artificial Sequence
  Description of Artificial Sequence: Synthetic oligonucleotide
acccgguucugcggcgcgu

SEQ ID NO: 1288966 - RNA, 19 nt, Artificial Sequence
  Description of Artificial Sequence: Synthetic oligonucleotide
caacaccgcccuuggacuu

SEQ ID NO: 1288967 - RNA, 19 nt, Artificial Sequence
  Description of Artificial Sequence: Synthetic oligonucleotide
caauggauugcaggcgcuu

SEQ ID NO: 1288968 - RNA, 19 nt, Artificial Sequence
  Description of Artificial Sequence: Synthetic oligonucleotide
ccggauacggcggugggua

SEQ ID NO: 1288969 - RNA, 19 nt, Artificial Sequence
  Description of Artificial Sequence: Synthetic oligonucleotide
cgggcuccacaauggguac

SEQ ID NO: 1288970 - RNA, 19 nt, Artificial Sequence
  Description of Artificial Sequence: Synthetic oligonucleotide
ccaaaagaacgcagccuau

SEQ ID NO: 1288971 - RNA, 19 nt, Artificial Sequence
  Description of Artificial Sequence: Synthetic oligonucleotide
gucggccggauacggcggu

SEQ ID NO: 1288972 - RNA, 19 nt, Artificial Sequence
  Description of Artificial Sequence: Synthetic oligonucleotide
cuugacaagcgaggcuguu

SEQ ID NO: 1288973 - RNA, 19 nt, Artificial Sequence
  Description of Artificial Sequence: Synthetic oligonucleotide
gggcuccacaauggguaca

SEQ ID NO: 1288974 - RNA, 19 nt, Artificial Sequence
  Description of Artificial Sequence: Synthetic oligonucleotide
ccaauggauugcaggcgcu

SEQ ID NO: 1288975 - RNA, 19 nt, Artificial Sequence
  Description of Artificial Sequence: Synthetic oligonucleotide
gacguccaucaucggccuu

SEQ ID NO: 1288976 - RNA, 19 nt, Artificial Sequence
  Description of Artificial Sequence: Synthetic oligonucleotide
guucugcggcgcguuccaa

SEQ ID NO: 1288977 - RNA, 19 nt, Artificial Sequence
  Description of Artificial Sequence: Synthetic oligonucleotide
ggcgguagaaacgccuguu

SEQ ID NO: 1288978 - RNA, 19 nt, Artificial Sequence
  Description of Artificial Sequence: Synthetic oligonucleotide
cggccggauacggcggugg

SEQ ID NO: 1288979 - RNA, 19 nt, Artificial Sequence
  Description of Artificial Sequence: Synthetic oligonucleotide
gccuguucucuucgguguu

SEQ ID NO: 1288980 - RNA, 19 nt, Artificial Sequence
  Description of Artificial Sequence: Synthetic oligonucleotide
ccacaacaccgcccuugga

SEQ ID NO: 1288981 - RNA, 19 nt, Artificial Sequence
  Description of Artificial Sequence: Synthetic oligonucleotide
ccgguucugcggcgcguuc

SEQ ID NO: 1288982 - RNA, 19 nt, Artificial Sequence
  Description of Artificial Sequence: Synthetic oligonucleotide
ggcgccggugacagcacgu

SEQ ID NO: 1288983 - RNA, 19 nt, Artificial Sequence
  Description of Artificial Sequence: Synthetic oligonucleotide
caacgccacuuggcaaagu

SEQ ID NO: 1288984 - RNA, 19 nt, Artificial Sequence
  Description of Artificial Sequence: Synthetic oligonucleotide
gccggauacggcggugggu

SEQ ID NO: 1288985 - RNA, 19 nt, Artificial Sequence
  Description of Artificial Sequence: Synthetic oligonucleotide
ccacgccuuuaucuaccuu

SEQ ID NO: 1288986 - RNA, 19 nt, Artificial Sequence
  Description of Artificial Sequence: Synthetic oligonucleotide
caccgcccuuggacuugau

SEQ ID NO: 1288987 - RNA, 19 nt, Artificial Sequence
  Description of Artificial Sequence: Synthetic oligonucleotide
cccgguucugcggcgcguu

SEQ ID NO: 1288988 - RNA, 19 nt, Artificial Sequence
  Description of Artificial Sequence: Synthetic oligonucleotide
aaauuccgcagcuacaugc

SEQ ID NO: 1288989 - RNA, 19 nt, Artificial Sequence
  Description of Artificial Sequence: Synthetic oligonucleotide
gauguuaagaaccccaucc

SEQ ID NO: 1288990 - RNA, 19 nt, Artificial Sequence
  Description of Artificial Sequence: Synthetic oligonucleotide
aaggugacgcccuaaacac

SEQ ID NO: 1288991 - RNA, 19 nt, Artificial Sequence
  Description of Artificial Sequence: Synthetic oligonucleotide
aacaucacaacgucaaaag

SEQ ID NO: 1288992 - RNA, 19 nt, Artificial Sequence
  Description of Artificial Sequence: Synthetic oligonucleotide
aaagguuguccuugcaugc

SEQ ID NO: 1288993 - RNA, 19 nt, Artificial Sequence
  Description of Artificial Sequence: Synthetic oligonucleotide
uggcuaaaugucaacaggg

SEQ ID NO: 1288994 - RNA, 19 nt, Artificial Sequence
  Description of Artificial Sequence: Synthetic oligonucleotide
aauuuugucgcugcggagg

SEQ ID NO: 1288995 - RNA, 19 nt, Artificial Sequence
  Description of Artificial Sequence: Synthetic oligonucleotide
uguacggagaggcagaaac

SEQ ID NO: 1288996 - RNA, 19 nt, Artificial Sequence
  Description of Artificial Sequence: Synthetic oligonucleotide
aguggugccacuccaaugg

SEQ ID NO: 1288997 - RNA, 19 nt, Artificial Sequence
  Description of Artificial Sequence: Synthetic oligonucleotide
cucaaaacgauggauaggg

SEQ ID NO: 1288998 - RNA, 19 nt, Artificial Sequence
  Description of Artificial Sequence: Synthetic oligonucleotide
auugccacgggguaccucc

SEQ ID NO: 1288999 - RNA, 19 nt, Artificial Sequence
  Description of Artificial Sequence: Synthetic oligonucleotide
aaacucauaggcauggauc

SEQ ID NO: 1289000 - RNA, 19 nt, Artificial Sequence
  Description of Artificial Sequence: Synthetic oligonucleotide
ugacagggcaauuuugucg

SEQ ID NO: 1289001 - RNA, 19 nt, Artificial Sequence
  Description of Artificial Sequence: Synthetic oligonucleotide
aacuguagccuuuucccgg

SEQ ID NO: 1289002 - RNA, 19 nt, Artificial Sequence
  Description of Artificial Sequence: Synthetic oligonucleotide
uuaggguacaacaucacaa

SEQ ID NO: 1289003 - RNA, 19 nt, Artificial Sequence
  Description of Artificial Sequence: Synthetic oligonucleotide
ugauccucacaaaagagac

SEQ ID NO: 1289004 - RNA, 19 nt, Artificial Sequence
  Description of Artificial Sequence: Synthetic oligonucleotide
aguauccgggacuauuucc

SEQ ID NO: 1289005 - RNA, 19 nt, Artificial Sequence
  Description of Artificial Sequence: Synthetic oligonucleotide
auagggaacuucccggucc

SEQ ID NO: 1289006 - RNA, 19 nt, Artificial Sequence
  Description of Artificial Sequence: Synthetic oligonucleotide
acaucacaacgucaaaagc

SEQ ID NO: 1289007 - RNA, 19 nt, Artificial Sequence
  Description of Artificial Sequence: Synthetic oligonucleotide
agguaaagucaccaagugc

SEQ ID NO: 1289008 - RNA, 19 nt, Artificial Sequence
  Description of Artificial Sequence: Synthetic oligonucleotide
uaaagguuguccuugcaug

SEQ ID NO: 1289009 - RNA, 19 nt, Artificial Sequence
  Description of Artificial Sequence: Synthetic oligonucleotide
agaaacgcaagucaccuug

SEQ ID NO: 1289010 - RNA, 19 nt, Artificial Sequence
  Description of Artificial Sequence: Synthetic oligonucleotide
aacgcaagucaccuugagg

SEQ ID NO: 1289011 - RNA, 19 nt, Artificial Sequence
  Description of Artificial Sequence: Synthetic oligonucleotide
ucauauacccaucccagac

SEQ ID NO: 1289012 - RNA, 19 nt, Artificial Sequence
  Description of Artificial Sequence: Synthetic oligonucleotide
agugcuaggucauagcugu

SEQ ID NO: 1289013 - RNA, 19 nt, Artificial Sequence
  Description of Artificial Sequence: Synthetic oligonucleotide
acgcaagucaccuugaggu

SEQ ID NO: 1289014 - RNA, 19 nt, Artificial Sequence
  Description of Artificial Sequence: Synthetic oligonucleotide
  modified_base (12)..(12): a, c, u, g, unknown or other
aaacaccugccnuaaaggu

SEQ ID NO: 1289015 - RNA, 19 nt, Artificial Sequence
  Description of Artificial Sequence: Synthetic oligonucleotide
aaauuccacucugugcugc

SEQ ID NO: 1289016 - RNA, 19 nt, Artificial Sequence
  Description of Artificial Sequence: Synthetic oligonucleotide
uguaaaacuggcucuuccc

SEQ ID NO: 1289017 - RNA, 19 nt, Artificial Sequence
  Description of Artificial Sequence: Synthetic oligonucleotide
aacagugacgccaagccag

SEQ ID NO: 1289018 - RNA, 19 nt, Artificial Sequence
  Description of Artificial Sequence: Synthetic oligonucleotide
guuaagaaccccauccucg

SEQ ID NO: 1289019 - RNA, 19 nt, Artificial Sequence
  Description of Artificial Sequence: Synthetic oligonucleotide
ugcucaaaacgauggauag

SEQ ID NO: 1289020 - RNA, 19 nt, Artificial Sequence
  Description of Artificial Sequence: Synthetic oligonucleotide
gacagggcaauuuugucgc

SEQ ID NO: 1289021 - RNA, 19 nt, Artificial Sequence
  Description of Artificial Sequence: Synthetic oligonucleotide
ucguagggcacauuggcgg

SEQ ID NO: 1289022 - RNA, 19 nt, Artificial Sequence
  Description of Artificial Sequence: Synthetic oligonucleotide
agaugugacgcacagggug

SEQ ID NO: 1289023 - RNA, 19 nt, Artificial Sequence
  Description of Artificial Sequence: Synthetic oligonucleotide
cauaggggaaagaaagugc

SEQ ID NO: 1289024 - RNA, 19 nt, Artificial Sequence
  Description of Artificial Sequence: Synthetic oligonucleotide
auggauagggaacuucccg

SEQ ID NO: 1289025 - RNA, 19 nt, Artificial Sequence
  Description of Artificial Sequence: Synthetic oligonucleotide
caugccgugaccuugaaga

SEQ ID NO: 1289026 - RNA, 19 nt, Artificial Sequence
  Description of Artificial Sequence: Synthetic oligonucleotide
gguaaucccacacagacac

SEQ ID NO: 1289027 - RNA, 19 nt, Artificial Sequence
  Description of Artificial Sequence: Synthetic oligonucleotide
acugcaaacucauaggcau

SEQ ID NO: 1289028 - RNA, 19 nt, Artificial Sequence
  Description of Artificial Sequence: Synthetic oligonucleotide
uugagguuuggcaaacacc

SEQ ID NO: 1289029 - RNA, 19 nt, Artificial Sequence
  Description of Artificial Sequence: Synthetic oligonucleotide
aauuccgcagcuacaugcc

SEQ ID NO: 1289030 - RNA, 19 nt, Artificial Sequence
  Description of Artificial Sequence: Synthetic oligonucleotide
aaggagaugugacgcacag

SEQ ID NO: 1289031 - RNA, 19 nt, Artificial Sequence
  Description of Artificial Sequence: Synthetic oligonucleotide
auaaugaaggguucuggcu

SEQ ID NO: 1289032 - RNA, 19 nt, Artificial Sequence
  Description of Artificial Sequence: Synthetic oligonucleotide
ucguuaggguacaacauca

SEQ ID NO: 1289033 - RNA, 19 nt, Artificial Sequence
  Description of Artificial Sequence: Synthetic oligonucleotide
caucacaacgucaaaagca

SEQ ID NO: 1289034 - RNA, 19 nt, Artificial Sequence
  Description of Artificial Sequence: Synthetic oligonucleotide
uuguuuccuucauauaccc

SEQ ID NO: 1289035 - RNA, 19 nt, Artificial Sequence
  Description of Artificial Sequence: Synthetic oligonucleotide
agggcaauuuugucgcugc

SEQ ID NO: 1289036 - RNA, 19 nt, Artificial Sequence
  Description of Artificial Sequence: Synthetic oligonucleotide
uccucguuaggguacaaca

SEQ ID NO: 1289037 - RNA, 19 nt, Artificial Sequence
  Description of Artificial Sequence: Synthetic oligonucleotide
acauuggcggugaugaggc

SEQ ID NO: 1289038 - RNA, 19 nt, Artificial Sequence
  Description of Artificial Sequence: Synthetic oligonucleotide
auaaggugacgcccuaaac

SEQ ID NO: 1289039 - RNA, 19 nt, Artificial Sequence
  Description of Artificial Sequence: Synthetic oligonucleotide
aagagagcucugaaaggcc

SEQ ID NO: 1289040 - RNA, 19 nt, Artificial Sequence
  Description of Artificial Sequence: Synthetic oligonucleotide
gguaaagucaccaagugca

SEQ ID NO: 1289041 - RNA, 19 nt, Artificial Sequence
  Description of Artificial Sequence: Synthetic oligonucleotide
agcgcaagggccuguauuc

SEQ ID NO: 1289042 - RNA, 19 nt, Artificial Sequence
  Description of Artificial Sequence: Synthetic oligonucleotide
acuguagccuuuucccggc

SEQ ID NO: 1289043 - RNA, 19 nt, Artificial Sequence
  Description of Artificial Sequence: Synthetic oligonucleotide
uugacacagguaaagucac

SEQ ID NO: 1289044 - RNA, 19 nt, Artificial Sequence
  Description of Artificial Sequence: Synthetic oligonucleotide
uguuaagaaccccauccuc

SEQ ID NO: 1289045 - RNA, 19 nt, Artificial Sequence
  Description of Artificial Sequence: Synthetic oligonucleotide
  modified_base (10)..(10): a, c, u, g, unknown or other
acaccugccnuaaagguug

SEQ ID NO: 1289046 - RNA, 19 nt, Artificial Sequence
  Description of Artificial Sequence: Synthetic oligonucleotide
cucguaagccgccacagcc

SEQ ID NO: 1289047 - RNA, 19 nt, Artificial Sequence
  Description of Artificial Sequence: Synthetic oligonucleotide
aagggguaggcuugucuuc

SEQ ID NO: 1289048 - RNA, 19 nt, Artificial Sequence
  Description of Artificial Sequence: Synthetic oligonucleotide
gaaagugcuaggucauagc

SEQ ID NO: 1289049 - RNA, 19 nt, Artificial Sequence
  Description of Artificial Sequence: Synthetic oligonucleotide
cugaacuucaaauuccgca

SEQ ID NO: 1289050 - RNA, 19 nt, Artificial Sequence
  Description of Artificial Sequence: Synthetic oligonucleotide
aucacaacgucaaaagcag

SEQ ID NO: 1289051 - RNA, 19 nt, Artificial Sequence
  Description of Artificial Sequence: Synthetic oligonucleotide
auugccaagcuucgagagg

SEQ ID NO: 1289052 - RNA, 19 nt, Artificial Sequence
  Description of Artificial Sequence: Synthetic oligonucleotide
aagaaccccauccucguaa

SEQ ID NO: 1289053 - RNA, 19 nt, Artificial Sequence
  Description of Artificial Sequence: Synthetic oligonucleotide
aaacgauggauagggaacu

SEQ ID NO: 1289054 - RNA, 19 nt, Artificial Sequence
  Description of Artificial Sequence: Synthetic oligonucleotide
caggcuauacaccaggauc

SEQ ID NO: 1289055 - RNA, 19 nt, Artificial Sequence
  Description of Artificial Sequence: Synthetic oligonucleotide
aaacgcaagucaccuugag

SEQ ID NO: 1289056 - RNA, 19 nt, Artificial Sequence
  Description of Artificial Sequence: Synthetic oligonucleotide
ucuccuguccauguugccg

SEQ ID NO: 1289057 - RNA, 19 nt, Artificial Sequence
  Description of Artificial Sequence: Synthetic oligonucleotide
ucaccuugagguuuggcaa

SEQ ID NO: 1289058 - RNA, 19 nt, Artificial Sequence
  Description of Artificial Sequence: Synthetic oligonucleotide
gcaacuguagccuuuuccc

SEQ ID NO: 1289059 - RNA, 19 nt, Artificial Sequence
  Description of Artificial Sequence: Synthetic oligonucleotide
gccguagacauaaugaagg

SEQ ID NO: 1289060 - RNA, 19 nt, Artificial Sequence
  Description of Artificial Sequence: Synthetic oligonucleotide
caacuguagccuuuucccg

SEQ ID NO: 1289061 - RNA, 19 nt, Artificial Sequence
  Description of Artificial Sequence: Synthetic oligonucleotide
gaagagccagugcugaaac

SEQ ID NO: 1289062 - RNA, 19 nt, Artificial Sequence
  Description of Artificial Sequence: Synthetic oligonucleotide
agcuacaugccaguacccc

SEQ ID NO: 1289063 - RNA, 19 nt, Artificial Sequence
  Description of Artificial Sequence: Synthetic oligonucleotide
agaaagugcuaggucauag

SEQ ID NO: 1289064 - RNA, 19 nt, Artificial Sequence
  Description of Artificial Sequence: Synthetic oligonucleotide
uauuuccagguagucaacc

SEQ ID NO: 1289065 - RNA, 19 nt, Artificial Sequence
  Description of Artificial Sequence: Synthetic oligonucleotide
ucuccauaaggugacgccc

SEQ ID NO: 1289066 - RNA, 19 nt, Artificial Sequence
  Description of Artificial Sequence: Synthetic oligonucleotide
ucaaauuccgcagcuacau

SEQ ID NO: 1289067 - RNA, 19 nt, Artificial Sequence
  Description of Artificial Sequence: Synthetic oligonucleotide
agaggcagaaacgcaaguc

SEQ ID NO: 1289068 - RNA, 19 nt, Artificial Sequence
  Description of Artificial Sequence: Synthetic oligonucleotide
agguauaccagguccccag

SEQ ID NO: 1289069 - RNA, 19 nt, Artificial Sequence
  Description of Artificial Sequence: Synthetic oligonucleotide
uagacauaaugaaggguuc

SEQ ID NO: 1289070 - RNA, 19 nt, Artificial Sequence
  Description of Artificial Sequence: Synthetic oligonucleotide
cauggaucaggccacgaug

SEQ ID NO: 1289071 - RNA, 19 nt, Artificial Sequence
  Description of Artificial Sequence: Synthetic oligonucleotide
augcgguaaucccacacag

SEQ ID NO: 1289072 - RNA, 19 nt, Artificial Sequence
  Description of Artificial Sequence: Synthetic oligonucleotide
aaggcuguguggccauagg

SEQ ID NO: 1289073 - RNA, 19 nt, Artificial Sequence
  Description of Artificial Sequence: Synthetic oligonucleotide
ugugacuauugaaggagau

SEQ ID NO: 1289074 - RNA, 19 nt, Artificial Sequence
  Description of Artificial Sequence: Synthetic oligonucleotide
uucauauacccaucccaga

SEQ ID NO: 1289075 - RNA, 19 nt, Artificial Sequence
  Description of Artificial Sequence: Synthetic oligonucleotide
aaguggugccacuccaaug

SEQ ID NO: 1289076 - RNA, 19 nt, Artificial Sequence
  Description of Artificial Sequence: Synthetic oligonucleotide
cugaugggcagacagugac

SEQ ID NO: 1289077 - RNA, 19 nt, Artificial Sequence
  Description of Artificial Sequence: Synthetic oligonucleotide
augucaacagggcuuggug

SEQ ID NO: 1289078 - RNA, 19 nt, Artificial Sequence
  Description of Artificial Sequence: Synthetic oligonucleotide
ugagaggggcacuaucccc

SEQ ID NO: 1289079 - RNA, 19 nt, Artificial Sequence
  Description of Artificial Sequence: Synthetic oligonucleotide
ucagaacuccagcuagggc

SEQ ID NO: 1289080 - RNA, 19 nt, Artificial Sequence
  Description of Artificial Sequence: Synthetic oligonucleotide
ggcacuauccccaaauucc

SEQ ID NO: 1289081 - RNA, 19 nt, Artificial Sequence
  Description of Artificial Sequence: Synthetic oligonucleotide
ugcgggaacacagccaaag

SEQ ID NO: 1289082 - RNA, 19 nt, Artificial Sequence
  Description of Artificial Sequence: Synthetic oligonucleotide
caucaugcucaaaacgaug

SEQ ID NO: 1289083 - RNA, 19 nt, Artificial Sequence
  Description of Artificial Sequence: Synthetic oligonucleotide
uuccgcagcuacaugccag

SEQ ID NO: 1289084 - RNA, 19 nt, Artificial Sequence
  Description of Artificial Sequence: Synthetic oligonucleotide
agcagguauaccagguccc

SEQ ID NO: 1289085 - RNA, 19 nt, Artificial Sequence
  Description of Artificial Sequence: Synthetic oligonucleotide
gaugugacgcacagggugc

SEQ ID NO: 1289086 - RNA, 19 nt, Artificial Sequence
  Description of Artificial Sequence: Synthetic oligonucleotide
uaggucauagcuguaccca

SEQ ID NO: 1289087 - RNA, 19 nt, Artificial Sequence
  Description of Artificial Sequence: Synthetic oligonucleotide
gacauaaugaaggguucug

SEQ ID NO: 1289088 - RNA, 19 nt, Artificial Sequence
  Description of Artificial Sequence: Synthetic oligonucleotide
gucaccuugagguuuggca

SEQ ID NO: 1289089 - RNA, 19 nt, Artificial Sequence
  Description of Artificial Sequence: Synthetic oligonucleotide
ccuaaacacugucauaggg

SEQ ID NO: 1289090 - RNA, 19 nt, Artificial Sequence
  Description of Artificial Sequence: Synthetic oligonucleotide
cucguagggcacauuggcg

SEQ ID NO: 1289091 - RNA, 19 nt, Artificial Sequence
  Description of Artificial Sequence: Synthetic oligonucleotide
accccauccucguaagccg

SEQ ID NO: 1289092 - RNA, 19 nt, Artificial Sequence
  Description of Artificial Sequence: Synthetic oligonucleotide
gcagcuacaugccaguacc

SEQ ID NO: 1289093 - RNA, 19 nt, Artificial Sequence
  Description of Artificial Sequence: Synthetic oligonucleotide
ucaaaacgauggauaggga

SEQ ID NO: 1289094 - RNA, 19 nt, Artificial Sequence
  Description of Artificial Sequence: Synthetic oligonucleotide
cuggccguagacauaauga

SEQ ID NO: 1289095 - RNA, 19 nt, Artificial Sequence
  Description of Artificial Sequence: Synthetic oligonucleotide
guuaggguacaacaucaca

SEQ ID NO: 1289096 - RNA, 19 nt, Artificial Sequence
  Description of Artificial Sequence: Synthetic oligonucleotide
cucguuaggguacaacauc

SEQ ID NO: 1289097 - RNA, 19 nt, Artificial Sequence
  Description of Artificial Sequence: Synthetic oligonucleotide
gugacgccaagccagcaag

SEQ ID NO: 1289098 - RNA, 19 nt, Artificial Sequence
  Description of Artificial Sequence: Synthetic oligonucleotide
uggccguagacauaaugaa

SEQ ID NO: 1289099 - RNA, 19 nt, Artificial Sequence
  Description of Artificial Sequence: Synthetic oligonucleotide
acgaugucuccugugacag

SEQ ID NO: 1289100 - RNA, 19 nt, Artificial Sequence
  Description of Artificial Sequence: Synthetic oligonucleotide
agugcauugccaagcuucg

SEQ ID NO: 1289101 - RNA, 19 nt, Artificial Sequence
  Description of Artificial Sequence: Synthetic oligonucleotide
ugaaggagaugugacgcac

SEQ ID NO: 1289102 - RNA, 19 nt, Artificial Sequence
  Description of Artificial Sequence: Synthetic oligonucleotide
gauggauagggaacuuccc

SEQ ID NO: 1289103 - RNA, 19 nt, Artificial Sequence
  Description of Artificial Sequence: Synthetic oligonucleotide
gguaccucccaguauccgg

SEQ ID NO: 1289104 - RNA, 19 nt, Artificial Sequence
  Description of Artificial Sequence: Synthetic oligonucleotide
auuuugucgcugcggaggu

SEQ ID NO: 1289105 - RNA, 19 nt, Artificial Sequence
  Description of Artificial Sequence: Synthetic oligonucleotide
gcccuaaacacugucauag

SEQ ID NO: 1289106 - RNA, 19 nt, Artificial Sequence
  Description of Artificial Sequence: Synthetic oligonucleotide
ugacgccaagccagcaagg

SEQ ID NO: 1289107 - RNA, 19 nt, Artificial Sequence
  Description of Artificial Sequence: Synthetic oligonucleotide
aggcuauacaccaggaucu

SEQ ID NO: 1289108 - RNA, 19 nt, Artificial Sequence
  Description of Artificial Sequence: Synthetic oligonucleotide
cauguugccgcugaccaug

SEQ ID NO: 1289109 - RNA, 19 nt, Artificial Sequence
  Description of Artificial Sequence: Synthetic oligonucleotide
cucagaacuccagcuaggg

SEQ ID NO: 1289110 - RNA, 19 nt, Artificial Sequence
  Description of Artificial Sequence: Synthetic oligonucleotide
ucguaagccgccacagcca

SEQ ID NO: 1289111 - RNA, 19 nt, Artificial Sequence
  Description of Artificial Sequence: Synthetic oligonucleotide
cuuggugcgggaacacagc

SEQ ID NO: 1289112 - RNA, 19 nt, Artificial Sequence
  Description of Artificial Sequence: Synthetic oligonucleotide
gucgcugcggaggucaugg

SEQ ID NO: 1289113 - RNA, 19 nt, Artificial Sequence
  Description of Artificial Sequence: Synthetic oligonucleotide
uguagccuuuucccggcug

SEQ ID NO: 1289114 - RNA, 19 nt, Artificial Sequence
  Description of Artificial Sequence: Synthetic oligonucleotide
gucaaaagcagaagcugug

SEQ ID NO: 1289115 - RNA, 19 nt, Artificial Sequence
  Description of Artificial Sequence: Synthetic oligonucleotide
cugagaggggcacuauccc

SEQ ID NO: 1289116 - RNA, 19 nt, Artificial Sequence
  Description of Artificial Sequence: Synthetic oligonucleotide
gcgguaaucccacacagac

SEQ ID NO: 1289117 - RNA, 19 nt, Artificial Sequence
  Description of Artificial Sequence: Synthetic oligonucleotide
guaccucccaguauccggg

SEQ ID NO: 1289118 - RNA, 19 nt, Artificial Sequence
  Description of Artificial Sequence: Synthetic oligonucleotide
cuacaugccaguaccccuc

SEQ ID NO: 1289119 - RNA, 19 nt, Artificial Sequence
  Description of Artificial Sequence: Synthetic oligonucleotide
gcuggcuaaaugucaacag

SEQ ID NO: 1289120 - RNA, 19 nt, Artificial Sequence
  Description of Artificial Sequence: Synthetic oligonucleotide
ggcaacuguagccuuuucc

SEQ ID NO: 1289121 - RNA, 19 nt, Artificial Sequence
  Description of Artificial Sequence: Synthetic oligonucleotide
acgccaagccagcaagggg

SEQ ID NO: 1289122 - RNA, 19 nt, Artificial Sequence
  Description of Artificial Sequence: Synthetic oligonucleotide
guagacauaaugaaggguu

SEQ ID NO: 1289123 - RNA, 19 nt, Artificial Sequence
  Description of Artificial Sequence: Synthetic oligonucleotide
caauuuugucgcugcggag

SEQ ID NO: 1289124 - RNA, 19 nt, Artificial Sequence
  Description of Artificial Sequence: Synthetic oligonucleotide
gaucaggccacgaugucuc

SEQ ID NO: 1289125 - RNA, 19 nt, Artificial Sequence
  Description of Artificial Sequence: Synthetic oligonucleotide
guacggagaggcagaaacg

SEQ ID NO: 1289126 - RNA, 19 nt, Artificial Sequence
  Description of Artificial Sequence: Synthetic oligonucleotide
  modified_base (11)..(11): a, c, u, g, unknown or other
aacaccugccnuaaagguu

SEQ ID NO: 1289127 - RNA, 19 nt, Artificial Sequence
  Description of Artificial Sequence: Synthetic oligonucleotide
agacauaaugaaggguucu

SEQ ID NO: 1289128 - RNA, 19 nt, Artificial Sequence
  Description of Artificial Sequence: Synthetic oligonucleotide
ugcgguaaucccacacaga

SEQ ID NO: 1289129 - RNA, 19 nt, Artificial Sequence
  Description of Artificial Sequence: Synthetic oligonucleotide
uccaggucggaguuccgca

SEQ ID NO: 1289130 - RNA, 19 nt, Artificial Sequence
  Description of Artificial Sequence: Synthetic oligonucleotide
uccucguaagccgccacag

SEQ ID NO: 1289131 - RNA, 19 nt, Artificial Sequence
  Description of Artificial Sequence: Synthetic oligonucleotide
cauuuguaaaacuggcucu

SEQ ID NO: 1289132 - RNA, 19 nt, Artificial Sequence
  Description of Artificial Sequence: Synthetic oligonucleotide
cuauacaccaggaucuugu

SEQ ID NO: 1289133 - RNA, 19 nt, Artificial Sequence
  Description of Artificial Sequence: Synthetic oligonucleotide
  modified_base (7)..(7): a, c, u, g, unknown or other
ccugccnuaaagguugucc

SEQ ID NO: 1289134 - RNA, 19 nt, Artificial Sequence
  Description of Artificial Sequence: Synthetic oligonucleotide
uacaugccaguaccccucc

SEQ ID NO: 1289135 - RNA, 19 nt, Artificial Sequence
  Description of Artificial Sequence: Synthetic oligonucleotide
ucaacagggcuuggugcgg

SEQ ID NO: 1289136 - RNA, 19 nt, Artificial Sequence
  Description of Artificial Sequence: Synthetic oligonucleotide
ugcagcucugacauuugua

SEQ ID NO: 1289137 - RNA, 19 nt, Artificial Sequence
  Description of Artificial Sequence: Synthetic oligonucleotide
gauagggaacuucccgguc

SEQ ID NO: 1289138 - RNA, 19 nt, Artificial Sequence
  Description of Artificial Sequence: Synthetic oligonucleotide
caaccuggguggcugagac

SEQ ID NO: 1289139 - RNA, 19 nt, Artificial Sequence
  Description of Artificial Sequence: Synthetic oligonucleotide
gugacuauugaaggagaug

SEQ ID NO: 1289140 - RNA, 19 nt, Artificial Sequence
  Description of Artificial Sequence: Synthetic oligonucleotide
uguguccugggaagggcac

SEQ ID NO: 1289141 - RNA, 19 nt, Artificial Sequence
  Description of Artificial Sequence: Synthetic oligonucleotide
cugcggaggucauggagcc

SEQ ID NO: 1289142 - RNA, 19 nt, Artificial Sequence
  Description of Artificial Sequence: Synthetic oligonucleotide
cuugcaugccgugaccuug

SEQ ID NO: 1289143 - RNA, 19 nt, Artificial Sequence
  Description of Artificial Sequence: Synthetic oligonucleotide
gcggcagacaggaagagag

SEQ ID NO: 1289144 - RNA, 19 nt, Artificial Sequence
  Description of Artificial Sequence: Synthetic oligonucleotide
aucaggccacgaugucucc

SEQ ID NO: 1289145 - RNA, 19 nt, Artificial Sequence
  Description of Artificial Sequence: Synthetic oligonucleotide
uggagccggacucuccugu

SEQ ID NO: 1289146 - RNA, 19 nt, Artificial Sequence
  Description of Artificial Sequence: Synthetic oligonucleotide
acgcccuaaacacugucau

SEQ ID NO: 1289147 - RNA, 19 nt, Artificial Sequence
  Description of Artificial Sequence: Synthetic oligonucleotide
cccaaauuccacucugugc

SEQ ID NO: 1289148 - RNA, 19 nt, Artificial Sequence
  Description of Artificial Sequence: Synthetic oligonucleotide
uugcaugccgugaccuuga

SEQ ID NO: 1289149 - RNA, 19 nt, Artificial Sequence
  Description of Artificial Sequence: Synthetic oligonucleotide
uauacccaucccagacucu

SEQ ID NO: 1289150 - RNA, 19 nt, Artificial Sequence
  Description of Artificial Sequence: Synthetic oligonucleotide
uguguggccauaggccacc

SEQ ID NO: 1289151 - RNA, 19 nt, Artificial Sequence
  Description of Artificial Sequence: Synthetic oligonucleotide
augugacgcacagggugcc

SEQ ID NO: 1289152 - RNA, 19 nt, Artificial Sequence
  Description of Artificial Sequence: Synthetic oligonucleotide
agucaccuugagguuuggc

SEQ ID NO: 1289153 - RNA, 19 nt, Artificial Sequence
  Description of Artificial Sequence: Synthetic oligonucleotide
cugcaaacucauaggcaug

SEQ ID NO: 1289154 - RNA, 19 nt, Artificial Sequence
  Description of Artificial Sequence: Synthetic oligonucleotide
ugacaaucuuccagucauc

SEQ ID NO: 1289155 - RNA, 19 nt, Artificial Sequence
  Description of Artificial Sequence: Synthetic oligonucleotide
guaccccuccucguuaggg

SEQ ID NO: 1289156 - RNA, 19 nt, Artificial Sequence
  Description of Artificial Sequence: Synthetic oligonucleotide
cugacaaucuuccagucau

SEQ ID NO: 1289157 - RNA, 19 nt, Artificial Sequence
  Description of Artificial Sequence: Synthetic oligonucleotide
agggccuguauucuugcau

SEQ ID NO: 1289158 - RNA, 19 nt, Artificial Sequence
  Description of Artificial Sequence: Synthetic oligonucleotide
gcuguacccagccauggug

SEQ ID NO: 1289159 - RNA, 19 nt, Artificial Sequence
  Description of Artificial Sequence: Synthetic oligonucleotide
gaggcagcgcucugcuucc

SEQ ID NO: 1289160 - RNA, 19 nt, Artificial Sequence
  Description of Artificial Sequence: Synthetic oligonucleotide
caugcgguaaucccacaca

SEQ ID NO: 1289161 - RNA, 19 nt, Artificial Sequence
  Description of Artificial Sequence: Synthetic oligonucleotide
gucccggagguugacacag

SEQ ID NO: 1289162 - RNA, 19 nt, Artificial Sequence
  Description of Artificial Sequence: Synthetic oligonucleotide
  modified_base (4)..(4): a, c, u, g, unknown or other
gccnuaaagguuguccuug

SEQ ID NO: 1289163 - RNA, 19 nt, Artificial Sequence
  Description of Artificial Sequence: Synthetic oligonucleotide
  modified_base (5)..(5): a, c, u, g, unknown or other
ugccnuaaagguuguccuu

SEQ ID NO: 1289164 - RNA, 19 nt, Artificial Sequence
  Description of Artificial Sequence: Synthetic oligonucleotide
caaauuccgcagcuacaug

SEQ ID NO: 1289165 - RNA, 19 nt, Artificial Sequence
  Description of Artificial Sequence: Synthetic oligonucleotide
cagcgcucugcuuccaggc

SEQ ID NO: 1289166 - RNA, 19 nt, Artificial Sequence
  Description of Artificial Sequence: Synthetic oligonucleotide
aguaccccuccucguuagg

SEQ ID NO: 1289167 - RNA, 19 nt, Artificial Sequence
  Description of Artificial Sequence: Synthetic oligonucleotide
uguggcaacuguagccuuu

SEQ ID NO: 1289168 - RNA, 19 nt, Artificial Sequence
  Description of Artificial Sequence: Synthetic oligonucleotide
uccgcagcuacaugccagu

SEQ ID NO: 1289169 - RNA, 19 nt, Artificial Sequence
  Description of Artificial Sequence: Synthetic oligonucleotide
uccuugcaugccgugaccu

SEQ ID NO: 1289170 - RNA, 19 nt, Artificial Sequence
  Description of Artificial Sequence: Synthetic oligonucleotide
ugacgcccuaaacacuguc

SEQ ID NO: 1289171 - RNA, 19 nt, Artificial Sequence
  Description of Artificial Sequence: Synthetic oligonucleotide
cgauggauagggaacuucc

SEQ ID NO: 1289172 - RNA, 19 nt, Artificial Sequence
  Description of Artificial Sequence: Synthetic oligonucleotide
ccguagacauaaugaaggg

SEQ ID NO: 1289173 - RNA, 19 nt, Artificial Sequence
  Description of Artificial Sequence: Synthetic oligonucleotide
ucggaguuccgcaccacuu

SEQ ID NO: 1289174 - RNA, 19 nt, Artificial Sequence
  Description of Artificial Sequence: Synthetic oligonucleotide
auagcuguacccagccaug

SEQ ID NO: 1289175 - RNA, 19 nt, Artificial Sequence
  Description of Artificial Sequence: Synthetic oligonucleotide
auuccgcagcuacaugcca

SEQ ID NO: 1289176 - RNA, 19 nt, Artificial Sequence
  Description of Artificial Sequence: Synthetic oligonucleotide
gccgugaccuugaagagcc

SEQ ID NO: 1289177 - RNA, 19 nt, Artificial Sequence
  Description of Artificial Sequence: Synthetic oligonucleotide
guagccuuuucccggcuga

SEQ ID NO: 1289178 - RNA, 19 nt, Artificial Sequence
  Description of Artificial Sequence: Synthetic oligonucleotide
cauaaggugacgcccuaaa

SEQ ID NO: 1289179 - RNA, 19 nt, Artificial Sequence
  Description of Artificial Sequence: Synthetic oligonucleotide
caccaagugcauugccaag

SEQ ID NO: 1289180 - RNA, 19 nt, Artificial Sequence
  Description of Artificial Sequence: Synthetic oligonucleotide
aaaggcaaccuggguggcu

SEQ ID NO: 1289181 - RNA, 19 nt, Artificial Sequence
  Description of Artificial Sequence: Synthetic oligonucleotide
gugccuggagugcaccucc

SEQ ID NO: 1289182 - RNA, 19 nt, Artificial Sequence
  Description of Artificial Sequence: Synthetic oligonucleotide
cacgaugucuccugugaca

SEQ ID NO: 1289183 - RNA, 19 nt, Artificial Sequence
  Description of Artificial Sequence: Synthetic oligonucleotide
caggccacgaugucuccug

SEQ ID NO: 1289184 - RNA, 19 nt, Artificial Sequence
  Description of Artificial Sequence: Synthetic oligonucleotide
aagcuucgagaggcagcgc

SEQ ID NO: 1289185 - RNA, 19 nt, Artificial Sequence
  Description of Artificial Sequence: Synthetic oligonucleotide
gagccggacucuccugucc

SEQ ID NO: 1289186 - RNA, 19 nt, Artificial Sequence
  Description of Artificial Sequence: Synthetic oligonucleotide
cagcuacaugccaguaccc

SEQ ID NO: 1289187 - RNA, 19 nt, Artificial Sequence
  Description of Artificial Sequence: Synthetic oligonucleotide
gaaccccauccucguaagc

SEQ ID NO: 1289188 - RNA, 19 nt, Artificial Sequence
  Description of Artificial Sequence: Synthetic oligonucleotide
acagccaaaggagggcuca

SEQ ID NO: 1289189 - RNA, 19 nt, Artificial Sequence
  Description of Artificial Sequence: Synthetic oligonucleotide
  modified_base (2)..(2): a, c, u, g, unknown or other
cnuaaagguuguccuugca

SEQ ID NO: 1289190 - RNA, 19 nt, Artificial Sequence
  Description of Artificial Sequence: Synthetic oligonucleotide
cacuuuccauggcaucagc

SEQ ID NO: 1289191 - RNA, 19 nt, Artificial Sequence
  Description of Artificial Sequence: Synthetic oligonucleotide
uggcuauugccacggggua

SEQ ID NO: 1289192 - RNA, 19 nt, Artificial Sequence
  Description of Artificial Sequence: Synthetic oligonucleotide
  modified_base (3)..(3): a, c, u, g, unknown or other
ccnuaaagguuguccuugc

SEQ ID NO: 1289193 - RNA, 19 nt, Artificial Sequence
  Description of Artificial Sequence: Synthetic oligonucleotide
gacgcccuaaacacuguca

SEQ ID NO: 1289194 - RNA, 19 nt, Artificial Sequence
  Description of Artificial Sequence: Synthetic oligonucleotide
caguauccgggacuauuuc

SEQ ID NO: 1289195 - RNA, 19 nt, Artificial Sequence
  Description of Artificial Sequence: Synthetic oligonucleotide
gcucaaaacgauggauagg

SEQ ID NO: 1289196 - RNA, 19 nt, Artificial Sequence
  Description of Artificial Sequence: Synthetic oligonucleotide
caggucggaguuccgcacc

SEQ ID NO: 1289197 - RNA, 19 nt, Artificial Sequence
  Description of Artificial Sequence: Synthetic oligonucleotide
aggagaugugacgcacagg

SEQ ID NO: 1289198 - RNA, 19 nt, Artificial Sequence
  Description of Artificial Sequence: Synthetic oligonucleotide
gcuaaaugucaacagggcu

SEQ ID NO: 1289199 - RNA, 19 nt, Artificial Sequence
  Description of Artificial Sequence: Synthetic oligonucleotide
ggccguagacauaaugaag

SEQ ID NO: 1289200 - RNA, 19 nt, Artificial Sequence
  Description of Artificial Sequence: Synthetic oligonucleotide
ugucccggagguugacaca

SEQ ID NO: 1289201 - RNA, 19 nt, Artificial Sequence
  Description of Artificial Sequence: Synthetic oligonucleotide
gaaggagaugugacgcaca

SEQ ID NO: 1289202 - RNA, 19 nt, Artificial Sequence
  Description of Artificial Sequence: Synthetic oligonucleotide
uucgagaggcagcgcucug

SEQ ID NO: 1289203 - RNA, 19 nt, Artificial Sequence
  Description of Artificial Sequence: Synthetic oligonucleotide
uccauaaggugacgcccua

SEQ ID NO: 1289204 - RNA, 19 nt, Artificial Sequence
  Description of Artificial Sequence: Synthetic oligonucleotide
gcuggccguagacauaaug

SEQ ID NO: 1289205 - RNA, 19 nt, Artificial Sequence
  Description of Artificial Sequence: Synthetic oligonucleotide
  modified_base (6)..(6): a, c, u, g, unknown or other
cugccnuaaagguuguccu

SEQ ID NO: 1289206 - RNA, 19 nt, Artificial Sequence
  Description of Artificial Sequence: Synthetic oligonucleotide
agccggacucuccugucca

SEQ ID NO: 1289207 - RNA, 19 nt, Artificial Sequence
  Description of Artificial Sequence: Synthetic oligonucleotide
gguugggagggcugucccg

SEQ ID NO: 1289208 - RNA, 19 nt, Artificial Sequence
  Description of Artificial Sequence: Synthetic oligonucleotide
uguggcaggcuggccguag

SEQ ID NO: 1289209 - RNA, 19 nt, Artificial Sequence
  Description of Artificial Sequence: Synthetic oligonucleotide
gggcacuauccccaaauuc

SEQ ID NO: 1289210 - RNA, 19 nt, Artificial Sequence
  Description of Artificial Sequence: Synthetic oligonucleotide
ccggcugagcgcaagggcc

SEQ ID NO: 1289211 - RNA, 19 nt, Artificial Sequence
  Description of Artificial Sequence: Synthetic oligonucleotide
gguauaccagguccccagc

SEQ ID NO: 1289212 - RNA, 19 nt, Artificial Sequence
  Description of Artificial Sequence: Synthetic oligonucleotide
cuuuucccggcugagcgca

SEQ ID NO: 1289213 - RNA, 19 nt, Artificial Sequence
  Description of Artificial Sequence: Synthetic oligonucleotide
aggucggaguuccgcacca

SEQ ID NO: 1289214 - RNA, 19 nt, Artificial Sequence
  Description of Artificial Sequence: Synthetic oligonucleotide
caaggcuguguggccauag

SEQ ID NO: 1289215 - RNA, 19 nt, Artificial Sequence
  Description of Artificial Sequence: Synthetic oligonucleotide
acagggaaguggugccacu

SEQ ID NO: 1289216 - RNA, 19 nt, Artificial Sequence
  Description of Artificial Sequence: Synthetic oligonucleotide
cauauacccaucccagacu

SEQ ID NO: 1289217 - RNA, 19 nt, Artificial Sequence
  Description of Artificial Sequence: Synthetic oligonucleotide
agcgcucugcuuccaggcu

SEQ ID NO: 1289218 - RNA, 19 nt, Artificial Sequence
  Description of Artificial Sequence: Synthetic oligonucleotide
uuucccggcugagcgcaag

SEQ ID NO: 1289219 - RNA, 19 nt, Artificial Sequence
  Description of Artificial Sequence: Synthetic oligonucleotide
aggcuggccguagacauaa

SEQ ID NO: 1289220 - RNA, 19 nt, Artificial Sequence
  Description of Artificial Sequence: Synthetic oligonucleotide
aacgauggauagggaacuu

SEQ ID NO: 1289221 - RNA, 19 nt, Artificial Sequence
  Description of Artificial Sequence: Synthetic oligonucleotide
ugccaagcuucgagaggca

SEQ ID NO: 1289222 - RNA, 19 nt, Artificial Sequence
  Description of Artificial Sequence: Synthetic oligonucleotide
cccuaaacacugucauagg

SEQ ID NO: 1289223 - RNA, 19 nt, Artificial Sequence
  Description of Artificial Sequence: Synthetic oligonucleotide
ugccaguaccccuccucgu

SEQ ID NO: 1289224 - RNA, 19 nt, Artificial Sequence
  Description of Artificial Sequence: Synthetic oligonucleotide
gcaccacuuucucguaggg

SEQ ID NO: 1289225 - RNA, 19 nt, Artificial Sequence
  Description of Artificial Sequence: Synthetic oligonucleotide
cagggcaauuuugucgcug

SEQ ID NO: 1289226 - RNA, 19 nt, Artificial Sequence
  Description of Artificial Sequence: Synthetic oligonucleotide
guggcuauugccacggggu

SEQ ID NO: 1289227 - RNA, 19 nt, Artificial Sequence
  Description of Artificial Sequence: Synthetic oligonucleotide
gucauccaucuggacugcg

SEQ ID NO: 1289228 - RNA, 19 nt, Artificial Sequence
  Description of Artificial Sequence: Synthetic oligonucleotide
uugccacgggguaccuccc

SEQ ID NO: 1289229 - RNA, 19 nt, Artificial Sequence
  Description of Artificial Sequence: Synthetic oligonucleotide
ggaguuccgcaccacuuuc

SEQ ID NO: 1289230 - RNA, 19 nt, Artificial Sequence
  Description of Artificial Sequence: Synthetic oligonucleotide
caaacucauaggcauggau

SEQ ID NO: 1289231 - RNA, 19 nt, Artificial Sequence
  Description of Artificial Sequence: Synthetic oligonucleotide
ccgcugaccaugagguugg

SEQ ID NO: 1289232 - RNA, 19 nt, Artificial Sequence
  Description of Artificial Sequence: Synthetic oligonucleotide
ugagcgcaagggccuguau

SEQ ID NO: 1289233 - RNA, 19 nt, Artificial Sequence
  Description of Artificial Sequence: Synthetic oligonucleotide
cauccucguaagccgccac

SEQ ID NO: 1289234 - RNA, 19 nt, Artificial Sequence
  Description of Artificial Sequence: Synthetic oligonucleotide
cuguacccagccauggugu

SEQ ID NO: 1289235 - RNA, 19 nt, Artificial Sequence
  Description of Artificial Sequence: Synthetic oligonucleotide
ugccacgggguaccuccca

SEQ ID NO: 1289236 - RNA, 19 nt, Artificial Sequence
  Description of Artificial Sequence: Synthetic oligonucleotide
cgggacuauuuccagguag

SEQ ID NO: 1289237 - RNA, 19 nt, Artificial Sequence
  Description of Artificial Sequence: Synthetic oligonucleotide
agcuagggcaggguggcaa

SEQ ID NO: 1289238 - RNA, 19 nt, Artificial Sequence
  Description of Artificial Sequence: Synthetic oligonucleotide
agccagcgagcuguugauc

SEQ ID NO: 1289239 - RNA, 19 nt, Artificial Sequence
  Description of Artificial Sequence: Synthetic oligonucleotide
cuccucguuaggguacaac

SEQ ID NO: 1289240 - RNA, 19 nt, Artificial Sequence
  Description of Artificial Sequence: Synthetic oligonucleotide
caccuugagguuuggcaaa

SEQ ID NO: 1289241 - RNA, 19 nt, Artificial Sequence
  Description of Artificial Sequence: Synthetic oligonucleotide
cagggaaguggugccacuc

SEQ ID NO: 1289242 - RNA, 19 nt, Artificial Sequence
  Description of Artificial Sequence: Synthetic oligonucleotide
guagggcacauuggcggug

SEQ ID NO: 1289243 - RNA, 19 nt, Artificial Sequence
  Description of Artificial Sequence: Synthetic oligonucleotide
cggagguugacacagguaa

SEQ ID NO: 1289244 - RNA, 19 nt, Artificial Sequence
  Description of Artificial Sequence: Synthetic oligonucleotide
cuccauaaggugacgcccu

SEQ ID NO: 1289245 - RNA, 19 nt, Artificial Sequence
  Description of Artificial Sequence: Synthetic oligonucleotide
caagggguaggcuugucuu

SEQ ID NO: 1289246 - RNA, 19 nt, Artificial Sequence
  Description of Artificial Sequence: Synthetic oligonucleotide
agcggcagacaggaagaga

SEQ ID NO: 1289247 - RNA, 19 nt, Artificial Sequence
  Description of Artificial Sequence: Synthetic oligonucleotide
ggcucaugcgguaauccca

SEQ ID NO: 1289248 - RNA, 19 nt, Artificial Sequence
  Description of Artificial Sequence: Synthetic oligonucleotide
gcagguauaccaggucccc

SEQ ID NO: 1289249 - RNA, 19 nt, Artificial Sequence
  Description of Artificial Sequence: Synthetic oligonucleotide
uggcaacuguagccuuuuc

SEQ ID NO: 1289250 - RNA, 19 nt, Artificial Sequence
  Description of Artificial Sequence: Synthetic oligonucleotide
gcucaugcgguaaucccac

SEQ ID NO: 1289251 - RNA, 19 nt, Artificial Sequence
  Description of Artificial Sequence: Synthetic oligonucleotide
acgggguaccucccaguau

SEQ ID NO: 1289252 - RNA, 19 nt, Artificial Sequence
  Description of Artificial Sequence: Synthetic oligonucleotide
ugcaugccgugaccuugaa

SEQ ID NO: 1289253 - RNA, 19 nt, Artificial Sequence
  Description of Artificial Sequence: Synthetic oligonucleotide
gcugagacauccagacaug

SEQ ID NO: 1289254 - RNA, 19 nt, Artificial Sequence
  Description of Artificial Sequence: Synthetic oligonucleotide
ccuggagugcaccucccac

SEQ ID NO: 1289255 - RNA, 19 nt, Artificial Sequence
  Description of Artificial Sequence: Synthetic oligonucleotide
guguccugggaagggcacc

SEQ ID NO: 1289256 - RNA, 19 nt, Artificial Sequence
  Description of Artificial Sequence: Synthetic oligonucleotide
uauugccacgggguaccuc

SEQ ID NO: 1289257 - RNA, 19 nt, Artificial Sequence
  Description of Artificial Sequence: Synthetic oligonucleotide
cauggagccggacucuccu

SEQ ID NO: 1289258 - RNA, 19 nt, Artificial Sequence
  Description of Artificial Sequence: Synthetic oligonucleotide
uuuucccggcugagcgcaa

SEQ ID NO: 1289259 - RNA, 19 nt, Artificial Sequence
  Description of Artificial Sequence: Synthetic oligonucleotide
  modified_base (8)..(8): a, c, u, g, unknown or other
accugccnuaaagguuguc

SEQ ID NO: 1289260 - RNA, 19 nt, Artificial Sequence
  Description of Artificial Sequence: Synthetic oligonucleotide
cagggugccuggagugcac

SEQ ID NO: 1289261 - RNA, 19 nt, Artificial Sequence
  Description of Artificial Sequence: Synthetic oligonucleotide
uuuugucgcugcggagguc

SEQ ID NO: 1289262 - RNA, 19 nt, Artificial Sequence
  Description of Artificial Sequence: Synthetic oligonucleotide
caucuggacugcggacacc

SEQ ID NO: 1289263 - RNA, 19 nt, Artificial Sequence
  Description of Artificial Sequence: Synthetic oligonucleotide
gagcgcaagggccuguauu

SEQ ID NO: 1289264 - RNA, 19 nt, Artificial Sequence
  Description of Artificial Sequence: Synthetic oligonucleotide
cguaagccgccacagccag

SEQ ID NO: 1289265 - RNA, 19 nt, Artificial Sequence
  Description of Artificial Sequence: Synthetic oligonucleotide
uccgcaccacuuucucgua

SEQ ID NO: 1289266 - RNA, 19 nt, Artificial Sequence
  Description of Artificial Sequence: Synthetic oligonucleotide
cgggguaccucccaguauc

SEQ ID NO: 1289267 - RNA, 19 nt, Artificial Sequence
  Description of Artificial Sequence: Synthetic oligonucleotide
ggcuauugccacgggguac

SEQ ID NO: 1289268 - RNA, 19 nt, Artificial Sequence
  Description of Artificial Sequence: Synthetic oligonucleotide
agcgagcuguugauccuca

SEQ ID NO: 1289269 - RNA, 19 nt, Artificial Sequence
  Description of Artificial Sequence: Synthetic oligonucleotide
cguuaggguacaacaucac

SEQ ID NO: 1289270 - RNA, 19 nt, Artificial Sequence
  Description of Artificial Sequence: Synthetic oligonucleotide
cccagauguuaagaacccc

SEQ ID NO: 1289271 - RNA, 19 nt, Artificial Sequence
  Description of Artificial Sequence: Synthetic oligonucleotide
gccacgggguaccucccag

SEQ ID NO: 1289272 - RNA, 19 nt, Artificial Sequence
  Description of Artificial Sequence: Synthetic oligonucleotide
gggaacuucccgguccuca

SEQ ID NO: 1289273 - RNA, 19 nt, Artificial Sequence
  Description of Artificial Sequence: Synthetic oligonucleotide
gucggaguuccgcaccacu

SEQ ID NO: 1289274 - RNA, 19 nt, Artificial Sequence
  Description of Artificial Sequence: Synthetic oligonucleotide
ccacgaugucuccugugac

SEQ ID NO: 1289275 - RNA, 19 nt, Artificial Sequence
  Description of Artificial Sequence: Synthetic oligonucleotide
cugagacauccagacaugu

SEQ ID NO: 1289276 - RNA, 19 nt, Artificial Sequence
  Description of Artificial Sequence: Synthetic oligonucleotide
ccccauccucguaagccgc

SEQ ID NO: 1289277 - RNA, 19 nt, Artificial Sequence
  Description of Artificial Sequence: Synthetic oligonucleotide
gugaccuugaagagccagu

SEQ ID NO: 1289278 - RNA, 19 nt, Artificial Sequence
  Description of Artificial Sequence: Synthetic oligonucleotide
gggacuauuuccagguagu

SEQ ID NO: 1289279 - RNA, 19 nt, Artificial Sequence
  Description of Artificial Sequence: Synthetic oligonucleotide
cacgggguaccucccagua

SEQ ID NO: 1289280 - RNA, 19 nt, Artificial Sequence
  Description of Artificial Sequence: Synthetic oligonucleotide
cucaugcgguaaucccaca

SEQ ID NO: 1289281 - RNA, 19 nt, Artificial Sequence
  Description of Artificial Sequence: Synthetic oligonucleotide
ccucguaagccgccacagc

SEQ ID NO: 1289282 - RNA, 19 nt, Artificial Sequence
  Description of Artificial Sequence: Synthetic oligonucleotide
cugggcacgggcuggaguu

SEQ ID NO: 1289283 - RNA, 19 nt, Artificial Sequence
  Description of Artificial Sequence: Synthetic oligonucleotide
cccauccucguaagccgcc

SEQ ID NO: 1289284 - RNA, 19 nt, Artificial Sequence
  Description of Artificial Sequence: Synthetic oligonucleotide
gaguuccgcaccacuuucu

SEQ ID NO: 1289285 - RNA, 19 nt, Artificial Sequence
  Description of Artificial Sequence: Synthetic oligonucleotide
cgcagcuacaugccaguac

SEQ ID NO: 1289286 - RNA, 19 nt, Artificial Sequence
  Description of Artificial Sequence: Synthetic oligonucleotide
cucccaguauccgggacua

SEQ ID NO: 1289287 - RNA, 19 nt, Artificial Sequence
  Description of Artificial Sequence: Synthetic oligonucleotide
gccgccacagccagcgagc

SEQ ID NO: 1289288 - RNA, 19 nt, Artificial Sequence
  Description of Artificial Sequence: Synthetic oligonucleotide
cuucgagaggcagcgcucu

SEQ ID NO: 1289289 - RNA, 19 nt, Artificial Sequence
  Description of Artificial Sequence: Synthetic oligonucleotide
cacugucauaggggaaaga

SEQ ID NO: 1289290 - RNA, 19 nt, Artificial Sequence
  Description of Artificial Sequence: Synthetic oligonucleotide
ggugccuggagugcaccuc

SEQ ID NO: 1289291 - RNA, 19 nt, Artificial Sequence
  Description of Artificial Sequence: Synthetic oligonucleotide
ggagccggacucuccuguc

SEQ ID NO: 1289292 - RNA, 19 nt, Artificial Sequence
  Description of Artificial Sequence: Synthetic oligonucleotide
gcagacagugacagggcaa

SEQ ID NO: 1289293 - RNA, 19 nt, Artificial Sequence
  Description of Artificial Sequence: Synthetic oligonucleotide
ccccuccucguuaggguac

SEQ ID NO: 1289294 - RNA, 19 nt, Artificial Sequence
  Description of Artificial Sequence: Synthetic oligonucleotide
gguguacggagaggcagaa

SEQ ID NO: 1289295 - RNA, 19 nt, Artificial Sequence
  Description of Artificial Sequence: Synthetic oligonucleotide
gcuucgagaggcagcgcuc

SEQ ID NO: 1289296 - RNA, 19 nt, Artificial Sequence
  Description of Artificial Sequence: Synthetic oligonucleotide
ccgcaccacuuucucguag

SEQ ID NO: 1289297 - RNA, 19 nt, Artificial Sequence
  Description of Artificial Sequence: Synthetic oligonucleotide
agcugggcacgggcuggag

SEQ ID NO: 1289298 - RNA, 19 nt, Artificial Sequence
  Description of Artificial Sequence: Synthetic oligonucleotide
gcauggaucaggccacgau

SEQ ID NO: 1289299 - RNA, 19 nt, Artificial Sequence
  Description of Artificial Sequence: Synthetic oligonucleotide
ccucguuaggguacaacau

SEQ ID NO: 1289300 - RNA, 19 nt, Artificial Sequence
  Description of Artificial Sequence: Synthetic oligonucleotide
gcgagcuguugauccucac

SEQ ID NO: 1289301 - RNA, 19 nt, Artificial Sequence
  Description of Artificial Sequence: Synthetic oligonucleotide
ggcuuggugcgggaacaca

SEQ ID NO: 1289302 - RNA, 19 nt, Artificial Sequence
  Description of Artificial Sequence: Synthetic oligonucleotide
ucccaguauccgggacuau

SEQ ID NO: 1289303 - RNA, 19 nt, Artificial Sequence
  Description of Artificial Sequence: Synthetic oligonucleotide
guguacggagaggcagaaa

SEQ ID NO: 1289304 - RNA, 19 nt, Artificial Sequence
  Description of Artificial Sequence: Synthetic oligonucleotide
  modified_base (15)..(15): a, c, u, g, unknown or other
ggcaaacaccugccnuaaa

SEQ ID NO: 1289305 - RNA, 19 nt, Artificial Sequence
  Description of Artificial Sequence: Synthetic oligonucleotide
ccaguauccgggacuauuu

SEQ ID NO: 1289306 - RNA, 19 nt, Artificial Sequence
  Description of Artificial Sequence: Synthetic oligonucleotide
cagugacgccaagccagca

SEQ ID NO: 1289307 - RNA, 19 nt, Artificial Sequence
  Description of Artificial Sequence: Synthetic oligonucleotide
gcugaccaugagguuggga

SEQ ID NO: 1289308 - RNA, 19 nt, Artificial Sequence
  Description of Artificial Sequence: Synthetic oligonucleotide
ggcugagcgcaagggccug

SEQ ID NO: 1289309 - RNA, 19 nt, Artificial Sequence
  Description of Artificial Sequence: Synthetic oligonucleotide
ggcauggaucaggccacga

SEQ ID NO: 1289310 - RNA, 19 nt, Artificial Sequence
  Description of Artificial Sequence: Synthetic oligonucleotide
ccggacucuccuguccaug

SEQ ID NO: 1289311 - RNA, 19 nt, Artificial Sequence
  Description of Artificial Sequence: Synthetic oligonucleotide
ggcggugaugaggcuguga

SEQ ID NO: 1289312 - RNA, 19 nt, Artificial Sequence
  Description of Artificial Sequence: Synthetic oligonucleotide
gcugucccggagguugaca

SEQ ID NO: 1289313 - RNA, 19 nt, Artificial Sequence
  Description of Artificial Sequence: Synthetic oligonucleotide
ggguggcaacagugacgcc

SEQ ID NO: 1289314 - RNA, 19 nt, Artificial Sequence
  Description of Artificial Sequence: Synthetic oligonucleotide
ggucauggagccggacucu

SEQ ID NO: 1289315 - RNA, 19 nt, Artificial Sequence
  Description of Artificial Sequence: Synthetic oligonucleotide
cugccaugggcuggcuaaa

SEQ ID NO: 1289316 - RNA, 19 nt, Artificial Sequence
  Description of Artificial Sequence: Synthetic oligonucleotide
  modified_base (9)..(9): a, c, u, g, unknown or other
caccugccnuaaagguugu

SEQ ID NO: 1289317 - RNA, 19 nt, Artificial Sequence
  Description of Artificial Sequence: Synthetic oligonucleotide
cugagcgcaagggccugua

SEQ ID NO: 1289318 - RNA, 19 nt, Artificial Sequence
  Description of Artificial Sequence: Synthetic oligonucleotide
gggcuuggugcgggaacac

SEQ ID NO: 1289319 - RNA, 19 nt, Artificial Sequence
  Description of Artificial Sequence: Synthetic oligonucleotide
ggggcacuauccccaaauu

SEQ ID NO: 1289320 - RNA, 19 nt, Artificial Sequence
  Description of Artificial Sequence: Synthetic oligonucleotide
cuguagccuuuucccggcu

SEQ ID NO: 1289321 - RNA, 19 nt, Artificial Sequence
  Description of Artificial Sequence: Synthetic oligonucleotide
ccuguccauguugccgcug

SEQ ID NO: 1289322 - RNA, 19 nt, Artificial Sequence
  Description of Artificial Sequence: Synthetic oligonucleotide
aggcagcgcucugcuucca

SEQ ID NO: 1289323 - RNA, 19 nt, Artificial Sequence
  Description of Artificial Sequence: Synthetic oligonucleotide
ccaggcuauacaccaggau

SEQ ID NO: 1289324 - RNA, 19 nt, Artificial Sequence
  Description of Artificial Sequence: Synthetic oligonucleotide
gggugccuggagugcaccu

SEQ ID NO: 1289325 - RNA, 19 nt, Artificial Sequence
  Description of Artificial Sequence: Synthetic oligonucleotide
ccccacugacaaucuucca

SEQ ID NO: 1289326 - RNA, 19 nt, Artificial Sequence
  Description of Artificial Sequence: Synthetic oligonucleotide
ccauaaggugacgcccuaa

SEQ ID NO: 1289327 - RNA, 19 nt, Artificial Sequence
  Description of Artificial Sequence: Synthetic oligonucleotide
cuccugugacaggcaaagu

SEQ ID NO: 1289328 - RNA, 19 nt, Artificial Sequence
  Description of Artificial Sequence: Synthetic oligonucleotide
ggcuauacaccaggaucuu

SEQ ID NO: 1289329 - RNA, 19 nt, Artificial Sequence
  Description of Artificial Sequence: Synthetic oligonucleotide
cagcuagggcaggguggca

SEQ ID NO: 1289330 - RNA, 19 nt, Artificial Sequence
  Description of Artificial Sequence: Synthetic oligonucleotide
gcgcaagggccuguauucu

SEQ ID NO: 1289331 - RNA, 19 nt, Artificial Sequence
  Description of Artificial Sequence: Synthetic oligonucleotide
ggccccugcaguggguagu

SEQ ID NO: 1289332 - RNA, 19 nt, Artificial Sequence
  Description of Artificial Sequence: Synthetic oligonucleotide
cgcccuaaacacugucaua

SEQ ID NO: 1289333 - RNA, 19 nt, Artificial Sequence
  Description of Artificial Sequence: Synthetic oligonucleotide
cccaguauccgggacuauu

SEQ ID NO: 1289334 - RNA, 19 nt, Artificial Sequence
  Description of Artificial Sequence: Synthetic oligonucleotide
ccuugcaugccgugaccuu

SEQ ID NO: 1289335 - RNA, 19 nt, Artificial Sequence
  Description of Artificial Sequence: Synthetic oligonucleotide
ccgggacuauuuccaggua

SEQ ID NO: 1289336 - RNA, 19 nt, Artificial Sequence
  Description of Artificial Sequence: Synthetic oligonucleotide
cgcaagucaccuugagguu

SEQ ID NO: 1289337 - RNA, 19 nt, Artificial Sequence
  Description of Artificial Sequence: Synthetic oligonucleotide
gcugagcgcaagggccugu

SEQ ID NO: 1289338 - RNA, 19 nt, Artificial Sequence
  Description of Artificial Sequence: Synthetic oligonucleotide
cgcaagggccuguauucuu

SEQ ID NO: 1289339 - RNA, 19 nt, Artificial Sequence
  Description of Artificial Sequence: Synthetic oligonucleotide
ccgcagcuacaugccagua

SEQ ID NO: 1289340 - RNA, 19 nt, Artificial Sequence
  Description of Artificial Sequence: Synthetic oligonucleotide
ccuccucguuaggguacaa

SEQ ID NO: 1289341 - RNA, 19 nt, Artificial Sequence
  Description of Artificial Sequence: Synthetic oligonucleotide
ggcuggccguagacauaau

SEQ ID NO: 1289342 - RNA, 19 nt, Artificial Sequence
  Description of Artificial Sequence: Synthetic oligonucleotide
uuaagaguggaacacagca

SEQ ID NO: 1289343 - RNA, 19 nt, Artificial Sequence
  Description of Artificial Sequence: Synthetic oligonucleotide
aagaagucggagcauauag

SEQ ID NO: 1289344 - RNA, 19 nt, Artificial Sequence
  Description of Artificial Sequence: Synthetic oligonucleotide
ucaaagguagcauugaggu

SEQ ID NO: 1289345 - RNA, 19 nt, Artificial Sequence
  Description of Artificial Sequence: Synthetic oligonucleotide
guaacuacaucaaagguag

SEQ ID NO: 1289346 - RNA, 19 nt, Artificial Sequence
  Description of Artificial Sequence: Synthetic oligonucleotide
aauccuucugaguugaccu

SEQ ID NO: 1289347 - RNA, 19 nt, Artificial Sequence
  Description of Artificial Sequence: Synthetic oligonucleotide
gauggcucgacucaagcgg

SEQ ID NO: 1289348 - RNA, 19 nt, Artificial Sequence
  Description of Artificial Sequence: Synthetic oligonucleotide
ucuuuaacuugucagccag

SEQ ID NO: 1289349 - RNA, 19 nt, Artificial Sequence
  Description of Artificial Sequence: Synthetic oligonucleotide
cugaauucuacacuguggg

SEQ ID NO: 1289350 - RNA, 19 nt, Artificial Sequence
  Description of Artificial Sequence: Synthetic oligonucleotide
aaauccuucugaguugacc

SEQ ID NO: 1289351 - RNA, 19 nt, Artificial Sequence
  Description of Artificial Sequence: Synthetic oligonucleotide
uuugucagcacucuguaaa

SEQ ID NO: 1289352 - RNA, 19 nt, Artificial Sequence
  Description of Artificial Sequence: Synthetic oligonucleotide
uucugcauccaauacaccc

SEQ ID NO: 1289353 - RNA, 19 nt, Artificial Sequence
  Description of Artificial Sequence: Synthetic oligonucleotide
acuaauuggagacacgacu

SEQ ID NO: 1289354 - RNA, 19 nt, Artificial Sequence
  Description of Artificial Sequence: Synthetic oligonucleotide
ucuuggacuacuaauugga

SEQ ID NO: 1289355 - RNA, 19 nt, Artificial Sequence
  Description of Artificial Sequence: Synthetic oligonucleotide
uuagagguggccaaguccu

SEQ ID NO: 1289356 - RNA, 19 nt, Artificial Sequence
  Description of Artificial Sequence: Synthetic oligonucleotide
gaagucggagcauauagug

SEQ ID NO: 1289357 - RNA, 19 nt, Artificial Sequence
  Description of Artificial Sequence: Synthetic oligonucleotide
aagcuuauugaugauagcu

SEQ ID NO: 1289358 - RNA, 19 nt, Artificial Sequence
  Description of Artificial Sequence: Synthetic oligonucleotide
auugcguucuucuagugug

SEQ ID NO: 1289359 - RNA, 19 nt, Artificial Sequence
  Description of Artificial Sequence: Synthetic oligonucleotide
auauagugcacagagcgcg

SEQ ID NO: 1289360 - RNA, 19 nt, Artificial Sequence
  Description of Artificial Sequence: Synthetic oligonucleotide
ucuagugugucccguagag

SEQ ID NO: 1289361 - RNA, 19 nt, Artificial Sequence
  Description of Artificial Sequence: Synthetic oligonucleotide
uauucuuaccacaucugug

SEQ ID NO: 1289362 - RNA, 19 nt, Artificial Sequence
  Description of Artificial Sequence: Synthetic oligonucleotide
aauucauucuuuaaguaau

SEQ ID NO: 1289363 - RNA, 19 nt, Artificial Sequence
  Description of Artificial Sequence: Synthetic oligonucleotide
aaagccuauucuuaccaca

SEQ ID NO: 1289364 - RNA, 19 nt, Artificial Sequence
  Description of Artificial Sequence: Synthetic oligonucleotide
uagagugucgauaaugguc

SEQ ID NO: 1289365 - RNA, 19 nt, Artificial Sequence
  Description of Artificial Sequence: Synthetic oligonucleotide
ucuuucuugagggacacgc

SEQ ID NO: 1289366 - RNA, 19 nt, Artificial Sequence
  Description of Artificial Sequence: Synthetic oligonucleotide
gcuggaugaacuuuguucg

SEQ ID NO: 1289367 - RNA, 19 nt, Artificial Sequence
  Description of Artificial Sequence: Synthetic oligonucleotide
ugaucgaagaagucggagc

SEQ ID NO: 1289368 - RNA, 19 nt, Artificial Sequence
  Description of Artificial Sequence: Synthetic oligonucleotide
uguaaauccuucugaguug

SEQ ID NO: 1289369 - RNA, 19 nt, Artificial Sequence
  Description of Artificial Sequence: Synthetic oligonucleotide
uccuauacagcgcuggcca

SEQ ID NO: 1289370 - RNA, 19 nt, Artificial Sequence
  Description of Artificial Sequence: Synthetic oligonucleotide
agcucaauucgcuccaugg

SEQ ID NO: 1289371 - RNA, 19 nt, Artificial Sequence
  Description of Artificial Sequence: Synthetic oligonucleotide
uggagggguaacuacauca

SEQ ID NO: 1289372 - RNA, 19 nt, Artificial Sequence
  Description of Artificial Sequence: Synthetic oligonucleotide
agaccaucaaagccuauuc

SEQ ID NO: 1289373 - RNA, 19 nt, Artificial Sequence
  Description of Artificial Sequence: Synthetic oligonucleotide
gagugaucgaagaagucgg

SEQ ID NO: 1289374 - RNA, 19 nt, Artificial Sequence
  Description of Artificial Sequence: Synthetic oligonucleotide
cuuaacaggcauuggucgg

SEQ ID NO: 1289375 - RNA, 19 nt, Artificial Sequence
  Description of Artificial Sequence: Synthetic oligonucleotide
uuuaagaguggaacacagc

SEQ ID NO: 1289376 - RNA, 19 nt, Artificial Sequence
  Description of Artificial Sequence: Synthetic oligonucleotide
agucggagcauauagugca

SEQ ID NO: 1289377 - RNA, 19 nt, Artificial Sequence
  Description of Artificial Sequence: Synthetic oligonucleotide
uggaguaggagcucaauuc

SEQ ID NO: 1289378 - RNA, 19 nt, Artificial Sequence
  Description of Artificial Sequence: Synthetic oligonucleotide
ucucgcacuuuccaagagg

SEQ ID NO: 1289379 - RNA, 19 nt, Artificial Sequence
  Description of Artificial Sequence: Synthetic oligonucleotide
ucgauaauggucuggcugu

SEQ ID NO: 1289380 - RNA, 19 nt, Artificial Sequence
  Description of Artificial Sequence: Synthetic oligonucleotide
aagucggagcauauagugc

SEQ ID NO: 1289381 - RNA, 19 nt, Artificial Sequence
  Description of Artificial Sequence: Synthetic oligonucleotide
ucgugauuuccuuugucag

SEQ ID NO: 1289382 - RNA, 19 nt, Artificial Sequence
  Description of Artificial Sequence: Synthetic oligonucleotide
cuuagagguggccaagucc

SEQ ID NO: 1289383 - RNA, 19 nt, Artificial Sequence
  Description of Artificial Sequence: Synthetic oligonucleotide
ugauggcucgacucaagcg

SEQ ID NO: 1289384 - RNA, 19 nt, Artificial Sequence
  Description of Artificial Sequence: Synthetic oligonucleotide
gaucgaagaagucggagca

SEQ ID NO: 1289385 - RNA, 19 nt, Artificial Sequence
  Description of Artificial Sequence: Synthetic oligonucleotide
cugcuuggagacuuuaggg

SEQ ID NO: 1289386 - RNA, 19 nt, Artificial Sequence
  Description of Artificial Sequence: Synthetic oligonucleotide
gucgauaauggucuggcug

SEQ ID NO: 1289387 - RNA, 19 nt, Artificial Sequence
  Description of Artificial Sequence: Synthetic oligonucleotide
uuggacuacuaauuggaga

SEQ ID NO: 1289388 - RNA, 19 nt, Artificial Sequence
  Description of Artificial Sequence: Synthetic oligonucleotide
cuucaacuugcucuuagag

SEQ ID NO: 1289389 - RNA, 19 nt, Artificial Sequence
  Description of Artificial Sequence: Synthetic oligonucleotide
uuguucguccuccaagacc

SEQ ID NO: 1289390 - RNA, 19 nt, Artificial Sequence
  Description of Artificial Sequence: Synthetic oligonucleotide
ucuuuaaguaauucugcau

SEQ ID NO: 1289391 - RNA, 19 nt, Artificial Sequence
  Description of Artificial Sequence: Synthetic oligonucleotide
gucagcacucuguaaaucc

SEQ ID NO: 1289392 - RNA, 19 nt, Artificial Sequence
  Description of Artificial Sequence: Synthetic oligonucleotide
uuuaacuugucagccagcu

SEQ ID NO: 1289393 - RNA, 19 nt, Artificial Sequence
  Description of Artificial Sequence: Synthetic oligonucleotide
ucaaaccacuggauuaggc

SEQ ID NO: 1289394 - RNA, 19 nt, Artificial Sequence
  Description of Artificial Sequence: Synthetic oligonucleotide
ugcaacgggagucugcugu

SEQ ID NO: 1289395 - RNA, 19 nt, Artificial Sequence
  Description of Artificial Sequence: Synthetic oligonucleotide
ucucaaaccacuggauuag

SEQ ID NO: 1289396 - RNA, 19 nt, Artificial Sequence
  Description of Artificial Sequence: Synthetic oligonucleotide
aucaaagguagcauugagg

SEQ ID NO: 1289397 - RNA, 19 nt, Artificial Sequence
  Description of Artificial Sequence: Synthetic oligonucleotide
acacgacucugucauuugc

SEQ ID NO: 1289398 - RNA, 19 nt, Artificial Sequence
  Description of Artificial Sequence: Synthetic oligonucleotide
uucaagguuuccugaagca

SEQ ID NO: 1289399 - RNA, 19 nt, Artificial Sequence
  Description of Artificial Sequence: Synthetic oligonucleotide
ugcucacugcaacaggaag

SEQ ID NO: 1289400 - RNA, 19 nt, Artificial Sequence
  Description of Artificial Sequence: Synthetic oligonucleotide
gcuuaacaggcauuggucg

SEQ ID NO: 1289401 - RNA, 19 nt, Artificial Sequence
  Description of Artificial Sequence: Synthetic oligonucleotide
uguuucugaccccgaauug

SEQ ID NO: 1289402 - RNA, 19 nt, Artificial Sequence
  Description of Artificial Sequence: Synthetic oligonucleotide
cauauagugcacagagcgc

SEQ ID NO: 1289403 - RNA, 19 nt, Artificial Sequence
  Description of Artificial Sequence: Synthetic oligonucleotide
agagugucgauaauggucu

SEQ ID NO: 1289404 - RNA, 19 nt, Artificial Sequence
  Description of Artificial Sequence: Synthetic oligonucleotide
cacgucgcgagagugaucg

SEQ ID NO: 1289405 - RNA, 19 nt, Artificial Sequence
  Description of Artificial Sequence: Synthetic oligonucleotide
uucagauucucauacucuu

SEQ ID NO: 1289406 - RNA, 19 nt, Artificial Sequence
  Description of Artificial Sequence: Synthetic oligonucleotide
ugaauucuacacugugggc

SEQ ID NO: 1289407 - RNA, 19 nt, Artificial Sequence
  Description of Artificial Sequence: Synthetic oligonucleotide
acacccaugucucggauca

SEQ ID NO: 1289408 - RNA, 19 nt, Artificial Sequence
  Description of Artificial Sequence: Synthetic oligonucleotide
acgacucugucauuugcuc

SEQ ID NO: 1289409 - RNA, 19 nt, Artificial Sequence
  Description of Artificial Sequence: Synthetic oligonucleotide
agggguaacuacaucaaag

SEQ ID NO: 1289410 - RNA, 19 nt, Artificial Sequence
  Description of Artificial Sequence: Synthetic oligonucleotide
cuugagaacguccugcaca

SEQ ID NO: 1289411 - RNA, 19 nt, Artificial Sequence
  Description of Artificial Sequence: Synthetic oligonucleotide
cucaauucgcuccaugguc

SEQ ID NO: 1289412 - RNA, 19 nt, Artificial Sequence
  Description of Artificial Sequence: Synthetic oligonucleotide
cuuggacuacuaauuggag

SEQ ID NO: 1289413 - RNA, 19 nt, Artificial Sequence
  Description of Artificial Sequence: Synthetic oligonucleotide
uaaggcguucugcagggac

SEQ ID NO: 1289414 - RNA, 19 nt, Artificial Sequence
  Description of Artificial Sequence: Synthetic oligonucleotide
uacuaauuggagacacgac

SEQ ID NO: 1289415 - RNA, 19 nt, Artificial Sequence
  Description of Artificial Sequence: Synthetic oligonucleotide
uugggcuuaacaggcauug

SEQ ID NO: 1289416 - RNA, 19 nt, Artificial Sequence
  Description of Artificial Sequence: Synthetic oligonucleotide
gacuacuaauuggagacac

SEQ ID NO: 1289417 - RNA, 19 nt, Artificial Sequence
  Description of Artificial Sequence: Synthetic oligonucleotide
uccccaaacacuccugggu

SEQ ID NO: 1289418 - RNA, 19 nt, Artificial Sequence
  Description of Artificial Sequence: Synthetic oligonucleotide
caucacugauggauggccg

SEQ ID NO: 1289419 - RNA, 19 nt, Artificial Sequence
  Description of Artificial Sequence: Synthetic oligonucleotide
aggaagguauccaucuugg

SEQ ID NO: 1289420 - RNA, 19 nt, Artificial Sequence
  Description of Artificial Sequence: Synthetic oligonucleotide
gucauuugcucacugcaac

SEQ ID NO: 1289421 - RNA, 19 nt, Artificial Sequence
  Description of Artificial Sequence: Synthetic oligonucleotide
uugccaaccugaauucuac

SEQ ID NO: 1289422 - RNA, 19 nt, Artificial Sequence
  Description of Artificial Sequence: Synthetic oligonucleotide
ugucucaaaccacuggauu

SEQ ID NO: 1289423 - RNA, 19 nt, Artificial Sequence
  Description of Artificial Sequence: Synthetic oligonucleotide
uguccaauucauucuuuaa

SEQ ID NO: 1289424 - RNA, 19 nt, Artificial Sequence
  Description of Artificial Sequence: Synthetic oligonucleotide
ugggcuguuucugaccccg

SEQ ID NO: 1289425 - RNA, 19 nt, Artificial Sequence
  Description of Artificial Sequence: Synthetic oligonucleotide
agcauugaggucaaucuca

SEQ ID NO: 1289426 - RNA, 19 nt, Artificial Sequence
  Description of Artificial Sequence: Synthetic oligonucleotide
cuuuagggaucuucuugag

SEQ ID NO: 1289427 - RNA, 19 nt, Artificial Sequence
  Description of Artificial Sequence: Synthetic oligonucleotide
ucuccuauacagcgcuggc

SEQ ID NO: 1289428 - RNA, 19 nt, Artificial Sequence
  Description of Artificial Sequence: Synthetic oligonucleotide
uuaacaggcauuggucgga

SEQ ID NO: 1289429 - RNA, 19 nt, Artificial Sequence
  Description of Artificial Sequence: Synthetic oligonucleotide
cuacuaauuggagacacga

SEQ ID NO: 1289430 - RNA, 19 nt, Artificial Sequence
  Description of Artificial Sequence: Synthetic oligonucleotide
cucgugauuuccuuuguca

SEQ ID NO: 1289431 - RNA, 19 nt, Artificial Sequence
  Description of Artificial Sequence: Synthetic oligonucleotide
auuggucggaaaauggcug

SEQ ID NO: 1289432 - RNA, 19 nt, Artificial Sequence
  Description of Artificial Sequence: Synthetic oligonucleotide
aggaagaauucacagucuu

SEQ ID NO: 1289433 - RNA, 19 nt, Artificial Sequence
  Description of Artificial Sequence: Synthetic oligonucleotide
ugaguugaccucaguucca

SEQ ID NO: 1289434 - RNA, 19 nt, Artificial Sequence
  Description of Artificial Sequence: Synthetic oligonucleotide
aggagagcgugcccucucc

SEQ ID NO: 1289435 - RNA, 19 nt, Artificial Sequence
  Description of Artificial Sequence: Synthetic oligonucleotide
ucccguagagugucgauaa

SEQ ID NO: 1289436 - RNA, 19 nt, Artificial Sequence
  Description of Artificial Sequence: Synthetic oligonucleotide
acuacaucaaagguagcau

SEQ ID NO: 1289437 - RNA, 19 nt, Artificial Sequence
  Description of Artificial Sequence: Synthetic oligonucleotide
uccgacuuggugcugucuc

SEQ ID NO: 1289438 - RNA, 19 nt, Artificial Sequence
  Description of Artificial Sequence: Synthetic oligonucleotide
uuggucggaaaauggcugu

SEQ ID NO: 1289439 - RNA, 19 nt, Artificial Sequence
  Description of Artificial Sequence: Synthetic oligonucleotide
agugucgauaauggucugg

SEQ ID NO: 1289440 - RNA, 19 nt, Artificial Sequence
  Description of Artificial Sequence: Synthetic oligonucleotide
cuucuagugugucccguag

SEQ ID NO: 1289441 - RNA, 19 nt, Artificial Sequence
  Description of Artificial Sequence: Synthetic oligonucleotide
ucuuagagguggccaaguc

SEQ ID NO: 1289442 - RNA, 19 nt, Artificial Sequence
  Description of Artificial Sequence: Synthetic oligonucleotide
uucuagugugucccguaga

SEQ ID NO: 1289443 - RNA, 19 nt, Artificial Sequence
  Description of Artificial Sequence: Synthetic oligonucleotide
uuccgugcuucuuucagau

SEQ ID NO: 1289444 - RNA, 19 nt, Artificial Sequence
  Description of Artificial Sequence: Synthetic oligonucleotide
cuuggagacuuuagggauc

SEQ ID NO: 1289445 - RNA, 19 nt, Artificial Sequence
  Description of Artificial Sequence: Synthetic oligonucleotide
cucgcacuuuccaagagga

SEQ ID NO: 1289446 - RNA, 19 nt, Artificial Sequence
  Description of Artificial Sequence: Synthetic oligonucleotide
acuacuaauuggagacacg

SEQ ID NO: 1289447 - RNA, 19 nt, Artificial Sequence
  Description of Artificial Sequence: Synthetic oligonucleotide
cucuccuauacagcgcugg

SEQ ID NO: 1289448 - RNA, 19 nt, Artificial Sequence
  Description of Artificial Sequence: Synthetic oligonucleotide
aggcucgugauuuccuuug

SEQ ID NO: 1289449 - RNA, 19 nt, Artificial Sequence
  Description of Artificial Sequence: Synthetic oligonucleotide
guaaauccuucugaguuga

SEQ ID NO: 1289450 - RNA, 19 nt, Artificial Sequence
  Description of Artificial Sequence: Synthetic oligonucleotide
ucucacucucgcacuuucc

SEQ ID NO: 1289451 - RNA, 19 nt, Artificial Sequence
  Description of Artificial Sequence: Synthetic oligonucleotide
gaguuggcgggccuccucc

SEQ ID NO: 1289452 - RNA, 19 nt, Artificial Sequence
  Description of Artificial Sequence: Synthetic oligonucleotide
gugucgauaauggucuggc

SEQ ID NO: 1289453 - RNA, 19 nt, Artificial Sequence
  Description of Artificial Sequence: Synthetic oligonucleotide
aacgggagucugcuguggu

SEQ ID NO: 1289454 - RNA, 19 nt, Artificial Sequence
  Description of Artificial Sequence: Synthetic oligonucleotide
agccuauucuuaccacauc

SEQ ID NO: 1289455 - RNA, 19 nt, Artificial Sequence
  Description of Artificial Sequence: Synthetic oligonucleotide
agaaaagcuuauugaugau

SEQ ID NO: 1289456 - RNA, 19 nt, Artificial Sequence
  Description of Artificial Sequence: Synthetic oligonucleotide
gaguaggagcucaauucgc

SEQ ID NO: 1289457 - RNA, 19 nt, Artificial Sequence
  Description of Artificial Sequence: Synthetic oligonucleotide
uggagacacgacucuguca

SEQ ID NO: 1289458 - RNA, 19 nt, Artificial Sequence
  Description of Artificial Sequence: Synthetic oligonucleotide
gaacguccugcacaggaga

SEQ ID NO: 1289459 - RNA, 19 nt, Artificial Sequence
  Description of Artificial Sequence: Synthetic oligonucleotide
ugcucuuagagguggccaa

SEQ ID NO: 1289460 - RNA, 19 nt, Artificial Sequence
  Description of Artificial Sequence: Synthetic oligonucleotide
aaaccaggcggcugacggu

SEQ ID NO: 1289461 - RNA, 19 nt, Artificial Sequence
  Description of Artificial Sequence: Synthetic oligonucleotide
agcacucuguaaauccuuc

SEQ ID NO: 1289462 - RNA, 19 nt, Artificial Sequence
  Description of Artificial Sequence: Synthetic oligonucleotide
gguaacuacaucaaaggua

SEQ ID NO: 1289463 - RNA, 19 nt, Artificial Sequence
  Description of Artificial Sequence: Synthetic oligonucleotide
gcgcggauaggcaugaugg

SEQ ID NO: 1289464 - RNA, 19 nt, Artificial Sequence
  Description of Artificial Sequence: Synthetic oligonucleotide
agcgcggauaggcaugaug

SEQ ID NO: 1289465 - RNA, 19 nt, Artificial Sequence
  Description of Artificial Sequence: Synthetic oligonucleotide
gcauuccggaugaagaggg

SEQ ID NO: 1289466 - RNA, 19 nt, Artificial Sequence
  Description of Artificial Sequence: Synthetic oligonucleotide
accgcggacugucccacac

SEQ ID NO: 1289467 - RNA, 19 nt, Artificial Sequence
  Description of Artificial Sequence: Synthetic oligonucleotide
cacaucugugcugcaacgg

SEQ ID NO: 1289468 - RNA, 19 nt, Artificial Sequence
  Description of Artificial Sequence: Synthetic oligonucleotide
gugaucgaagaagucggag

SEQ ID NO: 1289469 - RNA, 19 nt, Artificial Sequence
  Description of Artificial Sequence: Synthetic oligonucleotide
ugugcugcaacgggagucu

SEQ ID NO: 1289470 - RNA, 19 nt, Artificial Sequence
  Description of Artificial Sequence: Synthetic oligonucleotide
uaacuacaucaaagguagc

SEQ ID NO: 1289471 - RNA, 19 nt, Artificial Sequence
  Description of Artificial Sequence: Synthetic oligonucleotide
aguaggagcucaauucgcu

SEQ ID NO: 1289472 - RNA, 19 nt, Artificial Sequence
  Description of Artificial Sequence: Synthetic oligonucleotide
cuguaaauccuucugaguu

SEQ ID NO: 1289473 - RNA, 19 nt, Artificial Sequence
  Description of Artificial Sequence: Synthetic oligonucleotide
gugaaaaguguggccacag

SEQ ID NO: 1289474 - RNA, 19 nt, Artificial Sequence
  Description of Artificial Sequence: Synthetic oligonucleotide
agaccgcuggcucuggagu

SEQ ID NO: 1289475 - RNA, 19 nt, Artificial Sequence
  Description of Artificial Sequence: Synthetic oligonucleotide
acucucgcacuuuccaaga

SEQ ID NO: 1289476 - RNA, 19 nt, Artificial Sequence
  Description of Artificial Sequence: Synthetic oligonucleotide
cauuccggaugaagagggg

SEQ ID NO: 1289477 - RNA, 19 nt, Artificial Sequence
  Description of Artificial Sequence: Synthetic oligonucleotide
ucgcgagagugaucgaaga

SEQ ID NO: 1289478 - RNA, 19 nt, Artificial Sequence
  Description of Artificial Sequence: Synthetic oligonucleotide
ucgcacuuuccaagaggag

SEQ ID NO: 1289479 - RNA, 19 nt, Artificial Sequence
  Description of Artificial Sequence: Synthetic oligonucleotide
ugcacaggagagcgugccc

SEQ ID NO: 1289480 - RNA, 19 nt, Artificial Sequence
  Description of Artificial Sequence: Synthetic oligonucleotide
cuauacagcgcuggccacc

SEQ ID NO: 1289481 - RNA, 19 nt, Artificial Sequence
  Description of Artificial Sequence: Synthetic oligonucleotide
gcgagagugaucgaagaag

SEQ ID NO: 1289482 - RNA, 19 nt, Artificial Sequence
  Description of Artificial Sequence: Synthetic oligonucleotide
ucuucuagugugucccgua

SEQ ID NO: 1289483 - RNA, 19 nt, Artificial Sequence
  Description of Artificial Sequence: Synthetic oligonucleotide
uagggaucuucuugagaac

SEQ ID NO: 1289484 - RNA, 19 nt, Artificial Sequence
  Description of Artificial Sequence: Synthetic oligonucleotide
ugucgauaauggucuggcu

SEQ ID NO: 1289485 - RNA, 19 nt, Artificial Sequence
  Description of Artificial Sequence: Synthetic oligonucleotide
auuggagacacgacucugu

SEQ ID NO: 1289486 - RNA, 19 nt, Artificial Sequence
  Description of Artificial Sequence: Synthetic oligonucleotide
uuaggcucgugauuuccuu

SEQ ID NO: 1289487 - RNA, 19 nt, Artificial Sequence
  Description of Artificial Sequence: Synthetic oligonucleotide
acguccugcacaggagagc

SEQ ID NO: 1289488 - RNA, 19 nt, Artificial Sequence
  Description of Artificial Sequence: Synthetic oligonucleotide
cuauucuuaccacaucugu

SEQ ID NO: 1289489 - RNA, 19 nt, Artificial Sequence
  Description of Artificial Sequence: Synthetic oligonucleotide
gcacuuuccaagaggagcc

SEQ ID NO: 1289490 - RNA, 19 nt, Artificial Sequence
  Description of Artificial Sequence: Synthetic oligonucleotide
agaagucggagcauauagu

SEQ ID NO: 1289491 - RNA, 19 nt, Artificial Sequence
  Description of Artificial Sequence: Synthetic oligonucleotide
agcuuauugaugauagcuu

SEQ ID NO: 1289492 - RNA, 19 nt, Artificial Sequence
  Description of Artificial Sequence: Synthetic oligonucleotide
aaggcguucugcagggacu

SEQ ID NO: 1289493 - RNA, 19 nt, Artificial Sequence
  Description of Artificial Sequence: Synthetic oligonucleotide
gucggaaaauggcuguguc

SEQ ID NO: 1289494 - RNA, 19 nt, Artificial Sequence
  Description of Artificial Sequence: Synthetic oligonucleotide
cuccuauacagcgcuggcc

SEQ ID NO: 1289495 - RNA, 19 nt, Artificial Sequence
  Description of Artificial Sequence: Synthetic oligonucleotide
agaacguccugcacaggag

SEQ ID NO: 1289496 - RNA, 19 nt, Artificial Sequence
  Description of Artificial Sequence: Synthetic oligonucleotide
aggagccaucuccccaaac

SEQ ID NO: 1289497 - RNA, 19 nt, Artificial Sequence
  Description of Artificial Sequence: Synthetic oligonucleotide
ggucacuggaggcagguuc

SEQ ID NO: 1289498 - RNA, 19 nt, Artificial Sequence
  Description of Artificial Sequence: Synthetic oligonucleotide
auucgcuccauggucuuca

SEQ ID NO: 1289499 - RNA, 19 nt, Artificial Sequence
  Description of Artificial Sequence: Synthetic oligonucleotide
cauuggucggaaaauggcu

SEQ ID NO: 1289500 - RNA, 19 nt, Artificial Sequence
  Description of Artificial Sequence: Synthetic oligonucleotide
ugccaaccugaauucuaca

SEQ ID NO: 1289501 - RNA, 19 nt, Artificial Sequence
  Description of Artificial Sequence: Synthetic oligonucleotide
ccgaauugcauuccggaug

SEQ ID NO: 1289502 - RNA, 19 nt, Artificial Sequence
  Description of Artificial Sequence: Synthetic oligonucleotide
agacuuuagggaucuucuu

SEQ ID NO: 1289503 - RNA, 19 nt, Artificial Sequence
  Description of Artificial Sequence: Synthetic oligonucleotide
cuguugggcuguuucugac

SEQ ID NO: 1289504 - RNA, 19 nt, Artificial Sequence
  Description of Artificial Sequence: Synthetic oligonucleotide
gucgcgagagugaucgaag

SEQ ID NO: 1289505 - RNA, 19 nt, Artificial Sequence
  Description of Artificial Sequence: Synthetic oligonucleotide
aggucuuggacuacuaauu

SEQ ID NO: 1289506 - RNA, 19 nt, Artificial Sequence
  Description of Artificial Sequence: Synthetic oligonucleotide
ugucagcacucuguaaauc

SEQ ID NO: 1289507 - RNA, 19 nt, Artificial Sequence
  Description of Artificial Sequence: Synthetic oligonucleotide
ccuauucuuaccacaucug

SEQ ID NO: 1289508 - RNA, 19 nt, Artificial Sequence
  Description of Artificial Sequence: Synthetic oligonucleotide
ggcaaagagaacucaggaa

SEQ ID NO: 1289509 - RNA, 19 nt, Artificial Sequence
  Description of Artificial Sequence: Synthetic oligonucleotide
uucuucuagugugucccgu

SEQ ID NO: 1289510 - RNA, 19 nt, Artificial Sequence
  Description of Artificial Sequence: Synthetic oligonucleotide
ugucuugucuaaggcguuc

SEQ ID NO: 1289511 - RNA, 19 nt, Artificial Sequence
  Description of Artificial Sequence: Synthetic oligonucleotide
gagggguaacuacaucaaa

SEQ ID NO: 1289512 - RNA, 19 nt, Artificial Sequence
  Description of Artificial Sequence: Synthetic oligonucleotide
ucacugauggauggccggu

SEQ ID NO: 1289513 - RNA, 19 nt, Artificial Sequence
  Description of Artificial Sequence: Synthetic oligonucleotide
gagagugaucgaagaaguc

SEQ ID NO: 1289514 - RNA, 19 nt, Artificial Sequence
  Description of Artificial Sequence: Synthetic oligonucleotide
gagugucgauaauggucug

SEQ ID NO: 1289515 - RNA, 19 nt, Artificial Sequence
  Description of Artificial Sequence: Synthetic oligonucleotide
acgcaguacacagccagcu

SEQ ID NO: 1289516 - RNA, 19 nt, Artificial Sequence
  Description of Artificial Sequence: Synthetic oligonucleotide
ggagacuuuagggaucuuc

SEQ ID NO: 1289517 - RNA, 19 nt, Artificial Sequence
  Description of Artificial Sequence: Synthetic oligonucleotide
ugagaacguccugcacagg

SEQ ID NO: 1289518 - RNA, 19 nt, Artificial Sequence
  Description of Artificial Sequence: Synthetic oligonucleotide
aguuccucgucuggcucuc

SEQ ID NO: 1289519 - RNA, 19 nt, Artificial Sequence
  Description of Artificial Sequence: Synthetic oligonucleotide
ugcuuacucuuggccuugg

SEQ ID NO: 1289520 - RNA, 19 nt, Artificial Sequence
  Description of Artificial Sequence: Synthetic oligonucleotide
uuccaagaggagccaucuc

SEQ ID NO: 1289521 - RNA, 19 nt, Artificial Sequence
  Description of Artificial Sequence: Synthetic oligonucleotide
gcacagagcgcggauaggc

SEQ ID NO: 1289522 - RNA, 19 nt, Artificial Sequence
  Description of Artificial Sequence: Synthetic oligonucleotide
ccacaucugugcugcaacg

SEQ ID NO: 1289523 - RNA, 19 nt, Artificial Sequence
  Description of Artificial Sequence: Synthetic oligonucleotide
guagagugucgauaauggu

SEQ ID NO: 1289524 - RNA, 19 nt, Artificial Sequence
  Description of Artificial Sequence: Synthetic oligonucleotide
gaagaagucggagcauaua

SEQ ID NO: 1289525 - RNA, 19 nt, Artificial Sequence
  Description of Artificial Sequence: Synthetic oligonucleotide
cacacccaugucucggauc

SEQ ID NO: 1289526 - RNA, 19 nt, Artificial Sequence
  Description of Artificial Sequence: Synthetic oligonucleotide
cgcacuuuccaagaggagc

SEQ ID NO: 1289527 - RNA, 19 nt, Artificial Sequence
  Description of Artificial Sequence: Synthetic oligonucleotide
accccgaauugcauuccgg

SEQ ID NO: 1289528 - RNA, 19 nt, Artificial Sequence
  Description of Artificial Sequence: Synthetic oligonucleotide
aggcagguucaagguuucc

SEQ ID NO: 1289529 - RNA, 19 nt, Artificial Sequence
  Description of Artificial Sequence: Synthetic oligonucleotide
ugucccguagagugucgau

SEQ ID NO: 1289530 - RNA, 19 nt, Artificial Sequence
  Description of Artificial Sequence: Synthetic oligonucleotide
agugaucgaagaagucgga

SEQ ID NO: 1289531 - RNA, 19 nt, Artificial Sequence
  Description of Artificial Sequence: Synthetic oligonucleotide
caacgggagucugcugugg

SEQ ID NO: 1289532 - RNA, 19 nt, Artificial Sequence
  Description of Artificial Sequence: Synthetic oligonucleotide
cuuugucagcacucuguaa

SEQ ID NO: 1289533 - RNA, 19 nt, Artificial Sequence
  Description of Artificial Sequence: Synthetic oligonucleotide
agugugucccguagagugu

SEQ ID NO: 1289534 - RNA, 19 nt, Artificial Sequence
  Description of Artificial Sequence: Synthetic oligonucleotide
cuacaucaaagguagcauu

SEQ ID NO: 1289535 - RNA, 19 nt, Artificial Sequence
  Description of Artificial Sequence: Synthetic oligonucleotide
cacagagcgcggauaggca

SEQ ID NO: 1289536 - RNA, 19 nt, Artificial Sequence
  Description of Artificial Sequence: Synthetic oligonucleotide
cuccaccgcggacuguccc

SEQ ID NO: 1289537 - RNA, 19 nt, Artificial Sequence
  Description of Artificial Sequence: Synthetic oligonucleotide
ggguaacuacaucaaaggu

SEQ ID NO: 1289538 - RNA, 19 nt, Artificial Sequence
  Description of Artificial Sequence: Synthetic oligonucleotide
cauugcguucuucuagugu

SEQ ID NO: 1289539 - RNA, 19 nt, Artificial Sequence
  Description of Artificial Sequence: Synthetic oligonucleotide
aagguagcauugaggucaa

SEQ ID NO: 1289540 - RNA, 19 nt, Artificial Sequence
  Description of Artificial Sequence: Synthetic oligonucleotide
caccucagaccgcuggcuc

SEQ ID NO: 1289541 - RNA, 19 nt, Artificial Sequence
  Description of Artificial Sequence: Synthetic oligonucleotide
cuguuucugaccccgaauu

SEQ ID NO: 1289542 - RNA, 19 nt, Artificial Sequence
  Description of Artificial Sequence: Synthetic oligonucleotide
ccguagagugucgauaaug

SEQ ID NO: 1289543 - RNA, 19 nt, Artificial Sequence
  Description of Artificial Sequence: Synthetic oligonucleotide
aucgaagaagucggagcau

SEQ ID NO: 1289544 - RNA, 19 nt, Artificial Sequence
  Description of Artificial Sequence: Synthetic oligonucleotide
gacuuggugcugucucaaa

SEQ ID NO: 1289545 - RNA, 19 nt, Artificial Sequence
  Description of Artificial Sequence: Synthetic oligonucleotide
guuggcgggccuccuccug

SEQ ID NO: 1289546 - RNA, 19 nt, Artificial Sequence
  Description of Artificial Sequence: Synthetic oligonucleotide
gguauccaucuugggcugg

SEQ ID NO: 1289547 - RNA, 19 nt, Artificial Sequence
  Description of Artificial Sequence: Synthetic oligonucleotide
uccucgucuggcucuccua

SEQ ID NO: 1289548 - RNA, 19 nt, Artificial Sequence
  Description of Artificial Sequence: Synthetic oligonucleotide
gggcuuaacaggcauuggu

SEQ ID NO: 1289549 - RNA, 19 nt, Artificial Sequence
  Description of Artificial Sequence: Synthetic oligonucleotide
guggcauugcguucuucua

SEQ ID NO: 1289550 - RNA, 19 nt, Artificial Sequence
  Description of Artificial Sequence: Synthetic oligonucleotide
gcaacgggagucugcugug

SEQ ID NO: 1289551 - RNA, 19 nt, Artificial Sequence
  Description of Artificial Sequence: Synthetic oligonucleotide
gcauugcguucuucuagug

SEQ ID NO: 1289552 - RNA, 19 nt, Artificial Sequence
  Description of Artificial Sequence: Synthetic oligonucleotide
aggcggcugacggucucac

SEQ ID NO: 1289553 - RNA, 19 nt, Artificial Sequence
  Description of Artificial Sequence: Synthetic oligonucleotide
gugcugucucaaaccacug

SEQ ID NO: 1289554 - RNA, 19 nt, Artificial Sequence
  Description of Artificial Sequence: Synthetic oligonucleotide
ggagcauauagugcacaga

SEQ ID NO: 1289555 - RNA, 19 nt, Artificial Sequence
  Description of Artificial Sequence: Synthetic oligonucleotide
gaccgcuggcucuggagua

SEQ ID NO: 1289556 - RNA, 19 nt, Artificial Sequence
  Description of Artificial Sequence: Synthetic oligonucleotide
gugcccucuccagggagag

SEQ ID NO: 1289557 - RNA, 19 nt, Artificial Sequence
  Description of Artificial Sequence: Synthetic oligonucleotide
gcaacaggaagguauccau

SEQ ID NO: 1289558 - RNA, 19 nt, Artificial Sequence
  Description of Artificial Sequence: Synthetic oligonucleotide
ggcucuccuauacagcgcu

SEQ ID NO: 1289559 - RNA, 19 nt, Artificial Sequence
  Description of Artificial Sequence: Synthetic oligonucleotide
gauaggcaugauggcucga

SEQ ID NO: 1289560 - RNA, 19 nt, Artificial Sequence
  Description of Artificial Sequence: Synthetic oligonucleotide
ggagggguaacuacaucaa

SEQ ID NO: 1289561 - RNA, 19 nt, Artificial Sequence
  Description of Artificial Sequence: Synthetic oligonucleotide
ggacuccacaguggcauug

SEQ ID NO: 1289562 - RNA, 19 nt, Artificial Sequence
  Description of Artificial Sequence: Synthetic oligonucleotide
uucgcuccauggucuucau

SEQ ID NO: 1289563 - RNA, 19 nt, Artificial Sequence
  Description of Artificial Sequence: Synthetic oligonucleotide
ggcagccacgucgcgagag

SEQ ID NO: 1289564 - RNA, 19 nt, Artificial Sequence
  Description of Artificial Sequence: Synthetic oligonucleotide
gcucuuagagguggccaag

SEQ ID NO: 1289565 - RNA, 19 nt, Artificial Sequence
  Description of Artificial Sequence: Synthetic oligonucleotide
agcuccccugaggccuucc

SEQ ID NO: 1289566 - RNA, 19 nt, Artificial Sequence
  Description of Artificial Sequence: Synthetic oligonucleotide
agcgugcccucuccaggga

SEQ ID NO: 1289567 - RNA, 19 nt, Artificial Sequence
  Description of Artificial Sequence: Synthetic oligonucleotide
gcucgugauuuccuuuguc

SEQ ID NO: 1289568 - RNA, 19 nt, Artificial Sequence
  Description of Artificial Sequence: Synthetic oligonucleotide
auuaggcacugcaggugaa

SEQ ID NO: 1289569 - RNA, 19 nt, Artificial Sequence
  Description of Artificial Sequence: Synthetic oligonucleotide
gcucaauucgcuccauggu

SEQ ID NO: 1289570 - RNA, 19 nt, Artificial Sequence
  Description of Artificial Sequence: Synthetic oligonucleotide
cugcaacgggagucugcug

SEQ ID NO: 1289571 - RNA, 19 nt, Artificial Sequence
  Description of Artificial Sequence: Synthetic oligonucleotide
ccuauacagcgcuggccac

SEQ ID NO: 1289572 - RNA, 19 nt, Artificial Sequence
  Description of Artificial Sequence: Synthetic oligonucleotide
cgcggacugucccacaccc

SEQ ID NO: 1289573 - RNA, 19 nt, Artificial Sequence
  Description of Artificial Sequence: Synthetic oligonucleotide
ccaaccugaauucuacacu

SEQ ID NO: 1289574 - RNA, 19 nt, Artificial Sequence
  Description of Artificial Sequence: Synthetic oligonucleotide
ggacuacuaauuggagaca

SEQ ID NO: 1289575 - RNA, 19 nt, Artificial Sequence
  Description of Artificial Sequence: Synthetic oligonucleotide
gucccguagagugucgaua

SEQ ID NO: 1289576 - RNA, 19 nt, Artificial Sequence
  Description of Artificial Sequence: Synthetic oligonucleotide
gcuccccugaggccuuccg

SEQ ID NO: 1289577 - RNA, 19 nt, Artificial Sequence
  Description of Artificial Sequence: Synthetic oligonucleotide
ccccgaauugcauuccgga

SEQ ID NO: 1289578 - RNA, 19 nt, Artificial Sequence
  Description of Artificial Sequence: Synthetic oligonucleotide
agccacgucgcgagaguga

SEQ ID NO: 1289579 - RNA, 19 nt, Artificial Sequence
  Description of Artificial Sequence: Synthetic oligonucleotide
ccaauacacccuccucuuc

SEQ ID NO: 1289580 - RNA, 19 nt, Artificial Sequence
  Description of Artificial Sequence: Synthetic oligonucleotide
gggcaaggucaaagaaaag

SEQ ID NO: 1289581 - RNA, 19 nt, Artificial Sequence
  Description of Artificial Sequence: Synthetic oligonucleotide
cacuuuccaagaggagcca

SEQ ID NO: 1289582 - RNA, 19 nt, Artificial Sequence
  Description of Artificial Sequence: Synthetic oligonucleotide
gcucuugaguuggcgggcc

SEQ ID NO: 1289583 - RNA, 19 nt, Artificial Sequence
  Description of Artificial Sequence: Synthetic oligonucleotide
cgagagugaucgaagaagu

SEQ ID NO: 1289584 - RNA, 19 nt, Artificial Sequence
  Description of Artificial Sequence: Synthetic oligonucleotide
ggaggcagguucaagguuu

SEQ ID NO: 1289585 - RNA, 19 nt, Artificial Sequence
  Description of Artificial Sequence: Synthetic oligonucleotide
cuugggcuuaacaggcauu

SEQ ID NO: 1289586 - RNA, 19 nt, Artificial Sequence
  Description of Artificial Sequence: Synthetic oligonucleotide
ccuuugucagcacucugua

SEQ ID NO: 1289587 - RNA, 19 nt, Artificial Sequence
  Description of Artificial Sequence: Synthetic oligonucleotide
cuagugugucccguagagu

SEQ ID NO: 1289588 - RNA, 19 nt, Artificial Sequence
  Description of Artificial Sequence: Synthetic oligonucleotide
ggauggccgguggagccug

SEQ ID NO: 1289589 - RNA, 19 nt, Artificial Sequence
  Description of Artificial Sequence: Synthetic oligonucleotide
gcugcaacgggagucugcu

SEQ ID NO: 1289590 - RNA, 19 nt, Artificial Sequence
  Description of Artificial Sequence: Synthetic oligonucleotide
gcaaaggucuuggacuacu

SEQ ID NO: 1289591 - RNA, 19 nt, Artificial Sequence
  Description of Artificial Sequence: Synthetic oligonucleotide
cucuuagagguggccaagu

SEQ ID NO: 1289592 - RNA, 19 nt, Artificial Sequence
  Description of Artificial Sequence: Synthetic oligonucleotide
gcggauaggcaugauggcu

SEQ ID NO: 1289593 - RNA, 19 nt, Artificial Sequence
  Description of Artificial Sequence: Synthetic oligonucleotide
cucgucuggcucuccuaua

SEQ ID NO: 1289594 - RNA, 19 nt, Artificial Sequence
  Description of Artificial Sequence: Synthetic oligonucleotide
acgucgcgagagugaucga

SEQ ID NO: 1289595 - RNA, 19 nt, Artificial Sequence
  Description of Artificial Sequence: Synthetic oligonucleotide
cccagugagagcuggggcu

SEQ ID NO: 1289596 - RNA, 19 nt, Artificial Sequence
  Description of Artificial Sequence: Synthetic oligonucleotide
ggcaaaggucuuggacuac

SEQ ID NO: 1289597 - RNA, 19 nt, Artificial Sequence
  Description of Artificial Sequence: Synthetic oligonucleotide
gugcugcaacgggagucug

SEQ ID NO: 1289598 - RNA, 19 nt, Artificial Sequence
  Description of Artificial Sequence: Synthetic oligonucleotide
cgcaguacacagccagcug

SEQ ID NO: 1289599 - RNA, 19 nt, Artificial Sequence
  Description of Artificial Sequence: Synthetic oligonucleotide
ccgacuuggugcugucuca

SEQ ID NO: 1289600 - RNA, 19 nt, Artificial Sequence
  Description of Artificial Sequence: Synthetic oligonucleotide
cuaaggcguucugcaggga

SEQ ID NO: 1289601 - RNA, 19 nt, Artificial Sequence
  Description of Artificial Sequence: Synthetic oligonucleotide
cugucuugucuaaggcguu

SEQ ID NO: 1289602 - RNA, 19 nt, Artificial Sequence
  Description of Artificial Sequence: Synthetic oligonucleotide
cucuugaguuggcgggccu

SEQ ID NO: 1289603 - RNA, 19 nt, Artificial Sequence
  Description of Artificial Sequence: Synthetic oligonucleotide
ccgcggacugucccacacc

SEQ ID NO: 1289604 - RNA, 19 nt, Artificial Sequence
  Description of Artificial Sequence: Synthetic oligonucleotide
ggcucgugauuuccuuugu

SEQ ID NO: 1289605 - RNA, 19 nt, Artificial Sequence
  Description of Artificial Sequence: Synthetic oligonucleotide
gcuggagggguaacuacau

SEQ ID NO: 1289606 - RNA, 19 nt, Artificial Sequence
  Description of Artificial Sequence: Synthetic oligonucleotide
cgauaauggucuggcuguc

SEQ ID NO: 1289607 - RNA, 19 nt, Artificial Sequence
  Description of Artificial Sequence: Synthetic oligonucleotide
cgcgagagugaucgaagaa

SEQ ID NO: 1289608 - RNA, 19 nt, Artificial Sequence
  Description of Artificial Sequence: Synthetic oligonucleotide
gcuccaccgcggacugucc

SEQ ID NO: 1289609 - RNA, 19 nt, Artificial Sequence
  Description of Artificial Sequence: Synthetic oligonucleotide
caccgcggacugucccaca

SEQ ID NO: 1289610 - RNA, 19 nt, Artificial Sequence
  Description of Artificial Sequence: Synthetic oligonucleotide
gcagccacgucgcgagagu

SEQ ID NO: 1289611 - RNA, 19 nt, Artificial Sequence
  Description of Artificial Sequence: Synthetic oligonucleotide
agguagcauugaggucaau

SEQ ID NO: 1289612 - RNA, 19 nt, Artificial Sequence
  Description of Artificial Sequence: Synthetic oligonucleotide
ccacuggauuaggcacugc

SEQ ID NO: 1289613 - RNA, 19 nt, Artificial Sequence
  Description of Artificial Sequence: Synthetic oligonucleotide
ccccaaacacuccuggguu

SEQ ID NO: 1289614 - RNA, 19 nt, Artificial Sequence
  Description of Artificial Sequence: Synthetic oligonucleotide
gccacgucgcgagagugau

SEQ ID NO: 1289615 - RNA, 19 nt, Artificial Sequence
  Description of Artificial Sequence: Synthetic oligonucleotide
ccacgucgcgagagugauc

SEQ ID NO: 1289616 - RNA, 19 nt, Artificial Sequence
  Description of Artificial Sequence: Synthetic oligonucleotide
ccucgucuggcucuccuau

SEQ ID NO: 1289617 - RNA, 19 nt, Artificial Sequence
  Description of Artificial Sequence: Synthetic oligonucleotide
cgucgcgagagugaucgaa

SEQ ID NO: 1289618 - RNA, 19 nt, Artificial Sequence
  Description of Artificial Sequence: Synthetic oligonucleotide
gcggacugucccacaccca

SEQ ID NO: 1289619 - RNA, 19 nt, Artificial Sequence
  Description of Artificial Sequence: Synthetic oligonucleotide
ggagcucaauucgcuccau

SEQ ID NO: 1289620 - RNA, 19 nt, Artificial Sequence
  Description of Artificial Sequence: Synthetic oligonucleotide
ggcggcugacggucucacu

SEQ ID NO: 1289621 - RNA, 19 nt, Artificial Sequence
  Description of Artificial Sequence: Synthetic oligonucleotide
cccguagagugucgauaau

SEQ ID NO: 1289622 - RNA, 19 nt, Artificial Sequence
  Description of Artificial Sequence: Synthetic oligonucleotide
cacccaugucucggaucau

SEQ ID NO: 1289623 - RNA, 19 nt, Artificial Sequence
  Description of Artificial Sequence: Synthetic oligonucleotide
guuacagugcuauaggcag

SEQ ID NO: 1289624 - RNA, 19 nt, Artificial Sequence
  Description of Artificial Sequence: Synthetic oligonucleotide
aaagcugaacauguugccc

SEQ ID NO: 1289625 - RNA, 19 nt, Artificial Sequence
  Description of Artificial Sequence: Synthetic oligonucleotide
uauggaaccuuucuagcag

SEQ ID NO: 1289626 - RNA, 19 nt, Artificial Sequence
  Description of Artificial Sequence: Synthetic oligonucleotide
aaugcuucgucucuucaug

SEQ ID NO: 1289627 - RNA, 19 nt, Artificial Sequence
  Description of Artificial Sequence: Synthetic oligonucleotide
acggacagaaggcuggagc

SEQ ID NO: 1289628 - RNA, 19 nt, Artificial Sequence
  Description of Artificial Sequence: Synthetic oligonucleotide
cuugguaacgcccaguauc

SEQ ID NO: 1289629 - RNA, 19 nt, Artificial Sequence
  Description of Artificial Sequence: Synthetic oligonucleotide
gaugacugagguucacugg

SEQ ID NO: 1289630 - RNA, 19 nt, Artificial Sequence
  Description of Artificial Sequence: Synthetic oligonucleotide
uccaugagaugacugaggu

SEQ ID NO: 1289631 - RNA, 19 nt, Artificial Sequence
  Description of Artificial Sequence: Synthetic oligonucleotide
acauguugcccaucguccc

SEQ ID NO: 1289632 - RNA, 19 nt, Artificial Sequence
  Description of Artificial Sequence: Synthetic oligonucleotide
uucugauggagucccgagg

SEQ ID NO: 1289633 - RNA, 19 nt, Artificial Sequence
  Description of Artificial Sequence: Synthetic oligonucleotide
uccggggugaccuugucag

SEQ ID NO: 1289634 - RNA, 19 nt, Artificial Sequence
  Description of Artificial Sequence: Synthetic oligonucleotide
gagaagacgcaucuggaac

SEQ ID NO: 1289635 - RNA, 19 nt, Artificial Sequence
  Description of Artificial Sequence: Synthetic oligonucleotide
uuuggaguacuuccaugag

SEQ ID NO: 1289636 - RNA, 19 nt, Artificial Sequence
  Description of Artificial Sequence: Synthetic oligonucleotide
agaguguagauccuggaau

SEQ ID NO: 1289637 - RNA, 19 nt, Artificial Sequence
  Description of Artificial Sequence: Synthetic oligonucleotide
cugaaucacacuccaacag

SEQ ID NO: 1289638 - RNA, 19 nt, Artificial Sequence
  Description of Artificial Sequence: Synthetic oligonucleotide
caggucuagucuuagcugc

SEQ ID NO: 1289639 - RNA, 19 nt, Artificial Sequence
  Description of Artificial Sequence: Synthetic oligonucleotide
uguuccagucucgagaucu

SEQ ID NO: 1289640 - RNA, 19 nt, Artificial Sequence
  Description of Artificial Sequence: Synthetic oligonucleotide
agcaggucuagucuuagcu

SEQ ID NO: 1289641 - RNA, 19 nt, Artificial Sequence
  Description of Artificial Sequence: Synthetic oligonucleotide
gaguacuuccaugagauga

SEQ ID NO: 1289642 - RNA, 19 nt, Artificial Sequence
  Description of Artificial Sequence: Synthetic oligonucleotide
agaagacgcaucuggaacu

SEQ ID NO: 1289643 - RNA, 19 nt, Artificial Sequence
  Description of Artificial Sequence: Synthetic oligonucleotide
acuuccaugagaugacuga

SEQ ID NO: 1289644 - RNA, 19 nt, Artificial Sequence
  Description of Artificial Sequence: Synthetic oligonucleotide
uuggggaucagcugggacu

SEQ ID NO: 1289645 - RNA, 19 nt, Artificial Sequence
  Description of Artificial Sequence: Synthetic oligonucleotide
ugaggcuuugcagagggug

SEQ ID NO: 1289646 - RNA, 19 nt, Artificial Sequence
  Description of Artificial Sequence: Synthetic oligonucleotide
caugguaaugcuucgucuc

SEQ ID NO: 1289647 - RNA, 19 nt, Artificial Sequence
  Description of Artificial Sequence: Synthetic oligonucleotide
agagugaugaauggcagca

SEQ ID NO: 1289648 - RNA, 19 nt, Artificial Sequence
  Description of Artificial Sequence: Synthetic oligonucleotide
agugguaagcccaucgguc

SEQ ID NO: 1289649 - RNA, 19 nt, Artificial Sequence
  Description of Artificial Sequence: Synthetic oligonucleotide
uugucugacuccacaggag

SEQ ID NO: 1289650 - RNA, 19 nt, Artificial Sequence
  Description of Artificial Sequence: Synthetic oligonucleotide
acgacagggacugcgaagg

SEQ ID NO: 1289651 - RNA, 19 nt, Artificial Sequence
  Description of Artificial Sequence: Synthetic oligonucleotide
gauauccaccgccagcaug

SEQ ID NO: 1289652 - RNA, 19 nt, Artificial Sequence
  Description of Artificial Sequence: Synthetic oligonucleotide
ucacuagagcggauggcag

SEQ ID NO: 1289653 - RNA, 19 nt, Artificial Sequence
  Description of Artificial Sequence: Synthetic oligonucleotide
gauggagucccgaggaugc

SEQ ID NO: 1289654 - RNA, 19 nt, Artificial Sequence
  Description of Artificial Sequence: Synthetic oligonucleotide
ucuagucuuagcugccggc

SEQ ID NO: 1289655 - RNA, 19 nt, Artificial Sequence
  Description of Artificial Sequence: Synthetic oligonucleotide
ucuguuccagucucgagau

SEQ ID NO: 1289656 - RNA, 19 nt, Artificial Sequence
  Description of Artificial Sequence: Synthetic oligonucleotide
cuucucauagcgccgggcc

SEQ ID NO: 1289657 - RNA, 19 nt, Artificial Sequence
  Description of Artificial Sequence: Synthetic oligonucleotide
uccaugguaaugcuucguc

SEQ ID NO: 1289658 - RNA, 19 nt, Artificial Sequence
  Description of Artificial Sequence: Synthetic oligonucleotide
ugugggaacgugguguugc

SEQ ID NO: 1289659 - RNA, 19 nt, Artificial Sequence
  Description of Artificial Sequence: Synthetic oligonucleotide
ucuacgacagggacugcga

SEQ ID NO: 1289660 - RNA, 19 nt, Artificial Sequence
  Description of Artificial Sequence: Synthetic oligonucleotide
guaguggccagaucccggg

SEQ ID NO: 1289661 - RNA, 19 nt, Artificial Sequence
  Description of Artificial Sequence: Synthetic oligonucleotide
gaaccuuucuagcaggucu

SEQ ID NO: 1289662 - RNA, 19 nt, Artificial Sequence
  Description of Artificial Sequence: Synthetic oligonucleotide
ucccauuagggucugcauc

SEQ ID NO: 1289663 - RNA, 19 nt, Artificial Sequence
  Description of Artificial Sequence: Synthetic oligonucleotide
aggacuuugucaaacuucu

SEQ ID NO: 1289664 - RNA, 19 nt, Artificial Sequence
  Description of Artificial Sequence: Synthetic oligonucleotide
acggguuacagugcuauag

SEQ ID NO: 1289665 - RNA, 19 nt, Artificial Sequence
  Description of Artificial Sequence: Synthetic oligonucleotide
gacgagguggcuucuacga

SEQ ID NO: 1289666 - RNA, 19 nt, Artificial Sequence
  Description of Artificial Sequence: Synthetic oligonucleotide
gugguaagcccaucggucc

SEQ ID NO: 1289667 - RNA, 19 nt, Artificial Sequence
  Description of Artificial Sequence: Synthetic oligonucleotide
uacgacagggacugcgaag

SEQ ID NO: 1289668 - RNA, 19 nt, Artificial Sequence
  Description of Artificial Sequence: Synthetic oligonucleotide
gcuagcacaaccuccacac

SEQ ID NO: 1289669 - RNA, 19 nt, Artificial Sequence
  Description of Artificial Sequence: Synthetic oligonucleotide
gaccuugucagugguaagc

SEQ ID NO: 1289670 - RNA, 19 nt, Artificial Sequence
  Description of Artificial Sequence: Synthetic oligonucleotide
augaggcuugucugacucc

SEQ ID NO: 1289671 - RNA, 19 nt, Artificial Sequence
  Description of Artificial Sequence: Synthetic oligonucleotide
caugaggcuugucugacuc

SEQ ID NO: 1289672 - RNA, 19 nt, Artificial Sequence
  Description of Artificial Sequence: Synthetic oligonucleotide
agcggcaggcuuucuuugc

SEQ ID NO: 1289673 - RNA, 19 nt, Artificial Sequence
  Description of Artificial Sequence: Synthetic oligonucleotide
caucgguccaugguaaugc

SEQ ID NO: 1289674 - RNA, 19 nt, Artificial Sequence
  Description of Artificial Sequence: Synthetic oligonucleotide
uugagugauggagaccuug

SEQ ID NO: 1289675 - RNA, 19 nt, Artificial Sequence
  Description of Artificial Sequence: Synthetic oligonucleotide
aacucuguacugaacacuu

SEQ ID NO: 1289676 - RNA, 19 nt, Artificial Sequence
  Description of Artificial Sequence: Synthetic oligonucleotide
guaacgcccaguauccuag

SEQ ID NO: 1289677 - RNA, 19 nt, Artificial Sequence
  Description of Artificial Sequence: Synthetic oligonucleotide
gguauggaaccuuucuagc

SEQ ID NO: 1289678 - RNA, 19 nt, Artificial Sequence
  Description of Artificial Sequence: Synthetic oligonucleotide
cagcggacucccauuaggg

SEQ ID NO: 1289679 - RNA, 19 nt, Artificial Sequence
  Description of Artificial Sequence: Synthetic oligonucleotide
gucuguuccagucucgaga

SEQ ID NO: 1289680 - RNA, 19 nt, Artificial Sequence
  Description of Artificial Sequence: Synthetic oligonucleotide
agucucgagaucugggcca

SEQ ID NO: 1289681 - RNA, 19 nt, Artificial Sequence
  Description of Artificial Sequence: Synthetic oligonucleotide
ugaggacuuugucaaacuu

SEQ ID NO: 1289682 - RNA, 19 nt, Artificial Sequence
  Description of Artificial Sequence: Synthetic oligonucleotide
cacuagagcggauggcagg

SEQ ID NO: 1289683 - RNA, 19 nt, Artificial Sequence
  Description of Artificial Sequence: Synthetic oligonucleotide
cuagucuuagcugccggcc

SEQ ID NO: 1289684 - RNA, 19 nt, Artificial Sequence
  Description of Artificial Sequence: Synthetic oligonucleotide
cuugucugacuccacagga

SEQ ID NO: 1289685 - RNA, 19 nt, Artificial Sequence
  Description of Artificial Sequence: Synthetic oligonucleotide
ucagcguuggugugguaga

SEQ ID NO: 1289686 - RNA, 19 nt, Artificial Sequence
  Description of Artificial Sequence: Synthetic oligonucleotide
caggccaucggcuccgggg

SEQ ID NO: 1289687 - RNA, 19 nt, Artificial Sequence
  Description of Artificial Sequence: Synthetic oligonucleotide
gaaucugguccaugcugag

SEQ ID NO: 1289688 - RNA, 19 nt, Artificial Sequence
  Description of Artificial Sequence: Synthetic oligonucleotide
caugucuguuccagucucg

SEQ ID NO: 1289689 - RNA, 19 nt, Artificial Sequence
  Description of Artificial Sequence: Synthetic oligonucleotide
acgagguggcuucuacgac

SEQ ID NO: 1289690 - RNA, 19 nt, Artificial Sequence
  Description of Artificial Sequence: Synthetic oligonucleotide
cucagcguuggugugguag

SEQ ID NO: 1289691 - RNA, 19 nt, Artificial Sequence
  Description of Artificial Sequence: Synthetic oligonucleotide
uagucuuagcugccggcca

SEQ ID NO: 1289692 - RNA, 19 nt, Artificial Sequence
  Description of Artificial Sequence: Synthetic oligonucleotide
cuccaagugggcuagcaca

SEQ ID NO: 1289693 - RNA, 19 nt, Artificial Sequence
  Description of Artificial Sequence: Synthetic oligonucleotide
auggucuuaugcagcagcg

SEQ ID NO: 1289694 - RNA, 19 nt, Artificial Sequence
  Description of Artificial Sequence: Synthetic oligonucleotide
cagucucgagaucugggcc

SEQ ID NO: 1289695 - RNA, 19 nt, Artificial Sequence
  Description of Artificial Sequence: Synthetic oligonucleotide
ucuuccgcggagccugugc

SEQ ID NO: 1289696 - RNA, 19 nt, Artificial Sequence
  Description of Artificial Sequence: Synthetic oligonucleotide
uggcuucuacgacagggac

SEQ ID NO: 1289697 - RNA, 19 nt, Artificial Sequence
  Description of Artificial Sequence: Synthetic oligonucleotide
ugucuguuccagucucgag

SEQ ID NO: 1289698 - RNA, 19 nt, Artificial Sequence
  Description of Artificial Sequence: Synthetic oligonucleotide
ccaacagagugaugaaugg

SEQ ID NO: 1289699 - RNA, 19 nt, Artificial Sequence
  Description of Artificial Sequence: Synthetic oligonucleotide
aacgcccaguauccuagca

SEQ ID NO: 1289700 - RNA, 19 nt, Artificial Sequence
  Description of Artificial Sequence: Synthetic oligonucleotide
agagcggauggcagguucc

SEQ ID NO: 1289701 - RNA, 19 nt, Artificial Sequence
  Description of Artificial Sequence: Synthetic oligonucleotide
acucucggagaugggagac

SEQ ID NO: 1289702 - RNA, 19 nt, Artificial Sequence
  Description of Artificial Sequence: Synthetic oligonucleotide
caguguccgagcauccacc

SEQ ID NO: 1289703 - RNA, 19 nt, Artificial Sequence
  Description of Artificial Sequence: Synthetic oligonucleotide
gaggccgguucucuuuggg

SEQ ID NO: 1289704 - RNA, 19 nt, Artificial Sequence
  Description of Artificial Sequence: Synthetic oligonucleotide
uccuugaccuuccgcagaa

SEQ ID NO: 1289705 - RNA, 19 nt, Artificial Sequence
  Description of Artificial Sequence: Synthetic oligonucleotide
uagagcggauggcagguuc

SEQ ID NO: 1289706 - RNA, 19 nt, Artificial Sequence
  Description of Artificial Sequence: Synthetic oligonucleotide
uuccagucucgagaucugg

SEQ ID NO: 1289707 - RNA, 19 nt, Artificial Sequence
  Description of Artificial Sequence: Synthetic oligonucleotide
uucuagcaggucuagucuu

SEQ ID NO: 1289708 - RNA, 19 nt, Artificial Sequence
  Description of Artificial Sequence: Synthetic oligonucleotide
agacccuugaggaaaggcu

SEQ ID NO: 1289709 - RNA, 19 nt, Artificial Sequence
  Description of Artificial Sequence: Synthetic oligonucleotide
agugcgggcggccuccaag

SEQ ID NO: 1289710 - RNA, 19 nt, Artificial Sequence
  Description of Artificial Sequence: Synthetic oligonucleotide
gagaugggagacaggggag

SEQ ID NO: 1289711 - RNA, 19 nt, Artificial Sequence
  Description of Artificial Sequence: Synthetic oligonucleotide
aagugggcuagcacaaccu

SEQ ID NO: 1289712 - RNA, 19 nt, Artificial Sequence
  Description of Artificial Sequence: Synthetic oligonucleotide
cauguugcccaucgucccc

SEQ ID NO: 1289713 - RNA, 19 nt, Artificial Sequence
  Description of Artificial Sequence: Synthetic oligonucleotide
gacugcgaagggcuugccc

SEQ ID NO: 1289714 - RNA, 19 nt, Artificial Sequence
  Description of Artificial Sequence: Synthetic oligonucleotide
ugucgcagggucacccaug

SEQ ID NO: 1289715 - RNA, 19 nt, Artificial Sequence
  Description of Artificial Sequence: Synthetic oligonucleotide
cuauugagugauggagacc

SEQ ID NO: 1289716 - RNA, 19 nt, Artificial Sequence
  Description of Artificial Sequence: Synthetic oligonucleotide
ggcugccacggacagaagg

SEQ ID NO: 1289717 - RNA, 19 nt, Artificial Sequence
  Description of Artificial Sequence: Synthetic oligonucleotide
ugccacggacagaaggcug

SEQ ID NO: 1289718 - RNA, 19 nt, Artificial Sequence
  Description of Artificial Sequence: Synthetic oligonucleotide
agcacgugugggaacgugg

SEQ ID NO: 1289719 - RNA, 19 nt, Artificial Sequence
  Description of Artificial Sequence: Synthetic oligonucleotide
aucagagaccccauuuucu

SEQ ID NO: 1289720 - RNA, 19 nt, Artificial Sequence
  Description of Artificial Sequence: Synthetic oligonucleotide
gacaugccgggccaguguc

SEQ ID NO: 1289721 - RNA, 19 nt, Artificial Sequence
  Description of Artificial Sequence: Synthetic oligonucleotide
aggucuagucuuagcugcc

SEQ ID NO: 1289722 - RNA, 19 nt, Artificial Sequence
  Description of Artificial Sequence: Synthetic oligonucleotide
ugcuauaggcaggggagcu

SEQ ID NO: 1289723 - RNA, 19 nt, Artificial Sequence
  Description of Artificial Sequence: Synthetic oligonucleotide
acuagagcggauggcaggu

SEQ ID NO: 1289724 - RNA, 19 nt, Artificial Sequence
  Description of Artificial Sequence: Synthetic oligonucleotide
aggcuugagcuucuucuca

SEQ ID NO: 1289725 - RNA, 19 nt, Artificial Sequence
  Description of Artificial Sequence: Synthetic oligonucleotide
uugucagugguaagcccau

SEQ ID NO: 1289726 - RNA, 19 nt, Artificial Sequence
  Description of Artificial Sequence: Synthetic oligonucleotide
cucacuagagcggauggca

SEQ ID NO: 1289727 - RNA, 19 nt, Artificial Sequence
  Description of Artificial Sequence: Synthetic oligonucleotide
ugugugccgcugucgcagg

SEQ ID NO: 1289728 - RNA, 19 nt, Artificial Sequence
  Description of Artificial Sequence: Synthetic oligonucleotide
gucacuguagcuauugagu

SEQ ID NO: 1289729 - RNA, 19 nt, Artificial Sequence
  Description of Artificial Sequence: Synthetic oligonucleotide
uggucuuaugcagcagcgc

SEQ ID NO: 1289730 - RNA, 19 nt, Artificial Sequence
  Description of Artificial Sequence: Synthetic oligonucleotide
ugcuucgucucuucauguc

SEQ ID NO: 1289731 - RNA, 19 nt, Artificial Sequence
  Description of Artificial Sequence: Synthetic oligonucleotide
ugcaugaggcuugucugac

SEQ ID NO: 1289732 - RNA, 19 nt, Artificial Sequence
  Description of Artificial Sequence: Synthetic oligonucleotide
uggacaugguauggaaccu

SEQ ID NO: 1289733 - RNA, 19 nt, Artificial Sequence
  Description of Artificial Sequence: Synthetic oligonucleotide
gagacaggggagaguguag

SEQ ID NO: 1289734 - RNA, 19 nt, Artificial Sequence
  Description of Artificial Sequence: Synthetic oligonucleotide
gacucucggagaugggaga

SEQ ID NO: 1289735 - RNA, 19 nt, Artificial Sequence
  Description of Artificial Sequence: Synthetic oligonucleotide
gcaggucuagucuuagcug

SEQ ID NO: 1289736 - RNA, 19 nt, Artificial Sequence
  Description of Artificial Sequence: Synthetic oligonucleotide
cugugugccgcugucgcag

SEQ ID NO: 1289737 - RNA, 19 nt, Artificial Sequence
  Description of Artificial Sequence: Synthetic oligonucleotide
agcggacucccauuagggu

SEQ ID NO: 1289738 - RNA, 19 nt, Artificial Sequence
  Description of Artificial Sequence: Synthetic oligonucleotide
gaagacgcaucuggaacuc

SEQ ID NO: 1289739 - RNA, 19 nt, Artificial Sequence
  Description of Artificial Sequence: Synthetic oligonucleotide
gguuacagugcuauaggca

SEQ ID NO: 1289740 - RNA, 19 nt, Artificial Sequence
  Description of Artificial Sequence: Synthetic oligonucleotide
caugccgggccaguguccg

SEQ ID NO: 1289741 - RNA, 19 nt, Artificial Sequence
  Description of Artificial Sequence: Synthetic oligonucleotide
ucugugugccgcugucgca

SEQ ID NO: 1289742 - RNA, 19 nt, Artificial Sequence
  Description of Artificial Sequence: Synthetic oligonucleotide
agcguuggugugguagagg

SEQ ID NO: 1289743 - RNA, 19 nt, Artificial Sequence
  Description of Artificial Sequence: Synthetic oligonucleotide
acuccaacagagugaugaa

SEQ ID NO: 1289744 - RNA, 19 nt, Artificial Sequence
  Description of Artificial Sequence: Synthetic oligonucleotide
agaggccgguucucuuugg

SEQ ID NO: 1289745 - RNA, 19 nt, Artificial Sequence
  Description of Artificial Sequence: Synthetic oligonucleotide
gugggcuagcacaaccucc

SEQ ID NO: 1289746 - RNA, 19 nt, Artificial Sequence
  Description of Artificial Sequence: Synthetic oligonucleotide
ugcggaagugaggugcugu

SEQ ID NO: 1289747 - RNA, 19 nt, Artificial Sequence
  Description of Artificial Sequence: Synthetic oligonucleotide
ggacgagguggcuucuacg

SEQ ID NO: 1289748 - RNA, 19 nt, Artificial Sequence
  Description of Artificial Sequence: Synthetic oligonucleotide
agacaggggagaguguaga

SEQ ID NO: 1289749 - RNA, 19 nt, Artificial Sequence
  Description of Artificial Sequence: Synthetic oligonucleotide
cuucucauacaggauggca

SEQ ID NO: 1289750 - RNA, 19 nt, Artificial Sequence
  Description of Artificial Sequence: Synthetic oligonucleotide
agucccgaggaugcggaag

SEQ ID NO: 1289751 - RNA, 19 nt, Artificial Sequence
  Description of Artificial Sequence: Synthetic oligonucleotide
aaccuuucuagcaggucua

SEQ ID NO: 1289752 - RNA, 19 nt, Artificial Sequence
  Description of Artificial Sequence: Synthetic oligonucleotide
ccagucucgagaucugggc

SEQ ID NO: 1289753 - RNA, 19 nt, Artificial Sequence
  Description of Artificial Sequence: Synthetic oligonucleotide
cugcagagaggcaaggucu

SEQ ID NO: 1289754 - RNA, 19 nt, Artificial Sequence
  Description of Artificial Sequence: Synthetic oligonucleotide
cacaccgugcucugugcug

SEQ ID NO: 1289755 - RNA, 19 nt, Artificial Sequence
  Description of Artificial Sequence: Synthetic oligonucleotide
ggcagcacgugugggaacg

SEQ ID NO: 1289756 - RNA, 19 nt, Artificial Sequence
  Description of Artificial Sequence: Synthetic oligonucleotide
aucggcuccggggugaccu

SEQ ID NO: 1289757 - RNA, 19 nt, Artificial Sequence
  Description of Artificial Sequence: Synthetic oligonucleotide
acgcccaguauccuagcaa

SEQ ID NO: 1289758 - RNA, 19 nt, Artificial Sequence
  Description of Artificial Sequence: Synthetic oligonucleotide
uaacgcccaguauccuagc

SEQ ID NO: 1289759 - RNA, 19 nt, Artificial Sequence
  Description of Artificial Sequence: Synthetic oligonucleotide
cagguugaaggacgaggug

SEQ ID NO: 1289760 - RNA, 19 nt, Artificial Sequence
  Description of Artificial Sequence: Synthetic oligonucleotide
cccacuccccaucagagac

SEQ ID NO: 1289761 - RNA, 19 nt, Artificial Sequence
  Description of Artificial Sequence: Synthetic oligonucleotide
ggaaucugguccaugcuga

SEQ ID NO: 1289762 - RNA, 19 nt, Artificial Sequence
  Description of Artificial Sequence: Synthetic oligonucleotide
accccauuuucugacaguu

SEQ ID NO: 1289763 - RNA, 19 nt, Artificial Sequence
  Description of Artificial Sequence: Synthetic oligonucleotide
uuccgcggagccugugcag

SEQ ID NO: 1289764 - RNA, 19 nt, Artificial Sequence
  Description of Artificial Sequence: Synthetic oligonucleotide
ccaguuugugggacaaggc

SEQ ID NO: 1289765 - RNA, 19 nt, Artificial Sequence
  Description of Artificial Sequence: Synthetic oligonucleotide
ccgaggaugcggaagugag

SEQ ID NO: 1289766 - RNA, 19 nt, Artificial Sequence
  Description of Artificial Sequence: Synthetic oligonucleotide
augucuguuccagucucga

SEQ ID NO: 1289767 - RNA, 19 nt, Artificial Sequence
  Description of Artificial Sequence: Synthetic oligonucleotide
ugacaguaguggccagauc

SEQ ID NO: 1289768 - RNA, 19 nt, Artificial Sequence
  Description of Artificial Sequence: Synthetic oligonucleotide
ccagcggacucccauuagg

SEQ ID NO: 1289769 - RNA, 19 nt, Artificial Sequence
  Description of Artificial Sequence: Synthetic oligonucleotide
uguugcucagcggcaggcu

SEQ ID NO: 1289770 - RNA, 19 nt, Artificial Sequence
  Description of Artificial Sequence: Synthetic oligonucleotide
gcugccacggacagaaggc

SEQ ID NO: 1289771 - RNA, 19 nt, Artificial Sequence
  Description of Artificial Sequence: Synthetic oligonucleotide
gcggacucccauuaggguc

SEQ ID NO: 1289772 - RNA, 19 nt, Artificial Sequence
  Description of Artificial Sequence: Synthetic oligonucleotide
gugugccacagugcgggcg

SEQ ID NO: 1289773 - RNA, 19 nt, Artificial Sequence
  Description of Artificial Sequence: Synthetic oligonucleotide
cauugagacccuugaggaa

SEQ ID NO: 1289774 - RNA, 19 nt, Artificial Sequence
  Description of Artificial Sequence: Synthetic oligonucleotide
accuuucuagcaggucuag

SEQ ID NO: 1289775 - RNA, 19 nt, Artificial Sequence
  Description of Artificial Sequence: Synthetic oligonucleotide
gguguugcucagcggcagg

SEQ ID NO: 1289776 - RNA, 19 nt, Artificial Sequence
  Description of Artificial Sequence: Synthetic oligonucleotide
ccaguauccuagcaaccag

SEQ ID NO: 1289777 - RNA, 19 nt, Artificial Sequence
  Description of Artificial Sequence: Synthetic oligonucleotide
ucgggcaacuggugaggca

SEQ ID NO: 1289778 - RNA, 19 nt, Artificial Sequence
  Description of Artificial Sequence: Synthetic oligonucleotide
gcuugcaugaggcuugucu

SEQ ID NO: 1289779 - RNA, 19 nt, Artificial Sequence
  Description of Artificial Sequence: Synthetic oligonucleotide
gugcuauaggcaggggagc

SEQ ID NO: 1289780 - RNA, 19 nt, Artificial Sequence
  Description of Artificial Sequence: Synthetic oligonucleotide
ucgagaucugggccaucuc

SEQ ID NO: 1289781 - RNA, 19 nt, Artificial Sequence
  Description of Artificial Sequence: Synthetic oligonucleotide
guggccagaucccggguca

SEQ ID NO: 1289782 - RNA, 19 nt, Artificial Sequence
  Description of Artificial Sequence: Synthetic oligonucleotide
ucccgggucacuguagcua

SEQ ID NO: 1289783 - RNA, 19 nt, Artificial Sequence
  Description of Artificial Sequence: Synthetic oligonucleotide
aggucacagcucacuagag

SEQ ID NO: 1289784 - RNA, 19 nt, Artificial Sequence
  Description of Artificial Sequence: Synthetic oligonucleotide
cagcucacuagagcggaug

SEQ ID NO: 1289785 - RNA, 19 nt, Artificial Sequence
  Description of Artificial Sequence: Synthetic oligonucleotide
cagcggcaggcuuucuuug

SEQ ID NO: 1289786 - RNA, 19 nt, Artificial Sequence
  Description of Artificial Sequence: Synthetic oligonucleotide
acagugcuauaggcagggg

SEQ ID NO: 1289787 - RNA, 19 nt, Artificial Sequence
  Description of Artificial Sequence: Synthetic oligonucleotide
cagggcgcccaugaccgcg

SEQ ID NO: 1289788 - RNA, 19 nt, Artificial Sequence
  Description of Artificial Sequence: Synthetic oligonucleotide
ggaguacuuccaugagaug

SEQ ID NO: 1289789 - RNA, 19 nt, Artificial Sequence
  Description of Artificial Sequence: Synthetic oligonucleotide
cacagcucacuagagcgga

SEQ ID NO: 1289790 - RNA, 19 nt, Artificial Sequence
  Description of Artificial Sequence: Synthetic oligonucleotide
cuguagcuauugagugaug

SEQ ID NO: 1289791 - RNA, 19 nt, Artificial Sequence
  Description of Artificial Sequence: Synthetic oligonucleotide
aucccgggucacuguagcu

SEQ ID NO: 1289792 - RNA, 19 nt, Artificial Sequence
  Description of Artificial Sequence: Synthetic oligonucleotide
ggggagcugggacucucgg

SEQ ID NO: 1289793 - RNA, 19 nt, Artificial Sequence
  Description of Artificial Sequence: Synthetic oligonucleotide
ccgagcauccaccuccgag

SEQ ID NO: 1289794 - RNA, 19 nt, Artificial Sequence
  Description of Artificial Sequence: Synthetic oligonucleotide
gagguucacuggggcgucg

SEQ ID NO: 1289795 - RNA, 19 nt, Artificial Sequence
  Description of Artificial Sequence: Synthetic oligonucleotide
guuccaguuugugggacaa

SEQ ID NO: 1289796 - RNA, 19 nt, Artificial Sequence
  Description of Artificial Sequence: Synthetic oligonucleotide
ugagguucacuggggcguc

SEQ ID NO: 1289797 - RNA, 19 nt, Artificial Sequence
  Description of Artificial Sequence: Synthetic oligonucleotide
cccguggugugccacagug

SEQ ID NO: 1289798 - RNA, 19 nt, Artificial Sequence
  Description of Artificial Sequence: Synthetic oligonucleotide
ggcggugcugugguggagg

SEQ ID NO: 1289799 - RNA, 19 nt, Artificial Sequence
  Description of Artificial Sequence: Synthetic oligonucleotide
gcgucgggcaacuggugag

SEQ ID NO: 1289800 - RNA, 19 nt, Artificial Sequence
  Description of Artificial Sequence: Synthetic oligonucleotide
gguaacgcccaguauccua

SEQ ID NO: 1289801 - RNA, 19 nt, Artificial Sequence
  Description of Artificial Sequence: Synthetic oligonucleotide
gugugccgcugucgcaggg

SEQ ID NO: 1289802 - RNA, 19 nt, Artificial Sequence
  Description of Artificial Sequence: Synthetic oligonucleotide
gguuccaguuugugggaca

SEQ ID NO: 1289803 - RNA, 19 nt, Artificial Sequence
  Description of Artificial Sequence: Synthetic oligonucleotide
gucgggcaacuggugaggc

SEQ ID NO: 1289804 - RNA, 19 nt, Artificial Sequence
  Description of Artificial Sequence: Synthetic oligonucleotide
gaggcuuugcagagggugu

SEQ ID NO: 1289805 - RNA, 19 nt, Artificial Sequence
  Description of Artificial Sequence: Synthetic oligonucleotide
ggcagucaaccuuggugac

SEQ ID NO: 1289806 - RNA, 19 nt, Artificial Sequence
  Description of Artificial Sequence: Synthetic oligonucleotide
cagcguuggugugguagag

SEQ ID NO: 1289807 - RNA, 19 nt, Artificial Sequence
  Description of Artificial Sequence: Synthetic oligonucleotide
agucaaccuuggugacaug

SEQ ID NO: 1289808 - RNA, 19 nt, Artificial Sequence
  Description of Artificial Sequence: Synthetic oligonucleotide
ucgucucuucaugucccuc

SEQ ID NO: 1289809 - RNA, 19 nt, Artificial Sequence
  Description of Artificial Sequence: Synthetic oligonucleotide
cgcccaguauccuagcaac

SEQ ID NO: 1289810 - RNA, 19 nt, Artificial Sequence
  Description of Artificial Sequence: Synthetic oligonucleotide
cuacgacagggacugcgaa

SEQ ID NO: 1289811 - RNA, 19 nt, Artificial Sequence
  Description of Artificial Sequence: Synthetic oligonucleotide
uagcgccgggccuggcugc

SEQ ID NO: 1289812 - RNA, 19 nt, Artificial Sequence
  Description of Artificial Sequence: Synthetic oligonucleotide
gucccgaggaugcggaagu

SEQ ID NO: 1289813 - RNA, 19 nt, Artificial Sequence
  Description of Artificial Sequence: Synthetic oligonucleotide
gaugcggaagugaggugcu

SEQ ID NO: 1289814 - RNA, 19 nt, Artificial Sequence
  Description of Artificial Sequence: Synthetic oligonucleotide
cagugguaagcccaucggu

SEQ ID NO: 1289815 - RNA, 19 nt, Artificial Sequence
  Description of Artificial Sequence: Synthetic oligonucleotide
ggagacaggggagagugua

SEQ ID NO: 1289816 - RNA, 19 nt, Artificial Sequence
  Description of Artificial Sequence: Synthetic oligonucleotide
guaagcccaucgguccaug

SEQ ID NO: 1289817 - RNA, 19 nt, Artificial Sequence
  Description of Artificial Sequence: Synthetic oligonucleotide
gaccgcggcaaagcugaac

SEQ ID NO: 1289818 - RNA, 19 nt, Artificial Sequence
  Description of Artificial Sequence: Synthetic oligonucleotide
gucgcagggucacccaugu

SEQ ID NO: 1289819 - RNA, 19 nt, Artificial Sequence
  Description of Artificial Sequence: Synthetic oligonucleotide
cgggcggccuccaaguggg

SEQ ID NO: 1289820 - RNA, 19 nt, Artificial Sequence
  Description of Artificial Sequence: Synthetic oligonucleotide
gggacugcgaagggcuugc

SEQ ID NO: 1289821 - RNA, 19 nt, Artificial Sequence
  Description of Artificial Sequence: Synthetic oligonucleotide
cuuccgcagaaggcccacc

SEQ ID NO: 1289822 - RNA, 19 nt, Artificial Sequence
  Description of Artificial Sequence: Synthetic oligonucleotide
gaggcuugucugacuccac

SEQ ID NO: 1289823 - RNA, 19 nt, Artificial Sequence
  Description of Artificial Sequence: Synthetic oligonucleotide
gagcggauggcagguucca

SEQ ID NO: 1289824 - RNA, 19 nt, Artificial Sequence
  Description of Artificial Sequence: Synthetic oligonucleotide
ggcgucgggcaacugguga

SEQ ID NO: 1289825 - RNA, 19 nt, Artificial Sequence
  Description of Artificial Sequence: Synthetic oligonucleotide
ugcgaagggcuugccccac

SEQ ID NO: 1289826 - RNA, 19 nt, Artificial Sequence
  Description of Artificial Sequence: Synthetic oligonucleotide
aaggacgagguggcuucua

SEQ ID NO: 1289827 - RNA, 19 nt, Artificial Sequence
  Description of Artificial Sequence: Synthetic oligonucleotide
cagucaaccuuggugacau

SEQ ID NO: 1289828 - RNA, 19 nt, Artificial Sequence
  Description of Artificial Sequence: Synthetic oligonucleotide
caccgugcucugugcugcc

SEQ ID NO: 1289829 - RNA, 19 nt, Artificial Sequence
  Description of Artificial Sequence: Synthetic oligonucleotide
cgagcauccaccuccgaga

SEQ ID NO: 1289830 - RNA, 19 nt, Artificial Sequence
  Description of Artificial Sequence: Synthetic oligonucleotide
gggucacccaugucuguuc

SEQ ID NO: 1289831 - RNA, 19 nt, Artificial Sequence
  Description of Artificial Sequence: Synthetic oligonucleotide
caccuccagaggccgguuc

SEQ ID NO: 1289832 - RNA, 19 nt, Artificial Sequence
  Description of Artificial Sequence: Synthetic oligonucleotide
guguccgagcauccaccuc

SEQ ID NO: 1289833 - RNA, 19 nt, Artificial Sequence
  Description of Artificial Sequence: Synthetic oligonucleotide
ccacuccccaucagagacc

SEQ ID NO: 1289834 - RNA, 19 nt, Artificial Sequence
  Description of Artificial Sequence: Synthetic oligonucleotide
agggcgcccaugaccgcgg

SEQ ID NO: 1289835 - RNA, 19 nt, Artificial Sequence
  Description of Artificial Sequence: Synthetic oligonucleotide
cccaguauccuagcaacca

SEQ ID NO: 1289836 - RNA, 19 nt, Artificial Sequence
  Description of Artificial Sequence: Synthetic oligonucleotide
ccgagagcagcuccuugac

SEQ ID NO: 1289837 - RNA, 19 nt, Artificial Sequence
  Description of Artificial Sequence: Synthetic oligonucleotide
ggacacggguuacagugcu

SEQ ID NO: 1289838 - RNA, 19 nt, Artificial Sequence
  Description of Artificial Sequence: Synthetic oligonucleotide
ccaucgguccaugguaaug

SEQ ID NO: 1289839 - RNA, 19 nt, Artificial Sequence
  Description of Artificial Sequence: Synthetic oligonucleotide
ccguggugugccacagugc

SEQ ID NO: 1289840 - RNA, 19 nt, Artificial Sequence
  Description of Artificial Sequence: Synthetic oligonucleotide
ggcccaccuccagaggccg

SEQ ID NO: 1289841 - RNA, 19 nt, Artificial Sequence
  Description of Artificial Sequence: Synthetic oligonucleotide
ucgcagggucacccauguc

SEQ ID NO: 1289842 - RNA, 19 nt, Artificial Sequence
  Description of Artificial Sequence: Synthetic oligonucleotide
gcccaguauccuagcaacc

SEQ ID NO: 1289843 - RNA, 19 nt, Artificial Sequence
  Description of Artificial Sequence: Synthetic oligonucleotide
agcagcgcugcccgcucuu

SEQ ID NO: 1289844 - RNA, 19 nt, Artificial Sequence
  Description of Artificial Sequence: Synthetic oligonucleotide
uggccagaucccgggucac

SEQ ID NO: 1289845 - RNA, 19 nt, Artificial Sequence
  Description of Artificial Sequence: Synthetic oligonucleotide
uauccaccgccagcaugau

SEQ ID NO: 1289846 - RNA, 19 nt, Artificial Sequence
  Description of Artificial Sequence: Synthetic oligonucleotide
cagaaggcuggagcugaca

SEQ ID NO: 1289847 - RNA, 19 nt, Artificial Sequence
  Description of Artificial Sequence: Synthetic oligonucleotide
cugacaguaguggccagau

SEQ ID NO: 1289848 - RNA, 19 nt, Artificial Sequence
  Description of Artificial Sequence: Synthetic oligonucleotide
gagucccgaggaugcggaa

SEQ ID NO: 1289849 - RNA, 19 nt, Artificial Sequence
  Description of Artificial Sequence: Synthetic oligonucleotide
ugaccgcggcaaagcugaa

SEQ ID NO: 1289850 - RNA, 19 nt, Artificial Sequence
  Description of Artificial Sequence: Synthetic oligonucleotide
ccaugguaaugcuucgucu

SEQ ID NO: 1289851 - RNA, 19 nt, Artificial Sequence
  Description of Artificial Sequence: Synthetic oligonucleotide
auugagugauggagaccuu

SEQ ID NO: 1289852 - RNA, 19 nt, Artificial Sequence
  Description of Artificial Sequence: Synthetic oligonucleotide
gugggaacgugguguugcu

SEQ ID NO: 1289853 - RNA, 19 nt, Artificial Sequence
  Description of Artificial Sequence: Synthetic oligonucleotide
gugcgggcggccuccaagu

SEQ ID NO: 1289854 - RNA, 19 nt, Artificial Sequence
  Description of Artificial Sequence: Synthetic oligonucleotide
cccgcucuuccgcggagcc

SEQ ID NO: 1289855 - RNA, 19 nt, Artificial Sequence
  Description of Artificial Sequence: Synthetic oligonucleotide
cucccauuagggucugcau

SEQ ID NO: 1289856 - RNA, 19 nt, Artificial Sequence
  Description of Artificial Sequence: Synthetic oligonucleotide
gcccaugaccgcggcaaag

SEQ ID NO: 1289857 - RNA, 19 nt, Artificial Sequence
  Description of Artificial Sequence: Synthetic oligonucleotide
guugaaggacgagguggcu

SEQ ID NO: 1289858 - RNA, 19 nt, Artificial Sequence
  Description of Artificial Sequence: Synthetic oligonucleotide
gccgcugucgcagggucac

SEQ ID NO: 1289859 - RNA, 19 nt, Artificial Sequence
  Description of Artificial Sequence: Synthetic oligonucleotide
cugccccagagaagacgca

SEQ ID NO: 1289860 - RNA, 19 nt, Artificial Sequence
  Description of Artificial Sequence: Synthetic oligonucleotide
acagcucacuagagcggau

SEQ ID NO: 1289861 - RNA, 19 nt, Artificial Sequence
  Description of Artificial Sequence: Synthetic oligonucleotide
guccaugguaaugcuucgu

SEQ ID NO: 1289862 - RNA, 19 nt, Artificial Sequence
  Description of Artificial Sequence: Synthetic oligonucleotide
ccggcugccacggacagaa

SEQ ID NO: 1289863 - RNA, 19 nt, Artificial Sequence
  Description of Artificial Sequence: Synthetic oligonucleotide
gaaggacgagguggcuucu

SEQ ID NO: 1289864 - RNA, 19 nt, Artificial Sequence
  Description of Artificial Sequence: Synthetic oligonucleotide
ggccaguguccgagcaucc

SEQ ID NO: 1289865 - RNA, 19 nt, Artificial Sequence
  Description of Artificial Sequence: Synthetic oligonucleotide
ggcuucuacgacagggacu

SEQ ID NO: 1289866 - RNA, 19 nt, Artificial Sequence
  Description of Artificial Sequence: Synthetic oligonucleotide
cggggugaccuugucagug

SEQ ID NO: 1289867 - RNA, 19 nt, Artificial Sequence
  Description of Artificial Sequence: Synthetic oligonucleotide
gcaggccaucggcuccggg

SEQ ID NO: 1289868 - RNA, 19 nt, Artificial Sequence
  Description of Artificial Sequence: Synthetic oligonucleotide
cacggguuacagugcuaua

SEQ ID NO: 1289869 - RNA, 19 nt, Artificial Sequence
  Description of Artificial Sequence: Synthetic oligonucleotide
gcggcguggacacggguua

SEQ ID NO: 1289870 - RNA, 19 nt, Artificial Sequence
  Description of Artificial Sequence: Synthetic oligonucleotide
ucggcuccggggugaccuu

SEQ ID NO: 1289871 - RNA, 19 nt, Artificial Sequence
  Description of Artificial Sequence: Synthetic oligonucleotide
gcgcccaugaccgcggcaa

SEQ ID NO: 1289872 - RNA, 19 nt, Artificial Sequence
  Description of Artificial Sequence: Synthetic oligonucleotide
ggccaucggcuccggggug

SEQ ID NO: 1289873 - RNA, 19 nt, Artificial Sequence
  Description of Artificial Sequence: Synthetic oligonucleotide
cgcugucgcagggucaccc

SEQ ID NO: 1289874 - RNA, 19 nt, Artificial Sequence
  Description of Artificial Sequence: Synthetic oligonucleotide
acagugcgggcggccucca

SEQ ID NO: 1289875 - RNA, 19 nt, Artificial Sequence
  Description of Artificial Sequence: Synthetic oligonucleotide
gcaugaggcuugucugacu

SEQ ID NO: 1289876 - RNA, 19 nt, Artificial Sequence
  Description of Artificial Sequence: Synthetic oligonucleotide
ccaugccccagcggacucc

SEQ ID NO: 1289877 - RNA, 19 nt, Artificial Sequence
  Description of Artificial Sequence: Synthetic oligonucleotide
cugucgcagggucacccau

SEQ ID NO: 1289878 - RNA, 19 nt, Artificial Sequence
  Description of Artificial Sequence: Synthetic oligonucleotide
gcccaucgguccaugguaa

SEQ ID NO: 1289879 - RNA, 19 nt, Artificial Sequence
  Description of Artificial Sequence: Synthetic oligonucleotide
cagggucacccaugucugu

SEQ ID NO: 1289880 - RNA, 19 nt, Artificial Sequence
  Description of Artificial Sequence: Synthetic oligonucleotide
gcacgugugggaacguggu

SEQ ID NO: 1289881 - RNA, 19 nt, Artificial Sequence
  Description of Artificial Sequence: Synthetic oligonucleotide
gucucgagaucugggccau

SEQ ID NO: 1289882 - RNA, 19 nt, Artificial Sequence
  Description of Artificial Sequence: Synthetic oligonucleotide
ggggcgucgggcaacuggu

SEQ ID NO: 1289883 - RNA, 19 nt, Artificial Sequence
  Description of Artificial Sequence: Synthetic oligonucleotide
cggacucccauuagggucu

SEQ ID NO: 1289884 - RNA, 19 nt, Artificial Sequence
  Description of Artificial Sequence: Synthetic oligonucleotide
ggacugcgaagggcuugcc

SEQ ID NO: 1289885 - RNA, 19 nt, Artificial Sequence
  Description of Artificial Sequence: Synthetic oligonucleotide
cccaugucuguuccagucu

SEQ ID NO: 1289886 - RNA, 19 nt, Artificial Sequence
  Description of Artificial Sequence: Synthetic oligonucleotide
gccaucggcuccgggguga

SEQ ID NO: 1289887 - RNA, 19 nt, Artificial Sequence
  Description of Artificial Sequence: Synthetic oligonucleotide
ggugugggaggggcuugca

SEQ ID NO: 1289888 - RNA, 19 nt, Artificial Sequence
  Description of Artificial Sequence: Synthetic oligonucleotide
gggcgucgggcaacuggug

SEQ ID NO: 1289889 - RNA, 19 nt, Artificial Sequence
  Description of Artificial Sequence: Synthetic oligonucleotide
ccaugaccgcggcaaagcu

SEQ ID NO: 1289890 - RNA, 19 nt, Artificial Sequence
  Description of Artificial Sequence: Synthetic oligonucleotide
gguaagcccaucgguccau

SEQ ID NO: 1289891 - RNA, 19 nt, Artificial Sequence
  Description of Artificial Sequence: Synthetic oligonucleotide
ccccagcggacucccauua

SEQ ID NO: 1289892 - RNA, 19 nt, Artificial Sequence
  Description of Artificial Sequence: Synthetic oligonucleotide
ccaucggcuccggggugac

SEQ ID NO: 1289893 - RNA, 19 nt, Artificial Sequence
  Description of Artificial Sequence: Synthetic oligonucleotide
cuagagcggauggcagguu

SEQ ID NO: 1289894 - RNA, 19 nt, Artificial Sequence
  Description of Artificial Sequence: Synthetic oligonucleotide
ccacaccgugcucugugcu

SEQ ID NO: 1289895 - RNA, 19 nt, Artificial Sequence
  Description of Artificial Sequence: Synthetic oligonucleotide
ccuuucuagcaggucuagu

SEQ ID NO: 1289896 - RNA, 19 nt, Artificial Sequence
  Description of Artificial Sequence: Synthetic oligonucleotide
gccacagugcgggcggccu

SEQ ID NO: 1289897 - RNA, 19 nt, Artificial Sequence
  Description of Artificial Sequence: Synthetic oligonucleotide
ggcuccggggugaccuugu

SEQ ID NO: 1289898 - RNA, 19 nt, Artificial Sequence
  Description of Artificial Sequence: Synthetic oligonucleotide
gccccagcggacucccauu

SEQ ID NO: 1289899 - RNA, 19 nt, Artificial Sequence
  Description of Artificial Sequence: Synthetic oligonucleotide
cccaucgguccaugguaau

SEQ ID NO: 1289900 - RNA, 19 nt, Artificial Sequence
  Description of Artificial Sequence: Synthetic oligonucleotide
cggcguggacacggguuac

SEQ ID NO: 1289901 - RNA, 19 nt, Artificial Sequence
  Description of Artificial Sequence: Synthetic oligonucleotide
cggcugccacggacagaag

SEQ ID NO: 1289902 - RNA, 19 nt, Artificial Sequence
  Description of Artificial Sequence: Synthetic oligonucleotide
ccgcggcaaagcugaacau

SEQ ID NO: 1289903 - RNA, 19 nt, Artificial Sequence
  Description of Artificial Sequence: Synthetic oligonucleotide
gcucuuccgcggagccugu

SEQ ID NO: 1289904 - RNA, 19 nt, Artificial Sequence
  Description of Artificial Sequence: Synthetic oligonucleotide
cccggcugccacggacaga

SEQ ID NO: 1289905 - RNA, 19 nt, Artificial Sequence
  Description of Artificial Sequence: Synthetic oligonucleotide
ccucagcguugguguggua

SEQ ID NO: 1289906 - RNA, 19 nt, Artificial Sequence
  Description of Artificial Sequence: Synthetic oligonucleotide
ccuccgagagcagcuccuu

SEQ ID NO: 1289907 - RNA, 19 nt, Artificial Sequence
  Description of Artificial Sequence: Synthetic oligonucleotide
gcucagcggcaggcuuucu

SEQ ID NO: 1289908 - RNA, 19 nt, Artificial Sequence
  Description of Artificial Sequence: Synthetic oligonucleotide
ccgggucacuguagcuauu

SEQ ID NO: 1289909 - RNA, 19 nt, Artificial Sequence
  Description of Artificial Sequence: Synthetic oligonucleotide
ccccguggugugccacagu

SEQ ID NO: 1289910 - RNA, 19 nt, Artificial Sequence
  Description of Artificial Sequence: Synthetic oligonucleotide
ccgcucuuccgcggagccu

SEQ ID NO: 1289911 - RNA, 19 nt, Artificial Sequence
  Description of Artificial Sequence: Synthetic oligonucleotide
aaagcuuagagcuaaaggg

SEQ ID NO: 1289912 - RNA, 19 nt, Artificial Sequence
  Description of Artificial Sequence: Synthetic oligonucleotide
ucuaaaaugggaaugaccu

SEQ ID NO: 1289913 - RNA, 19 nt, Artificial Sequence
  Description of Artificial Sequence: Synthetic oligonucleotide
ucuuccaaagcuuagagcu

SEQ ID NO: 1289914 - RNA, 19 nt, Artificial Sequence
  Description of Artificial Sequence: Synthetic oligonucleotide
ucagguaguaggaacaagg

SEQ ID NO: 1289915 - RNA, 19 nt, Artificial Sequence
  Description of Artificial Sequence: Synthetic oligonucleotide
ugaacuucagugaaugagg

SEQ ID NO: 1289916 - RNA, 19 nt, Artificial Sequence
  Description of Artificial Sequence: Synthetic oligonucleotide
aaugggaaugaccucuggc

SEQ ID NO: 1289917 - RNA, 19 nt, Artificial Sequence
  Description of Artificial Sequence: Synthetic oligonucleotide
aacccauugcuucucaagg

SEQ ID NO: 1289918 - RNA, 19 nt, Artificial Sequence
  Description of Artificial Sequence: Synthetic oligonucleotide
uggaaugagacucuguucu

SEQ ID NO: 1289919 - RNA, 19 nt, Artificial Sequence
  Description of Artificial Sequence: Synthetic oligonucleotide
gauaaaagagagaagacuc

SEQ ID NO: 1289920 - RNA, 19 nt, Artificial Sequence
  Description of Artificial Sequence: Synthetic oligonucleotide
aagcuuagagcuaaagggc

SEQ ID NO: 1289921 - RNA, 19 nt, Artificial Sequence
  Description of Artificial Sequence: Synthetic oligonucleotide
aauagcagggacucugauc

SEQ ID NO: 1289922 - RNA, 19 nt, Artificial Sequence
  Description of Artificial Sequence: Synthetic oligonucleotide
ucuuauaguccacagcacc

SEQ ID NO: 1289923 - RNA, 19 nt, Artificial Sequence
  Description of Artificial Sequence: Synthetic oligonucleotide
uugaagaccacauugcgac

SEQ ID NO: 1289924 - RNA, 19 nt, Artificial Sequence
  Description of Artificial Sequence: Synthetic oligonucleotide
cucacaagcggcuauagag

SEQ ID NO: 1289925 - RNA, 19 nt, Artificial Sequence
  Description of Artificial Sequence: Synthetic oligonucleotide
aauucugucagcaaccugu

SEQ ID NO: 1289926 - RNA, 19 nt, Artificial Sequence
  Description of Artificial Sequence: Synthetic oligonucleotide
uuccaaagggcucacaagc

SEQ ID NO: 1289927 - RNA, 19 nt, Artificial Sequence
  Description of Artificial Sequence: Synthetic oligonucleotide
ucaaucuucuugcugaacu

SEQ ID NO: 1289928 - RNA, 19 nt, Artificial Sequence
  Description of Artificial Sequence: Synthetic oligonucleotide
ucucauacgccgauuaugc

SEQ ID NO: 1289929 - RNA, 19 nt, Artificial Sequence
  Description of Artificial Sequence: Synthetic oligonucleotide
ggugaugccauccagagcc

SEQ ID NO: 1289930 - RNA, 19 nt, Artificial Sequence
  Description of Artificial Sequence: Synthetic oligonucleotide
aagauaaaagagagaagac

SEQ ID NO: 1289931 - RNA, 19 nt, Artificial Sequence
  Description of Artificial Sequence: Synthetic oligonucleotide
uaugcugaccucauaagga

SEQ ID NO: 1289932 - RNA, 19 nt, Artificial Sequence
  Description of Artificial Sequence: Synthetic oligonucleotide
cauaacgcugucuagcugc

SEQ ID NO: 1289933 - RNA, 19 nt, Artificial Sequence
  Description of Artificial Sequence: Synthetic oligonucleotide
cucauaaggagagugaacc

SEQ ID NO: 1289934 - RNA, 19 nt, Artificial Sequence
  Description of Artificial Sequence: Synthetic oligonucleotide
ugaugaacuggagucaugg

SEQ ID NO: 1289935 - RNA, 19 nt, Artificial Sequence
  Description of Artificial Sequence: Synthetic oligonucleotide
uguauugcagcccaucagu

SEQ ID NO: 1289936 - RNA, 19 nt, Artificial Sequence
  Description of Artificial Sequence: Synthetic oligonucleotide
ugaagauaaaagagagaag

SEQ ID NO: 1289937 - RNA, 19 nt, Artificial Sequence
  Description of Artificial Sequence: Synthetic oligonucleotide
aaucaggagagccaugcca

SEQ ID NO: 1289938 - RNA, 19 nt, Artificial Sequence
  Description of Artificial Sequence: Synthetic oligonucleotide
ugcacuucuaaaaugggaa

SEQ ID NO: 1289939 - RNA, 19 nt, Artificial Sequence
  Description of Artificial Sequence: Synthetic oligonucleotide
cuugaacuggacuuggccc

SEQ ID NO: 1289940 - RNA, 19 nt, Artificial Sequence
  Description of Artificial Sequence: Synthetic oligonucleotide
agcuggacuacacggacgc

SEQ ID NO: 1289941 - RNA, 19 nt, Artificial Sequence
  Description of Artificial Sequence: Synthetic oligonucleotide
ugaacugcacuucuaaaau

SEQ ID NO: 1289942 - RNA, 19 nt, Artificial Sequence
  Description of Artificial Sequence: Synthetic oligonucleotide
agugaaugaggugucaagg

SEQ ID NO: 1289943 - RNA, 19 nt, Artificial Sequence
  Description of Artificial Sequence: Synthetic oligonucleotide
gauaucacccgauaagcca

SEQ ID NO: 1289944 - RNA, 19 nt, Artificial Sequence
  Description of Artificial Sequence: Synthetic oligonucleotide
aggucaguuucccaggaac

SEQ ID NO: 1289945 - RNA, 19 nt, Artificial Sequence
  Description of Artificial Sequence: Synthetic oligonucleotide
agucccuucagcuugcuca

SEQ ID NO: 1289946 - RNA, 19 nt, Artificial Sequence
  Description of Artificial Sequence: Synthetic oligonucleotide
acgccgauuaugcuugucc

SEQ ID NO: 1289947 - RNA, 19 nt, Artificial Sequence
  Description of Artificial Sequence: Synthetic oligonucleotide
uccaaagggcucacaagcg

SEQ ID NO: 1289948 - RNA, 19 nt, Artificial Sequence
  Description of Artificial Sequence: Synthetic oligonucleotide
aacacaucacauucaugug

SEQ ID NO: 1289949 - RNA, 19 nt, Artificial Sequence
  Description of Artificial Sequence: Synthetic oligonucleotide
aaggacacagggcuaacga

SEQ ID NO: 1289950 - RNA, 19 nt, Artificial Sequence
  Description of Artificial Sequence: Synthetic oligonucleotide
ugagacucuguucucugag

SEQ ID NO: 1289951 - RNA, 19 nt, Artificial Sequence
  Description of Artificial Sequence: Synthetic oligonucleotide
ucugucccuagguagcugg

SEQ ID NO: 1289952 - RNA, 19 nt, Artificial Sequence
  Description of Artificial Sequence: Synthetic oligonucleotide
uuccugaucucagugaugc

SEQ ID NO: 1289953 - RNA, 19 nt, Artificial Sequence
  Description of Artificial Sequence: Synthetic oligonucleotide
uguguauugcagcccauca

SEQ ID NO: 1289954 - RNA, 19 nt, Artificial Sequence
  Description of Artificial Sequence: Synthetic oligonucleotide
cugaagauaaaagagagaa

SEQ ID NO: 1289955 - RNA, 19 nt, Artificial Sequence
  Description of Artificial Sequence: Synthetic oligonucleotide
agggacucugaucaccacc

SEQ ID NO: 1289956 - RNA, 19 nt, Artificial Sequence
  Description of Artificial Sequence: Synthetic oligonucleotide
cacaucacauucauguggc

SEQ ID NO: 1289957 - RNA, 19 nt, Artificial Sequence
  Description of Artificial Sequence: Synthetic oligonucleotide
cagugcaaaggacacaggg

SEQ ID NO: 1289958 - RNA, 19 nt, Artificial Sequence
  Description of Artificial Sequence: Synthetic oligonucleotide
auggcuaugcugugguggc

SEQ ID NO: 1289959 - RNA, 19 nt, Artificial Sequence
  Description of Artificial Sequence: Synthetic oligonucleotide
gaugaaggaccuuugaugu

SEQ ID NO: 1289960 - RNA, 19 nt, Artificial Sequence
  Description of Artificial Sequence: Synthetic oligonucleotide
agugagcugaaccagugcu

SEQ ID NO: 1289961 - RNA, 19 nt, Artificial Sequence
  Description of Artificial Sequence: Synthetic oligonucleotide
aaagcuggggucucaguga

SEQ ID NO: 1289962 - RNA, 19 nt, Artificial Sequence
  Description of Artificial Sequence: Synthetic oligonucleotide
cacuaaggcaucuuccagg

SEQ ID NO: 1289963 - RNA, 19 nt, Artificial Sequence
  Description of Artificial Sequence: Synthetic oligonucleotide
gagucauggauuuccaaac

SEQ ID NO: 1289964 - RNA, 19 nt, Artificial Sequence
  Description of Artificial Sequence: Synthetic oligonucleotide
ugaacacuaaggcaucuuc

SEQ ID NO: 1289965 - RNA, 19 nt, Artificial Sequence
  Description of Artificial Sequence: Synthetic oligonucleotide
ugaugugucuuccauucgu

SEQ ID NO: 1289966 - RNA, 19 nt, Artificial Sequence
  Description of Artificial Sequence: Synthetic oligonucleotide
uucccucucaaaccuaugc

SEQ ID NO: 1289967 - RNA, 19 nt, Artificial Sequence
  Description of Artificial Sequence: Synthetic oligonucleotide
aaaugggaaugaccucugg

SEQ ID NO: 1289968 - RNA, 19 nt, Artificial Sequence
  Description of Artificial Sequence: Synthetic oligonucleotide
aagggcacccagaaaacac

SEQ ID NO: 1289969 - RNA, 19 nt, Artificial Sequence
  Description of Artificial Sequence: Synthetic oligonucleotide
ucaaaccuaugcaggagug

SEQ ID NO: 1289970 - RNA, 19 nt, Artificial Sequence
  Description of Artificial Sequence: Synthetic oligonucleotide
cauacgccgauuaugcuug

SEQ ID NO: 1289971 - RNA, 19 nt, Artificial Sequence
  Description of Artificial Sequence: Synthetic oligonucleotide
augggaaugaccucuggca

SEQ ID NO: 1289972 - RNA, 19 nt, Artificial Sequence
  Description of Artificial Sequence: Synthetic oligonucleotide
cugaacuucagugaaugag

SEQ ID NO: 1289973 - RNA, 19 nt, Artificial Sequence
  Description of Artificial Sequence: Synthetic oligonucleotide
ggucuuauaguccacagca

SEQ ID NO: 1289974 - RNA, 19 nt, Artificial Sequence
  Description of Artificial Sequence: Synthetic oligonucleotide
acuacaucagcuuucucau

SEQ ID NO: 1289975 - RNA, 19 nt, Artificial Sequence
  Description of Artificial Sequence: Synthetic oligonucleotide
agauaucacccgauaagcc

SEQ ID NO: 1289976 - RNA, 19 nt, Artificial Sequence
  Description of Artificial Sequence: Synthetic oligonucleotide
ucacaagcggcuauagaga

SEQ ID NO: 1289977 - RNA, 19 nt, Artificial Sequence
  Description of Artificial Sequence: Synthetic oligonucleotide
ggaacuagccaucaguccc

SEQ ID NO: 1289978 - RNA, 19 nt, Artificial Sequence
  Description of Artificial Sequence: Synthetic oligonucleotide
agagugaaccuugauauca

SEQ ID NO: 1289979 - RNA, 19 nt, Artificial Sequence
  Description of Artificial Sequence: Synthetic oligonucleotide
aagaccacauugcgacugg

SEQ ID NO: 1289980 - RNA, 19 nt, Artificial Sequence
  Description of Artificial Sequence: Synthetic oligonucleotide
gaacccauugcuucucaag

SEQ ID NO: 1289981 - RNA, 19 nt, Artificial Sequence
  Description of Artificial Sequence: Synthetic oligonucleotide
uagguagcuggacuacacg

SEQ ID NO: 1289982 - RNA, 19 nt, Artificial Sequence
  Description of Artificial Sequence: Synthetic oligonucleotide
auucauguggcuccucuug

SEQ ID NO: 1289983 - RNA, 19 nt, Artificial Sequence
  Description of Artificial Sequence: Synthetic oligonucleotide
aaaggacacagggcuaacg

SEQ ID NO: 1289984 - RNA, 19 nt, Artificial Sequence
  Description of Artificial Sequence: Synthetic oligonucleotide
caagcggcuauagagacag

SEQ ID NO: 1289985 - RNA, 19 nt, Artificial Sequence
  Description of Artificial Sequence: Synthetic oligonucleotide
auaucacccgauaagccac

SEQ ID NO: 1289986 - RNA, 19 nt, Artificial Sequence
  Description of Artificial Sequence: Synthetic oligonucleotide
gaaaccaggacagugagcu

SEQ ID NO: 1289987 - RNA, 19 nt, Artificial Sequence
  Description of Artificial Sequence: Synthetic oligonucleotide
cuaacgacagcagaaucag

SEQ ID NO: 1289988 - RNA, 19 nt, Artificial Sequence
  Description of Artificial Sequence: Synthetic oligonucleotide
cagauaucacccgauaagc

SEQ ID NO: 1289989 - RNA, 19 nt, Artificial Sequence
  Description of Artificial Sequence: Synthetic oligonucleotide
augcugaccucauaaggag

SEQ ID NO: 1289990 - RNA, 19 nt, Artificial Sequence
  Description of Artificial Sequence: Synthetic oligonucleotide
gauuuccaaaccagaaacc

SEQ ID NO: 1289991 - RNA, 19 nt, Artificial Sequence
  Description of Artificial Sequence: Synthetic oligonucleotide
uuccauucgucucugggaa

SEQ ID NO: 1289992 - RNA, 19 nt, Artificial Sequence
  Description of Artificial Sequence: Synthetic oligonucleotide
ugaaggaccuuugaugugu

SEQ ID NO: 1289993 - RNA, 19 nt, Artificial Sequence
  Description of Artificial Sequence: Synthetic oligonucleotide
aucaccaccccuuccuuuc

SEQ ID NO: 1289994 - RNA, 19 nt, Artificial Sequence
  Description of Artificial Sequence: Synthetic oligonucleotide
aggacacagggcuaacgac

SEQ ID NO: 1289995 - RNA, 19 nt, Artificial Sequence
  Description of Artificial Sequence: Synthetic oligonucleotide
ggagugaugaacuggaguc

SEQ ID NO: 1289996 - RNA, 19 nt, Artificial Sequence
  Description of Artificial Sequence: Synthetic oligonucleotide
cuggcuuggaaugagacuc

SEQ ID NO: 1289997 - RNA, 19 nt, Artificial Sequence
  Description of Artificial Sequence: Synthetic oligonucleotide
ucuuuccugaucucaguga

SEQ ID NO: 1289998 - RNA, 19 nt, Artificial Sequence
  Description of Artificial Sequence: Synthetic oligonucleotide
aacuucagugaaugaggug

SEQ ID NO: 1289999 - RNA, 19 nt, Artificial Sequence
  Description of Artificial Sequence: Synthetic oligonucleotide
uugaugugucuuccauucg

SEQ ID NO: 1290000 - RNA, 19 nt, Artificial Sequence
  Description of Artificial Sequence: Synthetic oligonucleotide
ugggaacuagccaucaguc

SEQ ID NO: 1290001 - RNA, 19 nt, Artificial Sequence
  Description of Artificial Sequence: Synthetic oligonucleotide
cagguaguaggaacaaggc

SEQ ID NO: 1290002 - RNA, 19 nt, Artificial Sequence
  Description of Artificial Sequence: Synthetic oligonucleotide
aagcuggggucucagugag

SEQ ID NO: 1290003 - RNA, 19 nt, Artificial Sequence
  Description of Artificial Sequence: Synthetic oligonucleotide
cauggcuaugcuguggugg

SEQ ID NO: 1290004 - RNA, 19 nt, Artificial Sequence
  Description of Artificial Sequence: Synthetic oligonucleotide
aaaccuaugcaggagugau

SEQ ID NO: 1290005 - RNA, 19 nt, Artificial Sequence
  Description of Artificial Sequence: Synthetic oligonucleotide
agugaaccuugauaucauc

SEQ ID NO: 1290006 - RNA, 19 nt, Artificial Sequence
  Description of Artificial Sequence: Synthetic oligonucleotide
cuagccaucagucccacca

SEQ ID NO: 1290007 - RNA, 19 nt, Artificial Sequence
  Description of Artificial Sequence: Synthetic oligonucleotide
acggugaugccauccagag

SEQ ID NO: 1290008 - RNA, 19 nt, Artificial Sequence
  Description of Artificial Sequence: Synthetic oligonucleotide
cucgguguguauugcagcc

SEQ ID NO: 1290009 - RNA, 19 nt, Artificial Sequence
  Description of Artificial Sequence: Synthetic oligonucleotide
gcagauaucacccgauaag

SEQ ID NO: 1290010 - RNA, 19 nt, Artificial Sequence
  Description of Artificial Sequence: Synthetic oligonucleotide
cuuauaguccacagcacca

SEQ ID NO: 1290011 - RNA, 19 nt, Artificial Sequence
  Description of Artificial Sequence: Synthetic oligonucleotide
ucauacgccgauuaugcuu

SEQ ID NO: 1290012 - RNA, 19 nt, Artificial Sequence
  Description of Artificial Sequence: Synthetic oligonucleotide
ucuuggcagauaucacccg

SEQ ID NO: 1290013 - RNA, 19 nt, Artificial Sequence
  Description of Artificial Sequence: Synthetic oligonucleotide
ccuaggaaggcacaguucc

SEQ ID NO: 1290014 - RNA, 19 nt, Artificial Sequence
  Description of Artificial Sequence: Synthetic oligonucleotide
uccuuacuugaacuggacu

SEQ ID NO: 1290015 - RNA, 19 nt, Artificial Sequence
  Description of Artificial Sequence: Synthetic oligonucleotide
caucagcuuucucauacgc

SEQ ID NO: 1290016 - RNA, 19 nt, Artificial Sequence
  Description of Artificial Sequence: Synthetic oligonucleotide
ucauaaggagagugaaccu

SEQ ID NO: 1290017 - RNA, 19 nt, Artificial Sequence
  Description of Artificial Sequence: Synthetic oligonucleotide
ugccagucccuucagcuug

SEQ ID NO: 1290018 - RNA, 19 nt, Artificial Sequence
  Description of Artificial Sequence: Synthetic oligonucleotide
aacaaggccaggaguggac

SEQ ID NO: 1290019 - RNA, 19 nt, Artificial Sequence
  Description of Artificial Sequence: Synthetic oligonucleotide
aggagugaugaacuggagu

SEQ ID NO: 1290020 - RNA, 19 nt, Artificial Sequence
  Description of Artificial Sequence: Synthetic oligonucleotide
gagaaacaauagcagggac

SEQ ID NO: 1290021 - RNA, 19 nt, Artificial Sequence
  Description of Artificial Sequence: Synthetic oligonucleotide
cuuacuugaacuggacuug

SEQ ID NO: 1290022 - RNA, 19 nt, Artificial Sequence
  Description of Artificial Sequence: Synthetic oligonucleotide
cuaugcaggagugaugaac

SEQ ID NO: 1290023 - RNA, 19 nt, Artificial Sequence
  Description of Artificial Sequence: Synthetic oligonucleotide
acacggacgcuguaguauc

SEQ ID NO: 1290024 - RNA, 19 nt, Artificial Sequence
  Description of Artificial Sequence: Synthetic oligonucleotide
uaucacccgauaagccacg

SEQ ID NO: 1290025 - RNA, 19 nt, Artificial Sequence
  Description of Artificial Sequence: Synthetic oligonucleotide
ucgucucugggaacuagcc

SEQ ID NO: 1290026 - RNA, 19 nt, Artificial Sequence
  Description of Artificial Sequence: Synthetic oligonucleotide
uauugcagcccaucagucu

SEQ ID NO: 1290027 - RNA, 19 nt, Artificial Sequence
  Description of Artificial Sequence: Synthetic oligonucleotide
uugccgaugaaccgcugcc

SEQ ID NO: 1290028 - RNA, 19 nt, Artificial Sequence
  Description of Artificial Sequence: Synthetic oligonucleotide
auaaaagagagaagacucu

SEQ ID NO: 1290029 - RNA, 19 nt, Artificial Sequence
  Description of Artificial Sequence: Synthetic oligonucleotide
uacggugaugccauccaga

SEQ ID NO: 1290030 - RNA, 19 nt, Artificial Sequence
  Description of Artificial Sequence: Synthetic oligonucleotide
cacaagcggcuauagagac

SEQ ID NO: 1290031 - RNA, 19 nt, Artificial Sequence
  Description of Artificial Sequence: Synthetic oligonucleotide
uucgucucugggaacuagc

SEQ ID NO: 1290032 - RNA, 19 nt, Artificial Sequence
  Description of Artificial Sequence: Synthetic oligonucleotide
aggagagugaaccuugaua

SEQ ID NO: 1290033 - RNA, 19 nt, Artificial Sequence
  Description of Artificial Sequence: Synthetic oligonucleotide
aguucugucugcacugaac

SEQ ID NO: 1290034 - RNA, 19 nt, Artificial Sequence
  Description of Artificial Sequence: Synthetic oligonucleotide
ucauaacgcugucuagcug

SEQ ID NO: 1290035 - RNA, 19 nt, Artificial Sequence
  Description of Artificial Sequence: Synthetic oligonucleotide
uaaaagagagaagacucuu

SEQ ID NO: 1290036 - RNA, 19 nt, Artificial Sequence
  Description of Artificial Sequence: Synthetic oligonucleotide
augaaccgcugccguaugc

SEQ ID NO: 1290037 - RNA, 19 nt, Artificial Sequence
  Description of Artificial Sequence: Synthetic oligonucleotide
ucucaaaccuaugcaggag

SEQ ID NO: 1290038 - RNA, 19 nt, Artificial Sequence
  Description of Artificial Sequence: Synthetic oligonucleotide
ccaagaauggcuucccagg

SEQ ID NO: 1290039 - RNA, 19 nt, Artificial Sequence
  Description of Artificial Sequence: Synthetic oligonucleotide
acuacacggacgcuguagu

SEQ ID NO: 1290040 - RNA, 19 nt, Artificial Sequence
  Description of Artificial Sequence: Synthetic oligonucleotide
uccuggcuuggaaugagac

SEQ ID NO: 1290041 - RNA, 19 nt, Artificial Sequence
  Description of Artificial Sequence: Synthetic oligonucleotide
ucugaucaccaccccuucc

SEQ ID NO: 1290042 - RNA, 19 nt, Artificial Sequence
  Description of Artificial Sequence: Synthetic oligonucleotide
gaaguccgggcccugcucc

SEQ ID NO: 1290043 - RNA, 19 nt, Artificial Sequence
  Description of Artificial Sequence: Synthetic oligonucleotide
ugggaaugaccucuggcau

SEQ ID NO: 1290044 - RNA, 19 nt, Artificial Sequence
  Description of Artificial Sequence: Synthetic oligonucleotide
cuagguagcuggacuacac

SEQ ID NO: 1290045 - RNA, 19 nt, Artificial Sequence
  Description of Artificial Sequence: Synthetic oligonucleotide
guguauugcagcccaucag

SEQ ID NO: 1290046 - RNA, 19 nt, Artificial Sequence
  Description of Artificial Sequence: Synthetic oligonucleotide
aaagggcacccagaaaaca

SEQ ID NO: 1290047 - RNA, 19 nt, Artificial Sequence
  Description of Artificial Sequence: Synthetic oligonucleotide
uguggguagcucucggugu

SEQ ID NO: 1290048 - RNA, 19 nt, Artificial Sequence
  Description of Artificial Sequence: Synthetic oligonucleotide
ugcugcaugcccucugcag

SEQ ID NO: 1290049 - RNA, 19 nt, Artificial Sequence
  Description of Artificial Sequence: Synthetic oligonucleotide
cuugcucaggaucuguguc

SEQ ID NO: 1290050 - RNA, 19 nt, Artificial Sequence
  Description of Artificial Sequence: Synthetic oligonucleotide
cagugaaugaggugucaag

SEQ ID NO: 1290051 - RNA, 19 nt, Artificial Sequence
  Description of Artificial Sequence: Synthetic oligonucleotide
uggacuacacggacgcugu

SEQ ID NO: 1290052 - RNA, 19 nt, Artificial Sequence
  Description of Artificial Sequence: Synthetic oligonucleotide
gucauggauuuccaaacca

SEQ ID NO: 1290053 - RNA, 19 nt, Artificial Sequence
  Description of Artificial Sequence: Synthetic oligonucleotide
cuggcuugccgaugaaccg

SEQ ID NO: 1290054 - RNA, 19 nt, Artificial Sequence
  Description of Artificial Sequence: Synthetic oligonucleotide
gaugcuggagagaggcagg

SEQ ID NO: 1290055 - RNA, 19 nt, Artificial Sequence
  Description of Artificial Sequence: Synthetic oligonucleotide
auaagccacgucuggcuug

SEQ ID NO: 1290056 - RNA, 19 nt, Artificial Sequence
  Description of Artificial Sequence: Synthetic oligonucleotide
uccucuugguggcccaucc

SEQ ID NO: 1290057 - RNA, 19 nt, Artificial Sequence
  Description of Artificial Sequence: Synthetic oligonucleotide
guagcuggacuacacggac

SEQ ID NO: 1290058 - RNA, 19 nt, Artificial Sequence
  Description of Artificial Sequence: Synthetic oligonucleotide
ugcugaccucauaaggaga

SEQ ID NO: 1290059 - RNA, 19 nt, Artificial Sequence
  Description of Artificial Sequence: Synthetic oligonucleotide
uuccaaagcuuagagcuaa

SEQ ID NO: 1290060 - RNA, 19 nt, Artificial Sequence
  Description of Artificial Sequence: Synthetic oligonucleotide
gacuacacggacgcuguag

SEQ ID NO: 1290061 - RNA, 19 nt, Artificial Sequence
  Description of Artificial Sequence: Synthetic oligonucleotide
gaaucaggagagccaugcc

SEQ ID NO: 1290062 - RNA, 19 nt, Artificial Sequence
  Description of Artificial Sequence: Synthetic oligonucleotide
agaaaacacaucacauuca

SEQ ID NO: 1290063 - RNA, 19 nt, Artificial Sequence
  Description of Artificial Sequence: Synthetic oligonucleotide
caaagggcacccagaaaac

SEQ ID NO: 1290064 - RNA, 19 nt, Artificial Sequence
  Description of Artificial Sequence: Synthetic oligonucleotide
uggugaugaaggaccuuug

SEQ ID NO: 1290065 - RNA, 19 nt, Artificial Sequence
  Description of Artificial Sequence: Synthetic oligonucleotide
cuaggaaggcacaguuccc

SEQ ID NO: 1290066 - RNA, 19 nt, Artificial Sequence
  Description of Artificial Sequence: Synthetic oligonucleotide
aagaauggcuucccagguu

SEQ ID NO: 1290067 - RNA, 19 nt, Artificial Sequence
  Description of Artificial Sequence: Synthetic oligonucleotide
ucaguguccagugccaguc

SEQ ID NO: 1290068 - RNA, 19 nt, Artificial Sequence
  Description of Artificial Sequence: Synthetic oligonucleotide
ugauguugaagaccacauu

SEQ ID NO: 1290069 - RNA, 19 nt, Artificial Sequence
  Description of Artificial Sequence: Synthetic oligonucleotide
uucagguaguaggaacaag

SEQ ID NO: 1290070 - RNA, 19 nt, Artificial Sequence
  Description of Artificial Sequence: Synthetic oligonucleotide
agaucugacuccaucuucu

SEQ ID NO: 1290071 - RNA, 19 nt, Artificial Sequence
  Description of Artificial Sequence: Synthetic oligonucleotide
cagucuggaugcugcaugc

SEQ ID NO: 1290072 - RNA, 19 nt, Artificial Sequence
  Description of Artificial Sequence: Synthetic oligonucleotide
ggagacuccaauucuguca

SEQ ID NO: 1290073 - RNA, 19 nt, Artificial Sequence
  Description of Artificial Sequence: Synthetic oligonucleotide
accgcugccguaugcugac

SEQ ID NO: 1290074 - RNA, 19 nt, Artificial Sequence
  Description of Artificial Sequence: Synthetic oligonucleotide
cuuccauucgucucuggga

SEQ ID NO: 1290075 - RNA, 19 nt, Artificial Sequence
  Description of Artificial Sequence: Synthetic oligonucleotide
aacuagccaucagucccac

SEQ ID NO: 1290076 - RNA, 19 nt, Artificial Sequence
  Description of Artificial Sequence: Synthetic oligonucleotide
agcggcuauagagacagcu

SEQ ID NO: 1290077 - RNA, 19 nt, Artificial Sequence
  Description of Artificial Sequence: Synthetic oligonucleotide
acugaacuucagugaauga

SEQ ID NO: 1290078 - RNA, 19 nt, Artificial Sequence
  Description of Artificial Sequence: Synthetic oligonucleotide
cacauugcgacugggccgc

SEQ ID NO: 1290079 - RNA, 19 nt, Artificial Sequence
  Description of Artificial Sequence: Synthetic oligonucleotide
uagcucucgguguguauug

SEQ ID NO: 1290080 - RNA, 19 nt, Artificial Sequence
  Description of Artificial Sequence: Synthetic oligonucleotide
uggccauccuuacuugaac

SEQ ID NO: 1290081 - RNA, 19 nt, Artificial Sequence
  Description of Artificial Sequence: Synthetic oligonucleotide
augaaggaccuuugaugug

SEQ ID NO: 1290082 - RNA, 19 nt, Artificial Sequence
  Description of Artificial Sequence: Synthetic oligonucleotide
auccuaggaaggcacaguu

SEQ ID NO: 1290083 - RNA, 19 nt, Artificial Sequence
  Description of Artificial Sequence: Synthetic oligonucleotide
acccauugcuucucaaggu

SEQ ID NO: 1290084 - RNA, 19 nt, Artificial Sequence
  Description of Artificial Sequence: Synthetic oligonucleotide
cuuagagcuaaagggccac

SEQ ID NO: 1290085 - RNA, 19 nt, Artificial Sequence
  Description of Artificial Sequence: Synthetic oligonucleotide
uacacggacgcuguaguau

SEQ ID NO: 1290086 - RNA, 19 nt, Artificial Sequence
  Description of Artificial Sequence: Synthetic oligonucleotide
ucagugaaugaggugucaa

SEQ ID NO: 1290087 - RNA, 19 nt, Artificial Sequence
  Description of Artificial Sequence: Synthetic oligonucleotide
gaggacaggaagcauggcu

SEQ ID NO: 1290088 - RNA, 19 nt, Artificial Sequence
  Description of Artificial Sequence: Synthetic oligonucleotide
uugccugguccacugcuac

SEQ ID NO: 1290089 - RNA, 19 nt, Artificial Sequence
  Description of Artificial Sequence: Synthetic oligonucleotide
guugaagaccacauugcga

SEQ ID NO: 1290090 - RNA, 19 nt, Artificial Sequence
  Description of Artificial Sequence: Synthetic oligonucleotide
cuucagugaaugagguguc

SEQ ID NO: 1290091 - RNA, 19 nt, Artificial Sequence
  Description of Artificial Sequence: Synthetic oligonucleotide
gaucucagugaugcuggag

SEQ ID NO: 1290092 - RNA, 19 nt, Artificial Sequence
  Description of Artificial Sequence: Synthetic oligonucleotide
gagagugaaccuugauauc

SEQ ID NO: 1290093 - RNA, 19 nt, Artificial Sequence
  Description of Artificial Sequence: Synthetic oligonucleotide
agccacaucuagaucugac

SEQ ID NO: 1290094 - RNA, 19 nt, Artificial Sequence
  Description of Artificial Sequence: Synthetic oligonucleotide
agacuccaauucugucagc

SEQ ID NO: 1290095 - RNA, 19 nt, Artificial Sequence
  Description of Artificial Sequence: Synthetic oligonucleotide
uccuaggaaggcacaguuc

SEQ ID NO: 1290096 - RNA, 19 nt, Artificial Sequence
  Description of Artificial Sequence: Synthetic oligonucleotide
uccugaacacuaaggcauc

SEQ ID NO: 1290097 - RNA, 19 nt, Artificial Sequence
  Description of Artificial Sequence: Synthetic oligonucleotide
ggagucauggauuuccaaa

SEQ ID NO: 1290098 - RNA, 19 nt, Artificial Sequence
  Description of Artificial Sequence: Synthetic oligonucleotide
aaggaccuuugaugugucu

SEQ ID NO: 1290099 - RNA, 19 nt, Artificial Sequence
  Description of Artificial Sequence: Synthetic oligonucleotide
gaugugucuuccauucguc

SEQ ID NO: 1290100 - RNA, 19 nt, Artificial Sequence
  Description of Artificial Sequence: Synthetic oligonucleotide
cugcacuucuaaaauggga

SEQ ID NO: 1290101 - RNA, 19 nt, Artificial Sequence
  Description of Artificial Sequence: Synthetic oligonucleotide
ugaaccgcugccguaugcu

SEQ ID NO: 1290102 - RNA, 19 nt, Artificial Sequence
  Description of Artificial Sequence: Synthetic oligonucleotide
cauccuuacuugaacugga

SEQ ID NO: 1290103 - RNA, 19 nt, Artificial Sequence
  Description of Artificial Sequence: Synthetic oligonucleotide
ugccgaugaaccgcugccg

SEQ ID NO: 1290104 - RNA, 19 nt, Artificial Sequence
  Description of Artificial Sequence: Synthetic oligonucleotide
acuagccaucagucccacc

SEQ ID NO: 1290105 - RNA, 19 nt, Artificial Sequence
  Description of Artificial Sequence: Synthetic oligonucleotide
cuggacuacacggacgcug

SEQ ID NO: 1290106 - RNA, 19 nt, Artificial Sequence
  Description of Artificial Sequence: Synthetic oligonucleotide
gaaccgcugccguaugcug

SEQ ID NO: 1290107 - RNA, 19 nt, Artificial Sequence
  Description of Artificial Sequence: Synthetic oligonucleotide
acugcuacggugaugccau

SEQ ID NO: 1290108 - RNA, 19 nt, Artificial Sequence
  Description of Artificial Sequence: Synthetic oligonucleotide
ugcuacggugaugccaucc

SEQ ID NO: 1290109 - RNA, 19 nt, Artificial Sequence
  Description of Artificial Sequence: Synthetic oligonucleotide
gacugugauggcacugaag

SEQ ID NO: 1290110 - RNA, 19 nt, Artificial Sequence
  Description of Artificial Sequence: Synthetic oligonucleotide
gucccuucagcuugcucag

SEQ ID NO: 1290111 - RNA, 19 nt, Artificial Sequence
  Description of Artificial Sequence: Synthetic oligonucleotide
auccuuacuugaacuggac

SEQ ID NO: 1290112 - RNA, 19 nt, Artificial Sequence
  Description of Artificial Sequence: Synthetic oligonucleotide
agacucuuuccugaucuca

SEQ ID NO: 1290113 - RNA, 19 nt, Artificial Sequence
  Description of Artificial Sequence: Synthetic oligonucleotide
acacagggcuaacgacagc

SEQ ID NO: 1290114 - RNA, 19 nt, Artificial Sequence
  Description of Artificial Sequence: Synthetic oligonucleotide
uggcuugccgaugaaccgc

SEQ ID NO: 1290115 - RNA, 19 nt, Artificial Sequence
  Description of Artificial Sequence: Synthetic oligonucleotide
aacuggagucauggauuuc

SEQ ID NO: 1290116 - RNA, 19 nt, Artificial Sequence
  Description of Artificial Sequence: Synthetic oligonucleotide
auugcgacugggccgcagu

SEQ ID NO: 1290117 - RNA, 19 nt, Artificial Sequence
  Description of Artificial Sequence: Synthetic oligonucleotide
ugcaaaggacacagggcua

SEQ ID NO: 1290118 - RNA, 19 nt, Artificial Sequence
  Description of Artificial Sequence: Synthetic oligonucleotide
gcugaccucauaaggagag

SEQ ID NO: 1290119 - RNA, 19 nt, Artificial Sequence
  Description of Artificial Sequence: Synthetic oligonucleotide
ugccugguccacugcuacg

SEQ ID NO: 1290120 - RNA, 19 nt, Artificial Sequence
  Description of Artificial Sequence: Synthetic oligonucleotide
aacuggacuuggcccacau

SEQ ID NO: 1290121 - RNA, 19 nt, Artificial Sequence
  Description of Artificial Sequence: Synthetic oligonucleotide
augagacucuguucucuga

SEQ ID NO: 1290122 - RNA, 19 nt, Artificial Sequence
  Description of Artificial Sequence: Synthetic oligonucleotide
gaugaaccgcugccguaug

SEQ ID NO: 1290123 - RNA, 19 nt, Artificial Sequence
  Description of Artificial Sequence: Synthetic oligonucleotide
aaacaauagcagggacucu

SEQ ID NO: 1290124 - RNA, 19 nt, Artificial Sequence
  Description of Artificial Sequence: Synthetic oligonucleotide
aggguugccugguccacug

SEQ ID NO: 1290125 - RNA, 19 nt, Artificial Sequence
  Description of Artificial Sequence: Synthetic oligonucleotide
auaguccacagcaccaaga

SEQ ID NO: 1290126 - RNA, 19 nt, Artificial Sequence
  Description of Artificial Sequence: Synthetic oligonucleotide
acgucuggcuugccgauga

SEQ ID NO: 1290127 - RNA, 19 nt, Artificial Sequence
  Description of Artificial Sequence: Synthetic oligonucleotide
gggaacuagccaucagucc

SEQ ID NO: 1290128 - RNA, 19 nt, Artificial Sequence
  Description of Artificial Sequence: Synthetic oligonucleotide
cuacggugaugccauccag

SEQ ID NO: 1290129 - RNA, 19 nt, Artificial Sequence
  Description of Artificial Sequence: Synthetic oligonucleotide
ucccuagguagcuggacua

SEQ ID NO: 1290130 - RNA, 19 nt, Artificial Sequence
  Description of Artificial Sequence: Synthetic oligonucleotide
agcucucgguguguauugc

SEQ ID NO: 1290131 - RNA, 19 nt, Artificial Sequence
  Description of Artificial Sequence: Synthetic oligonucleotide
ccaaagggcucacaagcgg

SEQ ID NO: 1290132 - RNA, 19 nt, Artificial Sequence
  Description of Artificial Sequence: Synthetic oligonucleotide
ccacaucuagaucugacuc

SEQ ID NO: 1290133 - RNA, 19 nt, Artificial Sequence
  Description of Artificial Sequence: Synthetic oligonucleotide
gagugaugaacuggaguca

SEQ ID NO: 1290134 - RNA, 19 nt, Artificial Sequence
  Description of Artificial Sequence: Synthetic oligonucleotide
aaccuaugcaggagugaug

SEQ ID NO: 1290135 - RNA, 19 nt, Artificial Sequence
  Description of Artificial Sequence: Synthetic oligonucleotide
gucucugggaacuagccau

SEQ ID NO: 1290136 - RNA, 19 nt, Artificial Sequence
  Description of Artificial Sequence: Synthetic oligonucleotide
gaccacauugcgacugggc

SEQ ID NO: 1290137 - RNA, 19 nt, Artificial Sequence
  Description of Artificial Sequence: Synthetic oligonucleotide
gggacucugaucaccaccc

SEQ ID NO: 1290138 - RNA, 19 nt, Artificial Sequence
  Description of Artificial Sequence: Synthetic oligonucleotide
gugaaugaggugucaaggu

SEQ ID NO: 1290139 - RNA, 19 nt, Artificial Sequence
  Description of Artificial Sequence: Synthetic oligonucleotide
gcuaacgacagcagaauca

SEQ ID NO: 1290140 - RNA, 19 nt, Artificial Sequence
  Description of Artificial Sequence: Synthetic oligonucleotide
gugucaaggucaguuuccc

SEQ ID NO: 1290141 - RNA, 19 nt, Artificial Sequence
  Description of Artificial Sequence: Synthetic oligonucleotide
cuuggaaugagacucuguu

SEQ ID NO: 1290142 - RNA, 19 nt, Artificial Sequence
  Description of Artificial Sequence: Synthetic oligonucleotide
gaacuagccaucaguccca

SEQ ID NO: 1290143 - RNA, 19 nt, Artificial Sequence
  Description of Artificial Sequence: Synthetic oligonucleotide
ugaucucagugaugcugga

SEQ ID NO: 1290144 - RNA, 19 nt, Artificial Sequence
  Description of Artificial Sequence: Synthetic oligonucleotide
uugcgacugggccgcagug

SEQ ID NO: 1290145 - RNA, 19 nt, Artificial Sequence
  Description of Artificial Sequence: Synthetic oligonucleotide
ccauccuuacuugaacugg

SEQ ID NO: 1290146 - RNA, 19 nt, Artificial Sequence
  Description of Artificial Sequence: Synthetic oligonucleotide
gggucuuauaguccacagc

SEQ ID NO: 1290147 - RNA, 19 nt, Artificial Sequence
  Description of Artificial Sequence: Synthetic oligonucleotide
gaccucauaaggagaguga

SEQ ID NO: 1290148 - RNA, 19 nt, Artificial Sequence
  Description of Artificial Sequence: Synthetic oligonucleotide
uggcagauaucacccgaua

SEQ ID NO: 1290149 - RNA, 19 nt, Artificial Sequence
  Description of Artificial Sequence: Synthetic oligonucleotide
agggcuaacgacagcagaa

SEQ ID NO: 1290150 - RNA, 19 nt, Artificial Sequence
  Description of Artificial Sequence: Synthetic oligonucleotide
ucgguguguauugcagccc

SEQ ID NO: 1290151 - RNA, 19 nt, Artificial Sequence
  Description of Artificial Sequence: Synthetic oligonucleotide
caggagugaugaacuggag

SEQ ID NO: 1290152 - RNA, 19 nt, Artificial Sequence
  Description of Artificial Sequence: Synthetic oligonucleotide
gguucagguaguaggaaca

SEQ ID NO: 1290153 - RNA, 19 nt, Artificial Sequence
  Description of Artificial Sequence: Synthetic oligonucleotide
agguugugcuggcagcagu

SEQ ID NO: 1290154 - RNA, 19 nt, Artificial Sequence
  Description of Artificial Sequence: Synthetic oligonucleotide
gccauccuuacuugaacug

SEQ ID NO: 1290155 - RNA, 19 nt, Artificial Sequence
  Description of Artificial Sequence: Synthetic oligonucleotide
agguuccagugcaaaggac

SEQ ID NO: 1290156 - RNA, 19 nt, Artificial Sequence
  Description of Artificial Sequence: Synthetic oligonucleotide
uucugaagcuggccccacu

SEQ ID NO: 1290157 - RNA, 19 nt, Artificial Sequence
  Description of Artificial Sequence: Synthetic oligonucleotide
cacccgauaagccacgucu

SEQ ID NO: 1290158 - RNA, 19 nt, Artificial Sequence
  Description of Artificial Sequence: Synthetic oligonucleotide
uccauucgucucugggaac

SEQ ID NO: 1290159 - RNA, 19 nt, Artificial Sequence
  Description of Artificial Sequence: Synthetic oligonucleotide
guauugcagcccaucaguc

SEQ ID NO: 1290160 - RNA, 19 nt, Artificial Sequence
  Description of Artificial Sequence: Synthetic oligonucleotide
ggaccuuugaugugucuuc

SEQ ID NO: 1290161 - RNA, 19 nt, Artificial Sequence
  Description of Artificial Sequence: Synthetic oligonucleotide
aaccgcugccguaugcuga

SEQ ID NO: 1290162 - RNA, 19 nt, Artificial Sequence
  Description of Artificial Sequence: Synthetic oligonucleotide
agcuuucucauacgccgau

SEQ ID NO: 1290163 - RNA, 19 nt, Artificial Sequence
  Description of Artificial Sequence: Synthetic oligonucleotide
ugucuuccauucgucucug

SEQ ID NO: 1290164 - RNA, 19 nt, Artificial Sequence
  Description of Artificial Sequence: Synthetic oligonucleotide
cagguuccagugcaaagga

SEQ ID NO: 1290165 - RNA, 19 nt, Artificial Sequence
  Description of Artificial Sequence: Synthetic oligonucleotide
gaccucuggcaucuuggca

SEQ ID NO: 1290166 - RNA, 19 nt, Artificial Sequence
  Description of Artificial Sequence: Synthetic oligonucleotide
cuuggcccacaugcaaagg

SEQ ID NO: 1290167 - RNA, 19 nt, Artificial Sequence
  Description of Artificial Sequence: Synthetic oligonucleotide
gaacaaggccaggagugga

SEQ ID NO: 1290168 - RNA, 19 nt, Artificial Sequence
  Description of Artificial Sequence: Synthetic oligonucleotide
ggggagguugugcuggcag

SEQ ID NO: 1290169 - RNA, 19 nt, Artificial Sequence
  Description of Artificial Sequence: Synthetic oligonucleotide
uccaaagcuuagagcuaaa

SEQ ID NO: 1290170 - RNA, 19 nt, Artificial Sequence
  Description of Artificial Sequence: Synthetic oligonucleotide
acaauagcagggacucuga

SEQ ID NO: 1290171 - RNA, 19 nt, Artificial Sequence
  Description of Artificial Sequence: Synthetic oligonucleotide
gacaggaagcauggcuaug

SEQ ID NO: 1290172 - RNA, 19 nt, Artificial Sequence
  Description of Artificial Sequence: Synthetic oligonucleotide
gucauggggagguugugcu

SEQ ID NO: 1290173 - RNA, 19 nt, Artificial Sequence
  Description of Artificial Sequence: Synthetic oligonucleotide
agaccacauugcgacuggg

SEQ ID NO: 1290174 - RNA, 19 nt, Artificial Sequence
  Description of Artificial Sequence: Synthetic oligonucleotide
cucaaaccuaugcaggagu

SEQ ID NO: 1290175 - RNA, 19 nt, Artificial Sequence
  Description of Artificial Sequence: Synthetic oligonucleotide
ugcaugcccucugcagggg

SEQ ID NO: 1290176 - RNA, 19 nt, Artificial Sequence
  Description of Artificial Sequence: Synthetic oligonucleotide
gacucugaucaccaccccu

SEQ ID NO: 1290177 - RNA, 19 nt, Artificial Sequence
  Description of Artificial Sequence: Synthetic oligonucleotide
ggccgcagugagcugaacc

SEQ ID NO: 1290178 - RNA, 19 nt, Artificial Sequence
  Description of Artificial Sequence: Synthetic oligonucleotide
ucacccgauaagccacguc

SEQ ID NO: 1290179 - RNA, 19 nt, Artificial Sequence
  Description of Artificial Sequence: Synthetic oligonucleotide
gaacuggagucauggauuu

SEQ ID NO: 1290180 - RNA, 19 nt, Artificial Sequence
  Description of Artificial Sequence: Synthetic oligonucleotide
caucuucccucucaaaccu

SEQ ID NO: 1290181 - RNA, 19 nt, Artificial Sequence
  Description of Artificial Sequence: Synthetic oligonucleotide
ggcagauaucacccgauaa

SEQ ID NO: 1290182 - RNA, 19 nt, Artificial Sequence
  Description of Artificial Sequence: Synthetic oligonucleotide
acucugaucaccaccccuu

SEQ ID NO: 1290183 - RNA, 19 nt, Artificial Sequence
  Description of Artificial Sequence: Synthetic oligonucleotide
cugggaacuagccaucagu

SEQ ID NO: 1290184 - RNA, 19 nt, Artificial Sequence
  Description of Artificial Sequence: Synthetic oligonucleotide
agggcacccagaaaacaca

SEQ ID NO: 1290185 - RNA, 19 nt, Artificial Sequence
  Description of Artificial Sequence: Synthetic oligonucleotide
ugccguaugcugaccucau

SEQ ID NO: 1290186 - RNA, 19 nt, Artificial Sequence
  Description of Artificial Sequence: Synthetic oligonucleotide
ugcgacugggccgcaguga

SEQ ID NO: 1290187 - RNA, 19 nt, Artificial Sequence
  Description of Artificial Sequence: Synthetic oligonucleotide
ccucauaaggagagugaac

SEQ ID NO: 1290188 - RNA, 19 nt, Artificial Sequence
  Description of Artificial Sequence: Synthetic oligonucleotide
ggcacaguucccaggcagg

SEQ ID NO: 1290189 - RNA, 19 nt, Artificial Sequence
  Description of Artificial Sequence: Synthetic oligonucleotide
gaaggaccuuugauguguc

SEQ ID NO: 1290190 - RNA, 19 nt, Artificial Sequence
  Description of Artificial Sequence: Synthetic oligonucleotide
gacuuggcccacaugcaaa

SEQ ID NO: 1290191 - RNA, 19 nt, Artificial Sequence
  Description of Artificial Sequence: Synthetic oligonucleotide
cguaugcugaccucauaag

SEQ ID NO: 1290192 - RNA, 19 nt, Artificial Sequence
  Description of Artificial Sequence: Synthetic oligonucleotide
ggaaugagacucuguucuc

SEQ ID NO: 1290193 - RNA, 19 nt, Artificial Sequence
  Description of Artificial Sequence: Synthetic oligonucleotide
caguguccagugccagucc

SEQ ID NO: 1290194 - RNA, 19 nt, Artificial Sequence
  Description of Artificial Sequence: Synthetic oligonucleotide
gcgacugggccgcagugag

SEQ ID NO: 1290195 - RNA, 19 nt, Artificial Sequence
  Description of Artificial Sequence: Synthetic oligonucleotide
uccugaucucagugaugcu

SEQ ID NO: 1290196 - RNA, 19 nt, Artificial Sequence
  Description of Artificial Sequence: Synthetic oligonucleotide
auaacgcugucuagcugcu

SEQ ID NO: 1290197 - RNA, 19 nt, Artificial Sequence
  Description of Artificial Sequence: Synthetic oligonucleotide
ggcuaacgacagcagaauc

SEQ ID NO: 1290198 - RNA, 19 nt, Artificial Sequence
  Description of Artificial Sequence: Synthetic oligonucleotide
ccaaagcuuagagcuaaag

SEQ ID NO: 1290199 - RNA, 19 nt, Artificial Sequence
  Description of Artificial Sequence: Synthetic oligonucleotide
cccgauaagccacgucugg

SEQ ID NO: 1290200 - RNA, 19 nt, Artificial Sequence
  Description of Artificial Sequence: Synthetic oligonucleotide
cucuugguggcccauccua

SEQ ID NO: 1290201 - RNA, 19 nt, Artificial Sequence
  Description of Artificial Sequence: Synthetic oligonucleotide
agggcucacaagcggcuau

SEQ ID NO: 1290202 - RNA, 19 nt, Artificial Sequence
  Description of Artificial Sequence: Synthetic oligonucleotide
guguguauugcagcccauc

SEQ ID NO: 1290203 - RNA, 19 nt, Artificial Sequence
  Description of Artificial Sequence: Synthetic oligonucleotide
acccgauaagccacgucug

SEQ ID NO: 1290204 - RNA, 19 nt, Artificial Sequence
  Description of Artificial Sequence: Synthetic oligonucleotide
guucagguaguaggaacaa

SEQ ID NO: 1290205 - RNA, 19 nt, Artificial Sequence
  Description of Artificial Sequence: Synthetic oligonucleotide
caggccccucauaacgcug

SEQ ID NO: 1290206 - RNA, 19 nt, Artificial Sequence
  Description of Artificial Sequence: Synthetic oligonucleotide
cacugcuacggugaugcca

SEQ ID NO: 1290207 - RNA, 19 nt, Artificial Sequence
  Description of Artificial Sequence: Synthetic oligonucleotide
ucucaagguucagguagua

SEQ ID NO: 1290208 - RNA, 19 nt, Artificial Sequence
  Description of Artificial Sequence: Synthetic oligonucleotide
gccgauuaugcuuguccac

SEQ ID NO: 1290209 - RNA, 19 nt, Artificial Sequence
  Description of Artificial Sequence: Synthetic oligonucleotide
cagugccagucccuucagc

SEQ ID NO: 1290210 - RNA, 19 nt, Artificial Sequence
  Description of Artificial Sequence: Synthetic oligonucleotide
gcuacggugaugccaucca

SEQ ID NO: 1290211 - RNA, 19 nt, Artificial Sequence
  Description of Artificial Sequence: Synthetic oligonucleotide
uucccagguuccagugcaa

SEQ ID NO: 1290212 - RNA, 19 nt, Artificial Sequence
  Description of Artificial Sequence: Synthetic oligonucleotide
cgauuaugcuuguccacag

SEQ ID NO: 1290213 - RNA, 19 nt, Artificial Sequence
  Description of Artificial Sequence: Synthetic oligonucleotide
acggacgcuguaguaucug

SEQ ID NO: 1290214 - RNA, 19 nt, Artificial Sequence
  Description of Artificial Sequence: Synthetic oligonucleotide
acaagcggcuauagagaca

SEQ ID NO: 1290215 - RNA, 19 nt, Artificial Sequence
  Description of Artificial Sequence: Synthetic oligonucleotide
ucccuucagcuugcucagg

SEQ ID NO: 1290216 - RNA, 19 nt, Artificial Sequence
  Description of Artificial Sequence: Synthetic oligonucleotide
augcccucugcaggggaag

SEQ ID NO: 1290217 - RNA, 19 nt, Artificial Sequence
  Description of Artificial Sequence: Synthetic oligonucleotide
aaccugucagccacaucua

SEQ ID NO: 1290218 - RNA, 19 nt, Artificial Sequence
  Description of Artificial Sequence: Synthetic oligonucleotide
cggcuauagagacagcuuc

SEQ ID NO: 1290219 - RNA, 19 nt, Artificial Sequence
  Description of Artificial Sequence: Synthetic oligonucleotide
gguggccauccuuacuuga

SEQ ID NO: 1290220 - RNA, 19 nt, Artificial Sequence
  Description of Artificial Sequence: Synthetic oligonucleotide
ccuuacuugaacuggacuu

SEQ ID NO: 1290221 - RNA, 19 nt, Artificial Sequence
  Description of Artificial Sequence: Synthetic oligonucleotide
aagggcucacaagcggcua

SEQ ID NO: 1290222 - RNA, 19 nt, Artificial Sequence
  Description of Artificial Sequence: Synthetic oligonucleotide
cagggacucugaucaccac

SEQ ID NO: 1290223 - RNA, 19 nt, Artificial Sequence
  Description of Artificial Sequence: Synthetic oligonucleotide
ccacaugcaaagggcaccc

SEQ ID NO: 1290224 - RNA, 19 nt, Artificial Sequence
  Description of Artificial Sequence: Synthetic oligonucleotide
ggaaugaccucuggcaucu

SEQ ID NO: 1290225 - RNA, 19 nt, Artificial Sequence
  Description of Artificial Sequence: Synthetic oligonucleotide
cuggccuccuguggguagc

SEQ ID NO: 1290226 - RNA, 19 nt, Artificial Sequence
  Description of Artificial Sequence: Synthetic oligonucleotide
cuagaucugacuccaucuu

SEQ ID NO: 1290227 - RNA, 19 nt, Artificial Sequence
  Description of Artificial Sequence: Synthetic oligonucleotide
ggacuuggcccacaugcaa

SEQ ID NO: 1290228 - RNA, 19 nt, Artificial Sequence
  Description of Artificial Sequence: Synthetic oligonucleotide
cugccguaugcugaccuca

SEQ ID NO: 1290229 - RNA, 19 nt, Artificial Sequence
  Description of Artificial Sequence: Synthetic oligonucleotide
ccgauaagccacgucuggc

SEQ ID NO: 1290230 - RNA, 19 nt, Artificial Sequence
  Description of Artificial Sequence: Synthetic oligonucleotide
auacgccgauuaugcuugu

SEQ ID NO: 1290231 - RNA, 19 nt, Artificial Sequence
  Description of Artificial Sequence: Synthetic oligonucleotide
gcaaaggacacagggcuaa

SEQ ID NO: 1290232 - RNA, 19 nt, Artificial Sequence
  Description of Artificial Sequence: Synthetic oligonucleotide
ugggccgcagugagcugaa

SEQ ID NO: 1290233 - RNA, 19 nt, Artificial Sequence
  Description of Artificial Sequence: Synthetic oligonucleotide
ucccuccagaagugcucga

SEQ ID NO: 1290234 - RNA, 19 nt, Artificial Sequence
  Description of Artificial Sequence: Synthetic oligonucleotide
ccguaugcugaccucauaa

SEQ ID NO: 1290235 - RNA, 19 nt, Artificial Sequence
  Description of Artificial Sequence: Synthetic oligonucleotide
uggguagcucucggugugu

SEQ ID NO: 1290236 - RNA, 19 nt, Artificial Sequence
  Description of Artificial Sequence: Synthetic oligonucleotide
guggccauccuuacuugaa

SEQ ID NO: 1290237 - RNA, 19 nt, Artificial Sequence
  Description of Artificial Sequence: Synthetic oligonucleotide
aggccccucauaacgcugu

SEQ ID NO: 1290238 - RNA, 19 nt, Artificial Sequence
  Description of Artificial Sequence: Synthetic oligonucleotide
gagugaaccuugauaucau

SEQ ID NO: 1290239 - RNA, 19 nt, Artificial Sequence
  Description of Artificial Sequence: Synthetic oligonucleotide
ggcucacaagcggcuauag

SEQ ID NO: 1290240 - RNA, 19 nt, Artificial Sequence
  Description of Artificial Sequence: Synthetic oligonucleotide
ggccauccuuacuugaacu

SEQ ID NO: 1290241 - RNA, 19 nt, Artificial Sequence
  Description of Artificial Sequence: Synthetic oligonucleotide
aucacccgauaagccacgu

SEQ ID NO: 1290242 - RNA, 19 nt, Artificial Sequence
  Description of Artificial Sequence: Synthetic oligonucleotide
cuacacggacgcuguagua

SEQ ID NO: 1290243 - RNA, 19 nt, Artificial Sequence
  Description of Artificial Sequence: Synthetic oligonucleotide
ccgauuaugcuuguccaca

SEQ ID NO: 1290244 - RNA, 19 nt, Artificial Sequence
  Description of Artificial Sequence: Synthetic oligonucleotide
cucugggaacuagccauca

SEQ ID NO: 1290245 - RNA, 19 nt, Artificial Sequence
  Description of Artificial Sequence: Synthetic oligonucleotide
uacgccgauuaugcuuguc

SEQ ID NO: 1290246 - RNA, 19 nt, Artificial Sequence
  Description of Artificial Sequence: Synthetic oligonucleotide
cauugcgacugggccgcag

SEQ ID NO: 1290247 - RNA, 19 nt, Artificial Sequence
  Description of Artificial Sequence: Synthetic oligonucleotide
gcuaaagggccaccaggaa

SEQ ID NO: 1290248 - RNA, 19 nt, Artificial Sequence
  Description of Artificial Sequence: Synthetic oligonucleotide
cugggccgcagugagcuga

SEQ ID NO: 1290249 - RNA, 19 nt, Artificial Sequence
  Description of Artificial Sequence: Synthetic oligonucleotide
ggcuuggaaugagacucug

SEQ ID NO: 1290250 - RNA, 19 nt, Artificial Sequence
  Description of Artificial Sequence: Synthetic oligonucleotide
cucauacgccgauuaugcu

SEQ ID NO: 1290251 - RNA, 19 nt, Artificial Sequence
  Description of Artificial Sequence: Synthetic oligonucleotide
guagcucucgguguguauu

SEQ ID NO: 1290252 - RNA, 19 nt, Artificial Sequence
  Description of Artificial Sequence: Synthetic oligonucleotide
gcucucgguguguauugca

SEQ ID NO: 1290253 - RNA, 19 nt, Artificial Sequence
  Description of Artificial Sequence: Synthetic oligonucleotide
cagucaggguugccugguc

SEQ ID NO: 1290254 - RNA, 19 nt, Artificial Sequence
  Description of Artificial Sequence: Synthetic oligonucleotide
gcuauagagacagcuuccu

SEQ ID NO: 1290255 - RNA, 19 nt, Artificial Sequence
  Description of Artificial Sequence: Synthetic oligonucleotide
gcacuucuaaaaugggaau

SEQ ID NO: 1290256 - RNA, 19 nt, Artificial Sequence
  Description of Artificial Sequence: Synthetic oligonucleotide
gaacuggacuuggcccaca

SEQ ID NO: 1290257 - RNA, 19 nt, Artificial Sequence
  Description of Artificial Sequence: Synthetic oligonucleotide
guugccugguccacugcua

SEQ ID NO: 1290258 - RNA, 19 nt, Artificial Sequence
  Description of Artificial Sequence: Synthetic oligonucleotide
gggcccugcuccugaacac

SEQ ID NO: 1290259 - RNA, 19 nt, Artificial Sequence
  Description of Artificial Sequence: Synthetic oligonucleotide
ggagcucaaucuucuugcu

SEQ ID NO: 1290260 - RNA, 19 nt, Artificial Sequence
  Description of Artificial Sequence: Synthetic oligonucleotide
caguucugucugcacugaa

SEQ ID NO: 1290261 - RNA, 19 nt, Artificial Sequence
  Description of Artificial Sequence: Synthetic oligonucleotide
cagcacaaagcuggggucu

SEQ ID NO: 1290262 - RNA, 19 nt, Artificial Sequence
  Description of Artificial Sequence: Synthetic oligonucleotide
ccuggccuccuguggguag

SEQ ID NO: 1290263 - RNA, 19 nt, Artificial Sequence
  Description of Artificial Sequence: Synthetic oligonucleotide
cuggcgucuuccaaagcuu

SEQ ID NO: 1290264 - RNA, 19 nt, Artificial Sequence
  Description of Artificial Sequence: Synthetic oligonucleotide
cauucauguggcuccucuu

SEQ ID NO: 1290265 - RNA, 19 nt, Artificial Sequence
  Description of Artificial Sequence: Synthetic oligonucleotide
cauccuaggaaggcacagu

SEQ ID NO: 1290266 - RNA, 19 nt, Artificial Sequence
  Description of Artificial Sequence: Synthetic oligonucleotide
caauagcagggacucugau

SEQ ID NO: 1290267 - RNA, 19 nt, Artificial Sequence
  Description of Artificial Sequence: Synthetic oligonucleotide
ccgcagugagcugaaccag

SEQ ID NO: 1290268 - RNA, 19 nt, Artificial Sequence
  Description of Artificial Sequence: Synthetic oligonucleotide
ggguugccugguccacugc

SEQ ID NO: 1290269 - RNA, 19 nt, Artificial Sequence
  Description of Artificial Sequence: Synthetic oligonucleotide
caaggccaggaguggacau

SEQ ID NO: 1290270 - RNA, 19 nt, Artificial Sequence
  Description of Artificial Sequence: Synthetic oligonucleotide
cacggacgcuguaguaucu

SEQ ID NO: 1290271 - RNA, 19 nt, Artificial Sequence
  Description of Artificial Sequence: Synthetic oligonucleotide
cccuagguagcuggacuac

SEQ ID NO: 1290272 - RNA, 19 nt, Artificial Sequence
  Description of Artificial Sequence: Synthetic oligonucleotide
cugcuacggugaugccauc

SEQ ID NO: 1290273 - RNA, 19 nt, Artificial Sequence
  Description of Artificial Sequence: Synthetic oligonucleotide
gccgaugaaccgcugccgu

SEQ ID NO: 1290274 - RNA, 19 nt, Artificial Sequence
  Description of Artificial Sequence: Synthetic oligonucleotide
cgguguguauugcagccca

SEQ ID NO: 1290275 - RNA, 19 nt, Artificial Sequence
  Description of Artificial Sequence: Synthetic oligonucleotide
ccaggaacccauugcuucu

SEQ ID NO: 1290276 - RNA, 19 nt, Artificial Sequence
  Description of Artificial Sequence: Synthetic oligonucleotide
cauucgucucugggaacua

SEQ ID NO: 1290277 - RNA, 19 nt, Artificial Sequence
  Description of Artificial Sequence: Synthetic oligonucleotide
ccuggcuuggaaugagacu

SEQ ID NO: 1290278 - RNA, 19 nt, Artificial Sequence
  Description of Artificial Sequence: Synthetic oligonucleotide
gcaaccugucagccacauc

SEQ ID NO: 1290279 - RNA, 19 nt, Artificial Sequence
  Description of Artificial Sequence: Synthetic oligonucleotide
cgauaagccacgucuggcu

SEQ ID NO: 1290280 - RNA, 19 nt, Artificial Sequence
  Description of Artificial Sequence: Synthetic oligonucleotide
cugaccucauaaggagagu

SEQ ID NO: 1290281 - RNA, 19 nt, Artificial Sequence
  Description of Artificial Sequence: Synthetic oligonucleotide
cgcugucuagcugcucucc

SEQ ID NO: 1290282 - RNA, 19 nt, Artificial Sequence
  Description of Artificial Sequence: Synthetic oligonucleotide
gggcuaacgacagcagaau

SEQ ID NO: 1290283 - RNA, 19 nt, Artificial Sequence
  Description of Artificial Sequence: Synthetic oligonucleotide
ggccccucauaacgcuguc

SEQ ID NO: 1290284 - RNA, 19 nt, Artificial Sequence
  Description of Artificial Sequence: Synthetic oligonucleotide
ggcuugccgaugaaccgcu

SEQ ID NO: 1290285 - RNA, 19 nt, Artificial Sequence
  Description of Artificial Sequence: Synthetic oligonucleotide
ccacaucuucccucucaaa

SEQ ID NO: 1290286 - RNA, 19 nt, Artificial Sequence
  Description of Artificial Sequence: Synthetic oligonucleotide
gccccacuacaucagcuuu

SEQ ID NO: 1290287 - RNA, 19 nt, Artificial Sequence
  Description of Artificial Sequence: Synthetic oligonucleotide
ggacuacacggacgcugua

SEQ ID NO: 1290288 - RNA, 19 nt, Artificial Sequence
  Description of Artificial Sequence: Synthetic oligonucleotide
gccguaugcugaccucaua

SEQ ID NO: 1290289 - RNA, 19 nt, Artificial Sequence
  Description of Artificial Sequence: Synthetic oligonucleotide
ccuguggguagcucucggu

SEQ ID NO: 1290290 - RNA, 19 nt, Artificial Sequence
  Description of Artificial Sequence: Synthetic oligonucleotide
caggguugccugguccacu

SEQ ID NO: 1290291 - RNA, 19 nt, Artificial Sequence
  Description of Artificial Sequence: Synthetic oligonucleotide
gcggcuauagagacagcuu

SEQ ID NO: 1290292 - RNA, 19 nt, Artificial Sequence
  Description of Artificial Sequence: Synthetic oligonucleotide
ccgaugaaccgcugccgua

SEQ ID NO: 1290293 - RNA, 19 nt, Artificial Sequence
  Description of Artificial Sequence: Synthetic oligonucleotide
ggguagcucucggugugua

SEQ ID NO: 1290294 - RNA, 19 nt, Artificial Sequence
  Description of Artificial Sequence: Synthetic oligonucleotide
gcuaugcugugguggccau

SEQ ID NO: 1290295 - RNA, 19 nt, Artificial Sequence
  Description of Artificial Sequence: Synthetic oligonucleotide
gguguguauugcagcccau

SEQ ID NO: 1290296 - RNA, 19 nt, Artificial Sequence
  Description of Artificial Sequence: Synthetic oligonucleotide
gcuuucucauacgccgauu

SEQ ID NO: 1290297 - RNA, 19 nt, Artificial Sequence
  Description of Artificial Sequence: Synthetic oligonucleotide
gaaugaccucuggcaucuu

SEQ ID NO: 1290298 - RNA, 19 nt, Artificial Sequence
  Description of Artificial Sequence: Synthetic oligonucleotide
cgaugaaccgcugccguau

SEQ ID NO: 1290299 - RNA, 19 nt, Artificial Sequence
  Description of Artificial Sequence: Synthetic oligonucleotide
gccccucauaacgcugucu

SEQ ID NO: 1290300 - RNA, 19 nt, Artificial Sequence
  Description of Artificial Sequence: Synthetic oligonucleotide
ccucuugguggcccauccu

SEQ ID NO: 1290301 - RNA, 19 nt, Artificial Sequence
  Description of Artificial Sequence: Synthetic oligonucleotide
ccugguccacugcuacggu

SEQ ID NO: 1290302 - RNA, 19 nt, Artificial Sequence
  Description of Artificial Sequence: Synthetic oligonucleotide
gcuggacuacacggacgcu

SEQ ID NO: 1290303 - RNA, 19 nt, Artificial Sequence
  Description of Artificial Sequence: Synthetic oligonucleotide
gggccgcagugagcugaac

SEQ ID NO: 1290304 - RNA, 19 nt, Artificial Sequence
  Description of Artificial Sequence: Synthetic oligonucleotide
cccuggucauggggagguu

SEQ ID NO: 1290305 - RNA, 19 nt, Artificial Sequence
  Description of Artificial Sequence: Synthetic oligonucleotide
uauauuacaacucaaguug

SEQ ID NO: 1290306 - RNA, 19 nt, Artificial Sequence
  Description of Artificial Sequence: Synthetic oligonucleotide
gaaauuuacguaaacaagg

SEQ ID NO: 1290307 - RNA, 19 nt, Artificial Sequence
  Description of Artificial Sequence: Synthetic oligonucleotide
aauauauuacaacucaagu

SEQ ID NO: 1290308 - RNA, 19 nt, Artificial Sequence
  Description of Artificial Sequence: Synthetic oligonucleotide
uuacauugaacucuaaaag

SEQ ID NO: 1290309 - RNA, 19 nt, Artificial Sequence
  Description of Artificial Sequence: Synthetic oligonucleotide
uuuacguaaacaaggaaag

SEQ ID NO: 1290310 - RNA, 19 nt, Artificial Sequence
  Description of Artificial Sequence: Synthetic oligonucleotide
ucauacucgauaaauacag

SEQ ID NO: 1290311 - RNA, 19 nt, Artificial Sequence
  Description of Artificial Sequence: Synthetic oligonucleotide
aaucuuucgaaauuuacgu

SEQ ID NO: 1290312 - RNA, 19 nt, Artificial Sequence
  Description of Artificial Sequence: Synthetic oligonucleotide
aauguuuacagucacaauu

SEQ ID NO: 1290313 - RNA, 19 nt, Artificial Sequence
  Description of Artificial Sequence: Synthetic oligonucleotide
auuuguagugaacugauuc

SEQ ID NO: 1290314 - RNA, 19 nt, Artificial Sequence
  Description of Artificial Sequence: Synthetic oligonucleotide
aaacauauaacuucguuaa

SEQ ID NO: 1290315 - RNA, 19 nt, Artificial Sequence
  Description of Artificial Sequence: Synthetic oligonucleotide
aguaugaacaaacauccuc

SEQ ID NO: 1290316 - RNA, 19 nt, Artificial Sequence
  Description of Artificial Sequence: Synthetic oligonucleotide
auaucuauugcuuuucauc

SEQ ID NO: 1290317 - RNA, 19 nt, Artificial Sequence
  Description of Artificial Sequence: Synthetic oligonucleotide
auguuucuaagcuaaacac

SEQ ID NO: 1290318 - RNA, 19 nt, Artificial Sequence
  Description of Artificial Sequence: Synthetic oligonucleotide
aaacaaggcauauucaugu

SEQ ID NO: 1290319 - RNA, 19 nt, Artificial Sequence
  Description of Artificial Sequence: Synthetic oligonucleotide
auuuaaggcaaguucgggc

SEQ ID NO: 1290320 - RNA, 19 nt, Artificial Sequence
  Description of Artificial Sequence: Synthetic oligonucleotide
ugcgaaucaacucaaaaca

SEQ ID NO: 1290321 - RNA, 19 nt, Artificial Sequence
  Description of Artificial Sequence: Synthetic oligonucleotide
aaggcuacucguuucaagg

SEQ ID NO: 1290322 - RNA, 19 nt, Artificial Sequence
  Description of Artificial Sequence: Synthetic oligonucleotide
aaugucacaguagagcugg

SEQ ID NO: 1290323 - RNA, 19 nt, Artificial Sequence
  Description of Artificial Sequence: Synthetic oligonucleotide
ugcagguuaacccaucugg

SEQ ID NO: 1290324 - RNA, 19 nt, Artificial Sequence
  Description of Artificial Sequence: Synthetic oligonucleotide
aaaggcauauauuacugug

SEQ ID NO: 1290325 - RNA, 19 nt, Artificial Sequence
  Description of Artificial Sequence: Synthetic oligonucleotide
uaaacgguggcaaugagac

SEQ ID NO: 1290326 - RNA, 19 nt, Artificial Sequence
  Description of Artificial Sequence: Synthetic oligonucleotide
agaguuucaaaacucaucu

SEQ ID NO: 1290327 - RNA, 19 nt, Artificial Sequence
  Description of Artificial Sequence: Synthetic oligonucleotide
agaacgaaaacucuaauaa

SEQ ID NO: 1290328 - RNA, 19 nt, Artificial Sequence
  Description of Artificial Sequence: Synthetic oligonucleotide
aguaguccagaauacacac

SEQ ID NO: 1290329 - RNA, 19 nt, Artificial Sequence
  Description of Artificial Sequence: Synthetic oligonucleotide
uucaaauucgcucaagcac

SEQ ID NO: 1290330 - RNA, 19 nt, Artificial Sequence
  Description of Artificial Sequence: Synthetic oligonucleotide
cauaguacaaguuucggac

SEQ ID NO: 1290331 - RNA, 19 nt, Artificial Sequence
  Description of Artificial Sequence: Synthetic oligonucleotide
auuacauugaacucuaaaa

SEQ ID NO: 1290332 - RNA, 19 nt, Artificial Sequence
  Description of Artificial Sequence: Synthetic oligonucleotide
aguugacuuaucuuguuac

SEQ ID NO: 1290333 - RNA, 19 nt, Artificial Sequence
  Description of Artificial Sequence: Synthetic oligonucleotide
uuuaaggcaaguucgggcc

SEQ ID NO: 1290334 - RNA, 19 nt, Artificial Sequence
  Description of Artificial Sequence: Synthetic oligonucleotide
gaagauuuaaggcaaguuc

SEQ ID NO: 1290335 - RNA, 19 nt, Artificial Sequence
  Description of Artificial Sequence: Synthetic oligonucleotide
aaacaaggacaacaaccgc

SEQ ID NO: 1290336 - RNA, 19 nt, Artificial Sequence
  Description of Artificial Sequence: Synthetic oligonucleotide
aaagucauaguacaaguuu

SEQ ID NO: 1290337 - RNA, 19 nt, Artificial Sequence
  Description of Artificial Sequence: Synthetic oligonucleotide
uaaacacucacuaaacggu

SEQ ID NO: 1290338 - RNA, 19 nt, Artificial Sequence
  Description of Artificial Sequence: Synthetic oligonucleotide
aaugaagcacuuauuuccc

SEQ ID NO: 1290339 - RNA, 19 nt, Artificial Sequence
  Description of Artificial Sequence: Synthetic oligonucleotide
ucgaaauuuacguaaacaa

SEQ ID NO: 1290340 - RNA, 19 nt, Artificial Sequence
  Description of Artificial Sequence: Synthetic oligonucleotide
gugaaaagaacauacacuc

SEQ ID NO: 1290341 - RNA, 19 nt, Artificial Sequence
  Description of Artificial Sequence: Synthetic oligonucleotide
ucaaauucgcucaagcacu

SEQ ID NO: 1290342 - RNA, 19 nt, Artificial Sequence
  Description of Artificial Sequence: Synthetic oligonucleotide
aauguauacuuuucacaag

SEQ ID NO: 1290343 - RNA, 19 nt, Artificial Sequence
  Description of Artificial Sequence: Synthetic oligonucleotide
uuauuucccaacaauuaug

SEQ ID NO: 1290344 - RNA, 19 nt, Artificial Sequence
  Description of Artificial Sequence: Synthetic oligonucleotide
uuuguagugaacugauucc

SEQ ID NO: 1290345 - RNA, 19 nt, Artificial Sequence
  Description of Artificial Sequence: Synthetic oligonucleotide
aaaccgaaagggaaggggc

SEQ ID NO: 1290346 - RNA, 19 nt, Artificial Sequence
  Description of Artificial Sequence: Synthetic oligonucleotide
ucaagcacuaaugaaauac

SEQ ID NO: 1290347 - RNA, 19 nt, Artificial Sequence
  Description of Artificial Sequence: Synthetic oligonucleotide
auaguucgaguccaagugc

SEQ ID NO: 1290348 - RNA, 19 nt, Artificial Sequence
  Description of Artificial Sequence: Synthetic oligonucleotide
aaaagaaccuacuguguca

SEQ ID NO: 1290349 - RNA, 19 nt, Artificial Sequence
  Description of Artificial Sequence: Synthetic oligonucleotide
aaaaccgaaagggaagggg

SEQ ID NO: 1290350 - RNA, 19 nt, Artificial Sequence
  Description of Artificial Sequence: Synthetic oligonucleotide
uguggugcgaaucaacuca

SEQ ID NO: 1290351 - RNA, 19 nt, Artificial Sequence
  Description of Artificial Sequence: Synthetic oligonucleotide
uuucauauugaguuguggu

SEQ ID NO: 1290352 - RNA, 19 nt, Artificial Sequence
  Description of Artificial Sequence: Synthetic oligonucleotide
uggacuguaacuaaggcuu

SEQ ID NO: 1290353 - RNA, 19 nt, Artificial Sequence
  Description of Artificial Sequence: Synthetic oligonucleotide
ucaaugucacaguagagcu

SEQ ID NO: 1290354 - RNA, 19 nt, Artificial Sequence
  Description of Artificial Sequence: Synthetic oligonucleotide
gugacuauuuuguucaucc

SEQ ID NO: 1290355 - RNA, 19 nt, Artificial Sequence
  Description of Artificial Sequence: Synthetic oligonucleotide
ucuuucgaaauuuacguaa

SEQ ID NO: 1290356 - RNA, 19 nt, Artificial Sequence
  Description of Artificial Sequence: Synthetic oligonucleotide
aauacuuauuugguugagg

SEQ ID NO: 1290357 - RNA, 19 nt, Artificial Sequence
  Description of Artificial Sequence: Synthetic oligonucleotide
uuacucauuuacaauaaaa

SEQ ID NO: 1290358 - RNA, 19 nt, Artificial Sequence
  Description of Artificial Sequence: Synthetic oligonucleotide
uucauauugaguuguggug

SEQ ID NO: 1290359 - RNA, 19 nt, Artificial Sequence
  Description of Artificial Sequence: Synthetic oligonucleotide
auauauuacaacucaaguu

SEQ ID NO: 1290360 - RNA, 19 nt, Artificial Sequence
  Description of Artificial Sequence: Synthetic oligonucleotide
aaacuaagcgccugcucac

SEQ ID NO: 1290361 - RNA, 19 nt, Artificial Sequence
  Description of Artificial Sequence: Synthetic oligonucleotide
auacuuauuugguugagga

SEQ ID NO: 1290362 - RNA, 19 nt, Artificial Sequence
  Description of Artificial Sequence: Synthetic oligonucleotide
uugccgauuaauaauggca

SEQ ID NO: 1290363 - RNA, 19 nt, Artificial Sequence
  Description of Artificial Sequence: Synthetic oligonucleotide
uguuucuaagcuaaacacu

SEQ ID NO: 1290364 - RNA, 19 nt, Artificial Sequence
  Description of Artificial Sequence: Synthetic oligonucleotide
aagucauaguacaaguuuc

SEQ ID NO: 1290365 - RNA, 19 nt, Artificial Sequence
  Description of Artificial Sequence: Synthetic oligonucleotide
aacuguacccuacauacaa

SEQ ID NO: 1290366 - RNA, 19 nt, Artificial Sequence
  Description of Artificial Sequence: Synthetic oligonucleotide
acuuuauagcuauauauaa

SEQ ID NO: 1290367 - RNA, 19 nt, Artificial Sequence
  Description of Artificial Sequence: Synthetic oligonucleotide
ucauauugaguuguggugc

SEQ ID NO: 1290368 - RNA, 19 nt, Artificial Sequence
  Description of Artificial Sequence: Synthetic oligonucleotide
aucgaaaagucauaguaca

SEQ ID NO: 1290369 - RNA, 19 nt, Artificial Sequence
  Description of Artificial Sequence: Synthetic oligonucleotide
uuuugccgauuaauaaugg

SEQ ID NO: 1290370 - RNA, 19 nt, Artificial Sequence
  Description of Artificial Sequence: Synthetic oligonucleotide
agaguucucacaucuggac

SEQ ID NO: 1290371 - RNA, 19 nt, Artificial Sequence
  Description of Artificial Sequence: Synthetic oligonucleotide
auguauacuuuucacaaga

SEQ ID NO: 1290372 - RNA, 19 nt, Artificial Sequence
  Description of Artificial Sequence: Synthetic oligonucleotide
gaauacacacacucggugc

SEQ ID NO: 1290373 - RNA, 19 nt, Artificial Sequence
  Description of Artificial Sequence: Synthetic oligonucleotide
acucgauaaauacaguaug

SEQ ID NO: 1290374 - RNA, 19 nt, Artificial Sequence
  Description of Artificial Sequence: Synthetic oligonucleotide
uaucgcaucacaacugccc

SEQ ID NO: 1290375 - RNA, 19 nt, Artificial Sequence
  Description of Artificial Sequence: Synthetic oligonucleotide
aucaacucaaaacagcuaa

SEQ ID NO: 1290376 - RNA, 19 nt, Artificial Sequence
  Description of Artificial Sequence: Synthetic oligonucleotide
auuaaggggagguggcagc

SEQ ID NO: 1290377 - RNA, 19 nt, Artificial Sequence
  Description of Artificial Sequence: Synthetic oligonucleotide
acaacaaccgcgacaaacc

SEQ ID NO: 1290378 - RNA, 19 nt, Artificial Sequence
  Description of Artificial Sequence: Synthetic oligonucleotide
aaaaggcauauauuacugu

SEQ ID NO: 1290379 - RNA, 19 nt, Artificial Sequence
  Description of Artificial Sequence: Synthetic oligonucleotide
ucuaucgcaucacaacugc

SEQ ID NO: 1290380 - RNA, 19 nt, Artificial Sequence
  Description of Artificial Sequence: Synthetic oligonucleotide
aagaacgaaaacucuaaua

SEQ ID NO: 1290381 - RNA, 19 nt, Artificial Sequence
  Description of Artificial Sequence: Synthetic oligonucleotide
ucuacagaccauuuucagc

SEQ ID NO: 1290382 - RNA, 19 nt, Artificial Sequence
  Description of Artificial Sequence: Synthetic oligonucleotide
aaauuuacguaaacaagga

SEQ ID NO: 1290383 - RNA, 19 nt, Artificial Sequence
  Description of Artificial Sequence: Synthetic oligonucleotide
cuacagaccauuuucagca

SEQ ID NO: 1290384 - RNA, 19 nt, Artificial Sequence
  Description of Artificial Sequence: Synthetic oligonucleotide
uguucuaucgcaucacaac

SEQ ID NO: 1290385 - RNA, 19 nt, Artificial Sequence
  Description of Artificial Sequence: Synthetic oligonucleotide
cuuauuaaggggagguggc

SEQ ID NO: 1290386 - RNA, 19 nt, Artificial Sequence
  Description of Artificial Sequence: Synthetic oligonucleotide
auggcaauuauaauuuaac

SEQ ID NO: 1290387 - RNA, 19 nt, Artificial Sequence
  Description of Artificial Sequence: Synthetic oligonucleotide
acucaucugagaccuaaac

SEQ ID NO: 1290388 - RNA, 19 nt, Artificial Sequence
  Description of Artificial Sequence: Synthetic oligonucleotide
acaaggcauauucauguuc

SEQ ID NO: 1290389 - RNA, 19 nt, Artificial Sequence
  Description of Artificial Sequence: Synthetic oligonucleotide
aauuuacguaaacaaggaa

SEQ ID NO: 1290390 - RNA, 19 nt, Artificial Sequence
  Description of Artificial Sequence: Synthetic oligonucleotide
cucaaugucacaguagagc

SEQ ID NO: 1290391 - RNA, 19 nt, Artificial Sequence
  Description of Artificial Sequence: Synthetic oligonucleotide
aacgaaaacucuaauaaua

SEQ ID NO: 1290392 - RNA, 19 nt, Artificial Sequence
  Description of Artificial Sequence: Synthetic oligonucleotide
cauucaaauucgcucaagc

SEQ ID NO: 1290393 - RNA, 19 nt, Artificial Sequence
  Description of Artificial Sequence: Synthetic oligonucleotide
uauacucaaugucacagua

SEQ ID NO: 1290394 - RNA, 19 nt, Artificial Sequence
  Description of Artificial Sequence: Synthetic oligonucleotide
uuacaucgaaaagucauag

SEQ ID NO: 1290395 - RNA, 19 nt, Artificial Sequence
  Description of Artificial Sequence: Synthetic oligonucleotide
uucgaaauuuacguaaaca

SEQ ID NO: 1290396 - RNA, 19 nt, Artificial Sequence
  Description of Artificial Sequence: Synthetic oligonucleotide
agaauacacacacucggug

SEQ ID NO: 1290397 - RNA, 19 nt, Artificial Sequence
  Description of Artificial Sequence: Synthetic oligonucleotide
uggcuuuuauuucaacaag

SEQ ID NO: 1290398 - RNA, 19 nt, Artificial Sequence
  Description of Artificial Sequence: Synthetic oligonucleotide
auuuacguaaacaaggaaa

SEQ ID NO: 1290399 - RNA, 19 nt, Artificial Sequence
  Description of Artificial Sequence: Synthetic oligonucleotide
ucaaguugacuuaucuugu

SEQ ID NO: 1290400 - RNA, 19 nt, Artificial Sequence
  Description of Artificial Sequence: Synthetic oligonucleotide
uacguaaacaaggaaagaa

SEQ ID NO: 1290401 - RNA, 19 nt, Artificial Sequence
  Description of Artificial Sequence: Synthetic oligonucleotide
aaagaagagauggaauggu

SEQ ID NO: 1290402 - RNA, 19 nt, Artificial Sequence
  Description of Artificial Sequence: Synthetic oligonucleotide
gaccuaaacaaguguuugg

SEQ ID NO: 1290403 - RNA, 19 nt, Artificial Sequence
  Description of Artificial Sequence: Synthetic oligonucleotide
uaguacaaguuucggacug

SEQ ID NO: 1290404 - RNA, 19 nt, Artificial Sequence
  Description of Artificial Sequence: Synthetic oligonucleotide
auucaaauucgcucaagca

SEQ ID NO: 1290405 - RNA, 19 nt, Artificial Sequence
  Description of Artificial Sequence: Synthetic oligonucleotide
ucuggacuguaacuaaggc

SEQ ID NO: 1290406 - RNA, 19 nt, Artificial Sequence
  Description of Artificial Sequence: Synthetic oligonucleotide
uucgcucaagcacuaauga

SEQ ID NO: 1290407 - RNA, 19 nt, Artificial Sequence
  Description of Artificial Sequence: Synthetic oligonucleotide
agugaaguuacaaaaggca

SEQ ID NO: 1290408 - RNA, 19 nt, Artificial Sequence
  Description of Artificial Sequence: Synthetic oligonucleotide
ucuuacucauuuacaauaa

SEQ ID NO: 1290409 - RNA, 19 nt, Artificial Sequence
  Description of Artificial Sequence: Synthetic oligonucleotide
uuacaacucaaguugacuu

SEQ ID NO: 1290410 - RNA, 19 nt, Artificial Sequence
  Description of Artificial Sequence: Synthetic oligonucleotide
ugccgauuaauaauggcaa

SEQ ID NO: 1290411 - RNA, 19 nt, Artificial Sequence
  Description of Artificial Sequence: Synthetic oligonucleotide
uagaguuucaaaacucauc

SEQ ID NO: 1290412 - RNA, 19 nt, Artificial Sequence
  Description of Artificial Sequence: Synthetic oligonucleotide
gauggaauggugguuuuag

SEQ ID NO: 1290413 - RNA, 19 nt, Artificial Sequence
  Description of Artificial Sequence: Synthetic oligonucleotide
uggcauucaaauucgcuca

SEQ ID NO: 1290414 - RNA, 19 nt, Artificial Sequence
  Description of Artificial Sequence: Synthetic oligonucleotide
uuugccgauuaauaauggc

SEQ ID NO: 1290415 - RNA, 19 nt, Artificial Sequence
  Description of Artificial Sequence: Synthetic oligonucleotide
auuuccccguuauugcuac

SEQ ID NO: 1290416 - RNA, 19 nt, Artificial Sequence
  Description of Artificial Sequence: Synthetic oligonucleotide
acaaaccccggcugaaggc

SEQ ID NO: 1290417 - RNA, 19 nt, Artificial Sequence
  Description of Artificial Sequence: Synthetic oligonucleotide
gauuuaaggcaaguucggg

SEQ ID NO: 1290418 - RNA, 19 nt, Artificial Sequence
  Description of Artificial Sequence: Synthetic oligonucleotide
cauauugaguuguggugcg

SEQ ID NO: 1290419 - RNA, 19 nt, Artificial Sequence
  Description of Artificial Sequence: Synthetic oligonucleotide
ugagaccuaaacaaguguu

SEQ ID NO: 1290420 - RNA, 19 nt, Artificial Sequence
  Description of Artificial Sequence: Synthetic oligonucleotide
uuuguucuaucgcaucaca

SEQ ID NO: 1290421 - RNA, 19 nt, Artificial Sequence
  Description of Artificial Sequence: Synthetic oligonucleotide
aucgcaucacaacugcccg

SEQ ID NO: 1290422 - RNA, 19 nt, Artificial Sequence
  Description of Artificial Sequence: Synthetic oligonucleotide
aacaaccgcgacaaacccc

SEQ ID NO: 1290423 - RNA, 19 nt, Artificial Sequence
  Description of Artificial Sequence: Synthetic oligonucleotide
cuggcauucaaauucgcuc

SEQ ID NO: 1290424 - RNA, 19 nt, Artificial Sequence
  Description of Artificial Sequence: Synthetic oligonucleotide
acauuuugccgauuaauaa

SEQ ID NO: 1290425 - RNA, 19 nt, Artificial Sequence
  Description of Artificial Sequence: Synthetic oligonucleotide
uuaugaacugagcucugcu

SEQ ID NO: 1290426 - RNA, 19 nt, Artificial Sequence
  Description of Artificial Sequence: Synthetic oligonucleotide
auuuugccgauuaauaaug

SEQ ID NO: 1290427 - RNA, 19 nt, Artificial Sequence
  Description of Artificial Sequence: Synthetic oligonucleotide
ucuaagcuaaacacucacu

SEQ ID NO: 1290428 - RNA, 19 nt, Artificial Sequence
  Description of Artificial Sequence: Synthetic oligonucleotide
auacucgauaaauacagua

SEQ ID NO: 1290429 - RNA, 19 nt, Artificial Sequence
  Description of Artificial Sequence: Synthetic oligonucleotide
uuguagugaacugauuccc

SEQ ID NO: 1290430 - RNA, 19 nt, Artificial Sequence
  Description of Artificial Sequence: Synthetic oligonucleotide
aggcuacucguuucaaggc

SEQ ID NO: 1290431 - RNA, 19 nt, Artificial Sequence
  Description of Artificial Sequence: Synthetic oligonucleotide
ccaacuguacccuacauac

SEQ ID NO: 1290432 - RNA, 19 nt, Artificial Sequence
  Description of Artificial Sequence: Synthetic oligonucleotide
gaaaagucauaguacaagu

SEQ ID NO: 1290433 - RNA, 19 nt, Artificial Sequence
  Description of Artificial Sequence: Synthetic oligonucleotide
aaauacuuauuugguugag

SEQ ID NO: 1290434 - RNA, 19 nt, Artificial Sequence
  Description of Artificial Sequence: Synthetic oligonucleotide
ucuauugcuuuucaucaua

SEQ ID NO: 1290435 - RNA, 19 nt, Artificial Sequence
  Description of Artificial Sequence: Synthetic oligonucleotide
ucucguuuugugcagguua

SEQ ID NO: 1290436 - RNA, 19 nt, Artificial Sequence
  Description of Artificial Sequence: Synthetic oligonucleotide
acaauuuguagugaacuga

SEQ ID NO: 1290437 - RNA, 19 nt, Artificial Sequence
  Description of Artificial Sequence: Synthetic oligonucleotide
acaaccgcgacaaaccccg

SEQ ID NO: 1290438 - RNA, 19 nt, Artificial Sequence
  Description of Artificial Sequence: Synthetic oligonucleotide
aaccgcgacaaaccccggc

SEQ ID NO: 1290439 - RNA, 19 nt, Artificial Sequence
  Description of Artificial Sequence: Synthetic oligonucleotide
aacacucacuaaacggugg

SEQ ID NO: 1290440 - RNA, 19 nt, Artificial Sequence
  Description of Artificial Sequence: Synthetic oligonucleotide
agaaccuacugugucaaag

SEQ ID NO: 1290441 - RNA, 19 nt, Artificial Sequence
  Description of Artificial Sequence: Synthetic oligonucleotide
uuucgaaauuuacguaaac

SEQ ID NO: 1290442 - RNA, 19 nt, Artificial Sequence
  Description of Artificial Sequence: Synthetic oligonucleotide
uauauaucuauugcuuuuc

SEQ ID NO: 1290443 - RNA, 19 nt, Artificial Sequence
  Description of Artificial Sequence: Synthetic oligonucleotide
ucuggcauucaaauucgcu

SEQ ID NO: 1290444 - RNA, 19 nt, Artificial Sequence
  Description of Artificial Sequence: Synthetic oligonucleotide
aaacaaguguuugguaucu

SEQ ID NO: 1290445 - RNA, 19 nt, Artificial Sequence
  Description of Artificial Sequence: Synthetic oligonucleotide
uuauacucaaugucacagu

SEQ ID NO: 1290446 - RNA, 19 nt, Artificial Sequence
  Description of Artificial Sequence: Synthetic oligonucleotide
agucauaguacaaguuucg

SEQ ID NO: 1290447 - RNA, 19 nt, Artificial Sequence
  Description of Artificial Sequence: Synthetic oligonucleotide
uguacccuacauacaaaac

SEQ ID NO: 1290448 - RNA, 19 nt, Artificial Sequence
  Description of Artificial Sequence: Synthetic oligonucleotide
acauauaacuucguuaaaa

SEQ ID NO: 1290449 - RNA, 19 nt, Artificial Sequence
  Description of Artificial Sequence: Synthetic oligonucleotide
uaguucgaguccaagugcu

SEQ ID NO: 1290450 - RNA, 19 nt, Artificial Sequence
  Description of Artificial Sequence: Synthetic oligonucleotide
uggcauuacauugaacucu

SEQ ID NO: 1290451 - RNA, 19 nt, Artificial Sequence
  Description of Artificial Sequence: Synthetic oligonucleotide
agauuuaaggcaaguucgg

SEQ ID NO: 1290452 - RNA, 19 nt, Artificial Sequence
  Description of Artificial Sequence: Synthetic oligonucleotide
uaauaauggcaauuauaau

SEQ ID NO: 1290453 - RNA, 19 nt, Artificial Sequence
  Description of Artificial Sequence: Synthetic oligonucleotide
aaacacucacuaaacggug

SEQ ID NO: 1290454 - RNA, 19 nt, Artificial Sequence
  Description of Artificial Sequence: Synthetic oligonucleotide
gaacucuaaaagcuuauua

SEQ ID NO: 1290455 - RNA, 19 nt, Artificial Sequence
  Description of Artificial Sequence: Synthetic oligonucleotide
caucugagaccuaaacaag

SEQ ID NO: 1290456 - RNA, 19 nt, Artificial Sequence
  Description of Artificial Sequence: Synthetic oligonucleotide
aacauccucaauguauacu

SEQ ID NO: 1290457 - RNA, 19 nt, Artificial Sequence
  Description of Artificial Sequence: Synthetic oligonucleotide
gaauguuucuaagcuaaac

SEQ ID NO: 1290458 - RNA, 19 nt, Artificial Sequence
  Description of Artificial Sequence: Synthetic oligonucleotide
uauaucuauugcuuuucau

SEQ ID NO: 1290459 - RNA, 19 nt, Artificial Sequence
  Description of Artificial Sequence: Synthetic oligonucleotide
auaguacaaguuucggacu

SEQ ID NO: 1290460 - RNA, 19 nt, Artificial Sequence
  Description of Artificial Sequence: Synthetic oligonucleotide
cucguuucaaggcauguuc

SEQ ID NO: 1290461 - RNA, 19 nt, Artificial Sequence
  Description of Artificial Sequence: Synthetic oligonucleotide
aacaagaacgaaaacucua

SEQ ID NO: 1290462 - RNA, 19 nt, Artificial Sequence
  Description of Artificial Sequence: Synthetic oligonucleotide
aaguugacuuaucuuguua

SEQ ID NO: 1290463 - RNA, 19 nt, Artificial Sequence
  Description of Artificial Sequence: Synthetic oligonucleotide
ucgauaaauacaguaugaa

SEQ ID NO: 1290464 - RNA, 19 nt, Artificial Sequence
  Description of Artificial Sequence: Synthetic oligonucleotide
auauaucuauugcuuuuca

SEQ ID NO: 1290465 - RNA, 19 nt, Artificial Sequence
  Description of Artificial Sequence: Synthetic oligonucleotide
uaugaacugagcucugcuc

SEQ ID NO: 1290466 - RNA, 19 nt, Artificial Sequence
  Description of Artificial Sequence: Synthetic oligonucleotide
uuaaggcaaguucgggccc

SEQ ID NO: 1290467 - RNA, 19 nt, Artificial Sequence
  Description of Artificial Sequence: Synthetic oligonucleotide
uuuucagcacuaagauggc

SEQ ID NO: 1290468 - RNA, 19 nt, Artificial Sequence
  Description of Artificial Sequence: Synthetic oligonucleotide
uucgaguccaagugcucgg

SEQ ID NO: 1290469 - RNA, 19 nt, Artificial Sequence
  Description of Artificial Sequence: Synthetic oligonucleotide
aaggcauauauuacuguga

SEQ ID NO: 1290470 - RNA, 19 nt, Artificial Sequence
  Description of Artificial Sequence: Synthetic oligonucleotide
ucguuucaaggcauguucu

SEQ ID NO: 1290471 - RNA, 19 nt, Artificial Sequence
  Description of Artificial Sequence: Synthetic oligonucleotide
gcuuauuaaggggaggugg

SEQ ID NO: 1290472 - RNA, 19 nt, Artificial Sequence
  Description of Artificial Sequence: Synthetic oligonucleotide
uuggcauuacauugaacuc

SEQ ID NO: 1290473 - RNA, 19 nt, Artificial Sequence
  Description of Artificial Sequence: Synthetic oligonucleotide
auuacaacucaaguugacu

SEQ ID NO: 1290474 - RNA, 19 nt, Artificial Sequence
  Description of Artificial Sequence: Synthetic oligonucleotide
cuaagcuaaacacucacua

SEQ ID NO: 1290475 - RNA, 19 nt, Artificial Sequence
  Description of Artificial Sequence: Synthetic oligonucleotide
auugcuacaugucuuuaua

SEQ ID NO: 1290476 - RNA, 19 nt, Artificial Sequence
  Description of Artificial Sequence: Synthetic oligonucleotide
aaccgaaagggaaggggcg

SEQ ID NO: 1290477 - RNA, 19 nt, Artificial Sequence
  Description of Artificial Sequence: Synthetic oligonucleotide
cucgauaaauacaguauga

SEQ ID NO: 1290478 - RNA, 19 nt, Artificial Sequence
  Description of Artificial Sequence: Synthetic oligonucleotide
ucgaaaagucauaguacaa

SEQ ID NO: 1290479 - RNA, 19 nt, Artificial Sequence
  Description of Artificial Sequence: Synthetic oligonucleotide
aggcauauucauguucuac

SEQ ID NO: 1290480 - RNA, 19 nt, Artificial Sequence
  Description of Artificial Sequence: Synthetic oligonucleotide
accauuauuuccccguuau

SEQ ID NO: 1290481 - RNA, 19 nt, Artificial Sequence
  Description of Artificial Sequence: Synthetic oligonucleotide
aggcauauauuacugugaa

SEQ ID NO: 1290482 - RNA, 19 nt, Artificial Sequence
  Description of Artificial Sequence: Synthetic oligonucleotide
uuguucuaucgcaucacaa

SEQ ID NO: 1290483 - RNA, 19 nt, Artificial Sequence
  Description of Artificial Sequence: Synthetic oligonucleotide
agaccuaaacaaguguuug

SEQ ID NO: 1290484 - RNA, 19 nt, Artificial Sequence
  Description of Artificial Sequence: Synthetic oligonucleotide
ugugcagguuaacccaucu

SEQ ID NO: 1290485 - RNA, 19 nt, Artificial Sequence
  Description of Artificial Sequence: Synthetic oligonucleotide
uauugcuacaugucuuuau

SEQ ID NO: 1290486 - RNA, 19 nt, Artificial Sequence
  Description of Artificial Sequence: Synthetic oligonucleotide
ggacuguuaugaaacaagg

SEQ ID NO: 1290487 - RNA, 19 nt, Artificial Sequence
  Description of Artificial Sequence: Synthetic oligonucleotide
uacaacucaaguugacuua

SEQ ID NO: 1290488 - RNA, 19 nt, Artificial Sequence
  Description of Artificial Sequence: Synthetic oligonucleotide
aaccuacugugucaaagua

SEQ ID NO: 1290489 - RNA, 19 nt, Artificial Sequence
  Description of Artificial Sequence: Synthetic oligonucleotide
uauugcuuuucaucauacu

SEQ ID NO: 1290490 - RNA, 19 nt, Artificial Sequence
  Description of Artificial Sequence: Synthetic oligonucleotide
uggcaugcaaucuuucgaa

SEQ ID NO: 1290491 - RNA, 19 nt, Artificial Sequence
  Description of Artificial Sequence: Synthetic oligonucleotide
aggacaacaaccgcgacaa

SEQ ID NO: 1290492 - RNA, 19 nt, Artificial Sequence
  Description of Artificial Sequence: Synthetic oligonucleotide
uugacuuaucuuguuacau

SEQ ID NO: 1290493 - RNA, 19 nt, Artificial Sequence
  Description of Artificial Sequence: Synthetic oligonucleotide
aacaaacauccucaaugua

SEQ ID NO: 1290494 - RNA, 19 nt, Artificial Sequence
  Description of Artificial Sequence: Synthetic oligonucleotide
guucgaguccaagugcucg

SEQ ID NO: 1290495 - RNA, 19 nt, Artificial Sequence
  Description of Artificial Sequence: Synthetic oligonucleotide
guacccuacauacaaaacu

SEQ ID NO: 1290496 - RNA, 19 nt, Artificial Sequence
  Description of Artificial Sequence: Synthetic oligonucleotide
ucagcacuaagauggcccu

SEQ ID NO: 1290497 - RNA, 19 nt, Artificial Sequence
  Description of Artificial Sequence: Synthetic oligonucleotide
accuaaacaaguguuuggu

SEQ ID NO: 1290498 - RNA, 19 nt, Artificial Sequence
  Description of Artificial Sequence: Synthetic oligonucleotide
ugacuuaucuuguuacauu

SEQ ID NO: 1290499 - RNA, 19 nt, Artificial Sequence
  Description of Artificial Sequence: Synthetic oligonucleotide
uuugugcagguuaacccau

SEQ ID NO: 1290500 - RNA, 19 nt, Artificial Sequence
  Description of Artificial Sequence: Synthetic oligonucleotide
aaguucguuggcuuuuauu

SEQ ID NO: 1290501 - RNA, 19 nt, Artificial Sequence
  Description of Artificial Sequence: Synthetic oligonucleotide
uccaacuguacccuacaua

SEQ ID NO: 1290502 - RNA, 19 nt, Artificial Sequence
  Description of Artificial Sequence: Synthetic oligonucleotide
uaacccaucuggcauucaa

SEQ ID NO: 1290503 - RNA, 19 nt, Artificial Sequence
  Description of Artificial Sequence: Synthetic oligonucleotide
gaagagauggaaugguggu

SEQ ID NO: 1290504 - RNA, 19 nt, Artificial Sequence
  Description of Artificial Sequence: Synthetic oligonucleotide
uuacguaaacaaggaaaga

SEQ ID NO: 1290505 - RNA, 19 nt, Artificial Sequence
  Description of Artificial Sequence: Synthetic oligonucleotide
gguggcaugcaaucuuucg

SEQ ID NO: 1290506 - RNA, 19 nt, Artificial Sequence
  Description of Artificial Sequence: Synthetic oligonucleotide
ggcauauucauguucuaca

SEQ ID NO: 1290507 - RNA, 19 nt, Artificial Sequence
  Description of Artificial Sequence: Synthetic oligonucleotide
aucauacucgauaaauaca

SEQ ID NO: 1290508 - RNA, 19 nt, Artificial Sequence
  Description of Artificial Sequence: Synthetic oligonucleotide
aucuggacuguaacuaagg

SEQ ID NO: 1290509 - RNA, 19 nt, Artificial Sequence
  Description of Artificial Sequence: Synthetic oligonucleotide
aguuguggugcgaaucaac

SEQ ID NO: 1290510 - RNA, 19 nt, Artificial Sequence
  Description of Artificial Sequence: Synthetic oligonucleotide
acgaaaacucuaauaauaa

SEQ ID NO: 1290511 - RNA, 19 nt, Artificial Sequence
  Description of Artificial Sequence: Synthetic oligonucleotide
acuaaacgguggcaaugag

SEQ ID NO: 1290512 - RNA, 19 nt, Artificial Sequence
  Description of Artificial Sequence: Synthetic oligonucleotide
uauuuccccguuauugcua

SEQ ID NO: 1290513 - RNA, 19 nt, Artificial Sequence
  Description of Artificial Sequence: Synthetic oligonucleotide
uggagggacauuccugccu

SEQ ID NO: 1290514 - RNA, 19 nt, Artificial Sequence
  Description of Artificial Sequence: Synthetic oligonucleotide
aagaguucucacaucugga

SEQ ID NO: 1290515 - RNA, 19 nt, Artificial Sequence
  Description of Artificial Sequence: Synthetic oligonucleotide
guugacuuaucuuguuaca

SEQ ID NO: 1290516 - RNA, 19 nt, Artificial Sequence
  Description of Artificial Sequence: Synthetic oligonucleotide
uuauuaaggggagguggca

SEQ ID NO: 1290517 - RNA, 19 nt, Artificial Sequence
  Description of Artificial Sequence: Synthetic oligonucleotide
guaucagacuuuggaaugc

SEQ ID NO: 1290518 - RNA, 19 nt, Artificial Sequence
  Description of Artificial Sequence: Synthetic oligonucleotide
aauuaugaacugagcucug

SEQ ID NO: 1290519 - RNA, 19 nt, Artificial Sequence
  Description of Artificial Sequence: Synthetic oligonucleotide
agcgccugcucacucaucu

SEQ ID NO: 1290520 - RNA, 19 nt, Artificial Sequence
  Description of Artificial Sequence: Synthetic oligonucleotide
acaagaacgaaaacucuaa

SEQ ID NO: 1290521 - RNA, 19 nt, Artificial Sequence
  Description of Artificial Sequence: Synthetic oligonucleotide
cauuacauugaacucuaaa

SEQ ID NO: 1290522 - RNA, 19 nt, Artificial Sequence
  Description of Artificial Sequence: Synthetic oligonucleotide
cuaagauggcccucuucac

SEQ ID NO: 1290523 - RNA, 19 nt, Artificial Sequence
  Description of Artificial Sequence: Synthetic oligonucleotide
cacauuuugccgauuaaua

SEQ ID NO: 1290524 - RNA, 19 nt, Artificial Sequence
  Description of Artificial Sequence: Synthetic oligonucleotide
cuaucgcaucacaacugcc

SEQ ID NO: 1290525 - RNA, 19 nt, Artificial Sequence
  Description of Artificial Sequence: Synthetic oligonucleotide
acaacugcccguugugacu

SEQ ID NO: 1290526 - RNA, 19 nt, Artificial Sequence
  Description of Artificial Sequence: Synthetic oligonucleotide
aaggcacugagaccauuau

SEQ ID NO: 1290527 - RNA, 19 nt, Artificial Sequence
  Description of Artificial Sequence: Synthetic oligonucleotide
ccccaaacauauaacuucg

SEQ ID NO: 1290528 - RNA, 19 nt, Artificial Sequence
  Description of Artificial Sequence: Synthetic oligonucleotide
aagugaaagaagagaugga

SEQ ID NO: 1290529 - RNA, 19 nt, Artificial Sequence
  Description of Artificial Sequence: Synthetic oligonucleotide
acucaaguugacuuaucuu

SEQ ID NO: 1290530 - RNA, 19 nt, Artificial Sequence
  Description of Artificial Sequence: Synthetic oligonucleotide
auacucaaugucacaguag

SEQ ID NO: 1290531 - RNA, 19 nt, Artificial Sequence
  Description of Artificial Sequence: Synthetic oligonucleotide
cagagggaauguuucuaag

SEQ ID NO: 1290532 - RNA, 19 nt, Artificial Sequence
  Description of Artificial Sequence: Synthetic oligonucleotide
guucuaucgcaucacaacu

SEQ ID NO: 1290533 - RNA, 19 nt, Artificial Sequence
  Description of Artificial Sequence: Synthetic oligonucleotide
caucugccauccaggaagg

SEQ ID NO: 1290534 - RNA, 19 nt, Artificial Sequence
  Description of Artificial Sequence: Synthetic oligonucleotide
cacaacugcccguugugac

SEQ ID NO: 1290535 - RNA, 19 nt, Artificial Sequence
  Description of Artificial Sequence: Synthetic oligonucleotide
uucggacuguuaugaaaca

SEQ ID NO: 1290536 - RNA, 19 nt, Artificial Sequence
  Description of Artificial Sequence: Synthetic oligonucleotide
agaccaguaucagacuuug

SEQ ID NO: 1290537 - RNA, 19 nt, Artificial Sequence
  Description of Artificial Sequence: Synthetic oligonucleotide
accuacugugucaaaguag

SEQ ID NO: 1290538 - RNA, 19 nt, Artificial Sequence
  Description of Artificial Sequence: Synthetic oligonucleotide
uugaguuguggugcgaauc

SEQ ID NO: 1290539 - RNA, 19 nt, Artificial Sequence
  Description of Artificial Sequence: Synthetic oligonucleotide
acaguacaauguuuacagu

SEQ ID NO: 1290540 - RNA, 19 nt, Artificial Sequence
  Description of Artificial Sequence: Synthetic oligonucleotide
aucuuucgaaauuuacgua

SEQ ID NO: 1290541 - RNA, 19 nt, Artificial Sequence
  Description of Artificial Sequence: Synthetic oligonucleotide
acguaaacaaggaaagaaa

SEQ ID NO: 1290542 - RNA, 19 nt, Artificial Sequence
  Description of Artificial Sequence: Synthetic oligonucleotide
guucguuggcuuuuauuuc

SEQ ID NO: 1290543 - RNA, 19 nt, Artificial Sequence
  Description of Artificial Sequence: Synthetic oligonucleotide
caaggcauauucauguucu

SEQ ID NO: 1290544 - RNA, 19 nt, Artificial Sequence
  Description of Artificial Sequence: Synthetic oligonucleotide
auugaacucuaaaagcuua

SEQ ID NO: 1290545 - RNA, 19 nt, Artificial Sequence
  Description of Artificial Sequence: Synthetic oligonucleotide
gagaccauuauuuccccgu

SEQ ID NO: 1290546 - RNA, 19 nt, Artificial Sequence
  Description of Artificial Sequence: Synthetic oligonucleotide
acaaggacaacaaccgcga

SEQ ID NO: 1290547 - RNA, 19 nt, Artificial Sequence
  Description of Artificial Sequence: Synthetic oligonucleotide
guggcaugcaaucuuucga

SEQ ID NO: 1290548 - RNA, 19 nt, Artificial Sequence
  Description of Artificial Sequence: Synthetic oligonucleotide
uuguggugcgaaucaacuc

SEQ ID NO: 1290549 - RNA, 19 nt, Artificial Sequence
  Description of Artificial Sequence: Synthetic oligonucleotide
cuuucgaaauuuacguaaa

SEQ ID NO: 1290550 - RNA, 19 nt, Artificial Sequence
  Description of Artificial Sequence: Synthetic oligonucleotide
cuggucuaagaguucucac

SEQ ID NO: 1290551 - RNA, 19 nt, Artificial Sequence
  Description of Artificial Sequence: Synthetic oligonucleotide
gacuuuggaaugcaagggu

SEQ ID NO: 1290552 - RNA, 19 nt, Artificial Sequence
  Description of Artificial Sequence: Synthetic oligonucleotide
caaaacuaagcgccugcuc

SEQ ID NO: 1290553 - RNA, 19 nt, Artificial Sequence
  Description of Artificial Sequence: Synthetic oligonucleotide
uagugaacugauuccccaa

SEQ ID NO: 1290554 - RNA, 19 nt, Artificial Sequence
  Description of Artificial Sequence: Synthetic oligonucleotide
cuguuaugaaacaaggcau

SEQ ID NO: 1290555 - RNA, 19 nt, Artificial Sequence
  Description of Artificial Sequence: Synthetic oligonucleotide
aaucaacucaaaacagcua

SEQ ID NO: 1290556 - RNA, 19 nt, Artificial Sequence
  Description of Artificial Sequence: Synthetic oligonucleotide
ucgcucaagcacuaaugaa

SEQ ID NO: 1290557 - RNA, 19 nt, Artificial Sequence
  Description of Artificial Sequence: Synthetic oligonucleotide
gaacgaaaacucuaauaau

SEQ ID NO: 1290558 - RNA, 19 nt, Artificial Sequence
  Description of Artificial Sequence: Synthetic oligonucleotide
aaaguucguuggcuuuuau

SEQ ID NO: 1290559 - RNA, 19 nt, Artificial Sequence
  Description of Artificial Sequence: Synthetic oligonucleotide
gaaccuacugugucaaagu

SEQ ID NO: 1290560 - RNA, 19 nt, Artificial Sequence
  Description of Artificial Sequence: Synthetic oligonucleotide
accgcgacaaaccccggcu

SEQ ID NO: 1290561 - RNA, 19 nt, Artificial Sequence
  Description of Artificial Sequence: Synthetic oligonucleotide
agcacuaagauggcccucu

SEQ ID NO: 1290562 - RNA, 19 nt, Artificial Sequence
  Description of Artificial Sequence: Synthetic oligonucleotide
acacuggucuaagaguucu

SEQ ID NO: 1290563 - RNA, 19 nt, Artificial Sequence
  Description of Artificial Sequence: Synthetic oligonucleotide
accgaaagggaaggggcgg

SEQ ID NO: 1290564 - RNA, 19 nt, Artificial Sequence
  Description of Artificial Sequence: Synthetic oligonucleotide
cccuacauacaaaacuaag

SEQ ID NO: 1290565 - RNA, 19 nt, Artificial Sequence
  Description of Artificial Sequence: Synthetic oligonucleotide
uaaggcaaguucgggcccc

SEQ ID NO: 1290566 - RNA, 19 nt, Artificial Sequence
  Description of Artificial Sequence: Synthetic oligonucleotide
guucuacagaccauuuuca

SEQ ID NO: 1290567 - RNA, 19 nt, Artificial Sequence
  Description of Artificial Sequence: Synthetic oligonucleotide
cauuuugccgauuaauaau

SEQ ID NO: 1290568 - RNA, 19 nt, Artificial Sequence
  Description of Artificial Sequence: Synthetic oligonucleotide
acaaaacuaagcgccugcu

SEQ ID NO: 1290569 - RNA, 19 nt, Artificial Sequence
  Description of Artificial Sequence: Synthetic oligonucleotide
aaggcauguucuuggcauu

SEQ ID NO: 1290570 - RNA, 19 nt, Artificial Sequence
  Description of Artificial Sequence: Synthetic oligonucleotide
uacaaguuucggacuguua

SEQ ID NO: 1290571 - RNA, 19 nt, Artificial Sequence
  Description of Artificial Sequence: Synthetic oligonucleotide
acucacuaaacgguggcaa

SEQ ID NO: 1290572 - RNA, 19 nt, Artificial Sequence
  Description of Artificial Sequence: Synthetic oligonucleotide
gaggaagauuuaaggcaag

SEQ ID NO: 1290573 - RNA, 19 nt, Artificial Sequence
  Description of Artificial Sequence: Synthetic oligonucleotide
uccccguuauugcuacaug

SEQ ID NO: 1290574 - RNA, 19 nt, Artificial Sequence
  Description of Artificial Sequence: Synthetic oligonucleotide
ugaacucuaaaagcuuauu

SEQ ID NO: 1290575 - RNA, 19 nt, Artificial Sequence
  Description of Artificial Sequence: Synthetic oligonucleotide
auugaguuguggugcgaau

SEQ ID NO: 1290576 - RNA, 19 nt, Artificial Sequence
  Description of Artificial Sequence: Synthetic oligonucleotide
gaguucucacaucuggacu

SEQ ID NO: 1290577 - RNA, 19 nt, Artificial Sequence
  Description of Artificial Sequence: Synthetic oligonucleotide
caaugagaccaguaucaga

SEQ ID NO: 1290578 - RNA, 19 nt, Artificial Sequence
  Description of Artificial Sequence: Synthetic oligonucleotide
acuuaucuuguuacauuca

SEQ ID NO: 1290579 - RNA, 19 nt, Artificial Sequence
  Description of Artificial Sequence: Synthetic oligonucleotide
aaaaguucguuggcuuuua

SEQ ID NO: 1290580 - RNA, 19 nt, Artificial Sequence
  Description of Artificial Sequence: Synthetic oligonucleotide
ucacaacugcccguuguga

SEQ ID NO: 1290581 - RNA, 19 nt, Artificial Sequence
  Description of Artificial Sequence: Synthetic oligonucleotide
cagguuaacccaucuggca

SEQ ID NO: 1290582 - RNA, 19 nt, Artificial Sequence
  Description of Artificial Sequence: Synthetic oligonucleotide
aauuuguagugaacugauu

SEQ ID NO: 1290583 - RNA, 19 nt, Artificial Sequence
  Description of Artificial Sequence: Synthetic oligonucleotide
gcgaaucaacucaaaacag

SEQ ID NO: 1290584 - RNA, 19 nt, Artificial Sequence
  Description of Artificial Sequence: Synthetic oligonucleotide
agcuuauuaaggggaggug

SEQ ID NO: 1290585 - RNA, 19 nt, Artificial Sequence
  Description of Artificial Sequence: Synthetic oligonucleotide
aacuaagcgccugcucacu

SEQ ID NO: 1290586 - RNA, 19 nt, Artificial Sequence
  Description of Artificial Sequence: Synthetic oligonucleotide
ugcucacucaucugccauc

SEQ ID NO: 1290587 - RNA, 19 nt, Artificial Sequence
  Description of Artificial Sequence: Synthetic oligonucleotide
caauuuguagugaacugau

SEQ ID NO: 1290588 - RNA, 19 nt, Artificial Sequence
  Description of Artificial Sequence: Synthetic oligonucleotide
auacacacacucggugcuc

SEQ ID NO: 1290589 - RNA, 19 nt, Artificial Sequence
  Description of Artificial Sequence: Synthetic oligonucleotide
guucgggccccaugaaggc

SEQ ID NO: 1290590 - RNA, 19 nt, Artificial Sequence
  Description of Artificial Sequence: Synthetic oligonucleotide
cuuacucauuuacaauaaa

SEQ ID NO: 1290591 - RNA, 19 nt, Artificial Sequence
  Description of Artificial Sequence: Synthetic oligonucleotide
cuggacuguaacuaaggcu

SEQ ID NO: 1290592 - RNA, 19 nt, Artificial Sequence
  Description of Artificial Sequence: Synthetic oligonucleotide
uacucguuucaaggcaugu

SEQ ID NO: 1290593 - RNA, 19 nt, Artificial Sequence
  Description of Artificial Sequence: Synthetic oligonucleotide
uuauugcuacaugucuuua

SEQ ID NO: 1290594 - RNA, 19 nt, Artificial Sequence
  Description of Artificial Sequence: Synthetic oligonucleotide
uuauuugguugaggaagau

SEQ ID NO: 1290595 - RNA, 19 nt, Artificial Sequence
  Description of Artificial Sequence: Synthetic oligonucleotide
aguacaaguuucggacugu

SEQ ID NO: 1290596 - RNA, 19 nt, Artificial Sequence
  Description of Artificial Sequence: Synthetic oligonucleotide
cucguuuugugcagguuaa

SEQ ID NO: 1290597 - RNA, 19 nt, Artificial Sequence
  Description of Artificial Sequence: Synthetic oligonucleotide
ggugcgaaucaacucaaaa

SEQ ID NO: 1290598 - RNA, 19 nt, Artificial Sequence
  Description of Artificial Sequence: Synthetic oligonucleotide
uuccccguuauugcuacau

SEQ ID NO: 1290599 - RNA, 19 nt, Artificial Sequence
  Description of Artificial Sequence: Synthetic oligonucleotide
gucuaagaguucucacauc

SEQ ID NO: 1290600 - RNA, 19 nt, Artificial Sequence
  Description of Artificial Sequence: Synthetic oligonucleotide
cacuuauuucccaacaauu

SEQ ID NO: 1290601 - RNA, 19 nt, Artificial Sequence
  Description of Artificial Sequence: Synthetic oligonucleotide
agaccauuauuuccccguu

SEQ ID NO: 1290602 - RNA, 19 nt, Artificial Sequence
  Description of Artificial Sequence: Synthetic oligonucleotide
aguucgaguccaagugcuc

SEQ ID NO: 1290603 - RNA, 19 nt, Artificial Sequence
  Description of Artificial Sequence: Synthetic oligonucleotide
ucccggcauaguucgaguc

SEQ ID NO: 1290604 - RNA, 19 nt, Artificial Sequence
  Description of Artificial Sequence: Synthetic oligonucleotide
gacuguaacuaaggcuuuc

SEQ ID NO: 1290605 - RNA, 19 nt, Artificial Sequence
  Description of Artificial Sequence: Synthetic oligonucleotide
guggcaaugagaccaguau

SEQ ID NO: 1290606 - RNA, 19 nt, Artificial Sequence
  Description of Artificial Sequence: Synthetic oligonucleotide
guuguggugcgaaucaacu

SEQ ID NO: 1290607 - RNA, 19 nt, Artificial Sequence
  Description of Artificial Sequence: Synthetic oligonucleotide
ucgcaucacaacugcccgu

SEQ ID NO: 1290608 - RNA, 19 nt, Artificial Sequence
  Description of Artificial Sequence: Synthetic oligonucleotide
cuaagcgccugcucacuca

SEQ ID NO: 1290609 - RNA, 19 nt, Artificial Sequence
  Description of Artificial Sequence: Synthetic oligonucleotide
ggcuacucguuucaaggca

SEQ ID NO: 1290610 - RNA, 19 nt, Artificial Sequence
  Description of Artificial Sequence: Synthetic oligonucleotide
ggucuaagaguucucacau

SEQ ID NO: 1290611 - RNA, 19 nt, Artificial Sequence
  Description of Artificial Sequence: Synthetic oligonucleotide
aggcacugagaccauuauu

SEQ ID NO: 1290612 - RNA, 19 nt, Artificial Sequence
  Description of Artificial Sequence: Synthetic oligonucleotide
caugcaaucuuucgaaauu

SEQ ID NO: 1290613 - RNA, 19 nt, Artificial Sequence
  Description of Artificial Sequence: Synthetic oligonucleotide
caaggacaacaaccgcgac

SEQ ID NO: 1290614 - RNA, 19 nt, Artificial Sequence
  Description of Artificial Sequence: Synthetic oligonucleotide
agcagagggaauguuucua

SEQ ID NO: 1290615 - RNA, 19 nt, Artificial Sequence
  Description of Artificial Sequence: Synthetic oligonucleotide
caacuguacccuacauaca

SEQ ID NO: 1290616 - RNA, 19 nt, Artificial Sequence
  Description of Artificial Sequence: Synthetic oligonucleotide
uggugcgaaucaacucaaa

SEQ ID NO: 1290617 - RNA, 19 nt, Artificial Sequence
  Description of Artificial Sequence: Synthetic oligonucleotide
uggcucacacuggucuaag

SEQ ID NO: 1290618 - RNA, 19 nt, Artificial Sequence
  Description of Artificial Sequence: Synthetic oligonucleotide
cagaauacacacacucggu

SEQ ID NO: 1290619 - RNA, 19 nt, Artificial Sequence
  Description of Artificial Sequence: Synthetic oligonucleotide
cugagaccuaaacaagugu

SEQ ID NO: 1290620 - RNA, 19 nt, Artificial Sequence
  Description of Artificial Sequence: Synthetic oligonucleotide
cccguuauugcuacauguc

SEQ ID NO: 1290621 - RNA, 19 nt, Artificial Sequence
  Description of Artificial Sequence: Synthetic oligonucleotide
ggcacugagaccauuauuu

SEQ ID NO: 1290622 - RNA, 19 nt, Artificial Sequence
  Description of Artificial Sequence: Synthetic oligonucleotide
guaguccagaauacacaca

SEQ ID NO: 1290623 - RNA, 19 nt, Artificial Sequence
  Description of Artificial Sequence: Synthetic oligonucleotide
auauugaguuguggugcga

SEQ ID NO: 1290624 - RNA, 19 nt, Artificial Sequence
  Description of Artificial Sequence: Synthetic oligonucleotide
ucguuuugugcagguuaac

SEQ ID NO: 1290625 - RNA, 19 nt, Artificial Sequence
  Description of Artificial Sequence: Synthetic oligonucleotide
caaauucgcucaagcacua

SEQ ID NO: 1290626 - RNA, 19 nt, Artificial Sequence
  Description of Artificial Sequence: Synthetic oligonucleotide
cauacucgauaaauacagu

SEQ ID NO: 1290627 - RNA, 19 nt, Artificial Sequence
  Description of Artificial Sequence: Synthetic oligonucleotide
cacaguagagcugguggca

SEQ ID NO: 1290628 - RNA, 19 nt, Artificial Sequence
  Description of Artificial Sequence: Synthetic oligonucleotide
uucgggccccaugaaggca

SEQ ID NO: 1290629 - RNA, 19 nt, Artificial Sequence
  Description of Artificial Sequence: Synthetic oligonucleotide
ggcauaguucgaguccaag

SEQ ID NO: 1290630 - RNA, 19 nt, Artificial Sequence
  Description of Artificial Sequence: Synthetic oligonucleotide
gcagagggaauguuucuaa

SEQ ID NO: 1290631 - RNA, 19 nt, Artificial Sequence
  Description of Artificial Sequence: Synthetic oligonucleotide
acucguuucaaggcauguu

SEQ ID NO: 1290632 - RNA, 19 nt, Artificial Sequence
  Description of Artificial Sequence: Synthetic oligonucleotide
uuuccccguuauugcuaca

SEQ ID NO: 1290633 - RNA, 19 nt, Artificial Sequence
  Description of Artificial Sequence: Synthetic oligonucleotide
uuaacccaucuggcauuca

SEQ ID NO: 1290634 - RNA, 19 nt, Artificial Sequence
  Description of Artificial Sequence: Synthetic oligonucleotide
gagcagagggaauguuucu

SEQ ID NO: 1290635 - RNA, 19 nt, Artificial Sequence
  Description of Artificial Sequence: Synthetic oligonucleotide
gcauaguucgaguccaagu

SEQ ID NO: 1290636 - RNA, 19 nt, Artificial Sequence
  Description of Artificial Sequence: Synthetic oligonucleotide
ccccucccggcauaguucg

SEQ ID NO: 1290637 - RNA, 19 nt, Artificial Sequence
  Description of Artificial Sequence: Synthetic oligonucleotide
cgcucaagcacuaaugaaa

SEQ ID NO: 1290638 - RNA, 19 nt, Artificial Sequence
  Description of Artificial Sequence: Synthetic oligonucleotide
ggcaaguucgggccccaug

SEQ ID NO: 1290639 - RNA, 19 nt, Artificial Sequence
  Description of Artificial Sequence: Synthetic oligonucleotide
ggcauauauuacugugaaa

SEQ ID NO: 1290640 - RNA, 19 nt, Artificial Sequence
  Description of Artificial Sequence: Synthetic oligonucleotide
aaggcaaguucgggcccca

SEQ ID NO: 1290641 - RNA, 19 nt, Artificial Sequence
  Description of Artificial Sequence: Synthetic oligonucleotide
aucagacuuuggaaugcaa

SEQ ID NO: 1290642 - RNA, 19 nt, Artificial Sequence
  Description of Artificial Sequence: Synthetic oligonucleotide
caagaacgaaaacucuaau

SEQ ID NO: 1290643 - RNA, 19 nt, Artificial Sequence
  Description of Artificial Sequence: Synthetic oligonucleotide
agauggaauggugguuuua

SEQ ID NO: 1290644 - RNA, 19 nt, Artificial Sequence
  Description of Artificial Sequence: Synthetic oligonucleotide
ggcauuacauugaacucua

SEQ ID NO: 1290645 - RNA, 19 nt, Artificial Sequence
  Description of Artificial Sequence: Synthetic oligonucleotide
cccggcugaaggcuacucg

SEQ ID NO: 1290646 - RNA, 19 nt, Artificial Sequence
  Description of Artificial Sequence: Synthetic oligonucleotide
gaguuguggugcgaaucaa

SEQ ID NO: 1290647 - RNA, 19 nt, Artificial Sequence
  Description of Artificial Sequence: Synthetic oligonucleotide
aacugcccguugugacuau

SEQ ID NO: 1290648 - RNA, 19 nt, Artificial Sequence
  Description of Artificial Sequence: Synthetic oligonucleotide
cguaaacaaggaaagaaau

SEQ ID NO: 1290649 - RNA, 19 nt, Artificial Sequence
  Description of Artificial Sequence: Synthetic oligonucleotide
gcacuuauuucccaacaau

SEQ ID NO: 1290650 - RNA, 19 nt, Artificial Sequence
  Description of Artificial Sequence: Synthetic oligonucleotide
caaccgcgacaaaccccgg

SEQ ID NO: 1290651 - RNA, 19 nt, Artificial Sequence
  Description of Artificial Sequence: Synthetic oligonucleotide
ggcaugcaaucuuucgaaa

SEQ ID NO: 1290652 - RNA, 19 nt, Artificial Sequence
  Description of Artificial Sequence: Synthetic oligonucleotide
gcaugcaaucuuucgaaau

SEQ ID NO: 1290653 - RNA, 19 nt, Artificial Sequence
  Description of Artificial Sequence: Synthetic oligonucleotide
cacucacuaaacgguggca

SEQ ID NO: 1290654 - RNA, 19 nt, Artificial Sequence
  Description of Artificial Sequence: Synthetic oligonucleotide
cucacuaaacgguggcaau

SEQ ID NO: 1290655 - RNA, 19 nt, Artificial Sequence
  Description of Artificial Sequence: Synthetic oligonucleotide
guggugcgaaucaacucaa

SEQ ID NO: 1290656 - RNA, 19 nt, Artificial Sequence
  Description of Artificial Sequence: Synthetic oligonucleotide
gagaccaguaucagacuuu

SEQ ID NO: 1290657 - RNA, 19 nt, Artificial Sequence
  Description of Artificial Sequence: Synthetic oligonucleotide
ccuaaacaaguguuuggua

SEQ ID NO: 1290658 - RNA, 19 nt, Artificial Sequence
  Description of Artificial Sequence: Synthetic oligonucleotide
caacugcccguugugacua

SEQ ID NO: 1290659 - RNA, 19 nt, Artificial Sequence
  Description of Artificial Sequence: Synthetic oligonucleotide
cgauuaauaauggcaauua

SEQ ID NO: 1290660 - RNA, 19 nt, Artificial Sequence
  Description of Artificial Sequence: Synthetic oligonucleotide
gagauggaauggugguuuu

SEQ ID NO: 1290661 - RNA, 19 nt, Artificial Sequence
  Description of Artificial Sequence: Synthetic oligonucleotide
caaaccccggcugaaggcu

SEQ ID NO: 1290662 - RNA, 19 nt, Artificial Sequence
  Description of Artificial Sequence: Synthetic oligonucleotide
gcucaagcacuaaugaaau

SEQ ID NO: 1290663 - RNA, 19 nt, Artificial Sequence
  Description of Artificial Sequence: Synthetic oligonucleotide
caaguucgggccccaugaa

SEQ ID NO: 1290664 - RNA, 19 nt, Artificial Sequence
  Description of Artificial Sequence: Synthetic oligonucleotide
ccgaaagggaaggggcggg

SEQ ID NO: 1290665 - RNA, 19 nt, Artificial Sequence
  Description of Artificial Sequence: Synthetic oligonucleotide
ccguuauugcuacaugucu

SEQ ID NO: 1290666 - RNA, 19 nt, Artificial Sequence
  Description of Artificial Sequence: Synthetic oligonucleotide
ccucccggcauaguucgag

SEQ ID NO: 1290667 - RNA, 19 nt, Artificial Sequence
  Description of Artificial Sequence: Synthetic oligonucleotide
ccaaacauauaacuucguu

SEQ ID NO: 1290668 - RNA, 19 nt, Artificial Sequence
  Description of Artificial Sequence: Synthetic oligonucleotide
cagcacuaagauggcccuc

SEQ ID NO: 1290669 - RNA, 19 nt, Artificial Sequence
  Description of Artificial Sequence: Synthetic oligonucleotide
cuggcucacacuggucuaa

SEQ ID NO: 1290670 - RNA, 19 nt, Artificial Sequence
  Description of Artificial Sequence: Synthetic oligonucleotide
ggagggacauuccugccuu

SEQ ID NO: 1290671 - RNA, 19 nt, Artificial Sequence
  Description of Artificial Sequence: Synthetic oligonucleotide
ccccguuauugcuacaugu

SEQ ID NO: 1290672 - RNA, 19 nt, Artificial Sequence
  Description of Artificial Sequence: Synthetic oligonucleotide
gccgauuaauaauggcaau

SEQ ID NO: 1290673 - RNA, 19 nt, Artificial Sequence
  Description of Artificial Sequence: Synthetic oligonucleotide
guacaaguuucggacuguu

SEQ ID NO: 1290674 - RNA, 19 nt, Artificial Sequence
  Description of Artificial Sequence: Synthetic oligonucleotide
ccggcauaguucgagucca

SEQ ID NO: 1290675 - RNA, 19 nt, Artificial Sequence
  Description of Artificial Sequence: Synthetic oligonucleotide
cgaaaacucuaauaauaau

SEQ ID NO: 1290676 - RNA, 19 nt, Artificial Sequence
  Description of Artificial Sequence: Synthetic oligonucleotide
acugcccguugugacuauu

SEQ ID NO: 1290677 - RNA, 19 nt, Artificial Sequence
  Description of Artificial Sequence: Synthetic oligonucleotide
cucccggcauaguucgagu

SEQ ID NO: 1290678 - RNA, 19 nt, Artificial Sequence
  Description of Artificial Sequence: Synthetic oligonucleotide
ccgcgacaaaccccggcug

SEQ ID NO: 1290679 - RNA, 19 nt, Artificial Sequence
  Description of Artificial Sequence: Synthetic oligonucleotide
cguuauugcuacaugucuu

SEQ ID NO: 1290680 - RNA, 19 nt, Artificial Sequence
  Description of Artificial Sequence: Synthetic oligonucleotide
ccggcugaaggcuacucgu

SEQ ID NO: 1290681 - RNA, 19 nt, Artificial Sequence
  Description of Artificial Sequence: Synthetic oligonucleotide
ccgauuaauaauggcaauu

SEQ ID NO: 1290682 - RNA, 19 nt, Artificial Sequence
  Description of Artificial Sequence: Synthetic oligonucleotide
ccacauuuugccgauuaau

SEQ ID NO: 1290683 - RNA, 19 nt, Artificial Sequence
  Description of Artificial Sequence: Synthetic oligonucleotide
gccccucccggcauaguuc

SEQ ID NO: 1290684 - RNA, 19 nt, Artificial Sequence
  Description of Artificial Sequence: Synthetic oligonucleotide
cccaaacauauaacuucgu

SEQ ID NO: 1290685 - RNA, 19 nt, Artificial Sequence
  Description of Artificial Sequence: Synthetic oligonucleotide
gcgacaaaccccggcugaa

SEQ ID NO: 1290686 - RNA, 19 nt, Artificial Sequence
  Description of Artificial Sequence: Synthetic oligonucleotide
ggggccccucccggcauag

SEQ ID NO: 1290687 - RNA, 19 nt, Artificial Sequence
  Description of Artificial Sequence: Synthetic oligonucleotide
ggccccucccggcauaguu

SEQ ID NO: 1290688 - RNA, 19 nt, Artificial Sequence
  Description of Artificial Sequence: Synthetic oligonucleotide
ggacuguaacuaaggcuuu

SEQ ID NO: 1290689 - RNA, 19 nt, Artificial Sequence
  Description of Artificial Sequence: Synthetic oligonucleotide
cgcaucacaacugcccguu

SEQ ID NO: 1290690 - RNA, 19 nt, Artificial Sequence
  Description of Artificial Sequence: Synthetic oligonucleotide
cggcauaguucgaguccaa

SEQ ID NO: 1290691 - RNA, 19 nt, Artificial Sequence
  Description of Artificial Sequence: Synthetic oligonucleotide
cccucccggcauaguucga

SEQ ID NO: 1290692 - RNA, 19 nt, Artificial Sequence
  Description of Artificial Sequence: Synthetic oligonucleotide
aucguugccauccagaauc

SEQ ID NO: 1290693 - RNA, 19 nt, Artificial Sequence
  Description of Artificial Sequence: Synthetic oligonucleotide
aacuugacgggcuucugcc

SEQ ID NO: 1290694 - RNA, 19 nt, Artificial Sequence
  Description of Artificial Sequence: Synthetic oligonucleotide
aucucuuguacagagaacc

SEQ ID NO: 1290695 - RNA, 19 nt, Artificial Sequence
  Description of Artificial Sequence: Synthetic oligonucleotide
aguagcgucacgcuggugg

SEQ ID NO: 1290696 - RNA, 19 nt, Artificial Sequence
  Description of Artificial Sequence: Synthetic oligonucleotide
aacauacggagguaguuuc

SEQ ID NO: 1290697 - RNA, 19 nt, Artificial Sequence
  Description of Artificial Sequence: Synthetic oligonucleotide
uguguuccggucuugaucc

SEQ ID NO: 1290698 - RNA, 19 nt, Artificial Sequence
  Description of Artificial Sequence: Synthetic oligonucleotide
gaucauguagaacucuccg

SEQ ID NO: 1290699 - RNA, 19 nt, Artificial Sequence
  Description of Artificial Sequence: Synthetic oligonucleotide
aaaaguguuacuagccccg

SEQ ID NO: 1290700 - RNA, 19 nt, Artificial Sequence
  Description of Artificial Sequence: Synthetic oligonucleotide
guacccaugauccuuagug

SEQ ID NO: 1290701 - RNA, 19 nt, Artificial Sequence
  Description of Artificial Sequence: Synthetic oligonucleotide
ucucauggaucacagccgg

SEQ ID NO: 1290702 - RNA, 19 nt, Artificial Sequence
  Description of Artificial Sequence: Synthetic oligonucleotide
aaccucggaacauacggag

SEQ ID NO: 1290703 - RNA, 19 nt, Artificial Sequence
  Description of Artificial Sequence: Synthetic oligonucleotide
uucucauggaucacagccg

SEQ ID NO: 1290704 - RNA, 19 nt, Artificial Sequence
  Description of Artificial Sequence: Synthetic oligonucleotide
ucauguagaacucuccguc

SEQ ID NO: 1290705 - RNA, 19 nt, Artificial Sequence
  Description of Artificial Sequence: Synthetic oligonucleotide
uggaacauggcacagcguc

SEQ ID NO: 1290706 - RNA, 19 nt, Artificial Sequence
  Description of Artificial Sequence: Synthetic oligonucleotide
ugagggauaucucuuguac

SEQ ID NO: 1290707 - RNA, 19 nt, Artificial Sequence
  Description of Artificial Sequence: Synthetic oligonucleotide
aacgagguugcuuccugac

SEQ ID NO: 1290708 - RNA, 19 nt, Artificial Sequence
  Description of Artificial Sequence: Synthetic oligonucleotide
aauccggugggcuggggcg

SEQ ID NO: 1290709 - RNA, 19 nt, Artificial Sequence
  Description of Artificial Sequence: Synthetic oligonucleotide
ugggguaggacucaaucug

SEQ ID NO: 1290710 - RNA, 19 nt, Artificial Sequence
  Description of Artificial Sequence: Synthetic oligonucleotide
acaaacuccccacccaaac

SEQ ID NO: 1290711 - RNA, 19 nt, Artificial Sequence
  Description of Artificial Sequence: Synthetic oligonucleotide
ugucuaauggcagaggcga

SEQ ID NO: 1290712 - RNA, 19 nt, Artificial Sequence
  Description of Artificial Sequence: Synthetic oligonucleotide
gagguaguuucccaccucg

SEQ ID NO: 1290713 - RNA, 19 nt, Artificial Sequence
  Description of Artificial Sequence: Synthetic oligonucleotide
acccaaacgagguugcuuc

SEQ ID NO: 1290714 - RNA, 19 nt, Artificial Sequence
  Description of Artificial Sequence: Synthetic oligonucleotide
cugacucuagacuuugggg

SEQ ID NO: 1290715 - RNA, 19 nt, Artificial Sequence
  Description of Artificial Sequence: Synthetic oligonucleotide
uaccaugugacgaugcaac

SEQ ID NO: 1290716 - RNA, 19 nt, Artificial Sequence
  Description of Artificial Sequence: Synthetic oligonucleotide
uggguucucacugaaggcg

SEQ ID NO: 1290717 - RNA, 19 nt, Artificial Sequence
  Description of Artificial Sequence: Synthetic oligonucleotide
gucagauugguccuccagg

SEQ ID NO: 1290718 - RNA, 19 nt, Artificial Sequence
  Description of Artificial Sequence: Synthetic oligonucleotide
aacacaacccaaacgaggu

SEQ ID NO: 1290719 - RNA, 19 nt, Artificial Sequence
  Description of Artificial Sequence: Synthetic oligonucleotide
aaaacacaacccaaacgag

SEQ ID NO: 1290720 - RNA, 19 nt, Artificial Sequence
  Description of Artificial Sequence: Synthetic oligonucleotide
aguguuacuagccccgucu

SEQ ID NO: 1290721 - RNA, 19 nt, Artificial Sequence
  Description of Artificial Sequence: Synthetic oligonucleotide
ugaugcauucucauggauc

SEQ ID NO: 1290722 - RNA, 19 nt, Artificial Sequence
  Description of Artificial Sequence: Synthetic oligonucleotide
uuucaguagcgucacgcug

SEQ ID NO: 1290723 - RNA, 19 nt, Artificial Sequence
  Description of Artificial Sequence: Synthetic oligonucleotide
cauguagaacucuccgucg

SEQ ID NO: 1290724 - RNA, 19 nt, Artificial Sequence
  Description of Artificial Sequence: Synthetic oligonucleotide
cucucuuuaccacagagga

SEQ ID NO: 1290725 - RNA, 19 nt, Artificial Sequence
  Description of Artificial Sequence: Synthetic oligonucleotide
uguuacuagccccgucugg

SEQ ID NO: 1290726 - RNA, 19 nt, Artificial Sequence
  Description of Artificial Sequence: Synthetic oligonucleotide
uuuugagaugcuccgugga

SEQ ID NO: 1290727 - RNA, 19 nt, Artificial Sequence
  Description of Artificial Sequence: Synthetic oligonucleotide
ugugggguaggacucaauc

SEQ ID NO: 1290728 - RNA, 19 nt, Artificial Sequence
  Description of Artificial Sequence: Synthetic oligonucleotide
uggaaugugugcugaagga

SEQ ID NO: 1290729 - RNA, 19 nt, Artificial Sequence
  Description of Artificial Sequence: Synthetic oligonucleotide
gguggaacauggcacagcg

SEQ ID NO: 1290730 - RNA, 19 nt, Artificial Sequence
  Description of Artificial Sequence: Synthetic oligonucleotide
cuugucccgacccaugcgg

SEQ ID NO: 1290731 - RNA, 19 nt, Artificial Sequence
  Description of Artificial Sequence: Synthetic oligonucleotide
gucgccuccagagugaggg

SEQ ID NO: 1290732 - RNA, 19 nt, Artificial Sequence
  Description of Artificial Sequence: Synthetic oligonucleotide
gauugguccuccaggaugc

SEQ ID NO: 1290733 - RNA, 19 nt, Artificial Sequence
  Description of Artificial Sequence: Synthetic oligonucleotide
ucgagcuggaaagaauccg

SEQ ID NO: 1290734 - RNA, 19 nt, Artificial Sequence
  Description of Artificial Sequence: Synthetic oligonucleotide
acaguggcuagucgccucc

SEQ ID NO: 1290735 - RNA, 19 nt, Artificial Sequence
  Description of Artificial Sequence: Synthetic oligonucleotide
uggcuagucgccuccagag

SEQ ID NO: 1290736 - RNA, 19 nt, Artificial Sequence
  Description of Artificial Sequence: Synthetic oligonucleotide
agcaaauggaaugugugcu

SEQ ID NO: 1290737 - RNA, 19 nt, Artificial Sequence
  Description of Artificial Sequence: Synthetic oligonucleotide
aggucagcggguucaaauc

SEQ ID NO: 1290738 - RNA, 19 nt, Artificial Sequence
  Description of Artificial Sequence: Synthetic oligonucleotide
uguauuucggauggcaauc

SEQ ID NO: 1290739 - RNA, 19 nt, Artificial Sequence
  Description of Artificial Sequence: Synthetic oligonucleotide
cugucuaauggcagaggcg

SEQ ID NO: 1290740 - RNA, 19 nt, Artificial Sequence
  Description of Artificial Sequence: Synthetic oligonucleotide
uugagaugcuccguggaag

SEQ ID NO: 1290741 - RNA, 19 nt, Artificial Sequence
  Description of Artificial Sequence: Synthetic oligonucleotide
agcggguucaaauccaggu

SEQ ID NO: 1290742 - RNA, 19 nt, Artificial Sequence
  Description of Artificial Sequence: Synthetic oligonucleotide
agaggcgauagcuggcacg

SEQ ID NO: 1290743 - RNA, 19 nt, Artificial Sequence
  Description of Artificial Sequence: Synthetic oligonucleotide
uuguguuccggucuugauc

SEQ ID NO: 1290744 - RNA, 19 nt, Artificial Sequence
  Description of Artificial Sequence: Synthetic oligonucleotide
caugucccauucaaacugg

SEQ ID NO: 1290745 - RNA, 19 nt, Artificial Sequence
  Description of Artificial Sequence: Synthetic oligonucleotide
acuugacgggcuucugccc

SEQ ID NO: 1290746 - RNA, 19 nt, Artificial Sequence
  Description of Artificial Sequence: Synthetic oligonucleotide
cucggagccgaucauguag

SEQ ID NO: 1290747 - RNA, 19 nt, Artificial Sequence
  Description of Artificial Sequence: Synthetic oligonucleotide
aaguguuacuagccccguc

SEQ ID NO: 1290748 - RNA, 19 nt, Artificial Sequence
  Description of Artificial Sequence: Synthetic oligonucleotide
ucuugucccgacccaugcg

SEQ ID NO: 1290749 - RNA, 19 nt, Artificial Sequence
  Description of Artificial Sequence: Synthetic oligonucleotide
cuugacgggcuucugcccg

SEQ ID NO: 1290750 - RNA, 19 nt, Artificial Sequence
  Description of Artificial Sequence: Synthetic oligonucleotide
uguccaaccggaugggaac

SEQ ID NO: 1290751 - RNA, 19 nt, Artificial Sequence
  Description of Artificial Sequence: Synthetic oligonucleotide
uccgaggcuuucaguagcg

SEQ ID NO: 1290752 - RNA, 19 nt, Artificial Sequence
  Description of Artificial Sequence: Synthetic oligonucleotide
ugugacgaugcaacuauuu

SEQ ID NO: 1290753 - RNA, 19 nt, Artificial Sequence
  Description of Artificial Sequence: Synthetic oligonucleotide
ucucugacaugucccauuc

SEQ ID NO: 1290754 - RNA, 19 nt, Artificial Sequence
  Description of Artificial Sequence: Synthetic oligonucleotide
ucagcggguucaaauccag

SEQ ID NO: 1290755 - RNA, 19 nt, Artificial Sequence
  Description of Artificial Sequence: Synthetic oligonucleotide
ugcugauggacacagccuu

SEQ ID NO: 1290756 - RNA, 19 nt, Artificial Sequence
  Description of Artificial Sequence: Synthetic oligonucleotide
acgggcuucugcccgaagg

SEQ ID NO: 1290757 - RNA, 19 nt, Artificial Sequence
  Description of Artificial Sequence: Synthetic oligonucleotide
uuggcgagacgccucauuc

SEQ ID NO: 1290758 - RNA, 19 nt, Artificial Sequence
  Description of Artificial Sequence: Synthetic oligonucleotide
uuacuagccccgucugggg

SEQ ID NO: 1290759 - RNA, 19 nt, Artificial Sequence
  Description of Artificial Sequence: Synthetic oligonucleotide
aaacgagguugcuuccuga

SEQ ID NO: 1290760 - RNA, 19 nt, Artificial Sequence
  Description of Artificial Sequence: Synthetic oligonucleotide
uaucucuuguacagagaac

SEQ ID NO: 1290761 - RNA, 19 nt, Artificial Sequence
  Description of Artificial Sequence: Synthetic oligonucleotide
caaucuccauguccaaccg

SEQ ID NO: 1290762 - RNA, 19 nt, Artificial Sequence
  Description of Artificial Sequence: Synthetic oligonucleotide
ugcauucucauggaucaca

SEQ ID NO: 1290763 - RNA, 19 nt, Artificial Sequence
  Description of Artificial Sequence: Synthetic oligonucleotide
caaacuccccacccaaacc

SEQ ID NO: 1290764 - RNA, 19 nt, Artificial Sequence
  Description of Artificial Sequence: Synthetic oligonucleotide
uacccaugauccuuagugu

SEQ ID NO: 1290765 - RNA, 19 nt, Artificial Sequence
  Description of Artificial Sequence: Synthetic oligonucleotide
acaacccaaacgagguugc

SEQ ID NO: 1290766 - RNA, 19 nt, Artificial Sequence
  Description of Artificial Sequence: Synthetic oligonucleotide
gggcuuagcaaauggaaug

SEQ ID NO: 1290767 - RNA, 19 nt, Artificial Sequence
  Description of Artificial Sequence: Synthetic oligonucleotide
agagaaccucggaacauac

SEQ ID NO: 1290768 - RNA, 19 nt, Artificial Sequence
  Description of Artificial Sequence: Synthetic oligonucleotide
gagggauaucucuuguaca

SEQ ID NO: 1290769 - RNA, 19 nt, Artificial Sequence
  Description of Artificial Sequence: Synthetic oligonucleotide
aaauggaaugugugcugaa

SEQ ID NO: 1290770 - RNA, 19 nt, Artificial Sequence
  Description of Artificial Sequence: Synthetic oligonucleotide
cacaacccaaacgagguug

SEQ ID NO: 1290771 - RNA, 19 nt, Artificial Sequence
  Description of Artificial Sequence: Synthetic oligonucleotide
ugggccgaagggaacggag

SEQ ID NO: 1290772 - RNA, 19 nt, Artificial Sequence
  Description of Artificial Sequence: Synthetic oligonucleotide
ucggucagugucuccagca

SEQ ID NO: 1290773 - RNA, 19 nt, Artificial Sequence
  Description of Artificial Sequence: Synthetic oligonucleotide
uggcgagacgccucauucg

SEQ ID NO: 1290774 - RNA, 19 nt, Artificial Sequence
  Description of Artificial Sequence: Synthetic oligonucleotide
auguagaacucuccgucgu

SEQ ID NO: 1290775 - RNA, 19 nt, Artificial Sequence
  Description of Artificial Sequence: Synthetic oligonucleotide
cauacggagguaguuuccc

SEQ ID NO: 1290776 - RNA, 19 nt, Artificial Sequence
  Description of Artificial Sequence: Synthetic oligonucleotide
acauacggagguaguuucc

SEQ ID NO: 1290777 - RNA, 19 nt, Artificial Sequence
  Description of Artificial Sequence: Synthetic oligonucleotide
gaauccggugggcuggggc

SEQ ID NO: 1290778 - RNA, 19 nt, Artificial Sequence
  Description of Artificial Sequence: Synthetic oligonucleotide
auguuccccacauggauau

SEQ ID NO: 1290779 - RNA, 19 nt, Artificial Sequence
  Description of Artificial Sequence: Synthetic oligonucleotide
uguuccggucuugaucccg

SEQ ID NO: 1290780 - RNA, 19 nt, Artificial Sequence
  Description of Artificial Sequence: Synthetic oligonucleotide
uccguggaaguugagcaug

SEQ ID NO: 1290781 - RNA, 19 nt, Artificial Sequence
  Description of Artificial Sequence: Synthetic oligonucleotide
ggugacaaacuccccaccc

SEQ ID NO: 1290782 - RNA, 19 nt, Artificial Sequence
  Description of Artificial Sequence: Synthetic oligonucleotide
aacugguccaccagggaga

SEQ ID NO: 1290783 - RNA, 19 nt, Artificial Sequence
  Description of Artificial Sequence: Synthetic oligonucleotide
ucucuuuaccacagaggaa

SEQ ID NO: 1290784 - RNA, 19 nt, Artificial Sequence
  Description of Artificial Sequence: Synthetic oligonucleotide
ucauucgccuuguguuccg

SEQ ID NO: 1290785 - RNA, 19 nt, Artificial Sequence
  Description of Artificial Sequence: Synthetic oligonucleotide
uacuagccccgucuggggc

SEQ ID NO: 1290786 - RNA, 19 nt, Artificial Sequence
  Description of Artificial Sequence: Synthetic oligonucleotide
uguagaacucuccgucguc

SEQ ID NO: 1290787 - RNA, 19 nt, Artificial Sequence
  Description of Artificial Sequence: Synthetic oligonucleotide
ggugcguugggccgaaggg

SEQ ID NO: 1290788 - RNA, 19 nt, Artificial Sequence
  Description of Artificial Sequence: Synthetic oligonucleotide
caggcugugaugcauucuc

SEQ ID NO: 1290789 - RNA, 19 nt, Artificial Sequence
  Description of Artificial Sequence: Synthetic oligonucleotide
aggugcguugggccgaagg

SEQ ID NO: 1290790 - RNA, 19 nt, Artificial Sequence
  Description of Artificial Sequence: Synthetic oligonucleotide
guagaacucuccgucgucc

SEQ ID NO: 1290791 - RNA, 19 nt, Artificial Sequence
  Description of Artificial Sequence: Synthetic oligonucleotide
ucauggaucacagccggau

SEQ ID NO: 1290792 - RNA, 19 nt, Artificial Sequence
  Description of Artificial Sequence: Synthetic oligonucleotide
aggaaggcaaggcaggcuu

SEQ ID NO: 1290793 - RNA, 19 nt, Artificial Sequence
  Description of Artificial Sequence: Synthetic oligonucleotide
ugcguugggccgaagggaa

SEQ ID NO: 1290794 - RNA, 19 nt, Artificial Sequence
  Description of Artificial Sequence: Synthetic oligonucleotide
uaggacucaaucugcuguc

SEQ ID NO: 1290795 - RNA, 19 nt, Artificial Sequence
  Description of Artificial Sequence: Synthetic oligonucleotide
uauuucggauggcaaucuc

SEQ ID NO: 1290796 - RNA, 19 nt, Artificial Sequence
  Description of Artificial Sequence: Synthetic oligonucleotide
guaggacucaaucugcugu

SEQ ID NO: 1290797 - RNA, 19 nt, Artificial Sequence
  Description of Artificial Sequence: Synthetic oligonucleotide
aaccggaugggaaccagca

SEQ ID NO: 1290798 - RNA, 19 nt, Artificial Sequence
  Description of Artificial Sequence: Synthetic oligonucleotide
gcuggcacgaaggucagcg

SEQ ID NO: 1290799 - RNA, 19 nt, Artificial Sequence
  Description of Artificial Sequence: Synthetic oligonucleotide
gagaaccucggaacauacg

SEQ ID NO: 1290800 - RNA, 19 nt, Artificial Sequence
  Description of Artificial Sequence: Synthetic oligonucleotide
aucacagccggaucauggu

SEQ ID NO: 1290801 - RNA, 19 nt, Artificial Sequence
  Description of Artificial Sequence: Synthetic oligonucleotide
aacauggcacagcguccag

SEQ ID NO: 1290802 - RNA, 19 nt, Artificial Sequence
  Description of Artificial Sequence: Synthetic oligonucleotide
cuuagcaaauggaaugugu

SEQ ID NO: 1290803 - RNA, 19 nt, Artificial Sequence
  Description of Artificial Sequence: Synthetic oligonucleotide
aaaguguuacuagccccgu

SEQ ID NO: 1290804 - RNA, 19 nt, Artificial Sequence
  Description of Artificial Sequence: Synthetic oligonucleotide
uuaccaugugacgaugcaa

SEQ ID NO: 1290805 - RNA, 19 nt, Artificial Sequence
  Description of Artificial Sequence: Synthetic oligonucleotide
ugcuccguggaaguugagc

SEQ ID NO: 1290806 - RNA, 19 nt, Artificial Sequence
  Description of Artificial Sequence: Synthetic oligonucleotide
ucgccuuguguuccggucu

SEQ ID NO: 1290807 - RNA, 19 nt, Artificial Sequence
  Description of Artificial Sequence: Synthetic oligonucleotide
gcuagucgccuccagagug

SEQ ID NO: 1290808 - RNA, 19 nt, Artificial Sequence
  Description of Artificial Sequence: Synthetic oligonucleotide
ggcaccauuggucagcauc

SEQ ID NO: 1290809 - RNA, 19 nt, Artificial Sequence
  Description of Artificial Sequence: Synthetic oligonucleotide
caaacgagguugcuuccug

SEQ ID NO: 1290810 - RNA, 19 nt, Artificial Sequence
  Description of Artificial Sequence: Synthetic oligonucleotide
ucacagccggaucaugguc

SEQ ID NO: 1290811 - RNA, 19 nt, Artificial Sequence
  Description of Artificial Sequence: Synthetic oligonucleotide
uugccucucucuuuaccac

SEQ ID NO: 1290812 - RNA, 19 nt, Artificial Sequence
  Description of Artificial Sequence: Synthetic oligonucleotide
ggucagcggguucaaaucc

SEQ ID NO: 1290813 - RNA, 19 nt, Artificial Sequence
  Description of Artificial Sequence: Synthetic oligonucleotide
uguacccaugauccuuagu

SEQ ID NO: 1290814 - RNA, 19 nt, Artificial Sequence
  Description of Artificial Sequence: Synthetic oligonucleotide
agcaucggucagugucucc

SEQ ID NO: 1290815 - RNA, 19 nt, Artificial Sequence
  Description of Artificial Sequence: Synthetic oligonucleotide
ucuggggcuccuauacaaa

SEQ ID NO: 1290816 - RNA, 19 nt, Artificial Sequence
  Description of Artificial Sequence: Synthetic oligonucleotide
ucuaauggcagaggcgaua

SEQ ID NO: 1290817 - RNA, 19 nt, Artificial Sequence
  Description of Artificial Sequence: Synthetic oligonucleotide
uugcuuccugacucuagac

SEQ ID NO: 1290818 - RNA, 19 nt, Artificial Sequence
  Description of Artificial Sequence: Synthetic oligonucleotide
gaacauggcacagcgucca

SEQ ID NO: 1290819 - RNA, 19 nt, Artificial Sequence
  Description of Artificial Sequence: Synthetic oligonucleotide
uucucaucguugccaucca

SEQ ID NO: 1290820 - RNA, 19 nt, Artificial Sequence
  Description of Artificial Sequence: Synthetic oligonucleotide
gcaaauggaaugugugcug

SEQ ID NO: 1290821 - RNA, 19 nt, Artificial Sequence
  Description of Artificial Sequence: Synthetic oligonucleotide
cucuuguacagagaaccuc

SEQ ID NO: 1290822 - RNA, 19 nt, Artificial Sequence
  Description of Artificial Sequence: Synthetic oligonucleotide
aaacuucucuggggaguuc

SEQ ID NO: 1290823 - RNA, 19 nt, Artificial Sequence
  Description of Artificial Sequence: Synthetic oligonucleotide
guagcgucacgcugguggc

SEQ ID NO: 1290824 - RNA, 19 nt, Artificial Sequence
  Description of Artificial Sequence: Synthetic oligonucleotide
acccaugcgguuccuguug

SEQ ID NO: 1290825 - RNA, 19 nt, Artificial Sequence
  Description of Artificial Sequence: Synthetic oligonucleotide
ucuaccuccgaggcuuuca

SEQ ID NO: 1290826 - RNA, 19 nt, Artificial Sequence
  Description of Artificial Sequence: Synthetic oligonucleotide
cuguaagcaauggugguga

SEQ ID NO: 1290827 - RNA, 19 nt, Artificial Sequence
  Description of Artificial Sequence: Synthetic oligonucleotide
ucaguagcgucacgcuggu

SEQ ID NO: 1290828 - RNA, 19 nt, Artificial Sequence
  Description of Artificial Sequence: Synthetic oligonucleotide
uucgccuuguguuccgguc

SEQ ID NO: 1290829 - RNA, 19 nt, Artificial Sequence
  Description of Artificial Sequence: Synthetic oligonucleotide
auacggagguaguuuccca

SEQ ID NO: 1290830 - RNA, 19 nt, Artificial Sequence
  Description of Artificial Sequence: Synthetic oligonucleotide
uguaagcaaugguggugac

SEQ ID NO: 1290831 - RNA, 19 nt, Artificial Sequence
  Description of Artificial Sequence: Synthetic oligonucleotide
cacuggcuguuucucuugg

SEQ ID NO: 1290832 - RNA, 19 nt, Artificial Sequence
  Description of Artificial Sequence: Synthetic oligonucleotide
caaccggaugggaaccagc

SEQ ID NO: 1290833 - RNA, 19 nt, Artificial Sequence
  Description of Artificial Sequence: Synthetic oligonucleotide
gaugcuccguggaaguuga

SEQ ID NO: 1290834 - RNA, 19 nt, Artificial Sequence
  Description of Artificial Sequence: Synthetic oligonucleotide
ggcgauagcuggcacgaag

SEQ ID NO: 1290835 - RNA, 19 nt, Artificial Sequence
  Description of Artificial Sequence: Synthetic oligonucleotide
aggcguaggucuucuggug

SEQ ID NO: 1290836 - RNA, 19 nt, Artificial Sequence
  Description of Artificial Sequence: Synthetic oligonucleotide
gcuccguggaaguugagca

SEQ ID NO: 1290837 - RNA, 19 nt, Artificial Sequence
  Description of Artificial Sequence: Synthetic oligonucleotide
guguuacuagccccgucug

SEQ ID NO: 1290838 - RNA, 19 nt, Artificial Sequence
  Description of Artificial Sequence: Synthetic oligonucleotide
gaggcgauagcuggcacga

SEQ ID NO: 1290839 - RNA, 19 nt, Artificial Sequence
  Description of Artificial Sequence: Synthetic oligonucleotide
acuagccccgucuggggcu

SEQ ID NO: 1290840 - RNA, 19 nt, Artificial Sequence
  Description of Artificial Sequence: Synthetic oligonucleotide
ucguugccauccagaaucu

SEQ ID NO: 1290841 - RNA, 19 nt, Artificial Sequence
  Description of Artificial Sequence: Synthetic oligonucleotide
acgagguugcuuccugacu

SEQ ID NO: 1290842 - RNA, 19 nt, Artificial Sequence
  Description of Artificial Sequence: Synthetic oligonucleotide
cagguaaaggcaucccgca

SEQ ID NO: 1290843 - RNA, 19 nt, Artificial Sequence
  Description of Artificial Sequence: Synthetic oligonucleotide
gucgagcuggaaagaaucc

SEQ ID NO: 1290844 - RNA, 19 nt, Artificial Sequence
  Description of Artificial Sequence: Synthetic oligonucleotide
uccccggaugcuguaagca

SEQ ID NO: 1290845 - RNA, 19 nt, Artificial Sequence
  Description of Artificial Sequence: Synthetic oligonucleotide
aacccaaacgagguugcuu

SEQ ID NO: 1290846 - RNA, 19 nt, Artificial Sequence
  Description of Artificial Sequence: Synthetic oligonucleotide
ggcgagacgccucauucgc

SEQ ID NO: 1290847 - RNA, 19 nt, Artificial Sequence
  Description of Artificial Sequence: Synthetic oligonucleotide
guuccggucuugaucccgg

SEQ ID NO: 1290848 - RNA, 19 nt, Artificial Sequence
  Description of Artificial Sequence: Synthetic oligonucleotide
ggggaguucuccuucucug

SEQ ID NO: 1290849 - RNA, 19 nt, Artificial Sequence
  Description of Artificial Sequence: Synthetic oligonucleotide
gcgauagcuggcacgaagg

SEQ ID NO: 1290850 - RNA, 19 nt, Artificial Sequence
  Description of Artificial Sequence: Synthetic oligonucleotide
gaaccucggaacauacgga

SEQ ID NO: 1290851 - RNA, 19 nt, Artificial Sequence
  Description of Artificial Sequence: Synthetic oligonucleotide
aguggcuagucgccuccag

SEQ ID NO: 1290852 - RNA, 19 nt, Artificial Sequence
  Description of Artificial Sequence: Synthetic oligonucleotide
cauggaucacagccggauc

SEQ ID NO: 1290853 - RNA, 19 nt, Artificial Sequence
  Description of Artificial Sequence: Synthetic oligonucleotide
uccuuaguguuagguuuug

SEQ ID NO: 1290854 - RNA, 19 nt, Artificial Sequence
  Description of Artificial Sequence: Synthetic oligonucleotide
gucacgcugguggcgaggg

SEQ ID NO: 1290855 - RNA, 19 nt, Artificial Sequence
  Description of Artificial Sequence: Synthetic oligonucleotide
agacgccucauucgccuug

SEQ ID NO: 1290856 - RNA, 19 nt, Artificial Sequence
  Description of Artificial Sequence: Synthetic oligonucleotide
uugucccgacccaugcggu

SEQ ID NO: 1290857 - RNA, 19 nt, Artificial Sequence
  Description of Artificial Sequence: Synthetic oligonucleotide
accucggaacauacggagg

SEQ ID NO: 1290858 - RNA, 19 nt, Artificial Sequence
  Description of Artificial Sequence: Synthetic oligonucleotide
uccuguugaugguggugga

SEQ ID NO: 1290859 - RNA, 19 nt, Artificial Sequence
  Description of Artificial Sequence: Synthetic oligonucleotide
caugugacgaugcaacuau

SEQ ID NO: 1290860 - RNA, 19 nt, Artificial Sequence
  Description of Artificial Sequence: Synthetic oligonucleotide
cagcggguucaaauccagg

SEQ ID NO: 1290861 - RNA, 19 nt, Artificial Sequence
  Description of Artificial Sequence: Synthetic oligonucleotide
acauggauauucagcuuga

SEQ ID NO: 1290862 - RNA, 19 nt, Artificial Sequence
  Description of Artificial Sequence: Synthetic oligonucleotide
ggcguaggucuucuggugc

SEQ ID NO: 1290863 - RNA, 19 nt, Artificial Sequence
  Description of Artificial Sequence: Synthetic oligonucleotide
cuggcacgaaggucagcgg

SEQ ID NO: 1290864 - RNA, 19 nt, Artificial Sequence
  Description of Artificial Sequence: Synthetic oligonucleotide
gguaguuucccaccucgga

SEQ ID NO: 1290865 - RNA, 19 nt, Artificial Sequence
  Description of Artificial Sequence: Synthetic oligonucleotide
aagggaacggaggccggga

SEQ ID NO: 1290866 - RNA, 19 nt, Artificial Sequence
  Description of Artificial Sequence: Synthetic oligonucleotide
ggucgagcuggaaagaauc

SEQ ID NO: 1290867 - RNA, 19 nt, Artificial Sequence
  Description of Artificial Sequence: Synthetic oligonucleotide
ugguguacccaugauccuu

SEQ ID NO: 1290868 - RNA, 19 nt, Artificial Sequence
  Description of Artificial Sequence: Synthetic oligonucleotide
caucggucagugucuccag

SEQ ID NO: 1290869 - RNA, 19 nt, Artificial Sequence
  Description of Artificial Sequence: Synthetic oligonucleotide
acagagaaccucggaacau

SEQ ID NO: 1290870 - RNA, 19 nt, Artificial Sequence
  Description of Artificial Sequence: Synthetic oligonucleotide
ucccgacccaugcgguucc

SEQ ID NO: 1290871 - RNA, 19 nt, Artificial Sequence
  Description of Artificial Sequence: Synthetic oligonucleotide
agccgaucauguagaacuc

SEQ ID NO: 1290872 - RNA, 19 nt, Artificial Sequence
  Description of Artificial Sequence: Synthetic oligonucleotide
augcauucucauggaucac

SEQ ID NO: 1290873 - RNA, 19 nt, Artificial Sequence
  Description of Artificial Sequence: Synthetic oligonucleotide
ggccguguuggcgagacgc

SEQ ID NO: 1290874 - RNA, 19 nt, Artificial Sequence
  Description of Artificial Sequence: Synthetic oligonucleotide
aucuccacugugggaagug

SEQ ID NO: 1290875 - RNA, 19 nt, Artificial Sequence
  Description of Artificial Sequence: Synthetic oligonucleotide
cuagucgccuccagaguga

SEQ ID NO: 1290876 - RNA, 19 nt, Artificial Sequence
  Description of Artificial Sequence: Synthetic oligonucleotide
cuccgagcacagcuucagg

SEQ ID NO: 1290877 - RNA, 19 nt, Artificial Sequence
  Description of Artificial Sequence: Synthetic oligonucleotide
cauucauguuccagguaaa

SEQ ID NO: 1290878 - RNA, 19 nt, Artificial Sequence
  Description of Artificial Sequence: Synthetic oligonucleotide
guggcgagggugguguacc

SEQ ID NO: 1290879 - RNA, 19 nt, Artificial Sequence
  Description of Artificial Sequence: Synthetic oligonucleotide
uccggucuugaucccggau

SEQ ID NO: 1290880 - RNA, 19 nt, Artificial Sequence
  Description of Artificial Sequence: Synthetic oligonucleotide
guguacccaugauccuuag

SEQ ID NO: 1290881 - RNA, 19 nt, Artificial Sequence
  Description of Artificial Sequence: Synthetic oligonucleotide
gaacauacggagguaguuu

SEQ ID NO: 1290882 - RNA, 19 nt, Artificial Sequence
  Description of Artificial Sequence: Synthetic oligonucleotide
cacaguggcuagucgccuc

SEQ ID NO: 1290883 - RNA, 19 nt, Artificial Sequence
  Description of Artificial Sequence: Synthetic oligonucleotide
auguccaaccggaugggaa

SEQ ID NO: 1290884 - RNA, 19 nt, Artificial Sequence
  Description of Artificial Sequence: Synthetic oligonucleotide
uccaaccggaugggaacca

SEQ ID NO: 1290885 - RNA, 19 nt, Artificial Sequence
  Description of Artificial Sequence: Synthetic oligonucleotide
guggcuagucgccuccaga

SEQ ID NO: 1290886 - RNA, 19 nt, Artificial Sequence
  Description of Artificial Sequence: Synthetic oligonucleotide
cuguauuucggauggcaau

SEQ ID NO: 1290887 - RNA, 19 nt, Artificial Sequence
  Description of Artificial Sequence: Synthetic oligonucleotide
gccgaggugcguugggccg

SEQ ID NO: 1290888 - RNA, 19 nt, Artificial Sequence
  Description of Artificial Sequence: Synthetic oligonucleotide
accucggagccgaucaugu

SEQ ID NO: 1290889 - RNA, 19 nt, Artificial Sequence
  Description of Artificial Sequence: Synthetic oligonucleotide
cauucgccuuguguuccgg

SEQ ID NO: 1290890 - RNA, 19 nt, Artificial Sequence
  Description of Artificial Sequence: Synthetic oligonucleotide
ggaaacggggcagccgggg

SEQ ID NO: 1290891 - RNA, 19 nt, Artificial Sequence
  Description of Artificial Sequence: Synthetic oligonucleotide
guccccggaugcuguaagc

SEQ ID NO: 1290892 - RNA, 19 nt, Artificial Sequence
  Description of Artificial Sequence: Synthetic oligonucleotide
gggguaggacucaaucugc

SEQ ID NO: 1290893 - RNA, 19 nt, Artificial Sequence
  Description of Artificial Sequence: Synthetic oligonucleotide
gugagggauaucucuugua

SEQ ID NO: 1290894 - RNA, 19 nt, Artificial Sequence
  Description of Artificial Sequence: Synthetic oligonucleotide
uggcgagggugguguaccc

SEQ ID NO: 1290895 - RNA, 19 nt, Artificial Sequence
  Description of Artificial Sequence: Synthetic oligonucleotide
agcgucacgcugguggcga

SEQ ID NO: 1290896 - RNA, 19 nt, Artificial Sequence
  Description of Artificial Sequence: Synthetic oligonucleotide
acauggcacagcguccaga

SEQ ID NO: 1290897 - RNA, 19 nt, Artificial Sequence
  Description of Artificial Sequence: Synthetic oligonucleotide
gcuuagcaaauggaaugug

SEQ ID NO: 1290898 - RNA, 19 nt, Artificial Sequence
  Description of Artificial Sequence: Synthetic oligonucleotide
guguuggcgagacgccuca

SEQ ID NO: 1290899 - RNA, 19 nt, Artificial Sequence
  Description of Artificial Sequence: Synthetic oligonucleotide
gaacaucucaggggucauc

SEQ ID NO: 1290900 - RNA, 19 nt, Artificial Sequence
  Description of Artificial Sequence: Synthetic oligonucleotide
auccuuaguguuagguuuu

SEQ ID NO: 1290901 - RNA, 19 nt, Artificial Sequence
  Description of Artificial Sequence: Synthetic oligonucleotide
caaacccagcuccgagcac

SEQ ID NO: 1290902 - RNA, 19 nt, Artificial Sequence
  Description of Artificial Sequence: Synthetic oligonucleotide
gcggguucaaauccagguc

SEQ ID NO: 1290903 - RNA, 19 nt, Artificial Sequence
  Description of Artificial Sequence: Synthetic oligonucleotide
gucagcggguucaaaucca

SEQ ID NO: 1290904 - RNA, 19 nt, Artificial Sequence
  Description of Artificial Sequence: Synthetic oligonucleotide
gguugcuuccugacucuag

SEQ ID NO: 1290905 - RNA, 19 nt, Artificial Sequence
  Description of Artificial Sequence: Synthetic oligonucleotide
cauggcacagcguccagau

SEQ ID NO: 1290906 - RNA, 19 nt, Artificial Sequence
  Description of Artificial Sequence: Synthetic oligonucleotide
agggugguguacccaugau

SEQ ID NO: 1290907 - RNA, 19 nt, Artificial Sequence
  Description of Artificial Sequence: Synthetic oligonucleotide
ccucauucgccuuguguuc

SEQ ID NO: 1290908 - RNA, 19 nt, Artificial Sequence
  Description of Artificial Sequence: Synthetic oligonucleotide
guuucccaccucggagccg

SEQ ID NO: 1290909 - RNA, 19 nt, Artificial Sequence
  Description of Artificial Sequence: Synthetic oligonucleotide
guauuucggauggcaaucu

SEQ ID NO: 1290910 - RNA, 19 nt, Artificial Sequence
  Description of Artificial Sequence: Synthetic oligonucleotide
caaagcacaaggggaaggu

SEQ ID NO: 1290911 - RNA, 19 nt, Artificial Sequence
  Description of Artificial Sequence: Synthetic oligonucleotide
ggaggcccuaccccauucc

SEQ ID NO: 1290912 - RNA, 19 nt, Artificial Sequence
  Description of Artificial Sequence: Synthetic oligonucleotide
ccuccgaggcuuucaguag

SEQ ID NO: 1290913 - RNA, 19 nt, Artificial Sequence
  Description of Artificial Sequence: Synthetic oligonucleotide
gugcguugggccgaaggga

SEQ ID NO: 1290914 - RNA, 19 nt, Artificial Sequence
  Description of Artificial Sequence: Synthetic oligonucleotide
ucucagcaucggucagugu

SEQ ID NO: 1290915 - RNA, 19 nt, Artificial Sequence
  Description of Artificial Sequence: Synthetic oligonucleotide
agcuggcacgaaggucagc

SEQ ID NO: 1290916 - RNA, 19 nt, Artificial Sequence
  Description of Artificial Sequence: Synthetic oligonucleotide
gagcuggaaagaauccggu

SEQ ID NO: 1290917 - RNA, 19 nt, Artificial Sequence
  Description of Artificial Sequence: Synthetic oligonucleotide
gaaacggggcagccggggu

SEQ ID NO: 1290918 - RNA, 19 nt, Artificial Sequence
  Description of Artificial Sequence: Synthetic oligonucleotide
guguuccggucuugauccc

SEQ ID NO: 1290919 - RNA, 19 nt, Artificial Sequence
  Description of Artificial Sequence: Synthetic oligonucleotide
cacgaaggucagcggguuc

SEQ ID NO: 1290920 - RNA, 19 nt, Artificial Sequence
  Description of Artificial Sequence: Synthetic oligonucleotide
ccuguauuucggauggcaa

SEQ ID NO: 1290921 - RNA, 19 nt, Artificial Sequence
  Description of Artificial Sequence: Synthetic oligonucleotide
ucgccuccagagugaggga

SEQ ID NO: 1290922 - RNA, 19 nt, Artificial Sequence
  Description of Artificial Sequence: Synthetic oligonucleotide
ggagguaguuucccaccuc

SEQ ID NO: 1290923 - RNA, 19 nt, Artificial Sequence
  Description of Artificial Sequence: Synthetic oligonucleotide
cccaaacgagguugcuucc

SEQ ID NO: 1290924 - RNA, 19 nt, Artificial Sequence
  Description of Artificial Sequence: Synthetic oligonucleotide
cucauggaucacagccgga

SEQ ID NO: 1290925 - RNA, 19 nt, Artificial Sequence
  Description of Artificial Sequence: Synthetic oligonucleotide
uccggugggcuggggcggg

SEQ ID NO: 1290926 - RNA, 19 nt, Artificial Sequence
  Description of Artificial Sequence: Synthetic oligonucleotide
ucacgcugguggcgagggu

SEQ ID NO: 1290927 - RNA, 19 nt, Artificial Sequence
  Description of Artificial Sequence: Synthetic oligonucleotide
ggcuuagcaaauggaaugu

SEQ ID NO: 1290928 - RNA, 19 nt, Artificial Sequence
  Description of Artificial Sequence: Synthetic oligonucleotide
cuggggccguguuggcgag

SEQ ID NO: 1290929 - RNA, 19 nt, Artificial Sequence
  Description of Artificial Sequence: Synthetic oligonucleotide
cagagaaccucggaacaua

SEQ ID NO: 1290930 - RNA, 19 nt, Artificial Sequence
  Description of Artificial Sequence: Synthetic oligonucleotide
ggcuuucaguagcgucacg

SEQ ID NO: 1290931 - RNA, 19 nt, Artificial Sequence
  Description of Artificial Sequence: Synthetic oligonucleotide
gucccgacccaugcgguuc

SEQ ID NO: 1290932 - RNA, 19 nt, Artificial Sequence
  Description of Artificial Sequence: Synthetic oligonucleotide
gugaugcauucucauggau

SEQ ID NO: 1290933 - RNA, 19 nt, Artificial Sequence
  Description of Artificial Sequence: Synthetic oligonucleotide
cguugggccgaagggaacg

SEQ ID NO: 1290934 - RNA, 19 nt, Artificial Sequence
  Description of Artificial Sequence: Synthetic oligonucleotide
ucccgcagcuucuguccau

SEQ ID NO: 1290935 - RNA, 19 nt, Artificial Sequence
  Description of Artificial Sequence: Synthetic oligonucleotide
gugggcacccacuggcugu

SEQ ID NO: 1290936 - RNA, 19 nt, Artificial Sequence
  Description of Artificial Sequence: Synthetic oligonucleotide
agucgccuccagagugagg

SEQ ID NO: 1290937 - RNA, 19 nt, Artificial Sequence
  Description of Artificial Sequence: Synthetic oligonucleotide
augacacgcuggucagauu

SEQ ID NO: 1290938 - RNA, 19 nt, Artificial Sequence
  Description of Artificial Sequence: Synthetic oligonucleotide
uucuaccuccgaggcuuuc

SEQ ID NO: 1290939 - RNA, 19 nt, Artificial Sequence
  Description of Artificial Sequence: Synthetic oligonucleotide
gguguacccaugauccuua

SEQ ID NO: 1290940 - RNA, 19 nt, Artificial Sequence
  Description of Artificial Sequence: Synthetic oligonucleotide
ggacucaaucugcugucua

SEQ ID NO: 1290941 - RNA, 19 nt, Artificial Sequence
  Description of Artificial Sequence: Synthetic oligonucleotide
gcgguuccuguugauggug

SEQ ID NO: 1290942 - RNA, 19 nt, Artificial Sequence
  Description of Artificial Sequence: Synthetic oligonucleotide
gugguguacccaugauccu

SEQ ID NO: 1290943 - RNA, 19 nt, Artificial Sequence
  Description of Artificial Sequence: Synthetic oligonucleotide
ccucggaacauacggaggu

SEQ ID NO: 1290944 - RNA, 19 nt, Artificial Sequence
  Description of Artificial Sequence: Synthetic oligonucleotide
ggcacccacuggcuguuuc

SEQ ID NO: 1290945 - RNA, 19 nt, Artificial Sequence
  Description of Artificial Sequence: Synthetic oligonucleotide
cccaugauccuuaguguua

SEQ ID NO: 1290946 - RNA, 19 nt, Artificial Sequence
  Description of Artificial Sequence: Synthetic oligonucleotide
cuagccccgucuggggcuc

SEQ ID NO: 1290947 - RNA, 19 nt, Artificial Sequence
  Description of Artificial Sequence: Synthetic oligonucleotide
ggcugugaugcauucucau

SEQ ID NO: 1290948 - RNA, 19 nt, Artificial Sequence
  Description of Artificial Sequence: Synthetic oligonucleotide
augugacgaugcaacuauu

SEQ ID NO: 1290949 - RNA, 19 nt, Artificial Sequence
  Description of Artificial Sequence: Synthetic oligonucleotide
ugggcacccacuggcuguu

SEQ ID NO: 1290950 - RNA, 19 nt, Artificial Sequence
  Description of Artificial Sequence: Synthetic oligonucleotide
gacccaugcgguuccuguu

SEQ ID NO: 1290951 - RNA, 19 nt, Artificial Sequence
  Description of Artificial Sequence: Synthetic oligonucleotide
acgccucauucgccuugug

SEQ ID NO: 1290952 - RNA, 19 nt, Artificial Sequence
  Description of Artificial Sequence: Synthetic oligonucleotide
ggaacauacggagguaguu

SEQ ID NO: 1290953 - RNA, 19 nt, Artificial Sequence
  Description of Artificial Sequence: Synthetic oligonucleotide
uguuggcgagacgccucau

SEQ ID NO: 1290954 - RNA, 19 nt, Artificial Sequence
  Description of Artificial Sequence: Synthetic oligonucleotide
cccauucaaacugguccac

SEQ ID NO: 1290955 - RNA, 19 nt, Artificial Sequence
  Description of Artificial Sequence: Synthetic oligonucleotide
ggggcuuagcaaauggaau

SEQ ID NO: 1290956 - RNA, 19 nt, Artificial Sequence
  Description of Artificial Sequence: Synthetic oligonucleotide
gccggggucgagcuggaaa

SEQ ID NO: 1290957 - RNA, 19 nt, Artificial Sequence
  Description of Artificial Sequence: Synthetic oligonucleotide
guuggcgagacgccucauu

SEQ ID NO: 1290958 - RNA, 19 nt, Artificial Sequence
  Description of Artificial Sequence: Synthetic oligonucleotide
cguguuggcgagacgccuc

SEQ ID NO: 1290959 - RNA, 19 nt, Artificial Sequence
  Description of Artificial Sequence: Synthetic oligonucleotide
ccaaccggaugggaaccag

SEQ ID NO: 1290960 - RNA, 19 nt, Artificial Sequence
  Description of Artificial Sequence: Synthetic oligonucleotide
ggggcagccggggucgagc

SEQ ID NO: 1290961 - RNA, 19 nt, Artificial Sequence
  Description of Artificial Sequence: Synthetic oligonucleotide
uguuccccacauggauauu

SEQ ID NO: 1290962 - RNA, 19 nt, Artificial Sequence
  Description of Artificial Sequence: Synthetic oligonucleotide
cuccguggaaguugagcau

SEQ ID NO: 1290963 - RNA, 19 nt, Artificial Sequence
  Description of Artificial Sequence: Synthetic oligonucleotide
gacgccucauucgccuugu

SEQ ID NO: 1290964 - RNA, 19 nt, Artificial Sequence
  Description of Artificial Sequence: Synthetic oligonucleotide
cuccgucguccuccagcug

SEQ ID NO: 1290965 - RNA, 19 nt, Artificial Sequence
  Description of Artificial Sequence: Synthetic oligonucleotide
cucggaacauacggaggua

SEQ ID NO: 1290966 - RNA, 19 nt, Artificial Sequence
  Description of Artificial Sequence: Synthetic oligonucleotide
gccguguuggcgagacgcc

SEQ ID NO: 1290967 - RNA, 19 nt, Artificial Sequence
  Description of Artificial Sequence: Synthetic oligonucleotide
gcgagacgccucauucgcc

SEQ ID NO: 1290968 - RNA, 19 nt, Artificial Sequence
  Description of Artificial Sequence: Synthetic oligonucleotide
ccaugugacgaugcaacua

SEQ ID NO: 1290969 - RNA, 19 nt, Artificial Sequence
  Description of Artificial Sequence: Synthetic oligonucleotide
gguacccaggaggcccuac

SEQ ID NO: 1290970 - RNA, 19 nt, Artificial Sequence
  Description of Artificial Sequence: Synthetic oligonucleotide
ggcuagucgccuccagagu

SEQ ID NO: 1290971 - RNA, 19 nt, Artificial Sequence
  Description of Artificial Sequence: Synthetic oligonucleotide
cauggauauucagcuugau

SEQ ID NO: 1290972 - RNA, 19 nt, Artificial Sequence
  Description of Artificial Sequence: Synthetic oligonucleotide
augcuccguggaaguugag

SEQ ID NO: 1290973 - RNA, 19 nt, Artificial Sequence
  Description of Artificial Sequence: Synthetic oligonucleotide
gaggugcguugggccgaag

SEQ ID NO: 1290974 - RNA, 19 nt, Artificial Sequence
  Description of Artificial Sequence: Synthetic oligonucleotide
gggccguguuggcgagacg

SEQ ID NO: 1290975 - RNA, 19 nt, Artificial Sequence
  Description of Artificial Sequence: Synthetic oligonucleotide
gcgagggugguguacccau

SEQ ID NO: 1290976 - RNA, 19 nt, Artificial Sequence
  Description of Artificial Sequence: Synthetic oligonucleotide
uggggccguguuggcgaga

SEQ ID NO: 1290977 - RNA, 19 nt, Artificial Sequence
  Description of Artificial Sequence: Synthetic oligonucleotide
ccccggaugcuguaagcaa

SEQ ID NO: 1290978 - RNA, 19 nt, Artificial Sequence
  Description of Artificial Sequence: Synthetic oligonucleotide
caguagcgucacgcuggug

SEQ ID NO: 1290979 - RNA, 19 nt, Artificial Sequence
  Description of Artificial Sequence: Synthetic oligonucleotide
ggcgagggugguguaccca

SEQ ID NO: 1290980 - RNA, 19 nt, Artificial Sequence
  Description of Artificial Sequence: Synthetic oligonucleotide
guggaacauggcacagcgu

SEQ ID NO: 1290981 - RNA, 19 nt, Artificial Sequence
  Description of Artificial Sequence: Synthetic oligonucleotide
gcacagcguccagauggug

SEQ ID NO: 1290982 - RNA, 19 nt, Artificial Sequence
  Description of Artificial Sequence: Synthetic oligonucleotide
gccgaucauguagaacucu

SEQ ID NO: 1290983 - RNA, 19 nt, Artificial Sequence
  Description of Artificial Sequence: Synthetic oligonucleotide
gcgucacgcugguggcgag

SEQ ID NO: 1290984 - RNA, 19 nt, Artificial Sequence
  Description of Artificial Sequence: Synthetic oligonucleotide
caguggcuagucgccucca

SEQ ID NO: 1290985 - RNA, 19 nt, Artificial Sequence
  Description of Artificial Sequence: Synthetic oligonucleotide
gcggggccgaggugcguug

SEQ ID NO: 1290986 - RNA, 19 nt, Artificial Sequence
  Description of Artificial Sequence: Synthetic oligonucleotide
caacccaaacgagguugcu

SEQ ID NO: 1290987 - RNA, 19 nt, Artificial Sequence
  Description of Artificial Sequence: Synthetic oligonucleotide
gccuuguguuccggucuug

SEQ ID NO: 1290988 - RNA, 19 nt, Artificial Sequence
  Description of Artificial Sequence: Synthetic oligonucleotide
cccgaaggucuugcucagc

SEQ ID NO: 1290989 - RNA, 19 nt, Artificial Sequence
  Description of Artificial Sequence: Synthetic oligonucleotide
ccuguugauggugguggaa

SEQ ID NO: 1290990 - RNA, 19 nt, Artificial Sequence
  Description of Artificial Sequence: Synthetic oligonucleotide
ccccacccaaacccagcuc

SEQ ID NO: 1290991 - RNA, 19 nt, Artificial Sequence
  Description of Artificial Sequence: Synthetic oligonucleotide
gcguugggccgaagggaac

SEQ ID NO: 1290992 - RNA, 19 nt, Artificial Sequence
  Description of Artificial Sequence: Synthetic oligonucleotide
ggcacagcguccagauggu

SEQ ID NO: 1290993 - RNA, 19 nt, Artificial Sequence
  Description of Artificial Sequence: Synthetic oligonucleotide
ggcagggugggcacccacu

SEQ ID NO: 1290994 - RNA, 19 nt, Artificial Sequence
  Description of Artificial Sequence: Synthetic oligonucleotide
gccuccagagugagggaua

SEQ ID NO: 1290995 - RNA, 19 nt, Artificial Sequence
  Description of Artificial Sequence: Synthetic oligonucleotide
ccaaacgagguugcuuccu

SEQ ID NO: 1290996 - RNA, 19 nt, Artificial Sequence
  Description of Artificial Sequence: Synthetic oligonucleotide
cgucuggggcuccuauaca

SEQ ID NO: 1290997 - RNA, 19 nt, Artificial Sequence
  Description of Artificial Sequence: Synthetic oligonucleotide
cgacccaugcgguuccugu

SEQ ID NO: 1290998 - RNA, 19 nt, Artificial Sequence
  Description of Artificial Sequence: Synthetic oligonucleotide
ggaaggcaaggcaggcuuu

SEQ ID NO: 1290999 - RNA, 19 nt, Artificial Sequence
  Description of Artificial Sequence: Synthetic oligonucleotide
ccgacccaugcgguuccug

SEQ ID NO: 1291000 - RNA, 19 nt, Artificial Sequence
  Description of Artificial Sequence: Synthetic oligonucleotide
ccucggagccgaucaugua

SEQ ID NO: 1291001 - RNA, 19 nt, Artificial Sequence
  Description of Artificial Sequence: Synthetic oligonucleotide
cccgucuggggcuccuaua

SEQ ID NO: 1291002 - RNA, 19 nt, Artificial Sequence
  Description of Artificial Sequence: Synthetic oligonucleotide
agccggggucgagcuggaa

SEQ ID NO: 1291003 - RNA, 19 nt, Artificial Sequence
  Description of Artificial Sequence: Synthetic oligonucleotide
ccgaggugcguugggccga

SEQ ID NO: 1291004 - RNA, 19 nt, Artificial Sequence
  Description of Artificial Sequence: Synthetic oligonucleotide
cgccucauucgccuugugu

SEQ ID NO: 1291005 - RNA, 19 nt, Artificial Sequence
  Description of Artificial Sequence: Synthetic oligonucleotide
cggagccgaucauguagaa

SEQ ID NO: 1291006 - RNA, 19 nt, Artificial Sequence
  Description of Artificial Sequence: Synthetic oligonucleotide
ccguguuggcgagacgccu

SEQ ID NO: 1291007 - RNA, 19 nt, Artificial Sequence
  Description of Artificial Sequence: Synthetic oligonucleotide
ccacaguggcuagucgccu

SEQ ID NO: 1291008 - RNA, 19 nt, Artificial Sequence
  Description of Artificial Sequence: Synthetic oligonucleotide
ccccgucuggggcuccuau

SEQ ID NO: 1291009 - RNA, 19 nt, Artificial Sequence
  Description of Artificial Sequence: Synthetic oligonucleotide
cgccuuguguuccggucuu

SEQ ID NO: 1291010 - RNA, 19 nt, Artificial Sequence
  Description of Artificial Sequence: Synthetic oligonucleotide
cgaggugcguugggccgaa

SEQ ID NO: 1291011 - RNA, 19 nt, Artificial Sequence
  Description of Artificial Sequence: Synthetic oligonucleotide
gccccgucuggggcuccua

SEQ ID NO: 1291012 - RNA, 19 nt, Artificial Sequence
  Description of Artificial Sequence: Synthetic oligonucleotide
gggcacccacuggcuguuu

SEQ ID NO: 1291013 - RNA, 19 nt, Artificial Sequence
  Description of Artificial Sequence: Synthetic oligonucleotide
acaauauugagcuacaacc

SEQ ID NO: 1291014 - RNA, 19 nt, Artificial Sequence
  Description of Artificial Sequence: Synthetic oligonucleotide
uuagauuuugcauaguggg

SEQ ID NO: 1291015 - RNA, 19 nt, Artificial Sequence
  Description of Artificial Sequence: Synthetic oligonucleotide
uuuaaugugaucaauuccu

SEQ ID NO: 1291016 - RNA, 19 nt, Artificial Sequence
  Description of Artificial Sequence: Synthetic oligonucleotide
uuaaaguaaaauguggacg

SEQ ID NO: 1291017 - RNA, 19 nt, Artificial Sequence
  Description of Artificial Sequence: Synthetic oligonucleotide
auuccuaugacuuuuccac

SEQ ID NO: 1291018 - RNA, 19 nt, Artificial Sequence
  Description of Artificial Sequence: Synthetic oligonucleotide
aauguggacguguuaaaac

SEQ ID NO: 1291019 - RNA, 19 nt, Artificial Sequence
  Description of Artificial Sequence: Synthetic oligonucleotide
gauuguaucuacaacaugc

SEQ ID NO: 1291020 - RNA, 19 nt, Artificial Sequence
  Description of Artificial Sequence: Synthetic oligonucleotide
aauauugagcuacaaccuc

SEQ ID NO: 1291021 - RNA, 19 nt, Artificial Sequence
  Description of Artificial Sequence: Synthetic oligonucleotide
acaacauacaaaguuauac

SEQ ID NO: 1291022 - RNA, 19 nt, Artificial Sequence
  Description of Artificial Sequence: Synthetic oligonucleotide
auaucaaucuuccaccagg

SEQ ID NO: 1291023 - RNA, 19 nt, Artificial Sequence
  Description of Artificial Sequence: Synthetic oligonucleotide
uuaucugaugcacaaaaga

SEQ ID NO: 1291024 - RNA, 19 nt, Artificial Sequence
  Description of Artificial Sequence: Synthetic oligonucleotide
uugaauguguggaagaaga

SEQ ID NO: 1291025 - RNA, 19 nt, Artificial Sequence
  Description of Artificial Sequence: Synthetic oligonucleotide
uuuaaaguaaaauguggac

SEQ ID NO: 1291026 - RNA, 19 nt, Artificial Sequence
  Description of Artificial Sequence: Synthetic oligonucleotide
uuaaagagaggaaaacuac

SEQ ID NO: 1291027 - RNA, 19 nt, Artificial Sequence
  Description of Artificial Sequence: Synthetic oligonucleotide
guuaaaggcacguauauca

SEQ ID NO: 1291028 - RNA, 19 nt, Artificial Sequence
  Description of Artificial Sequence: Synthetic oligonucleotide
uguggauuagcuccgagug

SEQ ID NO: 1291029 - RNA, 19 nt, Artificial Sequence
  Description of Artificial Sequence: Synthetic oligonucleotide
ucuaacagacaucagcuac

SEQ ID NO: 1291030 - RNA, 19 nt, Artificial Sequence
  Description of Artificial Sequence: Synthetic oligonucleotide
acguguuaaaacaacauac

SEQ ID NO: 1291031 - RNA, 19 nt, Artificial Sequence
  Description of Artificial Sequence: Synthetic oligonucleotide
aagagaggaaaacuacauc

SEQ ID NO: 1291032 - RNA, 19 nt, Artificial Sequence
  Description of Artificial Sequence: Synthetic oligonucleotide
uggaacagaauuaaguguc

SEQ ID NO: 1291033 - RNA, 19 nt, Artificial Sequence
  Description of Artificial Sequence: Synthetic oligonucleotide
gagaccaccucccacacgg

SEQ ID NO: 1291034 - RNA, 19 nt, Artificial Sequence
  Description of Artificial Sequence: Synthetic oligonucleotide
aaugguauagacuggucaa

SEQ ID NO: 1291035 - RNA, 19 nt, Artificial Sequence
  Description of Artificial Sequence: Synthetic oligonucleotide
ugaucaauuccuaugacuu

SEQ ID NO: 1291036 - RNA, 19 nt, Artificial Sequence
  Description of Artificial Sequence: Synthetic oligonucleotide
aacagcugaguguuuacag

SEQ ID NO: 1291037 - RNA, 19 nt, Artificial Sequence
  Description of Artificial Sequence: Synthetic oligonucleotide
uguuaucugaugcacaaaa

SEQ ID NO: 1291038 - RNA, 19 nt, Artificial Sequence
  Description of Artificial Sequence: Synthetic oligonucleotide
uggagaauccauguaaggg

SEQ ID NO: 1291039 - RNA, 19 nt, Artificial Sequence
  Description of Artificial Sequence: Synthetic oligonucleotide
uaucugaugcacaaaagaa

SEQ ID NO: 1291040 - RNA, 19 nt, Artificial Sequence
  Description of Artificial Sequence: Synthetic oligonucleotide
gaaguucuagugcauacgc

SEQ ID NO: 1291041 - RNA, 19 nt, Artificial Sequence
  Description of Artificial Sequence: Synthetic oligonucleotide
aaucugaacagcugagugu

SEQ ID NO: 1291042 - RNA, 19 nt, Artificial Sequence
  Description of Artificial Sequence: Synthetic oligonucleotide
uguggagaauccauguaag

SEQ ID NO: 1291043 - RNA, 19 nt, Artificial Sequence
  Description of Artificial Sequence: Synthetic oligonucleotide
uaacuggucuauuagugcc

SEQ ID NO: 1291044 - RNA, 19 nt, Artificial Sequence
  Description of Artificial Sequence: Synthetic oligonucleotide
aaaacaugcagugaggauu

SEQ ID NO: 1291045 - RNA, 19 nt, Artificial Sequence
  Description of Artificial Sequence: Synthetic oligonucleotide
gaguguuaggugcagauac

SEQ ID NO: 1291046 - RNA, 19 nt, Artificial Sequence
  Description of Artificial Sequence: Synthetic oligonucleotide
ucuauuagugccuggggca

SEQ ID NO: 1291047 - RNA, 19 nt, Artificial Sequence
  Description of Artificial Sequence: Synthetic oligonucleotide
ugacauuauuuauugaguc

SEQ ID NO: 1291048 - RNA, 19 nt, Artificial Sequence
  Description of Artificial Sequence: Synthetic oligonucleotide
auauugagcuacaaccucc

SEQ ID NO: 1291049 - RNA, 19 nt, Artificial Sequence
  Description of Artificial Sequence: Synthetic oligonucleotide
agaacccuuucuuuuaauc

SEQ ID NO: 1291050 - RNA, 19 nt, Artificial Sequence
  Description of Artificial Sequence: Synthetic oligonucleotide
uuuaucuguuaaaggcacg

SEQ ID NO: 1291051 - RNA, 19 nt, Artificial Sequence
  Description of Artificial Sequence: Synthetic oligonucleotide
aguaucagcagcaaacuag

SEQ ID NO: 1291052 - RNA, 19 nt, Artificial Sequence
  Description of Artificial Sequence: Synthetic oligonucleotide
acagaauuaagugucaaga

SEQ ID NO: 1291053 - RNA, 19 nt, Artificial Sequence
  Description of Artificial Sequence: Synthetic oligonucleotide
guuagauuuugcauagugg

SEQ ID NO: 1291054 - RNA, 19 nt, Artificial Sequence
  Description of Artificial Sequence: Synthetic oligonucleotide
agauuuugcauagugggag

SEQ ID NO: 1291055 - RNA, 19 nt, Artificial Sequence
  Description of Artificial Sequence: Synthetic oligonucleotide
uuaucauacugcuccaaca

SEQ ID NO: 1291056 - RNA, 19 nt, Artificial Sequence
  Description of Artificial Sequence: Synthetic oligonucleotide
uacaucgagggcuuuagca

SEQ ID NO: 1291057 - RNA, 19 nt, Artificial Sequence
  Description of Artificial Sequence: Synthetic oligonucleotide
uucuagugcauacgcaugc

SEQ ID NO: 1291058 - RNA, 19 nt, Artificial Sequence
  Description of Artificial Sequence: Synthetic oligonucleotide
aaccagucguacucgcccc

SEQ ID NO: 1291059 - RNA, 19 nt, Artificial Sequence
  Description of Artificial Sequence: Synthetic oligonucleotide
cuaacagacaucagcuacc

SEQ ID NO: 1291060 - RNA, 19 nt, Artificial Sequence
  Description of Artificial Sequence: Synthetic oligonucleotide
gacauuauuuauugaguca

SEQ ID NO: 1291061 - RNA, 19 nt, Artificial Sequence
  Description of Artificial Sequence: Synthetic oligonucleotide
auuagcuccgaguggcugg

SEQ ID NO: 1291062 - RNA, 19 nt, Artificial Sequence
  Description of Artificial Sequence: Synthetic oligonucleotide
ucuacaacaugcuauccua

SEQ ID NO: 1291063 - RNA, 19 nt, Artificial Sequence
  Description of Artificial Sequence: Synthetic oligonucleotide
guguuuacagcacaccacc

SEQ ID NO: 1291064 - RNA, 19 nt, Artificial Sequence
  Description of Artificial Sequence: Synthetic oligonucleotide
aggguuagauuuugcauag

SEQ ID NO: 1291065 - RNA, 19 nt, Artificial Sequence
  Description of Artificial Sequence: Synthetic oligonucleotide
ugagcuacaaccuccuauc

SEQ ID NO: 1291066 - RNA, 19 nt, Artificial Sequence
  Description of Artificial Sequence: Synthetic oligonucleotide
uuaaaggcacguauaucac

SEQ ID NO: 1291067 - RNA, 19 nt, Artificial Sequence
  Description of Artificial Sequence: Synthetic oligonucleotide
uaaaggcacguauaucacc

SEQ ID NO: 1291068 - RNA, 19 nt, Artificial Sequence
  Description of Artificial Sequence: Synthetic oligonucleotide
uaaggguuagauuuugcau

SEQ ID NO: 1291069 - RNA, 19 nt, Artificial Sequence
  Description of Artificial Sequence: Synthetic oligonucleotide
auguggacguguuaaaaca

SEQ ID NO: 1291070 - RNA, 19 nt, Artificial Sequence
  Description of Artificial Sequence: Synthetic oligonucleotide
aaagagaggaaaacuacau

SEQ ID NO: 1291071 - RNA, 19 nt, Artificial Sequence
  Description of Artificial Sequence: Synthetic oligonucleotide
uccuacaugaauggcauca

SEQ ID NO: 1291072 - RNA, 19 nt, Artificial Sequence
  Description of Artificial Sequence: Synthetic oligonucleotide
uagauuuugcauaguggga

SEQ ID NO: 1291073 - RNA, 19 nt, Artificial Sequence
  Description of Artificial Sequence: Synthetic oligonucleotide
ucuuccaccaggcuuuaac

SEQ ID NO: 1291074 - RNA, 19 nt, Artificial Sequence
  Description of Artificial Sequence: Synthetic oligonucleotide
uggacguguuaaaacaaca

SEQ ID NO: 1291075 - RNA, 19 nt, Artificial Sequence
  Description of Artificial Sequence: Synthetic oligonucleotide
uagugcauacgcaugcaug

SEQ ID NO: 1291076 - RNA, 19 nt, Artificial Sequence
  Description of Artificial Sequence: Synthetic oligonucleotide
uuacacagaguguuaggug

SEQ ID NO: 1291077 - RNA, 19 nt, Artificial Sequence
  Description of Artificial Sequence: Synthetic oligonucleotide
auccgugcaaaacaugcag

SEQ ID NO: 1291078 - RNA, 19 nt, Artificial Sequence
  Description of Artificial Sequence: Synthetic oligonucleotide
caugcuauccuaugacacc

SEQ ID NO: 1291079 - RNA, 19 nt, Artificial Sequence
  Description of Artificial Sequence: Synthetic oligonucleotide
uaaacuugugaaugguggu

SEQ ID NO: 1291080 - RNA, 19 nt, Artificial Sequence
  Description of Artificial Sequence: Synthetic oligonucleotide
acaacaugcuauccuauga

SEQ ID NO: 1291081 - RNA, 19 nt, Artificial Sequence
  Description of Artificial Sequence: Synthetic oligonucleotide
gauuuugcauagugggagc

SEQ ID NO: 1291082 - RNA, 19 nt, Artificial Sequence
  Description of Artificial Sequence: Synthetic oligonucleotide
aguguuuacagcacaccac

SEQ ID NO: 1291083 - RNA, 19 nt, Artificial Sequence
  Description of Artificial Sequence: Synthetic oligonucleotide
gcugauuguaucuacaaca

SEQ ID NO: 1291084 - RNA, 19 nt, Artificial Sequence
  Description of Artificial Sequence: Synthetic oligonucleotide
uugccguuacaguucaucc

SEQ ID NO: 1291085 - RNA, 19 nt, Artificial Sequence
  Description of Artificial Sequence: Synthetic oligonucleotide
agauccuacaucgagggcu

SEQ ID NO: 1291086 - RNA, 19 nt, Artificial Sequence
  Description of Artificial Sequence: Synthetic oligonucleotide
uuaucuguuaaaggcacgu

SEQ ID NO: 1291087 - RNA, 19 nt, Artificial Sequence
  Description of Artificial Sequence: Synthetic oligonucleotide
uugaauuaggaaguccuac

SEQ ID NO: 1291088 - RNA, 19 nt, Artificial Sequence
  Description of Artificial Sequence: Synthetic oligonucleotide
uacaacaugcuauccuaug

SEQ ID NO: 1291089 - RNA, 19 nt, Artificial Sequence
  Description of Artificial Sequence: Synthetic oligonucleotide
uggucuauuagugccuggg

SEQ ID NO: 1291090 - RNA, 19 nt, Artificial Sequence
  Description of Artificial Sequence: Synthetic oligonucleotide
gguuagauuuugcauagug

SEQ ID NO: 1291091 - RNA, 19 nt, Artificial Sequence
  Description of Artificial Sequence: Synthetic oligonucleotide
accuucaugcaacugguca

SEQ ID NO: 1291092 - RNA, 19 nt, Artificial Sequence
  Description of Artificial Sequence: Synthetic oligonucleotide
cuuaucauacugcuccaac

SEQ ID NO: 1291093 - RNA, 19 nt, Artificial Sequence
  Description of Artificial Sequence: Synthetic oligonucleotide
guaucuacaacaugcuauc

SEQ ID NO: 1291094 - RNA, 19 nt, Artificial Sequence
  Description of Artificial Sequence: Synthetic oligonucleotide
uugacuguggagaauccau

SEQ ID NO: 1291095 - RNA, 19 nt, Artificial Sequence
  Description of Artificial Sequence: Synthetic oligonucleotide
agcagcugauuguaucuac

SEQ ID NO: 1291096 - RNA, 19 nt, Artificial Sequence
  Description of Artificial Sequence: Synthetic oligonucleotide
cuacuaguucuuuaaugug

SEQ ID NO: 1291097 - RNA, 19 nt, Artificial Sequence
  Description of Artificial Sequence: Synthetic oligonucleotide
ugcauacgcaugcauguga

SEQ ID NO: 1291098 - RNA, 19 nt, Artificial Sequence
  Description of Artificial Sequence: Synthetic oligonucleotide
aaaacaauauugagcuaca

SEQ ID NO: 1291099 - RNA, 19 nt, Artificial Sequence
  Description of Artificial Sequence: Synthetic oligonucleotide
ugaggagcgcugauuguag

SEQ ID NO: 1291100 - RNA, 19 nt, Artificial Sequence
  Description of Artificial Sequence: Synthetic oligonucleotide
auccuaugacaccacauca

SEQ ID NO: 1291101 - RNA, 19 nt, Artificial Sequence
  Description of Artificial Sequence: Synthetic oligonucleotide
cauaaggagcuucuucagc

SEQ ID NO: 1291102 - RNA, 19 nt, Artificial Sequence
  Description of Artificial Sequence: Synthetic oligonucleotide
guaaggguuagauuuugca

SEQ ID NO: 1291103 - RNA, 19 nt, Artificial Sequence
  Description of Artificial Sequence: Synthetic oligonucleotide
ugaggauuccgcuuccaga

SEQ ID NO: 1291104 - RNA, 19 nt, Artificial Sequence
  Description of Artificial Sequence: Synthetic oligonucleotide
aguccuacaaaaccacaca

SEQ ID NO: 1291105 - RNA, 19 nt, Artificial Sequence
  Description of Artificial Sequence: Synthetic oligonucleotide
gcuguugguuuucagaugc

SEQ ID NO: 1291106 - RNA, 19 nt, Artificial Sequence
  Description of Artificial Sequence: Synthetic oligonucleotide
gaauuaggaaguccuacaa

SEQ ID NO: 1291107 - RNA, 19 nt, Artificial Sequence
  Description of Artificial Sequence: Synthetic oligonucleotide
auuuugcauagugggagcg

SEQ ID NO: 1291108 - RNA, 19 nt, Artificial Sequence
  Description of Artificial Sequence: Synthetic oligonucleotide
agaaaaucacuuccaccug

SEQ ID NO: 1291109 - RNA, 19 nt, Artificial Sequence
  Description of Artificial Sequence: Synthetic oligonucleotide
uguggacguguuaaaacaa

SEQ ID NO: 1291110 - RNA, 19 nt, Artificial Sequence
  Description of Artificial Sequence: Synthetic oligonucleotide
guggagaauccauguaagg

SEQ ID NO: 1291111 - RNA, 19 nt, Artificial Sequence
  Description of Artificial Sequence: Synthetic oligonucleotide
cugauaaauuaauauugga

SEQ ID NO: 1291112 - RNA, 19 nt, Artificial Sequence
  Description of Artificial Sequence: Synthetic oligonucleotide
guuuacagcacaccaccug

SEQ ID NO: 1291113 - RNA, 19 nt, Artificial Sequence
  Description of Artificial Sequence: Synthetic oligonucleotide
cuuugaauuaggaaguccu

SEQ ID NO: 1291114 - RNA, 19 nt, Artificial Sequence
  Description of Artificial Sequence: Synthetic oligonucleotide
gaauccauguaaggguuag

SEQ ID NO: 1291115 - RNA, 19 nt, Artificial Sequence
  Description of Artificial Sequence: Synthetic oligonucleotide
uuuugcauagugggagcgg

SEQ ID NO: 1291116 - RNA, 19 nt, Artificial Sequence
  Description of Artificial Sequence: Synthetic oligonucleotide
caucgagggcuuuagcacc

SEQ ID NO: 1291117 - RNA, 19 nt, Artificial Sequence
  Description of Artificial Sequence: Synthetic oligonucleotide
caacaugcuauccuaugac

SEQ ID NO: 1291118 - RNA, 19 nt, Artificial Sequence
  Description of Artificial Sequence: Synthetic oligonucleotide
uccuaugacaccacaucaa

SEQ ID NO: 1291119 - RNA, 19 nt, Artificial Sequence
  Description of Artificial Sequence: Synthetic oligonucleotide
uuguggauuagcuccgagu

SEQ ID NO: 1291120 - RNA, 19 nt, Artificial Sequence
  Description of Artificial Sequence: Synthetic oligonucleotide
ucaucccuugaaugugugg

SEQ ID NO: 1291121 - RNA, 19 nt, Artificial Sequence
  Description of Artificial Sequence: Synthetic oligonucleotide
auacgcaugcaugugagga

SEQ ID NO: 1291122 - RNA, 19 nt, Artificial Sequence
  Description of Artificial Sequence: Synthetic oligonucleotide
ccuaguuuuaaggugacag

SEQ ID NO: 1291123 - RNA, 19 nt, Artificial Sequence
  Description of Artificial Sequence: Synthetic oligonucleotide
ugaauguguggaagaagaa

SEQ ID NO: 1291124 - RNA, 19 nt, Artificial Sequence
  Description of Artificial Sequence: Synthetic oligonucleotide
ugcgccucuuugaauuagg

SEQ ID NO: 1291125 - RNA, 19 nt, Artificial Sequence
  Description of Artificial Sequence: Synthetic oligonucleotide
gaugcuuuaaggacugaga

SEQ ID NO: 1291126 - RNA, 19 nt, Artificial Sequence
  Description of Artificial Sequence: Synthetic oligonucleotide
uacgcaugcaugugaggag

SEQ ID NO: 1291127 - RNA, 19 nt, Artificial Sequence
  Description of Artificial Sequence: Synthetic oligonucleotide
uguuaggugcagauacagu

SEQ ID NO: 1291128 - RNA, 19 nt, Artificial Sequence
  Description of Artificial Sequence: Synthetic oligonucleotide
caaugguauagacugguca

SEQ ID NO: 1291129 - RNA, 19 nt, Artificial Sequence
  Description of Artificial Sequence: Synthetic oligonucleotide
ugccguuacaguucauccc

SEQ ID NO: 1291130 - RNA, 19 nt, Artificial Sequence
  Description of Artificial Sequence: Synthetic oligonucleotide
ugcaaugguauagacuggu

SEQ ID NO: 1291131 - RNA, 19 nt, Artificial Sequence
  Description of Artificial Sequence: Synthetic oligonucleotide
uguuuacagcacaccaccu

SEQ ID NO: 1291132 - RNA, 19 nt, Artificial Sequence
  Description of Artificial Sequence: Synthetic oligonucleotide
uccgugcaaaacaugcagu

SEQ ID NO: 1291133 - RNA, 19 nt, Artificial Sequence
  Description of Artificial Sequence: Synthetic oligonucleotide
uucagcgcggcgacggucc

SEQ ID NO: 1291134 - RNA, 19 nt, Artificial Sequence
  Description of Artificial Sequence: Synthetic oligonucleotide
caucuaacagacaucagcu

SEQ ID NO: 1291135 - RNA, 19 nt, Artificial Sequence
  Description of Artificial Sequence: Synthetic oligonucleotide
uuguaucuacaacaugcua

SEQ ID NO: 1291136 - RNA, 19 nt, Artificial Sequence
  Description of Artificial Sequence: Synthetic oligonucleotide
cuugaauguguggaagaag

SEQ ID NO: 1291137 - RNA, 19 nt, Artificial Sequence
  Description of Artificial Sequence: Synthetic oligonucleotide
ugguguuaucugaugcaca

SEQ ID NO: 1291138 - RNA, 19 nt, Artificial Sequence
  Description of Artificial Sequence: Synthetic oligonucleotide
guggauuagcuccgagugg

SEQ ID NO: 1291139 - RNA, 19 nt, Artificial Sequence
  Description of Artificial Sequence: Synthetic oligonucleotide
uccuacaaaaccacacauu

SEQ ID NO: 1291140 - RNA, 19 nt, Artificial Sequence
  Description of Artificial Sequence: Synthetic oligonucleotide
uuugcauagugggagcggu

SEQ ID NO: 1291141 - RNA, 19 nt, Artificial Sequence
  Description of Artificial Sequence: Synthetic oligonucleotide
ccagauccuacaucgaggg

SEQ ID NO: 1291142 - RNA, 19 nt, Artificial Sequence
  Description of Artificial Sequence: Synthetic oligonucleotide
uaacagacaucagcuacca

SEQ ID NO: 1291143 - RNA, 19 nt, Artificial Sequence
  Description of Artificial Sequence: Synthetic oligonucleotide
uugugaauggugguguuau

SEQ ID NO: 1291144 - RNA, 19 nt, Artificial Sequence
  Description of Artificial Sequence: Synthetic oligonucleotide
uguuaaaggcacguauauc

SEQ ID NO: 1291145 - RNA, 19 nt, Artificial Sequence
  Description of Artificial Sequence: Synthetic oligonucleotide
guguuaggugcagauacag

SEQ ID NO: 1291146 - RNA, 19 nt, Artificial Sequence
  Description of Artificial Sequence: Synthetic oligonucleotide
agcuuacacagaguguuag

SEQ ID NO: 1291147 - RNA, 19 nt, Artificial Sequence
  Description of Artificial Sequence: Synthetic oligonucleotide
uaucuacaacaugcuaucc

SEQ ID NO: 1291148 - RNA, 19 nt, Artificial Sequence
  Description of Artificial Sequence: Synthetic oligonucleotide
ugaacagcugaguguuuac

SEQ ID NO: 1291149 - RNA, 19 nt, Artificial Sequence
  Description of Artificial Sequence: Synthetic oligonucleotide
uuccuaugacuuuuccacu

SEQ ID NO: 1291150 - RNA, 19 nt, Artificial Sequence
  Description of Artificial Sequence: Synthetic oligonucleotide
agcauaucccauucuucca

SEQ ID NO: 1291151 - RNA, 19 nt, Artificial Sequence
  Description of Artificial Sequence: Synthetic oligonucleotide
ggauuuccaggccaucgcg

SEQ ID NO: 1291152 - RNA, 19 nt, Artificial Sequence
  Description of Artificial Sequence: Synthetic oligonucleotide
cauacgcaugcaugugagg

SEQ ID NO: 1291153 - RNA, 19 nt, Artificial Sequence
  Description of Artificial Sequence: Synthetic oligonucleotide
ggauuccgcuuccagaucc

SEQ ID NO: 1291154 - RNA, 19 nt, Artificial Sequence
  Description of Artificial Sequence: Synthetic oligonucleotide
caaccauccgugcaaaaca

SEQ ID NO: 1291155 - RNA, 19 nt, Artificial Sequence
  Description of Artificial Sequence: Synthetic oligonucleotide
cuaccagucuggcucugcg

SEQ ID NO: 1291156 - RNA, 19 nt, Artificial Sequence
  Description of Artificial Sequence: Synthetic oligonucleotide
ugcauagugggagcggucu

SEQ ID NO: 1291157 - RNA, 19 nt, Artificial Sequence
  Description of Artificial Sequence: Synthetic oligonucleotide
uccuaugacuuuuccacuu

SEQ ID NO: 1291158 - RNA, 19 nt, Artificial Sequence
  Description of Artificial Sequence: Synthetic oligonucleotide
uuuccaggccaucgcgaag

SEQ ID NO: 1291159 - RNA, 19 nt, Artificial Sequence
  Description of Artificial Sequence: Synthetic oligonucleotide
caauauugagcuacaaccu

SEQ ID NO: 1291160 - RNA, 19 nt, Artificial Sequence
  Description of Artificial Sequence: Synthetic oligonucleotide
augagcaauccacugcaau

SEQ ID NO: 1291161 - RNA, 19 nt, Artificial Sequence
  Description of Artificial Sequence: Synthetic oligonucleotide
gguagcaucuaacagacau

SEQ ID NO: 1291162 - RNA, 19 nt, Artificial Sequence
  Description of Artificial Sequence: Synthetic oligonucleotide
aggaccgacuggcaauauc

SEQ ID NO: 1291163 - RNA, 19 nt, Artificial Sequence
  Description of Artificial Sequence: Synthetic oligonucleotide
ugagaccaccucccacacg

SEQ ID NO: 1291164 - RNA, 19 nt, Artificial Sequence
  Description of Artificial Sequence: Synthetic oligonucleotide
acaaccagucguacucgcc

SEQ ID NO: 1291165 - RNA, 19 nt, Artificial Sequence
  Description of Artificial Sequence: Synthetic oligonucleotide
augguauagacuggucaag

SEQ ID NO: 1291166 - RNA, 19 nt, Artificial Sequence
  Description of Artificial Sequence: Synthetic oligonucleotide
augcuauccuaugacacca

SEQ ID NO: 1291167 - RNA, 19 nt, Artificial Sequence
  Description of Artificial Sequence: Synthetic oligonucleotide
aucugaacagcugaguguu

SEQ ID NO: 1291168 - RNA, 19 nt, Artificial Sequence
  Description of Artificial Sequence: Synthetic oligonucleotide
gauuguagcuuggaaaccu

SEQ ID NO: 1291169 - RNA, 19 nt, Artificial Sequence
  Description of Artificial Sequence: Synthetic oligonucleotide
caauuuccccaagagugag

SEQ ID NO: 1291170 - RNA, 19 nt, Artificial Sequence
  Description of Artificial Sequence: Synthetic oligonucleotide
aaguucuagugcauacgca

SEQ ID NO: 1291171 - RNA, 19 nt, Artificial Sequence
  Description of Artificial Sequence: Synthetic oligonucleotide
ucccacacggucaccgccc

SEQ ID NO: 1291172 - RNA, 19 nt, Artificial Sequence
  Description of Artificial Sequence: Synthetic oligonucleotide
ucgccccgaggacagaagc

SEQ ID NO: 1291173 - RNA, 19 nt, Artificial Sequence
  Description of Artificial Sequence: Synthetic oligonucleotide
gagcgcugauuguagcuug

SEQ ID NO: 1291174 - RNA, 19 nt, Artificial Sequence
  Description of Artificial Sequence: Synthetic oligonucleotide
gccaucgcgaagcacaccc

SEQ ID NO: 1291175 - RNA, 19 nt, Artificial Sequence
  Description of Artificial Sequence: Synthetic oligonucleotide
ucacccacaaccagucgua

SEQ ID NO: 1291176 - RNA, 19 nt, Artificial Sequence
  Description of Artificial Sequence: Synthetic oligonucleotide
ggcgucuuaaguuucagua

SEQ ID NO: 1291177 - RNA, 19 nt, Artificial Sequence
  Description of Artificial Sequence: Synthetic oligonucleotide
agcuccuacaugaauggca

SEQ ID NO: 1291178 - RNA, 19 nt, Artificial Sequence
  Description of Artificial Sequence: Synthetic oligonucleotide
cuuuaacuggucuauuagu

SEQ ID NO: 1291179 - RNA, 19 nt, Artificial Sequence
  Description of Artificial Sequence: Synthetic oligonucleotide
aggagcgcugauuguagcu

SEQ ID NO: 1291180 - RNA, 19 nt, Artificial Sequence
  Description of Artificial Sequence: Synthetic oligonucleotide
ucuagugcauacgcaugca

SEQ ID NO: 1291181 - RNA, 19 nt, Artificial Sequence
  Description of Artificial Sequence: Synthetic oligonucleotide
caucccuugaaugugugga

SEQ ID NO: 1291182 - RNA, 19 nt, Artificial Sequence
  Description of Artificial Sequence: Synthetic oligonucleotide
aacuggucuauuagugccu

SEQ ID NO: 1291183 - RNA, 19 nt, Artificial Sequence
  Description of Artificial Sequence: Synthetic oligonucleotide
auguugccguuacaguuca

SEQ ID NO: 1291184 - RNA, 19 nt, Artificial Sequence
  Description of Artificial Sequence: Synthetic oligonucleotide
accuauugacuguggagaa

SEQ ID NO: 1291185 - RNA, 19 nt, Artificial Sequence
  Description of Artificial Sequence: Synthetic oligonucleotide
auggggucguccuuucuga

SEQ ID NO: 1291186 - RNA, 19 nt, Artificial Sequence
  Description of Artificial Sequence: Synthetic oligonucleotide
auguccaaucugaacagcu

SEQ ID NO: 1291187 - RNA, 19 nt, Artificial Sequence
  Description of Artificial Sequence: Synthetic oligonucleotide
ggagaauccauguaagggu

SEQ ID NO: 1291188 - RNA, 19 nt, Artificial Sequence
  Description of Artificial Sequence: Synthetic oligonucleotide
gacuagcaacagcuuacac

SEQ ID NO: 1291189 - RNA, 19 nt, Artificial Sequence
  Description of Artificial Sequence: Synthetic oligonucleotide
cacaaccagucguacucgc

SEQ ID NO: 1291190 - RNA, 19 nt, Artificial Sequence
  Description of Artificial Sequence: Synthetic oligonucleotide
gaggagcgcugauuguagc

SEQ ID NO: 1291191 - RNA, 19 nt, Artificial Sequence
  Description of Artificial Sequence: Synthetic oligonucleotide
gugguguuaucugaugcac

SEQ ID NO: 1291192 - RNA, 19 nt, Artificial Sequence
  Description of Artificial Sequence: Synthetic oligonucleotide
aaccauccgugcaaaacau

SEQ ID NO: 1291193 - RNA, 19 nt, Artificial Sequence
  Description of Artificial Sequence: Synthetic oligonucleotide
uagugggagcggucugugg

SEQ ID NO: 1291194 - RNA, 19 nt, Artificial Sequence
  Description of Artificial Sequence: Synthetic oligonucleotide
gagugagaccaccucccac

SEQ ID NO: 1291195 - RNA, 19 nt, Artificial Sequence
  Description of Artificial Sequence: Synthetic oligonucleotide
uuuugcggagguuguggau

SEQ ID NO: 1291196 - RNA, 19 nt, Artificial Sequence
  Description of Artificial Sequence: Synthetic oligonucleotide
aauuuccccaagagugaga

SEQ ID NO: 1291197 - RNA, 19 nt, Artificial Sequence
  Description of Artificial Sequence: Synthetic oligonucleotide
acagcacaccaccugccgu

SEQ ID NO: 1291198 - RNA, 19 nt, Artificial Sequence
  Description of Artificial Sequence: Synthetic oligonucleotide
gaacagcugaguguuuaca

SEQ ID NO: 1291199 - RNA, 19 nt, Artificial Sequence
  Description of Artificial Sequence: Synthetic oligonucleotide
auguguggaagaagaaaga

SEQ ID NO: 1291200 - RNA, 19 nt, Artificial Sequence
  Description of Artificial Sequence: Synthetic oligonucleotide
ggugguguuaucugaugca

SEQ ID NO: 1291201 - RNA, 19 nt, Artificial Sequence
  Description of Artificial Sequence: Synthetic oligonucleotide
ugcuauccuaugacaccac

SEQ ID NO: 1291202 - RNA, 19 nt, Artificial Sequence
  Description of Artificial Sequence: Synthetic oligonucleotide
cuacaucgagggcuuuagc

SEQ ID NO: 1291203 - RNA, 19 nt, Artificial Sequence
  Description of Artificial Sequence: Synthetic oligonucleotide
guggacguguuaaaacaac

SEQ ID NO: 1291204 - RNA, 19 nt, Artificial Sequence
  Description of Artificial Sequence: Synthetic oligonucleotide
guagcaucuaacagacauc

SEQ ID NO: 1291205 - RNA, 19 nt, Artificial Sequence
  Description of Artificial Sequence: Synthetic oligonucleotide
accgacuggcaauaucaau

SEQ ID NO: 1291206 - RNA, 19 nt, Artificial Sequence
  Description of Artificial Sequence: Synthetic oligonucleotide
cugauuguaucuacaacau

SEQ ID NO: 1291207 - RNA, 19 nt, Artificial Sequence
  Description of Artificial Sequence: Synthetic oligonucleotide
ggaccgacuggcaauauca

SEQ ID NO: 1291208 - RNA, 19 nt, Artificial Sequence
  Description of Artificial Sequence: Synthetic oligonucleotide
ugcaugugaggagcgcuga

SEQ ID NO: 1291209 - RNA, 19 nt, Artificial Sequence
  Description of Artificial Sequence: Synthetic oligonucleotide
caccuaguuuuaaggugac

SEQ ID NO: 1291210 - RNA, 19 nt, Artificial Sequence
  Description of Artificial Sequence: Synthetic oligonucleotide
cauccgugcaaaacaugca

SEQ ID NO: 1291211 - RNA, 19 nt, Artificial Sequence
  Description of Artificial Sequence: Synthetic oligonucleotide
cccacaaccagucguacuc

SEQ ID NO: 1291212 - RNA, 19 nt, Artificial Sequence
  Description of Artificial Sequence: Synthetic oligonucleotide
ucguacucgccccgaggac

SEQ ID NO: 1291213 - RNA, 19 nt, Artificial Sequence
  Description of Artificial Sequence: Synthetic oligonucleotide
ggucaagcucauguugccg

SEQ ID NO: 1291214 - RNA, 19 nt, Artificial Sequence
  Description of Artificial Sequence: Synthetic oligonucleotide
gcaaaacaugcagugagga

SEQ ID NO: 1291215 - RNA, 19 nt, Artificial Sequence
  Description of Artificial Sequence: Synthetic oligonucleotide
uugcauagugggagcgguc

SEQ ID NO: 1291216 - RNA, 19 nt, Artificial Sequence
  Description of Artificial Sequence: Synthetic oligonucleotide
ccauucuuccaucacccac

SEQ ID NO: 1291217 - RNA, 19 nt, Artificial Sequence
  Description of Artificial Sequence: Synthetic oligonucleotide
uacaaccuccuaucauuuu

SEQ ID NO: 1291218 - RNA, 19 nt, Artificial Sequence
  Description of Artificial Sequence: Synthetic oligonucleotide
ucggcgucuuaaguuucag

SEQ ID NO: 1291219 - RNA, 19 nt, Artificial Sequence
  Description of Artificial Sequence: Synthetic oligonucleotide
ugccgucggcgucuuaagu

SEQ ID NO: 1291220 - RNA, 19 nt, Artificial Sequence
  Description of Artificial Sequence: Synthetic oligonucleotide
cagauccuacaucgagggc

SEQ ID NO: 1291221 - RNA, 19 nt, Artificial Sequence
  Description of Artificial Sequence: Synthetic oligonucleotide
gcauacgcaugcaugugag

SEQ ID NO: 1291222 - RNA, 19 nt, Artificial Sequence
  Description of Artificial Sequence: Synthetic oligonucleotide
augcaacuggucaaacaga

SEQ ID NO: 1291223 - RNA, 19 nt, Artificial Sequence
  Description of Artificial Sequence: Synthetic oligonucleotide
agcgcugauuguagcuugg

SEQ ID NO: 1291224 - RNA, 19 nt, Artificial Sequence
  Description of Artificial Sequence: Synthetic oligonucleotide
gugagaccaccucccacac

SEQ ID NO: 1291225 - RNA, 19 nt, Artificial Sequence
  Description of Artificial Sequence: Synthetic oligonucleotide
guccuacaaaaccacacau

SEQ ID NO: 1291226 - RNA, 19 nt, Artificial Sequence
  Description of Artificial Sequence: Synthetic oligonucleotide
cuguuaaaggcacguauau

SEQ ID NO: 1291227 - RNA, 19 nt, Artificial Sequence
  Description of Artificial Sequence: Synthetic oligonucleotide
cagcccuccucuaccaguc

SEQ ID NO: 1291228 - RNA, 19 nt, Artificial Sequence
  Description of Artificial Sequence: Synthetic oligonucleotide
guacucgccccgaggacag

SEQ ID NO: 1291229 - RNA, 19 nt, Artificial Sequence
  Description of Artificial Sequence: Synthetic oligonucleotide
augcaugugaggagcgcug

SEQ ID NO: 1291230 - RNA, 19 nt, Artificial Sequence
  Description of Artificial Sequence: Synthetic oligonucleotide
aagcacacccggagcaggu

SEQ ID NO: 1291231 - RNA, 19 nt, Artificial Sequence
  Description of Artificial Sequence: Synthetic oligonucleotide
auuagugccuggggcacaa

SEQ ID NO: 1291232 - RNA, 19 nt, Artificial Sequence
  Description of Artificial Sequence: Synthetic oligonucleotide
cuauccuaugacaccacau

SEQ ID NO: 1291233 - RNA, 19 nt, Artificial Sequence
  Description of Artificial Sequence: Synthetic oligonucleotide
cauguggagaacccuuucu

SEQ ID NO: 1291234 - RNA, 19 nt, Artificial Sequence
  Description of Artificial Sequence: Synthetic oligonucleotide
gcuacaaccuccuaucauu

SEQ ID NO: 1291235 - RNA, 19 nt, Artificial Sequence
  Description of Artificial Sequence: Synthetic oligonucleotide
gugcauacgcaugcaugug

SEQ ID NO: 1291236 - RNA, 19 nt, Artificial Sequence
  Description of Artificial Sequence: Synthetic oligonucleotide
auugagcuacaaccuccua

SEQ ID NO: 1291237 - RNA, 19 nt, Artificial Sequence
  Description of Artificial Sequence: Synthetic oligonucleotide
cagagauguccaaucugaa

SEQ ID NO: 1291238 - RNA, 19 nt, Artificial Sequence
  Description of Artificial Sequence: Synthetic oligonucleotide
cuacaugaauggcaucaua

SEQ ID NO: 1291239 - RNA, 19 nt, Artificial Sequence
  Description of Artificial Sequence: Synthetic oligonucleotide
uccuacaucgagggcuuua

SEQ ID NO: 1291240 - RNA, 19 nt, Artificial Sequence
  Description of Artificial Sequence: Synthetic oligonucleotide
cugccgucggcgucuuaag

SEQ ID NO: 1291241 - RNA, 19 nt, Artificial Sequence
  Description of Artificial Sequence: Synthetic oligonucleotide
gcuauccuaugacaccaca

SEQ ID NO: 1291242 - RNA, 19 nt, Artificial Sequence
  Description of Artificial Sequence: Synthetic oligonucleotide
cuucaugcaacuggucaaa

SEQ ID NO: 1291243 - RNA, 19 nt, Artificial Sequence
  Description of Artificial Sequence: Synthetic oligonucleotide
ggcgccgccggauuuccag

SEQ ID NO: 1291244 - RNA, 19 nt, Artificial Sequence
  Description of Artificial Sequence: Synthetic oligonucleotide
cucgccccgaggacagaag

SEQ ID NO: 1291245 - RNA, 19 nt, Artificial Sequence
  Description of Artificial Sequence: Synthetic oligonucleotide
aucgagggcuuuagcaccu

SEQ ID NO: 1291246 - RNA, 19 nt, Artificial Sequence
  Description of Artificial Sequence: Synthetic oligonucleotide
gccguuacaguucaucccu

SEQ ID NO: 1291247 - RNA, 19 nt, Artificial Sequence
  Description of Artificial Sequence: Synthetic oligonucleotide
accauccgugcaaaacaug

SEQ ID NO: 1291248 - RNA, 19 nt, Artificial Sequence
  Description of Artificial Sequence: Synthetic oligonucleotide
gugaggagcgcugauugua

SEQ ID NO: 1291249 - RNA, 19 nt, Artificial Sequence
  Description of Artificial Sequence: Synthetic oligonucleotide
cagaguguuaggugcagau

SEQ ID NO: 1291250 - RNA, 19 nt, Artificial Sequence
  Description of Artificial Sequence: Synthetic oligonucleotide
agugaggauuccgcuucca

SEQ ID NO: 1291251 - RNA, 19 nt, Artificial Sequence
  Description of Artificial Sequence: Synthetic oligonucleotide
cugcgccucuuugaauuag

SEQ ID NO: 1291252 - RNA, 19 nt, Artificial Sequence
  Description of Artificial Sequence: Synthetic oligonucleotide
cagcuccuacaugaauggc

SEQ ID NO: 1291253 - RNA, 19 nt, Artificial Sequence
  Description of Artificial Sequence: Synthetic oligonucleotide
cuccuacaugaauggcauc

SEQ ID NO: 1291254 - RNA, 19 nt, Artificial Sequence
  Description of Artificial Sequence: Synthetic oligonucleotide
ucagcgcggcgacgguccc

SEQ ID NO: 1291255 - RNA, 19 nt, Artificial Sequence
  Description of Artificial Sequence: Synthetic oligonucleotide
gaugagcaauccacugcaa

SEQ ID NO: 1291256 - RNA, 19 nt, Artificial Sequence
  Description of Artificial Sequence: Synthetic oligonucleotide
cagucguacucgccccgag

SEQ ID NO: 1291257 - RNA, 19 nt, Artificial Sequence
  Description of Artificial Sequence: Synthetic oligonucleotide
ugcggagguuguggauuag

SEQ ID NO: 1291258 - RNA, 19 nt, Artificial Sequence
  Description of Artificial Sequence: Synthetic oligonucleotide
ccuucaugcaacuggucaa

SEQ ID NO: 1291259 - RNA, 19 nt, Artificial Sequence
  Description of Artificial Sequence: Synthetic oligonucleotide
gucguccuuucugacauua

SEQ ID NO: 1291260 - RNA, 19 nt, Artificial Sequence
  Description of Artificial Sequence: Synthetic oligonucleotide
cuacaaccuccuaucauuu

SEQ ID NO: 1291261 - RNA, 19 nt, Artificial Sequence
  Description of Artificial Sequence: Synthetic oligonucleotide
aucgcgaagcacacccgga

SEQ ID NO: 1291262 - RNA, 19 nt, Artificial Sequence
  Description of Artificial Sequence: Synthetic oligonucleotide
gucaccgccccgcuggugu

SEQ ID NO: 1291263 - RNA, 19 nt, Artificial Sequence
  Description of Artificial Sequence: Synthetic oligonucleotide
cacacccggagcagguaca

SEQ ID NO: 1291264 - RNA, 19 nt, Artificial Sequence
  Description of Artificial Sequence: Synthetic oligonucleotide
gaccgacuggcaauaucaa

SEQ ID NO: 1291265 - RNA, 19 nt, Artificial Sequence
  Description of Artificial Sequence: Synthetic oligonucleotide
gcacacccggagcagguac

SEQ ID NO: 1291266 - RNA, 19 nt, Artificial Sequence
  Description of Artificial Sequence: Synthetic oligonucleotide
gcauagugggagcggucug

SEQ ID NO: 1291267 - RNA, 19 nt, Artificial Sequence
  Description of Artificial Sequence: Synthetic oligonucleotide
gcuccgaguggcuggcgcc

SEQ ID NO: 1291268 - RNA, 19 nt, Artificial Sequence
  Description of Artificial Sequence: Synthetic oligonucleotide
ccacaaccagucguacucg

SEQ ID NO: 1291269 - RNA, 19 nt, Artificial Sequence
  Description of Artificial Sequence: Synthetic oligonucleotide
cuucagcgcggcgacgguc

SEQ ID NO: 1291270 - RNA, 19 nt, Artificial Sequence
  Description of Artificial Sequence: Synthetic oligonucleotide
gcagcugauuguaucuaca

SEQ ID NO: 1291271 - RNA, 19 nt, Artificial Sequence
  Description of Artificial Sequence: Synthetic oligonucleotide
ggggucguccuuucugaca

SEQ ID NO: 1291272 - RNA, 19 nt, Artificial Sequence
  Description of Artificial Sequence: Synthetic oligonucleotide
gggucguccuuucugacau

SEQ ID NO: 1291273 - RNA, 19 nt, Artificial Sequence
  Description of Artificial Sequence: Synthetic oligonucleotide
uguugccguuacaguucau

SEQ ID NO: 1291274 - RNA, 19 nt, Artificial Sequence
  Description of Artificial Sequence: Synthetic oligonucleotide
cacccacaaccagucguac

SEQ ID NO: 1291275 - RNA, 19 nt, Artificial Sequence
  Description of Artificial Sequence: Synthetic oligonucleotide
cuagugcauacgcaugcau

SEQ ID NO: 1291276 - RNA, 19 nt, Artificial Sequence
  Description of Artificial Sequence: Synthetic oligonucleotide
cagcaucacuucaaauacu

SEQ ID NO: 1291277 - RNA, 19 nt, Artificial Sequence
  Description of Artificial Sequence: Synthetic oligonucleotide
cggauuuccaggccaucgc

SEQ ID NO: 1291278 - RNA, 19 nt, Artificial Sequence
  Description of Artificial Sequence: Synthetic oligonucleotide
guguuaucugaugcacaaa

SEQ ID NO: 1291279 - RNA, 19 nt, Artificial Sequence
  Description of Artificial Sequence: Synthetic oligonucleotide
acucgccccgaggacagaa

SEQ ID NO: 1291280 - RNA, 19 nt, Artificial Sequence
  Description of Artificial Sequence: Synthetic oligonucleotide
gucggcgucuuaaguuuca

SEQ ID NO: 1291281 - RNA, 19 nt, Artificial Sequence
  Description of Artificial Sequence: Synthetic oligonucleotide
cgcaugcaugugaggagcg

SEQ ID NO: 1291282 - RNA, 19 nt, Artificial Sequence
  Description of Artificial Sequence: Synthetic oligonucleotide
cauagugggagcggucugu

SEQ ID NO: 1291283 - RNA, 19 nt, Artificial Sequence
  Description of Artificial Sequence: Synthetic oligonucleotide
gcgucuuaaguuucaguau

SEQ ID NO: 1291284 - RNA, 19 nt, Artificial Sequence
  Description of Artificial Sequence: Synthetic oligonucleotide
gcggagguuguggauuagc

SEQ ID NO: 1291285 - RNA, 19 nt, Artificial Sequence
  Description of Artificial Sequence: Synthetic oligonucleotide
ucaccgccccgcugguguc

SEQ ID NO: 1291286 - RNA, 19 nt, Artificial Sequence
  Description of Artificial Sequence: Synthetic oligonucleotide
gcgccgccggauuuccagg

SEQ ID NO: 1291287 - RNA, 19 nt, Artificial Sequence
  Description of Artificial Sequence: Synthetic oligonucleotide
aggcuuuaacuggucuauu

SEQ ID NO: 1291288 - RNA, 19 nt, Artificial Sequence
  Description of Artificial Sequence: Synthetic oligonucleotide
gagcggucuguggccagca

SEQ ID NO: 1291289 - RNA, 19 nt, Artificial Sequence
  Description of Artificial Sequence: Synthetic oligonucleotide
caagcucauguugccguua

SEQ ID NO: 1291290 - RNA, 19 nt, Artificial Sequence
  Description of Artificial Sequence: Synthetic oligonucleotide
gcacaccaccugccgucgg

SEQ ID NO: 1291291 - RNA, 19 nt, Artificial Sequence
  Description of Artificial Sequence: Synthetic oligonucleotide
cagagacuagcaacagcuu

SEQ ID NO: 1291292 - RNA, 19 nt, Artificial Sequence
  Description of Artificial Sequence: Synthetic oligonucleotide
gcgccucuuugaauuagga

SEQ ID NO: 1291293 - RNA, 19 nt, Artificial Sequence
  Description of Artificial Sequence: Synthetic oligonucleotide
caccgccccgcuggugucc

SEQ ID NO: 1291294 - RNA, 19 nt, Artificial Sequence
  Description of Artificial Sequence: Synthetic oligonucleotide
cuccucuaccagucuggcu

SEQ ID NO: 1291295 - RNA, 19 nt, Artificial Sequence
  Description of Artificial Sequence: Synthetic oligonucleotide
gccgucggcgucuuaaguu

SEQ ID NO: 1291296 - RNA, 19 nt, Artificial Sequence
  Description of Artificial Sequence: Synthetic oligonucleotide
uacucgccccgaggacaga

SEQ ID NO: 1291297 - RNA, 19 nt, Artificial Sequence
  Description of Artificial Sequence: Synthetic oligonucleotide
gcaacagcuuacacagagu

SEQ ID NO: 1291298 - RNA, 19 nt, Artificial Sequence
  Description of Artificial Sequence: Synthetic oligonucleotide
cguacucgccccgaggaca

SEQ ID NO: 1291299 - RNA, 19 nt, Artificial Sequence
  Description of Artificial Sequence: Synthetic oligonucleotide
cgccgccggauuuccaggc

SEQ ID NO: 1291300 - RNA, 19 nt, Artificial Sequence
  Description of Artificial Sequence: Synthetic oligonucleotide
cgucggcgucuuaaguuuc

SEQ ID NO: 1291301 - RNA, 19 nt, Artificial Sequence
  Description of Artificial Sequence: Synthetic oligonucleotide
ggccaucgcgaagcacacc

SEQ ID NO: 1291302 - RNA, 19 nt, Artificial Sequence
  Description of Artificial Sequence: Synthetic oligonucleotide
ggcgacgguccccagcaau

SEQ ID NO: 1291303 - RNA, 19 nt, Artificial Sequence
  Description of Artificial Sequence: Synthetic oligonucleotide
ccgccggauuuccaggcca

SEQ ID NO: 1291304 - RNA, 19 nt, Artificial Sequence
  Description of Artificial Sequence: Synthetic oligonucleotide
gcgcugauuguagcuugga

SEQ ID NO: 1291305 - RNA, 19 nt, Artificial Sequence
  Description of Artificial Sequence: Synthetic oligonucleotide
cgcugauuguagcuuggaa

SEQ ID NO: 1291306 - RNA, 19 nt, Artificial Sequence
  Description of Artificial Sequence: Synthetic oligonucleotide
ccuaugacuuuuccacuuu

SEQ ID NO: 1291307 - RNA, 19 nt, Artificial Sequence
  Description of Artificial Sequence: Synthetic oligonucleotide
cgagggcuuuagcaccuuc

SEQ ID NO: 1291308 - RNA, 19 nt, Artificial Sequence
  Description of Artificial Sequence: Synthetic oligonucleotide
ggauuagcuccgaguggcu

SEQ ID NO: 1291309 - RNA, 19 nt, Artificial Sequence
  Description of Artificial Sequence: Synthetic oligonucleotide
cgaguggcuggcgccgccg

SEQ ID NO: 1291310 - RNA, 19 nt, Artificial Sequence
  Description of Artificial Sequence: Synthetic oligonucleotide
ccgaguggcuggcgccgcc

SEQ ID NO: 1291311 - RNA, 19 nt, Artificial Sequence
  Description of Artificial Sequence: Synthetic oligonucleotide
ccaggccaucgcgaagcac

SEQ ID NO: 1291312 - RNA, 19 nt, Artificial Sequence
  Description of Artificial Sequence: Synthetic oligonucleotide
gccccgaggacagaagcau

SEQ ID NO: 1291313 - RNA, 19 nt, Artificial Sequence
  Description of Artificial Sequence: Synthetic oligonucleotide
caccaccugccgucggcgu

SEQ ID NO: 1291314 - RNA, 19 nt, Artificial Sequence
  Description of Artificial Sequence: Synthetic oligonucleotide
ggucaccgccccgcuggug

SEQ ID NO: 1291315 - RNA, 19 nt, Artificial Sequence
  Description of Artificial Sequence: Synthetic oligonucleotide
ccagucguacucgccccga

SEQ ID NO: 1291316 - RNA, 19 nt, Artificial Sequence
  Description of Artificial Sequence: Synthetic oligonucleotide
ccuggaccacugcuuuucu

SEQ ID NO: 1291317 - RNA, 19 nt, Artificial Sequence
  Description of Artificial Sequence: Synthetic oligonucleotide
gcgacgguccccagcaauu

SEQ ID NO: 1291318 - RNA, 19 nt, Artificial Sequence
  Description of Artificial Sequence: Synthetic oligonucleotide
cgccccgcugguguccccg

SEQ ID NO: 1291319 - RNA, 19 nt, Artificial Sequence
  Description of Artificial Sequence: Synthetic oligonucleotide
ggucguccuuucugacauu

SEQ ID NO: 1291320 - RNA, 19 nt, Artificial Sequence
  Description of Artificial Sequence: Synthetic oligonucleotide
cggcgucuuaaguuucagu

SEQ ID NO: 1291321 - RNA, 19 nt, Artificial Sequence
  Description of Artificial Sequence: Synthetic oligonucleotide
ccguuacaguucaucccuu

SEQ ID NO: 1291322 - RNA, 19 nt, Artificial Sequence
  Description of Artificial Sequence: Synthetic oligonucleotide
ccgccccgcuggugucccc

SEQ ID NO: 1291323 - RNA, 19 nt, Artificial Sequence
  Description of Artificial Sequence: Synthetic oligonucleotide
cgccggauuuccaggccau

SEQ ID NO: 1291324 - RNA, 19 nt, Artificial Sequence
  Description of Artificial Sequence: Synthetic oligonucleotide
cgacgguccccagcaauuu

SEQ ID NO: 1291325 - RNA, 19 nt, Artificial Sequence
  Description of Artificial Sequence: Synthetic oligonucleotide
caccugccgucggcgucuu

SEQ ID NO: 1291326 - RNA, 19 nt, Artificial Sequence
  Description of Artificial Sequence: Synthetic oligonucleotide
agaugaaacagucauaggu

SEQ ID NO: 1291327 - RNA, 19 nt, Artificial Sequence
  Description of Artificial Sequence: Synthetic oligonucleotide
uuuacuaaagcacccacac

SEQ ID NO: 1291328 - RNA, 19 nt, Artificial Sequence
  Description of Artificial Sequence: Synthetic oligonucleotide
aacccuaacagugaggagg

SEQ ID NO: 1291329 - RNA, 19 nt, Artificial Sequence
  Description of Artificial Sequence: Synthetic oligonucleotide
aaaguagcuagcauagggc

SEQ ID NO: 1291330 - RNA, 19 nt, Artificial Sequence
  Description of Artificial Sequence: Synthetic oligonucleotide
accacaacgguacagauug

SEQ ID NO: 1291331 - RNA, 19 nt, Artificial Sequence
  Description of Artificial Sequence: Synthetic oligonucleotide
gagccaauagcguaggugg

SEQ ID NO: 1291332 - RNA, 19 nt, Artificial Sequence
  Description of Artificial Sequence: Synthetic oligonucleotide
ucuuacuaaaccucugagg

SEQ ID NO: 1291333 - RNA, 19 nt, Artificial Sequence
  Description of Artificial Sequence: Synthetic oligonucleotide
ucuuugaagacccucagaa

SEQ ID NO: 1291334 - RNA, 19 nt, Artificial Sequence
  Description of Artificial Sequence: Synthetic oligonucleotide
auaacggccucccaggagc

SEQ ID NO: 1291335 - RNA, 19 nt, Artificial Sequence
  Description of Artificial Sequence: Synthetic oligonucleotide
acuuccaagacucgguacc

SEQ ID NO: 1291336 - RNA, 19 nt, Artificial Sequence
  Description of Artificial Sequence: Synthetic oligonucleotide
uguauaacggccucccagg

SEQ ID NO: 1291337 - RNA, 19 nt, Artificial Sequence
  Description of Artificial Sequence: Synthetic oligonucleotide
caaaguagcuagcauaggg

SEQ ID NO: 1291338 - RNA, 19 nt, Artificial Sequence
  Description of Artificial Sequence: Synthetic oligonucleotide
acauauaaacaugagcagg

SEQ ID NO: 1291339 - RNA, 19 nt, Artificial Sequence
  Description of Artificial Sequence: Synthetic oligonucleotide
ugauugagccaugacaugg

SEQ ID NO: 1291340 - RNA, 19 nt, Artificial Sequence
  Description of Artificial Sequence: Synthetic oligonucleotide
aguggagugaccuagccca

SEQ ID NO: 1291341 - RNA, 19 nt, Artificial Sequence
  Description of Artificial Sequence: Synthetic oligonucleotide
ugaaucuuacuaaaccucu

SEQ ID NO: 1291342 - RNA, 19 nt, Artificial Sequence
  Description of Artificial Sequence: Synthetic oligonucleotide
ugacauagauaccguagcg

SEQ ID NO: 1291343 - RNA, 19 nt, Artificial Sequence
  Description of Artificial Sequence: Synthetic oligonucleotide
auaacugccacuguuuggg

SEQ ID NO: 1291344 - RNA, 19 nt, Artificial Sequence
  Description of Artificial Sequence: Synthetic oligonucleotide
aacgguacagauugcgguc

SEQ ID NO: 1291345 - RNA, 19 nt, Artificial Sequence
  Description of Artificial Sequence: Synthetic oligonucleotide
aacucgaugaccacucggc

SEQ ID NO: 1291346 - RNA, 19 nt, Artificial Sequence
  Description of Artificial Sequence: Synthetic oligonucleotide
augaaacagucauagguag

SEQ ID NO: 1291347 - RNA, 19 nt, Artificial Sequence
  Description of Artificial Sequence: Synthetic oligonucleotide
ucuaaaggggaugauaacu

SEQ ID NO: 1291348 - RNA, 19 nt, Artificial Sequence
  Description of Artificial Sequence: Synthetic oligonucleotide
auagauaccguagcgcagc

SEQ ID NO: 1291349 - RNA, 19 nt, Artificial Sequence
  Description of Artificial Sequence: Synthetic oligonucleotide
gauaccguagcgcagccgc

SEQ ID NO: 1291350 - RNA, 19 nt, Artificial Sequence
  Description of Artificial Sequence: Synthetic oligonucleotide
uuuuacuaaagcacccaca

SEQ ID NO: 1291351 - RNA, 19 nt, Artificial Sequence
  Description of Artificial Sequence: Synthetic oligonucleotide
acauagauaccguagcgca

SEQ ID NO: 1291352 - RNA, 19 nt, Artificial Sequence
  Description of Artificial Sequence: Synthetic oligonucleotide
cuaacagugaggagguuag

SEQ ID NO: 1291353 - RNA, 19 nt, Artificial Sequence
  Description of Artificial Sequence: Synthetic oligonucleotide
ugcaacauauaaacaugag

SEQ ID NO: 1291354 - RNA, 19 nt, Artificial Sequence
  Description of Artificial Sequence: Synthetic oligonucleotide
gauaacugccacuguuugg

SEQ ID NO: 1291355 - RNA, 19 nt, Artificial Sequence
  Description of Artificial Sequence: Synthetic oligonucleotide
uguuuugaaucuuacuaaa

SEQ ID NO: 1291356 - RNA, 19 nt, Artificial Sequence
  Description of Artificial Sequence: Synthetic oligonucleotide
ucuaggaagccuacguuga

SEQ ID NO: 1291357 - RNA, 19 nt, Artificial Sequence
  Description of Artificial Sequence: Synthetic oligonucleotide
auguuugucccggucaugc

SEQ ID NO: 1291358 - RNA, 19 nt, Artificial Sequence
  Description of Artificial Sequence: Synthetic oligonucleotide
uacucguuaggaaagccgu

SEQ ID NO: 1291359 - RNA, 19 nt, Artificial Sequence
  Description of Artificial Sequence: Synthetic oligonucleotide
aucuuacuaaaccucugag

SEQ ID NO: 1291360 - RNA, 19 nt, Artificial Sequence
  Description of Artificial Sequence: Synthetic oligonucleotide
uucuaggccgucuuugaag

SEQ ID NO: 1291361 - RNA, 19 nt, Artificial Sequence
  Description of Artificial Sequence: Synthetic oligonucleotide
ucuaggccgucuuugaaga

SEQ ID NO: 1291362 - RNA, 19 nt, Artificial Sequence
  Description of Artificial Sequence: Synthetic oligonucleotide
ugaaacagucauagguagc

SEQ ID NO: 1291363 - RNA, 19 nt, Artificial Sequence
  Description of Artificial Sequence: Synthetic oligonucleotide
ugcgguagcggccuauccg

SEQ ID NO: 1291364 - RNA, 19 nt, Artificial Sequence
  Description of Artificial Sequence: Synthetic oligonucleotide
auagcguagguggugcucc

SEQ ID NO: 1291365 - RNA, 19 nt, Artificial Sequence
  Description of Artificial Sequence: Synthetic oligonucleotide
gaaacagucauagguagca

SEQ ID NO: 1291366 - RNA, 19 nt, Artificial Sequence
  Description of Artificial Sequence: Synthetic oligonucleotide
uaagucaauccucccaccu

SEQ ID NO: 1291367 - RNA, 19 nt, Artificial Sequence
  Description of Artificial Sequence: Synthetic oligonucleotide
cucagaaaacagcucacag

SEQ ID NO: 1291368 - RNA, 19 nt, Artificial Sequence
  Description of Artificial Sequence: Synthetic oligonucleotide
acucgaugaccacucggcc

SEQ ID NO: 1291369 - RNA, 19 nt, Artificial Sequence
  Description of Artificial Sequence: Synthetic oligonucleotide
ucgaugaccacucggccca

SEQ ID NO: 1291370 - RNA, 19 nt, Artificial Sequence
  Description of Artificial Sequence: Synthetic oligonucleotide
gaacucgaugaccacucgg

SEQ ID NO: 1291371 - RNA, 19 nt, Artificial Sequence
  Description of Artificial Sequence: Synthetic oligonucleotide
cuguaguucaguccucugg

SEQ ID NO: 1291372 - RNA, 19 nt, Artificial Sequence
  Description of Artificial Sequence: Synthetic oligonucleotide
aguacucguuaggaaagcc

SEQ ID NO: 1291373 - RNA, 19 nt, Artificial Sequence
  Description of Artificial Sequence: Synthetic oligonucleotide
gacauagauaccguagcgc

SEQ ID NO: 1291374 - RNA, 19 nt, Artificial Sequence
  Description of Artificial Sequence: Synthetic oligonucleotide
cucuaggaagccuacguug

SEQ ID NO: 1291375 - RNA, 19 nt, Artificial Sequence
  Description of Artificial Sequence: Synthetic oligonucleotide
gauguuggugaagaguggc

SEQ ID NO: 1291376 - RNA, 19 nt, Artificial Sequence
  Description of Artificial Sequence: Synthetic oligonucleotide
ucaggugguguauaacggc

SEQ ID NO: 1291377 - RNA, 19 nt, Artificial Sequence
  Description of Artificial Sequence: Synthetic oligonucleotide
cuggucaccacaacgguac

SEQ ID NO: 1291378 - RNA, 19 nt, Artificial Sequence
  Description of Artificial Sequence: Synthetic oligonucleotide
guguauaacggccucccag

SEQ ID NO: 1291379 - RNA, 19 nt, Artificial Sequence
  Description of Artificial Sequence: Synthetic oligonucleotide
cagaaccacggacugaucc

SEQ ID NO: 1291380 - RNA, 19 nt, Artificial Sequence
  Description of Artificial Sequence: Synthetic oligonucleotide
agcuuuguguuuugaaucu

SEQ ID NO: 1291381 - RNA, 19 nt, Artificial Sequence
  Description of Artificial Sequence: Synthetic oligonucleotide
ugauccucagaaacugggc

SEQ ID NO: 1291382 - RNA, 19 nt, Artificial Sequence
  Description of Artificial Sequence: Synthetic oligonucleotide
guuauguuugucccgguca

SEQ ID NO: 1291383 - RNA, 19 nt, Artificial Sequence
  Description of Artificial Sequence: Synthetic oligonucleotide
uauaacggccucccaggag

SEQ ID NO: 1291384 - RNA, 19 nt, Artificial Sequence
  Description of Artificial Sequence: Synthetic oligonucleotide
cuauccggacaucugggcg

SEQ ID NO: 1291385 - RNA, 19 nt, Artificial Sequence
  Description of Artificial Sequence: Synthetic oligonucleotide
caugcaaaggccaacccca

SEQ ID NO: 1291386 - RNA, 19 nt, Artificial Sequence
  Description of Artificial Sequence: Synthetic oligonucleotide
gaaggauuggccucagaga

SEQ ID NO: 1291387 - RNA, 19 nt, Artificial Sequence
  Description of Artificial Sequence: Synthetic oligonucleotide
uccauuagugucagccuug

SEQ ID NO: 1291388 - RNA, 19 nt, Artificial Sequence
  Description of Artificial Sequence: Synthetic oligonucleotide
uccauagggaccaggucca

SEQ ID NO: 1291389 - RNA, 19 nt, Artificial Sequence
  Description of Artificial Sequence: Synthetic oligonucleotide
uccaaugccaucccacuuc

SEQ ID NO: 1291390 - RNA, 19 nt, Artificial Sequence
  Description of Artificial Sequence: Synthetic oligonucleotide
cagcuuuguguuuugaauc

SEQ ID NO: 1291391 - RNA, 19 nt, Artificial Sequence
  Description of Artificial Sequence: Synthetic oligonucleotide
guacagauugcggucaucc

SEQ ID NO: 1291392 - RNA, 19 nt, Artificial Sequence
  Description of Artificial Sequence: Synthetic oligonucleotide
gcuagcauagggcagccgg

SEQ ID NO: 1291393 - RNA, 19 nt, Artificial Sequence
  Description of Artificial Sequence: Synthetic oligonucleotide
aacuucuaggccgucuuug

SEQ ID NO: 1291394 - RNA, 19 nt, Artificial Sequence
  Description of Artificial Sequence: Synthetic oligonucleotide
cucgguaccgcagcgaucc

SEQ ID NO: 1291395 - RNA, 19 nt, Artificial Sequence
  Description of Artificial Sequence: Synthetic oligonucleotide
cucguuauguuugucccgg

SEQ ID NO: 1291396 - RNA, 19 nt, Artificial Sequence
  Description of Artificial Sequence: Synthetic oligonucleotide
cauggggugcagauagugg

SEQ ID NO: 1291397 - RNA, 19 nt, Artificial Sequence
  Description of Artificial Sequence: Synthetic oligonucleotide
acacaaguuucugugcaac

SEQ ID NO: 1291398 - RNA, 19 nt, Artificial Sequence
  Description of Artificial Sequence: Synthetic oligonucleotide
aggggaugauaacugccac

SEQ ID NO: 1291399 - RNA, 19 nt, Artificial Sequence
  Description of Artificial Sequence: Synthetic oligonucleotide
uacguugagcagcuuggcc

SEQ ID NO: 1291400 - RNA, 19 nt, Artificial Sequence
  Description of Artificial Sequence: Synthetic oligonucleotide
ugccgagacacuuccaaga

SEQ ID NO: 1291401 - RNA, 19 nt, Artificial Sequence
  Description of Artificial Sequence: Synthetic oligonucleotide
guacucguuaggaaagccg

SEQ ID NO: 1291402 - RNA, 19 nt, Artificial Sequence
  Description of Artificial Sequence: Synthetic oligonucleotide
uaccgcagcgauccaaugc

SEQ ID NO: 1291403 - RNA, 19 nt, Artificial Sequence
  Description of Artificial Sequence: Synthetic oligonucleotide
ucccggucaugcuugauca

SEQ ID NO: 1291404 - RNA, 19 nt, Artificial Sequence
  Description of Artificial Sequence: Synthetic oligonucleotide
uuacuaaaccucugagggu

SEQ ID NO: 1291405 - RNA, 19 nt, Artificial Sequence
  Description of Artificial Sequence: Synthetic oligonucleotide
ugaagaugaaacagucaua

SEQ ID NO: 1291406 - RNA, 19 nt, Artificial Sequence
  Description of Artificial Sequence: Synthetic oligonucleotide
ucauagguagcauccuccu

SEQ ID NO: 1291407 - RNA, 19 nt, Artificial Sequence
  Description of Artificial Sequence: Synthetic oligonucleotide
cuugauugagccaugacau

SEQ ID NO: 1291408 - RNA, 19 nt, Artificial Sequence
  Description of Artificial Sequence: Synthetic oligonucleotide
uacuaaaccucugaggguu

SEQ ID NO: 1291409 - RNA, 19 nt, Artificial Sequence
  Description of Artificial Sequence: Synthetic oligonucleotide
acaucugggcgugagaucu

SEQ ID NO: 1291410 - RNA, 19 nt, Artificial Sequence
  Description of Artificial Sequence: Synthetic oligonucleotide
cucccggugucuaaagggg

SEQ ID NO: 1291411 - RNA, 19 nt, Artificial Sequence
  Description of Artificial Sequence: Synthetic oligonucleotide
ugagggaucuccagaucug

SEQ ID NO: 1291412 - RNA, 19 nt, Artificial Sequence
  Description of Artificial Sequence: Synthetic oligonucleotide
cucgaugaccacucggccc

SEQ ID NO: 1291413 - RNA, 19 nt, Artificial Sequence
  Description of Artificial Sequence: Synthetic oligonucleotide
guguuuugaaucuuacuaa

SEQ ID NO: 1291414 - RNA, 19 nt, Artificial Sequence
  Description of Artificial Sequence: Synthetic oligonucleotide
cacggacugauccaagccc

SEQ ID NO: 1291415 - RNA, 19 nt, Artificial Sequence
  Description of Artificial Sequence: Synthetic oligonucleotide
gggcgugagaucuucaucc

SEQ ID NO: 1291416 - RNA, 19 nt, Artificial Sequence
  Description of Artificial Sequence: Synthetic oligonucleotide
uauccggacaucugggcgu

SEQ ID NO: 1291417 - RNA, 19 nt, Artificial Sequence
  Description of Artificial Sequence: Synthetic oligonucleotide
cacaacgguacagauugcg

SEQ ID NO: 1291418 - RNA, 19 nt, Artificial Sequence
  Description of Artificial Sequence: Synthetic oligonucleotide
auagggaccagguccacau

SEQ ID NO: 1291419 - RNA, 19 nt, Artificial Sequence
  Description of Artificial Sequence: Synthetic oligonucleotide
ugggccuuacucaggcccg

SEQ ID NO: 1291420 - RNA, 19 nt, Artificial Sequence
  Description of Artificial Sequence: Synthetic oligonucleotide
acggacugauccaagcccc

SEQ ID NO: 1291421 - RNA, 19 nt, Artificial Sequence
  Description of Artificial Sequence: Synthetic oligonucleotide
ucaauccucccaccuuucc

SEQ ID NO: 1291422 - RNA, 19 nt, Artificial Sequence
  Description of Artificial Sequence: Synthetic oligonucleotide
agcgauccaaugccauccc

SEQ ID NO: 1291423 - RNA, 19 nt, Artificial Sequence
  Description of Artificial Sequence: Synthetic oligonucleotide
ucguuaggaaagccguuga

SEQ ID NO: 1291424 - RNA, 19 nt, Artificial Sequence
  Description of Artificial Sequence: Synthetic oligonucleotide
caugggugaggugaacucg

SEQ ID NO: 1291425 - RNA, 19 nt, Artificial Sequence
  Description of Artificial Sequence: Synthetic oligonucleotide
ugcucccggugucuaaagg

SEQ ID NO: 1291426 - RNA, 19 nt, Artificial Sequence
  Description of Artificial Sequence: Synthetic oligonucleotide
gcuaaccaaagcuugcccc

SEQ ID NO: 1291427 - RNA, 19 nt, Artificial Sequence
  Description of Artificial Sequence: Synthetic oligonucleotide
guagcuagcauagggcagc

SEQ ID NO: 1291428 - RNA, 19 nt, Artificial Sequence
  Description of Artificial Sequence: Synthetic oligonucleotide
guagguggcuaaccaaagc

SEQ ID NO: 1291429 - RNA, 19 nt, Artificial Sequence
  Description of Artificial Sequence: Synthetic oligonucleotide
acaacgguacagauugcgg

SEQ ID NO: 1291430 - RNA, 19 nt, Artificial Sequence
  Description of Artificial Sequence: Synthetic oligonucleotide
caagacucgguaccgcagc

SEQ ID NO: 1291431 - RNA, 19 nt, Artificial Sequence
  Description of Artificial Sequence: Synthetic oligonucleotide
cacuguuugggcuggggug

SEQ ID NO: 1291432 - RNA, 19 nt, Artificial Sequence
  Description of Artificial Sequence: Synthetic oligonucleotide
ugaagaguggcugccgaga

SEQ ID NO: 1291433 - RNA, 19 nt, Artificial Sequence
  Description of Artificial Sequence: Synthetic oligonucleotide
ugguguauaacggccuccc

SEQ ID NO: 1291434 - RNA, 19 nt, Artificial Sequence
  Description of Artificial Sequence: Synthetic oligonucleotide
uggcaggcaaaccuccaca

SEQ ID NO: 1291435 - RNA, 19 nt, Artificial Sequence
  Description of Artificial Sequence: Synthetic oligonucleotide
aagucaauccucccaccuu

SEQ ID NO: 1291436 - RNA, 19 nt, Artificial Sequence
  Description of Artificial Sequence: Synthetic oligonucleotide
gaugauaacugccacuguu

SEQ ID NO: 1291437 - RNA, 19 nt, Artificial Sequence
  Description of Artificial Sequence: Synthetic oligonucleotide
agucaauccucccaccuuu

SEQ ID NO: 1291438 - RNA, 19 nt, Artificial Sequence
  Description of Artificial Sequence: Synthetic oligonucleotide
ggaaacagcaccccuucug

SEQ ID NO: 1291439 - RNA, 19 nt, Artificial Sequence
  Description of Artificial Sequence: Synthetic oligonucleotide
acucaggcccgacacaccu

SEQ ID NO: 1291440 - RNA, 19 nt, Artificial Sequence
  Description of Artificial Sequence: Synthetic oligonucleotide
gggaugauaacugccacug

SEQ ID NO: 1291441 - RNA, 19 nt, Artificial Sequence
  Description of Artificial Sequence: Synthetic oligonucleotide
uagguagcauccuccuuca

SEQ ID NO: 1291442 - RNA, 19 nt, Artificial Sequence
  Description of Artificial Sequence: Synthetic oligonucleotide
ggauuggccucagagagag

SEQ ID NO: 1291443 - RNA, 19 nt, Artificial Sequence
  Description of Artificial Sequence: Synthetic oligonucleotide
ggcccuaggggacucaagg

SEQ ID NO: 1291444 - RNA, 19 nt, Artificial Sequence
  Description of Artificial Sequence: Synthetic oligonucleotide
augcgguagcggccuaucc

SEQ ID NO: 1291445 - RNA, 19 nt, Artificial Sequence
  Description of Artificial Sequence: Synthetic oligonucleotide
uaguggagccaauagcgua

SEQ ID NO: 1291446 - RNA, 19 nt, Artificial Sequence
  Description of Artificial Sequence: Synthetic oligonucleotide
ugaaacuucuaggccgucu

SEQ ID NO: 1291447 - RNA, 19 nt, Artificial Sequence
  Description of Artificial Sequence: Synthetic oligonucleotide
ugcggucauccauagggac

SEQ ID NO: 1291448 - RNA, 19 nt, Artificial Sequence
  Description of Artificial Sequence: Synthetic oligonucleotide
cagcgauccaaugccaucc

SEQ ID NO: 1291449 - RNA, 19 nt, Artificial Sequence
  Description of Artificial Sequence: Synthetic oligonucleotide
aguggguucugaaacuucu

SEQ ID NO: 1291450 - RNA, 19 nt, Artificial Sequence
  Description of Artificial Sequence: Synthetic oligonucleotide
gcucccggugucuaaaggg

SEQ ID NO: 1291451 - RNA, 19 nt, Artificial Sequence
  Description of Artificial Sequence: Synthetic oligonucleotide
cucguuaggaaagccguug

SEQ ID NO: 1291452 - RNA, 19 nt, Artificial Sequence
  Description of Artificial Sequence: Synthetic oligonucleotide
uggcuaaccaaagcuugcc

SEQ ID NO: 1291453 - RNA, 19 nt, Artificial Sequence
  Description of Artificial Sequence: Synthetic oligonucleotide
uggcugccgagacacuucc

SEQ ID NO: 1291454 - RNA, 19 nt, Artificial Sequence
  Description of Artificial Sequence: Synthetic oligonucleotide
cuccaaaguagcuagcaua

SEQ ID NO: 1291455 - RNA, 19 nt, Artificial Sequence
  Description of Artificial Sequence: Synthetic oligonucleotide
agcacgccuggguucuccc

SEQ ID NO: 1291456 - RNA, 19 nt, Artificial Sequence
  Description of Artificial Sequence: Synthetic oligonucleotide
ggccuauccggacaucugg

SEQ ID NO: 1291457 - RNA, 19 nt, Artificial Sequence
  Description of Artificial Sequence: Synthetic oligonucleotide
gccguugauccucagaaac

SEQ ID NO: 1291458 - RNA, 19 nt, Artificial Sequence
  Description of Artificial Sequence: Synthetic oligonucleotide
cucaguagguggcuaacca

SEQ ID NO: 1291459 - RNA, 19 nt, Artificial Sequence
  Description of Artificial Sequence: Synthetic oligonucleotide
aaacuucuaggccgucuuu

SEQ ID NO: 1291460 - RNA, 19 nt, Artificial Sequence
  Description of Artificial Sequence: Synthetic oligonucleotide
aaacugggccuuacucagg

SEQ ID NO: 1291461 - RNA, 19 nt, Artificial Sequence
  Description of Artificial Sequence: Synthetic oligonucleotide
ggagguuagggcuggagga

SEQ ID NO: 1291462 - RNA, 19 nt, Artificial Sequence
  Description of Artificial Sequence: Synthetic oligonucleotide
acugaagaugaaacaguca

SEQ ID NO: 1291463 - RNA, 19 nt, Artificial Sequence
  Description of Artificial Sequence: Synthetic oligonucleotide
cauggagggccuuugucca

SEQ ID NO: 1291464 - RNA, 19 nt, Artificial Sequence
  Description of Artificial Sequence: Synthetic oligonucleotide
ggcccacaagaccaggugg

SEQ ID NO: 1291465 - RNA, 19 nt, Artificial Sequence
  Description of Artificial Sequence: Synthetic oligonucleotide
uaacagugaggagguuagg

SEQ ID NO: 1291466 - RNA, 19 nt, Artificial Sequence
  Description of Artificial Sequence: Synthetic oligonucleotide
ucccggugucuaaagggga

SEQ ID NO: 1291467 - RNA, 19 nt, Artificial Sequence
  Description of Artificial Sequence: Synthetic oligonucleotide
ccggaagccaaacuugucc

SEQ ID NO: 1291468 - RNA, 19 nt, Artificial Sequence
  Description of Artificial Sequence: Synthetic oligonucleotide
cacgucaggacaggguggg

SEQ ID NO: 1291469 - RNA, 19 nt, Artificial Sequence
  Description of Artificial Sequence: Synthetic oligonucleotide
gcgguagcggccuauccgg

SEQ ID NO: 1291470 - RNA, 19 nt, Artificial Sequence
  Description of Artificial Sequence: Synthetic oligonucleotide
ugacaugggucgcccgaug

SEQ ID NO: 1291471 - RNA, 19 nt, Artificial Sequence
  Description of Artificial Sequence: Synthetic oligonucleotide
guagguggugcucccggug

SEQ ID NO: 1291472 - RNA, 19 nt, Artificial Sequence
  Description of Artificial Sequence: Synthetic oligonucleotide
auaguggagccaauagcgu

SEQ ID NO: 1291473 - RNA, 19 nt, Artificial Sequence
  Description of Artificial Sequence: Synthetic oligonucleotide
cccuaggggacucaagggg

SEQ ID NO: 1291474 - RNA, 19 nt, Artificial Sequence
  Description of Artificial Sequence: Synthetic oligonucleotide
uggcacgucaggacagggu

SEQ ID NO: 1291475 - RNA, 19 nt, Artificial Sequence
  Description of Artificial Sequence: Synthetic oligonucleotide
gguugaaggucuccucacc

SEQ ID NO: 1291476 - RNA, 19 nt, Artificial Sequence
  Description of Artificial Sequence: Synthetic oligonucleotide
uacucaggcccgacacacc

SEQ ID NO: 1291477 - RNA, 19 nt, Artificial Sequence
  Description of Artificial Sequence: Synthetic oligonucleotide
guggcuaaccaaagcuugc

SEQ ID NO: 1291478 - RNA, 19 nt, Artificial Sequence
  Description of Artificial Sequence: Synthetic oligonucleotide
uaacggccucccaggagca

SEQ ID NO: 1291479 - RNA, 19 nt, Artificial Sequence
  Description of Artificial Sequence: Synthetic oligonucleotide
gucaccacaacgguacaga

SEQ ID NO: 1291480 - RNA, 19 nt, Artificial Sequence
  Description of Artificial Sequence: Synthetic oligonucleotide
ucugggcgugagaucuuca

SEQ ID NO: 1291481 - RNA, 19 nt, Artificial Sequence
  Description of Artificial Sequence: Synthetic oligonucleotide
gacaucugggcgugagauc

SEQ ID NO: 1291482 - RNA, 19 nt, Artificial Sequence
  Description of Artificial Sequence: Synthetic oligonucleotide
cauccauagggaccagguc

SEQ ID NO: 1291483 - RNA, 19 nt, Artificial Sequence
  Description of Artificial Sequence: Synthetic oligonucleotide
agagaaguggagugaccua

SEQ ID NO: 1291484 - RNA, 19 nt, Artificial Sequence
  Description of Artificial Sequence: Synthetic oligonucleotide
ucaacauggggugcagaua

SEQ ID NO: 1291485 - RNA, 19 nt, Artificial Sequence
  Description of Artificial Sequence: Synthetic oligonucleotide
aucugggcgugagaucuuc

SEQ ID NO: 1291486 - RNA, 19 nt, Artificial Sequence
  Description of Artificial Sequence: Synthetic oligonucleotide
gucuuugaagacccucaga

SEQ ID NO: 1291487 - RNA, 19 nt, Artificial Sequence
  Description of Artificial Sequence: Synthetic oligonucleotide
caugacaugggucgcccga

SEQ ID NO: 1291488 - RNA, 19 nt, Artificial Sequence
  Description of Artificial Sequence: Synthetic oligonucleotide
ccuuacucaggcccgacac

SEQ ID NO: 1291489 - RNA, 19 nt, Artificial Sequence
  Description of Artificial Sequence: Synthetic oligonucleotide
uugggcucguuauguuugu

SEQ ID NO: 1291490 - RNA, 19 nt, Artificial Sequence
  Description of Artificial Sequence: Synthetic oligonucleotide
guauaacggccucccagga

SEQ ID NO: 1291491 - RNA, 19 nt, Artificial Sequence
  Description of Artificial Sequence: Synthetic oligonucleotide
caacccuaacagugaggag

SEQ ID NO: 1291492 - RNA, 19 nt, Artificial Sequence
  Description of Artificial Sequence: Synthetic oligonucleotide
guagcggccuauccggaca

SEQ ID NO: 1291493 - RNA, 19 nt, Artificial Sequence
  Description of Artificial Sequence: Synthetic oligonucleotide
gcgauggcaaaguggcggg

SEQ ID NO: 1291494 - RNA, 19 nt, Artificial Sequence
  Description of Artificial Sequence: Synthetic oligonucleotide
caacgguacagauugcggu

SEQ ID NO: 1291495 - RNA, 19 nt, Artificial Sequence
  Description of Artificial Sequence: Synthetic oligonucleotide
agauaccguagcgcagccg

SEQ ID NO: 1291496 - RNA, 19 nt, Artificial Sequence
  Description of Artificial Sequence: Synthetic oligonucleotide
gucccggucaugcuugauc

SEQ ID NO: 1291497 - RNA, 19 nt, Artificial Sequence
  Description of Artificial Sequence: Synthetic oligonucleotide
agugccucuaggaagccua

SEQ ID NO: 1291498 - RNA, 19 nt, Artificial Sequence
  Description of Artificial Sequence: Synthetic oligonucleotide
acccuaacagugaggaggu

SEQ ID NO: 1291499 - RNA, 19 nt, Artificial Sequence
  Description of Artificial Sequence: Synthetic oligonucleotide
guggagccaauagcguagg

SEQ ID NO: 1291500 - RNA, 19 nt, Artificial Sequence
  Description of Artificial Sequence: Synthetic oligonucleotide
acggccucccaggagcacg

SEQ ID NO: 1291501 - RNA, 19 nt, Artificial Sequence
  Description of Artificial Sequence: Synthetic oligonucleotide
acgguacagauugcgguca

SEQ ID NO: 1291502 - RNA, 19 nt, Artificial Sequence
  Description of Artificial Sequence: Synthetic oligonucleotide
auccaaugccaucccacuu

SEQ ID NO: 1291503 - RNA, 19 nt, Artificial Sequence
  Description of Artificial Sequence: Synthetic oligonucleotide
cacuccgcgaggcagugca

SEQ ID NO: 1291504 - RNA, 19 nt, Artificial Sequence
  Description of Artificial Sequence: Synthetic oligonucleotide
aaccacggacugauccaag

SEQ ID NO: 1291505 - RNA, 19 nt, Artificial Sequence
  Description of Artificial Sequence: Synthetic oligonucleotide
gauccaagccccaccuguc

SEQ ID NO: 1291506 - RNA, 19 nt, Artificial Sequence
  Description of Artificial Sequence: Synthetic oligonucleotide
cuuacucaggcccgacaca

SEQ ID NO: 1291507 - RNA, 19 nt, Artificial Sequence
  Description of Artificial Sequence: Synthetic oligonucleotide
uggucaccacaacgguaca

SEQ ID NO: 1291508 - RNA, 19 nt, Artificial Sequence
  Description of Artificial Sequence: Synthetic oligonucleotide
auccgguugaagaugucau

SEQ ID NO: 1291509 - RNA, 19 nt, Artificial Sequence
  Description of Artificial Sequence: Synthetic oligonucleotide
gcccuaggggacucaaggg

SEQ ID NO: 1291510 - RNA, 19 nt, Artificial Sequence
  Description of Artificial Sequence: Synthetic oligonucleotide
gugguguauaacggccucc

SEQ ID NO: 1291511 - RNA, 19 nt, Artificial Sequence
  Description of Artificial Sequence: Synthetic oligonucleotide
uaccguagcgcagccgcug

SEQ ID NO: 1291512 - RNA, 19 nt, Artificial Sequence
  Description of Artificial Sequence: Synthetic oligonucleotide
augggugaggugaacucga

SEQ ID NO: 1291513 - RNA, 19 nt, Artificial Sequence
  Description of Artificial Sequence: Synthetic oligonucleotide
cuaggccgucuuugaagac

SEQ ID NO: 1291514 - RNA, 19 nt, Artificial Sequence
  Description of Artificial Sequence: Synthetic oligonucleotide
acuaaaccucugaggguug

SEQ ID NO: 1291515 - RNA, 19 nt, Artificial Sequence
  Description of Artificial Sequence: Synthetic oligonucleotide
ccuggaagcaugagggauc

SEQ ID NO: 1291516 - RNA, 19 nt, Artificial Sequence
  Description of Artificial Sequence: Synthetic oligonucleotide
ggcgugagaucuucauccc

SEQ ID NO: 1291517 - RNA, 19 nt, Artificial Sequence
  Description of Artificial Sequence: Synthetic oligonucleotide
cucagaaacugggccuuac

SEQ ID NO: 1291518 - RNA, 19 nt, Artificial Sequence
  Description of Artificial Sequence: Synthetic oligonucleotide
uagcuagcauagggcagcc

SEQ ID NO: 1291519 - RNA, 19 nt, Artificial Sequence
  Description of Artificial Sequence: Synthetic oligonucleotide
gggaugacuggagcugugg

SEQ ID NO: 1291520 - RNA, 19 nt, Artificial Sequence
  Description of Artificial Sequence: Synthetic oligonucleotide
gaaccacggacugauccaa

SEQ ID NO: 1291521 - RNA, 19 nt, Artificial Sequence
  Description of Artificial Sequence: Synthetic oligonucleotide
uggagccaauagcguaggu

SEQ ID NO: 1291522 - RNA, 19 nt, Artificial Sequence
  Description of Artificial Sequence: Synthetic oligonucleotide
ucguuauguuugucccggu

SEQ ID NO: 1291523 - RNA, 19 nt, Artificial Sequence
  Description of Artificial Sequence: Synthetic oligonucleotide
gugucuaaaggggaugaua

SEQ ID NO: 1291524 - RNA, 19 nt, Artificial Sequence
  Description of Artificial Sequence: Synthetic oligonucleotide
cucaacauggggugcagau

SEQ ID NO: 1291525 - RNA, 19 nt, Artificial Sequence
  Description of Artificial Sequence: Synthetic oligonucleotide
cucaccgugcugguugaug

SEQ ID NO: 1291526 - RNA, 19 nt, Artificial Sequence
  Description of Artificial Sequence: Synthetic oligonucleotide
gacaugggucgcccgaugu

SEQ ID NO: 1291527 - RNA, 19 nt, Artificial Sequence
  Description of Artificial Sequence: Synthetic oligonucleotide
guaccgcagcgauccaaug

SEQ ID NO: 1291528 - RNA, 19 nt, Artificial Sequence
  Description of Artificial Sequence: Synthetic oligonucleotide
cccacacaaguuucugugc

SEQ ID NO: 1291529 - RNA, 19 nt, Artificial Sequence
  Description of Artificial Sequence: Synthetic oligonucleotide
cuuccgccuccucucuaag

SEQ ID NO: 1291530 - RNA, 19 nt, Artificial Sequence
  Description of Artificial Sequence: Synthetic oligonucleotide
agccggaagccaaacuugu

SEQ ID NO: 1291531 - RNA, 19 nt, Artificial Sequence
  Description of Artificial Sequence: Synthetic oligonucleotide
gccgagacacuuccaagac

SEQ ID NO: 1291532 - RNA, 19 nt, Artificial Sequence
  Description of Artificial Sequence: Synthetic oligonucleotide
ggugguguauaacggccuc

SEQ ID NO: 1291533 - RNA, 19 nt, Artificial Sequence
  Description of Artificial Sequence: Synthetic oligonucleotide
gagguuagggcuggaggaa

SEQ ID NO: 1291534 - RNA, 19 nt, Artificial Sequence
  Description of Artificial Sequence: Synthetic oligonucleotide
aggugguguauaacggccu

SEQ ID NO: 1291535 - RNA, 19 nt, Artificial Sequence
  Description of Artificial Sequence: Synthetic oligonucleotide
gugcagauaguggagccaa

SEQ ID NO: 1291536 - RNA, 19 nt, Artificial Sequence
  Description of Artificial Sequence: Synthetic oligonucleotide
ccaagacucgguaccgcag

SEQ ID NO: 1291537 - RNA, 19 nt, Artificial Sequence
  Description of Artificial Sequence: Synthetic oligonucleotide
ugcacccgcuccagaggca

SEQ ID NO: 1291538 - RNA, 19 nt, Artificial Sequence
  Description of Artificial Sequence: Synthetic oligonucleotide
gcguagguggugcucccgg

SEQ ID NO: 1291539 - RNA, 19 nt, Artificial Sequence
  Description of Artificial Sequence: Synthetic oligonucleotide
guggcacgucaggacaggg

SEQ ID NO: 1291540 - RNA, 19 nt, Artificial Sequence
  Description of Artificial Sequence: Synthetic oligonucleotide
gcaugggugaggugaacuc

SEQ ID NO: 1291541 - RNA, 19 nt, Artificial Sequence
  Description of Artificial Sequence: Synthetic oligonucleotide
gcccgacacaccuccaaag

SEQ ID NO: 1291542 - RNA, 19 nt, Artificial Sequence
  Description of Artificial Sequence: Synthetic oligonucleotide
cugauccaagccccaccug

SEQ ID NO: 1291543 - RNA, 19 nt, Artificial Sequence
  Description of Artificial Sequence: Synthetic oligonucleotide
gugcucccggugucuaaag

SEQ ID NO: 1291544 - RNA, 19 nt, Artificial Sequence
  Description of Artificial Sequence: Synthetic oligonucleotide
agguggcuaaccaaagcuu

SEQ ID NO: 1291545 - RNA, 19 nt, Artificial Sequence
  Description of Artificial Sequence: Synthetic oligonucleotide
cgauccaaugccaucccac

SEQ ID NO: 1291546 - RNA, 19 nt, Artificial Sequence
  Description of Artificial Sequence: Synthetic oligonucleotide
gccuauccggacaucuggg

SEQ ID NO: 1291547 - RNA, 19 nt, Artificial Sequence
  Description of Artificial Sequence: Synthetic oligonucleotide
gacucgguaccgcagcgau

SEQ ID NO: 1291548 - RNA, 19 nt, Artificial Sequence
  Description of Artificial Sequence: Synthetic oligonucleotide
ggucaccacaacgguacag

SEQ ID NO: 1291549 - RNA, 19 nt, Artificial Sequence
  Description of Artificial Sequence: Synthetic oligonucleotide
gggugaggugaacucgaug

SEQ ID NO: 1291550 - RNA, 19 nt, Artificial Sequence
  Description of Artificial Sequence: Synthetic oligonucleotide
gagccaugacaugggucgc

SEQ ID NO: 1291551 - RNA, 19 nt, Artificial Sequence
  Description of Artificial Sequence: Synthetic oligonucleotide
caccgugcugguugaugac

SEQ ID NO: 1291552 - RNA, 19 nt, Artificial Sequence
  Description of Artificial Sequence: Synthetic oligonucleotide
agcccaacccuaacaguga

SEQ ID NO: 1291553 - RNA, 19 nt, Artificial Sequence
  Description of Artificial Sequence: Synthetic oligonucleotide
agcuagcauagggcagccg

SEQ ID NO: 1291554 - RNA, 19 nt, Artificial Sequence
  Description of Artificial Sequence: Synthetic oligonucleotide
ggcuagcccaacccuaaca

SEQ ID NO: 1291555 - RNA, 19 nt, Artificial Sequence
  Description of Artificial Sequence: Synthetic oligonucleotide
gcccaacccuaacagugag

SEQ ID NO: 1291556 - RNA, 19 nt, Artificial Sequence
  Description of Artificial Sequence: Synthetic oligonucleotide
gccaauagcguagguggug

SEQ ID NO: 1291557 - RNA, 19 nt, Artificial Sequence
  Description of Artificial Sequence: Synthetic oligonucleotide
acgccuggguucucccucu

SEQ ID NO: 1291558 - RNA, 19 nt, Artificial Sequence
  Description of Artificial Sequence: Synthetic oligonucleotide
aggauuggccucagagaga

SEQ ID NO: 1291559 - RNA, 19 nt, Artificial Sequence
  Description of Artificial Sequence: Synthetic oligonucleotide
guuugucccggucaugcuu

SEQ ID NO: 1291560 - RNA, 19 nt, Artificial Sequence
  Description of Artificial Sequence: Synthetic oligonucleotide
gagcacgccuggguucucc

SEQ ID NO: 1291561 - RNA, 19 nt, Artificial Sequence
  Description of Artificial Sequence: Synthetic oligonucleotide
gguagcggccuauccggac

SEQ ID NO: 1291562 - RNA, 19 nt, Artificial Sequence
  Description of Artificial Sequence: Synthetic oligonucleotide
aggcaugggugaggugaac

SEQ ID NO: 1291563 - RNA, 19 nt, Artificial Sequence
  Description of Artificial Sequence: Synthetic oligonucleotide
agauccgguugaagauguc

SEQ ID NO: 1291564 - RNA, 19 nt, Artificial Sequence
  Description of Artificial Sequence: Synthetic oligonucleotide
acucgguaccgcagcgauc

SEQ ID NO: 1291565 - RNA, 19 nt, Artificial Sequence
  Description of Artificial Sequence: Synthetic oligonucleotide
augacaugggucgcccgau

SEQ ID NO: 1291566 - RNA, 19 nt, Artificial Sequence
  Description of Artificial Sequence: Synthetic oligonucleotide
agccaauagcguagguggu

SEQ ID NO: 1291567 - RNA, 19 nt, Artificial Sequence
  Description of Artificial Sequence: Synthetic oligonucleotide
caaaguggcggggcugguc

SEQ ID NO: 1291568 - RNA, 19 nt, Artificial Sequence
  Description of Artificial Sequence: Synthetic oligonucleotide
agcaccccuucuggucccc

SEQ ID NO: 1291569 - RNA, 19 nt, Artificial Sequence
  Description of Artificial Sequence: Synthetic oligonucleotide
cagcaccccuucugguccc

SEQ ID NO: 1291570 - RNA, 19 nt, Artificial Sequence
  Description of Artificial Sequence: Synthetic oligonucleotide
agguuuccccuccccugga

SEQ ID NO: 1291571 - RNA, 19 nt, Artificial Sequence
  Description of Artificial Sequence: Synthetic oligonucleotide
agacucgguaccgcagcga

SEQ ID NO: 1291572 - RNA, 19 nt, Artificial Sequence
  Description of Artificial Sequence: Synthetic oligonucleotide
auggagggccuuuguccau

SEQ ID NO: 1291573 - RNA, 19 nt, Artificial Sequence
  Description of Artificial Sequence: Synthetic oligonucleotide
cuagcccaacccuaacagu

SEQ ID NO: 1291574 - RNA, 19 nt, Artificial Sequence
  Description of Artificial Sequence: Synthetic oligonucleotide
aguuucugugcaacauaua

SEQ ID NO: 1291575 - RNA, 19 nt, Artificial Sequence
  Description of Artificial Sequence: Synthetic oligonucleotide
gcacgucaggacagggugg

SEQ ID NO: 1291576 - RNA, 19 nt, Artificial Sequence
  Description of Artificial Sequence: Synthetic oligonucleotide
ggcaaaccuccacaucaga

SEQ ID NO: 1291577 - RNA, 19 nt, Artificial Sequence
  Description of Artificial Sequence: Synthetic oligonucleotide
ggucgcccgauguccacug

SEQ ID NO: 1291578 - RNA, 19 nt, Artificial Sequence
  Description of Artificial Sequence: Synthetic oligonucleotide
ugggucgcccgauguccac

SEQ ID NO: 1291579 - RNA, 19 nt, Artificial Sequence
  Description of Artificial Sequence: Synthetic oligonucleotide
cccaugcaaaggccaaccc

SEQ ID NO: 1291580 - RNA, 19 nt, Artificial Sequence
  Description of Artificial Sequence: Synthetic oligonucleotide
ccgucuuugaagacccuca

SEQ ID NO: 1291581 - RNA, 19 nt, Artificial Sequence
  Description of Artificial Sequence: Synthetic oligonucleotide
ccacucggcccacaagacc

SEQ ID NO: 1291582 - RNA, 19 nt, Artificial Sequence
  Description of Artificial Sequence: Synthetic oligonucleotide
agcccaggccacuccgcga

SEQ ID NO: 1291583 - RNA, 19 nt, Artificial Sequence
  Description of Artificial Sequence: Synthetic oligonucleotide
cccuaagucaauccuccca

SEQ ID NO: 1291584 - RNA, 19 nt, Artificial Sequence
  Description of Artificial Sequence: Synthetic oligonucleotide
caaccccaugaucccagga

SEQ ID NO: 1291585 - RNA, 19 nt, Artificial Sequence
  Description of Artificial Sequence: Synthetic oligonucleotide
cauagggaccagguccaca

SEQ ID NO: 1291586 - RNA, 19 nt, Artificial Sequence
  Description of Artificial Sequence: Synthetic oligonucleotide
ucaugcgguagcggccuau

SEQ ID NO: 1291587 - RNA, 19 nt, Artificial Sequence
  Description of Artificial Sequence: Synthetic oligonucleotide
gguguauaacggccuccca

SEQ ID NO: 1291588 - RNA, 19 nt, Artificial Sequence
  Description of Artificial Sequence: Synthetic oligonucleotide
cugaggguugggcucguua

SEQ ID NO: 1291589 - RNA, 19 nt, Artificial Sequence
  Description of Artificial Sequence: Synthetic oligonucleotide
gauuggccucagagagagc

SEQ ID NO: 1291590 - RNA, 19 nt, Artificial Sequence
  Description of Artificial Sequence: Synthetic oligonucleotide
ccucaguagguggcuaacc

SEQ ID NO: 1291591 - RNA, 19 nt, Artificial Sequence
  Description of Artificial Sequence: Synthetic oligonucleotide
uggugcucccggugucuaa

SEQ ID NO: 1291592 - RNA, 19 nt, Artificial Sequence
  Description of Artificial Sequence: Synthetic oligonucleotide
gcaggcaaaccuccacauc

SEQ ID NO: 1291593 - RNA, 19 nt, Artificial Sequence
  Description of Artificial Sequence: Synthetic oligonucleotide
gccaaccccaugaucccag

SEQ ID NO: 1291594 - RNA, 19 nt, Artificial Sequence
  Description of Artificial Sequence: Synthetic oligonucleotide
ccaugacaugggucgcccg

SEQ ID NO: 1291595 - RNA, 19 nt, Artificial Sequence
  Description of Artificial Sequence: Synthetic oligonucleotide
acucguuaggaaagccguu

SEQ ID NO: 1291596 - RNA, 19 nt, Artificial Sequence
  Description of Artificial Sequence: Synthetic oligonucleotide
ccaaccccaugaucccagg

SEQ ID NO: 1291597 - RNA, 19 nt, Artificial Sequence
  Description of Artificial Sequence: Synthetic oligonucleotide
ggggaugauaacugccacu

SEQ ID NO: 1291598 - RNA, 19 nt, Artificial Sequence
  Description of Artificial Sequence: Synthetic oligonucleotide
ccuaacagugaggagguua

SEQ ID NO: 1291599 - RNA, 19 nt, Artificial Sequence
  Description of Artificial Sequence: Synthetic oligonucleotide
cgcgaggcagugcaggggc

SEQ ID NO: 1291600 - RNA, 19 nt, Artificial Sequence
  Description of Artificial Sequence: Synthetic oligonucleotide
cguuauguuugucccgguc

SEQ ID NO: 1291601 - RNA, 19 nt, Artificial Sequence
  Description of Artificial Sequence: Synthetic oligonucleotide
gccauaagaggggcuugcc

SEQ ID NO: 1291602 - RNA, 19 nt, Artificial Sequence
  Description of Artificial Sequence: Synthetic oligonucleotide
cagaggcaugggugaggug

SEQ ID NO: 1291603 - RNA, 19 nt, Artificial Sequence
  Description of Artificial Sequence: Synthetic oligonucleotide
ccaaugccaucccacuuca

SEQ ID NO: 1291604 - RNA, 19 nt, Artificial Sequence
  Description of Artificial Sequence: Synthetic oligonucleotide
ccgguugaaggucuccuca

SEQ ID NO: 1291605 - RNA, 19 nt, Artificial Sequence
  Description of Artificial Sequence: Synthetic oligonucleotide
auaccguagcgcagccgcu

SEQ ID NO: 1291606 - RNA, 19 nt, Artificial Sequence
  Description of Artificial Sequence: Synthetic oligonucleotide
augggucgcccgaugucca

SEQ ID NO: 1291607 - RNA, 19 nt, Artificial Sequence
  Description of Artificial Sequence: Synthetic oligonucleotide
ggacaucugggcgugagau

SEQ ID NO: 1291608 - RNA, 19 nt, Artificial Sequence
  Description of Artificial Sequence: Synthetic oligonucleotide
gugccucuaggaagccuac

SEQ ID NO: 1291609 - RNA, 19 nt, Artificial Sequence
  Description of Artificial Sequence: Synthetic oligonucleotide
ccccuaagucaauccuccc

SEQ ID NO: 1291610 - RNA, 19 nt, Artificial Sequence
  Description of Artificial Sequence: Synthetic oligonucleotide
aggggcuagcccaacccua

SEQ ID NO: 1291611 - RNA, 19 nt, Artificial Sequence
  Description of Artificial Sequence: Synthetic oligonucleotide
gccccaguacucguuagga

SEQ ID NO: 1291612 - RNA, 19 nt, Artificial Sequence
  Description of Artificial Sequence: Synthetic oligonucleotide
gccgucuuugaagacccuc

SEQ ID NO: 1291613 - RNA, 19 nt, Artificial Sequence
  Description of Artificial Sequence: Synthetic oligonucleotide
ggacugauccaagccccac

SEQ ID NO: 1291614 - RNA, 19 nt, Artificial Sequence
  Description of Artificial Sequence: Synthetic oligonucleotide
agcggccuauccggacauc

SEQ ID NO: 1291615 - RNA, 19 nt, Artificial Sequence
  Description of Artificial Sequence: Synthetic oligonucleotide
ggcaggcaaaccuccacau

SEQ ID NO: 1291616 - RNA, 19 nt, Artificial Sequence
  Description of Artificial Sequence: Synthetic oligonucleotide
ccacaacgguacagauugc

SEQ ID NO: 1291617 - RNA, 19 nt, Artificial Sequence
  Description of Artificial Sequence: Synthetic oligonucleotide
gguacagauugcggucauc

SEQ ID NO: 1291618 - RNA, 19 nt, Artificial Sequence
  Description of Artificial Sequence: Synthetic oligonucleotide
acuccgcgaggcagugcag

SEQ ID NO: 1291619 - RNA, 19 nt, Artificial Sequence
  Description of Artificial Sequence: Synthetic oligonucleotide
ugucccggucaugcuugau

SEQ ID NO: 1291620 - RNA, 19 nt, Artificial Sequence
  Description of Artificial Sequence: Synthetic oligonucleotide
ggcaugggugaggugaacu

SEQ ID NO: 1291621 - RNA, 19 nt, Artificial Sequence
  Description of Artificial Sequence: Synthetic oligonucleotide
aucaugcgguagcggccua

SEQ ID NO: 1291622 - RNA, 19 nt, Artificial Sequence
  Description of Artificial Sequence: Synthetic oligonucleotide
ccggugucuaaaggggaug

SEQ ID NO: 1291623 - RNA, 19 nt, Artificial Sequence
  Description of Artificial Sequence: Synthetic oligonucleotide
gggcuagcccaacccuaac

SEQ ID NO: 1291624 - RNA, 19 nt, Artificial Sequence
  Description of Artificial Sequence: Synthetic oligonucleotide
ccggacaucugggcgugag

SEQ ID NO: 1291625 - RNA, 19 nt, Artificial Sequence
  Description of Artificial Sequence: Synthetic oligonucleotide
gcgcuccucaguagguggc

SEQ ID NO: 1291626 - RNA, 19 nt, Artificial Sequence
  Description of Artificial Sequence: Synthetic oligonucleotide
gcuggucaccacaacggua

SEQ ID NO: 1291627 - RNA, 19 nt, Artificial Sequence
  Description of Artificial Sequence: Synthetic oligonucleotide
ggcuguaguucaguccucu

SEQ ID NO: 1291628 - RNA, 19 nt, Artificial Sequence
  Description of Artificial Sequence: Synthetic oligonucleotide
gguaccgcagcgauccaau

SEQ ID NO: 1291629 - RNA, 19 nt, Artificial Sequence
  Description of Artificial Sequence: Synthetic oligonucleotide
uccggacaucugggcguga

SEQ ID NO: 1291630 - RNA, 19 nt, Artificial Sequence
  Description of Artificial Sequence: Synthetic oligonucleotide
ggggcuagcccaacccuaa

SEQ ID NO: 1291631 - RNA, 19 nt, Artificial Sequence
  Description of Artificial Sequence: Synthetic oligonucleotide
gguuagggcuggaggaagu

SEQ ID NO: 1291632 - RNA, 19 nt, Artificial Sequence
  Description of Artificial Sequence: Synthetic oligonucleotide
gcucagcuuuguguuuuga

SEQ ID NO: 1291633 - RNA, 19 nt, Artificial Sequence
  Description of Artificial Sequence: Synthetic oligonucleotide
gccggaagccaaacuuguc

SEQ ID NO: 1291634 - RNA, 19 nt, Artificial Sequence
  Description of Artificial Sequence: Synthetic oligonucleotide
ccgcgaggcagugcagggg

SEQ ID NO: 1291635 - RNA, 19 nt, Artificial Sequence
  Description of Artificial Sequence: Synthetic oligonucleotide
cccgacacaccuccaaagu

SEQ ID NO: 1291636 - RNA, 19 nt, Artificial Sequence
  Description of Artificial Sequence: Synthetic oligonucleotide
ggagggccuuuguccauua

SEQ ID NO: 1291637 - RNA, 19 nt, Artificial Sequence
  Description of Artificial Sequence: Synthetic oligonucleotide
gccacuccgcgaggcagug

SEQ ID NO: 1291638 - RNA, 19 nt, Artificial Sequence
  Description of Artificial Sequence: Synthetic oligonucleotide
cggccuauccggacaucug

SEQ ID NO: 1291639 - RNA, 19 nt, Artificial Sequence
  Description of Artificial Sequence: Synthetic oligonucleotide
guggugcucccggugucua

SEQ ID NO: 1291640 - RNA, 19 nt, Artificial Sequence
  Description of Artificial Sequence: Synthetic oligonucleotide
gcggccuauccggacaucu

SEQ ID NO: 1291641 - RNA, 19 nt, Artificial Sequence
  Description of Artificial Sequence: Synthetic oligonucleotide
ccgccuccucucuaaggca

SEQ ID NO: 1291642 - RNA, 19 nt, Artificial Sequence
  Description of Artificial Sequence: Synthetic oligonucleotide
ggugucuaaaggggaugau

SEQ ID NO: 1291643 - RNA, 19 nt, Artificial Sequence
  Description of Artificial Sequence: Synthetic oligonucleotide
ccgccucaacauggggugc

SEQ ID NO: 1291644 - RNA, 19 nt, Artificial Sequence
  Description of Artificial Sequence: Synthetic oligonucleotide
gguggugcucccggugucu

SEQ ID NO: 1291645 - RNA, 19 nt, Artificial Sequence
  Description of Artificial Sequence: Synthetic oligonucleotide
ccauagggaccagguccac

SEQ ID NO: 1291646 - RNA, 19 nt, Artificial Sequence
  Description of Artificial Sequence: Synthetic oligonucleotide
ccgcugccgccucaacaug

SEQ ID NO: 1291647 - RNA, 19 nt, Artificial Sequence
  Description of Artificial Sequence: Synthetic oligonucleotide
ccgcagcgauccaaugcca

SEQ ID NO: 1291648 - RNA, 19 nt, Artificial Sequence
  Description of Artificial Sequence: Synthetic oligonucleotide
gucgcccgauguccacugu

SEQ ID NO: 1291649 - RNA, 19 nt, Artificial Sequence
  Description of Artificial Sequence: Synthetic oligonucleotide
gggccuuacucaggcccga

SEQ ID NO: 1291650 - RNA, 19 nt, Artificial Sequence
  Description of Artificial Sequence: Synthetic oligonucleotide
cccggugucuaaaggggau

SEQ ID NO: 1291651 - RNA, 19 nt, Artificial Sequence
  Description of Artificial Sequence: Synthetic oligonucleotide
cggacugauccaagcccca

SEQ ID NO: 1291652 - RNA, 19 nt, Artificial Sequence
  Description of Artificial Sequence: Synthetic oligonucleotide
ccucaacauggggugcaga

SEQ ID NO: 1291653 - RNA, 19 nt, Artificial Sequence
  Description of Artificial Sequence: Synthetic oligonucleotide
ggguugggcucguuauguu

SEQ ID NO: 1291654 - RNA, 19 nt, Artificial Sequence
  Description of Artificial Sequence: Synthetic oligonucleotide
caucugggcgugagaucuu

SEQ ID NO: 1291655 - RNA, 19 nt, Artificial Sequence
  Description of Artificial Sequence: Synthetic oligonucleotide
ccccucaaaguggguucug

SEQ ID NO: 1291656 - RNA, 19 nt, Artificial Sequence
  Description of Artificial Sequence: Synthetic oligonucleotide
ccacuccgcgaggcagugc

SEQ ID NO: 1291657 - RNA, 19 nt, Artificial Sequence
  Description of Artificial Sequence: Synthetic oligonucleotide
cggacaucugggcgugaga

SEQ ID NO: 1291658 - RNA, 19 nt, Artificial Sequence
  Description of Artificial Sequence: Synthetic oligonucleotide
gcacccgcuccagaggcau

SEQ ID NO: 1291659 - RNA, 19 nt, Artificial Sequence
  Description of Artificial Sequence: Synthetic oligonucleotide
cgccucaacauggggugca

SEQ ID NO: 1291660 - RNA, 19 nt, Artificial Sequence
  Description of Artificial Sequence: Synthetic oligonucleotide
gggucgcccgauguccacu

SEQ ID NO: 1291661 - RNA, 19 nt, Artificial Sequence
  Description of Artificial Sequence: Synthetic oligonucleotide
ggccacuccgcgaggcagu

SEQ ID NO: 1291662 - RNA, 19 nt, Artificial Sequence
  Description of Artificial Sequence: Synthetic oligonucleotide
cgguagcggccuauccgga

SEQ ID NO: 1291663 - RNA, 19 nt, Artificial Sequence
  Description of Artificial Sequence: Synthetic oligonucleotide
ggagcacgccuggguucuc

SEQ ID NO: 1291664 - RNA, 19 nt, Artificial Sequence
  Description of Artificial Sequence: Synthetic oligonucleotide
cucugaggguugggcucgu

SEQ ID NO: 1291665 - RNA, 19 nt, Artificial Sequence
  Description of Artificial Sequence: Synthetic oligonucleotide
ccucagaaacugggccuua

SEQ ID NO: 1291666 - RNA, 19 nt, Artificial Sequence
  Description of Artificial Sequence: Synthetic oligonucleotide
gcaccccuucugguccccu

SEQ ID NO: 1291667 - RNA, 19 nt, Artificial Sequence
  Description of Artificial Sequence: Synthetic oligonucleotide
cgguacagauugcggucau

SEQ ID NO: 1291668 - RNA, 19 nt, Artificial Sequence
  Description of Artificial Sequence: Synthetic oligonucleotide
cccuaacagugaggagguu

SEQ ID NO: 1291669 - RNA, 19 nt, Artificial Sequence
  Description of Artificial Sequence: Synthetic oligonucleotide
aauagacaggaacaaaucc

SEQ ID NO: 1291670 - RNA, 19 nt, Artificial Sequence
  Description of Artificial Sequence: Synthetic oligonucleotide
ugauaaucaaccauguucc

SEQ ID NO: 1291671 - RNA, 19 nt, Artificial Sequence
  Description of Artificial Sequence: Synthetic oligonucleotide
aguucuuguaaugagaagc

SEQ ID NO: 1291672 - RNA, 19 nt, Artificial Sequence
  Description of Artificial Sequence: Synthetic oligonucleotide
gaugagaugauaaucaacc

SEQ ID NO: 1291673 - RNA, 19 nt, Artificial Sequence
  Description of Artificial Sequence: Synthetic oligonucleotide
guaaugagaagccacauag

SEQ ID NO: 1291674 - RNA, 19 nt, Artificial Sequence
  Description of Artificial Sequence: Synthetic oligonucleotide
accaagguaauccaggcgc

SEQ ID NO: 1291675 - RNA, 19 nt, Artificial Sequence
  Description of Artificial Sequence: Synthetic oligonucleotide
uucaaacuaacgauggagg

SEQ ID NO: 1291676 - RNA, 19 nt, Artificial Sequence
  Description of Artificial Sequence: Synthetic oligonucleotide
aaugccgcaagccaggcuc

SEQ ID NO: 1291677 - RNA, 19 nt, Artificial Sequence
  Description of Artificial Sequence: Synthetic oligonucleotide
uucuggauuauguugagag

SEQ ID NO: 1291678 - RNA, 19 nt, Artificial Sequence
  Description of Artificial Sequence: Synthetic oligonucleotide
ucacuuuucaaacuaacga

SEQ ID NO: 1291679 - RNA, 19 nt, Artificial Sequence
  Description of Artificial Sequence: Synthetic oligonucleotide
auugguaagacagcaaggc

SEQ ID NO: 1291680 - RNA, 19 nt, Artificial Sequence
  Description of Artificial Sequence: Synthetic oligonucleotide
ucucaaauagacaggaaca

SEQ ID NO: 1291681 - RNA, 19 nt, Artificial Sequence
  Description of Artificial Sequence: Synthetic oligonucleotide
cuuuucaaacuaacgaugg

SEQ ID NO: 1291682 - RNA, 19 nt, Artificial Sequence
  Description of Artificial Sequence: Synthetic oligonucleotide
uaaucaaccauguuccgag

SEQ ID NO: 1291683 - RNA, 19 nt, Artificial Sequence
  Description of Artificial Sequence: Synthetic oligonucleotide
aauuuugcauccuuucugu

SEQ ID NO: 1291684 - RNA, 19 nt, Artificial Sequence
  Description of Artificial Sequence: Synthetic oligonucleotide
ugugcuguaggccaauucc

SEQ ID NO: 1291685 - RNA, 19 nt, Artificial Sequence
  Description of Artificial Sequence: Synthetic oligonucleotide
ugaaaagccccauuaacug

SEQ ID NO: 1291686 - RNA, 19 nt, Artificial Sequence
  Description of Artificial Sequence: Synthetic oligonucleotide
aaaagccccauuaacuggc

SEQ ID NO: 1291687 - RNA, 19 nt, Artificial Sequence
  Description of Artificial Sequence: Synthetic oligonucleotide
uuucaaacuaacgauggag

SEQ ID NO: 1291688 - RNA, 19 nt, Artificial Sequence
  Description of Artificial Sequence: Synthetic oligonucleotide
gaguaagggaggcagaucc

SEQ ID NO: 1291689 - RNA, 19 nt, Artificial Sequence
  Description of Artificial Sequence: Synthetic oligonucleotide
acaacuucacaacuuuucg

SEQ ID NO: 1291690 - RNA, 19 nt, Artificial Sequence
  Description of Artificial Sequence: Synthetic oligonucleotide
uugugguagcaaaagagag

SEQ ID NO: 1291691 - RNA, 19 nt, Artificial Sequence
  Description of Artificial Sequence: Synthetic oligonucleotide
uagacaggaacaaauccag

SEQ ID NO: 1291692 - RNA, 19 nt, Artificial Sequence
  Description of Artificial Sequence: Synthetic oligonucleotide
aacuuuucggaugaugcgg

SEQ ID NO: 1291693 - RNA, 19 nt, Artificial Sequence
  Description of Artificial Sequence: Synthetic oligonucleotide
ugguaagacagcaaggcca

SEQ ID NO: 1291694 - RNA, 19 nt, Artificial Sequence
  Description of Artificial Sequence: Synthetic oligonucleotide
ucagcaugaugcaugagug

SEQ ID NO: 1291695 - RNA, 19 nt, Artificial Sequence
  Description of Artificial Sequence: Synthetic oligonucleotide
gaugaugcgguugaaaagc

SEQ ID NO: 1291696 - RNA, 19 nt, Artificial Sequence
  Description of Artificial Sequence: Synthetic oligonucleotide
cucucauucaacuugagga

SEQ ID NO: 1291697 - RNA, 19 nt, Artificial Sequence
  Description of Artificial Sequence: Synthetic oligonucleotide
aucggauugacucuuggag

SEQ ID NO: 1291698 - RNA, 19 nt, Artificial Sequence
  Description of Artificial Sequence: Synthetic oligonucleotide
uuaacuggccggaagggag

SEQ ID NO: 1291699 - RNA, 19 nt, Artificial Sequence
  Description of Artificial Sequence: Synthetic oligonucleotide
cauuaaacaacuucacaac

SEQ ID NO: 1291700 - RNA, 19 nt, Artificial Sequence
  Description of Artificial Sequence: Synthetic oligonucleotide
gagaugauaaucaaccaug

SEQ ID NO: 1291701 - RNA, 19 nt, Artificial Sequence
  Description of Artificial Sequence: Synthetic oligonucleotide
uucagcaugaugcaugagu

SEQ ID NO: 1291702 - RNA, 19 nt, Artificial Sequence
  Description of Artificial Sequence: Synthetic oligonucleotide
aaguacaagcgggaaaugg

SEQ ID NO: 1291703 - RNA, 19 nt, Artificial Sequence
  Description of Artificial Sequence: Synthetic oligonucleotide
ucaaacuaacgauggaggc

SEQ ID NO: 1291704 - RNA, 19 nt, Artificial Sequence
  Description of Artificial Sequence: Synthetic oligonucleotide
ucggauugacucuuggagg

SEQ ID NO: 1291705 - RNA, 19 nt, Artificial Sequence
  Description of Artificial Sequence: Synthetic oligonucleotide
auaggaaacaccaagguaa

SEQ ID NO: 1291706 - RNA, 19 nt, Artificial Sequence
  Description of Artificial Sequence: Synthetic oligonucleotide
aauugguaagacagcaagg

SEQ ID NO: 1291707 - RNA, 19 nt, Artificial Sequence
  Description of Artificial Sequence: Synthetic oligonucleotide
aacgauggaggcauucugc

SEQ ID NO: 1291708 - RNA, 19 nt, Artificial Sequence
  Description of Artificial Sequence: Synthetic oligonucleotide
aagcugacggccucacugc

SEQ ID NO: 1291709 - RNA, 19 nt, Artificial Sequence
  Description of Artificial Sequence: Synthetic oligonucleotide
aacuauucgggugauguug

SEQ ID NO: 1291710 - RNA, 19 nt, Artificial Sequence
  Description of Artificial Sequence: Synthetic oligonucleotide
ugagaugauaaucaaccau

SEQ ID NO: 1291711 - RNA, 19 nt, Artificial Sequence
  Description of Artificial Sequence: Synthetic oligonucleotide
uccugaacaucauuaaaca

SEQ ID NO: 1291712 - RNA, 19 nt, Artificial Sequence
  Description of Artificial Sequence: Synthetic oligonucleotide
aguacaagcgggaaauggc

SEQ ID NO: 1291713 - RNA, 19 nt, Artificial Sequence
  Description of Artificial Sequence: Synthetic oligonucleotide
uccguuucaauuuugcauc

SEQ ID NO: 1291714 - RNA, 19 nt, Artificial Sequence
  Description of Artificial Sequence: Synthetic oligonucleotide
gaauuugaggagucugggg

SEQ ID NO: 1291715 - RNA, 19 nt, Artificial Sequence
  Description of Artificial Sequence: Synthetic oligonucleotide
guuaacauaguagagcuca

SEQ ID NO: 1291716 - RNA, 19 nt, Artificial Sequence
  Description of Artificial Sequence: Synthetic oligonucleotide
ggaggaaaacuucagaggc

SEQ ID NO: 1291717 - RNA, 19 nt, Artificial Sequence
  Description of Artificial Sequence: Synthetic oligonucleotide
uggggucugucucaaauag

SEQ ID NO: 1291718 - RNA, 19 nt, Artificial Sequence
  Description of Artificial Sequence: Synthetic oligonucleotide
gagaguacaucuccagccg

SEQ ID NO: 1291719 - RNA, 19 nt, Artificial Sequence
  Description of Artificial Sequence: Synthetic oligonucleotide
agccgacaugcccagaucc

SEQ ID NO: 1291720 - RNA, 19 nt, Artificial Sequence
  Description of Artificial Sequence: Synthetic oligonucleotide
aaagagaguaucucuguua

SEQ ID NO: 1291721 - RNA, 19 nt, Artificial Sequence
  Description of Artificial Sequence: Synthetic oligonucleotide
aaacuaacgauggaggcau

SEQ ID NO: 1291722 - RNA, 19 nt, Artificial Sequence
  Description of Artificial Sequence: Synthetic oligonucleotide
gagaguaucucuguuaaca

SEQ ID NO: 1291723 - RNA, 19 nt, Artificial Sequence
  Description of Artificial Sequence: Synthetic oligonucleotide
ugugguagcaaaagagagu

SEQ ID NO: 1291724 - RNA, 19 nt, Artificial Sequence
  Description of Artificial Sequence: Synthetic oligonucleotide
uucuugucacuuuucaaac

SEQ ID NO: 1291725 - RNA, 19 nt, Artificial Sequence
  Description of Artificial Sequence: Synthetic oligonucleotide
auuacguacugagagaagu

SEQ ID NO: 1291726 - RNA, 19 nt, Artificial Sequence
  Description of Artificial Sequence: Synthetic oligonucleotide
cuggauuauguugagagac

SEQ ID NO: 1291727 - RNA, 19 nt, Artificial Sequence
  Description of Artificial Sequence: Synthetic oligonucleotide
guucaggaaguacaagcgg

SEQ ID NO: 1291728 - RNA, 19 nt, Artificial Sequence
  Description of Artificial Sequence: Synthetic oligonucleotide
acaagcgggaaauggcugg

SEQ ID NO: 1291729 - RNA, 19 nt, Artificial Sequence
  Description of Artificial Sequence: Synthetic oligonucleotide
uugguaagacagcaaggcc

SEQ ID NO: 1291730 - RNA, 19 nt, Artificial Sequence
  Description of Artificial Sequence: Synthetic oligonucleotide
ggaaacaccaagguaaucc

SEQ ID NO: 1291731 - RNA, 19 nt, Artificial Sequence
  Description of Artificial Sequence: Synthetic oligonucleotide
gaugcgguugaaaagcccc

SEQ ID NO: 1291732 - RNA, 19 nt, Artificial Sequence
  Description of Artificial Sequence: Synthetic oligonucleotide
aggugcaucagaaagcauc

SEQ ID NO: 1291733 - RNA, 19 nt, Artificial Sequence
  Description of Artificial Sequence: Synthetic oligonucleotide
aaggcgcugaauugguaag

SEQ ID NO: 1291734 - RNA, 19 nt, Artificial Sequence
  Description of Artificial Sequence: Synthetic oligonucleotide
uguaggccaauucccaaca

SEQ ID NO: 1291735 - RNA, 19 nt, Artificial Sequence
  Description of Artificial Sequence: Synthetic oligonucleotide
agaauuugaggagucuggg

SEQ ID NO: 1291736 - RNA, 19 nt, Artificial Sequence
  Description of Artificial Sequence: Synthetic oligonucleotide
ugucacuuuucaaacuaac

SEQ ID NO: 1291737 - RNA, 19 nt, Artificial Sequence
  Description of Artificial Sequence: Synthetic oligonucleotide
agucaggucguuugggguc

SEQ ID NO: 1291738 - RNA, 19 nt, Artificial Sequence
  Description of Artificial Sequence: Synthetic oligonucleotide
ucggaaaucuuuccaaaau

SEQ ID NO: 1291739 - RNA, 19 nt, Artificial Sequence
  Description of Artificial Sequence: Synthetic oligonucleotide
ucuucggaaaucuuuccaa

SEQ ID NO: 1291740 - RNA, 19 nt, Artificial Sequence
  Description of Artificial Sequence: Synthetic oligonucleotide
auguugaggcaguccaggc

SEQ ID NO: 1291741 - RNA, 19 nt, Artificial Sequence
  Description of Artificial Sequence: Synthetic oligonucleotide
auagacaggaacaaaucca

SEQ ID NO: 1291742 - RNA, 19 nt, Artificial Sequence
  Description of Artificial Sequence: Synthetic oligonucleotide
auaucggauugacucuugg

SEQ ID NO: 1291743 - RNA, 19 nt, Artificial Sequence
  Description of Artificial Sequence: Synthetic oligonucleotide
uaacgauggaggcauucug

SEQ ID NO: 1291744 - RNA, 19 nt, Artificial Sequence
  Description of Artificial Sequence: Synthetic oligonucleotide
caagcugacggccucacug

SEQ ID NO: 1291745 - RNA, 19 nt, Artificial Sequence
  Description of Artificial Sequence: Synthetic oligonucleotide
ucuuguggugucucaaaga

SEQ ID NO: 1291746 - RNA, 19 nt, Artificial Sequence
  Description of Artificial Sequence: Synthetic oligonucleotide
agacuugugcuguaggcca

SEQ ID NO: 1291747 - RNA, 19 nt, Artificial Sequence
  Description of Artificial Sequence: Synthetic oligonucleotide
uuagcccauaggaaacacc

SEQ ID NO: 1291748 - RNA, 19 nt, Artificial Sequence
  Description of Artificial Sequence: Synthetic oligonucleotide
guucuuguaaugagaagcc

SEQ ID NO: 1291749 - RNA, 19 nt, Artificial Sequence
  Description of Artificial Sequence: Synthetic oligonucleotide
uguaaugagaagccacaua

SEQ ID NO: 1291750 - RNA, 19 nt, Artificial Sequence
  Description of Artificial Sequence: Synthetic oligonucleotide
uguggauuucuuguggugu

SEQ ID NO: 1291751 - RNA, 19 nt, Artificial Sequence
  Description of Artificial Sequence: Synthetic oligonucleotide
uuccuguucuggauuaugu

SEQ ID NO: 1291752 - RNA, 19 nt, Artificial Sequence
  Description of Artificial Sequence: Synthetic oligonucleotide
aacggccagcacuuccggc

SEQ ID NO: 1291753 - RNA, 19 nt, Artificial Sequence
  Description of Artificial Sequence: Synthetic oligonucleotide
cuuguaaugagaagccaca

SEQ ID NO: 1291754 - RNA, 19 nt, Artificial Sequence
  Description of Artificial Sequence: Synthetic oligonucleotide
agccccauuaacuggccgg

SEQ ID NO: 1291755 - RNA, 19 nt, Artificial Sequence
  Description of Artificial Sequence: Synthetic oligonucleotide
ucuggauuauguugagaga

SEQ ID NO: 1291756 - RNA, 19 nt, Artificial Sequence
  Description of Artificial Sequence: Synthetic oligonucleotide
gaaacuauucgggugaugu

SEQ ID NO: 1291757 - RNA, 19 nt, Artificial Sequence
  Description of Artificial Sequence: Synthetic oligonucleotide
uacaagcgggaaauggcug

SEQ ID NO: 1291758 - RNA, 19 nt, Artificial Sequence
  Description of Artificial Sequence: Synthetic oligonucleotide
aauccagcucguuuccaga

SEQ ID NO: 1291759 - RNA, 19 nt, Artificial Sequence
  Description of Artificial Sequence: Synthetic oligonucleotide
ugaauugguaagacagcaa

SEQ ID NO: 1291760 - RNA, 19 nt, Artificial Sequence
  Description of Artificial Sequence: Synthetic oligonucleotide
ucgucuucggaaaucuuuc

SEQ ID NO: 1291761 - RNA, 19 nt, Artificial Sequence
  Description of Artificial Sequence: Synthetic oligonucleotide
ggccauaucggauugacuc

SEQ ID NO: 1291762 - RNA, 19 nt, Artificial Sequence
  Description of Artificial Sequence: Synthetic oligonucleotide
augagaugauaaucaacca

SEQ ID NO: 1291763 - RNA, 19 nt, Artificial Sequence
  Description of Artificial Sequence: Synthetic oligonucleotide
ucauucaacuugaggagua

SEQ ID NO: 1291764 - RNA, 19 nt, Artificial Sequence
  Description of Artificial Sequence: Synthetic oligonucleotide
gugauguugaggcagucca

SEQ ID NO: 1291765 - RNA, 19 nt, Artificial Sequence
  Description of Artificial Sequence: Synthetic oligonucleotide
uuccaaaaugccgcaagcc

SEQ ID NO: 1291766 - RNA, 19 nt, Artificial Sequence
  Description of Artificial Sequence: Synthetic oligonucleotide
gaaacagcgccuccagaug

SEQ ID NO: 1291767 - RNA, 19 nt, Artificial Sequence
  Description of Artificial Sequence: Synthetic oligonucleotide
agagaguaucucuguuaac

SEQ ID NO: 1291768 - RNA, 19 nt, Artificial Sequence
  Description of Artificial Sequence: Synthetic oligonucleotide
uguucuggauuauguugag

SEQ ID NO: 1291769 - RNA, 19 nt, Artificial Sequence
  Description of Artificial Sequence: Synthetic oligonucleotide
gguucaggaaguacaagcg

SEQ ID NO: 1291770 - RNA, 19 nt, Artificial Sequence
  Description of Artificial Sequence: Synthetic oligonucleotide
uuguggugucucaaagacc

SEQ ID NO: 1291771 - RNA, 19 nt, Artificial Sequence
  Description of Artificial Sequence: Synthetic oligonucleotide
uuacguacugagagaaguc

SEQ ID NO: 1291772 - RNA, 19 nt, Artificial Sequence
  Description of Artificial Sequence: Synthetic oligonucleotide
aggccucucauucaacuug

SEQ ID NO: 1291773 - RNA, 19 nt, Artificial Sequence
  Description of Artificial Sequence: Synthetic oligonucleotide
ugcaugaguguucuccagu

SEQ ID NO: 1291774 - RNA, 19 nt, Artificial Sequence
  Description of Artificial Sequence: Synthetic oligonucleotide
aggaaaacuucagaggccu

SEQ ID NO: 1291775 - RNA, 19 nt, Artificial Sequence
  Description of Artificial Sequence: Synthetic oligonucleotide
aguguggauuucuuguggu

SEQ ID NO: 1291776 - RNA, 19 nt, Artificial Sequence
  Description of Artificial Sequence: Synthetic oligonucleotide
uaucggauugacucuugga

SEQ ID NO: 1291777 - RNA, 19 nt, Artificial Sequence
  Description of Artificial Sequence: Synthetic oligonucleotide
gaugcucccggccuagggc

SEQ ID NO: 1291778 - RNA, 19 nt, Artificial Sequence
  Description of Artificial Sequence: Synthetic oligonucleotide
caggucauaggggagaaac

SEQ ID NO: 1291779 - RNA, 19 nt, Artificial Sequence
  Description of Artificial Sequence: Synthetic oligonucleotide
ucaaauagacaggaacaaa

SEQ ID NO: 1291780 - RNA, 19 nt, Artificial Sequence
  Description of Artificial Sequence: Synthetic oligonucleotide
agaaggcacaccuggacaa

SEQ ID NO: 1291781 - RNA, 19 nt, Artificial Sequence
  Description of Artificial Sequence: Synthetic oligonucleotide
aagccccauuaacuggccg

SEQ ID NO: 1291782 - RNA, 19 nt, Artificial Sequence
  Description of Artificial Sequence: Synthetic oligonucleotide
ggagaguucuuguaaugag

SEQ ID NO: 1291783 - RNA, 19 nt, Artificial Sequence
  Description of Artificial Sequence: Synthetic oligonucleotide
auaaucaaccauguuccga

SEQ ID NO: 1291784 - RNA, 19 nt, Artificial Sequence
  Description of Artificial Sequence: Synthetic oligonucleotide
cuguuaacauaguagagcu

SEQ ID NO: 1291785 - RNA, 19 nt, Artificial Sequence
  Description of Artificial Sequence: Synthetic oligonucleotide
uguuaacauaguagagcuc

SEQ ID NO: 1291786 - RNA, 19 nt, Artificial Sequence
  Description of Artificial Sequence: Synthetic oligonucleotide
uguuccgagaguacaucuc

SEQ ID NO: 1291787 - RNA, 19 nt, Artificial Sequence
  Description of Artificial Sequence: Synthetic oligonucleotide
aaucaaccauguuccgaga

SEQ ID NO: 1291788 - RNA, 19 nt, Artificial Sequence
  Description of Artificial Sequence: Synthetic oligonucleotide
ggaaauggcugggauaagg

SEQ ID NO: 1291789 - RNA, 19 nt, Artificial Sequence
  Description of Artificial Sequence: Synthetic oligonucleotide
gacagcaaggccaggaauc

SEQ ID NO: 1291790 - RNA, 19 nt, Artificial Sequence
  Description of Artificial Sequence: Synthetic oligonucleotide
uggacaacggccagcacuu

SEQ ID NO: 1291791 - RNA, 19 nt, Artificial Sequence
  Description of Artificial Sequence: Synthetic oligonucleotide
auugugggcuccaugacca

SEQ ID NO: 1291792 - RNA, 19 nt, Artificial Sequence
  Description of Artificial Sequence: Synthetic oligonucleotide
gacaacggccagcacuucc

SEQ ID NO: 1291793 - RNA, 19 nt, Artificial Sequence
  Description of Artificial Sequence: Synthetic oligonucleotide
aagacgucguuccacucuu

SEQ ID NO: 1291794 - RNA, 19 nt, Artificial Sequence
  Description of Artificial Sequence: Synthetic oligonucleotide
agcuuugcucaagacgucg

SEQ ID NO: 1291795 - RNA, 19 nt, Artificial Sequence
  Description of Artificial Sequence: Synthetic oligonucleotide
cgcugaauugguaagacag

SEQ ID NO: 1291796 - RNA, 19 nt, Artificial Sequence
  Description of Artificial Sequence: Synthetic oligonucleotide
caauucccaacagaagagc

SEQ ID NO: 1291797 - RNA, 19 nt, Artificial Sequence
  Description of Artificial Sequence: Synthetic oligonucleotide
gaggaaaacuucagaggcc

SEQ ID NO: 1291798 - RNA, 19 nt, Artificial Sequence
  Description of Artificial Sequence: Synthetic oligonucleotide
ucauugggagaguucuugu

SEQ ID NO: 1291799 - RNA, 19 nt, Artificial Sequence
  Description of Artificial Sequence: Synthetic oligonucleotide
uaacauaguagagcucaca

SEQ ID NO: 1291800 - RNA, 19 nt, Artificial Sequence
  Description of Artificial Sequence: Synthetic oligonucleotide
auguuccgagaguacaucu

SEQ ID NO: 1291801 - RNA, 19 nt, Artificial Sequence
  Description of Artificial Sequence: Synthetic oligonucleotide
aaacuauucgggugauguu

SEQ ID NO: 1291802 - RNA, 19 nt, Artificial Sequence
  Description of Artificial Sequence: Synthetic oligonucleotide
agaugauaaucaaccaugu

SEQ ID NO: 1291803 - RNA, 19 nt, Artificial Sequence
  Description of Artificial Sequence: Synthetic oligonucleotide
cagacuugugcuguaggcc

SEQ ID NO: 1291804 - RNA, 19 nt, Artificial Sequence
  Description of Artificial Sequence: Synthetic oligonucleotide
aaccauguuccgagaguac

SEQ ID NO: 1291805 - RNA, 19 nt, Artificial Sequence
  Description of Artificial Sequence: Synthetic oligonucleotide
cugaauugguaagacagca

SEQ ID NO: 1291806 - RNA, 19 nt, Artificial Sequence
  Description of Artificial Sequence: Synthetic oligonucleotide
agccagaaacuauucgggu

SEQ ID NO: 1291807 - RNA, 19 nt, Artificial Sequence
  Description of Artificial Sequence: Synthetic oligonucleotide
acaacggccagcacuuccg

SEQ ID NO: 1291808 - RNA, 19 nt, Artificial Sequence
  Description of Artificial Sequence: Synthetic oligonucleotide
gauuacguacugagagaag

SEQ ID NO: 1291809 - RNA, 19 nt, Artificial Sequence
  Description of Artificial Sequence: Synthetic oligonucleotide
uuccgagaguacaucucca

SEQ ID NO: 1291810 - RNA, 19 nt, Artificial Sequence
  Description of Artificial Sequence: Synthetic oligonucleotide
caccaagguaauccaggcg

SEQ ID NO: 1291811 - RNA, 19 nt, Artificial Sequence
  Description of Artificial Sequence: Synthetic oligonucleotide
cacgucuggcaucuccucg

SEQ ID NO: 1291812 - RNA, 19 nt, Artificial Sequence
  Description of Artificial Sequence: Synthetic oligonucleotide
uugugcuguaggccaauuc

SEQ ID NO: 1291813 - RNA, 19 nt, Artificial Sequence
  Description of Artificial Sequence: Synthetic oligonucleotide
cgagaguacaucuccagcc

SEQ ID NO: 1291814 - RNA, 19 nt, Artificial Sequence
  Description of Artificial Sequence: Synthetic oligonucleotide
auuaacuggccggaaggga

SEQ ID NO: 1291815 - RNA, 19 nt, Artificial Sequence
  Description of Artificial Sequence: Synthetic oligonucleotide
uccggcagcgcauucuggu

SEQ ID NO: 1291816 - RNA, 19 nt, Artificial Sequence
  Description of Artificial Sequence: Synthetic oligonucleotide
ggcagccagaaacuauucg

SEQ ID NO: 1291817 - RNA, 19 nt, Artificial Sequence
  Description of Artificial Sequence: Synthetic oligonucleotide
aggccaggaaucgucuucg

SEQ ID NO: 1291818 - RNA, 19 nt, Artificial Sequence
  Description of Artificial Sequence: Synthetic oligonucleotide
uugacucuuggagggaaac

SEQ ID NO: 1291819 - RNA, 19 nt, Artificial Sequence
  Description of Artificial Sequence: Synthetic oligonucleotide
agcaugaugcaugaguguu

SEQ ID NO: 1291820 - RNA, 19 nt, Artificial Sequence
  Description of Artificial Sequence: Synthetic oligonucleotide
gcugggauaagguccauga

SEQ ID NO: 1291821 - RNA, 19 nt, Artificial Sequence
  Description of Artificial Sequence: Synthetic oligonucleotide
guguggauuucuuguggug

SEQ ID NO: 1291822 - RNA, 19 nt, Artificial Sequence
  Description of Artificial Sequence: Synthetic oligonucleotide
acacgucuggcaucuccuc

SEQ ID NO: 1291823 - RNA, 19 nt, Artificial Sequence
  Description of Artificial Sequence: Synthetic oligonucleotide
uuguaaugagaagccacau

SEQ ID NO: 1291824 - RNA, 19 nt, Artificial Sequence
  Description of Artificial Sequence: Synthetic oligonucleotide
ucauccccacggauuacgu

SEQ ID NO: 1291825 - RNA, 19 nt, Artificial Sequence
  Description of Artificial Sequence: Synthetic oligonucleotide
aggcagauccuuccgggga

SEQ ID NO: 1291826 - RNA, 19 nt, Artificial Sequence
  Description of Artificial Sequence: Synthetic oligonucleotide
cucaaauagacaggaacaa

SEQ ID NO: 1291827 - RNA, 19 nt, Artificial Sequence
  Description of Artificial Sequence: Synthetic oligonucleotide
agacagcaaggccaggaau

SEQ ID NO: 1291828 - RNA, 19 nt, Artificial Sequence
  Description of Artificial Sequence: Synthetic oligonucleotide
uccuguucuggauuauguu

SEQ ID NO: 1291829 - RNA, 19 nt, Artificial Sequence
  Description of Artificial Sequence: Synthetic oligonucleotide
acuauucgggugauguuga

SEQ ID NO: 1291830 - RNA, 19 nt, Artificial Sequence
  Description of Artificial Sequence: Synthetic oligonucleotide
cauaucggauugacucuug

SEQ ID NO: 1291831 - RNA, 19 nt, Artificial Sequence
  Description of Artificial Sequence: Synthetic oligonucleotide
aggggagaaacagcgccuc

SEQ ID NO: 1291832 - RNA, 19 nt, Artificial Sequence
  Description of Artificial Sequence: Synthetic oligonucleotide
gaaguacaagcgggaaaug

SEQ ID NO: 1291833 - RNA, 19 nt, Artificial Sequence
  Description of Artificial Sequence: Synthetic oligonucleotide
cggauugacucuuggaggg

SEQ ID NO: 1291834 - RNA, 19 nt, Artificial Sequence
  Description of Artificial Sequence: Synthetic oligonucleotide
agcucguuuccagaauuug

SEQ ID NO: 1291835 - RNA, 19 nt, Artificial Sequence
  Description of Artificial Sequence: Synthetic oligonucleotide
ucacuacuucuuccguuuc

SEQ ID NO: 1291836 - RNA, 19 nt, Artificial Sequence
  Description of Artificial Sequence: Synthetic oligonucleotide
cuucggaaaucuuuccaaa

SEQ ID NO: 1291837 - RNA, 19 nt, Artificial Sequence
  Description of Artificial Sequence: Synthetic oligonucleotide
ucgcgugucacuacuucuu

SEQ ID NO: 1291838 - RNA, 19 nt, Artificial Sequence
  Description of Artificial Sequence: Synthetic oligonucleotide
guagcaaaagagaguaucu

SEQ ID NO: 1291839 - RNA, 19 nt, Artificial Sequence
  Description of Artificial Sequence: Synthetic oligonucleotide
cuauucgggugauguugag

SEQ ID NO: 1291840 - RNA, 19 nt, Artificial Sequence
  Description of Artificial Sequence: Synthetic oligonucleotide
gaaauggcugggauaaggu

SEQ ID NO: 1291841 - RNA, 19 nt, Artificial Sequence
  Description of Artificial Sequence: Synthetic oligonucleotide
cuucucuacugcaucucca

SEQ ID NO: 1291842 - RNA, 19 nt, Artificial Sequence
  Description of Artificial Sequence: Synthetic oligonucleotide
uggauuucuuguggugucu

SEQ ID NO: 1291843 - RNA, 19 nt, Artificial Sequence
  Description of Artificial Sequence: Synthetic oligonucleotide
uuccggggagugaugacuu

SEQ ID NO: 1291844 - RNA, 19 nt, Artificial Sequence
  Description of Artificial Sequence: Synthetic oligonucleotide
uggugucucaaagaccuuu

SEQ ID NO: 1291845 - RNA, 19 nt, Artificial Sequence
  Description of Artificial Sequence: Synthetic oligonucleotide
uccccacggauuacguacu

SEQ ID NO: 1291846 - RNA, 19 nt, Artificial Sequence
  Description of Artificial Sequence: Synthetic oligonucleotide
caagcgggaaauggcuggg

SEQ ID NO: 1291847 - RNA, 19 nt, Artificial Sequence
  Description of Artificial Sequence: Synthetic oligonucleotide
cauguuccgagaguacauc

SEQ ID NO: 1291848 - RNA, 19 nt, Artificial Sequence
  Description of Artificial Sequence: Synthetic oligonucleotide
ggauuacguacugagagaa

SEQ ID NO: 1291849 - RNA, 19 nt, Artificial Sequence
  Description of Artificial Sequence: Synthetic oligonucleotide
cuucuuccagcaagcugac

SEQ ID NO: 1291850 - RNA, 19 nt, Artificial Sequence
  Description of Artificial Sequence: Synthetic oligonucleotide
ccagucaggucguuugggg

SEQ ID NO: 1291851 - RNA, 19 nt, Artificial Sequence
  Description of Artificial Sequence: Synthetic oligonucleotide
agcgggaaauggcugggau

SEQ ID NO: 1291852 - RNA, 19 nt, Artificial Sequence
  Description of Artificial Sequence: Synthetic oligonucleotide
guuccuguucuggauuaug

SEQ ID NO: 1291853 - RNA, 19 nt, Artificial Sequence
  Description of Artificial Sequence: Synthetic oligonucleotide
gguugaaaagccccauuaa

SEQ ID NO: 1291854 - RNA, 19 nt, Artificial Sequence
  Description of Artificial Sequence: Synthetic oligonucleotide
aggaaucgucuucggaaau

SEQ ID NO: 1291855 - RNA, 19 nt, Artificial Sequence
  Description of Artificial Sequence: Synthetic oligonucleotide
caggaaucgucuucggaaa

SEQ ID NO: 1291856 - RNA, 19 nt, Artificial Sequence
  Description of Artificial Sequence: Synthetic oligonucleotide
gaugauaaucaaccauguu

SEQ ID NO: 1291857 - RNA, 19 nt, Artificial Sequence
  Description of Artificial Sequence: Synthetic oligonucleotide
cggaaaucuuuccaaaaug

SEQ ID NO: 1291858 - RNA, 19 nt, Artificial Sequence
  Description of Artificial Sequence: Synthetic oligonucleotide
cuggacaacggccagcacu

SEQ ID NO: 1291859 - RNA, 19 nt, Artificial Sequence
  Description of Artificial Sequence: Synthetic oligonucleotide
gacaugcccagauccccga

SEQ ID NO: 1291860 - RNA, 19 nt, Artificial Sequence
  Description of Artificial Sequence: Synthetic oligonucleotide
aacuggccggaagggagcu

SEQ ID NO: 1291861 - RNA, 19 nt, Artificial Sequence
  Description of Artificial Sequence: Synthetic oligonucleotide
agaaacuauucgggugaug

SEQ ID NO: 1291862 - RNA, 19 nt, Artificial Sequence
  Description of Artificial Sequence: Synthetic oligonucleotide
cagauccccgagcugguuc

SEQ ID NO: 1291863 - RNA, 19 nt, Artificial Sequence
  Description of Artificial Sequence: Synthetic oligonucleotide
caacggccagcacuuccgg

SEQ ID NO: 1291864 - RNA, 19 nt, Artificial Sequence
  Description of Artificial Sequence: Synthetic oligonucleotide
cacggauuacguacugaga

SEQ ID NO: 1291865 - RNA, 19 nt, Artificial Sequence
  Description of Artificial Sequence: Synthetic oligonucleotide
aggcacaccuggacaacgg

SEQ ID NO: 1291866 - RNA, 19 nt, Artificial Sequence
  Description of Artificial Sequence: Synthetic oligonucleotide
ggccaacacagcucacacg

SEQ ID NO: 1291867 - RNA, 19 nt, Artificial Sequence
  Description of Artificial Sequence: Synthetic oligonucleotide
ucgcuauguuccuguucug

SEQ ID NO: 1291868 - RNA, 19 nt, Artificial Sequence
  Description of Artificial Sequence: Synthetic oligonucleotide
ccguuucaauuuugcaucc

SEQ ID NO: 1291869 - RNA, 19 nt, Artificial Sequence
  Description of Artificial Sequence: Synthetic oligonucleotide
gggagaguucuuguaauga

SEQ ID NO: 1291870 - RNA, 19 nt, Artificial Sequence
  Description of Artificial Sequence: Synthetic oligonucleotide
gggcuccaugaccacaucc

SEQ ID NO: 1291871 - RNA, 19 nt, Artificial Sequence
  Description of Artificial Sequence: Synthetic oligonucleotide
augccgcaagccaggcucc

SEQ ID NO: 1291872 - RNA, 19 nt, Artificial Sequence
  Description of Artificial Sequence: Synthetic oligonucleotide
guacaagcgggaaauggcu

SEQ ID NO: 1291873 - RNA, 19 nt, Artificial Sequence
  Description of Artificial Sequence: Synthetic oligonucleotide
cccauuaacuggccggaag

SEQ ID NO: 1291874 - RNA, 19 nt, Artificial Sequence
  Description of Artificial Sequence: Synthetic oligonucleotide
ucuccucgcgugucacuac

SEQ ID NO: 1291875 - RNA, 19 nt, Artificial Sequence
  Description of Artificial Sequence: Synthetic oligonucleotide
acgucguuccacucuucau

SEQ ID NO: 1291876 - RNA, 19 nt, Artificial Sequence
  Description of Artificial Sequence: Synthetic oligonucleotide
caugaugcaugaguguucu

SEQ ID NO: 1291877 - RNA, 19 nt, Artificial Sequence
  Description of Artificial Sequence: Synthetic oligonucleotide
cucaagacgucguuccacu

SEQ ID NO: 1291878 - RNA, 19 nt, Artificial Sequence
  Description of Artificial Sequence: Synthetic oligonucleotide
guaagacagcaaggccagg

SEQ ID NO: 1291879 - RNA, 19 nt, Artificial Sequence
  Description of Artificial Sequence: Synthetic oligonucleotide
caggggccauaucggauug

SEQ ID NO: 1291880 - RNA, 19 nt, Artificial Sequence
  Description of Artificial Sequence: Synthetic oligonucleotide
ugcgguugaaaagccccau

SEQ ID NO: 1291881 - RNA, 19 nt, Artificial Sequence
  Description of Artificial Sequence: Synthetic oligonucleotide
aagcgggaaauggcuggga

SEQ ID NO: 1291882 - RNA, 19 nt, Artificial Sequence
  Description of Artificial Sequence: Synthetic oligonucleotide
ggcacaccuggacaacggc

SEQ ID NO: 1291883 - RNA, 19 nt, Artificial Sequence
  Description of Artificial Sequence: Synthetic oligonucleotide
guucuggauuauguugaga

SEQ ID NO: 1291884 - RNA, 19 nt, Artificial Sequence
  Description of Artificial Sequence: Synthetic oligonucleotide
gcgugucacuacuucuucc

SEQ ID NO: 1291885 - RNA, 19 nt, Artificial Sequence
  Description of Artificial Sequence: Synthetic oligonucleotide
caagacgucguuccacucu

SEQ ID NO: 1291886 - RNA, 19 nt, Artificial Sequence
  Description of Artificial Sequence: Synthetic oligonucleotide
ggguuagcccauaggaaac

SEQ ID NO: 1291887 - RNA, 19 nt, Artificial Sequence
  Description of Artificial Sequence: Synthetic oligonucleotide
aggcgcugaauugguaaga

SEQ ID NO: 1291888 - RNA, 19 nt, Artificial Sequence
  Description of Artificial Sequence: Synthetic oligonucleotide
gccggaagggagcucaauc

SEQ ID NO: 1291889 - RNA, 19 nt, Artificial Sequence
  Description of Artificial Sequence: Synthetic oligonucleotide
gcacaccuggacaacggcc

SEQ ID NO: 1291890 - RNA, 19 nt, Artificial Sequence
  Description of Artificial Sequence: Synthetic oligonucleotide
gaggcaguccaggcacagc

SEQ ID NO: 1291891 - RNA, 19 nt, Artificial Sequence
  Description of Artificial Sequence: Synthetic oligonucleotide
cucauucaacuugaggagu

SEQ ID NO: 1291892 - RNA, 19 nt, Artificial Sequence
  Description of Artificial Sequence: Synthetic oligonucleotide
ggcgcugaauugguaagac

SEQ ID NO: 1291893 - RNA, 19 nt, Artificial Sequence
  Description of Artificial Sequence: Synthetic oligonucleotide
gaguacaucuccagccgcu

SEQ ID NO: 1291894 - RNA, 19 nt, Artificial Sequence
  Description of Artificial Sequence: Synthetic oligonucleotide
cuucagaggccuuguggua

SEQ ID NO: 1291895 - RNA, 19 nt, Artificial Sequence
  Description of Artificial Sequence: Synthetic oligonucleotide
agcugacugggcagccgac

SEQ ID NO: 1291896 - RNA, 19 nt, Artificial Sequence
  Description of Artificial Sequence: Synthetic oligonucleotide
augcgguugaaaagcccca

SEQ ID NO: 1291897 - RNA, 19 nt, Artificial Sequence
  Description of Artificial Sequence: Synthetic oligonucleotide
gcucguuuccagaauuuga

SEQ ID NO: 1291898 - RNA, 19 nt, Artificial Sequence
  Description of Artificial Sequence: Synthetic oligonucleotide
agauccuuccggggaguga

SEQ ID NO: 1291899 - RNA, 19 nt, Artificial Sequence
  Description of Artificial Sequence: Synthetic oligonucleotide
ucguuccacucuucaucau

SEQ ID NO: 1291900 - RNA, 19 nt, Artificial Sequence
  Description of Artificial Sequence: Synthetic oligonucleotide
auccccgagcugguucagg

SEQ ID NO: 1291901 - RNA, 19 nt, Artificial Sequence
  Description of Artificial Sequence: Synthetic oligonucleotide
gagaaggcgcugaauuggu

SEQ ID NO: 1291902 - RNA, 19 nt, Artificial Sequence
  Description of Artificial Sequence: Synthetic oligonucleotide
caucugcagaaggcacacc

SEQ ID NO: 1291903 - RNA, 19 nt, Artificial Sequence
  Description of Artificial Sequence: Synthetic oligonucleotide
gguuagcccauaggaaaca

SEQ ID NO: 1291904 - RNA, 19 nt, Artificial Sequence
  Description of Artificial Sequence: Synthetic oligonucleotide
uccggggagugaugacuuc

SEQ ID NO: 1291905 - RNA, 19 nt, Artificial Sequence
  Description of Artificial Sequence: Synthetic oligonucleotide
uccucgcgugucacuacuu

SEQ ID NO: 1291906 - RNA, 19 nt, Artificial Sequence
  Description of Artificial Sequence: Synthetic oligonucleotide
uggcuucgcuauguuccug

SEQ ID NO: 1291907 - RNA, 19 nt, Artificial Sequence
  Description of Artificial Sequence: Synthetic oligonucleotide
cgucuucggaaaucuuucc

SEQ ID NO: 1291908 - RNA, 19 nt, Artificial Sequence
  Description of Artificial Sequence: Synthetic oligonucleotide
cgcuauguuccuguucugg

SEQ ID NO: 1291909 - RNA, 19 nt, Artificial Sequence
  Description of Artificial Sequence: Synthetic oligonucleotide
ggggccauaucggauugac

SEQ ID NO: 1291910 - RNA, 19 nt, Artificial Sequence
  Description of Artificial Sequence: Synthetic oligonucleotide
gggucuucauugugggcuc

SEQ ID NO: 1291911 - RNA, 19 nt, Artificial Sequence
  Description of Artificial Sequence: Synthetic oligonucleotide
cucgcgugucacuacuucu

SEQ ID NO: 1291912 - RNA, 19 nt, Artificial Sequence
  Description of Artificial Sequence: Synthetic oligonucleotide
gcucaagacgucguuccac

SEQ ID NO: 1291913 - RNA, 19 nt, Artificial Sequence
  Description of Artificial Sequence: Synthetic oligonucleotide
gauccccgagcugguucag

SEQ ID NO: 1291914 - RNA, 19 nt, Artificial Sequence
  Description of Artificial Sequence: Synthetic oligonucleotide
agccacuucucuacugcau

SEQ ID NO: 1291915 - RNA, 19 nt, Artificial Sequence
  Description of Artificial Sequence: Synthetic oligonucleotide
cgacaugcccagauccccg

SEQ ID NO: 1291916 - RNA, 19 nt, Artificial Sequence
  Description of Artificial Sequence: Synthetic oligonucleotide
cagccgacaugcccagauc

SEQ ID NO: 1291917 - RNA, 19 nt, Artificial Sequence
  Description of Artificial Sequence: Synthetic oligonucleotide
gacuugugcuguaggccaa

SEQ ID NO: 1291918 - RNA, 19 nt, Artificial Sequence
  Description of Artificial Sequence: Synthetic oligonucleotide
gccauaucggauugacucu

SEQ ID NO: 1291919 - RNA, 19 nt, Artificial Sequence
  Description of Artificial Sequence: Synthetic oligonucleotide
gccaggaaucgucuucgga

SEQ ID NO: 1291920 - RNA, 19 nt, Artificial Sequence
  Description of Artificial Sequence: Synthetic oligonucleotide
ccgacaugcccagaucccc

SEQ ID NO: 1291921 - RNA, 19 nt, Artificial Sequence
  Description of Artificial Sequence: Synthetic oligonucleotide
aggccuugugguagcaaaa

SEQ ID NO: 1291922 - RNA, 19 nt, Artificial Sequence
  Description of Artificial Sequence: Synthetic oligonucleotide
cagcaugaugcaugagugu

SEQ ID NO: 1291923 - RNA, 19 nt, Artificial Sequence
  Description of Artificial Sequence: Synthetic oligonucleotide
ugccgcaagccaggcuccc

SEQ ID NO: 1291924 - RNA, 19 nt, Artificial Sequence
  Description of Artificial Sequence: Synthetic oligonucleotide
ggaguaagggaggcagauc

SEQ ID NO: 1291925 - RNA, 19 nt, Artificial Sequence
  Description of Artificial Sequence: Synthetic oligonucleotide
gcgcugaauugguaagaca

SEQ ID NO: 1291926 - RNA, 19 nt, Artificial Sequence
  Description of Artificial Sequence: Synthetic oligonucleotide
gccgacaugcccagauccc

SEQ ID NO: 1291927 - RNA, 19 nt, Artificial Sequence
  Description of Artificial Sequence: Synthetic oligonucleotide
ggccucucauucaacuuga

SEQ ID NO: 1291928 - RNA, 19 nt, Artificial Sequence
  Description of Artificial Sequence: Synthetic oligonucleotide
cauccccacggauuacgua

SEQ ID NO: 1291929 - RNA, 19 nt, Artificial Sequence
  Description of Artificial Sequence: Synthetic oligonucleotide
aacuaacgauggaggcauu

SEQ ID NO: 1291930 - RNA, 19 nt, Artificial Sequence
  Description of Artificial Sequence: Synthetic oligonucleotide
ccucgcgugucacuacuuc

SEQ ID NO: 1291931 - RNA, 19 nt, Artificial Sequence
  Description of Artificial Sequence: Synthetic oligonucleotide
ggcugggauaagguccaug

SEQ ID NO: 1291932 - RNA, 19 nt, Artificial Sequence
  Description of Artificial Sequence: Synthetic oligonucleotide
cuggcuucgcuauguuccu

SEQ ID NO: 1291933 - RNA, 19 nt, Artificial Sequence
  Description of Artificial Sequence: Synthetic oligonucleotide
caugagccgcuggaggaaa

SEQ ID NO: 1291934 - RNA, 19 nt, Artificial Sequence
  Description of Artificial Sequence: Synthetic oligonucleotide
cggauuacguacugagaga

SEQ ID NO: 1291935 - RNA, 19 nt, Artificial Sequence
  Description of Artificial Sequence: Synthetic oligonucleotide
ccggaagggagcucaaucu

SEQ ID NO: 1291936 - RNA, 19 nt, Artificial Sequence
  Description of Artificial Sequence: Synthetic oligonucleotide
ccgcuggaggaaaacuuca

SEQ ID NO: 1291937 - RNA, 19 nt, Artificial Sequence
  Description of Artificial Sequence: Synthetic oligonucleotide
cacuuccggcagcgcauuc

SEQ ID NO: 1291938 - RNA, 19 nt, Artificial Sequence
  Description of Artificial Sequence: Synthetic oligonucleotide
ccggcagcgcauucuggug

SEQ ID NO: 1291939 - RNA, 19 nt, Artificial Sequence
  Description of Artificial Sequence: Synthetic oligonucleotide
aggggccauaucggauuga

SEQ ID NO: 1291940 - RNA, 19 nt, Artificial Sequence
  Description of Artificial Sequence: Synthetic oligonucleotide
cgguugaaaagccccauua

SEQ ID NO: 1291941 - RNA, 19 nt, Artificial Sequence
  Description of Artificial Sequence: Synthetic oligonucleotide
ccgcaagccaggcucccug

SEQ ID NO: 1291942 - RNA, 19 nt, Artificial Sequence
  Description of Artificial Sequence: Synthetic oligonucleotide
cuccucgcgugucacuacu

SEQ ID NO: 1291943 - RNA, 19 nt, Artificial Sequence
  Description of Artificial Sequence: Synthetic oligonucleotide
gccccauuaacuggccgga

SEQ ID NO: 1291944 - RNA, 19 nt, Artificial Sequence
  Description of Artificial Sequence: Synthetic oligonucleotide
augagccgcuggaggaaaa

SEQ ID NO: 1291945 - RNA, 19 nt, Artificial Sequence
  Description of Artificial Sequence: Synthetic oligonucleotide
cagcucguuuccagaauuu

SEQ ID NO: 1291946 - RNA, 19 nt, Artificial Sequence
  Description of Artificial Sequence: Synthetic oligonucleotide
cgcgugucacuacuucuuc

SEQ ID NO: 1291947 - RNA, 19 nt, Artificial Sequence
  Description of Artificial Sequence: Synthetic oligonucleotide
gcagcgcauucuggugggg

SEQ ID NO: 1291948 - RNA, 19 nt, Artificial Sequence
  Description of Artificial Sequence: Synthetic oligonucleotide
cagcaagcugacggccuca

SEQ ID NO: 1291949 - RNA, 19 nt, Artificial Sequence
  Description of Artificial Sequence: Synthetic oligonucleotide
ggugucucaaagaccuuuu

SEQ ID NO: 1291950 - RNA, 19 nt, Artificial Sequence
  Description of Artificial Sequence: Synthetic oligonucleotide
ccccacggauuacguacug

SEQ ID NO: 1291951 - RNA, 19 nt, Artificial Sequence
  Description of Artificial Sequence: Synthetic oligonucleotide
cagaggccuugugguagca

SEQ ID NO: 1291952 - RNA, 19 nt, Artificial Sequence
  Description of Artificial Sequence: Synthetic oligonucleotide
cagaaacuauucgggugau

SEQ ID NO: 1291953 - RNA, 19 nt, Artificial Sequence
  Description of Artificial Sequence: Synthetic oligonucleotide
ugcccggccccaggccaac

SEQ ID NO: 1291954 - RNA, 19 nt, Artificial Sequence
  Description of Artificial Sequence: Synthetic oligonucleotide
cguacugagagaaguccau

SEQ ID NO: 1291955 - RNA, 19 nt, Artificial Sequence
  Description of Artificial Sequence: Synthetic oligonucleotide
caggugcaucagaaagcau

SEQ ID NO: 1291956 - RNA, 19 nt, Artificial Sequence
  Description of Artificial Sequence: Synthetic oligonucleotide
cccggccccaggccaacac

SEQ ID NO: 1291957 - RNA, 19 nt, Artificial Sequence
  Description of Artificial Sequence: Synthetic oligonucleotide
gcgguugaaaagccccauu

SEQ ID NO: 1291958 - RNA, 19 nt, Artificial Sequence
  Description of Artificial Sequence: Synthetic oligonucleotide
ggacaacggccagcacuuc

SEQ ID NO: 1291959 - RNA, 19 nt, Artificial Sequence
  Description of Artificial Sequence: Synthetic oligonucleotide
cagcaaggccaggaaucgu

SEQ ID NO: 1291960 - RNA, 19 nt, Artificial Sequence
  Description of Artificial Sequence: Synthetic oligonucleotide
ccauaucggauugacucuu

SEQ ID NO: 1291961 - RNA, 19 nt, Artificial Sequence
  Description of Artificial Sequence: Synthetic oligonucleotide
gggccauaucggauugacu

SEQ ID NO: 1291962 - RNA, 19 nt, Artificial Sequence
  Description of Artificial Sequence: Synthetic oligonucleotide
gcuucgcuauguuccuguu

SEQ ID NO: 1291963 - RNA, 19 nt, Artificial Sequence
  Description of Artificial Sequence: Synthetic oligonucleotide
ggaaaacuucagaggccuu

SEQ ID NO: 1291964 - RNA, 19 nt, Artificial Sequence
  Description of Artificial Sequence: Synthetic oligonucleotide
cguuuggggucugucucaa

SEQ ID NO: 1291965 - RNA, 19 nt, Artificial Sequence
  Description of Artificial Sequence: Synthetic oligonucleotide
ccccauuaacuggccggaa

SEQ ID NO: 1291966 - RNA, 19 nt, Artificial Sequence
  Description of Artificial Sequence: Synthetic oligonucleotide
ggccggaagggagcucaau

SEQ ID NO: 1291967 - RNA, 19 nt, Artificial Sequence
  Description of Artificial Sequence: Synthetic oligonucleotide
gccgcaagccaggcucccu

SEQ ID NO: 1291968 - RNA, 19 nt, Artificial Sequence
  Description of Artificial Sequence: Synthetic oligonucleotide
gcacuuccggcagcgcauu

SEQ ID NO: 1291969 - RNA, 19 nt, Artificial Sequence
  Description of Artificial Sequence: Synthetic oligonucleotide
gcccggccccaggccaaca

SEQ ID NO: 1291970 - RNA, 19 nt, Artificial Sequence
  Description of Artificial Sequence: Synthetic oligonucleotide
aaucagugggcuuacauuc

SEQ ID NO: 1291971 - RNA, 19 nt, Artificial Sequence
  Description of Artificial Sequence: Synthetic oligonucleotide
aauucaagaagguuuuagg

SEQ ID NO: 1291972 - RNA, 19 nt, Artificial Sequence
  Description of Artificial Sequence: Synthetic oligonucleotide
cauaguauaccucauaugc

SEQ ID NO: 1291973 - RNA, 19 nt, Artificial Sequence
  Description of Artificial Sequence: Synthetic oligonucleotide
uuguaauccaacuugaagc

SEQ ID NO: 1291974 - RNA, 19 nt, Artificial Sequence
  Description of Artificial Sequence: Synthetic oligonucleotide
ugauguaagaucugcaagg

SEQ ID NO: 1291975 - RNA, 19 nt, Artificial Sequence
  Description of Artificial Sequence: Synthetic oligonucleotide
aaguauagaguuaaaugcc

SEQ ID NO: 1291976 - RNA, 19 nt, Artificial Sequence
  Description of Artificial Sequence: Synthetic oligonucleotide
uguaagaucugcaaggcca

SEQ ID NO: 1291977 - RNA, 19 nt, Artificial Sequence
  Description of Artificial Sequence: Synthetic oligonucleotide
agaaauacaacaaauguug

SEQ ID NO: 1291978 - RNA, 19 nt, Artificial Sequence
  Description of Artificial Sequence: Synthetic oligonucleotide
cauaugccaacaaagaggc

SEQ ID NO: 1291979 - RNA, 19 nt, Artificial Sequence
  Description of Artificial Sequence: Synthetic oligonucleotide
auuacgagaacucagguaa

SEQ ID NO: 1291980 - RNA, 19 nt, Artificial Sequence
  Description of Artificial Sequence: Synthetic oligonucleotide
auaaugucccuuuaguguc

SEQ ID NO: 1291981 - RNA, 19 nt, Artificial Sequence
  Description of Artificial Sequence: Synthetic oligonucleotide
uaauccaacuugaagcagg

SEQ ID NO: 1291982 - RNA, 19 nt, Artificial Sequence
  Description of Artificial Sequence: Synthetic oligonucleotide
gauggcgucaaauacauga

SEQ ID NO: 1291983 - RNA, 19 nt, Artificial Sequence
  Description of Artificial Sequence: Synthetic oligonucleotide
aguaccuccuaacacuugc

SEQ ID NO: 1291984 - RNA, 19 nt, Artificial Sequence
  Description of Artificial Sequence: Synthetic oligonucleotide
aggaaagacaagcguaucc

SEQ ID NO: 1291985 - RNA, 19 nt, Artificial Sequence
  Description of Artificial Sequence: Synthetic oligonucleotide
uuaggaaccucaaaaucag

SEQ ID NO: 1291986 - RNA, 19 nt, Artificial Sequence
  Description of Artificial Sequence: Synthetic oligonucleotide
aacauaaugucccuuuagu

SEQ ID NO: 1291987 - RNA, 19 nt, Artificial Sequence
  Description of Artificial Sequence: Synthetic oligonucleotide
uagucuauagagaaaugcc

SEQ ID NO: 1291988 - RNA, 19 nt, Artificial Sequence
  Description of Artificial Sequence: Synthetic oligonucleotide
aagaguaccuccuaacacu

SEQ ID NO: 1291989 - RNA, 19 nt, Artificial Sequence
  Description of Artificial Sequence: Synthetic oligonucleotide
uucaagaagguagucaggg

SEQ ID NO: 1291990 - RNA, 19 nt, Artificial Sequence
  Description of Artificial Sequence: Synthetic oligonucleotide
aagacaagcguauccuuuc

SEQ ID NO: 1291991 - RNA, 19 nt, Artificial Sequence
  Description of Artificial Sequence: Synthetic oligonucleotide
uguaauccaacuugaagca

SEQ ID NO: 1291992 - RNA, 19 nt, Artificial Sequence
  Description of Artificial Sequence: Synthetic oligonucleotide
uauuccaaggcagugaagc

SEQ ID NO: 1291993 - RNA, 19 nt, Artificial Sequence
  Description of Artificial Sequence: Synthetic oligonucleotide
agugacugcauccaguaag

SEQ ID NO: 1291994 - RNA, 19 nt, Artificial Sequence
  Description of Artificial Sequence: Synthetic oligonucleotide
aauaggaguagagggcugc

SEQ ID NO: 1291995 - RNA, 19 nt, Artificial Sequence
  Description of Artificial Sequence: Synthetic oligonucleotide
acaagcguauccuuucacc

SEQ ID NO: 1291996 - RNA, 19 nt, Artificial Sequence
  Description of Artificial Sequence: Synthetic oligonucleotide
uaaucugugauguaagauc

SEQ ID NO: 1291997 - RNA, 19 nt, Artificial Sequence
  Description of Artificial Sequence: Synthetic oligonucleotide
uccucuguguuucagacga

SEQ ID NO: 1291998 - RNA, 19 nt, Artificial Sequence
  Description of Artificial Sequence: Synthetic oligonucleotide
aguauagaguuaaaugccc

SEQ ID NO: 1291999 - RNA, 19 nt, Artificial Sequence
  Description of Artificial Sequence: Synthetic oligonucleotide
ucgaaguacaaguccaggg

SEQ ID NO: 1292000 - RNA, 19 nt, Artificial Sequence
  Description of Artificial Sequence: Synthetic oligonucleotide
caaagagaggcacacaggc

SEQ ID NO: 1292001 - RNA, 19 nt, Artificial Sequence
  Description of Artificial Sequence: Synthetic oligonucleotide
uacaugagagccagcaggg

SEQ ID NO: 1292002 - RNA, 19 nt, Artificial Sequence
  Description of Artificial Sequence: Synthetic oligonucleotide
aguggaaugccuccaauag

SEQ ID NO: 1292003 - RNA, 19 nt, Artificial Sequence
  Description of Artificial Sequence: Synthetic oligonucleotide
acuaguucauaguauaccu

SEQ ID NO: 1292004 - RNA, 19 nt, Artificial Sequence
  Description of Artificial Sequence: Synthetic oligonucleotide
uucauaguauaccucauau

SEQ ID NO: 1292005 - RNA, 19 nt, Artificial Sequence
  Description of Artificial Sequence: Synthetic oligonucleotide
uguguguuacuacaucugc

SEQ ID NO: 1292006 - RNA, 19 nt, Artificial Sequence
  Description of Artificial Sequence: Synthetic oligonucleotide
uacaacaaauguuggagca

SEQ ID NO: 1292007 - RNA, 19 nt, Artificial Sequence
  Description of Artificial Sequence: Synthetic oligonucleotide
cuuguaauccaacuugaag

SEQ ID NO: 1292008 - RNA, 19 nt, Artificial Sequence
  Description of Artificial Sequence: Synthetic oligonucleotide
uguguuucagacgacuggg

SEQ ID NO: 1292009 - RNA, 19 nt, Artificial Sequence
  Description of Artificial Sequence: Synthetic oligonucleotide
aagaauuacgagaacucag

SEQ ID NO: 1292010 - RNA, 19 nt, Artificial Sequence
  Description of Artificial Sequence: Synthetic oligonucleotide
aggguuacaguuuugugug

SEQ ID NO: 1292011 - RNA, 19 nt, Artificial Sequence
  Description of Artificial Sequence: Synthetic oligonucleotide
uucaagaagguuuuaggaa

SEQ ID NO: 1292012 - RNA, 19 nt, Artificial Sequence
  Description of Artificial Sequence: Synthetic oligonucleotide
uuucagacgacugggaacc

SEQ ID NO: 1292013 - RNA, 19 nt, Artificial Sequence
  Description of Artificial Sequence: Synthetic oligonucleotide
ugauaaauacugcaauguc

SEQ ID NO: 1292014 - RNA, 19 nt, Artificial Sequence
  Description of Artificial Sequence: Synthetic oligonucleotide
auaguauaccucauaugcc

SEQ ID NO: 1292015 - RNA, 19 nt, Artificial Sequence
  Description of Artificial Sequence: Synthetic oligonucleotide
uccaaugagacuuguaauc

SEQ ID NO: 1292016 - RNA, 19 nt, Artificial Sequence
  Description of Artificial Sequence: Synthetic oligonucleotide
aguuuuguguguuacuaca

SEQ ID NO: 1292017 - RNA, 19 nt, Artificial Sequence
  Description of Artificial Sequence: Synthetic oligonucleotide
ucacccuccaaucaacacc

SEQ ID NO: 1292018 - RNA, 19 nt, Artificial Sequence
  Description of Artificial Sequence: Synthetic oligonucleotide
cacauuucgggccacgugg

SEQ ID NO: 1292019 - RNA, 19 nt, Artificial Sequence
  Description of Artificial Sequence: Synthetic oligonucleotide
ucaacaccuauuccaaggc

SEQ ID NO: 1292020 - RNA, 19 nt, Artificial Sequence
  Description of Artificial Sequence: Synthetic oligonucleotide
gaaguuagcaaugggauga

SEQ ID NO: 1292021 - RNA, 19 nt, Artificial Sequence
  Description of Artificial Sequence: Synthetic oligonucleotide
gacaacuaccccugggugg

SEQ ID NO: 1292022 - RNA, 19 nt, Artificial Sequence
  Description of Artificial Sequence: Synthetic oligonucleotide
agaauuacgagaacucagg

SEQ ID NO: 1292023 - RNA, 19 nt, Artificial Sequence
  Description of Artificial Sequence: Synthetic oligonucleotide
aucccgaagaaauaggagu

SEQ ID NO: 1292024 - RNA, 19 nt, Artificial Sequence
  Description of Artificial Sequence: Synthetic oligonucleotide
aaccucaaaaucagugggc

SEQ ID NO: 1292025 - RNA, 19 nt, Artificial Sequence
  Description of Artificial Sequence: Synthetic oligonucleotide
uuaaaugcccgucuccgcu

SEQ ID NO: 1292026 - RNA, 19 nt, Artificial Sequence
  Description of Artificial Sequence: Synthetic oligonucleotide
aacaccuauuccaaggcag

SEQ ID NO: 1292027 - RNA, 19 nt, Artificial Sequence
  Description of Artificial Sequence: Synthetic oligonucleotide
auguaagaucugcaaggcc

SEQ ID NO: 1292028 - RNA, 19 nt, Artificial Sequence
  Description of Artificial Sequence: Synthetic oligonucleotide
ugugauguaagaucugcaa

SEQ ID NO: 1292029 - RNA, 19 nt, Artificial Sequence
  Description of Artificial Sequence: Synthetic oligonucleotide
gaagaguaccuccuaacac

SEQ ID NO: 1292030 - RNA, 19 nt, Artificial Sequence
  Description of Artificial Sequence: Synthetic oligonucleotide
acuacaucugcuccaauga

SEQ ID NO: 1292031 - RNA, 19 nt, Artificial Sequence
  Description of Artificial Sequence: Synthetic oligonucleotide
uguguuacuacaucugcuc

SEQ ID NO: 1292032 - RNA, 19 nt, Artificial Sequence
  Description of Artificial Sequence: Synthetic oligonucleotide
agaguuaaaugcccgucuc

SEQ ID NO: 1292033 - RNA, 19 nt, Artificial Sequence
  Description of Artificial Sequence: Synthetic oligonucleotide
aauuacgagaacucaggua

SEQ ID NO: 1292034 - RNA, 19 nt, Artificial Sequence
  Description of Artificial Sequence: Synthetic oligonucleotide
aucgaugacagcaucacag

SEQ ID NO: 1292035 - RNA, 19 nt, Artificial Sequence
  Description of Artificial Sequence: Synthetic oligonucleotide
uauagagaaaugccaggac

SEQ ID NO: 1292036 - RNA, 19 nt, Artificial Sequence
  Description of Artificial Sequence: Synthetic oligonucleotide
aaucaacaccuauuccaag

SEQ ID NO: 1292037 - RNA, 19 nt, Artificial Sequence
  Description of Artificial Sequence: Synthetic oligonucleotide
caagcguauccuuucaccc

SEQ ID NO: 1292038 - RNA, 19 nt, Artificial Sequence
  Description of Artificial Sequence: Synthetic oligonucleotide
uccagauggcaucuaauac

SEQ ID NO: 1292039 - RNA, 19 nt, Artificial Sequence
  Description of Artificial Sequence: Synthetic oligonucleotide
ugguucuaauaccaguagc

SEQ ID NO: 1292040 - RNA, 19 nt, Artificial Sequence
  Description of Artificial Sequence: Synthetic oligonucleotide
ucugugauguaagaucugc

SEQ ID NO: 1292041 - RNA, 19 nt, Artificial Sequence
  Description of Artificial Sequence: Synthetic oligonucleotide
uauagaguuaaaugcccgu

SEQ ID NO: 1292042 - RNA, 19 nt, Artificial Sequence
  Description of Artificial Sequence: Synthetic oligonucleotide
uacauucccgagcugaggu

SEQ ID NO: 1292043 - RNA, 19 nt, Artificial Sequence
  Description of Artificial Sequence: Synthetic oligonucleotide
uguuacuacaucugcucca

SEQ ID NO: 1292044 - RNA, 19 nt, Artificial Sequence
  Description of Artificial Sequence: Synthetic oligonucleotide
uagaguuaaaugcccgucu

SEQ ID NO: 1292045 - RNA, 19 nt, Artificial Sequence
  Description of Artificial Sequence: Synthetic oligonucleotide
aggaguagagggcugccac

SEQ ID NO: 1292046 - RNA, 19 nt, Artificial Sequence
  Description of Artificial Sequence: Synthetic oligonucleotide
ucuguguuucagacgacug

SEQ ID NO: 1292047 - RNA, 19 nt, Artificial Sequence
  Description of Artificial Sequence: Synthetic oligonucleotide
aaguacugucacuucccuc

SEQ ID NO: 1292048 - RNA, 19 nt, Artificial Sequence
  Description of Artificial Sequence: Synthetic oligonucleotide
ugcgugucuccacagaaga

SEQ ID NO: 1292049 - RNA, 19 nt, Artificial Sequence
  Description of Artificial Sequence: Synthetic oligonucleotide
uugugcgucacagaggggc

SEQ ID NO: 1292050 - RNA, 19 nt, Artificial Sequence
  Description of Artificial Sequence: Synthetic oligonucleotide
agaggggcuagucaggaug

SEQ ID NO: 1292051 - RNA, 19 nt, Artificial Sequence
  Description of Artificial Sequence: Synthetic oligonucleotide
gcuugugcgucacagaggg

SEQ ID NO: 1292052 - RNA, 19 nt, Artificial Sequence
  Description of Artificial Sequence: Synthetic oligonucleotide
auagaguuaaaugcccguc

SEQ ID NO: 1292053 - RNA, 19 nt, Artificial Sequence
  Description of Artificial Sequence: Synthetic oligonucleotide
ucuaauacucggcugccau

SEQ ID NO: 1292054 - RNA, 19 nt, Artificial Sequence
  Description of Artificial Sequence: Synthetic oligonucleotide
guauagaguuaaaugcccg

SEQ ID NO: 1292055 - RNA, 19 nt, Artificial Sequence
  Description of Artificial Sequence: Synthetic oligonucleotide
ucagacuucgaaguacaag

SEQ ID NO: 1292056 - RNA, 19 nt, Artificial Sequence
  Description of Artificial Sequence: Synthetic oligonucleotide
gacugcauccaguaagcgc

SEQ ID NO: 1292057 - RNA, 19 nt, Artificial Sequence
  Description of Artificial Sequence: Synthetic oligonucleotide
acgacgacgcugcuugugc

SEQ ID NO: 1292058 - RNA, 19 nt, Artificial Sequence
  Description of Artificial Sequence: Synthetic oligonucleotide
uccacuaguucauaguaua

SEQ ID NO: 1292059 - RNA, 19 nt, Artificial Sequence
  Description of Artificial Sequence: Synthetic oligonucleotide
caauucaagaagguuuuag

SEQ ID NO: 1292060 - RNA, 19 nt, Artificial Sequence
  Description of Artificial Sequence: Synthetic oligonucleotide
agagaaaugccaggacagc

SEQ ID NO: 1292061 - RNA, 19 nt, Artificial Sequence
  Description of Artificial Sequence: Synthetic oligonucleotide
ucuaccugauguucugcag

SEQ ID NO: 1292062 - RNA, 19 nt, Artificial Sequence
  Description of Artificial Sequence: Synthetic oligonucleotide
acaggcaagagcaacauaa

SEQ ID NO: 1292063 - RNA, 19 nt, Artificial Sequence
  Description of Artificial Sequence: Synthetic oligonucleotide
uucgaaguacaaguccagg

SEQ ID NO: 1292064 - RNA, 19 nt, Artificial Sequence
  Description of Artificial Sequence: Synthetic oligonucleotide
uauaccucauaugccaaca

SEQ ID NO: 1292065 - RNA, 19 nt, Artificial Sequence
  Description of Artificial Sequence: Synthetic oligonucleotide
gaagaauuacgagaacuca

SEQ ID NO: 1292066 - RNA, 19 nt, Artificial Sequence
  Description of Artificial Sequence: Synthetic oligonucleotide
gaguuaaaugcccgucucc

SEQ ID NO: 1292067 - RNA, 19 nt, Artificial Sequence
  Description of Artificial Sequence: Synthetic oligonucleotide
ucaagaagguagucagggc

SEQ ID NO: 1292068 - RNA, 19 nt, Artificial Sequence
  Description of Artificial Sequence: Synthetic oligonucleotide
aagcguauccuuucacccu

SEQ ID NO: 1292069 - RNA, 19 nt, Artificial Sequence
  Description of Artificial Sequence: Synthetic oligonucleotide
ccaacuugaagcaggaaag

SEQ ID NO: 1292070 - RNA, 19 nt, Artificial Sequence
  Description of Artificial Sequence: Synthetic oligonucleotide
acgacugggaaccacggga

SEQ ID NO: 1292071 - RNA, 19 nt, Artificial Sequence
  Description of Artificial Sequence: Synthetic oligonucleotide
uacacuaggguuacaguuu

SEQ ID NO: 1292072 - RNA, 19 nt, Artificial Sequence
  Description of Artificial Sequence: Synthetic oligonucleotide
uccaagagucuggagcucg

SEQ ID NO: 1292073 - RNA, 19 nt, Artificial Sequence
  Description of Artificial Sequence: Synthetic oligonucleotide
acgagaacucagguaaucg

SEQ ID NO: 1292074 - RNA, 19 nt, Artificial Sequence
  Description of Artificial Sequence: Synthetic oligonucleotide
cuccaaucaacaccuauuc

SEQ ID NO: 1292075 - RNA, 19 nt, Artificial Sequence
  Description of Artificial Sequence: Synthetic oligonucleotide
gacuagcuccuccagaauc

SEQ ID NO: 1292076 - RNA, 19 nt, Artificial Sequence
  Description of Artificial Sequence: Synthetic oligonucleotide
aggcaagagcaacauaaug

SEQ ID NO: 1292077 - RNA, 19 nt, Artificial Sequence
  Description of Artificial Sequence: Synthetic oligonucleotide
guuucagacgacugggaac

SEQ ID NO: 1292078 - RNA, 19 nt, Artificial Sequence
  Description of Artificial Sequence: Synthetic oligonucleotide
agcagcaaucuccuuccgg

SEQ ID NO: 1292079 - RNA, 19 nt, Artificial Sequence
  Description of Artificial Sequence: Synthetic oligonucleotide
aggaaccucaaaaucagug

SEQ ID NO: 1292080 - RNA, 19 nt, Artificial Sequence
  Description of Artificial Sequence: Synthetic oligonucleotide
cagacgacugggaaccacg

SEQ ID NO: 1292081 - RNA, 19 nt, Artificial Sequence
  Description of Artificial Sequence: Synthetic oligonucleotide
uucuaccugauguucugca

SEQ ID NO: 1292082 - RNA, 19 nt, Artificial Sequence
  Description of Artificial Sequence: Synthetic oligonucleotide
uccgcuuggccauagcacu

SEQ ID NO: 1292083 - RNA, 19 nt, Artificial Sequence
  Description of Artificial Sequence: Synthetic oligonucleotide
cuaguucauaguauaccuc

SEQ ID NO: 1292084 - RNA, 19 nt, Artificial Sequence
  Description of Artificial Sequence: Synthetic oligonucleotide
gcaucuaauacucggcugc

SEQ ID NO: 1292085 - RNA, 19 nt, Artificial Sequence
  Description of Artificial Sequence: Synthetic oligonucleotide
cuugcagcagaguucugac

SEQ ID NO: 1292086 - RNA, 19 nt, Artificial Sequence
  Description of Artificial Sequence: Synthetic oligonucleotide
ugucccuuuagugucuuca

SEQ ID NO: 1292087 - RNA, 19 nt, Artificial Sequence
  Description of Artificial Sequence: Synthetic oligonucleotide
uagcaguugcaagacuugg

SEQ ID NO: 1292088 - RNA, 19 nt, Artificial Sequence
  Description of Artificial Sequence: Synthetic oligonucleotide
aguacaaguccaggguugg

SEQ ID NO: 1292089 - RNA, 19 nt, Artificial Sequence
  Description of Artificial Sequence: Synthetic oligonucleotide
agcuacacuaggguuacag

SEQ ID NO: 1292090 - RNA, 19 nt, Artificial Sequence
  Description of Artificial Sequence: Synthetic oligonucleotide
caccagagcgacaacuacc

SEQ ID NO: 1292091 - RNA, 19 nt, Artificial Sequence
  Description of Artificial Sequence: Synthetic oligonucleotide
acaaaagcuggagaucuug

SEQ ID NO: 1292092 - RNA, 19 nt, Artificial Sequence
  Description of Artificial Sequence: Synthetic oligonucleotide
auuucgggccacguggugg

SEQ ID NO: 1292093 - RNA, 19 nt, Artificial Sequence
  Description of Artificial Sequence: Synthetic oligonucleotide
guguuacuacaucugcucc

SEQ ID NO: 1292094 - RNA, 19 nt, Artificial Sequence
  Description of Artificial Sequence: Synthetic oligonucleotide
gcaguagagauccaaguac

SEQ ID NO: 1292095 - RNA, 19 nt, Artificial Sequence
  Description of Artificial Sequence: Synthetic oligonucleotide
cacgugguggccaaaagca

SEQ ID NO: 1292096 - RNA, 19 nt, Artificial Sequence
  Description of Artificial Sequence: Synthetic oligonucleotide
cugguucuaauaccaguag

SEQ ID NO: 1292097 - RNA, 19 nt, Artificial Sequence
  Description of Artificial Sequence: Synthetic oligonucleotide
uaccucauaugccaacaaa

SEQ ID NO: 1292098 - RNA, 19 nt, Artificial Sequence
  Description of Artificial Sequence: Synthetic oligonucleotide
cagaagaguaccuccuaac

SEQ ID NO: 1292099 - RNA, 19 nt, Artificial Sequence
  Description of Artificial Sequence: Synthetic oligonucleotide
cagacuucgaaguacaagu

SEQ ID NO: 1292100 - RNA, 19 nt, Artificial Sequence
  Description of Artificial Sequence: Synthetic oligonucleotide
uuacauucccgagcugagg

SEQ ID NO: 1292101 - RNA, 19 nt, Artificial Sequence
  Description of Artificial Sequence: Synthetic oligonucleotide
agcaguagagauccaagua

SEQ ID NO: 1292102 - RNA, 19 nt, Artificial Sequence
  Description of Artificial Sequence: Synthetic oligonucleotide
aaagacaagcguauccuuu

SEQ ID NO: 1292103 - RNA, 19 nt, Artificial Sequence
  Description of Artificial Sequence: Synthetic oligonucleotide
ugccacuugcugaagaauu

SEQ ID NO: 1292104 - RNA, 19 nt, Artificial Sequence
  Description of Artificial Sequence: Synthetic oligonucleotide
ucagguaaucgaugacagc

SEQ ID NO: 1292105 - RNA, 19 nt, Artificial Sequence
  Description of Artificial Sequence: Synthetic oligonucleotide
cuacaucugcuccaaugag

SEQ ID NO: 1292106 - RNA, 19 nt, Artificial Sequence
  Description of Artificial Sequence: Synthetic oligonucleotide
caccucagcggcuagcccc

SEQ ID NO: 1292107 - RNA, 19 nt, Artificial Sequence
  Description of Artificial Sequence: Synthetic oligonucleotide
gaagugacugcauccagua

SEQ ID NO: 1292108 - RNA, 19 nt, Artificial Sequence
  Description of Artificial Sequence: Synthetic oligonucleotide
cuaggguuacaguuuugug

SEQ ID NO: 1292109 - RNA, 19 nt, Artificial Sequence
  Description of Artificial Sequence: Synthetic oligonucleotide
uggagcucgucugaucccg

SEQ ID NO: 1292110 - RNA, 19 nt, Artificial Sequence
  Description of Artificial Sequence: Synthetic oligonucleotide
aaaugcccgucuccgcuug

SEQ ID NO: 1292111 - RNA, 19 nt, Artificial Sequence
  Description of Artificial Sequence: Synthetic oligonucleotide
agcgacaacuaccccuggg

SEQ ID NO: 1292112 - RNA, 19 nt, Artificial Sequence
  Description of Artificial Sequence: Synthetic oligonucleotide
aacuaccccuggguggccc

SEQ ID NO: 1292113 - RNA, 19 nt, Artificial Sequence
  Description of Artificial Sequence: Synthetic oligonucleotide
aaggcaauucaagaagguu

SEQ ID NO: 1292114 - RNA, 19 nt, Artificial Sequence
  Description of Artificial Sequence: Synthetic oligonucleotide
uugcaagacuuggacuugg

SEQ ID NO: 1292115 - RNA, 19 nt, Artificial Sequence
  Description of Artificial Sequence: Synthetic oligonucleotide
ucucucgccgcuucaagaa

SEQ ID NO: 1292116 - RNA, 19 nt, Artificial Sequence
  Description of Artificial Sequence: Synthetic oligonucleotide
guggaaugccuccaauagc

SEQ ID NO: 1292117 - RNA, 19 nt, Artificial Sequence
  Description of Artificial Sequence: Synthetic oligonucleotide
gagauccaaguacugucac

SEQ ID NO: 1292118 - RNA, 19 nt, Artificial Sequence
  Description of Artificial Sequence: Synthetic oligonucleotide
gaggggcuagucaggaugg

SEQ ID NO: 1292119 - RNA, 19 nt, Artificial Sequence
  Description of Artificial Sequence: Synthetic oligonucleotide
auaggaguagagggcugcc

SEQ ID NO: 1292120 - RNA, 19 nt, Artificial Sequence
  Description of Artificial Sequence: Synthetic oligonucleotide
agaaucugcaagggagcac

SEQ ID NO: 1292121 - RNA, 19 nt, Artificial Sequence
  Description of Artificial Sequence: Synthetic oligonucleotide
aguuagcaaugggaugagc

SEQ ID NO: 1292122 - RNA, 19 nt, Artificial Sequence
  Description of Artificial Sequence: Synthetic oligonucleotide
guagcaccugcuccaagag

SEQ ID NO: 1292123 - RNA, 19 nt, Artificial Sequence
  Description of Artificial Sequence: Synthetic oligonucleotide
cauucccgagcugaggucc

SEQ ID NO: 1292124 - RNA, 19 nt, Artificial Sequence
  Description of Artificial Sequence: Synthetic oligonucleotide
uuucgggccacgugguggc

SEQ ID NO: 1292125 - RNA, 19 nt, Artificial Sequence
  Description of Artificial Sequence: Synthetic oligonucleotide
gacgacugggaaccacggg

SEQ ID NO: 1292126 - RNA, 19 nt, Artificial Sequence
  Description of Artificial Sequence: Synthetic oligonucleotide
ggaaguuagcaaugggaug

SEQ ID NO: 1292127 - RNA, 19 nt, Artificial Sequence
  Description of Artificial Sequence: Synthetic oligonucleotide
cuaauacucggcugccaug

SEQ ID NO: 1292128 - RNA, 19 nt, Artificial Sequence
  Description of Artificial Sequence: Synthetic oligonucleotide
gacuuguaauccaacuuga

SEQ ID NO: 1292129 - RNA, 19 nt, Artificial Sequence
  Description of Artificial Sequence: Synthetic oligonucleotide
agacuucgaaguacaaguc

SEQ ID NO: 1292130 - RNA, 19 nt, Artificial Sequence
  Description of Artificial Sequence: Synthetic oligonucleotide
agccaaagcuacacuaggg

SEQ ID NO: 1292131 - RNA, 19 nt, Artificial Sequence
  Description of Artificial Sequence: Synthetic oligonucleotide
aggcaauucaagaagguuu

SEQ ID NO: 1292132 - RNA, 19 nt, Artificial Sequence
  Description of Artificial Sequence: Synthetic oligonucleotide
aaauaggaguagagggcug

SEQ ID NO: 1292133 - RNA, 19 nt, Artificial Sequence
  Description of Artificial Sequence: Synthetic oligonucleotide
aagguagucagggccacau

SEQ ID NO: 1292134 - RNA, 19 nt, Artificial Sequence
  Description of Artificial Sequence: Synthetic oligonucleotide
guaauccaacuugaagcag

SEQ ID NO: 1292135 - RNA, 19 nt, Artificial Sequence
  Description of Artificial Sequence: Synthetic oligonucleotide
uguucccaagucucucgcc

SEQ ID NO: 1292136 - RNA, 19 nt, Artificial Sequence
  Description of Artificial Sequence: Synthetic oligonucleotide
gacaagcguauccuuucac

SEQ ID NO: 1292137 - RNA, 19 nt, Artificial Sequence
  Description of Artificial Sequence: Synthetic oligonucleotide
gugauaaauacugcaaugu

SEQ ID NO: 1292138 - RNA, 19 nt, Artificial Sequence
  Description of Artificial Sequence: Synthetic oligonucleotide
agcggcuagccccaggacu

SEQ ID NO: 1292139 - RNA, 19 nt, Artificial Sequence
  Description of Artificial Sequence: Synthetic oligonucleotide
uuucuaccugauguucugc

SEQ ID NO: 1292140 - RNA, 19 nt, Artificial Sequence
  Description of Artificial Sequence: Synthetic oligonucleotide
gaauuacgagaacucaggu

SEQ ID NO: 1292141 - RNA, 19 nt, Artificial Sequence
  Description of Artificial Sequence: Synthetic oligonucleotide
ugacugcauccaguaagcg

SEQ ID NO: 1292142 - RNA, 19 nt, Artificial Sequence
  Description of Artificial Sequence: Synthetic oligonucleotide
uguggccauuucuaccuga

SEQ ID NO: 1292143 - RNA, 19 nt, Artificial Sequence
  Description of Artificial Sequence: Synthetic oligonucleotide
ccaaugagacuuguaaucc

SEQ ID NO: 1292144 - RNA, 19 nt, Artificial Sequence
  Description of Artificial Sequence: Synthetic oligonucleotide
uccaccagagcgacaacua

SEQ ID NO: 1292145 - RNA, 19 nt, Artificial Sequence
  Description of Artificial Sequence: Synthetic oligonucleotide
agagcgacaacuaccccug

SEQ ID NO: 1292146 - RNA, 19 nt, Artificial Sequence
  Description of Artificial Sequence: Synthetic oligonucleotide
gcaguugcaagacuuggac

SEQ ID NO: 1292147 - RNA, 19 nt, Artificial Sequence
  Description of Artificial Sequence: Synthetic oligonucleotide
guaaucgaugacagcauca

SEQ ID NO: 1292148 - RNA, 19 nt, Artificial Sequence
  Description of Artificial Sequence: Synthetic oligonucleotide
gugacugcauccaguaagc

SEQ ID NO: 1292149 - RNA, 19 nt, Artificial Sequence
  Description of Artificial Sequence: Synthetic oligonucleotide
cuccgcuuggccauagcac

SEQ ID NO: 1292150 - RNA, 19 nt, Artificial Sequence
  Description of Artificial Sequence: Synthetic oligonucleotide
agaagguagucagggccac

SEQ ID NO: 1292151 - RNA, 19 nt, Artificial Sequence
  Description of Artificial Sequence: Synthetic oligonucleotide
aaugcccgucuccgcuugg

SEQ ID NO: 1292152 - RNA, 19 nt, Artificial Sequence
  Description of Artificial Sequence: Synthetic oligonucleotide
guccugucaaggcacucag

SEQ ID NO: 1292153 - RNA, 19 nt, Artificial Sequence
  Description of Artificial Sequence: Synthetic oligonucleotide
ugugcgucacagaggggcu

SEQ ID NO: 1292154 - RNA, 19 nt, Artificial Sequence
  Description of Artificial Sequence: Synthetic oligonucleotide
ucgcugguucuaauaccag

SEQ ID NO: 1292155 - RNA, 19 nt, Artificial Sequence
  Description of Artificial Sequence: Synthetic oligonucleotide
aguagagauccaaguacug

SEQ ID NO: 1292156 - RNA, 19 nt, Artificial Sequence
  Description of Artificial Sequence: Synthetic oligonucleotide
cuuccacuaguucauagua

SEQ ID NO: 1292157 - RNA, 19 nt, Artificial Sequence
  Description of Artificial Sequence: Synthetic oligonucleotide
agacaagcguauccuuuca

SEQ ID NO: 1292158 - RNA, 19 nt, Artificial Sequence
  Description of Artificial Sequence: Synthetic oligonucleotide
cauccaguaagcgcugcag

SEQ ID NO: 1292159 - RNA, 19 nt, Artificial Sequence
  Description of Artificial Sequence: Synthetic oligonucleotide
auagcaguugcaagacuug

SEQ ID NO: 1292160 - RNA, 19 nt, Artificial Sequence
  Description of Artificial Sequence: Synthetic oligonucleotide
agucucucgccgcuucaag

SEQ ID NO: 1292161 - RNA, 19 nt, Artificial Sequence
  Description of Artificial Sequence: Synthetic oligonucleotide
aagugacugcauccaguaa

SEQ ID NO: 1292162 - RNA, 19 nt, Artificial Sequence
  Description of Artificial Sequence: Synthetic oligonucleotide
gucacagaggggcuaguca

SEQ ID NO: 1292163 - RNA, 19 nt, Artificial Sequence
  Description of Artificial Sequence: Synthetic oligonucleotide
caucuaauacucggcugcc

SEQ ID NO: 1292164 - RNA, 19 nt, Artificial Sequence
  Description of Artificial Sequence: Synthetic oligonucleotide
cuauuccaaggcagugaag

SEQ ID NO: 1292165 - RNA, 19 nt, Artificial Sequence
  Description of Artificial Sequence: Synthetic oligonucleotide
uuacgagaacucagguaau

SEQ ID NO: 1292166 - RNA, 19 nt, Artificial Sequence
  Description of Artificial Sequence: Synthetic oligonucleotide
cacucagacuucgaaguac

SEQ ID NO: 1292167 - RNA, 19 nt, Artificial Sequence
  Description of Artificial Sequence: Synthetic oligonucleotide
agcucgucugaucccgaag

SEQ ID NO: 1292168 - RNA, 19 nt, Artificial Sequence
  Description of Artificial Sequence: Synthetic oligonucleotide
ugccuccaauagcaguugc

SEQ ID NO: 1292169 - RNA, 19 nt, Artificial Sequence
  Description of Artificial Sequence: Synthetic oligonucleotide
aagaucugcaaggccacuu

SEQ ID NO: 1292170 - RNA, 19 nt, Artificial Sequence
  Description of Artificial Sequence: Synthetic oligonucleotide
gguccucuguguuucagac

SEQ ID NO: 1292171 - RNA, 19 nt, Artificial Sequence
  Description of Artificial Sequence: Synthetic oligonucleotide
uacgagaacucagguaauc

SEQ ID NO: 1292172 - RNA, 19 nt, Artificial Sequence
  Description of Artificial Sequence: Synthetic oligonucleotide
gcgucaaauacaugagagc

SEQ ID NO: 1292173 - RNA, 19 nt, Artificial Sequence
  Description of Artificial Sequence: Synthetic oligonucleotide
uggagcaguagagauccaa

SEQ ID NO: 1292174 - RNA, 19 nt, Artificial Sequence
  Description of Artificial Sequence: Synthetic oligonucleotide
gaaguacaaguccaggguu

SEQ ID NO: 1292175 - RNA, 19 nt, Artificial Sequence
  Description of Artificial Sequence: Synthetic oligonucleotide
ugcaagacuuggacuuggu

SEQ ID NO: 1292176 - RNA, 19 nt, Artificial Sequence
  Description of Artificial Sequence: Synthetic oligonucleotide
cagcaucacagagaugggc

SEQ ID NO: 1292177 - RNA, 19 nt, Artificial Sequence
  Description of Artificial Sequence: Synthetic oligonucleotide
ggcaucuaauacucggcug

SEQ ID NO: 1292178 - RNA, 19 nt, Artificial Sequence
  Description of Artificial Sequence: Synthetic oligonucleotide
acucagacuucgaaguaca

SEQ ID NO: 1292179 - RNA, 19 nt, Artificial Sequence
  Description of Artificial Sequence: Synthetic oligonucleotide
gugggcuuacauucccgag

SEQ ID NO: 1292180 - RNA, 19 nt, Artificial Sequence
  Description of Artificial Sequence: Synthetic oligonucleotide
auaccucauaugccaacaa

SEQ ID NO: 1292181 - RNA, 19 nt, Artificial Sequence
  Description of Artificial Sequence: Synthetic oligonucleotide
accuauuccaaggcaguga

SEQ ID NO: 1292182 - RNA, 19 nt, Artificial Sequence
  Description of Artificial Sequence: Synthetic oligonucleotide
gguaaucgaugacagcauc

SEQ ID NO: 1292183 - RNA, 19 nt, Artificial Sequence
  Description of Artificial Sequence: Synthetic oligonucleotide
agucccaacccugcggcag

SEQ ID NO: 1292184 - RNA, 19 nt, Artificial Sequence
  Description of Artificial Sequence: Synthetic oligonucleotide
aggauggcgucaaauacau

SEQ ID NO: 1292185 - RNA, 19 nt, Artificial Sequence
  Description of Artificial Sequence: Synthetic oligonucleotide
cugugauguaagaucugca

SEQ ID NO: 1292186 - RNA, 19 nt, Artificial Sequence
  Description of Artificial Sequence: Synthetic oligonucleotide
ugcgucacagaggggcuag

SEQ ID NO: 1292187 - RNA, 19 nt, Artificial Sequence
  Description of Artificial Sequence: Synthetic oligonucleotide
agacgacugggaaccacgg

SEQ ID NO: 1292188 - RNA, 19 nt, Artificial Sequence
  Description of Artificial Sequence: Synthetic oligonucleotide
agucagggccacauuucgg

SEQ ID NO: 1292189 - RNA, 19 nt, Artificial Sequence
  Description of Artificial Sequence: Synthetic oligonucleotide
guugcaagacuuggacuug

SEQ ID NO: 1292190 - RNA, 19 nt, Artificial Sequence
  Description of Artificial Sequence: Synthetic oligonucleotide
guuacuacaucugcuccaa

SEQ ID NO: 1292191 - RNA, 19 nt, Artificial Sequence
  Description of Artificial Sequence: Synthetic oligonucleotide
cauuucuaccugauguucu

SEQ ID NO: 1292192 - RNA, 19 nt, Artificial Sequence
  Description of Artificial Sequence: Synthetic oligonucleotide
gcaaagagaggcacacagg

SEQ ID NO: 1292193 - RNA, 19 nt, Artificial Sequence
  Description of Artificial Sequence: Synthetic oligonucleotide
caguagagauccaaguacu

SEQ ID NO: 1292194 - RNA, 19 nt, Artificial Sequence
  Description of Artificial Sequence: Synthetic oligonucleotide
acaguggaaugccuccaau

SEQ ID NO: 1292195 - RNA, 19 nt, Artificial Sequence
  Description of Artificial Sequence: Synthetic oligonucleotide
uaaaugcccgucuccgcuu

SEQ ID NO: 1292196 - RNA, 19 nt, Artificial Sequence
  Description of Artificial Sequence: Synthetic oligonucleotide
gcuacuugccgggaugagg

SEQ ID NO: 1292197 - RNA, 19 nt, Artificial Sequence
  Description of Artificial Sequence: Synthetic oligonucleotide
caugcgugucuccacagaa

SEQ ID NO: 1292198 - RNA, 19 nt, Artificial Sequence
  Description of Artificial Sequence: Synthetic oligonucleotide
cuggagcucgucugauccc

SEQ ID NO: 1292199 - RNA, 19 nt, Artificial Sequence
  Description of Artificial Sequence: Synthetic oligonucleotide
gcuuacauucccgagcuga

SEQ ID NO: 1292200 - RNA, 19 nt, Artificial Sequence
  Description of Artificial Sequence: Synthetic oligonucleotide
caggcuacuugccgggaug

SEQ ID NO: 1292201 - RNA, 19 nt, Artificial Sequence
  Description of Artificial Sequence: Synthetic oligonucleotide
guagucagggccacauuuc

SEQ ID NO: 1292202 - RNA, 19 nt, Artificial Sequence
  Description of Artificial Sequence: Synthetic oligonucleotide
ucagacgacugggaaccac

SEQ ID NO: 1292203 - RNA, 19 nt, Artificial Sequence
  Description of Artificial Sequence: Synthetic oligonucleotide
gagaacucagguaaucgau

SEQ ID NO: 1292204 - RNA, 19 nt, Artificial Sequence
  Description of Artificial Sequence: Synthetic oligonucleotide
ggcacucagacuucgaagu

SEQ ID NO: 1292205 - RNA, 19 nt, Artificial Sequence
  Description of Artificial Sequence: Synthetic oligonucleotide
caaggccacuugaagacaa

SEQ ID NO: 1292206 - RNA, 19 nt, Artificial Sequence
  Description of Artificial Sequence: Synthetic oligonucleotide
acaccuauuccaaggcagu

SEQ ID NO: 1292207 - RNA, 19 nt, Artificial Sequence
  Description of Artificial Sequence: Synthetic oligonucleotide
caacaccuauuccaaggca

SEQ ID NO: 1292208 - RNA, 19 nt, Artificial Sequence
  Description of Artificial Sequence: Synthetic oligonucleotide
cagagcgacaacuaccccu

SEQ ID NO: 1292209 - RNA, 19 nt, Artificial Sequence
  Description of Artificial Sequence: Synthetic oligonucleotide
guaaucugugauguaagau

SEQ ID NO: 1292210 - RNA, 19 nt, Artificial Sequence
  Description of Artificial Sequence: Synthetic oligonucleotide
guagagauccaaguacugu

SEQ ID NO: 1292211 - RNA, 19 nt, Artificial Sequence
  Description of Artificial Sequence: Synthetic oligonucleotide
acgacgcugcuugugcguc

SEQ ID NO: 1292212 - RNA, 19 nt, Artificial Sequence
  Description of Artificial Sequence: Synthetic oligonucleotide
uacuugccgggaugagggc

SEQ ID NO: 1292213 - RNA, 19 nt, Artificial Sequence
  Description of Artificial Sequence: Synthetic oligonucleotide
cuugugcgucacagagggg

SEQ ID NO: 1292214 - RNA, 19 nt, Artificial Sequence
  Description of Artificial Sequence: Synthetic oligonucleotide
agcaguugcaagacuugga

SEQ ID NO: 1292215 - RNA, 19 nt, Artificial Sequence
  Description of Artificial Sequence: Synthetic oligonucleotide
uucugaccacgaagcugcc

SEQ ID NO: 1292216 - RNA, 19 nt, Artificial Sequence
  Description of Artificial Sequence: Synthetic oligonucleotide
cugugguccugucaaggca

SEQ ID NO: 1292217 - RNA, 19 nt, Artificial Sequence
  Description of Artificial Sequence: Synthetic oligonucleotide
acuuguaauccaacuugaa

SEQ ID NO: 1292218 - RNA, 19 nt, Artificial Sequence
  Description of Artificial Sequence: Synthetic oligonucleotide
ccaauagcaguugcaagac

SEQ ID NO: 1292219 - RNA, 19 nt, Artificial Sequence
  Description of Artificial Sequence: Synthetic oligonucleotide
cagugauaaauacugcaau

SEQ ID NO: 1292220 - RNA, 19 nt, Artificial Sequence
  Description of Artificial Sequence: Synthetic oligonucleotide
augcgugucuccacagaag

SEQ ID NO: 1292221 - RNA, 19 nt, Artificial Sequence
  Description of Artificial Sequence: Synthetic oligonucleotide
gcucgucugaucccgaaga

SEQ ID NO: 1292222 - RNA, 19 nt, Artificial Sequence
  Description of Artificial Sequence: Synthetic oligonucleotide
acgaagcugccaugcgugu

SEQ ID NO: 1292223 - RNA, 19 nt, Artificial Sequence
  Description of Artificial Sequence: Synthetic oligonucleotide
cuagccccaggacuagcuc

SEQ ID NO: 1292224 - RNA, 19 nt, Artificial Sequence
  Description of Artificial Sequence: Synthetic oligonucleotide
gagcgacaacuaccccugg

SEQ ID NO: 1292225 - RNA, 19 nt, Artificial Sequence
  Description of Artificial Sequence: Synthetic oligonucleotide
ugcuguucccaagucucuc

SEQ ID NO: 1292226 - RNA, 19 nt, Artificial Sequence
  Description of Artificial Sequence: Synthetic oligonucleotide
aucuaauacucggcugcca

SEQ ID NO: 1292227 - RNA, 19 nt, Artificial Sequence
  Description of Artificial Sequence: Synthetic oligonucleotide
uuacuacaucugcuccaau

SEQ ID NO: 1292228 - RNA, 19 nt, Artificial Sequence
  Description of Artificial Sequence: Synthetic oligonucleotide
gccucgcugguucuaauac

SEQ ID NO: 1292229 - RNA, 19 nt, Artificial Sequence
  Description of Artificial Sequence: Synthetic oligonucleotide
ggaaagacaagcguauccu

SEQ ID NO: 1292230 - RNA, 19 nt, Artificial Sequence
  Description of Artificial Sequence: Synthetic oligonucleotide
caccuauuccaaggcagug

SEQ ID NO: 1292231 - RNA, 19 nt, Artificial Sequence
  Description of Artificial Sequence: Synthetic oligonucleotide
caaaagcuggagaucuugu

SEQ ID NO: 1292232 - RNA, 19 nt, Artificial Sequence
  Description of Artificial Sequence: Synthetic oligonucleotide
caguggaaugccuccaaua

SEQ ID NO: 1292233 - RNA, 19 nt, Artificial Sequence
  Description of Artificial Sequence: Synthetic oligonucleotide
agguaaucgaugacagcau

SEQ ID NO: 1292234 - RNA, 19 nt, Artificial Sequence
  Description of Artificial Sequence: Synthetic oligonucleotide
ccaguaagcgcugcagggg

SEQ ID NO: 1292235 - RNA, 19 nt, Artificial Sequence
  Description of Artificial Sequence: Synthetic oligonucleotide
cacuaggguuacaguuuug

SEQ ID NO: 1292236 - RNA, 19 nt, Artificial Sequence
  Description of Artificial Sequence: Synthetic oligonucleotide
cuccaaugagacuuguaau

SEQ ID NO: 1292237 - RNA, 19 nt, Artificial Sequence
  Description of Artificial Sequence: Synthetic oligonucleotide
guauccuuucacccuccaa

SEQ ID NO: 1292238 - RNA, 19 nt, Artificial Sequence
  Description of Artificial Sequence: Synthetic oligonucleotide
gcugguucuaauaccagua

SEQ ID NO: 1292239 - RNA, 19 nt, Artificial Sequence
  Description of Artificial Sequence: Synthetic oligonucleotide
agccucgcugguucuaaua

SEQ ID NO: 1292240 - RNA, 19 nt, Artificial Sequence
  Description of Artificial Sequence: Synthetic oligonucleotide
acuaccccuggguggcccu

SEQ ID NO: 1292241 - RNA, 19 nt, Artificial Sequence
  Description of Artificial Sequence: Synthetic oligonucleotide
aggcuacuugccgggauga

SEQ ID NO: 1292242 - RNA, 19 nt, Artificial Sequence
  Description of Artificial Sequence: Synthetic oligonucleotide
cugccaugcgugucuccac

SEQ ID NO: 1292243 - RNA, 19 nt, Artificial Sequence
  Description of Artificial Sequence: Synthetic oligonucleotide
ccuauuccaaggcagugaa

SEQ ID NO: 1292244 - RNA, 19 nt, Artificial Sequence
  Description of Artificial Sequence: Synthetic oligonucleotide
cagcagcaaucuccuuccg

SEQ ID NO: 1292245 - RNA, 19 nt, Artificial Sequence
  Description of Artificial Sequence: Synthetic oligonucleotide
guguguuacuacaucugcu

SEQ ID NO: 1292246 - RNA, 19 nt, Artificial Sequence
  Description of Artificial Sequence: Synthetic oligonucleotide
ccaggguuggagaaauaca

SEQ ID NO: 1292247 - RNA, 19 nt, Artificial Sequence
  Description of Artificial Sequence: Synthetic oligonucleotide
guaccuccuaacacuugca

SEQ ID NO: 1292248 - RNA, 19 nt, Artificial Sequence
  Description of Artificial Sequence: Synthetic oligonucleotide
cacgacgacgcugcuugug

SEQ ID NO: 1292249 - RNA, 19 nt, Artificial Sequence
  Description of Artificial Sequence: Synthetic oligonucleotide
uucagacgacugggaacca

SEQ ID NO: 1292250 - RNA, 19 nt, Artificial Sequence
  Description of Artificial Sequence: Synthetic oligonucleotide
aaggccacuugaagacaaa

SEQ ID NO: 1292251 - RNA, 19 nt, Artificial Sequence
  Description of Artificial Sequence: Synthetic oligonucleotide
gacgacgcugcuugugcgu

SEQ ID NO: 1292252 - RNA, 19 nt, Artificial Sequence
  Description of Artificial Sequence: Synthetic oligonucleotide
caagagucuggagcucguc

SEQ ID NO: 1292253 - RNA, 19 nt, Artificial Sequence
  Description of Artificial Sequence: Synthetic oligonucleotide
gggcuuacauucccgagcu

SEQ ID NO: 1292254 - RNA, 19 nt, Artificial Sequence
  Description of Artificial Sequence: Synthetic oligonucleotide
cacuccagauggcaucuaa

SEQ ID NO: 1292255 - RNA, 19 nt, Artificial Sequence
  Description of Artificial Sequence: Synthetic oligonucleotide
ggcuagucaggauggcguc

SEQ ID NO: 1292256 - RNA, 19 nt, Artificial Sequence
  Description of Artificial Sequence: Synthetic oligonucleotide
cagacaccucagcggcuag

SEQ ID NO: 1292257 - RNA, 19 nt, Artificial Sequence
  Description of Artificial Sequence: Synthetic oligonucleotide
cucgucugaucccgaagaa

SEQ ID NO: 1292258 - RNA, 19 nt, Artificial Sequence
  Description of Artificial Sequence: Synthetic oligonucleotide
gucaaggcacucagacuuc

SEQ ID NO: 1292259 - RNA, 19 nt, Artificial Sequence
  Description of Artificial Sequence: Synthetic oligonucleotide
cugucaaggcacucagacu

SEQ ID NO: 1292260 - RNA, 19 nt, Artificial Sequence
  Description of Artificial Sequence: Synthetic oligonucleotide
gccaugcgugucuccacag

SEQ ID NO: 1292261 - RNA, 19 nt, Artificial Sequence
  Description of Artificial Sequence: Synthetic oligonucleotide
gagcucgucugaucccgaa

SEQ ID NO: 1292262 - RNA, 19 nt, Artificial Sequence
  Description of Artificial Sequence: Synthetic oligonucleotide
auaugccaacaaagaggca

SEQ ID NO: 1292263 - RNA, 19 nt, Artificial Sequence
  Description of Artificial Sequence: Synthetic oligonucleotide
caagucucucgccgcuuca

SEQ ID NO: 1292264 - RNA, 19 nt, Artificial Sequence
  Description of Artificial Sequence: Synthetic oligonucleotide
cacgggacuuggcucucuc

SEQ ID NO: 1292265 - RNA, 19 nt, Artificial Sequence
  Description of Artificial Sequence: Synthetic oligonucleotide
cgagaacucagguaaucga

SEQ ID NO: 1292266 - RNA, 19 nt, Artificial Sequence
  Description of Artificial Sequence: Synthetic oligonucleotide
gcgacaacuaccccugggu

SEQ ID NO: 1292267 - RNA, 19 nt, Artificial Sequence
  Description of Artificial Sequence: Synthetic oligonucleotide
caauagcaguugcaagacu

SEQ ID NO: 1292268 - RNA, 19 nt, Artificial Sequence
  Description of Artificial Sequence: Synthetic oligonucleotide
agcacacgacgacgcugcu

SEQ ID NO: 1292269 - RNA, 19 nt, Artificial Sequence
  Description of Artificial Sequence: Synthetic oligonucleotide
gcuacacuaggguuacagu

SEQ ID NO: 1292270 - RNA, 19 nt, Artificial Sequence
  Description of Artificial Sequence: Synthetic oligonucleotide
accucagcggcuagcccca

SEQ ID NO: 1292271 - RNA, 19 nt, Artificial Sequence
  Description of Artificial Sequence: Synthetic oligonucleotide
ggcaauucaagaagguuuu

SEQ ID NO: 1292272 - RNA, 19 nt, Artificial Sequence
  Description of Artificial Sequence: Synthetic oligonucleotide
gcugcuugugcgucacaga

SEQ ID NO: 1292273 - RNA, 19 nt, Artificial Sequence
  Description of Artificial Sequence: Synthetic oligonucleotide
cgacaacuaccccugggug

SEQ ID NO: 1292274 - RNA, 19 nt, Artificial Sequence
  Description of Artificial Sequence: Synthetic oligonucleotide
gucugaucccgaagaaaua

SEQ ID NO: 1292275 - RNA, 19 nt, Artificial Sequence
  Description of Artificial Sequence: Synthetic oligonucleotide
cuccaagagucuggagcuc

SEQ ID NO: 1292276 - RNA, 19 nt, Artificial Sequence
  Description of Artificial Sequence: Synthetic oligonucleotide
ugguccugucaaggcacuc

SEQ ID NO: 1292277 - RNA, 19 nt, Artificial Sequence
  Description of Artificial Sequence: Synthetic oligonucleotide
acacgacgacgcugcuugu

SEQ ID NO: 1292278 - RNA, 19 nt, Artificial Sequence
  Description of Artificial Sequence: Synthetic oligonucleotide
ggaagugacugcauccagu

SEQ ID NO: 1292279 - RNA, 19 nt, Artificial Sequence
  Description of Artificial Sequence: Synthetic oligonucleotide
caaaaucagugggcuuaca

SEQ ID NO: 1292280 - RNA, 19 nt, Artificial Sequence
  Description of Artificial Sequence: Synthetic oligonucleotide
gcauccaguaagcgcugca

SEQ ID NO: 1292281 - RNA, 19 nt, Artificial Sequence
  Description of Artificial Sequence: Synthetic oligonucleotide
auucccgagcugagguccu

SEQ ID NO: 1292282 - RNA, 19 nt, Artificial Sequence
  Description of Artificial Sequence: Synthetic oligonucleotide
guacaaguccaggguugga

SEQ ID NO: 1292283 - RNA, 19 nt, Artificial Sequence
  Description of Artificial Sequence: Synthetic oligonucleotide
gaugagggcucugcacagu

SEQ ID NO: 1292284 - RNA, 19 nt, Artificial Sequence
  Description of Artificial Sequence: Synthetic oligonucleotide
ccaagucucucgccgcuuc

SEQ ID NO: 1292285 - RNA, 19 nt, Artificial Sequence
  Description of Artificial Sequence: Synthetic oligonucleotide
gcaggaaagacaagcguau

SEQ ID NO: 1292286 - RNA, 19 nt, Artificial Sequence
  Description of Artificial Sequence: Synthetic oligonucleotide
cgacgacgcugcuugugcg

SEQ ID NO: 1292287 - RNA, 19 nt, Artificial Sequence
  Description of Artificial Sequence: Synthetic oligonucleotide
cacuugcagcagaguucug

SEQ ID NO: 1292288 - RNA, 19 nt, Artificial Sequence
  Description of Artificial Sequence: Synthetic oligonucleotide
uucgggccacgugguggcc

SEQ ID NO: 1292289 - RNA, 19 nt, Artificial Sequence
  Description of Artificial Sequence: Synthetic oligonucleotide
caacuaccccuggguggcc

SEQ ID NO: 1292290 - RNA, 19 nt, Artificial Sequence
  Description of Artificial Sequence: Synthetic oligonucleotide
gccuccaauagcaguugca

SEQ ID NO: 1292291 - RNA, 19 nt, Artificial Sequence
  Description of Artificial Sequence: Synthetic oligonucleotide
ccaaagcuacacuaggguu

SEQ ID NO: 1292292 - RNA, 19 nt, Artificial Sequence
  Description of Artificial Sequence: Synthetic oligonucleotide
gguuacaguuuuguguguu

SEQ ID NO: 1292293 - RNA, 19 nt, Artificial Sequence
  Description of Artificial Sequence: Synthetic oligonucleotide
ccuccaaucaacaccuauu

SEQ ID NO: 1292294 - RNA, 19 nt, Artificial Sequence
  Description of Artificial Sequence: Synthetic oligonucleotide
gagaggcacacaggcuacu

SEQ ID NO: 1292295 - RNA, 19 nt, Artificial Sequence
  Description of Artificial Sequence: Synthetic oligonucleotide
ccucuguguuucagacgac

SEQ ID NO: 1292296 - RNA, 19 nt, Artificial Sequence
  Description of Artificial Sequence: Synthetic oligonucleotide
gcggcuagccccaggacua

SEQ ID NO: 1292297 - RNA, 19 nt, Artificial Sequence
  Description of Artificial Sequence: Synthetic oligonucleotide
cccgagcugagguccucug

SEQ ID NO: 1292298 - RNA, 19 nt, Artificial Sequence
  Description of Artificial Sequence: Synthetic oligonucleotide
ggguuacaguuuugugugu

SEQ ID NO: 1292299 - RNA, 19 nt, Artificial Sequence
  Description of Artificial Sequence: Synthetic oligonucleotide
ggagccucgcugguucuaa

SEQ ID NO: 1292300 - RNA, 19 nt, Artificial Sequence
  Description of Artificial Sequence: Synthetic oligonucleotide
gagccucgcugguucuaau

SEQ ID NO: 1292301 - RNA, 19 nt, Artificial Sequence
  Description of Artificial Sequence: Synthetic oligonucleotide
gugcgucacagaggggcua

SEQ ID NO: 1292302 - RNA, 19 nt, Artificial Sequence
  Description of Artificial Sequence: Synthetic oligonucleotide
gugguccugucaaggcacu

SEQ ID NO: 1292303 - RNA, 19 nt, Artificial Sequence
  Description of Artificial Sequence: Synthetic oligonucleotide
cgucacagaggggcuaguc

SEQ ID NO: 1292304 - RNA, 19 nt, Artificial Sequence
  Description of Artificial Sequence: Synthetic oligonucleotide
cgcugguucuaauaccagu

SEQ ID NO: 1292305 - RNA, 19 nt, Artificial Sequence
  Description of Artificial Sequence: Synthetic oligonucleotide
cagaggggcuagucaggau

SEQ ID NO: 1292306 - RNA, 19 nt, Artificial Sequence
  Description of Artificial Sequence: Synthetic oligonucleotide
ccgcuucaagaagguaguc

SEQ ID NO: 1292307 - RNA, 19 nt, Artificial Sequence
  Description of Artificial Sequence: Synthetic oligonucleotide
cugcuccaaugagacuugu

SEQ ID NO: 1292308 - RNA, 19 nt, Artificial Sequence
  Description of Artificial Sequence: Synthetic oligonucleotide
ccaagagucuggagcucgu

SEQ ID NO: 1292309 - RNA, 19 nt, Artificial Sequence
  Description of Artificial Sequence: Synthetic oligonucleotide
acccuccaaucaacaccua

SEQ ID NO: 1292310 - RNA, 19 nt, Artificial Sequence
  Description of Artificial Sequence: Synthetic oligonucleotide
ccgagcugagguccucugu

SEQ ID NO: 1292311 - RNA, 19 nt, Artificial Sequence
  Description of Artificial Sequence: Synthetic oligonucleotide
cggcuagccccaggacuag

SEQ ID NO: 1292312 - RNA, 19 nt, Artificial Sequence
  Description of Artificial Sequence: Synthetic oligonucleotide
ccucagcggcuagccccag

SEQ ID NO: 1292313 - RNA, 19 nt, Artificial Sequence
  Description of Artificial Sequence: Synthetic oligonucleotide
gcacacgacgacgcugcuu

SEQ ID NO: 1292314 - RNA, 19 nt, Artificial Sequence
  Description of Artificial Sequence: Synthetic oligonucleotide
aaagacacuagcugcaccg

SEQ ID NO: 1292315 - RNA, 19 nt, Artificial Sequence
  Description of Artificial Sequence: Synthetic oligonucleotide
agaacuauggaacacacca

SEQ ID NO: 1292316 - RNA, 19 nt, Artificial Sequence
  Description of Artificial Sequence: Synthetic oligonucleotide
aacaucccgaaccugacag

SEQ ID NO: 1292317 - RNA, 19 nt, Artificial Sequence
  Description of Artificial Sequence: Synthetic oligonucleotide
aaugcggugaagccaggcc

SEQ ID NO: 1292318 - RNA, 19 nt, Artificial Sequence
  Description of Artificial Sequence: Synthetic oligonucleotide
auaguagugucacauacag

SEQ ID NO: 1292319 - RNA, 19 nt, Artificial Sequence
  Description of Artificial Sequence: Synthetic oligonucleotide
ucguagaugaugaacacga

SEQ ID NO: 1292320 - RNA, 19 nt, Artificial Sequence
  Description of Artificial Sequence: Synthetic oligonucleotide
cauacagaccacaugacag

SEQ ID NO: 1292321 - RNA, 19 nt, Artificial Sequence
  Description of Artificial Sequence: Synthetic oligonucleotide
ugagcacauauucacaagc

SEQ ID NO: 1292322 - RNA, 19 nt, Artificial Sequence
  Description of Artificial Sequence: Synthetic oligonucleotide
ucuuccaaacuuuauugag

SEQ ID NO: 1292323 - RNA, 19 nt, Artificial Sequence
  Description of Artificial Sequence: Synthetic oligonucleotide
cauuuaaggccaauggcgg

SEQ ID NO: 1292324 - RNA, 19 nt, Artificial Sequence
  Description of Artificial Sequence: Synthetic oligonucleotide
cauaagagaagauggcggg

SEQ ID NO: 1292325 - RNA, 19 nt, Artificial Sequence
  Description of Artificial Sequence: Synthetic oligonucleotide
gaaacaagcacauggcuca

SEQ ID NO: 1292326 - RNA, 19 nt, Artificial Sequence
  Description of Artificial Sequence: Synthetic oligonucleotide
auuugugugcuuccaggcc

SEQ ID NO: 1292327 - RNA, 19 nt, Artificial Sequence
  Description of Artificial Sequence: Synthetic oligonucleotide
aaggggaagggccuuuugg

SEQ ID NO: 1292328 - RNA, 19 nt, Artificial Sequence
  Description of Artificial Sequence: Synthetic oligonucleotide
gacaguuugccucacgcag

SEQ ID NO: 1292329 - RNA, 19 nt, Artificial Sequence
  Description of Artificial Sequence: Synthetic oligonucleotide
ugaaacaagcacauggcuc

SEQ ID NO: 1292330 - RNA, 19 nt, Artificial Sequence
  Description of Artificial Sequence: Synthetic oligonucleotide
gaggaacucaaacaucccg

SEQ ID NO: 1292331 - RNA, 19 nt, Artificial Sequence
  Description of Artificial Sequence: Synthetic oligonucleotide
aucauaagagaagauggcg

SEQ ID NO: 1292332 - RNA, 19 nt, Artificial Sequence
  Description of Artificial Sequence: Synthetic oligonucleotide
uguucuuguauuugugugc

SEQ ID NO: 1292333 - RNA, 19 nt, Artificial Sequence
  Description of Artificial Sequence: Synthetic oligonucleotide
cuuccaaacuuuauugagc

SEQ ID NO: 1292334 - RNA, 19 nt, Artificial Sequence
  Description of Artificial Sequence: Synthetic oligonucleotide
guauuugugugcuuccagg

SEQ ID NO: 1292335 - RNA, 19 nt, Artificial Sequence
  Description of Artificial Sequence: Synthetic oligonucleotide
aaauccucgguacuuggga

SEQ ID NO: 1292336 - RNA, 19 nt, Artificial Sequence
  Description of Artificial Sequence: Synthetic oligonucleotide
gguuuauucuccuuggcag

SEQ ID NO: 1292337 - RNA, 19 nt, Artificial Sequence
  Description of Artificial Sequence: Synthetic oligonucleotide
ugacacagaacaugaaaca

SEQ ID NO: 1292338 - RNA, 19 nt, Artificial Sequence
  Description of Artificial Sequence: Synthetic oligonucleotide
ccauuuaaggccaauggcg

SEQ ID NO: 1292339 - RNA, 19 nt, Artificial Sequence
  Description of Artificial Sequence: Synthetic oligonucleotide
agauuucuaugccucccgc

SEQ ID NO: 1292340 - RNA, 19 nt, Artificial Sequence
  Description of Artificial Sequence: Synthetic oligonucleotide
uauucacaagccauagaga

SEQ ID NO: 1292341 - RNA, 19 nt, Artificial Sequence
  Description of Artificial Sequence: Synthetic oligonucleotide
uuguagaaugccuuggguc

SEQ ID NO: 1292342 - RNA, 19 nt, Artificial Sequence
  Description of Artificial Sequence: Synthetic oligonucleotide
gacacaauaguagugucac

SEQ ID NO: 1292343 - RNA, 19 nt, Artificial Sequence
  Description of Artificial Sequence: Synthetic oligonucleotide
cauaacgaagaaucggaug

SEQ ID NO: 1292344 - RNA, 19 nt, Artificial Sequence
  Description of Artificial Sequence: Synthetic oligonucleotide
uacucgguagggaagguga

SEQ ID NO: 1292345 - RNA, 19 nt, Artificial Sequence
  Description of Artificial Sequence: Synthetic oligonucleotide
auuuaaggccaauggcggg

SEQ ID NO: 1292346 - RNA, 19 nt, Artificial Sequence
  Description of Artificial Sequence: Synthetic oligonucleotide
auuucuaugccucccgcca

SEQ ID NO: 1292347 - RNA, 19 nt, Artificial Sequence
  Description of Artificial Sequence: Synthetic oligonucleotide
gacaggauccgguuuauuc

SEQ ID NO: 1292348 - RNA, 19 nt, Artificial Sequence
  Description of Artificial Sequence: Synthetic oligonucleotide
uccgguuuauucuccuugg

SEQ ID NO: 1292349 - RNA, 19 nt, Artificial Sequence
  Description of Artificial Sequence: Synthetic oligonucleotide
uugguuugagcccugcuuc

SEQ ID NO: 1292350 - RNA, 19 nt, Artificial Sequence
  Description of Artificial Sequence: Synthetic oligonucleotide
cuugguauguccccuuuag

SEQ ID NO: 1292351 - RNA, 19 nt, Artificial Sequence
  Description of Artificial Sequence: Synthetic oligonucleotide
aaggcaccggacugugacc

SEQ ID NO: 1292352 - RNA, 19 nt, Artificial Sequence
  Description of Artificial Sequence: Synthetic oligonucleotide
ucuaggguuagucugucuu

SEQ ID NO: 1292353 - RNA, 19 nt, Artificial Sequence
  Description of Artificial Sequence: Synthetic oligonucleotide
ucuucacguacucgguagg

SEQ ID NO: 1292354 - RNA, 19 nt, Artificial Sequence
  Description of Artificial Sequence: Synthetic oligonucleotide
augcggugaagccaggccg

SEQ ID NO: 1292355 - RNA, 19 nt, Artificial Sequence
  Description of Artificial Sequence: Synthetic oligonucleotide
cucgguaccaguugcguag

SEQ ID NO: 1292356 - RNA, 19 nt, Artificial Sequence
  Description of Artificial Sequence: Synthetic oligonucleotide
cuuguauuugugugcuucc

SEQ ID NO: 1292357 - RNA, 19 nt, Artificial Sequence
  Description of Artificial Sequence: Synthetic oligonucleotide
aagcaauggagaagugagc

SEQ ID NO: 1292358 - RNA, 19 nt, Artificial Sequence
  Description of Artificial Sequence: Synthetic oligonucleotide
gauuucuaugccucccgcc

SEQ ID NO: 1292359 - RNA, 19 nt, Artificial Sequence
  Description of Artificial Sequence: Synthetic oligonucleotide
uucccuaacaaucucccua

SEQ ID NO: 1292360 - RNA, 19 nt, Artificial Sequence
  Description of Artificial Sequence: Synthetic oligonucleotide
acauacagaccacaugaca

SEQ ID NO: 1292361 - RNA, 19 nt, Artificial Sequence
  Description of Artificial Sequence: Synthetic oligonucleotide
ucuagcugcaacugcgucu

SEQ ID NO: 1292362 - RNA, 19 nt, Artificial Sequence
  Description of Artificial Sequence: Synthetic oligonucleotide
aucuucaagccacagucca

SEQ ID NO: 1292363 - RNA, 19 nt, Artificial Sequence
  Description of Artificial Sequence: Synthetic oligonucleotide
gaagaaucggauggcuugg

SEQ ID NO: 1292364 - RNA, 19 nt, Artificial Sequence
  Description of Artificial Sequence: Synthetic oligonucleotide
agcaauggagaagugagca

SEQ ID NO: 1292365 - RNA, 19 nt, Artificial Sequence
  Description of Artificial Sequence: Synthetic oligonucleotide
ugacagacacagaacuaug

SEQ ID NO: 1292366 - RNA, 19 nt, Artificial Sequence
  Description of Artificial Sequence: Synthetic oligonucleotide
agcacauauucacaagcca

SEQ ID NO: 1292367 - RNA, 19 nt, Artificial Sequence
  Description of Artificial Sequence: Synthetic oligonucleotide
cacaacagcccucucgugc

SEQ ID NO: 1292368 - RNA, 19 nt, Artificial Sequence
  Description of Artificial Sequence: Synthetic oligonucleotide
uuucuaugccucccgccag

SEQ ID NO: 1292369 - RNA, 19 nt, Artificial Sequence
  Description of Artificial Sequence: Synthetic oligonucleotide
gucagcguggccuucccgg

SEQ ID NO: 1292370 - RNA, 19 nt, Artificial Sequence
  Description of Artificial Sequence: Synthetic oligonucleotide
acuucaucguagaugauga

SEQ ID NO: 1292371 - RNA, 19 nt, Artificial Sequence
  Description of Artificial Sequence: Synthetic oligonucleotide
auacagaccacaugacaga

SEQ ID NO: 1292372 - RNA, 19 nt, Artificial Sequence
  Description of Artificial Sequence: Synthetic oligonucleotide
ugaggaacucaaacauccc

SEQ ID NO: 1292373 - RNA, 19 nt, Artificial Sequence
  Description of Artificial Sequence: Synthetic oligonucleotide
ugaggccuugguauguccc

SEQ ID NO: 1292374 - RNA, 19 nt, Artificial Sequence
  Description of Artificial Sequence: Synthetic oligonucleotide
ggugaugcagauuucuaug

SEQ ID NO: 1292375 - RNA, 19 nt, Artificial Sequence
  Description of Artificial Sequence: Synthetic oligonucleotide
ggucauaacgaagaaucgg

SEQ ID NO: 1292376 - RNA, 19 nt, Artificial Sequence
  Description of Artificial Sequence: Synthetic oligonucleotide
aauccucgguacuugggau

SEQ ID NO: 1292377 - RNA, 19 nt, Artificial Sequence
  Description of Artificial Sequence: Synthetic oligonucleotide
cauauagccccuggaaugc

SEQ ID NO: 1292378 - RNA, 19 nt, Artificial Sequence
  Description of Artificial Sequence: Synthetic oligonucleotide
gagcacauauucacaagcc

SEQ ID NO: 1292379 - RNA, 19 nt, Artificial Sequence
  Description of Artificial Sequence: Synthetic oligonucleotide
uugguauguccccuuuagc

SEQ ID NO: 1292380 - RNA, 19 nt, Artificial Sequence
  Description of Artificial Sequence: Synthetic oligonucleotide
aaacaucccgaaccugaca

SEQ ID NO: 1292381 - RNA, 19 nt, Artificial Sequence
  Description of Artificial Sequence: Synthetic oligonucleotide
gucauaacgaagaaucgga

SEQ ID NO: 1292382 - RNA, 19 nt, Artificial Sequence
  Description of Artificial Sequence: Synthetic oligonucleotide
cagauuucuaugccucccg

SEQ ID NO: 1292383 - RNA, 19 nt, Artificial Sequence
  Description of Artificial Sequence: Synthetic oligonucleotide
uaccaguugcguagugagg

SEQ ID NO: 1292384 - RNA, 19 nt, Artificial Sequence
  Description of Artificial Sequence: Synthetic oligonucleotide
ucccgaaccugacagccgc

SEQ ID NO: 1292385 - RNA, 19 nt, Artificial Sequence
  Description of Artificial Sequence: Synthetic oligonucleotide
aagacacuagcugcaccgg

SEQ ID NO: 1292386 - RNA, 19 nt, Artificial Sequence
  Description of Artificial Sequence: Synthetic oligonucleotide
cgagcguucaucuagcugc

SEQ ID NO: 1292387 - RNA, 19 nt, Artificial Sequence
  Description of Artificial Sequence: Synthetic oligonucleotide
cauggcugcggacaguuug

SEQ ID NO: 1292388 - RNA, 19 nt, Artificial Sequence
  Description of Artificial Sequence: Synthetic oligonucleotide
ucgguacuugggauugggg

SEQ ID NO: 1292389 - RNA, 19 nt, Artificial Sequence
  Description of Artificial Sequence: Synthetic oligonucleotide
gaacuauggaacacaccag

SEQ ID NO: 1292390 - RNA, 19 nt, Artificial Sequence
  Description of Artificial Sequence: Synthetic oligonucleotide
ugcagauuucuaugccucc

SEQ ID NO: 1292391 - RNA, 19 nt, Artificial Sequence
  Description of Artificial Sequence: Synthetic oligonucleotide
aacuucaccuugauagucu

SEQ ID NO: 1292392 - RNA, 19 nt, Artificial Sequence
  Description of Artificial Sequence: Synthetic oligonucleotide
gcguagugaggucauaacg

SEQ ID NO: 1292393 - RNA, 19 nt, Artificial Sequence
  Description of Artificial Sequence: Synthetic oligonucleotide
ugagaacgcgggcucgcgg

SEQ ID NO: 1292394 - RNA, 19 nt, Artificial Sequence
  Description of Artificial Sequence: Synthetic oligonucleotide
gcauauagccccuggaaug

SEQ ID NO: 1292395 - RNA, 19 nt, Artificial Sequence
  Description of Artificial Sequence: Synthetic oligonucleotide
cucacaagcaagcaaugga

SEQ ID NO: 1292396 - RNA, 19 nt, Artificial Sequence
  Description of Artificial Sequence: Synthetic oligonucleotide
accaguugcguagugaggu

SEQ ID NO: 1292397 - RNA, 19 nt, Artificial Sequence
  Description of Artificial Sequence: Synthetic oligonucleotide
ucacguacucgguagggaa

SEQ ID NO: 1292398 - RNA, 19 nt, Artificial Sequence
  Description of Artificial Sequence: Synthetic oligonucleotide
uccaaacuuuauugagcag

SEQ ID NO: 1292399 - RNA, 19 nt, Artificial Sequence
  Description of Artificial Sequence: Synthetic oligonucleotide
ucccuaacaaucucccuaa

SEQ ID NO: 1292400 - RNA, 19 nt, Artificial Sequence
  Description of Artificial Sequence: Synthetic oligonucleotide
gaaccugacagccgccuug

SEQ ID NO: 1292401 - RNA, 19 nt, Artificial Sequence
  Description of Artificial Sequence: Synthetic oligonucleotide
cacuucaucguagaugaug

SEQ ID NO: 1292402 - RNA, 19 nt, Artificial Sequence
  Description of Artificial Sequence: Synthetic oligonucleotide
ggaauagugcccuuguaga

SEQ ID NO: 1292403 - RNA, 19 nt, Artificial Sequence
  Description of Artificial Sequence: Synthetic oligonucleotide
aaacaagcacauggcucac

SEQ ID NO: 1292404 - RNA, 19 nt, Artificial Sequence
  Description of Artificial Sequence: Synthetic oligonucleotide
acugcgucuucacguacuc

SEQ ID NO: 1292405 - RNA, 19 nt, Artificial Sequence
  Description of Artificial Sequence: Synthetic oligonucleotide
aaccugacagccgccuugg

SEQ ID NO: 1292406 - RNA, 19 nt, Artificial Sequence
  Description of Artificial Sequence: Synthetic oligonucleotide
aauggguucaugggcuugu

SEQ ID NO: 1292407 - RNA, 19 nt, Artificial Sequence
  Description of Artificial Sequence: Synthetic oligonucleotide
gaauagugcccuuguagaa

SEQ ID NO: 1292408 - RNA, 19 nt, Artificial Sequence
  Description of Artificial Sequence: Synthetic oligonucleotide
aggucauaacgaagaaucg

SEQ ID NO: 1292409 - RNA, 19 nt, Artificial Sequence
  Description of Artificial Sequence: Synthetic oligonucleotide
uuuuggcacuacugcacug

SEQ ID NO: 1292410 - RNA, 19 nt, Artificial Sequence
  Description of Artificial Sequence: Synthetic oligonucleotide
uccccaaugccccgguacc

SEQ ID NO: 1292411 - RNA, 19 nt, Artificial Sequence
  Description of Artificial Sequence: Synthetic oligonucleotide
caucccgaaccugacagcc

SEQ ID NO: 1292412 - RNA, 19 nt, Artificial Sequence
  Description of Artificial Sequence: Synthetic oligonucleotide
gccauuuaaggccaauggc

SEQ ID NO: 1292413 - RNA, 19 nt, Artificial Sequence
  Description of Artificial Sequence: Synthetic oligonucleotide
cuggaaucauaagagaaga

SEQ ID NO: 1292414 - RNA, 19 nt, Artificial Sequence
  Description of Artificial Sequence: Synthetic oligonucleotide
cagaacuauggaacacacc

SEQ ID NO: 1292415 - RNA, 19 nt, Artificial Sequence
  Description of Artificial Sequence: Synthetic oligonucleotide
caaacaucccgaaccugac

SEQ ID NO: 1292416 - RNA, 19 nt, Artificial Sequence
  Description of Artificial Sequence: Synthetic oligonucleotide
ugcguagugaggucauaac

SEQ ID NO: 1292417 - RNA, 19 nt, Artificial Sequence
  Description of Artificial Sequence: Synthetic oligonucleotide
cuaggguuagucugucuuc

SEQ ID NO: 1292418 - RNA, 19 nt, Artificial Sequence
  Description of Artificial Sequence: Synthetic oligonucleotide
ugcgacaggauccgguuua

SEQ ID NO: 1292419 - RNA, 19 nt, Artificial Sequence
  Description of Artificial Sequence: Synthetic oligonucleotide
agccauagagacacccagc

SEQ ID NO: 1292420 - RNA, 19 nt, Artificial Sequence
  Description of Artificial Sequence: Synthetic oligonucleotide
gaggccuugguaugucccc

SEQ ID NO: 1292421 - RNA, 19 nt, Artificial Sequence
  Description of Artificial Sequence: Synthetic oligonucleotide
acguacucgguagggaagg

SEQ ID NO: 1292422 - RNA, 19 nt, Artificial Sequence
  Description of Artificial Sequence: Synthetic oligonucleotide
uuaaggccaauggcgggag

SEQ ID NO: 1292423 - RNA, 19 nt, Artificial Sequence
  Description of Artificial Sequence: Synthetic oligonucleotide
gaacuucaccuugauaguc

SEQ ID NO: 1292424 - RNA, 19 nt, Artificial Sequence
  Description of Artificial Sequence: Synthetic oligonucleotide
caauggcgggagaagcagg

SEQ ID NO: 1292425 - RNA, 19 nt, Artificial Sequence
  Description of Artificial Sequence: Synthetic oligonucleotide
uuguauuugugugcuucca

SEQ ID NO: 1292426 - RNA, 19 nt, Artificial Sequence
  Description of Artificial Sequence: Synthetic oligonucleotide
acaauaguagugucacaua

SEQ ID NO: 1292427 - RNA, 19 nt, Artificial Sequence
  Description of Artificial Sequence: Synthetic oligonucleotide
auggcugcggacaguuugc

SEQ ID NO: 1292428 - RNA, 19 nt, Artificial Sequence
  Description of Artificial Sequence: Synthetic oligonucleotide
aauggagaagugagcacau

SEQ ID NO: 1292429 - RNA, 19 nt, Artificial Sequence
  Description of Artificial Sequence: Synthetic oligonucleotide
aaugccccgguaccgcggu

SEQ ID NO: 1292430 - RNA, 19 nt, Artificial Sequence
  Description of Artificial Sequence: Synthetic oligonucleotide
cauagagacacccagccau

SEQ ID NO: 1292431 - RNA, 19 nt, Artificial Sequence
  Description of Artificial Sequence: Synthetic oligonucleotide
cagacacagaacuauggaa

SEQ ID NO: 1292432 - RNA, 19 nt, Artificial Sequence
  Description of Artificial Sequence: Synthetic oligonucleotide
ugcggugaagccaggccga

SEQ ID NO: 1292433 - RNA, 19 nt, Artificial Sequence
  Description of Artificial Sequence: Synthetic oligonucleotide
uccucgguacuugggauug

SEQ ID NO: 1292434 - RNA, 19 nt, Artificial Sequence
  Description of Artificial Sequence: Synthetic oligonucleotide
cuucacguacucgguaggg

SEQ ID NO: 1292435 - RNA, 19 nt, Artificial Sequence
  Description of Artificial Sequence: Synthetic oligonucleotide
aacgcgggcucgcggggcg

SEQ ID NO: 1292436 - RNA, 19 nt, Artificial Sequence
  Description of Artificial Sequence: Synthetic oligonucleotide
caccacuucaucguagaug

SEQ ID NO: 1292437 - RNA, 19 nt, Artificial Sequence
  Description of Artificial Sequence: Synthetic oligonucleotide
caggauccgguuuauucuc

SEQ ID NO: 1292438 - RNA, 19 nt, Artificial Sequence
  Description of Artificial Sequence: Synthetic oligonucleotide
cacguacucgguagggaag

SEQ ID NO: 1292439 - RNA, 19 nt, Artificial Sequence
  Description of Artificial Sequence: Synthetic oligonucleotide
ugguuugagcccugcuuca

SEQ ID NO: 1292440 - RNA, 19 nt, Artificial Sequence
  Description of Artificial Sequence: Synthetic oligonucleotide
ccgagggccauuuaaggcc

SEQ ID NO: 1292441 - RNA, 19 nt, Artificial Sequence
  Description of Artificial Sequence: Synthetic oligonucleotide
ucucgugcugucgagccga

SEQ ID NO: 1292442 - RNA, 19 nt, Artificial Sequence
  Description of Artificial Sequence: Synthetic oligonucleotide
ucccuaaccccguggaaaa

SEQ ID NO: 1292443 - RNA, 19 nt, Artificial Sequence
  Description of Artificial Sequence: Synthetic oligonucleotide
aucucccuaaccccgugga

SEQ ID NO: 1292444 - RNA, 19 nt, Artificial Sequence
  Description of Artificial Sequence: Synthetic oligonucleotide
ucgccucgguaccaguugc

SEQ ID NO: 1292445 - RNA, 19 nt, Artificial Sequence
  Description of Artificial Sequence: Synthetic oligonucleotide
caggauugccuucccgggg

SEQ ID NO: 1292446 - RNA, 19 nt, Artificial Sequence
  Description of Artificial Sequence: Synthetic oligonucleotide
aggauccgguuuauucucc

SEQ ID NO: 1292447 - RNA, 19 nt, Artificial Sequence
  Description of Artificial Sequence: Synthetic oligonucleotide
aaggccaauggcgggagaa

SEQ ID NO: 1292448 - RNA, 19 nt, Artificial Sequence
  Description of Artificial Sequence: Synthetic oligonucleotide
uucacguacucgguaggga

SEQ ID NO: 1292449 - RNA, 19 nt, Artificial Sequence
  Description of Artificial Sequence: Synthetic oligonucleotide
guagugucacauacagacc

SEQ ID NO: 1292450 - RNA, 19 nt, Artificial Sequence
  Description of Artificial Sequence: Synthetic oligonucleotide
accggacugugaccugacc

SEQ ID NO: 1292451 - RNA, 19 nt, Artificial Sequence
  Description of Artificial Sequence: Synthetic oligonucleotide
ugggacaccccgccgcacc

SEQ ID NO: 1292452 - RNA, 19 nt, Artificial Sequence
  Description of Artificial Sequence: Synthetic oligonucleotide
ugggugcgagcguucaucu

SEQ ID NO: 1292453 - RNA, 19 nt, Artificial Sequence
  Description of Artificial Sequence: Synthetic oligonucleotide
cacauauucacaagccaua

SEQ ID NO: 1292454 - RNA, 19 nt, Artificial Sequence
  Description of Artificial Sequence: Synthetic oligonucleotide
auauagccccuggaaugcg

SEQ ID NO: 1292455 - RNA, 19 nt, Artificial Sequence
  Description of Artificial Sequence: Synthetic oligonucleotide
aacugcgucuucacguacu

SEQ ID NO: 1292456 - RNA, 19 nt, Artificial Sequence
  Description of Artificial Sequence: Synthetic oligonucleotide
ccagucggggaauagugcc

SEQ ID NO: 1292457 - RNA, 19 nt, Artificial Sequence
  Description of Artificial Sequence: Synthetic oligonucleotide
uugcguagugaggucauaa

SEQ ID NO: 1292458 - RNA, 19 nt, Artificial Sequence
  Description of Artificial Sequence: Synthetic oligonucleotide
ccuuuuggcacuacugcac

SEQ ID NO: 1292459 - RNA, 19 nt, Artificial Sequence
  Description of Artificial Sequence: Synthetic oligonucleotide
gaaugcggugaagccaggc

SEQ ID NO: 1292460 - RNA, 19 nt, Artificial Sequence
  Description of Artificial Sequence: Synthetic oligonucleotide
gcgguacaggcccaggacg

SEQ ID NO: 1292461 - RNA, 19 nt, Artificial Sequence
  Description of Artificial Sequence: Synthetic oligonucleotide
caagccauagagacaccca

SEQ ID NO: 1292462 - RNA, 19 nt, Artificial Sequence
  Description of Artificial Sequence: Synthetic oligonucleotide
guagaaugccuuggguccc

SEQ ID NO: 1292463 - RNA, 19 nt, Artificial Sequence
  Description of Artificial Sequence: Synthetic oligonucleotide
uagugcccuuguagaaugc

SEQ ID NO: 1292464 - RNA, 19 nt, Artificial Sequence
  Description of Artificial Sequence: Synthetic oligonucleotide
gacacuagcugcaccggca

SEQ ID NO: 1292465 - RNA, 19 nt, Artificial Sequence
  Description of Artificial Sequence: Synthetic oligonucleotide
gcugcggacaguuugccuc

SEQ ID NO: 1292466 - RNA, 19 nt, Artificial Sequence
  Description of Artificial Sequence: Synthetic oligonucleotide
acacaauaguagugucaca

SEQ ID NO: 1292467 - RNA, 19 nt, Artificial Sequence
  Description of Artificial Sequence: Synthetic oligonucleotide
cgaagaaucggauggcuug

SEQ ID NO: 1292468 - RNA, 19 nt, Artificial Sequence
  Description of Artificial Sequence: Synthetic oligonucleotide
aagaaucggauggcuuggu

SEQ ID NO: 1292469 - RNA, 19 nt, Artificial Sequence
  Description of Artificial Sequence: Synthetic oligonucleotide
ucagcguggccuucccgga

SEQ ID NO: 1292470 - RNA, 19 nt, Artificial Sequence
  Description of Artificial Sequence: Synthetic oligonucleotide
aguuugccucacgcagucc

SEQ ID NO: 1292471 - RNA, 19 nt, Artificial Sequence
  Description of Artificial Sequence: Synthetic oligonucleotide
auagagacacccagccaug

SEQ ID NO: 1292472 - RNA, 19 nt, Artificial Sequence
  Description of Artificial Sequence: Synthetic oligonucleotide
gcucacaagcaagcaaugg

SEQ ID NO: 1292473 - RNA, 19 nt, Artificial Sequence
  Description of Artificial Sequence: Synthetic oligonucleotide
ucggggaauagugcccuug

SEQ ID NO: 1292474 - RNA, 19 nt, Artificial Sequence
  Description of Artificial Sequence: Synthetic oligonucleotide
caaugccccgguaccgcgg

SEQ ID NO: 1292475 - RNA, 19 nt, Artificial Sequence
  Description of Artificial Sequence: Synthetic oligonucleotide
guccccaaugccccgguac

SEQ ID NO: 1292476 - RNA, 19 nt, Artificial Sequence
  Description of Artificial Sequence: Synthetic oligonucleotide
cacaauaguagugucacau

SEQ ID NO: 1292477 - RNA, 19 nt, Artificial Sequence
  Description of Artificial Sequence: Synthetic oligonucleotide
cacuacugcacuggaauca

SEQ ID NO: 1292478 - RNA, 19 nt, Artificial Sequence
  Description of Artificial Sequence: Synthetic oligonucleotide
acuacugcacuggaaucau

SEQ ID NO: 1292479 - RNA, 19 nt, Artificial Sequence
  Description of Artificial Sequence: Synthetic oligonucleotide
gugaggccuugguaugucc

SEQ ID NO: 1292480 - RNA, 19 nt, Artificial Sequence
  Description of Artificial Sequence: Synthetic oligonucleotide
cguagugaggucauaacga

SEQ ID NO: 1292481 - RNA, 19 nt, Artificial Sequence
  Description of Artificial Sequence: Synthetic oligonucleotide
guuuggucauggaugaacu

SEQ ID NO: 1292482 - RNA, 19 nt, Artificial Sequence
  Description of Artificial Sequence: Synthetic oligonucleotide
ugggguucucgccucggua

SEQ ID NO: 1292483 - RNA, 19 nt, Artificial Sequence
  Description of Artificial Sequence: Synthetic oligonucleotide
gguuagucugucuuccaaa

SEQ ID NO: 1292484 - RNA, 19 nt, Artificial Sequence
  Description of Artificial Sequence: Synthetic oligonucleotide
acaguuugccucacgcagu

SEQ ID NO: 1292485 - RNA, 19 nt, Artificial Sequence
  Description of Artificial Sequence: Synthetic oligonucleotide
uugggguucucgccucggu

SEQ ID NO: 1292486 - RNA, 19 nt, Artificial Sequence
  Description of Artificial Sequence: Synthetic oligonucleotide
acacaacagcccucucgug

SEQ ID NO: 1292487 - RNA, 19 nt, Artificial Sequence
  Description of Artificial Sequence: Synthetic oligonucleotide
gcccgagggccauuuaagg

SEQ ID NO: 1292488 - RNA, 19 nt, Artificial Sequence
  Description of Artificial Sequence: Synthetic oligonucleotide
agacucggcccagucgggg

SEQ ID NO: 1292489 - RNA, 19 nt, Artificial Sequence
  Description of Artificial Sequence: Synthetic oligonucleotide
gggguucucgccucgguac

SEQ ID NO: 1292490 - RNA, 19 nt, Artificial Sequence
  Description of Artificial Sequence: Synthetic oligonucleotide
cgugcugucgagccgaccc

SEQ ID NO: 1292491 - RNA, 19 nt, Artificial Sequence
  Description of Artificial Sequence: Synthetic oligonucleotide
uggcacuacugcacuggaa

SEQ ID NO: 1292492 - RNA, 19 nt, Artificial Sequence
  Description of Artificial Sequence: Synthetic oligonucleotide
cccgagggccauuuaaggc

SEQ ID NO: 1292493 - RNA, 19 nt, Artificial Sequence
  Description of Artificial Sequence: Synthetic oligonucleotide
ugcgagcguucaucuagcu

SEQ ID NO: 1292494 - RNA, 19 nt, Artificial Sequence
  Description of Artificial Sequence: Synthetic oligonucleotide
gagcccugcuucaguacag

SEQ ID NO: 1292495 - RNA, 19 nt, Artificial Sequence
  Description of Artificial Sequence: Synthetic oligonucleotide
cugucgagccgacccuggg

SEQ ID NO: 1292496 - RNA, 19 nt, Artificial Sequence
  Description of Artificial Sequence: Synthetic oligonucleotide
gagcugggacaccccgccg

SEQ ID NO: 1292497 - RNA, 19 nt, Artificial Sequence
  Description of Artificial Sequence: Synthetic oligonucleotide
auccucgguacuugggauu

SEQ ID NO: 1292498 - RNA, 19 nt, Artificial Sequence
  Description of Artificial Sequence: Synthetic oligonucleotide
ugugaggccuugguauguc

SEQ ID NO: 1292499 - RNA, 19 nt, Artificial Sequence
  Description of Artificial Sequence: Synthetic oligonucleotide
gcaagcaauggagaaguga

SEQ ID NO: 1292500 - RNA, 19 nt, Artificial Sequence
  Description of Artificial Sequence: Synthetic oligonucleotide
agaccacacaacagcccuc

SEQ ID NO: 1292501 - RNA, 19 nt, Artificial Sequence
  Description of Artificial Sequence: Synthetic oligonucleotide
caacugcgucuucacguac

SEQ ID NO: 1292502 - RNA, 19 nt, Artificial Sequence
  Description of Artificial Sequence: Synthetic oligonucleotide
ugcugucgagccgacccug

SEQ ID NO: 1292503 - RNA, 19 nt, Artificial Sequence
  Description of Artificial Sequence: Synthetic oligonucleotide
gggcacacgaccaccacug

SEQ ID NO: 1292504 - RNA, 19 nt, Artificial Sequence
  Description of Artificial Sequence: Synthetic oligonucleotide
gcguucaucuagcugcaac

SEQ ID NO: 1292505 - RNA, 19 nt, Artificial Sequence
  Description of Artificial Sequence: Synthetic oligonucleotide
accacacaacagcccucuc

SEQ ID NO: 1292506 - RNA, 19 nt, Artificial Sequence
  Description of Artificial Sequence: Synthetic oligonucleotide
cagacucggcccagucggg

SEQ ID NO: 1292507 - RNA, 19 nt, Artificial Sequence
  Description of Artificial Sequence: Synthetic oligonucleotide
caaucucccuaaccccgug

SEQ ID NO: 1292508 - RNA, 19 nt, Artificial Sequence
  Description of Artificial Sequence: Synthetic oligonucleotide
cuuuuggcacuacugcacu

SEQ ID NO: 1292509 - RNA, 19 nt, Artificial Sequence
  Description of Artificial Sequence: Synthetic oligonucleotide
caauggguucaugggcuug

SEQ ID NO: 1292510 - RNA, 19 nt, Artificial Sequence
  Description of Artificial Sequence: Synthetic oligonucleotide
cuaugccucccgccaggcc

SEQ ID NO: 1292511 - RNA, 19 nt, Artificial Sequence
  Description of Artificial Sequence: Synthetic oligonucleotide
gugagaacgcgggcucgcg

SEQ ID NO: 1292512 - RNA, 19 nt, Artificial Sequence
  Description of Artificial Sequence: Synthetic oligonucleotide
aucccgaaccugacagccg

SEQ ID NO: 1292513 - RNA, 19 nt, Artificial Sequence
  Description of Artificial Sequence: Synthetic oligonucleotide
cacaagccauagagacacc

SEQ ID NO: 1292514 - RNA, 19 nt, Artificial Sequence
  Description of Artificial Sequence: Synthetic oligonucleotide
ugaccugaccauggcucca

SEQ ID NO: 1292515 - RNA, 19 nt, Artificial Sequence
  Description of Artificial Sequence: Synthetic oligonucleotide
ugggucccucauucuucag

SEQ ID NO: 1292516 - RNA, 19 nt, Artificial Sequence
  Description of Artificial Sequence: Synthetic oligonucleotide
ggacaguuugccucacgca

SEQ ID NO: 1292517 - RNA, 19 nt, Artificial Sequence
  Description of Artificial Sequence: Synthetic oligonucleotide
cuugguuugagcccugcuu

SEQ ID NO: 1292518 - RNA, 19 nt, Artificial Sequence
  Description of Artificial Sequence: Synthetic oligonucleotide
ggccacagaacuugaggga

SEQ ID NO: 1292519 - RNA, 19 nt, Artificial Sequence
  Description of Artificial Sequence: Synthetic oligonucleotide
acagaccacaugacagaca

SEQ ID NO: 1292520 - RNA, 19 nt, Artificial Sequence
  Description of Artificial Sequence: Synthetic oligonucleotide
gggcauauagccccuggaa

SEQ ID NO: 1292521 - RNA, 19 nt, Artificial Sequence
  Description of Artificial Sequence: Synthetic oligonucleotide
gagccgacccugggcaucc

SEQ ID NO: 1292522 - RNA, 19 nt, Artificial Sequence
  Description of Artificial Sequence: Synthetic oligonucleotide
uggcugcggacaguuugcc

SEQ ID NO: 1292523 - RNA, 19 nt, Artificial Sequence
  Description of Artificial Sequence: Synthetic oligonucleotide
acgaagaaucggauggcuu

SEQ ID NO: 1292524 - RNA, 19 nt, Artificial Sequence
  Description of Artificial Sequence: Synthetic oligonucleotide
caguugcguagugagguca

SEQ ID NO: 1292525 - RNA, 19 nt, Artificial Sequence
  Description of Artificial Sequence: Synthetic oligonucleotide
gggccuuuuggcacuacug

SEQ ID NO: 1292526 - RNA, 19 nt, Artificial Sequence
  Description of Artificial Sequence: Synthetic oligonucleotide
guucucgccucgguaccag

SEQ ID NO: 1292527 - RNA, 19 nt, Artificial Sequence
  Description of Artificial Sequence: Synthetic oligonucleotide
ucgguaccaguugcguagu

SEQ ID NO: 1292528 - RNA, 19 nt, Artificial Sequence
  Description of Artificial Sequence: Synthetic oligonucleotide
gugcgagcguucaucuagc

SEQ ID NO: 1292529 - RNA, 19 nt, Artificial Sequence
  Description of Artificial Sequence: Synthetic oligonucleotide
gggaaguuuggucauggau

SEQ ID NO: 1292530 - RNA, 19 nt, Artificial Sequence
  Description of Artificial Sequence: Synthetic oligonucleotide
cugcggacaguuugccuca

SEQ ID NO: 1292531 - RNA, 19 nt, Artificial Sequence
  Description of Artificial Sequence: Synthetic oligonucleotide
gcgagcguucaucuagcug

SEQ ID NO: 1292532 - RNA, 19 nt, Artificial Sequence
  Description of Artificial Sequence: Synthetic oligonucleotide
accugacagccgccuuggg

SEQ ID NO: 1292533 - RNA, 19 nt, Artificial Sequence
  Description of Artificial Sequence: Synthetic oligonucleotide
ccggcaauggcuccaaaga

SEQ ID NO: 1292534 - RNA, 19 nt, Artificial Sequence
  Description of Artificial Sequence: Synthetic oligonucleotide
aggccuccugccaggauug

SEQ ID NO: 1292535 - RNA, 19 nt, Artificial Sequence
  Description of Artificial Sequence: Synthetic oligonucleotide
ggcauauagccccuggaau

SEQ ID NO: 1292536 - RNA, 19 nt, Artificial Sequence
  Description of Artificial Sequence: Synthetic oligonucleotide
agugaccaauggguucaug

SEQ ID NO: 1292537 - RNA, 19 nt, Artificial Sequence
  Description of Artificial Sequence: Synthetic oligonucleotide
uguccccuuuagcccuugu

SEQ ID NO: 1292538 - RNA, 19 nt, Artificial Sequence
  Description of Artificial Sequence: Synthetic oligonucleotide
cucggguccgagccuccgc

SEQ ID NO: 1292539 - RNA, 19 nt, Artificial Sequence
  Description of Artificial Sequence: Synthetic oligonucleotide
aguugcguagugaggucau

SEQ ID NO: 1292540 - RNA, 19 nt, Artificial Sequence
  Description of Artificial Sequence: Synthetic oligonucleotide
ccaaugccccgguaccgcg

SEQ ID NO: 1292541 - RNA, 19 nt, Artificial Sequence
  Description of Artificial Sequence: Synthetic oligonucleotide
cuucaucguagaugaugaa

SEQ ID NO: 1292542 - RNA, 19 nt, Artificial Sequence
  Description of Artificial Sequence: Synthetic oligonucleotide
gagcguucaucuagcugca

SEQ ID NO: 1292543 - RNA, 19 nt, Artificial Sequence
  Description of Artificial Sequence: Synthetic oligonucleotide
ggguucucgccucgguacc

SEQ ID NO: 1292544 - RNA, 19 nt, Artificial Sequence
  Description of Artificial Sequence: Synthetic oligonucleotide
gcggccgugagaacgcggg

SEQ ID NO: 1292545 - RNA, 19 nt, Artificial Sequence
  Description of Artificial Sequence: Synthetic oligonucleotide
caggugccacccugucccg

SEQ ID NO: 1292546 - RNA, 19 nt, Artificial Sequence
  Description of Artificial Sequence: Synthetic oligonucleotide
agcaagcaauggagaagug

SEQ ID NO: 1292547 - RNA, 19 nt, Artificial Sequence
  Description of Artificial Sequence: Synthetic oligonucleotide
ggguuagucugucuuccaa

SEQ ID NO: 1292548 - RNA, 19 nt, Artificial Sequence
  Description of Artificial Sequence: Synthetic oligonucleotide
ggcccgagggccauuuaag

SEQ ID NO: 1292549 - RNA, 19 nt, Artificial Sequence
  Description of Artificial Sequence: Synthetic oligonucleotide
gcaucccgcaugugguugc

SEQ ID NO: 1292550 - RNA, 19 nt, Artificial Sequence
  Description of Artificial Sequence: Synthetic oligonucleotide
gacaccccgccgcacccuc

SEQ ID NO: 1292551 - RNA, 19 nt, Artificial Sequence
  Description of Artificial Sequence: Synthetic oligonucleotide
ccggaggcagcugugguag

SEQ ID NO: 1292552 - RNA, 19 nt, Artificial Sequence
  Description of Artificial Sequence: Synthetic oligonucleotide
cacccugucccgggcagag

SEQ ID NO: 1292553 - RNA, 19 nt, Artificial Sequence
  Description of Artificial Sequence: Synthetic oligonucleotide
caccggacugugaccugac

SEQ ID NO: 1292554 - RNA, 19 nt, Artificial Sequence
  Description of Artificial Sequence: Synthetic oligonucleotide
ccgguuuauucuccuuggc

SEQ ID NO: 1292555 - RNA, 19 nt, Artificial Sequence
  Description of Artificial Sequence: Synthetic oligonucleotide
ggacugugaccugaccaug

SEQ ID NO: 1292556 - RNA, 19 nt, Artificial Sequence
  Description of Artificial Sequence: Synthetic oligonucleotide
cgguacaggcccaggacgc

SEQ ID NO: 1292557 - RNA, 19 nt, Artificial Sequence
  Description of Artificial Sequence: Synthetic oligonucleotide
ggggcauauagccccugga

SEQ ID NO: 1292558 - RNA, 19 nt, Artificial Sequence
  Description of Artificial Sequence: Synthetic oligonucleotide
aucggauggcuugguuuga

SEQ ID NO: 1292559 - RNA, 19 nt, Artificial Sequence
  Description of Artificial Sequence: Synthetic oligonucleotide
ugccucacgcaguccccaa

SEQ ID NO: 1292560 - RNA, 19 nt, Artificial Sequence
  Description of Artificial Sequence: Synthetic oligonucleotide
gacccgggcgcggcggccg

SEQ ID NO: 1292561 - RNA, 19 nt, Artificial Sequence
  Description of Artificial Sequence: Synthetic oligonucleotide
caucuagcugcaacugcgu

SEQ ID NO: 1292562 - RNA, 19 nt, Artificial Sequence
  Description of Artificial Sequence: Synthetic oligonucleotide
guccgagccuccgcugcgg

SEQ ID NO: 1292563 - RNA, 19 nt, Artificial Sequence
  Description of Artificial Sequence: Synthetic oligonucleotide
guacaggcccaggacgcca

SEQ ID NO: 1292564 - RNA, 19 nt, Artificial Sequence
  Description of Artificial Sequence: Synthetic oligonucleotide
cuuuagcccuuguucccua

SEQ ID NO: 1292565 - RNA, 19 nt, Artificial Sequence
  Description of Artificial Sequence: Synthetic oligonucleotide
gcaacugcgucuucacgua

SEQ ID NO: 1292566 - RNA, 19 nt, Artificial Sequence
  Description of Artificial Sequence: Synthetic oligonucleotide
cggggcgcagccauggcgg

SEQ ID NO: 1292567 - RNA, 19 nt, Artificial Sequence
  Description of Artificial Sequence: Synthetic oligonucleotide
cagcccucucgugcugucg

SEQ ID NO: 1292568 - RNA, 19 nt, Artificial Sequence
  Description of Artificial Sequence: Synthetic oligonucleotide
gguacaggcccaggacgcc

SEQ ID NO: 1292569 - RNA, 19 nt, Artificial Sequence
  Description of Artificial Sequence: Synthetic oligonucleotide
gacagccgccuuggggaug

SEQ ID NO: 1292570 - RNA, 19 nt, Artificial Sequence
  Description of Artificial Sequence: Synthetic oligonucleotide
gauccgguuuauucuccuu

SEQ ID NO: 1292571 - RNA, 19 nt, Artificial Sequence
  Description of Artificial Sequence: Synthetic oligonucleotide
ggauugccuucccggggug

SEQ ID NO: 1292572 - RNA, 19 nt, Artificial Sequence
  Description of Artificial Sequence: Synthetic oligonucleotide
cagcguggccuucccggac

SEQ ID NO: 1292573 - RNA, 19 nt, Artificial Sequence
  Description of Artificial Sequence: Synthetic oligonucleotide
gcggacaguuugccucacg

SEQ ID NO: 1292574 - RNA, 19 nt, Artificial Sequence
  Description of Artificial Sequence: Synthetic oligonucleotide
accucggguccgagccucc

SEQ ID NO: 1292575 - RNA, 19 nt, Artificial Sequence
  Description of Artificial Sequence: Synthetic oligonucleotide
cccgguaccgcggugggug

SEQ ID NO: 1292576 - RNA, 19 nt, Artificial Sequence
  Description of Artificial Sequence: Synthetic oligonucleotide
uucccggacccgggcgcgg

SEQ ID NO: 1292577 - RNA, 19 nt, Artificial Sequence
  Description of Artificial Sequence: Synthetic oligonucleotide
gccgugagaacgcgggcuc

SEQ ID NO: 1292578 - RNA, 19 nt, Artificial Sequence
  Description of Artificial Sequence: Synthetic oligonucleotide
ucgugcugucgagccgacc

SEQ ID NO: 1292579 - RNA, 19 nt, Artificial Sequence
  Description of Artificial Sequence: Synthetic oligonucleotide
gggacaccccgccgcaccc

SEQ ID NO: 1292580 - RNA, 19 nt, Artificial Sequence
  Description of Artificial Sequence: Synthetic oligonucleotide
gcugucgagccgacccugg

SEQ ID NO: 1292581 - RNA, 19 nt, Artificial Sequence
  Description of Artificial Sequence: Synthetic oligonucleotide
agaccacaugacagacaca

SEQ ID NO: 1292582 - RNA, 19 nt, Artificial Sequence
  Description of Artificial Sequence: Synthetic oligonucleotide
ugccuucccggggugcguc

SEQ ID NO: 1292583 - RNA, 19 nt, Artificial Sequence
  Description of Artificial Sequence: Synthetic oligonucleotide
ggcgccccugccaucgggg

SEQ ID NO: 1292584 - RNA, 19 nt, Artificial Sequence
  Description of Artificial Sequence: Synthetic oligonucleotide
ccaguugcguagugagguc

SEQ ID NO: 1292585 - RNA, 19 nt, Artificial Sequence
  Description of Artificial Sequence: Synthetic oligonucleotide
ugcggacaguuugccucac

SEQ ID NO: 1292586 - RNA, 19 nt, Artificial Sequence
  Description of Artificial Sequence: Synthetic oligonucleotide
cuccagugaccaauggguu

SEQ ID NO: 1292587 - RNA, 19 nt, Artificial Sequence
  Description of Artificial Sequence: Synthetic oligonucleotide
cuacugcacuggaaucaua

SEQ ID NO: 1292588 - RNA, 19 nt, Artificial Sequence
  Description of Artificial Sequence: Synthetic oligonucleotide
ccacagaacuugagggaca

SEQ ID NO: 1292589 - RNA, 19 nt, Artificial Sequence
  Description of Artificial Sequence: Synthetic oligonucleotide
ggggcgcagccauggcggg

SEQ ID NO: 1292590 - RNA, 19 nt, Artificial Sequence
  Description of Artificial Sequence: Synthetic oligonucleotide
ggagaagugagcacauauu

SEQ ID NO: 1292591 - RNA, 19 nt, Artificial Sequence
  Description of Artificial Sequence: Synthetic oligonucleotide
cccaaugccccgguaccgc

SEQ ID NO: 1292592 - RNA, 19 nt, Artificial Sequence
  Description of Artificial Sequence: Synthetic oligonucleotide
ggauccgguuuauucuccu

SEQ ID NO: 1292593 - RNA, 19 nt, Artificial Sequence
  Description of Artificial Sequence: Synthetic oligonucleotide
cgcccagaccacacaacag

SEQ ID NO: 1292594 - RNA, 19 nt, Artificial Sequence
  Description of Artificial Sequence: Synthetic oligonucleotide
ccauggggcacacgaccac

SEQ ID NO: 1292595 - RNA, 19 nt, Artificial Sequence
  Description of Artificial Sequence: Synthetic oligonucleotide
guaccgcggugggugcgag

SEQ ID NO: 1292596 - RNA, 19 nt, Artificial Sequence
  Description of Artificial Sequence: Synthetic oligonucleotide
gggcccgagggccauuuaa

SEQ ID NO: 1292597 - RNA, 19 nt, Artificial Sequence
  Description of Artificial Sequence: Synthetic oligonucleotide
gggugcgucagcguggccu

SEQ ID NO: 1292598 - RNA, 19 nt, Artificial Sequence
  Description of Artificial Sequence: Synthetic oligonucleotide
cucuaggguuagucugucu

SEQ ID NO: 1292599 - RNA, 19 nt, Artificial Sequence
  Description of Artificial Sequence: Synthetic oligonucleotide
ccgggcagagggagggccc

SEQ ID NO: 1292600 - RNA, 19 nt, Artificial Sequence
  Description of Artificial Sequence: Synthetic oligonucleotide
caguagcugugaggccuug

SEQ ID NO: 1292601 - RNA, 19 nt, Artificial Sequence
  Description of Artificial Sequence: Synthetic oligonucleotide
cgcgguacaggcccaggac

SEQ ID NO: 1292602 - RNA, 19 nt, Artificial Sequence
  Description of Artificial Sequence: Synthetic oligonucleotide
gggcgccccugccaucggg

SEQ ID NO: 1292603 - RNA, 19 nt, Artificial Sequence
  Description of Artificial Sequence: Synthetic oligonucleotide
gcacacgaccaccacugcu

SEQ ID NO: 1292604 - RNA, 19 nt, Artificial Sequence
  Description of Artificial Sequence: Synthetic oligonucleotide
gggacaaggggaagggccu

SEQ ID NO: 1292605 - RNA, 19 nt, Artificial Sequence
  Description of Artificial Sequence: Synthetic oligonucleotide
gggguggaaggcaccggac

SEQ ID NO: 1292606 - RNA, 19 nt, Artificial Sequence
  Description of Artificial Sequence: Synthetic oligonucleotide
gaagggccuuuuggcacua

SEQ ID NO: 1292607 - RNA, 19 nt, Artificial Sequence
  Description of Artificial Sequence: Synthetic oligonucleotide
augccccgguaccgcggug

SEQ ID NO: 1292608 - RNA, 19 nt, Artificial Sequence
  Description of Artificial Sequence: Synthetic oligonucleotide
ggcaccggacugugaccug

SEQ ID NO: 1292609 - RNA, 19 nt, Artificial Sequence
  Description of Artificial Sequence: Synthetic oligonucleotide
guugcguagugaggucaua

SEQ ID NO: 1292610 - RNA, 19 nt, Artificial Sequence
  Description of Artificial Sequence: Synthetic oligonucleotide
ggcggccgugagaacgcgg

SEQ ID NO: 1292611 - RNA, 19 nt, Artificial Sequence
  Description of Artificial Sequence: Synthetic oligonucleotide
cccgaaccugacagccgcc

SEQ ID NO: 1292612 - RNA, 19 nt, Artificial Sequence
  Description of Artificial Sequence: Synthetic oligonucleotide
agcguucaucuagcugcaa

SEQ ID NO: 1292613 - RNA, 19 nt, Artificial Sequence
  Description of Artificial Sequence: Synthetic oligonucleotide
ucggcccagucggggaaua

SEQ ID NO: 1292614 - RNA, 19 nt, Artificial Sequence
  Description of Artificial Sequence: Synthetic oligonucleotide
cugggacaccccgccgcac

SEQ ID NO: 1292615 - RNA, 19 nt, Artificial Sequence
  Description of Artificial Sequence: Synthetic oligonucleotide
gcguggccuucccggaccc

SEQ ID NO: 1292616 - RNA, 19 nt, Artificial Sequence
  Description of Artificial Sequence: Synthetic oligonucleotide
gcaccggacugugaccuga

SEQ ID NO: 1292617 - RNA, 19 nt, Artificial Sequence
  Description of Artificial Sequence: Synthetic oligonucleotide
ccgugagaacgcgggcucg

SEQ ID NO: 1292618 - RNA, 19 nt, Artificial Sequence
  Description of Artificial Sequence: Synthetic oligonucleotide
ccagagguguguucccaaa

SEQ ID NO: 1292619 - RNA, 19 nt, Artificial Sequence
  Description of Artificial Sequence: Synthetic oligonucleotide
gcgucagcguggccuuccc

SEQ ID NO: 1292620 - RNA, 19 nt, Artificial Sequence
  Description of Artificial Sequence: Synthetic oligonucleotide
cgugagaacgcgggcucgc

SEQ ID NO: 1292621 - RNA, 19 nt, Artificial Sequence
  Description of Artificial Sequence: Synthetic oligonucleotide
ccucuaggguuagucuguc

SEQ ID NO: 1292622 - RNA, 19 nt, Artificial Sequence
  Description of Artificial Sequence: Synthetic oligonucleotide
gguaccgcggugggugcga

SEQ ID NO: 1292623 - RNA, 19 nt, Artificial Sequence
  Description of Artificial Sequence: Synthetic oligonucleotide
gcggugaagccaggccgag

SEQ ID NO: 1292624 - RNA, 19 nt, Artificial Sequence
  Description of Artificial Sequence: Synthetic oligonucleotide
gucccucauucuucaggau

SEQ ID NO: 1292625 - RNA, 19 nt, Artificial Sequence
  Description of Artificial Sequence: Synthetic oligonucleotide
ccgguaccgcggugggugc

SEQ ID NO: 1292626 - RNA, 19 nt, Artificial Sequence
  Description of Artificial Sequence: Synthetic oligonucleotide
ggccgugagaacgcgggcu

SEQ ID NO: 1292627 - RNA, 19 nt, Artificial Sequence
  Description of Artificial Sequence: Synthetic oligonucleotide
gccccuggaaugcggugaa

SEQ ID NO: 1292628 - RNA, 19 nt, Artificial Sequence
  Description of Artificial Sequence: Synthetic oligonucleotide
ccucgguaccaguugcgua

SEQ ID NO: 1292629 - RNA, 19 nt, Artificial Sequence
  Description of Artificial Sequence: Synthetic oligonucleotide
ggugcgucagcguggccuu

SEQ ID NO: 1292630 - RNA, 19 nt, Artificial Sequence
  Description of Artificial Sequence: Synthetic oligonucleotide
agggcccgagggccauuua

SEQ ID NO: 1292631 - RNA, 19 nt, Artificial Sequence
  Description of Artificial Sequence: Synthetic oligonucleotide
ggcugcggacaguuugccu

SEQ ID NO: 1292632 - RNA, 19 nt, Artificial Sequence
  Description of Artificial Sequence: Synthetic oligonucleotide
ccauggaccagggcacaca

SEQ ID NO: 1292633 - RNA, 19 nt, Artificial Sequence
  Description of Artificial Sequence: Synthetic oligonucleotide
acaccccgccgcacccucu

SEQ ID NO: 1292634 - RNA, 19 nt, Artificial Sequence
  Description of Artificial Sequence: Synthetic oligonucleotide
ccgcgguacaggcccagga

SEQ ID NO: 1292635 - RNA, 19 nt, Artificial Sequence
  Description of Artificial Sequence: Synthetic oligonucleotide
gggugcgagcguucaucua

SEQ ID NO: 1292636 - RNA, 19 nt, Artificial Sequence
  Description of Artificial Sequence: Synthetic oligonucleotide
ccaggacgccauggcugcg

SEQ ID NO: 1292637 - RNA, 19 nt, Artificial Sequence
  Description of Artificial Sequence: Synthetic oligonucleotide
caccccgccgcacccucua

SEQ ID NO: 1292638 - RNA, 19 nt, Artificial Sequence
  Description of Artificial Sequence: Synthetic oligonucleotide
ggagggcgccccugccauc

SEQ ID NO: 1292639 - RNA, 19 nt, Artificial Sequence
  Description of Artificial Sequence: Synthetic oligonucleotide
gccucgguaccaguugcgu

SEQ ID NO: 1292640 - RNA, 19 nt, Artificial Sequence
  Description of Artificial Sequence: Synthetic oligonucleotide
gccggcgcccagaccacac

SEQ ID NO: 1292641 - RNA, 19 nt, Artificial Sequence
  Description of Artificial Sequence: Synthetic oligonucleotide
cccggaggcagcuguggua

SEQ ID NO: 1292642 - RNA, 19 nt, Artificial Sequence
  Description of Artificial Sequence: Synthetic oligonucleotide
gccgaggcccggaggcagc

SEQ ID NO: 1292643 - RNA, 19 nt, Artificial Sequence
  Description of Artificial Sequence: Synthetic oligonucleotide
gugcgucagcguggccuuc

SEQ ID NO: 1292644 - RNA, 19 nt, Artificial Sequence
  Description of Artificial Sequence: Synthetic oligonucleotide
gcucgcggggcgcagccau

SEQ ID NO: 1292645 - RNA, 19 nt, Artificial Sequence
  Description of Artificial Sequence: Synthetic oligonucleotide
cccggacccgggcgcggcg

SEQ ID NO: 1292646 - RNA, 19 nt, Artificial Sequence
  Description of Artificial Sequence: Synthetic oligonucleotide
ggggugcgucagcguggcc

SEQ ID NO: 1292647 - RNA, 19 nt, Artificial Sequence
  Description of Artificial Sequence: Synthetic oligonucleotide
ggugggugcgagcguucau

SEQ ID NO: 1292648 - RNA, 19 nt, Artificial Sequence
  Description of Artificial Sequence: Synthetic oligonucleotide
gucggggaauagugcccuu

SEQ ID NO: 1292649 - RNA, 19 nt, Artificial Sequence
  Description of Artificial Sequence: Synthetic oligonucleotide
gccuugguauguccccuuu

SEQ ID NO: 1292650 - RNA, 19 nt, Artificial Sequence
  Description of Artificial Sequence: Synthetic oligonucleotide
gccgcacccucuaggguua

SEQ ID NO: 1292651 - RNA, 19 nt, Artificial Sequence
  Description of Artificial Sequence: Synthetic oligonucleotide
cgagccgacccugggcauc

SEQ ID NO: 1292652 - RNA, 19 nt, Artificial Sequence
  Description of Artificial Sequence: Synthetic oligonucleotide
cgguaccgcggugggugcg

SEQ ID NO: 1292653 - RNA, 19 nt, Artificial Sequence
  Description of Artificial Sequence: Synthetic oligonucleotide
gggcaucccgcaugugguu

SEQ ID NO: 1292654 - RNA, 19 nt, Artificial Sequence
  Description of Artificial Sequence: Synthetic oligonucleotide
gcggugggugcgagcguuc

SEQ ID NO: 1292655 - RNA, 19 nt, Artificial Sequence
  Description of Artificial Sequence: Synthetic oligonucleotide
ccggcgcccagaccacaca

SEQ ID NO: 1292656 - RNA, 19 nt, Artificial Sequence
  Description of Artificial Sequence: Synthetic oligonucleotide
ccgaaccugacagccgccu

SEQ ID NO: 1292657 - RNA, 19 nt, Artificial Sequence
  Description of Artificial Sequence: Synthetic oligonucleotide
cgccgcacccucuaggguu

SEQ ID NO: 1292658 - RNA, 19 nt, Artificial Sequence
  Description of Artificial Sequence: Synthetic oligonucleotide
cucggcccagucggggaau

SEQ ID NO: 1292659 - RNA, 19 nt, Artificial Sequence
  Description of Artificial Sequence: Synthetic oligonucleotide
gcccugcauccuggucuug

SEQ ID NO: 1292660 - RNA, 19 nt, Artificial Sequence
  Description of Artificial Sequence: Synthetic oligonucleotide
ccgcacccucuaggguuag

SEQ ID NO: 1292661 - RNA, 19 nt, Artificial Sequence
  Description of Artificial Sequence: Synthetic oligonucleotide
cggcccagucggggaauag

SEQ ID NO: 1292662 - RNA, 19 nt, Artificial Sequence
  Description of Artificial Sequence: Synthetic oligonucleotide
ggacaccccgccgcacccu

SEQ ID NO: 1292663 - RNA, 19 nt, Artificial Sequence
  Description of Artificial Sequence: Synthetic oligonucleotide
cguccaccucggguccgag

SEQ ID NO: 1292664 - RNA, 19 nt, Artificial Sequence
  Description of Artificial Sequence: Synthetic oligonucleotide
ccgccgcacccucuagggu

SEQ ID NO: 1292665 - RNA, 19 nt, Artificial Sequence
  Description of Artificial Sequence: Synthetic oligonucleotide
cgaaccugacagccgccuu

SEQ ID NO: 1292666 - RNA, 19 nt, Artificial Sequence
  Description of Artificial Sequence: Synthetic oligonucleotide
ccgaggcccggaggcagcu

SEQ ID NO: 1292667 - RNA, 19 nt, Artificial Sequence
  Description of Artificial Sequence: Synthetic oligonucleotide
ccgcggugggugcgagcgu

SEQ ID NO: 1292668 - RNA, 19 nt, Artificial Sequence
  Description of Artificial Sequence: Synthetic oligonucleotide
ccccgguaccgcggugggu

SEQ ID NO: 1292669 - RNA, 19 nt, Artificial Sequence
  Description of Artificial Sequence: Synthetic oligonucleotide
cgcacccucuaggguuagu

SEQ ID NO: 1292670 - RNA, 19 nt, Artificial Sequence
  Description of Artificial Sequence: Synthetic oligonucleotide
cuucguacaaauaacaucc

SEQ ID NO: 1292671 - RNA, 19 nt, Artificial Sequence
  Description of Artificial Sequence: Synthetic oligonucleotide
acauagauuaccuucccac

SEQ ID NO: 1292672 - RNA, 19 nt, Artificial Sequence
  Description of Artificial Sequence: Synthetic oligonucleotide
ucuccugccaguaaggaag

SEQ ID NO: 1292673 - RNA, 19 nt, Artificial Sequence
  Description of Artificial Sequence: Synthetic oligonucleotide
aaauggaccaaagccagac

SEQ ID NO: 1292674 - RNA, 19 nt, Artificial Sequence
  Description of Artificial Sequence: Synthetic oligonucleotide
aauaggugcuauccugccc

SEQ ID NO: 1292675 - RNA, 19 nt, Artificial Sequence
  Description of Artificial Sequence: Synthetic oligonucleotide
ugggcugaggauauaaagg

SEQ ID NO: 1292676 - RNA, 19 nt, Artificial Sequence
  Description of Artificial Sequence: Synthetic oligonucleotide
acaagugcuguuuacgaac

SEQ ID NO: 1292677 - RNA, 19 nt, Artificial Sequence
  Description of Artificial Sequence: Synthetic oligonucleotide
aaagggaucccuucuacug

SEQ ID NO: 1292678 - RNA, 19 nt, Artificial Sequence
  Description of Artificial Sequence: Synthetic oligonucleotide
auacacacacaccacacac

SEQ ID NO: 1292679 - RNA, 19 nt, Artificial Sequence
  Description of Artificial Sequence: Synthetic oligonucleotide
acacacaccacacacacag

SEQ ID NO: 1292680 - RNA, 19 nt, Artificial Sequence
  Description of Artificial Sequence: Synthetic oligonucleotide
acaggugacaugaaaagcc

SEQ ID NO: 1292681 - RNA, 19 nt, Artificial Sequence
  Description of Artificial Sequence: Synthetic oligonucleotide
caacccuacacucacaacc

SEQ ID NO: 1292682 - RNA, 19 nt, Artificial Sequence
  Description of Artificial Sequence: Synthetic oligonucleotide
aacccuuaaagugucauug

SEQ ID NO: 1292683 - RNA, 19 nt, Artificial Sequence
  Description of Artificial Sequence: Synthetic oligonucleotide
ugacaugaaaagccugucg

SEQ ID NO: 1292684 - RNA, 19 nt, Artificial Sequence
  Description of Artificial Sequence: Synthetic oligonucleotide
acacacacaccacacacac

SEQ ID NO: 1292685 - RNA, 19 nt, Artificial Sequence
  Description of Artificial Sequence: Synthetic oligonucleotide
caucucuucucacugaggg

SEQ ID NO: 1292686 - RNA, 19 nt, Artificial Sequence
  Description of Artificial Sequence: Synthetic oligonucleotide
caauggaacaggaaugacc

SEQ ID NO: 1292687 - RNA, 19 nt, Artificial Sequence
  Description of Artificial Sequence: Synthetic oligonucleotide
auccuuucgacucuucuuc

SEQ ID NO: 1292688 - RNA, 19 nt, Artificial Sequence
  Description of Artificial Sequence: Synthetic oligonucleotide
caaauaacauccguuauac

SEQ ID NO: 1292689 - RNA, 19 nt, Artificial Sequence
  Description of Artificial Sequence: Synthetic oligonucleotide
cauuaagauccacucaugc

SEQ ID NO: 1292690 - RNA, 19 nt, Artificial Sequence
  Description of Artificial Sequence: Synthetic oligonucleotide
agaaacugaaggucaccgc

SEQ ID NO: 1292691 - RNA, 19 nt, Artificial Sequence
  Description of Artificial Sequence: Synthetic oligonucleotide
ugcuacauagauuaccuuc

SEQ ID NO: 1292692 - RNA, 19 nt, Artificial Sequence
  Description of Artificial Sequence: Synthetic oligonucleotide
agaagguauggggagauac

SEQ ID NO: 1292693 - RNA, 19 nt, Artificial Sequence
  Description of Artificial Sequence: Synthetic oligonucleotide
acacaccacacacacaggg

SEQ ID NO: 1292694 - RNA, 19 nt, Artificial Sequence
  Description of Artificial Sequence: Synthetic oligonucleotide
uuaccuucccaccaugggc

SEQ ID NO: 1292695 - RNA, 19 nt, Artificial Sequence
  Description of Artificial Sequence: Synthetic oligonucleotide
uugggcugaggauauaaag

SEQ ID NO: 1292696 - RNA, 19 nt, Artificial Sequence
  Description of Artificial Sequence: Synthetic oligonucleotide
gaggauauaaagguuucag

SEQ ID NO: 1292697 - RNA, 19 nt, Artificial Sequence
  Description of Artificial Sequence: Synthetic oligonucleotide
aagccagcuccaaugaccc

SEQ ID NO: 1292698 - RNA, 19 nt, Artificial Sequence
  Description of Artificial Sequence: Synthetic oligonucleotide
ucauugucuauggagagga

SEQ ID NO: 1292699 - RNA, 19 nt, Artificial Sequence
  Description of Artificial Sequence: Synthetic oligonucleotide
cuacauggaaacaggcugg

SEQ ID NO: 1292700 - RNA, 19 nt, Artificial Sequence
  Description of Artificial Sequence: Synthetic oligonucleotide
gauucgucagcucagagcu

SEQ ID NO: 1292701 - RNA, 19 nt, Artificial Sequence
  Description of Artificial Sequence: Synthetic oligonucleotide
agaacaagugcuguuuacg

SEQ ID NO: 1292702 - RNA, 19 nt, Artificial Sequence
  Description of Artificial Sequence: Synthetic oligonucleotide
auagauuaccuucccacca

SEQ ID NO: 1292703 - RNA, 19 nt, Artificial Sequence
  Description of Artificial Sequence: Synthetic oligonucleotide
cagaguucggucuucagug

SEQ ID NO: 1292704 - RNA, 19 nt, Artificial Sequence
  Description of Artificial Sequence: Synthetic oligonucleotide
gaaugaccaggcuagguac

SEQ ID NO: 1292705 - RNA, 19 nt, Artificial Sequence
  Description of Artificial Sequence: Synthetic oligonucleotide
guaggucaagacaaggugg

SEQ ID NO: 1292706 - RNA, 19 nt, Artificial Sequence
  Description of Artificial Sequence: Synthetic oligonucleotide
uucguacaaauaacauccg

SEQ ID NO: 1292707 - RNA, 19 nt, Artificial Sequence
  Description of Artificial Sequence: Synthetic oligonucleotide
uggcaauggaacaggaaug

SEQ ID NO: 1292708 - RNA, 19 nt, Artificial Sequence
  Description of Artificial Sequence: Synthetic oligonucleotide
ucauacacacacaccacac

SEQ ID NO: 1292709 - RNA, 19 nt, Artificial Sequence
  Description of Artificial Sequence: Synthetic oligonucleotide
ugacauuaagauccacuca

SEQ ID NO: 1292710 - RNA, 19 nt, Artificial Sequence
  Description of Artificial Sequence: Synthetic oligonucleotide
uccacuuccgcucugcaaa

SEQ ID NO: 1292711 - RNA, 19 nt, Artificial Sequence
  Description of Artificial Sequence: Synthetic oligonucleotide
gugacauuaagauccacuc

SEQ ID NO: 1292712 - RNA, 19 nt, Artificial Sequence
  Description of Artificial Sequence: Synthetic oligonucleotide
cugccaguaaggaagcugc

SEQ ID NO: 1292713 - RNA, 19 nt, Artificial Sequence
  Description of Artificial Sequence: Synthetic oligonucleotide
acaaagauacaagacccag

SEQ ID NO: 1292714 - RNA, 19 nt, Artificial Sequence
  Description of Artificial Sequence: Synthetic oligonucleotide
aaagugaacacaggagaca

SEQ ID NO: 1292715 - RNA, 19 nt, Artificial Sequence
  Description of Artificial Sequence: Synthetic oligonucleotide
aaacagucaaagggauccc

SEQ ID NO: 1292716 - RNA, 19 nt, Artificial Sequence
  Description of Artificial Sequence: Synthetic oligonucleotide
acaggaaugaccaggcuag

SEQ ID NO: 1292717 - RNA, 19 nt, Artificial Sequence
  Description of Artificial Sequence: Synthetic oligonucleotide
gcuacauggaaacaggcug

SEQ ID NO: 1292718 - RNA, 19 nt, Artificial Sequence
  Description of Artificial Sequence: Synthetic oligonucleotide
acaaauaacauccguuaua

SEQ ID NO: 1292719 - RNA, 19 nt, Artificial Sequence
  Description of Artificial Sequence: Synthetic oligonucleotide
aucaguggggccccaauag

SEQ ID NO: 1292720 - RNA, 19 nt, Artificial Sequence
  Description of Artificial Sequence: Synthetic oligonucleotide
uacaaauaacauccguuau

SEQ ID NO: 1292721 - RNA, 19 nt, Artificial Sequence
  Description of Artificial Sequence: Synthetic oligonucleotide
agaguucggucuucagugc

SEQ ID NO: 1292722 - RNA, 19 nt, Artificial Sequence
  Description of Artificial Sequence: Synthetic oligonucleotide
uaaaggcaacccuuaaagu

SEQ ID NO: 1292723 - RNA, 19 nt, Artificial Sequence
  Description of Artificial Sequence: Synthetic oligonucleotide
uccaccaaagcucuuuauc

SEQ ID NO: 1292724 - RNA, 19 nt, Artificial Sequence
  Description of Artificial Sequence: Synthetic oligonucleotide
gaucccuucuacugggaag

SEQ ID NO: 1292725 - RNA, 19 nt, Artificial Sequence
  Description of Artificial Sequence: Synthetic oligonucleotide
uaggucaagacaagguggu

SEQ ID NO: 1292726 - RNA, 19 nt, Artificial Sequence
  Description of Artificial Sequence: Synthetic oligonucleotide
ucuauggagaggauucguc

SEQ ID NO: 1292727 - RNA, 19 nt, Artificial Sequence
  Description of Artificial Sequence: Synthetic oligonucleotide
uaggcuuagagcagucacc

SEQ ID NO: 1292728 - RNA, 19 nt, Artificial Sequence
  Description of Artificial Sequence: Synthetic oligonucleotide
aaauaacauccguuauaca

SEQ ID NO: 1292729 - RNA, 19 nt, Artificial Sequence
  Description of Artificial Sequence: Synthetic oligonucleotide
uagugggaggggaugauga

SEQ ID NO: 1292730 - RNA, 19 nt, Artificial Sequence
  Description of Artificial Sequence: Synthetic oligonucleotide
aaguaccugucccuccuag

SEQ ID NO: 1292731 - RNA, 19 nt, Artificial Sequence
  Description of Artificial Sequence: Synthetic oligonucleotide
uacauagauuaccuuccca

SEQ ID NO: 1292732 - RNA, 19 nt, Artificial Sequence
  Description of Artificial Sequence: Synthetic oligonucleotide
guacuguggcuuaugaccg

SEQ ID NO: 1292733 - RNA, 19 nt, Artificial Sequence
  Description of Artificial Sequence: Synthetic oligonucleotide
gacauuaagauccacucau

SEQ ID NO: 1292734 - RNA, 19 nt, Artificial Sequence
  Description of Artificial Sequence: Synthetic oligonucleotide
ucguacaaauaacauccgu

SEQ ID NO: 1292735 - RNA, 19 nt, Artificial Sequence
  Description of Artificial Sequence: Synthetic oligonucleotide
agggcggugacauuaagau

SEQ ID NO: 1292736 - RNA, 19 nt, Artificial Sequence
  Description of Artificial Sequence: Synthetic oligonucleotide
gucaccaaguaccuguccc

SEQ ID NO: 1292737 - RNA, 19 nt, Artificial Sequence
  Description of Artificial Sequence: Synthetic oligonucleotide
uuugcaaucuguggcuucc

SEQ ID NO: 1292738 - RNA, 19 nt, Artificial Sequence
  Description of Artificial Sequence: Synthetic oligonucleotide
guacaaauaacauccguua

SEQ ID NO: 1292739 - RNA, 19 nt, Artificial Sequence
  Description of Artificial Sequence: Synthetic oligonucleotide
uaaaagaacaagugcuguu

SEQ ID NO: 1292740 - RNA, 19 nt, Artificial Sequence
  Description of Artificial Sequence: Synthetic oligonucleotide
cuaggcuuagagcagucac

SEQ ID NO: 1292741 - RNA, 19 nt, Artificial Sequence
  Description of Artificial Sequence: Synthetic oligonucleotide
aaccacaccaucauacaca

SEQ ID NO: 1292742 - RNA, 19 nt, Artificial Sequence
  Description of Artificial Sequence: Synthetic oligonucleotide
cuuaugaccgcugucacca

SEQ ID NO: 1292743 - RNA, 19 nt, Artificial Sequence
  Description of Artificial Sequence: Synthetic oligonucleotide
ucuuuauccuuucgacucu

SEQ ID NO: 1292744 - RNA, 19 nt, Artificial Sequence
  Description of Artificial Sequence: Synthetic oligonucleotide
ucgcacuacucacucaucu

SEQ ID NO: 1292745 - RNA, 19 nt, Artificial Sequence
  Description of Artificial Sequence: Synthetic oligonucleotide
cacucaugcguucucagac

SEQ ID NO: 1292746 - RNA, 19 nt, Artificial Sequence
  Description of Artificial Sequence: Synthetic oligonucleotide
augggcacaacccuacacu

SEQ ID NO: 1292747 - RNA, 19 nt, Artificial Sequence
  Description of Artificial Sequence: Synthetic oligonucleotide
uacacacacaccacacaca

SEQ ID NO: 1292748 - RNA, 19 nt, Artificial Sequence
  Description of Artificial Sequence: Synthetic oligonucleotide
uuucgacucuucuucuggc

SEQ ID NO: 1292749 - RNA, 19 nt, Artificial Sequence
  Description of Artificial Sequence: Synthetic oligonucleotide
aggucaccgcuucuugugc

SEQ ID NO: 1292750 - RNA, 19 nt, Artificial Sequence
  Description of Artificial Sequence: Synthetic oligonucleotide
uaugaccgcugucaccaag

SEQ ID NO: 1292751 - RNA, 19 nt, Artificial Sequence
  Description of Artificial Sequence: Synthetic oligonucleotide
aagguauggggagauacaa

SEQ ID NO: 1292752 - RNA, 19 nt, Artificial Sequence
  Description of Artificial Sequence: Synthetic oligonucleotide
uaugcacaauuccaggcuu

SEQ ID NO: 1292753 - RNA, 19 nt, Artificial Sequence
  Description of Artificial Sequence: Synthetic oligonucleotide
ugucuauggagaggauucg

SEQ ID NO: 1292754 - RNA, 19 nt, Artificial Sequence
  Description of Artificial Sequence: Synthetic oligonucleotide
uagguacuguggcuuauga

SEQ ID NO: 1292755 - RNA, 19 nt, Artificial Sequence
  Description of Artificial Sequence: Synthetic oligonucleotide
uggcuuaugaccgcuguca

SEQ ID NO: 1292756 - RNA, 19 nt, Artificial Sequence
  Description of Artificial Sequence: Synthetic oligonucleotide
guagccacaguacuugaca

SEQ ID NO: 1292757 - RNA, 19 nt, Artificial Sequence
  Description of Artificial Sequence: Synthetic oligonucleotide
ucacucaucucuucucacu

SEQ ID NO: 1292758 - RNA, 19 nt, Artificial Sequence
  Description of Artificial Sequence: Synthetic oligonucleotide
agucaaagggaucccuucu

SEQ ID NO: 1292759 - RNA, 19 nt, Artificial Sequence
  Description of Artificial Sequence: Synthetic oligonucleotide
ugcacaauuccaggcuugg

SEQ ID NO: 1292760 - RNA, 19 nt, Artificial Sequence
  Description of Artificial Sequence: Synthetic oligonucleotide
uguggcuuaugaccgcugu

SEQ ID NO: 1292761 - RNA, 19 nt, Artificial Sequence
  Description of Artificial Sequence: Synthetic oligonucleotide
uucgacucuucuucuggcc

SEQ ID NO: 1292762 - RNA, 19 nt, Artificial Sequence
  Description of Artificial Sequence: Synthetic oligonucleotide
auaacauccguuauacaaa

SEQ ID NO: 1292763 - RNA, 19 nt, Artificial Sequence
  Description of Artificial Sequence: Synthetic oligonucleotide
ugaaaagccugucgacaac

SEQ ID NO: 1292764 - RNA, 19 nt, Artificial Sequence
  Description of Artificial Sequence: Synthetic oligonucleotide
ugcccuucguacaaauaac

SEQ ID NO: 1292765 - RNA, 19 nt, Artificial Sequence
  Description of Artificial Sequence: Synthetic oligonucleotide
acaacccuacacucacaac

SEQ ID NO: 1292766 - RNA, 19 nt, Artificial Sequence
  Description of Artificial Sequence: Synthetic oligonucleotide
uguuuaaggcguucuuuau

SEQ ID NO: 1292767 - RNA, 19 nt, Artificial Sequence
  Description of Artificial Sequence: Synthetic oligonucleotide
uacaagacccaggcuaugc

SEQ ID NO: 1292768 - RNA, 19 nt, Artificial Sequence
  Description of Artificial Sequence: Synthetic oligonucleotide
gaguucggucuucagugcc

SEQ ID NO: 1292769 - RNA, 19 nt, Artificial Sequence
  Description of Artificial Sequence: Synthetic oligonucleotide
agcuaaaaggcuggcaaug

SEQ ID NO: 1292770 - RNA, 19 nt, Artificial Sequence
  Description of Artificial Sequence: Synthetic oligonucleotide
uagauuaccuucccaccau

SEQ ID NO: 1292771 - RNA, 19 nt, Artificial Sequence
  Description of Artificial Sequence: Synthetic oligonucleotide
uaagauccacucaugcguu

SEQ ID NO: 1292772 - RNA, 19 nt, Artificial Sequence
  Description of Artificial Sequence: Synthetic oligonucleotide
gucagcucagagcuaagac

SEQ ID NO: 1292773 - RNA, 19 nt, Artificial Sequence
  Description of Artificial Sequence: Synthetic oligonucleotide
caggcuaugcacaauucca

SEQ ID NO: 1292774 - RNA, 19 nt, Artificial Sequence
  Description of Artificial Sequence: Synthetic oligonucleotide
uauccuuucgacucuucuu

SEQ ID NO: 1292775 - RNA, 19 nt, Artificial Sequence
  Description of Artificial Sequence: Synthetic oligonucleotide
aacccuacacucacaacca

SEQ ID NO: 1292776 - RNA, 19 nt, Artificial Sequence
  Description of Artificial Sequence: Synthetic oligonucleotide
cagugcuacauagauuacc

SEQ ID NO: 1292777 - RNA, 19 nt, Artificial Sequence
  Description of Artificial Sequence: Synthetic oligonucleotide
ucaccaaguaccugucccu

SEQ ID NO: 1292778 - RNA, 19 nt, Artificial Sequence
  Description of Artificial Sequence: Synthetic oligonucleotide
gcuaugcacaauuccaggc

SEQ ID NO: 1292779 - RNA, 19 nt, Artificial Sequence
  Description of Artificial Sequence: Synthetic oligonucleotide
agaaacagucaaagggauc

SEQ ID NO: 1292780 - RNA, 19 nt, Artificial Sequence
  Description of Artificial Sequence: Synthetic oligonucleotide
ugaggauauaaagguuuca

SEQ ID NO: 1292781 - RNA, 19 nt, Artificial Sequence
  Description of Artificial Sequence: Synthetic oligonucleotide
uccacucaugcguucucag

SEQ ID NO: 1292782 - RNA, 19 nt, Artificial Sequence
  Description of Artificial Sequence: Synthetic oligonucleotide
cucagcucgcacuacucac

SEQ ID NO: 1292783 - RNA, 19 nt, Artificial Sequence
  Description of Artificial Sequence: Synthetic oligonucleotide
ucaugcguucucagacucc

SEQ ID NO: 1292784 - RNA, 19 nt, Artificial Sequence
  Description of Artificial Sequence: Synthetic oligonucleotide
ggcuaugcacaauuccagg

SEQ ID NO: 1292785 - RNA, 19 nt, Artificial Sequence
  Description of Artificial Sequence: Synthetic oligonucleotide
aagacccaggcuaugcaca

SEQ ID NO: 1292786 - RNA, 19 nt, Artificial Sequence
  Description of Artificial Sequence: Synthetic oligonucleotide
gaccaggcuagguacugug

SEQ ID NO: 1292787 - RNA, 19 nt, Artificial Sequence
  Description of Artificial Sequence: Synthetic oligonucleotide
uucgucagcucagagcuaa

SEQ ID NO: 1292788 - RNA, 19 nt, Artificial Sequence
  Description of Artificial Sequence: Synthetic oligonucleotide
uggggagauacaauuuauu

SEQ ID NO: 1292789 - RNA, 19 nt, Artificial Sequence
  Description of Artificial Sequence: Synthetic oligonucleotide
cgcucugcaaaccacaucc

SEQ ID NO: 1292790 - RNA, 19 nt, Artificial Sequence
  Description of Artificial Sequence: Synthetic oligonucleotide
uaaggcguucuuuauccuu

SEQ ID NO: 1292791 - RNA, 19 nt, Artificial Sequence
  Description of Artificial Sequence: Synthetic oligonucleotide
gugacccuuagugggaggg

SEQ ID NO: 1292792 - RNA, 19 nt, Artificial Sequence
  Description of Artificial Sequence: Synthetic oligonucleotide
gagcuaagacagucagugc

SEQ ID NO: 1292793 - RNA, 19 nt, Artificial Sequence
  Description of Artificial Sequence: Synthetic oligonucleotide
ccuucguacaaauaacauc

SEQ ID NO: 1292794 - RNA, 19 nt, Artificial Sequence
  Description of Artificial Sequence: Synthetic oligonucleotide
ugcaaaccacauccuuccc

SEQ ID NO: 1292795 - RNA, 19 nt, Artificial Sequence
  Description of Artificial Sequence: Synthetic oligonucleotide
aaugaccaggcuagguacu

SEQ ID NO: 1292796 - RNA, 19 nt, Artificial Sequence
  Description of Artificial Sequence: Synthetic oligonucleotide
acucaugcguucucagacu

SEQ ID NO: 1292797 - RNA, 19 nt, Artificial Sequence
  Description of Artificial Sequence: Synthetic oligonucleotide
aggauucgucagcucagag

SEQ ID NO: 1292798 - RNA, 19 nt, Artificial Sequence
  Description of Artificial Sequence: Synthetic oligonucleotide
ccaauaggugcuauccugc

SEQ ID NO: 1292799 - RNA, 19 nt, Artificial Sequence
  Description of Artificial Sequence: Synthetic oligonucleotide
ugugacccuuagugggagg

SEQ ID NO: 1292800 - RNA, 19 nt, Artificial Sequence
  Description of Artificial Sequence: Synthetic oligonucleotide
uccccucacuccaccaaag

SEQ ID NO: 1292801 - RNA, 19 nt, Artificial Sequence
  Description of Artificial Sequence: Synthetic oligonucleotide
aggcuuagagcagucaccu

SEQ ID NO: 1292802 - RNA, 19 nt, Artificial Sequence
  Description of Artificial Sequence: Synthetic oligonucleotide
uggagugacgggaugucuu

SEQ ID NO: 1292803 - RNA, 19 nt, Artificial Sequence
  Description of Artificial Sequence: Synthetic oligonucleotide
uggagaggauucgucagcu

SEQ ID NO: 1292804 - RNA, 19 nt, Artificial Sequence
  Description of Artificial Sequence: Synthetic oligonucleotide
acccuuaaagugucauugu

SEQ ID NO: 1292805 - RNA, 19 nt, Artificial Sequence
  Description of Artificial Sequence: Synthetic oligonucleotide
acccuacacucacaaccac

SEQ ID NO: 1292806 - RNA, 19 nt, Artificial Sequence
  Description of Artificial Sequence: Synthetic oligonucleotide
aaugagccccuggguuugc

SEQ ID NO: 1292807 - RNA, 19 nt, Artificial Sequence
  Description of Artificial Sequence: Synthetic oligonucleotide
uucuccugccaguaaggaa

SEQ ID NO: 1292808 - RNA, 19 nt, Artificial Sequence
  Description of Artificial Sequence: Synthetic oligonucleotide
aaaauggaccaaagccaga

SEQ ID NO: 1292809 - RNA, 19 nt, Artificial Sequence
  Description of Artificial Sequence: Synthetic oligonucleotide
aggcuaugcacaauuccag

SEQ ID NO: 1292810 - RNA, 19 nt, Artificial Sequence
  Description of Artificial Sequence: Synthetic oligonucleotide
agaggcgggacuuccccug

SEQ ID NO: 1292811 - RNA, 19 nt, Artificial Sequence
  Description of Artificial Sequence: Synthetic oligonucleotide
agaggauucgucagcucag

SEQ ID NO: 1292812 - RNA, 19 nt, Artificial Sequence
  Description of Artificial Sequence: Synthetic oligonucleotide
ucagugcuacauagauuac

SEQ ID NO: 1292813 - RNA, 19 nt, Artificial Sequence
  Description of Artificial Sequence: Synthetic oligonucleotide
ugagggcggugacauuaag

SEQ ID NO: 1292814 - RNA, 19 nt, Artificial Sequence
  Description of Artificial Sequence: Synthetic oligonucleotide
uuagagcagucaccuguaa

SEQ ID NO: 1292815 - RNA, 19 nt, Artificial Sequence
  Description of Artificial Sequence: Synthetic oligonucleotide
gaggccgaccgacuucucc

SEQ ID NO: 1292816 - RNA, 19 nt, Artificial Sequence
  Description of Artificial Sequence: Synthetic oligonucleotide
cuguuuaaggcguucuuua

SEQ ID NO: 1292817 - RNA, 19 nt, Artificial Sequence
  Description of Artificial Sequence: Synthetic oligonucleotide
ucccuccuaggcuuagagc

SEQ ID NO: 1292818 - RNA, 19 nt, Artificial Sequence
  Description of Artificial Sequence: Synthetic oligonucleotide
gaagguauggggagauaca

SEQ ID NO: 1292819 - RNA, 19 nt, Artificial Sequence
  Description of Artificial Sequence: Synthetic oligonucleotide
ucaucuugcugaaguggua

SEQ ID NO: 1292820 - RNA, 19 nt, Artificial Sequence
  Description of Artificial Sequence: Synthetic oligonucleotide
gcagcuaaaaggcuggcaa

SEQ ID NO: 1292821 - RNA, 19 nt, Artificial Sequence
  Description of Artificial Sequence: Synthetic oligonucleotide
acauuaagauccacucaug

SEQ ID NO: 1292822 - RNA, 19 nt, Artificial Sequence
  Description of Artificial Sequence: Synthetic oligonucleotide
ucuugcugaagugguauuu

SEQ ID NO: 1292823 - RNA, 19 nt, Artificial Sequence
  Description of Artificial Sequence: Synthetic oligonucleotide
aggcguucuuuauccuuuc

SEQ ID NO: 1292824 - RNA, 19 nt, Artificial Sequence
  Description of Artificial Sequence: Synthetic oligonucleotide
aggccgaccgacuucuccu

SEQ ID NO: 1292825 - RNA, 19 nt, Artificial Sequence
  Description of Artificial Sequence: Synthetic oligonucleotide
cauacacacacaccacaca

SEQ ID NO: 1292826 - RNA, 19 nt, Artificial Sequence
  Description of Artificial Sequence: Synthetic oligonucleotide
acugagggcggugacauua

SEQ ID NO: 1292827 - RNA, 19 nt, Artificial Sequence
  Description of Artificial Sequence: Synthetic oligonucleotide
cauccguuauacaaagaua

SEQ ID NO: 1292828 - RNA, 19 nt, Artificial Sequence
  Description of Artificial Sequence: Synthetic oligonucleotide
cuuccgcucugcaaaccac

SEQ ID NO: 1292829 - RNA, 19 nt, Artificial Sequence
  Description of Artificial Sequence: Synthetic oligonucleotide
cccaauaggugcuauccug

SEQ ID NO: 1292830 - RNA, 19 nt, Artificial Sequence
  Description of Artificial Sequence: Synthetic oligonucleotide
cccuccuaggcuuagagca

SEQ ID NO: 1292831 - RNA, 19 nt, Artificial Sequence
  Description of Artificial Sequence: Synthetic oligonucleotide
cacacaccacacacacagg

SEQ ID NO: 1292832 - RNA, 19 nt, Artificial Sequence
  Description of Artificial Sequence: Synthetic oligonucleotide
agugacgggaugucuucau

SEQ ID NO: 1292833 - RNA, 19 nt, Artificial Sequence
  Description of Artificial Sequence: Synthetic oligonucleotide
uguuuacgaacugcccuuc

SEQ ID NO: 1292834 - RNA, 19 nt, Artificial Sequence
  Description of Artificial Sequence: Synthetic oligonucleotide
ccaggcuaugcacaauucc

SEQ ID NO: 1292835 - RNA, 19 nt, Artificial Sequence
  Description of Artificial Sequence: Synthetic oligonucleotide
uggaggucgcaagggaaca

SEQ ID NO: 1292836 - RNA, 19 nt, Artificial Sequence
  Description of Artificial Sequence: Synthetic oligonucleotide
aacauccguuauacaaaga

SEQ ID NO: 1292837 - RNA, 19 nt, Artificial Sequence
  Description of Artificial Sequence: Synthetic oligonucleotide
gaccgcugucaccaaguac

SEQ ID NO: 1292838 - RNA, 19 nt, Artificial Sequence
  Description of Artificial Sequence: Synthetic oligonucleotide
cuaugcacaauuccaggcu

SEQ ID NO: 1292839 - RNA, 19 nt, Artificial Sequence
  Description of Artificial Sequence: Synthetic oligonucleotide
acccaggcuaugcacaauu

SEQ ID NO: 1292840 - RNA, 19 nt, Artificial Sequence
  Description of Artificial Sequence: Synthetic oligonucleotide
ggaaugaccaggcuaggua

SEQ ID NO: 1292841 - RNA, 19 nt, Artificial Sequence
  Description of Artificial Sequence: Synthetic oligonucleotide
cagagauggccccaaaucu

SEQ ID NO: 1292842 - RNA, 19 nt, Artificial Sequence
  Description of Artificial Sequence: Synthetic oligonucleotide
gguauggggagauacaauu

SEQ ID NO: 1292843 - RNA, 19 nt, Artificial Sequence
  Description of Artificial Sequence: Synthetic oligonucleotide
accgacuucuccugccagu

SEQ ID NO: 1292844 - RNA, 19 nt, Artificial Sequence
  Description of Artificial Sequence: Synthetic oligonucleotide
ugccaguaaggaagcugcu

SEQ ID NO: 1292845 - RNA, 19 nt, Artificial Sequence
  Description of Artificial Sequence: Synthetic oligonucleotide
gauacaagacccaggcuau

SEQ ID NO: 1292846 - RNA, 19 nt, Artificial Sequence
  Description of Artificial Sequence: Synthetic oligonucleotide
caugcguucucagacucca

SEQ ID NO: 1292847 - RNA, 19 nt, Artificial Sequence
  Description of Artificial Sequence: Synthetic oligonucleotide
cauuguccaccuccagaac

SEQ ID NO: 1292848 - RNA, 19 nt, Artificial Sequence
  Description of Artificial Sequence: Synthetic oligonucleotide
augaugagaaacagucaaa

SEQ ID NO: 1292849 - RNA, 19 nt, Artificial Sequence
  Description of Artificial Sequence: Synthetic oligonucleotide
gcuuagagcagucaccugu

SEQ ID NO: 1292850 - RNA, 19 nt, Artificial Sequence
  Description of Artificial Sequence: Synthetic oligonucleotide
uggggccccaauaggugcu

SEQ ID NO: 1292851 - RNA, 19 nt, Artificial Sequence
  Description of Artificial Sequence: Synthetic oligonucleotide
gauccacucaugcguucuc

SEQ ID NO: 1292852 - RNA, 19 nt, Artificial Sequence
  Description of Artificial Sequence: Synthetic oligonucleotide
cuuagagcagucaccugua

SEQ ID NO: 1292853 - RNA, 19 nt, Artificial Sequence
  Description of Artificial Sequence: Synthetic oligonucleotide
gagggcggugacauuaaga

SEQ ID NO: 1292854 - RNA, 19 nt, Artificial Sequence
  Description of Artificial Sequence: Synthetic oligonucleotide
ccaggcuagguacuguggc

SEQ ID NO: 1292855 - RNA, 19 nt, Artificial Sequence
  Description of Artificial Sequence: Synthetic oligonucleotide
ggcaauggaacaggaauga

SEQ ID NO: 1292856 - RNA, 19 nt, Artificial Sequence
  Description of Artificial Sequence: Synthetic oligonucleotide
caguagacccaggagccug

SEQ ID NO: 1292857 - RNA, 19 nt, Artificial Sequence
  Description of Artificial Sequence: Synthetic oligonucleotide
cacaccacacacacaggga

SEQ ID NO: 1292858 - RNA, 19 nt, Artificial Sequence
  Description of Artificial Sequence: Synthetic oligonucleotide
ggcguucuuuauccuuucg

SEQ ID NO: 1292859 - RNA, 19 nt, Artificial Sequence
  Description of Artificial Sequence: Synthetic oligonucleotide
gcuuaugaccgcugucacc

SEQ ID NO: 1292860 - RNA, 19 nt, Artificial Sequence
  Description of Artificial Sequence: Synthetic oligonucleotide
aggucaagacaaggugguc

SEQ ID NO: 1292861 - RNA, 19 nt, Artificial Sequence
  Description of Artificial Sequence: Synthetic oligonucleotide
gagaaacagucaaagggau

SEQ ID NO: 1292862 - RNA, 19 nt, Artificial Sequence
  Description of Artificial Sequence: Synthetic oligonucleotide
gcuguuuacgaacugcccu

SEQ ID NO: 1292863 - RNA, 19 nt, Artificial Sequence
  Description of Artificial Sequence: Synthetic oligonucleotide
gacccuuagugggagggga

SEQ ID NO: 1292864 - RNA, 19 nt, Artificial Sequence
  Description of Artificial Sequence: Synthetic oligonucleotide
auggggagauacaauuuau

SEQ ID NO: 1292865 - RNA, 19 nt, Artificial Sequence
  Description of Artificial Sequence: Synthetic oligonucleotide
ucgucagcucagagcuaag

SEQ ID NO: 1292866 - RNA, 19 nt, Artificial Sequence
  Description of Artificial Sequence: Synthetic oligonucleotide
uccuaggcuuagagcaguc

SEQ ID NO: 1292867 - RNA, 19 nt, Artificial Sequence
  Description of Artificial Sequence: Synthetic oligonucleotide
augaccgcugucaccaagu

SEQ ID NO: 1292868 - RNA, 19 nt, Artificial Sequence
  Description of Artificial Sequence: Synthetic oligonucleotide
caguaggucaagacaaggu

SEQ ID NO: 1292869 - RNA, 19 nt, Artificial Sequence
  Description of Artificial Sequence: Synthetic oligonucleotide
ugaccgcugucaccaagua

SEQ ID NO: 1292870 - RNA, 19 nt, Artificial Sequence
  Description of Artificial Sequence: Synthetic oligonucleotide
gggagauacaauuuauuuu

SEQ ID NO: 1292871 - RNA, 19 nt, Artificial Sequence
  Description of Artificial Sequence: Synthetic oligonucleotide
ccaacucuucaguagguca

SEQ ID NO: 1292872 - RNA, 19 nt, Artificial Sequence
  Description of Artificial Sequence: Synthetic oligonucleotide
aucuugcugaagugguauu

SEQ ID NO: 1292873 - RNA, 19 nt, Artificial Sequence
  Description of Artificial Sequence: Synthetic oligonucleotide
caagugcuguuuacgaacu

SEQ ID NO: 1292874 - RNA, 19 nt, Artificial Sequence
  Description of Artificial Sequence: Synthetic oligonucleotide
aguucggucuucagugcca

SEQ ID NO: 1292875 - RNA, 19 nt, Artificial Sequence
  Description of Artificial Sequence: Synthetic oligonucleotide
cccuuaaagugucauuguc

SEQ ID NO: 1292876 - RNA, 19 nt, Artificial Sequence
  Description of Artificial Sequence: Synthetic oligonucleotide
cagcucgcacuacucacuc

SEQ ID NO: 1292877 - RNA, 19 nt, Artificial Sequence
  Description of Artificial Sequence: Synthetic oligonucleotide
gugacgggaugucuucauc

SEQ ID NO: 1292878 - RNA, 19 nt, Artificial Sequence
  Description of Artificial Sequence: Synthetic oligonucleotide
auacaagacccaggcuaug

SEQ ID NO: 1292879 - RNA, 19 nt, Artificial Sequence
  Description of Artificial Sequence: Synthetic oligonucleotide
gcuauccugcccuuccuca

SEQ ID NO: 1292880 - RNA, 19 nt, Artificial Sequence
  Description of Artificial Sequence: Synthetic oligonucleotide
cagucagugcuacauagau

SEQ ID NO: 1292881 - RNA, 19 nt, Artificial Sequence
  Description of Artificial Sequence: Synthetic oligonucleotide
ggagugacgggaugucuuc

SEQ ID NO: 1292882 - RNA, 19 nt, Artificial Sequence
  Description of Artificial Sequence: Synthetic oligonucleotide
auccacucaugcguucuca

SEQ ID NO: 1292883 - RNA, 19 nt, Artificial Sequence
  Description of Artificial Sequence: Synthetic oligonucleotide
guggcuuaugaccgcuguc

SEQ ID NO: 1292884 - RNA, 19 nt, Artificial Sequence
  Description of Artificial Sequence: Synthetic oligonucleotide
aggucgcaagggaacacug

SEQ ID NO: 1292885 - RNA, 19 nt, Artificial Sequence
  Description of Artificial Sequence: Synthetic oligonucleotide
agugccaagugaacuggaa

SEQ ID NO: 1292886 - RNA, 19 nt, Artificial Sequence
  Description of Artificial Sequence: Synthetic oligonucleotide
gcagaggcgggacuucccc

SEQ ID NO: 1292887 - RNA, 19 nt, Artificial Sequence
  Description of Artificial Sequence: Synthetic oligonucleotide
gaggauucgucagcucaga

SEQ ID NO: 1292888 - RNA, 19 nt, Artificial Sequence
  Description of Artificial Sequence: Synthetic oligonucleotide
cgcaagggaacacugccgc

SEQ ID NO: 1292889 - RNA, 19 nt, Artificial Sequence
  Description of Artificial Sequence: Synthetic oligonucleotide
ugaccaggcuagguacugu

SEQ ID NO: 1292890 - RNA, 19 nt, Artificial Sequence
  Description of Artificial Sequence: Synthetic oligonucleotide
ggcuuaugaccgcugucac

SEQ ID NO: 1292891 - RNA, 19 nt, Artificial Sequence
  Description of Artificial Sequence: Synthetic oligonucleotide
agggucugcuacauggaaa

SEQ ID NO: 1292892 - RNA, 19 nt, Artificial Sequence
  Description of Artificial Sequence: Synthetic oligonucleotide
uuaugaccgcugucaccaa

SEQ ID NO: 1292893 - RNA, 19 nt, Artificial Sequence
  Description of Artificial Sequence: Synthetic oligonucleotide
gcacuacucacucaucucu

SEQ ID NO: 1292894 - RNA, 19 nt, Artificial Sequence
  Description of Artificial Sequence: Synthetic oligonucleotide
cucgcacuacucacucauc

SEQ ID NO: 1292895 - RNA, 19 nt, Artificial Sequence
  Description of Artificial Sequence: Synthetic oligonucleotide
cuucagugccaagugaacu

SEQ ID NO: 1292896 - RNA, 19 nt, Artificial Sequence
  Description of Artificial Sequence: Synthetic oligonucleotide
caccaaguaccugucccuc

SEQ ID NO: 1292897 - RNA, 19 nt, Artificial Sequence
  Description of Artificial Sequence: Synthetic oligonucleotide
acaagguggucugguggca

SEQ ID NO: 1292898 - RNA, 19 nt, Artificial Sequence
  Description of Artificial Sequence: Synthetic oligonucleotide
aggcuagguacuguggcuu

SEQ ID NO: 1292899 - RNA, 19 nt, Artificial Sequence
  Description of Artificial Sequence: Synthetic oligonucleotide
ucaccgcuucuugugcuuc

SEQ ID NO: 1292900 - RNA, 19 nt, Artificial Sequence
  Description of Artificial Sequence: Synthetic oligonucleotide
ggucaagacaagguggucu

SEQ ID NO: 1292901 - RNA, 19 nt, Artificial Sequence
  Description of Artificial Sequence: Synthetic oligonucleotide
cuucuccugccaguaagga

SEQ ID NO: 1292902 - RNA, 19 nt, Artificial Sequence
  Description of Artificial Sequence: Synthetic oligonucleotide
gagugacgggaugucuuca

SEQ ID NO: 1292903 - RNA, 19 nt, Artificial Sequence
  Description of Artificial Sequence: Synthetic oligonucleotide
ccuccuaggcuuagagcag

SEQ ID NO: 1292904 - RNA, 19 nt, Artificial Sequence
  Description of Artificial Sequence: Synthetic oligonucleotide
agguauggggagauacaau

SEQ ID NO: 1292905 - RNA, 19 nt, Artificial Sequence
  Description of Artificial Sequence: Synthetic oligonucleotide
cuuccucgcuccccuagga

SEQ ID NO: 1292906 - RNA, 19 nt, Artificial Sequence
  Description of Artificial Sequence: Synthetic oligonucleotide
cuguuuacgaacugcccuu

SEQ ID NO: 1292907 - RNA, 19 nt, Artificial Sequence
  Description of Artificial Sequence: Synthetic oligonucleotide
ggucgcaagggaacacugc

SEQ ID NO: 1292908 - RNA, 19 nt, Artificial Sequence
  Description of Artificial Sequence: Synthetic oligonucleotide
agccaaacagcugcagcua

SEQ ID NO: 1292909 - RNA, 19 nt, Artificial Sequence
  Description of Artificial Sequence: Synthetic oligonucleotide
cugcagcuaaaaggcuggc

SEQ ID NO: 1292910 - RNA, 19 nt, Artificial Sequence
  Description of Artificial Sequence: Synthetic oligonucleotide
gacgggaugucuucaucuu

SEQ ID NO: 1292911 - RNA, 19 nt, Artificial Sequence
  Description of Artificial Sequence: Synthetic oligonucleotide
ggguuugcaaucuguggcu

SEQ ID NO: 1292912 - RNA, 19 nt, Artificial Sequence
  Description of Artificial Sequence: Synthetic oligonucleotide
cacacacaccacacacaca

SEQ ID NO: 1292913 - RNA, 19 nt, Artificial Sequence
  Description of Artificial Sequence: Synthetic oligonucleotide
acugccgcuugggcugagg

SEQ ID NO: 1292914 - RNA, 19 nt, Artificial Sequence
  Description of Artificial Sequence: Synthetic oligonucleotide
caguggggccccaauaggu

SEQ ID NO: 1292915 - RNA, 19 nt, Artificial Sequence
  Description of Artificial Sequence: Synthetic oligonucleotide
caucaguggggccccaaua

SEQ ID NO: 1292916 - RNA, 19 nt, Artificial Sequence
  Description of Artificial Sequence: Synthetic oligonucleotide
gcccuucguacaaauaaca

SEQ ID NO: 1292917 - RNA, 19 nt, Artificial Sequence
  Description of Artificial Sequence: Synthetic oligonucleotide
gcaauggaacaggaaugac

SEQ ID NO: 1292918 - RNA, 19 nt, Artificial Sequence
  Description of Artificial Sequence: Synthetic oligonucleotide
ggugaggccgaccgacuuc

SEQ ID NO: 1292919 - RNA, 19 nt, Artificial Sequence
  Description of Artificial Sequence: Synthetic oligonucleotide
gaggucgcaagggaacacu

SEQ ID NO: 1292920 - RNA, 19 nt, Artificial Sequence
  Description of Artificial Sequence: Synthetic oligonucleotide
agauggccccaaaucugca

SEQ ID NO: 1292921 - RNA, 19 nt, Artificial Sequence
  Description of Artificial Sequence: Synthetic oligonucleotide
caucuugcugaagugguau

SEQ ID NO: 1292922 - RNA, 19 nt, Artificial Sequence
  Description of Artificial Sequence: Synthetic oligonucleotide
ggaucccuucuacugggaa

SEQ ID NO: 1292923 - RNA, 19 nt, Artificial Sequence
  Description of Artificial Sequence: Synthetic oligonucleotide
gggcggugacauuaagauc

SEQ ID NO: 1292924 - RNA, 19 nt, Artificial Sequence
  Description of Artificial Sequence: Synthetic oligonucleotide
caagacaagguggucuggu

SEQ ID NO: 1292925 - RNA, 19 nt, Artificial Sequence
  Description of Artificial Sequence: Synthetic oligonucleotide
cugccgcuugggcugagga

SEQ ID NO: 1292926 - RNA, 19 nt, Artificial Sequence
  Description of Artificial Sequence: Synthetic oligonucleotide
gcacagacucagcucgcac

SEQ ID NO: 1292927 - RNA, 19 nt, Artificial Sequence
  Description of Artificial Sequence: Synthetic oligonucleotide
caggcuagguacuguggcu

SEQ ID NO: 1292928 - RNA, 19 nt, Artificial Sequence
  Description of Artificial Sequence: Synthetic oligonucleotide
gucuauggagaggauucgu

SEQ ID NO: 1292929 - RNA, 19 nt, Artificial Sequence
  Description of Artificial Sequence: Synthetic oligonucleotide
cccuacacucacaaccaca

SEQ ID NO: 1292930 - RNA, 19 nt, Artificial Sequence
  Description of Artificial Sequence: Synthetic oligonucleotide
guagggugcuucuccugcu

SEQ ID NO: 1292931 - RNA, 19 nt, Artificial Sequence
  Description of Artificial Sequence: Synthetic oligonucleotide
uaggugcuauccugcccuu

SEQ ID NO: 1292932 - RNA, 19 nt, Artificial Sequence
  Description of Artificial Sequence: Synthetic oligonucleotide
guauggggagauacaauuu

SEQ ID NO: 1292933 - RNA, 19 nt, Artificial Sequence
  Description of Artificial Sequence: Synthetic oligonucleotide
ggagaggauucgucagcuc

SEQ ID NO: 1292934 - RNA, 19 nt, Artificial Sequence
  Description of Artificial Sequence: Synthetic oligonucleotide
gggacuuccccugcccagc

SEQ ID NO: 1292935 - RNA, 19 nt, Artificial Sequence
  Description of Artificial Sequence: Synthetic oligonucleotide
guucggucuucagugccaa

SEQ ID NO: 1292936 - RNA, 19 nt, Artificial Sequence
  Description of Artificial Sequence: Synthetic oligonucleotide
cugagggcggugacauuaa

SEQ ID NO: 1292937 - RNA, 19 nt, Artificial Sequence
  Description of Artificial Sequence: Synthetic oligonucleotide
cagagcuaagacagucagu

SEQ ID NO: 1292938 - RNA, 19 nt, Artificial Sequence
  Description of Artificial Sequence: Synthetic oligonucleotide
cguacaaauaacauccguu

SEQ ID NO: 1292939 - RNA, 19 nt, Artificial Sequence
  Description of Artificial Sequence: Synthetic oligonucleotide
cagcuaaaaggcuggcaau

SEQ ID NO: 1292940 - RNA, 19 nt, Artificial Sequence
  Description of Artificial Sequence: Synthetic oligonucleotide
gugaggccgaccgacuucu

SEQ ID NO: 1292941 - RNA, 19 nt, Artificial Sequence
  Description of Artificial Sequence: Synthetic oligonucleotide
ggccgaccgacuucuccug

SEQ ID NO: 1292942 - RNA, 19 nt, Artificial Sequence
  Description of Artificial Sequence: Synthetic oligonucleotide
gcuucuguuuaaggcguuc

SEQ ID NO: 1292943 - RNA, 19 nt, Artificial Sequence
  Description of Artificial Sequence: Synthetic oligonucleotide
ugaggccgaccgacuucuc

SEQ ID NO: 1292944 - RNA, 19 nt, Artificial Sequence
  Description of Artificial Sequence: Synthetic oligonucleotide
cucugcaaaccacauccuu

SEQ ID NO: 1292945 - RNA, 19 nt, Artificial Sequence
  Description of Artificial Sequence: Synthetic oligonucleotide
ccacuuccgcucugcaaac

SEQ ID NO: 1292946 - RNA, 19 nt, Artificial Sequence
  Description of Artificial Sequence: Synthetic oligonucleotide
cuguaaagccagcuccaau

SEQ ID NO: 1292947 - RNA, 19 nt, Artificial Sequence
  Description of Artificial Sequence: Synthetic oligonucleotide
ggaggucgcaagggaacac

SEQ ID NO: 1292948 - RNA, 19 nt, Artificial Sequence
  Description of Artificial Sequence: Synthetic oligonucleotide
caacccuuaaagugucauu

SEQ ID NO: 1292949 - RNA, 19 nt, Artificial Sequence
  Description of Artificial Sequence: Synthetic oligonucleotide
gagaagguauggggagaua

SEQ ID NO: 1292950 - RNA, 19 nt, Artificial Sequence
  Description of Artificial Sequence: Synthetic oligonucleotide
gccgcuugggcugaggaua

SEQ ID NO: 1292951 - RNA, 19 nt, Artificial Sequence
  Description of Artificial Sequence: Synthetic oligonucleotide
cacuacucacucaucucuu

SEQ ID NO: 1292952 - RNA, 19 nt, Artificial Sequence
  Description of Artificial Sequence: Synthetic oligonucleotide
cgcacuacucacucaucuc

SEQ ID NO: 1292953 - RNA, 19 nt, Artificial Sequence
  Description of Artificial Sequence: Synthetic oligonucleotide
acccuuagugggaggggau

SEQ ID NO: 1292954 - RNA, 19 nt, Artificial Sequence
  Description of Artificial Sequence: Synthetic oligonucleotide
ccagaguucggucuucagu

SEQ ID NO: 1292955 - RNA, 19 nt, Artificial Sequence
  Description of Artificial Sequence: Synthetic oligonucleotide
caagggaacacugccgcuu

SEQ ID NO: 1292956 - RNA, 19 nt, Artificial Sequence
  Description of Artificial Sequence: Synthetic oligonucleotide
gccgaccgacuucuccugc

SEQ ID NO: 1292957 - RNA, 19 nt, Artificial Sequence
  Description of Artificial Sequence: Synthetic oligonucleotide
ggccccaauaggugcuauc

SEQ ID NO: 1292958 - RNA, 19 nt, Artificial Sequence
  Description of Artificial Sequence: Synthetic oligonucleotide
gggcacaacccuacacuca

SEQ ID NO: 1292959 - RNA, 19 nt, Artificial Sequence
  Description of Artificial Sequence: Synthetic oligonucleotide
gugcuacauagauuaccuu

SEQ ID NO: 1292960 - RNA, 19 nt, Artificial Sequence
  Description of Artificial Sequence: Synthetic oligonucleotide
ccuuagugggaggggauga

SEQ ID NO: 1292961 - RNA, 19 nt, Artificial Sequence
  Description of Artificial Sequence: Synthetic oligonucleotide
cccuuagugggaggggaug

SEQ ID NO: 1292962 - RNA, 19 nt, Artificial Sequence
  Description of Artificial Sequence: Synthetic oligonucleotide
caaguaccugucccuccua

SEQ ID NO: 1292963 - RNA, 19 nt, Artificial Sequence
  Description of Artificial Sequence: Synthetic oligonucleotide
ggggaugaugagaaacagu

SEQ ID NO: 1292964 - RNA, 19 nt, Artificial Sequence
  Description of Artificial Sequence: Synthetic oligonucleotide
ggcuagguacuguggcuua

SEQ ID NO: 1292965 - RNA, 19 nt, Artificial Sequence
  Description of Artificial Sequence: Synthetic oligonucleotide
cuccuaggcuuagagcagu

SEQ ID NO: 1292966 - RNA, 19 nt, Artificial Sequence
  Description of Artificial Sequence: Synthetic oligonucleotide
acacugccgcuugggcuga

SEQ ID NO: 1292967 - RNA, 19 nt, Artificial Sequence
  Description of Artificial Sequence: Synthetic oligonucleotide
auucgucagcucagagcua

SEQ ID NO: 1292968 - RNA, 19 nt, Artificial Sequence
  Description of Artificial Sequence: Synthetic oligonucleotide
cgaacugcccuucguacaa

SEQ ID NO: 1292969 - RNA, 19 nt, Artificial Sequence
  Description of Artificial Sequence: Synthetic oligonucleotide
cccuucguacaaauaacau

SEQ ID NO: 1292970 - RNA, 19 nt, Artificial Sequence
  Description of Artificial Sequence: Synthetic oligonucleotide
cuuagugggaggggaugau

SEQ ID NO: 1292971 - RNA, 19 nt, Artificial Sequence
  Description of Artificial Sequence: Synthetic oligonucleotide
cagaggcgggacuuccccu

SEQ ID NO: 1292972 - RNA, 19 nt, Artificial Sequence
  Description of Artificial Sequence: Synthetic oligonucleotide
cgcuccccuaggaaggguc

SEQ ID NO: 1292973 - RNA, 19 nt, Artificial Sequence
  Description of Artificial Sequence: Synthetic oligonucleotide
uucccaccaugggcacaac

SEQ ID NO: 1292974 - RNA, 19 nt, Artificial Sequence
  Description of Artificial Sequence: Synthetic oligonucleotide
gcaagggaacacugccgcu

SEQ ID NO: 1292975 - RNA, 19 nt, Artificial Sequence
  Description of Artificial Sequence: Synthetic oligonucleotide
ccaccaugggcacaacccu

SEQ ID NO: 1292976 - RNA, 19 nt, Artificial Sequence
  Description of Artificial Sequence: Synthetic oligonucleotide
ggcugaggauauaaagguu

SEQ ID NO: 1292977 - RNA, 19 nt, Artificial Sequence
  Description of Artificial Sequence: Synthetic oligonucleotide
gggaucccuucuacuggga

SEQ ID NO: 1292978 - RNA, 19 nt, Artificial Sequence
  Description of Artificial Sequence: Synthetic oligonucleotide
ccaggcuuggaggucgcaa

SEQ ID NO: 1292979 - RNA, 19 nt, Artificial Sequence
  Description of Artificial Sequence: Synthetic oligonucleotide
cgucagcucagagcuaaga

SEQ ID NO: 1292980 - RNA, 19 nt, Artificial Sequence
  Description of Artificial Sequence: Synthetic oligonucleotide
gacccaggcuaugcacaau

SEQ ID NO: 1292981 - RNA, 19 nt, Artificial Sequence
  Description of Artificial Sequence: Synthetic oligonucleotide
gcaguagacccaggagccu

SEQ ID NO: 1292982 - RNA, 19 nt, Artificial Sequence
  Description of Artificial Sequence: Synthetic oligonucleotide
cgaccgacuucuccugcca

SEQ ID NO: 1292983 - RNA, 19 nt, Artificial Sequence
  Description of Artificial Sequence: Synthetic oligonucleotide
ggggccccaauaggugcua

SEQ ID NO: 1292984 - RNA, 19 nt, Artificial Sequence
  Description of Artificial Sequence: Synthetic oligonucleotide
cacugagggcggugacauu

SEQ ID NO: 1292985 - RNA, 19 nt, Artificial Sequence
  Description of Artificial Sequence: Synthetic oligonucleotide
ccgcuugggcugaggauau

SEQ ID NO: 1292986 - RNA, 19 nt, Artificial Sequence
  Description of Artificial Sequence: Synthetic oligonucleotide
ccccuaggaagggucugcu

SEQ ID NO: 1292987 - RNA, 19 nt, Artificial Sequence
  Description of Artificial Sequence: Synthetic oligonucleotide
cccaucaguggggccccaa

SEQ ID NO: 1292988 - RNA, 19 nt, Artificial Sequence
  Description of Artificial Sequence: Synthetic oligonucleotide
gggccccaauaggugcuau

SEQ ID NO: 1292989 - RNA, 19 nt, Artificial Sequence
  Description of Artificial Sequence: Synthetic oligonucleotide
aauuaaaugaagucccuuc

SEQ ID NO: 1292990 - RNA, 19 nt, Artificial Sequence
  Description of Artificial Sequence: Synthetic oligonucleotide
uauaguaacaaaaccaucu

SEQ ID NO: 1292991 - RNA, 19 nt, Artificial Sequence
  Description of Artificial Sequence: Synthetic oligonucleotide
auaauuaaucaauccaugg

SEQ ID NO: 1292992 - RNA, 19 nt, Artificial Sequence
  Description of Artificial Sequence: Synthetic oligonucleotide
aaugcguucuuguucuucc

SEQ ID NO: 1292993 - RNA, 19 nt, Artificial Sequence
  Description of Artificial Sequence: Synthetic oligonucleotide
uaaacucuaguaauuaacc

SEQ ID NO: 1292994 - RNA, 19 nt, Artificial Sequence
  Description of Artificial Sequence: Synthetic oligonucleotide
aguaauuaaccuuucuagg

SEQ ID NO: 1292995 - RNA, 19 nt, Artificial Sequence
  Description of Artificial Sequence: Synthetic oligonucleotide
augacaugaagucauuagc

SEQ ID NO: 1292996 - RNA, 19 nt, Artificial Sequence
  Description of Artificial Sequence: Synthetic oligonucleotide
guagaaaggaggcagaaag

SEQ ID NO: 1292997 - RNA, 19 nt, Artificial Sequence
  Description of Artificial Sequence: Synthetic oligonucleotide
ugaagucccuucaaaaugg

SEQ ID NO: 1292998 - RNA, 19 nt, Artificial Sequence
  Description of Artificial Sequence: Synthetic oligonucleotide
uuggcgauaacccaugugc

SEQ ID NO: 1292999 - RNA, 19 nt, Artificial Sequence
  Description of Artificial Sequence: Synthetic oligonucleotide
aauagucuauaggagacgg

SEQ ID NO: 1293000 - RNA, 19 nt, Artificial Sequence
  Description of Artificial Sequence: Synthetic oligonucleotide
ugcaacaccgacuacagcc

SEQ ID NO: 1293001 - RNA, 19 nt, Artificial Sequence
  Description of Artificial Sequence: Synthetic oligonucleotide
aaaaccaucuugcagguaa

SEQ ID NO: 1293002 - RNA, 19 nt, Artificial Sequence
  Description of Artificial Sequence: Synthetic oligonucleotide
cagaauuaaaugaaguccc

SEQ ID NO: 1293003 - RNA, 19 nt, Artificial Sequence
  Description of Artificial Sequence: Synthetic oligonucleotide
acuacagccacaaaaggcc

SEQ ID NO: 1293004 - RNA, 19 nt, Artificial Sequence
  Description of Artificial Sequence: Synthetic oligonucleotide
aaauuagggguauugauuu

SEQ ID NO: 1293005 - RNA, 19 nt, Artificial Sequence
  Description of Artificial Sequence: Synthetic oligonucleotide
ugacaugaagucauuagcc

SEQ ID NO: 1293006 - RNA, 19 nt, Artificial Sequence
  Description of Artificial Sequence: Synthetic oligonucleotide
uaauuaaucaauccauggu

SEQ ID NO: 1293007 - RNA, 19 nt, Artificial Sequence
  Description of Artificial Sequence: Synthetic oligonucleotide
ucaacuuguacuuacugga

SEQ ID NO: 1293008 - RNA, 19 nt, Artificial Sequence
  Description of Artificial Sequence: Synthetic oligonucleotide
aaggauuuggguuccauga

SEQ ID NO: 1293009 - RNA, 19 nt, Artificial Sequence
  Description of Artificial Sequence: Synthetic oligonucleotide
aauuaugucuccauuaggu

SEQ ID NO: 1293010 - RNA, 19 nt, Artificial Sequence
  Description of Artificial Sequence: Synthetic oligonucleotide
aaucuguaagucccuuugc

SEQ ID NO: 1293011 - RNA, 19 nt, Artificial Sequence
  Description of Artificial Sequence: Synthetic oligonucleotide
uuaucuuuggcauguuacg

SEQ ID NO: 1293012 - RNA, 19 nt, Artificial Sequence
  Description of Artificial Sequence: Synthetic oligonucleotide
uuuguuggauuacugagga

SEQ ID NO: 1293013 - RNA, 19 nt, Artificial Sequence
  Description of Artificial Sequence: Synthetic oligonucleotide
ucugguaagagguauggug

SEQ ID NO: 1293014 - RNA, 19 nt, Artificial Sequence
  Description of Artificial Sequence: Synthetic oligonucleotide
gaugacaugaagucauuag

SEQ ID NO: 1293015 - RNA, 19 nt, Artificial Sequence
  Description of Artificial Sequence: Synthetic oligonucleotide
aguauaagccuucugucuc

SEQ ID NO: 1293016 - RNA, 19 nt, Artificial Sequence
  Description of Artificial Sequence: Synthetic oligonucleotide
agguaaugugcauggaucc

SEQ ID NO: 1293017 - RNA, 19 nt, Artificial Sequence
  Description of Artificial Sequence: Synthetic oligonucleotide
uccaguauaagccuucugu

SEQ ID NO: 1293018 - RNA, 19 nt, Artificial Sequence
  Description of Artificial Sequence: Synthetic oligonucleotide
aauaauuaaucaauccaug

SEQ ID NO: 1293019 - RNA, 19 nt, Artificial Sequence
  Description of Artificial Sequence: Synthetic oligonucleotide
ucuccauuagguagaaagg

SEQ ID NO: 1293020 - RNA, 19 nt, Artificial Sequence
  Description of Artificial Sequence: Synthetic oligonucleotide
aucaacuuguacuuacugg

SEQ ID NO: 1293021 - RNA, 19 nt, Artificial Sequence
  Description of Artificial Sequence: Synthetic oligonucleotide
uaacaaaaccaucuugcag

SEQ ID NO: 1293022 - RNA, 19 nt, Artificial Sequence
  Description of Artificial Sequence: Synthetic oligonucleotide
ucuuaaauucagaaugcca

SEQ ID NO: 1293023 - RNA, 19 nt, Artificial Sequence
  Description of Artificial Sequence: Synthetic oligonucleotide
uauaagucuucaucaaugc

SEQ ID NO: 1293024 - RNA, 19 nt, Artificial Sequence
  Description of Artificial Sequence: Synthetic oligonucleotide
uuagguagaaaggaggcag

SEQ ID NO: 1293025 - RNA, 19 nt, Artificial Sequence
  Description of Artificial Sequence: Synthetic oligonucleotide
cauggaauagucuauagga

SEQ ID NO: 1293026 - RNA, 19 nt, Artificial Sequence
  Description of Artificial Sequence: Synthetic oligonucleotide
cacagaauaaggauuuggg

SEQ ID NO: 1293027 - RNA, 19 nt, Artificial Sequence
  Description of Artificial Sequence: Synthetic oligonucleotide
aaacucuaguaauuaaccu

SEQ ID NO: 1293028 - RNA, 19 nt, Artificial Sequence
  Description of Artificial Sequence: Synthetic oligonucleotide
auaggucaccaacucaugc

SEQ ID NO: 1293029 - RNA, 19 nt, Artificial Sequence
  Description of Artificial Sequence: Synthetic oligonucleotide
uccugaaucuguaaguccc

SEQ ID NO: 1293030 - RNA, 19 nt, Artificial Sequence
  Description of Artificial Sequence: Synthetic oligonucleotide
cuaaacucuaguaauuaac

SEQ ID NO: 1293031 - RNA, 19 nt, Artificial Sequence
  Description of Artificial Sequence: Synthetic oligonucleotide
agucccuucaaaaugggcc

SEQ ID NO: 1293032 - RNA, 19 nt, Artificial Sequence
  Description of Artificial Sequence: Synthetic oligonucleotide
cuugucauuuaguucagcc

SEQ ID NO: 1293033 - RNA, 19 nt, Artificial Sequence
  Description of Artificial Sequence: Synthetic oligonucleotide
ugucaugucaguuuggaau

SEQ ID NO: 1293034 - RNA, 19 nt, Artificial Sequence
  Description of Artificial Sequence: Synthetic oligonucleotide
gagacuuaaguugaagagg

SEQ ID NO: 1293035 - RNA, 19 nt, Artificial Sequence
  Description of Artificial Sequence: Synthetic oligonucleotide
auuaaucaauccauggugg

SEQ ID NO: 1293036 - RNA, 19 nt, Artificial Sequence
  Description of Artificial Sequence: Synthetic oligonucleotide
uuugcaacaccgacuacag

SEQ ID NO: 1293037 - RNA, 19 nt, Artificial Sequence
  Description of Artificial Sequence: Synthetic oligonucleotide
aacagcugcgucuacccuc

SEQ ID NO: 1293038 - RNA, 19 nt, Artificial Sequence
  Description of Artificial Sequence: Synthetic oligonucleotide
auaagucuucaucaaugcg

SEQ ID NO: 1293039 - RNA, 19 nt, Artificial Sequence
  Description of Artificial Sequence: Synthetic oligonucleotide
ucugcguuccgguaggagg

SEQ ID NO: 1293040 - RNA, 19 nt, Artificial Sequence
  Description of Artificial Sequence: Synthetic oligonucleotide
auuaaaugaagucccuuca

SEQ ID NO: 1293041 - RNA, 19 nt, Artificial Sequence
  Description of Artificial Sequence: Synthetic oligonucleotide
uuauguuuucgauacuucu

SEQ ID NO: 1293042 - RNA, 19 nt, Artificial Sequence
  Description of Artificial Sequence: Synthetic oligonucleotide
uaggucaucucccucugcg

SEQ ID NO: 1293043 - RNA, 19 nt, Artificial Sequence
  Description of Artificial Sequence: Synthetic oligonucleotide
ucuagcucggcuuuuagaa

SEQ ID NO: 1293044 - RNA, 19 nt, Artificial Sequence
  Description of Artificial Sequence: Synthetic oligonucleotide
uuuuccgugguucucuuca

SEQ ID NO: 1293045 - RNA, 19 nt, Artificial Sequence
  Description of Artificial Sequence: Synthetic oligonucleotide
gaaucuguaagucccuuug

SEQ ID NO: 1293046 - RNA, 19 nt, Artificial Sequence
  Description of Artificial Sequence: Synthetic oligonucleotide
uguccuguauucuuguuug

SEQ ID NO: 1293047 - RNA, 19 nt, Artificial Sequence
  Description of Artificial Sequence: Synthetic oligonucleotide
uguacuucgcucagaacug

SEQ ID NO: 1293048 - RNA, 19 nt, Artificial Sequence
  Description of Artificial Sequence: Synthetic oligonucleotide
uggaacaaauuccuuucag

SEQ ID NO: 1293049 - RNA, 19 nt, Artificial Sequence
  Description of Artificial Sequence: Synthetic oligonucleotide
ucucccuacaaacuccucc

SEQ ID NO: 1293050 - RNA, 19 nt, Artificial Sequence
  Description of Artificial Sequence: Synthetic oligonucleotide
uaucuuguguagcaggacu

SEQ ID NO: 1293051 - RNA, 19 nt, Artificial Sequence
  Description of Artificial Sequence: Synthetic oligonucleotide
aucaaugcguucuuguucu

SEQ ID NO: 1293052 - RNA, 19 nt, Artificial Sequence
  Description of Artificial Sequence: Synthetic oligonucleotide
auuauaguaacaaaaccau

SEQ ID NO: 1293053 - RNA, 19 nt, Artificial Sequence
  Description of Artificial Sequence: Synthetic oligonucleotide
acagaauaaggauuugggu

SEQ ID NO: 1293054 - RNA, 19 nt, Artificial Sequence
  Description of Artificial Sequence: Synthetic oligonucleotide
ucuuuggcauguuacgacc

SEQ ID NO: 1293055 - RNA, 19 nt, Artificial Sequence
  Description of Artificial Sequence: Synthetic oligonucleotide
ggauuauaguaacaaaacc

SEQ ID NO: 1293056 - RNA, 19 nt, Artificial Sequence
  Description of Artificial Sequence: Synthetic oligonucleotide
cauuucuuaacaauuaugu

SEQ ID NO: 1293057 - RNA, 19 nt, Artificial Sequence
  Description of Artificial Sequence: Synthetic oligonucleotide
ucuaguaauuaaccuuucu

SEQ ID NO: 1293058 - RNA, 19 nt, Artificial Sequence
  Description of Artificial Sequence: Synthetic oligonucleotide
gguacuauaggucaccaac

SEQ ID NO: 1293059 - RNA, 19 nt, Artificial Sequence
  Description of Artificial Sequence: Synthetic oligonucleotide
uuaaaugaagucccuucaa

SEQ ID NO: 1293060 - RNA, 19 nt, Artificial Sequence
  Description of Artificial Sequence: Synthetic oligonucleotide
aaguugaagaggugauuug

SEQ ID NO: 1293061 - RNA, 19 nt, Artificial Sequence
  Description of Artificial Sequence: Synthetic oligonucleotide
gguauggugguguacuucg

SEQ ID NO: 1293062 - RNA, 19 nt, Artificial Sequence
  Description of Artificial Sequence: Synthetic oligonucleotide
uggauuacugaggaccugg

SEQ ID NO: 1293063 - RNA, 19 nt, Artificial Sequence
  Description of Artificial Sequence: Synthetic oligonucleotide
acagauggaagcaaauuag

SEQ ID NO: 1293064 - RNA, 19 nt, Artificial Sequence
  Description of Artificial Sequence: Synthetic oligonucleotide
aguacuuccaggugugucu

SEQ ID NO: 1293065 - RNA, 19 nt, Artificial Sequence
  Description of Artificial Sequence: Synthetic oligonucleotide
cauguuacgaccuccgcuc

SEQ ID NO: 1293066 - RNA, 19 nt, Artificial Sequence
  Description of Artificial Sequence: Synthetic oligonucleotide
gacuacagccacaaaaggc

SEQ ID NO: 1293067 - RNA, 19 nt, Artificial Sequence
  Description of Artificial Sequence: Synthetic oligonucleotide
uguugaaagggaucagcug

SEQ ID NO: 1293068 - RNA, 19 nt, Artificial Sequence
  Description of Artificial Sequence: Synthetic oligonucleotide
uccggaacagagcaucucc

SEQ ID NO: 1293069 - RNA, 19 nt, Artificial Sequence
  Description of Artificial Sequence: Synthetic oligonucleotide
acuuaaguugaagagguga

SEQ ID NO: 1293070 - RNA, 19 nt, Artificial Sequence
  Description of Artificial Sequence: Synthetic oligonucleotide
gaagaggugauuuguuuuc

SEQ ID NO: 1293071 - RNA, 19 nt, Artificial Sequence
  Description of Artificial Sequence: Synthetic oligonucleotide
cagguaauucccauuaguc

SEQ ID NO: 1293072 - RNA, 19 nt, Artificial Sequence
  Description of Artificial Sequence: Synthetic oligonucleotide
uuaaucaauccaugguggu

SEQ ID NO: 1293073 - RNA, 19 nt, Artificial Sequence
  Description of Artificial Sequence: Synthetic oligonucleotide
uucaucaaugcguucuugu

SEQ ID NO: 1293074 - RNA, 19 nt, Artificial Sequence
  Description of Artificial Sequence: Synthetic oligonucleotide
uccuuucagccaaaacacg

SEQ ID NO: 1293075 - RNA, 19 nt, Artificial Sequence
  Description of Artificial Sequence: Synthetic oligonucleotide
gacaugaagucauuagcca

SEQ ID NO: 1293076 - RNA, 19 nt, Artificial Sequence
  Description of Artificial Sequence: Synthetic oligonucleotide
uugauuugcucauauccaa

SEQ ID NO: 1293077 - RNA, 19 nt, Artificial Sequence
  Description of Artificial Sequence: Synthetic oligonucleotide
caauuaugucuccauuagg

SEQ ID NO: 1293078 - RNA, 19 nt, Artificial Sequence
  Description of Artificial Sequence: Synthetic oligonucleotide
aagcaaauuagggguauug

SEQ ID NO: 1293079 - RNA, 19 nt, Artificial Sequence
  Description of Artificial Sequence: Synthetic oligonucleotide
ugcguucuuguucuuccgg

SEQ ID NO: 1293080 - RNA, 19 nt, Artificial Sequence
  Description of Artificial Sequence: Synthetic oligonucleotide
uuucagccaaaacacguuc

SEQ ID NO: 1293081 - RNA, 19 nt, Artificial Sequence
  Description of Artificial Sequence: Synthetic oligonucleotide
cagguauaagucuucauca

SEQ ID NO: 1293082 - RNA, 19 nt, Artificial Sequence
  Description of Artificial Sequence: Synthetic oligonucleotide
ggucuuagcagguaauucc

SEQ ID NO: 1293083 - RNA, 19 nt, Artificial Sequence
  Description of Artificial Sequence: Synthetic oligonucleotide
gaauagucuauaggagacg

SEQ ID NO: 1293084 - RNA, 19 nt, Artificial Sequence
  Description of Artificial Sequence: Synthetic oligonucleotide
aauccaugguggucaauga

SEQ ID NO: 1293085 - RNA, 19 nt, Artificial Sequence
  Description of Artificial Sequence: Synthetic oligonucleotide
accgacuacagccacaaaa

SEQ ID NO: 1293086 - RNA, 19 nt, Artificial Sequence
  Description of Artificial Sequence: Synthetic oligonucleotide
acgaccuccgcucuccugg

SEQ ID NO: 1293087 - RNA, 19 nt, Artificial Sequence
  Description of Artificial Sequence: Synthetic oligonucleotide
agcaccaugccaucaaaca

SEQ ID NO: 1293088 - RNA, 19 nt, Artificial Sequence
  Description of Artificial Sequence: Synthetic oligonucleotide
uacuauaggucaccaacuc

SEQ ID NO: 1293089 - RNA, 19 nt, Artificial Sequence
  Description of Artificial Sequence: Synthetic oligonucleotide
ucuucucuaacagauggaa

SEQ ID NO: 1293090 - RNA, 19 nt, Artificial Sequence
  Description of Artificial Sequence: Synthetic oligonucleotide
uaacuaaacucuaguaauu

SEQ ID NO: 1293091 - RNA, 19 nt, Artificial Sequence
  Description of Artificial Sequence: Synthetic oligonucleotide
cagguaaugugcauggauc

SEQ ID NO: 1293092 - RNA, 19 nt, Artificial Sequence
  Description of Artificial Sequence: Synthetic oligonucleotide
uccuguaaggacuggacau

SEQ ID NO: 1293093 - RNA, 19 nt, Artificial Sequence
  Description of Artificial Sequence: Synthetic oligonucleotide
ugcucauauccaauugucu

SEQ ID NO: 1293094 - RNA, 19 nt, Artificial Sequence
  Description of Artificial Sequence: Synthetic oligonucleotide
uugcucauauccaauuguc

SEQ ID NO: 1293095 - RNA, 19 nt, Artificial Sequence
  Description of Artificial Sequence: Synthetic oligonucleotide
ugaagaggugauuuguuuu

SEQ ID NO: 1293096 - RNA, 19 nt, Artificial Sequence
  Description of Artificial Sequence: Synthetic oligonucleotide
aguccucacaagcugauaa

SEQ ID NO: 1293097 - RNA, 19 nt, Artificial Sequence
  Description of Artificial Sequence: Synthetic oligonucleotide
uugaaagggaucagcugga

SEQ ID NO: 1293098 - RNA, 19 nt, Artificial Sequence
  Description of Artificial Sequence: Synthetic oligonucleotide
uggcauguuacgaccuccg

SEQ ID NO: 1293099 - RNA, 19 nt, Artificial Sequence
  Description of Artificial Sequence: Synthetic oligonucleotide
aagucccuucaaaaugggc

SEQ ID NO: 1293100 - RNA, 19 nt, Artificial Sequence
  Description of Artificial Sequence: Synthetic oligonucleotide
cauuaguccucacaagcug

SEQ ID NO: 1293101 - RNA, 19 nt, Artificial Sequence
  Description of Artificial Sequence: Synthetic oligonucleotide
uauaggucaccaacucaug

SEQ ID NO: 1293102 - RNA, 19 nt, Artificial Sequence
  Description of Artificial Sequence: Synthetic oligonucleotide
acuauaggucaccaacuca

SEQ ID NO: 1293103 - RNA, 19 nt, Artificial Sequence
  Description of Artificial Sequence: Synthetic oligonucleotide
cucccuacaaacuccuccc

SEQ ID NO: 1293104 - RNA, 19 nt, Artificial Sequence
  Description of Artificial Sequence: Synthetic oligonucleotide
ugucaguuuggaaucuccu

SEQ ID NO: 1293105 - RNA, 19 nt, Artificial Sequence
  Description of Artificial Sequence: Synthetic oligonucleotide
uucgauacuucuguuagau

SEQ ID NO: 1293106 - RNA, 19 nt, Artificial Sequence
  Description of Artificial Sequence: Synthetic oligonucleotide
ucacaagcugauaacuaaa

SEQ ID NO: 1293107 - RNA, 19 nt, Artificial Sequence
  Description of Artificial Sequence: Synthetic oligonucleotide
uaucuuuggcauguuacga

SEQ ID NO: 1293108 - RNA, 19 nt, Artificial Sequence
  Description of Artificial Sequence: Synthetic oligonucleotide
uuuggguuccaugauucug

SEQ ID NO: 1293109 - RNA, 19 nt, Artificial Sequence
  Description of Artificial Sequence: Synthetic oligonucleotide
agccaaaacacguuccagu

SEQ ID NO: 1293110 - RNA, 19 nt, Artificial Sequence
  Description of Artificial Sequence: Synthetic oligonucleotide
acaugaagucauuagccaa

SEQ ID NO: 1293111 - RNA, 19 nt, Artificial Sequence
  Description of Artificial Sequence: Synthetic oligonucleotide
ucucuaacagauggaagca

SEQ ID NO: 1293112 - RNA, 19 nt, Artificial Sequence
  Description of Artificial Sequence: Synthetic oligonucleotide
acauuucuuaacaauuaug

SEQ ID NO: 1293113 - RNA, 19 nt, Artificial Sequence
  Description of Artificial Sequence: Synthetic oligonucleotide
uuguacuuacuggaaaacu

SEQ ID NO: 1293114 - RNA, 19 nt, Artificial Sequence
  Description of Artificial Sequence: Synthetic oligonucleotide
uacuuacuggaaaacugaa

SEQ ID NO: 1293115 - RNA, 19 nt, Artificial Sequence
  Description of Artificial Sequence: Synthetic oligonucleotide
guagcaggacucuuuguug

SEQ ID NO: 1293116 - RNA, 19 nt, Artificial Sequence
  Description of Artificial Sequence: Synthetic oligonucleotide
auaggagacggugucaugu

SEQ ID NO: 1293117 - RNA, 19 nt, Artificial Sequence
  Description of Artificial Sequence: Synthetic oligonucleotide
uuagggguauugauuugcu

SEQ ID NO: 1293118 - RNA, 19 nt, Artificial Sequence
  Description of Artificial Sequence: Synthetic oligonucleotide
caucaaugcguucuuguuc

SEQ ID NO: 1293119 - RNA, 19 nt, Artificial Sequence
  Description of Artificial Sequence: Synthetic oligonucleotide
gauuacugaggaccuggug

SEQ ID NO: 1293120 - RNA, 19 nt, Artificial Sequence
  Description of Artificial Sequence: Synthetic oligonucleotide
gaaagggaucagcuggaug

SEQ ID NO: 1293121 - RNA, 19 nt, Artificial Sequence
  Description of Artificial Sequence: Synthetic oligonucleotide
aagagguauggugguguac

SEQ ID NO: 1293122 - RNA, 19 nt, Artificial Sequence
  Description of Artificial Sequence: Synthetic oligonucleotide
aacagagcaucuccuguau

SEQ ID NO: 1293123 - RNA, 19 nt, Artificial Sequence
  Description of Artificial Sequence: Synthetic oligonucleotide
ugcuggaacaaauuccuuu

SEQ ID NO: 1293124 - RNA, 19 nt, Artificial Sequence
  Description of Artificial Sequence: Synthetic oligonucleotide
aagcaccaugccaucaaac

SEQ ID NO: 1293125 - RNA, 19 nt, Artificial Sequence
  Description of Artificial Sequence: Synthetic oligonucleotide
aguugaagaggugauuugu

SEQ ID NO: 1293126 - RNA, 19 nt, Artificial Sequence
  Description of Artificial Sequence: Synthetic oligonucleotide
ucuuaacaauuaugucucc

SEQ ID NO: 1293127 - RNA, 19 nt, Artificial Sequence
  Description of Artificial Sequence: Synthetic oligonucleotide
uucgcucagaacuggauuu

SEQ ID NO: 1293128 - RNA, 19 nt, Artificial Sequence
  Description of Artificial Sequence: Synthetic oligonucleotide
guauaagccuucugucucc

SEQ ID NO: 1293129 - RNA, 19 nt, Artificial Sequence
  Description of Artificial Sequence: Synthetic oligonucleotide
uagcucggcuuuuagaauc

SEQ ID NO: 1293130 - RNA, 19 nt, Artificial Sequence
  Description of Artificial Sequence: Synthetic oligonucleotide
agagguauggugguguacu

SEQ ID NO: 1293131 - RNA, 19 nt, Artificial Sequence
  Description of Artificial Sequence: Synthetic oligonucleotide
acggugucaugucaguuug

SEQ ID NO: 1293132 - RNA, 19 nt, Artificial Sequence
  Description of Artificial Sequence: Synthetic oligonucleotide
ugauuugcucauauccaau

SEQ ID NO: 1293133 - RNA, 19 nt, Artificial Sequence
  Description of Artificial Sequence: Synthetic oligonucleotide
ugguguacuucgcucagaa

SEQ ID NO: 1293134 - RNA, 19 nt, Artificial Sequence
  Description of Artificial Sequence: Synthetic oligonucleotide
agccauaucuuguguagca

SEQ ID NO: 1293135 - RNA, 19 nt, Artificial Sequence
  Description of Artificial Sequence: Synthetic oligonucleotide
auaucuuguguagcaggac

SEQ ID NO: 1293136 - RNA, 19 nt, Artificial Sequence
  Description of Artificial Sequence: Synthetic oligonucleotide
ucuacccuccuguaaggac

SEQ ID NO: 1293137 - RNA, 19 nt, Artificial Sequence
  Description of Artificial Sequence: Synthetic oligonucleotide
ucccuguugaaagggauca

SEQ ID NO: 1293138 - RNA, 19 nt, Artificial Sequence
  Description of Artificial Sequence: Synthetic oligonucleotide
cuacagccacaaaaggccc

SEQ ID NO: 1293139 - RNA, 19 nt, Artificial Sequence
  Description of Artificial Sequence: Synthetic oligonucleotide
gaauaaggauuuggguucc

SEQ ID NO: 1293140 - RNA, 19 nt, Artificial Sequence
  Description of Artificial Sequence: Synthetic oligonucleotide
agcuccugaaucuguaagu

SEQ ID NO: 1293141 - RNA, 19 nt, Artificial Sequence
  Description of Artificial Sequence: Synthetic oligonucleotide
cugcguuccgguaggaggc

SEQ ID NO: 1293142 - RNA, 19 nt, Artificial Sequence
  Description of Artificial Sequence: Synthetic oligonucleotide
aaucuccuucguuucucca

SEQ ID NO: 1293143 - RNA, 19 nt, Artificial Sequence
  Description of Artificial Sequence: Synthetic oligonucleotide
ucuuccggaacagagcauc

SEQ ID NO: 1293144 - RNA, 19 nt, Artificial Sequence
  Description of Artificial Sequence: Synthetic oligonucleotide
cuguaaggacuggacaugg

SEQ ID NO: 1293145 - RNA, 19 nt, Artificial Sequence
  Description of Artificial Sequence: Synthetic oligonucleotide
gggauuauaguaacaaaac

SEQ ID NO: 1293146 - RNA, 19 nt, Artificial Sequence
  Description of Artificial Sequence: Synthetic oligonucleotide
uucuagcucggcuuuuaga

SEQ ID NO: 1293147 - RNA, 19 nt, Artificial Sequence
  Description of Artificial Sequence: Synthetic oligonucleotide
uccucacaagcugauaacu

SEQ ID NO: 1293148 - RNA, 19 nt, Artificial Sequence
  Description of Artificial Sequence: Synthetic oligonucleotide
ugugcuucuugcuccagua

SEQ ID NO: 1293149 - RNA, 19 nt, Artificial Sequence
  Description of Artificial Sequence: Synthetic oligonucleotide
uggcgauaacccaugugcu

SEQ ID NO: 1293150 - RNA, 19 nt, Artificial Sequence
  Description of Artificial Sequence: Synthetic oligonucleotide
uuucgauacuucuguuaga

SEQ ID NO: 1293151 - RNA, 19 nt, Artificial Sequence
  Description of Artificial Sequence: Synthetic oligonucleotide
ucaucaaugcguucuuguu

SEQ ID NO: 1293152 - RNA, 19 nt, Artificial Sequence
  Description of Artificial Sequence: Synthetic oligonucleotide
uucagccauaucuugugua

SEQ ID NO: 1293153 - RNA, 19 nt, Artificial Sequence
  Description of Artificial Sequence: Synthetic oligonucleotide
guaaggacuggacauggaa

SEQ ID NO: 1293154 - RNA, 19 nt, Artificial Sequence
  Description of Artificial Sequence: Synthetic oligonucleotide
uguaaggacuggacaugga

SEQ ID NO: 1293155 - RNA, 19 nt, Artificial Sequence
  Description of Artificial Sequence: Synthetic oligonucleotide
ugguaagagguaugguggu

SEQ ID NO: 1293156 - RNA, 19 nt, Artificial Sequence
  Description of Artificial Sequence: Synthetic oligonucleotide
uuuggcauguuacgaccuc

SEQ ID NO: 1293157 - RNA, 19 nt, Artificial Sequence
  Description of Artificial Sequence: Synthetic oligonucleotide
uccgguaggaggccugggc

SEQ ID NO: 1293158 - RNA, 19 nt, Artificial Sequence
  Description of Artificial Sequence: Synthetic oligonucleotide
agcaaauuagggguauuga

SEQ ID NO: 1293159 - RNA, 19 nt, Artificial Sequence
  Description of Artificial Sequence: Synthetic oligonucleotide
guacuuacuggaaaacuga

SEQ ID NO: 1293160 - RNA, 19 nt, Artificial Sequence
  Description of Artificial Sequence: Synthetic oligonucleotide
gucuauaggagacgguguc

SEQ ID NO: 1293161 - RNA, 19 nt, Artificial Sequence
  Description of Artificial Sequence: Synthetic oligonucleotide
uuagccuugcucagguaua

SEQ ID NO: 1293162 - RNA, 19 nt, Artificial Sequence
  Description of Artificial Sequence: Synthetic oligonucleotide
ccauaucuuguguagcagg

SEQ ID NO: 1293163 - RNA, 19 nt, Artificial Sequence
  Description of Artificial Sequence: Synthetic oligonucleotide
uccuguauucuuguuugcu

SEQ ID NO: 1293164 - RNA, 19 nt, Artificial Sequence
  Description of Artificial Sequence: Synthetic oligonucleotide
ccgacuacagccacaaaag

SEQ ID NO: 1293165 - RNA, 19 nt, Artificial Sequence
  Description of Artificial Sequence: Synthetic oligonucleotide
augguggucaaugaauuaa

SEQ ID NO: 1293166 - RNA, 19 nt, Artificial Sequence
  Description of Artificial Sequence: Synthetic oligonucleotide
auuaguccucacaagcuga

SEQ ID NO: 1293167 - RNA, 19 nt, Artificial Sequence
  Description of Artificial Sequence: Synthetic oligonucleotide
gaaagcaccaugccaucaa

SEQ ID NO: 1293168 - RNA, 19 nt, Artificial Sequence
  Description of Artificial Sequence: Synthetic oligonucleotide
uauaggagacggugucaug

SEQ ID NO: 1293169 - RNA, 19 nt, Artificial Sequence
  Description of Artificial Sequence: Synthetic oligonucleotide
agaauuaaaugaagucccu

SEQ ID NO: 1293170 - RNA, 19 nt, Artificial Sequence
  Description of Artificial Sequence: Synthetic oligonucleotide
guuuucgauacuucuguua

SEQ ID NO: 1293171 - RNA, 19 nt, Artificial Sequence
  Description of Artificial Sequence: Synthetic oligonucleotide
ccuucguuucuccacaggc

SEQ ID NO: 1293172 - RNA, 19 nt, Artificial Sequence
  Description of Artificial Sequence: Synthetic oligonucleotide
augcguucuuguucuuccg

SEQ ID NO: 1293173 - RNA, 19 nt, Artificial Sequence
  Description of Artificial Sequence: Synthetic oligonucleotide
gguggucaaugaauuaagg

SEQ ID NO: 1293174 - RNA, 19 nt, Artificial Sequence
  Description of Artificial Sequence: Synthetic oligonucleotide
uuguguagcaggacucuuu

SEQ ID NO: 1293175 - RNA, 19 nt, Artificial Sequence
  Description of Artificial Sequence: Synthetic oligonucleotide
uuaaguugaagaggugauu

SEQ ID NO: 1293176 - RNA, 19 nt, Artificial Sequence
  Description of Artificial Sequence: Synthetic oligonucleotide
auucagaaugccaaugguu

SEQ ID NO: 1293177 - RNA, 19 nt, Artificial Sequence
  Description of Artificial Sequence: Synthetic oligonucleotide
guuacgaccuccgcucucc

SEQ ID NO: 1293178 - RNA, 19 nt, Artificial Sequence
  Description of Artificial Sequence: Synthetic oligonucleotide
gaacuggauuuaucauggc

SEQ ID NO: 1293179 - RNA, 19 nt, Artificial Sequence
  Description of Artificial Sequence: Synthetic oligonucleotide
ggggauuauaguaacaaaa

SEQ ID NO: 1293180 - RNA, 19 nt, Artificial Sequence
  Description of Artificial Sequence: Synthetic oligonucleotide
ugccaaugguucuucuccu

SEQ ID NO: 1293181 - RNA, 19 nt, Artificial Sequence
  Description of Artificial Sequence: Synthetic oligonucleotide
uacuucgcucagaacugga

SEQ ID NO: 1293182 - RNA, 19 nt, Artificial Sequence
  Description of Artificial Sequence: Synthetic oligonucleotide
agguauggugguguacuuc

SEQ ID NO: 1293183 - RNA, 19 nt, Artificial Sequence
  Description of Artificial Sequence: Synthetic oligonucleotide
ugcuccaguauaagccuuc

SEQ ID NO: 1293184 - RNA, 19 nt, Artificial Sequence
  Description of Artificial Sequence: Synthetic oligonucleotide
cuuggcgauaacccaugug

SEQ ID NO: 1293185 - RNA, 19 nt, Artificial Sequence
  Description of Artificial Sequence: Synthetic oligonucleotide
acuggcugcggcuuucuaa

SEQ ID NO: 1293186 - RNA, 19 nt, Artificial Sequence
  Description of Artificial Sequence: Synthetic oligonucleotide
ccuuucuaggucaucuccc

SEQ ID NO: 1293187 - RNA, 19 nt, Artificial Sequence
  Description of Artificial Sequence: Synthetic oligonucleotide
uugcuuagccuugcucagg

SEQ ID NO: 1293188 - RNA, 19 nt, Artificial Sequence
  Description of Artificial Sequence: Synthetic oligonucleotide
aggacucuuuguuggauua

SEQ ID NO: 1293189 - RNA, 19 nt, Artificial Sequence
  Description of Artificial Sequence: Synthetic oligonucleotide
gcaucugaucuucuaauuc

SEQ ID NO: 1293190 - RNA, 19 nt, Artificial Sequence
  Description of Artificial Sequence: Synthetic oligonucleotide
cugauaacuaaacucuagu

SEQ ID NO: 1293191 - RNA, 19 nt, Artificial Sequence
  Description of Artificial Sequence: Synthetic oligonucleotide
cuucuggguauucugguaa

SEQ ID NO: 1293192 - RNA, 19 nt, Artificial Sequence
  Description of Artificial Sequence: Synthetic oligonucleotide
uggcaggggccacagaaua

SEQ ID NO: 1293193 - RNA, 19 nt, Artificial Sequence
  Description of Artificial Sequence: Synthetic oligonucleotide
aggauuuggguuccaugau

SEQ ID NO: 1293194 - RNA, 19 nt, Artificial Sequence
  Description of Artificial Sequence: Synthetic oligonucleotide
uacuucuguuagauucuuc

SEQ ID NO: 1293195 - RNA, 19 nt, Artificial Sequence
  Description of Artificial Sequence: Synthetic oligonucleotide
ugcgucuacccuccuguaa

SEQ ID NO: 1293196 - RNA, 19 nt, Artificial Sequence
  Description of Artificial Sequence: Synthetic oligonucleotide
caugauucugcugccuuuc

SEQ ID NO: 1293197 - RNA, 19 nt, Artificial Sequence
  Description of Artificial Sequence: Synthetic oligonucleotide
gcgucuacccuccuguaag

SEQ ID NO: 1293198 - RNA, 19 nt, Artificial Sequence
  Description of Artificial Sequence: Synthetic oligonucleotide
guauuuuggauggggauua

SEQ ID NO: 1293199 - RNA, 19 nt, Artificial Sequence
  Description of Artificial Sequence: Synthetic oligonucleotide
cuuaaguugaagaggugau

SEQ ID NO: 1293200 - RNA, 19 nt, Artificial Sequence
  Description of Artificial Sequence: Synthetic oligonucleotide
uaagagguaugguggugua

SEQ ID NO: 1293201 - RNA, 19 nt, Artificial Sequence
  Description of Artificial Sequence: Synthetic oligonucleotide
ucaugucaguuuggaaucu

SEQ ID NO: 1293202 - RNA, 19 nt, Artificial Sequence
  Description of Artificial Sequence: Synthetic oligonucleotide
aaauuccuuucagccaaaa

SEQ ID NO: 1293203 - RNA, 19 nt, Artificial Sequence
  Description of Artificial Sequence: Synthetic oligonucleotide
aauaaggauuuggguucca

SEQ ID NO: 1293204 - RNA, 19 nt, Artificial Sequence
  Description of Artificial Sequence: Synthetic oligonucleotide
ggcagaaagcaccaugcca

SEQ ID NO: 1293205 - RNA, 19 nt, Artificial Sequence
  Description of Artificial Sequence: Synthetic oligonucleotide
ccaguauaagccuucuguc

SEQ ID NO: 1293206 - RNA, 19 nt, Artificial Sequence
  Description of Artificial Sequence: Synthetic oligonucleotide
agucuauaggagacggugu

SEQ ID NO: 1293207 - RNA, 19 nt, Artificial Sequence
  Description of Artificial Sequence: Synthetic oligonucleotide
uaauucccauuaguccuca

SEQ ID NO: 1293208 - RNA, 19 nt, Artificial Sequence
  Description of Artificial Sequence: Synthetic oligonucleotide
gauggggauuauaguaaca

SEQ ID NO: 1293209 - RNA, 19 nt, Artificial Sequence
  Description of Artificial Sequence: Synthetic oligonucleotide
guccucacaagcugauaac

SEQ ID NO: 1293210 - RNA, 19 nt, Artificial Sequence
  Description of Artificial Sequence: Synthetic oligonucleotide
agaaagcaccaugccauca

SEQ ID NO: 1293211 - RNA, 19 nt, Artificial Sequence
  Description of Artificial Sequence: Synthetic oligonucleotide
cuucuugcuccaguauaag

SEQ ID NO: 1293212 - RNA, 19 nt, Artificial Sequence
  Description of Artificial Sequence: Synthetic oligonucleotide
cccaugugcuucuugcucc

SEQ ID NO: 1293213 - RNA, 19 nt, Artificial Sequence
  Description of Artificial Sequence: Synthetic oligonucleotide
uggguacuauaggucacca

SEQ ID NO: 1293214 - RNA, 19 nt, Artificial Sequence
  Description of Artificial Sequence: Synthetic oligonucleotide
cuggugcuugucacuuucc

SEQ ID NO: 1293215 - RNA, 19 nt, Artificial Sequence
  Description of Artificial Sequence: Synthetic oligonucleotide
uguuacgaccuccgcucuc

SEQ ID NO: 1293216 - RNA, 19 nt, Artificial Sequence
  Description of Artificial Sequence: Synthetic oligonucleotide
ugcggcuuucuaagaaaua

SEQ ID NO: 1293217 - RNA, 19 nt, Artificial Sequence
  Description of Artificial Sequence: Synthetic oligonucleotide
caguauaagccuucugucu

SEQ ID NO: 1293218 - RNA, 19 nt, Artificial Sequence
  Description of Artificial Sequence: Synthetic oligonucleotide
uuggauuacugaggaccug

SEQ ID NO: 1293219 - RNA, 19 nt, Artificial Sequence
  Description of Artificial Sequence: Synthetic oligonucleotide
aggucaucucccucugcgu

SEQ ID NO: 1293220 - RNA, 19 nt, Artificial Sequence
  Description of Artificial Sequence: Synthetic oligonucleotide
cuggauuuaucauggcugu

SEQ ID NO: 1293221 - RNA, 19 nt, Artificial Sequence
  Description of Artificial Sequence: Synthetic oligonucleotide
guccuguauucuuguuugc

SEQ ID NO: 1293222 - RNA, 19 nt, Artificial Sequence
  Description of Artificial Sequence: Synthetic oligonucleotide
cagaaagcaccaugccauc

SEQ ID NO: 1293223 - RNA, 19 nt, Artificial Sequence
  Description of Artificial Sequence: Synthetic oligonucleotide
caacuuguacuuacuggaa

SEQ ID NO: 1293224 - RNA, 19 nt, Artificial Sequence
  Description of Artificial Sequence: Synthetic oligonucleotide
cuuagccuugcucagguau

SEQ ID NO: 1293225 - RNA, 19 nt, Artificial Sequence
  Description of Artificial Sequence: Synthetic oligonucleotide
auaaggauuuggguuccau

SEQ ID NO: 1293226 - RNA, 19 nt, Artificial Sequence
  Description of Artificial Sequence: Synthetic oligonucleotide
agggauuccuggucuuggu

SEQ ID NO: 1293227 - RNA, 19 nt, Artificial Sequence
  Description of Artificial Sequence: Synthetic oligonucleotide
ggguauucugguaagaggu

SEQ ID NO: 1293228 - RNA, 19 nt, Artificial Sequence
  Description of Artificial Sequence: Synthetic oligonucleotide
ggugguguacuucgcucag

SEQ ID NO: 1293229 - RNA, 19 nt, Artificial Sequence
  Description of Artificial Sequence: Synthetic oligonucleotide
cuaggucaucucccucugc

SEQ ID NO: 1293230 - RNA, 19 nt, Artificial Sequence
  Description of Artificial Sequence: Synthetic oligonucleotide
caacucaugcugagcuuuc

SEQ ID NO: 1293231 - RNA, 19 nt, Artificial Sequence
  Description of Artificial Sequence: Synthetic oligonucleotide
uuccgugguucucuucaau

SEQ ID NO: 1293232 - RNA, 19 nt, Artificial Sequence
  Description of Artificial Sequence: Synthetic oligonucleotide
augggccuacauuucuuaa

SEQ ID NO: 1293233 - RNA, 19 nt, Artificial Sequence
  Description of Artificial Sequence: Synthetic oligonucleotide
guaagagguaugguggugu

SEQ ID NO: 1293234 - RNA, 19 nt, Artificial Sequence
  Description of Artificial Sequence: Synthetic oligonucleotide
ucgauacuucuguuagauu

SEQ ID NO: 1293235 - RNA, 19 nt, Artificial Sequence
  Description of Artificial Sequence: Synthetic oligonucleotide
guacuauaggucaccaacu

SEQ ID NO: 1293236 - RNA, 19 nt, Artificial Sequence
  Description of Artificial Sequence: Synthetic oligonucleotide
gggacccuggacaaagugc

SEQ ID NO: 1293237 - RNA, 19 nt, Artificial Sequence
  Description of Artificial Sequence: Synthetic oligonucleotide
gacucuuuguuggauuacu

SEQ ID NO: 1293238 - RNA, 19 nt, Artificial Sequence
  Description of Artificial Sequence: Synthetic oligonucleotide
agguagaaaggaggcagaa

SEQ ID NO: 1293239 - RNA, 19 nt, Artificial Sequence
  Description of Artificial Sequence: Synthetic oligonucleotide
cuaccaaucuuggcaucug

SEQ ID NO: 1293240 - RNA, 19 nt, Artificial Sequence
  Description of Artificial Sequence: Synthetic oligonucleotide
gacggugucaugucaguuu

SEQ ID NO: 1293241 - RNA, 19 nt, Artificial Sequence
  Description of Artificial Sequence: Synthetic oligonucleotide
auagucuauaggagacggu

SEQ ID NO: 1293242 - RNA, 19 nt, Artificial Sequence
  Description of Artificial Sequence: Synthetic oligonucleotide
aucaauccaugguggucaa

SEQ ID NO: 1293243 - RNA, 19 nt, Artificial Sequence
  Description of Artificial Sequence: Synthetic oligonucleotide
gcaaauuagggguauugau

SEQ ID NO: 1293244 - RNA, 19 nt, Artificial Sequence
  Description of Artificial Sequence: Synthetic oligonucleotide
ccuguucuguccuguauuc

SEQ ID NO: 1293245 - RNA, 19 nt, Artificial Sequence
  Description of Artificial Sequence: Synthetic oligonucleotide
cuuggcaucugaucuucua

SEQ ID NO: 1293246 - RNA, 19 nt, Artificial Sequence
  Description of Artificial Sequence: Synthetic oligonucleotide
gguucuuucuagcucggcu

SEQ ID NO: 1293247 - RNA, 19 nt, Artificial Sequence
  Description of Artificial Sequence: Synthetic oligonucleotide
agccacaaaaggcccuuua

SEQ ID NO: 1293248 - RNA, 19 nt, Artificial Sequence
  Description of Artificial Sequence: Synthetic oligonucleotide
gguaagagguaugguggug

SEQ ID NO: 1293249 - RNA, 19 nt, Artificial Sequence
  Description of Artificial Sequence: Synthetic oligonucleotide
accaaucuuggcaucugau

SEQ ID NO: 1293250 - RNA, 19 nt, Artificial Sequence
  Description of Artificial Sequence: Synthetic oligonucleotide
uuacgaccuccgcucuccu

SEQ ID NO: 1293251 - RNA, 19 nt, Artificial Sequence
  Description of Artificial Sequence: Synthetic oligonucleotide
ccuguauuuuggaugggga

SEQ ID NO: 1293252 - RNA, 19 nt, Artificial Sequence
  Description of Artificial Sequence: Synthetic oligonucleotide
gcggcuuucuaagaaauaa

SEQ ID NO: 1293253 - RNA, 19 nt, Artificial Sequence
  Description of Artificial Sequence: Synthetic oligonucleotide
gcgauaacccaugugcuuc

SEQ ID NO: 1293254 - RNA, 19 nt, Artificial Sequence
  Description of Artificial Sequence: Synthetic oligonucleotide
guauggugguguacuucgc

SEQ ID NO: 1293255 - RNA, 19 nt, Artificial Sequence
  Description of Artificial Sequence: Synthetic oligonucleotide
agcuuggcgauaacccaug

SEQ ID NO: 1293256 - RNA, 19 nt, Artificial Sequence
  Description of Artificial Sequence: Synthetic oligonucleotide
auuuuggauggggauuaua

SEQ ID NO: 1293257 - RNA, 19 nt, Artificial Sequence
  Description of Artificial Sequence: Synthetic oligonucleotide
cuuuggcauguuacgaccu

SEQ ID NO: 1293258 - RNA, 19 nt, Artificial Sequence
  Description of Artificial Sequence: Synthetic oligonucleotide
uuccggaacagagcaucuc

SEQ ID NO: 1293259 - RNA, 19 nt, Artificial Sequence
  Description of Artificial Sequence: Synthetic oligonucleotide
gcuccugaaucuguaaguc

SEQ ID NO: 1293260 - RNA, 19 nt, Artificial Sequence
  Description of Artificial Sequence: Synthetic oligonucleotide
cgacuacagccacaaaagg

SEQ ID NO: 1293261 - RNA, 19 nt, Artificial Sequence
  Description of Artificial Sequence: Synthetic oligonucleotide
uauuuuggauggggauuau

SEQ ID NO: 1293262 - RNA, 19 nt, Artificial Sequence
  Description of Artificial Sequence: Synthetic oligonucleotide
ggcauguuacgaccuccgc

SEQ ID NO: 1293263 - RNA, 19 nt, Artificial Sequence
  Description of Artificial Sequence: Synthetic oligonucleotide
ccgugguucucuucaauuc

SEQ ID NO: 1293264 - RNA, 19 nt, Artificial Sequence
  Description of Artificial Sequence: Synthetic oligonucleotide
ggcucaucacccaggauca

SEQ ID NO: 1293265 - RNA, 19 nt, Artificial Sequence
  Description of Artificial Sequence: Synthetic oligonucleotide
gcucauauccaauugucuu

SEQ ID NO: 1293266 - RNA, 19 nt, Artificial Sequence
  Description of Artificial Sequence: Synthetic oligonucleotide
cagagcaucuccuguauuu

SEQ ID NO: 1293267 - RNA, 19 nt, Artificial Sequence
  Description of Artificial Sequence: Synthetic oligonucleotide
gguaaugugcauggaucca

SEQ ID NO: 1293268 - RNA, 19 nt, Artificial Sequence
  Description of Artificial Sequence: Synthetic oligonucleotide
cuuucagccaaaacacguu

SEQ ID NO: 1293269 - RNA, 19 nt, Artificial Sequence
  Description of Artificial Sequence: Synthetic oligonucleotide
agcucggcuuuuagaaucu

SEQ ID NO: 1293270 - RNA, 19 nt, Artificial Sequence
  Description of Artificial Sequence: Synthetic oligonucleotide
acuucgcucagaacuggau

SEQ ID NO: 1293271 - RNA, 19 nt, Artificial Sequence
  Description of Artificial Sequence: Synthetic oligonucleotide
gggucuuagcagguaauuc

SEQ ID NO: 1293272 - RNA, 19 nt, Artificial Sequence
  Description of Artificial Sequence: Synthetic oligonucleotide
ugcguuccgguaggaggcc

SEQ ID NO: 1293273 - RNA, 19 nt, Artificial Sequence
  Description of Artificial Sequence: Synthetic oligonucleotide
gccaaugguucuucuccug

SEQ ID NO: 1293274 - RNA, 19 nt, Artificial Sequence
  Description of Artificial Sequence: Synthetic oligonucleotide
ucgcucagaacuggauuua

SEQ ID NO: 1293275 - RNA, 19 nt, Artificial Sequence
  Description of Artificial Sequence: Synthetic oligonucleotide
cucugcguuccgguaggag

SEQ ID NO: 1293276 - RNA, 19 nt, Artificial Sequence
  Description of Artificial Sequence: Synthetic oligonucleotide
uggauuuaucauggcuguu

SEQ ID NO: 1293277 - RNA, 19 nt, Artificial Sequence
  Description of Artificial Sequence: Synthetic oligonucleotide
ggucuugguccugggaccc

SEQ ID NO: 1293278 - RNA, 19 nt, Artificial Sequence
  Description of Artificial Sequence: Synthetic oligonucleotide
gcguucuuguucuuccgga

SEQ ID NO: 1293279 - RNA, 19 nt, Artificial Sequence
  Description of Artificial Sequence: Synthetic oligonucleotide
ccuguaaggacuggacaug

SEQ ID NO: 1293280 - RNA, 19 nt, Artificial Sequence
  Description of Artificial Sequence: Synthetic oligonucleotide
gcauguuacgaccuccgcu

SEQ ID NO: 1293281 - RNA, 19 nt, Artificial Sequence
  Description of Artificial Sequence: Synthetic oligonucleotide
cuguuagauucuucugcua

SEQ ID NO: 1293282 - RNA, 19 nt, Artificial Sequence
  Description of Artificial Sequence: Synthetic oligonucleotide
ucaaugcguucuuguucuu

SEQ ID NO: 1293283 - RNA, 19 nt, Artificial Sequence
  Description of Artificial Sequence: Synthetic oligonucleotide
ggcuuucuaagaaauaauu

SEQ ID NO: 1293284 - RNA, 19 nt, Artificial Sequence
  Description of Artificial Sequence: Synthetic oligonucleotide
cuauaggagacggugucau

SEQ ID NO: 1293285 - RNA, 19 nt, Artificial Sequence
  Description of Artificial Sequence: Synthetic oligonucleotide
gcugcggcuuucuaagaaa

SEQ ID NO: 1293286 - RNA, 19 nt, Artificial Sequence
  Description of Artificial Sequence: Synthetic oligonucleotide
gucuacccuccuguaagga

SEQ ID NO: 1293287 - RNA, 19 nt, Artificial Sequence
  Description of Artificial Sequence: Synthetic oligonucleotide
ggacccuggacaaagugcu

SEQ ID NO: 1293288 - RNA, 19 nt, Artificial Sequence
  Description of Artificial Sequence: Synthetic oligonucleotide
ggggccacagaauaaggau

SEQ ID NO: 1293289 - RNA, 19 nt, Artificial Sequence
  Description of Artificial Sequence: Synthetic oligonucleotide
agacggugucaugucaguu

SEQ ID NO: 1293290 - RNA, 19 nt, Artificial Sequence
  Description of Artificial Sequence: Synthetic oligonucleotide
gcugcgucuacccuccugu

SEQ ID NO: 1293291 - RNA, 19 nt, Artificial Sequence
  Description of Artificial Sequence: Synthetic oligonucleotide
cuucgcucagaacuggauu

SEQ ID NO: 1293292 - RNA, 19 nt, Artificial Sequence
  Description of Artificial Sequence: Synthetic oligonucleotide
cgucuacccuccuguaagg

SEQ ID NO: 1293293 - RNA, 19 nt, Artificial Sequence
  Description of Artificial Sequence: Synthetic oligonucleotide
cuagcucggcuuuuagaau

SEQ ID NO: 1293294 - RNA, 19 nt, Artificial Sequence
  Description of Artificial Sequence: Synthetic oligonucleotide
gggguauugauuugcucau

SEQ ID NO: 1293295 - RNA, 19 nt, Artificial Sequence
  Description of Artificial Sequence: Synthetic oligonucleotide
ggcugcggcuuucuaagaa

SEQ ID NO: 1293296 - RNA, 19 nt, Artificial Sequence
  Description of Artificial Sequence: Synthetic oligonucleotide
ggacucuuuguuggauuac

SEQ ID NO: 1293297 - RNA, 19 nt, Artificial Sequence
  Description of Artificial Sequence: Synthetic oligonucleotide
ggacauggaauagucuaua

SEQ ID NO: 1293298 - RNA, 19 nt, Artificial Sequence
  Description of Artificial Sequence: Synthetic oligonucleotide
gccaaaacacguuccaguu

SEQ ID NO: 1293299 - RNA, 19 nt, Artificial Sequence
  Description of Artificial Sequence: Synthetic oligonucleotide
ccauuaguccucacaagcu

SEQ ID NO: 1293300 - RNA, 19 nt, Artificial Sequence
  Description of Artificial Sequence: Synthetic oligonucleotide
cccucugcguuccgguagg

SEQ ID NO: 1293301 - RNA, 19 nt, Artificial Sequence
  Description of Artificial Sequence: Synthetic oligonucleotide
ggauuuggguuccaugauu

SEQ ID NO: 1293302 - RNA, 19 nt, Artificial Sequence
  Description of Artificial Sequence: Synthetic oligonucleotide
gcuucuggguauucuggua

SEQ ID NO: 1293303 - RNA, 19 nt, Artificial Sequence
  Description of Artificial Sequence: Synthetic oligonucleotide
gagguauggugguguacuu

SEQ ID NO: 1293304 - RNA, 19 nt, Artificial Sequence
  Description of Artificial Sequence: Synthetic oligonucleotide
cuuguugcuuagccuugcu

SEQ ID NO: 1293305 - RNA, 19 nt, Artificial Sequence
  Description of Artificial Sequence: Synthetic oligonucleotide
ggguacuauaggucaccaa

SEQ ID NO: 1293306 - RNA, 19 nt, Artificial Sequence
  Description of Artificial Sequence: Synthetic oligonucleotide
gcuaccaaucuuggcaucu

SEQ ID NO: 1293307 - RNA, 19 nt, Artificial Sequence
  Description of Artificial Sequence: Synthetic oligonucleotide
gaagcaaauuagggguauu

SEQ ID NO: 1293308 - RNA, 19 nt, Artificial Sequence
  Description of Artificial Sequence: Synthetic oligonucleotide
ggcaucugaucuucuaauu

SEQ ID NO: 1293309 - RNA, 19 nt, Artificial Sequence
  Description of Artificial Sequence: Synthetic oligonucleotide
gccacagaauaaggauuug

SEQ ID NO: 1293310 - RNA, 19 nt, Artificial Sequence
  Description of Artificial Sequence: Synthetic oligonucleotide
gaccuccgcucuccuggca

SEQ ID NO: 1293311 - RNA, 19 nt, Artificial Sequence
  Description of Artificial Sequence: Synthetic oligonucleotide
gugguguacuucgcucaga

SEQ ID NO: 1293312 - RNA, 19 nt, Artificial Sequence
  Description of Artificial Sequence: Synthetic oligonucleotide
ggaagcaaauuagggguau

SEQ ID NO: 1293313 - RNA, 19 nt, Artificial Sequence
  Description of Artificial Sequence: Synthetic oligonucleotide
ggccacagaauaaggauuu

SEQ ID NO: 1293314 - RNA, 19 nt, Artificial Sequence
  Description of Artificial Sequence: Synthetic oligonucleotide
cuccuggcagcccuuuccu

SEQ ID NO: 1293315 - RNA, 19 nt, Artificial Sequence
  Description of Artificial Sequence: Synthetic oligonucleotide
ggcgauaacccaugugcuu

SEQ ID NO: 1293316 - RNA, 19 nt, Artificial Sequence
  Description of Artificial Sequence: Synthetic oligonucleotide
gacuggcugcggcuuucua

SEQ ID NO: 1293317 - RNA, 19 nt, Artificial Sequence
  Description of Artificial Sequence: Synthetic oligonucleotide
cuguucuguccuguauucu

SEQ ID NO: 1293318 - RNA, 19 nt, Artificial Sequence
  Description of Artificial Sequence: Synthetic oligonucleotide
caacagcugcgucuacccu

SEQ ID NO: 1293319 - RNA, 19 nt, Artificial Sequence
  Description of Artificial Sequence: Synthetic oligonucleotide
caucaaacacagggagacu

SEQ ID NO: 1293320 - RNA, 19 nt, Artificial Sequence
  Description of Artificial Sequence: Synthetic oligonucleotide
cggugucaugucaguuugg

SEQ ID NO: 1293321 - RNA, 19 nt, Artificial Sequence
  Description of Artificial Sequence: Synthetic oligonucleotide
ggauuacugaggaccuggu

SEQ ID NO: 1293322 - RNA, 19 nt, Artificial Sequence
  Description of Artificial Sequence: Synthetic oligonucleotide
ggcaggggccacagaauaa

SEQ ID NO: 1293323 - RNA, 19 nt, Artificial Sequence
  Description of Artificial Sequence: Synthetic oligonucleotide
cggcuuuuagaaucuggaa

SEQ ID NO: 1293324 - RNA, 19 nt, Artificial Sequence
  Description of Artificial Sequence: Synthetic oligonucleotide
gggccacagaauaaggauu

SEQ ID NO: 1293325 - RNA, 19 nt, Artificial Sequence
  Description of Artificial Sequence: Synthetic oligonucleotide
guggcaggggccacagaau

SEQ ID NO: 1293326 - RNA, 19 nt, Artificial Sequence
  Description of Artificial Sequence: Synthetic oligonucleotide
ggguaggcaacagcugcgu

SEQ ID NO: 1293327 - RNA, 19 nt, Artificial Sequence
  Description of Artificial Sequence: Synthetic oligonucleotide
gcuuagccuugcucaggua

SEQ ID NO: 1293328 - RNA, 19 nt, Artificial Sequence
  Description of Artificial Sequence: Synthetic oligonucleotide
ggggucuuagcagguaauu

SEQ ID NO: 1293329 - RNA, 19 nt, Artificial Sequence
  Description of Artificial Sequence: Synthetic oligonucleotide
caccgacuacagccacaaa

SEQ ID NO: 1293330 - RNA, 19 nt, Artificial Sequence
  Description of Artificial Sequence: Synthetic oligonucleotide
ggacaaagugcuggagcuu

SEQ ID NO: 1293331 - RNA, 19 nt, Artificial Sequence
  Description of Artificial Sequence: Synthetic oligonucleotide
cgauaacccaugugcuucu

SEQ ID NO: 1293332 - RNA, 19 nt, Artificial Sequence
  Description of Artificial Sequence: Synthetic oligonucleotide
cagcuggaugggagcuccu

SEQ ID NO: 1293333 - RNA, 19 nt, Artificial Sequence
  Description of Artificial Sequence: Synthetic oligonucleotide
gcguuccgguaggaggccu

SEQ ID NO: 1293334 - RNA, 19 nt, Artificial Sequence
  Description of Artificial Sequence: Synthetic oligonucleotide
aauaauaaaacuuggaacg

SEQ ID NO: 1293335 - RNA, 19 nt, Artificial Sequence
  Description of Artificial Sequence: Synthetic oligonucleotide
aauaacuugagauuuaugg

SEQ ID NO: 1293336 - RNA, 19 nt, Artificial Sequence
  Description of Artificial Sequence: Synthetic oligonucleotide
aauacuugaccauauacuc

SEQ ID NO: 1293337 - RNA, 19 nt, Artificial Sequence
  Description of Artificial Sequence: Synthetic oligonucleotide
aacaaauuaagccagguca

SEQ ID NO: 1293338 - RNA, 19 nt, Artificial Sequence
  Description of Artificial Sequence: Synthetic oligonucleotide
ugcuuuaaaaggcagacgg

SEQ ID NO: 1293339 - RNA, 19 nt, Artificial Sequence
  Description of Artificial Sequence: Synthetic oligonucleotide
aaugucauaauauauaaua

SEQ ID NO: 1293340 - RNA, 19 nt, Artificial Sequence
  Description of Artificial Sequence: Synthetic oligonucleotide
uaaaauaaaauaaaauaaa

SEQ ID NO: 1293341 - RNA, 19 nt, Artificial Sequence
  Description of Artificial Sequence: Synthetic oligonucleotide
uuaaaauuuaggaagugga

SEQ ID NO: 1293342 - RNA, 19 nt, Artificial Sequence
  Description of Artificial Sequence: Synthetic oligonucleotide
aaauuuaggaaguggagcu

SEQ ID NO: 1293343 - RNA, 19 nt, Artificial Sequence
  Description of Artificial Sequence: Synthetic oligonucleotide
uaggucaacacauauacag

SEQ ID NO: 1293344 - RNA, 19 nt, Artificial Sequence
  Description of Artificial Sequence: Synthetic oligonucleotide
ugaaacugaaucuucaccc

SEQ ID NO: 1293345 - RNA, 19 nt, Artificial Sequence
  Description of Artificial Sequence: Synthetic oligonucleotide
aaaccuagaucugaaagac

SEQ ID NO: 1293346 - RNA, 19 nt, Artificial Sequence
  Description of Artificial Sequence: Synthetic oligonucleotide
aucaaaacccaggagaugc

SEQ ID NO: 1293347 - RNA, 19 nt, Artificial Sequence
  Description of Artificial Sequence: Synthetic oligonucleotide
aaaauaaaauaaaauaaaa

SEQ ID NO: 1293348 - RNA, 19 nt, Artificial Sequence
  Description of Artificial Sequence: Synthetic oligonucleotide
uaauacuugaccauauacu

SEQ ID NO: 1293349 - RNA, 19 nt, Artificial Sequence
  Description of Artificial Sequence: Synthetic oligonucleotide
uauugcaauaauaaaacuu

SEQ ID NO: 1293350 - RNA, 19 nt, Artificial Sequence
  Description of Artificial Sequence: Synthetic oligonucleotide
agcaccuucaauuuaaacu

SEQ ID NO: 1293351 - RNA, 19 nt, Artificial Sequence
  Description of Artificial Sequence: Synthetic oligonucleotide
auugcaauaauaaaacuug

SEQ ID NO: 1293352 - RNA, 19 nt, Artificial Sequence
  Description of Artificial Sequence: Synthetic oligonucleotide
uucaauuuaaacuuuccau

SEQ ID NO: 1293353 - RNA, 19 nt, Artificial Sequence
  Description of Artificial Sequence: Synthetic oligonucleotide
agauuuauggcauaguuua

SEQ ID NO: 1293354 - RNA, 19 nt, Artificial Sequence
  Description of Artificial Sequence: Synthetic oligonucleotide
aaaggaaccugcuuuaaaa

SEQ ID NO: 1293355 - RNA, 19 nt, Artificial Sequence
  Description of Artificial Sequence: Synthetic oligonucleotide
ccuagcauaaacuuaaagg

SEQ ID NO: 1293356 - RNA, 19 nt, Artificial Sequence
  Description of Artificial Sequence: Synthetic oligonucleotide
acuuggaacgcauauguag

SEQ ID NO: 1293357 - RNA, 19 nt, Artificial Sequence
  Description of Artificial Sequence: Synthetic oligonucleotide
gagauugucaguuuggcuc

SEQ ID NO: 1293358 - RNA, 19 nt, Artificial Sequence
  Description of Artificial Sequence: Synthetic oligonucleotide
auaauaaaacuuggaacgc

SEQ ID NO: 1293359 - RNA, 19 nt, Artificial Sequence
  Description of Artificial Sequence: Synthetic oligonucleotide
uucuaaaguuaacccaucg

SEQ ID NO: 1293360 - RNA, 19 nt, Artificial Sequence
  Description of Artificial Sequence: Synthetic oligonucleotide
cuuaaaauuuaggaagugg

SEQ ID NO: 1293361 - RNA, 19 nt, Artificial Sequence
  Description of Artificial Sequence: Synthetic oligonucleotide
uuuucuuagagaacacuca

SEQ ID NO: 1293362 - RNA, 19 nt, Artificial Sequence
  Description of Artificial Sequence: Synthetic oligonucleotide
ucuaaaguuaacccaucgc

SEQ ID NO: 1293363 - RNA, 19 nt, Artificial Sequence
  Description of Artificial Sequence: Synthetic oligonucleotide
ugagugacggaacacauuc

SEQ ID NO: 1293364 - RNA, 19 nt, Artificial Sequence
  Description of Artificial Sequence: Synthetic oligonucleotide
uccgaagcaaagcugagug

SEQ ID NO: 1293365 - RNA, 19 nt, Artificial Sequence
  Description of Artificial Sequence: Synthetic oligonucleotide
uagcauaaacuuaaagggc

SEQ ID NO: 1293366 - RNA, 19 nt, Artificial Sequence
  Description of Artificial Sequence: Synthetic oligonucleotide
cugaccuacacucaucugg

SEQ ID NO: 1293367 - RNA, 19 nt, Artificial Sequence
  Description of Artificial Sequence: Synthetic oligonucleotide
ugcuguuaauacuugacca

SEQ ID NO: 1293368 - RNA, 19 nt, Artificial Sequence
  Description of Artificial Sequence: Synthetic oligonucleotide
gggauuucaauuuaacagg

SEQ ID NO: 1293369 - RNA, 19 nt, Artificial Sequence
  Description of Artificial Sequence: Synthetic oligonucleotide
gaaucuucaccccaaaaca

SEQ ID NO: 1293370 - RNA, 19 nt, Artificial Sequence
  Description of Artificial Sequence: Synthetic oligonucleotide
aggauuuguagugauggcc

SEQ ID NO: 1293371 - RNA, 19 nt, Artificial Sequence
  Description of Artificial Sequence: Synthetic oligonucleotide
gcauauguagugcagaggg

SEQ ID NO: 1293372 - RNA, 19 nt, Artificial Sequence
  Description of Artificial Sequence: Synthetic oligonucleotide
ugaccauauacuccauugg

SEQ ID NO: 1293373 - RNA, 19 nt, Artificial Sequence
  Description of Artificial Sequence: Synthetic oligonucleotide
ugaccuacacucaucuggg

SEQ ID NO: 1293374 - RNA, 19 nt, Artificial Sequence
  Description of Artificial Sequence: Synthetic oligonucleotide
aaguccugaaaauucauua

SEQ ID NO: 1293375 - RNA, 19 nt, Artificial Sequence
  Description of Artificial Sequence: Synthetic oligonucleotide
aauuuaacaggaccucccu

SEQ ID NO: 1293376 - RNA, 19 nt, Artificial Sequence
  Description of Artificial Sequence: Synthetic oligonucleotide
gaaaccuagaucugaaaga

SEQ ID NO: 1293377 - RNA, 19 nt, Artificial Sequence
  Description of Artificial Sequence: Synthetic oligonucleotide
gaggaaucaaauuucuuuc

SEQ ID NO: 1293378 - RNA, 19 nt, Artificial Sequence
  Description of Artificial Sequence: Synthetic oligonucleotide
auuuauggcauaguuuagg

SEQ ID NO: 1293379 - RNA, 19 nt, Artificial Sequence
  Description of Artificial Sequence: Synthetic oligonucleotide
aagcaaagcugagugacgg

SEQ ID NO: 1293380 - RNA, 19 nt, Artificial Sequence
  Description of Artificial Sequence: Synthetic oligonucleotide
uagugcaccacgcaggucu

SEQ ID NO: 1293381 - RNA, 19 nt, Artificial Sequence
  Description of Artificial Sequence: Synthetic oligonucleotide
ugacggaacacauucaguc

SEQ ID NO: 1293382 - RNA, 19 nt, Artificial Sequence
  Description of Artificial Sequence: Synthetic oligonucleotide
caaaucacuacacaggaca

SEQ ID NO: 1293383 - RNA, 19 nt, Artificial Sequence
  Description of Artificial Sequence: Synthetic oligonucleotide
ucuccaaucugcuauggcu

SEQ ID NO: 1293384 - RNA, 19 nt, Artificial Sequence
  Description of Artificial Sequence: Synthetic oligonucleotide
uuugcagcacagcagcaag

SEQ ID NO: 1293385 - RNA, 19 nt, Artificial Sequence
  Description of Artificial Sequence: Synthetic oligonucleotide
ugagauuuauggcauaguu

SEQ ID NO: 1293386 - RNA, 19 nt, Artificial Sequence
  Description of Artificial Sequence: Synthetic oligonucleotide
cuuguuucugucccgagag

SEQ ID NO: 1293387 - RNA, 19 nt, Artificial Sequence
  Description of Artificial Sequence: Synthetic oligonucleotide
aguccugaaaauucauuag

SEQ ID NO: 1293388 - RNA, 19 nt, Artificial Sequence
  Description of Artificial Sequence: Synthetic oligonucleotide
agugacggaacacauucag

SEQ ID NO: 1293389 - RNA, 19 nt, Artificial Sequence
  Description of Artificial Sequence: Synthetic oligonucleotide
gaaacugaaucuucacccc

SEQ ID NO: 1293390 - RNA, 19 nt, Artificial Sequence
  Description of Artificial Sequence: Synthetic oligonucleotide
ugugcuguuaauacuugac

SEQ ID NO: 1293391 - RNA, 19 nt, Artificial Sequence
  Description of Artificial Sequence: Synthetic oligonucleotide
uucuuagagaacacucaag

SEQ ID NO: 1293392 - RNA, 19 nt, Artificial Sequence
  Description of Artificial Sequence: Synthetic oligonucleotide
gacggaacacauucagucg

SEQ ID NO: 1293393 - RNA, 19 nt, Artificial Sequence
  Description of Artificial Sequence: Synthetic oligonucleotide
caauuuaacaggaccuccc

SEQ ID NO: 1293394 - RNA, 19 nt, Artificial Sequence
  Description of Artificial Sequence: Synthetic oligonucleotide
ugggaggaccguuagaagc

SEQ ID NO: 1293395 - RNA, 19 nt, Artificial Sequence
  Description of Artificial Sequence: Synthetic oligonucleotide
uugccuagcauaaacuuaa

SEQ ID NO: 1293396 - RNA, 19 nt, Artificial Sequence
  Description of Artificial Sequence: Synthetic oligonucleotide
ggaaaccuagaucugaaag

SEQ ID NO: 1293397 - RNA, 19 nt, Artificial Sequence
  Description of Artificial Sequence: Synthetic oligonucleotide
cugaaacugaaucuucacc

SEQ ID NO: 1293398 - RNA, 19 nt, Artificial Sequence
  Description of Artificial Sequence: Synthetic oligonucleotide
aaacugaaucuucacccca

SEQ ID NO: 1293399 - RNA, 19 nt, Artificial Sequence
  Description of Artificial Sequence: Synthetic oligonucleotide
aaagaguagugggacauca

SEQ ID NO: 1293400 - RNA, 19 nt, Artificial Sequence
  Description of Artificial Sequence: Synthetic oligonucleotide
ucccaauucaguuugggua

SEQ ID NO: 1293401 - RNA, 19 nt, Artificial Sequence
  Description of Artificial Sequence: Synthetic oligonucleotide
gauuuguagugauggccgg

SEQ ID NO: 1293402 - RNA, 19 nt, Artificial Sequence
  Description of Artificial Sequence: Synthetic oligonucleotide
aggagagauggucuccacc

SEQ ID NO: 1293403 - RNA, 19 nt, Artificial Sequence
  Description of Artificial Sequence: Synthetic oligonucleotide
cauaguuuaggucaacaca

SEQ ID NO: 1293404 - RNA, 19 nt, Artificial Sequence
  Description of Artificial Sequence: Synthetic oligonucleotide
aacaccaauuccuauucua

SEQ ID NO: 1293405 - RNA, 19 nt, Artificial Sequence
  Description of Artificial Sequence: Synthetic oligonucleotide
cacucaaggauuuguagug

SEQ ID NO: 1293406 - RNA, 19 nt, Artificial Sequence
  Description of Artificial Sequence: Synthetic oligonucleotide
gacgguuucagaagguggg

SEQ ID NO: 1293407 - RNA, 19 nt, Artificial Sequence
  Description of Artificial Sequence: Synthetic oligonucleotide
auaguuuaggucaacacau

SEQ ID NO: 1293408 - RNA, 19 nt, Artificial Sequence
  Description of Artificial Sequence: Synthetic oligonucleotide
aaaucacuacacaggacag

SEQ ID NO: 1293409 - RNA, 19 nt, Artificial Sequence
  Description of Artificial Sequence: Synthetic oligonucleotide
ucggcuucgucccucggcg

SEQ ID NO: 1293410 - RNA, 19 nt, Artificial Sequence
  Description of Artificial Sequence: Synthetic oligonucleotide
uucaccccaaaacaaaaua

SEQ ID NO: 1293411 - RNA, 19 nt, Artificial Sequence
  Description of Artificial Sequence: Synthetic oligonucleotide
accuagaucugaaagacug

SEQ ID NO: 1293412 - RNA, 19 nt, Artificial Sequence
  Description of Artificial Sequence: Synthetic oligonucleotide
uggugagucuacaaacagc

SEQ ID NO: 1293413 - RNA, 19 nt, Artificial Sequence
  Description of Artificial Sequence: Synthetic oligonucleotide
uuagcagagagagccaagc

SEQ ID NO: 1293414 - RNA, 19 nt, Artificial Sequence
  Description of Artificial Sequence: Synthetic oligonucleotide
ucaaggauuuguagugaug

SEQ ID NO: 1293415 - RNA, 19 nt, Artificial Sequence
  Description of Artificial Sequence: Synthetic oligonucleotide
ucugucauuccaguuuuag

SEQ ID NO: 1293416 - RNA, 19 nt, Artificial Sequence
  Description of Artificial Sequence: Synthetic oligonucleotide
uuucucucaccaaaucacu

SEQ ID NO: 1293417 - RNA, 19 nt, Artificial Sequence
  Description of Artificial Sequence: Synthetic oligonucleotide
auauguagugcagagggca

SEQ ID NO: 1293418 - RNA, 19 nt, Artificial Sequence
  Description of Artificial Sequence: Synthetic oligonucleotide
ucucucaccaaaucacuac

SEQ ID NO: 1293419 - RNA, 19 nt, Artificial Sequence
  Description of Artificial Sequence: Synthetic oligonucleotide
aucuccaaucugcuauggc

SEQ ID NO: 1293420 - RNA, 19 nt, Artificial Sequence
  Description of Artificial Sequence: Synthetic oligonucleotide
gaccauauacuccauugga

SEQ ID NO: 1293421 - RNA, 19 nt, Artificial Sequence
  Description of Artificial Sequence: Synthetic oligonucleotide
acauauacagaaggggaag

SEQ ID NO: 1293422 - RNA, 19 nt, Artificial Sequence
  Description of Artificial Sequence: Synthetic oligonucleotide
ugaaagacugaaacugaau

SEQ ID NO: 1293423 - RNA, 19 nt, Artificial Sequence
  Description of Artificial Sequence: Synthetic oligonucleotide
aguuuaggucaacacauau

SEQ ID NO: 1293424 - RNA, 19 nt, Artificial Sequence
  Description of Artificial Sequence: Synthetic oligonucleotide
cuaaaguuaacccaucgcu

SEQ ID NO: 1293425 - RNA, 19 nt, Artificial Sequence
  Description of Artificial Sequence: Synthetic oligonucleotide
gucuauacaaagaguagug

SEQ ID NO: 1293426 - RNA, 19 nt, Artificial Sequence
  Description of Artificial Sequence: Synthetic oligonucleotide
cuugagauuuauggcauag

SEQ ID NO: 1293427 - RNA, 19 nt, Artificial Sequence
  Description of Artificial Sequence: Synthetic oligonucleotide
aaguuaacccaucgcuugu

SEQ ID NO: 1293428 - RNA, 19 nt, Artificial Sequence
  Description of Artificial Sequence: Synthetic oligonucleotide
uuaggucaacacauauaca

SEQ ID NO: 1293429 - RNA, 19 nt, Artificial Sequence
  Description of Artificial Sequence: Synthetic oligonucleotide
aauuccuauucuaaaguua

SEQ ID NO: 1293430 - RNA, 19 nt, Artificial Sequence
  Description of Artificial Sequence: Synthetic oligonucleotide
ucaguuuggcucucugacc

SEQ ID NO: 1293431 - RNA, 19 nt, Artificial Sequence
  Description of Artificial Sequence: Synthetic oligonucleotide
uucaguuuggguagggauu

SEQ ID NO: 1293432 - RNA, 19 nt, Artificial Sequence
  Description of Artificial Sequence: Synthetic oligonucleotide
auuuaggaaguggagcuug

SEQ ID NO: 1293433 - RNA, 19 nt, Artificial Sequence
  Description of Artificial Sequence: Synthetic oligonucleotide
uuuguagugauggccgggc

SEQ ID NO: 1293434 - RNA, 19 nt, Artificial Sequence
  Description of Artificial Sequence: Synthetic oligonucleotide
gguaggugucuauacaaag

SEQ ID NO: 1293435 - RNA, 19 nt, Artificial Sequence
  Description of Artificial Sequence: Synthetic oligonucleotide
uuggaacgcauauguagug

SEQ ID NO: 1293436 - RNA, 19 nt, Artificial Sequence
  Description of Artificial Sequence: Synthetic oligonucleotide
uauacuccauuggaaaccu

SEQ ID NO: 1293437 - RNA, 19 nt, Artificial Sequence
  Description of Artificial Sequence: Synthetic oligonucleotide
aguaaaggaaccugcuuua

SEQ ID NO: 1293438 - RNA, 19 nt, Artificial Sequence
  Description of Artificial Sequence: Synthetic oligonucleotide
aucugcuauggcuuugcag

SEQ ID NO: 1293439 - RNA, 19 nt, Artificial Sequence
  Description of Artificial Sequence: Synthetic oligonucleotide
acgcauauguagugcagag

SEQ ID NO: 1293440 - RNA, 19 nt, Artificial Sequence
  Description of Artificial Sequence: Synthetic oligonucleotide
guggugagucuacaaacag

SEQ ID NO: 1293441 - RNA, 19 nt, Artificial Sequence
  Description of Artificial Sequence: Synthetic oligonucleotide
ucgcuugugcuguuaauac

SEQ ID NO: 1293442 - RNA, 19 nt, Artificial Sequence
  Description of Artificial Sequence: Synthetic oligonucleotide
uguagugauggccgggcgu

SEQ ID NO: 1293443 - RNA, 19 nt, Artificial Sequence
  Description of Artificial Sequence: Synthetic oligonucleotide
cauauguagugcagagggc

SEQ ID NO: 1293444 - RNA, 19 nt, Artificial Sequence
  Description of Artificial Sequence: Synthetic oligonucleotide
cagcaguaaaggaaccugc

SEQ ID NO: 1293445 - RNA, 19 nt, Artificial Sequence
  Description of Artificial Sequence: Synthetic oligonucleotide
accguuagaagcaaaggcu

SEQ ID NO: 1293446 - RNA, 19 nt, Artificial Sequence
  Description of Artificial Sequence: Synthetic oligonucleotide
caagcauucccguguagug

SEQ ID NO: 1293447 - RNA, 19 nt, Artificial Sequence
  Description of Artificial Sequence: Synthetic oligonucleotide
uuuggguagggauuucaau

SEQ ID NO: 1293448 - RNA, 19 nt, Artificial Sequence
  Description of Artificial Sequence: Synthetic oligonucleotide
uuguagugauggccgggcg

SEQ ID NO: 1293449 - RNA, 19 nt, Artificial Sequence
  Description of Artificial Sequence: Synthetic oligonucleotide
agccgagauuagcagagag

SEQ ID NO: 1293450 - RNA, 19 nt, Artificial Sequence
  Description of Artificial Sequence: Synthetic oligonucleotide
aauucaguuuggguaggga

SEQ ID NO: 1293451 - RNA, 19 nt, Artificial Sequence
  Description of Artificial Sequence: Synthetic oligonucleotide
ccaagcaucaaaacccagg

SEQ ID NO: 1293452 - RNA, 19 nt, Artificial Sequence
  Description of Artificial Sequence: Synthetic oligonucleotide
uaggaaguggagcuuggau

SEQ ID NO: 1293453 - RNA, 19 nt, Artificial Sequence
  Description of Artificial Sequence: Synthetic oligonucleotide
uucccaauucaguuugggu

SEQ ID NO: 1293454 - RNA, 19 nt, Artificial Sequence
  Description of Artificial Sequence: Synthetic oligonucleotide
auaaacuuaaagggcuugu

SEQ ID NO: 1293455 - RNA, 19 nt, Artificial Sequence
  Description of Artificial Sequence: Synthetic oligonucleotide
gaggaggccacuucuguca

SEQ ID NO: 1293456 - RNA, 19 nt, Artificial Sequence
  Description of Artificial Sequence: Synthetic oligonucleotide
ugggcuaccccuucuuccc

SEQ ID NO: 1293457 - RNA, 19 nt, Artificial Sequence
  Description of Artificial Sequence: Synthetic oligonucleotide
ucggguaggugucuauaca

SEQ ID NO: 1293458 - RNA, 19 nt, Artificial Sequence
  Description of Artificial Sequence: Synthetic oligonucleotide
ggugagucuacaaacagca

SEQ ID NO: 1293459 - RNA, 19 nt, Artificial Sequence
  Description of Artificial Sequence: Synthetic oligonucleotide
acacucaucugggcuaccc

SEQ ID NO: 1293460 - RNA, 19 nt, Artificial Sequence
  Description of Artificial Sequence: Synthetic oligonucleotide
uggaacgcauauguagugc

SEQ ID NO: 1293461 - RNA, 19 nt, Artificial Sequence
  Description of Artificial Sequence: Synthetic oligonucleotide
auuuguagugauggccggg

SEQ ID NO: 1293462 - RNA, 19 nt, Artificial Sequence
  Description of Artificial Sequence: Synthetic oligonucleotide
agacgguuucagaaggugg

SEQ ID NO: 1293463 - RNA, 19 nt, Artificial Sequence
  Description of Artificial Sequence: Synthetic oligonucleotide
gaugaccagcaucauuuuc

SEQ ID NO: 1293464 - RNA, 19 nt, Artificial Sequence
  Description of Artificial Sequence: Synthetic oligonucleotide
acaaagaguagugggacau

SEQ ID NO: 1293465 - RNA, 19 nt, Artificial Sequence
  Description of Artificial Sequence: Synthetic oligonucleotide
gucaacacauauacagaag

SEQ ID NO: 1293466 - RNA, 19 nt, Artificial Sequence
  Description of Artificial Sequence: Synthetic oligonucleotide
ucaaaacccaggagaugcu

SEQ ID NO: 1293467 - RNA, 19 nt, Artificial Sequence
  Description of Artificial Sequence: Synthetic oligonucleotide
ugucccgagaggaaucaaa

SEQ ID NO: 1293468 - RNA, 19 nt, Artificial Sequence
  Description of Artificial Sequence: Synthetic oligonucleotide
aguggcauguggugggaug

SEQ ID NO: 1293469 - RNA, 19 nt, Artificial Sequence
  Description of Artificial Sequence: Synthetic oligonucleotide
uguccgaagcaaagcugag

SEQ ID NO: 1293470 - RNA, 19 nt, Artificial Sequence
  Description of Artificial Sequence: Synthetic oligonucleotide
ggcucucugaccuacacuc

SEQ ID NO: 1293471 - RNA, 19 nt, Artificial Sequence
  Description of Artificial Sequence: Synthetic oligonucleotide
gcuccauaggcauagucug

SEQ ID NO: 1293472 - RNA, 19 nt, Artificial Sequence
  Description of Artificial Sequence: Synthetic oligonucleotide
agacugaaacugaaucuuc

SEQ ID NO: 1293473 - RNA, 19 nt, Artificial Sequence
  Description of Artificial Sequence: Synthetic oligonucleotide
gguaccagauccuuccaug

SEQ ID NO: 1293474 - RNA, 19 nt, Artificial Sequence
  Description of Artificial Sequence: Synthetic oligonucleotide
agcccucaacagcaucucc

SEQ ID NO: 1293475 - RNA, 19 nt, Artificial Sequence
  Description of Artificial Sequence: Synthetic oligonucleotide
ccgagauuagcagagagag

SEQ ID NO: 1293476 - RNA, 19 nt, Artificial Sequence
  Description of Artificial Sequence: Synthetic oligonucleotide
uuccuauucuaaaguuaac

SEQ ID NO: 1293477 - RNA, 19 nt, Artificial Sequence
  Description of Artificial Sequence: Synthetic oligonucleotide
aaacagcaccuucaauuua

SEQ ID NO: 1293478 - RNA, 19 nt, Artificial Sequence
  Description of Artificial Sequence: Synthetic oligonucleotide
cauucagucggguaggugu

SEQ ID NO: 1293479 - RNA, 19 nt, Artificial Sequence
  Description of Artificial Sequence: Synthetic oligonucleotide
cccaauucaguuuggguag

SEQ ID NO: 1293480 - RNA, 19 nt, Artificial Sequence
  Description of Artificial Sequence: Synthetic oligonucleotide
aaaggcucgcucccuuccu

SEQ ID NO: 1293481 - RNA, 19 nt, Artificial Sequence
  Description of Artificial Sequence: Synthetic oligonucleotide
agguacuguaguguccaac

SEQ ID NO: 1293482 - RNA, 19 nt, Artificial Sequence
  Description of Artificial Sequence: Synthetic oligonucleotide
aaucugcuauggcuuugca

SEQ ID NO: 1293483 - RNA, 19 nt, Artificial Sequence
  Description of Artificial Sequence: Synthetic oligonucleotide
uuagaagcaaaggcucgcu

SEQ ID NO: 1293484 - RNA, 19 nt, Artificial Sequence
  Description of Artificial Sequence: Synthetic oligonucleotide
cuuaaagggcuuguuucug

SEQ ID NO: 1293485 - RNA, 19 nt, Artificial Sequence
  Description of Artificial Sequence: Synthetic oligonucleotide
uggccgggcguccauuggg

SEQ ID NO: 1293486 - RNA, 19 nt, Artificial Sequence
  Description of Artificial Sequence: Synthetic oligonucleotide
aacccaucgcuugugcugu

SEQ ID NO: 1293487 - RNA, 19 nt, Artificial Sequence
  Description of Artificial Sequence: Synthetic oligonucleotide
ccuucaauuuaaacuuucc

SEQ ID NO: 1293488 - RNA, 19 nt, Artificial Sequence
  Description of Artificial Sequence: Synthetic oligonucleotide
guaggugucuauacaaaga

SEQ ID NO: 1293489 - RNA, 19 nt, Artificial Sequence
  Description of Artificial Sequence: Synthetic oligonucleotide
aagaguagugggacaucag

SEQ ID NO: 1293490 - RNA, 19 nt, Artificial Sequence
  Description of Artificial Sequence: Synthetic oligonucleotide
aauuuaggaaguggagcuu

SEQ ID NO: 1293491 - RNA, 19 nt, Artificial Sequence
  Description of Artificial Sequence: Synthetic oligonucleotide
cacuacacaggacagcaga

SEQ ID NO: 1293492 - RNA, 19 nt, Artificial Sequence
  Description of Artificial Sequence: Synthetic oligonucleotide
aggaccguuagaagcaaag

SEQ ID NO: 1293493 - RNA, 19 nt, Artificial Sequence
  Description of Artificial Sequence: Synthetic oligonucleotide
gagucuacaaacagcaccu

SEQ ID NO: 1293494 - RNA, 19 nt, Artificial Sequence
  Description of Artificial Sequence: Synthetic oligonucleotide
caggaagccgagauuagca

SEQ ID NO: 1293495 - RNA, 19 nt, Artificial Sequence
  Description of Artificial Sequence: Synthetic oligonucleotide
uaaacuuaaagggcuuguu

SEQ ID NO: 1293496 - RNA, 19 nt, Artificial Sequence
  Description of Artificial Sequence: Synthetic oligonucleotide
cagcaucauuuucuuagag

SEQ ID NO: 1293497 - RNA, 19 nt, Artificial Sequence
  Description of Artificial Sequence: Synthetic oligonucleotide
gcauaguuuaggucaacac

SEQ ID NO: 1293498 - RNA, 19 nt, Artificial Sequence
  Description of Artificial Sequence: Synthetic oligonucleotide
uaguuuaggucaacacaua

SEQ ID NO: 1293499 - RNA, 19 nt, Artificial Sequence
  Description of Artificial Sequence: Synthetic oligonucleotide
cuuggaacgcauauguagu

SEQ ID NO: 1293500 - RNA, 19 nt, Artificial Sequence
  Description of Artificial Sequence: Synthetic oligonucleotide
uggauucaugugcacccgu

SEQ ID NO: 1293501 - RNA, 19 nt, Artificial Sequence
  Description of Artificial Sequence: Synthetic oligonucleotide
gagguguccgaagcaaagc

SEQ ID NO: 1293502 - RNA, 19 nt, Artificial Sequence
  Description of Artificial Sequence: Synthetic oligonucleotide
gugggaugaugccugggug

SEQ ID NO: 1293503 - RNA, 19 nt, Artificial Sequence
  Description of Artificial Sequence: Synthetic oligonucleotide
uggaaaccuagaucugaaa

SEQ ID NO: 1293504 - RNA, 19 nt, Artificial Sequence
  Description of Artificial Sequence: Synthetic oligonucleotide
auggauucaugugcacccg

SEQ ID NO: 1293505 - RNA, 19 nt, Artificial Sequence
  Description of Artificial Sequence: Synthetic oligonucleotide
gcaagaaugucauaauaua

SEQ ID NO: 1293506 - RNA, 19 nt, Artificial Sequence
  Description of Artificial Sequence: Synthetic oligonucleotide
cuucagaggucccugcuga

SEQ ID NO: 1293507 - RNA, 19 nt, Artificial Sequence
  Description of Artificial Sequence: Synthetic oligonucleotide
uucugucccgagaggaauc

SEQ ID NO: 1293508 - RNA, 19 nt, Artificial Sequence
  Description of Artificial Sequence: Synthetic oligonucleotide
auucccguguagugcacca

SEQ ID NO: 1293509 - RNA, 19 nt, Artificial Sequence
  Description of Artificial Sequence: Synthetic oligonucleotide
cuugccuagcauaaacuua

SEQ ID NO: 1293510 - RNA, 19 nt, Artificial Sequence
  Description of Artificial Sequence: Synthetic oligonucleotide
ggacaucaggaaaagcucc

SEQ ID NO: 1293511 - RNA, 19 nt, Artificial Sequence
  Description of Artificial Sequence: Synthetic oligonucleotide
aacugaaucuucaccccaa

SEQ ID NO: 1293512 - RNA, 19 nt, Artificial Sequence
  Description of Artificial Sequence: Synthetic oligonucleotide
caaaauaacuugagauuua

SEQ ID NO: 1293513 - RNA, 19 nt, Artificial Sequence
  Description of Artificial Sequence: Synthetic oligonucleotide
ggguggugagucuacaaac

SEQ ID NO: 1293514 - RNA, 19 nt, Artificial Sequence
  Description of Artificial Sequence: Synthetic oligonucleotide
gucggguaggugucuauac

SEQ ID NO: 1293515 - RNA, 19 nt, Artificial Sequence
  Description of Artificial Sequence: Synthetic oligonucleotide
cucucaccaaaucacuaca

SEQ ID NO: 1293516 - RNA, 19 nt, Artificial Sequence
  Description of Artificial Sequence: Synthetic oligonucleotide
ucugucccgagaggaauca

SEQ ID NO: 1293517 - RNA, 19 nt, Artificial Sequence
  Description of Artificial Sequence: Synthetic oligonucleotide
gauggccgggcguccauug

SEQ ID NO: 1293518 - RNA, 19 nt, Artificial Sequence
  Description of Artificial Sequence: Synthetic oligonucleotide
cuagaucugaaagacugaa

SEQ ID NO: 1293519 - RNA, 19 nt, Artificial Sequence
  Description of Artificial Sequence: Synthetic oligonucleotide
gccuagcauaaacuuaaag

SEQ ID NO: 1293520 - RNA, 19 nt, Artificial Sequence
  Description of Artificial Sequence: Synthetic oligonucleotide
aaccuagaucugaaagacu

SEQ ID NO: 1293521 - RNA, 19 nt, Artificial Sequence
  Description of Artificial Sequence: Synthetic oligonucleotide
ggauuucaauuuaacagga

SEQ ID NO: 1293522 - RNA, 19 nt, Artificial Sequence
  Description of Artificial Sequence: Synthetic oligonucleotide
aguuuggguagggauuuca

SEQ ID NO: 1293523 - RNA, 19 nt, Artificial Sequence
  Description of Artificial Sequence: Synthetic oligonucleotide
caauucaguuuggguaggg

SEQ ID NO: 1293524 - RNA, 19 nt, Artificial Sequence
  Description of Artificial Sequence: Synthetic oligonucleotide
ggaacgcauauguagugca

SEQ ID NO: 1293525 - RNA, 19 nt, Artificial Sequence
  Description of Artificial Sequence: Synthetic oligonucleotide
ugcacucccauggcagcgg

SEQ ID NO: 1293526 - RNA, 19 nt, Artificial Sequence
  Description of Artificial Sequence: Synthetic oligonucleotide
auuagcagagagagccaag

SEQ ID NO: 1293527 - RNA, 19 nt, Artificial Sequence
  Description of Artificial Sequence: Synthetic oligonucleotide
gcauagucuggggagauug

SEQ ID NO: 1293528 - RNA, 19 nt, Artificial Sequence
  Description of Artificial Sequence: Synthetic oligonucleotide
gauucaugugcacccgucu

SEQ ID NO: 1293529 - RNA, 19 nt, Artificial Sequence
  Description of Artificial Sequence: Synthetic oligonucleotide
cacucaucugggcuacccc

SEQ ID NO: 1293530 - RNA, 19 nt, Artificial Sequence
  Description of Artificial Sequence: Synthetic oligonucleotide
cuauggcuuugcagcacag

SEQ ID NO: 1293531 - RNA, 19 nt, Artificial Sequence
  Description of Artificial Sequence: Synthetic oligonucleotide
ggaccguuagaagcaaagg

SEQ ID NO: 1293532 - RNA, 19 nt, Artificial Sequence
  Description of Artificial Sequence: Synthetic oligonucleotide
guguccgaagcaaagcuga

SEQ ID NO: 1293533 - RNA, 19 nt, Artificial Sequence
  Description of Artificial Sequence: Synthetic oligonucleotide
cauuggguggugagucuac

SEQ ID NO: 1293534 - RNA, 19 nt, Artificial Sequence
  Description of Artificial Sequence: Synthetic oligonucleotide
aggucaacacauauacaga

SEQ ID NO: 1293535 - RNA, 19 nt, Artificial Sequence
  Description of Artificial Sequence: Synthetic oligonucleotide
acucaaggauuuguaguga

SEQ ID NO: 1293536 - RNA, 19 nt, Artificial Sequence
  Description of Artificial Sequence: Synthetic oligonucleotide
uggcuccauaggcauaguc

SEQ ID NO: 1293537 - RNA, 19 nt, Artificial Sequence
  Description of Artificial Sequence: Synthetic oligonucleotide
agccaggaagccgagauua

SEQ ID NO: 1293538 - RNA, 19 nt, Artificial Sequence
  Description of Artificial Sequence: Synthetic oligonucleotide
gauccuuccauggcagauc

SEQ ID NO: 1293539 - RNA, 19 nt, Artificial Sequence
  Description of Artificial Sequence: Synthetic oligonucleotide
gcggcuguucagcagcucg

SEQ ID NO: 1293540 - RNA, 19 nt, Artificial Sequence
  Description of Artificial Sequence: Synthetic oligonucleotide
gugggaggaccguuagaag

SEQ ID NO: 1293541 - RNA, 19 nt, Artificial Sequence
  Description of Artificial Sequence: Synthetic oligonucleotide
uaccccuucuucccagccu

SEQ ID NO: 1293542 - RNA, 19 nt, Artificial Sequence
  Description of Artificial Sequence: Synthetic oligonucleotide
uccaaucugcuauggcuuu

SEQ ID NO: 1293543 - RNA, 19 nt, Artificial Sequence
  Description of Artificial Sequence: Synthetic oligonucleotide
uccauuggguggugagucu

SEQ ID NO: 1293544 - RNA, 19 nt, Artificial Sequence
  Description of Artificial Sequence: Synthetic oligonucleotide
gagcuaagggaggaggcca

SEQ ID NO: 1293545 - RNA, 19 nt, Artificial Sequence
  Description of Artificial Sequence: Synthetic oligonucleotide
aggugcgcccgucuccagg

SEQ ID NO: 1293546 - RNA, 19 nt, Artificial Sequence
  Description of Artificial Sequence: Synthetic oligonucleotide
ggagagauggucuccaccu

SEQ ID NO: 1293547 - RNA, 19 nt, Artificial Sequence
  Description of Artificial Sequence: Synthetic oligonucleotide
uuucagaaggugggaggac

SEQ ID NO: 1293548 - RNA, 19 nt, Artificial Sequence
  Description of Artificial Sequence: Synthetic oligonucleotide
cucggcuucgucccucggc

SEQ ID NO: 1293549 - RNA, 19 nt, Artificial Sequence
  Description of Artificial Sequence: Synthetic oligonucleotide
gaccuacacucaucugggc

SEQ ID NO: 1293550 - RNA, 19 nt, Artificial Sequence
  Description of Artificial Sequence: Synthetic oligonucleotide
cagacgguuucagaaggug

SEQ ID NO: 1293551 - RNA, 19 nt, Artificial Sequence
  Description of Artificial Sequence: Synthetic oligonucleotide
ggagcuuggauaguuacaa

SEQ ID NO: 1293552 - RNA, 19 nt, Artificial Sequence
  Description of Artificial Sequence: Synthetic oligonucleotide
ccguuagaagcaaaggcuc

SEQ ID NO: 1293553 - RNA, 19 nt, Artificial Sequence
  Description of Artificial Sequence: Synthetic oligonucleotide
agcaaagcugagugacgga

SEQ ID NO: 1293554 - RNA, 19 nt, Artificial Sequence
  Description of Artificial Sequence: Synthetic oligonucleotide
cuaccccuucuucccagcc

SEQ ID NO: 1293555 - RNA, 19 nt, Artificial Sequence
  Description of Artificial Sequence: Synthetic oligonucleotide
guuggcggggaggagagga

SEQ ID NO: 1293556 - RNA, 19 nt, Artificial Sequence
  Description of Artificial Sequence: Synthetic oligonucleotide
guagugauggccgggcguc

SEQ ID NO: 1293557 - RNA, 19 nt, Artificial Sequence
  Description of Artificial Sequence: Synthetic oligonucleotide
agguaccagauccuuccau

SEQ ID NO: 1293558 - RNA, 19 nt, Artificial Sequence
  Description of Artificial Sequence: Synthetic oligonucleotide
ucccgagaggaaucaaauu

SEQ ID NO: 1293559 - RNA, 19 nt, Artificial Sequence
  Description of Artificial Sequence: Synthetic oligonucleotide
guuuggcucucugaccuac

SEQ ID NO: 1293560 - RNA, 19 nt, Artificial Sequence
  Description of Artificial Sequence: Synthetic oligonucleotide
caguuuggcucucugaccu

SEQ ID NO: 1293561 - RNA, 19 nt, Artificial Sequence
  Description of Artificial Sequence: Synthetic oligonucleotide
caguaaaggaaccugcuuu

SEQ ID NO: 1293562 - RNA, 19 nt, Artificial Sequence
  Description of Artificial Sequence: Synthetic oligonucleotide
auggccgggcguccauugg

SEQ ID NO: 1293563 - RNA, 19 nt, Artificial Sequence
  Description of Artificial Sequence: Synthetic oligonucleotide
uucccagccucggaucacc

SEQ ID NO: 1293564 - RNA, 19 nt, Artificial Sequence
  Description of Artificial Sequence: Synthetic oligonucleotide
ucuggccgcgcuucgggaa

SEQ ID NO: 1293565 - RNA, 19 nt, Artificial Sequence
  Description of Artificial Sequence: Synthetic oligonucleotide
gcggcguggagccggagcg

SEQ ID NO: 1293566 - RNA, 19 nt, Artificial Sequence
  Description of Artificial Sequence: Synthetic oligonucleotide
cugaagcugugaugaccag

SEQ ID NO: 1293567 - RNA, 19 nt, Artificial Sequence
  Description of Artificial Sequence: Synthetic oligonucleotide
cuucgggaaggugcgcccg

SEQ ID NO: 1293568 - RNA, 19 nt, Artificial Sequence
  Description of Artificial Sequence: Synthetic oligonucleotide
ugccuagcauaaacuuaaa

SEQ ID NO: 1293569 - RNA, 19 nt, Artificial Sequence
  Description of Artificial Sequence: Synthetic oligonucleotide
cauucccguguagugcacc

SEQ ID NO: 1293570 - RNA, 19 nt, Artificial Sequence
  Description of Artificial Sequence: Synthetic oligonucleotide
aaggcucgcucccuuccuu

SEQ ID NO: 1293571 - RNA, 19 nt, Artificial Sequence
  Description of Artificial Sequence: Synthetic oligonucleotide
cuguuaauacuugaccaua

SEQ ID NO: 1293572 - RNA, 19 nt, Artificial Sequence
  Description of Artificial Sequence: Synthetic oligonucleotide
uuggcggggaggagaggac

SEQ ID NO: 1293573 - RNA, 19 nt, Artificial Sequence
  Description of Artificial Sequence: Synthetic oligonucleotide
cugcacucccauggcagcg

SEQ ID NO: 1293574 - RNA, 19 nt, Artificial Sequence
  Description of Artificial Sequence: Synthetic oligonucleotide
uucgggaaggugcgcccgu

SEQ ID NO: 1293575 - RNA, 19 nt, Artificial Sequence
  Description of Artificial Sequence: Synthetic oligonucleotide
gaccuggcggcuguucagc

SEQ ID NO: 1293576 - RNA, 19 nt, Artificial Sequence
  Description of Artificial Sequence: Synthetic oligonucleotide
aggggacaaaagccuuucu

SEQ ID NO: 1293577 - RNA, 19 nt, Artificial Sequence
  Description of Artificial Sequence: Synthetic oligonucleotide
gguggugagucuacaaaca

SEQ ID NO: 1293578 - RNA, 19 nt, Artificial Sequence
  Description of Artificial Sequence: Synthetic oligonucleotide
gguguccgaagcaaagcug

SEQ ID NO: 1293579 - RNA, 19 nt, Artificial Sequence
  Description of Artificial Sequence: Synthetic oligonucleotide
ucgucccucggcgugucgc

SEQ ID NO: 1293580 - RNA, 19 nt, Artificial Sequence
  Description of Artificial Sequence: Synthetic oligonucleotide
gagguaccagauccuucca

SEQ ID NO: 1293581 - RNA, 19 nt, Artificial Sequence
  Description of Artificial Sequence: Synthetic oligonucleotide
uucgucccucggcgugucg

SEQ ID NO: 1293582 - RNA, 19 nt, Artificial Sequence
  Description of Artificial Sequence: Synthetic oligonucleotide
caaagaguagugggacauc

SEQ ID NO: 1293583 - RNA, 19 nt, Artificial Sequence
  Description of Artificial Sequence: Synthetic oligonucleotide
ccaaaucacuacacaggac

SEQ ID NO: 1293584 - RNA, 19 nt, Artificial Sequence
  Description of Artificial Sequence: Synthetic oligonucleotide
agcuccacauggauucaug

SEQ ID NO: 1293585 - RNA, 19 nt, Artificial Sequence
  Description of Artificial Sequence: Synthetic oligonucleotide
aagccgagauuagcagaga

SEQ ID NO: 1293586 - RNA, 19 nt, Artificial Sequence
  Description of Artificial Sequence: Synthetic oligonucleotide
caggggacaaaagccuuuc

SEQ ID NO: 1293587 - RNA, 19 nt, Artificial Sequence
  Description of Artificial Sequence: Synthetic oligonucleotide
aagcuccacauggauucau

SEQ ID NO: 1293588 - RNA, 19 nt, Artificial Sequence
  Description of Artificial Sequence: Synthetic oligonucleotide
gcuauggcuuugcagcaca

SEQ ID NO: 1293589 - RNA, 19 nt, Artificial Sequence
  Description of Artificial Sequence: Synthetic oligonucleotide
uucagucggguaggugucu

SEQ ID NO: 1293590 - RNA, 19 nt, Artificial Sequence
  Description of Artificial Sequence: Synthetic oligonucleotide
acgguuucagaagguggga

SEQ ID NO: 1293591 - RNA, 19 nt, Artificial Sequence
  Description of Artificial Sequence: Synthetic oligonucleotide
guuuggguagggauuucaa

SEQ ID NO: 1293592 - RNA, 19 nt, Artificial Sequence
  Description of Artificial Sequence: Synthetic oligonucleotide
ccgcgcuucgggaaggugc

SEQ ID NO: 1293593 - RNA, 19 nt, Artificial Sequence
  Description of Artificial Sequence: Synthetic oligonucleotide
gaaggugggaggaccguua

SEQ ID NO: 1293594 - RNA, 19 nt, Artificial Sequence
  Description of Artificial Sequence: Synthetic oligonucleotide
gugagucuacaaacagcac

SEQ ID NO: 1293595 - RNA, 19 nt, Artificial Sequence
  Description of Artificial Sequence: Synthetic oligonucleotide
cauggcagcggcggcguug

SEQ ID NO: 1293596 - RNA, 19 nt, Artificial Sequence
  Description of Artificial Sequence: Synthetic oligonucleotide
cuccauuggaaaccuagau

SEQ ID NO: 1293597 - RNA, 19 nt, Artificial Sequence
  Description of Artificial Sequence: Synthetic oligonucleotide
gggaggaccguuagaagca

SEQ ID NO: 1293598 - RNA, 19 nt, Artificial Sequence
  Description of Artificial Sequence: Synthetic oligonucleotide
cucaaggauuuguagugau

SEQ ID NO: 1293599 - RNA, 19 nt, Artificial Sequence
  Description of Artificial Sequence: Synthetic oligonucleotide
ggaggaggccacuucuguc

SEQ ID NO: 1293600 - RNA, 19 nt, Artificial Sequence
  Description of Artificial Sequence: Synthetic oligonucleotide
gcguccauuggguggugag

SEQ ID NO: 1293601 - RNA, 19 nt, Artificial Sequence
  Description of Artificial Sequence: Synthetic oligonucleotide
guuucugucccgagaggaa

SEQ ID NO: 1293602 - RNA, 19 nt, Artificial Sequence
  Description of Artificial Sequence: Synthetic oligonucleotide
ucccucggcgugucgccug

SEQ ID NO: 1293603 - RNA, 19 nt, Artificial Sequence
  Description of Artificial Sequence: Synthetic oligonucleotide
cuucaagcauucccgugua

SEQ ID NO: 1293604 - RNA, 19 nt, Artificial Sequence
  Description of Artificial Sequence: Synthetic oligonucleotide
uagugauggccgggcgucc

SEQ ID NO: 1293605 - RNA, 19 nt, Artificial Sequence
  Description of Artificial Sequence: Synthetic oligonucleotide
cucggcgugucgccugcgc

SEQ ID NO: 1293606 - RNA, 19 nt, Artificial Sequence
  Description of Artificial Sequence: Synthetic oligonucleotide
ggagauugucaguuuggcu

SEQ ID NO: 1293607 - RNA, 19 nt, Artificial Sequence
  Description of Artificial Sequence: Synthetic oligonucleotide
ggauaguuacaagauuaua

SEQ ID NO: 1293608 - RNA, 19 nt, Artificial Sequence
  Description of Artificial Sequence: Synthetic oligonucleotide
aguuuggcucucugaccua

SEQ ID NO: 1293609 - RNA, 19 nt, Artificial Sequence
  Description of Artificial Sequence: Synthetic oligonucleotide
ugcacccgucuggagguac

SEQ ID NO: 1293610 - RNA, 19 nt, Artificial Sequence
  Description of Artificial Sequence: Synthetic oligonucleotide
ucagucggguaggugucua

SEQ ID NO: 1293611 - RNA, 19 nt, Artificial Sequence
  Description of Artificial Sequence: Synthetic oligonucleotide
ccaggaagccgagauuagc

SEQ ID NO: 1293612 - RNA, 19 nt, Artificial Sequence
  Description of Artificial Sequence: Synthetic oligonucleotide
ccgggcguccauugggugg

SEQ ID NO: 1293613 - RNA, 19 nt, Artificial Sequence
  Description of Artificial Sequence: Synthetic oligonucleotide
ggcuuguuucugucccgag

SEQ ID NO: 1293614 - RNA, 19 nt, Artificial Sequence
  Description of Artificial Sequence: Synthetic oligonucleotide
uggcauaguuuaggucaac

SEQ ID NO: 1293615 - RNA, 19 nt, Artificial Sequence
  Description of Artificial Sequence: Synthetic oligonucleotide
gcuucgggaaggugcgccc

SEQ ID NO: 1293616 - RNA, 19 nt, Artificial Sequence
  Description of Artificial Sequence: Synthetic oligonucleotide
agucggguaggugucuaua

SEQ ID NO: 1293617 - RNA, 19 nt, Artificial Sequence
  Description of Artificial Sequence: Synthetic oligonucleotide
ccaauucaguuuggguagg

SEQ ID NO: 1293618 - RNA, 19 nt, Artificial Sequence
  Description of Artificial Sequence: Synthetic oligonucleotide
uucccguguagugcaccac

SEQ ID NO: 1293619 - RNA, 19 nt, Artificial Sequence
  Description of Artificial Sequence: Synthetic oligonucleotide
cgagauuagcagagagagc

SEQ ID NO: 1293620 - RNA, 19 nt, Artificial Sequence
  Description of Artificial Sequence: Synthetic oligonucleotide
ggugggaugaugccugggu

SEQ ID NO: 1293621 - RNA, 19 nt, Artificial Sequence
  Description of Artificial Sequence: Synthetic oligonucleotide
ggauucaugugcacccguc

SEQ ID NO: 1293622 - RNA, 19 nt, Artificial Sequence
  Description of Artificial Sequence: Synthetic oligonucleotide
ggugcgcccgucuccagga

SEQ ID NO: 1293623 - RNA, 19 nt, Artificial Sequence
  Description of Artificial Sequence: Synthetic oligonucleotide
agugcaccacgcaggucug

SEQ ID NO: 1293624 - RNA, 19 nt, Artificial Sequence
  Description of Artificial Sequence: Synthetic oligonucleotide
cgcgcuucgggaaggugcg

SEQ ID NO: 1293625 - RNA, 19 nt, Artificial Sequence
  Description of Artificial Sequence: Synthetic oligonucleotide
ggagaggacgcgggcggcg

SEQ ID NO: 1293626 - RNA, 19 nt, Artificial Sequence
  Description of Artificial Sequence: Synthetic oligonucleotide
gcuugccuagcauaaacuu

SEQ ID NO: 1293627 - RNA, 19 nt, Artificial Sequence
  Description of Artificial Sequence: Synthetic oligonucleotide
acgcaggucuggccgcgcu

SEQ ID NO: 1293628 - RNA, 19 nt, Artificial Sequence
  Description of Artificial Sequence: Synthetic oligonucleotide
cgcauauguagugcagagg

SEQ ID NO: 1293629 - RNA, 19 nt, Artificial Sequence
  Description of Artificial Sequence: Synthetic oligonucleotide
gccgagauuagcagagaga

SEQ ID NO: 1293630 - RNA, 19 nt, Artificial Sequence
  Description of Artificial Sequence: Synthetic oligonucleotide
cccgagaggaaucaaauuu

SEQ ID NO: 1293631 - RNA, 19 nt, Artificial Sequence
  Description of Artificial Sequence: Synthetic oligonucleotide
cuucccagccucggaucac

SEQ ID NO: 1293632 - RNA, 19 nt, Artificial Sequence
  Description of Artificial Sequence: Synthetic oligonucleotide
ggaccucccucacuggaaa

SEQ ID NO: 1293633 - RNA, 19 nt, Artificial Sequence
  Description of Artificial Sequence: Synthetic oligonucleotide
ggucuccaccugcacuccc

SEQ ID NO: 1293634 - RNA, 19 nt, Artificial Sequence
  Description of Artificial Sequence: Synthetic oligonucleotide
cagcccucaacagcaucuc

SEQ ID NO: 1293635 - RNA, 19 nt, Artificial Sequence
  Description of Artificial Sequence: Synthetic oligonucleotide
gugacggaacacauucagu

SEQ ID NO: 1293636 - RNA, 19 nt, Artificial Sequence
  Description of Artificial Sequence: Synthetic oligonucleotide
gucccgagaggaaucaaau

SEQ ID NO: 1293637 - RNA, 19 nt, Artificial Sequence
  Description of Artificial Sequence: Synthetic oligonucleotide
ggguaggugucuauacaaa

SEQ ID NO: 1293638 - RNA, 19 nt, Artificial Sequence
  Description of Artificial Sequence: Synthetic oligonucleotide
gucuggccgcgcuucggga

SEQ ID NO: 1293639 - RNA, 19 nt, Artificial Sequence
  Description of Artificial Sequence: Synthetic oligonucleotide
gaggaccguuagaagcaaa

SEQ ID NO: 1293640 - RNA, 19 nt, Artificial Sequence
  Description of Artificial Sequence: Synthetic oligonucleotide
ccuggcggcuguucagcag

SEQ ID NO: 1293641 - RNA, 19 nt, Artificial Sequence
  Description of Artificial Sequence: Synthetic oligonucleotide
gcgacgggcggcguggagc

SEQ ID NO: 1293642 - RNA, 19 nt, Artificial Sequence
  Description of Artificial Sequence: Synthetic oligonucleotide
gcuuuaaaaggcagacggu

SEQ ID NO: 1293643 - RNA, 19 nt, Artificial Sequence
  Description of Artificial Sequence: Synthetic oligonucleotide
ugauggccgggcguccauu

SEQ ID NO: 1293644 - RNA, 19 nt, Artificial Sequence
  Description of Artificial Sequence: Synthetic oligonucleotide
cccgucuccaggagagaug

SEQ ID NO: 1293645 - RNA, 19 nt, Artificial Sequence
  Description of Artificial Sequence: Synthetic oligonucleotide
gcguuggcggggaggagag

SEQ ID NO: 1293646 - RNA, 19 nt, Artificial Sequence
  Description of Artificial Sequence: Synthetic oligonucleotide
uggagccggagcggaccug

SEQ ID NO: 1293647 - RNA, 19 nt, Artificial Sequence
  Description of Artificial Sequence: Synthetic oligonucleotide
caccuucaauuuaaacuuu

SEQ ID NO: 1293648 - RNA, 19 nt, Artificial Sequence
  Description of Artificial Sequence: Synthetic oligonucleotide
gugcgcccgucuccaggag

SEQ ID NO: 1293649 - RNA, 19 nt, Artificial Sequence
  Description of Artificial Sequence: Synthetic oligonucleotide
gcaguaaaggaaccugcuu

SEQ ID NO: 1293650 - RNA, 19 nt, Artificial Sequence
  Description of Artificial Sequence: Synthetic oligonucleotide
cggguaggugucuauacaa

SEQ ID NO: 1293651 - RNA, 19 nt, Artificial Sequence
  Description of Artificial Sequence: Synthetic oligonucleotide
caguuuggguagggauuuc

SEQ ID NO: 1293652 - RNA, 19 nt, Artificial Sequence
  Description of Artificial Sequence: Synthetic oligonucleotide
gucuggggagauugucagu

SEQ ID NO: 1293653 - RNA, 19 nt, Artificial Sequence
  Description of Artificial Sequence: Synthetic oligonucleotide
cgacgggcggcguggagcc

SEQ ID NO: 1293654 - RNA, 19 nt, Artificial Sequence
  Description of Artificial Sequence: Synthetic oligonucleotide
guggagccggagcggaccu

SEQ ID NO: 1293655 - RNA, 19 nt, Artificial Sequence
  Description of Artificial Sequence: Synthetic oligonucleotide
caucgcuugugcuguuaau

SEQ ID NO: 1293656 - RNA, 19 nt, Artificial Sequence
  Description of Artificial Sequence: Synthetic oligonucleotide
gccgggcguccauugggug

SEQ ID NO: 1293657 - RNA, 19 nt, Artificial Sequence
  Description of Artificial Sequence: Synthetic oligonucleotide
ggagcggaccuggcggcug

SEQ ID NO: 1293658 - RNA, 19 nt, Artificial Sequence
  Description of Artificial Sequence: Synthetic oligonucleotide
cacgcaggucuggccgcgc

SEQ ID NO: 1293659 - RNA, 19 nt, Artificial Sequence
  Description of Artificial Sequence: Synthetic oligonucleotide
cagguacuguaguguccaa

SEQ ID NO: 1293660 - RNA, 19 nt, Artificial Sequence
  Description of Artificial Sequence: Synthetic oligonucleotide
ggaggaccguuagaagcaa

SEQ ID NO: 1293661 - RNA, 19 nt, Artificial Sequence
  Description of Artificial Sequence: Synthetic oligonucleotide
gagcggaccuggcggcugu

SEQ ID NO: 1293662 - RNA, 19 nt, Artificial Sequence
  Description of Artificial Sequence: Synthetic oligonucleotide
cacccgucuggagguacca

SEQ ID NO: 1293663 - RNA, 19 nt, Artificial Sequence
  Description of Artificial Sequence: Synthetic oligonucleotide
cgcuucgggaaggugcgcc

SEQ ID NO: 1293664 - RNA, 19 nt, Artificial Sequence
  Description of Artificial Sequence: Synthetic oligonucleotide
gcucggcuucgucccucgg

SEQ ID NO: 1293665 - RNA, 19 nt, Artificial Sequence
  Description of Artificial Sequence: Synthetic oligonucleotide
gcauaaacuuaaagggcuu

SEQ ID NO: 1293666 - RNA, 19 nt, Artificial Sequence
  Description of Artificial Sequence: Synthetic oligonucleotide
ccaucgcuugugcuguuaa

SEQ ID NO: 1293667 - RNA, 19 nt, Artificial Sequence
  Description of Artificial Sequence: Synthetic oligonucleotide
cacauucagucggguaggu

SEQ ID NO: 1293668 - RNA, 19 nt, Artificial Sequence
  Description of Artificial Sequence: Synthetic oligonucleotide
cgucuggagguaccagauc

SEQ ID NO: 1293669 - RNA, 19 nt, Artificial Sequence
  Description of Artificial Sequence: Synthetic oligonucleotide
cugucccgagaggaaucaa

SEQ ID NO: 1293670 - RNA, 19 nt, Artificial Sequence
  Description of Artificial Sequence: Synthetic oligonucleotide
gcauucccguguagugcac

SEQ ID NO: 1293671 - RNA, 19 nt, Artificial Sequence
  Description of Artificial Sequence: Synthetic oligonucleotide
ccauuggguggugagucua

SEQ ID NO: 1293672 - RNA, 19 nt, Artificial Sequence
  Description of Artificial Sequence: Synthetic oligonucleotide
gcagacgguuucagaaggu

SEQ ID NO: 1293673 - RNA, 19 nt, Artificial Sequence
  Description of Artificial Sequence: Synthetic oligonucleotide
cagucggguaggugucuau

SEQ ID NO: 1293674 - RNA, 19 nt, Artificial Sequence
  Description of Artificial Sequence: Synthetic oligonucleotide
gugauggccgggcguccau

SEQ ID NO: 1293675 - RNA, 19 nt, Artificial Sequence
  Description of Artificial Sequence: Synthetic oligonucleotide
ggcguccauugggugguga

SEQ ID NO: 1293676 - RNA, 19 nt, Artificial Sequence
  Description of Artificial Sequence: Synthetic oligonucleotide
ccgucuggagguaccagau

SEQ ID NO: 1293677 - RNA, 19 nt, Artificial Sequence
  Description of Artificial Sequence: Synthetic oligonucleotide
cgcuugugcuguuaauacu

SEQ ID NO: 1293678 - RNA, 19 nt, Artificial Sequence
  Description of Artificial Sequence: Synthetic oligonucleotide
gccgcgcuucgggaaggug

SEQ ID NO: 1293679 - RNA, 19 nt, Artificial Sequence
  Description of Artificial Sequence: Synthetic oligonucleotide
gucccucggcgugucgccu

SEQ ID NO: 1293680 - RNA, 19 nt, Artificial Sequence
  Description of Artificial Sequence: Synthetic oligonucleotide
gcccgucuccaggagagau

SEQ ID NO: 1293681 - RNA, 19 nt, Artificial Sequence
  Description of Artificial Sequence: Synthetic oligonucleotide
agcggaccuggcggcuguu

SEQ ID NO: 1293682 - RNA, 19 nt, Artificial Sequence
  Description of Artificial Sequence: Synthetic oligonucleotide
gcggaccuggcggcuguuc

SEQ ID NO: 1293683 - RNA, 19 nt, Artificial Sequence
  Description of Artificial Sequence: Synthetic oligonucleotide
gcgcuucgggaaggugcgc

SEQ ID NO: 1293684 - RNA, 19 nt, Artificial Sequence
  Description of Artificial Sequence: Synthetic oligonucleotide
ggccgggcguccauugggu

SEQ ID NO: 1293685 - RNA, 19 nt, Artificial Sequence
  Description of Artificial Sequence: Synthetic oligonucleotide
gcguggagccggagcggac

SEQ ID NO: 1293686 - RNA, 19 nt, Artificial Sequence
  Description of Artificial Sequence: Synthetic oligonucleotide
cguuggcggggaggagagg

SEQ ID NO: 1293687 - RNA, 19 nt, Artificial Sequence
  Description of Artificial Sequence: Synthetic oligonucleotide
cggcguggagccggagcgg

SEQ ID NO: 1293688 - RNA, 19 nt, Artificial Sequence
  Description of Artificial Sequence: Synthetic oligonucleotide
gugcacccgucuggaggua

SEQ ID NO: 1293689 - RNA, 19 nt, Artificial Sequence
  Description of Artificial Sequence: Synthetic oligonucleotide
ggaggccacuucugucauu

SEQ ID NO: 1293690 - RNA, 19 nt, Artificial Sequence
  Description of Artificial Sequence: Synthetic oligonucleotide
gggcguccauuggguggug

SEQ ID NO: 1293691 - RNA, 19 nt, Artificial Sequence
  Description of Artificial Sequence: Synthetic oligonucleotide
cguccauuggguggugagu

SEQ ID NO: 1293692 - RNA, 19 nt, Artificial Sequence
  Description of Artificial Sequence: Synthetic oligonucleotide
cccaucgcuugugcuguua

SEQ ID NO: 1293693 - RNA, 19 nt, Artificial Sequence
  Description of Artificial Sequence: Synthetic oligonucleotide
cgcgacgggcggcguggag

SEQ ID NO: 1293694 - RNA, 19 nt, Artificial Sequence
  Description of Artificial Sequence: Synthetic oligonucleotide
cgggcguccauuggguggu

SEQ ID NO: 1293695 - RNA, 19 nt, Artificial Sequence
  Description of Artificial Sequence: Synthetic oligonucleotide
gcgcgacgggcggcgugga

SEQ ID NO: 1293696 - RNA, 19 nt, Artificial Sequence
  Description of Artificial Sequence: Synthetic oligonucleotide
cggcuucgucccucggcgu

SEQ ID NO: 1293697 - RNA, 19 nt, Artificial Sequence
  Description of Artificial Sequence: Synthetic oligonucleotide
cgcccgucuccaggagaga

SEQ ID NO: 1293698 - RNA, 19 nt, Artificial Sequence
  Description of Artificial Sequence: Synthetic oligonucleotide
cgcaggucuggccgcgcuu

SEQ ID NO: 1293699 - RNA, 19 nt, Artificial Sequence
  Description of Artificial Sequence: Synthetic oligonucleotide
uuugauauggcaaacauaa

SEQ ID NO: 1293700 - RNA, 19 nt, Artificial Sequence
  Description of Artificial Sequence: Synthetic oligonucleotide
uauuagaggagaauucugg

SEQ ID NO: 1293701 - RNA, 19 nt, Artificial Sequence
  Description of Artificial Sequence: Synthetic oligonucleotide
ucuaagauggcugauaucu

SEQ ID NO: 1293702 - RNA, 19 nt, Artificial Sequence
  Description of Artificial Sequence: Synthetic oligonucleotide
guuuucuugagccaauucg

SEQ ID NO: 1293703 - RNA, 19 nt, Artificial Sequence
  Description of Artificial Sequence: Synthetic oligonucleotide
aauucgguuccucucuacc

SEQ ID NO: 1293704 - RNA, 19 nt, Artificial Sequence
  Description of Artificial Sequence: Synthetic oligonucleotide
auggcugauaucuaguagg

SEQ ID NO: 1293705 - RNA, 19 nt, Artificial Sequence
  Description of Artificial Sequence: Synthetic oligonucleotide
uuuaucugcacuaccaagu

SEQ ID NO: 1293706 - RNA, 19 nt, Artificial Sequence
  Description of Artificial Sequence: Synthetic oligonucleotide
ucuugugagguuuagcuug

SEQ ID NO: 1293707 - RNA, 19 nt, Artificial Sequence
  Description of Artificial Sequence: Synthetic oligonucleotide
uauccuacgguaaaaguac

SEQ ID NO: 1293708 - RNA, 19 nt, Artificial Sequence
  Description of Artificial Sequence: Synthetic oligonucleotide
auucguugcucguagggcc

SEQ ID NO: 1293709 - RNA, 19 nt, Artificial Sequence
  Description of Artificial Sequence: Synthetic oligonucleotide
ucuaucaacugguucauca

SEQ ID NO: 1293710 - RNA, 19 nt, Artificial Sequence
  Description of Artificial Sequence: Synthetic oligonucleotide
uggcauaucaauagaaaca

SEQ ID NO: 1293711 - RNA, 19 nt, Artificial Sequence
  Description of Artificial Sequence: Synthetic oligonucleotide
uagaggagaauucugggug

SEQ ID NO: 1293712 - RNA, 19 nt, Artificial Sequence
  Description of Artificial Sequence: Synthetic oligonucleotide
uuagcuugguauccuacgg

SEQ ID NO: 1293713 - RNA, 19 nt, Artificial Sequence
  Description of Artificial Sequence: Synthetic oligonucleotide
uuuagcuugguauccuacg

SEQ ID NO: 1293714 - RNA, 19 nt, Artificial Sequence
  Description of Artificial Sequence: Synthetic oligonucleotide
aucucaaucaugaagucac

SEQ ID NO: 1293715 - RNA, 19 nt, Artificial Sequence
  Description of Artificial Sequence: Synthetic oligonucleotide
aaaaccggaagacaucacu

SEQ ID NO: 1293716 - RNA, 19 nt, Artificial Sequence
  Description of Artificial Sequence: Synthetic oligonucleotide
aaauaacucguacauucca

SEQ ID NO: 1293717 - RNA, 19 nt, Artificial Sequence
  Description of Artificial Sequence: Synthetic oligonucleotide
uucauaggcgaucagcuca

SEQ ID NO: 1293718 - RNA, 19 nt, Artificial Sequence
  Description of Artificial Sequence: Synthetic oligonucleotide
uaugauucguugcucguag

SEQ ID NO: 1293719 - RNA, 19 nt, Artificial Sequence
  Description of Artificial Sequence: Synthetic oligonucleotide
cuacaauuuccucaggagg

SEQ ID NO: 1293720 - RNA, 19 nt, Artificial Sequence
  Description of Artificial Sequence: Synthetic oligonucleotide
ugaagauccaguccagugc

SEQ ID NO: 1293721 - RNA, 19 nt, Artificial Sequence
  Description of Artificial Sequence: Synthetic oligonucleotide
cuucucaucaauucauagg

SEQ ID NO: 1293722 - RNA, 19 nt, Artificial Sequence
  Description of Artificial Sequence: Synthetic oligonucleotide
aacuuagucaucugugugu

SEQ ID NO: 1293723 - RNA, 19 nt, Artificial Sequence
  Description of Artificial Sequence: Synthetic oligonucleotide
aacucguacauuccagauc

SEQ ID NO: 1293724 - RNA, 19 nt, Artificial Sequence
  Description of Artificial Sequence: Synthetic oligonucleotide
guacauuccagauccaucc

SEQ ID NO: 1293725 - RNA, 19 nt, Artificial Sequence
  Description of Artificial Sequence: Synthetic oligonucleotide
uuguagaucacccaccguc

SEQ ID NO: 1293726 - RNA, 19 nt, Artificial Sequence
  Description of Artificial Sequence: Synthetic oligonucleotide
uguccaauccaguagcacc

SEQ ID NO: 1293727 - RNA, 19 nt, Artificial Sequence
  Description of Artificial Sequence: Synthetic oligonucleotide
aauucauaggcgaucagcu

SEQ ID NO: 1293728 - RNA, 19 nt, Artificial Sequence
  Description of Artificial Sequence: Synthetic oligonucleotide
uguguguugaaguccugcg

SEQ ID NO: 1293729 - RNA, 19 nt, Artificial Sequence
  Description of Artificial Sequence: Synthetic oligonucleotide
ugcguuggaucuaacggcg

SEQ ID NO: 1293730 - RNA, 19 nt, Artificial Sequence
  Description of Artificial Sequence: Synthetic oligonucleotide
aacaucaaauuuucuggga

SEQ ID NO: 1293731 - RNA, 19 nt, Artificial Sequence
  Description of Artificial Sequence: Synthetic oligonucleotide
uuggccucggacaugaugu

SEQ ID NO: 1293732 - RNA, 19 nt, Artificial Sequence
  Description of Artificial Sequence: Synthetic oligonucleotide
ucucaucaauucauaggcg

SEQ ID NO: 1293733 - RNA, 19 nt, Artificial Sequence
  Description of Artificial Sequence: Synthetic oligonucleotide
acgguaaaaguacauauau

SEQ ID NO: 1293734 - RNA, 19 nt, Artificial Sequence
  Description of Artificial Sequence: Synthetic oligonucleotide
uguagaucacccaccgucc

SEQ ID NO: 1293735 - RNA, 19 nt, Artificial Sequence
  Description of Artificial Sequence: Synthetic oligonucleotide
uguauggcuucuucuagcc

SEQ ID NO: 1293736 - RNA, 19 nt, Artificial Sequence
  Description of Artificial Sequence: Synthetic oligonucleotide
aggucuggcauaucaauag

SEQ ID NO: 1293737 - RNA, 19 nt, Artificial Sequence
  Description of Artificial Sequence: Synthetic oligonucleotide
uugcgcugaaaucccaugg

SEQ ID NO: 1293738 - RNA, 19 nt, Artificial Sequence
  Description of Artificial Sequence: Synthetic oligonucleotide
aaugagcucggauuucaca

SEQ ID NO: 1293739 - RNA, 19 nt, Artificial Sequence
  Description of Artificial Sequence: Synthetic oligonucleotide
ucuugagccaauucgguuc

SEQ ID NO: 1293740 - RNA, 19 nt, Artificial Sequence
  Description of Artificial Sequence: Synthetic oligonucleotide
gaguagucaaauauccuag

SEQ ID NO: 1293741 - RNA, 19 nt, Artificial Sequence
  Description of Artificial Sequence: Synthetic oligonucleotide
aaauuuucugggaacccag

SEQ ID NO: 1293742 - RNA, 19 nt, Artificial Sequence
  Description of Artificial Sequence: Synthetic oligonucleotide
uuagaggagaauucugggu

SEQ ID NO: 1293743 - RNA, 19 nt, Artificial Sequence
  Description of Artificial Sequence: Synthetic oligonucleotide
gauggcugauaucuaguag

SEQ ID NO: 1293744 - RNA, 19 nt, Artificial Sequence
  Description of Artificial Sequence: Synthetic oligonucleotide
agaggagaauucugggugg

SEQ ID NO: 1293745 - RNA, 19 nt, Artificial Sequence
  Description of Artificial Sequence: Synthetic oligonucleotide
aaccggaagacaucacuug

SEQ ID NO: 1293746 - RNA, 19 nt, Artificial Sequence
  Description of Artificial Sequence: Synthetic oligonucleotide
augcaaauaacucguacau

SEQ ID NO: 1293747 - RNA, 19 nt, Artificial Sequence
  Description of Artificial Sequence: Synthetic oligonucleotide
accagauugaccaagugca

SEQ ID NO: 1293748 - RNA, 19 nt, Artificial Sequence
  Description of Artificial Sequence: Synthetic oligonucleotide
agauugaccaagugcaaga

SEQ ID NO: 1293749 - RNA, 19 nt, Artificial Sequence
  Description of Artificial Sequence: Synthetic oligonucleotide
cuugaacaugcauggagag

SEQ ID NO: 1293750 - RNA, 19 nt, Artificial Sequence
  Description of Artificial Sequence: Synthetic oligonucleotide
gguuaugauucguugcucg

SEQ ID NO: 1293751 - RNA, 19 nt, Artificial Sequence
  Description of Artificial Sequence: Synthetic oligonucleotide
accggaagacaucacuugg

SEQ ID NO: 1293752 - RNA, 19 nt, Artificial Sequence
  Description of Artificial Sequence: Synthetic oligonucleotide
ugagguuuagcuugguauc

SEQ ID NO: 1293753 - RNA, 19 nt, Artificial Sequence
  Description of Artificial Sequence: Synthetic oligonucleotide
uccagguuaugauucguug

SEQ ID NO: 1293754 - RNA, 19 nt, Artificial Sequence
  Description of Artificial Sequence: Synthetic oligonucleotide
ucuucgauuugcuucugcu

SEQ ID NO: 1293755 - RNA, 19 nt, Artificial Sequence
  Description of Artificial Sequence: Synthetic oligonucleotide
cuauuagaggagaauucug

SEQ ID NO: 1293756 - RNA, 19 nt, Artificial Sequence
  Description of Artificial Sequence: Synthetic oligonucleotide
cacuaccaaguauucaggg

SEQ ID NO: 1293757 - RNA, 19 nt, Artificial Sequence
  Description of Artificial Sequence: Synthetic oligonucleotide
caauucauaggcgaucagc

SEQ ID NO: 1293758 - RNA, 19 nt, Artificial Sequence
  Description of Artificial Sequence: Synthetic oligonucleotide
agauguucccaugugacug

SEQ ID NO: 1293759 - RNA, 19 nt, Artificial Sequence
  Description of Artificial Sequence: Synthetic oligonucleotide
auaucuaguaggucuggca

SEQ ID NO: 1293760 - RNA, 19 nt, Artificial Sequence
  Description of Artificial Sequence: Synthetic oligonucleotide
caucaggcgaucuuuugag

SEQ ID NO: 1293761 - RNA, 19 nt, Artificial Sequence
  Description of Artificial Sequence: Synthetic oligonucleotide
auucauaggcgaucagcuc

SEQ ID NO: 1293762 - RNA, 19 nt, Artificial Sequence
  Description of Artificial Sequence: Synthetic oligonucleotide
ucuaacggcgaguagucaa

SEQ ID NO: 1293763 - RNA, 19 nt, Artificial Sequence
  Description of Artificial Sequence: Synthetic oligonucleotide
gacaugauguuugcauugg

SEQ ID NO: 1293764 - RNA, 19 nt, Artificial Sequence
  Description of Artificial Sequence: Synthetic oligonucleotide
uccugcguuggaucuaacg

SEQ ID NO: 1293765 - RNA, 19 nt, Artificial Sequence
  Description of Artificial Sequence: Synthetic oligonucleotide
ucuaccagauugaccaagu

SEQ ID NO: 1293766 - RNA, 19 nt, Artificial Sequence
  Description of Artificial Sequence: Synthetic oligonucleotide
ugucuauuagaggagaauu

SEQ ID NO: 1293767 - RNA, 19 nt, Artificial Sequence
  Description of Artificial Sequence: Synthetic oligonucleotide
acuaccaaguauucaggga

SEQ ID NO: 1293768 - RNA, 19 nt, Artificial Sequence
  Description of Artificial Sequence: Synthetic oligonucleotide
uucccuucucaucaauuca

SEQ ID NO: 1293769 - RNA, 19 nt, Artificial Sequence
  Description of Artificial Sequence: Synthetic oligonucleotide
gaagacaucacuuggguuu

SEQ ID NO: 1293770 - RNA, 19 nt, Artificial Sequence
  Description of Artificial Sequence: Synthetic oligonucleotide
ucggacaugauguuugcau

SEQ ID NO: 1293771 - RNA, 19 nt, Artificial Sequence
  Description of Artificial Sequence: Synthetic oligonucleotide
ugaacuucuuuaucugcac

SEQ ID NO: 1293772 - RNA, 19 nt, Artificial Sequence
  Description of Artificial Sequence: Synthetic oligonucleotide
ucaggcgaucuuuugaguc

SEQ ID NO: 1293773 - RNA, 19 nt, Artificial Sequence
  Description of Artificial Sequence: Synthetic oligonucleotide
cugcguuggaucuaacggc

SEQ ID NO: 1293774 - RNA, 19 nt, Artificial Sequence
  Description of Artificial Sequence: Synthetic oligonucleotide
cucaucaauucauaggcga

SEQ ID NO: 1293775 - RNA, 19 nt, Artificial Sequence
  Description of Artificial Sequence: Synthetic oligonucleotide
uaauggccacucauuguag

SEQ ID NO: 1293776 - RNA, 19 nt, Artificial Sequence
  Description of Artificial Sequence: Synthetic oligonucleotide
uguugaaguccugcguugg

SEQ ID NO: 1293777 - RNA, 19 nt, Artificial Sequence
  Description of Artificial Sequence: Synthetic oligonucleotide
uacgguaaaaguacauaua

SEQ ID NO: 1293778 - RNA, 19 nt, Artificial Sequence
  Description of Artificial Sequence: Synthetic oligonucleotide
ucaucaauucauaggcgau

SEQ ID NO: 1293779 - RNA, 19 nt, Artificial Sequence
  Description of Artificial Sequence: Synthetic oligonucleotide
cugauaucuaguaggucug

SEQ ID NO: 1293780 - RNA, 19 nt, Artificial Sequence
  Description of Artificial Sequence: Synthetic oligonucleotide
uuucgggucugacagcacu

SEQ ID NO: 1293781 - RNA, 19 nt, Artificial Sequence
  Description of Artificial Sequence: Synthetic oligonucleotide
acggcgaguagucaaauau

SEQ ID NO: 1293782 - RNA, 19 nt, Artificial Sequence
  Description of Artificial Sequence: Synthetic oligonucleotide
acgcacaagcucuggaagg

SEQ ID NO: 1293783 - RNA, 19 nt, Artificial Sequence
  Description of Artificial Sequence: Synthetic oligonucleotide
gauuucacaggaggcuucg

SEQ ID NO: 1293784 - RNA, 19 nt, Artificial Sequence
  Description of Artificial Sequence: Synthetic oligonucleotide
aggcuuccaaaggaaagcc

SEQ ID NO: 1293785 - RNA, 19 nt, Artificial Sequence
  Description of Artificial Sequence: Synthetic oligonucleotide
ugcaucagauaguccaccc

SEQ ID NO: 1293786 - RNA, 19 nt, Artificial Sequence
  Description of Artificial Sequence: Synthetic oligonucleotide
caucagauaguccacccuc

SEQ ID NO: 1293787 - RNA, 19 nt, Artificial Sequence
  Description of Artificial Sequence: Synthetic oligonucleotide
ugccugauugcgcugaaau

SEQ ID NO: 1293788 - RNA, 19 nt, Artificial Sequence
  Description of Artificial Sequence: Synthetic oligonucleotide
uguugucuauuagaggaga

SEQ ID NO: 1293789 - RNA, 19 nt, Artificial Sequence
  Description of Artificial Sequence: Synthetic oligonucleotide
cugauugcgcugaaauccc

SEQ ID NO: 1293790 - RNA, 19 nt, Artificial Sequence
  Description of Artificial Sequence: Synthetic oligonucleotide
ucacggaggauucaucaau

SEQ ID NO: 1293791 - RNA, 19 nt, Artificial Sequence
  Description of Artificial Sequence: Synthetic oligonucleotide
uccggcaggcuuccaaagg

SEQ ID NO: 1293792 - RNA, 19 nt, Artificial Sequence
  Description of Artificial Sequence: Synthetic oligonucleotide
uggaggugaugauagcuac

SEQ ID NO: 1293793 - RNA, 19 nt, Artificial Sequence
  Description of Artificial Sequence: Synthetic oligonucleotide
caugugcacgauaauccag

SEQ ID NO: 1293794 - RNA, 19 nt, Artificial Sequence
  Description of Artificial Sequence: Synthetic oligonucleotide
ugauaucuaguaggucugg

SEQ ID NO: 1293795 - RNA, 19 nt, Artificial Sequence
  Description of Artificial Sequence: Synthetic oligonucleotide
gauucguugcucguagggc

SEQ ID NO: 1293796 - RNA, 19 nt, Artificial Sequence
  Description of Artificial Sequence: Synthetic oligonucleotide
cuaccaaguauucagggaa

SEQ ID NO: 1293797 - RNA, 19 nt, Artificial Sequence
  Description of Artificial Sequence: Synthetic oligonucleotide
auggagagaucccauucug

SEQ ID NO: 1293798 - RNA, 19 nt, Artificial Sequence
  Description of Artificial Sequence: Synthetic oligonucleotide
cuucuuuaucugcacuacc

SEQ ID NO: 1293799 - RNA, 19 nt, Artificial Sequence
  Description of Artificial Sequence: Synthetic oligonucleotide
ucaaugagcucggauuuca

SEQ ID NO: 1293800 - RNA, 19 nt, Artificial Sequence
  Description of Artificial Sequence: Synthetic oligonucleotide
aaacuaccugggcaucuug

SEQ ID NO: 1293801 - RNA, 19 nt, Artificial Sequence
  Description of Artificial Sequence: Synthetic oligonucleotide
aucaauucauaggcgauca

SEQ ID NO: 1293802 - RNA, 19 nt, Artificial Sequence
  Description of Artificial Sequence: Synthetic oligonucleotide
gcuacaauuuccucaggag

SEQ ID NO: 1293803 - RNA, 19 nt, Artificial Sequence
  Description of Artificial Sequence: Synthetic oligonucleotide
ucgauuugcuucugcuucc

SEQ ID NO: 1293804 - RNA, 19 nt, Artificial Sequence
  Description of Artificial Sequence: Synthetic oligonucleotide
ucaauucauaggcgaucag

SEQ ID NO: 1293805 - RNA, 19 nt, Artificial Sequence
  Description of Artificial Sequence: Synthetic oligonucleotide
guagauguucccaugugac

SEQ ID NO: 1293806 - RNA, 19 nt, Artificial Sequence
  Description of Artificial Sequence: Synthetic oligonucleotide
ccugauugcgcugaaaucc

SEQ ID NO: 1293807 - RNA, 19 nt, Artificial Sequence
  Description of Artificial Sequence: Synthetic oligonucleotide
uauggccaaggguucagca

SEQ ID NO: 1293808 - RNA, 19 nt, Artificial Sequence
  Description of Artificial Sequence: Synthetic oligonucleotide
ugcgcugaaaucccaugga

SEQ ID NO: 1293809 - RNA, 19 nt, Artificial Sequence
  Description of Artificial Sequence: Synthetic oligonucleotide
auauccuagggagguuucc

SEQ ID NO: 1293810 - RNA, 19 nt, Artificial Sequence
  Description of Artificial Sequence: Synthetic oligonucleotide
agccaauucgguuccucuc

SEQ ID NO: 1293811 - RNA, 19 nt, Artificial Sequence
  Description of Artificial Sequence: Synthetic oligonucleotide
uggcugauaucuaguaggu

SEQ ID NO: 1293812 - RNA, 19 nt, Artificial Sequence
  Description of Artificial Sequence: Synthetic oligonucleotide
uguagcggaccuuucgggu

SEQ ID NO: 1293813 - RNA, 19 nt, Artificial Sequence
  Description of Artificial Sequence: Synthetic oligonucleotide
ugacugaugaaugcaaaua

SEQ ID NO: 1293814 - RNA, 19 nt, Artificial Sequence
  Description of Artificial Sequence: Synthetic oligonucleotide
auucgguuccucucuacca

SEQ ID NO: 1293815 - RNA, 19 nt, Artificial Sequence
  Description of Artificial Sequence: Synthetic oligonucleotide
cugaugaaugcaaauaacu

SEQ ID NO: 1293816 - RNA, 19 nt, Artificial Sequence
  Description of Artificial Sequence: Synthetic oligonucleotide
ugguauccuacgguaaaag

SEQ ID NO: 1293817 - RNA, 19 nt, Artificial Sequence
  Description of Artificial Sequence: Synthetic oligonucleotide
ccugcguuggaucuaacgg

SEQ ID NO: 1293818 - RNA, 19 nt, Artificial Sequence
  Description of Artificial Sequence: Synthetic oligonucleotide
gaaggggucuucgauuugc

SEQ ID NO: 1293819 - RNA, 19 nt, Artificial Sequence
  Description of Artificial Sequence: Synthetic oligonucleotide
caaaucagguuccuccaug

SEQ ID NO: 1293820 - RNA, 19 nt, Artificial Sequence
  Description of Artificial Sequence: Synthetic oligonucleotide
ucugcacuaccaaguauuc

SEQ ID NO: 1293821 - RNA, 19 nt, Artificial Sequence
  Description of Artificial Sequence: Synthetic oligonucleotide
aacauaauggccacucauu

SEQ ID NO: 1293822 - RNA, 19 nt, Artificial Sequence
  Description of Artificial Sequence: Synthetic oligonucleotide
gauaucuaguaggucuggc

SEQ ID NO: 1293823 - RNA, 19 nt, Artificial Sequence
  Description of Artificial Sequence: Synthetic oligonucleotide
ucuaguaggucuggcauau

SEQ ID NO: 1293824 - RNA, 19 nt, Artificial Sequence
  Description of Artificial Sequence: Synthetic oligonucleotide
guguauggcuucuucuagc

SEQ ID NO: 1293825 - RNA, 19 nt, Artificial Sequence
  Description of Artificial Sequence: Synthetic oligonucleotide
auaggcgaucagcucaucu

SEQ ID NO: 1293826 - RNA, 19 nt, Artificial Sequence
  Description of Artificial Sequence: Synthetic oligonucleotide
guguagcggaccuuucggg

SEQ ID NO: 1293827 - RNA, 19 nt, Artificial Sequence
  Description of Artificial Sequence: Synthetic oligonucleotide
uagcuugguauccuacggu

SEQ ID NO: 1293828 - RNA, 19 nt, Artificial Sequence
  Description of Artificial Sequence: Synthetic oligonucleotide
uaggucuggcauaucaaua

SEQ ID NO: 1293829 - RNA, 19 nt, Artificial Sequence
  Description of Artificial Sequence: Synthetic oligonucleotide
cauccuugacucugggccc

SEQ ID NO: 1293830 - RNA, 19 nt, Artificial Sequence
  Description of Artificial Sequence: Synthetic oligonucleotide
uucgggucugacagcacug

SEQ ID NO: 1293831 - RNA, 19 nt, Artificial Sequence
  Description of Artificial Sequence: Synthetic oligonucleotide
augauucguugcucguagg

SEQ ID NO: 1293832 - RNA, 19 nt, Artificial Sequence
  Description of Artificial Sequence: Synthetic oligonucleotide
uuccucucuaccagauuga

SEQ ID NO: 1293833 - RNA, 19 nt, Artificial Sequence
  Description of Artificial Sequence: Synthetic oligonucleotide
cacgauaauccaguugaag

SEQ ID NO: 1293834 - RNA, 19 nt, Artificial Sequence
  Description of Artificial Sequence: Synthetic oligonucleotide
ggcgaguagucaaauaucc

SEQ ID NO: 1293835 - RNA, 19 nt, Artificial Sequence
  Description of Artificial Sequence: Synthetic oligonucleotide
aaaccggaagacaucacuu

SEQ ID NO: 1293836 - RNA, 19 nt, Artificial Sequence
  Description of Artificial Sequence: Synthetic oligonucleotide
auaucaauagaaacaucaa

SEQ ID NO: 1293837 - RNA, 19 nt, Artificial Sequence
  Description of Artificial Sequence: Synthetic oligonucleotide
gguguauggcuucuucuag

SEQ ID NO: 1293838 - RNA, 19 nt, Artificial Sequence
  Description of Artificial Sequence: Synthetic oligonucleotide
gccuugaacaugcauggag

SEQ ID NO: 1293839 - RNA, 19 nt, Artificial Sequence
  Description of Artificial Sequence: Synthetic oligonucleotide
gucuauuagaggagaauuc

SEQ ID NO: 1293840 - RNA, 19 nt, Artificial Sequence
  Description of Artificial Sequence: Synthetic oligonucleotide
ucuuggcacgcacaagcuc

SEQ ID NO: 1293841 - RNA, 19 nt, Artificial Sequence
  Description of Artificial Sequence: Synthetic oligonucleotide
uaucugcacuaccaaguau

SEQ ID NO: 1293842 - RNA, 19 nt, Artificial Sequence
  Description of Artificial Sequence: Synthetic oligonucleotide
gaucuaacggcgaguaguc

SEQ ID NO: 1293843 - RNA, 19 nt, Artificial Sequence
  Description of Artificial Sequence: Synthetic oligonucleotide
ugugagguuuagcuuggua

SEQ ID NO: 1293844 - RNA, 19 nt, Artificial Sequence
  Description of Artificial Sequence: Synthetic oligonucleotide
ucauaggcgaucagcucau

SEQ ID NO: 1293845 - RNA, 19 nt, Artificial Sequence
  Description of Artificial Sequence: Synthetic oligonucleotide
uggaucuaacggcgaguag

SEQ ID NO: 1293846 - RNA, 19 nt, Artificial Sequence
  Description of Artificial Sequence: Synthetic oligonucleotide
uugucuauuagaggagaau

SEQ ID NO: 1293847 - RNA, 19 nt, Artificial Sequence
  Description of Artificial Sequence: Synthetic oligonucleotide
uccuacgguaaaaguacau

SEQ ID NO: 1293848 - RNA, 19 nt, Artificial Sequence
  Description of Artificial Sequence: Synthetic oligonucleotide
uaggcgaucagcucaucuu

SEQ ID NO: 1293849 - RNA, 19 nt, Artificial Sequence
  Description of Artificial Sequence: Synthetic oligonucleotide
auugaccaagugcaagaaa

SEQ ID NO: 1293850 - RNA, 19 nt, Artificial Sequence
  Description of Artificial Sequence: Synthetic oligonucleotide
auugucugguucagcaaag

SEQ ID NO: 1293851 - RNA, 19 nt, Artificial Sequence
  Description of Artificial Sequence: Synthetic oligonucleotide
gugagguuuagcuugguau

SEQ ID NO: 1293852 - RNA, 19 nt, Artificial Sequence
  Description of Artificial Sequence: Synthetic oligonucleotide
ugauugcgcugaaauccca

SEQ ID NO: 1293853 - RNA, 19 nt, Artificial Sequence
  Description of Artificial Sequence: Synthetic oligonucleotide
agguguauggcuucuucua

SEQ ID NO: 1293854 - RNA, 19 nt, Artificial Sequence
  Description of Artificial Sequence: Synthetic oligonucleotide
cuuuguugguugcugccuc

SEQ ID NO: 1293855 - RNA, 19 nt, Artificial Sequence
  Description of Artificial Sequence: Synthetic oligonucleotide
uucguugcucguagggccu

SEQ ID NO: 1293856 - RNA, 19 nt, Artificial Sequence
  Description of Artificial Sequence: Synthetic oligonucleotide
uccauccuugacucugggc

SEQ ID NO: 1293857 - RNA, 19 nt, Artificial Sequence
  Description of Artificial Sequence: Synthetic oligonucleotide
uuuuacuccugcagacuuu

SEQ ID NO: 1293858 - RNA, 19 nt, Artificial Sequence
  Description of Artificial Sequence: Synthetic oligonucleotide
uauccuagggagguuuccu

SEQ ID NO: 1293859 - RNA, 19 nt, Artificial Sequence
  Description of Artificial Sequence: Synthetic oligonucleotide
uuggaucuaacggcgagua

SEQ ID NO: 1293860 - RNA, 19 nt, Artificial Sequence
  Description of Artificial Sequence: Synthetic oligonucleotide
uuaugauucguugcucgua

SEQ ID NO: 1293861 - RNA, 19 nt, Artificial Sequence
  Description of Artificial Sequence: Synthetic oligonucleotide
guagaucacccaccguccc

SEQ ID NO: 1293862 - RNA, 19 nt, Artificial Sequence
  Description of Artificial Sequence: Synthetic oligonucleotide
cauugucugguucagcaaa

SEQ ID NO: 1293863 - RNA, 19 nt, Artificial Sequence
  Description of Artificial Sequence: Synthetic oligonucleotide
caucaauucauaggcgauc

SEQ ID NO: 1293864 - RNA, 19 nt, Artificial Sequence
  Description of Artificial Sequence: Synthetic oligonucleotide
aacuaccugggcaucuugu

SEQ ID NO: 1293865 - RNA, 19 nt, Artificial Sequence
  Description of Artificial Sequence: Synthetic oligonucleotide
cuacgguaaaaguacauau

SEQ ID NO: 1293866 - RNA, 19 nt, Artificial Sequence
  Description of Artificial Sequence: Synthetic oligonucleotide
acggaggauucaucaaugu

SEQ ID NO: 1293867 - RNA, 19 nt, Artificial Sequence
  Description of Artificial Sequence: Synthetic oligonucleotide
ggaggauucaucaaugucu

SEQ ID NO: 1293868 - RNA, 19 nt, Artificial Sequence
  Description of Artificial Sequence: Synthetic oligonucleotide
uucugggaacccagucaag

SEQ ID NO: 1293869 - RNA, 19 nt, Artificial Sequence
  Description of Artificial Sequence: Synthetic oligonucleotide
uuccagguuaugauucguu

SEQ ID NO: 1293870 - RNA, 19 nt, Artificial Sequence
  Description of Artificial Sequence: Synthetic oligonucleotide
augugcacgauaauccagu

SEQ ID NO: 1293871 - RNA, 19 nt, Artificial Sequence
  Description of Artificial Sequence: Synthetic oligonucleotide
uagcggaccuuucgggucu

SEQ ID NO: 1293872 - RNA, 19 nt, Artificial Sequence
  Description of Artificial Sequence: Synthetic oligonucleotide
ggcacaaacuuugugguca

SEQ ID NO: 1293873 - RNA, 19 nt, Artificial Sequence
  Description of Artificial Sequence: Synthetic oligonucleotide
acauugucugguucagcaa

SEQ ID NO: 1293874 - RNA, 19 nt, Artificial Sequence
  Description of Artificial Sequence: Synthetic oligonucleotide
cuugguauccuacgguaaa

SEQ ID NO: 1293875 - RNA, 19 nt, Artificial Sequence
  Description of Artificial Sequence: Synthetic oligonucleotide
ggcauuguucuccaucuca

SEQ ID NO: 1293876 - RNA, 19 nt, Artificial Sequence
  Description of Artificial Sequence: Synthetic oligonucleotide
agggaaugaggcaaagcga

SEQ ID NO: 1293877 - RNA, 19 nt, Artificial Sequence
  Description of Artificial Sequence: Synthetic oligonucleotide
gaaguccugcguuggaucu

SEQ ID NO: 1293878 - RNA, 19 nt, Artificial Sequence
  Description of Artificial Sequence: Synthetic oligonucleotide
aucaggcgaucuuuugagu

SEQ ID NO: 1293879 - RNA, 19 nt, Artificial Sequence
  Description of Artificial Sequence: Synthetic oligonucleotide
cccaacuuagucaucugug

SEQ ID NO: 1293880 - RNA, 19 nt, Artificial Sequence
  Description of Artificial Sequence: Synthetic oligonucleotide
aacggcgaguagucaaaua

SEQ ID NO: 1293881 - RNA, 19 nt, Artificial Sequence
  Description of Artificial Sequence: Synthetic oligonucleotide
aucuaguaggucuggcaua

SEQ ID NO: 1293882 - RNA, 19 nt, Artificial Sequence
  Description of Artificial Sequence: Synthetic oligonucleotide
cuuagucaucuguguguug

SEQ ID NO: 1293883 - RNA, 19 nt, Artificial Sequence
  Description of Artificial Sequence: Synthetic oligonucleotide
guagcggaccuuucggguc

SEQ ID NO: 1293884 - RNA, 19 nt, Artificial Sequence
  Description of Artificial Sequence: Synthetic oligonucleotide
acuuagucaucuguguguu

SEQ ID NO: 1293885 - RNA, 19 nt, Artificial Sequence
  Description of Artificial Sequence: Synthetic oligonucleotide
aggcgaucagcucaucuuu

SEQ ID NO: 1293886 - RNA, 19 nt, Artificial Sequence
  Description of Artificial Sequence: Synthetic oligonucleotide
ucguacauuccagauccau

SEQ ID NO: 1293887 - RNA, 19 nt, Artificial Sequence
  Description of Artificial Sequence: Synthetic oligonucleotide
caauucgguuccucucuac

SEQ ID NO: 1293888 - RNA, 19 nt, Artificial Sequence
  Description of Artificial Sequence: Synthetic oligonucleotide
cauccacauugucugguuc

SEQ ID NO: 1293889 - RNA, 19 nt, Artificial Sequence
  Description of Artificial Sequence: Synthetic oligonucleotide
guccaauccaguagcacca

SEQ ID NO: 1293890 - RNA, 19 nt, Artificial Sequence
  Description of Artificial Sequence: Synthetic oligonucleotide
caaugagcucggauuucac

SEQ ID NO: 1293891 - RNA, 19 nt, Artificial Sequence
  Description of Artificial Sequence: Synthetic oligonucleotide
ggggacugaugucuggaag

SEQ ID NO: 1293892 - RNA, 19 nt, Artificial Sequence
  Description of Artificial Sequence: Synthetic oligonucleotide
gagaucccauucugcugag

SEQ ID NO: 1293893 - RNA, 19 nt, Artificial Sequence
  Description of Artificial Sequence: Synthetic oligonucleotide
gaaugggaucuuggcacgc

SEQ ID NO: 1293894 - RNA, 19 nt, Artificial Sequence
  Description of Artificial Sequence: Synthetic oligonucleotide
caggcgaucuuuugaguca

SEQ ID NO: 1293895 - RNA, 19 nt, Artificial Sequence
  Description of Artificial Sequence: Synthetic oligonucleotide
ugguucaucaggcgaucuu

SEQ ID NO: 1293896 - RNA, 19 nt, Artificial Sequence
  Description of Artificial Sequence: Synthetic oligonucleotide
cucuaagauggcugauauc

SEQ ID NO: 1293897 - RNA, 19 nt, Artificial Sequence
  Description of Artificial Sequence: Synthetic oligonucleotide
uccucucuaccagauugac

SEQ ID NO: 1293898 - RNA, 19 nt, Artificial Sequence
  Description of Artificial Sequence: Synthetic oligonucleotide
ugugcacgauaauccaguu

SEQ ID NO: 1293899 - RNA, 19 nt, Artificial Sequence
  Description of Artificial Sequence: Synthetic oligonucleotide
gaaugaggcaaagcgagau

SEQ ID NO: 1293900 - RNA, 19 nt, Artificial Sequence
  Description of Artificial Sequence: Synthetic oligonucleotide
caaacauaauggccacuca

SEQ ID NO: 1293901 - RNA, 19 nt, Artificial Sequence
  Description of Artificial Sequence: Synthetic oligonucleotide
ccggaagacaucacuuggg

SEQ ID NO: 1293902 - RNA, 19 nt, Artificial Sequence
  Description of Artificial Sequence: Synthetic oligonucleotide
aucagauaguccacccucu

SEQ ID NO: 1293903 - RNA, 19 nt, Artificial Sequence
  Description of Artificial Sequence: Synthetic oligonucleotide
uggguuuucuugagccaau

SEQ ID NO: 1293904 - RNA, 19 nt, Artificial Sequence
  Description of Artificial Sequence: Synthetic oligonucleotide
gacuuugccugcagggcac

SEQ ID NO: 1293905 - RNA, 19 nt, Artificial Sequence
  Description of Artificial Sequence: Synthetic oligonucleotide
gcucuugcugacaaaggcc

SEQ ID NO: 1293906 - RNA, 19 nt, Artificial Sequence
  Description of Artificial Sequence: Synthetic oligonucleotide
cuaacggcgaguagucaaa

SEQ ID NO: 1293907 - RNA, 19 nt, Artificial Sequence
  Description of Artificial Sequence: Synthetic oligonucleotide
cugaggggucuaucaacug

SEQ ID NO: 1293908 - RNA, 19 nt, Artificial Sequence
  Description of Artificial Sequence: Synthetic oligonucleotide
guuaugauucguugcucgu

SEQ ID NO: 1293909 - RNA, 19 nt, Artificial Sequence
  Description of Artificial Sequence: Synthetic oligonucleotide
gaauucuggguggcucuug

SEQ ID NO: 1293910 - RNA, 19 nt, Artificial Sequence
  Description of Artificial Sequence: Synthetic oligonucleotide
gcgcugaaaucccauggag

SEQ ID NO: 1293911 - RNA, 19 nt, Artificial Sequence
  Description of Artificial Sequence: Synthetic oligonucleotide
gcacuaccaaguauucagg

SEQ ID NO: 1293912 - RNA, 19 nt, Artificial Sequence
  Description of Artificial Sequence: Synthetic oligonucleotide
caugccccaacuuagucau

SEQ ID NO: 1293913 - RNA, 19 nt, Artificial Sequence
  Description of Artificial Sequence: Synthetic oligonucleotide
gggaacccagucaagacca

SEQ ID NO: 1293914 - RNA, 19 nt, Artificial Sequence
  Description of Artificial Sequence: Synthetic oligonucleotide
agguuuagcuugguauccu

SEQ ID NO: 1293915 - RNA, 19 nt, Artificial Sequence
  Description of Artificial Sequence: Synthetic oligonucleotide
ugagccaauucgguuccuc

SEQ ID NO: 1293916 - RNA, 19 nt, Artificial Sequence
  Description of Artificial Sequence: Synthetic oligonucleotide
aggagguugguuguccaau

SEQ ID NO: 1293917 - RNA, 19 nt, Artificial Sequence
  Description of Artificial Sequence: Synthetic oligonucleotide
uugcucguagggccugcac

SEQ ID NO: 1293918 - RNA, 19 nt, Artificial Sequence
  Description of Artificial Sequence: Synthetic oligonucleotide
ucgggucugacagcacuga

SEQ ID NO: 1293919 - RNA, 19 nt, Artificial Sequence
  Description of Artificial Sequence: Synthetic oligonucleotide
ugcuucccuucucaucaau

SEQ ID NO: 1293920 - RNA, 19 nt, Artificial Sequence
  Description of Artificial Sequence: Synthetic oligonucleotide
auggaggugaugauagcua

SEQ ID NO: 1293921 - RNA, 19 nt, Artificial Sequence
  Description of Artificial Sequence: Synthetic oligonucleotide
ggaucuaacggcgaguagu

SEQ ID NO: 1293922 - RNA, 19 nt, Artificial Sequence
  Description of Artificial Sequence: Synthetic oligonucleotide
ucacccaccgucccuccuu

SEQ ID NO: 1293923 - RNA, 19 nt, Artificial Sequence
  Description of Artificial Sequence: Synthetic oligonucleotide
guugucuauuagaggagaa

SEQ ID NO: 1293924 - RNA, 19 nt, Artificial Sequence
  Description of Artificial Sequence: Synthetic oligonucleotide
ugggcaucuuguugucuau

SEQ ID NO: 1293925 - RNA, 19 nt, Artificial Sequence
  Description of Artificial Sequence: Synthetic oligonucleotide
gagccaauucgguuccucu

SEQ ID NO: 1293926 - RNA, 19 nt, Artificial Sequence
  Description of Artificial Sequence: Synthetic oligonucleotide
cauggagagaucccauucu

SEQ ID NO: 1293927 - RNA, 19 nt, Artificial Sequence
  Description of Artificial Sequence: Synthetic oligonucleotide
agaucccauucugcugagg

SEQ ID NO: 1293928 - RNA, 19 nt, Artificial Sequence
  Description of Artificial Sequence: Synthetic oligonucleotide
gguauccuacgguaaaagu

SEQ ID NO: 1293929 - RNA, 19 nt, Artificial Sequence
  Description of Artificial Sequence: Synthetic oligonucleotide
caacucuugugagguuuag

SEQ ID NO: 1293930 - RNA, 19 nt, Artificial Sequence
  Description of Artificial Sequence: Synthetic oligonucleotide
gaggggucuaucaacuggu

SEQ ID NO: 1293931 - RNA, 19 nt, Artificial Sequence
  Description of Artificial Sequence: Synthetic oligonucleotide
cacagguaacugcaucaga

SEQ ID NO: 1293932 - RNA, 19 nt, Artificial Sequence
  Description of Artificial Sequence: Synthetic oligonucleotide
ggggucuaucaacugguuc

SEQ ID NO: 1293933 - RNA, 19 nt, Artificial Sequence
  Description of Artificial Sequence: Synthetic oligonucleotide
aggaggcuucgaguacugg

SEQ ID NO: 1293934 - RNA, 19 nt, Artificial Sequence
  Description of Artificial Sequence: Synthetic oligonucleotide
guauggccaaggguucagc

SEQ ID NO: 1293935 - RNA, 19 nt, Artificial Sequence
  Description of Artificial Sequence: Synthetic oligonucleotide
ggccacucauuguagaugu

SEQ ID NO: 1293936 - RNA, 19 nt, Artificial Sequence
  Description of Artificial Sequence: Synthetic oligonucleotide
uaacggcgaguagucaaau

SEQ ID NO: 1293937 - RNA, 19 nt, Artificial Sequence
  Description of Artificial Sequence: Synthetic oligonucleotide
aguccugcguuggaucuaa

SEQ ID NO: 1293938 - RNA, 19 nt, Artificial Sequence
  Description of Artificial Sequence: Synthetic oligonucleotide
auccuacgguaaaaguaca

SEQ ID NO: 1293939 - RNA, 19 nt, Artificial Sequence
  Description of Artificial Sequence: Synthetic oligonucleotide
cgaucuuuugagucaucag

SEQ ID NO: 1293940 - RNA, 19 nt, Artificial Sequence
  Description of Artificial Sequence: Synthetic oligonucleotide
gguauggccaaggguucag

SEQ ID NO: 1293941 - RNA, 19 nt, Artificial Sequence
  Description of Artificial Sequence: Synthetic oligonucleotide
ggccugcacugccugauug

SEQ ID NO: 1293942 - RNA, 19 nt, Artificial Sequence
  Description of Artificial Sequence: Synthetic oligonucleotide
aucuaacggcgaguaguca

SEQ ID NO: 1293943 - RNA, 19 nt, Artificial Sequence
  Description of Artificial Sequence: Synthetic oligonucleotide
ccugcacugccugauugcg

SEQ ID NO: 1293944 - RNA, 19 nt, Artificial Sequence
  Description of Artificial Sequence: Synthetic oligonucleotide
gcgaucuuuugagucauca

SEQ ID NO: 1293945 - RNA, 19 nt, Artificial Sequence
  Description of Artificial Sequence: Synthetic oligonucleotide
cauacccagguauggccaa

SEQ ID NO: 1293946 - RNA, 19 nt, Artificial Sequence
  Description of Artificial Sequence: Synthetic oligonucleotide
cgaguagucaaauauccua

SEQ ID NO: 1293947 - RNA, 19 nt, Artificial Sequence
  Description of Artificial Sequence: Synthetic oligonucleotide
cucguagggccugcacugc

SEQ ID NO: 1293948 - RNA, 19 nt, Artificial Sequence
  Description of Artificial Sequence: Synthetic oligonucleotide
caguagcaccauauacaga

SEQ ID NO: 1293949 - RNA, 19 nt, Artificial Sequence
  Description of Artificial Sequence: Synthetic oligonucleotide
auguuugcauuggcauugu

SEQ ID NO: 1293950 - RNA, 19 nt, Artificial Sequence
  Description of Artificial Sequence: Synthetic oligonucleotide
aggcgaucuuuugagucau

SEQ ID NO: 1293951 - RNA, 19 nt, Artificial Sequence
  Description of Artificial Sequence: Synthetic oligonucleotide
gccugauugcgcugaaauc

SEQ ID NO: 1293952 - RNA, 19 nt, Artificial Sequence
  Description of Artificial Sequence: Synthetic oligonucleotide
uccaauccaguagcaccau

SEQ ID NO: 1293953 - RNA, 19 nt, Artificial Sequence
  Description of Artificial Sequence: Synthetic oligonucleotide
cccuccauacccagguaug

SEQ ID NO: 1293954 - RNA, 19 nt, Artificial Sequence
  Description of Artificial Sequence: Synthetic oligonucleotide
ucguugcucguagggccug

SEQ ID NO: 1293955 - RNA, 19 nt, Artificial Sequence
  Description of Artificial Sequence: Synthetic oligonucleotide
ccaugccccaacuuaguca

SEQ ID NO: 1293956 - RNA, 19 nt, Artificial Sequence
  Description of Artificial Sequence: Synthetic oligonucleotide
gcucuaagauggcugauau

SEQ ID NO: 1293957 - RNA, 19 nt, Artificial Sequence
  Description of Artificial Sequence: Synthetic oligonucleotide
aaguccugcguuggaucua

SEQ ID NO: 1293958 - RNA, 19 nt, Artificial Sequence
  Description of Artificial Sequence: Synthetic oligonucleotide
cguuggaucuaacggcgag

SEQ ID NO: 1293959 - RNA, 19 nt, Artificial Sequence
  Description of Artificial Sequence: Synthetic oligonucleotide
ggcgaucagcucaucuuug

SEQ ID NO: 1293960 - RNA, 19 nt, Artificial Sequence
  Description of Artificial Sequence: Synthetic oligonucleotide
guuggaucuaacggcgagu

SEQ ID NO: 1293961 - RNA, 19 nt, Artificial Sequence
  Description of Artificial Sequence: Synthetic oligonucleotide
cugcacuaccaaguauuca

SEQ ID NO: 1293962 - RNA, 19 nt, Artificial Sequence
  Description of Artificial Sequence: Synthetic oligonucleotide
ggaaggggucuucgauuug

SEQ ID NO: 1293963 - RNA, 19 nt, Artificial Sequence
  Description of Artificial Sequence: Synthetic oligonucleotide
gauugcgcugaaaucccau

SEQ ID NO: 1293964 - RNA, 19 nt, Artificial Sequence
  Description of Artificial Sequence: Synthetic oligonucleotide
uugugagguuuagcuuggu

SEQ ID NO: 1293965 - RNA, 19 nt, Artificial Sequence
  Description of Artificial Sequence: Synthetic oligonucleotide
acugccugauugcgcugaa

SEQ ID NO: 1293966 - RNA, 19 nt, Artificial Sequence
  Description of Artificial Sequence: Synthetic oligonucleotide
gcuguaagccccuggcucu

SEQ ID NO: 1293967 - RNA, 19 nt, Artificial Sequence
  Description of Artificial Sequence: Synthetic oligonucleotide
uguaagccccuggcucuaa

SEQ ID NO: 1293968 - RNA, 19 nt, Artificial Sequence
  Description of Artificial Sequence: Synthetic oligonucleotide
gccaauucgguuccucucu

SEQ ID NO: 1293969 - RNA, 19 nt, Artificial Sequence
  Description of Artificial Sequence: Synthetic oligonucleotide
cuggaaggggucuucgauu

SEQ ID NO: 1293970 - RNA, 19 nt, Artificial Sequence
  Description of Artificial Sequence: Synthetic oligonucleotide
cacugccugauugcgcuga

SEQ ID NO: 1293971 - RNA, 19 nt, Artificial Sequence
  Description of Artificial Sequence: Synthetic oligonucleotide
gucuaucaacugguucauc

SEQ ID NO: 1293972 - RNA, 19 nt, Artificial Sequence
  Description of Artificial Sequence: Synthetic oligonucleotide
caggagguugguuguccaa

SEQ ID NO: 1293973 - RNA, 19 nt, Artificial Sequence
  Description of Artificial Sequence: Synthetic oligonucleotide
cucguacauuccagaucca

SEQ ID NO: 1293974 - RNA, 19 nt, Artificial Sequence
  Description of Artificial Sequence: Synthetic oligonucleotide
cucggacaugauguuugca

SEQ ID NO: 1293975 - RNA, 19 nt, Artificial Sequence
  Description of Artificial Sequence: Synthetic oligonucleotide
ccuacgguaaaaguacaua

SEQ ID NO: 1293976 - RNA, 19 nt, Artificial Sequence
  Description of Artificial Sequence: Synthetic oligonucleotide
ggcugauaucuaguagguc

SEQ ID NO: 1293977 - RNA, 19 nt, Artificial Sequence
  Description of Artificial Sequence: Synthetic oligonucleotide
cuaguaggucuggcauauc

SEQ ID NO: 1293978 - RNA, 19 nt, Artificial Sequence
  Description of Artificial Sequence: Synthetic oligonucleotide
cggcgaguagucaaauauc

SEQ ID NO: 1293979 - RNA, 19 nt, Artificial Sequence
  Description of Artificial Sequence: Synthetic oligonucleotide
gcaucagauaguccacccu

SEQ ID NO: 1293980 - RNA, 19 nt, Artificial Sequence
  Description of Artificial Sequence: Synthetic oligonucleotide
ccggcaggcuuccaaagga

SEQ ID NO: 1293981 - RNA, 19 nt, Artificial Sequence
  Description of Artificial Sequence: Synthetic oligonucleotide
gcuugguauccuacgguaa

SEQ ID NO: 1293982 - RNA, 19 nt, Artificial Sequence
  Description of Artificial Sequence: Synthetic oligonucleotide
ggcucuaagauggcugaua

SEQ ID NO: 1293983 - RNA, 19 nt, Artificial Sequence
  Description of Artificial Sequence: Synthetic oligonucleotide
ccuuucugaggcacaaacu

SEQ ID NO: 1293984 - RNA, 19 nt, Artificial Sequence
  Description of Artificial Sequence: Synthetic oligonucleotide
cauaggcgaucagcucauc

SEQ ID NO: 1293985 - RNA, 19 nt, Artificial Sequence
  Description of Artificial Sequence: Synthetic oligonucleotide
guugcucguagggccugca

SEQ ID NO: 1293986 - RNA, 19 nt, Artificial Sequence
  Description of Artificial Sequence: Synthetic oligonucleotide
gauccaguccagugcccuu

SEQ ID NO: 1293987 - RNA, 19 nt, Artificial Sequence
  Description of Artificial Sequence: Synthetic oligonucleotide
gccccaacuuagucaucug

SEQ ID NO: 1293988 - RNA, 19 nt, Artificial Sequence
  Description of Artificial Sequence: Synthetic oligonucleotide
ccucucuguguagcggacc

SEQ ID NO: 1293989 - RNA, 19 nt, Artificial Sequence
  Description of Artificial Sequence: Synthetic oligonucleotide
gcgaucagcucaucuuugu

SEQ ID NO: 1293990 - RNA, 19 nt, Artificial Sequence
  Description of Artificial Sequence: Synthetic oligonucleotide
aggggucuaucaacugguu

SEQ ID NO: 1293991 - RNA, 19 nt, Artificial Sequence
  Description of Artificial Sequence: Synthetic oligonucleotide
cccucucuguguagcggac

SEQ ID NO: 1293992 - RNA, 19 nt, Artificial Sequence
  Description of Artificial Sequence: Synthetic oligonucleotide
aggcuuggccucggacaug

SEQ ID NO: 1293993 - RNA, 19 nt, Artificial Sequence
  Description of Artificial Sequence: Synthetic oligonucleotide
ccaacucuugugagguuua

SEQ ID NO: 1293994 - RNA, 19 nt, Artificial Sequence
  Description of Artificial Sequence: Synthetic oligonucleotide
cccuucaggcuuggccucg

SEQ ID NO: 1293995 - RNA, 19 nt, Artificial Sequence
  Description of Artificial Sequence: Synthetic oligonucleotide
gcgaguagucaaauauccu

SEQ ID NO: 1293996 - RNA, 19 nt, Artificial Sequence
  Description of Artificial Sequence: Synthetic oligonucleotide
cugcaucacggaggauuca

SEQ ID NO: 1293997 - RNA, 19 nt, Artificial Sequence
  Description of Artificial Sequence: Synthetic oligonucleotide
caaauauccuagggagguu

SEQ ID NO: 1293998 - RNA, 19 nt, Artificial Sequence
  Description of Artificial Sequence: Synthetic oligonucleotide
ccccaacuuagucaucugu

SEQ ID NO: 1293999 - RNA, 19 nt, Artificial Sequence
  Description of Artificial Sequence: Synthetic oligonucleotide
gcacgauaauccaguugaa

SEQ ID NO: 1294000 - RNA, 19 nt, Artificial Sequence
  Description of Artificial Sequence: Synthetic oligonucleotide
cuguaagccccuggcucua

SEQ ID NO: 1294001 - RNA, 19 nt, Artificial Sequence
  Description of Artificial Sequence: Synthetic oligonucleotide
cggaagacaucacuugggu

SEQ ID NO: 1294002 - RNA, 19 nt, Artificial Sequence
  Description of Artificial Sequence: Synthetic oligonucleotide
acccaccgucccuccuuuu

SEQ ID NO: 1294003 - RNA, 19 nt, Artificial Sequence
  Description of Artificial Sequence: Synthetic oligonucleotide
gcguuggaucuaacggcga

SEQ ID NO: 1294004 - RNA, 19 nt, Artificial Sequence
  Description of Artificial Sequence: Synthetic oligonucleotide
ggggccuuucugaggcaca

SEQ ID NO: 1294005 - RNA, 19 nt, Artificial Sequence
  Description of Artificial Sequence: Synthetic oligonucleotide
cugccugauugcgcugaaa

SEQ ID NO: 1294006 - RNA, 19 nt, Artificial Sequence
  Description of Artificial Sequence: Synthetic oligonucleotide
guccugcguuggaucuaac

SEQ ID NO: 1294007 - RNA, 19 nt, Artificial Sequence
  Description of Artificial Sequence: Synthetic oligonucleotide
cccuuuccagguuaugauu

SEQ ID NO: 1294008 - RNA, 19 nt, Artificial Sequence
  Description of Artificial Sequence: Synthetic oligonucleotide
ggcgaucuuuugagucauc

SEQ ID NO: 1294009 - RNA, 19 nt, Artificial Sequence
  Description of Artificial Sequence: Synthetic oligonucleotide
ccaauccaguagcaccaua

SEQ ID NO: 1294010 - RNA, 19 nt, Artificial Sequence
  Description of Artificial Sequence: Synthetic oligonucleotide
ccccuccauacccagguau

SEQ ID NO: 1294011 - RNA, 19 nt, Artificial Sequence
  Description of Artificial Sequence: Synthetic oligonucleotide
cguugcucguagggccugc

SEQ ID NO: 1294012 - RNA, 19 nt, Artificial Sequence
  Description of Artificial Sequence: Synthetic oligonucleotide
ggccaugccccaacuuagu

SEQ ID NO: 1294013 - RNA, 19 nt, Artificial Sequence
  Description of Artificial Sequence: Synthetic oligonucleotide
ggccaaggguucagcaaau

SEQ ID NO: 1294014 - RNA, 19 nt, Artificial Sequence
  Description of Artificial Sequence: Synthetic oligonucleotide
cacccaccgucccuccuuu

SEQ ID NO: 1294015 - RNA, 19 nt, Artificial Sequence
  Description of Artificial Sequence: Synthetic oligonucleotide
gggcaucuuguugucuauu

SEQ ID NO: 1294016 - RNA, 19 nt, Artificial Sequence
  Description of Artificial Sequence: Synthetic oligonucleotide
ggccucggacaugauguuu

SEQ ID NO: 1294017 - RNA, 19 nt, Artificial Sequence
  Description of Artificial Sequence: Synthetic oligonucleotide
cgaucagcucaucuuuguu

SEQ ID NO: 1294018 - RNA, 19 nt, Artificial Sequence
  Description of Artificial Sequence: Synthetic oligonucleotide
gcggaccuuucgggucuga

SEQ ID NO: 1294019 - RNA, 19 nt, Artificial Sequence
  Description of Artificial Sequence: Synthetic oligonucleotide
uaaacuuuaccuuauaggg

SEQ ID NO: 1294020 - RNA, 19 nt, Artificial Sequence
  Description of Artificial Sequence: Synthetic oligonucleotide
aauuuaaucacuggaaugc

SEQ ID NO: 1294021 - RNA, 19 nt, Artificial Sequence
  Description of Artificial Sequence: Synthetic oligonucleotide
aguauaauaaacuuuaccu

SEQ ID NO: 1294022 - RNA, 19 nt, Artificial Sequence
  Description of Artificial Sequence: Synthetic oligonucleotide
aagguaguuauuucuaacc

SEQ ID NO: 1294023 - RNA, 19 nt, Artificial Sequence
  Description of Artificial Sequence: Synthetic oligonucleotide
aaaguugggaacugggucc

SEQ ID NO: 1294024 - RNA, 19 nt, Artificial Sequence
  Description of Artificial Sequence: Synthetic oligonucleotide
ucuacagucauuaccaagg

SEQ ID NO: 1294025 - RNA, 19 nt, Artificial Sequence
  Description of Artificial Sequence: Synthetic oligonucleotide
aaauauggaugucauuugc

SEQ ID NO: 1294026 - RNA, 19 nt, Artificial Sequence
  Description of Artificial Sequence: Synthetic oligonucleotide
uuagggauaaaucagagaa

SEQ ID NO: 1294027 - RNA, 19 nt, Artificial Sequence
  Description of Artificial Sequence: Synthetic oligonucleotide
uuuaauuaaagccccuggg

SEQ ID NO: 1294028 - RNA, 19 nt, Artificial Sequence
  Description of Artificial Sequence: Synthetic oligonucleotide
uguucuuauaauuuaauac

SEQ ID NO: 1294029 - RNA, 19 nt, Artificial Sequence
  Description of Artificial Sequence: Synthetic oligonucleotide
uaguaaaccgaguauaagg

SEQ ID NO: 1294030 - RNA, 19 nt, Artificial Sequence
  Description of Artificial Sequence: Synthetic oligonucleotide
caugcuaaucucuaaaugg

SEQ ID NO: 1294031 - RNA, 19 nt, Artificial Sequence
  Description of Artificial Sequence: Synthetic oligonucleotide
aauugaauuuaaucacugg

SEQ ID NO: 1294032 - RNA, 19 nt, Artificial Sequence
  Description of Artificial Sequence: Synthetic oligonucleotide
auuucuaaccucuugaaca

SEQ ID NO: 1294033 - RNA, 19 nt, Artificial Sequence
  Description of Artificial Sequence: Synthetic oligonucleotide
ucuaauuuuaguccuuucc

SEQ ID NO: 1294034 - RNA, 19 nt, Artificial Sequence
  Description of Artificial Sequence: Synthetic oligonucleotide
aaagguaguuauuucuaac

SEQ ID NO: 1294035 - RNA, 19 nt, Artificial Sequence
  Description of Artificial Sequence: Synthetic oligonucleotide
aacuuuaccuuauagggca

SEQ ID NO: 1294036 - RNA, 19 nt, Artificial Sequence
  Description of Artificial Sequence: Synthetic oligonucleotide
aaguugauaacagaucugg

SEQ ID NO: 1294037 - RNA, 19 nt, Artificial Sequence
  Description of Artificial Sequence: Synthetic oligonucleotide
acacaaucauguuagcucc

SEQ ID NO: 1294038 - RNA, 19 nt, Artificial Sequence
  Description of Artificial Sequence: Synthetic oligonucleotide
aaaucuuugucaugaauga

SEQ ID NO: 1294039 - RNA, 19 nt, Artificial Sequence
  Description of Artificial Sequence: Synthetic oligonucleotide
aagguauauugauuggcac

SEQ ID NO: 1294040 - RNA, 19 nt, Artificial Sequence
  Description of Artificial Sequence: Synthetic oligonucleotide
uuuaucaguguucuuauaa

SEQ ID NO: 1294041 - RNA, 19 nt, Artificial Sequence
  Description of Artificial Sequence: Synthetic oligonucleotide
aauuaaagccccuggguug

SEQ ID NO: 1294042 - RNA, 19 nt, Artificial Sequence
  Description of Artificial Sequence: Synthetic oligonucleotide
ugaccaaaagugauguugg

SEQ ID NO: 1294043 - RNA, 19 nt, Artificial Sequence
  Description of Artificial Sequence: Synthetic oligonucleotide
agguauauugauuggcacc

SEQ ID NO: 1294044 - RNA, 19 nt, Artificial Sequence
  Description of Artificial Sequence: Synthetic oligonucleotide
aaauacaaguugucccagc

SEQ ID NO: 1294045 - RNA, 19 nt, Artificial Sequence
  Description of Artificial Sequence: Synthetic oligonucleotide
uuaaucacuggaaugcagc

SEQ ID NO: 1294046 - RNA, 19 nt, Artificial Sequence
  Description of Artificial Sequence: Synthetic oligonucleotide
uucuuauaauuuaauaccu

SEQ ID NO: 1294047 - RNA, 19 nt, Artificial Sequence
  Description of Artificial Sequence: Synthetic oligonucleotide
aaacuuuaccuuauagggc

SEQ ID NO: 1294048 - RNA, 19 nt, Artificial Sequence
  Description of Artificial Sequence: Synthetic oligonucleotide
uuuaauaccuauuuugaua

SEQ ID NO: 1294049 - RNA, 19 nt, Artificial Sequence
  Description of Artificial Sequence: Synthetic oligonucleotide
gugcauaucaaagaaaggg

SEQ ID NO: 1294050 - RNA, 19 nt, Artificial Sequence
  Description of Artificial Sequence: Synthetic oligonucleotide
ucugauuagcccauggggc

SEQ ID NO: 1294051 - RNA, 19 nt, Artificial Sequence
  Description of Artificial Sequence: Synthetic oligonucleotide
agguucuacagucauuacc

SEQ ID NO: 1294052 - RNA, 19 nt, Artificial Sequence
  Description of Artificial Sequence: Synthetic oligonucleotide
gaauuuaaucacuggaaug

SEQ ID NO: 1294053 - RNA, 19 nt, Artificial Sequence
  Description of Artificial Sequence: Synthetic oligonucleotide
auucaaugugauuugguag

SEQ ID NO: 1294054 - RNA, 19 nt, Artificial Sequence
  Description of Artificial Sequence: Synthetic oligonucleotide
agggauaaaucagagaaac

SEQ ID NO: 1294055 - RNA, 19 nt, Artificial Sequence
  Description of Artificial Sequence: Synthetic oligonucleotide
uuaauuaaagccccugggu

SEQ ID NO: 1294056 - RNA, 19 nt, Artificial Sequence
  Description of Artificial Sequence: Synthetic oligonucleotide
uuugcuuuagggauaaauc

SEQ ID NO: 1294057 - RNA, 19 nt, Artificial Sequence
  Description of Artificial Sequence: Synthetic oligonucleotide
auaguagcuaauuuuccuc

SEQ ID NO: 1294058 - RNA, 19 nt, Artificial Sequence
  Description of Artificial Sequence: Synthetic oligonucleotide
aucugauuagcccaugggg

SEQ ID NO: 1294059 - RNA, 19 nt, Artificial Sequence
  Description of Artificial Sequence: Synthetic oligonucleotide
cauaucaaagaaagggucc

SEQ ID NO: 1294060 - RNA, 19 nt, Artificial Sequence
  Description of Artificial Sequence: Synthetic oligonucleotide
ugcacaauugaauuuaauc

SEQ ID NO: 1294061 - RNA, 19 nt, Artificial Sequence
  Description of Artificial Sequence: Synthetic oligonucleotide
aaugugauuugguaguuaa

SEQ ID NO: 1294062 - RNA, 19 nt, Artificial Sequence
  Description of Artificial Sequence: Synthetic oligonucleotide
ugcuuuagggauaaaucag

SEQ ID NO: 1294063 - RNA, 19 nt, Artificial Sequence
  Description of Artificial Sequence: Synthetic oligonucleotide
cacaauugaauuuaaucac

SEQ ID NO: 1294064 - RNA, 19 nt, Artificial Sequence
  Description of Artificial Sequence: Synthetic oligonucleotide
cuagauaccaucaugugca

SEQ ID NO: 1294065 - RNA, 19 nt, Artificial Sequence
  Description of Artificial Sequence: Synthetic oligonucleotide
uauucucaggcauauaaac

SEQ ID NO: 1294066 - RNA, 19 nt, Artificial Sequence
  Description of Artificial Sequence: Synthetic oligonucleotide
uugcuuuagggauaaauca

SEQ ID NO: 1294067 - RNA, 19 nt, Artificial Sequence
  Description of Artificial Sequence: Synthetic oligonucleotide
uauuaguuuuacuuguaca

SEQ ID NO: 1294068 - RNA, 19 nt, Artificial Sequence
  Description of Artificial Sequence: Synthetic oligonucleotide
auugauuggcaccugccac

SEQ ID NO: 1294069 - RNA, 19 nt, Artificial Sequence
  Description of Artificial Sequence: Synthetic oligonucleotide
aaguuauuucuauaugccu

SEQ ID NO: 1294070 - RNA, 19 nt, Artificial Sequence
  Description of Artificial Sequence: Synthetic oligonucleotide
cuuucggaggcuuucaacc

SEQ ID NO: 1294071 - RNA, 19 nt, Artificial Sequence
  Description of Artificial Sequence: Synthetic oligonucleotide
ugauaucuuuaauuaaagc

SEQ ID NO: 1294072 - RNA, 19 nt, Artificial Sequence
  Description of Artificial Sequence: Synthetic oligonucleotide
acugcuucgauucaaugug

SEQ ID NO: 1294073 - RNA, 19 nt, Artificial Sequence
  Description of Artificial Sequence: Synthetic oligonucleotide
uucaaugugauuugguagu

SEQ ID NO: 1294074 - RNA, 19 nt, Artificial Sequence
  Description of Artificial Sequence: Synthetic oligonucleotide
gacacaaucauguuagcuc

SEQ ID NO: 1294075 - RNA, 19 nt, Artificial Sequence
  Description of Artificial Sequence: Synthetic oligonucleotide
cuuuaauuaaagccccugg

SEQ ID NO: 1294076 - RNA, 19 nt, Artificial Sequence
  Description of Artificial Sequence: Synthetic oligonucleotide
uuuaaucacuggaaugcag

SEQ ID NO: 1294077 - RNA, 19 nt, Artificial Sequence
  Description of Artificial Sequence: Synthetic oligonucleotide
ugcauuucagaaacccucg

SEQ ID NO: 1294078 - RNA, 19 nt, Artificial Sequence
  Description of Artificial Sequence: Synthetic oligonucleotide
ugaaagguauauugauugg

SEQ ID NO: 1294079 - RNA, 19 nt, Artificial Sequence
  Description of Artificial Sequence: Synthetic oligonucleotide
uguaauccuaaaaccaugu

SEQ ID NO: 1294080 - RNA, 19 nt, Artificial Sequence
  Description of Artificial Sequence: Synthetic oligonucleotide
uaguaaguugauaacagau

SEQ ID NO: 1294081 - RNA, 19 nt, Artificial Sequence
  Description of Artificial Sequence: Synthetic oligonucleotide
uaucuaucugauuagccca

SEQ ID NO: 1294082 - RNA, 19 nt, Artificial Sequence
  Description of Artificial Sequence: Synthetic oligonucleotide
aauccuaaaaccauguuuu

SEQ ID NO: 1294083 - RNA, 19 nt, Artificial Sequence
  Description of Artificial Sequence: Synthetic oligonucleotide
caucaugugcauaucaaag

SEQ ID NO: 1294084 - RNA, 19 nt, Artificial Sequence
  Description of Artificial Sequence: Synthetic oligonucleotide
uuauuaguuuuacuuguac

SEQ ID NO: 1294085 - RNA, 19 nt, Artificial Sequence
  Description of Artificial Sequence: Synthetic oligonucleotide
uaaaccgaguauaaggaaa

SEQ ID NO: 1294086 - RNA, 19 nt, Artificial Sequence
  Description of Artificial Sequence: Synthetic oligonucleotide
aggcauauaaacaaaccac

SEQ ID NO: 1294087 - RNA, 19 nt, Artificial Sequence
  Description of Artificial Sequence: Synthetic oligonucleotide
uauauugauuggcaccugc

SEQ ID NO: 1294088 - RNA, 19 nt, Artificial Sequence
  Description of Artificial Sequence: Synthetic oligonucleotide
ucuauauccaaaguuggga

SEQ ID NO: 1294089 - RNA, 19 nt, Artificial Sequence
  Description of Artificial Sequence: Synthetic oligonucleotide
aauuaaaguuauuucuaua

SEQ ID NO: 1294090 - RNA, 19 nt, Artificial Sequence
  Description of Artificial Sequence: Synthetic oligonucleotide
uuugguaguuaauuuuccc

SEQ ID NO: 1294091 - RNA, 19 nt, Artificial Sequence
  Description of Artificial Sequence: Synthetic oligonucleotide
cauaucuaucugauuagcc

SEQ ID NO: 1294092 - RNA, 19 nt, Artificial Sequence
  Description of Artificial Sequence: Synthetic oligonucleotide
gauaacagaucuggggucg

SEQ ID NO: 1294093 - RNA, 19 nt, Artificial Sequence
  Description of Artificial Sequence: Synthetic oligonucleotide
gaaacccucggcuucauac

SEQ ID NO: 1294094 - RNA, 19 nt, Artificial Sequence
  Description of Artificial Sequence: Synthetic oligonucleotide
ugauuugauuaaaugcaca

SEQ ID NO: 1294095 - RNA, 19 nt, Artificial Sequence
  Description of Artificial Sequence: Synthetic oligonucleotide
aaccuugggcaucauaucu

SEQ ID NO: 1294096 - RNA, 19 nt, Artificial Sequence
  Description of Artificial Sequence: Synthetic oligonucleotide
aaaucauuuucccaauaua

SEQ ID NO: 1294097 - RNA, 19 nt, Artificial Sequence
  Description of Artificial Sequence: Synthetic oligonucleotide
ucgcuguugaggauggacg

SEQ ID NO: 1294098 - RNA, 19 nt, Artificial Sequence
  Description of Artificial Sequence: Synthetic oligonucleotide
gagaccagguuucuugugg

SEQ ID NO: 1294099 - RNA, 19 nt, Artificial Sequence
  Description of Artificial Sequence: Synthetic oligonucleotide
gauuugauuaaaugcacaa

SEQ ID NO: 1294100 - RNA, 19 nt, Artificial Sequence
  Description of Artificial Sequence: Synthetic oligonucleotide
gaaagguauauugauuggc

SEQ ID NO: 1294101 - RNA, 19 nt, Artificial Sequence
  Description of Artificial Sequence: Synthetic oligonucleotide
guuauuucuauaugccuug

SEQ ID NO: 1294102 - RNA, 19 nt, Artificial Sequence
  Description of Artificial Sequence: Synthetic oligonucleotide
augcuaaucucuaaauggc

SEQ ID NO: 1294103 - RNA, 19 nt, Artificial Sequence
  Description of Artificial Sequence: Synthetic oligonucleotide
uaauuaaagccccuggguu

SEQ ID NO: 1294104 - RNA, 19 nt, Artificial Sequence
  Description of Artificial Sequence: Synthetic oligonucleotide
uuuccuaagccaaaauaaa

SEQ ID NO: 1294105 - RNA, 19 nt, Artificial Sequence
  Description of Artificial Sequence: Synthetic oligonucleotide
aguaaguugauaacagauc

SEQ ID NO: 1294106 - RNA, 19 nt, Artificial Sequence
  Description of Artificial Sequence: Synthetic oligonucleotide
aaagguauauugauuggca

SEQ ID NO: 1294107 - RNA, 19 nt, Artificial Sequence
  Description of Artificial Sequence: Synthetic oligonucleotide
gauuucaugagcagagacc

SEQ ID NO: 1294108 - RNA, 19 nt, Artificial Sequence
  Description of Artificial Sequence: Synthetic oligonucleotide
aaaaugcccguccauuaca

SEQ ID NO: 1294109 - RNA, 19 nt, Artificial Sequence
  Description of Artificial Sequence: Synthetic oligonucleotide
uauugauuggcaccugcca

SEQ ID NO: 1294110 - RNA, 19 nt, Artificial Sequence
  Description of Artificial Sequence: Synthetic oligonucleotide
acagucauuaccaaggcca

SEQ ID NO: 1294111 - RNA, 19 nt, Artificial Sequence
  Description of Artificial Sequence: Synthetic oligonucleotide
ugaacagacauuccuuagu

SEQ ID NO: 1294112 - RNA, 19 nt, Artificial Sequence
  Description of Artificial Sequence: Synthetic oligonucleotide
ucgaccucuauauccaaag

SEQ ID NO: 1294113 - RNA, 19 nt, Artificial Sequence
  Description of Artificial Sequence: Synthetic oligonucleotide
aggguccuggccuagcugc

SEQ ID NO: 1294114 - RNA, 19 nt, Artificial Sequence
  Description of Artificial Sequence: Synthetic oligonucleotide
ucuuuaguaaaccgaguau

SEQ ID NO: 1294115 - RNA, 19 nt, Artificial Sequence
  Description of Artificial Sequence: Synthetic oligonucleotide
uaccuuauagggcaggaaa

SEQ ID NO: 1294116 - RNA, 19 nt, Artificial Sequence
  Description of Artificial Sequence: Synthetic oligonucleotide
auauuauaaucuucuacau

SEQ ID NO: 1294117 - RNA, 19 nt, Artificial Sequence
  Description of Artificial Sequence: Synthetic oligonucleotide
aguuauuucuaaccucuug

SEQ ID NO: 1294118 - RNA, 19 nt, Artificial Sequence
  Description of Artificial Sequence: Synthetic oligonucleotide
uuuagggauaaaucagaga

SEQ ID NO: 1294119 - RNA, 19 nt, Artificial Sequence
  Description of Artificial Sequence: Synthetic oligonucleotide
uguugggaacaaaaugccc

SEQ ID NO: 1294120 - RNA, 19 nt, Artificial Sequence
  Description of Artificial Sequence: Synthetic oligonucleotide
gcacaauugaauuuaauca

SEQ ID NO: 1294121 - RNA, 19 nt, Artificial Sequence
  Description of Artificial Sequence: Synthetic oligonucleotide
aacccgacgccauggugcc

SEQ ID NO: 1294122 - RNA, 19 nt, Artificial Sequence
  Description of Artificial Sequence: Synthetic oligonucleotide
ucuuauaauuuaauaccua

SEQ ID NO: 1294123 - RNA, 19 nt, Artificial Sequence
  Description of Artificial Sequence: Synthetic oligonucleotide
uaaucucuaaauggcauca

SEQ ID NO: 1294124 - RNA, 19 nt, Artificial Sequence
  Description of Artificial Sequence: Synthetic oligonucleotide
aucacuggaaugcagcacu

SEQ ID NO: 1294125 - RNA, 19 nt, Artificial Sequence
  Description of Artificial Sequence: Synthetic oligonucleotide
uccauuacauccaggugca

SEQ ID NO: 1294126 - RNA, 19 nt, Artificial Sequence
  Description of Artificial Sequence: Synthetic oligonucleotide
caaccagugaaccuugggc

SEQ ID NO: 1294127 - RNA, 19 nt, Artificial Sequence
  Description of Artificial Sequence: Synthetic oligonucleotide
accuacuccaccaucgacc

SEQ ID NO: 1294128 - RNA, 19 nt, Artificial Sequence
  Description of Artificial Sequence: Synthetic oligonucleotide
uauauccaaaguugggaac

SEQ ID NO: 1294129 - RNA, 19 nt, Artificial Sequence
  Description of Artificial Sequence: Synthetic oligonucleotide
uaauuuuaguccuuuccau

SEQ ID NO: 1294130 - RNA, 19 nt, Artificial Sequence
  Description of Artificial Sequence: Synthetic oligonucleotide
ugguaguuaauuuucccaa

SEQ ID NO: 1294131 - RNA, 19 nt, Artificial Sequence
  Description of Artificial Sequence: Synthetic oligonucleotide
gauuugguaguuaauuuuc

SEQ ID NO: 1294132 - RNA, 19 nt, Artificial Sequence
  Description of Artificial Sequence: Synthetic oligonucleotide
auuugauuaaaugcacaag

SEQ ID NO: 1294133 - RNA, 19 nt, Artificial Sequence
  Description of Artificial Sequence: Synthetic oligonucleotide
ugauuugguaguuaauuuu

SEQ ID NO: 1294134 - RNA, 19 nt, Artificial Sequence
  Description of Artificial Sequence: Synthetic oligonucleotide
ugcuaaucucuaaauggca

SEQ ID NO: 1294135 - RNA, 19 nt, Artificial Sequence
  Description of Artificial Sequence: Synthetic oligonucleotide
uguauugugugauuugauu

SEQ ID NO: 1294136 - RNA, 19 nt, Artificial Sequence
  Description of Artificial Sequence: Synthetic oligonucleotide
uuugauggcaaggccaacc

SEQ ID NO: 1294137 - RNA, 19 nt, Artificial Sequence
  Description of Artificial Sequence: Synthetic oligonucleotide
uaccuauuuugauaaaguc

SEQ ID NO: 1294138 - RNA, 19 nt, Artificial Sequence
  Description of Artificial Sequence: Synthetic oligonucleotide
ucaagagagcguuuucuga

SEQ ID NO: 1294139 - RNA, 19 nt, Artificial Sequence
  Description of Artificial Sequence: Synthetic oligonucleotide
aaguugucccagcaaauaa

SEQ ID NO: 1294140 - RNA, 19 nt, Artificial Sequence
  Description of Artificial Sequence: Synthetic oligonucleotide
cagaccaugacaugacacc

SEQ ID NO: 1294141 - RNA, 19 nt, Artificial Sequence
  Description of Artificial Sequence: Synthetic oligonucleotide
aauauggaugucauuugcu

SEQ ID NO: 1294142 - RNA, 19 nt, Artificial Sequence
  Description of Artificial Sequence: Synthetic oligonucleotide
gauucaaugugauuuggua

SEQ ID NO: 1294143 - RNA, 19 nt, Artificial Sequence
  Description of Artificial Sequence: Synthetic oligonucleotide
cauauucucaggcauauaa

SEQ ID NO: 1294144 - RNA, 19 nt, Artificial Sequence
  Description of Artificial Sequence: Synthetic oligonucleotide
cuauaugccuuguauugug

SEQ ID NO: 1294145 - RNA, 19 nt, Artificial Sequence
  Description of Artificial Sequence: Synthetic oligonucleotide
uuaucaguguucuuauaau

SEQ ID NO: 1294146 - RNA, 19 nt, Artificial Sequence
  Description of Artificial Sequence: Synthetic oligonucleotide
uuucuaaccucuugaacau

SEQ ID NO: 1294147 - RNA, 19 nt, Artificial Sequence
  Description of Artificial Sequence: Synthetic oligonucleotide
ucaucgaucaagagagcgu

SEQ ID NO: 1294148 - RNA, 19 nt, Artificial Sequence
  Description of Artificial Sequence: Synthetic oligonucleotide
ccagacacaaucauguuag

SEQ ID NO: 1294149 - RNA, 19 nt, Artificial Sequence
  Description of Artificial Sequence: Synthetic oligonucleotide
uaugccuuguauuguguga

SEQ ID NO: 1294150 - RNA, 19 nt, Artificial Sequence
  Description of Artificial Sequence: Synthetic oligonucleotide
gauaccaucaugugcauau

SEQ ID NO: 1294151 - RNA, 19 nt, Artificial Sequence
  Description of Artificial Sequence: Synthetic oligonucleotide
caaaguugggaacuggguc

SEQ ID NO: 1294152 - RNA, 19 nt, Artificial Sequence
  Description of Artificial Sequence: Synthetic oligonucleotide
cugauuagcccauggggcc

SEQ ID NO: 1294153 - RNA, 19 nt, Artificial Sequence
  Description of Artificial Sequence: Synthetic oligonucleotide
uugggcaucauaucuucca

SEQ ID NO: 1294154 - RNA, 19 nt, Artificial Sequence
  Description of Artificial Sequence: Synthetic oligonucleotide
aaucucuaaauggcaucac

SEQ ID NO: 1294155 - RNA, 19 nt, Artificial Sequence
  Description of Artificial Sequence: Synthetic oligonucleotide
uuuuguccuccaaacccag

SEQ ID NO: 1294156 - RNA, 19 nt, Artificial Sequence
  Description of Artificial Sequence: Synthetic oligonucleotide
auauucuuuaguaaaccga

SEQ ID NO: 1294157 - RNA, 19 nt, Artificial Sequence
  Description of Artificial Sequence: Synthetic oligonucleotide
aaugcacaagcuuuuccua

SEQ ID NO: 1294158 - RNA, 19 nt, Artificial Sequence
  Description of Artificial Sequence: Synthetic oligonucleotide
cauguuagcuccugccucc

SEQ ID NO: 1294159 - RNA, 19 nt, Artificial Sequence
  Description of Artificial Sequence: Synthetic oligonucleotide
cauuucagaaacccucggc

SEQ ID NO: 1294160 - RNA, 19 nt, Artificial Sequence
  Description of Artificial Sequence: Synthetic oligonucleotide
ugcacaagcuuuuccuaag

SEQ ID NO: 1294161 - RNA, 19 nt, Artificial Sequence
  Description of Artificial Sequence: Synthetic oligonucleotide
uuacuuguacauuuauuuu

SEQ ID NO: 1294162 - RNA, 19 nt, Artificial Sequence
  Description of Artificial Sequence: Synthetic oligonucleotide
guauugugugauuugauua

SEQ ID NO: 1294163 - RNA, 19 nt, Artificial Sequence
  Description of Artificial Sequence: Synthetic oligonucleotide
auuggcuuuacccacuguu

SEQ ID NO: 1294164 - RNA, 19 nt, Artificial Sequence
  Description of Artificial Sequence: Synthetic oligonucleotide
ucauguuagcuccugccuc

SEQ ID NO: 1294165 - RNA, 19 nt, Artificial Sequence
  Description of Artificial Sequence: Synthetic oligonucleotide
gaucuugcaacccgacgcc

SEQ ID NO: 1294166 - RNA, 19 nt, Artificial Sequence
  Description of Artificial Sequence: Synthetic oligonucleotide
ucggcuucauacauuauuu

SEQ ID NO: 1294167 - RNA, 19 nt, Artificial Sequence
  Description of Artificial Sequence: Synthetic oligonucleotide
uucaucaugcuaaucucua

SEQ ID NO: 1294168 - RNA, 19 nt, Artificial Sequence
  Description of Artificial Sequence: Synthetic oligonucleotide
uuaccaaggccauaucuau

SEQ ID NO: 1294169 - RNA, 19 nt, Artificial Sequence
  Description of Artificial Sequence: Synthetic oligonucleotide
auauccaaaguugggaacu

SEQ ID NO: 1294170 - RNA, 19 nt, Artificial Sequence
  Description of Artificial Sequence: Synthetic oligonucleotide
aaacccucggcuucauaca

SEQ ID NO: 1294171 - RNA, 19 nt, Artificial Sequence
  Description of Artificial Sequence: Synthetic oligonucleotide
caggcauauaaacaaacca

SEQ ID NO: 1294172 - RNA, 19 nt, Artificial Sequence
  Description of Artificial Sequence: Synthetic oligonucleotide
gaaugauauuauaaucuuc

SEQ ID NO: 1294173 - RNA, 19 nt, Artificial Sequence
  Description of Artificial Sequence: Synthetic oligonucleotide
uauaugccuuguauugugu

SEQ ID NO: 1294174 - RNA, 19 nt, Artificial Sequence
  Description of Artificial Sequence: Synthetic oligonucleotide
auaugccuuguauugugug

SEQ ID NO: 1294175 - RNA, 19 nt, Artificial Sequence
  Description of Artificial Sequence: Synthetic oligonucleotide
uccuuaguaaguugauaac

SEQ ID NO: 1294176 - RNA, 19 nt, Artificial Sequence
  Description of Artificial Sequence: Synthetic oligonucleotide
agaucuggggucgucacuc

SEQ ID NO: 1294177 - RNA, 19 nt, Artificial Sequence
  Description of Artificial Sequence: Synthetic oligonucleotide
uacuccaccaucgaccucu

SEQ ID NO: 1294178 - RNA, 19 nt, Artificial Sequence
  Description of Artificial Sequence: Synthetic oligonucleotide
aucauguuagcuccugccu

SEQ ID NO: 1294179 - RNA, 19 nt, Artificial Sequence
  Description of Artificial Sequence: Synthetic oligonucleotide
ucgauucaaugugauuugg

SEQ ID NO: 1294180 - RNA, 19 nt, Artificial Sequence
  Description of Artificial Sequence: Synthetic oligonucleotide
ugauaacagaucugggguc

SEQ ID NO: 1294181 - RNA, 19 nt, Artificial Sequence
  Description of Artificial Sequence: Synthetic oligonucleotide
aacagacauuccuuaguaa

SEQ ID NO: 1294182 - RNA, 19 nt, Artificial Sequence
  Description of Artificial Sequence: Synthetic oligonucleotide
uccaccaucgaccucuaua

SEQ ID NO: 1294183 - RNA, 19 nt, Artificial Sequence
  Description of Artificial Sequence: Synthetic oligonucleotide
aucucuaaauggcaucacu

SEQ ID NO: 1294184 - RNA, 19 nt, Artificial Sequence
  Description of Artificial Sequence: Synthetic oligonucleotide
ucuauaugccuuguauugu

SEQ ID NO: 1294185 - RNA, 19 nt, Artificial Sequence
  Description of Artificial Sequence: Synthetic oligonucleotide
uuucugucuguaauccuaa

SEQ ID NO: 1294186 - RNA, 19 nt, Artificial Sequence
  Description of Artificial Sequence: Synthetic oligonucleotide
cuuucaaccacagggugac

SEQ ID NO: 1294187 - RNA, 19 nt, Artificial Sequence
  Description of Artificial Sequence: Synthetic oligonucleotide
uuggcuuuacccacuguuc

SEQ ID NO: 1294188 - RNA, 19 nt, Artificial Sequence
  Description of Artificial Sequence: Synthetic oligonucleotide
caaaagugauguugggaac

SEQ ID NO: 1294189 - RNA, 19 nt, Artificial Sequence
  Description of Artificial Sequence: Synthetic oligonucleotide
uuucggaggcuuucaacca

SEQ ID NO: 1294190 - RNA, 19 nt, Artificial Sequence
  Description of Artificial Sequence: Synthetic oligonucleotide
caugauggcacugccagac

SEQ ID NO: 1294191 - RNA, 19 nt, Artificial Sequence
  Description of Artificial Sequence: Synthetic oligonucleotide
gauuaaaugcacaagcuuu

SEQ ID NO: 1294192 - RNA, 19 nt, Artificial Sequence
  Description of Artificial Sequence: Synthetic oligonucleotide
ugucaguugccuccagaug

SEQ ID NO: 1294193 - RNA, 19 nt, Artificial Sequence
  Description of Artificial Sequence: Synthetic oligonucleotide
aaaccgaguauaaggaaaa

SEQ ID NO: 1294194 - RNA, 19 nt, Artificial Sequence
  Description of Artificial Sequence: Synthetic oligonucleotide
gguucuacagucauuacca

SEQ ID NO: 1294195 - RNA, 19 nt, Artificial Sequence
  Description of Artificial Sequence: Synthetic oligonucleotide
uugggaacaaaaugcccgu

SEQ ID NO: 1294196 - RNA, 19 nt, Artificial Sequence
  Description of Artificial Sequence: Synthetic oligonucleotide
uugucaguugccuccagau

SEQ ID NO: 1294197 - RNA, 19 nt, Artificial Sequence
  Description of Artificial Sequence: Synthetic oligonucleotide
gaacagacauuccuuagua

SEQ ID NO: 1294198 - RNA, 19 nt, Artificial Sequence
  Description of Artificial Sequence: Synthetic oligonucleotide
ucucaggcauauaaacaaa

SEQ ID NO: 1294199 - RNA, 19 nt, Artificial Sequence
  Description of Artificial Sequence: Synthetic oligonucleotide
caauaagacacauuucugu

SEQ ID NO: 1294200 - RNA, 19 nt, Artificial Sequence
  Description of Artificial Sequence: Synthetic oligonucleotide
cuacagucauuaccaaggc

SEQ ID NO: 1294201 - RNA, 19 nt, Artificial Sequence
  Description of Artificial Sequence: Synthetic oligonucleotide
ccuagauaccaucaugugc

SEQ ID NO: 1294202 - RNA, 19 nt, Artificial Sequence
  Description of Artificial Sequence: Synthetic oligonucleotide
uuacccacuguucgggccu

SEQ ID NO: 1294203 - RNA, 19 nt, Artificial Sequence
  Description of Artificial Sequence: Synthetic oligonucleotide
guauaauaaacuuuaccuu

SEQ ID NO: 1294204 - RNA, 19 nt, Artificial Sequence
  Description of Artificial Sequence: Synthetic oligonucleotide
auaaucuucuacauaguuu

SEQ ID NO: 1294205 - RNA, 19 nt, Artificial Sequence
  Description of Artificial Sequence: Synthetic oligonucleotide
augccuacguuuaucagug

SEQ ID NO: 1294206 - RNA, 19 nt, Artificial Sequence
  Description of Artificial Sequence: Synthetic oligonucleotide
caaaaugcccguccauuac

SEQ ID NO: 1294207 - RNA, 19 nt, Artificial Sequence
  Description of Artificial Sequence: Synthetic oligonucleotide
aggugcagguagucggccc

SEQ ID NO: 1294208 - RNA, 19 nt, Artificial Sequence
  Description of Artificial Sequence: Synthetic oligonucleotide
uuguauugugugauuugau

SEQ ID NO: 1294209 - RNA, 19 nt, Artificial Sequence
  Description of Artificial Sequence: Synthetic oligonucleotide
ccucuuuaggcaauaagac

SEQ ID NO: 1294210 - RNA, 19 nt, Artificial Sequence
  Description of Artificial Sequence: Synthetic oligonucleotide
auuuaaucacuggaaugca

SEQ ID NO: 1294211 - RNA, 19 nt, Artificial Sequence
  Description of Artificial Sequence: Synthetic oligonucleotide
uguuccugguuugauggca

SEQ ID NO: 1294212 - RNA, 19 nt, Artificial Sequence
  Description of Artificial Sequence: Synthetic oligonucleotide
accaugacaugacacccca

SEQ ID NO: 1294213 - RNA, 19 nt, Artificial Sequence
  Description of Artificial Sequence: Synthetic oligonucleotide
uauuucuauaugccuugua

SEQ ID NO: 1294214 - RNA, 19 nt, Artificial Sequence
  Description of Artificial Sequence: Synthetic oligonucleotide
ggcaucauaucuuccauga

SEQ ID NO: 1294215 - RNA, 19 nt, Artificial Sequence
  Description of Artificial Sequence: Synthetic oligonucleotide
gucgucacuccucaugaug

SEQ ID NO: 1294216 - RNA, 19 nt, Artificial Sequence
  Description of Artificial Sequence: Synthetic oligonucleotide
uguucgggccuagauacca

SEQ ID NO: 1294217 - RNA, 19 nt, Artificial Sequence
  Description of Artificial Sequence: Synthetic oligonucleotide
aacagaucuggggucguca

SEQ ID NO: 1294218 - RNA, 19 nt, Artificial Sequence
  Description of Artificial Sequence: Synthetic oligonucleotide
cuuuaguaaaccgaguaua

SEQ ID NO: 1294219 - RNA, 19 nt, Artificial Sequence
  Description of Artificial Sequence: Synthetic oligonucleotide
agacacaaucauguuagcu

SEQ ID NO: 1294220 - RNA, 19 nt, Artificial Sequence
  Description of Artificial Sequence: Synthetic oligonucleotide
cugguuugauggcaaggcc

SEQ ID NO: 1294221 - RNA, 19 nt, Artificial Sequence
  Description of Artificial Sequence: Synthetic oligonucleotide
aaagugauguugggaacaa

SEQ ID NO: 1294222 - RNA, 19 nt, Artificial Sequence
  Description of Artificial Sequence: Synthetic oligonucleotide
uucuaauuuuaguccuuuc

SEQ ID NO: 1294223 - RNA, 19 nt, Artificial Sequence
  Description of Artificial Sequence: Synthetic oligonucleotide
accaaaagugauguuggga

SEQ ID NO: 1294224 - RNA, 19 nt, Artificial Sequence
  Description of Artificial Sequence: Synthetic oligonucleotide
gggaacuggguccucaacc

SEQ ID NO: 1294225 - RNA, 19 nt, Artificial Sequence
  Description of Artificial Sequence: Synthetic oligonucleotide
ucgggccuagauaccauca

SEQ ID NO: 1294226 - RNA, 19 nt, Artificial Sequence
  Description of Artificial Sequence: Synthetic oligonucleotide
ggccauaucuaucugauua

SEQ ID NO: 1294227 - RNA, 19 nt, Artificial Sequence
  Description of Artificial Sequence: Synthetic oligonucleotide
auuaaagccccuggguugu

SEQ ID NO: 1294228 - RNA, 19 nt, Artificial Sequence
  Description of Artificial Sequence: Synthetic oligonucleotide
aggauggacgggccgaucu

SEQ ID NO: 1294229 - RNA, 19 nt, Artificial Sequence
  Description of Artificial Sequence: Synthetic oligonucleotide
aacccucggcuucauacau

SEQ ID NO: 1294230 - RNA, 19 nt, Artificial Sequence
  Description of Artificial Sequence: Synthetic oligonucleotide
accacagggugaccaaaag

SEQ ID NO: 1294231 - RNA, 19 nt, Artificial Sequence
  Description of Artificial Sequence: Synthetic oligonucleotide
cuuuaccuuauagggcagg

SEQ ID NO: 1294232 - RNA, 19 nt, Artificial Sequence
  Description of Artificial Sequence: Synthetic oligonucleotide
gagagcguuuucugagcag

SEQ ID NO: 1294233 - RNA, 19 nt, Artificial Sequence
  Description of Artificial Sequence: Synthetic oligonucleotide
ugacaccccaccaaagcuu

SEQ ID NO: 1294234 - RNA, 19 nt, Artificial Sequence
  Description of Artificial Sequence: Synthetic oligonucleotide
guaguuaauuuucccaagu

SEQ ID NO: 1294235 - RNA, 19 nt, Artificial Sequence
  Description of Artificial Sequence: Synthetic oligonucleotide
aguugccuccagaugaaag

SEQ ID NO: 1294236 - RNA, 19 nt, Artificial Sequence
  Description of Artificial Sequence: Synthetic oligonucleotide
ucggaggcuuucaaccaca

SEQ ID NO: 1294237 - RNA, 19 nt, Artificial Sequence
  Description of Artificial Sequence: Synthetic oligonucleotide
guaaaccgaguauaaggaa

SEQ ID NO: 1294238 - RNA, 19 nt, Artificial Sequence
  Description of Artificial Sequence: Synthetic oligonucleotide
uccucaaccagugaaccuu

SEQ ID NO: 1294239 - RNA, 19 nt, Artificial Sequence
  Description of Artificial Sequence: Synthetic oligonucleotide
cuuuaggcaauaagacaca

SEQ ID NO: 1294240 - RNA, 19 nt, Artificial Sequence
  Description of Artificial Sequence: Synthetic oligonucleotide
gacgggccgaucuugcaac

SEQ ID NO: 1294241 - RNA, 19 nt, Artificial Sequence
  Description of Artificial Sequence: Synthetic oligonucleotide
cauaguagcuaauuuuccu

SEQ ID NO: 1294242 - RNA, 19 nt, Artificial Sequence
  Description of Artificial Sequence: Synthetic oligonucleotide
augcacaagcuuuuccuaa

SEQ ID NO: 1294243 - RNA, 19 nt, Artificial Sequence
  Description of Artificial Sequence: Synthetic oligonucleotide
ucaguugccuccagaugaa

SEQ ID NO: 1294244 - RNA, 19 nt, Artificial Sequence
  Description of Artificial Sequence: Synthetic oligonucleotide
auuucugucuguaauccua

SEQ ID NO: 1294245 - RNA, 19 nt, Artificial Sequence
  Description of Artificial Sequence: Synthetic oligonucleotide
ugcccguccauuacaucca

SEQ ID NO: 1294246 - RNA, 19 nt, Artificial Sequence
  Description of Artificial Sequence: Synthetic oligonucleotide
ugggcaucauaucuuccau

SEQ ID NO: 1294247 - RNA, 19 nt, Artificial Sequence
  Description of Artificial Sequence: Synthetic oligonucleotide
ugccagaccaugacaugac

SEQ ID NO: 1294248 - RNA, 19 nt, Artificial Sequence
  Description of Artificial Sequence: Synthetic oligonucleotide
uuucaugccuacguuuauc

SEQ ID NO: 1294249 - RNA, 19 nt, Artificial Sequence
  Description of Artificial Sequence: Synthetic oligonucleotide
auacaaguugucccagcaa

SEQ ID NO: 1294250 - RNA, 19 nt, Artificial Sequence
  Description of Artificial Sequence: Synthetic oligonucleotide
uugcaacccgacgccaugg

SEQ ID NO: 1294251 - RNA, 19 nt, Artificial Sequence
  Description of Artificial Sequence: Synthetic oligonucleotide
aguguucuuauaauuuaau

SEQ ID NO: 1294252 - RNA, 19 nt, Artificial Sequence
  Description of Artificial Sequence: Synthetic oligonucleotide
aagcuguuucaugccuacg

SEQ ID NO: 1294253 - RNA, 19 nt, Artificial Sequence
  Description of Artificial Sequence: Synthetic oligonucleotide
acaaucauguuagcuccug

SEQ ID NO: 1294254 - RNA, 19 nt, Artificial Sequence
  Description of Artificial Sequence: Synthetic oligonucleotide
aaguugggaacuggguccu

SEQ ID NO: 1294255 - RNA, 19 nt, Artificial Sequence
  Description of Artificial Sequence: Synthetic oligonucleotide
uaauaccuauuuugauaaa

SEQ ID NO: 1294256 - RNA, 19 nt, Artificial Sequence
  Description of Artificial Sequence: Synthetic oligonucleotide
uuguuccugguuugauggc

SEQ ID NO: 1294257 - RNA, 19 nt, Artificial Sequence
  Description of Artificial Sequence: Synthetic oligonucleotide
agagaccagguuucuugug

SEQ ID NO: 1294258 - RNA, 19 nt, Artificial Sequence
  Description of Artificial Sequence: Synthetic oligonucleotide
cagugucaggaccuacucc

SEQ ID NO: 1294259 - RNA, 19 nt, Artificial Sequence
  Description of Artificial Sequence: Synthetic oligonucleotide
acgccauggugccgguucc

SEQ ID NO: 1294260 - RNA, 19 nt, Artificial Sequence
  Description of Artificial Sequence: Synthetic oligonucleotide
augccagaccaugacauga

SEQ ID NO: 1294261 - RNA, 19 nt, Artificial Sequence
  Description of Artificial Sequence: Synthetic oligonucleotide
aaaugcccguccauuacau

SEQ ID NO: 1294262 - RNA, 19 nt, Artificial Sequence
  Description of Artificial Sequence: Synthetic oligonucleotide
caugugcauaucaaagaaa

SEQ ID NO: 1294263 - RNA, 19 nt, Artificial Sequence
  Description of Artificial Sequence: Synthetic oligonucleotide
cgaucuugcaacccgacgc

SEQ ID NO: 1294264 - RNA, 19 nt, Artificial Sequence
  Description of Artificial Sequence: Synthetic oligonucleotide
agacauuccuuaguaaguu

SEQ ID NO: 1294265 - RNA, 19 nt, Artificial Sequence
  Description of Artificial Sequence: Synthetic oligonucleotide
accauguuuucacucuuua

SEQ ID NO: 1294266 - RNA, 19 nt, Artificial Sequence
  Description of Artificial Sequence: Synthetic oligonucleotide
ucuugcaacccgacgccau

SEQ ID NO: 1294267 - RNA, 19 nt, Artificial Sequence
  Description of Artificial Sequence: Synthetic oligonucleotide
aggcaauaagacacauuuc

SEQ ID NO: 1294268 - RNA, 19 nt, Artificial Sequence
  Description of Artificial Sequence: Synthetic oligonucleotide
aacauccugcacaauugaa

SEQ ID NO: 1294269 - RNA, 19 nt, Artificial Sequence
  Description of Artificial Sequence: Synthetic oligonucleotide
gcauaucaaagaaaggguc

SEQ ID NO: 1294270 - RNA, 19 nt, Artificial Sequence
  Description of Artificial Sequence: Synthetic oligonucleotide
ucgaucaagagagcguuuu

SEQ ID NO: 1294271 - RNA, 19 nt, Artificial Sequence
  Description of Artificial Sequence: Synthetic oligonucleotide
cuucugaacagacauuccu

SEQ ID NO: 1294272 - RNA, 19 nt, Artificial Sequence
  Description of Artificial Sequence: Synthetic oligonucleotide
gaucaagagagcguuuucu

SEQ ID NO: 1294273 - RNA, 19 nt, Artificial Sequence
  Description of Artificial Sequence: Synthetic oligonucleotide
cucaaccagugaaccuugg

SEQ ID NO: 1294274 - RNA, 19 nt, Artificial Sequence
  Description of Artificial Sequence: Synthetic oligonucleotide
gaaugcagcacugcuucga

SEQ ID NO: 1294275 - RNA, 19 nt, Artificial Sequence
  Description of Artificial Sequence: Synthetic oligonucleotide
ggaacaaaaugcccgucca

SEQ ID NO: 1294276 - RNA, 19 nt, Artificial Sequence
  Description of Artificial Sequence: Synthetic oligonucleotide
acgggccgaucuugcaacc

SEQ ID NO: 1294277 - RNA, 19 nt, Artificial Sequence
  Description of Artificial Sequence: Synthetic oligonucleotide
cagcaagcuguuucaugcc

SEQ ID NO: 1294278 - RNA, 19 nt, Artificial Sequence
  Description of Artificial Sequence: Synthetic oligonucleotide
gaccucuauauccaaaguu

SEQ ID NO: 1294279 - RNA, 19 nt, Artificial Sequence
  Description of Artificial Sequence: Synthetic oligonucleotide
cuucaucgaucaagagagc

SEQ ID NO: 1294280 - RNA, 19 nt, Artificial Sequence
  Description of Artificial Sequence: Synthetic oligonucleotide
ggggccaaauauucaacug

SEQ ID NO: 1294281 - RNA, 19 nt, Artificial Sequence
  Description of Artificial Sequence: Synthetic oligonucleotide
ucuaucugauuagcccaug

SEQ ID NO: 1294282 - RNA, 19 nt, Artificial Sequence
  Description of Artificial Sequence: Synthetic oligonucleotide
auugugugauuugauuaaa

SEQ ID NO: 1294283 - RNA, 19 nt, Artificial Sequence
  Description of Artificial Sequence: Synthetic oligonucleotide
cauuaccaaggccauaucu

SEQ ID NO: 1294284 - RNA, 19 nt, Artificial Sequence
  Description of Artificial Sequence: Synthetic oligonucleotide
ccuacguuuaucaguguuc

SEQ ID NO: 1294285 - RNA, 19 nt, Artificial Sequence
  Description of Artificial Sequence: Synthetic oligonucleotide
gaccuacuccaccaucgac

SEQ ID NO: 1294286 - RNA, 19 nt, Artificial Sequence
  Description of Artificial Sequence: Synthetic oligonucleotide
caguguucuuauaauuuaa

SEQ ID NO: 1294287 - RNA, 19 nt, Artificial Sequence
  Description of Artificial Sequence: Synthetic oligonucleotide
auucuuuaguaaaccgagu

SEQ ID NO: 1294288 - RNA, 19 nt, Artificial Sequence
  Description of Artificial Sequence: Synthetic oligonucleotide
gaucuggggucgucacucc

SEQ ID NO: 1294289 - RNA, 19 nt, Artificial Sequence
  Description of Artificial Sequence: Synthetic oligonucleotide
ggcuuucaaccacagggug

SEQ ID NO: 1294290 - RNA, 19 nt, Artificial Sequence
  Description of Artificial Sequence: Synthetic oligonucleotide
ucaaugugauuugguaguu

SEQ ID NO: 1294291 - RNA, 19 nt, Artificial Sequence
  Description of Artificial Sequence: Synthetic oligonucleotide
uucgggccuagauaccauc

SEQ ID NO: 1294292 - RNA, 19 nt, Artificial Sequence
  Description of Artificial Sequence: Synthetic oligonucleotide
cuggccuagcugcuuucgg

SEQ ID NO: 1294293 - RNA, 19 nt, Artificial Sequence
  Description of Artificial Sequence: Synthetic oligonucleotide
ugcuuucggaggcuuucaa

SEQ ID NO: 1294294 - RNA, 19 nt, Artificial Sequence
  Description of Artificial Sequence: Synthetic oligonucleotide
auccugcacaauugaauuu

SEQ ID NO: 1294295 - RNA, 19 nt, Artificial Sequence
  Description of Artificial Sequence: Synthetic oligonucleotide
accuuauagggcaggaaaa

SEQ ID NO: 1294296 - RNA, 19 nt, Artificial Sequence
  Description of Artificial Sequence: Synthetic oligonucleotide
ccagaccaugacaugacac

SEQ ID NO: 1294297 - RNA, 19 nt, Artificial Sequence
  Description of Artificial Sequence: Synthetic oligonucleotide
auucauauucucaggcaua

SEQ ID NO: 1294298 - RNA, 19 nt, Artificial Sequence
  Description of Artificial Sequence: Synthetic oligonucleotide
accaaagcuucuaauuuua

SEQ ID NO: 1294299 - RNA, 19 nt, Artificial Sequence
  Description of Artificial Sequence: Synthetic oligonucleotide
gucgcuguugaggauggac

SEQ ID NO: 1294300 - RNA, 19 nt, Artificial Sequence
  Description of Artificial Sequence: Synthetic oligonucleotide
uccgcgcauuucugaacag

SEQ ID NO: 1294301 - RNA, 19 nt, Artificial Sequence
  Description of Artificial Sequence: Synthetic oligonucleotide
acaugacaccccaccaaag

SEQ ID NO: 1294302 - RNA, 19 nt, Artificial Sequence
  Description of Artificial Sequence: Synthetic oligonucleotide
aggcuuucaaccacagggu

SEQ ID NO: 1294303 - RNA, 19 nt, Artificial Sequence
  Description of Artificial Sequence: Synthetic oligonucleotide
ugcaacccgacgccauggu

SEQ ID NO: 1294304 - RNA, 19 nt, Artificial Sequence
  Description of Artificial Sequence: Synthetic oligonucleotide
ccaaagcuucuaauuuuag

SEQ ID NO: 1294305 - RNA, 19 nt, Artificial Sequence
  Description of Artificial Sequence: Synthetic oligonucleotide
gcuuuagggauaaaucaga

SEQ ID NO: 1294306 - RNA, 19 nt, Artificial Sequence
  Description of Artificial Sequence: Synthetic oligonucleotide
cuccgcgcauuucugaaca

SEQ ID NO: 1294307 - RNA, 19 nt, Artificial Sequence
  Description of Artificial Sequence: Synthetic oligonucleotide
acuuuaccuuauagggcag

SEQ ID NO: 1294308 - RNA, 19 nt, Artificial Sequence
  Description of Artificial Sequence: Synthetic oligonucleotide
gggccgaucuugcaacccg

SEQ ID NO: 1294309 - RNA, 19 nt, Artificial Sequence
  Description of Artificial Sequence: Synthetic oligonucleotide
cuggguugucaguugccuc

SEQ ID NO: 1294310 - RNA, 19 nt, Artificial Sequence
  Description of Artificial Sequence: Synthetic oligonucleotide
uaaagccccuggguuguca

SEQ ID NO: 1294311 - RNA, 19 nt, Artificial Sequence
  Description of Artificial Sequence: Synthetic oligonucleotide
ccauaucuaucugauuagc

SEQ ID NO: 1294312 - RNA, 19 nt, Artificial Sequence
  Description of Artificial Sequence: Synthetic oligonucleotide
ggaggcuuucaaccacagg

SEQ ID NO: 1294313 - RNA, 19 nt, Artificial Sequence
  Description of Artificial Sequence: Synthetic oligonucleotide
auguuagcuccugccuccg

SEQ ID NO: 1294314 - RNA, 19 nt, Artificial Sequence
  Description of Artificial Sequence: Synthetic oligonucleotide
guauauugauuggcaccug

SEQ ID NO: 1294315 - RNA, 19 nt, Artificial Sequence
  Description of Artificial Sequence: Synthetic oligonucleotide
cagguucuacagucauuac

SEQ ID NO: 1294316 - RNA, 19 nt, Artificial Sequence
  Description of Artificial Sequence: Synthetic oligonucleotide
uucuaaccucuugaacauc

SEQ ID NO: 1294317 - RNA, 19 nt, Artificial Sequence
  Description of Artificial Sequence: Synthetic oligonucleotide
cuacguuuaucaguguucu

SEQ ID NO: 1294318 - RNA, 19 nt, Artificial Sequence
  Description of Artificial Sequence: Synthetic oligonucleotide
ggggucgucacuccucaug

SEQ ID NO: 1294319 - RNA, 19 nt, Artificial Sequence
  Description of Artificial Sequence: Synthetic oligonucleotide
gcuuucggaggcuuucaac

SEQ ID NO: 1294320 - RNA, 19 nt, Artificial Sequence
  Description of Artificial Sequence: Synthetic oligonucleotide
cugcuucgauucaauguga

SEQ ID NO: 1294321 - RNA, 19 nt, Artificial Sequence
  Description of Artificial Sequence: Synthetic oligonucleotide
guucuacagucauuaccaa

SEQ ID NO: 1294322 - RNA, 19 nt, Artificial Sequence
  Description of Artificial Sequence: Synthetic oligonucleotide
uggacgggccgaucuugca

SEQ ID NO: 1294323 - RNA, 19 nt, Artificial Sequence
  Description of Artificial Sequence: Synthetic oligonucleotide
aagugauguugggaacaaa

SEQ ID NO: 1294324 - RNA, 19 nt, Artificial Sequence
  Description of Artificial Sequence: Synthetic oligonucleotide
aucuaucugauuagcccau

SEQ ID NO: 1294325 - RNA, 19 nt, Artificial Sequence
  Description of Artificial Sequence: Synthetic oligonucleotide
gggccaaauauucaacugu

SEQ ID NO: 1294326 - RNA, 19 nt, Artificial Sequence
  Description of Artificial Sequence: Synthetic oligonucleotide
gguuucuuguggcuucauc

SEQ ID NO: 1294327 - RNA, 19 nt, Artificial Sequence
  Description of Artificial Sequence: Synthetic oligonucleotide
auaacagaucuggggucgu

SEQ ID NO: 1294328 - RNA, 19 nt, Artificial Sequence
  Description of Artificial Sequence: Synthetic oligonucleotide
gcuguugaggauggacggg

SEQ ID NO: 1294329 - RNA, 19 nt, Artificial Sequence
  Description of Artificial Sequence: Synthetic oligonucleotide
ugggaacaaaaugcccguc

SEQ ID NO: 1294330 - RNA, 19 nt, Artificial Sequence
  Description of Artificial Sequence: Synthetic oligonucleotide
guugggaacuggguccuca

SEQ ID NO: 1294331 - RNA, 19 nt, Artificial Sequence
  Description of Artificial Sequence: Synthetic oligonucleotide
gauuggcaccugccacagc

SEQ ID NO: 1294332 - RNA, 19 nt, Artificial Sequence
  Description of Artificial Sequence: Synthetic oligonucleotide
ucauauucucaggcauaua

SEQ ID NO: 1294333 - RNA, 19 nt, Artificial Sequence
  Description of Artificial Sequence: Synthetic oligonucleotide
guagcuaauuuuccucuuu

SEQ ID NO: 1294334 - RNA, 19 nt, Artificial Sequence
  Description of Artificial Sequence: Synthetic oligonucleotide
uaacagaucuggggucguc

SEQ ID NO: 1294335 - RNA, 19 nt, Artificial Sequence
  Description of Artificial Sequence: Synthetic oligonucleotide
cgcgcauuucugaacagug

SEQ ID NO: 1294336 - RNA, 19 nt, Artificial Sequence
  Description of Artificial Sequence: Synthetic oligonucleotide
ccgaucuugcaacccgacg

SEQ ID NO: 1294337 - RNA, 19 nt, Artificial Sequence
  Description of Artificial Sequence: Synthetic oligonucleotide
cucggcuucauacauuauu

SEQ ID NO: 1294338 - RNA, 19 nt, Artificial Sequence
  Description of Artificial Sequence: Synthetic oligonucleotide
gcuuucaaccacaggguga

SEQ ID NO: 1294339 - RNA, 19 nt, Artificial Sequence
  Description of Artificial Sequence: Synthetic oligonucleotide
cuggggucgucacuccuca

SEQ ID NO: 1294340 - RNA, 19 nt, Artificial Sequence
  Description of Artificial Sequence: Synthetic oligonucleotide
gggauaaaucagagaaaca

SEQ ID NO: 1294341 - RNA, 19 nt, Artificial Sequence
  Description of Artificial Sequence: Synthetic oligonucleotide
caccaucgaccucuauauc

SEQ ID NO: 1294342 - RNA, 19 nt, Artificial Sequence
  Description of Artificial Sequence: Synthetic oligonucleotide
ccucaaccagugaaccuug

SEQ ID NO: 1294343 - RNA, 19 nt, Artificial Sequence
  Description of Artificial Sequence: Synthetic oligonucleotide
ugccuacguuuaucagugu

SEQ ID NO: 1294344 - RNA, 19 nt, Artificial Sequence
  Description of Artificial Sequence: Synthetic oligonucleotide
cagagaccagguuucuugu

SEQ ID NO: 1294345 - RNA, 19 nt, Artificial Sequence
  Description of Artificial Sequence: Synthetic oligonucleotide
guuugauggcaaggccaac

SEQ ID NO: 1294346 - RNA, 19 nt, Artificial Sequence
  Description of Artificial Sequence: Synthetic oligonucleotide
uccuggccuagcugcuuuc

SEQ ID NO: 1294347 - RNA, 19 nt, Artificial Sequence
  Description of Artificial Sequence: Synthetic oligonucleotide
agcguuuucugagcagcuu

SEQ ID NO: 1294348 - RNA, 19 nt, Artificial Sequence
  Description of Artificial Sequence: Synthetic oligonucleotide
gcaacccgacgccauggug

SEQ ID NO: 1294349 - RNA, 19 nt, Artificial Sequence
  Description of Artificial Sequence: Synthetic oligonucleotide
caucgaucaagagagcguu

SEQ ID NO: 1294350 - RNA, 19 nt, Artificial Sequence
  Description of Artificial Sequence: Synthetic oligonucleotide
gcuaaucucuaaauggcau

SEQ ID NO: 1294351 - RNA, 19 nt, Artificial Sequence
  Description of Artificial Sequence: Synthetic oligonucleotide
ggaccuacuccaccaucga

SEQ ID NO: 1294352 - RNA, 19 nt, Artificial Sequence
  Description of Artificial Sequence: Synthetic oligonucleotide
uuaaagccccuggguuguc

SEQ ID NO: 1294353 - RNA, 19 nt, Artificial Sequence
  Description of Artificial Sequence: Synthetic oligonucleotide
cccugauaucuuuaauuaa

SEQ ID NO: 1294354 - RNA, 19 nt, Artificial Sequence
  Description of Artificial Sequence: Synthetic oligonucleotide
ccguccauuacauccaggu

SEQ ID NO: 1294355 - RNA, 19 nt, Artificial Sequence
  Description of Artificial Sequence: Synthetic oligonucleotide
cagucauuaccaaggccau

SEQ ID NO: 1294356 - RNA, 19 nt, Artificial Sequence
  Description of Artificial Sequence: Synthetic oligonucleotide
cguccauuacauccaggug

SEQ ID NO: 1294357 - RNA, 19 nt, Artificial Sequence
  Description of Artificial Sequence: Synthetic oligonucleotide
agcagagaccagguuucuu

SEQ ID NO: 1294358 - RNA, 19 nt, Artificial Sequence
  Description of Artificial Sequence: Synthetic oligonucleotide
ggacgggccgaucuugcaa

SEQ ID NO: 1294359 - RNA, 19 nt, Artificial Sequence
  Description of Artificial Sequence: Synthetic oligonucleotide
acucggccccuagguuggc

SEQ ID NO: 1294360 - RNA, 19 nt, Artificial Sequence
  Description of Artificial Sequence: Synthetic oligonucleotide
gagcguuuucugagcagcu

SEQ ID NO: 1294361 - RNA, 19 nt, Artificial Sequence
  Description of Artificial Sequence: Synthetic oligonucleotide
ccccuggguugucaguugc

SEQ ID NO: 1294362 - RNA, 19 nt, Artificial Sequence
  Description of Artificial Sequence: Synthetic oligonucleotide
cccuggguugucaguugcc

SEQ ID NO: 1294363 - RNA, 19 nt, Artificial Sequence
  Description of Artificial Sequence: Synthetic oligonucleotide
aucgaucaagagagcguuu

SEQ ID NO: 1294364 - RNA, 19 nt, Artificial Sequence
  Description of Artificial Sequence: Synthetic oligonucleotide
gcccguccauuacauccag

SEQ ID NO: 1294365 - RNA, 19 nt, Artificial Sequence
  Description of Artificial Sequence: Synthetic oligonucleotide
ccuacuccaccaucgaccu

SEQ ID NO: 1294366 - RNA, 19 nt, Artificial Sequence
  Description of Artificial Sequence: Synthetic oligonucleotide
cucggccccuagguuggcc

SEQ ID NO: 1294367 - RNA, 19 nt, Artificial Sequence
  Description of Artificial Sequence: Synthetic oligonucleotide
ccuccgcgcauuucugaac

SEQ ID NO: 1294368 - RNA, 19 nt, Artificial Sequence
  Description of Artificial Sequence: Synthetic oligonucleotide
ccaugacaugacaccccac

SEQ ID NO: 1294369 - RNA, 19 nt, Artificial Sequence
  Description of Artificial Sequence: Synthetic oligonucleotide
cacugccagacacaaucau

SEQ ID NO: 1294370 - RNA, 19 nt, Artificial Sequence
  Description of Artificial Sequence: Synthetic oligonucleotide
gccuacguuuaucaguguu

SEQ ID NO: 1294371 - RNA, 19 nt, Artificial Sequence
  Description of Artificial Sequence: Synthetic oligonucleotide
gcaagcuguuucaugccua

SEQ ID NO: 1294372 - RNA, 19 nt, Artificial Sequence
  Description of Artificial Sequence: Synthetic oligonucleotide
ggccccuagguuggccagg

SEQ ID NO: 1294373 - RNA, 19 nt, Artificial Sequence
  Description of Artificial Sequence: Synthetic oligonucleotide
uacccacuguucgggccua

SEQ ID NO: 1294374 - RNA, 19 nt, Artificial Sequence
  Description of Artificial Sequence: Synthetic oligonucleotide
gccuccgcgcauuucugaa

SEQ ID NO: 1294375 - RNA, 19 nt, Artificial Sequence
  Description of Artificial Sequence: Synthetic oligonucleotide
cagaucuggggucgucacu

SEQ ID NO: 1294376 - RNA, 19 nt, Artificial Sequence
  Description of Artificial Sequence: Synthetic oligonucleotide
gcuucgauucaaugugauu

SEQ ID NO: 1294377 - RNA, 19 nt, Artificial Sequence
  Description of Artificial Sequence: Synthetic oligonucleotide
acaccccaccaaagcuucu

SEQ ID NO: 1294378 - RNA, 19 nt, Artificial Sequence
  Description of Artificial Sequence: Synthetic oligonucleotide
cguuuaucaguguucuuau

SEQ ID NO: 1294379 - RNA, 19 nt, Artificial Sequence
  Description of Artificial Sequence: Synthetic oligonucleotide
agugaaccuugggcaucau

SEQ ID NO: 1294380 - RNA, 19 nt, Artificial Sequence
  Description of Artificial Sequence: Synthetic oligonucleotide
cgauucaaugugauuuggu

SEQ ID NO: 1294381 - RNA, 19 nt, Artificial Sequence
  Description of Artificial Sequence: Synthetic oligonucleotide
acccucggcuucauacauu

SEQ ID NO: 1294382 - RNA, 19 nt, Artificial Sequence
  Description of Artificial Sequence: Synthetic oligonucleotide
caguugccuccagaugaaa

SEQ ID NO: 1294383 - RNA, 19 nt, Artificial Sequence
  Description of Artificial Sequence: Synthetic oligonucleotide
cuguuguuccugguuugau

SEQ ID NO: 1294384 - RNA, 19 nt, Artificial Sequence
  Description of Artificial Sequence: Synthetic oligonucleotide
ccuccagaugaaagguaua

SEQ ID NO: 1294385 - RNA, 19 nt, Artificial Sequence
  Description of Artificial Sequence: Synthetic oligonucleotide
ggugaccaaaagugauguu

SEQ ID NO: 1294386 - RNA, 19 nt, Artificial Sequence
  Description of Artificial Sequence: Synthetic oligonucleotide
guucgggccuagauaccau

SEQ ID NO: 1294387 - RNA, 19 nt, Artificial Sequence
  Description of Artificial Sequence: Synthetic oligonucleotide
ggauggacgggccgaucuu

SEQ ID NO: 1294388 - RNA, 19 nt, Artificial Sequence
  Description of Artificial Sequence: Synthetic oligonucleotide
cgggccgaucuugcaaccc

SEQ ID NO: 1294389 - RNA, 19 nt, Artificial Sequence
  Description of Artificial Sequence: Synthetic oligonucleotide
cgaccucuauauccaaagu

SEQ ID NO: 1294390 - RNA, 19 nt, Artificial Sequence
  Description of Artificial Sequence: Synthetic oligonucleotide
gccccuagguuggccaggu

SEQ ID NO: 1294391 - RNA, 19 nt, Artificial Sequence
  Description of Artificial Sequence: Synthetic oligonucleotide
ccgcgcauuucugaacagu

SEQ ID NO: 1294392 - RNA, 19 nt, Artificial Sequence
  Description of Artificial Sequence: Synthetic oligonucleotide
cggcuucauacauuauuuu

SEQ ID NO: 1294393 - RNA, 19 nt, Artificial Sequence
  Description of Artificial Sequence: Synthetic oligonucleotide
ggccaaccuucaucccauu

SEQ ID NO: 1294394 - RNA, 19 nt, Artificial Sequence
  Description of Artificial Sequence: Synthetic oligonucleotide
ccaggucgcuguugaggau

SEQ ID NO: 1294395 - RNA, 19 nt, Artificial Sequence
  Description of Artificial Sequence: Synthetic oligonucleotide
cgggccuagauaccaucau

SEQ ID NO: 1294396 - RNA, 19 nt, Artificial Sequence
  Description of Artificial Sequence: Synthetic oligonucleotide
ccucggcuucauacauuau

SEQ ID NO: 1294397 - RNA, 19 nt, Artificial Sequence
  Description of Artificial Sequence: Synthetic oligonucleotide
gcgcaggcacucggccccu

SEQ ID NO: 1294398 - RNA, 19 nt, Artificial Sequence
  Description of Artificial Sequence: Synthetic oligonucleotide
aaaauugucauccagguga

SEQ ID NO: 1294399 - RNA, 19 nt, Artificial Sequence
  Description of Artificial Sequence: Synthetic oligonucleotide
uccguuuucauuaaagacg

SEQ ID NO: 1294400 - RNA, 19 nt, Artificial Sequence
  Description of Artificial Sequence: Synthetic oligonucleotide
uuugauuaaaggcauacug

SEQ ID NO: 1294401 - RNA, 19 nt, Artificial Sequence
  Description of Artificial Sequence: Synthetic oligonucleotide
acucauaaaauugucaucc

SEQ ID NO: 1294402 - RNA, 19 nt, Artificial Sequence
  Description of Artificial Sequence: Synthetic oligonucleotide
uuguauagggaauuuaggg

SEQ ID NO: 1294403 - RNA, 19 nt, Artificial Sequence
  Description of Artificial Sequence: Synthetic oligonucleotide
uuuuguauagggaauuuag

SEQ ID NO: 1294404 - RNA, 19 nt, Artificial Sequence
  Description of Artificial Sequence: Synthetic oligonucleotide
aaagugauggagcaaauga

SEQ ID NO: 1294405 - RNA, 19 nt, Artificial Sequence
  Description of Artificial Sequence: Synthetic oligonucleotide
aagacaugauuccaaaauc

SEQ ID NO: 1294406 - RNA, 19 nt, Artificial Sequence
  Description of Artificial Sequence: Synthetic oligonucleotide
cauaaaauugucauccagg

SEQ ID NO: 1294407 - RNA, 19 nt, Artificial Sequence
  Description of Artificial Sequence: Synthetic oligonucleotide
guauagggaauuuagggcg

SEQ ID NO: 1294408 - RNA, 19 nt, Artificial Sequence
  Description of Artificial Sequence: Synthetic oligonucleotide
uucacaagcuguuggaucg

SEQ ID NO: 1294409 - RNA, 19 nt, Artificial Sequence
  Description of Artificial Sequence: Synthetic oligonucleotide
uugauuaaaggcauacugc

SEQ ID NO: 1294410 - RNA, 19 nt, Artificial Sequence
  Description of Artificial Sequence: Synthetic oligonucleotide
uguauagggaauuuagggc

SEQ ID NO: 1294411 - RNA, 19 nt, Artificial Sequence
  Description of Artificial Sequence: Synthetic oligonucleotide
uuuagggcgacucauaaaa

SEQ ID NO: 1294412 - RNA, 19 nt, Artificial Sequence
  Description of Artificial Sequence: Synthetic oligonucleotide
aaugauauuggaaacggca

SEQ ID NO: 1294413 - RNA, 19 nt, Artificial Sequence
  Description of Artificial Sequence: Synthetic oligonucleotide
aagucaaauugauauggag

SEQ ID NO: 1294414 - RNA, 19 nt, Artificial Sequence
  Description of Artificial Sequence: Synthetic oligonucleotide
auugauauggaguguggac

SEQ ID NO: 1294415 - RNA, 19 nt, Artificial Sequence
  Description of Artificial Sequence: Synthetic oligonucleotide
auagaaauggaccaucacu

SEQ ID NO: 1294416 - RNA, 19 nt, Artificial Sequence
  Description of Artificial Sequence: Synthetic oligonucleotide
auccguuuucauuaaagac

SEQ ID NO: 1294417 - RNA, 19 nt, Artificial Sequence
  Description of Artificial Sequence: Synthetic oligonucleotide
aggaaccugacguacaugg

SEQ ID NO: 1294418 - RNA, 19 nt, Artificial Sequence
  Description of Artificial Sequence: Synthetic oligonucleotide
aaauccaugugcaauaugu

SEQ ID NO: 1294419 - RNA, 19 nt, Artificial Sequence
  Description of Artificial Sequence: Synthetic oligonucleotide
uccaugugcaauauguugc

SEQ ID NO: 1294420 - RNA, 19 nt, Artificial Sequence
  Description of Artificial Sequence: Synthetic oligonucleotide
auaaaauugucauccaggu

SEQ ID NO: 1294421 - RNA, 19 nt, Artificial Sequence
  Description of Artificial Sequence: Synthetic oligonucleotide
uggagcgcugcccagaugg

SEQ ID NO: 1294422 - RNA, 19 nt, Artificial Sequence
  Description of Artificial Sequence: Synthetic oligonucleotide
aaaauccagacugauaaca

SEQ ID NO: 1294423 - RNA, 19 nt, Artificial Sequence
  Description of Artificial Sequence: Synthetic oligonucleotide
aauccguuuucauuaaaga

SEQ ID NO: 1294424 - RNA, 19 nt, Artificial Sequence
  Description of Artificial Sequence: Synthetic oligonucleotide
aagauauuuucauuaucca

SEQ ID NO: 1294425 - RNA, 19 nt, Artificial Sequence
  Description of Artificial Sequence: Synthetic oligonucleotide
augauuccaaaauccagac

SEQ ID NO: 1294426 - RNA, 19 nt, Artificial Sequence
  Description of Artificial Sequence: Synthetic oligonucleotide
cuuauaaucacugaagaca

SEQ ID NO: 1294427 - RNA, 19 nt, Artificial Sequence
  Description of Artificial Sequence: Synthetic oligonucleotide
uuggaaacggcauuguuga

SEQ ID NO: 1294428 - RNA, 19 nt, Artificial Sequence
  Description of Artificial Sequence: Synthetic oligonucleotide
ugcuuauaaucacugaaga

SEQ ID NO: 1294429 - RNA, 19 nt, Artificial Sequence
  Description of Artificial Sequence: Synthetic oligonucleotide
aaaggcauacugcuuauaa

SEQ ID NO: 1294430 - RNA, 19 nt, Artificial Sequence
  Description of Artificial Sequence: Synthetic oligonucleotide
aaaacgcucgccaaaagug

SEQ ID NO: 1294431 - RNA, 19 nt, Artificial Sequence
  Description of Artificial Sequence: Synthetic oligonucleotide
agauguuauagaaauggac

SEQ ID NO: 1294432 - RNA, 19 nt, Artificial Sequence
  Description of Artificial Sequence: Synthetic oligonucleotide
aaauggaccaucacugagg

SEQ ID NO: 1294433 - RNA, 19 nt, Artificial Sequence
  Description of Artificial Sequence: Synthetic oligonucleotide
ugucuggaagaucaauccg

SEQ ID NO: 1294434 - RNA, 19 nt, Artificial Sequence
  Description of Artificial Sequence: Synthetic oligonucleotide
auguuauagaaauggacca

SEQ ID NO: 1294435 - RNA, 19 nt, Artificial Sequence
  Description of Artificial Sequence: Synthetic oligonucleotide
aauggaccaucacugagga

SEQ ID NO: 1294436 - RNA, 19 nt, Artificial Sequence
  Description of Artificial Sequence: Synthetic oligonucleotide
uuauagaaauggaccauca

SEQ ID NO: 1294437 - RNA, 19 nt, Artificial Sequence
  Description of Artificial Sequence: Synthetic oligonucleotide
caauauguugcccacgaag

SEQ ID NO: 1294438 - RNA, 19 nt, Artificial Sequence
  Description of Artificial Sequence: Synthetic oligonucleotide
uugauauggaguguggacc

SEQ ID NO: 1294439 - RNA, 19 nt, Artificial Sequence
  Description of Artificial Sequence: Synthetic oligonucleotide
gaaauggaccaucacugag

SEQ ID NO: 1294440 - RNA, 19 nt, Artificial Sequence
  Description of Artificial Sequence: Synthetic oligonucleotide
aauuuagggcgacucauaa

SEQ ID NO: 1294441 - RNA, 19 nt, Artificial Sequence
  Description of Artificial Sequence: Synthetic oligonucleotide
ucaguuuucuccagguagc

SEQ ID NO: 1294442 - RNA, 19 nt, Artificial Sequence
  Description of Artificial Sequence: Synthetic oligonucleotide
gauauuggaaacggcauug

SEQ ID NO: 1294443 - RNA, 19 nt, Artificial Sequence
  Description of Artificial Sequence: Synthetic oligonucleotide
aggaacaagaaggugacag

SEQ ID NO: 1294444 - RNA, 19 nt, Artificial Sequence
  Description of Artificial Sequence: Synthetic oligonucleotide
guagcuauuuccuguuugg

SEQ ID NO: 1294445 - RNA, 19 nt, Artificial Sequence
  Description of Artificial Sequence: Synthetic oligonucleotide
ugcagagaagucaaauuga

SEQ ID NO: 1294446 - RNA, 19 nt, Artificial Sequence
  Description of Artificial Sequence: Synthetic oligonucleotide
gaaccugacguacauggcc

SEQ ID NO: 1294447 - RNA, 19 nt, Artificial Sequence
  Description of Artificial Sequence: Synthetic oligonucleotide
ugauauggaguguggaccc

SEQ ID NO: 1294448 - RNA, 19 nt, Artificial Sequence
  Description of Artificial Sequence: Synthetic oligonucleotide
ugcaauauguugcccacga

SEQ ID NO: 1294449 - RNA, 19 nt, Artificial Sequence
  Description of Artificial Sequence: Synthetic oligonucleotide
gaucaauccguuuucauua

SEQ ID NO: 1294450 - RNA, 19 nt, Artificial Sequence
  Description of Artificial Sequence: Synthetic oligonucleotide
gugcagagaagucaaauug

SEQ ID NO: 1294451 - RNA, 19 nt, Artificial Sequence
  Description of Artificial Sequence: Synthetic oligonucleotide
ucuccagguagcuauuucc

SEQ ID NO: 1294452 - RNA, 19 nt, Artificial Sequence
  Description of Artificial Sequence: Synthetic oligonucleotide
gugaguaaaggcuucuuug

SEQ ID NO: 1294453 - RNA, 19 nt, Artificial Sequence
  Description of Artificial Sequence: Synthetic oligonucleotide
aaucacugaagacaugauu

SEQ ID NO: 1294454 - RNA, 19 nt, Artificial Sequence
  Description of Artificial Sequence: Synthetic oligonucleotide
caauccguuuucauuaaag

SEQ ID NO: 1294455 - RNA, 19 nt, Artificial Sequence
  Description of Artificial Sequence: Synthetic oligonucleotide
aaauugauauggagugugg

SEQ ID NO: 1294456 - RNA, 19 nt, Artificial Sequence
  Description of Artificial Sequence: Synthetic oligonucleotide
aauccagccaauguagugu

SEQ ID NO: 1294457 - RNA, 19 nt, Artificial Sequence
  Description of Artificial Sequence: Synthetic oligonucleotide
uggaguguggaccccuucg

SEQ ID NO: 1294458 - RNA, 19 nt, Artificial Sequence
  Description of Artificial Sequence: Synthetic oligonucleotide
auauguugcccacgaaggg

SEQ ID NO: 1294459 - RNA, 19 nt, Artificial Sequence
  Description of Artificial Sequence: Synthetic oligonucleotide
gauaacauucccauauuuc

SEQ ID NO: 1294460 - RNA, 19 nt, Artificial Sequence
  Description of Artificial Sequence: Synthetic oligonucleotide
ggcauuguugaucuuaaag

SEQ ID NO: 1294461 - RNA, 19 nt, Artificial Sequence
  Description of Artificial Sequence: Synthetic oligonucleotide
caggguguaaccuucuuug

SEQ ID NO: 1294462 - RNA, 19 nt, Artificial Sequence
  Description of Artificial Sequence: Synthetic oligonucleotide
aauugauauggagugugga

SEQ ID NO: 1294463 - RNA, 19 nt, Artificial Sequence
  Description of Artificial Sequence: Synthetic oligonucleotide
agucaaauugauauggagu

SEQ ID NO: 1294464 - RNA, 19 nt, Artificial Sequence
  Description of Artificial Sequence: Synthetic oligonucleotide
ugacaucacagucuaggga

SEQ ID NO: 1294465 - RNA, 19 nt, Artificial Sequence
  Description of Artificial Sequence: Synthetic oligonucleotide
ucgccaaaagugauggagc

SEQ ID NO: 1294466 - RNA, 19 nt, Artificial Sequence
  Description of Artificial Sequence: Synthetic oligonucleotide
agacugauaacauucccau

SEQ ID NO: 1294467 - RNA, 19 nt, Artificial Sequence
  Description of Artificial Sequence: Synthetic oligonucleotide
agcuguuggaucgucaggg

SEQ ID NO: 1294468 - RNA, 19 nt, Artificial Sequence
  Description of Artificial Sequence: Synthetic oligonucleotide
caaauugauauggagugug

SEQ ID NO: 1294469 - RNA, 19 nt, Artificial Sequence
  Description of Artificial Sequence: Synthetic oligonucleotide
aauguagugucuacuguca

SEQ ID NO: 1294470 - RNA, 19 nt, Artificial Sequence
  Description of Artificial Sequence: Synthetic oligonucleotide
caugucuggaagaucaauc

SEQ ID NO: 1294471 - RNA, 19 nt, Artificial Sequence
  Description of Artificial Sequence: Synthetic oligonucleotide
gaggguaguucuuggggcg

SEQ ID NO: 1294472 - RNA, 19 nt, Artificial Sequence
  Description of Artificial Sequence: Synthetic oligonucleotide
agaguccggagauggagcg

SEQ ID NO: 1294473 - RNA, 19 nt, Artificial Sequence
  Description of Artificial Sequence: Synthetic oligonucleotide
uguccaggaagauauuuuc

SEQ ID NO: 1294474 - RNA, 19 nt, Artificial Sequence
  Description of Artificial Sequence: Synthetic oligonucleotide
guaaaggcuucuuugauua

SEQ ID NO: 1294475 - RNA, 19 nt, Artificial Sequence
  Description of Artificial Sequence: Synthetic oligonucleotide
uccagacugauaacauucc

SEQ ID NO: 1294476 - RNA, 19 nt, Artificial Sequence
  Description of Artificial Sequence: Synthetic oligonucleotide
ugauaacauucccauauuu

SEQ ID NO: 1294477 - RNA, 19 nt, Artificial Sequence
  Description of Artificial Sequence: Synthetic oligonucleotide
acugaggaaccugacguac

SEQ ID NO: 1294478 - RNA, 19 nt, Artificial Sequence
  Description of Artificial Sequence: Synthetic oligonucleotide
agggacagcgcagaggugg

SEQ ID NO: 1294479 - RNA, 19 nt, Artificial Sequence
  Description of Artificial Sequence: Synthetic oligonucleotide
agcauuccucaguucuucc

SEQ ID NO: 1294480 - RNA, 19 nt, Artificial Sequence
  Description of Artificial Sequence: Synthetic oligonucleotide
aaauugucauccaggugag

SEQ ID NO: 1294481 - RNA, 19 nt, Artificial Sequence
  Description of Artificial Sequence: Synthetic oligonucleotide
acagucuagggacagcgca

SEQ ID NO: 1294482 - RNA, 19 nt, Artificial Sequence
  Description of Artificial Sequence: Synthetic oligonucleotide
aauccagacugauaacauu

SEQ ID NO: 1294483 - RNA, 19 nt, Artificial Sequence
  Description of Artificial Sequence: Synthetic oligonucleotide
ugugcaauauguugcccac

SEQ ID NO: 1294484 - RNA, 19 nt, Artificial Sequence
  Description of Artificial Sequence: Synthetic oligonucleotide
agaucaauccguuuucauu

SEQ ID NO: 1294485 - RNA, 19 nt, Artificial Sequence
  Description of Artificial Sequence: Synthetic oligonucleotide
ucaaaacgcucgccaaaag

SEQ ID NO: 1294486 - RNA, 19 nt, Artificial Sequence
  Description of Artificial Sequence: Synthetic oligonucleotide
uccaugugcagagaaguca

SEQ ID NO: 1294487 - RNA, 19 nt, Artificial Sequence
  Description of Artificial Sequence: Synthetic oligonucleotide
aggcuucuuugauuaaagg

SEQ ID NO: 1294488 - RNA, 19 nt, Artificial Sequence
  Description of Artificial Sequence: Synthetic oligonucleotide
aagaucaauccguuuucau

SEQ ID NO: 1294489 - RNA, 19 nt, Artificial Sequence
  Description of Artificial Sequence: Synthetic oligonucleotide
caagcuguuggaucgucag

SEQ ID NO: 1294490 - RNA, 19 nt, Artificial Sequence
  Description of Artificial Sequence: Synthetic oligonucleotide
ucuagggacagcgcagagg

SEQ ID NO: 1294491 - RNA, 19 nt, Artificial Sequence
  Description of Artificial Sequence: Synthetic oligonucleotide
uugggguccaugugcagag

SEQ ID NO: 1294492 - RNA, 19 nt, Artificial Sequence
  Description of Artificial Sequence: Synthetic oligonucleotide
auccagccaauguaguguc

SEQ ID NO: 1294493 - RNA, 19 nt, Artificial Sequence
  Description of Artificial Sequence: Synthetic oligonucleotide
ugugcagagaagucaaauu

SEQ ID NO: 1294494 - RNA, 19 nt, Artificial Sequence
  Description of Artificial Sequence: Synthetic oligonucleotide
cauucuggacuucaggcuc

SEQ ID NO: 1294495 - RNA, 19 nt, Artificial Sequence
  Description of Artificial Sequence: Synthetic oligonucleotide
aguaaaggcuucuuugauu

SEQ ID NO: 1294496 - RNA, 19 nt, Artificial Sequence
  Description of Artificial Sequence: Synthetic oligonucleotide
agggaauuuagggcgacuc

SEQ ID NO: 1294497 - RNA, 19 nt, Artificial Sequence
  Description of Artificial Sequence: Synthetic oligonucleotide
ucaucaggguguaaccuuc

SEQ ID NO: 1294498 - RNA, 19 nt, Artificial Sequence
  Description of Artificial Sequence: Synthetic oligonucleotide
uucccauauuucuucacaa

SEQ ID NO: 1294499 - RNA, 19 nt, Artificial Sequence
  Description of Artificial Sequence: Synthetic oligonucleotide
cagauggcggccaccaggg

SEQ ID NO: 1294500 - RNA, 19 nt, Artificial Sequence
  Description of Artificial Sequence: Synthetic oligonucleotide
caggaagauauuuucauua

SEQ ID NO: 1294501 - RNA, 19 nt, Artificial Sequence
  Description of Artificial Sequence: Synthetic oligonucleotide
gguguaaccuucuuuguuc

SEQ ID NO: 1294502 - RNA, 19 nt, Artificial Sequence
  Description of Artificial Sequence: Synthetic oligonucleotide
gacagcgcagagguggugg

SEQ ID NO: 1294503 - RNA, 19 nt, Artificial Sequence
  Description of Artificial Sequence: Synthetic oligonucleotide
uguuauagaaauggaccau

SEQ ID NO: 1294504 - RNA, 19 nt, Artificial Sequence
  Description of Artificial Sequence: Synthetic oligonucleotide
aagugauggagcaaaugau

SEQ ID NO: 1294505 - RNA, 19 nt, Artificial Sequence
  Description of Artificial Sequence: Synthetic oligonucleotide
ucaaauugauauggagugu

SEQ ID NO: 1294506 - RNA, 19 nt, Artificial Sequence
  Description of Artificial Sequence: Synthetic oligonucleotide
aguguggaccccuucggca

SEQ ID NO: 1294507 - RNA, 19 nt, Artificial Sequence
  Description of Artificial Sequence: Synthetic oligonucleotide
ucuggaagaucaauccguu

SEQ ID NO: 1294508 - RNA, 19 nt, Artificial Sequence
  Description of Artificial Sequence: Synthetic oligonucleotide
uggugauacccauucugga

SEQ ID NO: 1294509 - RNA, 19 nt, Artificial Sequence
  Description of Artificial Sequence: Synthetic oligonucleotide
cagacugauaacauuccca

SEQ ID NO: 1294510 - RNA, 19 nt, Artificial Sequence
  Description of Artificial Sequence: Synthetic oligonucleotide
caaaauccagacugauaac

SEQ ID NO: 1294511 - RNA, 19 nt, Artificial Sequence
  Description of Artificial Sequence: Synthetic oligonucleotide
gacguacauggccuugucc

SEQ ID NO: 1294512 - RNA, 19 nt, Artificial Sequence
  Description of Artificial Sequence: Synthetic oligonucleotide
aaacgcucgccaaaaguga

SEQ ID NO: 1294513 - RNA, 19 nt, Artificial Sequence
  Description of Artificial Sequence: Synthetic oligonucleotide
uggaucgucagggugcggc

SEQ ID NO: 1294514 - RNA, 19 nt, Artificial Sequence
  Description of Artificial Sequence: Synthetic oligonucleotide
uccgaaauccaugugcaau

SEQ ID NO: 1294515 - RNA, 19 nt, Artificial Sequence
  Description of Artificial Sequence: Synthetic oligonucleotide
agggcgacucauaaaauug

SEQ ID NO: 1294516 - RNA, 19 nt, Artificial Sequence
  Description of Artificial Sequence: Synthetic oligonucleotide
aaccugacguacauggccu

SEQ ID NO: 1294517 - RNA, 19 nt, Artificial Sequence
  Description of Artificial Sequence: Synthetic oligonucleotide
acagcgcagaggugguggc

SEQ ID NO: 1294518 - RNA, 19 nt, Artificial Sequence
  Description of Artificial Sequence: Synthetic oligonucleotide
uauuggaaacggcauuguu

SEQ ID NO: 1294519 - RNA, 19 nt, Artificial Sequence
  Description of Artificial Sequence: Synthetic oligonucleotide
gcuuauaaucacugaagac

SEQ ID NO: 1294520 - RNA, 19 nt, Artificial Sequence
  Description of Artificial Sequence: Synthetic oligonucleotide
gguagcuauuuccuguuug

SEQ ID NO: 1294521 - RNA, 19 nt, Artificial Sequence
  Description of Artificial Sequence: Synthetic oligonucleotide
uugucauccaggugaguaa

SEQ ID NO: 1294522 - RNA, 19 nt, Artificial Sequence
  Description of Artificial Sequence: Synthetic oligonucleotide
cugucugucucugacauca

SEQ ID NO: 1294523 - RNA, 19 nt, Artificial Sequence
  Description of Artificial Sequence: Synthetic oligonucleotide
gggaggguaguucuugggg

SEQ ID NO: 1294524 - RNA, 19 nt, Artificial Sequence
  Description of Artificial Sequence: Synthetic oligonucleotide
uagggcgacucauaaaauu

SEQ ID NO: 1294525 - RNA, 19 nt, Artificial Sequence
  Description of Artificial Sequence: Synthetic oligonucleotide
ucaggguguaaccuucuuu

SEQ ID NO: 1294526 - RNA, 19 nt, Artificial Sequence
  Description of Artificial Sequence: Synthetic oligonucleotide
ggugauacccauucuggac

SEQ ID NO: 1294527 - RNA, 19 nt, Artificial Sequence
  Description of Artificial Sequence: Synthetic oligonucleotide
cagaguccggagauggagc

SEQ ID NO: 1294528 - RNA, 19 nt, Artificial Sequence
  Description of Artificial Sequence: Synthetic oligonucleotide
uguggaccccuucggcagg

SEQ ID NO: 1294529 - RNA, 19 nt, Artificial Sequence
  Description of Artificial Sequence: Synthetic oligonucleotide
ggaacaagaaggugacagc

SEQ ID NO: 1294530 - RNA, 19 nt, Artificial Sequence
  Description of Artificial Sequence: Synthetic oligonucleotide
ucugggguugcccauucuu

SEQ ID NO: 1294531 - RNA, 19 nt, Artificial Sequence
  Description of Artificial Sequence: Synthetic oligonucleotide
augauauuggaaacggcau

SEQ ID NO: 1294532 - RNA, 19 nt, Artificial Sequence
  Description of Artificial Sequence: Synthetic oligonucleotide
guguggaccccuucggcag

SEQ ID NO: 1294533 - RNA, 19 nt, Artificial Sequence
  Description of Artificial Sequence: Synthetic oligonucleotide
uuagggcgacucauaaaau

SEQ ID NO: 1294534 - RNA, 19 nt, Artificial Sequence
  Description of Artificial Sequence: Synthetic oligonucleotide
aagaaggugacagcagcua

SEQ ID NO: 1294535 - RNA, 19 nt, Artificial Sequence
  Description of Artificial Sequence: Synthetic oligonucleotide
auagggaauuuagggcgac

SEQ ID NO: 1294536 - RNA, 19 nt, Artificial Sequence
  Description of Artificial Sequence: Synthetic oligonucleotide
gccaauguagugucuacug

SEQ ID NO: 1294537 - RNA, 19 nt, Artificial Sequence
  Description of Artificial Sequence: Synthetic oligonucleotide
cagucuagggacagcgcag

SEQ ID NO: 1294538 - RNA, 19 nt, Artificial Sequence
  Description of Artificial Sequence: Synthetic oligonucleotide
ucaauccguuuucauuaaa

SEQ ID NO: 1294539 - RNA, 19 nt, Artificial Sequence
  Description of Artificial Sequence: Synthetic oligonucleotide
cagcuagcagcagaguccg

SEQ ID NO: 1294540 - RNA, 19 nt, Artificial Sequence
  Description of Artificial Sequence: Synthetic oligonucleotide
gaguguggaccccuucggc

SEQ ID NO: 1294541 - RNA, 19 nt, Artificial Sequence
  Description of Artificial Sequence: Synthetic oligonucleotide
gaagaucaauccguuuuca

SEQ ID NO: 1294542 - RNA, 19 nt, Artificial Sequence
  Description of Artificial Sequence: Synthetic oligonucleotide
auuuagggcgacucauaaa

SEQ ID NO: 1294543 - RNA, 19 nt, Artificial Sequence
  Description of Artificial Sequence: Synthetic oligonucleotide
guggaauccagccaaugua

SEQ ID NO: 1294544 - RNA, 19 nt, Artificial Sequence
  Description of Artificial Sequence: Synthetic oligonucleotide
uggggcgccggcuuuugag

SEQ ID NO: 1294545 - RNA, 19 nt, Artificial Sequence
  Description of Artificial Sequence: Synthetic oligonucleotide
cuguuggaucgucagggug

SEQ ID NO: 1294546 - RNA, 19 nt, Artificial Sequence
  Description of Artificial Sequence: Synthetic oligonucleotide
guuggaucgucagggugcg

SEQ ID NO: 1294547 - RNA, 19 nt, Artificial Sequence
  Description of Artificial Sequence: Synthetic oligonucleotide
gcuauuuccuguuuggugu

SEQ ID NO: 1294548 - RNA, 19 nt, Artificial Sequence
  Description of Artificial Sequence: Synthetic oligonucleotide
cauacugcuuauaaucacu

SEQ ID NO: 1294549 - RNA, 19 nt, Artificial Sequence
  Description of Artificial Sequence: Synthetic oligonucleotide
uccuuccaugucuggaaga

SEQ ID NO: 1294550 - RNA, 19 nt, Artificial Sequence
  Description of Artificial Sequence: Synthetic oligonucleotide
aggguaguucuuggggcgc

SEQ ID NO: 1294551 - RNA, 19 nt, Artificial Sequence
  Description of Artificial Sequence: Synthetic oligonucleotide
uucuuugauuaaaggcaua

SEQ ID NO: 1294552 - RNA, 19 nt, Artificial Sequence
  Description of Artificial Sequence: Synthetic oligonucleotide
cucauaaaauugucaucca

SEQ ID NO: 1294553 - RNA, 19 nt, Artificial Sequence
  Description of Artificial Sequence: Synthetic oligonucleotide
gugauacccauucuggacu

SEQ ID NO: 1294554 - RNA, 19 nt, Artificial Sequence
  Description of Artificial Sequence: Synthetic oligonucleotide
ucuucacaagcuguuggau

SEQ ID NO: 1294555 - RNA, 19 nt, Artificial Sequence
  Description of Artificial Sequence: Synthetic oligonucleotide
aucaauccguuuucauuaa

SEQ ID NO: 1294556 - RNA, 19 nt, Artificial Sequence
  Description of Artificial Sequence: Synthetic oligonucleotide
gaucgucagggugcggccg

SEQ ID NO: 1294557 - RNA, 19 nt, Artificial Sequence
  Description of Artificial Sequence: Synthetic oligonucleotide
aggguguaaccuucuuugu

SEQ ID NO: 1294558 - RNA, 19 nt, Artificial Sequence
  Description of Artificial Sequence: Synthetic oligonucleotide
auauuggaaacggcauugu

SEQ ID NO: 1294559 - RNA, 19 nt, Artificial Sequence
  Description of Artificial Sequence: Synthetic oligonucleotide
ugauacccauucuggacuu

SEQ ID NO: 1294560 - RNA, 19 nt, Artificial Sequence
  Description of Artificial Sequence: Synthetic oligonucleotide
gauauggaguguggacccc

SEQ ID NO: 1294561 - RNA, 19 nt, Artificial Sequence
  Description of Artificial Sequence: Synthetic oligonucleotide
agcgcagaggugguggcuc

SEQ ID NO: 1294562 - RNA, 19 nt, Artificial Sequence
  Description of Artificial Sequence: Synthetic oligonucleotide
caugugcaauauguugccc

SEQ ID NO: 1294563 - RNA, 19 nt, Artificial Sequence
  Description of Artificial Sequence: Synthetic oligonucleotide
uagcuauuuccuguuuggu

SEQ ID NO: 1294564 - RNA, 19 nt, Artificial Sequence
  Description of Artificial Sequence: Synthetic oligonucleotide
ccaugugcaauauguugcc

SEQ ID NO: 1294565 - RNA, 19 nt, Artificial Sequence
  Description of Artificial Sequence: Synthetic oligonucleotide
auacccauucuggacuuca

SEQ ID NO: 1294566 - RNA, 19 nt, Artificial Sequence
  Description of Artificial Sequence: Synthetic oligonucleotide
agcgcugcccagauggcgg

SEQ ID NO: 1294567 - RNA, 19 nt, Artificial Sequence
  Description of Artificial Sequence: Synthetic oligonucleotide
cacagucuagggacagcgc

SEQ ID NO: 1294568 - RNA, 19 nt, Artificial Sequence
  Description of Artificial Sequence: Synthetic oligonucleotide
aguccggagauggagcgcu

SEQ ID NO: 1294569 - RNA, 19 nt, Artificial Sequence
  Description of Artificial Sequence: Synthetic oligonucleotide
gagauggagcgcugcccag

SEQ ID NO: 1294570 - RNA, 19 nt, Artificial Sequence
  Description of Artificial Sequence: Synthetic oligonucleotide
ccguccgaaauccaugugc

SEQ ID NO: 1294571 - RNA, 19 nt, Artificial Sequence
  Description of Artificial Sequence: Synthetic oligonucleotide
cagagcauuccucaguucu

SEQ ID NO: 1294572 - RNA, 19 nt, Artificial Sequence
  Description of Artificial Sequence: Synthetic oligonucleotide
aacgcucgccaaaagugau

SEQ ID NO: 1294573 - RNA, 19 nt, Artificial Sequence
  Description of Artificial Sequence: Synthetic oligonucleotide
gaagggcaggcgucgcggc

SEQ ID NO: 1294574 - RNA, 19 nt, Artificial Sequence
  Description of Artificial Sequence: Synthetic oligonucleotide
ccagauggcggccaccagg

SEQ ID NO: 1294575 - RNA, 19 nt, Artificial Sequence
  Description of Artificial Sequence: Synthetic oligonucleotide
caaaacgcucgccaaaagu

SEQ ID NO: 1294576 - RNA, 19 nt, Artificial Sequence
  Description of Artificial Sequence: Synthetic oligonucleotide
gagcgcugcccagauggcg

SEQ ID NO: 1294577 - RNA, 19 nt, Artificial Sequence
  Description of Artificial Sequence: Synthetic oligonucleotide
ccaugggaagauguuauag

SEQ ID NO: 1294578 - RNA, 19 nt, Artificial Sequence
  Description of Artificial Sequence: Synthetic oligonucleotide
cagccaauguagugucuac

SEQ ID NO: 1294579 - RNA, 19 nt, Artificial Sequence
  Description of Artificial Sequence: Synthetic oligonucleotide
gugcaauauguugcccacg

SEQ ID NO: 1294580 - RNA, 19 nt, Artificial Sequence
  Description of Artificial Sequence: Synthetic oligonucleotide
gaguaaaggcuucuuugau

SEQ ID NO: 1294581 - RNA, 19 nt, Artificial Sequence
  Description of Artificial Sequence: Synthetic oligonucleotide
ccagacugauaacauuccc

SEQ ID NO: 1294582 - RNA, 19 nt, Artificial Sequence
  Description of Artificial Sequence: Synthetic oligonucleotide
cuuugggguccaugugcag

SEQ ID NO: 1294583 - RNA, 19 nt, Artificial Sequence
  Description of Artificial Sequence: Synthetic oligonucleotide
agccaauguagugucuacu

SEQ ID NO: 1294584 - RNA, 19 nt, Artificial Sequence
  Description of Artificial Sequence: Synthetic oligonucleotide
cuggggaaauggugauacc

SEQ ID NO: 1294585 - RNA, 19 nt, Artificial Sequence
  Description of Artificial Sequence: Synthetic oligonucleotide
gucagggugcggccguccg

SEQ ID NO: 1294586 - RNA, 19 nt, Artificial Sequence
  Description of Artificial Sequence: Synthetic oligonucleotide
agucuagggacagcgcaga

SEQ ID NO: 1294587 - RNA, 19 nt, Artificial Sequence
  Description of Artificial Sequence: Synthetic oligonucleotide
gaauuuagggcgacucaua

SEQ ID NO: 1294588 - RNA, 19 nt, Artificial Sequence
  Description of Artificial Sequence: Synthetic oligonucleotide
ggagauggagcgcugccca

SEQ ID NO: 1294589 - RNA, 19 nt, Artificial Sequence
  Description of Artificial Sequence: Synthetic oligonucleotide
gacugauaacauucccaua

SEQ ID NO: 1294590 - RNA, 19 nt, Artificial Sequence
  Description of Artificial Sequence: Synthetic oligonucleotide
aguucuuggggcgccggcu

SEQ ID NO: 1294591 - RNA, 19 nt, Artificial Sequence
  Description of Artificial Sequence: Synthetic oligonucleotide
ugucugucucugacaucac

SEQ ID NO: 1294592 - RNA, 19 nt, Artificial Sequence
  Description of Artificial Sequence: Synthetic oligonucleotide
gucauccaggugaguaaag

SEQ ID NO: 1294593 - RNA, 19 nt, Artificial Sequence
  Description of Artificial Sequence: Synthetic oligonucleotide
uccggagauggagcgcugc

SEQ ID NO: 1294594 - RNA, 19 nt, Artificial Sequence
  Description of Artificial Sequence: Synthetic oligonucleotide
aucgucagggugcggccgu

SEQ ID NO: 1294595 - RNA, 19 nt, Artificial Sequence
  Description of Artificial Sequence: Synthetic oligonucleotide
acaagcuguuggaucguca

SEQ ID NO: 1294596 - RNA, 19 nt, Artificial Sequence
  Description of Artificial Sequence: Synthetic oligonucleotide
gggaauuuagggcgacuca

SEQ ID NO: 1294597 - RNA, 19 nt, Artificial Sequence
  Description of Artificial Sequence: Synthetic oligonucleotide
cagggagcccgcagcggcg

SEQ ID NO: 1294598 - RNA, 19 nt, Artificial Sequence
  Description of Artificial Sequence: Synthetic oligonucleotide
ggaccccuucggcaggugg

SEQ ID NO: 1294599 - RNA, 19 nt, Artificial Sequence
  Description of Artificial Sequence: Synthetic oligonucleotide
cucugacaucacagucuag

SEQ ID NO: 1294600 - RNA, 19 nt, Artificial Sequence
  Description of Artificial Sequence: Synthetic oligonucleotide
ucacaagcuguuggaucgu

SEQ ID NO: 1294601 - RNA, 19 nt, Artificial Sequence
  Description of Artificial Sequence: Synthetic oligonucleotide
agauggagcgcugcccaga

SEQ ID NO: 1294602 - RNA, 19 nt, Artificial Sequence
  Description of Artificial Sequence: Synthetic oligonucleotide
cuuccaugucuggaagauc

SEQ ID NO: 1294603 - RNA, 19 nt, Artificial Sequence
  Description of Artificial Sequence: Synthetic oligonucleotide
ggaucgucagggugcggcc

SEQ ID NO: 1294604 - RNA, 19 nt, Artificial Sequence
  Description of Artificial Sequence: Synthetic oligonucleotide
ccguuuucauuaaagacgu

SEQ ID NO: 1294605 - RNA, 19 nt, Artificial Sequence
  Description of Artificial Sequence: Synthetic oligonucleotide
acggcauuguugaucuuaa

SEQ ID NO: 1294606 - RNA, 19 nt, Artificial Sequence
  Description of Artificial Sequence: Synthetic oligonucleotide
uggaaacggcauuguugau

SEQ ID NO: 1294607 - RNA, 19 nt, Artificial Sequence
  Description of Artificial Sequence: Synthetic oligonucleotide
gcgacucauaaaauuguca

SEQ ID NO: 1294608 - RNA, 19 nt, Artificial Sequence
  Description of Artificial Sequence: Synthetic oligonucleotide
agguagcuauuuccuguuu

SEQ ID NO: 1294609 - RNA, 19 nt, Artificial Sequence
  Description of Artificial Sequence: Synthetic oligonucleotide
gaguccggagauggagcgc

SEQ ID NO: 1294610 - RNA, 19 nt, Artificial Sequence
  Description of Artificial Sequence: Synthetic oligonucleotide
aguuuucuccagguagcua

SEQ ID NO: 1294611 - RNA, 19 nt, Artificial Sequence
  Description of Artificial Sequence: Synthetic oligonucleotide
ggcgucgcggcccgggagg

SEQ ID NO: 1294612 - RNA, 19 nt, Artificial Sequence
  Description of Artificial Sequence: Synthetic oligonucleotide
ggugcggccguccgaaauc

SEQ ID NO: 1294613 - RNA, 19 nt, Artificial Sequence
  Description of Artificial Sequence: Synthetic oligonucleotide
gaccccuucggcaggugga

SEQ ID NO: 1294614 - RNA, 19 nt, Artificial Sequence
  Description of Artificial Sequence: Synthetic oligonucleotide
gauacccauucuggacuuc

SEQ ID NO: 1294615 - RNA, 19 nt, Artificial Sequence
  Description of Artificial Sequence: Synthetic oligonucleotide
guccaugugcagagaaguc

SEQ ID NO: 1294616 - RNA, 19 nt, Artificial Sequence
  Description of Artificial Sequence: Synthetic oligonucleotide
gcuagcagcagaguccgga

SEQ ID NO: 1294617 - RNA, 19 nt, Artificial Sequence
  Description of Artificial Sequence: Synthetic oligonucleotide
accagggagcccgcagcgg

SEQ ID NO: 1294618 - RNA, 19 nt, Artificial Sequence
  Description of Artificial Sequence: Synthetic oligonucleotide
gguccaugugcagagaagu

SEQ ID NO: 1294619 - RNA, 19 nt, Artificial Sequence
  Description of Artificial Sequence: Synthetic oligonucleotide
gugcggccguccgaaaucc

SEQ ID NO: 1294620 - RNA, 19 nt, Artificial Sequence
  Description of Artificial Sequence: Synthetic oligonucleotide
gguaguucuuggggcgccg

SEQ ID NO: 1294621 - RNA, 19 nt, Artificial Sequence
  Description of Artificial Sequence: Synthetic oligonucleotide
ggcgacucauaaaauuguc

SEQ ID NO: 1294622 - RNA, 19 nt, Artificial Sequence
  Description of Artificial Sequence: Synthetic oligonucleotide
uucuuggggcgccggcuuu

SEQ ID NO: 1294623 - RNA, 19 nt, Artificial Sequence
  Description of Artificial Sequence: Synthetic oligonucleotide
gaugucugggguugcccau

SEQ ID NO: 1294624 - RNA, 19 nt, Artificial Sequence
  Description of Artificial Sequence: Synthetic oligonucleotide
ccagggagcccgcagcggc

SEQ ID NO: 1294625 - RNA, 19 nt, Artificial Sequence
  Description of Artificial Sequence: Synthetic oligonucleotide
cacaagcuguuggaucguc

SEQ ID NO: 1294626 - RNA, 19 nt, Artificial Sequence
  Description of Artificial Sequence: Synthetic oligonucleotide
ugcggccguccgaaaucca

SEQ ID NO: 1294627 - RNA, 19 nt, Artificial Sequence
  Description of Artificial Sequence: Synthetic oligonucleotide
guaaccuucuuuguuccuu

SEQ ID NO: 1294628 - RNA, 19 nt, Artificial Sequence
  Description of Artificial Sequence: Synthetic oligonucleotide
aggcgucgcggcccgggag

SEQ ID NO: 1294629 - RNA, 19 nt, Artificial Sequence
  Description of Artificial Sequence: Synthetic oligonucleotide
ucuggacuucaggcucagc

SEQ ID NO: 1294630 - RNA, 19 nt, Artificial Sequence
  Description of Artificial Sequence: Synthetic oligonucleotide
ggugaguaaaggcuucuuu

SEQ ID NO: 1294631 - RNA, 19 nt, Artificial Sequence
  Description of Artificial Sequence: Synthetic oligonucleotide
uuggaucgucagggugcgg

SEQ ID NO: 1294632 - RNA, 19 nt, Artificial Sequence
  Description of Artificial Sequence: Synthetic oligonucleotide
gcaaucucagcagcuccug

SEQ ID NO: 1294633 - RNA, 19 nt, Artificial Sequence
  Description of Artificial Sequence: Synthetic oligonucleotide
auggagcgcugcccagaug

SEQ ID NO: 1294634 - RNA, 19 nt, Artificial Sequence
  Description of Artificial Sequence: Synthetic oligonucleotide
guccgaaauccaugugcaa

SEQ ID NO: 1294635 - RNA, 19 nt, Artificial Sequence
  Description of Artificial Sequence: Synthetic oligonucleotide
cacugaggaaccugacgua

SEQ ID NO: 1294636 - RNA, 19 nt, Artificial Sequence
  Description of Artificial Sequence: Synthetic oligonucleotide
ucgcggcccgggaggguag

SEQ ID NO: 1294637 - RNA, 19 nt, Artificial Sequence
  Description of Artificial Sequence: Synthetic oligonucleotide
accugacguacauggccuu

SEQ ID NO: 1294638 - RNA, 19 nt, Artificial Sequence
  Description of Artificial Sequence: Synthetic oligonucleotide
ccgaaauccaugugcaaua

SEQ ID NO: 1294639 - RNA, 19 nt, Artificial Sequence
  Description of Artificial Sequence: Synthetic oligonucleotide
aggugaguaaaggcuucuu

SEQ ID NO: 1294640 - RNA, 19 nt, Artificial Sequence
  Description of Artificial Sequence: Synthetic oligonucleotide
auggaccaucacugaggaa

SEQ ID NO: 1294641 - RNA, 19 nt, Artificial Sequence
  Description of Artificial Sequence: Synthetic oligonucleotide
cguccgaaauccaugugca

SEQ ID NO: 1294642 - RNA, 19 nt, Artificial Sequence
  Description of Artificial Sequence: Synthetic oligonucleotide
gagcccgcagcggcgagca

SEQ ID NO: 1294643 - RNA, 19 nt, Artificial Sequence
  Description of Artificial Sequence: Synthetic oligonucleotide
cacgaagggcaggcgucgc

SEQ ID NO: 1294644 - RNA, 19 nt, Artificial Sequence
  Description of Artificial Sequence: Synthetic oligonucleotide
cccacgaagggcaggcguc

SEQ ID NO: 1294645 - RNA, 19 nt, Artificial Sequence
  Description of Artificial Sequence: Synthetic oligonucleotide
cauggccuuguccagcaau

SEQ ID NO: 1294646 - RNA, 19 nt, Artificial Sequence
  Description of Artificial Sequence: Synthetic oligonucleotide
cgacucauaaaauugucau

SEQ ID NO: 1294647 - RNA, 19 nt, Artificial Sequence
  Description of Artificial Sequence: Synthetic oligonucleotide
ugcccagauggcggccacc

SEQ ID NO: 1294648 - RNA, 19 nt, Artificial Sequence
  Description of Artificial Sequence: Synthetic oligonucleotide
gugguggcucacuggggaa

SEQ ID NO: 1294649 - RNA, 19 nt, Artificial Sequence
  Description of Artificial Sequence: Synthetic oligonucleotide
ugggguccaugugcagaga

SEQ ID NO: 1294650 - RNA, 19 nt, Artificial Sequence
  Description of Artificial Sequence: Synthetic oligonucleotide
gcgccggcuuuugagguag

SEQ ID NO: 1294651 - RNA, 19 nt, Artificial Sequence
  Description of Artificial Sequence: Synthetic oligonucleotide
gcaauauguugcccacgaa

SEQ ID NO: 1294652 - RNA, 19 nt, Artificial Sequence
  Description of Artificial Sequence: Synthetic oligonucleotide
ggguaguucuuggggcgcc

SEQ ID NO: 1294653 - RNA, 19 nt, Artificial Sequence
  Description of Artificial Sequence: Synthetic oligonucleotide
augucugggguugcccauu

SEQ ID NO: 1294654 - RNA, 19 nt, Artificial Sequence
  Description of Artificial Sequence: Synthetic oligonucleotide
cagguagcuauuuccuguu

SEQ ID NO: 1294655 - RNA, 19 nt, Artificial Sequence
  Description of Artificial Sequence: Synthetic oligonucleotide
cugcccagauggcggccac

SEQ ID NO: 1294656 - RNA, 19 nt, Artificial Sequence
  Description of Artificial Sequence: Synthetic oligonucleotide
cgaagggcaggcgucgcgg

SEQ ID NO: 1294657 - RNA, 19 nt, Artificial Sequence
  Description of Artificial Sequence: Synthetic oligonucleotide
ggguguaaccuucuuuguu

SEQ ID NO: 1294658 - RNA, 19 nt, Artificial Sequence
  Description of Artificial Sequence: Synthetic oligonucleotide
gccguccgaaauccaugug

SEQ ID NO: 1294659 - RNA, 19 nt, Artificial Sequence
  Description of Artificial Sequence: Synthetic oligonucleotide
ggccguccgaaauccaugu

SEQ ID NO: 1294660 - RNA, 19 nt, Artificial Sequence
  Description of Artificial Sequence: Synthetic oligonucleotide
agcuagcagcagaguccgg

SEQ ID NO: 1294661 - RNA, 19 nt, Artificial Sequence
  Description of Artificial Sequence: Synthetic oligonucleotide
ggaauccagccaauguagu

SEQ ID NO: 1294662 - RNA, 19 nt, Artificial Sequence
  Description of Artificial Sequence: Synthetic oligonucleotide
caggaacaagaaggugaca

SEQ ID NO: 1294663 - RNA, 19 nt, Artificial Sequence
  Description of Artificial Sequence: Synthetic oligonucleotide
agggagcccgcagcggcga

SEQ ID NO: 1294664 - RNA, 19 nt, Artificial Sequence
  Description of Artificial Sequence: Synthetic oligonucleotide
cuggaagaucaauccguuu

SEQ ID NO: 1294665 - RNA, 19 nt, Artificial Sequence
  Description of Artificial Sequence: Synthetic oligonucleotide
gggcgacucauaaaauugu

SEQ ID NO: 1294666 - RNA, 19 nt, Artificial Sequence
  Description of Artificial Sequence: Synthetic oligonucleotide
ccugacguacauggccuug

SEQ ID NO: 1294667 - RNA, 19 nt, Artificial Sequence
  Description of Artificial Sequence: Synthetic oligonucleotide
uggaccccuucggcaggug

SEQ ID NO: 1294668 - RNA, 19 nt, Artificial Sequence
  Description of Artificial Sequence: Synthetic oligonucleotide
cagggugcggccguccgaa

SEQ ID NO: 1294669 - RNA, 19 nt, Artificial Sequence
  Description of Artificial Sequence: Synthetic oligonucleotide
gcccgcagcggcgagcaug

SEQ ID NO: 1294670 - RNA, 19 nt, Artificial Sequence
  Description of Artificial Sequence: Synthetic oligonucleotide
ccggcuuuugagguaguca

SEQ ID NO: 1294671 - RNA, 19 nt, Artificial Sequence
  Description of Artificial Sequence: Synthetic oligonucleotide
gcuguuggaucgucagggu

SEQ ID NO: 1294672 - RNA, 19 nt, Artificial Sequence
  Description of Artificial Sequence: Synthetic oligonucleotide
cuuggacuucugggguaga

SEQ ID NO: 1294673 - RNA, 19 nt, Artificial Sequence
  Description of Artificial Sequence: Synthetic oligonucleotide
ggagcgcugcccagauggc

SEQ ID NO: 1294674 - RNA, 19 nt, Artificial Sequence
  Description of Artificial Sequence: Synthetic oligonucleotide
cccgggaggguaguucuug

SEQ ID NO: 1294675 - RNA, 19 nt, Artificial Sequence
  Description of Artificial Sequence: Synthetic oligonucleotide
caggugaguaaaggcuucu

SEQ ID NO: 1294676 - RNA, 19 nt, Artificial Sequence
  Description of Artificial Sequence: Synthetic oligonucleotide
gcccagauggcggccacca

SEQ ID NO: 1294677 - RNA, 19 nt, Artificial Sequence
  Description of Artificial Sequence: Synthetic oligonucleotide
ccaggaagauauuuucauu

SEQ ID NO: 1294678 - RNA, 19 nt, Artificial Sequence
  Description of Artificial Sequence: Synthetic oligonucleotide
ucgucagggugcggccguc

SEQ ID NO: 1294679 - RNA, 19 nt, Artificial Sequence
  Description of Artificial Sequence: Synthetic oligonucleotide
guccggagauggagcgcug

SEQ ID NO: 1294680 - RNA, 19 nt, Artificial Sequence
  Description of Artificial Sequence: Synthetic oligonucleotide
cggccguccgaaauccaug

SEQ ID NO: 1294681 - RNA, 19 nt, Artificial Sequence
  Description of Artificial Sequence: Synthetic oligonucleotide
cacuggggaaauggugaua

SEQ ID NO: 1294682 - RNA, 19 nt, Artificial Sequence
  Description of Artificial Sequence: Synthetic oligonucleotide
gucgcggcccgggagggua

SEQ ID NO: 1294683 - RNA, 19 nt, Artificial Sequence
  Description of Artificial Sequence: Synthetic oligonucleotide
agggugcggccguccgaaa

SEQ ID NO: 1294684 - RNA, 19 nt, Artificial Sequence
  Description of Artificial Sequence: Synthetic oligonucleotide
ggagcccgcagcggcgagc

SEQ ID NO: 1294685 - RNA, 19 nt, Artificial Sequence
  Description of Artificial Sequence: Synthetic oligonucleotide
gcccacgaagggcaggcgu

SEQ ID NO: 1294686 - RNA, 19 nt, Artificial Sequence
  Description of Artificial Sequence: Synthetic oligonucleotide
gcgcagaggugguggcuca

SEQ ID NO: 1294687 - RNA, 19 nt, Artificial Sequence
  Description of Artificial Sequence: Synthetic oligonucleotide
cccagauggcggccaccag

SEQ ID NO: 1294688 - RNA, 19 nt, Artificial Sequence
  Description of Artificial Sequence: Synthetic oligonucleotide
gccggcuuuugagguaguc

SEQ ID NO: 1294689 - RNA, 19 nt, Artificial Sequence
  Description of Artificial Sequence: Synthetic oligonucleotide
gggagcccgcagcggcgag

SEQ ID NO: 1294690 - RNA, 19 nt, Artificial Sequence
  Description of Artificial Sequence: Synthetic oligonucleotide
gggcgccggcuuuugaggu

SEQ ID NO: 1294691 - RNA, 19 nt, Artificial Sequence
  Description of Artificial Sequence: Synthetic oligonucleotide
ggcgccggcuuuugaggua

SEQ ID NO: 1294692 - RNA, 19 nt, Artificial Sequence
  Description of Artificial Sequence: Synthetic oligonucleotide
gggugcggccguccgaaau

SEQ ID NO: 1294693 - RNA, 19 nt, Artificial Sequence
  Description of Artificial Sequence: Synthetic oligonucleotide
ccaugucuggaagaucaau

SEQ ID NO: 1294694 - RNA, 19 nt, Artificial Sequence
  Description of Artificial Sequence: Synthetic oligonucleotide
gcccauucuuuggggucca

SEQ ID NO: 1294695 - RNA, 19 nt, Artificial Sequence
  Description of Artificial Sequence: Synthetic oligonucleotide
agcccgcagcggcgagcau

SEQ ID NO: 1294696 - RNA, 19 nt, Artificial Sequence
  Description of Artificial Sequence: Synthetic oligonucleotide
cagugucaucaggguguaa

SEQ ID NO: 1294697 - RNA, 19 nt, Artificial Sequence
  Description of Artificial Sequence: Synthetic oligonucleotide
gcggccguccgaaauccau

SEQ ID NO: 1294698 - RNA, 19 nt, Artificial Sequence
  Description of Artificial Sequence: Synthetic oligonucleotide
cggcauuguugaucuuaaa

SEQ ID NO: 1294699 - RNA, 19 nt, Artificial Sequence
  Description of Artificial Sequence: Synthetic oligonucleotide
cggcccgggaggguaguuc

SEQ ID NO: 1294700 - RNA, 19 nt, Artificial Sequence
  Description of Artificial Sequence: Synthetic oligonucleotide
gcggcccgggaggguaguu

SEQ ID NO: 1294701 - RNA, 19 nt, Artificial Sequence
  Description of Artificial Sequence: Synthetic oligonucleotide
cgccggcuuuugagguagu

SEQ ID NO: 1294702 - RNA, 19 nt, Artificial Sequence
  Description of Artificial Sequence: Synthetic oligonucleotide
cgcggcccgggaggguagu

SEQ ID NO: 1294703 - RNA, 19 nt, Artificial Sequence
  Description of Artificial Sequence: Synthetic oligonucleotide
aguauauucaauuucucgc

SEQ ID NO: 1294704 - RNA, 19 nt, Artificial Sequence
  Description of Artificial Sequence: Synthetic oligonucleotide
uauaauauuacccucacau

SEQ ID NO: 1294705 - RNA, 19 nt, Artificial Sequence
  Description of Artificial Sequence: Synthetic oligonucleotide
aaauagaaagaucuuuccg

SEQ ID NO: 1294706 - RNA, 19 nt, Artificial Sequence
  Description of Artificial Sequence: Synthetic oligonucleotide
aaaagagagagagagagag

SEQ ID NO: 1294707 - RNA, 19 nt, Artificial Sequence
  Description of Artificial Sequence: Synthetic oligonucleotide
uauagugccacauaauuag

SEQ ID NO: 1294708 - RNA, 19 nt, Artificial Sequence
  Description of Artificial Sequence: Synthetic oligonucleotide
cugaaauuagauuaugggg

SEQ ID NO: 1294709 - RNA, 19 nt, Artificial Sequence
  Description of Artificial Sequence: Synthetic oligonucleotide
ucuaauacuugcaauggag

SEQ ID NO: 1294710 - RNA, 19 nt, Artificial Sequence
  Description of Artificial Sequence: Synthetic oligonucleotide
auuacccucacauuagccc

SEQ ID NO: 1294711 - RNA, 19 nt, Artificial Sequence
  Description of Artificial Sequence: Synthetic oligonucleotide
aauggagcuauuauagugc

SEQ ID NO: 1294712 - RNA, 19 nt, Artificial Sequence
  Description of Artificial Sequence: Synthetic oligonucleotide
aguaccuauaauauuaccc

SEQ ID NO: 1294713 - RNA, 19 nt, Artificial Sequence
  Description of Artificial Sequence: Synthetic oligonucleotide
acaagcuauaauuauuugg

SEQ ID NO: 1294714 - RNA, 19 nt, Artificial Sequence
  Description of Artificial Sequence: Synthetic oligonucleotide
auaaagagcccauuaaaag

SEQ ID NO: 1294715 - RNA, 19 nt, Artificial Sequence
  Description of Artificial Sequence: Synthetic oligonucleotide
uaguauauucaauuucucg

SEQ ID NO: 1294716 - RNA, 19 nt, Artificial Sequence
  Description of Artificial Sequence: Synthetic oligonucleotide
cuuuaggcaggaaacaucg

SEQ ID NO: 1294717 - RNA, 19 nt, Artificial Sequence
  Description of Artificial Sequence: Synthetic oligonucleotide
aagagagagagagagagag

SEQ ID NO: 1294718 - RNA, 19 nt, Artificial Sequence
  Description of Artificial Sequence: Synthetic oligonucleotide
gauacuucggacauugugg

SEQ ID NO: 1294719 - RNA, 19 nt, Artificial Sequence
  Description of Artificial Sequence: Synthetic oligonucleotide
ugugaaaacacccucuggu

SEQ ID NO: 1294720 - RNA, 19 nt, Artificial Sequence
  Description of Artificial Sequence: Synthetic oligonucleotide
aaaaccgcacugcuaacgg

SEQ ID NO: 1294721 - RNA, 19 nt, Artificial Sequence
  Description of Artificial Sequence: Synthetic oligonucleotide
aagaaaaccgcacugcuaa

SEQ ID NO: 1294722 - RNA, 19 nt, Artificial Sequence
  Description of Artificial Sequence: Synthetic oligonucleotide
uguaugggcaugacgacgg

SEQ ID NO: 1294723 - RNA, 19 nt, Artificial Sequence
  Description of Artificial Sequence: Synthetic oligonucleotide
uuuaacccggcauggaugg

SEQ ID NO: 1294724 - RNA, 19 nt, Artificial Sequence
  Description of Artificial Sequence: Synthetic oligonucleotide
uugugguaaucaaacacgg

SEQ ID NO: 1294725 - RNA, 19 nt, Artificial Sequence
  Description of Artificial Sequence: Synthetic oligonucleotide
cacuguuuggaauugauac

SEQ ID NO: 1294726 - RNA, 19 nt, Artificial Sequence
  Description of Artificial Sequence: Synthetic oligonucleotide
aagcuauaauuauuugggg

SEQ ID NO: 1294727 - RNA, 19 nt, Artificial Sequence
  Description of Artificial Sequence: Synthetic oligonucleotide
acauaauuagccuugcacu

SEQ ID NO: 1294728 - RNA, 19 nt, Artificial Sequence
  Description of Artificial Sequence: Synthetic oligonucleotide
cuaacggggagaaaggugc

SEQ ID NO: 1294729 - RNA, 19 nt, Artificial Sequence
  Description of Artificial Sequence: Synthetic oligonucleotide
uagauuaugggguaagcca

SEQ ID NO: 1294730 - RNA, 19 nt, Artificial Sequence
  Description of Artificial Sequence: Synthetic oligonucleotide
auuagccuugcacugauag

SEQ ID NO: 1294731 - RNA, 19 nt, Artificial Sequence
  Description of Artificial Sequence: Synthetic oligonucleotide
gugguaaucaaacacggcc

SEQ ID NO: 1294732 - RNA, 19 nt, Artificial Sequence
  Description of Artificial Sequence: Synthetic oligonucleotide
uuaggcaggaaacaucggc

SEQ ID NO: 1294733 - RNA, 19 nt, Artificial Sequence
  Description of Artificial Sequence: Synthetic oligonucleotide
uguaauaaagagcccauua

SEQ ID NO: 1294734 - RNA, 19 nt, Artificial Sequence
  Description of Artificial Sequence: Synthetic oligonucleotide
uucaacauaguauauucaa

SEQ ID NO: 1294735 - RNA, 19 nt, Artificial Sequence
  Description of Artificial Sequence: Synthetic oligonucleotide
aauauuacccucacauuag

SEQ ID NO: 1294736 - RNA, 19 nt, Artificial Sequence
  Description of Artificial Sequence: Synthetic oligonucleotide
gagagagagagagagagag

SEQ ID NO: 1294737 - RNA, 19 nt, Artificial Sequence
  Description of Artificial Sequence: Synthetic oligonucleotide
agaugagggcuccaaauac

SEQ ID NO: 1294738 - RNA, 19 nt, Artificial Sequence
  Description of Artificial Sequence: Synthetic oligonucleotide
guauauucaauuucucgcc

SEQ ID NO: 1294739 - RNA, 19 nt, Artificial Sequence
  Description of Artificial Sequence: Synthetic oligonucleotide
ugcucuaauacuugcaaug

SEQ ID NO: 1294740 - RNA, 19 nt, Artificial Sequence
  Description of Artificial Sequence: Synthetic oligonucleotide
cuaauacuugcaauggagc

SEQ ID NO: 1294741 - RNA, 19 nt, Artificial Sequence
  Description of Artificial Sequence: Synthetic oligonucleotide
aauuauuuggggagguuuc

SEQ ID NO: 1294742 - RNA, 19 nt, Artificial Sequence
  Description of Artificial Sequence: Synthetic oligonucleotide
aguaugacagccgucaguc

SEQ ID NO: 1294743 - RNA, 19 nt, Artificial Sequence
  Description of Artificial Sequence: Synthetic oligonucleotide
uugacauagaucaguguug

SEQ ID NO: 1294744 - RNA, 19 nt, Artificial Sequence
  Description of Artificial Sequence: Synthetic oligonucleotide
gaggacggcagccacagcg

SEQ ID NO: 1294745 - RNA, 19 nt, Artificial Sequence
  Description of Artificial Sequence: Synthetic oligonucleotide
auuauagugccacauaauu

SEQ ID NO: 1294746 - RNA, 19 nt, Artificial Sequence
  Description of Artificial Sequence: Synthetic oligonucleotide
auauuacccucacauuagc

SEQ ID NO: 1294747 - RNA, 19 nt, Artificial Sequence
  Description of Artificial Sequence: Synthetic oligonucleotide
uuggacauagaguaugaca

SEQ ID NO: 1294748 - RNA, 19 nt, Artificial Sequence
  Description of Artificial Sequence: Synthetic oligonucleotide
aauuagauuaugggguaag

SEQ ID NO: 1294749 - RNA, 19 nt, Artificial Sequence
  Description of Artificial Sequence: Synthetic oligonucleotide
aaaagccuaggacaagcug

SEQ ID NO: 1294750 - RNA, 19 nt, Artificial Sequence
  Description of Artificial Sequence: Synthetic oligonucleotide
aucaagaaaaccgcacugc

SEQ ID NO: 1294751 - RNA, 19 nt, Artificial Sequence
  Description of Artificial Sequence: Synthetic oligonucleotide
agaaaggugcaguggaggg

SEQ ID NO: 1294752 - RNA, 19 nt, Artificial Sequence
  Description of Artificial Sequence: Synthetic oligonucleotide
cauaauuagccuugcacug

SEQ ID NO: 1294753 - RNA, 19 nt, Artificial Sequence
  Description of Artificial Sequence: Synthetic oligonucleotide
agcuauaauuauuugggga

SEQ ID NO: 1294754 - RNA, 19 nt, Artificial Sequence
  Description of Artificial Sequence: Synthetic oligonucleotide
gaauauacauguaugggca

SEQ ID NO: 1294755 - RNA, 19 nt, Artificial Sequence
  Description of Artificial Sequence: Synthetic oligonucleotide
aaagcuguaugcuuuugau

SEQ ID NO: 1294756 - RNA, 19 nt, Artificial Sequence
  Description of Artificial Sequence: Synthetic oligonucleotide
cuugcauucccucugcgcc

SEQ ID NO: 1294757 - RNA, 19 nt, Artificial Sequence
  Description of Artificial Sequence: Synthetic oligonucleotide
ucuguagaggauacaagcu

SEQ ID NO: 1294758 - RNA, 19 nt, Artificial Sequence
  Description of Artificial Sequence: Synthetic oligonucleotide
uuagauuaugggguaagcc

SEQ ID NO: 1294759 - RNA, 19 nt, Artificial Sequence
  Description of Artificial Sequence: Synthetic oligonucleotide
cacagaucaagaaaaccgc

SEQ ID NO: 1294760 - RNA, 19 nt, Artificial Sequence
  Description of Artificial Sequence: Synthetic oligonucleotide
ugguaaucaaacacggcca

SEQ ID NO: 1294761 - RNA, 19 nt, Artificial Sequence
  Description of Artificial Sequence: Synthetic oligonucleotide
ugugcuaugcauccuuuca

SEQ ID NO: 1294762 - RNA, 19 nt, Artificial Sequence
  Description of Artificial Sequence: Synthetic oligonucleotide
uauuugugaaaacacccuc

SEQ ID NO: 1294763 - RNA, 19 nt, Artificial Sequence
  Description of Artificial Sequence: Synthetic oligonucleotide
acgaagaucaccgacagga

SEQ ID NO: 1294764 - RNA, 19 nt, Artificial Sequence
  Description of Artificial Sequence: Synthetic oligonucleotide
gaugcuuuaggcaggaaac

SEQ ID NO: 1294765 - RNA, 19 nt, Artificial Sequence
  Description of Artificial Sequence: Synthetic oligonucleotide
gacauagaguaugacagcc

SEQ ID NO: 1294766 - RNA, 19 nt, Artificial Sequence
  Description of Artificial Sequence: Synthetic oligonucleotide
acuugagaagaaaauagag

SEQ ID NO: 1294767 - RNA, 19 nt, Artificial Sequence
  Description of Artificial Sequence: Synthetic oligonucleotide
aaagccuaggacaagcugu

SEQ ID NO: 1294768 - RNA, 19 nt, Artificial Sequence
  Description of Artificial Sequence: Synthetic oligonucleotide
agcuuauugccauggcgcc

SEQ ID NO: 1294769 - RNA, 19 nt, Artificial Sequence
  Description of Artificial Sequence: Synthetic oligonucleotide
uuauagugccacauaauua

SEQ ID NO: 1294770 - RNA, 19 nt, Artificial Sequence
  Description of Artificial Sequence: Synthetic oligonucleotide
uuucucgccaagcucuggg

SEQ ID NO: 1294771 - RNA, 19 nt, Artificial Sequence
  Description of Artificial Sequence: Synthetic oligonucleotide
uggaauugauacccaaggc

SEQ ID NO: 1294772 - RNA, 19 nt, Artificial Sequence
  Description of Artificial Sequence: Synthetic oligonucleotide
acauguaugggcaugacga

SEQ ID NO: 1294773 - RNA, 19 nt, Artificial Sequence
  Description of Artificial Sequence: Synthetic oligonucleotide
auuagauuaugggguaagc

SEQ ID NO: 1294774 - RNA, 19 nt, Artificial Sequence
  Description of Artificial Sequence: Synthetic oligonucleotide
gaauugauacccaaggcuc

SEQ ID NO: 1294775 - RNA, 19 nt, Artificial Sequence
  Description of Artificial Sequence: Synthetic oligonucleotide
ccugaaauuagauuauggg

SEQ ID NO: 1294776 - RNA, 19 nt, Artificial Sequence
  Description of Artificial Sequence: Synthetic oligonucleotide
uagugccacauaauuagcc

SEQ ID NO: 1294777 - RNA, 19 nt, Artificial Sequence
  Description of Artificial Sequence: Synthetic oligonucleotide
uauuacccucacauuagcc

SEQ ID NO: 1294778 - RNA, 19 nt, Artificial Sequence
  Description of Artificial Sequence: Synthetic oligonucleotide
uugugaaaacacccucugg

SEQ ID NO: 1294779 - RNA, 19 nt, Artificial Sequence
  Description of Artificial Sequence: Synthetic oligonucleotide
gacgaagccggucaccgcg

SEQ ID NO: 1294780 - RNA, 19 nt, Artificial Sequence
  Description of Artificial Sequence: Synthetic oligonucleotide
aagcuguaugcuuuugaug

SEQ ID NO: 1294781 - RNA, 19 nt, Artificial Sequence
  Description of Artificial Sequence: Synthetic oligonucleotide
ucaacauaguauauucaau

SEQ ID NO: 1294782 - RNA, 19 nt, Artificial Sequence
  Description of Artificial Sequence: Synthetic oligonucleotide
uagaguaugacagccguca

SEQ ID NO: 1294783 - RNA, 19 nt, Artificial Sequence
  Description of Artificial Sequence: Synthetic oligonucleotide
gaaaaccgcacugcuaacg

SEQ ID NO: 1294784 - RNA, 19 nt, Artificial Sequence
  Description of Artificial Sequence: Synthetic oligonucleotide
auucaauuucucgccaagc

SEQ ID NO: 1294785 - RNA, 19 nt, Artificial Sequence
  Description of Artificial Sequence: Synthetic oligonucleotide
cugaagaaggauagagccg

SEQ ID NO: 1294786 - RNA, 19 nt, Artificial Sequence
  Description of Artificial Sequence: Synthetic oligonucleotide
uugaugacauuaauucaac

SEQ ID NO: 1294787 - RNA, 19 nt, Artificial Sequence
  Description of Artificial Sequence: Synthetic oligonucleotide
augacgacggcccggagag

SEQ ID NO: 1294788 - RNA, 19 nt, Artificial Sequence
  Description of Artificial Sequence: Synthetic oligonucleotide
aggguauuugugaaaacac

SEQ ID NO: 1294789 - RNA, 19 nt, Artificial Sequence
  Description of Artificial Sequence: Synthetic oligonucleotide
uguagcaaucacuguuccg

SEQ ID NO: 1294790 - RNA, 19 nt, Artificial Sequence
  Description of Artificial Sequence: Synthetic oligonucleotide
gaggauacaagcuauaauu

SEQ ID NO: 1294791 - RNA, 19 nt, Artificial Sequence
  Description of Artificial Sequence: Synthetic oligonucleotide
agccaagccagauaaucuc

SEQ ID NO: 1294792 - RNA, 19 nt, Artificial Sequence
  Description of Artificial Sequence: Synthetic oligonucleotide
gagcuuauugccauggcgc

SEQ ID NO: 1294793 - RNA, 19 nt, Artificial Sequence
  Description of Artificial Sequence: Synthetic oligonucleotide
gcacagaucaagaaaaccg

SEQ ID NO: 1294794 - RNA, 19 nt, Artificial Sequence
  Description of Artificial Sequence: Synthetic oligonucleotide
uuacccucacauuagccca

SEQ ID NO: 1294795 - RNA, 19 nt, Artificial Sequence
  Description of Artificial Sequence: Synthetic oligonucleotide
uccaaauaccagaaucaga

SEQ ID NO: 1294796 - RNA, 19 nt, Artificial Sequence
  Description of Artificial Sequence: Synthetic oligonucleotide
gguauuugugaaaacaccc

SEQ ID NO: 1294797 - RNA, 19 nt, Artificial Sequence
  Description of Artificial Sequence: Synthetic oligonucleotide
ugcagacuguacauauggg

SEQ ID NO: 1294798 - RNA, 19 nt, Artificial Sequence
  Description of Artificial Sequence: Synthetic oligonucleotide
uaaucucuguagaggauac

SEQ ID NO: 1294799 - RNA, 19 nt, Artificial Sequence
  Description of Artificial Sequence: Synthetic oligonucleotide
aaugaaugguaugaaggau

SEQ ID NO: 1294800 - RNA, 19 nt, Artificial Sequence
  Description of Artificial Sequence: Synthetic oligonucleotide
uaccagaaucagaaggccc

SEQ ID NO: 1294801 - RNA, 19 nt, Artificial Sequence
  Description of Artificial Sequence: Synthetic oligonucleotide
auccuuucauaaaagcugg

SEQ ID NO: 1294802 - RNA, 19 nt, Artificial Sequence
  Description of Artificial Sequence: Synthetic oligonucleotide
uauaauuauuuggggaggu

SEQ ID NO: 1294803 - RNA, 19 nt, Artificial Sequence
  Description of Artificial Sequence: Synthetic oligonucleotide
acgagcacgaagaucaccg

SEQ ID NO: 1294804 - RNA, 19 nt, Artificial Sequence
  Description of Artificial Sequence: Synthetic oligonucleotide
uuuccugaaauuagauuau

SEQ ID NO: 1294805 - RNA, 19 nt, Artificial Sequence
  Description of Artificial Sequence: Synthetic oligonucleotide
uuaugggguaagccaagcc

SEQ ID NO: 1294806 - RNA, 19 nt, Artificial Sequence
  Description of Artificial Sequence: Synthetic oligonucleotide
uuaaacucgagcgcgccgc

SEQ ID NO: 1294807 - RNA, 19 nt, Artificial Sequence
  Description of Artificial Sequence: Synthetic oligonucleotide
agagguucuacuguggcug

SEQ ID NO: 1294808 - RNA, 19 nt, Artificial Sequence
  Description of Artificial Sequence: Synthetic oligonucleotide
uuuaggcaggaaacaucgg

SEQ ID NO: 1294809 - RNA, 19 nt, Artificial Sequence
  Description of Artificial Sequence: Synthetic oligonucleotide
ugugguaaucaaacacggc

SEQ ID NO: 1294810 - RNA, 19 nt, Artificial Sequence
  Description of Artificial Sequence: Synthetic oligonucleotide
gauagagccggguucucug

SEQ ID NO: 1294811 - RNA, 19 nt, Artificial Sequence
  Description of Artificial Sequence: Synthetic oligonucleotide
cauggauggacuucaucag

SEQ ID NO: 1294812 - RNA, 19 nt, Artificial Sequence
  Description of Artificial Sequence: Synthetic oligonucleotide
gauggacuucaucaggaac

SEQ ID NO: 1294813 - RNA, 19 nt, Artificial Sequence
  Description of Artificial Sequence: Synthetic oligonucleotide
auuaugggguaagccaagc

SEQ ID NO: 1294814 - RNA, 19 nt, Artificial Sequence
  Description of Artificial Sequence: Synthetic oligonucleotide
ugcacagaucaagaaaacc

SEQ ID NO: 1294815 - RNA, 19 nt, Artificial Sequence
  Description of Artificial Sequence: Synthetic oligonucleotide
cauuaauucaacauaguau

SEQ ID NO: 1294816 - RNA, 19 nt, Artificial Sequence
  Description of Artificial Sequence: Synthetic oligonucleotide
aaccgcacugcuaacgggg

SEQ ID NO: 1294817 - RNA, 19 nt, Artificial Sequence
  Description of Artificial Sequence: Synthetic oligonucleotide
aguuaaacucgagcgcgcc

SEQ ID NO: 1294818 - RNA, 19 nt, Artificial Sequence
  Description of Artificial Sequence: Synthetic oligonucleotide
guaauaaagagcccauuaa

SEQ ID NO: 1294819 - RNA, 19 nt, Artificial Sequence
  Description of Artificial Sequence: Synthetic oligonucleotide
agaugcuuuaggcaggaaa

SEQ ID NO: 1294820 - RNA, 19 nt, Artificial Sequence
  Description of Artificial Sequence: Synthetic oligonucleotide
ucauuguaauaaagagccc

SEQ ID NO: 1294821 - RNA, 19 nt, Artificial Sequence
  Description of Artificial Sequence: Synthetic oligonucleotide
agaagagucucaaauagaa

SEQ ID NO: 1294822 - RNA, 19 nt, Artificial Sequence
  Description of Artificial Sequence: Synthetic oligonucleotide
uucaaucacuguuuggaau

SEQ ID NO: 1294823 - RNA, 19 nt, Artificial Sequence
  Description of Artificial Sequence: Synthetic oligonucleotide
auacuucggacauuguggu

SEQ ID NO: 1294824 - RNA, 19 nt, Artificial Sequence
  Description of Artificial Sequence: Synthetic oligonucleotide
gguauaauuaucauuguaa

SEQ ID NO: 1294825 - RNA, 19 nt, Artificial Sequence
  Description of Artificial Sequence: Synthetic oligonucleotide
guaccuauaauauuacccu

SEQ ID NO: 1294826 - RNA, 19 nt, Artificial Sequence
  Description of Artificial Sequence: Synthetic oligonucleotide
cagaucaagaaaaccgcac

SEQ ID NO: 1294827 - RNA, 19 nt, Artificial Sequence
  Description of Artificial Sequence: Synthetic oligonucleotide
gagagagagagagagguuc

SEQ ID NO: 1294828 - RNA, 19 nt, Artificial Sequence
  Description of Artificial Sequence: Synthetic oligonucleotide
acuguagcaaucacuguuc

SEQ ID NO: 1294829 - RNA, 19 nt, Artificial Sequence
  Description of Artificial Sequence: Synthetic oligonucleotide
augggcaugacgacggccc

SEQ ID NO: 1294830 - RNA, 19 nt, Artificial Sequence
  Description of Artificial Sequence: Synthetic oligonucleotide
auaguauauucaauuucuc

SEQ ID NO: 1294831 - RNA, 19 nt, Artificial Sequence
  Description of Artificial Sequence: Synthetic oligonucleotide
agugcacagaucaagaaaa

SEQ ID NO: 1294832 - RNA, 19 nt, Artificial Sequence
  Description of Artificial Sequence: Synthetic oligonucleotide
acauagaucaguguugaaa

SEQ ID NO: 1294833 - RNA, 19 nt, Artificial Sequence
  Description of Artificial Sequence: Synthetic oligonucleotide
uggcaaucuguacacgaug

SEQ ID NO: 1294834 - RNA, 19 nt, Artificial Sequence
  Description of Artificial Sequence: Synthetic oligonucleotide
ggagcuuauugccauggcg

SEQ ID NO: 1294835 - RNA, 19 nt, Artificial Sequence
  Description of Artificial Sequence: Synthetic oligonucleotide
ugggacguuuccacugugg

SEQ ID NO: 1294836 - RNA, 19 nt, Artificial Sequence
  Description of Artificial Sequence: Synthetic oligonucleotide
uuucaaucacuguuuggaa

SEQ ID NO: 1294837 - RNA, 19 nt, Artificial Sequence
  Description of Artificial Sequence: Synthetic oligonucleotide
ucuuuccgauacauugugc

SEQ ID NO: 1294838 - RNA, 19 nt, Artificial Sequence
  Description of Artificial Sequence: Synthetic oligonucleotide
auaauauuacccucacauu

SEQ ID NO: 1294839 - RNA, 19 nt, Artificial Sequence
  Description of Artificial Sequence: Synthetic oligonucleotide
aauugauacccaaggcucu

SEQ ID NO: 1294840 - RNA, 19 nt, Artificial Sequence
  Description of Artificial Sequence: Synthetic oligonucleotide
ucggacauugugguaauca

SEQ ID NO: 1294841 - RNA, 19 nt, Artificial Sequence
  Description of Artificial Sequence: Synthetic oligonucleotide
auggacuucaucaggaacu

SEQ ID NO: 1294842 - RNA, 19 nt, Artificial Sequence
  Description of Artificial Sequence: Synthetic oligonucleotide
agagagagagagguucuac

SEQ ID NO: 1294843 - RNA, 19 nt, Artificial Sequence
  Description of Artificial Sequence: Synthetic oligonucleotide
aacacggccacuacggaga

SEQ ID NO: 1294844 - RNA, 19 nt, Artificial Sequence
  Description of Artificial Sequence: Synthetic oligonucleotide
ugaggggugcucuaauacu

SEQ ID NO: 1294845 - RNA, 19 nt, Artificial Sequence
  Description of Artificial Sequence: Synthetic oligonucleotide
uguuuggaauugauaccca

SEQ ID NO: 1294846 - RNA, 19 nt, Artificial Sequence
  Description of Artificial Sequence: Synthetic oligonucleotide
guuaaacucgagcgcgccg

SEQ ID NO: 1294847 - RNA, 19 nt, Artificial Sequence
  Description of Artificial Sequence: Synthetic oligonucleotide
ugugcagacuguacauaug

SEQ ID NO: 1294848 - RNA, 19 nt, Artificial Sequence
  Description of Artificial Sequence: Synthetic oligonucleotide
gaaguaccuauaauauuac

SEQ ID NO: 1294849 - RNA, 19 nt, Artificial Sequence
  Description of Artificial Sequence: Synthetic oligonucleotide
uaccuauaauauuacccuc

SEQ ID NO: 1294850 - RNA, 19 nt, Artificial Sequence
  Description of Artificial Sequence: Synthetic oligonucleotide
auagugccacauaauuagc

SEQ ID NO: 1294851 - RNA, 19 nt, Artificial Sequence
  Description of Artificial Sequence: Synthetic oligonucleotide
gacaagcuguuggacauag

SEQ ID NO: 1294852 - RNA, 19 nt, Artificial Sequence
  Description of Artificial Sequence: Synthetic oligonucleotide
auguaugggcaugacgacg

SEQ ID NO: 1294853 - RNA, 19 nt, Artificial Sequence
  Description of Artificial Sequence: Synthetic oligonucleotide
ggagaugauggcgaggacg

SEQ ID NO: 1294854 - RNA, 19 nt, Artificial Sequence
  Description of Artificial Sequence: Synthetic oligonucleotide
cauuagcccacuugagaag

SEQ ID NO: 1294855 - RNA, 19 nt, Artificial Sequence
  Description of Artificial Sequence: Synthetic oligonucleotide
ggauacuucggacauugug

SEQ ID NO: 1294856 - RNA, 19 nt, Artificial Sequence
  Description of Artificial Sequence: Synthetic oligonucleotide
cugauagccucugugggcc

SEQ ID NO: 1294857 - RNA, 19 nt, Artificial Sequence
  Description of Artificial Sequence: Synthetic oligonucleotide
uuccgaagaggagaagucc

SEQ ID NO: 1294858 - RNA, 19 nt, Artificial Sequence
  Description of Artificial Sequence: Synthetic oligonucleotide
agguauaauuaucauugua

SEQ ID NO: 1294859 - RNA, 19 nt, Artificial Sequence
  Description of Artificial Sequence: Synthetic oligonucleotide
auuugugaaaacacccucu

SEQ ID NO: 1294860 - RNA, 19 nt, Artificial Sequence
  Description of Artificial Sequence: Synthetic oligonucleotide
uccccuauucuuugcagac

SEQ ID NO: 1294861 - RNA, 19 nt, Artificial Sequence
  Description of Artificial Sequence: Synthetic oligonucleotide
aaaugaggggugcucuaau

SEQ ID NO: 1294862 - RNA, 19 nt, Artificial Sequence
  Description of Artificial Sequence: Synthetic oligonucleotide
gcuuuugaaagauaaaggu

SEQ ID NO: 1294863 - RNA, 19 nt, Artificial Sequence
  Description of Artificial Sequence: Synthetic oligonucleotide
guugacauagaucaguguu

SEQ ID NO: 1294864 - RNA, 19 nt, Artificial Sequence
  Description of Artificial Sequence: Synthetic oligonucleotide
agagucucaaauagaaaga

SEQ ID NO: 1294865 - RNA, 19 nt, Artificial Sequence
  Description of Artificial Sequence: Synthetic oligonucleotide
aagccggucaccgcgagca

SEQ ID NO: 1294866 - RNA, 19 nt, Artificial Sequence
  Description of Artificial Sequence: Synthetic oligonucleotide
gugccaguuaaacucgagc

SEQ ID NO: 1294867 - RNA, 19 nt, Artificial Sequence
  Description of Artificial Sequence: Synthetic oligonucleotide
uguugacauagaucagugu

SEQ ID NO: 1294868 - RNA, 19 nt, Artificial Sequence
  Description of Artificial Sequence: Synthetic oligonucleotide
ggagcuauuauagugccac

SEQ ID NO: 1294869 - RNA, 19 nt, Artificial Sequence
  Description of Artificial Sequence: Synthetic oligonucleotide
acuucggacauugugguaa

SEQ ID NO: 1294870 - RNA, 19 nt, Artificial Sequence
  Description of Artificial Sequence: Synthetic oligonucleotide
gagagagagagagagaggu

SEQ ID NO: 1294871 - RNA, 19 nt, Artificial Sequence
  Description of Artificial Sequence: Synthetic oligonucleotide
auuagcccacuugagaaga

SEQ ID NO: 1294872 - RNA, 19 nt, Artificial Sequence
  Description of Artificial Sequence: Synthetic oligonucleotide
uuggggagguuucaaucac

SEQ ID NO: 1294873 - RNA, 19 nt, Artificial Sequence
  Description of Artificial Sequence: Synthetic oligonucleotide
ugucacucccaugaggacu

SEQ ID NO: 1294874 - RNA, 19 nt, Artificial Sequence
  Description of Artificial Sequence: Synthetic oligonucleotide
gauuaugggguaagccaag

SEQ ID NO: 1294875 - RNA, 19 nt, Artificial Sequence
  Description of Artificial Sequence: Synthetic oligonucleotide
gacccagacgagcacgaag

SEQ ID NO: 1294876 - RNA, 19 nt, Artificial Sequence
  Description of Artificial Sequence: Synthetic oligonucleotide
cugcuaacggggagaaagg

SEQ ID NO: 1294877 - RNA, 19 nt, Artificial Sequence
  Description of Artificial Sequence: Synthetic oligonucleotide
uucuccccuauucuuugca

SEQ ID NO: 1294878 - RNA, 19 nt, Artificial Sequence
  Description of Artificial Sequence: Synthetic oligonucleotide
acauagaguaugacagccg

SEQ ID NO: 1294879 - RNA, 19 nt, Artificial Sequence
  Description of Artificial Sequence: Synthetic oligonucleotide
agcccauuaaaagaagagu

SEQ ID NO: 1294880 - RNA, 19 nt, Artificial Sequence
  Description of Artificial Sequence: Synthetic oligonucleotide
guuuaacccggcauggaug

SEQ ID NO: 1294881 - RNA, 19 nt, Artificial Sequence
  Description of Artificial Sequence: Synthetic oligonucleotide
auugauacccaaggcucuc

SEQ ID NO: 1294882 - RNA, 19 nt, Artificial Sequence
  Description of Artificial Sequence: Synthetic oligonucleotide
agcguuuaacccggcaugg

SEQ ID NO: 1294883 - RNA, 19 nt, Artificial Sequence
  Description of Artificial Sequence: Synthetic oligonucleotide
accuauaauauuacccuca

SEQ ID NO: 1294884 - RNA, 19 nt, Artificial Sequence
  Description of Artificial Sequence: Synthetic oligonucleotide
ucacuguuuggaauugaua

SEQ ID NO: 1294885 - RNA, 19 nt, Artificial Sequence
  Description of Artificial Sequence: Synthetic oligonucleotide
auaaucucuguagaggaua

SEQ ID NO: 1294886 - RNA, 19 nt, Artificial Sequence
  Description of Artificial Sequence: Synthetic oligonucleotide
gagguucuacuguggcugg

SEQ ID NO: 1294887 - RNA, 19 nt, Artificial Sequence
  Description of Artificial Sequence: Synthetic oligonucleotide
agcaaucacuguuccgaag

SEQ ID NO: 1294888 - RNA, 19 nt, Artificial Sequence
  Description of Artificial Sequence: Synthetic oligonucleotide
ggcuccaaauaccagaauc

SEQ ID NO: 1294889 - RNA, 19 nt, Artificial Sequence
  Description of Artificial Sequence: Synthetic oligonucleotide
agaaggauagagccggguu

SEQ ID NO: 1294890 - RNA, 19 nt, Artificial Sequence
  Description of Artificial Sequence: Synthetic oligonucleotide
gcucuaauacuugcaaugg

SEQ ID NO: 1294891 - RNA, 19 nt, Artificial Sequence
  Description of Artificial Sequence: Synthetic oligonucleotide
augggguaagccaagccag

SEQ ID NO: 1294892 - RNA, 19 nt, Artificial Sequence
  Description of Artificial Sequence: Synthetic oligonucleotide
ucugggacguuuccacugu

SEQ ID NO: 1294893 - RNA, 19 nt, Artificial Sequence
  Description of Artificial Sequence: Synthetic oligonucleotide
caauuucucgccaagcucu

SEQ ID NO: 1294894 - RNA, 19 nt, Artificial Sequence
  Description of Artificial Sequence: Synthetic oligonucleotide
cacuacggagaugauggcg

SEQ ID NO: 1294895 - RNA, 19 nt, Artificial Sequence
  Description of Artificial Sequence: Synthetic oligonucleotide
cauguaugggcaugacgac

SEQ ID NO: 1294896 - RNA, 19 nt, Artificial Sequence
  Description of Artificial Sequence: Synthetic oligonucleotide
cuguagcaaucacuguucc

SEQ ID NO: 1294897 - RNA, 19 nt, Artificial Sequence
  Description of Artificial Sequence: Synthetic oligonucleotide
ggaauugauacccaaggcu

SEQ ID NO: 1294898 - RNA, 19 nt, Artificial Sequence
  Description of Artificial Sequence: Synthetic oligonucleotide
uuccugaaauuagauuaug

SEQ ID NO: 1294899 - RNA, 19 nt, Artificial Sequence
  Description of Artificial Sequence: Synthetic oligonucleotide
ugcuaugcauccuuucaua

SEQ ID NO: 1294900 - RNA, 19 nt, Artificial Sequence
  Description of Artificial Sequence: Synthetic oligonucleotide
acaggaaagcuguaugcuu

SEQ ID NO: 1294901 - RNA, 19 nt, Artificial Sequence
  Description of Artificial Sequence: Synthetic oligonucleotide
caaucacuguuccgaagag

SEQ ID NO: 1294902 - RNA, 19 nt, Artificial Sequence
  Description of Artificial Sequence: Synthetic oligonucleotide
uccgauacauugugcuaug

SEQ ID NO: 1294903 - RNA, 19 nt, Artificial Sequence
  Description of Artificial Sequence: Synthetic oligonucleotide
uuuccgauacauugugcua

SEQ ID NO: 1294904 - RNA, 19 nt, Artificial Sequence
  Description of Artificial Sequence: Synthetic oligonucleotide
aucggcuuuugaaagauaa

SEQ ID NO: 1294905 - RNA, 19 nt, Artificial Sequence
  Description of Artificial Sequence: Synthetic oligonucleotide
aaagagagagagagagaga

SEQ ID NO: 1294906 - RNA, 19 nt, Artificial Sequence
  Description of Artificial Sequence: Synthetic oligonucleotide
gagcacgaagaucaccgac

SEQ ID NO: 1294907 - RNA, 19 nt, Artificial Sequence
  Description of Artificial Sequence: Synthetic oligonucleotide
accagaaucagaaggccca

SEQ ID NO: 1294908 - RNA, 19 nt, Artificial Sequence
  Description of Artificial Sequence: Synthetic oligonucleotide
ccaguuaaacucgagcgcg

SEQ ID NO: 1294909 - RNA, 19 nt, Artificial Sequence
  Description of Artificial Sequence: Synthetic oligonucleotide
cuuuccgauacauugugcu

SEQ ID NO: 1294910 - RNA, 19 nt, Artificial Sequence
  Description of Artificial Sequence: Synthetic oligonucleotide
acggagaugauggcgagga

SEQ ID NO: 1294911 - RNA, 19 nt, Artificial Sequence
  Description of Artificial Sequence: Synthetic oligonucleotide
auuauuuggggagguuuca

SEQ ID NO: 1294912 - RNA, 19 nt, Artificial Sequence
  Description of Artificial Sequence: Synthetic oligonucleotide
agacgaagccggucaccgc

SEQ ID NO: 1294913 - RNA, 19 nt, Artificial Sequence
  Description of Artificial Sequence: Synthetic oligonucleotide
cacauuagcccacuugaga

SEQ ID NO: 1294914 - RNA, 19 nt, Artificial Sequence
  Description of Artificial Sequence: Synthetic oligonucleotide
ucggcuuuugaaagauaaa

SEQ ID NO: 1294915 - RNA, 19 nt, Artificial Sequence
  Description of Artificial Sequence: Synthetic oligonucleotide
uccuuucauaaaagcugga

SEQ ID NO: 1294916 - RNA, 19 nt, Artificial Sequence
  Description of Artificial Sequence: Synthetic oligonucleotide
gacuguagcaaucacuguu

SEQ ID NO: 1294917 - RNA, 19 nt, Artificial Sequence
  Description of Artificial Sequence: Synthetic oligonucleotide
gcaaucacuguuccgaaga

SEQ ID NO: 1294918 - RNA, 19 nt, Artificial Sequence
  Description of Artificial Sequence: Synthetic oligonucleotide
caguuaaacucgagcgcgc

SEQ ID NO: 1294919 - RNA, 19 nt, Artificial Sequence
  Description of Artificial Sequence: Synthetic oligonucleotide
aauuucucgccaagcucug

SEQ ID NO: 1294920 - RNA, 19 nt, Artificial Sequence
  Description of Artificial Sequence: Synthetic oligonucleotide
ugggcaugacgacggcccg

SEQ ID NO: 1294921 - RNA, 19 nt, Artificial Sequence
  Description of Artificial Sequence: Synthetic oligonucleotide
uggagcuuauugccauggc

SEQ ID NO: 1294922 - RNA, 19 nt, Artificial Sequence
  Description of Artificial Sequence: Synthetic oligonucleotide
cagcguuuaacccggcaug

SEQ ID NO: 1294923 - RNA, 19 nt, Artificial Sequence
  Description of Artificial Sequence: Synthetic oligonucleotide
uaaacucgagcgcgccgcc

SEQ ID NO: 1294924 - RNA, 19 nt, Artificial Sequence
  Description of Artificial Sequence: Synthetic oligonucleotide
uggagcuauuauagugcca

SEQ ID NO: 1294925 - RNA, 19 nt, Artificial Sequence
  Description of Artificial Sequence: Synthetic oligonucleotide
uagaaagaucuuuccgaua

SEQ ID NO: 1294926 - RNA, 19 nt, Artificial Sequence
  Description of Artificial Sequence: Synthetic oligonucleotide
agagagagagagagagagg

SEQ ID NO: 1294927 - RNA, 19 nt, Artificial Sequence
  Description of Artificial Sequence: Synthetic oligonucleotide
guucuacuguggcuggagc

SEQ ID NO: 1294928 - RNA, 19 nt, Artificial Sequence
  Description of Artificial Sequence: Synthetic oligonucleotide
ggguauuugugaaaacacc

SEQ ID NO: 1294929 - RNA, 19 nt, Artificial Sequence
  Description of Artificial Sequence: Synthetic oligonucleotide
augaggacuguagcaauca

SEQ ID NO: 1294930 - RNA, 19 nt, Artificial Sequence
  Description of Artificial Sequence: Synthetic oligonucleotide
agcacgaagaucaccgaca

SEQ ID NO: 1294931 - RNA, 19 nt, Artificial Sequence
  Description of Artificial Sequence: Synthetic oligonucleotide
auagaguaugacagccguc

SEQ ID NO: 1294932 - RNA, 19 nt, Artificial Sequence
  Description of Artificial Sequence: Synthetic oligonucleotide
ugaaaugaggggugcucua

SEQ ID NO: 1294933 - RNA, 19 nt, Artificial Sequence
  Description of Artificial Sequence: Synthetic oligonucleotide
uaacggggagaaaggugca

SEQ ID NO: 1294934 - RNA, 19 nt, Artificial Sequence
  Description of Artificial Sequence: Synthetic oligonucleotide
ugauagccucugugggccg

SEQ ID NO: 1294935 - RNA, 19 nt, Artificial Sequence
  Description of Artificial Sequence: Synthetic oligonucleotide
uggggagguuucaaucacu

SEQ ID NO: 1294936 - RNA, 19 nt, Artificial Sequence
  Description of Artificial Sequence: Synthetic oligonucleotide
ugggguaagccaagccaga

SEQ ID NO: 1294937 - RNA, 19 nt, Artificial Sequence
  Description of Artificial Sequence: Synthetic oligonucleotide
gagagagagguucuacugu

SEQ ID NO: 1294938 - RNA, 19 nt, Artificial Sequence
  Description of Artificial Sequence: Synthetic oligonucleotide
cauggcgccuugcauuccc

SEQ ID NO: 1294939 - RNA, 19 nt, Artificial Sequence
  Description of Artificial Sequence: Synthetic oligonucleotide
gucacucccaugaggacug

SEQ ID NO: 1294940 - RNA, 19 nt, Artificial Sequence
  Description of Artificial Sequence: Synthetic oligonucleotide
ggacauagaguaugacagc

SEQ ID NO: 1294941 - RNA, 19 nt, Artificial Sequence
  Description of Artificial Sequence: Synthetic oligonucleotide
gccaguuaaacucgagcgc

SEQ ID NO: 1294942 - RNA, 19 nt, Artificial Sequence
  Description of Artificial Sequence: Synthetic oligonucleotide
ggcuuucauguugacauag

SEQ ID NO: 1294943 - RNA, 19 nt, Artificial Sequence
  Description of Artificial Sequence: Synthetic oligonucleotide
cauagaguaugacagccgu

SEQ ID NO: 1294944 - RNA, 19 nt, Artificial Sequence
  Description of Artificial Sequence: Synthetic oligonucleotide
gacagcggagcccauggaa

SEQ ID NO: 1294945 - RNA, 19 nt, Artificial Sequence
  Description of Artificial Sequence: Synthetic oligonucleotide
cucuaauacuugcaaugga

SEQ ID NO: 1294946 - RNA, 19 nt, Artificial Sequence
  Description of Artificial Sequence: Synthetic oligonucleotide
ugcuaacggggagaaaggu

SEQ ID NO: 1294947 - RNA, 19 nt, Artificial Sequence
  Description of Artificial Sequence: Synthetic oligonucleotide
uacggagaugauggcgagg

SEQ ID NO: 1294948 - RNA, 19 nt, Artificial Sequence
  Description of Artificial Sequence: Synthetic oligonucleotide
uucucgccaagcucuggga

SEQ ID NO: 1294949 - RNA, 19 nt, Artificial Sequence
  Description of Artificial Sequence: Synthetic oligonucleotide
uugugcuaugcauccuuuc

SEQ ID NO: 1294950 - RNA, 19 nt, Artificial Sequence
  Description of Artificial Sequence: Synthetic oligonucleotide
uaacccggcauggauggac

SEQ ID NO: 1294951 - RNA, 19 nt, Artificial Sequence
  Description of Artificial Sequence: Synthetic oligonucleotide
aaacucgagcgcgccgccg

SEQ ID NO: 1294952 - RNA, 19 nt, Artificial Sequence
  Description of Artificial Sequence: Synthetic oligonucleotide
auuuggcugaagaaggaua

SEQ ID NO: 1294953 - RNA, 19 nt, Artificial Sequence
  Description of Artificial Sequence: Synthetic oligonucleotide
ccgggugccaguuaaacuc

SEQ ID NO: 1294954 - RNA, 19 nt, Artificial Sequence
  Description of Artificial Sequence: Synthetic oligonucleotide
ggugggaaugaaugguaug

SEQ ID NO: 1294955 - RNA, 19 nt, Artificial Sequence
  Description of Artificial Sequence: Synthetic oligonucleotide
cuacggagaugauggcgag

SEQ ID NO: 1294956 - RNA, 19 nt, Artificial Sequence
  Description of Artificial Sequence: Synthetic oligonucleotide
ccauuaaaagaagagucuc

SEQ ID NO: 1294957 - RNA, 19 nt, Artificial Sequence
  Description of Artificial Sequence: Synthetic oligonucleotide
uagcaaucacuguuccgaa

SEQ ID NO: 1294958 - RNA, 19 nt, Artificial Sequence
  Description of Artificial Sequence: Synthetic oligonucleotide
gcacgaagaucaccgacag

SEQ ID NO: 1294959 - RNA, 19 nt, Artificial Sequence
  Description of Artificial Sequence: Synthetic oligonucleotide
accgggugccaguuaaacu

SEQ ID NO: 1294960 - RNA, 19 nt, Artificial Sequence
  Description of Artificial Sequence: Synthetic oligonucleotide
agcaccgggugccaguuaa

SEQ ID NO: 1294961 - RNA, 19 nt, Artificial Sequence
  Description of Artificial Sequence: Synthetic oligonucleotide
uguacacgaugauggcuau

SEQ ID NO: 1294962 - RNA, 19 nt, Artificial Sequence
  Description of Artificial Sequence: Synthetic oligonucleotide
augauggcgaggacggcag

SEQ ID NO: 1294963 - RNA, 19 nt, Artificial Sequence
  Description of Artificial Sequence: Synthetic oligonucleotide
gacgacggcccggagagac

SEQ ID NO: 1294964 - RNA, 19 nt, Artificial Sequence
  Description of Artificial Sequence: Synthetic oligonucleotide
acggcccggagagacagcg

SEQ ID NO: 1294965 - RNA, 19 nt, Artificial Sequence
  Description of Artificial Sequence: Synthetic oligonucleotide
ucgguagugcaggacccag

SEQ ID NO: 1294966 - RNA, 19 nt, Artificial Sequence
  Description of Artificial Sequence: Synthetic oligonucleotide
cacuguuccgaagaggaga

SEQ ID NO: 1294967 - RNA, 19 nt, Artificial Sequence
  Description of Artificial Sequence: Synthetic oligonucleotide
uacccucacauuagcccac

SEQ ID NO: 1294968 - RNA, 19 nt, Artificial Sequence
  Description of Artificial Sequence: Synthetic oligonucleotide
uuguaauaaagagcccauu

SEQ ID NO: 1294969 - RNA, 19 nt, Artificial Sequence
  Description of Artificial Sequence: Synthetic oligonucleotide
guaugacagccgucagucc

SEQ ID NO: 1294970 - RNA, 19 nt, Artificial Sequence
  Description of Artificial Sequence: Synthetic oligonucleotide
agagagagagagagguucu

SEQ ID NO: 1294971 - RNA, 19 nt, Artificial Sequence
  Description of Artificial Sequence: Synthetic oligonucleotide
gaaaugaggggugcucuaa

SEQ ID NO: 1294972 - RNA, 19 nt, Artificial Sequence
  Description of Artificial Sequence: Synthetic oligonucleotide
gagucucaaauagaaagau

SEQ ID NO: 1294973 - RNA, 19 nt, Artificial Sequence
  Description of Artificial Sequence: Synthetic oligonucleotide
auagccucugugggccgcc

SEQ ID NO: 1294974 - RNA, 19 nt, Artificial Sequence
  Description of Artificial Sequence: Synthetic oligonucleotide
cuaugcccuggaugaagac

SEQ ID NO: 1294975 - RNA, 19 nt, Artificial Sequence
  Description of Artificial Sequence: Synthetic oligonucleotide
auuucucgccaagcucugg

SEQ ID NO: 1294976 - RNA, 19 nt, Artificial Sequence
  Description of Artificial Sequence: Synthetic oligonucleotide
cuugcacugauagccucug

SEQ ID NO: 1294977 - RNA, 19 nt, Artificial Sequence
  Description of Artificial Sequence: Synthetic oligonucleotide
acuguuccgaagaggagaa

SEQ ID NO: 1294978 - RNA, 19 nt, Artificial Sequence
  Description of Artificial Sequence: Synthetic oligonucleotide
auaauuauuuggggagguu

SEQ ID NO: 1294979 - RNA, 19 nt, Artificial Sequence
  Description of Artificial Sequence: Synthetic oligonucleotide
cacgaagaucaccgacagg

SEQ ID NO: 1294980 - RNA, 19 nt, Artificial Sequence
  Description of Artificial Sequence: Synthetic oligonucleotide
guuggacauagaguaugac

SEQ ID NO: 1294981 - RNA, 19 nt, Artificial Sequence
  Description of Artificial Sequence: Synthetic oligonucleotide
caugacgacggcccggaga

SEQ ID NO: 1294982 - RNA, 19 nt, Artificial Sequence
  Description of Artificial Sequence: Synthetic oligonucleotide
acuugcaauggagcuauua

SEQ ID NO: 1294983 - RNA, 19 nt, Artificial Sequence
  Description of Artificial Sequence: Synthetic oligonucleotide
gaguaugacagccgucagu

SEQ ID NO: 1294984 - RNA, 19 nt, Artificial Sequence
  Description of Artificial Sequence: Synthetic oligonucleotide
gagcuauuauagugccaca

SEQ ID NO: 1294985 - RNA, 19 nt, Artificial Sequence
  Description of Artificial Sequence: Synthetic oligonucleotide
uugccauggcgccuugcau

SEQ ID NO: 1294986 - RNA, 19 nt, Artificial Sequence
  Description of Artificial Sequence: Synthetic oligonucleotide
gauagccucugugggccgc

SEQ ID NO: 1294987 - RNA, 19 nt, Artificial Sequence
  Description of Artificial Sequence: Synthetic oligonucleotide
cuccccuauucuuugcaga

SEQ ID NO: 1294988 - RNA, 19 nt, Artificial Sequence
  Description of Artificial Sequence: Synthetic oligonucleotide
agagccggguucucuggga

SEQ ID NO: 1294989 - RNA, 19 nt, Artificial Sequence
  Description of Artificial Sequence: Synthetic oligonucleotide
gagccggguucucugggac

SEQ ID NO: 1294990 - RNA, 19 nt, Artificial Sequence
  Description of Artificial Sequence: Synthetic oligonucleotide
ggcaaucuguacacgauga

SEQ ID NO: 1294991 - RNA, 19 nt, Artificial Sequence
  Description of Artificial Sequence: Synthetic oligonucleotide
ucaccgcgagcaccgggug

SEQ ID NO: 1294992 - RNA, 19 nt, Artificial Sequence
  Description of Artificial Sequence: Synthetic oligonucleotide
uuauugccauggcgccuug

SEQ ID NO: 1294993 - RNA, 19 nt, Artificial Sequence
  Description of Artificial Sequence: Synthetic oligonucleotide
caguccaacccagcugugc

SEQ ID NO: 1294994 - RNA, 19 nt, Artificial Sequence
  Description of Artificial Sequence: Synthetic oligonucleotide
aacccggcauggauggacu

SEQ ID NO: 1294995 - RNA, 19 nt, Artificial Sequence
  Description of Artificial Sequence: Synthetic oligonucleotide
gaagccggucaccgcgagc

SEQ ID NO: 1294996 - RNA, 19 nt, Artificial Sequence
  Description of Artificial Sequence: Synthetic oligonucleotide
gcuaacggggagaaaggug

SEQ ID NO: 1294997 - RNA, 19 nt, Artificial Sequence
  Description of Artificial Sequence: Synthetic oligonucleotide
gacagccgucaguccaacc

SEQ ID NO: 1294998 - RNA, 19 nt, Artificial Sequence
  Description of Artificial Sequence: Synthetic oligonucleotide
agagacagcggagcccaug

SEQ ID NO: 1294999 - RNA, 19 nt, Artificial Sequence
  Description of Artificial Sequence: Synthetic oligonucleotide
ggggagguuucaaucacug

SEQ ID NO: 1295000 - RNA, 19 nt, Artificial Sequence
  Description of Artificial Sequence: Synthetic oligonucleotide
ccagccaagccccucucgg

SEQ ID NO: 1295001 - RNA, 19 nt, Artificial Sequence
  Description of Artificial Sequence: Synthetic oligonucleotide
agagagagagagagagaga

SEQ ID NO: 1295002 - RNA, 19 nt, Artificial Sequence
  Description of Artificial Sequence: Synthetic oligonucleotide
cuggugggaaugaauggua

SEQ ID NO: 1295003 - RNA, 19 nt, Artificial Sequence
  Description of Artificial Sequence: Synthetic oligonucleotide
gacauagaucaguguugaa

SEQ ID NO: 1295004 - RNA, 19 nt, Artificial Sequence
  Description of Artificial Sequence: Synthetic oligonucleotide
gccuccauuuggcugaaga

SEQ ID NO: 1295005 - RNA, 19 nt, Artificial Sequence
  Description of Artificial Sequence: Synthetic oligonucleotide
guaugggcaugacgacggc

SEQ ID NO: 1295006 - RNA, 19 nt, Artificial Sequence
  Description of Artificial Sequence: Synthetic oligonucleotide
gauaaucucuguagaggau

SEQ ID NO: 1295007 - RNA, 19 nt, Artificial Sequence
  Description of Artificial Sequence: Synthetic oligonucleotide
uauugccauggcgccuugc

SEQ ID NO: 1295008 - RNA, 19 nt, Artificial Sequence
  Description of Artificial Sequence: Synthetic oligonucleotide
uggcgaggacggcagccac

SEQ ID NO: 1295009 - RNA, 19 nt, Artificial Sequence
  Description of Artificial Sequence: Synthetic oligonucleotide
ccgaagaggagaaguccag

SEQ ID NO: 1295010 - RNA, 19 nt, Artificial Sequence
  Description of Artificial Sequence: Synthetic oligonucleotide
caaacacggccacuacgga

SEQ ID NO: 1295011 - RNA, 19 nt, Artificial Sequence
  Description of Artificial Sequence: Synthetic oligonucleotide
cugugcagacuguacauau

SEQ ID NO: 1295012 - RNA, 19 nt, Artificial Sequence
  Description of Artificial Sequence: Synthetic oligonucleotide
cucgccaagcucugggaaa

SEQ ID NO: 1295013 - RNA, 19 nt, Artificial Sequence
  Description of Artificial Sequence: Synthetic oligonucleotide
ggacguuuccacugugguc

SEQ ID NO: 1295014 - RNA, 19 nt, Artificial Sequence
  Description of Artificial Sequence: Synthetic oligonucleotide
acauugugcuaugcauccu

SEQ ID NO: 1295015 - RNA, 19 nt, Artificial Sequence
  Description of Artificial Sequence: Synthetic oligonucleotide
acucgagcgcgccgccguc

SEQ ID NO: 1295016 - RNA, 19 nt, Artificial Sequence
  Description of Artificial Sequence: Synthetic oligonucleotide
auugugcuaugcauccuuu

SEQ ID NO: 1295017 - RNA, 19 nt, Artificial Sequence
  Description of Artificial Sequence: Synthetic oligonucleotide
ccggucaccgcgagcaccg

SEQ ID NO: 1295018 - RNA, 19 nt, Artificial Sequence
  Description of Artificial Sequence: Synthetic oligonucleotide
ugcauucccucugcgccuc

SEQ ID NO: 1295019 - RNA, 19 nt, Artificial Sequence
  Description of Artificial Sequence: Synthetic oligonucleotide
cccauuaaaagaagagucu

SEQ ID NO: 1295020 - RNA, 19 nt, Artificial Sequence
  Description of Artificial Sequence: Synthetic oligonucleotide
cugggacguuuccacugug

SEQ ID NO: 1295021 - RNA, 19 nt, Artificial Sequence
  Description of Artificial Sequence: Synthetic oligonucleotide
ggucaccgcgagcaccggg

SEQ ID NO: 1295022 - RNA, 19 nt, Artificial Sequence
  Description of Artificial Sequence: Synthetic oligonucleotide
gugcuaugcauccuuucau

SEQ ID NO: 1295023 - RNA, 19 nt, Artificial Sequence
  Description of Artificial Sequence: Synthetic oligonucleotide
cacaggaaagcuguaugcu

SEQ ID NO: 1295024 - RNA, 19 nt, Artificial Sequence
  Description of Artificial Sequence: Synthetic oligonucleotide
uuaacccggcauggaugga

SEQ ID NO: 1295025 - RNA, 19 nt, Artificial Sequence
  Description of Artificial Sequence: Synthetic oligonucleotide
guacacgaugauggcuaug

SEQ ID NO: 1295026 - RNA, 19 nt, Artificial Sequence
  Description of Artificial Sequence: Synthetic oligonucleotide
caccgcgagcaccgggugc

SEQ ID NO: 1295027 - RNA, 19 nt, Artificial Sequence
  Description of Artificial Sequence: Synthetic oligonucleotide
cauugugcuaugcauccuu

SEQ ID NO: 1295028 - RNA, 19 nt, Artificial Sequence
  Description of Artificial Sequence: Synthetic oligonucleotide
aggacggcagccacagcgu

SEQ ID NO: 1295029 - RNA, 19 nt, Artificial Sequence
  Description of Artificial Sequence: Synthetic oligonucleotide
ugcccuggaugaagacgaa

SEQ ID NO: 1295030 - RNA, 19 nt, Artificial Sequence
  Description of Artificial Sequence: Synthetic oligonucleotide
cacagcguuuaacccggca

SEQ ID NO: 1295031 - RNA, 19 nt, Artificial Sequence
  Description of Artificial Sequence: Synthetic oligonucleotide
ggaacuugcugcacuucca

SEQ ID NO: 1295032 - RNA, 19 nt, Artificial Sequence
  Description of Artificial Sequence: Synthetic oligonucleotide
agagagagagagagagguu

SEQ ID NO: 1295033 - RNA, 19 nt, Artificial Sequence
  Description of Artificial Sequence: Synthetic oligonucleotide
ugacagccgucaguccaac

SEQ ID NO: 1295034 - RNA, 19 nt, Artificial Sequence
  Description of Artificial Sequence: Synthetic oligonucleotide
gccacauaauuagccuugc

SEQ ID NO: 1295035 - RNA, 19 nt, Artificial Sequence
  Description of Artificial Sequence: Synthetic oligonucleotide
gagagagagagagguucua

SEQ ID NO: 1295036 - RNA, 19 nt, Artificial Sequence
  Description of Artificial Sequence: Synthetic oligonucleotide
gugccacauaauuagccuu

SEQ ID NO: 1295037 - RNA, 19 nt, Artificial Sequence
  Description of Artificial Sequence: Synthetic oligonucleotide
guaaucaaacacggccacu

SEQ ID NO: 1295038 - RNA, 19 nt, Artificial Sequence
  Description of Artificial Sequence: Synthetic oligonucleotide
gcuaugcccuggaugaaga

SEQ ID NO: 1295039 - RNA, 19 nt, Artificial Sequence
  Description of Artificial Sequence: Synthetic oligonucleotide
gcgccuugcauucccucug

SEQ ID NO: 1295040 - RNA, 19 nt, Artificial Sequence
  Description of Artificial Sequence: Synthetic oligonucleotide
cuguuccgaagaggagaag

SEQ ID NO: 1295041 - RNA, 19 nt, Artificial Sequence
  Description of Artificial Sequence: Synthetic oligonucleotide
ccggagagacagcggagcc

SEQ ID NO: 1295042 - RNA, 19 nt, Artificial Sequence
  Description of Artificial Sequence: Synthetic oligonucleotide
agccuaggacaagcuguug

SEQ ID NO: 1295043 - RNA, 19 nt, Artificial Sequence
  Description of Artificial Sequence: Synthetic oligonucleotide
accgcacugcuaacgggga

SEQ ID NO: 1295044 - RNA, 19 nt, Artificial Sequence
  Description of Artificial Sequence: Synthetic oligonucleotide
cccggagagacagcggagc

SEQ ID NO: 1295045 - RNA, 19 nt, Artificial Sequence
  Description of Artificial Sequence: Synthetic oligonucleotide
cucgagcgcgccgccgucc

SEQ ID NO: 1295046 - RNA, 19 nt, Artificial Sequence
  Description of Artificial Sequence: Synthetic oligonucleotide
ccacuacggagaugauggc

SEQ ID NO: 1295047 - RNA, 19 nt, Artificial Sequence
  Description of Artificial Sequence: Synthetic oligonucleotide
aguggagggugggcuuugu

SEQ ID NO: 1295048 - RNA, 19 nt, Artificial Sequence
  Description of Artificial Sequence: Synthetic oligonucleotide
gggcugaaaugaggggugc

SEQ ID NO: 1295049 - RNA, 19 nt, Artificial Sequence
  Description of Artificial Sequence: Synthetic oligonucleotide
ccauggcaaucuguacacg

SEQ ID NO: 1295050 - RNA, 19 nt, Artificial Sequence
  Description of Artificial Sequence: Synthetic oligonucleotide
gggugcucuaauacuugca

SEQ ID NO: 1295051 - RNA, 19 nt, Artificial Sequence
  Description of Artificial Sequence: Synthetic oligonucleotide
ggguaagccaagccagaua

SEQ ID NO: 1295052 - RNA, 19 nt, Artificial Sequence
  Description of Artificial Sequence: Synthetic oligonucleotide
acccucacauuagcccacu

SEQ ID NO: 1295053 - RNA, 19 nt, Artificial Sequence
  Description of Artificial Sequence: Synthetic oligonucleotide
ccagacgagcacgaagauc

SEQ ID NO: 1295054 - RNA, 19 nt, Artificial Sequence
  Description of Artificial Sequence: Synthetic oligonucleotide
ccgauacauugugcuaugc

SEQ ID NO: 1295055 - RNA, 19 nt, Artificial Sequence
  Description of Artificial Sequence: Synthetic oligonucleotide
ccccucucgguagugcagg

SEQ ID NO: 1295056 - RNA, 19 nt, Artificial Sequence
  Description of Artificial Sequence: Synthetic oligonucleotide
gucaccgcgagcaccgggu

SEQ ID NO: 1295057 - RNA, 19 nt, Artificial Sequence
  Description of Artificial Sequence: Synthetic oligonucleotide
acgaagccggucaccgcga

SEQ ID NO: 1295058 - RNA, 19 nt, Artificial Sequence
  Description of Artificial Sequence: Synthetic oligonucleotide
gggcaugacgacggcccgg

SEQ ID NO: 1295059 - RNA, 19 nt, Artificial Sequence
  Description of Artificial Sequence: Synthetic oligonucleotide
cucgguagugcaggaccca

SEQ ID NO: 1295060 - RNA, 19 nt, Artificial Sequence
  Description of Artificial Sequence: Synthetic oligonucleotide
cccagccaagccccucucg

SEQ ID NO: 1295061 - RNA, 19 nt, Artificial Sequence
  Description of Artificial Sequence: Synthetic oligonucleotide
ccaacccagcugugcagac

SEQ ID NO: 1295062 - RNA, 19 nt, Artificial Sequence
  Description of Artificial Sequence: Synthetic oligonucleotide
cuucggacauugugguaau

SEQ ID NO: 1295063 - RNA, 19 nt, Artificial Sequence
  Description of Artificial Sequence: Synthetic oligonucleotide
gggagguuucaaucacugu

SEQ ID NO: 1295064 - RNA, 19 nt, Artificial Sequence
  Description of Artificial Sequence: Synthetic oligonucleotide
ccacauaauuagccuugca

SEQ ID NO: 1295065 - RNA, 19 nt, Artificial Sequence
  Description of Artificial Sequence: Synthetic oligonucleotide
ugugggccgccgggcguug

SEQ ID NO: 1295066 - RNA, 19 nt, Artificial Sequence
  Description of Artificial Sequence: Synthetic oligonucleotide
gcaaucuguacacgaugau

SEQ ID NO: 1295067 - RNA, 19 nt, Artificial Sequence
  Description of Artificial Sequence: Synthetic oligonucleotide
ugacgacggcccggagaga

SEQ ID NO: 1295068 - RNA, 19 nt, Artificial Sequence
  Description of Artificial Sequence: Synthetic oligonucleotide
gccgccgucccagccaagc

SEQ ID NO: 1295069 - RNA, 19 nt, Artificial Sequence
  Description of Artificial Sequence: Synthetic oligonucleotide
gccaagccagauaaucucu

SEQ ID NO: 1295070 - RNA, 19 nt, Artificial Sequence
  Description of Artificial Sequence: Synthetic oligonucleotide
gagaugcuuuaggcaggaa

SEQ ID NO: 1295071 - RNA, 19 nt, Artificial Sequence
  Description of Artificial Sequence: Synthetic oligonucleotide
gccggucaccgcgagcacc

SEQ ID NO: 1295072 - RNA, 19 nt, Artificial Sequence
  Description of Artificial Sequence: Synthetic oligonucleotide
cccuauucuuugcagacuu

SEQ ID NO: 1295073 - RNA, 19 nt, Artificial Sequence
  Description of Artificial Sequence: Synthetic oligonucleotide
cagccaagccccucucggu

SEQ ID NO: 1295074 - RNA, 19 nt, Artificial Sequence
  Description of Artificial Sequence: Synthetic oligonucleotide
cggagagacagcggagccc

SEQ ID NO: 1295075 - RNA, 19 nt, Artificial Sequence
  Description of Artificial Sequence: Synthetic oligonucleotide
ggauagagccggguucucu

SEQ ID NO: 1295076 - RNA, 19 nt, Artificial Sequence
  Description of Artificial Sequence: Synthetic oligonucleotide
acgacggcccggagagaca

SEQ ID NO: 1295077 - RNA, 19 nt, Artificial Sequence
  Description of Artificial Sequence: Synthetic oligonucleotide
guaagccaagccagauaau

SEQ ID NO: 1295078 - RNA, 19 nt, Artificial Sequence
  Description of Artificial Sequence: Synthetic oligonucleotide
ccgcacugcuaacggggag

SEQ ID NO: 1295079 - RNA, 19 nt, Artificial Sequence
  Description of Artificial Sequence: Synthetic oligonucleotide
cgacggcccggagagacag

SEQ ID NO: 1295080 - RNA, 19 nt, Artificial Sequence
  Description of Artificial Sequence: Synthetic oligonucleotide
gcccggagagacagcggag

SEQ ID NO: 1295081 - RNA, 19 nt, Artificial Sequence
  Description of Artificial Sequence: Synthetic oligonucleotide
gccgucaguccaacccagc

SEQ ID NO: 1295082 - RNA, 19 nt, Artificial Sequence
  Description of Artificial Sequence: Synthetic oligonucleotide
gcaugacgacggcccggag

SEQ ID NO: 1295083 - RNA, 19 nt, Artificial Sequence
  Description of Artificial Sequence: Synthetic oligonucleotide
gcguuuaacccggcaugga

SEQ ID NO: 1295084 - RNA, 19 nt, Artificial Sequence
  Description of Artificial Sequence: Synthetic oligonucleotide
gcuuauugccauggcgccu

SEQ ID NO: 1295085 - RNA, 19 nt, Artificial Sequence
  Description of Artificial Sequence: Synthetic oligonucleotide
gcuguuggacauagaguau

SEQ ID NO: 1295086 - RNA, 19 nt, Artificial Sequence
  Description of Artificial Sequence: Synthetic oligonucleotide
ccacagcguuuaacccggc

SEQ ID NO: 1295087 - RNA, 19 nt, Artificial Sequence
  Description of Artificial Sequence: Synthetic oligonucleotide
cguuuaacccggcauggau

SEQ ID NO: 1295088 - RNA, 19 nt, Artificial Sequence
  Description of Artificial Sequence: Synthetic oligonucleotide
ccgucaguccaacccagcu

SEQ ID NO: 1295089 - RNA, 19 nt, Artificial Sequence
  Description of Artificial Sequence: Synthetic oligonucleotide
cgagcacgaagaucaccga

SEQ ID NO: 1295090 - RNA, 19 nt, Artificial Sequence
  Description of Artificial Sequence: Synthetic oligonucleotide
gccggguucucugggacgu

SEQ ID NO: 1295091 - RNA, 19 nt, Artificial Sequence
  Description of Artificial Sequence: Synthetic oligonucleotide
ggagcacaggaaagcugua

SEQ ID NO: 1295092 - RNA, 19 nt, Artificial Sequence
  Description of Artificial Sequence: Synthetic oligonucleotide
cacucccaugaggacugua

SEQ ID NO: 1295093 - RNA, 19 nt, Artificial Sequence
  Description of Artificial Sequence: Synthetic oligonucleotide
cacugcuaacggggagaaa

SEQ ID NO: 1295094 - RNA, 19 nt, Artificial Sequence
  Description of Artificial Sequence: Synthetic oligonucleotide
gcgagcaccgggugccagu

SEQ ID NO: 1295095 - RNA, 19 nt, Artificial Sequence
  Description of Artificial Sequence: Synthetic oligonucleotide
cggcccggagagacagcgg

SEQ ID NO: 1295096 - RNA, 19 nt, Artificial Sequence
  Description of Artificial Sequence: Synthetic oligonucleotide
ggacccagacgagcacgaa

SEQ ID NO: 1295097 - RNA, 19 nt, Artificial Sequence
  Description of Artificial Sequence: Synthetic oligonucleotide
gggcuccaaauaccagaau

SEQ ID NO: 1295098 - RNA, 19 nt, Artificial Sequence
  Description of Artificial Sequence: Synthetic oligonucleotide
gggauacuucggacauugu

SEQ ID NO: 1295099 - RNA, 19 nt, Artificial Sequence
  Description of Artificial Sequence: Synthetic oligonucleotide
cccagacgagcacgaagau

SEQ ID NO: 1295100 - RNA, 19 nt, Artificial Sequence
  Description of Artificial Sequence: Synthetic oligonucleotide
cugugggccgccgggcguu

SEQ ID NO: 1295101 - RNA, 19 nt, Artificial Sequence
  Description of Artificial Sequence: Synthetic oligonucleotide
cggucaccgcgagcaccgg

SEQ ID NO: 1295102 - RNA, 19 nt, Artificial Sequence
  Description of Artificial Sequence: Synthetic oligonucleotide
gaagcaaugccuuagagcc

SEQ ID NO: 1295103 - RNA, 19 nt, Artificial Sequence
  Description of Artificial Sequence: Synthetic oligonucleotide
agaugaacaccacagauuc

SEQ ID NO: 1295104 - RNA, 19 nt, Artificial Sequence
  Description of Artificial Sequence: Synthetic oligonucleotide
aaugccuuagagcccaggc

SEQ ID NO: 1295105 - RNA, 19 nt, Artificial Sequence
  Description of Artificial Sequence: Synthetic oligonucleotide
acugaucucagucuucacc

SEQ ID NO: 1295106 - RNA, 19 nt, Artificial Sequence
  Description of Artificial Sequence: Synthetic oligonucleotide
aaguccacgugccuggccc

SEQ ID NO: 1295107 - RNA, 19 nt, Artificial Sequence
  Description of Artificial Sequence: Synthetic oligonucleotide
agaucuggaggcuagguuc

SEQ ID NO: 1295108 - RNA, 19 nt, Artificial Sequence
  Description of Artificial Sequence: Synthetic oligonucleotide
ugaauuaucaggugaccag

SEQ ID NO: 1295109 - RNA, 19 nt, Artificial Sequence
  Description of Artificial Sequence: Synthetic oligonucleotide
ucgaaaguagcaaaugugu

SEQ ID NO: 1295110 - RNA, 19 nt, Artificial Sequence
  Description of Artificial Sequence: Synthetic oligonucleotide
cuugggaugcaccucaucg

SEQ ID NO: 1295111 - RNA, 19 nt, Artificial Sequence
  Description of Artificial Sequence: Synthetic oligonucleotide
agauucaagggagucaccc

SEQ ID NO: 1295112 - RNA, 19 nt, Artificial Sequence
  Description of Artificial Sequence: Synthetic oligonucleotide
cauggguaugcuuauacag

SEQ ID NO: 1295113 - RNA, 19 nt, Artificial Sequence
  Description of Artificial Sequence: Synthetic oligonucleotide
guagcaaauguguucagcc

SEQ ID NO: 1295114 - RNA, 19 nt, Artificial Sequence
  Description of Artificial Sequence: Synthetic oligonucleotide
gacaacuuugaugagucgg

SEQ ID NO: 1295115 - RNA, 19 nt, Artificial Sequence
  Description of Artificial Sequence: Synthetic oligonucleotide
aauacagcguucaaccauc

SEQ ID NO: 1295116 - RNA, 19 nt, Artificial Sequence
  Description of Artificial Sequence: Synthetic oligonucleotide
auuaucaggugaccaggcc

SEQ ID NO: 1295117 - RNA, 19 nt, Artificial Sequence
  Description of Artificial Sequence: Synthetic oligonucleotide
aggaagagccacucgaaac

SEQ ID NO: 1295118 - RNA, 19 nt, Artificial Sequence
  Description of Artificial Sequence: Synthetic oligonucleotide
ugaugagucggauggagcc

SEQ ID NO: 1295119 - RNA, 19 nt, Artificial Sequence
  Description of Artificial Sequence: Synthetic oligonucleotide
gaauuaucaggugaccagg

SEQ ID NO: 1295120 - RNA, 19 nt, Artificial Sequence
  Description of Artificial Sequence: Synthetic oligonucleotide
uaucaggugaccaggccag

SEQ ID NO: 1295121 - RNA, 19 nt, Artificial Sequence
  Description of Artificial Sequence: Synthetic oligonucleotide
gaucucagucuucaccucg

SEQ ID NO: 1295122 - RNA, 19 nt, Artificial Sequence
  Description of Artificial Sequence: Synthetic oligonucleotide
aguagcaaauguguucagc

SEQ ID NO: 1295123 - RNA, 19 nt, Artificial Sequence
  Description of Artificial Sequence: Synthetic oligonucleotide
auauaguugacugucuucu

SEQ ID NO: 1295124 - RNA, 19 nt, Artificial Sequence
  Description of Artificial Sequence: Synthetic oligonucleotide
guugauucggaucugcuga

SEQ ID NO: 1295125 - RNA, 19 nt, Artificial Sequence
  Description of Artificial Sequence: Synthetic oligonucleotide
aacuuugaugagucggaug

SEQ ID NO: 1295126 - RNA, 19 nt, Artificial Sequence
  Description of Artificial Sequence: Synthetic oligonucleotide
uggguaugcuuauacagga

SEQ ID NO: 1295127 - RNA, 19 nt, Artificial Sequence
  Description of Artificial Sequence: Synthetic oligonucleotide
agagauagggcggcaaccc

SEQ ID NO: 1295128 - RNA, 19 nt, Artificial Sequence
  Description of Artificial Sequence: Synthetic oligonucleotide
aaauuccuucuucacugug

SEQ ID NO: 1295129 - RNA, 19 nt, Artificial Sequence
  Description of Artificial Sequence: Synthetic oligonucleotide
ucagcguuccgcucgcucg

SEQ ID NO: 1295130 - RNA, 19 nt, Artificial Sequence
  Description of Artificial Sequence: Synthetic oligonucleotide
ucaaccaucccuuccugug

SEQ ID NO: 1295131 - RNA, 19 nt, Artificial Sequence
  Description of Artificial Sequence: Synthetic oligonucleotide
gauucggaucugcugaagc

SEQ ID NO: 1295132 - RNA, 19 nt, Artificial Sequence
  Description of Artificial Sequence: Synthetic oligonucleotide
ugcucuacggagucgagga

SEQ ID NO: 1295133 - RNA, 19 nt, Artificial Sequence
  Description of Artificial Sequence: Synthetic oligonucleotide
gauauaguugacugucuuc

SEQ ID NO: 1295134 - RNA, 19 nt, Artificial Sequence
  Description of Artificial Sequence: Synthetic oligonucleotide
cacagcaucagaucuggag

SEQ ID NO: 1295135 - RNA, 19 nt, Artificial Sequence
  Description of Artificial Sequence: Synthetic oligonucleotide
gguaugcuuauacaggaag

SEQ ID NO: 1295136 - RNA, 19 nt, Artificial Sequence
  Description of Artificial Sequence: Synthetic oligonucleotide
ugucaguucugcuccaucu

SEQ ID NO: 1295137 - RNA, 19 nt, Artificial Sequence
  Description of Artificial Sequence: Synthetic oligonucleotide
uugaugagucggauggagc

SEQ ID NO: 1295138 - RNA, 19 nt, Artificial Sequence
  Description of Artificial Sequence: Synthetic oligonucleotide
uacggagucgaggaggcgg

SEQ ID NO: 1295139 - RNA, 19 nt, Artificial Sequence
  Description of Artificial Sequence: Synthetic oligonucleotide
agggcggcaacccugaagu

SEQ ID NO: 1295140 - RNA, 19 nt, Artificial Sequence
  Description of Artificial Sequence: Synthetic oligonucleotide
auggguaugcuuauacagg

SEQ ID NO: 1295141 - RNA, 19 nt, Artificial Sequence
  Description of Artificial Sequence: Synthetic oligonucleotide
gaagcucucucucagccga

SEQ ID NO: 1295142 - RNA, 19 nt, Artificial Sequence
  Description of Artificial Sequence: Synthetic oligonucleotide
cucauggguaugcuuauac

SEQ ID NO: 1295143 - RNA, 19 nt, Artificial Sequence
  Description of Artificial Sequence: Synthetic oligonucleotide
cuggauauaguugacuguc

SEQ ID NO: 1295144 - RNA, 19 nt, Artificial Sequence
  Description of Artificial Sequence: Synthetic oligonucleotide
ucauggguaugcuuauaca

SEQ ID NO: 1295145 - RNA, 19 nt, Artificial Sequence
  Description of Artificial Sequence: Synthetic oligonucleotide
ugugacaucuggccccugc

SEQ ID NO: 1295146 - RNA, 19 nt, Artificial Sequence
  Description of Artificial Sequence: Synthetic oligonucleotide
ugcgccauggcucagcguu

SEQ ID NO: 1295147 - RNA, 19 nt, Artificial Sequence
  Description of Artificial Sequence: Synthetic oligonucleotide
ugucccacgggaagcaaug

SEQ ID NO: 1295148 - RNA, 19 nt, Artificial Sequence
  Description of Artificial Sequence: Synthetic oligonucleotide
uagcaaauguguucagcca

SEQ ID NO: 1295149 - RNA, 19 nt, Artificial Sequence
  Description of Artificial Sequence: Synthetic oligonucleotide
uuccugugacaucuggccc

SEQ ID NO: 1295150 - RNA, 19 nt, Artificial Sequence
  Description of Artificial Sequence: Synthetic oligonucleotide
aaguagcaaauguguucag

SEQ ID NO: 1295151 - RNA, 19 nt, Artificial Sequence
  Description of Artificial Sequence: Synthetic oligonucleotide
cucucagccgaagucaggg

SEQ ID NO: 1295152 - RNA, 19 nt, Artificial Sequence
  Description of Artificial Sequence: Synthetic oligonucleotide
ugagcauucugcgagucaa

SEQ ID NO: 1295153 - RNA, 19 nt, Artificial Sequence
  Description of Artificial Sequence: Synthetic oligonucleotide
agcuaucuccagcuggaag

SEQ ID NO: 1295154 - RNA, 19 nt, Artificial Sequence
  Description of Artificial Sequence: Synthetic oligonucleotide
agcauucugcgagucaagg

SEQ ID NO: 1295155 - RNA, 19 nt, Artificial Sequence
  Description of Artificial Sequence: Synthetic oligonucleotide
ucuugcucuacggagucga

SEQ ID NO: 1295156 - RNA, 19 nt, Artificial Sequence
  Description of Artificial Sequence: Synthetic oligonucleotide
uucaccucguugauucgga

SEQ ID NO: 1295157 - RNA, 19 nt, Artificial Sequence
  Description of Artificial Sequence: Synthetic oligonucleotide
cuuauggccccgcuugccc

SEQ ID NO: 1295158 - RNA, 19 nt, Artificial Sequence
  Description of Artificial Sequence: Synthetic oligonucleotide
gaagagccacucgaaaccc

SEQ ID NO: 1295159 - RNA, 19 nt, Artificial Sequence
  Description of Artificial Sequence: Synthetic oligonucleotide
caagugcugguccaauggc

SEQ ID NO: 1295160 - RNA, 19 nt, Artificial Sequence
  Description of Artificial Sequence: Synthetic oligonucleotide
gacccgugagggcagcugg

SEQ ID NO: 1295161 - RNA, 19 nt, Artificial Sequence
  Description of Artificial Sequence: Synthetic oligonucleotide
ucggcugucaguucugcuc

SEQ ID NO: 1295162 - RNA, 19 nt, Artificial Sequence
  Description of Artificial Sequence: Synthetic oligonucleotide
cucuacggagucgaggagg

SEQ ID NO: 1295163 - RNA, 19 nt, Artificial Sequence
  Description of Artificial Sequence: Synthetic oligonucleotide
uccauucucaccggggccc

SEQ ID NO: 1295164 - RNA, 19 nt, Artificial Sequence
  Description of Artificial Sequence: Synthetic oligonucleotide
gaugcaccucaucguagag

SEQ ID NO: 1295165 - RNA, 19 nt, Artificial Sequence
  Description of Artificial Sequence: Synthetic oligonucleotide
gaggucguccuuuacuguc

SEQ ID NO: 1295166 - RNA, 19 nt, Artificial Sequence
  Description of Artificial Sequence: Synthetic oligonucleotide
ucuggugcgccauggcuca

SEQ ID NO: 1295167 - RNA, 19 nt, Artificial Sequence
  Description of Artificial Sequence: Synthetic oligonucleotide
caagguaggguuccccagc

SEQ ID NO: 1295168 - RNA, 19 nt, Artificial Sequence
  Description of Artificial Sequence: Synthetic oligonucleotide
agcacggucguaguccugg

SEQ ID NO: 1295169 - RNA, 19 nt, Artificial Sequence
  Description of Artificial Sequence: Synthetic oligonucleotide
uugggaugcaccucaucgu

SEQ ID NO: 1295170 - RNA, 19 nt, Artificial Sequence
  Description of Artificial Sequence: Synthetic oligonucleotide
ucccacgggaagcaaugcc

SEQ ID NO: 1295171 - RNA, 19 nt, Artificial Sequence
  Description of Artificial Sequence: Synthetic oligonucleotide
cuccgcuugguccuggccc

SEQ ID NO: 1295172 - RNA, 19 nt, Artificial Sequence
  Description of Artificial Sequence: Synthetic oligonucleotide
gagagauagggcggcaacc

SEQ ID NO: 1295173 - RNA, 19 nt, Artificial Sequence
  Description of Artificial Sequence: Synthetic oligonucleotide
ucuggacugagcggggucc

SEQ ID NO: 1295174 - RNA, 19 nt, Artificial Sequence
  Description of Artificial Sequence: Synthetic oligonucleotide
uugcucuacggagucgagg

SEQ ID NO: 1295175 - RNA, 19 nt, Artificial Sequence
  Description of Artificial Sequence: Synthetic oligonucleotide
uuauggccccgcuugcccc

SEQ ID NO: 1295176 - RNA, 19 nt, Artificial Sequence
  Description of Artificial Sequence: Synthetic oligonucleotide
auucugcgagucaaggcgg

SEQ ID NO: 1295177 - RNA, 19 nt, Artificial Sequence
  Description of Artificial Sequence: Synthetic oligonucleotide
aggaggcggcucuugcagc

SEQ ID NO: 1295178 - RNA, 19 nt, Artificial Sequence
  Description of Artificial Sequence: Synthetic oligonucleotide
ugggaugcaccucaucgua

SEQ ID NO: 1295179 - RNA, 19 nt, Artificial Sequence
  Description of Artificial Sequence: Synthetic oligonucleotide
gugaauuaucaggugacca

SEQ ID NO: 1295180 - RNA, 19 nt, Artificial Sequence
  Description of Artificial Sequence: Synthetic oligonucleotide
cucgaaacccugagcauuc

SEQ ID NO: 1295181 - RNA, 19 nt, Artificial Sequence
  Description of Artificial Sequence: Synthetic oligonucleotide
acaacuuugaugagucgga

SEQ ID NO: 1295182 - RNA, 19 nt, Artificial Sequence
  Description of Artificial Sequence: Synthetic oligonucleotide
ucguccuuuacugucccga

SEQ ID NO: 1295183 - RNA, 19 nt, Artificial Sequence
  Description of Artificial Sequence: Synthetic oligonucleotide
ucguugauucggaucugcu

SEQ ID NO: 1295184 - RNA, 19 nt, Artificial Sequence
  Description of Artificial Sequence: Synthetic oligonucleotide
uagagcaugcgcuccuuaa

SEQ ID NO: 1295185 - RNA, 19 nt, Artificial Sequence
  Description of Artificial Sequence: Synthetic oligonucleotide
cucguguggcugcauacag

SEQ ID NO: 1295186 - RNA, 19 nt, Artificial Sequence
  Description of Artificial Sequence: Synthetic oligonucleotide
aggucguccuuuacugucc

SEQ ID NO: 1295187 - RNA, 19 nt, Artificial Sequence
  Description of Artificial Sequence: Synthetic oligonucleotide
uacagcguucaaccauccc

SEQ ID NO: 1295188 - RNA, 19 nt, Artificial Sequence
  Description of Artificial Sequence: Synthetic oligonucleotide
gguaggguuccccagcuac

SEQ ID NO: 1295189 - RNA, 19 nt, Artificial Sequence
  Description of Artificial Sequence: Synthetic oligonucleotide
agccaaggagaggucgucc

SEQ ID NO: 1295190 - RNA, 19 nt, Artificial Sequence
  Description of Artificial Sequence: Synthetic oligonucleotide
cacaggugaauuaucaggu

SEQ ID NO: 1295191 - RNA, 19 nt, Artificial Sequence
  Description of Artificial Sequence: Synthetic oligonucleotide
gacucggcucgccuggacc

SEQ ID NO: 1295192 - RNA, 19 nt, Artificial Sequence
  Description of Artificial Sequence: Synthetic oligonucleotide
agcuucgcgcagcaucccg

SEQ ID NO: 1295193 - RNA, 19 nt, Artificial Sequence
  Description of Artificial Sequence: Synthetic oligonucleotide
uugauucggaucugcugaa

SEQ ID NO: 1295194 - RNA, 19 nt, Artificial Sequence
  Description of Artificial Sequence: Synthetic oligonucleotide
auacagcguucaaccaucc

SEQ ID NO: 1295195 - RNA, 19 nt, Artificial Sequence
  Description of Artificial Sequence: Synthetic oligonucleotide
augaggcgcuuauggcccc

SEQ ID NO: 1295196 - RNA, 19 nt, Artificial Sequence
  Description of Artificial Sequence: Synthetic oligonucleotide
ucgaggaggcggcucuugc

SEQ ID NO: 1295197 - RNA, 19 nt, Artificial Sequence
  Description of Artificial Sequence: Synthetic oligonucleotide
cucgacucggcucgccugg

SEQ ID NO: 1295198 - RNA, 19 nt, Artificial Sequence
  Description of Artificial Sequence: Synthetic oligonucleotide
cuuguaccccggcauggag

SEQ ID NO: 1295199 - RNA, 19 nt, Artificial Sequence
  Description of Artificial Sequence: Synthetic oligonucleotide
ucagaucuggaggcuaggu

SEQ ID NO: 1295200 - RNA, 19 nt, Artificial Sequence
  Description of Artificial Sequence: Synthetic oligonucleotide
aggcuucuggacugagcgg

SEQ ID NO: 1295201 - RNA, 19 nt, Artificial Sequence
  Description of Artificial Sequence: Synthetic oligonucleotide
ccggaugaggcgcuuaugg

SEQ ID NO: 1295202 - RNA, 19 nt, Artificial Sequence
  Description of Artificial Sequence: Synthetic oligonucleotide
acgggaagcaaugccuuag

SEQ ID NO: 1295203 - RNA, 19 nt, Artificial Sequence
  Description of Artificial Sequence: Synthetic oligonucleotide
cuucgcgcagcaucccggg

SEQ ID NO: 1295204 - RNA, 19 nt, Artificial Sequence
  Description of Artificial Sequence: Synthetic oligonucleotide
agagcaugcgcuccuuaau

SEQ ID NO: 1295205 - RNA, 19 nt, Artificial Sequence
  Description of Artificial Sequence: Synthetic oligonucleotide
gguagcagggcuccugggc

SEQ ID NO: 1295206 - RNA, 19 nt, Artificial Sequence
  Description of Artificial Sequence: Synthetic oligonucleotide
caaugacaacuuugaugag

SEQ ID NO: 1295207 - RNA, 19 nt, Artificial Sequence
  Description of Artificial Sequence: Synthetic oligonucleotide
cucguugauucggaucugc

SEQ ID NO: 1295208 - RNA, 19 nt, Artificial Sequence
  Description of Artificial Sequence: Synthetic oligonucleotide
guagcgggcggcaucucgg

SEQ ID NO: 1295209 - RNA, 19 nt, Artificial Sequence
  Description of Artificial Sequence: Synthetic oligonucleotide
gaaggcgugcugcuuggga

SEQ ID NO: 1295210 - RNA, 19 nt, Artificial Sequence
  Description of Artificial Sequence: Synthetic oligonucleotide
agauagggcggcaacccug

SEQ ID NO: 1295211 - RNA, 19 nt, Artificial Sequence
  Description of Artificial Sequence: Synthetic oligonucleotide
gauucaagggagucacccu

SEQ ID NO: 1295212 - RNA, 19 nt, Artificial Sequence
  Description of Artificial Sequence: Synthetic oligonucleotide
guuccgcucgcucgugccg

SEQ ID NO: 1295213 - RNA, 19 nt, Artificial Sequence
  Description of Artificial Sequence: Synthetic oligonucleotide
acggagucgaggaggcggc

SEQ ID NO: 1295214 - RNA, 19 nt, Artificial Sequence
  Description of Artificial Sequence: Synthetic oligonucleotide
cuagguucaugccaaggua

SEQ ID NO: 1295215 - RNA, 19 nt, Artificial Sequence
  Description of Artificial Sequence: Synthetic oligonucleotide
cuggaguagagcaugcgcu

SEQ ID NO: 1295216 - RNA, 19 nt, Artificial Sequence
  Description of Artificial Sequence: Synthetic oligonucleotide
uucuggacugagcgggguc

SEQ ID NO: 1295217 - RNA, 19 nt, Artificial Sequence
  Description of Artificial Sequence: Synthetic oligonucleotide
ggugaauuaucaggugacc

SEQ ID NO: 1295218 - RNA, 19 nt, Artificial Sequence
  Description of Artificial Sequence: Synthetic oligonucleotide
auggcucagcguuccgcuc

SEQ ID NO: 1295219 - RNA, 19 nt, Artificial Sequence
  Description of Artificial Sequence: Synthetic oligonucleotide
acucgaaacccugagcauu

SEQ ID NO: 1295220 - RNA, 19 nt, Artificial Sequence
  Description of Artificial Sequence: Synthetic oligonucleotide
gaacucggcugucaguucu

SEQ ID NO: 1295221 - RNA, 19 nt, Artificial Sequence
  Description of Artificial Sequence: Synthetic oligonucleotide
gaugagucggauggagcca

SEQ ID NO: 1295222 - RNA, 19 nt, Artificial Sequence
  Description of Artificial Sequence: Synthetic oligonucleotide
uagcgggcggcaucucggg

SEQ ID NO: 1295223 - RNA, 19 nt, Artificial Sequence
  Description of Artificial Sequence: Synthetic oligonucleotide
agagccacucgaaacccug

SEQ ID NO: 1295224 - RNA, 19 nt, Artificial Sequence
  Description of Artificial Sequence: Synthetic oligonucleotide
aaccauccccacccucugu

SEQ ID NO: 1295225 - RNA, 19 nt, Artificial Sequence
  Description of Artificial Sequence: Synthetic oligonucleotide
gccaaaggcuucuggacug

SEQ ID NO: 1295226 - RNA, 19 nt, Artificial Sequence
  Description of Artificial Sequence: Synthetic oligonucleotide
gcauucugcgagucaaggc

SEQ ID NO: 1295227 - RNA, 19 nt, Artificial Sequence
  Description of Artificial Sequence: Synthetic oligonucleotide
gauagggcggcaacccuga

SEQ ID NO: 1295228 - RNA, 19 nt, Artificial Sequence
  Description of Artificial Sequence: Synthetic oligonucleotide
gguagcgggcggcaucucg

SEQ ID NO: 1295229 - RNA, 19 nt, Artificial Sequence
  Description of Artificial Sequence: Synthetic oligonucleotide
cagauucaagggagucacc

SEQ ID NO: 1295230 - RNA, 19 nt, Artificial Sequence
  Description of Artificial Sequence: Synthetic oligonucleotide
cuccggaggauguggcggc

SEQ ID NO: 1295231 - RNA, 19 nt, Artificial Sequence
  Description of Artificial Sequence: Synthetic oligonucleotide
cuaucuccagcuggaaguc

SEQ ID NO: 1295232 - RNA, 19 nt, Artificial Sequence
  Description of Artificial Sequence: Synthetic oligonucleotide
cuugcucuacggagucgag

SEQ ID NO: 1295233 - RNA, 19 nt, Artificial Sequence
  Description of Artificial Sequence: Synthetic oligonucleotide
agcacagcacggucguagu

SEQ ID NO: 1295234 - RNA, 19 nt, Artificial Sequence
  Description of Artificial Sequence: Synthetic oligonucleotide
uaccccggcauggaguaga

SEQ ID NO: 1295235 - RNA, 19 nt, Artificial Sequence
  Description of Artificial Sequence: Synthetic oligonucleotide
ugguccaauggcccucgaa

SEQ ID NO: 1295236 - RNA, 19 nt, Artificial Sequence
  Description of Artificial Sequence: Synthetic oligonucleotide
ggcaggagagauagggcgg

SEQ ID NO: 1295237 - RNA, 19 nt, Artificial Sequence
  Description of Artificial Sequence: Synthetic oligonucleotide
ccacucgaaacccugagca

SEQ ID NO: 1295238 - RNA, 19 nt, Artificial Sequence
  Description of Artificial Sequence: Synthetic oligonucleotide
gugcggcacaggaugagag

SEQ ID NO: 1295239 - RNA, 19 nt, Artificial Sequence
  Description of Artificial Sequence: Synthetic oligonucleotide
cucaccggggccccggaug

SEQ ID NO: 1295240 - RNA, 19 nt, Artificial Sequence
  Description of Artificial Sequence: Synthetic oligonucleotide
gcgcuuauggccccgcuug

SEQ ID NO: 1295241 - RNA, 19 nt, Artificial Sequence
  Description of Artificial Sequence: Synthetic oligonucleotide
ggugcgccauggcucagcg

SEQ ID NO: 1295242 - RNA, 19 nt, Artificial Sequence
  Description of Artificial Sequence: Synthetic oligonucleotide
agucaaggcggaagaggag

SEQ ID NO: 1295243 - RNA, 19 nt, Artificial Sequence
  Description of Artificial Sequence: Synthetic oligonucleotide
cucuguggccaaaggcuuc

SEQ ID NO: 1295244 - RNA, 19 nt, Artificial Sequence
  Description of Artificial Sequence: Synthetic oligonucleotide
gaugccggucuggugcgcc

SEQ ID NO: 1295245 - RNA, 19 nt, Artificial Sequence
  Description of Artificial Sequence: Synthetic oligonucleotide
gucguccuuuacugucccg

SEQ ID NO: 1295246 - RNA, 19 nt, Artificial Sequence
  Description of Artificial Sequence: Synthetic oligonucleotide
gucggagcgcuccgcuugg

SEQ ID NO: 1295247 - RNA, 19 nt, Artificial Sequence
  Description of Artificial Sequence: Synthetic oligonucleotide
uggcccucgaaaguagcaa

SEQ ID NO: 1295248 - RNA, 19 nt, Artificial Sequence
  Description of Artificial Sequence: Synthetic oligonucleotide
ggcggcaacccugaagucc

SEQ ID NO: 1295249 - RNA, 19 nt, Artificial Sequence
  Description of Artificial Sequence: Synthetic oligonucleotide
uggucccagcgucccacug

SEQ ID NO: 1295250 - RNA, 19 nt, Artificial Sequence
  Description of Artificial Sequence: Synthetic oligonucleotide
caaugccuuagagcccagg

SEQ ID NO: 1295251 - RNA, 19 nt, Artificial Sequence
  Description of Artificial Sequence: Synthetic oligonucleotide
gucuggugcgccauggcuc

SEQ ID NO: 1295252 - RNA, 19 nt, Artificial Sequence
  Description of Artificial Sequence: Synthetic oligonucleotide
cuggugcuugcuuuccaca

SEQ ID NO: 1295253 - RNA, 19 nt, Artificial Sequence
  Description of Artificial Sequence: Synthetic oligonucleotide
ggaguagagcaugcgcucc

SEQ ID NO: 1295254 - RNA, 19 nt, Artificial Sequence
  Description of Artificial Sequence: Synthetic oligonucleotide
ugaggcgcuuauggccccg

SEQ ID NO: 1295255 - RNA, 19 nt, Artificial Sequence
  Description of Artificial Sequence: Synthetic oligonucleotide
ggcuagguucaugccaagg

SEQ ID NO: 1295256 - RNA, 19 nt, Artificial Sequence
  Description of Artificial Sequence: Synthetic oligonucleotide
ugcucccaguccaggcaca

SEQ ID NO: 1295257 - RNA, 19 nt, Artificial Sequence
  Description of Artificial Sequence: Synthetic oligonucleotide
gcuagguucaugccaaggu

SEQ ID NO: 1295258 - RNA, 19 nt, Artificial Sequence
  Description of Artificial Sequence: Synthetic oligonucleotide
caagggagucacccucaug

SEQ ID NO: 1295259 - RNA, 19 nt, Artificial Sequence
  Description of Artificial Sequence: Synthetic oligonucleotide
gucuugcucuacggagucg

SEQ ID NO: 1295260 - RNA, 19 nt, Artificial Sequence
  Description of Artificial Sequence: Synthetic oligonucleotide
acuuguaccccggcaugga

SEQ ID NO: 1295261 - RNA, 19 nt, Artificial Sequence
  Description of Artificial Sequence: Synthetic oligonucleotide
cucagcguuccgcucgcuc

SEQ ID NO: 1295262 - RNA, 19 nt, Artificial Sequence
  Description of Artificial Sequence: Synthetic oligonucleotide
agcgccgagcuucgcgcag

SEQ ID NO: 1295263 - RNA, 19 nt, Artificial Sequence
  Description of Artificial Sequence: Synthetic oligonucleotide
cgagcuucgcgcagcaucc

SEQ ID NO: 1295264 - RNA, 19 nt, Artificial Sequence
  Description of Artificial Sequence: Synthetic oligonucleotide
aggcuagguucaugccaag

SEQ ID NO: 1295265 - RNA, 19 nt, Artificial Sequence
  Description of Artificial Sequence: Synthetic oligonucleotide
ggucguccuuuacuguccc

SEQ ID NO: 1295266 - RNA, 19 nt, Artificial Sequence
  Description of Artificial Sequence: Synthetic oligonucleotide
cguugauucggaucugcug

SEQ ID NO: 1295267 - RNA, 19 nt, Artificial Sequence
  Description of Artificial Sequence: Synthetic oligonucleotide
gcguucaaccaucccuucc

SEQ ID NO: 1295268 - RNA, 19 nt, Artificial Sequence
  Description of Artificial Sequence: Synthetic oligonucleotide
aguccacgugccuggcccu

SEQ ID NO: 1295269 - RNA, 19 nt, Artificial Sequence
  Description of Artificial Sequence: Synthetic oligonucleotide
ucacccucauggguaugcu

SEQ ID NO: 1295270 - RNA, 19 nt, Artificial Sequence
  Description of Artificial Sequence: Synthetic oligonucleotide
auggcccucgaaaguagca

SEQ ID NO: 1295271 - RNA, 19 nt, Artificial Sequence
  Description of Artificial Sequence: Synthetic oligonucleotide
uguggcucguguggcugca

SEQ ID NO: 1295272 - RNA, 19 nt, Artificial Sequence
  Description of Artificial Sequence: Synthetic oligonucleotide
cgagucaaggcggaagagg

SEQ ID NO: 1295273 - RNA, 19 nt, Artificial Sequence
  Description of Artificial Sequence: Synthetic oligonucleotide
ucgaaacccugagcauucu

SEQ ID NO: 1295274 - RNA, 19 nt, Artificial Sequence
  Description of Artificial Sequence: Synthetic oligonucleotide
cauggcucagcguuccgcu

SEQ ID NO: 1295275 - RNA, 19 nt, Artificial Sequence
  Description of Artificial Sequence: Synthetic oligonucleotide
cguaguccuggucccagcg

SEQ ID NO: 1295276 - RNA, 19 nt, Artificial Sequence
  Description of Artificial Sequence: Synthetic oligonucleotide
cucgcucgugccgucggag

SEQ ID NO: 1295277 - RNA, 19 nt, Artificial Sequence
  Description of Artificial Sequence: Synthetic oligonucleotide
ggagucacccucaugggua

SEQ ID NO: 1295278 - RNA, 19 nt, Artificial Sequence
  Description of Artificial Sequence: Synthetic oligonucleotide
agccagcccgggccuuggc

SEQ ID NO: 1295279 - RNA, 19 nt, Artificial Sequence
  Description of Artificial Sequence: Synthetic oligonucleotide
gccaagguaggguucccca

SEQ ID NO: 1295280 - RNA, 19 nt, Artificial Sequence
  Description of Artificial Sequence: Synthetic oligonucleotide
aggagagauagggcggcaa

SEQ ID NO: 1295281 - RNA, 19 nt, Artificial Sequence
  Description of Artificial Sequence: Synthetic oligonucleotide
ccgagcuucgcgcagcauc

SEQ ID NO: 1295282 - RNA, 19 nt, Artificial Sequence
  Description of Artificial Sequence: Synthetic oligonucleotide
gcaggagagauagggcggc

SEQ ID NO: 1295283 - RNA, 19 nt, Artificial Sequence
  Description of Artificial Sequence: Synthetic oligonucleotide
ggcacacuagcugucaucu

SEQ ID NO: 1295284 - RNA, 19 nt, Artificial Sequence
  Description of Artificial Sequence: Synthetic oligonucleotide
uugugggcucuguguggac

SEQ ID NO: 1295285 - RNA, 19 nt, Artificial Sequence
  Description of Artificial Sequence: Synthetic oligonucleotide
ucugcgagucaaggcggaa

SEQ ID NO: 1295286 - RNA, 19 nt, Artificial Sequence
  Description of Artificial Sequence: Synthetic oligonucleotide
cuacggagucgaggaggcg

SEQ ID NO: 1295287 - RNA, 19 nt, Artificial Sequence
  Description of Artificial Sequence: Synthetic oligonucleotide
cacggucguaguccugguc

SEQ ID NO: 1295288 - RNA, 19 nt, Artificial Sequence
  Description of Artificial Sequence: Synthetic oligonucleotide
gcucuacggagucgaggag

SEQ ID NO: 1295289 - RNA, 19 nt, Artificial Sequence
  Description of Artificial Sequence: Synthetic oligonucleotide
cggaugaggcgcuuauggc

SEQ ID NO: 1295290 - RNA, 19 nt, Artificial Sequence
  Description of Artificial Sequence: Synthetic oligonucleotide
gucccacgggaagcaaugc

SEQ ID NO: 1295291 - RNA, 19 nt, Artificial Sequence
  Description of Artificial Sequence: Synthetic oligonucleotide
uucagccgcacaggugaau

SEQ ID NO: 1295292 - RNA, 19 nt, Artificial Sequence
  Description of Artificial Sequence: Synthetic oligonucleotide
gagccacucgaaacccuga

SEQ ID NO: 1295293 - RNA, 19 nt, Artificial Sequence
  Description of Artificial Sequence: Synthetic oligonucleotide
ucggcucgccuggacccag

SEQ ID NO: 1295294 - RNA, 19 nt, Artificial Sequence
  Description of Artificial Sequence: Synthetic oligonucleotide
augccggucuggugcgcca

SEQ ID NO: 1295295 - RNA, 19 nt, Artificial Sequence
  Description of Artificial Sequence: Synthetic oligonucleotide
ggcccucgaaaguagcaaa

SEQ ID NO: 1295296 - RNA, 19 nt, Artificial Sequence
  Description of Artificial Sequence: Synthetic oligonucleotide
gcucgacucggcucgccug

SEQ ID NO: 1295297 - RNA, 19 nt, Artificial Sequence
  Description of Artificial Sequence: Synthetic oligonucleotide
gcuuauggccccgcuugcc

SEQ ID NO: 1295298 - RNA, 19 nt, Artificial Sequence
  Description of Artificial Sequence: Synthetic oligonucleotide
gagcuucgcgcagcauccc

SEQ ID NO: 1295299 - RNA, 19 nt, Artificial Sequence
  Description of Artificial Sequence: Synthetic oligonucleotide
cgaggcacccagcacgagc

SEQ ID NO: 1295300 - RNA, 19 nt, Artificial Sequence
  Description of Artificial Sequence: Synthetic oligonucleotide
uccggaggauguggcggca

SEQ ID NO: 1295301 - RNA, 19 nt, Artificial Sequence
  Description of Artificial Sequence: Synthetic oligonucleotide
guagaggaacucggcuguc

SEQ ID NO: 1295302 - RNA, 19 nt, Artificial Sequence
  Description of Artificial Sequence: Synthetic oligonucleotide
gcggcaacccugaagucca

SEQ ID NO: 1295303 - RNA, 19 nt, Artificial Sequence
  Description of Artificial Sequence: Synthetic oligonucleotide
caaauguguucagccaccu

SEQ ID NO: 1295304 - RNA, 19 nt, Artificial Sequence
  Description of Artificial Sequence: Synthetic oligonucleotide
gaggcgcuuauggccccgc

SEQ ID NO: 1295305 - RNA, 19 nt, Artificial Sequence
  Description of Artificial Sequence: Synthetic oligonucleotide
ggcgugcugcuugggaugc

SEQ ID NO: 1295306 - RNA, 19 nt, Artificial Sequence
  Description of Artificial Sequence: Synthetic oligonucleotide
cuccugcgaggcacccagc

SEQ ID NO: 1295307 - RNA, 19 nt, Artificial Sequence
  Description of Artificial Sequence: Synthetic oligonucleotide
cgucccacuggcuccugcg

SEQ ID NO: 1295308 - RNA, 19 nt, Artificial Sequence
  Description of Artificial Sequence: Synthetic oligonucleotide
agcccgggccuuggcaaag

SEQ ID NO: 1295309 - RNA, 19 nt, Artificial Sequence
  Description of Artificial Sequence: Synthetic oligonucleotide
ggcucgccuggacccagag

SEQ ID NO: 1295310 - RNA, 19 nt, Artificial Sequence
  Description of Artificial Sequence: Synthetic oligonucleotide
ucgacucggcucgccugga

SEQ ID NO: 1295311 - RNA, 19 nt, Artificial Sequence
  Description of Artificial Sequence: Synthetic oligonucleotide
aagcucucucucagccgaa

SEQ ID NO: 1295312 - RNA, 19 nt, Artificial Sequence
  Description of Artificial Sequence: Synthetic oligonucleotide
gggagucacccucaugggu

SEQ ID NO: 1295313 - RNA, 19 nt, Artificial Sequence
  Description of Artificial Sequence: Synthetic oligonucleotide
cacgggaagcaaugccuua

SEQ ID NO: 1295314 - RNA, 19 nt, Artificial Sequence
  Description of Artificial Sequence: Synthetic oligonucleotide
auagggcggcaacccugaa

SEQ ID NO: 1295315 - RNA, 19 nt, Artificial Sequence
  Description of Artificial Sequence: Synthetic oligonucleotide
cagaucuggaggcuagguu

SEQ ID NO: 1295316 - RNA, 19 nt, Artificial Sequence
  Description of Artificial Sequence: Synthetic oligonucleotide
cuggacccagagcuccgga

SEQ ID NO: 1295317 - RNA, 19 nt, Artificial Sequence
  Description of Artificial Sequence: Synthetic oligonucleotide
cuucagccgcacaggugaa

SEQ ID NO: 1295318 - RNA, 19 nt, Artificial Sequence
  Description of Artificial Sequence: Synthetic oligonucleotide
ggugcggcacaggaugaga

SEQ ID NO: 1295319 - RNA, 19 nt, Artificial Sequence
  Description of Artificial Sequence: Synthetic oligonucleotide
gugguagcgggcggcaucu

SEQ ID NO: 1295320 - RNA, 19 nt, Artificial Sequence
  Description of Artificial Sequence: Synthetic oligonucleotide
gcuccgcuugguccuggcc

SEQ ID NO: 1295321 - RNA, 19 nt, Artificial Sequence
  Description of Artificial Sequence: Synthetic oligonucleotide
cguuccgcucgcucgugcc

SEQ ID NO: 1295322 - RNA, 19 nt, Artificial Sequence
  Description of Artificial Sequence: Synthetic oligonucleotide
cacucgaaacccugagcau

SEQ ID NO: 1295323 - RNA, 19 nt, Artificial Sequence
  Description of Artificial Sequence: Synthetic oligonucleotide
cacgagcugcucguccuca

SEQ ID NO: 1295324 - RNA, 19 nt, Artificial Sequence
  Description of Artificial Sequence: Synthetic oligonucleotide
gccauggcucagcguuccg

SEQ ID NO: 1295325 - RNA, 19 nt, Artificial Sequence
  Description of Artificial Sequence: Synthetic oligonucleotide
ggacccgugagggcagcug

SEQ ID NO: 1295326 - RNA, 19 nt, Artificial Sequence
  Description of Artificial Sequence: Synthetic oligonucleotide
agcguuccgcucgcucgug

SEQ ID NO: 1295327 - RNA, 19 nt, Artificial Sequence
  Description of Artificial Sequence: Synthetic oligonucleotide
gcucguguggcugcauaca

SEQ ID NO: 1295328 - RNA, 19 nt, Artificial Sequence
  Description of Artificial Sequence: Synthetic oligonucleotide
cagcacggucguaguccug

SEQ ID NO: 1295329 - RNA, 19 nt, Artificial Sequence
  Description of Artificial Sequence: Synthetic oligonucleotide
guaccccggcauggaguag

SEQ ID NO: 1295330 - RNA, 19 nt, Artificial Sequence
  Description of Artificial Sequence: Synthetic oligonucleotide
ccuggcccggcucgacucg

SEQ ID NO: 1295331 - RNA, 19 nt, Artificial Sequence
  Description of Artificial Sequence: Synthetic oligonucleotide
acugucccgaagagcucau

SEQ ID NO: 1295332 - RNA, 19 nt, Artificial Sequence
  Description of Artificial Sequence: Synthetic oligonucleotide
ggguaugcuuauacaggaa

SEQ ID NO: 1295333 - RNA, 19 nt, Artificial Sequence
  Description of Artificial Sequence: Synthetic oligonucleotide
caacuuugaugagucggau

SEQ ID NO: 1295334 - RNA, 19 nt, Artificial Sequence
  Description of Artificial Sequence: Synthetic oligonucleotide
gccaaccauccccacccuc

SEQ ID NO: 1295335 - RNA, 19 nt, Artificial Sequence
  Description of Artificial Sequence: Synthetic oligonucleotide
caaggagaggucguccuuu

SEQ ID NO: 1295336 - RNA, 19 nt, Artificial Sequence
  Description of Artificial Sequence: Synthetic oligonucleotide
ccugagcauucugcgaguc

SEQ ID NO: 1295337 - RNA, 19 nt, Artificial Sequence
  Description of Artificial Sequence: Synthetic oligonucleotide
cagccgcacaggugaauua

SEQ ID NO: 1295338 - RNA, 19 nt, Artificial Sequence
  Description of Artificial Sequence: Synthetic oligonucleotide
ggagucgaggaggcggcuc

SEQ ID NO: 1295339 - RNA, 19 nt, Artificial Sequence
  Description of Artificial Sequence: Synthetic oligonucleotide
cuggacugagcggggucca

SEQ ID NO: 1295340 - RNA, 19 nt, Artificial Sequence
  Description of Artificial Sequence: Synthetic oligonucleotide
gcucgugccgucggagcgc

SEQ ID NO: 1295341 - RNA, 19 nt, Artificial Sequence
  Description of Artificial Sequence: Synthetic oligonucleotide
agcgcuccgcuugguccug

SEQ ID NO: 1295342 - RNA, 19 nt, Artificial Sequence
  Description of Artificial Sequence: Synthetic oligonucleotide
gcguuccgcucgcucgugc

SEQ ID NO: 1295343 - RNA, 19 nt, Artificial Sequence
  Description of Artificial Sequence: Synthetic oligonucleotide
caaggcggaagaggaggua

SEQ ID NO: 1295344 - RNA, 19 nt, Artificial Sequence
  Description of Artificial Sequence: Synthetic oligonucleotide
cguagaggaacucggcugu

SEQ ID NO: 1295345 - RNA, 19 nt, Artificial Sequence
  Description of Artificial Sequence: Synthetic oligonucleotide
caggagagauagggcggca

SEQ ID NO: 1295346 - RNA, 19 nt, Artificial Sequence
  Description of Artificial Sequence: Synthetic oligonucleotide
ucggagcgcuccgcuuggu

SEQ ID NO: 1295347 - RNA, 19 nt, Artificial Sequence
  Description of Artificial Sequence: Synthetic oligonucleotide
cgaaaguagcaaauguguu

SEQ ID NO: 1295348 - RNA, 19 nt, Artificial Sequence
  Description of Artificial Sequence: Synthetic oligonucleotide
cgcuuauggccccgcuugc

SEQ ID NO: 1295349 - RNA, 19 nt, Artificial Sequence
  Description of Artificial Sequence: Synthetic oligonucleotide
ccucaucguagaggaacuc

SEQ ID NO: 1295350 - RNA, 19 nt, Artificial Sequence
  Description of Artificial Sequence: Synthetic oligonucleotide
ggagccagcccgggccuug

SEQ ID NO: 1295351 - RNA, 19 nt, Artificial Sequence
  Description of Artificial Sequence: Synthetic oligonucleotide
cuucuggacugagcggggu

SEQ ID NO: 1295352 - RNA, 19 nt, Artificial Sequence
  Description of Artificial Sequence: Synthetic oligonucleotide
ccggcauggaguagaugaa

SEQ ID NO: 1295353 - RNA, 19 nt, Artificial Sequence
  Description of Artificial Sequence: Synthetic oligonucleotide
cagcguuccgcucgcucgu

SEQ ID NO: 1295354 - RNA, 19 nt, Artificial Sequence
  Description of Artificial Sequence: Synthetic oligonucleotide
cuggugcgccauggcucag

SEQ ID NO: 1295355 - RNA, 19 nt, Artificial Sequence
  Description of Artificial Sequence: Synthetic oligonucleotide
cccugaagggucuggugcu

SEQ ID NO: 1295356 - RNA, 19 nt, Artificial Sequence
  Description of Artificial Sequence: Synthetic oligonucleotide
gggcggcaacccugaaguc

SEQ ID NO: 1295357 - RNA, 19 nt, Artificial Sequence
  Description of Artificial Sequence: Synthetic oligonucleotide
accccggcauggaguagau

SEQ ID NO: 1295358 - RNA, 19 nt, Artificial Sequence
  Description of Artificial Sequence: Synthetic oligonucleotide
cucggcucgccuggaccca

SEQ ID NO: 1295359 - RNA, 19 nt, Artificial Sequence
  Description of Artificial Sequence: Synthetic oligonucleotide
gccggucuggugcgccaug

SEQ ID NO: 1295360 - RNA, 19 nt, Artificial Sequence
  Description of Artificial Sequence: Synthetic oligonucleotide
cacccucauggguaugcuu

SEQ ID NO: 1295361 - RNA, 19 nt, Artificial Sequence
  Description of Artificial Sequence: Synthetic oligonucleotide
cugugacaucuggccccug

SEQ ID NO: 1295362 - RNA, 19 nt, Artificial Sequence
  Description of Artificial Sequence: Synthetic oligonucleotide
ggaugccggucuggugcgc

SEQ ID NO: 1295363 - RNA, 19 nt, Artificial Sequence
  Description of Artificial Sequence: Synthetic oligonucleotide
ccggaggauguggcggcag

SEQ ID NO: 1295364 - RNA, 19 nt, Artificial Sequence
  Description of Artificial Sequence: Synthetic oligonucleotide
cugguccaauggcccucga

SEQ ID NO: 1295365 - RNA, 19 nt, Artificial Sequence
  Description of Artificial Sequence: Synthetic oligonucleotide
gcgccgagcuucgcgcagc

SEQ ID NO: 1295366 - RNA, 19 nt, Artificial Sequence
  Description of Artificial Sequence: Synthetic oligonucleotide
cguccuuuacugucccgaa

SEQ ID NO: 1295367 - RNA, 19 nt, Artificial Sequence
  Description of Artificial Sequence: Synthetic oligonucleotide
ucgugccgucggagcgcuc

SEQ ID NO: 1295368 - RNA, 19 nt, Artificial Sequence
  Description of Artificial Sequence: Synthetic oligonucleotide
cuggucccagcgucccacu

SEQ ID NO: 1295369 - RNA, 19 nt, Artificial Sequence
  Description of Artificial Sequence: Synthetic oligonucleotide
gcucgcucgugccgucgga

SEQ ID NO: 1295370 - RNA, 19 nt, Artificial Sequence
  Description of Artificial Sequence: Synthetic oligonucleotide
ggcgcuuauggccccgcuu

SEQ ID NO: 1295371 - RNA, 19 nt, Artificial Sequence
  Description of Artificial Sequence: Synthetic oligonucleotide
gcccucgaaaguagcaaau

SEQ ID NO: 1295372 - RNA, 19 nt, Artificial Sequence
  Description of Artificial Sequence: Synthetic oligonucleotide
cucgugccgucggagcgcu

SEQ ID NO: 1295373 - RNA, 19 nt, Artificial Sequence
  Description of Artificial Sequence: Synthetic oligonucleotide
ccacgggaagcaaugccuu

SEQ ID NO: 1295374 - RNA, 19 nt, Artificial Sequence
  Description of Artificial Sequence: Synthetic oligonucleotide
gcgaggcacccagcacgag

SEQ ID NO: 1295375 - RNA, 19 nt, Artificial Sequence
  Description of Artificial Sequence: Synthetic oligonucleotide
gugcgccauggcucagcgu

SEQ ID NO: 1295376 - RNA, 19 nt, Artificial Sequence
  Description of Artificial Sequence: Synthetic oligonucleotide
gccgucggagcgcuccgcu

SEQ ID NO: 1295377 - RNA, 19 nt, Artificial Sequence
  Description of Artificial Sequence: Synthetic oligonucleotide
cggagcgcuccgcuugguc

SEQ ID NO: 1295378 - RNA, 19 nt, Artificial Sequence
  Description of Artificial Sequence: Synthetic oligonucleotide
cccucauggguaugcuuau

SEQ ID NO: 1295379 - RNA, 19 nt, Artificial Sequence
  Description of Artificial Sequence: Synthetic oligonucleotide
gcacggucguaguccuggu

SEQ ID NO: 1295380 - RNA, 19 nt, Artificial Sequence
  Description of Artificial Sequence: Synthetic oligonucleotide
cccugagcauucugcgagu

SEQ ID NO: 1295381 - RNA, 19 nt, Artificial Sequence
  Description of Artificial Sequence: Synthetic oligonucleotide
ccgcuugguccuggcccgg

SEQ ID NO: 1295382 - RNA, 19 nt, Artificial Sequence
  Description of Artificial Sequence: Synthetic oligonucleotide
ccucauggguaugcuuaua

SEQ ID NO: 1295383 - RNA, 19 nt, Artificial Sequence
  Description of Artificial Sequence: Synthetic oligonucleotide
cgcuugguccuggcccggc

SEQ ID NO: 1295384 - RNA, 19 nt, Artificial Sequence
  Description of Artificial Sequence: Synthetic oligonucleotide
ccggcucgacucggcucgc

SEQ ID NO: 1295385 - RNA, 19 nt, Artificial Sequence
  Description of Artificial Sequence: Synthetic oligonucleotide
gcgugcugcuugggaugca

SEQ ID NO: 1295386 - RNA, 19 nt, Artificial Sequence
  Description of Artificial Sequence: Synthetic oligonucleotide
ccccggaugaggcgcuuau

SEQ ID NO: 1295387 - RNA, 19 nt, Artificial Sequence
  Description of Artificial Sequence: Synthetic oligonucleotide
cggcucgacucggcucgcc

SEQ ID NO: 1295388 - RNA, 19 nt, Artificial Sequence
  Description of Artificial Sequence: Synthetic oligonucleotide
cccacccucuguggccaaa

SEQ ID NO: 1295389 - RNA, 19 nt, Artificial Sequence
  Description of Artificial Sequence: Synthetic oligonucleotide
ccgucggagcgcuccgcuu

SEQ ID NO: 1295390 - RNA, 19 nt, Artificial Sequence
  Description of Artificial Sequence: Synthetic oligonucleotide
ccccacccucuguggccaa

SEQ ID NO: 1295391 - RNA, 19 nt, Artificial Sequence
  Description of Artificial Sequence: Synthetic oligonucleotide
cggcagcgccgagcuucgc

SEQ ID NO: 1295392 - RNA, 19 nt, Artificial Sequence
  Description of Artificial Sequence: Synthetic oligonucleotide
cggagucgaggaggcggcu

SEQ ID NO: 1295393 - RNA, 19 nt, Artificial Sequence
  Description of Artificial Sequence: Synthetic oligonucleotide
ggccccggaugaggcgcuu

SEQ ID NO: 1295394 - RNA, 19 nt, Artificial Sequence
  Description of Artificial Sequence: Synthetic oligonucleotide
auaagauagugccuggacc

SEQ ID NO: 1295395 - RNA, 19 nt, Artificial Sequence
  Description of Artificial Sequence: Synthetic oligonucleotide
guugcagagaacuugcccg

SEQ ID NO: 1295396 - RNA, 19 nt, Artificial Sequence
  Description of Artificial Sequence: Synthetic oligonucleotide
aacaaggagggccaguguc

SEQ ID NO: 1295397 - RNA, 19 nt, Artificial Sequence
  Description of Artificial Sequence: Synthetic oligonucleotide
acuucaauagggguggucc

SEQ ID NO: 1295398 - RNA, 19 nt, Artificial Sequence
  Description of Artificial Sequence: Synthetic oligonucleotide
auacuagacugauaaauag

SEQ ID NO: 1295399 - RNA, 19 nt, Artificial Sequence
  Description of Artificial Sequence: Synthetic oligonucleotide
aacugaacccagcccaggc

SEQ ID NO: 1295400 - RNA, 19 nt, Artificial Sequence
  Description of Artificial Sequence: Synthetic oligonucleotide
uaagauagugccuggaccu

SEQ ID NO: 1295401 - RNA, 19 nt, Artificial Sequence
  Description of Artificial Sequence: Synthetic oligonucleotide
guaacaacuguaaugauca

SEQ ID NO: 1295402 - RNA, 19 nt, Artificial Sequence
  Description of Artificial Sequence: Synthetic oligonucleotide
agcucaagaaucugcuugc

SEQ ID NO: 1295403 - RNA, 19 nt, Artificial Sequence
  Description of Artificial Sequence: Synthetic oligonucleotide
uacacuucaauaggggugg

SEQ ID NO: 1295404 - RNA, 19 nt, Artificial Sequence
  Description of Artificial Sequence: Synthetic oligonucleotide
uauaagauagugccuggac

SEQ ID NO: 1295405 - RNA, 19 nt, Artificial Sequence
  Description of Artificial Sequence: Synthetic oligonucleotide
cuagucgugcaaaaguugc

SEQ ID NO: 1295406 - RNA, 19 nt, Artificial Sequence
  Description of Artificial Sequence: Synthetic oligonucleotide
cuccccgucuguaagaucg

SEQ ID NO: 1295407 - RNA, 19 nt, Artificial Sequence
  Description of Artificial Sequence: Synthetic oligonucleotide
ucuauaagauagugccugg

SEQ ID NO: 1295408 - RNA, 19 nt, Artificial Sequence
  Description of Artificial Sequence: Synthetic oligonucleotide
agaggucuggacauaaagc

SEQ ID NO: 1295409 - RNA, 19 nt, Artificial Sequence
  Description of Artificial Sequence: Synthetic oligonucleotide
agaaccccggucuuugagc

SEQ ID NO: 1295410 - RNA, 19 nt, Artificial Sequence
  Description of Artificial Sequence: Synthetic oligonucleotide
ggagauacacuucaauagg

SEQ ID NO: 1295411 - RNA, 19 nt, Artificial Sequence
  Description of Artificial Sequence: Synthetic oligonucleotide
uacuagacugauaaauagu

SEQ ID NO: 1295412 - RNA, 19 nt, Artificial Sequence
  Description of Artificial Sequence: Synthetic oligonucleotide
gggagauacacuucaauag

SEQ ID NO: 1295413 - RNA, 19 nt, Artificial Sequence
  Description of Artificial Sequence: Synthetic oligonucleotide
auaaagcuggaauucauua

SEQ ID NO: 1295414 - RNA, 19 nt, Artificial Sequence
  Description of Artificial Sequence: Synthetic oligonucleotide
ugaggcuagaugaggaaga

SEQ ID NO: 1295415 - RNA, 19 nt, Artificial Sequence
  Description of Artificial Sequence: Synthetic oligonucleotide
ucagguguggacuggacgu

SEQ ID NO: 1295416 - RNA, 19 nt, Artificial Sequence
  Description of Artificial Sequence: Synthetic oligonucleotide
auauccagccucccauugc

SEQ ID NO: 1295417 - RNA, 19 nt, Artificial Sequence
  Description of Artificial Sequence: Synthetic oligonucleotide
gucuauaagauagugccug

SEQ ID NO: 1295418 - RNA, 19 nt, Artificial Sequence
  Description of Artificial Sequence: Synthetic oligonucleotide
ugaaugucaggguccagug

SEQ ID NO: 1295419 - RNA, 19 nt, Artificial Sequence
  Description of Artificial Sequence: Synthetic oligonucleotide
uggacauaaagcuggaauu

SEQ ID NO: 1295420 - RNA, 19 nt, Artificial Sequence
  Description of Artificial Sequence: Synthetic oligonucleotide
aguacagacaggagguccc

SEQ ID NO: 1295421 - RNA, 19 nt, Artificial Sequence
  Description of Artificial Sequence: Synthetic oligonucleotide
uguggcauccacaguaccu

SEQ ID NO: 1295422 - RNA, 19 nt, Artificial Sequence
  Description of Artificial Sequence: Synthetic oligonucleotide
agccccaacaaggagggcc

SEQ ID NO: 1295423 - RNA, 19 nt, Artificial Sequence
  Description of Artificial Sequence: Synthetic oligonucleotide
ucauucauguggcauccac

SEQ ID NO: 1295424 - RNA, 19 nt, Artificial Sequence
  Description of Artificial Sequence: Synthetic oligonucleotide
accggaauguuccuucuag

SEQ ID NO: 1295425 - RNA, 19 nt, Artificial Sequence
  Description of Artificial Sequence: Synthetic oligonucleotide
cacuggaauguccugcucg

SEQ ID NO: 1295426 - RNA, 19 nt, Artificial Sequence
  Description of Artificial Sequence: Synthetic oligonucleotide
agaucuaacuucaggacug

SEQ ID NO: 1295427 - RNA, 19 nt, Artificial Sequence
  Description of Artificial Sequence: Synthetic oligonucleotide
uggggcuaggcucagcccc

SEQ ID NO: 1295428 - RNA, 19 nt, Artificial Sequence
  Description of Artificial Sequence: Synthetic oligonucleotide
gaacuugacugggagauac

SEQ ID NO: 1295429 - RNA, 19 nt, Artificial Sequence
  Description of Artificial Sequence: Synthetic oligonucleotide
agacucuugaccucagacu

SEQ ID NO: 1295430 - RNA, 19 nt, Artificial Sequence
  Description of Artificial Sequence: Synthetic oligonucleotide
augcuugccucauucaugu

SEQ ID NO: 1295431 - RNA, 19 nt, Artificial Sequence
  Description of Artificial Sequence: Synthetic oligonucleotide
aggcagaccggaauguucc

SEQ ID NO: 1295432 - RNA, 19 nt, Artificial Sequence
  Description of Artificial Sequence: Synthetic oligonucleotide
gaaccccggucuuugagcc

SEQ ID NO: 1295433 - RNA, 19 nt, Artificial Sequence
  Description of Artificial Sequence: Synthetic oligonucleotide
uguaagaucgagugcucuc

SEQ ID NO: 1295434 - RNA, 19 nt, Artificial Sequence
  Description of Artificial Sequence: Synthetic oligonucleotide
ggcuguaacaacuguaaug

SEQ ID NO: 1295435 - RNA, 19 nt, Artificial Sequence
  Description of Artificial Sequence: Synthetic oligonucleotide
aauagggguggucccagau

SEQ ID NO: 1295436 - RNA, 19 nt, Artificial Sequence
  Description of Artificial Sequence: Synthetic oligonucleotide
uguccuaccccugagccca

SEQ ID NO: 1295437 - RNA, 19 nt, Artificial Sequence
  Description of Artificial Sequence: Synthetic oligonucleotide
ccuuccgugaggcagaccg

SEQ ID NO: 1295438 - RNA, 19 nt, Artificial Sequence
  Description of Artificial Sequence: Synthetic oligonucleotide
ugagccgucuccuuccgug

SEQ ID NO: 1295439 - RNA, 19 nt, Artificial Sequence
  Description of Artificial Sequence: Synthetic oligonucleotide
ggucuggacauaaagcugg

SEQ ID NO: 1295440 - RNA, 19 nt, Artificial Sequence
  Description of Artificial Sequence: Synthetic oligonucleotide
uccaacuaggcuguaacaa

SEQ ID NO: 1295441 - RNA, 19 nt, Artificial Sequence
  Description of Artificial Sequence: Synthetic oligonucleotide
gauacacuucaauaggggu

SEQ ID NO: 1295442 - RNA, 19 nt, Artificial Sequence
  Description of Artificial Sequence: Synthetic oligonucleotide
uggugaggcuagaugagga

SEQ ID NO: 1295443 - RNA, 19 nt, Artificial Sequence
  Description of Artificial Sequence: Synthetic oligonucleotide
aaauagucuauaagauagu

SEQ ID NO: 1295444 - RNA, 19 nt, Artificial Sequence
  Description of Artificial Sequence: Synthetic oligonucleotide
cucagguguggacuggacg

SEQ ID NO: 1295445 - RNA, 19 nt, Artificial Sequence
  Description of Artificial Sequence: Synthetic oligonucleotide
aaggauugagggcugugua

SEQ ID NO: 1295446 - RNA, 19 nt, Artificial Sequence
  Description of Artificial Sequence: Synthetic oligonucleotide
ugggaugcuugccucauuc

SEQ ID NO: 1295447 - RNA, 19 nt, Artificial Sequence
  Description of Artificial Sequence: Synthetic oligonucleotide
agcaaggagcuagucgugc

SEQ ID NO: 1295448 - RNA, 19 nt, Artificial Sequence
  Description of Artificial Sequence: Synthetic oligonucleotide
ggucugauaaggauugagg

SEQ ID NO: 1295449 - RNA, 19 nt, Artificial Sequence
  Description of Artificial Sequence: Synthetic oligonucleotide
ucacugaacguggagcuca

SEQ ID NO: 1295450 - RNA, 19 nt, Artificial Sequence
  Description of Artificial Sequence: Synthetic oligonucleotide
uggucugauaaggauugag

SEQ ID NO: 1295451 - RNA, 19 nt, Artificial Sequence
  Description of Artificial Sequence: Synthetic oligonucleotide
cuucaauaggggugguccc

SEQ ID NO: 1295452 - RNA, 19 nt, Artificial Sequence
  Description of Artificial Sequence: Synthetic oligonucleotide
ugauaaggauugagggcug

SEQ ID NO: 1295453 - RNA, 19 nt, Artificial Sequence
  Description of Artificial Sequence: Synthetic oligonucleotide
uaagaucgagugcucucug

SEQ ID NO: 1295454 - RNA, 19 nt, Artificial Sequence
  Description of Artificial Sequence: Synthetic oligonucleotide
agucgugcaaaaguugcag

SEQ ID NO: 1295455 - RNA, 19 nt, Artificial Sequence
  Description of Artificial Sequence: Synthetic oligonucleotide
uggucccgggacaauaaug

SEQ ID NO: 1295456 - RNA, 19 nt, Artificial Sequence
  Description of Artificial Sequence: Synthetic oligonucleotide
caagucaguucuugagacc

SEQ ID NO: 1295457 - RNA, 19 nt, Artificial Sequence
  Description of Artificial Sequence: Synthetic oligonucleotide
accgucuuggcauccaagu

SEQ ID NO: 1295458 - RNA, 19 nt, Artificial Sequence
  Description of Artificial Sequence: Synthetic oligonucleotide
ucccgggacaauaaugguc

SEQ ID NO: 1295459 - RNA, 19 nt, Artificial Sequence
  Description of Artificial Sequence: Synthetic oligonucleotide
ggucccgggacaauaaugg

SEQ ID NO: 1295460 - RNA, 19 nt, Artificial Sequence
  Description of Artificial Sequence: Synthetic oligonucleotide
uaaggauugagggcugugu

SEQ ID NO: 1295461 - RNA, 19 nt, Artificial Sequence
  Description of Artificial Sequence: Synthetic oligonucleotide
uagucgugcaaaaguugca

SEQ ID NO: 1295462 - RNA, 19 nt, Artificial Sequence
  Description of Artificial Sequence: Synthetic oligonucleotide
caguccuggucugauaagg

SEQ ID NO: 1295463 - RNA, 19 nt, Artificial Sequence
  Description of Artificial Sequence: Synthetic oligonucleotide
aggaaaauacuagacugau

SEQ ID NO: 1295464 - RNA, 19 nt, Artificial Sequence
  Description of Artificial Sequence: Synthetic oligonucleotide
ugcggauagcuguccacag

SEQ ID NO: 1295465 - RNA, 19 nt, Artificial Sequence
  Description of Artificial Sequence: Synthetic oligonucleotide
ugagagguggcuggucccg

SEQ ID NO: 1295466 - RNA, 19 nt, Artificial Sequence
  Description of Artificial Sequence: Synthetic oligonucleotide
uguugcggauagcugucca

SEQ ID NO: 1295467 - RNA, 19 nt, Artificial Sequence
  Description of Artificial Sequence: Synthetic oligonucleotide
cuguguaacugaacccagc

SEQ ID NO: 1295468 - RNA, 19 nt, Artificial Sequence
  Description of Artificial Sequence: Synthetic oligonucleotide
ucaauagggguggucccag

SEQ ID NO: 1295469 - RNA, 19 nt, Artificial Sequence
  Description of Artificial Sequence: Synthetic oligonucleotide
guaccuagcagaggucugg

SEQ ID NO: 1295470 - RNA, 19 nt, Artificial Sequence
  Description of Artificial Sequence: Synthetic oligonucleotide
aggacaguacuuucuuccu

SEQ ID NO: 1295471 - RNA, 19 nt, Artificial Sequence
  Description of Artificial Sequence: Synthetic oligonucleotide
ucuguaagaucgagugcuc

SEQ ID NO: 1295472 - RNA, 19 nt, Artificial Sequence
  Description of Artificial Sequence: Synthetic oligonucleotide
uucaauaggggugguccca

SEQ ID NO: 1295473 - RNA, 19 nt, Artificial Sequence
  Description of Artificial Sequence: Synthetic oligonucleotide
cauguggcauccacaguac

SEQ ID NO: 1295474 - RNA, 19 nt, Artificial Sequence
  Description of Artificial Sequence: Synthetic oligonucleotide
cugauaaggauugagggcu

SEQ ID NO: 1295475 - RNA, 19 nt, Artificial Sequence
  Description of Artificial Sequence: Synthetic oligonucleotide
ccgucuguaagaucgagug

SEQ ID NO: 1295476 - RNA, 19 nt, Artificial Sequence
  Description of Artificial Sequence: Synthetic oligonucleotide
ccaagucaguucuugagac

SEQ ID NO: 1295477 - RNA, 19 nt, Artificial Sequence
  Description of Artificial Sequence: Synthetic oligonucleotide
uggucccacccuuguaggg

SEQ ID NO: 1295478 - RNA, 19 nt, Artificial Sequence
  Description of Artificial Sequence: Synthetic oligonucleotide
acugaacccagcccaggca

SEQ ID NO: 1295479 - RNA, 19 nt, Artificial Sequence
  Description of Artificial Sequence: Synthetic oligonucleotide
uugcggauagcuguccaca

SEQ ID NO: 1295480 - RNA, 19 nt, Artificial Sequence
  Description of Artificial Sequence: Synthetic oligonucleotide
cauucauguggcauccaca

SEQ ID NO: 1295481 - RNA, 19 nt, Artificial Sequence
  Description of Artificial Sequence: Synthetic oligonucleotide
uuccuucuagacagaggcu

SEQ ID NO: 1295482 - RNA, 19 nt, Artificial Sequence
  Description of Artificial Sequence: Synthetic oligonucleotide
aaccccggucuuugagccg

SEQ ID NO: 1295483 - RNA, 19 nt, Artificial Sequence
  Description of Artificial Sequence: Synthetic oligonucleotide
cuggugaggcuagaugagg

SEQ ID NO: 1295484 - RNA, 19 nt, Artificial Sequence
  Description of Artificial Sequence: Synthetic oligonucleotide
gagcuagucgugcaaaagu

SEQ ID NO: 1295485 - RNA, 19 nt, Artificial Sequence
  Description of Artificial Sequence: Synthetic oligonucleotide
uccugcucgcccuggaagu

SEQ ID NO: 1295486 - RNA, 19 nt, Artificial Sequence
  Description of Artificial Sequence: Synthetic oligonucleotide
gaucuaacuucaggacugc

SEQ ID NO: 1295487 - RNA, 19 nt, Artificial Sequence
  Description of Artificial Sequence: Synthetic oligonucleotide
acaguccuggucugauaag

SEQ ID NO: 1295488 - RNA, 19 nt, Artificial Sequence
  Description of Artificial Sequence: Synthetic oligonucleotide
cuuuagggcuagguggggc

SEQ ID NO: 1295489 - RNA, 19 nt, Artificial Sequence
  Description of Artificial Sequence: Synthetic oligonucleotide
cuugcccgggagaaccccg

SEQ ID NO: 1295490 - RNA, 19 nt, Artificial Sequence
  Description of Artificial Sequence: Synthetic oligonucleotide
agacugauaaauagucuau

SEQ ID NO: 1295491 - RNA, 19 nt, Artificial Sequence
  Description of Artificial Sequence: Synthetic oligonucleotide
uuuguggcucugagaggug

SEQ ID NO: 1295492 - RNA, 19 nt, Artificial Sequence
  Description of Artificial Sequence: Synthetic oligonucleotide
ucugcagucuggcucuguu

SEQ ID NO: 1295493 - RNA, 19 nt, Artificial Sequence
  Description of Artificial Sequence: Synthetic oligonucleotide
ccucagaucuaacuucagg

SEQ ID NO: 1295494 - RNA, 19 nt, Artificial Sequence
  Description of Artificial Sequence: Synthetic oligonucleotide
uguccgaaguccugcccca

SEQ ID NO: 1295495 - RNA, 19 nt, Artificial Sequence
  Description of Artificial Sequence: Synthetic oligonucleotide
acuccgaccuccccgucug

SEQ ID NO: 1295496 - RNA, 19 nt, Artificial Sequence
  Description of Artificial Sequence: Synthetic oligonucleotide
acuugcccgggagaacccc

SEQ ID NO: 1295497 - RNA, 19 nt, Artificial Sequence
  Description of Artificial Sequence: Synthetic oligonucleotide
agauucuggccuaggucgg

SEQ ID NO: 1295498 - RNA, 19 nt, Artificial Sequence
  Description of Artificial Sequence: Synthetic oligonucleotide
aaggagcuagucgugcaaa

SEQ ID NO: 1295499 - RNA, 19 nt, Artificial Sequence
  Description of Artificial Sequence: Synthetic oligonucleotide
aggcuagaugaggaagacg

SEQ ID NO: 1295500 - RNA, 19 nt, Artificial Sequence
  Description of Artificial Sequence: Synthetic oligonucleotide
agacaggagaccaggggug

SEQ ID NO: 1295501 - RNA, 19 nt, Artificial Sequence
  Description of Artificial Sequence: Synthetic oligonucleotide
cuaggcuguaacaacugua

SEQ ID NO: 1295502 - RNA, 19 nt, Artificial Sequence
  Description of Artificial Sequence: Synthetic oligonucleotide
cuguccuaccccugagccc

SEQ ID NO: 1295503 - RNA, 19 nt, Artificial Sequence
  Description of Artificial Sequence: Synthetic oligonucleotide
ggacgguccucuuuguggc

SEQ ID NO: 1295504 - RNA, 19 nt, Artificial Sequence
  Description of Artificial Sequence: Synthetic oligonucleotide
ugacugggagauacacuuc

SEQ ID NO: 1295505 - RNA, 19 nt, Artificial Sequence
  Description of Artificial Sequence: Synthetic oligonucleotide
cuagacugauaaauagucu

SEQ ID NO: 1295506 - RNA, 19 nt, Artificial Sequence
  Description of Artificial Sequence: Synthetic oligonucleotide
aggucuggacauaaagcug

SEQ ID NO: 1295507 - RNA, 19 nt, Artificial Sequence
  Description of Artificial Sequence: Synthetic oligonucleotide
auaaggauugagggcugug

SEQ ID NO: 1295508 - RNA, 19 nt, Artificial Sequence
  Description of Artificial Sequence: Synthetic oligonucleotide
gaggcuagaugaggaagac

SEQ ID NO: 1295509 - RNA, 19 nt, Artificial Sequence
  Description of Artificial Sequence: Synthetic oligonucleotide
cauaggucuuguugauauc

SEQ ID NO: 1295510 - RNA, 19 nt, Artificial Sequence
  Description of Artificial Sequence: Synthetic oligonucleotide
gcuagguggggcuaggcuc

SEQ ID NO: 1295511 - RNA, 19 nt, Artificial Sequence
  Description of Artificial Sequence: Synthetic oligonucleotide
aggucccuguugcggauag

SEQ ID NO: 1295512 - RNA, 19 nt, Artificial Sequence
  Description of Artificial Sequence: Synthetic oligonucleotide
cagagggacugucuuccag

SEQ ID NO: 1295513 - RNA, 19 nt, Artificial Sequence
  Description of Artificial Sequence: Synthetic oligonucleotide
cuggacauaaagcuggaau

SEQ ID NO: 1295514 - RNA, 19 nt, Artificial Sequence
  Description of Artificial Sequence: Synthetic oligonucleotide
uucccaggacaguacuuuc

SEQ ID NO: 1295515 - RNA, 19 nt, Artificial Sequence
  Description of Artificial Sequence: Synthetic oligonucleotide
cuaccccugagcccagagc

SEQ ID NO: 1295516 - RNA, 19 nt, Artificial Sequence
  Description of Artificial Sequence: Synthetic oligonucleotide
caacuaggcuguaacaacu

SEQ ID NO: 1295517 - RNA, 19 nt, Artificial Sequence
  Description of Artificial Sequence: Synthetic oligonucleotide
gcgguguuuccauccaccg

SEQ ID NO: 1295518 - RNA, 19 nt, Artificial Sequence
  Description of Artificial Sequence: Synthetic oligonucleotide
agggucucucacugaacgu

SEQ ID NO: 1295519 - RNA, 19 nt, Artificial Sequence
  Description of Artificial Sequence: Synthetic oligonucleotide
ugccucauucauguggcau

SEQ ID NO: 1295520 - RNA, 19 nt, Artificial Sequence
  Description of Artificial Sequence: Synthetic oligonucleotide
agcucccaguucuguggac

SEQ ID NO: 1295521 - RNA, 19 nt, Artificial Sequence
  Description of Artificial Sequence: Synthetic oligonucleotide
cacccuuguagggagaaca

SEQ ID NO: 1295522 - RNA, 19 nt, Artificial Sequence
  Description of Artificial Sequence: Synthetic oligonucleotide
agcuagucgugcaaaaguu

SEQ ID NO: 1295523 - RNA, 19 nt, Artificial Sequence
  Description of Artificial Sequence: Synthetic oligonucleotide
aggcuguaacaacuguaau

SEQ ID NO: 1295524 - RNA, 19 nt, Artificial Sequence
  Description of Artificial Sequence: Synthetic oligonucleotide
gaggcagaccggaauguuc

SEQ ID NO: 1295525 - RNA, 19 nt, Artificial Sequence
  Description of Artificial Sequence: Synthetic oligonucleotide
agaacaguccuggucugau

SEQ ID NO: 1295526 - RNA, 19 nt, Artificial Sequence
  Description of Artificial Sequence: Synthetic oligonucleotide
ggagcuagucgugcaaaag

SEQ ID NO: 1295527 - RNA, 19 nt, Artificial Sequence
  Description of Artificial Sequence: Synthetic oligonucleotide
aggagcuagucgugcaaaa

SEQ ID NO: 1295528 - RNA, 19 nt, Artificial Sequence
  Description of Artificial Sequence: Synthetic oligonucleotide
agagcgaucuccacuggaa

SEQ ID NO: 1295529 - RNA, 19 nt, Artificial Sequence
  Description of Artificial Sequence: Synthetic oligonucleotide
ccuccaacuaggcuguaac

SEQ ID NO: 1295530 - RNA, 19 nt, Artificial Sequence
  Description of Artificial Sequence: Synthetic oligonucleotide
ugcagcgcgguguuuccau

SEQ ID NO: 1295531 - RNA, 19 nt, Artificial Sequence
  Description of Artificial Sequence: Synthetic oligonucleotide
cucccaguucuguggacuc

SEQ ID NO: 1295532 - RNA, 19 nt, Artificial Sequence
  Description of Artificial Sequence: Synthetic oligonucleotide
gcuagucgugcaaaaguug

SEQ ID NO: 1295533 - RNA, 19 nt, Artificial Sequence
  Description of Artificial Sequence: Synthetic oligonucleotide
acccuuguagggagaacag

SEQ ID NO: 1295534 - RNA, 19 nt, Artificial Sequence
  Description of Artificial Sequence: Synthetic oligonucleotide
uaggucgggaggugccuga

SEQ ID NO: 1295535 - RNA, 19 nt, Artificial Sequence
  Description of Artificial Sequence: Synthetic oligonucleotide
guaagaucgagugcucucu

SEQ ID NO: 1295536 - RNA, 19 nt, Artificial Sequence
  Description of Artificial Sequence: Synthetic oligonucleotide
ugaggcaguccagcuggcc

SEQ ID NO: 1295537 - RNA, 19 nt, Artificial Sequence
  Description of Artificial Sequence: Synthetic oligonucleotide
ucgggaggugccugauggc

SEQ ID NO: 1295538 - RNA, 19 nt, Artificial Sequence
  Description of Artificial Sequence: Synthetic oligonucleotide
ucuggacauaaagcuggaa

SEQ ID NO: 1295539 - RNA, 19 nt, Artificial Sequence
  Description of Artificial Sequence: Synthetic oligonucleotide
ggaccugaaugauggccag

SEQ ID NO: 1295540 - RNA, 19 nt, Artificial Sequence
  Description of Artificial Sequence: Synthetic oligonucleotide
aguccuggucugauaagga

SEQ ID NO: 1295541 - RNA, 19 nt, Artificial Sequence
  Description of Artificial Sequence: Synthetic oligonucleotide
cuggcgacucugauggcca

SEQ ID NO: 1295542 - RNA, 19 nt, Artificial Sequence
  Description of Artificial Sequence: Synthetic oligonucleotide
gacucaagucccagcucug

SEQ ID NO: 1295543 - RNA, 19 nt, Artificial Sequence
  Description of Artificial Sequence: Synthetic oligonucleotide
caucugugggaugcuugcc

SEQ ID NO: 1295544 - RNA, 19 nt, Artificial Sequence
  Description of Artificial Sequence: Synthetic oligonucleotide
uggacugcuuggguucucu

SEQ ID NO: 1295545 - RNA, 19 nt, Artificial Sequence
  Description of Artificial Sequence: Synthetic oligonucleotide
uuccauccaccgucuuggc

SEQ ID NO: 1295546 - RNA, 19 nt, Artificial Sequence
  Description of Artificial Sequence: Synthetic oligonucleotide
agcguggucccacccuugu

SEQ ID NO: 1295547 - RNA, 19 nt, Artificial Sequence
  Description of Artificial Sequence: Synthetic oligonucleotide
ugugggaugcuugccucau

SEQ ID NO: 1295548 - RNA, 19 nt, Artificial Sequence
  Description of Artificial Sequence: Synthetic oligonucleotide
ucccagauucuggccuagg

SEQ ID NO: 1295549 - RNA, 19 nt, Artificial Sequence
  Description of Artificial Sequence: Synthetic oligonucleotide
ggacucaagucccagcucu

SEQ ID NO: 1295550 - RNA, 19 nt, Artificial Sequence
  Description of Artificial Sequence: Synthetic oligonucleotide
ggugccugcccaucaggcc

SEQ ID NO: 1295551 - RNA, 19 nt, Artificial Sequence
  Description of Artificial Sequence: Synthetic oligonucleotide
uugccucauucauguggca

SEQ ID NO: 1295552 - RNA, 19 nt, Artificial Sequence
  Description of Artificial Sequence: Synthetic oligonucleotide
caagugcagggcaagcucu

SEQ ID NO: 1295553 - RNA, 19 nt, Artificial Sequence
  Description of Artificial Sequence: Synthetic oligonucleotide
agggacugucuuccagacu

SEQ ID NO: 1295554 - RNA, 19 nt, Artificial Sequence
  Description of Artificial Sequence: Synthetic oligonucleotide
ggacaguacuuucuuccuc

SEQ ID NO: 1295555 - RNA, 19 nt, Artificial Sequence
  Description of Artificial Sequence: Synthetic oligonucleotide
acguggagcucaagaaucu

SEQ ID NO: 1295556 - RNA, 19 nt, Artificial Sequence
  Description of Artificial Sequence: Synthetic oligonucleotide
auccaccgucuuggcaucc

SEQ ID NO: 1295557 - RNA, 19 nt, Artificial Sequence
  Description of Artificial Sequence: Synthetic oligonucleotide
cguggucccacccuuguag

SEQ ID NO: 1295558 - RNA, 19 nt, Artificial Sequence
  Description of Artificial Sequence: Synthetic oligonucleotide
uccccgucuguaagaucga

SEQ ID NO: 1295559 - RNA, 19 nt, Artificial Sequence
  Description of Artificial Sequence: Synthetic oligonucleotide
ccucauucauguggcaucc

SEQ ID NO: 1295560 - RNA, 19 nt, Artificial Sequence
  Description of Artificial Sequence: Synthetic oligonucleotide
gugucagagcgaucuccac

SEQ ID NO: 1295561 - RNA, 19 nt, Artificial Sequence
  Description of Artificial Sequence: Synthetic oligonucleotide
ugcuugccucauucaugug

SEQ ID NO: 1295562 - RNA, 19 nt, Artificial Sequence
  Description of Artificial Sequence: Synthetic oligonucleotide
cuguggacucaagucccag

SEQ ID NO: 1295563 - RNA, 19 nt, Artificial Sequence
  Description of Artificial Sequence: Synthetic oligonucleotide
uugagccgucuccuuccgu

SEQ ID NO: 1295564 - RNA, 19 nt, Artificial Sequence
  Description of Artificial Sequence: Synthetic oligonucleotide
cuggaauguccugcucgcc

SEQ ID NO: 1295565 - RNA, 19 nt, Artificial Sequence
  Description of Artificial Sequence: Synthetic oligonucleotide
cugccccauuggcaaaggc

SEQ ID NO: 1295566 - RNA, 19 nt, Artificial Sequence
  Description of Artificial Sequence: Synthetic oligonucleotide
acgcuggacugcuuggguu

SEQ ID NO: 1295567 - RNA, 19 nt, Artificial Sequence
  Description of Artificial Sequence: Synthetic oligonucleotide
gauagugccuggaccugaa

SEQ ID NO: 1295568 - RNA, 19 nt, Artificial Sequence
  Description of Artificial Sequence: Synthetic oligonucleotide
guggggcuaggcucagccc

SEQ ID NO: 1295569 - RNA, 19 nt, Artificial Sequence
  Description of Artificial Sequence: Synthetic oligonucleotide
cagugcagcgcgguguuuc

SEQ ID NO: 1295570 - RNA, 19 nt, Artificial Sequence
  Description of Artificial Sequence: Synthetic oligonucleotide
cuguugcggauagcugucc

SEQ ID NO: 1295571 - RNA, 19 nt, Artificial Sequence
  Description of Artificial Sequence: Synthetic oligonucleotide
gagaacaguccuggucuga

SEQ ID NO: 1295572 - RNA, 19 nt, Artificial Sequence
  Description of Artificial Sequence: Synthetic oligonucleotide
caggagacucuugaccuca

SEQ ID NO: 1295573 - RNA, 19 nt, Artificial Sequence
  Description of Artificial Sequence: Synthetic oligonucleotide
ugaggcagaccggaauguu

SEQ ID NO: 1295574 - RNA, 19 nt, Artificial Sequence
  Description of Artificial Sequence: Synthetic oligonucleotide
gcuggcgacucugauggcc

SEQ ID NO: 1295575 - RNA, 19 nt, Artificial Sequence
  Description of Artificial Sequence: Synthetic oligonucleotide
caaggagcuagucgugcaa

SEQ ID NO: 1295576 - RNA, 19 nt, Artificial Sequence
  Description of Artificial Sequence: Synthetic oligonucleotide
accccggucuuugagccgu

SEQ ID NO: 1295577 - RNA, 19 nt, Artificial Sequence
  Description of Artificial Sequence: Synthetic oligonucleotide
uccgaaguccugccccauu

SEQ ID NO: 1295578 - RNA, 19 nt, Artificial Sequence
  Description of Artificial Sequence: Synthetic oligonucleotide
cuaggucgggaggugccug

SEQ ID NO: 1295579 - RNA, 19 nt, Artificial Sequence
  Description of Artificial Sequence: Synthetic oligonucleotide
ggugucagagcgaucucca

SEQ ID NO: 1295580 - RNA, 19 nt, Artificial Sequence
  Description of Artificial Sequence: Synthetic oligonucleotide
gagguggcuggucccggga

SEQ ID NO: 1295581 - RNA, 19 nt, Artificial Sequence
  Description of Artificial Sequence: Synthetic oligonucleotide
cucacugaacguggagcuc

SEQ ID NO: 1295582 - RNA, 19 nt, Artificial Sequence
  Description of Artificial Sequence: Synthetic oligonucleotide
uccaccgucuuggcaucca

SEQ ID NO: 1295583 - RNA, 19 nt, Artificial Sequence
  Description of Artificial Sequence: Synthetic oligonucleotide
aagugugguccuagaguuu

SEQ ID NO: 1295584 - RNA, 19 nt, Artificial Sequence
  Description of Artificial Sequence: Synthetic oligonucleotide
uuagggcuagguggggcua

SEQ ID NO: 1295585 - RNA, 19 nt, Artificial Sequence
  Description of Artificial Sequence: Synthetic oligonucleotide
ucgcccuggaagugugguc

SEQ ID NO: 1295586 - RNA, 19 nt, Artificial Sequence
  Description of Artificial Sequence: Synthetic oligonucleotide
cacuucaauaggggugguc

SEQ ID NO: 1295587 - RNA, 19 nt, Artificial Sequence
  Description of Artificial Sequence: Synthetic oligonucleotide
acugaacguggagcucaag

SEQ ID NO: 1295588 - RNA, 19 nt, Artificial Sequence
  Description of Artificial Sequence: Synthetic oligonucleotide
gucccuguugcggauagcu

SEQ ID NO: 1295589 - RNA, 19 nt, Artificial Sequence
  Description of Artificial Sequence: Synthetic oligonucleotide
ucccacccuuguagggaga

SEQ ID NO: 1295590 - RNA, 19 nt, Artificial Sequence
  Description of Artificial Sequence: Synthetic oligonucleotide
ccgaaguccugccccauug

SEQ ID NO: 1295591 - RNA, 19 nt, Artificial Sequence
  Description of Artificial Sequence: Synthetic oligonucleotide
gacgcuggacugcuugggu

SEQ ID NO: 1295592 - RNA, 19 nt, Artificial Sequence
  Description of Artificial Sequence: Synthetic oligonucleotide
cccgggacaauaauggucu

SEQ ID NO: 1295593 - RNA, 19 nt, Artificial Sequence
  Description of Artificial Sequence: Synthetic oligonucleotide
gaccggaauguuccuucua

SEQ ID NO: 1295594 - RNA, 19 nt, Artificial Sequence
  Description of Artificial Sequence: Synthetic oligonucleotide
ggaggccuucuuuagggcu

SEQ ID NO: 1295595 - RNA, 19 nt, Artificial Sequence
  Description of Artificial Sequence: Synthetic oligonucleotide
ggaauguccugcucgcccu

SEQ ID NO: 1295596 - RNA, 19 nt, Artificial Sequence
  Description of Artificial Sequence: Synthetic oligonucleotide
cgcgguguuuccauccacc

SEQ ID NO: 1295597 - RNA, 19 nt, Artificial Sequence
  Description of Artificial Sequence: Synthetic oligonucleotide
ccgucuuggcauccaagug

SEQ ID NO: 1295598 - RNA, 19 nt, Artificial Sequence
  Description of Artificial Sequence: Synthetic oligonucleotide
aagcccggcuggcgacucu

SEQ ID NO: 1295599 - RNA, 19 nt, Artificial Sequence
  Description of Artificial Sequence: Synthetic oligonucleotide
gacuccgaccuccccgucu

SEQ ID NO: 1295600 - RNA, 19 nt, Artificial Sequence
  Description of Artificial Sequence: Synthetic oligonucleotide
ggggacgguccucuuugug

SEQ ID NO: 1295601 - RNA, 19 nt, Artificial Sequence
  Description of Artificial Sequence: Synthetic oligonucleotide
accuccccgucuguaagau

SEQ ID NO: 1295602 - RNA, 19 nt, Artificial Sequence
  Description of Artificial Sequence: Synthetic oligonucleotide
gggacaauaauggucucau

SEQ ID NO: 1295603 - RNA, 19 nt, Artificial Sequence
  Description of Artificial Sequence: Synthetic oligonucleotide
uggcgacucugauggccaa

SEQ ID NO: 1295604 - RNA, 19 nt, Artificial Sequence
  Description of Artificial Sequence: Synthetic oligonucleotide
ccauugccccagcaguccc

SEQ ID NO: 1295605 - RNA, 19 nt, Artificial Sequence
  Description of Artificial Sequence: Synthetic oligonucleotide
caauagggguggucccaga

SEQ ID NO: 1295606 - RNA, 19 nt, Artificial Sequence
  Description of Artificial Sequence: Synthetic oligonucleotide
gcaaggggccacaucugug

SEQ ID NO: 1295607 - RNA, 19 nt, Artificial Sequence
  Description of Artificial Sequence: Synthetic oligonucleotide
ggucccacccuuguaggga

SEQ ID NO: 1295608 - RNA, 19 nt, Artificial Sequence
  Description of Artificial Sequence: Synthetic oligonucleotide
cgcccuggaaguguggucc

SEQ ID NO: 1295609 - RNA, 19 nt, Artificial Sequence
  Description of Artificial Sequence: Synthetic oligonucleotide
gucucucacugaacgugga

SEQ ID NO: 1295610 - RNA, 19 nt, Artificial Sequence
  Description of Artificial Sequence: Synthetic oligonucleotide
ggccguggagugcagcaca

SEQ ID NO: 1295611 - RNA, 19 nt, Artificial Sequence
  Description of Artificial Sequence: Synthetic oligonucleotide
ggacugucuuccagacucc

SEQ ID NO: 1295612 - RNA, 19 nt, Artificial Sequence
  Description of Artificial Sequence: Synthetic oligonucleotide
ccgucuccuuccgugaggc

SEQ ID NO: 1295613 - RNA, 19 nt, Artificial Sequence
  Description of Artificial Sequence: Synthetic oligonucleotide
uccgaccuccccgucugua

SEQ ID NO: 1295614 - RNA, 19 nt, Artificial Sequence
  Description of Artificial Sequence: Synthetic oligonucleotide
ggaaggugagcucccaguu

SEQ ID NO: 1295615 - RNA, 19 nt, Artificial Sequence
  Description of Artificial Sequence: Synthetic oligonucleotide
ccuaccccugagcccagag

SEQ ID NO: 1295616 - RNA, 19 nt, Artificial Sequence
  Description of Artificial Sequence: Synthetic oligonucleotide
cuguaacaacuguaaugau

SEQ ID NO: 1295617 - RNA, 19 nt, Artificial Sequence
  Description of Artificial Sequence: Synthetic oligonucleotide
gucccgggacaauaauggu

SEQ ID NO: 1295618 - RNA, 19 nt, Artificial Sequence
  Description of Artificial Sequence: Synthetic oligonucleotide
ccggcuggcgacucugaug

SEQ ID NO: 1295619 - RNA, 19 nt, Artificial Sequence
  Description of Artificial Sequence: Synthetic oligonucleotide
gugaggcagaccggaaugu

SEQ ID NO: 1295620 - RNA, 19 nt, Artificial Sequence
  Description of Artificial Sequence: Synthetic oligonucleotide
cccuguugcggauagcugu

SEQ ID NO: 1295621 - RNA, 19 nt, Artificial Sequence
  Description of Artificial Sequence: Synthetic oligonucleotide
cuccuuccgugaggcagac

SEQ ID NO: 1295622 - RNA, 19 nt, Artificial Sequence
  Description of Artificial Sequence: Synthetic oligonucleotide
ccggaauguuccuucuaga

SEQ ID NO: 1295623 - RNA, 19 nt, Artificial Sequence
  Description of Artificial Sequence: Synthetic oligonucleotide
cacugaacguggagcucaa

SEQ ID NO: 1295624 - RNA, 19 nt, Artificial Sequence
  Description of Artificial Sequence: Synthetic oligonucleotide
uccuuccgugaggcagacc

SEQ ID NO: 1295625 - RNA, 19 nt, Artificial Sequence
  Description of Artificial Sequence: Synthetic oligonucleotide
ccucuuuguggcucugaga

SEQ ID NO: 1295626 - RNA, 19 nt, Artificial Sequence
  Description of Artificial Sequence: Synthetic oligonucleotide
ggcgacucugauggccaag

SEQ ID NO: 1295627 - RNA, 19 nt, Artificial Sequence
  Description of Artificial Sequence: Synthetic oligonucleotide
gccuaggucgggaggugcc

SEQ ID NO: 1295628 - RNA, 19 nt, Artificial Sequence
  Description of Artificial Sequence: Synthetic oligonucleotide
ggcuagguggggcuaggcu

SEQ ID NO: 1295629 - RNA, 19 nt, Artificial Sequence
  Description of Artificial Sequence: Synthetic oligonucleotide
ggccuaggucgggaggugc

SEQ ID NO: 1295630 - RNA, 19 nt, Artificial Sequence
  Description of Artificial Sequence: Synthetic oligonucleotide
gccguggagugcagcacag

SEQ ID NO: 1295631 - RNA, 19 nt, Artificial Sequence
  Description of Artificial Sequence: Synthetic oligonucleotide
caaggagggccaguguccu

SEQ ID NO: 1295632 - RNA, 19 nt, Artificial Sequence
  Description of Artificial Sequence: Synthetic oligonucleotide
gcagcacagugcagcgcgg

SEQ ID NO: 1295633 - RNA, 19 nt, Artificial Sequence
  Description of Artificial Sequence: Synthetic oligonucleotide
cucauucauguggcaucca

SEQ ID NO: 1295634 - RNA, 19 nt, Artificial Sequence
  Description of Artificial Sequence: Synthetic oligonucleotide
gcagcgcgguguuuccauc

SEQ ID NO: 1295635 - RNA, 19 nt, Artificial Sequence
  Description of Artificial Sequence: Synthetic oligonucleotide
ggggugucagagcgaucuc

SEQ ID NO: 1295636 - RNA, 19 nt, Artificial Sequence
  Description of Artificial Sequence: Synthetic oligonucleotide
aggucgggaggugccugau

SEQ ID NO: 1295637 - RNA, 19 nt, Artificial Sequence
  Description of Artificial Sequence: Synthetic oligonucleotide
gcuagaugaggaagacgcu

SEQ ID NO: 1295638 - RNA, 19 nt, Artificial Sequence
  Description of Artificial Sequence: Synthetic oligonucleotide
gcuuggguucucugaggcu

SEQ ID NO: 1295639 - RNA, 19 nt, Artificial Sequence
  Description of Artificial Sequence: Synthetic oligonucleotide
gcgcgguguuuccauccac

SEQ ID NO: 1295640 - RNA, 19 nt, Artificial Sequence
  Description of Artificial Sequence: Synthetic oligonucleotide
ccugcucgcccuggaagug

SEQ ID NO: 1295641 - RNA, 19 nt, Artificial Sequence
  Description of Artificial Sequence: Synthetic oligonucleotide
ccccgucuguaagaucgag

SEQ ID NO: 1295642 - RNA, 19 nt, Artificial Sequence
  Description of Artificial Sequence: Synthetic oligonucleotide
gugccuggaccugaaugau

SEQ ID NO: 1295643 - RNA, 19 nt, Artificial Sequence
  Description of Artificial Sequence: Synthetic oligonucleotide
gggcuagguggggcuaggc

SEQ ID NO: 1295644 - RNA, 19 nt, Artificial Sequence
  Description of Artificial Sequence: Synthetic oligonucleotide
gcccgggagaaccccgguc

SEQ ID NO: 1295645 - RNA, 19 nt, Artificial Sequence
  Description of Artificial Sequence: Synthetic oligonucleotide
cuggucccgggacaauaau

SEQ ID NO: 1295646 - RNA, 19 nt, Artificial Sequence
  Description of Artificial Sequence: Synthetic oligonucleotide
guccuaccccugagcccag

SEQ ID NO: 1295647 - RNA, 19 nt, Artificial Sequence
  Description of Artificial Sequence: Synthetic oligonucleotide
gcgacucugauggccaagu

SEQ ID NO: 1295648 - RNA, 19 nt, Artificial Sequence
  Description of Artificial Sequence: Synthetic oligonucleotide
ccgggacaauaauggucuc

SEQ ID NO: 1295649 - RNA, 19 nt, Artificial Sequence
  Description of Artificial Sequence: Synthetic oligonucleotide
ggucccuguugcggauagc

SEQ ID NO: 1295650 - RNA, 19 nt, Artificial Sequence
  Description of Artificial Sequence: Synthetic oligonucleotide
ggcagaccggaauguuccu

SEQ ID NO: 1295651 - RNA, 19 nt, Artificial Sequence
  Description of Artificial Sequence: Synthetic oligonucleotide
cccgucuguaagaucgagu

SEQ ID NO: 1295652 - RNA, 19 nt, Artificial Sequence
  Description of Artificial Sequence: Synthetic oligonucleotide
ccuccccgucuguaagauc

SEQ ID NO: 1295653 - RNA, 19 nt, Artificial Sequence
  Description of Artificial Sequence: Synthetic oligonucleotide
cgggacaauaauggucuca

SEQ ID NO: 1295654 - RNA, 19 nt, Artificial Sequence
  Description of Artificial Sequence: Synthetic oligonucleotide
gccagcguggucccacccu

SEQ ID NO: 1295655 - RNA, 19 nt, Artificial Sequence
  Description of Artificial Sequence: Synthetic oligonucleotide
ccgaccuccccgucuguaa

SEQ ID NO: 1295656 - RNA, 19 nt, Artificial Sequence
  Description of Artificial Sequence: Synthetic oligonucleotide
cugcucgcccuggaagugu

SEQ ID NO: 1295657 - RNA, 19 nt, Artificial Sequence
  Description of Artificial Sequence: Synthetic oligonucleotide
ccacccuuguagggagaac

SEQ ID NO: 1295658 - RNA, 19 nt, Artificial Sequence
  Description of Artificial Sequence: Synthetic oligonucleotide
gggucagcaaggagcuagu

SEQ ID NO: 1295659 - RNA, 19 nt, Artificial Sequence
  Description of Artificial Sequence: Synthetic oligonucleotide
cccacccuuguagggagaa

SEQ ID NO: 1295660 - RNA, 19 nt, Artificial Sequence
  Description of Artificial Sequence: Synthetic oligonucleotide
gcguggucccacccuugua

SEQ ID NO: 1295661 - RNA, 19 nt, Artificial Sequence
  Description of Artificial Sequence: Synthetic oligonucleotide
gcagaccggaauguuccuu

SEQ ID NO: 1295662 - RNA, 19 nt, Artificial Sequence
  Description of Artificial Sequence: Synthetic oligonucleotide
ccagcguggucccacccuu

SEQ ID NO: 1295663 - RNA, 19 nt, Artificial Sequence
  Description of Artificial Sequence: Synthetic oligonucleotide
ccuaggucgggaggugccu

SEQ ID NO: 1295664 - RNA, 19 nt, Artificial Sequence
  Description of Artificial Sequence: Synthetic oligonucleotide
cuccgaccuccccgucugu

SEQ ID NO: 1295665 - RNA, 19 nt, Artificial Sequence
  Description of Artificial Sequence: Synthetic oligonucleotide
ccccggucuuugagccguc

SEQ ID NO: 1295666 - RNA, 19 nt, Artificial Sequence
  Description of Artificial Sequence: Synthetic oligonucleotide
cccacgggagcccucccuu

SEQ ID NO: 1295667 - RNA, 19 nt, Artificial Sequence
  Description of Artificial Sequence: Synthetic oligonucleotide
gcccggcuggcgacucuga

SEQ ID NO: 1295668 - RNA, 19 nt, Artificial Sequence
  Description of Artificial Sequence: Synthetic oligonucleotide
ccccacgggagcccucccu

SEQ ID NO: 1295669 - RNA, 19 nt, Artificial Sequence
  Description of Artificial Sequence: Synthetic oligonucleotide
cccggcuggcgacucugau

SEQ ID NO: 1295670 - RNA, 19 nt, Artificial Sequence
  Description of Artificial Sequence: Synthetic oligonucleotide
ccgggagaaccccggucuu

SEQ ID NO: 1295671 - RNA, 19 nt, Artificial Sequence
  Description of Artificial Sequence: Synthetic oligonucleotide
ccguggagugcagcacagu

SEQ ID NO: 1295672 - RNA, 19 nt, Artificial Sequence
  Description of Artificial Sequence: Synthetic oligonucleotide
aguuaauggauuugaaucc

SEQ ID NO: 1295673 - RNA, 19 nt, Artificial Sequence
  Description of Artificial Sequence: Synthetic oligonucleotide
aauuuauccaaauuguaga

SEQ ID NO: 1295674 - RNA, 19 nt, Artificial Sequence
  Description of Artificial Sequence: Synthetic oligonucleotide
aauccgacuucuuggaugc

SEQ ID NO: 1295675 - RNA, 19 nt, Artificial Sequence
  Description of Artificial Sequence: Synthetic oligonucleotide
uucauaaggaaaaucucgg

SEQ ID NO: 1295676 - RNA, 19 nt, Artificial Sequence
  Description of Artificial Sequence: Synthetic oligonucleotide
ugugucuacaaucugccgg

SEQ ID NO: 1295677 - RNA, 19 nt, Artificial Sequence
  Description of Artificial Sequence: Synthetic oligonucleotide
cuucauaaggaaaaucucg

SEQ ID NO: 1295678 - RNA, 19 nt, Artificial Sequence
  Description of Artificial Sequence: Synthetic oligonucleotide
uuuaguagggcacuuaagu

SEQ ID NO: 1295679 - RNA, 19 nt, Artificial Sequence
  Description of Artificial Sequence: Synthetic oligonucleotide
cucauaaucauuaggaaac

SEQ ID NO: 1295680 - RNA, 19 nt, Artificial Sequence
  Description of Artificial Sequence: Synthetic oligonucleotide
uagguuacaaucaaacuug

SEQ ID NO: 1295681 - RNA, 19 nt, Artificial Sequence
  Description of Artificial Sequence: Synthetic oligonucleotide
aaacccgcuggcuucaugc

SEQ ID NO: 1295682 - RNA, 19 nt, Artificial Sequence
  Description of Artificial Sequence: Synthetic oligonucleotide
uuagguuacaaucaaacuu

SEQ ID NO: 1295683 - RNA, 19 nt, Artificial Sequence
  Description of Artificial Sequence: Synthetic oligonucleotide
gaucuuaugagccacugug

SEQ ID NO: 1295684 - RNA, 19 nt, Artificial Sequence
  Description of Artificial Sequence: Synthetic oligonucleotide
auaucucagaaguccaucc

SEQ ID NO: 1295685 - RNA, 19 nt, Artificial Sequence
  Description of Artificial Sequence: Synthetic oligonucleotide
cuuuagguuacaaucaaac

SEQ ID NO: 1295686 - RNA, 19 nt, Artificial Sequence
  Description of Artificial Sequence: Synthetic oligonucleotide
cuugguuucaacuuccaag

SEQ ID NO: 1295687 - RNA, 19 nt, Artificial Sequence
  Description of Artificial Sequence: Synthetic oligonucleotide
uuaaguauuucaguuaaug

SEQ ID NO: 1295688 - RNA, 19 nt, Artificial Sequence
  Description of Artificial Sequence: Synthetic oligonucleotide
cauaaggaaaaucucgggg

SEQ ID NO: 1295689 - RNA, 19 nt, Artificial Sequence
  Description of Artificial Sequence: Synthetic oligonucleotide
aaccauguuccucagcagg

SEQ ID NO: 1295690 - RNA, 19 nt, Artificial Sequence
  Description of Artificial Sequence: Synthetic oligonucleotide
ucugagacgauucugccca

SEQ ID NO: 1295691 - RNA, 19 nt, Artificial Sequence
  Description of Artificial Sequence: Synthetic oligonucleotide
caguuaauggauuugaauc

SEQ ID NO: 1295692 - RNA, 19 nt, Artificial Sequence
  Description of Artificial Sequence: Synthetic oligonucleotide
ucaacauauaucucagaag

SEQ ID NO: 1295693 - RNA, 19 nt, Artificial Sequence
  Description of Artificial Sequence: Synthetic oligonucleotide
uucucuacaagagaaguag

SEQ ID NO: 1295694 - RNA, 19 nt, Artificial Sequence
  Description of Artificial Sequence: Synthetic oligonucleotide
ucguguaaggaucauggag

SEQ ID NO: 1295695 - RNA, 19 nt, Artificial Sequence
  Description of Artificial Sequence: Synthetic oligonucleotide
cauuaggaaacauaggauc

SEQ ID NO: 1295696 - RNA, 19 nt, Artificial Sequence
  Description of Artificial Sequence: Synthetic oligonucleotide
aaauuguagaaacaugcuu

SEQ ID NO: 1295697 - RNA, 19 nt, Artificial Sequence
  Description of Artificial Sequence: Synthetic oligonucleotide
auaaggaaaaucucggggu

SEQ ID NO: 1295698 - RNA, 19 nt, Artificial Sequence
  Description of Artificial Sequence: Synthetic oligonucleotide
uuuauugccggccuucuga

SEQ ID NO: 1295699 - RNA, 19 nt, Artificial Sequence
  Description of Artificial Sequence: Synthetic oligonucleotide
aauaccucccauugagauc

SEQ ID NO: 1295700 - RNA, 19 nt, Artificial Sequence
  Description of Artificial Sequence: Synthetic oligonucleotide
aaugaucuugccgccacgc

SEQ ID NO: 1295701 - RNA, 19 nt, Artificial Sequence
  Description of Artificial Sequence: Synthetic oligonucleotide
aguacuuagcccuugcuca

SEQ ID NO: 1295702 - RNA, 19 nt, Artificial Sequence
  Description of Artificial Sequence: Synthetic oligonucleotide
aucaacaacagcuuuaauu

SEQ ID NO: 1295703 - RNA, 19 nt, Artificial Sequence
  Description of Artificial Sequence: Synthetic oligonucleotide
ugacuuuagguuacaauca

SEQ ID NO: 1295704 - RNA, 19 nt, Artificial Sequence
  Description of Artificial Sequence: Synthetic oligonucleotide
ucauaaggaaaaucucggg

SEQ ID NO: 1295705 - RNA, 19 nt, Artificial Sequence
  Description of Artificial Sequence: Synthetic oligonucleotide
auugccggccuucugagac

SEQ ID NO: 1295706 - RNA, 19 nt, Artificial Sequence
  Description of Artificial Sequence: Synthetic oligonucleotide
uugguuucaacuuccaagu

SEQ ID NO: 1295707 - RNA, 19 nt, Artificial Sequence
  Description of Artificial Sequence: Synthetic oligonucleotide
aauuguagaaacaugcuuu

SEQ ID NO: 1295708 - RNA, 19 nt, Artificial Sequence
  Description of Artificial Sequence: Synthetic oligonucleotide
aauggauuugaauccgacu

SEQ ID NO: 1295709 - RNA, 19 nt, Artificial Sequence
  Description of Artificial Sequence: Synthetic oligonucleotide
agauccaagacccugaauu

SEQ ID NO: 1295710 - RNA, 19 nt, Artificial Sequence
  Description of Artificial Sequence: Synthetic oligonucleotide
uuuagguuacaaucaaacu

SEQ ID NO: 1295711 - RNA, 19 nt, Artificial Sequence
  Description of Artificial Sequence: Synthetic oligonucleotide
aucaacauauaucucagaa

SEQ ID NO: 1295712 - RNA, 19 nt, Artificial Sequence
  Description of Artificial Sequence: Synthetic oligonucleotide
acaaucaaacuuguucugc

SEQ ID NO: 1295713 - RNA, 19 nt, Artificial Sequence
  Description of Artificial Sequence: Synthetic oligonucleotide
ugauucaacucucucaaau

SEQ ID NO: 1295714 - RNA, 19 nt, Artificial Sequence
  Description of Artificial Sequence: Synthetic oligonucleotide
auuugaauccgacuucuug

SEQ ID NO: 1295715 - RNA, 19 nt, Artificial Sequence
  Description of Artificial Sequence: Synthetic oligonucleotide
aagacccugaauuuaucca

SEQ ID NO: 1295716 - RNA, 19 nt, Artificial Sequence
  Description of Artificial Sequence: Synthetic oligonucleotide
ucucuacaagagaaguagg

SEQ ID NO: 1295717 - RNA, 19 nt, Artificial Sequence
  Description of Artificial Sequence: Synthetic oligonucleotide
aaggggaucagaacuuccc

SEQ ID NO: 1295718 - RNA, 19 nt, Artificial Sequence
  Description of Artificial Sequence: Synthetic oligonucleotide
uguacuuuguuuuguccgc

SEQ ID NO: 1295719 - RNA, 19 nt, Artificial Sequence
  Description of Artificial Sequence: Synthetic oligonucleotide
agcuaaggggaucagaacu

SEQ ID NO: 1295720 - RNA, 19 nt, Artificial Sequence
  Description of Artificial Sequence: Synthetic oligonucleotide
aggaauagcagcuuuggaa

SEQ ID NO: 1295721 - RNA, 19 nt, Artificial Sequence
  Description of Artificial Sequence: Synthetic oligonucleotide
auggauuugaauccgacuu

SEQ ID NO: 1295722 - RNA, 19 nt, Artificial Sequence
  Description of Artificial Sequence: Synthetic oligonucleotide
gacgauucugcccaugggc

SEQ ID NO: 1295723 - RNA, 19 nt, Artificial Sequence
  Description of Artificial Sequence: Synthetic oligonucleotide
ucauuaggaaacauaggau

SEQ ID NO: 1295724 - RNA, 19 nt, Artificial Sequence
  Description of Artificial Sequence: Synthetic oligonucleotide
guuaauggauuugaauccg

SEQ ID NO: 1295725 - RNA, 19 nt, Artificial Sequence
  Description of Artificial Sequence: Synthetic oligonucleotide
ugaauuuauccaaauugua

SEQ ID NO: 1295726 - RNA, 19 nt, Artificial Sequence
  Description of Artificial Sequence: Synthetic oligonucleotide
gaauccgacuucuuggaug

SEQ ID NO: 1295727 - RNA, 19 nt, Artificial Sequence
  Description of Artificial Sequence: Synthetic oligonucleotide
ucuacaagagaaguaggug

SEQ ID NO: 1295728 - RNA, 19 nt, Artificial Sequence
  Description of Artificial Sequence: Synthetic oligonucleotide
uggugugucuacaaucugc

SEQ ID NO: 1295729 - RNA, 19 nt, Artificial Sequence
  Description of Artificial Sequence: Synthetic oligonucleotide
ucucagaaguccauccaag

SEQ ID NO: 1295730 - RNA, 19 nt, Artificial Sequence
  Description of Artificial Sequence: Synthetic oligonucleotide
aaagggauccaucaacaua

SEQ ID NO: 1295731 - RNA, 19 nt, Artificial Sequence
  Description of Artificial Sequence: Synthetic oligonucleotide
aucaaacuuguucugccag

SEQ ID NO: 1295732 - RNA, 19 nt, Artificial Sequence
  Description of Artificial Sequence: Synthetic oligonucleotide
cacccguccaccaaaauac

SEQ ID NO: 1295733 - RNA, 19 nt, Artificial Sequence
  Description of Artificial Sequence: Synthetic oligonucleotide
ucuaucuggcuccucauau

SEQ ID NO: 1295734 - RNA, 19 nt, Artificial Sequence
  Description of Artificial Sequence: Synthetic oligonucleotide
cuuuaggucgaugacuggg

SEQ ID NO: 1295735 - RNA, 19 nt, Artificial Sequence
  Description of Artificial Sequence: Synthetic oligonucleotide
caagacccugaauuuaucc

SEQ ID NO: 1295736 - RNA, 19 nt, Artificial Sequence
  Description of Artificial Sequence: Synthetic oligonucleotide
gagacgauucugcccaugg

SEQ ID NO: 1295737 - RNA, 19 nt, Artificial Sequence
  Description of Artificial Sequence: Synthetic oligonucleotide
guaaggaucauggagguga

SEQ ID NO: 1295738 - RNA, 19 nt, Artificial Sequence
  Description of Artificial Sequence: Synthetic oligonucleotide
auaccucccauugagauca

SEQ ID NO: 1295739 - RNA, 19 nt, Artificial Sequence
  Description of Artificial Sequence: Synthetic oligonucleotide
uuugguuuauugccggccu

SEQ ID NO: 1295740 - RNA, 19 nt, Artificial Sequence
  Description of Artificial Sequence: Synthetic oligonucleotide
caugcuuuaaccacccguc

SEQ ID NO: 1295741 - RNA, 19 nt, Artificial Sequence
  Description of Artificial Sequence: Synthetic oligonucleotide
aguauuucaguuaauggau

SEQ ID NO: 1295742 - RNA, 19 nt, Artificial Sequence
  Description of Artificial Sequence: Synthetic oligonucleotide
caacauauaucucagaagu

SEQ ID NO: 1295743 - RNA, 19 nt, Artificial Sequence
  Description of Artificial Sequence: Synthetic oligonucleotide
uacaaucaaacuuguucug

SEQ ID NO: 1295744 - RNA, 19 nt, Artificial Sequence
  Description of Artificial Sequence: Synthetic oligonucleotide
uaauggauuugaauccgac

SEQ ID NO: 1295745 - RNA, 19 nt, Artificial Sequence
  Description of Artificial Sequence: Synthetic oligonucleotide
auuaggaaacauaggauca

SEQ ID NO: 1295746 - RNA, 19 nt, Artificial Sequence
  Description of Artificial Sequence: Synthetic oligonucleotide
uuaauggauuugaauccga

SEQ ID NO: 1295747 - RNA, 19 nt, Artificial Sequence
  Description of Artificial Sequence: Synthetic oligonucleotide
uucaugccugucuuuacgc

SEQ ID NO: 1295748 - RNA, 19 nt, Artificial Sequence
  Description of Artificial Sequence: Synthetic oligonucleotide
acaugcuuuaaccacccgu

SEQ ID NO: 1295749 - RNA, 19 nt, Artificial Sequence
  Description of Artificial Sequence: Synthetic oligonucleotide
ucuacaaucugccggucau

SEQ ID NO: 1295750 - RNA, 19 nt, Artificial Sequence
  Description of Artificial Sequence: Synthetic oligonucleotide
uuaguagggcacuuaagua

SEQ ID NO: 1295751 - RNA, 19 nt, Artificial Sequence
  Description of Artificial Sequence: Synthetic oligonucleotide
gugaucgaggucuugaguc

SEQ ID NO: 1295752 - RNA, 19 nt, Artificial Sequence
  Description of Artificial Sequence: Synthetic oligonucleotide
uacagcucguguaaggauc

SEQ ID NO: 1295753 - RNA, 19 nt, Artificial Sequence
  Description of Artificial Sequence: Synthetic oligonucleotide
ggaaucucaaauaucacac

SEQ ID NO: 1295754 - RNA, 19 nt, Artificial Sequence
  Description of Artificial Sequence: Synthetic oligonucleotide
uaucucagaaguccaucca

SEQ ID NO: 1295755 - RNA, 19 nt, Artificial Sequence
  Description of Artificial Sequence: Synthetic oligonucleotide
uugaauccgacuucuugga

SEQ ID NO: 1295756 - RNA, 19 nt, Artificial Sequence
  Description of Artificial Sequence: Synthetic oligonucleotide
uuauugccggccuucugag

SEQ ID NO: 1295757 - RNA, 19 nt, Artificial Sequence
  Description of Artificial Sequence: Synthetic oligonucleotide
aucuuaugagccacugugc

SEQ ID NO: 1295758 - RNA, 19 nt, Artificial Sequence
  Description of Artificial Sequence: Synthetic oligonucleotide
ugcuuuaaccacccgucca

SEQ ID NO: 1295759 - RNA, 19 nt, Artificial Sequence
  Description of Artificial Sequence: Synthetic oligonucleotide
acgauucugcccaugggcc

SEQ ID NO: 1295760 - RNA, 19 nt, Artificial Sequence
  Description of Artificial Sequence: Synthetic oligonucleotide
cguguaaggaucauggagg

SEQ ID NO: 1295761 - RNA, 19 nt, Artificial Sequence
  Description of Artificial Sequence: Synthetic oligonucleotide
uucuccaccgacagugcag

SEQ ID NO: 1295762 - RNA, 19 nt, Artificial Sequence
  Description of Artificial Sequence: Synthetic oligonucleotide
uuaggucgaugacuggggc

SEQ ID NO: 1295763 - RNA, 19 nt, Artificial Sequence
  Description of Artificial Sequence: Synthetic oligonucleotide
cuuuaguagggcacuuaag

SEQ ID NO: 1295764 - RNA, 19 nt, Artificial Sequence
  Description of Artificial Sequence: Synthetic oligonucleotide
uuuauccaaauuguagaaa

SEQ ID NO: 1295765 - RNA, 19 nt, Artificial Sequence
  Description of Artificial Sequence: Synthetic oligonucleotide
uuuguccgcugacucuugg

SEQ ID NO: 1295766 - RNA, 19 nt, Artificial Sequence
  Description of Artificial Sequence: Synthetic oligonucleotide
uguacagcucguguaagga

SEQ ID NO: 1295767 - RNA, 19 nt, Artificial Sequence
  Description of Artificial Sequence: Synthetic oligonucleotide
aaauauccgcacugcuuca

SEQ ID NO: 1295768 - RNA, 19 nt, Artificial Sequence
  Description of Artificial Sequence: Synthetic oligonucleotide
ugcaugaucuuaugagcca

SEQ ID NO: 1295769 - RNA, 19 nt, Artificial Sequence
  Description of Artificial Sequence: Synthetic oligonucleotide
aacaugcuuuaaccacccg

SEQ ID NO: 1295770 - RNA, 19 nt, Artificial Sequence
  Description of Artificial Sequence: Synthetic oligonucleotide
ugugaucgaggucuugagu

SEQ ID NO: 1295771 - RNA, 19 nt, Artificial Sequence
  Description of Artificial Sequence: Synthetic oligonucleotide
cuugaguccucuucauaag

SEQ ID NO: 1295772 - RNA, 19 nt, Artificial Sequence
  Description of Artificial Sequence: Synthetic oligonucleotide
uggauuugaauccgacuuc

SEQ ID NO: 1295773 - RNA, 19 nt, Artificial Sequence
  Description of Artificial Sequence: Synthetic oligonucleotide
ugucuuuacgccucuuuuc

SEQ ID NO: 1295774 - RNA, 19 nt, Artificial Sequence
  Description of Artificial Sequence: Synthetic oligonucleotide
uucaguuaauggauuugaa

SEQ ID NO: 1295775 - RNA, 19 nt, Artificial Sequence
  Description of Artificial Sequence: Synthetic oligonucleotide
uguccgcugacucuuggcu

SEQ ID NO: 1295776 - RNA, 19 nt, Artificial Sequence
  Description of Artificial Sequence: Synthetic oligonucleotide
uuuguuuuguccgcugacu

SEQ ID NO: 1295777 - RNA, 19 nt, Artificial Sequence
  Description of Artificial Sequence: Synthetic oligonucleotide
gaaucucaaauaucacaca

SEQ ID NO: 1295778 - RNA, 19 nt, Artificial Sequence
  Description of Artificial Sequence: Synthetic oligonucleotide
uggucgccuagaaaacccg

SEQ ID NO: 1295779 - RNA, 19 nt, Artificial Sequence
  Description of Artificial Sequence: Synthetic oligonucleotide
uagaaaacccgcuggcuuc

SEQ ID NO: 1295780 - RNA, 19 nt, Artificial Sequence
  Description of Artificial Sequence: Synthetic oligonucleotide
gaaaaucucgggguaacuc

SEQ ID NO: 1295781 - RNA, 19 nt, Artificial Sequence
  Description of Artificial Sequence: Synthetic oligonucleotide
cuggucgccuagaaaaccc

SEQ ID NO: 1295782 - RNA, 19 nt, Artificial Sequence
  Description of Artificial Sequence: Synthetic oligonucleotide
aggacuguacuuuguuuug

SEQ ID NO: 1295783 - RNA, 19 nt, Artificial Sequence
  Description of Artificial Sequence: Synthetic oligonucleotide
ucuccguugcaucacccac

SEQ ID NO: 1295784 - RNA, 19 nt, Artificial Sequence
  Description of Artificial Sequence: Synthetic oligonucleotide
auaaucauuaggaaacaua

SEQ ID NO: 1295785 - RNA, 19 nt, Artificial Sequence
  Description of Artificial Sequence: Synthetic oligonucleotide
agacccugaauuuauccaa

SEQ ID NO: 1295786 - RNA, 19 nt, Artificial Sequence
  Description of Artificial Sequence: Synthetic oligonucleotide
cugcccaugggccacggcg

SEQ ID NO: 1295787 - RNA, 19 nt, Artificial Sequence
  Description of Artificial Sequence: Synthetic oligonucleotide
aaaacccacugggaacagg

SEQ ID NO: 1295788 - RNA, 19 nt, Artificial Sequence
  Description of Artificial Sequence: Synthetic oligonucleotide
uuuucuccgcucucgcuca

SEQ ID NO: 1295789 - RNA, 19 nt, Artificial Sequence
  Description of Artificial Sequence: Synthetic oligonucleotide
uuagcccuugcucauguuu

SEQ ID NO: 1295790 - RNA, 19 nt, Artificial Sequence
  Description of Artificial Sequence: Synthetic oligonucleotide
gcucguguaaggaucaugg

SEQ ID NO: 1295791 - RNA, 19 nt, Artificial Sequence
  Description of Artificial Sequence: Synthetic oligonucleotide
ugucauugcucaguguaca

SEQ ID NO: 1295792 - RNA, 19 nt, Artificial Sequence
  Description of Artificial Sequence: Synthetic oligonucleotide
ugcucauguuuccccagcc

SEQ ID NO: 1295793 - RNA, 19 nt, Artificial Sequence
  Description of Artificial Sequence: Synthetic oligonucleotide
aaaauaccucccauugaga

SEQ ID NO: 1295794 - RNA, 19 nt, Artificial Sequence
  Description of Artificial Sequence: Synthetic oligonucleotide
ucgccuagaaaacccgcug

SEQ ID NO: 1295795 - RNA, 19 nt, Artificial Sequence
  Description of Artificial Sequence: Synthetic oligonucleotide
cugagacucgcccuucucc

SEQ ID NO: 1295796 - RNA, 19 nt, Artificial Sequence
  Description of Artificial Sequence: Synthetic oligonucleotide
cguugcaucacccacaaug

SEQ ID NO: 1295797 - RNA, 19 nt, Artificial Sequence
  Description of Artificial Sequence: Synthetic oligonucleotide
cccauguuagcaaggaagg

SEQ ID NO: 1295798 - RNA, 19 nt, Artificial Sequence
  Description of Artificial Sequence: Synthetic oligonucleotide
acugggaacaggguccuuc

SEQ ID NO: 1295799 - RNA, 19 nt, Artificial Sequence
  Description of Artificial Sequence: Synthetic oligonucleotide
uacaaucugccggucaucu

SEQ ID NO: 1295800 - RNA, 19 nt, Artificial Sequence
  Description of Artificial Sequence: Synthetic oligonucleotide
gaaguagguggggcaaugg

SEQ ID NO: 1295801 - RNA, 19 nt, Artificial Sequence
  Description of Artificial Sequence: Synthetic oligonucleotide
ugcaguacuuagcccuugc

SEQ ID NO: 1295802 - RNA, 19 nt, Artificial Sequence
  Description of Artificial Sequence: Synthetic oligonucleotide
auguuagcaaggaaggagu

SEQ ID NO: 1295803 - RNA, 19 nt, Artificial Sequence
  Description of Artificial Sequence: Synthetic oligonucleotide
auauccgcacugcuucauc

SEQ ID NO: 1295804 - RNA, 19 nt, Artificial Sequence
  Description of Artificial Sequence: Synthetic oligonucleotide
gacuuuagguuacaaucaa

SEQ ID NO: 1295805 - RNA, 19 nt, Artificial Sequence
  Description of Artificial Sequence: Synthetic oligonucleotide
acgccugugucauugcuca

SEQ ID NO: 1295806 - RNA, 19 nt, Artificial Sequence
  Description of Artificial Sequence: Synthetic oligonucleotide
ucuggucgccuagaaaacc

SEQ ID NO: 1295807 - RNA, 19 nt, Artificial Sequence
  Description of Artificial Sequence: Synthetic oligonucleotide
aucucagaaguccauccaa

SEQ ID NO: 1295808 - RNA, 19 nt, Artificial Sequence
  Description of Artificial Sequence: Synthetic oligonucleotide
caguacuuagcccuugcuc

SEQ ID NO: 1295809 - RNA, 19 nt, Artificial Sequence
  Description of Artificial Sequence: Synthetic oligonucleotide
ggucuggucgccuagaaaa

SEQ ID NO: 1295810 - RNA, 19 nt, Artificial Sequence
  Description of Artificial Sequence: Synthetic oligonucleotide
uugcucauguuuccccagc

SEQ ID NO: 1295811 - RNA, 19 nt, Artificial Sequence
  Description of Artificial Sequence: Synthetic oligonucleotide
agccuccucgcuuuagguc

SEQ ID NO: 1295812 - RNA, 19 nt, Artificial Sequence
  Description of Artificial Sequence: Synthetic oligonucleotide
cuugccgccacgcuugcug

SEQ ID NO: 1295813 - RNA, 19 nt, Artificial Sequence
  Description of Artificial Sequence: Synthetic oligonucleotide
gucauugcucaguguacag

SEQ ID NO: 1295814 - RNA, 19 nt, Artificial Sequence
  Description of Artificial Sequence: Synthetic oligonucleotide
accaaccauguuccucagc

SEQ ID NO: 1295815 - RNA, 19 nt, Artificial Sequence
  Description of Artificial Sequence: Synthetic oligonucleotide
gagucucaguguccaacag

SEQ ID NO: 1295816 - RNA, 19 nt, Artificial Sequence
  Description of Artificial Sequence: Synthetic oligonucleotide
uguuagcaaggaaggaguu

SEQ ID NO: 1295817 - RNA, 19 nt, Artificial Sequence
  Description of Artificial Sequence: Synthetic oligonucleotide
aaaacccgcuggcuucaug

SEQ ID NO: 1295818 - RNA, 19 nt, Artificial Sequence
  Description of Artificial Sequence: Synthetic oligonucleotide
ucgggguaacuccuugucu

SEQ ID NO: 1295819 - RNA, 19 nt, Artificial Sequence
  Description of Artificial Sequence: Synthetic oligonucleotide
ggauccaucaacauauauc

SEQ ID NO: 1295820 - RNA, 19 nt, Artificial Sequence
  Description of Artificial Sequence: Synthetic oligonucleotide
uucccggaagccauauuuc

SEQ ID NO: 1295821 - RNA, 19 nt, Artificial Sequence
  Description of Artificial Sequence: Synthetic oligonucleotide
guuagcaaggaaggaguug

SEQ ID NO: 1295822 - RNA, 19 nt, Artificial Sequence
  Description of Artificial Sequence: Synthetic oligonucleotide
acugugaucgaggucuuga

SEQ ID NO: 1295823 - RNA, 19 nt, Artificial Sequence
  Description of Artificial Sequence: Synthetic oligonucleotide
uuuggaccagccuucgguu

SEQ ID NO: 1295824 - RNA, 19 nt, Artificial Sequence
  Description of Artificial Sequence: Synthetic oligonucleotide
uccguugcaucacccacaa

SEQ ID NO: 1295825 - RNA, 19 nt, Artificial Sequence
  Description of Artificial Sequence: Synthetic oligonucleotide
cugugaucgaggucuugag

SEQ ID NO: 1295826 - RNA, 19 nt, Artificial Sequence
  Description of Artificial Sequence: Synthetic oligonucleotide
uucuccguugcaucaccca

SEQ ID NO: 1295827 - RNA, 19 nt, Artificial Sequence
  Description of Artificial Sequence: Synthetic oligonucleotide
cucucuggcgcuucacuac

SEQ ID NO: 1295828 - RNA, 19 nt, Artificial Sequence
  Description of Artificial Sequence: Synthetic oligonucleotide
uaaccacccguccaccaaa

SEQ ID NO: 1295829 - RNA, 19 nt, Artificial Sequence
  Description of Artificial Sequence: Synthetic oligonucleotide
uugcugauucaacucucuc

SEQ ID NO: 1295830 - RNA, 19 nt, Artificial Sequence
  Description of Artificial Sequence: Synthetic oligonucleotide
caguguccaacagccaugg

SEQ ID NO: 1295831 - RNA, 19 nt, Artificial Sequence
  Description of Artificial Sequence: Synthetic oligonucleotide
cucgcuuuaggucgaugac

SEQ ID NO: 1295832 - RNA, 19 nt, Artificial Sequence
  Description of Artificial Sequence: Synthetic oligonucleotide
gaccacuuuaguagggcac

SEQ ID NO: 1295833 - RNA, 19 nt, Artificial Sequence
  Description of Artificial Sequence: Synthetic oligonucleotide
uguuggagaucuuggucua

SEQ ID NO: 1295834 - RNA, 19 nt, Artificial Sequence
  Description of Artificial Sequence: Synthetic oligonucleotide
ugaauccgacuucuuggau

SEQ ID NO: 1295835 - RNA, 19 nt, Artificial Sequence
  Description of Artificial Sequence: Synthetic oligonucleotide
ucuccgcucucgcucauaa

SEQ ID NO: 1295836 - RNA, 19 nt, Artificial Sequence
  Description of Artificial Sequence: Synthetic oligonucleotide
ugguuucaacuuccaaguc

SEQ ID NO: 1295837 - RNA, 19 nt, Artificial Sequence
  Description of Artificial Sequence: Synthetic oligonucleotide
uugccgccacgcuugcugg

SEQ ID NO: 1295838 - RNA, 19 nt, Artificial Sequence
  Description of Artificial Sequence: Synthetic oligonucleotide
aguguacagcucguguaag

SEQ ID NO: 1295839 - RNA, 19 nt, Artificial Sequence
  Description of Artificial Sequence: Synthetic oligonucleotide
cucagaaguccauccaaga

SEQ ID NO: 1295840 - RNA, 19 nt, Artificial Sequence
  Description of Artificial Sequence: Synthetic oligonucleotide
caucaaccucuccugcacc

SEQ ID NO: 1295841 - RNA, 19 nt, Artificial Sequence
  Description of Artificial Sequence: Synthetic oligonucleotide
aauauccgcacugcuucau

SEQ ID NO: 1295842 - RNA, 19 nt, Artificial Sequence
  Description of Artificial Sequence: Synthetic oligonucleotide
uuguccgcugacucuuggc

SEQ ID NO: 1295843 - RNA, 19 nt, Artificial Sequence
  Description of Artificial Sequence: Synthetic oligonucleotide
accacuuuaguagggcacu

SEQ ID NO: 1295844 - RNA, 19 nt, Artificial Sequence
  Description of Artificial Sequence: Synthetic oligonucleotide
cuuuaaccacccguccacc

SEQ ID NO: 1295845 - RNA, 19 nt, Artificial Sequence
  Description of Artificial Sequence: Synthetic oligonucleotide
uccaccgacagugcaguac

SEQ ID NO: 1295846 - RNA, 19 nt, Artificial Sequence
  Description of Artificial Sequence: Synthetic oligonucleotide
gagaucaacaacagcuuua

SEQ ID NO: 1295847 - RNA, 19 nt, Artificial Sequence
  Description of Artificial Sequence: Synthetic oligonucleotide
cucuacaagagaaguaggu

SEQ ID NO: 1295848 - RNA, 19 nt, Artificial Sequence
  Description of Artificial Sequence: Synthetic oligonucleotide
uggaugcauccugagacuc

SEQ ID NO: 1295849 - RNA, 19 nt, Artificial Sequence
  Description of Artificial Sequence: Synthetic oligonucleotide
aucucgggguaacuccuug

SEQ ID NO: 1295850 - RNA, 19 nt, Artificial Sequence
  Description of Artificial Sequence: Synthetic oligonucleotide
uugcaucacccacaaugau

SEQ ID NO: 1295851 - RNA, 19 nt, Artificial Sequence
  Description of Artificial Sequence: Synthetic oligonucleotide
cuuuacgccucuuuucucu

SEQ ID NO: 1295852 - RNA, 19 nt, Artificial Sequence
  Description of Artificial Sequence: Synthetic oligonucleotide
ccaaccauguuccucagca

SEQ ID NO: 1295853 - RNA, 19 nt, Artificial Sequence
  Description of Artificial Sequence: Synthetic oligonucleotide
ucucgggguaacuccuugu

SEQ ID NO: 1295854 - RNA, 19 nt, Artificial Sequence
  Description of Artificial Sequence: Synthetic oligonucleotide
ugagcggaagcccgccgac

SEQ ID NO: 1295855 - RNA, 19 nt, Artificial Sequence
  Description of Artificial Sequence: Synthetic oligonucleotide
auugcugauucaacucucu

SEQ ID NO: 1295856 - RNA, 19 nt, Artificial Sequence
  Description of Artificial Sequence: Synthetic oligonucleotide
gauucugcccaugggccac

SEQ ID NO: 1295857 - RNA, 19 nt, Artificial Sequence
  Description of Artificial Sequence: Synthetic oligonucleotide
aguagggcacuuaaguauu

SEQ ID NO: 1295858 - RNA, 19 nt, Artificial Sequence
  Description of Artificial Sequence: Synthetic oligonucleotide
gaucauggaggugacuuua

SEQ ID NO: 1295859 - RNA, 19 nt, Artificial Sequence
  Description of Artificial Sequence: Synthetic oligonucleotide
cuaaggggaucagaacuuc

SEQ ID NO: 1295860 - RNA, 19 nt, Artificial Sequence
  Description of Artificial Sequence: Synthetic oligonucleotide
cucgggguaacuccuuguc

SEQ ID NO: 1295861 - RNA, 19 nt, Artificial Sequence
  Description of Artificial Sequence: Synthetic oligonucleotide
gaaucugggucuggucgcc

SEQ ID NO: 1295862 - RNA, 19 nt, Artificial Sequence
  Description of Artificial Sequence: Synthetic oligonucleotide
ucgaugacuggggcaagga

SEQ ID NO: 1295863 - RNA, 19 nt, Artificial Sequence
  Description of Artificial Sequence: Synthetic oligonucleotide
aggucgaugacuggggcaa

SEQ ID NO: 1295864 - RNA, 19 nt, Artificial Sequence
  Description of Artificial Sequence: Synthetic oligonucleotide
ucuggcgcuucacuacuuu

SEQ ID NO: 1295865 - RNA, 19 nt, Artificial Sequence
  Description of Artificial Sequence: Synthetic oligonucleotide
gauccaagacccugaauuu

SEQ ID NO: 1295866 - RNA, 19 nt, Artificial Sequence
  Description of Artificial Sequence: Synthetic oligonucleotide
aucauggaggugacuuuag

SEQ ID NO: 1295867 - RNA, 19 nt, Artificial Sequence
  Description of Artificial Sequence: Synthetic oligonucleotide
ucagcccagcugcuacaug

SEQ ID NO: 1295868 - RNA, 19 nt, Artificial Sequence
  Description of Artificial Sequence: Synthetic oligonucleotide
gugucauugcucaguguac

SEQ ID NO: 1295869 - RNA, 19 nt, Artificial Sequence
  Description of Artificial Sequence: Synthetic oligonucleotide
agcucguguaaggaucaug

SEQ ID NO: 1295870 - RNA, 19 nt, Artificial Sequence
  Description of Artificial Sequence: Synthetic oligonucleotide
ugagacgauucugcccaug

SEQ ID NO: 1295871 - RNA, 19 nt, Artificial Sequence
  Description of Artificial Sequence: Synthetic oligonucleotide
guguaaggaucauggaggu

SEQ ID NO: 1295872 - RNA, 19 nt, Artificial Sequence
  Description of Artificial Sequence: Synthetic oligonucleotide
agguuacaaucaaacuugu

SEQ ID NO: 1295873 - RNA, 19 nt, Artificial Sequence
  Description of Artificial Sequence: Synthetic oligonucleotide
gacucgcccuucuccguug

SEQ ID NO: 1295874 - RNA, 19 nt, Artificial Sequence
  Description of Artificial Sequence: Synthetic oligonucleotide
caguguacagcucguguaa

SEQ ID NO: 1295875 - RNA, 19 nt, Artificial Sequence
  Description of Artificial Sequence: Synthetic oligonucleotide
ggaugcauccugagacucg

SEQ ID NO: 1295876 - RNA, 19 nt, Artificial Sequence
  Description of Artificial Sequence: Synthetic oligonucleotide
cucguguaaggaucaugga

SEQ ID NO: 1295877 - RNA, 19 nt, Artificial Sequence
  Description of Artificial Sequence: Synthetic oligonucleotide
ucuucaccugaagcuggga

SEQ ID NO: 1295878 - RNA, 19 nt, Artificial Sequence
  Description of Artificial Sequence: Synthetic oligonucleotide
gacccugaauuuauccaaa

SEQ ID NO: 1295879 - RNA, 19 nt, Artificial Sequence
  Description of Artificial Sequence: Synthetic oligonucleotide
cugacgccugugucauugc

SEQ ID NO: 1295880 - RNA, 19 nt, Artificial Sequence
  Description of Artificial Sequence: Synthetic oligonucleotide
caacucucucaaauucuaa

SEQ ID NO: 1295881 - RNA, 19 nt, Artificial Sequence
  Description of Artificial Sequence: Synthetic oligonucleotide
gcacuuaaguauuucaguu

SEQ ID NO: 1295882 - RNA, 19 nt, Artificial Sequence
  Description of Artificial Sequence: Synthetic oligonucleotide
caugccugucuuuacgccu

SEQ ID NO: 1295883 - RNA, 19 nt, Artificial Sequence
  Description of Artificial Sequence: Synthetic oligonucleotide
ggaggugacuuuagguuac

SEQ ID NO: 1295884 - RNA, 19 nt, Artificial Sequence
  Description of Artificial Sequence: Synthetic oligonucleotide
gucuggucgccuagaaaac

SEQ ID NO: 1295885 - RNA, 19 nt, Artificial Sequence
  Description of Artificial Sequence: Synthetic oligonucleotide
accgccggagcccgccgcg

SEQ ID NO: 1295886 - RNA, 19 nt, Artificial Sequence
  Description of Artificial Sequence: Synthetic oligonucleotide
augcauccugagacucgcc

SEQ ID NO: 1295887 - RNA, 19 nt, Artificial Sequence
  Description of Artificial Sequence: Synthetic oligonucleotide
ugccggccuucugagacga

SEQ ID NO: 1295888 - RNA, 19 nt, Artificial Sequence
  Description of Artificial Sequence: Synthetic oligonucleotide
cagcaggaccacuuuagua

SEQ ID NO: 1295889 - RNA, 19 nt, Artificial Sequence
  Description of Artificial Sequence: Synthetic oligonucleotide
ccucgcuuuaggucgauga

SEQ ID NO: 1295890 - RNA, 19 nt, Artificial Sequence
  Description of Artificial Sequence: Synthetic oligonucleotide
aucgaggucuugaguccuc

SEQ ID NO: 1295891 - RNA, 19 nt, Artificial Sequence
  Description of Artificial Sequence: Synthetic oligonucleotide
cuuguucugccagauccaa

SEQ ID NO: 1295892 - RNA, 19 nt, Artificial Sequence
  Description of Artificial Sequence: Synthetic oligonucleotide
cuucagcccagcugcuaca

SEQ ID NO: 1295893 - RNA, 19 nt, Artificial Sequence
  Description of Artificial Sequence: Synthetic oligonucleotide
gacugugaucgaggucuug

SEQ ID NO: 1295894 - RNA, 19 nt, Artificial Sequence
  Description of Artificial Sequence: Synthetic oligonucleotide
cgccuagaaaacccgcugg

SEQ ID NO: 1295895 - RNA, 19 nt, Artificial Sequence
  Description of Artificial Sequence: Synthetic oligonucleotide
cccggaagccauauuucug

SEQ ID NO: 1295896 - RNA, 19 nt, Artificial Sequence
  Description of Artificial Sequence: Synthetic oligonucleotide
aaucucgggguaacuccuu

SEQ ID NO: 1295897 - RNA, 19 nt, Artificial Sequence
  Description of Artificial Sequence: Synthetic oligonucleotide
cugagcggaagcccgccga

SEQ ID NO: 1295898 - RNA, 19 nt, Artificial Sequence
  Description of Artificial Sequence: Synthetic oligonucleotide
guacagcucguguaaggau

SEQ ID NO: 1295899 - RNA, 19 nt, Artificial Sequence
  Description of Artificial Sequence: Synthetic oligonucleotide
ccuucuccguugcaucacc

SEQ ID NO: 1295900 - RNA, 19 nt, Artificial Sequence
  Description of Artificial Sequence: Synthetic oligonucleotide
gugccacccauguuagcaa

SEQ ID NO: 1295901 - RNA, 19 nt, Artificial Sequence
  Description of Artificial Sequence: Synthetic oligonucleotide
ggucgccuagaaaacccgc

SEQ ID NO: 1295902 - RNA, 19 nt, Artificial Sequence
  Description of Artificial Sequence: Synthetic oligonucleotide
aaccacccguccaccaaaa

SEQ ID NO: 1295903 - RNA, 19 nt, Artificial Sequence
  Description of Artificial Sequence: Synthetic oligonucleotide
guauuucaguuaauggauu

SEQ ID NO: 1295904 - RNA, 19 nt, Artificial Sequence
  Description of Artificial Sequence: Synthetic oligonucleotide
agugcaguacuuagcccuu

SEQ ID NO: 1295905 - RNA, 19 nt, Artificial Sequence
  Description of Artificial Sequence: Synthetic oligonucleotide
ccgacuucuuggaugcauc

SEQ ID NO: 1295906 - RNA, 19 nt, Artificial Sequence
  Description of Artificial Sequence: Synthetic oligonucleotide
gaggugacuuuagguuaca

SEQ ID NO: 1295907 - RNA, 19 nt, Artificial Sequence
  Description of Artificial Sequence: Synthetic oligonucleotide
aggagccuccucgcuuuag

SEQ ID NO: 1295908 - RNA, 19 nt, Artificial Sequence
  Description of Artificial Sequence: Synthetic oligonucleotide
cugucuuuacgccucuuuu

SEQ ID NO: 1295909 - RNA, 19 nt, Artificial Sequence
  Description of Artificial Sequence: Synthetic oligonucleotide
ccaagacccugaauuuauc

SEQ ID NO: 1295910 - RNA, 19 nt, Artificial Sequence
  Description of Artificial Sequence: Synthetic oligonucleotide
gugcaguacuuagcccuug

SEQ ID NO: 1295911 - RNA, 19 nt, Artificial Sequence
  Description of Artificial Sequence: Synthetic oligonucleotide
accacccguccaccaaaau

SEQ ID NO: 1295912 - RNA, 19 nt, Artificial Sequence
  Description of Artificial Sequence: Synthetic oligonucleotide
ccgcacugcuucaucauca

SEQ ID NO: 1295913 - RNA, 19 nt, Artificial Sequence
  Description of Artificial Sequence: Synthetic oligonucleotide
gucgccuagaaaacccgcu

SEQ ID NO: 1295914 - RNA, 19 nt, Artificial Sequence
  Description of Artificial Sequence: Synthetic oligonucleotide
ugccgccacgcuugcuggu

SEQ ID NO: 1295915 - RNA, 19 nt, Artificial Sequence
  Description of Artificial Sequence: Synthetic oligonucleotide
ggcuucaugccugucuuua

SEQ ID NO: 1295916 - RNA, 19 nt, Artificial Sequence
  Description of Artificial Sequence: Synthetic oligonucleotide
gauuugaauccgacuucuu

SEQ ID NO: 1295917 - RNA, 19 nt, Artificial Sequence
  Description of Artificial Sequence: Synthetic oligonucleotide
ccugagcggaagcccgccg

SEQ ID NO: 1295918 - RNA, 19 nt, Artificial Sequence
  Description of Artificial Sequence: Synthetic oligonucleotide
gggauccaucaacauauau

SEQ ID NO: 1295919 - RNA, 19 nt, Artificial Sequence
  Description of Artificial Sequence: Synthetic oligonucleotide
cgcccugagcggaagcccg

SEQ ID NO: 1295920 - RNA, 19 nt, Artificial Sequence
  Description of Artificial Sequence: Synthetic oligonucleotide
uuggucuaucuggcuccuc

SEQ ID NO: 1295921 - RNA, 19 nt, Artificial Sequence
  Description of Artificial Sequence: Synthetic oligonucleotide
gaaguccauccaagagucu

SEQ ID NO: 1295922 - RNA, 19 nt, Artificial Sequence
  Description of Artificial Sequence: Synthetic oligonucleotide
gcauccugagacucgcccu

SEQ ID NO: 1295923 - RNA, 19 nt, Artificial Sequence
  Description of Artificial Sequence: Synthetic oligonucleotide
uaccucccauugagaucaa

SEQ ID NO: 1295924 - RNA, 19 nt, Artificial Sequence
  Description of Artificial Sequence: Synthetic oligonucleotide
ggaaaaucucgggguaacu

SEQ ID NO: 1295925 - RNA, 19 nt, Artificial Sequence
  Description of Artificial Sequence: Synthetic oligonucleotide
gcaguacuuagcccuugcu

SEQ ID NO: 1295926 - RNA, 19 nt, Artificial Sequence
  Description of Artificial Sequence: Synthetic oligonucleotide
gcccuugcucauguuuccc

SEQ ID NO: 1295927 - RNA, 19 nt, Artificial Sequence
  Description of Artificial Sequence: Synthetic oligonucleotide
ccugagacucgcccuucuc

SEQ ID NO: 1295928 - RNA, 19 nt, Artificial Sequence
  Description of Artificial Sequence: Synthetic oligonucleotide
gggucuggucgccuagaaa

SEQ ID NO: 1295929 - RNA, 19 nt, Artificial Sequence
  Description of Artificial Sequence: Synthetic oligonucleotide
ccauguuagcaaggaagga

SEQ ID NO: 1295930 - RNA, 19 nt, Artificial Sequence
  Description of Artificial Sequence: Synthetic oligonucleotide
ggacuguacuuuguuuugu

SEQ ID NO: 1295931 - RNA, 19 nt, Artificial Sequence
  Description of Artificial Sequence: Synthetic oligonucleotide
gcuaaggggaucagaacuu

SEQ ID NO: 1295932 - RNA, 19 nt, Artificial Sequence
  Description of Artificial Sequence: Synthetic oligonucleotide
ggaucauggaggugacuuu

SEQ ID NO: 1295933 - RNA, 19 nt, Artificial Sequence
  Description of Artificial Sequence: Synthetic oligonucleotide
ggucuugaguccucuucau

SEQ ID NO: 1295934 - RNA, 19 nt, Artificial Sequence
  Description of Artificial Sequence: Synthetic oligonucleotide
caggguccuucagcccagc

SEQ ID NO: 1295935 - RNA, 19 nt, Artificial Sequence
  Description of Artificial Sequence: Synthetic oligonucleotide
agacugugaucgaggucuu

SEQ ID NO: 1295936 - RNA, 19 nt, Artificial Sequence
  Description of Artificial Sequence: Synthetic oligonucleotide
gaggagccuccucgcuuua

SEQ ID NO: 1295937 - RNA, 19 nt, Artificial Sequence
  Description of Artificial Sequence: Synthetic oligonucleotide
ccaccgacagugcaguacu

SEQ ID NO: 1295938 - RNA, 19 nt, Artificial Sequence
  Description of Artificial Sequence: Synthetic oligonucleotide
cuuggucuaucuggcuccu

SEQ ID NO: 1295939 - RNA, 19 nt, Artificial Sequence
  Description of Artificial Sequence: Synthetic oligonucleotide
cgauucugcccaugggcca

SEQ ID NO: 1295940 - RNA, 19 nt, Artificial Sequence
  Description of Artificial Sequence: Synthetic oligonucleotide
guuggagaucuuggucuau

SEQ ID NO: 1295941 - RNA, 19 nt, Artificial Sequence
  Description of Artificial Sequence: Synthetic oligonucleotide
guagggcacuuaaguauuu

SEQ ID NO: 1295942 - RNA, 19 nt, Artificial Sequence
  Description of Artificial Sequence: Synthetic oligonucleotide
gguuacaaucaaacuuguu

SEQ ID NO: 1295943 - RNA, 19 nt, Artificial Sequence
  Description of Artificial Sequence: Synthetic oligonucleotide
ccgcccugagcggaagccc

SEQ ID NO: 1295944 - RNA, 19 nt, Artificial Sequence
  Description of Artificial Sequence: Synthetic oligonucleotide
ccaccaaaauaccucccau

SEQ ID NO: 1295945 - RNA, 19 nt, Artificial Sequence
  Description of Artificial Sequence: Synthetic oligonucleotide
cccugagcggaagcccgcc

SEQ ID NO: 1295946 - RNA, 19 nt, Artificial Sequence
  Description of Artificial Sequence: Synthetic oligonucleotide
gaaaacccgcuggcuucau

SEQ ID NO: 1295947 - RNA, 19 nt, Artificial Sequence
  Description of Artificial Sequence: Synthetic oligonucleotide
ccuccucgcuuuaggucga

SEQ ID NO: 1295948 - RNA, 19 nt, Artificial Sequence
  Description of Artificial Sequence: Synthetic oligonucleotide
gccgccacgcuugcugguc

SEQ ID NO: 1295949 - RNA, 19 nt, Artificial Sequence
  Description of Artificial Sequence: Synthetic oligonucleotide
cugagacgauucugcccau

SEQ ID NO: 1295950 - RNA, 19 nt, Artificial Sequence
  Description of Artificial Sequence: Synthetic oligonucleotide
cucuggcgcuucacuacuu

SEQ ID NO: 1295951 - RNA, 19 nt, Artificial Sequence
  Description of Artificial Sequence: Synthetic oligonucleotide
gccacgcuugcuggucuuc

SEQ ID NO: 1295952 - RNA, 19 nt, Artificial Sequence
  Description of Artificial Sequence: Synthetic oligonucleotide
ccacucccaggucaucaua

SEQ ID NO: 1295953 - RNA, 19 nt, Artificial Sequence
  Description of Artificial Sequence: Synthetic oligonucleotide
cuccgcucucgcucauaau

SEQ ID NO: 1295954 - RNA, 19 nt, Artificial Sequence
  Description of Artificial Sequence: Synthetic oligonucleotide
caccgacagugcaguacuu

SEQ ID NO: 1295955 - RNA, 19 nt, Artificial Sequence
  Description of Artificial Sequence: Synthetic oligonucleotide
cgccgcggugcccacccuc

SEQ ID NO: 1295956 - RNA, 19 nt, Artificial Sequence
  Description of Artificial Sequence: Synthetic oligonucleotide
cagcucguguaaggaucau

SEQ ID NO: 1295957 - RNA, 19 nt, Artificial Sequence
  Description of Artificial Sequence: Synthetic oligonucleotide
ccggccuucugagacgauu

SEQ ID NO: 1295958 - RNA, 19 nt, Artificial Sequence
  Description of Artificial Sequence: Synthetic oligonucleotide
ccacuuuaguagggcacuu

SEQ ID NO: 1295959 - RNA, 19 nt, Artificial Sequence
  Description of Artificial Sequence: Synthetic oligonucleotide
ccgccacgcuugcuggucu

SEQ ID NO: 1295960 - RNA, 19 nt, Artificial Sequence
  Description of Artificial Sequence: Synthetic oligonucleotide
cuccucgcuuuaggucgau

SEQ ID NO: 1295961 - RNA, 19 nt, Artificial Sequence
  Description of Artificial Sequence: Synthetic oligonucleotide
cacugggaacaggguccuu

SEQ ID NO: 1295962 - RNA, 19 nt, Artificial Sequence
  Description of Artificial Sequence: Synthetic oligonucleotide
cgcggagcccagccgcccu

SEQ ID NO: 1295963 - RNA, 19 nt, Artificial Sequence
  Description of Artificial Sequence: Synthetic oligonucleotide
ccguugcaucacccacaau

SEQ ID NO: 1295964 - RNA, 19 nt, Artificial Sequence
  Description of Artificial Sequence: Synthetic oligonucleotide
cgccacgcuugcuggucuu

SEQ ID NO: 1295965 - RNA, 19 nt, Artificial Sequence
  Description of Artificial Sequence: Synthetic oligonucleotide
gccggccuucugagacgau

SEQ ID NO: 1295966 - RNA, 19 nt, Artificial Sequence
  Description of Artificial Sequence: Synthetic oligonucleotide
uauuugaugagcaagcuug

SEQ ID NO: 1295967 - RNA, 19 nt, Artificial Sequence
  Description of Artificial Sequence: Synthetic oligonucleotide
uuagauauuugccaguugc

SEQ ID NO: 1295968 - RNA, 19 nt, Artificial Sequence
  Description of Artificial Sequence: Synthetic oligonucleotide
aauaugaugaacuuugcuu

SEQ ID NO: 1295969 - RNA, 19 nt, Artificial Sequence
  Description of Artificial Sequence: Synthetic oligonucleotide
caaaucauacacauggugg

SEQ ID NO: 1295970 - RNA, 19 nt, Artificial Sequence
  Description of Artificial Sequence: Synthetic oligonucleotide
auuuguacaucccagacug

SEQ ID NO: 1295971 - RNA, 19 nt, Artificial Sequence
  Description of Artificial Sequence: Synthetic oligonucleotide
uuuucagguaaucuaagcc

SEQ ID NO: 1295972 - RNA, 19 nt, Artificial Sequence
  Description of Artificial Sequence: Synthetic oligonucleotide
ucuauaacaacagcuaggg

SEQ ID NO: 1295973 - RNA, 19 nt, Artificial Sequence
  Description of Artificial Sequence: Synthetic oligonucleotide
agaguaaauucacuugugc

SEQ ID NO: 1295974 - RNA, 19 nt, Artificial Sequence
  Description of Artificial Sequence: Synthetic oligonucleotide
uucuuuacgaagauaucgg

SEQ ID NO: 1295975 - RNA, 19 nt, Artificial Sequence
  Description of Artificial Sequence: Synthetic oligonucleotide
cucgaauucucuaacaacc

SEQ ID NO: 1295976 - RNA, 19 nt, Artificial Sequence
  Description of Artificial Sequence: Synthetic oligonucleotide
acuuaagcuguacugaauc

SEQ ID NO: 1295977 - RNA, 19 nt, Artificial Sequence
  Description of Artificial Sequence: Synthetic oligonucleotide
uguuguauacagcagggca

SEQ ID NO: 1295978 - RNA, 19 nt, Artificial Sequence
  Description of Artificial Sequence: Synthetic oligonucleotide
uuucagguaaucuaagcca

SEQ ID NO: 1295979 - RNA, 19 nt, Artificial Sequence
  Description of Artificial Sequence: Synthetic oligonucleotide
aauucacuugugcaaauca

SEQ ID NO: 1295980 - RNA, 19 nt, Artificial Sequence
  Description of Artificial Sequence: Synthetic oligonucleotide
ucuauugaccuggauaugg

SEQ ID NO: 1295981 - RNA, 19 nt, Artificial Sequence
  Description of Artificial Sequence: Synthetic oligonucleotide
gaacucaugaucuccuugg

SEQ ID NO: 1295982 - RNA, 19 nt, Artificial Sequence
  Description of Artificial Sequence: Synthetic oligonucleotide
aaagcuauguucuuaucaa

SEQ ID NO: 1295983 - RNA, 19 nt, Artificial Sequence
  Description of Artificial Sequence: Synthetic oligonucleotide
cuucuuuacgaagauaucg

SEQ ID NO: 1295984 - RNA, 19 nt, Artificial Sequence
  Description of Artificial Sequence: Synthetic oligonucleotide
ucugauaugcuucuugggu

SEQ ID NO: 1295985 - RNA, 19 nt, Artificial Sequence
  Description of Artificial Sequence: Synthetic oligonucleotide
uuuacgaagauaucggcaa

SEQ ID NO: 1295986 - RNA, 19 nt, Artificial Sequence
  Description of Artificial Sequence: Synthetic oligonucleotide
ugaguccucaucaagacuc

SEQ ID NO: 1295987 - RNA, 19 nt, Artificial Sequence
  Description of Artificial Sequence: Synthetic oligonucleotide
uacugaaucugcauaagcu

SEQ ID NO: 1295988 - RNA, 19 nt, Artificial Sequence
  Description of Artificial Sequence: Synthetic oligonucleotide
ucuucuauugaccuggaua

SEQ ID NO: 1295989 - RNA, 19 nt, Artificial Sequence
  Description of Artificial Sequence: Synthetic oligonucleotide
aucagaacuaauugaugac

SEQ ID NO: 1295990 - RNA, 19 nt, Artificial Sequence
  Description of Artificial Sequence: Synthetic oligonucleotide
ucgaauucucuaacaaccg

SEQ ID NO: 1295991 - RNA, 19 nt, Artificial Sequence
  Description of Artificial Sequence: Synthetic oligonucleotide
ugauaugcuucuugggugg

SEQ ID NO: 1295992 - RNA, 19 nt, Artificial Sequence
  Description of Artificial Sequence: Synthetic oligonucleotide
aaugccuucuuugagaaaa

SEQ ID NO: 1295993 - RNA, 19 nt, Artificial Sequence
  Description of Artificial Sequence: Synthetic oligonucleotide
uuaauucauucugauaugc

SEQ ID NO: 1295994 - RNA, 19 nt, Artificial Sequence
  Description of Artificial Sequence: Synthetic oligonucleotide
agguugcacaauuucaugg

SEQ ID NO: 1295995 - RNA, 19 nt, Artificial Sequence
  Description of Artificial Sequence: Synthetic oligonucleotide
aguaaauucacuugugcaa

SEQ ID NO: 1295996 - RNA, 19 nt, Artificial Sequence
  Description of Artificial Sequence: Synthetic oligonucleotide
uaagcuguacugaaucugc

SEQ ID NO: 1295997 - RNA, 19 nt, Artificial Sequence
  Description of Artificial Sequence: Synthetic oligonucleotide
uaaucuaagccauauuuau

SEQ ID NO: 1295998 - RNA, 19 nt, Artificial Sequence
  Description of Artificial Sequence: Synthetic oligonucleotide
uacaagaucugguucagga

SEQ ID NO: 1295999 - RNA, 19 nt, Artificial Sequence
  Description of Artificial Sequence: Synthetic oligonucleotide
uuuaauucauucugauaug

SEQ ID NO: 1296000 - RNA, 19 nt, Artificial Sequence
  Description of Artificial Sequence: Synthetic oligonucleotide
uaccucuauaacaacagcu

SEQ ID NO: 1296001 - RNA, 19 nt, Artificial Sequence
  Description of Artificial Sequence: Synthetic oligonucleotide
ucuagaagguucuuuaaau

SEQ ID NO: 1296002 - RNA, 19 nt, Artificial Sequence
  Description of Artificial Sequence: Synthetic oligonucleotide
cuucauuccagccaaugag

SEQ ID NO: 1296003 - RNA, 19 nt, Artificial Sequence
  Description of Artificial Sequence: Synthetic oligonucleotide
caucccaguaucuucaccc

SEQ ID NO: 1296004 - RNA, 19 nt, Artificial Sequence
  Description of Artificial Sequence: Synthetic oligonucleotide
uuggcuaccucuauaacaa

SEQ ID NO: 1296005 - RNA, 19 nt, Artificial Sequence
  Description of Artificial Sequence: Synthetic oligonucleotide
gaacuaauugaugacuucc

SEQ ID NO: 1296006 - RNA, 19 nt, Artificial Sequence
  Description of Artificial Sequence: Synthetic oligonucleotide
uccagccguaacaaaaggg

SEQ ID NO: 1296007 - RNA, 19 nt, Artificial Sequence
  Description of Artificial Sequence: Synthetic oligonucleotide
uuucaucccaguaucuuca

SEQ ID NO: 1296008 - RNA, 19 nt, Artificial Sequence
  Description of Artificial Sequence: Synthetic oligonucleotide
uuaacacauccacaaacac

SEQ ID NO: 1296009 - RNA, 19 nt, Artificial Sequence
  Description of Artificial Sequence: Synthetic oligonucleotide
uagguuggcacaucguggg

SEQ ID NO: 1296010 - RNA, 19 nt, Artificial Sequence
  Description of Artificial Sequence: Synthetic oligonucleotide
acuucauacaaauuugcau

SEQ ID NO: 1296011 - RNA, 19 nt, Artificial Sequence
  Description of Artificial Sequence: Synthetic oligonucleotide
uugaugagcaagcuuggca

SEQ ID NO: 1296012 - RNA, 19 nt, Artificial Sequence
  Description of Artificial Sequence: Synthetic oligonucleotide
acaucgugggcucaucucg

SEQ ID NO: 1296013 - RNA, 19 nt, Artificial Sequence
  Description of Artificial Sequence: Synthetic oligonucleotide
ucagaaugccuucuuugag

SEQ ID NO: 1296014 - RNA, 19 nt, Artificial Sequence
  Description of Artificial Sequence: Synthetic oligonucleotide
auggguguuguauacagca

SEQ ID NO: 1296015 - RNA, 19 nt, Artificial Sequence
  Description of Artificial Sequence: Synthetic oligonucleotide
uucauuccagccaaugaga

SEQ ID NO: 1296016 - RNA, 19 nt, Artificial Sequence
  Description of Artificial Sequence: Synthetic oligonucleotide
uccuuuacuggacucggag

SEQ ID NO: 1296017 - RNA, 19 nt, Artificial Sequence
  Description of Artificial Sequence: Synthetic oligonucleotide
uaauugaugacuuccucau

SEQ ID NO: 1296018 - RNA, 19 nt, Artificial Sequence
  Description of Artificial Sequence: Synthetic oligonucleotide
ucuuuacgaagauaucggc

SEQ ID NO: 1296019 - RNA, 19 nt, Artificial Sequence
  Description of Artificial Sequence: Synthetic oligonucleotide
uagauauuugccaguugcc

SEQ ID NO: 1296020 - RNA, 19 nt, Artificial Sequence
  Description of Artificial Sequence: Synthetic oligonucleotide
cuagguuggcacaucgugg

SEQ ID NO: 1296021 - RNA, 19 nt, Artificial Sequence
  Description of Artificial Sequence: Synthetic oligonucleotide
aagagcgcuccacacuuuc

SEQ ID NO: 1296022 - RNA, 19 nt, Artificial Sequence
  Description of Artificial Sequence: Synthetic oligonucleotide
aaucuuuaauucauucuga

SEQ ID NO: 1296023 - RNA, 19 nt, Artificial Sequence
  Description of Artificial Sequence: Synthetic oligonucleotide
ugcuuuucaucccaguauc

SEQ ID NO: 1296024 - RNA, 19 nt, Artificial Sequence
  Description of Artificial Sequence: Synthetic oligonucleotide
uuuucaucccaguaucuuc

SEQ ID NO: 1296025 - RNA, 19 nt, Artificial Sequence
  Description of Artificial Sequence: Synthetic oligonucleotide
uuugauguauguggaauac

SEQ ID NO: 1296026 - RNA, 19 nt, Artificial Sequence
  Description of Artificial Sequence: Synthetic oligonucleotide
cugauaugcuucuugggug

SEQ ID NO: 1296027 - RNA, 19 nt, Artificial Sequence
  Description of Artificial Sequence: Synthetic oligonucleotide
ucccaaguugccuggaugc

SEQ ID NO: 1296028 - RNA, 19 nt, Artificial Sequence
  Description of Artificial Sequence: Synthetic oligonucleotide
ugaggcagguaguacaaga

SEQ ID NO: 1296029 - RNA, 19 nt, Artificial Sequence
  Description of Artificial Sequence: Synthetic oligonucleotide
uugcacaauuucauggugu

SEQ ID NO: 1296030 - RNA, 19 nt, Artificial Sequence
  Description of Artificial Sequence: Synthetic oligonucleotide
ucuaacaaccgcagcaaau

SEQ ID NO: 1296031 - RNA, 19 nt, Artificial Sequence
  Description of Artificial Sequence: Synthetic oligonucleotide
ggcaauaugaugaacuuug

SEQ ID NO: 1296032 - RNA, 19 nt, Artificial Sequence
  Description of Artificial Sequence: Synthetic oligonucleotide
gaagguucuuuaaauaguc

SEQ ID NO: 1296033 - RNA, 19 nt, Artificial Sequence
  Description of Artificial Sequence: Synthetic oligonucleotide
aaucaauaugcaaaaguuu

SEQ ID NO: 1296034 - RNA, 19 nt, Artificial Sequence
  Description of Artificial Sequence: Synthetic oligonucleotide
guuggcuaccucuauaaca

SEQ ID NO: 1296035 - RNA, 19 nt, Artificial Sequence
  Description of Artificial Sequence: Synthetic oligonucleotide
aucaauaugcaaaaguuuu

SEQ ID NO: 1296036 - RNA, 19 nt, Artificial Sequence
  Description of Artificial Sequence: Synthetic oligonucleotide
uucacuugugcaaaucaua

SEQ ID NO: 1296037 - RNA, 19 nt, Artificial Sequence
  Description of Artificial Sequence: Synthetic oligonucleotide
acccuguuuaucuuccauc

SEQ ID NO: 1296038 - RNA, 19 nt, Artificial Sequence
  Description of Artificial Sequence: Synthetic oligonucleotide
aacuucauacaaauuugca

SEQ ID NO: 1296039 - RNA, 19 nt, Artificial Sequence
  Description of Artificial Sequence: Synthetic oligonucleotide
aucccgguugagcucauac

SEQ ID NO: 1296040 - RNA, 19 nt, Artificial Sequence
  Description of Artificial Sequence: Synthetic oligonucleotide
cuauugaccuggauauggc

SEQ ID NO: 1296041 - RNA, 19 nt, Artificial Sequence
  Description of Artificial Sequence: Synthetic oligonucleotide
guugccuggaugcaugggc

SEQ ID NO: 1296042 - RNA, 19 nt, Artificial Sequence
  Description of Artificial Sequence: Synthetic oligonucleotide
cuuuacgaagauaucggca

SEQ ID NO: 1296043 - RNA, 19 nt, Artificial Sequence
  Description of Artificial Sequence: Synthetic oligonucleotide
aacuaauugaugacuuccu

SEQ ID NO: 1296044 - RNA, 19 nt, Artificial Sequence
  Description of Artificial Sequence: Synthetic oligonucleotide
gacuuuccgagacagcuuc

SEQ ID NO: 1296045 - RNA, 19 nt, Artificial Sequence
  Description of Artificial Sequence: Synthetic oligonucleotide
cuuggcacacaaucuuucc

SEQ ID NO: 1296046 - RNA, 19 nt, Artificial Sequence
  Description of Artificial Sequence: Synthetic oligonucleotide
agggcaggucaccaagacc

SEQ ID NO: 1296047 - RNA, 19 nt, Artificial Sequence
  Description of Artificial Sequence: Synthetic oligonucleotide
ucuccuuuacuggacucgg

SEQ ID NO: 1296048 - RNA, 19 nt, Artificial Sequence
  Description of Artificial Sequence: Synthetic oligonucleotide
uguacugaaucugcauaag

SEQ ID NO: 1296049 - RNA, 19 nt, Artificial Sequence
  Description of Artificial Sequence: Synthetic oligonucleotide
cuaacaaccgcagcaaauc

SEQ ID NO: 1296050 - RNA, 19 nt, Artificial Sequence
  Description of Artificial Sequence: Synthetic oligonucleotide
uggcauacucuucuauuga

SEQ ID NO: 1296051 - RNA, 19 nt, Artificial Sequence
  Description of Artificial Sequence: Synthetic oligonucleotide
guaguacaagaucugguuc

SEQ ID NO: 1296052 - RNA, 19 nt, Artificial Sequence
  Description of Artificial Sequence: Synthetic oligonucleotide
guccacuuaagcuguacug

SEQ ID NO: 1296053 - RNA, 19 nt, Artificial Sequence
  Description of Artificial Sequence: Synthetic oligonucleotide
ugcacaauuucaugguguc

SEQ ID NO: 1296054 - RNA, 19 nt, Artificial Sequence
  Description of Artificial Sequence: Synthetic oligonucleotide
aucucgaauucucuaacaa

SEQ ID NO: 1296055 - RNA, 19 nt, Artificial Sequence
  Description of Artificial Sequence: Synthetic oligonucleotide
gaggaugaaagagcgcucc

SEQ ID NO: 1296056 - RNA, 19 nt, Artificial Sequence
  Description of Artificial Sequence: Synthetic oligonucleotide
uggguguuguauacagcag

SEQ ID NO: 1296057 - RNA, 19 nt, Artificial Sequence
  Description of Artificial Sequence: Synthetic oligonucleotide
aucauacacaugguggcuc

SEQ ID NO: 1296058 - RNA, 19 nt, Artificial Sequence
  Description of Artificial Sequence: Synthetic oligonucleotide
cauaagcuucugaaaguug

SEQ ID NO: 1296059 - RNA, 19 nt, Artificial Sequence
  Description of Artificial Sequence: Synthetic oligonucleotide
uuuagcagauagugcuuca

SEQ ID NO: 1296060 - RNA, 19 nt, Artificial Sequence
  Description of Artificial Sequence: Synthetic oligonucleotide
aagcuauguucuuaucaaa

SEQ ID NO: 1296061 - RNA, 19 nt, Artificial Sequence
  Description of Artificial Sequence: Synthetic oligonucleotide
acgaagauaucggcaauuc

SEQ ID NO: 1296062 - RNA, 19 nt, Artificial Sequence
  Description of Artificial Sequence: Synthetic oligonucleotide
uauggccccuucuuuacga

SEQ ID NO: 1296063 - RNA, 19 nt, Artificial Sequence
  Description of Artificial Sequence: Synthetic oligonucleotide
gcaaaucauacacauggug

SEQ ID NO: 1296064 - RNA, 19 nt, Artificial Sequence
  Description of Artificial Sequence: Synthetic oligonucleotide
ggaguuuucccuccagccg

SEQ ID NO: 1296065 - RNA, 19 nt, Artificial Sequence
  Description of Artificial Sequence: Synthetic oligonucleotide
auaucggcaauucuuuguu

SEQ ID NO: 1296066 - RNA, 19 nt, Artificial Sequence
  Description of Artificial Sequence: Synthetic oligonucleotide
auaacaacagcuagggcau

SEQ ID NO: 1296067 - RNA, 19 nt, Artificial Sequence
  Description of Artificial Sequence: Synthetic oligonucleotide
agauaucggcaauucuuug

SEQ ID NO: 1296068 - RNA, 19 nt, Artificial Sequence
  Description of Artificial Sequence: Synthetic oligonucleotide
cuucuauugaccuggauau

SEQ ID NO: 1296069 - RNA, 19 nt, Artificial Sequence
  Description of Artificial Sequence: Synthetic oligonucleotide
cagaguaaauucacuugug

SEQ ID NO: 1296070 - RNA, 19 nt, Artificial Sequence
  Description of Artificial Sequence: Synthetic oligonucleotide
aagaucccgguugagcuca

SEQ ID NO: 1296071 - RNA, 19 nt, Artificial Sequence
  Description of Artificial Sequence: Synthetic oligonucleotide
cuaccucuauaacaacagc

SEQ ID NO: 1296072 - RNA, 19 nt, Artificial Sequence
  Description of Artificial Sequence: Synthetic oligonucleotide
uuggcaauaugaugaacuu

SEQ ID NO: 1296073 - RNA, 19 nt, Artificial Sequence
  Description of Artificial Sequence: Synthetic oligonucleotide
gauaucggcaauucuuugu

SEQ ID NO: 1296074 - RNA, 19 nt, Artificial Sequence
  Description of Artificial Sequence: Synthetic oligonucleotide
cccuguuuaucuuccaucg

SEQ ID NO: 1296075 - RNA, 19 nt, Artificial Sequence
  Description of Artificial Sequence: Synthetic oligonucleotide
aacaaccgcagcaaauccu

SEQ ID NO: 1296076 - RNA, 19 nt, Artificial Sequence
  Description of Artificial Sequence: Synthetic oligonucleotide
caucaagacuccugcuggg

SEQ ID NO: 1296077 - RNA, 19 nt, Artificial Sequence
  Description of Artificial Sequence: Synthetic oligonucleotide
gccauauuuauuugaugag

SEQ ID NO: 1296078 - RNA, 19 nt, Artificial Sequence
  Description of Artificial Sequence: Synthetic oligonucleotide
aacaacagcuagggcaucu

SEQ ID NO: 1296079 - RNA, 19 nt, Artificial Sequence
  Description of Artificial Sequence: Synthetic oligonucleotide
uaucggcaauucuuuguug

SEQ ID NO: 1296080 - RNA, 19 nt, Artificial Sequence
  Description of Artificial Sequence: Synthetic oligonucleotide
ggauauggccuccagccag

SEQ ID NO: 1296081 - RNA, 19 nt, Artificial Sequence
  Description of Artificial Sequence: Synthetic oligonucleotide
acucaugaucuccuuggca

SEQ ID NO: 1296082 - RNA, 19 nt, Artificial Sequence
  Description of Artificial Sequence: Synthetic oligonucleotide
cauuccagccaaugagagc

SEQ ID NO: 1296083 - RNA, 19 nt, Artificial Sequence
  Description of Artificial Sequence: Synthetic oligonucleotide
uugccuggaugcaugggcu

SEQ ID NO: 1296084 - RNA, 19 nt, Artificial Sequence
  Description of Artificial Sequence: Synthetic oligonucleotide
agggcaaaauuuucauacu

SEQ ID NO: 1296085 - RNA, 19 nt, Artificial Sequence
  Description of Artificial Sequence: Synthetic oligonucleotide
ucccggaaaucaauaugca

SEQ ID NO: 1296086 - RNA, 19 nt, Artificial Sequence
  Description of Artificial Sequence: Synthetic oligonucleotide
gaagauaucggcaauucuu

SEQ ID NO: 1296087 - RNA, 19 nt, Artificial Sequence
  Description of Artificial Sequence: Synthetic oligonucleotide
uggauauggccuccagcca

SEQ ID NO: 1296088 - RNA, 19 nt, Artificial Sequence
  Description of Artificial Sequence: Synthetic oligonucleotide
ucucuaacaaccgcagcaa

SEQ ID NO: 1296089 - RNA, 19 nt, Artificial Sequence
  Description of Artificial Sequence: Synthetic oligonucleotide
gguaaucuaagccauauuu

SEQ ID NO: 1296090 - RNA, 19 nt, Artificial Sequence
  Description of Artificial Sequence: Synthetic oligonucleotide
uugauguauguggaauaca

SEQ ID NO: 1296091 - RNA, 19 nt, Artificial Sequence
  Description of Artificial Sequence: Synthetic oligonucleotide
cagaaugccuucuuugaga

SEQ ID NO: 1296092 - RNA, 19 nt, Artificial Sequence
  Description of Artificial Sequence: Synthetic oligonucleotide
uacagcagggcaucauuaa

SEQ ID NO: 1296093 - RNA, 19 nt, Artificial Sequence
  Description of Artificial Sequence: Synthetic oligonucleotide
cauggguguuguauacagc

SEQ ID NO: 1296094 - RNA, 19 nt, Artificial Sequence
  Description of Artificial Sequence: Synthetic oligonucleotide
gcuagguuggcacaucgug

SEQ ID NO: 1296095 - RNA, 19 nt, Artificial Sequence
  Description of Artificial Sequence: Synthetic oligonucleotide
cucuccuuuacuggacucg

SEQ ID NO: 1296096 - RNA, 19 nt, Artificial Sequence
  Description of Artificial Sequence: Synthetic oligonucleotide
agccuguacugagggaucc

SEQ ID NO: 1296097 - RNA, 19 nt, Artificial Sequence
  Description of Artificial Sequence: Synthetic oligonucleotide
uugccuuuucagguaaucu

SEQ ID NO: 1296098 - RNA, 19 nt, Artificial Sequence
  Description of Artificial Sequence: Synthetic oligonucleotide
gcauggguguuguauacag

SEQ ID NO: 1296099 - RNA, 19 nt, Artificial Sequence
  Description of Artificial Sequence: Synthetic oligonucleotide
agccuuugacccaagagga

SEQ ID NO: 1296100 - RNA, 19 nt, Artificial Sequence
  Description of Artificial Sequence: Synthetic oligonucleotide
acaaccgcagcaaauccug

SEQ ID NO: 1296101 - RNA, 19 nt, Artificial Sequence
  Description of Artificial Sequence: Synthetic oligonucleotide
uuacgaagauaucggcaau

SEQ ID NO: 1296102 - RNA, 19 nt, Artificial Sequence
  Description of Artificial Sequence: Synthetic oligonucleotide
cuucauggugucauuggca

SEQ ID NO: 1296103 - RNA, 19 nt, Artificial Sequence
  Description of Artificial Sequence: Synthetic oligonucleotide
acugcauggguguuguaua

SEQ ID NO: 1296104 - RNA, 19 nt, Artificial Sequence
  Description of Artificial Sequence: Synthetic oligonucleotide
agguuggcacaucgugggc

SEQ ID NO: 1296105 - RNA, 19 nt, Artificial Sequence
  Description of Artificial Sequence: Synthetic oligonucleotide
cagguugcacaauuucaug

SEQ ID NO: 1296106 - RNA, 19 nt, Artificial Sequence
  Description of Artificial Sequence: Synthetic oligonucleotide
cuccagccguaacaaaagg

SEQ ID NO: 1296107 - RNA, 19 nt, Artificial Sequence
  Description of Artificial Sequence: Synthetic oligonucleotide
cuuuacuggacucggagcu

SEQ ID NO: 1296108 - RNA, 19 nt, Artificial Sequence
  Description of Artificial Sequence: Synthetic oligonucleotide
caaucacaggcuucccaag

SEQ ID NO: 1296109 - RNA, 19 nt, Artificial Sequence
  Description of Artificial Sequence: Synthetic oligonucleotide
gcuaccucuauaacaacag

SEQ ID NO: 1296110 - RNA, 19 nt, Artificial Sequence
  Description of Artificial Sequence: Synthetic oligonucleotide
uugagaucauccugccccu

SEQ ID NO: 1296111 - RNA, 19 nt, Artificial Sequence
  Description of Artificial Sequence: Synthetic oligonucleotide
guaaucuaagccauauuua

SEQ ID NO: 1296112 - RNA, 19 nt, Artificial Sequence
  Description of Artificial Sequence: Synthetic oligonucleotide
aagacuccugcuggggcag

SEQ ID NO: 1296113 - RNA, 19 nt, Artificial Sequence
  Description of Artificial Sequence: Synthetic oligonucleotide
ugguaucaggaauccagau

SEQ ID NO: 1296114 - RNA, 19 nt, Artificial Sequence
  Description of Artificial Sequence: Synthetic oligonucleotide
uuacuggacucggagcuga

SEQ ID NO: 1296115 - RNA, 19 nt, Artificial Sequence
  Description of Artificial Sequence: Synthetic oligonucleotide
cuuugauguauguggaaua

SEQ ID NO: 1296116 - RNA, 19 nt, Artificial Sequence
  Description of Artificial Sequence: Synthetic oligonucleotide
ugucuaggaucaaguugca

SEQ ID NO: 1296117 - RNA, 19 nt, Artificial Sequence
  Description of Artificial Sequence: Synthetic oligonucleotide
ucauuggcaugguuggcua

SEQ ID NO: 1296118 - RNA, 19 nt, Artificial Sequence
  Description of Artificial Sequence: Synthetic oligonucleotide
ccucuauaacaacagcuag

SEQ ID NO: 1296119 - RNA, 19 nt, Artificial Sequence
  Description of Artificial Sequence: Synthetic oligonucleotide
cuggaauucugccauccca

SEQ ID NO: 1296120 - RNA, 19 nt, Artificial Sequence
  Description of Artificial Sequence: Synthetic oligonucleotide
ucauggugucauuggcaug

SEQ ID NO: 1296121 - RNA, 19 nt, Artificial Sequence
  Description of Artificial Sequence: Synthetic oligonucleotide
gaaagagcgcuccacacuu

SEQ ID NO: 1296122 - RNA, 19 nt, Artificial Sequence
  Description of Artificial Sequence: Synthetic oligonucleotide
ucccgguugagcucauaca

SEQ ID NO: 1296123 - RNA, 19 nt, Artificial Sequence
  Description of Artificial Sequence: Synthetic oligonucleotide
cugcauggguguuguauac

SEQ ID NO: 1296124 - RNA, 19 nt, Artificial Sequence
  Description of Artificial Sequence: Synthetic oligonucleotide
caggucaccaagaccaaga

SEQ ID NO: 1296125 - RNA, 19 nt, Artificial Sequence
  Description of Artificial Sequence: Synthetic oligonucleotide
uggagcgucauagggcucu

SEQ ID NO: 1296126 - RNA, 19 nt, Artificial Sequence
  Description of Artificial Sequence: Synthetic oligonucleotide
ucagguaaucuaagccaua

SEQ ID NO: 1296127 - RNA, 19 nt, Artificial Sequence
  Description of Artificial Sequence: Synthetic oligonucleotide
accucuauaacaacagcua

SEQ ID NO: 1296128 - RNA, 19 nt, Artificial Sequence
  Description of Artificial Sequence: Synthetic oligonucleotide
caaugagagcauguuguuc

SEQ ID NO: 1296129 - RNA, 19 nt, Artificial Sequence
  Description of Artificial Sequence: Synthetic oligonucleotide
uucuauugaccuggauaug

SEQ ID NO: 1296130 - RNA, 19 nt, Artificial Sequence
  Description of Artificial Sequence: Synthetic oligonucleotide
uggccccuucuuuacgaag

SEQ ID NO: 1296131 - RNA, 19 nt, Artificial Sequence
  Description of Artificial Sequence: Synthetic oligonucleotide
ggcauacucuucuauugac

SEQ ID NO: 1296132 - RNA, 19 nt, Artificial Sequence
  Description of Artificial Sequence: Synthetic oligonucleotide
caucucgaauucucuaaca

SEQ ID NO: 1296133 - RNA, 19 nt, Artificial Sequence
  Description of Artificial Sequence: Synthetic oligonucleotide
cagauagugcuucagggcu

SEQ ID NO: 1296134 - RNA, 19 nt, Artificial Sequence
  Description of Artificial Sequence: Synthetic oligonucleotide
auucacuugugcaaaucau

SEQ ID NO: 1296135 - RNA, 19 nt, Artificial Sequence
  Description of Artificial Sequence: Synthetic oligonucleotide
ugacuuuccgagacagcuu

SEQ ID NO: 1296136 - RNA, 19 nt, Artificial Sequence
  Description of Artificial Sequence: Synthetic oligonucleotide
uacgaagauaucggcaauu

SEQ ID NO: 1296137 - RNA, 19 nt, Artificial Sequence
  Description of Artificial Sequence: Synthetic oligonucleotide
ccgguccucaaucacaggc

SEQ ID NO: 1296138 - RNA, 19 nt, Artificial Sequence
  Description of Artificial Sequence: Synthetic oligonucleotide
acaucccagacugcauggg

SEQ ID NO: 1296139 - RNA, 19 nt, Artificial Sequence
  Description of Artificial Sequence: Synthetic oligonucleotide
ugcauggguguuguauaca

SEQ ID NO: 1296140 - RNA, 19 nt, Artificial Sequence
  Description of Artificial Sequence: Synthetic oligonucleotide
aggauccgguccucaauca

SEQ ID NO: 1296141 - RNA, 19 nt, Artificial Sequence
  Description of Artificial Sequence: Synthetic oligonucleotide
cuuaagcuguacugaaucu

SEQ ID NO: 1296142 - RNA, 19 nt, Artificial Sequence
  Description of Artificial Sequence: Synthetic oligonucleotide
cacaucgugggcucaucuc

SEQ ID NO: 1296143 - RNA, 19 nt, Artificial Sequence
  Description of Artificial Sequence: Synthetic oligonucleotide
aggucaccaagaccaagau

SEQ ID NO: 1296144 - RNA, 19 nt, Artificial Sequence
  Description of Artificial Sequence: Synthetic oligonucleotide
auagggcucuucaacuuca

SEQ ID NO: 1296145 - RNA, 19 nt, Artificial Sequence
  Description of Artificial Sequence: Synthetic oligonucleotide
guacaagaucugguucagg

SEQ ID NO: 1296146 - RNA, 19 nt, Artificial Sequence
  Description of Artificial Sequence: Synthetic oligonucleotide
caagacuccugcuggggca

SEQ ID NO: 1296147 - RNA, 19 nt, Artificial Sequence
  Description of Artificial Sequence: Synthetic oligonucleotide
ucgggucuggcucuccuuu

SEQ ID NO: 1296148 - RNA, 19 nt, Artificial Sequence
  Description of Artificial Sequence: Synthetic oligonucleotide
uggcaauaugaugaacuuu

SEQ ID NO: 1296149 - RNA, 19 nt, Artificial Sequence
  Description of Artificial Sequence: Synthetic oligonucleotide
gcauacucuucuauugacc

SEQ ID NO: 1296150 - RNA, 19 nt, Artificial Sequence
  Description of Artificial Sequence: Synthetic oligonucleotide
cauuggcaugguuggcuac

SEQ ID NO: 1296151 - RNA, 19 nt, Artificial Sequence
  Description of Artificial Sequence: Synthetic oligonucleotide
agggauccucugaacuggc

SEQ ID NO: 1296152 - RNA, 19 nt, Artificial Sequence
  Description of Artificial Sequence: Synthetic oligonucleotide
caccaagaccaagauugag

SEQ ID NO: 1296153 - RNA, 19 nt, Artificial Sequence
  Description of Artificial Sequence: Synthetic oligonucleotide
accuggauauggccuccag

SEQ ID NO: 1296154 - RNA, 19 nt, Artificial Sequence
  Description of Artificial Sequence: Synthetic oligonucleotide
cuucggugucccagaacug

SEQ ID NO: 1296155 - RNA, 19 nt, Artificial Sequence
  Description of Artificial Sequence: Synthetic oligonucleotide
cuuugacccaagaggacua

SEQ ID NO: 1296156 - RNA, 19 nt, Artificial Sequence
  Description of Artificial Sequence: Synthetic oligonucleotide
agccguaacaaaagggcaa

SEQ ID NO: 1296157 - RNA, 19 nt, Artificial Sequence
  Description of Artificial Sequence: Synthetic oligonucleotide
agguaaucuaagccauauu

SEQ ID NO: 1296158 - RNA, 19 nt, Artificial Sequence
  Description of Artificial Sequence: Synthetic oligonucleotide
augguuggcuaccucuaua

SEQ ID NO: 1296159 - RNA, 19 nt, Artificial Sequence
  Description of Artificial Sequence: Synthetic oligonucleotide
gagcaagcuuggcacacaa

SEQ ID NO: 1296160 - RNA, 19 nt, Artificial Sequence
  Description of Artificial Sequence: Synthetic oligonucleotide
uccucugaacuggcuuuag

SEQ ID NO: 1296161 - RNA, 19 nt, Artificial Sequence
  Description of Artificial Sequence: Synthetic oligonucleotide
gguaguacaagaucugguu

SEQ ID NO: 1296162 - RNA, 19 nt, Artificial Sequence
  Description of Artificial Sequence: Synthetic oligonucleotide
ccuguuuaucuuccaucgg

SEQ ID NO: 1296163 - RNA, 19 nt, Artificial Sequence
  Description of Artificial Sequence: Synthetic oligonucleotide
uggcuaccucuauaacaac

SEQ ID NO: 1296164 - RNA, 19 nt, Artificial Sequence
  Description of Artificial Sequence: Synthetic oligonucleotide
gacccaagaggacuaacuu

SEQ ID NO: 1296165 - RNA, 19 nt, Artificial Sequence
  Description of Artificial Sequence: Synthetic oligonucleotide
cagaacuaauugaugacuu

SEQ ID NO: 1296166 - RNA, 19 nt, Artificial Sequence
  Description of Artificial Sequence: Synthetic oligonucleotide
gugaucuacagagucuucu

SEQ ID NO: 1296167 - RNA, 19 nt, Artificial Sequence
  Description of Artificial Sequence: Synthetic oligonucleotide
gcaauaugaugaacuuugc

SEQ ID NO: 1296168 - RNA, 19 nt, Artificial Sequence
  Description of Artificial Sequence: Synthetic oligonucleotide
caacucuggaguuuucccu

SEQ ID NO: 1296169 - RNA, 19 nt, Artificial Sequence
  Description of Artificial Sequence: Synthetic oligonucleotide
ggucagaguaaauucacuu

SEQ ID NO: 1296170 - RNA, 19 nt, Artificial Sequence
  Description of Artificial Sequence: Synthetic oligonucleotide
ucggagcugacaucaucuu

SEQ ID NO: 1296171 - RNA, 19 nt, Artificial Sequence
  Description of Artificial Sequence: Synthetic oligonucleotide
caugguggcucugguauca

SEQ ID NO: 1296172 - RNA, 19 nt, Artificial Sequence
  Description of Artificial Sequence: Synthetic oligonucleotide
gacugcauggguguuguau

SEQ ID NO: 1296173 - RNA, 19 nt, Artificial Sequence
  Description of Artificial Sequence: Synthetic oligonucleotide
ggcuaccucuauaacaaca

SEQ ID NO: 1296174 - RNA, 19 nt, Artificial Sequence
  Description of Artificial Sequence: Synthetic oligonucleotide
auauggccuccagccaguc

SEQ ID NO: 1296175 - RNA, 19 nt, Artificial Sequence
  Description of Artificial Sequence: Synthetic oligonucleotide
gaccaagauugagaucauc

SEQ ID NO: 1296176 - RNA, 19 nt, Artificial Sequence
  Description of Artificial Sequence: Synthetic oligonucleotide
gccaaugagagcauguugu

SEQ ID NO: 1296177 - RNA, 19 nt, Artificial Sequence
  Description of Artificial Sequence: Synthetic oligonucleotide
agcagccuguacugaggga

SEQ ID NO: 1296178 - RNA, 19 nt, Artificial Sequence
  Description of Artificial Sequence: Synthetic oligonucleotide
gguuggcuaccucuauaac

SEQ ID NO: 1296179 - RNA, 19 nt, Artificial Sequence
  Description of Artificial Sequence: Synthetic oligonucleotide
ggcacacaaucuuuccaca

SEQ ID NO: 1296180 - RNA, 19 nt, Artificial Sequence
  Description of Artificial Sequence: Synthetic oligonucleotide
caucgugggcucaucucga

SEQ ID NO: 1296181 - RNA, 19 nt, Artificial Sequence
  Description of Artificial Sequence: Synthetic oligonucleotide
cccuucuuuacgaagauau

SEQ ID NO: 1296182 - RNA, 19 nt, Artificial Sequence
  Description of Artificial Sequence: Synthetic oligonucleotide
cagccuguacugagggauc

SEQ ID NO: 1296183 - RNA, 19 nt, Artificial Sequence
  Description of Artificial Sequence: Synthetic oligonucleotide
aaaacccgcccagguugca

SEQ ID NO: 1296184 - RNA, 19 nt, Artificial Sequence
  Description of Artificial Sequence: Synthetic oligonucleotide
ccgguugagcucauacagc

SEQ ID NO: 1296185 - RNA, 19 nt, Artificial Sequence
  Description of Artificial Sequence: Synthetic oligonucleotide
ggauccgguccucaaucac

SEQ ID NO: 1296186 - RNA, 19 nt, Artificial Sequence
  Description of Artificial Sequence: Synthetic oligonucleotide
ggcaugguuggcuaccucu

SEQ ID NO: 1296187 - RNA, 19 nt, Artificial Sequence
  Description of Artificial Sequence: Synthetic oligonucleotide
gcgcuccacacuuucaauc

SEQ ID NO: 1296188 - RNA, 19 nt, Artificial Sequence
  Description of Artificial Sequence: Synthetic oligonucleotide
agggcuagguuggcacauc

SEQ ID NO: 1296189 - RNA, 19 nt, Artificial Sequence
  Description of Artificial Sequence: Synthetic oligonucleotide
aucccaacucuggaguuuu

SEQ ID NO: 1296190 - RNA, 19 nt, Artificial Sequence
  Description of Artificial Sequence: Synthetic oligonucleotide
ugccuggaugcaugggcua

SEQ ID NO: 1296191 - RNA, 19 nt, Artificial Sequence
  Description of Artificial Sequence: Synthetic oligonucleotide
uuccagccaaugagagcau

SEQ ID NO: 1296192 - RNA, 19 nt, Artificial Sequence
  Description of Artificial Sequence: Synthetic oligonucleotide
aucgugggcucaucucgaa

SEQ ID NO: 1296193 - RNA, 19 nt, Artificial Sequence
  Description of Artificial Sequence: Synthetic oligonucleotide
ccaagaccaagauugagau

SEQ ID NO: 1296194 - RNA, 19 nt, Artificial Sequence
  Description of Artificial Sequence: Synthetic oligonucleotide
gcugcaugacuuuccgaga

SEQ ID NO: 1296195 - RNA, 19 nt, Artificial Sequence
  Description of Artificial Sequence: Synthetic oligonucleotide
ccuucggugucccagaacu

SEQ ID NO: 1296196 - RNA, 19 nt, Artificial Sequence
  Description of Artificial Sequence: Synthetic oligonucleotide
gaggcagguaguacaagau

SEQ ID NO: 1296197 - RNA, 19 nt, Artificial Sequence
  Description of Artificial Sequence: Synthetic oligonucleotide
aaagagcgcuccacacuuu

SEQ ID NO: 1296198 - RNA, 19 nt, Artificial Sequence
  Description of Artificial Sequence: Synthetic oligonucleotide
ggaucaaguugcagcuggc

SEQ ID NO: 1296199 - RNA, 19 nt, Artificial Sequence
  Description of Artificial Sequence: Synthetic oligonucleotide
uaacaacagcuagggcauc

SEQ ID NO: 1296200 - RNA, 19 nt, Artificial Sequence
  Description of Artificial Sequence: Synthetic oligonucleotide
uuggcacaucgugggcuca

SEQ ID NO: 1296201 - RNA, 19 nt, Artificial Sequence
  Description of Artificial Sequence: Synthetic oligonucleotide
cagguaaucuaagccauau

SEQ ID NO: 1296202 - RNA, 19 nt, Artificial Sequence
  Description of Artificial Sequence: Synthetic oligonucleotide
ucccuccagccguaacaaa

SEQ ID NO: 1296203 - RNA, 19 nt, Artificial Sequence
  Description of Artificial Sequence: Synthetic oligonucleotide
ggccccuucuuuacgaaga

SEQ ID NO: 1296204 - RNA, 19 nt, Artificial Sequence
  Description of Artificial Sequence: Synthetic oligonucleotide
caucccagacugcaugggu

SEQ ID NO: 1296205 - RNA, 19 nt, Artificial Sequence
  Description of Artificial Sequence: Synthetic oligonucleotide
gcuagggcaucuugggugu

SEQ ID NO: 1296206 - RNA, 19 nt, Artificial Sequence
  Description of Artificial Sequence: Synthetic oligonucleotide
cccggaaaucaauaugcaa

SEQ ID NO: 1296207 - RNA, 19 nt, Artificial Sequence
  Description of Artificial Sequence: Synthetic oligonucleotide
auggugucauuggcauggu

SEQ ID NO: 1296208 - RNA, 19 nt, Artificial Sequence
  Description of Artificial Sequence: Synthetic oligonucleotide
agucuucuagaagguucuu

SEQ ID NO: 1296209 - RNA, 19 nt, Artificial Sequence
  Description of Artificial Sequence: Synthetic oligonucleotide
uggcacaucgugggcucau

SEQ ID NO: 1296210 - RNA, 19 nt, Artificial Sequence
  Description of Artificial Sequence: Synthetic oligonucleotide
aguugccuuuucagguaau

SEQ ID NO: 1296211 - RNA, 19 nt, Artificial Sequence
  Description of Artificial Sequence: Synthetic oligonucleotide
gccguaacaaaagggcaaa

SEQ ID NO: 1296212 - RNA, 19 nt, Artificial Sequence
  Description of Artificial Sequence: Synthetic oligonucleotide
agaccaagauugagaucau

SEQ ID NO: 1296213 - RNA, 19 nt, Artificial Sequence
  Description of Artificial Sequence: Synthetic oligonucleotide
uccaucgggucuggcucuc

SEQ ID NO: 1296214 - RNA, 19 nt, Artificial Sequence
  Description of Artificial Sequence: Synthetic oligonucleotide
cccuccuucggugucccag

SEQ ID NO: 1296215 - RNA, 19 nt, Artificial Sequence
  Description of Artificial Sequence: Synthetic oligonucleotide
ccagguugcacaauuucau

SEQ ID NO: 1296216 - RNA, 19 nt, Artificial Sequence
  Description of Artificial Sequence: Synthetic oligonucleotide
gguuggcacaucgugggcu

SEQ ID NO: 1296217 - RNA, 19 nt, Artificial Sequence
  Description of Artificial Sequence: Synthetic oligonucleotide
aguuuucccuccagccgua

SEQ ID NO: 1296218 - RNA, 19 nt, Artificial Sequence
  Description of Artificial Sequence: Synthetic oligonucleotide
gcgucauagggcucuucaa

SEQ ID NO: 1296219 - RNA, 19 nt, Artificial Sequence
  Description of Artificial Sequence: Synthetic oligonucleotide
gggugucccugugaucuac

SEQ ID NO: 1296220 - RNA, 19 nt, Artificial Sequence
  Description of Artificial Sequence: Synthetic oligonucleotide
ccuuugacccaagaggacu

SEQ ID NO: 1296221 - RNA, 19 nt, Artificial Sequence
  Description of Artificial Sequence: Synthetic oligonucleotide
gccuggaugcaugggcuac

SEQ ID NO: 1296222 - RNA, 19 nt, Artificial Sequence
  Description of Artificial Sequence: Synthetic oligonucleotide
gaacuggcuuuagcagaua

SEQ ID NO: 1296223 - RNA, 19 nt, Artificial Sequence
  Description of Artificial Sequence: Synthetic oligonucleotide
cggggcugcaugacuuucc

SEQ ID NO: 1296224 - RNA, 19 nt, Artificial Sequence
  Description of Artificial Sequence: Synthetic oligonucleotide
cgguugagcucauacagcu

SEQ ID NO: 1296225 - RNA, 19 nt, Artificial Sequence
  Description of Artificial Sequence: Synthetic oligonucleotide
caggcccugcagugauguc

SEQ ID NO: 1296226 - RNA, 19 nt, Artificial Sequence
  Description of Artificial Sequence: Synthetic oligonucleotide
cagcuagggcaucuugggu

SEQ ID NO: 1296227 - RNA, 19 nt, Artificial Sequence
  Description of Artificial Sequence: Synthetic oligonucleotide
cuucccaaguugccuggau

SEQ ID NO: 1296228 - RNA, 19 nt, Artificial Sequence
  Description of Artificial Sequence: Synthetic oligonucleotide
ccgcacugcuggaauucug

SEQ ID NO: 1296229 - RNA, 19 nt, Artificial Sequence
  Description of Artificial Sequence: Synthetic oligonucleotide
gcacaucgugggcucaucu

SEQ ID NO: 1296230 - RNA, 19 nt, Artificial Sequence
  Description of Artificial Sequence: Synthetic oligonucleotide
gcaugguuggcuaccucua

SEQ ID NO: 1296231 - RNA, 19 nt, Artificial Sequence
  Description of Artificial Sequence: Synthetic oligonucleotide
ccuccuucggugucccaga

SEQ ID NO: 1296232 - RNA, 19 nt, Artificial Sequence
  Description of Artificial Sequence: Synthetic oligonucleotide
cucuucuauugaccuggau

SEQ ID NO: 1296233 - RNA, 19 nt, Artificial Sequence
  Description of Artificial Sequence: Synthetic oligonucleotide
ggguggguuuucuaaccuu

SEQ ID NO: 1296234 - RNA, 19 nt, Artificial Sequence
  Description of Artificial Sequence: Synthetic oligonucleotide
cgaagauaucggcaauucu

SEQ ID NO: 1296235 - RNA, 19 nt, Artificial Sequence
  Description of Artificial Sequence: Synthetic oligonucleotide
ggcacaucgugggcucauc

SEQ ID NO: 1296236 - RNA, 19 nt, Artificial Sequence
  Description of Artificial Sequence: Synthetic oligonucleotide
ggaauccagaugggagccu

SEQ ID NO: 1296237 - RNA, 19 nt, Artificial Sequence
  Description of Artificial Sequence: Synthetic oligonucleotide
gacucggagcugacaucau

SEQ ID NO: 1296238 - RNA, 19 nt, Artificial Sequence
  Description of Artificial Sequence: Synthetic oligonucleotide
ggcuagguuggcacaucgu

SEQ ID NO: 1296239 - RNA, 19 nt, Artificial Sequence
  Description of Artificial Sequence: Synthetic oligonucleotide
agaucccgguugagcucau

SEQ ID NO: 1296240 - RNA, 19 nt, Artificial Sequence
  Description of Artificial Sequence: Synthetic oligonucleotide
ccguaacaaaagggcaaaa

SEQ ID NO: 1296241 - RNA, 19 nt, Artificial Sequence
  Description of Artificial Sequence: Synthetic oligonucleotide
ccgcccagguugcacaauu

SEQ ID NO: 1296242 - RNA, 19 nt, Artificial Sequence
  Description of Artificial Sequence: Synthetic oligonucleotide
ccuccgcacugcuggaauu

SEQ ID NO: 1296243 - RNA, 19 nt, Artificial Sequence
  Description of Artificial Sequence: Synthetic oligonucleotide
ccccuccuucgguguccca

SEQ ID NO: 1296244 - RNA, 19 nt, Artificial Sequence
  Description of Artificial Sequence: Synthetic oligonucleotide
uuaaugaacgcauagccgg

SEQ ID NO: 1296245 - RNA, 19 nt, Artificial Sequence
  Description of Artificial Sequence: Synthetic oligonucleotide
agaacaucaccucagcagc

SEQ ID NO: 1296246 - RNA, 19 nt, Artificial Sequence
  Description of Artificial Sequence: Synthetic oligonucleotide
ucaugacccaaacagaacc

SEQ ID NO: 1296247 - RNA, 19 nt, Artificial Sequence
  Description of Artificial Sequence: Synthetic oligonucleotide
auaucaaaggcuuuccgag

SEQ ID NO: 1296248 - RNA, 19 nt, Artificial Sequence
  Description of Artificial Sequence: Synthetic oligonucleotide
aaaguaagauaggaaaguc

SEQ ID NO: 1296249 - RNA, 19 nt, Artificial Sequence
  Description of Artificial Sequence: Synthetic oligonucleotide
aguucgauccucuggaaac

SEQ ID NO: 1296250 - RNA, 19 nt, Artificial Sequence
  Description of Artificial Sequence: Synthetic oligonucleotide
aaucucaagguccacauuu

SEQ ID NO: 1296251 - RNA, 19 nt, Artificial Sequence
  Description of Artificial Sequence: Synthetic oligonucleotide
uccgcuuccacccaggggc

SEQ ID NO: 1296252 - RNA, 19 nt, Artificial Sequence
  Description of Artificial Sequence: Synthetic oligonucleotide
uggcugaucauaucaaagg

SEQ ID NO: 1296253 - RNA, 19 nt, Artificial Sequence
  Description of Artificial Sequence: Synthetic oligonucleotide
gaugguuagucccagugcc

SEQ ID NO: 1296254 - RNA, 19 nt, Artificial Sequence
  Description of Artificial Sequence: Synthetic oligonucleotide
ucugggaaugcaaaguccc

SEQ ID NO: 1296255 - RNA, 19 nt, Artificial Sequence
  Description of Artificial Sequence: Synthetic oligonucleotide
aucaaucacacugccaucc

SEQ ID NO: 1296256 - RNA, 19 nt, Artificial Sequence
  Description of Artificial Sequence: Synthetic oligonucleotide
ucauaucaaaggcuuuccg

SEQ ID NO: 1296257 - RNA, 19 nt, Artificial Sequence
  Description of Artificial Sequence: Synthetic oligonucleotide
ugccuaagcaggaugcucg

SEQ ID NO: 1296258 - RNA, 19 nt, Artificial Sequence
  Description of Artificial Sequence: Synthetic oligonucleotide
ugaagguacggccucgggg

SEQ ID NO: 1296259 - RNA, 19 nt, Artificial Sequence
  Description of Artificial Sequence: Synthetic oligonucleotide
gugaguuugagggugaagg

SEQ ID NO: 1296260 - RNA, 19 nt, Artificial Sequence
  Description of Artificial Sequence: Synthetic oligonucleotide
uugaugcgcuuaaugaacg

SEQ ID NO: 1296261 - RNA, 19 nt, Artificial Sequence
  Description of Artificial Sequence: Synthetic oligonucleotide
agugacaugccuaagcagg

SEQ ID NO: 1296262 - RNA, 19 nt, Artificial Sequence
  Description of Artificial Sequence: Synthetic oligonucleotide
agaaggggcaauuugccag

SEQ ID NO: 1296263 - RNA, 19 nt, Artificial Sequence
  Description of Artificial Sequence: Synthetic oligonucleotide
aacuucguagugccgacag

SEQ ID NO: 1296264 - RNA, 19 nt, Artificial Sequence
  Description of Artificial Sequence: Synthetic oligonucleotide
gaagguacggccucggggc

SEQ ID NO: 1296265 - RNA, 19 nt, Artificial Sequence
  Description of Artificial Sequence: Synthetic oligonucleotide
aggccguugagugacaugc

SEQ ID NO: 1296266 - RNA, 19 nt, Artificial Sequence
  Description of Artificial Sequence: Synthetic oligonucleotide
uccacauuuaguuccaguc

SEQ ID NO: 1296267 - RNA, 19 nt, Artificial Sequence
  Description of Artificial Sequence: Synthetic oligonucleotide
aguuugagggugaagguac

SEQ ID NO: 1296268 - RNA, 19 nt, Artificial Sequence
  Description of Artificial Sequence: Synthetic oligonucleotide
aaagacgaauucaucuggg

SEQ ID NO: 1296269 - RNA, 19 nt, Artificial Sequence
  Description of Artificial Sequence: Synthetic oligonucleotide
uugagggugcagaacauca

SEQ ID NO: 1296270 - RNA, 19 nt, Artificial Sequence
  Description of Artificial Sequence: Synthetic oligonucleotide
gcuuaaugaacgcauagcc

SEQ ID NO: 1296271 - RNA, 19 nt, Artificial Sequence
  Description of Artificial Sequence: Synthetic oligonucleotide
aucauaucaaaggcuuucc

SEQ ID NO: 1296272 - RNA, 19 nt, Artificial Sequence
  Description of Artificial Sequence: Synthetic oligonucleotide
gucagugaugguuaguccc

SEQ ID NO: 1296273 - RNA, 19 nt, Artificial Sequence
  Description of Artificial Sequence: Synthetic oligonucleotide
uuuauggguguugagggug

SEQ ID NO: 1296274 - RNA, 19 nt, Artificial Sequence
  Description of Artificial Sequence: Synthetic oligonucleotide
ugcgcuuacucuacugagg

SEQ ID NO: 1296275 - RNA, 19 nt, Artificial Sequence
  Description of Artificial Sequence: Synthetic oligonucleotide
ugaugguuagucccagugc

SEQ ID NO: 1296276 - RNA, 19 nt, Artificial Sequence
  Description of Artificial Sequence: Synthetic oligonucleotide
gaugguggaaaguguuggg

SEQ ID NO: 1296277 - RNA, 19 nt, Artificial Sequence
  Description of Artificial Sequence: Synthetic oligonucleotide
aguaagauaggaaagucau

SEQ ID NO: 1296278 - RNA, 19 nt, Artificial Sequence
  Description of Artificial Sequence: Synthetic oligonucleotide
cacuuuauggguguugagg

SEQ ID NO: 1296279 - RNA, 19 nt, Artificial Sequence
  Description of Artificial Sequence: Synthetic oligonucleotide
cucagacuugaauacuucc

SEQ ID NO: 1296280 - RNA, 19 nt, Artificial Sequence
  Description of Artificial Sequence: Synthetic oligonucleotide
cuucguagugccgacagcc

SEQ ID NO: 1296281 - RNA, 19 nt, Artificial Sequence
  Description of Artificial Sequence: Synthetic oligonucleotide
uuuuccgccgccccagucc

SEQ ID NO: 1296282 - RNA, 19 nt, Artificial Sequence
  Description of Artificial Sequence: Synthetic oligonucleotide
cuggcaacuucguagugcc

SEQ ID NO: 1296283 - RNA, 19 nt, Artificial Sequence
  Description of Artificial Sequence: Synthetic oligonucleotide
augugaucaaucacacugc

SEQ ID NO: 1296284 - RNA, 19 nt, Artificial Sequence
  Description of Artificial Sequence: Synthetic oligonucleotide
uaaugaacgcauagccggc

SEQ ID NO: 1296285 - RNA, 19 nt, Artificial Sequence
  Description of Artificial Sequence: Synthetic oligonucleotide
guagcuuucuagcaaguca

SEQ ID NO: 1296286 - RNA, 19 nt, Artificial Sequence
  Description of Artificial Sequence: Synthetic oligonucleotide
ucacccacgcugaugagcu

SEQ ID NO: 1296287 - RNA, 19 nt, Artificial Sequence
  Description of Artificial Sequence: Synthetic oligonucleotide
gaugcucgggucuugucug

SEQ ID NO: 1296288 - RNA, 19 nt, Artificial Sequence
  Description of Artificial Sequence: Synthetic oligonucleotide
ucuacugagguaggugggg

SEQ ID NO: 1296289 - RNA, 19 nt, Artificial Sequence
  Description of Artificial Sequence: Synthetic oligonucleotide
cauaucaaaggcuuuccga

SEQ ID NO: 1296290 - RNA, 19 nt, Artificial Sequence
  Description of Artificial Sequence: Synthetic oligonucleotide
acaugagcaaagaugaagu

SEQ ID NO: 1296291 - RNA, 19 nt, Artificial Sequence
  Description of Artificial Sequence: Synthetic oligonucleotide
ucgauccucuggaaacucg

SEQ ID NO: 1296292 - RNA, 19 nt, Artificial Sequence
  Description of Artificial Sequence: Synthetic oligonucleotide
acggccucggggcagcucc

SEQ ID NO: 1296293 - RNA, 19 nt, Artificial Sequence
  Description of Artificial Sequence: Synthetic oligonucleotide
aacgcuggcugaucauauc

SEQ ID NO: 1296294 - RNA, 19 nt, Artificial Sequence
  Description of Artificial Sequence: Synthetic oligonucleotide
cuuacucuacugagguagg

SEQ ID NO: 1296295 - RNA, 19 nt, Artificial Sequence
  Description of Artificial Sequence: Synthetic oligonucleotide
gacaugccuaagcaggaug

SEQ ID NO: 1296296 - RNA, 19 nt, Artificial Sequence
  Description of Artificial Sequence: Synthetic oligonucleotide
aucccaaccaggcugggca

SEQ ID NO: 1296297 - RNA, 19 nt, Artificial Sequence
  Description of Artificial Sequence: Synthetic oligonucleotide
uugucagugaugguuaguc

SEQ ID NO: 1296298 - RNA, 19 nt, Artificial Sequence
  Description of Artificial Sequence: Synthetic oligonucleotide
gcuuacucuacugagguag

SEQ ID NO: 1296299 - RNA, 19 nt, Artificial Sequence
  Description of Artificial Sequence: Synthetic oligonucleotide
ugaguuugagggugaaggu

SEQ ID NO: 1296300 - RNA, 19 nt, Artificial Sequence
  Description of Artificial Sequence: Synthetic oligonucleotide
gaaggggcaauuugccagc

SEQ ID NO: 1296301 - RNA, 19 nt, Artificial Sequence
  Description of Artificial Sequence: Synthetic oligonucleotide
augguggaaaguguugggg

SEQ ID NO: 1296302 - RNA, 19 nt, Artificial Sequence
  Description of Artificial Sequence: Synthetic oligonucleotide
gcaauuugccagccgaugg

SEQ ID NO: 1296303 - RNA, 19 nt, Artificial Sequence
  Description of Artificial Sequence: Synthetic oligonucleotide
ugaacgcauagccggcucc

SEQ ID NO: 1296304 - RNA, 19 nt, Artificial Sequence
  Description of Artificial Sequence: Synthetic oligonucleotide
aguuccagucuuaguaucg

SEQ ID NO: 1296305 - RNA, 19 nt, Artificial Sequence
  Description of Artificial Sequence: Synthetic oligonucleotide
caugagcagccagaaaugg

SEQ ID NO: 1296306 - RNA, 19 nt, Artificial Sequence
  Description of Artificial Sequence: Synthetic oligonucleotide
ugggacucggccaggagac

SEQ ID NO: 1296307 - RNA, 19 nt, Artificial Sequence
  Description of Artificial Sequence: Synthetic oligonucleotide
uguggggcuaccgugggcc

SEQ ID NO: 1296308 - RNA, 19 nt, Artificial Sequence
  Description of Artificial Sequence: Synthetic oligonucleotide
uguggaauacgaggcgagg

SEQ ID NO: 1296309 - RNA, 19 nt, Artificial Sequence
  Description of Artificial Sequence: Synthetic oligonucleotide
guguugagggugcagaaca

SEQ ID NO: 1296310 - RNA, 19 nt, Artificial Sequence
  Description of Artificial Sequence: Synthetic oligonucleotide
augcgcuuacucuacugag

SEQ ID NO: 1296311 - RNA, 19 nt, Artificial Sequence
  Description of Artificial Sequence: Synthetic oligonucleotide
auaggaaagucaugaccca

SEQ ID NO: 1296312 - RNA, 19 nt, Artificial Sequence
  Description of Artificial Sequence: Synthetic oligonucleotide
auuuaguuccagucuuagu

SEQ ID NO: 1296313 - RNA, 19 nt, Artificial Sequence
  Description of Artificial Sequence: Synthetic oligonucleotide
cucgaugcggccugugggg

SEQ ID NO: 1296314 - RNA, 19 nt, Artificial Sequence
  Description of Artificial Sequence: Synthetic oligonucleotide
cauuuaguuccagucuuag

SEQ ID NO: 1296315 - RNA, 19 nt, Artificial Sequence
  Description of Artificial Sequence: Synthetic oligonucleotide
uacucuacugagguaggug

SEQ ID NO: 1296316 - RNA, 19 nt, Artificial Sequence
  Description of Artificial Sequence: Synthetic oligonucleotide
uggcccauccccaugcgcu

SEQ ID NO: 1296317 - RNA, 19 nt, Artificial Sequence
  Description of Artificial Sequence: Synthetic oligonucleotide
ucagcgaucuugccauaca

SEQ ID NO: 1296318 - RNA, 19 nt, Artificial Sequence
  Description of Artificial Sequence: Synthetic oligonucleotide
gacgaauucaucugggaau

SEQ ID NO: 1296319 - RNA, 19 nt, Artificial Sequence
  Description of Artificial Sequence: Synthetic oligonucleotide
uuugccagccgauggugga

SEQ ID NO: 1296320 - RNA, 19 nt, Artificial Sequence
  Description of Artificial Sequence: Synthetic oligonucleotide
ugaugcgcuuaaugaacgc

SEQ ID NO: 1296321 - RNA, 19 nt, Artificial Sequence
  Description of Artificial Sequence: Synthetic oligonucleotide
aagucaugacccaaacaga

SEQ ID NO: 1296322 - RNA, 19 nt, Artificial Sequence
  Description of Artificial Sequence: Synthetic oligonucleotide
uucguagugccgacagccc

SEQ ID NO: 1296323 - RNA, 19 nt, Artificial Sequence
  Description of Artificial Sequence: Synthetic oligonucleotide
uccguugucagugaugguu

SEQ ID NO: 1296324 - RNA, 19 nt, Artificial Sequence
  Description of Artificial Sequence: Synthetic oligonucleotide
agucuuaguaucggccgac

SEQ ID NO: 1296325 - RNA, 19 nt, Artificial Sequence
  Description of Artificial Sequence: Synthetic oligonucleotide
ggugagucugucuugaaaa

SEQ ID NO: 1296326 - RNA, 19 nt, Artificial Sequence
  Description of Artificial Sequence: Synthetic oligonucleotide
aaugaacgcauagccggcu

SEQ ID NO: 1296327 - RNA, 19 nt, Artificial Sequence
  Description of Artificial Sequence: Synthetic oligonucleotide
ucguagugccgacagccca

SEQ ID NO: 1296328 - RNA, 19 nt, Artificial Sequence
  Description of Artificial Sequence: Synthetic oligonucleotide
acgcuggcugaucauauca

SEQ ID NO: 1296329 - RNA, 19 nt, Artificial Sequence
  Description of Artificial Sequence: Synthetic oligonucleotide
gaauacgaggcgaggccgg

SEQ ID NO: 1296330 - RNA, 19 nt, Artificial Sequence
  Description of Artificial Sequence: Synthetic oligonucleotide
ccagucuuaguaucggccg

SEQ ID NO: 1296331 - RNA, 19 nt, Artificial Sequence
  Description of Artificial Sequence: Synthetic oligonucleotide
uccccaauggcuccccaga

SEQ ID NO: 1296332 - RNA, 19 nt, Artificial Sequence
  Description of Artificial Sequence: Synthetic oligonucleotide
guagguggggacccggcag

SEQ ID NO: 1296333 - RNA, 19 nt, Artificial Sequence
  Description of Artificial Sequence: Synthetic oligonucleotide
gcuccguugucagugaugg

SEQ ID NO: 1296334 - RNA, 19 nt, Artificial Sequence
  Description of Artificial Sequence: Synthetic oligonucleotide
uaucggccgaccuuggcau

SEQ ID NO: 1296335 - RNA, 19 nt, Artificial Sequence
  Description of Artificial Sequence: Synthetic oligonucleotide
aucggaguggggccaggac

SEQ ID NO: 1296336 - RNA, 19 nt, Artificial Sequence
  Description of Artificial Sequence: Synthetic oligonucleotide
gaacgcauagccggcuccg

SEQ ID NO: 1296337 - RNA, 19 nt, Artificial Sequence
  Description of Artificial Sequence: Synthetic oligonucleotide
ucaaaggcuuuccgaggcu

SEQ ID NO: 1296338 - RNA, 19 nt, Artificial Sequence
  Description of Artificial Sequence: Synthetic oligonucleotide
guaagauaggaaagucaug

SEQ ID NO: 1296339 - RNA, 19 nt, Artificial Sequence
  Description of Artificial Sequence: Synthetic oligonucleotide
gaugcgcuuaaugaacgca

SEQ ID NO: 1296340 - RNA, 19 nt, Artificial Sequence
  Description of Artificial Sequence: Synthetic oligonucleotide
cagcgaucuugccauacag

SEQ ID NO: 1296341 - RNA, 19 nt, Artificial Sequence
  Description of Artificial Sequence: Synthetic oligonucleotide
cagaaaugggacucggcca

SEQ ID NO: 1296342 - RNA, 19 nt, Artificial Sequence
  Description of Artificial Sequence: Synthetic oligonucleotide
guggaauacgaggcgaggc

SEQ ID NO: 1296343 - RNA, 19 nt, Artificial Sequence
  Description of Artificial Sequence: Synthetic oligonucleotide
cuugaauacuuccaccucu

SEQ ID NO: 1296344 - RNA, 19 nt, Artificial Sequence
  Description of Artificial Sequence: Synthetic oligonucleotide
caagucguucauccagagc

SEQ ID NO: 1296345 - RNA, 19 nt, Artificial Sequence
  Description of Artificial Sequence: Synthetic oligonucleotide
ggaauacgaggcgaggccg

SEQ ID NO: 1296346 - RNA, 19 nt, Artificial Sequence
  Description of Artificial Sequence: Synthetic oligonucleotide
caugacccaaacagaacca

SEQ ID NO: 1296347 - RNA, 19 nt, Artificial Sequence
  Description of Artificial Sequence: Synthetic oligonucleotide
augccuaagcaggaugcuc

SEQ ID NO: 1296348 - RNA, 19 nt, Artificial Sequence
  Description of Artificial Sequence: Synthetic oligonucleotide
caaccagcgcuacauggug

SEQ ID NO: 1296349 - RNA, 19 nt, Artificial Sequence
  Description of Artificial Sequence: Synthetic oligonucleotide
agccuggcaacuucguagu

SEQ ID NO: 1296350 - RNA, 19 nt, Artificial Sequence
  Description of Artificial Sequence: Synthetic oligonucleotide
acccacgcugaugagcugg

SEQ ID NO: 1296351 - RNA, 19 nt, Artificial Sequence
  Description of Artificial Sequence: Synthetic oligonucleotide
cagguaaucucaaggucca

SEQ ID NO: 1296352 - RNA, 19 nt, Artificial Sequence
  Description of Artificial Sequence: Synthetic oligonucleotide
uuccaucccaugccauccc

SEQ ID NO: 1296353 - RNA, 19 nt, Artificial Sequence
  Description of Artificial Sequence: Synthetic oligonucleotide
aggccgauggcagauccuc

SEQ ID NO: 1296354 - RNA, 19 nt, Artificial Sequence
  Description of Artificial Sequence: Synthetic oligonucleotide
ugcgcuuaaugaacgcaua

SEQ ID NO: 1296355 - RNA, 19 nt, Artificial Sequence
  Description of Artificial Sequence: Synthetic oligonucleotide
caugcgcuuacucuacuga

SEQ ID NO: 1296356 - RNA, 19 nt, Artificial Sequence
  Description of Artificial Sequence: Synthetic oligonucleotide
agcgcuacauggugagucu

SEQ ID NO: 1296357 - RNA, 19 nt, Artificial Sequence
  Description of Artificial Sequence: Synthetic oligonucleotide
uuuccgaggcucugugagu

SEQ ID NO: 1296358 - RNA, 19 nt, Artificial Sequence
  Description of Artificial Sequence: Synthetic oligonucleotide
cagccgaugguggaaagug

SEQ ID NO: 1296359 - RNA, 19 nt, Artificial Sequence
  Description of Artificial Sequence: Synthetic oligonucleotide
ggugcagaacaucaccuca

SEQ ID NO: 1296360 - RNA, 19 nt, Artificial Sequence
  Description of Artificial Sequence: Synthetic oligonucleotide
uggccggggaucccaacca

SEQ ID NO: 1296361 - RNA, 19 nt, Artificial Sequence
  Description of Artificial Sequence: Synthetic oligonucleotide
uggcaacuucguagugccg

SEQ ID NO: 1296362 - RNA, 19 nt, Artificial Sequence
  Description of Artificial Sequence: Synthetic oligonucleotide
accccgcgcgcccaguucg

SEQ ID NO: 1296363 - RNA, 19 nt, Artificial Sequence
  Description of Artificial Sequence: Synthetic oligonucleotide
ugaacgcuggcugaucaua

SEQ ID NO: 1296364 - RNA, 19 nt, Artificial Sequence
  Description of Artificial Sequence: Synthetic oligonucleotide
gguggccacccgcugaacg

SEQ ID NO: 1296365 - RNA, 19 nt, Artificial Sequence
  Description of Artificial Sequence: Synthetic oligonucleotide
gaaaugggacucggccagg

SEQ ID NO: 1296366 - RNA, 19 nt, Artificial Sequence
  Description of Artificial Sequence: Synthetic oligonucleotide
cuaccgugggccagcuggg

SEQ ID NO: 1296367 - RNA, 19 nt, Artificial Sequence
  Description of Artificial Sequence: Synthetic oligonucleotide
uuacucuacugagguaggu

SEQ ID NO: 1296368 - RNA, 19 nt, Artificial Sequence
  Description of Artificial Sequence: Synthetic oligonucleotide
aagguacggccucggggca

SEQ ID NO: 1296369 - RNA, 19 nt, Artificial Sequence
  Description of Artificial Sequence: Synthetic oligonucleotide
acaaccagcgcuacauggu

SEQ ID NO: 1296370 - RNA, 19 nt, Artificial Sequence
  Description of Artificial Sequence: Synthetic oligonucleotide
aauacgaggcgaggccgga

SEQ ID NO: 1296371 - RNA, 19 nt, Artificial Sequence
  Description of Artificial Sequence: Synthetic oligonucleotide
gugaagguacggccucggg

SEQ ID NO: 1296372 - RNA, 19 nt, Artificial Sequence
  Description of Artificial Sequence: Synthetic oligonucleotide
aggggcaauuugccagccg

SEQ ID NO: 1296373 - RNA, 19 nt, Artificial Sequence
  Description of Artificial Sequence: Synthetic oligonucleotide
ggguguggaauacgaggcg

SEQ ID NO: 1296374 - RNA, 19 nt, Artificial Sequence
  Description of Artificial Sequence: Synthetic oligonucleotide
gcgcuuaaugaacgcauag

SEQ ID NO: 1296375 - RNA, 19 nt, Artificial Sequence
  Description of Artificial Sequence: Synthetic oligonucleotide
guguggaauacgaggcgag

SEQ ID NO: 1296376 - RNA, 19 nt, Artificial Sequence
  Description of Artificial Sequence: Synthetic oligonucleotide
gucacccacgcugaugagc

SEQ ID NO: 1296377 - RNA, 19 nt, Artificial Sequence
  Description of Artificial Sequence: Synthetic oligonucleotide
agccagaaaugggacucgg

SEQ ID NO: 1296378 - RNA, 19 nt, Artificial Sequence
  Description of Artificial Sequence: Synthetic oligonucleotide
gaguuugagggugaaggua

SEQ ID NO: 1296379 - RNA, 19 nt, Artificial Sequence
  Description of Artificial Sequence: Synthetic oligonucleotide
auagccggcuccguuguca

SEQ ID NO: 1296380 - RNA, 19 nt, Artificial Sequence
  Description of Artificial Sequence: Synthetic oligonucleotide
gaucggagccugagggucc

SEQ ID NO: 1296381 - RNA, 19 nt, Artificial Sequence
  Description of Artificial Sequence: Synthetic oligonucleotide
aucggagccugaggguccc

SEQ ID NO: 1296382 - RNA, 19 nt, Artificial Sequence
  Description of Artificial Sequence: Synthetic oligonucleotide
cagcgcuacauggugaguc

SEQ ID NO: 1296383 - RNA, 19 nt, Artificial Sequence
  Description of Artificial Sequence: Synthetic oligonucleotide
uugugggcccgagccaggg

SEQ ID NO: 1296384 - RNA, 19 nt, Artificial Sequence
  Description of Artificial Sequence: Synthetic oligonucleotide
cugagggucccucggccag

SEQ ID NO: 1296385 - RNA, 19 nt, Artificial Sequence
  Description of Artificial Sequence: Synthetic oligonucleotide
gguaaucucaagguccaca

SEQ ID NO: 1296386 - RNA, 19 nt, Artificial Sequence
  Description of Artificial Sequence: Synthetic oligonucleotide
ggggcaauuugccagccga

SEQ ID NO: 1296387 - RNA, 19 nt, Artificial Sequence
  Description of Artificial Sequence: Synthetic oligonucleotide
cuuugcgcugccccuugac

SEQ ID NO: 1296388 - RNA, 19 nt, Artificial Sequence
  Description of Artificial Sequence: Synthetic oligonucleotide
uucgauccucuggaaacuc

SEQ ID NO: 1296389 - RNA, 19 nt, Artificial Sequence
  Description of Artificial Sequence: Synthetic oligonucleotide
cuccgcuuccacccagggg

SEQ ID NO: 1296390 - RNA, 19 nt, Artificial Sequence
  Description of Artificial Sequence: Synthetic oligonucleotide
augcgcuuaaugaacgcau

SEQ ID NO: 1296391 - RNA, 19 nt, Artificial Sequence
  Description of Artificial Sequence: Synthetic oligonucleotide
agguaaucucaagguccac

SEQ ID NO: 1296392 - RNA, 19 nt, Artificial Sequence
  Description of Artificial Sequence: Synthetic oligonucleotide
ucggccgaccuuggcaucc

SEQ ID NO: 1296393 - RNA, 19 nt, Artificial Sequence
  Description of Artificial Sequence: Synthetic oligonucleotide
gaucccaaccaggcugggc

SEQ ID NO: 1296394 - RNA, 19 nt, Artificial Sequence
  Description of Artificial Sequence: Synthetic oligonucleotide
ucuuugcgcugccccuuga

SEQ ID NO: 1296395 - RNA, 19 nt, Artificial Sequence
  Description of Artificial Sequence: Synthetic oligonucleotide
gcccaguucgauccucugg

SEQ ID NO: 1296396 - RNA, 19 nt, Artificial Sequence
  Description of Artificial Sequence: Synthetic oligonucleotide
cucagcgaucuugccauac

SEQ ID NO: 1296397 - RNA, 19 nt, Artificial Sequence
  Description of Artificial Sequence: Synthetic oligonucleotide
acccggcagggguuggccg

SEQ ID NO: 1296398 - RNA, 19 nt, Artificial Sequence
  Description of Artificial Sequence: Synthetic oligonucleotide
ucgaugcggccuguggggc

SEQ ID NO: 1296399 - RNA, 19 nt, Artificial Sequence
  Description of Artificial Sequence: Synthetic oligonucleotide
cacauuuaguuccagucuu

SEQ ID NO: 1296400 - RNA, 19 nt, Artificial Sequence
  Description of Artificial Sequence: Synthetic oligonucleotide
ggcaacuucguagugccga

SEQ ID NO: 1296401 - RNA, 19 nt, Artificial Sequence
  Description of Artificial Sequence: Synthetic oligonucleotide
cgggaucggagccugaggg

SEQ ID NO: 1296402 - RNA, 19 nt, Artificial Sequence
  Description of Artificial Sequence: Synthetic oligonucleotide
gucuuaguaucggccgacc

SEQ ID NO: 1296403 - RNA, 19 nt, Artificial Sequence
  Description of Artificial Sequence: Synthetic oligonucleotide
cucaaaggccgauggcaga

SEQ ID NO: 1296404 - RNA, 19 nt, Artificial Sequence
  Description of Artificial Sequence: Synthetic oligonucleotide
guggaaaguguuggggaca

SEQ ID NO: 1296405 - RNA, 19 nt, Artificial Sequence
  Description of Artificial Sequence: Synthetic oligonucleotide
cauccccaugcgcuuacuc

SEQ ID NO: 1296406 - RNA, 19 nt, Artificial Sequence
  Description of Artificial Sequence: Synthetic oligonucleotide
cagccagaaaugggacucg

SEQ ID NO: 1296407 - RNA, 19 nt, Artificial Sequence
  Description of Artificial Sequence: Synthetic oligonucleotide
cuggcccauccccaugcgc

SEQ ID NO: 1296408 - RNA, 19 nt, Artificial Sequence
  Description of Artificial Sequence: Synthetic oligonucleotide
ugacaugccuaagcaggau

SEQ ID NO: 1296409 - RNA, 19 nt, Artificial Sequence
  Description of Artificial Sequence: Synthetic oligonucleotide
cagucuuaguaucggccga

SEQ ID NO: 1296410 - RNA, 19 nt, Artificial Sequence
  Description of Artificial Sequence: Synthetic oligonucleotide
gguguggaauacgaggcga

SEQ ID NO: 1296411 - RNA, 19 nt, Artificial Sequence
  Description of Artificial Sequence: Synthetic oligonucleotide
aacgcauagccggcuccgu

SEQ ID NO: 1296412 - RNA, 19 nt, Artificial Sequence
  Description of Artificial Sequence: Synthetic oligonucleotide
ccccuugacaugagcaaag

SEQ ID NO: 1296413 - RNA, 19 nt, Artificial Sequence
  Description of Artificial Sequence: Synthetic oligonucleotide
ugggcaccauggugaucgg

SEQ ID NO: 1296414 - RNA, 19 nt, Artificial Sequence
  Description of Artificial Sequence: Synthetic oligonucleotide
acauuuaguuccagucuua

SEQ ID NO: 1296415 - RNA, 19 nt, Artificial Sequence
  Description of Artificial Sequence: Synthetic oligonucleotide
ugaucggaguggggccagg

SEQ ID NO: 1296416 - RNA, 19 nt, Artificial Sequence
  Description of Artificial Sequence: Synthetic oligonucleotide
cacugccauccuugaugcg

SEQ ID NO: 1296417 - RNA, 19 nt, Artificial Sequence
  Description of Artificial Sequence: Synthetic oligonucleotide
caguucgauccucuggaaa

SEQ ID NO: 1296418 - RNA, 19 nt, Artificial Sequence
  Description of Artificial Sequence: Synthetic oligonucleotide
caauuugccagccgauggu

SEQ ID NO: 1296419 - RNA, 19 nt, Artificial Sequence
  Description of Artificial Sequence: Synthetic oligonucleotide
gaccauaggccacuuccau

SEQ ID NO: 1296420 - RNA, 19 nt, Artificial Sequence
  Description of Artificial Sequence: Synthetic oligonucleotide
cucugauccccauguagcu

SEQ ID NO: 1296421 - RNA, 19 nt, Artificial Sequence
  Description of Artificial Sequence: Synthetic oligonucleotide
gggaaugcaaaguccccaa

SEQ ID NO: 1296422 - RNA, 19 nt, Artificial Sequence
  Description of Artificial Sequence: Synthetic oligonucleotide
aggguggccacccgcugaa

SEQ ID NO: 1296423 - RNA, 19 nt, Artificial Sequence
  Description of Artificial Sequence: Synthetic oligonucleotide
ggaucggagccugaggguc

SEQ ID NO: 1296424 - RNA, 19 nt, Artificial Sequence
  Description of Artificial Sequence: Synthetic oligonucleotide
gcaacuucguagugccgac

SEQ ID NO: 1296425 - RNA, 19 nt, Artificial Sequence
  Description of Artificial Sequence: Synthetic oligonucleotide
ggcuuuccgaggcucugug

SEQ ID NO: 1296426 - RNA, 19 nt, Artificial Sequence
  Description of Artificial Sequence: Synthetic oligonucleotide
aaggccgauggcagauccu

SEQ ID NO: 1296427 - RNA, 19 nt, Artificial Sequence
  Description of Artificial Sequence: Synthetic oligonucleotide
agggucccucggccagugc

SEQ ID NO: 1296428 - RNA, 19 nt, Artificial Sequence
  Description of Artificial Sequence: Synthetic oligonucleotide
ugcucgggucuugucugug

SEQ ID NO: 1296429 - RNA, 19 nt, Artificial Sequence
  Description of Artificial Sequence: Synthetic oligonucleotide
cccaguucgauccucugga

SEQ ID NO: 1296430 - RNA, 19 nt, Artificial Sequence
  Description of Artificial Sequence: Synthetic oligonucleotide
cuacugagguaggugggga

SEQ ID NO: 1296431 - RNA, 19 nt, Artificial Sequence
  Description of Artificial Sequence: Synthetic oligonucleotide
aucucaagguccacauuua

SEQ ID NO: 1296432 - RNA, 19 nt, Artificial Sequence
  Description of Artificial Sequence: Synthetic oligonucleotide
augcucgggucuugucugu

SEQ ID NO: 1296433 - RNA, 19 nt, Artificial Sequence
  Description of Artificial Sequence: Synthetic oligonucleotide
ggagaccugcgccgcagcc

SEQ ID NO: 1296434 - RNA, 19 nt, Artificial Sequence
  Description of Artificial Sequence: Synthetic oligonucleotide
caggccguugagugacaug

SEQ ID NO: 1296435 - RNA, 19 nt, Artificial Sequence
  Description of Artificial Sequence: Synthetic oligonucleotide
ggaugcucgggucuugucu

SEQ ID NO: 1296436 - RNA, 19 nt, Artificial Sequence
  Description of Artificial Sequence: Synthetic oligonucleotide
uggccacccgcugaacgcu

SEQ ID NO: 1296437 - RNA, 19 nt, Artificial Sequence
  Description of Artificial Sequence: Synthetic oligonucleotide
auacgaggcgaggccggag

SEQ ID NO: 1296438 - RNA, 19 nt, Artificial Sequence
  Description of Artificial Sequence: Synthetic oligonucleotide
cuccagcccgaucuggcca

SEQ ID NO: 1296439 - RNA, 19 nt, Artificial Sequence
  Description of Artificial Sequence: Synthetic oligonucleotide
ggccuguggggcuaccgug

SEQ ID NO: 1296440 - RNA, 19 nt, Artificial Sequence
  Description of Artificial Sequence: Synthetic oligonucleotide
uggggcuaccgugggccag

SEQ ID NO: 1296441 - RNA, 19 nt, Artificial Sequence
  Description of Artificial Sequence: Synthetic oligonucleotide
gucguucauccagagccuc

SEQ ID NO: 1296442 - RNA, 19 nt, Artificial Sequence
  Description of Artificial Sequence: Synthetic oligonucleotide
gaucggaguggggccagga

SEQ ID NO: 1296443 - RNA, 19 nt, Artificial Sequence
  Description of Artificial Sequence: Synthetic oligonucleotide
cgcgcgcccaguucgaucc

SEQ ID NO: 1296444 - RNA, 19 nt, Artificial Sequence
  Description of Artificial Sequence: Synthetic oligonucleotide
ccaugcgcuuacucuacug

SEQ ID NO: 1296445 - RNA, 19 nt, Artificial Sequence
  Description of Artificial Sequence: Synthetic oligonucleotide
uugccagccgaugguggaa

SEQ ID NO: 1296446 - RNA, 19 nt, Artificial Sequence
  Description of Artificial Sequence: Synthetic oligonucleotide
agccgaugguggaaagugu

SEQ ID NO: 1296447 - RNA, 19 nt, Artificial Sequence
  Description of Artificial Sequence: Synthetic oligonucleotide
agcccgaucuggccaccca

SEQ ID NO: 1296448 - RNA, 19 nt, Artificial Sequence
  Description of Artificial Sequence: Synthetic oligonucleotide
cagggccccgggaucggag

SEQ ID NO: 1296449 - RNA, 19 nt, Artificial Sequence
  Description of Artificial Sequence: Synthetic oligonucleotide
gguagguggggacccggca

SEQ ID NO: 1296450 - RNA, 19 nt, Artificial Sequence
  Description of Artificial Sequence: Synthetic oligonucleotide
cguagugccgacagcccag

SEQ ID NO: 1296451 - RNA, 19 nt, Artificial Sequence
  Description of Artificial Sequence: Synthetic oligonucleotide
gcgcuuacucuacugaggu

SEQ ID NO: 1296452 - RNA, 19 nt, Artificial Sequence
  Description of Artificial Sequence: Synthetic oligonucleotide
gugaucggaguggggccag

SEQ ID NO: 1296453 - RNA, 19 nt, Artificial Sequence
  Description of Artificial Sequence: Synthetic oligonucleotide
guucgauccucuggaaacu

SEQ ID NO: 1296454 - RNA, 19 nt, Artificial Sequence
  Description of Artificial Sequence: Synthetic oligonucleotide
gcccgaucuggccacccag

SEQ ID NO: 1296455 - RNA, 19 nt, Artificial Sequence
  Description of Artificial Sequence: Synthetic oligonucleotide
agguacggccucggggcag

SEQ ID NO: 1296456 - RNA, 19 nt, Artificial Sequence
  Description of Artificial Sequence: Synthetic oligonucleotide
gcccagguaaucucaaggu

SEQ ID NO: 1296457 - RNA, 19 nt, Artificial Sequence
  Description of Artificial Sequence: Synthetic oligonucleotide
uggggacccggcagggguu

SEQ ID NO: 1296458 - RNA, 19 nt, Artificial Sequence
  Description of Artificial Sequence: Synthetic oligonucleotide
gcuacauggugagucuguc

SEQ ID NO: 1296459 - RNA, 19 nt, Artificial Sequence
  Description of Artificial Sequence: Synthetic oligonucleotide
gaacgcuggcugaucauau

SEQ ID NO: 1296460 - RNA, 19 nt, Artificial Sequence
  Description of Artificial Sequence: Synthetic oligonucleotide
ugagggucccucggccagu

SEQ ID NO: 1296461 - RNA, 19 nt, Artificial Sequence
  Description of Artificial Sequence: Synthetic oligonucleotide
gagacagaaggggcaauuu

SEQ ID NO: 1296462 - RNA, 19 nt, Artificial Sequence
  Description of Artificial Sequence: Synthetic oligonucleotide
caguugugggcccgagcca

SEQ ID NO: 1296463 - RNA, 19 nt, Artificial Sequence
  Description of Artificial Sequence: Synthetic oligonucleotide
ccuaagcaggaugcucggg

SEQ ID NO: 1296464 - RNA, 19 nt, Artificial Sequence
  Description of Artificial Sequence: Synthetic oligonucleotide
ggucccucggccagugccc

SEQ ID NO: 1296465 - RNA, 19 nt, Artificial Sequence
  Description of Artificial Sequence: Synthetic oligonucleotide
cgcauagccggcuccguug

SEQ ID NO: 1296466 - RNA, 19 nt, Artificial Sequence
  Description of Artificial Sequence: Synthetic oligonucleotide
uccgaggcucugugaguuu

SEQ ID NO: 1296467 - RNA, 19 nt, Artificial Sequence
  Description of Artificial Sequence: Synthetic oligonucleotide
gccagaaaugggacucggc

SEQ ID NO: 1296468 - RNA, 19 nt, Artificial Sequence
  Description of Artificial Sequence: Synthetic oligonucleotide
ggccggggaucccaaccag

SEQ ID NO: 1296469 - RNA, 19 nt, Artificial Sequence
  Description of Artificial Sequence: Synthetic oligonucleotide
guugucagugaugguuagu

SEQ ID NO: 1296470 - RNA, 19 nt, Artificial Sequence
  Description of Artificial Sequence: Synthetic oligonucleotide
ggcuccguugucagugaug

SEQ ID NO: 1296471 - RNA, 19 nt, Artificial Sequence
  Description of Artificial Sequence: Synthetic oligonucleotide
caacuucguagugccgaca

SEQ ID NO: 1296472 - RNA, 19 nt, Artificial Sequence
  Description of Artificial Sequence: Synthetic oligonucleotide
caaucaugucacccacgcu

SEQ ID NO: 1296473 - RNA, 19 nt, Artificial Sequence
  Description of Artificial Sequence: Synthetic oligonucleotide
ccgggaucggagccugagg

SEQ ID NO: 1296474 - RNA, 19 nt, Artificial Sequence
  Description of Artificial Sequence: Synthetic oligonucleotide
ugccauccccaggccguug

SEQ ID NO: 1296475 - RNA, 19 nt, Artificial Sequence
  Description of Artificial Sequence: Synthetic oligonucleotide
gccguugagugacaugccu

SEQ ID NO: 1296476 - RNA, 19 nt, Artificial Sequence
  Description of Artificial Sequence: Synthetic oligonucleotide
gcaagcccaucugggauuc

SEQ ID NO: 1296477 - RNA, 19 nt, Artificial Sequence
  Description of Artificial Sequence: Synthetic oligonucleotide
gcagccaccccgcgcgccc

SEQ ID NO: 1296478 - RNA, 19 nt, Artificial Sequence
  Description of Artificial Sequence: Synthetic oligonucleotide
ccccaugcgcuuacucuac

SEQ ID NO: 1296479 - RNA, 19 nt, Artificial Sequence
  Description of Artificial Sequence: Synthetic oligonucleotide
ugcccaguugugggcccga

SEQ ID NO: 1296480 - RNA, 19 nt, Artificial Sequence
  Description of Artificial Sequence: Synthetic oligonucleotide
cacccacgcugaugagcug

SEQ ID NO: 1296481 - RNA, 19 nt, Artificial Sequence
  Description of Artificial Sequence: Synthetic oligonucleotide
ccccaauggcuccccagac

SEQ ID NO: 1296482 - RNA, 19 nt, Artificial Sequence
  Description of Artificial Sequence: Synthetic oligonucleotide
ccgaggcucugugaguuug

SEQ ID NO: 1296483 - RNA, 19 nt, Artificial Sequence
  Description of Artificial Sequence: Synthetic oligonucleotide
caagcccaucugggauucc

SEQ ID NO: 1296484 - RNA, 19 nt, Artificial Sequence
  Description of Artificial Sequence: Synthetic oligonucleotide
caugccuaagcaggaugcu

SEQ ID NO: 1296485 - RNA, 19 nt, Artificial Sequence
  Description of Artificial Sequence: Synthetic oligonucleotide
ggccgauggcagauccucc

SEQ ID NO: 1296486 - RNA, 19 nt, Artificial Sequence
  Description of Artificial Sequence: Synthetic oligonucleotide
gggccccgggaucggagcc

SEQ ID NO: 1296487 - RNA, 19 nt, Artificial Sequence
  Description of Artificial Sequence: Synthetic oligonucleotide
ggccguugagugacaugcc

SEQ ID NO: 1296488 - RNA, 19 nt, Artificial Sequence
  Description of Artificial Sequence: Synthetic oligonucleotide
ggaucccaaccaggcuggg

SEQ ID NO: 1296489 - RNA, 19 nt, Artificial Sequence
  Description of Artificial Sequence: Synthetic oligonucleotide
gccauccccaggccguuga

SEQ ID NO: 1296490 - RNA, 19 nt, Artificial Sequence
  Description of Artificial Sequence: Synthetic oligonucleotide
gcgcuacauggugagucug

SEQ ID NO: 1296491 - RNA, 19 nt, Artificial Sequence
  Description of Artificial Sequence: Synthetic oligonucleotide
caccccgcgcgcccaguuc

SEQ ID NO: 1296492 - RNA, 19 nt, Artificial Sequence
  Description of Artificial Sequence: Synthetic oligonucleotide
gccacccgcugaacgcugg

SEQ ID NO: 1296493 - RNA, 19 nt, Artificial Sequence
  Description of Artificial Sequence: Synthetic oligonucleotide
cugaacgcuggcugaucau

SEQ ID NO: 1296494 - RNA, 19 nt, Artificial Sequence
  Description of Artificial Sequence: Synthetic oligonucleotide
ccaucccaugccaucccca

SEQ ID NO: 1296495 - RNA, 19 nt, Artificial Sequence
  Description of Artificial Sequence: Synthetic oligonucleotide
gggaucggagccugagggu

SEQ ID NO: 1296496 - RNA, 19 nt, Artificial Sequence
  Description of Artificial Sequence: Synthetic oligonucleotide
gcggccuguggggcuaccg

SEQ ID NO: 1296497 - RNA, 19 nt, Artificial Sequence
  Description of Artificial Sequence: Synthetic oligonucleotide
ccgaccuuggcauccccaa

SEQ ID NO: 1296498 - RNA, 19 nt, Artificial Sequence
  Description of Artificial Sequence: Synthetic oligonucleotide
gccucggggcagcuccuug

SEQ ID NO: 1296499 - RNA, 19 nt, Artificial Sequence
  Description of Artificial Sequence: Synthetic oligonucleotide
ggacucggccaggagaccu

SEQ ID NO: 1296500 - RNA, 19 nt, Artificial Sequence
  Description of Artificial Sequence: Synthetic oligonucleotide
cccauccccaugcgcuuac

SEQ ID NO: 1296501 - RNA, 19 nt, Artificial Sequence
  Description of Artificial Sequence: Synthetic oligonucleotide
ggccaagcccagguaaucu

SEQ ID NO: 1296502 - RNA, 19 nt, Artificial Sequence
  Description of Artificial Sequence: Synthetic oligonucleotide
ggagacagaaggggcaauu

SEQ ID NO: 1296503 - RNA, 19 nt, Artificial Sequence
  Description of Artificial Sequence: Synthetic oligonucleotide
cuugucuguggcagcccuu

SEQ ID NO: 1296504 - RNA, 19 nt, Artificial Sequence
  Description of Artificial Sequence: Synthetic oligonucleotide
caucugggauuccccugcu

SEQ ID NO: 1296505 - RNA, 19 nt, Artificial Sequence
  Description of Artificial Sequence: Synthetic oligonucleotide
ggguuggccggggauccca

SEQ ID NO: 1296506 - RNA, 19 nt, Artificial Sequence
  Description of Artificial Sequence: Synthetic oligonucleotide
ccaguucgauccucuggaa

SEQ ID NO: 1296507 - RNA, 19 nt, Artificial Sequence
  Description of Artificial Sequence: Synthetic oligonucleotide
ggaaaguguuggggacaga

SEQ ID NO: 1296508 - RNA, 19 nt, Artificial Sequence
  Description of Artificial Sequence: Synthetic oligonucleotide
gggauuccccugcuccgcu

SEQ ID NO: 1296509 - RNA, 19 nt, Artificial Sequence
  Description of Artificial Sequence: Synthetic oligonucleotide
gccgaccuuggcaucccca

SEQ ID NO: 1296510 - RNA, 19 nt, Artificial Sequence
  Description of Artificial Sequence: Synthetic oligonucleotide
gccgaugguggaaaguguu

SEQ ID NO: 1296511 - RNA, 19 nt, Artificial Sequence
  Description of Artificial Sequence: Synthetic oligonucleotide
ggccacccgcugaacgcug

SEQ ID NO: 1296512 - RNA, 19 nt, Artificial Sequence
  Description of Artificial Sequence: Synthetic oligonucleotide
gguuggccggggaucccaa

SEQ ID NO: 1296513 - RNA, 19 nt, Artificial Sequence
  Description of Artificial Sequence: Synthetic oligonucleotide
gggguuggccggggauccc

SEQ ID NO: 1296514 - RNA, 19 nt, Artificial Sequence
  Description of Artificial Sequence: Synthetic oligonucleotide
cgcccaguucgauccucug

SEQ ID NO: 1296515 - RNA, 19 nt, Artificial Sequence
  Description of Artificial Sequence: Synthetic oligonucleotide
ccgcgcgcccaguucgauc

SEQ ID NO: 1296516 - RNA, 19 nt, Artificial Sequence
  Description of Artificial Sequence: Synthetic oligonucleotide
cacccgcugaacgcuggcu

SEQ ID NO: 1296517 - RNA, 19 nt, Artificial Sequence
  Description of Artificial Sequence: Synthetic oligonucleotide
cccagugugcuggcccauc

SEQ ID NO: 1296518 - RNA, 19 nt, Artificial Sequence
  Description of Artificial Sequence: Synthetic oligonucleotide
ccggcuccguugucaguga

SEQ ID NO: 1296519 - RNA, 19 nt, Artificial Sequence
  Description of Artificial Sequence: Synthetic oligonucleotide
ccagcccgaucuggccacc

SEQ ID NO: 1296520 - RNA, 19 nt, Artificial Sequence
  Description of Artificial Sequence: Synthetic oligonucleotide
ggauuccccugcuccgcuu

SEQ ID NO: 1296521 - RNA, 19 nt, Artificial Sequence
  Description of Artificial Sequence: Synthetic oligonucleotide
ggguggccacccgcugaac

SEQ ID NO: 1296522 - RNA, 19 nt, Artificial Sequence
  Description of Artificial Sequence: Synthetic oligonucleotide
cagccaccccgcgcgccca

SEQ ID NO: 1296523 - RNA, 19 nt, Artificial Sequence
  Description of Artificial Sequence: Synthetic oligonucleotide
cgcuuacucuacugaggua

SEQ ID NO: 1296524 - RNA, 19 nt, Artificial Sequence
  Description of Artificial Sequence: Synthetic oligonucleotide
ccagccgaugguggaaagu

SEQ ID NO: 1296525 - RNA, 19 nt, Artificial Sequence
  Description of Artificial Sequence: Synthetic oligonucleotide
cgcugaacgcuggcugauc

SEQ ID NO: 1296526 - RNA, 19 nt, Artificial Sequence
  Description of Artificial Sequence: Synthetic oligonucleotide
cccaugcgcuuacucuacu

SEQ ID NO: 1296527 - RNA, 19 nt, Artificial Sequence
  Description of Artificial Sequence: Synthetic oligonucleotide
gcgcccaguucgauccucu

SEQ ID NO: 1296528 - RNA, 19 nt, Artificial Sequence
  Description of Artificial Sequence: Synthetic oligonucleotide
cccaggccguugagugaca

SEQ ID NO: 1296529 - RNA, 19 nt, Artificial Sequence
  Description of Artificial Sequence: Synthetic oligonucleotide
ccucagcgaucuugccaua

SEQ ID NO: 1296530 - RNA, 19 nt, Artificial Sequence
  Description of Artificial Sequence: Synthetic oligonucleotide
cggccgaccuuggcauccc

SEQ ID NO: 1296531 - RNA, 19 nt, Artificial Sequence
  Description of Artificial Sequence: Synthetic oligonucleotide
ggccccgggaucggagccu

SEQ ID NO: 1296532 - RNA, 19 nt, Artificial Sequence
  Description of Artificial Sequence: Synthetic oligonucleotide
ccccgcgcgcccaguucga

SEQ ID NO: 1296533 - RNA, 19 nt, Artificial Sequence
  Description of Artificial Sequence: Synthetic oligonucleotide
ccaggccguugagugacau

SEQ ID NO: 1296534 - RNA, 19 nt, Artificial Sequence
  Description of Artificial Sequence: Synthetic oligonucleotide
cggccuguggggcuaccgu

SEQ ID NO: 1296535 - RNA, 19 nt, Artificial Sequence
  Description of Artificial Sequence: Synthetic oligonucleotide
gcgcgcccaguucgauccu

SEQ ID NO: 1296536 - RNA, 19 nt, Artificial Sequence
  Description of Artificial Sequence: Synthetic oligonucleotide
ccgcugaacgcuggcugau

SEQ ID NO: 1296537 - RNA, 19 nt, Artificial Sequence
  Description of Artificial Sequence: Synthetic oligonucleotide
ccauccccaugcgcuuacu

SEQ ID NO: 1296538 - RNA, 19 nt, Artificial Sequence
  Description of Artificial Sequence: Synthetic oligonucleotide
ggccucggggcagcuccuu

SEQ ID NO: 1296539 - RNA, 19 nt, Artificial Sequence
  Description of Artificial Sequence: Synthetic oligonucleotide
ccaccccgcgcgcccaguu

SEQ ID NO: 1296540 - RNA, 19 nt, Artificial Sequence
  Description of Artificial Sequence: Synthetic oligonucleotide
cggcuccguugucagugau

SEQ ID NO: 1296541 - RNA, 19 nt, Artificial Sequence
  Description of Artificial Sequence: Synthetic oligonucleotide
cccgcgcgcccaguucgau

SEQ ID NO: 1296542 - RNA, 19 nt, Artificial Sequence
  Description of Artificial Sequence: Synthetic oligonucleotide
uaaacaguaaaacugaggg

SEQ ID NO: 1296543 - RNA, 19 nt, Artificial Sequence
  Description of Artificial Sequence: Synthetic oligonucleotide
aauaaugagagucuccagg

SEQ ID NO: 1296544 - RNA, 19 nt, Artificial Sequence
  Description of Artificial Sequence: Synthetic oligonucleotide
ucauauaucgaucauuagg

SEQ ID NO: 1296545 - RNA, 19 nt, Artificial Sequence
  Description of Artificial Sequence: Synthetic oligonucleotide
aacaucaauguuuggaucg

SEQ ID NO: 1296546 - RNA, 19 nt, Artificial Sequence
  Description of Artificial Sequence: Synthetic oligonucleotide
gaggguuucaguuaaaggg

SEQ ID NO: 1296547 - RNA, 19 nt, Artificial Sequence
  Description of Artificial Sequence: Synthetic oligonucleotide
aaaugcaucagauacagau

SEQ ID NO: 1296548 - RNA, 19 nt, Artificial Sequence
  Description of Artificial Sequence: Synthetic oligonucleotide
ucuaaguaauuaaugaaag

SEQ ID NO: 1296549 - RNA, 19 nt, Artificial Sequence
  Description of Artificial Sequence: Synthetic oligonucleotide
ucucacauauuaaacaggg

SEQ ID NO: 1296550 - RNA, 19 nt, Artificial Sequence
  Description of Artificial Sequence: Synthetic oligonucleotide
ugaacuuacauaaucaggu

SEQ ID NO: 1296551 - RNA, 19 nt, Artificial Sequence
  Description of Artificial Sequence: Synthetic oligonucleotide
aaggggauaauucauaaca

SEQ ID NO: 1296552 - RNA, 19 nt, Artificial Sequence
  Description of Artificial Sequence: Synthetic oligonucleotide
aaugaacuuacauaaucag

SEQ ID NO: 1296553 - RNA, 19 nt, Artificial Sequence
  Description of Artificial Sequence: Synthetic oligonucleotide
agucagaugguguugacgc

SEQ ID NO: 1296554 - RNA, 19 nt, Artificial Sequence
  Description of Artificial Sequence: Synthetic oligonucleotide
agaacacucaaacagauug

SEQ ID NO: 1296555 - RNA, 19 nt, Artificial Sequence
  Description of Artificial Sequence: Synthetic oligonucleotide
aaacuaugcaacuuucagg

SEQ ID NO: 1296556 - RNA, 19 nt, Artificial Sequence
  Description of Artificial Sequence: Synthetic oligonucleotide
acaauggucgaacauaaac

SEQ ID NO: 1296557 - RNA, 19 nt, Artificial Sequence
  Description of Artificial Sequence: Synthetic oligonucleotide
ucacauauuaaacaggggu

SEQ ID NO: 1296558 - RNA, 19 nt, Artificial Sequence
  Description of Artificial Sequence: Synthetic oligonucleotide
aucagauacagauuuguac

SEQ ID NO: 1296559 - RNA, 19 nt, Artificial Sequence
  Description of Artificial Sequence: Synthetic oligonucleotide
  modified_base (16)..(16): a, c, u, g, unknown or other
uaacaaggagguuugnucc

SEQ ID NO: 1296560 - RNA, 19 nt, Artificial Sequence
  Description of Artificial Sequence: Synthetic oligonucleotide
aguaauuaaugaaaggugg

SEQ ID NO: 1296561 - RNA, 19 nt, Artificial Sequence
  Description of Artificial Sequence: Synthetic oligonucleotide
aacaucaucagcuaacgaa

SEQ ID NO: 1296562 - RNA, 19 nt, Artificial Sequence
  Description of Artificial Sequence: Synthetic oligonucleotide
acaacugcaagacauaucu

SEQ ID NO: 1296563 - RNA, 19 nt, Artificial Sequence
  Description of Artificial Sequence: Synthetic oligonucleotide
uuugccuucgguuacagga

SEQ ID NO: 1296564 - RNA, 19 nt, Artificial Sequence
  Description of Artificial Sequence: Synthetic oligonucleotide
aucguaaugaguaagaaug

SEQ ID NO: 1296565 - RNA, 19 nt, Artificial Sequence
  Description of Artificial Sequence: Synthetic oligonucleotide
uugaagauguaacaaggag

SEQ ID NO: 1296566 - RNA, 19 nt, Artificial Sequence
  Description of Artificial Sequence: Synthetic oligonucleotide
uuuugcaucguaaugagua

SEQ ID NO: 1296567 - RNA, 19 nt, Artificial Sequence
  Description of Artificial Sequence: Synthetic oligonucleotide
aaaacugaggguuucaguu

SEQ ID NO: 1296568 - RNA, 19 nt, Artificial Sequence
  Description of Artificial Sequence: Synthetic oligonucleotide
uucuaaguaauuaaugaaa

SEQ ID NO: 1296569 - RNA, 19 nt, Artificial Sequence
  Description of Artificial Sequence: Synthetic oligonucleotide
aggggaaguggauagauac

SEQ ID NO: 1296570 - RNA, 19 nt, Artificial Sequence
  Description of Artificial Sequence: Synthetic oligonucleotide
ugcaaaauggcuuuacaug

SEQ ID NO: 1296571 - RNA, 19 nt, Artificial Sequence
  Description of Artificial Sequence: Synthetic oligonucleotide
ucagcuaacgaaucugugg

SEQ ID NO: 1296572 - RNA, 19 nt, Artificial Sequence
  Description of Artificial Sequence: Synthetic oligonucleotide
aagacauaucucaaaacac

SEQ ID NO: 1296573 - RNA, 19 nt, Artificial Sequence
  Description of Artificial Sequence: Synthetic oligonucleotide
aauuccacucuuuaaacaa

SEQ ID NO: 1296574 - RNA, 19 nt, Artificial Sequence
  Description of Artificial Sequence: Synthetic oligonucleotide
aagguuacaauagaacauc

SEQ ID NO: 1296575 - RNA, 19 nt, Artificial Sequence
  Description of Artificial Sequence: Synthetic oligonucleotide
aaguacaccucuuuucuag

SEQ ID NO: 1296576 - RNA, 19 nt, Artificial Sequence
  Description of Artificial Sequence: Synthetic oligonucleotide
aaacaucaauguuuggauc

SEQ ID NO: 1296577 - RNA, 19 nt, Artificial Sequence
  Description of Artificial Sequence: Synthetic oligonucleotide
gauguguccaauaaagucc

SEQ ID NO: 1296578 - RNA, 19 nt, Artificial Sequence
  Description of Artificial Sequence: Synthetic oligonucleotide
ucaaagguuacaauagaac

SEQ ID NO: 1296579 - RNA, 19 nt, Artificial Sequence
  Description of Artificial Sequence: Synthetic oligonucleotide
aaaggggauaauucauaac

SEQ ID NO: 1296580 - RNA, 19 nt, Artificial Sequence
  Description of Artificial Sequence: Synthetic oligonucleotide
aauacaaggguguaauaau

SEQ ID NO: 1296581 - RNA, 19 nt, Artificial Sequence
  Description of Artificial Sequence: Synthetic oligonucleotide
caauggucgaacauaaacc

SEQ ID NO: 1296582 - RNA, 19 nt, Artificial Sequence
  Description of Artificial Sequence: Synthetic oligonucleotide
uguaguauucuguaacuug

SEQ ID NO: 1296583 - RNA, 19 nt, Artificial Sequence
  Description of Artificial Sequence: Synthetic oligonucleotide
aaguaauuaaugaaaggug

SEQ ID NO: 1296584 - RNA, 19 nt, Artificial Sequence
  Description of Artificial Sequence: Synthetic oligonucleotide
gauacaagauugaugcugg

SEQ ID NO: 1296585 - RNA, 19 nt, Artificial Sequence
  Description of Artificial Sequence: Synthetic oligonucleotide
uuaacagugcccagaaacc

SEQ ID NO: 1296586 - RNA, 19 nt, Artificial Sequence
  Description of Artificial Sequence: Synthetic oligonucleotide
uuuucuaaccauguaaaca

SEQ ID NO: 1296587 - RNA, 19 nt, Artificial Sequence
  Description of Artificial Sequence: Synthetic oligonucleotide
aagccgauaauacucuaag

SEQ ID NO: 1296588 - RNA, 19 nt, Artificial Sequence
  Description of Artificial Sequence: Synthetic oligonucleotide
aauacacaucuugaggaac

SEQ ID NO: 1296589 - RNA, 19 nt, Artificial Sequence
  Description of Artificial Sequence: Synthetic oligonucleotide
aacuaaagugacugggaag

SEQ ID NO: 1296590 - RNA, 19 nt, Artificial Sequence
  Description of Artificial Sequence: Synthetic oligonucleotide
aaauuccacucuuuaaaca

SEQ ID NO: 1296591 - RNA, 19 nt, Artificial Sequence
  Description of Artificial Sequence: Synthetic oligonucleotide
ucuacaucuguucugcaga

SEQ ID NO: 1296592 - RNA, 19 nt, Artificial Sequence
  Description of Artificial Sequence: Synthetic oligonucleotide
uuuagggcaaugaacuuac

SEQ ID NO: 1296593 - RNA, 19 nt, Artificial Sequence
  Description of Artificial Sequence: Synthetic oligonucleotide
uguacaacuauguuacagu

SEQ ID NO: 1296594 - RNA, 19 nt, Artificial Sequence
  Description of Artificial Sequence: Synthetic oligonucleotide
gaaaccgaaucauacagca

SEQ ID NO: 1296595 - RNA, 19 nt, Artificial Sequence
  Description of Artificial Sequence: Synthetic oligonucleotide
gagccugucuacuagauac

SEQ ID NO: 1296596 - RNA, 19 nt, Artificial Sequence
  Description of Artificial Sequence: Synthetic oligonucleotide
uguaacuugaggccuuucc

SEQ ID NO: 1296597 - RNA, 19 nt, Artificial Sequence
  Description of Artificial Sequence: Synthetic oligonucleotide
auaaacaucaauguuugga

SEQ ID NO: 1296598 - RNA, 19 nt, Artificial Sequence
  Description of Artificial Sequence: Synthetic oligonucleotide
acuucuacaucuguucugc

SEQ ID NO: 1296599 - RNA, 19 nt, Artificial Sequence
  Description of Artificial Sequence: Synthetic oligonucleotide
accauguaaacaguaaaac

SEQ ID NO: 1296600 - RNA, 19 nt, Artificial Sequence
  Description of Artificial Sequence: Synthetic oligonucleotide
cauaucucaaaacacaaca

SEQ ID NO: 1296601 - RNA, 19 nt, Artificial Sequence
  Description of Artificial Sequence: Synthetic oligonucleotide
cacucuuuaaacaaugguc

SEQ ID NO: 1296602 - RNA, 19 nt, Artificial Sequence
  Description of Artificial Sequence: Synthetic oligonucleotide
caauagaacaucagaacac

SEQ ID NO: 1296603 - RNA, 19 nt, Artificial Sequence
  Description of Artificial Sequence: Synthetic oligonucleotide
aagcaaggggcuuuccugg

SEQ ID NO: 1296604 - RNA, 19 nt, Artificial Sequence
  Description of Artificial Sequence: Synthetic oligonucleotide
cauaaaccuuauuaacugg

SEQ ID NO: 1296605 - RNA, 19 nt, Artificial Sequence
  Description of Artificial Sequence: Synthetic oligonucleotide
caaacuaugcaacuuucag

SEQ ID NO: 1296606 - RNA, 19 nt, Artificial Sequence
  Description of Artificial Sequence: Synthetic oligonucleotide
acaggaggauuuuaacccc

SEQ ID NO: 1296607 - RNA, 19 nt, Artificial Sequence
  Description of Artificial Sequence: Synthetic oligonucleotide
uucccuaugcugcaaaaug

SEQ ID NO: 1296608 - RNA, 19 nt, Artificial Sequence
  Description of Artificial Sequence: Synthetic oligonucleotide
uuuggaucgaacucuccag

SEQ ID NO: 1296609 - RNA, 19 nt, Artificial Sequence
  Description of Artificial Sequence: Synthetic oligonucleotide
cugucuacuagauacuuug

SEQ ID NO: 1296610 - RNA, 19 nt, Artificial Sequence
  Description of Artificial Sequence: Synthetic oligonucleotide
ucgaucauuagguugguaa

SEQ ID NO: 1296611 - RNA, 19 nt, Artificial Sequence
  Description of Artificial Sequence: Synthetic oligonucleotide
cagaaaccgaaucauacag

SEQ ID NO: 1296612 - RNA, 19 nt, Artificial Sequence
  Description of Artificial Sequence: Synthetic oligonucleotide
ugcaagacauaucucaaaa

SEQ ID NO: 1296613 - RNA, 19 nt, Artificial Sequence
  Description of Artificial Sequence: Synthetic oligonucleotide
ucuccaggcgagaaaagag

SEQ ID NO: 1296614 - RNA, 19 nt, Artificial Sequence
  Description of Artificial Sequence: Synthetic oligonucleotide
uuuaaccccuuguacaucu

SEQ ID NO: 1296615 - RNA, 19 nt, Artificial Sequence
  Description of Artificial Sequence: Synthetic oligonucleotide
uuggaucgaacucuccagg

SEQ ID NO: 1296616 - RNA, 19 nt, Artificial Sequence
  Description of Artificial Sequence: Synthetic oligonucleotide
agauacaagauugaugcug

SEQ ID NO: 1296617 - RNA, 19 nt, Artificial Sequence
  Description of Artificial Sequence: Synthetic oligonucleotide
guuaaacacaaccagcaca

SEQ ID NO: 1296618 - RNA, 19 nt, Artificial Sequence
  Description of Artificial Sequence: Synthetic oligonucleotide
aucgaguuugguuuuaacu

SEQ ID NO: 1296619 - RNA, 19 nt, Artificial Sequence
  Description of Artificial Sequence: Synthetic oligonucleotide
uacucuaagcaaauguagu

SEQ ID NO: 1296620 - RNA, 19 nt, Artificial Sequence
  Description of Artificial Sequence: Synthetic oligonucleotide
uggaguuaacaucaucagc

SEQ ID NO: 1296621 - RNA, 19 nt, Artificial Sequence
  Description of Artificial Sequence: Synthetic oligonucleotide
uuaaacaauggucgaacau

SEQ ID NO: 1296622 - RNA, 19 nt, Artificial Sequence
  Description of Artificial Sequence: Synthetic oligonucleotide
uucagcacagcauguaagc

SEQ ID NO: 1296623 - RNA, 19 nt, Artificial Sequence
  Description of Artificial Sequence: Synthetic oligonucleotide
uuuaaacaauggucgaaca

SEQ ID NO: 1296624 - RNA, 19 nt, Artificial Sequence
  Description of Artificial Sequence: Synthetic oligonucleotide
aaccuuauuaacugggauu

SEQ ID NO: 1296625 - RNA, 19 nt, Artificial Sequence
  Description of Artificial Sequence: Synthetic oligonucleotide
auguaagccgauaauacuc

SEQ ID NO: 1296626 - RNA, 19 nt, Artificial Sequence
  Description of Artificial Sequence: Synthetic oligonucleotide
accacaauuaacagugccc

SEQ ID NO: 1296627 - RNA, 19 nt, Artificial Sequence
  Description of Artificial Sequence: Synthetic oligonucleotide
uguaagccgauaauacucu

SEQ ID NO: 1296628 - RNA, 19 nt, Artificial Sequence
  Description of Artificial Sequence: Synthetic oligonucleotide
  modified_base (9)..(9): a, c, u, g, unknown or other
gagguuugnuccugcaagg

SEQ ID NO: 1296629 - RNA, 19 nt, Artificial Sequence
  Description of Artificial Sequence: Synthetic oligonucleotide
gaucgaacucuccaggagc

SEQ ID NO: 1296630 - RNA, 19 nt, Artificial Sequence
  Description of Artificial Sequence: Synthetic oligonucleotide
uuaugugagagccugucua

SEQ ID NO: 1296631 - RNA, 19 nt, Artificial Sequence
  Description of Artificial Sequence: Synthetic oligonucleotide
uguuauugccccaaacuau

SEQ ID NO: 1296632 - RNA, 19 nt, Artificial Sequence
  Description of Artificial Sequence: Synthetic oligonucleotide
aacuucuacaucuguucug

SEQ ID NO: 1296633 - RNA, 19 nt, Artificial Sequence
  Description of Artificial Sequence: Synthetic oligonucleotide
uauguuacaguggaguuaa

SEQ ID NO: 1296634 - RNA, 19 nt, Artificial Sequence
  Description of Artificial Sequence: Synthetic oligonucleotide
aaagcagucagaugguguu

SEQ ID NO: 1296635 - RNA, 19 nt, Artificial Sequence
  Description of Artificial Sequence: Synthetic oligonucleotide
cuuccagacgcugugaagg

SEQ ID NO: 1296636 - RNA, 19 nt, Artificial Sequence
  Description of Artificial Sequence: Synthetic oligonucleotide
aaggggcuuuccuggaccc

SEQ ID NO: 1296637 - RNA, 19 nt, Artificial Sequence
  Description of Artificial Sequence: Synthetic oligonucleotide
guaaacaguaaaacugagg

SEQ ID NO: 1296638 - RNA, 19 nt, Artificial Sequence
  Description of Artificial Sequence: Synthetic oligonucleotide
uagguugguaaauacacau

SEQ ID NO: 1296639 - RNA, 19 nt, Artificial Sequence
  Description of Artificial Sequence: Synthetic oligonucleotide
cauauaucgaucauuaggu

SEQ ID NO: 1296640 - RNA, 19 nt, Artificial Sequence
  Description of Artificial Sequence: Synthetic oligonucleotide
aauacucuaagcaaaugua

SEQ ID NO: 1296641 - RNA, 19 nt, Artificial Sequence
  Description of Artificial Sequence: Synthetic oligonucleotide
gacgcuggcuuccagacgc

SEQ ID NO: 1296642 - RNA, 19 nt, Artificial Sequence
  Description of Artificial Sequence: Synthetic oligonucleotide
uuuccuacgccgaagccac

SEQ ID NO: 1296643 - RNA, 19 nt, Artificial Sequence
  Description of Artificial Sequence: Synthetic oligonucleotide
gaagcaaggggcuuuccug

SEQ ID NO: 1296644 - RNA, 19 nt, Artificial Sequence
  Description of Artificial Sequence: Synthetic oligonucleotide
uguucugcagaaugaaacu

SEQ ID NO: 1296645 - RNA, 19 nt, Artificial Sequence
  Description of Artificial Sequence: Synthetic oligonucleotide
uuaaaggggauaauucaua

SEQ ID NO: 1296646 - RNA, 19 nt, Artificial Sequence
  Description of Artificial Sequence: Synthetic oligonucleotide
  modified_base (3)..(3): a, c, u, g, unknown or other
ugnuccugcaaggugagug

SEQ ID NO: 1296647 - RNA, 19 nt, Artificial Sequence
  Description of Artificial Sequence: Synthetic oligonucleotide
agaaugaaacucugcagcu

SEQ ID NO: 1296648 - RNA, 19 nt, Artificial Sequence
  Description of Artificial Sequence: Synthetic oligonucleotide
agccgauaauacucuaagc

SEQ ID NO: 1296649 - RNA, 19 nt, Artificial Sequence
  Description of Artificial Sequence: Synthetic oligonucleotide
uuccuaaaggggaagugga

SEQ ID NO: 1296650 - RNA, 19 nt, Artificial Sequence
  Description of Artificial Sequence: Synthetic oligonucleotide
cagcuaacgaaucuguggc

SEQ ID NO: 1296651 - RNA, 19 nt, Artificial Sequence
  Description of Artificial Sequence: Synthetic oligonucleotide
guacaacuauguuacagug

SEQ ID NO: 1296652 - RNA, 19 nt, Artificial Sequence
  Description of Artificial Sequence: Synthetic oligonucleotide
cacucaaacagauuggaca

SEQ ID NO: 1296653 - RNA, 19 nt, Artificial Sequence
  Description of Artificial Sequence: Synthetic oligonucleotide
cuuuaaacaauggucgaac

SEQ ID NO: 1296654 - RNA, 19 nt, Artificial Sequence
  Description of Artificial Sequence: Synthetic oligonucleotide
ugguuuuaacuuuccuacg

SEQ ID NO: 1296655 - RNA, 19 nt, Artificial Sequence
  Description of Artificial Sequence: Synthetic oligonucleotide
ugcaucguaaugaguaaga

SEQ ID NO: 1296656 - RNA, 19 nt, Artificial Sequence
  Description of Artificial Sequence: Synthetic oligonucleotide
uuugaacaaaacacucacu

SEQ ID NO: 1296657 - RNA, 19 nt, Artificial Sequence
  Description of Artificial Sequence: Synthetic oligonucleotide
  modified_base (5)..(5): a, c, u, g, unknown or other
uuugnuccugcaaggugag

SEQ ID NO: 1296658 - RNA, 19 nt, Artificial Sequence
  Description of Artificial Sequence: Synthetic oligonucleotide
ucuaaccauguaaacagua

SEQ ID NO: 1296659 - RNA, 19 nt, Artificial Sequence
  Description of Artificial Sequence: Synthetic oligonucleotide
uaugcaacuuucagggaac

SEQ ID NO: 1296660 - RNA, 19 nt, Artificial Sequence
  Description of Artificial Sequence: Synthetic oligonucleotide
auuaacugggauuugccuu

SEQ ID NO: 1296661 - RNA, 19 nt, Artificial Sequence
  Description of Artificial Sequence: Synthetic oligonucleotide
uuacaguggaguuaacauc

SEQ ID NO: 1296662 - RNA, 19 nt, Artificial Sequence
  Description of Artificial Sequence: Synthetic oligonucleotide
ucagaacacucaaacagau

SEQ ID NO: 1296663 - RNA, 19 nt, Artificial Sequence
  Description of Artificial Sequence: Synthetic oligonucleotide
cuaagcaaauguaguauuc

SEQ ID NO: 1296664 - RNA, 19 nt, Artificial Sequence
  Description of Artificial Sequence: Synthetic oligonucleotide
uucacggucgagaucucag

SEQ ID NO: 1296665 - RNA, 19 nt, Artificial Sequence
  Description of Artificial Sequence: Synthetic oligonucleotide
uggucgaacauaaaccuua

SEQ ID NO: 1296666 - RNA, 19 nt, Artificial Sequence
  Description of Artificial Sequence: Synthetic oligonucleotide
caguuaaaggggauaauuc

SEQ ID NO: 1296667 - RNA, 19 nt, Artificial Sequence
  Description of Artificial Sequence: Synthetic oligonucleotide
aggguuucaguuaaagggg

SEQ ID NO: 1296668 - RNA, 19 nt, Artificial Sequence
  Description of Artificial Sequence: Synthetic oligonucleotide
uggcaggucaguacaaagc

SEQ ID NO: 1296669 - RNA, 19 nt, Artificial Sequence
  Description of Artificial Sequence: Synthetic oligonucleotide
agaaaccgaaucauacagc

SEQ ID NO: 1296670 - RNA, 19 nt, Artificial Sequence
  Description of Artificial Sequence: Synthetic oligonucleotide
aguacaccucuuuucuagg

SEQ ID NO: 1296671 - RNA, 19 nt, Artificial Sequence
  Description of Artificial Sequence: Synthetic oligonucleotide
aaaagcgcuuugaauacug

SEQ ID NO: 1296672 - RNA, 19 nt, Artificial Sequence
  Description of Artificial Sequence: Synthetic oligonucleotide
gaacacucaaacagauugg

SEQ ID NO: 1296673 - RNA, 19 nt, Artificial Sequence
  Description of Artificial Sequence: Synthetic oligonucleotide
  modified_base (15)..(15): a, c, u, g, unknown or other
aacaaggagguuugnuccu

SEQ ID NO: 1296674 - RNA, 19 nt, Artificial Sequence
  Description of Artificial Sequence: Synthetic oligonucleotide
uuuaugugagagccugucu

SEQ ID NO: 1296675 - RNA, 19 nt, Artificial Sequence
  Description of Artificial Sequence: Synthetic oligonucleotide
ucuaagcaaauguaguauu

SEQ ID NO: 1296676 - RNA, 19 nt, Artificial Sequence
  Description of Artificial Sequence: Synthetic oligonucleotide
ucguaaugaguaagaaugu

SEQ ID NO: 1296677 - RNA, 19 nt, Artificial Sequence
  Description of Artificial Sequence: Synthetic oligonucleotide
uggauagauacaagauuga

SEQ ID NO: 1296678 - RNA, 19 nt, Artificial Sequence
  Description of Artificial Sequence: Synthetic oligonucleotide
agcgcuuugaauacuguuc

SEQ ID NO: 1296679 - RNA, 19 nt, Artificial Sequence
  Description of Artificial Sequence: Synthetic oligonucleotide
uuucaguuaaaggggauaa

SEQ ID NO: 1296680 - RNA, 19 nt, Artificial Sequence
  Description of Artificial Sequence: Synthetic oligonucleotide
uacaccucuuuucuaggug

SEQ ID NO: 1296681 - RNA, 19 nt, Artificial Sequence
  Description of Artificial Sequence: Synthetic oligonucleotide
guggaguuaacaucaucag

SEQ ID NO: 1296682 - RNA, 19 nt, Artificial Sequence
  Description of Artificial Sequence: Synthetic oligonucleotide
guaaugaguaagaauguca

SEQ ID NO: 1296683 - RNA, 19 nt, Artificial Sequence
  Description of Artificial Sequence: Synthetic oligonucleotide
  modified_base (2)..(2): a, c, u, g, unknown or other
gnuccugcaaggugagugc

SEQ ID NO: 1296684 - RNA, 19 nt, Artificial Sequence
  Description of Artificial Sequence: Synthetic oligonucleotide
uuauugccccaaacuaugc

SEQ ID NO: 1296685 - RNA, 19 nt, Artificial Sequence
  Description of Artificial Sequence: Synthetic oligonucleotide
aaacaauggucgaacauaa

SEQ ID NO: 1296686 - RNA, 19 nt, Artificial Sequence
  Description of Artificial Sequence: Synthetic oligonucleotide
gcuucuaaguaauuaauga

SEQ ID NO: 1296687 - RNA, 19 nt, Artificial Sequence
  Description of Artificial Sequence: Synthetic oligonucleotide
acuuuccuacgccgaagcc

SEQ ID NO: 1296688 - RNA, 19 nt, Artificial Sequence
  Description of Artificial Sequence: Synthetic oligonucleotide
uucgguuacaggaggauuu

SEQ ID NO: 1296689 - RNA, 19 nt, Artificial Sequence
  Description of Artificial Sequence: Synthetic oligonucleotide
ucaguuaaaggggauaauu

SEQ ID NO: 1296690 - RNA, 19 nt, Artificial Sequence
  Description of Artificial Sequence: Synthetic oligonucleotide
cuucuaaguaauuaaugaa

SEQ ID NO: 1296691 - RNA, 19 nt, Artificial Sequence
  Description of Artificial Sequence: Synthetic oligonucleotide
guuauugccccaaacuaug

SEQ ID NO: 1296692 - RNA, 19 nt, Artificial Sequence
  Description of Artificial Sequence: Synthetic oligonucleotide
ugaggaacaaaauccuuuu

SEQ ID NO: 1296693 - RNA, 19 nt, Artificial Sequence
  Description of Artificial Sequence: Synthetic oligonucleotide
agcuguuauugccccaaac

SEQ ID NO: 1296694 - RNA, 19 nt, Artificial Sequence
  Description of Artificial Sequence: Synthetic oligonucleotide
uaugugagagccugucuac

SEQ ID NO: 1296695 - RNA, 19 nt, Artificial Sequence
  Description of Artificial Sequence: Synthetic oligonucleotide
agcuguugaguguguuucc

SEQ ID NO: 1296696 - RNA, 19 nt, Artificial Sequence
  Description of Artificial Sequence: Synthetic oligonucleotide
aacagauuggacaccacaa

SEQ ID NO: 1296697 - RNA, 19 nt, Artificial Sequence
  Description of Artificial Sequence: Synthetic oligonucleotide
acauaucucaaaacacaac

SEQ ID NO: 1296698 - RNA, 19 nt, Artificial Sequence
  Description of Artificial Sequence: Synthetic oligonucleotide
cugcagcucaauacaaggg

SEQ ID NO: 1296699 - RNA, 19 nt, Artificial Sequence
  Description of Artificial Sequence: Synthetic oligonucleotide
uuugggaucaaagguuaca

SEQ ID NO: 1296700 - RNA, 19 nt, Artificial Sequence
  Description of Artificial Sequence: Synthetic oligonucleotide
uugccuucgguuacaggag

SEQ ID NO: 1296701 - RNA, 19 nt, Artificial Sequence
  Description of Artificial Sequence: Synthetic oligonucleotide
uagggcaaugaacuuacau

SEQ ID NO: 1296702 - RNA, 19 nt, Artificial Sequence
  Description of Artificial Sequence: Synthetic oligonucleotide
uaagccgauaauacucuaa

SEQ ID NO: 1296703 - RNA, 19 nt, Artificial Sequence
  Description of Artificial Sequence: Synthetic oligonucleotide
augucaauaauggccauga

SEQ ID NO: 1296704 - RNA, 19 nt, Artificial Sequence
  Description of Artificial Sequence: Synthetic oligonucleotide
gccgauaauacucuaagca

SEQ ID NO: 1296705 - RNA, 19 nt, Artificial Sequence
  Description of Artificial Sequence: Synthetic oligonucleotide
aaguggauagauacaagau

SEQ ID NO: 1296706 - RNA, 19 nt, Artificial Sequence
  Description of Artificial Sequence: Synthetic oligonucleotide
ucuuuaaacaauggucgaa

SEQ ID NO: 1296707 - RNA, 19 nt, Artificial Sequence
  Description of Artificial Sequence: Synthetic oligonucleotide
auugccccaaacuaugcaa

SEQ ID NO: 1296708 - RNA, 19 nt, Artificial Sequence
  Description of Artificial Sequence: Synthetic oligonucleotide
uaaucauauaucgaucauu

SEQ ID NO: 1296709 - RNA, 19 nt, Artificial Sequence
  Description of Artificial Sequence: Synthetic oligonucleotide
acagcauguaagccgauaa

SEQ ID NO: 1296710 - RNA, 19 nt, Artificial Sequence
  Description of Artificial Sequence: Synthetic oligonucleotide
cauaaacaucaauguuugg

SEQ ID NO: 1296711 - RNA, 19 nt, Artificial Sequence
  Description of Artificial Sequence: Synthetic oligonucleotide
acaccucuuuucuagguga

SEQ ID NO: 1296712 - RNA, 19 nt, Artificial Sequence
  Description of Artificial Sequence: Synthetic oligonucleotide
uuugcaucguaaugaguaa

SEQ ID NO: 1296713 - RNA, 19 nt, Artificial Sequence
  Description of Artificial Sequence: Synthetic oligonucleotide
guuuggaucgaacucucca

SEQ ID NO: 1296714 - RNA, 19 nt, Artificial Sequence
  Description of Artificial Sequence: Synthetic oligonucleotide
uccaggcgagaaaagagaa

SEQ ID NO: 1296715 - RNA, 19 nt, Artificial Sequence
  Description of Artificial Sequence: Synthetic oligonucleotide
aucucacauauuaaacagg

SEQ ID NO: 1296716 - RNA, 19 nt, Artificial Sequence
  Description of Artificial Sequence: Synthetic oligonucleotide
  modified_base (6)..(6): a, c, u, g, unknown or other
guuugnuccugcaagguga

SEQ ID NO: 1296717 - RNA, 19 nt, Artificial Sequence
  Description of Artificial Sequence: Synthetic oligonucleotide
ugggauuugccuucgguua

SEQ ID NO: 1296718 - RNA, 19 nt, Artificial Sequence
  Description of Artificial Sequence: Synthetic oligonucleotide
aggugagugcuucaucgag

SEQ ID NO: 1296719 - RNA, 19 nt, Artificial Sequence
  Description of Artificial Sequence: Synthetic oligonucleotide
gagaucucagcuccagcgc

SEQ ID NO: 1296720 - RNA, 19 nt, Artificial Sequence
  Description of Artificial Sequence: Synthetic oligonucleotide
aaaggggaaguggauagau

SEQ ID NO: 1296721 - RNA, 19 nt, Artificial Sequence
  Description of Artificial Sequence: Synthetic oligonucleotide
ugucuacuagauacuuuga

SEQ ID NO: 1296722 - RNA, 19 nt, Artificial Sequence
  Description of Artificial Sequence: Synthetic oligonucleotide
aaggugagugcuucaucga

SEQ ID NO: 1296723 - RNA, 19 nt, Artificial Sequence
  Description of Artificial Sequence: Synthetic oligonucleotide
uaacuugaggccuuuccua

SEQ ID NO: 1296724 - RNA, 19 nt, Artificial Sequence
  Description of Artificial Sequence: Synthetic oligonucleotide
uacgccgaagccaccacca

SEQ ID NO: 1296725 - RNA, 19 nt, Artificial Sequence
  Description of Artificial Sequence: Synthetic oligonucleotide
ggauuuuaaccccuuguac

SEQ ID NO: 1296726 - RNA, 19 nt, Artificial Sequence
  Description of Artificial Sequence: Synthetic oligonucleotide
uugcaucguaaugaguaag

SEQ ID NO: 1296727 - RNA, 19 nt, Artificial Sequence
  Description of Artificial Sequence: Synthetic oligonucleotide
  modified_base (18)..(18): a, c, u, g, unknown or other
uguaacaaggagguuugnu

SEQ ID NO: 1296728 - RNA, 19 nt, Artificial Sequence
  Description of Artificial Sequence: Synthetic oligonucleotide
ucuggguucacggucgaga

SEQ ID NO: 1296729 - RNA, 19 nt, Artificial Sequence
  Description of Artificial Sequence: Synthetic oligonucleotide
accuuauuaacugggauuu

SEQ ID NO: 1296730 - RNA, 19 nt, Artificial Sequence
  Description of Artificial Sequence: Synthetic oligonucleotide
auaauacucuaagcaaaug

SEQ ID NO: 1296731 - RNA, 19 nt, Artificial Sequence
  Description of Artificial Sequence: Synthetic oligonucleotide
uugccccaaacuaugcaac

SEQ ID NO: 1296732 - RNA, 19 nt, Artificial Sequence
  Description of Artificial Sequence: Synthetic oligonucleotide
cuaugcaacuuucagggaa

SEQ ID NO: 1296733 - RNA, 19 nt, Artificial Sequence
  Description of Artificial Sequence: Synthetic oligonucleotide
  modified_base (7)..(7): a, c, u, g, unknown or other
gguuugnuccugcaaggug

SEQ ID NO: 1296734 - RNA, 19 nt, Artificial Sequence
  Description of Artificial Sequence: Synthetic oligonucleotide
uggaucgaacucuccagga

SEQ ID NO: 1296735 - RNA, 19 nt, Artificial Sequence
  Description of Artificial Sequence: Synthetic oligonucleotide
acauauuaaacagggguuu

SEQ ID NO: 1296736 - RNA, 19 nt, Artificial Sequence
  Description of Artificial Sequence: Synthetic oligonucleotide
acggucgagaucucagcuc

SEQ ID NO: 1296737 - RNA, 19 nt, Artificial Sequence
  Description of Artificial Sequence: Synthetic oligonucleotide
gguugguaaauacacaucu

SEQ ID NO: 1296738 - RNA, 19 nt, Artificial Sequence
  Description of Artificial Sequence: Synthetic oligonucleotide
ggaguuaacaucaucagcu

SEQ ID NO: 1296739 - RNA, 19 nt, Artificial Sequence
  Description of Artificial Sequence: Synthetic oligonucleotide
gggcaaugaacuuacauaa

SEQ ID NO: 1296740 - RNA, 19 nt, Artificial Sequence
  Description of Artificial Sequence: Synthetic oligonucleotide
aaugcaucagauacagauu

SEQ ID NO: 1296741 - RNA, 19 nt, Artificial Sequence
  Description of Artificial Sequence: Synthetic oligonucleotide
cuaaccauguaaacaguaa

SEQ ID NO: 1296742 - RNA, 19 nt, Artificial Sequence
  Description of Artificial Sequence: Synthetic oligonucleotide
agggguuuuaaaggcacag

SEQ ID NO: 1296743 - RNA, 19 nt, Artificial Sequence
  Description of Artificial Sequence: Synthetic oligonucleotide
  modified_base (12)..(12): a, c, u, g, unknown or other
aaggagguuugnuccugca

SEQ ID NO: 1296744 - RNA, 19 nt, Artificial Sequence
  Description of Artificial Sequence: Synthetic oligonucleotide
caauacaaggguguaauaa

SEQ ID NO: 1296745 - RNA, 19 nt, Artificial Sequence
  Description of Artificial Sequence: Synthetic oligonucleotide
uacaagauugaugcuggaa

SEQ ID NO: 1296746 - RNA, 19 nt, Artificial Sequence
  Description of Artificial Sequence: Synthetic oligonucleotide
acugggauuugccuucggu

SEQ ID NO: 1296747 - RNA, 19 nt, Artificial Sequence
  Description of Artificial Sequence: Synthetic oligonucleotide
aagauugaugcuggaaguu

SEQ ID NO: 1296748 - RNA, 19 nt, Artificial Sequence
  Description of Artificial Sequence: Synthetic oligonucleotide
acacucaaacagauuggac

SEQ ID NO: 1296749 - RNA, 19 nt, Artificial Sequence
  Description of Artificial Sequence: Synthetic oligonucleotide
uaacuuuccuacgccgaag

SEQ ID NO: 1296750 - RNA, 19 nt, Artificial Sequence
  Description of Artificial Sequence: Synthetic oligonucleotide
cacauguugggcacagcug

SEQ ID NO: 1296751 - RNA, 19 nt, Artificial Sequence
  Description of Artificial Sequence: Synthetic oligonucleotide
acuagauacuuugaacaaa

SEQ ID NO: 1296752 - RNA, 19 nt, Artificial Sequence
  Description of Artificial Sequence: Synthetic oligonucleotide
uguaaguuuugggaucaaa

SEQ ID NO: 1296753 - RNA, 19 nt, Artificial Sequence
  Description of Artificial Sequence: Synthetic oligonucleotide
ucacggucgagaucucagc

SEQ ID NO: 1296754 - RNA, 19 nt, Artificial Sequence
  Description of Artificial Sequence: Synthetic oligonucleotide
cacaauuaacagugcccag

SEQ ID NO: 1296755 - RNA, 19 nt, Artificial Sequence
  Description of Artificial Sequence: Synthetic oligonucleotide
ugcuuuuaugugagagccu

SEQ ID NO: 1296756 - RNA, 19 nt, Artificial Sequence
  Description of Artificial Sequence: Synthetic oligonucleotide
ucgagaucucagcuccagc

SEQ ID NO: 1296757 - RNA, 19 nt, Artificial Sequence
  Description of Artificial Sequence: Synthetic oligonucleotide
gucuacuagauacuuugaa

SEQ ID NO: 1296758 - RNA, 19 nt, Artificial Sequence
  Description of Artificial Sequence: Synthetic oligonucleotide
uggcuugaagauguaacaa

SEQ ID NO: 1296759 - RNA, 19 nt, Artificial Sequence
  Description of Artificial Sequence: Synthetic oligonucleotide
cuuuccuaaaggggaagug

SEQ ID NO: 1296760 - RNA, 19 nt, Artificial Sequence
  Description of Artificial Sequence: Synthetic oligonucleotide
cuguuauugccccaaacua

SEQ ID NO: 1296761 - RNA, 19 nt, Artificial Sequence
  Description of Artificial Sequence: Synthetic oligonucleotide
ucaauacaaggguguaaua

SEQ ID NO: 1296762 - RNA, 19 nt, Artificial Sequence
  Description of Artificial Sequence: Synthetic oligonucleotide
ggagguuacgucaagaugu

SEQ ID NO: 1296763 - RNA, 19 nt, Artificial Sequence
  Description of Artificial Sequence: Synthetic oligonucleotide
cucuuuaaacaauggucga

SEQ ID NO: 1296764 - RNA, 19 nt, Artificial Sequence
  Description of Artificial Sequence: Synthetic oligonucleotide
uacgucaagauguguccaa

SEQ ID NO: 1296765 - RNA, 19 nt, Artificial Sequence
  Description of Artificial Sequence: Synthetic oligonucleotide
uccuaaaggggaaguggau

SEQ ID NO: 1296766 - RNA, 19 nt, Artificial Sequence
  Description of Artificial Sequence: Synthetic oligonucleotide
gauaauacucuaagcaaau

SEQ ID NO: 1296767 - RNA, 19 nt, Artificial Sequence
  Description of Artificial Sequence: Synthetic oligonucleotide
ggcaggucaguacaaagca

SEQ ID NO: 1296768 - RNA, 19 nt, Artificial Sequence
  Description of Artificial Sequence: Synthetic oligonucleotide
caauuaacagugcccagaa

SEQ ID NO: 1296769 - RNA, 19 nt, Artificial Sequence
  Description of Artificial Sequence: Synthetic oligonucleotide
accuucagucaucuuggcu

SEQ ID NO: 1296770 - RNA, 19 nt, Artificial Sequence
  Description of Artificial Sequence: Synthetic oligonucleotide
ugggaucuuggguuuguaa

SEQ ID NO: 1296771 - RNA, 19 nt, Artificial Sequence
  Description of Artificial Sequence: Synthetic oligonucleotide
cauggcauuuaauugcaua

SEQ ID NO: 1296772 - RNA, 19 nt, Artificial Sequence
  Description of Artificial Sequence: Synthetic oligonucleotide
agcgccauguuuaacaguu

SEQ ID NO: 1296773 - RNA, 19 nt, Artificial Sequence
  Description of Artificial Sequence: Synthetic oligonucleotide
guaacuugaggccuuuccu

SEQ ID NO: 1296774 - RNA, 19 nt, Artificial Sequence
  Description of Artificial Sequence: Synthetic oligonucleotide
acuaugcaacuuucaggga

SEQ ID NO: 1296775 - RNA, 19 nt, Artificial Sequence
  Description of Artificial Sequence: Synthetic oligonucleotide
gcuaacgaaucuguggcag

SEQ ID NO: 1296776 - RNA, 19 nt, Artificial Sequence
  Description of Artificial Sequence: Synthetic oligonucleotide
ggaucgaacucuccaggag

SEQ ID NO: 1296777 - RNA, 19 nt, Artificial Sequence
  Description of Artificial Sequence: Synthetic oligonucleotide
aggccuuuccuaaagggga

SEQ ID NO: 1296778 - RNA, 19 nt, Artificial Sequence
  Description of Artificial Sequence: Synthetic oligonucleotide
gagguuacgucaagaugug

SEQ ID NO: 1296779 - RNA, 19 nt, Artificial Sequence
  Description of Artificial Sequence: Synthetic oligonucleotide
uguucccuaugcugcaaaa

SEQ ID NO: 1296780 - RNA, 19 nt, Artificial Sequence
  Description of Artificial Sequence: Synthetic oligonucleotide
gguuacgucaagauguguc

SEQ ID NO: 1296781 - RNA, 19 nt, Artificial Sequence
  Description of Artificial Sequence: Synthetic oligonucleotide
gcauguaagccgauaauac

SEQ ID NO: 1296782 - RNA, 19 nt, Artificial Sequence
  Description of Artificial Sequence: Synthetic oligonucleotide
cuuuccuacgccgaagcca

SEQ ID NO: 1296783 - RNA, 19 nt, Artificial Sequence
  Description of Artificial Sequence: Synthetic oligonucleotide
agcacagcauguaagccga

SEQ ID NO: 1296784 - RNA, 19 nt, Artificial Sequence
  Description of Artificial Sequence: Synthetic oligonucleotide
aagcagucagaugguguug

SEQ ID NO: 1296785 - RNA, 19 nt, Artificial Sequence
  Description of Artificial Sequence: Synthetic oligonucleotide
accgaaucauacagcauug

SEQ ID NO: 1296786 - RNA, 19 nt, Artificial Sequence
  Description of Artificial Sequence: Synthetic oligonucleotide
caucgaguuugguuuuaac

SEQ ID NO: 1296787 - RNA, 19 nt, Artificial Sequence
  Description of Artificial Sequence: Synthetic oligonucleotide
gaguuaacaucaucagcua

SEQ ID NO: 1296788 - RNA, 19 nt, Artificial Sequence
  Description of Artificial Sequence: Synthetic oligonucleotide
aaagcgcuuugaauacugu

SEQ ID NO: 1296789 - RNA, 19 nt, Artificial Sequence
  Description of Artificial Sequence: Synthetic oligonucleotide
guugacgcuggcuuccaga

SEQ ID NO: 1296790 - RNA, 19 nt, Artificial Sequence
  Description of Artificial Sequence: Synthetic oligonucleotide
cauguaagccgauaauacu

SEQ ID NO: 1296791 - RNA, 19 nt, Artificial Sequence
  Description of Artificial Sequence: Synthetic oligonucleotide
agacgcugugaaggcagcc

SEQ ID NO: 1296792 - RNA, 19 nt, Artificial Sequence
  Description of Artificial Sequence: Synthetic oligonucleotide
uuuuaaccccuuguacauc

SEQ ID NO: 1296793 - RNA, 19 nt, Artificial Sequence
  Description of Artificial Sequence: Synthetic oligonucleotide
ggcggugagcuguugagug

SEQ ID NO: 1296794 - RNA, 19 nt, Artificial Sequence
  Description of Artificial Sequence: Synthetic oligonucleotide
uuuugggaucuuggguuug

SEQ ID NO: 1296795 - RNA, 19 nt, Artificial Sequence
  Description of Artificial Sequence: Synthetic oligonucleotide
agauugaugcuggaaguuu

SEQ ID NO: 1296796 - RNA, 19 nt, Artificial Sequence
  Description of Artificial Sequence: Synthetic oligonucleotide
ccgaacuaaagugacuggg

SEQ ID NO: 1296797 - RNA, 19 nt, Artificial Sequence
  Description of Artificial Sequence: Synthetic oligonucleotide
cacaguuuuagggcaauga

SEQ ID NO: 1296798 - RNA, 19 nt, Artificial Sequence
  Description of Artificial Sequence: Synthetic oligonucleotide
aggcccgaacuaaagugac

SEQ ID NO: 1296799 - RNA, 19 nt, Artificial Sequence
  Description of Artificial Sequence: Synthetic oligonucleotide
gaggcccgaacuaaaguga

SEQ ID NO: 1296800 - RNA, 19 nt, Artificial Sequence
  Description of Artificial Sequence: Synthetic oligonucleotide
acaucaauguuuggaucga

SEQ ID NO: 1296801 - RNA, 19 nt, Artificial Sequence
  Description of Artificial Sequence: Synthetic oligonucleotide
  modified_base (11)..(11): a, c, u, g, unknown or other
aggagguuugnuccugcaa

SEQ ID NO: 1296802 - RNA, 19 nt, Artificial Sequence
  Description of Artificial Sequence: Synthetic oligonucleotide
auacaagauugaugcugga

SEQ ID NO: 1296803 - RNA, 19 nt, Artificial Sequence
  Description of Artificial Sequence: Synthetic oligonucleotide
uuagggcaaugaacuuaca

SEQ ID NO: 1296804 - RNA, 19 nt, Artificial Sequence
  Description of Artificial Sequence: Synthetic oligonucleotide
cacauauuaaacagggguu

SEQ ID NO: 1296805 - RNA, 19 nt, Artificial Sequence
  Description of Artificial Sequence: Synthetic oligonucleotide
cuacgccgaagccaccacc

SEQ ID NO: 1296806 - RNA, 19 nt, Artificial Sequence
  Description of Artificial Sequence: Synthetic oligonucleotide
acgcugugaaggcagccca

SEQ ID NO: 1296807 - RNA, 19 nt, Artificial Sequence
  Description of Artificial Sequence: Synthetic oligonucleotide
aggggauaauucauaacaa

SEQ ID NO: 1296808 - RNA, 19 nt, Artificial Sequence
  Description of Artificial Sequence: Synthetic oligonucleotide
guuaaaggggauaauucau

SEQ ID NO: 1296809 - RNA, 19 nt, Artificial Sequence
  Description of Artificial Sequence: Synthetic oligonucleotide
ggggauaauucauaacaaa

SEQ ID NO: 1296810 - RNA, 19 nt, Artificial Sequence
  Description of Artificial Sequence: Synthetic oligonucleotide
uguaccuggagaggcccga

SEQ ID NO: 1296811 - RNA, 19 nt, Artificial Sequence
  Description of Artificial Sequence: Synthetic oligonucleotide
cuguaccuggagaggcccg

SEQ ID NO: 1296812 - RNA, 19 nt, Artificial Sequence
  Description of Artificial Sequence: Synthetic oligonucleotide
uucaguuaaaggggauaau

SEQ ID NO: 1296813 - RNA, 19 nt, Artificial Sequence
  Description of Artificial Sequence: Synthetic oligonucleotide
uuugcagcauggggcagcu

SEQ ID NO: 1296814 - RNA, 19 nt, Artificial Sequence
  Description of Artificial Sequence: Synthetic oligonucleotide
gcuguuauugccccaaacu

SEQ ID NO: 1296815 - RNA, 19 nt, Artificial Sequence
  Description of Artificial Sequence: Synthetic oligonucleotide
uccuacgccgaagccacca

SEQ ID NO: 1296816 - RNA, 19 nt, Artificial Sequence
  Description of Artificial Sequence: Synthetic oligonucleotide
gugcucguguccaucuggg

SEQ ID NO: 1296817 - RNA, 19 nt, Artificial Sequence
  Description of Artificial Sequence: Synthetic oligonucleotide
ugaaacucugcagcucaau

SEQ ID NO: 1296818 - RNA, 19 nt, Artificial Sequence
  Description of Artificial Sequence: Synthetic oligonucleotide
gcccgaacuaaagugacug

SEQ ID NO: 1296819 - RNA, 19 nt, Artificial Sequence
  Description of Artificial Sequence: Synthetic oligonucleotide
caacugcaagacauaucuc

SEQ ID NO: 1296820 - RNA, 19 nt, Artificial Sequence
  Description of Artificial Sequence: Synthetic oligonucleotide
uguggcaggucaguacaaa

SEQ ID NO: 1296821 - RNA, 19 nt, Artificial Sequence
  Description of Artificial Sequence: Synthetic oligonucleotide
guuucaguuaaaggggaua

SEQ ID NO: 1296822 - RNA, 19 nt, Artificial Sequence
  Description of Artificial Sequence: Synthetic oligonucleotide
ggaggauuuuaaccccuug

SEQ ID NO: 1296823 - RNA, 19 nt, Artificial Sequence
  Description of Artificial Sequence: Synthetic oligonucleotide
  modified_base (8)..(8): a, c, u, g, unknown or other
agguuugnuccugcaaggu

SEQ ID NO: 1296824 - RNA, 19 nt, Artificial Sequence
  Description of Artificial Sequence: Synthetic oligonucleotide
caguaaaacugaggguuuc

SEQ ID NO: 1296825 - RNA, 19 nt, Artificial Sequence
  Description of Artificial Sequence: Synthetic oligonucleotide
ccgauaauacucuaagcaa

SEQ ID NO: 1296826 - RNA, 19 nt, Artificial Sequence
  Description of Artificial Sequence: Synthetic oligonucleotide
gggaaguggauagauacaa

SEQ ID NO: 1296827 - RNA, 19 nt, Artificial Sequence
  Description of Artificial Sequence: Synthetic oligonucleotide
ucaucgaguuugguuuuaa

SEQ ID NO: 1296828 - RNA, 19 nt, Artificial Sequence
  Description of Artificial Sequence: Synthetic oligonucleotide
caucguaaugaguaagaau

SEQ ID NO: 1296829 - RNA, 19 nt, Artificial Sequence
  Description of Artificial Sequence: Synthetic oligonucleotide
cucaauacaaggguguaau

SEQ ID NO: 1296830 - RNA, 19 nt, Artificial Sequence
  Description of Artificial Sequence: Synthetic oligonucleotide
aacaauggucgaacauaaa

SEQ ID NO: 1296831 - RNA, 19 nt, Artificial Sequence
  Description of Artificial Sequence: Synthetic oligonucleotide
agcaaggggcuuuccugga

SEQ ID NO: 1296832 - RNA, 19 nt, Artificial Sequence
  Description of Artificial Sequence: Synthetic oligonucleotide
agagccugucuacuagaua

SEQ ID NO: 1296833 - RNA, 19 nt, Artificial Sequence
  Description of Artificial Sequence: Synthetic oligonucleotide
cuauguuacaguggaguua

SEQ ID NO: 1296834 - RNA, 19 nt, Artificial Sequence
  Description of Artificial Sequence: Synthetic oligonucleotide
gggauuugccuucgguuac

SEQ ID NO: 1296835 - RNA, 19 nt, Artificial Sequence
  Description of Artificial Sequence: Synthetic oligonucleotide
gguguugacgcuggcuucc

SEQ ID NO: 1296836 - RNA, 19 nt, Artificial Sequence
  Description of Artificial Sequence: Synthetic oligonucleotide
uaucgaucauuagguuggu

SEQ ID NO: 1296837 - RNA, 19 nt, Artificial Sequence
  Description of Artificial Sequence: Synthetic oligonucleotide
cugcaagacauaucucaaa

SEQ ID NO: 1296838 - RNA, 19 nt, Artificial Sequence
  Description of Artificial Sequence: Synthetic oligonucleotide
uggguucacggucgagauc

SEQ ID NO: 1296839 - RNA, 19 nt, Artificial Sequence
  Description of Artificial Sequence: Synthetic oligonucleotide
caccuucagucaucuuggc

SEQ ID NO: 1296840 - RNA, 19 nt, Artificial Sequence
  Description of Artificial Sequence: Synthetic oligonucleotide
aggggcuuuccuggacccc

SEQ ID NO: 1296841 - RNA, 19 nt, Artificial Sequence
  Description of Artificial Sequence: Synthetic oligonucleotide
cgauaauacucuaagcaaa

SEQ ID NO: 1296842 - RNA, 19 nt, Artificial Sequence
  Description of Artificial Sequence: Synthetic oligonucleotide
ccacaauuaacagugccca

SEQ ID NO: 1296843 - RNA, 19 nt, Artificial Sequence
  Description of Artificial Sequence: Synthetic oligonucleotide
ggguucacggucgagaucu

SEQ ID NO: 1296844 - RNA, 19 nt, Artificial Sequence
  Description of Artificial Sequence: Synthetic oligonucleotide
uuaaccccuuguacaucuu

SEQ ID NO: 1296845 - RNA, 19 nt, Artificial Sequence
  Description of Artificial Sequence: Synthetic oligonucleotide
agccuucccgugcucgugu

SEQ ID NO: 1296846 - RNA, 19 nt, Artificial Sequence
  Description of Artificial Sequence: Synthetic oligonucleotide
cucuaagcaaauguaguau

SEQ ID NO: 1296847 - RNA, 19 nt, Artificial Sequence
  Description of Artificial Sequence: Synthetic oligonucleotide
cccgaacuaaagugacugg

SEQ ID NO: 1296848 - RNA, 19 nt, Artificial Sequence
  Description of Artificial Sequence: Synthetic oligonucleotide
cacaugcuguauauuaaau

SEQ ID NO: 1296849 - RNA, 19 nt, Artificial Sequence
  Description of Artificial Sequence: Synthetic oligonucleotide
gcaggucaguacaaagcag

SEQ ID NO: 1296850 - RNA, 19 nt, Artificial Sequence
  Description of Artificial Sequence: Synthetic oligonucleotide
guacaccucuuuucuaggu

SEQ ID NO: 1296851 - RNA, 19 nt, Artificial Sequence
  Description of Artificial Sequence: Synthetic oligonucleotide
ucgguuacaggaggauuuu

SEQ ID NO: 1296852 - RNA, 19 nt, Artificial Sequence
  Description of Artificial Sequence: Synthetic oligonucleotide
guaagccgauaauacucua

SEQ ID NO: 1296853 - RNA, 19 nt, Artificial Sequence
  Description of Artificial Sequence: Synthetic oligonucleotide
ucuguaacuugaggccuuu

SEQ ID NO: 1296854 - RNA, 19 nt, Artificial Sequence
  Description of Artificial Sequence: Synthetic oligonucleotide
cggucgagaucucagcucc

SEQ ID NO: 1296855 - RNA, 19 nt, Artificial Sequence
  Description of Artificial Sequence: Synthetic oligonucleotide
augcaacuuucagggaacu

SEQ ID NO: 1296856 - RNA, 19 nt, Artificial Sequence
  Description of Artificial Sequence: Synthetic oligonucleotide
cagcucaauacaagggugu

SEQ ID NO: 1296857 - RNA, 19 nt, Artificial Sequence
  Description of Artificial Sequence: Synthetic oligonucleotide
uucaucgaguuugguuuua

SEQ ID NO: 1296858 - RNA, 19 nt, Artificial Sequence
  Description of Artificial Sequence: Synthetic oligonucleotide
gaucuuggguuuguaaguu

SEQ ID NO: 1296859 - RNA, 19 nt, Artificial Sequence
  Description of Artificial Sequence: Synthetic oligonucleotide
gaaucuguggcaggucagu

SEQ ID NO: 1296860 - RNA, 19 nt, Artificial Sequence
  Description of Artificial Sequence: Synthetic oligonucleotide
ccagcacaguuuuagggca

SEQ ID NO: 1296861 - RNA, 19 nt, Artificial Sequence
  Description of Artificial Sequence: Synthetic oligonucleotide
acgucaagauguguccaau

SEQ ID NO: 1296862 - RNA, 19 nt, Artificial Sequence
  Description of Artificial Sequence: Synthetic oligonucleotide
gcuguaccuggagaggccc

SEQ ID NO: 1296863 - RNA, 19 nt, Artificial Sequence
  Description of Artificial Sequence: Synthetic oligonucleotide
  modified_base (4)..(4): a, c, u, g, unknown or other
uugnuccugcaaggugagu

SEQ ID NO: 1296864 - RNA, 19 nt, Artificial Sequence
  Description of Artificial Sequence: Synthetic oligonucleotide
auggucgaacauaaaccuu

SEQ ID NO: 1296865 - RNA, 19 nt, Artificial Sequence
  Description of Artificial Sequence: Synthetic oligonucleotide
cuucccgugcucgugucca

SEQ ID NO: 1296866 - RNA, 19 nt, Artificial Sequence
  Description of Artificial Sequence: Synthetic oligonucleotide
cagggguuuuaaaggcaca

SEQ ID NO: 1296867 - RNA, 19 nt, Artificial Sequence
  Description of Artificial Sequence: Synthetic oligonucleotide
cguaaugaguaagaauguc

SEQ ID NO: 1296868 - RNA, 19 nt, Artificial Sequence
  Description of Artificial Sequence: Synthetic oligonucleotide
ucguguccaucuggggcug

SEQ ID NO: 1296869 - RNA, 19 nt, Artificial Sequence
  Description of Artificial Sequence: Synthetic oligonucleotide
uuccuacgccgaagccacc

SEQ ID NO: 1296870 - RNA, 19 nt, Artificial Sequence
  Description of Artificial Sequence: Synthetic oligonucleotide
agcacaguuuuagggcaau

SEQ ID NO: 1296871 - RNA, 19 nt, Artificial Sequence
  Description of Artificial Sequence: Synthetic oligonucleotide
cugggauuugccuucgguu

SEQ ID NO: 1296872 - RNA, 19 nt, Artificial Sequence
  Description of Artificial Sequence: Synthetic oligonucleotide
ggguuucaguuaaagggga

SEQ ID NO: 1296873 - RNA, 19 nt, Artificial Sequence
  Description of Artificial Sequence: Synthetic oligonucleotide
uuguaaguuuugggaucaa

SEQ ID NO: 1296874 - RNA, 19 nt, Artificial Sequence
  Description of Artificial Sequence: Synthetic oligonucleotide
agccugucuacuagauacu

SEQ ID NO: 1296875 - RNA, 19 nt, Artificial Sequence
  Description of Artificial Sequence: Synthetic oligonucleotide
agguuacgucaagaugugu

SEQ ID NO: 1296876 - RNA, 19 nt, Artificial Sequence
  Description of Artificial Sequence: Synthetic oligonucleotide
caggagguuacgucaagau

SEQ ID NO: 1296877 - RNA, 19 nt, Artificial Sequence
  Description of Artificial Sequence: Synthetic oligonucleotide
cgugcucguguccaucugg

SEQ ID NO: 1296878 - RNA, 19 nt, Artificial Sequence
  Description of Artificial Sequence: Synthetic oligonucleotide
gcaucguaaugaguaagaa

SEQ ID NO: 1296879 - RNA, 19 nt, Artificial Sequence
  Description of Artificial Sequence: Synthetic oligonucleotide
cacggucgagaucucagcu

SEQ ID NO: 1296880 - RNA, 19 nt, Artificial Sequence
  Description of Artificial Sequence: Synthetic oligonucleotide
gucagaugguguugacgcu

SEQ ID NO: 1296881 - RNA, 19 nt, Artificial Sequence
  Description of Artificial Sequence: Synthetic oligonucleotide
cauauuaaacagggguuuu

SEQ ID NO: 1296882 - RNA, 19 nt, Artificial Sequence
  Description of Artificial Sequence: Synthetic oligonucleotide
guucuggguucacggucga

SEQ ID NO: 1296883 - RNA, 19 nt, Artificial Sequence
  Description of Artificial Sequence: Synthetic oligonucleotide
gcaaggggcuuuccuggac

SEQ ID NO: 1296884 - RNA, 19 nt, Artificial Sequence
  Description of Artificial Sequence: Synthetic oligonucleotide
cuggguucacggucgagau

SEQ ID NO: 1296885 - RNA, 19 nt, Artificial Sequence
  Description of Artificial Sequence: Synthetic oligonucleotide
gccuuuccuaaaggggaag

SEQ ID NO: 1296886 - RNA, 19 nt, Artificial Sequence
  Description of Artificial Sequence: Synthetic oligonucleotide
cagcauggggcagcuuuuc

SEQ ID NO: 1296887 - RNA, 19 nt, Artificial Sequence
  Description of Artificial Sequence: Synthetic oligonucleotide
cugcaaggugagugcuuca

SEQ ID NO: 1296888 - RNA, 19 nt, Artificial Sequence
  Description of Artificial Sequence: Synthetic oligonucleotide
ccuuauuaacugggauuug

SEQ ID NO: 1296889 - RNA, 19 nt, Artificial Sequence
  Description of Artificial Sequence: Synthetic oligonucleotide
cuguggcaggucaguacaa

SEQ ID NO: 1296890 - RNA, 19 nt, Artificial Sequence
  Description of Artificial Sequence: Synthetic oligonucleotide
guucccuaugcugcaaaau

SEQ ID NO: 1296891 - RNA, 19 nt, Artificial Sequence
  Description of Artificial Sequence: Synthetic oligonucleotide
gcaggagguuacgucaaga

SEQ ID NO: 1296892 - RNA, 19 nt, Artificial Sequence
  Description of Artificial Sequence: Synthetic oligonucleotide
ggugagugcuucaucgagu

SEQ ID NO: 1296893 - RNA, 19 nt, Artificial Sequence
  Description of Artificial Sequence: Synthetic oligonucleotide
ggauuugccuucgguuaca

SEQ ID NO: 1296894 - RNA, 19 nt, Artificial Sequence
  Description of Artificial Sequence: Synthetic oligonucleotide
gcucaauacaaggguguaa

SEQ ID NO: 1296895 - RNA, 19 nt, Artificial Sequence
  Description of Artificial Sequence: Synthetic oligonucleotide
cacagcauguaagccgaua

SEQ ID NO: 1296896 - RNA, 19 nt, Artificial Sequence
  Description of Artificial Sequence: Synthetic oligonucleotide
gcugugaaggcagcccaca

SEQ ID NO: 1296897 - RNA, 19 nt, Artificial Sequence
  Description of Artificial Sequence: Synthetic oligonucleotide
cagcauguaagccgauaau

SEQ ID NO: 1296898 - RNA, 19 nt, Artificial Sequence
  Description of Artificial Sequence: Synthetic oligonucleotide
cauguucccuaugcugcaa

SEQ ID NO: 1296899 - RNA, 19 nt, Artificial Sequence
  Description of Artificial Sequence: Synthetic oligonucleotide
cacaaccagcacaguuuua

SEQ ID NO: 1296900 - RNA, 19 nt, Artificial Sequence
  Description of Artificial Sequence: Synthetic oligonucleotide
ccuucccgugcucgugucc

SEQ ID NO: 1296901 - RNA, 19 nt, Artificial Sequence
  Description of Artificial Sequence: Synthetic oligonucleotide
cuucgguuacaggaggauu

SEQ ID NO: 1296902 - RNA, 19 nt, Artificial Sequence
  Description of Artificial Sequence: Synthetic oligonucleotide
ccuacgccgaagccaccac

SEQ ID NO: 1296903 - RNA, 19 nt, Artificial Sequence
  Description of Artificial Sequence: Synthetic oligonucleotide
ggcaaugaacuuacauaau

SEQ ID NO: 1296904 - RNA, 19 nt, Artificial Sequence
  Description of Artificial Sequence: Synthetic oligonucleotide
gguuucaguuaaaggggau

SEQ ID NO: 1296905 - RNA, 19 nt, Artificial Sequence
  Description of Artificial Sequence: Synthetic oligonucleotide
guaccuggagaggcccgaa

SEQ ID NO: 1296906 - RNA, 19 nt, Artificial Sequence
  Description of Artificial Sequence: Synthetic oligonucleotide
gccuucgguuacaggagga

SEQ ID NO: 1296907 - RNA, 19 nt, Artificial Sequence
  Description of Artificial Sequence: Synthetic oligonucleotide
ggucgaacauaaaccuuau

SEQ ID NO: 1296908 - RNA, 19 nt, Artificial Sequence
  Description of Artificial Sequence: Synthetic oligonucleotide
ccgaaucauacagcauuga

SEQ ID NO: 1296909 - RNA, 19 nt, Artificial Sequence
  Description of Artificial Sequence: Synthetic oligonucleotide
gcggugagcuguugagugu

SEQ ID NO: 1296910 - RNA, 19 nt, Artificial Sequence
  Description of Artificial Sequence: Synthetic oligonucleotide
cgucaagauguguccaaua

SEQ ID NO: 1296911 - RNA, 19 nt, Artificial Sequence
  Description of Artificial Sequence: Synthetic oligonucleotide
gcccagaaaccgaaucaua

SEQ ID NO: 1296912 - RNA, 19 nt, Artificial Sequence
  Description of Artificial Sequence: Synthetic oligonucleotide
acgcuggcuuccagacgcu

SEQ ID NO: 1296913 - RNA, 19 nt, Artificial Sequence
  Description of Artificial Sequence: Synthetic oligonucleotide
gccuucccgugcucguguc

SEQ ID NO: 1296914 - RNA, 19 nt, Artificial Sequence
  Description of Artificial Sequence: Synthetic oligonucleotide
ccgugcucguguccaucug

SEQ ID NO: 1296915 - RNA, 19 nt, Artificial Sequence
  Description of Artificial Sequence: Synthetic oligonucleotide
gccugucuacuagauacuu

SEQ ID NO: 1296916 - RNA, 19 nt, Artificial Sequence
  Description of Artificial Sequence: Synthetic oligonucleotide
gguucacggucgagaucuc

SEQ ID NO: 1296917 - RNA, 19 nt, Artificial Sequence
  Description of Artificial Sequence: Synthetic oligonucleotide
ggcccgaacuaaagugacu

SEQ ID NO: 1296918 - RNA, 19 nt, Artificial Sequence
  Description of Artificial Sequence: Synthetic oligonucleotide
cccgugcucguguccaucu

SEQ ID NO: 1296919 - RNA, 19 nt, Artificial Sequence
  Description of Artificial Sequence: Synthetic oligonucleotide
gggcggugagcuguugagu

SEQ ID NO: 1296920 - RNA, 19 nt, Artificial Sequence
  Description of Artificial Sequence: Synthetic oligonucleotide
ccagccuucccgugcucgu

SEQ ID NO: 1296921 - RNA, 19 nt, Artificial Sequence
  Description of Artificial Sequence: Synthetic oligonucleotide
cgguuacaggaggauuuua

SEQ ID NO: 1296922 - RNA, 19 nt, Artificial Sequence
  Description of Artificial Sequence: Synthetic oligonucleotide
gcgccauguuuaacaguuu

SEQ ID NO: 1296923 - RNA, 19 nt, Artificial Sequence
  Description of Artificial Sequence: Synthetic oligonucleotide
aagauaaugagucucaacc

SEQ ID NO: 1296924 - RNA, 19 nt, Artificial Sequence
  Description of Artificial Sequence: Synthetic oligonucleotide
aauuacuggaauuccaugg

SEQ ID NO: 1296925 - RNA, 19 nt, Artificial Sequence
  Description of Artificial Sequence: Synthetic oligonucleotide
auuaacuaaagucccagcc

SEQ ID NO: 1296926 - RNA, 19 nt, Artificial Sequence
  Description of Artificial Sequence: Synthetic oligonucleotide
uuaagauauauacaaaaug

SEQ ID NO: 1296927 - RNA, 19 nt, Artificial Sequence
  Description of Artificial Sequence: Synthetic oligonucleotide
aauaauggguuuucagagc

SEQ ID NO: 1296928 - RNA, 19 nt, Artificial Sequence
  Description of Artificial Sequence: Synthetic oligonucleotide
aagauauauacaaaauggc

SEQ ID NO: 1296929 - RNA, 19 nt, Artificial Sequence
  Description of Artificial Sequence: Synthetic oligonucleotide
aaugacuuaaugcuaaaga

SEQ ID NO: 1296930 - RNA, 19 nt, Artificial Sequence
  Description of Artificial Sequence: Synthetic oligonucleotide
aaauaauuacuggaauucc

SEQ ID NO: 1296931 - RNA, 19 nt, Artificial Sequence
  Description of Artificial Sequence: Synthetic oligonucleotide
aaaagggucagaguaacac

SEQ ID NO: 1296932 - RNA, 19 nt, Artificial Sequence
  Description of Artificial Sequence: Synthetic oligonucleotide
auaaguguuuauuaguuag

SEQ ID NO: 1296933 - RNA, 19 nt, Artificial Sequence
  Description of Artificial Sequence: Synthetic oligonucleotide
uuuuaagauauauacaaaa

SEQ ID NO: 1296934 - RNA, 19 nt, Artificial Sequence
  Description of Artificial Sequence: Synthetic oligonucleotide
ugacuuaaugcuaaagaag

SEQ ID NO: 1296935 - RNA, 19 nt, Artificial Sequence
  Description of Artificial Sequence: Synthetic oligonucleotide
uaugcaggaaaucucacca

SEQ ID NO: 1296936 - RNA, 19 nt, Artificial Sequence
  Description of Artificial Sequence: Synthetic oligonucleotide
gucaguaacagcucaaggg

SEQ ID NO: 1296937 - RNA, 19 nt, Artificial Sequence
  Description of Artificial Sequence: Synthetic oligonucleotide
aucuuuauccccuguaugg

SEQ ID NO: 1296938 - RNA, 19 nt, Artificial Sequence
  Description of Artificial Sequence: Synthetic oligonucleotide
acauugaucacuuuauucu

SEQ ID NO: 1296939 - RNA, 19 nt, Artificial Sequence
  Description of Artificial Sequence: Synthetic oligonucleotide
cuuguaauccuacugaaac

SEQ ID NO: 1296940 - RNA, 19 nt, Artificial Sequence
  Description of Artificial Sequence: Synthetic oligonucleotide
gacuuaaugcuaaagaagc

SEQ ID NO: 1296941 - RNA, 19 nt, Artificial Sequence
  Description of Artificial Sequence: Synthetic oligonucleotide
acugguaagacacaggagu

SEQ ID NO: 1296942 - RNA, 19 nt, Artificial Sequence
  Description of Artificial Sequence: Synthetic oligonucleotide
aaggcaauuugccagucag

SEQ ID NO: 1296943 - RNA, 19 nt, Artificial Sequence
  Description of Artificial Sequence: Synthetic oligonucleotide
aagggucagaguaacaccc

SEQ ID NO: 1296944 - RNA, 19 nt, Artificial Sequence
  Description of Artificial Sequence: Synthetic oligonucleotide
ugugcauuauuaacuaaag

SEQ ID NO: 1296945 - RNA, 19 nt, Artificial Sequence
  Description of Artificial Sequence: Synthetic oligonucleotide
uuaaugcuaaagaagcugu

SEQ ID NO: 1296946 - RNA, 19 nt, Artificial Sequence
  Description of Artificial Sequence: Synthetic oligonucleotide
uaugacuuucccaguaagg

SEQ ID NO: 1296947 - RNA, 19 nt, Artificial Sequence
  Description of Artificial Sequence: Synthetic oligonucleotide
gaauaagguaugaaggccg

SEQ ID NO: 1296948 - RNA, 19 nt, Artificial Sequence
  Description of Artificial Sequence: Synthetic oligonucleotide
guagguaaagguuuguuug

SEQ ID NO: 1296949 - RNA, 19 nt, Artificial Sequence
  Description of Artificial Sequence: Synthetic oligonucleotide
cauguuuugcacucaaagg

SEQ ID NO: 1296950 - RNA, 19 nt, Artificial Sequence
  Description of Artificial Sequence: Synthetic oligonucleotide
auaagcaucccucaggaga

SEQ ID NO: 1296951 - RNA, 19 nt, Artificial Sequence
  Description of Artificial Sequence: Synthetic oligonucleotide
uguuuauuaguuagcaccu

SEQ ID NO: 1296952 - RNA, 19 nt, Artificial Sequence
  Description of Artificial Sequence: Synthetic oligonucleotide
ucaauaaggcuuguaaucc

SEQ ID NO: 1296953 - RNA, 19 nt, Artificial Sequence
  Description of Artificial Sequence: Synthetic oligonucleotide
uuaacuaaagucccagccu

SEQ ID NO: 1296954 - RNA, 19 nt, Artificial Sequence
  Description of Artificial Sequence: Synthetic oligonucleotide
aacuucggaauguacagca

SEQ ID NO: 1296955 - RNA, 19 nt, Artificial Sequence
  Description of Artificial Sequence: Synthetic oligonucleotide
uucaauaaggcuuguaauc

SEQ ID NO: 1296956 - RNA, 19 nt, Artificial Sequence
  Description of Artificial Sequence: Synthetic oligonucleotide
uaauaucugaggaugugca

SEQ ID NO: 1296957 - RNA, 19 nt, Artificial Sequence
  Description of Artificial Sequence: Synthetic oligonucleotide
uucggaauguacagcaggg

SEQ ID NO: 1296958 - RNA, 19 nt, Artificial Sequence
  Description of Artificial Sequence: Synthetic oligonucleotide
aaugaugagagcugaacuu

SEQ ID NO: 1296959 - RNA, 19 nt, Artificial Sequence
  Description of Artificial Sequence: Synthetic oligonucleotide
uuuauuaguuagcaccugu

SEQ ID NO: 1296960 - RNA, 19 nt, Artificial Sequence
  Description of Artificial Sequence: Synthetic oligonucleotide
ugagcuacgccuaaaggcu

SEQ ID NO: 1296961 - RNA, 19 nt, Artificial Sequence
  Description of Artificial Sequence: Synthetic oligonucleotide
uuauuaacuaaagucccag

SEQ ID NO: 1296962 - RNA, 19 nt, Artificial Sequence
  Description of Artificial Sequence: Synthetic oligonucleotide
acugguuucacacuacaug

SEQ ID NO: 1296963 - RNA, 19 nt, Artificial Sequence
  Description of Artificial Sequence: Synthetic oligonucleotide
uacaugaguagguaaaggu

SEQ ID NO: 1296964 - RNA, 19 nt, Artificial Sequence
  Description of Artificial Sequence: Synthetic oligonucleotide
aguguuuauuaguuagcac

SEQ ID NO: 1296965 - RNA, 19 nt, Artificial Sequence
  Description of Artificial Sequence: Synthetic oligonucleotide
uuucacacuacaugaguag

SEQ ID NO: 1296966 - RNA, 19 nt, Artificial Sequence
  Description of Artificial Sequence: Synthetic oligonucleotide
ucaaugacaguugaacucc

SEQ ID NO: 1296967 - RNA, 19 nt, Artificial Sequence
  Description of Artificial Sequence: Synthetic oligonucleotide
auaauggguuuucagagcu

SEQ ID NO: 1296968 - RNA, 19 nt, Artificial Sequence
  Description of Artificial Sequence: Synthetic oligonucleotide
acauauugcacugguaugg

SEQ ID NO: 1296969 - RNA, 19 nt, Artificial Sequence
  Description of Artificial Sequence: Synthetic oligonucleotide
acauaagauuuccaaaucu

SEQ ID NO: 1296970 - RNA, 19 nt, Artificial Sequence
  Description of Artificial Sequence: Synthetic oligonucleotide
aauauuuucccaauggcuu

SEQ ID NO: 1296971 - RNA, 19 nt, Artificial Sequence
  Description of Artificial Sequence: Synthetic oligonucleotide
aagguaugaaggccgagug

SEQ ID NO: 1296972 - RNA, 19 nt, Artificial Sequence
  Description of Artificial Sequence: Synthetic oligonucleotide
acuggaauuccaugggugg

SEQ ID NO: 1296973 - RNA, 19 nt, Artificial Sequence
  Description of Artificial Sequence: Synthetic oligonucleotide
aaccagaucccuaauaucu

SEQ ID NO: 1296974 - RNA, 19 nt, Artificial Sequence
  Description of Artificial Sequence: Synthetic oligonucleotide
acaaucauugcacugguaa

SEQ ID NO: 1296975 - RNA, 19 nt, Artificial Sequence
  Description of Artificial Sequence: Synthetic oligonucleotide
aaaucuuuauccccuguau

SEQ ID NO: 1296976 - RNA, 19 nt, Artificial Sequence
  Description of Artificial Sequence: Synthetic oligonucleotide
ugagaugaauccugguccg

SEQ ID NO: 1296977 - RNA, 19 nt, Artificial Sequence
  Description of Artificial Sequence: Synthetic oligonucleotide
aauaauuacuggaauucca

SEQ ID NO: 1296978 - RNA, 19 nt, Artificial Sequence
  Description of Artificial Sequence: Synthetic oligonucleotide
ucucucacaaucauugcac

SEQ ID NO: 1296979 - RNA, 19 nt, Artificial Sequence
  Description of Artificial Sequence: Synthetic oligonucleotide
ucuaaugguuuuccucugg

SEQ ID NO: 1296980 - RNA, 19 nt, Artificial Sequence
  Description of Artificial Sequence: Synthetic oligonucleotide
augacuuaaugcuaaagaa

SEQ ID NO: 1296981 - RNA, 19 nt, Artificial Sequence
  Description of Artificial Sequence: Synthetic oligonucleotide
ucugagaugaauccugguc

SEQ ID NO: 1296982 - RNA, 19 nt, Artificial Sequence
  Description of Artificial Sequence: Synthetic oligonucleotide
ucuuccauuuucagcaacc

SEQ ID NO: 1296983 - RNA, 19 nt, Artificial Sequence
  Description of Artificial Sequence: Synthetic oligonucleotide
gauucuaaugguuuuccuc

SEQ ID NO: 1296984 - RNA, 19 nt, Artificial Sequence
  Description of Artificial Sequence: Synthetic oligonucleotide
uucaguucaaugacaguug

SEQ ID NO: 1296985 - RNA, 19 nt, Artificial Sequence
  Description of Artificial Sequence: Synthetic oligonucleotide
ugagaugcaggccaaggga

SEQ ID NO: 1296986 - RNA, 19 nt, Artificial Sequence
  Description of Artificial Sequence: Synthetic oligonucleotide
uacauugaucacuuuauuc

SEQ ID NO: 1296987 - RNA, 19 nt, Artificial Sequence
  Description of Artificial Sequence: Synthetic oligonucleotide
ccuacuaugacuuucccag

SEQ ID NO: 1296988 - RNA, 19 nt, Artificial Sequence
  Description of Artificial Sequence: Synthetic oligonucleotide
augguuuuccucugguuac

SEQ ID NO: 1296989 - RNA, 19 nt, Artificial Sequence
  Description of Artificial Sequence: Synthetic oligonucleotide
uuccagauaauaauggguu

SEQ ID NO: 1296990 - RNA, 19 nt, Artificial Sequence
  Description of Artificial Sequence: Synthetic oligonucleotide
uucucucacaaucauugca

SEQ ID NO: 1296991 - RNA, 19 nt, Artificial Sequence
  Description of Artificial Sequence: Synthetic oligonucleotide
agcauaagcaucccucagg

SEQ ID NO: 1296992 - RNA, 19 nt, Artificial Sequence
  Description of Artificial Sequence: Synthetic oligonucleotide
caguugaacuccaacuucg

SEQ ID NO: 1296993 - RNA, 19 nt, Artificial Sequence
  Description of Artificial Sequence: Synthetic oligonucleotide
aaguguuuauuaguuagca

SEQ ID NO: 1296994 - RNA, 19 nt, Artificial Sequence
  Description of Artificial Sequence: Synthetic oligonucleotide
uaugcaucuccugaucugg

SEQ ID NO: 1296995 - RNA, 19 nt, Artificial Sequence
  Description of Artificial Sequence: Synthetic oligonucleotide
aaugagucucaaccagauc

SEQ ID NO: 1296996 - RNA, 19 nt, Artificial Sequence
  Description of Artificial Sequence: Synthetic oligonucleotide
uaauccuacugaaacuucu

SEQ ID NO: 1296997 - RNA, 19 nt, Artificial Sequence
  Description of Artificial Sequence: Synthetic oligonucleotide
gagagcugaacuuccaaug

SEQ ID NO: 1296998 - RNA, 19 nt, Artificial Sequence
  Description of Artificial Sequence: Synthetic oligonucleotide
uuugggacacauauugcac

SEQ ID NO: 1296999 - RNA, 19 nt, Artificial Sequence
  Description of Artificial Sequence: Synthetic oligonucleotide
auacaaaauggccuuggug

SEQ ID NO: 1297000 - RNA, 19 nt, Artificial Sequence
  Description of Artificial Sequence: Synthetic oligonucleotide
uacgccuaaaggcuuuggg

SEQ ID NO: 1297001 - RNA, 19 nt, Artificial Sequence
  Description of Artificial Sequence: Synthetic oligonucleotide
uggaagauaaugagucuca

SEQ ID NO: 1297002 - RNA, 19 nt, Artificial Sequence
  Description of Artificial Sequence: Synthetic oligonucleotide
guucaucugagaugaaucc

SEQ ID NO: 1297003 - RNA, 19 nt, Artificial Sequence
  Description of Artificial Sequence: Synthetic oligonucleotide
aguuucaauauuuucccaa

SEQ ID NO: 1297004 - RNA, 19 nt, Artificial Sequence
  Description of Artificial Sequence: Synthetic oligonucleotide
uccucacauucauagacag

SEQ ID NO: 1297005 - RNA, 19 nt, Artificial Sequence
  Description of Artificial Sequence: Synthetic oligonucleotide
ggaguuucaauauuuuccc

SEQ ID NO: 1297006 - RNA, 19 nt, Artificial Sequence
  Description of Artificial Sequence: Synthetic oligonucleotide
gaggaugugcauuauuaac

SEQ ID NO: 1297007 - RNA, 19 nt, Artificial Sequence
  Description of Artificial Sequence: Synthetic oligonucleotide
uauuaguuagcaccuguau

SEQ ID NO: 1297008 - RNA, 19 nt, Artificial Sequence
  Description of Artificial Sequence: Synthetic oligonucleotide
ucuuuauccccuguauggg

SEQ ID NO: 1297009 - RNA, 19 nt, Artificial Sequence
  Description of Artificial Sequence: Synthetic oligonucleotide
uucacacuacaugaguagg

SEQ ID NO: 1297010 - RNA, 19 nt, Artificial Sequence
  Description of Artificial Sequence: Synthetic oligonucleotide
uauuaacuaaagucccagc

SEQ ID NO: 1297011 - RNA, 19 nt, Artificial Sequence
  Description of Artificial Sequence: Synthetic oligonucleotide
gaucccuaauaucugagga

SEQ ID NO: 1297012 - RNA, 19 nt, Artificial Sequence
  Description of Artificial Sequence: Synthetic oligonucleotide
uccugguccguccaucugg

SEQ ID NO: 1297013 - RNA, 19 nt, Artificial Sequence
  Description of Artificial Sequence: Synthetic oligonucleotide
cuucggaauguacagcagg

SEQ ID NO: 1297014 - RNA, 19 nt, Artificial Sequence
  Description of Artificial Sequence: Synthetic oligonucleotide
uguauuccucggcuggagg

SEQ ID NO: 1297015 - RNA, 19 nt, Artificial Sequence
  Description of Artificial Sequence: Synthetic oligonucleotide
ugacucugacuucugagga

SEQ ID NO: 1297016 - RNA, 19 nt, Artificial Sequence
  Description of Artificial Sequence: Synthetic oligonucleotide
ucaagggugacuucaguuc

SEQ ID NO: 1297017 - RNA, 19 nt, Artificial Sequence
  Description of Artificial Sequence: Synthetic oligonucleotide
agaucccuaauaucugagg

SEQ ID NO: 1297018 - RNA, 19 nt, Artificial Sequence
  Description of Artificial Sequence: Synthetic oligonucleotide
uuaaggcacucucacagaa

SEQ ID NO: 1297019 - RNA, 19 nt, Artificial Sequence
  Description of Artificial Sequence: Synthetic oligonucleotide
agagcuaugcaggaaaucu

SEQ ID NO: 1297020 - RNA, 19 nt, Artificial Sequence
  Description of Artificial Sequence: Synthetic oligonucleotide
accccugcaacucugaagu

SEQ ID NO: 1297021 - RNA, 19 nt, Artificial Sequence
  Description of Artificial Sequence: Synthetic oligonucleotide
aaaucucaccagcauauuu

SEQ ID NO: 1297022 - RNA, 19 nt, Artificial Sequence
  Description of Artificial Sequence: Synthetic oligonucleotide
uagagguucaucugagaug

SEQ ID NO: 1297023 - RNA, 19 nt, Artificial Sequence
  Description of Artificial Sequence: Synthetic oligonucleotide
ugagucucaaccagauccc

SEQ ID NO: 1297024 - RNA, 19 nt, Artificial Sequence
  Description of Artificial Sequence: Synthetic oligonucleotide
cauugaucacuuuauucug

SEQ ID NO: 1297025 - RNA, 19 nt, Artificial Sequence
  Description of Artificial Sequence: Synthetic oligonucleotide
cuaauaucugaggaugugc

SEQ ID NO: 1297026 - RNA, 19 nt, Artificial Sequence
  Description of Artificial Sequence: Synthetic oligonucleotide
uugccagucaggaagccca

SEQ ID NO: 1297027 - RNA, 19 nt, Artificial Sequence
  Description of Artificial Sequence: Synthetic oligonucleotide
aaggcacucucacagaauu

SEQ ID NO: 1297028 - RNA, 19 nt, Artificial Sequence
  Description of Artificial Sequence: Synthetic oligonucleotide
cuuaguaugcaucuccuga

SEQ ID NO: 1297029 - RNA, 19 nt, Artificial Sequence
  Description of Artificial Sequence: Synthetic oligonucleotide
gagaucugagcugugacug

SEQ ID NO: 1297030 - RNA, 19 nt, Artificial Sequence
  Description of Artificial Sequence: Synthetic oligonucleotide
ucccuaauaucugaggaug

SEQ ID NO: 1297031 - RNA, 19 nt, Artificial Sequence
  Description of Artificial Sequence: Synthetic oligonucleotide
gaagauaaugagucucaac

SEQ ID NO: 1297032 - RNA, 19 nt, Artificial Sequence
  Description of Artificial Sequence: Synthetic oligonucleotide
cagccuaugacuucugcag

SEQ ID NO: 1297033 - RNA, 19 nt, Artificial Sequence
  Description of Artificial Sequence: Synthetic oligonucleotide
cuaugcaggaaaucucacc

SEQ ID NO: 1297034 - RNA, 19 nt, Artificial Sequence
  Description of Artificial Sequence: Synthetic oligonucleotide
gacauaagauuuccaaauc

SEQ ID NO: 1297035 - RNA, 19 nt, Artificial Sequence
  Description of Artificial Sequence: Synthetic oligonucleotide
guuacuuucuagcauugga

SEQ ID NO: 1297036 - RNA, 19 nt, Artificial Sequence
  Description of Artificial Sequence: Synthetic oligonucleotide
cuugugaagggcucauuag

SEQ ID NO: 1297037 - RNA, 19 nt, Artificial Sequence
  Description of Artificial Sequence: Synthetic oligonucleotide
uugauucuaaugguuuucc

SEQ ID NO: 1297038 - RNA, 19 nt, Artificial Sequence
  Description of Artificial Sequence: Synthetic oligonucleotide
aauccuacugaaacuucuc

SEQ ID NO: 1297039 - RNA, 19 nt, Artificial Sequence
  Description of Artificial Sequence: Synthetic oligonucleotide
uucuguguauuccucggcu

SEQ ID NO: 1297040 - RNA, 19 nt, Artificial Sequence
  Description of Artificial Sequence: Synthetic oligonucleotide
gaugaauccugguccgucc

SEQ ID NO: 1297041 - RNA, 19 nt, Artificial Sequence
  Description of Artificial Sequence: Synthetic oligonucleotide
aaccccugcaacucugaag

SEQ ID NO: 1297042 - RNA, 19 nt, Artificial Sequence
  Description of Artificial Sequence: Synthetic oligonucleotide
ugaaugaugagagcugaac

SEQ ID NO: 1297043 - RNA, 19 nt, Artificial Sequence
  Description of Artificial Sequence: Synthetic oligonucleotide
uauacaaaauggccuuggu

SEQ ID NO: 1297044 - RNA, 19 nt, Artificial Sequence
  Description of Artificial Sequence: Synthetic oligonucleotide
ggcuuugggacacauauug

SEQ ID NO: 1297045 - RNA, 19 nt, Artificial Sequence
  Description of Artificial Sequence: Synthetic oligonucleotide
caaucauugcacugguaag

SEQ ID NO: 1297046 - RNA, 19 nt, Artificial Sequence
  Description of Artificial Sequence: Synthetic oligonucleotide
uuauuaguuagcaccugua

SEQ ID NO: 1297047 - RNA, 19 nt, Artificial Sequence
  Description of Artificial Sequence: Synthetic oligonucleotide
cugguuucacacuacauga

SEQ ID NO: 1297048 - RNA, 19 nt, Artificial Sequence
  Description of Artificial Sequence: Synthetic oligonucleotide
uuccauuuucagcaacccc

SEQ ID NO: 1297049 - RNA, 19 nt, Artificial Sequence
  Description of Artificial Sequence: Synthetic oligonucleotide
aguagguaaagguuuguuu

SEQ ID NO: 1297050 - RNA, 19 nt, Artificial Sequence
  Description of Artificial Sequence: Synthetic oligonucleotide
ggugacuucaguucaauga

SEQ ID NO: 1297051 - RNA, 19 nt, Artificial Sequence
  Description of Artificial Sequence: Synthetic oligonucleotide
ugguuucacacuacaugag

SEQ ID NO: 1297052 - RNA, 19 nt, Artificial Sequence
  Description of Artificial Sequence: Synthetic oligonucleotide
uuaguaugcaucuccugau

SEQ ID NO: 1297053 - RNA, 19 nt, Artificial Sequence
  Description of Artificial Sequence: Synthetic oligonucleotide
ugcagucaguaacagcuca

SEQ ID NO: 1297054 - RNA, 19 nt, Artificial Sequence
  Description of Artificial Sequence: Synthetic oligonucleotide
auaagauuuccaaaucuga

SEQ ID NO: 1297055 - RNA, 19 nt, Artificial Sequence
  Description of Artificial Sequence: Synthetic oligonucleotide
ucacacuacaugaguaggu

SEQ ID NO: 1297056 - RNA, 19 nt, Artificial Sequence
  Description of Artificial Sequence: Synthetic oligonucleotide
agagcugaacuuccaauga

SEQ ID NO: 1297057 - RNA, 19 nt, Artificial Sequence
  Description of Artificial Sequence: Synthetic oligonucleotide
aaugcuaaagaagcuguuu

SEQ ID NO: 1297058 - RNA, 19 nt, Artificial Sequence
  Description of Artificial Sequence: Synthetic oligonucleotide
uuggaagauaaugagucuc

SEQ ID NO: 1297059 - RNA, 19 nt, Artificial Sequence
  Description of Artificial Sequence: Synthetic oligonucleotide
uagguaaagguuuguuugu

SEQ ID NO: 1297060 - RNA, 19 nt, Artificial Sequence
  Description of Artificial Sequence: Synthetic oligonucleotide
aggaugugcauuauuaacu

SEQ ID NO: 1297061 - RNA, 19 nt, Artificial Sequence
  Description of Artificial Sequence: Synthetic oligonucleotide
gacuuucccaguaagguuc

SEQ ID NO: 1297062 - RNA, 19 nt, Artificial Sequence
  Description of Artificial Sequence: Synthetic oligonucleotide
cuguuuaaggcacucucac

SEQ ID NO: 1297063 - RNA, 19 nt, Artificial Sequence
  Description of Artificial Sequence: Synthetic oligonucleotide
uguacagcaggggucacug

SEQ ID NO: 1297064 - RNA, 19 nt, Artificial Sequence
  Description of Artificial Sequence: Synthetic oligonucleotide
uguuuaaggcacucucaca

SEQ ID NO: 1297065 - RNA, 19 nt, Artificial Sequence
  Description of Artificial Sequence: Synthetic oligonucleotide
aauuccauggguggcacau

SEQ ID NO: 1297066 - RNA, 19 nt, Artificial Sequence
  Description of Artificial Sequence: Synthetic oligonucleotide
cuaugacuuucccaguaag

SEQ ID NO: 1297067 - RNA, 19 nt, Artificial Sequence
  Description of Artificial Sequence: Synthetic oligonucleotide
uuuaaggcacucucacaga

SEQ ID NO: 1297068 - RNA, 19 nt, Artificial Sequence
  Description of Artificial Sequence: Synthetic oligonucleotide
ugggacacauauugcacug

SEQ ID NO: 1297069 - RNA, 19 nt, Artificial Sequence
  Description of Artificial Sequence: Synthetic oligonucleotide
ugcuaaagaagcuguuuaa

SEQ ID NO: 1297070 - RNA, 19 nt, Artificial Sequence
  Description of Artificial Sequence: Synthetic oligonucleotide
agucaggaagcccauuuga

SEQ ID NO: 1297071 - RNA, 19 nt, Artificial Sequence
  Description of Artificial Sequence: Synthetic oligonucleotide
ugaggaugugcauuauuaa

SEQ ID NO: 1297072 - RNA, 19 nt, Artificial Sequence
  Description of Artificial Sequence: Synthetic oligonucleotide
ugucucaggagaugugagc

SEQ ID NO: 1297073 - RNA, 19 nt, Artificial Sequence
  Description of Artificial Sequence: Synthetic oligonucleotide
gaaugaugagagcugaacu

SEQ ID NO: 1297074 - RNA, 19 nt, Artificial Sequence
  Description of Artificial Sequence: Synthetic oligonucleotide
guuagcaccuguauacaag

SEQ ID NO: 1297075 - RNA, 19 nt, Artificial Sequence
  Description of Artificial Sequence: Synthetic oligonucleotide
uaagguaugaaggccgagu

SEQ ID NO: 1297076 - RNA, 19 nt, Artificial Sequence
  Description of Artificial Sequence: Synthetic oligonucleotide
cuacaugaguagguaaagg

SEQ ID NO: 1297077 - RNA, 19 nt, Artificial Sequence
  Description of Artificial Sequence: Synthetic oligonucleotide
acuacaugaguagguaaag

SEQ ID NO: 1297078 - RNA, 19 nt, Artificial Sequence
  Description of Artificial Sequence: Synthetic oligonucleotide
gaugaaugaugagagcuga

SEQ ID NO: 1297079 - RNA, 19 nt, Artificial Sequence
  Description of Artificial Sequence: Synthetic oligonucleotide
aguacauugaucacuuuau

SEQ ID NO: 1297080 - RNA, 19 nt, Artificial Sequence
  Description of Artificial Sequence: Synthetic oligonucleotide
aauaagguaugaaggccga

SEQ ID NO: 1297081 - RNA, 19 nt, Artificial Sequence
  Description of Artificial Sequence: Synthetic oligonucleotide
uccuacugaaacuucucuc

SEQ ID NO: 1297082 - RNA, 19 nt, Artificial Sequence
  Description of Artificial Sequence: Synthetic oligonucleotide
aauggcuuuccacccuacu

SEQ ID NO: 1297083 - RNA, 19 nt, Artificial Sequence
  Description of Artificial Sequence: Synthetic oligonucleotide
uacuaugacuuucccagua

SEQ ID NO: 1297084 - RNA, 19 nt, Artificial Sequence
  Description of Artificial Sequence: Synthetic oligonucleotide
cacauauugcacugguaug

SEQ ID NO: 1297085 - RNA, 19 nt, Artificial Sequence
  Description of Artificial Sequence: Synthetic oligonucleotide
uucuagcauuggaagauaa

SEQ ID NO: 1297086 - RNA, 19 nt, Artificial Sequence
  Description of Artificial Sequence: Synthetic oligonucleotide
uuuccacccuacuaugacu

SEQ ID NO: 1297087 - RNA, 19 nt, Artificial Sequence
  Description of Artificial Sequence: Synthetic oligonucleotide
gaauguacagcagggguca

SEQ ID NO: 1297088 - RNA, 19 nt, Artificial Sequence
  Description of Artificial Sequence: Synthetic oligonucleotide
ugaagugagccugggagcu

SEQ ID NO: 1297089 - RNA, 19 nt, Artificial Sequence
  Description of Artificial Sequence: Synthetic oligonucleotide
cauucacaaugacuuaaug

SEQ ID NO: 1297090 - RNA, 19 nt, Artificial Sequence
  Description of Artificial Sequence: Synthetic oligonucleotide
ugauucuaaugguuuuccu

SEQ ID NO: 1297091 - RNA, 19 nt, Artificial Sequence
  Description of Artificial Sequence: Synthetic oligonucleotide
auuauuaacuaaaguccca

SEQ ID NO: 1297092 - RNA, 19 nt, Artificial Sequence
  Description of Artificial Sequence: Synthetic oligonucleotide
agacuuccagauaauaaug

SEQ ID NO: 1297093 - RNA, 19 nt, Artificial Sequence
  Description of Artificial Sequence: Synthetic oligonucleotide
uucuaaugguuuuccucug

SEQ ID NO: 1297094 - RNA, 19 nt, Artificial Sequence
  Description of Artificial Sequence: Synthetic oligonucleotide
acgccuaaaggcuuuggga

SEQ ID NO: 1297095 - RNA, 19 nt, Artificial Sequence
  Description of Artificial Sequence: Synthetic oligonucleotide
auucugugauguucaagga

SEQ ID NO: 1297096 - RNA, 19 nt, Artificial Sequence
  Description of Artificial Sequence: Synthetic oligonucleotide
uuccacccuacuaugacuu

SEQ ID NO: 1297097 - RNA, 19 nt, Artificial Sequence
  Description of Artificial Sequence: Synthetic oligonucleotide
caaugacuuaaugcuaaag

SEQ ID NO: 1297098 - RNA, 19 nt, Artificial Sequence
  Description of Artificial Sequence: Synthetic oligonucleotide
uguagagguucaucugaga

SEQ ID NO: 1297099 - RNA, 19 nt, Artificial Sequence
  Description of Artificial Sequence: Synthetic oligonucleotide
agaugaauccugguccguc

SEQ ID NO: 1297100 - RNA, 19 nt, Artificial Sequence
  Description of Artificial Sequence: Synthetic oligonucleotide
ucccaagaguaacaaaauu

SEQ ID NO: 1297101 - RNA, 19 nt, Artificial Sequence
  Description of Artificial Sequence: Synthetic oligonucleotide
ugaagggcucauuagccua

SEQ ID NO: 1297102 - RNA, 19 nt, Artificial Sequence
  Description of Artificial Sequence: Synthetic oligonucleotide
aagcaggacauaagauuuc

SEQ ID NO: 1297103 - RNA, 19 nt, Artificial Sequence
  Description of Artificial Sequence: Synthetic oligonucleotide
ucaggaagcccauuugauu

SEQ ID NO: 1297104 - RNA, 19 nt, Artificial Sequence
  Description of Artificial Sequence: Synthetic oligonucleotide
acugugacagaaguuuucu

SEQ ID NO: 1297105 - RNA, 19 nt, Artificial Sequence
  Description of Artificial Sequence: Synthetic oligonucleotide
agcugaacuuccaaugaag

SEQ ID NO: 1297106 - RNA, 19 nt, Artificial Sequence
  Description of Artificial Sequence: Synthetic oligonucleotide
uugcacugguaagacacag

SEQ ID NO: 1297107 - RNA, 19 nt, Artificial Sequence
  Description of Artificial Sequence: Synthetic oligonucleotide
acccuacuaugacuuuccc

SEQ ID NO: 1297108 - RNA, 19 nt, Artificial Sequence
  Description of Artificial Sequence: Synthetic oligonucleotide
cuacugaaacuucucucac

SEQ ID NO: 1297109 - RNA, 19 nt, Artificial Sequence
  Description of Artificial Sequence: Synthetic oligonucleotide
ccuaaucuuaguaugcauc

SEQ ID NO: 1297110 - RNA, 19 nt, Artificial Sequence
  Description of Artificial Sequence: Synthetic oligonucleotide
aauaaggcuuguaauccua

SEQ ID NO: 1297111 - RNA, 19 nt, Artificial Sequence
  Description of Artificial Sequence: Synthetic oligonucleotide
ugacuucugaggacaggca

SEQ ID NO: 1297112 - RNA, 19 nt, Artificial Sequence
  Description of Artificial Sequence: Synthetic oligonucleotide
caggacauaagauuuccaa

SEQ ID NO: 1297113 - RNA, 19 nt, Artificial Sequence
  Description of Artificial Sequence: Synthetic oligonucleotide
uaguaugcaucuccugauc

SEQ ID NO: 1297114 - RNA, 19 nt, Artificial Sequence
  Description of Artificial Sequence: Synthetic oligonucleotide
cucggcuggaggcaagucc

SEQ ID NO: 1297115 - RNA, 19 nt, Artificial Sequence
  Description of Artificial Sequence: Synthetic oligonucleotide
aguuagcaccuguauacaa

SEQ ID NO: 1297116 - RNA, 19 nt, Artificial Sequence
  Description of Artificial Sequence: Synthetic oligonucleotide
caccagcauauuuaauaag

SEQ ID NO: 1297117 - RNA, 19 nt, Artificial Sequence
  Description of Artificial Sequence: Synthetic oligonucleotide
ccaacuucggaauguacag

SEQ ID NO: 1297118 - RNA, 19 nt, Artificial Sequence
  Description of Artificial Sequence: Synthetic oligonucleotide
acuaugacuuucccaguaa

SEQ ID NO: 1297119 - RNA, 19 nt, Artificial Sequence
  Description of Artificial Sequence: Synthetic oligonucleotide
ucugacuucugaggacagg

SEQ ID NO: 1297120 - RNA, 19 nt, Artificial Sequence
  Description of Artificial Sequence: Synthetic oligonucleotide
uuugccagucaggaagccc

SEQ ID NO: 1297121 - RNA, 19 nt, Artificial Sequence
  Description of Artificial Sequence: Synthetic oligonucleotide
gaucugggaaccaggcugc

SEQ ID NO: 1297122 - RNA, 19 nt, Artificial Sequence
  Description of Artificial Sequence: Synthetic oligonucleotide
auaaugagucucaaccaga

SEQ ID NO: 1297123 - RNA, 19 nt, Artificial Sequence
  Description of Artificial Sequence: Synthetic oligonucleotide
auauugcacugguauggcu

SEQ ID NO: 1297124 - RNA, 19 nt, Artificial Sequence
  Description of Artificial Sequence: Synthetic oligonucleotide
cuaugacuucugcagucag

SEQ ID NO: 1297125 - RNA, 19 nt, Artificial Sequence
  Description of Artificial Sequence: Synthetic oligonucleotide
uggugcuugaugagaucug

SEQ ID NO: 1297126 - RNA, 19 nt, Artificial Sequence
  Description of Artificial Sequence: Synthetic oligonucleotide
agauaauaauggguuuuca

SEQ ID NO: 1297127 - RNA, 19 nt, Artificial Sequence
  Description of Artificial Sequence: Synthetic oligonucleotide
gacucugacuucugaggac

SEQ ID NO: 1297128 - RNA, 19 nt, Artificial Sequence
  Description of Artificial Sequence: Synthetic oligonucleotide
guaagguucuggaacaaaa

SEQ ID NO: 1297129 - RNA, 19 nt, Artificial Sequence
  Description of Artificial Sequence: Synthetic oligonucleotide
acuuaaugcuaaagaagcu

SEQ ID NO: 1297130 - RNA, 19 nt, Artificial Sequence
  Description of Artificial Sequence: Synthetic oligonucleotide
auaucugaggaugugcauu

SEQ ID NO: 1297131 - RNA, 19 nt, Artificial Sequence
  Description of Artificial Sequence: Synthetic oligonucleotide
agucccagccuaugacuuc

SEQ ID NO: 1297132 - RNA, 19 nt, Artificial Sequence
  Description of Artificial Sequence: Synthetic oligonucleotide
caaccagaucccuaauauc

SEQ ID NO: 1297133 - RNA, 19 nt, Artificial Sequence
  Description of Artificial Sequence: Synthetic oligonucleotide
acacuacaugaguagguaa

SEQ ID NO: 1297134 - RNA, 19 nt, Artificial Sequence
  Description of Artificial Sequence: Synthetic oligonucleotide
cauaagcaucccucaggag

SEQ ID NO: 1297135 - RNA, 19 nt, Artificial Sequence
  Description of Artificial Sequence: Synthetic oligonucleotide
cugaugaaugaugagagcu

SEQ ID NO: 1297136 - RNA, 19 nt, Artificial Sequence
  Description of Artificial Sequence: Synthetic oligonucleotide
gaaacugguuucacacuac

SEQ ID NO: 1297137 - RNA, 19 nt, Artificial Sequence
  Description of Artificial Sequence: Synthetic oligonucleotide
aaggcacaaagcaggacau

SEQ ID NO: 1297138 - RNA, 19 nt, Artificial Sequence
  Description of Artificial Sequence: Synthetic oligonucleotide
cucugguuacuuucuagca

SEQ ID NO: 1297139 - RNA, 19 nt, Artificial Sequence
  Description of Artificial Sequence: Synthetic oligonucleotide
gucccuaaucuuaguaugc

SEQ ID NO: 1297140 - RNA, 19 nt, Artificial Sequence
  Description of Artificial Sequence: Synthetic oligonucleotide
uauuccucggcuggaggca

SEQ ID NO: 1297141 - RNA, 19 nt, Artificial Sequence
  Description of Artificial Sequence: Synthetic oligonucleotide
augaguagguaaagguuug

SEQ ID NO: 1297142 - RNA, 19 nt, Artificial Sequence
  Description of Artificial Sequence: Synthetic oligonucleotide
acaugaguagguaaagguu

SEQ ID NO: 1297143 - RNA, 19 nt, Artificial Sequence
  Description of Artificial Sequence: Synthetic oligonucleotide
guuuauuaguuagcaccug

SEQ ID NO: 1297144 - RNA, 19 nt, Artificial Sequence
  Description of Artificial Sequence: Synthetic oligonucleotide
aagcaucccucaggagacc

SEQ ID NO: 1297145 - RNA, 19 nt, Artificial Sequence
  Description of Artificial Sequence: Synthetic oligonucleotide
cacugugacagaaguuuuc

SEQ ID NO: 1297146 - RNA, 19 nt, Artificial Sequence
  Description of Artificial Sequence: Synthetic oligonucleotide
ggagaccugagaugcaggc

SEQ ID NO: 1297147 - RNA, 19 nt, Artificial Sequence
  Description of Artificial Sequence: Synthetic oligonucleotide
ccucugguuacuuucuagc

SEQ ID NO: 1297148 - RNA, 19 nt, Artificial Sequence
  Description of Artificial Sequence: Synthetic oligonucleotide
caugaguagguaaagguuu

SEQ ID NO: 1297149 - RNA, 19 nt, Artificial Sequence
  Description of Artificial Sequence: Synthetic oligonucleotide
agggucagaguaacacccc

SEQ ID NO: 1297150 - RNA, 19 nt, Artificial Sequence
  Description of Artificial Sequence: Synthetic oligonucleotide
guugaacuccaacuucgga

SEQ ID NO: 1297151 - RNA, 19 nt, Artificial Sequence
  Description of Artificial Sequence: Synthetic oligonucleotide
agccuaugacuucugcagu

SEQ ID NO: 1297152 - RNA, 19 nt, Artificial Sequence
  Description of Artificial Sequence: Synthetic oligonucleotide
ggacauaagauuuccaaau

SEQ ID NO: 1297153 - RNA, 19 nt, Artificial Sequence
  Description of Artificial Sequence: Synthetic oligonucleotide
uguguauuccucggcugga

SEQ ID NO: 1297154 - RNA, 19 nt, Artificial Sequence
  Description of Artificial Sequence: Synthetic oligonucleotide
uccauggguggcacauuca

SEQ ID NO: 1297155 - RNA, 19 nt, Artificial Sequence
  Description of Artificial Sequence: Synthetic oligonucleotide
aucugagaugaauccuggu

SEQ ID NO: 1297156 - RNA, 19 nt, Artificial Sequence
  Description of Artificial Sequence: Synthetic oligonucleotide
cauuucgcuuuguagaggu

SEQ ID NO: 1297157 - RNA, 19 nt, Artificial Sequence
  Description of Artificial Sequence: Synthetic oligonucleotide
ugaguagguaaagguuugu

SEQ ID NO: 1297158 - RNA, 19 nt, Artificial Sequence
  Description of Artificial Sequence: Synthetic oligonucleotide
gagcugaacuuccaaugaa

SEQ ID NO: 1297159 - RNA, 19 nt, Artificial Sequence
  Description of Artificial Sequence: Synthetic oligonucleotide
aacugguuucacacuacau

SEQ ID NO: 1297160 - RNA, 19 nt, Artificial Sequence
  Description of Artificial Sequence: Synthetic oligonucleotide
auaagguaugaaggccgag

SEQ ID NO: 1297161 - RNA, 19 nt, Artificial Sequence
  Description of Artificial Sequence: Synthetic oligonucleotide
gcuugaugagaucugagcu

SEQ ID NO: 1297162 - RNA, 19 nt, Artificial Sequence
  Description of Artificial Sequence: Synthetic oligonucleotide
cuccucacauucauagaca

SEQ ID NO: 1297163 - RNA, 19 nt, Artificial Sequence
  Description of Artificial Sequence: Synthetic oligonucleotide
cuucaguucaaugacaguu

SEQ ID NO: 1297164 - RNA, 19 nt, Artificial Sequence
  Description of Artificial Sequence: Synthetic oligonucleotide
uccugcauuucgcuuugua

SEQ ID NO: 1297165 - RNA, 19 nt, Artificial Sequence
  Description of Artificial Sequence: Synthetic oligonucleotide
cagucaggaagcccauuug

SEQ ID NO: 1297166 - RNA, 19 nt, Artificial Sequence
  Description of Artificial Sequence: Synthetic oligonucleotide
uggaggcaagucccuaauc

SEQ ID NO: 1297167 - RNA, 19 nt, Artificial Sequence
  Description of Artificial Sequence: Synthetic oligonucleotide
agguucaucugagaugaau

SEQ ID NO: 1297168 - RNA, 19 nt, Artificial Sequence
  Description of Artificial Sequence: Synthetic oligonucleotide
uuucuagcauuggaagaua

SEQ ID NO: 1297169 - RNA, 19 nt, Artificial Sequence
  Description of Artificial Sequence: Synthetic oligonucleotide
ucucaccagcauauuuaau

SEQ ID NO: 1297170 - RNA, 19 nt, Artificial Sequence
  Description of Artificial Sequence: Synthetic oligonucleotide
ggaugugcauuauuaacua

SEQ ID NO: 1297171 - RNA, 19 nt, Artificial Sequence
  Description of Artificial Sequence: Synthetic oligonucleotide
aaugacaguugaacuccaa

SEQ ID NO: 1297172 - RNA, 19 nt, Artificial Sequence
  Description of Artificial Sequence: Synthetic oligonucleotide
aggcaauuugccagucagg

SEQ ID NO: 1297173 - RNA, 19 nt, Artificial Sequence
  Description of Artificial Sequence: Synthetic oligonucleotide
ugaauccugguccguccau

SEQ ID NO: 1297174 - RNA, 19 nt, Artificial Sequence
  Description of Artificial Sequence: Synthetic oligonucleotide
uggugaagacuuccagaua

SEQ ID NO: 1297175 - RNA, 19 nt, Artificial Sequence
  Description of Artificial Sequence: Synthetic oligonucleotide
guaauccuacugaaacuuc

SEQ ID NO: 1297176 - RNA, 19 nt, Artificial Sequence
  Description of Artificial Sequence: Synthetic oligonucleotide
gacacuugugaagggcuca

SEQ ID NO: 1297177 - RNA, 19 nt, Artificial Sequence
  Description of Artificial Sequence: Synthetic oligonucleotide
gauuuccaaaucugacacu

SEQ ID NO: 1297178 - RNA, 19 nt, Artificial Sequence
  Description of Artificial Sequence: Synthetic oligonucleotide
aacuaaagucccagccuau

SEQ ID NO: 1297179 - RNA, 19 nt, Artificial Sequence
  Description of Artificial Sequence: Synthetic oligonucleotide
gucacugugacagaaguuu

SEQ ID NO: 1297180 - RNA, 19 nt, Artificial Sequence
  Description of Artificial Sequence: Synthetic oligonucleotide
ucucaggagaugugagcua

SEQ ID NO: 1297181 - RNA, 19 nt, Artificial Sequence
  Description of Artificial Sequence: Synthetic oligonucleotide
gcaccuguauacaaggcac

SEQ ID NO: 1297182 - RNA, 19 nt, Artificial Sequence
  Description of Artificial Sequence: Synthetic oligonucleotide
ucucaaccagaucccuaau

SEQ ID NO: 1297183 - RNA, 19 nt, Artificial Sequence
  Description of Artificial Sequence: Synthetic oligonucleotide
aguaagguucuggaacaaa

SEQ ID NO: 1297184 - RNA, 19 nt, Artificial Sequence
  Description of Artificial Sequence: Synthetic oligonucleotide
gacuucugaggacaggcau

SEQ ID NO: 1297185 - RNA, 19 nt, Artificial Sequence
  Description of Artificial Sequence: Synthetic oligonucleotide
acuucggaauguacagcag

SEQ ID NO: 1297186 - RNA, 19 nt, Artificial Sequence
  Description of Artificial Sequence: Synthetic oligonucleotide
uccacauguuuugcacuca

SEQ ID NO: 1297187 - RNA, 19 nt, Artificial Sequence
  Description of Artificial Sequence: Synthetic oligonucleotide
gccaagggaaggcaauuug

SEQ ID NO: 1297188 - RNA, 19 nt, Artificial Sequence
  Description of Artificial Sequence: Synthetic oligonucleotide
ugguaagacacaggaguuu

SEQ ID NO: 1297189 - RNA, 19 nt, Artificial Sequence
  Description of Artificial Sequence: Synthetic oligonucleotide
acauucacaaugacuuaau

SEQ ID NO: 1297190 - RNA, 19 nt, Artificial Sequence
  Description of Artificial Sequence: Synthetic oligonucleotide
ggcacucucacagaauuuc

SEQ ID NO: 1297191 - RNA, 19 nt, Artificial Sequence
  Description of Artificial Sequence: Synthetic oligonucleotide
cuuucuagcauuggaagau

SEQ ID NO: 1297192 - RNA, 19 nt, Artificial Sequence
  Description of Artificial Sequence: Synthetic oligonucleotide
ugguuuuccucugguuacu

SEQ ID NO: 1297193 - RNA, 19 nt, Artificial Sequence
  Description of Artificial Sequence: Synthetic oligonucleotide
gaauccugguccguccauc

SEQ ID NO: 1297194 - RNA, 19 nt, Artificial Sequence
  Description of Artificial Sequence: Synthetic oligonucleotide
gucucaggagaugugagcu

SEQ ID NO: 1297195 - RNA, 19 nt, Artificial Sequence
  Description of Artificial Sequence: Synthetic oligonucleotide
cgccuaaaggcuuugggac

SEQ ID NO: 1297196 - RNA, 19 nt, Artificial Sequence
  Description of Artificial Sequence: Synthetic oligonucleotide
ggcuuuccacccuacuaug

SEQ ID NO: 1297197 - RNA, 19 nt, Artificial Sequence
  Description of Artificial Sequence: Synthetic oligonucleotide
guguauuccucggcuggag

SEQ ID NO: 1297198 - RNA, 19 nt, Artificial Sequence
  Description of Artificial Sequence: Synthetic oligonucleotide
gguuucacacuacaugagu

SEQ ID NO: 1297199 - RNA, 19 nt, Artificial Sequence
  Description of Artificial Sequence: Synthetic oligonucleotide
cuccugaucugggaaccag

SEQ ID NO: 1297200 - RNA, 19 nt, Artificial Sequence
  Description of Artificial Sequence: Synthetic oligonucleotide
cugacacuugugaagggcu

SEQ ID NO: 1297201 - RNA, 19 nt, Artificial Sequence
  Description of Artificial Sequence: Synthetic oligonucleotide
caauggcuuuccacccuac

SEQ ID NO: 1297202 - RNA, 19 nt, Artificial Sequence
  Description of Artificial Sequence: Synthetic oligonucleotide
caccuguauacaaggcaca

SEQ ID NO: 1297203 - RNA, 19 nt, Artificial Sequence
  Description of Artificial Sequence: Synthetic oligonucleotide
cuacgccuaaaggcuuugg

SEQ ID NO: 1297204 - RNA, 19 nt, Artificial Sequence
  Description of Artificial Sequence: Synthetic oligonucleotide
cuuuauccccuguaugggu

SEQ ID NO: 1297205 - RNA, 19 nt, Artificial Sequence
  Description of Artificial Sequence: Synthetic oligonucleotide
cuaaugguuuuccucuggu

SEQ ID NO: 1297206 - RNA, 19 nt, Artificial Sequence
  Description of Artificial Sequence: Synthetic oligonucleotide
ggcacaaagcaggacauaa

SEQ ID NO: 1297207 - RNA, 19 nt, Artificial Sequence
  Description of Artificial Sequence: Synthetic oligonucleotide
cacaggaguuucaauauuu

SEQ ID NO: 1297208 - RNA, 19 nt, Artificial Sequence
  Description of Artificial Sequence: Synthetic oligonucleotide
guaacagcucaagggugac

SEQ ID NO: 1297209 - RNA, 19 nt, Artificial Sequence
  Description of Artificial Sequence: Synthetic oligonucleotide
agguaaagguuuguuuguu

SEQ ID NO: 1297210 - RNA, 19 nt, Artificial Sequence
  Description of Artificial Sequence: Synthetic oligonucleotide
ccuaauaucugaggaugug

SEQ ID NO: 1297211 - RNA, 19 nt, Artificial Sequence
  Description of Artificial Sequence: Synthetic oligonucleotide
agcaucccucaggagaccu

SEQ ID NO: 1297212 - RNA, 19 nt, Artificial Sequence
  Description of Artificial Sequence: Synthetic oligonucleotide
ggcuuguaauccuacugaa

SEQ ID NO: 1297213 - RNA, 19 nt, Artificial Sequence
  Description of Artificial Sequence: Synthetic oligonucleotide
gcauuucgcuuuguagagg

SEQ ID NO: 1297214 - RNA, 19 nt, Artificial Sequence
  Description of Artificial Sequence: Synthetic oligonucleotide
gggacacauauugcacugg

SEQ ID NO: 1297215 - RNA, 19 nt, Artificial Sequence
  Description of Artificial Sequence: Synthetic oligonucleotide
gccuaugacuucugcaguc

SEQ ID NO: 1297216 - RNA, 19 nt, Artificial Sequence
  Description of Artificial Sequence: Synthetic oligonucleotide
agccugggagcugccacuc

SEQ ID NO: 1297217 - RNA, 19 nt, Artificial Sequence
  Description of Artificial Sequence: Synthetic oligonucleotide
ccugguccguccaucuggg

SEQ ID NO: 1297218 - RNA, 19 nt, Artificial Sequence
  Description of Artificial Sequence: Synthetic oligonucleotide
uccccuguauggguccucu

SEQ ID NO: 1297219 - RNA, 19 nt, Artificial Sequence
  Description of Artificial Sequence: Synthetic oligonucleotide
cacacuacaugaguaggua

SEQ ID NO: 1297220 - RNA, 19 nt, Artificial Sequence
  Description of Artificial Sequence: Synthetic oligonucleotide
gacacauauugcacuggua

SEQ ID NO: 1297221 - RNA, 19 nt, Artificial Sequence
  Description of Artificial Sequence: Synthetic oligonucleotide
gccuaaaggcuuugggaca

SEQ ID NO: 1297222 - RNA, 19 nt, Artificial Sequence
  Description of Artificial Sequence: Synthetic oligonucleotide
cacucucacagaauuuccu

SEQ ID NO: 1297223 - RNA, 19 nt, Artificial Sequence
  Description of Artificial Sequence: Synthetic oligonucleotide
ccucaggagaccugagaug

SEQ ID NO: 1297224 - RNA, 19 nt, Artificial Sequence
  Description of Artificial Sequence: Synthetic oligonucleotide
cucucacaaucauugcacu

SEQ ID NO: 1297225 - RNA, 19 nt, Artificial Sequence
  Description of Artificial Sequence: Synthetic oligonucleotide
guacauugaucacuuuauu

SEQ ID NO: 1297226 - RNA, 19 nt, Artificial Sequence
  Description of Artificial Sequence: Synthetic oligonucleotide
cugguccguccaucugggg

SEQ ID NO: 1297227 - RNA, 19 nt, Artificial Sequence
  Description of Artificial Sequence: Synthetic oligonucleotide
gcacucucacagaauuucc

SEQ ID NO: 1297228 - RNA, 19 nt, Artificial Sequence
  Description of Artificial Sequence: Synthetic oligonucleotide
ugccagucaggaagcccau

SEQ ID NO: 1297229 - RNA, 19 nt, Artificial Sequence
  Description of Artificial Sequence: Synthetic oligonucleotide
augaaugaugagagcugaa

SEQ ID NO: 1297230 - RNA, 19 nt, Artificial Sequence
  Description of Artificial Sequence: Synthetic oligonucleotide
ccagaucccuaauaucuga

SEQ ID NO: 1297231 - RNA, 19 nt, Artificial Sequence
  Description of Artificial Sequence: Synthetic oligonucleotide
acacuugugaagggcucau

SEQ ID NO: 1297232 - RNA, 19 nt, Artificial Sequence
  Description of Artificial Sequence: Synthetic oligonucleotide
cugugacugaaggccuuac

SEQ ID NO: 1297233 - RNA, 19 nt, Artificial Sequence
  Description of Artificial Sequence: Synthetic oligonucleotide
aagggcucauuagccuaaa

SEQ ID NO: 1297234 - RNA, 19 nt, Artificial Sequence
  Description of Artificial Sequence: Synthetic oligonucleotide
cugguaagacacaggaguu

SEQ ID NO: 1297235 - RNA, 19 nt, Artificial Sequence
  Description of Artificial Sequence: Synthetic oligonucleotide
uccacccuacuaugacuuu

SEQ ID NO: 1297236 - RNA, 19 nt, Artificial Sequence
  Description of Artificial Sequence: Synthetic oligonucleotide
ggacacauauugcacuggu

SEQ ID NO: 1297237 - RNA, 19 nt, Artificial Sequence
  Description of Artificial Sequence: Synthetic oligonucleotide
agggcucauuagccuaaaa

SEQ ID NO: 1297238 - RNA, 19 nt, Artificial Sequence
  Description of Artificial Sequence: Synthetic oligonucleotide
ggaagauaaugagucucaa

SEQ ID NO: 1297239 - RNA, 19 nt, Artificial Sequence
  Description of Artificial Sequence: Synthetic oligonucleotide
uccucggcuggaggcaagu

SEQ ID NO: 1297240 - RNA, 19 nt, Artificial Sequence
  Description of Artificial Sequence: Synthetic oligonucleotide
ggggcuacaucuuccauuu

SEQ ID NO: 1297241 - RNA, 19 nt, Artificial Sequence
  Description of Artificial Sequence: Synthetic oligonucleotide
agucucaaccagaucccua

SEQ ID NO: 1297242 - RNA, 19 nt, Artificial Sequence
  Description of Artificial Sequence: Synthetic oligonucleotide
aacuuccaaugaaggcuuu

SEQ ID NO: 1297243 - RNA, 19 nt, Artificial Sequence
  Description of Artificial Sequence: Synthetic oligonucleotide
cuacuaugacuuucccagu

SEQ ID NO: 1297244 - RNA, 19 nt, Artificial Sequence
  Description of Artificial Sequence: Synthetic oligonucleotide
cccuacuaugacuuuccca

SEQ ID NO: 1297245 - RNA, 19 nt, Artificial Sequence
  Description of Artificial Sequence: Synthetic oligonucleotide
ucgcuuuguagagguucau

SEQ ID NO: 1297246 - RNA, 19 nt, Artificial Sequence
  Description of Artificial Sequence: Synthetic oligonucleotide
cccauuugauucuaauggu

SEQ ID NO: 1297247 - RNA, 19 nt, Artificial Sequence
  Description of Artificial Sequence: Synthetic oligonucleotide
ggccgagugaagccuuuuc

SEQ ID NO: 1297248 - RNA, 19 nt, Artificial Sequence
  Description of Artificial Sequence: Synthetic oligonucleotide
aucugaggaugugcauuau

SEQ ID NO: 1297249 - RNA, 19 nt, Artificial Sequence
  Description of Artificial Sequence: Synthetic oligonucleotide
aggccaagggaaggcaauu

SEQ ID NO: 1297250 - RNA, 19 nt, Artificial Sequence
  Description of Artificial Sequence: Synthetic oligonucleotide
cccagccuaugacuucugc

SEQ ID NO: 1297251 - RNA, 19 nt, Artificial Sequence
  Description of Artificial Sequence: Synthetic oligonucleotide
gcuuuccacccuacuauga

SEQ ID NO: 1297252 - RNA, 19 nt, Artificial Sequence
  Description of Artificial Sequence: Synthetic oligonucleotide
agugucugcucaggcuuuu

SEQ ID NO: 1297253 - RNA, 19 nt, Artificial Sequence
  Description of Artificial Sequence: Synthetic oligonucleotide
gagaugaauccugguccgu

SEQ ID NO: 1297254 - RNA, 19 nt, Artificial Sequence
  Description of Artificial Sequence: Synthetic oligonucleotide
agcuacgccuaaaggcuuu

SEQ ID NO: 1297255 - RNA, 19 nt, Artificial Sequence
  Description of Artificial Sequence: Synthetic oligonucleotide
ccuaugacuucugcaguca

SEQ ID NO: 1297256 - RNA, 19 nt, Artificial Sequence
  Description of Artificial Sequence: Synthetic oligonucleotide
gucccagccuaugacuucu

SEQ ID NO: 1297257 - RNA, 19 nt, Artificial Sequence
  Description of Artificial Sequence: Synthetic oligonucleotide
ccacccuacuaugacuuuc

SEQ ID NO: 1297258 - RNA, 19 nt, Artificial Sequence
  Description of Artificial Sequence: Synthetic oligonucleotide
auuccauggguggcacauu

SEQ ID NO: 1297259 - RNA, 19 nt, Artificial Sequence
  Description of Artificial Sequence: Synthetic oligonucleotide
aggcacucucacagaauuu

SEQ ID NO: 1297260 - RNA, 19 nt, Artificial Sequence
  Description of Artificial Sequence: Synthetic oligonucleotide
caguaagguucuggaacaa

SEQ ID NO: 1297261 - RNA, 19 nt, Artificial Sequence
  Description of Artificial Sequence: Synthetic oligonucleotide
caaccccugcaacucugaa

SEQ ID NO: 1297262 - RNA, 19 nt, Artificial Sequence
  Description of Artificial Sequence: Synthetic oligonucleotide
gcuacgccuaaaggcuuug

SEQ ID NO: 1297263 - RNA, 19 nt, Artificial Sequence
  Description of Artificial Sequence: Synthetic oligonucleotide
aggcacaaagcaggacaua

SEQ ID NO: 1297264 - RNA, 19 nt, Artificial Sequence
  Description of Artificial Sequence: Synthetic oligonucleotide
caggccaagggaaggcaau

SEQ ID NO: 1297265 - RNA, 19 nt, Artificial Sequence
  Description of Artificial Sequence: Synthetic oligonucleotide
cuggaggcaagucccuaau

SEQ ID NO: 1297266 - RNA, 19 nt, Artificial Sequence
  Description of Artificial Sequence: Synthetic oligonucleotide
cccuaauaucugaggaugu

SEQ ID NO: 1297267 - RNA, 19 nt, Artificial Sequence
  Description of Artificial Sequence: Synthetic oligonucleotide
gcaucccucaggagaccug

SEQ ID NO: 1297268 - RNA, 19 nt, Artificial Sequence
  Description of Artificial Sequence: Synthetic oligonucleotide
cccucaggagaccugagau

SEQ ID NO: 1297269 - RNA, 19 nt, Artificial Sequence
  Description of Artificial Sequence: Synthetic oligonucleotide
gagcuacgccuaaaggcuu

SEQ ID NO: 1297270 - RNA, 19 nt, Artificial Sequence
  Description of Artificial Sequence: Synthetic oligonucleotide
ggaagcccauuugauucua

SEQ ID NO: 1297271 - RNA, 19 nt, Artificial Sequence
  Description of Artificial Sequence: Synthetic oligonucleotide
gcucaagggugacuucagu

SEQ ID NO: 1297272 - RNA, 19 nt, Artificial Sequence
  Description of Artificial Sequence: Synthetic oligonucleotide
gcaggccaagggaaggcaa

SEQ ID NO: 1297273 - RNA, 19 nt, Artificial Sequence
  Description of Artificial Sequence: Synthetic oligonucleotide
ucgcacucauagggcuuuu

SEQ ID NO: 1297274 - RNA, 19 nt, Artificial Sequence
  Description of Artificial Sequence: Synthetic oligonucleotide
ccccugcaacucugaagug

SEQ ID NO: 1297275 - RNA, 19 nt, Artificial Sequence
  Description of Artificial Sequence: Synthetic oligonucleotide
ccagucaggaagcccauuu

SEQ ID NO: 1297276 - RNA, 19 nt, Artificial Sequence
  Description of Artificial Sequence: Synthetic oligonucleotide
cccuaaucuuaguaugcau

SEQ ID NO: 1297277 - RNA, 19 nt, Artificial Sequence
  Description of Artificial Sequence: Synthetic oligonucleotide
ggggaaaggccuggggcua

SEQ ID NO: 1297278 - RNA, 19 nt, Artificial Sequence
  Description of Artificial Sequence: Synthetic oligonucleotide
gguguucaauaaggcuugu

SEQ ID NO: 1297279 - RNA, 19 nt, Artificial Sequence
  Description of Artificial Sequence: Synthetic oligonucleotide
ccccuguauggguccucug

SEQ ID NO: 1297280 - RNA, 19 nt, Artificial Sequence
  Description of Artificial Sequence: Synthetic oligonucleotide
cccaauggcuuuccacccu

SEQ ID NO: 1297281 - RNA, 19 nt, Artificial Sequence
  Description of Artificial Sequence: Synthetic oligonucleotide
ccucggcuggaggcaaguc

SEQ ID NO: 1297282 - RNA, 19 nt, Artificial Sequence
  Description of Artificial Sequence: Synthetic oligonucleotide
cuccugcauuucgcuuugu

SEQ ID NO: 1297283 - RNA, 19 nt, Artificial Sequence
  Description of Artificial Sequence: Synthetic oligonucleotide
acaaguaccacuuagcauc

SEQ ID NO: 1297284 - RNA, 19 nt, Artificial Sequence
  Description of Artificial Sequence: Synthetic oligonucleotide
uuaaucaugguagaaaugg

SEQ ID NO: 1297285 - RNA, 19 nt, Artificial Sequence
  Description of Artificial Sequence: Synthetic oligonucleotide
uuuagaacaguuaugcaca

SEQ ID NO: 1297286 - RNA, 19 nt, Artificial Sequence
  Description of Artificial Sequence: Synthetic oligonucleotide
uguauaacccuucaguuug

SEQ ID NO: 1297287 - RNA, 19 nt, Artificial Sequence
  Description of Artificial Sequence: Synthetic oligonucleotide
cacaagauaugcaugaugg

SEQ ID NO: 1297288 - RNA, 19 nt, Artificial Sequence
  Description of Artificial Sequence: Synthetic oligonucleotide
uacaauauuucaaaguaca

SEQ ID NO: 1297289 - RNA, 19 nt, Artificial Sequence
  Description of Artificial Sequence: Synthetic oligonucleotide
agaaguuagagucaccuuc

SEQ ID NO: 1297290 - RNA, 19 nt, Artificial Sequence
  Description of Artificial Sequence: Synthetic oligonucleotide
uuugaaacaauaagcagcu

SEQ ID NO: 1297291 - RNA, 19 nt, Artificial Sequence
  Description of Artificial Sequence: Synthetic oligonucleotide
cuaacuacagcucagauga

SEQ ID NO: 1297292 - RNA, 19 nt, Artificial Sequence
  Description of Artificial Sequence: Synthetic oligonucleotide
cuuuagaacaguuaugcac

SEQ ID NO: 1297293 - RNA, 19 nt, Artificial Sequence
  Description of Artificial Sequence: Synthetic oligonucleotide
uggacuuacacacuggagc

SEQ ID NO: 1297294 - RNA, 19 nt, Artificial Sequence
  Description of Artificial Sequence: Synthetic oligonucleotide
aacaaucguaaucuuguuc

SEQ ID NO: 1297295 - RNA, 19 nt, Artificial Sequence
  Description of Artificial Sequence: Synthetic oligonucleotide
aguuugaucaccucauagg

SEQ ID NO: 1297296 - RNA, 19 nt, Artificial Sequence
  Description of Artificial Sequence: Synthetic oligonucleotide
agaaaugggaugcacccgc

SEQ ID NO: 1297297 - RNA, 19 nt, Artificial Sequence
  Description of Artificial Sequence: Synthetic oligonucleotide
aguuaugcacaagauaugc

SEQ ID NO: 1297298 - RNA, 19 nt, Artificial Sequence
  Description of Artificial Sequence: Synthetic oligonucleotide
acaaucguaaucuuguucu

SEQ ID NO: 1297299 - RNA, 19 nt, Artificial Sequence
  Description of Artificial Sequence: Synthetic oligonucleotide
ugugacaaugaccagcuug

SEQ ID NO: 1297300 - RNA, 19 nt, Artificial Sequence
  Description of Artificial Sequence: Synthetic oligonucleotide
guuugaaacaauaagcagc

SEQ ID NO: 1297301 - RNA, 19 nt, Artificial Sequence
  Description of Artificial Sequence: Synthetic oligonucleotide
agauucuucagggagacac

SEQ ID NO: 1297302 - RNA, 19 nt, Artificial Sequence
  Description of Artificial Sequence: Synthetic oligonucleotide
aagauguucacguuucgcu

SEQ ID NO: 1297303 - RNA, 19 nt, Artificial Sequence
  Description of Artificial Sequence: Synthetic oligonucleotide
agaacaguuaugcacaaga

SEQ ID NO: 1297304 - RNA, 19 nt, Artificial Sequence
  Description of Artificial Sequence: Synthetic oligonucleotide
uauuucacaacguugggaa

SEQ ID NO: 1297305 - RNA, 19 nt, Artificial Sequence
  Description of Artificial Sequence: Synthetic oligonucleotide
aacguugggaaugaugaac

SEQ ID NO: 1297306 - RNA, 19 nt, Artificial Sequence
  Description of Artificial Sequence: Synthetic oligonucleotide
ugcuaaguccuucaugagg

SEQ ID NO: 1297307 - RNA, 19 nt, Artificial Sequence
  Description of Artificial Sequence: Synthetic oligonucleotide
aguagauucacaaucagcu

SEQ ID NO: 1297308 - RNA, 19 nt, Artificial Sequence
  Description of Artificial Sequence: Synthetic oligonucleotide
aaguagauucacaaucagc

SEQ ID NO: 1297309 - RNA, 19 nt, Artificial Sequence
  Description of Artificial Sequence: Synthetic oligonucleotide
uccuuuagaacaguuaugc

SEQ ID NO: 1297310 - RNA, 19 nt, Artificial Sequence
  Description of Artificial Sequence: Synthetic oligonucleotide
agugggugaacacccaacc

SEQ ID NO: 1297311 - RNA, 19 nt, Artificial Sequence
  Description of Artificial Sequence: Synthetic oligonucleotide
gaaacaauaagcagcuugc

SEQ ID NO: 1297312 - RNA, 19 nt, Artificial Sequence
  Description of Artificial Sequence: Synthetic oligonucleotide
uuugggaccgcuaaugcac

SEQ ID NO: 1297313 - RNA, 19 nt, Artificial Sequence
  Description of Artificial Sequence: Synthetic oligonucleotide
agcucagaugaguagauag

SEQ ID NO: 1297314 - RNA, 19 nt, Artificial Sequence
  Description of Artificial Sequence: Synthetic oligonucleotide
cuaacugggaacucauugg

SEQ ID NO: 1297315 - RNA, 19 nt, Artificial Sequence
  Description of Artificial Sequence: Synthetic oligonucleotide
auuggcaugacacuugggu

SEQ ID NO: 1297316 - RNA, 19 nt, Artificial Sequence
  Description of Artificial Sequence: Synthetic oligonucleotide
gauguucacguuucgcugg

SEQ ID NO: 1297317 - RNA, 19 nt, Artificial Sequence
  Description of Artificial Sequence: Synthetic oligonucleotide
uguauuucacaacguuggg

SEQ ID NO: 1297318 - RNA, 19 nt, Artificial Sequence
  Description of Artificial Sequence: Synthetic oligonucleotide
ucucccaucagauaacgga

SEQ ID NO: 1297319 - RNA, 19 nt, Artificial Sequence
  Description of Artificial Sequence: Synthetic oligonucleotide
uuaugcacaagauaugcau

SEQ ID NO: 1297320 - RNA, 19 nt, Artificial Sequence
  Description of Artificial Sequence: Synthetic oligonucleotide
cuaacggcuaauugaagcc

SEQ ID NO: 1297321 - RNA, 19 nt, Artificial Sequence
  Description of Artificial Sequence: Synthetic oligonucleotide
uuuucaagguuuauuuggu

SEQ ID NO: 1297322 - RNA, 19 nt, Artificial Sequence
  Description of Artificial Sequence: Synthetic oligonucleotide
uucaagguuuauuuggugu

SEQ ID NO: 1297323 - RNA, 19 nt, Artificial Sequence
  Description of Artificial Sequence: Synthetic oligonucleotide
aaucguaaucuuguucugg

SEQ ID NO: 1297324 - RNA, 19 nt, Artificial Sequence
  Description of Artificial Sequence: Synthetic oligonucleotide
accacagaaacauaauaca

SEQ ID NO: 1297325 - RNA, 19 nt, Artificial Sequence
  Description of Artificial Sequence: Synthetic oligonucleotide
agccacuuauuuuccaagc

SEQ ID NO: 1297326 - RNA, 19 nt, Artificial Sequence
  Description of Artificial Sequence: Synthetic oligonucleotide
ucacacuauagucuuugcc

SEQ ID NO: 1297327 - RNA, 19 nt, Artificial Sequence
  Description of Artificial Sequence: Synthetic oligonucleotide
auguguguggucuccauag

SEQ ID NO: 1297328 - RNA, 19 nt, Artificial Sequence
  Description of Artificial Sequence: Synthetic oligonucleotide
aacaguuaugcacaagaua

SEQ ID NO: 1297329 - RNA, 19 nt, Artificial Sequence
  Description of Artificial Sequence: Synthetic oligonucleotide
cagaucuuauuucuuauac

SEQ ID NO: 1297330 - RNA, 19 nt, Artificial Sequence
  Description of Artificial Sequence: Synthetic oligonucleotide
augacacuuggguaguugg

SEQ ID NO: 1297331 - RNA, 19 nt, Artificial Sequence
  Description of Artificial Sequence: Synthetic oligonucleotide
uucacaacaucggagauuc

SEQ ID NO: 1297332 - RNA, 19 nt, Artificial Sequence
  Description of Artificial Sequence: Synthetic oligonucleotide
ugcacucuucuucaagcgg

SEQ ID NO: 1297333 - RNA, 19 nt, Artificial Sequence
  Description of Artificial Sequence: Synthetic oligonucleotide
ucagaaguuagagucaccu

SEQ ID NO: 1297334 - RNA, 19 nt, Artificial Sequence
  Description of Artificial Sequence: Synthetic oligonucleotide
agcacuaggguaucugagg

SEQ ID NO: 1297335 - RNA, 19 nt, Artificial Sequence
  Description of Artificial Sequence: Synthetic oligonucleotide
acacuauagucuuugccag

SEQ ID NO: 1297336 - RNA, 19 nt, Artificial Sequence
  Description of Artificial Sequence: Synthetic oligonucleotide
uuuugggaaagccacuuau

SEQ ID NO: 1297337 - RNA, 19 nt, Artificial Sequence
  Description of Artificial Sequence: Synthetic oligonucleotide
gauugagucggcucucucc

SEQ ID NO: 1297338 - RNA, 19 nt, Artificial Sequence
  Description of Artificial Sequence: Synthetic oligonucleotide
ucaugguagaaaugggaug

SEQ ID NO: 1297339 - RNA, 19 nt, Artificial Sequence
  Description of Artificial Sequence: Synthetic oligonucleotide
ucagaugaguagauagaug

SEQ ID NO: 1297340 - RNA, 19 nt, Artificial Sequence
  Description of Artificial Sequence: Synthetic oligonucleotide
auaggcacugucaaccacc

SEQ ID NO: 1297341 - RNA, 19 nt, Artificial Sequence
  Description of Artificial Sequence: Synthetic oligonucleotide
uuuucauuggcaugacacu

SEQ ID NO: 1297342 - RNA, 19 nt, Artificial Sequence
  Description of Artificial Sequence: Synthetic oligonucleotide
cacacuauagucuuugcca

SEQ ID NO: 1297343 - RNA, 19 nt, Artificial Sequence
  Description of Artificial Sequence: Synthetic oligonucleotide
aaguuagagucaccuucac

SEQ ID NO: 1297344 - RNA, 19 nt, Artificial Sequence
  Description of Artificial Sequence: Synthetic oligonucleotide
uuuuccaagccacguaggu

SEQ ID NO: 1297345 - RNA, 19 nt, Artificial Sequence
  Description of Artificial Sequence: Synthetic oligonucleotide
agcagacacaggcuaacgg

SEQ ID NO: 1297346 - RNA, 19 nt, Artificial Sequence
  Description of Artificial Sequence: Synthetic oligonucleotide
agcuuagugggugaacacc

SEQ ID NO: 1297347 - RNA, 19 nt, Artificial Sequence
  Description of Artificial Sequence: Synthetic oligonucleotide
agcaccaaccccaacaauc

SEQ ID NO: 1297348 - RNA, 19 nt, Artificial Sequence
  Description of Artificial Sequence: Synthetic oligonucleotide
aucugaggacuucagaacu

SEQ ID NO: 1297349 - RNA, 19 nt, Artificial Sequence
  Description of Artificial Sequence: Synthetic oligonucleotide
aacugggaacucauuggcc

SEQ ID NO: 1297350 - RNA, 19 nt, Artificial Sequence
  Description of Artificial Sequence: Synthetic oligonucleotide
uaucugaggacuucagaac

SEQ ID NO: 1297351 - RNA, 19 nt, Artificial Sequence
  Description of Artificial Sequence: Synthetic oligonucleotide
gauaacggaaucgagcaga

SEQ ID NO: 1297352 - RNA, 19 nt, Artificial Sequence
  Description of Artificial Sequence: Synthetic oligonucleotide
agauguucacguuucgcug

SEQ ID NO: 1297353 - RNA, 19 nt, Artificial Sequence
  Description of Artificial Sequence: Synthetic oligonucleotide
guugugacuaacugggaac

SEQ ID NO: 1297354 - RNA, 19 nt, Artificial Sequence
  Description of Artificial Sequence: Synthetic oligonucleotide
cuuaaucaugguagaaaug

SEQ ID NO: 1297355 - RNA, 19 nt, Artificial Sequence
  Description of Artificial Sequence: Synthetic oligonucleotide
uguggucuccauagaaacc

SEQ ID NO: 1297356 - RNA, 19 nt, Artificial Sequence
  Description of Artificial Sequence: Synthetic oligonucleotide
cagauaacggaaucgagca

SEQ ID NO: 1297357 - RNA, 19 nt, Artificial Sequence
  Description of Artificial Sequence: Synthetic oligonucleotide
augcacaagauaugcauga

SEQ ID NO: 1297358 - RNA, 19 nt, Artificial Sequence
  Description of Artificial Sequence: Synthetic oligonucleotide
acuauagucuuugccagag

SEQ ID NO: 1297359 - RNA, 19 nt, Artificial Sequence
  Description of Artificial Sequence: Synthetic oligonucleotide
agauagauguguguggucu

SEQ ID NO: 1297360 - RNA, 19 nt, Artificial Sequence
  Description of Artificial Sequence: Synthetic oligonucleotide
guaucugaggacuucagaa

SEQ ID NO: 1297361 - RNA, 19 nt, Artificial Sequence
  Description of Artificial Sequence: Synthetic oligonucleotide
ucuccaggcuaccuuaaca

SEQ ID NO: 1297362 - RNA, 19 nt, Artificial Sequence
  Description of Artificial Sequence: Synthetic oligonucleotide
guaccacuuagcaucaggg

SEQ ID NO: 1297363 - RNA, 19 nt, Artificial Sequence
  Description of Artificial Sequence: Synthetic oligonucleotide
uguucuuccuuaaguagau

SEQ ID NO: 1297364 - RNA, 19 nt, Artificial Sequence
  Description of Artificial Sequence: Synthetic oligonucleotide
uucacguuucgcuggacca

SEQ ID NO: 1297365 - RNA, 19 nt, Artificial Sequence
  Description of Artificial Sequence: Synthetic oligonucleotide
cauaaccacacuaacuaca

SEQ ID NO: 1297366 - RNA, 19 nt, Artificial Sequence
  Description of Artificial Sequence: Synthetic oligonucleotide
uuuugggaccgcuaaugca

SEQ ID NO: 1297367 - RNA, 19 nt, Artificial Sequence
  Description of Artificial Sequence: Synthetic oligonucleotide
uuucucccaucagauaacg

SEQ ID NO: 1297368 - RNA, 19 nt, Artificial Sequence
  Description of Artificial Sequence: Synthetic oligonucleotide
aggcuaccuuaacauaacc

SEQ ID NO: 1297369 - RNA, 19 nt, Artificial Sequence
  Description of Artificial Sequence: Synthetic oligonucleotide
uagagcugugggaagugag

SEQ ID NO: 1297370 - RNA, 19 nt, Artificial Sequence
  Description of Artificial Sequence: Synthetic oligonucleotide
ugaguagauagaugugugu

SEQ ID NO: 1297371 - RNA, 19 nt, Artificial Sequence
  Description of Artificial Sequence: Synthetic oligonucleotide
agccacucccaauaacucg

SEQ ID NO: 1297372 - RNA, 19 nt, Artificial Sequence
  Description of Artificial Sequence: Synthetic oligonucleotide
auaaccacacuaacuacag

SEQ ID NO: 1297373 - RNA, 19 nt, Artificial Sequence
  Description of Artificial Sequence: Synthetic oligonucleotide
accagauugagucggcucu

SEQ ID NO: 1297374 - RNA, 19 nt, Artificial Sequence
  Description of Artificial Sequence: Synthetic oligonucleotide
ugucacacuauagucuuug

SEQ ID NO: 1297375 - RNA, 19 nt, Artificial Sequence
  Description of Artificial Sequence: Synthetic oligonucleotide
ucaccuucacaacaucgga

SEQ ID NO: 1297376 - RNA, 19 nt, Artificial Sequence
  Description of Artificial Sequence: Synthetic oligonucleotide
ucguaaucuuguucugggg

SEQ ID NO: 1297377 - RNA, 19 nt, Artificial Sequence
  Description of Artificial Sequence: Synthetic oligonucleotide
acuguauuucacaacguug

SEQ ID NO: 1297378 - RNA, 19 nt, Artificial Sequence
  Description of Artificial Sequence: Synthetic oligonucleotide
uuccuuaaguagauucaca

SEQ ID NO: 1297379 - RNA, 19 nt, Artificial Sequence
  Description of Artificial Sequence: Synthetic oligonucleotide
uguuuuggagacaguggga

SEQ ID NO: 1297380 - RNA, 19 nt, Artificial Sequence
  Description of Artificial Sequence: Synthetic oligonucleotide
gcuaacggcuaauugaagc

SEQ ID NO: 1297381 - RNA, 19 nt, Artificial Sequence
  Description of Artificial Sequence: Synthetic oligonucleotide
ucaagguuuauuugguguu

SEQ ID NO: 1297382 - RNA, 19 nt, Artificial Sequence
  Description of Artificial Sequence: Synthetic oligonucleotide
uggguaguugguugcauca

SEQ ID NO: 1297383 - RNA, 19 nt, Artificial Sequence
  Description of Artificial Sequence: Synthetic oligonucleotide
gacugucgcaccaacgagg

SEQ ID NO: 1297384 - RNA, 19 nt, Artificial Sequence
  Description of Artificial Sequence: Synthetic oligonucleotide
auaacccuucaguuugauc

SEQ ID NO: 1297385 - RNA, 19 nt, Artificial Sequence
  Description of Artificial Sequence: Synthetic oligonucleotide
gucaccgcuacacaaguac

SEQ ID NO: 1297386 - RNA, 19 nt, Artificial Sequence
  Description of Artificial Sequence: Synthetic oligonucleotide
uuuugucccaggacacaag

SEQ ID NO: 1297387 - RNA, 19 nt, Artificial Sequence
  Description of Artificial Sequence: Synthetic oligonucleotide
ucaccgcuacacaaguacc

SEQ ID NO: 1297388 - RNA, 19 nt, Artificial Sequence
  Description of Artificial Sequence: Synthetic oligonucleotide
auagagacccuuaaucaug

SEQ ID NO: 1297389 - RNA, 19 nt, Artificial Sequence
  Description of Artificial Sequence: Synthetic oligonucleotide
aacuacagcucagaugagu

SEQ ID NO: 1297390 - RNA, 19 nt, Artificial Sequence
  Description of Artificial Sequence: Synthetic oligonucleotide
aggucaagauauccacugg

SEQ ID NO: 1297391 - RNA, 19 nt, Artificial Sequence
  Description of Artificial Sequence: Synthetic oligonucleotide
accccaacaaucguaaucu

SEQ ID NO: 1297392 - RNA, 19 nt, Artificial Sequence
  Description of Artificial Sequence: Synthetic oligonucleotide
ugggugaacacccaaccuu

SEQ ID NO: 1297393 - RNA, 19 nt, Artificial Sequence
  Description of Artificial Sequence: Synthetic oligonucleotide
uugggaccgcuaaugcacg

SEQ ID NO: 1297394 - RNA, 19 nt, Artificial Sequence
  Description of Artificial Sequence: Synthetic oligonucleotide
agucaccuucacaacaucg

SEQ ID NO: 1297395 - RNA, 19 nt, Artificial Sequence
  Description of Artificial Sequence: Synthetic oligonucleotide
uucucccaucagauaacgg

SEQ ID NO: 1297396 - RNA, 19 nt, Artificial Sequence
  Description of Artificial Sequence: Synthetic oligonucleotide
ggacuuacacacuggagcc

SEQ ID NO: 1297397 - RNA, 19 nt, Artificial Sequence
  Description of Artificial Sequence: Synthetic oligonucleotide
ugggaagugaggauuucuc

SEQ ID NO: 1297398 - RNA, 19 nt, Artificial Sequence
  Description of Artificial Sequence: Synthetic oligonucleotide
aaacaauaagcagcuugca

SEQ ID NO: 1297399 - RNA, 19 nt, Artificial Sequence
  Description of Artificial Sequence: Synthetic oligonucleotide
uguuuucauuggcaugaca

SEQ ID NO: 1297400 - RNA, 19 nt, Artificial Sequence
  Description of Artificial Sequence: Synthetic oligonucleotide
acaggcuaacggcuaauug

SEQ ID NO: 1297401 - RNA, 19 nt, Artificial Sequence
  Description of Artificial Sequence: Synthetic oligonucleotide
gauguauaacccuucaguu

SEQ ID NO: 1297402 - RNA, 19 nt, Artificial Sequence
  Description of Artificial Sequence: Synthetic oligonucleotide
caggcuaacggcuaauuga

SEQ ID NO: 1297403 - RNA, 19 nt, Artificial Sequence
  Description of Artificial Sequence: Synthetic oligonucleotide
gaugaguagauagaugugu

SEQ ID NO: 1297404 - RNA, 19 nt, Artificial Sequence
  Description of Artificial Sequence: Synthetic oligonucleotide
gcuaauugaagccugcaga

SEQ ID NO: 1297405 - RNA, 19 nt, Artificial Sequence
  Description of Artificial Sequence: Synthetic oligonucleotide
auguauaacccuucaguuu

SEQ ID NO: 1297406 - RNA, 19 nt, Artificial Sequence
  Description of Artificial Sequence: Synthetic oligonucleotide
uccccuaggacccauccau

SEQ ID NO: 1297407 - RNA, 19 nt, Artificial Sequence
  Description of Artificial Sequence: Synthetic oligonucleotide
agauaacggaaucgagcag

SEQ ID NO: 1297408 - RNA, 19 nt, Artificial Sequence
  Description of Artificial Sequence: Synthetic oligonucleotide
cacaacguugggaaugaug

SEQ ID NO: 1297409 - RNA, 19 nt, Artificial Sequence
  Description of Artificial Sequence: Synthetic oligonucleotide
gaaguuagagucaccuuca

SEQ ID NO: 1297410 - RNA, 19 nt, Artificial Sequence
  Description of Artificial Sequence: Synthetic oligonucleotide
aaaugggaugcacccgccu

SEQ ID NO: 1297411 - RNA, 19 nt, Artificial Sequence
  Description of Artificial Sequence: Synthetic oligonucleotide
agauaugcaugauggacuu

SEQ ID NO: 1297412 - RNA, 19 nt, Artificial Sequence
  Description of Artificial Sequence: Synthetic oligonucleotide
ugggacugucgcaccaacg

SEQ ID NO: 1297413 - RNA, 19 nt, Artificial Sequence
  Description of Artificial Sequence: Synthetic oligonucleotide
uccuugucgguaucagugc

SEQ ID NO: 1297414 - RNA, 19 nt, Artificial Sequence
  Description of Artificial Sequence: Synthetic oligonucleotide
ugcagaucuuauuucuuau

SEQ ID NO: 1297415 - RNA, 19 nt, Artificial Sequence
  Description of Artificial Sequence: Synthetic oligonucleotide
cuugucgguaucagugccc

SEQ ID NO: 1297416 - RNA, 19 nt, Artificial Sequence
  Description of Artificial Sequence: Synthetic oligonucleotide
cuaccuuaacauaaccaca

SEQ ID NO: 1297417 - RNA, 19 nt, Artificial Sequence
  Description of Artificial Sequence: Synthetic oligonucleotide
cuuccuuaaguagauucac

SEQ ID NO: 1297418 - RNA, 19 nt, Artificial Sequence
  Description of Artificial Sequence: Synthetic oligonucleotide
cauucacuccacuccacac

SEQ ID NO: 1297419 - RNA, 19 nt, Artificial Sequence
  Description of Artificial Sequence: Synthetic oligonucleotide
ugacuaacugggaacucau

SEQ ID NO: 1297420 - RNA, 19 nt, Artificial Sequence
  Description of Artificial Sequence: Synthetic oligonucleotide
guucacguuucgcuggacc

SEQ ID NO: 1297421 - RNA, 19 nt, Artificial Sequence
  Description of Artificial Sequence: Synthetic oligonucleotide
uuagugggugaacacccaa

SEQ ID NO: 1297422 - RNA, 19 nt, Artificial Sequence
  Description of Artificial Sequence: Synthetic oligonucleotide
ucggagauuccauuuuguc

SEQ ID NO: 1297423 - RNA, 19 nt, Artificial Sequence
  Description of Artificial Sequence: Synthetic oligonucleotide
gaggauuucuccaggcuac

SEQ ID NO: 1297424 - RNA, 19 nt, Artificial Sequence
  Description of Artificial Sequence: Synthetic oligonucleotide
cuacagcucagaugaguag

SEQ ID NO: 1297425 - RNA, 19 nt, Artificial Sequence
  Description of Artificial Sequence: Synthetic oligonucleotide
cuuucucccaucagauaac

SEQ ID NO: 1297426 - RNA, 19 nt, Artificial Sequence
  Description of Artificial Sequence: Synthetic oligonucleotide
gacagugggacugucgcac

SEQ ID NO: 1297427 - RNA, 19 nt, Artificial Sequence
  Description of Artificial Sequence: Synthetic oligonucleotide
uaccacuuagcaucagggu

SEQ ID NO: 1297428 - RNA, 19 nt, Artificial Sequence
  Description of Artificial Sequence: Synthetic oligonucleotide
ucgguaucagugcccagcu

SEQ ID NO: 1297429 - RNA, 19 nt, Artificial Sequence
  Description of Artificial Sequence: Synthetic oligonucleotide
ucggcucucucccucuugc

SEQ ID NO: 1297430 - RNA, 19 nt, Artificial Sequence
  Description of Artificial Sequence: Synthetic oligonucleotide
aacggcuaauugaagccug

SEQ ID NO: 1297431 - RNA, 19 nt, Artificial Sequence
  Description of Artificial Sequence: Synthetic oligonucleotide
ugacacuuggguaguuggu

SEQ ID NO: 1297432 - RNA, 19 nt, Artificial Sequence
  Description of Artificial Sequence: Synthetic oligonucleotide
augaguagauagaugugug

SEQ ID NO: 1297433 - RNA, 19 nt, Artificial Sequence
  Description of Artificial Sequence: Synthetic oligonucleotide
uaacggcuaauugaagccu

SEQ ID NO: 1297434 - RNA, 19 nt, Artificial Sequence
  Description of Artificial Sequence: Synthetic oligonucleotide
cauccaugacagcuuagug

SEQ ID NO: 1297435 - RNA, 19 nt, Artificial Sequence
  Description of Artificial Sequence: Synthetic oligonucleotide
cacguaggucaagauaucc

SEQ ID NO: 1297436 - RNA, 19 nt, Artificial Sequence
  Description of Artificial Sequence: Synthetic oligonucleotide
caucggagauuccauuuug

SEQ ID NO: 1297437 - RNA, 19 nt, Artificial Sequence
  Description of Artificial Sequence: Synthetic oligonucleotide
accacacuaacuacagcuc

SEQ ID NO: 1297438 - RNA, 19 nt, Artificial Sequence
  Description of Artificial Sequence: Synthetic oligonucleotide
accgcuacacaaguaccac

SEQ ID NO: 1297439 - RNA, 19 nt, Artificial Sequence
  Description of Artificial Sequence: Synthetic oligonucleotide
cuaggcaaguuugguaaag

SEQ ID NO: 1297440 - RNA, 19 nt, Artificial Sequence
  Description of Artificial Sequence: Synthetic oligonucleotide
uccauaugcagaucuuauu

SEQ ID NO: 1297441 - RNA, 19 nt, Artificial Sequence
  Description of Artificial Sequence: Synthetic oligonucleotide
augcacccgccuaagauuc

SEQ ID NO: 1297442 - RNA, 19 nt, Artificial Sequence
  Description of Artificial Sequence: Synthetic oligonucleotide
uaggcacugucaaccaccu

SEQ ID NO: 1297443 - RNA, 19 nt, Artificial Sequence
  Description of Artificial Sequence: Synthetic oligonucleotide
caaucguaaucuuguucug

SEQ ID NO: 1297444 - RNA, 19 nt, Artificial Sequence
  Description of Artificial Sequence: Synthetic oligonucleotide
gaggucaccgcuacacaag

SEQ ID NO: 1297445 - RNA, 19 nt, Artificial Sequence
  Description of Artificial Sequence: Synthetic oligonucleotide
cuaggacccauccaugaca

SEQ ID NO: 1297446 - RNA, 19 nt, Artificial Sequence
  Description of Artificial Sequence: Synthetic oligonucleotide
gggaagugaggauuucucc

SEQ ID NO: 1297447 - RNA, 19 nt, Artificial Sequence
  Description of Artificial Sequence: Synthetic oligonucleotide
cuacauucacuccacucca

SEQ ID NO: 1297448 - RNA, 19 nt, Artificial Sequence
  Description of Artificial Sequence: Synthetic oligonucleotide
guauuucacaacguuggga

SEQ ID NO: 1297449 - RNA, 19 nt, Artificial Sequence
  Description of Artificial Sequence: Synthetic oligonucleotide
caucagauaacggaaucga

SEQ ID NO: 1297450 - RNA, 19 nt, Artificial Sequence
  Description of Artificial Sequence: Synthetic oligonucleotide
gucgguaucagugcccagc

SEQ ID NO: 1297451 - RNA, 19 nt, Artificial Sequence
  Description of Artificial Sequence: Synthetic oligonucleotide
uuggguaguugguugcauc

SEQ ID NO: 1297452 - RNA, 19 nt, Artificial Sequence
  Description of Artificial Sequence: Synthetic oligonucleotide
ucacguuucgcuggaccag

SEQ ID NO: 1297453 - RNA, 19 nt, Artificial Sequence
  Description of Artificial Sequence: Synthetic oligonucleotide
gcuaaguccuucaugagga

SEQ ID NO: 1297454 - RNA, 19 nt, Artificial Sequence
  Description of Artificial Sequence: Synthetic oligonucleotide
uugucgguaucagugccca

SEQ ID NO: 1297455 - RNA, 19 nt, Artificial Sequence
  Description of Artificial Sequence: Synthetic oligonucleotide
uuuccaagccacguagguc

SEQ ID NO: 1297456 - RNA, 19 nt, Artificial Sequence
  Description of Artificial Sequence: Synthetic oligonucleotide
accuuaacauaaccacacu

SEQ ID NO: 1297457 - RNA, 19 nt, Artificial Sequence
  Description of Artificial Sequence: Synthetic oligonucleotide
caggcuaccuuaacauaac

SEQ ID NO: 1297458 - RNA, 19 nt, Artificial Sequence
  Description of Artificial Sequence: Synthetic oligonucleotide
gaccagauugagucggcuc

SEQ ID NO: 1297459 - RNA, 19 nt, Artificial Sequence
  Description of Artificial Sequence: Synthetic oligonucleotide
cuaauugaagccugcagau

SEQ ID NO: 1297460 - RNA, 19 nt, Artificial Sequence
  Description of Artificial Sequence: Synthetic oligonucleotide
agugaagcacuaggguauc

SEQ ID NO: 1297461 - RNA, 19 nt, Artificial Sequence
  Description of Artificial Sequence: Synthetic oligonucleotide
cacaacaucggagauucca

SEQ ID NO: 1297462 - RNA, 19 nt, Artificial Sequence
  Description of Artificial Sequence: Synthetic oligonucleotide
agaugaguagauagaugug

SEQ ID NO: 1297463 - RNA, 19 nt, Artificial Sequence
  Description of Artificial Sequence: Synthetic oligonucleotide
ugggaacucauuggccuag

SEQ ID NO: 1297464 - RNA, 19 nt, Artificial Sequence
  Description of Artificial Sequence: Synthetic oligonucleotide
agacagaccaauggcccag

SEQ ID NO: 1297465 - RNA, 19 nt, Artificial Sequence
  Description of Artificial Sequence: Synthetic oligonucleotide
aggucaccgcuacacaagu

SEQ ID NO: 1297466 - RNA, 19 nt, Artificial Sequence
  Description of Artificial Sequence: Synthetic oligonucleotide
uagauagaugugugugguc

SEQ ID NO: 1297467 - RNA, 19 nt, Artificial Sequence
  Description of Artificial Sequence: Synthetic oligonucleotide
acggcuaauugaagccugc

SEQ ID NO: 1297468 - RNA, 19 nt, Artificial Sequence
  Description of Artificial Sequence: Synthetic oligonucleotide
acccuucaguuugaucacc

SEQ ID NO: 1297469 - RNA, 19 nt, Artificial Sequence
  Description of Artificial Sequence: Synthetic oligonucleotide
acaucggagauuccauuuu

SEQ ID NO: 1297470 - RNA, 19 nt, Artificial Sequence
  Description of Artificial Sequence: Synthetic oligonucleotide
gcacaagauaugcaugaug

SEQ ID NO: 1297471 - RNA, 19 nt, Artificial Sequence
  Description of Artificial Sequence: Synthetic oligonucleotide
ugguagaaaugggaugcac

SEQ ID NO: 1297472 - RNA, 19 nt, Artificial Sequence
  Description of Artificial Sequence: Synthetic oligonucleotide
gcuuagugggugaacaccc

SEQ ID NO: 1297473 - RNA, 19 nt, Artificial Sequence
  Description of Artificial Sequence: Synthetic oligonucleotide
auccuuuagaacaguuaug

SEQ ID NO: 1297474 - RNA, 19 nt, Artificial Sequence
  Description of Artificial Sequence: Synthetic oligonucleotide
gaaaugggaugcacccgcc

SEQ ID NO: 1297475 - RNA, 19 nt, Artificial Sequence
  Description of Artificial Sequence: Synthetic oligonucleotide
acuacagcucagaugagua

SEQ ID NO: 1297476 - RNA, 19 nt, Artificial Sequence
  Description of Artificial Sequence: Synthetic oligonucleotide
aagcgggccuccucuucag

SEQ ID NO: 1297477 - RNA, 19 nt, Artificial Sequence
  Description of Artificial Sequence: Synthetic oligonucleotide
acugcuccuugucgguauc

SEQ ID NO: 1297478 - RNA, 19 nt, Artificial Sequence
  Description of Artificial Sequence: Synthetic oligonucleotide
gugacuaacugggaacuca

SEQ ID NO: 1297479 - RNA, 19 nt, Artificial Sequence
  Description of Artificial Sequence: Synthetic oligonucleotide
ugaucaccucauaggcacu

SEQ ID NO: 1297480 - RNA, 19 nt, Artificial Sequence
  Description of Artificial Sequence: Synthetic oligonucleotide
cugcuaaguccuucaugag

SEQ ID NO: 1297481 - RNA, 19 nt, Artificial Sequence
  Description of Artificial Sequence: Synthetic oligonucleotide
caugacacuuggguaguug

SEQ ID NO: 1297482 - RNA, 19 nt, Artificial Sequence
  Description of Artificial Sequence: Synthetic oligonucleotide
cacuaggguaucugaggac

SEQ ID NO: 1297483 - RNA, 19 nt, Artificial Sequence
  Description of Artificial Sequence: Synthetic oligonucleotide
uaauugaagccugcagaua

SEQ ID NO: 1297484 - RNA, 19 nt, Artificial Sequence
  Description of Artificial Sequence: Synthetic oligonucleotide
ccuugauuccauagagacc

SEQ ID NO: 1297485 - RNA, 19 nt, Artificial Sequence
  Description of Artificial Sequence: Synthetic oligonucleotide
cccaacaaucguaaucuug

SEQ ID NO: 1297486 - RNA, 19 nt, Artificial Sequence
  Description of Artificial Sequence: Synthetic oligonucleotide
gacuguauuucacaacguu

SEQ ID NO: 1297487 - RNA, 19 nt, Artificial Sequence
  Description of Artificial Sequence: Synthetic oligonucleotide
acacuaacuacagcucaga

SEQ ID NO: 1297488 - RNA, 19 nt, Artificial Sequence
  Description of Artificial Sequence: Synthetic oligonucleotide
ggaguuugcugucacacua

SEQ ID NO: 1297489 - RNA, 19 nt, Artificial Sequence
  Description of Artificial Sequence: Synthetic oligonucleotide
acccgccuaagauucuuca

SEQ ID NO: 1297490 - RNA, 19 nt, Artificial Sequence
  Description of Artificial Sequence: Synthetic oligonucleotide
gauguguguggucuccaua

SEQ ID NO: 1297491 - RNA, 19 nt, Artificial Sequence
  Description of Artificial Sequence: Synthetic oligonucleotide
guagauagauguguguggu

SEQ ID NO: 1297492 - RNA, 19 nt, Artificial Sequence
  Description of Artificial Sequence: Synthetic oligonucleotide
acaacaucggagauuccau

SEQ ID NO: 1297493 - RNA, 19 nt, Artificial Sequence
  Description of Artificial Sequence: Synthetic oligonucleotide
gguugugacuaacugggaa

SEQ ID NO: 1297494 - RNA, 19 nt, Artificial Sequence
  Description of Artificial Sequence: Synthetic oligonucleotide
aggcuaacggcuaauugaa

SEQ ID NO: 1297495 - RNA, 19 nt, Artificial Sequence
  Description of Artificial Sequence: Synthetic oligonucleotide
cagccacucccaauaacuc

SEQ ID NO: 1297496 - RNA, 19 nt, Artificial Sequence
  Description of Artificial Sequence: Synthetic oligonucleotide
gggacugucgcaccaacga

SEQ ID NO: 1297497 - RNA, 19 nt, Artificial Sequence
  Description of Artificial Sequence: Synthetic oligonucleotide
aagccacguaggucaagau

SEQ ID NO: 1297498 - RNA, 19 nt, Artificial Sequence
  Description of Artificial Sequence: Synthetic oligonucleotide
auccauaugcagaucuuau

SEQ ID NO: 1297499 - RNA, 19 nt, Artificial Sequence
  Description of Artificial Sequence: Synthetic oligonucleotide
ucaagcgggccuccucuuc

SEQ ID NO: 1297500 - RNA, 19 nt, Artificial Sequence
  Description of Artificial Sequence: Synthetic oligonucleotide
gguaucugaggacuucaga

SEQ ID NO: 1297501 - RNA, 19 nt, Artificial Sequence
  Description of Artificial Sequence: Synthetic oligonucleotide
augggaugcacccgccuaa

SEQ ID NO: 1297502 - RNA, 19 nt, Artificial Sequence
  Description of Artificial Sequence: Synthetic oligonucleotide
ccuuucucccaucagauaa

SEQ ID NO: 1297503 - RNA, 19 nt, Artificial Sequence
  Description of Artificial Sequence: Synthetic oligonucleotide
ugaccagcuuggaguuugc

SEQ ID NO: 1297504 - RNA, 19 nt, Artificial Sequence
  Description of Artificial Sequence: Synthetic oligonucleotide
caccgcuacacaaguacca

SEQ ID NO: 1297505 - RNA, 19 nt, Artificial Sequence
  Description of Artificial Sequence: Synthetic oligonucleotide
cagauaauuggcagugugu

SEQ ID NO: 1297506 - RNA, 19 nt, Artificial Sequence
  Description of Artificial Sequence: Synthetic oligonucleotide
ggacugucgcaccaacgag

SEQ ID NO: 1297507 - RNA, 19 nt, Artificial Sequence
  Description of Artificial Sequence: Synthetic oligonucleotide
ugugacuaacugggaacuc

SEQ ID NO: 1297508 - RNA, 19 nt, Artificial Sequence
  Description of Artificial Sequence: Synthetic oligonucleotide
uagauguguguggucucca

SEQ ID NO: 1297509 - RNA, 19 nt, Artificial Sequence
  Description of Artificial Sequence: Synthetic oligonucleotide
gauaauuggcaguguguuu

SEQ ID NO: 1297510 - RNA, 19 nt, Artificial Sequence
  Description of Artificial Sequence: Synthetic oligonucleotide
uauaacccuucaguuugau

SEQ ID NO: 1297511 - RNA, 19 nt, Artificial Sequence
  Description of Artificial Sequence: Synthetic oligonucleotide
ugacaucaacaagggcaag

SEQ ID NO: 1297512 - RNA, 19 nt, Artificial Sequence
  Description of Artificial Sequence: Synthetic oligonucleotide
guaucagugcccagcucug

SEQ ID NO: 1297513 - RNA, 19 nt, Artificial Sequence
  Description of Artificial Sequence: Synthetic oligonucleotide
ugcacaagauaugcaugau

SEQ ID NO: 1297514 - RNA, 19 nt, Artificial Sequence
  Description of Artificial Sequence: Synthetic oligonucleotide
gcacuaggguaucugagga

SEQ ID NO: 1297515 - RNA, 19 nt, Artificial Sequence
  Description of Artificial Sequence: Synthetic oligonucleotide
auccuugauuccauagaga

SEQ ID NO: 1297516 - RNA, 19 nt, Artificial Sequence
  Description of Artificial Sequence: Synthetic oligonucleotide
ugggaugcacccgccuaag

SEQ ID NO: 1297517 - RNA, 19 nt, Artificial Sequence
  Description of Artificial Sequence: Synthetic oligonucleotide
ccauaguguaucugcacuc

SEQ ID NO: 1297518 - RNA, 19 nt, Artificial Sequence
  Description of Artificial Sequence: Synthetic oligonucleotide
ucacaacaucggagauucc

SEQ ID NO: 1297519 - RNA, 19 nt, Artificial Sequence
  Description of Artificial Sequence: Synthetic oligonucleotide
ggaccgcuaaugcacgaug

SEQ ID NO: 1297520 - RNA, 19 nt, Artificial Sequence
  Description of Artificial Sequence: Synthetic oligonucleotide
ggcuaccuuaacauaacca

SEQ ID NO: 1297521 - RNA, 19 nt, Artificial Sequence
  Description of Artificial Sequence: Synthetic oligonucleotide
ccuugucgguaucagugcc

SEQ ID NO: 1297522 - RNA, 19 nt, Artificial Sequence
  Description of Artificial Sequence: Synthetic oligonucleotide
cauuaugcucucggccaag

SEQ ID NO: 1297523 - RNA, 19 nt, Artificial Sequence
  Description of Artificial Sequence: Synthetic oligonucleotide
cacuauagucuuugccaga

SEQ ID NO: 1297524 - RNA, 19 nt, Artificial Sequence
  Description of Artificial Sequence: Synthetic oligonucleotide
ugucgguaucagugcccag

SEQ ID NO: 1297525 - RNA, 19 nt, Artificial Sequence
  Description of Artificial Sequence: Synthetic oligonucleotide
uugagucggcucucucccu

SEQ ID NO: 1297526 - RNA, 19 nt, Artificial Sequence
  Description of Artificial Sequence: Synthetic oligonucleotide
cagacacaggcuaacggcu

SEQ ID NO: 1297527 - RNA, 19 nt, Artificial Sequence
  Description of Artificial Sequence: Synthetic oligonucleotide
uggccuaggcaaguuuggu

SEQ ID NO: 1297528 - RNA, 19 nt, Artificial Sequence
  Description of Artificial Sequence: Synthetic oligonucleotide
augguagaaaugggaugca

SEQ ID NO: 1297529 - RNA, 19 nt, Artificial Sequence
  Description of Artificial Sequence: Synthetic oligonucleotide
ccaggcuaccuuaacauaa

SEQ ID NO: 1297530 - RNA, 19 nt, Artificial Sequence
  Description of Artificial Sequence: Synthetic oligonucleotide
uccaagccacguaggucaa

SEQ ID NO: 1297531 - RNA, 19 nt, Artificial Sequence
  Description of Artificial Sequence: Synthetic oligonucleotide
ugggaccgcuaaugcacga

SEQ ID NO: 1297532 - RNA, 19 nt, Artificial Sequence
  Description of Artificial Sequence: Synthetic oligonucleotide
ugcucucggccaagucagc

SEQ ID NO: 1297533 - RNA, 19 nt, Artificial Sequence
  Description of Artificial Sequence: Synthetic oligonucleotide
cucagaugaguagauagau

SEQ ID NO: 1297534 - RNA, 19 nt, Artificial Sequence
  Description of Artificial Sequence: Synthetic oligonucleotide
accaaccccaacaaucgua

SEQ ID NO: 1297535 - RNA, 19 nt, Artificial Sequence
  Description of Artificial Sequence: Synthetic oligonucleotide
cacaaguaccacuuagcau

SEQ ID NO: 1297536 - RNA, 19 nt, Artificial Sequence
  Description of Artificial Sequence: Synthetic oligonucleotide
accuuucucccaucagaua

SEQ ID NO: 1297537 - RNA, 19 nt, Artificial Sequence
  Description of Artificial Sequence: Synthetic oligonucleotide
ccuuaacauaaccacacua

SEQ ID NO: 1297538 - RNA, 19 nt, Artificial Sequence
  Description of Artificial Sequence: Synthetic oligonucleotide
gaccaauggcccaggaugu

SEQ ID NO: 1297539 - RNA, 19 nt, Artificial Sequence
  Description of Artificial Sequence: Synthetic oligonucleotide
cauaguguaucugcacucu

SEQ ID NO: 1297540 - RNA, 19 nt, Artificial Sequence
  Description of Artificial Sequence: Synthetic oligonucleotide
ugcacccgccuaagauucu

SEQ ID NO: 1297541 - RNA, 19 nt, Artificial Sequence
  Description of Artificial Sequence: Synthetic oligonucleotide
uucaagcgggccuccucuu

SEQ ID NO: 1297542 - RNA, 19 nt, Artificial Sequence
  Description of Artificial Sequence: Synthetic oligonucleotide
caauggcccaggauguaua

SEQ ID NO: 1297543 - RNA, 19 nt, Artificial Sequence
  Description of Artificial Sequence: Synthetic oligonucleotide
caacguugggaaugaugaa

SEQ ID NO: 1297544 - RNA, 19 nt, Artificial Sequence
  Description of Artificial Sequence: Synthetic oligonucleotide
ccuaggacccauccaugac

SEQ ID NO: 1297545 - RNA, 19 nt, Artificial Sequence
  Description of Artificial Sequence: Synthetic oligonucleotide
aucaccucauaggcacugu

SEQ ID NO: 1297546 - RNA, 19 nt, Artificial Sequence
  Description of Artificial Sequence: Synthetic oligonucleotide
ccaaccccaacaaucguaa

SEQ ID NO: 1297547 - RNA, 19 nt, Artificial Sequence
  Description of Artificial Sequence: Synthetic oligonucleotide
cacccgccuaagauucuuc

SEQ ID NO: 1297548 - RNA, 19 nt, Artificial Sequence
  Description of Artificial Sequence: Synthetic oligonucleotide
uaacggaaucgagcagaau

SEQ ID NO: 1297549 - RNA, 19 nt, Artificial Sequence
  Description of Artificial Sequence: Synthetic oligonucleotide
ggcuaacggcuaauugaag

SEQ ID NO: 1297550 - RNA, 19 nt, Artificial Sequence
  Description of Artificial Sequence: Synthetic oligonucleotide
cuugcagucuggacuguau

SEQ ID NO: 1297551 - RNA, 19 nt, Artificial Sequence
  Description of Artificial Sequence: Synthetic oligonucleotide
ccccgcugugacaaugacc

SEQ ID NO: 1297552 - RNA, 19 nt, Artificial Sequence
  Description of Artificial Sequence: Synthetic oligonucleotide
gcucucggccaagucagcc

SEQ ID NO: 1297553 - RNA, 19 nt, Artificial Sequence
  Description of Artificial Sequence: Synthetic oligonucleotide
ccauagaaacccugcugca

SEQ ID NO: 1297554 - RNA, 19 nt, Artificial Sequence
  Description of Artificial Sequence: Synthetic oligonucleotide
cccuuaaucaugguagaaa

SEQ ID NO: 1297555 - RNA, 19 nt, Artificial Sequence
  Description of Artificial Sequence: Synthetic oligonucleotide
gugggaagugaggauuucu

SEQ ID NO: 1297556 - RNA, 19 nt, Artificial Sequence
  Description of Artificial Sequence: Synthetic oligonucleotide
ggccuaggcaaguuuggua

SEQ ID NO: 1297557 - RNA, 19 nt, Artificial Sequence
  Description of Artificial Sequence: Synthetic oligonucleotide
cacuuagcaucaggguaga

SEQ ID NO: 1297558 - RNA, 19 nt, Artificial Sequence
  Description of Artificial Sequence: Synthetic oligonucleotide
caugcuggagauccaucau

SEQ ID NO: 1297559 - RNA, 19 nt, Artificial Sequence
  Description of Artificial Sequence: Synthetic oligonucleotide
caacaucggagauuccauu

SEQ ID NO: 1297560 - RNA, 19 nt, Artificial Sequence
  Description of Artificial Sequence: Synthetic oligonucleotide
ucacaacguugggaaugau

SEQ ID NO: 1297561 - RNA, 19 nt, Artificial Sequence
  Description of Artificial Sequence: Synthetic oligonucleotide
cccauaguguaucugcacu

SEQ ID NO: 1297562 - RNA, 19 nt, Artificial Sequence
  Description of Artificial Sequence: Synthetic oligonucleotide
cccuaggacccauccauga

SEQ ID NO: 1297563 - RNA, 19 nt, Artificial Sequence
  Description of Artificial Sequence: Synthetic oligonucleotide
cagaaguuagagucaccuu

SEQ ID NO: 1297564 - RNA, 19 nt, Artificial Sequence
  Description of Artificial Sequence: Synthetic oligonucleotide
gcuacacaaguaccacuua

SEQ ID NO: 1297565 - RNA, 19 nt, Artificial Sequence
  Description of Artificial Sequence: Synthetic oligonucleotide
ccuuaaguagauucacaau

SEQ ID NO: 1297566 - RNA, 19 nt, Artificial Sequence
  Description of Artificial Sequence: Synthetic oligonucleotide
agggugcagagcagacaca

SEQ ID NO: 1297567 - RNA, 19 nt, Artificial Sequence
  Description of Artificial Sequence: Synthetic oligonucleotide
cuaggguaucugaggacuu

SEQ ID NO: 1297568 - RNA, 19 nt, Artificial Sequence
  Description of Artificial Sequence: Synthetic oligonucleotide
accaauggcccaggaugua

SEQ ID NO: 1297569 - RNA, 19 nt, Artificial Sequence
  Description of Artificial Sequence: Synthetic oligonucleotide
cugucgcaccaacgagguc

SEQ ID NO: 1297570 - RNA, 19 nt, Artificial Sequence
  Description of Artificial Sequence: Synthetic oligonucleotide
cccaaccuuucucccauca

SEQ ID NO: 1297571 - RNA, 19 nt, Artificial Sequence
  Description of Artificial Sequence: Synthetic oligonucleotide
guguugccaucuuggacuu

SEQ ID NO: 1297572 - RNA, 19 nt, Artificial Sequence
  Description of Artificial Sequence: Synthetic oligonucleotide
cgccuaagauucuucauua

SEQ ID NO: 1297573 - RNA, 19 nt, Artificial Sequence
  Description of Artificial Sequence: Synthetic oligonucleotide
ccccuaggacccauccaug

SEQ ID NO: 1297574 - RNA, 19 nt, Artificial Sequence
  Description of Artificial Sequence: Synthetic oligonucleotide
gcaagcucaucugcuaagu

SEQ ID NO: 1297575 - RNA, 19 nt, Artificial Sequence
  Description of Artificial Sequence: Synthetic oligonucleotide
gacccauccaugacagcuu

SEQ ID NO: 1297576 - RNA, 19 nt, Artificial Sequence
  Description of Artificial Sequence: Synthetic oligonucleotide
gcugugggaagugaggauu

SEQ ID NO: 1297577 - RNA, 19 nt, Artificial Sequence
  Description of Artificial Sequence: Synthetic oligonucleotide
caacgaggucaccgcuaca

SEQ ID NO: 1297578 - RNA, 19 nt, Artificial Sequence
  Description of Artificial Sequence: Synthetic oligonucleotide
ccagauugagucggcucuc

SEQ ID NO: 1297579 - RNA, 19 nt, Artificial Sequence
  Description of Artificial Sequence: Synthetic oligonucleotide
cgaggucaccgcuacacaa

SEQ ID NO: 1297580 - RNA, 19 nt, Artificial Sequence
  Description of Artificial Sequence: Synthetic oligonucleotide
ccuaggcaaguuugguaaa

SEQ ID NO: 1297581 - RNA, 19 nt, Artificial Sequence
  Description of Artificial Sequence: Synthetic oligonucleotide
caccaacgaggucaccgcu

SEQ ID NO: 1297582 - RNA, 19 nt, Artificial Sequence
  Description of Artificial Sequence: Synthetic oligonucleotide
gaccagcuuggaguuugcu

SEQ ID NO: 1297583 - RNA, 19 nt, Artificial Sequence
  Description of Artificial Sequence: Synthetic oligonucleotide
ggacuguauuucacaacgu

SEQ ID NO: 1297584 - RNA, 19 nt, Artificial Sequence
  Description of Artificial Sequence: Synthetic oligonucleotide
gcccaggauguauaacccu

SEQ ID NO: 1297585 - RNA, 19 nt, Artificial Sequence
  Description of Artificial Sequence: Synthetic oligonucleotide
gggugaacacccaaccuuu

SEQ ID NO: 1297586 - RNA, 19 nt, Artificial Sequence
  Description of Artificial Sequence: Synthetic oligonucleotide
ucgcaccaacgaggucacc

SEQ ID NO: 1297587 - RNA, 19 nt, Artificial Sequence
  Description of Artificial Sequence: Synthetic oligonucleotide
caccaaccccaacaaucgu

SEQ ID NO: 1297588 - RNA, 19 nt, Artificial Sequence
  Description of Artificial Sequence: Synthetic oligonucleotide
cagcucagaugaguagaua

SEQ ID NO: 1297589 - RNA, 19 nt, Artificial Sequence
  Description of Artificial Sequence: Synthetic oligonucleotide
cccaggauguauaacccuu

SEQ ID NO: 1297590 - RNA, 19 nt, Artificial Sequence
  Description of Artificial Sequence: Synthetic oligonucleotide
ccauccaugacagcuuagu

SEQ ID NO: 1297591 - RNA, 19 nt, Artificial Sequence
  Description of Artificial Sequence: Synthetic oligonucleotide
cgcuacacaaguaccacuu

SEQ ID NO: 1297592 - RNA, 19 nt, Artificial Sequence
  Description of Artificial Sequence: Synthetic oligonucleotide
ccgcugugacaaugaccag

SEQ ID NO: 1297593 - RNA, 19 nt, Artificial Sequence
  Description of Artificial Sequence: Synthetic oligonucleotide
ccaagccacguaggucaag

SEQ ID NO: 1297594 - RNA, 19 nt, Artificial Sequence
  Description of Artificial Sequence: Synthetic oligonucleotide
cacaggcuaacggcuaauu

SEQ ID NO: 1297595 - RNA, 19 nt, Artificial Sequence
  Description of Artificial Sequence: Synthetic oligonucleotide
ggucaccgcuacacaagua

SEQ ID NO: 1297596 - RNA, 19 nt, Artificial Sequence
  Description of Artificial Sequence: Synthetic oligonucleotide
ccgcuacacaaguaccacu

SEQ ID NO: 1297597 - RNA, 19 nt, Artificial Sequence
  Description of Artificial Sequence: Synthetic oligonucleotide
gggaccgcuaaugcacgau

SEQ ID NO: 1297598 - RNA, 19 nt, Artificial Sequence
  Description of Artificial Sequence: Synthetic oligonucleotide
cccgccuaagauucuucau

SEQ ID NO: 1297599 - RNA, 19 nt, Artificial Sequence
  Description of Artificial Sequence: Synthetic oligonucleotide
cugugacaaugaccagcuu

SEQ ID NO: 1297600 - RNA, 19 nt, Artificial Sequence
  Description of Artificial Sequence: Synthetic oligonucleotide
cggcuaauugaagccugca

SEQ ID NO: 1297601 - RNA, 19 nt, Artificial Sequence
  Description of Artificial Sequence: Synthetic oligonucleotide
gcacccgccuaagauucuu

SEQ ID NO: 1297602 - RNA, 19 nt, Artificial Sequence
  Description of Artificial Sequence: Synthetic oligonucleotide
ccacugcuccuugucggua

SEQ ID NO: 1297603 - RNA, 19 nt, Artificial Sequence
  Description of Artificial Sequence: Synthetic oligonucleotide
ccccaacaaucguaaucuu

SEQ ID NO: 1297604 - RNA, 19 nt, Artificial Sequence
  Description of Artificial Sequence: Synthetic oligonucleotide
gcaugacacuuggguaguu

SEQ ID NO: 1297605 - RNA, 19 nt, Artificial Sequence
  Description of Artificial Sequence: Synthetic oligonucleotide
aaauaaacaguacauaggg

SEQ ID NO: 1297606 - RNA, 19 nt, Artificial Sequence
  Description of Artificial Sequence: Synthetic oligonucleotide
ucaaguaggagaaagaggc

SEQ ID NO: 1297607 - RNA, 19 nt, Artificial Sequence
  Description of Artificial Sequence: Synthetic oligonucleotide
aaaauaucgcaaccacucc

SEQ ID NO: 1297608 - RNA, 19 nt, Artificial Sequence
  Description of Artificial Sequence: Synthetic oligonucleotide
aaaacccucagucuccucg

SEQ ID NO: 1297609 - RNA, 19 nt, Artificial Sequence
  Description of Artificial Sequence: Synthetic oligonucleotide
ugaaucgccagucagucag

SEQ ID NO: 1297610 - RNA, 19 nt, Artificial Sequence
  Description of Artificial Sequence: Synthetic oligonucleotide
aauacacccguccauuguc

SEQ ID NO: 1297611 - RNA, 19 nt, Artificial Sequence
  Description of Artificial Sequence: Synthetic oligonucleotide
cuucccaugguacagagcc

SEQ ID NO: 1297612 - RNA, 19 nt, Artificial Sequence
  Description of Artificial Sequence: Synthetic oligonucleotide
agauccagacgguugaagc

SEQ ID NO: 1297613 - RNA, 19 nt, Artificial Sequence
  Description of Artificial Sequence: Synthetic oligonucleotide
accaacaugaucaaagcac

SEQ ID NO: 1297614 - RNA, 19 nt, Artificial Sequence
  Description of Artificial Sequence: Synthetic oligonucleotide
uaaacaguacauaggguug

SEQ ID NO: 1297615 - RNA, 19 nt, Artificial Sequence
  Description of Artificial Sequence: Synthetic oligonucleotide
uccgcuuguagaaaggaag

SEQ ID NO: 1297616 - RNA, 19 nt, Artificial Sequence
  Description of Artificial Sequence: Synthetic oligonucleotide
aaauaucgcaaccacucca

SEQ ID NO: 1297617 - RNA, 19 nt, Artificial Sequence
  Description of Artificial Sequence: Synthetic oligonucleotide
auuugaguggcagaggaac

SEQ ID NO: 1297618 - RNA, 19 nt, Artificial Sequence
  Description of Artificial Sequence: Synthetic oligonucleotide
cuuguuuugucccugacuc

SEQ ID NO: 1297619 - RNA, 19 nt, Artificial Sequence
  Description of Artificial Sequence: Synthetic oligonucleotide
cugaucuucacauggcucg

SEQ ID NO: 1297620 - RNA, 19 nt, Artificial Sequence
  Description of Artificial Sequence: Synthetic oligonucleotide
uugugguucacguuaauac

SEQ ID NO: 1297621 - RNA, 19 nt, Artificial Sequence
  Description of Artificial Sequence: Synthetic oligonucleotide
uucacguuaauacacccgu

SEQ ID NO: 1297622 - RNA, 19 nt, Artificial Sequence
  Description of Artificial Sequence: Synthetic oligonucleotide
aauaaagcggaaguaggug

SEQ ID NO: 1297623 - RNA, 19 nt, Artificial Sequence
  Description of Artificial Sequence: Synthetic oligonucleotide
aagggugaagccugugucg

SEQ ID NO: 1297624 - RNA, 19 nt, Artificial Sequence
  Description of Artificial Sequence: Synthetic oligonucleotide
aaacuucggucguaggcac

SEQ ID NO: 1297625 - RNA, 19 nt, Artificial Sequence
  Description of Artificial Sequence: Synthetic oligonucleotide
aaaacuucggucguaggca

SEQ ID NO: 1297626 - RNA, 19 nt, Artificial Sequence
  Description of Artificial Sequence: Synthetic oligonucleotide
aucgcaaccacuccagagg

SEQ ID NO: 1297627 - RNA, 19 nt, Artificial Sequence
  Description of Artificial Sequence: Synthetic oligonucleotide
ucaaaauaucgcaaccacu

SEQ ID NO: 1297628 - RNA, 19 nt, Artificial Sequence
  Description of Artificial Sequence: Synthetic oligonucleotide
gauacuuccaccgaaaacu

SEQ ID NO: 1297629 - RNA, 19 nt, Artificial Sequence
  Description of Artificial Sequence: Synthetic oligonucleotide
aaauccuccaacaggcagg

SEQ ID NO: 1297630 - RNA, 19 nt, Artificial Sequence
  Description of Artificial Sequence: Synthetic oligonucleotide
auaaagcggaaguagguga

SEQ ID NO: 1297631 - RNA, 19 nt, Artificial Sequence
  Description of Artificial Sequence: Synthetic oligonucleotide
uaaagcggaaguaggugag

SEQ ID NO: 1297632 - RNA, 19 nt, Artificial Sequence
  Description of Artificial Sequence: Synthetic oligonucleotide
uuaaagguagugguucggg

SEQ ID NO: 1297633 - RNA, 19 nt, Artificial Sequence
  Description of Artificial Sequence: Synthetic oligonucleotide
cuacucuugguguagugcc

SEQ ID NO: 1297634 - RNA, 19 nt, Artificial Sequence
  Description of Artificial Sequence: Synthetic oligonucleotide
gauccguuaaagguagugg

SEQ ID NO: 1297635 - RNA, 19 nt, Artificial Sequence
  Description of Artificial Sequence: Synthetic oligonucleotide
acgguugaagcauguaugg

SEQ ID NO: 1297636 - RNA, 19 nt, Artificial Sequence
  Description of Artificial Sequence: Synthetic oligonucleotide
ugugguucacguuaauaca

SEQ ID NO: 1297637 - RNA, 19 nt, Artificial Sequence
  Description of Artificial Sequence: Synthetic oligonucleotide
aauaucgcaaccacuccag

SEQ ID NO: 1297638 - RNA, 19 nt, Artificial Sequence
  Description of Artificial Sequence: Synthetic oligonucleotide
agaauccucaaagaguguc

SEQ ID NO: 1297639 - RNA, 19 nt, Artificial Sequence
  Description of Artificial Sequence: Synthetic oligonucleotide
uucaucucccauccguggg

SEQ ID NO: 1297640 - RNA, 19 nt, Artificial Sequence
  Description of Artificial Sequence: Synthetic oligonucleotide
uccuccaacaggcaggcga

SEQ ID NO: 1297641 - RNA, 19 nt, Artificial Sequence
  Description of Artificial Sequence: Synthetic oligonucleotide
agggucaauagacucuagg

SEQ ID NO: 1297642 - RNA, 19 nt, Artificial Sequence
  Description of Artificial Sequence: Synthetic oligonucleotide
ucgcaaccacuccagaggg

SEQ ID NO: 1297643 - RNA, 19 nt, Artificial Sequence
  Description of Artificial Sequence: Synthetic oligonucleotide
aagcauguauggcuccggg

SEQ ID NO: 1297644 - RNA, 19 nt, Artificial Sequence
  Description of Artificial Sequence: Synthetic oligonucleotide
uaucgcaaccacuccagag

SEQ ID NO: 1297645 - RNA, 19 nt, Artificial Sequence
  Description of Artificial Sequence: Synthetic oligonucleotide
cugacucgaacccugggcg

SEQ ID NO: 1297646 - RNA, 19 nt, Artificial Sequence
  Description of Artificial Sequence: Synthetic oligonucleotide
agugguucggguauugugg

SEQ ID NO: 1297647 - RNA, 19 nt, Artificial Sequence
  Description of Artificial Sequence: Synthetic oligonucleotide
cacguuaauacacccgucc

SEQ ID NO: 1297648 - RNA, 19 nt, Artificial Sequence
  Description of Artificial Sequence: Synthetic oligonucleotide
ugauacuuccaccgaaaac

SEQ ID NO: 1297649 - RNA, 19 nt, Artificial Sequence
  Description of Artificial Sequence: Synthetic oligonucleotide
agugaaucgccagucaguc

SEQ ID NO: 1297650 - RNA, 19 nt, Artificial Sequence
  Description of Artificial Sequence: Synthetic oligonucleotide
uuaauacacccguccauug

SEQ ID NO: 1297651 - RNA, 19 nt, Artificial Sequence
  Description of Artificial Sequence: Synthetic oligonucleotide
agucguucaugucuauuuc

SEQ ID NO: 1297652 - RNA, 19 nt, Artificial Sequence
  Description of Artificial Sequence: Synthetic oligonucleotide
uuugucccugacucgaacc

SEQ ID NO: 1297653 - RNA, 19 nt, Artificial Sequence
  Description of Artificial Sequence: Synthetic oligonucleotide
ucgccagucagucagcaac

SEQ ID NO: 1297654 - RNA, 19 nt, Artificial Sequence
  Description of Artificial Sequence: Synthetic oligonucleotide
caccucaugggacaggagg

SEQ ID NO: 1297655 - RNA, 19 nt, Artificial Sequence
  Description of Artificial Sequence: Synthetic oligonucleotide
aauaaacaguacauagggu

SEQ ID NO: 1297656 - RNA, 19 nt, Artificial Sequence
  Description of Artificial Sequence: Synthetic oligonucleotide
ucaccacgcaugaugaugu

SEQ ID NO: 1297657 - RNA, 19 nt, Artificial Sequence
  Description of Artificial Sequence: Synthetic oligonucleotide
aucaaguaggagaaagagg

SEQ ID NO: 1297658 - RNA, 19 nt, Artificial Sequence
  Description of Artificial Sequence: Synthetic oligonucleotide
auccguuaaagguaguggu

SEQ ID NO: 1297659 - RNA, 19 nt, Artificial Sequence
  Description of Artificial Sequence: Synthetic oligonucleotide
auugcucccaaugaguuca

SEQ ID NO: 1297660 - RNA, 19 nt, Artificial Sequence
  Description of Artificial Sequence: Synthetic oligonucleotide
ugguucacguuaauacacc

SEQ ID NO: 1297661 - RNA, 19 nt, Artificial Sequence
  Description of Artificial Sequence: Synthetic oligonucleotide
uguuuugucccugacucga

SEQ ID NO: 1297662 - RNA, 19 nt, Artificial Sequence
  Description of Artificial Sequence: Synthetic oligonucleotide
gaacuggugauacuuccac

SEQ ID NO: 1297663 - RNA, 19 nt, Artificial Sequence
  Description of Artificial Sequence: Synthetic oligonucleotide
cuugguguagugccgguag

SEQ ID NO: 1297664 - RNA, 19 nt, Artificial Sequence
  Description of Artificial Sequence: Synthetic oligonucleotide
uugucccugacucgaaccc

SEQ ID NO: 1297665 - RNA, 19 nt, Artificial Sequence
  Description of Artificial Sequence: Synthetic oligonucleotide
uuguuuugucccugacucg

SEQ ID NO: 1297666 - RNA, 19 nt, Artificial Sequence
  Description of Artificial Sequence: Synthetic oligonucleotide
ucguaagguuucauguuca

SEQ ID NO: 1297667 - RNA, 19 nt, Artificial Sequence
  Description of Artificial Sequence: Synthetic oligonucleotide
uaauacacccguccauugu

SEQ ID NO: 1297668 - RNA, 19 nt, Artificial Sequence
  Description of Artificial Sequence: Synthetic oligonucleotide
ugucgaugaacuucccaug

SEQ ID NO: 1297669 - RNA, 19 nt, Artificial Sequence
  Description of Artificial Sequence: Synthetic oligonucleotide
gaagggugaagccuguguc

SEQ ID NO: 1297670 - RNA, 19 nt, Artificial Sequence
  Description of Artificial Sequence: Synthetic oligonucleotide
cuaccugccagaaccacug

SEQ ID NO: 1297671 - RNA, 19 nt, Artificial Sequence
  Description of Artificial Sequence: Synthetic oligonucleotide
cagacaauggaguuguaga

SEQ ID NO: 1297672 - RNA, 19 nt, Artificial Sequence
  Description of Artificial Sequence: Synthetic oligonucleotide
agcauccgcuuguagaaag

SEQ ID NO: 1297673 - RNA, 19 nt, Artificial Sequence
  Description of Artificial Sequence: Synthetic oligonucleotide
uagugguucggguauugug

SEQ ID NO: 1297674 - RNA, 19 nt, Artificial Sequence
  Description of Artificial Sequence: Synthetic oligonucleotide
ucccagcauauucaaauaa

SEQ ID NO: 1297675 - RNA, 19 nt, Artificial Sequence
  Description of Artificial Sequence: Synthetic oligonucleotide
acuacaugugcuggagggc

SEQ ID NO: 1297676 - RNA, 19 nt, Artificial Sequence
  Description of Artificial Sequence: Synthetic oligonucleotide
uaaagguagugguucgggu

SEQ ID NO: 1297677 - RNA, 19 nt, Artificial Sequence
  Description of Artificial Sequence: Synthetic oligonucleotide
agcauguauggcuccgggg

SEQ ID NO: 1297678 - RNA, 19 nt, Artificial Sequence
  Description of Artificial Sequence: Synthetic oligonucleotide
gucguucaugucuauuucc

SEQ ID NO: 1297679 - RNA, 19 nt, Artificial Sequence
  Description of Artificial Sequence: Synthetic oligonucleotide
agugcguguguugugguuc

SEQ ID NO: 1297680 - RNA, 19 nt, Artificial Sequence
  Description of Artificial Sequence: Synthetic oligonucleotide
gccaucaucaaguaggaga

SEQ ID NO: 1297681 - RNA, 19 nt, Artificial Sequence
  Description of Artificial Sequence: Synthetic oligonucleotide
ccaccgaaaacuucggucg

SEQ ID NO: 1297682 - RNA, 19 nt, Artificial Sequence
  Description of Artificial Sequence: Synthetic oligonucleotide
aguuggucucuuguugagc

SEQ ID NO: 1297683 - RNA, 19 nt, Artificial Sequence
  Description of Artificial Sequence: Synthetic oligonucleotide
uucacauggcucgguaggg

SEQ ID NO: 1297684 - RNA, 19 nt, Artificial Sequence
  Description of Artificial Sequence: Synthetic oligonucleotide
aagguuucauguucauaau

SEQ ID NO: 1297685 - RNA, 19 nt, Artificial Sequence
  Description of Artificial Sequence: Synthetic oligonucleotide
guucacguuaauacacccg

SEQ ID NO: 1297686 - RNA, 19 nt, Artificial Sequence
  Description of Artificial Sequence: Synthetic oligonucleotide
aaacccucagucuccucga

SEQ ID NO: 1297687 - RNA, 19 nt, Artificial Sequence
  Description of Artificial Sequence: Synthetic oligonucleotide
gucguaagguuucauguuc

SEQ ID NO: 1297688 - RNA, 19 nt, Artificial Sequence
  Description of Artificial Sequence: Synthetic oligonucleotide
uguaacucggaugcucuca

SEQ ID NO: 1297689 - RNA, 19 nt, Artificial Sequence
  Description of Artificial Sequence: Synthetic oligonucleotide
guuaaagguagugguucgg

SEQ ID NO: 1297690 - RNA, 19 nt, Artificial Sequence
  Description of Artificial Sequence: Synthetic oligonucleotide
uuuugucccugacucgaac

SEQ ID NO: 1297691 - RNA, 19 nt, Artificial Sequence
  Description of Artificial Sequence: Synthetic oligonucleotide
agugucugucuggaaacac

SEQ ID NO: 1297692 - RNA, 19 nt, Artificial Sequence
  Description of Artificial Sequence: Synthetic oligonucleotide
uugccaacucugucaaugc

SEQ ID NO: 1297693 - RNA, 19 nt, Artificial Sequence
  Description of Artificial Sequence: Synthetic oligonucleotide
acucggaugcucucaccac

SEQ ID NO: 1297694 - RNA, 19 nt, Artificial Sequence
  Description of Artificial Sequence: Synthetic oligonucleotide
uucggucguaggcaccagg

SEQ ID NO: 1297695 - RNA, 19 nt, Artificial Sequence
  Description of Artificial Sequence: Synthetic oligonucleotide
acaguacauaggguugagc

SEQ ID NO: 1297696 - RNA, 19 nt, Artificial Sequence
  Description of Artificial Sequence: Synthetic oligonucleotide
ggucaauagacucuagguc

SEQ ID NO: 1297697 - RNA, 19 nt, Artificial Sequence
  Description of Artificial Sequence: Synthetic oligonucleotide
gcuacuccuguccaaaacc

SEQ ID NO: 1297698 - RNA, 19 nt, Artificial Sequence
  Description of Artificial Sequence: Synthetic oligonucleotide
gcauguauggcuccggggc

SEQ ID NO: 1297699 - RNA, 19 nt, Artificial Sequence
  Description of Artificial Sequence: Synthetic oligonucleotide
acguuaauacacccgucca

SEQ ID NO: 1297700 - RNA, 19 nt, Artificial Sequence
  Description of Artificial Sequence: Synthetic oligonucleotide
uggugauacuuccaccgaa

SEQ ID NO: 1297701 - RNA, 19 nt, Artificial Sequence
  Description of Artificial Sequence: Synthetic oligonucleotide
guaccgcacacccucacug

SEQ ID NO: 1297702 - RNA, 19 nt, Artificial Sequence
  Description of Artificial Sequence: Synthetic oligonucleotide
auacacccguccauugucc

SEQ ID NO: 1297703 - RNA, 19 nt, Artificial Sequence
  Description of Artificial Sequence: Synthetic oligonucleotide
cuuccaccgaaaacuucgg

SEQ ID NO: 1297704 - RNA, 19 nt, Artificial Sequence
  Description of Artificial Sequence: Synthetic oligonucleotide
uauccaaaggggccuccca

SEQ ID NO: 1297705 - RNA, 19 nt, Artificial Sequence
  Description of Artificial Sequence: Synthetic oligonucleotide
guugaagcauguauggcuc

SEQ ID NO: 1297706 - RNA, 19 nt, Artificial Sequence
  Description of Artificial Sequence: Synthetic oligonucleotide
cucggaugcucucaccacc

SEQ ID NO: 1297707 - RNA, 19 nt, Artificial Sequence
  Description of Artificial Sequence: Synthetic oligonucleotide
ucggucguaggcaccaggu

SEQ ID NO: 1297708 - RNA, 19 nt, Artificial Sequence
  Description of Artificial Sequence: Synthetic oligonucleotide
cucuuugauccagacaaug

SEQ ID NO: 1297709 - RNA, 19 nt, Artificial Sequence
  Description of Artificial Sequence: Synthetic oligonucleotide
caggucguaagguuucaug

SEQ ID NO: 1297710 - RNA, 19 nt, Artificial Sequence
  Description of Artificial Sequence: Synthetic oligonucleotide
ccugugucgaugaacuucc

SEQ ID NO: 1297711 - RNA, 19 nt, Artificial Sequence
  Description of Artificial Sequence: Synthetic oligonucleotide
ucccaugguacagagccug

SEQ ID NO: 1297712 - RNA, 19 nt, Artificial Sequence
  Description of Artificial Sequence: Synthetic oligonucleotide
agucagcaacaugauguac

SEQ ID NO: 1297713 - RNA, 19 nt, Artificial Sequence
  Description of Artificial Sequence: Synthetic oligonucleotide
uccguuaaagguagugguu

SEQ ID NO: 1297714 - RNA, 19 nt, Artificial Sequence
  Description of Artificial Sequence: Synthetic oligonucleotide
gaagcauguauggcuccgg

SEQ ID NO: 1297715 - RNA, 19 nt, Artificial Sequence
  Description of Artificial Sequence: Synthetic oligonucleotide
ugccaacucugucaaugca

SEQ ID NO: 1297716 - RNA, 19 nt, Artificial Sequence
  Description of Artificial Sequence: Synthetic oligonucleotide
gcggaaguaggugaggugg

SEQ ID NO: 1297717 - RNA, 19 nt, Artificial Sequence
  Description of Artificial Sequence: Synthetic oligonucleotide
ucgagugaaucgccaguca

SEQ ID NO: 1297718 - RNA, 19 nt, Artificial Sequence
  Description of Artificial Sequence: Synthetic oligonucleotide
gguucacguuaauacaccc

SEQ ID NO: 1297719 - RNA, 19 nt, Artificial Sequence
  Description of Artificial Sequence: Synthetic oligonucleotide
aacucagggucaauagacu

SEQ ID NO: 1297720 - RNA, 19 nt, Artificial Sequence
  Description of Artificial Sequence: Synthetic oligonucleotide
ucggaugcucucaccaccu

SEQ ID NO: 1297721 - RNA, 19 nt, Artificial Sequence
  Description of Artificial Sequence: Synthetic oligonucleotide
gguagugcguguguugugg

SEQ ID NO: 1297722 - RNA, 19 nt, Artificial Sequence
  Description of Artificial Sequence: Synthetic oligonucleotide
cugucuggaaacacugauc

SEQ ID NO: 1297723 - RNA, 19 nt, Artificial Sequence
  Description of Artificial Sequence: Synthetic oligonucleotide
uccaacaggcaggcgacag

SEQ ID NO: 1297724 - RNA, 19 nt, Artificial Sequence
  Description of Artificial Sequence: Synthetic oligonucleotide
aacuucggucguaggcacc

SEQ ID NO: 1297725 - RNA, 19 nt, Artificial Sequence
  Description of Artificial Sequence: Synthetic oligonucleotide
cuugcuacucuugguguag

SEQ ID NO: 1297726 - RNA, 19 nt, Artificial Sequence
  Description of Artificial Sequence: Synthetic oligonucleotide
uccagacgguugaagcaug

SEQ ID NO: 1297727 - RNA, 19 nt, Artificial Sequence
  Description of Artificial Sequence: Synthetic oligonucleotide
aggacuacaugugcuggag

SEQ ID NO: 1297728 - RNA, 19 nt, Artificial Sequence
  Description of Artificial Sequence: Synthetic oligonucleotide
ugggcauggcgaugaaucu

SEQ ID NO: 1297729 - RNA, 19 nt, Artificial Sequence
  Description of Artificial Sequence: Synthetic oligonucleotide
ucacguuaauacacccguc

SEQ ID NO: 1297730 - RNA, 19 nt, Artificial Sequence
  Description of Artificial Sequence: Synthetic oligonucleotide
ugcuacucuugguguagug

SEQ ID NO: 1297731 - RNA, 19 nt, Artificial Sequence
  Description of Artificial Sequence: Synthetic oligonucleotide
aaucgccagucagucagca

SEQ ID NO: 1297732 - RNA, 19 nt, Artificial Sequence
  Description of Artificial Sequence: Synthetic oligonucleotide
uugguguagugccgguaga

SEQ ID NO: 1297733 - RNA, 19 nt, Artificial Sequence
  Description of Artificial Sequence: Synthetic oligonucleotide
cagagcaugagcuccagcu

SEQ ID NO: 1297734 - RNA, 19 nt, Artificial Sequence
  Description of Artificial Sequence: Synthetic oligonucleotide
gguugauggaagaggcugg

SEQ ID NO: 1297735 - RNA, 19 nt, Artificial Sequence
  Description of Artificial Sequence: Synthetic oligonucleotide
uuccaccgaaaacuucggu

SEQ ID NO: 1297736 - RNA, 19 nt, Artificial Sequence
  Description of Artificial Sequence: Synthetic oligonucleotide
ucggguauugugguccaca

SEQ ID NO: 1297737 - RNA, 19 nt, Artificial Sequence
  Description of Artificial Sequence: Synthetic oligonucleotide
gucguaggcaccaggugag

SEQ ID NO: 1297738 - RNA, 19 nt, Artificial Sequence
  Description of Artificial Sequence: Synthetic oligonucleotide
ccgcuuguagaaaggaagg

SEQ ID NO: 1297739 - RNA, 19 nt, Artificial Sequence
  Description of Artificial Sequence: Synthetic oligonucleotide
ggucguaggcaccagguga

SEQ ID NO: 1297740 - RNA, 19 nt, Artificial Sequence
  Description of Artificial Sequence: Synthetic oligonucleotide
auacagggccacuauccaa

SEQ ID NO: 1297741 - RNA, 19 nt, Artificial Sequence
  Description of Artificial Sequence: Synthetic oligonucleotide
uaacucggaugcucucacc

SEQ ID NO: 1297742 - RNA, 19 nt, Artificial Sequence
  Description of Artificial Sequence: Synthetic oligonucleotide
caaagcacagucccauaca

SEQ ID NO: 1297743 - RNA, 19 nt, Artificial Sequence
  Description of Artificial Sequence: Synthetic oligonucleotide
uggggccagacucuucagu

SEQ ID NO: 1297744 - RNA, 19 nt, Artificial Sequence
  Description of Artificial Sequence: Synthetic oligonucleotide
aguaccgcacacccucacu

SEQ ID NO: 1297745 - RNA, 19 nt, Artificial Sequence
  Description of Artificial Sequence: Synthetic oligonucleotide
aguagccggauccucuuuu

SEQ ID NO: 1297746 - RNA, 19 nt, Artificial Sequence
  Description of Artificial Sequence: Synthetic oligonucleotide
uggucucuuguugagcauc

SEQ ID NO: 1297747 - RNA, 19 nt, Artificial Sequence
  Description of Artificial Sequence: Synthetic oligonucleotide
ugccagucguucaugucua

SEQ ID NO: 1297748 - RNA, 19 nt, Artificial Sequence
  Description of Artificial Sequence: Synthetic oligonucleotide
auaucgcaaccacuccaga

SEQ ID NO: 1297749 - RNA, 19 nt, Artificial Sequence
  Description of Artificial Sequence: Synthetic oligonucleotide
cauacagggccacuaucca

SEQ ID NO: 1297750 - RNA, 19 nt, Artificial Sequence
  Description of Artificial Sequence: Synthetic oligonucleotide
gacucgaacccugggcgag

SEQ ID NO: 1297751 - RNA, 19 nt, Artificial Sequence
  Description of Artificial Sequence: Synthetic oligonucleotide
auccaaaggggccucccaa

SEQ ID NO: 1297752 - RNA, 19 nt, Artificial Sequence
  Description of Artificial Sequence: Synthetic oligonucleotide
ugggcgaggauccguuaaa

SEQ ID NO: 1297753 - RNA, 19 nt, Artificial Sequence
  Description of Artificial Sequence: Synthetic oligonucleotide
cacccguccauuguccugc

SEQ ID NO: 1297754 - RNA, 19 nt, Artificial Sequence
  Description of Artificial Sequence: Synthetic oligonucleotide
ucuggcgaugccgccguag

SEQ ID NO: 1297755 - RNA, 19 nt, Artificial Sequence
  Description of Artificial Sequence: Synthetic oligonucleotide
cuacaugugcuggagggca

SEQ ID NO: 1297756 - RNA, 19 nt, Artificial Sequence
  Description of Artificial Sequence: Synthetic oligonucleotide
caggcgacagguuccugug

SEQ ID NO: 1297757 - RNA, 19 nt, Artificial Sequence
  Description of Artificial Sequence: Synthetic oligonucleotide
acuucggucguaggcacca

SEQ ID NO: 1297758 - RNA, 19 nt, Artificial Sequence
  Description of Artificial Sequence: Synthetic oligonucleotide
aaccggaacuggugauacu

SEQ ID NO: 1297759 - RNA, 19 nt, Artificial Sequence
  Description of Artificial Sequence: Synthetic oligonucleotide
ucccauacagggccacuau

SEQ ID NO: 1297760 - RNA, 19 nt, Artificial Sequence
  Description of Artificial Sequence: Synthetic oligonucleotide
uccguggguccucccacug

SEQ ID NO: 1297761 - RNA, 19 nt, Artificial Sequence
  Description of Artificial Sequence: Synthetic oligonucleotide
gccgccguaguccaggccc

SEQ ID NO: 1297762 - RNA, 19 nt, Artificial Sequence
  Description of Artificial Sequence: Synthetic oligonucleotide
gccacuauccaaaggggcc

SEQ ID NO: 1297763 - RNA, 19 nt, Artificial Sequence
  Description of Artificial Sequence: Synthetic oligonucleotide
cauccccuggguccguggg

SEQ ID NO: 1297764 - RNA, 19 nt, Artificial Sequence
  Description of Artificial Sequence: Synthetic oligonucleotide
auggaagaggcuggguuga

SEQ ID NO: 1297765 - RNA, 19 nt, Artificial Sequence
  Description of Artificial Sequence: Synthetic oligonucleotide
cguuaaagguagugguucg

SEQ ID NO: 1297766 - RNA, 19 nt, Artificial Sequence
  Description of Artificial Sequence: Synthetic oligonucleotide
auccagacgguugaagcau

SEQ ID NO: 1297767 - RNA, 19 nt, Artificial Sequence
  Description of Artificial Sequence: Synthetic oligonucleotide
cuauccaaaggggccuccc

SEQ ID NO: 1297768 - RNA, 19 nt, Artificial Sequence
  Description of Artificial Sequence: Synthetic oligonucleotide
ggauccguuaaagguagug

SEQ ID NO: 1297769 - RNA, 19 nt, Artificial Sequence
  Description of Artificial Sequence: Synthetic oligonucleotide
gcuacucuugguguagugc

SEQ ID NO: 1297770 - RNA, 19 nt, Artificial Sequence
  Description of Artificial Sequence: Synthetic oligonucleotide
gugauacuuccaccgaaaa

SEQ ID NO: 1297771 - RNA, 19 nt, Artificial Sequence
  Description of Artificial Sequence: Synthetic oligonucleotide
auguauggcuccggggcag

SEQ ID NO: 1297772 - RNA, 19 nt, Artificial Sequence
  Description of Artificial Sequence: Synthetic oligonucleotide
aucuucacauggcucggua

SEQ ID NO: 1297773 - RNA, 19 nt, Artificial Sequence
  Description of Artificial Sequence: Synthetic oligonucleotide
cucucuggcgaugccgccg

SEQ ID NO: 1297774 - RNA, 19 nt, Artificial Sequence
  Description of Artificial Sequence: Synthetic oligonucleotide
auaggguugagcaccucau

SEQ ID NO: 1297775 - RNA, 19 nt, Artificial Sequence
  Description of Artificial Sequence: Synthetic oligonucleotide
cucgguagggcauuugagu

SEQ ID NO: 1297776 - RNA, 19 nt, Artificial Sequence
  Description of Artificial Sequence: Synthetic oligonucleotide
gaauccucaaagagugucu

SEQ ID NO: 1297777 - RNA, 19 nt, Artificial Sequence
  Description of Artificial Sequence: Synthetic oligonucleotide
accgcacacccucacuggu

SEQ ID NO: 1297778 - RNA, 19 nt, Artificial Sequence
  Description of Artificial Sequence: Synthetic oligonucleotide
ugguguagugccgguagau

SEQ ID NO: 1297779 - RNA, 19 nt, Artificial Sequence
  Description of Artificial Sequence: Synthetic oligonucleotide
guagccggauccucuuuuc

SEQ ID NO: 1297780 - RNA, 19 nt, Artificial Sequence
  Description of Artificial Sequence: Synthetic oligonucleotide
gggcuuuauuccaaacugc

SEQ ID NO: 1297781 - RNA, 19 nt, Artificial Sequence
  Description of Artificial Sequence: Synthetic oligonucleotide
gaaucgccagucagucagc

SEQ ID NO: 1297782 - RNA, 19 nt, Artificial Sequence
  Description of Artificial Sequence: Synthetic oligonucleotide
cuguaacucggaugcucuc

SEQ ID NO: 1297783 - RNA, 19 nt, Artificial Sequence
  Description of Artificial Sequence: Synthetic oligonucleotide
acccguccauuguccugcc

SEQ ID NO: 1297784 - RNA, 19 nt, Artificial Sequence
  Description of Artificial Sequence: Synthetic oligonucleotide
cauuugaguggcagaggaa

SEQ ID NO: 1297785 - RNA, 19 nt, Artificial Sequence
  Description of Artificial Sequence: Synthetic oligonucleotide
ccguuaaagguagugguuc

SEQ ID NO: 1297786 - RNA, 19 nt, Artificial Sequence
  Description of Artificial Sequence: Synthetic oligonucleotide
caggacuacaugugcugga

SEQ ID NO: 1297787 - RNA, 19 nt, Artificial Sequence
  Description of Artificial Sequence: Synthetic oligonucleotide
auacuuccaccgaaaacuu

SEQ ID NO: 1297788 - RNA, 19 nt, Artificial Sequence
  Description of Artificial Sequence: Synthetic oligonucleotide
ggcggcgcaggucguaagg

SEQ ID NO: 1297789 - RNA, 19 nt, Artificial Sequence
  Description of Artificial Sequence: Synthetic oligonucleotide
ucuugguguagugccggua

SEQ ID NO: 1297790 - RNA, 19 nt, Artificial Sequence
  Description of Artificial Sequence: Synthetic oligonucleotide
ggccacuauccaaaggggc

SEQ ID NO: 1297791 - RNA, 19 nt, Artificial Sequence
  Description of Artificial Sequence: Synthetic oligonucleotide
acaugugcuggagggcaug

SEQ ID NO: 1297792 - RNA, 19 nt, Artificial Sequence
  Description of Artificial Sequence: Synthetic oligonucleotide
cauccgcuuguagaaagga

SEQ ID NO: 1297793 - RNA, 19 nt, Artificial Sequence
  Description of Artificial Sequence: Synthetic oligonucleotide
acucgaacccugggcgagg

SEQ ID NO: 1297794 - RNA, 19 nt, Artificial Sequence
  Description of Artificial Sequence: Synthetic oligonucleotide
cugugucgaugaacuuccc

SEQ ID NO: 1297795 - RNA, 19 nt, Artificial Sequence
  Description of Artificial Sequence: Synthetic oligonucleotide
gggccacuauccaaagggg

SEQ ID NO: 1297796 - RNA, 19 nt, Artificial Sequence
  Description of Artificial Sequence: Synthetic oligonucleotide
ugguucggguauugugguc

SEQ ID NO: 1297797 - RNA, 19 nt, Artificial Sequence
  Description of Artificial Sequence: Synthetic oligonucleotide
gagugaaucgccagucagu

SEQ ID NO: 1297798 - RNA, 19 nt, Artificial Sequence
  Description of Artificial Sequence: Synthetic oligonucleotide
ccggauccucuuuucauug

SEQ ID NO: 1297799 - RNA, 19 nt, Artificial Sequence
  Description of Artificial Sequence: Synthetic oligonucleotide
uugcuacucuugguguagu

SEQ ID NO: 1297800 - RNA, 19 nt, Artificial Sequence
  Description of Artificial Sequence: Synthetic oligonucleotide
cagggucaauagacucuag

SEQ ID NO: 1297801 - RNA, 19 nt, Artificial Sequence
  Description of Artificial Sequence: Synthetic oligonucleotide
guaggcaccaggugagccu

SEQ ID NO: 1297802 - RNA, 19 nt, Artificial Sequence
  Description of Artificial Sequence: Synthetic oligonucleotide
gcaugaugauguagagccg

SEQ ID NO: 1297803 - RNA, 19 nt, Artificial Sequence
  Description of Artificial Sequence: Synthetic oligonucleotide
ugccgcagagcaugagcuc

SEQ ID NO: 1297804 - RNA, 19 nt, Artificial Sequence
  Description of Artificial Sequence: Synthetic oligonucleotide
gugaaucgccagucaguca

SEQ ID NO: 1297805 - RNA, 19 nt, Artificial Sequence
  Description of Artificial Sequence: Synthetic oligonucleotide
guucggguauuguggucca

SEQ ID NO: 1297806 - RNA, 19 nt, Artificial Sequence
  Description of Artificial Sequence: Synthetic oligonucleotide
cagucguucaugucuauuu

SEQ ID NO: 1297807 - RNA, 19 nt, Artificial Sequence
  Description of Artificial Sequence: Synthetic oligonucleotide
uggcgaugccgccguaguc

SEQ ID NO: 1297808 - RNA, 19 nt, Artificial Sequence
  Description of Artificial Sequence: Synthetic oligonucleotide
uagugccgguagauggcau

SEQ ID NO: 1297809 - RNA, 19 nt, Artificial Sequence
  Description of Artificial Sequence: Synthetic oligonucleotide
ucguaggcaccaggugagc

SEQ ID NO: 1297810 - RNA, 19 nt, Artificial Sequence
  Description of Artificial Sequence: Synthetic oligonucleotide
ccgaaaacuucggucguag

SEQ ID NO: 1297811 - RNA, 19 nt, Artificial Sequence
  Description of Artificial Sequence: Synthetic oligonucleotide
gugguucggguauuguggu

SEQ ID NO: 1297812 - RNA, 19 nt, Artificial Sequence
  Description of Artificial Sequence: Synthetic oligonucleotide
cacugaucuucacauggcu

SEQ ID NO: 1297813 - RNA, 19 nt, Artificial Sequence
  Description of Artificial Sequence: Synthetic oligonucleotide
ggcucgguagggcauuuga

SEQ ID NO: 1297814 - RNA, 19 nt, Artificial Sequence
  Description of Artificial Sequence: Synthetic oligonucleotide
ggugauacuuccaccgaaa

SEQ ID NO: 1297815 - RNA, 19 nt, Artificial Sequence
  Description of Artificial Sequence: Synthetic oligonucleotide
cgguagggcauuugagugg

SEQ ID NO: 1297816 - RNA, 19 nt, Artificial Sequence
  Description of Artificial Sequence: Synthetic oligonucleotide
auccgcuuguagaaaggaa

SEQ ID NO: 1297817 - RNA, 19 nt, Artificial Sequence
  Description of Artificial Sequence: Synthetic oligonucleotide
aggcgacagguuccuguga

SEQ ID NO: 1297818 - RNA, 19 nt, Artificial Sequence
  Description of Artificial Sequence: Synthetic oligonucleotide
gcucgguagggcauuugag

SEQ ID NO: 1297819 - RNA, 19 nt, Artificial Sequence
  Description of Artificial Sequence: Synthetic oligonucleotide
aucgccagucagucagcaa

SEQ ID NO: 1297820 - RNA, 19 nt, Artificial Sequence
  Description of Artificial Sequence: Synthetic oligonucleotide
ccguccauuguccugccuc

SEQ ID NO: 1297821 - RNA, 19 nt, Artificial Sequence
  Description of Artificial Sequence: Synthetic oligonucleotide
ugccgguagauggcauucu

SEQ ID NO: 1297822 - RNA, 19 nt, Artificial Sequence
  Description of Artificial Sequence: Synthetic oligonucleotide
ggaagggugaagccugugu

SEQ ID NO: 1297823 - RNA, 19 nt, Artificial Sequence
  Description of Artificial Sequence: Synthetic oligonucleotide
cgaaaacuucggucguagg

SEQ ID NO: 1297824 - RNA, 19 nt, Artificial Sequence
  Description of Artificial Sequence: Synthetic oligonucleotide
gugccgguagauggcauuc

SEQ ID NO: 1297825 - RNA, 19 nt, Artificial Sequence
  Description of Artificial Sequence: Synthetic oligonucleotide
cucagcuacuccuguccaa

SEQ ID NO: 1297826 - RNA, 19 nt, Artificial Sequence
  Description of Artificial Sequence: Synthetic oligonucleotide
ccaugguacagagccuggg

SEQ ID NO: 1297827 - RNA, 19 nt, Artificial Sequence
  Description of Artificial Sequence: Synthetic oligonucleotide
gggcgaggauccguuaaag

SEQ ID NO: 1297828 - RNA, 19 nt, Artificial Sequence
  Description of Artificial Sequence: Synthetic oligonucleotide
cagucaccaacaugaucaa

SEQ ID NO: 1297829 - RNA, 19 nt, Artificial Sequence
  Description of Artificial Sequence: Synthetic oligonucleotide
guagugcguguguuguggu

SEQ ID NO: 1297830 - RNA, 19 nt, Artificial Sequence
  Description of Artificial Sequence: Synthetic oligonucleotide
accgaaaacuucggucgua

SEQ ID NO: 1297831 - RNA, 19 nt, Artificial Sequence
  Description of Artificial Sequence: Synthetic oligonucleotide
uucggguauugugguccac

SEQ ID NO: 1297832 - RNA, 19 nt, Artificial Sequence
  Description of Artificial Sequence: Synthetic oligonucleotide
ggguagugcguguguugug

SEQ ID NO: 1297833 - RNA, 19 nt, Artificial Sequence
  Description of Artificial Sequence: Synthetic oligonucleotide
cgaugaaucugccaauaaa

SEQ ID NO: 1297834 - RNA, 19 nt, Artificial Sequence
  Description of Artificial Sequence: Synthetic oligonucleotide
gcgggaggggcccagggga

SEQ ID NO: 1297835 - RNA, 19 nt, Artificial Sequence
  Description of Artificial Sequence: Synthetic oligonucleotide
gcucagcuacuccugucca

SEQ ID NO: 1297836 - RNA, 19 nt, Artificial Sequence
  Description of Artificial Sequence: Synthetic oligonucleotide
gcgaugaaucugccaauaa

SEQ ID NO: 1297837 - RNA, 19 nt, Artificial Sequence
  Description of Artificial Sequence: Synthetic oligonucleotide
gcuugcuacucuuggugua

SEQ ID NO: 1297838 - RNA, 19 nt, Artificial Sequence
  Description of Artificial Sequence: Synthetic oligonucleotide
ccggaacuggugauacuuc

SEQ ID NO: 1297839 - RNA, 19 nt, Artificial Sequence
  Description of Artificial Sequence: Synthetic oligonucleotide
ucgaacccugggcgaggau

SEQ ID NO: 1297840 - RNA, 19 nt, Artificial Sequence
  Description of Artificial Sequence: Synthetic oligonucleotide
ggucguaagguuucauguu

SEQ ID NO: 1297841 - RNA, 19 nt, Artificial Sequence
  Description of Artificial Sequence: Synthetic oligonucleotide
cuucggucguaggcaccag

SEQ ID NO: 1297842 - RNA, 19 nt, Artificial Sequence
  Description of Artificial Sequence: Synthetic oligonucleotide
uggcucgguagggcauuug

SEQ ID NO: 1297843 - RNA, 19 nt, Artificial Sequence
  Description of Artificial Sequence: Synthetic oligonucleotide
gcuguucauagcucuugua

SEQ ID NO: 1297844 - RNA, 19 nt, Artificial Sequence
  Description of Artificial Sequence: Synthetic oligonucleotide
aggcaggcgacagguuccu

SEQ ID NO: 1297845 - RNA, 19 nt, Artificial Sequence
  Description of Artificial Sequence: Synthetic oligonucleotide
uggguccguggguccuccc

SEQ ID NO: 1297846 - RNA, 19 nt, Artificial Sequence
  Description of Artificial Sequence: Synthetic oligonucleotide
gcaggcgacagguuccugu

SEQ ID NO: 1297847 - RNA, 19 nt, Artificial Sequence
  Description of Artificial Sequence: Synthetic oligonucleotide
cagcuacuccuguccaaaa

SEQ ID NO: 1297848 - RNA, 19 nt, Artificial Sequence
  Description of Artificial Sequence: Synthetic oligonucleotide
cccugacucgaacccuggg

SEQ ID NO: 1297849 - RNA, 19 nt, Artificial Sequence
  Description of Artificial Sequence: Synthetic oligonucleotide
cguaggcaccaggugagcc

SEQ ID NO: 1297850 - RNA, 19 nt, Artificial Sequence
  Description of Artificial Sequence: Synthetic oligonucleotide
ggcgaugaaucugccaaua

SEQ ID NO: 1297851 - RNA, 19 nt, Artificial Sequence
  Description of Artificial Sequence: Synthetic oligonucleotide
caucaucaaguaggagaaa

SEQ ID NO: 1297852 - RNA, 19 nt, Artificial Sequence
  Description of Artificial Sequence: Synthetic oligonucleotide
guagugguucggguauugu

SEQ ID NO: 1297853 - RNA, 19 nt, Artificial Sequence
  Description of Artificial Sequence: Synthetic oligonucleotide
ccguggguccucccacugg

SEQ ID NO: 1297854 - RNA, 19 nt, Artificial Sequence
  Description of Artificial Sequence: Synthetic oligonucleotide
cucgaacccugggcgagga

SEQ ID NO: 1297855 - RNA, 19 nt, Artificial Sequence
  Description of Artificial Sequence: Synthetic oligonucleotide
caccgaaaacuucggucgu

SEQ ID NO: 1297856 - RNA, 19 nt, Artificial Sequence
  Description of Artificial Sequence: Synthetic oligonucleotide
cgaacccugggcgaggauc

SEQ ID NO: 1297857 - RNA, 19 nt, Artificial Sequence
  Description of Artificial Sequence: Synthetic oligonucleotide
agguagugguucggguauu

SEQ ID NO: 1297858 - RNA, 19 nt, Artificial Sequence
  Description of Artificial Sequence: Synthetic oligonucleotide
ccgcacacccucacuggug

SEQ ID NO: 1297859 - RNA, 19 nt, Artificial Sequence
  Description of Artificial Sequence: Synthetic oligonucleotide
aggauccguuaaagguagu

SEQ ID NO: 1297860 - RNA, 19 nt, Artificial Sequence
  Description of Artificial Sequence: Synthetic oligonucleotide
ccauugcucccaaugaguu

SEQ ID NO: 1297861 - RNA, 19 nt, Artificial Sequence
  Description of Artificial Sequence: Synthetic oligonucleotide
cucuugguguagugccggu

SEQ ID NO: 1297862 - RNA, 19 nt, Artificial Sequence
  Description of Artificial Sequence: Synthetic oligonucleotide
cacuggguagugcgugugu

SEQ ID NO: 1297863 - RNA, 19 nt, Artificial Sequence
  Description of Artificial Sequence: Synthetic oligonucleotide
gcgcaggucguaagguuuc

SEQ ID NO: 1297864 - RNA, 19 nt, Artificial Sequence
  Description of Artificial Sequence: Synthetic oligonucleotide
gcaugccgcagagcaugag

SEQ ID NO: 1297865 - RNA, 19 nt, Artificial Sequence
  Description of Artificial Sequence: Synthetic oligonucleotide
ccacuggguagugcgugug

SEQ ID NO: 1297866 - RNA, 19 nt, Artificial Sequence
  Description of Artificial Sequence: Synthetic oligonucleotide
cucccacuggguagugcgu

SEQ ID NO: 1297867 - RNA, 19 nt, Artificial Sequence
  Description of Artificial Sequence: Synthetic oligonucleotide
gccggauccucuuuucauu

SEQ ID NO: 1297868 - RNA, 19 nt, Artificial Sequence
  Description of Artificial Sequence: Synthetic oligonucleotide
cuucuguaacucggaugcu

SEQ ID NO: 1297869 - RNA, 19 nt, Artificial Sequence
  Description of Artificial Sequence: Synthetic oligonucleotide
guggcagauccagacgguu

SEQ ID NO: 1297870 - RNA, 19 nt, Artificial Sequence
  Description of Artificial Sequence: Synthetic oligonucleotide
caccacgcaugaugaugua

SEQ ID NO: 1297871 - RNA, 19 nt, Artificial Sequence
  Description of Artificial Sequence: Synthetic oligonucleotide
guccucccacuggguagug

SEQ ID NO: 1297872 - RNA, 19 nt, Artificial Sequence
  Description of Artificial Sequence: Synthetic oligonucleotide
aggcaccaggugagccuug

SEQ ID NO: 1297873 - RNA, 19 nt, Artificial Sequence
  Description of Artificial Sequence: Synthetic oligonucleotide
cguuaauacacccguccau

SEQ ID NO: 1297874 - RNA, 19 nt, Artificial Sequence
  Description of Artificial Sequence: Synthetic oligonucleotide
gguccucccacuggguagu

SEQ ID NO: 1297875 - RNA, 19 nt, Artificial Sequence
  Description of Artificial Sequence: Synthetic oligonucleotide
cggguauugugguccacaa

SEQ ID NO: 1297876 - RNA, 19 nt, Artificial Sequence
  Description of Artificial Sequence: Synthetic oligonucleotide
ggcgcaggucguaagguuu

SEQ ID NO: 1297877 - RNA, 19 nt, Artificial Sequence
  Description of Artificial Sequence: Synthetic oligonucleotide
ccccuggguccgugggucc

SEQ ID NO: 1297878 - RNA, 19 nt, Artificial Sequence
  Description of Artificial Sequence: Synthetic oligonucleotide
ccacuauccaaaggggccu

SEQ ID NO: 1297879 - RNA, 19 nt, Artificial Sequence
  Description of Artificial Sequence: Synthetic oligonucleotide
cauggcucgguagggcauu

SEQ ID NO: 1297880 - RNA, 19 nt, Artificial Sequence
  Description of Artificial Sequence: Synthetic oligonucleotide
gccgguagauggcauucuu

SEQ ID NO: 1297881 - RNA, 19 nt, Artificial Sequence
  Description of Artificial Sequence: Synthetic oligonucleotide
ggcaggcgacagguuccug

SEQ ID NO: 1297882 - RNA, 19 nt, Artificial Sequence
  Description of Artificial Sequence: Synthetic oligonucleotide
caguagccggauccucuuu

SEQ ID NO: 1297883 - RNA, 19 nt, Artificial Sequence
  Description of Artificial Sequence: Synthetic oligonucleotide
cgcacacccucacuggugu

SEQ ID NO: 1297884 - RNA, 19 nt, Artificial Sequence
  Description of Artificial Sequence: Synthetic oligonucleotide
gcggcgcaggucguaaggu

SEQ ID NO: 1297885 - RNA, 19 nt, Artificial Sequence
  Description of Artificial Sequence: Synthetic oligonucleotide
gcacacccucacuggugua

SEQ ID NO: 1297886 - RNA, 19 nt, Artificial Sequence
  Description of Artificial Sequence: Synthetic oligonucleotide
ccugcaugccgcagagcau

SEQ ID NO: 1297887 - RNA, 19 nt, Artificial Sequence
  Description of Artificial Sequence: Synthetic oligonucleotide
gcaggucguaagguuucau

SEQ ID NO: 1297888 - RNA, 19 nt, Artificial Sequence
  Description of Artificial Sequence: Synthetic oligonucleotide
gccagucguucaugucuau

SEQ ID NO: 1297889 - RNA, 19 nt, Artificial Sequence
  Description of Artificial Sequence: Synthetic oligonucleotide
cggcggcgcaggucguaag

SEQ ID NO: 1297890 - RNA, 19 nt, Artificial Sequence
  Description of Artificial Sequence: Synthetic oligonucleotide
cucuggcgaugccgccgua

SEQ ID NO: 1297891 - RNA, 19 nt, Artificial Sequence
  Description of Artificial Sequence: Synthetic oligonucleotide
cgcaggucguaagguuuca

SEQ ID NO: 1297892 - RNA, 19 nt, Artificial Sequence
  Description of Artificial Sequence: Synthetic oligonucleotide
ccagucguucaugucuauu

SEQ ID NO: 1297893 - RNA, 19 nt, Artificial Sequence
  Description of Artificial Sequence: Synthetic oligonucleotide
cccugggcgaggauccguu

SEQ ID NO: 1297894 - RNA, 19 nt, Artificial Sequence
  Description of Artificial Sequence: Synthetic oligonucleotide
ccgccguaguccaggcccu

SEQ ID NO: 1297895 - RNA, 19 nt, Artificial Sequence
  Description of Artificial Sequence: Synthetic oligonucleotide
aauacgauuaaccugcucc

SEQ ID NO: 1297896 - RNA, 19 nt, Artificial Sequence
  Description of Artificial Sequence: Synthetic oligonucleotide
aaggagaaauuucaguucc

SEQ ID NO: 1297897 - RNA, 19 nt, Artificial Sequence
  Description of Artificial Sequence: Synthetic oligonucleotide
ugagauuuaaugaaaagca

SEQ ID NO: 1297898 - RNA, 19 nt, Artificial Sequence
  Description of Artificial Sequence: Synthetic oligonucleotide
  modified_base (10)..(10): a, c, u, g, unknown or other
uuaguaaacnguuacuccc

SEQ ID NO: 1297899 - RNA, 19 nt, Artificial Sequence
  Description of Artificial Sequence: Synthetic oligonucleotide
ugggguaacaauaucaucc

SEQ ID NO: 1297900 - RNA, 19 nt, Artificial Sequence
  Description of Artificial Sequence: Synthetic oligonucleotide
agaaaagagaagcucgugc

SEQ ID NO: 1297901 - RNA, 19 nt, Artificial Sequence
  Description of Artificial Sequence: Synthetic oligonucleotide
cauauuaggauugugagcc

SEQ ID NO: 1297902 - RNA, 19 nt, Artificial Sequence
  Description of Artificial Sequence: Synthetic oligonucleotide
cugaauacgauuaaccugc

SEQ ID NO: 1297903 - RNA, 19 nt, Artificial Sequence
  Description of Artificial Sequence: Synthetic oligonucleotide
ugagccaugguauaaagcc

SEQ ID NO: 1297904 - RNA, 19 nt, Artificial Sequence
  Description of Artificial Sequence: Synthetic oligonucleotide
uauaaagcccaauuaauug

SEQ ID NO: 1297905 - RNA, 19 nt, Artificial Sequence
  Description of Artificial Sequence: Synthetic oligonucleotide
uuaaagagcucauacuggg

SEQ ID NO: 1297906 - RNA, 19 nt, Artificial Sequence
  Description of Artificial Sequence: Synthetic oligonucleotide
  modified_base (6)..(6): a, c, u, g, unknown or other
uaaacnguuacucccacug

SEQ ID NO: 1297907 - RNA, 19 nt, Artificial Sequence
  Description of Artificial Sequence: Synthetic oligonucleotide
uuuauuuaagucauucaga

SEQ ID NO: 1297908 - RNA, 19 nt, Artificial Sequence
  Description of Artificial Sequence: Synthetic oligonucleotide
ucauuuugcaccaaagcug

SEQ ID NO: 1297909 - RNA, 19 nt, Artificial Sequence
  Description of Artificial Sequence: Synthetic oligonucleotide
aaugauucaaagaugcaag

SEQ ID NO: 1297910 - RNA, 19 nt, Artificial Sequence
  Description of Artificial Sequence: Synthetic oligonucleotide
uuauuuaagucauucagaa

SEQ ID NO: 1297911 - RNA, 19 nt, Artificial Sequence
  Description of Artificial Sequence: Synthetic oligonucleotide
agucaguggacuuaaagag

SEQ ID NO: 1297912 - RNA, 19 nt, Artificial Sequence
  Description of Artificial Sequence: Synthetic oligonucleotide
aauuaauugccuugcucuc

SEQ ID NO: 1297913 - RNA, 19 nt, Artificial Sequence
  Description of Artificial Sequence: Synthetic oligonucleotide
ucuuguagaaucaucaaau

SEQ ID NO: 1297914 - RNA, 19 nt, Artificial Sequence
  Description of Artificial Sequence: Synthetic oligonucleotide
acaaccuucaggaucaugc

SEQ ID NO: 1297915 - RNA, 19 nt, Artificial Sequence
  Description of Artificial Sequence: Synthetic oligonucleotide
uguuacagcagacaaguga

SEQ ID NO: 1297916 - RNA, 19 nt, Artificial Sequence
  Description of Artificial Sequence: Synthetic oligonucleotide
ucuugcacaaguucaacag

SEQ ID NO: 1297917 - RNA, 19 nt, Artificial Sequence
  Description of Artificial Sequence: Synthetic oligonucleotide
  modified_base (11)..(11): a, c, u, g, unknown or other
cuuaguaaacnguuacucc

SEQ ID NO: 1297918 - RNA, 19 nt, Artificial Sequence
  Description of Artificial Sequence: Synthetic oligonucleotide
aauaugguggaguuucuga

SEQ ID NO: 1297919 - RNA, 19 nt, Artificial Sequence
  Description of Artificial Sequence: Synthetic oligonucleotide
ugauaugaaaccacacugc

SEQ ID NO: 1297920 - RNA, 19 nt, Artificial Sequence
  Description of Artificial Sequence: Synthetic oligonucleotide
ugaacugucacaucucacc

SEQ ID NO: 1297921 - RNA, 19 nt, Artificial Sequence
  Description of Artificial Sequence: Synthetic oligonucleotide
  modified_base (4)..(4): a, c, u, g, unknown or other
aacnguuacucccacugug

SEQ ID NO: 1297922 - RNA, 19 nt, Artificial Sequence
  Description of Artificial Sequence: Synthetic oligonucleotide
ugaugggguaacaauauca

SEQ ID NO: 1297923 - RNA, 19 nt, Artificial Sequence
  Description of Artificial Sequence: Synthetic oligonucleotide
  modified_base (12)..(12): a, c, u, g, unknown or other
acuuaguaaacnguuacuc

SEQ ID NO: 1297924 - RNA, 19 nt, Artificial Sequence
  Description of Artificial Sequence: Synthetic oligonucleotide
uccaauuuauuuaagucau

SEQ ID NO: 1297925 - RNA, 19 nt, Artificial Sequence
  Description of Artificial Sequence: Synthetic oligonucleotide
ucaagugggucauauuagg

SEQ ID NO: 1297926 - RNA, 19 nt, Artificial Sequence
  Description of Artificial Sequence: Synthetic oligonucleotide
aguggccuaacauuucacc

SEQ ID NO: 1297927 - RNA, 19 nt, Artificial Sequence
  Description of Artificial Sequence: Synthetic oligonucleotide
uaaagcccaauuaauugcc

SEQ ID NO: 1297928 - RNA, 19 nt, Artificial Sequence
  Description of Artificial Sequence: Synthetic oligonucleotide
agaugcaaguucuugacug

SEQ ID NO: 1297929 - RNA, 19 nt, Artificial Sequence
  Description of Artificial Sequence: Synthetic oligonucleotide
ucaguggacuuaaagagcu

SEQ ID NO: 1297930 - RNA, 19 nt, Artificial Sequence
  Description of Artificial Sequence: Synthetic oligonucleotide
uaagacugaugaaugagcu

SEQ ID NO: 1297931 - RNA, 19 nt, Artificial Sequence
  Description of Artificial Sequence: Synthetic oligonucleotide
caagugaccacauauaaga

SEQ ID NO: 1297932 - RNA, 19 nt, Artificial Sequence
  Description of Artificial Sequence: Synthetic oligonucleotide
uucugaauacgauuaaccu

SEQ ID NO: 1297933 - RNA, 19 nt, Artificial Sequence
  Description of Artificial Sequence: Synthetic oligonucleotide
ugguauaaagcccaauuaa

SEQ ID NO: 1297934 - RNA, 19 nt, Artificial Sequence
  Description of Artificial Sequence: Synthetic oligonucleotide
ugaugaaugagcuuacuua

SEQ ID NO: 1297935 - RNA, 19 nt, Artificial Sequence
  Description of Artificial Sequence: Synthetic oligonucleotide
uucaagugggucauauuag

SEQ ID NO: 1297936 - RNA, 19 nt, Artificial Sequence
  Description of Artificial Sequence: Synthetic oligonucleotide
gauugugguacccacaguc

SEQ ID NO: 1297937 - RNA, 19 nt, Artificial Sequence
  Description of Artificial Sequence: Synthetic oligonucleotide
uccaaaugauucaaagaug

SEQ ID NO: 1297938 - RNA, 19 nt, Artificial Sequence
  Description of Artificial Sequence: Synthetic oligonucleotide
ugucacaucucacccaaag

SEQ ID NO: 1297939 - RNA, 19 nt, Artificial Sequence
  Description of Artificial Sequence: Synthetic oligonucleotide
acugugauaagcacagacc

SEQ ID NO: 1297940 - RNA, 19 nt, Artificial Sequence
  Description of Artificial Sequence: Synthetic oligonucleotide
aacuggcaaggccaguggc

SEQ ID NO: 1297941 - RNA, 19 nt, Artificial Sequence
  Description of Artificial Sequence: Synthetic oligonucleotide
ucauauuaggauugugagc

SEQ ID NO: 1297942 - RNA, 19 nt, Artificial Sequence
  Description of Artificial Sequence: Synthetic oligonucleotide
aaagcauuugaaguggagu

SEQ ID NO: 1297943 - RNA, 19 nt, Artificial Sequence
  Description of Artificial Sequence: Synthetic oligonucleotide
cauccaauuuauuuaaguc

SEQ ID NO: 1297944 - RNA, 19 nt, Artificial Sequence
  Description of Artificial Sequence: Synthetic oligonucleotide
caagccaucagccaaaaca

SEQ ID NO: 1297945 - RNA, 19 nt, Artificial Sequence
  Description of Artificial Sequence: Synthetic oligonucleotide
caaugugaaacacuucacc

SEQ ID NO: 1297946 - RNA, 19 nt, Artificial Sequence
  Description of Artificial Sequence: Synthetic oligonucleotide
auuaauugccuugcucucc

SEQ ID NO: 1297947 - RNA, 19 nt, Artificial Sequence
  Description of Artificial Sequence: Synthetic oligonucleotide
uuaauugccuugcucuccc

SEQ ID NO: 1297948 - RNA, 19 nt, Artificial Sequence
  Description of Artificial Sequence: Synthetic oligonucleotide
cauucaguuauaccagucc

SEQ ID NO: 1297949 - RNA, 19 nt, Artificial Sequence
  Description of Artificial Sequence: Synthetic oligonucleotide
ugaaugagcuuacuuagua

SEQ ID NO: 1297950 - RNA, 19 nt, Artificial Sequence
  Description of Artificial Sequence: Synthetic oligonucleotide
auucaguuauaccaguccu

SEQ ID NO: 1297951 - RNA, 19 nt, Artificial Sequence
  Description of Artificial Sequence: Synthetic oligonucleotide
  modified_base (8)..(8): a, c, u, g, unknown or other
aguaaacnguuacucccac

SEQ ID NO: 1297952 - RNA, 19 nt, Artificial Sequence
  Description of Artificial Sequence: Synthetic oligonucleotide
ccuguguagauacugaugg

SEQ ID NO: 1297953 - RNA, 19 nt, Artificial Sequence
  Description of Artificial Sequence: Synthetic oligonucleotide
ucuugauaugaaaccacac

SEQ ID NO: 1297954 - RNA, 19 nt, Artificial Sequence
  Description of Artificial Sequence: Synthetic oligonucleotide
  modified_base (19)..(19): a, c, u, g, unknown or other
ugagcuuacuuaguaaacn

SEQ ID NO: 1297955 - RNA, 19 nt, Artificial Sequence
  Description of Artificial Sequence: Synthetic oligonucleotide
gaacugucacaucucaccc

SEQ ID NO: 1297956 - RNA, 19 nt, Artificial Sequence
  Description of Artificial Sequence: Synthetic oligonucleotide
  modified_base (9)..(9): a, c, u, g, unknown or other
uaguaaacnguuacuccca

SEQ ID NO: 1297957 - RNA, 19 nt, Artificial Sequence
  Description of Artificial Sequence: Synthetic oligonucleotide
ucaaagaugcaaguucuug

SEQ ID NO: 1297958 - RNA, 19 nt, Artificial Sequence
  Description of Artificial Sequence: Synthetic oligonucleotide
uuugugaugggguaacaau

SEQ ID NO: 1297959 - RNA, 19 nt, Artificial Sequence
  Description of Artificial Sequence: Synthetic oligonucleotide
ucaguuauaccaguccuca

SEQ ID NO: 1297960 - RNA, 19 nt, Artificial Sequence
  Description of Artificial Sequence: Synthetic oligonucleotide
uguguugcucauccagagg

SEQ ID NO: 1297961 - RNA, 19 nt, Artificial Sequence
  Description of Artificial Sequence: Synthetic oligonucleotide
ugugauaagcacagaccug

SEQ ID NO: 1297962 - RNA, 19 nt, Artificial Sequence
  Description of Artificial Sequence: Synthetic oligonucleotide
acugggcaaauccucuggc

SEQ ID NO: 1297963 - RNA, 19 nt, Artificial Sequence
  Description of Artificial Sequence: Synthetic oligonucleotide
gauaggaucucaucuccac

SEQ ID NO: 1297964 - RNA, 19 nt, Artificial Sequence
  Description of Artificial Sequence: Synthetic oligonucleotide
ugggcaaauccucuggcug

SEQ ID NO: 1297965 - RNA, 19 nt, Artificial Sequence
  Description of Artificial Sequence: Synthetic oligonucleotide
uggccuaacauuucaccag

SEQ ID NO: 1297966 - RNA, 19 nt, Artificial Sequence
  Description of Artificial Sequence: Synthetic oligonucleotide
cuuuacagcagcuggucug

SEQ ID NO: 1297967 - RNA, 19 nt, Artificial Sequence
  Description of Artificial Sequence: Synthetic oligonucleotide
aagugaccacauauaagac

SEQ ID NO: 1297968 - RNA, 19 nt, Artificial Sequence
  Description of Artificial Sequence: Synthetic oligonucleotide
ugugagccaugguauaaag

SEQ ID NO: 1297969 - RNA, 19 nt, Artificial Sequence
  Description of Artificial Sequence: Synthetic oligonucleotide
aagaugcaaguucuugacu

SEQ ID NO: 1297970 - RNA, 19 nt, Artificial Sequence
  Description of Artificial Sequence: Synthetic oligonucleotide
agugacuguaguuugugau

SEQ ID NO: 1297971 - RNA, 19 nt, Artificial Sequence
  Description of Artificial Sequence: Synthetic oligonucleotide
gaugacuaguauuucuaga

SEQ ID NO: 1297972 - RNA, 19 nt, Artificial Sequence
  Description of Artificial Sequence: Synthetic oligonucleotide
  modified_base (3)..(3): a, c, u, g, unknown or other
acnguuacucccacugugc

SEQ ID NO: 1297973 - RNA, 19 nt, Artificial Sequence
  Description of Artificial Sequence: Synthetic oligonucleotide
aaacaaggagaaauuucag

SEQ ID NO: 1297974 - RNA, 19 nt, Artificial Sequence
  Description of Artificial Sequence: Synthetic oligonucleotide
uucuugcacaaguucaaca

SEQ ID NO: 1297975 - RNA, 19 nt, Artificial Sequence
  Description of Artificial Sequence: Synthetic oligonucleotide
auuugaaguggaguaguuc

SEQ ID NO: 1297976 - RNA, 19 nt, Artificial Sequence
  Description of Artificial Sequence: Synthetic oligonucleotide
aacauuucaccaguagaga

SEQ ID NO: 1297977 - RNA, 19 nt, Artificial Sequence
  Description of Artificial Sequence: Synthetic oligonucleotide
aaaagcauuugaaguggag

SEQ ID NO: 1297978 - RNA, 19 nt, Artificial Sequence
  Description of Artificial Sequence: Synthetic oligonucleotide
aggauugugagccauggua

SEQ ID NO: 1297979 - RNA, 19 nt, Artificial Sequence
  Description of Artificial Sequence: Synthetic oligonucleotide
uugcuuaggcacaugcgug

SEQ ID NO: 1297980 - RNA, 19 nt, Artificial Sequence
  Description of Artificial Sequence: Synthetic oligonucleotide
ucugauaugcagagcugca

SEQ ID NO: 1297981 - RNA, 19 nt, Artificial Sequence
  Description of Artificial Sequence: Synthetic oligonucleotide
  modified_base (5)..(5): a, c, u, g, unknown or other
aaacnguuacucccacugu

SEQ ID NO: 1297982 - RNA, 19 nt, Artificial Sequence
  Description of Artificial Sequence: Synthetic oligonucleotide
uagauacugauggagaaau

SEQ ID NO: 1297983 - RNA, 19 nt, Artificial Sequence
  Description of Artificial Sequence: Synthetic oligonucleotide
uugugguacccacagucug

SEQ ID NO: 1297984 - RNA, 19 nt, Artificial Sequence
  Description of Artificial Sequence: Synthetic oligonucleotide
aggauugugucaaagaaaa

SEQ ID NO: 1297985 - RNA, 19 nt, Artificial Sequence
  Description of Artificial Sequence: Synthetic oligonucleotide
cacugugauaagcacagac

SEQ ID NO: 1297986 - RNA, 19 nt, Artificial Sequence
  Description of Artificial Sequence: Synthetic oligonucleotide
agucuugauaugaaaccac

SEQ ID NO: 1297987 - RNA, 19 nt, Artificial Sequence
  Description of Artificial Sequence: Synthetic oligonucleotide
guuacucccacugugcagc

SEQ ID NO: 1297988 - RNA, 19 nt, Artificial Sequence
  Description of Artificial Sequence: Synthetic oligonucleotide
augauucaaagaugcaagu

SEQ ID NO: 1297989 - RNA, 19 nt, Artificial Sequence
  Description of Artificial Sequence: Synthetic oligonucleotide
auacgauuaaccugcuccu

SEQ ID NO: 1297990 - RNA, 19 nt, Artificial Sequence
  Description of Artificial Sequence: Synthetic oligonucleotide
cuugcacaaguucaacagc

SEQ ID NO: 1297991 - RNA, 19 nt, Artificial Sequence
  Description of Artificial Sequence: Synthetic oligonucleotide
auguguugcucauccagag

SEQ ID NO: 1297992 - RNA, 19 nt, Artificial Sequence
  Description of Artificial Sequence: Synthetic oligonucleotide
ugcaggauugugucaaaga

SEQ ID NO: 1297993 - RNA, 19 nt, Artificial Sequence
  Description of Artificial Sequence: Synthetic oligonucleotide
augggguaacaauaucauc

SEQ ID NO: 1297994 - RNA, 19 nt, Artificial Sequence
  Description of Artificial Sequence: Synthetic oligonucleotide
gauaugaaaccacacugcu

SEQ ID NO: 1297995 - RNA, 19 nt, Artificial Sequence
  Description of Artificial Sequence: Synthetic oligonucleotide
uucuagaauaugguggagu

SEQ ID NO: 1297996 - RNA, 19 nt, Artificial Sequence
  Description of Artificial Sequence: Synthetic oligonucleotide
agaggauuuuguuuguaau

SEQ ID NO: 1297997 - RNA, 19 nt, Artificial Sequence
  Description of Artificial Sequence: Synthetic oligonucleotide
ucucccaacuggcaaggcc

SEQ ID NO: 1297998 - RNA, 19 nt, Artificial Sequence
  Description of Artificial Sequence: Synthetic oligonucleotide
cauggauccaugguaagac

SEQ ID NO: 1297999 - RNA, 19 nt, Artificial Sequence
  Description of Artificial Sequence: Synthetic oligonucleotide
uucaguuauaccaguccuc

SEQ ID NO: 1298000 - RNA, 19 nt, Artificial Sequence
  Description of Artificial Sequence: Synthetic oligonucleotide
agcuuuacaagugaccaca

SEQ ID NO: 1298001 - RNA, 19 nt, Artificial Sequence
  Description of Artificial Sequence: Synthetic oligonucleotide
augguauaaagcccaauua

SEQ ID NO: 1298002 - RNA, 19 nt, Artificial Sequence
  Description of Artificial Sequence: Synthetic oligonucleotide
cuucaucuuucagacaacc

SEQ ID NO: 1298003 - RNA, 19 nt, Artificial Sequence
  Description of Artificial Sequence: Synthetic oligonucleotide
accugucaacugcagcugc

SEQ ID NO: 1298004 - RNA, 19 nt, Artificial Sequence
  Description of Artificial Sequence: Synthetic oligonucleotide
aaauucacuugaugucuau

SEQ ID NO: 1298005 - RNA, 19 nt, Artificial Sequence
  Description of Artificial Sequence: Synthetic oligonucleotide
agugggucauauuaggauu

SEQ ID NO: 1298006 - RNA, 19 nt, Artificial Sequence
  Description of Artificial Sequence: Synthetic oligonucleotide
acaacuccuguaaugaugu

SEQ ID NO: 1298007 - RNA, 19 nt, Artificial Sequence
  Description of Artificial Sequence: Synthetic oligonucleotide
agacugaugaaugagcuua

SEQ ID NO: 1298008 - RNA, 19 nt, Artificial Sequence
  Description of Artificial Sequence: Synthetic oligonucleotide
uggaguuucugaauacgau

SEQ ID NO: 1298009 - RNA, 19 nt, Artificial Sequence
  Description of Artificial Sequence: Synthetic oligonucleotide
cuucaagugggucauauua

SEQ ID NO: 1298010 - RNA, 19 nt, Artificial Sequence
  Description of Artificial Sequence: Synthetic oligonucleotide
aguugaagucaagggaggg

SEQ ID NO: 1298011 - RNA, 19 nt, Artificial Sequence
  Description of Artificial Sequence: Synthetic oligonucleotide
cucugauaugcagagcugc

SEQ ID NO: 1298012 - RNA, 19 nt, Artificial Sequence
  Description of Artificial Sequence: Synthetic oligonucleotide
gguggaauguucucugucc

SEQ ID NO: 1298013 - RNA, 19 nt, Artificial Sequence
  Description of Artificial Sequence: Synthetic oligonucleotide
cuugaugucuaugauacaa

SEQ ID NO: 1298014 - RNA, 19 nt, Artificial Sequence
  Description of Artificial Sequence: Synthetic oligonucleotide
guaacuggcugcuuaaucu

SEQ ID NO: 1298015 - RNA, 19 nt, Artificial Sequence
  Description of Artificial Sequence: Synthetic oligonucleotide
caggaaagauccaaaguga

SEQ ID NO: 1298016 - RNA, 19 nt, Artificial Sequence
  Description of Artificial Sequence: Synthetic oligonucleotide
ugcuaacacuccuucucag

SEQ ID NO: 1298017 - RNA, 19 nt, Artificial Sequence
  Description of Artificial Sequence: Synthetic oligonucleotide
acgauuaaccugcuccugu

SEQ ID NO: 1298018 - RNA, 19 nt, Artificial Sequence
  Description of Artificial Sequence: Synthetic oligonucleotide
gaaugagcuuacuuaguaa

SEQ ID NO: 1298019 - RNA, 19 nt, Artificial Sequence
  Description of Artificial Sequence: Synthetic oligonucleotide
ucucacccaaagaggagga

SEQ ID NO: 1298020 - RNA, 19 nt, Artificial Sequence
  Description of Artificial Sequence: Synthetic oligonucleotide
cuaacacuccuucucagga

SEQ ID NO: 1298021 - RNA, 19 nt, Artificial Sequence
  Description of Artificial Sequence: Synthetic oligonucleotide
uguaugucaccacgcugca

SEQ ID NO: 1298022 - RNA, 19 nt, Artificial Sequence
  Description of Artificial Sequence: Synthetic oligonucleotide
aauugccuugcucucccaa

SEQ ID NO: 1298023 - RNA, 19 nt, Artificial Sequence
  Description of Artificial Sequence: Synthetic oligonucleotide
aacacuucaccaagucuug

SEQ ID NO: 1298024 - RNA, 19 nt, Artificial Sequence
  Description of Artificial Sequence: Synthetic oligonucleotide
auuugcugugaugagcuca

SEQ ID NO: 1298025 - RNA, 19 nt, Artificial Sequence
  Description of Artificial Sequence: Synthetic oligonucleotide
cuccuagccaacagguacc

SEQ ID NO: 1298026 - RNA, 19 nt, Artificial Sequence
  Description of Artificial Sequence: Synthetic oligonucleotide
gaugcaaguucuugacuga

SEQ ID NO: 1298027 - RNA, 19 nt, Artificial Sequence
  Description of Artificial Sequence: Synthetic oligonucleotide
cuugauaugaaaccacacu

SEQ ID NO: 1298028 - RNA, 19 nt, Artificial Sequence
  Description of Artificial Sequence: Synthetic oligonucleotide
agggguuugaagaaucuca

SEQ ID NO: 1298029 - RNA, 19 nt, Artificial Sequence
  Description of Artificial Sequence: Synthetic oligonucleotide
uggcugcuuaaucuucaag

SEQ ID NO: 1298030 - RNA, 19 nt, Artificial Sequence
  Description of Artificial Sequence: Synthetic oligonucleotide
uccguuucagagcccuugc

SEQ ID NO: 1298031 - RNA, 19 nt, Artificial Sequence
  Description of Artificial Sequence: Synthetic oligonucleotide
guacccacagucugcgucc

SEQ ID NO: 1298032 - RNA, 19 nt, Artificial Sequence
  Description of Artificial Sequence: Synthetic oligonucleotide
uggaguaguuccagagaga

SEQ ID NO: 1298033 - RNA, 19 nt, Artificial Sequence
  Description of Artificial Sequence: Synthetic oligonucleotide
aggagaaauuucaguuccc

SEQ ID NO: 1298034 - RNA, 19 nt, Artificial Sequence
  Description of Artificial Sequence: Synthetic oligonucleotide
auuaaccugcuccugugua

SEQ ID NO: 1298035 - RNA, 19 nt, Artificial Sequence
  Description of Artificial Sequence: Synthetic oligonucleotide
gucaguggacuuaaagagc

SEQ ID NO: 1298036 - RNA, 19 nt, Artificial Sequence
  Description of Artificial Sequence: Synthetic oligonucleotide
aguuccagagagagggacg

SEQ ID NO: 1298037 - RNA, 19 nt, Artificial Sequence
  Description of Artificial Sequence: Synthetic oligonucleotide
uuucuagaauaugguggag

SEQ ID NO: 1298038 - RNA, 19 nt, Artificial Sequence
  Description of Artificial Sequence: Synthetic oligonucleotide
  modified_base (15)..(15): a, c, u, g, unknown or other
cuuacuuaguaaacnguua

SEQ ID NO: 1298039 - RNA, 19 nt, Artificial Sequence
  Description of Artificial Sequence: Synthetic oligonucleotide
uucugguggaauguucucu

SEQ ID NO: 1298040 - RNA, 19 nt, Artificial Sequence
  Description of Artificial Sequence: Synthetic oligonucleotide
cugugauaagcacagaccu

SEQ ID NO: 1298041 - RNA, 19 nt, Artificial Sequence
  Description of Artificial Sequence: Synthetic oligonucleotide
cauuuugcaccaaagcugu

SEQ ID NO: 1298042 - RNA, 19 nt, Artificial Sequence
  Description of Artificial Sequence: Synthetic oligonucleotide
aaaauucacuugaugucua

SEQ ID NO: 1298043 - RNA, 19 nt, Artificial Sequence
  Description of Artificial Sequence: Synthetic oligonucleotide
auaugaaaccacacugcug

SEQ ID NO: 1298044 - RNA, 19 nt, Artificial Sequence
  Description of Artificial Sequence: Synthetic oligonucleotide
gagccaugguauaaagccc

SEQ ID NO: 1298045 - RNA, 19 nt, Artificial Sequence
  Description of Artificial Sequence: Synthetic oligonucleotide
uauuaggauugugagccau

SEQ ID NO: 1298046 - RNA, 19 nt, Artificial Sequence
  Description of Artificial Sequence: Synthetic oligonucleotide
ggucauauuaggauuguga

SEQ ID NO: 1298047 - RNA, 19 nt, Artificial Sequence
  Description of Artificial Sequence: Synthetic oligonucleotide
gcuucagagauugugguac

SEQ ID NO: 1298048 - RNA, 19 nt, Artificial Sequence
  Description of Artificial Sequence: Synthetic oligonucleotide
ugaauacgauuaaccugcu

SEQ ID NO: 1298049 - RNA, 19 nt, Artificial Sequence
  Description of Artificial Sequence: Synthetic oligonucleotide
uaguuccagagagagggac

SEQ ID NO: 1298050 - RNA, 19 nt, Artificial Sequence
  Description of Artificial Sequence: Synthetic oligonucleotide
uaacuggcugcuuaaucuu

SEQ ID NO: 1298051 - RNA, 19 nt, Artificial Sequence
  Description of Artificial Sequence: Synthetic oligonucleotide
uggaauguucucuguccgu

SEQ ID NO: 1298052 - RNA, 19 nt, Artificial Sequence
  Description of Artificial Sequence: Synthetic oligonucleotide
ucuccugauugcacucuga

SEQ ID NO: 1298053 - RNA, 19 nt, Artificial Sequence
  Description of Artificial Sequence: Synthetic oligonucleotide
cacucugauaugcagagcu

SEQ ID NO: 1298054 - RNA, 19 nt, Artificial Sequence
  Description of Artificial Sequence: Synthetic oligonucleotide
ugucuuuucuugugugaau

SEQ ID NO: 1298055 - RNA, 19 nt, Artificial Sequence
  Description of Artificial Sequence: Synthetic oligonucleotide
caaaauucacuugaugucu

SEQ ID NO: 1298056 - RNA, 19 nt, Artificial Sequence
  Description of Artificial Sequence: Synthetic oligonucleotide
gaguaguuccagagagagg

SEQ ID NO: 1298057 - RNA, 19 nt, Artificial Sequence
  Description of Artificial Sequence: Synthetic oligonucleotide
ugguaccucuucuuuaguu

SEQ ID NO: 1298058 - RNA, 19 nt, Artificial Sequence
  Description of Artificial Sequence: Synthetic oligonucleotide
cuugcuuaggcacaugcgu

SEQ ID NO: 1298059 - RNA, 19 nt, Artificial Sequence
  Description of Artificial Sequence: Synthetic oligonucleotide
gcuccuagccaacagguac

SEQ ID NO: 1298060 - RNA, 19 nt, Artificial Sequence
  Description of Artificial Sequence: Synthetic oligonucleotide
auauuaggauugugagcca

SEQ ID NO: 1298061 - RNA, 19 nt, Artificial Sequence
  Description of Artificial Sequence: Synthetic oligonucleotide
caagugggucauauuagga

SEQ ID NO: 1298062 - RNA, 19 nt, Artificial Sequence
  Description of Artificial Sequence: Synthetic oligonucleotide
cugauugcacucugauaug

SEQ ID NO: 1298063 - RNA, 19 nt, Artificial Sequence
  Description of Artificial Sequence: Synthetic oligonucleotide
ugucaacugcagcugcauc

SEQ ID NO: 1298064 - RNA, 19 nt, Artificial Sequence
  Description of Artificial Sequence: Synthetic oligonucleotide
gaauacgauuaaccugcuc

SEQ ID NO: 1298065 - RNA, 19 nt, Artificial Sequence
  Description of Artificial Sequence: Synthetic oligonucleotide
agccaugguauaaagccca

SEQ ID NO: 1298066 - RNA, 19 nt, Artificial Sequence
  Description of Artificial Sequence: Synthetic oligonucleotide
gcugcuaacacuccuucuc

SEQ ID NO: 1298067 - RNA, 19 nt, Artificial Sequence
  Description of Artificial Sequence: Synthetic oligonucleotide
caggauugugucaaagaaa

SEQ ID NO: 1298068 - RNA, 19 nt, Artificial Sequence
  Description of Artificial Sequence: Synthetic oligonucleotide
aggaucaaugugaaacacu

SEQ ID NO: 1298069 - RNA, 19 nt, Artificial Sequence
  Description of Artificial Sequence: Synthetic oligonucleotide
uccagaggauuuuguuugu

SEQ ID NO: 1298070 - RNA, 19 nt, Artificial Sequence
  Description of Artificial Sequence: Synthetic oligonucleotide
gugauaagcacagaccugu

SEQ ID NO: 1298071 - RNA, 19 nt, Artificial Sequence
  Description of Artificial Sequence: Synthetic oligonucleotide
auugugguacccacagucu

SEQ ID NO: 1298072 - RNA, 19 nt, Artificial Sequence
  Description of Artificial Sequence: Synthetic oligonucleotide
gcaggauugugucaaagaa

SEQ ID NO: 1298073 - RNA, 19 nt, Artificial Sequence
  Description of Artificial Sequence: Synthetic oligonucleotide
gauugugagccaugguaua

SEQ ID NO: 1298074 - RNA, 19 nt, Artificial Sequence
  Description of Artificial Sequence: Synthetic oligonucleotide
uaggauugugagccauggu

SEQ ID NO: 1298075 - RNA, 19 nt, Artificial Sequence
  Description of Artificial Sequence: Synthetic oligonucleotide
cucagcuccuagccaacag

SEQ ID NO: 1298076 - RNA, 19 nt, Artificial Sequence
  Description of Artificial Sequence: Synthetic oligonucleotide
auaccaguccucaagccau

SEQ ID NO: 1298077 - RNA, 19 nt, Artificial Sequence
  Description of Artificial Sequence: Synthetic oligonucleotide
auugugagccaugguauaa

SEQ ID NO: 1298078 - RNA, 19 nt, Artificial Sequence
  Description of Artificial Sequence: Synthetic oligonucleotide
augacucaaacaacuucug

SEQ ID NO: 1298079 - RNA, 19 nt, Artificial Sequence
  Description of Artificial Sequence: Synthetic oligonucleotide
ccaauuaauugccuugcuc

SEQ ID NO: 1298080 - RNA, 19 nt, Artificial Sequence
  Description of Artificial Sequence: Synthetic oligonucleotide
uggacuuaaagagcucaua

SEQ ID NO: 1298081 - RNA, 19 nt, Artificial Sequence
  Description of Artificial Sequence: Synthetic oligonucleotide
gguacccacagucugcguc

SEQ ID NO: 1298082 - RNA, 19 nt, Artificial Sequence
  Description of Artificial Sequence: Synthetic oligonucleotide
gaugggguaacaauaucau

SEQ ID NO: 1298083 - RNA, 19 nt, Artificial Sequence
  Description of Artificial Sequence: Synthetic oligonucleotide
uugugagccaugguauaaa

SEQ ID NO: 1298084 - RNA, 19 nt, Artificial Sequence
  Description of Artificial Sequence: Synthetic oligonucleotide
cagaggauuuuguuuguaa

SEQ ID NO: 1298085 - RNA, 19 nt, Artificial Sequence
  Description of Artificial Sequence: Synthetic oligonucleotide
gagaagcucgugcugagau

SEQ ID NO: 1298086 - RNA, 19 nt, Artificial Sequence
  Description of Artificial Sequence: Synthetic oligonucleotide
ucaagccaucagccaaaac

SEQ ID NO: 1298087 - RNA, 19 nt, Artificial Sequence
  Description of Artificial Sequence: Synthetic oligonucleotide
ugcagaugacuaguauuuc

SEQ ID NO: 1298088 - RNA, 19 nt, Artificial Sequence
  Description of Artificial Sequence: Synthetic oligonucleotide
agggacgcuguccauggau

SEQ ID NO: 1298089 - RNA, 19 nt, Artificial Sequence
  Description of Artificial Sequence: Synthetic oligonucleotide
ucuucaagugggucauauu

SEQ ID NO: 1298090 - RNA, 19 nt, Artificial Sequence
  Description of Artificial Sequence: Synthetic oligonucleotide
ccuugcuuaggcacaugcg

SEQ ID NO: 1298091 - RNA, 19 nt, Artificial Sequence
  Description of Artificial Sequence: Synthetic oligonucleotide
cuucaccaagucuugauau

SEQ ID NO: 1298092 - RNA, 19 nt, Artificial Sequence
  Description of Artificial Sequence: Synthetic oligonucleotide
agauugugguacccacagu

SEQ ID NO: 1298093 - RNA, 19 nt, Artificial Sequence
  Description of Artificial Sequence: Synthetic oligonucleotide
augaaugagcuuacuuagu

SEQ ID NO: 1298094 - RNA, 19 nt, Artificial Sequence
  Description of Artificial Sequence: Synthetic oligonucleotide
gauaugcagagcugcaguu

SEQ ID NO: 1298095 - RNA, 19 nt, Artificial Sequence
  Description of Artificial Sequence: Synthetic oligonucleotide
gcuguaugucaccacgcug

SEQ ID NO: 1298096 - RNA, 19 nt, Artificial Sequence
  Description of Artificial Sequence: Synthetic oligonucleotide
acggcugagauaggaucuc

SEQ ID NO: 1298097 - RNA, 19 nt, Artificial Sequence
  Description of Artificial Sequence: Synthetic oligonucleotide
  modified_base (7)..(7): a, c, u, g, unknown or other
guaaacnguuacucccacu

SEQ ID NO: 1298098 - RNA, 19 nt, Artificial Sequence
  Description of Artificial Sequence: Synthetic oligonucleotide
cuguuacagcagacaagug

SEQ ID NO: 1298099 - RNA, 19 nt, Artificial Sequence
  Description of Artificial Sequence: Synthetic oligonucleotide
gaaaagcaugcagaugacu

SEQ ID NO: 1298100 - RNA, 19 nt, Artificial Sequence
  Description of Artificial Sequence: Synthetic oligonucleotide
ugggucauauuaggauugu

SEQ ID NO: 1298101 - RNA, 19 nt, Artificial Sequence
  Description of Artificial Sequence: Synthetic oligonucleotide
guuugugaugggguaacaa

SEQ ID NO: 1298102 - RNA, 19 nt, Artificial Sequence
  Description of Artificial Sequence: Synthetic oligonucleotide
gaagcucgugcugagauuu

SEQ ID NO: 1298103 - RNA, 19 nt, Artificial Sequence
  Description of Artificial Sequence: Synthetic oligonucleotide
uccuagccaacagguaccu

SEQ ID NO: 1298104 - RNA, 19 nt, Artificial Sequence
  Description of Artificial Sequence: Synthetic oligonucleotide
acucugauaugcagagcug

SEQ ID NO: 1298105 - RNA, 19 nt, Artificial Sequence
  Description of Artificial Sequence: Synthetic oligonucleotide
  modified_base (2)..(2): a, c, u, g, unknown or other
cnguuacucccacugugca

SEQ ID NO: 1298106 - RNA, 19 nt, Artificial Sequence
  Description of Artificial Sequence: Synthetic oligonucleotide
guaguuugugaugggguaa

SEQ ID NO: 1298107 - RNA, 19 nt, Artificial Sequence
  Description of Artificial Sequence: Synthetic oligonucleotide
ggacgcuguccauggaucc

SEQ ID NO: 1298108 - RNA, 19 nt, Artificial Sequence
  Description of Artificial Sequence: Synthetic oligonucleotide
agaagcucgugcugagauu

SEQ ID NO: 1298109 - RNA, 19 nt, Artificial Sequence
  Description of Artificial Sequence: Synthetic oligonucleotide
cuuguagaaucaucaaauu

SEQ ID NO: 1298110 - RNA, 19 nt, Artificial Sequence
  Description of Artificial Sequence: Synthetic oligonucleotide
cuguguagauacugaugga

SEQ ID NO: 1298111 - RNA, 19 nt, Artificial Sequence
  Description of Artificial Sequence: Synthetic oligonucleotide
cccuugcuuaggcacaugc

SEQ ID NO: 1298112 - RNA, 19 nt, Artificial Sequence
  Description of Artificial Sequence: Synthetic oligonucleotide
guccauggauccaugguaa

SEQ ID NO: 1298113 - RNA, 19 nt, Artificial Sequence
  Description of Artificial Sequence: Synthetic oligonucleotide
ccauucaguuauaccaguc

SEQ ID NO: 1298114 - RNA, 19 nt, Artificial Sequence
  Description of Artificial Sequence: Synthetic oligonucleotide
  modified_base (16)..(16): a, c, u, g, unknown or other
gcuuacuuaguaaacnguu

SEQ ID NO: 1298115 - RNA, 19 nt, Artificial Sequence
  Description of Artificial Sequence: Synthetic oligonucleotide
ggaucaaugugaaacacuu

SEQ ID NO: 1298116 - RNA, 19 nt, Artificial Sequence
  Description of Artificial Sequence: Synthetic oligonucleotide
aguuugugaugggguaaca

SEQ ID NO: 1298117 - RNA, 19 nt, Artificial Sequence
  Description of Artificial Sequence: Synthetic oligonucleotide
cuggcuguuacagcagaca

SEQ ID NO: 1298118 - RNA, 19 nt, Artificial Sequence
  Description of Artificial Sequence: Synthetic oligonucleotide
caaagugacuguaguuugu

SEQ ID NO: 1298119 - RNA, 19 nt, Artificial Sequence
  Description of Artificial Sequence: Synthetic oligonucleotide
gcagaugacuaguauuucu

SEQ ID NO: 1298120 - RNA, 19 nt, Artificial Sequence
  Description of Artificial Sequence: Synthetic oligonucleotide
cacggcugagauaggaucu

SEQ ID NO: 1298121 - RNA, 19 nt, Artificial Sequence
  Description of Artificial Sequence: Synthetic oligonucleotide
cagcagacaagugaugucu

SEQ ID NO: 1298122 - RNA, 19 nt, Artificial Sequence
  Description of Artificial Sequence: Synthetic oligonucleotide
caguggacuuaaagagcuc

SEQ ID NO: 1298123 - RNA, 19 nt, Artificial Sequence
  Description of Artificial Sequence: Synthetic oligonucleotide
aaccacacugcugcucauu

SEQ ID NO: 1298124 - RNA, 19 nt, Artificial Sequence
  Description of Artificial Sequence: Synthetic oligonucleotide
agagaagcucgugcugaga

SEQ ID NO: 1298125 - RNA, 19 nt, Artificial Sequence
  Description of Artificial Sequence: Synthetic oligonucleotide
cugaugaaugagcuuacuu

SEQ ID NO: 1298126 - RNA, 19 nt, Artificial Sequence
  Description of Artificial Sequence: Synthetic oligonucleotide
gacgcuguccauggaucca

SEQ ID NO: 1298127 - RNA, 19 nt, Artificial Sequence
  Description of Artificial Sequence: Synthetic oligonucleotide
aggcacaugcguguggcuu

SEQ ID NO: 1298128 - RNA, 19 nt, Artificial Sequence
  Description of Artificial Sequence: Synthetic oligonucleotide
ggcacaugcguguggcuuc

SEQ ID NO: 1298129 - RNA, 19 nt, Artificial Sequence
  Description of Artificial Sequence: Synthetic oligonucleotide
cagcuccuagccaacaggu

SEQ ID NO: 1298130 - RNA, 19 nt, Artificial Sequence
  Description of Artificial Sequence: Synthetic oligonucleotide
gaauguucucuguccguuu

SEQ ID NO: 1298131 - RNA, 19 nt, Artificial Sequence
  Description of Artificial Sequence: Synthetic oligonucleotide
caacuccuguaaugauguc

SEQ ID NO: 1298132 - RNA, 19 nt, Artificial Sequence
  Description of Artificial Sequence: Synthetic oligonucleotide
agcucgugcugagauuuaa

SEQ ID NO: 1298133 - RNA, 19 nt, Artificial Sequence
  Description of Artificial Sequence: Synthetic oligonucleotide
gcaguaacuggcugcuuaa

SEQ ID NO: 1298134 - RNA, 19 nt, Artificial Sequence
  Description of Artificial Sequence: Synthetic oligonucleotide
ggaaagauccaaagugacu

SEQ ID NO: 1298135 - RNA, 19 nt, Artificial Sequence
  Description of Artificial Sequence: Synthetic oligonucleotide
cauccucauugcugcccug

SEQ ID NO: 1298136 - RNA, 19 nt, Artificial Sequence
  Description of Artificial Sequence: Synthetic oligonucleotide
agcaugcagaugacuagua

SEQ ID NO: 1298137 - RNA, 19 nt, Artificial Sequence
  Description of Artificial Sequence: Synthetic oligonucleotide
gauccaugguaagacugau

SEQ ID NO: 1298138 - RNA, 19 nt, Artificial Sequence
  Description of Artificial Sequence: Synthetic oligonucleotide
gagaugacucaaacaacuu

SEQ ID NO: 1298139 - RNA, 19 nt, Artificial Sequence
  Description of Artificial Sequence: Synthetic oligonucleotide
gggucauauuaggauugug

SEQ ID NO: 1298140 - RNA, 19 nt, Artificial Sequence
  Description of Artificial Sequence: Synthetic oligonucleotide
uuccagagagagggacgcu

SEQ ID NO: 1298141 - RNA, 19 nt, Artificial Sequence
  Description of Artificial Sequence: Synthetic oligonucleotide
uguccguuucagagcccuu

SEQ ID NO: 1298142 - RNA, 19 nt, Artificial Sequence
  Description of Artificial Sequence: Synthetic oligonucleotide
agcagacaagugaugucuu

SEQ ID NO: 1298143 - RNA, 19 nt, Artificial Sequence
  Description of Artificial Sequence: Synthetic oligonucleotide
cccgcacugugauaagcac

SEQ ID NO: 1298144 - RNA, 19 nt, Artificial Sequence
  Description of Artificial Sequence: Synthetic oligonucleotide
caguuauaccaguccucaa

SEQ ID NO: 1298145 - RNA, 19 nt, Artificial Sequence
  Description of Artificial Sequence: Synthetic oligonucleotide
ggccuaacauuucaccagu

SEQ ID NO: 1298146 - RNA, 19 nt, Artificial Sequence
  Description of Artificial Sequence: Synthetic oligonucleotide
agguaccuucaggaucuga

SEQ ID NO: 1298147 - RNA, 19 nt, Artificial Sequence
  Description of Artificial Sequence: Synthetic oligonucleotide
uacccacagucugcguccu

SEQ ID NO: 1298148 - RNA, 19 nt, Artificial Sequence
  Description of Artificial Sequence: Synthetic oligonucleotide
gggacgcuguccauggauc

SEQ ID NO: 1298149 - RNA, 19 nt, Artificial Sequence
  Description of Artificial Sequence: Synthetic oligonucleotide
aggagccacggcugagaua

SEQ ID NO: 1298150 - RNA, 19 nt, Artificial Sequence
  Description of Artificial Sequence: Synthetic oligonucleotide
ggcuguaugucaccacgcu

SEQ ID NO: 1298151 - RNA, 19 nt, Artificial Sequence
  Description of Artificial Sequence: Synthetic oligonucleotide
gagggacgcuguccaugga

SEQ ID NO: 1298152 - RNA, 19 nt, Artificial Sequence
  Description of Artificial Sequence: Synthetic oligonucleotide
gccauucaguuauaccagu

SEQ ID NO: 1298153 - RNA, 19 nt, Artificial Sequence
  Description of Artificial Sequence: Synthetic oligonucleotide
guugcucauccagaggauu

SEQ ID NO: 1298154 - RNA, 19 nt, Artificial Sequence
  Description of Artificial Sequence: Synthetic oligonucleotide
ccagagguucaagccauuc

SEQ ID NO: 1298155 - RNA, 19 nt, Artificial Sequence
  Description of Artificial Sequence: Synthetic oligonucleotide
aagcucgugcugagauuua

SEQ ID NO: 1298156 - RNA, 19 nt, Artificial Sequence
  Description of Artificial Sequence: Synthetic oligonucleotide
cuguccguuucagagcccu

SEQ ID NO: 1298157 - RNA, 19 nt, Artificial Sequence
  Description of Artificial Sequence: Synthetic oligonucleotide
cucaagccaucagccaaaa

SEQ ID NO: 1298158 - RNA, 19 nt, Artificial Sequence
  Description of Artificial Sequence: Synthetic oligonucleotide
ccauggauccaugguaaga

SEQ ID NO: 1298159 - RNA, 19 nt, Artificial Sequence
  Description of Artificial Sequence: Synthetic oligonucleotide
agcuccuagccaacaggua

SEQ ID NO: 1298160 - RNA, 19 nt, Artificial Sequence
  Description of Artificial Sequence: Synthetic oligonucleotide
ggaauguucucuguccguu

SEQ ID NO: 1298161 - RNA, 19 nt, Artificial Sequence
  Description of Artificial Sequence: Synthetic oligonucleotide
ccucaagccaucagccaaa

SEQ ID NO: 1298162 - RNA, 19 nt, Artificial Sequence
  Description of Artificial Sequence: Synthetic oligonucleotide
gagcucauacugggcaaau

SEQ ID NO: 1298163 - RNA, 19 nt, Artificial Sequence
  Description of Artificial Sequence: Synthetic oligonucleotide
gcuuaaucuucaagugggu

SEQ ID NO: 1298164 - RNA, 19 nt, Artificial Sequence
  Description of Artificial Sequence: Synthetic oligonucleotide
cacaugcguguggcuucag

SEQ ID NO: 1298165 - RNA, 19 nt, Artificial Sequence
  Description of Artificial Sequence: Synthetic oligonucleotide
cauugcugcccugcugcua

SEQ ID NO: 1298166 - RNA, 19 nt, Artificial Sequence
  Description of Artificial Sequence: Synthetic oligonucleotide
cugucaacugcagcugcau

SEQ ID NO: 1298167 - RNA, 19 nt, Artificial Sequence
  Description of Artificial Sequence: Synthetic oligonucleotide
cagguaccuucaggaucug

SEQ ID NO: 1298168 - RNA, 19 nt, Artificial Sequence
  Description of Artificial Sequence: Synthetic oligonucleotide
agacaaccuucaggaucau

SEQ ID NO: 1298169 - RNA, 19 nt, Artificial Sequence
  Description of Artificial Sequence: Synthetic oligonucleotide
gcagacaagugaugucuuu

SEQ ID NO: 1298170 - RNA, 19 nt, Artificial Sequence
  Description of Artificial Sequence: Synthetic oligonucleotide
gcacaugcguguggcuuca

SEQ ID NO: 1298171 - RNA, 19 nt, Artificial Sequence
  Description of Artificial Sequence: Synthetic oligonucleotide
cccaauuaauugccuugcu

SEQ ID NO: 1298172 - RNA, 19 nt, Artificial Sequence
  Description of Artificial Sequence: Synthetic oligonucleotide
gcuuuacaagugaccacau

SEQ ID NO: 1298173 - RNA, 19 nt, Artificial Sequence
  Description of Artificial Sequence: Synthetic oligonucleotide
caguaacuggcugcuuaau

SEQ ID NO: 1298174 - RNA, 19 nt, Artificial Sequence
  Description of Artificial Sequence: Synthetic oligonucleotide
gccuaacauuucaccagua

SEQ ID NO: 1298175 - RNA, 19 nt, Artificial Sequence
  Description of Artificial Sequence: Synthetic oligonucleotide
cguuucagagcccuugcuu

SEQ ID NO: 1298176 - RNA, 19 nt, Artificial Sequence
  Description of Artificial Sequence: Synthetic oligonucleotide
gcugcucauuuugcaccaa

SEQ ID NO: 1298177 - RNA, 19 nt, Artificial Sequence
  Description of Artificial Sequence: Synthetic oligonucleotide
gcccuugcuuaggcacaug

SEQ ID NO: 1298178 - RNA, 19 nt, Artificial Sequence
  Description of Artificial Sequence: Synthetic oligonucleotide
cggcugagauaggaucuca

SEQ ID NO: 1298179 - RNA, 19 nt, Artificial Sequence
  Description of Artificial Sequence: Synthetic oligonucleotide
ccuagccaacagguaccuu

SEQ ID NO: 1298180 - RNA, 19 nt, Artificial Sequence
  Description of Artificial Sequence: Synthetic oligonucleotide
aaagagauauuccagaucu

SEQ ID NO: 1298181 - RNA, 19 nt, Artificial Sequence
  Description of Artificial Sequence: Synthetic oligonucleotide
agugaguuuauucagcagc

SEQ ID NO: 1298182 - RNA, 19 nt, Artificial Sequence
  Description of Artificial Sequence: Synthetic oligonucleotide
uauauauaaacccugccug

SEQ ID NO: 1298183 - RNA, 19 nt, Artificial Sequence
  Description of Artificial Sequence: Synthetic oligonucleotide
caugcaauugauaauaggc

SEQ ID NO: 1298184 - RNA, 19 nt, Artificial Sequence
  Description of Artificial Sequence: Synthetic oligonucleotide
uguuacauauuauagcucc

SEQ ID NO: 1298185 - RNA, 19 nt, Artificial Sequence
  Description of Artificial Sequence: Synthetic oligonucleotide
auaauaggcaaucuguuag

SEQ ID NO: 1298186 - RNA, 19 nt, Artificial Sequence
  Description of Artificial Sequence: Synthetic oligonucleotide
uuagaaugagucauccugg

SEQ ID NO: 1298187 - RNA, 19 nt, Artificial Sequence
  Description of Artificial Sequence: Synthetic oligonucleotide
uuaagugagaccuauacuu

SEQ ID NO: 1298188 - RNA, 19 nt, Artificial Sequence
  Description of Artificial Sequence: Synthetic oligonucleotide
uuaacgaggcuuuucaaag

SEQ ID NO: 1298189 - RNA, 19 nt, Artificial Sequence
  Description of Artificial Sequence: Synthetic oligonucleotide
agaaaccaaagcuuaggcc

SEQ ID NO: 1298190 - RNA, 19 nt, Artificial Sequence
  Description of Artificial Sequence: Synthetic oligonucleotide
uacuuuaauaggcucagcc

SEQ ID NO: 1298191 - RNA, 19 nt, Artificial Sequence
  Description of Artificial Sequence: Synthetic oligonucleotide
aucguagagguucagcugc

SEQ ID NO: 1298192 - RNA, 19 nt, Artificial Sequence
  Description of Artificial Sequence: Synthetic oligonucleotide
aacuccggagucuaucugc

SEQ ID NO: 1298193 - RNA, 19 nt, Artificial Sequence
  Description of Artificial Sequence: Synthetic oligonucleotide
acauauuauagcuccuagc

SEQ ID NO: 1298194 - RNA, 19 nt, Artificial Sequence
  Description of Artificial Sequence: Synthetic oligonucleotide
uguagaaucgucugaaaga

SEQ ID NO: 1298195 - RNA, 19 nt, Artificial Sequence
  Description of Artificial Sequence: Synthetic oligonucleotide
uuucaaagagauauuccag

SEQ ID NO: 1298196 - RNA, 19 nt, Artificial Sequence
  Description of Artificial Sequence: Synthetic oligonucleotide
ugaacucacaaccauggug

SEQ ID NO: 1298197 - RNA, 19 nt, Artificial Sequence
  Description of Artificial Sequence: Synthetic oligonucleotide
ugugcuuugacaguacccg

SEQ ID NO: 1298198 - RNA, 19 nt, Artificial Sequence
  Description of Artificial Sequence: Synthetic oligonucleotide
uauacugaccaccaugaca

SEQ ID NO: 1298199 - RNA, 19 nt, Artificial Sequence
  Description of Artificial Sequence: Synthetic oligonucleotide
uacucuauaugucucauuc

SEQ ID NO: 1298200 - RNA, 19 nt, Artificial Sequence
  Description of Artificial Sequence: Synthetic oligonucleotide
ucuauauauaaacccugcc

SEQ ID NO: 1298201 - RNA, 19 nt, Artificial Sequence
  Description of Artificial Sequence: Synthetic oligonucleotide
gauauuccagaucuggggc

SEQ ID NO: 1298202 - RNA, 19 nt, Artificial Sequence
  Description of Artificial Sequence: Synthetic oligonucleotide
ucuaaggcaacucucuugu

SEQ ID NO: 1298203 - RNA, 19 nt, Artificial Sequence
  Description of Artificial Sequence: Synthetic oligonucleotide
aacgaggcuuuucaaagag

SEQ ID NO: 1298204 - RNA, 19 nt, Artificial Sequence
  Description of Artificial Sequence: Synthetic oligonucleotide
uuauucagcagcuaagcaa

SEQ ID NO: 1298205 - RNA, 19 nt, Artificial Sequence
  Description of Artificial Sequence: Synthetic oligonucleotide
ugugcagauauucuuuagc

SEQ ID NO: 1298206 - RNA, 19 nt, Artificial Sequence
  Description of Artificial Sequence: Synthetic oligonucleotide
ucugcucucauagaguagg

SEQ ID NO: 1298207 - RNA, 19 nt, Artificial Sequence
  Description of Artificial Sequence: Synthetic oligonucleotide
cucuauaugucucauuccc

SEQ ID NO: 1298208 - RNA, 19 nt, Artificial Sequence
  Description of Artificial Sequence: Synthetic oligonucleotide
uacauauuauagcuccuag

SEQ ID NO: 1298209 - RNA, 19 nt, Artificial Sequence
  Description of Artificial Sequence: Synthetic oligonucleotide
agaacuaagcguucccugg

SEQ ID NO: 1298210 - RNA, 19 nt, Artificial Sequence
  Description of Artificial Sequence: Synthetic oligonucleotide
aagugauuaucaccuuugg

SEQ ID NO: 1298211 - RNA, 19 nt, Artificial Sequence
  Description of Artificial Sequence: Synthetic oligonucleotide
agaccuauacuuuuccauc

SEQ ID NO: 1298212 - RNA, 19 nt, Artificial Sequence
  Description of Artificial Sequence: Synthetic oligonucleotide
ugaggcuacaagcaaaggu

SEQ ID NO: 1298213 - RNA, 19 nt, Artificial Sequence
  Description of Artificial Sequence: Synthetic oligonucleotide
agaagacaggcucuaaguc

SEQ ID NO: 1298214 - RNA, 19 nt, Artificial Sequence
  Description of Artificial Sequence: Synthetic oligonucleotide
ugagguaacugaaggcugg

SEQ ID NO: 1298215 - RNA, 19 nt, Artificial Sequence
  Description of Artificial Sequence: Synthetic oligonucleotide
uauagauucaucaguucuc

SEQ ID NO: 1298216 - RNA, 19 nt, Artificial Sequence
  Description of Artificial Sequence: Synthetic oligonucleotide
uuacugacuccuucuaagg

SEQ ID NO: 1298217 - RNA, 19 nt, Artificial Sequence
  Description of Artificial Sequence: Synthetic oligonucleotide
caaagcuuaggccagugag

SEQ ID NO: 1298218 - RNA, 19 nt, Artificial Sequence
  Description of Artificial Sequence: Synthetic oligonucleotide
aacccugccuguuuagcac

SEQ ID NO: 1298219 - RNA, 19 nt, Artificial Sequence
  Description of Artificial Sequence: Synthetic oligonucleotide
uaaucaggcgaucguagag

SEQ ID NO: 1298220 - RNA, 19 nt, Artificial Sequence
  Description of Artificial Sequence: Synthetic oligonucleotide
ugcaauugauaauaggcaa

SEQ ID NO: 1298221 - RNA, 19 nt, Artificial Sequence
  Description of Artificial Sequence: Synthetic oligonucleotide
ugugcacuucuuaaagucc

SEQ ID NO: 1298222 - RNA, 19 nt, Artificial Sequence
  Description of Artificial Sequence: Synthetic oligonucleotide
ucauggauguauuacugac

SEQ ID NO: 1298223 - RNA, 19 nt, Artificial Sequence
  Description of Artificial Sequence: Synthetic oligonucleotide
caguguuacauauuauagc

SEQ ID NO: 1298224 - RNA, 19 nt, Artificial Sequence
  Description of Artificial Sequence: Synthetic oligonucleotide
ugugagguaacugaaggcu

SEQ ID NO: 1298225 - RNA, 19 nt, Artificial Sequence
  Description of Artificial Sequence: Synthetic oligonucleotide
ugauuaucaccuuugguua

SEQ ID NO: 1298226 - RNA, 19 nt, Artificial Sequence
  Description of Artificial Sequence: Synthetic oligonucleotide
agcagcuaagcaaugaagg

SEQ ID NO: 1298227 - RNA, 19 nt, Artificial Sequence
  Description of Artificial Sequence: Synthetic oligonucleotide
uccuaugguauccugugug

SEQ ID NO: 1298228 - RNA, 19 nt, Artificial Sequence
  Description of Artificial Sequence: Synthetic oligonucleotide
uccugugcacuucuuaaag

SEQ ID NO: 1298229 - RNA, 19 nt, Artificial Sequence
  Description of Artificial Sequence: Synthetic oligonucleotide
agaaucgucugaaagaugu

SEQ ID NO: 1298230 - RNA, 19 nt, Artificial Sequence
  Description of Artificial Sequence: Synthetic oligonucleotide
cuaggcucauuaaucaggc

SEQ ID NO: 1298231 - RNA, 19 nt, Artificial Sequence
  Description of Artificial Sequence: Synthetic oligonucleotide
aacugcccugcauguaugc

SEQ ID NO: 1298232 - RNA, 19 nt, Artificial Sequence
  Description of Artificial Sequence: Synthetic oligonucleotide
cuaagucucagggugaggc

SEQ ID NO: 1298233 - RNA, 19 nt, Artificial Sequence
  Description of Artificial Sequence: Synthetic oligonucleotide
aguggcacacggcuuaacg

SEQ ID NO: 1298234 - RNA, 19 nt, Artificial Sequence
  Description of Artificial Sequence: Synthetic oligonucleotide
aaucgucugaaagauguca

SEQ ID NO: 1298235 - RNA, 19 nt, Artificial Sequence
  Description of Artificial Sequence: Synthetic oligonucleotide
ggauaaauagggaaggugc

SEQ ID NO: 1298236 - RNA, 19 nt, Artificial Sequence
  Description of Artificial Sequence: Synthetic oligonucleotide
ucuauaugucucauuccca

SEQ ID NO: 1298237 - RNA, 19 nt, Artificial Sequence
  Description of Artificial Sequence: Synthetic oligonucleotide
cuguagaaucgucugaaag

SEQ ID NO: 1298238 - RNA, 19 nt, Artificial Sequence
  Description of Artificial Sequence: Synthetic oligonucleotide
acaagcaaagguuccuguc

SEQ ID NO: 1298239 - RNA, 19 nt, Artificial Sequence
  Description of Artificial Sequence: Synthetic oligonucleotide
agguuagaaugagucaucc

SEQ ID NO: 1298240 - RNA, 19 nt, Artificial Sequence
  Description of Artificial Sequence: Synthetic oligonucleotide
aggcucauuaaucaggcga

SEQ ID NO: 1298241 - RNA, 19 nt, Artificial Sequence
  Description of Artificial Sequence: Synthetic oligonucleotide
aucccagucauugcuaggc

SEQ ID NO: 1298242 - RNA, 19 nt, Artificial Sequence
  Description of Artificial Sequence: Synthetic oligonucleotide
aaggacuugucaccaaggu

SEQ ID NO: 1298243 - RNA, 19 nt, Artificial Sequence
  Description of Artificial Sequence: Synthetic oligonucleotide
aggcuuuucaaagagauau

SEQ ID NO: 1298244 - RNA, 19 nt, Artificial Sequence
  Description of Artificial Sequence: Synthetic oligonucleotide
uuugacaguacccgcgcca

SEQ ID NO: 1298245 - RNA, 19 nt, Artificial Sequence
  Description of Artificial Sequence: Synthetic oligonucleotide
uguccauauacugaccacc

SEQ ID NO: 1298246 - RNA, 19 nt, Artificial Sequence
  Description of Artificial Sequence: Synthetic oligonucleotide
cuuucaguugaaacugccc

SEQ ID NO: 1298247 - RNA, 19 nt, Artificial Sequence
  Description of Artificial Sequence: Synthetic oligonucleotide
ugauaauaggcaaucuguu

SEQ ID NO: 1298248 - RNA, 19 nt, Artificial Sequence
  Description of Artificial Sequence: Synthetic oligonucleotide
cucauuaaucaggcgaucg

SEQ ID NO: 1298249 - RNA, 19 nt, Artificial Sequence
  Description of Artificial Sequence: Synthetic oligonucleotide
aaacccugccuguuuagca

SEQ ID NO: 1298250 - RNA, 19 nt, Artificial Sequence
  Description of Artificial Sequence: Synthetic oligonucleotide
uuuucacuggcuggcaagg

SEQ ID NO: 1298251 - RNA, 19 nt, Artificial Sequence
  Description of Artificial Sequence: Synthetic oligonucleotide
uggcacacggcuuaacgag

SEQ ID NO: 1298252 - RNA, 19 nt, Artificial Sequence
  Description of Artificial Sequence: Synthetic oligonucleotide
guaguaaauaucccaguca

SEQ ID NO: 1298253 - RNA, 19 nt, Artificial Sequence
  Description of Artificial Sequence: Synthetic oligonucleotide
cauauuauagcuccuagcu

SEQ ID NO: 1298254 - RNA, 19 nt, Artificial Sequence
  Description of Artificial Sequence: Synthetic oligonucleotide
uucuuuagcaaagaggcuu

SEQ ID NO: 1298255 - RNA, 19 nt, Artificial Sequence
  Description of Artificial Sequence: Synthetic oligonucleotide
aacuaagcguucccuggag

SEQ ID NO: 1298256 - RNA, 19 nt, Artificial Sequence
  Description of Artificial Sequence: Synthetic oligonucleotide
aauugauaauaggcaaucu

SEQ ID NO: 1298257 - RNA, 19 nt, Artificial Sequence
  Description of Artificial Sequence: Synthetic oligonucleotide
accauggugcuauacuguc

SEQ ID NO: 1298258 - RNA, 19 nt, Artificial Sequence
  Description of Artificial Sequence: Synthetic oligonucleotide
ucuuccuaugguauccugu

SEQ ID NO: 1298259 - RNA, 19 nt, Artificial Sequence
  Description of Artificial Sequence: Synthetic oligonucleotide
aaggggauuucaaucaugu

SEQ ID NO: 1298260 - RNA, 19 nt, Artificial Sequence
  Description of Artificial Sequence: Synthetic oligonucleotide
uaauaggcaaucuguuaga

SEQ ID NO: 1298261 - RNA, 19 nt, Artificial Sequence
  Description of Artificial Sequence: Synthetic oligonucleotide
uuaaucaggcgaucguaga

SEQ ID NO: 1298262 - RNA, 19 nt, Artificial Sequence
  Description of Artificial Sequence: Synthetic oligonucleotide
uguuguauaaugggcucag

SEQ ID NO: 1298263 - RNA, 19 nt, Artificial Sequence
  Description of Artificial Sequence: Synthetic oligonucleotide
gcucuuuugguuucuauag

SEQ ID NO: 1298264 - RNA, 19 nt, Artificial Sequence
  Description of Artificial Sequence: Synthetic oligonucleotide
acuuucaguugaaacugcc

SEQ ID NO: 1298265 - RNA, 19 nt, Artificial Sequence
  Description of Artificial Sequence: Synthetic oligonucleotide
uggggcuuguuguauaaug

SEQ ID NO: 1298266 - RNA, 19 nt, Artificial Sequence
  Description of Artificial Sequence: Synthetic oligonucleotide
aggcucaagugccuaaggg

SEQ ID NO: 1298267 - RNA, 19 nt, Artificial Sequence
  Description of Artificial Sequence: Synthetic oligonucleotide
uuucuugcuuaagugagac

SEQ ID NO: 1298268 - RNA, 19 nt, Artificial Sequence
  Description of Artificial Sequence: Synthetic oligonucleotide
cuuccuaugguauccugug

SEQ ID NO: 1298269 - RNA, 19 nt, Artificial Sequence
  Description of Artificial Sequence: Synthetic oligonucleotide
agugauuaucaccuuuggu

SEQ ID NO: 1298270 - RNA, 19 nt, Artificial Sequence
  Description of Artificial Sequence: Synthetic oligonucleotide
gauaauaggcaaucuguua

SEQ ID NO: 1298271 - RNA, 19 nt, Artificial Sequence
  Description of Artificial Sequence: Synthetic oligonucleotide
auuaaucaggcgaucguag

SEQ ID NO: 1298272 - RNA, 19 nt, Artificial Sequence
  Description of Artificial Sequence: Synthetic oligonucleotide
ucaguugaaacugcccugc

SEQ ID NO: 1298273 - RNA, 19 nt, Artificial Sequence
  Description of Artificial Sequence: Synthetic oligonucleotide
ugaagugauuaucaccuuu

SEQ ID NO: 1298274 - RNA, 19 nt, Artificial Sequence
  Description of Artificial Sequence: Synthetic oligonucleotide
auauacugaccaccaugac

SEQ ID NO: 1298275 - RNA, 19 nt, Artificial Sequence
  Description of Artificial Sequence: Synthetic oligonucleotide
caaccauggugcuauacug

SEQ ID NO: 1298276 - RNA, 19 nt, Artificial Sequence
  Description of Artificial Sequence: Synthetic oligonucleotide
cugugcacuucuuaaaguc

SEQ ID NO: 1298277 - RNA, 19 nt, Artificial Sequence
  Description of Artificial Sequence: Synthetic oligonucleotide
aaagggccagcauuucugu

SEQ ID NO: 1298278 - RNA, 19 nt, Artificial Sequence
  Description of Artificial Sequence: Synthetic oligonucleotide
cuuguuguauaaugggcuc

SEQ ID NO: 1298279 - RNA, 19 nt, Artificial Sequence
  Description of Artificial Sequence: Synthetic oligonucleotide
cuaagcaaugaagggaaag

SEQ ID NO: 1298280 - RNA, 19 nt, Artificial Sequence
  Description of Artificial Sequence: Synthetic oligonucleotide
acuaagcguucccuggagg

SEQ ID NO: 1298281 - RNA, 19 nt, Artificial Sequence
  Description of Artificial Sequence: Synthetic oligonucleotide
ucuauagauucaucaguuc

SEQ ID NO: 1298282 - RNA, 19 nt, Artificial Sequence
  Description of Artificial Sequence: Synthetic oligonucleotide
aagggaaagcuugaacuca

SEQ ID NO: 1298283 - RNA, 19 nt, Artificial Sequence
  Description of Artificial Sequence: Synthetic oligonucleotide
caaagggccagcauuucug

SEQ ID NO: 1298284 - RNA, 19 nt, Artificial Sequence
  Description of Artificial Sequence: Synthetic oligonucleotide
aauuccugugcacuucuua

SEQ ID NO: 1298285 - RNA, 19 nt, Artificial Sequence
  Description of Artificial Sequence: Synthetic oligonucleotide
aggauaaauagggaaggug

SEQ ID NO: 1298286 - RNA, 19 nt, Artificial Sequence
  Description of Artificial Sequence: Synthetic oligonucleotide
gacaguacccgcgccagcg

SEQ ID NO: 1298287 - RNA, 19 nt, Artificial Sequence
  Description of Artificial Sequence: Synthetic oligonucleotide
gugauuaucaccuuugguu

SEQ ID NO: 1298288 - RNA, 19 nt, Artificial Sequence
  Description of Artificial Sequence: Synthetic oligonucleotide
ccaguguuacauauuauag

SEQ ID NO: 1298289 - RNA, 19 nt, Artificial Sequence
  Description of Artificial Sequence: Synthetic oligonucleotide
ucuuuagcaaagaggcuua

SEQ ID NO: 1298290 - RNA, 19 nt, Artificial Sequence
  Description of Artificial Sequence: Synthetic oligonucleotide
aacucuuuccagguuagaa

SEQ ID NO: 1298291 - RNA, 19 nt, Artificial Sequence
  Description of Artificial Sequence: Synthetic oligonucleotide
uugaaacugcccugcaugu

SEQ ID NO: 1298292 - RNA, 19 nt, Artificial Sequence
  Description of Artificial Sequence: Synthetic oligonucleotide
ccuaagggaaaguaggaag

SEQ ID NO: 1298293 - RNA, 19 nt, Artificial Sequence
  Description of Artificial Sequence: Synthetic oligonucleotide
aguaggcgugcucuuuugg

SEQ ID NO: 1298294 - RNA, 19 nt, Artificial Sequence
  Description of Artificial Sequence: Synthetic oligonucleotide
aaagcuuaggccagugagu

SEQ ID NO: 1298295 - RNA, 19 nt, Artificial Sequence
  Description of Artificial Sequence: Synthetic oligonucleotide
auagauucaucaguucucu

SEQ ID NO: 1298296 - RNA, 19 nt, Artificial Sequence
  Description of Artificial Sequence: Synthetic oligonucleotide
gaaacucuuuccagguuag

SEQ ID NO: 1298297 - RNA, 19 nt, Artificial Sequence
  Description of Artificial Sequence: Synthetic oligonucleotide
cuauauauaaacccugccu

SEQ ID NO: 1298298 - RNA, 19 nt, Artificial Sequence
  Description of Artificial Sequence: Synthetic oligonucleotide
gaccuauacuuuuccauca

SEQ ID NO: 1298299 - RNA, 19 nt, Artificial Sequence
  Description of Artificial Sequence: Synthetic oligonucleotide
aucgucugaaagaugucac

SEQ ID NO: 1298300 - RNA, 19 nt, Artificial Sequence
  Description of Artificial Sequence: Synthetic oligonucleotide
gcagcuaagcaaugaaggg

SEQ ID NO: 1298301 - RNA, 19 nt, Artificial Sequence
  Description of Artificial Sequence: Synthetic oligonucleotide
augcaauugauaauaggca

SEQ ID NO: 1298302 - RNA, 19 nt, Artificial Sequence
  Description of Artificial Sequence: Synthetic oligonucleotide
cugugagguaacugaaggc

SEQ ID NO: 1298303 - RNA, 19 nt, Artificial Sequence
  Description of Artificial Sequence: Synthetic oligonucleotide
auauuccagaucuggggca

SEQ ID NO: 1298304 - RNA, 19 nt, Artificial Sequence
  Description of Artificial Sequence: Synthetic oligonucleotide
auuccugugcacuucuuaa

SEQ ID NO: 1298305 - RNA, 19 nt, Artificial Sequence
  Description of Artificial Sequence: Synthetic oligonucleotide
uaggccagugaguuuauuc

SEQ ID NO: 1298306 - RNA, 19 nt, Artificial Sequence
  Description of Artificial Sequence: Synthetic oligonucleotide
cauguaugcaugcaauuga

SEQ ID NO: 1298307 - RNA, 19 nt, Artificial Sequence
  Description of Artificial Sequence: Synthetic oligonucleotide
ccaguaguaaauaucccag

SEQ ID NO: 1298308 - RNA, 19 nt, Artificial Sequence
  Description of Artificial Sequence: Synthetic oligonucleotide
uuugaucauggauguauua

SEQ ID NO: 1298309 - RNA, 19 nt, Artificial Sequence
  Description of Artificial Sequence: Synthetic oligonucleotide
ugccuaagggaaaguagga

SEQ ID NO: 1298310 - RNA, 19 nt, Artificial Sequence
  Description of Artificial Sequence: Synthetic oligonucleotide
uucuugagacugaagugau

SEQ ID NO: 1298311 - RNA, 19 nt, Artificial Sequence
  Description of Artificial Sequence: Synthetic oligonucleotide
ugcucuuuugguuucuaua

SEQ ID NO: 1298312 - RNA, 19 nt, Artificial Sequence
  Description of Artificial Sequence: Synthetic oligonucleotide
uagaaugagucauccuggu

SEQ ID NO: 1298313 - RNA, 19 nt, Artificial Sequence
  Description of Artificial Sequence: Synthetic oligonucleotide
cuuaacgaggcuuuucaaa

SEQ ID NO: 1298314 - RNA, 19 nt, Artificial Sequence
  Description of Artificial Sequence: Synthetic oligonucleotide
uccuucuaaggcaacucuc

SEQ ID NO: 1298315 - RNA, 19 nt, Artificial Sequence
  Description of Artificial Sequence: Synthetic oligonucleotide
gaaaguaggaagccaaaau

SEQ ID NO: 1298316 - RNA, 19 nt, Artificial Sequence
  Description of Artificial Sequence: Synthetic oligonucleotide
ugcucucauagaguaggcg

SEQ ID NO: 1298317 - RNA, 19 nt, Artificial Sequence
  Description of Artificial Sequence: Synthetic oligonucleotide
agugagaccuauacuuuuc

SEQ ID NO: 1298318 - RNA, 19 nt, Artificial Sequence
  Description of Artificial Sequence: Synthetic oligonucleotide
ugcuucuacucuauauguc

SEQ ID NO: 1298319 - RNA, 19 nt, Artificial Sequence
  Description of Artificial Sequence: Synthetic oligonucleotide
aaucaguaucagaagcagu

SEQ ID NO: 1298320 - RNA, 19 nt, Artificial Sequence
  Description of Artificial Sequence: Synthetic oligonucleotide
aucaguaucagaagcaguu

SEQ ID NO: 1298321 - RNA, 19 nt, Artificial Sequence
  Description of Artificial Sequence: Synthetic oligonucleotide
uagaaucgucugaaagaug

SEQ ID NO: 1298322 - RNA, 19 nt, Artificial Sequence
  Description of Artificial Sequence: Synthetic oligonucleotide
ugagaacuaagcguucccu

SEQ ID NO: 1298323 - RNA, 19 nt, Artificial Sequence
  Description of Artificial Sequence: Synthetic oligonucleotide
gugaccaccgccaugucgc

SEQ ID NO: 1298324 - RNA, 19 nt, Artificial Sequence
  Description of Artificial Sequence: Synthetic oligonucleotide
gugagaccuauacuuuucc

SEQ ID NO: 1298325 - RNA, 19 nt, Artificial Sequence
  Description of Artificial Sequence: Synthetic oligonucleotide
aagguuccugucuuccuau

SEQ ID NO: 1298326 - RNA, 19 nt, Artificial Sequence
  Description of Artificial Sequence: Synthetic oligonucleotide
ucugucaugcugugcagau

SEQ ID NO: 1298327 - RNA, 19 nt, Artificial Sequence
  Description of Artificial Sequence: Synthetic oligonucleotide
caaauauuucuggggcugg

SEQ ID NO: 1298328 - RNA, 19 nt, Artificial Sequence
  Description of Artificial Sequence: Synthetic oligonucleotide
aaccaucccaguguuacau

SEQ ID NO: 1298329 - RNA, 19 nt, Artificial Sequence
  Description of Artificial Sequence: Synthetic oligonucleotide
ggggauuucaaucaugucu

SEQ ID NO: 1298330 - RNA, 19 nt, Artificial Sequence
  Description of Artificial Sequence: Synthetic oligonucleotide
uaggcucauuaaucaggcg

SEQ ID NO: 1298331 - RNA, 19 nt, Artificial Sequence
  Description of Artificial Sequence: Synthetic oligonucleotide
uggccaggaaacucuuucc

SEQ ID NO: 1298332 - RNA, 19 nt, Artificial Sequence
  Description of Artificial Sequence: Synthetic oligonucleotide
aucaggcgaucguagaggu

SEQ ID NO: 1298333 - RNA, 19 nt, Artificial Sequence
  Description of Artificial Sequence: Synthetic oligonucleotide
cuggcaaccggcacuccgg

SEQ ID NO: 1298334 - RNA, 19 nt, Artificial Sequence
  Description of Artificial Sequence: Synthetic oligonucleotide
caggcgaucguagagguuc

SEQ ID NO: 1298335 - RNA, 19 nt, Artificial Sequence
  Description of Artificial Sequence: Synthetic oligonucleotide
cuuaggagaaggcaguucu

SEQ ID NO: 1298336 - RNA, 19 nt, Artificial Sequence
  Description of Artificial Sequence: Synthetic oligonucleotide
aaugggcucaggauaaaua

SEQ ID NO: 1298337 - RNA, 19 nt, Artificial Sequence
  Description of Artificial Sequence: Synthetic oligonucleotide
ggcccaguaguaaauaucc

SEQ ID NO: 1298338 - RNA, 19 nt, Artificial Sequence
  Description of Artificial Sequence: Synthetic oligonucleotide
agggaaagcuugaacucac

SEQ ID NO: 1298339 - RNA, 19 nt, Artificial Sequence
  Description of Artificial Sequence: Synthetic oligonucleotide
gucauugcuaggcucauua

SEQ ID NO: 1298340 - RNA, 19 nt, Artificial Sequence
  Description of Artificial Sequence: Synthetic oligonucleotide
cuaagcguucccuggagga

SEQ ID NO: 1298341 - RNA, 19 nt, Artificial Sequence
  Description of Artificial Sequence: Synthetic oligonucleotide
agcuaagcaaugaagggaa

SEQ ID NO: 1298342 - RNA, 19 nt, Artificial Sequence
  Description of Artificial Sequence: Synthetic oligonucleotide
agaggcuuaggagaaggca

SEQ ID NO: 1298343 - RNA, 19 nt, Artificial Sequence
  Description of Artificial Sequence: Synthetic oligonucleotide
uauauaaacccugccuguu

SEQ ID NO: 1298344 - RNA, 19 nt, Artificial Sequence
  Description of Artificial Sequence: Synthetic oligonucleotide
ugagaaucuguugggcugu

SEQ ID NO: 1298345 - RNA, 19 nt, Artificial Sequence
  Description of Artificial Sequence: Synthetic oligonucleotide
uaagcguucccuggaggag

SEQ ID NO: 1298346 - RNA, 19 nt, Artificial Sequence
  Description of Artificial Sequence: Synthetic oligonucleotide
uuaggagaaggcaguucuc

SEQ ID NO: 1298347 - RNA, 19 nt, Artificial Sequence
  Description of Artificial Sequence: Synthetic oligonucleotide
auauaaacccugccuguuu

SEQ ID NO: 1298348 - RNA, 19 nt, Artificial Sequence
  Description of Artificial Sequence: Synthetic oligonucleotide
aggcuacaagcaaagguuc

SEQ ID NO: 1298349 - RNA, 19 nt, Artificial Sequence
  Description of Artificial Sequence: Synthetic oligonucleotide
gaacuaagcguucccugga

SEQ ID NO: 1298350 - RNA, 19 nt, Artificial Sequence
  Description of Artificial Sequence: Synthetic oligonucleotide
accggaagcuggcaaccgg

SEQ ID NO: 1298351 - RNA, 19 nt, Artificial Sequence
  Description of Artificial Sequence: Synthetic oligonucleotide
gauaaauagggaaggugcu

SEQ ID NO: 1298352 - RNA, 19 nt, Artificial Sequence
  Description of Artificial Sequence: Synthetic oligonucleotide
cugugcagauauucuuuag

SEQ ID NO: 1298353 - RNA, 19 nt, Artificial Sequence
  Description of Artificial Sequence: Synthetic oligonucleotide
agggccagcauuucuguaa

SEQ ID NO: 1298354 - RNA, 19 nt, Artificial Sequence
  Description of Artificial Sequence: Synthetic oligonucleotide
aauaucccagucauugcua

SEQ ID NO: 1298355 - RNA, 19 nt, Artificial Sequence
  Description of Artificial Sequence: Synthetic oligonucleotide
ucaagcaaagggccagcau

SEQ ID NO: 1298356 - RNA, 19 nt, Artificial Sequence
  Description of Artificial Sequence: Synthetic oligonucleotide
uuaauaggcucagccuucu

SEQ ID NO: 1298357 - RNA, 19 nt, Artificial Sequence
  Description of Artificial Sequence: Synthetic oligonucleotide
ggugcuauacuguccuuug

SEQ ID NO: 1298358 - RNA, 19 nt, Artificial Sequence
  Description of Artificial Sequence: Synthetic oligonucleotide
gcaaucuguuagaagacag

SEQ ID NO: 1298359 - RNA, 19 nt, Artificial Sequence
  Description of Artificial Sequence: Synthetic oligonucleotide
gugcuauacuguccuuugg

SEQ ID NO: 1298360 - RNA, 19 nt, Artificial Sequence
  Description of Artificial Sequence: Synthetic oligonucleotide
aguugaaacugcccugcau

SEQ ID NO: 1298361 - RNA, 19 nt, Artificial Sequence
  Description of Artificial Sequence: Synthetic oligonucleotide
ucauagaguaggcgugcuc

SEQ ID NO: 1298362 - RNA, 19 nt, Artificial Sequence
  Description of Artificial Sequence: Synthetic oligonucleotide
agcgucgggaucaagguga

SEQ ID NO: 1298363 - RNA, 19 nt, Artificial Sequence
  Description of Artificial Sequence: Synthetic oligonucleotide
uuccuaugguauccugugu

SEQ ID NO: 1298364 - RNA, 19 nt, Artificial Sequence
  Description of Artificial Sequence: Synthetic oligonucleotide
aggcaacucucuugucuac

SEQ ID NO: 1298365 - RNA, 19 nt, Artificial Sequence
  Description of Artificial Sequence: Synthetic oligonucleotide
ccauauacugaccaccaug

SEQ ID NO: 1298366 - RNA, 19 nt, Artificial Sequence
  Description of Artificial Sequence: Synthetic oligonucleotide
ucuaagucucagggugagg

SEQ ID NO: 1298367 - RNA, 19 nt, Artificial Sequence
  Description of Artificial Sequence: Synthetic oligonucleotide
gaacuccggagucuaucug

SEQ ID NO: 1298368 - RNA, 19 nt, Artificial Sequence
  Description of Artificial Sequence: Synthetic oligonucleotide
agcuccuagcuuucuugag

SEQ ID NO: 1298369 - RNA, 19 nt, Artificial Sequence
  Description of Artificial Sequence: Synthetic oligonucleotide
cuuuaauaggcucagccuu

SEQ ID NO: 1298370 - RNA, 19 nt, Artificial Sequence
  Description of Artificial Sequence: Synthetic oligonucleotide
auuaucaccuuugguuaga

SEQ ID NO: 1298371 - RNA, 19 nt, Artificial Sequence
  Description of Artificial Sequence: Synthetic oligonucleotide
cuuugacaguacccgcgcc

SEQ ID NO: 1298372 - RNA, 19 nt, Artificial Sequence
  Description of Artificial Sequence: Synthetic oligonucleotide
uugagacugaagugauuau

SEQ ID NO: 1298373 - RNA, 19 nt, Artificial Sequence
  Description of Artificial Sequence: Synthetic oligonucleotide
uuacuuuaauaggcucagc

SEQ ID NO: 1298374 - RNA, 19 nt, Artificial Sequence
  Description of Artificial Sequence: Synthetic oligonucleotide
accgccaugucgcccuacg

SEQ ID NO: 1298375 - RNA, 19 nt, Artificial Sequence
  Description of Artificial Sequence: Synthetic oligonucleotide
aagcaaagggccagcauuu

SEQ ID NO: 1298376 - RNA, 19 nt, Artificial Sequence
  Description of Artificial Sequence: Synthetic oligonucleotide
uugcuuaagugagaccuau

SEQ ID NO: 1298377 - RNA, 19 nt, Artificial Sequence
  Description of Artificial Sequence: Synthetic oligonucleotide
uccauauacugaccaccau

SEQ ID NO: 1298378 - RNA, 19 nt, Artificial Sequence
  Description of Artificial Sequence: Synthetic oligonucleotide
aggacuugucaccaagguu

SEQ ID NO: 1298379 - RNA, 19 nt, Artificial Sequence
  Description of Artificial Sequence: Synthetic oligonucleotide
aagucucagggugaggcua

SEQ ID NO: 1298380 - RNA, 19 nt, Artificial Sequence
  Description of Artificial Sequence: Synthetic oligonucleotide
ucaaaggacuugucaccaa

SEQ ID NO: 1298381 - RNA, 19 nt, Artificial Sequence
  Description of Artificial Sequence: Synthetic oligonucleotide
ggugaggcuacaagcaaag

SEQ ID NO: 1298382 - RNA, 19 nt, Artificial Sequence
  Description of Artificial Sequence: Synthetic oligonucleotide
agaggcucaagugccuaag

SEQ ID NO: 1298383 - RNA, 19 nt, Artificial Sequence
  Description of Artificial Sequence: Synthetic oligonucleotide
cuacggcaccggaagcugg

SEQ ID NO: 1298384 - RNA, 19 nt, Artificial Sequence
  Description of Artificial Sequence: Synthetic oligonucleotide
ccuaugguauccugugugc

SEQ ID NO: 1298385 - RNA, 19 nt, Artificial Sequence
  Description of Artificial Sequence: Synthetic oligonucleotide
accggcacuccggaacucc

SEQ ID NO: 1298386 - RNA, 19 nt, Artificial Sequence
  Description of Artificial Sequence: Synthetic oligonucleotide
guagaaucgucugaaagau

SEQ ID NO: 1298387 - RNA, 19 nt, Artificial Sequence
  Description of Artificial Sequence: Synthetic oligonucleotide
ggcuuaacgaggcuuuuca

SEQ ID NO: 1298388 - RNA, 19 nt, Artificial Sequence
  Description of Artificial Sequence: Synthetic oligonucleotide
guggcacacggcuuaacga

SEQ ID NO: 1298389 - RNA, 19 nt, Artificial Sequence
  Description of Artificial Sequence: Synthetic oligonucleotide
accuauacuuuuccaucaa

SEQ ID NO: 1298390 - RNA, 19 nt, Artificial Sequence
  Description of Artificial Sequence: Synthetic oligonucleotide
gcucaggauaaauagggaa

SEQ ID NO: 1298391 - RNA, 19 nt, Artificial Sequence
  Description of Artificial Sequence: Synthetic oligonucleotide
agaaugagucauccuggua

SEQ ID NO: 1298392 - RNA, 19 nt, Artificial Sequence
  Description of Artificial Sequence: Synthetic oligonucleotide
cuauaugucucauucccau

SEQ ID NO: 1298393 - RNA, 19 nt, Artificial Sequence
  Description of Artificial Sequence: Synthetic oligonucleotide
cagcuaagcaaugaaggga

SEQ ID NO: 1298394 - RNA, 19 nt, Artificial Sequence
  Description of Artificial Sequence: Synthetic oligonucleotide
gcuggcaaggcacuuugug

SEQ ID NO: 1298395 - RNA, 19 nt, Artificial Sequence
  Description of Artificial Sequence: Synthetic oligonucleotide
uaggcgugcucuuuugguu

SEQ ID NO: 1298396 - RNA, 19 nt, Artificial Sequence
  Description of Artificial Sequence: Synthetic oligonucleotide
auuucuugcuuaagugaga

SEQ ID NO: 1298397 - RNA, 19 nt, Artificial Sequence
  Description of Artificial Sequence: Synthetic oligonucleotide
ucguagagguucagcugcu

SEQ ID NO: 1298398 - RNA, 19 nt, Artificial Sequence
  Description of Artificial Sequence: Synthetic oligonucleotide
cauggugcuauacuguccu

SEQ ID NO: 1298399 - RNA, 19 nt, Artificial Sequence
  Description of Artificial Sequence: Synthetic oligonucleotide
ggauguauuacugacuccu

SEQ ID NO: 1298400 - RNA, 19 nt, Artificial Sequence
  Description of Artificial Sequence: Synthetic oligonucleotide
ugcaauuccugugcacuuc

SEQ ID NO: 1298401 - RNA, 19 nt, Artificial Sequence
  Description of Artificial Sequence: Synthetic oligonucleotide
caugucgcccuacggcacc

SEQ ID NO: 1298402 - RNA, 19 nt, Artificial Sequence
  Description of Artificial Sequence: Synthetic oligonucleotide
ucuugagacugaagugauu

SEQ ID NO: 1298403 - RNA, 19 nt, Artificial Sequence
  Description of Artificial Sequence: Synthetic oligonucleotide
ugucaccccucuguaggag

SEQ ID NO: 1298404 - RNA, 19 nt, Artificial Sequence
  Description of Artificial Sequence: Synthetic oligonucleotide
uaaugggcucaggauaaau

SEQ ID NO: 1298405 - RNA, 19 nt, Artificial Sequence
  Description of Artificial Sequence: Synthetic oligonucleotide
ugcugagaacuaagcguuc

SEQ ID NO: 1298406 - RNA, 19 nt, Artificial Sequence
  Description of Artificial Sequence: Synthetic oligonucleotide
auguaugcaugcaauugau

SEQ ID NO: 1298407 - RNA, 19 nt, Artificial Sequence
  Description of Artificial Sequence: Synthetic oligonucleotide
auucuuuagcaaagaggcu

SEQ ID NO: 1298408 - RNA, 19 nt, Artificial Sequence
  Description of Artificial Sequence: Synthetic oligonucleotide
caagcaaagguuccugucu

SEQ ID NO: 1298409 - RNA, 19 nt, Artificial Sequence
  Description of Artificial Sequence: Synthetic oligonucleotide
ucgggaucaaggugaccac

SEQ ID NO: 1298410 - RNA, 19 nt, Artificial Sequence
  Description of Artificial Sequence: Synthetic oligonucleotide
aaacucuuuccagguuaga

SEQ ID NO: 1298411 - RNA, 19 nt, Artificial Sequence
  Description of Artificial Sequence: Synthetic oligonucleotide
guccauauacugaccacca

SEQ ID NO: 1298412 - RNA, 19 nt, Artificial Sequence
  Description of Artificial Sequence: Synthetic oligonucleotide
cauagaguaggcgugcucu

SEQ ID NO: 1298413 - RNA, 19 nt, Artificial Sequence
  Description of Artificial Sequence: Synthetic oligonucleotide
ucccaguguuacauauuau

SEQ ID NO: 1298414 - RNA, 19 nt, Artificial Sequence
  Description of Artificial Sequence: Synthetic oligonucleotide
gcuuugacaguacccgcgc

SEQ ID NO: 1298415 - RNA, 19 nt, Artificial Sequence
  Description of Artificial Sequence: Synthetic oligonucleotide
uuauagcuccuagcuuucu

SEQ ID NO: 1298416 - RNA, 19 nt, Artificial Sequence
  Description of Artificial Sequence: Synthetic oligonucleotide
ugcuuaagugagaccuaua

SEQ ID NO: 1298417 - RNA, 19 nt, Artificial Sequence
  Description of Artificial Sequence: Synthetic oligonucleotide
augucaccccucuguagga

SEQ ID NO: 1298418 - RNA, 19 nt, Artificial Sequence
  Description of Artificial Sequence: Synthetic oligonucleotide
gcugggaaccaucccagug

SEQ ID NO: 1298419 - RNA, 19 nt, Artificial Sequence
  Description of Artificial Sequence: Synthetic oligonucleotide
gucuuccuaugguauccug

SEQ ID NO: 1298420 - RNA, 19 nt, Artificial Sequence
  Description of Artificial Sequence: Synthetic oligonucleotide
gcuggcaaccggcacuccg

SEQ ID NO: 1298421 - RNA, 19 nt, Artificial Sequence
  Description of Artificial Sequence: Synthetic oligonucleotide
gagucuaucugcggacuuc

SEQ ID NO: 1298422 - RNA, 19 nt, Artificial Sequence
  Description of Artificial Sequence: Synthetic oligonucleotide
cauggauguauuacugacu

SEQ ID NO: 1298423 - RNA, 19 nt, Artificial Sequence
  Description of Artificial Sequence: Synthetic oligonucleotide
aguacccgcgccagcgucg

SEQ ID NO: 1298424 - RNA, 19 nt, Artificial Sequence
  Description of Artificial Sequence: Synthetic oligonucleotide
cauuaaucaggcgaucgua

SEQ ID NO: 1298425 - RNA, 19 nt, Artificial Sequence
  Description of Artificial Sequence: Synthetic oligonucleotide
ugucuuccuaugguauccu

SEQ ID NO: 1298426 - RNA, 19 nt, Artificial Sequence
  Description of Artificial Sequence: Synthetic oligonucleotide
acccugccuguuuagcacu

SEQ ID NO: 1298427 - RNA, 19 nt, Artificial Sequence
  Description of Artificial Sequence: Synthetic oligonucleotide
gugaggcuacaagcaaagg

SEQ ID NO: 1298428 - RNA, 19 nt, Artificial Sequence
  Description of Artificial Sequence: Synthetic oligonucleotide
gaaccaucccaguguuaca

SEQ ID NO: 1298429 - RNA, 19 nt, Artificial Sequence
  Description of Artificial Sequence: Synthetic oligonucleotide
aggcgugcucuuuugguuu

SEQ ID NO: 1298430 - RNA, 19 nt, Artificial Sequence
  Description of Artificial Sequence: Synthetic oligonucleotide
uggcaaccggcacuccgga

SEQ ID NO: 1298431 - RNA, 19 nt, Artificial Sequence
  Description of Artificial Sequence: Synthetic oligonucleotide
cuuucugcucucauagagu

SEQ ID NO: 1298432 - RNA, 19 nt, Artificial Sequence
  Description of Artificial Sequence: Synthetic oligonucleotide
uccuagcuuucuugagacu

SEQ ID NO: 1298433 - RNA, 19 nt, Artificial Sequence
  Description of Artificial Sequence: Synthetic oligonucleotide
gccagcgucgggaucaagg

SEQ ID NO: 1298434 - RNA, 19 nt, Artificial Sequence
  Description of Artificial Sequence: Synthetic oligonucleotide
cuaaggcaacucucuuguc

SEQ ID NO: 1298435 - RNA, 19 nt, Artificial Sequence
  Description of Artificial Sequence: Synthetic oligonucleotide
agguuccugucuuccuaug

SEQ ID NO: 1298436 - RNA, 19 nt, Artificial Sequence
  Description of Artificial Sequence: Synthetic oligonucleotide
acgcagucucuguucuuug

SEQ ID NO: 1298437 - RNA, 19 nt, Artificial Sequence
  Description of Artificial Sequence: Synthetic oligonucleotide
cuccggagucuaucugcgg

SEQ ID NO: 1298438 - RNA, 19 nt, Artificial Sequence
  Description of Artificial Sequence: Synthetic oligonucleotide
gcucucauagaguaggcgu

SEQ ID NO: 1298439 - RNA, 19 nt, Artificial Sequence
  Description of Artificial Sequence: Synthetic oligonucleotide
gugaguuuauucagcagcu

SEQ ID NO: 1298440 - RNA, 19 nt, Artificial Sequence
  Description of Artificial Sequence: Synthetic oligonucleotide
aggccuaaugucaccccuc

SEQ ID NO: 1298441 - RNA, 19 nt, Artificial Sequence
  Description of Artificial Sequence: Synthetic oligonucleotide
gcuccuagcuuucuugaga

SEQ ID NO: 1298442 - RNA, 19 nt, Artificial Sequence
  Description of Artificial Sequence: Synthetic oligonucleotide
ggugaacucucucagcagu

SEQ ID NO: 1298443 - RNA, 19 nt, Artificial Sequence
  Description of Artificial Sequence: Synthetic oligonucleotide
guaggcgugcucuuuuggu

SEQ ID NO: 1298444 - RNA, 19 nt, Artificial Sequence
  Description of Artificial Sequence: Synthetic oligonucleotide
ggcacacggcuuaacgagg

SEQ ID NO: 1298445 - RNA, 19 nt, Artificial Sequence
  Description of Artificial Sequence: Synthetic oligonucleotide
cuugcuuaagugagaccua

SEQ ID NO: 1298446 - RNA, 19 nt, Artificial Sequence
  Description of Artificial Sequence: Synthetic oligonucleotide
ccagucauugcuaggcuca

SEQ ID NO: 1298447 - RNA, 19 nt, Artificial Sequence
  Description of Artificial Sequence: Synthetic oligonucleotide
ccauggugcuauacugucc

SEQ ID NO: 1298448 - RNA, 19 nt, Artificial Sequence
  Description of Artificial Sequence: Synthetic oligonucleotide
gcucaagugccuaagggaa

SEQ ID NO: 1298449 - RNA, 19 nt, Artificial Sequence
  Description of Artificial Sequence: Synthetic oligonucleotide
cagcgucgggaucaaggug

SEQ ID NO: 1298450 - RNA, 19 nt, Artificial Sequence
  Description of Artificial Sequence: Synthetic oligonucleotide
aaccggcacuccggaacuc

SEQ ID NO: 1298451 - RNA, 19 nt, Artificial Sequence
  Description of Artificial Sequence: Synthetic oligonucleotide
caguaguaaauaucccagu

SEQ ID NO: 1298452 - RNA, 19 nt, Artificial Sequence
  Description of Artificial Sequence: Synthetic oligonucleotide
ucgcccuacggcaccggaa

SEQ ID NO: 1298453 - RNA, 19 nt, Artificial Sequence
  Description of Artificial Sequence: Synthetic oligonucleotide
gcuuaggccagugaguuua

SEQ ID NO: 1298454 - RNA, 19 nt, Artificial Sequence
  Description of Artificial Sequence: Synthetic oligonucleotide
ggcaaucuguuagaagaca

SEQ ID NO: 1298455 - RNA, 19 nt, Artificial Sequence
  Description of Artificial Sequence: Synthetic oligonucleotide
ggcaccggaagcuggcaac

SEQ ID NO: 1298456 - RNA, 19 nt, Artificial Sequence
  Description of Artificial Sequence: Synthetic oligonucleotide
agaaucuguugggcuguca

SEQ ID NO: 1298457 - RNA, 19 nt, Artificial Sequence
  Description of Artificial Sequence: Synthetic oligonucleotide
acacggcuuaacgaggcuu

SEQ ID NO: 1298458 - RNA, 19 nt, Artificial Sequence
  Description of Artificial Sequence: Synthetic oligonucleotide
gcacuuugugguuacuuua

SEQ ID NO: 1298459 - RNA, 19 nt, Artificial Sequence
  Description of Artificial Sequence: Synthetic oligonucleotide
gggccagcauuucuguaac

SEQ ID NO: 1298460 - RNA, 19 nt, Artificial Sequence
  Description of Artificial Sequence: Synthetic oligonucleotide
acgaggcuuuucaaagaga

SEQ ID NO: 1298461 - RNA, 19 nt, Artificial Sequence
  Description of Artificial Sequence: Synthetic oligonucleotide
ucaggcgaucguagagguu

SEQ ID NO: 1298462 - RNA, 19 nt, Artificial Sequence
  Description of Artificial Sequence: Synthetic oligonucleotide
augucgcccuacggcaccg

SEQ ID NO: 1298463 - RNA, 19 nt, Artificial Sequence
  Description of Artificial Sequence: Synthetic oligonucleotide
caccggaagcuggcaaccg

SEQ ID NO: 1298464 - RNA, 19 nt, Artificial Sequence
  Description of Artificial Sequence: Synthetic oligonucleotide
uccagaucuggggcacgca

SEQ ID NO: 1298465 - RNA, 19 nt, Artificial Sequence
  Description of Artificial Sequence: Synthetic oligonucleotide
ggaacuccggagucuaucu

SEQ ID NO: 1298466 - RNA, 19 nt, Artificial Sequence
  Description of Artificial Sequence: Synthetic oligonucleotide
guuagaagacaggcucuaa

SEQ ID NO: 1298467 - RNA, 19 nt, Artificial Sequence
  Description of Artificial Sequence: Synthetic oligonucleotide
cuucugacuuucaguugaa

SEQ ID NO: 1298468 - RNA, 19 nt, Artificial Sequence
  Description of Artificial Sequence: Synthetic oligonucleotide
cuccuucuaaggcaacucu

SEQ ID NO: 1298469 - RNA, 19 nt, Artificial Sequence
  Description of Artificial Sequence: Synthetic oligonucleotide
gaggcuuuucaaagagaua

SEQ ID NO: 1298470 - RNA, 19 nt, Artificial Sequence
  Description of Artificial Sequence: Synthetic oligonucleotide
caguacccgcgccagcguc

SEQ ID NO: 1298471 - RNA, 19 nt, Artificial Sequence
  Description of Artificial Sequence: Synthetic oligonucleotide
cccagucauugcuaggcuc

SEQ ID NO: 1298472 - RNA, 19 nt, Artificial Sequence
  Description of Artificial Sequence: Synthetic oligonucleotide
gguuagaaugagucauccu

SEQ ID NO: 1298473 - RNA, 19 nt, Artificial Sequence
  Description of Artificial Sequence: Synthetic oligonucleotide
ugucgcccuacggcaccgg

SEQ ID NO: 1298474 - RNA, 19 nt, Artificial Sequence
  Description of Artificial Sequence: Synthetic oligonucleotide
cuaugguauccugugugcu

SEQ ID NO: 1298475 - RNA, 19 nt, Artificial Sequence
  Description of Artificial Sequence: Synthetic oligonucleotide
gcuuaacgaggcuuuucaa

SEQ ID NO: 1298476 - RNA, 19 nt, Artificial Sequence
  Description of Artificial Sequence: Synthetic oligonucleotide
ccuucuaaggcaacucucu

SEQ ID NO: 1298477 - RNA, 19 nt, Artificial Sequence
  Description of Artificial Sequence: Synthetic oligonucleotide
gauguauuacugacuccuu

SEQ ID NO: 1298478 - RNA, 19 nt, Artificial Sequence
  Description of Artificial Sequence: Synthetic oligonucleotide
gcgaucguagagguucagc

SEQ ID NO: 1298479 - RNA, 19 nt, Artificial Sequence
  Description of Artificial Sequence: Synthetic oligonucleotide
gucaccucuguagaaucgu

SEQ ID NO: 1298480 - RNA, 19 nt, Artificial Sequence
  Description of Artificial Sequence: Synthetic oligonucleotide
ccggagucuaucugcggac

SEQ ID NO: 1298481 - RNA, 19 nt, Artificial Sequence
  Description of Artificial Sequence: Synthetic oligonucleotide
caguugaaacugcccugca

SEQ ID NO: 1298482 - RNA, 19 nt, Artificial Sequence
  Description of Artificial Sequence: Synthetic oligonucleotide
cgccaugucgcccuacggc

SEQ ID NO: 1298483 - RNA, 19 nt, Artificial Sequence
  Description of Artificial Sequence: Synthetic oligonucleotide
ggcacuccggaacuccgga

SEQ ID NO: 1298484 - RNA, 19 nt, Artificial Sequence
  Description of Artificial Sequence: Synthetic oligonucleotide
gcacuccggaacuccggag

SEQ ID NO: 1298485 - RNA, 19 nt, Artificial Sequence
  Description of Artificial Sequence: Synthetic oligonucleotide
uuaggccagugaguuuauu

SEQ ID NO: 1298486 - RNA, 19 nt, Artificial Sequence
  Description of Artificial Sequence: Synthetic oligonucleotide
gcaauugauaauaggcaau

SEQ ID NO: 1298487 - RNA, 19 nt, Artificial Sequence
  Description of Artificial Sequence: Synthetic oligonucleotide
cacuccggaacuccggagu

SEQ ID NO: 1298488 - RNA, 19 nt, Artificial Sequence
  Description of Artificial Sequence: Synthetic oligonucleotide
gcccaguaguaaauauccc

SEQ ID NO: 1298489 - RNA, 19 nt, Artificial Sequence
  Description of Artificial Sequence: Synthetic oligonucleotide
gcuuaggagaaggcaguuc

SEQ ID NO: 1298490 - RNA, 19 nt, Artificial Sequence
  Description of Artificial Sequence: Synthetic oligonucleotide
caccauguaugugcugaga

SEQ ID NO: 1298491 - RNA, 19 nt, Artificial Sequence
  Description of Artificial Sequence: Synthetic oligonucleotide
gcaccggaagcuggcaacc

SEQ ID NO: 1298492 - RNA, 19 nt, Artificial Sequence
  Description of Artificial Sequence: Synthetic oligonucleotide
ggcaacucucuugucuaca

SEQ ID NO: 1298493 - RNA, 19 nt, Artificial Sequence
  Description of Artificial Sequence: Synthetic oligonucleotide
cagaucuggggcacgcagu

SEQ ID NO: 1298494 - RNA, 19 nt, Artificial Sequence
  Description of Artificial Sequence: Synthetic oligonucleotide
acccgcgccagcgucggga

SEQ ID NO: 1298495 - RNA, 19 nt, Artificial Sequence
  Description of Artificial Sequence: Synthetic oligonucleotide
gagguaacugaaggcuggu

SEQ ID NO: 1298496 - RNA, 19 nt, Artificial Sequence
  Description of Artificial Sequence: Synthetic oligonucleotide
ucacaaccauggugcuaua

SEQ ID NO: 1298497 - RNA, 19 nt, Artificial Sequence
  Description of Artificial Sequence: Synthetic oligonucleotide
caggccuaaugucaccccu

SEQ ID NO: 1298498 - RNA, 19 nt, Artificial Sequence
  Description of Artificial Sequence: Synthetic oligonucleotide
ggcgugcucuuuugguuuc

SEQ ID NO: 1298499 - RNA, 19 nt, Artificial Sequence
  Description of Artificial Sequence: Synthetic oligonucleotide
cuucuaaggcaacucucuu

SEQ ID NO: 1298500 - RNA, 19 nt, Artificial Sequence
  Description of Artificial Sequence: Synthetic oligonucleotide
ccggcacuccggaacuccg

SEQ ID NO: 1298501 - RNA, 19 nt, Artificial Sequence
  Description of Artificial Sequence: Synthetic oligonucleotide
cuguugggcugucaccucu

SEQ ID NO: 1298502 - RNA, 19 nt, Artificial Sequence
  Description of Artificial Sequence: Synthetic oligonucleotide
gggcacgcagucucuguuc

SEQ ID NO: 1298503 - RNA, 19 nt, Artificial Sequence
  Description of Artificial Sequence: Synthetic oligonucleotide
cgaucguagagguucagcu

SEQ ID NO: 1298504 - RNA, 19 nt, Artificial Sequence
  Description of Artificial Sequence: Synthetic oligonucleotide
gcucuaagucucaggguga

SEQ ID NO: 1298505 - RNA, 19 nt, Artificial Sequence
  Description of Artificial Sequence: Synthetic oligonucleotide
ggcucauuaaucaggcgau

SEQ ID NO: 1298506 - RNA, 19 nt, Artificial Sequence
  Description of Artificial Sequence: Synthetic oligonucleotide
cacggcuuaacgaggcuuu

SEQ ID NO: 1298507 - RNA, 19 nt, Artificial Sequence
  Description of Artificial Sequence: Synthetic oligonucleotide
ccagguuagaaugagucau

SEQ ID NO: 1298508 - RNA, 19 nt, Artificial Sequence
  Description of Artificial Sequence: Synthetic oligonucleotide
aggcgaucguagagguuca

SEQ ID NO: 1298509 - RNA, 19 nt, Artificial Sequence
  Description of Artificial Sequence: Synthetic oligonucleotide
cgcccuacggcaccggaag

SEQ ID NO: 1298510 - RNA, 19 nt, Artificial Sequence
  Description of Artificial Sequence: Synthetic oligonucleotide
gccuaaugucaccccucug

SEQ ID NO: 1298511 - RNA, 19 nt, Artificial Sequence
  Description of Artificial Sequence: Synthetic oligonucleotide
gucgcccuacggcaccgga

SEQ ID NO: 1298512 - RNA, 19 nt, Artificial Sequence
  Description of Artificial Sequence: Synthetic oligonucleotide
cgaggcuuuucaaagagau

SEQ ID NO: 1298513 - RNA, 19 nt, Artificial Sequence
  Description of Artificial Sequence: Synthetic oligonucleotide
agucauugcuaggcucauu

SEQ ID NO: 1298514 - RNA, 19 nt, Artificial Sequence
  Description of Artificial Sequence: Synthetic oligonucleotide
uacccgcgccagcgucggg

SEQ ID NO: 1298515 - RNA, 19 nt, Artificial Sequence
  Description of Artificial Sequence: Synthetic oligonucleotide
gggugaggcuacaagcaaa

SEQ ID NO: 1298516 - RNA, 19 nt, Artificial Sequence
  Description of Artificial Sequence: Synthetic oligonucleotide
ccuacggcaccggaagcug

SEQ ID NO: 1298517 - RNA, 19 nt, Artificial Sequence
  Description of Artificial Sequence: Synthetic oligonucleotide
cauggaggcaaggggauuu

SEQ ID NO: 1298518 - RNA, 19 nt, Artificial Sequence
  Description of Artificial Sequence: Synthetic oligonucleotide
gcucauuaaucaggcgauc

SEQ ID NO: 1298519 - RNA, 19 nt, Artificial Sequence
  Description of Artificial Sequence: Synthetic oligonucleotide
cuacucuauaugucucauu

SEQ ID NO: 1298520 - RNA, 19 nt, Artificial Sequence
  Description of Artificial Sequence: Synthetic oligonucleotide
gacuugucaccaagguuuu

SEQ ID NO: 1298521 - RNA, 19 nt, Artificial Sequence
  Description of Artificial Sequence: Synthetic oligonucleotide
ggccuaaugucaccccucu

SEQ ID NO: 1298522 - RNA, 19 nt, Artificial Sequence
  Description of Artificial Sequence: Synthetic oligonucleotide
ggcugucaccucuguagaa

SEQ ID NO: 1298523 - RNA, 19 nt, Artificial Sequence
  Description of Artificial Sequence: Synthetic oligonucleotide
ccaaagcuuaggccaguga

SEQ ID NO: 1298524 - RNA, 19 nt, Artificial Sequence
  Description of Artificial Sequence: Synthetic oligonucleotide
acggcuuaacgaggcuuuu

SEQ ID NO: 1298525 - RNA, 19 nt, Artificial Sequence
  Description of Artificial Sequence: Synthetic oligonucleotide
ccugugcacuucuuaaagu

SEQ ID NO: 1298526 - RNA, 19 nt, Artificial Sequence
  Description of Artificial Sequence: Synthetic oligonucleotide
cugaagugauuaucaccuu

SEQ ID NO: 1298527 - RNA, 19 nt, Artificial Sequence
  Description of Artificial Sequence: Synthetic oligonucleotide
ccgccaugucgcccuacgg

SEQ ID NO: 1298528 - RNA, 19 nt, Artificial Sequence
  Description of Artificial Sequence: Synthetic oligonucleotide
cucauagaguaggcgugcu

SEQ ID NO: 1298529 - RNA, 19 nt, Artificial Sequence
  Description of Artificial Sequence: Synthetic oligonucleotide
caucccaguguuacauauu

SEQ ID NO: 1298530 - RNA, 19 nt, Artificial Sequence
  Description of Artificial Sequence: Synthetic oligonucleotide
ggcgaucguagagguucag

SEQ ID NO: 1298531 - RNA, 19 nt, Artificial Sequence
  Description of Artificial Sequence: Synthetic oligonucleotide
ccaucccaguguuacauau

SEQ ID NO: 1298532 - RNA, 19 nt, Artificial Sequence
  Description of Artificial Sequence: Synthetic oligonucleotide
cuuaggccagugaguuuau

SEQ ID NO: 1298533 - RNA, 19 nt, Artificial Sequence
  Description of Artificial Sequence: Synthetic oligonucleotide
ccagcgucgggaucaaggu

SEQ ID NO: 1298534 - RNA, 19 nt, Artificial Sequence
  Description of Artificial Sequence: Synthetic oligonucleotide
cacuggcuggcaaggcacu

SEQ ID NO: 1298535 - RNA, 19 nt, Artificial Sequence
  Description of Artificial Sequence: Synthetic oligonucleotide
cugucaugcugugcagaua

SEQ ID NO: 1298536 - RNA, 19 nt, Artificial Sequence
  Description of Artificial Sequence: Synthetic oligonucleotide
gucucagggugaggcuaca

SEQ ID NO: 1298537 - RNA, 19 nt, Artificial Sequence
  Description of Artificial Sequence: Synthetic oligonucleotide
cccugccuguuuagcacuc

SEQ ID NO: 1298538 - RNA, 19 nt, Artificial Sequence
  Description of Artificial Sequence: Synthetic oligonucleotide
cggcacuccggaacuccgg

SEQ ID NO: 1298539 - RNA, 19 nt, Artificial Sequence
  Description of Artificial Sequence: Synthetic oligonucleotide
cacacggcuuaacgaggcu

SEQ ID NO: 1298540 - RNA, 19 nt, Artificial Sequence
  Description of Artificial Sequence: Synthetic oligonucleotide
ggagucuaucugcggacuu

SEQ ID NO: 1298541 - RNA, 19 nt, Artificial Sequence
  Description of Artificial Sequence: Synthetic oligonucleotide
cggaacuccggagucuauc

SEQ ID NO: 1298542 - RNA, 19 nt, Artificial Sequence
  Description of Artificial Sequence: Synthetic oligonucleotide
caauuccugugcacuucuu

SEQ ID NO: 1298543 - RNA, 19 nt, Artificial Sequence
  Description of Artificial Sequence: Synthetic oligonucleotide
gcgucgggaucaaggugac

SEQ ID NO: 1298544 - RNA, 19 nt, Artificial Sequence
  Description of Artificial Sequence: Synthetic oligonucleotide
caccgccaugucgcccuac

SEQ ID NO: 1298545 - RNA, 19 nt, Artificial Sequence
  Description of Artificial Sequence: Synthetic oligonucleotide
ggggcacgcagucucuguu

SEQ ID NO: 1298546 - RNA, 19 nt, Artificial Sequence
  Description of Artificial Sequence: Synthetic oligonucleotide
cagucauugcuaggcucau

SEQ ID NO: 1298547 - RNA, 19 nt, Artificial Sequence
  Description of Artificial Sequence: Synthetic oligonucleotide
cggcuuaacgaggcuuuuc

SEQ ID NO: 1298548 - RNA, 19 nt, Artificial Sequence
  Description of Artificial Sequence: Synthetic oligonucleotide
cccuacggcaccggaagcu

SEQ ID NO: 1298549 - RNA, 19 nt, Artificial Sequence
  Description of Artificial Sequence: Synthetic oligonucleotide
cgucgggaucaaggugacc

SEQ ID NO: 1298550 - RNA, 19 nt, Artificial Sequence
  Description of Artificial Sequence: Synthetic oligonucleotide
gcgugcucuuuugguuucu

SEQ ID NO: 1298551 - RNA, 19 nt, Artificial Sequence
  Description of Artificial Sequence: Synthetic oligonucleotide
cggagucuaucugcggacu

SEQ ID NO: 1298552 - RNA, 19 nt, Artificial Sequence
  Description of Artificial Sequence: Synthetic oligonucleotide
ccgcgccagcgucgggauc

SEQ ID NO: 1298553 - RNA, 19 nt, Artificial Sequence
  Description of Artificial Sequence: Synthetic oligonucleotide
ccggaacuccggagucuau

SEQ ID NO: 1298554 - RNA, 19 nt, Artificial Sequence
  Description of Artificial Sequence: Synthetic oligonucleotide
gcgccagcgucgggaucaa

SEQ ID NO: 1298555 - RNA, 19 nt, Artificial Sequence
  Description of Artificial Sequence: Synthetic oligonucleotide
uacaauauugcacagaacu

SEQ ID NO: 1298556 - RNA, 19 nt, Artificial Sequence
  Description of Artificial Sequence: Synthetic oligonucleotide
agcucuaugaauucugagc

SEQ ID NO: 1298557 - RNA, 19 nt, Artificial Sequence
  Description of Artificial Sequence: Synthetic oligonucleotide
aaguauccuaucccgaagc

SEQ ID NO: 1298558 - RNA, 19 nt, Artificial Sequence
  Description of Artificial Sequence: Synthetic oligonucleotide
uggagaaggauaaauaaug

SEQ ID NO: 1298559 - RNA, 19 nt, Artificial Sequence
  Description of Artificial Sequence: Synthetic oligonucleotide
aauaaugcugccacaauuc

SEQ ID NO: 1298560 - RNA, 19 nt, Artificial Sequence
  Description of Artificial Sequence: Synthetic oligonucleotide
uauugcacagaacuguaag

SEQ ID NO: 1298561 - RNA, 19 nt, Artificial Sequence
  Description of Artificial Sequence: Synthetic oligonucleotide
uuugacaguggcaacagcu

SEQ ID NO: 1298562 - RNA, 19 nt, Artificial Sequence
  Description of Artificial Sequence: Synthetic oligonucleotide
aaaguaggacuauuugcag

SEQ ID NO: 1298563 - RNA, 19 nt, Artificial Sequence
  Description of Artificial Sequence: Synthetic oligonucleotide
acauuaggcaaccagguca

SEQ ID NO: 1298564 - RNA, 19 nt, Artificial Sequence
  Description of Artificial Sequence: Synthetic oligonucleotide
ugauacaggaauagcagcu

SEQ ID NO: 1298565 - RNA, 19 nt, Artificial Sequence
  Description of Artificial Sequence: Synthetic oligonucleotide
uuccuuagacuguagaagc

SEQ ID NO: 1298566 - RNA, 19 nt, Artificial Sequence
  Description of Artificial Sequence: Synthetic oligonucleotide
aguaggacuauuugcagug

SEQ ID NO: 1298567 - RNA, 19 nt, Artificial Sequence
  Description of Artificial Sequence: Synthetic oligonucleotide
auacaggaauagcagcugc

SEQ ID NO: 1298568 - RNA, 19 nt, Artificial Sequence
  Description of Artificial Sequence: Synthetic oligonucleotide
acugcucagaaugagagag

SEQ ID NO: 1298569 - RNA, 19 nt, Artificial Sequence
  Description of Artificial Sequence: Synthetic oligonucleotide
gagcaaguauccuaucccg

SEQ ID NO: 1298570 - RNA, 19 nt, Artificial Sequence
  Description of Artificial Sequence: Synthetic oligonucleotide
aaaugauguagugaaggca

SEQ ID NO: 1298571 - RNA, 19 nt, Artificial Sequence
  Description of Artificial Sequence: Synthetic oligonucleotide
caaaguaggacuauuugca

SEQ ID NO: 1298572 - RNA, 19 nt, Artificial Sequence
  Description of Artificial Sequence: Synthetic oligonucleotide
ugcaagaggggcucgauca

SEQ ID NO: 1298573 - RNA, 19 nt, Artificial Sequence
  Description of Artificial Sequence: Synthetic oligonucleotide
cuucucuacaauauugcac

SEQ ID NO: 1298574 - RNA, 19 nt, Artificial Sequence
  Description of Artificial Sequence: Synthetic oligonucleotide
ugggauaaauagaccacag

SEQ ID NO: 1298575 - RNA, 19 nt, Artificial Sequence
  Description of Artificial Sequence: Synthetic oligonucleotide
aaguaggacuauuugcagu

SEQ ID NO: 1298576 - RNA, 19 nt, Artificial Sequence
  Description of Artificial Sequence: Synthetic oligonucleotide
uacugagacggccuugccg

SEQ ID NO: 1298577 - RNA, 19 nt, Artificial Sequence
  Description of Artificial Sequence: Synthetic oligonucleotide
ugacauuaggcaaccaggu

SEQ ID NO: 1298578 - RNA, 19 nt, Artificial Sequence
  Description of Artificial Sequence: Synthetic oligonucleotide
agaacuguaaguaccagca

SEQ ID NO: 1298579 - RNA, 19 nt, Artificial Sequence
  Description of Artificial Sequence: Synthetic oligonucleotide
uggccuacuacuucaaugu

SEQ ID NO: 1298580 - RNA, 19 nt, Artificial Sequence
  Description of Artificial Sequence: Synthetic oligonucleotide
ucccuuagcagccucuugc

SEQ ID NO: 1298581 - RNA, 19 nt, Artificial Sequence
  Description of Artificial Sequence: Synthetic oligonucleotide
agcauagcauuguugaccu

SEQ ID NO: 1298582 - RNA, 19 nt, Artificial Sequence
  Description of Artificial Sequence: Synthetic oligonucleotide
uagaccacagggguuaggg

SEQ ID NO: 1298583 - RNA, 19 nt, Artificial Sequence
  Description of Artificial Sequence: Synthetic oligonucleotide
ugagagagcucauguaggc

SEQ ID NO: 1298584 - RNA, 19 nt, Artificial Sequence
  Description of Artificial Sequence: Synthetic oligonucleotide
caugcaaguagcucuaguc

SEQ ID NO: 1298585 - RNA, 19 nt, Artificial Sequence
  Description of Artificial Sequence: Synthetic oligonucleotide
caagccucgacgaaggcug

SEQ ID NO: 1298586 - RNA, 19 nt, Artificial Sequence
  Description of Artificial Sequence: Synthetic oligonucleotide
auccagagaaagcaaggag

SEQ ID NO: 1298587 - RNA, 19 nt, Artificial Sequence
  Description of Artificial Sequence: Synthetic oligonucleotide
cucuccacgauaagguucc

SEQ ID NO: 1298588 - RNA, 19 nt, Artificial Sequence
  Description of Artificial Sequence: Synthetic oligonucleotide
uccaugaauagcugucugc

SEQ ID NO: 1298589 - RNA, 19 nt, Artificial Sequence
  Description of Artificial Sequence: Synthetic oligonucleotide
uccugaugccuuucuaggg

SEQ ID NO: 1298590 - RNA, 19 nt, Artificial Sequence
  Description of Artificial Sequence: Synthetic oligonucleotide
ucauguaggcaccgagccg

SEQ ID NO: 1298591 - RNA, 19 nt, Artificial Sequence
  Description of Artificial Sequence: Synthetic oligonucleotide
acugcuguaccucggcuuc

SEQ ID NO: 1298592 - RNA, 19 nt, Artificial Sequence
  Description of Artificial Sequence: Synthetic oligonucleotide
aaauagaccacagggguua

SEQ ID NO: 1298593 - RNA, 19 nt, Artificial Sequence
  Description of Artificial Sequence: Synthetic oligonucleotide
ggagguaagaaguggcugg

SEQ ID NO: 1298594 - RNA, 19 nt, Artificial Sequence
  Description of Artificial Sequence: Synthetic oligonucleotide
auugcacagaacuguaagu

SEQ ID NO: 1298595 - RNA, 19 nt, Artificial Sequence
  Description of Artificial Sequence: Synthetic oligonucleotide
cacagcaaccccaagguuc

SEQ ID NO: 1298596 - RNA, 19 nt, Artificial Sequence
  Description of Artificial Sequence: Synthetic oligonucleotide
agagagaaccaguguauug

SEQ ID NO: 1298597 - RNA, 19 nt, Artificial Sequence
  Description of Artificial Sequence: Synthetic oligonucleotide
caggcaccgaaacacaggg

SEQ ID NO: 1298598 - RNA, 19 nt, Artificial Sequence
  Description of Artificial Sequence: Synthetic oligonucleotide
ggugcugcaagccucgacg

SEQ ID NO: 1298599 - RNA, 19 nt, Artificial Sequence
  Description of Artificial Sequence: Synthetic oligonucleotide
cauguaggcaccgagccgc

SEQ ID NO: 1298600 - RNA, 19 nt, Artificial Sequence
  Description of Artificial Sequence: Synthetic oligonucleotide
agagaaccaguguauugag

SEQ ID NO: 1298601 - RNA, 19 nt, Artificial Sequence
  Description of Artificial Sequence: Synthetic oligonucleotide
augcaggcaaccaaggccg

SEQ ID NO: 1298602 - RNA, 19 nt, Artificial Sequence
  Description of Artificial Sequence: Synthetic oligonucleotide
cuccugaugccuuucuagg

SEQ ID NO: 1298603 - RNA, 19 nt, Artificial Sequence
  Description of Artificial Sequence: Synthetic oligonucleotide
aagcuggacccuucucuac

SEQ ID NO: 1298604 - RNA, 19 nt, Artificial Sequence
  Description of Artificial Sequence: Synthetic oligonucleotide
caacagguugcucaggcac

SEQ ID NO: 1298605 - RNA, 19 nt, Artificial Sequence
  Description of Artificial Sequence: Synthetic oligonucleotide
gauaagguuccccagugua

SEQ ID NO: 1298606 - RNA, 19 nt, Artificial Sequence
  Description of Artificial Sequence: Synthetic oligonucleotide
ugccaacguaggcagagcc

SEQ ID NO: 1298607 - RNA, 19 nt, Artificial Sequence
  Description of Artificial Sequence: Synthetic oligonucleotide
ucuagggccugcaacccug

SEQ ID NO: 1298608 - RNA, 19 nt, Artificial Sequence
  Description of Artificial Sequence: Synthetic oligonucleotide
ugggacaaggcauauccaa

SEQ ID NO: 1298609 - RNA, 19 nt, Artificial Sequence
  Description of Artificial Sequence: Synthetic oligonucleotide
ugggagagaagcauagcau

SEQ ID NO: 1298610 - RNA, 19 nt, Artificial Sequence
  Description of Artificial Sequence: Synthetic oligonucleotide
ucggcuuccccaaggagca

SEQ ID NO: 1298611 - RNA, 19 nt, Artificial Sequence
  Description of Artificial Sequence: Synthetic oligonucleotide
agucccgcaucauccauuc

SEQ ID NO: 1298612 - RNA, 19 nt, Artificial Sequence
  Description of Artificial Sequence: Synthetic oligonucleotide
ggcucgaucagauccagag

SEQ ID NO: 1298613 - RNA, 19 nt, Artificial Sequence
  Description of Artificial Sequence: Synthetic oligonucleotide
cuggccuacuacuucaaug

SEQ ID NO: 1298614 - RNA, 19 nt, Artificial Sequence
  Description of Artificial Sequence: Synthetic oligonucleotide
gguuugcuguguuucaggg

SEQ ID NO: 1298615 - RNA, 19 nt, Artificial Sequence
  Description of Artificial Sequence: Synthetic oligonucleotide
cacgccagcguacugagac

SEQ ID NO: 1298616 - RNA, 19 nt, Artificial Sequence
  Description of Artificial Sequence: Synthetic oligonucleotide
uaaauagaccacagggguu

SEQ ID NO: 1298617 - RNA, 19 nt, Artificial Sequence
  Description of Artificial Sequence: Synthetic oligonucleotide
acgauaagguuccccagug

SEQ ID NO: 1298618 - RNA, 19 nt, Artificial Sequence
  Description of Artificial Sequence: Synthetic oligonucleotide
ucagucguagcaugugcug

SEQ ID NO: 1298619 - RNA, 19 nt, Artificial Sequence
  Description of Artificial Sequence: Synthetic oligonucleotide
ucucuacaauauugcacag

SEQ ID NO: 1298620 - RNA, 19 nt, Artificial Sequence
  Description of Artificial Sequence: Synthetic oligonucleotide
ccuacuacuucaaugucag

SEQ ID NO: 1298621 - RNA, 19 nt, Artificial Sequence
  Description of Artificial Sequence: Synthetic oligonucleotide
aguaagcuggacccuucuc

SEQ ID NO: 1298622 - RNA, 19 nt, Artificial Sequence
  Description of Artificial Sequence: Synthetic oligonucleotide
cucgaucagauccagagaa

SEQ ID NO: 1298623 - RNA, 19 nt, Artificial Sequence
  Description of Artificial Sequence: Synthetic oligonucleotide
uacuucaaugucagagaga

SEQ ID NO: 1298624 - RNA, 19 nt, Artificial Sequence
  Description of Artificial Sequence: Synthetic oligonucleotide
ugaauagcugucugcugga

SEQ ID NO: 1298625 - RNA, 19 nt, Artificial Sequence
  Description of Artificial Sequence: Synthetic oligonucleotide
augagagagcucauguagg

SEQ ID NO: 1298626 - RNA, 19 nt, Artificial Sequence
  Description of Artificial Sequence: Synthetic oligonucleotide
ugggcuagccgaaggaacu

SEQ ID NO: 1298627 - RNA, 19 nt, Artificial Sequence
  Description of Artificial Sequence: Synthetic oligonucleotide
gggccugcaacccugauug

SEQ ID NO: 1298628 - RNA, 19 nt, Artificial Sequence
  Description of Artificial Sequence: Synthetic oligonucleotide
ggugggcuguuucugaagg

SEQ ID NO: 1298629 - RNA, 19 nt, Artificial Sequence
  Description of Artificial Sequence: Synthetic oligonucleotide
agcucauguaggcaccgag

SEQ ID NO: 1298630 - RNA, 19 nt, Artificial Sequence
  Description of Artificial Sequence: Synthetic oligonucleotide
acaaccgcuggcaguaagc

SEQ ID NO: 1298631 - RNA, 19 nt, Artificial Sequence
  Description of Artificial Sequence: Synthetic oligonucleotide
caaguauccuaucccgaag

SEQ ID NO: 1298632 - RNA, 19 nt, Artificial Sequence
  Description of Artificial Sequence: Synthetic oligonucleotide
accaguguauugagcaggc

SEQ ID NO: 1298633 - RNA, 19 nt, Artificial Sequence
  Description of Artificial Sequence: Synthetic oligonucleotide
accgaaacacagggcaugc

SEQ ID NO: 1298634 - RNA, 19 nt, Artificial Sequence
  Description of Artificial Sequence: Synthetic oligonucleotide
gugaggagguaagaagugg

SEQ ID NO: 1298635 - RNA, 19 nt, Artificial Sequence
  Description of Artificial Sequence: Synthetic oligonucleotide
uuccccaaggagcacggcu

SEQ ID NO: 1298636 - RNA, 19 nt, Artificial Sequence
  Description of Artificial Sequence: Synthetic oligonucleotide
ucgacgaaggcugaccaga

SEQ ID NO: 1298637 - RNA, 19 nt, Artificial Sequence
  Description of Artificial Sequence: Synthetic oligonucleotide
aacugcuguaccucggcuu

SEQ ID NO: 1298638 - RNA, 19 nt, Artificial Sequence
  Description of Artificial Sequence: Synthetic oligonucleotide
uccccguugggcuagccga

SEQ ID NO: 1298639 - RNA, 19 nt, Artificial Sequence
  Description of Artificial Sequence: Synthetic oligonucleotide
aaggccggaacaaugcccu

SEQ ID NO: 1298640 - RNA, 19 nt, Artificial Sequence
  Description of Artificial Sequence: Synthetic oligonucleotide
ucuagucccgcaucaucca

SEQ ID NO: 1298641 - RNA, 19 nt, Artificial Sequence
  Description of Artificial Sequence: Synthetic oligonucleotide
guuucagggugcugcaagc

SEQ ID NO: 1298642 - RNA, 19 nt, Artificial Sequence
  Description of Artificial Sequence: Synthetic oligonucleotide
uuccccguugggcuagccg

SEQ ID NO: 1298643 - RNA, 19 nt, Artificial Sequence
  Description of Artificial Sequence: Synthetic oligonucleotide
aacccugauugcugcagga

SEQ ID NO: 1298644 - RNA, 19 nt, Artificial Sequence
  Description of Artificial Sequence: Synthetic oligonucleotide
acucuggccuacuacuuca

SEQ ID NO: 1298645 - RNA, 19 nt, Artificial Sequence
  Description of Artificial Sequence: Synthetic oligonucleotide
agaggggaugaucuucucu

SEQ ID NO: 1298646 - RNA, 19 nt, Artificial Sequence
  Description of Artificial Sequence: Synthetic oligonucleotide
uugcaucagucguagcaug

SEQ ID NO: 1298647 - RNA, 19 nt, Artificial Sequence
  Description of Artificial Sequence: Synthetic oligonucleotide
gacauuaggcaaccagguc

SEQ ID NO: 1298648 - RNA, 19 nt, Artificial Sequence
  Description of Artificial Sequence: Synthetic oligonucleotide
aggggugacauuaggcaac

SEQ ID NO: 1298649 - RNA, 19 nt, Artificial Sequence
  Description of Artificial Sequence: Synthetic oligonucleotide
caugaauagcugucugcug

SEQ ID NO: 1298650 - RNA, 19 nt, Artificial Sequence
  Description of Artificial Sequence: Synthetic oligonucleotide
gaggggacuggaugcaggc

SEQ ID NO: 1298651 - RNA, 19 nt, Artificial Sequence
  Description of Artificial Sequence: Synthetic oligonucleotide
agaccacagggguuagggg

SEQ ID NO: 1298652 - RNA, 19 nt, Artificial Sequence
  Description of Artificial Sequence: Synthetic oligonucleotide
cuggcugauacaggaauag

SEQ ID NO: 1298653 - RNA, 19 nt, Artificial Sequence
  Description of Artificial Sequence: Synthetic oligonucleotide
ucgucucugagcuccauuu

SEQ ID NO: 1298654 - RNA, 19 nt, Artificial Sequence
  Description of Artificial Sequence: Synthetic oligonucleotide
ggcaccgaaacacagggca

SEQ ID NO: 1298655 - RNA, 19 nt, Artificial Sequence
  Description of Artificial Sequence: Synthetic oligonucleotide
uuucuagggccugcaaccc

SEQ ID NO: 1298656 - RNA, 19 nt, Artificial Sequence
  Description of Artificial Sequence: Synthetic oligonucleotide
agcaaccccaagguucagc

SEQ ID NO: 1298657 - RNA, 19 nt, Artificial Sequence
  Description of Artificial Sequence: Synthetic oligonucleotide
auaaagguuugcuguguuu

SEQ ID NO: 1298658 - RNA, 19 nt, Artificial Sequence
  Description of Artificial Sequence: Synthetic oligonucleotide
aguagcucuagucccgcau

SEQ ID NO: 1298659 - RNA, 19 nt, Artificial Sequence
  Description of Artificial Sequence: Synthetic oligonucleotide
caaggagguacacaaagua

SEQ ID NO: 1298660 - RNA, 19 nt, Artificial Sequence
  Description of Artificial Sequence: Synthetic oligonucleotide
ucgcucgucucugagcucc

SEQ ID NO: 1298661 - RNA, 19 nt, Artificial Sequence
  Description of Artificial Sequence: Synthetic oligonucleotide
aggagguaagaaguggcug

SEQ ID NO: 1298662 - RNA, 19 nt, Artificial Sequence
  Description of Artificial Sequence: Synthetic oligonucleotide
agucguagcaugugcugga

SEQ ID NO: 1298663 - RNA, 19 nt, Artificial Sequence
  Description of Artificial Sequence: Synthetic oligonucleotide
ugccacaauucgcucgucu

SEQ ID NO: 1298664 - RNA, 19 nt, Artificial Sequence
  Description of Artificial Sequence: Synthetic oligonucleotide
cugaccaacugcugcuccc

SEQ ID NO: 1298665 - RNA, 19 nt, Artificial Sequence
  Description of Artificial Sequence: Synthetic oligonucleotide
acagguugcucaggcaccg

SEQ ID NO: 1298666 - RNA, 19 nt, Artificial Sequence
  Description of Artificial Sequence: Synthetic oligonucleotide
uggacccuucucuacaaua

SEQ ID NO: 1298667 - RNA, 19 nt, Artificial Sequence
  Description of Artificial Sequence: Synthetic oligonucleotide
cagucguagcaugugcugg

SEQ ID NO: 1298668 - RNA, 19 nt, Artificial Sequence
  Description of Artificial Sequence: Synthetic oligonucleotide
caaggguccgcaugcugcc

SEQ ID NO: 1298669 - RNA, 19 nt, Artificial Sequence
  Description of Artificial Sequence: Synthetic oligonucleotide
guugcuggucaggagcccg

SEQ ID NO: 1298670 - RNA, 19 nt, Artificial Sequence
  Description of Artificial Sequence: Synthetic oligonucleotide
aggcauauccaagggcuuc

SEQ ID NO: 1298671 - RNA, 19 nt, Artificial Sequence
  Description of Artificial Sequence: Synthetic oligonucleotide
ucgaucagauccagagaaa

SEQ ID NO: 1298672 - RNA, 19 nt, Artificial Sequence
  Description of Artificial Sequence: Synthetic oligonucleotide
caaacucuggccuacuacu

SEQ ID NO: 1298673 - RNA, 19 nt, Artificial Sequence
  Description of Artificial Sequence: Synthetic oligonucleotide
cuagccgaaggaacugcug

SEQ ID NO: 1298674 - RNA, 19 nt, Artificial Sequence
  Description of Artificial Sequence: Synthetic oligonucleotide
gcuggcaguaagcuggacc

SEQ ID NO: 1298675 - RNA, 19 nt, Artificial Sequence
  Description of Artificial Sequence: Synthetic oligonucleotide
cugguugcaucagucguag

SEQ ID NO: 1298676 - RNA, 19 nt, Artificial Sequence
  Description of Artificial Sequence: Synthetic oligonucleotide
aaggguccgcaugcugccc

SEQ ID NO: 1298677 - RNA, 19 nt, Artificial Sequence
  Description of Artificial Sequence: Synthetic oligonucleotide
caauucgcucgucucugag

SEQ ID NO: 1298678 - RNA, 19 nt, Artificial Sequence
  Description of Artificial Sequence: Synthetic oligonucleotide
agagcucauguaggcaccg

SEQ ID NO: 1298679 - RNA, 19 nt, Artificial Sequence
  Description of Artificial Sequence: Synthetic oligonucleotide
cugcucagaaugagagagc

SEQ ID NO: 1298680 - RNA, 19 nt, Artificial Sequence
  Description of Artificial Sequence: Synthetic oligonucleotide
guugaccuggcugcaaaug

SEQ ID NO: 1298681 - RNA, 19 nt, Artificial Sequence
  Description of Artificial Sequence: Synthetic oligonucleotide
ugcaggcaaccaaggccgg

SEQ ID NO: 1298682 - RNA, 19 nt, Artificial Sequence
  Description of Artificial Sequence: Synthetic oligonucleotide
guguauacagacacagcuc

SEQ ID NO: 1298683 - RNA, 19 nt, Artificial Sequence
  Description of Artificial Sequence: Synthetic oligonucleotide
ccugaugccuuucuagggc

SEQ ID NO: 1298684 - RNA, 19 nt, Artificial Sequence
  Description of Artificial Sequence: Synthetic oligonucleotide
cacaauucgcucgucucug

SEQ ID NO: 1298685 - RNA, 19 nt, Artificial Sequence
  Description of Artificial Sequence: Synthetic oligonucleotide
agccugauaaagguuugcu

SEQ ID NO: 1298686 - RNA, 19 nt, Artificial Sequence
  Description of Artificial Sequence: Synthetic oligonucleotide
agagaggggaugaucuucu

SEQ ID NO: 1298687 - RNA, 19 nt, Artificial Sequence
  Description of Artificial Sequence: Synthetic oligonucleotide
auacccugggauaaauaga

SEQ ID NO: 1298688 - RNA, 19 nt, Artificial Sequence
  Description of Artificial Sequence: Synthetic oligonucleotide
caggagcccgacaaggguc

SEQ ID NO: 1298689 - RNA, 19 nt, Artificial Sequence
  Description of Artificial Sequence: Synthetic oligonucleotide
uggcugauacaggaauagc

SEQ ID NO: 1298690 - RNA, 19 nt, Artificial Sequence
  Description of Artificial Sequence: Synthetic oligonucleotide
guagcucuagucccgcauc

SEQ ID NO: 1298691 - RNA, 19 nt, Artificial Sequence
  Description of Artificial Sequence: Synthetic oligonucleotide
gagagcucauguaggcacc

SEQ ID NO: 1298692 - RNA, 19 nt, Artificial Sequence
  Description of Artificial Sequence: Synthetic oligonucleotide
cugggauaaauagaccaca

SEQ ID NO: 1298693 - RNA, 19 nt, Artificial Sequence
  Description of Artificial Sequence: Synthetic oligonucleotide
aucagucguagcaugugcu

SEQ ID NO: 1298694 - RNA, 19 nt, Artificial Sequence
  Description of Artificial Sequence: Synthetic oligonucleotide
agcacacuuaucacauuug

SEQ ID NO: 1298695 - RNA, 19 nt, Artificial Sequence
  Description of Artificial Sequence: Synthetic oligonucleotide
caacagcugcaagaggggc

SEQ ID NO: 1298696 - RNA, 19 nt, Artificial Sequence
  Description of Artificial Sequence: Synthetic oligonucleotide
caccgcagcuccuccaccc

SEQ ID NO: 1298697 - RNA, 19 nt, Artificial Sequence
  Description of Artificial Sequence: Synthetic oligonucleotide
ugagacggccuugccgccg

SEQ ID NO: 1298698 - RNA, 19 nt, Artificial Sequence
  Description of Artificial Sequence: Synthetic oligonucleotide
acgccagcguacugagacg

SEQ ID NO: 1298699 - RNA, 19 nt, Artificial Sequence
  Description of Artificial Sequence: Synthetic oligonucleotide
ucuggccuacuacuucaau

SEQ ID NO: 1298700 - RNA, 19 nt, Artificial Sequence
  Description of Artificial Sequence: Synthetic oligonucleotide
cucgacgaaggcugaccag

SEQ ID NO: 1298701 - RNA, 19 nt, Artificial Sequence
  Description of Artificial Sequence: Synthetic oligonucleotide
auaagguuccccaguguau

SEQ ID NO: 1298702 - RNA, 19 nt, Artificial Sequence
  Description of Artificial Sequence: Synthetic oligonucleotide
ggaacugcuguaccucggc

SEQ ID NO: 1298703 - RNA, 19 nt, Artificial Sequence
  Description of Artificial Sequence: Synthetic oligonucleotide
ccaacguaggcagagcccc

SEQ ID NO: 1298704 - RNA, 19 nt, Artificial Sequence
  Description of Artificial Sequence: Synthetic oligonucleotide
guaggugaggagguaagaa

SEQ ID NO: 1298705 - RNA, 19 nt, Artificial Sequence
  Description of Artificial Sequence: Synthetic oligonucleotide
gugaccagagagguaggug

SEQ ID NO: 1298706 - RNA, 19 nt, Artificial Sequence
  Description of Artificial Sequence: Synthetic oligonucleotide
cacggcugcacucugaccu

SEQ ID NO: 1298707 - RNA, 19 nt, Artificial Sequence
  Description of Artificial Sequence: Synthetic oligonucleotide
ugaccaacugcugcucccu

SEQ ID NO: 1298708 - RNA, 19 nt, Artificial Sequence
  Description of Artificial Sequence: Synthetic oligonucleotide
gggacaaggcauauccaag

SEQ ID NO: 1298709 - RNA, 19 nt, Artificial Sequence
  Description of Artificial Sequence: Synthetic oligonucleotide
cuggagaaggauaaauaau

SEQ ID NO: 1298710 - RNA, 19 nt, Artificial Sequence
  Description of Artificial Sequence: Synthetic oligonucleotide
gagagagcucauguaggca

SEQ ID NO: 1298711 - RNA, 19 nt, Artificial Sequence
  Description of Artificial Sequence: Synthetic oligonucleotide
ggcacuucagucaacaggu

SEQ ID NO: 1298712 - RNA, 19 nt, Artificial Sequence
  Description of Artificial Sequence: Synthetic oligonucleotide
cacaaccgcuggcaguaag

SEQ ID NO: 1298713 - RNA, 19 nt, Artificial Sequence
  Description of Artificial Sequence: Synthetic oligonucleotide
caccgaaacacagggcaug

SEQ ID NO: 1298714 - RNA, 19 nt, Artificial Sequence
  Description of Artificial Sequence: Synthetic oligonucleotide
ccgacaaggguccgcaugc

SEQ ID NO: 1298715 - RNA, 19 nt, Artificial Sequence
  Description of Artificial Sequence: Synthetic oligonucleotide
ugcugcaagccucgacgaa

SEQ ID NO: 1298716 - RNA, 19 nt, Artificial Sequence
  Description of Artificial Sequence: Synthetic oligonucleotide
ccgguugcuggucaggagc

SEQ ID NO: 1298717 - RNA, 19 nt, Artificial Sequence
  Description of Artificial Sequence: Synthetic oligonucleotide
cggaacaaugcccuguggc

SEQ ID NO: 1298718 - RNA, 19 nt, Artificial Sequence
  Description of Artificial Sequence: Synthetic oligonucleotide
uggauacccugggauaaau

SEQ ID NO: 1298719 - RNA, 19 nt, Artificial Sequence
  Description of Artificial Sequence: Synthetic oligonucleotide
auauugcacagaacuguaa

SEQ ID NO: 1298720 - RNA, 19 nt, Artificial Sequence
  Description of Artificial Sequence: Synthetic oligonucleotide
ccugcaacccugauugcug

SEQ ID NO: 1298721 - RNA, 19 nt, Artificial Sequence
  Description of Artificial Sequence: Synthetic oligonucleotide
uuccgcacgggcucgccuc

SEQ ID NO: 1298722 - RNA, 19 nt, Artificial Sequence
  Description of Artificial Sequence: Synthetic oligonucleotide
uccuccugaugccuuucua

SEQ ID NO: 1298723 - RNA, 19 nt, Artificial Sequence
  Description of Artificial Sequence: Synthetic oligonucleotide
aacguaggcagagccccau

SEQ ID NO: 1298724 - RNA, 19 nt, Artificial Sequence
  Description of Artificial Sequence: Synthetic oligonucleotide
guaggcaccgagccgccuc

SEQ ID NO: 1298725 - RNA, 19 nt, Artificial Sequence
  Description of Artificial Sequence: Synthetic oligonucleotide
cuccacgauaagguucccc

SEQ ID NO: 1298726 - RNA, 19 nt, Artificial Sequence
  Description of Artificial Sequence: Synthetic oligonucleotide
ggagguacacaaaguagga

SEQ ID NO: 1298727 - RNA, 19 nt, Artificial Sequence
  Description of Artificial Sequence: Synthetic oligonucleotide
uuccggggcaucuucccuu

SEQ ID NO: 1298728 - RNA, 19 nt, Artificial Sequence
  Description of Artificial Sequence: Synthetic oligonucleotide
aggagcacggcugcacucu

SEQ ID NO: 1298729 - RNA, 19 nt, Artificial Sequence
  Description of Artificial Sequence: Synthetic oligonucleotide
augaggggacuggaugcag

SEQ ID NO: 1298730 - RNA, 19 nt, Artificial Sequence
  Description of Artificial Sequence: Synthetic oligonucleotide
uccgcacgggcucgccucc

SEQ ID NO: 1298731 - RNA, 19 nt, Artificial Sequence
  Description of Artificial Sequence: Synthetic oligonucleotide
aggguccgcaugcugcccu

SEQ ID NO: 1298732 - RNA, 19 nt, Artificial Sequence
  Description of Artificial Sequence: Synthetic oligonucleotide
gcaccgagccgccucaagc

SEQ ID NO: 1298733 - RNA, 19 nt, Artificial Sequence
  Description of Artificial Sequence: Synthetic oligonucleotide
cuguaccucggcuucccca

SEQ ID NO: 1298734 - RNA, 19 nt, Artificial Sequence
  Description of Artificial Sequence: Synthetic oligonucleotide
gggcaucuucccuuagcag

SEQ ID NO: 1298735 - RNA, 19 nt, Artificial Sequence
  Description of Artificial Sequence: Synthetic oligonucleotide
auuaggcaaccaggucauc

SEQ ID NO: 1298736 - RNA, 19 nt, Artificial Sequence
  Description of Artificial Sequence: Synthetic oligonucleotide
cauuaggcaaccaggucau

SEQ ID NO: 1298737 - RNA, 19 nt, Artificial Sequence
  Description of Artificial Sequence: Synthetic oligonucleotide
auguaggcaccgagccgcc

SEQ ID NO: 1298738 - RNA, 19 nt, Artificial Sequence
  Description of Artificial Sequence: Synthetic oligonucleotide
guacugagacggccuugcc

SEQ ID NO: 1298739 - RNA, 19 nt, Artificial Sequence
  Description of Artificial Sequence: Synthetic oligonucleotide
gugcugcaagccucgacga

SEQ ID NO: 1298740 - RNA, 19 nt, Artificial Sequence
  Description of Artificial Sequence: Synthetic oligonucleotide
gcaagaggggcucgaucag

SEQ ID NO: 1298741 - RNA, 19 nt, Artificial Sequence
  Description of Artificial Sequence: Synthetic oligonucleotide
cagggcaugcaaguagcuc

SEQ ID NO: 1298742 - RNA, 19 nt, Artificial Sequence
  Description of Artificial Sequence: Synthetic oligonucleotide
gagaggggaugaucuucuc

SEQ ID NO: 1298743 - RNA, 19 nt, Artificial Sequence
  Description of Artificial Sequence: Synthetic oligonucleotide
agcguacugagacggccuu

SEQ ID NO: 1298744 - RNA, 19 nt, Artificial Sequence
  Description of Artificial Sequence: Synthetic oligonucleotide
cagcaaggugggcuguuuc

SEQ ID NO: 1298745 - RNA, 19 nt, Artificial Sequence
  Description of Artificial Sequence: Synthetic oligonucleotide
gccuacuacuucaauguca

SEQ ID NO: 1298746 - RNA, 19 nt, Artificial Sequence
  Description of Artificial Sequence: Synthetic oligonucleotide
cugagacggccuugccgcc

SEQ ID NO: 1298747 - RNA, 19 nt, Artificial Sequence
  Description of Artificial Sequence: Synthetic oligonucleotide
uccuaucccgaagcugggu

SEQ ID NO: 1298748 - RNA, 19 nt, Artificial Sequence
  Description of Artificial Sequence: Synthetic oligonucleotide
ggaguccaaaagagagggg

SEQ ID NO: 1298749 - RNA, 19 nt, Artificial Sequence
  Description of Artificial Sequence: Synthetic oligonucleotide
guugggcuagccgaaggaa

SEQ ID NO: 1298750 - RNA, 19 nt, Artificial Sequence
  Description of Artificial Sequence: Synthetic oligonucleotide
gaacugcuguaccucggcu

SEQ ID NO: 1298751 - RNA, 19 nt, Artificial Sequence
  Description of Artificial Sequence: Synthetic oligonucleotide
ccaaggccggaacaaugcc

SEQ ID NO: 1298752 - RNA, 19 nt, Artificial Sequence
  Description of Artificial Sequence: Synthetic oligonucleotide
ccgaaggaacugcuguacc

SEQ ID NO: 1298753 - RNA, 19 nt, Artificial Sequence
  Description of Artificial Sequence: Synthetic oligonucleotide
cacgauaagguuccccagu

SEQ ID NO: 1298754 - RNA, 19 nt, Artificial Sequence
  Description of Artificial Sequence: Synthetic oligonucleotide
guaggacuauuugcaguga

SEQ ID NO: 1298755 - RNA, 19 nt, Artificial Sequence
  Description of Artificial Sequence: Synthetic oligonucleotide
gccgccucaagcugcaaca

SEQ ID NO: 1298756 - RNA, 19 nt, Artificial Sequence
  Description of Artificial Sequence: Synthetic oligonucleotide
agguuguugaggagccaca

SEQ ID NO: 1298757 - RNA, 19 nt, Artificial Sequence
  Description of Artificial Sequence: Synthetic oligonucleotide
gccggaacaaugcccugug

SEQ ID NO: 1298758 - RNA, 19 nt, Artificial Sequence
  Description of Artificial Sequence: Synthetic oligonucleotide
cacgggcucgccuccccgc

SEQ ID NO: 1298759 - RNA, 19 nt, Artificial Sequence
  Description of Artificial Sequence: Synthetic oligonucleotide
agcccgacaaggguccgca

SEQ ID NO: 1298760 - RNA, 19 nt, Artificial Sequence
  Description of Artificial Sequence: Synthetic oligonucleotide
ggcaaccaaggccggaaca

SEQ ID NO: 1298761 - RNA, 19 nt, Artificial Sequence
  Description of Artificial Sequence: Synthetic oligonucleotide
guaccucggcuuccccaag

SEQ ID NO: 1298762 - RNA, 19 nt, Artificial Sequence
  Description of Artificial Sequence: Synthetic oligonucleotide
caugaggggacuggaugca

SEQ ID NO: 1298763 - RNA, 19 nt, Artificial Sequence
  Description of Artificial Sequence: Synthetic oligonucleotide
gagacggccuugccgccga

SEQ ID NO: 1298764 - RNA, 19 nt, Artificial Sequence
  Description of Artificial Sequence: Synthetic oligonucleotide
uccggggcaucuucccuua

SEQ ID NO: 1298765 - RNA, 19 nt, Artificial Sequence
  Description of Artificial Sequence: Synthetic oligonucleotide
cuugccgccgacuccacau

SEQ ID NO: 1298766 - RNA, 19 nt, Artificial Sequence
  Description of Artificial Sequence: Synthetic oligonucleotide
gcaaccccaagguucagcu

SEQ ID NO: 1298767 - RNA, 19 nt, Artificial Sequence
  Description of Artificial Sequence: Synthetic oligonucleotide
agccucgacgaaggcugac

SEQ ID NO: 1298768 - RNA, 19 nt, Artificial Sequence
  Description of Artificial Sequence: Synthetic oligonucleotide
ggggugacauuaggcaacc

SEQ ID NO: 1298769 - RNA, 19 nt, Artificial Sequence
  Description of Artificial Sequence: Synthetic oligonucleotide
gcuuccccaaggagcacgg

SEQ ID NO: 1298770 - RNA, 19 nt, Artificial Sequence
  Description of Artificial Sequence: Synthetic oligonucleotide
cacaggcccucagacagca

SEQ ID NO: 1298771 - RNA, 19 nt, Artificial Sequence
  Description of Artificial Sequence: Synthetic oligonucleotide
cuguuccccguugggcuag

SEQ ID NO: 1298772 - RNA, 19 nt, Artificial Sequence
  Description of Artificial Sequence: Synthetic oligonucleotide
gcucgaucagauccagaga

SEQ ID NO: 1298773 - RNA, 19 nt, Artificial Sequence
  Description of Artificial Sequence: Synthetic oligonucleotide
gccaacguaggcagagccc

SEQ ID NO: 1298774 - RNA, 19 nt, Artificial Sequence
  Description of Artificial Sequence: Synthetic oligonucleotide
cguacugagacggccuugc

SEQ ID NO: 1298775 - RNA, 19 nt, Artificial Sequence
  Description of Artificial Sequence: Synthetic oligonucleotide
gccgaaggaacugcuguac

SEQ ID NO: 1298776 - RNA, 19 nt, Artificial Sequence
  Description of Artificial Sequence: Synthetic oligonucleotide
ggcuagccgaaggaacugc

SEQ ID NO: 1298777 - RNA, 19 nt, Artificial Sequence
  Description of Artificial Sequence: Synthetic oligonucleotide
ggccuacuacuucaauguc

SEQ ID NO: 1298778 - RNA, 19 nt, Artificial Sequence
  Description of Artificial Sequence: Synthetic oligonucleotide
gcaaccaaggccggaacaa

SEQ ID NO: 1298779 - RNA, 19 nt, Artificial Sequence
  Description of Artificial Sequence: Synthetic oligonucleotide
uguaggcaccgagccgccu

SEQ ID NO: 1298780 - RNA, 19 nt, Artificial Sequence
  Description of Artificial Sequence: Synthetic oligonucleotide
cccgacaaggguccgcaug

SEQ ID NO: 1298781 - RNA, 19 nt, Artificial Sequence
  Description of Artificial Sequence: Synthetic oligonucleotide
cugcuguaccucggcuucc

SEQ ID NO: 1298782 - RNA, 19 nt, Artificial Sequence
  Description of Artificial Sequence: Synthetic oligonucleotide
agcuuugggccugguugca

SEQ ID NO: 1298783 - RNA, 19 nt, Artificial Sequence
  Description of Artificial Sequence: Synthetic oligonucleotide
aagccucgacgaaggcuga

SEQ ID NO: 1298784 - RNA, 19 nt, Artificial Sequence
  Description of Artificial Sequence: Synthetic oligonucleotide
caacguaggcagagcccca

SEQ ID NO: 1298785 - RNA, 19 nt, Artificial Sequence
  Description of Artificial Sequence: Synthetic oligonucleotide
ccgagccgccucaagcugc

SEQ ID NO: 1298786 - RNA, 19 nt, Artificial Sequence
  Description of Artificial Sequence: Synthetic oligonucleotide
agacggccuugccgccgac

SEQ ID NO: 1298787 - RNA, 19 nt, Artificial Sequence
  Description of Artificial Sequence: Synthetic oligonucleotide
ccguugggcuagccgaagg

SEQ ID NO: 1298788 - RNA, 19 nt, Artificial Sequence
  Description of Artificial Sequence: Synthetic oligonucleotide
guuccccaguguauacaga

SEQ ID NO: 1298789 - RNA, 19 nt, Artificial Sequence
  Description of Artificial Sequence: Synthetic oligonucleotide
ggagcacggcugcacucug

SEQ ID NO: 1298790 - RNA, 19 nt, Artificial Sequence
  Description of Artificial Sequence: Synthetic oligonucleotide
cgaaacacagggcaugcaa

SEQ ID NO: 1298791 - RNA, 19 nt, Artificial Sequence
  Description of Artificial Sequence: Synthetic oligonucleotide
gccucgacgaaggcugacc

SEQ ID NO: 1298792 - RNA, 19 nt, Artificial Sequence
  Description of Artificial Sequence: Synthetic oligonucleotide
gagcucauguaggcaccga

SEQ ID NO: 1298793 - RNA, 19 nt, Artificial Sequence
  Description of Artificial Sequence: Synthetic oligonucleotide
gcuccaaacucuggccuac

SEQ ID NO: 1298794 - RNA, 19 nt, Artificial Sequence
  Description of Artificial Sequence: Synthetic oligonucleotide
cucuggccuacuacuucaa

SEQ ID NO: 1298795 - RNA, 19 nt, Artificial Sequence
  Description of Artificial Sequence: Synthetic oligonucleotide
cgccagcguacugagacgg

SEQ ID NO: 1298796 - RNA, 19 nt, Artificial Sequence
  Description of Artificial Sequence: Synthetic oligonucleotide
gccugguugcaucagucgu

SEQ ID NO: 1298797 - RNA, 19 nt, Artificial Sequence
  Description of Artificial Sequence: Synthetic oligonucleotide
ccaugaauagcugucugcu

SEQ ID NO: 1298798 - RNA, 19 nt, Artificial Sequence
  Description of Artificial Sequence: Synthetic oligonucleotide
ccggaacaaugcccugugg

SEQ ID NO: 1298799 - RNA, 19 nt, Artificial Sequence
  Description of Artificial Sequence: Synthetic oligonucleotide
cgacgaaggcugaccagag

SEQ ID NO: 1298800 - RNA, 19 nt, Artificial Sequence
  Description of Artificial Sequence: Synthetic oligonucleotide
cuaucccgaagcuggguuu

SEQ ID NO: 1298801 - RNA, 19 nt, Artificial Sequence
  Description of Artificial Sequence: Synthetic oligonucleotide
ccuccgccacugcagacug

SEQ ID NO: 1298802 - RNA, 19 nt, Artificial Sequence
  Description of Artificial Sequence: Synthetic oligonucleotide
uguuccccguugggcuagc

SEQ ID NO: 1298803 - RNA, 19 nt, Artificial Sequence
  Description of Artificial Sequence: Synthetic oligonucleotide
ccucgacgaaggcugacca

SEQ ID NO: 1298804 - RNA, 19 nt, Artificial Sequence
  Description of Artificial Sequence: Synthetic oligonucleotide
gggcuagccgaaggaacug

SEQ ID NO: 1298805 - RNA, 19 nt, Artificial Sequence
  Description of Artificial Sequence: Synthetic oligonucleotide
guccgcaugcugcccucca

SEQ ID NO: 1298806 - RNA, 19 nt, Artificial Sequence
  Description of Artificial Sequence: Synthetic oligonucleotide
gcauagcauuguugaccug

SEQ ID NO: 1298807 - RNA, 19 nt, Artificial Sequence
  Description of Artificial Sequence: Synthetic oligonucleotide
gcacgggcucgccuccccg

SEQ ID NO: 1298808 - RNA, 19 nt, Artificial Sequence
  Description of Artificial Sequence: Synthetic oligonucleotide
caaugcccuguggcaggag

SEQ ID NO: 1298809 - RNA, 19 nt, Artificial Sequence
  Description of Artificial Sequence: Synthetic oligonucleotide
ggccuugccgccgacucca

SEQ ID NO: 1298810 - RNA, 19 nt, Artificial Sequence
  Description of Artificial Sequence: Synthetic oligonucleotide
caguaagcuggacccuucu

SEQ ID NO: 1298811 - RNA, 19 nt, Artificial Sequence
  Description of Artificial Sequence: Synthetic oligonucleotide
gagcacggcugcacucuga

SEQ ID NO: 1298812 - RNA, 19 nt, Artificial Sequence
  Description of Artificial Sequence: Synthetic oligonucleotide
gcacggcugcacucugacc

SEQ ID NO: 1298813 - RNA, 19 nt, Artificial Sequence
  Description of Artificial Sequence: Synthetic oligonucleotide
ccugguugcaucagucgua

SEQ ID NO: 1298814 - RNA, 19 nt, Artificial Sequence
  Description of Artificial Sequence: Synthetic oligonucleotide
gcaugcaaguagcucuagu

SEQ ID NO: 1298815 - RNA, 19 nt, Artificial Sequence
  Description of Artificial Sequence: Synthetic oligonucleotide
gcaguaagcuggacccuuc

SEQ ID NO: 1298816 - RNA, 19 nt, Artificial Sequence
  Description of Artificial Sequence: Synthetic oligonucleotide
cgcacgccagcguacugag

SEQ ID NO: 1298817 - RNA, 19 nt, Artificial Sequence
  Description of Artificial Sequence: Synthetic oligonucleotide
cccgguugcuggucaggag

SEQ ID NO: 1298818 - RNA, 19 nt, Artificial Sequence
  Description of Artificial Sequence: Synthetic oligonucleotide
ggauacccugggauaaaua

SEQ ID NO: 1298819 - RNA, 19 nt, Artificial Sequence
  Description of Artificial Sequence: Synthetic oligonucleotide
ccgcaucauccauucucug

SEQ ID NO: 1298820 - RNA, 19 nt, Artificial Sequence
  Description of Artificial Sequence: Synthetic oligonucleotide
guuccccguugggcuagcc

SEQ ID NO: 1298821 - RNA, 19 nt, Artificial Sequence
  Description of Artificial Sequence: Synthetic oligonucleotide
ggccugcaacccugauugc

SEQ ID NO: 1298822 - RNA, 19 nt, Artificial Sequence
  Description of Artificial Sequence: Synthetic oligonucleotide
ccacaauucgcucgucucu

SEQ ID NO: 1298823 - RNA, 19 nt, Artificial Sequence
  Description of Artificial Sequence: Synthetic oligonucleotide
cccgcaucauccauucucu

SEQ ID NO: 1298824 - RNA, 19 nt, Artificial Sequence
  Description of Artificial Sequence: Synthetic oligonucleotide
gcauauccaagggcuucca

SEQ ID NO: 1298825 - RNA, 19 nt, Artificial Sequence
  Description of Artificial Sequence: Synthetic oligonucleotide
gcguacugagacggccuug

SEQ ID NO: 1298826 - RNA, 19 nt, Artificial Sequence
  Description of Artificial Sequence: Synthetic oligonucleotide
cguugggcuagccgaagga

SEQ ID NO: 1298827 - RNA, 19 nt, Artificial Sequence
  Description of Artificial Sequence: Synthetic oligonucleotide
ccgccucaagcugcaacag

SEQ ID NO: 1298828 - RNA, 19 nt, Artificial Sequence
  Description of Artificial Sequence: Synthetic oligonucleotide
gguccgcaugcugcccucc

SEQ ID NO: 1298829 - RNA, 19 nt, Artificial Sequence
  Description of Artificial Sequence: Synthetic oligonucleotide
gccugcaacccugauugcu

SEQ ID NO: 1298830 - RNA, 19 nt, Artificial Sequence
  Description of Artificial Sequence: Synthetic oligonucleotide
cuuccgcacgggcucgccu

SEQ ID NO: 1298831 - RNA, 19 nt, Artificial Sequence
  Description of Artificial Sequence: Synthetic oligonucleotide
cucgucucugagcuccauu

SEQ ID NO: 1298832 - RNA, 19 nt, Artificial Sequence
  Description of Artificial Sequence: Synthetic oligonucleotide
ggguccgcaugcugcccuc

SEQ ID NO: 1298833 - RNA, 19 nt, Artificial Sequence
  Description of Artificial Sequence: Synthetic oligonucleotide
ggccggaacaaugcccugu

SEQ ID NO: 1298834 - RNA, 19 nt, Artificial Sequence
  Description of Artificial Sequence: Synthetic oligonucleotide
ccuaucccgaagcuggguu

SEQ ID NO: 1298835 - RNA, 19 nt, Artificial Sequence
  Description of Artificial Sequence: Synthetic oligonucleotide
gcaggcaaccaaggccgga

SEQ ID NO: 1298836 - RNA, 19 nt, Artificial Sequence
  Description of Artificial Sequence: Synthetic oligonucleotide
cccguugggcuagccgaag

SEQ ID NO: 1298837 - RNA, 19 nt, Artificial Sequence
  Description of Artificial Sequence: Synthetic oligonucleotide
ccaguguauugagcaggca

SEQ ID NO: 1298838 - RNA, 19 nt, Artificial Sequence
  Description of Artificial Sequence: Synthetic oligonucleotide
gucccgcaucauccauucu

SEQ ID NO: 1298839 - RNA, 19 nt, Artificial Sequence
  Description of Artificial Sequence: Synthetic oligonucleotide
gggugacauuaggcaacca

SEQ ID NO: 1298840 - RNA, 19 nt, Artificial Sequence
  Description of Artificial Sequence: Synthetic oligonucleotide
ccgcacgccagcguacuga

SEQ ID NO: 1298841 - RNA, 19 nt, Artificial Sequence
  Description of Artificial Sequence: Synthetic oligonucleotide
ggcucgccuccccgcuccc

SEQ ID NO: 1298842 - RNA, 19 nt, Artificial Sequence
  Description of Artificial Sequence: Synthetic oligonucleotide
ccuuccgcacgggcucgcc

SEQ ID NO: 1298843 - RNA, 19 nt, Artificial Sequence
  Description of Artificial Sequence: Synthetic oligonucleotide
gcaccgaaacacagggcau

SEQ ID NO: 1298844 - RNA, 19 nt, Artificial Sequence
  Description of Artificial Sequence: Synthetic oligonucleotide
ccgaaacacagggcaugca

SEQ ID NO: 1298845 - RNA, 19 nt, Artificial Sequence
  Description of Artificial Sequence: Synthetic oligonucleotide
ccggggcaucuucccuuag

SEQ ID NO: 1298846 - RNA, 19 nt, Artificial Sequence
  Description of Artificial Sequence: Synthetic oligonucleotide
gcacucugaccuccggcuu

SEQ ID NO: 1298847 - RNA, 19 nt, Artificial Sequence
  Description of Artificial Sequence: Synthetic oligonucleotide
cccgcacgccagcguacug

SEQ ID NO: 1298848 - RNA, 19 nt, Artificial Sequence
  Description of Artificial Sequence: Synthetic oligonucleotide
gcucgccuccccgcucccc

SEQ ID NO: 1298849 - RNA, 19 nt, Artificial Sequence
  Description of Artificial Sequence: Synthetic oligonucleotide
ccaaaagagaggggaugau

SEQ ID NO: 1298850 - RNA, 19 nt, Artificial Sequence
  Description of Artificial Sequence: Synthetic oligonucleotide
cgauaagguuccccagugu

SEQ ID NO: 1298851 - RNA, 19 nt, Artificial Sequence
  Description of Artificial Sequence: Synthetic oligonucleotide
ccuugccgccgacuccaca

SEQ ID NO: 1298852 - RNA, 19 nt, Artificial Sequence
  Description of Artificial Sequence: Synthetic oligonucleotide
cgcacgggcucgccucccc

SEQ ID NO: 1298853 - RNA, 19 nt, Artificial Sequence
  Description of Artificial Sequence: Synthetic oligonucleotide
ccccguugggcuagccgaa

SEQ ID NO: 1298854 - RNA, 19 nt, Artificial Sequence
  Description of Artificial Sequence: Synthetic oligonucleotide
ccgcuggcaguaagcugga

SEQ ID NO: 1298855 - RNA, 19 nt, Artificial Sequence
  Description of Artificial Sequence: Synthetic oligonucleotide
gcuuugggccugguugcau

SEQ ID NO: 1298856 - RNA, 19 nt, Artificial Sequence
  Description of Artificial Sequence: Synthetic oligonucleotide
gcacgccagcguacugaga

SEQ ID NO: 1298857 - RNA, 19 nt, Artificial Sequence
  Description of Artificial Sequence: Synthetic oligonucleotide
ccgcacgggcucgccuccc

SEQ ID NO: 1298858 - RNA, 19 nt, Artificial Sequence
  Description of Artificial Sequence: Synthetic oligonucleotide
gccuugccgccgacuccac

SEQ ID NO: 1298859 - RNA, 19 nt, Artificial Sequence
  Description of Artificial Sequence: Synthetic oligonucleotide
ccacaaccgcuggcaguaa

SEQ ID NO: 1298860 - RNA, 19 nt, Artificial Sequence
  Description of Artificial Sequence: Synthetic oligonucleotide
gcccgacaaggguccgcau

SEQ ID NO: 1298861 - RNA, 19 nt, Artificial Sequence
  Description of Artificial Sequence: Synthetic oligonucleotide
cucugaccuccggcuucuu

SEQ ID NO: 1298862 - RNA, 19 nt, Artificial Sequence
  Description of Artificial Sequence: Synthetic oligonucleotide
ccccgccggcggcaccgca

SEQ ID NO: 1298863 - RNA, 19 nt, Artificial Sequence
  Description of Artificial Sequence: Synthetic oligonucleotide
aauccuaaauguuuuagac

SEQ ID NO: 1298864 - RNA, 19 nt, Artificial Sequence
  Description of Artificial Sequence: Synthetic oligonucleotide
accaauauccccuagagcg

SEQ ID NO: 1298865 - RNA, 19 nt, Artificial Sequence
  Description of Artificial Sequence: Synthetic oligonucleotide
aacacuguauacuauguac

SEQ ID NO: 1298866 - RNA, 19 nt, Artificial Sequence
  Description of Artificial Sequence: Synthetic oligonucleotide
aauuacguacauuacuugg

SEQ ID NO: 1298867 - RNA, 19 nt, Artificial Sequence
  Description of Artificial Sequence: Synthetic oligonucleotide
uucaguauaggacagguag

SEQ ID NO: 1298868 - RNA, 19 nt, Artificial Sequence
  Description of Artificial Sequence: Synthetic oligonucleotide
agucacaccaacuagcugc

SEQ ID NO: 1298869 - RNA, 19 nt, Artificial Sequence
  Description of Artificial Sequence: Synthetic oligonucleotide
uauuauuagucacaaaagc

SEQ ID NO: 1298870 - RNA, 19 nt, Artificial Sequence
  Description of Artificial Sequence: Synthetic oligonucleotide
uuauccuagagucagaaca

SEQ ID NO: 1298871 - RNA, 19 nt, Artificial Sequence
  Description of Artificial Sequence: Synthetic oligonucleotide
agagguuuggaucagcgcc

SEQ ID NO: 1298872 - RNA, 19 nt, Artificial Sequence
  Description of Artificial Sequence: Synthetic oligonucleotide
auaggcuacaauuacguac

SEQ ID NO: 1298873 - RNA, 19 nt, Artificial Sequence
  Description of Artificial Sequence: Synthetic oligonucleotide
uuauuagucacaaaagcga

SEQ ID NO: 1298874 - RNA, 19 nt, Artificial Sequence
  Description of Artificial Sequence: Synthetic oligonucleotide
aaucuuagaggcucuacgg

SEQ ID NO: 1298875 - RNA, 19 nt, Artificial Sequence
  Description of Artificial Sequence: Synthetic oligonucleotide
agaauuuucagugcuaagc

SEQ ID NO: 1298876 - RNA, 19 nt, Artificial Sequence
  Description of Artificial Sequence: Synthetic oligonucleotide
ugaaguuuagaacucuuag

SEQ ID NO: 1298877 - RNA, 19 nt, Artificial Sequence
  Description of Artificial Sequence: Synthetic oligonucleotide
caaaguaugcuguucaacg

SEQ ID NO: 1298878 - RNA, 19 nt, Artificial Sequence
  Description of Artificial Sequence: Synthetic oligonucleotide
auuauuagucacaaaagcg

SEQ ID NO: 1298879 - RNA, 19 nt, Artificial Sequence
  Description of Artificial Sequence: Synthetic oligonucleotide
auuaggauggcucucaugu

SEQ ID NO: 1298880 - RNA, 19 nt, Artificial Sequence
  Description of Artificial Sequence: Synthetic oligonucleotide
aaguacauaaacauauagg

SEQ ID NO: 1298881 - RNA, 19 nt, Artificial Sequence
  Description of Artificial Sequence: Synthetic oligonucleotide
ucugagauaagcauauaug

SEQ ID NO: 1298882 - RNA, 19 nt, Artificial Sequence
  Description of Artificial Sequence: Synthetic oligonucleotide
uuaaguuucguguuccuag

SEQ ID NO: 1298883 - RNA, 19 nt, Artificial Sequence
  Description of Artificial Sequence: Synthetic oligonucleotide
aagcauauaugucuuucac

SEQ ID NO: 1298884 - RNA, 19 nt, Artificial Sequence
  Description of Artificial Sequence: Synthetic oligonucleotide
caugacuacauucuuagcc

SEQ ID NO: 1298885 - RNA, 19 nt, Artificial Sequence
  Description of Artificial Sequence: Synthetic oligonucleotide
acguacauuacuuggauuc

SEQ ID NO: 1298886 - RNA, 19 nt, Artificial Sequence
  Description of Artificial Sequence: Synthetic oligonucleotide
uccuaaauguuuuagacaa

SEQ ID NO: 1298887 - RNA, 19 nt, Artificial Sequence
  Description of Artificial Sequence: Synthetic oligonucleotide
uaguguacaauucagcugu

SEQ ID NO: 1298888 - RNA, 19 nt, Artificial Sequence
  Description of Artificial Sequence: Synthetic oligonucleotide
uauacuauguacagguggc

SEQ ID NO: 1298889 - RNA, 19 nt, Artificial Sequence
  Description of Artificial Sequence: Synthetic oligonucleotide
guuuagaacucuuagaauc

SEQ ID NO: 1298890 - RNA, 19 nt, Artificial Sequence
  Description of Artificial Sequence: Synthetic oligonucleotide
aacagucauguacauaguc

SEQ ID NO: 1298891 - RNA, 19 nt, Artificial Sequence
  Description of Artificial Sequence: Synthetic oligonucleotide
auauaugucuuucacauau

SEQ ID NO: 1298892 - RNA, 19 nt, Artificial Sequence
  Description of Artificial Sequence: Synthetic oligonucleotide
acauauaggcuacaauuac

SEQ ID NO: 1298893 - RNA, 19 nt, Artificial Sequence
  Description of Artificial Sequence: Synthetic oligonucleotide
uuuuagacaacccuuguua

SEQ ID NO: 1298894 - RNA, 19 nt, Artificial Sequence
  Description of Artificial Sequence: Synthetic oligonucleotide
ggauuaucaaccaagauag

SEQ ID NO: 1298895 - RNA, 19 nt, Artificial Sequence
  Description of Artificial Sequence: Synthetic oligonucleotide
uuaccaauauccccuagag

SEQ ID NO: 1298896 - RNA, 19 nt, Artificial Sequence
  Description of Artificial Sequence: Synthetic oligonucleotide
aaguaugcuguucaacguc

SEQ ID NO: 1298897 - RNA, 19 nt, Artificial Sequence
  Description of Artificial Sequence: Synthetic oligonucleotide
cuaugaaaaguaaaacagc

SEQ ID NO: 1298898 - RNA, 19 nt, Artificial Sequence
  Description of Artificial Sequence: Synthetic oligonucleotide
ucuguguuaaguuucgugu

SEQ ID NO: 1298899 - RNA, 19 nt, Artificial Sequence
  Description of Artificial Sequence: Synthetic oligonucleotide
ucuuagaaucuucauuucc

SEQ ID NO: 1298900 - RNA, 19 nt, Artificial Sequence
  Description of Artificial Sequence: Synthetic oligonucleotide
gauaucuuggucuaacuga

SEQ ID NO: 1298901 - RNA, 19 nt, Artificial Sequence
  Description of Artificial Sequence: Synthetic oligonucleotide
uacaauuacguacauuacu

SEQ ID NO: 1298902 - RNA, 19 nt, Artificial Sequence
  Description of Artificial Sequence: Synthetic oligonucleotide
agcuaugaaaaguaaaaca

SEQ ID NO: 1298903 - RNA, 19 nt, Artificial Sequence
  Description of Artificial Sequence: Synthetic oligonucleotide
uggagagggauuaucaacc

SEQ ID NO: 1298904 - RNA, 19 nt, Artificial Sequence
  Description of Artificial Sequence: Synthetic oligonucleotide
uguaaguauuauuagucac

SEQ ID NO: 1298905 - RNA, 19 nt, Artificial Sequence
  Description of Artificial Sequence: Synthetic oligonucleotide
uuuagaacucuuagaaucu

SEQ ID NO: 1298906 - RNA, 19 nt, Artificial Sequence
  Description of Artificial Sequence: Synthetic oligonucleotide
acuaguguacaauucagcu

SEQ ID NO: 1298907 - RNA, 19 nt, Artificial Sequence
  Description of Artificial Sequence: Synthetic oligonucleotide
aacgucaaccucuccaauc

SEQ ID NO: 1298908 - RNA, 19 nt, Artificial Sequence
  Description of Artificial Sequence: Synthetic oligonucleotide
cauauaggcuacaauuacg

SEQ ID NO: 1298909 - RNA, 19 nt, Artificial Sequence
  Description of Artificial Sequence: Synthetic oligonucleotide
acagccuuuauugaagagc

SEQ ID NO: 1298910 - RNA, 19 nt, Artificial Sequence
  Description of Artificial Sequence: Synthetic oligonucleotide
ccuaaauuucauuugaacc

SEQ ID NO: 1298911 - RNA, 19 nt, Artificial Sequence
  Description of Artificial Sequence: Synthetic oligonucleotide
agcgaagucaccuauuucu

SEQ ID NO: 1298912 - RNA, 19 nt, Artificial Sequence
  Description of Artificial Sequence: Synthetic oligonucleotide
aacuaguguacaauucagc

SEQ ID NO: 1298913 - RNA, 19 nt, Artificial Sequence
  Description of Artificial Sequence: Synthetic oligonucleotide
acuacagagguuuggauca

SEQ ID NO: 1298914 - RNA, 19 nt, Artificial Sequence
  Description of Artificial Sequence: Synthetic oligonucleotide
guaucagccagucaauuag

SEQ ID NO: 1298915 - RNA, 19 nt, Artificial Sequence
  Description of Artificial Sequence: Synthetic oligonucleotide
uuacaucagagaaagccug

SEQ ID NO: 1298916 - RNA, 19 nt, Artificial Sequence
  Description of Artificial Sequence: Synthetic oligonucleotide
aaaguaugcuguucaacgu

SEQ ID NO: 1298917 - RNA, 19 nt, Artificial Sequence
  Description of Artificial Sequence: Synthetic oligonucleotide
augcuguucaacgucaacc

SEQ ID NO: 1298918 - RNA, 19 nt, Artificial Sequence
  Description of Artificial Sequence: Synthetic oligonucleotide
acaaauucugaacuagugu

SEQ ID NO: 1298919 - RNA, 19 nt, Artificial Sequence
  Description of Artificial Sequence: Synthetic oligonucleotide
cuuggguacacaguuaucc

SEQ ID NO: 1298920 - RNA, 19 nt, Artificial Sequence
  Description of Artificial Sequence: Synthetic oligonucleotide
ugagauaagcauauauguc

SEQ ID NO: 1298921 - RNA, 19 nt, Artificial Sequence
  Description of Artificial Sequence: Synthetic oligonucleotide
aaccaagauagguucagga

SEQ ID NO: 1298922 - RNA, 19 nt, Artificial Sequence
  Description of Artificial Sequence: Synthetic oligonucleotide
uucaccguugucaagaauu

SEQ ID NO: 1298923 - RNA, 19 nt, Artificial Sequence
  Description of Artificial Sequence: Synthetic oligonucleotide
cauagugagcuccaugagg

SEQ ID NO: 1298924 - RNA, 19 nt, Artificial Sequence
  Description of Artificial Sequence: Synthetic oligonucleotide
uuggauguugcauacuugu

SEQ ID NO: 1298925 - RNA, 19 nt, Artificial Sequence
  Description of Artificial Sequence: Synthetic oligonucleotide
auuugcuugcaauaaacau

SEQ ID NO: 1298926 - RNA, 19 nt, Artificial Sequence
  Description of Artificial Sequence: Synthetic oligonucleotide
ugggauuuuagcugaaacu

SEQ ID NO: 1298927 - RNA, 19 nt, Artificial Sequence
  Description of Artificial Sequence: Synthetic oligonucleotide
cacggcaagaauuacauca

SEQ ID NO: 1298928 - RNA, 19 nt, Artificial Sequence
  Description of Artificial Sequence: Synthetic oligonucleotide
gaaguuuagaacucuuaga

SEQ ID NO: 1298929 - RNA, 19 nt, Artificial Sequence
  Description of Artificial Sequence: Synthetic oligonucleotide
uggucuaacugauuguucu

SEQ ID NO: 1298930 - RNA, 19 nt, Artificial Sequence
  Description of Artificial Sequence: Synthetic oligonucleotide
aguguagugguccacuuga

SEQ ID NO: 1298931 - RNA, 19 nt, Artificial Sequence
  Description of Artificial Sequence: Synthetic oligonucleotide
aauguuuuagacaacccuu

SEQ ID NO: 1298932 - RNA, 19 nt, Artificial Sequence
  Description of Artificial Sequence: Synthetic oligonucleotide
ugauuguucuuccuccagc

SEQ ID NO: 1298933 - RNA, 19 nt, Artificial Sequence
  Description of Artificial Sequence: Synthetic oligonucleotide
accuguaucagccagucaa

SEQ ID NO: 1298934 - RNA, 19 nt, Artificial Sequence
  Description of Artificial Sequence: Synthetic oligonucleotide
uuuggccaaaguaugcugu

SEQ ID NO: 1298935 - RNA, 19 nt, Artificial Sequence
  Description of Artificial Sequence: Synthetic oligonucleotide
aaaaguaaaacagccuuua

SEQ ID NO: 1298936 - RNA, 19 nt, Artificial Sequence
  Description of Artificial Sequence: Synthetic oligonucleotide
auaauccuaaauguuuuag

SEQ ID NO: 1298937 - RNA, 19 nt, Artificial Sequence
  Description of Artificial Sequence: Synthetic oligonucleotide
ucaaaugagguaagcuaug

SEQ ID NO: 1298938 - RNA, 19 nt, Artificial Sequence
  Description of Artificial Sequence: Synthetic oligonucleotide
uucuguguuaaguuucgug

SEQ ID NO: 1298939 - RNA, 19 nt, Artificial Sequence
  Description of Artificial Sequence: Synthetic oligonucleotide
cuuagaggcucuacggagg

SEQ ID NO: 1298940 - RNA, 19 nt, Artificial Sequence
  Description of Artificial Sequence: Synthetic oligonucleotide
uuaugccuuugacacagcc

SEQ ID NO: 1298941 - RNA, 19 nt, Artificial Sequence
  Description of Artificial Sequence: Synthetic oligonucleotide
uuauccugcaugaaccggu

SEQ ID NO: 1298942 - RNA, 19 nt, Artificial Sequence
  Description of Artificial Sequence: Synthetic oligonucleotide
uaagcauauaugucuuuca

SEQ ID NO: 1298943 - RNA, 19 nt, Artificial Sequence
  Description of Artificial Sequence: Synthetic oligonucleotide
augucauaguccaacauag

SEQ ID NO: 1298944 - RNA, 19 nt, Artificial Sequence
  Description of Artificial Sequence: Synthetic oligonucleotide
uugauagucaugugcuuug

SEQ ID NO: 1298945 - RNA, 19 nt, Artificial Sequence
  Description of Artificial Sequence: Synthetic oligonucleotide
cauuugaaccuguaucagc

SEQ ID NO: 1298946 - RNA, 19 nt, Artificial Sequence
  Description of Artificial Sequence: Synthetic oligonucleotide
caaccaacauucaaaugag

SEQ ID NO: 1298947 - RNA, 19 nt, Artificial Sequence
  Description of Artificial Sequence: Synthetic oligonucleotide
aaagcgaagucaccuauuu

SEQ ID NO: 1298948 - RNA, 19 nt, Artificial Sequence
  Description of Artificial Sequence: Synthetic oligonucleotide
aauuaggauggcucucaug

SEQ ID NO: 1298949 - RNA, 19 nt, Artificial Sequence
  Description of Artificial Sequence: Synthetic oligonucleotide
uggacaaauucugaacuag

SEQ ID NO: 1298950 - RNA, 19 nt, Artificial Sequence
  Description of Artificial Sequence: Synthetic oligonucleotide
gacaaauucugaacuagug

SEQ ID NO: 1298951 - RNA, 19 nt, Artificial Sequence
  Description of Artificial Sequence: Synthetic oligonucleotide
ugauuuggugcuuagugua

SEQ ID NO: 1298952 - RNA, 19 nt, Artificial Sequence
  Description of Artificial Sequence: Synthetic oligonucleotide
cuuggauucucuguuaaac

SEQ ID NO: 1298953 - RNA, 19 nt, Artificial Sequence
  Description of Artificial Sequence: Synthetic oligonucleotide
agagggauuaucaaccaag

SEQ ID NO: 1298954 - RNA, 19 nt, Artificial Sequence
  Description of Artificial Sequence: Synthetic oligonucleotide
aaauaauccuaaauguuuu

SEQ ID NO: 1298955 - RNA, 19 nt, Artificial Sequence
  Description of Artificial Sequence: Synthetic oligonucleotide
uuggagagggauuaucaac

SEQ ID NO: 1298956 - RNA, 19 nt, Artificial Sequence
  Description of Artificial Sequence: Synthetic oligonucleotide
gcuacaauuacguacauua

SEQ ID NO: 1298957 - RNA, 19 nt, Artificial Sequence
  Description of Artificial Sequence: Synthetic oligonucleotide
cugaucuuagcaugcuugg

SEQ ID NO: 1298958 - RNA, 19 nt, Artificial Sequence
  Description of Artificial Sequence: Synthetic oligonucleotide
uauccuagagucagaacaa

SEQ ID NO: 1298959 - RNA, 19 nt, Artificial Sequence
  Description of Artificial Sequence: Synthetic oligonucleotide
gucaccuauuucuggaggg

SEQ ID NO: 1298960 - RNA, 19 nt, Artificial Sequence
  Description of Artificial Sequence: Synthetic oligonucleotide
uguuccuagugacucugag

SEQ ID NO: 1298961 - RNA, 19 nt, Artificial Sequence
  Description of Artificial Sequence: Synthetic oligonucleotide
ugucaagaauuuucagugc

SEQ ID NO: 1298962 - RNA, 19 nt, Artificial Sequence
  Description of Artificial Sequence: Synthetic oligonucleotide
auccuaaauguuuuagaca

SEQ ID NO: 1298963 - RNA, 19 nt, Artificial Sequence
  Description of Artificial Sequence: Synthetic oligonucleotide
aguauaggacagguagugc

SEQ ID NO: 1298964 - RNA, 19 nt, Artificial Sequence
  Description of Artificial Sequence: Synthetic oligonucleotide
uuuagacaacccuuguuau

SEQ ID NO: 1298965 - RNA, 19 nt, Artificial Sequence
  Description of Artificial Sequence: Synthetic oligonucleotide
accguugucaagaauuuuc

SEQ ID NO: 1298966 - RNA, 19 nt, Artificial Sequence
  Description of Artificial Sequence: Synthetic oligonucleotide
uucuuggguacacaguuau

SEQ ID NO: 1298967 - RNA, 19 nt, Artificial Sequence
  Description of Artificial Sequence: Synthetic oligonucleotide
auauaggcuacaauuacgu

SEQ ID NO: 1298968 - RNA, 19 nt, Artificial Sequence
  Description of Artificial Sequence: Synthetic oligonucleotide
uuacguacauuacuuggau

SEQ ID NO: 1298969 - RNA, 19 nt, Artificial Sequence
  Description of Artificial Sequence: Synthetic oligonucleotide
auuacaucagagaaagccu

SEQ ID NO: 1298970 - RNA, 19 nt, Artificial Sequence
  Description of Artificial Sequence: Synthetic oligonucleotide
agauagguucaggagaaag

SEQ ID NO: 1298971 - RNA, 19 nt, Artificial Sequence
  Description of Artificial Sequence: Synthetic oligonucleotide
ugccaauugcauuugccga

SEQ ID NO: 1298972 - RNA, 19 nt, Artificial Sequence
  Description of Artificial Sequence: Synthetic oligonucleotide
ucuuagcaugcuuggaugu

SEQ ID NO: 1298973 - RNA, 19 nt, Artificial Sequence
  Description of Artificial Sequence: Synthetic oligonucleotide
agccagucaauuaggaugg

SEQ ID NO: 1298974 - RNA, 19 nt, Artificial Sequence
  Description of Artificial Sequence: Synthetic oligonucleotide
gacuucacggcccaguaga

SEQ ID NO: 1298975 - RNA, 19 nt, Artificial Sequence
  Description of Artificial Sequence: Synthetic oligonucleotide
aguuucguguuccuaguga

SEQ ID NO: 1298976 - RNA, 19 nt, Artificial Sequence
  Description of Artificial Sequence: Synthetic oligonucleotide
auuuggccaaaguaugcug

SEQ ID NO: 1298977 - RNA, 19 nt, Artificial Sequence
  Description of Artificial Sequence: Synthetic oligonucleotide
uaccaauauccccuagagc

SEQ ID NO: 1298978 - RNA, 19 nt, Artificial Sequence
  Description of Artificial Sequence: Synthetic oligonucleotide
cuugaguuaugccuuugac

SEQ ID NO: 1298979 - RNA, 19 nt, Artificial Sequence
  Description of Artificial Sequence: Synthetic oligonucleotide
acuauguacagguggcaca

SEQ ID NO: 1298980 - RNA, 19 nt, Artificial Sequence
  Description of Artificial Sequence: Synthetic oligonucleotide
ucaacgucaaccucuccaa

SEQ ID NO: 1298981 - RNA, 19 nt, Artificial Sequence
  Description of Artificial Sequence: Synthetic oligonucleotide
ugcauuugccgauguagug

SEQ ID NO: 1298982 - RNA, 19 nt, Artificial Sequence
  Description of Artificial Sequence: Synthetic oligonucleotide
aaguuucguguuccuagug

SEQ ID NO: 1298983 - RNA, 19 nt, Artificial Sequence
  Description of Artificial Sequence: Synthetic oligonucleotide
uuaaagaaggaaguacaua

SEQ ID NO: 1298984 - RNA, 19 nt, Artificial Sequence
  Description of Artificial Sequence: Synthetic oligonucleotide
uguagugguccacuugagu

SEQ ID NO: 1298985 - RNA, 19 nt, Artificial Sequence
  Description of Artificial Sequence: Synthetic oligonucleotide
uuagaggcucuacggagga

SEQ ID NO: 1298986 - RNA, 19 nt, Artificial Sequence
  Description of Artificial Sequence: Synthetic oligonucleotide
uauuuggccaaaguaugcu

SEQ ID NO: 1298987 - RNA, 19 nt, Artificial Sequence
  Description of Artificial Sequence: Synthetic oligonucleotide
caauuacguacauuacuug

SEQ ID NO: 1298988 - RNA, 19 nt, Artificial Sequence
  Description of Artificial Sequence: Synthetic oligonucleotide
uggcacauggugccaauug

SEQ ID NO: 1298989 - RNA, 19 nt, Artificial Sequence
  Description of Artificial Sequence: Synthetic oligonucleotide
acaauuacguacauuacuu

SEQ ID NO: 1298990 - RNA, 19 nt, Artificial Sequence
  Description of Artificial Sequence: Synthetic oligonucleotide
uucgcugacuuuguuacca

SEQ ID NO: 1298991 - RNA, 19 nt, Artificial Sequence
  Description of Artificial Sequence: Synthetic oligonucleotide
guuucguguuccuagugac

SEQ ID NO: 1298992 - RNA, 19 nt, Artificial Sequence
  Description of Artificial Sequence: Synthetic oligonucleotide
cuacaauuacguacauuac

SEQ ID NO: 1298993 - RNA, 19 nt, Artificial Sequence
  Description of Artificial Sequence: Synthetic oligonucleotide
auggaaacagucauguaca

SEQ ID NO: 1298994 - RNA, 19 nt, Artificial Sequence
  Description of Artificial Sequence: Synthetic oligonucleotide
acgucaaccucuccaaucu

SEQ ID NO: 1298995 - RNA, 19 nt, Artificial Sequence
  Description of Artificial Sequence: Synthetic oligonucleotide
uguaucagccagucaauua

SEQ ID NO: 1298996 - RNA, 19 nt, Artificial Sequence
  Description of Artificial Sequence: Synthetic oligonucleotide
caacauucaaaugagguaa

SEQ ID NO: 1298997 - RNA, 19 nt, Artificial Sequence
  Description of Artificial Sequence: Synthetic oligonucleotide
cugaacuaguguacaauuc

SEQ ID NO: 1298998 - RNA, 19 nt, Artificial Sequence
  Description of Artificial Sequence: Synthetic oligonucleotide
uaaguuucguguuccuagu

SEQ ID NO: 1298999 - RNA, 19 nt, Artificial Sequence
  Description of Artificial Sequence: Synthetic oligonucleotide
uuagcaugcuuggauguug

SEQ ID NO: 1299000 - RNA, 19 nt, Artificial Sequence
  Description of Artificial Sequence: Synthetic oligonucleotide
accggucaauaauggaaac

SEQ ID NO: 1299001 - RNA, 19 nt, Artificial Sequence
  Description of Artificial Sequence: Synthetic oligonucleotide
uuagacaacccuuguuauc

SEQ ID NO: 1299002 - RNA, 19 nt, Artificial Sequence
  Description of Artificial Sequence: Synthetic oligonucleotide
ucacaaaagcgaagucacc

SEQ ID NO: 1299003 - RNA, 19 nt, Artificial Sequence
  Description of Artificial Sequence: Synthetic oligonucleotide
aucuuagaggcucuacgga

SEQ ID NO: 1299004 - RNA, 19 nt, Artificial Sequence
  Description of Artificial Sequence: Synthetic oligonucleotide
cagccuuuauugaagagca

SEQ ID NO: 1299005 - RNA, 19 nt, Artificial Sequence
  Description of Artificial Sequence: Synthetic oligonucleotide
auuacguacauuacuugga

SEQ ID NO: 1299006 - RNA, 19 nt, Artificial Sequence
  Description of Artificial Sequence: Synthetic oligonucleotide
aaccaacauucaaaugagg

SEQ ID NO: 1299007 - RNA, 19 nt, Artificial Sequence
  Description of Artificial Sequence: Synthetic oligonucleotide
guuuggaucagcgccauca

SEQ ID NO: 1299008 - RNA, 19 nt, Artificial Sequence
  Description of Artificial Sequence: Synthetic oligonucleotide
uagauaucuuggucuaacu

SEQ ID NO: 1299009 - RNA, 19 nt, Artificial Sequence
  Description of Artificial Sequence: Synthetic oligonucleotide
guuaccaauauccccuaga

SEQ ID NO: 1299010 - RNA, 19 nt, Artificial Sequence
  Description of Artificial Sequence: Synthetic oligonucleotide
gcaaguaaacacuguauac

SEQ ID NO: 1299011 - RNA, 19 nt, Artificial Sequence
  Description of Artificial Sequence: Synthetic oligonucleotide
ucuacggaggaagugcaga

SEQ ID NO: 1299012 - RNA, 19 nt, Artificial Sequence
  Description of Artificial Sequence: Synthetic oligonucleotide
agaacucuuagaaucuuca

SEQ ID NO: 1299013 - RNA, 19 nt, Artificial Sequence
  Description of Artificial Sequence: Synthetic oligonucleotide
gugggauuuuagcugaaac

SEQ ID NO: 1299014 - RNA, 19 nt, Artificial Sequence
  Description of Artificial Sequence: Synthetic oligonucleotide
uguaguguagugguccacu

SEQ ID NO: 1299015 - RNA, 19 nt, Artificial Sequence
  Description of Artificial Sequence: Synthetic oligonucleotide
aggagcaaagugcaccaug

SEQ ID NO: 1299016 - RNA, 19 nt, Artificial Sequence
  Description of Artificial Sequence: Synthetic oligonucleotide
uguuaccaauauccccuag

SEQ ID NO: 1299017 - RNA, 19 nt, Artificial Sequence
  Description of Artificial Sequence: Synthetic oligonucleotide
uaguguagugguccacuug

SEQ ID NO: 1299018 - RNA, 19 nt, Artificial Sequence
  Description of Artificial Sequence: Synthetic oligonucleotide
uucguguuccuagugacuc

SEQ ID NO: 1299019 - RNA, 19 nt, Artificial Sequence
  Description of Artificial Sequence: Synthetic oligonucleotide
ugaaccuguaucagccagu

SEQ ID NO: 1299020 - RNA, 19 nt, Artificial Sequence
  Description of Artificial Sequence: Synthetic oligonucleotide
uagcaugcuuggauguugc

SEQ ID NO: 1299021 - RNA, 19 nt, Artificial Sequence
  Description of Artificial Sequence: Synthetic oligonucleotide
uccugcaugaaccggucaa

SEQ ID NO: 1299022 - RNA, 19 nt, Artificial Sequence
  Description of Artificial Sequence: Synthetic oligonucleotide
auuuuagcugaaacuuuuc

SEQ ID NO: 1299023 - RNA, 19 nt, Artificial Sequence
  Description of Artificial Sequence: Synthetic oligonucleotide
uccauaacagguucagguu

SEQ ID NO: 1299024 - RNA, 19 nt, Artificial Sequence
  Description of Artificial Sequence: Synthetic oligonucleotide
caagauagguucaggagaa

SEQ ID NO: 1299025 - RNA, 19 nt, Artificial Sequence
  Description of Artificial Sequence: Synthetic oligonucleotide
auuaaagaaggaaguacau

SEQ ID NO: 1299026 - RNA, 19 nt, Artificial Sequence
  Description of Artificial Sequence: Synthetic oligonucleotide
uggcucacucacaggaacc

SEQ ID NO: 1299027 - RNA, 19 nt, Artificial Sequence
  Description of Artificial Sequence: Synthetic oligonucleotide
guuauccugcaugaaccgg

SEQ ID NO: 1299028 - RNA, 19 nt, Artificial Sequence
  Description of Artificial Sequence: Synthetic oligonucleotide
auguuuuagacaacccuug

SEQ ID NO: 1299029 - RNA, 19 nt, Artificial Sequence
  Description of Artificial Sequence: Synthetic oligonucleotide
caguauaggacagguagug

SEQ ID NO: 1299030 - RNA, 19 nt, Artificial Sequence
  Description of Artificial Sequence: Synthetic oligonucleotide
guagauaucuuggucuaac

SEQ ID NO: 1299031 - RNA, 19 nt, Artificial Sequence
  Description of Artificial Sequence: Synthetic oligonucleotide
acuugaguuaugccuuuga

SEQ ID NO: 1299032 - RNA, 19 nt, Artificial Sequence
  Description of Artificial Sequence: Synthetic oligonucleotide
ugcuuuguaaggccacggu

SEQ ID NO: 1299033 - RNA, 19 nt, Artificial Sequence
  Description of Artificial Sequence: Synthetic oligonucleotide
uacuauguacagguggcac

SEQ ID NO: 1299034 - RNA, 19 nt, Artificial Sequence
  Description of Artificial Sequence: Synthetic oligonucleotide
ugacuucacggcccaguag

SEQ ID NO: 1299035 - RNA, 19 nt, Artificial Sequence
  Description of Artificial Sequence: Synthetic oligonucleotide
ugguccacuugaguuaugc

SEQ ID NO: 1299036 - RNA, 19 nt, Artificial Sequence
  Description of Artificial Sequence: Synthetic oligonucleotide
aaguauuauuagucacaaa

SEQ ID NO: 1299037 - RNA, 19 nt, Artificial Sequence
  Description of Artificial Sequence: Synthetic oligonucleotide
aaauuucauuugaaccugu

SEQ ID NO: 1299038 - RNA, 19 nt, Artificial Sequence
  Description of Artificial Sequence: Synthetic oligonucleotide
ucgguguccauucaccguu

SEQ ID NO: 1299039 - RNA, 19 nt, Artificial Sequence
  Description of Artificial Sequence: Synthetic oligonucleotide
aaccggucaauaauggaaa

SEQ ID NO: 1299040 - RNA, 19 nt, Artificial Sequence
  Description of Artificial Sequence: Synthetic oligonucleotide
agggucgguguccauucac

SEQ ID NO: 1299041 - RNA, 19 nt, Artificial Sequence
  Description of Artificial Sequence: Synthetic oligonucleotide
guguuaaguuucguguucc

SEQ ID NO: 1299042 - RNA, 19 nt, Artificial Sequence
  Description of Artificial Sequence: Synthetic oligonucleotide
aguaugcuguucaacguca

SEQ ID NO: 1299043 - RNA, 19 nt, Artificial Sequence
  Description of Artificial Sequence: Synthetic oligonucleotide
gucaagaauuuucagugcu

SEQ ID NO: 1299044 - RNA, 19 nt, Artificial Sequence
  Description of Artificial Sequence: Synthetic oligonucleotide
gcuugcaauaaacauggca

SEQ ID NO: 1299045 - RNA, 19 nt, Artificial Sequence
  Description of Artificial Sequence: Synthetic oligonucleotide
uauaggcuacaauuacgua

SEQ ID NO: 1299046 - RNA, 19 nt, Artificial Sequence
  Description of Artificial Sequence: Synthetic oligonucleotide
guaagcuaugaaaaguaaa

SEQ ID NO: 1299047 - RNA, 19 nt, Artificial Sequence
  Description of Artificial Sequence: Synthetic oligonucleotide
gccuuuauugaagagcaag

SEQ ID NO: 1299048 - RNA, 19 nt, Artificial Sequence
  Description of Artificial Sequence: Synthetic oligonucleotide
cagagguuuggaucagcgc

SEQ ID NO: 1299049 - RNA, 19 nt, Artificial Sequence
  Description of Artificial Sequence: Synthetic oligonucleotide
ucauguuuccagugacuuc

SEQ ID NO: 1299050 - RNA, 19 nt, Artificial Sequence
  Description of Artificial Sequence: Synthetic oligonucleotide
auccuagagucagaacaac

SEQ ID NO: 1299051 - RNA, 19 nt, Artificial Sequence
  Description of Artificial Sequence: Synthetic oligonucleotide
gcauauaugucuuucacau

SEQ ID NO: 1299052 - RNA, 19 nt, Artificial Sequence
  Description of Artificial Sequence: Synthetic oligonucleotide
acaacccuuguuauccuag

SEQ ID NO: 1299053 - RNA, 19 nt, Artificial Sequence
  Description of Artificial Sequence: Synthetic oligonucleotide
cagcaaucgccacaggcac

SEQ ID NO: 1299054 - RNA, 19 nt, Artificial Sequence
  Description of Artificial Sequence: Synthetic oligonucleotide
uuuggaucagcgccaucau

SEQ ID NO: 1299055 - RNA, 19 nt, Artificial Sequence
  Description of Artificial Sequence: Synthetic oligonucleotide
uagucacaaaagcgaaguc

SEQ ID NO: 1299056 - RNA, 19 nt, Artificial Sequence
  Description of Artificial Sequence: Synthetic oligonucleotide
gcagccuaaauuucauuug

SEQ ID NO: 1299057 - RNA, 19 nt, Artificial Sequence
  Description of Artificial Sequence: Synthetic oligonucleotide
caauucagcugugccagag

SEQ ID NO: 1299058 - RNA, 19 nt, Artificial Sequence
  Description of Artificial Sequence: Synthetic oligonucleotide
gagggauuaucaaccaaga

SEQ ID NO: 1299059 - RNA, 19 nt, Artificial Sequence
  Description of Artificial Sequence: Synthetic oligonucleotide
agggauuaucaaccaagau

SEQ ID NO: 1299060 - RNA, 19 nt, Artificial Sequence
  Description of Artificial Sequence: Synthetic oligonucleotide
agaagggauucuucaguau

SEQ ID NO: 1299061 - RNA, 19 nt, Artificial Sequence
  Description of Artificial Sequence: Synthetic oligonucleotide
cagccuaaauuucauuuga

SEQ ID NO: 1299062 - RNA, 19 nt, Artificial Sequence
  Description of Artificial Sequence: Synthetic oligonucleotide
acggcaagaauuacaucag

SEQ ID NO: 1299063 - RNA, 19 nt, Artificial Sequence
  Description of Artificial Sequence: Synthetic oligonucleotide
ggucgguguccauucaccg

SEQ ID NO: 1299064 - RNA, 19 nt, Artificial Sequence
  Description of Artificial Sequence: Synthetic oligonucleotide
gcugaucuuagcaugcuug

SEQ ID NO: 1299065 - RNA, 19 nt, Artificial Sequence
  Description of Artificial Sequence: Synthetic oligonucleotide
uuguuauccuagagucaga

SEQ ID NO: 1299066 - RNA, 19 nt, Artificial Sequence
  Description of Artificial Sequence: Synthetic oligonucleotide
gucaugcugaccuuggccu

SEQ ID NO: 1299067 - RNA, 19 nt, Artificial Sequence
  Description of Artificial Sequence: Synthetic oligonucleotide
gagguaagcuaugaaaagu

SEQ ID NO: 1299068 - RNA, 19 nt, Artificial Sequence
  Description of Artificial Sequence: Synthetic oligonucleotide
cucugagcgccauggcucc

SEQ ID NO: 1299069 - RNA, 19 nt, Artificial Sequence
  Description of Artificial Sequence: Synthetic oligonucleotide
gaaccuguaucagccaguc

SEQ ID NO: 1299070 - RNA, 19 nt, Artificial Sequence
  Description of Artificial Sequence: Synthetic oligonucleotide
agcgguucucggucucagc

SEQ ID NO: 1299071 - RNA, 19 nt, Artificial Sequence
  Description of Artificial Sequence: Synthetic oligonucleotide
uuggaucagcgccaucauc

SEQ ID NO: 1299072 - RNA, 19 nt, Artificial Sequence
  Description of Artificial Sequence: Synthetic oligonucleotide
ucgcucacggcaagaauua

SEQ ID NO: 1299073 - RNA, 19 nt, Artificial Sequence
  Description of Artificial Sequence: Synthetic oligonucleotide
agguaagcuaugaaaagua

SEQ ID NO: 1299074 - RNA, 19 nt, Artificial Sequence
  Description of Artificial Sequence: Synthetic oligonucleotide
auauccccuagagcgguuc

SEQ ID NO: 1299075 - RNA, 19 nt, Artificial Sequence
  Description of Artificial Sequence: Synthetic oligonucleotide
uccauugggcuuggagagg

SEQ ID NO: 1299076 - RNA, 19 nt, Artificial Sequence
  Description of Artificial Sequence: Synthetic oligonucleotide
uggccuuauuuucuguguu

SEQ ID NO: 1299077 - RNA, 19 nt, Artificial Sequence
  Description of Artificial Sequence: Synthetic oligonucleotide
uccaucugucugauuuggu

SEQ ID NO: 1299078 - RNA, 19 nt, Artificial Sequence
  Description of Artificial Sequence: Synthetic oligonucleotide
uacguacauuacuuggauu

SEQ ID NO: 1299079 - RNA, 19 nt, Artificial Sequence
  Description of Artificial Sequence: Synthetic oligonucleotide
ccuagugacucugagcgcc

SEQ ID NO: 1299080 - RNA, 19 nt, Artificial Sequence
  Description of Artificial Sequence: Synthetic oligonucleotide
ggcccaguagauaucuugg

SEQ ID NO: 1299081 - RNA, 19 nt, Artificial Sequence
  Description of Artificial Sequence: Synthetic oligonucleotide
uccuagugacucugagcgc

SEQ ID NO: 1299082 - RNA, 19 nt, Artificial Sequence
  Description of Artificial Sequence: Synthetic oligonucleotide
ugcuuaguguaaguauuau

SEQ ID NO: 1299083 - RNA, 19 nt, Artificial Sequence
  Description of Artificial Sequence: Synthetic oligonucleotide
ugacucugagcgccauggc

SEQ ID NO: 1299084 - RNA, 19 nt, Artificial Sequence
  Description of Artificial Sequence: Synthetic oligonucleotide
caaaugagguaagcuauga

SEQ ID NO: 1299085 - RNA, 19 nt, Artificial Sequence
  Description of Artificial Sequence: Synthetic oligonucleotide
aaaagcgaagucaccuauu

SEQ ID NO: 1299086 - RNA, 19 nt, Artificial Sequence
  Description of Artificial Sequence: Synthetic oligonucleotide
aaccuguaucagccaguca

SEQ ID NO: 1299087 - RNA, 19 nt, Artificial Sequence
  Description of Artificial Sequence: Synthetic oligonucleotide
uauccccuagagcgguucu

SEQ ID NO: 1299088 - RNA, 19 nt, Artificial Sequence
  Description of Artificial Sequence: Synthetic oligonucleotide
aucgcucacggcaagaauu

SEQ ID NO: 1299089 - RNA, 19 nt, Artificial Sequence
  Description of Artificial Sequence: Synthetic oligonucleotide
gaguuaugccuuugacaca

SEQ ID NO: 1299090 - RNA, 19 nt, Artificial Sequence
  Description of Artificial Sequence: Synthetic oligonucleotide
auacuauguacagguggca

SEQ ID NO: 1299091 - RNA, 19 nt, Artificial Sequence
  Description of Artificial Sequence: Synthetic oligonucleotide
cacgguucaccaugacuac

SEQ ID NO: 1299092 - RNA, 19 nt, Artificial Sequence
  Description of Artificial Sequence: Synthetic oligonucleotide
uggcucucauguuuccagu

SEQ ID NO: 1299093 - RNA, 19 nt, Artificial Sequence
  Description of Artificial Sequence: Synthetic oligonucleotide
uuguuaccaauauccccua

SEQ ID NO: 1299094 - RNA, 19 nt, Artificial Sequence
  Description of Artificial Sequence: Synthetic oligonucleotide
caggcacacgcuuggcgcc

SEQ ID NO: 1299095 - RNA, 19 nt, Artificial Sequence
  Description of Artificial Sequence: Synthetic oligonucleotide
ugagcgccauggcuccucc

SEQ ID NO: 1299096 - RNA, 19 nt, Artificial Sequence
  Description of Artificial Sequence: Synthetic oligonucleotide
ggcucuacggaggaagugc

SEQ ID NO: 1299097 - RNA, 19 nt, Artificial Sequence
  Description of Artificial Sequence: Synthetic oligonucleotide
cucacggcaagaauuacau

SEQ ID NO: 1299098 - RNA, 19 nt, Artificial Sequence
  Description of Artificial Sequence: Synthetic oligonucleotide
ugcugaucuuagcaugcuu

SEQ ID NO: 1299099 - RNA, 19 nt, Artificial Sequence
  Description of Artificial Sequence: Synthetic oligonucleotide
gagagggauuaucaaccaa

SEQ ID NO: 1299100 - RNA, 19 nt, Artificial Sequence
  Description of Artificial Sequence: Synthetic oligonucleotide
ugcuugcaauaaacauggc

SEQ ID NO: 1299101 - RNA, 19 nt, Artificial Sequence
  Description of Artificial Sequence: Synthetic oligonucleotide
cauuugccgauguagugua

SEQ ID NO: 1299102 - RNA, 19 nt, Artificial Sequence
  Description of Artificial Sequence: Synthetic oligonucleotide
gauuuggugcuuaguguaa

SEQ ID NO: 1299103 - RNA, 19 nt, Artificial Sequence
  Description of Artificial Sequence: Synthetic oligonucleotide
cauucaaaugagguaagcu

SEQ ID NO: 1299104 - RNA, 19 nt, Artificial Sequence
  Description of Artificial Sequence: Synthetic oligonucleotide
gaaaaguaaaacagccuuu

SEQ ID NO: 1299105 - RNA, 19 nt, Artificial Sequence
  Description of Artificial Sequence: Synthetic oligonucleotide
agugacucugagcgccaug

SEQ ID NO: 1299106 - RNA, 19 nt, Artificial Sequence
  Description of Artificial Sequence: Synthetic oligonucleotide
uugccugugccuguucgcu

SEQ ID NO: 1299107 - RNA, 19 nt, Artificial Sequence
  Description of Artificial Sequence: Synthetic oligonucleotide
guacauuacuuggauucuc

SEQ ID NO: 1299108 - RNA, 19 nt, Artificial Sequence
  Description of Artificial Sequence: Synthetic oligonucleotide
ucguguuccuagugacucu

SEQ ID NO: 1299109 - RNA, 19 nt, Artificial Sequence
  Description of Artificial Sequence: Synthetic oligonucleotide
gagcaaagugcaccauguc

SEQ ID NO: 1299110 - RNA, 19 nt, Artificial Sequence
  Description of Artificial Sequence: Synthetic oligonucleotide
auaacagguucagguucag

SEQ ID NO: 1299111 - RNA, 19 nt, Artificial Sequence
  Description of Artificial Sequence: Synthetic oligonucleotide
acacgcuuggcgccuguca

SEQ ID NO: 1299112 - RNA, 19 nt, Artificial Sequence
  Description of Artificial Sequence: Synthetic oligonucleotide
ggugccaauugcauuugcc

SEQ ID NO: 1299113 - RNA, 19 nt, Artificial Sequence
  Description of Artificial Sequence: Synthetic oligonucleotide
cauucuuagccaggugcug

SEQ ID NO: 1299114 - RNA, 19 nt, Artificial Sequence
  Description of Artificial Sequence: Synthetic oligonucleotide
guucgcugacuuuguuacc

SEQ ID NO: 1299115 - RNA, 19 nt, Artificial Sequence
  Description of Artificial Sequence: Synthetic oligonucleotide
cacauuaaagaaggaagua

SEQ ID NO: 1299116 - RNA, 19 nt, Artificial Sequence
  Description of Artificial Sequence: Synthetic oligonucleotide
aucaaccaagauagguuca

SEQ ID NO: 1299117 - RNA, 19 nt, Artificial Sequence
  Description of Artificial Sequence: Synthetic oligonucleotide
ucacggcaagaauuacauc

SEQ ID NO: 1299118 - RNA, 19 nt, Artificial Sequence
  Description of Artificial Sequence: Synthetic oligonucleotide
augagguauuuggccaaag

SEQ ID NO: 1299119 - RNA, 19 nt, Artificial Sequence
  Description of Artificial Sequence: Synthetic oligonucleotide
caguagauaucuuggucua

SEQ ID NO: 1299120 - RNA, 19 nt, Artificial Sequence
  Description of Artificial Sequence: Synthetic oligonucleotide
gccuuugacacagccuugg

SEQ ID NO: 1299121 - RNA, 19 nt, Artificial Sequence
  Description of Artificial Sequence: Synthetic oligonucleotide
uccagcugucugagauaag

SEQ ID NO: 1299122 - RNA, 19 nt, Artificial Sequence
  Description of Artificial Sequence: Synthetic oligonucleotide
ggcucucauguuuccagug

SEQ ID NO: 1299123 - RNA, 19 nt, Artificial Sequence
  Description of Artificial Sequence: Synthetic oligonucleotide
ugccugugccuguucgcug

SEQ ID NO: 1299124 - RNA, 19 nt, Artificial Sequence
  Description of Artificial Sequence: Synthetic oligonucleotide
ccaguagauaucuuggucu

SEQ ID NO: 1299125 - RNA, 19 nt, Artificial Sequence
  Description of Artificial Sequence: Synthetic oligonucleotide
auucaccguugucaagaau

SEQ ID NO: 1299126 - RNA, 19 nt, Artificial Sequence
  Description of Artificial Sequence: Synthetic oligonucleotide
ccacgguucaccaugacua

SEQ ID NO: 1299127 - RNA, 19 nt, Artificial Sequence
  Description of Artificial Sequence: Synthetic oligonucleotide
caggggcacauccagaugu

SEQ ID NO: 1299128 - RNA, 19 nt, Artificial Sequence
  Description of Artificial Sequence: Synthetic oligonucleotide
ggagagggauuaucaacca

SEQ ID NO: 1299129 - RNA, 19 nt, Artificial Sequence
  Description of Artificial Sequence: Synthetic oligonucleotide
aguagauaucuuggucuaa

SEQ ID NO: 1299130 - RNA, 19 nt, Artificial Sequence
  Description of Artificial Sequence: Synthetic oligonucleotide
ucggucucagcccgggcuu

SEQ ID NO: 1299131 - RNA, 19 nt, Artificial Sequence
  Description of Artificial Sequence: Synthetic oligonucleotide
gacaacccuuguuauccua

SEQ ID NO: 1299132 - RNA, 19 nt, Artificial Sequence
  Description of Artificial Sequence: Synthetic oligonucleotide
aagauagguucaggagaaa

SEQ ID NO: 1299133 - RNA, 19 nt, Artificial Sequence
  Description of Artificial Sequence: Synthetic oligonucleotide
gggauuuuagcugaaacuu

SEQ ID NO: 1299134 - RNA, 19 nt, Artificial Sequence
  Description of Artificial Sequence: Synthetic oligonucleotide
ccuaaauguuuuagacaac

SEQ ID NO: 1299135 - RNA, 19 nt, Artificial Sequence
  Description of Artificial Sequence: Synthetic oligonucleotide
ggauucucuguuaaacuaa

SEQ ID NO: 1299136 - RNA, 19 nt, Artificial Sequence
  Description of Artificial Sequence: Synthetic oligonucleotide
gguaagcuaugaaaaguaa

SEQ ID NO: 1299137 - RNA, 19 nt, Artificial Sequence
  Description of Artificial Sequence: Synthetic oligonucleotide
cccaguagauaucuugguc

SEQ ID NO: 1299138 - RNA, 19 nt, Artificial Sequence
  Description of Artificial Sequence: Synthetic oligonucleotide
cuguucgcugacuuuguua

SEQ ID NO: 1299139 - RNA, 19 nt, Artificial Sequence
  Description of Artificial Sequence: Synthetic oligonucleotide
uagagcgguucucggucuc

SEQ ID NO: 1299140 - RNA, 19 nt, Artificial Sequence
  Description of Artificial Sequence: Synthetic oligonucleotide
ucgcugacuuuguuaccaa

SEQ ID NO: 1299141 - RNA, 19 nt, Artificial Sequence
  Description of Artificial Sequence: Synthetic oligonucleotide
caacccuuguuauccuaga

SEQ ID NO: 1299142 - RNA, 19 nt, Artificial Sequence
  Description of Artificial Sequence: Synthetic oligonucleotide
ccaaaguaugcuguucaac

SEQ ID NO: 1299143 - RNA, 19 nt, Artificial Sequence
  Description of Artificial Sequence: Synthetic oligonucleotide
acgcuuggcgccugucaug

SEQ ID NO: 1299144 - RNA, 19 nt, Artificial Sequence
  Description of Artificial Sequence: Synthetic oligonucleotide
guguagugguccacuugag

SEQ ID NO: 1299145 - RNA, 19 nt, Artificial Sequence
  Description of Artificial Sequence: Synthetic oligonucleotide
agccuaaauuucauuugaa

SEQ ID NO: 1299146 - RNA, 19 nt, Artificial Sequence
  Description of Artificial Sequence: Synthetic oligonucleotide
guucaacgucaaccucucc

SEQ ID NO: 1299147 - RNA, 19 nt, Artificial Sequence
  Description of Artificial Sequence: Synthetic oligonucleotide
caccaugacuacauucuua

SEQ ID NO: 1299148 - RNA, 19 nt, Artificial Sequence
  Description of Artificial Sequence: Synthetic oligonucleotide
agggcgacccaaacugaag

SEQ ID NO: 1299149 - RNA, 19 nt, Artificial Sequence
  Description of Artificial Sequence: Synthetic oligonucleotide
acaucgcucacggcaagaa

SEQ ID NO: 1299150 - RNA, 19 nt, Artificial Sequence
  Description of Artificial Sequence: Synthetic oligonucleotide
gagcgguucucggucucag

SEQ ID NO: 1299151 - RNA, 19 nt, Artificial Sequence
  Description of Artificial Sequence: Synthetic oligonucleotide
cuucaguauaggacaggua

SEQ ID NO: 1299152 - RNA, 19 nt, Artificial Sequence
  Description of Artificial Sequence: Synthetic oligonucleotide
gcaaucgccacaggcacac

SEQ ID NO: 1299153 - RNA, 19 nt, Artificial Sequence
  Description of Artificial Sequence: Synthetic oligonucleotide
ugcuuggauguugcauacu

SEQ ID NO: 1299154 - RNA, 19 nt, Artificial Sequence
  Description of Artificial Sequence: Synthetic oligonucleotide
aguguacaauucagcugug

SEQ ID NO: 1299155 - RNA, 19 nt, Artificial Sequence
  Description of Artificial Sequence: Synthetic oligonucleotide
caaagugcaccaugucaua

SEQ ID NO: 1299156 - RNA, 19 nt, Artificial Sequence
  Description of Artificial Sequence: Synthetic oligonucleotide
uccaaucuuagaggcucua

SEQ ID NO: 1299157 - RNA, 19 nt, Artificial Sequence
  Description of Artificial Sequence: Synthetic oligonucleotide
ccauucaccguugucaaga

SEQ ID NO: 1299158 - RNA, 19 nt, Artificial Sequence
  Description of Artificial Sequence: Synthetic oligonucleotide
aucgccacaggcacacgcu

SEQ ID NO: 1299159 - RNA, 19 nt, Artificial Sequence
  Description of Artificial Sequence: Synthetic oligonucleotide
cuagugacucugagcgcca

SEQ ID NO: 1299160 - RNA, 19 nt, Artificial Sequence
  Description of Artificial Sequence: Synthetic oligonucleotide
cauucaccguugucaagaa

SEQ ID NO: 1299161 - RNA, 19 nt, Artificial Sequence
  Description of Artificial Sequence: Synthetic oligonucleotide
auuugccgauguaguguag

SEQ ID NO: 1299162 - RNA, 19 nt, Artificial Sequence
  Description of Artificial Sequence: Synthetic oligonucleotide
gcgaagucaccuauuucug

SEQ ID NO: 1299163 - RNA, 19 nt, Artificial Sequence
  Description of Artificial Sequence: Synthetic oligonucleotide
cuugauagucaugugcuuu

SEQ ID NO: 1299164 - RNA, 19 nt, Artificial Sequence
  Description of Artificial Sequence: Synthetic oligonucleotide
ccaugacuacauucuuagc

SEQ ID NO: 1299165 - RNA, 19 nt, Artificial Sequence
  Description of Artificial Sequence: Synthetic oligonucleotide
uggugggauuuuagcugaa

SEQ ID NO: 1299166 - RNA, 19 nt, Artificial Sequence
  Description of Artificial Sequence: Synthetic oligonucleotide
aggcucuacggaggaagug

SEQ ID NO: 1299167 - RNA, 19 nt, Artificial Sequence
  Description of Artificial Sequence: Synthetic oligonucleotide
gcagaagggauucuucagu

SEQ ID NO: 1299168 - RNA, 19 nt, Artificial Sequence
  Description of Artificial Sequence: Synthetic oligonucleotide
gugcuuaguguaaguauua

SEQ ID NO: 1299169 - RNA, 19 nt, Artificial Sequence
  Description of Artificial Sequence: Synthetic oligonucleotide
gcaugaaccggucaauaau

SEQ ID NO: 1299170 - RNA, 19 nt, Artificial Sequence
  Description of Artificial Sequence: Synthetic oligonucleotide
gggucgguguccauucacc

SEQ ID NO: 1299171 - RNA, 19 nt, Artificial Sequence
  Description of Artificial Sequence: Synthetic oligonucleotide
aauauccccuagagcgguu

SEQ ID NO: 1299172 - RNA, 19 nt, Artificial Sequence
  Description of Artificial Sequence: Synthetic oligonucleotide
gcugacuuuguuaccaaua

SEQ ID NO: 1299173 - RNA, 19 nt, Artificial Sequence
  Description of Artificial Sequence: Synthetic oligonucleotide
aggcuacaauuacguacau

SEQ ID NO: 1299174 - RNA, 19 nt, Artificial Sequence
  Description of Artificial Sequence: Synthetic oligonucleotide
gggcacauccagauguuuc

SEQ ID NO: 1299175 - RNA, 19 nt, Artificial Sequence
  Description of Artificial Sequence: Synthetic oligonucleotide
agagcgguucucggucuca

SEQ ID NO: 1299176 - RNA, 19 nt, Artificial Sequence
  Description of Artificial Sequence: Synthetic oligonucleotide
ggugcuuaguguaaguauu

SEQ ID NO: 1299177 - RNA, 19 nt, Artificial Sequence
  Description of Artificial Sequence: Synthetic oligonucleotide
gcuuggauguugcauacuu

SEQ ID NO: 1299178 - RNA, 19 nt, Artificial Sequence
  Description of Artificial Sequence: Synthetic oligonucleotide
ccaauugcauuugccgaug

SEQ ID NO: 1299179 - RNA, 19 nt, Artificial Sequence
  Description of Artificial Sequence: Synthetic oligonucleotide
agcaaucgccacaggcaca

SEQ ID NO: 1299180 - RNA, 19 nt, Artificial Sequence
  Description of Artificial Sequence: Synthetic oligonucleotide
ccaaucuuagaggcucuac

SEQ ID NO: 1299181 - RNA, 19 nt, Artificial Sequence
  Description of Artificial Sequence: Synthetic oligonucleotide
gucgguguccauucaccgu

SEQ ID NO: 1299182 - RNA, 19 nt, Artificial Sequence
  Description of Artificial Sequence: Synthetic oligonucleotide
ggccuuauuuucuguguua

SEQ ID NO: 1299183 - RNA, 19 nt, Artificial Sequence
  Description of Artificial Sequence: Synthetic oligonucleotide
gcucacggcaagaauuaca

SEQ ID NO: 1299184 - RNA, 19 nt, Artificial Sequence
  Description of Artificial Sequence: Synthetic oligonucleotide
caauauccccuagagcggu

SEQ ID NO: 1299185 - RNA, 19 nt, Artificial Sequence
  Description of Artificial Sequence: Synthetic oligonucleotide
guaguguagugguccacuu

SEQ ID NO: 1299186 - RNA, 19 nt, Artificial Sequence
  Description of Artificial Sequence: Synthetic oligonucleotide
guaugcuguucaacgucaa

SEQ ID NO: 1299187 - RNA, 19 nt, Artificial Sequence
  Description of Artificial Sequence: Synthetic oligonucleotide
cuagagcgguucucggucu

SEQ ID NO: 1299188 - RNA, 19 nt, Artificial Sequence
  Description of Artificial Sequence: Synthetic oligonucleotide
gcuuaguguaaguauuauu

SEQ ID NO: 1299189 - RNA, 19 nt, Artificial Sequence
  Description of Artificial Sequence: Synthetic oligonucleotide
gggcgacccaaacugaagu

SEQ ID NO: 1299190 - RNA, 19 nt, Artificial Sequence
  Description of Artificial Sequence: Synthetic oligonucleotide
uagaggcucuacggaggaa

SEQ ID NO: 1299191 - RNA, 19 nt, Artificial Sequence
  Description of Artificial Sequence: Synthetic oligonucleotide
cugcauccacaucgcucac

SEQ ID NO: 1299192 - RNA, 19 nt, Artificial Sequence
  Description of Artificial Sequence: Synthetic oligonucleotide
gccugugccuguucgcuga

SEQ ID NO: 1299193 - RNA, 19 nt, Artificial Sequence
  Description of Artificial Sequence: Synthetic oligonucleotide
uagugacucugagcgccau

SEQ ID NO: 1299194 - RNA, 19 nt, Artificial Sequence
  Description of Artificial Sequence: Synthetic oligonucleotide
caugagguauuuggccaaa

SEQ ID NO: 1299195 - RNA, 19 nt, Artificial Sequence
  Description of Artificial Sequence: Synthetic oligonucleotide
cugagcgccauggcuccuc

SEQ ID NO: 1299196 - RNA, 19 nt, Artificial Sequence
  Description of Artificial Sequence: Synthetic oligonucleotide
uguuuccauugggcuugga

SEQ ID NO: 1299197 - RNA, 19 nt, Artificial Sequence
  Description of Artificial Sequence: Synthetic oligonucleotide
ggucaauaauggaaacagu

SEQ ID NO: 1299198 - RNA, 19 nt, Artificial Sequence
  Description of Artificial Sequence: Synthetic oligonucleotide
ccccuagagcgguucucgg

SEQ ID NO: 1299199 - RNA, 19 nt, Artificial Sequence
  Description of Artificial Sequence: Synthetic oligonucleotide
ggauuuuagcugaaacuuu

SEQ ID NO: 1299200 - RNA, 19 nt, Artificial Sequence
  Description of Artificial Sequence: Synthetic oligonucleotide
ccgauguaguguagugguc

SEQ ID NO: 1299201 - RNA, 19 nt, Artificial Sequence
  Description of Artificial Sequence: Synthetic oligonucleotide
ccggucaauaauggaaaca

SEQ ID NO: 1299202 - RNA, 19 nt, Artificial Sequence
  Description of Artificial Sequence: Synthetic oligonucleotide
cguguuccuagugacucug

SEQ ID NO: 1299203 - RNA, 19 nt, Artificial Sequence
  Description of Artificial Sequence: Synthetic oligonucleotide
agccuuuauugaagagcaa

SEQ ID NO: 1299204 - RNA, 19 nt, Artificial Sequence
  Description of Artificial Sequence: Synthetic oligonucleotide
guguuccuagugacucuga

SEQ ID NO: 1299205 - RNA, 19 nt, Artificial Sequence
  Description of Artificial Sequence: Synthetic oligonucleotide
gccacgguucaccaugacu

SEQ ID NO: 1299206 - RNA, 19 nt, Artificial Sequence
  Description of Artificial Sequence: Synthetic oligonucleotide
cuccaaucuuagaggcucu

SEQ ID NO: 1299207 - RNA, 19 nt, Artificial Sequence
  Description of Artificial Sequence: Synthetic oligonucleotide
gcagagggcgacccaaacu

SEQ ID NO: 1299208 - RNA, 19 nt, Artificial Sequence
  Description of Artificial Sequence: Synthetic oligonucleotide
ggucucagcccgggcuugg

SEQ ID NO: 1299209 - RNA, 19 nt, Artificial Sequence
  Description of Artificial Sequence: Synthetic oligonucleotide
ggugggauuuuagcugaaa

SEQ ID NO: 1299210 - RNA, 19 nt, Artificial Sequence
  Description of Artificial Sequence: Synthetic oligonucleotide
cacggcccaguagauaucu

SEQ ID NO: 1299211 - RNA, 19 nt, Artificial Sequence
  Description of Artificial Sequence: Synthetic oligonucleotide
cgcuuggcgccugucaugc

SEQ ID NO: 1299212 - RNA, 19 nt, Artificial Sequence
  Description of Artificial Sequence: Synthetic oligonucleotide
ggucuaacugauuguucuu

SEQ ID NO: 1299213 - RNA, 19 nt, Artificial Sequence
  Description of Artificial Sequence: Synthetic oligonucleotide
cuucacggcccaguagaua

SEQ ID NO: 1299214 - RNA, 19 nt, Artificial Sequence
  Description of Artificial Sequence: Synthetic oligonucleotide
cacgcuuggcgccugucau

SEQ ID NO: 1299215 - RNA, 19 nt, Artificial Sequence
  Description of Artificial Sequence: Synthetic oligonucleotide
cuuagcaugcuuggauguu

SEQ ID NO: 1299216 - RNA, 19 nt, Artificial Sequence
  Description of Artificial Sequence: Synthetic oligonucleotide
aggggcacauccagauguu

SEQ ID NO: 1299217 - RNA, 19 nt, Artificial Sequence
  Description of Artificial Sequence: Synthetic oligonucleotide
cacacgcuuggcgccuguc

SEQ ID NO: 1299218 - RNA, 19 nt, Artificial Sequence
  Description of Artificial Sequence: Synthetic oligonucleotide
ggcucacucacaggaaccu

SEQ ID NO: 1299219 - RNA, 19 nt, Artificial Sequence
  Description of Artificial Sequence: Synthetic oligonucleotide
caucgcucacggcaagaau

SEQ ID NO: 1299220 - RNA, 19 nt, Artificial Sequence
  Description of Artificial Sequence: Synthetic oligonucleotide
cagggucgguguccauuca

SEQ ID NO: 1299221 - RNA, 19 nt, Artificial Sequence
  Description of Artificial Sequence: Synthetic oligonucleotide
gucucagcccgggcuugga

SEQ ID NO: 1299222 - RNA, 19 nt, Artificial Sequence
  Description of Artificial Sequence: Synthetic oligonucleotide
gcagcagccuaaauuucau

SEQ ID NO: 1299223 - RNA, 19 nt, Artificial Sequence
  Description of Artificial Sequence: Synthetic oligonucleotide
ggccacgguucaccaugac

SEQ ID NO: 1299224 - RNA, 19 nt, Artificial Sequence
  Description of Artificial Sequence: Synthetic oligonucleotide
cggcaagaauuacaucaga

SEQ ID NO: 1299225 - RNA, 19 nt, Artificial Sequence
  Description of Artificial Sequence: Synthetic oligonucleotide
gguucaggagaaagcuuuu

SEQ ID NO: 1299226 - RNA, 19 nt, Artificial Sequence
  Description of Artificial Sequence: Synthetic oligonucleotide
ggcuacaauuacguacauu

SEQ ID NO: 1299227 - RNA, 19 nt, Artificial Sequence
  Description of Artificial Sequence: Synthetic oligonucleotide
cguacauuacuuggauucu

SEQ ID NO: 1299228 - RNA, 19 nt, Artificial Sequence
  Description of Artificial Sequence: Synthetic oligonucleotide
cgguucaccaugacuacau

SEQ ID NO: 1299229 - RNA, 19 nt, Artificial Sequence
  Description of Artificial Sequence: Synthetic oligonucleotide
ggcacacgcuuggcgccug

SEQ ID NO: 1299230 - RNA, 19 nt, Artificial Sequence
  Description of Artificial Sequence: Synthetic oligonucleotide
acggcccaguagauaucuu

SEQ ID NO: 1299231 - RNA, 19 nt, Artificial Sequence
  Description of Artificial Sequence: Synthetic oligonucleotide
gugccagagugcugaucuu

SEQ ID NO: 1299232 - RNA, 19 nt, Artificial Sequence
  Description of Artificial Sequence: Synthetic oligonucleotide
caccaacuagcugcagcau

SEQ ID NO: 1299233 - RNA, 19 nt, Artificial Sequence
  Description of Artificial Sequence: Synthetic oligonucleotide
cgcucacggcaagaauuac

SEQ ID NO: 1299234 - RNA, 19 nt, Artificial Sequence
  Description of Artificial Sequence: Synthetic oligonucleotide
gccuguucgcugacuuugu

SEQ ID NO: 1299235 - RNA, 19 nt, Artificial Sequence
  Description of Artificial Sequence: Synthetic oligonucleotide
ccacuugaguuaugccuuu

SEQ ID NO: 1299236 - RNA, 19 nt, Artificial Sequence
  Description of Artificial Sequence: Synthetic oligonucleotide
ccuguucgcugacuuuguu

SEQ ID NO: 1299237 - RNA, 19 nt, Artificial Sequence
  Description of Artificial Sequence: Synthetic oligonucleotide
auaauuugcacuuagaccc

SEQ ID NO: 1299238 - RNA, 19 nt, Artificial Sequence
  Description of Artificial Sequence: Synthetic oligonucleotide
gauuuuaugaaaaucaucc

SEQ ID NO: 1299239 - RNA, 19 nt, Artificial Sequence
  Description of Artificial Sequence: Synthetic oligonucleotide
uguuuuauggcucugguag

SEQ ID NO: 1299240 - RNA, 19 nt, Artificial Sequence
  Description of Artificial Sequence: Synthetic oligonucleotide
aaaucuauuacauuuuaug

SEQ ID NO: 1299241 - RNA, 19 nt, Artificial Sequence
  Description of Artificial Sequence: Synthetic oligonucleotide
uuagauaccagaauaaagu

SEQ ID NO: 1299242 - RNA, 19 nt, Artificial Sequence
  Description of Artificial Sequence: Synthetic oligonucleotide
agauuuugucuuuaaagcc

SEQ ID NO: 1299243 - RNA, 19 nt, Artificial Sequence
  Description of Artificial Sequence: Synthetic oligonucleotide
aaugcaauacgacaguuug

SEQ ID NO: 1299244 - RNA, 19 nt, Artificial Sequence
  Description of Artificial Sequence: Synthetic oligonucleotide
ugcaauuucaugcaaaugu

SEQ ID NO: 1299245 - RNA, 19 nt, Artificial Sequence
  Description of Artificial Sequence: Synthetic oligonucleotide
aauacgacaguuuggagga

SEQ ID NO: 1299246 - RNA, 19 nt, Artificial Sequence
  Description of Artificial Sequence: Synthetic oligonucleotide
cauuuuaugacauggcagg

SEQ ID NO: 1299247 - RNA, 19 nt, Artificial Sequence
  Description of Artificial Sequence: Synthetic oligonucleotide
uuuacaagggacuucauuc

SEQ ID NO: 1299248 - RNA, 19 nt, Artificial Sequence
  Description of Artificial Sequence: Synthetic oligonucleotide
ugcaguaaccaacagauga

SEQ ID NO: 1299249 - RNA, 19 nt, Artificial Sequence
  Description of Artificial Sequence: Synthetic oligonucleotide
uaucauuugagccauuaca

SEQ ID NO: 1299250 - RNA, 19 nt, Artificial Sequence
  Description of Artificial Sequence: Synthetic oligonucleotide
uguccauuaaaacagcucu

SEQ ID NO: 1299251 - RNA, 19 nt, Artificial Sequence
  Description of Artificial Sequence: Synthetic oligonucleotide
ugaccuuuauaauaaauca

SEQ ID NO: 1299252 - RNA, 19 nt, Artificial Sequence
  Description of Artificial Sequence: Synthetic oligonucleotide
uuuggauguaauuuuaacu

SEQ ID NO: 1299253 - RNA, 19 nt, Artificial Sequence
  Description of Artificial Sequence: Synthetic oligonucleotide
uauugagucaggaauauau

SEQ ID NO: 1299254 - RNA, 19 nt, Artificial Sequence
  Description of Artificial Sequence: Synthetic oligonucleotide
uuucacuuaaauaacuuuc

SEQ ID NO: 1299255 - RNA, 19 nt, Artificial Sequence
  Description of Artificial Sequence: Synthetic oligonucleotide
auuauaaauaccaaguacu

SEQ ID NO: 1299256 - RNA, 19 nt, Artificial Sequence
  Description of Artificial Sequence: Synthetic oligonucleotide
uacauuaacuuuccaaagc

SEQ ID NO: 1299257 - RNA, 19 nt, Artificial Sequence
  Description of Artificial Sequence: Synthetic oligonucleotide
uuuaugaaaaucaucccau

SEQ ID NO: 1299258 - RNA, 19 nt, Artificial Sequence
  Description of Artificial Sequence: Synthetic oligonucleotide
gugggguacaucuagauag

SEQ ID NO: 1299259 - RNA, 19 nt, Artificial Sequence
  Description of Artificial Sequence: Synthetic oligonucleotide
uuggauguaauuuuaacua

SEQ ID NO: 1299260 - RNA, 19 nt, Artificial Sequence
  Description of Artificial Sequence: Synthetic oligonucleotide
uuuacuucuuuacagggaa

SEQ ID NO: 1299261 - RNA, 19 nt, Artificial Sequence
  Description of Artificial Sequence: Synthetic oligonucleotide
acauuaacagauuuugucu

SEQ ID NO: 1299262 - RNA, 19 nt, Artificial Sequence
  Description of Artificial Sequence: Synthetic oligonucleotide
acauauguguugcaguaac

SEQ ID NO: 1299263 - RNA, 19 nt, Artificial Sequence
  Description of Artificial Sequence: Synthetic oligonucleotide
aauggccauauccauuuuc

SEQ ID NO: 1299264 - RNA, 19 nt, Artificial Sequence
  Description of Artificial Sequence: Synthetic oligonucleotide
uauuucuaaauuucaguga

SEQ ID NO: 1299265 - RNA, 19 nt, Artificial Sequence
  Description of Artificial Sequence: Synthetic oligonucleotide
caauccaauggccauaucc

SEQ ID NO: 1299266 - RNA, 19 nt, Artificial Sequence
  Description of Artificial Sequence: Synthetic oligonucleotide
uagaaaaguguacccaucc

SEQ ID NO: 1299267 - RNA, 19 nt, Artificial Sequence
  Description of Artificial Sequence: Synthetic oligonucleotide
agucauuuaauaacugacc

SEQ ID NO: 1299268 - RNA, 19 nt, Artificial Sequence
  Description of Artificial Sequence: Synthetic oligonucleotide
aguugauguauucucaaug

SEQ ID NO: 1299269 - RNA, 19 nt, Artificial Sequence
  Description of Artificial Sequence: Synthetic oligonucleotide
uaauuucacuuaaauaacu

SEQ ID NO: 1299270 - RNA, 19 nt, Artificial Sequence
  Description of Artificial Sequence: Synthetic oligonucleotide
acaucuagauaguucuagc

SEQ ID NO: 1299271 - RNA, 19 nt, Artificial Sequence
  Description of Artificial Sequence: Synthetic oligonucleotide
cuagcaaccaaccacuuug

SEQ ID NO: 1299272 - RNA, 19 nt, Artificial Sequence
  Description of Artificial Sequence: Synthetic oligonucleotide
ugaaaaucaucccaugguc

SEQ ID NO: 1299273 - RNA, 19 nt, Artificial Sequence
  Description of Artificial Sequence: Synthetic oligonucleotide
uguacccaucccaagauug

SEQ ID NO: 1299274 - RNA, 19 nt, Artificial Sequence
  Description of Artificial Sequence: Synthetic oligonucleotide
aaggccaguuaauucaaag

SEQ ID NO: 1299275 - RNA, 19 nt, Artificial Sequence
  Description of Artificial Sequence: Synthetic oligonucleotide
guaaccaacagaugacugg

SEQ ID NO: 1299276 - RNA, 19 nt, Artificial Sequence
  Description of Artificial Sequence: Synthetic oligonucleotide
ucaaccacucaaauaaacu

SEQ ID NO: 1299277 - RNA, 19 nt, Artificial Sequence
  Description of Artificial Sequence: Synthetic oligonucleotide
auguaagccaguccuuucc

SEQ ID NO: 1299278 - RNA, 19 nt, Artificial Sequence
  Description of Artificial Sequence: Synthetic oligonucleotide
agcaguacauauguguugc

SEQ ID NO: 1299279 - RNA, 19 nt, Artificial Sequence
  Description of Artificial Sequence: Synthetic oligonucleotide
auaacugaccuuuauaaua

SEQ ID NO: 1299280 - RNA, 19 nt, Artificial Sequence
  Description of Artificial Sequence: Synthetic oligonucleotide
ugaugcauguccauuaaaa

SEQ ID NO: 1299281 - RNA, 19 nt, Artificial Sequence
  Description of Artificial Sequence: Synthetic oligonucleotide
uucccugacauuaacagau

SEQ ID NO: 1299282 - RNA, 19 nt, Artificial Sequence
  Description of Artificial Sequence: Synthetic oligonucleotide
uaacugaccuuuauaauaa

SEQ ID NO: 1299283 - RNA, 19 nt, Artificial Sequence
  Description of Artificial Sequence: Synthetic oligonucleotide
ugagucaggaauauauuuc

SEQ ID NO: 1299284 - RNA, 19 nt, Artificial Sequence
  Description of Artificial Sequence: Synthetic oligonucleotide
uuuaugacauggcagguua

SEQ ID NO: 1299285 - RNA, 19 nt, Artificial Sequence
  Description of Artificial Sequence: Synthetic oligonucleotide
ugugacuacucauugcagc

SEQ ID NO: 1299286 - RNA, 19 nt, Artificial Sequence
  Description of Artificial Sequence: Synthetic oligonucleotide
uccgagaaaagaaucuccc

SEQ ID NO: 1299287 - RNA, 19 nt, Artificial Sequence
  Description of Artificial Sequence: Synthetic oligonucleotide
cugaccuuuauaauaaauc

SEQ ID NO: 1299288 - RNA, 19 nt, Artificial Sequence
  Description of Artificial Sequence: Synthetic oligonucleotide
ucauguuucucuugguugc

SEQ ID NO: 1299289 - RNA, 19 nt, Artificial Sequence
  Description of Artificial Sequence: Synthetic oligonucleotide
gguacuggcaauccaaugg

SEQ ID NO: 1299290 - RNA, 19 nt, Artificial Sequence
  Description of Artificial Sequence: Synthetic oligonucleotide
uuuuggauguaauuuuaac

SEQ ID NO: 1299291 - RNA, 19 nt, Artificial Sequence
  Description of Artificial Sequence: Synthetic oligonucleotide
uuuuacuucuuuacaggga

SEQ ID NO: 1299292 - RNA, 19 nt, Artificial Sequence
  Description of Artificial Sequence: Synthetic oligonucleotide
caaccaaccacuuugagaa

SEQ ID NO: 1299293 - RNA, 19 nt, Artificial Sequence
  Description of Artificial Sequence: Synthetic oligonucleotide
uguaagccaguccuuuccg

SEQ ID NO: 1299294 - RNA, 19 nt, Artificial Sequence
  Description of Artificial Sequence: Synthetic oligonucleotide
gauaguucuagcaaccaac

SEQ ID NO: 1299295 - RNA, 19 nt, Artificial Sequence
  Description of Artificial Sequence: Synthetic oligonucleotide
auugcagcaauuaacucuc

SEQ ID NO: 1299296 - RNA, 19 nt, Artificial Sequence
  Description of Artificial Sequence: Synthetic oligonucleotide
auaguucuagcaaccaacc

SEQ ID NO: 1299297 - RNA, 19 nt, Artificial Sequence
  Description of Artificial Sequence: Synthetic oligonucleotide
gaugcauguccauuaaaac

SEQ ID NO: 1299298 - RNA, 19 nt, Artificial Sequence
  Description of Artificial Sequence: Synthetic oligonucleotide
acuagugggguacaucuag

SEQ ID NO: 1299299 - RNA, 19 nt, Artificial Sequence
  Description of Artificial Sequence: Synthetic oligonucleotide
uacaagauucaccaucaac

SEQ ID NO: 1299300 - RNA, 19 nt, Artificial Sequence
  Description of Artificial Sequence: Synthetic oligonucleotide
acaugugacuacucauugc

SEQ ID NO: 1299301 - RNA, 19 nt, Artificial Sequence
  Description of Artificial Sequence: Synthetic oligonucleotide
uuacaagggacuucauucc

SEQ ID NO: 1299302 - RNA, 19 nt, Artificial Sequence
  Description of Artificial Sequence: Synthetic oligonucleotide
uacgauuucuuuucuguca

SEQ ID NO: 1299303 - RNA, 19 nt, Artificial Sequence
  Description of Artificial Sequence: Synthetic oligonucleotide
ucaacuaauucuauuucua

SEQ ID NO: 1299304 - RNA, 19 nt, Artificial Sequence
  Description of Artificial Sequence: Synthetic oligonucleotide
ucuaaauuucagugaagac

SEQ ID NO: 1299305 - RNA, 19 nt, Artificial Sequence
  Description of Artificial Sequence: Synthetic oligonucleotide
aauccaauggccauaucca

SEQ ID NO: 1299306 - RNA, 19 nt, Artificial Sequence
  Description of Artificial Sequence: Synthetic oligonucleotide
ugcaauacgacaguuugga

SEQ ID NO: 1299307 - RNA, 19 nt, Artificial Sequence
  Description of Artificial Sequence: Synthetic oligonucleotide
uucaaccacucaaauaaac

SEQ ID NO: 1299308 - RNA, 19 nt, Artificial Sequence
  Description of Artificial Sequence: Synthetic oligonucleotide
uuccgagaaaagaaucucc

SEQ ID NO: 1299309 - RNA, 19 nt, Artificial Sequence
  Description of Artificial Sequence: Synthetic oligonucleotide
uuucuaaauuucagugaag

SEQ ID NO: 1299310 - RNA, 19 nt, Artificial Sequence
  Description of Artificial Sequence: Synthetic oligonucleotide
gauaccagaauaaaguucu

SEQ ID NO: 1299311 - RNA, 19 nt, Artificial Sequence
  Description of Artificial Sequence: Synthetic oligonucleotide
agauuuuaugaaaaucauc

SEQ ID NO: 1299312 - RNA, 19 nt, Artificial Sequence
  Description of Artificial Sequence: Synthetic oligonucleotide
uuccauuaagcaaauuaaa

SEQ ID NO: 1299313 - RNA, 19 nt, Artificial Sequence
  Description of Artificial Sequence: Synthetic oligonucleotide
aagaggguaguacaagaaa

SEQ ID NO: 1299314 - RNA, 19 nt, Artificial Sequence
  Description of Artificial Sequence: Synthetic oligonucleotide
agauucaccaucaacagaa

SEQ ID NO: 1299315 - RNA, 19 nt, Artificial Sequence
  Description of Artificial Sequence: Synthetic oligonucleotide
acauuuuaugacauggcag

SEQ ID NO: 1299316 - RNA, 19 nt, Artificial Sequence
  Description of Artificial Sequence: Synthetic oligonucleotide
agggccauaaauccuccac

SEQ ID NO: 1299317 - RNA, 19 nt, Artificial Sequence
  Description of Artificial Sequence: Synthetic oligonucleotide
agauaccagaauaaaguuc

SEQ ID NO: 1299318 - RNA, 19 nt, Artificial Sequence
  Description of Artificial Sequence: Synthetic oligonucleotide
ucagugaagaccucgcaaa

SEQ ID NO: 1299319 - RNA, 19 nt, Artificial Sequence
  Description of Artificial Sequence: Synthetic oligonucleotide
gagacuucaggacauuuca

SEQ ID NO: 1299320 - RNA, 19 nt, Artificial Sequence
  Description of Artificial Sequence: Synthetic oligonucleotide
aaacauauguccacuuucu

SEQ ID NO: 1299321 - RNA, 19 nt, Artificial Sequence
  Description of Artificial Sequence: Synthetic oligonucleotide
uccauagggcacaaggcca

SEQ ID NO: 1299322 - RNA, 19 nt, Artificial Sequence
  Description of Artificial Sequence: Synthetic oligonucleotide
auuaguauugagucaggaa

SEQ ID NO: 1299323 - RNA, 19 nt, Artificial Sequence
  Description of Artificial Sequence: Synthetic oligonucleotide
ucaauagccaagauuucua

SEQ ID NO: 1299324 - RNA, 19 nt, Artificial Sequence
  Description of Artificial Sequence: Synthetic oligonucleotide
gaagguaauuagcucagga

SEQ ID NO: 1299325 - RNA, 19 nt, Artificial Sequence
  Description of Artificial Sequence: Synthetic oligonucleotide
cauuugagccauuacaaga

SEQ ID NO: 1299326 - RNA, 19 nt, Artificial Sequence
  Description of Artificial Sequence: Synthetic oligonucleotide
cagaauaaaguucuuuuca

SEQ ID NO: 1299327 - RNA, 19 nt, Artificial Sequence
  Description of Artificial Sequence: Synthetic oligonucleotide
auguguugcaguaaccaac

SEQ ID NO: 1299328 - RNA, 19 nt, Artificial Sequence
  Description of Artificial Sequence: Synthetic oligonucleotide
uuuauccaggucugaaugu

SEQ ID NO: 1299329 - RNA, 19 nt, Artificial Sequence
  Description of Artificial Sequence: Synthetic oligonucleotide
agccauuacaagauucacc

SEQ ID NO: 1299330 - RNA, 19 nt, Artificial Sequence
  Description of Artificial Sequence: Synthetic oligonucleotide
uugagucaggaauauauuu

SEQ ID NO: 1299331 - RNA, 19 nt, Artificial Sequence
  Description of Artificial Sequence: Synthetic oligonucleotide
aaugaugcauguccauuaa

SEQ ID NO: 1299332 - RNA, 19 nt, Artificial Sequence
  Description of Artificial Sequence: Synthetic oligonucleotide
acuggcaauacugacauau

SEQ ID NO: 1299333 - RNA, 19 nt, Artificial Sequence
  Description of Artificial Sequence: Synthetic oligonucleotide
ugcacuuagacccucuauu

SEQ ID NO: 1299334 - RNA, 19 nt, Artificial Sequence
  Description of Artificial Sequence: Synthetic oligonucleotide
uucagugaagaccucgcaa

SEQ ID NO: 1299335 - RNA, 19 nt, Artificial Sequence
  Description of Artificial Sequence: Synthetic oligonucleotide
uuagaaaaguguacccauc

SEQ ID NO: 1299336 - RNA, 19 nt, Artificial Sequence
  Description of Artificial Sequence: Synthetic oligonucleotide
uaguauugagucaggaaua

SEQ ID NO: 1299337 - RNA, 19 nt, Artificial Sequence
  Description of Artificial Sequence: Synthetic oligonucleotide
cuguucccauacuugaagg

SEQ ID NO: 1299338 - RNA, 19 nt, Artificial Sequence
  Description of Artificial Sequence: Synthetic oligonucleotide
uugagccauuacaagauuc

SEQ ID NO: 1299339 - RNA, 19 nt, Artificial Sequence
  Description of Artificial Sequence: Synthetic oligonucleotide
ucaccaucaacagaacuga

SEQ ID NO: 1299340 - RNA, 19 nt, Artificial Sequence
  Description of Artificial Sequence: Synthetic oligonucleotide
ucaugcaaaugucuucaac

SEQ ID NO: 1299341 - RNA, 19 nt, Artificial Sequence
  Description of Artificial Sequence: Synthetic oligonucleotide
aaacaacuggcuacuagug

SEQ ID NO: 1299342 - RNA, 19 nt, Artificial Sequence
  Description of Artificial Sequence: Synthetic oligonucleotide
aaagccacagucauuuuau

SEQ ID NO: 1299343 - RNA, 19 nt, Artificial Sequence
  Description of Artificial Sequence: Synthetic oligonucleotide
caugugacuacucauugca

SEQ ID NO: 1299344 - RNA, 19 nt, Artificial Sequence
  Description of Artificial Sequence: Synthetic oligonucleotide
ucuggaucucucaucacau

SEQ ID NO: 1299345 - RNA, 19 nt, Artificial Sequence
  Description of Artificial Sequence: Synthetic oligonucleotide
guccauagggcacaaggcc

SEQ ID NO: 1299346 - RNA, 19 nt, Artificial Sequence
  Description of Artificial Sequence: Synthetic oligonucleotide
gguaauuagcucaggaugc

SEQ ID NO: 1299347 - RNA, 19 nt, Artificial Sequence
  Description of Artificial Sequence: Synthetic oligonucleotide
uucccauacuugaagguaa

SEQ ID NO: 1299348 - RNA, 19 nt, Artificial Sequence
  Description of Artificial Sequence: Synthetic oligonucleotide
ucauuuaauaacugaccuu

SEQ ID NO: 1299349 - RNA, 19 nt, Artificial Sequence
  Description of Artificial Sequence: Synthetic oligonucleotide
guacuggcaauccaauggc

SEQ ID NO: 1299350 - RNA, 19 nt, Artificial Sequence
  Description of Artificial Sequence: Synthetic oligonucleotide
ucgcaaauauguaugugua

SEQ ID NO: 1299351 - RNA, 19 nt, Artificial Sequence
  Description of Artificial Sequence: Synthetic oligonucleotide
cacaaggccaguuaauuca

SEQ ID NO: 1299352 - RNA, 19 nt, Artificial Sequence
  Description of Artificial Sequence: Synthetic oligonucleotide
uauguguugcaguaaccaa

SEQ ID NO: 1299353 - RNA, 19 nt, Artificial Sequence
  Description of Artificial Sequence: Synthetic oligonucleotide
acaggugcaauuucaugca

SEQ ID NO: 1299354 - RNA, 19 nt, Artificial Sequence
  Description of Artificial Sequence: Synthetic oligonucleotide
uuucccugacauuaacaga

SEQ ID NO: 1299355 - RNA, 19 nt, Artificial Sequence
  Description of Artificial Sequence: Synthetic oligonucleotide
uuaugacauggcagguuag

SEQ ID NO: 1299356 - RNA, 19 nt, Artificial Sequence
  Description of Artificial Sequence: Synthetic oligonucleotide
uuuuauggcucugguagca

SEQ ID NO: 1299357 - RNA, 19 nt, Artificial Sequence
  Description of Artificial Sequence: Synthetic oligonucleotide
auaccuuucaauagccaag

SEQ ID NO: 1299358 - RNA, 19 nt, Artificial Sequence
  Description of Artificial Sequence: Synthetic oligonucleotide
uuacgauuucuuuucuguc

SEQ ID NO: 1299359 - RNA, 19 nt, Artificial Sequence
  Description of Artificial Sequence: Synthetic oligonucleotide
uguuuacgauuucuuuucu

SEQ ID NO: 1299360 - RNA, 19 nt, Artificial Sequence
  Description of Artificial Sequence: Synthetic oligonucleotide
accacuuugagaaaucuau

SEQ ID NO: 1299361 - RNA, 19 nt, Artificial Sequence
  Description of Artificial Sequence: Synthetic oligonucleotide
guuuacgauuucuuuucug

SEQ ID NO: 1299362 - RNA, 19 nt, Artificial Sequence
  Description of Artificial Sequence: Synthetic oligonucleotide
gacuucaggacauuucaaa

SEQ ID NO: 1299363 - RNA, 19 nt, Artificial Sequence
  Description of Artificial Sequence: Synthetic oligonucleotide
uuauucacuugauuuccau

SEQ ID NO: 1299364 - RNA, 19 nt, Artificial Sequence
  Description of Artificial Sequence: Synthetic oligonucleotide
accuuuauaauaaaucauu

SEQ ID NO: 1299365 - RNA, 19 nt, Artificial Sequence
  Description of Artificial Sequence: Synthetic oligonucleotide
cacaugugacuacucauug

SEQ ID NO: 1299366 - RNA, 19 nt, Artificial Sequence
  Description of Artificial Sequence: Synthetic oligonucleotide
aaaaugcaauacgacaguu

SEQ ID NO: 1299367 - RNA, 19 nt, Artificial Sequence
  Description of Artificial Sequence: Synthetic oligonucleotide
guuuggaggagcauuauaa

SEQ ID NO: 1299368 - RNA, 19 nt, Artificial Sequence
  Description of Artificial Sequence: Synthetic oligonucleotide
aguccuuuccgagaaaaga

SEQ ID NO: 1299369 - RNA, 19 nt, Artificial Sequence
  Description of Artificial Sequence: Synthetic oligonucleotide
aucacaugugacuacucau

SEQ ID NO: 1299370 - RNA, 19 nt, Artificial Sequence
  Description of Artificial Sequence: Synthetic oligonucleotide
ugaagaccucgcaaauaug

SEQ ID NO: 1299371 - RNA, 19 nt, Artificial Sequence
  Description of Artificial Sequence: Synthetic oligonucleotide
guugcaguaaccaacagau

SEQ ID NO: 1299372 - RNA, 19 nt, Artificial Sequence
  Description of Artificial Sequence: Synthetic oligonucleotide
cuuaagcaguacauaugug

SEQ ID NO: 1299373 - RNA, 19 nt, Artificial Sequence
  Description of Artificial Sequence: Synthetic oligonucleotide
gcaauuaacucucuucaac

SEQ ID NO: 1299374 - RNA, 19 nt, Artificial Sequence
  Description of Artificial Sequence: Synthetic oligonucleotide
auaaauccuccacuggcaa

SEQ ID NO: 1299375 - RNA, 19 nt, Artificial Sequence
  Description of Artificial Sequence: Synthetic oligonucleotide
uuuccgagaaaagaaucuc

SEQ ID NO: 1299376 - RNA, 19 nt, Artificial Sequence
  Description of Artificial Sequence: Synthetic oligonucleotide
ugacugggaaacauauguc

SEQ ID NO: 1299377 - RNA, 19 nt, Artificial Sequence
  Description of Artificial Sequence: Synthetic oligonucleotide
aaccacucaaauaaacuuu

SEQ ID NO: 1299378 - RNA, 19 nt, Artificial Sequence
  Description of Artificial Sequence: Synthetic oligonucleotide
accugaaaaugaugcaugu

SEQ ID NO: 1299379 - RNA, 19 nt, Artificial Sequence
  Description of Artificial Sequence: Synthetic oligonucleotide
agaccucgcaaauauguau

SEQ ID NO: 1299380 - RNA, 19 nt, Artificial Sequence
  Description of Artificial Sequence: Synthetic oligonucleotide
gaccucgcaaauauguaug

SEQ ID NO: 1299381 - RNA, 19 nt, Artificial Sequence
  Description of Artificial Sequence: Synthetic oligonucleotide
cacuuagacccucuauuag

SEQ ID NO: 1299382 - RNA, 19 nt, Artificial Sequence
  Description of Artificial Sequence: Synthetic oligonucleotide
uaugacauggcagguuaga

SEQ ID NO: 1299383 - RNA, 19 nt, Artificial Sequence
  Description of Artificial Sequence: Synthetic oligonucleotide
cugggaaacauauguccac

SEQ ID NO: 1299384 - RNA, 19 nt, Artificial Sequence
  Description of Artificial Sequence: Synthetic oligonucleotide
caacuggcuacuagugggg

SEQ ID NO: 1299385 - RNA, 19 nt, Artificial Sequence
  Description of Artificial Sequence: Synthetic oligonucleotide
uugagaaaucuauuacauu

SEQ ID NO: 1299386 - RNA, 19 nt, Artificial Sequence
  Description of Artificial Sequence: Synthetic oligonucleotide
gugacuacucauugcagca

SEQ ID NO: 1299387 - RNA, 19 nt, Artificial Sequence
  Description of Artificial Sequence: Synthetic oligonucleotide
agauaguucuagcaaccaa

SEQ ID NO: 1299388 - RNA, 19 nt, Artificial Sequence
  Description of Artificial Sequence: Synthetic oligonucleotide
cuaucauuugagccauuac

SEQ ID NO: 1299389 - RNA, 19 nt, Artificial Sequence
  Description of Artificial Sequence: Synthetic oligonucleotide
aguguacccaucccaagau

SEQ ID NO: 1299390 - RNA, 19 nt, Artificial Sequence
  Description of Artificial Sequence: Synthetic oligonucleotide
agaggguaguacaagaaaa

SEQ ID NO: 1299391 - RNA, 19 nt, Artificial Sequence
  Description of Artificial Sequence: Synthetic oligonucleotide
ugugcccuugguccauagg

SEQ ID NO: 1299392 - RNA, 19 nt, Artificial Sequence
  Description of Artificial Sequence: Synthetic oligonucleotide
gaagaccucgcaaauaugu

SEQ ID NO: 1299393 - RNA, 19 nt, Artificial Sequence
  Description of Artificial Sequence: Synthetic oligonucleotide
auuuucuggccccuccaca

SEQ ID NO: 1299394 - RNA, 19 nt, Artificial Sequence
  Description of Artificial Sequence: Synthetic oligonucleotide
aguaaccaacagaugacug

SEQ ID NO: 1299395 - RNA, 19 nt, Artificial Sequence
  Description of Artificial Sequence: Synthetic oligonucleotide
gauguaagccaguccuuuc

SEQ ID NO: 1299396 - RNA, 19 nt, Artificial Sequence
  Description of Artificial Sequence: Synthetic oligonucleotide
caguacauauguguugcag

SEQ ID NO: 1299397 - RNA, 19 nt, Artificial Sequence
  Description of Artificial Sequence: Synthetic oligonucleotide
augacauggcagguuagag

SEQ ID NO: 1299398 - RNA, 19 nt, Artificial Sequence
  Description of Artificial Sequence: Synthetic oligonucleotide
uagacccucuauuaguauu

SEQ ID NO: 1299399 - RNA, 19 nt, Artificial Sequence
  Description of Artificial Sequence: Synthetic oligonucleotide
agggacuucauuccucuau

SEQ ID NO: 1299400 - RNA, 19 nt, Artificial Sequence
  Description of Artificial Sequence: Synthetic oligonucleotide
agcaauuaacucucuucaa

SEQ ID NO: 1299401 - RNA, 19 nt, Artificial Sequence
  Description of Artificial Sequence: Synthetic oligonucleotide
uacgacaguuuggaggagc

SEQ ID NO: 1299402 - RNA, 19 nt, Artificial Sequence
  Description of Artificial Sequence: Synthetic oligonucleotide
uagcaaccaaccacuuuga

SEQ ID NO: 1299403 - RNA, 19 nt, Artificial Sequence
  Description of Artificial Sequence: Synthetic oligonucleotide
uuugagccauuacaagauu

SEQ ID NO: 1299404 - RNA, 19 nt, Artificial Sequence
  Description of Artificial Sequence: Synthetic oligonucleotide
aacugaccuuuauaauaaa

SEQ ID NO: 1299405 - RNA, 19 nt, Artificial Sequence
  Description of Artificial Sequence: Synthetic oligonucleotide
aguauugagucaggaauau

SEQ ID NO: 1299406 - RNA, 19 nt, Artificial Sequence
  Description of Artificial Sequence: Synthetic oligonucleotide
cucgcaaauauguaugugu

SEQ ID NO: 1299407 - RNA, 19 nt, Artificial Sequence
  Description of Artificial Sequence: Synthetic oligonucleotide
ucuagcaaccaaccacuuu

SEQ ID NO: 1299408 - RNA, 19 nt, Artificial Sequence
  Description of Artificial Sequence: Synthetic oligonucleotide
uugcaguaaccaacagaug

SEQ ID NO: 1299409 - RNA, 19 nt, Artificial Sequence
  Description of Artificial Sequence: Synthetic oligonucleotide
cuacuagugggguacaucu

SEQ ID NO: 1299410 - RNA, 19 nt, Artificial Sequence
  Description of Artificial Sequence: Synthetic oligonucleotide
ugggguacaucuagauagu

SEQ ID NO: 1299411 - RNA, 19 nt, Artificial Sequence
  Description of Artificial Sequence: Synthetic oligonucleotide
ccaagauugauuacaauaa

SEQ ID NO: 1299412 - RNA, 19 nt, Artificial Sequence
  Description of Artificial Sequence: Synthetic oligonucleotide
gcuguucccauacuugaag

SEQ ID NO: 1299413 - RNA, 19 nt, Artificial Sequence
  Description of Artificial Sequence: Synthetic oligonucleotide
uuauggcucugguagcauc

SEQ ID NO: 1299414 - RNA, 19 nt, Artificial Sequence
  Description of Artificial Sequence: Synthetic oligonucleotide
agacccucuauuaguauug

SEQ ID NO: 1299415 - RNA, 19 nt, Artificial Sequence
  Description of Artificial Sequence: Synthetic oligonucleotide
uuacuucuuuacagggaaa

SEQ ID NO: 1299416 - RNA, 19 nt, Artificial Sequence
  Description of Artificial Sequence: Synthetic oligonucleotide
agcaaccaaccacuuugag

SEQ ID NO: 1299417 - RNA, 19 nt, Artificial Sequence
  Description of Artificial Sequence: Synthetic oligonucleotide
accucgcaaauauguaugu

SEQ ID NO: 1299418 - RNA, 19 nt, Artificial Sequence
  Description of Artificial Sequence: Synthetic oligonucleotide
ucucuucaacuaauucuau

SEQ ID NO: 1299419 - RNA, 19 nt, Artificial Sequence
  Description of Artificial Sequence: Synthetic oligonucleotide
cuggcuacuagugggguac

SEQ ID NO: 1299420 - RNA, 19 nt, Artificial Sequence
  Description of Artificial Sequence: Synthetic oligonucleotide
cuuagacccucuauuagua

SEQ ID NO: 1299421 - RNA, 19 nt, Artificial Sequence
  Description of Artificial Sequence: Synthetic oligonucleotide
caucccaagauugauuaca

SEQ ID NO: 1299422 - RNA, 19 nt, Artificial Sequence
  Description of Artificial Sequence: Synthetic oligonucleotide
uggccauauccauuuucug

SEQ ID NO: 1299423 - RNA, 19 nt, Artificial Sequence
  Description of Artificial Sequence: Synthetic oligonucleotide
agccaagauuucuauccca

SEQ ID NO: 1299424 - RNA, 19 nt, Artificial Sequence
  Description of Artificial Sequence: Synthetic oligonucleotide
aaaagugugccaagaccau

SEQ ID NO: 1299425 - RNA, 19 nt, Artificial Sequence
  Description of Artificial Sequence: Synthetic oligonucleotide
ggccauaaauccuccacug

SEQ ID NO: 1299426 - RNA, 19 nt, Artificial Sequence
  Description of Artificial Sequence: Synthetic oligonucleotide
uuagacccucuauuaguau

SEQ ID NO: 1299427 - RNA, 19 nt, Artificial Sequence
  Description of Artificial Sequence: Synthetic oligonucleotide
uagugggguacaucuagau

SEQ ID NO: 1299428 - RNA, 19 nt, Artificial Sequence
  Description of Artificial Sequence: Synthetic oligonucleotide
uuacaagauucaccaucaa

SEQ ID NO: 1299429 - RNA, 19 nt, Artificial Sequence
  Description of Artificial Sequence: Synthetic oligonucleotide
auuagcucaggaugcuuuu

SEQ ID NO: 1299430 - RNA, 19 nt, Artificial Sequence
  Description of Artificial Sequence: Synthetic oligonucleotide
ucaucacaugugacuacuc

SEQ ID NO: 1299431 - RNA, 19 nt, Artificial Sequence
  Description of Artificial Sequence: Synthetic oligonucleotide
agcauccaacacuuucaug

SEQ ID NO: 1299432 - RNA, 19 nt, Artificial Sequence
  Description of Artificial Sequence: Synthetic oligonucleotide
gccauaaauccuccacugg

SEQ ID NO: 1299433 - RNA, 19 nt, Artificial Sequence
  Description of Artificial Sequence: Synthetic oligonucleotide
cugaaguccacaggaguug

SEQ ID NO: 1299434 - RNA, 19 nt, Artificial Sequence
  Description of Artificial Sequence: Synthetic oligonucleotide
aguuuggaggagcauuaua

SEQ ID NO: 1299435 - RNA, 19 nt, Artificial Sequence
  Description of Artificial Sequence: Synthetic oligonucleotide
gugaagaccucgcaaauau

SEQ ID NO: 1299436 - RNA, 19 nt, Artificial Sequence
  Description of Artificial Sequence: Synthetic oligonucleotide
gcaaccaaccacuuugaga

SEQ ID NO: 1299437 - RNA, 19 nt, Artificial Sequence
  Description of Artificial Sequence: Synthetic oligonucleotide
gagccauuacaagauucac

SEQ ID NO: 1299438 - RNA, 19 nt, Artificial Sequence
  Description of Artificial Sequence: Synthetic oligonucleotide
accaaccacuuugagaaau

SEQ ID NO: 1299439 - RNA, 19 nt, Artificial Sequence
  Description of Artificial Sequence: Synthetic oligonucleotide
cccaagauugauuacaaua

SEQ ID NO: 1299440 - RNA, 19 nt, Artificial Sequence
  Description of Artificial Sequence: Synthetic oligonucleotide
aacuggcuacuaguggggu

SEQ ID NO: 1299441 - RNA, 19 nt, Artificial Sequence
  Description of Artificial Sequence: Synthetic oligonucleotide
gacuggauguaagccaguc

SEQ ID NO: 1299442 - RNA, 19 nt, Artificial Sequence
  Description of Artificial Sequence: Synthetic oligonucleotide
ucccauacuugaagguaau

SEQ ID NO: 1299443 - RNA, 19 nt, Artificial Sequence
  Description of Artificial Sequence: Synthetic oligonucleotide
accacucaaauaaacuuuu

SEQ ID NO: 1299444 - RNA, 19 nt, Artificial Sequence
  Description of Artificial Sequence: Synthetic oligonucleotide
auugagucaggaauauauu

SEQ ID NO: 1299445 - RNA, 19 nt, Artificial Sequence
  Description of Artificial Sequence: Synthetic oligonucleotide
ccuuuccgagaaaagaauc

SEQ ID NO: 1299446 - RNA, 19 nt, Artificial Sequence
  Description of Artificial Sequence: Synthetic oligonucleotide
aguacugcacaggugcaau

SEQ ID NO: 1299447 - RNA, 19 nt, Artificial Sequence
  Description of Artificial Sequence: Synthetic oligonucleotide
gccaagauuucuaucccag

SEQ ID NO: 1299448 - RNA, 19 nt, Artificial Sequence
  Description of Artificial Sequence: Synthetic oligonucleotide
uggcagguuagaguuacua

SEQ ID NO: 1299449 - RNA, 19 nt, Artificial Sequence
  Description of Artificial Sequence: Synthetic oligonucleotide
caaccacucaaauaaacuu

SEQ ID NO: 1299450 - RNA, 19 nt, Artificial Sequence
  Description of Artificial Sequence: Synthetic oligonucleotide
uggauguaagccaguccuu

SEQ ID NO: 1299451 - RNA, 19 nt, Artificial Sequence
  Description of Artificial Sequence: Synthetic oligonucleotide
caaagaugcaaaagaaauu

SEQ ID NO: 1299452 - RNA, 19 nt, Artificial Sequence
  Description of Artificial Sequence: Synthetic oligonucleotide
uugucgagacuggauguaa

SEQ ID NO: 1299453 - RNA, 19 nt, Artificial Sequence
  Description of Artificial Sequence: Synthetic oligonucleotide
uacuagugggguacaucua

SEQ ID NO: 1299454 - RNA, 19 nt, Artificial Sequence
  Description of Artificial Sequence: Synthetic oligonucleotide
ugacuacucauugcagcaa

SEQ ID NO: 1299455 - RNA, 19 nt, Artificial Sequence
  Description of Artificial Sequence: Synthetic oligonucleotide
acauuucaaagaggguagu

SEQ ID NO: 1299456 - RNA, 19 nt, Artificial Sequence
  Description of Artificial Sequence: Synthetic oligonucleotide
gguccauagggcacaaggc

SEQ ID NO: 1299457 - RNA, 19 nt, Artificial Sequence
  Description of Artificial Sequence: Synthetic oligonucleotide
guaagccaguccuuuccga

SEQ ID NO: 1299458 - RNA, 19 nt, Artificial Sequence
  Description of Artificial Sequence: Synthetic oligonucleotide
aauguccgccaggugcugu

SEQ ID NO: 1299459 - RNA, 19 nt, Artificial Sequence
  Description of Artificial Sequence: Synthetic oligonucleotide
ccaggucugaauguuuacg

SEQ ID NO: 1299460 - RNA, 19 nt, Artificial Sequence
  Description of Artificial Sequence: Synthetic oligonucleotide
gcaguaaccaacagaugac

SEQ ID NO: 1299461 - RNA, 19 nt, Artificial Sequence
  Description of Artificial Sequence: Synthetic oligonucleotide
agugaagaccucgcaaaua

SEQ ID NO: 1299462 - RNA, 19 nt, Artificial Sequence
  Description of Artificial Sequence: Synthetic oligonucleotide
gcaauacgacaguuuggag

SEQ ID NO: 1299463 - RNA, 19 nt, Artificial Sequence
  Description of Artificial Sequence: Synthetic oligonucleotide
guucccauacuugaaggua

SEQ ID NO: 1299464 - RNA, 19 nt, Artificial Sequence
  Description of Artificial Sequence: Synthetic oligonucleotide
cucuugguugccuuaauuu

SEQ ID NO: 1299465 - RNA, 19 nt, Artificial Sequence
  Description of Artificial Sequence: Synthetic oligonucleotide
gggacuucauuccucuauc

SEQ ID NO: 1299466 - RNA, 19 nt, Artificial Sequence
  Description of Artificial Sequence: Synthetic oligonucleotide
cuucaaccacucaaauaaa

SEQ ID NO: 1299467 - RNA, 19 nt, Artificial Sequence
  Description of Artificial Sequence: Synthetic oligonucleotide
accaaguacugcacaggug

SEQ ID NO: 1299468 - RNA, 19 nt, Artificial Sequence
  Description of Artificial Sequence: Synthetic oligonucleotide
ugguugccuuaauuucacu

SEQ ID NO: 1299469 - RNA, 19 nt, Artificial Sequence
  Description of Artificial Sequence: Synthetic oligonucleotide
gacuacucauugcagcaau

SEQ ID NO: 1299470 - RNA, 19 nt, Artificial Sequence
  Description of Artificial Sequence: Synthetic oligonucleotide
acgacaguuuggaggagca

SEQ ID NO: 1299471 - RNA, 19 nt, Artificial Sequence
  Description of Artificial Sequence: Synthetic oligonucleotide
caagauugauuacaauaau

SEQ ID NO: 1299472 - RNA, 19 nt, Artificial Sequence
  Description of Artificial Sequence: Synthetic oligonucleotide
ccuuaagcaguacauaugu

SEQ ID NO: 1299473 - RNA, 19 nt, Artificial Sequence
  Description of Artificial Sequence: Synthetic oligonucleotide
uacccaucccaagauugau

SEQ ID NO: 1299474 - RNA, 19 nt, Artificial Sequence
  Description of Artificial Sequence: Synthetic oligonucleotide
acuggcuacuaguggggua

SEQ ID NO: 1299475 - RNA, 19 nt, Artificial Sequence
  Description of Artificial Sequence: Synthetic oligonucleotide
ucuggccccuccacauuaa

SEQ ID NO: 1299476 - RNA, 19 nt, Artificial Sequence
  Description of Artificial Sequence: Synthetic oligonucleotide
acaaggccaguuaauucaa

SEQ ID NO: 1299477 - RNA, 19 nt, Artificial Sequence
  Description of Artificial Sequence: Synthetic oligonucleotide
aggugcaauuucaugcaaa

SEQ ID NO: 1299478 - RNA, 19 nt, Artificial Sequence
  Description of Artificial Sequence: Synthetic oligonucleotide
guacccaucccaagauuga

SEQ ID NO: 1299479 - RNA, 19 nt, Artificial Sequence
  Description of Artificial Sequence: Synthetic oligonucleotide
gcagguuagaguuacuauu

SEQ ID NO: 1299480 - RNA, 19 nt, Artificial Sequence
  Description of Artificial Sequence: Synthetic oligonucleotide
gcacuuagacccucuauua

SEQ ID NO: 1299481 - RNA, 19 nt, Artificial Sequence
  Description of Artificial Sequence: Synthetic oligonucleotide
gacccucuauuaguauuga

SEQ ID NO: 1299482 - RNA, 19 nt, Artificial Sequence
  Description of Artificial Sequence: Synthetic oligonucleotide
ugguagcaucuccugcauu

SEQ ID NO: 1299483 - RNA, 19 nt, Artificial Sequence
  Description of Artificial Sequence: Synthetic oligonucleotide
guaauuagcucaggaugcu

SEQ ID NO: 1299484 - RNA, 19 nt, Artificial Sequence
  Description of Artificial Sequence: Synthetic oligonucleotide
cgcaaauauguauguguac

SEQ ID NO: 1299485 - RNA, 19 nt, Artificial Sequence
  Description of Artificial Sequence: Synthetic oligonucleotide
ccauacuugaagguaauua

SEQ ID NO: 1299486 - RNA, 19 nt, Artificial Sequence
  Description of Artificial Sequence: Synthetic oligonucleotide
cucaucacaugugacuacu

SEQ ID NO: 1299487 - RNA, 19 nt, Artificial Sequence
  Description of Artificial Sequence: Synthetic oligonucleotide
auacgacaguuuggaggag

SEQ ID NO: 1299488 - RNA, 19 nt, Artificial Sequence
  Description of Artificial Sequence: Synthetic oligonucleotide
ucucggccacugcccauaa

SEQ ID NO: 1299489 - RNA, 19 nt, Artificial Sequence
  Description of Artificial Sequence: Synthetic oligonucleotide
auccuccacuggcaauacu

SEQ ID NO: 1299490 - RNA, 19 nt, Artificial Sequence
  Description of Artificial Sequence: Synthetic oligonucleotide
acuacucauugcagcaauu

SEQ ID NO: 1299491 - RNA, 19 nt, Artificial Sequence
  Description of Artificial Sequence: Synthetic oligonucleotide
caguaaccaacagaugacu

SEQ ID NO: 1299492 - RNA, 19 nt, Artificial Sequence
  Description of Artificial Sequence: Synthetic oligonucleotide
gcuacuagugggguacauc

SEQ ID NO: 1299493 - RNA, 19 nt, Artificial Sequence
  Description of Artificial Sequence: Synthetic oligonucleotide
cuggcaauccaauggccau

SEQ ID NO: 1299494 - RNA, 19 nt, Artificial Sequence
  Description of Artificial Sequence: Synthetic oligonucleotide
auagggcacaaggccaguu

SEQ ID NO: 1299495 - RNA, 19 nt, Artificial Sequence
  Description of Artificial Sequence: Synthetic oligonucleotide
gcuguuuuauggcucuggu

SEQ ID NO: 1299496 - RNA, 19 nt, Artificial Sequence
  Description of Artificial Sequence: Synthetic oligonucleotide
guauugagucaggaauaua

SEQ ID NO: 1299497 - RNA, 19 nt, Artificial Sequence
  Description of Artificial Sequence: Synthetic oligonucleotide
gggccauaaauccuccacu

SEQ ID NO: 1299498 - RNA, 19 nt, Artificial Sequence
  Description of Artificial Sequence: Synthetic oligonucleotide
ccaagauuucuaucccaga

SEQ ID NO: 1299499 - RNA, 19 nt, Artificial Sequence
  Description of Artificial Sequence: Synthetic oligonucleotide
gcuugucgagacuggaugu

SEQ ID NO: 1299500 - RNA, 19 nt, Artificial Sequence
  Description of Artificial Sequence: Synthetic oligonucleotide
ggcagguuagaguuacuau

SEQ ID NO: 1299501 - RNA, 19 nt, Artificial Sequence
  Description of Artificial Sequence: Synthetic oligonucleotide
caacagaacugaugcugcu

SEQ ID NO: 1299502 - RNA, 19 nt, Artificial Sequence
  Description of Artificial Sequence: Synthetic oligonucleotide
uggcuacuagugggguaca

SEQ ID NO: 1299503 - RNA, 19 nt, Artificial Sequence
  Description of Artificial Sequence: Synthetic oligonucleotide
guacaucuagauaguucua

SEQ ID NO: 1299504 - RNA, 19 nt, Artificial Sequence
  Description of Artificial Sequence: Synthetic oligonucleotide
cuguugcagggccauaaau

SEQ ID NO: 1299505 - RNA, 19 nt, Artificial Sequence
  Description of Artificial Sequence: Synthetic oligonucleotide
ccucgcaaauauguaugug

SEQ ID NO: 1299506 - RNA, 19 nt, Artificial Sequence
  Description of Artificial Sequence: Synthetic oligonucleotide
gcaguacauauguguugca

SEQ ID NO: 1299507 - RNA, 19 nt, Artificial Sequence
  Description of Artificial Sequence: Synthetic oligonucleotide
agacuggauguaagccagu

SEQ ID NO: 1299508 - RNA, 19 nt, Artificial Sequence
  Description of Artificial Sequence: Synthetic oligonucleotide
cagugaagaccucgcaaau

SEQ ID NO: 1299509 - RNA, 19 nt, Artificial Sequence
  Description of Artificial Sequence: Synthetic oligonucleotide
gcugaaguccacaggaguu

SEQ ID NO: 1299510 - RNA, 19 nt, Artificial Sequence
  Description of Artificial Sequence: Synthetic oligonucleotide
ggcacaaggccaguuaauu

SEQ ID NO: 1299511 - RNA, 19 nt, Artificial Sequence
  Description of Artificial Sequence: Synthetic oligonucleotide
guguacccaucccaagauu

SEQ ID NO: 1299512 - RNA, 19 nt, Artificial Sequence
  Description of Artificial Sequence: Synthetic oligonucleotide
ggauguaagccaguccuuu

SEQ ID NO: 1299513 - RNA, 19 nt, Artificial Sequence
  Description of Artificial Sequence: Synthetic oligonucleotide
gaaguccacaggaguugau

SEQ ID NO: 1299514 - RNA, 19 nt, Artificial Sequence
  Description of Artificial Sequence: Synthetic oligonucleotide
cuugguccauagggcacaa

SEQ ID NO: 1299515 - RNA, 19 nt, Artificial Sequence
  Description of Artificial Sequence: Synthetic oligonucleotide
ggcaauccaauggccauau

SEQ ID NO: 1299516 - RNA, 19 nt, Artificial Sequence
  Description of Artificial Sequence: Synthetic oligonucleotide
caccaucaacagaacugau

SEQ ID NO: 1299517 - RNA, 19 nt, Artificial Sequence
  Description of Artificial Sequence: Synthetic oligonucleotide
cauagggcacaaggccagu

SEQ ID NO: 1299518 - RNA, 19 nt, Artificial Sequence
  Description of Artificial Sequence: Synthetic oligonucleotide
cucggccacugcccauaaa

SEQ ID NO: 1299519 - RNA, 19 nt, Artificial Sequence
  Description of Artificial Sequence: Synthetic oligonucleotide
cuggccccuccacauuaau

SEQ ID NO: 1299520 - RNA, 19 nt, Artificial Sequence
  Description of Artificial Sequence: Synthetic oligonucleotide
gggguacaucuagauaguu

SEQ ID NO: 1299521 - RNA, 19 nt, Artificial Sequence
  Description of Artificial Sequence: Synthetic oligonucleotide
ggcuacuagugggguacau

SEQ ID NO: 1299522 - RNA, 19 nt, Artificial Sequence
  Description of Artificial Sequence: Synthetic oligonucleotide
cccauacuugaagguaauu

SEQ ID NO: 1299523 - RNA, 19 nt, Artificial Sequence
  Description of Artificial Sequence: Synthetic oligonucleotide
cgacaguuuggaggagcau

SEQ ID NO: 1299524 - RNA, 19 nt, Artificial Sequence
  Description of Artificial Sequence: Synthetic oligonucleotide
ugaacaugaacauuuaacg

SEQ ID NO: 1299525 - RNA, 19 nt, Artificial Sequence
  Description of Artificial Sequence: Synthetic oligonucleotide
uauugcagagcucacaucg

SEQ ID NO: 1299526 - RNA, 19 nt, Artificial Sequence
  Description of Artificial Sequence: Synthetic oligonucleotide
aaagcuugcauugauaggg

SEQ ID NO: 1299527 - RNA, 19 nt, Artificial Sequence
  Description of Artificial Sequence: Synthetic oligonucleotide
aauaagggcauugauaggg

SEQ ID NO: 1299528 - RNA, 19 nt, Artificial Sequence
  Description of Artificial Sequence: Synthetic oligonucleotide
aauaucaucaacugccaag

SEQ ID NO: 1299529 - RNA, 19 nt, Artificial Sequence
  Description of Artificial Sequence: Synthetic oligonucleotide
uugacaaucaaauaucuca

SEQ ID NO: 1299530 - RNA, 19 nt, Artificial Sequence
  Description of Artificial Sequence: Synthetic oligonucleotide
uguaacaaaggccuuauug

SEQ ID NO: 1299531 - RNA, 19 nt, Artificial Sequence
  Description of Artificial Sequence: Synthetic oligonucleotide
acagcugucgacuuuacac

SEQ ID NO: 1299532 - RNA, 19 nt, Artificial Sequence
  Description of Artificial Sequence: Synthetic oligonucleotide
ugugagucaucuuaugucg

SEQ ID NO: 1299533 - RNA, 19 nt, Artificial Sequence
  Description of Artificial Sequence: Synthetic oligonucleotide
acagugaugacacuugaac

SEQ ID NO: 1299534 - RNA, 19 nt, Artificial Sequence
  Description of Artificial Sequence: Synthetic oligonucleotide
aauaucucaugaaucuucc

SEQ ID NO: 1299535 - RNA, 19 nt, Artificial Sequence
  Description of Artificial Sequence: Synthetic oligonucleotide
cuuaggaucaccagugugg

SEQ ID NO: 1299536 - RNA, 19 nt, Artificial Sequence
  Description of Artificial Sequence: Synthetic oligonucleotide
cugauugucccuuagagug

SEQ ID NO: 1299537 - RNA, 19 nt, Artificial Sequence
  Description of Artificial Sequence: Synthetic oligonucleotide
ugaucaagccucuugaaug

SEQ ID NO: 1299538 - RNA, 19 nt, Artificial Sequence
  Description of Artificial Sequence: Synthetic oligonucleotide
guaacaaaggccuuauugc

SEQ ID NO: 1299539 - RNA, 19 nt, Artificial Sequence
  Description of Artificial Sequence: Synthetic oligonucleotide
aguacgaauaugcaucuuc

SEQ ID NO: 1299540 - RNA, 19 nt, Artificial Sequence
  Description of Artificial Sequence: Synthetic oligonucleotide
uauaaggucgcuuuucuga

SEQ ID NO: 1299541 - RNA, 19 nt, Artificial Sequence
  Description of Artificial Sequence: Synthetic oligonucleotide
uaucucaugaaucuuccug

SEQ ID NO: 1299542 - RNA, 19 nt, Artificial Sequence
  Description of Artificial Sequence: Synthetic oligonucleotide
ugaaugauuuguuacagau

SEQ ID NO: 1299543 - RNA, 19 nt, Artificial Sequence
  Description of Artificial Sequence: Synthetic oligonucleotide
cuuagaguggucaacuuug

SEQ ID NO: 1299544 - RNA, 19 nt, Artificial Sequence
  Description of Artificial Sequence: Synthetic oligonucleotide
aaggccuuauugcagagcu

SEQ ID NO: 1299545 - RNA, 19 nt, Artificial Sequence
  Description of Artificial Sequence: Synthetic oligonucleotide
uuuggucauggucagagcu

SEQ ID NO: 1299546 - RNA, 19 nt, Artificial Sequence
  Description of Artificial Sequence: Synthetic oligonucleotide
agugaugacacuugaacgu

SEQ ID NO: 1299547 - RNA, 19 nt, Artificial Sequence
  Description of Artificial Sequence: Synthetic oligonucleotide
ugaugguguaacaaaggcc

SEQ ID NO: 1299548 - RNA, 19 nt, Artificial Sequence
  Description of Artificial Sequence: Synthetic oligonucleotide
ucgacuuuacacacaaacc

SEQ ID NO: 1299549 - RNA, 19 nt, Artificial Sequence
  Description of Artificial Sequence: Synthetic oligonucleotide
gaauaugcaucuucagucc

SEQ ID NO: 1299550 - RNA, 19 nt, Artificial Sequence
  Description of Artificial Sequence: Synthetic oligonucleotide
aucaucaacugccaaguag

SEQ ID NO: 1299551 - RNA, 19 nt, Artificial Sequence
  Description of Artificial Sequence: Synthetic oligonucleotide
gaugugaacucucaggguc

SEQ ID NO: 1299552 - RNA, 19 nt, Artificial Sequence
  Description of Artificial Sequence: Synthetic oligonucleotide
uuagcagaaauaaacuuuu

SEQ ID NO: 1299553 - RNA, 19 nt, Artificial Sequence
  Description of Artificial Sequence: Synthetic oligonucleotide
uuugugggcacccacuuga

SEQ ID NO: 1299554 - RNA, 19 nt, Artificial Sequence
  Description of Artificial Sequence: Synthetic oligonucleotide
aauuucuggccacaauaug

SEQ ID NO: 1299555 - RNA, 19 nt, Artificial Sequence
  Description of Artificial Sequence: Synthetic oligonucleotide
ugagugagugaucauguga

SEQ ID NO: 1299556 - RNA, 19 nt, Artificial Sequence
  Description of Artificial Sequence: Synthetic oligonucleotide
ucuuccgcuccugagaugg

SEQ ID NO: 1299557 - RNA, 19 nt, Artificial Sequence
  Description of Artificial Sequence: Synthetic oligonucleotide
ugucggaugagcauuuucu

SEQ ID NO: 1299558 - RNA, 19 nt, Artificial Sequence
  Description of Artificial Sequence: Synthetic oligonucleotide
ugucuuugcagagaaaaug

SEQ ID NO: 1299559 - RNA, 19 nt, Artificial Sequence
  Description of Artificial Sequence: Synthetic oligonucleotide
cagugaugacacuugaacg

SEQ ID NO: 1299560 - RNA, 19 nt, Artificial Sequence
  Description of Artificial Sequence: Synthetic oligonucleotide
gucgacuuuacacacaaac

SEQ ID NO: 1299561 - RNA, 19 nt, Artificial Sequence
  Description of Artificial Sequence: Synthetic oligonucleotide
aaggucgcuuuucugagug

SEQ ID NO: 1299562 - RNA, 19 nt, Artificial Sequence
  Description of Artificial Sequence: Synthetic oligonucleotide
agaguggucaacuuugccu

SEQ ID NO: 1299563 - RNA, 19 nt, Artificial Sequence
  Description of Artificial Sequence: Synthetic oligonucleotide
cauggucagagcuuguugc

SEQ ID NO: 1299564 - RNA, 19 nt, Artificial Sequence
  Description of Artificial Sequence: Synthetic oligonucleotide
uaaacuucuuaugacaaaa

SEQ ID NO: 1299565 - RNA, 19 nt, Artificial Sequence
  Description of Artificial Sequence: Synthetic oligonucleotide
auugugagucaucuuaugu

SEQ ID NO: 1299566 - RNA, 19 nt, Artificial Sequence
  Description of Artificial Sequence: Synthetic oligonucleotide
acuguggauuacuuugugg

SEQ ID NO: 1299567 - RNA, 19 nt, Artificial Sequence
  Description of Artificial Sequence: Synthetic oligonucleotide
ucuuaggaucaccagugug

SEQ ID NO: 1299568 - RNA, 19 nt, Artificial Sequence
  Description of Artificial Sequence: Synthetic oligonucleotide
auaaggucgcuuuucugag

SEQ ID NO: 1299569 - RNA, 19 nt, Artificial Sequence
  Description of Artificial Sequence: Synthetic oligonucleotide
ugauugucccuuagagugg

SEQ ID NO: 1299570 - RNA, 19 nt, Artificial Sequence
  Description of Artificial Sequence: Synthetic oligonucleotide
ugugaguacgaauaugcau

SEQ ID NO: 1299571 - RNA, 19 nt, Artificial Sequence
  Description of Artificial Sequence: Synthetic oligonucleotide
ucauuaaggaucuccucac

SEQ ID NO: 1299572 - RNA, 19 nt, Artificial Sequence
  Description of Artificial Sequence: Synthetic oligonucleotide
acgaauaugcaucuucagu

SEQ ID NO: 1299573 - RNA, 19 nt, Artificial Sequence
  Description of Artificial Sequence: Synthetic oligonucleotide
ucauacauucuugacaauc

SEQ ID NO: 1299574 - RNA, 19 nt, Artificial Sequence
  Description of Artificial Sequence: Synthetic oligonucleotide
cuugaaugauuuguuacag

SEQ ID NO: 1299575 - RNA, 19 nt, Artificial Sequence
  Description of Artificial Sequence: Synthetic oligonucleotide
gaugguguaacaaaggccu

SEQ ID NO: 1299576 - RNA, 19 nt, Artificial Sequence
  Description of Artificial Sequence: Synthetic oligonucleotide
aguuauaaggucgcuuuuc

SEQ ID NO: 1299577 - RNA, 19 nt, Artificial Sequence
  Description of Artificial Sequence: Synthetic oligonucleotide
ucauggaccacuugaacau

SEQ ID NO: 1299578 - RNA, 19 nt, Artificial Sequence
  Description of Artificial Sequence: Synthetic oligonucleotide
uuuaacguguccuuccuuu

SEQ ID NO: 1299579 - RNA, 19 nt, Artificial Sequence
  Description of Artificial Sequence: Synthetic oligonucleotide
uacggaacaaggcuuuaca

SEQ ID NO: 1299580 - RNA, 19 nt, Artificial Sequence
  Description of Artificial Sequence: Synthetic oligonucleotide
ugcaaggucugacagugcu

SEQ ID NO: 1299581 - RNA, 19 nt, Artificial Sequence
  Description of Artificial Sequence: Synthetic oligonucleotide
aacaggugucuuugcagag

SEQ ID NO: 1299582 - RNA, 19 nt, Artificial Sequence
  Description of Artificial Sequence: Synthetic oligonucleotide
cucgguaucaguuucaaua

SEQ ID NO: 1299583 - RNA, 19 nt, Artificial Sequence
  Description of Artificial Sequence: Synthetic oligonucleotide
uguggauuacuuugugggc

SEQ ID NO: 1299584 - RNA, 19 nt, Artificial Sequence
  Description of Artificial Sequence: Synthetic oligonucleotide
acaccauggacauugucca

SEQ ID NO: 1299585 - RNA, 19 nt, Artificial Sequence
  Description of Artificial Sequence: Synthetic oligonucleotide
aaauggccucuccucagag

SEQ ID NO: 1299586 - RNA, 19 nt, Artificial Sequence
  Description of Artificial Sequence: Synthetic oligonucleotide
agcugucgacuuuacacac

SEQ ID NO: 1299587 - RNA, 19 nt, Artificial Sequence
  Description of Artificial Sequence: Synthetic oligonucleotide
ucacuguuguggauuaaca

SEQ ID NO: 1299588 - RNA, 19 nt, Artificial Sequence
  Description of Artificial Sequence: Synthetic oligonucleotide
cuuguaaacguuucuguga

SEQ ID NO: 1299589 - RNA, 19 nt, Artificial Sequence
  Description of Artificial Sequence: Synthetic oligonucleotide
uuccuuuuaaauguggcau

SEQ ID NO: 1299590 - RNA, 19 nt, Artificial Sequence
  Description of Artificial Sequence: Synthetic oligonucleotide
acuugaacguccuuucacu

SEQ ID NO: 1299591 - RNA, 19 nt, Artificial Sequence
  Description of Artificial Sequence: Synthetic oligonucleotide
auaucaucaacugccaagu

SEQ ID NO: 1299592 - RNA, 19 nt, Artificial Sequence
  Description of Artificial Sequence: Synthetic oligonucleotide
uccuuguaaacuucuuaug

SEQ ID NO: 1299593 - RNA, 19 nt, Artificial Sequence
  Description of Artificial Sequence: Synthetic oligonucleotide
uacgaauaugcaucuucag

SEQ ID NO: 1299594 - RNA, 19 nt, Artificial Sequence
  Description of Artificial Sequence: Synthetic oligonucleotide
uuucauggaccacuugaac

SEQ ID NO: 1299595 - RNA, 19 nt, Artificial Sequence
  Description of Artificial Sequence: Synthetic oligonucleotide
uucugagugagugaucaug

SEQ ID NO: 1299596 - RNA, 19 nt, Artificial Sequence
  Description of Artificial Sequence: Synthetic oligonucleotide
uugaucaagccucuugaau

SEQ ID NO: 1299597 - RNA, 19 nt, Artificial Sequence
  Description of Artificial Sequence: Synthetic oligonucleotide
ugguugucuuuucagggca

SEQ ID NO: 1299598 - RNA, 19 nt, Artificial Sequence
  Description of Artificial Sequence: Synthetic oligonucleotide
uugagguagucauuccuug

SEQ ID NO: 1299599 - RNA, 19 nt, Artificial Sequence
  Description of Artificial Sequence: Synthetic oligonucleotide
ugaguacgaauaugcaucu

SEQ ID NO: 1299600 - RNA, 19 nt, Artificial Sequence
  Description of Artificial Sequence: Synthetic oligonucleotide
agugagugaucaugugacg

SEQ ID NO: 1299601 - RNA, 19 nt, Artificial Sequence
  Description of Artificial Sequence: Synthetic oligonucleotide
gugaguacgaauaugcauc

SEQ ID NO: 1299602 - RNA, 19 nt, Artificial Sequence
  Description of Artificial Sequence: Synthetic oligonucleotide
ugagugaucaugugacgcu

SEQ ID NO: 1299603 - RNA, 19 nt, Artificial Sequence
  Description of Artificial Sequence: Synthetic oligonucleotide
ugaugacacuugaacgucc

SEQ ID NO: 1299604 - RNA, 19 nt, Artificial Sequence
  Description of Artificial Sequence: Synthetic oligonucleotide
ucgauucacacuguggaca

SEQ ID NO: 1299605 - RNA, 19 nt, Artificial Sequence
  Description of Artificial Sequence: Synthetic oligonucleotide
caaagcuugcauugauagg

SEQ ID NO: 1299606 - RNA, 19 nt, Artificial Sequence
  Description of Artificial Sequence: Synthetic oligonucleotide
uuucacaauaagggcauug

SEQ ID NO: 1299607 - RNA, 19 nt, Artificial Sequence
  Description of Artificial Sequence: Synthetic oligonucleotide
aaacguuucugugagcaaa

SEQ ID NO: 1299608 - RNA, 19 nt, Artificial Sequence
  Description of Artificial Sequence: Synthetic oligonucleotide
gaugagcauuuucuucagg

SEQ ID NO: 1299609 - RNA, 19 nt, Artificial Sequence
  Description of Artificial Sequence: Synthetic oligonucleotide
uguggauuaacaggugucu

SEQ ID NO: 1299610 - RNA, 19 nt, Artificial Sequence
  Description of Artificial Sequence: Synthetic oligonucleotide
cacgugaacucuuucuccc

SEQ ID NO: 1299611 - RNA, 19 nt, Artificial Sequence
  Description of Artificial Sequence: Synthetic oligonucleotide
gauugugagucaucuuaug

SEQ ID NO: 1299612 - RNA, 19 nt, Artificial Sequence
  Description of Artificial Sequence: Synthetic oligonucleotide
aagucacaaacaucacacu

SEQ ID NO: 1299613 - RNA, 19 nt, Artificial Sequence
  Description of Artificial Sequence: Synthetic oligonucleotide
ucgguaucaguuucaauau

SEQ ID NO: 1299614 - RNA, 19 nt, Artificial Sequence
  Description of Artificial Sequence: Synthetic oligonucleotide
caucuuaugucggaugagc

SEQ ID NO: 1299615 - RNA, 19 nt, Artificial Sequence
  Description of Artificial Sequence: Synthetic oligonucleotide
aaucagaagcucgguauca

SEQ ID NO: 1299616 - RNA, 19 nt, Artificial Sequence
  Description of Artificial Sequence: Synthetic oligonucleotide
ucuuaugacuucugagcac

SEQ ID NO: 1299617 - RNA, 19 nt, Artificial Sequence
  Description of Artificial Sequence: Synthetic oligonucleotide
uaugggcagacuuucuccu

SEQ ID NO: 1299618 - RNA, 19 nt, Artificial Sequence
  Description of Artificial Sequence: Synthetic oligonucleotide
guagaaaauauucucuccu

SEQ ID NO: 1299619 - RNA, 19 nt, Artificial Sequence
  Description of Artificial Sequence: Synthetic oligonucleotide
acuccgagcacugguaugg

SEQ ID NO: 1299620 - RNA, 19 nt, Artificial Sequence
  Description of Artificial Sequence: Synthetic oligonucleotide
acccacuugaucaagccuc

SEQ ID NO: 1299621 - RNA, 19 nt, Artificial Sequence
  Description of Artificial Sequence: Synthetic oligonucleotide
cuugacaaucaaauaucuc

SEQ ID NO: 1299622 - RNA, 19 nt, Artificial Sequence
  Description of Artificial Sequence: Synthetic oligonucleotide
aaaugggguacggaacaag

SEQ ID NO: 1299623 - RNA, 19 nt, Artificial Sequence
  Description of Artificial Sequence: Synthetic oligonucleotide
acugaugguguaacaaagg

SEQ ID NO: 1299624 - RNA, 19 nt, Artificial Sequence
  Description of Artificial Sequence: Synthetic oligonucleotide
gauuaacaggugucuuugc

SEQ ID NO: 1299625 - RNA, 19 nt, Artificial Sequence
  Description of Artificial Sequence: Synthetic oligonucleotide
aacaaggcuuuacauucau

SEQ ID NO: 1299626 - RNA, 19 nt, Artificial Sequence
  Description of Artificial Sequence: Synthetic oligonucleotide
cucacaucgguacuucuug

SEQ ID NO: 1299627 - RNA, 19 nt, Artificial Sequence
  Description of Artificial Sequence: Synthetic oligonucleotide
agucaucuuaugucggaug

SEQ ID NO: 1299628 - RNA, 19 nt, Artificial Sequence
  Description of Artificial Sequence: Synthetic oligonucleotide
ugagucaucuuaugucgga

SEQ ID NO: 1299629 - RNA, 19 nt, Artificial Sequence
  Description of Artificial Sequence: Synthetic oligonucleotide
cuugaacguccuuucacug

SEQ ID NO: 1299630 - RNA, 19 nt, Artificial Sequence
  Description of Artificial Sequence: Synthetic oligonucleotide
ucuuaugucggaugagcau

SEQ ID NO: 1299631 - RNA, 19 nt, Artificial Sequence
  Description of Artificial Sequence: Synthetic oligonucleotide
cugguugucuuuucagggc

SEQ ID NO: 1299632 - RNA, 19 nt, Artificial Sequence
  Description of Artificial Sequence: Synthetic oligonucleotide
uguuguggauuaacaggug

SEQ ID NO: 1299633 - RNA, 19 nt, Artificial Sequence
  Description of Artificial Sequence: Synthetic oligonucleotide
caaauuucuggccacaaua

SEQ ID NO: 1299634 - RNA, 19 nt, Artificial Sequence
  Description of Artificial Sequence: Synthetic oligonucleotide
ugaacguccuuucacuguu

SEQ ID NO: 1299635 - RNA, 19 nt, Artificial Sequence
  Description of Artificial Sequence: Synthetic oligonucleotide
aacguccuuucacuguugu

SEQ ID NO: 1299636 - RNA, 19 nt, Artificial Sequence
  Description of Artificial Sequence: Synthetic oligonucleotide
acagcuaccaucagcuguc

SEQ ID NO: 1299637 - RNA, 19 nt, Artificial Sequence
  Description of Artificial Sequence: Synthetic oligonucleotide
aacguguccuuccuuuuaa

SEQ ID NO: 1299638 - RNA, 19 nt, Artificial Sequence
  Description of Artificial Sequence: Synthetic oligonucleotide
uagaguggucaacuuugcc

SEQ ID NO: 1299639 - RNA, 19 nt, Artificial Sequence
  Description of Artificial Sequence: Synthetic oligonucleotide
uuaggaucaccagugugga

SEQ ID NO: 1299640 - RNA, 19 nt, Artificial Sequence
  Description of Artificial Sequence: Synthetic oligonucleotide
gaccuuugcuugcagcugc

SEQ ID NO: 1299641 - RNA, 19 nt, Artificial Sequence
  Description of Artificial Sequence: Synthetic oligonucleotide
acggggaacuucuucccac

SEQ ID NO: 1299642 - RNA, 19 nt, Artificial Sequence
  Description of Artificial Sequence: Synthetic oligonucleotide
augugaacucucagggucc

SEQ ID NO: 1299643 - RNA, 19 nt, Artificial Sequence
  Description of Artificial Sequence: Synthetic oligonucleotide
gucaucuuaugucggauga

SEQ ID NO: 1299644 - RNA, 19 nt, Artificial Sequence
  Description of Artificial Sequence: Synthetic oligonucleotide
aaccuggcauccccucggc

SEQ ID NO: 1299645 - RNA, 19 nt, Artificial Sequence
  Description of Artificial Sequence: Synthetic oligonucleotide
acagcucucgcacgugaac

SEQ ID NO: 1299646 - RNA, 19 nt, Artificial Sequence
  Description of Artificial Sequence: Synthetic oligonucleotide
gaagcucgguaucaguuuc

SEQ ID NO: 1299647 - RNA, 19 nt, Artificial Sequence
  Description of Artificial Sequence: Synthetic oligonucleotide
gauuagcagaaauaaacuu

SEQ ID NO: 1299648 - RNA, 19 nt, Artificial Sequence
  Description of Artificial Sequence: Synthetic oligonucleotide
uugaacguccuuucacugu

SEQ ID NO: 1299649 - RNA, 19 nt, Artificial Sequence
  Description of Artificial Sequence: Synthetic oligonucleotide
augucggaugagcauuuuc

SEQ ID NO: 1299650 - RNA, 19 nt, Artificial Sequence
  Description of Artificial Sequence: Synthetic oligonucleotide
uccgcuacaccauggacau

SEQ ID NO: 1299651 - RNA, 19 nt, Artificial Sequence
  Description of Artificial Sequence: Synthetic oligonucleotide
caugugacgcuucagcuga

SEQ ID NO: 1299652 - RNA, 19 nt, Artificial Sequence
  Description of Artificial Sequence: Synthetic oligonucleotide
auggcacucugccaucggg

SEQ ID NO: 1299653 - RNA, 19 nt, Artificial Sequence
  Description of Artificial Sequence: Synthetic oligonucleotide
aagcucgauucacacugug

SEQ ID NO: 1299654 - RNA, 19 nt, Artificial Sequence
  Description of Artificial Sequence: Synthetic oligonucleotide
uggauuaacaggugucuuu

SEQ ID NO: 1299655 - RNA, 19 nt, Artificial Sequence
  Description of Artificial Sequence: Synthetic oligonucleotide
uggauuacuuugugggcac

SEQ ID NO: 1299656 - RNA, 19 nt, Artificial Sequence
  Description of Artificial Sequence: Synthetic oligonucleotide
ugagguagucauuccuugu

SEQ ID NO: 1299657 - RNA, 19 nt, Artificial Sequence
  Description of Artificial Sequence: Synthetic oligonucleotide
uuuagccucuucccacagc

SEQ ID NO: 1299658 - RNA, 19 nt, Artificial Sequence
  Description of Artificial Sequence: Synthetic oligonucleotide
cacaauaagggcauugaua

SEQ ID NO: 1299659 - RNA, 19 nt, Artificial Sequence
  Description of Artificial Sequence: Synthetic oligonucleotide
gauuuguuacagaucucac

SEQ ID NO: 1299660 - RNA, 19 nt, Artificial Sequence
  Description of Artificial Sequence: Synthetic oligonucleotide
aucgguacuucuugugucu

SEQ ID NO: 1299661 - RNA, 19 nt, Artificial Sequence
  Description of Artificial Sequence: Synthetic oligonucleotide
ugguucuuguaaacguuuc

SEQ ID NO: 1299662 - RNA, 19 nt, Artificial Sequence
  Description of Artificial Sequence: Synthetic oligonucleotide
gucacaaacaucacacuga

SEQ ID NO: 1299663 - RNA, 19 nt, Artificial Sequence
  Description of Artificial Sequence: Synthetic oligonucleotide
acugccaaguagaaaauau

SEQ ID NO: 1299664 - RNA, 19 nt, Artificial Sequence
  Description of Artificial Sequence: Synthetic oligonucleotide
ucaucuuaugucggaugag

SEQ ID NO: 1299665 - RNA, 19 nt, Artificial Sequence
  Description of Artificial Sequence: Synthetic oligonucleotide
uggucauggucagagcuug

SEQ ID NO: 1299666 - RNA, 19 nt, Artificial Sequence
  Description of Artificial Sequence: Synthetic oligonucleotide
gagcauuuucuucaggcua

SEQ ID NO: 1299667 - RNA, 19 nt, Artificial Sequence
  Description of Artificial Sequence: Synthetic oligonucleotide
uuaugacuucugagcacug

SEQ ID NO: 1299668 - RNA, 19 nt, Artificial Sequence
  Description of Artificial Sequence: Synthetic oligonucleotide
agcucucgcacgugaacuc

SEQ ID NO: 1299669 - RNA, 19 nt, Artificial Sequence
  Description of Artificial Sequence: Synthetic oligonucleotide
uucuuaggaucaccagugu

SEQ ID NO: 1299670 - RNA, 19 nt, Artificial Sequence
  Description of Artificial Sequence: Synthetic oligonucleotide
ucgcacgugaacucuuucu

SEQ ID NO: 1299671 - RNA, 19 nt, Artificial Sequence
  Description of Artificial Sequence: Synthetic oligonucleotide
caucgguacuucuuguguc

SEQ ID NO: 1299672 - RNA, 19 nt, Artificial Sequence
  Description of Artificial Sequence: Synthetic oligonucleotide
ugaacucucagggucccac

SEQ ID NO: 1299673 - RNA, 19 nt, Artificial Sequence
  Description of Artificial Sequence: Synthetic oligonucleotide
caaggccugccucacgggg

SEQ ID NO: 1299674 - RNA, 19 nt, Artificial Sequence
  Description of Artificial Sequence: Synthetic oligonucleotide
cucgauucacacuguggac

SEQ ID NO: 1299675 - RNA, 19 nt, Artificial Sequence
  Description of Artificial Sequence: Synthetic oligonucleotide
ugcuacacuccgagcacug

SEQ ID NO: 1299676 - RNA, 19 nt, Artificial Sequence
  Description of Artificial Sequence: Synthetic oligonucleotide
caucacauugaaauggccu

SEQ ID NO: 1299677 - RNA, 19 nt, Artificial Sequence
  Description of Artificial Sequence: Synthetic oligonucleotide
uuuccgcaaagcuugcauu

SEQ ID NO: 1299678 - RNA, 19 nt, Artificial Sequence
  Description of Artificial Sequence: Synthetic oligonucleotide
uguccgcuacaccauggac

SEQ ID NO: 1299679 - RNA, 19 nt, Artificial Sequence
  Description of Artificial Sequence: Synthetic oligonucleotide
ggauuaacaggugucuuug

SEQ ID NO: 1299680 - RNA, 19 nt, Artificial Sequence
  Description of Artificial Sequence: Synthetic oligonucleotide
acggaacaaggcuuuacau

SEQ ID NO: 1299681 - RNA, 19 nt, Artificial Sequence
  Description of Artificial Sequence: Synthetic oligonucleotide
gacagcuaccaucagcugu

SEQ ID NO: 1299682 - RNA, 19 nt, Artificial Sequence
  Description of Artificial Sequence: Synthetic oligonucleotide
ucccuuagaguggucaacu

SEQ ID NO: 1299683 - RNA, 19 nt, Artificial Sequence
  Description of Artificial Sequence: Synthetic oligonucleotide
guacgaauaugcaucuuca

SEQ ID NO: 1299684 - RNA, 19 nt, Artificial Sequence
  Description of Artificial Sequence: Synthetic oligonucleotide
uuauugcagagcucacauc

SEQ ID NO: 1299685 - RNA, 19 nt, Artificial Sequence
  Description of Artificial Sequence: Synthetic oligonucleotide
agaagcucgguaucaguuu

SEQ ID NO: 1299686 - RNA, 19 nt, Artificial Sequence
  Description of Artificial Sequence: Synthetic oligonucleotide
agcaaaucccuuuccgcaa

SEQ ID NO: 1299687 - RNA, 19 nt, Artificial Sequence
  Description of Artificial Sequence: Synthetic oligonucleotide
ucacuggaaaagcucgauu

SEQ ID NO: 1299688 - RNA, 19 nt, Artificial Sequence
  Description of Artificial Sequence: Synthetic oligonucleotide
cuuuggucauggucagagc

SEQ ID NO: 1299689 - RNA, 19 nt, Artificial Sequence
  Description of Artificial Sequence: Synthetic oligonucleotide
gugagucaucuuaugucgg

SEQ ID NO: 1299690 - RNA, 19 nt, Artificial Sequence
  Description of Artificial Sequence: Synthetic oligonucleotide
caggcuugacaaugaagug

SEQ ID NO: 1299691 - RNA, 19 nt, Artificial Sequence
  Description of Artificial Sequence: Synthetic oligonucleotide
agguagucauuccuuguaa

SEQ ID NO: 1299692 - RNA, 19 nt, Artificial Sequence
  Description of Artificial Sequence: Synthetic oligonucleotide
ugucuuuucagggcauccu

SEQ ID NO: 1299693 - RNA, 19 nt, Artificial Sequence
  Description of Artificial Sequence: Synthetic oligonucleotide
ucacaucgguacuucuugu

SEQ ID NO: 1299694 - RNA, 19 nt, Artificial Sequence
  Description of Artificial Sequence: Synthetic oligonucleotide
uaacguguccuuccuuuua

SEQ ID NO: 1299695 - RNA, 19 nt, Artificial Sequence
  Description of Artificial Sequence: Synthetic oligonucleotide
caaaggccuuauugcagag

SEQ ID NO: 1299696 - RNA, 19 nt, Artificial Sequence
  Description of Artificial Sequence: Synthetic oligonucleotide
gcucgauucacacugugga

SEQ ID NO: 1299697 - RNA, 19 nt, Artificial Sequence
  Description of Artificial Sequence: Synthetic oligonucleotide
cggaugugaacucucaggg

SEQ ID NO: 1299698 - RNA, 19 nt, Artificial Sequence
  Description of Artificial Sequence: Synthetic oligonucleotide
agcucgauucacacugugg

SEQ ID NO: 1299699 - RNA, 19 nt, Artificial Sequence
  Description of Artificial Sequence: Synthetic oligonucleotide
gggauugugagucaucuua

SEQ ID NO: 1299700 - RNA, 19 nt, Artificial Sequence
  Description of Artificial Sequence: Synthetic oligonucleotide
uggugugaguacgaauaug

SEQ ID NO: 1299701 - RNA, 19 nt, Artificial Sequence
  Description of Artificial Sequence: Synthetic oligonucleotide
agcacugaugguguaacaa

SEQ ID NO: 1299702 - RNA, 19 nt, Artificial Sequence
  Description of Artificial Sequence: Synthetic oligonucleotide
aggcauaguccucuucaca

SEQ ID NO: 1299703 - RNA, 19 nt, Artificial Sequence
  Description of Artificial Sequence: Synthetic oligonucleotide
aucagaagcucgguaucag

SEQ ID NO: 1299704 - RNA, 19 nt, Artificial Sequence
  Description of Artificial Sequence: Synthetic oligonucleotide
uuaacguguccuuccuuuu

SEQ ID NO: 1299705 - RNA, 19 nt, Artificial Sequence
  Description of Artificial Sequence: Synthetic oligonucleotide
aucuuaugucggaugagca

SEQ ID NO: 1299706 - RNA, 19 nt, Artificial Sequence
  Description of Artificial Sequence: Synthetic oligonucleotide
guuguggauuaacaggugu

SEQ ID NO: 1299707 - RNA, 19 nt, Artificial Sequence
  Description of Artificial Sequence: Synthetic oligonucleotide
cugugagcaaaucccuuuc

SEQ ID NO: 1299708 - RNA, 19 nt, Artificial Sequence
  Description of Artificial Sequence: Synthetic oligonucleotide
ccggaugugaacucucagg

SEQ ID NO: 1299709 - RNA, 19 nt, Artificial Sequence
  Description of Artificial Sequence: Synthetic oligonucleotide
ggacauuguccauaugcac

SEQ ID NO: 1299710 - RNA, 19 nt, Artificial Sequence
  Description of Artificial Sequence: Synthetic oligonucleotide
uucugugagcaaaucccuu

SEQ ID NO: 1299711 - RNA, 19 nt, Artificial Sequence
  Description of Artificial Sequence: Synthetic oligonucleotide
caguguggacauuuuccug

SEQ ID NO: 1299712 - RNA, 19 nt, Artificial Sequence
  Description of Artificial Sequence: Synthetic oligonucleotide
aacguuucugugagcaaau

SEQ ID NO: 1299713 - RNA, 19 nt, Artificial Sequence
  Description of Artificial Sequence: Synthetic oligonucleotide
uaaggucgcuuuucugagu

SEQ ID NO: 1299714 - RNA, 19 nt, Artificial Sequence
  Description of Artificial Sequence: Synthetic oligonucleotide
cugagugagugaucaugug

SEQ ID NO: 1299715 - RNA, 19 nt, Artificial Sequence
  Description of Artificial Sequence: Synthetic oligonucleotide
aacugccaaguagaaaaua

SEQ ID NO: 1299716 - RNA, 19 nt, Artificial Sequence
  Description of Artificial Sequence: Synthetic oligonucleotide
agcauuuucuucaggcuaa

SEQ ID NO: 1299717 - RNA, 19 nt, Artificial Sequence
  Description of Artificial Sequence: Synthetic oligonucleotide
cagcugucgacuuuacaca

SEQ ID NO: 1299718 - RNA, 19 nt, Artificial Sequence
  Description of Artificial Sequence: Synthetic oligonucleotide
ugggcagacuuucuccuuu

SEQ ID NO: 1299719 - RNA, 19 nt, Artificial Sequence
  Description of Artificial Sequence: Synthetic oligonucleotide
caaaucccuuuccgcaaag

SEQ ID NO: 1299720 - RNA, 19 nt, Artificial Sequence
  Description of Artificial Sequence: Synthetic oligonucleotide
ugacagcuaccaucagcug

SEQ ID NO: 1299721 - RNA, 19 nt, Artificial Sequence
  Description of Artificial Sequence: Synthetic oligonucleotide
aagcuugcauugauagggu

SEQ ID NO: 1299722 - RNA, 19 nt, Artificial Sequence
  Description of Artificial Sequence: Synthetic oligonucleotide
uggugcaaggucugacagu

SEQ ID NO: 1299723 - RNA, 19 nt, Artificial Sequence
  Description of Artificial Sequence: Synthetic oligonucleotide
gaguggucaacuuugccuu

SEQ ID NO: 1299724 - RNA, 19 nt, Artificial Sequence
  Description of Artificial Sequence: Synthetic oligonucleotide
acaaggcuuuacauucauc

SEQ ID NO: 1299725 - RNA, 19 nt, Artificial Sequence
  Description of Artificial Sequence: Synthetic oligonucleotide
uccccugucuccacaucac

SEQ ID NO: 1299726 - RNA, 19 nt, Artificial Sequence
  Description of Artificial Sequence: Synthetic oligonucleotide
cuuaugacuucugagcacu

SEQ ID NO: 1299727 - RNA, 19 nt, Artificial Sequence
  Description of Artificial Sequence: Synthetic oligonucleotide
ggcuugacaaugaagugca

SEQ ID NO: 1299728 - RNA, 19 nt, Artificial Sequence
  Description of Artificial Sequence: Synthetic oligonucleotide
auuuaacguguccuuccuu

SEQ ID NO: 1299729 - RNA, 19 nt, Artificial Sequence
  Description of Artificial Sequence: Synthetic oligonucleotide
gugaugacacuugaacguc

SEQ ID NO: 1299730 - RNA, 19 nt, Artificial Sequence
  Description of Artificial Sequence: Synthetic oligonucleotide
guguugcucaaaaugucuc

SEQ ID NO: 1299731 - RNA, 19 nt, Artificial Sequence
  Description of Artificial Sequence: Synthetic oligonucleotide
auaagggcauugauaggga

SEQ ID NO: 1299732 - RNA, 19 nt, Artificial Sequence
  Description of Artificial Sequence: Synthetic oligonucleotide
gaacauuuaacguguccuu

SEQ ID NO: 1299733 - RNA, 19 nt, Artificial Sequence
  Description of Artificial Sequence: Synthetic oligonucleotide
ugugggcacccacuugauc

SEQ ID NO: 1299734 - RNA, 19 nt, Artificial Sequence
  Description of Artificial Sequence: Synthetic oligonucleotide
aaagcucgauucacacugu

SEQ ID NO: 1299735 - RNA, 19 nt, Artificial Sequence
  Description of Artificial Sequence: Synthetic oligonucleotide
gcacgugaacucuuucucc

SEQ ID NO: 1299736 - RNA, 19 nt, Artificial Sequence
  Description of Artificial Sequence: Synthetic oligonucleotide
uucugguguugcucaaaau

SEQ ID NO: 1299737 - RNA, 19 nt, Artificial Sequence
  Description of Artificial Sequence: Synthetic oligonucleotide
ggucgcuuuucugagugag

SEQ ID NO: 1299738 - RNA, 19 nt, Artificial Sequence
  Description of Artificial Sequence: Synthetic oligonucleotide
ggccuugcuacacuccgag

SEQ ID NO: 1299739 - RNA, 19 nt, Artificial Sequence
  Description of Artificial Sequence: Synthetic oligonucleotide
ggccuuauugcagagcuca

SEQ ID NO: 1299740 - RNA, 19 nt, Artificial Sequence
  Description of Artificial Sequence: Synthetic oligonucleotide
acguuucugugagcaaauc

SEQ ID NO: 1299741 - RNA, 19 nt, Artificial Sequence
  Description of Artificial Sequence: Synthetic oligonucleotide
cuuucacuguuguggauua

SEQ ID NO: 1299742 - RNA, 19 nt, Artificial Sequence
  Description of Artificial Sequence: Synthetic oligonucleotide
uccgagcacugguauggcu

SEQ ID NO: 1299743 - RNA, 19 nt, Artificial Sequence
  Description of Artificial Sequence: Synthetic oligonucleotide
acacuccgagcacugguau

SEQ ID NO: 1299744 - RNA, 19 nt, Artificial Sequence
  Description of Artificial Sequence: Synthetic oligonucleotide
uuucugagugagugaucau

SEQ ID NO: 1299745 - RNA, 19 nt, Artificial Sequence
  Description of Artificial Sequence: Synthetic oligonucleotide
caucgggcgguugggauug

SEQ ID NO: 1299746 - RNA, 19 nt, Artificial Sequence
  Description of Artificial Sequence: Synthetic oligonucleotide
uaugcacuuugagguaguc

SEQ ID NO: 1299747 - RNA, 19 nt, Artificial Sequence
  Description of Artificial Sequence: Synthetic oligonucleotide
agcucacaucgguacuucu

SEQ ID NO: 1299748 - RNA, 19 nt, Artificial Sequence
  Description of Artificial Sequence: Synthetic oligonucleotide
gguagucauuccuuguaaa

SEQ ID NO: 1299749 - RNA, 19 nt, Artificial Sequence
  Description of Artificial Sequence: Synthetic oligonucleotide
ugggcacccacuugaucaa

SEQ ID NO: 1299750 - RNA, 19 nt, Artificial Sequence
  Description of Artificial Sequence: Synthetic oligonucleotide
guacggaacaaggcuuuac

SEQ ID NO: 1299751 - RNA, 19 nt, Artificial Sequence
  Description of Artificial Sequence: Synthetic oligonucleotide
gcgguugggauugugaguc

SEQ ID NO: 1299752 - RNA, 19 nt, Artificial Sequence
  Description of Artificial Sequence: Synthetic oligonucleotide
ugacaaugaagugcaccuu

SEQ ID NO: 1299753 - RNA, 19 nt, Artificial Sequence
  Description of Artificial Sequence: Synthetic oligonucleotide
ucucgcacgugaacucuuu

SEQ ID NO: 1299754 - RNA, 19 nt, Artificial Sequence
  Description of Artificial Sequence: Synthetic oligonucleotide
ugugcucaucuaggccccg

SEQ ID NO: 1299755 - RNA, 19 nt, Artificial Sequence
  Description of Artificial Sequence: Synthetic oligonucleotide
ugucgacuuuacacacaaa

SEQ ID NO: 1299756 - RNA, 19 nt, Artificial Sequence
  Description of Artificial Sequence: Synthetic oligonucleotide
gugugaguacgaauaugca

SEQ ID NO: 1299757 - RNA, 19 nt, Artificial Sequence
  Description of Artificial Sequence: Synthetic oligonucleotide
agagcucacaucgguacuu

SEQ ID NO: 1299758 - RNA, 19 nt, Artificial Sequence
  Description of Artificial Sequence: Synthetic oligonucleotide
gagcacugaugguguaaca

SEQ ID NO: 1299759 - RNA, 19 nt, Artificial Sequence
  Description of Artificial Sequence: Synthetic oligonucleotide
gauugucccuuagaguggu

SEQ ID NO: 1299760 - RNA, 19 nt, Artificial Sequence
  Description of Artificial Sequence: Synthetic oligonucleotide
uccuuucacuguuguggau

SEQ ID NO: 1299761 - RNA, 19 nt, Artificial Sequence
  Description of Artificial Sequence: Synthetic oligonucleotide
cacaauaugggcagacuuu

SEQ ID NO: 1299762 - RNA, 19 nt, Artificial Sequence
  Description of Artificial Sequence: Synthetic oligonucleotide
guuacagaucucacaguua

SEQ ID NO: 1299763 - RNA, 19 nt, Artificial Sequence
  Description of Artificial Sequence: Synthetic oligonucleotide
cuuaugucggaugagcauu

SEQ ID NO: 1299764 - RNA, 19 nt, Artificial Sequence
  Description of Artificial Sequence: Synthetic oligonucleotide
cgcuacaccauggacauug

SEQ ID NO: 1299765 - RNA, 19 nt, Artificial Sequence
  Description of Artificial Sequence: Synthetic oligonucleotide
ugggauugugagucaucuu

SEQ ID NO: 1299766 - RNA, 19 nt, Artificial Sequence
  Description of Artificial Sequence: Synthetic oligonucleotide
cauuuaacguguccuuccu

SEQ ID NO: 1299767 - RNA, 19 nt, Artificial Sequence
  Description of Artificial Sequence: Synthetic oligonucleotide
ggcgaccuuugcuugcagc

SEQ ID NO: 1299768 - RNA, 19 nt, Artificial Sequence
  Description of Artificial Sequence: Synthetic oligonucleotide
cauggacauuguccauaug

SEQ ID NO: 1299769 - RNA, 19 nt, Artificial Sequence
  Description of Artificial Sequence: Synthetic oligonucleotide
cucgcacgugaacucuuuc

SEQ ID NO: 1299770 - RNA, 19 nt, Artificial Sequence
  Description of Artificial Sequence: Synthetic oligonucleotide
ccccgcuucuggcugaagg

SEQ ID NO: 1299771 - RNA, 19 nt, Artificial Sequence
  Description of Artificial Sequence: Synthetic oligonucleotide
aggucgcuuuucugaguga

SEQ ID NO: 1299772 - RNA, 19 nt, Artificial Sequence
  Description of Artificial Sequence: Synthetic oligonucleotide
cgacuuuacacacaaaccu

SEQ ID NO: 1299773 - RNA, 19 nt, Artificial Sequence
  Description of Artificial Sequence: Synthetic oligonucleotide
cuccggaugugaacucuca

SEQ ID NO: 1299774 - RNA, 19 nt, Artificial Sequence
  Description of Artificial Sequence: Synthetic oligonucleotide
cagaagcucgguaucaguu

SEQ ID NO: 1299775 - RNA, 19 nt, Artificial Sequence
  Description of Artificial Sequence: Synthetic oligonucleotide
gguuucuggugcaaggucu

SEQ ID NO: 1299776 - RNA, 19 nt, Artificial Sequence
  Description of Artificial Sequence: Synthetic oligonucleotide
agcucgguaucaguuucaa

SEQ ID NO: 1299777 - RNA, 19 nt, Artificial Sequence
  Description of Artificial Sequence: Synthetic oligonucleotide
aggccuuauugcagagcuc

SEQ ID NO: 1299778 - RNA, 19 nt, Artificial Sequence
  Description of Artificial Sequence: Synthetic oligonucleotide
gcuguccgcuacaccaugg

SEQ ID NO: 1299779 - RNA, 19 nt, Artificial Sequence
  Description of Artificial Sequence: Synthetic oligonucleotide
cauuaaggaucuccucacu

SEQ ID NO: 1299780 - RNA, 19 nt, Artificial Sequence
  Description of Artificial Sequence: Synthetic oligonucleotide
cuacacuccgagcacuggu

SEQ ID NO: 1299781 - RNA, 19 nt, Artificial Sequence
  Description of Artificial Sequence: Synthetic oligonucleotide
cuguccgcuacaccaugga

SEQ ID NO: 1299782 - RNA, 19 nt, Artificial Sequence
  Description of Artificial Sequence: Synthetic oligonucleotide
gcuacacuccgagcacugg

SEQ ID NO: 1299783 - RNA, 19 nt, Artificial Sequence
  Description of Artificial Sequence: Synthetic oligonucleotide
ucgguacuucuugugucuu

SEQ ID NO: 1299784 - RNA, 19 nt, Artificial Sequence
  Description of Artificial Sequence: Synthetic oligonucleotide
uaugucggaugagcauuuu

SEQ ID NO: 1299785 - RNA, 19 nt, Artificial Sequence
  Description of Artificial Sequence: Synthetic oligonucleotide
ccaaucagaagcucgguau

SEQ ID NO: 1299786 - RNA, 19 nt, Artificial Sequence
  Description of Artificial Sequence: Synthetic oligonucleotide
cugccaucgggcgguuggg

SEQ ID NO: 1299787 - RNA, 19 nt, Artificial Sequence
  Description of Artificial Sequence: Synthetic oligonucleotide
ugugacgcuucagcugauu

SEQ ID NO: 1299788 - RNA, 19 nt, Artificial Sequence
  Description of Artificial Sequence: Synthetic oligonucleotide
aggcgaccuuugcuugcag

SEQ ID NO: 1299789 - RNA, 19 nt, Artificial Sequence
  Description of Artificial Sequence: Synthetic oligonucleotide
acgcuucagcugauuagca

SEQ ID NO: 1299790 - RNA, 19 nt, Artificial Sequence
  Description of Artificial Sequence: Synthetic oligonucleotide
cacggggaacuucuuccca

SEQ ID NO: 1299791 - RNA, 19 nt, Artificial Sequence
  Description of Artificial Sequence: Synthetic oligonucleotide
gucggaugagcauuuucuu

SEQ ID NO: 1299792 - RNA, 19 nt, Artificial Sequence
  Description of Artificial Sequence: Synthetic oligonucleotide
cuaccaucagcuguccgcu

SEQ ID NO: 1299793 - RNA, 19 nt, Artificial Sequence
  Description of Artificial Sequence: Synthetic oligonucleotide
ucccuggugugaguacgaa

SEQ ID NO: 1299794 - RNA, 19 nt, Artificial Sequence
  Description of Artificial Sequence: Synthetic oligonucleotide
ugccaucgggcgguuggga

SEQ ID NO: 1299795 - RNA, 19 nt, Artificial Sequence
  Description of Artificial Sequence: Synthetic oligonucleotide
gagucaucuuaugucggau

SEQ ID NO: 1299796 - RNA, 19 nt, Artificial Sequence
  Description of Artificial Sequence: Synthetic oligonucleotide
accuucuauugcacacuga

SEQ ID NO: 1299797 - RNA, 19 nt, Artificial Sequence
  Description of Artificial Sequence: Synthetic oligonucleotide
cuccgagcacugguauggc

SEQ ID NO: 1299798 - RNA, 19 nt, Artificial Sequence
  Description of Artificial Sequence: Synthetic oligonucleotide
ggauuacuuugugggcacc

SEQ ID NO: 1299799 - RNA, 19 nt, Artificial Sequence
  Description of Artificial Sequence: Synthetic oligonucleotide
gcaaaucccuuuccgcaaa

SEQ ID NO: 1299800 - RNA, 19 nt, Artificial Sequence
  Description of Artificial Sequence: Synthetic oligonucleotide
ggaugugaacucucagggu

SEQ ID NO: 1299801 - RNA, 19 nt, Artificial Sequence
  Description of Artificial Sequence: Synthetic oligonucleotide
gccaaucagaagcucggua

SEQ ID NO: 1299802 - RNA, 19 nt, Artificial Sequence
  Description of Artificial Sequence: Synthetic oligonucleotide
ccucuugaaugauuuguua

SEQ ID NO: 1299803 - RNA, 19 nt, Artificial Sequence
  Description of Artificial Sequence: Synthetic oligonucleotide
gugcaaggucugacagugc

SEQ ID NO: 1299804 - RNA, 19 nt, Artificial Sequence
  Description of Artificial Sequence: Synthetic oligonucleotide
cacccacuugaucaagccu

SEQ ID NO: 1299805 - RNA, 19 nt, Artificial Sequence
  Description of Artificial Sequence: Synthetic oligonucleotide
ucgggcgguugggauugug

SEQ ID NO: 1299806 - RNA, 19 nt, Artificial Sequence
  Description of Artificial Sequence: Synthetic oligonucleotide
cuggugugaguacgaauau

SEQ ID NO: 1299807 - RNA, 19 nt, Artificial Sequence
  Description of Artificial Sequence: Synthetic oligonucleotide
gccuugcuacacuccgagc

SEQ ID NO: 1299808 - RNA, 19 nt, Artificial Sequence
  Description of Artificial Sequence: Synthetic oligonucleotide
gguguaacaaaggccuuau

SEQ ID NO: 1299809 - RNA, 19 nt, Artificial Sequence
  Description of Artificial Sequence: Synthetic oligonucleotide
gcaaauuucuggccacaau

SEQ ID NO: 1299810 - RNA, 19 nt, Artificial Sequence
  Description of Artificial Sequence: Synthetic oligonucleotide
caggcgaccuuugcuugca

SEQ ID NO: 1299811 - RNA, 19 nt, Artificial Sequence
  Description of Artificial Sequence: Synthetic oligonucleotide
cagagcucacaucgguacu

SEQ ID NO: 1299812 - RNA, 19 nt, Artificial Sequence
  Description of Artificial Sequence: Synthetic oligonucleotide
aggccccgcuucuggcuga

SEQ ID NO: 1299813 - RNA, 19 nt, Artificial Sequence
  Description of Artificial Sequence: Synthetic oligonucleotide
cacugagcauaugagcuuu

SEQ ID NO: 1299814 - RNA, 19 nt, Artificial Sequence
  Description of Artificial Sequence: Synthetic oligonucleotide
cccuuuccgcaaagcuugc

SEQ ID NO: 1299815 - RNA, 19 nt, Artificial Sequence
  Description of Artificial Sequence: Synthetic oligonucleotide
cgguaucaguuucaauauc

SEQ ID NO: 1299816 - RNA, 19 nt, Artificial Sequence
  Description of Artificial Sequence: Synthetic oligonucleotide
gucgcuuuucugagugagu

SEQ ID NO: 1299817 - RNA, 19 nt, Artificial Sequence
  Description of Artificial Sequence: Synthetic oligonucleotide
guguaacaaaggccuuauu

SEQ ID NO: 1299818 - RNA, 19 nt, Artificial Sequence
  Description of Artificial Sequence: Synthetic oligonucleotide
guguggcuccggaugugaa

SEQ ID NO: 1299819 - RNA, 19 nt, Artificial Sequence
  Description of Artificial Sequence: Synthetic oligonucleotide
gaguacgaauaugcaucuu

SEQ ID NO: 1299820 - RNA, 19 nt, Artificial Sequence
  Description of Artificial Sequence: Synthetic oligonucleotide
cgaccuuugcuugcagcug

SEQ ID NO: 1299821 - RNA, 19 nt, Artificial Sequence
  Description of Artificial Sequence: Synthetic oligonucleotide
gggguacggaacaaggcuu

SEQ ID NO: 1299822 - RNA, 19 nt, Artificial Sequence
  Description of Artificial Sequence: Synthetic oligonucleotide
cagcuguccgcuacaccau

SEQ ID NO: 1299823 - RNA, 19 nt, Artificial Sequence
  Description of Artificial Sequence: Synthetic oligonucleotide
cggaacaaggcuuuacauu

SEQ ID NO: 1299824 - RNA, 19 nt, Artificial Sequence
  Description of Artificial Sequence: Synthetic oligonucleotide
cucucgcacgugaacucuu

SEQ ID NO: 1299825 - RNA, 19 nt, Artificial Sequence
  Description of Artificial Sequence: Synthetic oligonucleotide
augugacgcuucagcugau

SEQ ID NO: 1299826 - RNA, 19 nt, Artificial Sequence
  Description of Artificial Sequence: Synthetic oligonucleotide
ccgagcacugguauggcuu

SEQ ID NO: 1299827 - RNA, 19 nt, Artificial Sequence
  Description of Artificial Sequence: Synthetic oligonucleotide
gcucacaucgguacuucuu

SEQ ID NO: 1299828 - RNA, 19 nt, Artificial Sequence
  Description of Artificial Sequence: Synthetic oligonucleotide
gcucucgcacgugaacucu

SEQ ID NO: 1299829 - RNA, 19 nt, Artificial Sequence
  Description of Artificial Sequence: Synthetic oligonucleotide
ggcuccggaugugaacucu

SEQ ID NO: 1299830 - RNA, 19 nt, Artificial Sequence
  Description of Artificial Sequence: Synthetic oligonucleotide
gccaucgggcgguugggau

SEQ ID NO: 1299831 - RNA, 19 nt, Artificial Sequence
  Description of Artificial Sequence: Synthetic oligonucleotide
cuuccgcuccugagauggu

SEQ ID NO: 1299832 - RNA, 19 nt, Artificial Sequence
  Description of Artificial Sequence: Synthetic oligonucleotide
caccuguguggcuccggau

SEQ ID NO: 1299833 - RNA, 19 nt, Artificial Sequence
  Description of Artificial Sequence: Synthetic oligonucleotide
cccguggguuucuggugca

SEQ ID NO: 1299834 - RNA, 19 nt, Artificial Sequence
  Description of Artificial Sequence: Synthetic oligonucleotide
aucgggcgguugggauugu

SEQ ID NO: 1299835 - RNA, 19 nt, Artificial Sequence
  Description of Artificial Sequence: Synthetic oligonucleotide
ggucauggucagagcuugu

SEQ ID NO: 1299836 - RNA, 19 nt, Artificial Sequence
  Description of Artificial Sequence: Synthetic oligonucleotide
ccgcaaagcuugcauugau

SEQ ID NO: 1299837 - RNA, 19 nt, Artificial Sequence
  Description of Artificial Sequence: Synthetic oligonucleotide
ccaucgggcgguugggauu

SEQ ID NO: 1299838 - RNA, 19 nt, Artificial Sequence
  Description of Artificial Sequence: Synthetic oligonucleotide
cccuuagaguggucaacuu

SEQ ID NO: 1299839 - RNA, 19 nt, Artificial Sequence
  Description of Artificial Sequence: Synthetic oligonucleotide
gccccgcuucuggcugaag

SEQ ID NO: 1299840 - RNA, 19 nt, Artificial Sequence
  Description of Artificial Sequence: Synthetic oligonucleotide
ccguggguuucuggugcaa

SEQ ID NO: 1299841 - RNA, 19 nt, Artificial Sequence
  Description of Artificial Sequence: Synthetic oligonucleotide
ggccccgcuucuggcugaa

SEQ ID NO: 1299842 - RNA, 19 nt, Artificial Sequence
  Description of Artificial Sequence: Synthetic oligonucleotide
ccgcuacaccauggacauu

SEQ ID NO: 1299843 - RNA, 19 nt, Artificial Sequence
  Description of Artificial Sequence: Synthetic oligonucleotide
aaauucuccaucuuggucg

SEQ ID NO: 1299844 - RNA, 19 nt, Artificial Sequence
  Description of Artificial Sequence: Synthetic oligonucleotide
ugaacugagacucaaauag

SEQ ID NO: 1299845 - RNA, 19 nt, Artificial Sequence
  Description of Artificial Sequence: Synthetic oligonucleotide
ugaacgaugacaaccaccg

SEQ ID NO: 1299846 - RNA, 19 nt, Artificial Sequence
  Description of Artificial Sequence: Synthetic oligonucleotide
aacgaugacaaccaccggg

SEQ ID NO: 1299847 - RNA, 19 nt, Artificial Sequence
  Description of Artificial Sequence: Synthetic oligonucleotide
ucaaauaggacugugaacu

SEQ ID NO: 1299848 - RNA, 19 nt, Artificial Sequence
  Description of Artificial Sequence: Synthetic oligonucleotide
uguaguuccagccuggcag

SEQ ID NO: 1299849 - RNA, 19 nt, Artificial Sequence
  Description of Artificial Sequence: Synthetic oligonucleotide
uuuuccaagagaagcaagg

SEQ ID NO: 1299850 - RNA, 19 nt, Artificial Sequence
  Description of Artificial Sequence: Synthetic oligonucleotide
agaaaguguaguuccagcc

SEQ ID NO: 1299851 - RNA, 19 nt, Artificial Sequence
  Description of Artificial Sequence: Synthetic oligonucleotide
gaugagguagcucaggucc

SEQ ID NO: 1299852 - RNA, 19 nt, Artificial Sequence
  Description of Artificial Sequence: Synthetic oligonucleotide
aauauggccccaucauucc

SEQ ID NO: 1299853 - RNA, 19 nt, Artificial Sequence
  Description of Artificial Sequence: Synthetic oligonucleotide
auuucugagucgcuaaagc

SEQ ID NO: 1299854 - RNA, 19 nt, Artificial Sequence
  Description of Artificial Sequence: Synthetic oligonucleotide
aagaccucauccuuggguc

SEQ ID NO: 1299855 - RNA, 19 nt, Artificial Sequence
  Description of Artificial Sequence: Synthetic oligonucleotide
ugagacucaaauaggacug

SEQ ID NO: 1299856 - RNA, 19 nt, Artificial Sequence
  Description of Artificial Sequence: Synthetic oligonucleotide
aaguacaggaguguaguac

SEQ ID NO: 1299857 - RNA, 19 nt, Artificial Sequence
  Description of Artificial Sequence: Synthetic oligonucleotide
aaaguguaguuccagccug

SEQ ID NO: 1299858 - RNA, 19 nt, Artificial Sequence
  Description of Artificial Sequence: Synthetic oligonucleotide
guugcuuauucacaaagcc

SEQ ID NO: 1299859 - RNA, 19 nt, Artificial Sequence
  Description of Artificial Sequence: Synthetic oligonucleotide
uguaguacuuggcaaagac

SEQ ID NO: 1299860 - RNA, 19 nt, Artificial Sequence
  Description of Artificial Sequence: Synthetic oligonucleotide
aagcgcaguagaaaggucc

SEQ ID NO: 1299861 - RNA, 19 nt, Artificial Sequence
  Description of Artificial Sequence: Synthetic oligonucleotide
ugucuggcaacauccaugg

SEQ ID NO: 1299862 - RNA, 19 nt, Artificial Sequence
  Description of Artificial Sequence: Synthetic oligonucleotide
auucacaaagccuaauaug

SEQ ID NO: 1299863 - RNA, 19 nt, Artificial Sequence
  Description of Artificial Sequence: Synthetic oligonucleotide
ugcuuauucacaaagccua

SEQ ID NO: 1299864 - RNA, 19 nt, Artificial Sequence
  Description of Artificial Sequence: Synthetic oligonucleotide
auguagguagcauuggcuc

SEQ ID NO: 1299865 - RNA, 19 nt, Artificial Sequence
  Description of Artificial Sequence: Synthetic oligonucleotide
ugcguugauaaacucuggg

SEQ ID NO: 1299866 - RNA, 19 nt, Artificial Sequence
  Description of Artificial Sequence: Synthetic oligonucleotide
uauucacaaagccuaauau

SEQ ID NO: 1299867 - RNA, 19 nt, Artificial Sequence
  Description of Artificial Sequence: Synthetic oligonucleotide
ucagcgaaggcauuguccc

SEQ ID NO: 1299868 - RNA, 19 nt, Artificial Sequence
  Description of Artificial Sequence: Synthetic oligonucleotide
agagguuucggucaggaga

SEQ ID NO: 1299869 - RNA, 19 nt, Artificial Sequence
  Description of Artificial Sequence: Synthetic oligonucleotide
augacaaccaccgggaggg

SEQ ID NO: 1299870 - RNA, 19 nt, Artificial Sequence
  Description of Artificial Sequence: Synthetic oligonucleotide
guugauaaacucugggacc

SEQ ID NO: 1299871 - RNA, 19 nt, Artificial Sequence
  Description of Artificial Sequence: Synthetic oligonucleotide
uguugcuuauucacaaagc

SEQ ID NO: 1299872 - RNA, 19 nt, Artificial Sequence
  Description of Artificial Sequence: Synthetic oligonucleotide
aaaucucucguggugaaug

SEQ ID NO: 1299873 - RNA, 19 nt, Artificial Sequence
  Description of Artificial Sequence: Synthetic oligonucleotide
aaauaggacugugaacuuc

SEQ ID NO: 1299874 - RNA, 19 nt, Artificial Sequence
  Description of Artificial Sequence: Synthetic oligonucleotide
aaucucucguggugaaugg

SEQ ID NO: 1299875 - RNA, 19 nt, Artificial Sequence
  Description of Artificial Sequence: Synthetic oligonucleotide
gaacacguagaugagguag

SEQ ID NO: 1299876 - RNA, 19 nt, Artificial Sequence
  Description of Artificial Sequence: Synthetic oligonucleotide
gaugcguugauaaacucug

SEQ ID NO: 1299877 - RNA, 19 nt, Artificial Sequence
  Description of Artificial Sequence: Synthetic oligonucleotide
gaagcaaggaaucccagca

SEQ ID NO: 1299878 - RNA, 19 nt, Artificial Sequence
  Description of Artificial Sequence: Synthetic oligonucleotide
gaugacaaccaccgggagg

SEQ ID NO: 1299879 - RNA, 19 nt, Artificial Sequence
  Description of Artificial Sequence: Synthetic oligonucleotide
acaaagccuaauauggccc

SEQ ID NO: 1299880 - RNA, 19 nt, Artificial Sequence
  Description of Artificial Sequence: Synthetic oligonucleotide
ucugagucgcuaaagcgca

SEQ ID NO: 1299881 - RNA, 19 nt, Artificial Sequence
  Description of Artificial Sequence: Synthetic oligonucleotide
acaggaguguaguacuugg

SEQ ID NO: 1299882 - RNA, 19 nt, Artificial Sequence
  Description of Artificial Sequence: Synthetic oligonucleotide
aggagagucaaacuuccag

SEQ ID NO: 1299883 - RNA, 19 nt, Artificial Sequence
  Description of Artificial Sequence: Synthetic oligonucleotide
uacagcuuuugcaaguaca

SEQ ID NO: 1299884 - RNA, 19 nt, Artificial Sequence
  Description of Artificial Sequence: Synthetic oligonucleotide
uuauucacaaagccuaaua

SEQ ID NO: 1299885 - RNA, 19 nt, Artificial Sequence
  Description of Artificial Sequence: Synthetic oligonucleotide
uugcuuauucacaaagccu

SEQ ID NO: 1299886 - RNA, 19 nt, Artificial Sequence
  Description of Artificial Sequence: Synthetic oligonucleotide
aguacaggaguguaguacu

SEQ ID NO: 1299887 - RNA, 19 nt, Artificial Sequence
  Description of Artificial Sequence: Synthetic oligonucleotide
ucagauuccagagguuucg

SEQ ID NO: 1299888 - RNA, 19 nt, Artificial Sequence
  Description of Artificial Sequence: Synthetic oligonucleotide
augauggucuguugcuucc

SEQ ID NO: 1299889 - RNA, 19 nt, Artificial Sequence
  Description of Artificial Sequence: Synthetic oligonucleotide
aaacucugggaccacuugu

SEQ ID NO: 1299890 - RNA, 19 nt, Artificial Sequence
  Description of Artificial Sequence: Synthetic oligonucleotide
ucuagauggcugcugcugc

SEQ ID NO: 1299891 - RNA, 19 nt, Artificial Sequence
  Description of Artificial Sequence: Synthetic oligonucleotide
cacgugucuggcaacaucc

SEQ ID NO: 1299892 - RNA, 19 nt, Artificial Sequence
  Description of Artificial Sequence: Synthetic oligonucleotide
gcuaaagcgcaguagaaag

SEQ ID NO: 1299893 - RNA, 19 nt, Artificial Sequence
  Description of Artificial Sequence: Synthetic oligonucleotide
guacauguuguagugaggc

SEQ ID NO: 1299894 - RNA, 19 nt, Artificial Sequence
  Description of Artificial Sequence: Synthetic oligonucleotide
ugcaaguacaggaguguag

SEQ ID NO: 1299895 - RNA, 19 nt, Artificial Sequence
  Description of Artificial Sequence: Synthetic oligonucleotide
ucgagacugucuaugggcc

SEQ ID NO: 1299896 - RNA, 19 nt, Artificial Sequence
  Description of Artificial Sequence: Synthetic oligonucleotide
uucacguauccaucuacag

SEQ ID NO: 1299897 - RNA, 19 nt, Artificial Sequence
  Description of Artificial Sequence: Synthetic oligonucleotide
ucgaaggcaguuuuccaag

SEQ ID NO: 1299898 - RNA, 19 nt, Artificial Sequence
  Description of Artificial Sequence: Synthetic oligonucleotide
ugccgguucugccagauga

SEQ ID NO: 1299899 - RNA, 19 nt, Artificial Sequence
  Description of Artificial Sequence: Synthetic oligonucleotide
ucguaagagcuccuccacg

SEQ ID NO: 1299900 - RNA, 19 nt, Artificial Sequence
  Description of Artificial Sequence: Synthetic oligonucleotide
acaguacaguggcaguagc

SEQ ID NO: 1299901 - RNA, 19 nt, Artificial Sequence
  Description of Artificial Sequence: Synthetic oligonucleotide
gucgagacugucuaugggc

SEQ ID NO: 1299902 - RNA, 19 nt, Artificial Sequence
  Description of Artificial Sequence: Synthetic oligonucleotide
uaaacucugggaccacuug

SEQ ID NO: 1299903 - RNA, 19 nt, Artificial Sequence
  Description of Artificial Sequence: Synthetic oligonucleotide
ucggucugggaacacguag

SEQ ID NO: 1299904 - RNA, 19 nt, Artificial Sequence
  Description of Artificial Sequence: Synthetic oligonucleotide
gagucgagacugucuaugg

SEQ ID NO: 1299905 - RNA, 19 nt, Artificial Sequence
  Description of Artificial Sequence: Synthetic oligonucleotide
gagguuucggucaggagag

SEQ ID NO: 1299906 - RNA, 19 nt, Artificial Sequence
  Description of Artificial Sequence: Synthetic oligonucleotide
guuguagugaggcugggga

SEQ ID NO: 1299907 - RNA, 19 nt, Artificial Sequence
  Description of Artificial Sequence: Synthetic oligonucleotide
aggaguguaguacuuggca

SEQ ID NO: 1299908 - RNA, 19 nt, Artificial Sequence
  Description of Artificial Sequence: Synthetic oligonucleotide
uagaugagguagcucaggu

SEQ ID NO: 1299909 - RNA, 19 nt, Artificial Sequence
  Description of Artificial Sequence: Synthetic oligonucleotide
acauguuguagugaggcug

SEQ ID NO: 1299910 - RNA, 19 nt, Artificial Sequence
  Description of Artificial Sequence: Synthetic oligonucleotide
caggaugauggucuguugc

SEQ ID NO: 1299911 - RNA, 19 nt, Artificial Sequence
  Description of Artificial Sequence: Synthetic oligonucleotide
ugucuaugggccuucguaa

SEQ ID NO: 1299912 - RNA, 19 nt, Artificial Sequence
  Description of Artificial Sequence: Synthetic oligonucleotide
caaagccuaauauggcccc

SEQ ID NO: 1299913 - RNA, 19 nt, Artificial Sequence
  Description of Artificial Sequence: Synthetic oligonucleotide
uaggacugugaacuucucc

SEQ ID NO: 1299914 - RNA, 19 nt, Artificial Sequence
  Description of Artificial Sequence: Synthetic oligonucleotide
cagcauucaggacagggag

SEQ ID NO: 1299915 - RNA, 19 nt, Artificial Sequence
  Description of Artificial Sequence: Synthetic oligonucleotide
ucucucguggugaauggcu

SEQ ID NO: 1299916 - RNA, 19 nt, Artificial Sequence
  Description of Artificial Sequence: Synthetic oligonucleotide
acugagacucaaauaggac

SEQ ID NO: 1299917 - RNA, 19 nt, Artificial Sequence
  Description of Artificial Sequence: Synthetic oligonucleotide
agucgagacugucuauggg

SEQ ID NO: 1299918 - RNA, 19 nt, Artificial Sequence
  Description of Artificial Sequence: Synthetic oligonucleotide
uucuccaucuuggucgagg

SEQ ID NO: 1299919 - RNA, 19 nt, Artificial Sequence
  Description of Artificial Sequence: Synthetic oligonucleotide
ggcaguagcauuguggucc

SEQ ID NO: 1299920 - RNA, 19 nt, Artificial Sequence
  Description of Artificial Sequence: Synthetic oligonucleotide
acagcuuuugcaaguacag

SEQ ID NO: 1299921 - RNA, 19 nt, Artificial Sequence
  Description of Artificial Sequence: Synthetic oligonucleotide
uugugguguuucuucagca

SEQ ID NO: 1299922 - RNA, 19 nt, Artificial Sequence
  Description of Artificial Sequence: Synthetic oligonucleotide
uuugcaaguacaggagugu

SEQ ID NO: 1299923 - RNA, 19 nt, Artificial Sequence
  Description of Artificial Sequence: Synthetic oligonucleotide
ugugguguuucuucagcac

SEQ ID NO: 1299924 - RNA, 19 nt, Artificial Sequence
  Description of Artificial Sequence: Synthetic oligonucleotide
guaguuccagccuggcagg

SEQ ID NO: 1299925 - RNA, 19 nt, Artificial Sequence
  Description of Artificial Sequence: Synthetic oligonucleotide
cagcucgucauccaggaug

SEQ ID NO: 1299926 - RNA, 19 nt, Artificial Sequence
  Description of Artificial Sequence: Synthetic oligonucleotide
agcuucucacaccaggacu

SEQ ID NO: 1299927 - RNA, 19 nt, Artificial Sequence
  Description of Artificial Sequence: Synthetic oligonucleotide
aucuacagcuuuugcaagu

SEQ ID NO: 1299928 - RNA, 19 nt, Artificial Sequence
  Description of Artificial Sequence: Synthetic oligonucleotide
ugcagcacguccaggcugc

SEQ ID NO: 1299929 - RNA, 19 nt, Artificial Sequence
  Description of Artificial Sequence: Synthetic oligonucleotide
caagagaagcaaggaaucc

SEQ ID NO: 1299930 - RNA, 19 nt, Artificial Sequence
  Description of Artificial Sequence: Synthetic oligonucleotide
guggguacauguuguagug

SEQ ID NO: 1299931 - RNA, 19 nt, Artificial Sequence
  Description of Artificial Sequence: Synthetic oligonucleotide
ugggaacacguagaugagg

SEQ ID NO: 1299932 - RNA, 19 nt, Artificial Sequence
  Description of Artificial Sequence: Synthetic oligonucleotide
cacuugucugaucugcggc

SEQ ID NO: 1299933 - RNA, 19 nt, Artificial Sequence
  Description of Artificial Sequence: Synthetic oligonucleotide
agcgaaggcauugucccac

SEQ ID NO: 1299934 - RNA, 19 nt, Artificial Sequence
  Description of Artificial Sequence: Synthetic oligonucleotide
acuugucugaucugcggcu

SEQ ID NO: 1299935 - RNA, 19 nt, Artificial Sequence
  Description of Artificial Sequence: Synthetic oligonucleotide
uggagaaaucucucguggu

SEQ ID NO: 1299936 - RNA, 19 nt, Artificial Sequence
  Description of Artificial Sequence: Synthetic oligonucleotide
caucuacagcuuuugcaag

SEQ ID NO: 1299937 - RNA, 19 nt, Artificial Sequence
  Description of Artificial Sequence: Synthetic oligonucleotide
aagagcuccuccacguguc

SEQ ID NO: 1299938 - RNA, 19 nt, Artificial Sequence
  Description of Artificial Sequence: Synthetic oligonucleotide
agcauuggcuccagcaucg

SEQ ID NO: 1299939 - RNA, 19 nt, Artificial Sequence
  Description of Artificial Sequence: Synthetic oligonucleotide
agcgcaguagaaagguccc

SEQ ID NO: 1299940 - RNA, 19 nt, Artificial Sequence
  Description of Artificial Sequence: Synthetic oligonucleotide
ucggucaggagagucaaac

SEQ ID NO: 1299941 - RNA, 19 nt, Artificial Sequence
  Description of Artificial Sequence: Synthetic oligonucleotide
gaaaguguaguuccagccu

SEQ ID NO: 1299942 - RNA, 19 nt, Artificial Sequence
  Description of Artificial Sequence: Synthetic oligonucleotide
ugggcucuucacaucgaag

SEQ ID NO: 1299943 - RNA, 19 nt, Artificial Sequence
  Description of Artificial Sequence: Synthetic oligonucleotide
aaguguaguuccagccugg

SEQ ID NO: 1299944 - RNA, 19 nt, Artificial Sequence
  Description of Artificial Sequence: Synthetic oligonucleotide
acagcgaacggcacccugc

SEQ ID NO: 1299945 - RNA, 19 nt, Artificial Sequence
  Description of Artificial Sequence: Synthetic oligonucleotide
aucagcucgucauccagga

SEQ ID NO: 1299946 - RNA, 19 nt, Artificial Sequence
  Description of Artificial Sequence: Synthetic oligonucleotide
gagaaaucucucgugguga

SEQ ID NO: 1299947 - RNA, 19 nt, Artificial Sequence
  Description of Artificial Sequence: Synthetic oligonucleotide
uccgucacggacucaggug

SEQ ID NO: 1299948 - RNA, 19 nt, Artificial Sequence
  Description of Artificial Sequence: Synthetic oligonucleotide
gucuaugggccuucguaag

SEQ ID NO: 1299949 - RNA, 19 nt, Artificial Sequence
  Description of Artificial Sequence: Synthetic oligonucleotide
aguguaguuccagccuggc

SEQ ID NO: 1299950 - RNA, 19 nt, Artificial Sequence
  Description of Artificial Sequence: Synthetic oligonucleotide
gcaugggcucuucacaucg

SEQ ID NO: 1299951 - RNA, 19 nt, Artificial Sequence
  Description of Artificial Sequence: Synthetic oligonucleotide
agcacguccaggcugcccu

SEQ ID NO: 1299952 - RNA, 19 nt, Artificial Sequence
  Description of Artificial Sequence: Synthetic oligonucleotide
ggagaaaucucucguggug

SEQ ID NO: 1299953 - RNA, 19 nt, Artificial Sequence
  Description of Artificial Sequence: Synthetic oligonucleotide
cuugggucggucugggaac

SEQ ID NO: 1299954 - RNA, 19 nt, Artificial Sequence
  Description of Artificial Sequence: Synthetic oligonucleotide
guagaugagguagcucagg

SEQ ID NO: 1299955 - RNA, 19 nt, Artificial Sequence
  Description of Artificial Sequence: Synthetic oligonucleotide
uggugaauggcuucagauu

SEQ ID NO: 1299956 - RNA, 19 nt, Artificial Sequence
  Description of Artificial Sequence: Synthetic oligonucleotide
aagcaaggaaucccagcau

SEQ ID NO: 1299957 - RNA, 19 nt, Artificial Sequence
  Description of Artificial Sequence: Synthetic oligonucleotide
cugagacucaaauaggacu

SEQ ID NO: 1299958 - RNA, 19 nt, Artificial Sequence
  Description of Artificial Sequence: Synthetic oligonucleotide
agaugcguugauaaacucu

SEQ ID NO: 1299959 - RNA, 19 nt, Artificial Sequence
  Description of Artificial Sequence: Synthetic oligonucleotide
cuucguaagagcuccucca

SEQ ID NO: 1299960 - RNA, 19 nt, Artificial Sequence
  Description of Artificial Sequence: Synthetic oligonucleotide
gccugguccauguagguag

SEQ ID NO: 1299961 - RNA, 19 nt, Artificial Sequence
  Description of Artificial Sequence: Synthetic oligonucleotide
uacauguuguagugaggcu

SEQ ID NO: 1299962 - RNA, 19 nt, Artificial Sequence
  Description of Artificial Sequence: Synthetic oligonucleotide
ugaauggcuucagauucca

SEQ ID NO: 1299963 - RNA, 19 nt, Artificial Sequence
  Description of Artificial Sequence: Synthetic oligonucleotide
gaggcgggagucgagacug

SEQ ID NO: 1299964 - RNA, 19 nt, Artificial Sequence
  Description of Artificial Sequence: Synthetic oligonucleotide
uggggacacacgacugggg

SEQ ID NO: 1299965 - RNA, 19 nt, Artificial Sequence
  Description of Artificial Sequence: Synthetic oligonucleotide
gugaacgaugacaaccacc

SEQ ID NO: 1299966 - RNA, 19 nt, Artificial Sequence
  Description of Artificial Sequence: Synthetic oligonucleotide
acacgacuggggaaggggc

SEQ ID NO: 1299967 - RNA, 19 nt, Artificial Sequence
  Description of Artificial Sequence: Synthetic oligonucleotide
cuaugggccuucguaagag

SEQ ID NO: 1299968 - RNA, 19 nt, Artificial Sequence
  Description of Artificial Sequence: Synthetic oligonucleotide
cugccaacacugaacugag

SEQ ID NO: 1299969 - RNA, 19 nt, Artificial Sequence
  Description of Artificial Sequence: Synthetic oligonucleotide
cguugauaaacucugggac

SEQ ID NO: 1299970 - RNA, 19 nt, Artificial Sequence
  Description of Artificial Sequence: Synthetic oligonucleotide
agcaaggaaucccagcauu

SEQ ID NO: 1299971 - RNA, 19 nt, Artificial Sequence
  Description of Artificial Sequence: Synthetic oligonucleotide
accguauggagaaaucucu

SEQ ID NO: 1299972 - RNA, 19 nt, Artificial Sequence
  Description of Artificial Sequence: Synthetic oligonucleotide
uaugggccuucguaagagc

SEQ ID NO: 1299973 - RNA, 19 nt, Artificial Sequence
  Description of Artificial Sequence: Synthetic oligonucleotide
aggggccugguccauguag

SEQ ID NO: 1299974 - RNA, 19 nt, Artificial Sequence
  Description of Artificial Sequence: Synthetic oligonucleotide
aucucucguggugaauggc

SEQ ID NO: 1299975 - RNA, 19 nt, Artificial Sequence
  Description of Artificial Sequence: Synthetic oligonucleotide
acgguacugcugcaguguc

SEQ ID NO: 1299976 - RNA, 19 nt, Artificial Sequence
  Description of Artificial Sequence: Synthetic oligonucleotide
augagguagcucagguccc

SEQ ID NO: 1299977 - RNA, 19 nt, Artificial Sequence
  Description of Artificial Sequence: Synthetic oligonucleotide
agauuccagagguuucggu

SEQ ID NO: 1299978 - RNA, 19 nt, Artificial Sequence
  Description of Artificial Sequence: Synthetic oligonucleotide
caggaguguaguacuuggc

SEQ ID NO: 1299979 - RNA, 19 nt, Artificial Sequence
  Description of Artificial Sequence: Synthetic oligonucleotide
cuucacguauccaucuaca

SEQ ID NO: 1299980 - RNA, 19 nt, Artificial Sequence
  Description of Artificial Sequence: Synthetic oligonucleotide
gaccguauggagaaaucuc

SEQ ID NO: 1299981 - RNA, 19 nt, Artificial Sequence
  Description of Artificial Sequence: Synthetic oligonucleotide
aguuuuccaagagaagcaa

SEQ ID NO: 1299982 - RNA, 19 nt, Artificial Sequence
  Description of Artificial Sequence: Synthetic oligonucleotide
gcgaacggcacccugcccg

SEQ ID NO: 1299983 - RNA, 19 nt, Artificial Sequence
  Description of Artificial Sequence: Synthetic oligonucleotide
gacucaaauaggacuguga

SEQ ID NO: 1299984 - RNA, 19 nt, Artificial Sequence
  Description of Artificial Sequence: Synthetic oligonucleotide
gugucuggcaacauccaug

SEQ ID NO: 1299985 - RNA, 19 nt, Artificial Sequence
  Description of Artificial Sequence: Synthetic oligonucleotide
ugccucucgcugcagccag

SEQ ID NO: 1299986 - RNA, 19 nt, Artificial Sequence
  Description of Artificial Sequence: Synthetic oligonucleotide
ucgcuaaagcgcaguagaa

SEQ ID NO: 1299987 - RNA, 19 nt, Artificial Sequence
  Description of Artificial Sequence: Synthetic oligonucleotide
uuucggucaggagagucaa

SEQ ID NO: 1299988 - RNA, 19 nt, Artificial Sequence
  Description of Artificial Sequence: Synthetic oligonucleotide
cacacgacuggggaagggg

SEQ ID NO: 1299989 - RNA, 19 nt, Artificial Sequence
  Description of Artificial Sequence: Synthetic oligonucleotide
cguauggagaaaucucucg

SEQ ID NO: 1299990 - RNA, 19 nt, Artificial Sequence
  Description of Artificial Sequence: Synthetic oligonucleotide
guauggagaaaucucucgu

SEQ ID NO: 1299991 - RNA, 19 nt, Artificial Sequence
  Description of Artificial Sequence: Synthetic oligonucleotide
uucuggugcuuuucagcca

SEQ ID NO: 1299992 - RNA, 19 nt, Artificial Sequence
  Description of Artificial Sequence: Synthetic oligonucleotide
cuggcaacauccauggucu

SEQ ID NO: 1299993 - RNA, 19 nt, Artificial Sequence
  Description of Artificial Sequence: Synthetic oligonucleotide
ucuacagcuuuugcaagua

SEQ ID NO: 1299994 - RNA, 19 nt, Artificial Sequence
  Description of Artificial Sequence: Synthetic oligonucleotide
gaccucauccuugggucgg

SEQ ID NO: 1299995 - RNA, 19 nt, Artificial Sequence
  Description of Artificial Sequence: Synthetic oligonucleotide
uggcaugggcucuucacau

SEQ ID NO: 1299996 - RNA, 19 nt, Artificial Sequence
  Description of Artificial Sequence: Synthetic oligonucleotide
agccuaauauggccccauc

SEQ ID NO: 1299997 - RNA, 19 nt, Artificial Sequence
  Description of Artificial Sequence: Synthetic oligonucleotide
cagcuuuugcaaguacagg

SEQ ID NO: 1299998 - RNA, 19 nt, Artificial Sequence
  Description of Artificial Sequence: Synthetic oligonucleotide
guuccagccuggcagguuc

SEQ ID NO: 1299999 - RNA, 19 nt, Artificial Sequence
  Description of Artificial Sequence: Synthetic oligonucleotide
gccgugaacgaugacaacc

SEQ ID NO: 1300000 - RNA, 19 nt, Artificial Sequence
  Description of Artificial Sequence: Synthetic oligonucleotide
auauggccccaucauucca

SEQ ID NO: 1300001 - RNA, 19 nt, Artificial Sequence
  Description of Artificial Sequence: Synthetic oligonucleotide
cacgacuggggaaggggcc

SEQ ID NO: 1300002 - RNA, 19 nt, Artificial Sequence
  Description of Artificial Sequence: Synthetic oligonucleotide
ccaagagaagcaaggaauc

SEQ ID NO: 1300003 - RNA, 19 nt, Artificial Sequence
  Description of Artificial Sequence: Synthetic oligonucleotide
cucuagauggcugcugcug

SEQ ID NO: 1300004 - RNA, 19 nt, Artificial Sequence
  Description of Artificial Sequence: Synthetic oligonucleotide
acgaugacaaccaccggga

SEQ ID NO: 1300005 - RNA, 19 nt, Artificial Sequence
  Description of Artificial Sequence: Synthetic oligonucleotide
ggcagaugcguugauaaac

SEQ ID NO: 1300006 - RNA, 19 nt, Artificial Sequence
  Description of Artificial Sequence: Synthetic oligonucleotide
aggcuggggacacacgacu

SEQ ID NO: 1300007 - RNA, 19 nt, Artificial Sequence
  Description of Artificial Sequence: Synthetic oligonucleotide
uuccacuggaucagcucgu

SEQ ID NO: 1300008 - RNA, 19 nt, Artificial Sequence
  Description of Artificial Sequence: Synthetic oligonucleotide
cagccuggcagguucuccc

SEQ ID NO: 1300009 - RNA, 19 nt, Artificial Sequence
  Description of Artificial Sequence: Synthetic oligonucleotide
agacucaaauaggacugug

SEQ ID NO: 1300010 - RNA, 19 nt, Artificial Sequence
  Description of Artificial Sequence: Synthetic oligonucleotide
caaagaccucauccuuggg

SEQ ID NO: 1300011 - RNA, 19 nt, Artificial Sequence
  Description of Artificial Sequence: Synthetic oligonucleotide
accacuugucugaucugcg

SEQ ID NO: 1300012 - RNA, 19 nt, Artificial Sequence
  Description of Artificial Sequence: Synthetic oligonucleotide
auugugguccuggcugccg

SEQ ID NO: 1300013 - RNA, 19 nt, Artificial Sequence
  Description of Artificial Sequence: Synthetic oligonucleotide
cuuggucgagggcaggguc

SEQ ID NO: 1300014 - RNA, 19 nt, Artificial Sequence
  Description of Artificial Sequence: Synthetic oligonucleotide
ugggccuucguaagagcuc

SEQ ID NO: 1300015 - RNA, 19 nt, Artificial Sequence
  Description of Artificial Sequence: Synthetic oligonucleotide
ugagguagcucaggucccc

SEQ ID NO: 1300016 - RNA, 19 nt, Artificial Sequence
  Description of Artificial Sequence: Synthetic oligonucleotide
gcugccaacacugaacuga

SEQ ID NO: 1300017 - RNA, 19 nt, Artificial Sequence
  Description of Artificial Sequence: Synthetic oligonucleotide
cagaugcguugauaaacuc

SEQ ID NO: 1300018 - RNA, 19 nt, Artificial Sequence
  Description of Artificial Sequence: Synthetic oligonucleotide
ucaugagccuguugcuuau

SEQ ID NO: 1300019 - RNA, 19 nt, Artificial Sequence
  Description of Artificial Sequence: Synthetic oligonucleotide
cugccgugaacgaugacaa

SEQ ID NO: 1300020 - RNA, 19 nt, Artificial Sequence
  Description of Artificial Sequence: Synthetic oligonucleotide
cauuggcuccagcaucggc

SEQ ID NO: 1300021 - RNA, 19 nt, Artificial Sequence
  Description of Artificial Sequence: Synthetic oligonucleotide
ggcucuucacaucgaaggc

SEQ ID NO: 1300022 - RNA, 19 nt, Artificial Sequence
  Description of Artificial Sequence: Synthetic oligonucleotide
acggacucaggugcucagc

SEQ ID NO: 1300023 - RNA, 19 nt, Artificial Sequence
  Description of Artificial Sequence: Synthetic oligonucleotide
gacucaggugcucagcccu

SEQ ID NO: 1300024 - RNA, 19 nt, Artificial Sequence
  Description of Artificial Sequence: Synthetic oligonucleotide
uucccggccagcugcugcc

SEQ ID NO: 1300025 - RNA, 19 nt, Artificial Sequence
  Description of Artificial Sequence: Synthetic oligonucleotide
ggacacacgacuggggaag

SEQ ID NO: 1300026 - RNA, 19 nt, Artificial Sequence
  Description of Artificial Sequence: Synthetic oligonucleotide
cacaucgaaggcaguuuuc

SEQ ID NO: 1300027 - RNA, 19 nt, Artificial Sequence
  Description of Artificial Sequence: Synthetic oligonucleotide
ugucugaucugcggcuuca

SEQ ID NO: 1300028 - RNA, 19 nt, Artificial Sequence
  Description of Artificial Sequence: Synthetic oligonucleotide
uggguacauguuguaguga

SEQ ID NO: 1300029 - RNA, 19 nt, Artificial Sequence
  Description of Artificial Sequence: Synthetic oligonucleotide
gguacauguuguagugagg

SEQ ID NO: 1300030 - RNA, 19 nt, Artificial Sequence
  Description of Artificial Sequence: Synthetic oligonucleotide
gcguugauaaacucuggga

SEQ ID NO: 1300031 - RNA, 19 nt, Artificial Sequence
  Description of Artificial Sequence: Synthetic oligonucleotide
agaggcgggagucgagacu

SEQ ID NO: 1300032 - RNA, 19 nt, Artificial Sequence
  Description of Artificial Sequence: Synthetic oligonucleotide
cugucuaugggccuucgua

SEQ ID NO: 1300033 - RNA, 19 nt, Artificial Sequence
  Description of Artificial Sequence: Synthetic oligonucleotide
ccaucuacagcuuuugcaa

SEQ ID NO: 1300034 - RNA, 19 nt, Artificial Sequence
  Description of Artificial Sequence: Synthetic oligonucleotide
caggugcucagcccugcgg

SEQ ID NO: 1300035 - RNA, 19 nt, Artificial Sequence
  Description of Artificial Sequence: Synthetic oligonucleotide
cagauuccagagguuucgg

SEQ ID NO: 1300036 - RNA, 19 nt, Artificial Sequence
  Description of Artificial Sequence: Synthetic oligonucleotide
ggagucgagacugucuaug

SEQ ID NO: 1300037 - RNA, 19 nt, Artificial Sequence
  Description of Artificial Sequence: Synthetic oligonucleotide
gucaugagccuguugcuua

SEQ ID NO: 1300038 - RNA, 19 nt, Artificial Sequence
  Description of Artificial Sequence: Synthetic oligonucleotide
agcucgucauccaggauga

SEQ ID NO: 1300039 - RNA, 19 nt, Artificial Sequence
  Description of Artificial Sequence: Synthetic oligonucleotide
guuucggucaggagaguca

SEQ ID NO: 1300040 - RNA, 19 nt, Artificial Sequence
  Description of Artificial Sequence: Synthetic oligonucleotide
augggccuucguaagagcu

SEQ ID NO: 1300041 - RNA, 19 nt, Artificial Sequence
  Description of Artificial Sequence: Synthetic oligonucleotide
gaacaccagcucauugcug

SEQ ID NO: 1300042 - RNA, 19 nt, Artificial Sequence
  Description of Artificial Sequence: Synthetic oligonucleotide
uugcaaguacaggagugua

SEQ ID NO: 1300043 - RNA, 19 nt, Artificial Sequence
  Description of Artificial Sequence: Synthetic oligonucleotide
acaaccaccgggagggaca

SEQ ID NO: 1300044 - RNA, 19 nt, Artificial Sequence
  Description of Artificial Sequence: Synthetic oligonucleotide
uugucugaucugcggcuuc

SEQ ID NO: 1300045 - RNA, 19 nt, Artificial Sequence
  Description of Artificial Sequence: Synthetic oligonucleotide
ggcaaagaccucauccuug

SEQ ID NO: 1300046 - RNA, 19 nt, Artificial Sequence
  Description of Artificial Sequence: Synthetic oligonucleotide
gaauggcuucagauuccag

SEQ ID NO: 1300047 - RNA, 19 nt, Artificial Sequence
  Description of Artificial Sequence: Synthetic oligonucleotide
cuuuugcaaguacaggagu

SEQ ID NO: 1300048 - RNA, 19 nt, Artificial Sequence
  Description of Artificial Sequence: Synthetic oligonucleotide
ugcugccaacacugaacug

SEQ ID NO: 1300049 - RNA, 19 nt, Artificial Sequence
  Description of Artificial Sequence: Synthetic oligonucleotide
cuggcaugggcucuucaca

SEQ ID NO: 1300050 - RNA, 19 nt, Artificial Sequence
  Description of Artificial Sequence: Synthetic oligonucleotide
ucacggacucaggugcuca

SEQ ID NO: 1300051 - RNA, 19 nt, Artificial Sequence
  Description of Artificial Sequence: Synthetic oligonucleotide
ccgucacggacucaggugc

SEQ ID NO: 1300052 - RNA, 19 nt, Artificial Sequence
  Description of Artificial Sequence: Synthetic oligonucleotide
augggcucuucacaucgaa

SEQ ID NO: 1300053 - RNA, 19 nt, Artificial Sequence
  Description of Artificial Sequence: Synthetic oligonucleotide
cagugucugugccucucgc

SEQ ID NO: 1300054 - RNA, 19 nt, Artificial Sequence
  Description of Artificial Sequence: Synthetic oligonucleotide
augcguugauaaacucugg

SEQ ID NO: 1300055 - RNA, 19 nt, Artificial Sequence
  Description of Artificial Sequence: Synthetic oligonucleotide
uggcugccgugaacgauga

SEQ ID NO: 1300056 - RNA, 19 nt, Artificial Sequence
  Description of Artificial Sequence: Synthetic oligonucleotide
aagccuaauauggccccau

SEQ ID NO: 1300057 - RNA, 19 nt, Artificial Sequence
  Description of Artificial Sequence: Synthetic oligonucleotide
caggucaaauucuccaucu

SEQ ID NO: 1300058 - RNA, 19 nt, Artificial Sequence
  Description of Artificial Sequence: Synthetic oligonucleotide
caaggaaucccagcauuca

SEQ ID NO: 1300059 - RNA, 19 nt, Artificial Sequence
  Description of Artificial Sequence: Synthetic oligonucleotide
auaggacugugaacuucuc

SEQ ID NO: 1300060 - RNA, 19 nt, Artificial Sequence
  Description of Artificial Sequence: Synthetic oligonucleotide
acugucuaugggccuucgu

SEQ ID NO: 1300061 - RNA, 19 nt, Artificial Sequence
  Description of Artificial Sequence: Synthetic oligonucleotide
guagcauuggcuccagcau

SEQ ID NO: 1300062 - RNA, 19 nt, Artificial Sequence
  Description of Artificial Sequence: Synthetic oligonucleotide
aggucaaauucuccaucuu

SEQ ID NO: 1300063 - RNA, 19 nt, Artificial Sequence
  Description of Artificial Sequence: Synthetic oligonucleotide
gcugccgugaacgaugaca

SEQ ID NO: 1300064 - RNA, 19 nt, Artificial Sequence
  Description of Artificial Sequence: Synthetic oligonucleotide
gacaaccaccgggagggac

SEQ ID NO: 1300065 - RNA, 19 nt, Artificial Sequence
  Description of Artificial Sequence: Synthetic oligonucleotide
cuccaucuuggucgagggc

SEQ ID NO: 1300066 - RNA, 19 nt, Artificial Sequence
  Description of Artificial Sequence: Synthetic oligonucleotide
gacugucuaugggccuucg

SEQ ID NO: 1300067 - RNA, 19 nt, Artificial Sequence
  Description of Artificial Sequence: Synthetic oligonucleotide
agacugucuaugggccuuc

SEQ ID NO: 1300068 - RNA, 19 nt, Artificial Sequence
  Description of Artificial Sequence: Synthetic oligonucleotide
uugggucggucugggaaca

SEQ ID NO: 1300069 - RNA, 19 nt, Artificial Sequence
  Description of Artificial Sequence: Synthetic oligonucleotide
cccagcauucaggacaggg

SEQ ID NO: 1300070 - RNA, 19 nt, Artificial Sequence
  Description of Artificial Sequence: Synthetic oligonucleotide
cccaucauuccaguggggc

SEQ ID NO: 1300071 - RNA, 19 nt, Artificial Sequence
  Description of Artificial Sequence: Synthetic oligonucleotide
gccuaauauggccccauca

SEQ ID NO: 1300072 - RNA, 19 nt, Artificial Sequence
  Description of Artificial Sequence: Synthetic oligonucleotide
uucucacaccaggacugca

SEQ ID NO: 1300073 - RNA, 19 nt, Artificial Sequence
  Description of Artificial Sequence: Synthetic oligonucleotide
cugagucgcuaaagcgcag

SEQ ID NO: 1300074 - RNA, 19 nt, Artificial Sequence
  Description of Artificial Sequence: Synthetic oligonucleotide
cacggacucaggugcucag

SEQ ID NO: 1300075 - RNA, 19 nt, Artificial Sequence
  Description of Artificial Sequence: Synthetic oligonucleotide
uggcaguagcauugugguc

SEQ ID NO: 1300076 - RNA, 19 nt, Artificial Sequence
  Description of Artificial Sequence: Synthetic oligonucleotide
caccgggagggacaggguc

SEQ ID NO: 1300077 - RNA, 19 nt, Artificial Sequence
  Description of Artificial Sequence: Synthetic oligonucleotide
ucguggugaauggcuucag

SEQ ID NO: 1300078 - RNA, 19 nt, Artificial Sequence
  Description of Artificial Sequence: Synthetic oligonucleotide
uuccagccuggcagguucu

SEQ ID NO: 1300079 - RNA, 19 nt, Artificial Sequence
  Description of Artificial Sequence: Synthetic oligonucleotide
agggaccguauggagaaau

SEQ ID NO: 1300080 - RNA, 19 nt, Artificial Sequence
  Description of Artificial Sequence: Synthetic oligonucleotide
gggccuucguaagagcucc

SEQ ID NO: 1300081 - RNA, 19 nt, Artificial Sequence
  Description of Artificial Sequence: Synthetic oligonucleotide
gugaagaggccagcaggug

SEQ ID NO: 1300082 - RNA, 19 nt, Artificial Sequence
  Description of Artificial Sequence: Synthetic oligonucleotide
ucagcucgucauccaggau

SEQ ID NO: 1300083 - RNA, 19 nt, Artificial Sequence
  Description of Artificial Sequence: Synthetic oligonucleotide
gcauugucccacaguacag

SEQ ID NO: 1300084 - RNA, 19 nt, Artificial Sequence
  Description of Artificial Sequence: Synthetic oligonucleotide
cuaauauggccccaucauu

SEQ ID NO: 1300085 - RNA, 19 nt, Artificial Sequence
  Description of Artificial Sequence: Synthetic oligonucleotide
cacagcgaacggcacccug

SEQ ID NO: 1300086 - RNA, 19 nt, Artificial Sequence
  Description of Artificial Sequence: Synthetic oligonucleotide
ggggacacacgacugggga

SEQ ID NO: 1300087 - RNA, 19 nt, Artificial Sequence
  Description of Artificial Sequence: Synthetic oligonucleotide
acggcacccugcccggcuc

SEQ ID NO: 1300088 - RNA, 19 nt, Artificial Sequence
  Description of Artificial Sequence: Synthetic oligonucleotide
gucucauccaggucaaauu

SEQ ID NO: 1300089 - RNA, 19 nt, Artificial Sequence
  Description of Artificial Sequence: Synthetic oligonucleotide
ggacucaggugcucagccc

SEQ ID NO: 1300090 - RNA, 19 nt, Artificial Sequence
  Description of Artificial Sequence: Synthetic oligonucleotide
caaccaccgggagggacag

SEQ ID NO: 1300091 - RNA, 19 nt, Artificial Sequence
  Description of Artificial Sequence: Synthetic oligonucleotide
uucggucaggagagucaaa

SEQ ID NO: 1300092 - RNA, 19 nt, Artificial Sequence
  Description of Artificial Sequence: Synthetic oligonucleotide
ugccgugaacgaugacaac

SEQ ID NO: 1300093 - RNA, 19 nt, Artificial Sequence
  Description of Artificial Sequence: Synthetic oligonucleotide
cugcccggcucagcgaagg

SEQ ID NO: 1300094 - RNA, 19 nt, Artificial Sequence
  Description of Artificial Sequence: Synthetic oligonucleotide
gcaguagaaaggucccauc

SEQ ID NO: 1300095 - RNA, 19 nt, Artificial Sequence
  Description of Artificial Sequence: Synthetic oligonucleotide
caucuuggucgagggcagg

SEQ ID NO: 1300096 - RNA, 19 nt, Artificial Sequence
  Description of Artificial Sequence: Synthetic oligonucleotide
acgacuggggaaggggccu

SEQ ID NO: 1300097 - RNA, 19 nt, Artificial Sequence
  Description of Artificial Sequence: Synthetic oligonucleotide
cucguggugaauggcuuca

SEQ ID NO: 1300098 - RNA, 19 nt, Artificial Sequence
  Description of Artificial Sequence: Synthetic oligonucleotide
caaguacaggaguguagua

SEQ ID NO: 1300099 - RNA, 19 nt, Artificial Sequence
  Description of Artificial Sequence: Synthetic oligonucleotide
ggugcuuuucagccagcuc

SEQ ID NO: 1300100 - RNA, 19 nt, Artificial Sequence
  Description of Artificial Sequence: Synthetic oligonucleotide
accgggagggacagggucu

SEQ ID NO: 1300101 - RNA, 19 nt, Artificial Sequence
  Description of Artificial Sequence: Synthetic oligonucleotide
gcaaguacaggaguguagu

SEQ ID NO: 1300102 - RNA, 19 nt, Artificial Sequence
  Description of Artificial Sequence: Synthetic oligonucleotide
gguuucggucaggagaguc

SEQ ID NO: 1300103 - RNA, 19 nt, Artificial Sequence
  Description of Artificial Sequence: Synthetic oligonucleotide
ccguauggagaaaucucuc

SEQ ID NO: 1300104 - RNA, 19 nt, Artificial Sequence
  Description of Artificial Sequence: Synthetic oligonucleotide
cccguucccggccagcugc

SEQ ID NO: 1300105 - RNA, 19 nt, Artificial Sequence
  Description of Artificial Sequence: Synthetic oligonucleotide
ccgugaacgaugacaacca

SEQ ID NO: 1300106 - RNA, 19 nt, Artificial Sequence
  Description of Artificial Sequence: Synthetic oligonucleotide
guguaguacuuggcaaaga

SEQ ID NO: 1300107 - RNA, 19 nt, Artificial Sequence
  Description of Artificial Sequence: Synthetic oligonucleotide
cauuccaguggggcuugug

SEQ ID NO: 1300108 - RNA, 19 nt, Artificial Sequence
  Description of Artificial Sequence: Synthetic oligonucleotide
cacguccaggcugcccucg

SEQ ID NO: 1300109 - RNA, 19 nt, Artificial Sequence
  Description of Artificial Sequence: Synthetic oligonucleotide
cacugaacugagacucaaa

SEQ ID NO: 1300110 - RNA, 19 nt, Artificial Sequence
  Description of Artificial Sequence: Synthetic oligonucleotide
ccagggaccguauggagaa

SEQ ID NO: 1300111 - RNA, 19 nt, Artificial Sequence
  Description of Artificial Sequence: Synthetic oligonucleotide
gggucggucugggaacacg

SEQ ID NO: 1300112 - RNA, 19 nt, Artificial Sequence
  Description of Artificial Sequence: Synthetic oligonucleotide
caugggcucuucacaucga

SEQ ID NO: 1300113 - RNA, 19 nt, Artificial Sequence
  Description of Artificial Sequence: Synthetic oligonucleotide
aggguucuguggguacaug

SEQ ID NO: 1300114 - RNA, 19 nt, Artificial Sequence
  Description of Artificial Sequence: Synthetic oligonucleotide
ggaccacuugucugaucug

SEQ ID NO: 1300115 - RNA, 19 nt, Artificial Sequence
  Description of Artificial Sequence: Synthetic oligonucleotide
gggucuucaccuggaacac

SEQ ID NO: 1300116 - RNA, 19 nt, Artificial Sequence
  Description of Artificial Sequence: Synthetic oligonucleotide
cuagauggcugcugcugcu

SEQ ID NO: 1300117 - RNA, 19 nt, Artificial Sequence
  Description of Artificial Sequence: Synthetic oligonucleotide
ccugcggaucugcugccgg

SEQ ID NO: 1300118 - RNA, 19 nt, Artificial Sequence
  Description of Artificial Sequence: Synthetic oligonucleotide
aucggcagaugcguugaua

SEQ ID NO: 1300119 - RNA, 19 nt, Artificial Sequence
  Description of Artificial Sequence: Synthetic oligonucleotide
ugggaccacuugucugauc

SEQ ID NO: 1300120 - RNA, 19 nt, Artificial Sequence
  Description of Artificial Sequence: Synthetic oligonucleotide
ggacagggagccucuggca

SEQ ID NO: 1300121 - RNA, 19 nt, Artificial Sequence
  Description of Artificial Sequence: Synthetic oligonucleotide
acucaggugcucagcccug

SEQ ID NO: 1300122 - RNA, 19 nt, Artificial Sequence
  Description of Artificial Sequence: Synthetic oligonucleotide
ggaccguauggagaaaucu

SEQ ID NO: 1300123 - RNA, 19 nt, Artificial Sequence
  Description of Artificial Sequence: Synthetic oligonucleotide
guacaguggcaguagcauu

SEQ ID NO: 1300124 - RNA, 19 nt, Artificial Sequence
  Description of Artificial Sequence: Synthetic oligonucleotide
gcagaugcguugauaaacu

SEQ ID NO: 1300125 - RNA, 19 nt, Artificial Sequence
  Description of Artificial Sequence: Synthetic oligonucleotide
acgugucuggcaacaucca

SEQ ID NO: 1300126 - RNA, 19 nt, Artificial Sequence
  Description of Artificial Sequence: Synthetic oligonucleotide
ccuaauauggccccaucau

SEQ ID NO: 1300127 - RNA, 19 nt, Artificial Sequence
  Description of Artificial Sequence: Synthetic oligonucleotide
ccuugggucggucugggaa

SEQ ID NO: 1300128 - RNA, 19 nt, Artificial Sequence
  Description of Artificial Sequence: Synthetic oligonucleotide
caaauaggacugugaacuu

SEQ ID NO: 1300129 - RNA, 19 nt, Artificial Sequence
  Description of Artificial Sequence: Synthetic oligonucleotide
ccaggaugauggucuguug

SEQ ID NO: 1300130 - RNA, 19 nt, Artificial Sequence
  Description of Artificial Sequence: Synthetic oligonucleotide
aaccaccgggagggacagg

SEQ ID NO: 1300131 - RNA, 19 nt, Artificial Sequence
  Description of Artificial Sequence: Synthetic oligonucleotide
aaggggccugguccaugua

SEQ ID NO: 1300132 - RNA, 19 nt, Artificial Sequence
  Description of Artificial Sequence: Synthetic oligonucleotide
ucccggccagcugcugccg

SEQ ID NO: 1300133 - RNA, 19 nt, Artificial Sequence
  Description of Artificial Sequence: Synthetic oligonucleotide
cuccacgugucuggcaaca

SEQ ID NO: 1300134 - RNA, 19 nt, Artificial Sequence
  Description of Artificial Sequence: Synthetic oligonucleotide
gcucauugcugccaacacu

SEQ ID NO: 1300135 - RNA, 19 nt, Artificial Sequence
  Description of Artificial Sequence: Synthetic oligonucleotide
ggcaugggcucuucacauc

SEQ ID NO: 1300136 - RNA, 19 nt, Artificial Sequence
  Description of Artificial Sequence: Synthetic oligonucleotide
gggacacacgacuggggaa

SEQ ID NO: 1300137 - RNA, 19 nt, Artificial Sequence
  Description of Artificial Sequence: Synthetic oligonucleotide
cagcgaaggcauuguccca

SEQ ID NO: 1300138 - RNA, 19 nt, Artificial Sequence
  Description of Artificial Sequence: Synthetic oligonucleotide
aggccagcagguggggaga

SEQ ID NO: 1300139 - RNA, 19 nt, Artificial Sequence
  Description of Artificial Sequence: Synthetic oligonucleotide
gcuuauucacaaagccuaa

SEQ ID NO: 1300140 - RNA, 19 nt, Artificial Sequence
  Description of Artificial Sequence: Synthetic oligonucleotide
gagacugucuaugggccuu

SEQ ID NO: 1300141 - RNA, 19 nt, Artificial Sequence
  Description of Artificial Sequence: Synthetic oligonucleotide
ugacaaccaccgggaggga

SEQ ID NO: 1300142 - RNA, 19 nt, Artificial Sequence
  Description of Artificial Sequence: Synthetic oligonucleotide
ccgguucugccagaugagc

SEQ ID NO: 1300143 - RNA, 19 nt, Artificial Sequence
  Description of Artificial Sequence: Synthetic oligonucleotide
ggagccucuggcagcggug

SEQ ID NO: 1300144 - RNA, 19 nt, Artificial Sequence
  Description of Artificial Sequence: Synthetic oligonucleotide
ccaacacugaacugagacu

SEQ ID NO: 1300145 - RNA, 19 nt, Artificial Sequence
  Description of Artificial Sequence: Synthetic oligonucleotide
gggagggacagggucuuca

SEQ ID NO: 1300146 - RNA, 19 nt, Artificial Sequence
  Description of Artificial Sequence: Synthetic oligonucleotide
gucacggacucaggugcuc

SEQ ID NO: 1300147 - RNA, 19 nt, Artificial Sequence
  Description of Artificial Sequence: Synthetic oligonucleotide
cuccgucacggacucaggu

SEQ ID NO: 1300148 - RNA, 19 nt, Artificial Sequence
  Description of Artificial Sequence: Synthetic oligonucleotide
aguuccagccuggcagguu

SEQ ID NO: 1300149 - RNA, 19 nt, Artificial Sequence
  Description of Artificial Sequence: Synthetic oligonucleotide
gccgguucugccagaugag

SEQ ID NO: 1300150 - RNA, 19 nt, Artificial Sequence
  Description of Artificial Sequence: Synthetic oligonucleotide
cagcacguccaggcugccc

SEQ ID NO: 1300151 - RNA, 19 nt, Artificial Sequence
  Description of Artificial Sequence: Synthetic oligonucleotide
cagcggugaagaggccagc

SEQ ID NO: 1300152 - RNA, 19 nt, Artificial Sequence
  Description of Artificial Sequence: Synthetic oligonucleotide
gaacggcacccugcccggc

SEQ ID NO: 1300153 - RNA, 19 nt, Artificial Sequence
  Description of Artificial Sequence: Synthetic oligonucleotide
cgaacggcacccugcccgg

SEQ ID NO: 1300154 - RNA, 19 nt, Artificial Sequence
  Description of Artificial Sequence: Synthetic oligonucleotide
cacgguacugcugcagugu

SEQ ID NO: 1300155 - RNA, 19 nt, Artificial Sequence
  Description of Artificial Sequence: Synthetic oligonucleotide
uagugaggcuggggacaca

SEQ ID NO: 1300156 - RNA, 19 nt, Artificial Sequence
  Description of Artificial Sequence: Synthetic oligonucleotide
ggucugggaacacguagau

SEQ ID NO: 1300157 - RNA, 19 nt, Artificial Sequence
  Description of Artificial Sequence: Synthetic oligonucleotide
cucucguggugaauggcuu

SEQ ID NO: 1300158 - RNA, 19 nt, Artificial Sequence
  Description of Artificial Sequence: Synthetic oligonucleotide
gggaccguauggagaaauc

SEQ ID NO: 1300159 - RNA, 19 nt, Artificial Sequence
  Description of Artificial Sequence: Synthetic oligonucleotide
gccggucagccagggaccg

SEQ ID NO: 1300160 - RNA, 19 nt, Artificial Sequence
  Description of Artificial Sequence: Synthetic oligonucleotide
gcauuggcuccagcaucgg

SEQ ID NO: 1300161 - RNA, 19 nt, Artificial Sequence
  Description of Artificial Sequence: Synthetic oligonucleotide
ggucucauccaggucaaau

SEQ ID NO: 1300162 - RNA, 19 nt, Artificial Sequence
  Description of Artificial Sequence: Synthetic oligonucleotide
gugccucucgcugcagcca

SEQ ID NO: 1300163 - RNA, 19 nt, Artificial Sequence
  Description of Artificial Sequence: Synthetic oligonucleotide
cgugaacgaugacaaccac

SEQ ID NO: 1300164 - RNA, 19 nt, Artificial Sequence
  Description of Artificial Sequence: Synthetic oligonucleotide
ugggucggucugggaacac

SEQ ID NO: 1300165 - RNA, 19 nt, Artificial Sequence
  Description of Artificial Sequence: Synthetic oligonucleotide
cgaugacaaccaccgggag

SEQ ID NO: 1300166 - RNA, 19 nt, Artificial Sequence
  Description of Artificial Sequence: Synthetic oligonucleotide
agguuucggucaggagagu

SEQ ID NO: 1300167 - RNA, 19 nt, Artificial Sequence
  Description of Artificial Sequence: Synthetic oligonucleotide
uggucucauccaggucaaa

SEQ ID NO: 1300168 - RNA, 19 nt, Artificial Sequence
  Description of Artificial Sequence: Synthetic oligonucleotide
agcaggucaugagccuguu

SEQ ID NO: 1300169 - RNA, 19 nt, Artificial Sequence
  Description of Artificial Sequence: Synthetic oligonucleotide
ggucggucugggaacacgu

SEQ ID NO: 1300170 - RNA, 19 nt, Artificial Sequence
  Description of Artificial Sequence: Synthetic oligonucleotide
gguucuguggguacauguu

SEQ ID NO: 1300171 - RNA, 19 nt, Artificial Sequence
  Description of Artificial Sequence: Synthetic oligonucleotide
caccaggacugcagcacgu

SEQ ID NO: 1300172 - RNA, 19 nt, Artificial Sequence
  Description of Artificial Sequence: Synthetic oligonucleotide
gccuucguaagagcuccuc

SEQ ID NO: 1300173 - RNA, 19 nt, Artificial Sequence
  Description of Artificial Sequence: Synthetic oligonucleotide
guacaggaguguaguacuu

SEQ ID NO: 1300174 - RNA, 19 nt, Artificial Sequence
  Description of Artificial Sequence: Synthetic oligonucleotide
ccuccacgugucuggcaac

SEQ ID NO: 1300175 - RNA, 19 nt, Artificial Sequence
  Description of Artificial Sequence: Synthetic oligonucleotide
gucggucugggaacacgua

SEQ ID NO: 1300176 - RNA, 19 nt, Artificial Sequence
  Description of Artificial Sequence: Synthetic oligonucleotide
ccacaguacaguggcagua

SEQ ID NO: 1300177 - RNA, 19 nt, Artificial Sequence
  Description of Artificial Sequence: Synthetic oligonucleotide
caggguuuucuggugcuuu

SEQ ID NO: 1300178 - RNA, 19 nt, Artificial Sequence
  Description of Artificial Sequence: Synthetic oligonucleotide
ggcgggagucgagacuguc

SEQ ID NO: 1300179 - RNA, 19 nt, Artificial Sequence
  Description of Artificial Sequence: Synthetic oligonucleotide
ggucgagggcagggucagg

SEQ ID NO: 1300180 - RNA, 19 nt, Artificial Sequence
  Description of Artificial Sequence: Synthetic oligonucleotide
cgauuucugagucgcuaaa

SEQ ID NO: 1300181 - RNA, 19 nt, Artificial Sequence
  Description of Artificial Sequence: Synthetic oligonucleotide
cguggugaauggcuucaga

SEQ ID NO: 1300182 - RNA, 19 nt, Artificial Sequence
  Description of Artificial Sequence: Synthetic oligonucleotide
ccugcccggcucagcgaag

SEQ ID NO: 1300183 - RNA, 19 nt, Artificial Sequence
  Description of Artificial Sequence: Synthetic oligonucleotide
gggagccucuggcagcggu

SEQ ID NO: 1300184 - RNA, 19 nt, Artificial Sequence
  Description of Artificial Sequence: Synthetic oligonucleotide
cgggagucgagacugucua

SEQ ID NO: 1300185 - RNA, 19 nt, Artificial Sequence
  Description of Artificial Sequence: Synthetic oligonucleotide
cccugcggaucugcugccg

SEQ ID NO: 1300186 - RNA, 19 nt, Artificial Sequence
  Description of Artificial Sequence: Synthetic oligonucleotide
gcgcaguagaaagguccca

SEQ ID NO: 1300187 - RNA, 19 nt, Artificial Sequence
  Description of Artificial Sequence: Synthetic oligonucleotide
ggugcucagcccugcggau

SEQ ID NO: 1300188 - RNA, 19 nt, Artificial Sequence
  Description of Artificial Sequence: Synthetic oligonucleotide
gccucucgcugcagccagg

SEQ ID NO: 1300189 - RNA, 19 nt, Artificial Sequence
  Description of Artificial Sequence: Synthetic oligonucleotide
ggagggcugucucccggcu

SEQ ID NO: 1300190 - RNA, 19 nt, Artificial Sequence
  Description of Artificial Sequence: Synthetic oligonucleotide
cauucaggacagggagccu

SEQ ID NO: 1300191 - RNA, 19 nt, Artificial Sequence
  Description of Artificial Sequence: Synthetic oligonucleotide
ggcucagcgaaggcauugu

SEQ ID NO: 1300192 - RNA, 19 nt, Artificial Sequence
  Description of Artificial Sequence: Synthetic oligonucleotide
aggcgggagucgagacugu

SEQ ID NO: 1300193 - RNA, 19 nt, Artificial Sequence
  Description of Artificial Sequence: Synthetic oligonucleotide
cccagccggucagccaggg

SEQ ID NO: 1300194 - RNA, 19 nt, Artificial Sequence
  Description of Artificial Sequence: Synthetic oligonucleotide
cgguucugccagaugagcu

SEQ ID NO: 1300195 - RNA, 19 nt, Artificial Sequence
  Description of Artificial Sequence: Synthetic oligonucleotide
gggagucgagacugucuau

SEQ ID NO: 1300196 - RNA, 19 nt, Artificial Sequence
  Description of Artificial Sequence: Synthetic oligonucleotide
ggcugucucccggcucaug

SEQ ID NO: 1300197 - RNA, 19 nt, Artificial Sequence
  Description of Artificial Sequence: Synthetic oligonucleotide
cccacaguacaguggcagu

SEQ ID NO: 1300198 - RNA, 19 nt, Artificial Sequence
  Description of Artificial Sequence: Synthetic oligonucleotide
cccggcucagcgaaggcau

SEQ ID NO: 1300199 - RNA, 19 nt, Artificial Sequence
  Description of Artificial Sequence: Synthetic oligonucleotide
caggguucuguggguacau

SEQ ID NO: 1300200 - RNA, 19 nt, Artificial Sequence
  Description of Artificial Sequence: Synthetic oligonucleotide
ggcugccgugaacgaugac

SEQ ID NO: 1300201 - RNA, 19 nt, Artificial Sequence
  Description of Artificial Sequence: Synthetic oligonucleotide
gcgggagucgagacugucu

SEQ ID NO: 1300202 - RNA, 19 nt, Artificial Sequence
  Description of Artificial Sequence: Synthetic oligonucleotide
cagcaucggcagaugcguu

SEQ ID NO: 1300203 - RNA, 19 nt, Artificial Sequence
  Description of Artificial Sequence: Synthetic oligonucleotide
ccaguggggcuuguggugu

SEQ ID NO: 1300204 - RNA, 19 nt, Artificial Sequence
  Description of Artificial Sequence: Synthetic oligonucleotide
cagggaccguauggagaaa

SEQ ID NO: 1300205 - RNA, 19 nt, Artificial Sequence
  Description of Artificial Sequence: Synthetic oligonucleotide
ccccguucccggccagcug

SEQ ID NO: 1300206 - RNA, 19 nt, Artificial Sequence
  Description of Artificial Sequence: Synthetic oligonucleotide
cggucaggagagucaaacu

SEQ ID NO: 1300207 - RNA, 19 nt, Artificial Sequence
  Description of Artificial Sequence: Synthetic oligonucleotide
cugggaccacuugucugau

SEQ ID NO: 1300208 - RNA, 19 nt, Artificial Sequence
  Description of Artificial Sequence: Synthetic oligonucleotide
cggcagaugcguugauaaa

SEQ ID NO: 1300209 - RNA, 19 nt, Artificial Sequence
  Description of Artificial Sequence: Synthetic oligonucleotide
caguggggcuugugguguu

SEQ ID NO: 1300210 - RNA, 19 nt, Artificial Sequence
  Description of Artificial Sequence: Synthetic oligonucleotide
gcugccgguucugccagau

SEQ ID NO: 1300211 - RNA, 19 nt, Artificial Sequence
  Description of Artificial Sequence: Synthetic oligonucleotide
cgugucuggcaacauccau

SEQ ID NO: 1300212 - RNA, 19 nt, Artificial Sequence
  Description of Artificial Sequence: Synthetic oligonucleotide
cgcaguagaaaggucccau

SEQ ID NO: 1300213 - RNA, 19 nt, Artificial Sequence
  Description of Artificial Sequence: Synthetic oligonucleotide
cgucauccaggaugauggu

SEQ ID NO: 1300214 - RNA, 19 nt, Artificial Sequence
  Description of Artificial Sequence: Synthetic oligonucleotide
cgucacggacucaggugcu

SEQ ID NO: 1300215 - RNA, 19 nt, Artificial Sequence
  Description of Artificial Sequence: Synthetic oligonucleotide
ggucagccagggaccguau

SEQ ID NO: 1300216 - RNA, 19 nt, Artificial Sequence
  Description of Artificial Sequence: Synthetic oligonucleotide
gccgccucuuccacuggau

SEQ ID NO: 1300217 - RNA, 19 nt, Artificial Sequence
  Description of Artificial Sequence: Synthetic oligonucleotide
ggccuucguaagagcuccu

SEQ ID NO: 1300218 - RNA, 19 nt, Artificial Sequence
  Description of Artificial Sequence: Synthetic oligonucleotide
ccaccgggagggacagggu

SEQ ID NO: 1300219 - RNA, 19 nt, Artificial Sequence
  Description of Artificial Sequence: Synthetic oligonucleotide
gcacagcgaacggcacccu

SEQ ID NO: 1300220 - RNA, 19 nt, Artificial Sequence
  Description of Artificial Sequence: Synthetic oligonucleotide
ccguucccggccagcugcu

SEQ ID NO: 1300221 - RNA, 19 nt, Artificial Sequence
  Description of Artificial Sequence: Synthetic oligonucleotide
ccgggagggacagggucuu

SEQ ID NO: 1300222 - RNA, 19 nt, Artificial Sequence
  Description of Artificial Sequence: Synthetic oligonucleotide
ccggucagccagggaccgu

SEQ ID NO: 1300223 - RNA, 19 nt, Artificial Sequence
  Description of Artificial Sequence: Synthetic oligonucleotide
aauaaaacuugucugacug

SEQ ID NO: 1300224 - RNA, 19 nt, Artificial Sequence
  Description of Artificial Sequence: Synthetic oligonucleotide
uuuuaugagaacaauacac

SEQ ID NO: 1300225 - RNA, 19 nt, Artificial Sequence
  Description of Artificial Sequence: Synthetic oligonucleotide
auuaaauaaaacuugucug

SEQ ID NO: 1300226 - RNA, 19 nt, Artificial Sequence
  Description of Artificial Sequence: Synthetic oligonucleotide
uuuuauaacagacacugac

SEQ ID NO: 1300227 - RNA, 19 nt, Artificial Sequence
  Description of Artificial Sequence: Synthetic oligonucleotide
uugaagauaggcuuggagg

SEQ ID NO: 1300228 - RNA, 19 nt, Artificial Sequence
  Description of Artificial Sequence: Synthetic oligonucleotide
uucgucuugacucaguccg

SEQ ID NO: 1300229 - RNA, 19 nt, Artificial Sequence
  Description of Artificial Sequence: Synthetic oligonucleotide
uuuaugagaacaauacacc

SEQ ID NO: 1300230 - RNA, 19 nt, Artificial Sequence
  Description of Artificial Sequence: Synthetic oligonucleotide
uagacaaguaguuaacugg

SEQ ID NO: 1300231 - RNA, 19 nt, Artificial Sequence
  Description of Artificial Sequence: Synthetic oligonucleotide
uguacaugcuacaugaggc

SEQ ID NO: 1300232 - RNA, 19 nt, Artificial Sequence
  Description of Artificial Sequence: Synthetic oligonucleotide
aguuuuaugagaacaauac

SEQ ID NO: 1300233 - RNA, 19 nt, Artificial Sequence
  Description of Artificial Sequence: Synthetic oligonucleotide
aaaagauagucauggcaac

SEQ ID NO: 1300234 - RNA, 19 nt, Artificial Sequence
  Description of Artificial Sequence: Synthetic oligonucleotide
ucacuuuuggguaagacgu

SEQ ID NO: 1300235 - RNA, 19 nt, Artificial Sequence
  Description of Artificial Sequence: Synthetic oligonucleotide
aaaauaugcugacagggcu

SEQ ID NO: 1300236 - RNA, 19 nt, Artificial Sequence
  Description of Artificial Sequence: Synthetic oligonucleotide
ugauuaucacaccauaccc

SEQ ID NO: 1300237 - RNA, 19 nt, Artificial Sequence
  Description of Artificial Sequence: Synthetic oligonucleotide
ucuacauuccuuuaguccu

SEQ ID NO: 1300238 - RNA, 19 nt, Artificial Sequence
  Description of Artificial Sequence: Synthetic oligonucleotide
uuuucuacguauuugcugu

SEQ ID NO: 1300239 - RNA, 19 nt, Artificial Sequence
  Description of Artificial Sequence: Synthetic oligonucleotide
agaaagcuuagguagcccc

SEQ ID NO: 1300240 - RNA, 19 nt, Artificial Sequence
  Description of Artificial Sequence: Synthetic oligonucleotide
gacacaguugcugaaaugg

SEQ ID NO: 1300241 - RNA, 19 nt, Artificial Sequence
  Description of Artificial Sequence: Synthetic oligonucleotide
uuuauaacagacacugacu

SEQ ID NO: 1300242 - RNA, 19 nt, Artificial Sequence
  Description of Artificial Sequence: Synthetic oligonucleotide
gacgugauggucaacaagg

SEQ ID NO: 1300243 - RNA, 19 nt, Artificial Sequence
  Description of Artificial Sequence: Synthetic oligonucleotide
acugguagagaccggaucg

SEQ ID NO: 1300244 - RNA, 19 nt, Artificial Sequence
  Description of Artificial Sequence: Synthetic oligonucleotide
aaaauggagcuaccugccc

SEQ ID NO: 1300245 - RNA, 19 nt, Artificial Sequence
  Description of Artificial Sequence: Synthetic oligonucleotide
aaaucagugcagauuaaac

SEQ ID NO: 1300246 - RNA, 19 nt, Artificial Sequence
  Description of Artificial Sequence: Synthetic oligonucleotide
acggucacuuauuugaugg

SEQ ID NO: 1300247 - RNA, 19 nt, Artificial Sequence
  Description of Artificial Sequence: Synthetic oligonucleotide
caaacuuugccuuuugcag

SEQ ID NO: 1300248 - RNA, 19 nt, Artificial Sequence
  Description of Artificial Sequence: Synthetic oligonucleotide
cuuagguagccccugaucc

SEQ ID NO: 1300249 - RNA, 19 nt, Artificial Sequence
  Description of Artificial Sequence: Synthetic oligonucleotide
ugagacgucaaacuuugcc

SEQ ID NO: 1300250 - RNA, 19 nt, Artificial Sequence
  Description of Artificial Sequence: Synthetic oligonucleotide
uuuguugagucaaaauaug

SEQ ID NO: 1300251 - RNA, 19 nt, Artificial Sequence
  Description of Artificial Sequence: Synthetic oligonucleotide
uguugagucaaaauaugcu

SEQ ID NO: 1300252 - RNA, 19 nt, Artificial Sequence
  Description of Artificial Sequence: Synthetic oligonucleotide
ugaagauaggcuuggaggu

SEQ ID NO: 1300253 - RNA, 19 nt, Artificial Sequence
  Description of Artificial Sequence: Synthetic oligonucleotide
uuguugagucaaaauaugc

SEQ ID NO: 1300254 - RNA, 19 nt, Artificial Sequence
  Description of Artificial Sequence: Synthetic oligonucleotide
uccaccaagcuguucaugg

SEQ ID NO: 1300255 - RNA, 19 nt, Artificial Sequence
  Description of Artificial Sequence: Synthetic oligonucleotide
gguuuuauaacagacacug

SEQ ID NO: 1300256 - RNA, 19 nt, Artificial Sequence
  Description of Artificial Sequence: Synthetic oligonucleotide
aaauaaaacuugucugacu

SEQ ID NO: 1300257 - RNA, 19 nt, Artificial Sequence
  Description of Artificial Sequence: Synthetic oligonucleotide
auagucauggcaacgaggg

SEQ ID NO: 1300258 - RNA, 19 nt, Artificial Sequence
  Description of Artificial Sequence: Synthetic oligonucleotide
agauuaaacaauaacauua

SEQ ID NO: 1300259 - RNA, 19 nt, Artificial Sequence
  Description of Artificial Sequence: Synthetic oligonucleotide
aaagauagucauggcaacg

SEQ ID NO: 1300260 - RNA, 19 nt, Artificial Sequence
  Description of Artificial Sequence: Synthetic oligonucleotide
ugacucaguccgaaaaugg

SEQ ID NO: 1300261 - RNA, 19 nt, Artificial Sequence
  Description of Artificial Sequence: Synthetic oligonucleotide
cugcagaaagcuuagguag

SEQ ID NO: 1300262 - RNA, 19 nt, Artificial Sequence
  Description of Artificial Sequence: Synthetic oligonucleotide
aucauagcugugcucaugg

SEQ ID NO: 1300263 - RNA, 19 nt, Artificial Sequence
  Description of Artificial Sequence: Synthetic oligonucleotide
ugcuacaugaggcuaauuc

SEQ ID NO: 1300264 - RNA, 19 nt, Artificial Sequence
  Description of Artificial Sequence: Synthetic oligonucleotide
aauuggucgaugguccagc

SEQ ID NO: 1300265 - RNA, 19 nt, Artificial Sequence
  Description of Artificial Sequence: Synthetic oligonucleotide
ucugcuaggacagugauua

SEQ ID NO: 1300266 - RNA, 19 nt, Artificial Sequence
  Description of Artificial Sequence: Synthetic oligonucleotide
gugauuaucacaccauacc

SEQ ID NO: 1300267 - RNA, 19 nt, Artificial Sequence
  Description of Artificial Sequence: Synthetic oligonucleotide
aacaauacaccagauccug

SEQ ID NO: 1300268 - RNA, 19 nt, Artificial Sequence
  Description of Artificial Sequence: Synthetic oligonucleotide
uggucaacaaggguaaggg

SEQ ID NO: 1300269 - RNA, 19 nt, Artificial Sequence
  Description of Artificial Sequence: Synthetic oligonucleotide
cuaauugccguacugguuc

SEQ ID NO: 1300270 - RNA, 19 nt, Artificial Sequence
  Description of Artificial Sequence: Synthetic oligonucleotide
uuuugcagagaaucaaaga

SEQ ID NO: 1300271 - RNA, 19 nt, Artificial Sequence
  Description of Artificial Sequence: Synthetic oligonucleotide
ugaggcuaauucuuuaaca

SEQ ID NO: 1300272 - RNA, 19 nt, Artificial Sequence
  Description of Artificial Sequence: Synthetic oligonucleotide
auaaaacuugucugacugg

SEQ ID NO: 1300273 - RNA, 19 nt, Artificial Sequence
  Description of Artificial Sequence: Synthetic oligonucleotide
aauaugcugacagggcuuc

SEQ ID NO: 1300274 - RNA, 19 nt, Artificial Sequence
  Description of Artificial Sequence: Synthetic oligonucleotide
guaccauacaguaggaagg

SEQ ID NO: 1300275 - RNA, 19 nt, Artificial Sequence
  Description of Artificial Sequence: Synthetic oligonucleotide
gguaccauacaguaggaag

SEQ ID NO: 1300276 - RNA, 19 nt, Artificial Sequence
  Description of Artificial Sequence: Synthetic oligonucleotide
uugucugacugguagagac

SEQ ID NO: 1300277 - RNA, 19 nt, Artificial Sequence
  Description of Artificial Sequence: Synthetic oligonucleotide
gucuacauuccuuuagucc

SEQ ID NO: 1300278 - RNA, 19 nt, Artificial Sequence
  Description of Artificial Sequence: Synthetic oligonucleotide
agaacaagggaaaucagug

SEQ ID NO: 1300279 - RNA, 19 nt, Artificial Sequence
  Description of Artificial Sequence: Synthetic oligonucleotide
aguccgaaaauggagcuac

SEQ ID NO: 1300280 - RNA, 19 nt, Artificial Sequence
  Description of Artificial Sequence: Synthetic oligonucleotide
augaggcuaauucuuuaac

SEQ ID NO: 1300281 - RNA, 19 nt, Artificial Sequence
  Description of Artificial Sequence: Synthetic oligonucleotide
augcauuugaggugggcac

SEQ ID NO: 1300282 - RNA, 19 nt, Artificial Sequence
  Description of Artificial Sequence: Synthetic oligonucleotide
cuuuucuacguauuugcug

SEQ ID NO: 1300283 - RNA, 19 nt, Artificial Sequence
  Description of Artificial Sequence: Synthetic oligonucleotide
uaagacgugauggucaaca

SEQ ID NO: 1300284 - RNA, 19 nt, Artificial Sequence
  Description of Artificial Sequence: Synthetic oligonucleotide
uugaggugggcacucaccc

SEQ ID NO: 1300285 - RNA, 19 nt, Artificial Sequence
  Description of Artificial Sequence: Synthetic oligonucleotide
agcggcaucacuuuugggu

SEQ ID NO: 1300286 - RNA, 19 nt, Artificial Sequence
  Description of Artificial Sequence: Synthetic oligonucleotide
cucaguccgaaaauggagc

SEQ ID NO: 1300287 - RNA, 19 nt, Artificial Sequence
  Description of Artificial Sequence: Synthetic oligonucleotide
gauagucauggcaacgagg

SEQ ID NO: 1300288 - RNA, 19 nt, Artificial Sequence
  Description of Artificial Sequence: Synthetic oligonucleotide
guagacagcacugauggcc

SEQ ID NO: 1300289 - RNA, 19 nt, Artificial Sequence
  Description of Artificial Sequence: Synthetic oligonucleotide
auacccaucacaaacagaa

SEQ ID NO: 1300290 - RNA, 19 nt, Artificial Sequence
  Description of Artificial Sequence: Synthetic oligonucleotide
uggagcaauagacacaguu

SEQ ID NO: 1300291 - RNA, 19 nt, Artificial Sequence
  Description of Artificial Sequence: Synthetic oligonucleotide
aaacagcuaauugccguac

SEQ ID NO: 1300292 - RNA, 19 nt, Artificial Sequence
  Description of Artificial Sequence: Synthetic oligonucleotide
gacagugauuaucacacca

SEQ ID NO: 1300293 - RNA, 19 nt, Artificial Sequence
  Description of Artificial Sequence: Synthetic oligonucleotide
cuugaagauaggcuuggag

SEQ ID NO: 1300294 - RNA, 19 nt, Artificial Sequence
  Description of Artificial Sequence: Synthetic oligonucleotide
cuggacauacccacuaccc

SEQ ID NO: 1300295 - RNA, 19 nt, Artificial Sequence
  Description of Artificial Sequence: Synthetic oligonucleotide
ucauucgaagugccgagug

SEQ ID NO: 1300296 - RNA, 19 nt, Artificial Sequence
  Description of Artificial Sequence: Synthetic oligonucleotide
acagauugucauucgaagu

SEQ ID NO: 1300297 - RNA, 19 nt, Artificial Sequence
  Description of Artificial Sequence: Synthetic oligonucleotide
aagauagucauggcaacga

SEQ ID NO: 1300298 - RNA, 19 nt, Artificial Sequence
  Description of Artificial Sequence: Synthetic oligonucleotide
cuaauucuuuaacaugaac

SEQ ID NO: 1300299 - RNA, 19 nt, Artificial Sequence
  Description of Artificial Sequence: Synthetic oligonucleotide
uauaacagacacugacucu

SEQ ID NO: 1300300 - RNA, 19 nt, Artificial Sequence
  Description of Artificial Sequence: Synthetic oligonucleotide
ugcagaaagcuuagguagc

SEQ ID NO: 1300301 - RNA, 19 nt, Artificial Sequence
  Description of Artificial Sequence: Synthetic oligonucleotide
uuuggugucuugucugcag

SEQ ID NO: 1300302 - RNA, 19 nt, Artificial Sequence
  Description of Artificial Sequence: Synthetic oligonucleotide
auucgaagugccgaguggg

SEQ ID NO: 1300303 - RNA, 19 nt, Artificial Sequence
  Description of Artificial Sequence: Synthetic oligonucleotide
uguccaauuccuugucucc

SEQ ID NO: 1300304 - RNA, 19 nt, Artificial Sequence
  Description of Artificial Sequence: Synthetic oligonucleotide
auagcugugcucauggcag

SEQ ID NO: 1300305 - RNA, 19 nt, Artificial Sequence
  Description of Artificial Sequence: Synthetic oligonucleotide
ugucauucgaagugccgag

SEQ ID NO: 1300306 - RNA, 19 nt, Artificial Sequence
  Description of Artificial Sequence: Synthetic oligonucleotide
uugccuuuugcagagaauc

SEQ ID NO: 1300307 - RNA, 19 nt, Artificial Sequence
  Description of Artificial Sequence: Synthetic oligonucleotide
aggcuaauucuuuaacaug

SEQ ID NO: 1300308 - RNA, 19 nt, Artificial Sequence
  Description of Artificial Sequence: Synthetic oligonucleotide
ucuacguauuugcuguccu

SEQ ID NO: 1300309 - RNA, 19 nt, Artificial Sequence
  Description of Artificial Sequence: Synthetic oligonucleotide
acaaguaguuaacugguuu

SEQ ID NO: 1300310 - RNA, 19 nt, Artificial Sequence
  Description of Artificial Sequence: Synthetic oligonucleotide
uggucuacauuccuuuagu

SEQ ID NO: 1300311 - RNA, 19 nt, Artificial Sequence
  Description of Artificial Sequence: Synthetic oligonucleotide
gucugacugguagagaccg

SEQ ID NO: 1300312 - RNA, 19 nt, Artificial Sequence
  Description of Artificial Sequence: Synthetic oligonucleotide
uucagaguugccuuuccaa

SEQ ID NO: 1300313 - RNA, 19 nt, Artificial Sequence
  Description of Artificial Sequence: Synthetic oligonucleotide
uguagacaaguaguuaacu

SEQ ID NO: 1300314 - RNA, 19 nt, Artificial Sequence
  Description of Artificial Sequence: Synthetic oligonucleotide
gguguugccuugaagauag

SEQ ID NO: 1300315 - RNA, 19 nt, Artificial Sequence
  Description of Artificial Sequence: Synthetic oligonucleotide
gugcagauuaaacaauaac

SEQ ID NO: 1300316 - RNA, 19 nt, Artificial Sequence
  Description of Artificial Sequence: Synthetic oligonucleotide
aaagcucccugcuggguca

SEQ ID NO: 1300317 - RNA, 19 nt, Artificial Sequence
  Description of Artificial Sequence: Synthetic oligonucleotide
aagauaggcuuggagguca

SEQ ID NO: 1300318 - RNA, 19 nt, Artificial Sequence
  Description of Artificial Sequence: Synthetic oligonucleotide
ucccaguuuuaugagaaca

SEQ ID NO: 1300319 - RNA, 19 nt, Artificial Sequence
  Description of Artificial Sequence: Synthetic oligonucleotide
uugacucaguccgaaaaug

SEQ ID NO: 1300320 - RNA, 19 nt, Artificial Sequence
  Description of Artificial Sequence: Synthetic oligonucleotide
uugucauucgaagugccga

SEQ ID NO: 1300321 - RNA, 19 nt, Artificial Sequence
  Description of Artificial Sequence: Synthetic oligonucleotide
agauagucauggcaacgag

SEQ ID NO: 1300322 - RNA, 19 nt, Artificial Sequence
  Description of Artificial Sequence: Synthetic oligonucleotide
gaugcuuggaauagggguc

SEQ ID NO: 1300323 - RNA, 19 nt, Artificial Sequence
  Description of Artificial Sequence: Synthetic oligonucleotide
uucgaagugccgagugggg

SEQ ID NO: 1300324 - RNA, 19 nt, Artificial Sequence
  Description of Artificial Sequence: Synthetic oligonucleotide
acagcuaauugccguacug

SEQ ID NO: 1300325 - RNA, 19 nt, Artificial Sequence
  Description of Artificial Sequence: Synthetic oligonucleotide
ucuucgucuugacucaguc

SEQ ID NO: 1300326 - RNA, 19 nt, Artificial Sequence
  Description of Artificial Sequence: Synthetic oligonucleotide
agacgugauggucaacaag

SEQ ID NO: 1300327 - RNA, 19 nt, Artificial Sequence
  Description of Artificial Sequence: Synthetic oligonucleotide
aacuugucugacugguaga

SEQ ID NO: 1300328 - RNA, 19 nt, Artificial Sequence
  Description of Artificial Sequence: Synthetic oligonucleotide
agcuaauugccguacuggu

SEQ ID NO: 1300329 - RNA, 19 nt, Artificial Sequence
  Description of Artificial Sequence: Synthetic oligonucleotide
auggucaacaaggguaagg

SEQ ID NO: 1300330 - RNA, 19 nt, Artificial Sequence
  Description of Artificial Sequence: Synthetic oligonucleotide
cuuccgagagaccugggug

SEQ ID NO: 1300331 - RNA, 19 nt, Artificial Sequence
  Description of Artificial Sequence: Synthetic oligonucleotide
uuagguagccccugaucca

SEQ ID NO: 1300332 - RNA, 19 nt, Artificial Sequence
  Description of Artificial Sequence: Synthetic oligonucleotide
uuggguaagacgugauggu

SEQ ID NO: 1300333 - RNA, 19 nt, Artificial Sequence
  Description of Artificial Sequence: Synthetic oligonucleotide
cgaaaauggagcuaccugc

SEQ ID NO: 1300334 - RNA, 19 nt, Artificial Sequence
  Description of Artificial Sequence: Synthetic oligonucleotide
cauucgaagugccgagugg

SEQ ID NO: 1300335 - RNA, 19 nt, Artificial Sequence
  Description of Artificial Sequence: Synthetic oligonucleotide
aacagcuaauugccguacu

SEQ ID NO: 1300336 - RNA, 19 nt, Artificial Sequence
  Description of Artificial Sequence: Synthetic oligonucleotide
cuggucuacauuccuuuag

SEQ ID NO: 1300337 - RNA, 19 nt, Artificial Sequence
  Description of Artificial Sequence: Synthetic oligonucleotide
uugccguacugguucauug

SEQ ID NO: 1300338 - RNA, 19 nt, Artificial Sequence
  Description of Artificial Sequence: Synthetic oligonucleotide
ucuuccgagagaccugggu

SEQ ID NO: 1300339 - RNA, 19 nt, Artificial Sequence
  Description of Artificial Sequence: Synthetic oligonucleotide
uuccgagagaccugggugu

SEQ ID NO: 1300340 - RNA, 19 nt, Artificial Sequence
  Description of Artificial Sequence: Synthetic oligonucleotide
acucaguccgaaaauggag

SEQ ID NO: 1300341 - RNA, 19 nt, Artificial Sequence
  Description of Artificial Sequence: Synthetic oligonucleotide
uuggaggucaggagagaug

SEQ ID NO: 1300342 - RNA, 19 nt, Artificial Sequence
  Description of Artificial Sequence: Synthetic oligonucleotide
cacaccauacccaucacaa

SEQ ID NO: 1300343 - RNA, 19 nt, Artificial Sequence
  Description of Artificial Sequence: Synthetic oligonucleotide
aggaugaugguaccauaca

SEQ ID NO: 1300344 - RNA, 19 nt, Artificial Sequence
  Description of Artificial Sequence: Synthetic oligonucleotide
gaggacaguauuucugcuc

SEQ ID NO: 1300345 - RNA, 19 nt, Artificial Sequence
  Description of Artificial Sequence: Synthetic oligonucleotide
gaccggaucggagaggcag

SEQ ID NO: 1300346 - RNA, 19 nt, Artificial Sequence
  Description of Artificial Sequence: Synthetic oligonucleotide
ugagaacaauacaccagau

SEQ ID NO: 1300347 - RNA, 19 nt, Artificial Sequence
  Description of Artificial Sequence: Synthetic oligonucleotide
cagcuaauugccguacugg

SEQ ID NO: 1300348 - RNA, 19 nt, Artificial Sequence
  Description of Artificial Sequence: Synthetic oligonucleotide
cuucgucuugacucagucc

SEQ ID NO: 1300349 - RNA, 19 nt, Artificial Sequence
  Description of Artificial Sequence: Synthetic oligonucleotide
gagagaugcuuggaauagg

SEQ ID NO: 1300350 - RNA, 19 nt, Artificial Sequence
  Description of Artificial Sequence: Synthetic oligonucleotide
ucaauuggucgauggucca

SEQ ID NO: 1300351 - RNA, 19 nt, Artificial Sequence
  Description of Artificial Sequence: Synthetic oligonucleotide
uucuacguauuugcugucc

SEQ ID NO: 1300352 - RNA, 19 nt, Artificial Sequence
  Description of Artificial Sequence: Synthetic oligonucleotide
gagaccggaucggagaggc

SEQ ID NO: 1300353 - RNA, 19 nt, Artificial Sequence
  Description of Artificial Sequence: Synthetic oligonucleotide
cugacucugcucacagucc

SEQ ID NO: 1300354 - RNA, 19 nt, Artificial Sequence
  Description of Artificial Sequence: Synthetic oligonucleotide
ugaaauggucaaacaucuc

SEQ ID NO: 1300355 - RNA, 19 nt, Artificial Sequence
  Description of Artificial Sequence: Synthetic oligonucleotide
aagacgugauggucaacaa

SEQ ID NO: 1300356 - RNA, 19 nt, Artificial Sequence
  Description of Artificial Sequence: Synthetic oligonucleotide
agaaagcacugagaucuuc

SEQ ID NO: 1300357 - RNA, 19 nt, Artificial Sequence
  Description of Artificial Sequence: Synthetic oligonucleotide
gcugggucaccguauaucc

SEQ ID NO: 1300358 - RNA, 19 nt, Artificial Sequence
  Description of Artificial Sequence: Synthetic oligonucleotide
agggcacucguccaccaag

SEQ ID NO: 1300359 - RNA, 19 nt, Artificial Sequence
  Description of Artificial Sequence: Synthetic oligonucleotide
aaauaugcugacagggcuu

SEQ ID NO: 1300360 - RNA, 19 nt, Artificial Sequence
  Description of Artificial Sequence: Synthetic oligonucleotide
ggagcaauagacacaguug

SEQ ID NO: 1300361 - RNA, 19 nt, Artificial Sequence
  Description of Artificial Sequence: Synthetic oligonucleotide
cauacccacuaccccaagc

SEQ ID NO: 1300362 - RNA, 19 nt, Artificial Sequence
  Description of Artificial Sequence: Synthetic oligonucleotide
gaucggagaggcagaaagc

SEQ ID NO: 1300363 - RNA, 19 nt, Artificial Sequence
  Description of Artificial Sequence: Synthetic oligonucleotide
uccauguagacagcacuga

SEQ ID NO: 1300364 - RNA, 19 nt, Artificial Sequence
  Description of Artificial Sequence: Synthetic oligonucleotide
ucauguagacaaguaguua

SEQ ID NO: 1300365 - RNA, 19 nt, Artificial Sequence
  Description of Artificial Sequence: Synthetic oligonucleotide
acuuuuggguaagacguga

SEQ ID NO: 1300366 - RNA, 19 nt, Artificial Sequence
  Description of Artificial Sequence: Synthetic oligonucleotide
ugcuaggacagugauuauc

SEQ ID NO: 1300367 - RNA, 19 nt, Artificial Sequence
  Description of Artificial Sequence: Synthetic oligonucleotide
uaauugccguacugguuca

SEQ ID NO: 1300368 - RNA, 19 nt, Artificial Sequence
  Description of Artificial Sequence: Synthetic oligonucleotide
uccagcaccucugcuacug

SEQ ID NO: 1300369 - RNA, 19 nt, Artificial Sequence
  Description of Artificial Sequence: Synthetic oligonucleotide
acaauacaccagauccugg

SEQ ID NO: 1300370 - RNA, 19 nt, Artificial Sequence
  Description of Artificial Sequence: Synthetic oligonucleotide
acguauuugcuguccuuca

SEQ ID NO: 1300371 - RNA, 19 nt, Artificial Sequence
  Description of Artificial Sequence: Synthetic oligonucleotide
uccuuucccucccaguuuu

SEQ ID NO: 1300372 - RNA, 19 nt, Artificial Sequence
  Description of Artificial Sequence: Synthetic oligonucleotide
ggagagaugcuuggaauag

SEQ ID NO: 1300373 - RNA, 19 nt, Artificial Sequence
  Description of Artificial Sequence: Synthetic oligonucleotide
aagcuuagguagccccuga

SEQ ID NO: 1300374 - RNA, 19 nt, Artificial Sequence
  Description of Artificial Sequence: Synthetic oligonucleotide
ggucaggagagaugcuugg

SEQ ID NO: 1300375 - RNA, 19 nt, Artificial Sequence
  Description of Artificial Sequence: Synthetic oligonucleotide
ccugagacgucaaacuuug

SEQ ID NO: 1300376 - RNA, 19 nt, Artificial Sequence
  Description of Artificial Sequence: Synthetic oligonucleotide
cuaggacagugauuaucac

SEQ ID NO: 1300377 - RNA, 19 nt, Artificial Sequence
  Description of Artificial Sequence: Synthetic oligonucleotide
ugccguacugguucauugu

SEQ ID NO: 1300378 - RNA, 19 nt, Artificial Sequence
  Description of Artificial Sequence: Synthetic oligonucleotide
aguaguuaacugguuuuau

SEQ ID NO: 1300379 - RNA, 19 nt, Artificial Sequence
  Description of Artificial Sequence: Synthetic oligonucleotide
uacauuccuuuaguccugc

SEQ ID NO: 1300380 - RNA, 19 nt, Artificial Sequence
  Description of Artificial Sequence: Synthetic oligonucleotide
cagagcggcaucacuuuug

SEQ ID NO: 1300381 - RNA, 19 nt, Artificial Sequence
  Description of Artificial Sequence: Synthetic oligonucleotide
ggucacuuauuugaugggc

SEQ ID NO: 1300382 - RNA, 19 nt, Artificial Sequence
  Description of Artificial Sequence: Synthetic oligonucleotide
gacuacacaugcagacaag

SEQ ID NO: 1300383 - RNA, 19 nt, Artificial Sequence
  Description of Artificial Sequence: Synthetic oligonucleotide
agggaggacaguauuucug

SEQ ID NO: 1300384 - RNA, 19 nt, Artificial Sequence
  Description of Artificial Sequence: Synthetic oligonucleotide
accauacccaucacaaaca

SEQ ID NO: 1300385 - RNA, 19 nt, Artificial Sequence
  Description of Artificial Sequence: Synthetic oligonucleotide
cagcggaggguccucuucg

SEQ ID NO: 1300386 - RNA, 19 nt, Artificial Sequence
  Description of Artificial Sequence: Synthetic oligonucleotide
gaagauaggcuuggagguc

SEQ ID NO: 1300387 - RNA, 19 nt, Artificial Sequence
  Description of Artificial Sequence: Synthetic oligonucleotide
uggguaagacgugaugguc

SEQ ID NO: 1300388 - RNA, 19 nt, Artificial Sequence
  Description of Artificial Sequence: Synthetic oligonucleotide
cacuuuuggguaagacgug

SEQ ID NO: 1300389 - RNA, 19 nt, Artificial Sequence
  Description of Artificial Sequence: Synthetic oligonucleotide
uacaugcuacaugaggcua

SEQ ID NO: 1300390 - RNA, 19 nt, Artificial Sequence
  Description of Artificial Sequence: Synthetic oligonucleotide
ucuggucuacauuccuuua

SEQ ID NO: 1300391 - RNA, 19 nt, Artificial Sequence
  Description of Artificial Sequence: Synthetic oligonucleotide
accguauaucccuguacau

SEQ ID NO: 1300392 - RNA, 19 nt, Artificial Sequence
  Description of Artificial Sequence: Synthetic oligonucleotide
uuucuacguauuugcuguc

SEQ ID NO: 1300393 - RNA, 19 nt, Artificial Sequence
  Description of Artificial Sequence: Synthetic oligonucleotide
auuggucgaugguccagca

SEQ ID NO: 1300394 - RNA, 19 nt, Artificial Sequence
  Description of Artificial Sequence: Synthetic oligonucleotide
cugguagagaccggaucgg

SEQ ID NO: 1300395 - RNA, 19 nt, Artificial Sequence
  Description of Artificial Sequence: Synthetic oligonucleotide
guagccccugauccagagg

SEQ ID NO: 1300396 - RNA, 19 nt, Artificial Sequence
  Description of Artificial Sequence: Synthetic oligonucleotide
auaugcugacagggcuucc

SEQ ID NO: 1300397 - RNA, 19 nt, Artificial Sequence
  Description of Artificial Sequence: Synthetic oligonucleotide
ggugucuugucugcagacg

SEQ ID NO: 1300398 - RNA, 19 nt, Artificial Sequence
  Description of Artificial Sequence: Synthetic oligonucleotide
ucgucuugacucaguccga

SEQ ID NO: 1300399 - RNA, 19 nt, Artificial Sequence
  Description of Artificial Sequence: Synthetic oligonucleotide
cagcaccucugcuacugcc

SEQ ID NO: 1300400 - RNA, 19 nt, Artificial Sequence
  Description of Artificial Sequence: Synthetic oligonucleotide
gaacaauacaccagauccu

SEQ ID NO: 1300401 - RNA, 19 nt, Artificial Sequence
  Description of Artificial Sequence: Synthetic oligonucleotide
cagaaagcuuagguagccc

SEQ ID NO: 1300402 - RNA, 19 nt, Artificial Sequence
  Description of Artificial Sequence: Synthetic oligonucleotide
ugacugguagagaccggau

SEQ ID NO: 1300403 - RNA, 19 nt, Artificial Sequence
  Description of Artificial Sequence: Synthetic oligonucleotide
ggccuccaaauccauguag

SEQ ID NO: 1300404 - RNA, 19 nt, Artificial Sequence
  Description of Artificial Sequence: Synthetic oligonucleotide
cccuguacaugcuacauga

SEQ ID NO: 1300405 - RNA, 19 nt, Artificial Sequence
  Description of Artificial Sequence: Synthetic oligonucleotide
cauacccaucacaaacaga

SEQ ID NO: 1300406 - RNA, 19 nt, Artificial Sequence
  Description of Artificial Sequence: Synthetic oligonucleotide
ccacaugcucaacugaaac

SEQ ID NO: 1300407 - RNA, 19 nt, Artificial Sequence
  Description of Artificial Sequence: Synthetic oligonucleotide
guacaugcuacaugaggcu

SEQ ID NO: 1300408 - RNA, 19 nt, Artificial Sequence
  Description of Artificial Sequence: Synthetic oligonucleotide
gagcggcaucacuuuuggg

SEQ ID NO: 1300409 - RNA, 19 nt, Artificial Sequence
  Description of Artificial Sequence: Synthetic oligonucleotide
caagggaaaucagugcaga

SEQ ID NO: 1300410 - RNA, 19 nt, Artificial Sequence
  Description of Artificial Sequence: Synthetic oligonucleotide
acaccauacccaucacaaa

SEQ ID NO: 1300411 - RNA, 19 nt, Artificial Sequence
  Description of Artificial Sequence: Synthetic oligonucleotide
ccuggacauacccacuacc

SEQ ID NO: 1300412 - RNA, 19 nt, Artificial Sequence
  Description of Artificial Sequence: Synthetic oligonucleotide
ggucuacauuccuuuaguc

SEQ ID NO: 1300413 - RNA, 19 nt, Artificial Sequence
  Description of Artificial Sequence: Synthetic oligonucleotide
auuugaugggcaggcucug

SEQ ID NO: 1300414 - RNA, 19 nt, Artificial Sequence
  Description of Artificial Sequence: Synthetic oligonucleotide
agagaccggaucggagagg

SEQ ID NO: 1300415 - RNA, 19 nt, Artificial Sequence
  Description of Artificial Sequence: Synthetic oligonucleotide
gguagagaccggaucggag

SEQ ID NO: 1300416 - RNA, 19 nt, Artificial Sequence
  Description of Artificial Sequence: Synthetic oligonucleotide
acauacccacuaccccaag

SEQ ID NO: 1300417 - RNA, 19 nt, Artificial Sequence
  Description of Artificial Sequence: Synthetic oligonucleotide
ugguaccauacaguaggaa

SEQ ID NO: 1300418 - RNA, 19 nt, Artificial Sequence
  Description of Artificial Sequence: Synthetic oligonucleotide
gguaagacgugauggucaa

SEQ ID NO: 1300419 - RNA, 19 nt, Artificial Sequence
  Description of Artificial Sequence: Synthetic oligonucleotide
cugagacgucaaacuuugc

SEQ ID NO: 1300420 - RNA, 19 nt, Artificial Sequence
  Description of Artificial Sequence: Synthetic oligonucleotide
uccuucagaguugccuuuc

SEQ ID NO: 1300421 - RNA, 19 nt, Artificial Sequence
  Description of Artificial Sequence: Synthetic oligonucleotide
acaugcuacaugaggcuaa

SEQ ID NO: 1300422 - RNA, 19 nt, Artificial Sequence
  Description of Artificial Sequence: Synthetic oligonucleotide
gaaagcuuagguagccccu

SEQ ID NO: 1300423 - RNA, 19 nt, Artificial Sequence
  Description of Artificial Sequence: Synthetic oligonucleotide
cugacugguagagaccgga

SEQ ID NO: 1300424 - RNA, 19 nt, Artificial Sequence
  Description of Artificial Sequence: Synthetic oligonucleotide
uucugcucaauuggucgau

SEQ ID NO: 1300425 - RNA, 19 nt, Artificial Sequence
  Description of Artificial Sequence: Synthetic oligonucleotide
gccguacugguucauugug

SEQ ID NO: 1300426 - RNA, 19 nt, Artificial Sequence
  Description of Artificial Sequence: Synthetic oligonucleotide
ggguaagacgugaugguca

SEQ ID NO: 1300427 - RNA, 19 nt, Artificial Sequence
  Description of Artificial Sequence: Synthetic oligonucleotide
cuuuaguccugcucugcua

SEQ ID NO: 1300428 - RNA, 19 nt, Artificial Sequence
  Description of Artificial Sequence: Synthetic oligonucleotide
guuccaggaccccacagau

SEQ ID NO: 1300429 - RNA, 19 nt, Artificial Sequence
  Description of Artificial Sequence: Synthetic oligonucleotide
ccuguaggauucucucugc

SEQ ID NO: 1300430 - RNA, 19 nt, Artificial Sequence
  Description of Artificial Sequence: Synthetic oligonucleotide
uaccugcccuguccaauuc

SEQ ID NO: 1300431 - RNA, 19 nt, Artificial Sequence
  Description of Artificial Sequence: Synthetic oligonucleotide
caccaggguagcacaggac

SEQ ID NO: 1300432 - RNA, 19 nt, Artificial Sequence
  Description of Artificial Sequence: Synthetic oligonucleotide
ggacagugauuaucacacc

SEQ ID NO: 1300433 - RNA, 19 nt, Artificial Sequence
  Description of Artificial Sequence: Synthetic oligonucleotide
gcuuagguagccccugauc

SEQ ID NO: 1300434 - RNA, 19 nt, Artificial Sequence
  Description of Artificial Sequence: Synthetic oligonucleotide
agcaccucugcuacugccu

SEQ ID NO: 1300435 - RNA, 19 nt, Artificial Sequence
  Description of Artificial Sequence: Synthetic oligonucleotide
guggucaggccugagacgu

SEQ ID NO: 1300436 - RNA, 19 nt, Artificial Sequence
  Description of Artificial Sequence: Synthetic oligonucleotide
cccacuaccccaagcugcc

SEQ ID NO: 1300437 - RNA, 19 nt, Artificial Sequence
  Description of Artificial Sequence: Synthetic oligonucleotide
caacaaggguaagggugag

SEQ ID NO: 1300438 - RNA, 19 nt, Artificial Sequence
  Description of Artificial Sequence: Synthetic oligonucleotide
cuugacucaguccgaaaau

SEQ ID NO: 1300439 - RNA, 19 nt, Artificial Sequence
  Description of Artificial Sequence: Synthetic oligonucleotide
ucugguccuuucugagcau

SEQ ID NO: 1300440 - RNA, 19 nt, Artificial Sequence
  Description of Artificial Sequence: Synthetic oligonucleotide
ugcuuggaauaggggucag

SEQ ID NO: 1300441 - RNA, 19 nt, Artificial Sequence
  Description of Artificial Sequence: Synthetic oligonucleotide
ccguauaucccuguacaug

SEQ ID NO: 1300442 - RNA, 19 nt, Artificial Sequence
  Description of Artificial Sequence: Synthetic oligonucleotide
aauugccguacugguucau

SEQ ID NO: 1300443 - RNA, 19 nt, Artificial Sequence
  Description of Artificial Sequence: Synthetic oligonucleotide
ucccugcugggucaccgua

SEQ ID NO: 1300444 - RNA, 19 nt, Artificial Sequence
  Description of Artificial Sequence: Synthetic oligonucleotide
ccaaauccauguagacagc

SEQ ID NO: 1300445 - RNA, 19 nt, Artificial Sequence
  Description of Artificial Sequence: Synthetic oligonucleotide
agccccugauccagagggc

SEQ ID NO: 1300446 - RNA, 19 nt, Artificial Sequence
  Description of Artificial Sequence: Synthetic oligonucleotide
aggcaguuugucuguccaa

SEQ ID NO: 1300447 - RNA, 19 nt, Artificial Sequence
  Description of Artificial Sequence: Synthetic oligonucleotide
uggagcuaccugcccuguc

SEQ ID NO: 1300448 - RNA, 19 nt, Artificial Sequence
  Description of Artificial Sequence: Synthetic oligonucleotide
agcggaggguccucuucgu

SEQ ID NO: 1300449 - RNA, 19 nt, Artificial Sequence
  Description of Artificial Sequence: Synthetic oligonucleotide
ggcaucacuuuuggguaag

SEQ ID NO: 1300450 - RNA, 19 nt, Artificial Sequence
  Description of Artificial Sequence: Synthetic oligonucleotide
ccuguacaugcuacaugag

SEQ ID NO: 1300451 - RNA, 19 nt, Artificial Sequence
  Description of Artificial Sequence: Synthetic oligonucleotide
uaccccaagcugcccugaa

SEQ ID NO: 1300452 - RNA, 19 nt, Artificial Sequence
  Description of Artificial Sequence: Synthetic oligonucleotide
auggcaacgagggcaucau

SEQ ID NO: 1300453 - RNA, 19 nt, Artificial Sequence
  Description of Artificial Sequence: Synthetic oligonucleotide
auugccguacugguucauu

SEQ ID NO: 1300454 - RNA, 19 nt, Artificial Sequence
  Description of Artificial Sequence: Synthetic oligonucleotide
cuugucugacugguagaga

SEQ ID NO: 1300455 - RNA, 19 nt, Artificial Sequence
  Description of Artificial Sequence: Synthetic oligonucleotide
cccaagcugcccugaaggc

SEQ ID NO: 1300456 - RNA, 19 nt, Artificial Sequence
  Description of Artificial Sequence: Synthetic oligonucleotide
gaggucaggagagaugcuu

SEQ ID NO: 1300457 - RNA, 19 nt, Artificial Sequence
  Description of Artificial Sequence: Synthetic oligonucleotide
gacgucaaacuuugccuuu

SEQ ID NO: 1300458 - RNA, 19 nt, Artificial Sequence
  Description of Artificial Sequence: Synthetic oligonucleotide
aggguagcacaggacccca

SEQ ID NO: 1300459 - RNA, 19 nt, Artificial Sequence
  Description of Artificial Sequence: Synthetic oligonucleotide
caccaagcuguucaugggu

SEQ ID NO: 1300460 - RNA, 19 nt, Artificial Sequence
  Description of Artificial Sequence: Synthetic oligonucleotide
gcggcaucacuuuugggua

SEQ ID NO: 1300461 - RNA, 19 nt, Artificial Sequence
  Description of Artificial Sequence: Synthetic oligonucleotide
gucuugacucaguccgaaa

SEQ ID NO: 1300462 - RNA, 19 nt, Artificial Sequence
  Description of Artificial Sequence: Synthetic oligonucleotide
cuuuuggguaagacgugau

SEQ ID NO: 1300463 - RNA, 19 nt, Artificial Sequence
  Description of Artificial Sequence: Synthetic oligonucleotide
guagcacaggaccccacau

SEQ ID NO: 1300464 - RNA, 19 nt, Artificial Sequence
  Description of Artificial Sequence: Synthetic oligonucleotide
gcuaauucuuuaacaugaa

SEQ ID NO: 1300465 - RNA, 19 nt, Artificial Sequence
  Description of Artificial Sequence: Synthetic oligonucleotide
uccgagagaccuggguguu

SEQ ID NO: 1300466 - RNA, 19 nt, Artificial Sequence
  Description of Artificial Sequence: Synthetic oligonucleotide
cggucacuuauuugauggg

SEQ ID NO: 1300467 - RNA, 19 nt, Artificial Sequence
  Description of Artificial Sequence: Synthetic oligonucleotide
guaagacgugauggucaac

SEQ ID NO: 1300468 - RNA, 19 nt, Artificial Sequence
  Description of Artificial Sequence: Synthetic oligonucleotide
cagacggucuucugguccu

SEQ ID NO: 1300469 - RNA, 19 nt, Artificial Sequence
  Description of Artificial Sequence: Synthetic oligonucleotide
accggaucggagaggcaga

SEQ ID NO: 1300470 - RNA, 19 nt, Artificial Sequence
  Description of Artificial Sequence: Synthetic oligonucleotide
auggagcuaccugcccugu

SEQ ID NO: 1300471 - RNA, 19 nt, Artificial Sequence
  Description of Artificial Sequence: Synthetic oligonucleotide
cuuggaggucaggagagau

SEQ ID NO: 1300472 - RNA, 19 nt, Artificial Sequence
  Description of Artificial Sequence: Synthetic oligonucleotide
guauaucccuguacaugcu

SEQ ID NO: 1300473 - RNA, 19 nt, Artificial Sequence
  Description of Artificial Sequence: Synthetic oligonucleotide
ccguacugguucauuguga

SEQ ID NO: 1300474 - RNA, 19 nt, Artificial Sequence
  Description of Artificial Sequence: Synthetic oligonucleotide
guguugccuugaagauagg

SEQ ID NO: 1300475 - RNA, 19 nt, Artificial Sequence
  Description of Artificial Sequence: Synthetic oligonucleotide
cacagaucuggucuacauu

SEQ ID NO: 1300476 - RNA, 19 nt, Artificial Sequence
  Description of Artificial Sequence: Synthetic oligonucleotide
caguaggaaggcaguuugu

SEQ ID NO: 1300477 - RNA, 19 nt, Artificial Sequence
  Description of Artificial Sequence: Synthetic oligonucleotide
cccacagauugucauucga

SEQ ID NO: 1300478 - RNA, 19 nt, Artificial Sequence
  Description of Artificial Sequence: Synthetic oligonucleotide
gucauucgaagugccgagu

SEQ ID NO: 1300479 - RNA, 19 nt, Artificial Sequence
  Description of Artificial Sequence: Synthetic oligonucleotide
caggaccccacaugcucaa

SEQ ID NO: 1300480 - RNA, 19 nt, Artificial Sequence
  Description of Artificial Sequence: Synthetic oligonucleotide
cuacguauuugcuguccuu

SEQ ID NO: 1300481 - RNA, 19 nt, Artificial Sequence
  Description of Artificial Sequence: Synthetic oligonucleotide
gggucaccguauaucccug

SEQ ID NO: 1300482 - RNA, 19 nt, Artificial Sequence
  Description of Artificial Sequence: Synthetic oligonucleotide
cuaccugcccuguccaauu

SEQ ID NO: 1300483 - RNA, 19 nt, Artificial Sequence
  Description of Artificial Sequence: Synthetic oligonucleotide
ccaccaggguagcacagga

SEQ ID NO: 1300484 - RNA, 19 nt, Artificial Sequence
  Description of Artificial Sequence: Synthetic oligonucleotide
ccccugauccagagggcac

SEQ ID NO: 1300485 - RNA, 19 nt, Artificial Sequence
  Description of Artificial Sequence: Synthetic oligonucleotide
cucuucgucuugacucagu

SEQ ID NO: 1300486 - RNA, 19 nt, Artificial Sequence
  Description of Artificial Sequence: Synthetic oligonucleotide
gauggccacuuuggugucu

SEQ ID NO: 1300487 - RNA, 19 nt, Artificial Sequence
  Description of Artificial Sequence: Synthetic oligonucleotide
cucguccaccaagcuguuc

SEQ ID NO: 1300488 - RNA, 19 nt, Artificial Sequence
  Description of Artificial Sequence: Synthetic oligonucleotide
caguccgaaaauggagcua

SEQ ID NO: 1300489 - RNA, 19 nt, Artificial Sequence
  Description of Artificial Sequence: Synthetic oligonucleotide
ccccacggucacuuauuug

SEQ ID NO: 1300490 - RNA, 19 nt, Artificial Sequence
  Description of Artificial Sequence: Synthetic oligonucleotide
cccuguccaauuccuuguc

SEQ ID NO: 1300491 - RNA, 19 nt, Artificial Sequence
  Description of Artificial Sequence: Synthetic oligonucleotide
ggguguugccuugaagaua

SEQ ID NO: 1300492 - RNA, 19 nt, Artificial Sequence
  Description of Artificial Sequence: Synthetic oligonucleotide
agguagccccugauccaga

SEQ ID NO: 1300493 - RNA, 19 nt, Artificial Sequence
  Description of Artificial Sequence: Synthetic oligonucleotide
gggcagaaaacagcuaauu

SEQ ID NO: 1300494 - RNA, 19 nt, Artificial Sequence
  Description of Artificial Sequence: Synthetic oligonucleotide
agaccggaucggagaggca

SEQ ID NO: 1300495 - RNA, 19 nt, Artificial Sequence
  Description of Artificial Sequence: Synthetic oligonucleotide
ggucaccguauaucccugu

SEQ ID NO: 1300496 - RNA, 19 nt, Artificial Sequence
  Description of Artificial Sequence: Synthetic oligonucleotide
ggucgaugguccagcaccu

SEQ ID NO: 1300497 - RNA, 19 nt, Artificial Sequence
  Description of Artificial Sequence: Synthetic oligonucleotide
ggccacuuuggugucuugu

SEQ ID NO: 1300498 - RNA, 19 nt, Artificial Sequence
  Description of Artificial Sequence: Synthetic oligonucleotide
gcaucacuuuuggguaaga

SEQ ID NO: 1300499 - RNA, 19 nt, Artificial Sequence
  Description of Artificial Sequence: Synthetic oligonucleotide
ccauguagacagcacugau

SEQ ID NO: 1300500 - RNA, 19 nt, Artificial Sequence
  Description of Artificial Sequence: Synthetic oligonucleotide
gccugagacgucaaacuuu

SEQ ID NO: 1300501 - RNA, 19 nt, Artificial Sequence
  Description of Artificial Sequence: Synthetic oligonucleotide
gucaggccugagacgucaa

SEQ ID NO: 1300502 - RNA, 19 nt, Artificial Sequence
  Description of Artificial Sequence: Synthetic oligonucleotide
ggguagcacaggaccccac

SEQ ID NO: 1300503 - RNA, 19 nt, Artificial Sequence
  Description of Artificial Sequence: Synthetic oligonucleotide
ggggcagaaaacagcuaau

SEQ ID NO: 1300504 - RNA, 19 nt, Artificial Sequence
  Description of Artificial Sequence: Synthetic oligonucleotide
cuggagcaauagacacagu

SEQ ID NO: 1300505 - RNA, 19 nt, Artificial Sequence
  Description of Artificial Sequence: Synthetic oligonucleotide
cucccugcugggucaccgu

SEQ ID NO: 1300506 - RNA, 19 nt, Artificial Sequence
  Description of Artificial Sequence: Synthetic oligonucleotide
gacggucuucugguccuuu

SEQ ID NO: 1300507 - RNA, 19 nt, Artificial Sequence
  Description of Artificial Sequence: Synthetic oligonucleotide
ccgagagaccuggguguug

SEQ ID NO: 1300508 - RNA, 19 nt, Artificial Sequence
  Description of Artificial Sequence: Synthetic oligonucleotide
cggcaucacuuuuggguaa

SEQ ID NO: 1300509 - RNA, 19 nt, Artificial Sequence
  Description of Artificial Sequence: Synthetic oligonucleotide
gccccacggucacuuauuu

SEQ ID NO: 1300510 - RNA, 19 nt, Artificial Sequence
  Description of Artificial Sequence: Synthetic oligonucleotide
ccggaucggagaggcagaa

SEQ ID NO: 1300511 - RNA, 19 nt, Artificial Sequence
  Description of Artificial Sequence: Synthetic oligonucleotide
gggcagcggaggguccucu

SEQ ID NO: 1300512 - RNA, 19 nt, Artificial Sequence
  Description of Artificial Sequence: Synthetic oligonucleotide
aaagguaacgcaugaauuc

SEQ ID NO: 1300513 - RNA, 19 nt, Artificial Sequence
  Description of Artificial Sequence: Synthetic oligonucleotide
aauuccgaaggccuguggc

SEQ ID NO: 1300514 - RNA, 19 nt, Artificial Sequence
  Description of Artificial Sequence: Synthetic oligonucleotide
aauaucuaaggagagaucu

SEQ ID NO: 1300515 - RNA, 19 nt, Artificial Sequence
  Description of Artificial Sequence: Synthetic oligonucleotide
ugaaucgugaucauaggag

SEQ ID NO: 1300516 - RNA, 19 nt, Artificial Sequence
  Description of Artificial Sequence: Synthetic oligonucleotide
guaaugagcaaacaggccc

SEQ ID NO: 1300517 - RNA, 19 nt, Artificial Sequence
  Description of Artificial Sequence: Synthetic oligonucleotide
uccgguauaguaugaaucg

SEQ ID NO: 1300518 - RNA, 19 nt, Artificial Sequence
  Description of Artificial Sequence: Synthetic oligonucleotide
ucaugaguugcauaugccg

SEQ ID NO: 1300519 - RNA, 19 nt, Artificial Sequence
  Description of Artificial Sequence: Synthetic oligonucleotide
uauaguaugaaucgugauc

SEQ ID NO: 1300520 - RNA, 19 nt, Artificial Sequence
  Description of Artificial Sequence: Synthetic oligonucleotide
gaaucgugaucauaggagg

SEQ ID NO: 1300521 - RNA, 19 nt, Artificial Sequence
  Description of Artificial Sequence: Synthetic oligonucleotide
uaacgcaugaauucguggg

SEQ ID NO: 1300522 - RNA, 19 nt, Artificial Sequence
  Description of Artificial Sequence: Synthetic oligonucleotide
aaguuuaucugauccagcu

SEQ ID NO: 1300523 - RNA, 19 nt, Artificial Sequence
  Description of Artificial Sequence: Synthetic oligonucleotide
aaacuaaaccccaaacugg

SEQ ID NO: 1300524 - RNA, 19 nt, Artificial Sequence
  Description of Artificial Sequence: Synthetic oligonucleotide
aacaccauugaagccaccc

SEQ ID NO: 1300525 - RNA, 19 nt, Artificial Sequence
  Description of Artificial Sequence: Synthetic oligonucleotide
uauuacaacuaaagcagcc

SEQ ID NO: 1300526 - RNA, 19 nt, Artificial Sequence
  Description of Artificial Sequence: Synthetic oligonucleotide
ucucguaaugagcaaacag

SEQ ID NO: 1300527 - RNA, 19 nt, Artificial Sequence
  Description of Artificial Sequence: Synthetic oligonucleotide
uuaaauacgcuguccagug

SEQ ID NO: 1300528 - RNA, 19 nt, Artificial Sequence
  Description of Artificial Sequence: Synthetic oligonucleotide
uucuacauacguaucaacu

SEQ ID NO: 1300529 - RNA, 19 nt, Artificial Sequence
  Description of Artificial Sequence: Synthetic oligonucleotide
gaauaagucacuaccacug

SEQ ID NO: 1300530 - RNA, 19 nt, Artificial Sequence
  Description of Artificial Sequence: Synthetic oligonucleotide
uuuucuaugccugucagcu

SEQ ID NO: 1300531 - RNA, 19 nt, Artificial Sequence
  Description of Artificial Sequence: Synthetic oligonucleotide
uaaaguuuaucugauccag

SEQ ID NO: 1300532 - RNA, 19 nt, Artificial Sequence
  Description of Artificial Sequence: Synthetic oligonucleotide
uagaauguaggccuuugcc

SEQ ID NO: 1300533 - RNA, 19 nt, Artificial Sequence
  Description of Artificial Sequence: Synthetic oligonucleotide
uacguaucaacuuuguuuc

SEQ ID NO: 1300534 - RNA, 19 nt, Artificial Sequence
  Description of Artificial Sequence: Synthetic oligonucleotide
gaguuauuacaacuaaagc

SEQ ID NO: 1300535 - RNA, 19 nt, Artificial Sequence
  Description of Artificial Sequence: Synthetic oligonucleotide
uaaggagagaucuaggaau

SEQ ID NO: 1300536 - RNA, 19 nt, Artificial Sequence
  Description of Artificial Sequence: Synthetic oligonucleotide
agugaaaccuuuucaagug

SEQ ID NO: 1300537 - RNA, 19 nt, Artificial Sequence
  Description of Artificial Sequence: Synthetic oligonucleotide
ugaaauggaaccagcggcc

SEQ ID NO: 1300538 - RNA, 19 nt, Artificial Sequence
  Description of Artificial Sequence: Synthetic oligonucleotide
uuguuauuugcagacagag

SEQ ID NO: 1300539 - RNA, 19 nt, Artificial Sequence
  Description of Artificial Sequence: Synthetic oligonucleotide
ucuaaggagagaucuagga

SEQ ID NO: 1300540 - RNA, 19 nt, Artificial Sequence
  Description of Artificial Sequence: Synthetic oligonucleotide
aagguaacgcaugaauucg

SEQ ID NO: 1300541 - RNA, 19 nt, Artificial Sequence
  Description of Artificial Sequence: Synthetic oligonucleotide
cagacaacguagaacaagg

SEQ ID NO: 1300542 - RNA, 19 nt, Artificial Sequence
  Description of Artificial Sequence: Synthetic oligonucleotide
ucaucggucacuguuacag

SEQ ID NO: 1300543 - RNA, 19 nt, Artificial Sequence
  Description of Artificial Sequence: Synthetic oligonucleotide
gacuaaaucgcacguuugg

SEQ ID NO: 1300544 - RNA, 19 nt, Artificial Sequence
  Description of Artificial Sequence: Synthetic oligonucleotide
guugaugcuccauuuaugc

SEQ ID NO: 1300545 - RNA, 19 nt, Artificial Sequence
  Description of Artificial Sequence: Synthetic oligonucleotide
uaagucacuaccacugacc

SEQ ID NO: 1300546 - RNA, 19 nt, Artificial Sequence
  Description of Artificial Sequence: Synthetic oligonucleotide
ucugguagaacaacaacaa

SEQ ID NO: 1300547 - RNA, 19 nt, Artificial Sequence
  Description of Artificial Sequence: Synthetic oligonucleotide
aaguuaggcaugaucuucc

SEQ ID NO: 1300548 - RNA, 19 nt, Artificial Sequence
  Description of Artificial Sequence: Synthetic oligonucleotide
ucuagaucagugaagcuuc

SEQ ID NO: 1300549 - RNA, 19 nt, Artificial Sequence
  Description of Artificial Sequence: Synthetic oligonucleotide
uccaauaauuuucuuuucu

SEQ ID NO: 1300550 - RNA, 19 nt, Artificial Sequence
  Description of Artificial Sequence: Synthetic oligonucleotide
ucuuggaucaaguauuuau

SEQ ID NO: 1300551 - RNA, 19 nt, Artificial Sequence
  Description of Artificial Sequence: Synthetic oligonucleotide
uugaauaagucacuaccac

SEQ ID NO: 1300552 - RNA, 19 nt, Artificial Sequence
  Description of Artificial Sequence: Synthetic oligonucleotide
aauuaguuggugcccauau

SEQ ID NO: 1300553 - RNA, 19 nt, Artificial Sequence
  Description of Artificial Sequence: Synthetic oligonucleotide
aaguguaggugauccaaag

SEQ ID NO: 1300554 - RNA, 19 nt, Artificial Sequence
  Description of Artificial Sequence: Synthetic oligonucleotide
auagaauguaggccuuugc

SEQ ID NO: 1300555 - RNA, 19 nt, Artificial Sequence
  Description of Artificial Sequence: Synthetic oligonucleotide
ucggggaacaccauugaag

SEQ ID NO: 1300556 - RNA, 19 nt, Artificial Sequence
  Description of Artificial Sequence: Synthetic oligonucleotide
uaucuaaggagagaucuag

SEQ ID NO: 1300557 - RNA, 19 nt, Artificial Sequence
  Description of Artificial Sequence: Synthetic oligonucleotide
uuggugagaacugaaaaca

SEQ ID NO: 1300558 - RNA, 19 nt, Artificial Sequence
  Description of Artificial Sequence: Synthetic oligonucleotide
acauaugaggcaguugacc

SEQ ID NO: 1300559 - RNA, 19 nt, Artificial Sequence
  Description of Artificial Sequence: Synthetic oligonucleotide
ugaaguuccaaguguaggu

SEQ ID NO: 1300560 - RNA, 19 nt, Artificial Sequence
  Description of Artificial Sequence: Synthetic oligonucleotide
ucauaggagguauuaaagu

SEQ ID NO: 1300561 - RNA, 19 nt, Artificial Sequence
  Description of Artificial Sequence: Synthetic oligonucleotide
auaagucacuaccacugac

SEQ ID NO: 1300562 - RNA, 19 nt, Artificial Sequence
  Description of Artificial Sequence: Synthetic oligonucleotide
cacacgauccccaugguag

SEQ ID NO: 1300563 - RNA, 19 nt, Artificial Sequence
  Description of Artificial Sequence: Synthetic oligonucleotide
cuuggaucaaguauuuaug

SEQ ID NO: 1300564 - RNA, 19 nt, Artificial Sequence
  Description of Artificial Sequence: Synthetic oligonucleotide
uuuauggaaauuggaaaug

SEQ ID NO: 1300565 - RNA, 19 nt, Artificial Sequence
  Description of Artificial Sequence: Synthetic oligonucleotide
acaacuaaagcagccaauc

SEQ ID NO: 1300566 - RNA, 19 nt, Artificial Sequence
  Description of Artificial Sequence: Synthetic oligonucleotide
aguagguagcacuucaugu

SEQ ID NO: 1300567 - RNA, 19 nt, Artificial Sequence
  Description of Artificial Sequence: Synthetic oligonucleotide
aaucucguaaugagcaaac

SEQ ID NO: 1300568 - RNA, 19 nt, Artificial Sequence
  Description of Artificial Sequence: Synthetic oligonucleotide
uaugaaucgugaucauagg

SEQ ID NO: 1300569 - RNA, 19 nt, Artificial Sequence
  Description of Artificial Sequence: Synthetic oligonucleotide
ugaauaagucacuaccacu

SEQ ID NO: 1300570 - RNA, 19 nt, Artificial Sequence
  Description of Artificial Sequence: Synthetic oligonucleotide
aagucacuaccacugacca

SEQ ID NO: 1300571 - RNA, 19 nt, Artificial Sequence
  Description of Artificial Sequence: Synthetic oligonucleotide
ucuuaaauacgcuguccag

SEQ ID NO: 1300572 - RNA, 19 nt, Artificial Sequence
  Description of Artificial Sequence: Synthetic oligonucleotide
gagguauuaaaguuuaucu

SEQ ID NO: 1300573 - RNA, 19 nt, Artificial Sequence
  Description of Artificial Sequence: Synthetic oligonucleotide
acuaaaucgcacguuuggc

SEQ ID NO: 1300574 - RNA, 19 nt, Artificial Sequence
  Description of Artificial Sequence: Synthetic oligonucleotide
gacaacguagaacaaggac

SEQ ID NO: 1300575 - RNA, 19 nt, Artificial Sequence
  Description of Artificial Sequence: Synthetic oligonucleotide
agaauguaggccuuugccu

SEQ ID NO: 1300576 - RNA, 19 nt, Artificial Sequence
  Description of Artificial Sequence: Synthetic oligonucleotide
uaacucuuggaucaaguau

SEQ ID NO: 1300577 - RNA, 19 nt, Artificial Sequence
  Description of Artificial Sequence: Synthetic oligonucleotide
guugcccaaauuccgaagg

SEQ ID NO: 1300578 - RNA, 19 nt, Artificial Sequence
  Description of Artificial Sequence: Synthetic oligonucleotide
ucuccugcagaaucgauga

SEQ ID NO: 1300579 - RNA, 19 nt, Artificial Sequence
  Description of Artificial Sequence: Synthetic oligonucleotide
aacuacauauaaaacuuga

SEQ ID NO: 1300580 - RNA, 19 nt, Artificial Sequence
  Description of Artificial Sequence: Synthetic oligonucleotide
uacauacguaucaacuuug

SEQ ID NO: 1300581 - RNA, 19 nt, Artificial Sequence
  Description of Artificial Sequence: Synthetic oligonucleotide
aauaagucacuaccacuga

SEQ ID NO: 1300582 - RNA, 19 nt, Artificial Sequence
  Description of Artificial Sequence: Synthetic oligonucleotide
ucugucccacauaugaggc

SEQ ID NO: 1300583 - RNA, 19 nt, Artificial Sequence
  Description of Artificial Sequence: Synthetic oligonucleotide
ugcugauaaccccugaagu

SEQ ID NO: 1300584 - RNA, 19 nt, Artificial Sequence
  Description of Artificial Sequence: Synthetic oligonucleotide
ucuaggaauggaucaaacu

SEQ ID NO: 1300585 - RNA, 19 nt, Artificial Sequence
  Description of Artificial Sequence: Synthetic oligonucleotide
ugaucggggaacaccauug

SEQ ID NO: 1300586 - RNA, 19 nt, Artificial Sequence
  Description of Artificial Sequence: Synthetic oligonucleotide
ucugaacugacuuggaaua

SEQ ID NO: 1300587 - RNA, 19 nt, Artificial Sequence
  Description of Artificial Sequence: Synthetic oligonucleotide
ugauccaaagguaacgcau

SEQ ID NO: 1300588 - RNA, 19 nt, Artificial Sequence
  Description of Artificial Sequence: Synthetic oligonucleotide
ugauaaccccugaaguuag

SEQ ID NO: 1300589 - RNA, 19 nt, Artificial Sequence
  Description of Artificial Sequence: Synthetic oligonucleotide
gacaaucucguaaugagca

SEQ ID NO: 1300590 - RNA, 19 nt, Artificial Sequence
  Description of Artificial Sequence: Synthetic oligonucleotide
uuuguuauuugcagacaga

SEQ ID NO: 1300591 - RNA, 19 nt, Artificial Sequence
  Description of Artificial Sequence: Synthetic oligonucleotide
acugacuuggaauaucuaa

SEQ ID NO: 1300592 - RNA, 19 nt, Artificial Sequence
  Description of Artificial Sequence: Synthetic oligonucleotide
gagaucuaggaauggauca

SEQ ID NO: 1300593 - RNA, 19 nt, Artificial Sequence
  Description of Artificial Sequence: Synthetic oligonucleotide
uucggagacaaucucguaa

SEQ ID NO: 1300594 - RNA, 19 nt, Artificial Sequence
  Description of Artificial Sequence: Synthetic oligonucleotide
uuccuaaacucuucuacca

SEQ ID NO: 1300595 - RNA, 19 nt, Artificial Sequence
  Description of Artificial Sequence: Synthetic oligonucleotide
ucuacauacguaucaacuu

SEQ ID NO: 1300596 - RNA, 19 nt, Artificial Sequence
  Description of Artificial Sequence: Synthetic oligonucleotide
aguuuaucugauccagcuc

SEQ ID NO: 1300597 - RNA, 19 nt, Artificial Sequence
  Description of Artificial Sequence: Synthetic oligonucleotide
acuaccacugaccaaacua

SEQ ID NO: 1300598 - RNA, 19 nt, Artificial Sequence
  Description of Artificial Sequence: Synthetic oligonucleotide
aaauuccgaaggccugugg

SEQ ID NO: 1300599 - RNA, 19 nt, Artificial Sequence
  Description of Artificial Sequence: Synthetic oligonucleotide
guaacgcaugaauucgugg

SEQ ID NO: 1300600 - RNA, 19 nt, Artificial Sequence
  Description of Artificial Sequence: Synthetic oligonucleotide
gaaccagcggccuucauga

SEQ ID NO: 1300601 - RNA, 19 nt, Artificial Sequence
  Description of Artificial Sequence: Synthetic oligonucleotide
augaaucgugaucauagga

SEQ ID NO: 1300602 - RNA, 19 nt, Artificial Sequence
  Description of Artificial Sequence: Synthetic oligonucleotide
aaacuacauauaaaacuug

SEQ ID NO: 1300603 - RNA, 19 nt, Artificial Sequence
  Description of Artificial Sequence: Synthetic oligonucleotide
caugaucuuccagacaacg

SEQ ID NO: 1300604 - RNA, 19 nt, Artificial Sequence
  Description of Artificial Sequence: Synthetic oligonucleotide
aagcuucggagacaaucuc

SEQ ID NO: 1300605 - RNA, 19 nt, Artificial Sequence
  Description of Artificial Sequence: Synthetic oligonucleotide
cauaugccguguaaugucc

SEQ ID NO: 1300606 - RNA, 19 nt, Artificial Sequence
  Description of Artificial Sequence: Synthetic oligonucleotide
aacuaaaccccaaacugga

SEQ ID NO: 1300607 - RNA, 19 nt, Artificial Sequence
  Description of Artificial Sequence: Synthetic oligonucleotide
uaaaccccaaacuggaaau

SEQ ID NO: 1300608 - RNA, 19 nt, Artificial Sequence
  Description of Artificial Sequence: Synthetic oligonucleotide
agacaaucucguaaugagc

SEQ ID NO: 1300609 - RNA, 19 nt, Artificial Sequence
  Description of Artificial Sequence: Synthetic oligonucleotide
agagaucuaggaauggauc

SEQ ID NO: 1300610 - RNA, 19 nt, Artificial Sequence
  Description of Artificial Sequence: Synthetic oligonucleotide
agaucagugaagcuucgga

SEQ ID NO: 1300611 - RNA, 19 nt, Artificial Sequence
  Description of Artificial Sequence: Synthetic oligonucleotide
ugcacuaccacugcggcga

SEQ ID NO: 1300612 - RNA, 19 nt, Artificial Sequence
  Description of Artificial Sequence: Synthetic oligonucleotide
agcauuuguuauuugcaga

SEQ ID NO: 1300613 - RNA, 19 nt, Artificial Sequence
  Description of Artificial Sequence: Synthetic oligonucleotide
ugucucgucaaguuccucu

SEQ ID NO: 1300614 - RNA, 19 nt, Artificial Sequence
  Description of Artificial Sequence: Synthetic oligonucleotide
ugucauugaaauggaacca

SEQ ID NO: 1300615 - RNA, 19 nt, Artificial Sequence
  Description of Artificial Sequence: Synthetic oligonucleotide
aacucuuggaucaaguauu

SEQ ID NO: 1300616 - RNA, 19 nt, Artificial Sequence
  Description of Artificial Sequence: Synthetic oligonucleotide
auaugaggcaguugaccuc

SEQ ID NO: 1300617 - RNA, 19 nt, Artificial Sequence
  Description of Artificial Sequence: Synthetic oligonucleotide
ucaggacuaaaucgcacgu

SEQ ID NO: 1300618 - RNA, 19 nt, Artificial Sequence
  Description of Artificial Sequence: Synthetic oligonucleotide
gaucuuccagacaacguag

SEQ ID NO: 1300619 - RNA, 19 nt, Artificial Sequence
  Description of Artificial Sequence: Synthetic oligonucleotide
aguauuuauggaaauugga

SEQ ID NO: 1300620 - RNA, 19 nt, Artificial Sequence
  Description of Artificial Sequence: Synthetic oligonucleotide
gaaucgaugaucggggaac

SEQ ID NO: 1300621 - RNA, 19 nt, Artificial Sequence
  Description of Artificial Sequence: Synthetic oligonucleotide
uauuaaaguuuaucugauc

SEQ ID NO: 1300622 - RNA, 19 nt, Artificial Sequence
  Description of Artificial Sequence: Synthetic oligonucleotide
uuuaucugauccagcucug

SEQ ID NO: 1300623 - RNA, 19 nt, Artificial Sequence
  Description of Artificial Sequence: Synthetic oligonucleotide
ugugguauguucgccgucc

SEQ ID NO: 1300624 - RNA, 19 nt, Artificial Sequence
  Description of Artificial Sequence: Synthetic oligonucleotide
guagguagcacuucauguc

SEQ ID NO: 1300625 - RNA, 19 nt, Artificial Sequence
  Description of Artificial Sequence: Synthetic oligonucleotide
acacgauccccaugguagc

SEQ ID NO: 1300626 - RNA, 19 nt, Artificial Sequence
  Description of Artificial Sequence: Synthetic oligonucleotide
gucauugaaauggaaccag

SEQ ID NO: 1300627 - RNA, 19 nt, Artificial Sequence
  Description of Artificial Sequence: Synthetic oligonucleotide
acaaauggcagucguacuu

SEQ ID NO: 1300628 - RNA, 19 nt, Artificial Sequence
  Description of Artificial Sequence: Synthetic oligonucleotide
uguugcccaaauuccgaag

SEQ ID NO: 1300629 - RNA, 19 nt, Artificial Sequence
  Description of Artificial Sequence: Synthetic oligonucleotide
aucaagaugccugcugagg

SEQ ID NO: 1300630 - RNA, 19 nt, Artificial Sequence
  Description of Artificial Sequence: Synthetic oligonucleotide
guacagggcaacaaugugc

SEQ ID NO: 1300631 - RNA, 19 nt, Artificial Sequence
  Description of Artificial Sequence: Synthetic oligonucleotide
ugcggcgaggucauacagg

SEQ ID NO: 1300632 - RNA, 19 nt, Artificial Sequence
  Description of Artificial Sequence: Synthetic oligonucleotide
uucuuagagcgcuugcuuc

SEQ ID NO: 1300633 - RNA, 19 nt, Artificial Sequence
  Description of Artificial Sequence: Synthetic oligonucleotide
aaucgcacguuuggcugcc

SEQ ID NO: 1300634 - RNA, 19 nt, Artificial Sequence
  Description of Artificial Sequence: Synthetic oligonucleotide
gaugcuccauuuaugcagc

SEQ ID NO: 1300635 - RNA, 19 nt, Artificial Sequence
  Description of Artificial Sequence: Synthetic oligonucleotide
agucagaaggcguuccuga

SEQ ID NO: 1300636 - RNA, 19 nt, Artificial Sequence
  Description of Artificial Sequence: Synthetic oligonucleotide
gaucaaguauuuauggaaa

SEQ ID NO: 1300637 - RNA, 19 nt, Artificial Sequence
  Description of Artificial Sequence: Synthetic oligonucleotide
aggugauccaaagguaacg

SEQ ID NO: 1300638 - RNA, 19 nt, Artificial Sequence
  Description of Artificial Sequence: Synthetic oligonucleotide
uaggcaugaucuuccagac

SEQ ID NO: 1300639 - RNA, 19 nt, Artificial Sequence
  Description of Artificial Sequence: Synthetic oligonucleotide
uucuggagaauuccuccga

SEQ ID NO: 1300640 - RNA, 19 nt, Artificial Sequence
  Description of Artificial Sequence: Synthetic oligonucleotide
ucggagacaaucucguaau

SEQ ID NO: 1300641 - RNA, 19 nt, Artificial Sequence
  Description of Artificial Sequence: Synthetic oligonucleotide
uggaucaaacuuccuggac

SEQ ID NO: 1300642 - RNA, 19 nt, Artificial Sequence
  Description of Artificial Sequence: Synthetic oligonucleotide
uaugccguguaauguccag

SEQ ID NO: 1300643 - RNA, 19 nt, Artificial Sequence
  Description of Artificial Sequence: Synthetic oligonucleotide
uacaacuaaagcagccaau

SEQ ID NO: 1300644 - RNA, 19 nt, Artificial Sequence
  Description of Artificial Sequence: Synthetic oligonucleotide
ucgaugaucggggaacacc

SEQ ID NO: 1300645 - RNA, 19 nt, Artificial Sequence
  Description of Artificial Sequence: Synthetic oligonucleotide
cugcugauaaccccugaag

SEQ ID NO: 1300646 - RNA, 19 nt, Artificial Sequence
  Description of Artificial Sequence: Synthetic oligonucleotide
aaucgugaucauaggaggu

SEQ ID NO: 1300647 - RNA, 19 nt, Artificial Sequence
  Description of Artificial Sequence: Synthetic oligonucleotide
auacgcuguccagugaaac

SEQ ID NO: 1300648 - RNA, 19 nt, Artificial Sequence
  Description of Artificial Sequence: Synthetic oligonucleotide
uaaauacgcuguccaguga

SEQ ID NO: 1300649 - RNA, 19 nt, Artificial Sequence
  Description of Artificial Sequence: Synthetic oligonucleotide
uuuguccgguauaguauga

SEQ ID NO: 1300650 - RNA, 19 nt, Artificial Sequence
  Description of Artificial Sequence: Synthetic oligonucleotide
agaauuccuccgaauauug

SEQ ID NO: 1300651 - RNA, 19 nt, Artificial Sequence
  Description of Artificial Sequence: Synthetic oligonucleotide
uaauaacuugcuguuuagu

SEQ ID NO: 1300652 - RNA, 19 nt, Artificial Sequence
  Description of Artificial Sequence: Synthetic oligonucleotide
acguagaacaaggacucag

SEQ ID NO: 1300653 - RNA, 19 nt, Artificial Sequence
  Description of Artificial Sequence: Synthetic oligonucleotide
uggugagaacugaaaacau

SEQ ID NO: 1300654 - RNA, 19 nt, Artificial Sequence
  Description of Artificial Sequence: Synthetic oligonucleotide
cuagaucagugaagcuucg

SEQ ID NO: 1300655 - RNA, 19 nt, Artificial Sequence
  Description of Artificial Sequence: Synthetic oligonucleotide
ucagcgggaauucuacaua

SEQ ID NO: 1300656 - RNA, 19 nt, Artificial Sequence
  Description of Artificial Sequence: Synthetic oligonucleotide
cuugaguuauuacaacuaa

SEQ ID NO: 1300657 - RNA, 19 nt, Artificial Sequence
  Description of Artificial Sequence: Synthetic oligonucleotide
ucggucacuguuacaguac

SEQ ID NO: 1300658 - RNA, 19 nt, Artificial Sequence
  Description of Artificial Sequence: Synthetic oligonucleotide
gucacuaccacugaccaaa

SEQ ID NO: 1300659 - RNA, 19 nt, Artificial Sequence
  Description of Artificial Sequence: Synthetic oligonucleotide
agggcaacaaugugccuug

SEQ ID NO: 1300660 - RNA, 19 nt, Artificial Sequence
  Description of Artificial Sequence: Synthetic oligonucleotide
ugccguguaauguccagaa

SEQ ID NO: 1300661 - RNA, 19 nt, Artificial Sequence
  Description of Artificial Sequence: Synthetic oligonucleotide
cucucagcgggaauucuac

SEQ ID NO: 1300662 - RNA, 19 nt, Artificial Sequence
  Description of Artificial Sequence: Synthetic oligonucleotide
aauguuuguccgguauagu

SEQ ID NO: 1300663 - RNA, 19 nt, Artificial Sequence
  Description of Artificial Sequence: Synthetic oligonucleotide
agcuucggagacaaucucg

SEQ ID NO: 1300664 - RNA, 19 nt, Artificial Sequence
  Description of Artificial Sequence: Synthetic oligonucleotide
cagcgggaauucuacauac

SEQ ID NO: 1300665 - RNA, 19 nt, Artificial Sequence
  Description of Artificial Sequence: Synthetic oligonucleotide
ucguacuuccauuuacuuu

SEQ ID NO: 1300666 - RNA, 19 nt, Artificial Sequence
  Description of Artificial Sequence: Synthetic oligonucleotide
gaauuccuccgaauauugc

SEQ ID NO: 1300667 - RNA, 19 nt, Artificial Sequence
  Description of Artificial Sequence: Synthetic oligonucleotide
agcgcuugcuucugaacug

SEQ ID NO: 1300668 - RNA, 19 nt, Artificial Sequence
  Description of Artificial Sequence: Synthetic oligonucleotide
ugucaaguguugcccaaau

SEQ ID NO: 1300669 - RNA, 19 nt, Artificial Sequence
  Description of Artificial Sequence: Synthetic oligonucleotide
ugcccaaauuccgaaggcc

SEQ ID NO: 1300670 - RNA, 19 nt, Artificial Sequence
  Description of Artificial Sequence: Synthetic oligonucleotide
gaaauguuuguccgguaua

SEQ ID NO: 1300671 - RNA, 19 nt, Artificial Sequence
  Description of Artificial Sequence: Synthetic oligonucleotide
ugaucauaggagguauuaa

SEQ ID NO: 1300672 - RNA, 19 nt, Artificial Sequence
  Description of Artificial Sequence: Synthetic oligonucleotide
auauugcugugacaacagu

SEQ ID NO: 1300673 - RNA, 19 nt, Artificial Sequence
  Description of Artificial Sequence: Synthetic oligonucleotide
cuaaggagagaucuaggaa

SEQ ID NO: 1300674 - RNA, 19 nt, Artificial Sequence
  Description of Artificial Sequence: Synthetic oligonucleotide
ugaacugacuuggaauauc

SEQ ID NO: 1300675 - RNA, 19 nt, Artificial Sequence
  Description of Artificial Sequence: Synthetic oligonucleotide
aucuaaggagagaucuagg

SEQ ID NO: 1300676 - RNA, 19 nt, Artificial Sequence
  Description of Artificial Sequence: Synthetic oligonucleotide
auaggagguauuaaaguuu

SEQ ID NO: 1300677 - RNA, 19 nt, Artificial Sequence
  Description of Artificial Sequence: Synthetic oligonucleotide
agaaucgaugaucggggaa

SEQ ID NO: 1300678 - RNA, 19 nt, Artificial Sequence
  Description of Artificial Sequence: Synthetic oligonucleotide
uguccgguauaguaugaau

SEQ ID NO: 1300679 - RNA, 19 nt, Artificial Sequence
  Description of Artificial Sequence: Synthetic oligonucleotide
gguauguucgccguccugc

SEQ ID NO: 1300680 - RNA, 19 nt, Artificial Sequence
  Description of Artificial Sequence: Synthetic oligonucleotide
aaucgaugaucggggaaca

SEQ ID NO: 1300681 - RNA, 19 nt, Artificial Sequence
  Description of Artificial Sequence: Synthetic oligonucleotide
ucgucaaguuccucuagau

SEQ ID NO: 1300682 - RNA, 19 nt, Artificial Sequence
  Description of Artificial Sequence: Synthetic oligonucleotide
acucaggacuaaaucgcac

SEQ ID NO: 1300683 - RNA, 19 nt, Artificial Sequence
  Description of Artificial Sequence: Synthetic oligonucleotide
uaugccugucagcuguaaa

SEQ ID NO: 1300684 - RNA, 19 nt, Artificial Sequence
  Description of Artificial Sequence: Synthetic oligonucleotide
aguugcauaugccguguaa

SEQ ID NO: 1300685 - RNA, 19 nt, Artificial Sequence
  Description of Artificial Sequence: Synthetic oligonucleotide
acuaccacugcggcgaggu

SEQ ID NO: 1300686 - RNA, 19 nt, Artificial Sequence
  Description of Artificial Sequence: Synthetic oligonucleotide
guccgguauaguaugaauc

SEQ ID NO: 1300687 - RNA, 19 nt, Artificial Sequence
  Description of Artificial Sequence: Synthetic oligonucleotide
uccugguucuuagagcgcu

SEQ ID NO: 1300688 - RNA, 19 nt, Artificial Sequence
  Description of Artificial Sequence: Synthetic oligonucleotide
uauguucgccguccugcug

SEQ ID NO: 1300689 - RNA, 19 nt, Artificial Sequence
  Description of Artificial Sequence: Synthetic oligonucleotide
cauggugcacuaccacugc

SEQ ID NO: 1300690 - RNA, 19 nt, Artificial Sequence
  Description of Artificial Sequence: Synthetic oligonucleotide
gauaaccccugaaguuagg

SEQ ID NO: 1300691 - RNA, 19 nt, Artificial Sequence
  Description of Artificial Sequence: Synthetic oligonucleotide
ggagguauuaaaguuuauc

SEQ ID NO: 1300692 - RNA, 19 nt, Artificial Sequence
  Description of Artificial Sequence: Synthetic oligonucleotide
acgcuguccagugaaaccu

SEQ ID NO: 1300693 - RNA, 19 nt, Artificial Sequence
  Description of Artificial Sequence: Synthetic oligonucleotide
cauaggagguauuaaaguu

SEQ ID NO: 1300694 - RNA, 19 nt, Artificial Sequence
  Description of Artificial Sequence: Synthetic oligonucleotide
aagaugccugcugagguuu

SEQ ID NO: 1300695 - RNA, 19 nt, Artificial Sequence
  Description of Artificial Sequence: Synthetic oligonucleotide
guaggugauccaaagguaa

SEQ ID NO: 1300696 - RNA, 19 nt, Artificial Sequence
  Description of Artificial Sequence: Synthetic oligonucleotide
aguuaggcaugaucuucca

SEQ ID NO: 1300697 - RNA, 19 nt, Artificial Sequence
  Description of Artificial Sequence: Synthetic oligonucleotide
aggagagaucuaggaaugg

SEQ ID NO: 1300698 - RNA, 19 nt, Artificial Sequence
  Description of Artificial Sequence: Synthetic oligonucleotide
cuaaaucgcacguuuggcu

SEQ ID NO: 1300699 - RNA, 19 nt, Artificial Sequence
  Description of Artificial Sequence: Synthetic oligonucleotide
gggaauucuacauacguau

SEQ ID NO: 1300700 - RNA, 19 nt, Artificial Sequence
  Description of Artificial Sequence: Synthetic oligonucleotide
gcugugacaacaguugaug

SEQ ID NO: 1300701 - RNA, 19 nt, Artificial Sequence
  Description of Artificial Sequence: Synthetic oligonucleotide
acaaucucguaaugagcaa

SEQ ID NO: 1300702 - RNA, 19 nt, Artificial Sequence
  Description of Artificial Sequence: Synthetic oligonucleotide
aaauuaguuggugcccaua

SEQ ID NO: 1300703 - RNA, 19 nt, Artificial Sequence
  Description of Artificial Sequence: Synthetic oligonucleotide
caacuaaagcagccaauca

SEQ ID NO: 1300704 - RNA, 19 nt, Artificial Sequence
  Description of Artificial Sequence: Synthetic oligonucleotide
uucgccguccugcugucaa

SEQ ID NO: 1300705 - RNA, 19 nt, Artificial Sequence
  Description of Artificial Sequence: Synthetic oligonucleotide
augugccuuggugagaacu

SEQ ID NO: 1300706 - RNA, 19 nt, Artificial Sequence
  Description of Artificial Sequence: Synthetic oligonucleotide
ucucagcgggaauucuaca

SEQ ID NO: 1300707 - RNA, 19 nt, Artificial Sequence
  Description of Artificial Sequence: Synthetic oligonucleotide
gugauccaaagguaacgca

SEQ ID NO: 1300708 - RNA, 19 nt, Artificial Sequence
  Description of Artificial Sequence: Synthetic oligonucleotide
ggaguacagggcaacaaug

SEQ ID NO: 1300709 - RNA, 19 nt, Artificial Sequence
  Description of Artificial Sequence: Synthetic oligonucleotide
agaucuaggaauggaucaa

SEQ ID NO: 1300710 - RNA, 19 nt, Artificial Sequence
  Description of Artificial Sequence: Synthetic oligonucleotide
agaccgugggccacaggcc

SEQ ID NO: 1300711 - RNA, 19 nt, Artificial Sequence
  Description of Artificial Sequence: Synthetic oligonucleotide
cuuaaauacgcuguccagu

SEQ ID NO: 1300712 - RNA, 19 nt, Artificial Sequence
  Description of Artificial Sequence: Synthetic oligonucleotide
uuccgaaggccuguggcac

SEQ ID NO: 1300713 - RNA, 19 nt, Artificial Sequence
  Description of Artificial Sequence: Synthetic oligonucleotide
ucgugaucauaggagguau

SEQ ID NO: 1300714 - RNA, 19 nt, Artificial Sequence
  Description of Artificial Sequence: Synthetic oligonucleotide
gugcacuaccacugcggcg

SEQ ID NO: 1300715 - RNA, 19 nt, Artificial Sequence
  Description of Artificial Sequence: Synthetic oligonucleotide
ggugcacuaccacugcggc

SEQ ID NO: 1300716 - RNA, 19 nt, Artificial Sequence
  Description of Artificial Sequence: Synthetic oligonucleotide
gcauaugccguguaauguc

SEQ ID NO: 1300717 - RNA, 19 nt, Artificial Sequence
  Description of Artificial Sequence: Synthetic oligonucleotide
accagcggccuucaugagu

SEQ ID NO: 1300718 - RNA, 19 nt, Artificial Sequence
  Description of Artificial Sequence: Synthetic oligonucleotide
ggcaucuugcugcugauaa

SEQ ID NO: 1300719 - RNA, 19 nt, Artificial Sequence
  Description of Artificial Sequence: Synthetic oligonucleotide
acugcggcgaggucauaca

SEQ ID NO: 1300720 - RNA, 19 nt, Artificial Sequence
  Description of Artificial Sequence: Synthetic oligonucleotide
ggaauaucuaaggagagau

SEQ ID NO: 1300721 - RNA, 19 nt, Artificial Sequence
  Description of Artificial Sequence: Synthetic oligonucleotide
augaucggggaacaccauu

SEQ ID NO: 1300722 - RNA, 19 nt, Artificial Sequence
  Description of Artificial Sequence: Synthetic oligonucleotide
cugauaaccccugaaguua

SEQ ID NO: 1300723 - RNA, 19 nt, Artificial Sequence
  Description of Artificial Sequence: Synthetic oligonucleotide
aucgaugaucggggaacac

SEQ ID NO: 1300724 - RNA, 19 nt, Artificial Sequence
  Description of Artificial Sequence: Synthetic oligonucleotide
acauacguaucaacuuugu

SEQ ID NO: 1300725 - RNA, 19 nt, Artificial Sequence
  Description of Artificial Sequence: Synthetic oligonucleotide
cguacuuccauuuacuuua

SEQ ID NO: 1300726 - RNA, 19 nt, Artificial Sequence
  Description of Artificial Sequence: Synthetic oligonucleotide
aaccagcggccuucaugag

SEQ ID NO: 1300727 - RNA, 19 nt, Artificial Sequence
  Description of Artificial Sequence: Synthetic oligonucleotide
uccaaagguaacgcaugaa

SEQ ID NO: 1300728 - RNA, 19 nt, Artificial Sequence
  Description of Artificial Sequence: Synthetic oligonucleotide
acguaucaacuuuguuucu

SEQ ID NO: 1300729 - RNA, 19 nt, Artificial Sequence
  Description of Artificial Sequence: Synthetic oligonucleotide
agcgggaauucuacauacg

SEQ ID NO: 1300730 - RNA, 19 nt, Artificial Sequence
  Description of Artificial Sequence: Synthetic oligonucleotide
caugggaguacagggcaac

SEQ ID NO: 1300731 - RNA, 19 nt, Artificial Sequence
  Description of Artificial Sequence: Synthetic oligonucleotide
guauuaaaguuuaucugau

SEQ ID NO: 1300732 - RNA, 19 nt, Artificial Sequence
  Description of Artificial Sequence: Synthetic oligonucleotide
acgcaugaauucgugggca

SEQ ID NO: 1300733 - RNA, 19 nt, Artificial Sequence
  Description of Artificial Sequence: Synthetic oligonucleotide
ugggaguacagggcaacaa

SEQ ID NO: 1300734 - RNA, 19 nt, Artificial Sequence
  Description of Artificial Sequence: Synthetic oligonucleotide
cucgucaaguuccucuaga

SEQ ID NO: 1300735 - RNA, 19 nt, Artificial Sequence
  Description of Artificial Sequence: Synthetic oligonucleotide
ugugagaccgugggccaca

SEQ ID NO: 1300736 - RNA, 19 nt, Artificial Sequence
  Description of Artificial Sequence: Synthetic oligonucleotide
aucucguaaugagcaaaca

SEQ ID NO: 1300737 - RNA, 19 nt, Artificial Sequence
  Description of Artificial Sequence: Synthetic oligonucleotide
uuguccgguauaguaugaa

SEQ ID NO: 1300738 - RNA, 19 nt, Artificial Sequence
  Description of Artificial Sequence: Synthetic oligonucleotide
aucgugaucauaggaggua

SEQ ID NO: 1300739 - RNA, 19 nt, Artificial Sequence
  Description of Artificial Sequence: Synthetic oligonucleotide
cuacauacguaucaacuuu

SEQ ID NO: 1300740 - RNA, 19 nt, Artificial Sequence
  Description of Artificial Sequence: Synthetic oligonucleotide
cuuagagcgcuugcuucug

SEQ ID NO: 1300741 - RNA, 19 nt, Artificial Sequence
  Description of Artificial Sequence: Synthetic oligonucleotide
gagagaucuaggaauggau

SEQ ID NO: 1300742 - RNA, 19 nt, Artificial Sequence
  Description of Artificial Sequence: Synthetic oligonucleotide
cuggugugguauguucgcc

SEQ ID NO: 1300743 - RNA, 19 nt, Artificial Sequence
  Description of Artificial Sequence: Synthetic oligonucleotide
cugcggcgaggucauacag

SEQ ID NO: 1300744 - RNA, 19 nt, Artificial Sequence
  Description of Artificial Sequence: Synthetic oligonucleotide
ccucauucuggagaauucc

SEQ ID NO: 1300745 - RNA, 19 nt, Artificial Sequence
  Description of Artificial Sequence: Synthetic oligonucleotide
caaucucguaaugagcaaa

SEQ ID NO: 1300746 - RNA, 19 nt, Artificial Sequence
  Description of Artificial Sequence: Synthetic oligonucleotide
aggcaugaucuuccagaca

SEQ ID NO: 1300747 - RNA, 19 nt, Artificial Sequence
  Description of Artificial Sequence: Synthetic oligonucleotide
uccgaaggccuguggcaca

SEQ ID NO: 1300748 - RNA, 19 nt, Artificial Sequence
  Description of Artificial Sequence: Synthetic oligonucleotide
aguuccaaguguaggugau

SEQ ID NO: 1300749 - RNA, 19 nt, Artificial Sequence
  Description of Artificial Sequence: Synthetic oligonucleotide
ggcucuaguagguagcacu

SEQ ID NO: 1300750 - RNA, 19 nt, Artificial Sequence
  Description of Artificial Sequence: Synthetic oligonucleotide
agucacuaccacugaccaa

SEQ ID NO: 1300751 - RNA, 19 nt, Artificial Sequence
  Description of Artificial Sequence: Synthetic oligonucleotide
cgguauaguaugaaucgug

SEQ ID NO: 1300752 - RNA, 19 nt, Artificial Sequence
  Description of Artificial Sequence: Synthetic oligonucleotide
auaucuaaggagagaucua

SEQ ID NO: 1300753 - RNA, 19 nt, Artificial Sequence
  Description of Artificial Sequence: Synthetic oligonucleotide
agacaacguagaacaagga

SEQ ID NO: 1300754 - RNA, 19 nt, Artificial Sequence
  Description of Artificial Sequence: Synthetic oligonucleotide
agaauagaauguaggccuu

SEQ ID NO: 1300755 - RNA, 19 nt, Artificial Sequence
  Description of Artificial Sequence: Synthetic oligonucleotide
aggguggcucucagcaugg

SEQ ID NO: 1300756 - RNA, 19 nt, Artificial Sequence
  Description of Artificial Sequence: Synthetic oligonucleotide
gccugucagcuguaaaagc

SEQ ID NO: 1300757 - RNA, 19 nt, Artificial Sequence
  Description of Artificial Sequence: Synthetic oligonucleotide
ggaauucuacauacguauc

SEQ ID NO: 1300758 - RNA, 19 nt, Artificial Sequence
  Description of Artificial Sequence: Synthetic oligonucleotide
cucuagaucagugaagcuu

SEQ ID NO: 1300759 - RNA, 19 nt, Artificial Sequence
  Description of Artificial Sequence: Synthetic oligonucleotide
cagaaucgaugaucgggga

SEQ ID NO: 1300760 - RNA, 19 nt, Artificial Sequence
  Description of Artificial Sequence: Synthetic oligonucleotide
uggcagucguacuuccauu

SEQ ID NO: 1300761 - RNA, 19 nt, Artificial Sequence
  Description of Artificial Sequence: Synthetic oligonucleotide
auaugccguguaaugucca

SEQ ID NO: 1300762 - RNA, 19 nt, Artificial Sequence
  Description of Artificial Sequence: Synthetic oligonucleotide
cacugcggcgaggucauac

SEQ ID NO: 1300763 - RNA, 19 nt, Artificial Sequence
  Description of Artificial Sequence: Synthetic oligonucleotide
ucgugggcaucuugcugcu

SEQ ID NO: 1300764 - RNA, 19 nt, Artificial Sequence
  Description of Artificial Sequence: Synthetic oligonucleotide
ucgccguccugcugucaag

SEQ ID NO: 1300765 - RNA, 19 nt, Artificial Sequence
  Description of Artificial Sequence: Synthetic oligonucleotide
augccguguaauguccaga

SEQ ID NO: 1300766 - RNA, 19 nt, Artificial Sequence
  Description of Artificial Sequence: Synthetic oligonucleotide
ccaaaacuucuuuguggac

SEQ ID NO: 1300767 - RNA, 19 nt, Artificial Sequence
  Description of Artificial Sequence: Synthetic oligonucleotide
accccugaaguuaggcaug

SEQ ID NO: 1300768 - RNA, 19 nt, Artificial Sequence
  Description of Artificial Sequence: Synthetic oligonucleotide
gcuguaaaagcugaguuuu

SEQ ID NO: 1300769 - RNA, 19 nt, Artificial Sequence
  Description of Artificial Sequence: Synthetic oligonucleotide
acucuuggaucaaguauuu

SEQ ID NO: 1300770 - RNA, 19 nt, Artificial Sequence
  Description of Artificial Sequence: Synthetic oligonucleotide
guguaauguccagaaccga

SEQ ID NO: 1300771 - RNA, 19 nt, Artificial Sequence
  Description of Artificial Sequence: Synthetic oligonucleotide
caguugaugcuccauuuau

SEQ ID NO: 1300772 - RNA, 19 nt, Artificial Sequence
  Description of Artificial Sequence: Synthetic oligonucleotide
ccagaaccgaccccagagc

SEQ ID NO: 1300773 - RNA, 19 nt, Artificial Sequence
  Description of Artificial Sequence: Synthetic oligonucleotide
augggaguacagggcaaca

SEQ ID NO: 1300774 - RNA, 19 nt, Artificial Sequence
  Description of Artificial Sequence: Synthetic oligonucleotide
acagggcaacaaugugccu

SEQ ID NO: 1300775 - RNA, 19 nt, Artificial Sequence
  Description of Artificial Sequence: Synthetic oligonucleotide
gcgggaauucuacauacgu

SEQ ID NO: 1300776 - RNA, 19 nt, Artificial Sequence
  Description of Artificial Sequence: Synthetic oligonucleotide
uagccgcuggccuggccac

SEQ ID NO: 1300777 - RNA, 19 nt, Artificial Sequence
  Description of Artificial Sequence: Synthetic oligonucleotide
uguucgccguccugcuguc

SEQ ID NO: 1300778 - RNA, 19 nt, Artificial Sequence
  Description of Artificial Sequence: Synthetic oligonucleotide
cucucagcaugggaguaca

SEQ ID NO: 1300779 - RNA, 19 nt, Artificial Sequence
  Description of Artificial Sequence: Synthetic oligonucleotide
cgaugaucggggaacacca

SEQ ID NO: 1300780 - RNA, 19 nt, Artificial Sequence
  Description of Artificial Sequence: Synthetic oligonucleotide
guauguucgccguccugcu

SEQ ID NO: 1300781 - RNA, 19 nt, Artificial Sequence
  Description of Artificial Sequence: Synthetic oligonucleotide
ucgcacguuuggcugccuu

SEQ ID NO: 1300782 - RNA, 19 nt, Artificial Sequence
  Description of Artificial Sequence: Synthetic oligonucleotide
gucguacuuccauuuacuu

SEQ ID NO: 1300783 - RNA, 19 nt, Artificial Sequence
  Description of Artificial Sequence: Synthetic oligonucleotide
gaaccgaccccagagccau

SEQ ID NO: 1300784 - RNA, 19 nt, Artificial Sequence
  Description of Artificial Sequence: Synthetic oligonucleotide
cgaauauugcugugacaac

SEQ ID NO: 1300785 - RNA, 19 nt, Artificial Sequence
  Description of Artificial Sequence: Synthetic oligonucleotide
cuaguagguagcacuucau

SEQ ID NO: 1300786 - RNA, 19 nt, Artificial Sequence
  Description of Artificial Sequence: Synthetic oligonucleotide
gugugguauguucgccguc

SEQ ID NO: 1300787 - RNA, 19 nt, Artificial Sequence
  Description of Artificial Sequence: Synthetic oligonucleotide
ccaaagguaacgcaugaau

SEQ ID NO: 1300788 - RNA, 19 nt, Artificial Sequence
  Description of Artificial Sequence: Synthetic oligonucleotide
cucaucggucacuguuaca

SEQ ID NO: 1300789 - RNA, 19 nt, Artificial Sequence
  Description of Artificial Sequence: Synthetic oligonucleotide
ccgcuuuccugguucuuag

SEQ ID NO: 1300790 - RNA, 19 nt, Artificial Sequence
  Description of Artificial Sequence: Synthetic oligonucleotide
ggccccgcacacacgaucc

SEQ ID NO: 1300791 - RNA, 19 nt, Artificial Sequence
  Description of Artificial Sequence: Synthetic oligonucleotide
ggugugguauguucgccgu

SEQ ID NO: 1300792 - RNA, 19 nt, Artificial Sequence
  Description of Artificial Sequence: Synthetic oligonucleotide
gguucuuagagcgcuugcu

SEQ ID NO: 1300793 - RNA, 19 nt, Artificial Sequence
  Description of Artificial Sequence: Synthetic oligonucleotide
ccaaguguaggugauccaa

SEQ ID NO: 1300794 - RNA, 19 nt, Artificial Sequence
  Description of Artificial Sequence: Synthetic oligonucleotide
gggaguacagggcaacaau

SEQ ID NO: 1300795 - RNA, 19 nt, Artificial Sequence
  Description of Artificial Sequence: Synthetic oligonucleotide
cuucggagacaaucucgua

SEQ ID NO: 1300796 - RNA, 19 nt, Artificial Sequence
  Description of Artificial Sequence: Synthetic oligonucleotide
aggagguauuaaaguuuau

SEQ ID NO: 1300797 - RNA, 19 nt, Artificial Sequence
  Description of Artificial Sequence: Synthetic oligonucleotide
gucaaguguugcccaaauu

SEQ ID NO: 1300798 - RNA, 19 nt, Artificial Sequence
  Description of Artificial Sequence: Synthetic oligonucleotide
gcuucggagacaaucucgu

SEQ ID NO: 1300799 - RNA, 19 nt, Artificial Sequence
  Description of Artificial Sequence: Synthetic oligonucleotide
cagggcaacaaugugccuu

SEQ ID NO: 1300800 - RNA, 19 nt, Artificial Sequence
  Description of Artificial Sequence: Synthetic oligonucleotide
gggccaauguucucuggcu

SEQ ID NO: 1300801 - RNA, 19 nt, Artificial Sequence
  Description of Artificial Sequence: Synthetic oligonucleotide
caucggucacuguuacagu

SEQ ID NO: 1300802 - RNA, 19 nt, Artificial Sequence
  Description of Artificial Sequence: Synthetic oligonucleotide
aagccacccugaaguucca

SEQ ID NO: 1300803 - RNA, 19 nt, Artificial Sequence
  Description of Artificial Sequence: Synthetic oligonucleotide
gcaugaucuuccagacaac

SEQ ID NO: 1300804 - RNA, 19 nt, Artificial Sequence
  Description of Artificial Sequence: Synthetic oligonucleotide
gaugaucggggaacaccau

SEQ ID NO: 1300805 - RNA, 19 nt, Artificial Sequence
  Description of Artificial Sequence: Synthetic oligonucleotide
cugucucgucaaguuccuc

SEQ ID NO: 1300806 - RNA, 19 nt, Artificial Sequence
  Description of Artificial Sequence: Synthetic oligonucleotide
cagcggccuucaugaguug

SEQ ID NO: 1300807 - RNA, 19 nt, Artificial Sequence
  Description of Artificial Sequence: Synthetic oligonucleotide
cgggaauucuacauacgua

SEQ ID NO: 1300808 - RNA, 19 nt, Artificial Sequence
  Description of Artificial Sequence: Synthetic oligonucleotide
gcacuaccacugcggcgag

SEQ ID NO: 1300809 - RNA, 19 nt, Artificial Sequence
  Description of Artificial Sequence: Synthetic oligonucleotide
ccagcggccuucaugaguu

SEQ ID NO: 1300810 - RNA, 19 nt, Artificial Sequence
  Description of Artificial Sequence: Synthetic oligonucleotide
cccgcacacacgaucccca

SEQ ID NO: 1300811 - RNA, 19 nt, Artificial Sequence
  Description of Artificial Sequence: Synthetic oligonucleotide
ggguggcucucagcauggg

SEQ ID NO: 1300812 - RNA, 19 nt, Artificial Sequence
  Description of Artificial Sequence: Synthetic oligonucleotide
ggaauggaucaaacuuccu

SEQ ID NO: 1300813 - RNA, 19 nt, Artificial Sequence
  Description of Artificial Sequence: Synthetic oligonucleotide
agccacccugaaguuccaa

SEQ ID NO: 1300814 - RNA, 19 nt, Artificial Sequence
  Description of Artificial Sequence: Synthetic oligonucleotide
gccccgcacacacgauccc

SEQ ID NO: 1300815 - RNA, 19 nt, Artificial Sequence
  Description of Artificial Sequence: Synthetic oligonucleotide
gccuugccauaaagcacac

SEQ ID NO: 1300816 - RNA, 19 nt, Artificial Sequence
  Description of Artificial Sequence: Synthetic oligonucleotide
cgcacacacgauccccaug

SEQ ID NO: 1300817 - RNA, 19 nt, Artificial Sequence
  Description of Artificial Sequence: Synthetic oligonucleotide
gcuccacauagaauagaau

SEQ ID NO: 1300818 - RNA, 19 nt, Artificial Sequence
  Description of Artificial Sequence: Synthetic oligonucleotide
ccucuagaucagugaagcu

SEQ ID NO: 1300819 - RNA, 19 nt, Artificial Sequence
  Description of Artificial Sequence: Synthetic oligonucleotide
agccgcuggccuggccacu

SEQ ID NO: 1300820 - RNA, 19 nt, Artificial Sequence
  Description of Artificial Sequence: Synthetic oligonucleotide
ccguccugcugucaagugu

SEQ ID NO: 1300821 - RNA, 19 nt, Artificial Sequence
  Description of Artificial Sequence: Synthetic oligonucleotide
ccgguauaguaugaaucgu

SEQ ID NO: 1300822 - RNA, 19 nt, Artificial Sequence
  Description of Artificial Sequence: Synthetic oligonucleotide
cccgcuuuccugguucuua

SEQ ID NO: 1300823 - RNA, 19 nt, Artificial Sequence
  Description of Artificial Sequence: Synthetic oligonucleotide
gccugacgcuccacauaga

SEQ ID NO: 1300824 - RNA, 19 nt, Artificial Sequence
  Description of Artificial Sequence: Synthetic oligonucleotide
cgcaugaauucgugggcau

SEQ ID NO: 1300825 - RNA, 19 nt, Artificial Sequence
  Description of Artificial Sequence: Synthetic oligonucleotide
caggccccgcacacacgau

SEQ ID NO: 1300826 - RNA, 19 nt, Artificial Sequence
  Description of Artificial Sequence: Synthetic oligonucleotide
ccugguucuuagagcgcuu

SEQ ID NO: 1300827 - RNA, 19 nt, Artificial Sequence
  Description of Artificial Sequence: Synthetic oligonucleotide
cgugggcaucuugcugcug

SEQ ID NO: 1300828 - RNA, 19 nt, Artificial Sequence
  Description of Artificial Sequence: Synthetic oligonucleotide
caggcccgcuuuccugguu

SEQ ID NO: 1300829 - RNA, 19 nt, Artificial Sequence
  Description of Artificial Sequence: Synthetic oligonucleotide
ccgcacacacgauccccau

SEQ ID NO: 1300830 - RNA, 19 nt, Artificial Sequence
  Description of Artificial Sequence: Synthetic oligonucleotide
ccgaccccagagccauggu

SEQ ID NO: 1300831 - RNA, 19 nt, Artificial Sequence
  Description of Artificial Sequence: Synthetic oligonucleotide
cccugaaguuaggcaugau

SEQ ID NO: 1300832 - RNA, 19 nt, Artificial Sequence
  Description of Artificial Sequence: Synthetic oligonucleotide
agugucaaaagcucgggcc

SEQ ID NO: 1300833 - RNA, 19 nt, Artificial Sequence
  Description of Artificial Sequence: Synthetic oligonucleotide
gauugcaagagcuuggugc

SEQ ID NO: 1300834 - RNA, 19 nt, Artificial Sequence
  Description of Artificial Sequence: Synthetic oligonucleotide
uuauacuugauguacuugc

SEQ ID NO: 1300835 - RNA, 19 nt, Artificial Sequence
  Description of Artificial Sequence: Synthetic oligonucleotide
uuggaauuauacuugaugu

SEQ ID NO: 1300836 - RNA, 19 nt, Artificial Sequence
  Description of Artificial Sequence: Synthetic oligonucleotide
cucaagauggucuuggccg

SEQ ID NO: 1300837 - RNA, 19 nt, Artificial Sequence
  Description of Artificial Sequence: Synthetic oligonucleotide
ugcaaauccgguuacaggc

SEQ ID NO: 1300838 - RNA, 19 nt, Artificial Sequence
  Description of Artificial Sequence: Synthetic oligonucleotide
aaaagcucgggccacuagg

SEQ ID NO: 1300839 - RNA, 19 nt, Artificial Sequence
  Description of Artificial Sequence: Synthetic oligonucleotide
ucuuaccauggccagaugg

SEQ ID NO: 1300840 - RNA, 19 nt, Artificial Sequence
  Description of Artificial Sequence: Synthetic oligonucleotide
uuuagcucaaugaugcaca

SEQ ID NO: 1300841 - RNA, 19 nt, Artificial Sequence
  Description of Artificial Sequence: Synthetic oligonucleotide
ugugucguaccaauguagg

SEQ ID NO: 1300842 - RNA, 19 nt, Artificial Sequence
  Description of Artificial Sequence: Synthetic oligonucleotide
ugaaaggcggaacagcaag

SEQ ID NO: 1300843 - RNA, 19 nt, Artificial Sequence
  Description of Artificial Sequence: Synthetic oligonucleotide
uguggugucagucggaugu

SEQ ID NO: 1300844 - RNA, 19 nt, Artificial Sequence
  Description of Artificial Sequence: Synthetic oligonucleotide
ugcuccagauggaagaugg

SEQ ID NO: 1300845 - RNA, 19 nt, Artificial Sequence
  Description of Artificial Sequence: Synthetic oligonucleotide
augguaucuuaccauggcc

SEQ ID NO: 1300846 - RNA, 19 nt, Artificial Sequence
  Description of Artificial Sequence: Synthetic oligonucleotide
uacauaucggggcuggucc

SEQ ID NO: 1300847 - RNA, 19 nt, Artificial Sequence
  Description of Artificial Sequence: Synthetic oligonucleotide
ucggauguugucaucgcgg

SEQ ID NO: 1300848 - RNA, 19 nt, Artificial Sequence
  Description of Artificial Sequence: Synthetic oligonucleotide
cuuauuggggaguuauucc

SEQ ID NO: 1300849 - RNA, 19 nt, Artificial Sequence
  Description of Artificial Sequence: Synthetic oligonucleotide
ugguaucuuaccauggcca

SEQ ID NO: 1300850 - RNA, 19 nt, Artificial Sequence
  Description of Artificial Sequence: Synthetic oligonucleotide
agaucauuuagccuuugca

SEQ ID NO: 1300851 - RNA, 19 nt, Artificial Sequence
  Description of Artificial Sequence: Synthetic oligonucleotide
uuauuggggaguuauuccu

SEQ ID NO: 1300852 - RNA, 19 nt, Artificial Sequence
  Description of Artificial Sequence: Synthetic oligonucleotide
ucauggacugccuaucacc

SEQ ID NO: 1300853 - RNA, 19 nt, Artificial Sequence
  Description of Artificial Sequence: Synthetic oligonucleotide
auuucgaagguuccacuuc

SEQ ID NO: 1300854 - RNA, 19 nt, Artificial Sequence
  Description of Artificial Sequence: Synthetic oligonucleotide
gagagagucuuuaugcagg

SEQ ID NO: 1300855 - RNA, 19 nt, Artificial Sequence
  Description of Artificial Sequence: Synthetic oligonucleotide
aaaggcggaacagcaaggg

SEQ ID NO: 1300856 - RNA, 19 nt, Artificial Sequence
  Description of Artificial Sequence: Synthetic oligonucleotide
ugucaucgcggacaaagcc

SEQ ID NO: 1300857 - RNA, 19 nt, Artificial Sequence
  Description of Artificial Sequence: Synthetic oligonucleotide
gaagguuccacuucuccac

SEQ ID NO: 1300858 - RNA, 19 nt, Artificial Sequence
  Description of Artificial Sequence: Synthetic oligonucleotide
acugccuaucaccagcuuc

SEQ ID NO: 1300859 - RNA, 19 nt, Artificial Sequence
  Description of Artificial Sequence: Synthetic oligonucleotide
ugaaucucggucccauucc

SEQ ID NO: 1300860 - RNA, 19 nt, Artificial Sequence
  Description of Artificial Sequence: Synthetic oligonucleotide
auugcaagagcuuggugcu

SEQ ID NO: 1300861 - RNA, 19 nt, Artificial Sequence
  Description of Artificial Sequence: Synthetic oligonucleotide
caugcucuugcaaauccgg

SEQ ID NO: 1300862 - RNA, 19 nt, Artificial Sequence
  Description of Artificial Sequence: Synthetic oligonucleotide
aacgcucaaaugugaagug

SEQ ID NO: 1300863 - RNA, 19 nt, Artificial Sequence
  Description of Artificial Sequence: Synthetic oligonucleotide
aguuauuccuccaucuggg

SEQ ID NO: 1300864 - RNA, 19 nt, Artificial Sequence
  Description of Artificial Sequence: Synthetic oligonucleotide
aagguccagaucauuuagc

SEQ ID NO: 1300865 - RNA, 19 nt, Artificial Sequence
  Description of Artificial Sequence: Synthetic oligonucleotide
ucuuauuggggaguuauuc

SEQ ID NO: 1300866 - RNA, 19 nt, Artificial Sequence
  Description of Artificial Sequence: Synthetic oligonucleotide
caauguagggccucugacc

SEQ ID NO: 1300867 - RNA, 19 nt, Artificial Sequence
  Description of Artificial Sequence: Synthetic oligonucleotide
uccgguuacaggcaugaga

SEQ ID NO: 1300868 - RNA, 19 nt, Artificial Sequence
  Description of Artificial Sequence: Synthetic oligonucleotide
aaggcggaacagcaagggg

SEQ ID NO: 1300869 - RNA, 19 nt, Artificial Sequence
  Description of Artificial Sequence: Synthetic oligonucleotide
uuucaguguggaucugugg

SEQ ID NO: 1300870 - RNA, 19 nt, Artificial Sequence
  Description of Artificial Sequence: Synthetic oligonucleotide
ggucacaucacucauguuc

SEQ ID NO: 1300871 - RNA, 19 nt, Artificial Sequence
  Description of Artificial Sequence: Synthetic oligonucleotide
acaggcaugagaauagaag

SEQ ID NO: 1300872 - RNA, 19 nt, Artificial Sequence
  Description of Artificial Sequence: Synthetic oligonucleotide
uaugagguguggccgaaga

SEQ ID NO: 1300873 - RNA, 19 nt, Artificial Sequence
  Description of Artificial Sequence: Synthetic oligonucleotide
aauuucuggcuaugaggug

SEQ ID NO: 1300874 - RNA, 19 nt, Artificial Sequence
  Description of Artificial Sequence: Synthetic oligonucleotide
agugaucguguucucgggg

SEQ ID NO: 1300875 - RNA, 19 nt, Artificial Sequence
  Description of Artificial Sequence: Synthetic oligonucleotide
augaccagaacgcucaaau

SEQ ID NO: 1300876 - RNA, 19 nt, Artificial Sequence
  Description of Artificial Sequence: Synthetic oligonucleotide
ggaauuauacuugauguac

SEQ ID NO: 1300877 - RNA, 19 nt, Artificial Sequence
  Description of Artificial Sequence: Synthetic oligonucleotide
ucaucgcggacaaagccug

SEQ ID NO: 1300878 - RNA, 19 nt, Artificial Sequence
  Description of Artificial Sequence: Synthetic oligonucleotide
agaacgcucaaaugugaag

SEQ ID NO: 1300879 - RNA, 19 nt, Artificial Sequence
  Description of Artificial Sequence: Synthetic oligonucleotide
cauccuucuggcagaagcg

SEQ ID NO: 1300880 - RNA, 19 nt, Artificial Sequence
  Description of Artificial Sequence: Synthetic oligonucleotide
gucguaccaauguagggcc

SEQ ID NO: 1300881 - RNA, 19 nt, Artificial Sequence
  Description of Artificial Sequence: Synthetic oligonucleotide
caggcaugagaauagaaga

SEQ ID NO: 1300882 - RNA, 19 nt, Artificial Sequence
  Description of Artificial Sequence: Synthetic oligonucleotide
guugccaucuccaaaguca

SEQ ID NO: 1300883 - RNA, 19 nt, Artificial Sequence
  Description of Artificial Sequence: Synthetic oligonucleotide
uggaauuauacuugaugua

SEQ ID NO: 1300884 - RNA, 19 nt, Artificial Sequence
  Description of Artificial Sequence: Synthetic oligonucleotide
ggagugaucguguucucgg

SEQ ID NO: 1300885 - RNA, 19 nt, Artificial Sequence
  Description of Artificial Sequence: Synthetic oligonucleotide
uguacuccaucauacucuc

SEQ ID NO: 1300886 - RNA, 19 nt, Artificial Sequence
  Description of Artificial Sequence: Synthetic oligonucleotide
cugugucguaccaauguag

SEQ ID NO: 1300887 - RNA, 19 nt, Artificial Sequence
  Description of Artificial Sequence: Synthetic oligonucleotide
agucggauguugucaucgc

SEQ ID NO: 1300888 - RNA, 19 nt, Artificial Sequence
  Description of Artificial Sequence: Synthetic oligonucleotide
agcugagaguacaugaguc

SEQ ID NO: 1300889 - RNA, 19 nt, Artificial Sequence
  Description of Artificial Sequence: Synthetic oligonucleotide
uuaugcagggauucccaca

SEQ ID NO: 1300890 - RNA, 19 nt, Artificial Sequence
  Description of Artificial Sequence: Synthetic oligonucleotide
aauccgguuacaggcauga

SEQ ID NO: 1300891 - RNA, 19 nt, Artificial Sequence
  Description of Artificial Sequence: Synthetic oligonucleotide
agauucaggcuuccgguug

SEQ ID NO: 1300892 - RNA, 19 nt, Artificial Sequence
  Description of Artificial Sequence: Synthetic oligonucleotide
uguaaaggucacccacacc

SEQ ID NO: 1300893 - RNA, 19 nt, Artificial Sequence
  Description of Artificial Sequence: Synthetic oligonucleotide
ugagaguacaugaguccca

SEQ ID NO: 1300894 - RNA, 19 nt, Artificial Sequence
  Description of Artificial Sequence: Synthetic oligonucleotide
cauguucucauccccggag

SEQ ID NO: 1300895 - RNA, 19 nt, Artificial Sequence
  Description of Artificial Sequence: Synthetic oligonucleotide
cugagaguacaugaguccc

SEQ ID NO: 1300896 - RNA, 19 nt, Artificial Sequence
  Description of Artificial Sequence: Synthetic oligonucleotide
cccgauuuuccuuucaagg

SEQ ID NO: 1300897 - RNA, 19 nt, Artificial Sequence
  Description of Artificial Sequence: Synthetic oligonucleotide
uuuaugcagggauucccac

SEQ ID NO: 1300898 - RNA, 19 nt, Artificial Sequence
  Description of Artificial Sequence: Synthetic oligonucleotide
gaaaggcggaacagcaagg

SEQ ID NO: 1300899 - RNA, 19 nt, Artificial Sequence
  Description of Artificial Sequence: Synthetic oligonucleotide
uguuaucgaggucaccaaa

SEQ ID NO: 1300900 - RNA, 19 nt, Artificial Sequence
  Description of Artificial Sequence: Synthetic oligonucleotide
agcaguacauaucggggcu

SEQ ID NO: 1300901 - RNA, 19 nt, Artificial Sequence
  Description of Artificial Sequence: Synthetic oligonucleotide
gauucaggcuuccgguugc

SEQ ID NO: 1300902 - RNA, 19 nt, Artificial Sequence
  Description of Artificial Sequence: Synthetic oligonucleotide
agcucgggccacuaggauc

SEQ ID NO: 1300903 - RNA, 19 nt, Artificial Sequence
  Description of Artificial Sequence: Synthetic oligonucleotide
ucauuuagccuuugcacuu

SEQ ID NO: 1300904 - RNA, 19 nt, Artificial Sequence
  Description of Artificial Sequence: Synthetic oligonucleotide
guacuugcccucaauguag

SEQ ID NO: 1300905 - RNA, 19 nt, Artificial Sequence
  Description of Artificial Sequence: Synthetic oligonucleotide
ucccgauuuuccuuucaag

SEQ ID NO: 1300906 - RNA, 19 nt, Artificial Sequence
  Description of Artificial Sequence: Synthetic oligonucleotide
guauccacuguccccacug

SEQ ID NO: 1300907 - RNA, 19 nt, Artificial Sequence
  Description of Artificial Sequence: Synthetic oligonucleotide
ugaccagaacgcucaaaug

SEQ ID NO: 1300908 - RNA, 19 nt, Artificial Sequence
  Description of Artificial Sequence: Synthetic oligonucleotide
ugcacuucgagggccacag

SEQ ID NO: 1300909 - RNA, 19 nt, Artificial Sequence
  Description of Artificial Sequence: Synthetic oligonucleotide
uauuggggaguuauuccuc

SEQ ID NO: 1300910 - RNA, 19 nt, Artificial Sequence
  Description of Artificial Sequence: Synthetic oligonucleotide
uugucaucgcggacaaagc

SEQ ID NO: 1300911 - RNA, 19 nt, Artificial Sequence
  Description of Artificial Sequence: Synthetic oligonucleotide
gagugaucguguucucggg

SEQ ID NO: 1300912 - RNA, 19 nt, Artificial Sequence
  Description of Artificial Sequence: Synthetic oligonucleotide
gugucguaccaauguaggg

SEQ ID NO: 1300913 - RNA, 19 nt, Artificial Sequence
  Description of Artificial Sequence: Synthetic oligonucleotide
gccagcaguacauaucggg

SEQ ID NO: 1300914 - RNA, 19 nt, Artificial Sequence
  Description of Artificial Sequence: Synthetic oligonucleotide
ugucagucggauguuguca

SEQ ID NO: 1300915 - RNA, 19 nt, Artificial Sequence
  Description of Artificial Sequence: Synthetic oligonucleotide
aucgaggucaccaaacacu

SEQ ID NO: 1300916 - RNA, 19 nt, Artificial Sequence
  Description of Artificial Sequence: Synthetic oligonucleotide
gaguuggaauuauacuuga

SEQ ID NO: 1300917 - RNA, 19 nt, Artificial Sequence
  Description of Artificial Sequence: Synthetic oligonucleotide
ucauaguacugguuggcua

SEQ ID NO: 1300918 - RNA, 19 nt, Artificial Sequence
  Description of Artificial Sequence: Synthetic oligonucleotide
uggagugaucguguucucg

SEQ ID NO: 1300919 - RNA, 19 nt, Artificial Sequence
  Description of Artificial Sequence: Synthetic oligonucleotide
gagaguacaugagucccag

SEQ ID NO: 1300920 - RNA, 19 nt, Artificial Sequence
  Description of Artificial Sequence: Synthetic oligonucleotide
acaaucagcugaugaccag

SEQ ID NO: 1300921 - RNA, 19 nt, Artificial Sequence
  Description of Artificial Sequence: Synthetic oligonucleotide
cuuaccauggccagaugga

SEQ ID NO: 1300922 - RNA, 19 nt, Artificial Sequence
  Description of Artificial Sequence: Synthetic oligonucleotide
aggucacuucgcuucucgc

SEQ ID NO: 1300923 - RNA, 19 nt, Artificial Sequence
  Description of Artificial Sequence: Synthetic oligonucleotide
cugaaucucggucccauuc

SEQ ID NO: 1300924 - RNA, 19 nt, Artificial Sequence
  Description of Artificial Sequence: Synthetic oligonucleotide
agcccuuuaucuuguucuc

SEQ ID NO: 1300925 - RNA, 19 nt, Artificial Sequence
  Description of Artificial Sequence: Synthetic oligonucleotide
uuccgguugccauuggagu

SEQ ID NO: 1300926 - RNA, 19 nt, Artificial Sequence
  Description of Artificial Sequence: Synthetic oligonucleotide
ugccauuggagugaucgug

SEQ ID NO: 1300927 - RNA, 19 nt, Artificial Sequence
  Description of Artificial Sequence: Synthetic oligonucleotide
gcuagucggcccuucaugg

SEQ ID NO: 1300928 - RNA, 19 nt, Artificial Sequence
  Description of Artificial Sequence: Synthetic oligonucleotide
aagguuccacuucuccaca

SEQ ID NO: 1300929 - RNA, 19 nt, Artificial Sequence
  Description of Artificial Sequence: Synthetic oligonucleotide
cucaaaugugaaguggcug

SEQ ID NO: 1300930 - RNA, 19 nt, Artificial Sequence
  Description of Artificial Sequence: Synthetic oligonucleotide
uagucggcccuucauggcu

SEQ ID NO: 1300931 - RNA, 19 nt, Artificial Sequence
  Description of Artificial Sequence: Synthetic oligonucleotide
auggaccuuccccaaaaca

SEQ ID NO: 1300932 - RNA, 19 nt, Artificial Sequence
  Description of Artificial Sequence: Synthetic oligonucleotide
ggcaugagaauagaagaag

SEQ ID NO: 1300933 - RNA, 19 nt, Artificial Sequence
  Description of Artificial Sequence: Synthetic oligonucleotide
uccccggacaccgagguug

SEQ ID NO: 1300934 - RNA, 19 nt, Artificial Sequence
  Description of Artificial Sequence: Synthetic oligonucleotide
cacucauguucucaucccc

SEQ ID NO: 1300935 - RNA, 19 nt, Artificial Sequence
  Description of Artificial Sequence: Synthetic oligonucleotide
cucguagucccggugauug

SEQ ID NO: 1300936 - RNA, 19 nt, Artificial Sequence
  Description of Artificial Sequence: Synthetic oligonucleotide
ucugccgccuucaguaagu

SEQ ID NO: 1300937 - RNA, 19 nt, Artificial Sequence
  Description of Artificial Sequence: Synthetic oligonucleotide
agccauuccccggacaccg

SEQ ID NO: 1300938 - RNA, 19 nt, Artificial Sequence
  Description of Artificial Sequence: Synthetic oligonucleotide
cuuuaugcagggauuccca

SEQ ID NO: 1300939 - RNA, 19 nt, Artificial Sequence
  Description of Artificial Sequence: Synthetic oligonucleotide
ucuuggccgauugcaagag

SEQ ID NO: 1300940 - RNA, 19 nt, Artificial Sequence
  Description of Artificial Sequence: Synthetic oligonucleotide
uucgucacagucagugguc

SEQ ID NO: 1300941 - RNA, 19 nt, Artificial Sequence
  Description of Artificial Sequence: Synthetic oligonucleotide
ugcgugcuccagauggaag

SEQ ID NO: 1300942 - RNA, 19 nt, Artificial Sequence
  Description of Artificial Sequence: Synthetic oligonucleotide
agauggucuuggccgauug

SEQ ID NO: 1300943 - RNA, 19 nt, Artificial Sequence
  Description of Artificial Sequence: Synthetic oligonucleotide
ucauguucucauccccgga

SEQ ID NO: 1300944 - RNA, 19 nt, Artificial Sequence
  Description of Artificial Sequence: Synthetic oligonucleotide
uguuucaguguggaucugu

SEQ ID NO: 1300945 - RNA, 19 nt, Artificial Sequence
  Description of Artificial Sequence: Synthetic oligonucleotide
gcgggagggauuucgaagg

SEQ ID NO: 1300946 - RNA, 19 nt, Artificial Sequence
  Description of Artificial Sequence: Synthetic oligonucleotide
cauggacugccuaucacca

SEQ ID NO: 1300947 - RNA, 19 nt, Artificial Sequence
  Description of Artificial Sequence: Synthetic oligonucleotide
cucugaccagucuuggcac

SEQ ID NO: 1300948 - RNA, 19 nt, Artificial Sequence
  Description of Artificial Sequence: Synthetic oligonucleotide
gaucauggacugccuauca

SEQ ID NO: 1300949 - RNA, 19 nt, Artificial Sequence
  Description of Artificial Sequence: Synthetic oligonucleotide
gcugagaguacaugagucc

SEQ ID NO: 1300950 - RNA, 19 nt, Artificial Sequence
  Description of Artificial Sequence: Synthetic oligonucleotide
gauggucuuggccgauugc

SEQ ID NO: 1300951 - RNA, 19 nt, Artificial Sequence
  Description of Artificial Sequence: Synthetic oligonucleotide
cacaaucagcugaugacca

SEQ ID NO: 1300952 - RNA, 19 nt, Artificial Sequence
  Description of Artificial Sequence: Synthetic oligonucleotide
ucugauucaccagggccug

SEQ ID NO: 1300953 - RNA, 19 nt, Artificial Sequence
  Description of Artificial Sequence: Synthetic oligonucleotide
aaagccugaguuggaauua

SEQ ID NO: 1300954 - RNA, 19 nt, Artificial Sequence
  Description of Artificial Sequence: Synthetic oligonucleotide
uucccgauuuuccuuucaa

SEQ ID NO: 1300955 - RNA, 19 nt, Artificial Sequence
  Description of Artificial Sequence: Synthetic oligonucleotide
cagaucauuuagccuuugc

SEQ ID NO: 1300956 - RNA, 19 nt, Artificial Sequence
  Description of Artificial Sequence: Synthetic oligonucleotide
uucagggcugugucguacc

SEQ ID NO: 1300957 - RNA, 19 nt, Artificial Sequence
  Description of Artificial Sequence: Synthetic oligonucleotide
accaauguagggccucuga

SEQ ID NO: 1300958 - RNA, 19 nt, Artificial Sequence
  Description of Artificial Sequence: Synthetic oligonucleotide
ugcucuugcaaauccgguu

SEQ ID NO: 1300959 - RNA, 19 nt, Artificial Sequence
  Description of Artificial Sequence: Synthetic oligonucleotide
aguguaaaggucacccaca

SEQ ID NO: 1300960 - RNA, 19 nt, Artificial Sequence
  Description of Artificial Sequence: Synthetic oligonucleotide
uuagcucaaugaugcacau

SEQ ID NO: 1300961 - RNA, 19 nt, Artificial Sequence
  Description of Artificial Sequence: Synthetic oligonucleotide
cagugucaaaagcucgggc

SEQ ID NO: 1300962 - RNA, 19 nt, Artificial Sequence
  Description of Artificial Sequence: Synthetic oligonucleotide
auuccccggacaccgaggu

SEQ ID NO: 1300963 - RNA, 19 nt, Artificial Sequence
  Description of Artificial Sequence: Synthetic oligonucleotide
uuuagccuuugcacuucga

SEQ ID NO: 1300964 - RNA, 19 nt, Artificial Sequence
  Description of Artificial Sequence: Synthetic oligonucleotide
uccuguacuccaucauacu

SEQ ID NO: 1300965 - RNA, 19 nt, Artificial Sequence
  Description of Artificial Sequence: Synthetic oligonucleotide
ccggugauuguccaugugg

SEQ ID NO: 1300966 - RNA, 19 nt, Artificial Sequence
  Description of Artificial Sequence: Synthetic oligonucleotide
uggucucuagggcccaugu

SEQ ID NO: 1300967 - RNA, 19 nt, Artificial Sequence
  Description of Artificial Sequence: Synthetic oligonucleotide
cuagucggcccuucauggc

SEQ ID NO: 1300968 - RNA, 19 nt, Artificial Sequence
  Description of Artificial Sequence: Synthetic oligonucleotide
cagagagagucuuuaugca

SEQ ID NO: 1300969 - RNA, 19 nt, Artificial Sequence
  Description of Artificial Sequence: Synthetic oligonucleotide
ucacuucgcuucucgcuug

SEQ ID NO: 1300970 - RNA, 19 nt, Artificial Sequence
  Description of Artificial Sequence: Synthetic oligonucleotide
cauuccccggacaccgagg

SEQ ID NO: 1300971 - RNA, 19 nt, Artificial Sequence
  Description of Artificial Sequence: Synthetic oligonucleotide
gagggauuucgaagguucc

SEQ ID NO: 1300972 - RNA, 19 nt, Artificial Sequence
  Description of Artificial Sequence: Synthetic oligonucleotide
gaucuuauuggggaguuau

SEQ ID NO: 1300973 - RNA, 19 nt, Artificial Sequence
  Description of Artificial Sequence: Synthetic oligonucleotide
ucagggcugugucguacca

SEQ ID NO: 1300974 - RNA, 19 nt, Artificial Sequence
  Description of Artificial Sequence: Synthetic oligonucleotide
ggucuuggccgauugcaag

SEQ ID NO: 1300975 - RNA, 19 nt, Artificial Sequence
  Description of Artificial Sequence: Synthetic oligonucleotide
gguguggccgaagaugggg

SEQ ID NO: 1300976 - RNA, 19 nt, Artificial Sequence
  Description of Artificial Sequence: Synthetic oligonucleotide
aggcccaugcucuugcaaa

SEQ ID NO: 1300977 - RNA, 19 nt, Artificial Sequence
  Description of Artificial Sequence: Synthetic oligonucleotide
aaggcccaugcucuugcaa

SEQ ID NO: 1300978 - RNA, 19 nt, Artificial Sequence
  Description of Artificial Sequence: Synthetic oligonucleotide
caguacauaucggggcugg

SEQ ID NO: 1300979 - RNA, 19 nt, Artificial Sequence
  Description of Artificial Sequence: Synthetic oligonucleotide
aguguggaucuguggguca

SEQ ID NO: 1300980 - RNA, 19 nt, Artificial Sequence
  Description of Artificial Sequence: Synthetic oligonucleotide
auggacugccuaucaccag

SEQ ID NO: 1300981 - RNA, 19 nt, Artificial Sequence
  Description of Artificial Sequence: Synthetic oligonucleotide
ugguuggcuagucggcccu

SEQ ID NO: 1300982 - RNA, 19 nt, Artificial Sequence
  Description of Artificial Sequence: Synthetic oligonucleotide
gccagagagagucuuuaug

SEQ ID NO: 1300983 - RNA, 19 nt, Artificial Sequence
  Description of Artificial Sequence: Synthetic oligonucleotide
ugucaaaagcucgggccac

SEQ ID NO: 1300984 - RNA, 19 nt, Artificial Sequence
  Description of Artificial Sequence: Synthetic oligonucleotide
caaaagcucgggccacuag

SEQ ID NO: 1300985 - RNA, 19 nt, Artificial Sequence
  Description of Artificial Sequence: Synthetic oligonucleotide
ggcgggagggauuucgaag

SEQ ID NO: 1300986 - RNA, 19 nt, Artificial Sequence
  Description of Artificial Sequence: Synthetic oligonucleotide
ucggggcugguccuguacu

SEQ ID NO: 1300987 - RNA, 19 nt, Artificial Sequence
  Description of Artificial Sequence: Synthetic oligonucleotide
cucuugcaaauccgguuac

SEQ ID NO: 1300988 - RNA, 19 nt, Artificial Sequence
  Description of Artificial Sequence: Synthetic oligonucleotide
acauaucggggcugguccu

SEQ ID NO: 1300989 - RNA, 19 nt, Artificial Sequence
  Description of Artificial Sequence: Synthetic oligonucleotide
caccacaaucagcugauga

SEQ ID NO: 1300990 - RNA, 19 nt, Artificial Sequence
  Description of Artificial Sequence: Synthetic oligonucleotide
gauuucgaagguuccacuu

SEQ ID NO: 1300991 - RNA, 19 nt, Artificial Sequence
  Description of Artificial Sequence: Synthetic oligonucleotide
gucuuggccgauugcaaga

SEQ ID NO: 1300992 - RNA, 19 nt, Artificial Sequence
  Description of Artificial Sequence: Synthetic oligonucleotide
cucugauucaccagggccu

SEQ ID NO: 1300993 - RNA, 19 nt, Artificial Sequence
  Description of Artificial Sequence: Synthetic oligonucleotide
uuggcuagucggcccuuca

SEQ ID NO: 1300994 - RNA, 19 nt, Artificial Sequence
  Description of Artificial Sequence: Synthetic oligonucleotide
uucucgcuuggguauccac

SEQ ID NO: 1300995 - RNA, 19 nt, Artificial Sequence
  Description of Artificial Sequence: Synthetic oligonucleotide
ucgcuucucgcuuggguau

SEQ ID NO: 1300996 - RNA, 19 nt, Artificial Sequence
  Description of Artificial Sequence: Synthetic oligonucleotide
uugccauuggagugaucgu

SEQ ID NO: 1300997 - RNA, 19 nt, Artificial Sequence
  Description of Artificial Sequence: Synthetic oligonucleotide
auguggucauggucucuag

SEQ ID NO: 1300998 - RNA, 19 nt, Artificial Sequence
  Description of Artificial Sequence: Synthetic oligonucleotide
uggaucugugggucagugu

SEQ ID NO: 1300999 - RNA, 19 nt, Artificial Sequence
  Description of Artificial Sequence: Synthetic oligonucleotide
aggcaugagaauagaagaa

SEQ ID NO: 1301000 - RNA, 19 nt, Artificial Sequence
  Description of Artificial Sequence: Synthetic oligonucleotide
ucgucacagucaguggucu

SEQ ID NO: 1301001 - RNA, 19 nt, Artificial Sequence
  Description of Artificial Sequence: Synthetic oligonucleotide
gcaugagaauagaagaaga

SEQ ID NO: 1301002 - RNA, 19 nt, Artificial Sequence
  Description of Artificial Sequence: Synthetic oligonucleotide
agcugccuaggcugucuuc

SEQ ID NO: 1301003 - RNA, 19 nt, Artificial Sequence
  Description of Artificial Sequence: Synthetic oligonucleotide
cuuggccgauugcaagagc

SEQ ID NO: 1301004 - RNA, 19 nt, Artificial Sequence
  Description of Artificial Sequence: Synthetic oligonucleotide
ccaugcucuugcaaauccg

SEQ ID NO: 1301005 - RNA, 19 nt, Artificial Sequence
  Description of Artificial Sequence: Synthetic oligonucleotide
aagcucgggccacuaggau

SEQ ID NO: 1301006 - RNA, 19 nt, Artificial Sequence
  Description of Artificial Sequence: Synthetic oligonucleotide
ggucaccaaacacuggcca

SEQ ID NO: 1301007 - RNA, 19 nt, Artificial Sequence
  Description of Artificial Sequence: Synthetic oligonucleotide
aagccugaguuggaauuau

SEQ ID NO: 1301008 - RNA, 19 nt, Artificial Sequence
  Description of Artificial Sequence: Synthetic oligonucleotide
guagugcuccagguggaag

SEQ ID NO: 1301009 - RNA, 19 nt, Artificial Sequence
  Description of Artificial Sequence: Synthetic oligonucleotide
ccggaguucucugaaaggc

SEQ ID NO: 1301010 - RNA, 19 nt, Artificial Sequence
  Description of Artificial Sequence: Synthetic oligonucleotide
uguucucggggcucaggau

SEQ ID NO: 1301011 - RNA, 19 nt, Artificial Sequence
  Description of Artificial Sequence: Synthetic oligonucleotide
cacccucaugguaucuuac

SEQ ID NO: 1301012 - RNA, 19 nt, Artificial Sequence
  Description of Artificial Sequence: Synthetic oligonucleotide
ccaccuucgucacagucag

SEQ ID NO: 1301013 - RNA, 19 nt, Artificial Sequence
  Description of Artificial Sequence: Synthetic oligonucleotide
ggggccggcugccagagag

SEQ ID NO: 1301014 - RNA, 19 nt, Artificial Sequence
  Description of Artificial Sequence: Synthetic oligonucleotide
ccucaagauggucuuggcc

SEQ ID NO: 1301015 - RNA, 19 nt, Artificial Sequence
  Description of Artificial Sequence: Synthetic oligonucleotide
aucgcggacaaagccugag

SEQ ID NO: 1301016 - RNA, 19 nt, Artificial Sequence
  Description of Artificial Sequence: Synthetic oligonucleotide
agggauuucgaagguucca

SEQ ID NO: 1301017 - RNA, 19 nt, Artificial Sequence
  Description of Artificial Sequence: Synthetic oligonucleotide
ucguaccaauguagggccu

SEQ ID NO: 1301018 - RNA, 19 nt, Artificial Sequence
  Description of Artificial Sequence: Synthetic oligonucleotide
agggaucuuauuggggagu

SEQ ID NO: 1301019 - RNA, 19 nt, Artificial Sequence
  Description of Artificial Sequence: Synthetic oligonucleotide
agguuuaggccagugucaa

SEQ ID NO: 1301020 - RNA, 19 nt, Artificial Sequence
  Description of Artificial Sequence: Synthetic oligonucleotide
augagguguggccgaagau

SEQ ID NO: 1301021 - RNA, 19 nt, Artificial Sequence
  Description of Artificial Sequence: Synthetic oligonucleotide
cuuugcacuucgagggcca

SEQ ID NO: 1301022 - RNA, 19 nt, Artificial Sequence
  Description of Artificial Sequence: Synthetic oligonucleotide
gaaucucggucccauuccu

SEQ ID NO: 1301023 - RNA, 19 nt, Artificial Sequence
  Description of Artificial Sequence: Synthetic oligonucleotide
cacuucgcuucucgcuugg

SEQ ID NO: 1301024 - RNA, 19 nt, Artificial Sequence
  Description of Artificial Sequence: Synthetic oligonucleotide
cuucgucacagucaguggu

SEQ ID NO: 1301025 - RNA, 19 nt, Artificial Sequence
  Description of Artificial Sequence: Synthetic oligonucleotide
ggcuagucggcccuucaug

SEQ ID NO: 1301026 - RNA, 19 nt, Artificial Sequence
  Description of Artificial Sequence: Synthetic oligonucleotide
ugaugaccagaacgcucaa

SEQ ID NO: 1301027 - RNA, 19 nt, Artificial Sequence
  Description of Artificial Sequence: Synthetic oligonucleotide
gccugaguuggaauuauac

SEQ ID NO: 1301028 - RNA, 19 nt, Artificial Sequence
  Description of Artificial Sequence: Synthetic oligonucleotide
ccaauguagggccucugac

SEQ ID NO: 1301029 - RNA, 19 nt, Artificial Sequence
  Description of Artificial Sequence: Synthetic oligonucleotide
uucuggcuaugaggugugg

SEQ ID NO: 1301030 - RNA, 19 nt, Artificial Sequence
  Description of Artificial Sequence: Synthetic oligonucleotide
cuucagggcugugucguac

SEQ ID NO: 1301031 - RNA, 19 nt, Artificial Sequence
  Description of Artificial Sequence: Synthetic oligonucleotide
ucgcuuggguauccacugu

SEQ ID NO: 1301032 - RNA, 19 nt, Artificial Sequence
  Description of Artificial Sequence: Synthetic oligonucleotide
agcugaugaccagaacgcu

SEQ ID NO: 1301033 - RNA, 19 nt, Artificial Sequence
  Description of Artificial Sequence: Synthetic oligonucleotide
gggauuucgaagguuccac

SEQ ID NO: 1301034 - RNA, 19 nt, Artificial Sequence
  Description of Artificial Sequence: Synthetic oligonucleotide
uggcuagucggcccuucau

SEQ ID NO: 1301035 - RNA, 19 nt, Artificial Sequence
  Description of Artificial Sequence: Synthetic oligonucleotide
ucaaaagcucgggccacua

SEQ ID NO: 1301036 - RNA, 19 nt, Artificial Sequence
  Description of Artificial Sequence: Synthetic oligonucleotide
cacagacccguccauagcu

SEQ ID NO: 1301037 - RNA, 19 nt, Artificial Sequence
  Description of Artificial Sequence: Synthetic oligonucleotide
gcucuugcaaauccgguua

SEQ ID NO: 1301038 - RNA, 19 nt, Artificial Sequence
  Description of Artificial Sequence: Synthetic oligonucleotide
aguuggaauuauacuugau

SEQ ID NO: 1301039 - RNA, 19 nt, Artificial Sequence
  Description of Artificial Sequence: Synthetic oligonucleotide
cugaaaggcggaacagcaa

SEQ ID NO: 1301040 - RNA, 19 nt, Artificial Sequence
  Description of Artificial Sequence: Synthetic oligonucleotide
gccgauugcaagagcuugg

SEQ ID NO: 1301041 - RNA, 19 nt, Artificial Sequence
  Description of Artificial Sequence: Synthetic oligonucleotide
agccgagggccucggcagg

SEQ ID NO: 1301042 - RNA, 19 nt, Artificial Sequence
  Description of Artificial Sequence: Synthetic oligonucleotide
aucugugggucaguguaaa

SEQ ID NO: 1301043 - RNA, 19 nt, Artificial Sequence
  Description of Artificial Sequence: Synthetic oligonucleotide
cggaguucucugaaaggcg

SEQ ID NO: 1301044 - RNA, 19 nt, Artificial Sequence
  Description of Artificial Sequence: Synthetic oligonucleotide
gggaguuauuccuccaucu

SEQ ID NO: 1301045 - RNA, 19 nt, Artificial Sequence
  Description of Artificial Sequence: Synthetic oligonucleotide
aucuuaccauggccagaug

SEQ ID NO: 1301046 - RNA, 19 nt, Artificial Sequence
  Description of Artificial Sequence: Synthetic oligonucleotide
guaucuuaccauggccaga

SEQ ID NO: 1301047 - RNA, 19 nt, Artificial Sequence
  Description of Artificial Sequence: Synthetic oligonucleotide
gcgugcuccagauggaaga

SEQ ID NO: 1301048 - RNA, 19 nt, Artificial Sequence
  Description of Artificial Sequence: Synthetic oligonucleotide
gagccauuccccggacacc

SEQ ID NO: 1301049 - RNA, 19 nt, Artificial Sequence
  Description of Artificial Sequence: Synthetic oligonucleotide
uaccaauguagggccucug

SEQ ID NO: 1301050 - RNA, 19 nt, Artificial Sequence
  Description of Artificial Sequence: Synthetic oligonucleotide
augcucuugcaaauccggu

SEQ ID NO: 1301051 - RNA, 19 nt, Artificial Sequence
  Description of Artificial Sequence: Synthetic oligonucleotide
gucaucgcggacaaagccu

SEQ ID NO: 1301052 - RNA, 19 nt, Artificial Sequence
  Description of Artificial Sequence: Synthetic oligonucleotide
ggccgauugcaagagcuug

SEQ ID NO: 1301053 - RNA, 19 nt, Artificial Sequence
  Description of Artificial Sequence: Synthetic oligonucleotide
gacuucccgauuuuccuuu

SEQ ID NO: 1301054 - RNA, 19 nt, Artificial Sequence
  Description of Artificial Sequence: Synthetic oligonucleotide
ccacuaggaucauggacug

SEQ ID NO: 1301055 - RNA, 19 nt, Artificial Sequence
  Description of Artificial Sequence: Synthetic oligonucleotide
ugaccagucuuggcaccug

SEQ ID NO: 1301056 - RNA, 19 nt, Artificial Sequence
  Description of Artificial Sequence: Synthetic oligonucleotide
gcaggcgggagggauuucg

SEQ ID NO: 1301057 - RNA, 19 nt, Artificial Sequence
  Description of Artificial Sequence: Synthetic oligonucleotide
aagauggucuuggccgauu

SEQ ID NO: 1301058 - RNA, 19 nt, Artificial Sequence
  Description of Artificial Sequence: Synthetic oligonucleotide
acuucgcuucucgcuuggg

SEQ ID NO: 1301059 - RNA, 19 nt, Artificial Sequence
  Description of Artificial Sequence: Synthetic oligonucleotide
uucaggcuuccgguugcca

SEQ ID NO: 1301060 - RNA, 19 nt, Artificial Sequence
  Description of Artificial Sequence: Synthetic oligonucleotide
cuaugagguguggccgaag

SEQ ID NO: 1301061 - RNA, 19 nt, Artificial Sequence
  Description of Artificial Sequence: Synthetic oligonucleotide
uagcucaaugaugcacauc

SEQ ID NO: 1301062 - RNA, 19 nt, Artificial Sequence
  Description of Artificial Sequence: Synthetic oligonucleotide
ggaccuuccccaaaacaga

SEQ ID NO: 1301063 - RNA, 19 nt, Artificial Sequence
  Description of Artificial Sequence: Synthetic oligonucleotide
gccgaagauggggaggaag

SEQ ID NO: 1301064 - RNA, 19 nt, Artificial Sequence
  Description of Artificial Sequence: Synthetic oligonucleotide
gcugaugaccagaacgcuc

SEQ ID NO: 1301065 - RNA, 19 nt, Artificial Sequence
  Description of Artificial Sequence: Synthetic oligonucleotide
gucacuucgcuucucgcuu

SEQ ID NO: 1301066 - RNA, 19 nt, Artificial Sequence
  Description of Artificial Sequence: Synthetic oligonucleotide
ggaucauggacugccuauc

SEQ ID NO: 1301067 - RNA, 19 nt, Artificial Sequence
  Description of Artificial Sequence: Synthetic oligonucleotide
ggcugugucguaccaaugu

SEQ ID NO: 1301068 - RNA, 19 nt, Artificial Sequence
  Description of Artificial Sequence: Synthetic oligonucleotide
gucagucggauguugucau

SEQ ID NO: 1301069 - RNA, 19 nt, Artificial Sequence
  Description of Artificial Sequence: Synthetic oligonucleotide
cauguggucauggucucua

SEQ ID NO: 1301070 - RNA, 19 nt, Artificial Sequence
  Description of Artificial Sequence: Synthetic oligonucleotide
cuucccgauuuuccuuuca

SEQ ID NO: 1301071 - RNA, 19 nt, Artificial Sequence
  Description of Artificial Sequence: Synthetic oligonucleotide
aagcgcccacccucauggu

SEQ ID NO: 1301072 - RNA, 19 nt, Artificial Sequence
  Description of Artificial Sequence: Synthetic oligonucleotide
aggcgggagggauuucgaa

SEQ ID NO: 1301073 - RNA, 19 nt, Artificial Sequence
  Description of Artificial Sequence: Synthetic oligonucleotide
cacuaggaucauggacugc

SEQ ID NO: 1301074 - RNA, 19 nt, Artificial Sequence
  Description of Artificial Sequence: Synthetic oligonucleotide
auaucggggcugguccugu

SEQ ID NO: 1301075 - RNA, 19 nt, Artificial Sequence
  Description of Artificial Sequence: Synthetic oligonucleotide
agcgcccacccucauggua

SEQ ID NO: 1301076 - RNA, 19 nt, Artificial Sequence
  Description of Artificial Sequence: Synthetic oligonucleotide
gcugccuaggcugucuuca

SEQ ID NO: 1301077 - RNA, 19 nt, Artificial Sequence
  Description of Artificial Sequence: Synthetic oligonucleotide
ccugaguuggaauuauacu

SEQ ID NO: 1301078 - RNA, 19 nt, Artificial Sequence
  Description of Artificial Sequence: Synthetic oligonucleotide
ggucacuucgcuucucgcu

SEQ ID NO: 1301079 - RNA, 19 nt, Artificial Sequence
  Description of Artificial Sequence: Synthetic oligonucleotide
ccccucaagauggucuugg

SEQ ID NO: 1301080 - RNA, 19 nt, Artificial Sequence
  Description of Artificial Sequence: Synthetic oligonucleotide
ccagaacgcucaaauguga

SEQ ID NO: 1301081 - RNA, 19 nt, Artificial Sequence
  Description of Artificial Sequence: Synthetic oligonucleotide
gccuuugcacuucgagggc

SEQ ID NO: 1301082 - RNA, 19 nt, Artificial Sequence
  Description of Artificial Sequence: Synthetic oligonucleotide
ccgauuuuccuuucaaggu

SEQ ID NO: 1301083 - RNA, 19 nt, Artificial Sequence
  Description of Artificial Sequence: Synthetic oligonucleotide
cccucaugguaucuuacca

SEQ ID NO: 1301084 - RNA, 19 nt, Artificial Sequence
  Description of Artificial Sequence: Synthetic oligonucleotide
gcaaauccgguuacaggca

SEQ ID NO: 1301085 - RNA, 19 nt, Artificial Sequence
  Description of Artificial Sequence: Synthetic oligonucleotide
cagcugagaguacaugagu

SEQ ID NO: 1301086 - RNA, 19 nt, Artificial Sequence
  Description of Artificial Sequence: Synthetic oligonucleotide
aucuuauuggggaguuauu

SEQ ID NO: 1301087 - RNA, 19 nt, Artificial Sequence
  Description of Artificial Sequence: Synthetic oligonucleotide
cugagguuuaggccagugu

SEQ ID NO: 1301088 - RNA, 19 nt, Artificial Sequence
  Description of Artificial Sequence: Synthetic oligonucleotide
ggauuucgaagguuccacu

SEQ ID NO: 1301089 - RNA, 19 nt, Artificial Sequence
  Description of Artificial Sequence: Synthetic oligonucleotide
ggucaguguaaaggucacc

SEQ ID NO: 1301090 - RNA, 19 nt, Artificial Sequence
  Description of Artificial Sequence: Synthetic oligonucleotide
gcugugucguaccaaugua

SEQ ID NO: 1301091 - RNA, 19 nt, Artificial Sequence
  Description of Artificial Sequence: Synthetic oligonucleotide
ccguccauagcugccuagg

SEQ ID NO: 1301092 - RNA, 19 nt, Artificial Sequence
  Description of Artificial Sequence: Synthetic oligonucleotide
cuaggaucauggacugccu

SEQ ID NO: 1301093 - RNA, 19 nt, Artificial Sequence
  Description of Artificial Sequence: Synthetic oligonucleotide
caaauccgguuacaggcau

SEQ ID NO: 1301094 - RNA, 19 nt, Artificial Sequence
  Description of Artificial Sequence: Synthetic oligonucleotide
gaccagucuuggcaccugu

SEQ ID NO: 1301095 - RNA, 19 nt, Artificial Sequence
  Description of Artificial Sequence: Synthetic oligonucleotide
ggccggcugccagagagag

SEQ ID NO: 1301096 - RNA, 19 nt, Artificial Sequence
  Description of Artificial Sequence: Synthetic oligonucleotide
ccauuccccggacaccgag

SEQ ID NO: 1301097 - RNA, 19 nt, Artificial Sequence
  Description of Artificial Sequence: Synthetic oligonucleotide
gcaguacauaucggggcug

SEQ ID NO: 1301098 - RNA, 19 nt, Artificial Sequence
  Description of Artificial Sequence: Synthetic oligonucleotide
gggucaguguaaaggucac

SEQ ID NO: 1301099 - RNA, 19 nt, Artificial Sequence
  Description of Artificial Sequence: Synthetic oligonucleotide
cuucugccgccuucaguaa

SEQ ID NO: 1301100 - RNA, 19 nt, Artificial Sequence
  Description of Artificial Sequence: Synthetic oligonucleotide
ucggcaggugcaggcggga

SEQ ID NO: 1301101 - RNA, 19 nt, Artificial Sequence
  Description of Artificial Sequence: Synthetic oligonucleotide
gccgccuucaguaaguaau

SEQ ID NO: 1301102 - RNA, 19 nt, Artificial Sequence
  Description of Artificial Sequence: Synthetic oligonucleotide
ccucggcaggugcaggcgg

SEQ ID NO: 1301103 - RNA, 19 nt, Artificial Sequence
  Description of Artificial Sequence: Synthetic oligonucleotide
uggcugaaucucgguccca

SEQ ID NO: 1301104 - RNA, 19 nt, Artificial Sequence
  Description of Artificial Sequence: Synthetic oligonucleotide
caggcgggagggauuucga

SEQ ID NO: 1301105 - RNA, 19 nt, Artificial Sequence
  Description of Artificial Sequence: Synthetic oligonucleotide
gcuuccgguugccauugga

SEQ ID NO: 1301106 - RNA, 19 nt, Artificial Sequence
  Description of Artificial Sequence: Synthetic oligonucleotide
cguccauagcugccuaggc

SEQ ID NO: 1301107 - RNA, 19 nt, Artificial Sequence
  Description of Artificial Sequence: Synthetic oligonucleotide
uaucggggcugguccugua

SEQ ID NO: 1301108 - RNA, 19 nt, Artificial Sequence
  Description of Artificial Sequence: Synthetic oligonucleotide
ucggcccuucauggcuucc

SEQ ID NO: 1301109 - RNA, 19 nt, Artificial Sequence
  Description of Artificial Sequence: Synthetic oligonucleotide
caaggcccaugcucuugca

SEQ ID NO: 1301110 - RNA, 19 nt, Artificial Sequence
  Description of Artificial Sequence: Synthetic oligonucleotide
uuccccggacaccgagguu

SEQ ID NO: 1301111 - RNA, 19 nt, Artificial Sequence
  Description of Artificial Sequence: Synthetic oligonucleotide
caucgcggacaaagccuga

SEQ ID NO: 1301112 - RNA, 19 nt, Artificial Sequence
  Description of Artificial Sequence: Synthetic oligonucleotide
gcuucucgcuuggguaucc

SEQ ID NO: 1301113 - RNA, 19 nt, Artificial Sequence
  Description of Artificial Sequence: Synthetic oligonucleotide
guaccaauguagggccucu

SEQ ID NO: 1301114 - RNA, 19 nt, Artificial Sequence
  Description of Artificial Sequence: Synthetic oligonucleotide
cugucugggcugagguuua

SEQ ID NO: 1301115 - RNA, 19 nt, Artificial Sequence
  Description of Artificial Sequence: Synthetic oligonucleotide
acccguccauagcugccua

SEQ ID NO: 1301116 - RNA, 19 nt, Artificial Sequence
  Description of Artificial Sequence: Synthetic oligonucleotide
gguuuaggccagugucaaa

SEQ ID NO: 1301117 - RNA, 19 nt, Artificial Sequence
  Description of Artificial Sequence: Synthetic oligonucleotide
gcucaaaugugaaguggcu

SEQ ID NO: 1301118 - RNA, 19 nt, Artificial Sequence
  Description of Artificial Sequence: Synthetic oligonucleotide
ccauguuaucgaggucacc

SEQ ID NO: 1301119 - RNA, 19 nt, Artificial Sequence
  Description of Artificial Sequence: Synthetic oligonucleotide
cagcugcgugcuccagaug

SEQ ID NO: 1301120 - RNA, 19 nt, Artificial Sequence
  Description of Artificial Sequence: Synthetic oligonucleotide
cgcuuggguauccacuguc

SEQ ID NO: 1301121 - RNA, 19 nt, Artificial Sequence
  Description of Artificial Sequence: Synthetic oligonucleotide
cgauugcaagagcuuggug

SEQ ID NO: 1301122 - RNA, 19 nt, Artificial Sequence
  Description of Artificial Sequence: Synthetic oligonucleotide
gucaaaagcucgggccacu

SEQ ID NO: 1301123 - RNA, 19 nt, Artificial Sequence
  Description of Artificial Sequence: Synthetic oligonucleotide
cccguccauagcugccuag

SEQ ID NO: 1301124 - RNA, 19 nt, Artificial Sequence
  Description of Artificial Sequence: Synthetic oligonucleotide
cugcgugcuccagauggaa

SEQ ID NO: 1301125 - RNA, 19 nt, Artificial Sequence
  Description of Artificial Sequence: Synthetic oligonucleotide
ccaaaacagacuucccgau

SEQ ID NO: 1301126 - RNA, 19 nt, Artificial Sequence
  Description of Artificial Sequence: Synthetic oligonucleotide
cauccaggucacuucgcuu

SEQ ID NO: 1301127 - RNA, 19 nt, Artificial Sequence
  Description of Artificial Sequence: Synthetic oligonucleotide
gaagagggguuggccuucu

SEQ ID NO: 1301128 - RNA, 19 nt, Artificial Sequence
  Description of Artificial Sequence: Synthetic oligonucleotide
ccucaugguaucuuaccau

SEQ ID NO: 1301129 - RNA, 19 nt, Artificial Sequence
  Description of Artificial Sequence: Synthetic oligonucleotide
cguaccaauguagggccuc

SEQ ID NO: 1301130 - RNA, 19 nt, Artificial Sequence
  Description of Artificial Sequence: Synthetic oligonucleotide
gguauccacuguccccacu

SEQ ID NO: 1301131 - RNA, 19 nt, Artificial Sequence
  Description of Artificial Sequence: Synthetic oligonucleotide
cccggugauuguccaugug

SEQ ID NO: 1301132 - RNA, 19 nt, Artificial Sequence
  Description of Artificial Sequence: Synthetic oligonucleotide
gacugccuaucaccagcuu

SEQ ID NO: 1301133 - RNA, 19 nt, Artificial Sequence
  Description of Artificial Sequence: Synthetic oligonucleotide
ggcccaugcucuugcaaau

SEQ ID NO: 1301134 - RNA, 19 nt, Artificial Sequence
  Description of Artificial Sequence: Synthetic oligonucleotide
ccacccucaugguaucuua

SEQ ID NO: 1301135 - RNA, 19 nt, Artificial Sequence
  Description of Artificial Sequence: Synthetic oligonucleotide
gcugcgugcuccagaugga

SEQ ID NO: 1301136 - RNA, 19 nt, Artificial Sequence
  Description of Artificial Sequence: Synthetic oligonucleotide
ccgagguugccaucuccaa

SEQ ID NO: 1301137 - RNA, 19 nt, Artificial Sequence
  Description of Artificial Sequence: Synthetic oligonucleotide
cugccuaggcugucuucau

SEQ ID NO: 1301138 - RNA, 19 nt, Artificial Sequence
  Description of Artificial Sequence: Synthetic oligonucleotide
ggcugaaucucggucccau

SEQ ID NO: 1301139 - RNA, 19 nt, Artificial Sequence
  Description of Artificial Sequence: Synthetic oligonucleotide
ggucucuagggcccauguu

SEQ ID NO: 1301140 - RNA, 19 nt, Artificial Sequence
  Description of Artificial Sequence: Synthetic oligonucleotide
cugccgccuucaguaagua

SEQ ID NO: 1301141 - RNA, 19 nt, Artificial Sequence
  Description of Artificial Sequence: Synthetic oligonucleotide
gcgcccacccucaugguau

SEQ ID NO: 1301142 - RNA, 19 nt, Artificial Sequence
  Description of Artificial Sequence: Synthetic oligonucleotide
ccgauugcaagagcuuggu

SEQ ID NO: 1301143 - RNA, 19 nt, Artificial Sequence
  Description of Artificial Sequence: Synthetic oligonucleotide
gggagggauuucgaagguu

SEQ ID NO: 1301144 - RNA, 19 nt, Artificial Sequence
  Description of Artificial Sequence: Synthetic oligonucleotide
gguugccauuggagugauc

SEQ ID NO: 1301145 - RNA, 19 nt, Artificial Sequence
  Description of Artificial Sequence: Synthetic oligonucleotide
gggccggcugccagagaga

SEQ ID NO: 1301146 - RNA, 19 nt, Artificial Sequence
  Description of Artificial Sequence: Synthetic oligonucleotide
caccuucgucacagucagu

SEQ ID NO: 1301147 - RNA, 19 nt, Artificial Sequence
  Description of Artificial Sequence: Synthetic oligonucleotide
cgcuucucgcuuggguauc

SEQ ID NO: 1301148 - RNA, 19 nt, Artificial Sequence
  Description of Artificial Sequence: Synthetic oligonucleotide
cauggucucuagggcccau

SEQ ID NO: 1301149 - RNA, 19 nt, Artificial Sequence
  Description of Artificial Sequence: Synthetic oligonucleotide
cggacaccgagguugccau

SEQ ID NO: 1301150 - RNA, 19 nt, Artificial Sequence
  Description of Artificial Sequence: Synthetic oligonucleotide
cgggagggauuucgaaggu

SEQ ID NO: 1301151 - RNA, 19 nt, Artificial Sequence
  Description of Artificial Sequence: Synthetic oligonucleotide
ccauguggucauggucucu

SEQ ID NO: 1301152 - RNA, 19 nt, Artificial Sequence
  Description of Artificial Sequence: Synthetic oligonucleotide
gguuggcuagucggcccuu

SEQ ID NO: 1301153 - RNA, 19 nt, Artificial Sequence
  Description of Artificial Sequence: Synthetic oligonucleotide
cccacccucaugguaucuu

SEQ ID NO: 1301154 - RNA, 19 nt, Artificial Sequence
  Description of Artificial Sequence: Synthetic oligonucleotide
cucgggccacuaggaucau

SEQ ID NO: 1301155 - RNA, 19 nt, Artificial Sequence
  Description of Artificial Sequence: Synthetic oligonucleotide
uuaacauuaaccaagaucu

SEQ ID NO: 1301156 - RNA, 19 nt, Artificial Sequence
  Description of Artificial Sequence: Synthetic oligonucleotide
uguucuugaaucaagacgg

SEQ ID NO: 1301157 - RNA, 19 nt, Artificial Sequence
  Description of Artificial Sequence: Synthetic oligonucleotide
ucuuggaaugcuaagacgg

SEQ ID NO: 1301158 - RNA, 19 nt, Artificial Sequence
  Description of Artificial Sequence: Synthetic oligonucleotide
agcuauaugaccucugacc

SEQ ID NO: 1301159 - RNA, 19 nt, Artificial Sequence
  Description of Artificial Sequence: Synthetic oligonucleotide
cauguuaacauuaaccaag

SEQ ID NO: 1301160 - RNA, 19 nt, Artificial Sequence
  Description of Artificial Sequence: Synthetic oligonucleotide
uggguauugauucucauug

SEQ ID NO: 1301161 - RNA, 19 nt, Artificial Sequence
  Description of Artificial Sequence: Synthetic oligonucleotide
uaucuacuaagucacacag

SEQ ID NO: 1301162 - RNA, 19 nt, Artificial Sequence
  Description of Artificial Sequence: Synthetic oligonucleotide
uaucccaugacucuccagg

SEQ ID NO: 1301163 - RNA, 19 nt, Artificial Sequence
  Description of Artificial Sequence: Synthetic oligonucleotide
acuaccucagcuugcaucc

SEQ ID NO: 1301164 - RNA, 19 nt, Artificial Sequence
  Description of Artificial Sequence: Synthetic oligonucleotide
uuacaugguagcgagaugg

SEQ ID NO: 1301165 - RNA, 19 nt, Artificial Sequence
  Description of Artificial Sequence: Synthetic oligonucleotide
aaggaugucuguguuaggc

SEQ ID NO: 1301166 - RNA, 19 nt, Artificial Sequence
  Description of Artificial Sequence: Synthetic oligonucleotide
ucucaaguugauaccaucg

SEQ ID NO: 1301167 - RNA, 19 nt, Artificial Sequence
  Description of Artificial Sequence: Synthetic oligonucleotide
aaaucuacucccucgccgg

SEQ ID NO: 1301168 - RNA, 19 nt, Artificial Sequence
  Description of Artificial Sequence: Synthetic oligonucleotide
gggauuuuaauacugagag

SEQ ID NO: 1301169 - RNA, 19 nt, Artificial Sequence
  Description of Artificial Sequence: Synthetic oligonucleotide
aggaggauagucuagccac

SEQ ID NO: 1301170 - RNA, 19 nt, Artificial Sequence
  Description of Artificial Sequence: Synthetic oligonucleotide
ucccauaugagcuuccccg

SEQ ID NO: 1301171 - RNA, 19 nt, Artificial Sequence
  Description of Artificial Sequence: Synthetic oligonucleotide
uagcgaaccaauuauagac

SEQ ID NO: 1301172 - RNA, 19 nt, Artificial Sequence
  Description of Artificial Sequence: Synthetic oligonucleotide
aaucuaaagguacccaaga

SEQ ID NO: 1301173 - RNA, 19 nt, Artificial Sequence
  Description of Artificial Sequence: Synthetic oligonucleotide
agaacaagacgauagugug

SEQ ID NO: 1301174 - RNA, 19 nt, Artificial Sequence
  Description of Artificial Sequence: Synthetic oligonucleotide
acccaugcuguuuacaugg

SEQ ID NO: 1301175 - RNA, 19 nt, Artificial Sequence
  Description of Artificial Sequence: Synthetic oligonucleotide
acgauagugugguugacgg

SEQ ID NO: 1301176 - RNA, 19 nt, Artificial Sequence
  Description of Artificial Sequence: Synthetic oligonucleotide
ugagagaguauaugcaaag

SEQ ID NO: 1301177 - RNA, 19 nt, Artificial Sequence
  Description of Artificial Sequence: Synthetic oligonucleotide
uagacuuucagagagguaa

SEQ ID NO: 1301178 - RNA, 19 nt, Artificial Sequence
  Description of Artificial Sequence: Synthetic oligonucleotide
ucuauuagcgaaccaauua

SEQ ID NO: 1301179 - RNA, 19 nt, Artificial Sequence
  Description of Artificial Sequence: Synthetic oligonucleotide
uaaccaagaucugagcucg

SEQ ID NO: 1301180 - RNA, 19 nt, Artificial Sequence
  Description of Artificial Sequence: Synthetic oligonucleotide
caugcuguuuacaugguag

SEQ ID NO: 1301181 - RNA, 19 nt, Artificial Sequence
  Description of Artificial Sequence: Synthetic oligonucleotide
aagcuauaugaccucugac

SEQ ID NO: 1301182 - RNA, 19 nt, Artificial Sequence
  Description of Artificial Sequence: Synthetic oligonucleotide
gucuguaacagccaaugag

SEQ ID NO: 1301183 - RNA, 19 nt, Artificial Sequence
  Description of Artificial Sequence: Synthetic oligonucleotide
gguaacucguuccaggucg

SEQ ID NO: 1301184 - RNA, 19 nt, Artificial Sequence
  Description of Artificial Sequence: Synthetic oligonucleotide
ucgauauuggcucuccucu

SEQ ID NO: 1301185 - RNA, 19 nt, Artificial Sequence
  Description of Artificial Sequence: Synthetic oligonucleotide
uucaggguccucuauuggg

SEQ ID NO: 1301186 - RNA, 19 nt, Artificial Sequence
  Description of Artificial Sequence: Synthetic oligonucleotide
caaacuuaucacuauguuc

SEQ ID NO: 1301187 - RNA, 19 nt, Artificial Sequence
  Description of Artificial Sequence: Synthetic oligonucleotide
agucuagccacgcugugac

SEQ ID NO: 1301188 - RNA, 19 nt, Artificial Sequence
  Description of Artificial Sequence: Synthetic oligonucleotide
acaacugcuugggaaaucc

SEQ ID NO: 1301189 - RNA, 19 nt, Artificial Sequence
  Description of Artificial Sequence: Synthetic oligonucleotide
auguuggaacaaucgaucg

SEQ ID NO: 1301190 - RNA, 19 nt, Artificial Sequence
  Description of Artificial Sequence: Synthetic oligonucleotide
ugugcaacaacugcuuggg

SEQ ID NO: 1301191 - RNA, 19 nt, Artificial Sequence
  Description of Artificial Sequence: Synthetic oligonucleotide
ucuaaagguacccaagauu

SEQ ID NO: 1301192 - RNA, 19 nt, Artificial Sequence
  Description of Artificial Sequence: Synthetic oligonucleotide
aagacgauagugugguuga

SEQ ID NO: 1301193 - RNA, 19 nt, Artificial Sequence
  Description of Artificial Sequence: Synthetic oligonucleotide
agagauccggcucugacug

SEQ ID NO: 1301194 - RNA, 19 nt, Artificial Sequence
  Description of Artificial Sequence: Synthetic oligonucleotide
uccaaacuuaucacuaugu

SEQ ID NO: 1301195 - RNA, 19 nt, Artificial Sequence
  Description of Artificial Sequence: Synthetic oligonucleotide
uuuaauacugagagaguau

SEQ ID NO: 1301196 - RNA, 19 nt, Artificial Sequence
  Description of Artificial Sequence: Synthetic oligonucleotide
uuaaccaagaucugagcuc

SEQ ID NO: 1301197 - RNA, 19 nt, Artificial Sequence
  Description of Artificial Sequence: Synthetic oligonucleotide
agaacugaggguuaucuaa

SEQ ID NO: 1301198 - RNA, 19 nt, Artificial Sequence
  Description of Artificial Sequence: Synthetic oligonucleotide
uguguuaggcauguuaaca

SEQ ID NO: 1301199 - RNA, 19 nt, Artificial Sequence
  Description of Artificial Sequence: Synthetic oligonucleotide
uguuaccugugcaacaacu

SEQ ID NO: 1301200 - RNA, 19 nt, Artificial Sequence
  Description of Artificial Sequence: Synthetic oligonucleotide
uauuugagaacugaggguu

SEQ ID NO: 1301201 - RNA, 19 nt, Artificial Sequence
  Description of Artificial Sequence: Synthetic oligonucleotide
auauuugagaacugagggu

SEQ ID NO: 1301202 - RNA, 19 nt, Artificial Sequence
  Description of Artificial Sequence: Synthetic oligonucleotide
gagguaucauaacuguugc

SEQ ID NO: 1301203 - RNA, 19 nt, Artificial Sequence
  Description of Artificial Sequence: Synthetic oligonucleotide
aacaaucgaucguuguucu

SEQ ID NO: 1301204 - RNA, 19 nt, Artificial Sequence
  Description of Artificial Sequence: Synthetic oligonucleotide
ugggaaauccuccgauugg

SEQ ID NO: 1301205 - RNA, 19 nt, Artificial Sequence
  Description of Artificial Sequence: Synthetic oligonucleotide
aucaagacgguccaaaguu

SEQ ID NO: 1301206 - RNA, 19 nt, Artificial Sequence
  Description of Artificial Sequence: Synthetic oligonucleotide
uuagcgaaccaauuauaga

SEQ ID NO: 1301207 - RNA, 19 nt, Artificial Sequence
  Description of Artificial Sequence: Synthetic oligonucleotide
uccauaacagcuaggcacu

SEQ ID NO: 1301208 - RNA, 19 nt, Artificial Sequence
  Description of Artificial Sequence: Synthetic oligonucleotide
cuguuuacaugguagcgag

SEQ ID NO: 1301209 - RNA, 19 nt, Artificial Sequence
  Description of Artificial Sequence: Synthetic oligonucleotide
uuaacguagccccaggguu

SEQ ID NO: 1301210 - RNA, 19 nt, Artificial Sequence
  Description of Artificial Sequence: Synthetic oligonucleotide
ugauugguagugcaaggcu

SEQ ID NO: 1301211 - RNA, 19 nt, Artificial Sequence
  Description of Artificial Sequence: Synthetic oligonucleotide
auaugagcuuccccguagc

SEQ ID NO: 1301212 - RNA, 19 nt, Artificial Sequence
  Description of Artificial Sequence: Synthetic oligonucleotide
ggguuaucuaaauaccugg

SEQ ID NO: 1301213 - RNA, 19 nt, Artificial Sequence
  Description of Artificial Sequence: Synthetic oligonucleotide
ugcaacaacugcuugggaa

SEQ ID NO: 1301214 - RNA, 19 nt, Artificial Sequence
  Description of Artificial Sequence: Synthetic oligonucleotide
ucaucuaucccaugacucu

SEQ ID NO: 1301215 - RNA, 19 nt, Artificial Sequence
  Description of Artificial Sequence: Synthetic oligonucleotide
ugucugucgguccugugcc

SEQ ID NO: 1301216 - RNA, 19 nt, Artificial Sequence
  Description of Artificial Sequence: Synthetic oligonucleotide
gcuauaugaccucugaccc

SEQ ID NO: 1301217 - RNA, 19 nt, Artificial Sequence
  Description of Artificial Sequence: Synthetic oligonucleotide
aucaaugaaucuccggcug

SEQ ID NO: 1301218 - RNA, 19 nt, Artificial Sequence
  Description of Artificial Sequence: Synthetic oligonucleotide
acauuaaccaagaucugag

SEQ ID NO: 1301219 - RNA, 19 nt, Artificial Sequence
  Description of Artificial Sequence: Synthetic oligonucleotide
agccuaauauuugagaacu

SEQ ID NO: 1301220 - RNA, 19 nt, Artificial Sequence
  Description of Artificial Sequence: Synthetic oligonucleotide
auaacagcuaggcacuccu

SEQ ID NO: 1301221 - RNA, 19 nt, Artificial Sequence
  Description of Artificial Sequence: Synthetic oligonucleotide
caaucgaucguuguucucc

SEQ ID NO: 1301222 - RNA, 19 nt, Artificial Sequence
  Description of Artificial Sequence: Synthetic oligonucleotide
gguaucauaacuguugcug

SEQ ID NO: 1301223 - RNA, 19 nt, Artificial Sequence
  Description of Artificial Sequence: Synthetic oligonucleotide
gauauuggcucuccucuug

SEQ ID NO: 1301224 - RNA, 19 nt, Artificial Sequence
  Description of Artificial Sequence: Synthetic oligonucleotide
gagagaguauaugcaaagg

SEQ ID NO: 1301225 - RNA, 19 nt, Artificial Sequence
  Description of Artificial Sequence: Synthetic oligonucleotide
gauguuggaacaaucgauc

SEQ ID NO: 1301226 - RNA, 19 nt, Artificial Sequence
  Description of Artificial Sequence: Synthetic oligonucleotide
aacugcuugggaaauccuc

SEQ ID NO: 1301227 - RNA, 19 nt, Artificial Sequence
  Description of Artificial Sequence: Synthetic oligonucleotide
ugcugcuucgauauuggcu

SEQ ID NO: 1301228 - RNA, 19 nt, Artificial Sequence
  Description of Artificial Sequence: Synthetic oligonucleotide
acuuaacguagccccaggg

SEQ ID NO: 1301229 - RNA, 19 nt, Artificial Sequence
  Description of Artificial Sequence: Synthetic oligonucleotide
uguuggaacaaucgaucgu

SEQ ID NO: 1301230 - RNA, 19 nt, Artificial Sequence
  Description of Artificial Sequence: Synthetic oligonucleotide
caugaaucuaaagguaccc

SEQ ID NO: 1301231 - RNA, 19 nt, Artificial Sequence
  Description of Artificial Sequence: Synthetic oligonucleotide
uuuccauaacagcuaggca

SEQ ID NO: 1301232 - RNA, 19 nt, Artificial Sequence
  Description of Artificial Sequence: Synthetic oligonucleotide
uagugagaugggaucuugg

SEQ ID NO: 1301233 - RNA, 19 nt, Artificial Sequence
  Description of Artificial Sequence: Synthetic oligonucleotide
cauuaaccaagaucugagc

SEQ ID NO: 1301234 - RNA, 19 nt, Artificial Sequence
  Description of Artificial Sequence: Synthetic oligonucleotide
ccuccgauuggcaagaagg

SEQ ID NO: 1301235 - RNA, 19 nt, Artificial Sequence
  Description of Artificial Sequence: Synthetic oligonucleotide
gauugguagugcaaggcug

SEQ ID NO: 1301236 - RNA, 19 nt, Artificial Sequence
  Description of Artificial Sequence: Synthetic oligonucleotide
aaucgaucguuguucuccu

SEQ ID NO: 1301237 - RNA, 19 nt, Artificial Sequence
  Description of Artificial Sequence: Synthetic oligonucleotide
ucuaaauaccuggaagcac

SEQ ID NO: 1301238 - RNA, 19 nt, Artificial Sequence
  Description of Artificial Sequence: Synthetic oligonucleotide
ugcauugcaagcguuggca

SEQ ID NO: 1301239 - RNA, 19 nt, Artificial Sequence
  Description of Artificial Sequence: Synthetic oligonucleotide
gaacaaucgaucguuguuc

SEQ ID NO: 1301240 - RNA, 19 nt, Artificial Sequence
  Description of Artificial Sequence: Synthetic oligonucleotide
cagagagguaacucguucc

SEQ ID NO: 1301241 - RNA, 19 nt, Artificial Sequence
  Description of Artificial Sequence: Synthetic oligonucleotide
ucagagagguaacucguuc

SEQ ID NO: 1301242 - RNA, 19 nt, Artificial Sequence
  Description of Artificial Sequence: Synthetic oligonucleotide
uuaggcauguuaacauuaa

SEQ ID NO: 1301243 - RNA, 19 nt, Artificial Sequence
  Description of Artificial Sequence: Synthetic oligonucleotide
uuacacagagccuaauauu

SEQ ID NO: 1301244 - RNA, 19 nt, Artificial Sequence
  Description of Artificial Sequence: Synthetic oligonucleotide
agggauguuugguugguug

SEQ ID NO: 1301245 - RNA, 19 nt, Artificial Sequence
  Description of Artificial Sequence: Synthetic oligonucleotide
gacgauagugugguugacg

SEQ ID NO: 1301246 - RNA, 19 nt, Artificial Sequence
  Description of Artificial Sequence: Synthetic oligonucleotide
ucuccagguaaaaucuacu

SEQ ID NO: 1301247 - RNA, 19 nt, Artificial Sequence
  Description of Artificial Sequence: Synthetic oligonucleotide
gagccuaauauuugagaac

SEQ ID NO: 1301248 - RNA, 19 nt, Artificial Sequence
  Description of Artificial Sequence: Synthetic oligonucleotide
aaugaaucuccggcugagg

SEQ ID NO: 1301249 - RNA, 19 nt, Artificial Sequence
  Description of Artificial Sequence: Synthetic oligonucleotide
uacuuaacguagccccagg

SEQ ID NO: 1301250 - RNA, 19 nt, Artificial Sequence
  Description of Artificial Sequence: Synthetic oligonucleotide
aggaggcacggcuuauugc

SEQ ID NO: 1301251 - RNA, 19 nt, Artificial Sequence
  Description of Artificial Sequence: Synthetic oligonucleotide
cuccuuccgucuauuagcg

SEQ ID NO: 1301252 - RNA, 19 nt, Artificial Sequence
  Description of Artificial Sequence: Synthetic oligonucleotide
uuuacaugguagcgagaug

SEQ ID NO: 1301253 - RNA, 19 nt, Artificial Sequence
  Description of Artificial Sequence: Synthetic oligonucleotide
guuaucuacuaagucacac

SEQ ID NO: 1301254 - RNA, 19 nt, Artificial Sequence
  Description of Artificial Sequence: Synthetic oligonucleotide
ugacugaugccuguuaccu

SEQ ID NO: 1301255 - RNA, 19 nt, Artificial Sequence
  Description of Artificial Sequence: Synthetic oligonucleotide
ugagagauccggcucugac

SEQ ID NO: 1301256 - RNA, 19 nt, Artificial Sequence
  Description of Artificial Sequence: Synthetic oligonucleotide
caagacgauagugugguug

SEQ ID NO: 1301257 - RNA, 19 nt, Artificial Sequence
  Description of Artificial Sequence: Synthetic oligonucleotide
uucgauauuggcucuccuc

SEQ ID NO: 1301258 - RNA, 19 nt, Artificial Sequence
  Description of Artificial Sequence: Synthetic oligonucleotide
gcuaagacggagcagcaag

SEQ ID NO: 1301259 - RNA, 19 nt, Artificial Sequence
  Description of Artificial Sequence: Synthetic oligonucleotide
cuaaagguacccaagauuu

SEQ ID NO: 1301260 - RNA, 19 nt, Artificial Sequence
  Description of Artificial Sequence: Synthetic oligonucleotide
cauaugagcuuccccguag

SEQ ID NO: 1301261 - RNA, 19 nt, Artificial Sequence
  Description of Artificial Sequence: Synthetic oligonucleotide
aucgguaaaaugcucuuuu

SEQ ID NO: 1301262 - RNA, 19 nt, Artificial Sequence
  Description of Artificial Sequence: Synthetic oligonucleotide
cuccgauuggcaagaaggc

SEQ ID NO: 1301263 - RNA, 19 nt, Artificial Sequence
  Description of Artificial Sequence: Synthetic oligonucleotide
cuccagguaaaaucuacuc

SEQ ID NO: 1301264 - RNA, 19 nt, Artificial Sequence
  Description of Artificial Sequence: Synthetic oligonucleotide
aucuacuaagucacacagc

SEQ ID NO: 1301265 - RNA, 19 nt, Artificial Sequence
  Description of Artificial Sequence: Synthetic oligonucleotide
uucaaagcuauaugaccuc

SEQ ID NO: 1301266 - RNA, 19 nt, Artificial Sequence
  Description of Artificial Sequence: Synthetic oligonucleotide
guugauaccaucgguaaaa

SEQ ID NO: 1301267 - RNA, 19 nt, Artificial Sequence
  Description of Artificial Sequence: Synthetic oligonucleotide
gcugcuucgauauuggcuc

SEQ ID NO: 1301268 - RNA, 19 nt, Artificial Sequence
  Description of Artificial Sequence: Synthetic oligonucleotide
ugucuguaacagccaauga

SEQ ID NO: 1301269 - RNA, 19 nt, Artificial Sequence
  Description of Artificial Sequence: Synthetic oligonucleotide
ucccauuuugauugguagu

SEQ ID NO: 1301270 - RNA, 19 nt, Artificial Sequence
  Description of Artificial Sequence: Synthetic oligonucleotide
uacaugguagcgagauggc

SEQ ID NO: 1301271 - RNA, 19 nt, Artificial Sequence
  Description of Artificial Sequence: Synthetic oligonucleotide
gauagugugguugacggcu

SEQ ID NO: 1301272 - RNA, 19 nt, Artificial Sequence
  Description of Artificial Sequence: Synthetic oligonucleotide
caugguagcgagauggcga

SEQ ID NO: 1301273 - RNA, 19 nt, Artificial Sequence
  Description of Artificial Sequence: Synthetic oligonucleotide
cauuuugauugguagugca

SEQ ID NO: 1301274 - RNA, 19 nt, Artificial Sequence
  Description of Artificial Sequence: Synthetic oligonucleotide
ugaggcggggcucuagugu

SEQ ID NO: 1301275 - RNA, 19 nt, Artificial Sequence
  Description of Artificial Sequence: Synthetic oligonucleotide
gcuuauugcagcugaauca

SEQ ID NO: 1301276 - RNA, 19 nt, Artificial Sequence
  Description of Artificial Sequence: Synthetic oligonucleotide
aacgggguacagccuagug

SEQ ID NO: 1301277 - RNA, 19 nt, Artificial Sequence
  Description of Artificial Sequence: Synthetic oligonucleotide
acucguuccaggucggaca

SEQ ID NO: 1301278 - RNA, 19 nt, Artificial Sequence
  Description of Artificial Sequence: Synthetic oligonucleotide
agcucgggauuccaaugac

SEQ ID NO: 1301279 - RNA, 19 nt, Artificial Sequence
  Description of Artificial Sequence: Synthetic oligonucleotide
cuugaaucaagacggucca

SEQ ID NO: 1301280 - RNA, 19 nt, Artificial Sequence
  Description of Artificial Sequence: Synthetic oligonucleotide
ucuaguguuccuugcgcuc

SEQ ID NO: 1301281 - RNA, 19 nt, Artificial Sequence
  Description of Artificial Sequence: Synthetic oligonucleotide
cauuguugguacuguuccc

SEQ ID NO: 1301282 - RNA, 19 nt, Artificial Sequence
  Description of Artificial Sequence: Synthetic oligonucleotide
aauccuccgauuggcaaga

SEQ ID NO: 1301283 - RNA, 19 nt, Artificial Sequence
  Description of Artificial Sequence: Synthetic oligonucleotide
cacuaccucagcuugcauc

SEQ ID NO: 1301284 - RNA, 19 nt, Artificial Sequence
  Description of Artificial Sequence: Synthetic oligonucleotide
cucgugcugucaucuaucc

SEQ ID NO: 1301285 - RNA, 19 nt, Artificial Sequence
  Description of Artificial Sequence: Synthetic oligonucleotide
ugucccucucauuaacuuc

SEQ ID NO: 1301286 - RNA, 19 nt, Artificial Sequence
  Description of Artificial Sequence: Synthetic oligonucleotide
uaugagcuuccccguagcu

SEQ ID NO: 1301287 - RNA, 19 nt, Artificial Sequence
  Description of Artificial Sequence: Synthetic oligonucleotide
guuaccugugcaacaacug

SEQ ID NO: 1301288 - RNA, 19 nt, Artificial Sequence
  Description of Artificial Sequence: Synthetic oligonucleotide
cugcuugggaaauccuccg

SEQ ID NO: 1301289 - RNA, 19 nt, Artificial Sequence
  Description of Artificial Sequence: Synthetic oligonucleotide
uuccaaugacauucuuagc

SEQ ID NO: 1301290 - RNA, 19 nt, Artificial Sequence
  Description of Artificial Sequence: Synthetic oligonucleotide
cuaguguuccuugcgcucc

SEQ ID NO: 1301291 - RNA, 19 nt, Artificial Sequence
  Description of Artificial Sequence: Synthetic oligonucleotide
caaagcuauaugaccucug

SEQ ID NO: 1301292 - RNA, 19 nt, Artificial Sequence
  Description of Artificial Sequence: Synthetic oligonucleotide
aggaugucuguguuaggca

SEQ ID NO: 1301293 - RNA, 19 nt, Artificial Sequence
  Description of Artificial Sequence: Synthetic oligonucleotide
acgggguacagccuagugu

SEQ ID NO: 1301294 - RNA, 19 nt, Artificial Sequence
  Description of Artificial Sequence: Synthetic oligonucleotide
auacuuaacguagccccag

SEQ ID NO: 1301295 - RNA, 19 nt, Artificial Sequence
  Description of Artificial Sequence: Synthetic oligonucleotide
ucgguaaaaugcucuuuuc

SEQ ID NO: 1301296 - RNA, 19 nt, Artificial Sequence
  Description of Artificial Sequence: Synthetic oligonucleotide
cuuccgucuauuagcgaac

SEQ ID NO: 1301297 - RNA, 19 nt, Artificial Sequence
  Description of Artificial Sequence: Synthetic oligonucleotide
gacauuccggagugcuggg

SEQ ID NO: 1301298 - RNA, 19 nt, Artificial Sequence
  Description of Artificial Sequence: Synthetic oligonucleotide
uguuuacaugguagcgaga

SEQ ID NO: 1301299 - RNA, 19 nt, Artificial Sequence
  Description of Artificial Sequence: Synthetic oligonucleotide
gacccaugcuguuuacaug

SEQ ID NO: 1301300 - RNA, 19 nt, Artificial Sequence
  Description of Artificial Sequence: Synthetic oligonucleotide
ucuagccacgcugugacua

SEQ ID NO: 1301301 - RNA, 19 nt, Artificial Sequence
  Description of Artificial Sequence: Synthetic oligonucleotide
ggacauuccggagugcugg

SEQ ID NO: 1301302 - RNA, 19 nt, Artificial Sequence
  Description of Artificial Sequence: Synthetic oligonucleotide
ugcguggaagcuguggcug

SEQ ID NO: 1301303 - RNA, 19 nt, Artificial Sequence
  Description of Artificial Sequence: Synthetic oligonucleotide
gauacuucccggauggugu

SEQ ID NO: 1301304 - RNA, 19 nt, Artificial Sequence
  Description of Artificial Sequence: Synthetic oligonucleotide
augaaucuaaagguaccca

SEQ ID NO: 1301305 - RNA, 19 nt, Artificial Sequence
  Description of Artificial Sequence: Synthetic oligonucleotide
uccuccgauuggcaagaag

SEQ ID NO: 1301306 - RNA, 19 nt, Artificial Sequence
  Description of Artificial Sequence: Synthetic oligonucleotide
uaacguagccccaggguuu

SEQ ID NO: 1301307 - RNA, 19 nt, Artificial Sequence
  Description of Artificial Sequence: Synthetic oligonucleotide
cagaacaagacgauagugu

SEQ ID NO: 1301308 - RNA, 19 nt, Artificial Sequence
  Description of Artificial Sequence: Synthetic oligonucleotide
uucuuagcacagcacccaa

SEQ ID NO: 1301309 - RNA, 19 nt, Artificial Sequence
  Description of Artificial Sequence: Synthetic oligonucleotide
aguugauaccaucgguaaa

SEQ ID NO: 1301310 - RNA, 19 nt, Artificial Sequence
  Description of Artificial Sequence: Synthetic oligonucleotide
gaaugcuaagacggagcag

SEQ ID NO: 1301311 - RNA, 19 nt, Artificial Sequence
  Description of Artificial Sequence: Synthetic oligonucleotide
auaacuguugcugggugau

SEQ ID NO: 1301312 - RNA, 19 nt, Artificial Sequence
  Description of Artificial Sequence: Synthetic oligonucleotide
ucuacucccucgccggagu

SEQ ID NO: 1301313 - RNA, 19 nt, Artificial Sequence
  Description of Artificial Sequence: Synthetic oligonucleotide
ugcuugggaaauccuccga

SEQ ID NO: 1301314 - RNA, 19 nt, Artificial Sequence
  Description of Artificial Sequence: Synthetic oligonucleotide
acugaggguuaucuaaaua

SEQ ID NO: 1301315 - RNA, 19 nt, Artificial Sequence
  Description of Artificial Sequence: Synthetic oligonucleotide
aaucuacucccucgccgga

SEQ ID NO: 1301316 - RNA, 19 nt, Artificial Sequence
  Description of Artificial Sequence: Synthetic oligonucleotide
ucuuagcacagcacccaaa

SEQ ID NO: 1301317 - RNA, 19 nt, Artificial Sequence
  Description of Artificial Sequence: Synthetic oligonucleotide
gacugcauugcaagcguug

SEQ ID NO: 1301318 - RNA, 19 nt, Artificial Sequence
  Description of Artificial Sequence: Synthetic oligonucleotide
acagagccuaauauuugag

SEQ ID NO: 1301319 - RNA, 19 nt, Artificial Sequence
  Description of Artificial Sequence: Synthetic oligonucleotide
uccguggauacuucccgga

SEQ ID NO: 1301320 - RNA, 19 nt, Artificial Sequence
  Description of Artificial Sequence: Synthetic oligonucleotide
gacugaugccuguuaccug

SEQ ID NO: 1301321 - RNA, 19 nt, Artificial Sequence
  Description of Artificial Sequence: Synthetic oligonucleotide
uagcgagauggcgacaucu

SEQ ID NO: 1301322 - RNA, 19 nt, Artificial Sequence
  Description of Artificial Sequence: Synthetic oligonucleotide
ggaggcacggcuuauugca

SEQ ID NO: 1301323 - RNA, 19 nt, Artificial Sequence
  Description of Artificial Sequence: Synthetic oligonucleotide
agccaaugagagauccggc

SEQ ID NO: 1301324 - RNA, 19 nt, Artificial Sequence
  Description of Artificial Sequence: Synthetic oligonucleotide
uccgauuggcaagaaggcu

SEQ ID NO: 1301325 - RNA, 19 nt, Artificial Sequence
  Description of Artificial Sequence: Synthetic oligonucleotide
accaucgguaaaaugcucu

SEQ ID NO: 1301326 - RNA, 19 nt, Artificial Sequence
  Description of Artificial Sequence: Synthetic oligonucleotide
cagcuagugagaugggauc

SEQ ID NO: 1301327 - RNA, 19 nt, Artificial Sequence
  Description of Artificial Sequence: Synthetic oligonucleotide
ggaaugcuaagacggagca

SEQ ID NO: 1301328 - RNA, 19 nt, Artificial Sequence
  Description of Artificial Sequence: Synthetic oligonucleotide
ggcuuauugcagcugaauc

SEQ ID NO: 1301329 - RNA, 19 nt, Artificial Sequence
  Description of Artificial Sequence: Synthetic oligonucleotide
auagucuagccacgcugug

SEQ ID NO: 1301330 - RNA, 19 nt, Artificial Sequence
  Description of Artificial Sequence: Synthetic oligonucleotide
gguauugauucucauugaa

SEQ ID NO: 1301331 - RNA, 19 nt, Artificial Sequence
  Description of Artificial Sequence: Synthetic oligonucleotide
cauacuuaacguagcccca

SEQ ID NO: 1301332 - RNA, 19 nt, Artificial Sequence
  Description of Artificial Sequence: Synthetic oligonucleotide
cuauuagcgaaccaauuau

SEQ ID NO: 1301333 - RNA, 19 nt, Artificial Sequence
  Description of Artificial Sequence: Synthetic oligonucleotide
gagcucgggauuccaauga

SEQ ID NO: 1301334 - RNA, 19 nt, Artificial Sequence
  Description of Artificial Sequence: Synthetic oligonucleotide
agcuagugagaugggaucu

SEQ ID NO: 1301335 - RNA, 19 nt, Artificial Sequence
  Description of Artificial Sequence: Synthetic oligonucleotide
cauaacuguugcuggguga

SEQ ID NO: 1301336 - RNA, 19 nt, Artificial Sequence
  Description of Artificial Sequence: Synthetic oligonucleotide
ucgugcugucaucuauccc

SEQ ID NO: 1301337 - RNA, 19 nt, Artificial Sequence
  Description of Artificial Sequence: Synthetic oligonucleotide
agcgaaccaauuauagacu

SEQ ID NO: 1301338 - RNA, 19 nt, Artificial Sequence
  Description of Artificial Sequence: Synthetic oligonucleotide
auuccggagugcugggucu

SEQ ID NO: 1301339 - RNA, 19 nt, Artificial Sequence
  Description of Artificial Sequence: Synthetic oligonucleotide
cuagccacgcugugacuag

SEQ ID NO: 1301340 - RNA, 19 nt, Artificial Sequence
  Description of Artificial Sequence: Synthetic oligonucleotide
cuuggaaugcuaagacgga

SEQ ID NO: 1301341 - RNA, 19 nt, Artificial Sequence
  Description of Artificial Sequence: Synthetic oligonucleotide
uucagagagguaacucguu

SEQ ID NO: 1301342 - RNA, 19 nt, Artificial Sequence
  Description of Artificial Sequence: Synthetic oligonucleotide
uuccgucuauuagcgaacc

SEQ ID NO: 1301343 - RNA, 19 nt, Artificial Sequence
  Description of Artificial Sequence: Synthetic oligonucleotide
uuauugcagcugaaucaau

SEQ ID NO: 1301344 - RNA, 19 nt, Artificial Sequence
  Description of Artificial Sequence: Synthetic oligonucleotide
ucacuauggcucgugcugu

SEQ ID NO: 1301345 - RNA, 19 nt, Artificial Sequence
  Description of Artificial Sequence: Synthetic oligonucleotide
cuaagucacacagcuugug

SEQ ID NO: 1301346 - RNA, 19 nt, Artificial Sequence
  Description of Artificial Sequence: Synthetic oligonucleotide
cuaagacggagcagcaaga

SEQ ID NO: 1301347 - RNA, 19 nt, Artificial Sequence
  Description of Artificial Sequence: Synthetic oligonucleotide
ggccucauacuuaacguag

SEQ ID NO: 1301348 - RNA, 19 nt, Artificial Sequence
  Description of Artificial Sequence: Synthetic oligonucleotide
cauuccggagugcuggguc

SEQ ID NO: 1301349 - RNA, 19 nt, Artificial Sequence
  Description of Artificial Sequence: Synthetic oligonucleotide
aagacgguccaaaguuucu

SEQ ID NO: 1301350 - RNA, 19 nt, Artificial Sequence
  Description of Artificial Sequence: Synthetic oligonucleotide
gauggcgacaucuucccau

SEQ ID NO: 1301351 - RNA, 19 nt, Artificial Sequence
  Description of Artificial Sequence: Synthetic oligonucleotide
auuuugauugguagugcaa

SEQ ID NO: 1301352 - RNA, 19 nt, Artificial Sequence
  Description of Artificial Sequence: Synthetic oligonucleotide
uccgucuauuagcgaacca

SEQ ID NO: 1301353 - RNA, 19 nt, Artificial Sequence
  Description of Artificial Sequence: Synthetic oligonucleotide
gacgguccaaaguuucuaa

SEQ ID NO: 1301354 - RNA, 19 nt, Artificial Sequence
  Description of Artificial Sequence: Synthetic oligonucleotide
cuauaugaccucugaccca

SEQ ID NO: 1301355 - RNA, 19 nt, Artificial Sequence
  Description of Artificial Sequence: Synthetic oligonucleotide
guuaggcauguuaacauua

SEQ ID NO: 1301356 - RNA, 19 nt, Artificial Sequence
  Description of Artificial Sequence: Synthetic oligonucleotide
uagucuagccacgcuguga

SEQ ID NO: 1301357 - RNA, 19 nt, Artificial Sequence
  Description of Artificial Sequence: Synthetic oligonucleotide
cuccuacuuuaucaucuac

SEQ ID NO: 1301358 - RNA, 19 nt, Artificial Sequence
  Description of Artificial Sequence: Synthetic oligonucleotide
gauagucuagccacgcugu

SEQ ID NO: 1301359 - RNA, 19 nt, Artificial Sequence
  Description of Artificial Sequence: Synthetic oligonucleotide
uuaucacacugcugucccu

SEQ ID NO: 1301360 - RNA, 19 nt, Artificial Sequence
  Description of Artificial Sequence: Synthetic oligonucleotide
cccauuuugauugguagug

SEQ ID NO: 1301361 - RNA, 19 nt, Artificial Sequence
  Description of Artificial Sequence: Synthetic oligonucleotide
gaacugaggguuaucuaaa

SEQ ID NO: 1301362 - RNA, 19 nt, Artificial Sequence
  Description of Artificial Sequence: Synthetic oligonucleotide
ugugacuaggaggcacggc

SEQ ID NO: 1301363 - RNA, 19 nt, Artificial Sequence
  Description of Artificial Sequence: Synthetic oligonucleotide
ugccuguuaccugugcaac

SEQ ID NO: 1301364 - RNA, 19 nt, Artificial Sequence
  Description of Artificial Sequence: Synthetic oligonucleotide
guaacucguuccaggucgg

SEQ ID NO: 1301365 - RNA, 19 nt, Artificial Sequence
  Description of Artificial Sequence: Synthetic oligonucleotide
uacucccucgccggagucg

SEQ ID NO: 1301366 - RNA, 19 nt, Artificial Sequence
  Description of Artificial Sequence: Synthetic oligonucleotide
ccucauacuuaacguagcc

SEQ ID NO: 1301367 - RNA, 19 nt, Artificial Sequence
  Description of Artificial Sequence: Synthetic oligonucleotide
caucuaucccaugacucuc

SEQ ID NO: 1301368 - RNA, 19 nt, Artificial Sequence
  Description of Artificial Sequence: Synthetic oligonucleotide
ccacgcugugacuaggagg

SEQ ID NO: 1301369 - RNA, 19 nt, Artificial Sequence
  Description of Artificial Sequence: Synthetic oligonucleotide
cuaucccaugacucuccag

SEQ ID NO: 1301370 - RNA, 19 nt, Artificial Sequence
  Description of Artificial Sequence: Synthetic oligonucleotide
gggaaauccuccgauuggc

SEQ ID NO: 1301371 - RNA, 19 nt, Artificial Sequence
  Description of Artificial Sequence: Synthetic oligonucleotide
uugauaccaucgguaaaau

SEQ ID NO: 1301372 - RNA, 19 nt, Artificial Sequence
  Description of Artificial Sequence: Synthetic oligonucleotide
gcaacaacugcuugggaaa

SEQ ID NO: 1301373 - RNA, 19 nt, Artificial Sequence
  Description of Artificial Sequence: Synthetic oligonucleotide
aucgaucguuguucuccuc

SEQ ID NO: 1301374 - RNA, 19 nt, Artificial Sequence
  Description of Artificial Sequence: Synthetic oligonucleotide
gcucuaguguuccuugcgc

SEQ ID NO: 1301375 - RNA, 19 nt, Artificial Sequence
  Description of Artificial Sequence: Synthetic oligonucleotide
aggccucauacuuaacgua

SEQ ID NO: 1301376 - RNA, 19 nt, Artificial Sequence
  Description of Artificial Sequence: Synthetic oligonucleotide
gguuauuacuuacugggau

SEQ ID NO: 1301377 - RNA, 19 nt, Artificial Sequence
  Description of Artificial Sequence: Synthetic oligonucleotide
acgguccaaaguuucuaau

SEQ ID NO: 1301378 - RNA, 19 nt, Artificial Sequence
  Description of Artificial Sequence: Synthetic oligonucleotide
gucugcguggaagcugugg

SEQ ID NO: 1301379 - RNA, 19 nt, Artificial Sequence
  Description of Artificial Sequence: Synthetic oligonucleotide
gagagauccggcucugacu

SEQ ID NO: 1301380 - RNA, 19 nt, Artificial Sequence
  Description of Artificial Sequence: Synthetic oligonucleotide
guggggagguaucauaacu

SEQ ID NO: 1301381 - RNA, 19 nt, Artificial Sequence
  Description of Artificial Sequence: Synthetic oligonucleotide
ucugacccaugcuguuuac

SEQ ID NO: 1301382 - RNA, 19 nt, Artificial Sequence
  Description of Artificial Sequence: Synthetic oligonucleotide
agacgauagugugguugac

SEQ ID NO: 1301383 - RNA, 19 nt, Artificial Sequence
  Description of Artificial Sequence: Synthetic oligonucleotide
uugucuucucaaguugaua

SEQ ID NO: 1301384 - RNA, 19 nt, Artificial Sequence
  Description of Artificial Sequence: Synthetic oligonucleotide
cacggcuuauugcagcuga

SEQ ID NO: 1301385 - RNA, 19 nt, Artificial Sequence
  Description of Artificial Sequence: Synthetic oligonucleotide
cuuaacguagccccagggu

SEQ ID NO: 1301386 - RNA, 19 nt, Artificial Sequence
  Description of Artificial Sequence: Synthetic oligonucleotide
ggauacuucccggauggug

SEQ ID NO: 1301387 - RNA, 19 nt, Artificial Sequence
  Description of Artificial Sequence: Synthetic oligonucleotide
gguuaucuaaauaccugga

SEQ ID NO: 1301388 - RNA, 19 nt, Artificial Sequence
  Description of Artificial Sequence: Synthetic oligonucleotide
guuggaacaaucgaucguu

SEQ ID NO: 1301389 - RNA, 19 nt, Artificial Sequence
  Description of Artificial Sequence: Synthetic oligonucleotide
cucgggauuccaaugacau

SEQ ID NO: 1301390 - RNA, 19 nt, Artificial Sequence
  Description of Artificial Sequence: Synthetic oligonucleotide
cgggauuccaaugacauuc

SEQ ID NO: 1301391 - RNA, 19 nt, Artificial Sequence
  Description of Artificial Sequence: Synthetic oligonucleotide
gaggcacggcuuauugcag

SEQ ID NO: 1301392 - RNA, 19 nt, Artificial Sequence
  Description of Artificial Sequence: Synthetic oligonucleotide
ggaggauagucuagccacg

SEQ ID NO: 1301393 - RNA, 19 nt, Artificial Sequence
  Description of Artificial Sequence: Synthetic oligonucleotide
aaccaagaucugagcucgg

SEQ ID NO: 1301394 - RNA, 19 nt, Artificial Sequence
  Description of Artificial Sequence: Synthetic oligonucleotide
ugacugcauugcaagcguu

SEQ ID NO: 1301395 - RNA, 19 nt, Artificial Sequence
  Description of Artificial Sequence: Synthetic oligonucleotide
cugugacuaggaggcacgg

SEQ ID NO: 1301396 - RNA, 19 nt, Artificial Sequence
  Description of Artificial Sequence: Synthetic oligonucleotide
cuguuaccugugcaacaac

SEQ ID NO: 1301397 - RNA, 19 nt, Artificial Sequence
  Description of Artificial Sequence: Synthetic oligonucleotide
ucguuguucuccucccauu

SEQ ID NO: 1301398 - RNA, 19 nt, Artificial Sequence
  Description of Artificial Sequence: Synthetic oligonucleotide
gacggcugccaucuccaca

SEQ ID NO: 1301399 - RNA, 19 nt, Artificial Sequence
  Description of Artificial Sequence: Synthetic oligonucleotide
gcuguuuacaugguagcga

SEQ ID NO: 1301400 - RNA, 19 nt, Artificial Sequence
  Description of Artificial Sequence: Synthetic oligonucleotide
caaugagagauccggcucu

SEQ ID NO: 1301401 - RNA, 19 nt, Artificial Sequence
  Description of Artificial Sequence: Synthetic oligonucleotide
auagugugguugacggcug

SEQ ID NO: 1301402 - RNA, 19 nt, Artificial Sequence
  Description of Artificial Sequence: Synthetic oligonucleotide
ccaaugagagauccggcuc

SEQ ID NO: 1301403 - RNA, 19 nt, Artificial Sequence
  Description of Artificial Sequence: Synthetic oligonucleotide
auggcgacaucuucccauu

SEQ ID NO: 1301404 - RNA, 19 nt, Artificial Sequence
  Description of Artificial Sequence: Synthetic oligonucleotide
aucuacucccucgccggag

SEQ ID NO: 1301405 - RNA, 19 nt, Artificial Sequence
  Description of Artificial Sequence: Synthetic oligonucleotide
cuaguguuacaugaaucua

SEQ ID NO: 1301406 - RNA, 19 nt, Artificial Sequence
  Description of Artificial Sequence: Synthetic oligonucleotide
agauggcgacaucuuccca

SEQ ID NO: 1301407 - RNA, 19 nt, Artificial Sequence
  Description of Artificial Sequence: Synthetic oligonucleotide
uccuuccgucuauuagcga

SEQ ID NO: 1301408 - RNA, 19 nt, Artificial Sequence
  Description of Artificial Sequence: Synthetic oligonucleotide
ggggcucuaguguuccuug

SEQ ID NO: 1301409 - RNA, 19 nt, Artificial Sequence
  Description of Artificial Sequence: Synthetic oligonucleotide
caggauugcugcuucgaua

SEQ ID NO: 1301410 - RNA, 19 nt, Artificial Sequence
  Description of Artificial Sequence: Synthetic oligonucleotide
ccauuuugauugguagugc

SEQ ID NO: 1301411 - RNA, 19 nt, Artificial Sequence
  Description of Artificial Sequence: Synthetic oligonucleotide
ggguauugauucucauuga

SEQ ID NO: 1301412 - RNA, 19 nt, Artificial Sequence
  Description of Artificial Sequence: Synthetic oligonucleotide
ccuuccgucuauuagcgaa

SEQ ID NO: 1301413 - RNA, 19 nt, Artificial Sequence
  Description of Artificial Sequence: Synthetic oligonucleotide
uccccguagcuggaccucc

SEQ ID NO: 1301414 - RNA, 19 nt, Artificial Sequence
  Description of Artificial Sequence: Synthetic oligonucleotide
agacgguccaaaguuucua

SEQ ID NO: 1301415 - RNA, 19 nt, Artificial Sequence
  Description of Artificial Sequence: Synthetic oligonucleotide
auuugagaacugaggguua

SEQ ID NO: 1301416 - RNA, 19 nt, Artificial Sequence
  Description of Artificial Sequence: Synthetic oligonucleotide
cucuaguguuccuugcgcu

SEQ ID NO: 1301417 - RNA, 19 nt, Artificial Sequence
  Description of Artificial Sequence: Synthetic oligonucleotide
aaucuccggcugaggcggg

SEQ ID NO: 1301418 - RNA, 19 nt, Artificial Sequence
  Description of Artificial Sequence: Synthetic oligonucleotide
cacuauggcucgugcuguc

SEQ ID NO: 1301419 - RNA, 19 nt, Artificial Sequence
  Description of Artificial Sequence: Synthetic oligonucleotide
gguacagccuaguguuaca

SEQ ID NO: 1301420 - RNA, 19 nt, Artificial Sequence
  Description of Artificial Sequence: Synthetic oligonucleotide
gccuaguguuacaugaauc

SEQ ID NO: 1301421 - RNA, 19 nt, Artificial Sequence
  Description of Artificial Sequence: Synthetic oligonucleotide
ggaugucuguguuaggcau

SEQ ID NO: 1301422 - RNA, 19 nt, Artificial Sequence
  Description of Artificial Sequence: Synthetic oligonucleotide
ggaacaaucgaucguuguu

SEQ ID NO: 1301423 - RNA, 19 nt, Artificial Sequence
  Description of Artificial Sequence: Synthetic oligonucleotide
gccaaugagagauccggcu

SEQ ID NO: 1301424 - RNA, 19 nt, Artificial Sequence
  Description of Artificial Sequence: Synthetic oligonucleotide
gccucauacuuaacguagc

SEQ ID NO: 1301425 - RNA, 19 nt, Artificial Sequence
  Description of Artificial Sequence: Synthetic oligonucleotide
ugucgguccugugccacua

SEQ ID NO: 1301426 - RNA, 19 nt, Artificial Sequence
  Description of Artificial Sequence: Synthetic oligonucleotide
cagccuaguguuacaugaa

SEQ ID NO: 1301427 - RNA, 19 nt, Artificial Sequence
  Description of Artificial Sequence: Synthetic oligonucleotide
ggcaggaacgggguacagc

SEQ ID NO: 1301428 - RNA, 19 nt, Artificial Sequence
  Description of Artificial Sequence: Synthetic oligonucleotide
gagauccggcucugacuga

SEQ ID NO: 1301429 - RNA, 19 nt, Artificial Sequence
  Description of Artificial Sequence: Synthetic oligonucleotide
guagcgagauggcgacauc

SEQ ID NO: 1301430 - RNA, 19 nt, Artificial Sequence
  Description of Artificial Sequence: Synthetic oligonucleotide
ggaaauccuccgauuggca

SEQ ID NO: 1301431 - RNA, 19 nt, Artificial Sequence
  Description of Artificial Sequence: Synthetic oligonucleotide
gcuggaccuccuuccaaac

SEQ ID NO: 1301432 - RNA, 19 nt, Artificial Sequence
  Description of Artificial Sequence: Synthetic oligonucleotide
gcgagauggcgacaucuuc

SEQ ID NO: 1301433 - RNA, 19 nt, Artificial Sequence
  Description of Artificial Sequence: Synthetic oligonucleotide
gggcucuaguguuccuugc

SEQ ID NO: 1301434 - RNA, 19 nt, Artificial Sequence
  Description of Artificial Sequence: Synthetic oligonucleotide
ccuugcgcuccguggauac

SEQ ID NO: 1301435 - RNA, 19 nt, Artificial Sequence
  Description of Artificial Sequence: Synthetic oligonucleotide
uggauacuucccggauggu

SEQ ID NO: 1301436 - RNA, 19 nt, Artificial Sequence
  Description of Artificial Sequence: Synthetic oligonucleotide
cuucucaaguugauaccau

SEQ ID NO: 1301437 - RNA, 19 nt, Artificial Sequence
  Description of Artificial Sequence: Synthetic oligonucleotide
acaagacgauagugugguu

SEQ ID NO: 1301438 - RNA, 19 nt, Artificial Sequence
  Description of Artificial Sequence: Synthetic oligonucleotide
cuugggaaauccuccgauu

SEQ ID NO: 1301439 - RNA, 19 nt, Artificial Sequence
  Description of Artificial Sequence: Synthetic oligonucleotide
cuacucccucgccggaguc

SEQ ID NO: 1301440 - RNA, 19 nt, Artificial Sequence
  Description of Artificial Sequence: Synthetic oligonucleotide
ggaacauuguugguacugu

SEQ ID NO: 1301441 - RNA, 19 nt, Artificial Sequence
  Description of Artificial Sequence: Synthetic oligonucleotide
gccuaauauuugagaacug

SEQ ID NO: 1301442 - RNA, 19 nt, Artificial Sequence
  Description of Artificial Sequence: Synthetic oligonucleotide
cauugcaagcguuggcaau

SEQ ID NO: 1301443 - RNA, 19 nt, Artificial Sequence
  Description of Artificial Sequence: Synthetic oligonucleotide
aucuccggcugaggcgggg

SEQ ID NO: 1301444 - RNA, 19 nt, Artificial Sequence
  Description of Artificial Sequence: Synthetic oligonucleotide
gccuguuaccugugcaaca

SEQ ID NO: 1301445 - RNA, 19 nt, Artificial Sequence
  Description of Artificial Sequence: Synthetic oligonucleotide
gugcaacaacugcuuggga

SEQ ID NO: 1301446 - RNA, 19 nt, Artificial Sequence
  Description of Artificial Sequence: Synthetic oligonucleotide
uuccccguagcuggaccuc

SEQ ID NO: 1301447 - RNA, 19 nt, Artificial Sequence
  Description of Artificial Sequence: Synthetic oligonucleotide
cauuaacuuccuccuacuu

SEQ ID NO: 1301448 - RNA, 19 nt, Artificial Sequence
  Description of Artificial Sequence: Synthetic oligonucleotide
ccucuuuuaucacacugcu

SEQ ID NO: 1301449 - RNA, 19 nt, Artificial Sequence
  Description of Artificial Sequence: Synthetic oligonucleotide
cuuccccguagcuggaccu

SEQ ID NO: 1301450 - RNA, 19 nt, Artificial Sequence
  Description of Artificial Sequence: Synthetic oligonucleotide
gucuauuagcgaaccaauu

SEQ ID NO: 1301451 - RNA, 19 nt, Artificial Sequence
  Description of Artificial Sequence: Synthetic oligonucleotide
gcaagcguuggcaaucucu

SEQ ID NO: 1301452 - RNA, 19 nt, Artificial Sequence
  Description of Artificial Sequence: Synthetic oligonucleotide
gcgaaccaauuauagacuu

SEQ ID NO: 1301453 - RNA, 19 nt, Artificial Sequence
  Description of Artificial Sequence: Synthetic oligonucleotide
cugucccucucauuaacuu

SEQ ID NO: 1301454 - RNA, 19 nt, Artificial Sequence
  Description of Artificial Sequence: Synthetic oligonucleotide
ccgucuauuagcgaaccaa

SEQ ID NO: 1301455 - RNA, 19 nt, Artificial Sequence
  Description of Artificial Sequence: Synthetic oligonucleotide
cgauagugugguugacggc

SEQ ID NO: 1301456 - RNA, 19 nt, Artificial Sequence
  Description of Artificial Sequence: Synthetic oligonucleotide
cauuggauguuggaacaau

SEQ ID NO: 1301457 - RNA, 19 nt, Artificial Sequence
  Description of Artificial Sequence: Synthetic oligonucleotide
cugcugucccucucauuaa

SEQ ID NO: 1301458 - RNA, 19 nt, Artificial Sequence
  Description of Artificial Sequence: Synthetic oligonucleotide
cagcuaggcacuccuuucu

SEQ ID NO: 1301459 - RNA, 19 nt, Artificial Sequence
  Description of Artificial Sequence: Synthetic oligonucleotide
cuucgauauuggcucuccu

SEQ ID NO: 1301460 - RNA, 19 nt, Artificial Sequence
  Description of Artificial Sequence: Synthetic oligonucleotide
ccuguuaccugugcaacaa

SEQ ID NO: 1301461 - RNA, 19 nt, Artificial Sequence
  Description of Artificial Sequence: Synthetic oligonucleotide
gccacuaccucagcuugca

SEQ ID NO: 1301462 - RNA, 19 nt, Artificial Sequence
  Description of Artificial Sequence: Synthetic oligonucleotide
gguagcgagauggcgacau

SEQ ID NO: 1301463 - RNA, 19 nt, Artificial Sequence
  Description of Artificial Sequence: Synthetic oligonucleotide
cuauggcucgugcugucau

SEQ ID NO: 1301464 - RNA, 19 nt, Artificial Sequence
  Description of Artificial Sequence: Synthetic oligonucleotide
gcucgggauuccaaugaca

SEQ ID NO: 1301465 - RNA, 19 nt, Artificial Sequence
  Description of Artificial Sequence: Synthetic oligonucleotide
ggcacggcuuauugcagcu

SEQ ID NO: 1301466 - RNA, 19 nt, Artificial Sequence
  Description of Artificial Sequence: Synthetic oligonucleotide
ccgauuggcaagaaggcuu

SEQ ID NO: 1301467 - RNA, 19 nt, Artificial Sequence
  Description of Artificial Sequence: Synthetic oligonucleotide
gcgcuccguggauacuucc

SEQ ID NO: 1301468 - RNA, 19 nt, Artificial Sequence
  Description of Artificial Sequence: Synthetic oligonucleotide
ggagguguuugucuccauu

SEQ ID NO: 1301469 - RNA, 19 nt, Artificial Sequence
  Description of Artificial Sequence: Synthetic oligonucleotide
ggggacauuccggagugcu

SEQ ID NO: 1301470 - RNA, 19 nt, Artificial Sequence
  Description of Artificial Sequence: Synthetic oligonucleotide
gacggagcagcaagauuuu

SEQ ID NO: 1301471 - RNA, 19 nt, Artificial Sequence
  Description of Artificial Sequence: Synthetic oligonucleotide
ggucugaccccugucugua

SEQ ID NO: 1301472 - RNA, 19 nt, Artificial Sequence
  Description of Artificial Sequence: Synthetic oligonucleotide
cugcuucgauauuggcucu

SEQ ID NO: 1301473 - RNA, 19 nt, Artificial Sequence
  Description of Artificial Sequence: Synthetic oligonucleotide
gggauuggggcaggccuca

SEQ ID NO: 1301474 - RNA, 19 nt, Artificial Sequence
  Description of Artificial Sequence: Synthetic oligonucleotide
gaacgggguacagccuagu

SEQ ID NO: 1301475 - RNA, 19 nt, Artificial Sequence
  Description of Artificial Sequence: Synthetic oligonucleotide
caucgguaaaaugcucuuu

SEQ ID NO: 1301476 - RNA, 19 nt, Artificial Sequence
  Description of Artificial Sequence: Synthetic oligonucleotide
cgcugugacuaggaggcac

SEQ ID NO: 1301477 - RNA, 19 nt, Artificial Sequence
  Description of Artificial Sequence: Synthetic oligonucleotide
acgcugugacuaggaggca

SEQ ID NO: 1301478 - RNA, 19 nt, Artificial Sequence
  Description of Artificial Sequence: Synthetic oligonucleotide
gucuagccacgcugugacu

SEQ ID NO: 1301479 - RNA, 19 nt, Artificial Sequence
  Description of Artificial Sequence: Synthetic oligonucleotide
ccauaacagcuaggcacuc

SEQ ID NO: 1301480 - RNA, 19 nt, Artificial Sequence
  Description of Artificial Sequence: Synthetic oligonucleotide
cgucuauuagcgaaccaau

SEQ ID NO: 1301481 - RNA, 19 nt, Artificial Sequence
  Description of Artificial Sequence: Synthetic oligonucleotide
cccauaugagcuuccccgu

SEQ ID NO: 1301482 - RNA, 19 nt, Artificial Sequence
  Description of Artificial Sequence: Synthetic oligonucleotide
cugaggcuucaaagcuaua

SEQ ID NO: 1301483 - RNA, 19 nt, Artificial Sequence
  Description of Artificial Sequence: Synthetic oligonucleotide
ccauaugagcuuccccgua

SEQ ID NO: 1301484 - RNA, 19 nt, Artificial Sequence
  Description of Artificial Sequence: Synthetic oligonucleotide
ccggagugcugggucugcg

SEQ ID NO: 1301485 - RNA, 19 nt, Artificial Sequence
  Description of Artificial Sequence: Synthetic oligonucleotide
gagggauguuugguugguu

SEQ ID NO: 1301486 - RNA, 19 nt, Artificial Sequence
  Description of Artificial Sequence: Synthetic oligonucleotide
gggagguaucauaacuguu

SEQ ID NO: 1301487 - RNA, 19 nt, Artificial Sequence
  Description of Artificial Sequence: Synthetic oligonucleotide
ccaucgguaaaaugcucuu

SEQ ID NO: 1301488 - RNA, 19 nt, Artificial Sequence
  Description of Artificial Sequence: Synthetic oligonucleotide
cuaggaggcacggcuuauu

SEQ ID NO: 1301489 - RNA, 19 nt, Artificial Sequence
  Description of Artificial Sequence: Synthetic oligonucleotide
cuaccucagcuugcauccu

SEQ ID NO: 1301490 - RNA, 19 nt, Artificial Sequence
  Description of Artificial Sequence: Synthetic oligonucleotide
ggucugcguggaagcugug

SEQ ID NO: 1301491 - RNA, 19 nt, Artificial Sequence
  Description of Artificial Sequence: Synthetic oligonucleotide
cgaaccaauuauagacuuu

SEQ ID NO: 1301492 - RNA, 19 nt, Artificial Sequence
  Description of Artificial Sequence: Synthetic oligonucleotide
ggauugcugcuucgauauu

SEQ ID NO: 1301493 - RNA, 19 nt, Artificial Sequence
  Description of Artificial Sequence: Synthetic oligonucleotide
ccggauggugucugucggu

SEQ ID NO: 1301494 - RNA, 19 nt, Artificial Sequence
  Description of Artificial Sequence: Synthetic oligonucleotide
ccguggauacuucccggau

SEQ ID NO: 1301495 - RNA, 19 nt, Artificial Sequence
  Description of Artificial Sequence: Synthetic oligonucleotide
cgauauuggcucuccucuu

SEQ ID NO: 1301496 - RNA, 19 nt, Artificial Sequence
  Description of Artificial Sequence: Synthetic oligonucleotide
gcggggcucuaguguuccu

SEQ ID NO: 1301497 - RNA, 19 nt, Artificial Sequence
  Description of Artificial Sequence: Synthetic oligonucleotide
ggauuggggcaggccucau

SEQ ID NO: 1301498 - RNA, 19 nt, Artificial Sequence
  Description of Artificial Sequence: Synthetic oligonucleotide
uuuagaacaaccuaagcag

SEQ ID NO: 1301499 - RNA, 19 nt, Artificial Sequence
  Description of Artificial Sequence: Synthetic oligonucleotide
gaaucuaaacuccaaaagg

SEQ ID NO: 1301500 - RNA, 19 nt, Artificial Sequence
  Description of Artificial Sequence: Synthetic oligonucleotide
aaucuaaacuccaaaaggg

SEQ ID NO: 1301501 - RNA, 19 nt, Artificial Sequence
  Description of Artificial Sequence: Synthetic oligonucleotide
aacuucaagugauaccugc

SEQ ID NO: 1301502 - RNA, 19 nt, Artificial Sequence
  Description of Artificial Sequence: Synthetic oligonucleotide
aauuguaccugccugugag

SEQ ID NO: 1301503 - RNA, 19 nt, Artificial Sequence
  Description of Artificial Sequence: Synthetic oligonucleotide
ucuaaucugagcaacuuca

SEQ ID NO: 1301504 - RNA, 19 nt, Artificial Sequence
  Description of Artificial Sequence: Synthetic oligonucleotide
aaacaagaaucuaaacucc

SEQ ID NO: 1301505 - RNA, 19 nt, Artificial Sequence
  Description of Artificial Sequence: Synthetic oligonucleotide
ugaaaugcuaggaugggcc

SEQ ID NO: 1301506 - RNA, 19 nt, Artificial Sequence
  Description of Artificial Sequence: Synthetic oligonucleotide
agugauaccugcuauaaca

SEQ ID NO: 1301507 - RNA, 19 nt, Artificial Sequence
  Description of Artificial Sequence: Synthetic oligonucleotide
auacuaguuauuaacaagg

SEQ ID NO: 1301508 - RNA, 19 nt, Artificial Sequence
  Description of Artificial Sequence: Synthetic oligonucleotide
uuugugcuuagccaagggg

SEQ ID NO: 1301509 - RNA, 19 nt, Artificial Sequence
  Description of Artificial Sequence: Synthetic oligonucleotide
auuuguaugggcugguguc

SEQ ID NO: 1301510 - RNA, 19 nt, Artificial Sequence
  Description of Artificial Sequence: Synthetic oligonucleotide
aagaaucuaaacuccaaaa

SEQ ID NO: 1301511 - RNA, 19 nt, Artificial Sequence
  Description of Artificial Sequence: Synthetic oligonucleotide
cuuuagaacaaccuaagca

SEQ ID NO: 1301512 - RNA, 19 nt, Artificial Sequence
  Description of Artificial Sequence: Synthetic oligonucleotide
uacucaacacuccugagac

SEQ ID NO: 1301513 - RNA, 19 nt, Artificial Sequence
  Description of Artificial Sequence: Synthetic oligonucleotide
aguucaguuuucuaccagg

SEQ ID NO: 1301514 - RNA, 19 nt, Artificial Sequence
  Description of Artificial Sequence: Synthetic oligonucleotide
acuaguuauuaacaaggag

SEQ ID NO: 1301515 - RNA, 19 nt, Artificial Sequence
  Description of Artificial Sequence: Synthetic oligonucleotide
uuauuaacaaggaggcuac

SEQ ID NO: 1301516 - RNA, 19 nt, Artificial Sequence
  Description of Artificial Sequence: Synthetic oligonucleotide
caaucuauguuaagugugg

SEQ ID NO: 1301517 - RNA, 19 nt, Artificial Sequence
  Description of Artificial Sequence: Synthetic oligonucleotide
agaaacacaugagggaacc

SEQ ID NO: 1301518 - RNA, 19 nt, Artificial Sequence
  Description of Artificial Sequence: Synthetic oligonucleotide
aaaacaaguuuuaagcuau

SEQ ID NO: 1301519 - RNA, 19 nt, Artificial Sequence
  Description of Artificial Sequence: Synthetic oligonucleotide
acuauguagugucucugcg

SEQ ID NO: 1301520 - RNA, 19 nt, Artificial Sequence
  Description of Artificial Sequence: Synthetic oligonucleotide
aagguaauacuuccuagaa

SEQ ID NO: 1301521 - RNA, 19 nt, Artificial Sequence
  Description of Artificial Sequence: Synthetic oligonucleotide
agcuauucccuccuggagg

SEQ ID NO: 1301522 - RNA, 19 nt, Artificial Sequence
  Description of Artificial Sequence: Synthetic oligonucleotide
cuggcaaccuuaaagcagg

SEQ ID NO: 1301523 - RNA, 19 nt, Artificial Sequence
  Description of Artificial Sequence: Synthetic oligonucleotide
agagaacuccgacuuuucc

SEQ ID NO: 1301524 - RNA, 19 nt, Artificial Sequence
  Description of Artificial Sequence: Synthetic oligonucleotide
cuauguuaagugugggugg

SEQ ID NO: 1301525 - RNA, 19 nt, Artificial Sequence
  Description of Artificial Sequence: Synthetic oligonucleotide
ugaacaaagcucuucucac

SEQ ID NO: 1301526 - RNA, 19 nt, Artificial Sequence
  Description of Artificial Sequence: Synthetic oligonucleotide
ucuuuagaacaaccuaagc

SEQ ID NO: 1301527 - RNA, 19 nt, Artificial Sequence
  Description of Artificial Sequence: Synthetic oligonucleotide
uggauauguggacuggugc

SEQ ID NO: 1301528 - RNA, 19 nt, Artificial Sequence
  Description of Artificial Sequence: Synthetic oligonucleotide
gaggcuacaaauugaagga

SEQ ID NO: 1301529 - RNA, 19 nt, Artificial Sequence
  Description of Artificial Sequence: Synthetic oligonucleotide
aagugauaccugcuauaac

SEQ ID NO: 1301530 - RNA, 19 nt, Artificial Sequence
  Description of Artificial Sequence: Synthetic oligonucleotide
uuagaacaaccuaagcagu

SEQ ID NO: 1301531 - RNA, 19 nt, Artificial Sequence
  Description of Artificial Sequence: Synthetic oligonucleotide
uauaccaaugaacccacuc

SEQ ID NO: 1301532 - RNA, 19 nt, Artificial Sequence
  Description of Artificial Sequence: Synthetic oligonucleotide
uuaacugugggaagacgug

SEQ ID NO: 1301533 - RNA, 19 nt, Artificial Sequence
  Description of Artificial Sequence: Synthetic oligonucleotide
cuagaauucuccacauacc

SEQ ID NO: 1301534 - RNA, 19 nt, Artificial Sequence
  Description of Artificial Sequence: Synthetic oligonucleotide
aaucuauguuaaguguggg

SEQ ID NO: 1301535 - RNA, 19 nt, Artificial Sequence
  Description of Artificial Sequence: Synthetic oligonucleotide
ggaaagucuaaucugagca

SEQ ID NO: 1301536 - RNA, 19 nt, Artificial Sequence
  Description of Artificial Sequence: Synthetic oligonucleotide
uguuaggugagaaucucuc

SEQ ID NO: 1301537 - RNA, 19 nt, Artificial Sequence
  Description of Artificial Sequence: Synthetic oligonucleotide
uauguuaaguguggguggg

SEQ ID NO: 1301538 - RNA, 19 nt, Artificial Sequence
  Description of Artificial Sequence: Synthetic oligonucleotide
auaccaaugaacccacucu

SEQ ID NO: 1301539 - RNA, 19 nt, Artificial Sequence
  Description of Artificial Sequence: Synthetic oligonucleotide
uccaaucuauguuaagugu

SEQ ID NO: 1301540 - RNA, 19 nt, Artificial Sequence
  Description of Artificial Sequence: Synthetic oligonucleotide
gaaacaauucucaggaaga

SEQ ID NO: 1301541 - RNA, 19 nt, Artificial Sequence
  Description of Artificial Sequence: Synthetic oligonucleotide
ucuccaaucuauguuaagu

SEQ ID NO: 1301542 - RNA, 19 nt, Artificial Sequence
  Description of Artificial Sequence: Synthetic oligonucleotide
gugugaaaugcuaggaugg

SEQ ID NO: 1301543 - RNA, 19 nt, Artificial Sequence
  Description of Artificial Sequence: Synthetic oligonucleotide
cuauguagugucucugcgg

SEQ ID NO: 1301544 - RNA, 19 nt, Artificial Sequence
  Description of Artificial Sequence: Synthetic oligonucleotide
agccugacuauguaguguc

SEQ ID NO: 1301545 - RNA, 19 nt, Artificial Sequence
  Description of Artificial Sequence: Synthetic oligonucleotide
cacauauaccaaugaaccc

SEQ ID NO: 1301546 - RNA, 19 nt, Artificial Sequence
  Description of Artificial Sequence: Synthetic oligonucleotide
agacgugugaaaugcuagg

SEQ ID NO: 1301547 - RNA, 19 nt, Artificial Sequence
  Description of Artificial Sequence: Synthetic oligonucleotide
acucgggacaacuguaggg

SEQ ID NO: 1301548 - RNA, 19 nt, Artificial Sequence
  Description of Artificial Sequence: Synthetic oligonucleotide
cuccaaucuauguuaagug

SEQ ID NO: 1301549 - RNA, 19 nt, Artificial Sequence
  Description of Artificial Sequence: Synthetic oligonucleotide
aacuucuacaacucuuaaa

SEQ ID NO: 1301550 - RNA, 19 nt, Artificial Sequence
  Description of Artificial Sequence: Synthetic oligonucleotide
aagacgugugaaaugcuag

SEQ ID NO: 1301551 - RNA, 19 nt, Artificial Sequence
  Description of Artificial Sequence: Synthetic oligonucleotide
gcagaaacaauucucagga

SEQ ID NO: 1301552 - RNA, 19 nt, Artificial Sequence
  Description of Artificial Sequence: Synthetic oligonucleotide
ugugaaaugcuaggauggg

SEQ ID NO: 1301553 - RNA, 19 nt, Artificial Sequence
  Description of Artificial Sequence: Synthetic oligonucleotide
gaaucaagcucagucuucc

SEQ ID NO: 1301554 - RNA, 19 nt, Artificial Sequence
  Description of Artificial Sequence: Synthetic oligonucleotide
aaagcaggccauugggccu

SEQ ID NO: 1301555 - RNA, 19 nt, Artificial Sequence
  Description of Artificial Sequence: Synthetic oligonucleotide
uaccaaugaacccacucuc

SEQ ID NO: 1301556 - RNA, 19 nt, Artificial Sequence
  Description of Artificial Sequence: Synthetic oligonucleotide
ucugagcaacuucaaguga

SEQ ID NO: 1301557 - RNA, 19 nt, Artificial Sequence
  Description of Artificial Sequence: Synthetic oligonucleotide
cauucggaacauuuguaug

SEQ ID NO: 1301558 - RNA, 19 nt, Artificial Sequence
  Description of Artificial Sequence: Synthetic oligonucleotide
uggcauucggaacauuugu

SEQ ID NO: 1301559 - RNA, 19 nt, Artificial Sequence
  Description of Artificial Sequence: Synthetic oligonucleotide
cuguggcugaguaagacuc

SEQ ID NO: 1301560 - RNA, 19 nt, Artificial Sequence
  Description of Artificial Sequence: Synthetic oligonucleotide
gauaccugcuauaacagaa

SEQ ID NO: 1301561 - RNA, 19 nt, Artificial Sequence
  Description of Artificial Sequence: Synthetic oligonucleotide
agaugagagaacuccgacu

SEQ ID NO: 1301562 - RNA, 19 nt, Artificial Sequence
  Description of Artificial Sequence: Synthetic oligonucleotide
caacuaagcuguuagguga

SEQ ID NO: 1301563 - RNA, 19 nt, Artificial Sequence
  Description of Artificial Sequence: Synthetic oligonucleotide
uguggacuggugcuggggc

SEQ ID NO: 1301564 - RNA, 19 nt, Artificial Sequence
  Description of Artificial Sequence: Synthetic oligonucleotide
ccuagaauucuccacauac

SEQ ID NO: 1301565 - RNA, 19 nt, Artificial Sequence
  Description of Artificial Sequence: Synthetic oligonucleotide
uuuggcucuccaaucuaug

SEQ ID NO: 1301566 - RNA, 19 nt, Artificial Sequence
  Description of Artificial Sequence: Synthetic oligonucleotide
uggacuauuccagaacaca

SEQ ID NO: 1301567 - RNA, 19 nt, Artificial Sequence
  Description of Artificial Sequence: Synthetic oligonucleotide
cacuggaaagucuaaucug

SEQ ID NO: 1301568 - RNA, 19 nt, Artificial Sequence
  Description of Artificial Sequence: Synthetic oligonucleotide
uucuggacuauuccagaac

SEQ ID NO: 1301569 - RNA, 19 nt, Artificial Sequence
  Description of Artificial Sequence: Synthetic oligonucleotide
agcaacuaagcuguuaggu

SEQ ID NO: 1301570 - RNA, 19 nt, Artificial Sequence
  Description of Artificial Sequence: Synthetic oligonucleotide
guagcggaagcugaucugg

SEQ ID NO: 1301571 - RNA, 19 nt, Artificial Sequence
  Description of Artificial Sequence: Synthetic oligonucleotide
uuuguaugggcuggugucc

SEQ ID NO: 1301572 - RNA, 19 nt, Artificial Sequence
  Description of Artificial Sequence: Synthetic oligonucleotide
agucagccugacuauguag

SEQ ID NO: 1301573 - RNA, 19 nt, Artificial Sequence
  Description of Artificial Sequence: Synthetic oligonucleotide
aucuauguuaagugugggu

SEQ ID NO: 1301574 - RNA, 19 nt, Artificial Sequence
  Description of Artificial Sequence: Synthetic oligonucleotide
ugcauaugugcagucagcu

SEQ ID NO: 1301575 - RNA, 19 nt, Artificial Sequence
  Description of Artificial Sequence: Synthetic oligonucleotide
ugauaccugcuauaacaga

SEQ ID NO: 1301576 - RNA, 19 nt, Artificial Sequence
  Description of Artificial Sequence: Synthetic oligonucleotide
aaacaauucucaggaagaa

SEQ ID NO: 1301577 - RNA, 19 nt, Artificial Sequence
  Description of Artificial Sequence: Synthetic oligonucleotide
gaaagucuaaucugagcaa

SEQ ID NO: 1301578 - RNA, 19 nt, Artificial Sequence
  Description of Artificial Sequence: Synthetic oligonucleotide
aacuaagcuguuaggugag

SEQ ID NO: 1301579 - RNA, 19 nt, Artificial Sequence
  Description of Artificial Sequence: Synthetic oligonucleotide
gagcaacuaagcuguuagg

SEQ ID NO: 1301580 - RNA, 19 nt, Artificial Sequence
  Description of Artificial Sequence: Synthetic oligonucleotide
uuuuggcucuccaaucuau

SEQ ID NO: 1301581 - RNA, 19 nt, Artificial Sequence
  Description of Artificial Sequence: Synthetic oligonucleotide
aaaagccuuugugcuuagc

SEQ ID NO: 1301582 - RNA, 19 nt, Artificial Sequence
  Description of Artificial Sequence: Synthetic oligonucleotide
gguaauacuuccuagaauu

SEQ ID NO: 1301583 - RNA, 19 nt, Artificial Sequence
  Description of Artificial Sequence: Synthetic oligonucleotide
gucuuuagaacaaccuaag

SEQ ID NO: 1301584 - RNA, 19 nt, Artificial Sequence
  Description of Artificial Sequence: Synthetic oligonucleotide
ucgacuucuuggccugugg

SEQ ID NO: 1301585 - RNA, 19 nt, Artificial Sequence
  Description of Artificial Sequence: Synthetic oligonucleotide
gaacacagccugcuccgcg

SEQ ID NO: 1301586 - RNA, 19 nt, Artificial Sequence
  Description of Artificial Sequence: Synthetic oligonucleotide
aaauugaaggaagguaaua

SEQ ID NO: 1301587 - RNA, 19 nt, Artificial Sequence
  Description of Artificial Sequence: Synthetic oligonucleotide
gaugagagaacuccgacuu

SEQ ID NO: 1301588 - RNA, 19 nt, Artificial Sequence
  Description of Artificial Sequence: Synthetic oligonucleotide
agugugggugggcuaaaag

SEQ ID NO: 1301589 - RNA, 19 nt, Artificial Sequence
  Description of Artificial Sequence: Synthetic oligonucleotide
uaccugcuauaacagaauc

SEQ ID NO: 1301590 - RNA, 19 nt, Artificial Sequence
  Description of Artificial Sequence: Synthetic oligonucleotide
cuuugugcuuagccaaggg

SEQ ID NO: 1301591 - RNA, 19 nt, Artificial Sequence
  Description of Artificial Sequence: Synthetic oligonucleotide
ggaacauuuguaugggcug

SEQ ID NO: 1301592 - RNA, 19 nt, Artificial Sequence
  Description of Artificial Sequence: Synthetic oligonucleotide
acuccugacccaauuguac

SEQ ID NO: 1301593 - RNA, 19 nt, Artificial Sequence
  Description of Artificial Sequence: Synthetic oligonucleotide
uguuaagugugggugggcu

SEQ ID NO: 1301594 - RNA, 19 nt, Artificial Sequence
  Description of Artificial Sequence: Synthetic oligonucleotide
aaugcuaggaugggcccug

SEQ ID NO: 1301595 - RNA, 19 nt, Artificial Sequence
  Description of Artificial Sequence: Synthetic oligonucleotide
gcaaccuuaaagcaggcca

SEQ ID NO: 1301596 - RNA, 19 nt, Artificial Sequence
  Description of Artificial Sequence: Synthetic oligonucleotide
acccaauuguaccugccug

SEQ ID NO: 1301597 - RNA, 19 nt, Artificial Sequence
  Description of Artificial Sequence: Synthetic oligonucleotide
ucacacugaugcagcuucg

SEQ ID NO: 1301598 - RNA, 19 nt, Artificial Sequence
  Description of Artificial Sequence: Synthetic oligonucleotide
acacuccugacccaauugu

SEQ ID NO: 1301599 - RNA, 19 nt, Artificial Sequence
  Description of Artificial Sequence: Synthetic oligonucleotide
ccaaucuauguuaagugug

SEQ ID NO: 1301600 - RNA, 19 nt, Artificial Sequence
  Description of Artificial Sequence: Synthetic oligonucleotide
uuggcucuccaaucuaugu

SEQ ID NO: 1301601 - RNA, 19 nt, Artificial Sequence
  Description of Artificial Sequence: Synthetic oligonucleotide
acaacucuuaaaauuuaga

SEQ ID NO: 1301602 - RNA, 19 nt, Artificial Sequence
  Description of Artificial Sequence: Synthetic oligonucleotide
gugugggugggcuaaaaga

SEQ ID NO: 1301603 - RNA, 19 nt, Artificial Sequence
  Description of Artificial Sequence: Synthetic oligonucleotide
guacucaacacuccugaga

SEQ ID NO: 1301604 - RNA, 19 nt, Artificial Sequence
  Description of Artificial Sequence: Synthetic oligonucleotide
agaaucaagcucagucuuc

SEQ ID NO: 1301605 - RNA, 19 nt, Artificial Sequence
  Description of Artificial Sequence: Synthetic oligonucleotide
agguaauacuuccuagaau

SEQ ID NO: 1301606 - RNA, 19 nt, Artificial Sequence
  Description of Artificial Sequence: Synthetic oligonucleotide
aacaaggaggcuacaaauu

SEQ ID NO: 1301607 - RNA, 19 nt, Artificial Sequence
  Description of Artificial Sequence: Synthetic oligonucleotide
cacaguacccacagaugag

SEQ ID NO: 1301608 - RNA, 19 nt, Artificial Sequence
  Description of Artificial Sequence: Synthetic oligonucleotide
uccuccaagggauguggcc

SEQ ID NO: 1301609 - RNA, 19 nt, Artificial Sequence
  Description of Artificial Sequence: Synthetic oligonucleotide
cuguccucaacagacugag

SEQ ID NO: 1301610 - RNA, 19 nt, Artificial Sequence
  Description of Artificial Sequence: Synthetic oligonucleotide
agcccauagcuauucccuc

SEQ ID NO: 1301611 - RNA, 19 nt, Artificial Sequence
  Description of Artificial Sequence: Synthetic oligonucleotide
cuccgcgccaaagaaagcc

SEQ ID NO: 1301612 - RNA, 19 nt, Artificial Sequence
  Description of Artificial Sequence: Synthetic oligonucleotide
ugagagaacuccgacuuuu

SEQ ID NO: 1301613 - RNA, 19 nt, Artificial Sequence
  Description of Artificial Sequence: Synthetic oligonucleotide
aacugugggaagacgugug

SEQ ID NO: 1301614 - RNA, 19 nt, Artificial Sequence
  Description of Artificial Sequence: Synthetic oligonucleotide
uaacugugggaagacgugu

SEQ ID NO: 1301615 - RNA, 19 nt, Artificial Sequence
  Description of Artificial Sequence: Synthetic oligonucleotide
acggugaggggcuggcaac

SEQ ID NO: 1301616 - RNA, 19 nt, Artificial Sequence
  Description of Artificial Sequence: Synthetic oligonucleotide
uguccucaacagacugagg

SEQ ID NO: 1301617 - RNA, 19 nt, Artificial Sequence
  Description of Artificial Sequence: Synthetic oligonucleotide
ugauuccaagagagcagga

SEQ ID NO: 1301618 - RNA, 19 nt, Artificial Sequence
  Description of Artificial Sequence: Synthetic oligonucleotide
uguggcugaguaagacucu

SEQ ID NO: 1301619 - RNA, 19 nt, Artificial Sequence
  Description of Artificial Sequence: Synthetic oligonucleotide
gucuaaucugagcaacuuc

SEQ ID NO: 1301620 - RNA, 19 nt, Artificial Sequence
  Description of Artificial Sequence: Synthetic oligonucleotide
ggcuaaaagagcccauagc

SEQ ID NO: 1301621 - RNA, 19 nt, Artificial Sequence
  Description of Artificial Sequence: Synthetic oligonucleotide
ucgggacaacuguagggcc

SEQ ID NO: 1301622 - RNA, 19 nt, Artificial Sequence
  Description of Artificial Sequence: Synthetic oligonucleotide
ucggaacauuuguaugggc

SEQ ID NO: 1301623 - RNA, 19 nt, Artificial Sequence
  Description of Artificial Sequence: Synthetic oligonucleotide
gagaaucucuccuggauau

SEQ ID NO: 1301624 - RNA, 19 nt, Artificial Sequence
  Description of Artificial Sequence: Synthetic oligonucleotide
aagucagccugacuaugua

SEQ ID NO: 1301625 - RNA, 19 nt, Artificial Sequence
  Description of Artificial Sequence: Synthetic oligonucleotide
acaugagggaacccacgca

SEQ ID NO: 1301626 - RNA, 19 nt, Artificial Sequence
  Description of Artificial Sequence: Synthetic oligonucleotide
auguuaagugugggugggc

SEQ ID NO: 1301627 - RNA, 19 nt, Artificial Sequence
  Description of Artificial Sequence: Synthetic oligonucleotide
uccgcgccaaagaaagccu

SEQ ID NO: 1301628 - RNA, 19 nt, Artificial Sequence
  Description of Artificial Sequence: Synthetic oligonucleotide
gacgugugaaaugcuagga

SEQ ID NO: 1301629 - RNA, 19 nt, Artificial Sequence
  Description of Artificial Sequence: Synthetic oligonucleotide
cgugguuugggccuaaggc

SEQ ID NO: 1301630 - RNA, 19 nt, Artificial Sequence
  Description of Artificial Sequence: Synthetic oligonucleotide
cacucgggacaacuguagg

SEQ ID NO: 1301631 - RNA, 19 nt, Artificial Sequence
  Description of Artificial Sequence: Synthetic oligonucleotide
caaaccccugugcuuuucc

SEQ ID NO: 1301632 - RNA, 19 nt, Artificial Sequence
  Description of Artificial Sequence: Synthetic oligonucleotide
auuguaccugccugugaga

SEQ ID NO: 1301633 - RNA, 19 nt, Artificial Sequence
  Description of Artificial Sequence: Synthetic oligonucleotide
agaagucagccugacuaug

SEQ ID NO: 1301634 - RNA, 19 nt, Artificial Sequence
  Description of Artificial Sequence: Synthetic oligonucleotide
uagcggaagcugaucuggc

SEQ ID NO: 1301635 - RNA, 19 nt, Artificial Sequence
  Description of Artificial Sequence: Synthetic oligonucleotide
ggccccauuuaacuguggg

SEQ ID NO: 1301636 - RNA, 19 nt, Artificial Sequence
  Description of Artificial Sequence: Synthetic oligonucleotide
ggugugacaguacaccaga

SEQ ID NO: 1301637 - RNA, 19 nt, Artificial Sequence
  Description of Artificial Sequence: Synthetic oligonucleotide
uguaccugccugugagacu

SEQ ID NO: 1301638 - RNA, 19 nt, Artificial Sequence
  Description of Artificial Sequence: Synthetic oligonucleotide
ccgacuuuuccuccaaggg

SEQ ID NO: 1301639 - RNA, 19 nt, Artificial Sequence
  Description of Artificial Sequence: Synthetic oligonucleotide
ccccaaaugacaguggggc

SEQ ID NO: 1301640 - RNA, 19 nt, Artificial Sequence
  Description of Artificial Sequence: Synthetic oligonucleotide
agacaaaccccugugcuuu

SEQ ID NO: 1301641 - RNA, 19 nt, Artificial Sequence
  Description of Artificial Sequence: Synthetic oligonucleotide
acagaugagagaacuccga

SEQ ID NO: 1301642 - RNA, 19 nt, Artificial Sequence
  Description of Artificial Sequence: Synthetic oligonucleotide
gggccugauuccaagagag

SEQ ID NO: 1301643 - RNA, 19 nt, Artificial Sequence
  Description of Artificial Sequence: Synthetic oligonucleotide
acaagaaucuaaacuccaa

SEQ ID NO: 1301644 - RNA, 19 nt, Artificial Sequence
  Description of Artificial Sequence: Synthetic oligonucleotide
gguuaggaacaacuucuac

SEQ ID NO: 1301645 - RNA, 19 nt, Artificial Sequence
  Description of Artificial Sequence: Synthetic oligonucleotide
accugcuauaacagaauca

SEQ ID NO: 1301646 - RNA, 19 nt, Artificial Sequence
  Description of Artificial Sequence: Synthetic oligonucleotide
accuuaaagcaggccauug

SEQ ID NO: 1301647 - RNA, 19 nt, Artificial Sequence
  Description of Artificial Sequence: Synthetic oligonucleotide
uugggccuaaggcucuccu

SEQ ID NO: 1301648 - RNA, 19 nt, Artificial Sequence
  Description of Artificial Sequence: Synthetic oligonucleotide
cuguggccccauuuaacug

SEQ ID NO: 1301649 - RNA, 19 nt, Artificial Sequence
  Description of Artificial Sequence: Synthetic oligonucleotide
uggcugaguaagacucucu

SEQ ID NO: 1301650 - RNA, 19 nt, Artificial Sequence
  Description of Artificial Sequence: Synthetic oligonucleotide
aacaaccuaagcaguucau

SEQ ID NO: 1301651 - RNA, 19 nt, Artificial Sequence
  Description of Artificial Sequence: Synthetic oligonucleotide
uauuaacaaggaggcuaca

SEQ ID NO: 1301652 - RNA, 19 nt, Artificial Sequence
  Description of Artificial Sequence: Synthetic oligonucleotide
aguucccagguuaggaaca

SEQ ID NO: 1301653 - RNA, 19 nt, Artificial Sequence
  Description of Artificial Sequence: Synthetic oligonucleotide
acacucgggacaacuguag

SEQ ID NO: 1301654 - RNA, 19 nt, Artificial Sequence
  Description of Artificial Sequence: Synthetic oligonucleotide
acaaccuaagcaguucauu

SEQ ID NO: 1301655 - RNA, 19 nt, Artificial Sequence
  Description of Artificial Sequence: Synthetic oligonucleotide
uggcaaccuuaaagcaggc

SEQ ID NO: 1301656 - RNA, 19 nt, Artificial Sequence
  Description of Artificial Sequence: Synthetic oligonucleotide
gacggugaggggcuggcaa

SEQ ID NO: 1301657 - RNA, 19 nt, Artificial Sequence
  Description of Artificial Sequence: Synthetic oligonucleotide
ugggcuaaaagagcccaua

SEQ ID NO: 1301658 - RNA, 19 nt, Artificial Sequence
  Description of Artificial Sequence: Synthetic oligonucleotide
ccaaugaacccacucucac

SEQ ID NO: 1301659 - RNA, 19 nt, Artificial Sequence
  Description of Artificial Sequence: Synthetic oligonucleotide
cugugagacuucuguuuuc

SEQ ID NO: 1301660 - RNA, 19 nt, Artificial Sequence
  Description of Artificial Sequence: Synthetic oligonucleotide
aaccuuaaagcaggccauu

SEQ ID NO: 1301661 - RNA, 19 nt, Artificial Sequence
  Description of Artificial Sequence: Synthetic oligonucleotide
uggccccauuuaacugugg

SEQ ID NO: 1301662 - RNA, 19 nt, Artificial Sequence
  Description of Artificial Sequence: Synthetic oligonucleotide
uagagcaacuaagcuguua

SEQ ID NO: 1301663 - RNA, 19 nt, Artificial Sequence
  Description of Artificial Sequence: Synthetic oligonucleotide
auaccugcuauaacagaau

SEQ ID NO: 1301664 - RNA, 19 nt, Artificial Sequence
  Description of Artificial Sequence: Synthetic oligonucleotide
cacugaugcagcuucgacu

SEQ ID NO: 1301665 - RNA, 19 nt, Artificial Sequence
  Description of Artificial Sequence: Synthetic oligonucleotide
ggauauguggacuggugcu

SEQ ID NO: 1301666 - RNA, 19 nt, Artificial Sequence
  Description of Artificial Sequence: Synthetic oligonucleotide
uucgacuucuuggccugug

SEQ ID NO: 1301667 - RNA, 19 nt, Artificial Sequence
  Description of Artificial Sequence: Synthetic oligonucleotide
guaggcucaguucccaggu

SEQ ID NO: 1301668 - RNA, 19 nt, Artificial Sequence
  Description of Artificial Sequence: Synthetic oligonucleotide
cagcuucgacuucuuggcc

SEQ ID NO: 1301669 - RNA, 19 nt, Artificial Sequence
  Description of Artificial Sequence: Synthetic oligonucleotide
cauuuguaugggcuggugu

SEQ ID NO: 1301670 - RNA, 19 nt, Artificial Sequence
  Description of Artificial Sequence: Synthetic oligonucleotide
cacuagucccuguggugug

SEQ ID NO: 1301671 - RNA, 19 nt, Artificial Sequence
  Description of Artificial Sequence: Synthetic oligonucleotide
cccauuuaacugugggaag

SEQ ID NO: 1301672 - RNA, 19 nt, Artificial Sequence
  Description of Artificial Sequence: Synthetic oligonucleotide
gagagaacuccgacuuuuc

SEQ ID NO: 1301673 - RNA, 19 nt, Artificial Sequence
  Description of Artificial Sequence: Synthetic oligonucleotide
gacccaauuguaccugccu

SEQ ID NO: 1301674 - RNA, 19 nt, Artificial Sequence
  Description of Artificial Sequence: Synthetic oligonucleotide
aggcuacaaauugaaggaa

SEQ ID NO: 1301675 - RNA, 19 nt, Artificial Sequence
  Description of Artificial Sequence: Synthetic oligonucleotide
gagcccauagcuauucccu

SEQ ID NO: 1301676 - RNA, 19 nt, Artificial Sequence
  Description of Artificial Sequence: Synthetic oligonucleotide
cugacuauguagugucucu

SEQ ID NO: 1301677 - RNA, 19 nt, Artificial Sequence
  Description of Artificial Sequence: Synthetic oligonucleotide
guuuuggcucuccaaucua

SEQ ID NO: 1301678 - RNA, 19 nt, Artificial Sequence
  Description of Artificial Sequence: Synthetic oligonucleotide
agcugaucuggcauucgga

SEQ ID NO: 1301679 - RNA, 19 nt, Artificial Sequence
  Description of Artificial Sequence: Synthetic oligonucleotide
cucccgcuggugaauuuuc

SEQ ID NO: 1301680 - RNA, 19 nt, Artificial Sequence
  Description of Artificial Sequence: Synthetic oligonucleotide
gucagccugacuauguagu

SEQ ID NO: 1301681 - RNA, 19 nt, Artificial Sequence
  Description of Artificial Sequence: Synthetic oligonucleotide
cacgcaguguguuuuggcu

SEQ ID NO: 1301682 - RNA, 19 nt, Artificial Sequence
  Description of Artificial Sequence: Synthetic oligonucleotide
caauuguaccugccuguga

SEQ ID NO: 1301683 - RNA, 19 nt, Artificial Sequence
  Description of Artificial Sequence: Synthetic oligonucleotide
gagacaaaccccugugcuu

SEQ ID NO: 1301684 - RNA, 19 nt, Artificial Sequence
  Description of Artificial Sequence: Synthetic oligonucleotide
gccuaaggcucuccucugg

SEQ ID NO: 1301685 - RNA, 19 nt, Artificial Sequence
  Description of Artificial Sequence: Synthetic oligonucleotide
ccuaaggcucuccucuggc

SEQ ID NO: 1301686 - RNA, 19 nt, Artificial Sequence
  Description of Artificial Sequence: Synthetic oligonucleotide
ggugggcuaaaagagccca

SEQ ID NO: 1301687 - RNA, 19 nt, Artificial Sequence
  Description of Artificial Sequence: Synthetic oligonucleotide
cagguagagcaacuaagcu

SEQ ID NO: 1301688 - RNA, 19 nt, Artificial Sequence
  Description of Artificial Sequence: Synthetic oligonucleotide
aagugugggugggcuaaaa

SEQ ID NO: 1301689 - RNA, 19 nt, Artificial Sequence
  Description of Artificial Sequence: Synthetic oligonucleotide
caaccuuaaagcaggccau

SEQ ID NO: 1301690 - RNA, 19 nt, Artificial Sequence
  Description of Artificial Sequence: Synthetic oligonucleotide
aagcaggccauugggccuu

SEQ ID NO: 1301691 - RNA, 19 nt, Artificial Sequence
  Description of Artificial Sequence: Synthetic oligonucleotide
uaugggcuggugucccuuu

SEQ ID NO: 1301692 - RNA, 19 nt, Artificial Sequence
  Description of Artificial Sequence: Synthetic oligonucleotide
aggaugggcccuggaacug

SEQ ID NO: 1301693 - RNA, 19 nt, Artificial Sequence
  Description of Artificial Sequence: Synthetic oligonucleotide
cacacucgggacaacugua

SEQ ID NO: 1301694 - RNA, 19 nt, Artificial Sequence
  Description of Artificial Sequence: Synthetic oligonucleotide
cuagucccuguggugugac

SEQ ID NO: 1301695 - RNA, 19 nt, Artificial Sequence
  Description of Artificial Sequence: Synthetic oligonucleotide
gcauucggaacauuuguau

SEQ ID NO: 1301696 - RNA, 19 nt, Artificial Sequence
  Description of Artificial Sequence: Synthetic oligonucleotide
gccuuccaugcucuggagc

SEQ ID NO: 1301697 - RNA, 19 nt, Artificial Sequence
  Description of Artificial Sequence: Synthetic oligonucleotide
cuguuaggugagaaucucu

SEQ ID NO: 1301698 - RNA, 19 nt, Artificial Sequence
  Description of Artificial Sequence: Synthetic oligonucleotide
acuagucccugugguguga

SEQ ID NO: 1301699 - RNA, 19 nt, Artificial Sequence
  Description of Artificial Sequence: Synthetic oligonucleotide
uagucccuguggugugaca

SEQ ID NO: 1301700 - RNA, 19 nt, Artificial Sequence
  Description of Artificial Sequence: Synthetic oligonucleotide
gcuguuaggugagaaucuc

SEQ ID NO: 1301701 - RNA, 19 nt, Artificial Sequence
  Description of Artificial Sequence: Synthetic oligonucleotide
ccuuugugcuuagccaagg

SEQ ID NO: 1301702 - RNA, 19 nt, Artificial Sequence
  Description of Artificial Sequence: Synthetic oligonucleotide
cacuccugacccaauugua

SEQ ID NO: 1301703 - RNA, 19 nt, Artificial Sequence
  Description of Artificial Sequence: Synthetic oligonucleotide
guaccugccugugagacuu

SEQ ID NO: 1301704 - RNA, 19 nt, Artificial Sequence
  Description of Artificial Sequence: Synthetic oligonucleotide
auauaccaaugaacccacu

SEQ ID NO: 1301705 - RNA, 19 nt, Artificial Sequence
  Description of Artificial Sequence: Synthetic oligonucleotide
ccaauuguaccugccugug

SEQ ID NO: 1301706 - RNA, 19 nt, Artificial Sequence
  Description of Artificial Sequence: Synthetic oligonucleotide
agguuaggaacaacuucua

SEQ ID NO: 1301707 - RNA, 19 nt, Artificial Sequence
  Description of Artificial Sequence: Synthetic oligonucleotide
ccugacuauguagugucuc

SEQ ID NO: 1301708 - RNA, 19 nt, Artificial Sequence
  Description of Artificial Sequence: Synthetic oligonucleotide
cuaaggcucuccucuggcu

SEQ ID NO: 1301709 - RNA, 19 nt, Artificial Sequence
  Description of Artificial Sequence: Synthetic oligonucleotide
ggguaggcucaguucccag

SEQ ID NO: 1301710 - RNA, 19 nt, Artificial Sequence
  Description of Artificial Sequence: Synthetic oligonucleotide
ccgugguuugggccuaagg

SEQ ID NO: 1301711 - RNA, 19 nt, Artificial Sequence
  Description of Artificial Sequence: Synthetic oligonucleotide
ggugcugcuucugaacaaa

SEQ ID NO: 1301712 - RNA, 19 nt, Artificial Sequence
  Description of Artificial Sequence: Synthetic oligonucleotide
ggccuaaggcucuccucug

SEQ ID NO: 1301713 - RNA, 19 nt, Artificial Sequence
  Description of Artificial Sequence: Synthetic oligonucleotide
cuaccaggggcagggucuc

SEQ ID NO: 1301714 - RNA, 19 nt, Artificial Sequence
  Description of Artificial Sequence: Synthetic oligonucleotide
gagggaacccacgcagugu

SEQ ID NO: 1301715 - RNA, 19 nt, Artificial Sequence
  Description of Artificial Sequence: Synthetic oligonucleotide
caggccauugggccuucca

SEQ ID NO: 1301716 - RNA, 19 nt, Artificial Sequence
  Description of Artificial Sequence: Synthetic oligonucleotide
gaagcuccuguggcacaca

SEQ ID NO: 1301717 - RNA, 19 nt, Artificial Sequence
  Description of Artificial Sequence: Synthetic oligonucleotide
ggggucuuuagaacaaccu

SEQ ID NO: 1301718 - RNA, 19 nt, Artificial Sequence
  Description of Artificial Sequence: Synthetic oligonucleotide
gggugggcuaaaagagccc

SEQ ID NO: 1301719 - RNA, 19 nt, Artificial Sequence
  Description of Artificial Sequence: Synthetic oligonucleotide
gaacccacgcaguguguuu

SEQ ID NO: 1301720 - RNA, 19 nt, Artificial Sequence
  Description of Artificial Sequence: Synthetic oligonucleotide
ccgcgccaaagaaagccug

SEQ ID NO: 1301721 - RNA, 19 nt, Artificial Sequence
  Description of Artificial Sequence: Synthetic oligonucleotide
ccuuuucaccuucaggccu

SEQ ID NO: 1301722 - RNA, 19 nt, Artificial Sequence
  Description of Artificial Sequence: Synthetic oligonucleotide
cccaaaugacaguggggca

SEQ ID NO: 1301723 - RNA, 19 nt, Artificial Sequence
  Description of Artificial Sequence: Synthetic oligonucleotide
gucagauggguggcugaaa

SEQ ID NO: 1301724 - RNA, 19 nt, Artificial Sequence
  Description of Artificial Sequence: Synthetic oligonucleotide
gaggggcuggcaaccuuaa

SEQ ID NO: 1301725 - RNA, 19 nt, Artificial Sequence
  Description of Artificial Sequence: Synthetic oligonucleotide
ccugcuccgcgccaaagaa

SEQ ID NO: 1301726 - RNA, 19 nt, Artificial Sequence
  Description of Artificial Sequence: Synthetic oligonucleotide
cagccugacuauguagugu

SEQ ID NO: 1301727 - RNA, 19 nt, Artificial Sequence
  Description of Artificial Sequence: Synthetic oligonucleotide
cacuccgcucccgcuggug

SEQ ID NO: 1301728 - RNA, 19 nt, Artificial Sequence
  Description of Artificial Sequence: Synthetic oligonucleotide
agcaggccauugggccuuc

SEQ ID NO: 1301729 - RNA, 19 nt, Artificial Sequence
  Description of Artificial Sequence: Synthetic oligonucleotide
ccaggggcagggucucuac

SEQ ID NO: 1301730 - RNA, 19 nt, Artificial Sequence
  Description of Artificial Sequence: Synthetic oligonucleotide
ggcucugcauaugugcagu

SEQ ID NO: 1301731 - RNA, 19 nt, Artificial Sequence
  Description of Artificial Sequence: Synthetic oligonucleotide
ccucuguggccccauuuaa

SEQ ID NO: 1301732 - RNA, 19 nt, Artificial Sequence
  Description of Artificial Sequence: Synthetic oligonucleotide
ggggcaaagcagaaacaau

SEQ ID NO: 1301733 - RNA, 19 nt, Artificial Sequence
  Description of Artificial Sequence: Synthetic oligonucleotide
aucuggcauucggaacauu

SEQ ID NO: 1301734 - RNA, 19 nt, Artificial Sequence
  Description of Artificial Sequence: Synthetic oligonucleotide
gcuccgcgccaaagaaagc

SEQ ID NO: 1301735 - RNA, 19 nt, Artificial Sequence
  Description of Artificial Sequence: Synthetic oligonucleotide
guaugggcuggugucccuu

SEQ ID NO: 1301736 - RNA, 19 nt, Artificial Sequence
  Description of Artificial Sequence: Synthetic oligonucleotide
cccagguuaggaacaacuu

SEQ ID NO: 1301737 - RNA, 19 nt, Artificial Sequence
  Description of Artificial Sequence: Synthetic oligonucleotide
ggaacccacgcaguguguu

SEQ ID NO: 1301738 - RNA, 19 nt, Artificial Sequence
  Description of Artificial Sequence: Synthetic oligonucleotide
gugggcuaaaagagcccau

SEQ ID NO: 1301739 - RNA, 19 nt, Artificial Sequence
  Description of Artificial Sequence: Synthetic oligonucleotide
ccucaacagacugaggguu

SEQ ID NO: 1301740 - RNA, 19 nt, Artificial Sequence
  Description of Artificial Sequence: Synthetic oligonucleotide
ccacguggcucugcauaug

SEQ ID NO: 1301741 - RNA, 19 nt, Artificial Sequence
  Description of Artificial Sequence: Synthetic oligonucleotide
cucugcccacguggcucug

SEQ ID NO: 1301742 - RNA, 19 nt, Artificial Sequence
  Description of Artificial Sequence: Synthetic oligonucleotide
gcagcgcuggugggucacc

SEQ ID NO: 1301743 - RNA, 19 nt, Artificial Sequence
  Description of Artificial Sequence: Synthetic oligonucleotide
ccuggauauguggacuggu

SEQ ID NO: 1301744 - RNA, 19 nt, Artificial Sequence
  Description of Artificial Sequence: Synthetic oligonucleotide
gccgugguuugggccuaag

SEQ ID NO: 1301745 - RNA, 19 nt, Artificial Sequence
  Description of Artificial Sequence: Synthetic oligonucleotide
ccggacggugaggggcugg

SEQ ID NO: 1301746 - RNA, 19 nt, Artificial Sequence
  Description of Artificial Sequence: Synthetic oligonucleotide
ggacggugaggggcuggca

SEQ ID NO: 1301747 - RNA, 19 nt, Artificial Sequence
  Description of Artificial Sequence: Synthetic oligonucleotide
cuauucccuccuggagggu

SEQ ID NO: 1301748 - RNA, 19 nt, Artificial Sequence
  Description of Artificial Sequence: Synthetic oligonucleotide
agccgugguuugggccuaa

SEQ ID NO: 1301749 - RNA, 19 nt, Artificial Sequence
  Description of Artificial Sequence: Synthetic oligonucleotide
cagccugcuccgcgccaaa

SEQ ID NO: 1301750 - RNA, 19 nt, Artificial Sequence
  Description of Artificial Sequence: Synthetic oligonucleotide
gccugacuauguagugucu

SEQ ID NO: 1301751 - RNA, 19 nt, Artificial Sequence
  Description of Artificial Sequence: Synthetic oligonucleotide
gcucccgcuggugaauuuu

SEQ ID NO: 1301752 - RNA, 19 nt, Artificial Sequence
  Description of Artificial Sequence: Synthetic oligonucleotide
cgcgccaaagaaagccugu

SEQ ID NO: 1301753 - RNA, 19 nt, Artificial Sequence
  Description of Artificial Sequence: Synthetic oligonucleotide
gggaacccacgcagugugu

SEQ ID NO: 1301754 - RNA, 19 nt, Artificial Sequence
  Description of Artificial Sequence: Synthetic oligonucleotide
cccggacggugaggggcug

SEQ ID NO: 1301755 - RNA, 19 nt, Artificial Sequence
  Description of Artificial Sequence: Synthetic oligonucleotide
gcccuggaacuggccacua

SEQ ID NO: 1301756 - RNA, 19 nt, Artificial Sequence
  Description of Artificial Sequence: Synthetic oligonucleotide
ccgcucccgcuggugaauu

SEQ ID NO: 1301757 - RNA, 19 nt, Artificial Sequence
  Description of Artificial Sequence: Synthetic oligonucleotide
aauguugacuccuucaucg

SEQ ID NO: 1301758 - RNA, 19 nt, Artificial Sequence
  Description of Artificial Sequence: Synthetic oligonucleotide
uguguaagcagccagauug

SEQ ID NO: 1301759 - RNA, 19 nt, Artificial Sequence
  Description of Artificial Sequence: Synthetic oligonucleotide
guuuauagggcauagauuc

SEQ ID NO: 1301760 - RNA, 19 nt, Artificial Sequence
  Description of Artificial Sequence: Synthetic oligonucleotide
auggauguggcagagaucc

SEQ ID NO: 1301761 - RNA, 19 nt, Artificial Sequence
  Description of Artificial Sequence: Synthetic oligonucleotide
acuaguaccagcuaugaug

SEQ ID NO: 1301762 - RNA, 19 nt, Artificial Sequence
  Description of Artificial Sequence: Synthetic oligonucleotide
caugauucgaucauggggc

SEQ ID NO: 1301763 - RNA, 19 nt, Artificial Sequence
  Description of Artificial Sequence: Synthetic oligonucleotide
aacccuacggaagucaucc

SEQ ID NO: 1301764 - RNA, 19 nt, Artificial Sequence
  Description of Artificial Sequence: Synthetic oligonucleotide
aacguugacuuguuucugc

SEQ ID NO: 1301765 - RNA, 19 nt, Artificial Sequence
  Description of Artificial Sequence: Synthetic oligonucleotide
aagccgagcagucaacgcc

SEQ ID NO: 1301766 - RNA, 19 nt, Artificial Sequence
  Description of Artificial Sequence: Synthetic oligonucleotide
gacgggaucaccuuggcag

SEQ ID NO: 1301767 - RNA, 19 nt, Artificial Sequence
  Description of Artificial Sequence: Synthetic oligonucleotide
guagccaugagugaggugg

SEQ ID NO: 1301768 - RNA, 19 nt, Artificial Sequence
  Description of Artificial Sequence: Synthetic oligonucleotide
uccauaauaucucuugcca

SEQ ID NO: 1301769 - RNA, 19 nt, Artificial Sequence
  Description of Artificial Sequence: Synthetic oligonucleotide
ucgauaaaaucaacaaccc

SEQ ID NO: 1301770 - RNA, 19 nt, Artificial Sequence
  Description of Artificial Sequence: Synthetic oligonucleotide
auaaaaucaacaacccuac

SEQ ID NO: 1301771 - RNA, 19 nt, Artificial Sequence
  Description of Artificial Sequence: Synthetic oligonucleotide
uucuuguuggccguaaugg

SEQ ID NO: 1301772 - RNA, 19 nt, Artificial Sequence
  Description of Artificial Sequence: Synthetic oligonucleotide
uauggcugcacauugacuc

SEQ ID NO: 1301773 - RNA, 19 nt, Artificial Sequence
  Description of Artificial Sequence: Synthetic oligonucleotide
aaagccgagcagucaacgc

SEQ ID NO: 1301774 - RNA, 19 nt, Artificial Sequence
  Description of Artificial Sequence: Synthetic oligonucleotide
aguaauggcacuccggucu

SEQ ID NO: 1301775 - RNA, 19 nt, Artificial Sequence
  Description of Artificial Sequence: Synthetic oligonucleotide
uccgauaaaagaugagucc

SEQ ID NO: 1301776 - RNA, 19 nt, Artificial Sequence
  Description of Artificial Sequence: Synthetic oligonucleotide
ugcaucuuugagcaggaag

SEQ ID NO: 1301777 - RNA, 19 nt, Artificial Sequence
  Description of Artificial Sequence: Synthetic oligonucleotide
ggcauagucaaugagacgg

SEQ ID NO: 1301778 - RNA, 19 nt, Artificial Sequence
  Description of Artificial Sequence: Synthetic oligonucleotide
agcaggaccagucaccaac

SEQ ID NO: 1301779 - RNA, 19 nt, Artificial Sequence
  Description of Artificial Sequence: Synthetic oligonucleotide
ucgaucauggggcugaaga

SEQ ID NO: 1301780 - RNA, 19 nt, Artificial Sequence
  Description of Artificial Sequence: Synthetic oligonucleotide
aguaccagcuaugaugagc

SEQ ID NO: 1301781 - RNA, 19 nt, Artificial Sequence
  Description of Artificial Sequence: Synthetic oligonucleotide
aaauguguaagggaucucu

SEQ ID NO: 1301782 - RNA, 19 nt, Artificial Sequence
  Description of Artificial Sequence: Synthetic oligonucleotide
ucaacaacccuacggaagu

SEQ ID NO: 1301783 - RNA, 19 nt, Artificial Sequence
  Description of Artificial Sequence: Synthetic oligonucleotide
uuccgauaaaagaugaguc

SEQ ID NO: 1301784 - RNA, 19 nt, Artificial Sequence
  Description of Artificial Sequence: Synthetic oligonucleotide
uguaagggaucucuuggcc

SEQ ID NO: 1301785 - RNA, 19 nt, Artificial Sequence
  Description of Artificial Sequence: Synthetic oligonucleotide
auaaaagaugaguccugac

SEQ ID NO: 1301786 - RNA, 19 nt, Artificial Sequence
  Description of Artificial Sequence: Synthetic oligonucleotide
uaaaaucaacaacccuacg

SEQ ID NO: 1301787 - RNA, 19 nt, Artificial Sequence
  Description of Artificial Sequence: Synthetic oligonucleotide
agaaggguaccaucgcuac

SEQ ID NO: 1301788 - RNA, 19 nt, Artificial Sequence
  Description of Artificial Sequence: Synthetic oligonucleotide
acugccgagaagucagugc

SEQ ID NO: 1301789 - RNA, 19 nt, Artificial Sequence
  Description of Artificial Sequence: Synthetic oligonucleotide
aaaagccgagcagucaacg

SEQ ID NO: 1301790 - RNA, 19 nt, Artificial Sequence
  Description of Artificial Sequence: Synthetic oligonucleotide
auguccgcauacuugaaag

SEQ ID NO: 1301791 - RNA, 19 nt, Artificial Sequence
  Description of Artificial Sequence: Synthetic oligonucleotide
guagccucucuuuagcagg

SEQ ID NO: 1301792 - RNA, 19 nt, Artificial Sequence
  Description of Artificial Sequence: Synthetic oligonucleotide
uagucaaugagacgggcgu

SEQ ID NO: 1301793 - RNA, 19 nt, Artificial Sequence
  Description of Artificial Sequence: Synthetic oligonucleotide
cuaugaugagccguggucg

SEQ ID NO: 1301794 - RNA, 19 nt, Artificial Sequence
  Description of Artificial Sequence: Synthetic oligonucleotide
ugaguagccucucuuuagc

SEQ ID NO: 1301795 - RNA, 19 nt, Artificial Sequence
  Description of Artificial Sequence: Synthetic oligonucleotide
ugauucgguccucaaaugu

SEQ ID NO: 1301796 - RNA, 19 nt, Artificial Sequence
  Description of Artificial Sequence: Synthetic oligonucleotide
auggacacaagcuccaaca

SEQ ID NO: 1301797 - RNA, 19 nt, Artificial Sequence
  Description of Artificial Sequence: Synthetic oligonucleotide
agaguauggcugcacauug

SEQ ID NO: 1301798 - RNA, 19 nt, Artificial Sequence
  Description of Artificial Sequence: Synthetic oligonucleotide
uaugaugagccguggucgg

SEQ ID NO: 1301799 - RNA, 19 nt, Artificial Sequence
  Description of Artificial Sequence: Synthetic oligonucleotide
auaauaucucuugccaggg

SEQ ID NO: 1301800 - RNA, 19 nt, Artificial Sequence
  Description of Artificial Sequence: Synthetic oligonucleotide
cuccauaauaucucuugcc

SEQ ID NO: 1301801 - RNA, 19 nt, Artificial Sequence
  Description of Artificial Sequence: Synthetic oligonucleotide
cuaguaccagcuaugauga

SEQ ID NO: 1301802 - RNA, 19 nt, Artificial Sequence
  Description of Artificial Sequence: Synthetic oligonucleotide
aaugagacgggcguaggca

SEQ ID NO: 1301803 - RNA, 19 nt, Artificial Sequence
  Description of Artificial Sequence: Synthetic oligonucleotide
uacugcagcaauggcaugg

SEQ ID NO: 1301804 - RNA, 19 nt, Artificial Sequence
  Description of Artificial Sequence: Synthetic oligonucleotide
uugcgcuucaccuccaagc

SEQ ID NO: 1301805 - RNA, 19 nt, Artificial Sequence
  Description of Artificial Sequence: Synthetic oligonucleotide
uuguuggccguaauggaca

SEQ ID NO: 1301806 - RNA, 19 nt, Artificial Sequence
  Description of Artificial Sequence: Synthetic oligonucleotide
uaaccuuccgaguacuugu

SEQ ID NO: 1301807 - RNA, 19 nt, Artificial Sequence
  Description of Artificial Sequence: Synthetic oligonucleotide
cucagcguucaucaaaccc

SEQ ID NO: 1301808 - RNA, 19 nt, Artificial Sequence
  Description of Artificial Sequence: Synthetic oligonucleotide
uugaaauccuggagcuugg

SEQ ID NO: 1301809 - RNA, 19 nt, Artificial Sequence
  Description of Artificial Sequence: Synthetic oligonucleotide
aguagccucucuuuagcag

SEQ ID NO: 1301810 - RNA, 19 nt, Artificial Sequence
  Description of Artificial Sequence: Synthetic oligonucleotide
acucccuuccgauaaaaga

SEQ ID NO: 1301811 - RNA, 19 nt, Artificial Sequence
  Description of Artificial Sequence: Synthetic oligonucleotide
auacuugaaaggugacggg

SEQ ID NO: 1301812 - RNA, 19 nt, Artificial Sequence
  Description of Artificial Sequence: Synthetic oligonucleotide
uguccgcauacuugaaagg

SEQ ID NO: 1301813 - RNA, 19 nt, Artificial Sequence
  Description of Artificial Sequence: Synthetic oligonucleotide
gauuugaaauccuggagcu

SEQ ID NO: 1301814 - RNA, 19 nt, Artificial Sequence
  Description of Artificial Sequence: Synthetic oligonucleotide
gacaauguccgcauacuug

SEQ ID NO: 1301815 - RNA, 19 nt, Artificial Sequence
  Description of Artificial Sequence: Synthetic oligonucleotide
ugaguccugaccuggcucc

SEQ ID NO: 1301816 - RNA, 19 nt, Artificial Sequence
  Description of Artificial Sequence: Synthetic oligonucleotide
uacuuguuguucagacagg

SEQ ID NO: 1301817 - RNA, 19 nt, Artificial Sequence
  Description of Artificial Sequence: Synthetic oligonucleotide
augagacgggcguaggcac

SEQ ID NO: 1301818 - RNA, 19 nt, Artificial Sequence
  Description of Artificial Sequence: Synthetic oligonucleotide
guaccagcuaugaugagcc

SEQ ID NO: 1301819 - RNA, 19 nt, Artificial Sequence
  Description of Artificial Sequence: Synthetic oligonucleotide
aauguccgcauacuugaaa

SEQ ID NO: 1301820 - RNA, 19 nt, Artificial Sequence
  Description of Artificial Sequence: Synthetic oligonucleotide
agcagucaacgccagcugg

SEQ ID NO: 1301821 - RNA, 19 nt, Artificial Sequence
  Description of Artificial Sequence: Synthetic oligonucleotide
uccgcauacuugaaaggug

SEQ ID NO: 1301822 - RNA, 19 nt, Artificial Sequence
  Description of Artificial Sequence: Synthetic oligonucleotide
gguaccaucgcuaccagag

SEQ ID NO: 1301823 - RNA, 19 nt, Artificial Sequence
  Description of Artificial Sequence: Synthetic oligonucleotide
ucccuuccgauaaaagaug

SEQ ID NO: 1301824 - RNA, 19 nt, Artificial Sequence
  Description of Artificial Sequence: Synthetic oligonucleotide
uccgucugacaucagacau

SEQ ID NO: 1301825 - RNA, 19 nt, Artificial Sequence
  Description of Artificial Sequence: Synthetic oligonucleotide
aggguaaccuuccgaguac

SEQ ID NO: 1301826 - RNA, 19 nt, Artificial Sequence
  Description of Artificial Sequence: Synthetic oligonucleotide
ucuuguuggccguaaugga

SEQ ID NO: 1301827 - RNA, 19 nt, Artificial Sequence
  Description of Artificial Sequence: Synthetic oligonucleotide
gauucgguccucaaaugug

SEQ ID NO: 1301828 - RNA, 19 nt, Artificial Sequence
  Description of Artificial Sequence: Synthetic oligonucleotide
augaguccugaccuggcuc

SEQ ID NO: 1301829 - RNA, 19 nt, Artificial Sequence
  Description of Artificial Sequence: Synthetic oligonucleotide
auguguaagggaucucuug

SEQ ID NO: 1301830 - RNA, 19 nt, Artificial Sequence
  Description of Artificial Sequence: Synthetic oligonucleotide
uacuugaaaggugacggga

SEQ ID NO: 1301831 - RNA, 19 nt, Artificial Sequence
  Description of Artificial Sequence: Synthetic oligonucleotide
caucagguagguccaaccc

SEQ ID NO: 1301832 - RNA, 19 nt, Artificial Sequence
  Description of Artificial Sequence: Synthetic oligonucleotide
uaccaucgcuaccagaggu

SEQ ID NO: 1301833 - RNA, 19 nt, Artificial Sequence
  Description of Artificial Sequence: Synthetic oligonucleotide
cuugccaggguaaccuucc

SEQ ID NO: 1301834 - RNA, 19 nt, Artificial Sequence
  Description of Artificial Sequence: Synthetic oligonucleotide
ccaugauucgaucaugggg

SEQ ID NO: 1301835 - RNA, 19 nt, Artificial Sequence
  Description of Artificial Sequence: Synthetic oligonucleotide
uccgaguacuuguuguuca

SEQ ID NO: 1301836 - RNA, 19 nt, Artificial Sequence
  Description of Artificial Sequence: Synthetic oligonucleotide
auagucaaugagacgggcg

SEQ ID NO: 1301837 - RNA, 19 nt, Artificial Sequence
  Description of Artificial Sequence: Synthetic oligonucleotide
ucguagucaaugaggccag

SEQ ID NO: 1301838 - RNA, 19 nt, Artificial Sequence
  Description of Artificial Sequence: Synthetic oligonucleotide
aucaacaacccuacggaag

SEQ ID NO: 1301839 - RNA, 19 nt, Artificial Sequence
  Description of Artificial Sequence: Synthetic oligonucleotide
uugaaaggugacgggauca

SEQ ID NO: 1301840 - RNA, 19 nt, Artificial Sequence
  Description of Artificial Sequence: Synthetic oligonucleotide
ugauaugggccaugucugc

SEQ ID NO: 1301841 - RNA, 19 nt, Artificial Sequence
  Description of Artificial Sequence: Synthetic oligonucleotide
cauacucccggaacauggg

SEQ ID NO: 1301842 - RNA, 19 nt, Artificial Sequence
  Description of Artificial Sequence: Synthetic oligonucleotide
caaagcaaagagaagggua

SEQ ID NO: 1301843 - RNA, 19 nt, Artificial Sequence
  Description of Artificial Sequence: Synthetic oligonucleotide
aaccccaugauucgaucau

SEQ ID NO: 1301844 - RNA, 19 nt, Artificial Sequence
  Description of Artificial Sequence: Synthetic oligonucleotide
aaaguugauucgguccuca

SEQ ID NO: 1301845 - RNA, 19 nt, Artificial Sequence
  Description of Artificial Sequence: Synthetic oligonucleotide
guucuuguuggccguaaug

SEQ ID NO: 1301846 - RNA, 19 nt, Artificial Sequence
  Description of Artificial Sequence: Synthetic oligonucleotide
agucaacgccagcuggucg

SEQ ID NO: 1301847 - RNA, 19 nt, Artificial Sequence
  Description of Artificial Sequence: Synthetic oligonucleotide
aagucagugcuggggcacc

SEQ ID NO: 1301848 - RNA, 19 nt, Artificial Sequence
  Description of Artificial Sequence: Synthetic oligonucleotide
aggccgagugguccaaagc

SEQ ID NO: 1301849 - RNA, 19 nt, Artificial Sequence
  Description of Artificial Sequence: Synthetic oligonucleotide
aaacguugacuuguuucug

SEQ ID NO: 1301850 - RNA, 19 nt, Artificial Sequence
  Description of Artificial Sequence: Synthetic oligonucleotide
uuggccguaauggacacaa

SEQ ID NO: 1301851 - RNA, 19 nt, Artificial Sequence
  Description of Artificial Sequence: Synthetic oligonucleotide
agauccgucugacaucaga

SEQ ID NO: 1301852 - RNA, 19 nt, Artificial Sequence
  Description of Artificial Sequence: Synthetic oligonucleotide
gauucgaucauggggcuga

SEQ ID NO: 1301853 - RNA, 19 nt, Artificial Sequence
  Description of Artificial Sequence: Synthetic oligonucleotide
guguaagggaucucuuggc

SEQ ID NO: 1301854 - RNA, 19 nt, Artificial Sequence
  Description of Artificial Sequence: Synthetic oligonucleotide
agguuggccaaacguugac

SEQ ID NO: 1301855 - RNA, 19 nt, Artificial Sequence
  Description of Artificial Sequence: Synthetic oligonucleotide
cacuuguugccugagguug

SEQ ID NO: 1301856 - RNA, 19 nt, Artificial Sequence
  Description of Artificial Sequence: Synthetic oligonucleotide
ugagccguggucggaaaag

SEQ ID NO: 1301857 - RNA, 19 nt, Artificial Sequence
  Description of Artificial Sequence: Synthetic oligonucleotide
gauaugggccaugucugcc

SEQ ID NO: 1301858 - RNA, 19 nt, Artificial Sequence
  Description of Artificial Sequence: Synthetic oligonucleotide
cguaauggacacaagcucc

SEQ ID NO: 1301859 - RNA, 19 nt, Artificial Sequence
  Description of Artificial Sequence: Synthetic oligonucleotide
uaauaucucuugccagggu

SEQ ID NO: 1301860 - RNA, 19 nt, Artificial Sequence
  Description of Artificial Sequence: Synthetic oligonucleotide
agggcauacucccggaaca

SEQ ID NO: 1301861 - RNA, 19 nt, Artificial Sequence
  Description of Artificial Sequence: Synthetic oligonucleotide
caugcgggcauagucaaug

SEQ ID NO: 1301862 - RNA, 19 nt, Artificial Sequence
  Description of Artificial Sequence: Synthetic oligonucleotide
uugagggccacagcuacug

SEQ ID NO: 1301863 - RNA, 19 nt, Artificial Sequence
  Description of Artificial Sequence: Synthetic oligonucleotide
accuuacugugcugagccc

SEQ ID NO: 1301864 - RNA, 19 nt, Artificial Sequence
  Description of Artificial Sequence: Synthetic oligonucleotide
cuucaucgauaaaaucaac

SEQ ID NO: 1301865 - RNA, 19 nt, Artificial Sequence
  Description of Artificial Sequence: Synthetic oligonucleotide
aguugauucgguccucaaa

SEQ ID NO: 1301866 - RNA, 19 nt, Artificial Sequence
  Description of Artificial Sequence: Synthetic oligonucleotide
uguaagcagccagauuggc

SEQ ID NO: 1301867 - RNA, 19 nt, Artificial Sequence
  Description of Artificial Sequence: Synthetic oligonucleotide
caccuguagggcauacucc

SEQ ID NO: 1301868 - RNA, 19 nt, Artificial Sequence
  Description of Artificial Sequence: Synthetic oligonucleotide
guaaccuuccgaguacuug

SEQ ID NO: 1301869 - RNA, 19 nt, Artificial Sequence
  Description of Artificial Sequence: Synthetic oligonucleotide
auaugggccaugucugcca

SEQ ID NO: 1301870 - RNA, 19 nt, Artificial Sequence
  Description of Artificial Sequence: Synthetic oligonucleotide
uggccaaacguugacuugu

SEQ ID NO: 1301871 - RNA, 19 nt, Artificial Sequence
  Description of Artificial Sequence: Synthetic oligonucleotide
cauagucaaugagacgggc

SEQ ID NO: 1301872 - RNA, 19 nt, Artificial Sequence
  Description of Artificial Sequence: Synthetic oligonucleotide
ucuuggggucuaugguccg

SEQ ID NO: 1301873 - RNA, 19 nt, Artificial Sequence
  Description of Artificial Sequence: Synthetic oligonucleotide
ccaacacccgcucagcucg

SEQ ID NO: 1301874 - RNA, 19 nt, Artificial Sequence
  Description of Artificial Sequence: Synthetic oligonucleotide
ggccguaauggacacaagc

SEQ ID NO: 1301875 - RNA, 19 nt, Artificial Sequence
  Description of Artificial Sequence: Synthetic oligonucleotide
ccaaacguugacuuguuuc

SEQ ID NO: 1301876 - RNA, 19 nt, Artificial Sequence
  Description of Artificial Sequence: Synthetic oligonucleotide
ucggaaaagccgagcaguc

SEQ ID NO: 1301877 - RNA, 19 nt, Artificial Sequence
  Description of Artificial Sequence: Synthetic oligonucleotide
guaccaucgcuaccagagg

SEQ ID NO: 1301878 - RNA, 19 nt, Artificial Sequence
  Description of Artificial Sequence: Synthetic oligonucleotide
caaacguugacuuguuucu

SEQ ID NO: 1301879 - RNA, 19 nt, Artificial Sequence
  Description of Artificial Sequence: Synthetic oligonucleotide
ccauaauaucucuugccag

SEQ ID NO: 1301880 - RNA, 19 nt, Artificial Sequence
  Description of Artificial Sequence: Synthetic oligonucleotide
ggugacaauguccgcauac

SEQ ID NO: 1301881 - RNA, 19 nt, Artificial Sequence
  Description of Artificial Sequence: Synthetic oligonucleotide
aguagcucccacaucucag

SEQ ID NO: 1301882 - RNA, 19 nt, Artificial Sequence
  Description of Artificial Sequence: Synthetic oligonucleotide
gaaggguaccaucgcuacc

SEQ ID NO: 1301883 - RNA, 19 nt, Artificial Sequence
  Description of Artificial Sequence: Synthetic oligonucleotide
gccaggguaaccuuccgag

SEQ ID NO: 1301884 - RNA, 19 nt, Artificial Sequence
  Description of Artificial Sequence: Synthetic oligonucleotide
aacgccagcuggucguagu

SEQ ID NO: 1301885 - RNA, 19 nt, Artificial Sequence
  Description of Artificial Sequence: Synthetic oligonucleotide
acguugacuuguuucugca

SEQ ID NO: 1301886 - RNA, 19 nt, Artificial Sequence
  Description of Artificial Sequence: Synthetic oligonucleotide
guguaagcagccagauugg

SEQ ID NO: 1301887 - RNA, 19 nt, Artificial Sequence
  Description of Artificial Sequence: Synthetic oligonucleotide
agucuugugagugguggug

SEQ ID NO: 1301888 - RNA, 19 nt, Artificial Sequence
  Description of Artificial Sequence: Synthetic oligonucleotide
cauccucacggaacugccg

SEQ ID NO: 1301889 - RNA, 19 nt, Artificial Sequence
  Description of Artificial Sequence: Synthetic oligonucleotide
agucaccaacucugguccg

SEQ ID NO: 1301890 - RNA, 19 nt, Artificial Sequence
  Description of Artificial Sequence: Synthetic oligonucleotide
uggauguggcagagauccg

SEQ ID NO: 1301891 - RNA, 19 nt, Artificial Sequence
  Description of Artificial Sequence: Synthetic oligonucleotide
auccgucugacaucagaca

SEQ ID NO: 1301892 - RNA, 19 nt, Artificial Sequence
  Description of Artificial Sequence: Synthetic oligonucleotide
uguuggccguaauggacac

SEQ ID NO: 1301893 - RNA, 19 nt, Artificial Sequence
  Description of Artificial Sequence: Synthetic oligonucleotide
augauucgaucauggggcu

SEQ ID NO: 1301894 - RNA, 19 nt, Artificial Sequence
  Description of Artificial Sequence: Synthetic oligonucleotide
caaaggcuuccaaggcccg

SEQ ID NO: 1301895 - RNA, 19 nt, Artificial Sequence
  Description of Artificial Sequence: Synthetic oligonucleotide
aauguguaagggaucucuu

SEQ ID NO: 1301896 - RNA, 19 nt, Artificial Sequence
  Description of Artificial Sequence: Synthetic oligonucleotide
aacugccgagaagucagug

SEQ ID NO: 1301897 - RNA, 19 nt, Artificial Sequence
  Description of Artificial Sequence: Synthetic oligonucleotide
aggcacuaguaccagcuau

SEQ ID NO: 1301898 - RNA, 19 nt, Artificial Sequence
  Description of Artificial Sequence: Synthetic oligonucleotide
auucgguccucaaaugugu

SEQ ID NO: 1301899 - RNA, 19 nt, Artificial Sequence
  Description of Artificial Sequence: Synthetic oligonucleotide
uccaaccccaugauucgau

SEQ ID NO: 1301900 - RNA, 19 nt, Artificial Sequence
  Description of Artificial Sequence: Synthetic oligonucleotide
aaguugauucgguccucaa

SEQ ID NO: 1301901 - RNA, 19 nt, Artificial Sequence
  Description of Artificial Sequence: Synthetic oligonucleotide
cuccuucaucgauaaaauc

SEQ ID NO: 1301902 - RNA, 19 nt, Artificial Sequence
  Description of Artificial Sequence: Synthetic oligonucleotide
ggaaggauuugaaauccug

SEQ ID NO: 1301903 - RNA, 19 nt, Artificial Sequence
  Description of Artificial Sequence: Synthetic oligonucleotide
gaggccgagugguccaaag

SEQ ID NO: 1301904 - RNA, 19 nt, Artificial Sequence
  Description of Artificial Sequence: Synthetic oligonucleotide
gaagucagugcuggggcac

SEQ ID NO: 1301905 - RNA, 19 nt, Artificial Sequence
  Description of Artificial Sequence: Synthetic oligonucleotide
uugggucgcagguccacca

SEQ ID NO: 1301906 - RNA, 19 nt, Artificial Sequence
  Description of Artificial Sequence: Synthetic oligonucleotide
gaguaauggcacuccgguc

SEQ ID NO: 1301907 - RNA, 19 nt, Artificial Sequence
  Description of Artificial Sequence: Synthetic oligonucleotide
cacucccuuccgauaaaag

SEQ ID NO: 1301908 - RNA, 19 nt, Artificial Sequence
  Description of Artificial Sequence: Synthetic oligonucleotide
ggaaaagccgagcagucaa

SEQ ID NO: 1301909 - RNA, 19 nt, Artificial Sequence
  Description of Artificial Sequence: Synthetic oligonucleotide
caccuccaagccaauguug

SEQ ID NO: 1301910 - RNA, 19 nt, Artificial Sequence
  Description of Artificial Sequence: Synthetic oligonucleotide
caucagacauguagccaug

SEQ ID NO: 1301911 - RNA, 19 nt, Artificial Sequence
  Description of Artificial Sequence: Synthetic oligonucleotide
agccguggucggaaaagcc

SEQ ID NO: 1301912 - RNA, 19 nt, Artificial Sequence
  Description of Artificial Sequence: Synthetic oligonucleotide
agcuaugaugagccguggu

SEQ ID NO: 1301913 - RNA, 19 nt, Artificial Sequence
  Description of Artificial Sequence: Synthetic oligonucleotide
guaauggacacaagcucca

SEQ ID NO: 1301914 - RNA, 19 nt, Artificial Sequence
  Description of Artificial Sequence: Synthetic oligonucleotide
gggcguaggcacuaguacc

SEQ ID NO: 1301915 - RNA, 19 nt, Artificial Sequence
  Description of Artificial Sequence: Synthetic oligonucleotide
agauuggcuggagacccag

SEQ ID NO: 1301916 - RNA, 19 nt, Artificial Sequence
  Description of Artificial Sequence: Synthetic oligonucleotide
ucgguccucaaauguguaa

SEQ ID NO: 1301917 - RNA, 19 nt, Artificial Sequence
  Description of Artificial Sequence: Synthetic oligonucleotide
cuuccgauaaaagaugagu

SEQ ID NO: 1301918 - RNA, 19 nt, Artificial Sequence
  Description of Artificial Sequence: Synthetic oligonucleotide
cuacggaagucauccucac

SEQ ID NO: 1301919 - RNA, 19 nt, Artificial Sequence
  Description of Artificial Sequence: Synthetic oligonucleotide
agcuggucguagucaauga

SEQ ID NO: 1301920 - RNA, 19 nt, Artificial Sequence
  Description of Artificial Sequence: Synthetic oligonucleotide
aucacacaccucucucaug

SEQ ID NO: 1301921 - RNA, 19 nt, Artificial Sequence
  Description of Artificial Sequence: Synthetic oligonucleotide
gaaaagccgagcagucaac

SEQ ID NO: 1301922 - RNA, 19 nt, Artificial Sequence
  Description of Artificial Sequence: Synthetic oligonucleotide
cucccuuccgauaaaagau

SEQ ID NO: 1301923 - RNA, 19 nt, Artificial Sequence
  Description of Artificial Sequence: Synthetic oligonucleotide
accaucgcuaccagagguc

SEQ ID NO: 1301924 - RNA, 19 nt, Artificial Sequence
  Description of Artificial Sequence: Synthetic oligonucleotide
gauguggcagagauccguc

SEQ ID NO: 1301925 - RNA, 19 nt, Artificial Sequence
  Description of Artificial Sequence: Synthetic oligonucleotide
aggccuccgggaguaaugg

SEQ ID NO: 1301926 - RNA, 19 nt, Artificial Sequence
  Description of Artificial Sequence: Synthetic oligonucleotide
uuccgaguacuuguuguuc

SEQ ID NO: 1301927 - RNA, 19 nt, Artificial Sequence
  Description of Artificial Sequence: Synthetic oligonucleotide
accuuccgaguacuuguug

SEQ ID NO: 1301928 - RNA, 19 nt, Artificial Sequence
  Description of Artificial Sequence: Synthetic oligonucleotide
gucaccaacucugguccgg

SEQ ID NO: 1301929 - RNA, 19 nt, Artificial Sequence
  Description of Artificial Sequence: Synthetic oligonucleotide
cagucuugcgcuucaccuc

SEQ ID NO: 1301930 - RNA, 19 nt, Artificial Sequence
  Description of Artificial Sequence: Synthetic oligonucleotide
aucgcuaccagaggucaca

SEQ ID NO: 1301931 - RNA, 19 nt, Artificial Sequence
  Description of Artificial Sequence: Synthetic oligonucleotide
caagcuccaacacccgcuc

SEQ ID NO: 1301932 - RNA, 19 nt, Artificial Sequence
  Description of Artificial Sequence: Synthetic oligonucleotide
ggguugaguuuauagggca

SEQ ID NO: 1301933 - RNA, 19 nt, Artificial Sequence
  Description of Artificial Sequence: Synthetic oligonucleotide
guuguucagacaggacccc

SEQ ID NO: 1301934 - RNA, 19 nt, Artificial Sequence
  Description of Artificial Sequence: Synthetic oligonucleotide
caaccccaugauucgauca

SEQ ID NO: 1301935 - RNA, 19 nt, Artificial Sequence
  Description of Artificial Sequence: Synthetic oligonucleotide
cucucuuuagcagggcauc

SEQ ID NO: 1301936 - RNA, 19 nt, Artificial Sequence
  Description of Artificial Sequence: Synthetic oligonucleotide
ggugcaggccugcuugagg

SEQ ID NO: 1301937 - RNA, 19 nt, Artificial Sequence
  Description of Artificial Sequence: Synthetic oligonucleotide
ggucggaaaagccgagcag

SEQ ID NO: 1301938 - RNA, 19 nt, Artificial Sequence
  Description of Artificial Sequence: Synthetic oligonucleotide
ugauucgaucauggggcug

SEQ ID NO: 1301939 - RNA, 19 nt, Artificial Sequence
  Description of Artificial Sequence: Synthetic oligonucleotide
gggucuaugguccgcacuc

SEQ ID NO: 1301940 - RNA, 19 nt, Artificial Sequence
  Description of Artificial Sequence: Synthetic oligonucleotide
ccuuacugugcugagcccg

SEQ ID NO: 1301941 - RNA, 19 nt, Artificial Sequence
  Description of Artificial Sequence: Synthetic oligonucleotide
uucgguccucaaaugugua

SEQ ID NO: 1301942 - RNA, 19 nt, Artificial Sequence
  Description of Artificial Sequence: Synthetic oligonucleotide
ccagcuaugaugagccgug

SEQ ID NO: 1301943 - RNA, 19 nt, Artificial Sequence
  Description of Artificial Sequence: Synthetic oligonucleotide
uaguaccagcuaugaugag

SEQ ID NO: 1301944 - RNA, 19 nt, Artificial Sequence
  Description of Artificial Sequence: Synthetic oligonucleotide
uccgggccaccuuacugug

SEQ ID NO: 1301945 - RNA, 19 nt, Artificial Sequence
  Description of Artificial Sequence: Synthetic oligonucleotide
gcaccuguagggcauacuc

SEQ ID NO: 1301946 - RNA, 19 nt, Artificial Sequence
  Description of Artificial Sequence: Synthetic oligonucleotide
ccuucaucgauaaaaucaa

SEQ ID NO: 1301947 - RNA, 19 nt, Artificial Sequence
  Description of Artificial Sequence: Synthetic oligonucleotide
uaugguccgcacucccuuc

SEQ ID NO: 1301948 - RNA, 19 nt, Artificial Sequence
  Description of Artificial Sequence: Synthetic oligonucleotide
gcacauugacuccccauug

SEQ ID NO: 1301949 - RNA, 19 nt, Artificial Sequence
  Description of Artificial Sequence: Synthetic oligonucleotide
gaagagucuugugaguggu

SEQ ID NO: 1301950 - RNA, 19 nt, Artificial Sequence
  Description of Artificial Sequence: Synthetic oligonucleotide
gagaaggguaccaucgcua

SEQ ID NO: 1301951 - RNA, 19 nt, Artificial Sequence
  Description of Artificial Sequence: Synthetic oligonucleotide
aggcuuccaaggcccggcg

SEQ ID NO: 1301952 - RNA, 19 nt, Artificial Sequence
  Description of Artificial Sequence: Synthetic oligonucleotide
auguagccaugagugaggu

SEQ ID NO: 1301953 - RNA, 19 nt, Artificial Sequence
  Description of Artificial Sequence: Synthetic oligonucleotide
gggaguaauggcacuccgg

SEQ ID NO: 1301954 - RNA, 19 nt, Artificial Sequence
  Description of Artificial Sequence: Synthetic oligonucleotide
caggguaaccuuccgagua

SEQ ID NO: 1301955 - RNA, 19 nt, Artificial Sequence
  Description of Artificial Sequence: Synthetic oligonucleotide
gccguggucggaaaagccg

SEQ ID NO: 1301956 - RNA, 19 nt, Artificial Sequence
  Description of Artificial Sequence: Synthetic oligonucleotide
ccguaauggacacaagcuc

SEQ ID NO: 1301957 - RNA, 19 nt, Artificial Sequence
  Description of Artificial Sequence: Synthetic oligonucleotide
uagguccaaccccaugauu

SEQ ID NO: 1301958 - RNA, 19 nt, Artificial Sequence
  Description of Artificial Sequence: Synthetic oligonucleotide
ucgcuaccagaggucacag

SEQ ID NO: 1301959 - RNA, 19 nt, Artificial Sequence
  Description of Artificial Sequence: Synthetic oligonucleotide
gggguugaguuuauagggc

SEQ ID NO: 1301960 - RNA, 19 nt, Artificial Sequence
  Description of Artificial Sequence: Synthetic oligonucleotide
aggguaccaucgcuaccag

SEQ ID NO: 1301961 - RNA, 19 nt, Artificial Sequence
  Description of Artificial Sequence: Synthetic oligonucleotide
gcauagucaaugagacggg

SEQ ID NO: 1301962 - RNA, 19 nt, Artificial Sequence
  Description of Artificial Sequence: Synthetic oligonucleotide
ggcacuaguaccagcuaug

SEQ ID NO: 1301963 - RNA, 19 nt, Artificial Sequence
  Description of Artificial Sequence: Synthetic oligonucleotide
uccgggaguaauggcacuc

SEQ ID NO: 1301964 - RNA, 19 nt, Artificial Sequence
  Description of Artificial Sequence: Synthetic oligonucleotide
guugaguuuauagggcaua

SEQ ID NO: 1301965 - RNA, 19 nt, Artificial Sequence
  Description of Artificial Sequence: Synthetic oligonucleotide
guugacuccuucaucgaua

SEQ ID NO: 1301966 - RNA, 19 nt, Artificial Sequence
  Description of Artificial Sequence: Synthetic oligonucleotide
cacggaacugccgagaagu

SEQ ID NO: 1301967 - RNA, 19 nt, Artificial Sequence
  Description of Artificial Sequence: Synthetic oligonucleotide
gucggaaaagccgagcagu

SEQ ID NO: 1301968 - RNA, 19 nt, Artificial Sequence
  Description of Artificial Sequence: Synthetic oligonucleotide
gugguccaaagcaaagaga

SEQ ID NO: 1301969 - RNA, 19 nt, Artificial Sequence
  Description of Artificial Sequence: Synthetic oligonucleotide
cccaugauucgaucauggg

SEQ ID NO: 1301970 - RNA, 19 nt, Artificial Sequence
  Description of Artificial Sequence: Synthetic oligonucleotide
ggucguagucaaugaggcc

SEQ ID NO: 1301971 - RNA, 19 nt, Artificial Sequence
  Description of Artificial Sequence: Synthetic oligonucleotide
uggccguaauggacacaag

SEQ ID NO: 1301972 - RNA, 19 nt, Artificial Sequence
  Description of Artificial Sequence: Synthetic oligonucleotide
acccagaguauggcugcac

SEQ ID NO: 1301973 - RNA, 19 nt, Artificial Sequence
  Description of Artificial Sequence: Synthetic oligonucleotide
gcaacucgauuucauccac

SEQ ID NO: 1301974 - RNA, 19 nt, Artificial Sequence
  Description of Artificial Sequence: Synthetic oligonucleotide
ucccacaucucagggucac

SEQ ID NO: 1301975 - RNA, 19 nt, Artificial Sequence
  Description of Artificial Sequence: Synthetic oligonucleotide
aggaaggauuugaaauccu

SEQ ID NO: 1301976 - RNA, 19 nt, Artificial Sequence
  Description of Artificial Sequence: Synthetic oligonucleotide
uuacugugcugagcccgag

SEQ ID NO: 1301977 - RNA, 19 nt, Artificial Sequence
  Description of Artificial Sequence: Synthetic oligonucleotide
cugccgagaagucagugcu

SEQ ID NO: 1301978 - RNA, 19 nt, Artificial Sequence
  Description of Artificial Sequence: Synthetic oligonucleotide
caacccuacggaagucauc

SEQ ID NO: 1301979 - RNA, 19 nt, Artificial Sequence
  Description of Artificial Sequence: Synthetic oligonucleotide
ccuuccgauaaaagaugag

SEQ ID NO: 1301980 - RNA, 19 nt, Artificial Sequence
  Description of Artificial Sequence: Synthetic oligonucleotide
ccuacggaagucauccuca

SEQ ID NO: 1301981 - RNA, 19 nt, Artificial Sequence
  Description of Artificial Sequence: Synthetic oligonucleotide
gucaacgccagcuggucgu

SEQ ID NO: 1301982 - RNA, 19 nt, Artificial Sequence
  Description of Artificial Sequence: Synthetic oligonucleotide
caucgcuaccagaggucac

SEQ ID NO: 1301983 - RNA, 19 nt, Artificial Sequence
  Description of Artificial Sequence: Synthetic oligonucleotide
agccgagcagucaacgcca

SEQ ID NO: 1301984 - RNA, 19 nt, Artificial Sequence
  Description of Artificial Sequence: Synthetic oligonucleotide
caguagcucccacaucuca

SEQ ID NO: 1301985 - RNA, 19 nt, Artificial Sequence
  Description of Artificial Sequence: Synthetic oligonucleotide
ggcagucuugcgcuucacc

SEQ ID NO: 1301986 - RNA, 19 nt, Artificial Sequence
  Description of Artificial Sequence: Synthetic oligonucleotide
uaauggcacuccggucucc

SEQ ID NO: 1301987 - RNA, 19 nt, Artificial Sequence
  Description of Artificial Sequence: Synthetic oligonucleotide
cuuggcagucuugcgcuuc

SEQ ID NO: 1301988 - RNA, 19 nt, Artificial Sequence
  Description of Artificial Sequence: Synthetic oligonucleotide
ucaugcgggcauagucaau

SEQ ID NO: 1301989 - RNA, 19 nt, Artificial Sequence
  Description of Artificial Sequence: Synthetic oligonucleotide
gcagucuugcgcuucaccu

SEQ ID NO: 1301990 - RNA, 19 nt, Artificial Sequence
  Description of Artificial Sequence: Synthetic oligonucleotide
guccgcauacuugaaaggu

SEQ ID NO: 1301991 - RNA, 19 nt, Artificial Sequence
  Description of Artificial Sequence: Synthetic oligonucleotide
augagccguggucggaaaa

SEQ ID NO: 1301992 - RNA, 19 nt, Artificial Sequence
  Description of Artificial Sequence: Synthetic oligonucleotide
acggaacugccgagaaguc

SEQ ID NO: 1301993 - RNA, 19 nt, Artificial Sequence
  Description of Artificial Sequence: Synthetic oligonucleotide
guggucggaaaagccgagc

SEQ ID NO: 1301994 - RNA, 19 nt, Artificial Sequence
  Description of Artificial Sequence: Synthetic oligonucleotide
ccgcauacuugaaagguga

SEQ ID NO: 1301995 - RNA, 19 nt, Artificial Sequence
  Description of Artificial Sequence: Synthetic oligonucleotide
ccuugaccucaucacacac

SEQ ID NO: 1301996 - RNA, 19 nt, Artificial Sequence
  Description of Artificial Sequence: Synthetic oligonucleotide
cucucucaugcgggcauag

SEQ ID NO: 1301997 - RNA, 19 nt, Artificial Sequence
  Description of Artificial Sequence: Synthetic oligonucleotide
uccgcacucccuuccgaua

SEQ ID NO: 1301998 - RNA, 19 nt, Artificial Sequence
  Description of Artificial Sequence: Synthetic oligonucleotide
cagcuaugaugagccgugg

SEQ ID NO: 1301999 - RNA, 19 nt, Artificial Sequence
  Description of Artificial Sequence: Synthetic oligonucleotide
ccucaaauguguaagggau

SEQ ID NO: 1302000 - RNA, 19 nt, Artificial Sequence
  Description of Artificial Sequence: Synthetic oligonucleotide
ggcguaggcacuaguacca

SEQ ID NO: 1302001 - RNA, 19 nt, Artificial Sequence
  Description of Artificial Sequence: Synthetic oligonucleotide
gagucuugugagugguggu

SEQ ID NO: 1302002 - RNA, 19 nt, Artificial Sequence
  Description of Artificial Sequence: Synthetic oligonucleotide
gcgcuggcagagcaacucg

SEQ ID NO: 1302003 - RNA, 19 nt, Artificial Sequence
  Description of Artificial Sequence: Synthetic oligonucleotide
aaccuuccgaguacuuguu

SEQ ID NO: 1302004 - RNA, 19 nt, Artificial Sequence
  Description of Artificial Sequence: Synthetic oligonucleotide
ccuccgggaguaauggcac

SEQ ID NO: 1302005 - RNA, 19 nt, Artificial Sequence
  Description of Artificial Sequence: Synthetic oligonucleotide
gccagauuggcuggagacc

SEQ ID NO: 1302006 - RNA, 19 nt, Artificial Sequence
  Description of Artificial Sequence: Synthetic oligonucleotide
uggggucuaugguccgcac

SEQ ID NO: 1302007 - RNA, 19 nt, Artificial Sequence
  Description of Artificial Sequence: Synthetic oligonucleotide
caccagacaccagugagua

SEQ ID NO: 1302008 - RNA, 19 nt, Artificial Sequence
  Description of Artificial Sequence: Synthetic oligonucleotide
ccgaguacuuguuguucag

SEQ ID NO: 1302009 - RNA, 19 nt, Artificial Sequence
  Description of Artificial Sequence: Synthetic oligonucleotide
agucaaugagacgggcgua

SEQ ID NO: 1302010 - RNA, 19 nt, Artificial Sequence
  Description of Artificial Sequence: Synthetic oligonucleotide
cgagugguccaaagcaaag

SEQ ID NO: 1302011 - RNA, 19 nt, Artificial Sequence
  Description of Artificial Sequence: Synthetic oligonucleotide
ccgucugacaucagacaug

SEQ ID NO: 1302012 - RNA, 19 nt, Artificial Sequence
  Description of Artificial Sequence: Synthetic oligonucleotide
caggaccagucaccaacuc

SEQ ID NO: 1302013 - RNA, 19 nt, Artificial Sequence
  Description of Artificial Sequence: Synthetic oligonucleotide
cagucaacgccagcugguc

SEQ ID NO: 1302014 - RNA, 19 nt, Artificial Sequence
  Description of Artificial Sequence: Synthetic oligonucleotide
gccaccuuacugugcugag

SEQ ID NO: 1302015 - RNA, 19 nt, Artificial Sequence
  Description of Artificial Sequence: Synthetic oligonucleotide
cccuacggaagucauccuc

SEQ ID NO: 1302016 - RNA, 19 nt, Artificial Sequence
  Description of Artificial Sequence: Synthetic oligonucleotide
cugagcccgagcagccauc

SEQ ID NO: 1302017 - RNA, 19 nt, Artificial Sequence
  Description of Artificial Sequence: Synthetic oligonucleotide
gccguaauggacacaagcu

SEQ ID NO: 1302018 - RNA, 19 nt, Artificial Sequence
  Description of Artificial Sequence: Synthetic oligonucleotide
cccuuccgauaaaagauga

SEQ ID NO: 1302019 - RNA, 19 nt, Artificial Sequence
  Description of Artificial Sequence: Synthetic oligonucleotide
caucacacaccucucucau

SEQ ID NO: 1302020 - RNA, 19 nt, Artificial Sequence
  Description of Artificial Sequence: Synthetic oligonucleotide
agcaccuguagggcauacu

SEQ ID NO: 1302021 - RNA, 19 nt, Artificial Sequence
  Description of Artificial Sequence: Synthetic oligonucleotide
caauguccgcauacuugaa

SEQ ID NO: 1302022 - RNA, 19 nt, Artificial Sequence
  Description of Artificial Sequence: Synthetic oligonucleotide
cugcaguagcucccacauc

SEQ ID NO: 1302023 - RNA, 19 nt, Artificial Sequence
  Description of Artificial Sequence: Synthetic oligonucleotide
ggucuaugguccgcacucc

SEQ ID NO: 1302024 - RNA, 19 nt, Artificial Sequence
  Description of Artificial Sequence: Synthetic oligonucleotide
gccucucuuuagcagggca

SEQ ID NO: 1302025 - RNA, 19 nt, Artificial Sequence
  Description of Artificial Sequence: Synthetic oligonucleotide
guagguccaaccccaugau

SEQ ID NO: 1302026 - RNA, 19 nt, Artificial Sequence
  Description of Artificial Sequence: Synthetic oligonucleotide
gcacuaguaccagcuauga

SEQ ID NO: 1302027 - RNA, 19 nt, Artificial Sequence
  Description of Artificial Sequence: Synthetic oligonucleotide
gccugagguuggccaaacg

SEQ ID NO: 1302028 - RNA, 19 nt, Artificial Sequence
  Description of Artificial Sequence: Synthetic oligonucleotide
ccgauaaaagaugaguccu

SEQ ID NO: 1302029 - RNA, 19 nt, Artificial Sequence
  Description of Artificial Sequence: Synthetic oligonucleotide
ggcauacucccggaacaug

SEQ ID NO: 1302030 - RNA, 19 nt, Artificial Sequence
  Description of Artificial Sequence: Synthetic oligonucleotide
ccuccaagccaauguugac

SEQ ID NO: 1302031 - RNA, 19 nt, Artificial Sequence
  Description of Artificial Sequence: Synthetic oligonucleotide
ucaacgccagcuggucgua

SEQ ID NO: 1302032 - RNA, 19 nt, Artificial Sequence
  Description of Artificial Sequence: Synthetic oligonucleotide
gccuccgggaguaauggca

SEQ ID NO: 1302033 - RNA, 19 nt, Artificial Sequence
  Description of Artificial Sequence: Synthetic oligonucleotide
ccaaccccaugauucgauc

SEQ ID NO: 1302034 - RNA, 19 nt, Artificial Sequence
  Description of Artificial Sequence: Synthetic oligonucleotide
ggagacccagaguauggcu

SEQ ID NO: 1302035 - RNA, 19 nt, Artificial Sequence
  Description of Artificial Sequence: Synthetic oligonucleotide
cagauuggcuggagaccca

SEQ ID NO: 1302036 - RNA, 19 nt, Artificial Sequence
  Description of Artificial Sequence: Synthetic oligonucleotide
cucagcaccuguagggcau

SEQ ID NO: 1302037 - RNA, 19 nt, Artificial Sequence
  Description of Artificial Sequence: Synthetic oligonucleotide
acgggcguaggcacuagua

SEQ ID NO: 1302038 - RNA, 19 nt, Artificial Sequence
  Description of Artificial Sequence: Synthetic oligonucleotide
cuuccgaguacuuguuguu

SEQ ID NO: 1302039 - RNA, 19 nt, Artificial Sequence
  Description of Artificial Sequence: Synthetic oligonucleotide
ccgagaagucagugcuggg

SEQ ID NO: 1302040 - RNA, 19 nt, Artificial Sequence
  Description of Artificial Sequence: Synthetic oligonucleotide
ggauguggcagagauccgu

SEQ ID NO: 1302041 - RNA, 19 nt, Artificial Sequence
  Description of Artificial Sequence: Synthetic oligonucleotide
ccaacucugguccggagua

SEQ ID NO: 1302042 - RNA, 19 nt, Artificial Sequence
  Description of Artificial Sequence: Synthetic oligonucleotide
ccguggucggaaaagccga

SEQ ID NO: 1302043 - RNA, 19 nt, Artificial Sequence
  Description of Artificial Sequence: Synthetic oligonucleotide
gagacgggcguaggcacua

SEQ ID NO: 1302044 - RNA, 19 nt, Artificial Sequence
  Description of Artificial Sequence: Synthetic oligonucleotide
cgggaguaauggcacuccg

SEQ ID NO: 1302045 - RNA, 19 nt, Artificial Sequence
  Description of Artificial Sequence: Synthetic oligonucleotide
cuaugguccgcacucccuu

SEQ ID NO: 1302046 - RNA, 19 nt, Artificial Sequence
  Description of Artificial Sequence: Synthetic oligonucleotide
guccaaccccaugauucga

SEQ ID NO: 1302047 - RNA, 19 nt, Artificial Sequence
  Description of Artificial Sequence: Synthetic oligonucleotide
caacgccagcuggucguag

SEQ ID NO: 1302048 - RNA, 19 nt, Artificial Sequence
  Description of Artificial Sequence: Synthetic oligonucleotide
cagugaguagccucucuuu

SEQ ID NO: 1302049 - RNA, 19 nt, Artificial Sequence
  Description of Artificial Sequence: Synthetic oligonucleotide
cgggcguaggcacuaguac

SEQ ID NO: 1302050 - RNA, 19 nt, Artificial Sequence
  Description of Artificial Sequence: Synthetic oligonucleotide
ccuuccgaguacuuguugu

SEQ ID NO: 1302051 - RNA, 19 nt, Artificial Sequence
  Description of Artificial Sequence: Synthetic oligonucleotide
ccaccuuacugugcugagc

SEQ ID NO: 1302052 - RNA, 19 nt, Artificial Sequence
  Description of Artificial Sequence: Synthetic oligonucleotide
agacgggcguaggcacuag

SEQ ID NO: 1302053 - RNA, 19 nt, Artificial Sequence
  Description of Artificial Sequence: Synthetic oligonucleotide
cuugagggccacagcuacu

SEQ ID NO: 1302054 - RNA, 19 nt, Artificial Sequence
  Description of Artificial Sequence: Synthetic oligonucleotide
ccgggaguaauggcacucc

SEQ ID NO: 1302055 - RNA, 19 nt, Artificial Sequence
  Description of Artificial Sequence: Synthetic oligonucleotide
cacaucucagggucacuau

SEQ ID NO: 1302056 - RNA, 19 nt, Artificial Sequence
  Description of Artificial Sequence: Synthetic oligonucleotide
ggccuccgggaguaauggc

SEQ ID NO: 1302057 - RNA, 19 nt, Artificial Sequence
  Description of Artificial Sequence: Synthetic oligonucleotide
cagaguauggcugcacauu

SEQ ID NO: 1302058 - RNA, 19 nt, Artificial Sequence
  Description of Artificial Sequence: Synthetic oligonucleotide
ggguaccaucgcuaccaga

SEQ ID NO: 1302059 - RNA, 19 nt, Artificial Sequence
  Description of Artificial Sequence: Synthetic oligonucleotide
gcguaggcacuaguaccag

SEQ ID NO: 1302060 - RNA, 19 nt, Artificial Sequence
  Description of Artificial Sequence: Synthetic oligonucleotide
guuggccguaauggacaca

SEQ ID NO: 1302061 - RNA, 19 nt, Artificial Sequence
  Description of Artificial Sequence: Synthetic oligonucleotide
ccaucgcuaccagagguca

SEQ ID NO: 1302062 - RNA, 19 nt, Artificial Sequence
  Description of Artificial Sequence: Synthetic oligonucleotide
gccacugauaugggccaug

SEQ ID NO: 1302063 - RNA, 19 nt, Artificial Sequence
  Description of Artificial Sequence: Synthetic oligonucleotide
gacgggcguaggcacuagu

SEQ ID NO: 1302064 - RNA, 19 nt, Artificial Sequence
  Description of Artificial Sequence: Synthetic oligonucleotide
cguggucggaaaagccgag

SEQ ID NO: 1302065 - RNA, 19 nt, Artificial Sequence
  Description of Artificial Sequence: Synthetic oligonucleotide
cacccgcucagcucgggcu

SEQ ID NO: 1302066 - RNA, 19 nt, Artificial Sequence
  Description of Artificial Sequence: Synthetic oligonucleotide
cagcaccuguagggcauac

SEQ ID NO: 1302067 - RNA, 19 nt, Artificial Sequence
  Description of Artificial Sequence: Synthetic oligonucleotide
cacuaguaccagcuaugau

SEQ ID NO: 1302068 - RNA, 19 nt, Artificial Sequence
  Description of Artificial Sequence: Synthetic oligonucleotide
gcaaagagaaggguaccau

SEQ ID NO: 1302069 - RNA, 19 nt, Artificial Sequence
  Description of Artificial Sequence: Synthetic oligonucleotide
ggucacuaucugccaaagu

SEQ ID NO: 1302070 - RNA, 19 nt, Artificial Sequence
  Description of Artificial Sequence: Synthetic oligonucleotide
gccgagugguccaaagcaa

SEQ ID NO: 1302071 - RNA, 19 nt, Artificial Sequence
  Description of Artificial Sequence: Synthetic oligonucleotide
cuggcagagcaacucgauu

SEQ ID NO: 1302072 - RNA, 19 nt, Artificial Sequence
  Description of Artificial Sequence: Synthetic oligonucleotide
gcucagcucgggcuccauc

SEQ ID NO: 1302073 - RNA, 19 nt, Artificial Sequence
  Description of Artificial Sequence: Synthetic oligonucleotide
cagcgcagcucggcugcag

SEQ ID NO: 1302074 - RNA, 19 nt, Artificial Sequence
  Description of Artificial Sequence: Synthetic oligonucleotide
cccaucagguagguccaac

SEQ ID NO: 1302075 - RNA, 19 nt, Artificial Sequence
  Description of Artificial Sequence: Synthetic oligonucleotide
cuguguaagcagccagauu

SEQ ID NO: 1302076 - RNA, 19 nt, Artificial Sequence
  Description of Artificial Sequence: Synthetic oligonucleotide
ccgggccaccuuacugugc

SEQ ID NO: 1302077 - RNA, 19 nt, Artificial Sequence
  Description of Artificial Sequence: Synthetic oligonucleotide
gcagucaacgccagcuggu

SEQ ID NO: 1302078 - RNA, 19 nt, Artificial Sequence
  Description of Artificial Sequence: Synthetic oligonucleotide
ccgcacucccuuccgauaa

SEQ ID NO: 1302079 - RNA, 19 nt, Artificial Sequence
  Description of Artificial Sequence: Synthetic oligonucleotide
cuggggcaccaagccucag

SEQ ID NO: 1302080 - RNA, 19 nt, Artificial Sequence
  Description of Artificial Sequence: Synthetic oligonucleotide
cuccgggaguaauggcacu

SEQ ID NO: 1302081 - RNA, 19 nt, Artificial Sequence
  Description of Artificial Sequence: Synthetic oligonucleotide
gcccgagcagccauccaga

SEQ ID NO: 1302082 - RNA, 19 nt, Artificial Sequence
  Description of Artificial Sequence: Synthetic oligonucleotide
guguccgggccaccuuacu

SEQ ID NO: 1302083 - RNA, 19 nt, Artificial Sequence
  Description of Artificial Sequence: Synthetic oligonucleotide
cucuugccaggguaaccuu

SEQ ID NO: 1302084 - RNA, 19 nt, Artificial Sequence
  Description of Artificial Sequence: Synthetic oligonucleotide
ccucacggaacugccgaga

SEQ ID NO: 1302085 - RNA, 19 nt, Artificial Sequence
  Description of Artificial Sequence: Synthetic oligonucleotide
cgggaucaccuuggcagcc

SEQ ID NO: 1302086 - RNA, 19 nt, Artificial Sequence
  Description of Artificial Sequence: Synthetic oligonucleotide
ccaggguaaccuuccgagu

SEQ ID NO: 1302087 - RNA, 19 nt, Artificial Sequence
  Description of Artificial Sequence: Synthetic oligonucleotide
cggaaaagccgagcaguca

SEQ ID NO: 1302088 - RNA, 19 nt, Artificial Sequence
  Description of Artificial Sequence: Synthetic oligonucleotide
gccaaacguugacuuguuu

SEQ ID NO: 1302089 - RNA, 19 nt, Artificial Sequence
  Description of Artificial Sequence: Synthetic oligonucleotide
gguaaccuuccgaguacuu

SEQ ID NO: 1302090 - RNA, 19 nt, Artificial Sequence
  Description of Artificial Sequence: Synthetic oligonucleotide
gggcauacucccggaacau

SEQ ID NO: 1302091 - RNA, 19 nt, Artificial Sequence
  Description of Artificial Sequence: Synthetic oligonucleotide
ccacugauaugggccaugu

SEQ ID NO: 1302092 - RNA, 19 nt, Artificial Sequence
  Description of Artificial Sequence: Synthetic oligonucleotide
ccacagcuacugcagcaau

SEQ ID NO: 1302093 - RNA, 19 nt, Artificial Sequence
  Description of Artificial Sequence: Synthetic oligonucleotide
ggccaaacguugacuuguu

SEQ ID NO: 1302094 - RNA, 19 nt, Artificial Sequence
  Description of Artificial Sequence: Synthetic oligonucleotide
cgcacucccuuccgauaaa

SEQ ID NO: 1302095 - RNA, 19 nt, Artificial Sequence
  Description of Artificial Sequence: Synthetic oligonucleotide
cccacaucucagggucacu

SEQ ID NO: 1302096 - RNA, 19 nt, Artificial Sequence
  Description of Artificial Sequence: Synthetic oligonucleotide
aaagcguagaagcauaaac

SEQ ID NO: 1302097 - RNA, 19 nt, Artificial Sequence
  Description of Artificial Sequence: Synthetic oligonucleotide
uuugugaccguucugaggg

SEQ ID NO: 1302098 - RNA, 19 nt, Artificial Sequence
  Description of Artificial Sequence: Synthetic oligonucleotide
uaauauuccgaccagcagg

SEQ ID NO: 1302099 - RNA, 19 nt, Artificial Sequence
  Description of Artificial Sequence: Synthetic oligonucleotide
aguaccuuaagucuguagg

SEQ ID NO: 1302100 - RNA, 19 nt, Artificial Sequence
  Description of Artificial Sequence: Synthetic oligonucleotide
uuaaguaugaccuucccac

SEQ ID NO: 1302101 - RNA, 19 nt, Artificial Sequence
  Description of Artificial Sequence: Synthetic oligonucleotide
aagucuguaggcaacaagc

SEQ ID NO: 1302102 - RNA, 19 nt, Artificial Sequence
  Description of Artificial Sequence: Synthetic oligonucleotide
ucuaaaguaccuuaagucu

SEQ ID NO: 1302103 - RNA, 19 nt, Artificial Sequence
  Description of Artificial Sequence: Synthetic oligonucleotide
ugcaguuccaagaagcuag

SEQ ID NO: 1302104 - RNA, 19 nt, Artificial Sequence
  Description of Artificial Sequence: Synthetic oligonucleotide
acaagaauugcccaaggag

SEQ ID NO: 1302105 - RNA, 19 nt, Artificial Sequence
  Description of Artificial Sequence: Synthetic oligonucleotide
acuauaauaggcagcagcc

SEQ ID NO: 1302106 - RNA, 19 nt, Artificial Sequence
  Description of Artificial Sequence: Synthetic oligonucleotide
uccacuugcauguacaucu

SEQ ID NO: 1302107 - RNA, 19 nt, Artificial Sequence
  Description of Artificial Sequence: Synthetic oligonucleotide
cauagaagagcuuccagcc

SEQ ID NO: 1302108 - RNA, 19 nt, Artificial Sequence
  Description of Artificial Sequence: Synthetic oligonucleotide
aauauuccgaccagcaggg

SEQ ID NO: 1302109 - RNA, 19 nt, Artificial Sequence
  Description of Artificial Sequence: Synthetic oligonucleotide
aaguggucuaggcaggaac

SEQ ID NO: 1302110 - RNA, 19 nt, Artificial Sequence
  Description of Artificial Sequence: Synthetic oligonucleotide
uuuagcaaguucaagggau

SEQ ID NO: 1302111 - RNA, 19 nt, Artificial Sequence
  Description of Artificial Sequence: Synthetic oligonucleotide
agacaaguggucuaggcag

SEQ ID NO: 1302112 - RNA, 19 nt, Artificial Sequence
  Description of Artificial Sequence: Synthetic oligonucleotide
ucuguaggcaacaagcuaa

SEQ ID NO: 1302113 - RNA, 19 nt, Artificial Sequence
  Description of Artificial Sequence: Synthetic oligonucleotide
agaagaccuguuuagguuc

SEQ ID NO: 1302114 - RNA, 19 nt, Artificial Sequence
  Description of Artificial Sequence: Synthetic oligonucleotide
aagaccggaugccuggagc

SEQ ID NO: 1302115 - RNA, 19 nt, Artificial Sequence
  Description of Artificial Sequence: Synthetic oligonucleotide
aguggauaauauuccgacc

SEQ ID NO: 1302116 - RNA, 19 nt, Artificial Sequence
  Description of Artificial Sequence: Synthetic oligonucleotide
ucaguuggagacaugucag

SEQ ID NO: 1302117 - RNA, 19 nt, Artificial Sequence
  Description of Artificial Sequence: Synthetic oligonucleotide
cuaaaguaccuuaagucug

SEQ ID NO: 1302118 - RNA, 19 nt, Artificial Sequence
  Description of Artificial Sequence: Synthetic oligonucleotide
ugucuaaaguaccuuaagu

SEQ ID NO: 1302119 - RNA, 19 nt, Artificial Sequence
  Description of Artificial Sequence: Synthetic oligonucleotide
ucugcauguagagugacag

SEQ ID NO: 1302120 - RNA, 19 nt, Artificial Sequence
  Description of Artificial Sequence: Synthetic oligonucleotide
uggguuguggagcacauca

SEQ ID NO: 1302121 - RNA, 19 nt, Artificial Sequence
  Description of Artificial Sequence: Synthetic oligonucleotide
ucuguacagccacaaacag

SEQ ID NO: 1302122 - RNA, 19 nt, Artificial Sequence
  Description of Artificial Sequence: Synthetic oligonucleotide
cacuauaauaggcagcagc

SEQ ID NO: 1302123 - RNA, 19 nt, Artificial Sequence
  Description of Artificial Sequence: Synthetic oligonucleotide
acugucgcugcuuugugac

SEQ ID NO: 1302124 - RNA, 19 nt, Artificial Sequence
  Description of Artificial Sequence: Synthetic oligonucleotide
uuuaccagcagccacucua

SEQ ID NO: 1302125 - RNA, 19 nt, Artificial Sequence
  Description of Artificial Sequence: Synthetic oligonucleotide
uccacuauaauaggcagca

SEQ ID NO: 1302126 - RNA, 19 nt, Artificial Sequence
  Description of Artificial Sequence: Synthetic oligonucleotide
aaaccggagcaccacagug

SEQ ID NO: 1302127 - RNA, 19 nt, Artificial Sequence
  Description of Artificial Sequence: Synthetic oligonucleotide
uaagacucaauuucuguaa

SEQ ID NO: 1302128 - RNA, 19 nt, Artificial Sequence
  Description of Artificial Sequence: Synthetic oligonucleotide
uaucuccacuauaauaggc

SEQ ID NO: 1302129 - RNA, 19 nt, Artificial Sequence
  Description of Artificial Sequence: Synthetic oligonucleotide
uugucuaaaguaccuuaag

SEQ ID NO: 1302130 - RNA, 19 nt, Artificial Sequence
  Description of Artificial Sequence: Synthetic oligonucleotide
ugggaccuuagacaagugg

SEQ ID NO: 1302131 - RNA, 19 nt, Artificial Sequence
  Description of Artificial Sequence: Synthetic oligonucleotide
uaaguaugaccuucccacg

SEQ ID NO: 1302132 - RNA, 19 nt, Artificial Sequence
  Description of Artificial Sequence: Synthetic oligonucleotide
caguuggcaagucaguugg

SEQ ID NO: 1302133 - RNA, 19 nt, Artificial Sequence
  Description of Artificial Sequence: Synthetic oligonucleotide
ugggagagcuuccuaacag

SEQ ID NO: 1302134 - RNA, 19 nt, Artificial Sequence
  Description of Artificial Sequence: Synthetic oligonucleotide
aguaacggaccuuuuccuc

SEQ ID NO: 1302135 - RNA, 19 nt, Artificial Sequence
  Description of Artificial Sequence: Synthetic oligonucleotide
agaccggaugccuggagcc

SEQ ID NO: 1302136 - RNA, 19 nt, Artificial Sequence
  Description of Artificial Sequence: Synthetic oligonucleotide
uccacuuuucauuuaugga

SEQ ID NO: 1302137 - RNA, 19 nt, Artificial Sequence
  Description of Artificial Sequence: Synthetic oligonucleotide
aagucaguuggagacaugu

SEQ ID NO: 1302138 - RNA, 19 nt, Artificial Sequence
  Description of Artificial Sequence: Synthetic oligonucleotide
ugaagaaaagacuggcguc

SEQ ID NO: 1302139 - RNA, 19 nt, Artificial Sequence
  Description of Artificial Sequence: Synthetic oligonucleotide
uuccacaucacugcgucgg

SEQ ID NO: 1302140 - RNA, 19 nt, Artificial Sequence
  Description of Artificial Sequence: Synthetic oligonucleotide
aaguaacggaccuuuuccu

SEQ ID NO: 1302141 - RNA, 19 nt, Artificial Sequence
  Description of Artificial Sequence: Synthetic oligonucleotide
aaguaugaccuucccacgu

SEQ ID NO: 1302142 - RNA, 19 nt, Artificial Sequence
  Description of Artificial Sequence: Synthetic oligonucleotide
uggauaauauuccgaccag

SEQ ID NO: 1302143 - RNA, 19 nt, Artificial Sequence
  Description of Artificial Sequence: Synthetic oligonucleotide
uggcaagucaguuggagac

SEQ ID NO: 1302144 - RNA, 19 nt, Artificial Sequence
  Description of Artificial Sequence: Synthetic oligonucleotide
cauguagagugacagcacc

SEQ ID NO: 1302145 - RNA, 19 nt, Artificial Sequence
  Description of Artificial Sequence: Synthetic oligonucleotide
aggcaaaguggccucaagg

SEQ ID NO: 1302146 - RNA, 19 nt, Artificial Sequence
  Description of Artificial Sequence: Synthetic oligonucleotide
uucagagaagaccuguuua

SEQ ID NO: 1302147 - RNA, 19 nt, Artificial Sequence
  Description of Artificial Sequence: Synthetic oligonucleotide
cuaucuccacuauaauagg

SEQ ID NO: 1302148 - RNA, 19 nt, Artificial Sequence
  Description of Artificial Sequence: Synthetic oligonucleotide
aacagcugugcuacaacac

SEQ ID NO: 1302149 - RNA, 19 nt, Artificial Sequence
  Description of Artificial Sequence: Synthetic oligonucleotide
agagaagaccuguuuaggu

SEQ ID NO: 1302150 - RNA, 19 nt, Artificial Sequence
  Description of Artificial Sequence: Synthetic oligonucleotide
guaccuuaagucuguaggc

SEQ ID NO: 1302151 - RNA, 19 nt, Artificial Sequence
  Description of Artificial Sequence: Synthetic oligonucleotide
caguggauaauauuccgac

SEQ ID NO: 1302152 - RNA, 19 nt, Artificial Sequence
  Description of Artificial Sequence: Synthetic oligonucleotide
agcguagaagcauaaacaa

SEQ ID NO: 1302153 - RNA, 19 nt, Artificial Sequence
  Description of Artificial Sequence: Synthetic oligonucleotide
uacacugucagcucugauc

SEQ ID NO: 1302154 - RNA, 19 nt, Artificial Sequence
  Description of Artificial Sequence: Synthetic oligonucleotide
guucaagggaucauguucc

SEQ ID NO: 1302155 - RNA, 19 nt, Artificial Sequence
  Description of Artificial Sequence: Synthetic oligonucleotide
auuccgaccagcagggacc

SEQ ID NO: 1302156 - RNA, 19 nt, Artificial Sequence
  Description of Artificial Sequence: Synthetic oligonucleotide
guaacggaccuuuuccucc

SEQ ID NO: 1302157 - RNA, 19 nt, Artificial Sequence
  Description of Artificial Sequence: Synthetic oligonucleotide
uauuccgaccagcagggac

SEQ ID NO: 1302158 - RNA, 19 nt, Artificial Sequence
  Description of Artificial Sequence: Synthetic oligonucleotide
uaacuacuccugcucagcc

SEQ ID NO: 1302159 - RNA, 19 nt, Artificial Sequence
  Description of Artificial Sequence: Synthetic oligonucleotide
ugcugaagaaaagacuggc

SEQ ID NO: 1302160 - RNA, 19 nt, Artificial Sequence
  Description of Artificial Sequence: Synthetic oligonucleotide
cuuugugaccguucugagg

SEQ ID NO: 1302161 - RNA, 19 nt, Artificial Sequence
  Description of Artificial Sequence: Synthetic oligonucleotide
agggaccaagaccggaugc

SEQ ID NO: 1302162 - RNA, 19 nt, Artificial Sequence
  Description of Artificial Sequence: Synthetic oligonucleotide
aacaagcuaaaagccaaca

SEQ ID NO: 1302163 - RNA, 19 nt, Artificial Sequence
  Description of Artificial Sequence: Synthetic oligonucleotide
ucuggcuaacuacuccugc

SEQ ID NO: 1302164 - RNA, 19 nt, Artificial Sequence
  Description of Artificial Sequence: Synthetic oligonucleotide
agacuggcgucuuaaaccu

SEQ ID NO: 1302165 - RNA, 19 nt, Artificial Sequence
  Description of Artificial Sequence: Synthetic oligonucleotide
uuguggagcacaucagccc

SEQ ID NO: 1302166 - RNA, 19 nt, Artificial Sequence
  Description of Artificial Sequence: Synthetic oligonucleotide
uucccaaaguaacggaccu

SEQ ID NO: 1302167 - RNA, 19 nt, Artificial Sequence
  Description of Artificial Sequence: Synthetic oligonucleotide
uugcauguacaucucugga

SEQ ID NO: 1302168 - RNA, 19 nt, Artificial Sequence
  Description of Artificial Sequence: Synthetic oligonucleotide
agagacuccucccuugucu

SEQ ID NO: 1302169 - RNA, 19 nt, Artificial Sequence
  Description of Artificial Sequence: Synthetic oligonucleotide
gucagcucugaucaccagg

SEQ ID NO: 1302170 - RNA, 19 nt, Artificial Sequence
  Description of Artificial Sequence: Synthetic oligonucleotide
acaguuggcaagucaguug

SEQ ID NO: 1302171 - RNA, 19 nt, Artificial Sequence
  Description of Artificial Sequence: Synthetic oligonucleotide
ugcauguacaucucuggaa

SEQ ID NO: 1302172 - RNA, 19 nt, Artificial Sequence
  Description of Artificial Sequence: Synthetic oligonucleotide
uuccuaacagcugugcuac

SEQ ID NO: 1302173 - RNA, 19 nt, Artificial Sequence
  Description of Artificial Sequence: Synthetic oligonucleotide
uuagcaaguucaagggauc

SEQ ID NO: 1302174 - RNA, 19 nt, Artificial Sequence
  Description of Artificial Sequence: Synthetic oligonucleotide
caaaguaacggaccuuuuc

SEQ ID NO: 1302175 - RNA, 19 nt, Artificial Sequence
  Description of Artificial Sequence: Synthetic oligonucleotide
cauguacaucucuggaacc

SEQ ID NO: 1302176 - RNA, 19 nt, Artificial Sequence
  Description of Artificial Sequence: Synthetic oligonucleotide
uguagaggcugaauguuuu

SEQ ID NO: 1302177 - RNA, 19 nt, Artificial Sequence
  Description of Artificial Sequence: Synthetic oligonucleotide
acugcgucggcccaugacu

SEQ ID NO: 1302178 - RNA, 19 nt, Artificial Sequence
  Description of Artificial Sequence: Synthetic oligonucleotide
uguugcaaaccggagcacc

SEQ ID NO: 1302179 - RNA, 19 nt, Artificial Sequence
  Description of Artificial Sequence: Synthetic oligonucleotide
cagacuaucuccacuauaa

SEQ ID NO: 1302180 - RNA, 19 nt, Artificial Sequence
  Description of Artificial Sequence: Synthetic oligonucleotide
gcucauccaaaccagacug

SEQ ID NO: 1302181 - RNA, 19 nt, Artificial Sequence
  Description of Artificial Sequence: Synthetic oligonucleotide
gacuaucuccacuauaaua

SEQ ID NO: 1302182 - RNA, 19 nt, Artificial Sequence
  Description of Artificial Sequence: Synthetic oligonucleotide
aguaugaccuucccacgug

SEQ ID NO: 1302183 - RNA, 19 nt, Artificial Sequence
  Description of Artificial Sequence: Synthetic oligonucleotide
uuggcaagucaguuggaga

SEQ ID NO: 1302184 - RNA, 19 nt, Artificial Sequence
  Description of Artificial Sequence: Synthetic oligonucleotide
guuguggagcacaucagcc

SEQ ID NO: 1302185 - RNA, 19 nt, Artificial Sequence
  Description of Artificial Sequence: Synthetic oligonucleotide
cucccuugucuaaaguacc

SEQ ID NO: 1302186 - RNA, 19 nt, Artificial Sequence
  Description of Artificial Sequence: Synthetic oligonucleotide
aaccucagaugcccuuggg

SEQ ID NO: 1302187 - RNA, 19 nt, Artificial Sequence
  Description of Artificial Sequence: Synthetic oligonucleotide
ugcaaagcguagaagcaua

SEQ ID NO: 1302188 - RNA, 19 nt, Artificial Sequence
  Description of Artificial Sequence: Synthetic oligonucleotide
uuaccagcagccacucuac

SEQ ID NO: 1302189 - RNA, 19 nt, Artificial Sequence
  Description of Artificial Sequence: Synthetic oligonucleotide
caagaauugcccaaggagu

SEQ ID NO: 1302190 - RNA, 19 nt, Artificial Sequence
  Description of Artificial Sequence: Synthetic oligonucleotide
accuguuuagguucuggcu

SEQ ID NO: 1302191 - RNA, 19 nt, Artificial Sequence
  Description of Artificial Sequence: Synthetic oligonucleotide
uaccuuaagucuguaggca

SEQ ID NO: 1302192 - RNA, 19 nt, Artificial Sequence
  Description of Artificial Sequence: Synthetic oligonucleotide
cauccaaaccagacugugc

SEQ ID NO: 1302193 - RNA, 19 nt, Artificial Sequence
  Description of Artificial Sequence: Synthetic oligonucleotide
ugccuaagccagaacugcc

SEQ ID NO: 1302194 - RNA, 19 nt, Artificial Sequence
  Description of Artificial Sequence: Synthetic oligonucleotide
agcucauccaaaccagacu

SEQ ID NO: 1302195 - RNA, 19 nt, Artificial Sequence
  Description of Artificial Sequence: Synthetic oligonucleotide
agaggcuaagacucaauuu

SEQ ID NO: 1302196 - RNA, 19 nt, Artificial Sequence
  Description of Artificial Sequence: Synthetic oligonucleotide
ccuaugcugaagaaaagac

SEQ ID NO: 1302197 - RNA, 19 nt, Artificial Sequence
  Description of Artificial Sequence: Synthetic oligonucleotide
uaaggggaugggagaagcc

SEQ ID NO: 1302198 - RNA, 19 nt, Artificial Sequence
  Description of Artificial Sequence: Synthetic oligonucleotide
gacaaguggucuaggcagg

SEQ ID NO: 1302199 - RNA, 19 nt, Artificial Sequence
  Description of Artificial Sequence: Synthetic oligonucleotide
ucccuugucuaaaguaccu

SEQ ID NO: 1302200 - RNA, 19 nt, Artificial Sequence
  Description of Artificial Sequence: Synthetic oligonucleotide
augaccuucccacgugcuc

SEQ ID NO: 1302201 - RNA, 19 nt, Artificial Sequence
  Description of Artificial Sequence: Synthetic oligonucleotide
uucuggcuaacuacuccug

SEQ ID NO: 1302202 - RNA, 19 nt, Artificial Sequence
  Description of Artificial Sequence: Synthetic oligonucleotide
cuaagacucaauuucugua

SEQ ID NO: 1302203 - RNA, 19 nt, Artificial Sequence
  Description of Artificial Sequence: Synthetic oligonucleotide
uguacaucucuggaaccug

SEQ ID NO: 1302204 - RNA, 19 nt, Artificial Sequence
  Description of Artificial Sequence: Synthetic oligonucleotide
uguagagugacagcaccaa

SEQ ID NO: 1302205 - RNA, 19 nt, Artificial Sequence
  Description of Artificial Sequence: Synthetic oligonucleotide
cuaacuacuccugcucagc

SEQ ID NO: 1302206 - RNA, 19 nt, Artificial Sequence
  Description of Artificial Sequence: Synthetic oligonucleotide
ugcaugcucacaguuggca

SEQ ID NO: 1302207 - RNA, 19 nt, Artificial Sequence
  Description of Artificial Sequence: Synthetic oligonucleotide
guuggcaagucaguuggag

SEQ ID NO: 1302208 - RNA, 19 nt, Artificial Sequence
  Description of Artificial Sequence: Synthetic oligonucleotide
ugcaaaccggagcaccaca

SEQ ID NO: 1302209 - RNA, 19 nt, Artificial Sequence
  Description of Artificial Sequence: Synthetic oligonucleotide
ucaugacagaugcagccuu

SEQ ID NO: 1302210 - RNA, 19 nt, Artificial Sequence
  Description of Artificial Sequence: Synthetic oligonucleotide
uggcuaacuacuccugcuc

SEQ ID NO: 1302211 - RNA, 19 nt, Artificial Sequence
  Description of Artificial Sequence: Synthetic oligonucleotide
uuguagaggcugaauguuu

SEQ ID NO: 1302212 - RNA, 19 nt, Artificial Sequence
  Description of Artificial Sequence: Synthetic oligonucleotide
gaagccccugauacaauag

SEQ ID NO: 1302213 - RNA, 19 nt, Artificial Sequence
  Description of Artificial Sequence: Synthetic oligonucleotide
aagccuguugcaaaccgga

SEQ ID NO: 1302214 - RNA, 19 nt, Artificial Sequence
  Description of Artificial Sequence: Synthetic oligonucleotide
caaggccucuugaaggcag

SEQ ID NO: 1302215 - RNA, 19 nt, Artificial Sequence
  Description of Artificial Sequence: Synthetic oligonucleotide
uaugaccuucccacgugcu

SEQ ID NO: 1302216 - RNA, 19 nt, Artificial Sequence
  Description of Artificial Sequence: Synthetic oligonucleotide
uucaagggaucauguuccc

SEQ ID NO: 1302217 - RNA, 19 nt, Artificial Sequence
  Description of Artificial Sequence: Synthetic oligonucleotide
guaugaccuucccacgugc

SEQ ID NO: 1302218 - RNA, 19 nt, Artificial Sequence
  Description of Artificial Sequence: Synthetic oligonucleotide
cugugcuacaacacugcug

SEQ ID NO: 1302219 - RNA, 19 nt, Artificial Sequence
  Description of Artificial Sequence: Synthetic oligonucleotide
cuugucuaaaguaccuuaa

SEQ ID NO: 1302220 - RNA, 19 nt, Artificial Sequence
  Description of Artificial Sequence: Synthetic oligonucleotide
ccugcaugcucacaguugg

SEQ ID NO: 1302221 - RNA, 19 nt, Artificial Sequence
  Description of Artificial Sequence: Synthetic oligonucleotide
caugguucugcaaagcgua

SEQ ID NO: 1302222 - RNA, 19 nt, Artificial Sequence
  Description of Artificial Sequence: Synthetic oligonucleotide
gaaccugggcuucaccuca

SEQ ID NO: 1302223 - RNA, 19 nt, Artificial Sequence
  Description of Artificial Sequence: Synthetic oligonucleotide
accuuaagucuguaggcaa

SEQ ID NO: 1302224 - RNA, 19 nt, Artificial Sequence
  Description of Artificial Sequence: Synthetic oligonucleotide
guacaucucuggaaccugg

SEQ ID NO: 1302225 - RNA, 19 nt, Artificial Sequence
  Description of Artificial Sequence: Synthetic oligonucleotide
aggcgaugcaguuccaaga

SEQ ID NO: 1302226 - RNA, 19 nt, Artificial Sequence
  Description of Artificial Sequence: Synthetic oligonucleotide
gccaguggauaauauuccg

SEQ ID NO: 1302227 - RNA, 19 nt, Artificial Sequence
  Description of Artificial Sequence: Synthetic oligonucleotide
uccaaaccagacugugcug

SEQ ID NO: 1302228 - RNA, 19 nt, Artificial Sequence
  Description of Artificial Sequence: Synthetic oligonucleotide
uuaaaccucagaugcccuu

SEQ ID NO: 1302229 - RNA, 19 nt, Artificial Sequence
  Description of Artificial Sequence: Synthetic oligonucleotide
cuuagacaaguggucuagg

SEQ ID NO: 1302230 - RNA, 19 nt, Artificial Sequence
  Description of Artificial Sequence: Synthetic oligonucleotide
gcuugagaggcuaagacuc

SEQ ID NO: 1302231 - RNA, 19 nt, Artificial Sequence
  Description of Artificial Sequence: Synthetic oligonucleotide
caacaagcuaaaagccaac

SEQ ID NO: 1302232 - RNA, 19 nt, Artificial Sequence
  Description of Artificial Sequence: Synthetic oligonucleotide
agagagacuccucccuugu

SEQ ID NO: 1302233 - RNA, 19 nt, Artificial Sequence
  Description of Artificial Sequence: Synthetic oligonucleotide
accucagaugcccuugggu

SEQ ID NO: 1302234 - RNA, 19 nt, Artificial Sequence
  Description of Artificial Sequence: Synthetic oligonucleotide
agaugcagccuuucugggu

SEQ ID NO: 1302235 - RNA, 19 nt, Artificial Sequence
  Description of Artificial Sequence: Synthetic oligonucleotide
caggcgaugcaguuccaag

SEQ ID NO: 1302236 - RNA, 19 nt, Artificial Sequence
  Description of Artificial Sequence: Synthetic oligonucleotide
agaccuguuuagguucugg

SEQ ID NO: 1302237 - RNA, 19 nt, Artificial Sequence
  Description of Artificial Sequence: Synthetic oligonucleotide
cuaugcugaagaaaagacu

SEQ ID NO: 1302238 - RNA, 19 nt, Artificial Sequence
  Description of Artificial Sequence: Synthetic oligonucleotide
cuaaaagccaacagcugua

SEQ ID NO: 1302239 - RNA, 19 nt, Artificial Sequence
  Description of Artificial Sequence: Synthetic oligonucleotide
ugugaccguucugaggggc

SEQ ID NO: 1302240 - RNA, 19 nt, Artificial Sequence
  Description of Artificial Sequence: Synthetic oligonucleotide
caagucagaacugguagca

SEQ ID NO: 1302241 - RNA, 19 nt, Artificial Sequence
  Description of Artificial Sequence: Synthetic oligonucleotide
gacugcacucugaguaagg

SEQ ID NO: 1302242 - RNA, 19 nt, Artificial Sequence
  Description of Artificial Sequence: Synthetic oligonucleotide
aaccggagcaccacagugu

SEQ ID NO: 1302243 - RNA, 19 nt, Artificial Sequence
  Description of Artificial Sequence: Synthetic oligonucleotide
augacugcacucugaguaa

SEQ ID NO: 1302244 - RNA, 19 nt, Artificial Sequence
  Description of Artificial Sequence: Synthetic oligonucleotide
cugcauguagagugacagc

SEQ ID NO: 1302245 - RNA, 19 nt, Artificial Sequence
  Description of Artificial Sequence: Synthetic oligonucleotide
cucuuaggagagucagcag

SEQ ID NO: 1302246 - RNA, 19 nt, Artificial Sequence
  Description of Artificial Sequence: Synthetic oligonucleotide
cuuccuaacagcugugcua

SEQ ID NO: 1302247 - RNA, 19 nt, Artificial Sequence
  Description of Artificial Sequence: Synthetic oligonucleotide
gcucacuuuagcaaguuca

SEQ ID NO: 1302248 - RNA, 19 nt, Artificial Sequence
  Description of Artificial Sequence: Synthetic oligonucleotide
agucuguaggcaacaagcu

SEQ ID NO: 1302249 - RNA, 19 nt, Artificial Sequence
  Description of Artificial Sequence: Synthetic oligonucleotide
ggauaauauuccgaccagc

SEQ ID NO: 1302250 - RNA, 19 nt, Artificial Sequence
  Description of Artificial Sequence: Synthetic oligonucleotide
cuuccacaucacugcgucg

SEQ ID NO: 1302251 - RNA, 19 nt, Artificial Sequence
  Description of Artificial Sequence: Synthetic oligonucleotide
acuggcgucuuaaaccuca

SEQ ID NO: 1302252 - RNA, 19 nt, Artificial Sequence
  Description of Artificial Sequence: Synthetic oligonucleotide
ucuggguuguggagcacau

SEQ ID NO: 1302253 - RNA, 19 nt, Artificial Sequence
  Description of Artificial Sequence: Synthetic oligonucleotide
ucuccacuugcauguacau

SEQ ID NO: 1302254 - RNA, 19 nt, Artificial Sequence
  Description of Artificial Sequence: Synthetic oligonucleotide
agacuaucuccacuauaau

SEQ ID NO: 1302255 - RNA, 19 nt, Artificial Sequence
  Description of Artificial Sequence: Synthetic oligonucleotide
gcuaaaagccaacagcugu

SEQ ID NO: 1302256 - RNA, 19 nt, Artificial Sequence
  Description of Artificial Sequence: Synthetic oligonucleotide
cuuaggagagucagcagcu

SEQ ID NO: 1302257 - RNA, 19 nt, Artificial Sequence
  Description of Artificial Sequence: Synthetic oligonucleotide
cacaagaauugcccaagga

SEQ ID NO: 1302258 - RNA, 19 nt, Artificial Sequence
  Description of Artificial Sequence: Synthetic oligonucleotide
ugucagcucugaucaccag

SEQ ID NO: 1302259 - RNA, 19 nt, Artificial Sequence
  Description of Artificial Sequence: Synthetic oligonucleotide
ugguucugcaaagcguaga

SEQ ID NO: 1302260 - RNA, 19 nt, Artificial Sequence
  Description of Artificial Sequence: Synthetic oligonucleotide
cuaagccagaacugccauc

SEQ ID NO: 1302261 - RNA, 19 nt, Artificial Sequence
  Description of Artificial Sequence: Synthetic oligonucleotide
cuuaagucuguaggcaaca

SEQ ID NO: 1302262 - RNA, 19 nt, Artificial Sequence
  Description of Artificial Sequence: Synthetic oligonucleotide
ccaagucagaacugguagc

SEQ ID NO: 1302263 - RNA, 19 nt, Artificial Sequence
  Description of Artificial Sequence: Synthetic oligonucleotide
uccccaagucagaacuggu

SEQ ID NO: 1302264 - RNA, 19 nt, Artificial Sequence
  Description of Artificial Sequence: Synthetic oligonucleotide
gaugcagccuuucuggguu

SEQ ID NO: 1302265 - RNA, 19 nt, Artificial Sequence
  Description of Artificial Sequence: Synthetic oligonucleotide
agggaagccccugauacaa

SEQ ID NO: 1302266 - RNA, 19 nt, Artificial Sequence
  Description of Artificial Sequence: Synthetic oligonucleotide
cucgucagauggaggcggg

SEQ ID NO: 1302267 - RNA, 19 nt, Artificial Sequence
  Description of Artificial Sequence: Synthetic oligonucleotide
cucuugaaggcaggcacug

SEQ ID NO: 1302268 - RNA, 19 nt, Artificial Sequence
  Description of Artificial Sequence: Synthetic oligonucleotide
ugguagcagucacuucaga

SEQ ID NO: 1302269 - RNA, 19 nt, Artificial Sequence
  Description of Artificial Sequence: Synthetic oligonucleotide
gguucgugucuccacuugc

SEQ ID NO: 1302270 - RNA, 19 nt, Artificial Sequence
  Description of Artificial Sequence: Synthetic oligonucleotide
ugggccuaugcugaagaaa

SEQ ID NO: 1302271 - RNA, 19 nt, Artificial Sequence
  Description of Artificial Sequence: Synthetic oligonucleotide
ucagauggaggcgggugcu

SEQ ID NO: 1302272 - RNA, 19 nt, Artificial Sequence
  Description of Artificial Sequence: Synthetic oligonucleotide
aggcuaagacucaauuucu

SEQ ID NO: 1302273 - RNA, 19 nt, Artificial Sequence
  Description of Artificial Sequence: Synthetic oligonucleotide
cuggguugggagagcuucc

SEQ ID NO: 1302274 - RNA, 19 nt, Artificial Sequence
  Description of Artificial Sequence: Synthetic oligonucleotide
cuugagaggcuaagacuca

SEQ ID NO: 1302275 - RNA, 19 nt, Artificial Sequence
  Description of Artificial Sequence: Synthetic oligonucleotide
agggaucauguuccccaag

SEQ ID NO: 1302276 - RNA, 19 nt, Artificial Sequence
  Description of Artificial Sequence: Synthetic oligonucleotide
ccaaaccagacugugcugc

SEQ ID NO: 1302277 - RNA, 19 nt, Artificial Sequence
  Description of Artificial Sequence: Synthetic oligonucleotide
gucuaacuuggccauuuaa

SEQ ID NO: 1302278 - RNA, 19 nt, Artificial Sequence
  Description of Artificial Sequence: Synthetic oligonucleotide
agcccagacuaucuccacu

SEQ ID NO: 1302279 - RNA, 19 nt, Artificial Sequence
  Description of Artificial Sequence: Synthetic oligonucleotide
ccuucccaaaguaacggac

SEQ ID NO: 1302280 - RNA, 19 nt, Artificial Sequence
  Description of Artificial Sequence: Synthetic oligonucleotide
accuuagacaaguggucua

SEQ ID NO: 1302281 - RNA, 19 nt, Artificial Sequence
  Description of Artificial Sequence: Synthetic oligonucleotide
uugagaggcuaagacucaa

SEQ ID NO: 1302282 - RNA, 19 nt, Artificial Sequence
  Description of Artificial Sequence: Synthetic oligonucleotide
ugccuggagcccucgucag

SEQ ID NO: 1302283 - RNA, 19 nt, Artificial Sequence
  Description of Artificial Sequence: Synthetic oligonucleotide
ugucuaacuuggccauuua

SEQ ID NO: 1302284 - RNA, 19 nt, Artificial Sequence
  Description of Artificial Sequence: Synthetic oligonucleotide
gccuguugcaaaccggagc

SEQ ID NO: 1302285 - RNA, 19 nt, Artificial Sequence
  Description of Artificial Sequence: Synthetic oligonucleotide
ccuguugcaaaccggagca

SEQ ID NO: 1302286 - RNA, 19 nt, Artificial Sequence
  Description of Artificial Sequence: Synthetic oligonucleotide
uggcgucuuaaaccucaga

SEQ ID NO: 1302287 - RNA, 19 nt, Artificial Sequence
  Description of Artificial Sequence: Synthetic oligonucleotide
gguucugcaaagcguagaa

SEQ ID NO: 1302288 - RNA, 19 nt, Artificial Sequence
  Description of Artificial Sequence: Synthetic oligonucleotide
ccuuaagucuguaggcaac

SEQ ID NO: 1302289 - RNA, 19 nt, Artificial Sequence
  Description of Artificial Sequence: Synthetic oligonucleotide
agaaaagacuggcgucuua

SEQ ID NO: 1302290 - RNA, 19 nt, Artificial Sequence
  Description of Artificial Sequence: Synthetic oligonucleotide
gguugggagagcuuccuaa

SEQ ID NO: 1302291 - RNA, 19 nt, Artificial Sequence
  Description of Artificial Sequence: Synthetic oligonucleotide
cauuuaccagcagccacuc

SEQ ID NO: 1302292 - RNA, 19 nt, Artificial Sequence
  Description of Artificial Sequence: Synthetic oligonucleotide
gagacuccucccuugucua

SEQ ID NO: 1302293 - RNA, 19 nt, Artificial Sequence
  Description of Artificial Sequence: Synthetic oligonucleotide
gaccuuagacaaguggucu

SEQ ID NO: 1302294 - RNA, 19 nt, Artificial Sequence
  Description of Artificial Sequence: Synthetic oligonucleotide
gcaacaagcuaaaagccaa

SEQ ID NO: 1302295 - RNA, 19 nt, Artificial Sequence
  Description of Artificial Sequence: Synthetic oligonucleotide
ggcgucuuaaaccucagau

SEQ ID NO: 1302296 - RNA, 19 nt, Artificial Sequence
  Description of Artificial Sequence: Synthetic oligonucleotide
caagaagcuagugaugagu

SEQ ID NO: 1302297 - RNA, 19 nt, Artificial Sequence
  Description of Artificial Sequence: Synthetic oligonucleotide
cugucgcugcuuugugacc

SEQ ID NO: 1302298 - RNA, 19 nt, Artificial Sequence
  Description of Artificial Sequence: Synthetic oligonucleotide
augucuaacuuggccauuu

SEQ ID NO: 1302299 - RNA, 19 nt, Artificial Sequence
  Description of Artificial Sequence: Synthetic oligonucleotide
caagaccggaugccuggag

SEQ ID NO: 1302300 - RNA, 19 nt, Artificial Sequence
  Description of Artificial Sequence: Synthetic oligonucleotide
auuuaccagcagccacucu

SEQ ID NO: 1302301 - RNA, 19 nt, Artificial Sequence
  Description of Artificial Sequence: Synthetic oligonucleotide
uguaggcaacaagcuaaaa

SEQ ID NO: 1302302 - RNA, 19 nt, Artificial Sequence
  Description of Artificial Sequence: Synthetic oligonucleotide
ccccugauacaauagccug

SEQ ID NO: 1302303 - RNA, 19 nt, Artificial Sequence
  Description of Artificial Sequence: Synthetic oligonucleotide
cgugcucuuguugaaauag

SEQ ID NO: 1302304 - RNA, 19 nt, Artificial Sequence
  Description of Artificial Sequence: Synthetic oligonucleotide
cugcaugcucacaguuggc

SEQ ID NO: 1302305 - RNA, 19 nt, Artificial Sequence
  Description of Artificial Sequence: Synthetic oligonucleotide
uugcaaaccggagcaccac

SEQ ID NO: 1302306 - RNA, 19 nt, Artificial Sequence
  Description of Artificial Sequence: Synthetic oligonucleotide
ggaucauguuccccaaguc

SEQ ID NO: 1302307 - RNA, 19 nt, Artificial Sequence
  Description of Artificial Sequence: Synthetic oligonucleotide
aguuuggcaauggcuucca

SEQ ID NO: 1302308 - RNA, 19 nt, Artificial Sequence
  Description of Artificial Sequence: Synthetic oligonucleotide
ccaaggagucauaggcagg

SEQ ID NO: 1302309 - RNA, 19 nt, Artificial Sequence
  Description of Artificial Sequence: Synthetic oligonucleotide
cuggcgucuuaaaccucag

SEQ ID NO: 1302310 - RNA, 19 nt, Artificial Sequence
  Description of Artificial Sequence: Synthetic oligonucleotide
ggagcacaucagcccaugg

SEQ ID NO: 1302311 - RNA, 19 nt, Artificial Sequence
  Description of Artificial Sequence: Synthetic oligonucleotide
ggccucaaggcucuuuuca

SEQ ID NO: 1302312 - RNA, 19 nt, Artificial Sequence
  Description of Artificial Sequence: Synthetic oligonucleotide
ggcuaagacucaauuucug

SEQ ID NO: 1302313 - RNA, 19 nt, Artificial Sequence
  Description of Artificial Sequence: Synthetic oligonucleotide
ccuuagacaaguggucuag

SEQ ID NO: 1302314 - RNA, 19 nt, Artificial Sequence
  Description of Artificial Sequence: Synthetic oligonucleotide
gcuaagacucaauuucugu

SEQ ID NO: 1302315 - RNA, 19 nt, Artificial Sequence
  Description of Artificial Sequence: Synthetic oligonucleotide
augguucugcaaagcguag

SEQ ID NO: 1302316 - RNA, 19 nt, Artificial Sequence
  Description of Artificial Sequence: Synthetic oligonucleotide
acaaguggucuaggcagga

SEQ ID NO: 1302317 - RNA, 19 nt, Artificial Sequence
  Description of Artificial Sequence: Synthetic oligonucleotide
ggaggcgggugcugguucg

SEQ ID NO: 1302318 - RNA, 19 nt, Artificial Sequence
  Description of Artificial Sequence: Synthetic oligonucleotide
uuuugucaaucugcaugua

SEQ ID NO: 1302319 - RNA, 19 nt, Artificial Sequence
  Description of Artificial Sequence: Synthetic oligonucleotide
ggcgaugcaguuccaagaa

SEQ ID NO: 1302320 - RNA, 19 nt, Artificial Sequence
  Description of Artificial Sequence: Synthetic oligonucleotide
uuccgaccagcagggacca

SEQ ID NO: 1302321 - RNA, 19 nt, Artificial Sequence
  Description of Artificial Sequence: Synthetic oligonucleotide
gcaaaccggagcaccacag

SEQ ID NO: 1302322 - RNA, 19 nt, Artificial Sequence
  Description of Artificial Sequence: Synthetic oligonucleotide
ggaaccugggcuucaccuc

SEQ ID NO: 1302323 - RNA, 19 nt, Artificial Sequence
  Description of Artificial Sequence: Synthetic oligonucleotide
cuuaaaccucagaugcccu

SEQ ID NO: 1302324 - RNA, 19 nt, Artificial Sequence
  Description of Artificial Sequence: Synthetic oligonucleotide
gccuaugcugaagaaaaga

SEQ ID NO: 1302325 - RNA, 19 nt, Artificial Sequence
  Description of Artificial Sequence: Synthetic oligonucleotide
cuguaggcaacaagcuaaa

SEQ ID NO: 1302326 - RNA, 19 nt, Artificial Sequence
  Description of Artificial Sequence: Synthetic oligonucleotide
ccuguuuagguucuggcua

SEQ ID NO: 1302327 - RNA, 19 nt, Artificial Sequence
  Description of Artificial Sequence: Synthetic oligonucleotide
ggaccuuagacaagugguc

SEQ ID NO: 1302328 - RNA, 19 nt, Artificial Sequence
  Description of Artificial Sequence: Synthetic oligonucleotide
uuaggagagucagcagcuu

SEQ ID NO: 1302329 - RNA, 19 nt, Artificial Sequence
  Description of Artificial Sequence: Synthetic oligonucleotide
gaucugccugcaugcucac

SEQ ID NO: 1302330 - RNA, 19 nt, Artificial Sequence
  Description of Artificial Sequence: Synthetic oligonucleotide
gcgaugcaguuccaagaag

SEQ ID NO: 1302331 - RNA, 19 nt, Artificial Sequence
  Description of Artificial Sequence: Synthetic oligonucleotide
gaugcccuugggugagcuc

SEQ ID NO: 1302332 - RNA, 19 nt, Artificial Sequence
  Description of Artificial Sequence: Synthetic oligonucleotide
cacugcgucggcccaugac

SEQ ID NO: 1302333 - RNA, 19 nt, Artificial Sequence
  Description of Artificial Sequence: Synthetic oligonucleotide
guagcccuucccaaaguaa

SEQ ID NO: 1302334 - RNA, 19 nt, Artificial Sequence
  Description of Artificial Sequence: Synthetic oligonucleotide
uccuaacagcugugcuaca

SEQ ID NO: 1302335 - RNA, 19 nt, Artificial Sequence
  Description of Artificial Sequence: Synthetic oligonucleotide
gcuggguugggagagcuuc

SEQ ID NO: 1302336 - RNA, 19 nt, Artificial Sequence
  Description of Artificial Sequence: Synthetic oligonucleotide
ccaguggauaauauuccga

SEQ ID NO: 1302337 - RNA, 19 nt, Artificial Sequence
  Description of Artificial Sequence: Synthetic oligonucleotide
aucugcauguagagugaca

SEQ ID NO: 1302338 - RNA, 19 nt, Artificial Sequence
  Description of Artificial Sequence: Synthetic oligonucleotide
cacugucgcugcuuuguga

SEQ ID NO: 1302339 - RNA, 19 nt, Artificial Sequence
  Description of Artificial Sequence: Synthetic oligonucleotide
agccuguugcaaaccggag

SEQ ID NO: 1302340 - RNA, 19 nt, Artificial Sequence
  Description of Artificial Sequence: Synthetic oligonucleotide
ugaccguucugaggggcuc

SEQ ID NO: 1302341 - RNA, 19 nt, Artificial Sequence
  Description of Artificial Sequence: Synthetic oligonucleotide
agacuccucccuugucuaa

SEQ ID NO: 1302342 - RNA, 19 nt, Artificial Sequence
  Description of Artificial Sequence: Synthetic oligonucleotide
ccucgucagauggaggcgg

SEQ ID NO: 1302343 - RNA, 19 nt, Artificial Sequence
  Description of Artificial Sequence: Synthetic oligonucleotide
ucggcccaugacugcacuc

SEQ ID NO: 1302344 - RNA, 19 nt, Artificial Sequence
  Description of Artificial Sequence: Synthetic oligonucleotide
aucacugcgucggcccaug

SEQ ID NO: 1302345 - RNA, 19 nt, Artificial Sequence
  Description of Artificial Sequence: Synthetic oligonucleotide
ccuugucuaaaguaccuua

SEQ ID NO: 1302346 - RNA, 19 nt, Artificial Sequence
  Description of Artificial Sequence: Synthetic oligonucleotide
cacugucagcucugaucac

SEQ ID NO: 1302347 - RNA, 19 nt, Artificial Sequence
  Description of Artificial Sequence: Synthetic oligonucleotide
accguucugaggggcucuc

SEQ ID NO: 1302348 - RNA, 19 nt, Artificial Sequence
  Description of Artificial Sequence: Synthetic oligonucleotide
ggggugacauuuaccagca

SEQ ID NO: 1302349 - RNA, 19 nt, Artificial Sequence
  Description of Artificial Sequence: Synthetic oligonucleotide
ucacugcgucggcccauga

SEQ ID NO: 1302350 - RNA, 19 nt, Artificial Sequence
  Description of Artificial Sequence: Synthetic oligonucleotide
caaagcguagaagcauaaa

SEQ ID NO: 1302351 - RNA, 19 nt, Artificial Sequence
  Description of Artificial Sequence: Synthetic oligonucleotide
cuccccaacuccuccaagu

SEQ ID NO: 1302352 - RNA, 19 nt, Artificial Sequence
  Description of Artificial Sequence: Synthetic oligonucleotide
cuguugcaaaccggagcac

SEQ ID NO: 1302353 - RNA, 19 nt, Artificial Sequence
  Description of Artificial Sequence: Synthetic oligonucleotide
cucauccaaaccagacugu

SEQ ID NO: 1302354 - RNA, 19 nt, Artificial Sequence
  Description of Artificial Sequence: Synthetic oligonucleotide
agcccucgucagauggagg

SEQ ID NO: 1302355 - RNA, 19 nt, Artificial Sequence
  Description of Artificial Sequence: Synthetic oligonucleotide
ggccuaugcugaagaaaag

SEQ ID NO: 1302356 - RNA, 19 nt, Artificial Sequence
  Description of Artificial Sequence: Synthetic oligonucleotide
cucccagguuuuaaaggcu

SEQ ID NO: 1302357 - RNA, 19 nt, Artificial Sequence
  Description of Artificial Sequence: Synthetic oligonucleotide
cuggagcccucgucagaug

SEQ ID NO: 1302358 - RNA, 19 nt, Artificial Sequence
  Description of Artificial Sequence: Synthetic oligonucleotide
guuuagguucuggcuaacu

SEQ ID NO: 1302359 - RNA, 19 nt, Artificial Sequence
  Description of Artificial Sequence: Synthetic oligonucleotide
gauggaggcgggugcuggu

SEQ ID NO: 1302360 - RNA, 19 nt, Artificial Sequence
  Description of Artificial Sequence: Synthetic oligonucleotide
aguuggcaagucaguugga

SEQ ID NO: 1302361 - RNA, 19 nt, Artificial Sequence
  Description of Artificial Sequence: Synthetic oligonucleotide
guaaaggagcucccagguu

SEQ ID NO: 1302362 - RNA, 19 nt, Artificial Sequence
  Description of Artificial Sequence: Synthetic oligonucleotide
cugcaucaugacagaugca

SEQ ID NO: 1302363 - RNA, 19 nt, Artificial Sequence
  Description of Artificial Sequence: Synthetic oligonucleotide
gcaccaagagagagacucc

SEQ ID NO: 1302364 - RNA, 19 nt, Artificial Sequence
  Description of Artificial Sequence: Synthetic oligonucleotide
auauuccgaccagcaggga

SEQ ID NO: 1302365 - RNA, 19 nt, Artificial Sequence
  Description of Artificial Sequence: Synthetic oligonucleotide
caccaagagagagacuccu

SEQ ID NO: 1302366 - RNA, 19 nt, Artificial Sequence
  Description of Artificial Sequence: Synthetic oligonucleotide
gacuggcgucuuaaaccuc

SEQ ID NO: 1302367 - RNA, 19 nt, Artificial Sequence
  Description of Artificial Sequence: Synthetic oligonucleotide
gccuaagccagaacugcca

SEQ ID NO: 1302368 - RNA, 19 nt, Artificial Sequence
  Description of Artificial Sequence: Synthetic oligonucleotide
agucggcagcacucagcau

SEQ ID NO: 1302369 - RNA, 19 nt, Artificial Sequence
  Description of Artificial Sequence: Synthetic oligonucleotide
ucugaucaccagggccauc

SEQ ID NO: 1302370 - RNA, 19 nt, Artificial Sequence
  Description of Artificial Sequence: Synthetic oligonucleotide
cugggccuaugcugaagaa

SEQ ID NO: 1302371 - RNA, 19 nt, Artificial Sequence
  Description of Artificial Sequence: Synthetic oligonucleotide
cuggguuguggagcacauc

SEQ ID NO: 1302372 - RNA, 19 nt, Artificial Sequence
  Description of Artificial Sequence: Synthetic oligonucleotide
gcaaagcguagaagcauaa

SEQ ID NO: 1302373 - RNA, 19 nt, Artificial Sequence
  Description of Artificial Sequence: Synthetic oligonucleotide
caugacagaugcagccuuu

SEQ ID NO: 1302374 - RNA, 19 nt, Artificial Sequence
  Description of Artificial Sequence: Synthetic oligonucleotide
gcgggugcugguucguguc

SEQ ID NO: 1302375 - RNA, 19 nt, Artificial Sequence
  Description of Artificial Sequence: Synthetic oligonucleotide
gcccaugguucugcaaagc

SEQ ID NO: 1302376 - RNA, 19 nt, Artificial Sequence
  Description of Artificial Sequence: Synthetic oligonucleotide
ccuaacagcugugcuacaa

SEQ ID NO: 1302377 - RNA, 19 nt, Artificial Sequence
  Description of Artificial Sequence: Synthetic oligonucleotide
caaguggucuaggcaggaa

SEQ ID NO: 1302378 - RNA, 19 nt, Artificial Sequence
  Description of Artificial Sequence: Synthetic oligonucleotide
ccagacugugcugccuaag

SEQ ID NO: 1302379 - RNA, 19 nt, Artificial Sequence
  Description of Artificial Sequence: Synthetic oligonucleotide
cccuucccaaaguaacgga

SEQ ID NO: 1302380 - RNA, 19 nt, Artificial Sequence
  Description of Artificial Sequence: Synthetic oligonucleotide
aggcgggugcugguucgug

SEQ ID NO: 1302381 - RNA, 19 nt, Artificial Sequence
  Description of Artificial Sequence: Synthetic oligonucleotide
ccagacuaucuccacuaua

SEQ ID NO: 1302382 - RNA, 19 nt, Artificial Sequence
  Description of Artificial Sequence: Synthetic oligonucleotide
cuucccacgugcucuuguu

SEQ ID NO: 1302383 - RNA, 19 nt, Artificial Sequence
  Description of Artificial Sequence: Synthetic oligonucleotide
gccccugauacaauagccu

SEQ ID NO: 1302384 - RNA, 19 nt, Artificial Sequence
  Description of Artificial Sequence: Synthetic oligonucleotide
gucggcccaugacugcacu

SEQ ID NO: 1302385 - RNA, 19 nt, Artificial Sequence
  Description of Artificial Sequence: Synthetic oligonucleotide
ucgcugcuuugugaccguu

SEQ ID NO: 1302386 - RNA, 19 nt, Artificial Sequence
  Description of Artificial Sequence: Synthetic oligonucleotide
gaccguucugaggggcucu

SEQ ID NO: 1302387 - RNA, 19 nt, Artificial Sequence
  Description of Artificial Sequence: Synthetic oligonucleotide
gugaccguucugaggggcu

SEQ ID NO: 1302388 - RNA, 19 nt, Artificial Sequence
  Description of Artificial Sequence: Synthetic oligonucleotide
ccggagcaccacaguguag

SEQ ID NO: 1302389 - RNA, 19 nt, Artificial Sequence
  Description of Artificial Sequence: Synthetic oligonucleotide
cugguucgugucuccacuu

SEQ ID NO: 1302390 - RNA, 19 nt, Artificial Sequence
  Description of Artificial Sequence: Synthetic oligonucleotide
gccuucagggaagccccug

SEQ ID NO: 1302391 - RNA, 19 nt, Artificial Sequence
  Description of Artificial Sequence: Synthetic oligonucleotide
gucgcugcuuugugaccgu

SEQ ID NO: 1302392 - RNA, 19 nt, Artificial Sequence
  Description of Artificial Sequence: Synthetic oligonucleotide
cuacacugucagcucugau

SEQ ID NO: 1302393 - RNA, 19 nt, Artificial Sequence
  Description of Artificial Sequence: Synthetic oligonucleotide
ggcgggugcugguucgugu

SEQ ID NO: 1302394 - RNA, 19 nt, Artificial Sequence
  Description of Artificial Sequence: Synthetic oligonucleotide
caucggcuucacugucgcu

SEQ ID NO: 1302395 - RNA, 19 nt, Artificial Sequence
  Description of Artificial Sequence: Synthetic oligonucleotide
uccgaccagcagggaccaa

SEQ ID NO: 1302396 - RNA, 19 nt, Artificial Sequence
  Description of Artificial Sequence: Synthetic oligonucleotide
ggaugccuggagcccucgu

SEQ ID NO: 1302397 - RNA, 19 nt, Artificial Sequence
  Description of Artificial Sequence: Synthetic oligonucleotide
ccaggccaguggauaauau

SEQ ID NO: 1302398 - RNA, 19 nt, Artificial Sequence
  Description of Artificial Sequence: Synthetic oligonucleotide
caucacugcgucggcccau

SEQ ID NO: 1302399 - RNA, 19 nt, Artificial Sequence
  Description of Artificial Sequence: Synthetic oligonucleotide
cccagacuaucuccacuau

SEQ ID NO: 1302400 - RNA, 19 nt, Artificial Sequence
  Description of Artificial Sequence: Synthetic oligonucleotide
cagggccaucggcuucacu

SEQ ID NO: 1302401 - RNA, 19 nt, Artificial Sequence
  Description of Artificial Sequence: Synthetic oligonucleotide
uauuccaucaucuagagaa

SEQ ID NO: 1302402 - RNA, 19 nt, Artificial Sequence
  Description of Artificial Sequence: Synthetic oligonucleotide
uugaauaagagcauuccgg

SEQ ID NO: 1302403 - RNA, 19 nt, Artificial Sequence
  Description of Artificial Sequence: Synthetic oligonucleotide
ugagauacauuucagagac

SEQ ID NO: 1302404 - RNA, 19 nt, Artificial Sequence
  Description of Artificial Sequence: Synthetic oligonucleotide
aaagcuuuaccacagguca

SEQ ID NO: 1302405 - RNA, 19 nt, Artificial Sequence
  Description of Artificial Sequence: Synthetic oligonucleotide
ugagauaucacauuuggcu

SEQ ID NO: 1302406 - RNA, 19 nt, Artificial Sequence
  Description of Artificial Sequence: Synthetic oligonucleotide
aaaggcagugguuugaaag

SEQ ID NO: 1302407 - RNA, 19 nt, Artificial Sequence
  Description of Artificial Sequence: Synthetic oligonucleotide
aaaaguaauguucuacuga

SEQ ID NO: 1302408 - RNA, 19 nt, Artificial Sequence
  Description of Artificial Sequence: Synthetic oligonucleotide
aauaagagcauuccgggga

SEQ ID NO: 1302409 - RNA, 19 nt, Artificial Sequence
  Description of Artificial Sequence: Synthetic oligonucleotide
uuuuauuccaucaucuaga

SEQ ID NO: 1302410 - RNA, 19 nt, Artificial Sequence
  Description of Artificial Sequence: Synthetic oligonucleotide
ugaauaagagcauuccggg

SEQ ID NO: 1302411 - RNA, 19 nt, Artificial Sequence
  Description of Artificial Sequence: Synthetic oligonucleotide
agagggauugaauaagagc

SEQ ID NO: 1302412 - RNA, 19 nt, Artificial Sequence
  Description of Artificial Sequence: Synthetic oligonucleotide
ugugacucuacccacaccc

SEQ ID NO: 1302413 - RNA, 19 nt, Artificial Sequence
  Description of Artificial Sequence: Synthetic oligonucleotide
accucaacaaccuugaucu

SEQ ID NO: 1302414 - RNA, 19 nt, Artificial Sequence
  Description of Artificial Sequence: Synthetic oligonucleotide
ucuauuucuucuaacugag

SEQ ID NO: 1302415 - RNA, 19 nt, Artificial Sequence
  Description of Artificial Sequence: Synthetic oligonucleotide
uguaaggaccucaacaacc

SEQ ID NO: 1302416 - RNA, 19 nt, Artificial Sequence
  Description of Artificial Sequence: Synthetic oligonucleotide
auuuuauuccaucaucuag

SEQ ID NO: 1302417 - RNA, 19 nt, Artificial Sequence
  Description of Artificial Sequence: Synthetic oligonucleotide
aaaguaauguucuacugaa

SEQ ID NO: 1302418 - RNA, 19 nt, Artificial Sequence
  Description of Artificial Sequence: Synthetic oligonucleotide
uaauguucuacugaaauca

SEQ ID NO: 1302419 - RNA, 19 nt, Artificial Sequence
  Description of Artificial Sequence: Synthetic oligonucleotide
ugaaaucacguuauuguag

SEQ ID NO: 1302420 - RNA, 19 nt, Artificial Sequence
  Description of Artificial Sequence: Synthetic oligonucleotide
auugaauaagagcauuccg

SEQ ID NO: 1302421 - RNA, 19 nt, Artificial Sequence
  Description of Artificial Sequence: Synthetic oligonucleotide
uugaucuucaucaagggau

SEQ ID NO: 1302422 - RNA, 19 nt, Artificial Sequence
  Description of Artificial Sequence: Synthetic oligonucleotide
aaggcagugguuugaaagg

SEQ ID NO: 1302423 - RNA, 19 nt, Artificial Sequence
  Description of Artificial Sequence: Synthetic oligonucleotide
acaguaauugguaaggugg

SEQ ID NO: 1302424 - RNA, 19 nt, Artificial Sequence
  Description of Artificial Sequence: Synthetic oligonucleotide
uguucuacugaaaucacgu

SEQ ID NO: 1302425 - RNA, 19 nt, Artificial Sequence
  Description of Artificial Sequence: Synthetic oligonucleotide
uaguuugucagcaugauuu

SEQ ID NO: 1302426 - RNA, 19 nt, Artificial Sequence
  Description of Artificial Sequence: Synthetic oligonucleotide
uguugaacuggcuugaggu

SEQ ID NO: 1302427 - RNA, 19 nt, Artificial Sequence
  Description of Artificial Sequence: Synthetic oligonucleotide
uauuucuucuaacugagau

SEQ ID NO: 1302428 - RNA, 19 nt, Artificial Sequence
  Description of Artificial Sequence: Synthetic oligonucleotide
uucuauuucuucuaacuga

SEQ ID NO: 1302429 - RNA, 19 nt, Artificial Sequence
  Description of Artificial Sequence: Synthetic oligonucleotide
auacauuucagagacagug

SEQ ID NO: 1302430 - RNA, 19 nt, Artificial Sequence
  Description of Artificial Sequence: Synthetic oligonucleotide
ucuucuaacugagauauca

SEQ ID NO: 1302431 - RNA, 19 nt, Artificial Sequence
  Description of Artificial Sequence: Synthetic oligonucleotide
agauacauuucagagacag

SEQ ID NO: 1302432 - RNA, 19 nt, Artificial Sequence
  Description of Artificial Sequence: Synthetic oligonucleotide
aucaguggauuccuuaugg

SEQ ID NO: 1302433 - RNA, 19 nt, Artificial Sequence
  Description of Artificial Sequence: Synthetic oligonucleotide
uacauuucagagacagugg

SEQ ID NO: 1302434 - RNA, 19 nt, Artificial Sequence
  Description of Artificial Sequence: Synthetic oligonucleotide
aguaauguucuacugaaau

SEQ ID NO: 1302435 - RNA, 19 nt, Artificial Sequence
  Description of Artificial Sequence: Synthetic oligonucleotide
gaaaaguaauguucuacug

SEQ ID NO: 1302436 - RNA, 19 nt, Artificial Sequence
  Description of Artificial Sequence: Synthetic oligonucleotide
uuuauuccaucaucuagag

SEQ ID NO: 1302437 - RNA, 19 nt, Artificial Sequence
  Description of Artificial Sequence: Synthetic oligonucleotide
uuucuucuaacugagauau

SEQ ID NO: 1302438 - RNA, 19 nt, Artificial Sequence
  Description of Artificial Sequence: Synthetic oligonucleotide
ucuacugaaaucacguuau

SEQ ID NO: 1302439 - RNA, 19 nt, Artificial Sequence
  Description of Artificial Sequence: Synthetic oligonucleotide
ucuuccuuagacaccgagg

SEQ ID NO: 1302440 - RNA, 19 nt, Artificial Sequence
  Description of Artificial Sequence: Synthetic oligonucleotide
uauagagggauugaauaag

SEQ ID NO: 1302441 - RNA, 19 nt, Artificial Sequence
  Description of Artificial Sequence: Synthetic oligonucleotide
cuagagaaggcucagaaga

SEQ ID NO: 1302442 - RNA, 19 nt, Artificial Sequence
  Description of Artificial Sequence: Synthetic oligonucleotide
uuccuuauggcaagcaggc

SEQ ID NO: 1302443 - RNA, 19 nt, Artificial Sequence
  Description of Artificial Sequence: Synthetic oligonucleotide
aaagcugaaaaggcagugg

SEQ ID NO: 1302444 - RNA, 19 nt, Artificial Sequence
  Description of Artificial Sequence: Synthetic oligonucleotide
ucaacaaccuugaucuuca

SEQ ID NO: 1302445 - RNA, 19 nt, Artificial Sequence
  Description of Artificial Sequence: Synthetic oligonucleotide
ucaggagaggauuuuauuc

SEQ ID NO: 1302446 - RNA, 19 nt, Artificial Sequence
  Description of Artificial Sequence: Synthetic oligonucleotide
gaauaagagcauuccgggg

SEQ ID NO: 1302447 - RNA, 19 nt, Artificial Sequence
  Description of Artificial Sequence: Synthetic oligonucleotide
ucaagggauucucaucagg

SEQ ID NO: 1302448 - RNA, 19 nt, Artificial Sequence
  Description of Artificial Sequence: Synthetic oligonucleotide
accaaguuugcccaagguc

SEQ ID NO: 1302449 - RNA, 19 nt, Artificial Sequence
  Description of Artificial Sequence: Synthetic oligonucleotide
acuauagagggauugaaua

SEQ ID NO: 1302450 - RNA, 19 nt, Artificial Sequence
  Description of Artificial Sequence: Synthetic oligonucleotide
uucucuuucagucgaucag

SEQ ID NO: 1302451 - RNA, 19 nt, Artificial Sequence
  Description of Artificial Sequence: Synthetic oligonucleotide
aggucagacacauguaagg

SEQ ID NO: 1302452 - RNA, 19 nt, Artificial Sequence
  Description of Artificial Sequence: Synthetic oligonucleotide
uuugucagcaugauuuccu

SEQ ID NO: 1302453 - RNA, 19 nt, Artificial Sequence
  Description of Artificial Sequence: Synthetic oligonucleotide
gauugaauaagagcauucc

SEQ ID NO: 1302454 - RNA, 19 nt, Artificial Sequence
  Description of Artificial Sequence: Synthetic oligonucleotide
aucacguuauuguaguuug

SEQ ID NO: 1302455 - RNA, 19 nt, Artificial Sequence
  Description of Artificial Sequence: Synthetic oligonucleotide
caggagaggauuuuauucc

SEQ ID NO: 1302456 - RNA, 19 nt, Artificial Sequence
  Description of Artificial Sequence: Synthetic oligonucleotide
guuauuguaguuugucagc

SEQ ID NO: 1302457 - RNA, 19 nt, Artificial Sequence
  Description of Artificial Sequence: Synthetic oligonucleotide
aguguaaggaccucaacaa

SEQ ID NO: 1302458 - RNA, 19 nt, Artificial Sequence
  Description of Artificial Sequence: Synthetic oligonucleotide
uacaguaauugguaaggug

SEQ ID NO: 1302459 - RNA, 19 nt, Artificial Sequence
  Description of Artificial Sequence: Synthetic oligonucleotide
aauguucuacugaaaucac

SEQ ID NO: 1302460 - RNA, 19 nt, Artificial Sequence
  Description of Artificial Sequence: Synthetic oligonucleotide
uucuacugaaaucacguua

SEQ ID NO: 1302461 - RNA, 19 nt, Artificial Sequence
  Description of Artificial Sequence: Synthetic oligonucleotide
caugauuuccuuguagagg

SEQ ID NO: 1302462 - RNA, 19 nt, Artificial Sequence
  Description of Artificial Sequence: Synthetic oligonucleotide
uucuccacuuucacuauag

SEQ ID NO: 1302463 - RNA, 19 nt, Artificial Sequence
  Description of Artificial Sequence: Synthetic oligonucleotide
auaagagcauuccggggac

SEQ ID NO: 1302464 - RNA, 19 nt, Artificial Sequence
  Description of Artificial Sequence: Synthetic oligonucleotide
agauaucacauuuggcuug

SEQ ID NO: 1302465 - RNA, 19 nt, Artificial Sequence
  Description of Artificial Sequence: Synthetic oligonucleotide
accggugaagcugagacac

SEQ ID NO: 1302466 - RNA, 19 nt, Artificial Sequence
  Description of Artificial Sequence: Synthetic oligonucleotide
cucagaagauccuggaaag

SEQ ID NO: 1302467 - RNA, 19 nt, Artificial Sequence
  Description of Artificial Sequence: Synthetic oligonucleotide
uuguugaacuggcuugagg

SEQ ID NO: 1302468 - RNA, 19 nt, Artificial Sequence
  Description of Artificial Sequence: Synthetic oligonucleotide
aucacauuuggcuuggaaa

SEQ ID NO: 1302469 - RNA, 19 nt, Artificial Sequence
  Description of Artificial Sequence: Synthetic oligonucleotide
uuauuguaguuugucagca

SEQ ID NO: 1302470 - RNA, 19 nt, Artificial Sequence
  Description of Artificial Sequence: Synthetic oligonucleotide
ucaggugguacaguaauug

SEQ ID NO: 1302471 - RNA, 19 nt, Artificial Sequence
  Description of Artificial Sequence: Synthetic oligonucleotide
uauccuguguguuuucuga

SEQ ID NO: 1302472 - RNA, 19 nt, Artificial Sequence
  Description of Artificial Sequence: Synthetic oligonucleotide
auuccuuauggcaagcagg

SEQ ID NO: 1302473 - RNA, 19 nt, Artificial Sequence
  Description of Artificial Sequence: Synthetic oligonucleotide
uaacugagauaucacauuu

SEQ ID NO: 1302474 - RNA, 19 nt, Artificial Sequence
  Description of Artificial Sequence: Synthetic oligonucleotide
agcaugauuuccuuguaga

SEQ ID NO: 1302475 - RNA, 19 nt, Artificial Sequence
  Description of Artificial Sequence: Synthetic oligonucleotide
uccaucaucuagagaaggc

SEQ ID NO: 1302476 - RNA, 19 nt, Artificial Sequence
  Description of Artificial Sequence: Synthetic oligonucleotide
ucagacacauguaaggcuu

SEQ ID NO: 1302477 - RNA, 19 nt, Artificial Sequence
  Description of Artificial Sequence: Synthetic oligonucleotide
agacaccgagguuacauuc

SEQ ID NO: 1302478 - RNA, 19 nt, Artificial Sequence
  Description of Artificial Sequence: Synthetic oligonucleotide
acauuucagagacagugga

SEQ ID NO: 1302479 - RNA, 19 nt, Artificial Sequence
  Description of Artificial Sequence: Synthetic oligonucleotide
gguacaguaauugguaagg

SEQ ID NO: 1302480 - RNA, 19 nt, Artificial Sequence
  Description of Artificial Sequence: Synthetic oligonucleotide
uuucacuauagagggauug

SEQ ID NO: 1302481 - RNA, 19 nt, Artificial Sequence
  Description of Artificial Sequence: Synthetic oligonucleotide
ucucuugaggacuuucucu

SEQ ID NO: 1302482 - RNA, 19 nt, Artificial Sequence
  Description of Artificial Sequence: Synthetic oligonucleotide
uggaaaaguaauguucuac

SEQ ID NO: 1302483 - RNA, 19 nt, Artificial Sequence
  Description of Artificial Sequence: Synthetic oligonucleotide
gauaucacauuuggcuugg

SEQ ID NO: 1302484 - RNA, 19 nt, Artificial Sequence
  Description of Artificial Sequence: Synthetic oligonucleotide
aguaauugguaagguggcc

SEQ ID NO: 1302485 - RNA, 19 nt, Artificial Sequence
  Description of Artificial Sequence: Synthetic oligonucleotide
cuggaaaggucucuugagg

SEQ ID NO: 1302486 - RNA, 19 nt, Artificial Sequence
  Description of Artificial Sequence: Synthetic oligonucleotide
ugguaagguggccaugucc

SEQ ID NO: 1302487 - RNA, 19 nt, Artificial Sequence
  Description of Artificial Sequence: Synthetic oligonucleotide
uacugaaaucacguuauug

SEQ ID NO: 1302488 - RNA, 19 nt, Artificial Sequence
  Description of Artificial Sequence: Synthetic oligonucleotide
ccacuuucacuauagaggg

SEQ ID NO: 1302489 - RNA, 19 nt, Artificial Sequence
  Description of Artificial Sequence: Synthetic oligonucleotide
guaauguucuacugaaauc

SEQ ID NO: 1302490 - RNA, 19 nt, Artificial Sequence
  Description of Artificial Sequence: Synthetic oligonucleotide
gguuacauucuccaccagg

SEQ ID NO: 1302491 - RNA, 19 nt, Artificial Sequence
  Description of Artificial Sequence: Synthetic oligonucleotide
uccuuguagaggcauuucu

SEQ ID NO: 1302492 - RNA, 19 nt, Artificial Sequence
  Description of Artificial Sequence: Synthetic oligonucleotide
uacaccccaaagcugaaaa

SEQ ID NO: 1302493 - RNA, 19 nt, Artificial Sequence
  Description of Artificial Sequence: Synthetic oligonucleotide
caguaauugguaagguggc

SEQ ID NO: 1302494 - RNA, 19 nt, Artificial Sequence
  Description of Artificial Sequence: Synthetic oligonucleotide
uuguucaguguaaggaccu

SEQ ID NO: 1302495 - RNA, 19 nt, Artificial Sequence
  Description of Artificial Sequence: Synthetic oligonucleotide
caucaagggauucucauca

SEQ ID NO: 1302496 - RNA, 19 nt, Artificial Sequence
  Description of Artificial Sequence: Synthetic oligonucleotide
uuucucucuccacuggcca

SEQ ID NO: 1302497 - RNA, 19 nt, Artificial Sequence
  Description of Artificial Sequence: Synthetic oligonucleotide
gaaaucacguuauuguagu

SEQ ID NO: 1302498 - RNA, 19 nt, Artificial Sequence
  Description of Artificial Sequence: Synthetic oligonucleotide
gagguuacauucuccacca

SEQ ID NO: 1302499 - RNA, 19 nt, Artificial Sequence
  Description of Artificial Sequence: Synthetic oligonucleotide
ucuacccacacccgcaacu

SEQ ID NO: 1302500 - RNA, 19 nt, Artificial Sequence
  Description of Artificial Sequence: Synthetic oligonucleotide
aucuagagaaggcucagaa

SEQ ID NO: 1302501 - RNA, 19 nt, Artificial Sequence
  Description of Artificial Sequence: Synthetic oligonucleotide
uucaucaagggauucucau

SEQ ID NO: 1302502 - RNA, 19 nt, Artificial Sequence
  Description of Artificial Sequence: Synthetic oligonucleotide
caccccaaagcugaaaagg

SEQ ID NO: 1302503 - RNA, 19 nt, Artificial Sequence
  Description of Artificial Sequence: Synthetic oligonucleotide
aaucacguuauuguaguuu

SEQ ID NO: 1302504 - RNA, 19 nt, Artificial Sequence
  Description of Artificial Sequence: Synthetic oligonucleotide
aaggcucagaagauccugg

SEQ ID NO: 1302505 - RNA, 19 nt, Artificial Sequence
  Description of Artificial Sequence: Synthetic oligonucleotide
accccaaagcugaaaaggc

SEQ ID NO: 1302506 - RNA, 19 nt, Artificial Sequence
  Description of Artificial Sequence: Synthetic oligonucleotide
ugcaggguacaccccaaag

SEQ ID NO: 1302507 - RNA, 19 nt, Artificial Sequence
  Description of Artificial Sequence: Synthetic oligonucleotide
acuuucacuauagagggau

SEQ ID NO: 1302508 - RNA, 19 nt, Artificial Sequence
  Description of Artificial Sequence: Synthetic oligonucleotide
gaccucaacaaccuugauc

SEQ ID NO: 1302509 - RNA, 19 nt, Artificial Sequence
  Description of Artificial Sequence: Synthetic oligonucleotide
uccuuagacaccgagguua

SEQ ID NO: 1302510 - RNA, 19 nt, Artificial Sequence
  Description of Artificial Sequence: Synthetic oligonucleotide
aaguuugcccaaggucucc

SEQ ID NO: 1302511 - RNA, 19 nt, Artificial Sequence
  Description of Artificial Sequence: Synthetic oligonucleotide
ucaguggauuccuuauggc

SEQ ID NO: 1302512 - RNA, 19 nt, Artificial Sequence
  Description of Artificial Sequence: Synthetic oligonucleotide
acguuauuguaguuuguca

SEQ ID NO: 1302513 - RNA, 19 nt, Artificial Sequence
  Description of Artificial Sequence: Synthetic oligonucleotide
auuucuucuaacugagaua

SEQ ID NO: 1302514 - RNA, 19 nt, Artificial Sequence
  Description of Artificial Sequence: Synthetic oligonucleotide
cuuggaaaaguaauguucu

SEQ ID NO: 1302515 - RNA, 19 nt, Artificial Sequence
  Description of Artificial Sequence: Synthetic oligonucleotide
aagcaggcacagcaucuuc

SEQ ID NO: 1302516 - RNA, 19 nt, Artificial Sequence
  Description of Artificial Sequence: Synthetic oligonucleotide
cuucuaacugagauaucac

SEQ ID NO: 1302517 - RNA, 19 nt, Artificial Sequence
  Description of Artificial Sequence: Synthetic oligonucleotide
acaggucagacacauguaa

SEQ ID NO: 1302518 - RNA, 19 nt, Artificial Sequence
  Description of Artificial Sequence: Synthetic oligonucleotide
uuagacaccgagguuacau

SEQ ID NO: 1302519 - RNA, 19 nt, Artificial Sequence
  Description of Artificial Sequence: Synthetic oligonucleotide
cuuucucucuccacuggcc

SEQ ID NO: 1302520 - RNA, 19 nt, Artificial Sequence
  Description of Artificial Sequence: Synthetic oligonucleotide
gaucaguggauuccuuaug

SEQ ID NO: 1302521 - RNA, 19 nt, Artificial Sequence
  Description of Artificial Sequence: Synthetic oligonucleotide
ugacucuacccacacccgc

SEQ ID NO: 1302522 - RNA, 19 nt, Artificial Sequence
  Description of Artificial Sequence: Synthetic oligonucleotide
agaagauccuggaaagguc

SEQ ID NO: 1302523 - RNA, 19 nt, Artificial Sequence
  Description of Artificial Sequence: Synthetic oligonucleotide
aucuuccuuagacaccgag

SEQ ID NO: 1302524 - RNA, 19 nt, Artificial Sequence
  Description of Artificial Sequence: Synthetic oligonucleotide
uaucacauuuggcuuggaa

SEQ ID NO: 1302525 - RNA, 19 nt, Artificial Sequence
  Description of Artificial Sequence: Synthetic oligonucleotide
ucaucaagggauucucauc

SEQ ID NO: 1302526 - RNA, 19 nt, Artificial Sequence
  Description of Artificial Sequence: Synthetic oligonucleotide
accgagguuacauucucca

SEQ ID NO: 1302527 - RNA, 19 nt, Artificial Sequence
  Description of Artificial Sequence: Synthetic oligonucleotide
gagaggauuuuauuccauc

SEQ ID NO: 1302528 - RNA, 19 nt, Artificial Sequence
  Description of Artificial Sequence: Synthetic oligonucleotide
uucaguguaaggaccucaa

SEQ ID NO: 1302529 - RNA, 19 nt, Artificial Sequence
  Description of Artificial Sequence: Synthetic oligonucleotide
aggcagugguuugaaaggc

SEQ ID NO: 1302530 - RNA, 19 nt, Artificial Sequence
  Description of Artificial Sequence: Synthetic oligonucleotide
uugaggacuuucucucucc

SEQ ID NO: 1302531 - RNA, 19 nt, Artificial Sequence
  Description of Artificial Sequence: Synthetic oligonucleotide
caguguaaggaccucaaca

SEQ ID NO: 1302532 - RNA, 19 nt, Artificial Sequence
  Description of Artificial Sequence: Synthetic oligonucleotide
caagggauucucaucagga

SEQ ID NO: 1302533 - RNA, 19 nt, Artificial Sequence
  Description of Artificial Sequence: Synthetic oligonucleotide
gauuuuauuccaucaucua

SEQ ID NO: 1302534 - RNA, 19 nt, Artificial Sequence
  Description of Artificial Sequence: Synthetic oligonucleotide
cauuucagagacaguggac

SEQ ID NO: 1302535 - RNA, 19 nt, Artificial Sequence
  Description of Artificial Sequence: Synthetic oligonucleotide
uggcuuggaaaaguaaugu

SEQ ID NO: 1302536 - RNA, 19 nt, Artificial Sequence
  Description of Artificial Sequence: Synthetic oligonucleotide
uucacuauagagggauuga

SEQ ID NO: 1302537 - RNA, 19 nt, Artificial Sequence
  Description of Artificial Sequence: Synthetic oligonucleotide
uuauuccaucaucuagaga

SEQ ID NO: 1302538 - RNA, 19 nt, Artificial Sequence
  Description of Artificial Sequence: Synthetic oligonucleotide
agaccaaguuugcccaagg

SEQ ID NO: 1302539 - RNA, 19 nt, Artificial Sequence
  Description of Artificial Sequence: Synthetic oligonucleotide
caggucagacacauguaag

SEQ ID NO: 1302540 - RNA, 19 nt, Artificial Sequence
  Description of Artificial Sequence: Synthetic oligonucleotide
cuauagagggauugaauaa

SEQ ID NO: 1302541 - RNA, 19 nt, Artificial Sequence
  Description of Artificial Sequence: Synthetic oligonucleotide
cugagauacauuucagaga

SEQ ID NO: 1302542 - RNA, 19 nt, Artificial Sequence
  Description of Artificial Sequence: Synthetic oligonucleotide
ucucuuucagucgaucagu

SEQ ID NO: 1302543 - RNA, 19 nt, Artificial Sequence
  Description of Artificial Sequence: Synthetic oligonucleotide
aggagaggauuuuauucca

SEQ ID NO: 1302544 - RNA, 19 nt, Artificial Sequence
  Description of Artificial Sequence: Synthetic oligonucleotide
uccuguguguuuucugaug

SEQ ID NO: 1302545 - RNA, 19 nt, Artificial Sequence
  Description of Artificial Sequence: Synthetic oligonucleotide
auugguaagguggccaugu

SEQ ID NO: 1302546 - RNA, 19 nt, Artificial Sequence
  Description of Artificial Sequence: Synthetic oligonucleotide
ugaucuucaucaagggauu

SEQ ID NO: 1302547 - RNA, 19 nt, Artificial Sequence
  Description of Artificial Sequence: Synthetic oligonucleotide
auguucuacugaaaucacg

SEQ ID NO: 1302548 - RNA, 19 nt, Artificial Sequence
  Description of Artificial Sequence: Synthetic oligonucleotide
guggauuccuuauggcaag

SEQ ID NO: 1302549 - RNA, 19 nt, Artificial Sequence
  Description of Artificial Sequence: Synthetic oligonucleotide
uuuauccuguguguuuucu

SEQ ID NO: 1302550 - RNA, 19 nt, Artificial Sequence
  Description of Artificial Sequence: Synthetic oligonucleotide
ugaggacuuucucucucca

SEQ ID NO: 1302551 - RNA, 19 nt, Artificial Sequence
  Description of Artificial Sequence: Synthetic oligonucleotide
cguuauuguaguuugucag

SEQ ID NO: 1302552 - RNA, 19 nt, Artificial Sequence
  Description of Artificial Sequence: Synthetic oligonucleotide
ucaucuagagaaggcucag

SEQ ID NO: 1302553 - RNA, 19 nt, Artificial Sequence
  Description of Artificial Sequence: Synthetic oligonucleotide
guaauugguaagguggcca

SEQ ID NO: 1302554 - RNA, 19 nt, Artificial Sequence
  Description of Artificial Sequence: Synthetic oligonucleotide
cucaacaaccuugaucuuc

SEQ ID NO: 1302555 - RNA, 19 nt, Artificial Sequence
  Description of Artificial Sequence: Synthetic oligonucleotide
ucaguguaaggaccucaac

SEQ ID NO: 1302556 - RNA, 19 nt, Artificial Sequence
  Description of Artificial Sequence: Synthetic oligonucleotide
aguggauuccuuauggcaa

SEQ ID NO: 1302557 - RNA, 19 nt, Artificial Sequence
  Description of Artificial Sequence: Synthetic oligonucleotide
acaccccaaagcugaaaag

SEQ ID NO: 1302558 - RNA, 19 nt, Artificial Sequence
  Description of Artificial Sequence: Synthetic oligonucleotide
aagauccuggaaaggucuc

SEQ ID NO: 1302559 - RNA, 19 nt, Artificial Sequence
  Description of Artificial Sequence: Synthetic oligonucleotide
cauuccggggaccagccac

SEQ ID NO: 1302560 - RNA, 19 nt, Artificial Sequence
  Description of Artificial Sequence: Synthetic oligonucleotide
guugguuuuccuuggaccu

SEQ ID NO: 1302561 - RNA, 19 nt, Artificial Sequence
  Description of Artificial Sequence: Synthetic oligonucleotide
gggauucucaucaggagag

SEQ ID NO: 1302562 - RNA, 19 nt, Artificial Sequence
  Description of Artificial Sequence: Synthetic oligonucleotide
aaaucacguuauuguaguu

SEQ ID NO: 1302563 - RNA, 19 nt, Artificial Sequence
  Description of Artificial Sequence: Synthetic oligonucleotide
aagagcauuccggggacca

SEQ ID NO: 1302564 - RNA, 19 nt, Artificial Sequence
  Description of Artificial Sequence: Synthetic oligonucleotide
aucaagggauucucaucag

SEQ ID NO: 1302565 - RNA, 19 nt, Artificial Sequence
  Description of Artificial Sequence: Synthetic oligonucleotide
ucuugaggacuuucucucu

SEQ ID NO: 1302566 - RNA, 19 nt, Artificial Sequence
  Description of Artificial Sequence: Synthetic oligonucleotide
cuugaucuucaucaaggga

SEQ ID NO: 1302567 - RNA, 19 nt, Artificial Sequence
  Description of Artificial Sequence: Synthetic oligonucleotide
ucacuauagagggauugaa

SEQ ID NO: 1302568 - RNA, 19 nt, Artificial Sequence
  Description of Artificial Sequence: Synthetic oligonucleotide
ggaaaaguaauguucuacu

SEQ ID NO: 1302569 - RNA, 19 nt, Artificial Sequence
  Description of Artificial Sequence: Synthetic oligonucleotide
gauucucaucaggagagga

SEQ ID NO: 1302570 - RNA, 19 nt, Artificial Sequence
  Description of Artificial Sequence: Synthetic oligonucleotide
aagcuuuaccacaggucag

SEQ ID NO: 1302571 - RNA, 19 nt, Artificial Sequence
  Description of Artificial Sequence: Synthetic oligonucleotide
auagagggauugaauaaga

SEQ ID NO: 1302572 - RNA, 19 nt, Artificial Sequence
  Description of Artificial Sequence: Synthetic oligonucleotide
caguggauuccuuauggca

SEQ ID NO: 1302573 - RNA, 19 nt, Artificial Sequence
  Description of Artificial Sequence: Synthetic oligonucleotide
cuugaggacuuucucucuc

SEQ ID NO: 1302574 - RNA, 19 nt, Artificial Sequence
  Description of Artificial Sequence: Synthetic oligonucleotide
ccuguguguuuucugaugc

SEQ ID NO: 1302575 - RNA, 19 nt, Artificial Sequence
  Description of Artificial Sequence: Synthetic oligonucleotide
cuuccuuagacaccgaggu

SEQ ID NO: 1302576 - RNA, 19 nt, Artificial Sequence
  Description of Artificial Sequence: Synthetic oligonucleotide
aucaucuagagaaggcuca

SEQ ID NO: 1302577 - RNA, 19 nt, Artificial Sequence
  Description of Artificial Sequence: Synthetic oligonucleotide
ucuccacuuucacuauaga

SEQ ID NO: 1302578 - RNA, 19 nt, Artificial Sequence
  Description of Artificial Sequence: Synthetic oligonucleotide
cagcaugauuuccuuguag

SEQ ID NO: 1302579 - RNA, 19 nt, Artificial Sequence
  Description of Artificial Sequence: Synthetic oligonucleotide
ucagucgaucaguggauuc

SEQ ID NO: 1302580 - RNA, 19 nt, Artificial Sequence
  Description of Artificial Sequence: Synthetic oligonucleotide
ccuuauggcaagcaggcac

SEQ ID NO: 1302581 - RNA, 19 nt, Artificial Sequence
  Description of Artificial Sequence: Synthetic oligonucleotide
ucgaucaguggauuccuua

SEQ ID NO: 1302582 - RNA, 19 nt, Artificial Sequence
  Description of Artificial Sequence: Synthetic oligonucleotide
uauuguaguuugucagcau

SEQ ID NO: 1302583 - RNA, 19 nt, Artificial Sequence
  Description of Artificial Sequence: Synthetic oligonucleotide
cagucgaucaguggauucc

SEQ ID NO: 1302584 - RNA, 19 nt, Artificial Sequence
  Description of Artificial Sequence: Synthetic oligonucleotide
aucaggagaggauuuuauu

SEQ ID NO: 1302585 - RNA, 19 nt, Artificial Sequence
  Description of Artificial Sequence: Synthetic oligonucleotide
gcuugaggucaccagggcg

SEQ ID NO: 1302586 - RNA, 19 nt, Artificial Sequence
  Description of Artificial Sequence: Synthetic oligonucleotide
cacguuauuguaguuuguc

SEQ ID NO: 1302587 - RNA, 19 nt, Artificial Sequence
  Description of Artificial Sequence: Synthetic oligonucleotide
gagauaucacauuuggcuu

SEQ ID NO: 1302588 - RNA, 19 nt, Artificial Sequence
  Description of Artificial Sequence: Synthetic oligonucleotide
auuguugguuuuccuugga

SEQ ID NO: 1302589 - RNA, 19 nt, Artificial Sequence
  Description of Artificial Sequence: Synthetic oligonucleotide
guugaacuggcuugagguc

SEQ ID NO: 1302590 - RNA, 19 nt, Artificial Sequence
  Description of Artificial Sequence: Synthetic oligonucleotide
guguaaggaccucaacaac

SEQ ID NO: 1302591 - RNA, 19 nt, Artificial Sequence
  Description of Artificial Sequence: Synthetic oligonucleotide
cuuccuuguucaguguaag

SEQ ID NO: 1302592 - RNA, 19 nt, Artificial Sequence
  Description of Artificial Sequence: Synthetic oligonucleotide
ccuugaucuucaucaaggg

SEQ ID NO: 1302593 - RNA, 19 nt, Artificial Sequence
  Description of Artificial Sequence: Synthetic oligonucleotide
ucacguuauuguaguuugu

SEQ ID NO: 1302594 - RNA, 19 nt, Artificial Sequence
  Description of Artificial Sequence: Synthetic oligonucleotide
ugauuuccuuguagaggca

SEQ ID NO: 1302595 - RNA, 19 nt, Artificial Sequence
  Description of Artificial Sequence: Synthetic oligonucleotide
cugaaaucacguuauugua

SEQ ID NO: 1302596 - RNA, 19 nt, Artificial Sequence
  Description of Artificial Sequence: Synthetic oligonucleotide
gcaggguacaccccaaagc

SEQ ID NO: 1302597 - RNA, 19 nt, Artificial Sequence
  Description of Artificial Sequence: Synthetic oligonucleotide
cagagaccaaguuugccca

SEQ ID NO: 1302598 - RNA, 19 nt, Artificial Sequence
  Description of Artificial Sequence: Synthetic oligonucleotide
cuuguagaggcauuucugu

SEQ ID NO: 1302599 - RNA, 19 nt, Artificial Sequence
  Description of Artificial Sequence: Synthetic oligonucleotide
caaguuugcccaaggucuc

SEQ ID NO: 1302600 - RNA, 19 nt, Artificial Sequence
  Description of Artificial Sequence: Synthetic oligonucleotide
caacuucucaggcagcgca

SEQ ID NO: 1302601 - RNA, 19 nt, Artificial Sequence
  Description of Artificial Sequence: Synthetic oligonucleotide
uuauggcaagcaggcacag

SEQ ID NO: 1302602 - RNA, 19 nt, Artificial Sequence
  Description of Artificial Sequence: Synthetic oligonucleotide
gagaccaaguuugcccaag

SEQ ID NO: 1302603 - RNA, 19 nt, Artificial Sequence
  Description of Artificial Sequence: Synthetic oligonucleotide
ucagcaugauuuccuugua

SEQ ID NO: 1302604 - RNA, 19 nt, Artificial Sequence
  Description of Artificial Sequence: Synthetic oligonucleotide
gaggacuuucucucuccac

SEQ ID NO: 1302605 - RNA, 19 nt, Artificial Sequence
  Description of Artificial Sequence: Synthetic oligonucleotide
uuaccacaggucagacaca

SEQ ID NO: 1302606 - RNA, 19 nt, Artificial Sequence
  Description of Artificial Sequence: Synthetic oligonucleotide
gcucagaagauccuggaaa

SEQ ID NO: 1302607 - RNA, 19 nt, Artificial Sequence
  Description of Artificial Sequence: Synthetic oligonucleotide
cgagguuacauucuccacc

SEQ ID NO: 1302608 - RNA, 19 nt, Artificial Sequence
  Description of Artificial Sequence: Synthetic oligonucleotide
uaccacaggucagacacau

SEQ ID NO: 1302609 - RNA, 19 nt, Artificial Sequence
  Description of Artificial Sequence: Synthetic oligonucleotide
cacagagaccaaguuugcc

SEQ ID NO: 1302610 - RNA, 19 nt, Artificial Sequence
  Description of Artificial Sequence: Synthetic oligonucleotide
gucucuugaggacuuucuc

SEQ ID NO: 1302611 - RNA, 19 nt, Artificial Sequence
  Description of Artificial Sequence: Synthetic oligonucleotide
auccuggaaaggucucuug

SEQ ID NO: 1302612 - RNA, 19 nt, Artificial Sequence
  Description of Artificial Sequence: Synthetic oligonucleotide
gaaaggucucuugaggacu

SEQ ID NO: 1302613 - RNA, 19 nt, Artificial Sequence
  Description of Artificial Sequence: Synthetic oligonucleotide
ccuuguagaggcauuucug

SEQ ID NO: 1302614 - RNA, 19 nt, Artificial Sequence
  Description of Artificial Sequence: Synthetic oligonucleotide
uucucaggcagcgcacuca

SEQ ID NO: 1302615 - RNA, 19 nt, Artificial Sequence
  Description of Artificial Sequence: Synthetic oligonucleotide
aaguaauguucuacugaaa

SEQ ID NO: 1302616 - RNA, 19 nt, Artificial Sequence
  Description of Artificial Sequence: Synthetic oligonucleotide
cagggcgcaggucuucucc

SEQ ID NO: 1302617 - RNA, 19 nt, Artificial Sequence
  Description of Artificial Sequence: Synthetic oligonucleotide
cuucaucaagggauucuca

SEQ ID NO: 1302618 - RNA, 19 nt, Artificial Sequence
  Description of Artificial Sequence: Synthetic oligonucleotide
ggacuuucucucuccacug

SEQ ID NO: 1302619 - RNA, 19 nt, Artificial Sequence
  Description of Artificial Sequence: Synthetic oligonucleotide
aacuggcuugaggucacca

SEQ ID NO: 1302620 - RNA, 19 nt, Artificial Sequence
  Description of Artificial Sequence: Synthetic oligonucleotide
ccuggaaaggucucuugag

SEQ ID NO: 1302621 - RNA, 19 nt, Artificial Sequence
  Description of Artificial Sequence: Synthetic oligonucleotide
agggccacggcugccuggc

SEQ ID NO: 1302622 - RNA, 19 nt, Artificial Sequence
  Description of Artificial Sequence: Synthetic oligonucleotide
aggucucuugaggacuuuc

SEQ ID NO: 1302623 - RNA, 19 nt, Artificial Sequence
  Description of Artificial Sequence: Synthetic oligonucleotide
uagacaccgagguuacauu

SEQ ID NO: 1302624 - RNA, 19 nt, Artificial Sequence
  Description of Artificial Sequence: Synthetic oligonucleotide
caccgagguuacauucucc

SEQ ID NO: 1302625 - RNA, 19 nt, Artificial Sequence
  Description of Artificial Sequence: Synthetic oligonucleotide
aaaggucucuugaggacuu

SEQ ID NO: 1302626 - RNA, 19 nt, Artificial Sequence
  Description of Artificial Sequence: Synthetic oligonucleotide
ggauugaauaagagcauuc

SEQ ID NO: 1302627 - RNA, 19 nt, Artificial Sequence
  Description of Artificial Sequence: Synthetic oligonucleotide
aggaccucaacaaccuuga

SEQ ID NO: 1302628 - RNA, 19 nt, Artificial Sequence
  Description of Artificial Sequence: Synthetic oligonucleotide
gugacucuacccacacccg

SEQ ID NO: 1302629 - RNA, 19 nt, Artificial Sequence
  Description of Artificial Sequence: Synthetic oligonucleotide
ccaccggugaagcugagac

SEQ ID NO: 1302630 - RNA, 19 nt, Artificial Sequence
  Description of Artificial Sequence: Synthetic oligonucleotide
acggcugccuggcaguccu

SEQ ID NO: 1302631 - RNA, 19 nt, Artificial Sequence
  Description of Artificial Sequence: Synthetic oligonucleotide
ccaaguuugcccaaggucu

SEQ ID NO: 1302632 - RNA, 19 nt, Artificial Sequence
  Description of Artificial Sequence: Synthetic oligonucleotide
cccgcaacuucucaggcag

SEQ ID NO: 1302633 - RNA, 19 nt, Artificial Sequence
  Description of Artificial Sequence: Synthetic oligonucleotide
uggauuccuuauggcaagc

SEQ ID NO: 1302634 - RNA, 19 nt, Artificial Sequence
  Description of Artificial Sequence: Synthetic oligonucleotide
auuuggcuuggaaaaguaa

SEQ ID NO: 1302635 - RNA, 19 nt, Artificial Sequence
  Description of Artificial Sequence: Synthetic oligonucleotide
cuuuaccacaggucagaca

SEQ ID NO: 1302636 - RNA, 19 nt, Artificial Sequence
  Description of Artificial Sequence: Synthetic oligonucleotide
agucgaucaguggauuccu

SEQ ID NO: 1302637 - RNA, 19 nt, Artificial Sequence
  Description of Artificial Sequence: Synthetic oligonucleotide
cuauuucuucuaacugaga

SEQ ID NO: 1302638 - RNA, 19 nt, Artificial Sequence
  Description of Artificial Sequence: Synthetic oligonucleotide
cauuuggcuuggaaaagua

SEQ ID NO: 1302639 - RNA, 19 nt, Artificial Sequence
  Description of Artificial Sequence: Synthetic oligonucleotide
uggccagaagucuucuauu

SEQ ID NO: 1302640 - RNA, 19 nt, Artificial Sequence
  Description of Artificial Sequence: Synthetic oligonucleotide
uucuucuaacugagauauc

SEQ ID NO: 1302641 - RNA, 19 nt, Artificial Sequence
  Description of Artificial Sequence: Synthetic oligonucleotide
guucaguguaaggaccuca

SEQ ID NO: 1302642 - RNA, 19 nt, Artificial Sequence
  Description of Artificial Sequence: Synthetic oligonucleotide
uugguaagguggccauguc

SEQ ID NO: 1302643 - RNA, 19 nt, Artificial Sequence
  Description of Artificial Sequence: Synthetic oligonucleotide
gacucuacccacacccgca

SEQ ID NO: 1302644 - RNA, 19 nt, Artificial Sequence
  Description of Artificial Sequence: Synthetic oligonucleotide
uuccuuagacaccgagguu

SEQ ID NO: 1302645 - RNA, 19 nt, Artificial Sequence
  Description of Artificial Sequence: Synthetic oligonucleotide
cagacacauguaaggcuuc

SEQ ID NO: 1302646 - RNA, 19 nt, Artificial Sequence
  Description of Artificial Sequence: Synthetic oligonucleotide
caggucuucuccacuuuca

SEQ ID NO: 1302647 - RNA, 19 nt, Artificial Sequence
  Description of Artificial Sequence: Synthetic oligonucleotide
ccggggaccagccacuucc

SEQ ID NO: 1302648 - RNA, 19 nt, Artificial Sequence
  Description of Artificial Sequence: Synthetic oligonucleotide
agguuacauucuccaccag

SEQ ID NO: 1302649 - RNA, 19 nt, Artificial Sequence
  Description of Artificial Sequence: Synthetic oligonucleotide
uguucaguguaaggaccuc

SEQ ID NO: 1302650 - RNA, 19 nt, Artificial Sequence
  Description of Artificial Sequence: Synthetic oligonucleotide
agggauugaauaagagcau

SEQ ID NO: 1302651 - RNA, 19 nt, Artificial Sequence
  Description of Artificial Sequence: Synthetic oligonucleotide
guggccauguccuuguuuu

SEQ ID NO: 1302652 - RNA, 19 nt, Artificial Sequence
  Description of Artificial Sequence: Synthetic oligonucleotide
acucuacccacacccgcaa

SEQ ID NO: 1302653 - RNA, 19 nt, Artificial Sequence
  Description of Artificial Sequence: Synthetic oligonucleotide
gguaagguggccauguccu

SEQ ID NO: 1302654 - RNA, 19 nt, Artificial Sequence
  Description of Artificial Sequence: Synthetic oligonucleotide
cagaagauccuggaaaggu

SEQ ID NO: 1302655 - RNA, 19 nt, Artificial Sequence
  Description of Artificial Sequence: Synthetic oligonucleotide
ggguacaccccaaagcuga

SEQ ID NO: 1302656 - RNA, 19 nt, Artificial Sequence
  Description of Artificial Sequence: Synthetic oligonucleotide
acuuccuuguucaguguaa

SEQ ID NO: 1302657 - RNA, 19 nt, Artificial Sequence
  Description of Artificial Sequence: Synthetic oligonucleotide
uccuuauggcaagcaggca

SEQ ID NO: 1302658 - RNA, 19 nt, Artificial Sequence
  Description of Artificial Sequence: Synthetic oligonucleotide
uucagucgaucaguggauu

SEQ ID NO: 1302659 - RNA, 19 nt, Artificial Sequence
  Description of Artificial Sequence: Synthetic oligonucleotide
aguuugcccaaggucucca

SEQ ID NO: 1302660 - RNA, 19 nt, Artificial Sequence
  Description of Artificial Sequence: Synthetic oligonucleotide
uuccuuguagaggcauuuc

SEQ ID NO: 1302661 - RNA, 19 nt, Artificial Sequence
  Description of Artificial Sequence: Synthetic oligonucleotide
agagaccaaguuugcccaa

SEQ ID NO: 1302662 - RNA, 19 nt, Artificial Sequence
  Description of Artificial Sequence: Synthetic oligonucleotide
acuucucaggcagcgcacu

SEQ ID NO: 1302663 - RNA, 19 nt, Artificial Sequence
  Description of Artificial Sequence: Synthetic oligonucleotide
aggguacaccccaaagcug

SEQ ID NO: 1302664 - RNA, 19 nt, Artificial Sequence
  Description of Artificial Sequence: Synthetic oligonucleotide
agggcgcaggucuucucca

SEQ ID NO: 1302665 - RNA, 19 nt, Artificial Sequence
  Description of Artificial Sequence: Synthetic oligonucleotide
agaaggcucagaagauccu

SEQ ID NO: 1302666 - RNA, 19 nt, Artificial Sequence
  Description of Artificial Sequence: Synthetic oligonucleotide
gauuuccuuguagaggcau

SEQ ID NO: 1302667 - RNA, 19 nt, Artificial Sequence
  Description of Artificial Sequence: Synthetic oligonucleotide
gcagccaccggugaagcug

SEQ ID NO: 1302668 - RNA, 19 nt, Artificial Sequence
  Description of Artificial Sequence: Synthetic oligonucleotide
gugugacucuacccacacc

SEQ ID NO: 1302669 - RNA, 19 nt, Artificial Sequence
  Description of Artificial Sequence: Synthetic oligonucleotide
ggauucucaucaggagagg

SEQ ID NO: 1302670 - RNA, 19 nt, Artificial Sequence
  Description of Artificial Sequence: Synthetic oligonucleotide
gaccaaguuugcccaaggu

SEQ ID NO: 1302671 - RNA, 19 nt, Artificial Sequence
  Description of Artificial Sequence: Synthetic oligonucleotide
ccuuagacaccgagguuac

SEQ ID NO: 1302672 - RNA, 19 nt, Artificial Sequence
  Description of Artificial Sequence: Synthetic oligonucleotide
cuucucaggcagcgcacuc

SEQ ID NO: 1302673 - RNA, 19 nt, Artificial Sequence
  Description of Artificial Sequence: Synthetic oligonucleotide
gauacauuucagagacagu

SEQ ID NO: 1302674 - RNA, 19 nt, Artificial Sequence
  Description of Artificial Sequence: Synthetic oligonucleotide
cacuauagagggauugaau

SEQ ID NO: 1302675 - RNA, 19 nt, Artificial Sequence
  Description of Artificial Sequence: Synthetic oligonucleotide
gguuguugaacuggcuuga

SEQ ID NO: 1302676 - RNA, 19 nt, Artificial Sequence
  Description of Artificial Sequence: Synthetic oligonucleotide
ugcagccaccggugaagcu

SEQ ID NO: 1302677 - RNA, 19 nt, Artificial Sequence
  Description of Artificial Sequence: Synthetic oligonucleotide
gagauacauuucagagaca

SEQ ID NO: 1302678 - RNA, 19 nt, Artificial Sequence
  Description of Artificial Sequence: Synthetic oligonucleotide
auuuccuuguagaggcauu

SEQ ID NO: 1302679 - RNA, 19 nt, Artificial Sequence
  Description of Artificial Sequence: Synthetic oligonucleotide
caucaggagaggauuuuau

SEQ ID NO: 1302680 - RNA, 19 nt, Artificial Sequence
  Description of Artificial Sequence: Synthetic oligonucleotide
guacaguaauugguaaggu

SEQ ID NO: 1302681 - RNA, 19 nt, Artificial Sequence
  Description of Artificial Sequence: Synthetic oligonucleotide
guaguuugucagcaugauu

SEQ ID NO: 1302682 - RNA, 19 nt, Artificial Sequence
  Description of Artificial Sequence: Synthetic oligonucleotide
cucuacccacacccgcaac

SEQ ID NO: 1302683 - RNA, 19 nt, Artificial Sequence
  Description of Artificial Sequence: Synthetic oligonucleotide
auuccggggaccagccacu

SEQ ID NO: 1302684 - RNA, 19 nt, Artificial Sequence
  Description of Artificial Sequence: Synthetic oligonucleotide
aggucaccagggcgcaggu

SEQ ID NO: 1302685 - RNA, 19 nt, Artificial Sequence
  Description of Artificial Sequence: Synthetic oligonucleotide
agcugaaaaggcagugguu

SEQ ID NO: 1302686 - RNA, 19 nt, Artificial Sequence
  Description of Artificial Sequence: Synthetic oligonucleotide
gcugaaaaggcagugguuu

SEQ ID NO: 1302687 - RNA, 19 nt, Artificial Sequence
  Description of Artificial Sequence: Synthetic oligonucleotide
cagccaccggugaagcuga

SEQ ID NO: 1302688 - RNA, 19 nt, Artificial Sequence
  Description of Artificial Sequence: Synthetic oligonucleotide
cacaggucagacacaugua

SEQ ID NO: 1302689 - RNA, 19 nt, Artificial Sequence
  Description of Artificial Sequence: Synthetic oligonucleotide
guucuacugaaaucacguu

SEQ ID NO: 1302690 - RNA, 19 nt, Artificial Sequence
  Description of Artificial Sequence: Synthetic oligonucleotide
ggaccagccacuuccuugu

SEQ ID NO: 1302691 - RNA, 19 nt, Artificial Sequence
  Description of Artificial Sequence: Synthetic oligonucleotide
ugaggucaccagggcgcag

SEQ ID NO: 1302692 - RNA, 19 nt, Artificial Sequence
  Description of Artificial Sequence: Synthetic oligonucleotide
caucuagagaaggcucaga

SEQ ID NO: 1302693 - RNA, 19 nt, Artificial Sequence
  Description of Artificial Sequence: Synthetic oligonucleotide
caccggugaagcugagaca

SEQ ID NO: 1302694 - RNA, 19 nt, Artificial Sequence
  Description of Artificial Sequence: Synthetic oligonucleotide
cgcaacuucucaggcagcg

SEQ ID NO: 1302695 - RNA, 19 nt, Artificial Sequence
  Description of Artificial Sequence: Synthetic oligonucleotide
ccgagguuacauucuccac

SEQ ID NO: 1302696 - RNA, 19 nt, Artificial Sequence
  Description of Artificial Sequence: Synthetic oligonucleotide
ggauuccuuauggcaagca

SEQ ID NO: 1302697 - RNA, 19 nt, Artificial Sequence
  Description of Artificial Sequence: Synthetic oligonucleotide
uccggggaccagccacuuc

SEQ ID NO: 1302698 - RNA, 19 nt, Artificial Sequence
  Description of Artificial Sequence: Synthetic oligonucleotide
ggucuucuccacuuucacu

SEQ ID NO: 1302699 - RNA, 19 nt, Artificial Sequence
  Description of Artificial Sequence: Synthetic oligonucleotide
ugcgugccugguuguugaa

SEQ ID NO: 1302700 - RNA, 19 nt, Artificial Sequence
  Description of Artificial Sequence: Synthetic oligonucleotide
gauccuggaaaggucucuu

SEQ ID NO: 1302701 - RNA, 19 nt, Artificial Sequence
  Description of Artificial Sequence: Synthetic oligonucleotide
accagggcgcaggucuucu

SEQ ID NO: 1302702 - RNA, 19 nt, Artificial Sequence
  Description of Artificial Sequence: Synthetic oligonucleotide
gcaacuucucaggcagcgc

SEQ ID NO: 1302703 - RNA, 19 nt, Artificial Sequence
  Description of Artificial Sequence: Synthetic oligonucleotide
caggcagcgcacucaggaa

SEQ ID NO: 1302704 - RNA, 19 nt, Artificial Sequence
  Description of Artificial Sequence: Synthetic oligonucleotide
ggcuuggaaaaguaauguu

SEQ ID NO: 1302705 - RNA, 19 nt, Artificial Sequence
  Description of Artificial Sequence: Synthetic oligonucleotide
guacaccccaaagcugaaa

SEQ ID NO: 1302706 - RNA, 19 nt, Artificial Sequence
  Description of Artificial Sequence: Synthetic oligonucleotide
cuuucacuauagagggauu

SEQ ID NO: 1302707 - RNA, 19 nt, Artificial Sequence
  Description of Artificial Sequence: Synthetic oligonucleotide
cuuagacaccgagguuaca

SEQ ID NO: 1302708 - RNA, 19 nt, Artificial Sequence
  Description of Artificial Sequence: Synthetic oligonucleotide
cacggcugccuggcagucc

SEQ ID NO: 1302709 - RNA, 19 nt, Artificial Sequence
  Description of Artificial Sequence: Synthetic oligonucleotide
caucuuccuuagacaccga

SEQ ID NO: 1302710 - RNA, 19 nt, Artificial Sequence
  Description of Artificial Sequence: Synthetic oligonucleotide
ggucucuugaggacuuucu

SEQ ID NO: 1302711 - RNA, 19 nt, Artificial Sequence
  Description of Artificial Sequence: Synthetic oligonucleotide
gggauugaauaagagcauu

SEQ ID NO: 1302712 - RNA, 19 nt, Artificial Sequence
  Description of Artificial Sequence: Synthetic oligonucleotide
guaagguggccauguccuu

SEQ ID NO: 1302713 - RNA, 19 nt, Artificial Sequence
  Description of Artificial Sequence: Synthetic oligonucleotide
gggcgcaggucuucuccac

SEQ ID NO: 1302714 - RNA, 19 nt, Artificial Sequence
  Description of Artificial Sequence: Synthetic oligonucleotide
cuacugaaaucacguuauu

SEQ ID NO: 1302715 - RNA, 19 nt, Artificial Sequence
  Description of Artificial Sequence: Synthetic oligonucleotide
uuccggggaccagccacuu

SEQ ID NO: 1302716 - RNA, 19 nt, Artificial Sequence
  Description of Artificial Sequence: Synthetic oligonucleotide
cgugccugguuguugaacu

SEQ ID NO: 1302717 - RNA, 19 nt, Artificial Sequence
  Description of Artificial Sequence: Synthetic oligonucleotide
ccgcaacuucucaggcagc

SEQ ID NO: 1302718 - RNA, 19 nt, Artificial Sequence
  Description of Artificial Sequence: Synthetic oligonucleotide
ggagaggauuuuauuccau

SEQ ID NO: 1302719 - RNA, 19 nt, Artificial Sequence
  Description of Artificial Sequence: Synthetic oligonucleotide
gcgugccugguuguugaac

SEQ ID NO: 1302720 - RNA, 19 nt, Artificial Sequence
  Description of Artificial Sequence: Synthetic oligonucleotide
caccagggcgcaggucuuc

SEQ ID NO: 1302721 - RNA, 19 nt, Artificial Sequence
  Description of Artificial Sequence: Synthetic oligonucleotide
cgaucaguggauuccuuau

SEQ ID NO: 1302722 - RNA, 19 nt, Artificial Sequence
  Description of Artificial Sequence: Synthetic oligonucleotide
caacaaccuugaucuucau

SEQ ID NO: 1302723 - RNA, 19 nt, Artificial Sequence
  Description of Artificial Sequence: Synthetic oligonucleotide
agccaccggugaagcugag

SEQ ID NO: 1302724 - RNA, 19 nt, Artificial Sequence
  Description of Artificial Sequence: Synthetic oligonucleotide
gccacggcugccuggcagu

SEQ ID NO: 1302725 - RNA, 19 nt, Artificial Sequence
  Description of Artificial Sequence: Synthetic oligonucleotide
ccagggcgcaggucuucuc

SEQ ID NO: 1302726 - RNA, 19 nt, Artificial Sequence
  Description of Artificial Sequence: Synthetic oligonucleotide
ggucaccagggcgcagguc

SEQ ID NO: 1302727 - RNA, 19 nt, Artificial Sequence
  Description of Artificial Sequence: Synthetic oligonucleotide
gaccagccacuuccuuguu

SEQ ID NO: 1302728 - RNA, 19 nt, Artificial Sequence
  Description of Artificial Sequence: Synthetic oligonucleotide
gccaccggugaagcugaga

SEQ ID NO: 1302729 - RNA, 19 nt, Artificial Sequence
  Description of Artificial Sequence: Synthetic oligonucleotide
ggaccucaacaaccuugau

SEQ ID NO: 1302730 - RNA, 19 nt, Artificial Sequence
  Description of Artificial Sequence: Synthetic oligonucleotide
ccacggcugccuggcaguc

SEQ ID NO: 1302731 - RNA, 19 nt, Artificial Sequence
  Description of Artificial Sequence: Synthetic oligonucleotide
ggggaccagccacuuccuu

SEQ ID NO: 1302732 - RNA, 19 nt, Artificial Sequence
  Description of Artificial Sequence: Synthetic oligonucleotide
ccggugaagcugagacacu

SEQ ID NO: 1302733 - RNA, 19 nt, Artificial Sequence
  Description of Artificial Sequence: Synthetic oligonucleotide
gggccacggcugccuggca

SEQ ID NO: 1302734 - RNA, 19 nt, Artificial Sequence
  Description of Artificial Sequence: Synthetic oligonucleotide
ccucaacaaccuugaucuu

SEQ ID NO: 1302735 - RNA, 19 nt, Artificial Sequence
  Description of Artificial Sequence: Synthetic oligonucleotide
aauauuaauuugcagggcc

SEQ ID NO: 1302736 - RNA, 19 nt, Artificial Sequence
  Description of Artificial Sequence: Synthetic oligonucleotide
ucaaauauuaauuugcagg

SEQ ID NO: 1302737 - RNA, 19 nt, Artificial Sequence
  Description of Artificial Sequence: Synthetic oligonucleotide
auuccuauuauauugacac

SEQ ID NO: 1302738 - RNA, 19 nt, Artificial Sequence
  Description of Artificial Sequence: Synthetic oligonucleotide
acuguaguaacauuuauuc

SEQ ID NO: 1302739 - RNA, 19 nt, Artificial Sequence
  Description of Artificial Sequence: Synthetic oligonucleotide
cuuuaaacaacccauagag

SEQ ID NO: 1302740 - RNA, 19 nt, Artificial Sequence
  Description of Artificial Sequence: Synthetic oligonucleotide
ucaucuacucaucagauug

SEQ ID NO: 1302741 - RNA, 19 nt, Artificial Sequence
  Description of Artificial Sequence: Synthetic oligonucleotide
uauauugacacauaaguuc

SEQ ID NO: 1302742 - RNA, 19 nt, Artificial Sequence
  Description of Artificial Sequence: Synthetic oligonucleotide
ugauauacccaucaggccc

SEQ ID NO: 1302743 - RNA, 19 nt, Artificial Sequence
  Description of Artificial Sequence: Synthetic oligonucleotide
agcauuaagaagaaagucc

SEQ ID NO: 1302744 - RNA, 19 nt, Artificial Sequence
  Description of Artificial Sequence: Synthetic oligonucleotide
aaaugaaccaggcagucca

SEQ ID NO: 1302745 - RNA, 19 nt, Artificial Sequence
  Description of Artificial Sequence: Synthetic oligonucleotide
aauaaacgugcuuuuaacu

SEQ ID NO: 1302746 - RNA, 19 nt, Artificial Sequence
  Description of Artificial Sequence: Synthetic oligonucleotide
uauuauauugacacauaag

SEQ ID NO: 1302747 - RNA, 19 nt, Artificial Sequence
  Description of Artificial Sequence: Synthetic oligonucleotide
ucacaucucguauauaagg

SEQ ID NO: 1302748 - RNA, 19 nt, Artificial Sequence
  Description of Artificial Sequence: Synthetic oligonucleotide
aauaacccuacugggagcc

SEQ ID NO: 1302749 - RNA, 19 nt, Artificial Sequence
  Description of Artificial Sequence: Synthetic oligonucleotide
aaauauuaauuugcagggc

SEQ ID NO: 1302750 - RNA, 19 nt, Artificial Sequence
  Description of Artificial Sequence: Synthetic oligonucleotide
aagacccagggcuauaaac

SEQ ID NO: 1302751 - RNA, 19 nt, Artificial Sequence
  Description of Artificial Sequence: Synthetic oligonucleotide
uggucuaucacacugccca

SEQ ID NO: 1302752 - RNA, 19 nt, Artificial Sequence
  Description of Artificial Sequence: Synthetic oligonucleotide
aauuccuguuacaauaaac

SEQ ID NO: 1302753 - RNA, 19 nt, Artificial Sequence
  Description of Artificial Sequence: Synthetic oligonucleotide
auuccuguuacaauaaacg

SEQ ID NO: 1302754 - RNA, 19 nt, Artificial Sequence
  Description of Artificial Sequence: Synthetic oligonucleotide
ucagucacggccuaucagg

SEQ ID NO: 1302755 - RNA, 19 nt, Artificial Sequence
  Description of Artificial Sequence: Synthetic oligonucleotide
auuuaaucgaacuggcuug

SEQ ID NO: 1302756 - RNA, 19 nt, Artificial Sequence
  Description of Artificial Sequence: Synthetic oligonucleotide
uuaguuggagacuaucgag

SEQ ID NO: 1302757 - RNA, 19 nt, Artificial Sequence
  Description of Artificial Sequence: Synthetic oligonucleotide
cuuuguaagguguaccagg

SEQ ID NO: 1302758 - RNA, 19 nt, Artificial Sequence
  Description of Artificial Sequence: Synthetic oligonucleotide
uccuguuacaauaaacgug

SEQ ID NO: 1302759 - RNA, 19 nt, Artificial Sequence
  Description of Artificial Sequence: Synthetic oligonucleotide
auauaaggacugcaguccc

SEQ ID NO: 1302760 - RNA, 19 nt, Artificial Sequence
  Description of Artificial Sequence: Synthetic oligonucleotide
ugugucgagagcauuaaga

SEQ ID NO: 1302761 - RNA, 19 nt, Artificial Sequence
  Description of Artificial Sequence: Synthetic oligonucleotide
uauauaaggacugcagucc

SEQ ID NO: 1302762 - RNA, 19 nt, Artificial Sequence
  Description of Artificial Sequence: Synthetic oligonucleotide
acauguuaggagaauaggc

SEQ ID NO: 1302763 - RNA, 19 nt, Artificial Sequence
  Description of Artificial Sequence: Synthetic oligonucleotide
agacaaugcugacuuaagc

SEQ ID NO: 1302764 - RNA, 19 nt, Artificial Sequence
  Description of Artificial Sequence: Synthetic oligonucleotide
agacuaucgagcugggacc

SEQ ID NO: 1302765 - RNA, 19 nt, Artificial Sequence
  Description of Artificial Sequence: Synthetic oligonucleotide
acaggauuugcuuuaaaca

SEQ ID NO: 1302766 - RNA, 19 nt, Artificial Sequence
  Description of Artificial Sequence: Synthetic oligonucleotide
auaauacgugccuugcugg

SEQ ID NO: 1302767 - RNA, 19 nt, Artificial Sequence
  Description of Artificial Sequence: Synthetic oligonucleotide
uacauuuaaucgaacuggc

SEQ ID NO: 1302768 - RNA, 19 nt, Artificial Sequence
  Description of Artificial Sequence: Synthetic oligonucleotide
ucguauauaaggacugcag

SEQ ID NO: 1302769 - RNA, 19 nt, Artificial Sequence
  Description of Artificial Sequence: Synthetic oligonucleotide
auaaacaggauucaugauu

SEQ ID NO: 1302770 - RNA, 19 nt, Artificial Sequence
  Description of Artificial Sequence: Synthetic oligonucleotide
gagacuaucgagcugggac

SEQ ID NO: 1302771 - RNA, 19 nt, Artificial Sequence
  Description of Artificial Sequence: Synthetic oligonucleotide
aaucgaacuggcuugggau

SEQ ID NO: 1302772 - RNA, 19 nt, Artificial Sequence
  Description of Artificial Sequence: Synthetic oligonucleotide
auguuaggagaauaggcag

SEQ ID NO: 1302773 - RNA, 19 nt, Artificial Sequence
  Description of Artificial Sequence: Synthetic oligonucleotide
uuagcuaugugucgagagc

SEQ ID NO: 1302774 - RNA, 19 nt, Artificial Sequence
  Description of Artificial Sequence: Synthetic oligonucleotide
ccuguuacaauaaacgugc

SEQ ID NO: 1302775 - RNA, 19 nt, Artificial Sequence
  Description of Artificial Sequence: Synthetic oligonucleotide
uaugugggaacagugacug

SEQ ID NO: 1302776 - RNA, 19 nt, Artificial Sequence
  Description of Artificial Sequence: Synthetic oligonucleotide
acuggucuaucacacugcc

SEQ ID NO: 1302777 - RNA, 19 nt, Artificial Sequence
  Description of Artificial Sequence: Synthetic oligonucleotide
uaguuggagacuaucgagc

SEQ ID NO: 1302778 - RNA, 19 nt, Artificial Sequence
  Description of Artificial Sequence: Synthetic oligonucleotide
auugcaacacaagucaauc

SEQ ID NO: 1302779 - RNA, 19 nt, Artificial Sequence
  Description of Artificial Sequence: Synthetic oligonucleotide
uacauguuaggagaauagg

SEQ ID NO: 1302780 - RNA, 19 nt, Artificial Sequence
  Description of Artificial Sequence: Synthetic oligonucleotide
cucaaauauuaauuugcag

SEQ ID NO: 1302781 - RNA, 19 nt, Artificial Sequence
  Description of Artificial Sequence: Synthetic oligonucleotide
auaaacgugcuuuuaacuu

SEQ ID NO: 1302782 - RNA, 19 nt, Artificial Sequence
  Description of Artificial Sequence: Synthetic oligonucleotide
cauguuuagcuaugugucg

SEQ ID NO: 1302783 - RNA, 19 nt, Artificial Sequence
  Description of Artificial Sequence: Synthetic oligonucleotide
uuuaaucgaacuggcuugg

SEQ ID NO: 1302784 - RNA, 19 nt, Artificial Sequence
  Description of Artificial Sequence: Synthetic oligonucleotide
acauaaguucaaugaagag

SEQ ID NO: 1302785 - RNA, 19 nt, Artificial Sequence
  Description of Artificial Sequence: Synthetic oligonucleotide
acauuuauuccacaggguu

SEQ ID NO: 1302786 - RNA, 19 nt, Artificial Sequence
  Description of Artificial Sequence: Synthetic oligonucleotide
aguuaguuggagacuaucg

SEQ ID NO: 1302787 - RNA, 19 nt, Artificial Sequence
  Description of Artificial Sequence: Synthetic oligonucleotide
caauaaacgugcuuuuaac

SEQ ID NO: 1302788 - RNA, 19 nt, Artificial Sequence
  Description of Artificial Sequence: Synthetic oligonucleotide
ugucgagagcauuaagaag

SEQ ID NO: 1302789 - RNA, 19 nt, Artificial Sequence
  Description of Artificial Sequence: Synthetic oligonucleotide
uaggauuugcuccagggua

SEQ ID NO: 1302790 - RNA, 19 nt, Artificial Sequence
  Description of Artificial Sequence: Synthetic oligonucleotide
cauguuaggagaauaggca

SEQ ID NO: 1302791 - RNA, 19 nt, Artificial Sequence
  Description of Artificial Sequence: Synthetic oligonucleotide
uuccuguuacaauaaacgu

SEQ ID NO: 1302792 - RNA, 19 nt, Artificial Sequence
  Description of Artificial Sequence: Synthetic oligonucleotide
agucaaucuuuauugaaaa

SEQ ID NO: 1302793 - RNA, 19 nt, Artificial Sequence
  Description of Artificial Sequence: Synthetic oligonucleotide
gucgagagcauuaagaaga

SEQ ID NO: 1302794 - RNA, 19 nt, Artificial Sequence
  Description of Artificial Sequence: Synthetic oligonucleotide
aacugcaguauuaauacau

SEQ ID NO: 1302795 - RNA, 19 nt, Artificial Sequence
  Description of Artificial Sequence: Synthetic oligonucleotide
ccagacaacgcucagaagc

SEQ ID NO: 1302796 - RNA, 19 nt, Artificial Sequence
  Description of Artificial Sequence: Synthetic oligonucleotide
cagacaacgcucagaagcg

SEQ ID NO: 1302797 - RNA, 19 nt, Artificial Sequence
  Description of Artificial Sequence: Synthetic oligonucleotide
aguaugaauuuacauuuaa

SEQ ID NO: 1302798 - RNA, 19 nt, Artificial Sequence
  Description of Artificial Sequence: Synthetic oligonucleotide
auauugacacauaaguuca

SEQ ID NO: 1302799 - RNA, 19 nt, Artificial Sequence
  Description of Artificial Sequence: Synthetic oligonucleotide
uguggaacucaaugaagug

SEQ ID NO: 1302800 - RNA, 19 nt, Artificial Sequence
  Description of Artificial Sequence: Synthetic oligonucleotide
ucucacuggguacacggcc

SEQ ID NO: 1302801 - RNA, 19 nt, Artificial Sequence
  Description of Artificial Sequence: Synthetic oligonucleotide
ugccacaauaacccuacug

SEQ ID NO: 1302802 - RNA, 19 nt, Artificial Sequence
  Description of Artificial Sequence: Synthetic oligonucleotide
ugguuggaggcucaaggcc

SEQ ID NO: 1302803 - RNA, 19 nt, Artificial Sequence
  Description of Artificial Sequence: Synthetic oligonucleotide
acacauaaguucaaugaag

SEQ ID NO: 1302804 - RNA, 19 nt, Artificial Sequence
  Description of Artificial Sequence: Synthetic oligonucleotide
aguucaaugaagaggcaag

SEQ ID NO: 1302805 - RNA, 19 nt, Artificial Sequence
  Description of Artificial Sequence: Synthetic oligonucleotide
uacucaucagauugcauaa

SEQ ID NO: 1302806 - RNA, 19 nt, Artificial Sequence
  Description of Artificial Sequence: Synthetic oligonucleotide
uguaccaggaguguagccu

SEQ ID NO: 1302807 - RNA, 19 nt, Artificial Sequence
  Description of Artificial Sequence: Synthetic oligonucleotide
caaugaagugacugcacag

SEQ ID NO: 1302808 - RNA, 19 nt, Artificial Sequence
  Description of Artificial Sequence: Synthetic oligonucleotide
agucucaccuaacuggucu

SEQ ID NO: 1302809 - RNA, 19 nt, Artificial Sequence
  Description of Artificial Sequence: Synthetic oligonucleotide
caacccauagaguuaguug

SEQ ID NO: 1302810 - RNA, 19 nt, Artificial Sequence
  Description of Artificial Sequence: Synthetic oligonucleotide
uaaucgaacuggcuuggga

SEQ ID NO: 1302811 - RNA, 19 nt, Artificial Sequence
  Description of Artificial Sequence: Synthetic oligonucleotide
aguuggagacuaucgagcu

SEQ ID NO: 1302812 - RNA, 19 nt, Artificial Sequence
  Description of Artificial Sequence: Synthetic oligonucleotide
ucgguaugugggaacagug

SEQ ID NO: 1302813 - RNA, 19 nt, Artificial Sequence
  Description of Artificial Sequence: Synthetic oligonucleotide
auacccaucaggcccucac

SEQ ID NO: 1302814 - RNA, 19 nt, Artificial Sequence
  Description of Artificial Sequence: Synthetic oligonucleotide
uaaacgugcuuuuaacuuu

SEQ ID NO: 1302815 - RNA, 19 nt, Artificial Sequence
  Description of Artificial Sequence: Synthetic oligonucleotide
ugcagggccaucaccacug

SEQ ID NO: 1302816 - RNA, 19 nt, Artificial Sequence
  Description of Artificial Sequence: Synthetic oligonucleotide
uguuuagcuaugugucgag

SEQ ID NO: 1302817 - RNA, 19 nt, Artificial Sequence
  Description of Artificial Sequence: Synthetic oligonucleotide
cgugguauggugaauaggg

SEQ ID NO: 1302818 - RNA, 19 nt, Artificial Sequence
  Description of Artificial Sequence: Synthetic oligonucleotide
uauaaggacugcagucccc

SEQ ID NO: 1302819 - RNA, 19 nt, Artificial Sequence
  Description of Artificial Sequence: Synthetic oligonucleotide
uucagucacggccuaucag

SEQ ID NO: 1302820 - RNA, 19 nt, Artificial Sequence
  Description of Artificial Sequence: Synthetic oligonucleotide
uuuggaagguaggauuugc

SEQ ID NO: 1302821 - RNA, 19 nt, Artificial Sequence
  Description of Artificial Sequence: Synthetic oligonucleotide
caggguagacaguugcugg

SEQ ID NO: 1302822 - RNA, 19 nt, Artificial Sequence
  Description of Artificial Sequence: Synthetic oligonucleotide
ugauuucaagaaagcggcc

SEQ ID NO: 1302823 - RNA, 19 nt, Artificial Sequence
  Description of Artificial Sequence: Synthetic oligonucleotide
gacgcagucauguuuagcu

SEQ ID NO: 1302824 - RNA, 19 nt, Artificial Sequence
  Description of Artificial Sequence: Synthetic oligonucleotide
cauagggaaccccagaaga

SEQ ID NO: 1302825 - RNA, 19 nt, Artificial Sequence
  Description of Artificial Sequence: Synthetic oligonucleotide
aacacaagucaaucuuuau

SEQ ID NO: 1302826 - RNA, 19 nt, Artificial Sequence
  Description of Artificial Sequence: Synthetic oligonucleotide
agagcauuaagaagaaagu

SEQ ID NO: 1302827 - RNA, 19 nt, Artificial Sequence
  Description of Artificial Sequence: Synthetic oligonucleotide
uccauccucaaauauuaau

SEQ ID NO: 1302828 - RNA, 19 nt, Artificial Sequence
  Description of Artificial Sequence: Synthetic oligonucleotide
ugccuuuaacacuggaaga

SEQ ID NO: 1302829 - RNA, 19 nt, Artificial Sequence
  Description of Artificial Sequence: Synthetic oligonucleotide
uagcuaugugucgagagca

SEQ ID NO: 1302830 - RNA, 19 nt, Artificial Sequence
  Description of Artificial Sequence: Synthetic oligonucleotide
aagacaaugcugacuuaag

SEQ ID NO: 1302831 - RNA, 19 nt, Artificial Sequence
  Description of Artificial Sequence: Synthetic oligonucleotide
aagaaccucuucuguucag

SEQ ID NO: 1302832 - RNA, 19 nt, Artificial Sequence
  Description of Artificial Sequence: Synthetic oligonucleotide
uucaagaaagcggccugcg

SEQ ID NO: 1302833 - RNA, 19 nt, Artificial Sequence
  Description of Artificial Sequence: Synthetic oligonucleotide
ucgaacuggcuugggaugg

SEQ ID NO: 1302834 - RNA, 19 nt, Artificial Sequence
  Description of Artificial Sequence: Synthetic oligonucleotide
gucauguuuagcuaugugu

SEQ ID NO: 1302835 - RNA, 19 nt, Artificial Sequence
  Description of Artificial Sequence: Synthetic oligonucleotide
uauaaacaggauucaugau

SEQ ID NO: 1302836 - RNA, 19 nt, Artificial Sequence
  Description of Artificial Sequence: Synthetic oligonucleotide
cuggagcucgguauguggg

SEQ ID NO: 1302837 - RNA, 19 nt, Artificial Sequence
  Description of Artificial Sequence: Synthetic oligonucleotide
caucuacucaucagauugc

SEQ ID NO: 1302838 - RNA, 19 nt, Artificial Sequence
  Description of Artificial Sequence: Synthetic oligonucleotide
uguggucccggcaaccaug

SEQ ID NO: 1302839 - RNA, 19 nt, Artificial Sequence
  Description of Artificial Sequence: Synthetic oligonucleotide
ugguuggggaacaggacac

SEQ ID NO: 1302840 - RNA, 19 nt, Artificial Sequence
  Description of Artificial Sequence: Synthetic oligonucleotide
uggacagucugcccauucc

SEQ ID NO: 1302841 - RNA, 19 nt, Artificial Sequence
  Description of Artificial Sequence: Synthetic oligonucleotide
agggaaccccagaagaccc

SEQ ID NO: 1302842 - RNA, 19 nt, Artificial Sequence
  Description of Artificial Sequence: Synthetic oligonucleotide
aucaggcccucacaucucg

SEQ ID NO: 1302843 - RNA, 19 nt, Artificial Sequence
  Description of Artificial Sequence: Synthetic oligonucleotide
accuaacuggucuaucaca

SEQ ID NO: 1302844 - RNA, 19 nt, Artificial Sequence
  Description of Artificial Sequence: Synthetic oligonucleotide
uagaguuaguuggagacua

SEQ ID NO: 1302845 - RNA, 19 nt, Artificial Sequence
  Description of Artificial Sequence: Synthetic oligonucleotide
uggcauuugcauagggaac

SEQ ID NO: 1302846 - RNA, 19 nt, Artificial Sequence
  Description of Artificial Sequence: Synthetic oligonucleotide
ggauuugcuuuaaacaacc

SEQ ID NO: 1302847 - RNA, 19 nt, Artificial Sequence
  Description of Artificial Sequence: Synthetic oligonucleotide
aucgaacuggcuugggaug

SEQ ID NO: 1302848 - RNA, 19 nt, Artificial Sequence
  Description of Artificial Sequence: Synthetic oligonucleotide
aggauuugcuccaggguac

SEQ ID NO: 1302849 - RNA, 19 nt, Artificial Sequence
  Description of Artificial Sequence: Synthetic oligonucleotide
aggaggaguaugguggcac

SEQ ID NO: 1302850 - RNA, 19 nt, Artificial Sequence
  Description of Artificial Sequence: Synthetic oligonucleotide
uuccuauuauauugacaca

SEQ ID NO: 1302851 - RNA, 19 nt, Artificial Sequence
  Description of Artificial Sequence: Synthetic oligonucleotide
ucacuggguacacggccgg

SEQ ID NO: 1302852 - RNA, 19 nt, Artificial Sequence
  Description of Artificial Sequence: Synthetic oligonucleotide
aaugcccagacaacgcuca

SEQ ID NO: 1302853 - RNA, 19 nt, Artificial Sequence
  Description of Artificial Sequence: Synthetic oligonucleotide
auauuaauuugcagggcca

SEQ ID NO: 1302854 - RNA, 19 nt, Artificial Sequence
  Description of Artificial Sequence: Synthetic oligonucleotide
gccugauauacccaucagg

SEQ ID NO: 1302855 - RNA, 19 nt, Artificial Sequence
  Description of Artificial Sequence: Synthetic oligonucleotide
caauaacccuacugggagc

SEQ ID NO: 1302856 - RNA, 19 nt, Artificial Sequence
  Description of Artificial Sequence: Synthetic oligonucleotide
guguagccuguuuggaagg

SEQ ID NO: 1302857 - RNA, 19 nt, Artificial Sequence
  Description of Artificial Sequence: Synthetic oligonucleotide
cacaauaacccuacuggga

SEQ ID NO: 1302858 - RNA, 19 nt, Artificial Sequence
  Description of Artificial Sequence: Synthetic oligonucleotide
gauuugcuuuaaacaaccc

SEQ ID NO: 1302859 - RNA, 19 nt, Artificial Sequence
  Description of Artificial Sequence: Synthetic oligonucleotide
uaucaggcuccuuggggcc

SEQ ID NO: 1302860 - RNA, 19 nt, Artificial Sequence
  Description of Artificial Sequence: Synthetic oligonucleotide
aucucguauauaaggacug

SEQ ID NO: 1302861 - RNA, 19 nt, Artificial Sequence
  Description of Artificial Sequence: Synthetic oligonucleotide
cagucagcaggguaccugc

SEQ ID NO: 1302862 - RNA, 19 nt, Artificial Sequence
  Description of Artificial Sequence: Synthetic oligonucleotide
guaccaggaguguagccug

SEQ ID NO: 1302863 - RNA, 19 nt, Artificial Sequence
  Description of Artificial Sequence: Synthetic oligonucleotide
ugccugauauacccaucag

SEQ ID NO: 1302864 - RNA, 19 nt, Artificial Sequence
  Description of Artificial Sequence: Synthetic oligonucleotide
uauuaauuugcagggccau

SEQ ID NO: 1302865 - RNA, 19 nt, Artificial Sequence
  Description of Artificial Sequence: Synthetic oligonucleotide
ugggacgcagucauguuua

SEQ ID NO: 1302866 - RNA, 19 nt, Artificial Sequence
  Description of Artificial Sequence: Synthetic oligonucleotide
uaacccuacugggagccgg

SEQ ID NO: 1302867 - RNA, 19 nt, Artificial Sequence
  Description of Artificial Sequence: Synthetic oligonucleotide
cauuccuauuauauugaca

SEQ ID NO: 1302868 - RNA, 19 nt, Artificial Sequence
  Description of Artificial Sequence: Synthetic oligonucleotide
agacccagggcuauaaaca

SEQ ID NO: 1302869 - RNA, 19 nt, Artificial Sequence
  Description of Artificial Sequence: Synthetic oligonucleotide
ucucguauauaaggacugc

SEQ ID NO: 1302870 - RNA, 19 nt, Artificial Sequence
  Description of Artificial Sequence: Synthetic oligonucleotide
uuaaucgaacuggcuuggg

SEQ ID NO: 1302871 - RNA, 19 nt, Artificial Sequence
  Description of Artificial Sequence: Synthetic oligonucleotide
auguuuagcuaugugucga

SEQ ID NO: 1302872 - RNA, 19 nt, Artificial Sequence
  Description of Artificial Sequence: Synthetic oligonucleotide
gaagcggccgaccgcuagg

SEQ ID NO: 1302873 - RNA, 19 nt, Artificial Sequence
  Description of Artificial Sequence: Synthetic oligonucleotide
ccuaacuggucuaucacac

SEQ ID NO: 1302874 - RNA, 19 nt, Artificial Sequence
  Description of Artificial Sequence: Synthetic oligonucleotide
auacgugccuugcugggca

SEQ ID NO: 1302875 - RNA, 19 nt, Artificial Sequence
  Description of Artificial Sequence: Synthetic oligonucleotide
uccccagucucaccuaacu

SEQ ID NO: 1302876 - RNA, 19 nt, Artificial Sequence
  Description of Artificial Sequence: Synthetic oligonucleotide
aagcggccgaccgcuaggc

SEQ ID NO: 1302877 - RNA, 19 nt, Artificial Sequence
  Description of Artificial Sequence: Synthetic oligonucleotide
accgcuaggccugcgcugc

SEQ ID NO: 1302878 - RNA, 19 nt, Artificial Sequence
  Description of Artificial Sequence: Synthetic oligonucleotide
gacaguugcuggcaugcca

SEQ ID NO: 1302879 - RNA, 19 nt, Artificial Sequence
  Description of Artificial Sequence: Synthetic oligonucleotide
caaaugaaccaggcagucc

SEQ ID NO: 1302880 - RNA, 19 nt, Artificial Sequence
  Description of Artificial Sequence: Synthetic oligonucleotide
gacaacgcucagaagcggc

SEQ ID NO: 1302881 - RNA, 19 nt, Artificial Sequence
  Description of Artificial Sequence: Synthetic oligonucleotide
gaggcuguguauaauacgu

SEQ ID NO: 1302882 - RNA, 19 nt, Artificial Sequence
  Description of Artificial Sequence: Synthetic oligonucleotide
ugcugcuucccacaccauc

SEQ ID NO: 1302883 - RNA, 19 nt, Artificial Sequence
  Description of Artificial Sequence: Synthetic oligonucleotide
gugguauggugaauagggg

SEQ ID NO: 1302884 - RNA, 19 nt, Artificial Sequence
  Description of Artificial Sequence: Synthetic oligonucleotide
ucuacucaucagauugcau

SEQ ID NO: 1302885 - RNA, 19 nt, Artificial Sequence
  Description of Artificial Sequence: Synthetic oligonucleotide
cauuuaaucgaacuggcuu

SEQ ID NO: 1302886 - RNA, 19 nt, Artificial Sequence
  Description of Artificial Sequence: Synthetic oligonucleotide
cagucacggccuaucaggc

SEQ ID NO: 1302887 - RNA, 19 nt, Artificial Sequence
  Description of Artificial Sequence: Synthetic oligonucleotide
aacgcucagaagcggccga

SEQ ID NO: 1302888 - RNA, 19 nt, Artificial Sequence
  Description of Artificial Sequence: Synthetic oligonucleotide
gucacggccuaucaggcuc

SEQ ID NO: 1302889 - RNA, 19 nt, Artificial Sequence
  Description of Artificial Sequence: Synthetic oligonucleotide
uaugugucgagagcauuaa

SEQ ID NO: 1302890 - RNA, 19 nt, Artificial Sequence
  Description of Artificial Sequence: Synthetic oligonucleotide
ggcauacgggcucugcugg

SEQ ID NO: 1302891 - RNA, 19 nt, Artificial Sequence
  Description of Artificial Sequence: Synthetic oligonucleotide
cugguuggggaacaggaca

SEQ ID NO: 1302892 - RNA, 19 nt, Artificial Sequence
  Description of Artificial Sequence: Synthetic oligonucleotide
augugucgagagcauuaag

SEQ ID NO: 1302893 - RNA, 19 nt, Artificial Sequence
  Description of Artificial Sequence: Synthetic oligonucleotide
gcuuuaaacaacccauaga

SEQ ID NO: 1302894 - RNA, 19 nt, Artificial Sequence
  Description of Artificial Sequence: Synthetic oligonucleotide
uggagacuaucgagcuggg

SEQ ID NO: 1302895 - RNA, 19 nt, Artificial Sequence
  Description of Artificial Sequence: Synthetic oligonucleotide
uggcaugccauugggcugc

SEQ ID NO: 1302896 - RNA, 19 nt, Artificial Sequence
  Description of Artificial Sequence: Synthetic oligonucleotide
aaacgugcuuuuaacuuuu

SEQ ID NO: 1302897 - RNA, 19 nt, Artificial Sequence
  Description of Artificial Sequence: Synthetic oligonucleotide
agguaggauuugcuccagg

SEQ ID NO: 1302898 - RNA, 19 nt, Artificial Sequence
  Description of Artificial Sequence: Synthetic oligonucleotide
uaagguguaccaggagugu

SEQ ID NO: 1302899 - RNA, 19 nt, Artificial Sequence
  Description of Artificial Sequence: Synthetic oligonucleotide
caccuaacuggucuaucac

SEQ ID NO: 1302900 - RNA, 19 nt, Artificial Sequence
  Description of Artificial Sequence: Synthetic oligonucleotide
ugcuggcaugccauugggc

SEQ ID NO: 1302901 - RNA, 19 nt, Artificial Sequence
  Description of Artificial Sequence: Synthetic oligonucleotide
guuggagacuaucgagcug

SEQ ID NO: 1302902 - RNA, 19 nt, Artificial Sequence
  Description of Artificial Sequence: Synthetic oligonucleotide
acacuggaagacaaugcug

SEQ ID NO: 1302903 - RNA, 19 nt, Artificial Sequence
  Description of Artificial Sequence: Synthetic oligonucleotide
gaguguagccuguuuggaa

SEQ ID NO: 1302904 - RNA, 19 nt, Artificial Sequence
  Description of Artificial Sequence: Synthetic oligonucleotide
gaguuaguuggagacuauc

SEQ ID NO: 1302905 - RNA, 19 nt, Artificial Sequence
  Description of Artificial Sequence: Synthetic oligonucleotide
cuaugugucgagagcauua

SEQ ID NO: 1302906 - RNA, 19 nt, Artificial Sequence
  Description of Artificial Sequence: Synthetic oligonucleotide
acauuuaaucgaacuggcu

SEQ ID NO: 1302907 - RNA, 19 nt, Artificial Sequence
  Description of Artificial Sequence: Synthetic oligonucleotide
agcugccugauauacccau

SEQ ID NO: 1302908 - RNA, 19 nt, Artificial Sequence
  Description of Artificial Sequence: Synthetic oligonucleotide
ggucccggcaaccaugccc

SEQ ID NO: 1302909 - RNA, 19 nt, Artificial Sequence
  Description of Artificial Sequence: Synthetic oligonucleotide
uaaggacugcaguccccag

SEQ ID NO: 1302910 - RNA, 19 nt, Artificial Sequence
  Description of Artificial Sequence: Synthetic oligonucleotide
agacaguugcuggcaugcc

SEQ ID NO: 1302911 - RNA, 19 nt, Artificial Sequence
  Description of Artificial Sequence: Synthetic oligonucleotide
cucagaagcggccgaccgc

SEQ ID NO: 1302912 - RNA, 19 nt, Artificial Sequence
  Description of Artificial Sequence: Synthetic oligonucleotide
agucugcccauuccuauua

SEQ ID NO: 1302913 - RNA, 19 nt, Artificial Sequence
  Description of Artificial Sequence: Synthetic oligonucleotide
cugccugauauacccauca

SEQ ID NO: 1302914 - RNA, 19 nt, Artificial Sequence
  Description of Artificial Sequence: Synthetic oligonucleotide
gccuuuaacacuggaagac

SEQ ID NO: 1302915 - RNA, 19 nt, Artificial Sequence
  Description of Artificial Sequence: Synthetic oligonucleotide
ccggcaaccaugcccaugg

SEQ ID NO: 1302916 - RNA, 19 nt, Artificial Sequence
  Description of Artificial Sequence: Synthetic oligonucleotide
augugggaacagugacugg

SEQ ID NO: 1302917 - RNA, 19 nt, Artificial Sequence
  Description of Artificial Sequence: Synthetic oligonucleotide
ugcaccaccgugguauggu

SEQ ID NO: 1302918 - RNA, 19 nt, Artificial Sequence
  Description of Artificial Sequence: Synthetic oligonucleotide
cauacgggcucugcugggg

SEQ ID NO: 1302919 - RNA, 19 nt, Artificial Sequence
  Description of Artificial Sequence: Synthetic oligonucleotide
gggauggacagucugccca

SEQ ID NO: 1302920 - RNA, 19 nt, Artificial Sequence
  Description of Artificial Sequence: Synthetic oligonucleotide
gcucagaagcggccgaccg

SEQ ID NO: 1302921 - RNA, 19 nt, Artificial Sequence
  Description of Artificial Sequence: Synthetic oligonucleotide
uguagccuguuuggaaggu

SEQ ID NO: 1302922 - RNA, 19 nt, Artificial Sequence
  Description of Artificial Sequence: Synthetic oligonucleotide
gggcaaugcccagacaacg

SEQ ID NO: 1302923 - RNA, 19 nt, Artificial Sequence
  Description of Artificial Sequence: Synthetic oligonucleotide
cucggcgacgggcaaugcc

SEQ ID NO: 1302924 - RNA, 19 nt, Artificial Sequence
  Description of Artificial Sequence: Synthetic oligonucleotide
cucguauauaaggacugca

SEQ ID NO: 1302925 - RNA, 19 nt, Artificial Sequence
  Description of Artificial Sequence: Synthetic oligonucleotide
aagguguaccaggagugua

SEQ ID NO: 1302926 - RNA, 19 nt, Artificial Sequence
  Description of Artificial Sequence: Synthetic oligonucleotide
guguaccaggaguguagcc

SEQ ID NO: 1302927 - RNA, 19 nt, Artificial Sequence
  Description of Artificial Sequence: Synthetic oligonucleotide
cugagcucaucuacucauc

SEQ ID NO: 1302928 - RNA, 19 nt, Artificial Sequence
  Description of Artificial Sequence: Synthetic oligonucleotide
gcugccucuaggaggaggg

SEQ ID NO: 1302929 - RNA, 19 nt, Artificial Sequence
  Description of Artificial Sequence: Synthetic oligonucleotide
ccucacaucucguauauaa

SEQ ID NO: 1302930 - RNA, 19 nt, Artificial Sequence
  Description of Artificial Sequence: Synthetic oligonucleotide
auuguggucccggcaacca

SEQ ID NO: 1302931 - RNA, 19 nt, Artificial Sequence
  Description of Artificial Sequence: Synthetic oligonucleotide
acaacccauagaguuaguu

SEQ ID NO: 1302932 - RNA, 19 nt, Artificial Sequence
  Description of Artificial Sequence: Synthetic oligonucleotide
ggcacuucucacuggguac

SEQ ID NO: 1302933 - RNA, 19 nt, Artificial Sequence
  Description of Artificial Sequence: Synthetic oligonucleotide
caggguaccugcugacaug

SEQ ID NO: 1302934 - RNA, 19 nt, Artificial Sequence
  Description of Artificial Sequence: Synthetic oligonucleotide
ucuguucagucacggccua

SEQ ID NO: 1302935 - RNA, 19 nt, Artificial Sequence
  Description of Artificial Sequence: Synthetic oligonucleotide
agaggcaagggaugccuuu

SEQ ID NO: 1302936 - RNA, 19 nt, Artificial Sequence
  Description of Artificial Sequence: Synthetic oligonucleotide
uaucgagcugggaccugcu

SEQ ID NO: 1302937 - RNA, 19 nt, Artificial Sequence
  Description of Artificial Sequence: Synthetic oligonucleotide
uggguacacggccggucug

SEQ ID NO: 1302938 - RNA, 19 nt, Artificial Sequence
  Description of Artificial Sequence: Synthetic oligonucleotide
acugcaguauuaauacaua

SEQ ID NO: 1302939 - RNA, 19 nt, Artificial Sequence
  Description of Artificial Sequence: Synthetic oligonucleotide
ccuacugggagccgguccc

SEQ ID NO: 1302940 - RNA, 19 nt, Artificial Sequence
  Description of Artificial Sequence: Synthetic oligonucleotide
agucacggccuaucaggcu

SEQ ID NO: 1302941 - RNA, 19 nt, Artificial Sequence
  Description of Artificial Sequence: Synthetic oligonucleotide
acacggccggucugguagg

SEQ ID NO: 1302942 - RNA, 19 nt, Artificial Sequence
  Description of Artificial Sequence: Synthetic oligonucleotide
gaccgcuaggccugcgcug

SEQ ID NO: 1302943 - RNA, 19 nt, Artificial Sequence
  Description of Artificial Sequence: Synthetic oligonucleotide
agcucgguaugugggaaca

SEQ ID NO: 1302944 - RNA, 19 nt, Artificial Sequence
  Description of Artificial Sequence: Synthetic oligonucleotide
agcggccgaccgcuaggcc

SEQ ID NO: 1302945 - RNA, 19 nt, Artificial Sequence
  Description of Artificial Sequence: Synthetic oligonucleotide
ccauuccuauuauauugac

SEQ ID NO: 1302946 - RNA, 19 nt, Artificial Sequence
  Description of Artificial Sequence: Synthetic oligonucleotide
ucucaccuaacuggucuau

SEQ ID NO: 1302947 - RNA, 19 nt, Artificial Sequence
  Description of Artificial Sequence: Synthetic oligonucleotide
ugcccagacaacgcucaga

SEQ ID NO: 1302948 - RNA, 19 nt, Artificial Sequence
  Description of Artificial Sequence: Synthetic oligonucleotide
gggcauacgggcucugcug

SEQ ID NO: 1302949 - RNA, 19 nt, Artificial Sequence
  Description of Artificial Sequence: Synthetic oligonucleotide
acgcagucauguuuagcua

SEQ ID NO: 1302950 - RNA, 19 nt, Artificial Sequence
  Description of Artificial Sequence: Synthetic oligonucleotide
ugggagccgguccccaguc

SEQ ID NO: 1302951 - RNA, 19 nt, Artificial Sequence
  Description of Artificial Sequence: Synthetic oligonucleotide
gcucaaggccugcagcacc

SEQ ID NO: 1302952 - RNA, 19 nt, Artificial Sequence
  Description of Artificial Sequence: Synthetic oligonucleotide
agaaagcggccugcgccuc

SEQ ID NO: 1302953 - RNA, 19 nt, Artificial Sequence
  Description of Artificial Sequence: Synthetic oligonucleotide
ggcaaugcccagacaacgc

SEQ ID NO: 1302954 - RNA, 19 nt, Artificial Sequence
  Description of Artificial Sequence: Synthetic oligonucleotide
gaacuggcuugggauggac

SEQ ID NO: 1302955 - RNA, 19 nt, Artificial Sequence
  Description of Artificial Sequence: Synthetic oligonucleotide
ccagcuggauauccaauuc

SEQ ID NO: 1302956 - RNA, 19 nt, Artificial Sequence
  Description of Artificial Sequence: Synthetic oligonucleotide
agccggcacggcguguggc

SEQ ID NO: 1302957 - RNA, 19 nt, Artificial Sequence
  Description of Artificial Sequence: Synthetic oligonucleotide
ggaguaugguggcacagcu

SEQ ID NO: 1302958 - RNA, 19 nt, Artificial Sequence
  Description of Artificial Sequence: Synthetic oligonucleotide
auauacccaucaggcccuc

SEQ ID NO: 1302959 - RNA, 19 nt, Artificial Sequence
  Description of Artificial Sequence: Synthetic oligonucleotide
cccauuccuauuauauuga

SEQ ID NO: 1302960 - RNA, 19 nt, Artificial Sequence
  Description of Artificial Sequence: Synthetic oligonucleotide
aacccuacugggagccggu

SEQ ID NO: 1302961 - RNA, 19 nt, Artificial Sequence
  Description of Artificial Sequence: Synthetic oligonucleotide
cucaccuaacuggucuauc

SEQ ID NO: 1302962 - RNA, 19 nt, Artificial Sequence
  Description of Artificial Sequence: Synthetic oligonucleotide
agcaggguaccugcugaca

SEQ ID NO: 1302963 - RNA, 19 nt, Artificial Sequence
  Description of Artificial Sequence: Synthetic oligonucleotide
cagucucaccuaacugguc

SEQ ID NO: 1302964 - RNA, 19 nt, Artificial Sequence
  Description of Artificial Sequence: Synthetic oligonucleotide
guaugugggaacagugacu

SEQ ID NO: 1302965 - RNA, 19 nt, Artificial Sequence
  Description of Artificial Sequence: Synthetic oligonucleotide
ccucuaggaggagggaugg

SEQ ID NO: 1302966 - RNA, 19 nt, Artificial Sequence
  Description of Artificial Sequence: Synthetic oligonucleotide
ggcaagggaugccuuuaac

SEQ ID NO: 1302967 - RNA, 19 nt, Artificial Sequence
  Description of Artificial Sequence: Synthetic oligonucleotide
agccgguccccagucucac

SEQ ID NO: 1302968 - RNA, 19 nt, Artificial Sequence
  Description of Artificial Sequence: Synthetic oligonucleotide
ggguacacggccggucugg

SEQ ID NO: 1302969 - RNA, 19 nt, Artificial Sequence
  Description of Artificial Sequence: Synthetic oligonucleotide
gcauacgggcucugcuggg

SEQ ID NO: 1302970 - RNA, 19 nt, Artificial Sequence
  Description of Artificial Sequence: Synthetic oligonucleotide
ugcccugccaugggagcug

SEQ ID NO: 1302971 - RNA, 19 nt, Artificial Sequence
  Description of Artificial Sequence: Synthetic oligonucleotide
uauacccaucaggcccuca

SEQ ID NO: 1302972 - RNA, 19 nt, Artificial Sequence
  Description of Artificial Sequence: Synthetic oligonucleotide
gagccggcacggcgugugg

SEQ ID NO: 1302973 - RNA, 19 nt, Artificial Sequence
  Description of Artificial Sequence: Synthetic oligonucleotide
gcaccagacccacccacug

SEQ ID NO: 1302974 - RNA, 19 nt, Artificial Sequence
  Description of Artificial Sequence: Synthetic oligonucleotide
cccauagaguuaguuggag

SEQ ID NO: 1302975 - RNA, 19 nt, Artificial Sequence
  Description of Artificial Sequence: Synthetic oligonucleotide
gccucuaggaggagggaug

SEQ ID NO: 1302976 - RNA, 19 nt, Artificial Sequence
  Description of Artificial Sequence: Synthetic oligonucleotide
caccaccgugguaugguga

SEQ ID NO: 1302977 - RNA, 19 nt, Artificial Sequence
  Description of Artificial Sequence: Synthetic oligonucleotide
agaguuaguuggagacuau

SEQ ID NO: 1302978 - RNA, 19 nt, Artificial Sequence
  Description of Artificial Sequence: Synthetic oligonucleotide
gucucaccuaacuggucua

SEQ ID NO: 1302979 - RNA, 19 nt, Artificial Sequence
  Description of Artificial Sequence: Synthetic oligonucleotide
cuacugggagccggucccc

SEQ ID NO: 1302980 - RNA, 19 nt, Artificial Sequence
  Description of Artificial Sequence: Synthetic oligonucleotide
ccuuuaacacuggaagaca

SEQ ID NO: 1302981 - RNA, 19 nt, Artificial Sequence
  Description of Artificial Sequence: Synthetic oligonucleotide
gggacgcagucauguuuag

SEQ ID NO: 1302982 - RNA, 19 nt, Artificial Sequence
  Description of Artificial Sequence: Synthetic oligonucleotide
uacgugccuugcugggcau

SEQ ID NO: 1302983 - RNA, 19 nt, Artificial Sequence
  Description of Artificial Sequence: Synthetic oligonucleotide
ccgugguauggugaauagg

SEQ ID NO: 1302984 - RNA, 19 nt, Artificial Sequence
  Description of Artificial Sequence: Synthetic oligonucleotide
acccuacugggagccgguc

SEQ ID NO: 1302985 - RNA, 19 nt, Artificial Sequence
  Description of Artificial Sequence: Synthetic oligonucleotide
cccuacugggagccggucc

SEQ ID NO: 1302986 - RNA, 19 nt, Artificial Sequence
  Description of Artificial Sequence: Synthetic oligonucleotide
ggacgcagucauguuuagc

SEQ ID NO: 1302987 - RNA, 19 nt, Artificial Sequence
  Description of Artificial Sequence: Synthetic oligonucleotide
cuguuacaauaaacgugcu

SEQ ID NO: 1302988 - RNA, 19 nt, Artificial Sequence
  Description of Artificial Sequence: Synthetic oligonucleotide
caccgugguauggugaaua

SEQ ID NO: 1302989 - RNA, 19 nt, Artificial Sequence
  Description of Artificial Sequence: Synthetic oligonucleotide
gugccuugcugggcauacg

SEQ ID NO: 1302990 - RNA, 19 nt, Artificial Sequence
  Description of Artificial Sequence: Synthetic oligonucleotide
gugaccccgcugccucuag

SEQ ID NO: 1302991 - RNA, 19 nt, Artificial Sequence
  Description of Artificial Sequence: Synthetic oligonucleotide
ggguagacaguugcuggca

SEQ ID NO: 1302992 - RNA, 19 nt, Artificial Sequence
  Description of Artificial Sequence: Synthetic oligonucleotide
cguauauaaggacugcagu

SEQ ID NO: 1302993 - RNA, 19 nt, Artificial Sequence
  Description of Artificial Sequence: Synthetic oligonucleotide
gacgggcaaugcccagaca

SEQ ID NO: 1302994 - RNA, 19 nt, Artificial Sequence
  Description of Artificial Sequence: Synthetic oligonucleotide
aggggcuacaggaguugga

SEQ ID NO: 1302995 - RNA, 19 nt, Artificial Sequence
  Description of Artificial Sequence: Synthetic oligonucleotide
ggcugcaccaccgugguau

SEQ ID NO: 1302996 - RNA, 19 nt, Artificial Sequence
  Description of Artificial Sequence: Synthetic oligonucleotide
cucgguaugugggaacagu

SEQ ID NO: 1302997 - RNA, 19 nt, Artificial Sequence
  Description of Artificial Sequence: Synthetic oligonucleotide
gcacuucucacuggguaca

SEQ ID NO: 1302998 - RNA, 19 nt, Artificial Sequence
  Description of Artificial Sequence: Synthetic oligonucleotide
gagccgguccccagucuca

SEQ ID NO: 1302999 - RNA, 19 nt, Artificial Sequence
  Description of Artificial Sequence: Synthetic oligonucleotide
guagccuguuuggaaggua

SEQ ID NO: 1303000 - RNA, 19 nt, Artificial Sequence
  Description of Artificial Sequence: Synthetic oligonucleotide
gcguguggcucggcgacgg

SEQ ID NO: 1303001 - RNA, 19 nt, Artificial Sequence
  Description of Artificial Sequence: Synthetic oligonucleotide
ccagacccacccacugccc

SEQ ID NO: 1303002 - RNA, 19 nt, Artificial Sequence
  Description of Artificial Sequence: Synthetic oligonucleotide
cccaucaggcccucacauc

SEQ ID NO: 1303003 - RNA, 19 nt, Artificial Sequence
  Description of Artificial Sequence: Synthetic oligonucleotide
ggcucggcgacgggcaaug

SEQ ID NO: 1303004 - RNA, 19 nt, Artificial Sequence
  Description of Artificial Sequence: Synthetic oligonucleotide
guuggggaacaggacacuu

SEQ ID NO: 1303005 - RNA, 19 nt, Artificial Sequence
  Description of Artificial Sequence: Synthetic oligonucleotide
ggcgacgggcaaugcccag

SEQ ID NO: 1303006 - RNA, 19 nt, Artificial Sequence
  Description of Artificial Sequence: Synthetic oligonucleotide
cgguaugugggaacaguga

SEQ ID NO: 1303007 - RNA, 19 nt, Artificial Sequence
  Description of Artificial Sequence: Synthetic oligonucleotide
ggacacuuuguaaggugua

SEQ ID NO: 1303008 - RNA, 19 nt, Artificial Sequence
  Description of Artificial Sequence: Synthetic oligonucleotide
gcucgguaugugggaacag

SEQ ID NO: 1303009 - RNA, 19 nt, Artificial Sequence
  Description of Artificial Sequence: Synthetic oligonucleotide
gcuaggccugcgcugccuc

SEQ ID NO: 1303010 - RNA, 19 nt, Artificial Sequence
  Description of Artificial Sequence: Synthetic oligonucleotide
cuccacugguuggggaaca

SEQ ID NO: 1303011 - RNA, 19 nt, Artificial Sequence
  Description of Artificial Sequence: Synthetic oligonucleotide
accaggaguguagccuguu

SEQ ID NO: 1303012 - RNA, 19 nt, Artificial Sequence
  Description of Artificial Sequence: Synthetic oligonucleotide
cugcauacagaggcugugu

SEQ ID NO: 1303013 - RNA, 19 nt, Artificial Sequence
  Description of Artificial Sequence: Synthetic oligonucleotide
accagcuguggaacucaau

SEQ ID NO: 1303014 - RNA, 19 nt, Artificial Sequence
  Description of Artificial Sequence: Synthetic oligonucleotide
ggagacuaucgagcuggga

SEQ ID NO: 1303015 - RNA, 19 nt, Artificial Sequence
  Description of Artificial Sequence: Synthetic oligonucleotide
cagacccacccacugcccu

SEQ ID NO: 1303016 - RNA, 19 nt, Artificial Sequence
  Description of Artificial Sequence: Synthetic oligonucleotide
ccgaccgcuaggccugcgc

SEQ ID NO: 1303017 - RNA, 19 nt, Artificial Sequence
  Description of Artificial Sequence: Synthetic oligonucleotide
cuaucacacugcccacagu

SEQ ID NO: 1303018 - RNA, 19 nt, Artificial Sequence
  Description of Artificial Sequence: Synthetic oligonucleotide
guacacggccggucuggua

SEQ ID NO: 1303019 - RNA, 19 nt, Artificial Sequence
  Description of Artificial Sequence: Synthetic oligonucleotide
gcugccugauauacccauc

SEQ ID NO: 1303020 - RNA, 19 nt, Artificial Sequence
  Description of Artificial Sequence: Synthetic oligonucleotide
cauugggcugcaccaccgu

SEQ ID NO: 1303021 - RNA, 19 nt, Artificial Sequence
  Description of Artificial Sequence: Synthetic oligonucleotide
cgacgggcaaugcccagac

SEQ ID NO: 1303022 - RNA, 19 nt, Artificial Sequence
  Description of Artificial Sequence: Synthetic oligonucleotide
uggcucggcgacgggcaau

SEQ ID NO: 1303023 - RNA, 19 nt, Artificial Sequence
  Description of Artificial Sequence: Synthetic oligonucleotide
gcggccgaccgcuaggccu

SEQ ID NO: 1303024 - RNA, 19 nt, Artificial Sequence
  Description of Artificial Sequence: Synthetic oligonucleotide
cgugccuugcugggcauac

SEQ ID NO: 1303025 - RNA, 19 nt, Artificial Sequence
  Description of Artificial Sequence: Synthetic oligonucleotide
gcccacagucugcaccaga

SEQ ID NO: 1303026 - RNA, 19 nt, Artificial Sequence
  Description of Artificial Sequence: Synthetic oligonucleotide
gggaccggcgcgcgccggc

SEQ ID NO: 1303027 - RNA, 19 nt, Artificial Sequence
  Description of Artificial Sequence: Synthetic oligonucleotide
gcccucacaucucguauau

SEQ ID NO: 1303028 - RNA, 19 nt, Artificial Sequence
  Description of Artificial Sequence: Synthetic oligonucleotide
ucccggcaaccaugcccau

SEQ ID NO: 1303029 - RNA, 19 nt, Artificial Sequence
  Description of Artificial Sequence: Synthetic oligonucleotide
ccuguuuggaagguaggau

SEQ ID NO: 1303030 - RNA, 19 nt, Artificial Sequence
  Description of Artificial Sequence: Synthetic oligonucleotide
cggcacggcguguggcucg

SEQ ID NO: 1303031 - RNA, 19 nt, Artificial Sequence
  Description of Artificial Sequence: Synthetic oligonucleotide
acgugccuugcugggcaua

SEQ ID NO: 1303032 - RNA, 19 nt, Artificial Sequence
  Description of Artificial Sequence: Synthetic oligonucleotide
gcuaugugucgagagcauu

SEQ ID NO: 1303033 - RNA, 19 nt, Artificial Sequence
  Description of Artificial Sequence: Synthetic oligonucleotide
ccggucugguagggguugg

SEQ ID NO: 1303034 - RNA, 19 nt, Artificial Sequence
  Description of Artificial Sequence: Synthetic oligonucleotide
accugcugacauggccauu

SEQ ID NO: 1303035 - RNA, 19 nt, Artificial Sequence
  Description of Artificial Sequence: Synthetic oligonucleotide
guccugguuggaggcucaa

SEQ ID NO: 1303036 - RNA, 19 nt, Artificial Sequence
  Description of Artificial Sequence: Synthetic oligonucleotide
cccggcaaccaugcccaug

SEQ ID NO: 1303037 - RNA, 19 nt, Artificial Sequence
  Description of Artificial Sequence: Synthetic oligonucleotide
ggaccggcgcgcgccggcc

SEQ ID NO: 1303038 - RNA, 19 nt, Artificial Sequence
  Description of Artificial Sequence: Synthetic oligonucleotide
cugccacaauaacccuacu

SEQ ID NO: 1303039 - RNA, 19 nt, Artificial Sequence
  Description of Artificial Sequence: Synthetic oligonucleotide
cagaagcggccgaccgcua

SEQ ID NO: 1303040 - RNA, 19 nt, Artificial Sequence
  Description of Artificial Sequence: Synthetic oligonucleotide
cgagccggcacggcgugug

SEQ ID NO: 1303041 - RNA, 19 nt, Artificial Sequence
  Description of Artificial Sequence: Synthetic oligonucleotide
cccgagccggcacggcgug

SEQ ID NO: 1303042 - RNA, 19 nt, Artificial Sequence
  Description of Artificial Sequence: Synthetic oligonucleotide
acggccuaucaggcuccuu

SEQ ID NO: 1303043 - RNA, 19 nt, Artificial Sequence
  Description of Artificial Sequence: Synthetic oligonucleotide
ccuccgggaccggcgcgcg

SEQ ID NO: 1303044 - RNA, 19 nt, Artificial Sequence
  Description of Artificial Sequence: Synthetic oligonucleotide
gguacacggccggucuggu

SEQ ID NO: 1303045 - RNA, 19 nt, Artificial Sequence
  Description of Artificial Sequence: Synthetic oligonucleotide
ccgggaccggcgcgcgccg

SEQ ID NO: 1303046 - RNA, 19 nt, Artificial Sequence
  Description of Artificial Sequence: Synthetic oligonucleotide
gcucggcgacgggcaaugc

SEQ ID NO: 1303047 - RNA, 19 nt, Artificial Sequence
  Description of Artificial Sequence: Synthetic oligonucleotide
gggcugggacgcagucaug

SEQ ID NO: 1303048 - RNA, 19 nt, Artificial Sequence
  Description of Artificial Sequence: Synthetic oligonucleotide
gccgaccgcuaggccugcg

SEQ ID NO: 1303049 - RNA, 19 nt, Artificial Sequence
  Description of Artificial Sequence: Synthetic oligonucleotide
cacuggguacacggccggu

SEQ ID NO: 1303050 - RNA, 19 nt, Artificial Sequence
  Description of Artificial Sequence: Synthetic oligonucleotide
cggcgacgggcaaugccca

SEQ ID NO: 1303051 - RNA, 19 nt, Artificial Sequence
  Description of Artificial Sequence: Synthetic oligonucleotide
ggcaugccauugggcugca

SEQ ID NO: 1303052 - RNA, 19 nt, Artificial Sequence
  Description of Artificial Sequence: Synthetic oligonucleotide
cgaccgcuaggccugcgcu

SEQ ID NO: 1303053 - RNA, 19 nt, Artificial Sequence
  Description of Artificial Sequence: Synthetic oligonucleotide
cacggccuaucaggcuccu

SEQ ID NO: 1303054 - RNA, 19 nt, Artificial Sequence
  Description of Artificial Sequence: Synthetic oligonucleotide
cccucacaucucguauaua

SEQ ID NO: 1303055 - RNA, 19 nt, Artificial Sequence
  Description of Artificial Sequence: Synthetic oligonucleotide
gcacggcguguggcucggc

SEQ ID NO: 1303056 - RNA, 19 nt, Artificial Sequence
  Description of Artificial Sequence: Synthetic oligonucleotide
ccaccgugguauggugaau

SEQ ID NO: 1303057 - RNA, 19 nt, Artificial Sequence
  Description of Artificial Sequence: Synthetic oligonucleotide
cgcuaggccugcgcugccu

SEQ ID NO: 1303058 - RNA, 19 nt, Artificial Sequence
  Description of Artificial Sequence: Synthetic oligonucleotide
ccgagccggcacggcgugu

SEQ ID NO: 1303059 - RNA, 19 nt, Artificial Sequence
  Description of Artificial Sequence: Synthetic oligonucleotide
aauuaagaaauuuucacag

SEQ ID NO: 1303060 - RNA, 19 nt, Artificial Sequence
  Description of Artificial Sequence: Synthetic oligonucleotide
aguccuauaauacugagcg

SEQ ID NO: 1303061 - RNA, 19 nt, Artificial Sequence
  Description of Artificial Sequence: Synthetic oligonucleotide
uucaaaucaaauaugcagg

SEQ ID NO: 1303062 - RNA, 19 nt, Artificial Sequence
  Description of Artificial Sequence: Synthetic oligonucleotide
uuaacauaggaacagacug

SEQ ID NO: 1303063 - RNA, 19 nt, Artificial Sequence
  Description of Artificial Sequence: Synthetic oligonucleotide
gaugauugaaaacacaacc

SEQ ID NO: 1303064 - RNA, 19 nt, Artificial Sequence
  Description of Artificial Sequence: Synthetic oligonucleotide
uacuuauugauguaaauag

SEQ ID NO: 1303065 - RNA, 19 nt, Artificial Sequence
  Description of Artificial Sequence: Synthetic oligonucleotide
gaaauuuucacagagcuag

SEQ ID NO: 1303066 - RNA, 19 nt, Artificial Sequence
  Description of Artificial Sequence: Synthetic oligonucleotide
uauugauguaaauagaucu

SEQ ID NO: 1303067 - RNA, 19 nt, Artificial Sequence
  Description of Artificial Sequence: Synthetic oligonucleotide
aauaacaggggcucguucg

SEQ ID NO: 1303068 - RNA, 19 nt, Artificial Sequence
  Description of Artificial Sequence: Synthetic oligonucleotide
auuuaucccguucucaucc

SEQ ID NO: 1303069 - RNA, 19 nt, Artificial Sequence
  Description of Artificial Sequence: Synthetic oligonucleotide
uuaaguacauacaugauau

SEQ ID NO: 1303070 - RNA, 19 nt, Artificial Sequence
  Description of Artificial Sequence: Synthetic oligonucleotide
aaaaugguaauucagcaaa

SEQ ID NO: 1303071 - RNA, 19 nt, Artificial Sequence
  Description of Artificial Sequence: Synthetic oligonucleotide
uuuguuauuauacacuuaa

SEQ ID NO: 1303072 - RNA, 19 nt, Artificial Sequence
  Description of Artificial Sequence: Synthetic oligonucleotide
uauacaauucuaauaaaac

SEQ ID NO: 1303073 - RNA, 19 nt, Artificial Sequence
  Description of Artificial Sequence: Synthetic oligonucleotide
uaaacuacuacgaaguuaa

SEQ ID NO: 1303074 - RNA, 19 nt, Artificial Sequence
  Description of Artificial Sequence: Synthetic oligonucleotide
uaugguuuaaaucacuaga

SEQ ID NO: 1303075 - RNA, 19 nt, Artificial Sequence
  Description of Artificial Sequence: Synthetic oligonucleotide
aaacagcacaugcagauuc

SEQ ID NO: 1303076 - RNA, 19 nt, Artificial Sequence
  Description of Artificial Sequence: Synthetic oligonucleotide
ucaucuauguaauaaauaa

SEQ ID NO: 1303077 - RNA, 19 nt, Artificial Sequence
  Description of Artificial Sequence: Synthetic oligonucleotide
aaauaaacuacuacgaagu

SEQ ID NO: 1303078 - RNA, 19 nt, Artificial Sequence
  Description of Artificial Sequence: Synthetic oligonucleotide
ucguucguaacccaggacg

SEQ ID NO: 1303079 - RNA, 19 nt, Artificial Sequence
  Description of Artificial Sequence: Synthetic oligonucleotide
uguggaugcacacagaggu

SEQ ID NO: 1303080 - RNA, 19 nt, Artificial Sequence
  Description of Artificial Sequence: Synthetic oligonucleotide
ugguaauucagcaaaauau

SEQ ID NO: 1303081 - RNA, 19 nt, Artificial Sequence
  Description of Artificial Sequence: Synthetic oligonucleotide
aauguauaguccuauaaua

SEQ ID NO: 1303082 - RNA, 19 nt, Artificial Sequence
  Description of Artificial Sequence: Synthetic oligonucleotide
uucgauagggguacaaugg

SEQ ID NO: 1303083 - RNA, 19 nt, Artificial Sequence
  Description of Artificial Sequence: Synthetic oligonucleotide
auacacaaaauguauuggg

SEQ ID NO: 1303084 - RNA, 19 nt, Artificial Sequence
  Description of Artificial Sequence: Synthetic oligonucleotide
uuauuauacacuuaauuua

SEQ ID NO: 1303085 - RNA, 19 nt, Artificial Sequence
  Description of Artificial Sequence: Synthetic oligonucleotide
ucgaagagguuuaacauag

SEQ ID NO: 1303086 - RNA, 19 nt, Artificial Sequence
  Description of Artificial Sequence: Synthetic oligonucleotide
uuuuccuauucuuacauca

SEQ ID NO: 1303087 - RNA, 19 nt, Artificial Sequence
  Description of Artificial Sequence: Synthetic oligonucleotide
uuuaaguacauacaugaua

SEQ ID NO: 1303088 - RNA, 19 nt, Artificial Sequence
  Description of Artificial Sequence: Synthetic oligonucleotide
aauuguucgauagggguac

SEQ ID NO: 1303089 - RNA, 19 nt, Artificial Sequence
  Description of Artificial Sequence: Synthetic oligonucleotide
ucaaauaucccuaguguca

SEQ ID NO: 1303090 - RNA, 19 nt, Artificial Sequence
  Description of Artificial Sequence: Synthetic oligonucleotide
uuuaugcuaaauucaauac

SEQ ID NO: 1303091 - RNA, 19 nt, Artificial Sequence
  Description of Artificial Sequence: Synthetic oligonucleotide
agugucaugaguaagccac

SEQ ID NO: 1303092 - RNA, 19 nt, Artificial Sequence
  Description of Artificial Sequence: Synthetic oligonucleotide
aacaaaucgugcugcuugc

SEQ ID NO: 1303093 - RNA, 19 nt, Artificial Sequence
  Description of Artificial Sequence: Synthetic oligonucleotide
uaacauaggaacagacugg

SEQ ID NO: 1303094 - RNA, 19 nt, Artificial Sequence
  Description of Artificial Sequence: Synthetic oligonucleotide
ucaugaguaagccacaaaa

SEQ ID NO: 1303095 - RNA, 19 nt, Artificial Sequence
  Description of Artificial Sequence: Synthetic oligonucleotide
uaacaaaucgugcugcuug

SEQ ID NO: 1303096 - RNA, 19 nt, Artificial Sequence
  Description of Artificial Sequence: Synthetic oligonucleotide
uucacaaucacccuuguuu

SEQ ID NO: 1303097 - RNA, 19 nt, Artificial Sequence
  Description of Artificial Sequence: Synthetic oligonucleotide
cuuaauugcgucuucacuc

SEQ ID NO: 1303098 - RNA, 19 nt, Artificial Sequence
  Description of Artificial Sequence: Synthetic oligonucleotide
aauaaugaccauuuugauu

SEQ ID NO: 1303099 - RNA, 19 nt, Artificial Sequence
  Description of Artificial Sequence: Synthetic oligonucleotide
aaccaauuguucgauaggg

SEQ ID NO: 1303100 - RNA, 19 nt, Artificial Sequence
  Description of Artificial Sequence: Synthetic oligonucleotide
cucaaauucauacgaagcc

SEQ ID NO: 1303101 - RNA, 19 nt, Artificial Sequence
  Description of Artificial Sequence: Synthetic oligonucleotide
uuguuguucgcucaaauuc

SEQ ID NO: 1303102 - RNA, 19 nt, Artificial Sequence
  Description of Artificial Sequence: Synthetic oligonucleotide
ugauccaaacagcacaugc

SEQ ID NO: 1303103 - RNA, 19 nt, Artificial Sequence
  Description of Artificial Sequence: Synthetic oligonucleotide
acaaccaauuguucgauag

SEQ ID NO: 1303104 - RNA, 19 nt, Artificial Sequence
  Description of Artificial Sequence: Synthetic oligonucleotide
uaacccaugagugaggugc

SEQ ID NO: 1303105 - RNA, 19 nt, Artificial Sequence
  Description of Artificial Sequence: Synthetic oligonucleotide
auugggaacccuuuaaaug

SEQ ID NO: 1303106 - RNA, 19 nt, Artificial Sequence
  Description of Artificial Sequence: Synthetic oligonucleotide
acugaguccaucuaaagaa

SEQ ID NO: 1303107 - RNA, 19 nt, Artificial Sequence
  Description of Artificial Sequence: Synthetic oligonucleotide
cugagcgauauuuacaagc

SEQ ID NO: 1303108 - RNA, 19 nt, Artificial Sequence
  Description of Artificial Sequence: Synthetic oligonucleotide
acuacuacgaaguuaacuu

SEQ ID NO: 1303109 - RNA, 19 nt, Artificial Sequence
  Description of Artificial Sequence: Synthetic oligonucleotide
uucgcucaaauucauacga

SEQ ID NO: 1303110 - RNA, 19 nt, Artificial Sequence
  Description of Artificial Sequence: Synthetic oligonucleotide
ugauugaaaacacaaccaa

SEQ ID NO: 1303111 - RNA, 19 nt, Artificial Sequence
  Description of Artificial Sequence: Synthetic oligonucleotide
aaaucgugcugcuugccuc

SEQ ID NO: 1303112 - RNA, 19 nt, Artificial Sequence
  Description of Artificial Sequence: Synthetic oligonucleotide
ucucaaauaucccuagugu

SEQ ID NO: 1303113 - RNA, 19 nt, Artificial Sequence
  Description of Artificial Sequence: Synthetic oligonucleotide
uguauaguccuauaauacu

SEQ ID NO: 1303114 - RNA, 19 nt, Artificial Sequence
  Description of Artificial Sequence: Synthetic oligonucleotide
auuguggaugcacacagag

SEQ ID NO: 1303115 - RNA, 19 nt, Artificial Sequence
  Description of Artificial Sequence: Synthetic oligonucleotide
aacacagacaaaagccucc

SEQ ID NO: 1303116 - RNA, 19 nt, Artificial Sequence
  Description of Artificial Sequence: Synthetic oligonucleotide
auaugcagguuucuacugc

SEQ ID NO: 1303117 - RNA, 19 nt, Artificial Sequence
  Description of Artificial Sequence: Synthetic oligonucleotide
uguucgcucaaauucauac

SEQ ID NO: 1303118 - RNA, 19 nt, Artificial Sequence
  Description of Artificial Sequence: Synthetic oligonucleotide
uugggaacccuuuaaaugu

SEQ ID NO: 1303119 - RNA, 19 nt, Artificial Sequence
  Description of Artificial Sequence: Synthetic oligonucleotide
aauucauacgaagccaaag

SEQ ID NO: 1303120 - RNA, 19 nt, Artificial Sequence
  Description of Artificial Sequence: Synthetic oligonucleotide
uacacaaaauguauuggga

SEQ ID NO: 1303121 - RNA, 19 nt, Artificial Sequence
  Description of Artificial Sequence: Synthetic oligonucleotide
aggauuaguaggcuugugg

SEQ ID NO: 1303122 - RNA, 19 nt, Artificial Sequence
  Description of Artificial Sequence: Synthetic oligonucleotide
aacaucugaugauugaaaa

SEQ ID NO: 1303123 - RNA, 19 nt, Artificial Sequence
  Description of Artificial Sequence: Synthetic oligonucleotide
uacacuuaauuuaugcuaa

SEQ ID NO: 1303124 - RNA, 19 nt, Artificial Sequence
  Description of Artificial Sequence: Synthetic oligonucleotide
ugagcgauauuuacaagca

SEQ ID NO: 1303125 - RNA, 19 nt, Artificial Sequence
  Description of Artificial Sequence: Synthetic oligonucleotide
uucauacgaagccaaagcu

SEQ ID NO: 1303126 - RNA, 19 nt, Artificial Sequence
  Description of Artificial Sequence: Synthetic oligonucleotide
uucuauacacaaaauguau

SEQ ID NO: 1303127 - RNA, 19 nt, Artificial Sequence
  Description of Artificial Sequence: Synthetic oligonucleotide
ucauacgaagccaaagcug

SEQ ID NO: 1303128 - RNA, 19 nt, Artificial Sequence
  Description of Artificial Sequence: Synthetic oligonucleotide
uuauugauguaaauagauc

SEQ ID NO: 1303129 - RNA, 19 nt, Artificial Sequence
  Description of Artificial Sequence: Synthetic oligonucleotide
acgacaacagauuauuucu

SEQ ID NO: 1303130 - RNA, 19 nt, Artificial Sequence
  Description of Artificial Sequence: Synthetic oligonucleotide
uuucuacugcauccgaggg

SEQ ID NO: 1303131 - RNA, 19 nt, Artificial Sequence
  Description of Artificial Sequence: Synthetic oligonucleotide
ugcuaaauucaauacaaau

SEQ ID NO: 1303132 - RNA, 19 nt, Artificial Sequence
  Description of Artificial Sequence: Synthetic oligonucleotide
uguuguucgcucaaauuca

SEQ ID NO: 1303133 - RNA, 19 nt, Artificial Sequence
  Description of Artificial Sequence: Synthetic oligonucleotide
uucccaaacaguagugagg

SEQ ID NO: 1303134 - RNA, 19 nt, Artificial Sequence
  Description of Artificial Sequence: Synthetic oligonucleotide
uauaguccuauaauacuga

SEQ ID NO: 1303135 - RNA, 19 nt, Artificial Sequence
  Description of Artificial Sequence: Synthetic oligonucleotide
ugcauuucgaucucauugc

SEQ ID NO: 1303136 - RNA, 19 nt, Artificial Sequence
  Description of Artificial Sequence: Synthetic oligonucleotide
caaaggaauaauucccagg

SEQ ID NO: 1303137 - RNA, 19 nt, Artificial Sequence
  Description of Artificial Sequence: Synthetic oligonucleotide
aagucauaacccaugagug

SEQ ID NO: 1303138 - RNA, 19 nt, Artificial Sequence
  Description of Artificial Sequence: Synthetic oligonucleotide
aucaauuguggaugcacac

SEQ ID NO: 1303139 - RNA, 19 nt, Artificial Sequence
  Description of Artificial Sequence: Synthetic oligonucleotide
agacuggucuauuuauccc

SEQ ID NO: 1303140 - RNA, 19 nt, Artificial Sequence
  Description of Artificial Sequence: Synthetic oligonucleotide
acgccuugcauuucuauac

SEQ ID NO: 1303141 - RNA, 19 nt, Artificial Sequence
  Description of Artificial Sequence: Synthetic oligonucleotide
auacacuuaauuuaugcua

SEQ ID NO: 1303142 - RNA, 19 nt, Artificial Sequence
  Description of Artificial Sequence: Synthetic oligonucleotide
ugguuuaaaucacuagaca

SEQ ID NO: 1303143 - RNA, 19 nt, Artificial Sequence
  Description of Artificial Sequence: Synthetic oligonucleotide
aaucgugcugcuugccucg

SEQ ID NO: 1303144 - RNA, 19 nt, Artificial Sequence
  Description of Artificial Sequence: Synthetic oligonucleotide
agaggcugaauuuaaauua

SEQ ID NO: 1303145 - RNA, 19 nt, Artificial Sequence
  Description of Artificial Sequence: Synthetic oligonucleotide
ucuacagagaaaagccagc

SEQ ID NO: 1303146 - RNA, 19 nt, Artificial Sequence
  Description of Artificial Sequence: Synthetic oligonucleotide
uguuaaacucucccaaaac

SEQ ID NO: 1303147 - RNA, 19 nt, Artificial Sequence
  Description of Artificial Sequence: Synthetic oligonucleotide
uacugaguccaucuaaaga

SEQ ID NO: 1303148 - RNA, 19 nt, Artificial Sequence
  Description of Artificial Sequence: Synthetic oligonucleotide
uuaauugcgucuucacuca

SEQ ID NO: 1303149 - RNA, 19 nt, Artificial Sequence
  Description of Artificial Sequence: Synthetic oligonucleotide
aaacacucgaacacgaacu

SEQ ID NO: 1303150 - RNA, 19 nt, Artificial Sequence
  Description of Artificial Sequence: Synthetic oligonucleotide
uacgaaguuaacuucuccu

SEQ ID NO: 1303151 - RNA, 19 nt, Artificial Sequence
  Description of Artificial Sequence: Synthetic oligonucleotide
uuugccuuggucccaacac

SEQ ID NO: 1303152 - RNA, 19 nt, Artificial Sequence
  Description of Artificial Sequence: Synthetic oligonucleotide
aacaugauccaaacagcac

SEQ ID NO: 1303153 - RNA, 19 nt, Artificial Sequence
  Description of Artificial Sequence: Synthetic oligonucleotide
cacaaaauguauugggaac

SEQ ID NO: 1303154 - RNA, 19 nt, Artificial Sequence
  Description of Artificial Sequence: Synthetic oligonucleotide
uacuacgaaguuaacuucu

SEQ ID NO: 1303155 - RNA, 19 nt, Artificial Sequence
  Description of Artificial Sequence: Synthetic oligonucleotide
ucuauacacaaaauguauu

SEQ ID NO: 1303156 - RNA, 19 nt, Artificial Sequence
  Description of Artificial Sequence: Synthetic oligonucleotide
aggaauaauucccaggaaa

SEQ ID NO: 1303157 - RNA, 19 nt, Artificial Sequence
  Description of Artificial Sequence: Synthetic oligonucleotide
aacacucgaacacgaacug

SEQ ID NO: 1303158 - RNA, 19 nt, Artificial Sequence
  Description of Artificial Sequence: Synthetic oligonucleotide
gaagagguuuaacauagga

SEQ ID NO: 1303159 - RNA, 19 nt, Artificial Sequence
  Description of Artificial Sequence: Synthetic oligonucleotide
uucaucuauguaauaaaua

SEQ ID NO: 1303160 - RNA, 19 nt, Artificial Sequence
  Description of Artificial Sequence: Synthetic oligonucleotide
aacuacuacgaaguuaacu

SEQ ID NO: 1303161 - RNA, 19 nt, Artificial Sequence
  Description of Artificial Sequence: Synthetic oligonucleotide
aaggagaccgaagacaagu

SEQ ID NO: 1303162 - RNA, 19 nt, Artificial Sequence
  Description of Artificial Sequence: Synthetic oligonucleotide
agaauguaccauuuguuau

SEQ ID NO: 1303163 - RNA, 19 nt, Artificial Sequence
  Description of Artificial Sequence: Synthetic oligonucleotide
uuacuuauugauguaaaua

SEQ ID NO: 1303164 - RNA, 19 nt, Artificial Sequence
  Description of Artificial Sequence: Synthetic oligonucleotide
aaagcuggugauaaaagau

SEQ ID NO: 1303165 - RNA, 19 nt, Artificial Sequence
  Description of Artificial Sequence: Synthetic oligonucleotide
uguaccauuuguuauuaua

SEQ ID NO: 1303166 - RNA, 19 nt, Artificial Sequence
  Description of Artificial Sequence: Synthetic oligonucleotide
cuaugguuuaaaucacuag

SEQ ID NO: 1303167 - RNA, 19 nt, Artificial Sequence
  Description of Artificial Sequence: Synthetic oligonucleotide
uguauugggaacccuuuaa

SEQ ID NO: 1303168 - RNA, 19 nt, Artificial Sequence
  Description of Artificial Sequence: Synthetic oligonucleotide
guauaguccuauaauacug

SEQ ID NO: 1303169 - RNA, 19 nt, Artificial Sequence
  Description of Artificial Sequence: Synthetic oligonucleotide
cucaaauaucccuaguguc

SEQ ID NO: 1303170 - RNA, 19 nt, Artificial Sequence
  Description of Artificial Sequence: Synthetic oligonucleotide
agucaguucuauacaaagc

SEQ ID NO: 1303171 - RNA, 19 nt, Artificial Sequence
  Description of Artificial Sequence: Synthetic oligonucleotide
ucccaaacaguagugaggc

SEQ ID NO: 1303172 - RNA, 19 nt, Artificial Sequence
  Description of Artificial Sequence: Synthetic oligonucleotide
aacauaggaacagacuggu

SEQ ID NO: 1303173 - RNA, 19 nt, Artificial Sequence
  Description of Artificial Sequence: Synthetic oligonucleotide
uuuacuuauugauguaaau

SEQ ID NO: 1303174 - RNA, 19 nt, Artificial Sequence
  Description of Artificial Sequence: Synthetic oligonucleotide
aauagaucuuauauucaca

SEQ ID NO: 1303175 - RNA, 19 nt, Artificial Sequence
  Description of Artificial Sequence: Synthetic oligonucleotide
auaaaagauaggaaagcug

SEQ ID NO: 1303176 - RNA, 19 nt, Artificial Sequence
  Description of Artificial Sequence: Synthetic oligonucleotide
aagccguccagcucgaaga

SEQ ID NO: 1303177 - RNA, 19 nt, Artificial Sequence
  Description of Artificial Sequence: Synthetic oligonucleotide
cacuagaagccucagcugc

SEQ ID NO: 1303178 - RNA, 19 nt, Artificial Sequence
  Description of Artificial Sequence: Synthetic oligonucleotide
auuaguaggcuuguggaug

SEQ ID NO: 1303179 - RNA, 19 nt, Artificial Sequence
  Description of Artificial Sequence: Synthetic oligonucleotide
acacagacuuaauugcguc

SEQ ID NO: 1303180 - RNA, 19 nt, Artificial Sequence
  Description of Artificial Sequence: Synthetic oligonucleotide
aauaaacuacuacgaaguu

SEQ ID NO: 1303181 - RNA, 19 nt, Artificial Sequence
  Description of Artificial Sequence: Synthetic oligonucleotide
uaacuaugguuuaaaucac

SEQ ID NO: 1303182 - RNA, 19 nt, Artificial Sequence
  Description of Artificial Sequence: Synthetic oligonucleotide
acuuaauugcgucuucacu

SEQ ID NO: 1303183 - RNA, 19 nt, Artificial Sequence
  Description of Artificial Sequence: Synthetic oligonucleotide
auaguccuauaauacugag

SEQ ID NO: 1303184 - RNA, 19 nt, Artificial Sequence
  Description of Artificial Sequence: Synthetic oligonucleotide
cagacaaaagccuccaauc

SEQ ID NO: 1303185 - RNA, 19 nt, Artificial Sequence
  Description of Artificial Sequence: Synthetic oligonucleotide
guucgauagggguacaaug

SEQ ID NO: 1303186 - RNA, 19 nt, Artificial Sequence
  Description of Artificial Sequence: Synthetic oligonucleotide
auaauacugagcgauauuu

SEQ ID NO: 1303187 - RNA, 19 nt, Artificial Sequence
  Description of Artificial Sequence: Synthetic oligonucleotide
ucugacacuagaagccuca

SEQ ID NO: 1303188 - RNA, 19 nt, Artificial Sequence
  Description of Artificial Sequence: Synthetic oligonucleotide
gaggcaucaauuguggaug

SEQ ID NO: 1303189 - RNA, 19 nt, Artificial Sequence
  Description of Artificial Sequence: Synthetic oligonucleotide
aaaugcacgccuugcauuu

SEQ ID NO: 1303190 - RNA, 19 nt, Artificial Sequence
  Description of Artificial Sequence: Synthetic oligonucleotide
cuguucagcaaguggagag

SEQ ID NO: 1303191 - RNA, 19 nt, Artificial Sequence
  Description of Artificial Sequence: Synthetic oligonucleotide
cuucccaaacaguagugag

SEQ ID NO: 1303192 - RNA, 19 nt, Artificial Sequence
  Description of Artificial Sequence: Synthetic oligonucleotide
cacgacaacagauuauuuc

SEQ ID NO: 1303193 - RNA, 19 nt, Artificial Sequence
  Description of Artificial Sequence: Synthetic oligonucleotide
gucauaacccaugagugag

SEQ ID NO: 1303194 - RNA, 19 nt, Artificial Sequence
  Description of Artificial Sequence: Synthetic oligonucleotide
uuuuaaguacauacaugau

SEQ ID NO: 1303195 - RNA, 19 nt, Artificial Sequence
  Description of Artificial Sequence: Synthetic oligonucleotide
ucuauuuaucccguucuca

SEQ ID NO: 1303196 - RNA, 19 nt, Artificial Sequence
  Description of Artificial Sequence: Synthetic oligonucleotide
ucacaaucacccuuguuuc

SEQ ID NO: 1303197 - RNA, 19 nt, Artificial Sequence
  Description of Artificial Sequence: Synthetic oligonucleotide
aaaagccuccaauccauau

SEQ ID NO: 1303198 - RNA, 19 nt, Artificial Sequence
  Description of Artificial Sequence: Synthetic oligonucleotide
ucacuagacaaaaucuuua

SEQ ID NO: 1303199 - RNA, 19 nt, Artificial Sequence
  Description of Artificial Sequence: Synthetic oligonucleotide
ucagguacagcccuccuua

SEQ ID NO: 1303200 - RNA, 19 nt, Artificial Sequence
  Description of Artificial Sequence: Synthetic oligonucleotide
augauugaaaacacaacca

SEQ ID NO: 1303201 - RNA, 19 nt, Artificial Sequence
  Description of Artificial Sequence: Synthetic oligonucleotide
aguucuauacaaagcaaug

SEQ ID NO: 1303202 - RNA, 19 nt, Artificial Sequence
  Description of Artificial Sequence: Synthetic oligonucleotide
uuaguaggcuuguggaugu

SEQ ID NO: 1303203 - RNA, 19 nt, Artificial Sequence
  Description of Artificial Sequence: Synthetic oligonucleotide
aggacguuaacaaaucgug

SEQ ID NO: 1303204 - RNA, 19 nt, Artificial Sequence
  Description of Artificial Sequence: Synthetic oligonucleotide
aaugguaauucagcaaaau

SEQ ID NO: 1303205 - RNA, 19 nt, Artificial Sequence
  Description of Artificial Sequence: Synthetic oligonucleotide
acguuaacaaaucgugcug

SEQ ID NO: 1303206 - RNA, 19 nt, Artificial Sequence
  Description of Artificial Sequence: Synthetic oligonucleotide
gacguuaacaaaucgugcu

SEQ ID NO: 1303207 - RNA, 19 nt, Artificial Sequence
  Description of Artificial Sequence: Synthetic oligonucleotide
aucauucaaaucaaauaug

SEQ ID NO: 1303208 - RNA, 19 nt, Artificial Sequence
  Description of Artificial Sequence: Synthetic oligonucleotide
aggcaucaauuguggaugc

SEQ ID NO: 1303209 - RNA, 19 nt, Artificial Sequence
  Description of Artificial Sequence: Synthetic oligonucleotide
cuugccucggaguauccag

SEQ ID NO: 1303210 - RNA, 19 nt, Artificial Sequence
  Description of Artificial Sequence: Synthetic oligonucleotide
uuccuauucuuacaucaaa

SEQ ID NO: 1303211 - RNA, 19 nt, Artificial Sequence
  Description of Artificial Sequence: Synthetic oligonucleotide
aaagucucaaauaucccua

SEQ ID NO: 1303212 - RNA, 19 nt, Artificial Sequence
  Description of Artificial Sequence: Synthetic oligonucleotide
uccucacauaaauuucuug

SEQ ID NO: 1303213 - RNA, 19 nt, Artificial Sequence
  Description of Artificial Sequence: Synthetic oligonucleotide
cuuauugauguaaauagau

SEQ ID NO: 1303214 - RNA, 19 nt, Artificial Sequence
  Description of Artificial Sequence: Synthetic oligonucleotide
agcuggucuucccaaacag

SEQ ID NO: 1303215 - RNA, 19 nt, Artificial Sequence
  Description of Artificial Sequence: Synthetic oligonucleotide
uaauacugagcgauauuua

SEQ ID NO: 1303216 - RNA, 19 nt, Artificial Sequence
  Description of Artificial Sequence: Synthetic oligonucleotide
aucacccuuguuucuacag

SEQ ID NO: 1303217 - RNA, 19 nt, Artificial Sequence
  Description of Artificial Sequence: Synthetic oligonucleotide
ucgauagggguacaauggu

SEQ ID NO: 1303218 - RNA, 19 nt, Artificial Sequence
  Description of Artificial Sequence: Synthetic oligonucleotide
agcuggugauaaaagauag

SEQ ID NO: 1303219 - RNA, 19 nt, Artificial Sequence
  Description of Artificial Sequence: Synthetic oligonucleotide
ucaauuguggaugcacaca

SEQ ID NO: 1303220 - RNA, 19 nt, Artificial Sequence
  Description of Artificial Sequence: Synthetic oligonucleotide
caaccaauuguucgauagg

SEQ ID NO: 1303221 - RNA, 19 nt, Artificial Sequence
  Description of Artificial Sequence: Synthetic oligonucleotide
agauucaggguagguaaac

SEQ ID NO: 1303222 - RNA, 19 nt, Artificial Sequence
  Description of Artificial Sequence: Synthetic oligonucleotide
aaaagauaggaaagcuggu

SEQ ID NO: 1303223 - RNA, 19 nt, Artificial Sequence
  Description of Artificial Sequence: Synthetic oligonucleotide
gagccgucaggauuaguag

SEQ ID NO: 1303224 - RNA, 19 nt, Artificial Sequence
  Description of Artificial Sequence: Synthetic oligonucleotide
uugauuuaacuaugguuua

SEQ ID NO: 1303225 - RNA, 19 nt, Artificial Sequence
  Description of Artificial Sequence: Synthetic oligonucleotide
cucggaguauccagaagcc

SEQ ID NO: 1303226 - RNA, 19 nt, Artificial Sequence
  Description of Artificial Sequence: Synthetic oligonucleotide
uauaauacugagcgauauu

SEQ ID NO: 1303227 - RNA, 19 nt, Artificial Sequence
  Description of Artificial Sequence: Synthetic oligonucleotide
gguagguaaacacucgaac

SEQ ID NO: 1303228 - RNA, 19 nt, Artificial Sequence
  Description of Artificial Sequence: Synthetic oligonucleotide
aaauguauugggaacccuu

SEQ ID NO: 1303229 - RNA, 19 nt, Artificial Sequence
  Description of Artificial Sequence: Synthetic oligonucleotide
uggucuauuuaucccguuc

SEQ ID NO: 1303230 - RNA, 19 nt, Artificial Sequence
  Description of Artificial Sequence: Synthetic oligonucleotide
caagucauaacccaugagu

SEQ ID NO: 1303231 - RNA, 19 nt, Artificial Sequence
  Description of Artificial Sequence: Synthetic oligonucleotide
aauguaccauuuguuauua

SEQ ID NO: 1303232 - RNA, 19 nt, Artificial Sequence
  Description of Artificial Sequence: Synthetic oligonucleotide
acuucuccuaauuugugua

SEQ ID NO: 1303233 - RNA, 19 nt, Artificial Sequence
  Description of Artificial Sequence: Synthetic oligonucleotide
gaagccguccagcucgaag

SEQ ID NO: 1303234 - RNA, 19 nt, Artificial Sequence
  Description of Artificial Sequence: Synthetic oligonucleotide
ucccacaagucauaaccca

SEQ ID NO: 1303235 - RNA, 19 nt, Artificial Sequence
  Description of Artificial Sequence: Synthetic oligonucleotide
aaaauguauugggaacccu

SEQ ID NO: 1303236 - RNA, 19 nt, Artificial Sequence
  Description of Artificial Sequence: Synthetic oligonucleotide
ucgaucucauugcuuguga

SEQ ID NO: 1303237 - RNA, 19 nt, Artificial Sequence
  Description of Artificial Sequence: Synthetic oligonucleotide
cuacuacgaaguuaacuuc

SEQ ID NO: 1303238 - RNA, 19 nt, Artificial Sequence
  Description of Artificial Sequence: Synthetic oligonucleotide
acgaacugccagucgcacc

SEQ ID NO: 1303239 - RNA, 19 nt, Artificial Sequence
  Description of Artificial Sequence: Synthetic oligonucleotide
cuacgaaguuaacuucucc

SEQ ID NO: 1303240 - RNA, 19 nt, Artificial Sequence
  Description of Artificial Sequence: Synthetic oligonucleotide
auagggguacaaugguuug

SEQ ID NO: 1303241 - RNA, 19 nt, Artificial Sequence
  Description of Artificial Sequence: Synthetic oligonucleotide
ccuagugucaugaguaagc

SEQ ID NO: 1303242 - RNA, 19 nt, Artificial Sequence
  Description of Artificial Sequence: Synthetic oligonucleotide
ugacacuagaagccucagc

SEQ ID NO: 1303243 - RNA, 19 nt, Artificial Sequence
  Description of Artificial Sequence: Synthetic oligonucleotide
aaguggcaaaugcacgccu

SEQ ID NO: 1303244 - RNA, 19 nt, Artificial Sequence
  Description of Artificial Sequence: Synthetic oligonucleotide
acgugguggccccuggagc

SEQ ID NO: 1303245 - RNA, 19 nt, Artificial Sequence
  Description of Artificial Sequence: Synthetic oligonucleotide
uauuuaucccguucucauc

SEQ ID NO: 1303246 - RNA, 19 nt, Artificial Sequence
  Description of Artificial Sequence: Synthetic oligonucleotide
acucucccaaaacaugaug

SEQ ID NO: 1303247 - RNA, 19 nt, Artificial Sequence
  Description of Artificial Sequence: Synthetic oligonucleotide
cuacugaguccaucuaaag

SEQ ID NO: 1303248 - RNA, 19 nt, Artificial Sequence
  Description of Artificial Sequence: Synthetic oligonucleotide
ugggaacccuuuaaaugug

SEQ ID NO: 1303249 - RNA, 19 nt, Artificial Sequence
  Description of Artificial Sequence: Synthetic oligonucleotide
uucuacugcauccgagggu

SEQ ID NO: 1303250 - RNA, 19 nt, Artificial Sequence
  Description of Artificial Sequence: Synthetic oligonucleotide
ucuccacgacaacagauua

SEQ ID NO: 1303251 - RNA, 19 nt, Artificial Sequence
  Description of Artificial Sequence: Synthetic oligonucleotide
guucuauacaaagcaauga

SEQ ID NO: 1303252 - RNA, 19 nt, Artificial Sequence
  Description of Artificial Sequence: Synthetic oligonucleotide
auaaacuacuacgaaguua

SEQ ID NO: 1303253 - RNA, 19 nt, Artificial Sequence
  Description of Artificial Sequence: Synthetic oligonucleotide
aacuaugguuuaaaucacu

SEQ ID NO: 1303254 - RNA, 19 nt, Artificial Sequence
  Description of Artificial Sequence: Synthetic oligonucleotide
agcuagucauauacaauuc

SEQ ID NO: 1303255 - RNA, 19 nt, Artificial Sequence
  Description of Artificial Sequence: Synthetic oligonucleotide
aggaacaucugaugauuga

SEQ ID NO: 1303256 - RNA, 19 nt, Artificial Sequence
  Description of Artificial Sequence: Synthetic oligonucleotide
gucaggauuaguaggcuug

SEQ ID NO: 1303257 - RNA, 19 nt, Artificial Sequence
  Description of Artificial Sequence: Synthetic oligonucleotide
caaauucauacgaagccaa

SEQ ID NO: 1303258 - RNA, 19 nt, Artificial Sequence
  Description of Artificial Sequence: Synthetic oligonucleotide
gagcuagucauauacaauu

SEQ ID NO: 1303259 - RNA, 19 nt, Artificial Sequence
  Description of Artificial Sequence: Synthetic oligonucleotide
ggauuaguaggcuugugga

SEQ ID NO: 1303260 - RNA, 19 nt, Artificial Sequence
  Description of Artificial Sequence: Synthetic oligonucleotide
ccagaagccguccagcucg

SEQ ID NO: 1303261 - RNA, 19 nt, Artificial Sequence
  Description of Artificial Sequence: Synthetic oligonucleotide
acacucgaacacgaacugc

SEQ ID NO: 1303262 - RNA, 19 nt, Artificial Sequence
  Description of Artificial Sequence: Synthetic oligonucleotide
uccaauccauauccaagaa

SEQ ID NO: 1303263 - RNA, 19 nt, Artificial Sequence
  Description of Artificial Sequence: Synthetic oligonucleotide
auaggaacagacuggucua

SEQ ID NO: 1303264 - RNA, 19 nt, Artificial Sequence
  Description of Artificial Sequence: Synthetic oligonucleotide
agcgauauuuacaagcaaa

SEQ ID NO: 1303265 - RNA, 19 nt, Artificial Sequence
  Description of Artificial Sequence: Synthetic oligonucleotide
ugaucuccacgacaacaga

SEQ ID NO: 1303266 - RNA, 19 nt, Artificial Sequence
  Description of Artificial Sequence: Synthetic oligonucleotide
gaacacgaacugccagucg

SEQ ID NO: 1303267 - RNA, 19 nt, Artificial Sequence
  Description of Artificial Sequence: Synthetic oligonucleotide
acgaaguuaacuucuccua

SEQ ID NO: 1303268 - RNA, 19 nt, Artificial Sequence
  Description of Artificial Sequence: Synthetic oligonucleotide
ucggaguauccagaagccg

SEQ ID NO: 1303269 - RNA, 19 nt, Artificial Sequence
  Description of Artificial Sequence: Synthetic oligonucleotide
aauguauugggaacccuuu

SEQ ID NO: 1303270 - RNA, 19 nt, Artificial Sequence
  Description of Artificial Sequence: Synthetic oligonucleotide
ucuccuaauuuguguaaaa

SEQ ID NO: 1303271 - RNA, 19 nt, Artificial Sequence
  Description of Artificial Sequence: Synthetic oligonucleotide
ugcagguuucuacugcauc

SEQ ID NO: 1303272 - RNA, 19 nt, Artificial Sequence
  Description of Artificial Sequence: Synthetic oligonucleotide
uuaaacuacugaguccauc

SEQ ID NO: 1303273 - RNA, 19 nt, Artificial Sequence
  Description of Artificial Sequence: Synthetic oligonucleotide
aggggcucguucguaaccc

SEQ ID NO: 1303274 - RNA, 19 nt, Artificial Sequence
  Description of Artificial Sequence: Synthetic oligonucleotide
uccuuauggcaucuugaaa

SEQ ID NO: 1303275 - RNA, 19 nt, Artificial Sequence
  Description of Artificial Sequence: Synthetic oligonucleotide
ccucggaguauccagaagc

SEQ ID NO: 1303276 - RNA, 19 nt, Artificial Sequence
  Description of Artificial Sequence: Synthetic oligonucleotide
acugagcgauauuuacaag

SEQ ID NO: 1303277 - RNA, 19 nt, Artificial Sequence
  Description of Artificial Sequence: Synthetic oligonucleotide
acaaaucgugcugcuugcc

SEQ ID NO: 1303278 - RNA, 19 nt, Artificial Sequence
  Description of Artificial Sequence: Synthetic oligonucleotide
ugauuuaacuaugguuuaa

SEQ ID NO: 1303279 - RNA, 19 nt, Artificial Sequence
  Description of Artificial Sequence: Synthetic oligonucleotide
aagucagaggcugaauuua

SEQ ID NO: 1303280 - RNA, 19 nt, Artificial Sequence
  Description of Artificial Sequence: Synthetic oligonucleotide
uccacgacaacagauuauu

SEQ ID NO: 1303281 - RNA, 19 nt, Artificial Sequence
  Description of Artificial Sequence: Synthetic oligonucleotide
uuaucccguucucauccug

SEQ ID NO: 1303282 - RNA, 19 nt, Artificial Sequence
  Description of Artificial Sequence: Synthetic oligonucleotide
aagccagcagagugcacca

SEQ ID NO: 1303283 - RNA, 19 nt, Artificial Sequence
  Description of Artificial Sequence: Synthetic oligonucleotide
acuacgaaguuaacuucuc

SEQ ID NO: 1303284 - RNA, 19 nt, Artificial Sequence
  Description of Artificial Sequence: Synthetic oligonucleotide
aguccucacauaaauuucu

SEQ ID NO: 1303285 - RNA, 19 nt, Artificial Sequence
  Description of Artificial Sequence: Synthetic oligonucleotide
caggaacaucugaugauug

SEQ ID NO: 1303286 - RNA, 19 nt, Artificial Sequence
  Description of Artificial Sequence: Synthetic oligonucleotide
agucgcaccugaucuccac

SEQ ID NO: 1303287 - RNA, 19 nt, Artificial Sequence
  Description of Artificial Sequence: Synthetic oligonucleotide
aaaugguaauucagcaaaa

SEQ ID NO: 1303288 - RNA, 19 nt, Artificial Sequence
  Description of Artificial Sequence: Synthetic oligonucleotide
caucaauuguggaugcaca

SEQ ID NO: 1303289 - RNA, 19 nt, Artificial Sequence
  Description of Artificial Sequence: Synthetic oligonucleotide
auaacaggggcucguucgu

SEQ ID NO: 1303290 - RNA, 19 nt, Artificial Sequence
  Description of Artificial Sequence: Synthetic oligonucleotide
auugauguaaauagaucuu

SEQ ID NO: 1303291 - RNA, 19 nt, Artificial Sequence
  Description of Artificial Sequence: Synthetic oligonucleotide
aagcuggugauaaaagaua

SEQ ID NO: 1303292 - RNA, 19 nt, Artificial Sequence
  Description of Artificial Sequence: Synthetic oligonucleotide
cagagcuagucauauacaa

SEQ ID NO: 1303293 - RNA, 19 nt, Artificial Sequence
  Description of Artificial Sequence: Synthetic oligonucleotide
aaacuacuacgaaguuaac

SEQ ID NO: 1303294 - RNA, 19 nt, Artificial Sequence
  Description of Artificial Sequence: Synthetic oligonucleotide
ugugcccuguuaaacucuc

SEQ ID NO: 1303295 - RNA, 19 nt, Artificial Sequence
  Description of Artificial Sequence: Synthetic oligonucleotide
gaauguaccauuuguuauu

SEQ ID NO: 1303296 - RNA, 19 nt, Artificial Sequence
  Description of Artificial Sequence: Synthetic oligonucleotide
ccucacauaaauuucuuga

SEQ ID NO: 1303297 - RNA, 19 nt, Artificial Sequence
  Description of Artificial Sequence: Synthetic oligonucleotide
aaauuuucacagagcuagu

SEQ ID NO: 1303298 - RNA, 19 nt, Artificial Sequence
  Description of Artificial Sequence: Synthetic oligonucleotide
gaacagacuggucuauuua

SEQ ID NO: 1303299 - RNA, 19 nt, Artificial Sequence
  Description of Artificial Sequence: Synthetic oligonucleotide
gauucaggguagguaaaca

SEQ ID NO: 1303300 - RNA, 19 nt, Artificial Sequence
  Description of Artificial Sequence: Synthetic oligonucleotide
uuucgaucucauugcuugu

SEQ ID NO: 1303301 - RNA, 19 nt, Artificial Sequence
  Description of Artificial Sequence: Synthetic oligonucleotide
ucgcucaaauucauacgaa

SEQ ID NO: 1303302 - RNA, 19 nt, Artificial Sequence
  Description of Artificial Sequence: Synthetic oligonucleotide
uuuaucccguucucauccu

SEQ ID NO: 1303303 - RNA, 19 nt, Artificial Sequence
  Description of Artificial Sequence: Synthetic oligonucleotide
agucucaaauaucccuagu

SEQ ID NO: 1303304 - RNA, 19 nt, Artificial Sequence
  Description of Artificial Sequence: Synthetic oligonucleotide
aaaggagaccgaagacaag

SEQ ID NO: 1303305 - RNA, 19 nt, Artificial Sequence
  Description of Artificial Sequence: Synthetic oligonucleotide
uucuccuaauuuguguaaa

SEQ ID NO: 1303306 - RNA, 19 nt, Artificial Sequence
  Description of Artificial Sequence: Synthetic oligonucleotide
ucgcaccugaucuccacga

SEQ ID NO: 1303307 - RNA, 19 nt, Artificial Sequence
  Description of Artificial Sequence: Synthetic oligonucleotide
uucacucauggguuuccac

SEQ ID NO: 1303308 - RNA, 19 nt, Artificial Sequence
  Description of Artificial Sequence: Synthetic oligonucleotide
uccuuucuguguucugaca

SEQ ID NO: 1303309 - RNA, 19 nt, Artificial Sequence
  Description of Artificial Sequence: Synthetic oligonucleotide
agacuuaauugcgucuuca

SEQ ID NO: 1303310 - RNA, 19 nt, Artificial Sequence
  Description of Artificial Sequence: Synthetic oligonucleotide
gaacaucugaugauugaaa

SEQ ID NO: 1303311 - RNA, 19 nt, Artificial Sequence
  Description of Artificial Sequence: Synthetic oligonucleotide
uguucgauagggguacaau

SEQ ID NO: 1303312 - RNA, 19 nt, Artificial Sequence
  Description of Artificial Sequence: Synthetic oligonucleotide
uccagcucgaagagguuua

SEQ ID NO: 1303313 - RNA, 19 nt, Artificial Sequence
  Description of Artificial Sequence: Synthetic oligonucleotide
caaguggcaaaugcacgcc

SEQ ID NO: 1303314 - RNA, 19 nt, Artificial Sequence
  Description of Artificial Sequence: Synthetic oligonucleotide
gaaguuaacuucuccuaau

SEQ ID NO: 1303315 - RNA, 19 nt, Artificial Sequence
  Description of Artificial Sequence: Synthetic oligonucleotide
acaugcagauucaggguag

SEQ ID NO: 1303316 - RNA, 19 nt, Artificial Sequence
  Description of Artificial Sequence: Synthetic oligonucleotide
aucaaauaugcagguuucu

SEQ ID NO: 1303317 - RNA, 19 nt, Artificial Sequence
  Description of Artificial Sequence: Synthetic oligonucleotide
gucgcaccugaucuccacg

SEQ ID NO: 1303318 - RNA, 19 nt, Artificial Sequence
  Description of Artificial Sequence: Synthetic oligonucleotide
acuacugaguccaucuaaa

SEQ ID NO: 1303319 - RNA, 19 nt, Artificial Sequence
  Description of Artificial Sequence: Synthetic oligonucleotide
caauuguucgauaggggua

SEQ ID NO: 1303320 - RNA, 19 nt, Artificial Sequence
  Description of Artificial Sequence: Synthetic oligonucleotide
aauuguggaugcacacaga

SEQ ID NO: 1303321 - RNA, 19 nt, Artificial Sequence
  Description of Artificial Sequence: Synthetic oligonucleotide
cuguuaaacucucccaaaa

SEQ ID NO: 1303322 - RNA, 19 nt, Artificial Sequence
  Description of Artificial Sequence: Synthetic oligonucleotide
caguagugaggccaagguc

SEQ ID NO: 1303323 - RNA, 19 nt, Artificial Sequence
  Description of Artificial Sequence: Synthetic oligonucleotide
aucccuagugucaugagua

SEQ ID NO: 1303324 - RNA, 19 nt, Artificial Sequence
  Description of Artificial Sequence: Synthetic oligonucleotide
uucguaacccaggacguua

SEQ ID NO: 1303325 - RNA, 19 nt, Artificial Sequence
  Description of Artificial Sequence: Synthetic oligonucleotide
gauuaguaggcuuguggau

SEQ ID NO: 1303326 - RNA, 19 nt, Artificial Sequence
  Description of Artificial Sequence: Synthetic oligonucleotide
aucuuuacuuauugaugua

SEQ ID NO: 1303327 - RNA, 19 nt, Artificial Sequence
  Description of Artificial Sequence: Synthetic oligonucleotide
accgaagacaaguggcaaa

SEQ ID NO: 1303328 - RNA, 19 nt, Artificial Sequence
  Description of Artificial Sequence: Synthetic oligonucleotide
ugucaugaguaagccacaa

SEQ ID NO: 1303329 - RNA, 19 nt, Artificial Sequence
  Description of Artificial Sequence: Synthetic oligonucleotide
gcagauaugcuuguuguuc

SEQ ID NO: 1303330 - RNA, 19 nt, Artificial Sequence
  Description of Artificial Sequence: Synthetic oligonucleotide
ccaauccauauccaagaag

SEQ ID NO: 1303331 - RNA, 19 nt, Artificial Sequence
  Description of Artificial Sequence: Synthetic oligonucleotide
gcgauauuuacaagcaaac

SEQ ID NO: 1303332 - RNA, 19 nt, Artificial Sequence
  Description of Artificial Sequence: Synthetic oligonucleotide
ugcagauaugcuuguuguu

SEQ ID NO: 1303333 - RNA, 19 nt, Artificial Sequence
  Description of Artificial Sequence: Synthetic oligonucleotide
caugcagauucaggguagg

SEQ ID NO: 1303334 - RNA, 19 nt, Artificial Sequence
  Description of Artificial Sequence: Synthetic oligonucleotide
auaacccaugagugaggug

SEQ ID NO: 1303335 - RNA, 19 nt, Artificial Sequence
  Description of Artificial Sequence: Synthetic oligonucleotide
ccaucuaaagaauguacca

SEQ ID NO: 1303336 - RNA, 19 nt, Artificial Sequence
  Description of Artificial Sequence: Synthetic oligonucleotide
uggcaaaugcacgccuugc

SEQ ID NO: 1303337 - RNA, 19 nt, Artificial Sequence
  Description of Artificial Sequence: Synthetic oligonucleotide
cuauuuaucccguucucau

SEQ ID NO: 1303338 - RNA, 19 nt, Artificial Sequence
  Description of Artificial Sequence: Synthetic oligonucleotide
uaccugugcccuguuaaac

SEQ ID NO: 1303339 - RNA, 19 nt, Artificial Sequence
  Description of Artificial Sequence: Synthetic oligonucleotide
gauagggguacaaugguuu

SEQ ID NO: 1303340 - RNA, 19 nt, Artificial Sequence
  Description of Artificial Sequence: Synthetic oligonucleotide
accugaucuccacgacaac

SEQ ID NO: 1303341 - RNA, 19 nt, Artificial Sequence
  Description of Artificial Sequence: Synthetic oligonucleotide
auguauugggaacccuuua

SEQ ID NO: 1303342 - RNA, 19 nt, Artificial Sequence
  Description of Artificial Sequence: Synthetic oligonucleotide
caaacaguagugaggccaa

SEQ ID NO: 1303343 - RNA, 19 nt, Artificial Sequence
  Description of Artificial Sequence: Synthetic oligonucleotide
agaccgaagacaaguggca

SEQ ID NO: 1303344 - RNA, 19 nt, Artificial Sequence
  Description of Artificial Sequence: Synthetic oligonucleotide
ggacguuaacaaaucgugc

SEQ ID NO: 1303345 - RNA, 19 nt, Artificial Sequence
  Description of Artificial Sequence: Synthetic oligonucleotide
uaauugcgucuucacucau

SEQ ID NO: 1303346 - RNA, 19 nt, Artificial Sequence
  Description of Artificial Sequence: Synthetic oligonucleotide
cacaugcagauucagggua

SEQ ID NO: 1303347 - RNA, 19 nt, Artificial Sequence
  Description of Artificial Sequence: Synthetic oligonucleotide
gagacgugguggccccugg

SEQ ID NO: 1303348 - RNA, 19 nt, Artificial Sequence
  Description of Artificial Sequence: Synthetic oligonucleotide
agagcuagucauauacaau

SEQ ID NO: 1303349 - RNA, 19 nt, Artificial Sequence
  Description of Artificial Sequence: Synthetic oligonucleotide
acagagcuagucauauaca

SEQ ID NO: 1303350 - RNA, 19 nt, Artificial Sequence
  Description of Artificial Sequence: Synthetic oligonucleotide
caccugaucuccacgacaa

SEQ ID NO: 1303351 - RNA, 19 nt, Artificial Sequence
  Description of Artificial Sequence: Synthetic oligonucleotide
agguuucuacugcauccga

SEQ ID NO: 1303352 - RNA, 19 nt, Artificial Sequence
  Description of Artificial Sequence: Synthetic oligonucleotide
agaaauuuucacagagcua

SEQ ID NO: 1303353 - RNA, 19 nt, Artificial Sequence
  Description of Artificial Sequence: Synthetic oligonucleotide
gguuucuacugcauccgag

SEQ ID NO: 1303354 - RNA, 19 nt, Artificial Sequence
  Description of Artificial Sequence: Synthetic oligonucleotide
guuaacaaaucgugcugcu

SEQ ID NO: 1303355 - RNA, 19 nt, Artificial Sequence
  Description of Artificial Sequence: Synthetic oligonucleotide
gguaaacacucgaacacga

SEQ ID NO: 1303356 - RNA, 19 nt, Artificial Sequence
  Description of Artificial Sequence: Synthetic oligonucleotide
aggcuuguggauguaccug

SEQ ID NO: 1303357 - RNA, 19 nt, Artificial Sequence
  Description of Artificial Sequence: Synthetic oligonucleotide
ccaggacguuaacaaaucg

SEQ ID NO: 1303358 - RNA, 19 nt, Artificial Sequence
  Description of Artificial Sequence: Synthetic oligonucleotide
acaaucacccuuguuucua

SEQ ID NO: 1303359 - RNA, 19 nt, Artificial Sequence
  Description of Artificial Sequence: Synthetic oligonucleotide
gcuggugauaaaagauagg

SEQ ID NO: 1303360 - RNA, 19 nt, Artificial Sequence
  Description of Artificial Sequence: Synthetic oligonucleotide
cuucuccuaauuuguguaa

SEQ ID NO: 1303361 - RNA, 19 nt, Artificial Sequence
  Description of Artificial Sequence: Synthetic oligonucleotide
agcaaguggagagccguca

SEQ ID NO: 1303362 - RNA, 19 nt, Artificial Sequence
  Description of Artificial Sequence: Synthetic oligonucleotide
cugcagauaugcuuguugu

SEQ ID NO: 1303363 - RNA, 19 nt, Artificial Sequence
  Description of Artificial Sequence: Synthetic oligonucleotide
caggacguuaacaaaucgu

SEQ ID NO: 1303364 - RNA, 19 nt, Artificial Sequence
  Description of Artificial Sequence: Synthetic oligonucleotide
gcaucaauuguggaugcac

SEQ ID NO: 1303365 - RNA, 19 nt, Artificial Sequence
  Description of Artificial Sequence: Synthetic oligonucleotide
uggauguaccugugcccug

SEQ ID NO: 1303366 - RNA, 19 nt, Artificial Sequence
  Description of Artificial Sequence: Synthetic oligonucleotide
caggggcucguucguaacc

SEQ ID NO: 1303367 - RNA, 19 nt, Artificial Sequence
  Description of Artificial Sequence: Synthetic oligonucleotide
ugccucggaguauccagaa

SEQ ID NO: 1303368 - RNA, 19 nt, Artificial Sequence
  Description of Artificial Sequence: Synthetic oligonucleotide
ggucuauuuaucccguucu

SEQ ID NO: 1303369 - RNA, 19 nt, Artificial Sequence
  Description of Artificial Sequence: Synthetic oligonucleotide
ccaaacaguagugaggcca

SEQ ID NO: 1303370 - RNA, 19 nt, Artificial Sequence
  Description of Artificial Sequence: Synthetic oligonucleotide
cagcagguuagcauggucu

SEQ ID NO: 1303371 - RNA, 19 nt, Artificial Sequence
  Description of Artificial Sequence: Synthetic oligonucleotide
cagacuuaauugcgucuuc

SEQ ID NO: 1303372 - RNA, 19 nt, Artificial Sequence
  Description of Artificial Sequence: Synthetic oligonucleotide
cuccaauaacaggggcucg

SEQ ID NO: 1303373 - RNA, 19 nt, Artificial Sequence
  Description of Artificial Sequence: Synthetic oligonucleotide
cucguucguaacccaggac

SEQ ID NO: 1303374 - RNA, 19 nt, Artificial Sequence
  Description of Artificial Sequence: Synthetic oligonucleotide
cguuaacaaaucgugcugc

SEQ ID NO: 1303375 - RNA, 19 nt, Artificial Sequence
  Description of Artificial Sequence: Synthetic oligonucleotide
guugacaguuucccaggaa

SEQ ID NO: 1303376 - RNA, 19 nt, Artificial Sequence
  Description of Artificial Sequence: Synthetic oligonucleotide
augauccaaacagcacaug

SEQ ID NO: 1303377 - RNA, 19 nt, Artificial Sequence
  Description of Artificial Sequence: Synthetic oligonucleotide
ggguacaaugguuugggcu

SEQ ID NO: 1303378 - RNA, 19 nt, Artificial Sequence
  Description of Artificial Sequence: Synthetic oligonucleotide
caugauccaaacagcacau

SEQ ID NO: 1303379 - RNA, 19 nt, Artificial Sequence
  Description of Artificial Sequence: Synthetic oligonucleotide
acacaaccaauuguucgau

SEQ ID NO: 1303380 - RNA, 19 nt, Artificial Sequence
  Description of Artificial Sequence: Synthetic oligonucleotide
ugcuugccucggaguaucc

SEQ ID NO: 1303381 - RNA, 19 nt, Artificial Sequence
  Description of Artificial Sequence: Synthetic oligonucleotide
gcaaguggagagccgucag

SEQ ID NO: 1303382 - RNA, 19 nt, Artificial Sequence
  Description of Artificial Sequence: Synthetic oligonucleotide
uuguucgauagggguacaa

SEQ ID NO: 1303383 - RNA, 19 nt, Artificial Sequence
  Description of Artificial Sequence: Synthetic oligonucleotide
cagaggcugaauuuaaauu

SEQ ID NO: 1303384 - RNA, 19 nt, Artificial Sequence
  Description of Artificial Sequence: Synthetic oligonucleotide
ccauuuguuauuauacacu

SEQ ID NO: 1303385 - RNA, 19 nt, Artificial Sequence
  Description of Artificial Sequence: Synthetic oligonucleotide
cugacacuagaagccucag

SEQ ID NO: 1303386 - RNA, 19 nt, Artificial Sequence
  Description of Artificial Sequence: Synthetic oligonucleotide
ggagagacgugguggcccc

SEQ ID NO: 1303387 - RNA, 19 nt, Artificial Sequence
  Description of Artificial Sequence: Synthetic oligonucleotide
cugccagucgcaccugauc

SEQ ID NO: 1303388 - RNA, 19 nt, Artificial Sequence
  Description of Artificial Sequence: Synthetic oligonucleotide
auacccagucaguucuaua

SEQ ID NO: 1303389 - RNA, 19 nt, Artificial Sequence
  Description of Artificial Sequence: Synthetic oligonucleotide
gaucuccacgacaacagau

SEQ ID NO: 1303390 - RNA, 19 nt, Artificial Sequence
  Description of Artificial Sequence: Synthetic oligonucleotide
ccuugcauuucuauacaca

SEQ ID NO: 1303391 - RNA, 19 nt, Artificial Sequence
  Description of Artificial Sequence: Synthetic oligonucleotide
caucuaaagaauguaccau

SEQ ID NO: 1303392 - RNA, 19 nt, Artificial Sequence
  Description of Artificial Sequence: Synthetic oligonucleotide
cuuguuguucgcucaaauu

SEQ ID NO: 1303393 - RNA, 19 nt, Artificial Sequence
  Description of Artificial Sequence: Synthetic oligonucleotide
ccaauuguucgauaggggu

SEQ ID NO: 1303394 - RNA, 19 nt, Artificial Sequence
  Description of Artificial Sequence: Synthetic oligonucleotide
ggcucguucguaacccagg

SEQ ID NO: 1303395 - RNA, 19 nt, Artificial Sequence
  Description of Artificial Sequence: Synthetic oligonucleotide
ccuauucuuacaucaaagu

SEQ ID NO: 1303396 - RNA, 19 nt, Artificial Sequence
  Description of Artificial Sequence: Synthetic oligonucleotide
cacagacuuaauugcgucu

SEQ ID NO: 1303397 - RNA, 19 nt, Artificial Sequence
  Description of Artificial Sequence: Synthetic oligonucleotide
cacgccuugcauuucuaua

SEQ ID NO: 1303398 - RNA, 19 nt, Artificial Sequence
  Description of Artificial Sequence: Synthetic oligonucleotide
gggagagacgugguggccc

SEQ ID NO: 1303399 - RNA, 19 nt, Artificial Sequence
  Description of Artificial Sequence: Synthetic oligonucleotide
caaaucgugcugcuugccu

SEQ ID NO: 1303400 - RNA, 19 nt, Artificial Sequence
  Description of Artificial Sequence: Synthetic oligonucleotide
cagauucaggguagguaaa

SEQ ID NO: 1303401 - RNA, 19 nt, Artificial Sequence
  Description of Artificial Sequence: Synthetic oligonucleotide
cauaacccaugagugaggu

SEQ ID NO: 1303402 - RNA, 19 nt, Artificial Sequence
  Description of Artificial Sequence: Synthetic oligonucleotide
ugcacgccuugcauuucua

SEQ ID NO: 1303403 - RNA, 19 nt, Artificial Sequence
  Description of Artificial Sequence: Synthetic oligonucleotide
caaaugcacgccuugcauu

SEQ ID NO: 1303404 - RNA, 19 nt, Artificial Sequence
  Description of Artificial Sequence: Synthetic oligonucleotide
agacgugguggccccugga

SEQ ID NO: 1303405 - RNA, 19 nt, Artificial Sequence
  Description of Artificial Sequence: Synthetic oligonucleotide
auacgaagccaaagcuggu

SEQ ID NO: 1303406 - RNA, 19 nt, Artificial Sequence
  Description of Artificial Sequence: Synthetic oligonucleotide
aguggcaaaugcacgccuu

SEQ ID NO: 1303407 - RNA, 19 nt, Artificial Sequence
  Description of Artificial Sequence: Synthetic oligonucleotide
acccuuguuucuacagaga

SEQ ID NO: 1303408 - RNA, 19 nt, Artificial Sequence
  Description of Artificial Sequence: Synthetic oligonucleotide
ccagucgcaccugaucucc

SEQ ID NO: 1303409 - RNA, 19 nt, Artificial Sequence
  Description of Artificial Sequence: Synthetic oligonucleotide
gcaccugaucuccacgaca

SEQ ID NO: 1303410 - RNA, 19 nt, Artificial Sequence
  Description of Artificial Sequence: Synthetic oligonucleotide
ucgugcugcuugccucgga

SEQ ID NO: 1303411 - RNA, 19 nt, Artificial Sequence
  Description of Artificial Sequence: Synthetic oligonucleotide
auuguucgauagggguaca

SEQ ID NO: 1303412 - RNA, 19 nt, Artificial Sequence
  Description of Artificial Sequence: Synthetic oligonucleotide
gcucguucguaacccagga

SEQ ID NO: 1303413 - RNA, 19 nt, Artificial Sequence
  Description of Artificial Sequence: Synthetic oligonucleotide
uaacaggggcucguucgua

SEQ ID NO: 1303414 - RNA, 19 nt, Artificial Sequence
  Description of Artificial Sequence: Synthetic oligonucleotide
gucagaggcugaauuuaaa

SEQ ID NO: 1303415 - RNA, 19 nt, Artificial Sequence
  Description of Artificial Sequence: Synthetic oligonucleotide
cgaagagguuuaacauagg

SEQ ID NO: 1303416 - RNA, 19 nt, Artificial Sequence
  Description of Artificial Sequence: Synthetic oligonucleotide
aggaacagacuggucuauu

SEQ ID NO: 1303417 - RNA, 19 nt, Artificial Sequence
  Description of Artificial Sequence: Synthetic oligonucleotide
cacaaccaauuguucgaua

SEQ ID NO: 1303418 - RNA, 19 nt, Artificial Sequence
  Description of Artificial Sequence: Synthetic oligonucleotide
gccuccaauccauauccaa

SEQ ID NO: 1303419 - RNA, 19 nt, Artificial Sequence
  Description of Artificial Sequence: Synthetic oligonucleotide
cagcucgaagagguuuaac

SEQ ID NO: 1303420 - RNA, 19 nt, Artificial Sequence
  Description of Artificial Sequence: Synthetic oligonucleotide
gccucggaguauccagaag

SEQ ID NO: 1303421 - RNA, 19 nt, Artificial Sequence
  Description of Artificial Sequence: Synthetic oligonucleotide
ggaacagacuggucuauuu

SEQ ID NO: 1303422 - RNA, 19 nt, Artificial Sequence
  Description of Artificial Sequence: Synthetic oligonucleotide
cgaaguuaacuucuccuaa

SEQ ID NO: 1303423 - RNA, 19 nt, Artificial Sequence
  Description of Artificial Sequence: Synthetic oligonucleotide
ggguagguaaacacucgaa

SEQ ID NO: 1303424 - RNA, 19 nt, Artificial Sequence
  Description of Artificial Sequence: Synthetic oligonucleotide
gcuguucagcaaguggaga

SEQ ID NO: 1303425 - RNA, 19 nt, Artificial Sequence
  Description of Artificial Sequence: Synthetic oligonucleotide
cugugcccuguuaaacucu

SEQ ID NO: 1303426 - RNA, 19 nt, Artificial Sequence
  Description of Artificial Sequence: Synthetic oligonucleotide
caaaucaaauaugcagguu

SEQ ID NO: 1303427 - RNA, 19 nt, Artificial Sequence
  Description of Artificial Sequence: Synthetic oligonucleotide
gggcucguucguaacccag

SEQ ID NO: 1303428 - RNA, 19 nt, Artificial Sequence
  Description of Artificial Sequence: Synthetic oligonucleotide
cccaaacaguagugaggcc

SEQ ID NO: 1303429 - RNA, 19 nt, Artificial Sequence
  Description of Artificial Sequence: Synthetic oligonucleotide
agcccuccuuauggcaucu

SEQ ID NO: 1303430 - RNA, 19 nt, Artificial Sequence
  Description of Artificial Sequence: Synthetic oligonucleotide
cuccacgacaacagauuau

SEQ ID NO: 1303431 - RNA, 19 nt, Artificial Sequence
  Description of Artificial Sequence: Synthetic oligonucleotide
acugccagucgcaccugau

SEQ ID NO: 1303432 - RNA, 19 nt, Artificial Sequence
  Description of Artificial Sequence: Synthetic oligonucleotide
cgaacacgaacugccaguc

SEQ ID NO: 1303433 - RNA, 19 nt, Artificial Sequence
  Description of Artificial Sequence: Synthetic oligonucleotide
cagucgcaccugaucucca

SEQ ID NO: 1303434 - RNA, 19 nt, Artificial Sequence
  Description of Artificial Sequence: Synthetic oligonucleotide
ggcaucaauuguggaugca

SEQ ID NO: 1303435 - RNA, 19 nt, Artificial Sequence
  Description of Artificial Sequence: Synthetic oligonucleotide
cgaacugccagucgcaccu

SEQ ID NO: 1303436 - RNA, 19 nt, Artificial Sequence
  Description of Artificial Sequence: Synthetic oligonucleotide
cggaguauccagaagccgu

SEQ ID NO: 1303437 - RNA, 19 nt, Artificial Sequence
  Description of Artificial Sequence: Synthetic oligonucleotide
ggauguaccugugcccugu

SEQ ID NO: 1303438 - RNA, 19 nt, Artificial Sequence
  Description of Artificial Sequence: Synthetic oligonucleotide
ggggcucguucguaaccca

SEQ ID NO: 1303439 - RNA, 19 nt, Artificial Sequence
  Description of Artificial Sequence: Synthetic oligonucleotide
guccucacauaaauuucuu

SEQ ID NO: 1303440 - RNA, 19 nt, Artificial Sequence
  Description of Artificial Sequence: Synthetic oligonucleotide
gcuugccucggaguaucca

SEQ ID NO: 1303441 - RNA, 19 nt, Artificial Sequence
  Description of Artificial Sequence: Synthetic oligonucleotide
caucagguacagcccuccu

SEQ ID NO: 1303442 - RNA, 19 nt, Artificial Sequence
  Description of Artificial Sequence: Synthetic oligonucleotide
cgaagacaaguggcaaaug

SEQ ID NO: 1303443 - RNA, 19 nt, Artificial Sequence
  Description of Artificial Sequence: Synthetic oligonucleotide
cccacaagucauaacccau

SEQ ID NO: 1303444 - RNA, 19 nt, Artificial Sequence
  Description of Artificial Sequence: Synthetic oligonucleotide
cguaacccaggacguuaac

SEQ ID NO: 1303445 - RNA, 19 nt, Artificial Sequence
  Description of Artificial Sequence: Synthetic oligonucleotide
gcuggucuucccaaacagu

SEQ ID NO: 1303446 - RNA, 19 nt, Artificial Sequence
  Description of Artificial Sequence: Synthetic oligonucleotide
cguucguaacccaggacgu

SEQ ID NO: 1303447 - RNA, 19 nt, Artificial Sequence
  Description of Artificial Sequence: Synthetic oligonucleotide
guucguaacccaggacguu

SEQ ID NO: 1303448 - RNA, 19 nt, Artificial Sequence
  Description of Artificial Sequence: Synthetic oligonucleotide
cuggucuauuuaucccguu

SEQ ID NO: 1303449 - RNA, 19 nt, Artificial Sequence
  Description of Artificial Sequence: Synthetic oligonucleotide
gcgucuucacucauggguu

SEQ ID NO: 1303450 - RNA, 19 nt, Artificial Sequence
  Description of Artificial Sequence: Synthetic oligonucleotide
cgcaccugaucuccacgac

SEQ ID NO: 1303451 - RNA, 19 nt, Artificial Sequence
  Description of Artificial Sequence: Synthetic oligonucleotide
ccgaagacaaguggcaaau

SEQ ID NO: 1303452 - RNA, 19 nt, Artificial Sequence
  Description of Artificial Sequence: Synthetic oligonucleotide
gagagccgucaggauuagu

SEQ ID NO: 1303453 - RNA, 19 nt, Artificial Sequence
  Description of Artificial Sequence: Synthetic oligonucleotide
gagagacgugguggccccu

SEQ ID NO: 1303454 - RNA, 19 nt, Artificial Sequence
  Description of Artificial Sequence: Synthetic oligonucleotide
ccacgacaacagauuauuu

SEQ ID NO: 1303455 - RNA, 19 nt, Artificial Sequence
  Description of Artificial Sequence: Synthetic oligonucleotide
cgucaggauuaguaggcuu

SEQ ID NO: 1303456 - RNA, 19 nt, Artificial Sequence
  Description of Artificial Sequence: Synthetic oligonucleotide
ccaauaacaggggcucguu

SEQ ID NO: 1303457 - RNA, 19 nt, Artificial Sequence
  Description of Artificial Sequence: Synthetic oligonucleotide
ccgucaggauuaguaggcu

SEQ ID NO: 1303458 - RNA, 19 nt, Artificial Sequence
  Description of Artificial Sequence: Synthetic oligonucleotide
gcccuccuuauggcaucuu

SEQ ID NO: 1303459 - RNA, 19 nt, Artificial Sequence
  Description of Artificial Sequence: Synthetic oligonucleotide
aauagaaccacacuccagc

SEQ ID NO: 1303460 - RNA, 19 nt, Artificial Sequence
  Description of Artificial Sequence: Synthetic oligonucleotide
uauucagugcuccagaucc

SEQ ID NO: 1303461 - RNA, 19 nt, Artificial Sequence
  Description of Artificial Sequence: Synthetic oligonucleotide
aauccacuaacgcacauuc

SEQ ID NO: 1303462 - RNA, 19 nt, Artificial Sequence
  Description of Artificial Sequence: Synthetic oligonucleotide
cuuauuaacagaccgacag

SEQ ID NO: 1303463 - RNA, 19 nt, Artificial Sequence
  Description of Artificial Sequence: Synthetic oligonucleotide
uuaacagaccgacagcugg

SEQ ID NO: 1303464 - RNA, 19 nt, Artificial Sequence
  Description of Artificial Sequence: Synthetic oligonucleotide
uaaacgucgaagcugaucu

SEQ ID NO: 1303465 - RNA, 19 nt, Artificial Sequence
  Description of Artificial Sequence: Synthetic oligonucleotide
gaaccgacgaaccacauag

SEQ ID NO: 1303466 - RNA, 19 nt, Artificial Sequence
  Description of Artificial Sequence: Synthetic oligonucleotide
acgucaacugcacaaagcc

SEQ ID NO: 1303467 - RNA, 19 nt, Artificial Sequence
  Description of Artificial Sequence: Synthetic oligonucleotide
uguaggaaacucaaggugu

SEQ ID NO: 1303468 - RNA, 19 nt, Artificial Sequence
  Description of Artificial Sequence: Synthetic oligonucleotide
aagggaguaacagacuggc

SEQ ID NO: 1303469 - RNA, 19 nt, Artificial Sequence
  Description of Artificial Sequence: Synthetic oligonucleotide
uuuaucaggguugagcaag

SEQ ID NO: 1303470 - RNA, 19 nt, Artificial Sequence
  Description of Artificial Sequence: Synthetic oligonucleotide
agagcuguguauucagugc

SEQ ID NO: 1303471 - RNA, 19 nt, Artificial Sequence
  Description of Artificial Sequence: Synthetic oligonucleotide
aacgucgaagcugaucucc

SEQ ID NO: 1303472 - RNA, 19 nt, Artificial Sequence
  Description of Artificial Sequence: Synthetic oligonucleotide
auaaccuccaucaggaagg

SEQ ID NO: 1303473 - RNA, 19 nt, Artificial Sequence
  Description of Artificial Sequence: Synthetic oligonucleotide
accgacgaaccacauagcc

SEQ ID NO: 1303474 - RNA, 19 nt, Artificial Sequence
  Description of Artificial Sequence: Synthetic oligonucleotide
ucauaaggugacaggacag

SEQ ID NO: 1303475 - RNA, 19 nt, Artificial Sequence
  Description of Artificial Sequence: Synthetic oligonucleotide
aagagcugaauagaaccac

SEQ ID NO: 1303476 - RNA, 19 nt, Artificial Sequence
  Description of Artificial Sequence: Synthetic oligonucleotide
ucugaguagcccauggucu

SEQ ID NO: 1303477 - RNA, 19 nt, Artificial Sequence
  Description of Artificial Sequence: Synthetic oligonucleotide
uguguugucugcagcacag

SEQ ID NO: 1303478 - RNA, 19 nt, Artificial Sequence
  Description of Artificial Sequence: Synthetic oligonucleotide
auugugucauucucuuggc

SEQ ID NO: 1303479 - RNA, 19 nt, Artificial Sequence
  Description of Artificial Sequence: Synthetic oligonucleotide
agauacaaggccucuucgg

SEQ ID NO: 1303480 - RNA, 19 nt, Artificial Sequence
  Description of Artificial Sequence: Synthetic oligonucleotide
ugaaucugaaaggagaguc

SEQ ID NO: 1303481 - RNA, 19 nt, Artificial Sequence
  Description of Artificial Sequence: Synthetic oligonucleotide
uguugucugcagcacagag

SEQ ID NO: 1303482 - RNA, 19 nt, Artificial Sequence
  Description of Artificial Sequence: Synthetic oligonucleotide
auagccguccaaguuaagc

SEQ ID NO: 1303483 - RNA, 19 nt, Artificial Sequence
  Description of Artificial Sequence: Synthetic oligonucleotide
ugguaaacgucgaagcuga

SEQ ID NO: 1303484 - RNA, 19 nt, Artificial Sequence
  Description of Artificial Sequence: Synthetic oligonucleotide
acuggaggcugccagacuc

SEQ ID NO: 1303485 - RNA, 19 nt, Artificial Sequence
  Description of Artificial Sequence: Synthetic oligonucleotide
uucuuauuaacagaccgac

SEQ ID NO: 1303486 - RNA, 19 nt, Artificial Sequence
  Description of Artificial Sequence: Synthetic oligonucleotide
aguguaggaaacucaaggu

SEQ ID NO: 1303487 - RNA, 19 nt, Artificial Sequence
  Description of Artificial Sequence: Synthetic oligonucleotide
auagccuagucucuucagg

SEQ ID NO: 1303488 - RNA, 19 nt, Artificial Sequence
  Description of Artificial Sequence: Synthetic oligonucleotide
uggguacugguuauucugg

SEQ ID NO: 1303489 - RNA, 19 nt, Artificial Sequence
  Description of Artificial Sequence: Synthetic oligonucleotide
gaagaccugauaguguagg

SEQ ID NO: 1303490 - RNA, 19 nt, Artificial Sequence
  Description of Artificial Sequence: Synthetic oligonucleotide
ugaagcuauagaaggagau

SEQ ID NO: 1303491 - RNA, 19 nt, Artificial Sequence
  Description of Artificial Sequence: Synthetic oligonucleotide
cauaaccuccaucaggaag

SEQ ID NO: 1303492 - RNA, 19 nt, Artificial Sequence
  Description of Artificial Sequence: Synthetic oligonucleotide
ugcuuuaucaggguugagc

SEQ ID NO: 1303493 - RNA, 19 nt, Artificial Sequence
  Description of Artificial Sequence: Synthetic oligonucleotide
ugcguucacauccucccgg

SEQ ID NO: 1303494 - RNA, 19 nt, Artificial Sequence
  Description of Artificial Sequence: Synthetic oligonucleotide
ccuucuuauuaacagaccg

SEQ ID NO: 1303495 - RNA, 19 nt, Artificial Sequence
  Description of Artificial Sequence: Synthetic oligonucleotide
uguguauucagugcuccag

SEQ ID NO: 1303496 - RNA, 19 nt, Artificial Sequence
  Description of Artificial Sequence: Synthetic oligonucleotide
uuagcuggaaccgacgaac

SEQ ID NO: 1303497 - RNA, 19 nt, Artificial Sequence
  Description of Artificial Sequence: Synthetic oligonucleotide
gggaguaacagacuggccc

SEQ ID NO: 1303498 - RNA, 19 nt, Artificial Sequence
  Description of Artificial Sequence: Synthetic oligonucleotide
ucuuauuaacagaccgaca

SEQ ID NO: 1303499 - RNA, 19 nt, Artificial Sequence
  Description of Artificial Sequence: Synthetic oligonucleotide
caucaaauccacuaacgca

SEQ ID NO: 1303500 - RNA, 19 nt, Artificial Sequence
  Description of Artificial Sequence: Synthetic oligonucleotide
ucucauaaggugacaggac

SEQ ID NO: 1303501 - RNA, 19 nt, Artificial Sequence
  Description of Artificial Sequence: Synthetic oligonucleotide
gaagcuauagaaggagaug

SEQ ID NO: 1303502 - RNA, 19 nt, Artificial Sequence
  Description of Artificial Sequence: Synthetic oligonucleotide
ucggaacguagccacagca

SEQ ID NO: 1303503 - RNA, 19 nt, Artificial Sequence
  Description of Artificial Sequence: Synthetic oligonucleotide
uagccguccaaguuaagcu

SEQ ID NO: 1303504 - RNA, 19 nt, Artificial Sequence
  Description of Artificial Sequence: Synthetic oligonucleotide
ugaagaccugauaguguag

SEQ ID NO: 1303505 - RNA, 19 nt, Artificial Sequence
  Description of Artificial Sequence: Synthetic oligonucleotide
acuaacgcacauucggaca

SEQ ID NO: 1303506 - RNA, 19 nt, Artificial Sequence
  Description of Artificial Sequence: Synthetic oligonucleotide
caagggaguaacagacugg

SEQ ID NO: 1303507 - RNA, 19 nt, Artificial Sequence
  Description of Artificial Sequence: Synthetic oligonucleotide
aaacgucgaagcugaucuc

SEQ ID NO: 1303508 - RNA, 19 nt, Artificial Sequence
  Description of Artificial Sequence: Synthetic oligonucleotide
ucaaauccacuaacgcaca

SEQ ID NO: 1303509 - RNA, 19 nt, Artificial Sequence
  Description of Artificial Sequence: Synthetic oligonucleotide
aaguccguuggggccaugc

SEQ ID NO: 1303510 - RNA, 19 nt, Artificial Sequence
  Description of Artificial Sequence: Synthetic oligonucleotide
ugucccucgcccaaugaca

SEQ ID NO: 1303511 - RNA, 19 nt, Artificial Sequence
  Description of Artificial Sequence: Synthetic oligonucleotide
gaaaaggccaauccccaga

SEQ ID NO: 1303512 - RNA, 19 nt, Artificial Sequence
  Description of Artificial Sequence: Synthetic oligonucleotide
gaccugauaguguaggaaa

SEQ ID NO: 1303513 - RNA, 19 nt, Artificial Sequence
  Description of Artificial Sequence: Synthetic oligonucleotide
aagaccugauaguguagga

SEQ ID NO: 1303514 - RNA, 19 nt, Artificial Sequence
  Description of Artificial Sequence: Synthetic oligonucleotide
uagccuagucucuucaggu

SEQ ID NO: 1303515 - RNA, 19 nt, Artificial Sequence
  Description of Artificial Sequence: Synthetic oligonucleotide
ucuccgggaaagcuucucc

SEQ ID NO: 1303516 - RNA, 19 nt, Artificial Sequence
  Description of Artificial Sequence: Synthetic oligonucleotide
uuucggaacguagccacag

SEQ ID NO: 1303517 - RNA, 19 nt, Artificial Sequence
  Description of Artificial Sequence: Synthetic oligonucleotide
uuggcuccauucuggauug

SEQ ID NO: 1303518 - RNA, 19 nt, Artificial Sequence
  Description of Artificial Sequence: Synthetic oligonucleotide
uccguuggggccaugcgac

SEQ ID NO: 1303519 - RNA, 19 nt, Artificial Sequence
  Description of Artificial Sequence: Synthetic oligonucleotide
aacguagccacagcaucag

SEQ ID NO: 1303520 - RNA, 19 nt, Artificial Sequence
  Description of Artificial Sequence: Synthetic oligonucleotide
ucugcuuuaucaggguuga

SEQ ID NO: 1303521 - RNA, 19 nt, Artificial Sequence
  Description of Artificial Sequence: Synthetic oligonucleotide
accgaugcuugcugguccc

SEQ ID NO: 1303522 - RNA, 19 nt, Artificial Sequence
  Description of Artificial Sequence: Synthetic oligonucleotide
cuucuuauuaacagaccga

SEQ ID NO: 1303523 - RNA, 19 nt, Artificial Sequence
  Description of Artificial Sequence: Synthetic oligonucleotide
gagauguguugaaggaccg

SEQ ID NO: 1303524 - RNA, 19 nt, Artificial Sequence
  Description of Artificial Sequence: Synthetic oligonucleotide
ugugaagucucugaagcua

SEQ ID NO: 1303525 - RNA, 19 nt, Artificial Sequence
  Description of Artificial Sequence: Synthetic oligonucleotide
ugguaggucaaccgcuuga

SEQ ID NO: 1303526 - RNA, 19 nt, Artificial Sequence
  Description of Artificial Sequence: Synthetic oligonucleotide
uaacagaccgacagcugga

SEQ ID NO: 1303527 - RNA, 19 nt, Artificial Sequence
  Description of Artificial Sequence: Synthetic oligonucleotide
uacaaggccucuucggggu

SEQ ID NO: 1303528 - RNA, 19 nt, Artificial Sequence
  Description of Artificial Sequence: Synthetic oligonucleotide
aacgcacauucggacauag

SEQ ID NO: 1303529 - RNA, 19 nt, Artificial Sequence
  Description of Artificial Sequence: Synthetic oligonucleotide
uguauucagugcuccagau

SEQ ID NO: 1303530 - RNA, 19 nt, Artificial Sequence
  Description of Artificial Sequence: Synthetic oligonucleotide
cucugaguagcccaugguc

SEQ ID NO: 1303531 - RNA, 19 nt, Artificial Sequence
  Description of Artificial Sequence: Synthetic oligonucleotide
agacucauggguggcaggg

SEQ ID NO: 1303532 - RNA, 19 nt, Artificial Sequence
  Description of Artificial Sequence: Synthetic oligonucleotide
aucaggaagguguguuguc

SEQ ID NO: 1303533 - RNA, 19 nt, Artificial Sequence
  Description of Artificial Sequence: Synthetic oligonucleotide
cagcccauaaccuccauca

SEQ ID NO: 1303534 - RNA, 19 nt, Artificial Sequence
  Description of Artificial Sequence: Synthetic oligonucleotide
aacucaagguguccucagu

SEQ ID NO: 1303535 - RNA, 19 nt, Artificial Sequence
  Description of Artificial Sequence: Synthetic oligonucleotide
cacuaacgcacauucggac

SEQ ID NO: 1303536 - RNA, 19 nt, Artificial Sequence
  Description of Artificial Sequence: Synthetic oligonucleotide
cugguaaacgucgaagcug

SEQ ID NO: 1303537 - RNA, 19 nt, Artificial Sequence
  Description of Artificial Sequence: Synthetic oligonucleotide
auccucccuagacagagca

SEQ ID NO: 1303538 - RNA, 19 nt, Artificial Sequence
  Description of Artificial Sequence: Synthetic oligonucleotide
agacgucaacugcacaaag

SEQ ID NO: 1303539 - RNA, 19 nt, Artificial Sequence
  Description of Artificial Sequence: Synthetic oligonucleotide
gacgucaacugcacaaagc

SEQ ID NO: 1303540 - RNA, 19 nt, Artificial Sequence
  Description of Artificial Sequence: Synthetic oligonucleotide
cugguuauucuggucacag

SEQ ID NO: 1303541 - RNA, 19 nt, Artificial Sequence
  Description of Artificial Sequence: Synthetic oligonucleotide
cagagcuuagcuggaaccg

SEQ ID NO: 1303542 - RNA, 19 nt, Artificial Sequence
  Description of Artificial Sequence: Synthetic oligonucleotide
ugaaggaccguggcugggg

SEQ ID NO: 1303543 - RNA, 19 nt, Artificial Sequence
  Description of Artificial Sequence: Synthetic oligonucleotide
gcaagggaguaacagacug

SEQ ID NO: 1303544 - RNA, 19 nt, Artificial Sequence
  Description of Artificial Sequence: Synthetic oligonucleotide
guucacauccucccggaac

SEQ ID NO: 1303545 - RNA, 19 nt, Artificial Sequence
  Description of Artificial Sequence: Synthetic oligonucleotide
aggucaaccgcuugaggcu

SEQ ID NO: 1303546 - RNA, 19 nt, Artificial Sequence
  Description of Artificial Sequence: Synthetic oligonucleotide
acaggcucaucaaauccac

SEQ ID NO: 1303547 - RNA, 19 nt, Artificial Sequence
  Description of Artificial Sequence: Synthetic oligonucleotide
gcaacugucgccucugcag

SEQ ID NO: 1303548 - RNA, 19 nt, Artificial Sequence
  Description of Artificial Sequence: Synthetic oligonucleotide
aucugcguucacauccucc

SEQ ID NO: 1303549 - RNA, 19 nt, Artificial Sequence
  Description of Artificial Sequence: Synthetic oligonucleotide
cgcacauucggacauaggg

SEQ ID NO: 1303550 - RNA, 19 nt, Artificial Sequence
  Description of Artificial Sequence: Synthetic oligonucleotide
agccguccaaguuaagcug

SEQ ID NO: 1303551 - RNA, 19 nt, Artificial Sequence
  Description of Artificial Sequence: Synthetic oligonucleotide
caacugucgccucugcagc

SEQ ID NO: 1303552 - RNA, 19 nt, Artificial Sequence
  Description of Artificial Sequence: Synthetic oligonucleotide
cauagccuagucucuucag

SEQ ID NO: 1303553 - RNA, 19 nt, Artificial Sequence
  Description of Artificial Sequence: Synthetic oligonucleotide
gaccgaugcuugcuggucc

SEQ ID NO: 1303554 - RNA, 19 nt, Artificial Sequence
  Description of Artificial Sequence: Synthetic oligonucleotide
uuuucggaacguagccaca

SEQ ID NO: 1303555 - RNA, 19 nt, Artificial Sequence
  Description of Artificial Sequence: Synthetic oligonucleotide
cugguucagcuuuuggcac

SEQ ID NO: 1303556 - RNA, 19 nt, Artificial Sequence
  Description of Artificial Sequence: Synthetic oligonucleotide
guaggucaaccgcuugagg

SEQ ID NO: 1303557 - RNA, 19 nt, Artificial Sequence
  Description of Artificial Sequence: Synthetic oligonucleotide
aaccgacgaaccacauagc

SEQ ID NO: 1303558 - RNA, 19 nt, Artificial Sequence
  Description of Artificial Sequence: Synthetic oligonucleotide
cugaguagcccauggucug

SEQ ID NO: 1303559 - RNA, 19 nt, Artificial Sequence
  Description of Artificial Sequence: Synthetic oligonucleotide
auaggguuugccaggguug

SEQ ID NO: 1303560 - RNA, 19 nt, Artificial Sequence
  Description of Artificial Sequence: Synthetic oligonucleotide
ucugggaccgcgagcgcgc

SEQ ID NO: 1303561 - RNA, 19 nt, Artificial Sequence
  Description of Artificial Sequence: Synthetic oligonucleotide
cugaagaccugauagugua

SEQ ID NO: 1303562 - RNA, 19 nt, Artificial Sequence
  Description of Artificial Sequence: Synthetic oligonucleotide
aguggcaggucuugguaga

SEQ ID NO: 1303563 - RNA, 19 nt, Artificial Sequence
  Description of Artificial Sequence: Synthetic oligonucleotide
agcuauagaaggagauguc

SEQ ID NO: 1303564 - RNA, 19 nt, Artificial Sequence
  Description of Artificial Sequence: Synthetic oligonucleotide
aguccguuggggccaugcg

SEQ ID NO: 1303565 - RNA, 19 nt, Artificial Sequence
  Description of Artificial Sequence: Synthetic oligonucleotide
uucggaacguagccacagc

SEQ ID NO: 1303566 - RNA, 19 nt, Artificial Sequence
  Description of Artificial Sequence: Synthetic oligonucleotide
aggaaacucaagguguccu

SEQ ID NO: 1303567 - RNA, 19 nt, Artificial Sequence
  Description of Artificial Sequence: Synthetic oligonucleotide
agccuagucucuucaggug

SEQ ID NO: 1303568 - RNA, 19 nt, Artificial Sequence
  Description of Artificial Sequence: Synthetic oligonucleotide
agccugguaaacgucgaag

SEQ ID NO: 1303569 - RNA, 19 nt, Artificial Sequence
  Description of Artificial Sequence: Synthetic oligonucleotide
cucaaaguuccagcgugcc

SEQ ID NO: 1303570 - RNA, 19 nt, Artificial Sequence
  Description of Artificial Sequence: Synthetic oligonucleotide
cuggaccgaugcuugcugg

SEQ ID NO: 1303571 - RNA, 19 nt, Artificial Sequence
  Description of Artificial Sequence: Synthetic oligonucleotide
aacugcuggaccgaugcuu

SEQ ID NO: 1303572 - RNA, 19 nt, Artificial Sequence
  Description of Artificial Sequence: Synthetic oligonucleotide
gaacguagccacagcauca

SEQ ID NO: 1303573 - RNA, 19 nt, Artificial Sequence
  Description of Artificial Sequence: Synthetic oligonucleotide
auucagugcuccagauccc

SEQ ID NO: 1303574 - RNA, 19 nt, Artificial Sequence
  Description of Artificial Sequence: Synthetic oligonucleotide
ucugguaggucaaccgcuu

SEQ ID NO: 1303575 - RNA, 19 nt, Artificial Sequence
  Description of Artificial Sequence: Synthetic oligonucleotide
auuaacagaccgacagcug

SEQ ID NO: 1303576 - RNA, 19 nt, Artificial Sequence
  Description of Artificial Sequence: Synthetic oligonucleotide
guauucagugcuccagauc

SEQ ID NO: 1303577 - RNA, 19 nt, Artificial Sequence
  Description of Artificial Sequence: Synthetic oligonucleotide
cagagauguguugaaggac

SEQ ID NO: 1303578 - RNA, 19 nt, Artificial Sequence
  Description of Artificial Sequence: Synthetic oligonucleotide
uuccagcgugccuuaggag

SEQ ID NO: 1303579 - RNA, 19 nt, Artificial Sequence
  Description of Artificial Sequence: Synthetic oligonucleotide
uucagugcuccagaucccu

SEQ ID NO: 1303580 - RNA, 19 nt, Artificial Sequence
  Description of Artificial Sequence: Synthetic oligonucleotide
cuugccagucccguccucc

SEQ ID NO: 1303581 - RNA, 19 nt, Artificial Sequence
  Description of Artificial Sequence: Synthetic oligonucleotide
uucucuggguacugguuau

SEQ ID NO: 1303582 - RNA, 19 nt, Artificial Sequence
  Description of Artificial Sequence: Synthetic oligonucleotide
guguauucagugcuccaga

SEQ ID NO: 1303583 - RNA, 19 nt, Artificial Sequence
  Description of Artificial Sequence: Synthetic oligonucleotide
agagcugaauagaaccaca

SEQ ID NO: 1303584 - RNA, 19 nt, Artificial Sequence
  Description of Artificial Sequence: Synthetic oligonucleotide
ggagacgucaacugcacaa

SEQ ID NO: 1303585 - RNA, 19 nt, Artificial Sequence
  Description of Artificial Sequence: Synthetic oligonucleotide
ucugucccucgcccaauga

SEQ ID NO: 1303586 - RNA, 19 nt, Artificial Sequence
  Description of Artificial Sequence: Synthetic oligonucleotide
cucgggucuccacucggcg

SEQ ID NO: 1303587 - RNA, 19 nt, Artificial Sequence
  Description of Artificial Sequence: Synthetic oligonucleotide
gagcuguguauucagugcu

SEQ ID NO: 1303588 - RNA, 19 nt, Artificial Sequence
  Description of Artificial Sequence: Synthetic oligonucleotide
agcccugcaccucgggauc

SEQ ID NO: 1303589 - RNA, 19 nt, Artificial Sequence
  Description of Artificial Sequence: Synthetic oligonucleotide
caggagacgucaacugcac

SEQ ID NO: 1303590 - RNA, 19 nt, Artificial Sequence
  Description of Artificial Sequence: Synthetic oligonucleotide
guaaacgucgaagcugauc

SEQ ID NO: 1303591 - RNA, 19 nt, Artificial Sequence
  Description of Artificial Sequence: Synthetic oligonucleotide
agaccugauaguguaggaa

SEQ ID NO: 1303592 - RNA, 19 nt, Artificial Sequence
  Description of Artificial Sequence: Synthetic oligonucleotide
gagaugucaccaugaucca

SEQ ID NO: 1303593 - RNA, 19 nt, Artificial Sequence
  Description of Artificial Sequence: Synthetic oligonucleotide
agcccauaaccuccaucag

SEQ ID NO: 1303594 - RNA, 19 nt, Artificial Sequence
  Description of Artificial Sequence: Synthetic oligonucleotide
gcuauagaaggagauguca

SEQ ID NO: 1303595 - RNA, 19 nt, Artificial Sequence
  Description of Artificial Sequence: Synthetic oligonucleotide
ugaguagcccauggucugc

SEQ ID NO: 1303596 - RNA, 19 nt, Artificial Sequence
  Description of Artificial Sequence: Synthetic oligonucleotide
agggaguaacagacuggcc

SEQ ID NO: 1303597 - RNA, 19 nt, Artificial Sequence
  Description of Artificial Sequence: Synthetic oligonucleotide
cugucccucgcccaaugac

SEQ ID NO: 1303598 - RNA, 19 nt, Artificial Sequence
  Description of Artificial Sequence: Synthetic oligonucleotide
gaaccacauagccuagucu

SEQ ID NO: 1303599 - RNA, 19 nt, Artificial Sequence
  Description of Artificial Sequence: Synthetic oligonucleotide
cuccuggcgacaccggcgc

SEQ ID NO: 1303600 - RNA, 19 nt, Artificial Sequence
  Description of Artificial Sequence: Synthetic oligonucleotide
caccaagcugccccaggcg

SEQ ID NO: 1303601 - RNA, 19 nt, Artificial Sequence
  Description of Artificial Sequence: Synthetic oligonucleotide
uggaccgaugcuugcuggu

SEQ ID NO: 1303602 - RNA, 19 nt, Artificial Sequence
  Description of Artificial Sequence: Synthetic oligonucleotide
gguugagcaagggaguaac

SEQ ID NO: 1303603 - RNA, 19 nt, Artificial Sequence
  Description of Artificial Sequence: Synthetic oligonucleotide
gaaucugcuuuaucagggu

SEQ ID NO: 1303604 - RNA, 19 nt, Artificial Sequence
  Description of Artificial Sequence: Synthetic oligonucleotide
agcuuagcuggaaccgacg

SEQ ID NO: 1303605 - RNA, 19 nt, Artificial Sequence
  Description of Artificial Sequence: Synthetic oligonucleotide
cuggaaccgacgaaccaca

SEQ ID NO: 1303606 - RNA, 19 nt, Artificial Sequence
  Description of Artificial Sequence: Synthetic oligonucleotide
auccacuaacgcacauucg

SEQ ID NO: 1303607 - RNA, 19 nt, Artificial Sequence
  Description of Artificial Sequence: Synthetic oligonucleotide
uacucccgccagcuggagc

SEQ ID NO: 1303608 - RNA, 19 nt, Artificial Sequence
  Description of Artificial Sequence: Synthetic oligonucleotide
cugcaccucgggaucugcg

SEQ ID NO: 1303609 - RNA, 19 nt, Artificial Sequence
  Description of Artificial Sequence: Synthetic oligonucleotide
caucagccugguaaacguc

SEQ ID NO: 1303610 - RNA, 19 nt, Artificial Sequence
  Description of Artificial Sequence: Synthetic oligonucleotide
uucggacauaggguuugcc

SEQ ID NO: 1303611 - RNA, 19 nt, Artificial Sequence
  Description of Artificial Sequence: Synthetic oligonucleotide
cucgcccaaugacauuggc

SEQ ID NO: 1303612 - RNA, 19 nt, Artificial Sequence
  Description of Artificial Sequence: Synthetic oligonucleotide
gaaggaccguggcugggga

SEQ ID NO: 1303613 - RNA, 19 nt, Artificial Sequence
  Description of Artificial Sequence: Synthetic oligonucleotide
gguacugguuauucugguc

SEQ ID NO: 1303614 - RNA, 19 nt, Artificial Sequence
  Description of Artificial Sequence: Synthetic oligonucleotide
cccugaaucugaaaggaga

SEQ ID NO: 1303615 - RNA, 19 nt, Artificial Sequence
  Description of Artificial Sequence: Synthetic oligonucleotide
ggaaacucaagguguccuc

SEQ ID NO: 1303616 - RNA, 19 nt, Artificial Sequence
  Description of Artificial Sequence: Synthetic oligonucleotide
cacauucggacauaggguu

SEQ ID NO: 1303617 - RNA, 19 nt, Artificial Sequence
  Description of Artificial Sequence: Synthetic oligonucleotide
guuggggccaugcgaccgc

SEQ ID NO: 1303618 - RNA, 19 nt, Artificial Sequence
  Description of Artificial Sequence: Synthetic oligonucleotide
gagacgucaacugcacaaa

SEQ ID NO: 1303619 - RNA, 19 nt, Artificial Sequence
  Description of Artificial Sequence: Synthetic oligonucleotide
caccaugauccaccagggc

SEQ ID NO: 1303620 - RNA, 19 nt, Artificial Sequence
  Description of Artificial Sequence: Synthetic oligonucleotide
ccagcgugccuuaggagcc

SEQ ID NO: 1303621 - RNA, 19 nt, Artificial Sequence
  Description of Artificial Sequence: Synthetic oligonucleotide
gcuggucccggucucuccg

SEQ ID NO: 1303622 - RNA, 19 nt, Artificial Sequence
  Description of Artificial Sequence: Synthetic oligonucleotide
gacgaaccacauagccuag

SEQ ID NO: 1303623 - RNA, 19 nt, Artificial Sequence
  Description of Artificial Sequence: Synthetic oligonucleotide
uugccagucccguccucca

SEQ ID NO: 1303624 - RNA, 19 nt, Artificial Sequence
  Description of Artificial Sequence: Synthetic oligonucleotide
aggagacgucaacugcaca

SEQ ID NO: 1303625 - RNA, 19 nt, Artificial Sequence
  Description of Artificial Sequence: Synthetic oligonucleotide
gcugccagacucaugggug

SEQ ID NO: 1303626 - RNA, 19 nt, Artificial Sequence
  Description of Artificial Sequence: Synthetic oligonucleotide
cuuagcuggaaccgacgaa

SEQ ID NO: 1303627 - RNA, 19 nt, Artificial Sequence
  Description of Artificial Sequence: Synthetic oligonucleotide
uccccagagcuguguauuc

SEQ ID NO: 1303628 - RNA, 19 nt, Artificial Sequence
  Description of Artificial Sequence: Synthetic oligonucleotide
acaaggccucuucggggug

SEQ ID NO: 1303629 - RNA, 19 nt, Artificial Sequence
  Description of Artificial Sequence: Synthetic oligonucleotide
cuaacgcacauucggacau

SEQ ID NO: 1303630 - RNA, 19 nt, Artificial Sequence
  Description of Artificial Sequence: Synthetic oligonucleotide
cugguaggucaaccgcuug

SEQ ID NO: 1303631 - RNA, 19 nt, Artificial Sequence
  Description of Artificial Sequence: Synthetic oligonucleotide
gcuuagcuggaaccgacga

SEQ ID NO: 1303632 - RNA, 19 nt, Artificial Sequence
  Description of Artificial Sequence: Synthetic oligonucleotide
uggaaccgacgaaccacau

SEQ ID NO: 1303633 - RNA, 19 nt, Artificial Sequence
  Description of Artificial Sequence: Synthetic oligonucleotide
cuggucccggucucuccgg

SEQ ID NO: 1303634 - RNA, 19 nt, Artificial Sequence
  Description of Artificial Sequence: Synthetic oligonucleotide
cucggcggccaccaagcug

SEQ ID NO: 1303635 - RNA, 19 nt, Artificial Sequence
  Description of Artificial Sequence: Synthetic oligonucleotide
gaucugcguucacauccuc

SEQ ID NO: 1303636 - RNA, 19 nt, Artificial Sequence
  Description of Artificial Sequence: Synthetic oligonucleotide
cccaaagguguggagggcg

SEQ ID NO: 1303637 - RNA, 19 nt, Artificial Sequence
  Description of Artificial Sequence: Synthetic oligonucleotide
cauagccguccaaguuaag

SEQ ID NO: 1303638 - RNA, 19 nt, Artificial Sequence
  Description of Artificial Sequence: Synthetic oligonucleotide
acauaggguuugccagggu

SEQ ID NO: 1303639 - RNA, 19 nt, Artificial Sequence
  Description of Artificial Sequence: Synthetic oligonucleotide
ggccaugcgaccgcugagg

SEQ ID NO: 1303640 - RNA, 19 nt, Artificial Sequence
  Description of Artificial Sequence: Synthetic oligonucleotide
aggccaauccccagagcug

SEQ ID NO: 1303641 - RNA, 19 nt, Artificial Sequence
  Description of Artificial Sequence: Synthetic oligonucleotide
ccuccuggcgacaccggcg

SEQ ID NO: 1303642 - RNA, 19 nt, Artificial Sequence
  Description of Artificial Sequence: Synthetic oligonucleotide
cauaggguuugccaggguu

SEQ ID NO: 1303643 - RNA, 19 nt, Artificial Sequence
  Description of Artificial Sequence: Synthetic oligonucleotide
guaacagacuggccccaaa

SEQ ID NO: 1303644 - RNA, 19 nt, Artificial Sequence
  Description of Artificial Sequence: Synthetic oligonucleotide
aggaccguggcuggggaau

SEQ ID NO: 1303645 - RNA, 19 nt, Artificial Sequence
  Description of Artificial Sequence: Synthetic oligonucleotide
cuccgagccgucggggagg

SEQ ID NO: 1303646 - RNA, 19 nt, Artificial Sequence
  Description of Artificial Sequence: Synthetic oligonucleotide
gcaggagacgucaacugca

SEQ ID NO: 1303647 - RNA, 19 nt, Artificial Sequence
  Description of Artificial Sequence: Synthetic oligonucleotide
auugggcauagccguccaa

SEQ ID NO: 1303648 - RNA, 19 nt, Artificial Sequence
  Description of Artificial Sequence: Synthetic oligonucleotide
ucaaccgcuugaggcugca

SEQ ID NO: 1303649 - RNA, 19 nt, Artificial Sequence
  Description of Artificial Sequence: Synthetic oligonucleotide
uggcggcuaucugaagcca

SEQ ID NO: 1303650 - RNA, 19 nt, Artificial Sequence
  Description of Artificial Sequence: Synthetic oligonucleotide
ggucaaccgcuugaggcug

SEQ ID NO: 1303651 - RNA, 19 nt, Artificial Sequence
  Description of Artificial Sequence: Synthetic oligonucleotide
gaggguguggcggcuaucu

SEQ ID NO: 1303652 - RNA, 19 nt, Artificial Sequence
  Description of Artificial Sequence: Synthetic oligonucleotide
agguguccucagucagcag

SEQ ID NO: 1303653 - RNA, 19 nt, Artificial Sequence
  Description of Artificial Sequence: Synthetic oligonucleotide
cccuagacagagcagggca

SEQ ID NO: 1303654 - RNA, 19 nt, Artificial Sequence
  Description of Artificial Sequence: Synthetic oligonucleotide
aggguugagcaagggagua

SEQ ID NO: 1303655 - RNA, 19 nt, Artificial Sequence
  Description of Artificial Sequence: Synthetic oligonucleotide
uccaagccucuggacuucu

SEQ ID NO: 1303656 - RNA, 19 nt, Artificial Sequence
  Description of Artificial Sequence: Synthetic oligonucleotide
cucgggaucugcguucaca

SEQ ID NO: 1303657 - RNA, 19 nt, Artificial Sequence
  Description of Artificial Sequence: Synthetic oligonucleotide
acgcacauucggacauagg

SEQ ID NO: 1303658 - RNA, 19 nt, Artificial Sequence
  Description of Artificial Sequence: Synthetic oligonucleotide
aguaacagacuggccccaa

SEQ ID NO: 1303659 - RNA, 19 nt, Artificial Sequence
  Description of Artificial Sequence: Synthetic oligonucleotide
acgaaccacauagccuagu

SEQ ID NO: 1303660 - RNA, 19 nt, Artificial Sequence
  Description of Artificial Sequence: Synthetic oligonucleotide
gccaugcgaccgcugaggc

SEQ ID NO: 1303661 - RNA, 19 nt, Artificial Sequence
  Description of Artificial Sequence: Synthetic oligonucleotide
cgacgaaccacauagccua

SEQ ID NO: 1303662 - RNA, 19 nt, Artificial Sequence
  Description of Artificial Sequence: Synthetic oligonucleotide
aggaggguguggcggcuau

SEQ ID NO: 1303663 - RNA, 19 nt, Artificial Sequence
  Description of Artificial Sequence: Synthetic oligonucleotide
ccccugaaucugaaaggag

SEQ ID NO: 1303664 - RNA, 19 nt, Artificial Sequence
  Description of Artificial Sequence: Synthetic oligonucleotide
gacucauggguggcaggga

SEQ ID NO: 1303665 - RNA, 19 nt, Artificial Sequence
  Description of Artificial Sequence: Synthetic oligonucleotide
cauugggcauagccgucca

SEQ ID NO: 1303666 - RNA, 19 nt, Artificial Sequence
  Description of Artificial Sequence: Synthetic oligonucleotide
cuggcgacaccggcgcagc

SEQ ID NO: 1303667 - RNA, 19 nt, Artificial Sequence
  Description of Artificial Sequence: Synthetic oligonucleotide
ccacuaacgcacauucgga

SEQ ID NO: 1303668 - RNA, 19 nt, Artificial Sequence
  Description of Artificial Sequence: Synthetic oligonucleotide
cgcaggagacgucaacugc

SEQ ID NO: 1303669 - RNA, 19 nt, Artificial Sequence
  Description of Artificial Sequence: Synthetic oligonucleotide
gcgacaccggcgcagccgc

SEQ ID NO: 1303670 - RNA, 19 nt, Artificial Sequence
  Description of Artificial Sequence: Synthetic oligonucleotide
cauggguggcagggaauuc

SEQ ID NO: 1303671 - RNA, 19 nt, Artificial Sequence
  Description of Artificial Sequence: Synthetic oligonucleotide
uggcgacaccggcgcagcc

SEQ ID NO: 1303672 - RNA, 19 nt, Artificial Sequence
  Description of Artificial Sequence: Synthetic oligonucleotide
uaacgcacauucggacaua

SEQ ID NO: 1303673 - RNA, 19 nt, Artificial Sequence
  Description of Artificial Sequence: Synthetic oligonucleotide
guguggcggcuaucugaag

SEQ ID NO: 1303674 - RNA, 19 nt, Artificial Sequence
  Description of Artificial Sequence: Synthetic oligonucleotide
cccacauccucccuagaca

SEQ ID NO: 1303675 - RNA, 19 nt, Artificial Sequence
  Description of Artificial Sequence: Synthetic oligonucleotide
gguguggcggcuaucugaa

SEQ ID NO: 1303676 - RNA, 19 nt, Artificial Sequence
  Description of Artificial Sequence: Synthetic oligonucleotide
uggggccaugcgaccgcug

SEQ ID NO: 1303677 - RNA, 19 nt, Artificial Sequence
  Description of Artificial Sequence: Synthetic oligonucleotide
ggauagacaguggcagguc

SEQ ID NO: 1303678 - RNA, 19 nt, Artificial Sequence
  Description of Artificial Sequence: Synthetic oligonucleotide
uuccgcugguucagcuuuu

SEQ ID NO: 1303679 - RNA, 19 nt, Artificial Sequence
  Description of Artificial Sequence: Synthetic oligonucleotide
ccgcaggagacgucaacug

SEQ ID NO: 1303680 - RNA, 19 nt, Artificial Sequence
  Description of Artificial Sequence: Synthetic oligonucleotide
cuuuuggcaccaggacuca

SEQ ID NO: 1303681 - RNA, 19 nt, Artificial Sequence
  Description of Artificial Sequence: Synthetic oligonucleotide
aaggccucuucggggugaa

SEQ ID NO: 1303682 - RNA, 19 nt, Artificial Sequence
  Description of Artificial Sequence: Synthetic oligonucleotide
agcccauggucugccagaa

SEQ ID NO: 1303683 - RNA, 19 nt, Artificial Sequence
  Description of Artificial Sequence: Synthetic oligonucleotide
cuuccgcugguucagcuuu

SEQ ID NO: 1303684 - RNA, 19 nt, Artificial Sequence
  Description of Artificial Sequence: Synthetic oligonucleotide
uuggggccaugcgaccgcu

SEQ ID NO: 1303685 - RNA, 19 nt, Artificial Sequence
  Description of Artificial Sequence: Synthetic oligonucleotide
gucaaccgcuugaggcugc

SEQ ID NO: 1303686 - RNA, 19 nt, Artificial Sequence
  Description of Artificial Sequence: Synthetic oligonucleotide
uccgagccgucggggagga

SEQ ID NO: 1303687 - RNA, 19 nt, Artificial Sequence
  Description of Artificial Sequence: Synthetic oligonucleotide
gcacauucggacauagggu

SEQ ID NO: 1303688 - RNA, 19 nt, Artificial Sequence
  Description of Artificial Sequence: Synthetic oligonucleotide
ggaaccgacgaaccacaua

SEQ ID NO: 1303689 - RNA, 19 nt, Artificial Sequence
  Description of Artificial Sequence: Synthetic oligonucleotide
agccgucggggaggaaguc

SEQ ID NO: 1303690 - RNA, 19 nt, Artificial Sequence
  Description of Artificial Sequence: Synthetic oligonucleotide
gcggcuaucugaagccaug

SEQ ID NO: 1303691 - RNA, 19 nt, Artificial Sequence
  Description of Artificial Sequence: Synthetic oligonucleotide
gcauagccguccaaguuaa

SEQ ID NO: 1303692 - RNA, 19 nt, Artificial Sequence
  Description of Artificial Sequence: Synthetic oligonucleotide
ccucgggucuccacucggc

SEQ ID NO: 1303693 - RNA, 19 nt, Artificial Sequence
  Description of Artificial Sequence: Synthetic oligonucleotide
augcgaccgcugaggcagc

SEQ ID NO: 1303694 - RNA, 19 nt, Artificial Sequence
  Description of Artificial Sequence: Synthetic oligonucleotide
cagcgugccuuaggagccc

SEQ ID NO: 1303695 - RNA, 19 nt, Artificial Sequence
  Description of Artificial Sequence: Synthetic oligonucleotide
gcguucacauccucccgga

SEQ ID NO: 1303696 - RNA, 19 nt, Artificial Sequence
  Description of Artificial Sequence: Synthetic oligonucleotide
agcagcccauaaccuccau

SEQ ID NO: 1303697 - RNA, 19 nt, Artificial Sequence
  Description of Artificial Sequence: Synthetic oligonucleotide
gggccuccgagccgucggg

SEQ ID NO: 1303698 - RNA, 19 nt, Artificial Sequence
  Description of Artificial Sequence: Synthetic oligonucleotide
cugggaccgcgagcgcgcg

SEQ ID NO: 1303699 - RNA, 19 nt, Artificial Sequence
  Description of Artificial Sequence: Synthetic oligonucleotide
ccugguaaacgucgaagcu

SEQ ID NO: 1303700 - RNA, 19 nt, Artificial Sequence
  Description of Artificial Sequence: Synthetic oligonucleotide
gaccgcgagcgcgcggcgc

SEQ ID NO: 1303701 - RNA, 19 nt, Artificial Sequence
  Description of Artificial Sequence: Synthetic oligonucleotide
caaauccacuaacgcacau

SEQ ID NO: 1303702 - RNA, 19 nt, Artificial Sequence
  Description of Artificial Sequence: Synthetic oligonucleotide
ugcgaccgcugaggcagcu

SEQ ID NO: 1303703 - RNA, 19 nt, Artificial Sequence
  Description of Artificial Sequence: Synthetic oligonucleotide
gccgucggggaggaagucc

SEQ ID NO: 1303704 - RNA, 19 nt, Artificial Sequence
  Description of Artificial Sequence: Synthetic oligonucleotide
gucgccucugcagcagcuc

SEQ ID NO: 1303705 - RNA, 19 nt, Artificial Sequence
  Description of Artificial Sequence: Synthetic oligonucleotide
ccuccgagccgucggggag

SEQ ID NO: 1303706 - RNA, 19 nt, Artificial Sequence
  Description of Artificial Sequence: Synthetic oligonucleotide
cguuggggccaugcgaccg

SEQ ID NO: 1303707 - RNA, 19 nt, Artificial Sequence
  Description of Artificial Sequence: Synthetic oligonucleotide
cagcccugcaccucgggau

SEQ ID NO: 1303708 - RNA, 19 nt, Artificial Sequence
  Description of Artificial Sequence: Synthetic oligonucleotide
gagccgucggggaggaagu

SEQ ID NO: 1303709 - RNA, 19 nt, Artificial Sequence
  Description of Artificial Sequence: Synthetic oligonucleotide
caccggcgcagccgcucgg

SEQ ID NO: 1303710 - RNA, 19 nt, Artificial Sequence
  Description of Artificial Sequence: Synthetic oligonucleotide
ccuggcgacaccggcgcag

SEQ ID NO: 1303711 - RNA, 19 nt, Artificial Sequence
  Description of Artificial Sequence: Synthetic oligonucleotide
cagccugguaaacgucgaa

SEQ ID NO: 1303712 - RNA, 19 nt, Artificial Sequence
  Description of Artificial Sequence: Synthetic oligonucleotide
cauuggccgggagcagcuc

SEQ ID NO: 1303713 - RNA, 19 nt, Artificial Sequence
  Description of Artificial Sequence: Synthetic oligonucleotide
ccgacgaaccacauagccu

SEQ ID NO: 1303714 - RNA, 19 nt, Artificial Sequence
  Description of Artificial Sequence: Synthetic oligonucleotide
ggccaauccccagagcugu

SEQ ID NO: 1303715 - RNA, 19 nt, Artificial Sequence
  Description of Artificial Sequence: Synthetic oligonucleotide
cgaccgcugaggcagcuuc

SEQ ID NO: 1303716 - RNA, 19 nt, Artificial Sequence
  Description of Artificial Sequence: Synthetic oligonucleotide
ccugauaguguaggaaacu

SEQ ID NO: 1303717 - RNA, 19 nt, Artificial Sequence
  Description of Artificial Sequence: Synthetic oligonucleotide
ccguuggggccaugcgacc

SEQ ID NO: 1303718 - RNA, 19 nt, Artificial Sequence
  Description of Artificial Sequence: Synthetic oligonucleotide
cuagucucuucagguggcu

SEQ ID NO: 1303719 - RNA, 19 nt, Artificial Sequence
  Description of Artificial Sequence: Synthetic oligonucleotide
cauucuggauugugucauu

SEQ ID NO: 1303720 - RNA, 19 nt, Artificial Sequence
  Description of Artificial Sequence: Synthetic oligonucleotide
ggaucugcguucacauccu

SEQ ID NO: 1303721 - RNA, 19 nt, Artificial Sequence
  Description of Artificial Sequence: Synthetic oligonucleotide
gaaguccguuggggccaug

SEQ ID NO: 1303722 - RNA, 19 nt, Artificial Sequence
  Description of Artificial Sequence: Synthetic oligonucleotide
gcgcuccacgcgcuccucc

SEQ ID NO: 1303723 - RNA, 19 nt, Artificial Sequence
  Description of Artificial Sequence: Synthetic oligonucleotide
gaccguggcuggggaaucu

SEQ ID NO: 1303724 - RNA, 19 nt, Artificial Sequence
  Description of Artificial Sequence: Synthetic oligonucleotide
ccauaaccuccaucaggaa

SEQ ID NO: 1303725 - RNA, 19 nt, Artificial Sequence
  Description of Artificial Sequence: Synthetic oligonucleotide
cccacucugguaggucaac

SEQ ID NO: 1303726 - RNA, 19 nt, Artificial Sequence
  Description of Artificial Sequence: Synthetic oligonucleotide
ggaccguggcuggggaauc

SEQ ID NO: 1303727 - RNA, 19 nt, Artificial Sequence
  Description of Artificial Sequence: Synthetic oligonucleotide
ggcuaucugaagccauguu

SEQ ID NO: 1303728 - RNA, 19 nt, Artificial Sequence
  Description of Artificial Sequence: Synthetic oligonucleotide
ggucucuccgggaaagcuu

SEQ ID NO: 1303729 - RNA, 19 nt, Artificial Sequence
  Description of Artificial Sequence: Synthetic oligonucleotide
ccggucucuccgggaaagc

SEQ ID NO: 1303730 - RNA, 19 nt, Artificial Sequence
  Description of Artificial Sequence: Synthetic oligonucleotide
cccgcaggagacgucaacu

SEQ ID NO: 1303731 - RNA, 19 nt, Artificial Sequence
  Description of Artificial Sequence: Synthetic oligonucleotide
gguaggccucuuggauaga

SEQ ID NO: 1303732 - RNA, 19 nt, Artificial Sequence
  Description of Artificial Sequence: Synthetic oligonucleotide
ggcggcuaucugaagccau

SEQ ID NO: 1303733 - RNA, 19 nt, Artificial Sequence
  Description of Artificial Sequence: Synthetic oligonucleotide
cggaacguagccacagcau

SEQ ID NO: 1303734 - RNA, 19 nt, Artificial Sequence
  Description of Artificial Sequence: Synthetic oligonucleotide
gucccguccuccaggcauu

SEQ ID NO: 1303735 - RNA, 19 nt, Artificial Sequence
  Description of Artificial Sequence: Synthetic oligonucleotide
gcuggggaaucugcuuuau

SEQ ID NO: 1303736 - RNA, 19 nt, Artificial Sequence
  Description of Artificial Sequence: Synthetic oligonucleotide
gguaaacgucgaagcugau

SEQ ID NO: 1303737 - RNA, 19 nt, Artificial Sequence
  Description of Artificial Sequence: Synthetic oligonucleotide
cggucucuccgggaaagcu

SEQ ID NO: 1303738 - RNA, 19 nt, Artificial Sequence
  Description of Artificial Sequence: Synthetic oligonucleotide
cggcuaucugaagccaugu

SEQ ID NO: 1303739 - RNA, 19 nt, Artificial Sequence
  Description of Artificial Sequence: Synthetic oligonucleotide
gcgaccgcugaggcagcuu

SEQ ID NO: 1303740 - RNA, 19 nt, Artificial Sequence
  Description of Artificial Sequence: Synthetic oligonucleotide
cgacaccggcgcagccgcu

SEQ ID NO: 1303741 - RNA, 19 nt, Artificial Sequence
  Description of Artificial Sequence: Synthetic oligonucleotide
ccgagccgucggggaggaa

SEQ ID NO: 1303742 - RNA, 19 nt, Artificial Sequence
  Description of Artificial Sequence: Synthetic oligonucleotide
uaaagaauggucaagugcg

SEQ ID NO: 1303743 - RNA, 19 nt, Artificial Sequence
  Description of Artificial Sequence: Synthetic oligonucleotide
uauaaaggaaucuucaagg

SEQ ID NO: 1303744 - RNA, 19 nt, Artificial Sequence
  Description of Artificial Sequence: Synthetic oligonucleotide
aaauuuaaagaauagccug

SEQ ID NO: 1303745 - RNA, 19 nt, Artificial Sequence
  Description of Artificial Sequence: Synthetic oligonucleotide
aguuugauuagcuuuauac

SEQ ID NO: 1303746 - RNA, 19 nt, Artificial Sequence
  Description of Artificial Sequence: Synthetic oligonucleotide
uuuucagcuagaaacaugg

SEQ ID NO: 1303747 - RNA, 19 nt, Artificial Sequence
  Description of Artificial Sequence: Synthetic oligonucleotide
uaaaauagggacucaaccg

SEQ ID NO: 1303748 - RNA, 19 nt, Artificial Sequence
  Description of Artificial Sequence: Synthetic oligonucleotide
uucaucagauauaacaugg

SEQ ID NO: 1303749 - RNA, 19 nt, Artificial Sequence
  Description of Artificial Sequence: Synthetic oligonucleotide
uguaccuagcccuagaccg

SEQ ID NO: 1303750 - RNA, 19 nt, Artificial Sequence
  Description of Artificial Sequence: Synthetic oligonucleotide
aagguagauacccuaaaac

SEQ ID NO: 1303751 - RNA, 19 nt, Artificial Sequence
  Description of Artificial Sequence: Synthetic oligonucleotide
aagauacacacuuucagag

SEQ ID NO: 1303752 - RNA, 19 nt, Artificial Sequence
  Description of Artificial Sequence: Synthetic oligonucleotide
uuauauuuaggcuugaaaa

SEQ ID NO: 1303753 - RNA, 19 nt, Artificial Sequence
  Description of Artificial Sequence: Synthetic oligonucleotide
uuauguguaaaauagggac

SEQ ID NO: 1303754 - RNA, 19 nt, Artificial Sequence
  Description of Artificial Sequence: Synthetic oligonucleotide
aguuuuagguucuugaguc

SEQ ID NO: 1303755 - RNA, 19 nt, Artificial Sequence
  Description of Artificial Sequence: Synthetic oligonucleotide
aaguuguuggagaagauac

SEQ ID NO: 1303756 - RNA, 19 nt, Artificial Sequence
  Description of Artificial Sequence: Synthetic oligonucleotide
aaaauagggacucaaccgu

SEQ ID NO: 1303757 - RNA, 19 nt, Artificial Sequence
  Description of Artificial Sequence: Synthetic oligonucleotide
aauagccugggauugaaug

SEQ ID NO: 1303758 - RNA, 19 nt, Artificial Sequence
  Description of Artificial Sequence: Synthetic oligonucleotide
uguucugcacuaaagaaug

SEQ ID NO: 1303759 - RNA, 19 nt, Artificial Sequence
  Description of Artificial Sequence: Synthetic oligonucleotide
uuuuaagacucacagggca

SEQ ID NO: 1303760 - RNA, 19 nt, Artificial Sequence
  Description of Artificial Sequence: Synthetic oligonucleotide
uuaaagaauagccugggau

SEQ ID NO: 1303761 - RNA, 19 nt, Artificial Sequence
  Description of Artificial Sequence: Synthetic oligonucleotide
auagaggaguuuuagguuc

SEQ ID NO: 1303762 - RNA, 19 nt, Artificial Sequence
  Description of Artificial Sequence: Synthetic oligonucleotide
agguucuugaguccaaucc

SEQ ID NO: 1303763 - RNA, 19 nt, Artificial Sequence
  Description of Artificial Sequence: Synthetic oligonucleotide
uaugaaaccacguauccac

SEQ ID NO: 1303764 - RNA, 19 nt, Artificial Sequence
  Description of Artificial Sequence: Synthetic oligonucleotide
ucauuaauccuugaaauca

SEQ ID NO: 1303765 - RNA, 19 nt, Artificial Sequence
  Description of Artificial Sequence: Synthetic oligonucleotide
guaaaauagggacucaacc

SEQ ID NO: 1303766 - RNA, 19 nt, Artificial Sequence
  Description of Artificial Sequence: Synthetic oligonucleotide
uuaauuucauccucauagg

SEQ ID NO: 1303767 - RNA, 19 nt, Artificial Sequence
  Description of Artificial Sequence: Synthetic oligonucleotide
uuuauguguaaaauaggga

SEQ ID NO: 1303768 - RNA, 19 nt, Artificial Sequence
  Description of Artificial Sequence: Synthetic oligonucleotide
cuaaagaauggucaagugc

SEQ ID NO: 1303769 - RNA, 19 nt, Artificial Sequence
  Description of Artificial Sequence: Synthetic oligonucleotide
aaaaggaagauaucaucca

SEQ ID NO: 1303770 - RNA, 19 nt, Artificial Sequence
  Description of Artificial Sequence: Synthetic oligonucleotide
agauagaggaguuuuaggu

SEQ ID NO: 1303771 - RNA, 19 nt, Artificial Sequence
  Description of Artificial Sequence: Synthetic oligonucleotide
agaagauacacacuuucag

SEQ ID NO: 1303772 - RNA, 19 nt, Artificial Sequence
  Description of Artificial Sequence: Synthetic oligonucleotide
auauuuaggcuugaaaagg

SEQ ID NO: 1303773 - RNA, 19 nt, Artificial Sequence
  Description of Artificial Sequence: Synthetic oligonucleotide
gauugaaugcuuuaaaucu

SEQ ID NO: 1303774 - RNA, 19 nt, Artificial Sequence
  Description of Artificial Sequence: Synthetic oligonucleotide
auagguugaacccuuuauc

SEQ ID NO: 1303775 - RNA, 19 nt, Artificial Sequence
  Description of Artificial Sequence: Synthetic oligonucleotide
aauuaugagccaaaaucuc

SEQ ID NO: 1303776 - RNA, 19 nt, Artificial Sequence
  Description of Artificial Sequence: Synthetic oligonucleotide
aacacugaaccauacuuga

SEQ ID NO: 1303777 - RNA, 19 nt, Artificial Sequence
  Description of Artificial Sequence: Synthetic oligonucleotide
ucccguuuuauauuuaggc

SEQ ID NO: 1303778 - RNA, 19 nt, Artificial Sequence
  Description of Artificial Sequence: Synthetic oligonucleotide
guuucaaguacccuaauca

SEQ ID NO: 1303779 - RNA, 19 nt, Artificial Sequence
  Description of Artificial Sequence: Synthetic oligonucleotide
uuuacaagaacaugccugu

SEQ ID NO: 1303780 - RNA, 19 nt, Artificial Sequence
  Description of Artificial Sequence: Synthetic oligonucleotide
uauguguaaaauagggacu

SEQ ID NO: 1303781 - RNA, 19 nt, Artificial Sequence
  Description of Artificial Sequence: Synthetic oligonucleotide
uauacagcacugcaggggc

SEQ ID NO: 1303782 - RNA, 19 nt, Artificial Sequence
  Description of Artificial Sequence: Synthetic oligonucleotide
aacauggucaguccaauaa

SEQ ID NO: 1303783 - RNA, 19 nt, Artificial Sequence
  Description of Artificial Sequence: Synthetic oligonucleotide
uauaacauggugguccagg

SEQ ID NO: 1303784 - RNA, 19 nt, Artificial Sequence
  Description of Artificial Sequence: Synthetic oligonucleotide
uuuaagacucacagggcag

SEQ ID NO: 1303785 - RNA, 19 nt, Artificial Sequence
  Description of Artificial Sequence: Synthetic oligonucleotide
uuuccuaacuaugaaacca

SEQ ID NO: 1303786 - RNA, 19 nt, Artificial Sequence
  Description of Artificial Sequence: Synthetic oligonucleotide
ugauuagcuuuauacagca

SEQ ID NO: 1303787 - RNA, 19 nt, Artificial Sequence
  Description of Artificial Sequence: Synthetic oligonucleotide
agguagauacccuaaaacu

SEQ ID NO: 1303788 - RNA, 19 nt, Artificial Sequence
  Description of Artificial Sequence: Synthetic oligonucleotide
uauuuaggcuugaaaagga

SEQ ID NO: 1303789 - RNA, 19 nt, Artificial Sequence
  Description of Artificial Sequence: Synthetic oligonucleotide
uuugccguaagccuuucug

SEQ ID NO: 1303790 - RNA, 19 nt, Artificial Sequence
  Description of Artificial Sequence: Synthetic oligonucleotide
aacccuuuaucaaugcugg

SEQ ID NO: 1303791 - RNA, 19 nt, Artificial Sequence
  Description of Artificial Sequence: Synthetic oligonucleotide
cugagugauauuuaucgag

SEQ ID NO: 1303792 - RNA, 19 nt, Artificial Sequence
  Description of Artificial Sequence: Synthetic oligonucleotide
uagguugaacccuuuauca

SEQ ID NO: 1303793 - RNA, 19 nt, Artificial Sequence
  Description of Artificial Sequence: Synthetic oligonucleotide
acaugcagcuaauacacag

SEQ ID NO: 1303794 - RNA, 19 nt, Artificial Sequence
  Description of Artificial Sequence: Synthetic oligonucleotide
agugauauuuaucgagguc

SEQ ID NO: 1303795 - RNA, 19 nt, Artificial Sequence
  Description of Artificial Sequence: Synthetic oligonucleotide
acauguuugauauuauuaa

SEQ ID NO: 1303796 - RNA, 19 nt, Artificial Sequence
  Description of Artificial Sequence: Synthetic oligonucleotide
uuuguuucaaguacccuaa

SEQ ID NO: 1303797 - RNA, 19 nt, Artificial Sequence
  Description of Artificial Sequence: Synthetic oligonucleotide
uggaagauuccuuugagua

SEQ ID NO: 1303798 - RNA, 19 nt, Artificial Sequence
  Description of Artificial Sequence: Synthetic oligonucleotide
cuagaaacaugguuuuccg

SEQ ID NO: 1303799 - RNA, 19 nt, Artificial Sequence
  Description of Artificial Sequence: Synthetic oligonucleotide
ugcacaugcagcuaauaca

SEQ ID NO: 1303800 - RNA, 19 nt, Artificial Sequence
  Description of Artificial Sequence: Synthetic oligonucleotide
gagauagaggaguuuuagg

SEQ ID NO: 1303801 - RNA, 19 nt, Artificial Sequence
  Description of Artificial Sequence: Synthetic oligonucleotide
agucaaacauggucagucc

SEQ ID NO: 1303802 - RNA, 19 nt, Artificial Sequence
  Description of Artificial Sequence: Synthetic oligonucleotide
cauggucaguccaauaagg

SEQ ID NO: 1303803 - RNA, 19 nt, Artificial Sequence
  Description of Artificial Sequence: Synthetic oligonucleotide
agagaugcaugacugcagg

SEQ ID NO: 1303804 - RNA, 19 nt, Artificial Sequence
  Description of Artificial Sequence: Synthetic oligonucleotide
uccuuaaagacucucgaau

SEQ ID NO: 1303805 - RNA, 19 nt, Artificial Sequence
  Description of Artificial Sequence: Synthetic oligonucleotide
aaaauggucuucuuccuua

SEQ ID NO: 1303806 - RNA, 19 nt, Artificial Sequence
  Description of Artificial Sequence: Synthetic oligonucleotide
uaaggcuugcacaugcagc

SEQ ID NO: 1303807 - RNA, 19 nt, Artificial Sequence
  Description of Artificial Sequence: Synthetic oligonucleotide
uucagagagaugcaugacu

SEQ ID NO: 1303808 - RNA, 19 nt, Artificial Sequence
  Description of Artificial Sequence: Synthetic oligonucleotide
ucgaggucauuaaacauga

SEQ ID NO: 1303809 - RNA, 19 nt, Artificial Sequence
  Description of Artificial Sequence: Synthetic oligonucleotide
aggucauuaaacaugaaga

SEQ ID NO: 1303810 - RNA, 19 nt, Artificial Sequence
  Description of Artificial Sequence: Synthetic oligonucleotide
aaccauacuugagcgaugg

SEQ ID NO: 1303811 - RNA, 19 nt, Artificial Sequence
  Description of Artificial Sequence: Synthetic oligonucleotide
auaacauggugguccaggg

SEQ ID NO: 1303812 - RNA, 19 nt, Artificial Sequence
  Description of Artificial Sequence: Synthetic oligonucleotide
auuaaacaugaagagcuuc

SEQ ID NO: 1303813 - RNA, 19 nt, Artificial Sequence
  Description of Artificial Sequence: Synthetic oligonucleotide
ucucgaaugcuguaccuag

SEQ ID NO: 1303814 - RNA, 19 nt, Artificial Sequence
  Description of Artificial Sequence: Synthetic oligonucleotide
gaguagaaggguccgcucg

SEQ ID NO: 1303815 - RNA, 19 nt, Artificial Sequence
  Description of Artificial Sequence: Synthetic oligonucleotide
uuuaauugguggcuucgga

SEQ ID NO: 1303816 - RNA, 19 nt, Artificial Sequence
  Description of Artificial Sequence: Synthetic oligonucleotide
ggucauuaaacaugaagag

SEQ ID NO: 1303817 - RNA, 19 nt, Artificial Sequence
  Description of Artificial Sequence: Synthetic oligonucleotide
uccuaacuaugaaaccacg

SEQ ID NO: 1303818 - RNA, 19 nt, Artificial Sequence
  Description of Artificial Sequence: Synthetic oligonucleotide
uaaagacucucgaaugcug

SEQ ID NO: 1303819 - RNA, 19 nt, Artificial Sequence
  Description of Artificial Sequence: Synthetic oligonucleotide
gaagauaucauccaauauu

SEQ ID NO: 1303820 - RNA, 19 nt, Artificial Sequence
  Description of Artificial Sequence: Synthetic oligonucleotide
ucgaaugcuguaccuagcc

SEQ ID NO: 1303821 - RNA, 19 nt, Artificial Sequence
  Description of Artificial Sequence: Synthetic oligonucleotide
cauuguagugauuccauuc

SEQ ID NO: 1303822 - RNA, 19 nt, Artificial Sequence
  Description of Artificial Sequence: Synthetic oligonucleotide
uugguguucugcacuaaag

SEQ ID NO: 1303823 - RNA, 19 nt, Artificial Sequence
  Description of Artificial Sequence: Synthetic oligonucleotide
gugauauuuaucgagguca

SEQ ID NO: 1303824 - RNA, 19 nt, Artificial Sequence
  Description of Artificial Sequence: Synthetic oligonucleotide
auuauuaauuucauccuca

SEQ ID NO: 1303825 - RNA, 19 nt, Artificial Sequence
  Description of Artificial Sequence: Synthetic oligonucleotide
ugcagauagucugagaagu

SEQ ID NO: 1303826 - RNA, 19 nt, Artificial Sequence
  Description of Artificial Sequence: Synthetic oligonucleotide
uucugaaugggauggcuug

SEQ ID NO: 1303827 - RNA, 19 nt, Artificial Sequence
  Description of Artificial Sequence: Synthetic oligonucleotide
uuccaugaaacaucugggc

SEQ ID NO: 1303828 - RNA, 19 nt, Artificial Sequence
  Description of Artificial Sequence: Synthetic oligonucleotide
ucugcacuaaagaaugguc

SEQ ID NO: 1303829 - RNA, 19 nt, Artificial Sequence
  Description of Artificial Sequence: Synthetic oligonucleotide
ucucaugaugccuuuuaug

SEQ ID NO: 1303830 - RNA, 19 nt, Artificial Sequence
  Description of Artificial Sequence: Synthetic oligonucleotide
uucccguuuuauauuuagg

SEQ ID NO: 1303831 - RNA, 19 nt, Artificial Sequence
  Description of Artificial Sequence: Synthetic oligonucleotide
uucagcuagaaacaugguu

SEQ ID NO: 1303832 - RNA, 19 nt, Artificial Sequence
  Description of Artificial Sequence: Synthetic oligonucleotide
uuccuaacuaugaaaccac

SEQ ID NO: 1303833 - RNA, 19 nt, Artificial Sequence
  Description of Artificial Sequence: Synthetic oligonucleotide
auacuugagcgauggagag

SEQ ID NO: 1303834 - RNA, 19 nt, Artificial Sequence
  Description of Artificial Sequence: Synthetic oligonucleotide
uccgguuucaucuccuuca

SEQ ID NO: 1303835 - RNA, 19 nt, Artificial Sequence
  Description of Artificial Sequence: Synthetic oligonucleotide
gaauuaugagccaaaaucu

SEQ ID NO: 1303836 - RNA, 19 nt, Artificial Sequence
  Description of Artificial Sequence: Synthetic oligonucleotide
uguuucaaguacccuaauc

SEQ ID NO: 1303837 - RNA, 19 nt, Artificial Sequence
  Description of Artificial Sequence: Synthetic oligonucleotide
uuucaaguacccuaaucau

SEQ ID NO: 1303838 - RNA, 19 nt, Artificial Sequence
  Description of Artificial Sequence: Synthetic oligonucleotide
auauuuaucgaggucauua

SEQ ID NO: 1303839 - RNA, 19 nt, Artificial Sequence
  Description of Artificial Sequence: Synthetic oligonucleotide
auaaggcuugcacaugcag

SEQ ID NO: 1303840 - RNA, 19 nt, Artificial Sequence
  Description of Artificial Sequence: Synthetic oligonucleotide
uuaauugguggcuucggau

SEQ ID NO: 1303841 - RNA, 19 nt, Artificial Sequence
  Description of Artificial Sequence: Synthetic oligonucleotide
cucauuaauccuugaaauc

SEQ ID NO: 1303842 - RNA, 19 nt, Artificial Sequence
  Description of Artificial Sequence: Synthetic oligonucleotide
uauuuaucgaggucauuaa

SEQ ID NO: 1303843 - RNA, 19 nt, Artificial Sequence
  Description of Artificial Sequence: Synthetic oligonucleotide
cuuuuaauugguggcuucg

SEQ ID NO: 1303844 - RNA, 19 nt, Artificial Sequence
  Description of Artificial Sequence: Synthetic oligonucleotide
ugguuuuccgcucucuaac

SEQ ID NO: 1303845 - RNA, 19 nt, Artificial Sequence
  Description of Artificial Sequence: Synthetic oligonucleotide
ugaaccauacuugagcgau

SEQ ID NO: 1303846 - RNA, 19 nt, Artificial Sequence
  Description of Artificial Sequence: Synthetic oligonucleotide
gaagauuccuuugaguaga

SEQ ID NO: 1303847 - RNA, 19 nt, Artificial Sequence
  Description of Artificial Sequence: Synthetic oligonucleotide
uuaaagacucucgaaugcu

SEQ ID NO: 1303848 - RNA, 19 nt, Artificial Sequence
  Description of Artificial Sequence: Synthetic oligonucleotide
ucugagugauauuuaucga

SEQ ID NO: 1303849 - RNA, 19 nt, Artificial Sequence
  Description of Artificial Sequence: Synthetic oligonucleotide
ucguuaucccuuuccauca

SEQ ID NO: 1303850 - RNA, 19 nt, Artificial Sequence
  Description of Artificial Sequence: Synthetic oligonucleotide
guuuccuaacuaugaaacc

SEQ ID NO: 1303851 - RNA, 19 nt, Artificial Sequence
  Description of Artificial Sequence: Synthetic oligonucleotide
ucaaccguuuccuaacuau

SEQ ID NO: 1303852 - RNA, 19 nt, Artificial Sequence
  Description of Artificial Sequence: Synthetic oligonucleotide
uuauuaauuucauccucau

SEQ ID NO: 1303853 - RNA, 19 nt, Artificial Sequence
  Description of Artificial Sequence: Synthetic oligonucleotide
acccuaaucauuuucucau

SEQ ID NO: 1303854 - RNA, 19 nt, Artificial Sequence
  Description of Artificial Sequence: Synthetic oligonucleotide
uccggaagaugccaguucu

SEQ ID NO: 1303855 - RNA, 19 nt, Artificial Sequence
  Description of Artificial Sequence: Synthetic oligonucleotide
auggucaguccaauaaggc

SEQ ID NO: 1303856 - RNA, 19 nt, Artificial Sequence
  Description of Artificial Sequence: Synthetic oligonucleotide
aauuucauccucauagguu

SEQ ID NO: 1303857 - RNA, 19 nt, Artificial Sequence
  Description of Artificial Sequence: Synthetic oligonucleotide
ucaucagauauaacauggu

SEQ ID NO: 1303858 - RNA, 19 nt, Artificial Sequence
  Description of Artificial Sequence: Synthetic oligonucleotide
gauauaacaugguggucca

SEQ ID NO: 1303859 - RNA, 19 nt, Artificial Sequence
  Description of Artificial Sequence: Synthetic oligonucleotide
cauacuugagcgauggaga

SEQ ID NO: 1303860 - RNA, 19 nt, Artificial Sequence
  Description of Artificial Sequence: Synthetic oligonucleotide
ugauuguuccaugaaacau

SEQ ID NO: 1303861 - RNA, 19 nt, Artificial Sequence
  Description of Artificial Sequence: Synthetic oligonucleotide
acuugagcgauggagagga

SEQ ID NO: 1303862 - RNA, 19 nt, Artificial Sequence
  Description of Artificial Sequence: Synthetic oligonucleotide
uucaagguagauacccuaa

SEQ ID NO: 1303863 - RNA, 19 nt, Artificial Sequence
  Description of Artificial Sequence: Synthetic oligonucleotide
aacaugguuuuccgcucuc

SEQ ID NO: 1303864 - RNA, 19 nt, Artificial Sequence
  Description of Artificial Sequence: Synthetic oligonucleotide
ugaaaccacguauccaccu

SEQ ID NO: 1303865 - RNA, 19 nt, Artificial Sequence
  Description of Artificial Sequence: Synthetic oligonucleotide
ugaacccuuuaucaaugcu

SEQ ID NO: 1303866 - RNA, 19 nt, Artificial Sequence
  Description of Artificial Sequence: Synthetic oligonucleotide
caagaacaugccuguagcc

SEQ ID NO: 1303867 - RNA, 19 nt, Artificial Sequence
  Description of Artificial Sequence: Synthetic oligonucleotide
aucgaggucauuaaacaug

SEQ ID NO: 1303868 - RNA, 19 nt, Artificial Sequence
  Description of Artificial Sequence: Synthetic oligonucleotide
aaacaugaagagcuucaua

SEQ ID NO: 1303869 - RNA, 19 nt, Artificial Sequence
  Description of Artificial Sequence: Synthetic oligonucleotide
uggauugccucguuauccc

SEQ ID NO: 1303870 - RNA, 19 nt, Artificial Sequence
  Description of Artificial Sequence: Synthetic oligonucleotide
uguuugugguuuucuguca

SEQ ID NO: 1303871 - RNA, 19 nt, Artificial Sequence
  Description of Artificial Sequence: Synthetic oligonucleotide
ucaagguagauacccuaaa

SEQ ID NO: 1303872 - RNA, 19 nt, Artificial Sequence
  Description of Artificial Sequence: Synthetic oligonucleotide
gacucaaccguuuccuaac

SEQ ID NO: 1303873 - RNA, 19 nt, Artificial Sequence
  Description of Artificial Sequence: Synthetic oligonucleotide
aguaguccgguuucaucuc

SEQ ID NO: 1303874 - RNA, 19 nt, Artificial Sequence
  Description of Artificial Sequence: Synthetic oligonucleotide
aagacuacgacugcugauu

SEQ ID NO: 1303875 - RNA, 19 nt, Artificial Sequence
  Description of Artificial Sequence: Synthetic oligonucleotide
ugggauugaaugcuuuaaa

SEQ ID NO: 1303876 - RNA, 19 nt, Artificial Sequence
  Description of Artificial Sequence: Synthetic oligonucleotide
aggaagauaucauccaaua

SEQ ID NO: 1303877 - RNA, 19 nt, Artificial Sequence
  Description of Artificial Sequence: Synthetic oligonucleotide
cuggauugccucguuaucc

SEQ ID NO: 1303878 - RNA, 19 nt, Artificial Sequence
  Description of Artificial Sequence: Synthetic oligonucleotide
cucaugaugccuuuuaugu

SEQ ID NO: 1303879 - RNA, 19 nt, Artificial Sequence
  Description of Artificial Sequence: Synthetic oligonucleotide
auuguuccaugaaacaucu

SEQ ID NO: 1303880 - RNA, 19 nt, Artificial Sequence
  Description of Artificial Sequence: Synthetic oligonucleotide
gacucucgaaugcuguacc

SEQ ID NO: 1303881 - RNA, 19 nt, Artificial Sequence
  Description of Artificial Sequence: Synthetic oligonucleotide
ggaagauuccuuugaguag

SEQ ID NO: 1303882 - RNA, 19 nt, Artificial Sequence
  Description of Artificial Sequence: Synthetic oligonucleotide
ucuuuuaauugguggcuuc

SEQ ID NO: 1303883 - RNA, 19 nt, Artificial Sequence
  Description of Artificial Sequence: Synthetic oligonucleotide
ucggaugagugccaggaau

SEQ ID NO: 1303884 - RNA, 19 nt, Artificial Sequence
  Description of Artificial Sequence: Synthetic oligonucleotide
cugcacuaaagaaugguca

SEQ ID NO: 1303885 - RNA, 19 nt, Artificial Sequence
  Description of Artificial Sequence: Synthetic oligonucleotide
cuaacuaugaaaccacgua

SEQ ID NO: 1303886 - RNA, 19 nt, Artificial Sequence
  Description of Artificial Sequence: Synthetic oligonucleotide
gaauuggcugcagauaguc

SEQ ID NO: 1303887 - RNA, 19 nt, Artificial Sequence
  Description of Artificial Sequence: Synthetic oligonucleotide
auuuaucgaggucauuaaa

SEQ ID NO: 1303888 - RNA, 19 nt, Artificial Sequence
  Description of Artificial Sequence: Synthetic oligonucleotide
cagauagucugagaaguag

SEQ ID NO: 1303889 - RNA, 19 nt, Artificial Sequence
  Description of Artificial Sequence: Synthetic oligonucleotide
agcuuuagacuccuucuga

SEQ ID NO: 1303890 - RNA, 19 nt, Artificial Sequence
  Description of Artificial Sequence: Synthetic oligonucleotide
cuuugaguagaaggguccg

SEQ ID NO: 1303891 - RNA, 19 nt, Artificial Sequence
  Description of Artificial Sequence: Synthetic oligonucleotide
agacucucgaaugcuguac

SEQ ID NO: 1303892 - RNA, 19 nt, Artificial Sequence
  Description of Artificial Sequence: Synthetic oligonucleotide
aauggucaagugcguucag

SEQ ID NO: 1303893 - RNA, 19 nt, Artificial Sequence
  Description of Artificial Sequence: Synthetic oligonucleotide
augcagcuaauacacagau

SEQ ID NO: 1303894 - RNA, 19 nt, Artificial Sequence
  Description of Artificial Sequence: Synthetic oligonucleotide
uuccuuaaagacucucgaa

SEQ ID NO: 1303895 - RNA, 19 nt, Artificial Sequence
  Description of Artificial Sequence: Synthetic oligonucleotide
ucguuguugguguucugca

SEQ ID NO: 1303896 - RNA, 19 nt, Artificial Sequence
  Description of Artificial Sequence: Synthetic oligonucleotide
gaaguaguccgguuucauc

SEQ ID NO: 1303897 - RNA, 19 nt, Artificial Sequence
  Description of Artificial Sequence: Synthetic oligonucleotide
uagggacucaaccguuucc

SEQ ID NO: 1303898 - RNA, 19 nt, Artificial Sequence
  Description of Artificial Sequence: Synthetic oligonucleotide
uuaucccuuuccaucaguu

SEQ ID NO: 1303899 - RNA, 19 nt, Artificial Sequence
  Description of Artificial Sequence: Synthetic oligonucleotide
gaccuuucugaaugggaug

SEQ ID NO: 1303900 - RNA, 19 nt, Artificial Sequence
  Description of Artificial Sequence: Synthetic oligonucleotide
aaccguuuccuaacuauga

SEQ ID NO: 1303901 - RNA, 19 nt, Artificial Sequence
  Description of Artificial Sequence: Synthetic oligonucleotide
ugcagcuaauacacagaug

SEQ ID NO: 1303902 - RNA, 19 nt, Artificial Sequence
  Description of Artificial Sequence: Synthetic oligonucleotide
auggucaagugcguucagc

SEQ ID NO: 1303903 - RNA, 19 nt, Artificial Sequence
  Description of Artificial Sequence: Synthetic oligonucleotide
uuucaagguaggcaagcuu

SEQ ID NO: 1303904 - RNA, 19 nt, Artificial Sequence
  Description of Artificial Sequence: Synthetic oligonucleotide
caaccguuuccuaacuaug

SEQ ID NO: 1303905 - RNA, 19 nt, Artificial Sequence
  Description of Artificial Sequence: Synthetic oligonucleotide
augaaaccacguauccacc

SEQ ID NO: 1303906 - RNA, 19 nt, Artificial Sequence
  Description of Artificial Sequence: Synthetic oligonucleotide
guagauacccuaaaacuaa

SEQ ID NO: 1303907 - RNA, 19 nt, Artificial Sequence
  Description of Artificial Sequence: Synthetic oligonucleotide
uuaagacucacagggcagu

SEQ ID NO: 1303908 - RNA, 19 nt, Artificial Sequence
  Description of Artificial Sequence: Synthetic oligonucleotide
gcuagaaacaugguuuucc

SEQ ID NO: 1303909 - RNA, 19 nt, Artificial Sequence
  Description of Artificial Sequence: Synthetic oligonucleotide
augcagauccauuuuguuu

SEQ ID NO: 1303910 - RNA, 19 nt, Artificial Sequence
  Description of Artificial Sequence: Synthetic oligonucleotide
ugccucguuaucccuuucc

SEQ ID NO: 1303911 - RNA, 19 nt, Artificial Sequence
  Description of Artificial Sequence: Synthetic oligonucleotide
uuaaaucucuccggaagau

SEQ ID NO: 1303912 - RNA, 19 nt, Artificial Sequence
  Description of Artificial Sequence: Synthetic oligonucleotide
uaccuaugcagauccauuu

SEQ ID NO: 1303913 - RNA, 19 nt, Artificial Sequence
  Description of Artificial Sequence: Synthetic oligonucleotide
agaaggguccgcucguugu

SEQ ID NO: 1303914 - RNA, 19 nt, Artificial Sequence
  Description of Artificial Sequence: Synthetic oligonucleotide
ccuuaaagacucucgaaug

SEQ ID NO: 1303915 - RNA, 19 nt, Artificial Sequence
  Description of Artificial Sequence: Synthetic oligonucleotide
gaaaccacguauccaccuc

SEQ ID NO: 1303916 - RNA, 19 nt, Artificial Sequence
  Description of Artificial Sequence: Synthetic oligonucleotide
cguuuccuaacuaugaaac

SEQ ID NO: 1303917 - RNA, 19 nt, Artificial Sequence
  Description of Artificial Sequence: Synthetic oligonucleotide
uacuugagcgauggagagg

SEQ ID NO: 1303918 - RNA, 19 nt, Artificial Sequence
  Description of Artificial Sequence: Synthetic oligonucleotide
gaguuuuagguucuugagu

SEQ ID NO: 1303919 - RNA, 19 nt, Artificial Sequence
  Description of Artificial Sequence: Synthetic oligonucleotide
cacagggcagucaaacaug

SEQ ID NO: 1303920 - RNA, 19 nt, Artificial Sequence
  Description of Artificial Sequence: Synthetic oligonucleotide
uggcugguaagcucuuuug

SEQ ID NO: 1303921 - RNA, 19 nt, Artificial Sequence
  Description of Artificial Sequence: Synthetic oligonucleotide
ggagauagaggaguuuuag

SEQ ID NO: 1303922 - RNA, 19 nt, Artificial Sequence
  Description of Artificial Sequence: Synthetic oligonucleotide
uuugaguagaaggguccgc

SEQ ID NO: 1303923 - RNA, 19 nt, Artificial Sequence
  Description of Artificial Sequence: Synthetic oligonucleotide
aaagaauggucaagugcgu

SEQ ID NO: 1303924 - RNA, 19 nt, Artificial Sequence
  Description of Artificial Sequence: Synthetic oligonucleotide
aguagaaggguccgcucgu

SEQ ID NO: 1303925 - RNA, 19 nt, Artificial Sequence
  Description of Artificial Sequence: Synthetic oligonucleotide
ccaaugugcaaccuucccg

SEQ ID NO: 1303926 - RNA, 19 nt, Artificial Sequence
  Description of Artificial Sequence: Synthetic oligonucleotide
auccggaugaugguuccac

SEQ ID NO: 1303927 - RNA, 19 nt, Artificial Sequence
  Description of Artificial Sequence: Synthetic oligonucleotide
ucuaccuaugcagauccau

SEQ ID NO: 1303928 - RNA, 19 nt, Artificial Sequence
  Description of Artificial Sequence: Synthetic oligonucleotide
uggugaauuaugagccaaa

SEQ ID NO: 1303929 - RNA, 19 nt, Artificial Sequence
  Description of Artificial Sequence: Synthetic oligonucleotide
uuucagcuagaaacauggu

SEQ ID NO: 1303930 - RNA, 19 nt, Artificial Sequence
  Description of Artificial Sequence: Synthetic oligonucleotide
uagaaggguccgcucguug

SEQ ID NO: 1303931 - RNA, 19 nt, Artificial Sequence
  Description of Artificial Sequence: Synthetic oligonucleotide
agguugaacccuuuaucaa

SEQ ID NO: 1303932 - RNA, 19 nt, Artificial Sequence
  Description of Artificial Sequence: Synthetic oligonucleotide
ucauagguugaacccuuua

SEQ ID NO: 1303933 - RNA, 19 nt, Artificial Sequence
  Description of Artificial Sequence: Synthetic oligonucleotide
uucuucuaccuaugcagau

SEQ ID NO: 1303934 - RNA, 19 nt, Artificial Sequence
  Description of Artificial Sequence: Synthetic oligonucleotide
aauaaggcuugcacaugca

SEQ ID NO: 1303935 - RNA, 19 nt, Artificial Sequence
  Description of Artificial Sequence: Synthetic oligonucleotide
agauagucugagaaguagu

SEQ ID NO: 1303936 - RNA, 19 nt, Artificial Sequence
  Description of Artificial Sequence: Synthetic oligonucleotide
cuuccaaauuugccguaag

SEQ ID NO: 1303937 - RNA, 19 nt, Artificial Sequence
  Description of Artificial Sequence: Synthetic oligonucleotide
cagagagaugcaugacugc

SEQ ID NO: 1303938 - RNA, 19 nt, Artificial Sequence
  Description of Artificial Sequence: Synthetic oligonucleotide
aagacucucgaaugcugua

SEQ ID NO: 1303939 - RNA, 19 nt, Artificial Sequence
  Description of Artificial Sequence: Synthetic oligonucleotide
gauagaggaguuuuagguu

SEQ ID NO: 1303940 - RNA, 19 nt, Artificial Sequence
  Description of Artificial Sequence: Synthetic oligonucleotide
aaguuugauuagcuuuaua

SEQ ID NO: 1303941 - RNA, 19 nt, Artificial Sequence
  Description of Artificial Sequence: Synthetic oligonucleotide
uguguaaaauagggacuca

SEQ ID NO: 1303942 - RNA, 19 nt, Artificial Sequence
  Description of Artificial Sequence: Synthetic oligonucleotide
ucauuguagugauuccauu

SEQ ID NO: 1303943 - RNA, 19 nt, Artificial Sequence
  Description of Artificial Sequence: Synthetic oligonucleotide
cucgaaugcuguaccuagc

SEQ ID NO: 1303944 - RNA, 19 nt, Artificial Sequence
  Description of Artificial Sequence: Synthetic oligonucleotide
ggcuguaugucagugauga

SEQ ID NO: 1303945 - RNA, 19 nt, Artificial Sequence
  Description of Artificial Sequence: Synthetic oligonucleotide
acguauccaccucugaaua

SEQ ID NO: 1303946 - RNA, 19 nt, Artificial Sequence
  Description of Artificial Sequence: Synthetic oligonucleotide
aauuggcugcagauagucu

SEQ ID NO: 1303947 - RNA, 19 nt, Artificial Sequence
  Description of Artificial Sequence: Synthetic oligonucleotide
gcacaugcagcuaauacac

SEQ ID NO: 1303948 - RNA, 19 nt, Artificial Sequence
  Description of Artificial Sequence: Synthetic oligonucleotide
uuucagagagaugcaugac

SEQ ID NO: 1303949 - RNA, 19 nt, Artificial Sequence
  Description of Artificial Sequence: Synthetic oligonucleotide
caugcagcuaauacacaga

SEQ ID NO: 1303950 - RNA, 19 nt, Artificial Sequence
  Description of Artificial Sequence: Synthetic oligonucleotide
agauacccuaaaacuaaug

SEQ ID NO: 1303951 - RNA, 19 nt, Artificial Sequence
  Description of Artificial Sequence: Synthetic oligonucleotide
ccauacuugagcgauggag

SEQ ID NO: 1303952 - RNA, 19 nt, Artificial Sequence
  Description of Artificial Sequence: Synthetic oligonucleotide
gcuuuauacagcacugcag

SEQ ID NO: 1303953 - RNA, 19 nt, Artificial Sequence
  Description of Artificial Sequence: Synthetic oligonucleotide
agaggccagauacuguuua

SEQ ID NO: 1303954 - RNA, 19 nt, Artificial Sequence
  Description of Artificial Sequence: Synthetic oligonucleotide
accguuuccuaacuaugaa

SEQ ID NO: 1303955 - RNA, 19 nt, Artificial Sequence
  Description of Artificial Sequence: Synthetic oligonucleotide
aaauagggacucaaccguu

SEQ ID NO: 1303956 - RNA, 19 nt, Artificial Sequence
  Description of Artificial Sequence: Synthetic oligonucleotide
uagguucuugaguccaauc

SEQ ID NO: 1303957 - RNA, 19 nt, Artificial Sequence
  Description of Artificial Sequence: Synthetic oligonucleotide
ugaguagaaggguccgcuc

SEQ ID NO: 1303958 - RNA, 19 nt, Artificial Sequence
  Description of Artificial Sequence: Synthetic oligonucleotide
aagaauggucaagugcguu

SEQ ID NO: 1303959 - RNA, 19 nt, Artificial Sequence
  Description of Artificial Sequence: Synthetic oligonucleotide
gguagauacccuaaaacua

SEQ ID NO: 1303960 - RNA, 19 nt, Artificial Sequence
  Description of Artificial Sequence: Synthetic oligonucleotide
aauagggacucaaccguuu

SEQ ID NO: 1303961 - RNA, 19 nt, Artificial Sequence
  Description of Artificial Sequence: Synthetic oligonucleotide
ugcuguaccuagcccuaga

SEQ ID NO: 1303962 - RNA, 19 nt, Artificial Sequence
  Description of Artificial Sequence: Synthetic oligonucleotide
acucaaccguuuccuaacu

SEQ ID NO: 1303963 - RNA, 19 nt, Artificial Sequence
  Description of Artificial Sequence: Synthetic oligonucleotide
accuucccguuuuauauuu

SEQ ID NO: 1303964 - RNA, 19 nt, Artificial Sequence
  Description of Artificial Sequence: Synthetic oligonucleotide
gaggccagauacuguuuac

SEQ ID NO: 1303965 - RNA, 19 nt, Artificial Sequence
  Description of Artificial Sequence: Synthetic oligonucleotide
aggguccgcucguuguugg

SEQ ID NO: 1303966 - RNA, 19 nt, Artificial Sequence
  Description of Artificial Sequence: Synthetic oligonucleotide
agaugcaugacugcagguu

SEQ ID NO: 1303967 - RNA, 19 nt, Artificial Sequence
  Description of Artificial Sequence: Synthetic oligonucleotide
uugagcgauggagaggaau

SEQ ID NO: 1303968 - RNA, 19 nt, Artificial Sequence
  Description of Artificial Sequence: Synthetic oligonucleotide
uaucccuuuccaucaguuu

SEQ ID NO: 1303969 - RNA, 19 nt, Artificial Sequence
  Description of Artificial Sequence: Synthetic oligonucleotide
caagguagauacccuaaaa

SEQ ID NO: 1303970 - RNA, 19 nt, Artificial Sequence
  Description of Artificial Sequence: Synthetic oligonucleotide
guaccuagcccuagaccgg

SEQ ID NO: 1303971 - RNA, 19 nt, Artificial Sequence
  Description of Artificial Sequence: Synthetic oligonucleotide
gucaguccaauaaggcuug

SEQ ID NO: 1303972 - RNA, 19 nt, Artificial Sequence
  Description of Artificial Sequence: Synthetic oligonucleotide
uaagcucuuuugugauugu

SEQ ID NO: 1303973 - RNA, 19 nt, Artificial Sequence
  Description of Artificial Sequence: Synthetic oligonucleotide
cuucggaugagugccagga

SEQ ID NO: 1303974 - RNA, 19 nt, Artificial Sequence
  Description of Artificial Sequence: Synthetic oligonucleotide
aaugcuguaccuagcccua

SEQ ID NO: 1303975 - RNA, 19 nt, Artificial Sequence
  Description of Artificial Sequence: Synthetic oligonucleotide
ucugguuuccauggagauc

SEQ ID NO: 1303976 - RNA, 19 nt, Artificial Sequence
  Description of Artificial Sequence: Synthetic oligonucleotide
ccuaugcagauccauuuug

SEQ ID NO: 1303977 - RNA, 19 nt, Artificial Sequence
  Description of Artificial Sequence: Synthetic oligonucleotide
cugaauaaucaacacuggu

SEQ ID NO: 1303978 - RNA, 19 nt, Artificial Sequence
  Description of Artificial Sequence: Synthetic oligonucleotide
cuaugaaaccacguaucca

SEQ ID NO: 1303979 - RNA, 19 nt, Artificial Sequence
  Description of Artificial Sequence: Synthetic oligonucleotide
gauuagcuuuauacagcac

SEQ ID NO: 1303980 - RNA, 19 nt, Artificial Sequence
  Description of Artificial Sequence: Synthetic oligonucleotide
uaguccgguuucaucuccu

SEQ ID NO: 1303981 - RNA, 19 nt, Artificial Sequence
  Description of Artificial Sequence: Synthetic oligonucleotide
uauuuucauuguagugauu

SEQ ID NO: 1303982 - RNA, 19 nt, Artificial Sequence
  Description of Artificial Sequence: Synthetic oligonucleotide
aaggguccgcucguuguug

SEQ ID NO: 1303983 - RNA, 19 nt, Artificial Sequence
  Description of Artificial Sequence: Synthetic oligonucleotide
accuaugcagauccauuuu

SEQ ID NO: 1303984 - RNA, 19 nt, Artificial Sequence
  Description of Artificial Sequence: Synthetic oligonucleotide
uuguuucaaguacccuaau

SEQ ID NO: 1303985 - RNA, 19 nt, Artificial Sequence
  Description of Artificial Sequence: Synthetic oligonucleotide
agcccuagaccgggcagcc

SEQ ID NO: 1303986 - RNA, 19 nt, Artificial Sequence
  Description of Artificial Sequence: Synthetic oligonucleotide
auugccucguuaucccuuu

SEQ ID NO: 1303987 - RNA, 19 nt, Artificial Sequence
  Description of Artificial Sequence: Synthetic oligonucleotide
caaccuucccguuuuauau

SEQ ID NO: 1303988 - RNA, 19 nt, Artificial Sequence
  Description of Artificial Sequence: Synthetic oligonucleotide
caaauuugccguaagccuu

SEQ ID NO: 1303989 - RNA, 19 nt, Artificial Sequence
  Description of Artificial Sequence: Synthetic oligonucleotide
guugguguucugcacuaaa

SEQ ID NO: 1303990 - RNA, 19 nt, Artificial Sequence
  Description of Artificial Sequence: Synthetic oligonucleotide
agacuacgacugcugauuu

SEQ ID NO: 1303991 - RNA, 19 nt, Artificial Sequence
  Description of Artificial Sequence: Synthetic oligonucleotide
gaaccauacuugagcgaug

SEQ ID NO: 1303992 - RNA, 19 nt, Artificial Sequence
  Description of Artificial Sequence: Synthetic oligonucleotide
gucaagugcguucagcuuu

SEQ ID NO: 1303993 - RNA, 19 nt, Artificial Sequence
  Description of Artificial Sequence: Synthetic oligonucleotide
uaagacucacagggcaguc

SEQ ID NO: 1303994 - RNA, 19 nt, Artificial Sequence
  Description of Artificial Sequence: Synthetic oligonucleotide
cacuaaagaauggucaagu

SEQ ID NO: 1303995 - RNA, 19 nt, Artificial Sequence
  Description of Artificial Sequence: Synthetic oligonucleotide
agcuucauaccugcccucu

SEQ ID NO: 1303996 - RNA, 19 nt, Artificial Sequence
  Description of Artificial Sequence: Synthetic oligonucleotide
auauaacauggugguccag

SEQ ID NO: 1303997 - RNA, 19 nt, Artificial Sequence
  Description of Artificial Sequence: Synthetic oligonucleotide
auuugccguaagccuuucu

SEQ ID NO: 1303998 - RNA, 19 nt, Artificial Sequence
  Description of Artificial Sequence: Synthetic oligonucleotide
accacguauccaccucuga

SEQ ID NO: 1303999 - RNA, 19 nt, Artificial Sequence
  Description of Artificial Sequence: Synthetic oligonucleotide
cugaaccauacuugagcga

SEQ ID NO: 1304000 - RNA, 19 nt, Artificial Sequence
  Description of Artificial Sequence: Synthetic oligonucleotide
agaaguaguccgguuucau

SEQ ID NO: 1304001 - RNA, 19 nt, Artificial Sequence
  Description of Artificial Sequence: Synthetic oligonucleotide
aacuauugucauggagaua

SEQ ID NO: 1304002 - RNA, 19 nt, Artificial Sequence
  Description of Artificial Sequence: Synthetic oligonucleotide
ggaaucuucaagguagaua

SEQ ID NO: 1304003 - RNA, 19 nt, Artificial Sequence
  Description of Artificial Sequence: Synthetic oligonucleotide
gguugaacccuuuaucaau

SEQ ID NO: 1304004 - RNA, 19 nt, Artificial Sequence
  Description of Artificial Sequence: Synthetic oligonucleotide
cagccugugccaagacuac

SEQ ID NO: 1304005 - RNA, 19 nt, Artificial Sequence
  Description of Artificial Sequence: Synthetic oligonucleotide
uuacaagaacaugccugua

SEQ ID NO: 1304006 - RNA, 19 nt, Artificial Sequence
  Description of Artificial Sequence: Synthetic oligonucleotide
cuuucggucugagugauau

SEQ ID NO: 1304007 - RNA, 19 nt, Artificial Sequence
  Description of Artificial Sequence: Synthetic oligonucleotide
gcuguaccuagcccuagac

SEQ ID NO: 1304008 - RNA, 19 nt, Artificial Sequence
  Description of Artificial Sequence: Synthetic oligonucleotide
auacacacuuucagagaga

SEQ ID NO: 1304009 - RNA, 19 nt, Artificial Sequence
  Description of Artificial Sequence: Synthetic oligonucleotide
ccaaauuugccguaagccu

SEQ ID NO: 1304010 - RNA, 19 nt, Artificial Sequence
  Description of Artificial Sequence: Synthetic oligonucleotide
cugggauugaaugcuuuaa

SEQ ID NO: 1304011 - RNA, 19 nt, Artificial Sequence
  Description of Artificial Sequence: Synthetic oligonucleotide
ggacucaaccguuuccuaa

SEQ ID NO: 1304012 - RNA, 19 nt, Artificial Sequence
  Description of Artificial Sequence: Synthetic oligonucleotide
ggugaauuaugagccaaaa

SEQ ID NO: 1304013 - RNA, 19 nt, Artificial Sequence
  Description of Artificial Sequence: Synthetic oligonucleotide
uggugcuuucggucugagu

SEQ ID NO: 1304014 - RNA, 19 nt, Artificial Sequence
  Description of Artificial Sequence: Synthetic oligonucleotide
uuggugcuuucggucugag

SEQ ID NO: 1304015 - RNA, 19 nt, Artificial Sequence
  Description of Artificial Sequence: Synthetic oligonucleotide
accauacuugagcgaugga

SEQ ID NO: 1304016 - RNA, 19 nt, Artificial Sequence
  Description of Artificial Sequence: Synthetic oligonucleotide
gagaugcaugacugcaggu

SEQ ID NO: 1304017 - RNA, 19 nt, Artificial Sequence
  Description of Artificial Sequence: Synthetic oligonucleotide
ucaguccaauaaggcuugc

SEQ ID NO: 1304018 - RNA, 19 nt, Artificial Sequence
  Description of Artificial Sequence: Synthetic oligonucleotide
cacguauccaccucugaau

SEQ ID NO: 1304019 - RNA, 19 nt, Artificial Sequence
  Description of Artificial Sequence: Synthetic oligonucleotide
ggaagauaucauccaauau

SEQ ID NO: 1304020 - RNA, 19 nt, Artificial Sequence
  Description of Artificial Sequence: Synthetic oligonucleotide
uguugguguucugcacuaa

SEQ ID NO: 1304021 - RNA, 19 nt, Artificial Sequence
  Description of Artificial Sequence: Synthetic oligonucleotide
guuaucccuuuccaucagu

SEQ ID NO: 1304022 - RNA, 19 nt, Artificial Sequence
  Description of Artificial Sequence: Synthetic oligonucleotide
guauccaccucugaauaau

SEQ ID NO: 1304023 - RNA, 19 nt, Artificial Sequence
  Description of Artificial Sequence: Synthetic oligonucleotide
cugagaaguaguccgguuu

SEQ ID NO: 1304024 - RNA, 19 nt, Artificial Sequence
  Description of Artificial Sequence: Synthetic oligonucleotide
gcauccggaugaugguucc

SEQ ID NO: 1304025 - RNA, 19 nt, Artificial Sequence
  Description of Artificial Sequence: Synthetic oligonucleotide
cccuaaucauuuucucaug

SEQ ID NO: 1304026 - RNA, 19 nt, Artificial Sequence
  Description of Artificial Sequence: Synthetic oligonucleotide
cugcaggggcuguauguca

SEQ ID NO: 1304027 - RNA, 19 nt, Artificial Sequence
  Description of Artificial Sequence: Synthetic oligonucleotide
aguccgguuucaucuccuu

SEQ ID NO: 1304028 - RNA, 19 nt, Artificial Sequence
  Description of Artificial Sequence: Synthetic oligonucleotide
agcgauggagaggaauaua

SEQ ID NO: 1304029 - RNA, 19 nt, Artificial Sequence
  Description of Artificial Sequence: Synthetic oligonucleotide
cuagugucucucuuuuaau

SEQ ID NO: 1304030 - RNA, 19 nt, Artificial Sequence
  Description of Artificial Sequence: Synthetic oligonucleotide
cgaaugcuguaccuagccc

SEQ ID NO: 1304031 - RNA, 19 nt, Artificial Sequence
  Description of Artificial Sequence: Synthetic oligonucleotide
cccuagaccgggcagccug

SEQ ID NO: 1304032 - RNA, 19 nt, Artificial Sequence
  Description of Artificial Sequence: Synthetic oligonucleotide
cuaccuaugcagauccauu

SEQ ID NO: 1304033 - RNA, 19 nt, Artificial Sequence
  Description of Artificial Sequence: Synthetic oligonucleotide
ccguuuuauauuuaggcuu

SEQ ID NO: 1304034 - RNA, 19 nt, Artificial Sequence
  Description of Artificial Sequence: Synthetic oligonucleotide
ccugugccaagacuacgac

SEQ ID NO: 1304035 - RNA, 19 nt, Artificial Sequence
  Description of Artificial Sequence: Synthetic oligonucleotide
gguuuuccgcucucuaacu

SEQ ID NO: 1304036 - RNA, 19 nt, Artificial Sequence
  Description of Artificial Sequence: Synthetic oligonucleotide
caagacuacgacugcugau

SEQ ID NO: 1304037 - RNA, 19 nt, Artificial Sequence
  Description of Artificial Sequence: Synthetic oligonucleotide
ccuaacuaugaaaccacgu

SEQ ID NO: 1304038 - RNA, 19 nt, Artificial Sequence
  Description of Artificial Sequence: Synthetic oligonucleotide
cucaaccguuuccuaacua

SEQ ID NO: 1304039 - RNA, 19 nt, Artificial Sequence
  Description of Artificial Sequence: Synthetic oligonucleotide
ggcauccggaugaugguuc

SEQ ID NO: 1304040 - RNA, 19 nt, Artificial Sequence
  Description of Artificial Sequence: Synthetic oligonucleotide
ccaagacuacgacugcuga

SEQ ID NO: 1304041 - RNA, 19 nt, Artificial Sequence
  Description of Artificial Sequence: Synthetic oligonucleotide
gguccgcucguuguuggug

SEQ ID NO: 1304042 - RNA, 19 nt, Artificial Sequence
  Description of Artificial Sequence: Synthetic oligonucleotide
cucucgaaugcuguaccua

SEQ ID NO: 1304043 - RNA, 19 nt, Artificial Sequence
  Description of Artificial Sequence: Synthetic oligonucleotide
ccaauaaggcuugcacaug

SEQ ID NO: 1304044 - RNA, 19 nt, Artificial Sequence
  Description of Artificial Sequence: Synthetic oligonucleotide
gaaggguccgcucguuguu

SEQ ID NO: 1304045 - RNA, 19 nt, Artificial Sequence
  Description of Artificial Sequence: Synthetic oligonucleotide
ccguuuccuaacuaugaaa

SEQ ID NO: 1304046 - RNA, 19 nt, Artificial Sequence
  Description of Artificial Sequence: Synthetic oligonucleotide
gauugccucguuaucccuu

SEQ ID NO: 1304047 - RNA, 19 nt, Artificial Sequence
  Description of Artificial Sequence: Synthetic oligonucleotide
gauauuuaucgaggucauu

SEQ ID NO: 1304048 - RNA, 19 nt, Artificial Sequence
  Description of Artificial Sequence: Synthetic oligonucleotide
cuugcacaugcagcuaaua

SEQ ID NO: 1304049 - RNA, 19 nt, Artificial Sequence
  Description of Artificial Sequence: Synthetic oligonucleotide
ggcuucggaugagugccag

SEQ ID NO: 1304050 - RNA, 19 nt, Artificial Sequence
  Description of Artificial Sequence: Synthetic oligonucleotide
gccugugccaagacuacga

SEQ ID NO: 1304051 - RNA, 19 nt, Artificial Sequence
  Description of Artificial Sequence: Synthetic oligonucleotide
cuagaccgggcagccugug

SEQ ID NO: 1304052 - RNA, 19 nt, Artificial Sequence
  Description of Artificial Sequence: Synthetic oligonucleotide
gagcgauggagaggaauau

SEQ ID NO: 1304053 - RNA, 19 nt, Artificial Sequence
  Description of Artificial Sequence: Synthetic oligonucleotide
ccacguauccaccucugaa

SEQ ID NO: 1304054 - RNA, 19 nt, Artificial Sequence
  Description of Artificial Sequence: Synthetic oligonucleotide
ccuaaaacuaauguccauu

SEQ ID NO: 1304055 - RNA, 19 nt, Artificial Sequence
  Description of Artificial Sequence: Synthetic oligonucleotide
ccggaagaugccaguucug

SEQ ID NO: 1304056 - RNA, 19 nt, Artificial Sequence
  Description of Artificial Sequence: Synthetic oligonucleotide
cucuuuuaauugguggcuu

SEQ ID NO: 1304057 - RNA, 19 nt, Artificial Sequence
  Description of Artificial Sequence: Synthetic oligonucleotide
cguuaucccuuuccaucag

SEQ ID NO: 1304058 - RNA, 19 nt, Artificial Sequence
  Description of Artificial Sequence: Synthetic oligonucleotide
gacucacagggcagucaaa

SEQ ID NO: 1304059 - RNA, 19 nt, Artificial Sequence
  Description of Artificial Sequence: Synthetic oligonucleotide
cugaaugggauggcuuggu

SEQ ID NO: 1304060 - RNA, 19 nt, Artificial Sequence
  Description of Artificial Sequence: Synthetic oligonucleotide
gcagauagucugagaagua

SEQ ID NO: 1304061 - RNA, 19 nt, Artificial Sequence
  Description of Artificial Sequence: Synthetic oligonucleotide
ggauugccucguuaucccu

SEQ ID NO: 1304062 - RNA, 19 nt, Artificial Sequence
  Description of Artificial Sequence: Synthetic oligonucleotide
cugcccucugugaggcuaa

SEQ ID NO: 1304063 - RNA, 19 nt, Artificial Sequence
  Description of Artificial Sequence: Synthetic oligonucleotide
cagcuaauacacagauguu

SEQ ID NO: 1304064 - RNA, 19 nt, Artificial Sequence
  Description of Artificial Sequence: Synthetic oligonucleotide
gggcuguaugucagugaug

SEQ ID NO: 1304065 - RNA, 19 nt, Artificial Sequence
  Description of Artificial Sequence: Synthetic oligonucleotide
cauccggaugaugguucca

SEQ ID NO: 1304066 - RNA, 19 nt, Artificial Sequence
  Description of Artificial Sequence: Synthetic oligonucleotide
cuugagcgauggagaggaa

SEQ ID NO: 1304067 - RNA, 19 nt, Artificial Sequence
  Description of Artificial Sequence: Synthetic oligonucleotide
ggucaagugcguucagcuu

SEQ ID NO: 1304068 - RNA, 19 nt, Artificial Sequence
  Description of Artificial Sequence: Synthetic oligonucleotide
gcuguaugucagugaugaa

SEQ ID NO: 1304069 - RNA, 19 nt, Artificial Sequence
  Description of Artificial Sequence: Synthetic oligonucleotide
ggaauuggcugcagauagu

SEQ ID NO: 1304070 - RNA, 19 nt, Artificial Sequence
  Description of Artificial Sequence: Synthetic oligonucleotide
cucauagguugaacccuuu

SEQ ID NO: 1304071 - RNA, 19 nt, Artificial Sequence
  Description of Artificial Sequence: Synthetic oligonucleotide
gccguaagccuuucuggau

SEQ ID NO: 1304072 - RNA, 19 nt, Artificial Sequence
  Description of Artificial Sequence: Synthetic oligonucleotide
ccgguuucaucuccuucaa

SEQ ID NO: 1304073 - RNA, 19 nt, Artificial Sequence
  Description of Artificial Sequence: Synthetic oligonucleotide
guagaaggguccgcucguu

SEQ ID NO: 1304074 - RNA, 19 nt, Artificial Sequence
  Description of Artificial Sequence: Synthetic oligonucleotide
ccucauagguugaacccuu

SEQ ID NO: 1304075 - RNA, 19 nt, Artificial Sequence
  Description of Artificial Sequence: Synthetic oligonucleotide
cccuaaaacuaauguccau

SEQ ID NO: 1304076 - RNA, 19 nt, Artificial Sequence
  Description of Artificial Sequence: Synthetic oligonucleotide
gcagucaaacauggucagu

SEQ ID NO: 1304077 - RNA, 19 nt, Artificial Sequence
  Description of Artificial Sequence: Synthetic oligonucleotide
ccuucccguuuuauauuua

SEQ ID NO: 1304078 - RNA, 19 nt, Artificial Sequence
  Description of Artificial Sequence: Synthetic oligonucleotide
cggaugagugccaggaauu

SEQ ID NO: 1304079 - RNA, 19 nt, Artificial Sequence
  Description of Artificial Sequence: Synthetic oligonucleotide
gcuugcacaugcagcuaau

SEQ ID NO: 1304080 - RNA, 19 nt, Artificial Sequence
  Description of Artificial Sequence: Synthetic oligonucleotide
ccuagaccgggcagccugu

SEQ ID NO: 1304081 - RNA, 19 nt, Artificial Sequence
  Description of Artificial Sequence: Synthetic oligonucleotide
ggguccgcucguuguuggu

SEQ ID NO: 1304082 - RNA, 19 nt, Artificial Sequence
  Description of Artificial Sequence: Synthetic oligonucleotide
cgcucguuguugguguucu

SEQ ID NO: 1304083 - RNA, 19 nt, Artificial Sequence
  Description of Artificial Sequence: Synthetic oligonucleotide
gcccuagaccgggcagccu

SEQ ID NO: 1304084 - RNA, 19 nt, Artificial Sequence
  Description of Artificial Sequence: Synthetic oligonucleotide
ugggauauaagaaaugagg

SEQ ID NO: 1304085 - RNA, 19 nt, Artificial Sequence
  Description of Artificial Sequence: Synthetic oligonucleotide
ucaccauucauccagaagu

SEQ ID NO: 1304086 - RNA, 19 nt, Artificial Sequence
  Description of Artificial Sequence: Synthetic oligonucleotide
uuuuauuggauuaguugcg

SEQ ID NO: 1304087 - RNA, 19 nt, Artificial Sequence
  Description of Artificial Sequence: Synthetic oligonucleotide
uuauuaauguaccuacucc

SEQ ID NO: 1304088 - RNA, 19 nt, Artificial Sequence
  Description of Artificial Sequence: Synthetic oligonucleotide
aagggugagaaguaguggg

SEQ ID NO: 1304089 - RNA, 19 nt, Artificial Sequence
  Description of Artificial Sequence: Synthetic oligonucleotide
uauuaauguaccuacuccc

SEQ ID NO: 1304090 - RNA, 19 nt, Artificial Sequence
  Description of Artificial Sequence: Synthetic oligonucleotide
ucauccagaaguagaaggg

SEQ ID NO: 1304091 - RNA, 19 nt, Artificial Sequence
  Description of Artificial Sequence: Synthetic oligonucleotide
aggaccaugccauuguccc

SEQ ID NO: 1304092 - RNA, 19 nt, Artificial Sequence
  Description of Artificial Sequence: Synthetic oligonucleotide
ucugguaacaccacuguga

SEQ ID NO: 1304093 - RNA, 19 nt, Artificial Sequence
  Description of Artificial Sequence: Synthetic oligonucleotide
gagggaauggagcagcucg

SEQ ID NO: 1304094 - RNA, 19 nt, Artificial Sequence
  Description of Artificial Sequence: Synthetic oligonucleotide
uaaacuguugagcagugac

SEQ ID NO: 1304095 - RNA, 19 nt, Artificial Sequence
  Description of Artificial Sequence: Synthetic oligonucleotide
auaaauuuaggguuauccu

SEQ ID NO: 1304096 - RNA, 19 nt, Artificial Sequence
  Description of Artificial Sequence: Synthetic oligonucleotide
auuuccuuauuaauguacc

SEQ ID NO: 1304097 - RNA, 19 nt, Artificial Sequence
  Description of Artificial Sequence: Synthetic oligonucleotide
agcaucuuggucuggaggg

SEQ ID NO: 1304098 - RNA, 19 nt, Artificial Sequence
  Description of Artificial Sequence: Synthetic oligonucleotide
aaugcggucaccauucauc

SEQ ID NO: 1304099 - RNA, 19 nt, Artificial Sequence
  Description of Artificial Sequence: Synthetic oligonucleotide
uugcacucuucccagaggg

SEQ ID NO: 1304100 - RNA, 19 nt, Artificial Sequence
  Description of Artificial Sequence: Synthetic oligonucleotide
acauacaggaaagcaaugc

SEQ ID NO: 1304101 - RNA, 19 nt, Artificial Sequence
  Description of Artificial Sequence: Synthetic oligonucleotide
uguuucacucccuggacgg

SEQ ID NO: 1304102 - RNA, 19 nt, Artificial Sequence
  Description of Artificial Sequence: Synthetic oligonucleotide
uguggaaagccgaagggug

SEQ ID NO: 1304103 - RNA, 19 nt, Artificial Sequence
  Description of Artificial Sequence: Synthetic oligonucleotide
uguccauaaauuuaggguu

SEQ ID NO: 1304104 - RNA, 19 nt, Artificial Sequence
  Description of Artificial Sequence: Synthetic oligonucleotide
uccuuauuaauguaccuac

SEQ ID NO: 1304105 - RNA, 19 nt, Artificial Sequence
  Description of Artificial Sequence: Synthetic oligonucleotide
ucugcagacacgugcauag

SEQ ID NO: 1304106 - RNA, 19 nt, Artificial Sequence
  Description of Artificial Sequence: Synthetic oligonucleotide
uuaggguuauccuuggaga

SEQ ID NO: 1304107 - RNA, 19 nt, Artificial Sequence
  Description of Artificial Sequence: Synthetic oligonucleotide
ugcauagaacuucaugcag

SEQ ID NO: 1304108 - RNA, 19 nt, Artificial Sequence
  Description of Artificial Sequence: Synthetic oligonucleotide
uuuauuggauuaguugcgg

SEQ ID NO: 1304109 - RNA, 19 nt, Artificial Sequence
  Description of Artificial Sequence: Synthetic oligonucleotide
ucuucaggcacccugugga

SEQ ID NO: 1304110 - RNA, 19 nt, Artificial Sequence
  Description of Artificial Sequence: Synthetic oligonucleotide
gauauaagaaaugaggccu

SEQ ID NO: 1304111 - RNA, 19 nt, Artificial Sequence
  Description of Artificial Sequence: Synthetic oligonucleotide
aagaaaugaggccuccugu

SEQ ID NO: 1304112 - RNA, 19 nt, Artificial Sequence
  Description of Artificial Sequence: Synthetic oligonucleotide
uauuggauuaguugcggug

SEQ ID NO: 1304113 - RNA, 19 nt, Artificial Sequence
  Description of Artificial Sequence: Synthetic oligonucleotide
cuaggguucacuccaagag

SEQ ID NO: 1304114 - RNA, 19 nt, Artificial Sequence
  Description of Artificial Sequence: Synthetic oligonucleotide
augcggucaccauucaucc

SEQ ID NO: 1304115 - RNA, 19 nt, Artificial Sequence
  Description of Artificial Sequence: Synthetic oligonucleotide
ucuuaaacccuuguccggg

SEQ ID NO: 1304116 - RNA, 19 nt, Artificial Sequence
  Description of Artificial Sequence: Synthetic oligonucleotide
aaaugaggccuccugugug

SEQ ID NO: 1304117 - RNA, 19 nt, Artificial Sequence
  Description of Artificial Sequence: Synthetic oligonucleotide
uuaucuguuucacucccug

SEQ ID NO: 1304118 - RNA, 19 nt, Artificial Sequence
  Description of Artificial Sequence: Synthetic oligonucleotide
cacaaggcggcuuuuauug

SEQ ID NO: 1304119 - RNA, 19 nt, Artificial Sequence
  Description of Artificial Sequence: Synthetic oligonucleotide
cacccaauugaacuguucg

SEQ ID NO: 1304120 - RNA, 19 nt, Artificial Sequence
  Description of Artificial Sequence: Synthetic oligonucleotide
ggauauaagaaaugaggcc

SEQ ID NO: 1304121 - RNA, 19 nt, Artificial Sequence
  Description of Artificial Sequence: Synthetic oligonucleotide
uaauguaccuacucccuug

SEQ ID NO: 1304122 - RNA, 19 nt, Artificial Sequence
  Description of Artificial Sequence: Synthetic oligonucleotide
uguaccuacucccuugagu

SEQ ID NO: 1304123 - RNA, 19 nt, Artificial Sequence
  Description of Artificial Sequence: Synthetic oligonucleotide
auuuugaauuuccuuauua

SEQ ID NO: 1304124 - RNA, 19 nt, Artificial Sequence
  Description of Artificial Sequence: Synthetic oligonucleotide
ugaguuauuagaguggguu

SEQ ID NO: 1304125 - RNA, 19 nt, Artificial Sequence
  Description of Artificial Sequence: Synthetic oligonucleotide
agaaaugaggccuccugug

SEQ ID NO: 1304126 - RNA, 19 nt, Artificial Sequence
  Description of Artificial Sequence: Synthetic oligonucleotide
guaucauuucuaagaaugg

SEQ ID NO: 1304127 - RNA, 19 nt, Artificial Sequence
  Description of Artificial Sequence: Synthetic oligonucleotide
gcuuuuauuggauuaguug

SEQ ID NO: 1304128 - RNA, 19 nt, Artificial Sequence
  Description of Artificial Sequence: Synthetic oligonucleotide
uauuagaguggguugucac

SEQ ID NO: 1304129 - RNA, 19 nt, Artificial Sequence
  Description of Artificial Sequence: Synthetic oligonucleotide
aauguaccuacucccuuga

SEQ ID NO: 1304130 - RNA, 19 nt, Artificial Sequence
  Description of Artificial Sequence: Synthetic oligonucleotide
uuagaguggguugucacug

SEQ ID NO: 1304131 - RNA, 19 nt, Artificial Sequence
  Description of Artificial Sequence: Synthetic oligonucleotide
aauggcuggaacaugucgu

SEQ ID NO: 1304132 - RNA, 19 nt, Artificial Sequence
  Description of Artificial Sequence: Synthetic oligonucleotide
aucauggucucauugcaca

SEQ ID NO: 1304133 - RNA, 19 nt, Artificial Sequence
  Description of Artificial Sequence: Synthetic oligonucleotide
acgaccaccucagugacac

SEQ ID NO: 1304134 - RNA, 19 nt, Artificial Sequence
  Description of Artificial Sequence: Synthetic oligonucleotide
aagccgaagggugagaagu

SEQ ID NO: 1304135 - RNA, 19 nt, Artificial Sequence
  Description of Artificial Sequence: Synthetic oligonucleotide
uccacagacaagaucuccu

SEQ ID NO: 1304136 - RNA, 19 nt, Artificial Sequence
  Description of Artificial Sequence: Synthetic oligonucleotide
gggauauaagaaaugaggc

SEQ ID NO: 1304137 - RNA, 19 nt, Artificial Sequence
  Description of Artificial Sequence: Synthetic oligonucleotide
uccgggaaugccuucaacu

SEQ ID NO: 1304138 - RNA, 19 nt, Artificial Sequence
  Description of Artificial Sequence: Synthetic oligonucleotide
ugaagaaccgguccuggaa

SEQ ID NO: 1304139 - RNA, 19 nt, Artificial Sequence
  Description of Artificial Sequence: Synthetic oligonucleotide
uucuaugagggucuuuauc

SEQ ID NO: 1304140 - RNA, 19 nt, Artificial Sequence
  Description of Artificial Sequence: Synthetic oligonucleotide
agcucucuaggguucacuc

SEQ ID NO: 1304141 - RNA, 19 nt, Artificial Sequence
  Description of Artificial Sequence: Synthetic oligonucleotide
guaguacuggucuucgccc

SEQ ID NO: 1304142 - RNA, 19 nt, Artificial Sequence
  Description of Artificial Sequence: Synthetic oligonucleotide
auuagaguggguugucacu

SEQ ID NO: 1304143 - RNA, 19 nt, Artificial Sequence
  Description of Artificial Sequence: Synthetic oligonucleotide
gaagggugagaaguagugg

SEQ ID NO: 1304144 - RNA, 19 nt, Artificial Sequence
  Description of Artificial Sequence: Synthetic oligonucleotide
ccuggugucaucuagagca

SEQ ID NO: 1304145 - RNA, 19 nt, Artificial Sequence
  Description of Artificial Sequence: Synthetic oligonucleotide
ucaucuagagcauccuccu

SEQ ID NO: 1304146 - RNA, 19 nt, Artificial Sequence
  Description of Artificial Sequence: Synthetic oligonucleotide
ucuaggguucacuccaaga

SEQ ID NO: 1304147 - RNA, 19 nt, Artificial Sequence
  Description of Artificial Sequence: Synthetic oligonucleotide
agggaugaggcuacggacc

SEQ ID NO: 1304148 - RNA, 19 nt, Artificial Sequence
  Description of Artificial Sequence: Synthetic oligonucleotide
auauaagaaaugaggccuc

SEQ ID NO: 1304149 - RNA, 19 nt, Artificial Sequence
  Description of Artificial Sequence: Synthetic oligonucleotide
uguggaacuggacauccau

SEQ ID NO: 1304150 - RNA, 19 nt, Artificial Sequence
  Description of Artificial Sequence: Synthetic oligonucleotide
ucuguggaacuggacaucc

SEQ ID NO: 1304151 - RNA, 19 nt, Artificial Sequence
  Description of Artificial Sequence: Synthetic oligonucleotide
uauaagaaaugaggccucc

SEQ ID NO: 1304152 - RNA, 19 nt, Artificial Sequence
  Description of Artificial Sequence: Synthetic oligonucleotide
ggcauuagagugcagaauc

SEQ ID NO: 1304153 - RNA, 19 nt, Artificial Sequence
  Description of Artificial Sequence: Synthetic oligonucleotide
caugcggagcucucuaggg

SEQ ID NO: 1304154 - RNA, 19 nt, Artificial Sequence
  Description of Artificial Sequence: Synthetic oligonucleotide
cuugggauauaagaaauga

SEQ ID NO: 1304155 - RNA, 19 nt, Artificial Sequence
  Description of Artificial Sequence: Synthetic oligonucleotide
gacgcgaagguaguacugg

SEQ ID NO: 1304156 - RNA, 19 nt, Artificial Sequence
  Description of Artificial Sequence: Synthetic oligonucleotide
acaugcggagcucucuagg

SEQ ID NO: 1304157 - RNA, 19 nt, Artificial Sequence
  Description of Artificial Sequence: Synthetic oligonucleotide
uuauuggauuaguugcggu

SEQ ID NO: 1304158 - RNA, 19 nt, Artificial Sequence
  Description of Artificial Sequence: Synthetic oligonucleotide
cuguuucacucccuggacg

SEQ ID NO: 1304159 - RNA, 19 nt, Artificial Sequence
  Description of Artificial Sequence: Synthetic oligonucleotide
uucaguaucccugguguca

SEQ ID NO: 1304160 - RNA, 19 nt, Artificial Sequence
  Description of Artificial Sequence: Synthetic oligonucleotide
cucgccuggagacaugcgg

SEQ ID NO: 1304161 - RNA, 19 nt, Artificial Sequence
  Description of Artificial Sequence: Synthetic oligonucleotide
uguugugccugguguauca

SEQ ID NO: 1304162 - RNA, 19 nt, Artificial Sequence
  Description of Artificial Sequence: Synthetic oligonucleotide
aaacccuuguccgggaacu

SEQ ID NO: 1304163 - RNA, 19 nt, Artificial Sequence
  Description of Artificial Sequence: Synthetic oligonucleotide
auuaauguaccuacucccu

SEQ ID NO: 1304164 - RNA, 19 nt, Artificial Sequence
  Description of Artificial Sequence: Synthetic oligonucleotide
gaaguagaagggugaacuc

SEQ ID NO: 1304165 - RNA, 19 nt, Artificial Sequence
  Description of Artificial Sequence: Synthetic oligonucleotide
acaaggcggcuuuuauugg

SEQ ID NO: 1304166 - RNA, 19 nt, Artificial Sequence
  Description of Artificial Sequence: Synthetic oligonucleotide
cuggucuucgcccugugug

SEQ ID NO: 1304167 - RNA, 19 nt, Artificial Sequence
  Description of Artificial Sequence: Synthetic oligonucleotide
agggagucaaugcggucac

SEQ ID NO: 1304168 - RNA, 19 nt, Artificial Sequence
  Description of Artificial Sequence: Synthetic oligonucleotide
uggcggaucuccuugcaca

SEQ ID NO: 1304169 - RNA, 19 nt, Artificial Sequence
  Description of Artificial Sequence: Synthetic oligonucleotide
cauucauccagaaguagaa

SEQ ID NO: 1304170 - RNA, 19 nt, Artificial Sequence
  Description of Artificial Sequence: Synthetic oligonucleotide
ugucucauuccgcucggcu

SEQ ID NO: 1304171 - RNA, 19 nt, Artificial Sequence
  Description of Artificial Sequence: Synthetic oligonucleotide
uuauuagaguggguuguca

SEQ ID NO: 1304172 - RNA, 19 nt, Artificial Sequence
  Description of Artificial Sequence: Synthetic oligonucleotide
cacccuguggaguuguggc

SEQ ID NO: 1304173 - RNA, 19 nt, Artificial Sequence
  Description of Artificial Sequence: Synthetic oligonucleotide
uaaacccuuguccgggaac

SEQ ID NO: 1304174 - RNA, 19 nt, Artificial Sequence
  Description of Artificial Sequence: Synthetic oligonucleotide
gucaccauucauccagaag

SEQ ID NO: 1304175 - RNA, 19 nt, Artificial Sequence
  Description of Artificial Sequence: Synthetic oligonucleotide
ucccuggugucaucuagag

SEQ ID NO: 1304176 - RNA, 19 nt, Artificial Sequence
  Description of Artificial Sequence: Synthetic oligonucleotide
gcauagaacuucaugcagg

SEQ ID NO: 1304177 - RNA, 19 nt, Artificial Sequence
  Description of Artificial Sequence: Synthetic oligonucleotide
cuucucuuaaacccuuguc

SEQ ID NO: 1304178 - RNA, 19 nt, Artificial Sequence
  Description of Artificial Sequence: Synthetic oligonucleotide
gacacgugcauagaacuuc

SEQ ID NO: 1304179 - RNA, 19 nt, Artificial Sequence
  Description of Artificial Sequence: Synthetic oligonucleotide
ggagaaucuucauggcgcg

SEQ ID NO: 1304180 - RNA, 19 nt, Artificial Sequence
  Description of Artificial Sequence: Synthetic oligonucleotide
gugcauagaacuucaugca

SEQ ID NO: 1304181 - RNA, 19 nt, Artificial Sequence
  Description of Artificial Sequence: Synthetic oligonucleotide
gaagaaccgguccuggaaa

SEQ ID NO: 1304182 - RNA, 19 nt, Artificial Sequence
  Description of Artificial Sequence: Synthetic oligonucleotide
acaggaaagcaaugcuucu

SEQ ID NO: 1304183 - RNA, 19 nt, Artificial Sequence
  Description of Artificial Sequence: Synthetic oligonucleotide
gaauggagcagcucguugu

SEQ ID NO: 1304184 - RNA, 19 nt, Artificial Sequence
  Description of Artificial Sequence: Synthetic oligonucleotide
cccauagugggagagaggg

SEQ ID NO: 1304185 - RNA, 19 nt, Artificial Sequence
  Description of Artificial Sequence: Synthetic oligonucleotide
gaaccgguccuggaaaagc

SEQ ID NO: 1304186 - RNA, 19 nt, Artificial Sequence
  Description of Artificial Sequence: Synthetic oligonucleotide
ucgccuggagacaugcgga

SEQ ID NO: 1304187 - RNA, 19 nt, Artificial Sequence
  Description of Artificial Sequence: Synthetic oligonucleotide
gacaugcggagcucucuag

SEQ ID NO: 1304188 - RNA, 19 nt, Artificial Sequence
  Description of Artificial Sequence: Synthetic oligonucleotide
ucguuguacugcuggguca

SEQ ID NO: 1304189 - RNA, 19 nt, Artificial Sequence
  Description of Artificial Sequence: Synthetic oligonucleotide
caucauggucucauugcac

SEQ ID NO: 1304190 - RNA, 19 nt, Artificial Sequence
  Description of Artificial Sequence: Synthetic oligonucleotide
cuggagggagucauucagc

SEQ ID NO: 1304191 - RNA, 19 nt, Artificial Sequence
  Description of Artificial Sequence: Synthetic oligonucleotide
ucagugacacgggagggcu

SEQ ID NO: 1304192 - RNA, 19 nt, Artificial Sequence
  Description of Artificial Sequence: Synthetic oligonucleotide
gucaaugcggucaccauuc

SEQ ID NO: 1304193 - RNA, 19 nt, Artificial Sequence
  Description of Artificial Sequence: Synthetic oligonucleotide
uggaaagccgaagggugag

SEQ ID NO: 1304194 - RNA, 19 nt, Artificial Sequence
  Description of Artificial Sequence: Synthetic oligonucleotide
cacuguggagacgcgaagg

SEQ ID NO: 1304195 - RNA, 19 nt, Artificial Sequence
  Description of Artificial Sequence: Synthetic oligonucleotide
uuaaacccuuguccgggaa

SEQ ID NO: 1304196 - RNA, 19 nt, Artificial Sequence
  Description of Artificial Sequence: Synthetic oligonucleotide
cucguuguacugcuggguc

SEQ ID NO: 1304197 - RNA, 19 nt, Artificial Sequence
  Description of Artificial Sequence: Synthetic oligonucleotide
gcggucaccauucauccag

SEQ ID NO: 1304198 - RNA, 19 nt, Artificial Sequence
  Description of Artificial Sequence: Synthetic oligonucleotide
aguaucccuggugucaucu

SEQ ID NO: 1304199 - RNA, 19 nt, Artificial Sequence
  Description of Artificial Sequence: Synthetic oligonucleotide
uggucuucgcccuguguga

SEQ ID NO: 1304200 - RNA, 19 nt, Artificial Sequence
  Description of Artificial Sequence: Synthetic oligonucleotide
ugcacucuucccagagggc

SEQ ID NO: 1304201 - RNA, 19 nt, Artificial Sequence
  Description of Artificial Sequence: Synthetic oligonucleotide
uucgcccugugugagguug

SEQ ID NO: 1304202 - RNA, 19 nt, Artificial Sequence
  Description of Artificial Sequence: Synthetic oligonucleotide
aucacaaggcggcuuuuau

SEQ ID NO: 1304203 - RNA, 19 nt, Artificial Sequence
  Description of Artificial Sequence: Synthetic oligonucleotide
caugggugaagaaccgguc

SEQ ID NO: 1304204 - RNA, 19 nt, Artificial Sequence
  Description of Artificial Sequence: Synthetic oligonucleotide
uccgccacuguguccauaa

SEQ ID NO: 1304205 - RNA, 19 nt, Artificial Sequence
  Description of Artificial Sequence: Synthetic oligonucleotide
cuggaaaagcauguccaug

SEQ ID NO: 1304206 - RNA, 19 nt, Artificial Sequence
  Description of Artificial Sequence: Synthetic oligonucleotide
ucuucgcccugugugaggu

SEQ ID NO: 1304207 - RNA, 19 nt, Artificial Sequence
  Description of Artificial Sequence: Synthetic oligonucleotide
guaacaccacugugauggg

SEQ ID NO: 1304208 - RNA, 19 nt, Artificial Sequence
  Description of Artificial Sequence: Synthetic oligonucleotide
uacucgccuggagacaugc

SEQ ID NO: 1304209 - RNA, 19 nt, Artificial Sequence
  Description of Artificial Sequence: Synthetic oligonucleotide
gaaaugaggccuccugugu

SEQ ID NO: 1304210 - RNA, 19 nt, Artificial Sequence
  Description of Artificial Sequence: Synthetic oligonucleotide
ucaaccucucagccaucug

SEQ ID NO: 1304211 - RNA, 19 nt, Artificial Sequence
  Description of Artificial Sequence: Synthetic oligonucleotide
aaccgguccuggaaaagca

SEQ ID NO: 1304212 - RNA, 19 nt, Artificial Sequence
  Description of Artificial Sequence: Synthetic oligonucleotide
uccgcucggcuuuucuugc

SEQ ID NO: 1304213 - RNA, 19 nt, Artificial Sequence
  Description of Artificial Sequence: Synthetic oligonucleotide
uugcacacuuccgggaaug

SEQ ID NO: 1304214 - RNA, 19 nt, Artificial Sequence
  Description of Artificial Sequence: Synthetic oligonucleotide
ucacaaggcggcuuuuauu

SEQ ID NO: 1304215 - RNA, 19 nt, Artificial Sequence
  Description of Artificial Sequence: Synthetic oligonucleotide
auacaggaaagcaaugcuu

SEQ ID NO: 1304216 - RNA, 19 nt, Artificial Sequence
  Description of Artificial Sequence: Synthetic oligonucleotide
agguguugagcaucuuggu

SEQ ID NO: 1304217 - RNA, 19 nt, Artificial Sequence
  Description of Artificial Sequence: Synthetic oligonucleotide
gacuugcgcuccucauugg

SEQ ID NO: 1304218 - RNA, 19 nt, Artificial Sequence
  Description of Artificial Sequence: Synthetic oligonucleotide
aggcuacggaccaagcggg

SEQ ID NO: 1304219 - RNA, 19 nt, Artificial Sequence
  Description of Artificial Sequence: Synthetic oligonucleotide
cauacaggaaagcaaugcu

SEQ ID NO: 1304220 - RNA, 19 nt, Artificial Sequence
  Description of Artificial Sequence: Synthetic oligonucleotide
caugucguggaagcucggg

SEQ ID NO: 1304221 - RNA, 19 nt, Artificial Sequence
  Description of Artificial Sequence: Synthetic oligonucleotide
uggacggcauuuugaauuu

SEQ ID NO: 1304222 - RNA, 19 nt, Artificial Sequence
  Description of Artificial Sequence: Synthetic oligonucleotide
ucaaugcggucaccauuca

SEQ ID NO: 1304223 - RNA, 19 nt, Artificial Sequence
  Description of Artificial Sequence: Synthetic oligonucleotide
gagagggaugaggcuacgg

SEQ ID NO: 1304224 - RNA, 19 nt, Artificial Sequence
  Description of Artificial Sequence: Synthetic oligonucleotide
caccucagugacacgggag

SEQ ID NO: 1304225 - RNA, 19 nt, Artificial Sequence
  Description of Artificial Sequence: Synthetic oligonucleotide
cuucaggcacccuguggag

SEQ ID NO: 1304226 - RNA, 19 nt, Artificial Sequence
  Description of Artificial Sequence: Synthetic oligonucleotide
uccauaaauuuaggguuau

SEQ ID NO: 1304227 - RNA, 19 nt, Artificial Sequence
  Description of Artificial Sequence: Synthetic oligonucleotide
ugcggagcucucuaggguu

SEQ ID NO: 1304228 - RNA, 19 nt, Artificial Sequence
  Description of Artificial Sequence: Synthetic oligonucleotide
gguguugagcaucuugguc

SEQ ID NO: 1304229 - RNA, 19 nt, Artificial Sequence
  Description of Artificial Sequence: Synthetic oligonucleotide
cugcugucggucacucucc

SEQ ID NO: 1304230 - RNA, 19 nt, Artificial Sequence
  Description of Artificial Sequence: Synthetic oligonucleotide
agugacacgggagggcucu

SEQ ID NO: 1304231 - RNA, 19 nt, Artificial Sequence
  Description of Artificial Sequence: Synthetic oligonucleotide
ucucacacuggcccuucau

SEQ ID NO: 1304232 - RNA, 19 nt, Artificial Sequence
  Description of Artificial Sequence: Synthetic oligonucleotide
ugguaacaccacugugaug

SEQ ID NO: 1304233 - RNA, 19 nt, Artificial Sequence
  Description of Artificial Sequence: Synthetic oligonucleotide
cagggcuugcacucuuccc

SEQ ID NO: 1304234 - RNA, 19 nt, Artificial Sequence
  Description of Artificial Sequence: Synthetic oligonucleotide
ggaauggagcagcucguug

SEQ ID NO: 1304235 - RNA, 19 nt, Artificial Sequence
  Description of Artificial Sequence: Synthetic oligonucleotide
gaccagagccgcuucugca

SEQ ID NO: 1304236 - RNA, 19 nt, Artificial Sequence
  Description of Artificial Sequence: Synthetic oligonucleotide
agaaccgguccuggaaaag

SEQ ID NO: 1304237 - RNA, 19 nt, Artificial Sequence
  Description of Artificial Sequence: Synthetic oligonucleotide
guuauuagaguggguuguc

SEQ ID NO: 1304238 - RNA, 19 nt, Artificial Sequence
  Description of Artificial Sequence: Synthetic oligonucleotide
cagacacgugcauagaacu

SEQ ID NO: 1304239 - RNA, 19 nt, Artificial Sequence
  Description of Artificial Sequence: Synthetic oligonucleotide
uccagaugcccggguaaag

SEQ ID NO: 1304240 - RNA, 19 nt, Artificial Sequence
  Description of Artificial Sequence: Synthetic oligonucleotide
cuggacggcauuuugaauu

SEQ ID NO: 1304241 - RNA, 19 nt, Artificial Sequence
  Description of Artificial Sequence: Synthetic oligonucleotide
auugcacacuuccgggaau

SEQ ID NO: 1304242 - RNA, 19 nt, Artificial Sequence
  Description of Artificial Sequence: Synthetic oligonucleotide
gacaagaucuccuggcauu

SEQ ID NO: 1304243 - RNA, 19 nt, Artificial Sequence
  Description of Artificial Sequence: Synthetic oligonucleotide
cugggacacccaauugaac

SEQ ID NO: 1304244 - RNA, 19 nt, Artificial Sequence
  Description of Artificial Sequence: Synthetic oligonucleotide
cagacaagaucuccuggca

SEQ ID NO: 1304245 - RNA, 19 nt, Artificial Sequence
  Description of Artificial Sequence: Synthetic oligonucleotide
uuccgggaaugccuucaac

SEQ ID NO: 1304246 - RNA, 19 nt, Artificial Sequence
  Description of Artificial Sequence: Synthetic oligonucleotide
uggagacaugcggagcucu

SEQ ID NO: 1304247 - RNA, 19 nt, Artificial Sequence
  Description of Artificial Sequence: Synthetic oligonucleotide
gcaucuaggacuuggcucu

SEQ ID NO: 1304248 - RNA, 19 nt, Artificial Sequence
  Description of Artificial Sequence: Synthetic oligonucleotide
agccccacgcacaacagga

SEQ ID NO: 1304249 - RNA, 19 nt, Artificial Sequence
  Description of Artificial Sequence: Synthetic oligonucleotide
uucaggcacccuguggagu

SEQ ID NO: 1304250 - RNA, 19 nt, Artificial Sequence
  Description of Artificial Sequence: Synthetic oligonucleotide
acgcgaagguaguacuggu

SEQ ID NO: 1304251 - RNA, 19 nt, Artificial Sequence
  Description of Artificial Sequence: Synthetic oligonucleotide
gagacgcgaagguaguacu

SEQ ID NO: 1304252 - RNA, 19 nt, Artificial Sequence
  Description of Artificial Sequence: Synthetic oligonucleotide
ucucuaggguucacuccaa

SEQ ID NO: 1304253 - RNA, 19 nt, Artificial Sequence
  Description of Artificial Sequence: Synthetic oligonucleotide
gagaccuccugcucuccca

SEQ ID NO: 1304254 - RNA, 19 nt, Artificial Sequence
  Description of Artificial Sequence: Synthetic oligonucleotide
gaaaagcauguccaugauu

SEQ ID NO: 1304255 - RNA, 19 nt, Artificial Sequence
  Description of Artificial Sequence: Synthetic oligonucleotide
ggccaucauggucucauug

SEQ ID NO: 1304256 - RNA, 19 nt, Artificial Sequence
  Description of Artificial Sequence: Synthetic oligonucleotide
caggcauuagagugcagaa

SEQ ID NO: 1304257 - RNA, 19 nt, Artificial Sequence
  Description of Artificial Sequence: Synthetic oligonucleotide
cagaaguagaagggugaac

SEQ ID NO: 1304258 - RNA, 19 nt, Artificial Sequence
  Description of Artificial Sequence: Synthetic oligonucleotide
cacacuuccgggaaugccu

SEQ ID NO: 1304259 - RNA, 19 nt, Artificial Sequence
  Description of Artificial Sequence: Synthetic oligonucleotide
cauggcgcggccuccucug

SEQ ID NO: 1304260 - RNA, 19 nt, Artificial Sequence
  Description of Artificial Sequence: Synthetic oligonucleotide
gugaacucugguucagaaa

SEQ ID NO: 1304261 - RNA, 19 nt, Artificial Sequence
  Description of Artificial Sequence: Synthetic oligonucleotide
agacaugcggagcucucua

SEQ ID NO: 1304262 - RNA, 19 nt, Artificial Sequence
  Description of Artificial Sequence: Synthetic oligonucleotide
aaggcggcuuuuauuggau

SEQ ID NO: 1304263 - RNA, 19 nt, Artificial Sequence
  Description of Artificial Sequence: Synthetic oligonucleotide
gguuguuggcugaacaguc

SEQ ID NO: 1304264 - RNA, 19 nt, Artificial Sequence
  Description of Artificial Sequence: Synthetic oligonucleotide
cucuaaacuguugagcagu

SEQ ID NO: 1304265 - RNA, 19 nt, Artificial Sequence
  Description of Artificial Sequence: Synthetic oligonucleotide
caggguuguuggcugaaca

SEQ ID NO: 1304266 - RNA, 19 nt, Artificial Sequence
  Description of Artificial Sequence: Synthetic oligonucleotide
ucggagaccuccugcucuc

SEQ ID NO: 1304267 - RNA, 19 nt, Artificial Sequence
  Description of Artificial Sequence: Synthetic oligonucleotide
acaagaucuccuggcauuu

SEQ ID NO: 1304268 - RNA, 19 nt, Artificial Sequence
  Description of Artificial Sequence: Synthetic oligonucleotide
agcaaugcuucugucucau

SEQ ID NO: 1304269 - RNA, 19 nt, Artificial Sequence
  Description of Artificial Sequence: Synthetic oligonucleotide
ugcggucaccauucaucca

SEQ ID NO: 1304270 - RNA, 19 nt, Artificial Sequence
  Description of Artificial Sequence: Synthetic oligonucleotide
cagccccacgcacaacagg

SEQ ID NO: 1304271 - RNA, 19 nt, Artificial Sequence
  Description of Artificial Sequence: Synthetic oligonucleotide
agacgcgaagguaguacug

SEQ ID NO: 1304272 - RNA, 19 nt, Artificial Sequence
  Description of Artificial Sequence: Synthetic oligonucleotide
ggagacgcgaagguaguac

SEQ ID NO: 1304273 - RNA, 19 nt, Artificial Sequence
  Description of Artificial Sequence: Synthetic oligonucleotide
aacccuuguccgggaacug

SEQ ID NO: 1304274 - RNA, 19 nt, Artificial Sequence
  Description of Artificial Sequence: Synthetic oligonucleotide
ggagucaaugcggucacca

SEQ ID NO: 1304275 - RNA, 19 nt, Artificial Sequence
  Description of Artificial Sequence: Synthetic oligonucleotide
cugcacggucaucuucacc

SEQ ID NO: 1304276 - RNA, 19 nt, Artificial Sequence
  Description of Artificial Sequence: Synthetic oligonucleotide
aggcauuagagugcagaau

SEQ ID NO: 1304277 - RNA, 19 nt, Artificial Sequence
  Description of Artificial Sequence: Synthetic oligonucleotide
cucccuggacggcauuuug

SEQ ID NO: 1304278 - RNA, 19 nt, Artificial Sequence
  Description of Artificial Sequence: Synthetic oligonucleotide
gcggcuuuuauuggauuag

SEQ ID NO: 1304279 - RNA, 19 nt, Artificial Sequence
  Description of Artificial Sequence: Synthetic oligonucleotide
guggaaagccgaaggguga

SEQ ID NO: 1304280 - RNA, 19 nt, Artificial Sequence
  Description of Artificial Sequence: Synthetic oligonucleotide
gcgaagguaguacuggucu

SEQ ID NO: 1304281 - RNA, 19 nt, Artificial Sequence
  Description of Artificial Sequence: Synthetic oligonucleotide
agcgggacuugggauauaa

SEQ ID NO: 1304282 - RNA, 19 nt, Artificial Sequence
  Description of Artificial Sequence: Synthetic oligonucleotide
agcagugacuugcgcuccu

SEQ ID NO: 1304283 - RNA, 19 nt, Artificial Sequence
  Description of Artificial Sequence: Synthetic oligonucleotide
cggucacucuccaucaggg

SEQ ID NO: 1304284 - RNA, 19 nt, Artificial Sequence
  Description of Artificial Sequence: Synthetic oligonucleotide
gcucaugggugaagaaccg

SEQ ID NO: 1304285 - RNA, 19 nt, Artificial Sequence
  Description of Artificial Sequence: Synthetic oligonucleotide
gaugcccggguaaagcugu

SEQ ID NO: 1304286 - RNA, 19 nt, Artificial Sequence
  Description of Artificial Sequence: Synthetic oligonucleotide
ccggguaaagcuguccugc

SEQ ID NO: 1304287 - RNA, 19 nt, Artificial Sequence
  Description of Artificial Sequence: Synthetic oligonucleotide
uggcggccaaccagaccag

SEQ ID NO: 1304288 - RNA, 19 nt, Artificial Sequence
  Description of Artificial Sequence: Synthetic oligonucleotide
agugcagaauccagaggaa

SEQ ID NO: 1304289 - RNA, 19 nt, Artificial Sequence
  Description of Artificial Sequence: Synthetic oligonucleotide
guuucacucccuggacggc

SEQ ID NO: 1304290 - RNA, 19 nt, Artificial Sequence
  Description of Artificial Sequence: Synthetic oligonucleotide
ggagagagggaugaggcua

SEQ ID NO: 1304291 - RNA, 19 nt, Artificial Sequence
  Description of Artificial Sequence: Synthetic oligonucleotide
ugcccggguaaagcugucc

SEQ ID NO: 1304292 - RNA, 19 nt, Artificial Sequence
  Description of Artificial Sequence: Synthetic oligonucleotide
guccaugauuccagaugcc

SEQ ID NO: 1304293 - RNA, 19 nt, Artificial Sequence
  Description of Artificial Sequence: Synthetic oligonucleotide
uggugucaucuagagcauc

SEQ ID NO: 1304294 - RNA, 19 nt, Artificial Sequence
  Description of Artificial Sequence: Synthetic oligonucleotide
uacggaccaagcgggacuu

SEQ ID NO: 1304295 - RNA, 19 nt, Artificial Sequence
  Description of Artificial Sequence: Synthetic oligonucleotide
ccugguguaucauuucuaa

SEQ ID NO: 1304296 - RNA, 19 nt, Artificial Sequence
  Description of Artificial Sequence: Synthetic oligonucleotide
cuaaacuguugagcaguga

SEQ ID NO: 1304297 - RNA, 19 nt, Artificial Sequence
  Description of Artificial Sequence: Synthetic oligonucleotide
ccagaugcccggguaaagc

SEQ ID NO: 1304298 - RNA, 19 nt, Artificial Sequence
  Description of Artificial Sequence: Synthetic oligonucleotide
ggcggaucuccuugcacac

SEQ ID NO: 1304299 - RNA, 19 nt, Artificial Sequence
  Description of Artificial Sequence: Synthetic oligonucleotide
guguggaaagccgaagggu

SEQ ID NO: 1304300 - RNA, 19 nt, Artificial Sequence
  Description of Artificial Sequence: Synthetic oligonucleotide
aucccuggugucaucuaga

SEQ ID NO: 1304301 - RNA, 19 nt, Artificial Sequence
  Description of Artificial Sequence: Synthetic oligonucleotide
gacacgggagggcucuucu

SEQ ID NO: 1304302 - RNA, 19 nt, Artificial Sequence
  Description of Artificial Sequence: Synthetic oligonucleotide
gagaaguaguggguguccu

SEQ ID NO: 1304303 - RNA, 19 nt, Artificial Sequence
  Description of Artificial Sequence: Synthetic oligonucleotide
ggcggcuuuuauuggauua

SEQ ID NO: 1304304 - RNA, 19 nt, Artificial Sequence
  Description of Artificial Sequence: Synthetic oligonucleotide
gugccugguguaucauuuc

SEQ ID NO: 1304305 - RNA, 19 nt, Artificial Sequence
  Description of Artificial Sequence: Synthetic oligonucleotide
ggugagaaguagugggugu

SEQ ID NO: 1304306 - RNA, 19 nt, Artificial Sequence
  Description of Artificial Sequence: Synthetic oligonucleotide
ccaucauggucucauugca

SEQ ID NO: 1304307 - RNA, 19 nt, Artificial Sequence
  Description of Artificial Sequence: Synthetic oligonucleotide
gccaaccagaccagagccg

SEQ ID NO: 1304308 - RNA, 19 nt, Artificial Sequence
  Description of Artificial Sequence: Synthetic oligonucleotide
agacacgugcauagaacuu

SEQ ID NO: 1304309 - RNA, 19 nt, Artificial Sequence
  Description of Artificial Sequence: Synthetic oligonucleotide
gucuguggaacuggacauc

SEQ ID NO: 1304310 - RNA, 19 nt, Artificial Sequence
  Description of Artificial Sequence: Synthetic oligonucleotide
ccgguccuggaaaagcaug

SEQ ID NO: 1304311 - RNA, 19 nt, Artificial Sequence
  Description of Artificial Sequence: Synthetic oligonucleotide
ugcgcuccucauugguuuu

SEQ ID NO: 1304312 - RNA, 19 nt, Artificial Sequence
  Description of Artificial Sequence: Synthetic oligonucleotide
ggucuguggaacuggacau

SEQ ID NO: 1304313 - RNA, 19 nt, Artificial Sequence
  Description of Artificial Sequence: Synthetic oligonucleotide
ggucuucgcccugugugag

SEQ ID NO: 1304314 - RNA, 19 nt, Artificial Sequence
  Description of Artificial Sequence: Synthetic oligonucleotide
ggggucccggccuacucgc

SEQ ID NO: 1304315 - RNA, 19 nt, Artificial Sequence
  Description of Artificial Sequence: Synthetic oligonucleotide
cuacucgccuggagacaug

SEQ ID NO: 1304316 - RNA, 19 nt, Artificial Sequence
  Description of Artificial Sequence: Synthetic oligonucleotide
gagucaaugcggucaccau

SEQ ID NO: 1304317 - RNA, 19 nt, Artificial Sequence
  Description of Artificial Sequence: Synthetic oligonucleotide
cuguugugccugguguauc

SEQ ID NO: 1304318 - RNA, 19 nt, Artificial Sequence
  Description of Artificial Sequence: Synthetic oligonucleotide
acucgccuggagacaugcg

SEQ ID NO: 1304319 - RNA, 19 nt, Artificial Sequence
  Description of Artificial Sequence: Synthetic oligonucleotide
cuacggaccaagcgggacu

SEQ ID NO: 1304320 - RNA, 19 nt, Artificial Sequence
  Description of Artificial Sequence: Synthetic oligonucleotide
aggcggcuuuuauuggauu

SEQ ID NO: 1304321 - RNA, 19 nt, Artificial Sequence
  Description of Artificial Sequence: Synthetic oligonucleotide
gcgguauuccuguagcgcu

SEQ ID NO: 1304322 - RNA, 19 nt, Artificial Sequence
  Description of Artificial Sequence: Synthetic oligonucleotide
agcuggcggccaaccagac

SEQ ID NO: 1304323 - RNA, 19 nt, Artificial Sequence
  Description of Artificial Sequence: Synthetic oligonucleotide
ugacacgggagggcucuuc

SEQ ID NO: 1304324 - RNA, 19 nt, Artificial Sequence
  Description of Artificial Sequence: Synthetic oligonucleotide
gagacaugcggagcucucu

SEQ ID NO: 1304325 - RNA, 19 nt, Artificial Sequence
  Description of Artificial Sequence: Synthetic oligonucleotide
ccuguguggaaagccgaag

SEQ ID NO: 1304326 - RNA, 19 nt, Artificial Sequence
  Description of Artificial Sequence: Synthetic oligonucleotide
uggagacgcgaagguagua

SEQ ID NO: 1304327 - RNA, 19 nt, Artificial Sequence
  Description of Artificial Sequence: Synthetic oligonucleotide
caucuaggacuuggcucug

SEQ ID NO: 1304328 - RNA, 19 nt, Artificial Sequence
  Description of Artificial Sequence: Synthetic oligonucleotide
agggagucauucagcuccu

SEQ ID NO: 1304329 - RNA, 19 nt, Artificial Sequence
  Description of Artificial Sequence: Synthetic oligonucleotide
cacuuccgggaaugccuuc

SEQ ID NO: 1304330 - RNA, 19 nt, Artificial Sequence
  Description of Artificial Sequence: Synthetic oligonucleotide
cugaguuauuagagugggu

SEQ ID NO: 1304331 - RNA, 19 nt, Artificial Sequence
  Description of Artificial Sequence: Synthetic oligonucleotide
ugcacacugcacggucauc

SEQ ID NO: 1304332 - RNA, 19 nt, Artificial Sequence
  Description of Artificial Sequence: Synthetic oligonucleotide
gguccuggaaaagcauguc

SEQ ID NO: 1304333 - RNA, 19 nt, Artificial Sequence
  Description of Artificial Sequence: Synthetic oligonucleotide
ggaccaugccauuguccca

SEQ ID NO: 1304334 - RNA, 19 nt, Artificial Sequence
  Description of Artificial Sequence: Synthetic oligonucleotide
gcggccaaccagaccagag

SEQ ID NO: 1304335 - RNA, 19 nt, Artificial Sequence
  Description of Artificial Sequence: Synthetic oligonucleotide
gcuacggaccaagcgggac

SEQ ID NO: 1304336 - RNA, 19 nt, Artificial Sequence
  Description of Artificial Sequence: Synthetic oligonucleotide
gccauugucccaggucagc

SEQ ID NO: 1304337 - RNA, 19 nt, Artificial Sequence
  Description of Artificial Sequence: Synthetic oligonucleotide
agccugcgcaggguuguug

SEQ ID NO: 1304338 - RNA, 19 nt, Artificial Sequence
  Description of Artificial Sequence: Synthetic oligonucleotide
cccuggugucaucuagagc

SEQ ID NO: 1304339 - RNA, 19 nt, Artificial Sequence
  Description of Artificial Sequence: Synthetic oligonucleotide
ccuuauuaauguaccuacu

SEQ ID NO: 1304340 - RNA, 19 nt, Artificial Sequence
  Description of Artificial Sequence: Synthetic oligonucleotide
cuuccgggaaugccuucaa

SEQ ID NO: 1304341 - RNA, 19 nt, Artificial Sequence
  Description of Artificial Sequence: Synthetic oligonucleotide
cccggguaaagcuguccug

SEQ ID NO: 1304342 - RNA, 19 nt, Artificial Sequence
  Description of Artificial Sequence: Synthetic oligonucleotide
gcccauagugggagagagg

SEQ ID NO: 1304343 - RNA, 19 nt, Artificial Sequence
  Description of Artificial Sequence: Synthetic oligonucleotide
ggucaccauucauccagaa

SEQ ID NO: 1304344 - RNA, 19 nt, Artificial Sequence
  Description of Artificial Sequence: Synthetic oligonucleotide
cccacgcacaacaggagaa

SEQ ID NO: 1304345 - RNA, 19 nt, Artificial Sequence
  Description of Artificial Sequence: Synthetic oligonucleotide
acucccuggacggcauuuu

SEQ ID NO: 1304346 - RNA, 19 nt, Artificial Sequence
  Description of Artificial Sequence: Synthetic oligonucleotide
cacgaccaccucagugaca

SEQ ID NO: 1304347 - RNA, 19 nt, Artificial Sequence
  Description of Artificial Sequence: Synthetic oligonucleotide
cuacucccuugaguggaca

SEQ ID NO: 1304348 - RNA, 19 nt, Artificial Sequence
  Description of Artificial Sequence: Synthetic oligonucleotide
agccgaagggugagaagua

SEQ ID NO: 1304349 - RNA, 19 nt, Artificial Sequence
  Description of Artificial Sequence: Synthetic oligonucleotide
ccauaaauuuaggguuauc

SEQ ID NO: 1304350 - RNA, 19 nt, Artificial Sequence
  Description of Artificial Sequence: Synthetic oligonucleotide
gagcucucuaggguucacu

SEQ ID NO: 1304351 - RNA, 19 nt, Artificial Sequence
  Description of Artificial Sequence: Synthetic oligonucleotide
augcccggguaaagcuguc

SEQ ID NO: 1304352 - RNA, 19 nt, Artificial Sequence
  Description of Artificial Sequence: Synthetic oligonucleotide
ucauuccgcucggcuuuuc

SEQ ID NO: 1304353 - RNA, 19 nt, Artificial Sequence
  Description of Artificial Sequence: Synthetic oligonucleotide
gccuggagacaugcggagc

SEQ ID NO: 1304354 - RNA, 19 nt, Artificial Sequence
  Description of Artificial Sequence: Synthetic oligonucleotide
ggagacaugcggagcucuc

SEQ ID NO: 1304355 - RNA, 19 nt, Artificial Sequence
  Description of Artificial Sequence: Synthetic oligonucleotide
cggaccaagcgggacuugg

SEQ ID NO: 1304356 - RNA, 19 nt, Artificial Sequence
  Description of Artificial Sequence: Synthetic oligonucleotide
ggacacccaauugaacugu

SEQ ID NO: 1304357 - RNA, 19 nt, Artificial Sequence
  Description of Artificial Sequence: Synthetic oligonucleotide
ggcgcaggugagccugcgc

SEQ ID NO: 1304358 - RNA, 19 nt, Artificial Sequence
  Description of Artificial Sequence: Synthetic oligonucleotide
cgcgaagguaguacugguc

SEQ ID NO: 1304359 - RNA, 19 nt, Artificial Sequence
  Description of Artificial Sequence: Synthetic oligonucleotide
ccgcucggcuuuucuugcg

SEQ ID NO: 1304360 - RNA, 19 nt, Artificial Sequence
  Description of Artificial Sequence: Synthetic oligonucleotide
cuggugucaucuagagcau

SEQ ID NO: 1304361 - RNA, 19 nt, Artificial Sequence
  Description of Artificial Sequence: Synthetic oligonucleotide
ggaaagccgaagggugaga

SEQ ID NO: 1304362 - RNA, 19 nt, Artificial Sequence
  Description of Artificial Sequence: Synthetic oligonucleotide
cugcagacacgugcauaga

SEQ ID NO: 1304363 - RNA, 19 nt, Artificial Sequence
  Description of Artificial Sequence: Synthetic oligonucleotide
guggagacgcgaagguagu

SEQ ID NO: 1304364 - RNA, 19 nt, Artificial Sequence
  Description of Artificial Sequence: Synthetic oligonucleotide
caaugcggucaccauucau

SEQ ID NO: 1304365 - RNA, 19 nt, Artificial Sequence
  Description of Artificial Sequence: Synthetic oligonucleotide
cuggacauccauggccugu

SEQ ID NO: 1304366 - RNA, 19 nt, Artificial Sequence
  Description of Artificial Sequence: Synthetic oligonucleotide
gcgggacuugggauauaag

SEQ ID NO: 1304367 - RNA, 19 nt, Artificial Sequence
  Description of Artificial Sequence: Synthetic oligonucleotide
ggcuuuuauuggauuaguu

SEQ ID NO: 1304368 - RNA, 19 nt, Artificial Sequence
  Description of Artificial Sequence: Synthetic oligonucleotide
ccagaaguagaagggugaa

SEQ ID NO: 1304369 - RNA, 19 nt, Artificial Sequence
  Description of Artificial Sequence: Synthetic oligonucleotide
acggaccaagcgggacuug

SEQ ID NO: 1304370 - RNA, 19 nt, Artificial Sequence
  Description of Artificial Sequence: Synthetic oligonucleotide
caagcgggacuugggauau

SEQ ID NO: 1304371 - RNA, 19 nt, Artificial Sequence
  Description of Artificial Sequence: Synthetic oligonucleotide
gccuguugugccuggugua

SEQ ID NO: 1304372 - RNA, 19 nt, Artificial Sequence
  Description of Artificial Sequence: Synthetic oligonucleotide
ccccacgcacaacaggaga

SEQ ID NO: 1304373 - RNA, 19 nt, Artificial Sequence
  Description of Artificial Sequence: Synthetic oligonucleotide
uuccgccacuguguccaua

SEQ ID NO: 1304374 - RNA, 19 nt, Artificial Sequence
  Description of Artificial Sequence: Synthetic oligonucleotide
gcccggguaaagcuguccu

SEQ ID NO: 1304375 - RNA, 19 nt, Artificial Sequence
  Description of Artificial Sequence: Synthetic oligonucleotide
ggacggcauuuugaauuuc

SEQ ID NO: 1304376 - RNA, 19 nt, Artificial Sequence
  Description of Artificial Sequence: Synthetic oligonucleotide
ccagagccgcuucugcaga

SEQ ID NO: 1304377 - RNA, 19 nt, Artificial Sequence
  Description of Artificial Sequence: Synthetic oligonucleotide
gggaugagguguugagcau

SEQ ID NO: 1304378 - RNA, 19 nt, Artificial Sequence
  Description of Artificial Sequence: Synthetic oligonucleotide
ccggccuacucgccuggag

SEQ ID NO: 1304379 - RNA, 19 nt, Artificial Sequence
  Description of Artificial Sequence: Synthetic oligonucleotide
ggagcucucuaggguucac

SEQ ID NO: 1304380 - RNA, 19 nt, Artificial Sequence
  Description of Artificial Sequence: Synthetic oligonucleotide
gcggagcucucuaggguuc

SEQ ID NO: 1304381 - RNA, 19 nt, Artificial Sequence
  Description of Artificial Sequence: Synthetic oligonucleotide
gccugguguaucauuucua

SEQ ID NO: 1304382 - RNA, 19 nt, Artificial Sequence
  Description of Artificial Sequence: Synthetic oligonucleotide
ggccuccuguguggaaagc

SEQ ID NO: 1304383 - RNA, 19 nt, Artificial Sequence
  Description of Artificial Sequence: Synthetic oligonucleotide
ccgggaaugccuucaacuu

SEQ ID NO: 1304384 - RNA, 19 nt, Artificial Sequence
  Description of Artificial Sequence: Synthetic oligonucleotide
cuucccagagggccaucau

SEQ ID NO: 1304385 - RNA, 19 nt, Artificial Sequence
  Description of Artificial Sequence: Synthetic oligonucleotide
gcagugacuugcgcuccuc

SEQ ID NO: 1304386 - RNA, 19 nt, Artificial Sequence
  Description of Artificial Sequence: Synthetic oligonucleotide
ccuuguccgggaacuggaa

SEQ ID NO: 1304387 - RNA, 19 nt, Artificial Sequence
  Description of Artificial Sequence: Synthetic oligonucleotide
cacgugcauagaacuucau

SEQ ID NO: 1304388 - RNA, 19 nt, Artificial Sequence
  Description of Artificial Sequence: Synthetic oligonucleotide
ggucccggccuacucgccu

SEQ ID NO: 1304389 - RNA, 19 nt, Artificial Sequence
  Description of Artificial Sequence: Synthetic oligonucleotide
guauuccuguagcgcuuuu

SEQ ID NO: 1304390 - RNA, 19 nt, Artificial Sequence
  Description of Artificial Sequence: Synthetic oligonucleotide
cggccuacucgccuggaga

SEQ ID NO: 1304391 - RNA, 19 nt, Artificial Sequence
  Description of Artificial Sequence: Synthetic oligonucleotide
ggcuacggaccaagcggga

SEQ ID NO: 1304392 - RNA, 19 nt, Artificial Sequence
  Description of Artificial Sequence: Synthetic oligonucleotide
guccgggaacuggaaggcu

SEQ ID NO: 1304393 - RNA, 19 nt, Artificial Sequence
  Description of Artificial Sequence: Synthetic oligonucleotide
cguuguacugcugggucaa

SEQ ID NO: 1304394 - RNA, 19 nt, Artificial Sequence
  Description of Artificial Sequence: Synthetic oligonucleotide
ggcgcggccuccucugggu

SEQ ID NO: 1304395 - RNA, 19 nt, Artificial Sequence
  Description of Artificial Sequence: Synthetic oligonucleotide
ccgcuucugcagacacgug

SEQ ID NO: 1304396 - RNA, 19 nt, Artificial Sequence
  Description of Artificial Sequence: Synthetic oligonucleotide
ccuacucgccuggagacau

SEQ ID NO: 1304397 - RNA, 19 nt, Artificial Sequence
  Description of Artificial Sequence: Synthetic oligonucleotide
ggcggccaaccagaccaga

SEQ ID NO: 1304398 - RNA, 19 nt, Artificial Sequence
  Description of Artificial Sequence: Synthetic oligonucleotide
gggucccggccuacucgcc

SEQ ID NO: 1304399 - RNA, 19 nt, Artificial Sequence
  Description of Artificial Sequence: Synthetic oligonucleotide
cggucaccauucauccaga

SEQ ID NO: 1304400 - RNA, 19 nt, Artificial Sequence
  Description of Artificial Sequence: Synthetic oligonucleotide
gcuucacgaccaccucagu

SEQ ID NO: 1304401 - RNA, 19 nt, Artificial Sequence
  Description of Artificial Sequence: Synthetic oligonucleotide
gcgcggccuccucuggguc

SEQ ID NO: 1304402 - RNA, 19 nt, Artificial Sequence
  Description of Artificial Sequence: Synthetic oligonucleotide
ccuggacggcauuuugaau

SEQ ID NO: 1304403 - RNA, 19 nt, Artificial Sequence
  Description of Artificial Sequence: Synthetic oligonucleotide
cucauuccgcucggcuuuu

SEQ ID NO: 1304404 - RNA, 19 nt, Artificial Sequence
  Description of Artificial Sequence: Synthetic oligonucleotide
ccacgcacaacaggagaau

SEQ ID NO: 1304405 - RNA, 19 nt, Artificial Sequence
  Description of Artificial Sequence: Synthetic oligonucleotide
cggcuuuuauuggauuagu

SEQ ID NO: 1304406 - RNA, 19 nt, Artificial Sequence
  Description of Artificial Sequence: Synthetic oligonucleotide
cgguauuccuguagcgcuu

SEQ ID NO: 1304407 - RNA, 19 nt, Artificial Sequence
  Description of Artificial Sequence: Synthetic oligonucleotide
cccggccuacucgccugga

SEQ ID NO: 1304408 - RNA, 19 nt, Artificial Sequence
  Description of Artificial Sequence: Synthetic oligonucleotide
uuaauauucagauucagcc

SEQ ID NO: 1304409 - RNA, 19 nt, Artificial Sequence
  Description of Artificial Sequence: Synthetic oligonucleotide
ugagcuaugaucaacacug

SEQ ID NO: 1304410 - RNA, 19 nt, Artificial Sequence
  Description of Artificial Sequence: Synthetic oligonucleotide
aacagggucauacaaccgc

SEQ ID NO: 1304411 - RNA, 19 nt, Artificial Sequence
  Description of Artificial Sequence: Synthetic oligonucleotide
aauaccugcuuauuuguac

SEQ ID NO: 1304412 - RNA, 19 nt, Artificial Sequence
  Description of Artificial Sequence: Synthetic oligonucleotide
cuuaauaguggacaggcgg

SEQ ID NO: 1304413 - RNA, 19 nt, Artificial Sequence
  Description of Artificial Sequence: Synthetic oligonucleotide
ugaacuuagaccuccaaug

SEQ ID NO: 1304414 - RNA, 19 nt, Artificial Sequence
  Description of Artificial Sequence: Synthetic oligonucleotide
uuuaauauucagauucagc

SEQ ID NO: 1304415 - RNA, 19 nt, Artificial Sequence
  Description of Artificial Sequence: Synthetic oligonucleotide
agcacaaucagguugcccg

SEQ ID NO: 1304416 - RNA, 19 nt, Artificial Sequence
  Description of Artificial Sequence: Synthetic oligonucleotide
ucucaucuaacacaguucc

SEQ ID NO: 1304417 - RNA, 19 nt, Artificial Sequence
  Description of Artificial Sequence: Synthetic oligonucleotide
agugcugaaacccuguggg

SEQ ID NO: 1304418 - RNA, 19 nt, Artificial Sequence
  Description of Artificial Sequence: Synthetic oligonucleotide
uuuucugcgacagagcagg

SEQ ID NO: 1304419 - RNA, 19 nt, Artificial Sequence
  Description of Artificial Sequence: Synthetic oligonucleotide
gaaacagggucauacaacc

SEQ ID NO: 1304420 - RNA, 19 nt, Artificial Sequence
  Description of Artificial Sequence: Synthetic oligonucleotide
ucaaaaguagcucuucaug

SEQ ID NO: 1304421 - RNA, 19 nt, Artificial Sequence
  Description of Artificial Sequence: Synthetic oligonucleotide
uucagauucagccuuauua

SEQ ID NO: 1304422 - RNA, 19 nt, Artificial Sequence
  Description of Artificial Sequence: Synthetic oligonucleotide
aauauucagauucagccuu

SEQ ID NO: 1304423 - RNA, 19 nt, Artificial Sequence
  Description of Artificial Sequence: Synthetic oligonucleotide
cucaauccaacccagaaag

SEQ ID NO: 1304424 - RNA, 19 nt, Artificial Sequence
  Description of Artificial Sequence: Synthetic oligonucleotide
cuauaauuaauauaucuga

SEQ ID NO: 1304425 - RNA, 19 nt, Artificial Sequence
  Description of Artificial Sequence: Synthetic oligonucleotide
ugacagauccagauggugg

SEQ ID NO: 1304426 - RNA, 19 nt, Artificial Sequence
  Description of Artificial Sequence: Synthetic oligonucleotide
auaccugcuuauuuguacc

SEQ ID NO: 1304427 - RNA, 19 nt, Artificial Sequence
  Description of Artificial Sequence: Synthetic oligonucleotide
aauuccgcagcauuggcca

SEQ ID NO: 1304428 - RNA, 19 nt, Artificial Sequence
  Description of Artificial Sequence: Synthetic oligonucleotide
ucuguaaagcccauugggc

SEQ ID NO: 1304429 - RNA, 19 nt, Artificial Sequence
  Description of Artificial Sequence: Synthetic oligonucleotide
uguuuucugcgacagagca

SEQ ID NO: 1304430 - RNA, 19 nt, Artificial Sequence
  Description of Artificial Sequence: Synthetic oligonucleotide
aaagaagccggcucucgcg

SEQ ID NO: 1304431 - RNA, 19 nt, Artificial Sequence
  Description of Artificial Sequence: Synthetic oligonucleotide
aucagguugcccgagagcc

SEQ ID NO: 1304432 - RNA, 19 nt, Artificial Sequence
  Description of Artificial Sequence: Synthetic oligonucleotide
guagaaugaacuuagaccu

SEQ ID NO: 1304433 - RNA, 19 nt, Artificial Sequence
  Description of Artificial Sequence: Synthetic oligonucleotide
uuaguacuaaacuuuaaua

SEQ ID NO: 1304434 - RNA, 19 nt, Artificial Sequence
  Description of Artificial Sequence: Synthetic oligonucleotide
aauauaucugaaaauuaca

SEQ ID NO: 1304435 - RNA, 19 nt, Artificial Sequence
  Description of Artificial Sequence: Synthetic oligonucleotide
acacagauacuucuggccg

SEQ ID NO: 1304436 - RNA, 19 nt, Artificial Sequence
  Description of Artificial Sequence: Synthetic oligonucleotide
uucuuaauaguggacaggc

SEQ ID NO: 1304437 - RNA, 19 nt, Artificial Sequence
  Description of Artificial Sequence: Synthetic oligonucleotide
cauuaaaaggcaguugugg

SEQ ID NO: 1304438 - RNA, 19 nt, Artificial Sequence
  Description of Artificial Sequence: Synthetic oligonucleotide
agaauuuugggguucuuca

SEQ ID NO: 1304439 - RNA, 19 nt, Artificial Sequence
  Description of Artificial Sequence: Synthetic oligonucleotide
ucucauacgcccuagugcu

SEQ ID NO: 1304440 - RNA, 19 nt, Artificial Sequence
  Description of Artificial Sequence: Synthetic oligonucleotide
uaauauucagauucagccu

SEQ ID NO: 1304441 - RNA, 19 nt, Artificial Sequence
  Description of Artificial Sequence: Synthetic oligonucleotide
aucagcucggaguagaaug

SEQ ID NO: 1304442 - RNA, 19 nt, Artificial Sequence
  Description of Artificial Sequence: Synthetic oligonucleotide
uuaauaguggacaggcggu

SEQ ID NO: 1304443 - RNA, 19 nt, Artificial Sequence
  Description of Artificial Sequence: Synthetic oligonucleotide
ucuacgaaugaauuccgca

SEQ ID NO: 1304444 - RNA, 19 nt, Artificial Sequence
  Description of Artificial Sequence: Synthetic oligonucleotide
augaucaacacuguucuuc

SEQ ID NO: 1304445 - RNA, 19 nt, Artificial Sequence
  Description of Artificial Sequence: Synthetic oligonucleotide
aaugucguggccaucaaga

SEQ ID NO: 1304446 - RNA, 19 nt, Artificial Sequence
  Description of Artificial Sequence: Synthetic oligonucleotide
gaacuuagaccuccaaugc

SEQ ID NO: 1304447 - RNA, 19 nt, Artificial Sequence
  Description of Artificial Sequence: Synthetic oligonucleotide
cuacgaaugaauuccgcag

SEQ ID NO: 1304448 - RNA, 19 nt, Artificial Sequence
  Description of Artificial Sequence: Synthetic oligonucleotide
acugucccaaccuuggauc

SEQ ID NO: 1304449 - RNA, 19 nt, Artificial Sequence
  Description of Artificial Sequence: Synthetic oligonucleotide
uacgaaugaauuccgcagc

SEQ ID NO: 1304450 - RNA, 19 nt, Artificial Sequence
  Description of Artificial Sequence: Synthetic oligonucleotide
agacaaggcaagcuuuccc

SEQ ID NO: 1304451 - RNA, 19 nt, Artificial Sequence
  Description of Artificial Sequence: Synthetic oligonucleotide
ucuuaauaguggacaggcg

SEQ ID NO: 1304452 - RNA, 19 nt, Artificial Sequence
  Description of Artificial Sequence: Synthetic oligonucleotide
augugucccauguucaacg

SEQ ID NO: 1304453 - RNA, 19 nt, Artificial Sequence
  Description of Artificial Sequence: Synthetic oligonucleotide
uauaucugaaaauuacaua

SEQ ID NO: 1304454 - RNA, 19 nt, Artificial Sequence
  Description of Artificial Sequence: Synthetic oligonucleotide
aaccuuggaucucagccag

SEQ ID NO: 1304455 - RNA, 19 nt, Artificial Sequence
  Description of Artificial Sequence: Synthetic oligonucleotide
gaguagaaugaacuuagac

SEQ ID NO: 1304456 - RNA, 19 nt, Artificial Sequence
  Description of Artificial Sequence: Synthetic oligonucleotide
caauccaacccagaaagcg

SEQ ID NO: 1304457 - RNA, 19 nt, Artificial Sequence
  Description of Artificial Sequence: Synthetic oligonucleotide
aaacuauaauuaauauauc

SEQ ID NO: 1304458 - RNA, 19 nt, Artificial Sequence
  Description of Artificial Sequence: Synthetic oligonucleotide
uguucauuaguuuucugua

SEQ ID NO: 1304459 - RNA, 19 nt, Artificial Sequence
  Description of Artificial Sequence: Synthetic oligonucleotide
guuuagcugacgaaugucg

SEQ ID NO: 1304460 - RNA, 19 nt, Artificial Sequence
  Description of Artificial Sequence: Synthetic oligonucleotide
caugcuucaacaaauguaa

SEQ ID NO: 1304461 - RNA, 19 nt, Artificial Sequence
  Description of Artificial Sequence: Synthetic oligonucleotide
uguucaacgaucuuuccuu

SEQ ID NO: 1304462 - RNA, 19 nt, Artificial Sequence
  Description of Artificial Sequence: Synthetic oligonucleotide
ugacaguugcagccuaugg

SEQ ID NO: 1304463 - RNA, 19 nt, Artificial Sequence
  Description of Artificial Sequence: Synthetic oligonucleotide
aacuuagaccuccaaugcu

SEQ ID NO: 1304464 - RNA, 19 nt, Artificial Sequence
  Description of Artificial Sequence: Synthetic oligonucleotide
gaauuuugggguucuucag

SEQ ID NO: 1304465 - RNA, 19 nt, Artificial Sequence
  Description of Artificial Sequence: Synthetic oligonucleotide
caucaagacugacaguucc

SEQ ID NO: 1304466 - RNA, 19 nt, Artificial Sequence
  Description of Artificial Sequence: Synthetic oligonucleotide
uacaugcuucaacaaaugu

SEQ ID NO: 1304467 - RNA, 19 nt, Artificial Sequence
  Description of Artificial Sequence: Synthetic oligonucleotide
cucucauacgcccuagugc

SEQ ID NO: 1304468 - RNA, 19 nt, Artificial Sequence
  Description of Artificial Sequence: Synthetic oligonucleotide
auauaucugaaaauuacau

SEQ ID NO: 1304469 - RNA, 19 nt, Artificial Sequence
  Description of Artificial Sequence: Synthetic oligonucleotide
ucauacaaccgcagcagga

SEQ ID NO: 1304470 - RNA, 19 nt, Artificial Sequence
  Description of Artificial Sequence: Synthetic oligonucleotide
acuuagaccuccaaugcuc

SEQ ID NO: 1304471 - RNA, 19 nt, Artificial Sequence
  Description of Artificial Sequence: Synthetic oligonucleotide
agaccuccaaugcucaauc

SEQ ID NO: 1304472 - RNA, 19 nt, Artificial Sequence
  Description of Artificial Sequence: Synthetic oligonucleotide
ucaacgaucuuuccuuggu

SEQ ID NO: 1304473 - RNA, 19 nt, Artificial Sequence
  Description of Artificial Sequence: Synthetic oligonucleotide
uccuguuuacagaauggga

SEQ ID NO: 1304474 - RNA, 19 nt, Artificial Sequence
  Description of Artificial Sequence: Synthetic oligonucleotide
uucaacgaucuuuccuugg

SEQ ID NO: 1304475 - RNA, 19 nt, Artificial Sequence
  Description of Artificial Sequence: Synthetic oligonucleotide
uggaacacagauacuucug

SEQ ID NO: 1304476 - RNA, 19 nt, Artificial Sequence
  Description of Artificial Sequence: Synthetic oligonucleotide
ugucccauguucaacgauc

SEQ ID NO: 1304477 - RNA, 19 nt, Artificial Sequence
  Description of Artificial Sequence: Synthetic oligonucleotide
aauuggcauucuuaauagu

SEQ ID NO: 1304478 - RNA, 19 nt, Artificial Sequence
  Description of Artificial Sequence: Synthetic oligonucleotide
caauccuuuguuucugccc

SEQ ID NO: 1304479 - RNA, 19 nt, Artificial Sequence
  Description of Artificial Sequence: Synthetic oligonucleotide
cuuuuguugcuaauaccug

SEQ ID NO: 1304480 - RNA, 19 nt, Artificial Sequence
  Description of Artificial Sequence: Synthetic oligonucleotide
uacaaccgcagcaggagug

SEQ ID NO: 1304481 - RNA, 19 nt, Artificial Sequence
  Description of Artificial Sequence: Synthetic oligonucleotide
ucagcucggaguagaauga

SEQ ID NO: 1304482 - RNA, 19 nt, Artificial Sequence
  Description of Artificial Sequence: Synthetic oligonucleotide
uuagcugacgaaugucgug

SEQ ID NO: 1304483 - RNA, 19 nt, Artificial Sequence
  Description of Artificial Sequence: Synthetic oligonucleotide
auucuuaauaguggacagg

SEQ ID NO: 1304484 - RNA, 19 nt, Artificial Sequence
  Description of Artificial Sequence: Synthetic oligonucleotide
cuuuaauauucagauucag

SEQ ID NO: 1304485 - RNA, 19 nt, Artificial Sequence
  Description of Artificial Sequence: Synthetic oligonucleotide
auguucaacgaucuuuccu

SEQ ID NO: 1304486 - RNA, 19 nt, Artificial Sequence
  Description of Artificial Sequence: Synthetic oligonucleotide
uaggcaauguuuucugcga

SEQ ID NO: 1304487 - RNA, 19 nt, Artificial Sequence
  Description of Artificial Sequence: Synthetic oligonucleotide
gaaggaggagaguucgccc

SEQ ID NO: 1304488 - RNA, 19 nt, Artificial Sequence
  Description of Artificial Sequence: Synthetic oligonucleotide
cugacugucccaaccuugg

SEQ ID NO: 1304489 - RNA, 19 nt, Artificial Sequence
  Description of Artificial Sequence: Synthetic oligonucleotide
auacuucuggccgagcagg

SEQ ID NO: 1304490 - RNA, 19 nt, Artificial Sequence
  Description of Artificial Sequence: Synthetic oligonucleotide
ugcucaauccaacccagaa

SEQ ID NO: 1304491 - RNA, 19 nt, Artificial Sequence
  Description of Artificial Sequence: Synthetic oligonucleotide
ugugggaaucuacgaauga

SEQ ID NO: 1304492 - RNA, 19 nt, Artificial Sequence
  Description of Artificial Sequence: Synthetic oligonucleotide
ugaauuccgcagcauuggc

SEQ ID NO: 1304493 - RNA, 19 nt, Artificial Sequence
  Description of Artificial Sequence: Synthetic oligonucleotide
cagaaagcguacaugagga

SEQ ID NO: 1304494 - RNA, 19 nt, Artificial Sequence
  Description of Artificial Sequence: Synthetic oligonucleotide
uguugcuaauaccugcuua

SEQ ID NO: 1304495 - RNA, 19 nt, Artificial Sequence
  Description of Artificial Sequence: Synthetic oligonucleotide
agaaccacuggggccaacc

SEQ ID NO: 1304496 - RNA, 19 nt, Artificial Sequence
  Description of Artificial Sequence: Synthetic oligonucleotide
ggcaaaaugcaucaggcuc

SEQ ID NO: 1304497 - RNA, 19 nt, Artificial Sequence
  Description of Artificial Sequence: Synthetic oligonucleotide
ucaauccaacccagaaagc

SEQ ID NO: 1304498 - RNA, 19 nt, Artificial Sequence
  Description of Artificial Sequence: Synthetic oligonucleotide
uacgcccuagugcugagca

SEQ ID NO: 1304499 - RNA, 19 nt, Artificial Sequence
  Description of Artificial Sequence: Synthetic oligonucleotide
gagacaacuguugauuuuc

SEQ ID NO: 1304500 - RNA, 19 nt, Artificial Sequence
  Description of Artificial Sequence: Synthetic oligonucleotide
aaacccugugggaaucuac

SEQ ID NO: 1304501 - RNA, 19 nt, Artificial Sequence
  Description of Artificial Sequence: Synthetic oligonucleotide
accgcagcaggagugagac

SEQ ID NO: 1304502 - RNA, 19 nt, Artificial Sequence
  Description of Artificial Sequence: Synthetic oligonucleotide
augggcgcugcccaucagc

SEQ ID NO: 1304503 - RNA, 19 nt, Artificial Sequence
  Description of Artificial Sequence: Synthetic oligonucleotide
aauccaacccagaaagcgu

SEQ ID NO: 1304504 - RNA, 19 nt, Artificial Sequence
  Description of Artificial Sequence: Synthetic oligonucleotide
ugcuaauaccugcuuauuu

SEQ ID NO: 1304505 - RNA, 19 nt, Artificial Sequence
  Description of Artificial Sequence: Synthetic oligonucleotide
gaagugcacauuucugaac

SEQ ID NO: 1304506 - RNA, 19 nt, Artificial Sequence
  Description of Artificial Sequence: Synthetic oligonucleotide
aagcuuucccuaaguggcc

SEQ ID NO: 1304507 - RNA, 19 nt, Artificial Sequence
  Description of Artificial Sequence: Synthetic oligonucleotide
aaacagggucauacaaccg

SEQ ID NO: 1304508 - RNA, 19 nt, Artificial Sequence
  Description of Artificial Sequence: Synthetic oligonucleotide
uccauuauacugacauaaa

SEQ ID NO: 1304509 - RNA, 19 nt, Artificial Sequence
  Description of Artificial Sequence: Synthetic oligonucleotide
cauacaaccgcagcaggag

SEQ ID NO: 1304510 - RNA, 19 nt, Artificial Sequence
  Description of Artificial Sequence: Synthetic oligonucleotide
ucuagcgucuccuucccaa

SEQ ID NO: 1304511 - RNA, 19 nt, Artificial Sequence
  Description of Artificial Sequence: Synthetic oligonucleotide
uuauuuguaccuugcuuuu

SEQ ID NO: 1304512 - RNA, 19 nt, Artificial Sequence
  Description of Artificial Sequence: Synthetic oligonucleotide
ugcugugacagauccagau

SEQ ID NO: 1304513 - RNA, 19 nt, Artificial Sequence
  Description of Artificial Sequence: Synthetic oligonucleotide
ugucguggccaucaagacu

SEQ ID NO: 1304514 - RNA, 19 nt, Artificial Sequence
  Description of Artificial Sequence: Synthetic oligonucleotide
gucauacaaccgcagcagg

SEQ ID NO: 1304515 - RNA, 19 nt, Artificial Sequence
  Description of Artificial Sequence: Synthetic oligonucleotide
ccagaaagcguacaugagg

SEQ ID NO: 1304516 - RNA, 19 nt, Artificial Sequence
  Description of Artificial Sequence: Synthetic oligonucleotide
ucccucauuaaaaggcagu

SEQ ID NO: 1304517 - RNA, 19 nt, Artificial Sequence
  Description of Artificial Sequence: Synthetic oligonucleotide
gcguacaugaggaaggagg

SEQ ID NO: 1304518 - RNA, 19 nt, Artificial Sequence
  Description of Artificial Sequence: Synthetic oligonucleotide
acgugaagugcacauuucu

SEQ ID NO: 1304519 - RNA, 19 nt, Artificial Sequence
  Description of Artificial Sequence: Synthetic oligonucleotide
ugguggaacacagauacuu

SEQ ID NO: 1304520 - RNA, 19 nt, Artificial Sequence
  Description of Artificial Sequence: Synthetic oligonucleotide
uguaaagcccauugggcuu

SEQ ID NO: 1304521 - RNA, 19 nt, Artificial Sequence
  Description of Artificial Sequence: Synthetic oligonucleotide
agugagacaacuguugauu

SEQ ID NO: 1304522 - RNA, 19 nt, Artificial Sequence
  Description of Artificial Sequence: Synthetic oligonucleotide
aacccagaaagcguacaug

SEQ ID NO: 1304523 - RNA, 19 nt, Artificial Sequence
  Description of Artificial Sequence: Synthetic oligonucleotide
gaauuccgcagcauuggcc

SEQ ID NO: 1304524 - RNA, 19 nt, Artificial Sequence
  Description of Artificial Sequence: Synthetic oligonucleotide
aucuacgaaugaauuccgc

SEQ ID NO: 1304525 - RNA, 19 nt, Artificial Sequence
  Description of Artificial Sequence: Synthetic oligonucleotide
cucgcgaaggccuccuucc

SEQ ID NO: 1304526 - RNA, 19 nt, Artificial Sequence
  Description of Artificial Sequence: Synthetic oligonucleotide
cuucuggccgagcagguac

SEQ ID NO: 1304527 - RNA, 19 nt, Artificial Sequence
  Description of Artificial Sequence: Synthetic oligonucleotide
uucuggccgagcagguacg

SEQ ID NO: 1304528 - RNA, 19 nt, Artificial Sequence
  Description of Artificial Sequence: Synthetic oligonucleotide
agacaacuguugauuuucc

SEQ ID NO: 1304529 - RNA, 19 nt, Artificial Sequence
  Description of Artificial Sequence: Synthetic oligonucleotide
agcuuucccuaaguggccc

SEQ ID NO: 1304530 - RNA, 19 nt, Artificial Sequence
  Description of Artificial Sequence: Synthetic oligonucleotide
ugcaauccuuuguuucugc

SEQ ID NO: 1304531 - RNA, 19 nt, Artificial Sequence
  Description of Artificial Sequence: Synthetic oligonucleotide
uaauaccugcuuauuugua

SEQ ID NO: 1304532 - RNA, 19 nt, Artificial Sequence
  Description of Artificial Sequence: Synthetic oligonucleotide
caaagaagccggcucucgc

SEQ ID NO: 1304533 - RNA, 19 nt, Artificial Sequence
  Description of Artificial Sequence: Synthetic oligonucleotide
ugggguuuagcugacgaau

SEQ ID NO: 1304534 - RNA, 19 nt, Artificial Sequence
  Description of Artificial Sequence: Synthetic oligonucleotide
cucaucuaacacaguuccc

SEQ ID NO: 1304535 - RNA, 19 nt, Artificial Sequence
  Description of Artificial Sequence: Synthetic oligonucleotide
ucggaugguucuuauguuu

SEQ ID NO: 1304536 - RNA, 19 nt, Artificial Sequence
  Description of Artificial Sequence: Synthetic oligonucleotide
ucggaguagaaugaacuua

SEQ ID NO: 1304537 - RNA, 19 nt, Artificial Sequence
  Description of Artificial Sequence: Synthetic oligonucleotide
cuucuccccgaccacagug

SEQ ID NO: 1304538 - RNA, 19 nt, Artificial Sequence
  Description of Artificial Sequence: Synthetic oligonucleotide
ucauacgcccuagugcuga

SEQ ID NO: 1304539 - RNA, 19 nt, Artificial Sequence
  Description of Artificial Sequence: Synthetic oligonucleotide
aguuguggcugucucucca

SEQ ID NO: 1304540 - RNA, 19 nt, Artificial Sequence
  Description of Artificial Sequence: Synthetic oligonucleotide
ggaaaacaggacuggcucc

SEQ ID NO: 1304541 - RNA, 19 nt, Artificial Sequence
  Description of Artificial Sequence: Synthetic oligonucleotide
cuccuuccgugcuagcugc

SEQ ID NO: 1304542 - RNA, 19 nt, Artificial Sequence
  Description of Artificial Sequence: Synthetic oligonucleotide
ugugucccauguucaacga

SEQ ID NO: 1304543 - RNA, 19 nt, Artificial Sequence
  Description of Artificial Sequence: Synthetic oligonucleotide
uuuugacaguugcagccua

SEQ ID NO: 1304544 - RNA, 19 nt, Artificial Sequence
  Description of Artificial Sequence: Synthetic oligonucleotide
gcuaugaucaacacuguuc

SEQ ID NO: 1304545 - RNA, 19 nt, Artificial Sequence
  Description of Artificial Sequence: Synthetic oligonucleotide
uguaccagaugcucauuuu

SEQ ID NO: 1304546 - RNA, 19 nt, Artificial Sequence
  Description of Artificial Sequence: Synthetic oligonucleotide
ugagacaacuguugauuuu

SEQ ID NO: 1304547 - RNA, 19 nt, Artificial Sequence
  Description of Artificial Sequence: Synthetic oligonucleotide
caucaggcucucauacgcc

SEQ ID NO: 1304548 - RNA, 19 nt, Artificial Sequence
  Description of Artificial Sequence: Synthetic oligonucleotide
uacgugaagugcacauuuc

SEQ ID NO: 1304549 - RNA, 19 nt, Artificial Sequence
  Description of Artificial Sequence: Synthetic oligonucleotide
ucaugugucccauguucaa

SEQ ID NO: 1304550 - RNA, 19 nt, Artificial Sequence
  Description of Artificial Sequence: Synthetic oligonucleotide
aguucgcccacugucauau

SEQ ID NO: 1304551 - RNA, 19 nt, Artificial Sequence
  Description of Artificial Sequence: Synthetic oligonucleotide
auacaugcuucaacaaaug

SEQ ID NO: 1304552 - RNA, 19 nt, Artificial Sequence
  Description of Artificial Sequence: Synthetic oligonucleotide
cuuagaccuccaaugcuca

SEQ ID NO: 1304553 - RNA, 19 nt, Artificial Sequence
  Description of Artificial Sequence: Synthetic oligonucleotide
ggucauacaaccgcagcag

SEQ ID NO: 1304554 - RNA, 19 nt, Artificial Sequence
  Description of Artificial Sequence: Synthetic oligonucleotide
ccaaugcucaauccaaccc

SEQ ID NO: 1304555 - RNA, 19 nt, Artificial Sequence
  Description of Artificial Sequence: Synthetic oligonucleotide
cauuuucagcauccagcgc

SEQ ID NO: 1304556 - RNA, 19 nt, Artificial Sequence
  Description of Artificial Sequence: Synthetic oligonucleotide
aaccagugcugugacagau

SEQ ID NO: 1304557 - RNA, 19 nt, Artificial Sequence
  Description of Artificial Sequence: Synthetic oligonucleotide
uugcaauccuuuguuucug

SEQ ID NO: 1304558 - RNA, 19 nt, Artificial Sequence
  Description of Artificial Sequence: Synthetic oligonucleotide
auacaaccgcagcaggagu

SEQ ID NO: 1304559 - RNA, 19 nt, Artificial Sequence
  Description of Artificial Sequence: Synthetic oligonucleotide
auccuuuguuucugcccac

SEQ ID NO: 1304560 - RNA, 19 nt, Artificial Sequence
  Description of Artificial Sequence: Synthetic oligonucleotide
ucgcgaaggccuccuuccg

SEQ ID NO: 1304561 - RNA, 19 nt, Artificial Sequence
  Description of Artificial Sequence: Synthetic oligonucleotide
cuaauaccugcuuauuugu

SEQ ID NO: 1304562 - RNA, 19 nt, Artificial Sequence
  Description of Artificial Sequence: Synthetic oligonucleotide
caaccuuggaucucagcca

SEQ ID NO: 1304563 - RNA, 19 nt, Artificial Sequence
  Description of Artificial Sequence: Synthetic oligonucleotide
ccaaccagugcugugacag

SEQ ID NO: 1304564 - RNA, 19 nt, Artificial Sequence
  Description of Artificial Sequence: Synthetic oligonucleotide
cagcaaccgguccacuugg

SEQ ID NO: 1304565 - RNA, 19 nt, Artificial Sequence
  Description of Artificial Sequence: Synthetic oligonucleotide
aagcguacaugaggaagga

SEQ ID NO: 1304566 - RNA, 19 nt, Artificial Sequence
  Description of Artificial Sequence: Synthetic oligonucleotide
gaagccggcucucgcgaag

SEQ ID NO: 1304567 - RNA, 19 nt, Artificial Sequence
  Description of Artificial Sequence: Synthetic oligonucleotide
uauuuguaccuugcuuuuc

SEQ ID NO: 1304568 - RNA, 19 nt, Artificial Sequence
  Description of Artificial Sequence: Synthetic oligonucleotide
aagccggcucucgcgaagg

SEQ ID NO: 1304569 - RNA, 19 nt, Artificial Sequence
  Description of Artificial Sequence: Synthetic oligonucleotide
cggaguagaaugaacuuag

SEQ ID NO: 1304570 - RNA, 19 nt, Artificial Sequence
  Description of Artificial Sequence: Synthetic oligonucleotide
ucucgcgaaggccuccuuc

SEQ ID NO: 1304571 - RNA, 19 nt, Artificial Sequence
  Description of Artificial Sequence: Synthetic oligonucleotide
cuuccgugcuagcugcagc

SEQ ID NO: 1304572 - RNA, 19 nt, Artificial Sequence
  Description of Artificial Sequence: Synthetic oligonucleotide
gaggagaguucgcccacug

SEQ ID NO: 1304573 - RNA, 19 nt, Artificial Sequence
  Description of Artificial Sequence: Synthetic oligonucleotide
cuguaaagcccauugggcu

SEQ ID NO: 1304574 - RNA, 19 nt, Artificial Sequence
  Description of Artificial Sequence: Synthetic oligonucleotide
agcucggaguagaaugaac

SEQ ID NO: 1304575 - RNA, 19 nt, Artificial Sequence
  Description of Artificial Sequence: Synthetic oligonucleotide
auaugggcgcugcccauca

SEQ ID NO: 1304576 - RNA, 19 nt, Artificial Sequence
  Description of Artificial Sequence: Synthetic oligonucleotide
uccaacccagaaagcguac

SEQ ID NO: 1304577 - RNA, 19 nt, Artificial Sequence
  Description of Artificial Sequence: Synthetic oligonucleotide
ucuucaugugucccauguu

SEQ ID NO: 1304578 - RNA, 19 nt, Artificial Sequence
  Description of Artificial Sequence: Synthetic oligonucleotide
cuuuucaagagaagucaua

SEQ ID NO: 1304579 - RNA, 19 nt, Artificial Sequence
  Description of Artificial Sequence: Synthetic oligonucleotide
agcuaugaucaacacuguu

SEQ ID NO: 1304580 - RNA, 19 nt, Artificial Sequence
  Description of Artificial Sequence: Synthetic oligonucleotide
agaaagcguacaugaggaa

SEQ ID NO: 1304581 - RNA, 19 nt, Artificial Sequence
  Description of Artificial Sequence: Synthetic oligonucleotide
ugacugucccaaccuugga

SEQ ID NO: 1304582 - RNA, 19 nt, Artificial Sequence
  Description of Artificial Sequence: Synthetic oligonucleotide
aaagcucggaugguucuua

SEQ ID NO: 1304583 - RNA, 19 nt, Artificial Sequence
  Description of Artificial Sequence: Synthetic oligonucleotide
auucacuuuuguugcuaau

SEQ ID NO: 1304584 - RNA, 19 nt, Artificial Sequence
  Description of Artificial Sequence: Synthetic oligonucleotide
uccuuuguuucugcccacc

SEQ ID NO: 1304585 - RNA, 19 nt, Artificial Sequence
  Description of Artificial Sequence: Synthetic oligonucleotide
caugugucccauguucaac

SEQ ID NO: 1304586 - RNA, 19 nt, Artificial Sequence
  Description of Artificial Sequence: Synthetic oligonucleotide
gagaguucgcccacuguca

SEQ ID NO: 1304587 - RNA, 19 nt, Artificial Sequence
  Description of Artificial Sequence: Synthetic oligonucleotide
gcauuggccacuucugcug

SEQ ID NO: 1304588 - RNA, 19 nt, Artificial Sequence
  Description of Artificial Sequence: Synthetic oligonucleotide
caacgaucuuuccuugguc

SEQ ID NO: 1304589 - RNA, 19 nt, Artificial Sequence
  Description of Artificial Sequence: Synthetic oligonucleotide
guacaugaggaaggaggag

SEQ ID NO: 1304590 - RNA, 19 nt, Artificial Sequence
  Description of Artificial Sequence: Synthetic oligonucleotide
cagggucauacaaccgcag

SEQ ID NO: 1304591 - RNA, 19 nt, Artificial Sequence
  Description of Artificial Sequence: Synthetic oligonucleotide
gaugcccuucuccccgacc

SEQ ID NO: 1304592 - RNA, 19 nt, Artificial Sequence
  Description of Artificial Sequence: Synthetic oligonucleotide
gggucauacaaccgcagca

SEQ ID NO: 1304593 - RNA, 19 nt, Artificial Sequence
  Description of Artificial Sequence: Synthetic oligonucleotide
gaaaacaggacuggcuccu

SEQ ID NO: 1304594 - RNA, 19 nt, Artificial Sequence
  Description of Artificial Sequence: Synthetic oligonucleotide
cugacgaaugucguggcca

SEQ ID NO: 1304595 - RNA, 19 nt, Artificial Sequence
  Description of Artificial Sequence: Synthetic oligonucleotide
cugguugcuucaucaagga

SEQ ID NO: 1304596 - RNA, 19 nt, Artificial Sequence
  Description of Artificial Sequence: Synthetic oligonucleotide
agaguucgcccacugucau

SEQ ID NO: 1304597 - RNA, 19 nt, Artificial Sequence
  Description of Artificial Sequence: Synthetic oligonucleotide
uagaccuccaaugcucaau

SEQ ID NO: 1304598 - RNA, 19 nt, Artificial Sequence
  Description of Artificial Sequence: Synthetic oligonucleotide
acccugugggaaucuacga

SEQ ID NO: 1304599 - RNA, 19 nt, Artificial Sequence
  Description of Artificial Sequence: Synthetic oligonucleotide
uuagaccuccaaugcucaa

SEQ ID NO: 1304600 - RNA, 19 nt, Artificial Sequence
  Description of Artificial Sequence: Synthetic oligonucleotide
gugcuagcugcagcaaccg

SEQ ID NO: 1304601 - RNA, 19 nt, Artificial Sequence
  Description of Artificial Sequence: Synthetic oligonucleotide
gcucucauacgcccuagug

SEQ ID NO: 1304602 - RNA, 19 nt, Artificial Sequence
  Description of Artificial Sequence: Synthetic oligonucleotide
auacgcccuagugcugagc

SEQ ID NO: 1304603 - RNA, 19 nt, Artificial Sequence
  Description of Artificial Sequence: Synthetic oligonucleotide
cacagauacuucuggccga

SEQ ID NO: 1304604 - RNA, 19 nt, Artificial Sequence
  Description of Artificial Sequence: Synthetic oligonucleotide
aagcucggaugguucuuau

SEQ ID NO: 1304605 - RNA, 19 nt, Artificial Sequence
  Description of Artificial Sequence: Synthetic oligonucleotide
guaaagcccauugggcuuc

SEQ ID NO: 1304606 - RNA, 19 nt, Artificial Sequence
  Description of Artificial Sequence: Synthetic oligonucleotide
aucuuuccuuggucaagga

SEQ ID NO: 1304607 - RNA, 19 nt, Artificial Sequence
  Description of Artificial Sequence: Synthetic oligonucleotide
uccugacugacugucccaa

SEQ ID NO: 1304608 - RNA, 19 nt, Artificial Sequence
  Description of Artificial Sequence: Synthetic oligonucleotide
ugaaacccugugggaaucu

SEQ ID NO: 1304609 - RNA, 19 nt, Artificial Sequence
  Description of Artificial Sequence: Synthetic oligonucleotide
gaaugaacuuagaccucca

SEQ ID NO: 1304610 - RNA, 19 nt, Artificial Sequence
  Description of Artificial Sequence: Synthetic oligonucleotide
ccuuuggcaaaaugcauca

SEQ ID NO: 1304611 - RNA, 19 nt, Artificial Sequence
  Description of Artificial Sequence: Synthetic oligonucleotide
acgcccuagugcugagcac

SEQ ID NO: 1304612 - RNA, 19 nt, Artificial Sequence
  Description of Artificial Sequence: Synthetic oligonucleotide
aggagaguucgcccacugu

SEQ ID NO: 1304613 - RNA, 19 nt, Artificial Sequence
  Description of Artificial Sequence: Synthetic oligonucleotide
auaaaacaaggaagugaau

SEQ ID NO: 1304614 - RNA, 19 nt, Artificial Sequence
  Description of Artificial Sequence: Synthetic oligonucleotide
guuuaguacuaaacuuuaa

SEQ ID NO: 1304615 - RNA, 19 nt, Artificial Sequence
  Description of Artificial Sequence: Synthetic oligonucleotide
uuucugcgacagagcagga

SEQ ID NO: 1304616 - RNA, 19 nt, Artificial Sequence
  Description of Artificial Sequence: Synthetic oligonucleotide
guacgugaagugcacauuu

SEQ ID NO: 1304617 - RNA, 19 nt, Artificial Sequence
  Description of Artificial Sequence: Synthetic oligonucleotide
gcucggaugguucuuaugu

SEQ ID NO: 1304618 - RNA, 19 nt, Artificial Sequence
  Description of Artificial Sequence: Synthetic oligonucleotide
uaugggcgcugcccaucag

SEQ ID NO: 1304619 - RNA, 19 nt, Artificial Sequence
  Description of Artificial Sequence: Synthetic oligonucleotide
agcguacaugaggaaggag

SEQ ID NO: 1304620 - RNA, 19 nt, Artificial Sequence
  Description of Artificial Sequence: Synthetic oligonucleotide
cugucauaugggcgcugcc

SEQ ID NO: 1304621 - RNA, 19 nt, Artificial Sequence
  Description of Artificial Sequence: Synthetic oligonucleotide
cuaugguguuccagagcuc

SEQ ID NO: 1304622 - RNA, 19 nt, Artificial Sequence
  Description of Artificial Sequence: Synthetic oligonucleotide
cuggcuauugcaauccuuu

SEQ ID NO: 1304623 - RNA, 19 nt, Artificial Sequence
  Description of Artificial Sequence: Synthetic oligonucleotide
ucccaaccuuggaucucag

SEQ ID NO: 1304624 - RNA, 19 nt, Artificial Sequence
  Description of Artificial Sequence: Synthetic oligonucleotide
cucauacgcccuagugcug

SEQ ID NO: 1304625 - RNA, 19 nt, Artificial Sequence
  Description of Artificial Sequence: Synthetic oligonucleotide
uucugcgacagagcaggaa

SEQ ID NO: 1304626 - RNA, 19 nt, Artificial Sequence
  Description of Artificial Sequence: Synthetic oligonucleotide
cauacgcccuagugcugag

SEQ ID NO: 1304627 - RNA, 19 nt, Artificial Sequence
  Description of Artificial Sequence: Synthetic oligonucleotide
uugcuaauaccugcuuauu

SEQ ID NO: 1304628 - RNA, 19 nt, Artificial Sequence
  Description of Artificial Sequence: Synthetic oligonucleotide
cugaaacccugugggaauc

SEQ ID NO: 1304629 - RNA, 19 nt, Artificial Sequence
  Description of Artificial Sequence: Synthetic oligonucleotide
caaaagcucggaugguucu

SEQ ID NO: 1304630 - RNA, 19 nt, Artificial Sequence
  Description of Artificial Sequence: Synthetic oligonucleotide
uggcuccugacugacuguc

SEQ ID NO: 1304631 - RNA, 19 nt, Artificial Sequence
  Description of Artificial Sequence: Synthetic oligonucleotide
agcaaccgguccacuuggc

SEQ ID NO: 1304632 - RNA, 19 nt, Artificial Sequence
  Description of Artificial Sequence: Synthetic oligonucleotide
gggguuuagcugacgaaug

SEQ ID NO: 1304633 - RNA, 19 nt, Artificial Sequence
  Description of Artificial Sequence: Synthetic oligonucleotide
auccaacccagaaagcgua

SEQ ID NO: 1304634 - RNA, 19 nt, Artificial Sequence
  Description of Artificial Sequence: Synthetic oligonucleotide
guugcagccuaugguguuc

SEQ ID NO: 1304635 - RNA, 19 nt, Artificial Sequence
  Description of Artificial Sequence: Synthetic oligonucleotide
ccuuucaucagcucggagu

SEQ ID NO: 1304636 - RNA, 19 nt, Artificial Sequence
  Description of Artificial Sequence: Synthetic oligonucleotide
agagcacccugaaagcuuu

SEQ ID NO: 1304637 - RNA, 19 nt, Artificial Sequence
  Description of Artificial Sequence: Synthetic oligonucleotide
cauaugggcgcugcccauc

SEQ ID NO: 1304638 - RNA, 19 nt, Artificial Sequence
  Description of Artificial Sequence: Synthetic oligonucleotide
gcaaaaugcaucaggcucu

SEQ ID NO: 1304639 - RNA, 19 nt, Artificial Sequence
  Description of Artificial Sequence: Synthetic oligonucleotide
auauucagauucagccuua

SEQ ID NO: 1304640 - RNA, 19 nt, Artificial Sequence
  Description of Artificial Sequence: Synthetic oligonucleotide
gcccacugucauaugggcg

SEQ ID NO: 1304641 - RNA, 19 nt, Artificial Sequence
  Description of Artificial Sequence: Synthetic oligonucleotide
ucccauguucaacgaucuu

SEQ ID NO: 1304642 - RNA, 19 nt, Artificial Sequence
  Description of Artificial Sequence: Synthetic oligonucleotide
ucguggccaucaagacuga

SEQ ID NO: 1304643 - RNA, 19 nt, Artificial Sequence
  Description of Artificial Sequence: Synthetic oligonucleotide
cuagcgucuccuucccaaa

SEQ ID NO: 1304644 - RNA, 19 nt, Artificial Sequence
  Description of Artificial Sequence: Synthetic oligonucleotide
uuucagcauccagcgcacu

SEQ ID NO: 1304645 - RNA, 19 nt, Artificial Sequence
  Description of Artificial Sequence: Synthetic oligonucleotide
ucuggccgagcagguacgu

SEQ ID NO: 1304646 - RNA, 19 nt, Artificial Sequence
  Description of Artificial Sequence: Synthetic oligonucleotide
gcuuucccuaaguggcccc

SEQ ID NO: 1304647 - RNA, 19 nt, Artificial Sequence
  Description of Artificial Sequence: Synthetic oligonucleotide
uaaagcccauugggcuuca

SEQ ID NO: 1304648 - RNA, 19 nt, Artificial Sequence
  Description of Artificial Sequence: Synthetic oligonucleotide
cuccugacugacuguccca

SEQ ID NO: 1304649 - RNA, 19 nt, Artificial Sequence
  Description of Artificial Sequence: Synthetic oligonucleotide
cucggaguagaaugaacuu

SEQ ID NO: 1304650 - RNA, 19 nt, Artificial Sequence
  Description of Artificial Sequence: Synthetic oligonucleotide
gaaacccugugggaaucua

SEQ ID NO: 1304651 - RNA, 19 nt, Artificial Sequence
  Description of Artificial Sequence: Synthetic oligonucleotide
cugucccaaccuuggaucu

SEQ ID NO: 1304652 - RNA, 19 nt, Artificial Sequence
  Description of Artificial Sequence: Synthetic oligonucleotide
gcgacagagcaggaaaaca

SEQ ID NO: 1304653 - RNA, 19 nt, Artificial Sequence
  Description of Artificial Sequence: Synthetic oligonucleotide
uccgugcuagcugcagcaa

SEQ ID NO: 1304654 - RNA, 19 nt, Artificial Sequence
  Description of Artificial Sequence: Synthetic oligonucleotide
ggguuuagcugacgaaugu

SEQ ID NO: 1304655 - RNA, 19 nt, Artificial Sequence
  Description of Artificial Sequence: Synthetic oligonucleotide
gcccuggcuauugcaaucc

SEQ ID NO: 1304656 - RNA, 19 nt, Artificial Sequence
  Description of Artificial Sequence: Synthetic oligonucleotide
gucccauguucaacgaucu

SEQ ID NO: 1304657 - RNA, 19 nt, Artificial Sequence
  Description of Artificial Sequence: Synthetic oligonucleotide
cacagugcugaaacccugu

SEQ ID NO: 1304658 - RNA, 19 nt, Artificial Sequence
  Description of Artificial Sequence: Synthetic oligonucleotide
augguggaacacagauacu

SEQ ID NO: 1304659 - RNA, 19 nt, Artificial Sequence
  Description of Artificial Sequence: Synthetic oligonucleotide
gguugggguuuagcugacg

SEQ ID NO: 1304660 - RNA, 19 nt, Artificial Sequence
  Description of Artificial Sequence: Synthetic oligonucleotide
gaguucgcccacugucaua

SEQ ID NO: 1304661 - RNA, 19 nt, Artificial Sequence
  Description of Artificial Sequence: Synthetic oligonucleotide
augcucaauccaacccaga

SEQ ID NO: 1304662 - RNA, 19 nt, Artificial Sequence
  Description of Artificial Sequence: Synthetic oligonucleotide
caacccagaaagcguacau

SEQ ID NO: 1304663 - RNA, 19 nt, Artificial Sequence
  Description of Artificial Sequence: Synthetic oligonucleotide
gacgaaugucguggccauc

SEQ ID NO: 1304664 - RNA, 19 nt, Artificial Sequence
  Description of Artificial Sequence: Synthetic oligonucleotide
gggaaucuacgaaugaauu

SEQ ID NO: 1304665 - RNA, 19 nt, Artificial Sequence
  Description of Artificial Sequence: Synthetic oligonucleotide
guucgcccacugucauaug

SEQ ID NO: 1304666 - RNA, 19 nt, Artificial Sequence
  Description of Artificial Sequence: Synthetic oligonucleotide
gcggugagcuaugaucaac

SEQ ID NO: 1304667 - RNA, 19 nt, Artificial Sequence
  Description of Artificial Sequence: Synthetic oligonucleotide
cccauugggcuucaaaagu

SEQ ID NO: 1304668 - RNA, 19 nt, Artificial Sequence
  Description of Artificial Sequence: Synthetic oligonucleotide
cagagcacccugaaagcuu

SEQ ID NO: 1304669 - RNA, 19 nt, Artificial Sequence
  Description of Artificial Sequence: Synthetic oligonucleotide
uccagcgcacugguugcuu

SEQ ID NO: 1304670 - RNA, 19 nt, Artificial Sequence
  Description of Artificial Sequence: Synthetic oligonucleotide
cuggccgagcagguacgug

SEQ ID NO: 1304671 - RNA, 19 nt, Artificial Sequence
  Description of Artificial Sequence: Synthetic oligonucleotide
uuccagaaacagggucaua

SEQ ID NO: 1304672 - RNA, 19 nt, Artificial Sequence
  Description of Artificial Sequence: Synthetic oligonucleotide
ccuuuguuucugcccacca

SEQ ID NO: 1304673 - RNA, 19 nt, Artificial Sequence
  Description of Artificial Sequence: Synthetic oligonucleotide
cucggaugguucuuauguu

SEQ ID NO: 1304674 - RNA, 19 nt, Artificial Sequence
  Description of Artificial Sequence: Synthetic oligonucleotide
ccgugcuagcugcagcaac

SEQ ID NO: 1304675 - RNA, 19 nt, Artificial Sequence
  Description of Artificial Sequence: Synthetic oligonucleotide
auccagcgcacugguugcu

SEQ ID NO: 1304676 - RNA, 19 nt, Artificial Sequence
  Description of Artificial Sequence: Synthetic oligonucleotide
aaagcccauugggcuucaa

SEQ ID NO: 1304677 - RNA, 19 nt, Artificial Sequence
  Description of Artificial Sequence: Synthetic oligonucleotide
cgaccacagugcugaaacc

SEQ ID NO: 1304678 - RNA, 19 nt, Artificial Sequence
  Description of Artificial Sequence: Synthetic oligonucleotide
caggcucucauacgcccua

SEQ ID NO: 1304679 - RNA, 19 nt, Artificial Sequence
  Description of Artificial Sequence: Synthetic oligonucleotide
cagcaacaaaauuggcauu

SEQ ID NO: 1304680 - RNA, 19 nt, Artificial Sequence
  Description of Artificial Sequence: Synthetic oligonucleotide
cugcuguauuucuccacuu

SEQ ID NO: 1304681 - RNA, 19 nt, Artificial Sequence
  Description of Artificial Sequence: Synthetic oligonucleotide
ggcggugagcuaugaucaa

SEQ ID NO: 1304682 - RNA, 19 nt, Artificial Sequence
  Description of Artificial Sequence: Synthetic oligonucleotide
cuaacacaguucccucauu

SEQ ID NO: 1304683 - RNA, 19 nt, Artificial Sequence
  Description of Artificial Sequence: Synthetic oligonucleotide
ccaacccagaaagcguaca

SEQ ID NO: 1304684 - RNA, 19 nt, Artificial Sequence
  Description of Artificial Sequence: Synthetic oligonucleotide
gccaaccagugcugugaca

SEQ ID NO: 1304685 - RNA, 19 nt, Artificial Sequence
  Description of Artificial Sequence: Synthetic oligonucleotide
ggaugcccuucuccccgac

SEQ ID NO: 1304686 - RNA, 19 nt, Artificial Sequence
  Description of Artificial Sequence: Synthetic oligonucleotide
caucagcucggaguagaau

SEQ ID NO: 1304687 - RNA, 19 nt, Artificial Sequence
  Description of Artificial Sequence: Synthetic oligonucleotide
ggcucucgcgaaggccucc

SEQ ID NO: 1304688 - RNA, 19 nt, Artificial Sequence
  Description of Artificial Sequence: Synthetic oligonucleotide
gguacgugaagugcacauu

SEQ ID NO: 1304689 - RNA, 19 nt, Artificial Sequence
  Description of Artificial Sequence: Synthetic oligonucleotide
gccggucaagugccuccug

SEQ ID NO: 1304690 - RNA, 19 nt, Artificial Sequence
  Description of Artificial Sequence: Synthetic oligonucleotide
ccgagcagguacgugaagu

SEQ ID NO: 1304691 - RNA, 19 nt, Artificial Sequence
  Description of Artificial Sequence: Synthetic oligonucleotide
cgcccuagugcugagcaca

SEQ ID NO: 1304692 - RNA, 19 nt, Artificial Sequence
  Description of Artificial Sequence: Synthetic oligonucleotide
ggcucucauacgcccuagu

SEQ ID NO: 1304693 - RNA, 19 nt, Artificial Sequence
  Description of Artificial Sequence: Synthetic oligonucleotide
ccggucaagugccuccugu

SEQ ID NO: 1304694 - RNA, 19 nt, Artificial Sequence
  Description of Artificial Sequence: Synthetic oligonucleotide
cccaaaagcucggaugguu

SEQ ID NO: 1304695 - RNA, 19 nt, Artificial Sequence
  Description of Artificial Sequence: Synthetic oligonucleotide
gagcacccugaaagcuuuu

SEQ ID NO: 1304696 - RNA, 19 nt, Artificial Sequence
  Description of Artificial Sequence: Synthetic oligonucleotide
gcucucgcgaaggccuccu

SEQ ID NO: 1304697 - RNA, 19 nt, Artificial Sequence
  Description of Artificial Sequence: Synthetic oligonucleotide
cggcucucgcgaaggccuc

SEQ ID NO: 1304698 - RNA, 19 nt, Artificial Sequence
  Description of Artificial Sequence: Synthetic oligonucleotide
cccgaccacagugcugaaa

SEQ ID NO: 1304699 - RNA, 19 nt, Artificial Sequence
  Description of Artificial Sequence: Synthetic oligonucleotide
cgaaugaauuccgcagcau

SEQ ID NO: 1304700 - RNA, 19 nt, Artificial Sequence
  Description of Artificial Sequence: Synthetic oligonucleotide
cucucgcgaaggccuccuu

SEQ ID NO: 1304701 - RNA, 19 nt, Artificial Sequence
  Description of Artificial Sequence: Synthetic oligonucleotide
caccagcacccaggccuuu

SEQ ID NO: 1304702 - RNA, 19 nt, Artificial Sequence
  Description of Artificial Sequence: Synthetic oligonucleotide
uuuguucucacguaguugg

SEQ ID NO: 1304703 - RNA, 19 nt, Artificial Sequence
  Description of Artificial Sequence: Synthetic oligonucleotide
ucuuguuucccaaauagag

SEQ ID NO: 1304704 - RNA, 19 nt, Artificial Sequence
  Description of Artificial Sequence: Synthetic oligonucleotide
ucaaagauaaguguugggg

SEQ ID NO: 1304705 - RNA, 19 nt, Artificial Sequence
  Description of Artificial Sequence: Synthetic oligonucleotide
ucauagauuaugcuuaaga

SEQ ID NO: 1304706 - RNA, 19 nt, Artificial Sequence
  Description of Artificial Sequence: Synthetic oligonucleotide
ugucuuguuucccaaauag

SEQ ID NO: 1304707 - RNA, 19 nt, Artificial Sequence
  Description of Artificial Sequence: Synthetic oligonucleotide
acagguuuuacacuuagug

SEQ ID NO: 1304708 - RNA, 19 nt, Artificial Sequence
  Description of Artificial Sequence: Synthetic oligonucleotide
aaagauaaguguuggggcu

SEQ ID NO: 1304709 - RNA, 19 nt, Artificial Sequence
  Description of Artificial Sequence: Synthetic oligonucleotide
uaaguguuggggcucaggg

SEQ ID NO: 1304710 - RNA, 19 nt, Artificial Sequence
  Description of Artificial Sequence: Synthetic oligonucleotide
aaauagagcugucaaagau

SEQ ID NO: 1304711 - RNA, 19 nt, Artificial Sequence
  Description of Artificial Sequence: Synthetic oligonucleotide
ugauguacuaccuggagcu

SEQ ID NO: 1304712 - RNA, 19 nt, Artificial Sequence
  Description of Artificial Sequence: Synthetic oligonucleotide
aggaagaggagcuuguuuc

SEQ ID NO: 1304713 - RNA, 19 nt, Artificial Sequence
  Description of Artificial Sequence: Synthetic oligonucleotide
aauacaccagcugugagug

SEQ ID NO: 1304714 - RNA, 19 nt, Artificial Sequence
  Description of Artificial Sequence: Synthetic oligonucleotide
aguguuggggcucaggguc

SEQ ID NO: 1304715 - RNA, 19 nt, Artificial Sequence
  Description of Artificial Sequence: Synthetic oligonucleotide
caaagauaaguguuggggc

SEQ ID NO: 1304716 - RNA, 19 nt, Artificial Sequence
  Description of Artificial Sequence: Synthetic oligonucleotide
agguuugauaagcuuaggg

SEQ ID NO: 1304717 - RNA, 19 nt, Artificial Sequence
  Description of Artificial Sequence: Synthetic oligonucleotide
ucugcaagugcucugugca

SEQ ID NO: 1304718 - RNA, 19 nt, Artificial Sequence
  Description of Artificial Sequence: Synthetic oligonucleotide
cacguaguugguuaagugg

SEQ ID NO: 1304719 - RNA, 19 nt, Artificial Sequence
  Description of Artificial Sequence: Synthetic oligonucleotide
aguguacagagccaccugg

SEQ ID NO: 1304720 - RNA, 19 nt, Artificial Sequence
  Description of Artificial Sequence: Synthetic oligonucleotide
agaguuucaugacauggag

SEQ ID NO: 1304721 - RNA, 19 nt, Artificial Sequence
  Description of Artificial Sequence: Synthetic oligonucleotide
cauaguugcuucuccacgg

SEQ ID NO: 1304722 - RNA, 19 nt, Artificial Sequence
  Description of Artificial Sequence: Synthetic oligonucleotide
uuaguguacucaucuuugg

SEQ ID NO: 1304723 - RNA, 19 nt, Artificial Sequence
  Description of Artificial Sequence: Synthetic oligonucleotide
agagauaggcuucauagau

SEQ ID NO: 1304724 - RNA, 19 nt, Artificial Sequence
  Description of Artificial Sequence: Synthetic oligonucleotide
aggaccuggaaaucaauuc

SEQ ID NO: 1304725 - RNA, 19 nt, Artificial Sequence
  Description of Artificial Sequence: Synthetic oligonucleotide
ugucaaagauaaguguugg

SEQ ID NO: 1304726 - RNA, 19 nt, Artificial Sequence
  Description of Artificial Sequence: Synthetic oligonucleotide
agguuuuacacuuagugua

SEQ ID NO: 1304727 - RNA, 19 nt, Artificial Sequence
  Description of Artificial Sequence: Synthetic oligonucleotide
acguaguugguuaaguggc

SEQ ID NO: 1304728 - RNA, 19 nt, Artificial Sequence
  Description of Artificial Sequence: Synthetic oligonucleotide
acauaguugcuucuccacg

SEQ ID NO: 1304729 - RNA, 19 nt, Artificial Sequence
  Description of Artificial Sequence: Synthetic oligonucleotide
aucagucucccucaguggg

SEQ ID NO: 1304730 - RNA, 19 nt, Artificial Sequence
  Description of Artificial Sequence: Synthetic oligonucleotide
gauaucuacuucucugccc

SEQ ID NO: 1304731 - RNA, 19 nt, Artificial Sequence
  Description of Artificial Sequence: Synthetic oligonucleotide
uguaagauaucuacuucuc

SEQ ID NO: 1304732 - RNA, 19 nt, Artificial Sequence
  Description of Artificial Sequence: Synthetic oligonucleotide
aacugguuaucuguuuugg

SEQ ID NO: 1304733 - RNA, 19 nt, Artificial Sequence
  Description of Artificial Sequence: Synthetic oligonucleotide
acacuuaguguacucaucu

SEQ ID NO: 1304734 - RNA, 19 nt, Artificial Sequence
  Description of Artificial Sequence: Synthetic oligonucleotide
uggagcuuucucaacagcu

SEQ ID NO: 1304735 - RNA, 19 nt, Artificial Sequence
  Description of Artificial Sequence: Synthetic oligonucleotide
acuaccuggagcuuucuca

SEQ ID NO: 1304736 - RNA, 19 nt, Artificial Sequence
  Description of Artificial Sequence: Synthetic oligonucleotide
gaugcgacugauguagggg

SEQ ID NO: 1304737 - RNA, 19 nt, Artificial Sequence
  Description of Artificial Sequence: Synthetic oligonucleotide
ugugcagucccaccguucc

SEQ ID NO: 1304738 - RNA, 19 nt, Artificial Sequence
  Description of Artificial Sequence: Synthetic oligonucleotide
cauagauuaugcuuaagaa

SEQ ID NO: 1304739 - RNA, 19 nt, Artificial Sequence
  Description of Artificial Sequence: Synthetic oligonucleotide
ugaaaguguacagagccac

SEQ ID NO: 1304740 - RNA, 19 nt, Artificial Sequence
  Description of Artificial Sequence: Synthetic oligonucleotide
uccacggggagugagagcc

SEQ ID NO: 1304741 - RNA, 19 nt, Artificial Sequence
  Description of Artificial Sequence: Synthetic oligonucleotide
accaugaguuucugaaugg

SEQ ID NO: 1304742 - RNA, 19 nt, Artificial Sequence
  Description of Artificial Sequence: Synthetic oligonucleotide
uaguguacucaucuuuggc

SEQ ID NO: 1304743 - RNA, 19 nt, Artificial Sequence
  Description of Artificial Sequence: Synthetic oligonucleotide
cuuaggguugucacaaaug

SEQ ID NO: 1304744 - RNA, 19 nt, Artificial Sequence
  Description of Artificial Sequence: Synthetic oligonucleotide
auaggcuucauagauuaug

SEQ ID NO: 1304745 - RNA, 19 nt, Artificial Sequence
  Description of Artificial Sequence: Synthetic oligonucleotide
cugucaaagauaaguguug

SEQ ID NO: 1304746 - RNA, 19 nt, Artificial Sequence
  Description of Artificial Sequence: Synthetic oligonucleotide
ugagagucugauguccugg

SEQ ID NO: 1304747 - RNA, 19 nt, Artificial Sequence
  Description of Artificial Sequence: Synthetic oligonucleotide
uuaaacuuaugugcugccc

SEQ ID NO: 1304748 - RNA, 19 nt, Artificial Sequence
  Description of Artificial Sequence: Synthetic oligonucleotide
uugaaaguguacagagcca

SEQ ID NO: 1304749 - RNA, 19 nt, Artificial Sequence
  Description of Artificial Sequence: Synthetic oligonucleotide
cacgaugcgacugauguag

SEQ ID NO: 1304750 - RNA, 19 nt, Artificial Sequence
  Description of Artificial Sequence: Synthetic oligonucleotide
accgggacagguuugauaa

SEQ ID NO: 1304751 - RNA, 19 nt, Artificial Sequence
  Description of Artificial Sequence: Synthetic oligonucleotide
uucaacuguucgcacugag

SEQ ID NO: 1304752 - RNA, 19 nt, Artificial Sequence
  Description of Artificial Sequence: Synthetic oligonucleotide
gauuaugcuuaagaagcug

SEQ ID NO: 1304753 - RNA, 19 nt, Artificial Sequence
  Description of Artificial Sequence: Synthetic oligonucleotide
uaugcuuaagaagcuguca

SEQ ID NO: 1304754 - RNA, 19 nt, Artificial Sequence
  Description of Artificial Sequence: Synthetic oligonucleotide
uuaugcuuaagaagcuguc

SEQ ID NO: 1304755 - RNA, 19 nt, Artificial Sequence
  Description of Artificial Sequence: Synthetic oligonucleotide
ucacguaguugguuaagug

SEQ ID NO: 1304756 - RNA, 19 nt, Artificial Sequence
  Description of Artificial Sequence: Synthetic oligonucleotide
auaguugcuucuccacggg

SEQ ID NO: 1304757 - RNA, 19 nt, Artificial Sequence
  Description of Artificial Sequence: Synthetic oligonucleotide
agcugucaaagauaagugu

SEQ ID NO: 1304758 - RNA, 19 nt, Artificial Sequence
  Description of Artificial Sequence: Synthetic oligonucleotide
uuucugaauggcuggacau

SEQ ID NO: 1304759 - RNA, 19 nt, Artificial Sequence
  Description of Artificial Sequence: Synthetic oligonucleotide
cacaggugaacugaggaag

SEQ ID NO: 1304760 - RNA, 19 nt, Artificial Sequence
  Description of Artificial Sequence: Synthetic oligonucleotide
ucagucucccucagugggg

SEQ ID NO: 1304761 - RNA, 19 nt, Artificial Sequence
  Description of Artificial Sequence: Synthetic oligonucleotide
auuaugcuuaagaagcugu

SEQ ID NO: 1304762 - RNA, 19 nt, Artificial Sequence
  Description of Artificial Sequence: Synthetic oligonucleotide
aacuguucgcacugaguga

SEQ ID NO: 1304763 - RNA, 19 nt, Artificial Sequence
  Description of Artificial Sequence: Synthetic oligonucleotide
uuggugguggugguggugg

SEQ ID NO: 1304764 - RNA, 19 nt, Artificial Sequence
  Description of Artificial Sequence: Synthetic oligonucleotide
aaguguacagagccaccug

SEQ ID NO: 1304765 - RNA, 19 nt, Artificial Sequence
  Description of Artificial Sequence: Synthetic oligonucleotide
gguuaaguggcuuuucuca

SEQ ID NO: 1304766 - RNA, 19 nt, Artificial Sequence
  Description of Artificial Sequence: Synthetic oligonucleotide
ucaacuguucgcacugagu

SEQ ID NO: 1304767 - RNA, 19 nt, Artificial Sequence
  Description of Artificial Sequence: Synthetic oligonucleotide
augcuuaagaagcugucau

SEQ ID NO: 1304768 - RNA, 19 nt, Artificial Sequence
  Description of Artificial Sequence: Synthetic oligonucleotide
uuggcacggagccagcuga

SEQ ID NO: 1304769 - RNA, 19 nt, Artificial Sequence
  Description of Artificial Sequence: Synthetic oligonucleotide
ggagugagagccuucuggg

SEQ ID NO: 1304770 - RNA, 19 nt, Artificial Sequence
  Description of Artificial Sequence: Synthetic oligonucleotide
agugagagccuucugggau

SEQ ID NO: 1304771 - RNA, 19 nt, Artificial Sequence
  Description of Artificial Sequence: Synthetic oligonucleotide
uguuucccaaauagagcug

SEQ ID NO: 1304772 - RNA, 19 nt, Artificial Sequence
  Description of Artificial Sequence: Synthetic oligonucleotide
ccaaauagagcugucaaag

SEQ ID NO: 1304773 - RNA, 19 nt, Artificial Sequence
  Description of Artificial Sequence: Synthetic oligonucleotide
aggauucccaguucugcag

SEQ ID NO: 1304774 - RNA, 19 nt, Artificial Sequence
  Description of Artificial Sequence: Synthetic oligonucleotide
aagcuuaggguugucacaa

SEQ ID NO: 1304775 - RNA, 19 nt, Artificial Sequence
  Description of Artificial Sequence: Synthetic oligonucleotide
gagaacuccccuugcauga

SEQ ID NO: 1304776 - RNA, 19 nt, Artificial Sequence
  Description of Artificial Sequence: Synthetic oligonucleotide
augacaggcuuucaacugu

SEQ ID NO: 1304777 - RNA, 19 nt, Artificial Sequence
  Description of Artificial Sequence: Synthetic oligonucleotide
gggagugagagccuucugg

SEQ ID NO: 1304778 - RNA, 19 nt, Artificial Sequence
  Description of Artificial Sequence: Synthetic oligonucleotide
auagagcugucaaagauaa

SEQ ID NO: 1304779 - RNA, 19 nt, Artificial Sequence
  Description of Artificial Sequence: Synthetic oligonucleotide
ugaagagauaggcuucaua

SEQ ID NO: 1304780 - RNA, 19 nt, Artificial Sequence
  Description of Artificial Sequence: Synthetic oligonucleotide
caugguggaggauucccag

SEQ ID NO: 1304781 - RNA, 19 nt, Artificial Sequence
  Description of Artificial Sequence: Synthetic oligonucleotide
gcaugcaacuccuugauga

SEQ ID NO: 1304782 - RNA, 19 nt, Artificial Sequence
  Description of Artificial Sequence: Synthetic oligonucleotide
uccugaguaggaagcacac

SEQ ID NO: 1304783 - RNA, 19 nt, Artificial Sequence
  Description of Artificial Sequence: Synthetic oligonucleotide
ucucauggcugcuuguguc

SEQ ID NO: 1304784 - RNA, 19 nt, Artificial Sequence
  Description of Artificial Sequence: Synthetic oligonucleotide
agcgggugcagccccgugc

SEQ ID NO: 1304785 - RNA, 19 nt, Artificial Sequence
  Description of Artificial Sequence: Synthetic oligonucleotide
uucagaguuucaugacaug

SEQ ID NO: 1304786 - RNA, 19 nt, Artificial Sequence
  Description of Artificial Sequence: Synthetic oligonucleotide
aguuucugaauggcuggac

SEQ ID NO: 1304787 - RNA, 19 nt, Artificial Sequence
  Description of Artificial Sequence: Synthetic oligonucleotide
gccacugaaauacaccagc

SEQ ID NO: 1304788 - RNA, 19 nt, Artificial Sequence
  Description of Artificial Sequence: Synthetic oligonucleotide
uucucauggcugcuugugu

SEQ ID NO: 1304789 - RNA, 19 nt, Artificial Sequence
  Description of Artificial Sequence: Synthetic oligonucleotide
ugugagugagccacgcuuu

SEQ ID NO: 1304790 - RNA, 19 nt, Artificial Sequence
  Description of Artificial Sequence: Synthetic oligonucleotide
ugggcugacacggggaacc

SEQ ID NO: 1304791 - RNA, 19 nt, Artificial Sequence
  Description of Artificial Sequence: Synthetic oligonucleotide
ugcacagggcuuaaacuua

SEQ ID NO: 1304792 - RNA, 19 nt, Artificial Sequence
  Description of Artificial Sequence: Synthetic oligonucleotide
gguuugauaagcuuagggu

SEQ ID NO: 1304793 - RNA, 19 nt, Artificial Sequence
  Description of Artificial Sequence: Synthetic oligonucleotide
gauaagcuuaggguuguca

SEQ ID NO: 1304794 - RNA, 19 nt, Artificial Sequence
  Description of Artificial Sequence: Synthetic oligonucleotide
caccguuccagggugaccc

SEQ ID NO: 1304795 - RNA, 19 nt, Artificial Sequence
  Description of Artificial Sequence: Synthetic oligonucleotide
ugagugagccacgcuuugg

SEQ ID NO: 1304796 - RNA, 19 nt, Artificial Sequence
  Description of Artificial Sequence: Synthetic oligonucleotide
uucccaaauagagcuguca

SEQ ID NO: 1304797 - RNA, 19 nt, Artificial Sequence
  Description of Artificial Sequence: Synthetic oligonucleotide
auguaggggucguggcgcc

SEQ ID NO: 1304798 - RNA, 19 nt, Artificial Sequence
  Description of Artificial Sequence: Synthetic oligonucleotide
ggauugucauaggacaggg

SEQ ID NO: 1304799 - RNA, 19 nt, Artificial Sequence
  Description of Artificial Sequence: Synthetic oligonucleotide
cuguaagauaucuacuucu

SEQ ID NO: 1304800 - RNA, 19 nt, Artificial Sequence
  Description of Artificial Sequence: Synthetic oligonucleotide
aacuuaugugcugccccag

SEQ ID NO: 1304801 - RNA, 19 nt, Artificial Sequence
  Description of Artificial Sequence: Synthetic oligonucleotide
ugcagucccaccguuccag

SEQ ID NO: 1304802 - RNA, 19 nt, Artificial Sequence
  Description of Artificial Sequence: Synthetic oligonucleotide
ugagcaucuguaagauauc

SEQ ID NO: 1304803 - RNA, 19 nt, Artificial Sequence
  Description of Artificial Sequence: Synthetic oligonucleotide
ugcuaaggcuggccguggg

SEQ ID NO: 1304804 - RNA, 19 nt, Artificial Sequence
  Description of Artificial Sequence: Synthetic oligonucleotide
uggaggauucccaguucug

SEQ ID NO: 1304805 - RNA, 19 nt, Artificial Sequence
  Description of Artificial Sequence: Synthetic oligonucleotide
uacugggucucaccgggac

SEQ ID NO: 1304806 - RNA, 19 nt, Artificial Sequence
  Description of Artificial Sequence: Synthetic oligonucleotide
ugagcccauuaucagucuc

SEQ ID NO: 1304807 - RNA, 19 nt, Artificial Sequence
  Description of Artificial Sequence: Synthetic oligonucleotide
cccauuaucagucucccuc

SEQ ID NO: 1304808 - RNA, 19 nt, Artificial Sequence
  Description of Artificial Sequence: Synthetic oligonucleotide
cagaguuucaugacaugga

SEQ ID NO: 1304809 - RNA, 19 nt, Artificial Sequence
  Description of Artificial Sequence: Synthetic oligonucleotide
guggugguggugguggugg

SEQ ID NO: 1304810 - RNA, 19 nt, Artificial Sequence
  Description of Artificial Sequence: Synthetic oligonucleotide
uguucgcacugagugaggu

SEQ ID NO: 1304811 - RNA, 19 nt, Artificial Sequence
  Description of Artificial Sequence: Synthetic oligonucleotide
uggagagggacagcgcuug

SEQ ID NO: 1304812 - RNA, 19 nt, Artificial Sequence
  Description of Artificial Sequence: Synthetic oligonucleotide
acugaagagauaggcuuca

SEQ ID NO: 1304813 - RNA, 19 nt, Artificial Sequence
  Description of Artificial Sequence: Synthetic oligonucleotide
aggcuuucaacuguucgca

SEQ ID NO: 1304814 - RNA, 19 nt, Artificial Sequence
  Description of Artificial Sequence: Synthetic oligonucleotide
uugucacaaauggcggaag

SEQ ID NO: 1304815 - RNA, 19 nt, Artificial Sequence
  Description of Artificial Sequence: Synthetic oligonucleotide
caggaauguguuuggucac

SEQ ID NO: 1304816 - RNA, 19 nt, Artificial Sequence
  Description of Artificial Sequence: Synthetic oligonucleotide
ucucacguaguugguuaag

SEQ ID NO: 1304817 - RNA, 19 nt, Artificial Sequence
  Description of Artificial Sequence: Synthetic oligonucleotide
cugccccugauguacuacc

SEQ ID NO: 1304818 - RNA, 19 nt, Artificial Sequence
  Description of Artificial Sequence: Synthetic oligonucleotide
ggcaugagcccauuaucag

SEQ ID NO: 1304819 - RNA, 19 nt, Artificial Sequence
  Description of Artificial Sequence: Synthetic oligonucleotide
uggcggaagaacugguuau

SEQ ID NO: 1304820 - RNA, 19 nt, Artificial Sequence
  Description of Artificial Sequence: Synthetic oligonucleotide
aacagguuuuacacuuagu

SEQ ID NO: 1304821 - RNA, 19 nt, Artificial Sequence
  Description of Artificial Sequence: Synthetic oligonucleotide
ggaaccuggcugcuaaggc

SEQ ID NO: 1304822 - RNA, 19 nt, Artificial Sequence
  Description of Artificial Sequence: Synthetic oligonucleotide
cuguccccgagccaugggc

SEQ ID NO: 1304823 - RNA, 19 nt, Artificial Sequence
  Description of Artificial Sequence: Synthetic oligonucleotide
acuuaugugcugccccaga

SEQ ID NO: 1304824 - RNA, 19 nt, Artificial Sequence
  Description of Artificial Sequence: Synthetic oligonucleotide
guaagauaucuacuucucu

SEQ ID NO: 1304825 - RNA, 19 nt, Artificial Sequence
  Description of Artificial Sequence: Synthetic oligonucleotide
uucucacguaguugguuaa

SEQ ID NO: 1304826 - RNA, 19 nt, Artificial Sequence
  Description of Artificial Sequence: Synthetic oligonucleotide
guucucacguaguugguua

SEQ ID NO: 1304827 - RNA, 19 nt, Artificial Sequence
  Description of Artificial Sequence: Synthetic oligonucleotide
uuucccaaauagagcuguc

SEQ ID NO: 1304828 - RNA, 19 nt, Artificial Sequence
  Description of Artificial Sequence: Synthetic oligonucleotide
cagguuuuacacuuagugu

SEQ ID NO: 1304829 - RNA, 19 nt, Artificial Sequence
  Description of Artificial Sequence: Synthetic oligonucleotide
uuguucucacguaguuggu

SEQ ID NO: 1304830 - RNA, 19 nt, Artificial Sequence
  Description of Artificial Sequence: Synthetic oligonucleotide
gguuuuacacuuaguguac

SEQ ID NO: 1304831 - RNA, 19 nt, Artificial Sequence
  Description of Artificial Sequence: Synthetic oligonucleotide
gguuuugaaaguguacaga

SEQ ID NO: 1304832 - RNA, 19 nt, Artificial Sequence
  Description of Artificial Sequence: Synthetic oligonucleotide
ucucaccgggacagguuug

SEQ ID NO: 1304833 - RNA, 19 nt, Artificial Sequence
  Description of Artificial Sequence: Synthetic oligonucleotide
uacuaccuggagcuuucuc

SEQ ID NO: 1304834 - RNA, 19 nt, Artificial Sequence
  Description of Artificial Sequence: Synthetic oligonucleotide
gcuucauagauuaugcuua

SEQ ID NO: 1304835 - RNA, 19 nt, Artificial Sequence
  Description of Artificial Sequence: Synthetic oligonucleotide
ugcgacugauguagggguc

SEQ ID NO: 1304836 - RNA, 19 nt, Artificial Sequence
  Description of Artificial Sequence: Synthetic oligonucleotide
cuucauagauuaugcuuaa

SEQ ID NO: 1304837 - RNA, 19 nt, Artificial Sequence
  Description of Artificial Sequence: Synthetic oligonucleotide
ugccccugauguacuaccu

SEQ ID NO: 1304838 - RNA, 19 nt, Artificial Sequence
  Description of Artificial Sequence: Synthetic oligonucleotide
gagugagagccuucuggga

SEQ ID NO: 1304839 - RNA, 19 nt, Artificial Sequence
  Description of Artificial Sequence: Synthetic oligonucleotide
ggcuuaaacuuaugugcug

SEQ ID NO: 1304840 - RNA, 19 nt, Artificial Sequence
  Description of Artificial Sequence: Synthetic oligonucleotide
cugucuuguuggcccaggc

SEQ ID NO: 1304841 - RNA, 19 nt, Artificial Sequence
  Description of Artificial Sequence: Synthetic oligonucleotide
uucugaauggcuggacaua

SEQ ID NO: 1304842 - RNA, 19 nt, Artificial Sequence
  Description of Artificial Sequence: Synthetic oligonucleotide
uccuaggggcaugagccca

SEQ ID NO: 1304843 - RNA, 19 nt, Artificial Sequence
  Description of Artificial Sequence: Synthetic oligonucleotide
uuucaacuguucgcacuga

SEQ ID NO: 1304844 - RNA, 19 nt, Artificial Sequence
  Description of Artificial Sequence: Synthetic oligonucleotide
cuuaugugcugccccagaa

SEQ ID NO: 1304845 - RNA, 19 nt, Artificial Sequence
  Description of Artificial Sequence: Synthetic oligonucleotide
cuccuaggggcaugagccc

SEQ ID NO: 1304846 - RNA, 19 nt, Artificial Sequence
  Description of Artificial Sequence: Synthetic oligonucleotide
gugagugagccacgcuuug

SEQ ID NO: 1304847 - RNA, 19 nt, Artificial Sequence
  Description of Artificial Sequence: Synthetic oligonucleotide
acguccacgaugcgacuga

SEQ ID NO: 1304848 - RNA, 19 nt, Artificial Sequence
  Description of Artificial Sequence: Synthetic oligonucleotide
cugcaagugcucugugcac

SEQ ID NO: 1304849 - RNA, 19 nt, Artificial Sequence
  Description of Artificial Sequence: Synthetic oligonucleotide
caccagcugugagugagcc

SEQ ID NO: 1304850 - RNA, 19 nt, Artificial Sequence
  Description of Artificial Sequence: Synthetic oligonucleotide
cagguuugauaagcuuagg

SEQ ID NO: 1304851 - RNA, 19 nt, Artificial Sequence
  Description of Artificial Sequence: Synthetic oligonucleotide
aggaauguguuuggucaca

SEQ ID NO: 1304852 - RNA, 19 nt, Artificial Sequence
  Description of Artificial Sequence: Synthetic oligonucleotide
guggcuacuacugggucuc

SEQ ID NO: 1304853 - RNA, 19 nt, Artificial Sequence
  Description of Artificial Sequence: Synthetic oligonucleotide
ggacauaguugcuucucca

SEQ ID NO: 1304854 - RNA, 19 nt, Artificial Sequence
  Description of Artificial Sequence: Synthetic oligonucleotide
cuguucgcacugagugagg

SEQ ID NO: 1304855 - RNA, 19 nt, Artificial Sequence
  Description of Artificial Sequence: Synthetic oligonucleotide
cuugcaugacuggggcugc

SEQ ID NO: 1304856 - RNA, 19 nt, Artificial Sequence
  Description of Artificial Sequence: Synthetic oligonucleotide
agccccgugcucccgacca

SEQ ID NO: 1304857 - RNA, 19 nt, Artificial Sequence
  Description of Artificial Sequence: Synthetic oligonucleotide
agcgcuugugcuggcagug

SEQ ID NO: 1304858 - RNA, 19 nt, Artificial Sequence
  Description of Artificial Sequence: Synthetic oligonucleotide
uguaggggucguggcgccg

SEQ ID NO: 1304859 - RNA, 19 nt, Artificial Sequence
  Description of Artificial Sequence: Synthetic oligonucleotide
ggcuuuucuguccccgagc

SEQ ID NO: 1304860 - RNA, 19 nt, Artificial Sequence
  Description of Artificial Sequence: Synthetic oligonucleotide
cugacacggggaaccuggc

SEQ ID NO: 1304861 - RNA, 19 nt, Artificial Sequence
  Description of Artificial Sequence: Synthetic oligonucleotide
uaccuggagcuuucucaac

SEQ ID NO: 1304862 - RNA, 19 nt, Artificial Sequence
  Description of Artificial Sequence: Synthetic oligonucleotide
cuguggcuacuacuggguc

SEQ ID NO: 1304863 - RNA, 19 nt, Artificial Sequence
  Description of Artificial Sequence: Synthetic oligonucleotide
gaggguuucagaguuucau

SEQ ID NO: 1304864 - RNA, 19 nt, Artificial Sequence
  Description of Artificial Sequence: Synthetic oligonucleotide
agugugcagucccaccguu

SEQ ID NO: 1304865 - RNA, 19 nt, Artificial Sequence
  Description of Artificial Sequence: Synthetic oligonucleotide
ggcuggacauaguugcuuc

SEQ ID NO: 1304866 - RNA, 19 nt, Artificial Sequence
  Description of Artificial Sequence: Synthetic oligonucleotide
auguacuaccuggagcuuu

SEQ ID NO: 1304867 - RNA, 19 nt, Artificial Sequence
  Description of Artificial Sequence: Synthetic oligonucleotide
cugcuugugucacacugaa

SEQ ID NO: 1304868 - RNA, 19 nt, Artificial Sequence
  Description of Artificial Sequence: Synthetic oligonucleotide
ggggcaugagcccauuauc

SEQ ID NO: 1304869 - RNA, 19 nt, Artificial Sequence
  Description of Artificial Sequence: Synthetic oligonucleotide
gcgacugauguaggggucg

SEQ ID NO: 1304870 - RNA, 19 nt, Artificial Sequence
  Description of Artificial Sequence: Synthetic oligonucleotide
ccgaccaugaguuucugaa

SEQ ID NO: 1304871 - RNA, 19 nt, Artificial Sequence
  Description of Artificial Sequence: Synthetic oligonucleotide
cccucuccugaacucaggg

SEQ ID NO: 1304872 - RNA, 19 nt, Artificial Sequence
  Description of Artificial Sequence: Synthetic oligonucleotide
uggggaggauucugcucca

SEQ ID NO: 1304873 - RNA, 19 nt, Artificial Sequence
  Description of Artificial Sequence: Synthetic oligonucleotide
cagugcacacugcuccuuc

SEQ ID NO: 1304874 - RNA, 19 nt, Artificial Sequence
  Description of Artificial Sequence: Synthetic oligonucleotide
gaagaacugguuaucuguu

SEQ ID NO: 1304875 - RNA, 19 nt, Artificial Sequence
  Description of Artificial Sequence: Synthetic oligonucleotide
gggcaugagcccauuauca

SEQ ID NO: 1304876 - RNA, 19 nt, Artificial Sequence
  Description of Artificial Sequence: Synthetic oligonucleotide
gugguggugguggugguga

SEQ ID NO: 1304877 - RNA, 19 nt, Artificial Sequence
  Description of Artificial Sequence: Synthetic oligonucleotide
ugcagccccgugcucccga

SEQ ID NO: 1304878 - RNA, 19 nt, Artificial Sequence
  Description of Artificial Sequence: Synthetic oligonucleotide
ggaauguguuuggucacac

SEQ ID NO: 1304879 - RNA, 19 nt, Artificial Sequence
  Description of Artificial Sequence: Synthetic oligonucleotide
acgaugcgacugauguagg

SEQ ID NO: 1304880 - RNA, 19 nt, Artificial Sequence
  Description of Artificial Sequence: Synthetic oligonucleotide
ggaaaucaauucucagucu

SEQ ID NO: 1304881 - RNA, 19 nt, Artificial Sequence
  Description of Artificial Sequence: Synthetic oligonucleotide
cacguccacgaugcgacug

SEQ ID NO: 1304882 - RNA, 19 nt, Artificial Sequence
  Description of Artificial Sequence: Synthetic oligonucleotide
cgagccaugggcugacacg

SEQ ID NO: 1304883 - RNA, 19 nt, Artificial Sequence
  Description of Artificial Sequence: Synthetic oligonucleotide
accagcugugagugagcca

SEQ ID NO: 1304884 - RNA, 19 nt, Artificial Sequence
  Description of Artificial Sequence: Synthetic oligonucleotide
guuggugguggugguggug

SEQ ID NO: 1304885 - RNA, 19 nt, Artificial Sequence
  Description of Artificial Sequence: Synthetic oligonucleotide
cuuaagaagcugucaucau

SEQ ID NO: 1304886 - RNA, 19 nt, Artificial Sequence
  Description of Artificial Sequence: Synthetic oligonucleotide
cuccacggggagugagagc

SEQ ID NO: 1304887 - RNA, 19 nt, Artificial Sequence
  Description of Artificial Sequence: Synthetic oligonucleotide
guaggggucguggcgccgc

SEQ ID NO: 1304888 - RNA, 19 nt, Artificial Sequence
  Description of Artificial Sequence: Synthetic oligonucleotide
guuuuacacuuaguguacu

SEQ ID NO: 1304889 - RNA, 19 nt, Artificial Sequence
  Description of Artificial Sequence: Synthetic oligonucleotide
ggggucguggcgccgcagg

SEQ ID NO: 1304890 - RNA, 19 nt, Artificial Sequence
  Description of Artificial Sequence: Synthetic oligonucleotide
agaacagguuuuacacuua

SEQ ID NO: 1304891 - RNA, 19 nt, Artificial Sequence
  Description of Artificial Sequence: Synthetic oligonucleotide
ugauaagcuuaggguuguc

SEQ ID NO: 1304892 - RNA, 19 nt, Artificial Sequence
  Description of Artificial Sequence: Synthetic oligonucleotide
guccccgagccaugggcug

SEQ ID NO: 1304893 - RNA, 19 nt, Artificial Sequence
  Description of Artificial Sequence: Synthetic oligonucleotide
uggccuuagugagcaucug

SEQ ID NO: 1304894 - RNA, 19 nt, Artificial Sequence
  Description of Artificial Sequence: Synthetic oligonucleotide
gcuuucaacuguucgcacu

SEQ ID NO: 1304895 - RNA, 19 nt, Artificial Sequence
  Description of Artificial Sequence: Synthetic oligonucleotide
ggcuuucaacuguucgcac

SEQ ID NO: 1304896 - RNA, 19 nt, Artificial Sequence
  Description of Artificial Sequence: Synthetic oligonucleotide
gguggaggauucccaguuc

SEQ ID NO: 1304897 - RNA, 19 nt, Artificial Sequence
  Description of Artificial Sequence: Synthetic oligonucleotide
cgggacagguuugauaagc

SEQ ID NO: 1304898 - RNA, 19 nt, Artificial Sequence
  Description of Artificial Sequence: Synthetic oligonucleotide
ugguggugguggugguggu

SEQ ID NO: 1304899 - RNA, 19 nt, Artificial Sequence
  Description of Artificial Sequence: Synthetic oligonucleotide
ucccucaguggggcacagg

SEQ ID NO: 1304900 - RNA, 19 nt, Artificial Sequence
  Description of Artificial Sequence: Synthetic oligonucleotide
ccgaggucuuguugggcgg

SEQ ID NO: 1304901 - RNA, 19 nt, Artificial Sequence
  Description of Artificial Sequence: Synthetic oligonucleotide
uccccgagccaugggcuga

SEQ ID NO: 1304902 - RNA, 19 nt, Artificial Sequence
  Description of Artificial Sequence: Synthetic oligonucleotide
gggaggauucugcuccaga

SEQ ID NO: 1304903 - RNA, 19 nt, Artificial Sequence
  Description of Artificial Sequence: Synthetic oligonucleotide
cccaaauagagcugucaaa

SEQ ID NO: 1304904 - RNA, 19 nt, Artificial Sequence
  Description of Artificial Sequence: Synthetic oligonucleotide
gccccugauguacuaccug

SEQ ID NO: 1304905 - RNA, 19 nt, Artificial Sequence
  Description of Artificial Sequence: Synthetic oligonucleotide
cucacguaguugguuaagu

SEQ ID NO: 1304906 - RNA, 19 nt, Artificial Sequence
  Description of Artificial Sequence: Synthetic oligonucleotide
cucaggguccgaggucuug

SEQ ID NO: 1304907 - RNA, 19 nt, Artificial Sequence
  Description of Artificial Sequence: Synthetic oligonucleotide
gaaggaccuggaaaucaau

SEQ ID NO: 1304908 - RNA, 19 nt, Artificial Sequence
  Description of Artificial Sequence: Synthetic oligonucleotide
cucaccgggacagguuuga

SEQ ID NO: 1304909 - RNA, 19 nt, Artificial Sequence
  Description of Artificial Sequence: Synthetic oligonucleotide
guacucaucuuuggccuua

SEQ ID NO: 1304910 - RNA, 19 nt, Artificial Sequence
  Description of Artificial Sequence: Synthetic oligonucleotide
gacagcgcuugugcuggca

SEQ ID NO: 1304911 - RNA, 19 nt, Artificial Sequence
  Description of Artificial Sequence: Synthetic oligonucleotide
gccuuagugagcaucugua

SEQ ID NO: 1304912 - RNA, 19 nt, Artificial Sequence
  Description of Artificial Sequence: Synthetic oligonucleotide
uggugguggugguggugau

SEQ ID NO: 1304913 - RNA, 19 nt, Artificial Sequence
  Description of Artificial Sequence: Synthetic oligonucleotide
caccgggacagguuugaua

SEQ ID NO: 1304914 - RNA, 19 nt, Artificial Sequence
  Description of Artificial Sequence: Synthetic oligonucleotide
ggcggaagaacugguuauc

SEQ ID NO: 1304915 - RNA, 19 nt, Artificial Sequence
  Description of Artificial Sequence: Synthetic oligonucleotide
gcucccgaccaugaguuuc

SEQ ID NO: 1304916 - RNA, 19 nt, Artificial Sequence
  Description of Artificial Sequence: Synthetic oligonucleotide
gcuuaggguugucacaaau

SEQ ID NO: 1304917 - RNA, 19 nt, Artificial Sequence
  Description of Artificial Sequence: Synthetic oligonucleotide
acggggagugagagccuuc

SEQ ID NO: 1304918 - RNA, 19 nt, Artificial Sequence
  Description of Artificial Sequence: Synthetic oligonucleotide
cuacugggucucaccggga

SEQ ID NO: 1304919 - RNA, 19 nt, Artificial Sequence
  Description of Artificial Sequence: Synthetic oligonucleotide
gugugcagucccaccguuc

SEQ ID NO: 1304920 - RNA, 19 nt, Artificial Sequence
  Description of Artificial Sequence: Synthetic oligonucleotide
guaguugguuaaguggcuu

SEQ ID NO: 1304921 - RNA, 19 nt, Artificial Sequence
  Description of Artificial Sequence: Synthetic oligonucleotide
ggccuuagugagcaucugu

SEQ ID NO: 1304922 - RNA, 19 nt, Artificial Sequence
  Description of Artificial Sequence: Synthetic oligonucleotide
gcaccuugaaguugcucua

SEQ ID NO: 1304923 - RNA, 19 nt, Artificial Sequence
  Description of Artificial Sequence: Synthetic oligonucleotide
ggggagugagagccuucug

SEQ ID NO: 1304924 - RNA, 19 nt, Artificial Sequence
  Description of Artificial Sequence: Synthetic oligonucleotide
gugcagucccaccguucca

SEQ ID NO: 1304925 - RNA, 19 nt, Artificial Sequence
  Description of Artificial Sequence: Synthetic oligonucleotide
ucaccgggacagguuugau

SEQ ID NO: 1304926 - RNA, 19 nt, Artificial Sequence
  Description of Artificial Sequence: Synthetic oligonucleotide
gguggugguggugguggug

SEQ ID NO: 1304927 - RNA, 19 nt, Artificial Sequence
  Description of Artificial Sequence: Synthetic oligonucleotide
ugcucccgaccaugaguuu

SEQ ID NO: 1304928 - RNA, 19 nt, Artificial Sequence
  Description of Artificial Sequence: Synthetic oligonucleotide
gugcucccgaccaugaguu

SEQ ID NO: 1304929 - RNA, 19 nt, Artificial Sequence
  Description of Artificial Sequence: Synthetic oligonucleotide
ggucguggcgccgcagggc

SEQ ID NO: 1304930 - RNA, 19 nt, Artificial Sequence
  Description of Artificial Sequence: Synthetic oligonucleotide
ccgagccaugggcugacac

SEQ ID NO: 1304931 - RNA, 19 nt, Artificial Sequence
  Description of Artificial Sequence: Synthetic oligonucleotide
ggacagguuugauaagcuu

SEQ ID NO: 1304932 - RNA, 19 nt, Artificial Sequence
  Description of Artificial Sequence: Synthetic oligonucleotide
uggcuacuacugggucuca

SEQ ID NO: 1304933 - RNA, 19 nt, Artificial Sequence
  Description of Artificial Sequence: Synthetic oligonucleotide
acgcuuuggcacggagcca

SEQ ID NO: 1304934 - RNA, 19 nt, Artificial Sequence
  Description of Artificial Sequence: Synthetic oligonucleotide
cagccccgugcucccgacc

SEQ ID NO: 1304935 - RNA, 19 nt, Artificial Sequence
  Description of Artificial Sequence: Synthetic oligonucleotide
ggcuacuacugggucucac

SEQ ID NO: 1304936 - RNA, 19 nt, Artificial Sequence
  Description of Artificial Sequence: Synthetic oligonucleotide
gauguacuaccuggagcuu

SEQ ID NO: 1304937 - RNA, 19 nt, Artificial Sequence
  Description of Artificial Sequence: Synthetic oligonucleotide
gggacagguuugauaagcu

SEQ ID NO: 1304938 - RNA, 19 nt, Artificial Sequence
  Description of Artificial Sequence: Synthetic oligonucleotide
ggccacguccacgaugcga

SEQ ID NO: 1304939 - RNA, 19 nt, Artificial Sequence
  Description of Artificial Sequence: Synthetic oligonucleotide
gcuggacauaguugcuucu

SEQ ID NO: 1304940 - RNA, 19 nt, Artificial Sequence
  Description of Artificial Sequence: Synthetic oligonucleotide
ccgggacagguuugauaag

SEQ ID NO: 1304941 - RNA, 19 nt, Artificial Sequence
  Description of Artificial Sequence: Synthetic oligonucleotide
cagugugcagucccaccgu

SEQ ID NO: 1304942 - RNA, 19 nt, Artificial Sequence
  Description of Artificial Sequence: Synthetic oligonucleotide
ccuguggcuacuacugggu

SEQ ID NO: 1304943 - RNA, 19 nt, Artificial Sequence
  Description of Artificial Sequence: Synthetic oligonucleotide
gcggaagaacugguuaucu

SEQ ID NO: 1304944 - RNA, 19 nt, Artificial Sequence
  Description of Artificial Sequence: Synthetic oligonucleotide
aggggucguggcgccgcag

SEQ ID NO: 1304945 - RNA, 19 nt, Artificial Sequence
  Description of Artificial Sequence: Synthetic oligonucleotide
ccugagagucugauguccu

SEQ ID NO: 1304946 - RNA, 19 nt, Artificial Sequence
  Description of Artificial Sequence: Synthetic oligonucleotide
ggcugacacggggaaccug

SEQ ID NO: 1304947 - RNA, 19 nt, Artificial Sequence
  Description of Artificial Sequence: Synthetic oligonucleotide
cuuuggcacggagccagcu

SEQ ID NO: 1304948 - RNA, 19 nt, Artificial Sequence
  Description of Artificial Sequence: Synthetic oligonucleotide
cgaggucuuguugggcggg

SEQ ID NO: 1304949 - RNA, 19 nt, Artificial Sequence
  Description of Artificial Sequence: Synthetic oligonucleotide
ggcugcuaaggcuggccgu

SEQ ID NO: 1304950 - RNA, 19 nt, Artificial Sequence
  Description of Artificial Sequence: Synthetic oligonucleotide
cagcgcuugugcuggcagu

SEQ ID NO: 1304951 - RNA, 19 nt, Artificial Sequence
  Description of Artificial Sequence: Synthetic oligonucleotide
gcgcuugugcuggcagugc

SEQ ID NO: 1304952 - RNA, 19 nt, Artificial Sequence
  Description of Artificial Sequence: Synthetic oligonucleotide
guggcgccgcagggcagcc

SEQ ID NO: 1304953 - RNA, 19 nt, Artificial Sequence
  Description of Artificial Sequence: Synthetic oligonucleotide
ccgugcucccgaccaugag

SEQ ID NO: 1304954 - RNA, 19 nt, Artificial Sequence
  Description of Artificial Sequence: Synthetic oligonucleotide
guacuaccuggagcuuucu

SEQ ID NO: 1304955 - RNA, 19 nt, Artificial Sequence
  Description of Artificial Sequence: Synthetic oligonucleotide
cguaguugguuaaguggcu

SEQ ID NO: 1304956 - RNA, 19 nt, Artificial Sequence
  Description of Artificial Sequence: Synthetic oligonucleotide
cugaagagauaggcuucau

SEQ ID NO: 1304957 - RNA, 19 nt, Artificial Sequence
  Description of Artificial Sequence: Synthetic oligonucleotide
cccgugcucccgaccauga

SEQ ID NO: 1304958 - RNA, 19 nt, Artificial Sequence
  Description of Artificial Sequence: Synthetic oligonucleotide
gcacagggcuuaaacuuau

SEQ ID NO: 1304959 - RNA, 19 nt, Artificial Sequence
  Description of Artificial Sequence: Synthetic oligonucleotide
cgugcucccgaccaugagu

SEQ ID NO: 1304960 - RNA, 19 nt, Artificial Sequence
  Description of Artificial Sequence: Synthetic oligonucleotide
gggucucaccgggacaggu

SEQ ID NO: 1304961 - RNA, 19 nt, Artificial Sequence
  Description of Artificial Sequence: Synthetic oligonucleotide
cggggaaccuggcugcuaa

SEQ ID NO: 1304962 - RNA, 19 nt, Artificial Sequence
  Description of Artificial Sequence: Synthetic oligonucleotide
ccccgugcucccgaccaug

SEQ ID NO: 1304963 - RNA, 19 nt, Artificial Sequence
  Description of Artificial Sequence: Synthetic oligonucleotide
caggguccgaggucuuguu

SEQ ID NO: 1304964 - RNA, 19 nt, Artificial Sequence
  Description of Artificial Sequence: Synthetic oligonucleotide
cacggggagugagagccuu

SEQ ID NO: 1304965 - RNA, 19 nt, Artificial Sequence
  Description of Artificial Sequence: Synthetic oligonucleotide
ggucucaccgggacagguu

SEQ ID NO: 1304966 - RNA, 19 nt, Artificial Sequence
  Description of Artificial Sequence: Synthetic oligonucleotide
ccuaggggcaugagcccau

SEQ ID NO: 1304967 - RNA, 19 nt, Artificial Sequence
  Description of Artificial Sequence: Synthetic oligonucleotide
cuaggggcaugagcccauu

SEQ ID NO: 1304968 - RNA, 19 nt, Artificial Sequence
  Description of Artificial Sequence: Synthetic oligonucleotide
gggcugacacggggaaccu

SEQ ID NO: 1304969 - RNA, 19 nt, Artificial Sequence
  Description of Artificial Sequence: Synthetic oligonucleotide
ccacguccacgaugcgacu

SEQ ID NO: 1304970 - RNA, 19 nt, Artificial Sequence
  Description of Artificial Sequence: Synthetic oligonucleotide
cggggagugagagccuucu

SEQ ID NO: 1304971 - RNA, 19 nt, Artificial Sequence
  Description of Artificial Sequence: Synthetic oligonucleotide
ggcuggccguggggccgcc

SEQ ID NO: 1304972 - RNA, 19 nt, Artificial Sequence
  Description of Artificial Sequence: Synthetic oligonucleotide
cgggugcagccccgugcuc

SEQ ID NO: 1304973 - RNA, 19 nt, Artificial Sequence
  Description of Artificial Sequence: Synthetic oligonucleotide
cgacugauguaggggucgu

SEQ ID NO: 1304974 - RNA, 19 nt, Artificial Sequence
  Description of Artificial Sequence: Synthetic oligonucleotide
gccccgugcucccgaccau

SEQ ID NO: 1304975 - RNA, 19 nt, Artificial Sequence
  Description of Artificial Sequence: Synthetic oligonucleotide
cccgagccaugggcugaca

SEQ ID NO: 1304976 - RNA, 19 nt, Artificial Sequence
  Description of Artificial Sequence: Synthetic oligonucleotide
auaaaugugaaccagagcg

SEQ ID NO: 1304977 - RNA, 19 nt, Artificial Sequence
  Description of Artificial Sequence: Synthetic oligonucleotide
aauaaacgcgccuucaauc

SEQ ID NO: 1304978 - RNA, 19 nt, Artificial Sequence
  Description of Artificial Sequence: Synthetic oligonucleotide
aaaggauccagguucaucu

SEQ ID NO: 1304979 - RNA, 19 nt, Artificial Sequence
  Description of Artificial Sequence: Synthetic oligonucleotide
acagccgagagacugaugc

SEQ ID NO: 1304980 - RNA, 19 nt, Artificial Sequence
  Description of Artificial Sequence: Synthetic oligonucleotide
aaugguguugcaccaacac

SEQ ID NO: 1304981 - RNA, 19 nt, Artificial Sequence
  Description of Artificial Sequence: Synthetic oligonucleotide
acaauguccguucugauag

SEQ ID NO: 1304982 - RNA, 19 nt, Artificial Sequence
  Description of Artificial Sequence: Synthetic oligonucleotide
ugauccaauacccacagga

SEQ ID NO: 1304983 - RNA, 19 nt, Artificial Sequence
  Description of Artificial Sequence: Synthetic oligonucleotide
uugcauuuggcucacacag

SEQ ID NO: 1304984 - RNA, 19 nt, Artificial Sequence
  Description of Artificial Sequence: Synthetic oligonucleotide
  modified_base (3)..(3): a, c, u, g, unknown or other
ugngaacuuaucuucagag

SEQ ID NO: 1304985 - RNA, 19 nt, Artificial Sequence
  Description of Artificial Sequence: Synthetic oligonucleotide
aggcaauucuauuucaacc

SEQ ID NO: 1304986 - RNA, 19 nt, Artificial Sequence
  Description of Artificial Sequence: Synthetic oligonucleotide
uuuaauucgcggcugacca

SEQ ID NO: 1304987 - RNA, 19 nt, Artificial Sequence
  Description of Artificial Sequence: Synthetic oligonucleotide
ugugauacagacuucggug

SEQ ID NO: 1304988 - RNA, 19 nt, Artificial Sequence
  Description of Artificial Sequence: Synthetic oligonucleotide
ugaugauggguucaaggcg

SEQ ID NO: 1304989 - RNA, 19 nt, Artificial Sequence
  Description of Artificial Sequence: Synthetic oligonucleotide
aaucauuuuaguguggaca

SEQ ID NO: 1304990 - RNA, 19 nt, Artificial Sequence
  Description of Artificial Sequence: Synthetic oligonucleotide
ugaaauagccaacagccga

SEQ ID NO: 1304991 - RNA, 19 nt, Artificial Sequence
  Description of Artificial Sequence: Synthetic oligonucleotide
uaaaugugaaccagagcgg

SEQ ID NO: 1304992 - RNA, 19 nt, Artificial Sequence
  Description of Artificial Sequence: Synthetic oligonucleotide
uucaaggcguuuuagaaga

SEQ ID NO: 1304993 - RNA, 19 nt, Artificial Sequence
  Description of Artificial Sequence: Synthetic oligonucleotide
cuauguccgacucauaacc

SEQ ID NO: 1304994 - RNA, 19 nt, Artificial Sequence
  Description of Artificial Sequence: Synthetic oligonucleotide
guugaugauggguucaagg

SEQ ID NO: 1304995 - RNA, 19 nt, Artificial Sequence
  Description of Artificial Sequence: Synthetic oligonucleotide
  modified_base (2)..(2): a, c, u, g, unknown or other
gngaacuuaucuucagagg

SEQ ID NO: 1304996 - RNA, 19 nt, Artificial Sequence
  Description of Artificial Sequence: Synthetic oligonucleotide
uaagauagugaccuggguc

SEQ ID NO: 1304997 - RNA, 19 nt, Artificial Sequence
  Description of Artificial Sequence: Synthetic oligonucleotide
gacuguugagccucaaugg

SEQ ID NO: 1304998 - RNA, 19 nt, Artificial Sequence
  Description of Artificial Sequence: Synthetic oligonucleotide
acaacccagacucuccucc

SEQ ID NO: 1304999 - RNA, 19 nt, Artificial Sequence
  Description of Artificial Sequence: Synthetic oligonucleotide
uccacgaggauucuuguug

SEQ ID NO: 1305000 - RNA, 19 nt, Artificial Sequence
  Description of Artificial Sequence: Synthetic oligonucleotide
cauccuugaauaaacgcgc

SEQ ID NO: 1305001 - RNA, 19 nt, Artificial Sequence
  Description of Artificial Sequence: Synthetic oligonucleotide
  modified_base (6)..(6): a, c, u, g, unknown or other
uuuugngaacuuaucuuca

SEQ ID NO: 1305002 - RNA, 19 nt, Artificial Sequence
  Description of Artificial Sequence: Synthetic oligonucleotide
uguacauauugaugguccg

SEQ ID NO: 1305003 - RNA, 19 nt, Artificial Sequence
  Description of Artificial Sequence: Synthetic oligonucleotide
cucauaaccccugaaauag

SEQ ID NO: 1305004 - RNA, 19 nt, Artificial Sequence
  Description of Artificial Sequence: Synthetic oligonucleotide
aaauaccgaacaucccagg

SEQ ID NO: 1305005 - RNA, 19 nt, Artificial Sequence
  Description of Artificial Sequence: Synthetic oligonucleotide
uuggauggaagguugguug

SEQ ID NO: 1305006 - RNA, 19 nt, Artificial Sequence
  Description of Artificial Sequence: Synthetic oligonucleotide
aaauacucaaagggauggc

SEQ ID NO: 1305007 - RNA, 19 nt, Artificial Sequence
  Description of Artificial Sequence: Synthetic oligonucleotide
aauaccgaacaucccagga

SEQ ID NO: 1305008 - RNA, 19 nt, Artificial Sequence
  Description of Artificial Sequence: Synthetic oligonucleotide
uggccuaugucuaagggcu

SEQ ID NO: 1305009 - RNA, 19 nt, Artificial Sequence
  Description of Artificial Sequence: Synthetic oligonucleotide
cuuuccaaguuccacgagg

SEQ ID NO: 1305010 - RNA, 19 nt, Artificial Sequence
  Description of Artificial Sequence: Synthetic oligonucleotide
auugaacuucccuacagcu

SEQ ID NO: 1305011 - RNA, 19 nt, Artificial Sequence
  Description of Artificial Sequence: Synthetic oligonucleotide
augguguugcaccaacacc

SEQ ID NO: 1305012 - RNA, 19 nt, Artificial Sequence
  Description of Artificial Sequence: Synthetic oligonucleotide
  modified_base (5)..(5): a, c, u, g, unknown or other
uuugngaacuuaucuucag

SEQ ID NO: 1305013 - RNA, 19 nt, Artificial Sequence
  Description of Artificial Sequence: Synthetic oligonucleotide
aaggcguuuuagaagaguc

SEQ ID NO: 1305014 - RNA, 19 nt, Artificial Sequence
  Description of Artificial Sequence: Synthetic oligonucleotide
ucauugaguaggaagacuu

SEQ ID NO: 1305015 - RNA, 19 nt, Artificial Sequence
  Description of Artificial Sequence: Synthetic oligonucleotide
uuuuaguguggacaccuug

SEQ ID NO: 1305016 - RNA, 19 nt, Artificial Sequence
  Description of Artificial Sequence: Synthetic oligonucleotide
ucuccaauaauguuuugaa

SEQ ID NO: 1305017 - RNA, 19 nt, Artificial Sequence
  Description of Artificial Sequence: Synthetic oligonucleotide
gauaaaugugaaccagagc

SEQ ID NO: 1305018 - RNA, 19 nt, Artificial Sequence
  Description of Artificial Sequence: Synthetic oligonucleotide
uguccaacauccaucacaa

SEQ ID NO: 1305019 - RNA, 19 nt, Artificial Sequence
  Description of Artificial Sequence: Synthetic oligonucleotide
aaucccaccaugagugacc

SEQ ID NO: 1305020 - RNA, 19 nt, Artificial Sequence
  Description of Artificial Sequence: Synthetic oligonucleotide
auauugaugguccgaaccu

SEQ ID NO: 1305021 - RNA, 19 nt, Artificial Sequence
  Description of Artificial Sequence: Synthetic oligonucleotide
uccauccuugaauaaacgc

SEQ ID NO: 1305022 - RNA, 19 nt, Artificial Sequence
  Description of Artificial Sequence: Synthetic oligonucleotide
cuuugggucuacauucugg

SEQ ID NO: 1305023 - RNA, 19 nt, Artificial Sequence
  Description of Artificial Sequence: Synthetic oligonucleotide
gaagcuugcauuuggcuca

SEQ ID NO: 1305024 - RNA, 19 nt, Artificial Sequence
  Description of Artificial Sequence: Synthetic oligonucleotide
auaaacgcgccuucaaucu

SEQ ID NO: 1305025 - RNA, 19 nt, Artificial Sequence
  Description of Artificial Sequence: Synthetic oligonucleotide
acagacuucggugaccagc

SEQ ID NO: 1305026 - RNA, 19 nt, Artificial Sequence
  Description of Artificial Sequence: Synthetic oligonucleotide
uucuuagcaccaauggugu

SEQ ID NO: 1305027 - RNA, 19 nt, Artificial Sequence
  Description of Artificial Sequence: Synthetic oligonucleotide
agaucugccaccacagacc

SEQ ID NO: 1305028 - RNA, 19 nt, Artificial Sequence
  Description of Artificial Sequence: Synthetic oligonucleotide
auuuggcucacacagguau

SEQ ID NO: 1305029 - RNA, 19 nt, Artificial Sequence
  Description of Artificial Sequence: Synthetic oligonucleotide
  modified_base (4)..(4): a, c, u, g, unknown or other
uugngaacuuaucuucaga

SEQ ID NO: 1305030 - RNA, 19 nt, Artificial Sequence
  Description of Artificial Sequence: Synthetic oligonucleotide
uuugggucuacauucuggu

SEQ ID NO: 1305031 - RNA, 19 nt, Artificial Sequence
  Description of Artificial Sequence: Synthetic oligonucleotide
cucacugcaucacggaugg

SEQ ID NO: 1305032 - RNA, 19 nt, Artificial Sequence
  Description of Artificial Sequence: Synthetic oligonucleotide
agauaaaugugaaccagag

SEQ ID NO: 1305033 - RNA, 19 nt, Artificial Sequence
  Description of Artificial Sequence: Synthetic oligonucleotide
ucgagauaaaugugaacca

SEQ ID NO: 1305034 - RNA, 19 nt, Artificial Sequence
  Description of Artificial Sequence: Synthetic oligonucleotide
aucggcaucuuuaauucgc

SEQ ID NO: 1305035 - RNA, 19 nt, Artificial Sequence
  Description of Artificial Sequence: Synthetic oligonucleotide
ugagcaggcagcuccauac

SEQ ID NO: 1305036 - RNA, 19 nt, Artificial Sequence
  Description of Artificial Sequence: Synthetic oligonucleotide
guucaaggcguuuuagaag

SEQ ID NO: 1305037 - RNA, 19 nt, Artificial Sequence
  Description of Artificial Sequence: Synthetic oligonucleotide
ugugcuugucccacgcagg

SEQ ID NO: 1305038 - RNA, 19 nt, Artificial Sequence
  Description of Artificial Sequence: Synthetic oligonucleotide
augaggguucucuugaacu

SEQ ID NO: 1305039 - RNA, 19 nt, Artificial Sequence
  Description of Artificial Sequence: Synthetic oligonucleotide
agccaaacccacguaaagc

SEQ ID NO: 1305040 - RNA, 19 nt, Artificial Sequence
  Description of Artificial Sequence: Synthetic oligonucleotide
uaccgaacaucccaggaac

SEQ ID NO: 1305041 - RNA, 19 nt, Artificial Sequence
  Description of Artificial Sequence: Synthetic oligonucleotide
aauguccguucugauaguc

SEQ ID NO: 1305042 - RNA, 19 nt, Artificial Sequence
  Description of Artificial Sequence: Synthetic oligonucleotide
gaaauagccaacagccgag

SEQ ID NO: 1305043 - RNA, 19 nt, Artificial Sequence
  Description of Artificial Sequence: Synthetic oligonucleotide
gaugugcguguacauauug

SEQ ID NO: 1305044 - RNA, 19 nt, Artificial Sequence
  Description of Artificial Sequence: Synthetic oligonucleotide
ucggcaucuuuaauucgcg

SEQ ID NO: 1305045 - RNA, 19 nt, Artificial Sequence
  Description of Artificial Sequence: Synthetic oligonucleotide
cugaaauagccaacagccg

SEQ ID NO: 1305046 - RNA, 19 nt, Artificial Sequence
  Description of Artificial Sequence: Synthetic oligonucleotide
agauaugccucucuccucu

SEQ ID NO: 1305047 - RNA, 19 nt, Artificial Sequence
  Description of Artificial Sequence: Synthetic oligonucleotide
uucucccagucuauguccg

SEQ ID NO: 1305048 - RNA, 19 nt, Artificial Sequence
  Description of Artificial Sequence: Synthetic oligonucleotide
aguccauccuugaauaaac

SEQ ID NO: 1305049 - RNA, 19 nt, Artificial Sequence
  Description of Artificial Sequence: Synthetic oligonucleotide
aacuuaucuucagaggcca

SEQ ID NO: 1305050 - RNA, 19 nt, Artificial Sequence
  Description of Artificial Sequence: Synthetic oligonucleotide
gagaucugccaccacagac

SEQ ID NO: 1305051 - RNA, 19 nt, Artificial Sequence
  Description of Artificial Sequence: Synthetic oligonucleotide
ugugcguguacauauugau

SEQ ID NO: 1305052 - RNA, 19 nt, Artificial Sequence
  Description of Artificial Sequence: Synthetic oligonucleotide
ugaauaaacgcgccuucaa

SEQ ID NO: 1305053 - RNA, 19 nt, Artificial Sequence
  Description of Artificial Sequence: Synthetic oligonucleotide
ucuauguccgacucauaac

SEQ ID NO: 1305054 - RNA, 19 nt, Artificial Sequence
  Description of Artificial Sequence: Synthetic oligonucleotide
gaacuuaucuucagaggcc

SEQ ID NO: 1305055 - RNA, 19 nt, Artificial Sequence
  Description of Artificial Sequence: Synthetic oligonucleotide
uggaugugcguguacauau

SEQ ID NO: 1305056 - RNA, 19 nt, Artificial Sequence
  Description of Artificial Sequence: Synthetic oligonucleotide
gaguaggaagacuuggcca

SEQ ID NO: 1305057 - RNA, 19 nt, Artificial Sequence
  Description of Artificial Sequence: Synthetic oligonucleotide
ugaggaagcugcuuugggu

SEQ ID NO: 1305058 - RNA, 19 nt, Artificial Sequence
  Description of Artificial Sequence: Synthetic oligonucleotide
uccagauaugccucucucc

SEQ ID NO: 1305059 - RNA, 19 nt, Artificial Sequence
  Description of Artificial Sequence: Synthetic oligonucleotide
uucugguggguuaauguuc

SEQ ID NO: 1305060 - RNA, 19 nt, Artificial Sequence
  Description of Artificial Sequence: Synthetic oligonucleotide
aaacgcgccuucaaucugg

SEQ ID NO: 1305061 - RNA, 19 nt, Artificial Sequence
  Description of Artificial Sequence: Synthetic oligonucleotide
uaaccccugaaauagccaa

SEQ ID NO: 1305062 - RNA, 19 nt, Artificial Sequence
  Description of Artificial Sequence: Synthetic oligonucleotide
accaugagugaccagugca

SEQ ID NO: 1305063 - RNA, 19 nt, Artificial Sequence
  Description of Artificial Sequence: Synthetic oligonucleotide
cagacuucggugaccagcc

SEQ ID NO: 1305064 - RNA, 19 nt, Artificial Sequence
  Description of Artificial Sequence: Synthetic oligonucleotide
cuggccuaugucuaagggc

SEQ ID NO: 1305065 - RNA, 19 nt, Artificial Sequence
  Description of Artificial Sequence: Synthetic oligonucleotide
gagccaucgagauaaaugu

SEQ ID NO: 1305066 - RNA, 19 nt, Artificial Sequence
  Description of Artificial Sequence: Synthetic oligonucleotide
cuauuucaaccucugagca

SEQ ID NO: 1305067 - RNA, 19 nt, Artificial Sequence
  Description of Artificial Sequence: Synthetic oligonucleotide
cuggguuuauacugugucc

SEQ ID NO: 1305068 - RNA, 19 nt, Artificial Sequence
  Description of Artificial Sequence: Synthetic oligonucleotide
uuagcaccaaugguguugc

SEQ ID NO: 1305069 - RNA, 19 nt, Artificial Sequence
  Description of Artificial Sequence: Synthetic oligonucleotide
ugacuucauucaaaaccag

SEQ ID NO: 1305070 - RNA, 19 nt, Artificial Sequence
  Description of Artificial Sequence: Synthetic oligonucleotide
ucaaucuggccuaugucua

SEQ ID NO: 1305071 - RNA, 19 nt, Artificial Sequence
  Description of Artificial Sequence: Synthetic oligonucleotide
uagaguccauccuugaaua

SEQ ID NO: 1305072 - RNA, 19 nt, Artificial Sequence
  Description of Artificial Sequence: Synthetic oligonucleotide
uaauucgcggcugaccacc

SEQ ID NO: 1305073 - RNA, 19 nt, Artificial Sequence
  Description of Artificial Sequence: Synthetic oligonucleotide
ucauaaccccugaaauagc

SEQ ID NO: 1305074 - RNA, 19 nt, Artificial Sequence
  Description of Artificial Sequence: Synthetic oligonucleotide
caacccauugagaucugcc

SEQ ID NO: 1305075 - RNA, 19 nt, Artificial Sequence
  Description of Artificial Sequence: Synthetic oligonucleotide
cuuuaauucgcggcugacc

SEQ ID NO: 1305076 - RNA, 19 nt, Artificial Sequence
  Description of Artificial Sequence: Synthetic oligonucleotide
caccugaaucauuuuagug

SEQ ID NO: 1305077 - RNA, 19 nt, Artificial Sequence
  Description of Artificial Sequence: Synthetic oligonucleotide
agugcagagccaucgagau

SEQ ID NO: 1305078 - RNA, 19 nt, Artificial Sequence
  Description of Artificial Sequence: Synthetic oligonucleotide
agcaccaaugguguugcac

SEQ ID NO: 1305079 - RNA, 19 nt, Artificial Sequence
  Description of Artificial Sequence: Synthetic oligonucleotide
cauccuuuacugccaaccc

SEQ ID NO: 1305080 - RNA, 19 nt, Artificial Sequence
  Description of Artificial Sequence: Synthetic oligonucleotide
uccgaaccugcucagggac

SEQ ID NO: 1305081 - RNA, 19 nt, Artificial Sequence
  Description of Artificial Sequence: Synthetic oligonucleotide
ggaguuacauucugcagug

SEQ ID NO: 1305082 - RNA, 19 nt, Artificial Sequence
  Description of Artificial Sequence: Synthetic oligonucleotide
uguccgacucauaaccccu

SEQ ID NO: 1305083 - RNA, 19 nt, Artificial Sequence
  Description of Artificial Sequence: Synthetic oligonucleotide
uaaacgcgccuucaaucug

SEQ ID NO: 1305084 - RNA, 19 nt, Artificial Sequence
  Description of Artificial Sequence: Synthetic oligonucleotide
ggcaucuuuaauucgcggc

SEQ ID NO: 1305085 - RNA, 19 nt, Artificial Sequence
  Description of Artificial Sequence: Synthetic oligonucleotide
gguugggacgcccaauugg

SEQ ID NO: 1305086 - RNA, 19 nt, Artificial Sequence
  Description of Artificial Sequence: Synthetic oligonucleotide
cuugaauaaacgcgccuuc

SEQ ID NO: 1305087 - RNA, 19 nt, Artificial Sequence
  Description of Artificial Sequence: Synthetic oligonucleotide
uauugaugguccgaaccug

SEQ ID NO: 1305088 - RNA, 19 nt, Artificial Sequence
  Description of Artificial Sequence: Synthetic oligonucleotide
gaugaggguucucuugaac

SEQ ID NO: 1305089 - RNA, 19 nt, Artificial Sequence
  Description of Artificial Sequence: Synthetic oligonucleotide
cugaaucauuuuagugugg

SEQ ID NO: 1305090 - RNA, 19 nt, Artificial Sequence
  Description of Artificial Sequence: Synthetic oligonucleotide
uugaauaaacgcgccuuca

SEQ ID NO: 1305091 - RNA, 19 nt, Artificial Sequence
  Description of Artificial Sequence: Synthetic oligonucleotide
uucugugcuugucccacgc

SEQ ID NO: 1305092 - RNA, 19 nt, Artificial Sequence
  Description of Artificial Sequence: Synthetic oligonucleotide
gugauacagacuucgguga

SEQ ID NO: 1305093 - RNA, 19 nt, Artificial Sequence
  Description of Artificial Sequence: Synthetic oligonucleotide
auaugccucucuccucucg

SEQ ID NO: 1305094 - RNA, 19 nt, Artificial Sequence
  Description of Artificial Sequence: Synthetic oligonucleotide
acucauaaccccugaaaua

SEQ ID NO: 1305095 - RNA, 19 nt, Artificial Sequence
  Description of Artificial Sequence: Synthetic oligonucleotide
gagauaaaugugaaccaga

SEQ ID NO: 1305096 - RNA, 19 nt, Artificial Sequence
  Description of Artificial Sequence: Synthetic oligonucleotide
auaccugucugccaggcua

SEQ ID NO: 1305097 - RNA, 19 nt, Artificial Sequence
  Description of Artificial Sequence: Synthetic oligonucleotide
aguuccacgaggauucuug

SEQ ID NO: 1305098 - RNA, 19 nt, Artificial Sequence
  Description of Artificial Sequence: Synthetic oligonucleotide
ucuuuccaaguuccacgag

SEQ ID NO: 1305099 - RNA, 19 nt, Artificial Sequence
  Description of Artificial Sequence: Synthetic oligonucleotide
cagucugcacgcuguaucc

SEQ ID NO: 1305100 - RNA, 19 nt, Artificial Sequence
  Description of Artificial Sequence: Synthetic oligonucleotide
gucuauguccgacucauaa

SEQ ID NO: 1305101 - RNA, 19 nt, Artificial Sequence
  Description of Artificial Sequence: Synthetic oligonucleotide
gauacagacuucggugacc

SEQ ID NO: 1305102 - RNA, 19 nt, Artificial Sequence
  Description of Artificial Sequence: Synthetic oligonucleotide
cuugaggaagcugcuuugg

SEQ ID NO: 1305103 - RNA, 19 nt, Artificial Sequence
  Description of Artificial Sequence: Synthetic oligonucleotide
auaccgaacaucccaggaa

SEQ ID NO: 1305104 - RNA, 19 nt, Artificial Sequence
  Description of Artificial Sequence: Synthetic oligonucleotide
uucgcggcugaccaccuga

SEQ ID NO: 1305105 - RNA, 19 nt, Artificial Sequence
  Description of Artificial Sequence: Synthetic oligonucleotide
ucaaggcguuuuagaagag

SEQ ID NO: 1305106 - RNA, 19 nt, Artificial Sequence
  Description of Artificial Sequence: Synthetic oligonucleotide
cugugcuugucccacgcag

SEQ ID NO: 1305107 - RNA, 19 nt, Artificial Sequence
  Description of Artificial Sequence: Synthetic oligonucleotide
uucucuugaacuccaccuu

SEQ ID NO: 1305108 - RNA, 19 nt, Artificial Sequence
  Description of Artificial Sequence: Synthetic oligonucleotide
gcaccaaugguguugcacc

SEQ ID NO: 1305109 - RNA, 19 nt, Artificial Sequence
  Description of Artificial Sequence: Synthetic oligonucleotide
caucgagauaaaugugaac

SEQ ID NO: 1305110 - RNA, 19 nt, Artificial Sequence
  Description of Artificial Sequence: Synthetic oligonucleotide
agccgagagacugaugcuc

SEQ ID NO: 1305111 - RNA, 19 nt, Artificial Sequence
  Description of Artificial Sequence: Synthetic oligonucleotide
ggcuaagauagugaccugg

SEQ ID NO: 1305112 - RNA, 19 nt, Artificial Sequence
  Description of Artificial Sequence: Synthetic oligonucleotide
agggacagcccacauuuga

SEQ ID NO: 1305113 - RNA, 19 nt, Artificial Sequence
  Description of Artificial Sequence: Synthetic oligonucleotide
aucuuuaauucgcggcuga

SEQ ID NO: 1305114 - RNA, 19 nt, Artificial Sequence
  Description of Artificial Sequence: Synthetic oligonucleotide
aaaccagucugcacgcugu

SEQ ID NO: 1305115 - RNA, 19 nt, Artificial Sequence
  Description of Artificial Sequence: Synthetic oligonucleotide
aggauucuuguugaugaug

SEQ ID NO: 1305116 - RNA, 19 nt, Artificial Sequence
  Description of Artificial Sequence: Synthetic oligonucleotide
gacuuggccaugcauucuc

SEQ ID NO: 1305117 - RNA, 19 nt, Artificial Sequence
  Description of Artificial Sequence: Synthetic oligonucleotide
uccaaguuccacgaggauu

SEQ ID NO: 1305118 - RNA, 19 nt, Artificial Sequence
  Description of Artificial Sequence: Synthetic oligonucleotide
cccaaucuuuccaaguucc

SEQ ID NO: 1305119 - RNA, 19 nt, Artificial Sequence
  Description of Artificial Sequence: Synthetic oligonucleotide
aaauagccaacagccgaga

SEQ ID NO: 1305120 - RNA, 19 nt, Artificial Sequence
  Description of Artificial Sequence: Synthetic oligonucleotide
gguccgaaccugcucaggg

SEQ ID NO: 1305121 - RNA, 19 nt, Artificial Sequence
  Description of Artificial Sequence: Synthetic oligonucleotide
auacucaaagggauggccu

SEQ ID NO: 1305122 - RNA, 19 nt, Artificial Sequence
  Description of Artificial Sequence: Synthetic oligonucleotide
uuaauucgcggcugaccac

SEQ ID NO: 1305123 - RNA, 19 nt, Artificial Sequence
  Description of Artificial Sequence: Synthetic oligonucleotide
aaagccguguuggauggaa

SEQ ID NO: 1305124 - RNA, 19 nt, Artificial Sequence
  Description of Artificial Sequence: Synthetic oligonucleotide
uccguucugauagucuugu

SEQ ID NO: 1305125 - RNA, 19 nt, Artificial Sequence
  Description of Artificial Sequence: Synthetic oligonucleotide
ggcguuuuagaagagucug

SEQ ID NO: 1305126 - RNA, 19 nt, Artificial Sequence
  Description of Artificial Sequence: Synthetic oligonucleotide
gaccaggaguuacauucug

SEQ ID NO: 1305127 - RNA, 19 nt, Artificial Sequence
  Description of Artificial Sequence: Synthetic oligonucleotide
aaugugaaccagagcggcu

SEQ ID NO: 1305128 - RNA, 19 nt, Artificial Sequence
  Description of Artificial Sequence: Synthetic oligonucleotide
gcccaauugggucuugagg

SEQ ID NO: 1305129 - RNA, 19 nt, Artificial Sequence
  Description of Artificial Sequence: Synthetic oligonucleotide
auacuggacaucggcaucu

SEQ ID NO: 1305130 - RNA, 19 nt, Artificial Sequence
  Description of Artificial Sequence: Synthetic oligonucleotide
uuccagggccuuccaauga

SEQ ID NO: 1305131 - RNA, 19 nt, Artificial Sequence
  Description of Artificial Sequence: Synthetic oligonucleotide
gcuaagauagugaccuggg

SEQ ID NO: 1305132 - RNA, 19 nt, Artificial Sequence
  Description of Artificial Sequence: Synthetic oligonucleotide
uguugaugauggguucaag

SEQ ID NO: 1305133 - RNA, 19 nt, Artificial Sequence
  Description of Artificial Sequence: Synthetic oligonucleotide
gggguuuuauggaugugcg

SEQ ID NO: 1305134 - RNA, 19 nt, Artificial Sequence
  Description of Artificial Sequence: Synthetic oligonucleotide
ugggacgcccaauuggguc

SEQ ID NO: 1305135 - RNA, 19 nt, Artificial Sequence
  Description of Artificial Sequence: Synthetic oligonucleotide
caggcuaagauagugaccu

SEQ ID NO: 1305136 - RNA, 19 nt, Artificial Sequence
  Description of Artificial Sequence: Synthetic oligonucleotide
ugguugggacgcccaauug

SEQ ID NO: 1305137 - RNA, 19 nt, Artificial Sequence
  Description of Artificial Sequence: Synthetic oligonucleotide
ucaaucccaccaugaguga

SEQ ID NO: 1305138 - RNA, 19 nt, Artificial Sequence
  Description of Artificial Sequence: Synthetic oligonucleotide
ugcgcccaaucuuuccaag

SEQ ID NO: 1305139 - RNA, 19 nt, Artificial Sequence
  Description of Artificial Sequence: Synthetic oligonucleotide
agcagucugcgcccaaucu

SEQ ID NO: 1305140 - RNA, 19 nt, Artificial Sequence
  Description of Artificial Sequence: Synthetic oligonucleotide
aagcuugcauuuggcucac

SEQ ID NO: 1305141 - RNA, 19 nt, Artificial Sequence
  Description of Artificial Sequence: Synthetic oligonucleotide
uggguucaaggcguuuuag

SEQ ID NO: 1305142 - RNA, 19 nt, Artificial Sequence
  Description of Artificial Sequence: Synthetic oligonucleotide
uguuuugaaugaagaucuu

SEQ ID NO: 1305143 - RNA, 19 nt, Artificial Sequence
  Description of Artificial Sequence: Synthetic oligonucleotide
gaauaaacgcgccuucaau

SEQ ID NO: 1305144 - RNA, 19 nt, Artificial Sequence
  Description of Artificial Sequence: Synthetic oligonucleotide
ggcuacugauccaauaccc

SEQ ID NO: 1305145 - RNA, 19 nt, Artificial Sequence
  Description of Artificial Sequence: Synthetic oligonucleotide
uguuggggacaguuucugu

SEQ ID NO: 1305146 - RNA, 19 nt, Artificial Sequence
  Description of Artificial Sequence: Synthetic oligonucleotide
cugaugcucuggucaaaag

SEQ ID NO: 1305147 - RNA, 19 nt, Artificial Sequence
  Description of Artificial Sequence: Synthetic oligonucleotide
ucuuuaauucgcggcugac

SEQ ID NO: 1305148 - RNA, 19 nt, Artificial Sequence
  Description of Artificial Sequence: Synthetic oligonucleotide
cuaaagcacucucauaccu

SEQ ID NO: 1305149 - RNA, 19 nt, Artificial Sequence
  Description of Artificial Sequence: Synthetic oligonucleotide
uccgacucauaaccccuga

SEQ ID NO: 1305150 - RNA, 19 nt, Artificial Sequence
  Description of Artificial Sequence: Synthetic oligonucleotide
gcuggguuuauacuguguc

SEQ ID NO: 1305151 - RNA, 19 nt, Artificial Sequence
  Description of Artificial Sequence: Synthetic oligonucleotide
gauccaauacccacaggaa

SEQ ID NO: 1305152 - RNA, 19 nt, Artificial Sequence
  Description of Artificial Sequence: Synthetic oligonucleotide
gcauccuuuacugccaacc

SEQ ID NO: 1305153 - RNA, 19 nt, Artificial Sequence
  Description of Artificial Sequence: Synthetic oligonucleotide
acgaggauucuuguugaug

SEQ ID NO: 1305154 - RNA, 19 nt, Artificial Sequence
  Description of Artificial Sequence: Synthetic oligonucleotide
ccacguaaagccguguugg

SEQ ID NO: 1305155 - RNA, 19 nt, Artificial Sequence
  Description of Artificial Sequence: Synthetic oligonucleotide
uuuuauggaugugcgugua

SEQ ID NO: 1305156 - RNA, 19 nt, Artificial Sequence
  Description of Artificial Sequence: Synthetic oligonucleotide
cauucugcaguggagcuga

SEQ ID NO: 1305157 - RNA, 19 nt, Artificial Sequence
  Description of Artificial Sequence: Synthetic oligonucleotide
uucauuccagggccuucca

SEQ ID NO: 1305158 - RNA, 19 nt, Artificial Sequence
  Description of Artificial Sequence: Synthetic oligonucleotide
ucuaugguguagaguccau

SEQ ID NO: 1305159 - RNA, 19 nt, Artificial Sequence
  Description of Artificial Sequence: Synthetic oligonucleotide
uucaucucucggaaucauu

SEQ ID NO: 1305160 - RNA, 19 nt, Artificial Sequence
  Description of Artificial Sequence: Synthetic oligonucleotide
gauggaagguugguuggga

SEQ ID NO: 1305161 - RNA, 19 nt, Artificial Sequence
  Description of Artificial Sequence: Synthetic oligonucleotide
ccaaacccacguaaagccg

SEQ ID NO: 1305162 - RNA, 19 nt, Artificial Sequence
  Description of Artificial Sequence: Synthetic oligonucleotide
aaacccacguaaagccgug

SEQ ID NO: 1305163 - RNA, 19 nt, Artificial Sequence
  Description of Artificial Sequence: Synthetic oligonucleotide
gaguccauccuugaauaaa

SEQ ID NO: 1305164 - RNA, 19 nt, Artificial Sequence
  Description of Artificial Sequence: Synthetic oligonucleotide
guuuuauggaugugcgugu

SEQ ID NO: 1305165 - RNA, 19 nt, Artificial Sequence
  Description of Artificial Sequence: Synthetic oligonucleotide
cugccugucccauggcuac

SEQ ID NO: 1305166 - RNA, 19 nt, Artificial Sequence
  Description of Artificial Sequence: Synthetic oligonucleotide
cauucugguggguuaaugu

SEQ ID NO: 1305167 - RNA, 19 nt, Artificial Sequence
  Description of Artificial Sequence: Synthetic oligonucleotide
ugacugcaacuucugugau

SEQ ID NO: 1305168 - RNA, 19 nt, Artificial Sequence
  Description of Artificial Sequence: Synthetic oligonucleotide
ugucugccaggcuaagaua

SEQ ID NO: 1305169 - RNA, 19 nt, Artificial Sequence
  Description of Artificial Sequence: Synthetic oligonucleotide
ugcugcgcucacugcauca

SEQ ID NO: 1305170 - RNA, 19 nt, Artificial Sequence
  Description of Artificial Sequence: Synthetic oligonucleotide
guauguuccagggaacaaa

SEQ ID NO: 1305171 - RNA, 19 nt, Artificial Sequence
  Description of Artificial Sequence: Synthetic oligonucleotide
cagguauguuccagggaac

SEQ ID NO: 1305172 - RNA, 19 nt, Artificial Sequence
  Description of Artificial Sequence: Synthetic oligonucleotide
ugucuaagggcuggguuua

SEQ ID NO: 1305173 - RNA, 19 nt, Artificial Sequence
  Description of Artificial Sequence: Synthetic oligonucleotide
ggauuuguguuggggacag

SEQ ID NO: 1305174 - RNA, 19 nt, Artificial Sequence
  Description of Artificial Sequence: Synthetic oligonucleotide
auguuccagggaacaaagg

SEQ ID NO: 1305175 - RNA, 19 nt, Artificial Sequence
  Description of Artificial Sequence: Synthetic oligonucleotide
ggucaaaagcagucugcgc

SEQ ID NO: 1305176 - RNA, 19 nt, Artificial Sequence
  Description of Artificial Sequence: Synthetic oligonucleotide
agugaccuggguccauccu

SEQ ID NO: 1305177 - RNA, 19 nt, Artificial Sequence
  Description of Artificial Sequence: Synthetic oligonucleotide
caccaugagugaccagugc

SEQ ID NO: 1305178 - RNA, 19 nt, Artificial Sequence
  Description of Artificial Sequence: Synthetic oligonucleotide
uugggacgcccaauugggu

SEQ ID NO: 1305179 - RNA, 19 nt, Artificial Sequence
  Description of Artificial Sequence: Synthetic oligonucleotide
gaagcugaugaugaggguu

SEQ ID NO: 1305180 - RNA, 19 nt, Artificial Sequence
  Description of Artificial Sequence: Synthetic oligonucleotide
augguccagauaugccucu

SEQ ID NO: 1305181 - RNA, 19 nt, Artificial Sequence
  Description of Artificial Sequence: Synthetic oligonucleotide
aagccguguuggauggaag

SEQ ID NO: 1305182 - RNA, 19 nt, Artificial Sequence
  Description of Artificial Sequence: Synthetic oligonucleotide
cagauaugccucucuccuc

SEQ ID NO: 1305183 - RNA, 19 nt, Artificial Sequence
  Description of Artificial Sequence: Synthetic oligonucleotide
guacauauugaugguccga

SEQ ID NO: 1305184 - RNA, 19 nt, Artificial Sequence
  Description of Artificial Sequence: Synthetic oligonucleotide
augcucuggucaaaagcag

SEQ ID NO: 1305185 - RNA, 19 nt, Artificial Sequence
  Description of Artificial Sequence: Synthetic oligonucleotide
caaucccaccaugagugac

SEQ ID NO: 1305186 - RNA, 19 nt, Artificial Sequence
  Description of Artificial Sequence: Synthetic oligonucleotide
uuccaaguuccacgaggau

SEQ ID NO: 1305187 - RNA, 19 nt, Artificial Sequence
  Description of Artificial Sequence: Synthetic oligonucleotide
gccaucgagauaaauguga

SEQ ID NO: 1305188 - RNA, 19 nt, Artificial Sequence
  Description of Artificial Sequence: Synthetic oligonucleotide
cuaugguguagaguccauc

SEQ ID NO: 1305189 - RNA, 19 nt, Artificial Sequence
  Description of Artificial Sequence: Synthetic oligonucleotide
cugcgcucacugcaucacg

SEQ ID NO: 1305190 - RNA, 19 nt, Artificial Sequence
  Description of Artificial Sequence: Synthetic oligonucleotide
cacaauguccguucugaua

SEQ ID NO: 1305191 - RNA, 19 nt, Artificial Sequence
  Description of Artificial Sequence: Synthetic oligonucleotide
guguugcaccaacaccgcc

SEQ ID NO: 1305192 - RNA, 19 nt, Artificial Sequence
  Description of Artificial Sequence: Synthetic oligonucleotide
gauaugccucucuccucuc

SEQ ID NO: 1305193 - RNA, 19 nt, Artificial Sequence
  Description of Artificial Sequence: Synthetic oligonucleotide
gagagacugaugcucuggu

SEQ ID NO: 1305194 - RNA, 19 nt, Artificial Sequence
  Description of Artificial Sequence: Synthetic oligonucleotide
ccaggaguuacauucugca

SEQ ID NO: 1305195 - RNA, 19 nt, Artificial Sequence
  Description of Artificial Sequence: Synthetic oligonucleotide
agacccuccagagggauuu

SEQ ID NO: 1305196 - RNA, 19 nt, Artificial Sequence
  Description of Artificial Sequence: Synthetic oligonucleotide
caaacccacguaaagccgu

SEQ ID NO: 1305197 - RNA, 19 nt, Artificial Sequence
  Description of Artificial Sequence: Synthetic oligonucleotide
caaugguguugcaccaaca

SEQ ID NO: 1305198 - RNA, 19 nt, Artificial Sequence
  Description of Artificial Sequence: Synthetic oligonucleotide
uacagacuucggugaccag

SEQ ID NO: 1305199 - RNA, 19 nt, Artificial Sequence
  Description of Artificial Sequence: Synthetic oligonucleotide
ugguccgaaccugcucagg

SEQ ID NO: 1305200 - RNA, 19 nt, Artificial Sequence
  Description of Artificial Sequence: Synthetic oligonucleotide
ggggaucauggccagcccc

SEQ ID NO: 1305201 - RNA, 19 nt, Artificial Sequence
  Description of Artificial Sequence: Synthetic oligonucleotide
accagagcggcugccuguc

SEQ ID NO: 1305202 - RNA, 19 nt, Artificial Sequence
  Description of Artificial Sequence: Synthetic oligonucleotide
agccaucgagauaaaugug

SEQ ID NO: 1305203 - RNA, 19 nt, Artificial Sequence
  Description of Artificial Sequence: Synthetic oligonucleotide
gucccacgcagguggauac

SEQ ID NO: 1305204 - RNA, 19 nt, Artificial Sequence
  Description of Artificial Sequence: Synthetic oligonucleotide
ucuucauuccagggccuuc

SEQ ID NO: 1305205 - RNA, 19 nt, Artificial Sequence
  Description of Artificial Sequence: Synthetic oligonucleotide
cuucuaaagcacucucaua

SEQ ID NO: 1305206 - RNA, 19 nt, Artificial Sequence
  Description of Artificial Sequence: Synthetic oligonucleotide
cagagggauuuguguuggg

SEQ ID NO: 1305207 - RNA, 19 nt, Artificial Sequence
  Description of Artificial Sequence: Synthetic oligonucleotide
acgcgccuucaaucuggcc

SEQ ID NO: 1305208 - RNA, 19 nt, Artificial Sequence
  Description of Artificial Sequence: Synthetic oligonucleotide
gcggcugaccaccugaauc

SEQ ID NO: 1305209 - RNA, 19 nt, Artificial Sequence
  Description of Artificial Sequence: Synthetic oligonucleotide
cgagauaaaugugaaccag

SEQ ID NO: 1305210 - RNA, 19 nt, Artificial Sequence
  Description of Artificial Sequence: Synthetic oligonucleotide
uuccacgaggauucuuguu

SEQ ID NO: 1305211 - RNA, 19 nt, Artificial Sequence
  Description of Artificial Sequence: Synthetic oligonucleotide
ucuuagcaccaaugguguu

SEQ ID NO: 1305212 - RNA, 19 nt, Artificial Sequence
  Description of Artificial Sequence: Synthetic oligonucleotide
agauagugaccugggucca

SEQ ID NO: 1305213 - RNA, 19 nt, Artificial Sequence
  Description of Artificial Sequence: Synthetic oligonucleotide
acguaaagccguguuggau

SEQ ID NO: 1305214 - RNA, 19 nt, Artificial Sequence
  Description of Artificial Sequence: Synthetic oligonucleotide
cacgcuguauccagcaucu

SEQ ID NO: 1305215 - RNA, 19 nt, Artificial Sequence
  Description of Artificial Sequence: Synthetic oligonucleotide
cugugauacagacuucggu

SEQ ID NO: 1305216 - RNA, 19 nt, Artificial Sequence
  Description of Artificial Sequence: Synthetic oligonucleotide
aaccagucugcacgcugua

SEQ ID NO: 1305217 - RNA, 19 nt, Artificial Sequence
  Description of Artificial Sequence: Synthetic oligonucleotide
ugcacgcuguauccagcau

SEQ ID NO: 1305218 - RNA, 19 nt, Artificial Sequence
  Description of Artificial Sequence: Synthetic oligonucleotide
aggcuaagauagugaccug

SEQ ID NO: 1305219 - RNA, 19 nt, Artificial Sequence
  Description of Artificial Sequence: Synthetic oligonucleotide
gccuaugucuaagggcugg

SEQ ID NO: 1305220 - RNA, 19 nt, Artificial Sequence
  Description of Artificial Sequence: Synthetic oligonucleotide
ugucccacgcagguggaua

SEQ ID NO: 1305221 - RNA, 19 nt, Artificial Sequence
  Description of Artificial Sequence: Synthetic oligonucleotide
aucccaccaugagugacca

SEQ ID NO: 1305222 - RNA, 19 nt, Artificial Sequence
  Description of Artificial Sequence: Synthetic oligonucleotide
aauucgcggcugaccaccu

SEQ ID NO: 1305223 - RNA, 19 nt, Artificial Sequence
  Description of Artificial Sequence: Synthetic oligonucleotide
caccaaugguguugcacca

SEQ ID NO: 1305224 - RNA, 19 nt, Artificial Sequence
  Description of Artificial Sequence: Synthetic oligonucleotide
ccagagggauuuguguugg

SEQ ID NO: 1305225 - RNA, 19 nt, Artificial Sequence
  Description of Artificial Sequence: Synthetic oligonucleotide
cucucauaccugucugcca

SEQ ID NO: 1305226 - RNA, 19 nt, Artificial Sequence
  Description of Artificial Sequence: Synthetic oligonucleotide
agggccuuccaaugaguuu

SEQ ID NO: 1305227 - RNA, 19 nt, Artificial Sequence
  Description of Artificial Sequence: Synthetic oligonucleotide
gcucacugcaucacggaug

SEQ ID NO: 1305228 - RNA, 19 nt, Artificial Sequence
  Description of Artificial Sequence: Synthetic oligonucleotide
auggaugugcguguacaua

SEQ ID NO: 1305229 - RNA, 19 nt, Artificial Sequence
  Description of Artificial Sequence: Synthetic oligonucleotide
acccacguaaagccguguu

SEQ ID NO: 1305230 - RNA, 19 nt, Artificial Sequence
  Description of Artificial Sequence: Synthetic oligonucleotide
ccaaugguguugcaccaac

SEQ ID NO: 1305231 - RNA, 19 nt, Artificial Sequence
  Description of Artificial Sequence: Synthetic oligonucleotide
cauugagaucugccaccac

SEQ ID NO: 1305232 - RNA, 19 nt, Artificial Sequence
  Description of Artificial Sequence: Synthetic oligonucleotide
cagucaggcaauucuauuu

SEQ ID NO: 1305233 - RNA, 19 nt, Artificial Sequence
  Description of Artificial Sequence: Synthetic oligonucleotide
cugcacgcuguauccagca

SEQ ID NO: 1305234 - RNA, 19 nt, Artificial Sequence
  Description of Artificial Sequence: Synthetic oligonucleotide
aacccacguaaagccgugu

SEQ ID NO: 1305235 - RNA, 19 nt, Artificial Sequence
  Description of Artificial Sequence: Synthetic oligonucleotide
cugucugccaggcuaagau

SEQ ID NO: 1305236 - RNA, 19 nt, Artificial Sequence
  Description of Artificial Sequence: Synthetic oligonucleotide
guggguuaauguucuccaa

SEQ ID NO: 1305237 - RNA, 19 nt, Artificial Sequence
  Description of Artificial Sequence: Synthetic oligonucleotide
guccgaaccugcucaggga

SEQ ID NO: 1305238 - RNA, 19 nt, Artificial Sequence
  Description of Artificial Sequence: Synthetic oligonucleotide
gguggauacuggacaucgg

SEQ ID NO: 1305239 - RNA, 19 nt, Artificial Sequence
  Description of Artificial Sequence: Synthetic oligonucleotide
aacagccgagagacugaug

SEQ ID NO: 1305240 - RNA, 19 nt, Artificial Sequence
  Description of Artificial Sequence: Synthetic oligonucleotide
ccucuaugguguagagucc

SEQ ID NO: 1305241 - RNA, 19 nt, Artificial Sequence
  Description of Artificial Sequence: Synthetic oligonucleotide
cacguaaagccguguugga

SEQ ID NO: 1305242 - RNA, 19 nt, Artificial Sequence
  Description of Artificial Sequence: Synthetic oligonucleotide
guccguucugauagucuug

SEQ ID NO: 1305243 - RNA, 19 nt, Artificial Sequence
  Description of Artificial Sequence: Synthetic oligonucleotide
gcuacugauccaauaccca

SEQ ID NO: 1305244 - RNA, 19 nt, Artificial Sequence
  Description of Artificial Sequence: Synthetic oligonucleotide
gguguugcaccaacaccgc

SEQ ID NO: 1305245 - RNA, 19 nt, Artificial Sequence
  Description of Artificial Sequence: Synthetic oligonucleotide
ugaccaccugaaucauuuu

SEQ ID NO: 1305246 - RNA, 19 nt, Artificial Sequence
  Description of Artificial Sequence: Synthetic oligonucleotide
gauggguucaaggcguuuu

SEQ ID NO: 1305247 - RNA, 19 nt, Artificial Sequence
  Description of Artificial Sequence: Synthetic oligonucleotide
gcccacauuugacugcaac

SEQ ID NO: 1305248 - RNA, 19 nt, Artificial Sequence
  Description of Artificial Sequence: Synthetic oligonucleotide
guguggacaccuugcccca

SEQ ID NO: 1305249 - RNA, 19 nt, Artificial Sequence
  Description of Artificial Sequence: Synthetic oligonucleotide
aaguuccacgaggauucuu

SEQ ID NO: 1305250 - RNA, 19 nt, Artificial Sequence
  Description of Artificial Sequence: Synthetic oligonucleotide
agccucaaugguccagaua

SEQ ID NO: 1305251 - RNA, 19 nt, Artificial Sequence
  Description of Artificial Sequence: Synthetic oligonucleotide
cuggcaggcauccuuuacu

SEQ ID NO: 1305252 - RNA, 19 nt, Artificial Sequence
  Description of Artificial Sequence: Synthetic oligonucleotide
accgaacaucccaggaaca

SEQ ID NO: 1305253 - RNA, 19 nt, Artificial Sequence
  Description of Artificial Sequence: Synthetic oligonucleotide
cccacguaaagccguguug

SEQ ID NO: 1305254 - RNA, 19 nt, Artificial Sequence
  Description of Artificial Sequence: Synthetic oligonucleotide
auucgcggcugaccaccug

SEQ ID NO: 1305255 - RNA, 19 nt, Artificial Sequence
  Description of Artificial Sequence: Synthetic oligonucleotide
cuacauucugguggguuaa

SEQ ID NO: 1305256 - RNA, 19 nt, Artificial Sequence
  Description of Artificial Sequence: Synthetic oligonucleotide
ucgcggcugaccaccugaa

SEQ ID NO: 1305257 - RNA, 19 nt, Artificial Sequence
  Description of Artificial Sequence: Synthetic oligonucleotide
cagggacagcccacauuug

SEQ ID NO: 1305258 - RNA, 19 nt, Artificial Sequence
  Description of Artificial Sequence: Synthetic oligonucleotide
uacauucugguggguuaau

SEQ ID NO: 1305259 - RNA, 19 nt, Artificial Sequence
  Description of Artificial Sequence: Synthetic oligonucleotide
gggacagcccacauuugac

SEQ ID NO: 1305260 - RNA, 19 nt, Artificial Sequence
  Description of Artificial Sequence: Synthetic oligonucleotide
guugcaccaacaccgccau

SEQ ID NO: 1305261 - RNA, 19 nt, Artificial Sequence
  Description of Artificial Sequence: Synthetic oligonucleotide
guuccacgaggauucuugu

SEQ ID NO: 1305262 - RNA, 19 nt, Artificial Sequence
  Description of Artificial Sequence: Synthetic oligonucleotide
ccaucgagauaaaugugaa

SEQ ID NO: 1305263 - RNA, 19 nt, Artificial Sequence
  Description of Artificial Sequence: Synthetic oligonucleotide
accaaugguguugcaccaa

SEQ ID NO: 1305264 - RNA, 19 nt, Artificial Sequence
  Description of Artificial Sequence: Synthetic oligonucleotide
cccagucuauguccgacuc

SEQ ID NO: 1305265 - RNA, 19 nt, Artificial Sequence
  Description of Artificial Sequence: Synthetic oligonucleotide
ggguuuauacuguguccaa

SEQ ID NO: 1305266 - RNA, 19 nt, Artificial Sequence
  Description of Artificial Sequence: Synthetic oligonucleotide
cagucuauguccgacucau

SEQ ID NO: 1305267 - RNA, 19 nt, Artificial Sequence
  Description of Artificial Sequence: Synthetic oligonucleotide
cagguggauacuggacauc

SEQ ID NO: 1305268 - RNA, 19 nt, Artificial Sequence
  Description of Artificial Sequence: Synthetic oligonucleotide
ugauggguucaaggcguuu

SEQ ID NO: 1305269 - RNA, 19 nt, Artificial Sequence
  Description of Artificial Sequence: Synthetic oligonucleotide
guuggauggaagguugguu

SEQ ID NO: 1305270 - RNA, 19 nt, Artificial Sequence
  Description of Artificial Sequence: Synthetic oligonucleotide
gguauguuccagggaacaa

SEQ ID NO: 1305271 - RNA, 19 nt, Artificial Sequence
  Description of Artificial Sequence: Synthetic oligonucleotide
ggaagacuuggccaugcau

SEQ ID NO: 1305272 - RNA, 19 nt, Artificial Sequence
  Description of Artificial Sequence: Synthetic oligonucleotide
ggaaagccaaacccacgua

SEQ ID NO: 1305273 - RNA, 19 nt, Artificial Sequence
  Description of Artificial Sequence: Synthetic oligonucleotide
ccacgaggauucuuguuga

SEQ ID NO: 1305274 - RNA, 19 nt, Artificial Sequence
  Description of Artificial Sequence: Synthetic oligonucleotide
aguggacuguugagccuca

SEQ ID NO: 1305275 - RNA, 19 nt, Artificial Sequence
  Description of Artificial Sequence: Synthetic oligonucleotide
agguugguugggacgccca

SEQ ID NO: 1305276 - RNA, 19 nt, Artificial Sequence
  Description of Artificial Sequence: Synthetic oligonucleotide
cggcaucuuuaauucgcgg

SEQ ID NO: 1305277 - RNA, 19 nt, Artificial Sequence
  Description of Artificial Sequence: Synthetic oligonucleotide
ccccugaaauagccaacag

SEQ ID NO: 1305278 - RNA, 19 nt, Artificial Sequence
  Description of Artificial Sequence: Synthetic oligonucleotide
cugcgcccaaucuuuccaa

SEQ ID NO: 1305279 - RNA, 19 nt, Artificial Sequence
  Description of Artificial Sequence: Synthetic oligonucleotide
ucccacgcagguggauacu

SEQ ID NO: 1305280 - RNA, 19 nt, Artificial Sequence
  Description of Artificial Sequence: Synthetic oligonucleotide
acgcuguauccagcaucuc

SEQ ID NO: 1305281 - RNA, 19 nt, Artificial Sequence
  Description of Artificial Sequence: Synthetic oligonucleotide
caaggcguuuuagaagagu

SEQ ID NO: 1305282 - RNA, 19 nt, Artificial Sequence
  Description of Artificial Sequence: Synthetic oligonucleotide
accugucugccaggcuaag

SEQ ID NO: 1305283 - RNA, 19 nt, Artificial Sequence
  Description of Artificial Sequence: Synthetic oligonucleotide
cgaacaucccaggaacaac

SEQ ID NO: 1305284 - RNA, 19 nt, Artificial Sequence
  Description of Artificial Sequence: Synthetic oligonucleotide
gacccuccagagggauuug

SEQ ID NO: 1305285 - RNA, 19 nt, Artificial Sequence
  Description of Artificial Sequence: Synthetic oligonucleotide
caucucucggaaucauuuu

SEQ ID NO: 1305286 - RNA, 19 nt, Artificial Sequence
  Description of Artificial Sequence: Synthetic oligonucleotide
uacuggacaucggcaucuu

SEQ ID NO: 1305287 - RNA, 19 nt, Artificial Sequence
  Description of Artificial Sequence: Synthetic oligonucleotide
gugcugcgcucacugcauc

SEQ ID NO: 1305288 - RNA, 19 nt, Artificial Sequence
  Description of Artificial Sequence: Synthetic oligonucleotide
acgcccaauugggucuuga

SEQ ID NO: 1305289 - RNA, 19 nt, Artificial Sequence
  Description of Artificial Sequence: Synthetic oligonucleotide
gcugcgcucacugcaucac

SEQ ID NO: 1305290 - RNA, 19 nt, Artificial Sequence
  Description of Artificial Sequence: Synthetic oligonucleotide
cgacucauaaccccugaaa

SEQ ID NO: 1305291 - RNA, 19 nt, Artificial Sequence
  Description of Artificial Sequence: Synthetic oligonucleotide
gcgccuucaaucuggccua

SEQ ID NO: 1305292 - RNA, 19 nt, Artificial Sequence
  Description of Artificial Sequence: Synthetic oligonucleotide
augauggguucaaggcguu

SEQ ID NO: 1305293 - RNA, 19 nt, Artificial Sequence
  Description of Artificial Sequence: Synthetic oligonucleotide
ccgagagacugaugcucug

SEQ ID NO: 1305294 - RNA, 19 nt, Artificial Sequence
  Description of Artificial Sequence: Synthetic oligonucleotide
cagggccuuccaaugaguu

SEQ ID NO: 1305295 - RNA, 19 nt, Artificial Sequence
  Description of Artificial Sequence: Synthetic oligonucleotide
gacgcccaauugggucuug

SEQ ID NO: 1305296 - RNA, 19 nt, Artificial Sequence
  Description of Artificial Sequence: Synthetic oligonucleotide
cgcccaauugggucuugag

SEQ ID NO: 1305297 - RNA, 19 nt, Artificial Sequence
  Description of Artificial Sequence: Synthetic oligonucleotide
ggccuaugucuaagggcug

SEQ ID NO: 1305298 - RNA, 19 nt, Artificial Sequence
  Description of Artificial Sequence: Synthetic oligonucleotide
cugucccauggcuacugau

SEQ ID NO: 1305299 - RNA, 19 nt, Artificial Sequence
  Description of Artificial Sequence: Synthetic oligonucleotide
cagccgagagacugaugcu

SEQ ID NO: 1305300 - RNA, 19 nt, Artificial Sequence
  Description of Artificial Sequence: Synthetic oligonucleotide
gcagucugcgcccaaucuu

SEQ ID NO: 1305301 - RNA, 19 nt, Artificial Sequence
  Description of Artificial Sequence: Synthetic oligonucleotide
gcgcucacugcaucacgga

SEQ ID NO: 1305302 - RNA, 19 nt, Artificial Sequence
  Description of Artificial Sequence: Synthetic oligonucleotide
ccguucugauagucuugug

SEQ ID NO: 1305303 - RNA, 19 nt, Artificial Sequence
  Description of Artificial Sequence: Synthetic oligonucleotide
cuacagcuguuuuccucau

SEQ ID NO: 1305304 - RNA, 19 nt, Artificial Sequence
  Description of Artificial Sequence: Synthetic oligonucleotide
gcugccugucccauggcua

SEQ ID NO: 1305305 - RNA, 19 nt, Artificial Sequence
  Description of Artificial Sequence: Synthetic oligonucleotide
cccauggcuacugauccaa

SEQ ID NO: 1305306 - RNA, 19 nt, Artificial Sequence
  Description of Artificial Sequence: Synthetic oligonucleotide
ccgaacaucccaggaacaa

SEQ ID NO: 1305307 - RNA, 19 nt, Artificial Sequence
  Description of Artificial Sequence: Synthetic oligonucleotide
cacgaggauucuuguugau

SEQ ID NO: 1305308 - RNA, 19 nt, Artificial Sequence
  Description of Artificial Sequence: Synthetic oligonucleotide
cuggaagggugacuucauu

SEQ ID NO: 1305309 - RNA, 19 nt, Artificial Sequence
  Description of Artificial Sequence: Synthetic oligonucleotide
gcgcccaaucuuuccaagu

SEQ ID NO: 1305310 - RNA, 19 nt, Artificial Sequence
  Description of Artificial Sequence: Synthetic oligonucleotide
caacagccgagagacugau

SEQ ID NO: 1305311 - RNA, 19 nt, Artificial Sequence
  Description of Artificial Sequence: Synthetic oligonucleotide
gccguguuggauggaaggu

SEQ ID NO: 1305312 - RNA, 19 nt, Artificial Sequence
  Description of Artificial Sequence: Synthetic oligonucleotide
ggacaucggcaucuuuaau

SEQ ID NO: 1305313 - RNA, 19 nt, Artificial Sequence
  Description of Artificial Sequence: Synthetic oligonucleotide
agcuugcauuuggcucaca

SEQ ID NO: 1305314 - RNA, 19 nt, Artificial Sequence
  Description of Artificial Sequence: Synthetic oligonucleotide
gcagacagaccaggaguua

SEQ ID NO: 1305315 - RNA, 19 nt, Artificial Sequence
  Description of Artificial Sequence: Synthetic oligonucleotide
ccgacucauaaccccugaa

SEQ ID NO: 1305316 - RNA, 19 nt, Artificial Sequence
  Description of Artificial Sequence: Synthetic oligonucleotide
ggcuggguuuauacugugu

SEQ ID NO: 1305317 - RNA, 19 nt, Artificial Sequence
  Description of Artificial Sequence: Synthetic oligonucleotide
guggacuguugagccucaa

SEQ ID NO: 1305318 - RNA, 19 nt, Artificial Sequence
  Description of Artificial Sequence: Synthetic oligonucleotide
ccucucgugcugcgcucac

SEQ ID NO: 1305319 - RNA, 19 nt, Artificial Sequence
  Description of Artificial Sequence: Synthetic oligonucleotide
ccugucccauggcuacuga

SEQ ID NO: 1305320 - RNA, 19 nt, Artificial Sequence
  Description of Artificial Sequence: Synthetic oligonucleotide
gccaacccauugagaucug

SEQ ID NO: 1305321 - RNA, 19 nt, Artificial Sequence
  Description of Artificial Sequence: Synthetic oligonucleotide
gaccuggguccauccucuu

SEQ ID NO: 1305322 - RNA, 19 nt, Artificial Sequence
  Description of Artificial Sequence: Synthetic oligonucleotide
ggucuugaggaagcugcuu

SEQ ID NO: 1305323 - RNA, 19 nt, Artificial Sequence
  Description of Artificial Sequence: Synthetic oligonucleotide
ggaugugcguguacauauu

SEQ ID NO: 1305324 - RNA, 19 nt, Artificial Sequence
  Description of Artificial Sequence: Synthetic oligonucleotide
ggggacaguuucugugcuu

SEQ ID NO: 1305325 - RNA, 19 nt, Artificial Sequence
  Description of Artificial Sequence: Synthetic oligonucleotide
ccagggccuuccaaugagu

SEQ ID NO: 1305326 - RNA, 19 nt, Artificial Sequence
  Description of Artificial Sequence: Synthetic oligonucleotide
gagcggcugccugucccau

SEQ ID NO: 1305327 - RNA, 19 nt, Artificial Sequence
  Description of Artificial Sequence: Synthetic oligonucleotide
ggcugaccaccugaaucau

SEQ ID NO: 1305328 - RNA, 19 nt, Artificial Sequence
  Description of Artificial Sequence: Synthetic oligonucleotide
cgcccaaucuuuccaaguu

SEQ ID NO: 1305329 - RNA, 19 nt, Artificial Sequence
  Description of Artificial Sequence: Synthetic oligonucleotide
ccguguuggauggaagguu

SEQ ID NO: 1305330 - RNA, 19 nt, Artificial Sequence
  Description of Artificial Sequence: Synthetic oligonucleotide
gcugaccaccugaaucauu

SEQ ID NO: 1305331 - RNA, 19 nt, Artificial Sequence
  Description of Artificial Sequence: Synthetic oligonucleotide
ccauggcuacugauccaau

SEQ ID NO: 1305332 - RNA, 19 nt, Artificial Sequence
  Description of Artificial Sequence: Synthetic oligonucleotide
  modified_base (1)..(1): a, c, u, g, unknown or other
ngaacuuaucuucagaggc

SEQ ID NO: 1305333 - RNA, 19 nt, Artificial Sequence
  Description of Artificial Sequence: Synthetic oligonucleotide
aaaauaauccucuauaucg

SEQ ID NO: 1305334 - RNA, 19 nt, Artificial Sequence
  Description of Artificial Sequence: Synthetic oligonucleotide
aaagcugaaauccaugucg

SEQ ID NO: 1305335 - RNA, 19 nt, Artificial Sequence
  Description of Artificial Sequence: Synthetic oligonucleotide
uguuaauuaaucaauaaac

SEQ ID NO: 1305336 - RNA, 19 nt, Artificial Sequence
  Description of Artificial Sequence: Synthetic oligonucleotide
aacugacuuauccugaugc

SEQ ID NO: 1305337 - RNA, 19 nt, Artificial Sequence
  Description of Artificial Sequence: Synthetic oligonucleotide
ucaacuuuggcuuagcucc

SEQ ID NO: 1305338 - RNA, 19 nt, Artificial Sequence
  Description of Artificial Sequence: Synthetic oligonucleotide
guuaguuccacauacacag

SEQ ID NO: 1305339 - RNA, 19 nt, Artificial Sequence
  Description of Artificial Sequence: Synthetic oligonucleotide
uaaucaauaaacuaaguuc

SEQ ID NO: 1305340 - RNA, 19 nt, Artificial Sequence
  Description of Artificial Sequence: Synthetic oligonucleotide
uuuaggugcaauuuuagcc

SEQ ID NO: 1305341 - RNA, 19 nt, Artificial Sequence
  Description of Artificial Sequence: Synthetic oligonucleotide
aaaauuuugugacgugagc

SEQ ID NO: 1305342 - RNA, 19 nt, Artificial Sequence
  Description of Artificial Sequence: Synthetic oligonucleotide
agaugguucuuuuaggugc

SEQ ID NO: 1305343 - RNA, 19 nt, Artificial Sequence
  Description of Artificial Sequence: Synthetic oligonucleotide
uuuguaacugcuuugauaa

SEQ ID NO: 1305344 - RNA, 19 nt, Artificial Sequence
  Description of Artificial Sequence: Synthetic oligonucleotide
ucuaugaccuuaauguugg

SEQ ID NO: 1305345 - RNA, 19 nt, Artificial Sequence
  Description of Artificial Sequence: Synthetic oligonucleotide
uccuuuauggcccaaauca

SEQ ID NO: 1305346 - RNA, 19 nt, Artificial Sequence
  Description of Artificial Sequence: Synthetic oligonucleotide
ucauacaccagcucaagcg

SEQ ID NO: 1305347 - RNA, 19 nt, Artificial Sequence
  Description of Artificial Sequence: Synthetic oligonucleotide
aaucaauaaacuaaguuca

SEQ ID NO: 1305348 - RNA, 19 nt, Artificial Sequence
  Description of Artificial Sequence: Synthetic oligonucleotide
auggcuuuauccuuuaugg

SEQ ID NO: 1305349 - RNA, 19 nt, Artificial Sequence
  Description of Artificial Sequence: Synthetic oligonucleotide
uauucugucagucaaaaua

SEQ ID NO: 1305350 - RNA, 19 nt, Artificial Sequence
  Description of Artificial Sequence: Synthetic oligonucleotide
uuaacucaugaucugagcc

SEQ ID NO: 1305351 - RNA, 19 nt, Artificial Sequence
  Description of Artificial Sequence: Synthetic oligonucleotide
aaugccaccauucccgacg

SEQ ID NO: 1305352 - RNA, 19 nt, Artificial Sequence
  Description of Artificial Sequence: Synthetic oligonucleotide
aauuaagacagcucccauc

SEQ ID NO: 1305353 - RNA, 19 nt, Artificial Sequence
  Description of Artificial Sequence: Synthetic oligonucleotide
uuagaaaccugcuugaagu

SEQ ID NO: 1305354 - RNA, 19 nt, Artificial Sequence
  Description of Artificial Sequence: Synthetic oligonucleotide
acuaaguucauccuaggag

SEQ ID NO: 1305355 - RNA, 19 nt, Artificial Sequence
  Description of Artificial Sequence: Synthetic oligonucleotide
cugucagucaaaauaaucc

SEQ ID NO: 1305356 - RNA, 19 nt, Artificial Sequence
  Description of Artificial Sequence: Synthetic oligonucleotide
ugcaugacgacuuugauau

SEQ ID NO: 1305357 - RNA, 19 nt, Artificial Sequence
  Description of Artificial Sequence: Synthetic oligonucleotide
uuaguauuccugaagauau

SEQ ID NO: 1305358 - RNA, 19 nt, Artificial Sequence
  Description of Artificial Sequence: Synthetic oligonucleotide
uuaaucaauaaacuaaguu

SEQ ID NO: 1305359 - RNA, 19 nt, Artificial Sequence
  Description of Artificial Sequence: Synthetic oligonucleotide
uauaucgauauuuggaucu

SEQ ID NO: 1305360 - RNA, 19 nt, Artificial Sequence
  Description of Artificial Sequence: Synthetic oligonucleotide
aaagguugaacguuuggug

SEQ ID NO: 1305361 - RNA, 19 nt, Artificial Sequence
  Description of Artificial Sequence: Synthetic oligonucleotide
uuucccauugguuaguucc

SEQ ID NO: 1305362 - RNA, 19 nt, Artificial Sequence
  Description of Artificial Sequence: Synthetic oligonucleotide
auuccuaacacauaugggu

SEQ ID NO: 1305363 - RNA, 19 nt, Artificial Sequence
  Description of Artificial Sequence: Synthetic oligonucleotide
aacuuaguauuccugaaga

SEQ ID NO: 1305364 - RNA, 19 nt, Artificial Sequence
  Description of Artificial Sequence: Synthetic oligonucleotide
acgaucauuauucucuugg

SEQ ID NO: 1305365 - RNA, 19 nt, Artificial Sequence
  Description of Artificial Sequence: Synthetic oligonucleotide
auagaugucaggaagugac

SEQ ID NO: 1305366 - RNA, 19 nt, Artificial Sequence
  Description of Artificial Sequence: Synthetic oligonucleotide
auuaagacagcucccauca

SEQ ID NO: 1305367 - RNA, 19 nt, Artificial Sequence
  Description of Artificial Sequence: Synthetic oligonucleotide
ucagucaaaauaauccucu

SEQ ID NO: 1305368 - RNA, 19 nt, Artificial Sequence
  Description of Artificial Sequence: Synthetic oligonucleotide
aagacagcucccaucaugc

SEQ ID NO: 1305369 - RNA, 19 nt, Artificial Sequence
  Description of Artificial Sequence: Synthetic oligonucleotide
uccauaugaugaaaggucc

SEQ ID NO: 1305370 - RNA, 19 nt, Artificial Sequence
  Description of Artificial Sequence: Synthetic oligonucleotide
ucuauaucgauauuuggau

SEQ ID NO: 1305371 - RNA, 19 nt, Artificial Sequence
  Description of Artificial Sequence: Synthetic oligonucleotide
uguaaucuuaaacuccucu

SEQ ID NO: 1305372 - RNA, 19 nt, Artificial Sequence
  Description of Artificial Sequence: Synthetic oligonucleotide
ugcuuugauaacaggagag

SEQ ID NO: 1305373 - RNA, 19 nt, Artificial Sequence
  Description of Artificial Sequence: Synthetic oligonucleotide
aagauauucugucagucaa

SEQ ID NO: 1305374 - RNA, 19 nt, Artificial Sequence
  Description of Artificial Sequence: Synthetic oligonucleotide
uuaggugcaauuuuagccu

SEQ ID NO: 1305375 - RNA, 19 nt, Artificial Sequence
  Description of Artificial Sequence: Synthetic oligonucleotide
cucuccuagaucaaaauug

SEQ ID NO: 1305376 - RNA, 19 nt, Artificial Sequence
  Description of Artificial Sequence: Synthetic oligonucleotide
aaaauuguuuccauggaga

SEQ ID NO: 1305377 - RNA, 19 nt, Artificial Sequence
  Description of Artificial Sequence: Synthetic oligonucleotide
gaugugaauacugugugag

SEQ ID NO: 1305378 - RNA, 19 nt, Artificial Sequence
  Description of Artificial Sequence: Synthetic oligonucleotide
aagguugaacguuuggugu

SEQ ID NO: 1305379 - RNA, 19 nt, Artificial Sequence
  Description of Artificial Sequence: Synthetic oligonucleotide
ucaauuguguagaugguuc

SEQ ID NO: 1305380 - RNA, 19 nt, Artificial Sequence
  Description of Artificial Sequence: Synthetic oligonucleotide
uugaacuuaguauuccuga

SEQ ID NO: 1305381 - RNA, 19 nt, Artificial Sequence
  Description of Artificial Sequence: Synthetic oligonucleotide
aucaacuuuggcuuagcuc

SEQ ID NO: 1305382 - RNA, 19 nt, Artificial Sequence
  Description of Artificial Sequence: Synthetic oligonucleotide
aaaagguugaacguuuggu

SEQ ID NO: 1305383 - RNA, 19 nt, Artificial Sequence
  Description of Artificial Sequence: Synthetic oligonucleotide
aaauuguuuccauggagaa

SEQ ID NO: 1305384 - RNA, 19 nt, Artificial Sequence
  Description of Artificial Sequence: Synthetic oligonucleotide
auauuuucccauugguuag

SEQ ID NO: 1305385 - RNA, 19 nt, Artificial Sequence
  Description of Artificial Sequence: Synthetic oligonucleotide
aaacuaaguucauccuagg

SEQ ID NO: 1305386 - RNA, 19 nt, Artificial Sequence
  Description of Artificial Sequence: Synthetic oligonucleotide
ugggaaaacgguuuucgag

SEQ ID NO: 1305387 - RNA, 19 nt, Artificial Sequence
  Description of Artificial Sequence: Synthetic oligonucleotide
aauuuugugacgugagcaa

SEQ ID NO: 1305388 - RNA, 19 nt, Artificial Sequence
  Description of Artificial Sequence: Synthetic oligonucleotide
aaacuagcugcagccaugc

SEQ ID NO: 1305389 - RNA, 19 nt, Artificial Sequence
  Description of Artificial Sequence: Synthetic oligonucleotide
uaauccucuauaucgauau

SEQ ID NO: 1305390 - RNA, 19 nt, Artificial Sequence
  Description of Artificial Sequence: Synthetic oligonucleotide
gacagagcuuccuauacgc

SEQ ID NO: 1305391 - RNA, 19 nt, Artificial Sequence
  Description of Artificial Sequence: Synthetic oligonucleotide
gaaaagguugaacguuugg

SEQ ID NO: 1305392 - RNA, 19 nt, Artificial Sequence
  Description of Artificial Sequence: Synthetic oligonucleotide
uccuagaucaaaauuguuu

SEQ ID NO: 1305393 - RNA, 19 nt, Artificial Sequence
  Description of Artificial Sequence: Synthetic oligonucleotide
ugucagucaaaauaauccu

SEQ ID NO: 1305394 - RNA, 19 nt, Artificial Sequence
  Description of Artificial Sequence: Synthetic oligonucleotide
uucccgacgaucauuauuc

SEQ ID NO: 1305395 - RNA, 19 nt, Artificial Sequence
  Description of Artificial Sequence: Synthetic oligonucleotide
uucugaaccaggacucugg

SEQ ID NO: 1305396 - RNA, 19 nt, Artificial Sequence
  Description of Artificial Sequence: Synthetic oligonucleotide
uaagacagcucccaucaug

SEQ ID NO: 1305397 - RNA, 19 nt, Artificial Sequence
  Description of Artificial Sequence: Synthetic oligonucleotide
ucaaguguaacugacuuau

SEQ ID NO: 1305398 - RNA, 19 nt, Artificial Sequence
  Description of Artificial Sequence: Synthetic oligonucleotide
aguauuccugaagauauuc

SEQ ID NO: 1305399 - RNA, 19 nt, Artificial Sequence
  Description of Artificial Sequence: Synthetic oligonucleotide
uucacaucugguuucgaug

SEQ ID NO: 1305400 - RNA, 19 nt, Artificial Sequence
  Description of Artificial Sequence: Synthetic oligonucleotide
uaucaaguguaacugacuu

SEQ ID NO: 1305401 - RNA, 19 nt, Artificial Sequence
  Description of Artificial Sequence: Synthetic oligonucleotide
aaaacgguuuucgaggaca

SEQ ID NO: 1305402 - RNA, 19 nt, Artificial Sequence
  Description of Artificial Sequence: Synthetic oligonucleotide
cauaccaccccaucugucg

SEQ ID NO: 1305403 - RNA, 19 nt, Artificial Sequence
  Description of Artificial Sequence: Synthetic oligonucleotide
aauaauccucuauaucgau

SEQ ID NO: 1305404 - RNA, 19 nt, Artificial Sequence
  Description of Artificial Sequence: Synthetic oligonucleotide
ucuccuagaucaaaauugu

SEQ ID NO: 1305405 - RNA, 19 nt, Artificial Sequence
  Description of Artificial Sequence: Synthetic oligonucleotide
cuccauaugaugaaagguc

SEQ ID NO: 1305406 - RNA, 19 nt, Artificial Sequence
  Description of Artificial Sequence: Synthetic oligonucleotide
aacuaaguucauccuagga

SEQ ID NO: 1305407 - RNA, 19 nt, Artificial Sequence
  Description of Artificial Sequence: Synthetic oligonucleotide
aguguaacugacuuauccu

SEQ ID NO: 1305408 - RNA, 19 nt, Artificial Sequence
  Description of Artificial Sequence: Synthetic oligonucleotide
ucugguuucgaugugaaua

SEQ ID NO: 1305409 - RNA, 19 nt, Artificial Sequence
  Description of Artificial Sequence: Synthetic oligonucleotide
gcauucucgacuuaugggg

SEQ ID NO: 1305410 - RNA, 19 nt, Artificial Sequence
  Description of Artificial Sequence: Synthetic oligonucleotide
gggaaaacgguuuucgagg

SEQ ID NO: 1305411 - RNA, 19 nt, Artificial Sequence
  Description of Artificial Sequence: Synthetic oligonucleotide
ucgauauuuggaucuagga

SEQ ID NO: 1305412 - RNA, 19 nt, Artificial Sequence
  Description of Artificial Sequence: Synthetic oligonucleotide
uccaauacuuuagaaaccu

SEQ ID NO: 1305413 - RNA, 19 nt, Artificial Sequence
  Description of Artificial Sequence: Synthetic oligonucleotide
auauggguuucccucacag

SEQ ID NO: 1305414 - RNA, 19 nt, Artificial Sequence
  Description of Artificial Sequence: Synthetic oligonucleotide
augaccuuaauguugggaa

SEQ ID NO: 1305415 - RNA, 19 nt, Artificial Sequence
  Description of Artificial Sequence: Synthetic oligonucleotide
aaauaauccucuauaucga

SEQ ID NO: 1305416 - RNA, 19 nt, Artificial Sequence
  Description of Artificial Sequence: Synthetic oligonucleotide
uuuucgaggacaguacuug

SEQ ID NO: 1305417 - RNA, 19 nt, Artificial Sequence
  Description of Artificial Sequence: Synthetic oligonucleotide
ugagccuaggccuugugca

SEQ ID NO: 1305418 - RNA, 19 nt, Artificial Sequence
  Description of Artificial Sequence: Synthetic oligonucleotide
agcgcaaugccaccauucc

SEQ ID NO: 1305419 - RNA, 19 nt, Artificial Sequence
  Description of Artificial Sequence: Synthetic oligonucleotide
acauacacaggccacauuu

SEQ ID NO: 1305420 - RNA, 19 nt, Artificial Sequence
  Description of Artificial Sequence: Synthetic oligonucleotide
uuccaauacuuuagaaacc

SEQ ID NO: 1305421 - RNA, 19 nt, Artificial Sequence
  Description of Artificial Sequence: Synthetic oligonucleotide
cagcaguacaaccuuauag

SEQ ID NO: 1305422 - RNA, 19 nt, Artificial Sequence
  Description of Artificial Sequence: Synthetic oligonucleotide
auuuacuuggugucaguug

SEQ ID NO: 1305423 - RNA, 19 nt, Artificial Sequence
  Description of Artificial Sequence: Synthetic oligonucleotide
cucuauaucgauauuugga

SEQ ID NO: 1305424 - RNA, 19 nt, Artificial Sequence
  Description of Artificial Sequence: Synthetic oligonucleotide
uaacucaugaucugagccu

SEQ ID NO: 1305425 - RNA, 19 nt, Artificial Sequence
  Description of Artificial Sequence: Synthetic oligonucleotide
ggcuuuauccuuuauggcc

SEQ ID NO: 1305426 - RNA, 19 nt, Artificial Sequence
  Description of Artificial Sequence: Synthetic oligonucleotide
ucuaaaucaguuucaccaa

SEQ ID NO: 1305427 - RNA, 19 nt, Artificial Sequence
  Description of Artificial Sequence: Synthetic oligonucleotide
auaaacuaaguucauccua

SEQ ID NO: 1305428 - RNA, 19 nt, Artificial Sequence
  Description of Artificial Sequence: Synthetic oligonucleotide
guugggaaaacgguuuucg

SEQ ID NO: 1305429 - RNA, 19 nt, Artificial Sequence
  Description of Artificial Sequence: Synthetic oligonucleotide
uacugugugagaacucuug

SEQ ID NO: 1305430 - RNA, 19 nt, Artificial Sequence
  Description of Artificial Sequence: Synthetic oligonucleotide
acgacuuugauauacucuu

SEQ ID NO: 1305431 - RNA, 19 nt, Artificial Sequence
  Description of Artificial Sequence: Synthetic oligonucleotide
uuuauggcccaaaucacuu

SEQ ID NO: 1305432 - RNA, 19 nt, Artificial Sequence
  Description of Artificial Sequence: Synthetic oligonucleotide
uuucgaggacaguacuugg

SEQ ID NO: 1305433 - RNA, 19 nt, Artificial Sequence
  Description of Artificial Sequence: Synthetic oligonucleotide
guguaacugacuuauccug

SEQ ID NO: 1305434 - RNA, 19 nt, Artificial Sequence
  Description of Artificial Sequence: Synthetic oligonucleotide
caugcguccauucugcaug

SEQ ID NO: 1305435 - RNA, 19 nt, Artificial Sequence
  Description of Artificial Sequence: Synthetic oligonucleotide
cauacaccagcucaagcgc

SEQ ID NO: 1305436 - RNA, 19 nt, Artificial Sequence
  Description of Artificial Sequence: Synthetic oligonucleotide
gaugcuuuggaaaagccaa

SEQ ID NO: 1305437 - RNA, 19 nt, Artificial Sequence
  Description of Artificial Sequence: Synthetic oligonucleotide
gaagauauucugucaguca

SEQ ID NO: 1305438 - RNA, 19 nt, Artificial Sequence
  Description of Artificial Sequence: Synthetic oligonucleotide
uggugugacuccuguagcg

SEQ ID NO: 1305439 - RNA, 19 nt, Artificial Sequence
  Description of Artificial Sequence: Synthetic oligonucleotide
aaaguauucccaauggcuu

SEQ ID NO: 1305440 - RNA, 19 nt, Artificial Sequence
  Description of Artificial Sequence: Synthetic oligonucleotide
ucacggauuccuaacacau

SEQ ID NO: 1305441 - RNA, 19 nt, Artificial Sequence
  Description of Artificial Sequence: Synthetic oligonucleotide
uucaccaauuaagacagcu

SEQ ID NO: 1305442 - RNA, 19 nt, Artificial Sequence
  Description of Artificial Sequence: Synthetic oligonucleotide
ucauccuaggaguuucuug

SEQ ID NO: 1305443 - RNA, 19 nt, Artificial Sequence
  Description of Artificial Sequence: Synthetic oligonucleotide
agacagagcuuccuauacg

SEQ ID NO: 1305444 - RNA, 19 nt, Artificial Sequence
  Description of Artificial Sequence: Synthetic oligonucleotide
gacuuauggggucauuuac

SEQ ID NO: 1305445 - RNA, 19 nt, Artificial Sequence
  Description of Artificial Sequence: Synthetic oligonucleotide
caucaugcguccauucugc

SEQ ID NO: 1305446 - RNA, 19 nt, Artificial Sequence
  Description of Artificial Sequence: Synthetic oligonucleotide
aaagaguucaaagcugaaa

SEQ ID NO: 1305447 - RNA, 19 nt, Artificial Sequence
  Description of Artificial Sequence: Synthetic oligonucleotide
ugacgugcgcaucugguca

SEQ ID NO: 1305448 - RNA, 19 nt, Artificial Sequence
  Description of Artificial Sequence: Synthetic oligonucleotide
acggauuccuaacacauau

SEQ ID NO: 1305449 - RNA, 19 nt, Artificial Sequence
  Description of Artificial Sequence: Synthetic oligonucleotide
uaucacggauuccuaacac

SEQ ID NO: 1305450 - RNA, 19 nt, Artificial Sequence
  Description of Artificial Sequence: Synthetic oligonucleotide
gauagggugucccaaacua

SEQ ID NO: 1305451 - RNA, 19 nt, Artificial Sequence
  Description of Artificial Sequence: Synthetic oligonucleotide
caugacgacuuugauauac

SEQ ID NO: 1305452 - RNA, 19 nt, Artificial Sequence
  Description of Artificial Sequence: Synthetic oligonucleotide
cuuccuauacgcaugcuga

SEQ ID NO: 1305453 - RNA, 19 nt, Artificial Sequence
  Description of Artificial Sequence: Synthetic oligonucleotide
uucgaggacaguacuuggc

SEQ ID NO: 1305454 - RNA, 19 nt, Artificial Sequence
  Description of Artificial Sequence: Synthetic oligonucleotide
acauuaucagcuuuagcuu

SEQ ID NO: 1305455 - RNA, 19 nt, Artificial Sequence
  Description of Artificial Sequence: Synthetic oligonucleotide
ugcgucaaagaaaguauuc

SEQ ID NO: 1305456 - RNA, 19 nt, Artificial Sequence
  Description of Artificial Sequence: Synthetic oligonucleotide
accaauuaagacagcuccc

SEQ ID NO: 1305457 - RNA, 19 nt, Artificial Sequence
  Description of Artificial Sequence: Synthetic oligonucleotide
cuauaucgauauuuggauc

SEQ ID NO: 1305458 - RNA, 19 nt, Artificial Sequence
  Description of Artificial Sequence: Synthetic oligonucleotide
cauuguauuuucccagcag

SEQ ID NO: 1305459 - RNA, 19 nt, Artificial Sequence
  Description of Artificial Sequence: Synthetic oligonucleotide
ugauauacucuuguccucu

SEQ ID NO: 1305460 - RNA, 19 nt, Artificial Sequence
  Description of Artificial Sequence: Synthetic oligonucleotide
cauccuaggaguuucuuga

SEQ ID NO: 1305461 - RNA, 19 nt, Artificial Sequence
  Description of Artificial Sequence: Synthetic oligonucleotide
cuguuaauuaaucaauaaa

SEQ ID NO: 1305462 - RNA, 19 nt, Artificial Sequence
  Description of Artificial Sequence: Synthetic oligonucleotide
ucauuauucucuuggcuuu

SEQ ID NO: 1305463 - RNA, 19 nt, Artificial Sequence
  Description of Artificial Sequence: Synthetic oligonucleotide
aaacuccucuugaagguag

SEQ ID NO: 1305464 - RNA, 19 nt, Artificial Sequence
  Description of Artificial Sequence: Synthetic oligonucleotide
uuccuaacacauauggguu

SEQ ID NO: 1305465 - RNA, 19 nt, Artificial Sequence
  Description of Artificial Sequence: Synthetic oligonucleotide
agcucaagcgcaaugccac

SEQ ID NO: 1305466 - RNA, 19 nt, Artificial Sequence
  Description of Artificial Sequence: Synthetic oligonucleotide
uaugaccuuaauguuggga

SEQ ID NO: 1305467 - RNA, 19 nt, Artificial Sequence
  Description of Artificial Sequence: Synthetic oligonucleotide
gacgugagcaaagaguuca

SEQ ID NO: 1305468 - RNA, 19 nt, Artificial Sequence
  Description of Artificial Sequence: Synthetic oligonucleotide
aagugacgugcgcaucugg

SEQ ID NO: 1305469 - RNA, 19 nt, Artificial Sequence
  Description of Artificial Sequence: Synthetic oligonucleotide
aucugucgugccugggucc

SEQ ID NO: 1305470 - RNA, 19 nt, Artificial Sequence
  Description of Artificial Sequence: Synthetic oligonucleotide
uuggugugacuccuguagc

SEQ ID NO: 1305471 - RNA, 19 nt, Artificial Sequence
  Description of Artificial Sequence: Synthetic oligonucleotide
uugugacgugagcaaagag

SEQ ID NO: 1305472 - RNA, 19 nt, Artificial Sequence
  Description of Artificial Sequence: Synthetic oligonucleotide
aucgauauuuggaucuagg

SEQ ID NO: 1305473 - RNA, 19 nt, Artificial Sequence
  Description of Artificial Sequence: Synthetic oligonucleotide
auucucgacuuaugggguc

SEQ ID NO: 1305474 - RNA, 19 nt, Artificial Sequence
  Description of Artificial Sequence: Synthetic oligonucleotide
acuuuggcuuagcuccagc

SEQ ID NO: 1305475 - RNA, 19 nt, Artificial Sequence
  Description of Artificial Sequence: Synthetic oligonucleotide
uuauccugaugcuuuggaa

SEQ ID NO: 1305476 - RNA, 19 nt, Artificial Sequence
  Description of Artificial Sequence: Synthetic oligonucleotide
aagcgcaaugccaccauuc

SEQ ID NO: 1305477 - RNA, 19 nt, Artificial Sequence
  Description of Artificial Sequence: Synthetic oligonucleotide
uauacgcaugcugacggcc

SEQ ID NO: 1305478 - RNA, 19 nt, Artificial Sequence
  Description of Artificial Sequence: Synthetic oligonucleotide
uccugaagauauucuguca

SEQ ID NO: 1305479 - RNA, 19 nt, Artificial Sequence
  Description of Artificial Sequence: Synthetic oligonucleotide
uggcuuuauccuuuauggc

SEQ ID NO: 1305480 - RNA, 19 nt, Artificial Sequence
  Description of Artificial Sequence: Synthetic oligonucleotide
agauacaauguuccucacu

SEQ ID NO: 1305481 - RNA, 19 nt, Artificial Sequence
  Description of Artificial Sequence: Synthetic oligonucleotide
agguugaacguuuggugug

SEQ ID NO: 1305482 - RNA, 19 nt, Artificial Sequence
  Description of Artificial Sequence: Synthetic oligonucleotide
uaacugacuuauccugaug

SEQ ID NO: 1305483 - RNA, 19 nt, Artificial Sequence
  Description of Artificial Sequence: Synthetic oligonucleotide
ucauccacuuucaggccgc

SEQ ID NO: 1305484 - RNA, 19 nt, Artificial Sequence
  Description of Artificial Sequence: Synthetic oligonucleotide
cacuuggccgcauaccacc

SEQ ID NO: 1305485 - RNA, 19 nt, Artificial Sequence
  Description of Artificial Sequence: Synthetic oligonucleotide
gauauucugucagucaaaa

SEQ ID NO: 1305486 - RNA, 19 nt, Artificial Sequence
  Description of Artificial Sequence: Synthetic oligonucleotide
auccuaggaguuucuugac

SEQ ID NO: 1305487 - RNA, 19 nt, Artificial Sequence
  Description of Artificial Sequence: Synthetic oligonucleotide
aucacggauuccuaacaca

SEQ ID NO: 1305488 - RNA, 19 nt, Artificial Sequence
  Description of Artificial Sequence: Synthetic oligonucleotide
gauauacucuuguccucug

SEQ ID NO: 1305489 - RNA, 19 nt, Artificial Sequence
  Description of Artificial Sequence: Synthetic oligonucleotide
cagauccaagccuccaugc

SEQ ID NO: 1305490 - RNA, 19 nt, Artificial Sequence
  Description of Artificial Sequence: Synthetic oligonucleotide
guuuguaacugcuuugaua

SEQ ID NO: 1305491 - RNA, 19 nt, Artificial Sequence
  Description of Artificial Sequence: Synthetic oligonucleotide
aaacgguuuucgaggacag

SEQ ID NO: 1305492 - RNA, 19 nt, Artificial Sequence
  Description of Artificial Sequence: Synthetic oligonucleotide
acugacuuauccugaugcu

SEQ ID NO: 1305493 - RNA, 19 nt, Artificial Sequence
  Description of Artificial Sequence: Synthetic oligonucleotide
auacuuuagaaaccugcuu

SEQ ID NO: 1305494 - RNA, 19 nt, Artificial Sequence
  Description of Artificial Sequence: Synthetic oligonucleotide
uugauauacucuuguccuc

SEQ ID NO: 1305495 - RNA, 19 nt, Artificial Sequence
  Description of Artificial Sequence: Synthetic oligonucleotide
uaucgauauuuggaucuag

SEQ ID NO: 1305496 - RNA, 19 nt, Artificial Sequence
  Description of Artificial Sequence: Synthetic oligonucleotide
uugggaaaacgguuuucga

SEQ ID NO: 1305497 - RNA, 19 nt, Artificial Sequence
  Description of Artificial Sequence: Synthetic oligonucleotide
acuuaguauuccugaagau

SEQ ID NO: 1305498 - RNA, 19 nt, Artificial Sequence
  Description of Artificial Sequence: Synthetic oligonucleotide
cuuucagauccaagccucc

SEQ ID NO: 1305499 - RNA, 19 nt, Artificial Sequence
  Description of Artificial Sequence: Synthetic oligonucleotide
guuccacauacacaggcca

SEQ ID NO: 1305500 - RNA, 19 nt, Artificial Sequence
  Description of Artificial Sequence: Synthetic oligonucleotide
cugugugagaacucuugug

SEQ ID NO: 1305501 - RNA, 19 nt, Artificial Sequence
  Description of Artificial Sequence: Synthetic oligonucleotide
auccugaugcuuuggaaaa

SEQ ID NO: 1305502 - RNA, 19 nt, Artificial Sequence
  Description of Artificial Sequence: Synthetic oligonucleotide
ugaccuuaauguugggaaa

SEQ ID NO: 1305503 - RNA, 19 nt, Artificial Sequence
  Description of Artificial Sequence: Synthetic oligonucleotide
cucacagaucaacuuuggc

SEQ ID NO: 1305504 - RNA, 19 nt, Artificial Sequence
  Description of Artificial Sequence: Synthetic oligonucleotide
aacguuuggugugacuccu

SEQ ID NO: 1305505 - RNA, 19 nt, Artificial Sequence
  Description of Artificial Sequence: Synthetic oligonucleotide
uuccacauacacaggccac

SEQ ID NO: 1305506 - RNA, 19 nt, Artificial Sequence
  Description of Artificial Sequence: Synthetic oligonucleotide
ugacgacuuugauauacuc

SEQ ID NO: 1305507 - RNA, 19 nt, Artificial Sequence
  Description of Artificial Sequence: Synthetic oligonucleotide
uacuuggcuguucuucaac

SEQ ID NO: 1305508 - RNA, 19 nt, Artificial Sequence
  Description of Artificial Sequence: Synthetic oligonucleotide
gacuuauccugaugcuuug

SEQ ID NO: 1305509 - RNA, 19 nt, Artificial Sequence
  Description of Artificial Sequence: Synthetic oligonucleotide
uauggguuucccucacaga

SEQ ID NO: 1305510 - RNA, 19 nt, Artificial Sequence
  Description of Artificial Sequence: Synthetic oligonucleotide
ucgauagggugucccaaac

SEQ ID NO: 1305511 - RNA, 19 nt, Artificial Sequence
  Description of Artificial Sequence: Synthetic oligonucleotide
ugcgccugcgucaaagaaa

SEQ ID NO: 1305512 - RNA, 19 nt, Artificial Sequence
  Description of Artificial Sequence: Synthetic oligonucleotide
acucuuguccucuggugca

SEQ ID NO: 1305513 - RNA, 19 nt, Artificial Sequence
  Description of Artificial Sequence: Synthetic oligonucleotide
ccauauauuuucccauugg

SEQ ID NO: 1305514 - RNA, 19 nt, Artificial Sequence
  Description of Artificial Sequence: Synthetic oligonucleotide
uuggugucaguuguuauuu

SEQ ID NO: 1305515 - RNA, 19 nt, Artificial Sequence
  Description of Artificial Sequence: Synthetic oligonucleotide
uccagauucuaugaccuua

SEQ ID NO: 1305516 - RNA, 19 nt, Artificial Sequence
  Description of Artificial Sequence: Synthetic oligonucleotide
guaucacggauuccuaaca

SEQ ID NO: 1305517 - RNA, 19 nt, Artificial Sequence
  Description of Artificial Sequence: Synthetic oligonucleotide
aacucaugaucugagccua

SEQ ID NO: 1305518 - RNA, 19 nt, Artificial Sequence
  Description of Artificial Sequence: Synthetic oligonucleotide
cuuaguauuccugaagaua

SEQ ID NO: 1305519 - RNA, 19 nt, Artificial Sequence
  Description of Artificial Sequence: Synthetic oligonucleotide
cgauauuuggaucuaggag

SEQ ID NO: 1305520 - RNA, 19 nt, Artificial Sequence
  Description of Artificial Sequence: Synthetic oligonucleotide
aucuaggagguccucucca

SEQ ID NO: 1305521 - RNA, 19 nt, Artificial Sequence
  Description of Artificial Sequence: Synthetic oligonucleotide
uggcccaaaucacuucaca

SEQ ID NO: 1305522 - RNA, 19 nt, Artificial Sequence
  Description of Artificial Sequence: Synthetic oligonucleotide
acuuauggggucauuuacu

SEQ ID NO: 1305523 - RNA, 19 nt, Artificial Sequence
  Description of Artificial Sequence: Synthetic oligonucleotide
augagcuuggaagucaaaa

SEQ ID NO: 1305524 - RNA, 19 nt, Artificial Sequence
  Description of Artificial Sequence: Synthetic oligonucleotide
gguaucacggauuccuaac

SEQ ID NO: 1305525 - RNA, 19 nt, Artificial Sequence
  Description of Artificial Sequence: Synthetic oligonucleotide
caugucgauaggguguccc

SEQ ID NO: 1305526 - RNA, 19 nt, Artificial Sequence
  Description of Artificial Sequence: Synthetic oligonucleotide
ggaaaucacagccauauau

SEQ ID NO: 1305527 - RNA, 19 nt, Artificial Sequence
  Description of Artificial Sequence: Synthetic oligonucleotide
uucugucagucaaaauaau

SEQ ID NO: 1305528 - RNA, 19 nt, Artificial Sequence
  Description of Artificial Sequence: Synthetic oligonucleotide
cugagccuaggccuugugc

SEQ ID NO: 1305529 - RNA, 19 nt, Artificial Sequence
  Description of Artificial Sequence: Synthetic oligonucleotide
gacgaucauuauucucuug

SEQ ID NO: 1305530 - RNA, 19 nt, Artificial Sequence
  Description of Artificial Sequence: Synthetic oligonucleotide
uuccuauacgcaugcugac

SEQ ID NO: 1305531 - RNA, 19 nt, Artificial Sequence
  Description of Artificial Sequence: Synthetic oligonucleotide
gucagucaaaauaauccuc

SEQ ID NO: 1305532 - RNA, 19 nt, Artificial Sequence
  Description of Artificial Sequence: Synthetic oligonucleotide
uccuaacacauauggguuu

SEQ ID NO: 1305533 - RNA, 19 nt, Artificial Sequence
  Description of Artificial Sequence: Synthetic oligonucleotide
uuauggcccaaaucacuuc

SEQ ID NO: 1305534 - RNA, 19 nt, Artificial Sequence
  Description of Artificial Sequence: Synthetic oligonucleotide
uuguaaucuuaaacuccuc

SEQ ID NO: 1305535 - RNA, 19 nt, Artificial Sequence
  Description of Artificial Sequence: Synthetic oligonucleotide
cuauacgcaugcugacggc

SEQ ID NO: 1305536 - RNA, 19 nt, Artificial Sequence
  Description of Artificial Sequence: Synthetic oligonucleotide
acuuauccugaugcuuugg

SEQ ID NO: 1305537 - RNA, 19 nt, Artificial Sequence
  Description of Artificial Sequence: Synthetic oligonucleotide
auucccgacgaucauuauu

SEQ ID NO: 1305538 - RNA, 19 nt, Artificial Sequence
  Description of Artificial Sequence: Synthetic oligonucleotide
cgcaaugccaccauucccg

SEQ ID NO: 1305539 - RNA, 19 nt, Artificial Sequence
  Description of Artificial Sequence: Synthetic oligonucleotide
agacagcucccaucaugcg

SEQ ID NO: 1305540 - RNA, 19 nt, Artificial Sequence
  Description of Artificial Sequence: Synthetic oligonucleotide
cucaugaucugagccuagg

SEQ ID NO: 1305541 - RNA, 19 nt, Artificial Sequence
  Description of Artificial Sequence: Synthetic oligonucleotide
cugucgguaucacggauuc

SEQ ID NO: 1305542 - RNA, 19 nt, Artificial Sequence
  Description of Artificial Sequence: Synthetic oligonucleotide
caucuguuaauuaaucaau

SEQ ID NO: 1305543 - RNA, 19 nt, Artificial Sequence
  Description of Artificial Sequence: Synthetic oligonucleotide
uagaaaccugcuugaaguu

SEQ ID NO: 1305544 - RNA, 19 nt, Artificial Sequence
  Description of Artificial Sequence: Synthetic oligonucleotide
uccuccuuauuuugaacuu

SEQ ID NO: 1305545 - RNA, 19 nt, Artificial Sequence
  Description of Artificial Sequence: Synthetic oligonucleotide
caugcacuuggccgcauac

SEQ ID NO: 1305546 - RNA, 19 nt, Artificial Sequence
  Description of Artificial Sequence: Synthetic oligonucleotide
gacaugagcuuggaaguca

SEQ ID NO: 1305547 - RNA, 19 nt, Artificial Sequence
  Description of Artificial Sequence: Synthetic oligonucleotide
ucuaggagguccucuccau

SEQ ID NO: 1305548 - RNA, 19 nt, Artificial Sequence
  Description of Artificial Sequence: Synthetic oligonucleotide
accaccccaucugucgugc

SEQ ID NO: 1305549 - RNA, 19 nt, Artificial Sequence
  Description of Artificial Sequence: Synthetic oligonucleotide
gguuucgaugugaauacug

SEQ ID NO: 1305550 - RNA, 19 nt, Artificial Sequence
  Description of Artificial Sequence: Synthetic oligonucleotide
ucgacuuauggggucauuu

SEQ ID NO: 1305551 - RNA, 19 nt, Artificial Sequence
  Description of Artificial Sequence: Synthetic oligonucleotide
gcgucaaagaaaguauucc

SEQ ID NO: 1305552 - RNA, 19 nt, Artificial Sequence
  Description of Artificial Sequence: Synthetic oligonucleotide
uggggucauuuacuuggug

SEQ ID NO: 1305553 - RNA, 19 nt, Artificial Sequence
  Description of Artificial Sequence: Synthetic oligonucleotide
acgguuuucgaggacagua

SEQ ID NO: 1305554 - RNA, 19 nt, Artificial Sequence
  Description of Artificial Sequence: Synthetic oligonucleotide
uuuucccauugguuaguuc

SEQ ID NO: 1305555 - RNA, 19 nt, Artificial Sequence
  Description of Artificial Sequence: Synthetic oligonucleotide
ucaugcguccauucugcau

SEQ ID NO: 1305556 - RNA, 19 nt, Artificial Sequence
  Description of Artificial Sequence: Synthetic oligonucleotide
cuaugaccuuaauguuggg

SEQ ID NO: 1305557 - RNA, 19 nt, Artificial Sequence
  Description of Artificial Sequence: Synthetic oligonucleotide
gaccuuaauguugggaaaa

SEQ ID NO: 1305558 - RNA, 19 nt, Artificial Sequence
  Description of Artificial Sequence: Synthetic oligonucleotide
auaccaccccaucugucgu

SEQ ID NO: 1305559 - RNA, 19 nt, Artificial Sequence
  Description of Artificial Sequence: Synthetic oligonucleotide
uugaacguuuggugugacu

SEQ ID NO: 1305560 - RNA, 19 nt, Artificial Sequence
  Description of Artificial Sequence: Synthetic oligonucleotide
auccaagccuccaugccag

SEQ ID NO: 1305561 - RNA, 19 nt, Artificial Sequence
  Description of Artificial Sequence: Synthetic oligonucleotide
ggaaaacgguuuucgagga

SEQ ID NO: 1305562 - RNA, 19 nt, Artificial Sequence
  Description of Artificial Sequence: Synthetic oligonucleotide
acuuggugucaguuguuau

SEQ ID NO: 1305563 - RNA, 19 nt, Artificial Sequence
  Description of Artificial Sequence: Synthetic oligonucleotide
augucgauaggguguccca

SEQ ID NO: 1305564 - RNA, 19 nt, Artificial Sequence
  Description of Artificial Sequence: Synthetic oligonucleotide
ugacgugagcaaagaguuc

SEQ ID NO: 1305565 - RNA, 19 nt, Artificial Sequence
  Description of Artificial Sequence: Synthetic oligonucleotide
ugcugcgccugcgucaaag

SEQ ID NO: 1305566 - RNA, 19 nt, Artificial Sequence
  Description of Artificial Sequence: Synthetic oligonucleotide
caguacaaccuuauaguua

SEQ ID NO: 1305567 - RNA, 19 nt, Artificial Sequence
  Description of Artificial Sequence: Synthetic oligonucleotide
gacgacuuugauauacucu

SEQ ID NO: 1305568 - RNA, 19 nt, Artificial Sequence
  Description of Artificial Sequence: Synthetic oligonucleotide
caggccacauuucuuuauc

SEQ ID NO: 1305569 - RNA, 19 nt, Artificial Sequence
  Description of Artificial Sequence: Synthetic oligonucleotide
uaguauuccugaagauauu

SEQ ID NO: 1305570 - RNA, 19 nt, Artificial Sequence
  Description of Artificial Sequence: Synthetic oligonucleotide
uuaagacagcucccaucau

SEQ ID NO: 1305571 - RNA, 19 nt, Artificial Sequence
  Description of Artificial Sequence: Synthetic oligonucleotide
uccaugucgauaggguguc

SEQ ID NO: 1305572 - RNA, 19 nt, Artificial Sequence
  Description of Artificial Sequence: Synthetic oligonucleotide
gcguccauucugcaugacg

SEQ ID NO: 1305573 - RNA, 19 nt, Artificial Sequence
  Description of Artificial Sequence: Synthetic oligonucleotide
gcaaagaguucaaagcuga

SEQ ID NO: 1305574 - RNA, 19 nt, Artificial Sequence
  Description of Artificial Sequence: Synthetic oligonucleotide
cagaucaacuuuggcuuag

SEQ ID NO: 1305575 - RNA, 19 nt, Artificial Sequence
  Description of Artificial Sequence: Synthetic oligonucleotide
uacuuggugucaguuguua

SEQ ID NO: 1305576 - RNA, 19 nt, Artificial Sequence
  Description of Artificial Sequence: Synthetic oligonucleotide
ucugucgugccugggucca

SEQ ID NO: 1305577 - RNA, 19 nt, Artificial Sequence
  Description of Artificial Sequence: Synthetic oligonucleotide
ucccucaauuguguagaug

SEQ ID NO: 1305578 - RNA, 19 nt, Artificial Sequence
  Description of Artificial Sequence: Synthetic oligonucleotide
ugucgauagggugucccaa

SEQ ID NO: 1305579 - RNA, 19 nt, Artificial Sequence
  Description of Artificial Sequence: Synthetic oligonucleotide
gaagugacgugcgcaucug

SEQ ID NO: 1305580 - RNA, 19 nt, Artificial Sequence
  Description of Artificial Sequence: Synthetic oligonucleotide
gaucaacuuuggcuuagcu

SEQ ID NO: 1305581 - RNA, 19 nt, Artificial Sequence
  Description of Artificial Sequence: Synthetic oligonucleotide
auaauccucuauaucgaua

SEQ ID NO: 1305582 - RNA, 19 nt, Artificial Sequence
  Description of Artificial Sequence: Synthetic oligonucleotide
guuucgaugugaauacugu

SEQ ID NO: 1305583 - RNA, 19 nt, Artificial Sequence
  Description of Artificial Sequence: Synthetic oligonucleotide
ccucuaaaucaguuucacc

SEQ ID NO: 1305584 - RNA, 19 nt, Artificial Sequence
  Description of Artificial Sequence: Synthetic oligonucleotide
gguccaagggcacugccca

SEQ ID NO: 1305585 - RNA, 19 nt, Artificial Sequence
  Description of Artificial Sequence: Synthetic oligonucleotide
gucgguaucacggauuccu

SEQ ID NO: 1305586 - RNA, 19 nt, Artificial Sequence
  Description of Artificial Sequence: Synthetic oligonucleotide
cagcaugcagugcagaugu

SEQ ID NO: 1305587 - RNA, 19 nt, Artificial Sequence
  Description of Artificial Sequence: Synthetic oligonucleotide
gguuaguuccacauacaca

SEQ ID NO: 1305588 - RNA, 19 nt, Artificial Sequence
  Description of Artificial Sequence: Synthetic oligonucleotide
agcuuuagcuuugcuucug

SEQ ID NO: 1305589 - RNA, 19 nt, Artificial Sequence
  Description of Artificial Sequence: Synthetic oligonucleotide
cuuuauccuuuauggccca

SEQ ID NO: 1305590 - RNA, 19 nt, Artificial Sequence
  Description of Artificial Sequence: Synthetic oligonucleotide
gugacgugcgcaucugguc

SEQ ID NO: 1305591 - RNA, 19 nt, Artificial Sequence
  Description of Artificial Sequence: Synthetic oligonucleotide
cugcaugacgacuuugaua

SEQ ID NO: 1305592 - RNA, 19 nt, Artificial Sequence
  Description of Artificial Sequence: Synthetic oligonucleotide
gcauagaugucaggaagug

SEQ ID NO: 1305593 - RNA, 19 nt, Artificial Sequence
  Description of Artificial Sequence: Synthetic oligonucleotide
ucgguaucacggauuccua

SEQ ID NO: 1305594 - RNA, 19 nt, Artificial Sequence
  Description of Artificial Sequence: Synthetic oligonucleotide
uaccaccccaucugucgug

SEQ ID NO: 1305595 - RNA, 19 nt, Artificial Sequence
  Description of Artificial Sequence: Synthetic oligonucleotide
aggaagugacgugcgcauc

SEQ ID NO: 1305596 - RNA, 19 nt, Artificial Sequence
  Description of Artificial Sequence: Synthetic oligonucleotide
uguggaccuuucagaucca

SEQ ID NO: 1305597 - RNA, 19 nt, Artificial Sequence
  Description of Artificial Sequence: Synthetic oligonucleotide
augaaagguccaucugguu

SEQ ID NO: 1305598 - RNA, 19 nt, Artificial Sequence
  Description of Artificial Sequence: Synthetic oligonucleotide
caucugcugccagacuggg

SEQ ID NO: 1305599 - RNA, 19 nt, Artificial Sequence
  Description of Artificial Sequence: Synthetic oligonucleotide
augacgacuuugauauacu

SEQ ID NO: 1305600 - RNA, 19 nt, Artificial Sequence
  Description of Artificial Sequence: Synthetic oligonucleotide
ccaucaugcguccauucug

SEQ ID NO: 1305601 - RNA, 19 nt, Artificial Sequence
  Description of Artificial Sequence: Synthetic oligonucleotide
aguauucccaauggcuuua

SEQ ID NO: 1305602 - RNA, 19 nt, Artificial Sequence
  Description of Artificial Sequence: Synthetic oligonucleotide
cauagaugucaggaaguga

SEQ ID NO: 1305603 - RNA, 19 nt, Artificial Sequence
  Description of Artificial Sequence: Synthetic oligonucleotide
uccucuccauaugaugaaa

SEQ ID NO: 1305604 - RNA, 19 nt, Artificial Sequence
  Description of Artificial Sequence: Synthetic oligonucleotide
cuuauggggucauuuacuu

SEQ ID NO: 1305605 - RNA, 19 nt, Artificial Sequence
  Description of Artificial Sequence: Synthetic oligonucleotide
agauauucugucagucaaa

SEQ ID NO: 1305606 - RNA, 19 nt, Artificial Sequence
  Description of Artificial Sequence: Synthetic oligonucleotide
ggagguccucuccauauga

SEQ ID NO: 1305607 - RNA, 19 nt, Artificial Sequence
  Description of Artificial Sequence: Synthetic oligonucleotide
aacgguuuucgaggacagu

SEQ ID NO: 1305608 - RNA, 19 nt, Artificial Sequence
  Description of Artificial Sequence: Synthetic oligonucleotide
caauuguguagaugguucu

SEQ ID NO: 1305609 - RNA, 19 nt, Artificial Sequence
  Description of Artificial Sequence: Synthetic oligonucleotide
augcguccauucugcauga

SEQ ID NO: 1305610 - RNA, 19 nt, Artificial Sequence
  Description of Artificial Sequence: Synthetic oligonucleotide
cgaucauuauucucuuggc

SEQ ID NO: 1305611 - RNA, 19 nt, Artificial Sequence
  Description of Artificial Sequence: Synthetic oligonucleotide
ugacggccaucuucuguga

SEQ ID NO: 1305612 - RNA, 19 nt, Artificial Sequence
  Description of Artificial Sequence: Synthetic oligonucleotide
aacuccucuugaagguaga

SEQ ID NO: 1305613 - RNA, 19 nt, Artificial Sequence
  Description of Artificial Sequence: Synthetic oligonucleotide
gggugucccaaacuagcug

SEQ ID NO: 1305614 - RNA, 19 nt, Artificial Sequence
  Description of Artificial Sequence: Synthetic oligonucleotide
gugacgugagcaaagaguu

SEQ ID NO: 1305615 - RNA, 19 nt, Artificial Sequence
  Description of Artificial Sequence: Synthetic oligonucleotide
uacgcaugcugacggccau

SEQ ID NO: 1305616 - RNA, 19 nt, Artificial Sequence
  Description of Artificial Sequence: Synthetic oligonucleotide
caaagaaaguauucccaau

SEQ ID NO: 1305617 - RNA, 19 nt, Artificial Sequence
  Description of Artificial Sequence: Synthetic oligonucleotide
ucccgacgaucauuauucu

SEQ ID NO: 1305618 - RNA, 19 nt, Artificial Sequence
  Description of Artificial Sequence: Synthetic oligonucleotide
ugguuucgaugugaauacu

SEQ ID NO: 1305619 - RNA, 19 nt, Artificial Sequence
  Description of Artificial Sequence: Synthetic oligonucleotide
ggggucauuuacuuggugu

SEQ ID NO: 1305620 - RNA, 19 nt, Artificial Sequence
  Description of Artificial Sequence: Synthetic oligonucleotide
caaaucacuucacagccuu

SEQ ID NO: 1305621 - RNA, 19 nt, Artificial Sequence
  Description of Artificial Sequence: Synthetic oligonucleotide
auaucgauauuuggaucua

SEQ ID NO: 1305622 - RNA, 19 nt, Artificial Sequence
  Description of Artificial Sequence: Synthetic oligonucleotide
cauucucgacuuauggggu

SEQ ID NO: 1305623 - RNA, 19 nt, Artificial Sequence
  Description of Artificial Sequence: Synthetic oligonucleotide
auacgcaugcugacggcca

SEQ ID NO: 1305624 - RNA, 19 nt, Artificial Sequence
  Description of Artificial Sequence: Synthetic oligonucleotide
cagcagcauagaugucagg

SEQ ID NO: 1305625 - RNA, 19 nt, Artificial Sequence
  Description of Artificial Sequence: Synthetic oligonucleotide
gaucugagccuaggccuug

SEQ ID NO: 1305626 - RNA, 19 nt, Artificial Sequence
  Description of Artificial Sequence: Synthetic oligonucleotide
guauuccugaagauauucu

SEQ ID NO: 1305627 - RNA, 19 nt, Artificial Sequence
  Description of Artificial Sequence: Synthetic oligonucleotide
cugcuugaaguuuguaacu

SEQ ID NO: 1305628 - RNA, 19 nt, Artificial Sequence
  Description of Artificial Sequence: Synthetic oligonucleotide
gucgauagggugucccaaa

SEQ ID NO: 1305629 - RNA, 19 nt, Artificial Sequence
  Description of Artificial Sequence: Synthetic oligonucleotide
caugccagucagguccaag

SEQ ID NO: 1305630 - RNA, 19 nt, Artificial Sequence
  Description of Artificial Sequence: Synthetic oligonucleotide
guucuuuuaggugcaauuu

SEQ ID NO: 1305631 - RNA, 19 nt, Artificial Sequence
  Description of Artificial Sequence: Synthetic oligonucleotide
acagagcuuccuauacgca

SEQ ID NO: 1305632 - RNA, 19 nt, Artificial Sequence
  Description of Artificial Sequence: Synthetic oligonucleotide
ccgacgaucauuauucucu

SEQ ID NO: 1305633 - RNA, 19 nt, Artificial Sequence
  Description of Artificial Sequence: Synthetic oligonucleotide
cuuggugucaguuguuauu

SEQ ID NO: 1305634 - RNA, 19 nt, Artificial Sequence
  Description of Artificial Sequence: Synthetic oligonucleotide
agggugucccaaacuagcu

SEQ ID NO: 1305635 - RNA, 19 nt, Artificial Sequence
  Description of Artificial Sequence: Synthetic oligonucleotide
cguccauucugcaugacga

SEQ ID NO: 1305636 - RNA, 19 nt, Artificial Sequence
  Description of Artificial Sequence: Synthetic oligonucleotide
ugucgguaucacggauucc

SEQ ID NO: 1305637 - RNA, 19 nt, Artificial Sequence
  Description of Artificial Sequence: Synthetic oligonucleotide
gaacucuuguggaccuuuc

SEQ ID NO: 1305638 - RNA, 19 nt, Artificial Sequence
  Description of Artificial Sequence: Synthetic oligonucleotide
ggugcaauuuuagccucug

SEQ ID NO: 1305639 - RNA, 19 nt, Artificial Sequence
  Description of Artificial Sequence: Synthetic oligonucleotide
ugucgugccuggguccaca

SEQ ID NO: 1305640 - RNA, 19 nt, Artificial Sequence
  Description of Artificial Sequence: Synthetic oligonucleotide
gguucuuuuaggugcaauu

SEQ ID NO: 1305641 - RNA, 19 nt, Artificial Sequence
  Description of Artificial Sequence: Synthetic oligonucleotide
acugucgguaucacggauu

SEQ ID NO: 1305642 - RNA, 19 nt, Artificial Sequence
  Description of Artificial Sequence: Synthetic oligonucleotide
cagucaaaauaauccucua

SEQ ID NO: 1305643 - RNA, 19 nt, Artificial Sequence
  Description of Artificial Sequence: Synthetic oligonucleotide
caccucagcauuaacucau

SEQ ID NO: 1305644 - RNA, 19 nt, Artificial Sequence
  Description of Artificial Sequence: Synthetic oligonucleotide
cagagcuuccuauacgcau

SEQ ID NO: 1305645 - RNA, 19 nt, Artificial Sequence
  Description of Artificial Sequence: Synthetic oligonucleotide
acucaugaucugagccuag

SEQ ID NO: 1305646 - RNA, 19 nt, Artificial Sequence
  Description of Artificial Sequence: Synthetic oligonucleotide
gucgugccuggguccacag

SEQ ID NO: 1305647 - RNA, 19 nt, Artificial Sequence
  Description of Artificial Sequence: Synthetic oligonucleotide
guugaacguuuggugugac

SEQ ID NO: 1305648 - RNA, 19 nt, Artificial Sequence
  Description of Artificial Sequence: Synthetic oligonucleotide
gguuuucgaggacaguacu

SEQ ID NO: 1305649 - RNA, 19 nt, Artificial Sequence
  Description of Artificial Sequence: Synthetic oligonucleotide
ggaagugacgugcgcaucu

SEQ ID NO: 1305650 - RNA, 19 nt, Artificial Sequence
  Description of Artificial Sequence: Synthetic oligonucleotide
ccaccauucccgacgauca

SEQ ID NO: 1305651 - RNA, 19 nt, Artificial Sequence
  Description of Artificial Sequence: Synthetic oligonucleotide
cauaugaugaaagguccau

SEQ ID NO: 1305652 - RNA, 19 nt, Artificial Sequence
  Description of Artificial Sequence: Synthetic oligonucleotide
ccuaacacauauggguuuc

SEQ ID NO: 1305653 - RNA, 19 nt, Artificial Sequence
  Description of Artificial Sequence: Synthetic oligonucleotide
gugcaauuuuagccucuga

SEQ ID NO: 1305654 - RNA, 19 nt, Artificial Sequence
  Description of Artificial Sequence: Synthetic oligonucleotide
gcgcaaugccaccauuccc

SEQ ID NO: 1305655 - RNA, 19 nt, Artificial Sequence
  Description of Artificial Sequence: Synthetic oligonucleotide
accauucccgacgaucauu

SEQ ID NO: 1305656 - RNA, 19 nt, Artificial Sequence
  Description of Artificial Sequence: Synthetic oligonucleotide
gcaccucagcauuaacuca

SEQ ID NO: 1305657 - RNA, 19 nt, Artificial Sequence
  Description of Artificial Sequence: Synthetic oligonucleotide
ucgugccuggguccacagu

SEQ ID NO: 1305658 - RNA, 19 nt, Artificial Sequence
  Description of Artificial Sequence: Synthetic oligonucleotide
uggugcaccucagcauuaa

SEQ ID NO: 1305659 - RNA, 19 nt, Artificial Sequence
  Description of Artificial Sequence: Synthetic oligonucleotide
guuuggugugacuccugua

SEQ ID NO: 1305660 - RNA, 19 nt, Artificial Sequence
  Description of Artificial Sequence: Synthetic oligonucleotide
uugcucccucaauugugua

SEQ ID NO: 1305661 - RNA, 19 nt, Artificial Sequence
  Description of Artificial Sequence: Synthetic oligonucleotide
ccauaugaugaaaggucca

SEQ ID NO: 1305662 - RNA, 19 nt, Artificial Sequence
  Description of Artificial Sequence: Synthetic oligonucleotide
acuccucuugaagguagau

SEQ ID NO: 1305663 - RNA, 19 nt, Artificial Sequence
  Description of Artificial Sequence: Synthetic oligonucleotide
ccgcauaccaccccaucug

SEQ ID NO: 1305664 - RNA, 19 nt, Artificial Sequence
  Description of Artificial Sequence: Synthetic oligonucleotide
gguugaacguuugguguga

SEQ ID NO: 1305665 - RNA, 19 nt, Artificial Sequence
  Description of Artificial Sequence: Synthetic oligonucleotide
cagcucccaucaugcgucc

SEQ ID NO: 1305666 - RNA, 19 nt, Artificial Sequence
  Description of Artificial Sequence: Synthetic oligonucleotide
uccaagccuccaugccagu

SEQ ID NO: 1305667 - RNA, 19 nt, Artificial Sequence
  Description of Artificial Sequence: Synthetic oligonucleotide
ggagaaaagguugaacguu

SEQ ID NO: 1305668 - RNA, 19 nt, Artificial Sequence
  Description of Artificial Sequence: Synthetic oligonucleotide
gcucaagcgcaaugccacc

SEQ ID NO: 1305669 - RNA, 19 nt, Artificial Sequence
  Description of Artificial Sequence: Synthetic oligonucleotide
gccugcgucaaagaaagua

SEQ ID NO: 1305670 - RNA, 19 nt, Artificial Sequence
  Description of Artificial Sequence: Synthetic oligonucleotide
gccuaggccuugugcauug

SEQ ID NO: 1305671 - RNA, 19 nt, Artificial Sequence
  Description of Artificial Sequence: Synthetic oligonucleotide
auacugugugagaacucuu

SEQ ID NO: 1305672 - RNA, 19 nt, Artificial Sequence
  Description of Artificial Sequence: Synthetic oligonucleotide
gcaguacaaccuuauaguu

SEQ ID NO: 1305673 - RNA, 19 nt, Artificial Sequence
  Description of Artificial Sequence: Synthetic oligonucleotide
cucaauuguguagaugguu

SEQ ID NO: 1305674 - RNA, 19 nt, Artificial Sequence
  Description of Artificial Sequence: Synthetic oligonucleotide
ccagauucuaugaccuuaa

SEQ ID NO: 1305675 - RNA, 19 nt, Artificial Sequence
  Description of Artificial Sequence: Synthetic oligonucleotide
cacggauuccuaacacaua

SEQ ID NO: 1305676 - RNA, 19 nt, Artificial Sequence
  Description of Artificial Sequence: Synthetic oligonucleotide
ucucgacuuauggggucau

SEQ ID NO: 1305677 - RNA, 19 nt, Artificial Sequence
  Description of Artificial Sequence: Synthetic oligonucleotide
acgcaugcugacggccauc

SEQ ID NO: 1305678 - RNA, 19 nt, Artificial Sequence
  Description of Artificial Sequence: Synthetic oligonucleotide
cccgacgaucauuauucuc

SEQ ID NO: 1305679 - RNA, 19 nt, Artificial Sequence
  Description of Artificial Sequence: Synthetic oligonucleotide
ccucuggugcaccucagca

SEQ ID NO: 1305680 - RNA, 19 nt, Artificial Sequence
  Description of Artificial Sequence: Synthetic oligonucleotide
cugcgucaaagaaaguauu

SEQ ID NO: 1305681 - RNA, 19 nt, Artificial Sequence
  Description of Artificial Sequence: Synthetic oligonucleotide
ccugcgucaaagaaaguau

SEQ ID NO: 1305682 - RNA, 19 nt, Artificial Sequence
  Description of Artificial Sequence: Synthetic oligonucleotide
gagccuaggccuugugcau

SEQ ID NO: 1305683 - RNA, 19 nt, Artificial Sequence
  Description of Artificial Sequence: Synthetic oligonucleotide
acgugcgcaucuggucauc

SEQ ID NO: 1305684 - RNA, 19 nt, Artificial Sequence
  Description of Artificial Sequence: Synthetic oligonucleotide
aggacaguacuuggcuguu

SEQ ID NO: 1305685 - RNA, 19 nt, Artificial Sequence
  Description of Artificial Sequence: Synthetic oligonucleotide
uggccgcauaccaccccau

SEQ ID NO: 1305686 - RNA, 19 nt, Artificial Sequence
  Description of Artificial Sequence: Synthetic oligonucleotide
cugcgccugcgucaaagaa

SEQ ID NO: 1305687 - RNA, 19 nt, Artificial Sequence
  Description of Artificial Sequence: Synthetic oligonucleotide
gacgugcgcaucuggucau

SEQ ID NO: 1305688 - RNA, 19 nt, Artificial Sequence
  Description of Artificial Sequence: Synthetic oligonucleotide
cuguagcgcugacaaggaa

SEQ ID NO: 1305689 - RNA, 19 nt, Artificial Sequence
  Description of Artificial Sequence: Synthetic oligonucleotide
ccuguagcgcugacaagga

SEQ ID NO: 1305690 - RNA, 19 nt, Artificial Sequence
  Description of Artificial Sequence: Synthetic oligonucleotide
gccgccauccucuccuaga

SEQ ID NO: 1305691 - RNA, 19 nt, Artificial Sequence
  Description of Artificial Sequence: Synthetic oligonucleotide
gcacugucgguaucacgga

SEQ ID NO: 1305692 - RNA, 19 nt, Artificial Sequence
  Description of Artificial Sequence: Synthetic oligonucleotide
agccuaggccuugugcauu

SEQ ID NO: 1305693 - RNA, 19 nt, Artificial Sequence
  Description of Artificial Sequence: Synthetic oligonucleotide
cggauuccuaacacauaug

SEQ ID NO: 1305694 - RNA, 19 nt, Artificial Sequence
  Description of Artificial Sequence: Synthetic oligonucleotide
agccaugcacuuggccgca

SEQ ID NO: 1305695 - RNA, 19 nt, Artificial Sequence
  Description of Artificial Sequence: Synthetic oligonucleotide
ugcguccauucugcaugac

SEQ ID NO: 1305696 - RNA, 19 nt, Artificial Sequence
  Description of Artificial Sequence: Synthetic oligonucleotide
gccgcauaccaccccaucu

SEQ ID NO: 1305697 - RNA, 19 nt, Artificial Sequence
  Description of Artificial Sequence: Synthetic oligonucleotide
cuccuagaucaaaauuguu

SEQ ID NO: 1305698 - RNA, 19 nt, Artificial Sequence
  Description of Artificial Sequence: Synthetic oligonucleotide
cccauugguuaguuccaca

SEQ ID NO: 1305699 - RNA, 19 nt, Artificial Sequence
  Description of Artificial Sequence: Synthetic oligonucleotide
ggccuugugcauuguauuu

SEQ ID NO: 1305700 - RNA, 19 nt, Artificial Sequence
  Description of Artificial Sequence: Synthetic oligonucleotide
gcauaccaccccaucuguc

SEQ ID NO: 1305701 - RNA, 19 nt, Artificial Sequence
  Description of Artificial Sequence: Synthetic oligonucleotide
guacaaccuuauaguuaaa

SEQ ID NO: 1305702 - RNA, 19 nt, Artificial Sequence
  Description of Artificial Sequence: Synthetic oligonucleotide
ggccgcauaccaccccauc

SEQ ID NO: 1305703 - RNA, 19 nt, Artificial Sequence
  Description of Artificial Sequence: Synthetic oligonucleotide
ccaaaucacuucacagccu

SEQ ID NO: 1305704 - RNA, 19 nt, Artificial Sequence
  Description of Artificial Sequence: Synthetic oligonucleotide
cacugucgguaucacggau

SEQ ID NO: 1305705 - RNA, 19 nt, Artificial Sequence
  Description of Artificial Sequence: Synthetic oligonucleotide
caccccaucugucgugccu

SEQ ID NO: 1305706 - RNA, 19 nt, Artificial Sequence
  Description of Artificial Sequence: Synthetic oligonucleotide
ccaaacuagcugcagccau

SEQ ID NO: 1305707 - RNA, 19 nt, Artificial Sequence
  Description of Artificial Sequence: Synthetic oligonucleotide
gcccacauuaucagcuuua

SEQ ID NO: 1305708 - RNA, 19 nt, Artificial Sequence
  Description of Artificial Sequence: Synthetic oligonucleotide
ccuccuuauuuugaacuua

SEQ ID NO: 1305709 - RNA, 19 nt, Artificial Sequence
  Description of Artificial Sequence: Synthetic oligonucleotide
ccucuccuagaucaaaauu

SEQ ID NO: 1305710 - RNA, 19 nt, Artificial Sequence
  Description of Artificial Sequence: Synthetic oligonucleotide
cccaaacuagcugcagcca

SEQ ID NO: 1305711 - RNA, 19 nt, Artificial Sequence
  Description of Artificial Sequence: Synthetic oligonucleotide
cugucgugccuggguccac

SEQ ID NO: 1305712 - RNA, 19 nt, Artificial Sequence
  Description of Artificial Sequence: Synthetic oligonucleotide
cccaucaugcguccauucu

SEQ ID NO: 1305713 - RNA, 19 nt, Artificial Sequence
  Description of Artificial Sequence: Synthetic oligonucleotide
ccagcaguacaaccuuaua

SEQ ID NO: 1305714 - RNA, 19 nt, Artificial Sequence
  Description of Artificial Sequence: Synthetic oligonucleotide
cauucccgacgaucauuau

SEQ ID NO: 1305715 - RNA, 19 nt, Artificial Sequence
  Description of Artificial Sequence: Synthetic oligonucleotide
ccaucugucgugccugggu

SEQ ID NO: 1305716 - RNA, 19 nt, Artificial Sequence
  Description of Artificial Sequence: Synthetic oligonucleotide
gagaacucuuguggaccuu

SEQ ID NO: 1305717 - RNA, 19 nt, Artificial Sequence
  Description of Artificial Sequence: Synthetic oligonucleotide
gccuugugcauuguauuuu

SEQ ID NO: 1305718 - RNA, 19 nt, Artificial Sequence
  Description of Artificial Sequence: Synthetic oligonucleotide
ccaugucgauagggugucc

SEQ ID NO: 1305719 - RNA, 19 nt, Artificial Sequence
  Description of Artificial Sequence: Synthetic oligonucleotide
cccagcaguacaaccuuau

SEQ ID NO: 1305720 - RNA, 19 nt, Artificial Sequence
  Description of Artificial Sequence: Synthetic oligonucleotide
gcaugacgacuuugauaua

SEQ ID NO: 1305721 - RNA, 19 nt, Artificial Sequence
  Description of Artificial Sequence: Synthetic oligonucleotide
caccauucccgacgaucau

SEQ ID NO: 1305722 - RNA, 19 nt, Artificial Sequence
  Description of Artificial Sequence: Synthetic oligonucleotide
cgauagggugucccaaacu

SEQ ID NO: 1305723 - RNA, 19 nt, Artificial Sequence
  Description of Artificial Sequence: Synthetic oligonucleotide
cucccaucaugcguccauu

SEQ ID NO: 1305724 - RNA, 19 nt, Artificial Sequence
  Description of Artificial Sequence: Synthetic oligonucleotide
cgcauaccaccccaucugu

SEQ ID NO: 1305725 - RNA, 19 nt, Artificial Sequence
  Description of Artificial Sequence: Synthetic oligonucleotide
ccaugcacuuggccgcaua

SEQ ID NO: 1305726 - RNA, 19 nt, Artificial Sequence
  Description of Artificial Sequence: Synthetic oligonucleotide
cucgacuuauggggucauu

SEQ ID NO: 1305727 - RNA, 19 nt, Artificial Sequence
  Description of Artificial Sequence: Synthetic oligonucleotide
cgacgaucauuauucucuu

SEQ ID NO: 1305728 - RNA, 19 nt, Artificial Sequence
  Description of Artificial Sequence: Synthetic oligonucleotide
cugcugcgccugcgucaaa

SEQ ID NO: 1305729 - RNA, 19 nt, Artificial Sequence
  Description of Artificial Sequence: Synthetic oligonucleotide
ccuaggccuugugcauugu

SEQ ID NO: 1305730 - RNA, 19 nt, Artificial Sequence
  Description of Artificial Sequence: Synthetic oligonucleotide
uuuugaagacgaaugaugg

SEQ ID NO: 1305731 - RNA, 19 nt, Artificial Sequence
  Description of Artificial Sequence: Synthetic oligonucleotide
ucuguuuagccaaacagcg

SEQ ID NO: 1305732 - RNA, 19 nt, Artificial Sequence
  Description of Artificial Sequence: Synthetic oligonucleotide
cuaauucagaaaaugaagc

SEQ ID NO: 1305733 - RNA, 19 nt, Artificial Sequence
  Description of Artificial Sequence: Synthetic oligonucleotide
uacugauaaaguucaaacg

SEQ ID NO: 1305734 - RNA, 19 nt, Artificial Sequence
  Description of Artificial Sequence: Synthetic oligonucleotide
agcgcgaucacguuguggc

SEQ ID NO: 1305735 - RNA, 19 nt, Artificial Sequence
  Description of Artificial Sequence: Synthetic oligonucleotide
auuagagguacagugauuc

SEQ ID NO: 1305736 - RNA, 19 nt, Artificial Sequence
  Description of Artificial Sequence: Synthetic oligonucleotide
ucauaguuaaauaacuuua

SEQ ID NO: 1305737 - RNA, 19 nt, Artificial Sequence
  Description of Artificial Sequence: Synthetic oligonucleotide
uaucuauaacacuuguucc

SEQ ID NO: 1305738 - RNA, 19 nt, Artificial Sequence
  Description of Artificial Sequence: Synthetic oligonucleotide
cuuguguacaccuuuuagc

SEQ ID NO: 1305739 - RNA, 19 nt, Artificial Sequence
  Description of Artificial Sequence: Synthetic oligonucleotide
ucuuuuaacucuuggucag

SEQ ID NO: 1305740 - RNA, 19 nt, Artificial Sequence
  Description of Artificial Sequence: Synthetic oligonucleotide
aaaguucaaacggugaugu

SEQ ID NO: 1305741 - RNA, 19 nt, Artificial Sequence
  Description of Artificial Sequence: Synthetic oligonucleotide
acuaauucagaaaaugaag

SEQ ID NO: 1305742 - RNA, 19 nt, Artificial Sequence
  Description of Artificial Sequence: Synthetic oligonucleotide
acgaaugauggauaaaucu

SEQ ID NO: 1305743 - RNA, 19 nt, Artificial Sequence
  Description of Artificial Sequence: Synthetic oligonucleotide
uugguaaaagaacuccgcc

SEQ ID NO: 1305744 - RNA, 19 nt, Artificial Sequence
  Description of Artificial Sequence: Synthetic oligonucleotide
uuguccaauuacuaaaaca

SEQ ID NO: 1305745 - RNA, 19 nt, Artificial Sequence
  Description of Artificial Sequence: Synthetic oligonucleotide
uuuguuaccugucugugau

SEQ ID NO: 1305746 - RNA, 19 nt, Artificial Sequence
  Description of Artificial Sequence: Synthetic oligonucleotide
acauuguaaggccuugugg

SEQ ID NO: 1305747 - RNA, 19 nt, Artificial Sequence
  Description of Artificial Sequence: Synthetic oligonucleotide
ugugauuuauacugacucc

SEQ ID NO: 1305748 - RNA, 19 nt, Artificial Sequence
  Description of Artificial Sequence: Synthetic oligonucleotide
auccgauccgcccagcugc

SEQ ID NO: 1305749 - RNA, 19 nt, Artificial Sequence
  Description of Artificial Sequence: Synthetic oligonucleotide
uucauaguuaaauaacuuu

SEQ ID NO: 1305750 - RNA, 19 nt, Artificial Sequence
  Description of Artificial Sequence: Synthetic oligonucleotide
uaauuagagguacagugau

SEQ ID NO: 1305751 - RNA, 19 nt, Artificial Sequence
  Description of Artificial Sequence: Synthetic oligonucleotide
gugauuuauacugacuccg

SEQ ID NO: 1305752 - RNA, 19 nt, Artificial Sequence
  Description of Artificial Sequence: Synthetic oligonucleotide
cuugguaaaagaacuccgc

SEQ ID NO: 1305753 - RNA, 19 nt, Artificial Sequence
  Description of Artificial Sequence: Synthetic oligonucleotide
uguuuagccaaacagcguu

SEQ ID NO: 1305754 - RNA, 19 nt, Artificial Sequence
  Description of Artificial Sequence: Synthetic oligonucleotide
gaagucguaggccuggagc

SEQ ID NO: 1305755 - RNA, 19 nt, Artificial Sequence
  Description of Artificial Sequence: Synthetic oligonucleotide
uccgaauacaucuucucca

SEQ ID NO: 1305756 - RNA, 19 nt, Artificial Sequence
  Description of Artificial Sequence: Synthetic oligonucleotide
aucuauaacacuuguucca

SEQ ID NO: 1305757 - RNA, 19 nt, Artificial Sequence
  Description of Artificial Sequence: Synthetic oligonucleotide
ucguauccagacaugaugu

SEQ ID NO: 1305758 - RNA, 19 nt, Artificial Sequence
  Description of Artificial Sequence: Synthetic oligonucleotide
uagagguacagugauuccg

SEQ ID NO: 1305759 - RNA, 19 nt, Artificial Sequence
  Description of Artificial Sequence: Synthetic oligonucleotide
guagagacggcucagcgug

SEQ ID NO: 1305760 - RNA, 19 nt, Artificial Sequence
  Description of Artificial Sequence: Synthetic oligonucleotide
auaaaguucaaacggugau

SEQ ID NO: 1305761 - RNA, 19 nt, Artificial Sequence
  Description of Artificial Sequence: Synthetic oligonucleotide
aauacugauaaaguucaaa

SEQ ID NO: 1305762 - RNA, 19 nt, Artificial Sequence
  Description of Artificial Sequence: Synthetic oligonucleotide
uugucgagcacgguaaagg

SEQ ID NO: 1305763 - RNA, 19 nt, Artificial Sequence
  Description of Artificial Sequence: Synthetic oligonucleotide
cuucgugccgcucucaggg

SEQ ID NO: 1305764 - RNA, 19 nt, Artificial Sequence
  Description of Artificial Sequence: Synthetic oligonucleotide
uaaaacacucucaggauuu

SEQ ID NO: 1305765 - RNA, 19 nt, Artificial Sequence
  Description of Artificial Sequence: Synthetic oligonucleotide
accugucugugauuuauac

SEQ ID NO: 1305766 - RNA, 19 nt, Artificial Sequence
  Description of Artificial Sequence: Synthetic oligonucleotide
cuuguaauuagagguacag

SEQ ID NO: 1305767 - RNA, 19 nt, Artificial Sequence
  Description of Artificial Sequence: Synthetic oligonucleotide
ucagguaccuuucuacaga

SEQ ID NO: 1305768 - RNA, 19 nt, Artificial Sequence
  Description of Artificial Sequence: Synthetic oligonucleotide
gaugaacucguauccagac

SEQ ID NO: 1305769 - RNA, 19 nt, Artificial Sequence
  Description of Artificial Sequence: Synthetic oligonucleotide
ucgaaaccgcaguacaccg

SEQ ID NO: 1305770 - RNA, 19 nt, Artificial Sequence
  Description of Artificial Sequence: Synthetic oligonucleotide
uuuucgggcucuuugacau

SEQ ID NO: 1305771 - RNA, 19 nt, Artificial Sequence
  Description of Artificial Sequence: Synthetic oligonucleotide
uugacaugcagcugcauaa

SEQ ID NO: 1305772 - RNA, 19 nt, Artificial Sequence
  Description of Artificial Sequence: Synthetic oligonucleotide
uugaagacgaaugauggau

SEQ ID NO: 1305773 - RNA, 19 nt, Artificial Sequence
  Description of Artificial Sequence: Synthetic oligonucleotide
caugaacaagcuuugucac

SEQ ID NO: 1305774 - RNA, 19 nt, Artificial Sequence
  Description of Artificial Sequence: Synthetic oligonucleotide
gaaguggccgcccacugag

SEQ ID NO: 1305775 - RNA, 19 nt, Artificial Sequence
  Description of Artificial Sequence: Synthetic oligonucleotide
gaaugauggauaaaucuga

SEQ ID NO: 1305776 - RNA, 19 nt, Artificial Sequence
  Description of Artificial Sequence: Synthetic oligonucleotide
ugugaucaaucucgggaag

SEQ ID NO: 1305777 - RNA, 19 nt, Artificial Sequence
  Description of Artificial Sequence: Synthetic oligonucleotide
agcacgguaaaggugcccc

SEQ ID NO: 1305778 - RNA, 19 nt, Artificial Sequence
  Description of Artificial Sequence: Synthetic oligonucleotide
uaucauccgauacccucgg

SEQ ID NO: 1305779 - RNA, 19 nt, Artificial Sequence
  Description of Artificial Sequence: Synthetic oligonucleotide
uccaugaacaagcuuuguc

SEQ ID NO: 1305780 - RNA, 19 nt, Artificial Sequence
  Description of Artificial Sequence: Synthetic oligonucleotide
agggucgagaacuaauuca

SEQ ID NO: 1305781 - RNA, 19 nt, Artificial Sequence
  Description of Artificial Sequence: Synthetic oligonucleotide
acuaaaacacucucaggau

SEQ ID NO: 1305782 - RNA, 19 nt, Artificial Sequence
  Description of Artificial Sequence: Synthetic oligonucleotide
ucgagaacuaauucagaaa

SEQ ID NO: 1305783 - RNA, 19 nt, Artificial Sequence
  Description of Artificial Sequence: Synthetic oligonucleotide
caaacggugauguuuucuc

SEQ ID NO: 1305784 - RNA, 19 nt, Artificial Sequence
  Description of Artificial Sequence: Synthetic oligonucleotide
caguacaccgucuggggcg

SEQ ID NO: 1305785 - RNA, 19 nt, Artificial Sequence
  Description of Artificial Sequence: Synthetic oligonucleotide
auaaugugaucaaucucgg

SEQ ID NO: 1305786 - RNA, 19 nt, Artificial Sequence
  Description of Artificial Sequence: Synthetic oligonucleotide
gaacuccuugaacaggccc

SEQ ID NO: 1305787 - RNA, 19 nt, Artificial Sequence
  Description of Artificial Sequence: Synthetic oligonucleotide
uguaucuauaacacuuguu

SEQ ID NO: 1305788 - RNA, 19 nt, Artificial Sequence
  Description of Artificial Sequence: Synthetic oligonucleotide
aacucguauccagacauga

SEQ ID NO: 1305789 - RNA, 19 nt, Artificial Sequence
  Description of Artificial Sequence: Synthetic oligonucleotide
gguaccuuucuacagaauc

SEQ ID NO: 1305790 - RNA, 19 nt, Artificial Sequence
  Description of Artificial Sequence: Synthetic oligonucleotide
agacgaaugauggauaaau

SEQ ID NO: 1305791 - RNA, 19 nt, Artificial Sequence
  Description of Artificial Sequence: Synthetic oligonucleotide
gaaaccgcaguacaccguc

SEQ ID NO: 1305792 - RNA, 19 nt, Artificial Sequence
  Description of Artificial Sequence: Synthetic oligonucleotide
uguaaggccuuguggauau

SEQ ID NO: 1305793 - RNA, 19 nt, Artificial Sequence
  Description of Artificial Sequence: Synthetic oligonucleotide
aagucguuucugagcaccc

SEQ ID NO: 1305794 - RNA, 19 nt, Artificial Sequence
  Description of Artificial Sequence: Synthetic oligonucleotide
uguacaccuuuuagcagca

SEQ ID NO: 1305795 - RNA, 19 nt, Artificial Sequence
  Description of Artificial Sequence: Synthetic oligonucleotide
ugaagacgaaugauggaua

SEQ ID NO: 1305796 - RNA, 19 nt, Artificial Sequence
  Description of Artificial Sequence: Synthetic oligonucleotide
uuagagguacagugauucc

SEQ ID NO: 1305797 - RNA, 19 nt, Artificial Sequence
  Description of Artificial Sequence: Synthetic oligonucleotide
gucguuucugagcaccccg

SEQ ID NO: 1305798 - RNA, 19 nt, Artificial Sequence
  Description of Artificial Sequence: Synthetic oligonucleotide
uggaauggcauuugcuuuc

SEQ ID NO: 1305799 - RNA, 19 nt, Artificial Sequence
  Description of Artificial Sequence: Synthetic oligonucleotide
ugguaaagugcuuguguac

SEQ ID NO: 1305800 - RNA, 19 nt, Artificial Sequence
  Description of Artificial Sequence: Synthetic oligonucleotide
gaagacgaaugauggauaa

SEQ ID NO: 1305801 - RNA, 19 nt, Artificial Sequence
  Description of Artificial Sequence: Synthetic oligonucleotide
uuccuauuuuaaguaagga

SEQ ID NO: 1305802 - RNA, 19 nt, Artificial Sequence
  Description of Artificial Sequence: Synthetic oligonucleotide
uccggcauguaucuauaac

SEQ ID NO: 1305803 - RNA, 19 nt, Artificial Sequence
  Description of Artificial Sequence: Synthetic oligonucleotide
aguucaaacggugauguuu

SEQ ID NO: 1305804 - RNA, 19 nt, Artificial Sequence
  Description of Artificial Sequence: Synthetic oligonucleotide
caguuguacuuguaauuag

SEQ ID NO: 1305805 - RNA, 19 nt, Artificial Sequence
  Description of Artificial Sequence: Synthetic oligonucleotide
caagucguuucugagcacc

SEQ ID NO: 1305806 - RNA, 19 nt, Artificial Sequence
  Description of Artificial Sequence: Synthetic oligonucleotide
gucgagaacuaauucagaa

SEQ ID NO: 1305807 - RNA, 19 nt, Artificial Sequence
  Description of Artificial Sequence: Synthetic oligonucleotide
gaaccaggcggcguugucg

SEQ ID NO: 1305808 - RNA, 19 nt, Artificial Sequence
  Description of Artificial Sequence: Synthetic oligonucleotide
guauccagacaugauguug

SEQ ID NO: 1305809 - RNA, 19 nt, Artificial Sequence
  Description of Artificial Sequence: Synthetic oligonucleotide
acgcagucggcgcucagcg

SEQ ID NO: 1305810 - RNA, 19 nt, Artificial Sequence
  Description of Artificial Sequence: Synthetic oligonucleotide
cucuaugcugcuaugguaa

SEQ ID NO: 1305811 - RNA, 19 nt, Artificial Sequence
  Description of Artificial Sequence: Synthetic oligonucleotide
uuguaauuagagguacagu

SEQ ID NO: 1305812 - RNA, 19 nt, Artificial Sequence
  Description of Artificial Sequence: Synthetic oligonucleotide
gugaucaaucucgggaagg

SEQ ID NO: 1305813 - RNA, 19 nt, Artificial Sequence
  Description of Artificial Sequence: Synthetic oligonucleotide
aaccaggcggcguugucga

SEQ ID NO: 1305814 - RNA, 19 nt, Artificial Sequence
  Description of Artificial Sequence: Synthetic oligonucleotide
uguuaccugucugugauuu

SEQ ID NO: 1305815 - RNA, 19 nt, Artificial Sequence
  Description of Artificial Sequence: Synthetic oligonucleotide
auccgauacccucggggac

SEQ ID NO: 1305816 - RNA, 19 nt, Artificial Sequence
  Description of Artificial Sequence: Synthetic oligonucleotide
ucaaacggugauguuuucu

SEQ ID NO: 1305817 - RNA, 19 nt, Artificial Sequence
  Description of Artificial Sequence: Synthetic oligonucleotide
agcccgcgcggccagaccc

SEQ ID NO: 1305818 - RNA, 19 nt, Artificial Sequence
  Description of Artificial Sequence: Synthetic oligonucleotide
ucuucgugccgcucucagg

SEQ ID NO: 1305819 - RNA, 19 nt, Artificial Sequence
  Description of Artificial Sequence: Synthetic oligonucleotide
guagaagucguaggccugg

SEQ ID NO: 1305820 - RNA, 19 nt, Artificial Sequence
  Description of Artificial Sequence: Synthetic oligonucleotide
acgugcagcgaaucgcccg

SEQ ID NO: 1305821 - RNA, 19 nt, Artificial Sequence
  Description of Artificial Sequence: Synthetic oligonucleotide
uacagugauuccgaauaca

SEQ ID NO: 1305822 - RNA, 19 nt, Artificial Sequence
  Description of Artificial Sequence: Synthetic oligonucleotide
ugccucuaugcugcuaugg

SEQ ID NO: 1305823 - RNA, 19 nt, Artificial Sequence
  Description of Artificial Sequence: Synthetic oligonucleotide
aagagccgcgcgugguugg

SEQ ID NO: 1305824 - RNA, 19 nt, Artificial Sequence
  Description of Artificial Sequence: Synthetic oligonucleotide
uaaguaaggagaguccauu

SEQ ID NO: 1305825 - RNA, 19 nt, Artificial Sequence
  Description of Artificial Sequence: Synthetic oligonucleotide
ugcuuuccggcauguaucu

SEQ ID NO: 1305826 - RNA, 19 nt, Artificial Sequence
  Description of Artificial Sequence: Synthetic oligonucleotide
gucgaaaccgcaguacacc

SEQ ID NO: 1305827 - RNA, 19 nt, Artificial Sequence
  Description of Artificial Sequence: Synthetic oligonucleotide
uuaccugucugugauuuau

SEQ ID NO: 1305828 - RNA, 19 nt, Artificial Sequence
  Description of Artificial Sequence: Synthetic oligonucleotide
ucguuucugagcaccccgc

SEQ ID NO: 1305829 - RNA, 19 nt, Artificial Sequence
  Description of Artificial Sequence: Synthetic oligonucleotide
agucaacuuguggaugaac

SEQ ID NO: 1305830 - RNA, 19 nt, Artificial Sequence
  Description of Artificial Sequence: Synthetic oligonucleotide
cgaaugauggauaaaucug

SEQ ID NO: 1305831 - RNA, 19 nt, Artificial Sequence
  Description of Artificial Sequence: Synthetic oligonucleotide
gcuuguguacaccuuuuag

SEQ ID NO: 1305832 - RNA, 19 nt, Artificial Sequence
  Description of Artificial Sequence: Synthetic oligonucleotide
agcucggucuucgugccgc

SEQ ID NO: 1305833 - RNA, 19 nt, Artificial Sequence
  Description of Artificial Sequence: Synthetic oligonucleotide
acgguaaaggugccccagg

SEQ ID NO: 1305834 - RNA, 19 nt, Artificial Sequence
  Description of Artificial Sequence: Synthetic oligonucleotide
augaacucguauccagaca

SEQ ID NO: 1305835 - RNA, 19 nt, Artificial Sequence
  Description of Artificial Sequence: Synthetic oligonucleotide
gauccgcccagcugcaccc

SEQ ID NO: 1305836 - RNA, 19 nt, Artificial Sequence
  Description of Artificial Sequence: Synthetic oligonucleotide
uccagggucgagaacuaau

SEQ ID NO: 1305837 - RNA, 19 nt, Artificial Sequence
  Description of Artificial Sequence: Synthetic oligonucleotide
aaacagcguugccagcaga

SEQ ID NO: 1305838 - RNA, 19 nt, Artificial Sequence
  Description of Artificial Sequence: Synthetic oligonucleotide
gauccgauccgcccagcug

SEQ ID NO: 1305839 - RNA, 19 nt, Artificial Sequence
  Description of Artificial Sequence: Synthetic oligonucleotide
guaccuuucuacagaauca

SEQ ID NO: 1305840 - RNA, 19 nt, Artificial Sequence
  Description of Artificial Sequence: Synthetic oligonucleotide
cuucagguaccuuucuaca

SEQ ID NO: 1305841 - RNA, 19 nt, Artificial Sequence
  Description of Artificial Sequence: Synthetic oligonucleotide
acagugauuccgaauacau

SEQ ID NO: 1305842 - RNA, 19 nt, Artificial Sequence
  Description of Artificial Sequence: Synthetic oligonucleotide
ggggagaaaagugaagagc

SEQ ID NO: 1305843 - RNA, 19 nt, Artificial Sequence
  Description of Artificial Sequence: Synthetic oligonucleotide
gacgaaugauggauaaauc

SEQ ID NO: 1305844 - RNA, 19 nt, Artificial Sequence
  Description of Artificial Sequence: Synthetic oligonucleotide
cucggugccgccaguauuc

SEQ ID NO: 1305845 - RNA, 19 nt, Artificial Sequence
  Description of Artificial Sequence: Synthetic oligonucleotide
augcugcuaugguaaagug

SEQ ID NO: 1305846 - RNA, 19 nt, Artificial Sequence
  Description of Artificial Sequence: Synthetic oligonucleotide
gggucgagaacuaauucag

SEQ ID NO: 1305847 - RNA, 19 nt, Artificial Sequence
  Description of Artificial Sequence: Synthetic oligonucleotide
ucggucuucgugccgcucu

SEQ ID NO: 1305848 - RNA, 19 nt, Artificial Sequence
  Description of Artificial Sequence: Synthetic oligonucleotide
accgucuggggcgacgagc

SEQ ID NO: 1305849 - RNA, 19 nt, Artificial Sequence
  Description of Artificial Sequence: Synthetic oligonucleotide
cugauaaaguucaaacggu

SEQ ID NO: 1305850 - RNA, 19 nt, Artificial Sequence
  Description of Artificial Sequence: Synthetic oligonucleotide
cagcgaaucgcccgugggg

SEQ ID NO: 1305851 - RNA, 19 nt, Artificial Sequence
  Description of Artificial Sequence: Synthetic oligonucleotide
cagugauuccgaauacauc

SEQ ID NO: 1305852 - RNA, 19 nt, Artificial Sequence
  Description of Artificial Sequence: Synthetic oligonucleotide
agagugcccaugcggaagu

SEQ ID NO: 1305853 - RNA, 19 nt, Artificial Sequence
  Description of Artificial Sequence: Synthetic oligonucleotide
agagguacagugauuccga

SEQ ID NO: 1305854 - RNA, 19 nt, Artificial Sequence
  Description of Artificial Sequence: Synthetic oligonucleotide
ucuaugcugcuaugguaaa

SEQ ID NO: 1305855 - RNA, 19 nt, Artificial Sequence
  Description of Artificial Sequence: Synthetic oligonucleotide
uuacauuguaaggccuugu

SEQ ID NO: 1305856 - RNA, 19 nt, Artificial Sequence
  Description of Artificial Sequence: Synthetic oligonucleotide
gguaaagugcuuguguaca

SEQ ID NO: 1305857 - RNA, 19 nt, Artificial Sequence
  Description of Artificial Sequence: Synthetic oligonucleotide
gacgagcccgcccugcggc

SEQ ID NO: 1305858 - RNA, 19 nt, Artificial Sequence
  Description of Artificial Sequence: Synthetic oligonucleotide
uuuccggcauguaucuaua

SEQ ID NO: 1305859 - RNA, 19 nt, Artificial Sequence
  Description of Artificial Sequence: Synthetic oligonucleotide
uccgcgaagagccgcgcgu

SEQ ID NO: 1305860 - RNA, 19 nt, Artificial Sequence
  Description of Artificial Sequence: Synthetic oligonucleotide
cuaugguaaagugcuugug

SEQ ID NO: 1305861 - RNA, 19 nt, Artificial Sequence
  Description of Artificial Sequence: Synthetic oligonucleotide
cauccgauacccucgggga

SEQ ID NO: 1305862 - RNA, 19 nt, Artificial Sequence
  Description of Artificial Sequence: Synthetic oligonucleotide
cucgcuggaaguggaacag

SEQ ID NO: 1305863 - RNA, 19 nt, Artificial Sequence
  Description of Artificial Sequence: Synthetic oligonucleotide
aauuagagguacagugauu

SEQ ID NO: 1305864 - RNA, 19 nt, Artificial Sequence
  Description of Artificial Sequence: Synthetic oligonucleotide
auauguuguccaauuacua

SEQ ID NO: 1305865 - RNA, 19 nt, Artificial Sequence
  Description of Artificial Sequence: Synthetic oligonucleotide
agcugcauaaugugaucaa

SEQ ID NO: 1305866 - RNA, 19 nt, Artificial Sequence
  Description of Artificial Sequence: Synthetic oligonucleotide
gggcacucgguagagacgg

SEQ ID NO: 1305867 - RNA, 19 nt, Artificial Sequence
  Description of Artificial Sequence: Synthetic oligonucleotide
agugcccaugcggaagugg

SEQ ID NO: 1305868 - RNA, 19 nt, Artificial Sequence
  Description of Artificial Sequence: Synthetic oligonucleotide
ucuggggcgacgagcccgc

SEQ ID NO: 1305869 - RNA, 19 nt, Artificial Sequence
  Description of Artificial Sequence: Synthetic oligonucleotide
aagacgaaugauggauaaa

SEQ ID NO: 1305870 - RNA, 19 nt, Artificial Sequence
  Description of Artificial Sequence: Synthetic oligonucleotide
cuaugcugcuaugguaaag

SEQ ID NO: 1305871 - RNA, 19 nt, Artificial Sequence
  Description of Artificial Sequence: Synthetic oligonucleotide
cagggucgagaacuaauuc

SEQ ID NO: 1305872 - RNA, 19 nt, Artificial Sequence
  Description of Artificial Sequence: Synthetic oligonucleotide
guugucgagcacgguaaag

SEQ ID NO: 1305873 - RNA, 19 nt, Artificial Sequence
  Description of Artificial Sequence: Synthetic oligonucleotide
ccgaauacaucuucuccag

SEQ ID NO: 1305874 - RNA, 19 nt, Artificial Sequence
  Description of Artificial Sequence: Synthetic oligonucleotide
aguagaagucguaggccug

SEQ ID NO: 1305875 - RNA, 19 nt, Artificial Sequence
  Description of Artificial Sequence: Synthetic oligonucleotide
cagcugauccgauccgccc

SEQ ID NO: 1305876 - RNA, 19 nt, Artificial Sequence
  Description of Artificial Sequence: Synthetic oligonucleotide
agcgaaucgcccguggggu

SEQ ID NO: 1305877 - RNA, 19 nt, Artificial Sequence
  Description of Artificial Sequence: Synthetic oligonucleotide
accuuucuacagaaucauc

SEQ ID NO: 1305878 - RNA, 19 nt, Artificial Sequence
  Description of Artificial Sequence: Synthetic oligonucleotide
aucauccgauacccucggg

SEQ ID NO: 1305879 - RNA, 19 nt, Artificial Sequence
  Description of Artificial Sequence: Synthetic oligonucleotide
gucuggggcgacgagcccg

SEQ ID NO: 1305880 - RNA, 19 nt, Artificial Sequence
  Description of Artificial Sequence: Synthetic oligonucleotide
agcgccuggcgccccuugc

SEQ ID NO: 1305881 - RNA, 19 nt, Artificial Sequence
  Description of Artificial Sequence: Synthetic oligonucleotide
ucgcccguggggucgaaac

SEQ ID NO: 1305882 - RNA, 19 nt, Artificial Sequence
  Description of Artificial Sequence: Synthetic oligonucleotide
cugcacccggcauccauag

SEQ ID NO: 1305883 - RNA, 19 nt, Artificial Sequence
  Description of Artificial Sequence: Synthetic oligonucleotide
cgagaacuaauucagaaaa

SEQ ID NO: 1305884 - RNA, 19 nt, Artificial Sequence
  Description of Artificial Sequence: Synthetic oligonucleotide
ucccacgagcgcgaucacg

SEQ ID NO: 1305885 - RNA, 19 nt, Artificial Sequence
  Description of Artificial Sequence: Synthetic oligonucleotide
cacgagcgcgaucacguug

SEQ ID NO: 1305886 - RNA, 19 nt, Artificial Sequence
  Description of Artificial Sequence: Synthetic oligonucleotide
ccggcauguaucuauaaca

SEQ ID NO: 1305887 - RNA, 19 nt, Artificial Sequence
  Description of Artificial Sequence: Synthetic oligonucleotide
gaacucguauccagacaug

SEQ ID NO: 1305888 - RNA, 19 nt, Artificial Sequence
  Description of Artificial Sequence: Synthetic oligonucleotide
agccgcgcgugguuggccg

SEQ ID NO: 1305889 - RNA, 19 nt, Artificial Sequence
  Description of Artificial Sequence: Synthetic oligonucleotide
uugaggcgacucugcacgc

SEQ ID NO: 1305890 - RNA, 19 nt, Artificial Sequence
  Description of Artificial Sequence: Synthetic oligonucleotide
cuaaaacacucucaggauu

SEQ ID NO: 1305891 - RNA, 19 nt, Artificial Sequence
  Description of Artificial Sequence: Synthetic oligonucleotide
cacucgguagagacggcuc

SEQ ID NO: 1305892 - RNA, 19 nt, Artificial Sequence
  Description of Artificial Sequence: Synthetic oligonucleotide
uucaaacggugauguuuuc

SEQ ID NO: 1305893 - RNA, 19 nt, Artificial Sequence
  Description of Artificial Sequence: Synthetic oligonucleotide
cagagugcccaugcggaag

SEQ ID NO: 1305894 - RNA, 19 nt, Artificial Sequence
  Description of Artificial Sequence: Synthetic oligonucleotide
gauacccucggggaccauc

SEQ ID NO: 1305895 - RNA, 19 nt, Artificial Sequence
  Description of Artificial Sequence: Synthetic oligonucleotide
caguauuccccgcgcgccc

SEQ ID NO: 1305896 - RNA, 19 nt, Artificial Sequence
  Description of Artificial Sequence: Synthetic oligonucleotide
gagcgcgaucacguugugg

SEQ ID NO: 1305897 - RNA, 19 nt, Artificial Sequence
  Description of Artificial Sequence: Synthetic oligonucleotide
cagaauauguuguccaauu

SEQ ID NO: 1305898 - RNA, 19 nt, Artificial Sequence
  Description of Artificial Sequence: Synthetic oligonucleotide
cuuuccggcauguaucuau

SEQ ID NO: 1305899 - RNA, 19 nt, Artificial Sequence
  Description of Artificial Sequence: Synthetic oligonucleotide
uuccggcauguaucuauaa

SEQ ID NO: 1305900 - RNA, 19 nt, Artificial Sequence
  Description of Artificial Sequence: Synthetic oligonucleotide
cacgugcagcgaaucgccc

SEQ ID NO: 1305901 - RNA, 19 nt, Artificial Sequence
  Description of Artificial Sequence: Synthetic oligonucleotide
acgagcgcgaucacguugu

SEQ ID NO: 1305902 - RNA, 19 nt, Artificial Sequence
  Description of Artificial Sequence: Synthetic oligonucleotide
cggcauguaucuauaacac

SEQ ID NO: 1305903 - RNA, 19 nt, Artificial Sequence
  Description of Artificial Sequence: Synthetic oligonucleotide
ggcggcguugucgagcacg

SEQ ID NO: 1305904 - RNA, 19 nt, Artificial Sequence
  Description of Artificial Sequence: Synthetic oligonucleotide
auacccucggggaccaucu

SEQ ID NO: 1305905 - RNA, 19 nt, Artificial Sequence
  Description of Artificial Sequence: Synthetic oligonucleotide
cuucuguuaucauccgaua

SEQ ID NO: 1305906 - RNA, 19 nt, Artificial Sequence
  Description of Artificial Sequence: Synthetic oligonucleotide
agccggcucagcagagugc

SEQ ID NO: 1305907 - RNA, 19 nt, Artificial Sequence
  Description of Artificial Sequence: Synthetic oligonucleotide
ccacgugcagcgaaucgcc

SEQ ID NO: 1305908 - RNA, 19 nt, Artificial Sequence
  Description of Artificial Sequence: Synthetic oligonucleotide
ccaauuacuaaaacacucu

SEQ ID NO: 1305909 - RNA, 19 nt, Artificial Sequence
  Description of Artificial Sequence: Synthetic oligonucleotide
uccgauccgcccagcugca

SEQ ID NO: 1305910 - RNA, 19 nt, Artificial Sequence
  Description of Artificial Sequence: Synthetic oligonucleotide
cacguuguggccggcucgc

SEQ ID NO: 1305911 - RNA, 19 nt, Artificial Sequence
  Description of Artificial Sequence: Synthetic oligonucleotide
aaaccgcaguacaccgucu

SEQ ID NO: 1305912 - RNA, 19 nt, Artificial Sequence
  Description of Artificial Sequence: Synthetic oligonucleotide
aaguggccgcccacugagg

SEQ ID NO: 1305913 - RNA, 19 nt, Artificial Sequence
  Description of Artificial Sequence: Synthetic oligonucleotide
ccuugaacaggccccgcgc

SEQ ID NO: 1305914 - RNA, 19 nt, Artificial Sequence
  Description of Artificial Sequence: Synthetic oligonucleotide
gagcucggucuucgugccg

SEQ ID NO: 1305915 - RNA, 19 nt, Artificial Sequence
  Description of Artificial Sequence: Synthetic oligonucleotide
gccgccaguauuccccgcg

SEQ ID NO: 1305916 - RNA, 19 nt, Artificial Sequence
  Description of Artificial Sequence: Synthetic oligonucleotide
gcgaucacguuguggccgg

SEQ ID NO: 1305917 - RNA, 19 nt, Artificial Sequence
  Description of Artificial Sequence: Synthetic oligonucleotide
acagcguugccagcagacu

SEQ ID NO: 1305918 - RNA, 19 nt, Artificial Sequence
  Description of Artificial Sequence: Synthetic oligonucleotide
uggggcgacgagcccgccc

SEQ ID NO: 1305919 - RNA, 19 nt, Artificial Sequence
  Description of Artificial Sequence: Synthetic oligonucleotide
uucgugccgcucucaggga

SEQ ID NO: 1305920 - RNA, 19 nt, Artificial Sequence
  Description of Artificial Sequence: Synthetic oligonucleotide
gggaccaucuggaauggca

SEQ ID NO: 1305921 - RNA, 19 nt, Artificial Sequence
  Description of Artificial Sequence: Synthetic oligonucleotide
gccaguauuccccgcgcgc

SEQ ID NO: 1305922 - RNA, 19 nt, Artificial Sequence
  Description of Artificial Sequence: Synthetic oligonucleotide
gcugauccgauccgcccag

SEQ ID NO: 1305923 - RNA, 19 nt, Artificial Sequence
  Description of Artificial Sequence: Synthetic oligonucleotide
acucuuggucagacaugac

SEQ ID NO: 1305924 - RNA, 19 nt, Artificial Sequence
  Description of Artificial Sequence: Synthetic oligonucleotide
cacgcagucggcgcucagc

SEQ ID NO: 1305925 - RNA, 19 nt, Artificial Sequence
  Description of Artificial Sequence: Synthetic oligonucleotide
gcccguggggucgaaaccg

SEQ ID NO: 1305926 - RNA, 19 nt, Artificial Sequence
  Description of Artificial Sequence: Synthetic oligonucleotide
ggccuuguggauauuccac

SEQ ID NO: 1305927 - RNA, 19 nt, Artificial Sequence
  Description of Artificial Sequence: Synthetic oligonucleotide
ugaggcgacucugcacgcu

SEQ ID NO: 1305928 - RNA, 19 nt, Artificial Sequence
  Description of Artificial Sequence: Synthetic oligonucleotide
ucgcuggaaguggaacaga

SEQ ID NO: 1305929 - RNA, 19 nt, Artificial Sequence
  Description of Artificial Sequence: Synthetic oligonucleotide
ccgucuggggcgacgagcc

SEQ ID NO: 1305930 - RNA, 19 nt, Artificial Sequence
  Description of Artificial Sequence: Synthetic oligonucleotide
ggucgaaaccgcaguacac

SEQ ID NO: 1305931 - RNA, 19 nt, Artificial Sequence
  Description of Artificial Sequence: Synthetic oligonucleotide
uacccucggggaccaucug

SEQ ID NO: 1305932 - RNA, 19 nt, Artificial Sequence
  Description of Artificial Sequence: Synthetic oligonucleotide
uuguggccggcucgcugga

SEQ ID NO: 1305933 - RNA, 19 nt, Artificial Sequence
  Description of Artificial Sequence: Synthetic oligonucleotide
ccaacaaagucagcaggug

SEQ ID NO: 1305934 - RNA, 19 nt, Artificial Sequence
  Description of Artificial Sequence: Synthetic oligonucleotide
acccggcauccauagcgcu

SEQ ID NO: 1305935 - RNA, 19 nt, Artificial Sequence
  Description of Artificial Sequence: Synthetic oligonucleotide
ucggugccgccaguauucc

SEQ ID NO: 1305936 - RNA, 19 nt, Artificial Sequence
  Description of Artificial Sequence: Synthetic oligonucleotide
ccaguauuccccgcgcgcc

SEQ ID NO: 1305937 - RNA, 19 nt, Artificial Sequence
  Description of Artificial Sequence: Synthetic oligonucleotide
ggcauguaucuauaacacu

SEQ ID NO: 1305938 - RNA, 19 nt, Artificial Sequence
  Description of Artificial Sequence: Synthetic oligonucleotide
ucguaggccuggagcacuu

SEQ ID NO: 1305939 - RNA, 19 nt, Artificial Sequence
  Description of Artificial Sequence: Synthetic oligonucleotide
ggcguugucgagcacggua

SEQ ID NO: 1305940 - RNA, 19 nt, Artificial Sequence
  Description of Artificial Sequence: Synthetic oligonucleotide
ggcgguccaagaguuccgg

SEQ ID NO: 1305941 - RNA, 19 nt, Artificial Sequence
  Description of Artificial Sequence: Synthetic oligonucleotide
gaguuccgggagcucgguc

SEQ ID NO: 1305942 - RNA, 19 nt, Artificial Sequence
  Description of Artificial Sequence: Synthetic oligonucleotide
gccggcucagcagagugcc

SEQ ID NO: 1305943 - RNA, 19 nt, Artificial Sequence
  Description of Artificial Sequence: Synthetic oligonucleotide
gcgcgcguuggccugcacg

SEQ ID NO: 1305944 - RNA, 19 nt, Artificial Sequence
  Description of Artificial Sequence: Synthetic oligonucleotide
gcggcgguccaagaguucc

SEQ ID NO: 1305945 - RNA, 19 nt, Artificial Sequence
  Description of Artificial Sequence: Synthetic oligonucleotide
agcguugccagcagacuuu

SEQ ID NO: 1305946 - RNA, 19 nt, Artificial Sequence
  Description of Artificial Sequence: Synthetic oligonucleotide
uuccagggucgagaacuaa

SEQ ID NO: 1305947 - RNA, 19 nt, Artificial Sequence
  Description of Artificial Sequence: Synthetic oligonucleotide
ucugcacgcucagccggcu

SEQ ID NO: 1305948 - RNA, 19 nt, Artificial Sequence
  Description of Artificial Sequence: Synthetic oligonucleotide
ccaguuguacuuguaauua

SEQ ID NO: 1305949 - RNA, 19 nt, Artificial Sequence
  Description of Artificial Sequence: Synthetic oligonucleotide
ugcggcgguccaagaguuc

SEQ ID NO: 1305950 - RNA, 19 nt, Artificial Sequence
  Description of Artificial Sequence: Synthetic oligonucleotide
cauagcgcuggaagaggua

SEQ ID NO: 1305951 - RNA, 19 nt, Artificial Sequence
  Description of Artificial Sequence: Synthetic oligonucleotide
cugacuccgccuucuguua

SEQ ID NO: 1305952 - RNA, 19 nt, Artificial Sequence
  Description of Artificial Sequence: Synthetic oligonucleotide
ggcgacucugcacgcucag

SEQ ID NO: 1305953 - RNA, 19 nt, Artificial Sequence
  Description of Artificial Sequence: Synthetic oligonucleotide
ccgcuuuucgggcucuuug

SEQ ID NO: 1305954 - RNA, 19 nt, Artificial Sequence
  Description of Artificial Sequence: Synthetic oligonucleotide
agaguuccgggagcucggu

SEQ ID NO: 1305955 - RNA, 19 nt, Artificial Sequence
  Description of Artificial Sequence: Synthetic oligonucleotide
cgcgcguuggccugcacgc

SEQ ID NO: 1305956 - RNA, 19 nt, Artificial Sequence
  Description of Artificial Sequence: Synthetic oligonucleotide
ggggucgaaaccgcaguac

SEQ ID NO: 1305957 - RNA, 19 nt, Artificial Sequence
  Description of Artificial Sequence: Synthetic oligonucleotide
ggucgagaacuaauucaga

SEQ ID NO: 1305958 - RNA, 19 nt, Artificial Sequence
  Description of Artificial Sequence: Synthetic oligonucleotide
cgcgaucacguuguggccg

SEQ ID NO: 1305959 - RNA, 19 nt, Artificial Sequence
  Description of Artificial Sequence: Synthetic oligonucleotide
gcccagcugauccgauccg

SEQ ID NO: 1305960 - RNA, 19 nt, Artificial Sequence
  Description of Artificial Sequence: Synthetic oligonucleotide
gcggcguugucgagcacgg

SEQ ID NO: 1305961 - RNA, 19 nt, Artificial Sequence
  Description of Artificial Sequence: Synthetic oligonucleotide
gcgcucagcgccuggcgcc

SEQ ID NO: 1305962 - RNA, 19 nt, Artificial Sequence
  Description of Artificial Sequence: Synthetic oligonucleotide
ggcucgcuggaaguggaac

SEQ ID NO: 1305963 - RNA, 19 nt, Artificial Sequence
  Description of Artificial Sequence: Synthetic oligonucleotide
gccgcucucagggaagaac

SEQ ID NO: 1305964 - RNA, 19 nt, Artificial Sequence
  Description of Artificial Sequence: Synthetic oligonucleotide
gcgacgagcccgcccugcg

SEQ ID NO: 1305965 - RNA, 19 nt, Artificial Sequence
  Description of Artificial Sequence: Synthetic oligonucleotide
ccccacgugcagcgaaucg

SEQ ID NO: 1305966 - RNA, 19 nt, Artificial Sequence
  Description of Artificial Sequence: Synthetic oligonucleotide
uggcgccccuugcuccggc

SEQ ID NO: 1305967 - RNA, 19 nt, Artificial Sequence
  Description of Artificial Sequence: Synthetic oligonucleotide
gcucccggaaccaggcggc

SEQ ID NO: 1305968 - RNA, 19 nt, Artificial Sequence
  Description of Artificial Sequence: Synthetic oligonucleotide
ucccggaaccaggcggcgu

SEQ ID NO: 1305969 - RNA, 19 nt, Artificial Sequence
  Description of Artificial Sequence: Synthetic oligonucleotide
gccucuaugcugcuauggu

SEQ ID NO: 1305970 - RNA, 19 nt, Artificial Sequence
  Description of Artificial Sequence: Synthetic oligonucleotide
ccucuaugcugcuauggua

SEQ ID NO: 1305971 - RNA, 19 nt, Artificial Sequence
  Description of Artificial Sequence: Synthetic oligonucleotide
cugauccgauccgcccagc

SEQ ID NO: 1305972 - RNA, 19 nt, Artificial Sequence
  Description of Artificial Sequence: Synthetic oligonucleotide
gcguugucgagcacgguaa

SEQ ID NO: 1305973 - RNA, 19 nt, Artificial Sequence
  Description of Artificial Sequence: Synthetic oligonucleotide
gcgcgaucacguuguggcc

SEQ ID NO: 1305974 - RNA, 19 nt, Artificial Sequence
  Description of Artificial Sequence: Synthetic oligonucleotide
guuggccgccaggcucucg

SEQ ID NO: 1305975 - RNA, 19 nt, Artificial Sequence
  Description of Artificial Sequence: Synthetic oligonucleotide
agaacuccgccaggcucau

SEQ ID NO: 1305976 - RNA, 19 nt, Artificial Sequence
  Description of Artificial Sequence: Synthetic oligonucleotide
cgaaucgcccguggggucg

SEQ ID NO: 1305977 - RNA, 19 nt, Artificial Sequence
  Description of Artificial Sequence: Synthetic oligonucleotide
agguaccuuucuacagaau

SEQ ID NO: 1305978 - RNA, 19 nt, Artificial Sequence
  Description of Artificial Sequence: Synthetic oligonucleotide
ccaggcggcguugucgagc

SEQ ID NO: 1305979 - RNA, 19 nt, Artificial Sequence
  Description of Artificial Sequence: Synthetic oligonucleotide
cucggggaccaucuggaau

SEQ ID NO: 1305980 - RNA, 19 nt, Artificial Sequence
  Description of Artificial Sequence: Synthetic oligonucleotide
ccguccgcgaagagccgcg

SEQ ID NO: 1305981 - RNA, 19 nt, Artificial Sequence
  Description of Artificial Sequence: Synthetic oligonucleotide
gaaucgcccguggggucga

SEQ ID NO: 1305982 - RNA, 19 nt, Artificial Sequence
  Description of Artificial Sequence: Synthetic oligonucleotide
caccccgcuuuucgggcuc

SEQ ID NO: 1305983 - RNA, 19 nt, Artificial Sequence
  Description of Artificial Sequence: Synthetic oligonucleotide
caccacgcgcagcccgcgc

SEQ ID NO: 1305984 - RNA, 19 nt, Artificial Sequence
  Description of Artificial Sequence: Synthetic oligonucleotide
gagccgcgcgugguuggcc

SEQ ID NO: 1305985 - RNA, 19 nt, Artificial Sequence
  Description of Artificial Sequence: Synthetic oligonucleotide
cgacaggggcacucgguag

SEQ ID NO: 1305986 - RNA, 19 nt, Artificial Sequence
  Description of Artificial Sequence: Synthetic oligonucleotide
cccguggggucgaaaccgc

SEQ ID NO: 1305987 - RNA, 19 nt, Artificial Sequence
  Description of Artificial Sequence: Synthetic oligonucleotide
cccugcggcgguccaagag

SEQ ID NO: 1305988 - RNA, 19 nt, Artificial Sequence
  Description of Artificial Sequence: Synthetic oligonucleotide
gugccccacgugcagcgaa

SEQ ID NO: 1305989 - RNA, 19 nt, Artificial Sequence
  Description of Artificial Sequence: Synthetic oligonucleotide
aggcgacucugcacgcuca

SEQ ID NO: 1305990 - RNA, 19 nt, Artificial Sequence
  Description of Artificial Sequence: Synthetic oligonucleotide
cccaugcggaaguggccgc

SEQ ID NO: 1305991 - RNA, 19 nt, Artificial Sequence
  Description of Artificial Sequence: Synthetic oligonucleotide
cagcguugccagcagacuu

SEQ ID NO: 1305992 - RNA, 19 nt, Artificial Sequence
  Description of Artificial Sequence: Synthetic oligonucleotide
cugcacgcucagccggcuc

SEQ ID NO: 1305993 - RNA, 19 nt, Artificial Sequence
  Description of Artificial Sequence: Synthetic oligonucleotide
guuccagggucgagaacua

SEQ ID NO: 1305994 - RNA, 19 nt, Artificial Sequence
  Description of Artificial Sequence: Synthetic oligonucleotide
gucguaggccuggagcacu

SEQ ID NO: 1305995 - RNA, 19 nt, Artificial Sequence
  Description of Artificial Sequence: Synthetic oligonucleotide
cccacgagcgcgaucacgu

SEQ ID NO: 1305996 - RNA, 19 nt, Artificial Sequence
  Description of Artificial Sequence: Synthetic oligonucleotide
gcugcauaaugugaucaau

SEQ ID NO: 1305997 - RNA, 19 nt, Artificial Sequence
  Description of Artificial Sequence: Synthetic oligonucleotide
cugccgcagggcgcgcgcg

SEQ ID NO: 1305998 - RNA, 19 nt, Artificial Sequence
  Description of Artificial Sequence: Synthetic oligonucleotide
ccgccaguauuccccgcgc

SEQ ID NO: 1305999 - RNA, 19 nt, Artificial Sequence
  Description of Artificial Sequence: Synthetic oligonucleotide
gugccgcucucagggaaga

SEQ ID NO: 1306000 - RNA, 19 nt, Artificial Sequence
  Description of Artificial Sequence: Synthetic oligonucleotide
ggggcgacgagcccgcccu

SEQ ID NO: 1306001 - RNA, 19 nt, Artificial Sequence
  Description of Artificial Sequence: Synthetic oligonucleotide
gugcagcgaaucgcccgug

SEQ ID NO: 1306002 - RNA, 19 nt, Artificial Sequence
  Description of Artificial Sequence: Synthetic oligonucleotide
ccgcucucagggaagaacu

SEQ ID NO: 1306003 - RNA, 19 nt, Artificial Sequence
  Description of Artificial Sequence: Synthetic oligonucleotide
cagucaacuuguggaugaa

SEQ ID NO: 1306004 - RNA, 19 nt, Artificial Sequence
  Description of Artificial Sequence: Synthetic oligonucleotide
cagcccgcgcggccagacc

SEQ ID NO: 1306005 - RNA, 19 nt, Artificial Sequence
  Description of Artificial Sequence: Synthetic oligonucleotide
ugccgcucucagggaagaa

SEQ ID NO: 1306006 - RNA, 19 nt, Artificial Sequence
  Description of Artificial Sequence: Synthetic oligonucleotide
guccaugaacaagcuuugu

SEQ ID NO: 1306007 - RNA, 19 nt, Artificial Sequence
  Description of Artificial Sequence: Synthetic oligonucleotide
ccaugcggaaguggccgcc

SEQ ID NO: 1306008 - RNA, 19 nt, Artificial Sequence
  Description of Artificial Sequence: Synthetic oligonucleotide
gcccguccgcaccacgcgc

SEQ ID NO: 1306009 - RNA, 19 nt, Artificial Sequence
  Description of Artificial Sequence: Synthetic oligonucleotide
cgcguuggccugcacgcag

SEQ ID NO: 1306010 - RNA, 19 nt, Artificial Sequence
  Description of Artificial Sequence: Synthetic oligonucleotide
ccauguuuugaagacgaau

SEQ ID NO: 1306011 - RNA, 19 nt, Artificial Sequence
  Description of Artificial Sequence: Synthetic oligonucleotide
cgccaguauuccccgcgcg

SEQ ID NO: 1306012 - RNA, 19 nt, Artificial Sequence
  Description of Artificial Sequence: Synthetic oligonucleotide
gcucaugcccucggggcuc

SEQ ID NO: 1306013 - RNA, 19 nt, Artificial Sequence
  Description of Artificial Sequence: Synthetic oligonucleotide
ggcgacgagcccgcccugc

SEQ ID NO: 1306014 - RNA, 19 nt, Artificial Sequence
  Description of Artificial Sequence: Synthetic oligonucleotide
cugcggcgguccaagaguu

SEQ ID NO: 1306015 - RNA, 19 nt, Artificial Sequence
  Description of Artificial Sequence: Synthetic oligonucleotide
ccugcggcgguccaagagu

SEQ ID NO: 1306016 - RNA, 19 nt, Artificial Sequence
  Description of Artificial Sequence: Synthetic oligonucleotide
cggcgguccaagaguuccg

SEQ ID NO: 1306017 - RNA, 19 nt, Artificial Sequence
  Description of Artificial Sequence: Synthetic oligonucleotide
ccagggucgagaacuaauu

SEQ ID NO: 1306018 - RNA, 19 nt, Artificial Sequence
  Description of Artificial Sequence: Synthetic oligonucleotide
ccugccgcagggcgcgcgc

SEQ ID NO: 1306019 - RNA, 19 nt, Artificial Sequence
  Description of Artificial Sequence: Synthetic oligonucleotide
ggcgccccuugcuccggcc

SEQ ID NO: 1306020 - RNA, 19 nt, Artificial Sequence
  Description of Artificial Sequence: Synthetic oligonucleotide
cccguccgcgaagagccgc

SEQ ID NO: 1306021 - RNA, 19 nt, Artificial Sequence
  Description of Artificial Sequence: Synthetic oligonucleotide
ccgcccguccgcgaagagc

SEQ ID NO: 1306022 - RNA, 19 nt, Artificial Sequence
  Description of Artificial Sequence: Synthetic oligonucleotide
accccgcuuuucgggcucu

SEQ ID NO: 1306023 - RNA, 19 nt, Artificial Sequence
  Description of Artificial Sequence: Synthetic oligonucleotide
cgcccguggggucgaaacc

SEQ ID NO: 1306024 - RNA, 19 nt, Artificial Sequence
  Description of Artificial Sequence: Synthetic oligonucleotide
aaucgcccguggggucgaa

SEQ ID NO: 1306025 - RNA, 19 nt, Artificial Sequence
  Description of Artificial Sequence: Synthetic oligonucleotide
ccgacaggggcacucggua

SEQ ID NO: 1306026 - RNA, 19 nt, Artificial Sequence
  Description of Artificial Sequence: Synthetic oligonucleotide
cgacgagcccgcccugcgg

SEQ ID NO: 1306027 - RNA, 19 nt, Artificial Sequence
  Description of Artificial Sequence: Synthetic oligonucleotide
aucgcccguggggucgaaa

SEQ ID NO: 1306028 - RNA, 19 nt, Artificial Sequence
  Description of Artificial Sequence: Synthetic oligonucleotide
ccaagaguuccgggagcuc

SEQ ID NO: 1306029 - RNA, 19 nt, Artificial Sequence
  Description of Artificial Sequence: Synthetic oligonucleotide
cgcgugguuggccgccagg

SEQ ID NO: 1306030 - RNA, 19 nt, Artificial Sequence
  Description of Artificial Sequence: Synthetic oligonucleotide
ggcauccauagcgcuggaa

SEQ ID NO: 1306031 - RNA, 19 nt, Artificial Sequence
  Description of Artificial Sequence: Synthetic oligonucleotide
cggggaccaucuggaaugg

SEQ ID NO: 1306032 - RNA, 19 nt, Artificial Sequence
  Description of Artificial Sequence: Synthetic oligonucleotide
gcugcacccggcauccaua

SEQ ID NO: 1306033 - RNA, 19 nt, Artificial Sequence
  Description of Artificial Sequence: Synthetic oligonucleotide
ccgcgaagagccgcgcgug

SEQ ID NO: 1306034 - RNA, 19 nt, Artificial Sequence
  Description of Artificial Sequence: Synthetic oligonucleotide
cccguccgcaccacgcgca

SEQ ID NO: 1306035 - RNA, 19 nt, Artificial Sequence
  Description of Artificial Sequence: Synthetic oligonucleotide
ccggcucgcuggaagugga

SEQ ID NO: 1306036 - RNA, 19 nt, Artificial Sequence
  Description of Artificial Sequence: Synthetic oligonucleotide
gccgcgcgugguuggccgc

SEQ ID NO: 1306037 - RNA, 19 nt, Artificial Sequence
  Description of Artificial Sequence: Synthetic oligonucleotide
cuggggcgacgagcccgcc

SEQ ID NO: 1306038 - RNA, 19 nt, Artificial Sequence
  Description of Artificial Sequence: Synthetic oligonucleotide
gagcccgcccugcggcggu

SEQ ID NO: 1306039 - RNA, 19 nt, Artificial Sequence
  Description of Artificial Sequence: Synthetic oligonucleotide
ccguggggucgaaaccgca

SEQ ID NO: 1306040 - RNA, 19 nt, Artificial Sequence
  Description of Artificial Sequence: Synthetic oligonucleotide
gccgcccguccgcgaagag

SEQ ID NO: 1306041 - RNA, 19 nt, Artificial Sequence
  Description of Artificial Sequence: Synthetic oligonucleotide
gcccguccgcgaagagccg

SEQ ID NO: 1306042 - RNA, 19 nt, Artificial Sequence
  Description of Artificial Sequence: Synthetic oligonucleotide
ggugccccacgugcagcga

SEQ ID NO: 1306043 - RNA, 19 nt, Artificial Sequence
  Description of Artificial Sequence: Synthetic oligonucleotide
gggcgacgagcccgcccug

SEQ ID NO: 1306044 - RNA, 19 nt, Artificial Sequence
  Description of Artificial Sequence: Synthetic oligonucleotide
gcaccccgcuuuucgggcu

SEQ ID NO: 1306045 - RNA, 19 nt, Artificial Sequence
  Description of Artificial Sequence: Synthetic oligonucleotide
ggcgcgcgcguuggccugc

SEQ ID NO: 1306046 - RNA, 19 nt, Artificial Sequence
  Description of Artificial Sequence: Synthetic oligonucleotide
cgaaaccgcaguacaccgu

SEQ ID NO: 1306047 - RNA, 19 nt, Artificial Sequence
  Description of Artificial Sequence: Synthetic oligonucleotide
gcgaagagccgcgcguggu

SEQ ID NO: 1306048 - RNA, 19 nt, Artificial Sequence
  Description of Artificial Sequence: Synthetic oligonucleotide
gcuuuccggcauguaucua

SEQ ID NO: 1306049 - RNA, 19 nt, Artificial Sequence
  Description of Artificial Sequence: Synthetic oligonucleotide
ccucggggaccaucuggaa

SEQ ID NO: 1306050 - RNA, 19 nt, Artificial Sequence
  Description of Artificial Sequence: Synthetic oligonucleotide
cguugucgagcacgguaaa

SEQ ID NO: 1306051 - RNA, 19 nt, Artificial Sequence
  Description of Artificial Sequence: Synthetic oligonucleotide
cuccgccuucuguuaucau

SEQ ID NO: 1306052 - RNA, 19 nt, Artificial Sequence
  Description of Artificial Sequence: Synthetic oligonucleotide
gcccgcgcggccagacccc

SEQ ID NO: 1306053 - RNA, 19 nt, Artificial Sequence
  Description of Artificial Sequence: Synthetic oligonucleotide
ccgcgcgugguuggccgcc

SEQ ID NO: 1306054 - RNA, 19 nt, Artificial Sequence
  Description of Artificial Sequence: Synthetic oligonucleotide
cgagcccgcccugcggcgg

SEQ ID NO: 1306055 - RNA, 19 nt, Artificial Sequence
  Description of Artificial Sequence: Synthetic oligonucleotide
cgagcgcgaucacguugug

SEQ ID NO: 1306056 - RNA, 19 nt, Artificial Sequence
  Description of Artificial Sequence: Synthetic oligonucleotide
gcgcguuggccugcacgca

SEQ ID NO: 1306057 - RNA, 19 nt, Artificial Sequence
  Description of Artificial Sequence: Synthetic oligonucleotide
cguccgcgaagagccgcgc

SEQ ID NO: 1306058 - RNA, 19 nt, Artificial Sequence
  Description of Artificial Sequence: Synthetic oligonucleotide
gcguuggccugcacgcagu

SEQ ID NO: 1306059 - RNA, 19 nt, Artificial Sequence
  Description of Artificial Sequence: Synthetic oligonucleotide
gcccugcggcgguccaaga

SEQ ID NO: 1306060 - RNA, 19 nt, Artificial Sequence
  Description of Artificial Sequence: Synthetic oligonucleotide
ccgauccgcccagcugcac

SEQ ID NO: 1306061 - RNA, 19 nt, Artificial Sequence
  Description of Artificial Sequence: Synthetic oligonucleotide
cccggaaccaggcggcguu

SEQ ID NO: 1306062 - RNA, 19 nt, Artificial Sequence
  Description of Artificial Sequence: Synthetic oligonucleotide
cagcugcacccggcaucca

SEQ ID NO: 1306063 - RNA, 19 nt, Artificial Sequence
  Description of Artificial Sequence: Synthetic oligonucleotide
cgaagagccgcgcgugguu

SEQ ID NO: 1306064 - RNA, 19 nt, Artificial Sequence
  Description of Artificial Sequence: Synthetic oligonucleotide
cccucggugccgccaguau

SEQ ID NO: 1306065 - RNA, 19 nt, Artificial Sequence
  Description of Artificial Sequence: Synthetic oligonucleotide
cggcucgcuggaaguggaa

SEQ ID NO: 1306066 - RNA, 19 nt, Artificial Sequence
  Description of Artificial Sequence: Synthetic oligonucleotide
ccacgagcgcgaucacguu

SEQ ID NO: 1306067 - RNA, 19 nt, Artificial Sequence
  Description of Artificial Sequence: Synthetic oligonucleotide
cggaaccaggcggcguugu

SEQ ID NO: 1306068 - RNA, 19 nt, Artificial Sequence
  Description of Artificial Sequence: Synthetic oligonucleotide
cccgcuuuucgggcucuuu

SEQ ID NO: 1306069 - RNA, 19 nt, Artificial Sequence
  Description of Artificial Sequence: Synthetic oligonucleotide
cggcguugucgagcacggu

SEQ ID NO: 1306070 - RNA, 19 nt, Artificial Sequence
  Description of Artificial Sequence: Synthetic oligonucleotide
aauuaaucagcauccaucc

SEQ ID NO: 1306071 - RNA, 19 nt, Artificial Sequence
  Description of Artificial Sequence: Synthetic oligonucleotide
uuauuaaucaagcaguuca

SEQ ID NO: 1306072 - RNA, 19 nt, Artificial Sequence
  Description of Artificial Sequence: Synthetic oligonucleotide
aaaagaauagguuuguaga

SEQ ID NO: 1306073 - RNA, 19 nt, Artificial Sequence
  Description of Artificial Sequence: Synthetic oligonucleotide
gaaaagugaauuuauuggg

SEQ ID NO: 1306074 - RNA, 19 nt, Artificial Sequence
  Description of Artificial Sequence: Synthetic oligonucleotide
ugaacagugaugcuuacgg

SEQ ID NO: 1306075 - RNA, 19 nt, Artificial Sequence
  Description of Artificial Sequence: Synthetic oligonucleotide
ugcuauaggacucagaugu

SEQ ID NO: 1306076 - RNA, 19 nt, Artificial Sequence
  Description of Artificial Sequence: Synthetic oligonucleotide
uaugcaaugacaaauuaca

SEQ ID NO: 1306077 - RNA, 19 nt, Artificial Sequence
  Description of Artificial Sequence: Synthetic oligonucleotide
uguagauuacagcaaaggg

SEQ ID NO: 1306078 - RNA, 19 nt, Artificial Sequence
  Description of Artificial Sequence: Synthetic oligonucleotide
cuaguuacuacaaaggggc

SEQ ID NO: 1306079 - RNA, 19 nt, Artificial Sequence
  Description of Artificial Sequence: Synthetic oligonucleotide
aauuuaggaauuauuaauc

SEQ ID NO: 1306080 - RNA, 19 nt, Artificial Sequence
  Description of Artificial Sequence: Synthetic oligonucleotide
uaaaagaauagguuuguag

SEQ ID NO: 1306081 - RNA, 19 nt, Artificial Sequence
  Description of Artificial Sequence: Synthetic oligonucleotide
agcugaaugauaugaaacc

SEQ ID NO: 1306082 - RNA, 19 nt, Artificial Sequence
  Description of Artificial Sequence: Synthetic oligonucleotide
acugauauaccuugaaaac

SEQ ID NO: 1306083 - RNA, 19 nt, Artificial Sequence
  Description of Artificial Sequence: Synthetic oligonucleotide
uccaacaucccauagacgc

SEQ ID NO: 1306084 - RNA, 19 nt, Artificial Sequence
  Description of Artificial Sequence: Synthetic oligonucleotide
agaaugaauacucaggugu

SEQ ID NO: 1306085 - RNA, 19 nt, Artificial Sequence
  Description of Artificial Sequence: Synthetic oligonucleotide
uucauaauauacuuuaccu

SEQ ID NO: 1306086 - RNA, 19 nt, Artificial Sequence
  Description of Artificial Sequence: Synthetic oligonucleotide
auauacuuuaccuuuaggu

SEQ ID NO: 1306087 - RNA, 19 nt, Artificial Sequence
  Description of Artificial Sequence: Synthetic oligonucleotide
auagacgcaucucuaagcc

SEQ ID NO: 1306088 - RNA, 19 nt, Artificial Sequence
  Description of Artificial Sequence: Synthetic oligonucleotide
aaucaacugauauaccuug

SEQ ID NO: 1306089 - RNA, 19 nt, Artificial Sequence
  Description of Artificial Sequence: Synthetic oligonucleotide
ggaauuauuaaucaagcag

SEQ ID NO: 1306090 - RNA, 19 nt, Artificial Sequence
  Description of Artificial Sequence: Synthetic oligonucleotide
uauuuugguaaccauauau

SEQ ID NO: 1306091 - RNA, 19 nt, Artificial Sequence
  Description of Artificial Sequence: Synthetic oligonucleotide
aauauacuuuaccuuuagg

SEQ ID NO: 1306092 - RNA, 19 nt, Artificial Sequence
  Description of Artificial Sequence: Synthetic oligonucleotide
ucucugaggauaauuaaag

SEQ ID NO: 1306093 - RNA, 19 nt, Artificial Sequence
  Description of Artificial Sequence: Synthetic oligonucleotide
uuuaccuuuagguuuggag

SEQ ID NO: 1306094 - RNA, 19 nt, Artificial Sequence
  Description of Artificial Sequence: Synthetic oligonucleotide
auaccuugaaaacacauug

SEQ ID NO: 1306095 - RNA, 19 nt, Artificial Sequence
  Description of Artificial Sequence: Synthetic oligonucleotide
uaagugagcacuaaagacu

SEQ ID NO: 1306096 - RNA, 19 nt, Artificial Sequence
  Description of Artificial Sequence: Synthetic oligonucleotide
uaugaaaccuucauaauau

SEQ ID NO: 1306097 - RNA, 19 nt, Artificial Sequence
  Description of Artificial Sequence: Synthetic oligonucleotide
ugauauaccuugaaaacac

SEQ ID NO: 1306098 - RNA, 19 nt, Artificial Sequence
  Description of Artificial Sequence: Synthetic oligonucleotide
augaagacugaugauaacc

SEQ ID NO: 1306099 - RNA, 19 nt, Artificial Sequence
  Description of Artificial Sequence: Synthetic oligonucleotide
uucuaagugagcacuaaag

SEQ ID NO: 1306100 - RNA, 19 nt, Artificial Sequence
  Description of Artificial Sequence: Synthetic oligonucleotide
aaugacauguguuauguua

SEQ ID NO: 1306101 - RNA, 19 nt, Artificial Sequence
  Description of Artificial Sequence: Synthetic oligonucleotide
ugcauucauaguuagaaca

SEQ ID NO: 1306102 - RNA, 19 nt, Artificial Sequence
  Description of Artificial Sequence: Synthetic oligonucleotide
uauguuaucuaucucuaga

SEQ ID NO: 1306103 - RNA, 19 nt, Artificial Sequence
  Description of Artificial Sequence: Synthetic oligonucleotide
aaggguuacuuacaauugg

SEQ ID NO: 1306104 - RNA, 19 nt, Artificial Sequence
  Description of Artificial Sequence: Synthetic oligonucleotide
ugggaauuaaucagcaucc

SEQ ID NO: 1306105 - RNA, 19 nt, Artificial Sequence
  Description of Artificial Sequence: Synthetic oligonucleotide
uuuacuccaauuuaggaau

SEQ ID NO: 1306106 - RNA, 19 nt, Artificial Sequence
  Description of Artificial Sequence: Synthetic oligonucleotide
uguguuauguuaucuaucu

SEQ ID NO: 1306107 - RNA, 19 nt, Artificial Sequence
  Description of Artificial Sequence: Synthetic oligonucleotide
ugaggauaauuaaaguaag

SEQ ID NO: 1306108 - RNA, 19 nt, Artificial Sequence
  Description of Artificial Sequence: Synthetic oligonucleotide
auguuaucuaucucuagac

SEQ ID NO: 1306109 - RNA, 19 nt, Artificial Sequence
  Description of Artificial Sequence: Synthetic oligonucleotide
ucuaagugagcacuaaaga

SEQ ID NO: 1306110 - RNA, 19 nt, Artificial Sequence
  Description of Artificial Sequence: Synthetic oligonucleotide
ggauggauaaguuaaaagc

SEQ ID NO: 1306111 - RNA, 19 nt, Artificial Sequence
  Description of Artificial Sequence: Synthetic oligonucleotide
uccaauuuaggaauuauua

SEQ ID NO: 1306112 - RNA, 19 nt, Artificial Sequence
  Description of Artificial Sequence: Synthetic oligonucleotide
gaacaaucaacugauauac

SEQ ID NO: 1306113 - RNA, 19 nt, Artificial Sequence
  Description of Artificial Sequence: Synthetic oligonucleotide
agaauucucauucacccag

SEQ ID NO: 1306114 - RNA, 19 nt, Artificial Sequence
  Description of Artificial Sequence: Synthetic oligonucleotide
ucuagacacaacaaaugcc

SEQ ID NO: 1306115 - RNA, 19 nt, Artificial Sequence
  Description of Artificial Sequence: Synthetic oligonucleotide
aaagaauagguuuguagau

SEQ ID NO: 1306116 - RNA, 19 nt, Artificial Sequence
  Description of Artificial Sequence: Synthetic oligonucleotide
acaaucaacugauauaccu

SEQ ID NO: 1306117 - RNA, 19 nt, Artificial Sequence
  Description of Artificial Sequence: Synthetic oligonucleotide
gguaguaaaacauuuugcc

SEQ ID NO: 1306118 - RNA, 19 nt, Artificial Sequence
  Description of Artificial Sequence: Synthetic oligonucleotide
gaucuagguaaccacacag

SEQ ID NO: 1306119 - RNA, 19 nt, Artificial Sequence
  Description of Artificial Sequence: Synthetic oligonucleotide
aaacugaaaagccuuugca

SEQ ID NO: 1306120 - RNA, 19 nt, Artificial Sequence
  Description of Artificial Sequence: Synthetic oligonucleotide
uauuaaucaagcaguucag

SEQ ID NO: 1306121 - RNA, 19 nt, Artificial Sequence
  Description of Artificial Sequence: Synthetic oligonucleotide
agguuuguagauuacagca

SEQ ID NO: 1306122 - RNA, 19 nt, Artificial Sequence
  Description of Artificial Sequence: Synthetic oligonucleotide
uccuuuagaaaaugcagag

SEQ ID NO: 1306123 - RNA, 19 nt, Artificial Sequence
  Description of Artificial Sequence: Synthetic oligonucleotide
aaggggaaaccgcauauag

SEQ ID NO: 1306124 - RNA, 19 nt, Artificial Sequence
  Description of Artificial Sequence: Synthetic oligonucleotide
cuaagugagcacuaaagac

SEQ ID NO: 1306125 - RNA, 19 nt, Artificial Sequence
  Description of Artificial Sequence: Synthetic oligonucleotide
uccagagugaacuaccuug

SEQ ID NO: 1306126 - RNA, 19 nt, Artificial Sequence
  Description of Artificial Sequence: Synthetic oligonucleotide
ugcugucugacuuugaugu

SEQ ID NO: 1306127 - RNA, 19 nt, Artificial Sequence
  Description of Artificial Sequence: Synthetic oligonucleotide
ugaagacugaugauaacca

SEQ ID NO: 1306128 - RNA, 19 nt, Artificial Sequence
  Description of Artificial Sequence: Synthetic oligonucleotide
ucuuacagaccaaagggga

SEQ ID NO: 1306129 - RNA, 19 nt, Artificial Sequence
  Description of Artificial Sequence: Synthetic oligonucleotide
uugguaaccauauaugaaa

SEQ ID NO: 1306130 - RNA, 19 nt, Artificial Sequence
  Description of Artificial Sequence: Synthetic oligonucleotide
acugaaaagccuuugcaug

SEQ ID NO: 1306131 - RNA, 19 nt, Artificial Sequence
  Description of Artificial Sequence: Synthetic oligonucleotide
cacauaaaggcuuugugac

SEQ ID NO: 1306132 - RNA, 19 nt, Artificial Sequence
  Description of Artificial Sequence: Synthetic oligonucleotide
ucugaggauaauuaaagua

SEQ ID NO: 1306133 - RNA, 19 nt, Artificial Sequence
  Description of Artificial Sequence: Synthetic oligonucleotide
ugaaugauaugaaaccuuc

SEQ ID NO: 1306134 - RNA, 19 nt, Artificial Sequence
  Description of Artificial Sequence: Synthetic oligonucleotide
uguguugcaaguucuaagu

SEQ ID NO: 1306135 - RNA, 19 nt, Artificial Sequence
  Description of Artificial Sequence: Synthetic oligonucleotide
ucucuagacacaacaaaug

SEQ ID NO: 1306136 - RNA, 19 nt, Artificial Sequence
  Description of Artificial Sequence: Synthetic oligonucleotide
aagauuucuuuccaggaau

SEQ ID NO: 1306137 - RNA, 19 nt, Artificial Sequence
  Description of Artificial Sequence: Synthetic oligonucleotide
gauaaguuaaaagcuuucc

SEQ ID NO: 1306138 - RNA, 19 nt, Artificial Sequence
  Description of Artificial Sequence: Synthetic oligonucleotide
aacagugaugcuuacggaa

SEQ ID NO: 1306139 - RNA, 19 nt, Artificial Sequence
  Description of Artificial Sequence: Synthetic oligonucleotide
aauucugcuuauuggcuug

SEQ ID NO: 1306140 - RNA, 19 nt, Artificial Sequence
  Description of Artificial Sequence: Synthetic oligonucleotide
uguugcaaguucuaaguga

SEQ ID NO: 1306141 - RNA, 19 nt, Artificial Sequence
  Description of Artificial Sequence: Synthetic oligonucleotide
caacaagaaaccauucuag

SEQ ID NO: 1306142 - RNA, 19 nt, Artificial Sequence
  Description of Artificial Sequence: Synthetic oligonucleotide
uuuuaugugcagauucucu

SEQ ID NO: 1306143 - RNA, 19 nt, Artificial Sequence
  Description of Artificial Sequence: Synthetic oligonucleotide
cucuagacacaacaaaugc

SEQ ID NO: 1306144 - RNA, 19 nt, Artificial Sequence
  Description of Artificial Sequence: Synthetic oligonucleotide
uuauuggguuuucuuacag

SEQ ID NO: 1306145 - RNA, 19 nt, Artificial Sequence
  Description of Artificial Sequence: Synthetic oligonucleotide
uuugguaaccauauaugaa

SEQ ID NO: 1306146 - RNA, 19 nt, Artificial Sequence
  Description of Artificial Sequence: Synthetic oligonucleotide
gaauuaaucagcauccauc

SEQ ID NO: 1306147 - RNA, 19 nt, Artificial Sequence
  Description of Artificial Sequence: Synthetic oligonucleotide
uguuaucuaucucuagaca

SEQ ID NO: 1306148 - RNA, 19 nt, Artificial Sequence
  Description of Artificial Sequence: Synthetic oligonucleotide
aggauggauaaguuaaaag

SEQ ID NO: 1306149 - RNA, 19 nt, Artificial Sequence
  Description of Artificial Sequence: Synthetic oligonucleotide
caagguauaaagaaacuga

SEQ ID NO: 1306150 - RNA, 19 nt, Artificial Sequence
  Description of Artificial Sequence: Synthetic oligonucleotide
aguuacuacaaaggggccc

SEQ ID NO: 1306151 - RNA, 19 nt, Artificial Sequence
  Description of Artificial Sequence: Synthetic oligonucleotide
auaugaaaccuucauaaua

SEQ ID NO: 1306152 - RNA, 19 nt, Artificial Sequence
  Description of Artificial Sequence: Synthetic oligonucleotide
uaaacaccuggcuauauuc

SEQ ID NO: 1306153 - RNA, 19 nt, Artificial Sequence
  Description of Artificial Sequence: Synthetic oligonucleotide
aggaacuaaagaagaaacc

SEQ ID NO: 1306154 - RNA, 19 nt, Artificial Sequence
  Description of Artificial Sequence: Synthetic oligonucleotide
aauagguuuguagauuaca

SEQ ID NO: 1306155 - RNA, 19 nt, Artificial Sequence
  Description of Artificial Sequence: Synthetic oligonucleotide
aagacugaugauaaccaag

SEQ ID NO: 1306156 - RNA, 19 nt, Artificial Sequence
  Description of Artificial Sequence: Synthetic oligonucleotide
aaaaggggaaaccgcauau

SEQ ID NO: 1306157 - RNA, 19 nt, Artificial Sequence
  Description of Artificial Sequence: Synthetic oligonucleotide
cuugaaaacacauugucua

SEQ ID NO: 1306158 - RNA, 19 nt, Artificial Sequence
  Description of Artificial Sequence: Synthetic oligonucleotide
gaugcauucauaguuagaa

SEQ ID NO: 1306159 - RNA, 19 nt, Artificial Sequence
  Description of Artificial Sequence: Synthetic oligonucleotide
aaccauucuaggaugucac

SEQ ID NO: 1306160 - RNA, 19 nt, Artificial Sequence
  Description of Artificial Sequence: Synthetic oligonucleotide
agguuacccaaguacaguc

SEQ ID NO: 1306161 - RNA, 19 nt, Artificial Sequence
  Description of Artificial Sequence: Synthetic oligonucleotide
aaccgcauauagaucaugg

SEQ ID NO: 1306162 - RNA, 19 nt, Artificial Sequence
  Description of Artificial Sequence: Synthetic oligonucleotide
uaucucuagacacaacaaa

SEQ ID NO: 1306163 - RNA, 19 nt, Artificial Sequence
  Description of Artificial Sequence: Synthetic oligonucleotide
aaaacacaacuuaggagag

SEQ ID NO: 1306164 - RNA, 19 nt, Artificial Sequence
  Description of Artificial Sequence: Synthetic oligonucleotide
ucucauucacccaggacca

SEQ ID NO: 1306165 - RNA, 19 nt, Artificial Sequence
  Description of Artificial Sequence: Synthetic oligonucleotide
agacugaugauaaccaagg

SEQ ID NO: 1306166 - RNA, 19 nt, Artificial Sequence
  Description of Artificial Sequence: Synthetic oligonucleotide
auacuuuaccuuuagguuu

SEQ ID NO: 1306167 - RNA, 19 nt, Artificial Sequence
  Description of Artificial Sequence: Synthetic oligonucleotide
aaccauauaugaaaugaca

SEQ ID NO: 1306168 - RNA, 19 nt, Artificial Sequence
  Description of Artificial Sequence: Synthetic oligonucleotide
cugaggauaauuaaaguaa

SEQ ID NO: 1306169 - RNA, 19 nt, Artificial Sequence
  Description of Artificial Sequence: Synthetic oligonucleotide
aacaaucaacugauauacc

SEQ ID NO: 1306170 - RNA, 19 nt, Artificial Sequence
  Description of Artificial Sequence: Synthetic oligonucleotide
uuauguuaucuaucucuag

SEQ ID NO: 1306171 - RNA, 19 nt, Artificial Sequence
  Description of Artificial Sequence: Synthetic oligonucleotide
accgcauauagaucauggc

SEQ ID NO: 1306172 - RNA, 19 nt, Artificial Sequence
  Description of Artificial Sequence: Synthetic oligonucleotide
agacacaacaaaugccuag

SEQ ID NO: 1306173 - RNA, 19 nt, Artificial Sequence
  Description of Artificial Sequence: Synthetic oligonucleotide
guugcaaguucuaagugag

SEQ ID NO: 1306174 - RNA, 19 nt, Artificial Sequence
  Description of Artificial Sequence: Synthetic oligonucleotide
cucagcugaacauugugac

SEQ ID NO: 1306175 - RNA, 19 nt, Artificial Sequence
  Description of Artificial Sequence: Synthetic oligonucleotide
uauagaucauggcucggga

SEQ ID NO: 1306176 - RNA, 19 nt, Artificial Sequence
  Description of Artificial Sequence: Synthetic oligonucleotide
auagguuuguagauuacag

SEQ ID NO: 1306177 - RNA, 19 nt, Artificial Sequence
  Description of Artificial Sequence: Synthetic oligonucleotide
agaauagguuuguagauua

SEQ ID NO: 1306178 - RNA, 19 nt, Artificial Sequence
  Description of Artificial Sequence: Synthetic oligonucleotide
acugaugauaaccaaggua

SEQ ID NO: 1306179 - RNA, 19 nt, Artificial Sequence
  Description of Artificial Sequence: Synthetic oligonucleotide
augcuuacggaauucuuug

SEQ ID NO: 1306180 - RNA, 19 nt, Artificial Sequence
  Description of Artificial Sequence: Synthetic oligonucleotide
gacccaaaaggggaaaccg

SEQ ID NO: 1306181 - RNA, 19 nt, Artificial Sequence
  Description of Artificial Sequence: Synthetic oligonucleotide
guugcugugauaaaugcca

SEQ ID NO: 1306182 - RNA, 19 nt, Artificial Sequence
  Description of Artificial Sequence: Synthetic oligonucleotide
ucuaaaagaauagguuugu

SEQ ID NO: 1306183 - RNA, 19 nt, Artificial Sequence
  Description of Artificial Sequence: Synthetic oligonucleotide
aaggguuuacuccaauuua

SEQ ID NO: 1306184 - RNA, 19 nt, Artificial Sequence
  Description of Artificial Sequence: Synthetic oligonucleotide
gauuacagcaaagggaguc

SEQ ID NO: 1306185 - RNA, 19 nt, Artificial Sequence
  Description of Artificial Sequence: Synthetic oligonucleotide
gauggauaaguuaaaagcu

SEQ ID NO: 1306186 - RNA, 19 nt, Artificial Sequence
  Description of Artificial Sequence: Synthetic oligonucleotide
acuacaaaggggcccaaca

SEQ ID NO: 1306187 - RNA, 19 nt, Artificial Sequence
  Description of Artificial Sequence: Synthetic oligonucleotide
uuacagaccaaaggggaag

SEQ ID NO: 1306188 - RNA, 19 nt, Artificial Sequence
  Description of Artificial Sequence: Synthetic oligonucleotide
aaaccauucuaggauguca

SEQ ID NO: 1306189 - RNA, 19 nt, Artificial Sequence
  Description of Artificial Sequence: Synthetic oligonucleotide
uucucagcugaacauugug

SEQ ID NO: 1306190 - RNA, 19 nt, Artificial Sequence
  Description of Artificial Sequence: Synthetic oligonucleotide
aguaugaagacugaugaua

SEQ ID NO: 1306191 - RNA, 19 nt, Artificial Sequence
  Description of Artificial Sequence: Synthetic oligonucleotide
ugugcugagaaagguauga

SEQ ID NO: 1306192 - RNA, 19 nt, Artificial Sequence
  Description of Artificial Sequence: Synthetic oligonucleotide
cugaugauaaccaagguau

SEQ ID NO: 1306193 - RNA, 19 nt, Artificial Sequence
  Description of Artificial Sequence: Synthetic oligonucleotide
cacauugucuaaaagaaua

SEQ ID NO: 1306194 - RNA, 19 nt, Artificial Sequence
  Description of Artificial Sequence: Synthetic oligonucleotide
uguagggauucucuugaga

SEQ ID NO: 1306195 - RNA, 19 nt, Artificial Sequence
  Description of Artificial Sequence: Synthetic oligonucleotide
ccuaguuacuacaaagggg

SEQ ID NO: 1306196 - RNA, 19 nt, Artificial Sequence
  Description of Artificial Sequence: Synthetic oligonucleotide
accauucuaggaugucacc

SEQ ID NO: 1306197 - RNA, 19 nt, Artificial Sequence
  Description of Artificial Sequence: Synthetic oligonucleotide
aauuauuaaucaagcaguu

SEQ ID NO: 1306198 - RNA, 19 nt, Artificial Sequence
  Description of Artificial Sequence: Synthetic oligonucleotide
cauggcaacaauuucugga

SEQ ID NO: 1306199 - RNA, 19 nt, Artificial Sequence
  Description of Artificial Sequence: Synthetic oligonucleotide
gaaggguuacuuacaauug

SEQ ID NO: 1306200 - RNA, 19 nt, Artificial Sequence
  Description of Artificial Sequence: Synthetic oligonucleotide
uaguuagaacaaucaacug

SEQ ID NO: 1306201 - RNA, 19 nt, Artificial Sequence
  Description of Artificial Sequence: Synthetic oligonucleotide
uggaugcauucauaguuag

SEQ ID NO: 1306202 - RNA, 19 nt, Artificial Sequence
  Description of Artificial Sequence: Synthetic oligonucleotide
gagcugaaugauaugaaac

SEQ ID NO: 1306203 - RNA, 19 nt, Artificial Sequence
  Description of Artificial Sequence: Synthetic oligonucleotide
ggaacuaaagaagaaacca

SEQ ID NO: 1306204 - RNA, 19 nt, Artificial Sequence
  Description of Artificial Sequence: Synthetic oligonucleotide
uaccuugugcugagaaagg

SEQ ID NO: 1306205 - RNA, 19 nt, Artificial Sequence
  Description of Artificial Sequence: Synthetic oligonucleotide
ugcuuacggaauucuuugg

SEQ ID NO: 1306206 - RNA, 19 nt, Artificial Sequence
  Description of Artificial Sequence: Synthetic oligonucleotide
cauggguaagauuucuuuc

SEQ ID NO: 1306207 - RNA, 19 nt, Artificial Sequence
  Description of Artificial Sequence: Synthetic oligonucleotide
ucuucccacauaaaggcuu

SEQ ID NO: 1306208 - RNA, 19 nt, Artificial Sequence
  Description of Artificial Sequence: Synthetic oligonucleotide
uggguaagauuucuuucca

SEQ ID NO: 1306209 - RNA, 19 nt, Artificial Sequence
  Description of Artificial Sequence: Synthetic oligonucleotide
uuacagcuaaacaccuggc

SEQ ID NO: 1306210 - RNA, 19 nt, Artificial Sequence
  Description of Artificial Sequence: Synthetic oligonucleotide
cauauaugaaaugacaugu

SEQ ID NO: 1306211 - RNA, 19 nt, Artificial Sequence
  Description of Artificial Sequence: Synthetic oligonucleotide
uuauuggcuugcucccucg

SEQ ID NO: 1306212 - RNA, 19 nt, Artificial Sequence
  Description of Artificial Sequence: Synthetic oligonucleotide
uauuggguuuucuuacaga

SEQ ID NO: 1306213 - RNA, 19 nt, Artificial Sequence
  Description of Artificial Sequence: Synthetic oligonucleotide
ugguaaccauauaugaaau

SEQ ID NO: 1306214 - RNA, 19 nt, Artificial Sequence
  Description of Artificial Sequence: Synthetic oligonucleotide
cuagacacaacaaaugccu

SEQ ID NO: 1306215 - RNA, 19 nt, Artificial Sequence
  Description of Artificial Sequence: Synthetic oligonucleotide
uucaugcuuaugcaaugac

SEQ ID NO: 1306216 - RNA, 19 nt, Artificial Sequence
  Description of Artificial Sequence: Synthetic oligonucleotide
uaccuugaaaacacauugu

SEQ ID NO: 1306217 - RNA, 19 nt, Artificial Sequence
  Description of Artificial Sequence: Synthetic oligonucleotide
guuacccaaguacagucug

SEQ ID NO: 1306218 - RNA, 19 nt, Artificial Sequence
  Description of Artificial Sequence: Synthetic oligonucleotide
acauugucuaaaagaauag

SEQ ID NO: 1306219 - RNA, 19 nt, Artificial Sequence
  Description of Artificial Sequence: Synthetic oligonucleotide
augucuguugcugugauaa

SEQ ID NO: 1306220 - RNA, 19 nt, Artificial Sequence
  Description of Artificial Sequence: Synthetic oligonucleotide
ucugggguacucuuucaug

SEQ ID NO: 1306221 - RNA, 19 nt, Artificial Sequence
  Description of Artificial Sequence: Synthetic oligonucleotide
aggguuacuuacaauuggg

SEQ ID NO: 1306222 - RNA, 19 nt, Artificial Sequence
  Description of Artificial Sequence: Synthetic oligonucleotide
uacucagguguguugcaag

SEQ ID NO: 1306223 - RNA, 19 nt, Artificial Sequence
  Description of Artificial Sequence: Synthetic oligonucleotide
cugagaaagguaugaauga

SEQ ID NO: 1306224 - RNA, 19 nt, Artificial Sequence
  Description of Artificial Sequence: Synthetic oligonucleotide
aagaauagguuuguagauu

SEQ ID NO: 1306225 - RNA, 19 nt, Artificial Sequence
  Description of Artificial Sequence: Synthetic oligonucleotide
aggacucagauguucucag

SEQ ID NO: 1306226 - RNA, 19 nt, Artificial Sequence
  Description of Artificial Sequence: Synthetic oligonucleotide
acucuuucaugcuuaugca

SEQ ID NO: 1306227 - RNA, 19 nt, Artificial Sequence
  Description of Artificial Sequence: Synthetic oligonucleotide
cuagguaaccacacagcug

SEQ ID NO: 1306228 - RNA, 19 nt, Artificial Sequence
  Description of Artificial Sequence: Synthetic oligonucleotide
uacagaccaaaggggaagg

SEQ ID NO: 1306229 - RNA, 19 nt, Artificial Sequence
  Description of Artificial Sequence: Synthetic oligonucleotide
ggcaacaauuucuggaugc

SEQ ID NO: 1306230 - RNA, 19 nt, Artificial Sequence
  Description of Artificial Sequence: Synthetic oligonucleotide
uaaggauggauaaguuaaa

SEQ ID NO: 1306231 - RNA, 19 nt, Artificial Sequence
  Description of Artificial Sequence: Synthetic oligonucleotide
aacaauuucuggaugcauu

SEQ ID NO: 1306232 - RNA, 19 nt, Artificial Sequence
  Description of Artificial Sequence: Synthetic oligonucleotide
uuugcccugagguaaggau

SEQ ID NO: 1306233 - RNA, 19 nt, Artificial Sequence
  Description of Artificial Sequence: Synthetic oligonucleotide
aggguuuacuccaauuuag

SEQ ID NO: 1306234 - RNA, 19 nt, Artificial Sequence
  Description of Artificial Sequence: Synthetic oligonucleotide
aacaaaugccuaguuacua

SEQ ID NO: 1306235 - RNA, 19 nt, Artificial Sequence
  Description of Artificial Sequence: Synthetic oligonucleotide
uauuggcuugcucccucgg

SEQ ID NO: 1306236 - RNA, 19 nt, Artificial Sequence
  Description of Artificial Sequence: Synthetic oligonucleotide
uagagcugaaugauaugaa

SEQ ID NO: 1306237 - RNA, 19 nt, Artificial Sequence
  Description of Artificial Sequence: Synthetic oligonucleotide
uuucaugcuuaugcaauga

SEQ ID NO: 1306238 - RNA, 19 nt, Artificial Sequence
  Description of Artificial Sequence: Synthetic oligonucleotide
gaugauaaccaagguauaa

SEQ ID NO: 1306239 - RNA, 19 nt, Artificial Sequence
  Description of Artificial Sequence: Synthetic oligonucleotide
auauaugaaaugacaugug

SEQ ID NO: 1306240 - RNA, 19 nt, Artificial Sequence
  Description of Artificial Sequence: Synthetic oligonucleotide
uaugaagacugaugauaac

SEQ ID NO: 1306241 - RNA, 19 nt, Artificial Sequence
  Description of Artificial Sequence: Synthetic oligonucleotide
uaguuacuacaaaggggcc

SEQ ID NO: 1306242 - RNA, 19 nt, Artificial Sequence
  Description of Artificial Sequence: Synthetic oligonucleotide
agugaugcuuacggaauuc

SEQ ID NO: 1306243 - RNA, 19 nt, Artificial Sequence
  Description of Artificial Sequence: Synthetic oligonucleotide
aaacaccuggcuauauucu

SEQ ID NO: 1306244 - RNA, 19 nt, Artificial Sequence
  Description of Artificial Sequence: Synthetic oligonucleotide
acacuuguagauucuccca

SEQ ID NO: 1306245 - RNA, 19 nt, Artificial Sequence
  Description of Artificial Sequence: Synthetic oligonucleotide
cacuuguagauucucccac

SEQ ID NO: 1306246 - RNA, 19 nt, Artificial Sequence
  Description of Artificial Sequence: Synthetic oligonucleotide
agauucagguuacccaagu

SEQ ID NO: 1306247 - RNA, 19 nt, Artificial Sequence
  Description of Artificial Sequence: Synthetic oligonucleotide
ccauauaugaaaugacaug

SEQ ID NO: 1306248 - RNA, 19 nt, Artificial Sequence
  Description of Artificial Sequence: Synthetic oligonucleotide
ucaccacaguccaaauuga

SEQ ID NO: 1306249 - RNA, 19 nt, Artificial Sequence
  Description of Artificial Sequence: Synthetic oligonucleotide
uuacccaaguacagucuga

SEQ ID NO: 1306250 - RNA, 19 nt, Artificial Sequence
  Description of Artificial Sequence: Synthetic oligonucleotide
aagucucugaggauaauua

SEQ ID NO: 1306251 - RNA, 19 nt, Artificial Sequence
  Description of Artificial Sequence: Synthetic oligonucleotide
cugauauaccuugaaaaca

SEQ ID NO: 1306252 - RNA, 19 nt, Artificial Sequence
  Description of Artificial Sequence: Synthetic oligonucleotide
acccaaaaggggaaaccgc

SEQ ID NO: 1306253 - RNA, 19 nt, Artificial Sequence
  Description of Artificial Sequence: Synthetic oligonucleotide
auuaaucagcauccaucca

SEQ ID NO: 1306254 - RNA, 19 nt, Artificial Sequence
  Description of Artificial Sequence: Synthetic oligonucleotide
aucucuagacacaacaaau

SEQ ID NO: 1306255 - RNA, 19 nt, Artificial Sequence
  Description of Artificial Sequence: Synthetic oligonucleotide
cacaacuuaggagagaaaa

SEQ ID NO: 1306256 - RNA, 19 nt, Artificial Sequence
  Description of Artificial Sequence: Synthetic oligonucleotide
agugaacuaccuugugcug

SEQ ID NO: 1306257 - RNA, 19 nt, Artificial Sequence
  Description of Artificial Sequence: Synthetic oligonucleotide
agucucugaggauaauuaa

SEQ ID NO: 1306258 - RNA, 19 nt, Artificial Sequence
  Description of Artificial Sequence: Synthetic oligonucleotide
auaugaaaugacauguguu

SEQ ID NO: 1306259 - RNA, 19 nt, Artificial Sequence
  Description of Artificial Sequence: Synthetic oligonucleotide
gaagacugaugauaaccaa

SEQ ID NO: 1306260 - RNA, 19 nt, Artificial Sequence
  Description of Artificial Sequence: Synthetic oligonucleotide
uuauuuugguaaccauaua

SEQ ID NO: 1306261 - RNA, 19 nt, Artificial Sequence
  Description of Artificial Sequence: Synthetic oligonucleotide
acuugugaauucugugaca

SEQ ID NO: 1306262 - RNA, 19 nt, Artificial Sequence
  Description of Artificial Sequence: Synthetic oligonucleotide
gugauaaaugccauaaacu

SEQ ID NO: 1306263 - RNA, 19 nt, Artificial Sequence
  Description of Artificial Sequence: Synthetic oligonucleotide
gguaaccauauaugaaaug

SEQ ID NO: 1306264 - RNA, 19 nt, Artificial Sequence
  Description of Artificial Sequence: Synthetic oligonucleotide
guguugcaaguucuaagug

SEQ ID NO: 1306265 - RNA, 19 nt, Artificial Sequence
  Description of Artificial Sequence: Synthetic oligonucleotide
agaucuagguaaccacaca

SEQ ID NO: 1306266 - RNA, 19 nt, Artificial Sequence
  Description of Artificial Sequence: Synthetic oligonucleotide
ucuuugguguugacuaaua

SEQ ID NO: 1306267 - RNA, 19 nt, Artificial Sequence
  Description of Artificial Sequence: Synthetic oligonucleotide
ucauucacccaggaccacc

SEQ ID NO: 1306268 - RNA, 19 nt, Artificial Sequence
  Description of Artificial Sequence: Synthetic oligonucleotide
cauagagcugaaugauaug

SEQ ID NO: 1306269 - RNA, 19 nt, Artificial Sequence
  Description of Artificial Sequence: Synthetic oligonucleotide
ugaugauaaccaagguaua

SEQ ID NO: 1306270 - RNA, 19 nt, Artificial Sequence
  Description of Artificial Sequence: Synthetic oligonucleotide
guuacuacaaaggggccca

SEQ ID NO: 1306271 - RNA, 19 nt, Artificial Sequence
  Description of Artificial Sequence: Synthetic oligonucleotide
uugugcugagaaagguaug

SEQ ID NO: 1306272 - RNA, 19 nt, Artificial Sequence
  Description of Artificial Sequence: Synthetic oligonucleotide
gaggauaauuaaaguaaga

SEQ ID NO: 1306273 - RNA, 19 nt, Artificial Sequence
  Description of Artificial Sequence: Synthetic oligonucleotide
agagcucaaggagaaaccu

SEQ ID NO: 1306274 - RNA, 19 nt, Artificial Sequence
  Description of Artificial Sequence: Synthetic oligonucleotide
auauaccuugaaaacacau

SEQ ID NO: 1306275 - RNA, 19 nt, Artificial Sequence
  Description of Artificial Sequence: Synthetic oligonucleotide
ggcucgggaauccagauuc

SEQ ID NO: 1306276 - RNA, 19 nt, Artificial Sequence
  Description of Artificial Sequence: Synthetic oligonucleotide
cuuugcauguccaugcugu

SEQ ID NO: 1306277 - RNA, 19 nt, Artificial Sequence
  Description of Artificial Sequence: Synthetic oligonucleotide
gacucagauguucucagcu

SEQ ID NO: 1306278 - RNA, 19 nt, Artificial Sequence
  Description of Artificial Sequence: Synthetic oligonucleotide
ucagauguucucagcugaa

SEQ ID NO: 1306279 - RNA, 19 nt, Artificial Sequence
  Description of Artificial Sequence: Synthetic oligonucleotide
cuauaggacucagauguuc

SEQ ID NO: 1306280 - RNA, 19 nt, Artificial Sequence
  Description of Artificial Sequence: Synthetic oligonucleotide
ugcucccucggauuucugc

SEQ ID NO: 1306281 - RNA, 19 nt, Artificial Sequence
  Description of Artificial Sequence: Synthetic oligonucleotide
cuuugcauuucugggguac

SEQ ID NO: 1306282 - RNA, 19 nt, Artificial Sequence
  Description of Artificial Sequence: Synthetic oligonucleotide
gaauuugcccugagguaag

SEQ ID NO: 1306283 - RNA, 19 nt, Artificial Sequence
  Description of Artificial Sequence: Synthetic oligonucleotide
auagaucauggcucgggaa

SEQ ID NO: 1306284 - RNA, 19 nt, Artificial Sequence
  Description of Artificial Sequence: Synthetic oligonucleotide
aaaugccuaguuacuacaa

SEQ ID NO: 1306285 - RNA, 19 nt, Artificial Sequence
  Description of Artificial Sequence: Synthetic oligonucleotide
gguuuacuccaauuuagga

SEQ ID NO: 1306286 - RNA, 19 nt, Artificial Sequence
  Description of Artificial Sequence: Synthetic oligonucleotide
acucagguguguugcaagu

SEQ ID NO: 1306287 - RNA, 19 nt, Artificial Sequence
  Description of Artificial Sequence: Synthetic oligonucleotide
gaaugauaugaaaccuuca

SEQ ID NO: 1306288 - RNA, 19 nt, Artificial Sequence
  Description of Artificial Sequence: Synthetic oligonucleotide
cuauauucugcacacuugu

SEQ ID NO: 1306289 - RNA, 19 nt, Artificial Sequence
  Description of Artificial Sequence: Synthetic oligonucleotide
aggguuuuauccagaauga

SEQ ID NO: 1306290 - RNA, 19 nt, Artificial Sequence
  Description of Artificial Sequence: Synthetic oligonucleotide
ucacauggguaagauuucu

SEQ ID NO: 1306291 - RNA, 19 nt, Artificial Sequence
  Description of Artificial Sequence: Synthetic oligonucleotide
gacauucucuccaguauga

SEQ ID NO: 1306292 - RNA, 19 nt, Artificial Sequence
  Description of Artificial Sequence: Synthetic oligonucleotide
aaacacaacuuaggagaga

SEQ ID NO: 1306293 - RNA, 19 nt, Artificial Sequence
  Description of Artificial Sequence: Synthetic oligonucleotide
ucccucggauuucugcuug

SEQ ID NO: 1306294 - RNA, 19 nt, Artificial Sequence
  Description of Artificial Sequence: Synthetic oligonucleotide
uagacacaacaaaugccua

SEQ ID NO: 1306295 - RNA, 19 nt, Artificial Sequence
  Description of Artificial Sequence: Synthetic oligonucleotide
ugacauguguuauguuauc

SEQ ID NO: 1306296 - RNA, 19 nt, Artificial Sequence
  Description of Artificial Sequence: Synthetic oligonucleotide
aaggcgagaaggguaguaa

SEQ ID NO: 1306297 - RNA, 19 nt, Artificial Sequence
  Description of Artificial Sequence: Synthetic oligonucleotide
gagguaaggauggauaagu

SEQ ID NO: 1306298 - RNA, 19 nt, Artificial Sequence
  Description of Artificial Sequence: Synthetic oligonucleotide
ugaugcuuacggaauucuu

SEQ ID NO: 1306299 - RNA, 19 nt, Artificial Sequence
  Description of Artificial Sequence: Synthetic oligonucleotide
uucugggguacucuuucau

SEQ ID NO: 1306300 - RNA, 19 nt, Artificial Sequence
  Description of Artificial Sequence: Synthetic oligonucleotide
cuuauuggcuugcucccuc

SEQ ID NO: 1306301 - RNA, 19 nt, Artificial Sequence
  Description of Artificial Sequence: Synthetic oligonucleotide
aggaauuugcccugaggua

SEQ ID NO: 1306302 - RNA, 19 nt, Artificial Sequence
  Description of Artificial Sequence: Synthetic oligonucleotide
auggauaaguuaaaagcuu

SEQ ID NO: 1306303 - RNA, 19 nt, Artificial Sequence
  Description of Artificial Sequence: Synthetic oligonucleotide
cugcuauaggacucagaug

SEQ ID NO: 1306304 - RNA, 19 nt, Artificial Sequence
  Description of Artificial Sequence: Synthetic oligonucleotide
cagauucagguuacccaag

SEQ ID NO: 1306305 - RNA, 19 nt, Artificial Sequence
  Description of Artificial Sequence: Synthetic oligonucleotide
acaucccauagacgcaucu

SEQ ID NO: 1306306 - RNA, 19 nt, Artificial Sequence
  Description of Artificial Sequence: Synthetic oligonucleotide
guuauguuaucuaucucua

SEQ ID NO: 1306307 - RNA, 19 nt, Artificial Sequence
  Description of Artificial Sequence: Synthetic oligonucleotide
cuuaugcaaugacaaauua

SEQ ID NO: 1306308 - RNA, 19 nt, Artificial Sequence
  Description of Artificial Sequence: Synthetic oligonucleotide
ugcauuucugggguacucu

SEQ ID NO: 1306309 - RNA, 19 nt, Artificial Sequence
  Description of Artificial Sequence: Synthetic oligonucleotide
ccaagguauaaagaaacug

SEQ ID NO: 1306310 - RNA, 19 nt, Artificial Sequence
  Description of Artificial Sequence: Synthetic oligonucleotide
aaggguaguaaaacauuuu

SEQ ID NO: 1306311 - RNA, 19 nt, Artificial Sequence
  Description of Artificial Sequence: Synthetic oligonucleotide
ggaaggguuacuuacaauu

SEQ ID NO: 1306312 - RNA, 19 nt, Artificial Sequence
  Description of Artificial Sequence: Synthetic oligonucleotide
cuugugcugagaaagguau

SEQ ID NO: 1306313 - RNA, 19 nt, Artificial Sequence
  Description of Artificial Sequence: Synthetic oligonucleotide
accaccuacccaagggugg

SEQ ID NO: 1306314 - RNA, 19 nt, Artificial Sequence
  Description of Artificial Sequence: Synthetic oligonucleotide
ggguuuacuccaauuuagg

SEQ ID NO: 1306315 - RNA, 19 nt, Artificial Sequence
  Description of Artificial Sequence: Synthetic oligonucleotide
uuacuccaauuuaggaauu

SEQ ID NO: 1306316 - RNA, 19 nt, Artificial Sequence
  Description of Artificial Sequence: Synthetic oligonucleotide
uuugcauguccaugcuguc

SEQ ID NO: 1306317 - RNA, 19 nt, Artificial Sequence
  Description of Artificial Sequence: Synthetic oligonucleotide
cagcaaagggagucucugc

SEQ ID NO: 1306318 - RNA, 19 nt, Artificial Sequence
  Description of Artificial Sequence: Synthetic oligonucleotide
augaaaccuucauaauaua

SEQ ID NO: 1306319 - RNA, 19 nt, Artificial Sequence
  Description of Artificial Sequence: Synthetic oligonucleotide
gaccaccuacccaagggug

SEQ ID NO: 1306320 - RNA, 19 nt, Artificial Sequence
  Description of Artificial Sequence: Synthetic oligonucleotide
cuacccaagggugggacug

SEQ ID NO: 1306321 - RNA, 19 nt, Artificial Sequence
  Description of Artificial Sequence: Synthetic oligonucleotide
uucuuugguguugacuaau

SEQ ID NO: 1306322 - RNA, 19 nt, Artificial Sequence
  Description of Artificial Sequence: Synthetic oligonucleotide
ggaauuugcccugagguaa

SEQ ID NO: 1306323 - RNA, 19 nt, Artificial Sequence
  Description of Artificial Sequence: Synthetic oligonucleotide
caacugauauaccuugaaa

SEQ ID NO: 1306324 - RNA, 19 nt, Artificial Sequence
  Description of Artificial Sequence: Synthetic oligonucleotide
ucucuaagccagucagauc

SEQ ID NO: 1306325 - RNA, 19 nt, Artificial Sequence
  Description of Artificial Sequence: Synthetic oligonucleotide
accuacccaagggugggac

SEQ ID NO: 1306326 - RNA, 19 nt, Artificial Sequence
  Description of Artificial Sequence: Synthetic oligonucleotide
cauguguuauguuaucuau

SEQ ID NO: 1306327 - RNA, 19 nt, Artificial Sequence
  Description of Artificial Sequence: Synthetic oligonucleotide
gauucagguuacccaagua

SEQ ID NO: 1306328 - RNA, 19 nt, Artificial Sequence
  Description of Artificial Sequence: Synthetic oligonucleotide
accaagguauaaagaaacu

SEQ ID NO: 1306329 - RNA, 19 nt, Artificial Sequence
  Description of Artificial Sequence: Synthetic oligonucleotide
ggggaaaccgcauauagau

SEQ ID NO: 1306330 - RNA, 19 nt, Artificial Sequence
  Description of Artificial Sequence: Synthetic oligonucleotide
aguccaaauugaugagaaa

SEQ ID NO: 1306331 - RNA, 19 nt, Artificial Sequence
  Description of Artificial Sequence: Synthetic oligonucleotide
ccacauaaaggcuuuguga

SEQ ID NO: 1306332 - RNA, 19 nt, Artificial Sequence
  Description of Artificial Sequence: Synthetic oligonucleotide
uuacagcaaagggagucuc

SEQ ID NO: 1306333 - RNA, 19 nt, Artificial Sequence
  Description of Artificial Sequence: Synthetic oligonucleotide
uugcauguccaugcugucu

SEQ ID NO: 1306334 - RNA, 19 nt, Artificial Sequence
  Description of Artificial Sequence: Synthetic oligonucleotide
gccagucagaucuagguaa

SEQ ID NO: 1306335 - RNA, 19 nt, Artificial Sequence
  Description of Artificial Sequence: Synthetic oligonucleotide
gaaggguaguaaaacauuu

SEQ ID NO: 1306336 - RNA, 19 nt, Artificial Sequence
  Description of Artificial Sequence: Synthetic oligonucleotide
gacauguguuauguuaucu

SEQ ID NO: 1306337 - RNA, 19 nt, Artificial Sequence
  Description of Artificial Sequence: Synthetic oligonucleotide
guguuauguuaucuaucuc

SEQ ID NO: 1306338 - RNA, 19 nt, Artificial Sequence
  Description of Artificial Sequence: Synthetic oligonucleotide
ucuaagccagucagaucua

SEQ ID NO: 1306339 - RNA, 19 nt, Artificial Sequence
  Description of Artificial Sequence: Synthetic oligonucleotide
acacaacaaaugccuaguu

SEQ ID NO: 1306340 - RNA, 19 nt, Artificial Sequence
  Description of Artificial Sequence: Synthetic oligonucleotide
cuacaaaggggcccaacaa

SEQ ID NO: 1306341 - RNA, 19 nt, Artificial Sequence
  Description of Artificial Sequence: Synthetic oligonucleotide
gcuauauucugcacacuug

SEQ ID NO: 1306342 - RNA, 19 nt, Artificial Sequence
  Description of Artificial Sequence: Synthetic oligonucleotide
cuggaugcauucauaguua

SEQ ID NO: 1306343 - RNA, 19 nt, Artificial Sequence
  Description of Artificial Sequence: Synthetic oligonucleotide
gaugcuuacggaauucuuu

SEQ ID NO: 1306344 - RNA, 19 nt, Artificial Sequence
  Description of Artificial Sequence: Synthetic oligonucleotide
aggcgagaaggguaguaaa

SEQ ID NO: 1306345 - RNA, 19 nt, Artificial Sequence
  Description of Artificial Sequence: Synthetic oligonucleotide
cauggcucgggaauccaga

SEQ ID NO: 1306346 - RNA, 19 nt, Artificial Sequence
  Description of Artificial Sequence: Synthetic oligonucleotide
ccauagacgcaucucuaag

SEQ ID NO: 1306347 - RNA, 19 nt, Artificial Sequence
  Description of Artificial Sequence: Synthetic oligonucleotide
cucgggaauccagauucag

SEQ ID NO: 1306348 - RNA, 19 nt, Artificial Sequence
  Description of Artificial Sequence: Synthetic oligonucleotide
cagagugaacuaccuugug

SEQ ID NO: 1306349 - RNA, 19 nt, Artificial Sequence
  Description of Artificial Sequence: Synthetic oligonucleotide
uaaccacacagcugagauu

SEQ ID NO: 1306350 - RNA, 19 nt, Artificial Sequence
  Description of Artificial Sequence: Synthetic oligonucleotide
aucaacugauauaccuuga

SEQ ID NO: 1306351 - RNA, 19 nt, Artificial Sequence
  Description of Artificial Sequence: Synthetic oligonucleotide
ucucugcuauaggacucag

SEQ ID NO: 1306352 - RNA, 19 nt, Artificial Sequence
  Description of Artificial Sequence: Synthetic oligonucleotide
uaaggcgagaaggguagua

SEQ ID NO: 1306353 - RNA, 19 nt, Artificial Sequence
  Description of Artificial Sequence: Synthetic oligonucleotide
ggagaaaccuugagacagg

SEQ ID NO: 1306354 - RNA, 19 nt, Artificial Sequence
  Description of Artificial Sequence: Synthetic oligonucleotide
acccaaguacagucugaca

SEQ ID NO: 1306355 - RNA, 19 nt, Artificial Sequence
  Description of Artificial Sequence: Synthetic oligonucleotide
aggggaaaccgcauauaga

SEQ ID NO: 1306356 - RNA, 19 nt, Artificial Sequence
  Description of Artificial Sequence: Synthetic oligonucleotide
caaucaacugauauaccuu

SEQ ID NO: 1306357 - RNA, 19 nt, Artificial Sequence
  Description of Artificial Sequence: Synthetic oligonucleotide
acuuuaccuuuagguuugg

SEQ ID NO: 1306358 - RNA, 19 nt, Artificial Sequence
  Description of Artificial Sequence: Synthetic oligonucleotide
uugcauuucugggguacuc

SEQ ID NO: 1306359 - RNA, 19 nt, Artificial Sequence
  Description of Artificial Sequence: Synthetic oligonucleotide
caccuggcuauauucugca

SEQ ID NO: 1306360 - RNA, 19 nt, Artificial Sequence
  Description of Artificial Sequence: Synthetic oligonucleotide
caucucuaagccagucaga

SEQ ID NO: 1306361 - RNA, 19 nt, Artificial Sequence
  Description of Artificial Sequence: Synthetic oligonucleotide
caucccauagacgcaucuc

SEQ ID NO: 1306362 - RNA, 19 nt, Artificial Sequence
  Description of Artificial Sequence: Synthetic oligonucleotide
ccagauucagguuacccaa

SEQ ID NO: 1306363 - RNA, 19 nt, Artificial Sequence
  Description of Artificial Sequence: Synthetic oligonucleotide
ggacccaaaaggggaaacc

SEQ ID NO: 1306364 - RNA, 19 nt, Artificial Sequence
  Description of Artificial Sequence: Synthetic oligonucleotide
ggacucagauguucucagc

SEQ ID NO: 1306365 - RNA, 19 nt, Artificial Sequence
  Description of Artificial Sequence: Synthetic oligonucleotide
uuaaggcgagaaggguagu

SEQ ID NO: 1306366 - RNA, 19 nt, Artificial Sequence
  Description of Artificial Sequence: Synthetic oligonucleotide
gguuuucuuacagaccaaa

SEQ ID NO: 1306367 - RNA, 19 nt, Artificial Sequence
  Description of Artificial Sequence: Synthetic oligonucleotide
ccuggcuauauucugcaca

SEQ ID NO: 1306368 - RNA, 19 nt, Artificial Sequence
  Description of Artificial Sequence: Synthetic oligonucleotide
gaagucucugaggauaauu

SEQ ID NO: 1306369 - RNA, 19 nt, Artificial Sequence
  Description of Artificial Sequence: Synthetic oligonucleotide
cuaaaagaauagguuugua

SEQ ID NO: 1306370 - RNA, 19 nt, Artificial Sequence
  Description of Artificial Sequence: Synthetic oligonucleotide
cagcuaaacaccuggcuau

SEQ ID NO: 1306371 - RNA, 19 nt, Artificial Sequence
  Description of Artificial Sequence: Synthetic oligonucleotide
cagcuaaaggccuugccau

SEQ ID NO: 1306372 - RNA, 19 nt, Artificial Sequence
  Description of Artificial Sequence: Synthetic oligonucleotide
gcugaaugauaugaaaccu

SEQ ID NO: 1306373 - RNA, 19 nt, Artificial Sequence
  Description of Artificial Sequence: Synthetic oligonucleotide
ggaauuaaucagcauccau

SEQ ID NO: 1306374 - RNA, 19 nt, Artificial Sequence
  Description of Artificial Sequence: Synthetic oligonucleotide
gcuuacggaauucuuuggu

SEQ ID NO: 1306375 - RNA, 19 nt, Artificial Sequence
  Description of Artificial Sequence: Synthetic oligonucleotide
gucucugcuauaggacuca

SEQ ID NO: 1306376 - RNA, 19 nt, Artificial Sequence
  Description of Artificial Sequence: Synthetic oligonucleotide
ggcuauauucugcacacuu

SEQ ID NO: 1306377 - RNA, 19 nt, Artificial Sequence
  Description of Artificial Sequence: Synthetic oligonucleotide
agguaaggauggauaaguu

SEQ ID NO: 1306378 - RNA, 19 nt, Artificial Sequence
  Description of Artificial Sequence: Synthetic oligonucleotide
uggcuauauucugcacacu

SEQ ID NO: 1306379 - RNA, 19 nt, Artificial Sequence
  Description of Artificial Sequence: Synthetic oligonucleotide
gcaacaauuucuggaugca

SEQ ID NO: 1306380 - RNA, 19 nt, Artificial Sequence
  Description of Artificial Sequence: Synthetic oligonucleotide
gguaaccacacagcugaga

SEQ ID NO: 1306381 - RNA, 19 nt, Artificial Sequence
  Description of Artificial Sequence: Synthetic oligonucleotide
agcuaaacaccuggcuaua

SEQ ID NO: 1306382 - RNA, 19 nt, Artificial Sequence
  Description of Artificial Sequence: Synthetic oligonucleotide
ccgcauauagaucauggcu

SEQ ID NO: 1306383 - RNA, 19 nt, Artificial Sequence
  Description of Artificial Sequence: Synthetic oligonucleotide
gguguguugcaaguucuaa

SEQ ID NO: 1306384 - RNA, 19 nt, Artificial Sequence
  Description of Artificial Sequence: Synthetic oligonucleotide
uuacuacaaaggggcccaa

SEQ ID NO: 1306385 - RNA, 19 nt, Artificial Sequence
  Description of Artificial Sequence: Synthetic oligonucleotide
ccaaauugaugagaaaagu

SEQ ID NO: 1306386 - RNA, 19 nt, Artificial Sequence
  Description of Artificial Sequence: Synthetic oligonucleotide
ggcgagaaggguaguaaaa

SEQ ID NO: 1306387 - RNA, 19 nt, Artificial Sequence
  Description of Artificial Sequence: Synthetic oligonucleotide
cuuuaccuuuagguuugga

SEQ ID NO: 1306388 - RNA, 19 nt, Artificial Sequence
  Description of Artificial Sequence: Synthetic oligonucleotide
agguaaccacacagcugag

SEQ ID NO: 1306389 - RNA, 19 nt, Artificial Sequence
  Description of Artificial Sequence: Synthetic oligonucleotide
cucauucacccaggaccac

SEQ ID NO: 1306390 - RNA, 19 nt, Artificial Sequence
  Description of Artificial Sequence: Synthetic oligonucleotide
gggaaaccgcauauagauc

SEQ ID NO: 1306391 - RNA, 19 nt, Artificial Sequence
  Description of Artificial Sequence: Synthetic oligonucleotide
ggaugcauucauaguuaga

SEQ ID NO: 1306392 - RNA, 19 nt, Artificial Sequence
  Description of Artificial Sequence: Synthetic oligonucleotide
gcaaagggagucucugcua

SEQ ID NO: 1306393 - RNA, 19 nt, Artificial Sequence
  Description of Artificial Sequence: Synthetic oligonucleotide
gggacccaaaaggggaaac

SEQ ID NO: 1306394 - RNA, 19 nt, Artificial Sequence
  Description of Artificial Sequence: Synthetic oligonucleotide
cuucccacauaaaggcuuu

SEQ ID NO: 1306395 - RNA, 19 nt, Artificial Sequence
  Description of Artificial Sequence: Synthetic oligonucleotide
caacaucccauagacgcau

SEQ ID NO: 1306396 - RNA, 19 nt, Artificial Sequence
  Description of Artificial Sequence: Synthetic oligonucleotide
gcucccucggauuucugcu

SEQ ID NO: 1306397 - RNA, 19 nt, Artificial Sequence
  Description of Artificial Sequence: Synthetic oligonucleotide
agguguguugcaaguucua

SEQ ID NO: 1306398 - RNA, 19 nt, Artificial Sequence
  Description of Artificial Sequence: Synthetic oligonucleotide
cccauagacgcaucucuaa

SEQ ID NO: 1306399 - RNA, 19 nt, Artificial Sequence
  Description of Artificial Sequence: Synthetic oligonucleotide
gagcucaaggagaaaccuu

SEQ ID NO: 1306400 - RNA, 19 nt, Artificial Sequence
  Description of Artificial Sequence: Synthetic oligonucleotide
gguuacccaaguacagucu

SEQ ID NO: 1306401 - RNA, 19 nt, Artificial Sequence
  Description of Artificial Sequence: Synthetic oligonucleotide
caccacaguccaaauugau

SEQ ID NO: 1306402 - RNA, 19 nt, Artificial Sequence
  Description of Artificial Sequence: Synthetic oligonucleotide
ccagagugaacuaccuugu

SEQ ID NO: 1306403 - RNA, 19 nt, Artificial Sequence
  Description of Artificial Sequence: Synthetic oligonucleotide
cacauggguaagauuucuu

SEQ ID NO: 1306404 - RNA, 19 nt, Artificial Sequence
  Description of Artificial Sequence: Synthetic oligonucleotide
caacaauuucuggaugcau

SEQ ID NO: 1306405 - RNA, 19 nt, Artificial Sequence
  Description of Artificial Sequence: Synthetic oligonucleotide
cuugcucccucggauuucu

SEQ ID NO: 1306406 - RNA, 19 nt, Artificial Sequence
  Description of Artificial Sequence: Synthetic oligonucleotide
gguacucuuucaugcuuau

SEQ ID NO: 1306407 - RNA, 19 nt, Artificial Sequence
  Description of Artificial Sequence: Synthetic oligonucleotide
gcucaaggagaaaccuuga

SEQ ID NO: 1306408 - RNA, 19 nt, Artificial Sequence
  Description of Artificial Sequence: Synthetic oligonucleotide
agugagcacuaaagacuuu

SEQ ID NO: 1306409 - RNA, 19 nt, Artificial Sequence
  Description of Artificial Sequence: Synthetic oligonucleotide
gcccaacaagaaaccauuc

SEQ ID NO: 1306410 - RNA, 19 nt, Artificial Sequence
  Description of Artificial Sequence: Synthetic oligonucleotide
ggggcccaacaagaaacca

SEQ ID NO: 1306411 - RNA, 19 nt, Artificial Sequence
  Description of Artificial Sequence: Synthetic oligonucleotide
ggugggacugggaauuaau

SEQ ID NO: 1306412 - RNA, 19 nt, Artificial Sequence
  Description of Artificial Sequence: Synthetic oligonucleotide
cuccaguaugaagacugau

SEQ ID NO: 1306413 - RNA, 19 nt, Artificial Sequence
  Description of Artificial Sequence: Synthetic oligonucleotide
cuccagagugaacuaccuu

SEQ ID NO: 1306414 - RNA, 19 nt, Artificial Sequence
  Description of Artificial Sequence: Synthetic oligonucleotide
gggcccaacaagaaaccau

SEQ ID NO: 1306415 - RNA, 19 nt, Artificial Sequence
  Description of Artificial Sequence: Synthetic oligonucleotide
ccaaaaggggaaaccgcau

SEQ ID NO: 1306416 - RNA, 19 nt, Artificial Sequence
  Description of Artificial Sequence: Synthetic oligonucleotide
cucagguguguugcaaguu

SEQ ID NO: 1306417 - RNA, 19 nt, Artificial Sequence
  Description of Artificial Sequence: Synthetic oligonucleotide
ggcuugcucccucggauuu

SEQ ID NO: 1306418 - RNA, 19 nt, Artificial Sequence
  Description of Artificial Sequence: Synthetic oligonucleotide
gcucgggaauccagauuca

SEQ ID NO: 1306419 - RNA, 19 nt, Artificial Sequence
  Description of Artificial Sequence: Synthetic oligonucleotide
caccuacccaaggguggga

SEQ ID NO: 1306420 - RNA, 19 nt, Artificial Sequence
  Description of Artificial Sequence: Synthetic oligonucleotide
ccuacccaagggugggacu

SEQ ID NO: 1306421 - RNA, 19 nt, Artificial Sequence
  Description of Artificial Sequence: Synthetic oligonucleotide
gcuauaggacucagauguu

SEQ ID NO: 1306422 - RNA, 19 nt, Artificial Sequence
  Description of Artificial Sequence: Synthetic oligonucleotide
aacuauauuuuauugauac

SEQ ID NO: 1306423 - RNA, 19 nt, Artificial Sequence
  Description of Artificial Sequence: Synthetic oligonucleotide
aaguauuugaaauaaagca

SEQ ID NO: 1306424 - RNA, 19 nt, Artificial Sequence
  Description of Artificial Sequence: Synthetic oligonucleotide
uuugaaauaaagcaaagcu

SEQ ID NO: 1306425 - RNA, 19 nt, Artificial Sequence
  Description of Artificial Sequence: Synthetic oligonucleotide
uuaauauccucuaagauac

SEQ ID NO: 1306426 - RNA, 19 nt, Artificial Sequence
  Description of Artificial Sequence: Synthetic oligonucleotide
auugauauuauacugaaca

SEQ ID NO: 1306427 - RNA, 19 nt, Artificial Sequence
  Description of Artificial Sequence: Synthetic oligonucleotide
aauacaacguaucucacag

SEQ ID NO: 1306428 - RNA, 19 nt, Artificial Sequence
  Description of Artificial Sequence: Synthetic oligonucleotide
aaggacauaauaccgacuc

SEQ ID NO: 1306429 - RNA, 19 nt, Artificial Sequence
  Description of Artificial Sequence: Synthetic oligonucleotide
aucgauauuaaacuuugcc

SEQ ID NO: 1306430 - RNA, 19 nt, Artificial Sequence
  Description of Artificial Sequence: Synthetic oligonucleotide
ucgauauuaaacuuugccg

SEQ ID NO: 1306431 - RNA, 19 nt, Artificial Sequence
  Description of Artificial Sequence: Synthetic oligonucleotide
aauccaauauuaaaguggc

SEQ ID NO: 1306432 - RNA, 19 nt, Artificial Sequence
  Description of Artificial Sequence: Synthetic oligonucleotide
uuuaccauaccacacaaga

SEQ ID NO: 1306433 - RNA, 19 nt, Artificial Sequence
  Description of Artificial Sequence: Synthetic oligonucleotide
auaauauuccuuugaaacg

SEQ ID NO: 1306434 - RNA, 19 nt, Artificial Sequence
  Description of Artificial Sequence: Synthetic oligonucleotide
uugaaauaaagcaaagcug

SEQ ID NO: 1306435 - RNA, 19 nt, Artificial Sequence
  Description of Artificial Sequence: Synthetic oligonucleotide
aaguauaucuugcaaagcu

SEQ ID NO: 1306436 - RNA, 19 nt, Artificial Sequence
  Description of Artificial Sequence: Synthetic oligonucleotide
aauaccguaucucugcaag

SEQ ID NO: 1306437 - RNA, 19 nt, Artificial Sequence
  Description of Artificial Sequence: Synthetic oligonucleotide
uuugaaaagaacacgagua

SEQ ID NO: 1306438 - RNA, 19 nt, Artificial Sequence
  Description of Artificial Sequence: Synthetic oligonucleotide
accuauauauauuuuaaag

SEQ ID NO: 1306439 - RNA, 19 nt, Artificial Sequence
  Description of Artificial Sequence: Synthetic oligonucleotide
cuuggagcaaguaagacag

SEQ ID NO: 1306440 - RNA, 19 nt, Artificial Sequence
  Description of Artificial Sequence: Synthetic oligonucleotide
uucuguauugauauuauac

SEQ ID NO: 1306441 - RNA, 19 nt, Artificial Sequence
  Description of Artificial Sequence: Synthetic oligonucleotide
uuuaaauaggaauauaauu

SEQ ID NO: 1306442 - RNA, 19 nt, Artificial Sequence
  Description of Artificial Sequence: Synthetic oligonucleotide
aauuauacaucguggacca

SEQ ID NO: 1306443 - RNA, 19 nt, Artificial Sequence
  Description of Artificial Sequence: Synthetic oligonucleotide
aagaacacgaguaaguguc

SEQ ID NO: 1306444 - RNA, 19 nt, Artificial Sequence
  Description of Artificial Sequence: Synthetic oligonucleotide
uuuaauauccucuaagaua

SEQ ID NO: 1306445 - RNA, 19 nt, Artificial Sequence
  Description of Artificial Sequence: Synthetic oligonucleotide
auucggaaggucuuggugc

SEQ ID NO: 1306446 - RNA, 19 nt, Artificial Sequence
  Description of Artificial Sequence: Synthetic oligonucleotide
auaauaccgacucaauaac

SEQ ID NO: 1306447 - RNA, 19 nt, Artificial Sequence
  Description of Artificial Sequence: Synthetic oligonucleotide
uacaacguaucucacaggc

SEQ ID NO: 1306448 - RNA, 19 nt, Artificial Sequence
  Description of Artificial Sequence: Synthetic oligonucleotide
aaagguggguuguugagag

SEQ ID NO: 1306449 - RNA, 19 nt, Artificial Sequence
  Description of Artificial Sequence: Synthetic oligonucleotide
ugucugauuauaauauucc

SEQ ID NO: 1306450 - RNA, 19 nt, Artificial Sequence
  Description of Artificial Sequence: Synthetic oligonucleotide
aaucguaauagcuuaacua

SEQ ID NO: 1306451 - RNA, 19 nt, Artificial Sequence
  Description of Artificial Sequence: Synthetic oligonucleotide
acaccagucagguauacgg

SEQ ID NO: 1306452 - RNA, 19 nt, Artificial Sequence
  Description of Artificial Sequence: Synthetic oligonucleotide
uggguagucaacauuuggg

SEQ ID NO: 1306453 - RNA, 19 nt, Artificial Sequence
  Description of Artificial Sequence: Synthetic oligonucleotide
ugcaaauccacacuuggug

SEQ ID NO: 1306454 - RNA, 19 nt, Artificial Sequence
  Description of Artificial Sequence: Synthetic oligonucleotide
uauaaaucguaauagcuua

SEQ ID NO: 1306455 - RNA, 19 nt, Artificial Sequence
  Description of Artificial Sequence: Synthetic oligonucleotide
uuauaaaucguaauagcuu

SEQ ID NO: 1306456 - RNA, 19 nt, Artificial Sequence
  Description of Artificial Sequence: Synthetic oligonucleotide
ucugauugauccaagcaca

SEQ ID NO: 1306457 - RNA, 19 nt, Artificial Sequence
  Description of Artificial Sequence: Synthetic oligonucleotide
uucuaauuaaguauuugaa

SEQ ID NO: 1306458 - RNA, 19 nt, Artificial Sequence
  Description of Artificial Sequence: Synthetic oligonucleotide
aacaacuuugauuggcuug

SEQ ID NO: 1306459 - RNA, 19 nt, Artificial Sequence
  Description of Artificial Sequence: Synthetic oligonucleotide
acuauuuuaccauaccaca

SEQ ID NO: 1306460 - RNA, 19 nt, Artificial Sequence
  Description of Artificial Sequence: Synthetic oligonucleotide
cacaauuagccuuugcagg

SEQ ID NO: 1306461 - RNA, 19 nt, Artificial Sequence
  Description of Artificial Sequence: Synthetic oligonucleotide
aacaguugaguuuccaacu

SEQ ID NO: 1306462 - RNA, 19 nt, Artificial Sequence
  Description of Artificial Sequence: Synthetic oligonucleotide
uucccuauauccacaaucc

SEQ ID NO: 1306463 - RNA, 19 nt, Artificial Sequence
  Description of Artificial Sequence: Synthetic oligonucleotide
uuuuaaagcauccuacaua

SEQ ID NO: 1306464 - RNA, 19 nt, Artificial Sequence
  Description of Artificial Sequence: Synthetic oligonucleotide
aauuagccuuugcaggugg

SEQ ID NO: 1306465 - RNA, 19 nt, Artificial Sequence
  Description of Artificial Sequence: Synthetic oligonucleotide
agaauuaaucccaaguguc

SEQ ID NO: 1306466 - RNA, 19 nt, Artificial Sequence
  Description of Artificial Sequence: Synthetic oligonucleotide
ccuauauauauuuuaaagc

SEQ ID NO: 1306467 - RNA, 19 nt, Artificial Sequence
  Description of Artificial Sequence: Synthetic oligonucleotide
cacuaggaauuauacaucg

SEQ ID NO: 1306468 - RNA, 19 nt, Artificial Sequence
  Description of Artificial Sequence: Synthetic oligonucleotide
aaauacaacguaucucaca

SEQ ID NO: 1306469 - RNA, 19 nt, Artificial Sequence
  Description of Artificial Sequence: Synthetic oligonucleotide
acuuuaauauccucuaaga

SEQ ID NO: 1306470 - RNA, 19 nt, Artificial Sequence
  Description of Artificial Sequence: Synthetic oligonucleotide
uucccaacgucaaacauca

SEQ ID NO: 1306471 - RNA, 19 nt, Artificial Sequence
  Description of Artificial Sequence: Synthetic oligonucleotide
auuauaaaucguaauagcu

SEQ ID NO: 1306472 - RNA, 19 nt, Artificial Sequence
  Description of Artificial Sequence: Synthetic oligonucleotide
aauuaaucccaagugucag

SEQ ID NO: 1306473 - RNA, 19 nt, Artificial Sequence
  Description of Artificial Sequence: Synthetic oligonucleotide
ugaaaucaauuaaauauua

SEQ ID NO: 1306474 - RNA, 19 nt, Artificial Sequence
  Description of Artificial Sequence: Synthetic oligonucleotide
uuucccuauauccacaauc

SEQ ID NO: 1306475 - RNA, 19 nt, Artificial Sequence
  Description of Artificial Sequence: Synthetic oligonucleotide
agcuuuuccuccuaagggg

SEQ ID NO: 1306476 - RNA, 19 nt, Artificial Sequence
  Description of Artificial Sequence: Synthetic oligonucleotide
cuaggaauuauacaucgug

SEQ ID NO: 1306477 - RNA, 19 nt, Artificial Sequence
  Description of Artificial Sequence: Synthetic oligonucleotide
caauccaggaccauggcag

SEQ ID NO: 1306478 - RNA, 19 nt, Artificial Sequence
  Description of Artificial Sequence: Synthetic oligonucleotide
aaauauuaaugcaaagaga

SEQ ID NO: 1306479 - RNA, 19 nt, Artificial Sequence
  Description of Artificial Sequence: Synthetic oligonucleotide
aucguaauagcuuaacuau

SEQ ID NO: 1306480 - RNA, 19 nt, Artificial Sequence
  Description of Artificial Sequence: Synthetic oligonucleotide
auugauacaaauacaacgu

SEQ ID NO: 1306481 - RNA, 19 nt, Artificial Sequence
  Description of Artificial Sequence: Synthetic oligonucleotide
auccuggcaacauagaugu

SEQ ID NO: 1306482 - RNA, 19 nt, Artificial Sequence
  Description of Artificial Sequence: Synthetic oligonucleotide
aaguucgcacuuuaauauc

SEQ ID NO: 1306483 - RNA, 19 nt, Artificial Sequence
  Description of Artificial Sequence: Synthetic oligonucleotide
uccaauauuaaaguggcaa

SEQ ID NO: 1306484 - RNA, 19 nt, Artificial Sequence
  Description of Artificial Sequence: Synthetic oligonucleotide
uuaaaguggcaacugauuu

SEQ ID NO: 1306485 - RNA, 19 nt, Artificial Sequence
  Description of Artificial Sequence: Synthetic oligonucleotide
uuuuaucacacuaggaauu

SEQ ID NO: 1306486 - RNA, 19 nt, Artificial Sequence
  Description of Artificial Sequence: Synthetic oligonucleotide
uuugaaacggagcggcucc

SEQ ID NO: 1306487 - RNA, 19 nt, Artificial Sequence
  Description of Artificial Sequence: Synthetic oligonucleotide
ugauauuauacugaacaac

SEQ ID NO: 1306488 - RNA, 19 nt, Artificial Sequence
  Description of Artificial Sequence: Synthetic oligonucleotide
accuucuggaacugaaccc

SEQ ID NO: 1306489 - RNA, 19 nt, Artificial Sequence
  Description of Artificial Sequence: Synthetic oligonucleotide
ucaccuauauauauuuuaa

SEQ ID NO: 1306490 - RNA, 19 nt, Artificial Sequence
  Description of Artificial Sequence: Synthetic oligonucleotide
uucucuaccaaauaccgua

SEQ ID NO: 1306491 - RNA, 19 nt, Artificial Sequence
  Description of Artificial Sequence: Synthetic oligonucleotide
uucagaucacuuacaaagc

SEQ ID NO: 1306492 - RNA, 19 nt, Artificial Sequence
  Description of Artificial Sequence: Synthetic oligonucleotide
uauacggccugucugauua

SEQ ID NO: 1306493 - RNA, 19 nt, Artificial Sequence
  Description of Artificial Sequence: Synthetic oligonucleotide
aacuuugauuggcuuggac

SEQ ID NO: 1306494 - RNA, 19 nt, Artificial Sequence
  Description of Artificial Sequence: Synthetic oligonucleotide
uauuaaaguggcaacugau

SEQ ID NO: 1306495 - RNA, 19 nt, Artificial Sequence
  Description of Artificial Sequence: Synthetic oligonucleotide
aauaccgacucaauaacca

SEQ ID NO: 1306496 - RNA, 19 nt, Artificial Sequence
  Description of Artificial Sequence: Synthetic oligonucleotide
uaauaccgacucaauaacc

SEQ ID NO: 1306497 - RNA, 19 nt, Artificial Sequence
  Description of Artificial Sequence: Synthetic oligonucleotide
uguggaugaauucuuuuaa

SEQ ID NO: 1306498 - RNA, 19 nt, Artificial Sequence
  Description of Artificial Sequence: Synthetic oligonucleotide
cacuauuuuaccauaccac

SEQ ID NO: 1306499 - RNA, 19 nt, Artificial Sequence
  Description of Artificial Sequence: Synthetic oligonucleotide
uugaaaagaacacgaguaa

SEQ ID NO: 1306500 - RNA, 19 nt, Artificial Sequence
  Description of Artificial Sequence: Synthetic oligonucleotide
aauauccucuaagauaccu

SEQ ID NO: 1306501 - RNA, 19 nt, Artificial Sequence
  Description of Artificial Sequence: Synthetic oligonucleotide
aguucgcacuuuaauaucc

SEQ ID NO: 1306502 - RNA, 19 nt, Artificial Sequence
  Description of Artificial Sequence: Synthetic oligonucleotide
gauauuauacugaacaacu

SEQ ID NO: 1306503 - RNA, 19 nt, Artificial Sequence
  Description of Artificial Sequence: Synthetic oligonucleotide
aagucaccuauauauauuu

SEQ ID NO: 1306504 - RNA, 19 nt, Artificial Sequence
  Description of Artificial Sequence: Synthetic oligonucleotide
uccuacauacuuuguacag

SEQ ID NO: 1306505 - RNA, 19 nt, Artificial Sequence
  Description of Artificial Sequence: Synthetic oligonucleotide
cuaagauaccuucuggaac

SEQ ID NO: 1306506 - RNA, 19 nt, Artificial Sequence
  Description of Artificial Sequence: Synthetic oligonucleotide
ggaguaugaauucggaagg

SEQ ID NO: 1306507 - RNA, 19 nt, Artificial Sequence
  Description of Artificial Sequence: Synthetic oligonucleotide
auuaaucccaagugucagg

SEQ ID NO: 1306508 - RNA, 19 nt, Artificial Sequence
  Description of Artificial Sequence: Synthetic oligonucleotide
auaaagcaaagcugaaucu

SEQ ID NO: 1306509 - RNA, 19 nt, Artificial Sequence
  Description of Artificial Sequence: Synthetic oligonucleotide
ugaguuuccaacuccuugu

SEQ ID NO: 1306510 - RNA, 19 nt, Artificial Sequence
  Description of Artificial Sequence: Synthetic oligonucleotide
uaguccgcgcuucagauca

SEQ ID NO: 1306511 - RNA, 19 nt, Artificial Sequence
  Description of Artificial Sequence: Synthetic oligonucleotide
cugaaauacaguaugugga

SEQ ID NO: 1306512 - RNA, 19 nt, Artificial Sequence
  Description of Artificial Sequence: Synthetic oligonucleotide
cuauuuuaccauaccacac

SEQ ID NO: 1306513 - RNA, 19 nt, Artificial Sequence
  Description of Artificial Sequence: Synthetic oligonucleotide
cacuuuaauauccucuaag

SEQ ID NO: 1306514 - RNA, 19 nt, Artificial Sequence
  Description of Artificial Sequence: Synthetic oligonucleotide
ugaacaacuuugauuggcu

SEQ ID NO: 1306515 - RNA, 19 nt, Artificial Sequence
  Description of Artificial Sequence: Synthetic oligonucleotide
aggaauuauacaucgugga

SEQ ID NO: 1306516 - RNA, 19 nt, Artificial Sequence
  Description of Artificial Sequence: Synthetic oligonucleotide
auagaugugccaccuauga

SEQ ID NO: 1306517 - RNA, 19 nt, Artificial Sequence
  Description of Artificial Sequence: Synthetic oligonucleotide
cauccuacauacuuuguac

SEQ ID NO: 1306518 - RNA, 19 nt, Artificial Sequence
  Description of Artificial Sequence: Synthetic oligonucleotide
cucugauugauccaagcac

SEQ ID NO: 1306519 - RNA, 19 nt, Artificial Sequence
  Description of Artificial Sequence: Synthetic oligonucleotide
uguaaaaucuucucuccau

SEQ ID NO: 1306520 - RNA, 19 nt, Artificial Sequence
  Description of Artificial Sequence: Synthetic oligonucleotide
acaauuagccuuugcaggu

SEQ ID NO: 1306521 - RNA, 19 nt, Artificial Sequence
  Description of Artificial Sequence: Synthetic oligonucleotide
augccugaaauacaguaug

SEQ ID NO: 1306522 - RNA, 19 nt, Artificial Sequence
  Description of Artificial Sequence: Synthetic oligonucleotide
uugauauuauacugaacaa

SEQ ID NO: 1306523 - RNA, 19 nt, Artificial Sequence
  Description of Artificial Sequence: Synthetic oligonucleotide
acuuggagcaaguaagaca

SEQ ID NO: 1306524 - RNA, 19 nt, Artificial Sequence
  Description of Artificial Sequence: Synthetic oligonucleotide
acaguugaguuuccaacuc

SEQ ID NO: 1306525 - RNA, 19 nt, Artificial Sequence
  Description of Artificial Sequence: Synthetic oligonucleotide
auaccgacucaauaaccac

SEQ ID NO: 1306526 - RNA, 19 nt, Artificial Sequence
  Description of Artificial Sequence: Synthetic oligonucleotide
uuuucauaagcgguggcug

SEQ ID NO: 1306527 - RNA, 19 nt, Artificial Sequence
  Description of Artificial Sequence: Synthetic oligonucleotide
guauaucuugcaaagcucc

SEQ ID NO: 1306528 - RNA, 19 nt, Artificial Sequence
  Description of Artificial Sequence: Synthetic oligonucleotide
uuucccaacgucaaacauc

SEQ ID NO: 1306529 - RNA, 19 nt, Artificial Sequence
  Description of Artificial Sequence: Synthetic oligonucleotide
uaggaauauaauucuucug

SEQ ID NO: 1306530 - RNA, 19 nt, Artificial Sequence
  Description of Artificial Sequence: Synthetic oligonucleotide
uggaugaauucuuuuaaau

SEQ ID NO: 1306531 - RNA, 19 nt, Artificial Sequence
  Description of Artificial Sequence: Synthetic oligonucleotide
uauuucucgguggaaaaug

SEQ ID NO: 1306532 - RNA, 19 nt, Artificial Sequence
  Description of Artificial Sequence: Synthetic oligonucleotide
uauccucuaagauaccuuc

SEQ ID NO: 1306533 - RNA, 19 nt, Artificial Sequence
  Description of Artificial Sequence: Synthetic oligonucleotide
cugucugauuauaauauuc

SEQ ID NO: 1306534 - RNA, 19 nt, Artificial Sequence
  Description of Artificial Sequence: Synthetic oligonucleotide
uccacuauuuuaccauacc

SEQ ID NO: 1306535 - RNA, 19 nt, Artificial Sequence
  Description of Artificial Sequence: Synthetic oligonucleotide
ucacuauucccaucgauau

SEQ ID NO: 1306536 - RNA, 19 nt, Artificial Sequence
  Description of Artificial Sequence: Synthetic oligonucleotide
ccuauauccacaauccagg

SEQ ID NO: 1306537 - RNA, 19 nt, Artificial Sequence
  Description of Artificial Sequence: Synthetic oligonucleotide
uuaaucccaagugucagga

SEQ ID NO: 1306538 - RNA, 19 nt, Artificial Sequence
  Description of Artificial Sequence: Synthetic oligonucleotide
ugaagugggaaggacauaa

SEQ ID NO: 1306539 - RNA, 19 nt, Artificial Sequence
  Description of Artificial Sequence: Synthetic oligonucleotide
uauuaaacuuugccgccug

SEQ ID NO: 1306540 - RNA, 19 nt, Artificial Sequence
  Description of Artificial Sequence: Synthetic oligonucleotide
ugauccaagcacauguaaa

SEQ ID NO: 1306541 - RNA, 19 nt, Artificial Sequence
  Description of Artificial Sequence: Synthetic oligonucleotide
auaccguaucucugcaagc

SEQ ID NO: 1306542 - RNA, 19 nt, Artificial Sequence
  Description of Artificial Sequence: Synthetic oligonucleotide
aguauaucuugcaaagcuc

SEQ ID NO: 1306543 - RNA, 19 nt, Artificial Sequence
  Description of Artificial Sequence: Synthetic oligonucleotide
auuucucgguggaaaaugc

SEQ ID NO: 1306544 - RNA, 19 nt, Artificial Sequence
  Description of Artificial Sequence: Synthetic oligonucleotide
aaucugugaagaaauccug

SEQ ID NO: 1306545 - RNA, 19 nt, Artificial Sequence
  Description of Artificial Sequence: Synthetic oligonucleotide
caaagugaaaucaauuaaa

SEQ ID NO: 1306546 - RNA, 19 nt, Artificial Sequence
  Description of Artificial Sequence: Synthetic oligonucleotide
acguaucucacaggcaucc

SEQ ID NO: 1306547 - RNA, 19 nt, Artificial Sequence
  Description of Artificial Sequence: Synthetic oligonucleotide
uuucauaagcgguggcugc

SEQ ID NO: 1306548 - RNA, 19 nt, Artificial Sequence
  Description of Artificial Sequence: Synthetic oligonucleotide
uacaaauacaacguaucuc

SEQ ID NO: 1306549 - RNA, 19 nt, Artificial Sequence
  Description of Artificial Sequence: Synthetic oligonucleotide
gaugacuuggagcaaguaa

SEQ ID NO: 1306550 - RNA, 19 nt, Artificial Sequence
  Description of Artificial Sequence: Synthetic oligonucleotide
aucguggaccaguuucucc

SEQ ID NO: 1306551 - RNA, 19 nt, Artificial Sequence
  Description of Artificial Sequence: Synthetic oligonucleotide
ugaauucggaaggucuugg

SEQ ID NO: 1306552 - RNA, 19 nt, Artificial Sequence
  Description of Artificial Sequence: Synthetic oligonucleotide
gcagaauuaaucccaagug

SEQ ID NO: 1306553 - RNA, 19 nt, Artificial Sequence
  Description of Artificial Sequence: Synthetic oligonucleotide
auaaccacaacccggcgau

SEQ ID NO: 1306554 - RNA, 19 nt, Artificial Sequence
  Description of Artificial Sequence: Synthetic oligonucleotide
aacacgaguaagugucucu

SEQ ID NO: 1306555 - RNA, 19 nt, Artificial Sequence
  Description of Artificial Sequence: Synthetic oligonucleotide
uuauacaucguggaccagu

SEQ ID NO: 1306556 - RNA, 19 nt, Artificial Sequence
  Description of Artificial Sequence: Synthetic oligonucleotide
ucacacuaggaauuauaca

SEQ ID NO: 1306557 - RNA, 19 nt, Artificial Sequence
  Description of Artificial Sequence: Synthetic oligonucleotide
acuuacaaagcaaguucgc

SEQ ID NO: 1306558 - RNA, 19 nt, Artificial Sequence
  Description of Artificial Sequence: Synthetic oligonucleotide
ucuucuguauugauauuau

SEQ ID NO: 1306559 - RNA, 19 nt, Artificial Sequence
  Description of Artificial Sequence: Synthetic oligonucleotide
ggguagucaacauuugggg

SEQ ID NO: 1306560 - RNA, 19 nt, Artificial Sequence
  Description of Artificial Sequence: Synthetic oligonucleotide
uccuuugaaacggagcggc

SEQ ID NO: 1306561 - RNA, 19 nt, Artificial Sequence
  Description of Artificial Sequence: Synthetic oligonucleotide
cuggcaacauagaugugcc

SEQ ID NO: 1306562 - RNA, 19 nt, Artificial Sequence
  Description of Artificial Sequence: Synthetic oligonucleotide
uggauuuguaguccgcgcu

SEQ ID NO: 1306563 - RNA, 19 nt, Artificial Sequence
  Description of Artificial Sequence: Synthetic oligonucleotide
uugggcacugcauaaggga

SEQ ID NO: 1306564 - RNA, 19 nt, Artificial Sequence
  Description of Artificial Sequence: Synthetic oligonucleotide
ucuauugggcacugcauaa

SEQ ID NO: 1306565 - RNA, 19 nt, Artificial Sequence
  Description of Artificial Sequence: Synthetic oligonucleotide
uaccgacucaauaaccaca

SEQ ID NO: 1306566 - RNA, 19 nt, Artificial Sequence
  Description of Artificial Sequence: Synthetic oligonucleotide
uauuucuaauuaaguauuu

SEQ ID NO: 1306567 - RNA, 19 nt, Artificial Sequence
  Description of Artificial Sequence: Synthetic oligonucleotide
auauaggcaacaccaggcu

SEQ ID NO: 1306568 - RNA, 19 nt, Artificial Sequence
  Description of Artificial Sequence: Synthetic oligonucleotide
uaagggaauccaauauuaa

SEQ ID NO: 1306569 - RNA, 19 nt, Artificial Sequence
  Description of Artificial Sequence: Synthetic oligonucleotide
auuaaacuuugccgccugg

SEQ ID NO: 1306570 - RNA, 19 nt, Artificial Sequence
  Description of Artificial Sequence: Synthetic oligonucleotide
gaaauacaguauguggaug

SEQ ID NO: 1306571 - RNA, 19 nt, Artificial Sequence
  Description of Artificial Sequence: Synthetic oligonucleotide
ccaaguauaucuugcaaag

SEQ ID NO: 1306572 - RNA, 19 nt, Artificial Sequence
  Description of Artificial Sequence: Synthetic oligonucleotide
guggguagucaacauuugg

SEQ ID NO: 1306573 - RNA, 19 nt, Artificial Sequence
  Description of Artificial Sequence: Synthetic oligonucleotide
cacacuaggaauuauacau

SEQ ID NO: 1306574 - RNA, 19 nt, Artificial Sequence
  Description of Artificial Sequence: Synthetic oligonucleotide
acuauucccaucgauauua

SEQ ID NO: 1306575 - RNA, 19 nt, Artificial Sequence
  Description of Artificial Sequence: Synthetic oligonucleotide
aaacuuugccgccuggauu

SEQ ID NO: 1306576 - RNA, 19 nt, Artificial Sequence
  Description of Artificial Sequence: Synthetic oligonucleotide
agcaguucaguacugggau

SEQ ID NO: 1306577 - RNA, 19 nt, Artificial Sequence
  Description of Artificial Sequence: Synthetic oligonucleotide
aacggagcggcucccaagu

SEQ ID NO: 1306578 - RNA, 19 nt, Artificial Sequence
  Description of Artificial Sequence: Synthetic oligonucleotide
guugagagaacaccaguca

SEQ ID NO: 1306579 - RNA, 19 nt, Artificial Sequence
  Description of Artificial Sequence: Synthetic oligonucleotide
auguaaaaucuucucucca

SEQ ID NO: 1306580 - RNA, 19 nt, Artificial Sequence
  Description of Artificial Sequence: Synthetic oligonucleotide
ggaauccaauauuaaagug

SEQ ID NO: 1306581 - RNA, 19 nt, Artificial Sequence
  Description of Artificial Sequence: Synthetic oligonucleotide
uugauccaagcacauguaa

SEQ ID NO: 1306582 - RNA, 19 nt, Artificial Sequence
  Description of Artificial Sequence: Synthetic oligonucleotide
aguuaauuauaaaucguaa

SEQ ID NO: 1306583 - RNA, 19 nt, Artificial Sequence
  Description of Artificial Sequence: Synthetic oligonucleotide
uaaacuuugccgccuggau

SEQ ID NO: 1306584 - RNA, 19 nt, Artificial Sequence
  Description of Artificial Sequence: Synthetic oligonucleotide
aaauccacacuuggugaag

SEQ ID NO: 1306585 - RNA, 19 nt, Artificial Sequence
  Description of Artificial Sequence: Synthetic oligonucleotide
uucauaagcgguggcugcg

SEQ ID NO: 1306586 - RNA, 19 nt, Artificial Sequence
  Description of Artificial Sequence: Synthetic oligonucleotide
ugacuaccaaauucucugc

SEQ ID NO: 1306587 - RNA, 19 nt, Artificial Sequence
  Description of Artificial Sequence: Synthetic oligonucleotide
acugaacaacuuugauugg

SEQ ID NO: 1306588 - RNA, 19 nt, Artificial Sequence
  Description of Artificial Sequence: Synthetic oligonucleotide
uucggaaggucuuggugcc

SEQ ID NO: 1306589 - RNA, 19 nt, Artificial Sequence
  Description of Artificial Sequence: Synthetic oligonucleotide
auccuacauacuuuguaca

SEQ ID NO: 1306590 - RNA, 19 nt, Artificial Sequence
  Description of Artificial Sequence: Synthetic oligonucleotide
gggauucaccaacagaugc

SEQ ID NO: 1306591 - RNA, 19 nt, Artificial Sequence
  Description of Artificial Sequence: Synthetic oligonucleotide
agcaaguucgcacuuuaau

SEQ ID NO: 1306592 - RNA, 19 nt, Artificial Sequence
  Description of Artificial Sequence: Synthetic oligonucleotide
ucguaauagcuuaacuaua

SEQ ID NO: 1306593 - RNA, 19 nt, Artificial Sequence
  Description of Artificial Sequence: Synthetic oligonucleotide
auacaacguaucucacagg

SEQ ID NO: 1306594 - RNA, 19 nt, Artificial Sequence
  Description of Artificial Sequence: Synthetic oligonucleotide
caguucaguacugggaugc

SEQ ID NO: 1306595 - RNA, 19 nt, Artificial Sequence
  Description of Artificial Sequence: Synthetic oligonucleotide
agcggcgcucacuauuccc

SEQ ID NO: 1306596 - RNA, 19 nt, Artificial Sequence
  Description of Artificial Sequence: Synthetic oligonucleotide
uguaguccgcgcuucagau

SEQ ID NO: 1306597 - RNA, 19 nt, Artificial Sequence
  Description of Artificial Sequence: Synthetic oligonucleotide
ggaauuauacaucguggac

SEQ ID NO: 1306598 - RNA, 19 nt, Artificial Sequence
  Description of Artificial Sequence: Synthetic oligonucleotide
auaagggaauccaauauua

SEQ ID NO: 1306599 - RNA, 19 nt, Artificial Sequence
  Description of Artificial Sequence: Synthetic oligonucleotide
agguauacggccugucuga

SEQ ID NO: 1306600 - RNA, 19 nt, Artificial Sequence
  Description of Artificial Sequence: Synthetic oligonucleotide
aaauaccguaucucugcaa

SEQ ID NO: 1306601 - RNA, 19 nt, Artificial Sequence
  Description of Artificial Sequence: Synthetic oligonucleotide
uauguggaugaauucuuuu

SEQ ID NO: 1306602 - RNA, 19 nt, Artificial Sequence
  Description of Artificial Sequence: Synthetic oligonucleotide
ugccugaaauacaguaugu

SEQ ID NO: 1306603 - RNA, 19 nt, Artificial Sequence
  Description of Artificial Sequence: Synthetic oligonucleotide
aaagucaccuauauauauu

SEQ ID NO: 1306604 - RNA, 19 nt, Artificial Sequence
  Description of Artificial Sequence: Synthetic oligonucleotide
acacgaguaagugucucuc

SEQ ID NO: 1306605 - RNA, 19 nt, Artificial Sequence
  Description of Artificial Sequence: Synthetic oligonucleotide
gucaccuauauauauuuua

SEQ ID NO: 1306606 - RNA, 19 nt, Artificial Sequence
  Description of Artificial Sequence: Synthetic oligonucleotide
aaagcauccuacauacuuu

SEQ ID NO: 1306607 - RNA, 19 nt, Artificial Sequence
  Description of Artificial Sequence: Synthetic oligonucleotide
uagaugugccaccuaugac

SEQ ID NO: 1306608 - RNA, 19 nt, Artificial Sequence
  Description of Artificial Sequence: Synthetic oligonucleotide
caaguauaucuugcaaagc

SEQ ID NO: 1306609 - RNA, 19 nt, Artificial Sequence
  Description of Artificial Sequence: Synthetic oligonucleotide
cucuccauccaguggguag

SEQ ID NO: 1306610 - RNA, 19 nt, Artificial Sequence
  Description of Artificial Sequence: Synthetic oligonucleotide
caguugaguuuccaacucc

SEQ ID NO: 1306611 - RNA, 19 nt, Artificial Sequence
  Description of Artificial Sequence: Synthetic oligonucleotide
uggguuguugagagaacac

SEQ ID NO: 1306612 - RNA, 19 nt, Artificial Sequence
  Description of Artificial Sequence: Synthetic oligonucleotide
cuggauuuguaguccgcgc

SEQ ID NO: 1306613 - RNA, 19 nt, Artificial Sequence
  Description of Artificial Sequence: Synthetic oligonucleotide
cuaugacuaccaaauucuc

SEQ ID NO: 1306614 - RNA, 19 nt, Artificial Sequence
  Description of Artificial Sequence: Synthetic oligonucleotide
aucacuuacaaagcaaguu

SEQ ID NO: 1306615 - RNA, 19 nt, Artificial Sequence
  Description of Artificial Sequence: Synthetic oligonucleotide
gaguuuccaacuccuugug

SEQ ID NO: 1306616 - RNA, 19 nt, Artificial Sequence
  Description of Artificial Sequence: Synthetic oligonucleotide
uaauauccucuaagauacc

SEQ ID NO: 1306617 - RNA, 19 nt, Artificial Sequence
  Description of Artificial Sequence: Synthetic oligonucleotide
cugcaagcaaucugugaag

SEQ ID NO: 1306618 - RNA, 19 nt, Artificial Sequence
  Description of Artificial Sequence: Synthetic oligonucleotide
cagguauacggccugucug

SEQ ID NO: 1306619 - RNA, 19 nt, Artificial Sequence
  Description of Artificial Sequence: Synthetic oligonucleotide
aauacaguauguggaugaa

SEQ ID NO: 1306620 - RNA, 19 nt, Artificial Sequence
  Description of Artificial Sequence: Synthetic oligonucleotide
ccaauauuaaaguggcaac

SEQ ID NO: 1306621 - RNA, 19 nt, Artificial Sequence
  Description of Artificial Sequence: Synthetic oligonucleotide
auauuaaacuuugccgccu

SEQ ID NO: 1306622 - RNA, 19 nt, Artificial Sequence
  Description of Artificial Sequence: Synthetic oligonucleotide
uggagcaaguaagacagau

SEQ ID NO: 1306623 - RNA, 19 nt, Artificial Sequence
  Description of Artificial Sequence: Synthetic oligonucleotide
caucgauauuaaacuuugc

SEQ ID NO: 1306624 - RNA, 19 nt, Artificial Sequence
  Description of Artificial Sequence: Synthetic oligonucleotide
aacguaucucacaggcauc

SEQ ID NO: 1306625 - RNA, 19 nt, Artificial Sequence
  Description of Artificial Sequence: Synthetic oligonucleotide
cagugucaacaguacauug

SEQ ID NO: 1306626 - RNA, 19 nt, Artificial Sequence
  Description of Artificial Sequence: Synthetic oligonucleotide
aacccggcgaucucuggga

SEQ ID NO: 1306627 - RNA, 19 nt, Artificial Sequence
  Description of Artificial Sequence: Synthetic oligonucleotide
cccuauauccacaauccag

SEQ ID NO: 1306628 - RNA, 19 nt, Artificial Sequence
  Description of Artificial Sequence: Synthetic oligonucleotide
caucacugagggaaggcuc

SEQ ID NO: 1306629 - RNA, 19 nt, Artificial Sequence
  Description of Artificial Sequence: Synthetic oligonucleotide
augcuuuguuacauaaaag

SEQ ID NO: 1306630 - RNA, 19 nt, Artificial Sequence
  Description of Artificial Sequence: Synthetic oligonucleotide
ccaucgauauuaaacuuug

SEQ ID NO: 1306631 - RNA, 19 nt, Artificial Sequence
  Description of Artificial Sequence: Synthetic oligonucleotide
gaguaagugucucucugaa

SEQ ID NO: 1306632 - RNA, 19 nt, Artificial Sequence
  Description of Artificial Sequence: Synthetic oligonucleotide
ucgaugacgaccgccgucu

SEQ ID NO: 1306633 - RNA, 19 nt, Artificial Sequence
  Description of Artificial Sequence: Synthetic oligonucleotide
cgacucaauaaccacaacc

SEQ ID NO: 1306634 - RNA, 19 nt, Artificial Sequence
  Description of Artificial Sequence: Synthetic oligonucleotide
gugucuauugggcacugca

SEQ ID NO: 1306635 - RNA, 19 nt, Artificial Sequence
  Description of Artificial Sequence: Synthetic oligonucleotide
ugauugauccaagcacaug

SEQ ID NO: 1306636 - RNA, 19 nt, Artificial Sequence
  Description of Artificial Sequence: Synthetic oligonucleotide
cuuacaaagcaaguucgca

SEQ ID NO: 1306637 - RNA, 19 nt, Artificial Sequence
  Description of Artificial Sequence: Synthetic oligonucleotide
aguucaguacugggaugcc

SEQ ID NO: 1306638 - RNA, 19 nt, Artificial Sequence
  Description of Artificial Sequence: Synthetic oligonucleotide
cucacuauucccaucgaua

SEQ ID NO: 1306639 - RNA, 19 nt, Artificial Sequence
  Description of Artificial Sequence: Synthetic oligonucleotide
gauaccuucuggaacugaa

SEQ ID NO: 1306640 - RNA, 19 nt, Artificial Sequence
  Description of Artificial Sequence: Synthetic oligonucleotide
uuauuucucgguggaaaau

SEQ ID NO: 1306641 - RNA, 19 nt, Artificial Sequence
  Description of Artificial Sequence: Synthetic oligonucleotide
agguggaguaugaauucgg

SEQ ID NO: 1306642 - RNA, 19 nt, Artificial Sequence
  Description of Artificial Sequence: Synthetic oligonucleotide
aguugaguuuccaacuccu

SEQ ID NO: 1306643 - RNA, 19 nt, Artificial Sequence
  Description of Artificial Sequence: Synthetic oligonucleotide
ugggaugccuucauauaua

SEQ ID NO: 1306644 - RNA, 19 nt, Artificial Sequence
  Description of Artificial Sequence: Synthetic oligonucleotide
caaguucgcacuuuaauau

SEQ ID NO: 1306645 - RNA, 19 nt, Artificial Sequence
  Description of Artificial Sequence: Synthetic oligonucleotide
aggacauaauaccgacuca

SEQ ID NO: 1306646 - RNA, 19 nt, Artificial Sequence
  Description of Artificial Sequence: Synthetic oligonucleotide
augacgaccgccgucuucu

SEQ ID NO: 1306647 - RNA, 19 nt, Artificial Sequence
  Description of Artificial Sequence: Synthetic oligonucleotide
cagaauuaaucccaagugu

SEQ ID NO: 1306648 - RNA, 19 nt, Artificial Sequence
  Description of Artificial Sequence: Synthetic oligonucleotide
cuccuaaggggagugcucc

SEQ ID NO: 1306649 - RNA, 19 nt, Artificial Sequence
  Description of Artificial Sequence: Synthetic oligonucleotide
uucgcacuuuaauauccuc

SEQ ID NO: 1306650 - RNA, 19 nt, Artificial Sequence
  Description of Artificial Sequence: Synthetic oligonucleotide
cagguggaguaugaauucg

SEQ ID NO: 1306651 - RNA, 19 nt, Artificial Sequence
  Description of Artificial Sequence: Synthetic oligonucleotide
cuuugaaacggagcggcuc

SEQ ID NO: 1306652 - RNA, 19 nt, Artificial Sequence
  Description of Artificial Sequence: Synthetic oligonucleotide
gcgcucacuauucccaucg

SEQ ID NO: 1306653 - RNA, 19 nt, Artificial Sequence
  Description of Artificial Sequence: Synthetic oligonucleotide
aguacugggaugccuucau

SEQ ID NO: 1306654 - RNA, 19 nt, Artificial Sequence
  Description of Artificial Sequence: Synthetic oligonucleotide
uuuccuccuaaggggagug

SEQ ID NO: 1306655 - RNA, 19 nt, Artificial Sequence
  Description of Artificial Sequence: Synthetic oligonucleotide
agagacaaagugaaaucaa

SEQ ID NO: 1306656 - RNA, 19 nt, Artificial Sequence
  Description of Artificial Sequence: Synthetic oligonucleotide
augaauucggaaggucuug

SEQ ID NO: 1306657 - RNA, 19 nt, Artificial Sequence
  Description of Artificial Sequence: Synthetic oligonucleotide
ggcaacauagaugugccac

SEQ ID NO: 1306658 - RNA, 19 nt, Artificial Sequence
  Description of Artificial Sequence: Synthetic oligonucleotide
caacccggcgaucucuggg

SEQ ID NO: 1306659 - RNA, 19 nt, Artificial Sequence
  Description of Artificial Sequence: Synthetic oligonucleotide
ucuccauccaguggguagu

SEQ ID NO: 1306660 - RNA, 19 nt, Artificial Sequence
  Description of Artificial Sequence: Synthetic oligonucleotide
gacgaccgccgucuucucg

SEQ ID NO: 1306661 - RNA, 19 nt, Artificial Sequence
  Description of Artificial Sequence: Synthetic oligonucleotide
cugcguuuucccaacguca

SEQ ID NO: 1306662 - RNA, 19 nt, Artificial Sequence
  Description of Artificial Sequence: Synthetic oligonucleotide
gucugauuauaauauuccu

SEQ ID NO: 1306663 - RNA, 19 nt, Artificial Sequence
  Description of Artificial Sequence: Synthetic oligonucleotide
auuuguaguccgcgcuuca

SEQ ID NO: 1306664 - RNA, 19 nt, Artificial Sequence
  Description of Artificial Sequence: Synthetic oligonucleotide
cuauugggcacugcauaag

SEQ ID NO: 1306665 - RNA, 19 nt, Artificial Sequence
  Description of Artificial Sequence: Synthetic oligonucleotide
guaugaauucggaaggucu

SEQ ID NO: 1306666 - RNA, 19 nt, Artificial Sequence
  Description of Artificial Sequence: Synthetic oligonucleotide
cauccaguggguagucaac

SEQ ID NO: 1306667 - RNA, 19 nt, Artificial Sequence
  Description of Artificial Sequence: Synthetic oligonucleotide
ucccaucgauauuaaacuu

SEQ ID NO: 1306668 - RNA, 19 nt, Artificial Sequence
  Description of Artificial Sequence: Synthetic oligonucleotide
uuuuccuccuaaggggagu

SEQ ID NO: 1306669 - RNA, 19 nt, Artificial Sequence
  Description of Artificial Sequence: Synthetic oligonucleotide
agagcggcgcucacuauuc

SEQ ID NO: 1306670 - RNA, 19 nt, Artificial Sequence
  Description of Artificial Sequence: Synthetic oligonucleotide
guggaugaauucuuuuaaa

SEQ ID NO: 1306671 - RNA, 19 nt, Artificial Sequence
  Description of Artificial Sequence: Synthetic oligonucleotide
auauuauacugaacaacuu

SEQ ID NO: 1306672 - RNA, 19 nt, Artificial Sequence
  Description of Artificial Sequence: Synthetic oligonucleotide
gauucaccaacagaugccu

SEQ ID NO: 1306673 - RNA, 19 nt, Artificial Sequence
  Description of Artificial Sequence: Synthetic oligonucleotide
ccucuaagauaccuucugg

SEQ ID NO: 1306674 - RNA, 19 nt, Artificial Sequence
  Description of Artificial Sequence: Synthetic oligonucleotide
gucuauugggcacugcaua

SEQ ID NO: 1306675 - RNA, 19 nt, Artificial Sequence
  Description of Artificial Sequence: Synthetic oligonucleotide
ggcagaauuaaucccaagu

SEQ ID NO: 1306676 - RNA, 19 nt, Artificial Sequence
  Description of Artificial Sequence: Synthetic oligonucleotide
cacacuuggugaaggcuuc

SEQ ID NO: 1306677 - RNA, 19 nt, Artificial Sequence
  Description of Artificial Sequence: Synthetic oligonucleotide
auaucuugcaaagcuccaa

SEQ ID NO: 1306678 - RNA, 19 nt, Artificial Sequence
  Description of Artificial Sequence: Synthetic oligonucleotide
gagagaacaccagucaggu

SEQ ID NO: 1306679 - RNA, 19 nt, Artificial Sequence
  Description of Artificial Sequence: Synthetic oligonucleotide
uccaacaguugaguuucca

SEQ ID NO: 1306680 - RNA, 19 nt, Artificial Sequence
  Description of Artificial Sequence: Synthetic oligonucleotide
gcaaguucgcacuuuaaua

SEQ ID NO: 1306681 - RNA, 19 nt, Artificial Sequence
  Description of Artificial Sequence: Synthetic oligonucleotide
acaaagcaaguucgcacuu

SEQ ID NO: 1306682 - RNA, 19 nt, Artificial Sequence
  Description of Artificial Sequence: Synthetic oligonucleotide
gaugugccaccuaugacua

SEQ ID NO: 1306683 - RNA, 19 nt, Artificial Sequence
  Description of Artificial Sequence: Synthetic oligonucleotide
auacuuuguacaguuuauu

SEQ ID NO: 1306684 - RNA, 19 nt, Artificial Sequence
  Description of Artificial Sequence: Synthetic oligonucleotide
cagauggaaccucaaaaua

SEQ ID NO: 1306685 - RNA, 19 nt, Artificial Sequence
  Description of Artificial Sequence: Synthetic oligonucleotide
ccuugugaagagcuuuucc

SEQ ID NO: 1306686 - RNA, 19 nt, Artificial Sequence
  Description of Artificial Sequence: Synthetic oligonucleotide
caaauaccguaucucugca

SEQ ID NO: 1306687 - RNA, 19 nt, Artificial Sequence
  Description of Artificial Sequence: Synthetic oligonucleotide
acaacccggcgaucucugg

SEQ ID NO: 1306688 - RNA, 19 nt, Artificial Sequence
  Description of Artificial Sequence: Synthetic oligonucleotide
auaaaucguaauagcuuaa

SEQ ID NO: 1306689 - RNA, 19 nt, Artificial Sequence
  Description of Artificial Sequence: Synthetic oligonucleotide
guggguuguugagagaaca

SEQ ID NO: 1306690 - RNA, 19 nt, Artificial Sequence
  Description of Artificial Sequence: Synthetic oligonucleotide
gaaauccuggcaacauaga

SEQ ID NO: 1306691 - RNA, 19 nt, Artificial Sequence
  Description of Artificial Sequence: Synthetic oligonucleotide
caacguaucucacaggcau

SEQ ID NO: 1306692 - RNA, 19 nt, Artificial Sequence
  Description of Artificial Sequence: Synthetic oligonucleotide
uccuaaggggagugcuccc

SEQ ID NO: 1306693 - RNA, 19 nt, Artificial Sequence
  Description of Artificial Sequence: Synthetic oligonucleotide
acugcauaagggaauccaa

SEQ ID NO: 1306694 - RNA, 19 nt, Artificial Sequence
  Description of Artificial Sequence: Synthetic oligonucleotide
gaacacgaguaagugucuc

SEQ ID NO: 1306695 - RNA, 19 nt, Artificial Sequence
  Description of Artificial Sequence: Synthetic oligonucleotide
ugaacccaucacugaggga

SEQ ID NO: 1306696 - RNA, 19 nt, Artificial Sequence
  Description of Artificial Sequence: Synthetic oligonucleotide
acuaggaauuauacaucgu

SEQ ID NO: 1306697 - RNA, 19 nt, Artificial Sequence
  Description of Artificial Sequence: Synthetic oligonucleotide
uuggagcaaguaagacaga

SEQ ID NO: 1306698 - RNA, 19 nt, Artificial Sequence
  Description of Artificial Sequence: Synthetic oligonucleotide
caauuagccuuugcaggug

SEQ ID NO: 1306699 - RNA, 19 nt, Artificial Sequence
  Description of Artificial Sequence: Synthetic oligonucleotide
augugccaccuaugacuac

SEQ ID NO: 1306700 - RNA, 19 nt, Artificial Sequence
  Description of Artificial Sequence: Synthetic oligonucleotide
uggcugcguuuucccaacg

SEQ ID NO: 1306701 - RNA, 19 nt, Artificial Sequence
  Description of Artificial Sequence: Synthetic oligonucleotide
uggcaacauagaugugcca

SEQ ID NO: 1306702 - RNA, 19 nt, Artificial Sequence
  Description of Artificial Sequence: Synthetic oligonucleotide
auacaguauguggaugaau

SEQ ID NO: 1306703 - RNA, 19 nt, Artificial Sequence
  Description of Artificial Sequence: Synthetic oligonucleotide
aguggguagucaacauuug

SEQ ID NO: 1306704 - RNA, 19 nt, Artificial Sequence
  Description of Artificial Sequence: Synthetic oligonucleotide
cauaagggaauccaauauu

SEQ ID NO: 1306705 - RNA, 19 nt, Artificial Sequence
  Description of Artificial Sequence: Synthetic oligonucleotide
gaagaaauccuggcaacau

SEQ ID NO: 1306706 - RNA, 19 nt, Artificial Sequence
  Description of Artificial Sequence: Synthetic oligonucleotide
uugaaacggagcggcuccc

SEQ ID NO: 1306707 - RNA, 19 nt, Artificial Sequence
  Description of Artificial Sequence: Synthetic oligonucleotide
ucauaagcgguggcugcgu

SEQ ID NO: 1306708 - RNA, 19 nt, Artificial Sequence
  Description of Artificial Sequence: Synthetic oligonucleotide
cagucagguauacggccug

SEQ ID NO: 1306709 - RNA, 19 nt, Artificial Sequence
  Description of Artificial Sequence: Synthetic oligonucleotide
auauccucuaagauaccuu

SEQ ID NO: 1306710 - RNA, 19 nt, Artificial Sequence
  Description of Artificial Sequence: Synthetic oligonucleotide
ggcucccaaguauaucuug

SEQ ID NO: 1306711 - RNA, 19 nt, Artificial Sequence
  Description of Artificial Sequence: Synthetic oligonucleotide
acaacguaucucacaggca

SEQ ID NO: 1306712 - RNA, 19 nt, Artificial Sequence
  Description of Artificial Sequence: Synthetic oligonucleotide
auuauacaucguggaccag

SEQ ID NO: 1306713 - RNA, 19 nt, Artificial Sequence
  Description of Artificial Sequence: Synthetic oligonucleotide
auaagcgguggcugcguuu

SEQ ID NO: 1306714 - RNA, 19 nt, Artificial Sequence
  Description of Artificial Sequence: Synthetic oligonucleotide
cuuuucauaagcgguggcu

SEQ ID NO: 1306715 - RNA, 19 nt, Artificial Sequence
  Description of Artificial Sequence: Synthetic oligonucleotide
gcucccaaguauaucuugc

SEQ ID NO: 1306716 - RNA, 19 nt, Artificial Sequence
  Description of Artificial Sequence: Synthetic oligonucleotide
agaacacgaguaagugucu

SEQ ID NO: 1306717 - RNA, 19 nt, Artificial Sequence
  Description of Artificial Sequence: Synthetic oligonucleotide
gaaacggagcggcucccaa

SEQ ID NO: 1306718 - RNA, 19 nt, Artificial Sequence
  Description of Artificial Sequence: Synthetic oligonucleotide
ccgaggcccucguagagcg

SEQ ID NO: 1306719 - RNA, 19 nt, Artificial Sequence
  Description of Artificial Sequence: Synthetic oligonucleotide
auugauccaagcacaugua

SEQ ID NO: 1306720 - RNA, 19 nt, Artificial Sequence
  Description of Artificial Sequence: Synthetic oligonucleotide
agcggcucccaaguauauc

SEQ ID NO: 1306721 - RNA, 19 nt, Artificial Sequence
  Description of Artificial Sequence: Synthetic oligonucleotide
gaacaccagucagguauac

SEQ ID NO: 1306722 - RNA, 19 nt, Artificial Sequence
  Description of Artificial Sequence: Synthetic oligonucleotide
gaacaacuuugauuggcuu

SEQ ID NO: 1306723 - RNA, 19 nt, Artificial Sequence
  Description of Artificial Sequence: Synthetic oligonucleotide
gucgaugacgaccgccguc

SEQ ID NO: 1306724 - RNA, 19 nt, Artificial Sequence
  Description of Artificial Sequence: Synthetic oligonucleotide
aagcaaguucgcacuuuaa

SEQ ID NO: 1306725 - RNA, 19 nt, Artificial Sequence
  Description of Artificial Sequence: Synthetic oligonucleotide
guaguccgcgcuucagauc

SEQ ID NO: 1306726 - RNA, 19 nt, Artificial Sequence
  Description of Artificial Sequence: Synthetic oligonucleotide
gcauccuacauacuuugua

SEQ ID NO: 1306727 - RNA, 19 nt, Artificial Sequence
  Description of Artificial Sequence: Synthetic oligonucleotide
guacauuguuccaacaguu

SEQ ID NO: 1306728 - RNA, 19 nt, Artificial Sequence
  Description of Artificial Sequence: Synthetic oligonucleotide
ggccugucugauuauaaua

SEQ ID NO: 1306729 - RNA, 19 nt, Artificial Sequence
  Description of Artificial Sequence: Synthetic oligonucleotide
guaauagcuuaacuauauu

SEQ ID NO: 1306730 - RNA, 19 nt, Artificial Sequence
  Description of Artificial Sequence: Synthetic oligonucleotide
uccuggcaacauagaugug

SEQ ID NO: 1306731 - RNA, 19 nt, Artificial Sequence
  Description of Artificial Sequence: Synthetic oligonucleotide
ugccaccuaugacuaccaa

SEQ ID NO: 1306732 - RNA, 19 nt, Artificial Sequence
  Description of Artificial Sequence: Synthetic oligonucleotide
gaguaugaauucggaaggu

SEQ ID NO: 1306733 - RNA, 19 nt, Artificial Sequence
  Description of Artificial Sequence: Synthetic oligonucleotide
auccaauauuaaaguggca

SEQ ID NO: 1306734 - RNA, 19 nt, Artificial Sequence
  Description of Artificial Sequence: Synthetic oligonucleotide
ucgguggaaaaugcucuuu

SEQ ID NO: 1306735 - RNA, 19 nt, Artificial Sequence
  Description of Artificial Sequence: Synthetic oligonucleotide
cuauucccaucgauauuaa

SEQ ID NO: 1306736 - RNA, 19 nt, Artificial Sequence
  Description of Artificial Sequence: Synthetic oligonucleotide
gguggaguaugaauucgga

SEQ ID NO: 1306737 - RNA, 19 nt, Artificial Sequence
  Description of Artificial Sequence: Synthetic oligonucleotide
agagaacaccagucaggua

SEQ ID NO: 1306738 - RNA, 19 nt, Artificial Sequence
  Description of Artificial Sequence: Synthetic oligonucleotide
gagcggcgcucacuauucc

SEQ ID NO: 1306739 - RNA, 19 nt, Artificial Sequence
  Description of Artificial Sequence: Synthetic oligonucleotide
uccgcgcuucagaucacuu

SEQ ID NO: 1306740 - RNA, 19 nt, Artificial Sequence
  Description of Artificial Sequence: Synthetic oligonucleotide
ccaccuaugacuaccaaau

SEQ ID NO: 1306741 - RNA, 19 nt, Artificial Sequence
  Description of Artificial Sequence: Synthetic oligonucleotide
gccgccuggauuuguaguc

SEQ ID NO: 1306742 - RNA, 19 nt, Artificial Sequence
  Description of Artificial Sequence: Synthetic oligonucleotide
auacaucguggaccaguuu

SEQ ID NO: 1306743 - RNA, 19 nt, Artificial Sequence
  Description of Artificial Sequence: Synthetic oligonucleotide
agucaccuauauauauuuu

SEQ ID NO: 1306744 - RNA, 19 nt, Artificial Sequence
  Description of Artificial Sequence: Synthetic oligonucleotide
gccaccuaugacuaccaaa

SEQ ID NO: 1306745 - RNA, 19 nt, Artificial Sequence
  Description of Artificial Sequence: Synthetic oligonucleotide
caacugagucucugauuga

SEQ ID NO: 1306746 - RNA, 19 nt, Artificial Sequence
  Description of Artificial Sequence: Synthetic oligonucleotide
gcggcucccaaguauaucu

SEQ ID NO: 1306747 - RNA, 19 nt, Artificial Sequence
  Description of Artificial Sequence: Synthetic oligonucleotide
cugcaaauccacacuuggu

SEQ ID NO: 1306748 - RNA, 19 nt, Artificial Sequence
  Description of Artificial Sequence: Synthetic oligonucleotide
uacggccugucugauuaua

SEQ ID NO: 1306749 - RNA, 19 nt, Artificial Sequence
  Description of Artificial Sequence: Synthetic oligonucleotide
gccuucauauauaggcaac

SEQ ID NO: 1306750 - RNA, 19 nt, Artificial Sequence
  Description of Artificial Sequence: Synthetic oligonucleotide
cuucucccaggucgaugac

SEQ ID NO: 1306751 - RNA, 19 nt, Artificial Sequence
  Description of Artificial Sequence: Synthetic oligonucleotide
ccaacuccuugugaagagc

SEQ ID NO: 1306752 - RNA, 19 nt, Artificial Sequence
  Description of Artificial Sequence: Synthetic oligonucleotide
gagagcggcgcucacuauu

SEQ ID NO: 1306753 - RNA, 19 nt, Artificial Sequence
  Description of Artificial Sequence: Synthetic oligonucleotide
cugauugauccaagcacau

SEQ ID NO: 1306754 - RNA, 19 nt, Artificial Sequence
  Description of Artificial Sequence: Synthetic oligonucleotide
ccaacaguugaguuuccaa

SEQ ID NO: 1306755 - RNA, 19 nt, Artificial Sequence
  Description of Artificial Sequence: Synthetic oligonucleotide
ucucuccauccagugggua

SEQ ID NO: 1306756 - RNA, 19 nt, Artificial Sequence
  Description of Artificial Sequence: Synthetic oligonucleotide
ccuaaggggagugcucccc

SEQ ID NO: 1306757 - RNA, 19 nt, Artificial Sequence
  Description of Artificial Sequence: Synthetic oligonucleotide
gcacuuuaauauccucuaa

SEQ ID NO: 1306758 - RNA, 19 nt, Artificial Sequence
  Description of Artificial Sequence: Synthetic oligonucleotide
ccaacagaugccugaaaua

SEQ ID NO: 1306759 - RNA, 19 nt, Artificial Sequence
  Description of Artificial Sequence: Synthetic oligonucleotide
auacggccugucugauuau

SEQ ID NO: 1306760 - RNA, 19 nt, Artificial Sequence
  Description of Artificial Sequence: Synthetic oligonucleotide
cguaauagcuuaacuauau

SEQ ID NO: 1306761 - RNA, 19 nt, Artificial Sequence
  Description of Artificial Sequence: Synthetic oligonucleotide
guucgcacuuuaauauccu

SEQ ID NO: 1306762 - RNA, 19 nt, Artificial Sequence
  Description of Artificial Sequence: Synthetic oligonucleotide
cacgaguaagugucucucu

SEQ ID NO: 1306763 - RNA, 19 nt, Artificial Sequence
  Description of Artificial Sequence: Synthetic oligonucleotide
gccugucugauuauaauau

SEQ ID NO: 1306764 - RNA, 19 nt, Artificial Sequence
  Description of Artificial Sequence: Synthetic oligonucleotide
caagugucaggagagccau

SEQ ID NO: 1306765 - RNA, 19 nt, Artificial Sequence
  Description of Artificial Sequence: Synthetic oligonucleotide
ccggcgaucucugggauuc

SEQ ID NO: 1306766 - RNA, 19 nt, Artificial Sequence
  Description of Artificial Sequence: Synthetic oligonucleotide
ccuccuaaggggagugcuc

SEQ ID NO: 1306767 - RNA, 19 nt, Artificial Sequence
  Description of Artificial Sequence: Synthetic oligonucleotide
cacaacugagucucugauu

SEQ ID NO: 1306768 - RNA, 19 nt, Artificial Sequence
  Description of Artificial Sequence: Synthetic oligonucleotide
acccggcgaucucugggau

SEQ ID NO: 1306769 - RNA, 19 nt, Artificial Sequence
  Description of Artificial Sequence: Synthetic oligonucleotide
gguggguuguugagagaac

SEQ ID NO: 1306770 - RNA, 19 nt, Artificial Sequence
  Description of Artificial Sequence: Synthetic oligonucleotide
gugccaccuaugacuacca

SEQ ID NO: 1306771 - RNA, 19 nt, Artificial Sequence
  Description of Artificial Sequence: Synthetic oligonucleotide
aguccgcgcuucagaucac

SEQ ID NO: 1306772 - RNA, 19 nt, Artificial Sequence
  Description of Artificial Sequence: Synthetic oligonucleotide
ugacgaccgccgucuucuc

SEQ ID NO: 1306773 - RNA, 19 nt, Artificial Sequence
  Description of Artificial Sequence: Synthetic oligonucleotide
ggauuuguaguccgcgcuu

SEQ ID NO: 1306774 - RNA, 19 nt, Artificial Sequence
  Description of Artificial Sequence: Synthetic oligonucleotide
ccgccuggauuuguagucc

SEQ ID NO: 1306775 - RNA, 19 nt, Artificial Sequence
  Description of Artificial Sequence: Synthetic oligonucleotide
ggcgaucucugggauucac

SEQ ID NO: 1306776 - RNA, 19 nt, Artificial Sequence
  Description of Artificial Sequence: Synthetic oligonucleotide
ggcgcucacuauucccauc

SEQ ID NO: 1306777 - RNA, 19 nt, Artificial Sequence
  Description of Artificial Sequence: Synthetic oligonucleotide
cccaucgauauuaaacuuu

SEQ ID NO: 1306778 - RNA, 19 nt, Artificial Sequence
  Description of Artificial Sequence: Synthetic oligonucleotide
acggagcggcucccaagua

SEQ ID NO: 1306779 - RNA, 19 nt, Artificial Sequence
  Description of Artificial Sequence: Synthetic oligonucleotide
gcggcgcucacuauuccca

SEQ ID NO: 1306780 - RNA, 19 nt, Artificial Sequence
  Description of Artificial Sequence: Synthetic oligonucleotide
cuggugucuauugggcacu

SEQ ID NO: 1306781 - RNA, 19 nt, Artificial Sequence
  Description of Artificial Sequence: Synthetic oligonucleotide
gccuggauuuguaguccgc

SEQ ID NO: 1306782 - RNA, 19 nt, Artificial Sequence
  Description of Artificial Sequence: Synthetic oligonucleotide
cccaacgucaaacaucauu

SEQ ID NO: 1306783 - RNA, 19 nt, Artificial Sequence
  Description of Artificial Sequence: Synthetic oligonucleotide
gcucacuauucccaucgau

SEQ ID NO: 1306784 - RNA, 19 nt, Artificial Sequence
  Description of Artificial Sequence: Synthetic oligonucleotide
ccgacucaauaaccacaac

SEQ ID NO: 1306785 - RNA, 19 nt, Artificial Sequence
  Description of Artificial Sequence: Synthetic oligonucleotide
guauacggccugucugauu

SEQ ID NO: 1306786 - RNA, 19 nt, Artificial Sequence
  Description of Artificial Sequence: Synthetic oligonucleotide
cacuauucccaucgauauu

SEQ ID NO: 1306787 - RNA, 19 nt, Artificial Sequence
  Description of Artificial Sequence: Synthetic oligonucleotide
caaagcaaguucgcacuuu

SEQ ID NO: 1306788 - RNA, 19 nt, Artificial Sequence
  Description of Artificial Sequence: Synthetic oligonucleotide
ggcugcguuuucccaacgu

SEQ ID NO: 1306789 - RNA, 19 nt, Artificial Sequence
  Description of Artificial Sequence: Synthetic oligonucleotide
caccaggcuuucccuauau

SEQ ID NO: 1306790 - RNA, 19 nt, Artificial Sequence
  Description of Artificial Sequence: Synthetic oligonucleotide
cauaagcgguggcugcguu

SEQ ID NO: 1306791 - RNA, 19 nt, Artificial Sequence
  Description of Artificial Sequence: Synthetic oligonucleotide
gcgcuucagaucacuuaca

SEQ ID NO: 1306792 - RNA, 19 nt, Artificial Sequence
  Description of Artificial Sequence: Synthetic oligonucleotide
gagcggcucccaaguauau

SEQ ID NO: 1306793 - RNA, 19 nt, Artificial Sequence
  Description of Artificial Sequence: Synthetic oligonucleotide
gguauacggccugucugau

SEQ ID NO: 1306794 - RNA, 19 nt, Artificial Sequence
  Description of Artificial Sequence: Synthetic oligonucleotide
ccgcgcuucagaucacuua

SEQ ID NO: 1306795 - RNA, 19 nt, Artificial Sequence
  Description of Artificial Sequence: Synthetic oligonucleotide
ccuuugaaacggagcggcu

SEQ ID NO: 1306796 - RNA, 19 nt, Artificial Sequence
  Description of Artificial Sequence: Synthetic oligonucleotide
guccgcgcuucagaucacu

SEQ ID NO: 1306797 - RNA, 19 nt, Artificial Sequence
  Description of Artificial Sequence: Synthetic oligonucleotide
cgaccgccgucuucucgcc

SEQ ID NO: 1306798 - RNA, 19 nt, Artificial Sequence
  Description of Artificial Sequence: Synthetic oligonucleotide
cgaggcccucguagagcgg

SEQ ID NO: 1306799 - RNA, 19 nt, Artificial Sequence
  Description of Artificial Sequence: Synthetic oligonucleotide
cgcucacuauucccaucga

SEQ ID NO: 1306800 - RNA, 19 nt, Artificial Sequence
  Description of Artificial Sequence: Synthetic oligonucleotide
cggccugucugauuauaau

SEQ ID NO: 1306801 - RNA, 19 nt, Artificial Sequence
  Description of Artificial Sequence: Synthetic oligonucleotide
cggagcggcucccaaguau

SEQ ID NO: 1306802 - RNA, 19 nt, Artificial Sequence
  Description of Artificial Sequence: Synthetic oligonucleotide
cccggcgaucucugggauu

SEQ ID NO: 1306803 - RNA, 19 nt, Artificial Sequence
  Description of Artificial Sequence: Synthetic oligonucleotide
cggcgcucacuauucccau

SEQ ID NO: 1306804 - RNA, 19 nt, Artificial Sequence
  Description of Artificial Sequence: Synthetic oligonucleotide
cggcgaucucugggauuca

SEQ ID NO: 1306805 - RNA, 19 nt, Artificial Sequence
  Description of Artificial Sequence: Synthetic oligonucleotide
cgaugacgaccgccgucuu

SEQ ID NO: 1306806 - RNA, 19 nt, Artificial Sequence
  Description of Artificial Sequence: Synthetic oligonucleotide
ccgcucccgaggcccucgu

SEQ ID NO: 1306807 - RNA, 19 nt, Artificial Sequence
  Description of Artificial Sequence: Synthetic oligonucleotide
uggugaaucacuuagacga

SEQ ID NO: 1306808 - RNA, 19 nt, Artificial Sequence
  Description of Artificial Sequence: Synthetic oligonucleotide
agaacacuuggucugaugc

SEQ ID NO: 1306809 - RNA, 19 nt, Artificial Sequence
  Description of Artificial Sequence: Synthetic oligonucleotide
uuuuauauacuuaacuuaa

SEQ ID NO: 1306810 - RNA, 19 nt, Artificial Sequence
  Description of Artificial Sequence: Synthetic oligonucleotide
uuuuguuagaaaauguccu

SEQ ID NO: 1306811 - RNA, 19 nt, Artificial Sequence
  Description of Artificial Sequence: Synthetic oligonucleotide
aauguaugcuucaacacac

SEQ ID NO: 1306812 - RNA, 19 nt, Artificial Sequence
  Description of Artificial Sequence: Synthetic oligonucleotide
ucaucuacugggaauaaag

SEQ ID NO: 1306813 - RNA, 19 nt, Artificial Sequence
  Description of Artificial Sequence: Synthetic oligonucleotide
uacuacacugaauuuaagg

SEQ ID NO: 1306814 - RNA, 19 nt, Artificial Sequence
  Description of Artificial Sequence: Synthetic oligonucleotide
uaaucgacaaaguucagug

SEQ ID NO: 1306815 - RNA, 19 nt, Artificial Sequence
  Description of Artificial Sequence: Synthetic oligonucleotide
uaagcuagacaaccaaugg

SEQ ID NO: 1306816 - RNA, 19 nt, Artificial Sequence
  Description of Artificial Sequence: Synthetic oligonucleotide
acucacaaaacuuugcaag

SEQ ID NO: 1306817 - RNA, 19 nt, Artificial Sequence
  Description of Artificial Sequence: Synthetic oligonucleotide
aaucgacaaaguucagugc

SEQ ID NO: 1306818 - RNA, 19 nt, Artificial Sequence
  Description of Artificial Sequence: Synthetic oligonucleotide
agcagcguaaaauguaugc

SEQ ID NO: 1306819 - RNA, 19 nt, Artificial Sequence
  Description of Artificial Sequence: Synthetic oligonucleotide
uaacauauguauuuagaca

SEQ ID NO: 1306820 - RNA, 19 nt, Artificial Sequence
  Description of Artificial Sequence: Synthetic oligonucleotide
uaaauaucaagggauaaca

SEQ ID NO: 1306821 - RNA, 19 nt, Artificial Sequence
  Description of Artificial Sequence: Synthetic oligonucleotide
aauggacugauaugacuac

SEQ ID NO: 1306822 - RNA, 19 nt, Artificial Sequence
  Description of Artificial Sequence: Synthetic oligonucleotide
aaaaguccgaaaauauuac

SEQ ID NO: 1306823 - RNA, 19 nt, Artificial Sequence
  Description of Artificial Sequence: Synthetic oligonucleotide
aacgucagaagacagcaug

SEQ ID NO: 1306824 - RNA, 19 nt, Artificial Sequence
  Description of Artificial Sequence: Synthetic oligonucleotide
aauaucaagggauaacaua

SEQ ID NO: 1306825 - RNA, 19 nt, Artificial Sequence
  Description of Artificial Sequence: Synthetic oligonucleotide
caucagaacuuaauaaucc

SEQ ID NO: 1306826 - RNA, 19 nt, Artificial Sequence
  Description of Artificial Sequence: Synthetic oligonucleotide
acuggugaaucacuuagac

SEQ ID NO: 1306827 - RNA, 19 nt, Artificial Sequence
  Description of Artificial Sequence: Synthetic oligonucleotide
uuucaucagaacuuaauaa

SEQ ID NO: 1306828 - RNA, 19 nt, Artificial Sequence
  Description of Artificial Sequence: Synthetic oligonucleotide
ggaggauacacacacaccg

SEQ ID NO: 1306829 - RNA, 19 nt, Artificial Sequence
  Description of Artificial Sequence: Synthetic oligonucleotide
aaucgaugcgcuuugggga

SEQ ID NO: 1306830 - RNA, 19 nt, Artificial Sequence
  Description of Artificial Sequence: Synthetic oligonucleotide
aauuuaagggcguccgcag

SEQ ID NO: 1306831 - RNA, 19 nt, Artificial Sequence
  Description of Artificial Sequence: Synthetic oligonucleotide
acauuaaacauccaaggau

SEQ ID NO: 1306832 - RNA, 19 nt, Artificial Sequence
  Description of Artificial Sequence: Synthetic oligonucleotide
ucaauagauggaaaacagc

SEQ ID NO: 1306833 - RNA, 19 nt, Artificial Sequence
  Description of Artificial Sequence: Synthetic oligonucleotide
caauagauggaaaacagca

SEQ ID NO: 1306834 - RNA, 19 nt, Artificial Sequence
  Description of Artificial Sequence: Synthetic oligonucleotide
ugaaucacuuagacgaaag

SEQ ID NO: 1306835 - RNA, 19 nt, Artificial Sequence
  Description of Artificial Sequence: Synthetic oligonucleotide
uccgaaaauauuacuacac

SEQ ID NO: 1306836 - RNA, 19 nt, Artificial Sequence
  Description of Artificial Sequence: Synthetic oligonucleotide
uacuauuaaaguuuuguua

SEQ ID NO: 1306837 - RNA, 19 nt, Artificial Sequence
  Description of Artificial Sequence: Synthetic oligonucleotide
uaucggaggauacacacac

SEQ ID NO: 1306838 - RNA, 19 nt, Artificial Sequence
  Description of Artificial Sequence: Synthetic oligonucleotide
acuaguuacuauuaaaguu

SEQ ID NO: 1306839 - RNA, 19 nt, Artificial Sequence
  Description of Artificial Sequence: Synthetic oligonucleotide
ugaguuacaggaagauccg

SEQ ID NO: 1306840 - RNA, 19 nt, Artificial Sequence
  Description of Artificial Sequence: Synthetic oligonucleotide
aaccaauggacugauauga

SEQ ID NO: 1306841 - RNA, 19 nt, Artificial Sequence
  Description of Artificial Sequence: Synthetic oligonucleotide
ugugccuaggacauuaaac

SEQ ID NO: 1306842 - RNA, 19 nt, Artificial Sequence
  Description of Artificial Sequence: Synthetic oligonucleotide
aacuuaauaaucccauaaa

SEQ ID NO: 1306843 - RNA, 19 nt, Artificial Sequence
  Description of Artificial Sequence: Synthetic oligonucleotide
aaaaccggcgaggagucgc

SEQ ID NO: 1306844 - RNA, 19 nt, Artificial Sequence
  Description of Artificial Sequence: Synthetic oligonucleotide
aucacuuagacgaaaguuc

SEQ ID NO: 1306845 - RNA, 19 nt, Artificial Sequence
  Description of Artificial Sequence: Synthetic oligonucleotide
aaacacugcuucccaauuc

SEQ ID NO: 1306846 - RNA, 19 nt, Artificial Sequence
  Description of Artificial Sequence: Synthetic oligonucleotide
cucacaaaacuuugcaagg

SEQ ID NO: 1306847 - RNA, 19 nt, Artificial Sequence
  Description of Artificial Sequence: Synthetic oligonucleotide
uggcuuaucugcauugcgg

SEQ ID NO: 1306848 - RNA, 19 nt, Artificial Sequence
  Description of Artificial Sequence: Synthetic oligonucleotide
aaaguccgaaaauauuacu

SEQ ID NO: 1306849 - RNA, 19 nt, Artificial Sequence
  Description of Artificial Sequence: Synthetic oligonucleotide
acgucguugucacucaggc

SEQ ID NO: 1306850 - RNA, 19 nt, Artificial Sequence
  Description of Artificial Sequence: Synthetic oligonucleotide
uccguugcuacucacaaaa

SEQ ID NO: 1306851 - RNA, 19 nt, Artificial Sequence
  Description of Artificial Sequence: Synthetic oligonucleotide
ucaacacacuuauugauaa

SEQ ID NO: 1306852 - RNA, 19 nt, Artificial Sequence
  Description of Artificial Sequence: Synthetic oligonucleotide
aacgucgugcuguuccgcc

SEQ ID NO: 1306853 - RNA, 19 nt, Artificial Sequence
  Description of Artificial Sequence: Synthetic oligonucleotide
uacuaguuacuauuaaagu

SEQ ID NO: 1306854 - RNA, 19 nt, Artificial Sequence
  Description of Artificial Sequence: Synthetic oligonucleotide
aucgacaaaguucagugcu

SEQ ID NO: 1306855 - RNA, 19 nt, Artificial Sequence
  Description of Artificial Sequence: Synthetic oligonucleotide
gaagagucaaauaggaaac

SEQ ID NO: 1306856 - RNA, 19 nt, Artificial Sequence
  Description of Artificial Sequence: Synthetic oligonucleotide
aagcuagacaaccaaugga

SEQ ID NO: 1306857 - RNA, 19 nt, Artificial Sequence
  Description of Artificial Sequence: Synthetic oligonucleotide
aacacuuggucugaugcag

SEQ ID NO: 1306858 - RNA, 19 nt, Artificial Sequence
  Description of Artificial Sequence: Synthetic oligonucleotide
ugauaugacuaccaguuuu

SEQ ID NO: 1306859 - RNA, 19 nt, Artificial Sequence
  Description of Artificial Sequence: Synthetic oligonucleotide
uaguaaaccgggugguugg

SEQ ID NO: 1306860 - RNA, 19 nt, Artificial Sequence
  Description of Artificial Sequence: Synthetic oligonucleotide
acgaaaguucaucuacugg

SEQ ID NO: 1306861 - RNA, 19 nt, Artificial Sequence
  Description of Artificial Sequence: Synthetic oligonucleotide
ggucugaugcaguugaugg

SEQ ID NO: 1306862 - RNA, 19 nt, Artificial Sequence
  Description of Artificial Sequence: Synthetic oligonucleotide
auaaucaguuuccauuuca

SEQ ID NO: 1306863 - RNA, 19 nt, Artificial Sequence
  Description of Artificial Sequence: Synthetic oligonucleotide
uugucacucaggcugaaac

SEQ ID NO: 1306864 - RNA, 19 nt, Artificial Sequence
  Description of Artificial Sequence: Synthetic oligonucleotide
aguuacaggaagauccggc

SEQ ID NO: 1306865 - RNA, 19 nt, Artificial Sequence
  Description of Artificial Sequence: Synthetic oligonucleotide
aaucacuuagacgaaaguu

SEQ ID NO: 1306866 - RNA, 19 nt, Artificial Sequence
  Description of Artificial Sequence: Synthetic oligonucleotide
uaaguagguaaguucuuca

SEQ ID NO: 1306867 - RNA, 19 nt, Artificial Sequence
  Description of Artificial Sequence: Synthetic oligonucleotide
acugaauuuaagggcgucc

SEQ ID NO: 1306868 - RNA, 19 nt, Artificial Sequence
  Description of Artificial Sequence: Synthetic oligonucleotide
ucggaggauacacacacac

SEQ ID NO: 1306869 - RNA, 19 nt, Artificial Sequence
  Description of Artificial Sequence: Synthetic oligonucleotide
ucucuagaauaacauuuca

SEQ ID NO: 1306870 - RNA, 19 nt, Artificial Sequence
  Description of Artificial Sequence: Synthetic oligonucleotide
ucgcuggugaguuacagga

SEQ ID NO: 1306871 - RNA, 19 nt, Artificial Sequence
  Description of Artificial Sequence: Synthetic oligonucleotide
uagugugccaugaauuaug

SEQ ID NO: 1306872 - RNA, 19 nt, Artificial Sequence
  Description of Artificial Sequence: Synthetic oligonucleotide
cuagacaaccaauggacug

SEQ ID NO: 1306873 - RNA, 19 nt, Artificial Sequence
  Description of Artificial Sequence: Synthetic oligonucleotide
uucuccggguaguaaaccg

SEQ ID NO: 1306874 - RNA, 19 nt, Artificial Sequence
  Description of Artificial Sequence: Synthetic oligonucleotide
uuggguaagcuagacaacc

SEQ ID NO: 1306875 - RNA, 19 nt, Artificial Sequence
  Description of Artificial Sequence: Synthetic oligonucleotide
aauccguugcuacucacaa

SEQ ID NO: 1306876 - RNA, 19 nt, Artificial Sequence
  Description of Artificial Sequence: Synthetic oligonucleotide
augacuaccaguuuucauu

SEQ ID NO: 1306877 - RNA, 19 nt, Artificial Sequence
  Description of Artificial Sequence: Synthetic oligonucleotide
ucuccggguaguaaaccgg

SEQ ID NO: 1306878 - RNA, 19 nt, Artificial Sequence
  Description of Artificial Sequence: Synthetic oligonucleotide
aggacauuaaacauccaag

SEQ ID NO: 1306879 - RNA, 19 nt, Artificial Sequence
  Description of Artificial Sequence: Synthetic oligonucleotide
uuuaagggcguccgcagga

SEQ ID NO: 1306880 - RNA, 19 nt, Artificial Sequence
  Description of Artificial Sequence: Synthetic oligonucleotide
uggacugauaugacuacca

SEQ ID NO: 1306881 - RNA, 19 nt, Artificial Sequence
  Description of Artificial Sequence: Synthetic oligonucleotide
ccuaggacauuaaacaucc

SEQ ID NO: 1306882 - RNA, 19 nt, Artificial Sequence
  Description of Artificial Sequence: Synthetic oligonucleotide
ggaagagucaaauaggaaa

SEQ ID NO: 1306883 - RNA, 19 nt, Artificial Sequence
  Description of Artificial Sequence: Synthetic oligonucleotide
acugauaugacuaccaguu

SEQ ID NO: 1306884 - RNA, 19 nt, Artificial Sequence
  Description of Artificial Sequence: Synthetic oligonucleotide
uucaacacacuuauugaua

SEQ ID NO: 1306885 - RNA, 19 nt, Artificial Sequence
  Description of Artificial Sequence: Synthetic oligonucleotide
ugcuacucacaaaacuuug

SEQ ID NO: 1306886 - RNA, 19 nt, Artificial Sequence
  Description of Artificial Sequence: Synthetic oligonucleotide
uuaaucgacaaaguucagu

SEQ ID NO: 1306887 - RNA, 19 nt, Artificial Sequence
  Description of Artificial Sequence: Synthetic oligonucleotide
gagacucucaauuauuuua

SEQ ID NO: 1306888 - RNA, 19 nt, Artificial Sequence
  Description of Artificial Sequence: Synthetic oligonucleotide
gugccuaggacauuaaaca

SEQ ID NO: 1306889 - RNA, 19 nt, Artificial Sequence
  Description of Artificial Sequence: Synthetic oligonucleotide
cuuggaggcaauccguugc

SEQ ID NO: 1306890 - RNA, 19 nt, Artificial Sequence
  Description of Artificial Sequence: Synthetic oligonucleotide
aaguagguaaguucuucaa

SEQ ID NO: 1306891 - RNA, 19 nt, Artificial Sequence
  Description of Artificial Sequence: Synthetic oligonucleotide
cugaauuuaagggcguccg

SEQ ID NO: 1306892 - RNA, 19 nt, Artificial Sequence
  Description of Artificial Sequence: Synthetic oligonucleotide
guaagcuagacaaccaaug

SEQ ID NO: 1306893 - RNA, 19 nt, Artificial Sequence
  Description of Artificial Sequence: Synthetic oligonucleotide
auuuaagggcguccgcagg

SEQ ID NO: 1306894 - RNA, 19 nt, Artificial Sequence
  Description of Artificial Sequence: Synthetic oligonucleotide
ugaauuuaagggcguccgc

SEQ ID NO: 1306895 - RNA, 19 nt, Artificial Sequence
  Description of Artificial Sequence: Synthetic oligonucleotide
ugcaacgucagaagacagc

SEQ ID NO: 1306896 - RNA, 19 nt, Artificial Sequence
  Description of Artificial Sequence: Synthetic oligonucleotide
acuuucgcuggugaguuac

SEQ ID NO: 1306897 - RNA, 19 nt, Artificial Sequence
  Description of Artificial Sequence: Synthetic oligonucleotide
acucucaauuauuuuaaau

SEQ ID NO: 1306898 - RNA, 19 nt, Artificial Sequence
  Description of Artificial Sequence: Synthetic oligonucleotide
uuuguuauuuccccuccua

SEQ ID NO: 1306899 - RNA, 19 nt, Artificial Sequence
  Description of Artificial Sequence: Synthetic oligonucleotide
aagaacacuuggucugaug

SEQ ID NO: 1306900 - RNA, 19 nt, Artificial Sequence
  Description of Artificial Sequence: Synthetic oligonucleotide
gauaugacuaccaguuuuc

SEQ ID NO: 1306901 - RNA, 19 nt, Artificial Sequence
  Description of Artificial Sequence: Synthetic oligonucleotide
uaggaaacagccucaacuu

SEQ ID NO: 1306902 - RNA, 19 nt, Artificial Sequence
  Description of Artificial Sequence: Synthetic oligonucleotide
ucaguuuacuaaacugaaa

SEQ ID NO: 1306903 - RNA, 19 nt, Artificial Sequence
  Description of Artificial Sequence: Synthetic oligonucleotide
cuuacuaguuacuauuaaa

SEQ ID NO: 1306904 - RNA, 19 nt, Artificial Sequence
  Description of Artificial Sequence: Synthetic oligonucleotide
aggguaucggaggauacac

SEQ ID NO: 1306905 - RNA, 19 nt, Artificial Sequence
  Description of Artificial Sequence: Synthetic oligonucleotide
aaguccgaaaauauuacua

SEQ ID NO: 1306906 - RNA, 19 nt, Artificial Sequence
  Description of Artificial Sequence: Synthetic oligonucleotide
uucgcuggugaguuacagg

SEQ ID NO: 1306907 - RNA, 19 nt, Artificial Sequence
  Description of Artificial Sequence: Synthetic oligonucleotide
aguuauguuggugugacuu

SEQ ID NO: 1306908 - RNA, 19 nt, Artificial Sequence
  Description of Artificial Sequence: Synthetic oligonucleotide
uuacaggaagauccggcac

SEQ ID NO: 1306909 - RNA, 19 nt, Artificial Sequence
  Description of Artificial Sequence: Synthetic oligonucleotide
gacggugcuggagacaccg

SEQ ID NO: 1306910 - RNA, 19 nt, Artificial Sequence
  Description of Artificial Sequence: Synthetic oligonucleotide
uccuucuuaaauguuuacu

SEQ ID NO: 1306911 - RNA, 19 nt, Artificial Sequence
  Description of Artificial Sequence: Synthetic oligonucleotide
aggacggugaaaacacugc

SEQ ID NO: 1306912 - RNA, 19 nt, Artificial Sequence
  Description of Artificial Sequence: Synthetic oligonucleotide
ucggccuggaaaaccggcg

SEQ ID NO: 1306913 - RNA, 19 nt, Artificial Sequence
  Description of Artificial Sequence: Synthetic oligonucleotide
augaaaucgaugcgcuuug

SEQ ID NO: 1306914 - RNA, 19 nt, Artificial Sequence
  Description of Artificial Sequence: Synthetic oligonucleotide
uacucacaaaacuuugcaa

SEQ ID NO: 1306915 - RNA, 19 nt, Artificial Sequence
  Description of Artificial Sequence: Synthetic oligonucleotide
uagacaaccaauggacuga

SEQ ID NO: 1306916 - RNA, 19 nt, Artificial Sequence
  Description of Artificial Sequence: Synthetic oligonucleotide
auuacuacacugaauuuaa

SEQ ID NO: 1306917 - RNA, 19 nt, Artificial Sequence
  Description of Artificial Sequence: Synthetic oligonucleotide
ggauaacauauguauuuag

SEQ ID NO: 1306918 - RNA, 19 nt, Artificial Sequence
  Description of Artificial Sequence: Synthetic oligonucleotide
uuuuguuauuuccccuccu

SEQ ID NO: 1306919 - RNA, 19 nt, Artificial Sequence
  Description of Artificial Sequence: Synthetic oligonucleotide
aaaacuuugcaaggacggu

SEQ ID NO: 1306920 - RNA, 19 nt, Artificial Sequence
  Description of Artificial Sequence: Synthetic oligonucleotide
gaauuuaagggcguccgca

SEQ ID NO: 1306921 - RNA, 19 nt, Artificial Sequence
  Description of Artificial Sequence: Synthetic oligonucleotide
uuguuauuuccccuccuau

SEQ ID NO: 1306922 - RNA, 19 nt, Artificial Sequence
  Description of Artificial Sequence: Synthetic oligonucleotide
aucgaugcgcuuuggggag

SEQ ID NO: 1306923 - RNA, 19 nt, Artificial Sequence
  Description of Artificial Sequence: Synthetic oligonucleotide
ugacuaccaguuuucauua

SEQ ID NO: 1306924 - RNA, 19 nt, Artificial Sequence
  Description of Artificial Sequence: Synthetic oligonucleotide
ggugugacuuacuaguuac

SEQ ID NO: 1306925 - RNA, 19 nt, Artificial Sequence
  Description of Artificial Sequence: Synthetic oligonucleotide
ugucacucaggcugaaacu

SEQ ID NO: 1306926 - RNA, 19 nt, Artificial Sequence
  Description of Artificial Sequence: Synthetic oligonucleotide
gguaucggaggauacacac

SEQ ID NO: 1306927 - RNA, 19 nt, Artificial Sequence
  Description of Artificial Sequence: Synthetic oligonucleotide
gucugaugcaguugauggg

SEQ ID NO: 1306928 - RNA, 19 nt, Artificial Sequence
  Description of Artificial Sequence: Synthetic oligonucleotide
uuagacgaaaguucaucua

SEQ ID NO: 1306929 - RNA, 19 nt, Artificial Sequence
  Description of Artificial Sequence: Synthetic oligonucleotide
caagggauaacauauguau

SEQ ID NO: 1306930 - RNA, 19 nt, Artificial Sequence
  Description of Artificial Sequence: Synthetic oligonucleotide
guuacaggaagauccggca

SEQ ID NO: 1306931 - RNA, 19 nt, Artificial Sequence
  Description of Artificial Sequence: Synthetic oligonucleotide
guuauuuccccuccuaucu

SEQ ID NO: 1306932 - RNA, 19 nt, Artificial Sequence
  Description of Artificial Sequence: Synthetic oligonucleotide
uagacauauuagcagcgua

SEQ ID NO: 1306933 - RNA, 19 nt, Artificial Sequence
  Description of Artificial Sequence: Synthetic oligonucleotide
uaaaccgggugguugggcu

SEQ ID NO: 1306934 - RNA, 19 nt, Artificial Sequence
  Description of Artificial Sequence: Synthetic oligonucleotide
guaguuauguuggugugac

SEQ ID NO: 1306935 - RNA, 19 nt, Artificial Sequence
  Description of Artificial Sequence: Synthetic oligonucleotide
uucuuggguaagcuagaca

SEQ ID NO: 1306936 - RNA, 19 nt, Artificial Sequence
  Description of Artificial Sequence: Synthetic oligonucleotide
aaggauucuuggguaagcu

SEQ ID NO: 1306937 - RNA, 19 nt, Artificial Sequence
  Description of Artificial Sequence: Synthetic oligonucleotide
gauaaucaguuuccauuuc

SEQ ID NO: 1306938 - RNA, 19 nt, Artificial Sequence
  Description of Artificial Sequence: Synthetic oligonucleotide
ugugacuuacuaguuacua

SEQ ID NO: 1306939 - RNA, 19 nt, Artificial Sequence
  Description of Artificial Sequence: Synthetic oligonucleotide
acuuacuaguuacuauuaa

SEQ ID NO: 1306940 - RNA, 19 nt, Artificial Sequence
  Description of Artificial Sequence: Synthetic oligonucleotide
ucaaugguccaagaacacu

SEQ ID NO: 1306941 - RNA, 19 nt, Artificial Sequence
  Description of Artificial Sequence: Synthetic oligonucleotide
guaguaaaccgggugguug

SEQ ID NO: 1306942 - RNA, 19 nt, Artificial Sequence
  Description of Artificial Sequence: Synthetic oligonucleotide
cuacucacaaaacuuugca

SEQ ID NO: 1306943 - RNA, 19 nt, Artificial Sequence
  Description of Artificial Sequence: Synthetic oligonucleotide
uuagacauauuagcagcgu

SEQ ID NO: 1306944 - RNA, 19 nt, Artificial Sequence
  Description of Artificial Sequence: Synthetic oligonucleotide
auucuuggguaagcuagac

SEQ ID NO: 1306945 - RNA, 19 nt, Artificial Sequence
  Description of Artificial Sequence: Synthetic oligonucleotide
accgucucccgguugauca

SEQ ID NO: 1306946 - RNA, 19 nt, Artificial Sequence
  Description of Artificial Sequence: Synthetic oligonucleotide
cuccggguaguaaaccggg

SEQ ID NO: 1306947 - RNA, 19 nt, Artificial Sequence
  Description of Artificial Sequence: Synthetic oligonucleotide
cuguaaguagguaaguucu

SEQ ID NO: 1306948 - RNA, 19 nt, Artificial Sequence
  Description of Artificial Sequence: Synthetic oligonucleotide
uguuagaccuccgcaggcc

SEQ ID NO: 1306949 - RNA, 19 nt, Artificial Sequence
  Description of Artificial Sequence: Synthetic oligonucleotide
ccaggaguggcuuaucugc

SEQ ID NO: 1306950 - RNA, 19 nt, Artificial Sequence
  Description of Artificial Sequence: Synthetic oligonucleotide
uguaaguagguaaguucuu

SEQ ID NO: 1306951 - RNA, 19 nt, Artificial Sequence
  Description of Artificial Sequence: Synthetic oligonucleotide
ugcucuaacuugauucuuu

SEQ ID NO: 1306952 - RNA, 19 nt, Artificial Sequence
  Description of Artificial Sequence: Synthetic oligonucleotide
ugccuaggacauuaaacau

SEQ ID NO: 1306953 - RNA, 19 nt, Artificial Sequence
  Description of Artificial Sequence: Synthetic oligonucleotide
aaaccgggugguugggcug

SEQ ID NO: 1306954 - RNA, 19 nt, Artificial Sequence
  Description of Artificial Sequence: Synthetic oligonucleotide
ggcggauuucuccacgucg

SEQ ID NO: 1306955 - RNA, 19 nt, Artificial Sequence
  Description of Artificial Sequence: Synthetic oligonucleotide
uauguuggugugacuuacu

SEQ ID NO: 1306956 - RNA, 19 nt, Artificial Sequence
  Description of Artificial Sequence: Synthetic oligonucleotide
aagacuggugaaucacuua

SEQ ID NO: 1306957 - RNA, 19 nt, Artificial Sequence
  Description of Artificial Sequence: Synthetic oligonucleotide
ucggugguagugcugacuu

SEQ ID NO: 1306958 - RNA, 19 nt, Artificial Sequence
  Description of Artificial Sequence: Synthetic oligonucleotide
uuucgcuggugaguuacag

SEQ ID NO: 1306959 - RNA, 19 nt, Artificial Sequence
  Description of Artificial Sequence: Synthetic oligonucleotide
aguucaucuacugggaaua

SEQ ID NO: 1306960 - RNA, 19 nt, Artificial Sequence
  Description of Artificial Sequence: Synthetic oligonucleotide
gaacacuuggucugaugca

SEQ ID NO: 1306961 - RNA, 19 nt, Artificial Sequence
  Description of Artificial Sequence: Synthetic oligonucleotide
gaguuacaggaagauccgg

SEQ ID NO: 1306962 - RNA, 19 nt, Artificial Sequence
  Description of Artificial Sequence: Synthetic oligonucleotide
caugaauuauggaauuuua

SEQ ID NO: 1306963 - RNA, 19 nt, Artificial Sequence
  Description of Artificial Sequence: Synthetic oligonucleotide
guuagaccuccgcaggccc

SEQ ID NO: 1306964 - RNA, 19 nt, Artificial Sequence
  Description of Artificial Sequence: Synthetic oligonucleotide
ugaaaucgaugcgcuuugg

SEQ ID NO: 1306965 - RNA, 19 nt, Artificial Sequence
  Description of Artificial Sequence: Synthetic oligonucleotide
cuuagacgaaaguucaucu

SEQ ID NO: 1306966 - RNA, 19 nt, Artificial Sequence
  Description of Artificial Sequence: Synthetic oligonucleotide
ugguagugcugacuuucgc

SEQ ID NO: 1306967 - RNA, 19 nt, Artificial Sequence
  Description of Artificial Sequence: Synthetic oligonucleotide
uuggaggcaauccguugcu

SEQ ID NO: 1306968 - RNA, 19 nt, Artificial Sequence
  Description of Artificial Sequence: Synthetic oligonucleotide
aauuccccgggugggugac

SEQ ID NO: 1306969 - RNA, 19 nt, Artificial Sequence
  Description of Artificial Sequence: Synthetic oligonucleotide
uuagaccuccgcaggcccc

SEQ ID NO: 1306970 - RNA, 19 nt, Artificial Sequence
  Description of Artificial Sequence: Synthetic oligonucleotide
gcuguuagaccuccgcagg

SEQ ID NO: 1306971 - RNA, 19 nt, Artificial Sequence
  Description of Artificial Sequence: Synthetic oligonucleotide
uggaccgucucccgguuga

SEQ ID NO: 1306972 - RNA, 19 nt, Artificial Sequence
  Description of Artificial Sequence: Synthetic oligonucleotide
uggugugacuuacuaguua

SEQ ID NO: 1306973 - RNA, 19 nt, Artificial Sequence
  Description of Artificial Sequence: Synthetic oligonucleotide
guaaguagguaaguucuuc

SEQ ID NO: 1306974 - RNA, 19 nt, Artificial Sequence
  Description of Artificial Sequence: Synthetic oligonucleotide
cugauaaucaguuuccauu

SEQ ID NO: 1306975 - RNA, 19 nt, Artificial Sequence
  Description of Artificial Sequence: Synthetic oligonucleotide
ugcuauaauuucuccuuuu

SEQ ID NO: 1306976 - RNA, 19 nt, Artificial Sequence
  Description of Artificial Sequence: Synthetic oligonucleotide
agacauauuagcagcguaa

SEQ ID NO: 1306977 - RNA, 19 nt, Artificial Sequence
  Description of Artificial Sequence: Synthetic oligonucleotide
cugcugugcaugcggaccg

SEQ ID NO: 1306978 - RNA, 19 nt, Artificial Sequence
  Description of Artificial Sequence: Synthetic oligonucleotide
auuagcagcguaaaaugua

SEQ ID NO: 1306979 - RNA, 19 nt, Artificial Sequence
  Description of Artificial Sequence: Synthetic oligonucleotide
auugcggucugcaccucgc

SEQ ID NO: 1306980 - RNA, 19 nt, Artificial Sequence
  Description of Artificial Sequence: Synthetic oligonucleotide
uuagugugccaugaauuau

SEQ ID NO: 1306981 - RNA, 19 nt, Artificial Sequence
  Description of Artificial Sequence: Synthetic oligonucleotide
ugaugcaguugaugggacu

SEQ ID NO: 1306982 - RNA, 19 nt, Artificial Sequence
  Description of Artificial Sequence: Synthetic oligonucleotide
agacucucaauuauuuuaa

SEQ ID NO: 1306983 - RNA, 19 nt, Artificial Sequence
  Description of Artificial Sequence: Synthetic oligonucleotide
gagacaccggaaugaaauc

SEQ ID NO: 1306984 - RNA, 19 nt, Artificial Sequence
  Description of Artificial Sequence: Synthetic oligonucleotide
aaccgggugguugggcugg

SEQ ID NO: 1306985 - RNA, 19 nt, Artificial Sequence
  Description of Artificial Sequence: Synthetic oligonucleotide
cacgucguugucacucagg

SEQ ID NO: 1306986 - RNA, 19 nt, Artificial Sequence
  Description of Artificial Sequence: Synthetic oligonucleotide
aggcaauccguugcuacuc
